United States Patent Application Publication US 2019/0348154 A1 - sequence listing, part 43

SEQ ID NO: 160078 - DNA, 600 bp, Enterobacter cloacae
atggcgcagttacaactcatcaagcagtcctcagggatcctgatcccggctacgccggagaccagcgatttgctgcaatcaaaaatcaagctcggcgccgtgctggtggccgacttcaaacaggtacgtaatcctgcgtttcatcgccgcttcttcgctctgctgaatctgggcttcgaatactgggagcctaccggcggcgcaatctcctccaacgagcgcaagctggttaccggctacgctaaattcctggcctcctatggcggaaacgaaggcgcactgctcgatgccgctgagcactatcttgagcaggttgcgagccgccgcgtaacaaacgggatcagcctctgtaaatccttcgatgcataccgcgcctgggtgactattcaggccgggcattacgacgctattaaacttccggatggcacacttcagaagcacccacgcagtatttcattcgccaacatggacgagctcgagtttcagcagctctataaagctgcgctcgatgttctttggcgctgggtcctttctcgttcattccgcagtcgcgatgaggccgaaaatgtcgccgcgcagttgcttggctttgcggggtga

SEQ ID NO: 160079 - DNA, 207 bp, Enterobacter cloacae
atgggcatgcaacattcttggttccatcataccgaatgcagcaccgaacaggccgacgaactggttaagcgttacagagcgcgcggcgtgaaggtagagcgcaacctgaactctgattatctcacctggaccgtcagcgcccggctgcctgaaggcaataaaccaccgcgtataaatcgccggtggcaaaaccggatgtgggggtga

SEQ ID NO: 160080 - DNA, 834 bp, Enterobacter cloacae
atgaatcttgaaaataccctcaaatatcacttcgccaaatcgacaatgattagcgactctccgcgtgctactgcgtcagactcattaaccggaacggatattatggccgctatgggcatgacgcaggaacgggccgccatgggttatagcgcttttctcgggaagatggggatcagcaatactgaccggaagagggcgattgagctgttggctcagtacgcgctgactaagtgcgatcgggttgcggcattacggaagcttgatgcagagattaaaccattggtgatgcaccaactggccaccatcgcgttcgaggattattcccgcagcgccgccagcgtgaagcagtgcgatgtctgcaatggggaagggtttgttgacgctgaggttttcagcacgaagtctcacactccggcaaaagagaagaagttcgtgaagatgtccttgctgatgggcgtcgaagatgttcgaccttctgagttcgagattcgcagacaggtcagggagatagcgcgcgttctgtgccctcagtgtaagggcaagaaggtagtaagttgtgcctgtagagattgccatggtcgcggaaaagccattaatcaggttcttactgaaaagcagggggggccggttctggccgactgtaagcgctgcggcggacgtggatatgagcgtatcccatctactgaagcatacgcggctgtttgccgtattaccgatgcgatatctgttgcaacttgggaaaagtccgttaagcggttctacgaccagctgattacaaaattcgacattgaagaagcgtgggcggaggcgcaactcaagcagataacaagatag

SEQ ID NO: 160081 - DNA, 564 bp, Enterobacter cloacae
atgatgattcacacagtacatttcatgactgatgtaaacgttccgtcagtaacgaacctcatggatgcttgtttaaaggccatttctaacccgaaccagccagttacagagttgagaatttatatctcaagcaaaggcggagataccgtagcagggtttactgcctataactttcttaaatctctcggcgtgaaggtaaccacgcataatttaagtaatgtcgaatccattgcaaacgtaatcttcatggctggttctgagcgaatcgcaaatcctttatcaaggttcctgttacacccattgcattggggtttctcagccccacaagcagatcacctgaggttaagggagttcgcggattgtcttgatgatgacttgaagcggtttgttcagatcatgaatattgaaactgctaatgcaaaaacgactacagacacagattgggagagcttgatttcctcagctactattcttgatccgaaaagagccgcagaattgggtatagttactcaaatcagtgctgcgactatacctactgactccattcgatggtgggttctttaa

SEQ ID NO: 160082 - DNA, 216 bp, Enterobacter cloacae
atgtgcattagaatgttaaccatatgcctggcgacgatgttgatcgcgagctgcgggacaactggacccgtaagggttgaggtaatggacaccgcttgcgactgggttaaacccatctacggtacagcgcacgactgggatgtgatggaccaccagacgaagaaagacatcctggcgcataacaaagcatggaaagcaaattgcgggaaaaattga

SEQ ID NO: 160083 - DNA, 1119 bp, Enterobacter cloacae
atgggagagcctttcttcaagcaaaaggacctattccggcgggctggggttgtttgcttcagcagtaactacgaactctatgctgacatgtctaatcgggtgatgacaacgctggaggaaatgagtcctcgcgtcgaaatttacagcatcgacgaagctttttgcgacctgacaggagtttgcaactgccgggagctgacggagtttggcaaagagattcgcgctacagttctgaagcgcacgcaccttaccgttggcgttggcatcgcgcagacgaaaaccctcgctaagctggctaaccatgccgcgaaaaaatggcagcggcagacgggcggcgtggttgatctctcgaatgtcgatcggcaacgtcggttgttggctctggtaccagtagaggacgtgtggggcgtcggcaggcgcatcaccaagaagctcaatgctatgggcatcaaaacagctctggacctctctgaacaaagcacgtggattatccgtaaacactttaacgtagtactcgagcgaacggttcgagagttgcgcggcgagccatgcctagatctggaagagttcgcaccagcaaagcaggaaattgtatgcagcaggtcgttcggcgaacgcgttacttactatgatcagatgcggcaggccatttgctcttatgcagctcgcggtgccgagaagttgcgggcagagcaccagtattgccgctttatctctgcattcgtgaaaacctctccctttgcgcttaacgaaccgtattatggcaacagcgcatcagtgaagcttcttacacccactcaggattcccgcgatatcattaacgctgctgtaaagtgcctggacaaaatctggaaggatgggcaccgataccaaaaagccggcattatgctcggggacttcttcagccagggcgtggcccagctcaacttgttcgacgaaaacacaccgcgggccggaagcgcaaaattgatggaggtgctcgatcatctgaacgctaaagatggaaaaggaacactctactttgccgggcagggcatacagcagcagtggcagatgaagcgagaaatgctgtcgcctcgatatacgacgagatattcagatctgcttagagtccgataa

SEQ ID NO: 160084 - DNA, 2022 bp, Enterobacter cloacae
atgaagatggaaaaaatggctgagtcgataaatgtctatccgggtaaacatacttctgttagagaagaccattttagtcaccaagagagagatataattaatgtgttgtcgaaagaattttacgttacgaacggtggagggataataacactaacatcaaacagtaagtataaatatatacttttacgcccgaccgatatttacatagaaatgtttaacctcgatagagaggtaatagttctctttagcgactatacaaacttccaatcacgtacactggatgcttttgagcaggcagcgaaacaactctcatctttgagagttgataaaacctgttatattttgataagtaaagatctaaacatagaagagaacattagtgaacttatcaaaaaggagcctgaaacagcaaatatagttcccttcacatatgatgaaacgcaaaaagcaaattccgatggttacttttttagaaacagagttcagaaatatttatataatcgagatcttttttcatttgaagcaccgttgaaaagtgattggcttttcttcggaagaaatgagattatattatctactattaatcgcatgaagggggggaataattctggcattttcgggctgcgaaaaactggaaaaacgtcattaattaatgccatatccagaaatcttcaaaaaaatggtgaaattgttacaaccatagactgtcaaagtccatctgttaataaaagaaaatggaacgaggctatctattatgtatgcaagaaaacgaaagacgataactatcttcaatcttatcttccagaagaaattgaatttactgagaagaattctgctgacattttagcgaaattcgtcagagatgttaataatgaaagagggaagaagttatttttgattttcgatgaaattgagaatatttctagaattacatctccaacagaacactggagtaaaggttctgattttctttatttttggcaaacaatgagaacagtttttcagactgtaggtataaatttagcgtatttgattgttggcacaaatccttcatgcatagaaacgcctagaatagatagttctgataatccactgtttaatcatttcacgcctacttatcttccaggttttgacattcgctctacaagagacatgataagaagaatcgggaaaagaatgggggtgaattttgaggaagcaatatatacaaatatcaacgaagaatatggtggtcatccgtttcttattcgtcaagtttgtagcataattgcaagaaggacttttagtcaaaaaaaacctatcagcataggtaagatttcttacagggatgctgtaaaagattttggagaaaatagttttaattacttagaaatgattataggtgtgttaaaagaacactatagtgaggaatatgaacttctcattactctagcaaatgaagataacgaaatttttaaagagaactctagcaaaaaacaaaattcattggcacatcttttgggttacggtattttaggaaaagataacgatagctattactttatcattgattccatgaggcgttatctgttggaaataaacaaatacaggaaagttgaaacaaatatagaacaacggtgggctgaaatatctgaaagacgaaatgcagttgaaaaaaaactaagaacaataataaaaacaactttaaagtcgatgcatggagaacaattagcgaaagatgcagtgcttgacatattgggtaaacaaagaaaatatgaatatatttctaaatctattaatgagatttttgacccaaatttatctacaatttacttcgaagatttaaggaaaataatatccaaagagtgggggtcatttgagaatatatttgaaacctcaaaaaaagaaactttcgagtccctgggctttataaataaatataggtcagatgcccatgctaaagacataacgcctgatgagtttactatattcaggcttagtatagaaaagattgagaatgatatagcgcaatatttttcctaa

SEQ ID NO: 160085 - DNA, 669 bp, Enterobacter cloacae
atgtgtggacgttttgcacaagcccaaactcgtgaagaatacctggcctaccttgccgacgaagccgatcgcgacatcgcatatgacccggaaccaattggacgttacaacgtggcgcccggtaccaaagtgctgctgttaagcgaacgcgacgaacaactgcatctcgatccggttctgtggtcctacgcgcccgggtggtggcataaagcaccgctgataaacgcccgcgttgagactgcggccaccagcagaatgttcaagcctctctggcagcatggccgggcgatctgttttgccgatggatggttcgaatggaaaaaggaaggcgacaagaaacagccctactttatacaccgtgccgacggcctgccaatattcatggcagcgatcggcacgccatttgaacgcggcgatgaagcagaaggttttctgattgtgacgtccgcagctgataaaggcctggtcgatatccacgaccgccgtccacttgttctatcaccgaaagctgcccgcgaatggatgcgccaagacgtaggcggaaaggaagcggaagagatagcagtcgacggtgcagtgcctgccgacaagtttatctggcacgctgtgacgcgtgccgtaggcaatgtgaaaaatcaggggccggagctaatcaaggcggcgcaataa

SEQ ID NO: 160086 - DNA, 426 bp, Enterobacter cloacae
atgattaatattaaagagaacatcgaccacattagagtgtattattatagtaatgagcatcttttcaaaagtgaattaatcaaacttggtagttatgaattctatgataaatacctatgtaatctaacaccaagagaatatcttgatttctcacaacttctaattgatgatataagtgagcgaaaaacgataataccagatgaaacaacctctttaattagttatatgctcggcaaagaaattttaacaaaacaggaagataattcatttgctatatctaaaaatatattctcagaaaactatcaagatctgacaaaaaaattcattacattaaataacatacacactgctaaaagagaaaaaaatataatcgaatccaaaattcataacaaaaaagttctaaacaaaactaaaaagaggctatag

SEQ ID NO: 160087 - DNA, 1311 bp, Enterobacter cloacae
atggaaaacaaatgtgttgaaagtgagcaaatcttttttgctaagatgaataggtatagtttcaaactgtctgataagaaatggcaactggataaagaaaactgcgtataccctcataaagttgtagatagaatgtctacaaaaatgaaacttagctacttaaaaacattggcttactatgcgtctgaatatagttcttcctatattcaaagcattaacaatctattttataagtggtttggtgcgatgactatcgatactattgatgacaaagccatatatcaattgaatgtttatttaggttcagcgagaaactacaagctaaacatagttaaggccttcatcactaaatggaaaaaactcaattaccctggagtagaagcgacagcccttagaatgttggagaaaataaaaatcattccaaaccaaacaggagaggcagttaaaagacgagatccaaataaaggacctttaactgaaacggaactaaattatatccttaactctgttagcaaattttaccttcagaagaaaattcaaccctttttatattgttatatttttctgttggcaataacaggaagaaggccattacaattaatctctctaaaagctaaggatctcattaaaaatgagaaagggtattttttaaatgtaccaaaagtaaaacaaaggaaatcatttagaaatgaatttaacatggtaatgatagaaaagttcttatatgacagcttatcaatgctaattaatgaaaatcaggtgtttgtagaagataaatttagtgttgggattaataactatagaggcgaattgccaatcttcatggatttagacaagattacggaaataaaaagaattgagggttttctatctgatttaacaacagattttttccatatgaaaaattcagtcatgtcaaagctattaaaacgctttccttcaaaattcgatgttagatcagaaaggactaacagctatatagagcttaatgccagaagattcagatatacattagggagtcgactggctaatgaaggagcctcaattgaggtgattgctaaagcgttagatcataaatcagcaaactcttctatgatttatataaaaaataatcctgacagtgtttatgatatcgataagaaactaagtgcattttttaaccccttatctaatatacttatgggcgtagagattgaagaaaacaagaacttttttatcaagtatgttttagattcatttttattattagaagatacgaaagaggaatttaaatgtttatcttgtaaaaaattcaacccctggagaacataa

SEQ ID NO: 160088 - DNA, 1269 bp, Enterobacter cloacae
atgaagggaatgcaaaaaatcaaaagaggaaaaacctttaacgggcttatttcttatttattaaaacctgcttcgcaccacaagtcagatccgtatgtagtcggtggcaatgtaatagaaagcttcgcagaagcgctaagtgcagagttcaacgctacgaagctcctacgcaccgatgtcagtaaacctgtttggcacaattctctgcgtctgcctgctggcgaacagatcaccacagaacaatggaagctgttagccgatgactatatgaagcgtatgggcttctctgagacgcatctacgcgcttatgtcctgcatgatgataaagatggccaacatatccatatagttgcaagtcgcatagatgcgacttcggggaagctctaccttggtaaaaatgagaaccttatcagcactcgtatcatccaggatcttgaaaaagactatcagttaataagaaccaaaggaactgatgccctgaaaccttcaacctcacctgccaaacgtaaaaaatcacgtagtgaagcgatgatggagaaaagggctggtgagctatgcccgaaaactatcatccaaaacgctctggaagtattccttgccgatagaccgtcaaccactgagtttgtgcatcagcttgccgcacaaaacatcagagcaatcccgaacatcgcttctaccggacgcatgaacggcttctcattcgaatacaaagggattgctttcaaagcatctcaattgggaaaagggtattcctggtctgccttgcaaagcagaatcgactaccaacaggaacgtgataatgctttcctgtttaaactgaaatcatctgtcagagaaacatctgttagtgcacctcatgatatggccataactacagatgctcctgaaaccacgaaagaatacgttaaccgccccatagaagcacttatcctcgataaacgagctgctggtcaggacgaatactctatcgcttctgtcgaagcgcttctcccagaagctgttgcaactaacaaagaagcgatagcaaccgaaacgttaaaagtatcgcccaagcgaagctatagggcttcaacgttcagatggttagagaccatcccctatctcaataccatcattaccatcttcaaaaacctcaaaatcccaacccttaaacgccctcaaaaacacaaaaccatcactagcgtgagagtggtagagattacgcctctcccccaaaaaaatctcattgaatcagcacctcaatccagaagagcttcgctttcgatgtaa

SEQ ID NO: 160089 - DNA, 378 bp, Enterobacter cloacae
atgaaagaaactatagcaatacaattctgtaagcagaataacaaagtcccagctaaatcattgcgaacccattgtgtcagtgttcgttttaatcaagatgagctaaagcttctcaacaaaaaacgtggtggtaaaagcaagggagagtggcttcgcttagcttccctggataagcttcctttgtctgttcctgccatcaacatacaagcctggaaatcattagccgaaatatctcagaatctgaataacctaatatgccatcttaatactaaaagcagcggaggtgagcttaccaaaacagaaatcttcgctataaagcgtcagatatcagagcttcgctcatgcctcacagcttctgattttccaagtggtaaatag

SEQ ID NO: 160090 - DNA, 219 bp, Enterobacter cloacae
atgaattactttaaaaaattaaaatcagatgttaattataaaaaaaggttgatagtcaatgtgctatttttagggcttatattttccatactctccatgatttatgtgtttgcagatgctgagaactttttaagttattttttaatagtctcgtttttgagcttccctgcatacctaactctcacttttcctttagcagattttaaaaaaaacgtctaa

SEQ ID NO: 160091 - DNA, 210 bp, Enterobacter cloacae
atgctctttatcgacgacaatgcggctggcagcgttgaacgggctgccaccccatgtatccacgagaaacagcacgcctttgctggtatccagcttctcaagctgagcagtgtatttttcaatcagcgtctcggcattttcaccgggaacgaaatcgatccagccgacgttttcctgctcgcccaacagcatttctgccgttttgagtaa

SEQ ID NO: 160092 - DNA, 576 bp, Enterobacter cloacae
atggacattagatttatcaatatatttatattaataataggatttgtggctctttccatagtgttggcattacttagttacgctttagaatataaagcattactgctatactcattgattttattaataataagctattgcatccttataataacaccttttatttccgcatatcaaaacagaagtaagataaagaaatcattcagattaccattcagttcagcgatcaatcaaaacgtaaaaaaagagtttattatagatcaacgttatcttccgaaactcattgcattagataaaaaagaacttgagctagggttactggagataaaacacgaaagaaatttcctagaaaaaagaattctccttataactggtcctgtagataaactaggtatacttcctggtattatttccgcattagcagccacaacaaaactagccgatccaaatggttggctaatggggatcacctatggatacattgcattagttgttctttctttattcttttatcaaataatgatgcgttatgatagaatgatagcacttaccgaactagtaatttctaaaaaataa

SEQ ID NO: 160093 - DNA, 258 bp, Enterobacter cloacae
atgtataaacgagtagaatctcagaaaacatcaacaaatggaatcacttcttgtgattggcatcgtgctgacatcattgccgagttacgtaagaaagggaccaccctggctggtttatcccgtaacgctggtttaaatgcccgcactctcaataacgctttagaccgtaaataccctaagggtgagcgcattattgcttccgcaataggcgttgaaccgtcggttatctggccttcaagatattgtgaggtgctgtga

SEQ ID NO: 160094 - DNA, 216 bp, Enterobacter cloacae
atgcatagcgtatccggttgtaagttcctggataacggaaaccgccgagtctggtacttccgcgataacagtcaggttgtcgagttgttggcggttccgcttaagttgcgcttcaactattacgacgccaacaaccgtacagtgcgcaataagggtactcaggctgatatgaaaaaggcgattgaatctttcaagaaacttcgggggataaagtga

SEQ ID NO: 160095 - DNA, 198 bp, Enterobacter cloacae
atggctgacaaattgatccgcgttaacgaaaaagtcagcgtcatggccagtaccgtggcatctgtatacatcgcgtcaggttactgctttgtctcaaccgtcgatggtgaacaccatgagatttcattcatgggggattgttaccgcacaagagatagctttgaaaaggcggttaacgatgcgttaaacgggaaataa

SEQ ID NO: 160096 - DNA, 678 bp, Enterobacter cloacae
atgcggcccttaatgccaccggtgcagacgccggataatcttttccatgatggtaatccgctcactggtgagctggggaccatagttgatgctgaacaccttaataatgaacaagctgctatccgcgatacacaaagtgagctgattgccattctaacagcagcggcaatggaaccagaatcggcagcaggccagctgttagctgcgttgaataaactttatgccccacttaacgatactttgggagcgctttccactctggtcgggggggccaataaactcccatatttcaccgcttctaatgctgctgctttaacagcattatccagcattggtcgggacatcatcggtaaagcaacggttgctgacgttctcacataccttggttttgcaggatcgttaacttcacctggttatgcggtcatcccgctaggaacgaaaaagctggttattcagtggggaacagtaacagtaccgactgccgggtcagcctctgcaacgtatccgctggctctggatttgggtctggcacagttctgtacgccgattgatgtttcgtcaataaacaactatcgggtcggtgttgcgacttcaacaaaaacgagtattacccttgcatcgactaacacgcaaagcgttaccggtgttatgtggctatcaattgggacaataaactga

SEQ ID NO: 160097 - DNA, 408 bp, Enterobacter cloacae
atgaataaatacttttactctccgggtacacgtggtttttaccagtctggtatccacagcgtaatacctgatgatgccatcgagattaatgctgatgagtatcatcgactgctggaaggtcagcaaaacagaatggagataacactaggagctgacggcagccccgtacttaccgagccggtgattgattatgttgcacagacacagcaggtgaaaaactcgcttcgcctgactgctgatgcagaaatttcatggcggcaggacgcagttgatgcagggatagccacggcgggagaaaccgccgcgcttgcggagtggaaaaagtaccgggtactgctgatgcgcgttgacacttcaaaggcacccgctatcgagtggcctacgccaccggacgctcaggccatttaa

SEQ ID NO: 160098 - DNA, 426 bp, Enterobacter cloacae
atgaactatgtattctcgccgtccctgaatcagttttatacccctcagcagaaacaatactatgtagatgctggcgcatggcctgatgatattgtggaagtcagtgacgaaatatttaacgagtattcagtgaacccaccggcaggaaaagtgagaggggttatagataaaatgccatcctgggtggatatcccaccgccatcacatgatgagttagtcgacgcggccgaacagaggaagcaggcattgattaatgaggccatgcagtcaatcagcgttatccagttgaagctacaggccggtagaaagctagccacgacagagacggaaaaacttaacagcacgctggactatatcgacgcggtgacgacaatagataccgctaccgcgccagatattaaatggcctgagcgtccggtggcgtag

SEQ ID NO: 160099 - DNA, 231 bp, Enterobacter cloacae
atgggcatgatgacttttgttgttgagtatgaggatggcaaggagccatctgtaggttcgcgaatgcagatctgcggtggcaaggtcgtttcggtggcatggagtgattatcgcgatgaccactttagtgaagatgaaaaggatgtcattgaggatgcaattgttgagcttcctgatagcaaccctctcaaggttgggattcttagccgcctgtcattacttacttcttag

SEQ ID NO: 160100 - DNA, 309 bp, Enterobacter cloacae
atgagcgtgaatcgttatgagtttgaagattacggcaccaatgaagatgacggccgttatgtgacttacgaagactacgccgcacttgaagccaaatgcgcggcgctggctgcggaagtgtacgacctgaaacatcctggaacatacctgccatcgaaacacgaaacgcctgctttagacgctttcctggctgaagtgcgagcgcagggtgtggagatgtttgccattgagtggggagggcatgactctccttacggtcaggacgcatacaattttgcagacaaaattcgcaaaggagtgcagtcatga

SEQ ID NO: 160101 - DNA, 183 bp, Enterobacter cloacae
atgatcggaaattactacgacccaggcattacaccgaatgaactggtagcacgccaccgattcaagccaattgacgatatcccacgcgaagaaatgctgaagcgtgactcattcggtaatgcagaacgtctcaacaacaatcgatacctgacagcgtggttaaaccagagggcgaagaaatga

SEQ ID NO: 160102 - DNA, 348 bp, Enterobacter cloacae
atgaccgtgaccgtgtttactacggccgatttggtcatgtccgtagtgactaaggaaaccatcatgaaactgaacatcgaagttggcagtaaatacgtaatcaccggcactaagtttgaccttgttcttaacgaaaaacgcatcatcaaagaaggcaagaatgccggacaggaaacactggttcgcctgagctactacagcaagtttgaccatcttgtgaaggctctgtgtgagcgtgaaattttggagtcagaagcacaggcgctagcggagctgaaaactcatatcgatgacctgtctatcgaactggcagaaggcgttaacgattttctggagcgtgcgcaatga

SEQ ID NO: 160103 - DNA, 339 bp, Enterobacter cloacae
atgtcacctgatgaaaatggttacttccgtgcgcctaaaaaacttgaatccaaggacgaagttattgcccgggtatgcgctggtcttgagatctattaccagcagaaagagaacggaactctaccaaaggatgaacgcacgtctgagcagattcaggatgcgaaggacgattactggctagagaagctcaccataaaatacgagtcaaggctctggcacgacaacttcatggcctccttctctcctggctgggaaacagtcggacctaaacaaccatcaagatgcaatgaccgtgaccgtgtttactacggccgatttggtcatgtccgtagtgactaa

SEQ ID NO: 160104 - DNA, 264 bp, Enterobacter cloacae
atggataaaccatccgtaggcgataccgttagagtaccgcgatatatgtttggtcgctttgttgagttgctcgagttcaagcttgaggaatttcattactgccttggattttttgaaagtgatgcgcatagggctgcatcaagatttacccctctgtgtgagataattgagcctgcgccagattcaaatctcaattactggagtcacttcggcgagtatcacgataaatatgtacaaacctacgaaatcataaaggccgcctga

SEQ ID NO: 160105 - DNA, 135 bp, Enterobacter cloacae
atgctcaagaaaacaaagcgccagctttaccgtgagggtaaatactcctgcctgcttccacaaggagataccactaaatggtctgtagatcagtggtgcgagtggattgatgagcatggaacgtggtggaagtag

SEQ ID NO: 160106 - DNA, 315 bp, Enterobacter cloacae
atgaaagagtttaagggtactccgggcgaatggaagtacacggttagaaatgtgaatgaaatgatgactacgttccatggcgtgacgattggcgacacgtacattgaagcagcaacaagaaatgaaagagaggatgcaagactgatagcagcagctcctgatttgctcgaagctctgcaaggttatatgtcagctgtaagcgaaatgaatgaagcgatgaaagacggatacaacgtgcagggtgctatgtcagcactaattggctgggaagatatggctcgcgcagccatcagcaaggctctgggggaggagtga

SEQ ID NO: 160107 - DNA, 249 bp, Enterobacter cloacae
atgggtaagcaggtgcagttatcagggaaatgcacattgaagattgacaccatcgttggaagttcaacgataaatattccgaaggtcaatcttgaaggtgaaaacaacgctgatgcgttaattcgaaatgttatccacttcggagttatgcgtcatggcaaggctgctttgcgaaagctgattgaagaaaaactcgctaattatggcgacgaatacgaaaacaaaggccttagttacgacgatgaatag

SEQ ID NO: 160108 - DNA, 708 bp, Enterobacter cloacae
atgttttctaataatgatatgaaagtaggtgaaaagattaggcttctacggaagcaacaaaaatacacattgaacgagctggcgttgcttgtagatagcgacgtaggcaacctgtcacgtcttgagcgcggcgttcagggctatagtgatcagcttctaagaaagattgctaaagcccttgatgttcctgtggctgtactattctcttccgatgagcaagaaaatactgtagattcatacagtgttaattccctcaatcatcgggaggataaggatgtgtatagagttgatgttcttaacgtttctgccagtgcaggtgatggtgcgccatctaaagaccttgttgaagtggttagatcaatcgagtacgacattgaccaagctaaatctatctttggaaacatcccgcagcgttccgttaagctgattaacgttcgtggcgatagcatgcagggaaccattgagcctggcgatctcatttttgttgatatcagggttaactatttcgatggtgacggtatctacgtgttcgatttcaatggcgatacatttgttaagcgtctgcagaaggttaagaacgacctttttgtcatatccgacaacccaaaataccgggaatggtcgatcaaccaggaagaagctgcaatgcttcacgtgtctggccgcgtaatgctgagccaatcacagcaattcagacgacacggctaa

SEQ ID NO: 160109 - DNA, 213 bp, Enterobacter cloacae
atgtgtacaccattaagaaaaatgcgtgtggagaaaggcctgacaatcgctgaagtttcgaagctgacagagattgacgttgggaacctgagccggattgagcgaggtaagcaagtaacctctttagaaacggctgaaaagctctcgaaattcttcgaagggaagatctccgagatgcagattctctacccgcatcgctatatggctgcttaa

SEQ ID NO: 160110 - DNA, 144 bp, Enterobacter cloacae
atggttaagcaacgatttatccaggacgaaatacacaaaaatgtagctcgcgaaaggttcatccgtacgtttagccgagaaggtgctgagaagttgaagcaggcgcttgaactgagcaaacgtaaactggagaaacccgaatga

SEQ ID NO: 160111 - DNA, 846 bp, Enterobacter cloacae
atgagcaacgtcgcatacgcagatttcggggcggtcaaagccccggtggagagaaaagtggcagagctggaagatggctatgccaagctatccaacacgcttcttgatgcctactccggtgctgacctcaccaagcgtcagttcaaagtcctcctggcgattctgagaaagacctatggatggaacaagaccatggacagaatcagtgactctcagttatcggagatcacaaaattaccagtgaagcgctgtaacgaagccaagctggaactggtcagaatggggattatcaagcagcagggcggtatgtttggccccaataaaaatatcaatgaatggtgtatccctcaaaacgagggaatatccctcaaaacaggggataaaacatccctcaatttgagggagtcgtatccctcaaaacagggggacacaaaagacactattcaaaagaaagaaatacaagataaaaacactatgcctgaacaggttcaggcgaagcagaaaaaatcatctgaccagcacgaagaaacggatcaggcttttgagaatattttctggtgtgcaggaatgcataagaccgggaagaaaaacgcgaagtccgcattcagaactcagttcactctttggcggaaagataccaaaggttcggcaggtgagtttgcaagatttctggcagacgatatcaagcttcgccttggtgttcagttcggcttcgataagcttcacccatcaacgtacctcaacggtcagcgctggaacgacgaaaagcctttaaacgccgtacaacaaaccaagcaatcagccatcaccgtatcgaaaactggcttagttttctgggaccggtga

SEQ ID NO: 160112 - DNA, 1881 bp, Enterobacter cloacae
atgacaccaagtgaactgagtgacctgctttggatgcaggtagacaaggttgctccgcacctgttgccgaacggcaagaaagacgggcatgagtgggtagccggaaacgtgcacggcgacaaagggactagcctgaaggttaacctgaacggcaagaagaaatgggcagacttcgcagaaggcgatggcggcgacatgctggacctatggatggcttgccggggaataaatcttcatcaggcgatgcaggaagctaaggcattcatcggaatcagggatgacgatcaccacttcgatgcaaaacgcgaaaagaaattctctcgcccggatcgcaagaaggtctccaaatactgcaacaagtctgagcaccatatcgaataccttaaatcgaggggtatctcagctgagacagcaaaagtatttggggttgtgagtggcaaggtatggaacggtgaaagagagctagacgctctggtatttccgtacaaacgagatggcgagttactccaggtcaaacgaatcagcactgaaagacctaacggaaagaaggtcatcatggctgagggcgattgtgagccttgcctgttcggatggcaggcgctggatagcaaggtgcgttcggttgtgctgtgtgagggtgaaatcgactgcatgagctactcacagtatggcgtaaacgctctttcggtaccgttcggtggtgggaagggtgcgaagcagcaatggattgagtttgagtttcataacctcgaccgcttcgaagaaatctggatttcaatggacaacgacgaagttggacaggaagccgccagagagatagcaagtcgtcttggagagcatcgatgccgcatggttaagctacctcgcaaagatatcaacgagtgcctgatggaagggattgcagaagatgttatctggcagtgtctggaaggtgcttcattcttcgaccccgaggaactctacagcgcgagagagttttatcaggacaccattaacgccttctatggtaagcagcaatacctgttcaatccaccatgggaaacgctggcctataactttcagtttcgcgaggcagagctaactctggtcaacggcgtgaatggacacggcaagactgaagttgtagggcatatgtcactggaagcgatgaggcagggcgttaaaacctgcgttgcttcgcttgagcttaagccgggaatgctacttaagcgccttacccgtcaggccacctgctgcaagatgccgccagtgatggagattgaatcagcattcaacttctacgatgaccggttatggatattcggccttaccggaaccgcaaaggctgaacgcctgattgaaatcttcacttacgcccgccgtcgctacggtatccagttgttcatcatcgacagcctcatgaagtgtgggataggcgatgacgattacaacgggcaaaaggcgtttgtcgatgcgctgtgtgacttcaagaacaagaccaactctcacatcatcctcgtcactcactcacgcaaaggtgacagcgaggaaaagcctaccggaaagatggacgtaaagggctctggagccattactgacctcacagacaacctgtttatcatctggcgaaacaaaggccgtgagagagcgttacagcgcgttcaggcaggagagcaactaagcgagaaagacgaacagcttctggcatcaccggcttccgttctcatgctcgaaaagcagcgtaacggtgaaggatgggaaggtggcgttccgctattccttgatgatcagtcacaccagttcctacaactggacggcgcatcaccttacaactacgtcgcaaacatgccgaagtctgaatatgacgaggtgtggcgacaggagaatgtatcggagttttaa

SEQ ID NO: 160113 - DNA, 462 bp, Enterobacter cloacae
atgaacacacgagacaaaatactcaaccaccttgaaacacacgcccactcatcactcgcagaacttcgaagaattcccaacacaaaccgagacaccgtagccatcactcttaaggagatggttcatgccggtgacgtcgaattctacatcgccaaaaacagggcaaagcgatatcgccttaccggataccctaagcgctttgagccggtagtcgaatatctggagcatcacgaaaaggcattcgcatctgacctggctgaacacacaggattggataagcagcacatggcgaaaatcctcaaggacatgcatgagaagggcgagatataccgcgactggagcgacagaaggaagacatgggtatacagcagaaagcgtgccattaactggggctgcgctaacccactgactgcatttatcaacaaggcattaagcgaggtacgaagtgagcgagccatctga

SEQ ID NO: 160114 - DNA, 198 bp, Enterobacter cloacae
atgagtaaagaaattaagaaaggcgaacgttttcaggctggagaagtttggatgtctccgcgcagttacctgtatctagttaaagaaattgttgggtcgcaggctgttatgagaatgggcacagatggaagtggtcgcaaggtgcgtcgtaatgtcgatgccattaacggctggtcaatttacaagccagaagagtga

SEQ ID NO: 160115 - DNA, 282 bp, Enterobacter cloacae
atggaagtaaaaacatacgcagttaactgcaatgatgcctggcttaacaccaaaggcgatgacatctctgattcctacgttaagtatcgagacttcaaatcgctgcaggaaagattccagaattactgcaagcatgatggtggcatgctattcggtccaaataagacaaataccgtctgtgcaatttgtctttgggatacagaaaattgccagcaccgcagaagcaagcctgatgataattattgcatcgattgcggcgaaaaactgaaggatggcgaatga

SEQ ID NO: 160116 - DNA, 297 bp, Enterobacter cloacae
atgatggagaggaatatggacgaatcaagaaataatatgagagaagaatttgaatcatggttagcgccttcgtggagccgtgacacatatcttgaagacgaaggcgaggtcgaatatgtagatgattgggttcagggtgcctgggttggatggcgcgccagtcgcgcagctatcgagattgagctacctcctacagttgatggaagcaacgtaccatttgcaggcaacgcatggaatgcatatcgaagcgaagcagtgaacaccatccgcgccgctggaatcaaagtgaaggagtga

SEQ ID NO: 160117 - DNA, 186 bp, Enterobacter cloacae
atgagcgcaccagtatttgtcgtaagcatccgcggctttgagggtgaaatggaagcagccgctgcattcacatcctatggcaaagctaaggagtatgtcgagcgtaacggattcacatcatgggcgattgaggaactaacacctgacgaggaatgccatgaaacagacgatatttctcaggagtaa

SEQ ID NO: 160118 - DNA, 126 bp, Enterobacter cloacae
atgaagaagttctgggaaatggcaatgatgacaatcctattttctacgctagcgggtatggggctgacatttggaattgccggggcttatgggtggttgaaattcatcagtcagtttatgaggtag

SEQ ID NO: 160119 - DNA, 228 bp, Enterobacter cloacae
atgagcagcttagacgatgactacgcagaccgacttgctgaccttctcgaagatatggaaggcgacggcgttgatgcagttcagatgatgatgagctggatgtatggattcgttcagggaaggttagaaggccatgaagggcaggcatacatgtaccagttcgaagatgccgacatgattatccagttacaggaaccggaagaaaccacagcagcgaggttgcattga

SEQ ID NO: 160120 - DNA, 282 bp, Enterobacter cloacae
atggcagtataccggagcaataaatggctgcaggcggtcagggagatagattgctgcgttctttgtggtcgttatggagttcaggcagcacatcggaacgaagggaagggaataggactgaaggttgatgactgcttaacggctgcgctatgcgagcagtgccatacgcgcatagacaacggaaaggatatgacccgggaagagcgcagagctgaaatggatagagccattgtactgacgcttaagcaactggcgaacggagggaggttatcggtcagatga

SEQ ID NO: 160121 - DNA, 396 bp, Enterobacter cloacae
atgaatagatatcttttgcaactaccttggccgccatccaataaccggtactggcgacactcacgaggcatccactacatcagtgattggggaaagagataccgaaaagaagtaatcgaaataattcagcaacagcagttagacatcaaaatcacacctcgcatcagaatcaccatccacgcagcacctcccgataaccgcaaacgagatttggacaatctgcccaaagccgtttttgacgcactcaccagtgcgggcttctggctggatgacggtcagatagacgatatgcgtatcaagcgctgtcaggcgattaagggcggaatgcttgtgctggtagttactgagacgtgcgggagcttgccaatgattacagagctactggaggctgcatga

SEQ ID NO: 160122 - DNA, 558 bp, Enterobacter cloacae
atgacggataaatcaaacaccccggcagaaattaaagacctgtggcgaacgccgccagagatattccatgcactgaatgctgagttcaatttcgttctggatgcggctgcaggcgttgataacagtttgtgcagacacttcgtcactgaatatcaggacacactcaaaacaccatggaatgaagtaatgccaaacattcctggttatgtgtggctcaaccccccctacagtaagccaatgccatttgtgcagaaagcggcgcaagaaaatgcagagcactggactggctgcgtgatgttgctaaatgcagattgctcagttggctggttcctggaggcgataaagacggcgcatgaggtcaggtttatcacgggtggccgactggcattcctgagcgcatcaaccggaaagcccgtatcaggcaacaacaaaggtcaaatgttcgttatctggcatccatatccgcgctcaggcgaatgtcgaatgactactgtcgatcgcgatgtgctgatgcaatacggaaaaagattcatgaaggggggcttatgtgcagcgtaa

SEQ ID NO: 160123 - DNA, 825 bp, Enterobacter cloacae
atgagacttgaatcaataggaaggtactttgcgccaaaatcaccaatgttcagcgactcgccgcgtgcaaccgcaacagactctctggacatcagtggagtaatggccgcattaggtttggcagaatcaaaatgcggcatcggtattgagctttacctggcaaagattggcatcagttcaccagataaagccgtcatgggcgtatacgaaatggcaaagcgtctggcaggacgtaccaaggcatttgatggacttcaggaagatactaaacaacgtgtattgcaattgctcgcaactttcgcttttcaggattattcacgtagtgcggctagcgtacggaaatgcgattgctgccacggggaaggattcatagacgccgaagtgttcagcacaaaaacgtacacgccatccagggaaaagcgtttcgtcaaagctgcattgcagatgggagataagacgattcgaccttcagcctatcaggtataccgtgaacagcgagatatcgaaaaggttcagtgtccatcttgcaaagggaagaaggtgctcagcaatgcctgccggtgccacgggaagggtaaggttgttgaccaggaaaagacaaaggaaatgggtggcgttccggtctggaaaacctgcgataaatgctcaggacgcagatatcgcagactgaagttctcgaccgtatttgagggcgttcagacagcatgggatgttaagaaaacctttgcatacgatcaccttcagccattctttgaatcgctggtaactgagtgccacaaagaagaggcgtttgctgatagtgttatctcgaaagtgactatgtga

SEQ ID NO: 160124 - DNA, 159 bp, Enterobacter cloacae
atggataagaatacgaaagagataaagcatattttcatatcagagtatgccatggctcagctaagtgatgatgagcaaaaaagatatctaaaaatactcagtgaaaatgtagttagagcgaacgctaattaccgccttcataaacaggcaaagaattaa

SEQ ID NO: 160125 - DNA, 297 bp, Enterobacter cloacae
atggcaaacggaacagaccttattccggctttgcttctcgcgctcatcatgacggtgcttggttcatgggcaaagtacgaaaccagaccggcagctgaaaaagtcagccttggcagtcatatgatcgtgtcaatctttgccggaacaatgatggctctatatgggctggacaaacagtggtcactttacatcctcggtatggggtgtggtgctgcgggatggcaaggagcagcaatcctcaaaaagttgccatggttcagccaaattgacaatggtgataattatggcaagaactga

SEQ ID NO: 160126 - DNA, 315 bp, Enterobacter cloacae
atggcaagaactgagatcagggtggggcgatacattgtcgacttcgtacctgtcgtattccttatcctaaccgccatcctctgcaatcaattcaacgactcggtaaacagtagccgtgacgctgtgaagcttgccagtgatatgaaccggcaaagaaccgcagcagagatgcgcgcgcataacgcagagcaaaagctggcgaataacacacagagtgcacctggcgtagtgattatctcgccggatggtaaaaccgttcaggctatcgagccaaaaacgagttacagcagcatccagcgtgaagtttccttctga

SEQ ID NO: 160127 - DNA, 630 bp, Enterobacter cloacae
atgacaaaagaccagtttatgcgagctgcaggaatttctcccgcgcttgctgataaatggtacccgcatgtcgtaaaagtcatggatgagttcggcatcaacactcctttgcgcgaagctcacttcatcgctcagattggtaccgaatccaacggctggcgctcagtagttgagtcgctgaattattcggtggcaggtctggcgatatttggcgatcggcttactgcagcacagcgcgaaaagctcggccgtaaacccggggagctagctctttcgccatccagacaggctgatatcgccaatatcgtttatggaggccggtacggcaattcggcaccaggtgatggatggaaatttcgcggacgcggattaaagcaaatcacctttaggttgaattacgaaatgtgcggctacgctctcgaattagacctcgtaaacaatcctgatttattgcttctggaccaaaacgcggctcgttctgccggttggttctggaaggccaataactgcaactcctttgcagacaaaaatgacattgtcggactgacaaaacgtatcaacggcggggcaaacggtctggacgatcggaaggctcgttatagcgtcgctaaaagcgtcctggtgggataa

SEQ ID NO: 160128 - DNA, 216 bp, Enterobacter cloacae
atgaaattcatcgataaccttcctcagctatggaagatgtggtcagtacgcattcttgcggtgctggctgtgattgcaggtatctgggaccaggttcctgatgacgttaaagcaatgattccggcgcaatacctcggctacatcgtggcctttgtttctgtctgcggcatcatcgctcgtgcaattaaacagttcgacaatgaccagtcaaaatga

SEQ ID NO: 160129 - DNA, 543 bp, Enterobacter cloacae
atgaacatctcaacggtgtttcagcctggctggaagtggtgcggaattgcgttgctgtgtggtgccttgcttggcgcgcatgccggttggtgggtgactgataataagtttaccgctgatattgccacgcttaaacagcggcatgccgaagacctgaaagccatcagtgatgaagccagtgctgtgcgtgataaaaacgcagcgctggaacacgcattctcaagcgctgtggccaaaagcgatcagaagcatacgcaggagttaaacaatgcactcgcagaaaacaaagctcttcgtgatgctgttacctctggctctcgccagttgcaattcgccaaagccggtcttgcaacctgtaacctgtcaaaaagtgcagctgcaagcgccagcggcctgggcaatgcagcctccgtcgagctctcagcagaagctggacgaaacatttacgacatccgcgccggaatcatcagcgaccagcaaaaactgaaagcgctgcaggattacatccgagcaggtcaggaagctggcgtaatcgctaagtaa

SEQ ID NO: 160130 - DNA, 660 bp, Enterobacter cloacae
atgagcagccttgatttcctgaacaacattatcaatccatcgagaattgaagtcggagaaaatccggtaaggccatccgactttcacgccagagtgaatgatgaagttgatgaagaattaaactacgaaaatttcgtagttggcaaaaccggacacaagacacactacgccatgctgactatggatcagatgatgctggttggtatgcgcgagtcaaaagcagtaaggcgctctgtgctggcgaagctcaaagtcatgcatgagccacaaattccgcaaactcttcctgaggcattacggcttgcagctgaccttgccgagcagaacgcagcgcttgaaagcaagctagctatagccgcaccaaaagttgaatttgtcgagagctacgttgaagccaagggagcatttggtttccgagaagtggcaaagctacttggcgtcaaagaaacagttctgcgctcgttcctgatagaaaacgaaattgtctattaccttgcaggcaaaatgacggcgcacgcgcaacatcttgacgcagggcgatttgtagttaagaccggggaaaaccacatcaacggcgctgcatacagccagttgaagttcacgccaaaaggtgttgaatggcttgccagtcttatgaatgcatcacgcaaggctgcataa

SEQ ID NO: 160131 - DNA, 669 bp, Enterobacter cloacae
atgactaaatacctgatagccgctctcgtagcggctttgtcgttttcagcgatcgcaagttctacatgcccgggtaaattcctgaatgacaatcctcctccggttaagtacgaccaggagatttgcttcactcagttctcagtgctttacagcgattccctgaaagacccggttgtaagttctcagcacctcacagcagatgacgtgaaaggttctctccagcttaagcgcaaggacgctttccacagcgagccaaaagttcctaagcagtttgagtccacacagaaggactacgcaaagtcaggctacgatatgggccacatgactgcagcaggcgacgcaggaacagctcaggagcagttagaaaccttcagcctggcaaacatgacacctcagctaccagaactcaacagaaaggcctggcgactgatggaagaagccgtgcgcaaacaggtgctggcagaaggtgatgcctgggtggttaccggaatgatacccggcgataagacggtcggaaacggcgtcaacgtgccaagcgttatctggaaggccgtgaaagccaaatcaggcgaggctgtctatgtcggcgataacaccactggcacagtaaccaaaatgacctcagcgcagttcgcgctgaaatacggcatcaagccgtttagcgagtaa

SEQ ID NO: 160132 - DNA, 180 bp, Enterobacter cloacae
atgaatacatacagcatcgaagtcaaaattccaggtcgcgagcgactggagcaaatcgcagagcaggtattagaaaaatactatggcgaaaaaattaccgatgaaaaactcggaaaatggcaaagagagataatggaagcttactccaaagaaatctcacttgtttttgagcctaagtaa

SEQ ID NO: 160133 - DNA, 855 bp, Enterobacter cloacae
atggcctaccgatataacgtaatgctgacaccagaagatggtgaggcgctgatgccaggtgacgctaaccctggttacagtggaatgcatgtcaacgtagtagcctttgacagcaattttgcttctgttgcgatcacaaacagcatggttcgcgtgatggtatctccatccagtaccggtaactcatggacagtctttgactctggcgctaaccgcgctaacttcacccgcatcaaagtggtgaagtctggcttgcctggtaacgtctaccgtgttggtgtcttcttcagttctacagtcgctccaagctcaggcattcctgatggtgcattcgaaggcaagcgctatctctcaatgcaaagcatcaaagagtcagcgattaaaaatggcaacctgtttaccgcgtcaagacgaatcactgcagtagccggtcagtcatatctggatagtgtgatcgtaactggtagtgagcccgtcattctgctaagtcgtgatatcgggtacacaggaacaggcgtagccgcttcgatttaccgtgacgcaacctataccggaacaccggtagcagctgacgtaaacaacccgaatgacatcaacccaaaaacgatgggctttacgctttcatcgggtattacatttgcatcagggattttgaccgttgcgatcgcatatagcgaaggtaaccagagtaaccaggggagcggtagcgctcatgcatcgctcggtgaaatggtcatcatgaagccaaacaccacatacgttctgcgcatccagtcgctcgatgcatcaaacgcaactcaaaacatcaacgcctacatctcaatgattgagggatggcctgatataccactttaa

SEQ ID NO: 160134 - DNA, 501 bp, Enterobacter cloacae
atgacaacaatcgcatgggatgaaacaacattagcttcagacagccagtcatctgctgataatgctgtgtgcacattgcgcgaacaaaagattttctatccagataacgcgccatggtacgtgaacgatgaggtggtgcttgcagtaggtacagcaggtgattgcggtatcgagtcacagctgtttgagttgatggaatgcaacctcacctataaaagcgagttcactgcagaacctgatttcacagcgctcgccattaccggaatcggaagggcttggataatttccaagaacggtggaaacactcacgcatcagtgagcttgcagactgacagctacgccattggctctggaagcatgatcgcaagggcagttatgcattgtggtaagggcgctgaatacgctgtgaaagtcgcaactgaattggacctctatagcggcggtgatattcagacattcactgctgaaacagaaatgaaaaaacggactaaagacgaataa

SEQ ID NO: 160135 - DNA, 1491 bp, Enterobacter cloacae
atgtcacttcaatccgaaatactggagatgctgagtgacaaactccgtcggctaaatacgctttactggatcaccgataagaacggaaaatcagttcgctttcagatgacgcgagagcaactcgaatatttcgaggggatgcatacccgcaacattatcctcaaggctcgccagttaggtttcacgactgaggtttgcatcattcagcttgatgcggccatttttgagtctgccagatgcgctctcattgcccacacgcttaacgacgcaaagcgcctttttcgtgagaaggtaaaatacgcttacgaccggcttccaggcttcataaaacgctgcaatccagccagcaatgactcagccagtgagcttgtatttcagaatggtggctcgctttacatcagcacatcatttcgaggcggcacgcttcgctatttgcatgtttctgagttcgggaagatatgcgctaagcatcctgaaaaggcgcgtgaaatcgttacaggtgcttttgaggccgtctctacagattgctataccacgatagagagcacggcagaggggcgggcggggtacttctatgaatattgccaggcagcagagaaagcgcagttacaggggaaaaagctttcaaatctagactggaagtttttcttcttctcctggtggaagaatccgcaatacgcgattgacccagttgagcctctacctcagcgcctgactgattatttcaatggaatcgagcaaaagcttagcatcgtcatcaacgagcgtcagcgggcctggtattacgccaaagagaagactcttggcgatgatatgaagcgcgaatatccttcgactccggaagaggcattccagcaatctgtcgaaggcgcttattacgccaagcagttccactggctctactcgcaaaaacgtattggtgtcatccccaacaaccctcatctcccggtgcatacgttctgggatatcggtgttggtgactccacggcgatctggttcgttcgtgaagttggtagcgagtttcatgtcatcgactactacgaaaacagcggcgaaggtctgcgtcactacatgaaaatccttaaagaaaagggatacacatacggtgagcactggggaccgcacgatatcgaaaaccgtgagtttggcagtgatgcgaaatcccgcaaggagttagccaaagaaggctacgaaatcgacggtctgcgctacagcatcaaattcaatgttgtgcctcgtgaatcggttgataccggtatagaggctgtgcgtgaaatcctgccgatgtgtgttttcgatgaggccaaatgtgaagaaggcattaatgccctagagggctaccgcaaggaatgggatgagaagcgagggtgctggaaagataagccacttcatgactggacatcgcacggctctgacggtttccgctacttcgctgtggtcaaaaacaataagcggacattcaaaacgaaaatgcgtcatttttctgcataa

SEQ ID NO: 160136 - DNA, 1401 bp, Enterobacter cloacae
atgaccgattctgtaagagtgcgatcagcaaaagtcgaggctattgcagaatgctggcctatgattactgctttgctgggcggcacggaagagatgcgagaggccggggaaacatatctcccgcaatggcctaacgaagacgataacttttacaaacgccgcctggcggtagcaacgttactccctgcattctcccgcactgttgaagttctgagtggaaagccattctcccgacctgttacgtgggctgatgatgtgcctgctcgtatcgttgaactgttcgacgatatcgacatgcagggaacaaaccttcactcattcctggctggcgtgctggaaggggcgatggggttcggaattaacatcgtcctggttgattacccaccgactaatggcgagatgacggttgcgcagacaaaggcatccggtgttcgtccgtactgggtatcaatcggtgcaaacagtctgcttgactggcgctcagagcgtattaacgggcgtgagttgttaacacaccttcgtttcgttgaatgcgtgactgagcaagaccctcaggatgagtttgcggaggtgcgtgttgagcaggtgcgcgtgctggactctggaagatggcgcgtataccgcgagcaaaaggacgaaacaaacggtgaaattaagtgggtgctgcacgatgaaggcactacaaccctgaattacgttcctgccgtaccagtgtacggtaaaaagctcggctttatgtgttcaaagccaccgctgaccgagctcgcttatctcaacgtcgagcactggcagtcaaagagcgatcagcagaccattcttcatgttgcccgtgtgccgattctgttcggtaaaggcttcgatccggacgatgaaatcacggtaggcgcttcgaccgctgtcatctcagagaaagaccaggctgacctcaagtatgtagagcactcagggaaagctatcgagtcgggtagcaaagaccttgagcgccttgaagacctgatgcggcagattggtgctgagcttctcgtcattaagcctggacgaattacagtagcccagacaagagcagaagatgaggccggtacatgcgctctgcaacgcattgtgcaggactttgaggatgcagccgaccagatgcttcaggttaccgctgagtggcttggagagaaggctggcggctctctgactatctacaacgacttcggcgctgcttcactggccgaggccaccgcacaactgctcctcgacgcaaatatcgctgacgtcatctctaacgagacgctgtttagcgaactgcagcggcgagggctggtgaaagaaaacatttcctgggatgaagaggcaaaacgcattgcttcgcagcctcagcgctcagaaagcacgaaaacaaacctcagcgcgtaa

SEQ ID NO: 160137 - DNA, 756 bp, Enterobacter cloacae
atgaaactgaaactcgatgagaacggccacgtagtagtctctgatggcaagcctgtgtacatcaacgatgaaggtaaagagatcgcctttgacgttgcaggtactgtagcaactatttctcgcctgaacggtgaagcaaaatcacaccgcgagcgtgcagaaacagctgagggagcactgaaggcatttgaaggcattcaggaccctaaagcggcattgcaggcactggaaaccatcaaaaatctcgacgctaaaaaactggtggatgccggcgaagtcgacaaagtccgttctgaagccattaaggcgatcgaagagaagtacgcgcctatcgttcaggagcgtgactcacttcaggctgccctagtgaatgaaaaggttggcggcagcttcctgcgttctccgttcattaccgaaaaaatggcaattcctgccgacatggttcaggcacgcttcggtgacgctttcaaactcgaaggtgaccaggtagtggcgtatgacaagcaaggcaacaagcttttcagtcgcagcaacccgggcgaagtggctggatttgacgaagcgctggaaatcctcatcgatagctacccatacaaagaccacatccttaagggctcgaatgcttctggctcaggcgcgaaaggcggtcagggtagcggcaataaccaaacctcaatttcacgtgcgcaatttgaagcgctaccgcctgccaagcagatggagcaaatcaaaggcggcgtaaccattaccgattaa

SEQ ID NO: 160138 - DNA, 1125 bp, Enterobacter cloacae
atggctaacaccctgaccagccttgtccccgacctgtacgaatcactggacatcgtatcccgtgaactggcaggttttatcccgtccgtcaccctggacgccaccgctgagcgtgctgctctgaaccaggcaatccgtatcccaatcacgccagcagcgccagctgaggacgtgagccctggtcagttgccaccagatgatggtgatcagaccgttggtaacactccgttcaccatcaccaaatcccgtatggttccgttccgctggactggtgaagaacagaaaggtgtaaataccggtcctggctatgcgaacatccgccgcgaccagatcacccaggcaatgcgtaccctggtaaacgaaatcgaagttgacgtaggcaagactgcctatctggcttctcgtgctaccggtaccgctggcaccacgccatttgcatcaaacctcggtgacaccgcgcaggtgcgtaaaatcctgtccgataacggtgctccactgagcgatctgcagtgcgttatcgacaccaccgccggtgcaaacatccgtactctggctcagttaaccaaagcgaacgaagccggtactaccgcgctgcgtgctcagggtactctgctggaactgcacggctttgttctgcgtgaatctgctggcgttgcccgtcataccgctggtactggcgcaagctatgtaaccaacggcgcactggcaatcggcgctactgtcattccggtacaaaccggcaccggcaccatcatcgctggagacgttgtcaccatcggcaactacaagtatgtggttacctctgcactgtctggcggtaacgtcaccatcggcgcacctggcctgcgcgaagcggttgcaggtggctctaccgtgactctggctgcggcttacaccgctaacttcgcattcagccgctccgccatcgtacttgcaacccgtgcgccagctctgccggaagaaggcgatatggccgatgaccgcatgatgattcaggacccacgcactggcatggcgttcgaagtctccatgtacaaacagtaccgtcgcgttcgttacgaaatcgctgcggcatggggtgtgcagaacatcaaacctgctcacaccgcgctgctgttaggctaa

SEQ ID NO: 160139 - DNA, 321 bp, Enterobacter cloacae
atggctggattgactaaagagcagcgtgcagagcgtgaggctcaaaagcaggctgagttgcagcagcaagaaggcgttgcagtcgcagaagatctagagcatgcagaggcggctgatgatgtagttgaagatatcgcaggccaggacgagagctcacctgaagctcagcaagatgatgctgatgagcaacctcaggaaaatgtgattgcatatgtaactatggttcgcgaccctgacaaatatgatgcccctcacaccgcacaggttcaccctgatgaagtggtgaattactactctggcggctgggtagaagacaaataa

SEQ ID NO: 160140 - DNA, 396 bp, Enterobacter cloacae
atgctgactgaccagcagaagacggacgtacgacgttacgccggatatccaatgattggcagcactccaacagatgccagtcgtgactttgcttatggttgggtgtctcctggtgtatgggagacgctttacagccgccttaacagcatgagcgcttcggaagaaaacgtgctcatcacagtttacctcgaaaagctgtctgtgctggaaacagccattacggatgccagtgacaacctggacactgatatcgcggcaatctggacgcacaacaaaaacgaggtatcagatcggatgaacctctttaacaagtggcgtcgccagatgtgctcatttatcggtattccgccgggcccatggttaggtaagggtggctgccaggtcgtcagggggtga

SEQ ID NO: 160141 - DNA, 645 bp, Enterobacter cloacae
atggatggtgagaaaatccagctcaagatgtacaaagggtacgcaaaggcggctcgtgtagttggaaccacttatcagcgataccgtccaacatcggcatccaatcctcttgatgtcggtaacgcactaacaccgctcaaaatgacgcttaacgcctgtgacatgaagtacagcaagccgaacgtttacggtaaggcgacatggtacgggattttcgacggcacgcaagggcaggttggtgattactttgttggcatcgatggaacgctgttcgtagctgctatgcagcaactgttaccaatcctgatggtgagctgtaatcgcacaatcacgatttcccgcccgtctatggacaccggacctggtgagcttggctatggtggcgacacggcagaagcagaggttccgctgatgaccaactggccttgttcaatgcttcagggaagcaagggcgaaaagaacgaagttggattacctgctgatgcaaagaacccatggtttaacgtgctgcttccattcgttgacaacgtctacctgcgcactgctgacatcatcaccgacgaaataggcgggcgatacaagctgacatctgctgagcagacagaccttggctggcgactgacagcgcaacaagtgaggccgtga

SEQ ID NO: 160142 - DNA, 822 bp, Enterobacter cloacae
atggctgacgtatacggcattcaaaacactctggtgtcgattattgccgggattatgtacccgaatggcacatcaaacccatcagtaaccggatttgcagcttacatctatgctggatggcctcagccagaacgcctggagcgcgatttgaaggctgggaagtgccacataagcgtttacccgctgacgaccgaaaaaaagctaacggagtctctaggcagaccgtggcgacggttatctaaaggcgtttcaggtattaccgctacggtgaacgggcagcaaatcacgctggctggtacggtaacaatcccgacaaacatcaacctttactgcaataagcaacatcacacctatgcagtgcagtcaggcgatacgcttgcaaccatagcaacggctcttgcggtgcagatatcaggggcttcgagcgcaggtgctgttatcacgcttccggcaacggctgcatttgagatacgaatcggatcagaagacgtagtaggccgcattcttcgccgtcaggaaaaggactttcaggttacggtatgggcagggtctcctgctgttcgtgctgccgcagctcttgctgtagacaatggtctttccgcactaacgtcactgaacatgccagacggatcgccgacattgctcaggtataagcgctcaatgccaagtgattcggctcagtcatacctcgtttaccgtcacgatatgattttctgcgctgatttcagctcgcttcagaccgcaaccgcaacccagattgtcgctccgacgatgaacgtcagcgatatgtcaggaaacctcatcaaaaccattccggagtaa

SEQ ID NO: 160143 - DNA, 174 bp, Enterobacter cloacae
atggccgataatgccaaagctaccgcatcagcctacctcggttatgagctggttgtgcgtcatgcattcatggattacaagattggtgatcgcatctcggacgcagccaaaatccaggagattttagctggagaactggcctgctatgtctacaaggcagcaaaagcagagtaa

SEQ ID NO: 160144 - DNA, 1560 bp, Enterobacter cloacae
atgcccgtttatcaagtaggtagcttgaacactaccgcgctgtctgctgctgacctctacgttggcatccaggcaccaataacacgctacatcaacggcgtgccaagcgatggcctgggtattgtcggcattgcctcatggggtccggtaaactctccggttctcattggctccgacacagaccaggctatctacttcggcgctcagcaggtgcgtaaatacgacctttgcaccgctatcgcgatttctctgcaaattggcgcaactaacctgcgctgcgttcgcgtaactgacggcactgaccttgcagctgcgattgcactgaaagacactgctggcacgcctgtgactggcatgacgctgacggcgaaatataccggcacaaaaggcaacaccatcactgcgcagatcgctactggtacagcagtaaacagctacaagctgactgtgtacttccctggacagactcctgaggtgttcgacaacatcactggctccggcgcaaccctgtggacaaaccttgtcaacgcggtaaacaacggtattactgctgtgcgcggtgcaagccagtatgttctggcaactatcggtacatcgactgcggttcctgatacgaccaccgtatggacgctgactggcgggactgacggcaacacaaccatcactgatgcggtgcttgtcggtactgatggtacaagcacaacccgcaaagggatgtactcgctgcgtggctctggcgtgcaggttcttaacctggtggatgttaccgattcaactcagtggcctactatcaatacctactgcctgtctgaaggggtatttggtatcgcccaggcagctgcaggcgttacttactcttcccttgcaaccactctgaactcatcaggtgtcgattcctggcaaatgaaggtgctggttggcgactggatttactggaatgacacacttaacggcctgagttctcgcatgtgcgcaccggcaacatttgttgctgctaaatatgctgcccagtcaccgcatatctccgcgctcaacaaggctatcaccaacgtcgtagcgacacagcgtcagctcgctaaccagccgtacagcatcagcgaaatcggcgcgctgagcaacgcacgactggatgtaatcaccaacccatgccctggcggtaactacttcggccttcgctcaggtcgaaacgctgcatcatcttcaacccagaacgatgatacctacacccgcatgaccaactacctgtctgcgacgcttgcagcatcgtttggttacgttgtaggtgagccgcaaactaccgacctgcgccgctcaactaagtccacgattgagtcattcctgcaatcactggtggatgccggaatgattggcgacccgaacggcggtcctgcattcagcgtcaagctcgatgccagcaacaacccaagcaaccgcgtcgctctgggctacatggttgcagacgtacaggttaaatacctggcaactacgcgcttcttcctgattaacctggaaggtggcgcaagcgtaacagtgtccgtttcaagcaacgccaccctgtaa

SEQ ID NO: 160145 - DNA, 432 bp, Enterobacter cloacae
atgcctcttaacggctacacagtaggtcgcgacgtccagattgacatcaacactgcttacggggttgttacgattcctgttgttatttctttcgacgcaaagccgaaagtaaaccaaatcgacgtcacaaaaatcaccggcgaaaccgatacgctcatgatccccaaaaactgggagggcacgattgaagccgagcgacaggactcaacgcttgattcttggtgggctcagtgggaatcagactatttcgctggcatcaaccgcgctgcaggcaccatcacagaaaccattaccgaatctgatggcgggacatctgtttatcgctatacgggcgtccagtttaactttactgacccaggcaaaaagcagggcgatcagactgttcgtcagaccttcacattcacttctaaacgccgtttacaggtagcataa

SEQ ID NO: 160146 - DNA, 387 bp, Enterobacter cloacae
atgccgaaaattaccgtaaaagaacaatcagcacctcagcctgcggcttctcaggaggagaaaactgttctgaccgattcaaaaggccgccacatcacccttcgcgagctggacccgctggaagaatcacgcatcttcatcgcggttggtgctgctaacgctgctaaccacacctacatgagcggctatgccttccctgctgccatggttgaatcaattgacgatattgattaccaaatcccggtaaatcaggcgcaaattgatggcaggctaaagcatcttggccgtgaaggtatgcttgcaatccgcgagtacatgattgacgccatgaaaaatgcagggcttggtgctagcgaagatgatgtggagcaggccgcaaaaaactga

SEQ ID NO: 160147 - DNA, 165 bp, Enterobacter cloacae
atggtgttccacctggcggatggggtcctggcggaggtggaaatggtggcggcagcgcgcctggtaatgggcgcactgggggggggggaagtcgtcaatatggtatggagaatctcgccatcgcatatggcggatttcatttcatgcaaagcgctgttgatgtag

SEQ ID NO: 160148 - DNA, 1695 bp, Enterobacter cloacae
atgcaaagcgctgttgatgtaggtgctgaataccagacgttacttgctcgcttctcggcttatggaatgggcgatgcagcagtaaaagaggctgataaattcgcgcaggccaccaaagtaatgggtgcatcaaaaaatgacatgctgcgcttctttgttgaggcgcaaggtgtgttccgcgaatcaggcgagctttccattgaagatcagctgaaaggcgctcggcttgctgccccaatgatggcgaaaatgcagtttgctatggcgtcgatggacccggcagctaaccacatgacgcatgccaaagaaatggatatgctgcgttttgtcgagcaggcaggaggtctgaatagcccggctaagttcaattccatcatgaacaacgcctataaggcggttcagtcatctggcggtaacattgatttcagccagctccgccagttcatggcgcgcgcaggcacttcagcatataacctcagcgatacggccctttatgccaagcttgagcccatcatcggtgagatgaagggtggtgctgcaggtgatgcgttgatgactgcgtacaaccggttaacagggacacttaaacttcctaatcaggtggtaaagcaacttgaagatatgggggtctgggataaaaacaaaatcatccataacagcatgggtgggattaaatccattataggcggccctggttcgcaattaacagaccttaagctgctagcaagtgatcctgtagagttctacgagaaggtaatcaggccaaaatatgcggcaaaaggtctctccgaggaacagattcagctacaaaataacgtaattttcggtcgtcagggtggcaagatgttcaacctgatcgagaagcagatgcacgttattgaactggctgcaaaggcctttgaaaagcaaatgggcatagaggatgccagcaagcagacggcagggacatacacaggtaaaaaggtagattttgatgccaaatggaaggatttccagcttgctcttgcacaggatggcggtctgcttgacaccttcacgaagggacttacaggcctgacgacgttcttgcagaagttaactgaattcagtaatgcaaatcctcgcattacagggacggtaacgactctgttagaaatggttaccgtgatggcaaccctgaagggcggactgtggctcgttaaacatgccgtatcagccttgtttagccctcttgagctaatcacggggacaaaaggcctgcctttgcttacgtcatcacttggcgggctatatggcatcgtggccaggcttgttccgcttcttggcctgtttattccaaccaataatacgccaaccaccacggaagaactgaagacgattcagagcaagggggctgaaaactggagcaaatcaaatccagggaagccttttgttggcacgtggcaaactcaggtaatggaatggatggacaagcatcccagtgagccattgtcaaactacaaaggatcacagggaggaacagcgtaccctgagccagcaaaatcgtcacagactatccaggtaaactcatctgtataccttgacagaaacaaggttggagatgctgttactcaacacatcatcaagcaggggtcaagagcgcctacaggcccatccggtgtggactcgtcaatgaaccttatccatgcaggaatgggcagccttgttccgcgctaa

SEQ ID NO: 160149 - DNA, 1038 bp, Enterobacter cloacae
atggctatttttggacaactgtcttcgcttgctggcgtggcgcaggggtttgacctatccgcaacaaggttaattctgtccggcacgtcaggaacctttgagttcctggacttcgagataccggaaaggatagtgataccaggtcgtcaaaaggtcgctattcaccagatgattggcggaaagcggctaattgacgtgcttggtgttgaatacgatccgattacctggactggagtttttaccggctcaacaactaagtcgcgcgtctcgcttttaatggcgatgcgtgactcaggtcagaagttaacactgacgcttgataattactcgtttgacgtagtcatcacagactttaacccgacatacgaatttgcttaccggcagccgtactcaatttcgctggctgttattcaacgcaatgataacccactgtcagtagactcgcttacaggtgcgttaaatgcgctgataaatagcgatatagggcaggctgtagggctgtcagatattatcaacatccagacagtaaccgatgcagttagcaccgttcagagcgcagtacaggccgtttcagactttgctacggcaaccgtggatacagtgcaaaccgtggtaagaccgataattgctgcccagcagatcatccagaccaatatatcatcgctggaaaactcgcttaacacgattaccacgcttggcgggattgttcctgggttcccgatttcaaaaaccgtgaacaatcttctaactcaagctgacggtatgacgcgcattccagcgctttacaacctgtctaatgtgcttgggcgtgtcgataaaaatgtcagaaccggacaaacggctaacggggttaaaaccattacgctttccggcggtaatctctaccagattgcttccgaccagtatggtgatgctaccttgtgggaaagcctggcgacggttaacggaattgacgatccacaactcaccggcattaactcgattcaggttccgacaacgccatcaacgcaggcatcaaaagcttcctatccggggtaa

SEQ ID NO: 160150 - DNA, 1119 bp, Enterobacter cloacae
atggatgtgaacaaccctattatcgcgcctgacgtgaggcatgtgtctggccgctgttatctgaatggggtatcagttccattcaaatcgtacgatgtgaccagcaacgggttccgtggtgccagcacctacagcgtcgagcttgtcatatctgcgctgccacctgatatgcagttagattggtgggcgaaaaccactactgtgacggtggagctttgggcagacattacctctgccgctggagtggactctaagagcctgattaagggtaatgttgatacgtgggactatgaccccgcgcggtttagcatctcatgtgagggtcgcgatttcgcggcccttttcattgatgccaagacagctggggaaacattcaaaaactatacatccagccagatagcggaaatcctggctaagcggcaggggcttaaggtaagcgccactgcgacctctcagcgatttggtgaattctatcagattgactctgcgcaccttactggtgagcaaactgagtgggacttgctgacaacgcttgcagctcttgagaattactctgtttgggttgatggcgatacgcttaatttccaccctgaggcgagccagatgtctggtgacagttatgtcatcaggtatcaaccgcctggaacgataaacctatatccgcaggctaacgtctctgaggatctcagattctcccgcgcactgaccatctcaaaaggcgttaccgttgaggttatgtcgtggaactcaaagaccaagaacaaacagttcactgcctactacccaaagacggcgaaaaacctgtcgcctggcgcatcaacaccaaaaacacaggtctaccgcatcatccgtaacgggttaaacccggaacaagcccaggcaatggcagagaagatatacagagacgtggttcttcatgagcttaagttttcctgctcaacagccggtgacaatctgctaacgccacgcacgctggtcaggatagaaggcacgcagtcgctttacgatcagaattactggtgtgattcagtgcgtcggcgcatagactgggatagcggctatacgatgtatatcaccggcaagaatcactctccggctctggagatagcaacagaatga

SEQ ID NO: 160151 - DNA, 627 bp, Enterobacter cloacae
atgaaccagctaaataaccttattgcgatgagggctcagcaggcttttgctggattttctggcacgaggcagggggtaattacagcctatgacccgaaagagtatgcgattaaggcatcgctgcagcctacaggtgaagaaacgggttggattcctcttggcactccatgggctggtaatggctggggatttgcagctgggccgatgataggcgcagaggttcagattgactttgactctggaacgatcggcgtagggatggcgggcggccaattctacaacaacgaagacaggagcccgggcccgccttctggtgagctctggatagtccatcagtcaggttcgatgctgaagttcctaaacagtggggcagtagtgatacaggacaaggcaggtaccgtattttccctgaatggtaatgggacatccactcatactgcgtcaaatggcatgactatcaatgcaaatatgcagaacaacggaaacttccagtcagccggcagcattgctgatatgaatggcctgcacgggactatgaacacaatccgagtcacctacaacggccacaatcaccacgagaacggagctggaaataatactaaccagccaaaccagcaaatcagctaa

SEQ ID NO: 160152 - DNA, 366 bp, Enterobacter cloacae
atgttcgacattttccactatgtgggcacggatttatccgcatcgccctgcggcgaccttttgtctgttactggcacagagaggcgaaagcaacggattttgcgtcggttgatcaccaatcctggagagcttgtttttcaccctgaatatggggcggggctcggtaagaaaatcggtgagcacgttaacgtctctgaatggaaagccctgattctaggacagatgaagctagaggactgcgtggcaaggataccggagcctgtagtgacgttaaaaacgatagataacggcgtaaacgtagatgtcagatacaacgactcagtctcgggaactgctgaattccttaatttcgatattacgaggtaa

SEQ ID NO: 160153 - DNA, 1125 bp, Enterobacter cloacae
gtggcgctaaatattaagtcgttctccgacattgtaacgcagcaggttacagccattcaggctaaaagcactcaactgctggattttgctatcggcagcatcttgcgagctattgttgagtcgaatagcggggttatcctttggctgcagcggttaattgtaaatctgttggtaattaccagagcctccacatgttccggagcagatctggattcgtggtttgctgacttcggtttctatcgtgagccagctgtttccgccacgggcaatgtaacattctctcgtttcacagcgacaaatgctgcacttatacccaccggttcgcaagtgcaaaccactgacggaacgcaatcatttctggttgtggctgatacatctaacccggcatatgactcaacgcaatctggctatgtagcccctgcgcttacagcatcagtaaccgtaccagtatctgcagtaacagctggaacggcaggaaatgcttccgcaaataccgtaacggtaattgtgggggctatccccggcatagacacggtaacaaacgctagttctttttcaaacggtgcagatgccgaatctgacgatgcagcaagaacgcgatttcagctgtgggtggcatctttatcaaaagccactaagtctgccatagaatatgcgatatcaagtgttcagcaaggcgtctcatatcaggttgttgagaatcagagctatgccggggcaacgcaatacggatatttctatgccgtggttgacgatggctctggtagtccaacaagcgcctttcttgatactgtttacacagcgatagatgcagtcaggggatttacaatctcatttggtgtatttgcacccgttgtggtcaccgcaaatgtatctatgacaatttcaacatccccatcagccgtgcatggtgacatcacagccctggtaaatgccgcgatatcaaattacatcgccacgctgacgcttgggcaatctctgccagtgacgaagcttgcatcacttgcttacggggcaagcccatacgttaccaacgtaaccaatataacaatcaacggacttaatgctgatttaaccgctaccgtgaagcaggttattcgcgccggtaccatcgttattagttaa

SEQ ID NO: 160154 - DNA, 660 bp, Enterobacter cloacae
atggcaactggtgaccaggatgatttcgtaagaaggctgaaatcagtattgcccgtacagtggattaacgattcaaaccccatacttgatgctgtcttaaatggtctggcatccgcactttcatgggtctatcaactgtacgcttatgctgttttgcagaccaggatactcactgctacagatggatggcttgatattatcgccaacgattttttcggcgaaaggataaaacgccaggctgggcaaactgatgaagattttctcaatatcataaggattaatttattcagggaaaggggaacaaggcaggcgattattaaggttcttgaggatttgactgggcatacccctaaaataatcgaaccatcaaggccacaggattgcggaggctacagcatgccatgcgtggggtatggtgtagccggtgcttatggttccatgtcaatgccatatcaggctttcgtaatagcgtatcgtccaactggtgccggaattccttatgtcggcgggtacacatcaacggtttcagggtacaacacgccatctcgaggtaagtacgcatcttactcagagctaaccagcgtcactgatgcgcaaatttacgctgcagtagcctctgtgaagatggaaggaaccgccgtgtgggttcgtatcgaataa

SEQ ID NO: 160155 - DNA, 1404 bp, Enterobacter cloacae
atgaaccgtcagattgtatatcctggagcaattccactcgaaacagatctgcttaataccaacaaatattcaatgctggggctggcaaagcttgcgtcttctttaatgggcgggaatacatacgttcacggtcttgcatgcacaccatcaagcccggcatcaatggtggtaaacgttgctgcaggacagatttacagccttcagaatattgatggcaccgcttattcctcactcccagctgatactacgcacagcattttgaagcagggatatgtgcttgatgcgcagcaatttaccctgacagcaccttcaacatctggctatagcattaactaccttattcaggcgacgtatgctgatgttgatggcggatcaactgtattgccttattacaatgcagccaacccgtctgttgcctggagcggaccaaacaacagcggtacagctcaatataccgtgcggcagggtgtttgcaccgtatcgctcaaagctggcgtagccgcaacgaccggaactcaggttacaccatcacctgattcgggttgcattggcttgtatgtaatcaccgtggctcagggcgcaaccacagttacggctggaaatatttccacttatgcgaacgcgccgttccttccacagggtggtattgttgacggtattcagcgtagtacgatgatttatgccgctgataccggagtggcaaatgcctatgtggttaatatcaacccaggcattctcacgctttcagacgggatggtagtaaacttcaaagcagccaatgcgaacacagcatcaagtacgcttaacgtctgtgcgctcggcgctttccctgtacttaataaattcgggcagacactgatcgccggagaaatcgcatctggtagtcatgtaacggttaaatggtctgcatccgcatcatcatggcttatccttgacagcaccatcgcgattcctaccgctccaacggcctcaactgcaacgaataatactcagattgccagtacagcatttgttcaggcggtaatcacagcgctggcacttggcactgcatcgcaaagaaatgtaggtactggtgccagtcaaattcctgacatgtcctcgtttgtgtttaacttggggggtagtggggctgcatataactggctacctggtggcaaccttattcaaatggggagggcaactacgagtacaactggacagcagtttgtaaacatcccaatcacttatccacatgcgaatttcaacgttgtggctatcgcaatggatcaggcgattcctaacattatctcagcagctggaacagctgcctcacagattgctattaacgcatggggagctaacagctctggaaacttagggcaacgagtttctacgccaatattttggatgacatttgggaactaa

SEQ ID NO: 160156 - DNA, 162 bp, Enterobacter cloacae
atgccagataataatgcctcacagaccaacgaaattcagcaagcagaagaatcaactgtggttagattctgtcctatctgtggaacgcaaatgtatcagggaatgcgctacggtttcctgtgctggatttgcccggaatgtgactttgacgagccggtttga

SEQ ID NO: 160157 - DNA, 390 bp, Enterobacter cloacae
atgggatttccatcgccagcagcagactacgttgaagaacgcatatcactcgacaagcgcatcataaccaggccggcagcaacgtatttcatgcgagccggtgcgacgcattaccgggaaggtatcatcagtggggcgcttctcgttgtcgacgcatcactgagccagtgtgacggatctctgctggtttgcactgatgaaggagagttcaggataaagcgatacaggacgcacccgcaaccgcatctggagaatctggagaatggcaagaaggaactattgaggcaaaaggatgagatggccgactctgaccggccagtgttcggggtgatcacctacatcatcaacgatgcgcgttctggtgagtttgatgattgtccggtgatgtga

SEQ ID NO: 160158 - DNA, 1038 bp, Enterobacter cloacae
atgaagtatgtgaatctgggtcgtagcggtttgcaagtctcccgcctttgtctcggttgtatgagctatggtgaacctgaacgtttgcctcaaccctggtccctggatgaaaaggcgtcacgtccgctcattcgacaggcgcttgaagcaggcattaatttttttgataccgcgaatatctactcgggcggaagttctgaagagatcacaggaaaagcgctgagagaaatggccagacgcgatgagatcgttgtggcgacaaagaccttctttccgtggcgcaactcacccaataccgggtttctttcccgcaaggccatttttcagtctattgacgatagcctgatgcgcttaggtatggattatgtggatctctttcagattcaccgctttgaccactctacgcctgttgaagagaccatggaggctctgcatgacctcgttaaatcaggaaaagtacgttacatcggcgcatcatctatggaagcctggcgctttgcaaaaatgcagcatactgcagagcgtaacggctggactcgatttatcacgatgcaaccgcaatacaacctgctttaccgggaagaagagcgcgagatgctgcccctgtgtgaagaccagggcgttggagtgatcccctggagtccgatggcgcgcggcaggcttacgcgcgactggagtgtcacgtcccgacgaacgcaaaacgatgcctttgcattaaaaatgtacgagaacgcagcccttctggataagcccgttattgatgttgttgccagcattgctgaaaagcaccatgtgccaagagcccatgttgcacttgcctggttgctatcaaaaacggtcatcacagccccgatcattggcgcgaccaaaccagaacatctttccacggctatcagcgcactggactttacacttagcgatgctgaaatcacggaactcgaggcactctatctgccgcaccccgtcgacgggatcattcccccgcttcctgatacgcccccttcactcacgccgccttcagcaatacagaaccgttaa

SEQ ID NO: 160159 - DNA, 600 bp, Enterobacter cloacae
atggccaacgggggatttctggatgcaacgcgctggatggataaggttccgccgttcgccagtcagcgctcagtatggcattttcatccgcttgagtttctggaaatattacgaagtgcagagtttcccaagactcctgttaatggggaattaacgcctatagaatttattaatttctataatgaagacagaattgatgatactgattatgaagaggctgcaaaagagttgggatgcgaagttgcagcaattaaagctgtagcaaaaacagaaacaggttcttatggctcttattttaagtttgaagataacgatgattatgttcctgcgatattatttgaaagacatcactttcataaatatacaaatgggaaatatgatcatttcgaagatatatcaaactctgttgcgggtggatatggcgcaaaatcagtacagtatacaaaactagtcaaagcgtatgccttagacaaaaaagctgctttgaaatcagcatcctggggtaagtttcagattttggcgtcgaacttcgccacggcaggctacgccagccctgaggatttcgttttggcattaagtaagtctgaaaaaatcaattaa

SEQ ID NO: 160160 - DNA, 678 bp, Enterobacter cloacae
gtgtttcagggggctacatcaaaagcccatatcgagttgctgagcctcgatgagcatgtcccggatgtggtggcaaacgtaaaggggattaaaacgggtaaacagttcattaagctgaagctaaaacgcccactgtaccttagatgcggggagggcgaggaaagtacctttgagcagatgagcgccattacccgtgccgatgccggaaaaattatccctcgtgatgccacgtacccgtttacggataaaaccggaatcacatactttcagatccgcccgcatacgtggatacacgaggacgatgtggaacagctaagccagcataatttagcagggctaaactttcactgtattgaggctgaacacacaaccgattttacccgcacgctggatgaacgatggctgattgacgccctgaaaagcatcagttcgtactttgacggtgaaaaaggacctcagttcgcgcaggcaaaaatgttttatgacagcctgattcacaacgctgaaaccagaagatcgcctagcccgtatcccgataaatcacatgaccagtatttgtttcgtgcactgcataccaaccaaatgaatatccctgaatatgcgcggcgactgatagtgaaacacgacagtgactggcacagtacgcgcgatgatacacgctggtcatcggtattttag

SEQ ID NO: 160161 - DNA, 612 bp, Enterobacter cloacae
gtggaattggagaaggttcttaaattttcggttgaggatggaaaattgctgaccgacgatgaagttattgaagtatataaattgattgaggttaacattgaacatgttcgcttctcacataatgatttctttatttatctttcggatcgctacctagatctatcgatcgcaatggatgaaaaggatagggaaaaagaaaaaagtcgtaaaagtgttatcagaaattccttggtaattctggtcgtgatggttgcaatttatggtagtgccaagctagttagctatataacaaaacccagcgaactggatatacaacagtctcaggcctatgcttctttacgtattgatgccattaaccgcaagcaacaggcgttgcagtttttaaagagtgcgccagatgtatcgacagaagatctctctttgattacgtctacgattacgaattctgggattagttttggggattcttttgttcttcaatgccaagagtatggagaaaaggttgcaataaacacattggctttatctccgaatttatcgagcgaaacaattaaagcattacagcaagccgttgatgcacaatgtgagttgtataatcttgataaacagtaa

SEQ ID NO: 160162 - DNA, 528 bp, Enterobacter cloacae
atgtcaggcaggcattggggggggcgcatgaagcgtagacactggataagcatcgaaacacacaaaaagttctatagggctcgcagcgagtttgcggactggacggatagggagtggaaacacccggtttcctgcttttttttgcaggtctggggattcttgatgtttgtttttcttgggctggcctcgctgcttttgggcgttggttcacataaaaatgccttcccggaattatatccgaacgatgaaaagcgcagaccaattcgctttaagtattctttgactttatttgtcagggagaagggatggattttgtctggcatgttcgcgattttgttcgtctcagttgctgacgtattcaacccattctttttaacttcgccccttatttactacgtaatcaatggcgcagcactattcgttggatggtggatcggggtatttgtttgtatgagactgtttagctggatgagagaacgcaccatttggctatcagaatggcagcgtagataccctgacgacaagtag

SEQ ID NO: 160163 - DNA, 891 bp, Enterobacter cloacae
atgaaaattttactgataggtaaaaatggtcaagttggctgggagttacaacgttcactttctacgattggtaacgttattgcgattgattacttaaccgaaaatttgtgcggtgatttaagagatttagaaggtatagccagaactattcatgtgtgtaagccggatatagttgttaatgctgccgcatatacagcggttgataaagctgaaacaaactatgatttgtgtgaagtaattaatgctcaagctgtcaaagtcttagcgaaagaaacatcagccattggtgcgctgctggttcattattctactgattatgtttttgatggaagaggcgaacattttcgttttgaagacgatgctacagctcctttaagtgcgtatgggagaactaagctatccggggaagaagctattagatcatataattcacgacatcttatttttcgaactagttgggtttatgctgctaggggaaataattttctcaagacaatgttaaaattaggttgtgaaaaggaaaaattatccgttatcaatgatcagcacggggcgccgactagcgcggaacttttagctgattgtactgcgattgcaattcgcaaagttattgaaaatcctaccttgactggaacatatcatttggttgctagtggagaaactacatggtatgactacgcattaaaaatttttgaaatagctataaaacatggtattcctttgaaagtatctcaagtaaatggaataccaactgaagcttatccaacatctgcaaaacgccctaaaaattcaaggttatcgaatatgaagttccagaacgccttcgatgtagttattccgaattgggaagttaatgtggaaagaacgctgattgaattgatttctaaatag

SEQ ID NO: 160164 - DNA, 231 bp, Enterobacter cloacae
atgagccaagttaatacccatgtcagcgcaggtagtgcaggagttacgcccgaacagcttttggaagtcattgagtcggtttcggaaacaaattacagtaggatatatttaaagaaatctggctttgaaacatctaatagttgggaaattacaaaagcaaacattttagatcaactatcaggtaagcgtgtagcaccagctaaggaaggtgcgaacaagttcctgatatga

SEQ ID NO: 160165 - DNA, 915 bp, Enterobacter cloacae
atgtctgcaggaactatcaccctgacaaacgggtccgctattgttggcggttccggaacctcattcgcaacagaactcgccgcaggtgattttattgtctccactgtgggcggcgttgattatacgctgcccgttaaatcggttgagagtaatgcgcaacttacgctggtcagcaactttaccggccctactcaggccggtgctgcctggtcagcagttccccgcgttgcgctgaacatggtaactgctgcgctggtggcgcaaagtgctgaagcactgcgtggactgaattacgacaaacagaactggcaattactattcagtgctacaggagatattacagtacgcctgcctgatggctctacttttaccgggcctgcatggaaaggaatcacttcaactttatcaggcaaacttgataaaaatcagaatctgaaagatctggatagtatctctgaagctttgaaaaaccttggctggatagatggatttcttcctttaagccttggtgggcttggtgcagggacgcaatctggcggccgtgctgctcttgggttgggtacagcagctactgcaaacataggaacagccgcaaaccagattcctgatatgaatagcttcgctcttgctccggggggagggggcgcctcattccgaaggctaccaggtggggatataattcagatgggaaggcttcaaacaagcgccagtaatacgttaacgggcacactgaacgtgccattccccaacgccaattacaacataattgctgtcgcacaggaccagcaggcgtctataacttgtgcacctctcacaggaaatacatttgcgatttcggcatggaatataggaagtacgggaggacttggttcccgtgtaacaacactggtttcatggcttgcatggggaaactga

SEQ ID NO: 160166 - DNA, 1458 bp, Enterobacter cloacae
atgcaggtcactattgatggtgtcccgtatgcacccgcctgcgcaatttcatcgcggatcggcattgcgataacgacacaccagcgcgctgacgttctgaaacgagcactcgaacagcacatgaagcatcttcccgccggcgcgctggtggtggttgtcgatgatggttcaaaacctgcagcggtagttccccacgacgtgcagctgcttcgccatgaaacatcactcggcattgttgcttcgaagaacgccagcctgtcagccctgatggatgccggatgtgagcatctttttttatgggatgatgacgcctggcctatcgctgataactggcacctcccttacatccaatcaccagagccgcacttagcttaccagtttctcgatctggctggccgcaataagctgaatgacctttcggtgctttaccatgacgatcagcatgtggcgtataccgggcagcgcggcgtgatgctgtattaccaccgcagcgcgatcgagaaggtgggcggattcgatccggtttatggtcgcggtatgtacgagcacagcgacctcgccctgcgtattcataatgctggcctcacgacgtgggcttacgctgatgtcgtcggttcagaaaagctgattcattctctcgatgagcatgaggccgtggagcgttcggtaccgaagccagaccgtcaggcgctggtggaacgtaacgtaaaaatccataaccaacggcgtgataccgggtttaccggttatgtggagtaccagcgtcagcgtgacgtggttatcactactctgctgaccagccagcccgacccccagcgcggcacgaaaatgacggcctcacctgacatgctgaccaggtgggcggcctcgcttcggaattgtggacgtattgcgctggtggatgaattactgacggcaccggcagacgttgagctttaccgagttcctgacgtgaagatgaatgtttacttccggcgctggctgcatatctggcagcacctgcgcgatcaccctgaataccggttcgtctggtgtaccgatggtaccgatgtcgaaatgctgcgagcgccatgggatgaaatgcagagcgggaatgtttacgttggttctgaaccgaagacctacgccgacacctgggcaaagcaaaatcatcctgagcgtatctatcaggaattcatcgaagcgcaccgcaacgatgtgatgcttaacgctggtctgctgggtggcacccgcgctgatgtaatggcgttagctcacggcatcatccgtctttactaccggatcgagagttatcgtttctggaagaaagaacaggctggcgccgcggtgggggatatgatcgcttttggcattgttgctaaatcgcttggcgatcgcattgtcaccggcccgcgcatccacacagtttttaagactgatggactagggaaggaagtagctttctggcgccataagtaa

SEQ ID NO: 160167 - DNA, 864 bp, Enterobacter cloacae
atggctaaaaaaactgaattagtaccagtagcggctcgcgacttgcagatcatcgagtatcgcggtcaacgagttgtgaccactgagcagttggctgctggttatggcacggacgtgaacaatatcacggtcaactatcaccgcaaccaagaccgcttcgctgagggcaaacattactttgacgtccagggagaagagcttcgcgaaatgaagaactgggtatctttaagtaatgcagttggtaagcgagcccgcagcctgcgtctttggactgagcgtggcgcggccaaccacgcgaagatgctggaaaccgatcaggcgtggggatatcacgaagacctggtggaattttactttactcagcgtgatgccatcgcggcaccgtcaacacaggtggctctcagccgtaaacagctggcgatgatggttatcgaggccgaagaacgagccgaagccgctgcgctggaaaataaaacactgagcgtgacggttgagaatctggagaagcactttaccaaaggaatgactctgccggcgttcggcaaagcgctcaacggtgttaataccagcaaaattacctggtgggcatatcagcgcggttggatttacaacgaacaaccagatccagagaaagatccgcgttggcgagttaaatcttatgcacgtgacaaataccttactgagcaggacatacagattaaggacgttggcaaagagccattcaccaaaaagaaaatcgttctgctgcagaaaggcacccatcgcatttatcagctctacctcaaaggtgagttgccgatgaaaaccacctggaacggcgagttcagccacgacaaagcgatttatacgccggaggaaaaataa

SEQ ID NO: 160168 - DNA, 576 bp, Enterobacter cloacae
atgctcattcataccgatattctccgcgctgccctttgctgcgtggctgatgaaagtgaagcacgtaaatacctgcgtggggtgaatataacccctactcacattcaggcatgcagtgggattgcaatggtttcgatggaacatggcgacaacactgaaattgaaggtgtttttctcttcgatggcgagattcctgataacgcggatggaacttacatcaacctgtttgatgatggctggatggcgatccacattgatgaattcgagcatcctgttggatcaactaatttaacaaaaattgagtgccgttatcctgatttcagcaagctgttacctccagagcctgagtcatttaatgagttacctatgttctcttcgtcacttcttgagcttccgtttcgtatgttcgggaagtccgtggtgaagtttaagccgttcggtaaaaccgcaccatgtcagatcctgctcgacccggtggtaaatgaattctttggcaatccatttatggtgatgatgccattacgcgaagatgcctttgagcaagttgcagaggtgttgaatgaagaaaatctgtga

SEQ ID NO: 160169 - DNA, 252 bp, Enterobacter cloacae
atggaaacaaaacgtactcgagattggcgcaatgcacagaagcgacgtaacaagtctcgtgatatccgcaagaccttattaaaattccgtggcgaaaaaaactggaagatgctttacacgcggtcggataaattgttgcgtgccgcacaactggggcttgagtatccacgtattactaaccaacagcttgccttgagaggtctggaagagtacctctattcggatgaacgtactttttatatgcagtcgtaa

SEQ ID NO: 160170 - DNA, 549 bp, Enterobacter cloacae
atgtctatctggcagccaaagagccgcgaaaatagccttaaattgctactcagagatattcctgattgtaattgggtgccttgtgtcaagagggctgtaggtggtttaaccgaagtcgctttttcacgcaattataaccacttgctcctgatcatttcctcttccggaagaggggtgcttgattgcctgagtggagagattattgccagagattatgaagaatatggtaactggtacgactcaattggccttgcatgtacaggtataggaccgctgagcggtgaaactctttccatcgccggtctgtgtggcggtggtttaccaatgtataaccggtatggagaagcactcgagcgagtatcgccagagtggcctctggaaatgttaatctggtgcccgccgggcaagagtgcattaatcgcatcccataaagaagggtgtctcagacttgcgaatgattactttcactgtgttggtttctcatgggatggtgagttaattatatcggcaacaagcagtgacatcactgtctggaaaagacagggctga

SEQ ID NO: 160171 - DNA, 480 bp, Enterobacter cloacae
atgcgtactcatcaactgaataagtcccgtaaactgtatcgcagcgtcaacactactacgcggcaccattctaataatccaggtgcagagtatcgctgggaacgcaatcataaaaaagtcggagatgagctactggcaaagcgcgagacaatgcatggcagacagaagcgtggccgagactacacaccattattttattttctgatcaagcagattggcaaaccgtgggataaaatattcagcgaagtatgtgggcgtcttgataccaccgaacctgtattctggttggtcgcgctacatgagcatcagcgaagggatttagtctgcattggcgaaagcagtttttacccgggtttgtttgttgatgagaatggaattctgcaacaggtaaacccttcaattacgagaaaggacgttaaagtgacttgccgctgctgtacacacacgtatattggtgaacctgtcccctggatagattga

SEQ ID NO: 160172 - DNA, 480 bp, Enterobacter cloacae
atgcggttcgagcactggaactcaatgatggttggatcggtgcgggttttgtacgagaacttacatgggtatgggctaagtcctgtatctggtgatgttaatgtcgtttggtttgactgtgaacactgtagcgcagagcatgatagctacctggaagacaggcttaggcaacaattaccttcgttagactggtcggtgaagaatcaagccagaatgcatcaacggaattgtgatcatccctatacctcaacggaaaatgctttattgcactggcctgaaacatctacggccgtggctgtcagattggggaagagaggcctcgatatcactgcgccttatggattttctgacttatttgaactgcgtttacgaccgactcctgcatttgaacgtgaaaagttggactctttcaaacaacgggtcactacaaagcaatggttgaaacgttatcccaggttacagctcatcgtctccttataa

SEQ ID NO: 160173 - DNA, 210 bp, Enterobacter cloacae
atggtgaaaggccatccttggcctctattgttatcttctttgagcaaattcaaacggcctaaccataccgttgctgttcgcatccagataatcagcccaccactggagcaacaggcggtgctggtcaaggtgcttggccttgtgggtataagcagcacggacgctattgctttccttatggctcatttgaagcgctacagcgtcttctga

SEQ ID NO: 160174 - DNA, 1011 bp, Enterobacter cloacae
ttgatcgattaccaaacaagactttatgatgctcagactactatcacttcaaatatttacgatctcgaaagtcagtattcgttagccattacttctgcaaatgaactcgaggaagattataagtttgcggtagaatccatacctactgacaatttagagtgtccattgtgtggcactcttcatgataactcactacctaacagagcgttgcttctttcagaaaaggattcattgcttaatgaggcaaattcaatagcatctaaaatagcggagctcaattcttcattgaactcattaaatgatgacgctcagtttattactaacgaaatcgataggataaataagaaatacattacagacgacgatgcagttgaaaaagatctcattgctcaagtaattgataccatatctactgaaaatgtttcaaaaaatattcaaattaaaatcgataatgaagaccttaacatcaacaaagccaacagttctatcaaggatttaaaaaaagaccagaaaaaacttctttctaccaaagaaagggaagaactgaattcgtcctttatgtccaaactgttggcaaatattgaagcactaggttcgacagggataaatcttagcaaagttaaatcacccactgattataaacagttgcttggtggtggtgctgctgaggctgctaggggactacttgcttatcaactctctatactacaacaaattcatggtgctaaatcttgcgtagtgcctcctttcgttatcgatacacccaaccagcaggaacaggcgggataccgttatgaaactgttattaaagaattaatgcgtagtgttcctcaggattatcaaataatactatgcgcaatggaaaatgatgctttaaatgaatttaaacatgatgctaatgttattgagttaaattcaaatagacttctaactgcttcgcaatataattctttgaggtctgaatataaatatcttcagtcaatgattacaggtcaaagtgagaaggaataa

SEQ ID NO: 160175 - DNA, 651 bp, Enterobacter cloacae
atggccggggataaaggccgggagtcgcttaaagagagcaaggaatggtggaaggaccagatcagggacaagctgggtaagaacaccgtttcccagattgcgaatggtctggtcaatgttgccgctgaaaccggcgacttagccgtgctgggcggcgatacagcgtttgatatggtagcagcgttaaccgcctgtgcgacaggggatagctactgtagccaggcgcagagtgatattgcgaagaaagatgcagcagcagcgaaagtactggatagcatcatgaatggtgatgcgtgggaaggcatcaagacgactgttgtgaaagcctggaatggtgaccagaaagcgctggagaatgttgcaggggtattatctggcgctttgataccggcgaagctttttccttcaggaagctcgacggcaaaagttattgttaagcccgttgcacccaagggcggagccggtggaaactggaatgtgctggatgaaatagtcgatccaaatgtggtgaaacaatcaacgccaacgggttgtggcggtgcttgcggtgaaatgatgctgaatgataggaatatctttgttgatcaaactcaaataggtactggactgaaaagccctgaacagttagggaaggtgcgaacaagttcctga

SEQ ID NO: 160176 - DNA, 321 bp, Enterobacter cloacae
atggatatttggcctgaatttcaacgagatcttgagatgtatcgagatgttgttttatcaataaaacgtaaccttcggttgtatgaggaatgtattgaatcgttaattcatcagatcggaagcaccgattttgataatgcacagactctatttgatgaactctttcgtatgcaatctgaacttgctactatgttatacaaatatgaatatgagccagggaaaaggatacaagagttaatataccatctggacagggatgatttttactcaagaaaatattggcatgaaaaattcagtgatgggttggcatggcctgaataa

SEQ ID NO: 160177 - DNA, 378 bp, Enterobacter cloacae
atgacactaagcatccgagatcggatttttgccgctatgcatggcatgtcagcagaacagtatgcattagaaaaggcgcgggacaatctgaagaacgtcaccgataactttctggatcaacatccggagttgcttaaatcagccccggctgaaacacccacggataaacggggcgaagccctctcgccaatgctagacacctttggtgctgaacaacggattaaaaaatcgttgggtgctgatagccgtccggttgtctcacataccgctgaccatatcgatcctgaaatgctggcgaaagctaaagcagcggctgctgcactcgcaaaatccgatcctggtcgttacggcaatatcatcaagcagcagggggtgtga

SEQ ID NO: 160178 - DNA, 855 bp, Enterobacter cloacae
atgacagagacagtaaaaactgaagttcagcgtacaccagatgaggtttacggcgttacggagatgcgtttcttgtgtgccagccagattgtgattcgcagcactggcgagattgtgaaaatcacagacaaaatgaagctcgtctacatctatatgaaaaatcagttcattggattctcaagtcgtgagcagcaattttacacagaccagcgacaaatcggggcagctttggatatctcacgcgacaccctgagcaaagttctggctgctttgaagacgctcggaattgtcgagactgctggatggaagggaaatagtgagtcttacaccgtccattttttcagtgatgttgctgacggtcttcaggttatccataaggaatggaaaggcgttccagcttgggaccacgaacgggccaacaagaattttaagtctaaaaatcagaagccgacaaacgaggagaaaaaaggcgatggcgaatctgatcagggcaatcatgaacagcgagacgatgtatctaacattcttggcagtggcaatgctcctttatccgctggtgctgatgcggtaaacggtgcggaacagcagaacgaacagtactatgccgatcttgatactctaaaccactggcgggaaggtcacgacgatgaaggatttaaggcttatggtgcgatgtggggaattactgacagaaggaaaatccctgatctgttaactaatcactacattaaggctacaaaagagaaagaaaagggatataaatctgccgccaatgatgacttatccggcgctgatgcccgttacaaacagcagcaagcacagagagcagccgccgcgaaacaggcgcatggctga

SEQ ID NO: 160179 - DNA, 201 bp, Enterobacter cloacae
atgcacatcaaattccagcagcacgtttatcaggctctgctagctgaggccattcgccaagataagccactggcacggctctgtaatgaaatcttggagactgccgcgcacattttcgacaacacaccagacatcaaaccagcattagccagcaaggcgacacttaacggagatattaatgacagagacagtaaaaactga

SEQ ID NO: 160180 - DNA, 126 bp, Enterobacter cloacae
atgaagccccttcagtctacattaaccagcgtgacggtaggattcacgcacaccatcacgataaccatcagcaaacgctgcctgaggacttttgtggcgaacggttcccgcctggctatcaggtaa

SEQ ID NO: 160181 - DNA, 321 bp, Enterobacter cloacae
atgtgtctgaaccttgtcgacttcataacattttggacaaaaagcagtttcatcaccttctttccaataaagaccatcattgaaagtgtaagagtgtttatctttaagctgctcttcaagtttcttgttcttctgttcagcatcgaacagaagcatttgagtagtgaccacttccattttagcgctagcaagttcagtcatgaggcttgcaagctcaagtttgagagtcgccttatcaagctcaccaccatcatcggcaagctttttggcaattcctacagctttgtcaatgatcccaacagcggcggctgtgctagctaa

SEQ ID NO: 160182 - DNA, 804 bp, Enterobacter cloacae
atgcacacttcgattgaagtactcagccaagcaagtttcaagtcggttcttggcagacctaatgaaggccaaatggccttaacgcttttatgccttgttgattggcctgacggagtgcaaaggcaatcatatgtgaaaatatttactaaggaagaaagtattggtgtcttcaatgaagttcttgggtacctgcttaccaaatcaaatgatcttcctgtagccccaaaagcaggcatattgatattgcctgatggtatcattgattcaattgacaagcccgtatcgccaattgcctttgttagctccaaagttaccggacattctccggctagctattacaacattggtgatatgattaaatttgagagtcttagaaggattctcgatggatgggaaaagttacataaaacgatcgcttttgatgagtgggtcgcaaaccaagatagaaatttagggaacttgatcattgattcacacaatcaagtcacccttattgaccacagtaatatgcctgtagatctcatgtggtctcctgaagacttatccataactatcagcccagtcaataagttggaaatggccctccgagccgcaccaacccttcctcagaaaatggatatagtaaatggagctagcggacaaactgaagcattggatatcgtaatagcagagattacttattggtgtgaaaaacttctgaatccgcaagcaaaagattgtttattggaatttttgagtcatcgtgcgattttttccaaagaaagattaagcagaagacttggtgtactggcgggggtcgcgtga

SEQ ID NO: 160183 - DNA, 870 bp, Enterobacter cloacae
gtgattaactttgattctatcctaagtgagcattcacatcagccgattgtcaaaggtgaatggtttacaattcagtggtgccctgatgttgccacaggagaaaaactcaatatcggtgtatgtttcaaagatagttttggcggggtatttgtacaaactcttgagtattttgacaggatttcttgcttgtactctcatggcatgacatttcaccttaagttggcttgtgaagtggctagggagatagtactttcaggggaagtatttttatcaaatcaatgccagaatttaacttttaaaaacaatggatatgctcaaggtgaatcagcagacgacatagtatcttctctgttttcaaatgttgttcctttatcggtaaaagtgacaaaaaagagagagaaagtttacactccaatttcaagagatcgcctttacaatataatggatggctacctcaaacaacaccttgaatacgaagaatattttgagatgcgagacccatcccctttaaaaagaattacactggggcaacaatcgcaaacaatttatcttccttacaaagccaagacctcactcggaacaatagcgtcagcagcctattctgatgaaaatttagccaagtgtcatttgtatgatgctcaaagagatatctcattagctttgaataactacgatgagtataagtgtggagcgattttcatattgtctccaaacaatgacctcaaagtagacaaacgtgatcaagtagatttagagattgataagttttgctggtatttgaaaacacaagccatagaaaccgaagtcgatagtgacccatatagtttatccgacagagctatccattggtaccgtaggaaggctgcctga

SEQ ID NO: 160184 - DNA, 258 bp, Enterobacter cloacae
atgaattacttacgattgattctcgaccacgagaagcgtgccactggctataactgtgcgattgatactgagctggatgaactcccggcagccatcaccgaggccatctacaagcatgtgaaggactatcggggcggtctcacctatgaccgggcagatttcatcatgcgtgacctcctgtggctcctgagcggctatgacattaaggctatcgttaccgaccatactcagcgtgaaacacaggtttatccattctga

SEQ ID NO: 160185 - DNA, 2454 bp, Enterobacter cloacae
atgcagtacaatttctctgagcttaacgctcttcccattgctgacgttttcactaaaattaccggcatcgatactaaatcctgcggcaccgactgccttgaacctgaagattctgtctgtccattttgtggcaataagggcaatttccgactgcacacggactctaatcgggcatattgctactctcttcaaaagtattacagtgtgattgacttggtgatggacctctgtgagctgtcaacgccagtcgaagccgccagtgctatcacaaagatggagttcgaaccacgccctacggtggaagctgtccaggcagagcctgagccggatacccgtaatttggagcgtgtagcggaaatcaacgcggcgactacagagtattaccaccgaaatttgctcggtaagaatgctgcaatcgtttatcagacggtaacgcggggccataatgtcaaaacgttgatgtcagctaaggtcggatacgctgatggtaagcttgtggcggctcttcgtgagcaaggcttcagtgatggagaaattctggagacagggatggcccgcctccagaatgaccgcccggtagatttcgcccgtgccggggtgtatgtctatccgcatttcgtcgacgggaaagtcgcccgtttcacctttaaagatcccacgggtgattttaagttccagcaacctaagcgttactggcttccgggtgcttgctggtatggtcaggactcgctggagcgccctggaaccgtcgctttagtcgaaggggagaatgaccacctggcgttgatggaggtatgggacggcccggttttggcgtctattggttctgtcagccgtgaacaggttgaatttatcaggtcgctaggccgtgaagttatctctttctacgataatgatgatgccggggatggctaccgtcagaggcagcctgacatccagcacattatcgtgccggagcggggcggtgatattgacagctttatccgtggcggcggtgacgttatgagcctcctgaccgtcttcacgccgaagtttgaagtactggcacctctggtagcgggagcctgtgggccggagagcttcaacgataccggtaatgctaaccggatgacccgactccacggacccgacctgcggtatgtccgggaaaccgatacgttcatccactgggacgataactgctgggttccggccggggtgcagattctggagtatgccaaacggacggctgctgccttgctcgccgaaggtcaggcgatgcttgcgtcggacgatgagaatatccgtaagcgtggaaccgaccaggttgcctacgcccatcgcctgcataacctggggctaatgaaggcgatgatcgagctgcttaagccaaaggtggaaattcgcacggtggagctggatgctgatccgatgctcgttcgcgtcaaaaacggcgtgattaacctcgggacgcagcgctaccgtgagaaccgccgtcaggacctgatgaccagcgtctgtccggtggaatatgatccgaaggctgtctgtccgacatgggagcgattcattgcagagatcacctgcggtgatgctgagctggctgcctttctgaagcgcctcgtgggatatatgctgacggggcggaccgatgaacaactcctgtttttcttctacggtcacggcagcaacggtaaatcgacgttcatccagattattcaggctctgatgggcacctacgcaacgcagattaacagtgacgtgctgatggctaaccgcagcgttggtggtccgaatgcgtcattagccaaactgcccggtaaacgtctggttgttgccaacgagctgcccgaaggtggccgctttgatgatatgcttatcaagtcaatgaccgggggcgatacgctggttgcccgtcaggtctacggtaagcatgaaatcgagttcaccgctcagttctcactggtgattgttggtaaccataagcctgcgattcacgatatgtcacatgggatgtggcgtcgtatgtgcctcatccctttcgcggctcagttctcggcggaacaggcggacccgacgcttccggctcgtctgctggctgaactgcccggcatccttaactgggcgctggagggtgtcgcagagtggcaggagcacggcctcaagcgctccctcccggccgcagtagtcaaggctaacgacgattaccgcgaagagagcgacctgctgggtgagttcctgagcggctgtatccttcagcctgacgcctacaccccagcgacggaactttaccaagcattccagacgtttgcctgcgagggcaatgaatggcgtatgacccaacgtgtctttaacaaaaagatggctgaacgtggcttcaccaagcttcgtcgtgacagtaaggccggtttccgtgggattgctctcactgccgacatgccacgtgtgtttgagtcagtgaagctgaccgtgtag

SEQ ID NO: 160186 - DNA, 432 bp, Enterobacter cloacae
atgcacgacataatcaatcaggctcgggagctgctgacggcacggctctaccgtaatgaatcgctgggttccccgcgtgaaacagaaagctacctcgctctccaactcggtgaccgtgagcacgaggtctttgccgtcatcttcctcgactcacaaaaccgcgttatccagtaccgagagatgtttcacggcacgataacgtccactagcgtctacccccgcgagatagctcgcttggcgcttcgtctaaacgccgctgcggtcatttgttcccataatcatccctcaggccaccctgaaccgtcatcggctgacagggctattaccggacgtataaaggactcgatggaactggtggacgttcgcctgctggatcacattgtcgtcggtggtgggcggaccgtatcgttcgctgagaggggctggctatga

SEQ ID NO: 160187 - DNA, 540 bp, Enterobacter cloacae
atggcaattataggatacgcccgtgtttcgactacggggcagtcgctggagcagcaactgacggcactgacagagtgtgaaaaagtttttcaggaaaaaatcagcggcagtaaaacggacaggccacagctacaggcaatgcttgagttcgcccgctccggggacgtcctgaaagtaaccaagctggatcgacttgcccggaatacccggcacttgctggaaatcacagatctgcttcattcaaaaggggtaacgttacagatacagaaccttggcatcgacacggccaccccgactggcaagctgatgctgaccatgataggggccatcgccacgttcgagcgggagatcatgcttgagcgtcaggccgagggaattgccctggcgaaggctaaaggtgtctataaaggccgcaagccaaccgccatggaaaaacgagacgaggtgctgtaccttctctcgcaaggcattgccaaagcgactgtcgcgaagcggctagggattagcgtgtcgagtgttcatcgtattgcagccagttga

SEQ ID NO: 160188 - DNA, 3132 bp, Enterobacter cloacae
atggatagcaaagcccgtgaacgagcctttcaggaccatattattgctgagcttgccagtactggatggttaatcggtgattcggcccattacgataaagaacgagctctttacccggaagacctgattggttttgtccacgagagccagcctgatggatggcagaagtactgtaaaacgtacagtgaaaatcctgagcgccatctattagatgccgcagtacgtcagctaacccgttccgaaggtggtacgctgtggctactacgaaatcaaattgaggatcgcgggcatcgtctgaaagtagcgagctttaaaccagataatgatctcaatccagagttactgatgcgttatcaggtcaaccgcctgcgtgtggtacctgagctgatttacagtcctcatggttatgatgggcgtatcgatctcacgctgttccttaacggtatcccggttgcaacactggaacttaaatcttgtttcaagcagtcccttgaaaacgccaagaaacaatatcgctatgatcgccagcttaagactttgggtaaagtcgagcccctgctcagtttccgtcggggagcactggttcacttcgcagtgaatcagttcgaagtggcgatgacgaccaagctcgcaggggaatcaaccttcttcctccccttcaataaaggaacctcagaaggcggggccggtaatgaccagccagaagtcggttatggtactgaatacctgtggaaagaaatcctgcaaccggataacttcctgcgaattctggcccgttatctgcacctcgaagtcaaaattgaagaagacccactcggtaagcagcagaagaaagagacgatgatctttccccgctaccatcagtgggctgtggtgcaaaaacttcttagtactgttcaactcgaagggccgggtcagaaataccttatccagcattccgcaggttctggtaagtcaaattccattgcatggctaactcatcagctcgcctcgcttagtcagggcggggataaactgtttgattcggttattgtggtgacagaccgtaccgtgctggacagccagctacaggagacgattggtcagttcgaccatgcatccggtgtcgtgagccgtattaaccgtgatgaaggggacagcaagtcagcacaactggccgaagccctggcaaacggtacgcccatcatcatcgtgaccatccagaccttcccgtatgtcctgaaagccattcaggaatccaccaccctcaaaagctcacgctttgcggtcgttgccgatgaagctcactccagtcagagtggcagcacggccagacagctacgtgaagtgctgatggcggagcagatcgaagaggaaatgtcagcagaagacatgatgaacctgacgctggcggcccgtggtggcagtaagaacatcagctattttgccttcacggcaaccccaaaggctaagacgctggagctgtttggtcgtcctgataagctggatatgccactgagtcaggagaacaagccgaaacctttccatgtgtattccatgcggcaggccatcgaagaaggcttcattctcgatgtactgaagaactacaccaattattcactggcctataagctcgccatgcagaccgaaactgacagcgaggtggattccaaaaaagcccgtacccgtttgtctaagtgggtacgcctgcatccgcacaatattgggcaaaaagtcgcgatcatcgtagagcatttccgttctaatgtgatgagtctactggccggtcaggccaaagcgatggttgtcaccagcagccgccttgaggccgttcgttacaaactggccttcgacaagtacgtcaaagaacaaggttacggggccatacaggctatggtggccttctccggtgagattgaagaggaggggcagacctttaacgagcgaaacatgaaccctgatctcaatggtcgggacatgcggaaagcattcgatacccaggactatcaggtcatgctggtggcgaacaagtttcagacgggatttgaccagccgaaactctgtgccatgtatgtcgataagaagctgactggcgttgactgtattcagacgctttcccgactgaaccgcacttctccgggtaaggacagtacttttgtcctggattttgtgaatgaccctcaggatgtactggaagagtttcagaagtactacgagacggcgaaacttgaaaccgtgtcagaccccaatctggtatatgacctgttccataaactcaaagggacgggcatttttacctggagtgaggtcgagtcattcactgatgcctatttcgatcataagcgtggaccagagtccttaaccggctatatcaaacccgccgtagaccggttcagtaaacgctacaagatcgtcagtgaagcgatacgcgaatcccgcaagatactcaaagtcattgagctggaaggtggctcaaagaccgataaggtgaatgctgaacgacgcgtaaccgaagccgcagaagccagagcggaactcgatttgttcaagaaggacctgaacagctacatccgcttctacgagttcgtgtcgcagataacgctatttgatgatcaggagctggaacgcctctgtgtcttcgcccgtcacctgctaccgatgcttcgtcaggaagtactggaagaagacgaaatagacctttcagctgtgatcctgagtcattacagcctcagggctaaacgcacccaggacctgaaactgaaagaagatgctcagggttatggtctggaaggtgtatcggcagtgggtagtgctaaagcccgtgaggaaaagaaagacttcctctcgcatattctggaacagcttaacgatttgttcggtacagaagtgaccgatggtgacaaactcgactggttgcagggtatggcgagtaaaattgctgagaaccagccgttaatggagcaggtacgcaacaattcccgtgatgccattatgttaggtgatttcccgaaagcggtcgatgctgctgtgattgagcggatggatacgcagaacggcatgtcgctggattacctttcccgaccggacgcggctaaccgtatccagagcctgttgctggacatactgctcaaggggctgggtggacaattatag

SEQ ID NO: 160189 - DNA, 1311 bp, Enterobacter cloacae
atgagtactatggaacaagtggaagtggggaaataccatccgtatactgggtataaggattcgggggttgagtgggtcggtgatatgccagatcattggcaaactaagccggccttcgctgctgtaatggagcaatgcataaaaaacagtgatggtgcagagtcgaatgttctctctcttagctatggaaatatcgtagagcgtgatgttgaaaataactttggtttgctaccagaatcattcaatacataccaaattgttaacccaggcgacattgtcctacgtctcacagatctgcaaaatgataagcgtagcctgcgtgttgcccgctctacattgcgaggcatcattacatcagcatatttgaagctggtttgtggtgatgaacttgataaccgatatgcatatcgtcttttgcattcgtacgatacaacaaaggtgttttatgggatgggggggggactgcgtcaatccatgaaatttgaggattttcgccgcttaccattcttgttacctccagcagaagaacaacgcaccatcgccgccttcctcgactatgaaaccgcccgtatcgacaagctgattgcccagcatcagcgactgattgaactactcaaagagaagcggcaggcggtgatttcccacgctgtcaccaaaggtctgaaccctgatgcaccgatgaaagattccggcgtagagtggctgggggaagtaccggagcattggctggtatcgtctttgaagttcatttataagaatcttgattacaagcgaataccacttagtgctgaagaacgggggtcaaagcaaggtgattacccctactatggtgcgtcaggaattattgactcgatcgatgattatttgttctctactgatcatgtgttagttggggaagatggtgcaaatcttgtaatgcgttcaacgcccatagcttttgtcgctacaggtcagtactgggtgaataatcatgcacatatactgcgtatgaatgatggtctcaatagctactgggctgcggttattgaaaatttggacatatccccctttgttactggttctgctcaaccaaaactcacagcagaagctcttggtaacttaatcgtggcatatccgaagacattgcaagaacgcattgagatacaagagtttattaatagagaaaaacctaaatttactactttgatagatagagctgaacatcaggttcacctcctcaaagaacgccgcaccgctctaatttccgctgctgttacaggcaagattgacctgcgtggctggactgcatcgactcaggaggcagccgcatga

SEQ ID NO: 160190 - DNA, 1977 bp, Enterobacter cloacae
atgaccactaatatttcttctttagccagccttatctggtccgttgccgacctgctgcgtggtgatttcaagcaatcccagtatggtcgcatcatcctgccatttactgtactgcgtcgtcttgagtgtgtactcgctcctactaaggcacagatactggcaacagtagaaaacacaaaggcgctgccagatctcgcgagagataaattactgctcaatgcgtcaggtcaggcgttctataacacctcgccgctggaactgagcaaactgggcgaaaatcatgtgggtgataacctggacgcctacgtgcgggctttctcgaaagacgcccgtgaggtcttcgaacatttcagcttcgaagcgagcattaccctgctggaagacgcggacctgctgtataaagtttcccgttcctttgcgacggtagacctgtcacctgaggcggtcgacaactaccacatgggcctggtgtttgaagaactgatccgtcgctttgcggaaagttcgaatgagaccgccggggagcactttaccccacgtgatattgtgcgtctgacgacctctctggtgttctctggtgatgatgatgtcctggcaaaacccggtgtcgttcgctccatctatgacccaacggcgggtactggcggcttcctgtcctgtgggatggaatacctgcatgaactgaacccggcagctcgtcttgccaccttcggtcaggagctgaacccggagtcctatgctatttgtaaagccgatatgctgataaaggggcaggacatcagcaacatcaagctcggtaacacgctctccgatgaccagcttcgctttaaccgtttcgactactgcctgtcgaacccaccattcggcgtggactggaagaaagtagagaagcaggtgcgtgatgaagctgataaaaagggctttaatgggcgcttcggtccaggtctgccacgtgtatctgatggctctctgctgttcctgatgcacctcatctcgaaaatgcagcagcccggtactgacagtacaggttcccgtatcggtatcatcctgaatggctccccgctgtttaccggtggtgcagggagtggcgagagtgaaattcgtcgctatattctggaaaacgatttgctggatgccctggtcgcactaccaaccgatatgttctacaacacgggcattgcgacctatgtctgggtactgtcgaaccacaaacccgcagaacgtaaaggcaaagtcctgctgattaacgccagtgatatgcattcaccgatgcgtaagtctttaggcagtaagcgtaagtttctgagcgatgaagtactgaaagagattgtcagtctgtacagccgctacgaagaaagctccatcgccaaaatattcccgagtactgcttttggttatcggcgtattacagtagaacgaccgctgaaactggcgttctatccacatgacacggaacgactggcgaacctgcaagccgataaggcctggacgaaacttgatggctctttacaggtggctatcctggcagcactggcgagcttcactgatgacaaattgctctcacgtgataagttcaagaagcaactcaccaaagcgttaggtgatgtgaagctacctgctccggtattcaagttactggtgaatcatctggctgaacaggatgatgcagccgaggtgtgcaggactaagggtgaagcggaaccgaacccggagctgcgggataacgagaacgtgccgttaggggaagatattcacgagtacttcaaacgtgaagtactgccccatgtaccggaggcgtggattgataccggtaagacggacccgctggatggtcaggtagggattgtcggctatgaaatcccgtttaaccgccacttctaccagtaccagccacctcgtgatttagctgagattgatgctgatctggatgaggttgctcgtgagattatgcaattgctggcggaggtgcattcatga

SEQ ID NO: 160191 - DNA, 324 bp, Enterobacter cloacae
atggtaccgttaacgtttcttcgaaaaaaagccacgcgcagcgtgccgcttctgctggcagccctgatctttgcaggctgtggcacccaggcacctgaccagagcaccgcccatctccagggttctgctcaggctgattctggcttttatctgcaacaaatgtcgcagagttcaaatgataccaagaccaactggcaattactcgccattcgtgcactgctgaaagagggtaaaacccagcggcagccgaactgtttaaccagttgccaaaagatcttaacgacgcacagcgtcgcgagcagagcctgctctctgccgagctga

SEQ ID NO: 160192 - DNA, 855 bp, Enterobacter cloacae
atgacgacgaaacccgagatgttgagccgtatcgaggcgaccttcagccagctcacgcccagcgaaaagcgggtcggaagctggctgctggcgcacgccgcgcaaatcccgtttgaaacggcggagagcgtcgggctggcgagcgggaccagcgggatcaccgtcggacgcttcctgcgcaagctgggatatcgcaacctggaagatgccaaaaagagcctgcgcgatccgtatcagccctggggcatgaacgagcgcctcgactcttggcagcagcagcgccccctgcccaaccgccttcagcacgccctgtcgctggaagtggatgccatcacgcaggtgtatcagctggcgcaaacggacgccttccgccaggtagtgcaccatctggcccacgcggacgcggtctttgtgctggggatccagtccacgcgcgggatcgccaacgccttcttcagccaccttgaatacctccgcccgcgggtgagctatgccgaaggcgcttccggcagctgggtggaatcccttaactccgggtttgcgcacccttatgtcgtgctgaccgatacgcgcacctactccacaatggcgcgccagtactgccgcgtcgcgagcgagaaaggcattccgctggccttaatcaccgacatctggtgcccgtgggcgcgggattacccgatggatttactgcaggtgaaaaccgataccggtcatttctgggattcacttgcccccgtgagctgtctgttcaacctgctgctgtcgggcgtggtggaagcgctgggcgatacgctcccggcgcgcctggcggtaaaccgacaattacaacaagagtttggtcaattcgaacgttaa

SEQ ID NO: 160193 - DNA, 2223 bp, Enterobacter cloacae
atgtcacaaccggaaaatagcccgtatctcccggctatccgctggccggtgccaaaaaacaaccggggcggggagttcagtaatctcgaagaaatgcttgcgcatctggagggcgaggccgccggccactggcttatcggtcgcaatggcatgtggcacggcggtattcacatcagtgataccaccacaccgtggtgtgcgctcagcggtcaggcgatgaatgaggcggtcgattttccggtgccgtttaagggggagcaggccgtgcgctgcatggcagacggtgaggtggtggcgtaccggattaaccgggattacctcagcgtgccgtggtactggggggatttacgctactccgggtcttttgtgctggtccggcaccgcgttcagccggggaaaacggcagagagcgggctgaccttttacaccctgtatatgcaccttgcgccctggctggcctacccggagcaggacagcacggcgttcaaagtggcagacggccagcacctgaatgcgtatgtggacgcgtcccggcagtgggtggcggcggagctgccgtccggcacgcgggtaacgtggaataaggcggtcagcaccgacacgatgaccgggagcaacgggcggcagtatgcgcacgtcacactggaagagccggttgcgggcagcatgagcctgaaagctggtgacagggtgtggacggtgtgtgacaaagggaatctggttccggcccgtgacagcgccacccgtccggcgtggtggtcgcagttcctgccgccgtcacgcgaaaccgtgcggtttgatacggtggtgtgccctgtaccttacccgattaaggctggggatccggtggggcatctggggtattttcaggtacccagtgaggacgggcatgaaaaacgctatcaggtgcatatcgaatgtctgacaacagacgacctgccgcgcttcctgagcaacccggaaggcgtggggcgtgacacgcccgtctttgcccgcagtccgaaggacattccggtgtacctgcaattcagcggcggggaaatacagaagggactgataaccacgcagaccgaaacggtgatggcgctgtccggtcaggcggtgacggacaaagaaggtaaacgctactggccggacgggtcgtcgcgcgggttgctggcggagttggatgtgcagttgctgtcccggtatgacctggctggtcggggttttgagacgacagaagacagcccggtcagctttgaccatctcgacgggaagacgcagccgaaagggttggtgaagacgatttttgaacggtttttcagcgtggctgacaatgacggtaaaccctacagcaaggctgtagcatttaactatcagcagttgctggacaagattgacgacgcgaaatccccccgctataacccggaacaataccggcgtgcggtgcagaacccgtcaatgcgtgaccacctgtaccggctgtgcgtaaagcaccccagcgattggtactactcgtcggaaactccggtgtggaaagcgttctttacgccacagctgaaaagagatgcgccggagtggtatgcctacagcatgaagttcctgacggacatccgctggatgtaccgtgtggcagggatggtggaaaatccatggcatatgcatccgctggtttttctagatgccattaataagattggtatcactctcgatgaagccagagttcgggcatttatgagaatgattcgagtcggcgaagggactgttggtgaggttggatatgaaacattgtttggtaggaagtcattcataaaagattatcataaaagttttagtgatcatcctaatataacaatcaccagaggcccattaaaatcttctgcggctggagcatatcaaataatgggttatacatggaatgatcctaaaatgctgtcttatcgcaagaaatatgggattggcgatttttctccaaaatcacaagatgagttttgtgtgctaattcttaagtataaaaggaagggggctttagaacttatcattgatggtgatattgatggggctttagatattttaagctacgaatgggcaagtcttccccctgctagatatcctcaaccaacgaagagtaagagtgaagttatgtctctatacaataagtatttattagaagaaatctcaggggaaacagatctccacctgtcaatcggctacataaaacaagtttataatggtgtgtaa

SEQ ID NO: 160194 - DNA, 276 bp, Enterobacter cloacae
atgcattcaaaaaaaatcacctccaaggttattgatgtttttttcgacaatgcattagatcttgggcaagggggcatggggtttaactgggaggaggttgataaagcaaaaaaaatagccgagttaacatattcaggtaataataaatggctgatgaaatggtttggtttttgggatgcgaaaaaacagacaagtttttgggtgaaagagcctgattttatccagtcgcatgcaaagaatgacgtcatagcgatgataaaatgcgaagaacagtga

SEQ ID NO: 160195 - DNA, 567 bp, Enterobacter cloacae
atgacgattaacgtgaaaaaacacacgccgatatttctttgttccgtcctgatgtttacctgtctcggcagcaatgtggttttggctcaggtaatgcctcccgttctgacaaaacgggatttttctgtgcagatcaaagaccagcctgtcgcattgggcgaccgatggtctcctgatagtgccggtaaaattgatgtgccgttggaaggcaactttgtcggtgaggttccttttgacggaacgaactataaattctaccagcatcaaagggctgggttagaaatattcagttccaatctctggtgggataaagctgaacgaagcgttgatgattatatcgtgtcgcagattacgctgactgccgaaaacttcgcaacgccgcgtggtgtccatgtgggttcaacgagaaaggaactgaacagcgcatacggtaccggtcaggtcgacaatgatgcgggggagcagtggattacctacgaattggataaaaaagtgctttcttttgagataaaaggcgggaacgttataaaaataacgatgaattacaacaataattctcaagaatga

SEQ ID NO: 160196 - DNA, 255 bp, Enterobacter cloacae
atgatgatctcatatcaggaacttgttcgcaccttccctagtagaattcaactttcgtttgcgctgtcattgaaactggtttcggcgccggattacctgcgttctgtactgtggcattacatatttcaggcacaagcatttcattataatgacaagaactggttgctgtataaccctccgagaaaactgatgagtttattagtttataatcaagaggctttctttttttatcaacataagatatttcatttttag

SEQ ID NO: 160197 - DNA, 489 bp, Enterobacter cloacae
ttgtccagcattacattgggtaaagggaaatgcatttacatctccaaagttgaggtgtctgcgaagtttgcttctacaagtgtaaagtttggctatgatgccgaaacacaagaatcctatgatgaagacctgttggatctccaggctgaatgggagaaaaacgggtatattgagatttatgacagtgcagttcatggatcgcgcgcggtatacccgttagctaaagattctaacaaaacacagggttcatctccgcattacaccgggttgtaccatgcacgtttgttaagtgatagtagcccagaccctttagttattgtgacctttcaaggggctacgatagaccctgaacgttacgaaaaggctgtcatagaggcgatgatctatcatgaccttatgtttttgcctaaggttaaaggtaagaaagacgctgaagatatgaaaattcaaggtggttgggttcgctcagtacttgaagataaaaattaa

SEQ ID NO: 160198 - DNA, 174 bp, Enterobacter cloacae
atgaaacacactccaacacaaaaagaaattgttgaaattctgaatgatgcccgcaaaagtgggagtgttcatttgactggctctagagatgcacgcaaagcacagttgcaggctctccgccaaaaagatttaaccgaggaaggttatcaaattgtccagcattacattgggtaa

SEQ ID NO: 160199 - DNA, 351 bp, Enterobacter cloacae
atgaactgcatactgccgttacaacgtggcttcatcgcgatactggagaaacaccgtaagccaggagaatgcacccttaacttccgctcaccggattattcgccagaaggtggctaccgcccggttgaaatccgtctggtcggcgaaacgctggactacgttaccgagttcgcctacttcggtgtgtggcctgaactggagaagtcgctggatttcgatttcgggcagggcgttggcttccagtcctatgtaggttgtaccgacatccggcgttaccgtgagctgttccagctctggcagcgaaacttcatcgcctactatcgggcaggcgtctacgaggtgaaatcatga

SEQ ID NO: 160200 - DNA, 432 bp, Enterobacter cloacae
atgcacgacatcatcaatcaggcccgagagctattaactcaacggctgtaccgtaacgaatcgctgggttcaccgagtgaaaccgaaagctatctcgccctccagcttggcgatcgtgaacaggaagtattcgccgtcatctttctcgattcccagaatcaggttcttcagtataaggaaatgttctacggaagtatcgcgtccaccagcgtctacccacgtgaaatagcccgcctagcgcttcgtctgaacgccgctgcggtcatctgctcacataaccacccgtcaggctatcctgagccgtcaggggctgacagagccattactgcacgtataaaggacgcgatggagctgattgaggtccgggtactggatcacatcgtcgtcggtggcggacagaccgtatcgttcgccgaaagggggtggctatga

SEQ ID NO: 160201 - DNA, 702 bp, Enterobacter cloacae
atggattggcctaaggagtacagcaagactactcaagcggtacgagaggctgcatacaagcagtataaggttgaagcgataaccaaaacgacgcttttaccagggcaggaaaaaattggttatcaccagcagccattaacgacggactattaccttttcctgttcaccaactgggataatcctgaatacaccgggtattttacatgtgggcttcatgcagcaaggggatggtttgatctgaatggacagctaccagaggatattccatcgtataacccccttactggcgagccttcggggggaggatctggcagtggaggttcaaaaccgtcaaactccaattggaatccccaaatgaagcgtctcatcagagtactacagacatttatctgcctgactgatgataacaaccggaaaattaaaggggagccgaaaacgctgaaaatccttcagacacttgtaaaagcatcaaataacgcaccagacacatcaaatatacgatccgttaatacaaccctgagcaaagcgttaaaagatggtcgacatggtggagccaccactttcacacaaatggtggagcatttcgaaacatcgctcggtgtcagcttcaagaagatcgatgttgatgatttcaaccaggaaatagaggcgactcgtaataagtctgaaagctactcatatccctatcctgcatcattctga

SEQ ID NO: 160202 - DNA, 2625 bp, Enterobacter cloacae
atgaatattgaagagcataatgaaaatgcacttgcggaagcattacagctaggaatagatcatggaattgtcgcagagaatgcagaattaaaggcaatcgatacgaattatcccagatgccaggatgtttatgataagccggggcgtgcaagtggttatttaaaaatactcagtgatgaggaagacaggattcactggatattagtcactagtttccacgaggatttaggtgagacaatttggcgaagtaatggactaaatgccttagagcctgataaacaagacgcccgagttaatgaattaaaaaagattaaggaacagcgaataaatgaaaaggctattcagttagtcgagaataggactgagttagctagatatttaaagtctctcccggtggtagcacaacacccttatttactgaggaaaaaaatttcaggtaatgaccttttaatggatggtagtgcattaattatccctattcattattacggtggtgagtttgttaatgctcagcgaatatggcctgatgggtctaaacgattctttaaggattgcggcaagaaaggtgcctgtcatgttattcagggtgatgacagcaccattttaattgctgaggggtatgcaacagcggcgtcctgcttcgatgccacgggatatacatctgtcatggcgatcgactgtgggaatatctattcggttgctgagtctattcgcttacatacaaaggcaccaatcgtcattgttgccgataacgataaatataaggagaagaacgcaggtgtagaggctgcgaaaaaggttgcaaaagcatttgaagggatatccgttttcatccctgaatttcaggacgagacgagtaaacccactgatgccaatgatctgatgctgctggagggtatgggcgagctgaagaagcaactggggcccgttatcgctcatgcaagaatgggaattccatccagctattctttctcgaatggctggctgtgccagaagcgtgagtcggaaaagggaagctacaacgtaaaggttagtactgctatttatcctgtcgcgttgtcacgtgataaggcgagtgaagactggggattagtccttcagtttgcagatatggataactacgtgcatcagtttgcgttgccgagggcggctttaatcaaagaaccttctctgatgctggaacccttagtttcgcgaggtctgcactatgatccagctgaactcagggcgctccagagctatatcaacacggttcagcctgtgggcagagcccggagtgtatcccagacgggctggtacggtaatgtttacgtacttcccgacgaggcgataggtgcgtcaaaggagacggtaatttttcagtcggttcttggggcccccgcaggctatgagcagttaggtagtttggaggactggcagaaaaatatctctgctaagtgtgtcggtaacagtcggttagttctgatggttgctgccggatttggcgggccgctgctggaactggacagctcgctggagtctggcgggtttcatatccgtagtgagagcagccggggcaagtcgacagctctaagggtttgtaagtcgctctggggggccccggataagctagtaacgtggcgagccacatcgaacgggcttgaaggtgtctgcttcgctcataacgacgcgacgctagtgatcgatgaattgggtcagatggcagatgaaaaccccacagaggcagctcagacagtctatatggttgctaatgggtcgagtaaacagcgggcaaatcgaacgggaggcgcagcagcaattaaaacgtggcgtttgatcttcatgtcagcgggcgaagtatcgctgtcgaacctgatggagcagcatggcaagaaggttaaagccgggcaggaagtgcgttttatcgatattccggcagatgctggtaaggggttggggctattcgaggaactccatgattgtgccgatggtgccagcttcgctgaggccctgaaccgtgacagtaagagcttctatggcacggctgcccgtgcattcctgcggcttcttacggcggataaggctggattcaccacgaggctaaagagtctgatggctgaatttcttgcctatgtgcctgagggagcagatggtcagatcaaacgtgccgctaaccgctttgctctcgtggctgctgctggtgagttggcccgggagatcaccggatggccggaaggtgaatcttcccgtggtgttaaggcctgcttcgatagttggctggccggacgtggggaaggctcccatgaatccaaccaggcccttgagtccgttaaggctcagctactaaagtggggagactcgcgttttaatccgctggtaaatggcccgtcttggggcgtaaaaaatggttcagacttctgggtatatccggctgctttcaaggaagatctgtgccatgggttggatcaccgtaacgtcgctaaggttctgttcgaaaaaggttatcttccaggtacagcctcagtaaccaaacgtatgccagatggcaggacgtgtaaggtctatgtcatttcggggaggctgctgggggatgaaccagagacgccagagccagcacagagtgacgaaccaccatataccgtgtaa

SEQ ID NO: 160203 - DNA, 246 bp, Enterobacter cloacae
atgaccagtaacaacgaaagcttcaggcagaaggcggctatctttagccagttcacgtctgttgaagagaaatgcgaatacgtttacgagttgcttagtgagatctgccctgttgaagatggtcatgccacatacagcgaagatcatgactgctatcagttcttctccgagggctgctgctgtgccatgcgtcttgtcatgagcccttacggagatatcgagcacttcgaattcggttgtaattaa

SEQ ID NO: 160204 - DNA, 804 bp, Enterobacter cloacae
atgtgtgaggaagaagatatttaccagccaccagatactgaagatgacataaggaaataccttctagaaaatttttacatgcatcttcagatgatcgataaccaaagaccatatgcgatagaccacaaatttccccctcttgttgaaaagtatgaggatgatatttctgcgtatgtagcatttccatcaacagatgatggtattgatcccggcagaggtattcctttatttgcagcaaaggctgcccttgatgtggttatcaagtttttagacaatgattgggagctagatggcaaaatgcggaagtatttgtcatcgagatttaaaaaggcaattgatggaggcggtgagagtttacagtcactatttcatataagaaagagtgatagtgatgatatgaaacacacgcaaaaactaaatataggtgagtacatagtatttagaatgcgcttgcatgaacgagttaaaaataatcttaaatcggattatagaaccaagaaagtattctataacatgatttgtgatgagttgattagcatttataaaatcaagtcccctgaccaagcaaagatgaaaagatatgctgaatatgcacttgtatacctaccatttatggtctatgcaaggggatgcgattttctgtgtgcatattcaaaatgcctcaaggaatattggagatattcacaaaaagaattgagcgactgtaagggcaatgagaaaaaaatagctggtttgaagaaggctagaatatcgactcttgagtggataaaaggtgaattgaagacacctaaagccaatggttaa

SEQ ID NO: 160205 - DNA, 1686 bp, Enterobacter cloacae
atgaaaaaaccaaaagccttctcctacgttcgtttcagcacgccaaagcaagcgcaaggtgacagttatcgccgccagattcagcaggcacaagattactgtgcggctaacgatctcgagctagaggacaaaacgatcgaagactttggagtcagtgcctttcgcggaagcaatcgcactgatggcgctttgggccgtttcattgatgcagtaaaatgtggggaaatcgaaaggggatcttatctcttagttgaatcggtggatcggctgagtagacaagcaattgaagacgccctaacgcagttcttggaaattgtgagagaagggatcgtgattgtcaccctatcagacaatcaggtctttcgcagcggtgaagtggatttcacaaagctaatcgtttcgattgtctatatggctcgtgccaacgatgaatctgaaatgaagagtcgacgtagccgtgctgcatggtctaatggacgtcagcaagcgagggacaataacaaagtgatagctaactcccgtctcccttcatggctgaagctcgaaggtgacaagattgtccctatccctgagcgggtcgctatcgtgaacgaaatgttccaaatggctagatcaggtcaaggttatcaacagatcgcgaaggttttcacagagaacgactacaaaacatttgggcaaggaaaggtatggcgtccagctggtatccagtcggtgattaagagccggaccgtaatcggtgaatttcagcctcatgtcattgtcgaggggaagagggttccagagggtgagccaattcttgattattatccggctatcgtccctccttcaatctttgcagaggtgctacatattgtagacaagaggagcaaccatagtggctcttacagaaaaggtctgtacaacaatctttttagcggggtcatccgttgccagtgcggtgaactgcttcgcttccacaacaaaggtagcaggggacaggttcgtaattatcttgtttgcccaatggaaggcgtaactggctgtcagttgccttatttgctgtacaacaagattgaacctcagcttttgcaagctatcagcaaattatcagttgttatgaagcaacggatacctcagacggagaaaacatctttactgaaagatgggcttgccgtattgcgtggtcagttagaaatagagactagaaaaagcaaaaaggccgctcaggcaatgctggagcttgatgatgacgcggttttccgttcgttgtacgaagaatgcaaagcgaattgtcaatctttggaggagaaaatccttcagattgaaaatgagatcgtggggttagagctatcgacccgaaccctctttcagcttctcagtcctgaagatttgagtaatacagaacagcgtcagcggttcaatagccagctaaagctagctgtcaagatcgagtttatttacgagcattccgggctggtggctgtaatcaaaaatcttgaggatgaactcctgttagagcaggcctttggacataagctgatgaacagtattgtccatgattttgaagggcatgttgttgttaaaactatttctgattccccatatattgatcctagttgggcatatgaggaaagggaagagtacacaaaaggcatcagtgtagaatttgatcagtgcggtgactttaatatcgacaattttaagtga

SEQ ID NO: 160206 - DNA, 891 bp, Enterobacter cloacae
atgacgacgcttaatctgggctatctcgccaccttccgcctggttcaccagcgcggcagcttttcagcggcagcggacgttctgggcctctcccagcccgccgtcagcctgcaaatacgccagctggagcagtttctgcaaacgcggctggtggagcgtaccgggcgagggattaaggcgacggctgccggagaaaccttgctggcgcacggggagcgtattcagcaggtggtggatgacgccatccgggccgtgaatgcgtttagccacgacgtgagcggcaccattacccttggcacgggggcgacggcctgcattcatcttctgccgccgctgctggagcagctacgccgcgactatccgctcctgagcgtgggagtcacgacgggcaacaccctcgacatcgtcagggccattgaagagaaccgtctcgatatggggctggtgaccctgccggtcagcggcagagcgctggacgtcatgccggtgatggacgaagagtttgtctttatcgcctcaagggagcagcaggacgctttcagggagttaaccccggaggcgctccatgcccagccgctgatcgcctttgagacaggcagcgggacccgggcgctgatcgatggctggtttgccgcccatggggtagcgatggcgccggtgatgcagcttggcagcatcgaggcgatcaaacgcatggttcgcgcggggctgggctacagcatcgtgccgcgaatggcggtagaacaggatgccgatcgcgaggggctatgcgtgatgtcgctgacgcccatgctgcagcggcagctggcggtggtgatgcggcaggataaaatcctcagcaaagggatcgcggcctttattcggctcgtacagcatccttcggggggttag

SEQ ID NO: 160207 - DNA, 966 bp, Enterobacter cloacae
atgaacgaagttgaattgatgtcaatagttaaggatgttatcccaaggaggtatgagatctcaagaggcgttattgagaatgcctgtggagaacagtcaaacgaaactgatagtatcatctatgataatgaaatattaccgccatatataaataacgatcttgtctttgtgccagttgaggcagttaaatataattttgagattaaaacaactttgactttaaaagagcttgaaacaacaattagtaaatttagacggtttcaatcaatgggtggcaagtctcctactgttcttttttcattctcaagtaatgccaagcaaagcgaattggcacgatattatggtaaggattgcaacttcttaacaaatccagcaattagtgtattctgtgtctctaataagtgttattattacaaacatacagaaattaaatatctaaaagattaccttagtaattcagatgttcttgaatcattctataagcagtctgaatttacaacggatgaagttttgtcctctttgcaggagatattgcgtaacgatgttatattatcaaatttaactagatctcagtttgcacttctgttgcaaagcgctataaatgcaaagaatagtttttctgatatggatagtaaaaatttaaccataaatggaatttcatttagcgaaataacttttaaaattcacaaatggataggtgttgaatgcagtaatgatgatgttgagctgtcatttttttctggcatatcgaatacgttgtctaaagaaaagtttggtaattatttgctcaatgaacgtgtactggatgtcaaggtcttctcagtgtgttatgaggatatgtggggaaatataagttgtcaaaagtttgattgggatggtgtaattgataatattgatgaagttggtttcagttttcagagcaatagtgaggaaagtaaaataatattttcctttaaagatgcttag

SEQ ID NO: 160208 - DNA, 333 bp, Enterobacter cloacae
atgtcagtagaagacctcaaaacgattgactgtattggtataccgatagacgctgctcatgaggtgaacctagggatttctgatcatcttgactgggatgtctcttttgatgagcatctgtatatgcttcaggaaaaaataaacacatacctgggttttatcgagtcgggagaaatctatcaaagttttcctcctgctactcaaacgacaaaaaaagtcattgaaattttttttaaacatcaaccgccatctcgagcaaatccatttctaaatcatgtcactgattacttaaaagaactgggcatcgaactgacaatgaaggtagaagaataa

SEQ ID NO: 160209 - DNA, 636 bp, Enterobacter cloacae
atgatgatctcatatcaggaacttgttcgcaccttccctagcaagttgtttgaacaaacatgggaaagatctaatgatgatcttaaaaaaacagcgggggaaagatatcactcatttatgctggagcccgaatcggatacaagtgaggataaaggagcaaaaataagaattttagagactttagtaaaagttaatggtgtgaaatttatacctgatgctgctagggcaagtttatacagacatgcggttaaacagctagctaaagctaaggatacatcttacggctggaatgatgaagaaagagcagccaaggcacttatacaatttggacctcatgttccatctattgcttttgaagatgtatatcaagaaatacttactgtttgggtggggaattactggggaagatctgatgcacatttagtacttcaaccatttttagatgtgttaaatagtaatcaattgatggctctctcacggttgttcgtggagaatgaaagagcaaattcagaactggtgtcaccaaggcccaaaagaagagcaatagaattacttgagataataaaaaataatctaacaattcaagcaagcattgatgaaattgataggatcatttctgaaattgataaaatgtaa

SEQ ID NO: 160210 - DNA, 1455 bp, Enterobacter cloacae
atgtttgatcaagcctttaaaaatattgacgatgccctgcacaaagagtctggctgtagttcagaactggattataccgaacagacctcatggttactgtttctcaagtatctcgatgggcttgaacaggacaaagaaaatgaagctttgctggaaggaaaaacctacacacctatcctgtcaccgcgctatcgctggtcccgctgggctgctcctaagggggcggatggcaagattgaccacaatgttgctttaacgggcgatgacctgatcgaattcgtagacaatgatttatttggctatctcgaaggttttaagcaacgagctagtggcccggataccatcgaatacaagattggcgagatcttcagcgagattagaaacaaaatccgtagtggatacaccttacgagatatcatcgattatattgacgagttacgttttcgctcgcaggttgagaagcacgaactctcagctctctatgaagagaagatcaaacgaatgggaaacgccggacgtaacggtggtgaatactacacacctcgcccactgattcgtgcaatgatccaggtggtcaagccacgtattggcgagcgtatttacgatggtgcttgtggttcggctggcttcttatgtgaagcccacgattacttgtcagcaaagccaaatctcactaccgccgatctcgataccttgcaaactcggaccttctacggcaaggagaagaaaagcctcgcctacgttatcgccatcatgaacctgattctgcatggaatcgaagcgcctaatatccaacatactaatactctggccgagaatctggcggatattcaggaaaaggatcggatggaggtgattctcgctaacccgccattcgggggcaaggaacgcaaagaagtacaacagaacttcccgatccggactggcgaaacagcattcctttttttgcagcactttatcaagatgctcaaagtcggtggtagagcagccatcgttatcaaaaacaccttcctttccaactctgataacgcttcagtggctctacgcaaattactattggagaactgcaacctacatacagtgttggattgtccaacaggcaccttccagggggctgtcgtgaacactgtggtactattttttaccaaaggcgagccaacccgcaaggtatggtactaccagcttgaaccaggtcggagtcttggaaagacaaatcccttaaatgatgccgatctggcggattttttgtccctacaagctcaatatgctgattccaacaagagttggagtgtggatgtatccacgattgataccacctgctatgacctatcggtgaagaaacccagtagcggcgaggtaattgaacatcgtggccccctcgaaatcatggatgagattgccgcattagatgcagagagtgccatgatattagctagccttaggggtttagtatga

SEQ ID NO: 160211 - DNA, 1203 bp, Enterobacter cloacae
atgaaagcagggtggttaactaaaccgatgagtgagattttggagaaaacagaaacaactaatccgacgatctcaccagaaactgagtttttttatattgatgtatcgagcgtatctaataagactttcagcattgaaaatgttcagctattgaaaggtaaaaatgcaccatcccgggcgcgtaagttagtaaaggaaggtgatgtcctattcgccactattcgcccaacgttgcagagaatcgcaatagttcctgaaaagttagataagcaagtttgtagcactgggtacgttgtattacgaacaaaacctgaagttgatagccgttttgtcttttactcactactgactgatgacttttccaacaaaatgaaagcattgcaaaaaggagctagctatccagcagtaactgatggggaagtacgatcgcagtacatatctttcccctcccaagttgaacaacaacgcatcatcaggattctcgatcaagcatttgaggcaatagcagctactcgaatcaataccgagaaaaaccgccagaatgtccgtagcttgtctgaaagctatcagcaagagatatttagtcagcgtaatgacggatggatcgaaaaggcattaggtgaaatggcaacttttcgcaatggcgttaatttcaccaaatctagtaaaggtgagtcaatcaaaattcttggagttaaagacttcaaaaaccattactgggctcaactggattctttagaatcaattatccctgacggcattcttcctgaagcagatactttacagcagaacgatattgtatttgttcgttctaatggaaaccctgagcttattggtcgatgtctattaattggcaagattcacgaaaggacaactttttctggttttaccatacgagctcgacaattaactaaagaaatcctcccccagtatttatgccattttttgaagctgccgcatgtccgcagagagttagttgaaggtggcaatggtgcaaacattcgcagcttgaatcaggggaccctatctcgactgcgtattaatttccccacagagataagtgaacagtataggataattaaacaattagaagccatacaagcagagactcaacgccttgagtccctttaccagcgtaagattgacgcactggatgaattaaaacaatctcttctacaccaagcattcagcggaaagctataa

SEQ ID NO: 160212 - DNA, 1854 bp, Enterobacter cloacae
atgagcaaagacgaccacaagattgatgcagatgaccgttgtgtatttgaagttttgaacgagcgaaaatacacggttgactacttccaacgcgaatatagttgggaaaaaaagcatattgagcaactggtgaccgatctgagctctgcttttcttaccgcctacgaggatggtgatgctaggtctgaggtcgaacattataacaattattaccttggcccatttgtcgttgccagtaaagatggggcacgcagcatcattgatggacaacaacggctgacatcactcacgctcctgctgatttatctcaacaatttgcaaaagcagaacggtggaaaagagtccatcgagcccatgattttctctgagaaatacggcgaaaagtctttcaacattcaggtagaagagcgtaaacgctgcctggaaaaattatttcaggaaggtcattacgaagttcgggaaggtgatgatgaatctactttcaatatggtggatcgctactgcgatatcgaattagctttcccagaagagattaaagctacagcgtttccttattttttagactggttgaaatacaacgtgattttagtcgaaatcacggcctattctgacgaaaatgcatatacaattttcgagtcgatgaatgatcgtggcttgaatctaactgccactgaaatgttaaagagctacattttatcccgtttgcccgatcaaaaaagccgtgataaagccaactctttctggaaagagtcgatccagaacttgcatctagaaagtaaagaggaagacctccgtttcatccaagcttggtttcgtagtcaatacgcagatacgatcagacagagcaaagctggctcatcaaatgaagattttgagaaaataggcacacgcttccataattggtttcgcgacaacattggtaaagccaagttaaaagccaactcggtggaagacttccaaaaattcgttcacattgaaatggcattctatttggatgcatatttgaagatattagaagcgcaaaatgaagaaaagcttggttgggaacaagttttctaccactacaactggggtattgccgactcattaagcttaccattaatgttggctccgctccgctcgtcggacaacggagaaacggtaaggctcaaaataaatctagtagcgaaatttctagaaaccttttccgtacggcgagccatcaactttagaaactttggtgccagttcgattcgctacacgatgtactcgctagtcaaggacattcgtggcaaaagtattgaagagttgcattcagtcttaggtaataagattgaagagatgcaagaacaatgggaaggtatggctcattttcggttacacggccagaatcgctatttcgttaagttcctcctttcacgcgtgactgcatatatcgagtcacactcaggtcttaaaagtaatttctcgacttacttcattcaagctgaaaactcaaaaccttacgaagtcgagcacatttgggccgataagtttgaagaacatgtcgacgagtttgatcagaaacatgaattcgacacttatcgaaaccggataggagacctactcctcttacctcgtggcactaatcaatcttacggagccatgtcctatgatgagaaagtcccacactatctgaaagaaaatctgctggcaaaatcgttgcatccacaagcttacataaacaatccgaattttttatctatggcagtaagccaaaaattcaaatttcaatcacatgaaaaattccgaaaagctgatatagatgaacgccaatggttaatccagcaaatttgcgaacagatttgggcatgggaagataacagtcatgaatga

SEQ ID NO: 160213 - DNA, 2427 bp, Enterobacter cloacae
atgaatgaagctgaaactagagccgaacatatcgatcccatgctggtggctgcaggttggggtatcgtccctggaagccgtattcgccgagaatacctcatcaccctgggacgactagaaggtaatggcaaacgtggtaatgcgctctccgccgattatgtactggaatatcggaatactaagctagccgtaattgaggccaaagcttgggacaagccgctcacctccggggtagcacaggctaaagattacgcgagcaagcttaccatccgctatacctattccagcaatggtcaaggtatctatgccatcgatatggaaacaggtaaggagaaaacagtcctcagtttccctactccagatgaactatggcaagccacttttgtgctgcaaaaccagtggtgggatcgctttactgccgtgccctttgaagataaaggtggctattggcaagggcgttactatcaagacatcgctatcgagcgggtgttgagagccttagctgaaggacaagacaggatcttactcaccctagctacaggcacaggcaagacatttatcgcatttcaacttgcctggaagctattccatagtcgctggaacctcaatggctggaaacaagaggaagaaccaactcgccgtccacgtattctatttctggctgatcgcaatattcttgctaaccaggcgttcaacgacttctctgcctttcctgaagatgctttagtgcgaatctcccctgatgagataaaaaagaaagggagagcaccgaagaatggaaatattttcttcactattttccaaactttcatgactggcacaaatgccgagggcaaaccatccccggtatttggtgactacccgcccgatttcttcgaccttattattattgatgaatgtcatcgaggtggggccaatgatgaaagtaactggcgagacattctcaactactttaaaccagcagtacaacttggattgacagcgaccccaaaacgaaaagataacgttgatacctatgcttattttggcagccccgtttatacctattcactcaaagaagggatcaacgatggcttcctaacaccatttagagtgcgccagcacgccactactttggatgaatatatctatacatccgatgatcaagtcgttgaaggtgaagtggagcgcggccgggtatacacagagaaggattttaaccacgttatcgaaattacaccccgggaacgtaaacgaatcgaaatattcatgcaggagatcgatcagagccaaaagacgatagtattctgtgcaacccaagagcatgcattggctattcgcgaccttattaatcagattaaaaaaagcagcaatcccaattattgccaccgagttactgctgatgacgcagctctaggcgaacaatggctacgagagtttcaggataacgagaaatcgatcccgacaatactgaccacttcacagaagttgtctaccggagtaaatgcccgcaatgtgcgtaatattgttcttatgcgcccgattaattcaatgattgaatttaagcaaatcattggtcgtggaactcggctatatgatggtaaaaactactttactattcatgattttgtgaaggcccatcaccactttagcgatcctgaatgggatggtgaacctttgcctccagaggagtgtgaagtctgtagtactagtccctgctcatgcgaaaaacccactgcaaagatatgtgcagtgtgtaaccaacgcccatgtgaatgcctaaaagagccgacgtccgaggatcaatgtcaattgtgcggtaataaaccttgtagctgcgacaagaagacaaaaatcaaaatcgagctggcagacggcaaggcccgcaaaatacagcatatgagtgcaaccagcttctggcacccggatggtactccaatgtcagccacggagtttatgggaaacctgtttggcaagctcccggagtttttcaaggatgaggatgaactccgcactatctggagtgaaccgagtacgcgtaaaaagttactcgatggtttggcagaaaagggatttggcgctgagcaattgactgagatgcagaaagttctagaggctgaggaaagtgacttgtttgatgtcttggcgtacgtagcttatgccagtgaaccattgagcaggcaagaaagagccgtccgtgccgaaacaatcattggcaaggcatttaacagcaagcaacatgctttcctcagttttgtactaggccattatgttaaggaaggggtagctgaactggatgagaccaaactgggaccgttactcaagctcaaatataacaatgctctagccgacgcatttgccgaactaggctcggcagatgtggtaagggatacttttattggcttccagaaatatctctaccaagggggtggcagggaatcgttgtaa

SEQ ID NO: 160214 - DNA, 600 bp, Enterobacter cloacae
atggtacttaaaaatcgccccgaagccctgtcacttctggctgctgtgcttgctctcgctttcatcggttacgctaaaggcatcgtgggctatgaggtctggacgactgatgcgggctacagtttcggtttacaggttttgctaccccgaattggacttattatcagtggctttattggtgcatgcggtgcattcactattgcaaataaatgcagccagtctgaagatgagctcagtgctgtatataagctggcatccgtcatgatgttcatcattggtgctggcctgctgatctatggcttctggaactggaaaaccgattatcagataatctacagcatattcgggcctgcatttgtcggaaacggaatgttcatattcatacacaagctaaaatggcttaaaaataaggtcgcctcaatgtctttcgcagcgatactgctgatactcgctttcgccgtagcaagcataggcaggccgtctccgtttgacgtatggcagtttgtggttgtcctgaatggaggtactggcttattcatattgatggcgactatgagcggaagtttcgttatgaattgtctgctacatcagaaaatatga

SEQ ID NO: 160215 - DNA, 345 bp, Enterobacter cloacae
atgaatcacgttgcactaataacagtgttatcgcttgttatggctgttagtcctcacgcaagagcagaaaataaagtaatggatataacgttaatctgtgaaaacagcataaccgctgatattcattacgcagatgagcaaggctttatcgacattaactcaccagatggcgagcgaaaaatacgcttacacaaagcagatattgtcgataaatattcaatcattaccttctacgacggctcagcactggcaaaagtcatgtttatgaatggtagtaagttaaaccactttgaattacagataggcccacatggcgagcttaatacgtgcaaaggagtcaggtaa

SEQ ID NO: 160216 - DNA, 549 bp, Enterobacter cloacae
atggctactatcggatacgcccgagtgtctactgccgggcaaagtctggacgcacagctggcagcgctgtctggctgcgagaagatttttcaggaaaaaatcagcggagctaaggacgaccgccccgagcttcaggcaatgctcgaatgggttcgggaaggtgacactgtaaatgtaacgaagctggaccgtctcgcccgcaatactcgccatctgctggaagtgtcggaataccttcaaaggaaaggcgtggcgttaaatatcctcaatattggcatcaacacggcgacaccgaccggaaaactcatgctgactatgattggagccatcgccacatttgaacgtgaaatgatgctggaacgccaggctgaagggattgccctggcgaaaatcaagggcaggtataagggccgcaaacccaccgcccgcaacaaatcgaaagaagttatcgacatgctggctcaaggggtaagcaagcccgaaatatcccgtcagttagggatcggcatcaccagcatttaccggatagtaaaaaacaaaccaagctaa

SEQ ID NO: 160217 - DNA, 828 bp, Enterobacter cloacae
atggctaactcatttcgtcaaatgacacgcggcggcgttatctcccgcactgacaatggcatgtttatccatctggatgatattcacgtcaaaccgggctttaacaagcgcctcgatgatgaacgtacacgccaggccgatgacgatctgttccagttcctgatgaacggcggcagcgttccaccgcttgaagtgatttcccgtgatgaaggcggagtgtggattgttgagggtcaccgccgacaccgttgttatgagcgctgccgtgaagcaggaaaaccggtaaacaaaatccacatcgtccagttcgtaggcgatgacaaagaacgccttgccaggatcctgacctccaataaccagttaagcctttccgagctggaacaggccgcggtggtaaaagagctggcatcggcattcaatcagactgtggcagaaatagccgctctggtgaacaagtctgaaccgaccgttcggaacctgcttaccctggctggcgctaaccatgacgtgaagcagaaagtacagtctggagaagtaacggctggtgcagctattgagcgtgtaaaagagttcggtgaaaaagcgggcgaagtgcttgagcaggataaagccgtagccgctgccgctggaaagaagaaagtcacccgcagcgttatagcccctgaaatcagcgtgaagaaagcccgccgtctggttgagctgatcacccttgccggaatcaacgagagcggcgctattaccctttctggcgagttattgaatgaggtaatggaaatcatcaacgaacaacgtgatatcgaagcacagcgcagcagggccgcagtatga

SEQ ID NO: 160218 - DNA, 561 bp, Enterobacter cloacae
atgagcaaccgcactattgatttagcaaacgaaattagcaaagttcttgctctcggcgaaagcggcgatattgatgcgcaaacccttgctgatacccttgaaggtatcgaaggcatgattgaagacaaatttgatgccacgatgtcagttattaaagatttcgaagctaaacaggaagcctgtaagaaggaggcaacccgtttgaccgaaagagcaaaacactggcaacgtcaggccggaagtcttcgccaatatttacttgagtgtttgcaaacctctggccgtaagcagtttaaatcaacccttcatacctattcagttaaaaaggggtcgatatctttaaagatagtcgatgaagatttaattcctgatgaatttgtggagtccagaacagaggttattcacgacatacagaaggataaaatcaaacaaatcctgactgaagcgttaaaagccattgaagatttacgcgaaaaaggagaacaggtgccaaaggaacttttaaacaaagtacctggcgctcaggtagaacgtgggcctgagtctctttctgttcgatga

SEQ ID NO: 160219 - DNA, 2373 bp, Enterobacter cloacae
atgactgaccagaaaattttcatcgcgggatatttccccgatgaagaatcagaaaaggcaggtattaagcgtgtcgctaccgccttcaatgctaaggatattgaacgcgctaaagctaaagcgaactttatcttcctggaagagtatgaacatgctcaggatgcagcatttaaaatccttgtgtgtgaagacactccagatgttcctggtcgtccttctcgcggaacatggaatgaagaattcctttacgaatacgactggcctaaagacgtcggccaccctgtgaaacgacaggctgaaaaggtcaatttcgacaagctctccaccgttaccaaaattgccgttctggtgaagtacgactctaccgagatcactaaagcggatctccctgccgcgctggaacttacccaggacgaggcgaacactttcgaaggtcatgttgttgaggctatcagcaagatgcctgaaatcgccaatatgtaccccgagcgcattcagcacgtcatcggctgggtcggtgccaagtgcgatcactctgcgaaatggcctgagatccagaaagaaattgcagcctggcaaaaaaggcaggatggagagcgcaaacaaaccggttcgtcaaaatcggtggtggatatcgctcgcgagaaagccgcggctgaaaaaatccgtgtgcaaaatccggctcctgttcaccttcaggatgaagaatctttaaagcgcaatattgccctgggcctggttgctaaggcgatggatttcgacatcctcaatcctccggcgagcattgttaatcgtgcccgcgacatcatcaagctgaaagagaaacccttccctgcatggtttgcagcaatgagcgcgacgattggcatttacgaatactcaaccgtccagattatctacagcgtgaaaatctcgcctgaagatatcgacaaaactgccggctctattcaggcacacatcaaccgcacgtttaccgaaactgaccacgccaacccgtcagctgaaatgctggccatcgcctgtggcatatcgaaaactgaagagggaaaaagcaatgggaccgaacagaaccaaacgggcacaactggcccactggacgatgcagcgtcaacggctggcgcagtggaaccggaacacaatgcagacgggtcagcagcggggccgctggaaactgcgccacaggtagagcgtacgggcccgttctattacctctttgcagatggtgtgaaagtaggacgcgctaacaagctgccaggcctcgaaaaagcgctggctgatggtggtaaggaaataagccaggacgaatatttagcgcgtaagaatggcacatacgaagcccctgctgcccctgctaataactcaggagcaggtaatgagcctgaaattaccaatcacggtgcgggtcgcttttccattgatgggctcatgtcagaacagcagccatccggaacggctcctgaaattccacctgaggctcctgtttcagatacagctggaccagcagcaccagcggtaaggagtgaagaaccaacattcactctccgtgctgacgagctggagaaagagctgggcgacagcgaaaacctttccatgtggaaagacgtgatgcgcacgaatccgcgttacacgaaagatatgagtgatatcgggtttggtggaacggctatcaactcgcaatacatgatcatgcgagccaccgaaaaattcgggcccgttggaattggctggggctgggaaatcgttgaagacaagatgatcgaaggcgcaccgcttactgaaaaaatctttgaaggtacaaagtttgtcggaaagcgcatcctgcgcgatgcagatggctcgttattgttcgagctgaaccactacatcaaaatccatctttggtacatcaaggacggcaagaaagggatcgttgagaacttcggttctacaccttatcgacaatcaacaaagcacggtattcagtgtgataccgaagttcataaaaaatcgcttaccgacgcgatcaaaaaatgtctttcaggcctgggcttctgcgccgatgtttggctgggtctgtatgacgatgctgtatacagggccgaaagcgttattgaacatggtctgaaggatgccactgacagggctgatgattcaacacgcatccgtgaagaactggacgaacgtttcaaacaaaatgtcgaaactatgcgtaacgccgtttcacaaaatgaagtttccaaaatcgcgagtagtctcacccgcgccgtaagcattcatttaaaggcggcaaaggatattaacgacaaagactatgtgaaatatctggagggtcgcttacgccgtctggaagatattaaaggcgagtgcctttctaagctggaggaaaaagcatga

SEQ ID NO: 160220 - DNA, 264 bp, Enterobacter cloacae
atggatattactctggcgtttaaaaaattagccctcgttaacggcgaggaagccgttatcagcattgcccccagcgcaatgaaaaagatggtcatggatttagtggcgaatggttatttatccactgaggatttaatcatttttgcaatcggtcaggtgaaactttgcgaccgcaaaaaccttgagcatgttttgccagacaacgttttaaagaaattaactgaagcttttgaatctgtaaaagaaggagataacaatgactga

SEQ ID NO: 160221 - DNA, 348 bp, Enterobacter cloacae
atgaaccatgaattcaccgtaccattcaaaactgtcctgttagtttccaccgatgaatgtaaagtgctgtcattaacctgcggcgaggaacagctgggttatatcgctttcaataccctggagcgcgattctgaaaagcgaaccttcattacaccattcacggatgaaggcgaactgaaagaggcgtgctgtgcgagctgtgcggcaaaggctcttttcaataaccgcacaggcttcaaactcaaatttatatctatcgctgaaactgaaaaggttcaaccttctattactcagcttctgcccctgttactgctcgcagatatcgccaaacgagctaaatcactctga

SEQ ID NO: 160222 - DNA, 240 bp, Enterobacter cloacae
atgactggacaacactacggcacccaagaagtaattcgttcatgtattcgccctggaatgttaatcaggcatgaagggctaacctggacagcaggagcaaacacccgtggcaagctcgttatttcaactttacgcgggagtaagtgtttaaaagattgcttcgtagatgttctgttggatgccaggggcgaacctcttggcaattacccaaaggatattcagtggactggcaaatcataa

SEQ ID NO: 160223 - DNA, 963 bp, Enterobacter cloacae
atgagcaagcaaaacgtagttgacctggcaaacaccgcgcgcgaatgcgcatcactggctaatagcgtgtccggcactatcaagtttatcgttcagcgctggaaccaggcttgccaggcggcaaagatggtaggcttcaccactgaaccacgctacacccgtcgcgctcagctcgccgctgatatgctgcgtatggctgcacagctggataacattgcagaaggtaaagacccgctgacaggcgagccagtagcttcggcgaagaaagtaaaaatcatcaaggctagtgacctgaaagtgggcgatatcttcgtaaatcagtcctacgccggcgagctgaaagtgtctggcgttatgggttcactgacaggcagcaaagaaacccatatcagctttgaaatcggcgggggtacttcttaccctgacaactgcaatatcaccatcttggatatggacgccattcacgccgaagcgctcgaaatgaacgcagagacagatcgccgtcgccattgttcagtaatgtctagcctacaaaacaccatcatggaacgcgatgacctgccagaactggttgaagcttgtcacgccgaagctcttacagaagacaagcgctttaactggctggcgaatcgctggggtctgttccatgcatcaatcaagtgggttcaggtcgaaatgttgaatgccgcgcacagtgaagctctgagaattgatgctgagcaatgcgcagctcccgtcacctgcttcattttccaacgtaatgacggcgtccagctggctttggatagctcatgcgacgttcggtttatccgtaccagcaaaaacggggaatggtttaaggcaggtttccgcaataccgatatggaaggttaccagcctgtagagagcgatgttttgtttacctccatgccttcacgcactctttcatattcagacggcgtgatggttgtctctgaggcctga

SEQ ID NO: 160224 - DNA, 954 bp, Enterobacter cloacae
atgtacatgtttgatttactcaagctgcttacaaagaacaatttgtcatgtattagtgatatgcaagcgtggttcaaacaatttccgccagacgccgcttggaacatctattcagactactgtgtgggaaatccagacaaagcgaatgatagcttttcttttgtcatcacgctcaatcacgacactgacaagaatttttcagaatatatcgcgcatgtagctccgaaggatttgaaaaagacacgccaagcttcggaaggactgatctcttatctcaactgtcctgttgcgttcagtgtctcgttcattgtagagcgcgaatcgaagttgcttcgagactatattaccaacgacaatattcatgagttttgccaaggggctagggaattaatctcatcatggtttgatgagcctgagcttgatgttgactattggcaaagagttgataaagacttagattgttttgcacttgaggtgagacgcaagcaattcaattctaagctggcaagacagattttgctgacttctacctttgccgcgtttatttttcagatacttaataaactcaaagagcctgcctatattcgatggatcactgatcgagatgccgcgttcgaaaaatataatggggttgcctttgatgttgcatactttttatttcttgttttacgccaacagtctggagttgttaaaaacccaaatgcgccacaatatattttttcctacccttttatggatggtaaaactgactatgcagagcaaattagactaccagattatctcgctggcctctgcgcggacataaaactcccatcaattgatttcactcatgcgaagttcgacaagatctttggtgatgctatcgtaaattcatcaaacaatataattctccaggttctcggcaatccagaaaagattacgactaggcgcttggtatttaggggggaagtatga

SEQ ID NO: 160225 - DNA, 906 bp, Enterobacter cloacae
atgagtgctcactttaatgaaacattgattgcaaattcctatcacgtattatgggagcagtcatttgcgaaaaaatataaggcaaaaaattttgaggtgtacattccgggttcggaggaagttcatgttggatatgatttaagttttgcacttccacttagaaaatttaaatttaaagacgatgatttttttaaatggatgaaagaaagaataagtagaacatcatcagctgatagtgctttccttatggcttatttttatcagtataaaattcttaattatgtcacacgcctctcctcgactcggaacaaatcgacaatagaggggcttgttcgaaaaggttataacgagagcaagccagcatttagagtagaactttatactcaaagaaaactatacgccaagggatcgaagcgtcgcccatttagtcaacatgaagccttgtgtcgtttggctaaagtcaaaggagcaaacgtcttttactgtataccaaaatttttgaagtcatcagggattcctcctgtttcaataaggtcccttagcgatctcaatcttattgaagttacaccaaaggtaccaacatacagagataaagaaacgcactacctctactttcagaccatagcgggagataatgcgcaatggtgttcacgtcctatagctgccaatgtagtagaagaaataaaccttccgcctcttcttacgccaaagcagttattgcaatttataaaggctaactatctagcatgcacaactgacgaggtcgataacatttcgtttgatgagttgccgattactaaagaagacctaaccagggaaacgtttatgaggtatatggccttgatgccaaaatgtacaagactcattgcattctcgggcgttgataatgagactgcaagaagctga

SEQ ID NO: 160226 - DNA, 657 bp, Enterobacter cloacae
atgaacgcacagcaactggaatatgtacgcattcaattacgcgctgcgctggtcgatgactcaggcggcaccaaagggcaacttgaggcgttcgcagagcatccaccagctaataagaacaagaatccgcgccagcaggtacacgttgttgaactcgataacgggcgcggcggtgttcgtcgcgttaaagctgaaaatagcgccctttacgtcttggaaacacgtcgccgtagcagctcaacatctctcataagagagcgcgcctttcaaaactgcaaatggagaagagctgtatcaaaattaagcaaggctcagcagtcatgggttaggtattgctatggatatgacttagattacgattatcaaaaaaatatatgtgaaagtatttggttcatctacctgtctcagcaaaaagaagttaaaattcaaagtagagttaagcgaaaactgctcgcattgacttggcttgcgattcaagagcgagcaagggttgttggaggaaaaacatacaacctttcgaatcgtgtactaagtgaacgccttgatattgccagacagacatggtttgaaatttatgccttaaggtgggctgagttgcaaaaaatagtttctgattttgatgagctcactcttgaagagctattgaggattgcataa

SEQ ID NO: 160227 - DNA, 1101 bp, Enterobacter cloacae
atgaaaatagtatccatagctgttgttggactttttggcaaaccaggagaggttgtatacaattttcacgaagatctaaacataataacaggaaggaatggttcaggaaagacaactcttttaaaattagcatggtttattataagtggaaatattctgtatgcattaaaagaggttgacttcaaatcatgtattgtaacgactagtgaatataaatgcactgttataagaacaggagatgtttattgtcgaattgaaattaatactgattatgaaacctatgttttcgaagatgatgagtttggttttgagggggaacctttcggtgacagtgctgaggacaaagcagcaagatatttaataccaaacggtagctcgatattttttccaaccttcaggcggatcgaaggcggcttttcatctgattccaaaaatcgaaatagaccttttggacaggcagagtctgaaatagataaagcattgtcttctttatcaaaacgcatgacaaataatgaacatttgttcatcgctgcgatttcaagtcaggacatcaatggtgttctccttagaaaatatgctttactttcagaggagataaatgcttttcaggcggatatatctcgaacagtcatagataaaattaaaaaacaccaacagtctcaaaatagccttcgtgatgcagatgctcttttagccgagacaagaagtgacatcgagcaaattgaggagttcagaactcagtcgatgagaccactcgatgctgttaaaaatattgtcgagaaattatttcagcatgcaggtatttcatttggtaaaagattgagctttggagatgctgcagaagcagttaacagtgaagtgttatctgcaggtgaaaaacaaatgctgagttttatttgttataacgcatttcataaaaacgccgtaattttcatagatgagccggagttaagtcttcatgttgattggcaacgacaactttataagattttaagcgagcagaatcctacaaatcaattcatttttgcaactcactctccatttatatatggcaagtttccagataaagaagtatcagtaggcattgacagaggagaataa

SEQ ID NO: 160228 - DNA, 738 bp, Enterobacter cloacae
gtgtcagctaagatcagacctacagttgatgaattgtatgctacgctgaaaaactctagtattcctactgtgttggttgaaggcgttgatgatattatcttctatcgaagggttgaggaggatttgcgtgatttgggtattgatatgctcccggctggaaacaaatgggcggtacttgaattaaaagagaggataagatgcaatcctataaacgcttcagttgcatttgtggtggataaagatctttgggtttatgatgaaagtcaatgtgaaagtgaagtaatcactactgatggctattcaattgaaaatgatatcttttgtgatggcgatctcttgtcgctaatgacacaagatgagcaaaccgcctttgaacaagaattacaagcttttgtaagatggtatgccttaagcgtcaagcgttctagttcgaatagcaactattcctttcggttaacgcctcatgctgtgctggctgatcaacattattatagtacgtttttacaattaaatgttggtgaagtgtatccagaagattttttttgtgaaatcaaagaaaattatggaaaactcttacgtgggaaatctttatttgctttgttggtccgtcaactatctgcacgccaacgtaaaaccaaatttggagtaaaccaactcatggaatttggggcttcaaggaagggagagagatatcaacgaatcaaagatcaaatacgtacagtttttgctgcggcttaa

SEQ ID NO: 160229 - DNA, 810 bp, Enterobacter cloacae
atggcttggcagggcattccattccgtgtgccatttgatgtgaacgaatacatctctgttgcactaaacagcatacccaaaatcactgttgaaagttcaaccgactattggggggtagcacttactgcaggagctgcgctagtgggtggtatcattccagcttggattgcaaaacgtacatttcgagaaaatgctgcactattaaaatctgaacgagaagagcaacagaaatttttaactaccgagagaactcgccaacaagaatttttgattgaagagcgccttgaacaaagtaagtcattagaagccgataggcaaatacaagtaactatcgctgaacgtaattttaacatgcaagttctatcagctaataggcaggcttggatttcgacattaagagatttgatttccgagttttctgttcaggcttatataaaatttgattgccagagtaatgccgaaatttatcgttcttatgcggattctttcgatccgaatgatatcagtgttgcagataaacgaaagagtgctaaagaaaaacacgctaaagcattggatgatgttgaagtagaaagaagaaagctagagttacttttaaacaaaattgaattgatgcttaacccagatgagcagatatctaaggatattatactatccatgtataccttacggtcacttggtggggaatttaggaaaggaaaagatttcactccgcttttcgatgaactgagacaacagacgcaattgttaataaaacaatctcaacagtgttttaaagcagagtgggtacgagttaagcaaggtctttaa

SEQ ID NO: 160230 - DNA, 462 bp, Enterobacter cloacae
atgacggctattgacgcagactttctaaattttgagaccatgattgcaactcaacaagcggcaaaatggacttgtatcgcagcgattggaacatgcatatcctgtctcgtgacaatcattggtattggtgtcgcttggaagtctcttcaccaatggaaaccacagtacaaagaaaacgcccgtttgaggtttatggatgctctcgtaaaattcgaagcttgccttatcttgcttcctaaaaatttagacgatgatgccgaacacatccatagaaaagcctttatggttgctctcagcgaggtcgatactcgggggttgttttatttaaaagacaataagaatgaagagttgagtgattccctaaaaaaacttagagaaaagagtgctgagttcataggtggaaaagtgtacaaatcggagttggctttgatatcacgcatgattttacttgtgaaagtataa

SEQ ID NO: 160231 - DNA, 786 bp, Enterobacter cloacae
atgaacgatagattgaaaatcgtatatcgcccgttaaaggaactaacgccatatgcgcgaaatgcccggacccatagcggtgagcaggtagcgcaactggttgccagcatcgaggaatttggctggacgaatcccgtattgattgacgagaacggcgagatcatagctggtcatggtcgcgttctggctgctgaggccattggtattgtctctgcgccgacgataaagctgacgggcctgacggacgagcagaaacgcgcctaccggctggcagataatagactgccgctaaatgctggctgggatagtgatctgctgaagcttgaagtaactgatttgctggatgtggattttaatctttccctgacgggcttcagccaacaggagattgacgatctgctggttgtcatcgagccgccagggaccgatgacgacccgtacaccaccaaaattgactcacctgtttacgagccgtcagacattgttcctgaggtcggggagctgtacaacgaggagaaaacaaaggagttacagtcacgaattaaaaaggctggcttacctgctgatgtggagatgttcctgttgagcgctgcagagcgtcacacggtctttaacttcaacaaaatcgcagattattacgccagcgcgggggcagaggttcaggctttgtttgaagagtctgcactggtgattatcgactatgaaaaggcgatagagaacggcttcgttcacctgactaaaaaaatggccgaaatcgtgtacagcgaagagggcgaaaatgcgtga

SEQ ID NO: 160232 - DNA, 867 bp, Enterobacter cloacae
atgcgtgaagatttctgtgcgttcatcctgaccaacggacggccggaaaaagtttacacgtacaacctgcttaaacgttcaggttatacggggaagatttttatcgttatcgacgatgaagataaaacccgggagcagtacatggagaaattcggggagcaggtgcttatcttttcgaaggaggatatcgccagtcggttcgatgaagcggataacttcggggatcgacgctccatattttacgcccgtaacgcctgctttgagctggcgcggctggtgggatgcaaatacttcattgagctggacgatgactacagcgccttacagctgcggattgataaaaatctggatgcttcatacgcgctgataaaaaatctggatgcagttctggaagcgatgctggcttattacgagtcaatccccgcagcgtgtatcgctatgtctcagggtggtgacttcctcggtgactcaggcaatgcagcctggttaaagcgtaaggcgatgaacagcctgaattgcagcactgaccgaccgtttaaattcatgggccgcatcaatgaggacgtgaacacttacacgacactcgggcggcgcggtgaattgttcctgacggttggggctatacagctgcgacagggaacgacacaaagtaacagtggagggatgacagagctttatctggcatcaggaacatacgttaaaagtttttactcggtgatgttcgcgccgtcctgcgtgaagatatccctgatgggctcaacccataagcgcatccatcatcaggtgagctggaacaatgccgcagtaaaaatcctccatgagaaacataaaaaatccgctcctggaaaaatcgggggtggaaaatga

SEQ ID NO: 160233 - DNA, 258 bp, Enterobacter cloacae
atgatcccttatgccgaagttgaatcactcgccgcgtgccggatgagtgaacagcaaattgccgatgtactggatatcaaccttcctgaactgaagcaacagcgcagcgagatttctctgttccgcgaggccatacgcaaaggcagggcaaagggagaggcacagataagatccgccttataccggaaagcgaaaagcggtgatgcgcgtgcttaccacgaattactgaggcgggagaaagaacaggacaacggctag

SEQ ID NO: 160234 - DNA, 147 bp, Enterobacter cloacae
atgaaaaatctaatcgtgtgtatctgtttcatcttactgtcactggcaattatctgcctttgcttcgtccctgaaaccaaagtgctagctattagtgcaacactaatgaaagtgatagtgatcttaactttattgaaaaatcgctaa

SEQ ID NO: 160235 - DNA, 1017 bp, Enterobacter cloacae
atgagtaaagcggactggggggctatcagacgtgagtatgaaactgatggaacgtcagcccgcaaactaggggaaaagtacggtgtcagccataccacgataaacaacaaagtcagggatgagggttggattaagggaaagaaaaacgtttccactaaaaaactttccacaaaaaaaatggaaacaaaaaaagtggaaataccgaagctggaaactggaaagtcacagcgtttaagtgatgaacgggtatcagatgcggaagcggataatcagtccgaaaatattgatgatctaggtttcgaacccagagatttcgggttgtctgaccaacaggctctttttgtcttctggtatgtgagaacaaaaaacagagtcgaggcgtacaaaaaagcgggctataaatgcgaaggaaaaaatctgcattttggtgctgcgcagatatacagaaatataaaggtttctcgtgccatcaaagcactggctaaaaggatgcgtcagcgttacacagccgaccttgatgaaatcgtggatcagctggtggcgataacccgtgcggatccgaatcttgtttctcagtacaggcgcgttaactgtcgtttctgctggggggaagaaaataaatatcagtggcgtgatgaaagcgagtatgaggccgcactgagtaaggctgccgataacggtaagccaccgcctgaggatggaggagcaggtttcattgataatgccgacccgaatcctgattgccctcgctgtcagggtgaaggtaaggggcagatgattatcaacgatacccgtgaccttgaaggcgatgagctgatgtattacctcggcgtgaagcagactaaaaacggtctggaggttctaaccgaaagtaagcaagccgctcgcgctgccctgattcgaatccttgaaattaaggaggcgaacaatcccgccgtgccggtagttcctgaagaggattaccagcttcaaccgttaaatactgatgagccaacacctgacaatccaatcctctag

SEQ ID NO: 160236 - DNA, 1146 bp, Enterobacter cloacae
atgaagtggaacgtcagtattgaggatgaaatctggtactgcgcacccacgcagaaacaggctaagcgtgttttctggcggcgactgaaacaatccatcccaccacactggagggcgagcaagccaaacgagactgaactatcaatcacgctggttagcggtcatatcctccggtgcgtgggcctcaataactatgatgacctgcgcggttctggtcttttcttcgttctgattgatgaatgggctgactgtccttatgaggcatgggaagaagttctgcgcccgatgctctcaacctgtcgttataccatcgatggggttacatacatcggaggtcacgcgctccgtatcggtacgcccaaaggattcaaccactgttacgacacgtggtttgcgggtcaggagggaagggagcctgaccataagagctggctttacacgtctgttgacggcggaaatgtcccgcctgaagaactggaagctgccaggcgcaaaatggacccgcgcactttccggcaggaatacctggcctcctttgaaaactatcagggcgttatttattactgctttgacaggcgcgagaaccataccgacgaaacagcgcagcgtggcgacgttcttcgtatcgggatggacttcaacgttgggaaaatggccgcggtggtttacgtcatgcgtgatggtctgccgcgtgctgttgatgagttcatggatgttttcgacacgccagcgatgatcgaggcgattcagaaaaaatactccagcgaaaatcatcaaataaaaatttatccggatgcctcggggaaaaatcgaaaatcctctgatgcgagtaactcagatatcgccttgcttgagaaggcgggttttgacgtatgcgtgaataacgctaaccctgcggtgaaggaccgtatcaacgctgtaaatgcgatgctctgtaatacctatggcgaacgccgattactgatcaatacgcgcacctgtcctaagttcacgcagtgccttgagcgtcagatttataacgaccagggcgaaccggataaaaaaggtggatttgaccacgccaatgacgggggcggctatccaatcgcgtacctgttcccaatcaaagagaaagtttacgaaattgaactggaaaccacattctga

SEQ ID NO: 160237 - DNA, 1389 bp, Enterobacter cloacae
atggcaaacaacgacattacttttgtcaggcctgagcagaaagcggcctgtgcgctttggacaaaaatccgcgatgtctgcaaaggggcggaagcgataaaaagcaaagggggggaatatcttccccttcttgatcccggcgaccgttcagcgaaagccaaacagcgaaatcaagattaccgtgacagggccgttttttaccccattaccggcaatacaaaaatcggtctgctgggtatggcctaccgaaaagatcccacgatgaccgctccggcaaaactggaatacctgaaaaccaattcggacggtggcggagtaagtatctatcagctgtcgcaactggtactggaggacattcttgaaacggcccgccacggtctctatgtggattacgccaaagaaagcgatcaggccatcattcttcgatacacgccggaaaacattatcaactggagaactgagcgcattaacgggcgcaaccagttggtgctggtggtgctgcgtgaggtgatagaagagaaggacggctacggattcagggagcttacacagtatcgggagttggctctaatcaatggccgatttgtttgtcgcgtctggcggtcaaaagcagagaatggcggcggggtgtttacggttgatgctgagtataacccgaagcctaaagggaaggatttctgggatgaaattcctttcacgtttgtcggtgcacaaaacaatgatgagactatcgacgatcccccgctggccacgctggcagaaattaatctgggccactaccggaacagtgcagattacgaagacagtgtctggttctgcggtcaggttcagccatatatgtctgggcttgataaagactggcgagactttttacagaagtcaggcgttaaggtcggttcacgtaatcctcttttgctccccgaaaacggcgtttttggttatgcacaggctcaaccaaatatgcttgcaaaagaggctatggacagtaagcgtgattacatggtccagcttggagcaagactcatcgagcaaaacagcgccacaaagacagcaacacaggctagtggtgaacagtctgctgcaacatcagtcctgagtatttgcgtatcgaacgtgtcagaggctttcagtaaggcgttggcttggtgcgcgaaatatctcggcgtgacagatgaaaaagcggattacaccatcaaccaggagtttatcgccagggtggcagattccgggatggtggccgttctggtcagtgcctggcagtcaggcgctatccgtgacagtgacctggtgcgcgtgctccaaaagctggacatcattgacccggctgacagcgtggacgaggtgatcgacgcgctgcgtaacgcgaaccctacattgctggataagtga

SEQ ID NO: 160238 - DNA, 1113 bp, Enterobacter cloacae
atggccaccgtaaacgagcaacttcgtgatgaggccatttcacacgcaatcggtataaatcgcttcggcaccggaatagcaaaccggatgctgaaaatcctcaatgcaagtgacgcggatatcagtgcaaaactgattgtggcgctggaaaatctgtcccctgaaagtttcaccgtgaggcggcttgaatcacttcttgaggatgttcgttcgctaaaccgccaagcggttgattctatgttttctgcaatgtcgggtgagctgcgtgcgctggcagtgtatgaggcgggctatcaaatcagcctgttcgattctctcctgccggatatcgttctgaagcgttacccgttgcagggcatcacggcggatatggtttacgccgccaccatgtcacagccttttcaggggcgtttgctgtcggagtgggccgagggtctggaaaccgacaggatgacccgcatcgtcaatgctgttcgtcatggttatctacagggggaaacgactgaggccatcgcccgaagggtgagaggccacgctaacaaaggttataaagacggtgcgctgcagatgagcagggcaaacgccaccagcatcgttaaatctgcggtcaaccatctcgcagcgacggcgcggcaaagtttcgcaaaagcgaacagtgacgttatcgagtgtaagcagtggctttccacgctcgataataaaaccacgcccctctgcatgatccgcgaccgcagaaagtacactctggaaaataaaccgatagggcacaaggtgccttatttgcaggggccaggccggattcatttttgttgccgctcaaccgaaacgctggtggtgaaatcatggcgtcagcttgggattgatgccgatgaaatggacgcaggaacccgcgccagtatggacggacaagtaccggccggcattacctataacgactggttactcagtcagtcatttacccgacaggttcaggtgctgggtgaaacccgcgccaggctcattcgtgacggcggtatgcgtcctgatgagttctacaccgataaaggggaatggctaacgcttgaacagctccgcgaatacgacagcaaggctttcgaggccgcagggttgtaa

SEQ ID NO: 160239 - DNA, 774 bp, Enterobacter cloacae
atgttaatccgaaataagcttctgaaatattacgctccagatgacggcggcaacggtggcggtggcggtggtatcgaaatcaccccagagattcagaagctgattgatgaacgcgtgacgtctgaagtcaccggactgaagtccaaaaataacgagctgctgggaaccatcaaacagcaaaaagaaaacctggcccgctttgaaggtatcgatcctgatgcggtgaaaaccatcctccagcgtttttctgacgacgaagaagcgaagctgatcgccgaagggaaaattgaccaggttctggaaaaacgcactgagcgttttcgcgctgacagcgataagcaaatcaaagcggccgtagagcgtgctgaaaaagcagaaggctttgccaacaagttccgcgaccgcgttctggctgatgcaatccgtgaagcggggctgaaggccggggcgctgcctaccgcgtcagatgatttgatcctccgcgctcgtggcacgtttaaggtcaacgatgaaggtgaggccatcgccgttgattcagatggcaatgccattctcggcaaggacggcaaaacgccgcttagcccgattgaatgggctgagtcactcaaagataccgcgccgcatctcttccccgctgctgaaggcacgggcggcggtggacataaacagggtggaggtggtggaagcctgaagcgctcagaaatgacgtctcaggaaaaaactgactatatccgcaagcatggccagcaggcttttctcaaactcccgaaataa

SEQ ID NO: 160240 - DNA, 351 bp, Enterobacter cloacae
atgcctattaattatcagcgtatacagcaacgctctgacaggctgctgcgtcagaacggcgcggaatatccggtaacacgtaaaggcacggtttcggtcatcggtggcgttgaacatcagactgaagacctgacgtttaccgcctggggcgtaagaaccgaatatgcccctgacgagattgacggaaacaacatccagcgcggtgatgtgaaaatcgttttcacgtcagaaaaaattatcgaaattggcgatctggttaacgttgacggcaaacaacacagggttatcaaacctaatccggttaagcccgcttcactggtgatttgctataagtcacagctgagagcatag

SEQ ID NO: 160241 - DNA, 582 bp, Enterobacter cloacae
atggctgaaaacgatgatttcatggcctccatcgatgcattcgtggcaaaagcaaagtcaaatcaggagcaggttgtcagggctggctgtatacgcatccttgcgcgtctcgtcgaaatgtctccggttggtaaccccgagctgtgggaagttaaccagacggctgtgcggtacaacaacgccgttaccgagtacaacgatcagctgcgtaatgaccctgacagtctgacccgaaacggtcgcctgaaacgaggccgtaagattcatgacagcatggcgatcagatccccggcgggttatacgggcgggcggtttcggggtaactggcaggtttctttcgatgcacggacaacggaagagacaggacgcatcgacaaaagcggtgctgaaacactgcgggcaggaaatcttgttctctcacagtttcgcgtgggtatgaatgaggtctttttttgcaataacgtcccctacgcctatccgcttgaaatggggcattcctctcaggctccaggcgggatggtgcgtatcacagccgcagaggcggcgcgtttttttgatgaagcggctaaggagataagttaa

SEQ ID NO: 160242 - DNA, 231 bp, Enterobacter cloacae
atgcggatcactgttctggatgacgatcctggtaagcgtattagtccaggcgcagagcgctacgaggtccggctcgacggggaaatcattaaatactgcctgacggcggatgatgataaaggtctggtcattttcgccgtagccgatgataaaggccgaataaaggcactgaatggagaggtggataaaaccacgctttacggtaatgttgaaataaggcggatgccgtga

SEQ ID NO: 160243 - DNA, 417 bp, Enterobacter cloacae
gtgaacattcaaaccgatattacagcgctgctggataaacagttgggtgaatgggctgataaggaaggtattccggtttcctgggataacgtggaattcacaccgcctgaaacaggcgtttatcttcagtcacatgacctgccggccacgccatacagtattgacctggcgggacgttgtcaggtttatcctggtgtgtaccaggtcaatgtaattgccagaacggcaacggggcgaacgcttgctgcgcagacggcaaaaaaaatcaccgcgctttttcatcaaaaccttgtccttgtcggcgaaggttttacctgctgggttttatcacttcccgccattcatcgtggcatcaataacggcgtgaactggactgttccggtcagcctgacttaccgcgcagaaaccacagtctga

SEQ ID NO: 160244 - DNA, 939 bp, Enterobacter cloacae
atgggctttgcattgcctaacggctcgcacgtctatctggcgtcgggctatgatcctgcggttccatttacaggggctactaatgccgaacatgccgttgtcacagttgaatcagggggcggctttgcttctggcgacgttgttcacgtcaattgtgactggaccggaattgataacgtcgtcgcgctggttgatgccgttgctggttcggctgtaacccttcgcaacatcaacaccaccaacaccgggaaattccctgctggtggcggaagcggcacgctgcgtaaggtcaccgaatggaccgaaatccctcagatcaccgaagtggcgaacgcgggtggcgagcagaacaccacgcagatccagtttttgtctgatgaccgccagcgtaacctgaacacctacaaatcagccagctcgcaaacctacaccattgcgcatgattcctcgcttccggtttacccgctgctgcgccagctcgacgaagacgaagaaacggtggcggcgtatatgtacgtgcccaaagcgaaagaaaaccgctactgggcggctacagcatctttcaacgatatcccgcagacagccgtaaactcagttgaaacagtaaccgcagttctcaaccttcagtctccggctatgacgttctacaaaaccgataacgtgactaccccagcagtacaggtcacgggggttactctaaacgacactaagctggatctggatgctggcgaaacagctcaactggtcgctgaagtcactccggctgatgctacgaataaacaggttacctggtccagttcgaatgaagaagtcgcaaaagttagcgccgatggactcgtgacggcgatggctggtgtgggcggtacaacgattatcacctgcacaacggtagacggcggtaaaaccgcaacctgtgaagttaccgaaacggtagcctga

SEQ ID NO: 160245 - DNA, 312 bp, Enterobacter cloacae
atggcaactaaatttgagctgcaaccgaaaccgacttttaaagccaatgttgagatcccgcgtgccggggaagagcctggcgtgctgacttttacgtttcgtcataagtcggcggatcagatcaaagagatggaaaagcgagaaggcgcaacggccattgattttctgtcggaaattatcgagggctgggcgctgcctgaatcctatacccgtgaaaacctgacggtactgctgaataactacctgagcgcggcaggcgcaatcaccgaaaaatattacgccgaactgatggggcaccgggaaaaaaactaa

SEQ ID NO: 160246 - DNA, 264 bp, Enterobacter cloacae
atggccaccttcgggctgactgatgacgattatgacgatgtgatcgttcacgttctgcctgatgtgtggcccgccttttgtctgttccagtcgctgtctactcaatggcgcaccggctttggtggcgtgacaggactcgattacaacgtgctgccctggctgatgcgcattcacggcatcgaggatgaggcaaccgccctaaatgacatccgtatcatggagcgtaccgctctgaaaaccatgcataaaaaagaggtggcctga

SEQ ID NO: 160247 - DNA, 2787 bp, Enterobacter cloacae
atgagtgatatcgccacgatctcactgcgtgttaataccagcggactggaaaaaggcacgcaggagcttgataaattccgccacgcggcgaaaggcggggctggctctgctgacgaactcagccagagcgttgatgaaacgcatcgcagggttgaagaactgcgtaagcgcctggcgaatagtgaggctgcaaccaggaaaaatgcctctgctcaggatgaactggcatcggcgttttataagcaaatcgacagcataaaaaatgccgcaaaagaaacggataatatcgcggcgatacgctcccgccttcatgcggcgcagaaatcagggaatctgatccaggaagactatctggcgttgctgtctgcaattacagcaaaacagatcgaaggccgacgtgcggaagaaagtgcagcagcggcacgggaagtttttctcaaaaaactcaaagatcaggtagcaaccacgcgtctttctcgcgaagaactgctgcgctacagggccgaacagctgggggcaggttctgcagcagagatttatattcagaagctgaaaaaggctgaagatggtactgcacgctttaataccaggaccgctgcagcgggtaaaaacctgcgcactctggccacatcactcgtcagaagcaacctggggggtgtggcaggtacaggaacgtcttttcttggtaatatcggggctttgacaccgcaagttgctctttttgcgggtgcagtcgcaacgcttggaaccgcttattacaaaggccagcaggaaagcagcgagtttaataaacagctcgcgctgacgggaaattatgctggccgtacaaccggacaactgaataatctggcgaaagctatctcaggcagtgggataacgcgtggggatgcagcggcggcgctggcgaaagttgtcggcacaggaagctttgggagtaaccagcttgagatgattacccgatctgccctcaggctggagcaggtaacgggtcagtcagtggatgcgacagtcggacattttgcgcggctgcaaaatgaacctctcagcgcggctaaggagctggatctgcagcttcactttctgaccgccagccagcttgagcagattacctctctttcacaggttggtgacactaccggcgcggctaaaatcgctatggatgcgtatgccgacgctattcaaaaccgtaccactgatatcacgaataacctgggttttcttgaatggggctggctggccatcaagcaaaaagccgcggaagcctgggatgcgatgctggggatcggtcgtacggaaactatcgaagaccagattgaaaaccttcagaaacgcgccagcagaaaaatccccacgccgtcagggatgaacaactatggtgccgaaaagtctctggatgagctcagggaagaaaaatatcttgccgatattgctgcggcgcgtgaaaaggctgaaagagacgaagaagagcgcaggaagcgtagcttcaacgacgatcagaagtggaagttacagtacgaaaacaaggaagagcagcaccagcggcgcctggctgaaattcgcagttcttatgcttctcagaccgcgaaggatgaagcaattcgccgtgagaatgaaagttatgccagaagccagcaaaaggggcaaaagaaggaaaaaacctacaccgatgattctgcaacaaagatgcttcaggaatcatcgaaacgcctggctgtactgaaagcgcaggatgaaacaaccaacagcctgacgtcagaagaaaagcgtctgctggaattcaaccagcaaattgccgacctcaagcaaaaaaggattttaacggccgaccaaaaaagcctggtcgccagaagcagtgagatccgcgcagcacttgaggctgaaagtgcagaggctatgcggattcaaaatatcaaggaaatcgcgaagggccatgaaacttccctgagattcattcagcaacaaagcgctcttatctcggctatggacagcaccgcaggaatgagctaccgacaggcgcagcgtcaaaaagagcgtgagcagctcaaacttatgaaagcctctgaagaagataaatcatcagcaagtaacaagcttgaagagcgctatgcgaaggaggatgaactgcgcggcgactggcttgcaggggctaaaaaaggctgggctgagtatgaggatgcagccaccaacgtttacgataatgttgcgagtgttagccagggagcactcaccagcatgtcaaatagcctcgctgatttcttcactaccggtaaagccaattttaaagactatctggccacgttcctgaaaggcattacccagatgttgactcagattgccctggttaattctgctaaaagcgccgcaggtatattcggcttcgctggcggcggtgccgttcctcagtttgactcaggaggctataccggagcgggtggaaagtttgaacctaaagggatcgttcacggtggcgagttcgtatttaccaaagaggccaccagtgctcttggcgttgataatctttacgcacttatgcataacgcacagggatatgcagagggcggcgtagttggacgtgcgccaatgtatgggctttccggtggcgggattactgtgaatgttgatgcgcctgtttctgttactcaggaaggtggcacaggggcaaataattcaagccgtaagggggctgaaagcatcggaaatcttgttaaatcagttgtacagcaagaggtgactttacggctaagaaaagaactaacagaaggaggagttttgtttaaaagagcataa

SEQ ID NO: 160248 - DNA, 612 bp, Enterobacter cloacae
atgcgtttaagtttttttcattataaattccctgcaattttgcgcaaattgaagaaagaaaaggaatttattttgaaactttcaactctgggtttggcacttttcgctgcatcagcagtaacgacttcagtccatgctgcaggagaaaacaccatctctcttggcttcgctcaaagccatgtgaaaatggatgatgaaagcctcaatgaaaaaccccgcggtatcaacattaagttacgaaatgagcttactgatgaatggggcgtagtaggctctctgaccaataccgagcgtaaatatgatctctatatgggcggttcaagggtggcagacgcaaaacttgaatacttttcactgatggcaggtccgtcataccgttttagtgagtacgtatctgcttacggtcttgtcggctatgctcatggtaaagcaaagctccgaattaacagtattaactttaagcacagtgaaagtgctgaggcagttgtaggcgctatcggtgcgcagtttaacgtaacgccaaatgttgcaatcgatacttcatgggaatattcgaagcttgatgattataaggtgaatacctgggttgtaggcgtaggttatcgcttctaa

SEQ ID NO: 160249 - DNA, 339 bp, Enterobacter cloacae
atgacagatacctttacttgggccacgcaggtttcaccaaccgcgaccgataccatcagcctctacaccgcacagttcggtgacggttatgaacaggtggcggttaatggtatcaacaacgtggcggaagcgtgggatctaacctggacgggcaagaagaatgacgtggcggctattcgtgcgtttctccattcccatgctcatcagtcattctggtggtcgaatccgtggggggagaaaaaactcttcagggttaaacctgactcaataaaaccgacttttatatcagggaaagttgtcaccctggccttttccttcaaacaggccttcgcgccttaa

SEQ ID NO: 160250 - DNA, 738 bp, Enterobacter cloacae
atggggctaaatgctgatttccaggcgctggagcctggcgaaaaaatccagctaattgaggtggatggaacatcgttcggtatggaaaaggtgctgcgcttccacgcttacaacatccactcggaagggtgggcatcgtttgctgctgacaacctcccttccatcatctggcagggtaacgaatacgatccgcatccctacgaggtgacgggtctggaattatcgggttctggcccacagccgacgccgactctttcagtgggcaatatctctaactatgtgacggcgctctgtctgcagtatgacgacatggttaaggctaaggttcgcattcataccacgttcgctaaatatcttgatgccgctaactgggtgcatggcaacccgaatgccaacccgaacgaagaacgtgtacagcttttctatatcaatgccagaaccgcagaatcgcgcgtacaggtcgattttgaactgtgctcacccttcgatattcagaacctccagctgccggcaaggcaaattcttcccgtatgtacctggtgtttgcggggctggtaccgcacaggtaacggctgcgactacaacggcacgaagtattttcagaaagatggcacgcctactgataaccctgctctggatgtgtgcggcggccgtatgcaggattgcagggatcgctttggagatgacaaaccacttcctttcggtggctttcctgcggcaaatttacaggggaaatag

SEQ ID NO: 160251 - DNA, 735 bp, Enterobacter cloacae
atgcgtaaacgccttattgacgcaatacgtaaacacgtggcggctgagtacccgaaagaggcctgcggcgtgatcgttgaaacgagtatggggcagaaatacgttgcctgtcgcaatgtggccagtgacccgacagaaaccttcacgatgtcacctgatgaccgacgtgcggctgaaaaactgggtgagatcatcatggttattcattctcaccctgatgtgacccgactggtaccgtctgagttcgaccgtatccagtgcgactggtcagggattgagtgggggattatgtcctggcctgacggggatttttgcacgatttcaccgcgcgatgaacgcgattatgtcgggcgccagtggctgctcggatacgctgattgctggtcactgattcgtgagtattaccagcgtgaacacggcgtggttttgggggattactcagtcgattacgagtggtgggtggatgcgaaagaaaaccgctatgacgataactggaagcgcgaagggttctatgaagtgccatccagccagatgcagcctggcgacatgataatgatgcaggtcagcgcccctgtaaccaaccacgccgcgatttacctgggcgataaccagatgctacatcacatgtcaggacagctttcaacgcgcgtgccgtatggcaaatattaccgcgatcggacggtgcgcgtggtcagacacaaaggagtaaaccttgaaaaaaacgctgattcttaa

SEQ ID NO: 160252 - DNA, 624 bp, Enterobacter cloacae
ttgaaaaaaacgctgattcttaaaggccgcatggcgaaaaaattcggtaagactcaccagtttcacgtggcagacctgcgcgaaatgctcagggcgatgtgctctcaggtaccaggattcagaaagtatatgaacgaggcgcacatcaagggcatcagattcgctttcttcagtgggcgcaacaatatcgggatcgatgaatttgatatgactgctggtggagaggttttcacaatagagcctgttttcgaaggcgccaaacgggggggctttcttcaggtcgttatcggcgctgcggcacttgcagcagcattcttcacggctggcggctcgctggcgctgtggggggcagctataggtgcgacaacagccacgggtgtcgcggtcactgcgctaacctcaatcggcctgagcatggttctggggggcgtggtgcaaatgctcacgccccagcctgattttaatgtcggtgcatcctccagttctgacaacaagccaaactatgccttcggtgctccggtgaataccgtatcaatgggctaccccgttccattgctttacggggagcgcgaaataggcggcgcaattatcagcgcggggatgttctcaagcgatcagcagtaa

SEQ ID NO: 160253 - DNA, 3534 bp, Enterobacter cloacae
atgaaatactcattcaaagaaatgccctacacgggaaggaagggcggcggaggtagtgcacacacacctgtagagcagccagacgatttactgtctgaagcccgtctaaaaatgctggtagccctgtctgaaggtgagattcagggcaatttgactgcacaggatatttacctgaacgataccccactggcgaatgctaacggcacgtacaactttgagggcgtgacctgggattttcgtaccggcacacaggatcaggaatacatttctggtctgcctgaggtgaacaacgaacttgcggtcggggttgtggttactgaatcggtatcctggacaaggcagtttactaatctggcgcttgatgcggtcagaataaagctgagtttgcccgttcagtaccgctataagaataacggcgatatggttgggacggtgaccgaatacgccattgatctttcgaccgatggggggagctggcaggaagttatccggggtaaattcgacggtaaaaccacgtcagaatatcagcgcgatcaccggattaattttcctaagtcttcaacaggatggtctgttcgggttcgtcgtcttacccccgattcgacagattccaaactggttaatgccttcagtgttttttctttcgcagaggtaatcgacagcaagcttcgttatccgaataccgcactgctgtacatcgaggtaaatgccagccagtttaatggctctgcgccgaaaataacctgcaaaccgaagggcaaaatcattcgtgtacctgataactatgatcccgtctatcgcacgtactcaggcagttggacaggcgggtttaaatgggcgtacaccaataatccggcgtggattttttacgatctcctgctggatgaaatttacggcatgggttcccgcattgatgcaagcatggtcgataaatgggagctgtatgaaatagcgcgttattgcgatgaattggtctctgacggcgcgggaggcacagagccgcgcttcacctgcaatgtgtttattcagagccagcaggacgcttacacggtgcttaacgatctcgctgcagtattcagggggatcacattctggggtaatgagcagctttttgttaaagctgacgtgccgcaggatgatgttgactgggtttataccgcgtccaacgtgatcaacggtgagttcaactatgcaggtggtagctataaaaaacgctattcctcctgtctggtgtcatggtcggaccctgtcaaccattacagcgacacggttgagggggtctatgactcagccctggttgagcgctaccagattaaccagctcacgcttacggccatagggtgcacgaaacagagtgaggcgcacagacgcggccgctgggcgctgttgtcgagcgtcaaggacggctcggtgacatttggtgtggggcttgatggctacataccgttgccgtctcaggtgataggggttgccgatccgttccgtgcgggtattcagaacggtgggcgcatgaagtcgattaaggggcgggtagtgacgcttgatcgtgccattgattatgaggccggtgctcgcctggttatgaacatgcctgacggctccactcagtctcgcaccattgaggctgtaaacaacgaagagaatacggtgacccttaccactggattcagccagacccccgtttacggcgctgtatgggccatcgacagcgacaaggtggctatccagtattttcgtgtgatgtctgttgccgcaaacgacgatgagactggcggtttcaccatttcggctattcagcacgatccggagaaatatcgctacattgatgacggtgtgcgtattgagagcccgccaatcacggtcacgccagttaacgttctcgacgcccccgaagacatagtgattgatgaaacggattatgtcgctcaggggctgacggttgccactctgtacgtttcatggaagagagtagagggcgcaatccgttatgttgctcagtggcgtaaggataacggcgactggataaacgttccggttaccagtgcccagggattctctgttgaggggatttattcaggctcatatgacgtgagggtgagggcgcttaatgctcaggaatcatcatctccgtggggttatgccgatactaccttcctgtctggtaagcagggtaaaccaggcacgccaacaaattttcgggccagcgataatgtcgtgtggaacatcgatctgacatggggatttccagaaggttcaggtgataccgcgtatacggaaattgagcgggccaccacttcagatttcctgaatccgcaaaaactgtctctgttgacctatccgacatcaacctatcagcacgggcccatgaaagccggtgtcaatcagtggtatcgtgcgcgcctggttgaccgcatagggaatgtgggtgagtggacggaatgggtcagagggatgagcagtattgacgcatctgacttgctgggagatatcacagacggcttcctgagcgctgaggatggagatcgccttaccagcgaaattaataccaacctcgaagggattatgcagaacgctcttgccaatcacggcactgtagaacatcagttcgcactgttaggcgaggtaagagcagatattgtcgttgtgaggaccactattgctgaagtcgataaggctatggcagaaatgtccacgcaggtacaggctcaaatcgaggatgtaactgcaacccttgaagataaattaacggcagttgtagatgccaatggcgcatcggctattcataccctgaaggcaggtgtacgcctggatggagtattccacagcgctgggatgagcattgccgtgcttgctgaaagtggtaaacccgtcataacccgtatcggatttaatgccaaccagttcgtacttctaagtggtagtggcgagaatcaatattcgccctttgccgttgtagatgggcaggtttttatcagtgatggttttattcagaatggcagcatcacaaatgctaaaatcggagaatatatccagtcatataattttgtctcaggaatgatgggctggcatatcgggaaaaatggacacgccgagtttaataatgtcaccgtcagaggcaccgtatatgcaagtaacggccaattcagtggtaccgtatacgcgaccgatggtgattttcagggcactgtttatgccaacagaattgtcggatatatttcagagtcaaaaatgtatcctgaattcaataagccagcatcgtccagtcgcagtatggatattaattattacgggaatgacagattacccgtgaggttatcaatctttttcaccataaacgagtatacggcaggatgtcgtttctttgtcgatggcgttgagcaagtggatcgttctacagggaaatcttatggttactcttacgacctcggcgtgggtgaaaggaaaacgataaatattagtgcttctggtagcggcagaatagtgaccagcccaataattgctatcgttacgccacagggaacagcattaggttaa

SEQ ID NO: 160254 - DNA, 1398 bp, Enterobacter cloacae
atgtcagccggaacaattaccatcactaacggctccgctattgttggtggagccgacacgtcattttctactgagctggaatcgggtgattttattgttactacagtcggtggcgtgtcttatacgttaccgataatgacggtaaatagtgatacacaactaacgctagtcagtaattttacaggaccaacacaggcaggggctgcatggtctgccgttccgcgtgttgcgctcaacatggtcactgcggggctggtggctcaaagtgctgaggccttgcgcggtcttaattatgacaaacaaaactggcagcaggtattcagtgaaagtggctatatcacggtaagattgcctgatggttcaacctatccaggcccaagctggccttatattgccaaaatagcggaaaacgcggattttgaccgtttaaagatattgacggatcaaattaatgagagtgctgcacagattgaaaaggatgttgctggctcaaaattaaatgctgattctgcttatcaaagcgcacaggaggcgaaggattacggaaaatctagctcagatgatgccggtgaatcgaaacgctatgcagagaacgccgctaaatcagcggcagatgcaaaacaaagcgaagataattcagcgctaatggtagaacggtcaagggatgaagctaacagagctgaaactgaagctgatagatcggaagtcgctgcagatagagcagaagcggcggcagacagggctgaaacgggtttacctgctgccgatgttatttgggagcatcttggtgtgtcaggaaatgctcgcaaagcgcttacaaaaaatcagcttgaagcggctgattttaatgccgcacctgcaccgaaaaaaacaacagtaaaccttaatgcgctattcacggctggtacttattaccctggtacgtacggctcgatttcgaatggatttcctgagaattttatgtatgcgtctgttcgcgttgcagatgccgggaataacaccataatccagataatagaaaatagtgacgccgcggtttatatgcggtcaggaaaaactggtgataacggcgagtcatattcatttagcgaatggagtggtgggctttccgcgcctgttgatgttaatcaaaaatataaagtaggctcaattgttatggccgcaatcactaataatggcggctcgtctttaatgtatggagaaacaattagtggtgcaggattaaaggtatcaagcgttagcttgccttactggagcgctggtaatggggttatttattgctggagtacattatcaggtacctggcgacatctaggccatgcgactagcaccggagctgatgataatccggtgactggtaaaacatatccagtgtcattgttcattcgaatcttgtaa

SEQ ID NO: 160255 - DNA, 402 bp, Enterobacter cloacae
atggaaattttagatgcacggaacatggtttataccgaaacaggagagattgactgtgaggttttggtcggtgagcaatggttgccgttctgcgcctcagaagatgacagcatggcgtacggggcaacgctttaccaggaagcgaaagatgggaaatggggtgaggtacaaccctacaaaccgaccgagaaaaccttcagtgagccagccagtgccatggcaacgaaagcagagctgatgtcgaatgctgaagcggtgattgctccgctttccagggcagtgaagtacgacatagccacagacgctgagaaaaacgctctggaggcttgggaacgttacaccgtgctgttgaatcgtgttgatgttgataaccctgtgtggccagatacacctgaatcttga

SEQ ID NO: 160256 - DNA, 123 bp, Enterobacter cloacae
atgatttacttgttgtggatactgggtgcgcttgcggtatggtgtgcttttggttattgctggttgaggttttttaaaatcactgacgaagaggaggagtatgaagagtgcccctatgactga

SEQ ID NO: 160257 - DNA, 204 bp, Enterobacter cloacae
atgccgctatggatgctcaccataattttattttttttcatgctggccatgttcgcccccatacccctcttgcgtagaaggtgtctgtactgtggcaaacgccgtccattgcttaactggttgtgctcacttgaaaaggactactgtgatgattgtctggacaagttgaacgatgaaattcgccataagagaacgtactcatga

SEQ ID NO: 160258 - DNA, 240 bp, Enterobacter cloacae
atgccgaggcaatacgaaatagagggcgctttccgcgccgctgtcaaaattgagcaaactggacggcgtaccgtcaccacagaggattttgtgaaacagcttgagacggtcaactggaactggtcgctgaagcaggctaacaactggatagagtgttacgtgacgaccttcaaggatatttcttccgatgaaggggaagagcgtaccttcatgctgttcaatcctaacggggggctttga

SEQ ID NO: 160259 - DNA, 432 bp, Enterobacter cloacae
atgaaggggaagagcgtaccttcatgctgttcaatcctaacggggggctttgagatgggttttccttcaccagctactgactacattgaagaacggatctcgctggataagttattcatttctcacccgagcgccacatatttcatgaaggcggcaaacacgtactggcgcgctggtataactcagggagcgcttcttatcgtggattgctctgctaccccttgcgacggttctgtggtcgtctgcaagctggcgggggagtttcatattagacgattcaggactcacccatataagcatctggaaagcctgagcggtgactgtcgtaaggacaggataaacacggaagatgatgacgggattttcggcgtgattttgcatgcggtgaacgacatgcgaacaatggaatttgatgataatcttgttatataa

SEQ ID NO: 160260 - DNA, 543 bp, Enterobacter cloacae
atgaaagttacatcttttgaaattgaagggcctttattaattgatgtggacgtatttaaagatgagcgaggtttctttttagagagtttcaataaagagaaattctccgagattgctggtataaaatatgaatttgttcaagacaaccactccgcatctacgaaaaatgttctccggggacttcattaccaagttgcaccaaatgagcagggaaagttggttagatgtattgtagggaaagtatatgatgtggctgttgatataagagaaaattctcctacattcgggaaatatatcggtgtatatttatctgaggaaagcaagagtcagttttggattcctcccggttttgctcatggttttttagttatgagtgaccgagcagagttcgcatataaaactactggttattactcgaaagttgatgaacgtggtataaaatgggacgatccttctcttgatattaagtggcctctcatcgatgcgccaattctttctgagaaagataaatcacagccacttttaaaagatattggttggtga

SEQ ID NO: 160261 - DNA, 213 bp, Enterobacter cloacae
atgggtaatgcttgtgaggccggttcaatcagggtgatctccatggattctgaaaataaaatacaaacacacaatccgatagattattgtatgggggcagtggttattagcaacaataccgataaagttaaaattgatattcgagatgacgatgattctaaaaatatcgagacgtggatattaaaagacaataaactaataaaggcgcaataa

SEQ ID NO: 160262 - DNA, 606 bp, Enterobacter cloacae
atgattaagatcatgctatcaatcttattatatggtttttgctgctattcctatgctaaagacttttgttcggaactgtccaaaacagccgagaaggagcaagcatatgtagatcattccgtgaatatatttaaggttgtatcgaaaacaagactttacttcaatagcgcaccaagtgaacaatgcaagattaataatttatttttagttaatggtgatgttgtttcaggatacaccactcttaatggatatttgtttgcatcatatttcaagaaaaatggtgaatcggtcgatggatggctcaaactatcagatttaaaaaataccggatatactaatggtccatcaagtgacgaacaaactgtttttaatattattccagatatcataaagaagaacaaactaactacagcacctgaaaaatgtatcaacatcagtggcgatgatagagacaacaaatactataaattcgctataaccaaagaagcacttgaagaatgtaaagacgtccagttcactccatttagtattttggttaaaaaaggcactcaagaaatgtacacaaaccaaggggatgatattgataaattccaccccattgaatga

SEQ ID NO: 160263 - DNA, 2673 bp, Enterobacter cloacae
atgctggacaagaatgtagcagttagtgttttaaacactcaagccctggctagagcaaaaattaacgctgaaaattttaaaaaaggcatagataaaaagcttaaatatggtgagtcaaaatgtgcccgttatgttaaaaaagcattaatcactggaggggcatctgcaaacaattcagaaattgaatcagctaaaaattatggcccatggctgcttgaaaataactttaaaattgtggataacgctacaacagtgcgtactgacggtgtattcacaatttctggacagcaagtgggggatgttgtcgtaatccaggcagcaccacatcatgtgcatggtcatatggcgatgtttaatggtacacactgggtatctgattttgtccaggaaagggggttctatcctgcccaaatatatcgtgatcaaagcataccctatgcactttatcgttatggcgataataccacatcagagcagaacgcctcggcaacccaaaaaagaaaaattaaaattgtctggccgatcccctccaatagcggggggaaagaattcagtaacctggaaacaatactcgctcatctgggtggggagtcaaccggacagtacgcaattggccgtagcgggatgtggcatggcggtatacatatcacacatgcaacgaccccatggtgtgcgttgagtggtaaatctcctcttgaggcgatagattttccggttccctttaaaggtgagcaggctgtgcgatgcatggctgatggagaagtcgttgcttatcgtgtctgcaaggattatctgacgctaggctgggaatctggtccactgagcttttctgggtcatttgtgctggtgaaacactatattcaacccggtgagaaagagtccagcggactacatttctacaccttgtatatgcatcttgcaccgtattcagcctatgaaagtgcgaaaaaaatccactggataactcaggatacgctctctggatattccgaagccgactggttgattatggatttgagccgcagcgaccagaggccagcgagtgcaggcaatgtcaacaaagggactcctgttacctgggatgcctcagatacttccctcaccgccacccagggggggcgtacttatggactggcgaccctgaatgcggatagcggaaaactgaaaacagggcaaaaagtatggatgctggtcgacaataacaacattaaaccggcgccaggaagtggccctggctggtgggatcatttggttccaccagcaaaagaagtcatggtttttgataaaacagtcagtctcagttcgcctctccctatcaaggcaggtgactcgattgggcacatgggctactatcaggcaccaaaggacgggggacatgaggcgagatatcaggtgcatattgaatgtaccagcatggacgataacctggaaaaattcctgaccaatccagaaaaagtgggggagaaaaacccactctggctgaagtattctcctggccttgctctgtacacaaaagacgtcgcgaaaggcaccttctcaaagggggcgacgtcaacaacgcggacaggccttcttccgttgaacacagtcacagctgaaacggataaatcaacaaaacaggaatactggcatctgcgaccagaaaatgcctacgtgcccaaaggccaggcggagcctcaactgttatcacagtatgatttggtaaagttgggtttcagaactgaaaccgtagagcctgccagctttgattacctggatgggaaaaaccagcctgttggattcttccgcagtcttatcaacgcactttacgaggccgcgaccggtgatacccggaccagtcatgcactggtgaagcataattatcagcgtctgttggataaaattgatagtggaagtgaccgttactctccaatggaatactggagagcacttcataatcctgactatcgtgacgtcgttcagaaaacaatcgtaaaacatcccagcgactggtacttcaaaaaaggcgatgctatctggcaactattcctgaatgcgcttaagaaagacgctccggaatggaagaaatacagcgaagatttccttgataaaatggcatggatgcaggatgtgaccactgaaaaactggggccctcattgtggcatatgcacccaataatgttccttggtgctctaaaaccacgaaatgatatagattggagcaagctgaccaagcaacagtttactgatgctgtttatgaggccgctcttaaagaacaagaaaaatcaggtattcctgcggcaataacaactgctcaggccattgatgagtcggggtatgggcgtaaggttccagttgatttaaacaataagacatatagtttcaacctctttggaataaaggctaaaagtggacaggaatttgttgagatatggaccactgaacatatcaatggaagtaacattaaaattaaagataaatttgcagcatataactcttttgaagaaagtattgccgacagaactagattcttaactgaaaacaagagatatgcctcactatttgaaaacgatgatcctgaaaaatgggctcatggccttcaggataaaggctatgccacagaccctaattatgcttcaaagttgatttctataatgaaaggtagttatatgaaaagcagaggtttgaaatga

SEQ ID NO: 160264 - DNA, 471 bp, Enterobacter cloacae
atgttgaagaagattattcttgcttgctgcttattctgcgtggtcaatatatcctcagcttcagcaaacgatagttcaatgcctcggcgaattgttgcaagtttttatcatgattaccttgtcgcgtctgaaatgcctgatatggaatcagctaataaactgactcaaaaagctatttttgaatatacaactgagcatctcagaagtctgcgggataatgatgaatcgggtgctgattattttgtcgatgctcaggagatatgtgaagaatggaaagacagcatttatgtggaaactgtttcagagaatgaccaggttgcacaagtgaagctaacattaggatatggtaaaggcgtatccctgtatgccgtaaacctggttaaagaaaaagggagctggttaatggattctgttaaaccgatatcccgtagtagtatttattgccctcggcaagcagagggaggagaataa

SEQ ID NO: 160265 - DNA, 1062 bp, Enterobacter cloacae
atgtatcagaatatctgtcaacaccgtcctcctaagccggtcgacagttccacccctcgtcatggtatgttccgccatacggaagacgataaatggcaaatcaatctctatatgttgttcaaaaaactacccaaaccacggggttcgagagccatttggtataaaaccagtcaaaatatggttcaaaaactaccggcagaaatctttggaagagaaattcgtgagattggtgctgtttttcatgacaaaattgacaggaacacatggattacagccagttcagcactcgttttactaacttacggctccagaaatcacaaacatcttgaagtcgctcagtgggtcgaacgatacacaggcatcagactgccacgccaacatgggttaagccgaagagaagcagtgtttggtcgtaaattacgtgaattcattaataaagaactcgtagacatcacctatggggactatgaactggaaactcagcaccgaatgtgcaatgggaagtactacgtcgatttcgcagttaagcattactggaacggtaacgaagatagctcaaaattttacctttatctcattgagtttgatgaagaagaacacacgttggcgccaaataaggttgctgattcaatcagggactctgagatcaaaaggcaagagccacaagctaccatcatcagggtaaaacatgatgagagtgaggactggtttgaactagtacgtaacaacaatgggctaattagctttgaagcagctcttttatcaggaatttctgctgcaagccgcggttttgatggcgacagaattttcattgattcaaagtccgccagaaatgcttatgatgacctccaaaaccggagtgcttggttgctaaactatgagaaacagccgttgagagggatcgaagaagcgataaaacgatgtggcattcactatgaaaaagcacgttccaaaacaagcagacaactgagagtatctcttcagtcgttaagctcttcactttaccgttggttgcctgatagcgccgccgaatacgtccttcaagactttaaaccagactga

SEQ ID NO: 160266 - DNA, 174 bp, Enterobacter cloacae
atgatgcgaagtcaaggactgatttttgaatttaatgaagttttaacactagcttttaaggtgtgcatccaccataaatccacgaatgcacacgaaaaaagtgataagtatttgaaatttagtgcacgtatttgcagctatttcaggacggtttttgctcgctttttttcttaa

SEQ ID NO: 160267 - DNA, 936 bp, Enterobacter cloacae
atgttaaaaattcctgactcagactggcggaatgatgccggggtcccccaaatttctgttgctttcttgcggaaaaagacgcctcagacgatacgatttacgcaatgggtgcagcggacacacgccaatttactcaaagcccccgaaaatgtcctgtcgtgctgcacatccgggttaatcgagggtgacattccggacaaaaacggctggatttctgcctgcgatgccctcgccctgctcacctacagcattcatagcagccagaatgaaccgctgattgacgcaattggtcaaaaagcaggtttagagctgcccgtaaggcccggagaaagccgtcttgaggggcagtttggcgtcaaattacgcgacctgataaccgaattgaggaatcagccgcattttgtccattacgaactcgagcaacagaaaaccatcggcccctacagagtggatttcttcctcactgagcagtggtacaccgatatggcaaaaggggaaaccgctaaacgccagtttatcattgaattcgatgaagcggctcaccggtcaaagcgctatcagctcaatgataaacgacgggaccaatggttacgggacaatctgcccggcataatgctaatcagagtcaggcacgaggagcaggaaacatggtttcgggctgtgcagcacctgaaaagatttgtccggctggaggattgctatgctcactgcctgcggatggcctgtgtcgatctttcagcgccagaactacggattagcagcacttcggcccagaaagcttacgatgcggcacaaaacgagtgtagtttcctgctcaaaagcccacgccagccgctcaaagaaatggaaaaactgcttaaccggatggcaataccctttgataaacgccgtgacaggcactttcggcgagcaaaattaaggtcatacggcatctag

SEQ ID NO: 160268 - DNA, 597 bp, Enterobacter cloacae
gtgagttatcaatggttacatgaatccgttaaagctaaggtatcagaatgtgaaggcctgcttctggctgagctgattgatgaagggtatctcctgacggatgttcaactccgtgcgcttcgacgcttttctttcgtaatggctgtaggtctgctggcgcaggaactgggtatcttgccttactctccggaacgaattgcgaccgccgtctgggaaatagttgttcgttggctgagtgatacctctgtgcaatataacccggtccaacaagcattgattgatattcagcgtgatcttgtaaaaagggaaggggcacatttcatcggcctgaaagatcgtgagagccgtaaacccggaaaccactgggggtatatccaccatactaatgaggattttttaatcttcgcacctgtatttgaagagtggtgccagaaacattcattaagcgctcgagaagtcgctaaggagctggcatgccgaaaacttcttcgggtagaaagtaaagggcattacaaaaagcgtcctcttactggtatggataagtgttactaccatattaagcgggagtttatcagtgttgatttgaatttttcttaa

SEQ ID NO: 160269 - DNA, 828 bp, Enterobacter cloacae
atggatgccacaaggatgatccaaacgttaccggaatcgaataacgcaagtatgtttctgttactggagggcggggcgcaaacaacggatgcttttcagacattttataacgaacatgcttcagctatgcattcgctgtatcttcatccgcagcttgtcgaagccagaaactatggcccatggttgtttgcgataagggataaagaagcgttagaaactcgtatcaagtccacaccggggttggttgctgttattgcttcttcacgctcaggtggggctttagccgttcagctttctgctgcctgcacaattatatctcctgacggaaaagcggctgtagtgcgtttttatatgcacaatgtcataagcctcctggctggatgccacgatcaagaatggcatcgttttttatttaatgggatttctcaatggtggtcacccaaaaagaatgaatggcaacctgtaaacattccctcttccctggtgaccgatgccagaaactgcgccattcaattgaatgaaaaagaatggcaatacctcatgggtaaacctgaggtaaccgcagtattagcatcatggcaaaaaatgccgtccagccagcatttcccaccttgtgttcaacgggacatggttgaaaaagctcttaacaaagccagcgcagcgaaaatgaaagcaggtaccgaacaaaaactgtatgccctttattaccttaatggcggtaaacaaatgctggagtcagtcgatatacaacctgcattagataaagttacccagggaaaggtatcgttagaatatgtcttaaccaactatgttcactctcagggatga

SEQ ID NO: 160270 - DNA, 1392 bp, Enterobacter cloacae
atgataaattatactgatgagtcaacttttcttgaaaagcacaaaccgtttaggaagttttggacaattttatcacctcattatgtatctttactgcatgcacttgccaaaatgataaggggagggaacccaactcaagaactaccttccaatgatgaggattttcttgcagggtatgaaacctgtctcaaaaattggaaagacacacaaaaaatcatatcttttgagattattattcggctgagagatataaaaagattggaagttgaaaaaaaagaacatcatcgaaacaaggataaagaaaagaaagaaaagtgtattgatgaaataaatttaaaaaaatttgaaattcttattcttcgccgttgtattgactcaataatttggagcatacttgatgaagatcactcgagtttgcggcgtttgcctattaatgcaggcaatgacaatctatcagaagataacataattgattctatggtcgcagccgatcttatcaaccaggacaaacacgccgtagcgattgtctctgacatgagcacatttgttcatgtgggggatttagtcacctttaatccactggatggcttccagctcgtggaggttaaaacaggtgaaaagaataatgagctttatgaagctgctgaattttctgttatctcagagtgtccgcactttgaagaaaacttcattaacaatatgcctgacaatgatgttaagcaatttaatcgcataaaaaggcaaattattcgcggcatgaatgtgttggaggcaattaatactggcgagggctttgacaaccttcatcagtctaaagttaaaatcgatgagatagatcatccctctgaattttatacccaccgcttaattaaaatgtgggagattattcgcggaggaaaaaattgggcaattgatactattgatgaatgtttgttcttaggtatgtaccgtgattctgaaatgggctttgttgccttcaatggatggatggatagtctcggtataaaaagccctgttgtgaatataaatgattcattctttgaccctttgtctcggccatttatgagtttgcatctgccaactgaaatgctctccgatctcatgtcgggacaaataatcatcgtcatgtgttttgacaatgaacttttttttcaccgtgctaacaaaacgtacccaggtttatttctccttagcaatgcggcaagaacaaagcagccattagaaaatattcttcatgttggttcgcaagggatagcttcttacgtagatgggcataccagctttttaggtaatggtattgaatcccgaatccttttcgatcagcaacgacccgacaacattattgagtggagctatgctagaagcgatctcaaaaagcaacatgaagcataa

SEQ ID NO: 160271 - DNA, 195 bp, Enterobacter cloacae
atgactattaatatcacgatgaatatggacaattttgcaggcgagggggatgtgaatctctttggggagatgctgcaccggttcttcgcgctctatgccgatgttcacctctttaaccagctcacgctggtactgcaaccgacaggaaaacgactgagatggcgcgagaatcacagccagcacgtaccgggctga

SEQ ID NO: 160272 - DNA, 177 bp, Enterobacter cloacae
atgcataagaatttagatacgcgtataaatgcagacatagcttgtgaagaggacaagaattcaagtccagctaaagatgaatctgattcgttaactttggaagatttactgccggttttcgacattacggagataacgaaattcaatcaggtggtctgtaaatcgtttagcgactga

SEQ ID NO: 160273 - DNA, 408 bp, Enterobacter cloacae
atggggcgctggcttgctggcagactcatgaaagagctggggctggtcagttgccagcagccgactcaccggtataagcgtggcggtcatgagcacgttgctatcccgaatcatcttgagcgacagttcgccgtaacggaaccaaatcaggtgtggtgcggtgatgtgacctatatctggacgggtaagcgctgggcgtacctcgccgttgttctcgacctgttcgcaagaaaaccagtgggctgggccatgtcgttctcgccggacagcaggctcaccatgaaagcactggaaatggcatgggaaacccgtggtaagcccgtcggggttatgttccacagcgatagtaataatgccgatgtcagtctttaccaccacttagtttgccgtttaaccagattggtgtga

SEQ ID NO: 160274 - DNA, 234 bp, Enterobacter cloacae
atggactattcagaagcgttcctgcgccagcatgaagaaatgtgccaggtcgtgggcagtatcgttttttcgctcgtggaggccggacacgactccacaagcaaaaatatcatcaccgtgctgcgcaatgagctggccgaaagtaacgggaaatgggagccggaccaggtcctttatcttcagctggccattgatttactggagcgggggcgaggggttcccggggtgcgctga

SEQ ID NO: 160275 - DNA, 243 bp, Enterobacter cloacae
atgaaaaacacctcgcgcaaaatcaaaatcacctatgatgacctgatgaacatcacagcaatgagtatagaaaccatcacaggaattcagggcagggtccagctcagcgaaaatgagctgggcatactcaggggaattatcctccactggagagcacttgcatcccagttcggcatatcaactgaaaacctggacagggatatggactggctgtgtgaactggccggaataccggttaactga

SEQ ID NO: 160276 - DNA, 951 bp, Enterobacter cloacae
atgttcaatcttcgcgtcaaaacctgggaagactgggaaacactttgtatatactggatgaaagagattgcctggtggggccatagagttgatacaaattatcaaacctatggcaggccggggcaaaaacaacatggggttgatataaaacctgtattacctggctgcggtattgttggccaaagtaaatttatccagggctcattcaccctgaaagatcttaacgctgaattggacaagacagataattacccagggccaattactaactactatctgcttacaaccgcagagaaatgcacttccatccagaatgcaagtagctatgagcgaatctctcatacaagacaggatggatcgttcttctatgttgatgtttactattggtcagatagaattaacgtggattttttacctaaagaagttaaatacaacctattccctgaagccaaaacattgttcgatactgagagcgaaaaaagcaccaacaacagctctacactcagtccagatgtgatgctggacaagctcgataaacttaaaaggttaataagaaacacgttcagtgaagaaaacattaaatggctggaaacctggaacttcagaagttataaaatttattccagggattatgacgttttcaacatggcctatctcgactggactatgattgaagtggcgatgagaactaataatcccaaagtgctacgtgcgtatcttaacaatgcaagcagaattaatttttacgcaacatggcctgtaagtcaggcgtttttctatgcacttgaagagtttagaaaaattgcttacaaccactataacacaggggctttagatggagacgaaaccttcttgacagtttcagatttaaaacatcgagactctatcgcccatcaaatggaatgcgcagcatcatatttatctcaggtaatcagaaatattcaacaataa

SEQ ID NO: 160277 - DNA, 627 bp, Enterobacter cloacae
ttgcaacagtgccataaaaactactgtcatcaggccggcggggtttatctcgatggcgctaaactgcgctttaacccgttcgccaacgtcaaagatatcaagcactctgctgaagggattgtgcgtctgctgacggtactcgccagcccgacgcagccgcttgatggcgtctgcgaggcgatcctgcagaaagcggtaatggatgcgtgggagaagaaggcaaacaaagcccgtatcgacgacgttcataattacctgaccaatgaggatgtgaatcaggcgtttgcagacaagccaaccatcatcgcgcgtctcgctgagctggccatgctgctcgatacctactgcacctggggaccggacggagaatactttaacgccgacaccccgacgctcgatggtgaaacccgcttcgcggtgctggagctgctgagcctggaagacaagccgaagctgctctccgctatcctgttctcgctcattctggcgattcaggaaaagatgtaccacagcccgcgcgacctcaaaaaagtctgcatcatcgacgaggcctggcgtctgctgggtggctccaacccgcacgcggcacggtttatcgaaaccggctacccgccatgcgttcaataa

SEQ ID NO: 160278 - DNA, 1137 bp, Enterobacter cloacae
atggctagttatgtgttatgggctaataaaggcggcattggcaaatcgactttaacttttcagttagcttgtaagtatgctcgcaccaactcagaagtccctactttcgtaattgatttaagccctcagtgtgacgtatctagaatgctcttggggggcggtcggtggaaaggagaggaaaaaatccttagtttgatgcagcaaagagttcgccaaacaatctatcagtatttgcgagaatgcgtccgtgatgtacccaatggacaaggttggcccgatatcaaccaattcattgtaaagccaaatgatataagagatgacgatcccaagccgctccccacaaacttgtacatgatttgcggcgatttcgacttagagagagcaactcatgacatcgagtctctttcgcaaccgccgaaaagaggtgggcttgttccaaccggagcctactactcacgttatctcctccctcgtacttttttaagaaaagcagttcaagatatcgaggcagagtatccgggagccgtaattttcattgatacagacccttactattcagtcgtaacaacacatctcggcttacttgctgctgataagctgattacggcttactctccatcttcgcaagcaagtcaatatgcagtctatcgtagcctagaatttctgcattccgcaggctatagcctgagtgatgatattgctagagagaaagaactacacgaagagccttggtttgactctagagataatcaaattgatgtcccgcaagtagacgttccgattttatctcatgtacttagtaacatgacgacttcgaaagcaggcgttggtgaacctcgttattcccaaccccaacaattgcatagaagcgtcataagtgcagttacatcagagatagatcaaaaactggctgctttgaatcaggcacatataccggtgtatgactatgtttgggcccttcaacgtttggggctgatctgtgactataacggtatcgatatgagctgcatcgttacaggtggacgttactctcaacctgacagcgatgaaatgtatcgagtcgatcgctcagtagataaccagctacaggttaatgcttataatcaaagaattcagcagattatcaaccatctttga

SEQ ID NO: 160279 - DNA, 210 bp, Enterobacter cloacae
atgaataattcttgggaggatggctatttctctgttcggggctttggggttctggccttaagatcctttgaacaacaaaatcgggaacaagcagtacttacgttcagtaatggcgatgtgagagccaaaattcggacatgggtcaaggataacgtcattcacttctatctgtgggatcagggcgactggaagtcttgcgactggcagtag

SEQ ID NO: 160280 - DNA, 870 bp, Enterobacter cloacae
atgaggctttacataataggaaatggatttgacattcgacatggcttaccaacaggatacaagcactttaagtcgtatgtagcaaaaaatgaccaagaactatatgacgcgatagaagaatacatgcctgctggggacgagtggaatgagttagaaagtgctttaggtgaaattgattatgagcttatccttcaaaacagtgagatgtttttggcttcatacaataccgatgattggagcgatgcctatcatcacgattaccaatatgaagtagataaaatcacacggatgctgtcagctcgcttgaaggagcaattcactgattgggttaaagggattaacatagccgatgcttacaattctgagcaatacatcccgcccataccaagagaaagtctctttttttcatttaattatacaaataccttgcagcagatctatgccgttccagacgtgcaaatcatacatattcacggcaattgtagttacgatgacgatctcatacttggtcacagttttagggtggaaaagccactaaatccatatataggaccggatcaagatacaagaatagcagaggcatacgacagcataaacgaatacttcggtaatacattcaagcccagcgaagacataattaaagaagaaagcgtttttttctcgtcgcttaataatgtggatgaggtcatcgttttaggccattcgcttgccgaagttgacggtgaatacttcgctaaaataaataaaagtatccaagaaaatgctcgatggatagttgctttatatagaggtgaggaaaaatcaggcagcttagaagattatgatgtcagaaactcaaatatttcttacatgcagtatgaagatatatga

SEQ ID NO: 160281 - DNA, 228 bp, Enterobacter cloacae; identical to SEQ ID NO: 82293

SEQ ID NO: 160282 - DNA, 348 bp, Enterobacter cloacae
atgcctaaaagcaacacaaaaaaaggtgttatttacaccgaaacgttcaaaatcactgctcgcaatcttttgaattttctttcgaccagtgttgaagagccaaaagaagtacttaataaacaactcgatgagtttgaaaagaaagttgatgttttccctgagagctgtcagttttcacctgacttgcttgaattaggctgtgaccgttatcgtgaatgtattaccagggatggttatcgcatcctttactcctacgatacagaacaggaggaactaactgcccatgtcattcttggcaagcgacagtcagtccttcagtgtcttttcgagagactaatcgctttgtaa

SEQ ID NO: 160283 - DNA, 237 bp, Enterobacter cloacae; identical to SEQ ID NO: 111146

SEQ ID NO: 160284 - DNA, 357 bp, Enterobacter cloacae
atgatgaaaacaatatcagtactattaatgttactcccattaaccacaattgcggctacttcgccagaagggaaagctgaaaatccctttgttgttggcaatgaagttatttgtctgaaagaaatccagaagcagattaccccttatctcaagtcatttgaagaagaaggtggggttaagtaccagtacaatgttaaatctggtttatcgtacaaggatgctgtagggctacggttacagatcaaccgtgttgattctggattggacgtgcgtgtagctgatcttgattactactggctacaggaacgtgggagcatgtgtcagccagcgtacatggtacttgatcgttctgagtaa

SEQ ID NO: 160285 - DNA, 219 bp, Enterobacter cloacae
atgctagtactgagaactggcatagggccgatatcttggcagctatcaagaagcgaggaggaacgttggcacagctatcccgagatagcggtttacatgaaagaacactttataacgtacttgagcgacattggccgaaaggtgagcgaattattgccgattttatcggtgtacccgttagtacgatctggcctgaacgctataagaaacttaacgtaa

SEQ ID NO: 160286 - DNA, 498 bp, Enterobacter cloacae
atgagcaaaaacactgatgttgtgcatgatcttgcaaatactgactacaagaagttgattgaaagaactgctgggaagaacttcaagttaactgattgtaaagctgagcttgataaactttttaaagaaaatcctcatgaattcattgatcagttgaatcgtgtatcaagaaatctttctcttgttgctcacgagtacaagaaggagcttgatgcaagtaaagttgatgatatcaagcaacagatattgcatttagatgaatcagtaaaggctgctctgcttgcttctttaggtattaaaaatggcaaggcaaagtccggtactgtaagaagtactaatcaaagagaaatcattaatgttaccgttgatgggaaaatgtacgagatcaaaaaaacaggtaacatcagtgctgaacttaaagaactgattaaatctcaaggttttgactacaaaggcgaagaacgcatgaagttctttgataagttcgaatcgaggtaa

SEQ ID NO: 160287 - DNA, 894 bp, Enterobacter cloacae
ttgcctgaaaatccagccagctacagggtcgttcgcacgaaatcttatttattcaacaaagcccaactgggcctgacgcaacccgccgtcagcaaaatcatcagcgatatcgaatcttacttcggtgtggaagtgatggtacgtaaaaatacgggcgtaaaactgacggctgcaggccaggttctgctctcgtactccgagtcgatcacccgtgaaatgaaaaacatggtgagcgaaatcaacagtctcagttttagcaccgttatggatgtctcctttggctatccgtcgctgattggttttaccttcctgtctgaaatgatcaaaaaattcaaggaagtgttcccgaaagcgcgcgtctcaatgtatgaagctcagctctcctctttcctcccggccattcgcgatggtcgtctggatttcgctatcggcacgctgagcgatgaaatgctgcttcaggatctgcacgtcgaaccgctgtttgagtctgagtttgtgctggtcgccagcaaaacgcgaacgtgcgccggcccgacgacactggcatcgcttacgcacgagcagtgggtgatgccgcaaaccgatatgggctactacaaagaacttctgaccactctgcaagacaaccacatcagcatcgaaaacatcgtccagaccgattccgtcgtcaccatttataaccttgtcctgaatgccgattatctgacggtgattccccgcgacatgattgccccattcggttcggatcaatttattgtgctgcccgtggaagacgaattacccgtggcgcgttatgctgccgtgtggtctaaaaattacaggattaaaaaatcggcgtcagtattagggaaggtgcgaataagcaggtcatttcttcccaagctgactcgctga

SEQ ID NO: 160288 - DNA, 474 bp, Enterobacter cloacae
atgagagaaatgaacggcgttgctcagttgatatcatctgctgtacaagcatcaggtgtggatgacaccatttccaaacaactgacagaaacattacaaaaagagcttaatgactacattaatctcgagagtcttaaaaacaagctcgaagtattatatagctttgagaaaaattatcttgaacttattaagtcttacaaagaagaaataaagtttgcaagcacgttgcaagaagatttgcgtaaagaacgttcaaaattcttttctgagactttaaaagaggtttcacagactctcagcgagtctcaagttgacggttcagttgcatcaaaatggttaaaagaacttgtcgaaagctacactaaaagtttagaccttagcagtagtttaattgaagaaaacacccttgatactatagggaaaattcgttcagaagctaaactacataaaccagccttatcttctgcagattaa

SEQ ID NO: 160289 - DNA, 288 bp, Enterobacter cloacae
atggaaacgccgtcttcaaccagtaattcattatatataaatgatattttatattcggaagaggataagaaagtcattttgtattttaactgtattgataataaagaaattttctcagcagaagtgaaaaaagttggggagataaaggtggtcagttctgacgagttgcactcgttcttaatgaagtttatgccttatgaatcttcaatttttaataagttgcataaaataatatgggattacattgaaggcaggaaagtaaccttcccgatccaattagttccctga

SEQ ID NO: 160290 - DNA, 162 bp, Enterobacter cloacae
atgtgggatcagggtagcaaaattgggcattgggttgttgttaagggtacagatagtaaaggaaatgtatctatctatgatccgtggaaaggaaccagttataaaatgacagataaagagtttaaaggaacttggaatggaaacgccgtcttcaaccagtaa

SEQ ID NO: 160291 - DNA, 345 bp, Enterobacter cloacae
ttggcagacaaacgcagcaaaatgctcacgatgtgggtgaccgaagatgagcaccgccgtctgctggaacgctgcgacggtaaacagctcgcagcctggatgcggcagacgtgcctggacgagaagcccgcccgcgccggcaaacttccgtcgctctcaccggcgctgcttcgtcagcttgccggcatgggcaacaaccttaaccagattgcccggcaggttaacggcggtggcggcagcgggcacgaccgggtacagattgtcgccgccctgatggccatcgatgccggactcgagcggctgcggcatgccgcgctggaaaaaggggctgacgatgatcgttaa

SEQ ID NO: 160292 - DNA, 324 bp, Enterobacter cloacae
atgctcaccatgtgggtgacggaggacgagcaccggcggctgcttgagcgctgcgacggcaggcagctggcagcgtggatgcggcagacctgcctggacgaaaagccggcacgttccggaaagcttccctcaatctcgccggcgctgctgcgccagcttgccggcatgggcaataacctgaaccagatagcccgccgtgttaacgccggcggcggtaccggccatgacagggtgcagattgttgcggcgctgatggccatcgatgccggacttgagcggctgcggcacgccgttcttgagaaaggaacggacgatgatcgttaa

SEQ ID NO: 160293 - DNA, 486 bp, Enterobacter cloacae
atgaacagtcttttaacgctggcgaaggacttagagcagaaatcgaaagcgcagcagcagagtaccggcgagatgctgaaagccgcattcagcgagcacgagaaatctgtaaaagcggaactgaacgaaagcgcgaagagaatcagcgccgccatcctcgcacacgagcagagtatgagcgaggcgatggagaaaaaccggcggagcgtactgcggactgccgggcggacatggttcaccatcctgatggtgtcagcgctgctgatcggcacgagcgcgggcattctgtggtggcaggggcagcagatactcgacaactacacgaccatccgggagcagaagagcacgcaggccatgctgtcagagaggaacagcggcgtgcagctctcgacctgcggcgagcagagacgccgctgcgtgaaggtgaacccggaagcgggacggttcggagaggattcgagctggatgatactggcggggaaatag

SEQ ID NO: 160294 - DNA, 357 bp, Enterobacter cloacae
atggcggatttgatgcgcaaggtatttgggatttatgcagggaatcaattatgccagccaaaccttgccctcgatgcggaacggtatcagaacgacctgatggtgcacactattgccatactaaaggtaaaggaaagtgatatgactaaatcgccaatgaagtacattgttcgtgcatggaataaagaacttaaaaaaccagtgtggcgcatgggaagccgtaaacatcgtaaagactgtgcccgtaattgggcttccgttacagtcgccagcgctggggcgtggcacgaggttattgaccgtcaggatgcagcagacgaagccgtagcagaagaggtaagtaattgggatgcataa

SEQ ID NO: 160295 - DNA, 282 bp, Enterobacter cloacae
atgacacttgagcgacttaaacagttattgcaagccatagatagcgaagcatatgatgaagaaatcattcataaagcacttagttcagatgaattaaaagctcttgttaaactcgcgatatcggctcttgtcaatgtgcaattagatatgagcgatgctgattgcttctctatagaacgtttgcatgaaattatttatggcagcaaattacgcggacaggaagcaaagctacttgctaaattcatgaatgatgcgaagcagctaaaaggttctgaatcatga

SEQ ID NO: 160296 - DNA, 201 bp, Enterobacter cloacae
atggtaaacaaaaaacagccaaacatatctctggatgaattatacaaacttcgcgaagcatatcgacatttccagtccatgaatcctttagttagggtaatcaatgaactgatcgatattcgtgagggagagaaaaaggaaattcagagcgcagtcaaaaattatatctcagcccaaaaaaacgcggagacaaccaaatga

SEQ ID NO: 160297 - DNA, 810 bp, Enterobacter cloacae
atgggttggttaggtaatcttggcaatgctctgattagttgtgtcagtaaaccaattgaagttttgtgtgactgggcttctgaaccacttaaagaaagagcacatgagagacatgaatcgagtcaaaactccgatcaccgacgcaatatggatacattaacagctcaatctagagctgagcatgaattcaaaactcaagaacttgagcttgaacacaaactcagaactgaagaaaaggtgcttgaagttgatcttgaagtccgccgggttcgtgaaattgaaatggctgtcgcagaaattcaagaatggaaaaaagagaaagaatttgagcgtatggagcgtaccactgcagccatcgctctttatcttgaacaactcactaaattgaatgtcgagactattaatgctatcggtcatatgcaactcgaactcaaagaacgcgctcaacggctagtttacgaaaaaaccattcagtataaagagcttcaggataaagcaatcgaagaagcaatgaacgacttacttagaattgaagataaattcggtaataatgaacgagctaaagatattcttattaaagcagtagataccaagatgggaaatattattacaacatcgactcgttttttagaggaactgaacagagatattgttaatcttaatgaaagcattgacagacttacaaatcaaggtcagaaatttatcgaaaatcacttagaacgttttcatatttccgatgcaagttcaccattgatactcaaaggtgaacacgaagaaaaattagtattacaacataaagacattaattaa

SEQ ID NO: 160298 - DNA, 861 bp, Enterobacter cloacae
atgggtaatcaggacataaataatgccagaaacataacggcagtgggaatcacaactacggaggcattacgaactagcggggtagcggtgataggcacaacattagacgttggcggtgtggcaacattaaactctgatttggttgtagcgggtaatggccaagtcaatggaaatttaaattctaataatagcgtatcaggaacaaccataacgtccagaggtgagacctatactaataactggttcagaactatgggagatggggggatttatttccaaaaatatggtggtggatggaatatgacagattccaatactataacagcatataatggtaaaaacattcagacttcagcaggattatatggcggatacgttaaatcaaccgggaatatagatgctaatggaacagttaacgctggatatgtatgggcatcaggaaaccttaattctaactacgtacactctaacggcaatattgatgcagctggaaaagtttatggtgctggtggagttgtgtcaggtggtagaacaacagttggagagtatcttcatctaaatggagtggcctatgctggaaatggatgttctcctaatggtttgcaagggcgagcagttgatggttctatattatcttgtactaatggtgtatggaaagaaggaggcggaagtgtaaataggatgtttattattgttgaagggaagtgttatgttccaaataaagatacaggaggttgttcttgtccaaacgatcctaatcgtctaaaacaaatagaagtgtcaagatataaaggaaatgaatgtaataatggtggaagtaactgtagagagccagacagaagattatatacatgtaattag

SEQ ID NO: 160299 - DNA, 243 bp, Enterobacter cloacae
  misc_feature (160)..(169): n is a, c, g, or t
atgagctatcgtaataaaacatatgtagcgtttgcgagtgaaaatataagttcttatcgtctaatggaggcgtggaaagcaaatgagaacattgacttcaacttttttgatgcacacgacctttttatttcaagagatacgagcaaaccagaaacgatannnnnnnnnnggttgtacttcttgggagcagcgatgcgaagagtaaaggtggtgatggtgactcattccttgcgcatgaaatag

SEQ ID NO: 160300 - DNA, 498 bp, Enterobacter cloacae
atgacgggagcagactttttattaccgattgcagcgggagccgcgattagctgggccagttatagtgtagttgcccatgctgtatcaaagcagcacatcagcacgctacgcgcaactgtatggggtgctctgggcactctctcattggtgctgggcgtatgcgccttttctgctgtaggtgctgagcatcagacagcacgaaaagatatcgtatgtgcagatgacaacccggaatgctatgcgaaaacgcaccataacccggtcagggagtgcaagcaggtaatggacaagaaagcgacgtttcgccatgtgtggcaggaaaatgaagcgcagtcggttttcggaacttacttgtggcacgacgagcaaaagagaacgattcaagcatttggacatcaggccaactccattaacagtctgggaatgctaacaccgcttcaatatttttgcgtttttaacgccaacaccggggaagtcatcgcagcttcgtttgaataa

SEQ ID NO: 160301 - DNA, 426 bp, Enterobacter cloacae
atgcttctggccatcgaactctatggggtctttgataatggcaccgcgctcttcaagccacgccgtaaattcatcttcaatggcttgaatatccaggggcggttcttcgatcactttattggggtcaaaaatccactctttcagccggctcaggttggcccccggctgtgcataccacaccttttcttccttcacgtagtccagagcattactgccatcagccagtttgccggccgcacgtattgcacgttggcgatcgtcaaagggaatactcagacgggttctttcagttgcaatttcaggtttcgccatactgtctacccctgtagttatgtgttatcgctgagagcgccggtaccaccacggccgcccggtaagttttttcccgcggataacccggagaatgacctggtacagcaccggtaa

SEQ ID NO: 160302 - DNA, 195 bp, Enterobacter cloacae
atgatgaccaaaagtgttctacatctaaaagcgttagcgctttttgaggggaacagagattctgctttgaaatggtgcaatacctctaacagagcattagcctggaaaacacccactgaagccattgaccctgaagagggaggtttaatggtcgtatcattaattttgcgtttagagcatggcgtatactcataa

SEQ ID NO: 160303 - DNA, 492 bp, Enterobacter cloacae; identical to SEQ ID NO: 131575

SEQ ID NO: 160304 - DNA, 420 bp, Enterobacter cloacae
atggatttttataaccatgagttttataaaaacaacaagattattagagataagatagagcagtatttttacggaagtagagattataactttaagaagttaaaaaaagctgagaaagatttctttaactctgttcttattgagtttatagatgagtgcaagagagaaagagaagatgaggggacaaaaaactttaaagcatctgtaagaatggttcttaataatcatagaataaaagaaaaaggattgaagaatgattctttctactttatgactcaatcagagattaagagtaagcccaaaaaatggcattacgatgtgatattaaaaagcgccctttctatttcgacatgggaaacatcgggcgtatggtgtgattatgatattgtttatgtaaggagtaacgatcatggcgagtaa

SEQ ID NO: 160305 - DNA, 1260 bp, Enterobacter cloacae
atggctttatataggttagaaatgcagaacgtaagccgtgcaaatggtgtcagctcagttgcaaaagctgcataccgtcatcgttgcgtcatgttcgatgaacgaacaggagaaacacacggcgagaaatcgctagaccgcgacgatctagtttatgctgaaatattagcaccagataacacgcccgattttttaaaaaaatctagcaacgatttatggtgtttcgtcgaaaagacagagactagatcgaactctagaaccgcaaaagaattcaaaatcactttgccgcatgagttatcgaatgaacaaaacatcgcattgatgaaagattttttattaaataatttcgttgaaaaaggcattatatgtgactttgttttacataatgataaagataataaaaacccacatgcacacgttatgattacaacaagagaaataacgccgtcaggttttggtaaaaaagtaagatcatgggatgaagaaaaaacacttcatgattggcgtaaacaatgggcgaaagttcaaaatcagcatttgaaaaaattaggtttaaaatctcgtgtcagtcatagaacgctagaagaacaaaaaaatataatgatcgatttagctaaaaaagcagaagatgcaaaggattttgacaagtctattttgtatttagcaaaagctattgaactagatagaccaccaatgcagaacatgagccgtaaaaaatggagaacaaaagaggggcaggaacaacgcaaacgtgaccaagcgatcagagacaaggcaagagaagatgcaagggctgtcaggttgttgaggggtgttgcagttgtggatgttgcttcattcacagttcaaccgctgcagaaaaaagagcattcaaaaaataatgatttttcagttaaaaaatcttggtggcgttctactgttaattttataaaaaatattaaagctaagttctcaactaaaaaagacattaaaaacgatatccatgcatcagacgatttaatgactgatccggtgactggtttaccgattaccaagcaaaaatggcaagagatgagtgacagggcaaaagtgaggactccacaggctgcgatctcataccaagttaagcaatcacacgctgacagtgagaaaacgcctcagaatgcgttacaggacgttttagacgtatcagagggtaaaacgttaaaggtgaagtctgtgcatgttccgggttctcgtaggcgtcgagtgatagaccaagacagcagtgacaagggttag

SEQ ID NO: 160306 - DNA, 861 bp, Enterobacter cloacae
atgatactacaaaaagaatatagcagaagtgattttataaatcaaattatatccaagcctttttgcactgatgactttaatcgtgacgggatttatagagcaaacaaaagacaagctttaaacaagatttacattgaacataataacgatagttttattaactctatcgtgtttgatatagatacagaaacagcggcgatctcttggcaggatgccaacatacctatacctaactttataactcaaaatccggctaatggtcatgctcatttgttttatgctttaaatagcccagtttgcattacagataaagcaaataaaaaacctcaaatccttttaaagggtgtcacagaaggtttaacggctcgtttaaatgcagatgtatgctacacaggcaagataacaaagaaccctttaaatcctcattggaggacgttttggaataacacagaacgatatgaattaaactatctccgcgagttcatagatgaaggtaaaagactaacaaaaaaagtattggttagaacgtcagaaaaagaaggaagaaacacaactttatttgataatcttcgcttctttgcttatagcgtgattttcaaataccaaaaggcaaatgatttttgcggttttttatcagcattagaacaagaagcagacattataaacaacgagtttaaaccaagattaggtcacaaagaaatccagcacacaataaaaagcataagtgaatgggtctggaacaagtttgattatgaaactttcagtgacatacaaaaagcaagaagagaaaaaagaacaataaaacaaaaggaaaaaacaaaaaataaattatcagagatgttaatgataaatgaggagtag

SEQ ID NO: 160307 - DNA, 276 bp, Enterobacter cloacae
atgtctcaaaaaaaagagcaaaaaacagcagaaaaaccaactgcagggccactgagaaaacacagaactagaactgaaaaaatagacgatttgaaaaaacagatcagcgatttgagaaaagctgaaagagaagaacgccagagagccagagatgaaaagttacttgctatcggcaaagctgtatatgagaaagcaggtaaaccaaaaaatatctatggcttgcagcagtttgttgagtcagaagaatttaaagtggattttaaaaacgatttctaa

SEQ ID NO: 160308 - DNA, 1164 bp, Enterobacter cloacae
atgaaaggaatgcagaagatcaaaaggggtaagagcttcgctggtgttgttcgttatgcattgcaaccgggagcacatcataaaagcgatccagtcgtaattggcgggaacatgttaagtagctctgttcttgaactgatttccgaattcaatggcacaaaacagcttcggctagatgtccagaaaccggtgtggcacaactcacttcgattacctacgaatgaatccttgtcgaatgaccagtgggtaaccatagctgatgactacatgaagaggatggggttcagtgatactcacctccgttgctatgtgcttcataacgacgaaggccagcatatacacattattgccagcagaatcgacatagccggtgggaaactctaccttggcaggaatgagaaccttataagtacccgcataatcagtgagcttgaaatcactcataatctaacagtgaccaaaacagcctcagccattgcaccaaagcaaccgaagcggaaaagaatctctcgcaacgaacaaatgctatcagaacggactggtcttcccgcccctaaggaagctctccaacagatacttgataaaagtttggcagatacacctgaccttttaacttttatcaagaggctggaagaagcagaagtcggctggacggcgaatgtcgcttctaccgggaaaatgaacgggttctctttttcctaccgcgatatagctttcaaagcttcgcaattgggcaagagctacagttgggcaaatcttagtaacaggctcaactacaacccagaccatctagaagctctgcgaaccggcataccaccagaagaaccccctgctcctgctcctgctcctgctcctgctcctgctcctgctcctgcaacgatcttaaggacaactgagagaagggaaagtatcggtggaaaaattgcagaactggaattacggctcagagaagacaaacggaccgcaatcgtagaaaagattcttctaaagaatacagtcaaacagcaaaagcatctcaggctcagtagctggtttccctttttacaacggctcatagagcttctccgaagctacggtaagagcattcttcacaacaaccctgcaagattctcaaaagtctatgcaactcagcatctaaaacctgcaagaaaaattcgtttatag

SEQ ID NO: 160309 - DNA, 258 bp, Enterobacter cloacae
atgattacgcttttgtgtagctatttctatcgcatctattggccactctttatgtacattaatatcaaatgtagctttataacgacctacaactttgtttgtactatgccaacttgcactaatcagatgttctttgattgctttaatcaattccgccctcatgttttcaatagattctcctttgaatggcaaagccaatatttctttacttaccttaaattccgtcttacctttttctatgaaatctttaaggtatga

SEQ ID NO: 160310 - DNA, 168 bp, Enterobacter cloacae
atgaatagaaaatggtggttcctttttattttaattatcttaaatatcgtagctgtgtatattggcctatatcttgataatgatattttcatgcggagattcaaggagtttgtgtatgttgtcgatattatatccataccattcattgtcgttttttttatcatttaa

SEQ ID NO: 160311 - DNA, 138 bp, Enterobacter cloacae
atgaattttgacagcgacactaatgcgatcgatgtcgcagtaaagcgactccgcgctaaaatagacaacgattacgggacaaagctgatccagacagtccggggcgtgggctacatgctggaggtcccggatgcatag

SEQ ID NO: 160312 - DNA, 651 bp, Enterobacter cloacae
atgacaggtaacgtcatcccatttaatccattagataagcaaaacttaggggctagtgtagctgaggctcttctgagcaaagagcctcacccgcttagcgaacttacatcctttgtaggtgctgggatttatgctatttactacacaggcaatcaccctgcatatgagaccctagcagacttaaatcgagataataaattcctgttacctatttatgttggtaaagccgtaccgcccggtgctcggatgggtttaacaaatcctgatgttgtggggaatgttctttttaagcgtttgaaagagcacgcggacagtcttagagctgctgaaaacctcaacattgaggatttttattgtcgcttcttggtagtggatgacatatggattccattaggagaatcgttagtaatctctcgttttaaacctatatggaactcatccatagatgggttcggaaaccatgatccgggacggcatcgctatacaggtctgcgtcctcgttgggattttatgcaccccggtaggggatgggcgcagaatctaagagaacgtaatgagaccgtagatgagctaattcgtgatgcacagcaatacttattaaatcttcctccttgtttagctcaacggttcattgaagctgagggtgattaa

SEQ ID NO: 160313 - DNA, 177 bp, Enterobacter cloacae
atgacccccgaacagttccggcactggttttcctcgctgcctgaaaaataccagcgcgtagcccgttctatgtacgacgacgctcgcaagacgggaacacacaccgcttcaagcctgctacttattcgcacgctgattgaagatcaaatcaatttcgatggagactttaccttatga

SEQ ID NO: 160314 - DNA, 567 bp, Enterobacter cloacae
atgacagttctgagcctgaccgatatccagcgcatcaatacccttgttaagcgcgatcttctcaatgtggaagaagttgtcgctgcaaccggatttgacccggtggacgttgatgcggtgctgcgcggcgtttatgtagccgaccttaccaaccagtggagggatgaagccgctattacgctggaggaatacaacgccatccgtaagcgctggaaaccggggcgcggccactgggacactgcacatgccattgcacgcgattttctaattcggcctgaaactgtgctggctatcgtccattcccgctttagcaacgtccacacgcacccagtgccgaaagccgtcaaagcaaagccggagaaagcgaaagtagtgcgcaagttggtgcctactgatttagatgaaatccacaagttagagcgcttcggttggcctgctgcggagatcgccgggaagctgggcgtccctgttgaagtcgtcgcgcatgtgcaacgctgtctgagaaatcgttggtcgtacccggatactctggagtctgttaactccaaattcagcgaggctgaatga

SEQ ID NO: 160315 - DNA, 687 bp, Enterobacter cloacae
atgtctgaccagaatgttaatccatacctttccggtgctgatactgcatcgcagcaatcgccgtatatggccgcacctgtaggcgctgacaacggcgctagccgattcgaccagacaacacctgatgctgatttcctgaaaacgcagccagcgaacattaatcaaagctggaacgaaagtaactttgccaaccagcaagaccagcagattgatgttgctgcgcaagtgggcgacacgctgcaattacaggatggcactactgttgagttgactcctgaacttcatgggctgatggggcagtttcaccagtctgtcgaaagccagctagggcaggggacagttgacgcgatgttgcagtacgctggcacactcgacgctgggacgcaatccacccttgaacgtatggttatgtctggcgaccctgcgcagatgcagcgggcggttcagtacctgcaagaacgtatggctgctggttctgcttccgggtacgttcctgcacagggaaacccatacggccagcctgccgcgcaatctgttggaatgtcacatgcggagtttatcgcggcgtatgaccagctttcgcagtgggcgcagcaatcagggtatggccccggccatcgccagtacgacgatcaataccgcgctctggttgcgcagcgctccgctggcaaacgcgctggccgttaa

SEQ ID NO: 160316 - DNA, 606 bp, Enterobacter cloacae
atggatctacaagcatgggataatatcgtttcaattgcatctaactcaattaccacaattggcgttatagccggtttaatctttggagggaagaaagttaatgagtattttaaaacaaaaatgaatgacgctgcatttatttcagcagttaatttatatgaagaagtggtaaatgtaagagaaagacacggcagggtgagattgctattaaattacgcgttagggaaaacagaagaggcattaacgcaaaatcgaccaattgaccttacaacttacatagagatcgaaagaattgggcttgattcatttgaggcttcgttatctatcagcaaatgttttacgcgagcctcaagctatggaaatattattaaaccctcggcactagaagagttaaatgcgctactcgacatctctaacaagatgaccgacatcgtcaactcttttttcggaaaagcaatatcttcatctacggcaaaggtgcctaatccagaagaacttggtgaattgagagcactatacaaatcattttcagaacagcagttggaatataatgaaaaatgttctaacttccaaaatataaaatttaaagacgcattttatttttag

SEQ ID NO: 160317 - DNA, 1485 bp, Enterobacter cloacae
atgagtggagggaaattgccggagggatggatagataccccgctagaaaatattgttgaaatactggattcgatgcgtattccggttaacaacaaagaaagacaaaaacgtattgaggggaaagattttaataaactatacccttattatggtgcaacaggtgaagtcggtaaaattgacgattttatttttgatgaagagcttattgcactaggtgaggatggtgtttcattttttgatggacaaaaaaataaagcgtacatgctttatgggaaaacatgggtgaataaccatgctcatgttttgaaagctattcaaggattaagccataacaaatttctatgttattttctcaatcagttcgactatcacgattacgtcaacggaggaactcgtttaaaacttacgcaagcaaacatgcggaagatcccggttcgtttcgctcctttttccgaacaaaaaatcattgccgaaaaactcgatacgctgttggcgcaggtagacagcaccaaagcacgccttgagcaaatcccacaaatcctgaaacgttttcgtcaggcggtgctagctgctgccgccagaggagaactgacgaaggattggtacacagatccaaatttagttagtgcaaaatctattctaaacgagatcgaaactgagcgtaatcaagctaaaaataacaagcttattaaacagagtttcggaaaatataaagatatatcaccgttattccacgtaccatcaaaatcatgggaatgggtttgcctggaacaaatttgtgcaaccaacaacaatgctcttaaagcaggcccgtttggttccgctttgaaaaaggttgattgcgtggaggttggttataaagtttatggacaagaacaagttatctcaggtaacgaaactcttgaaacataccgtataaatgatgataagtacgaacagcttaaatcatgtgccacaggtcctggagatatattaataagtctggtagggactataggaaaagtgctggttttatctccccaggcagaagttggaattataaatcctcgactggttaagattaccttacataacactatcagtcctcaatatattaaaacttacctcgacagccctgtttcccatagttttttcaaaggatatagccatggtgggacaatggagattctcaacttaagtatactcaaagagttacctatagcacttcccccgctagaagaacaactcgaaatcgtccgccgtgtcgaacagctcttcgcctgcgctgacgccattgaaaaacaggtcaacagcgctctggcccgcgtcaacaatctcacccagtcgattctggcaaaggccttccgcggcgagcttaccgcccaatggcgtgctgaaaacccagagcttatcaatggtgaaaacagcgccgccgccctgctggaaaaaattaaggccgaacgcgccgccagcggcggtaaaaaaaccgcgcgtaaaaaagcgtaa

SEQ ID NO: 160318 - DNA, 159 bp, Enterobacter cloacae
atggggaaagtgcgggctgatgccctcaccccggccctctcccacagggagagggagaaacaaactttgagagatttcttctttcactgccctgtgcaagataagaaaatctggcctttgcgcctgaatgttgcggagaaaaagcatggcggggaatga

SEQ ID NO: 160319 - DNA, 126 bp, Enterobacter cloacae
atgctcttgcccgtttacgccattttttacgcaaacgggcagcctttgttgccgatttgtgattttgggaacgggctgacccgtatcttttatgagatatctcacaaaaacagactcatagagtag

SEQ ID NO: 160320 - DNA, 255 bp, Enterobacter cloacae
gtgggaagaaaggaaaagttaaggttgaagttagataggttgcccaaaaatttcacttgggatgaacttgtcgcgcttatgagccagtatggcttcaagcttttgaacgcgaaacgtggttcaggacgcaaattttacagccaagccattgataaattagtaatttttcatgagccacatcctgaaaacaccctcaaaagatatgtcttggaagaagttaaactgctgttagatgagattgatgatcatgaataa

SEQ ID NO: 160321 - DNA, 456 bp, Enterobacter cloacae
atgaataacctgatgcaatacaaagggtactatggtagctccagcatttcatttgaagacggagttatgcatgggaagctcgaatgcataaatgatctcgtcacatatgaaggcgctaccgttgcggagcttcgtgctgcctttgaagaggccgttgacgactatctcgcaacttgtgaagagatcgggaagtcgcctgataagacaatgagtggttccttcaatgtgcgtataggtgaatcgctccataagaaagcatacttagcggccaagtcaaaaaatatgactttaaatgattatgtaaaacaggccgtaagtgagtcggtaaatggaagaaaagaggttcattaccactttgaaaagccaagggatgtgagggaagtctcgttcttctcctcaagacgcactgaagaaacctattgggaagtttcagtggataacggagtacagcactaa

SEQ ID NO: 160322 - DNA, 426 bp, Enterobacter cloacae
atgcttgataagattcgctttaaagggttcgatttagagggctcttcactttttatcaacgacgatgacaactctgagggcgggaaatacagcttaaaattttctgaacaccgcgtgattccgcagaatgatgaagatggaaattgggtatttattgaggtcacaccttcagtgatcggcttcccacgtgacaaaacgaacattgaagacggcgaagatgtgctcttcaaagcagaagctaacttgacgttaacttttgaatgctaccttgatgaaaatgttactgaagatttctataatgaaaactcttggttctttgagaattatgtttacgtctgtacaaaattagtatttgaaaacatgtttaaagatacagtattagacaccatcaagttaccatggtctccaaaacctactgataattaa

SEQ ID NO: 160323 - DNA, 552 bp, Enterobacter cloacae
atgaataaaataaatatcttacaggtaatccttaagcattacaaaaccatgtcggatggtaaaggtaataccttaatggatgatatcatagtccacttcgttatacctcttgctatatctttattcctttgtctaacttacggggttatgaaaccttcgattgcatctgtttttgtaaatttcggagcaattacaactgctttgttaatgagtgctgtcataatgatatacgaccagaaacagaaaactatttttaaaatatcggatatcgaagaaaataaaaagccaacgacaaacatcccgacactggaaataaataaaaaagtttatgatcaactttgtcataacgtgtcatatgcaattctgacctcggttatactcgtaatatcatcagtggttatttctttccttcctgaaaaggacattttcactaaattatatttttcgattcccgcttacttattaagttatgtggcttactcggcattttttacaactgtaataacatttttaatggttataaaaagatttagtaatattttagataattag

SEQ ID NO: 160324 - DNA, 933 bp, Enterobacter cloacae
atgcacagtgtaagcttttactcctttaggattttaacaaagaaaggtagccgcaatagcaagacccttggcaatcttggcttaagtaataataaaaccgcatttgatatactagaggattttctaaaccattataagttttcccctattgaatataagtcggcaaaaacaaaagtatcactggaacaacatacgaaattaaccttcgataaaaataaaggattggtatacggttatataaaagttggaaaatacggagaaagtcacgaaataaaggatcttcttcttaccaaaacacaatatacaactaaagtagatgatgttactttacgtgagcgctatatattgatttaccttccaaatgggttagaagaaggcattattgcatttcatggcaatgataatacttcagctaaatctgcccttactgaatttctacttgactattttattactaggtatcaacaagaggccagaatcaatcctctatgtcataaaaacataccccaacacatcctcgaatctgaggtgaagcaaattaaagctgtaggctacaaaccccctactgatattgctgattcatttggaagcaacaaaacaaacgtaaaaacagatttaatcataaaatacaacgaaggctatatgggtagctttcgtgatttgagaaacaaaagactcagtaatgttatagaaattgttgaggataaatgcgatgaagtaaaggtttccttgcaacttgggaatagagtcattgtcttcagttatgatgctatccttaaaaaaggaatttcagttgagctagatgattctgatcttaacatagatcctactactggcattcctgagctaaccgcacttcatgatacggtaaaaattgtagcgaatgatatactcttagaactgcatagcgctaacaagggggtcactatatga

SEQ ID NO: 160325 - DNA, 660 bp, Enterobacter cloacae
atggctgagtattatccggcggtgttcaatgcagaggcttttaactgtcctcactgcggtgtatatgcccgtcagttctggcgtggtatgtatggtaatgcgcgtgatctgagcggcaagtcgaccgatttccgaatgtcaacgtgctctcattgtgatgaagacgcttattggtatcagggcaacatgatgattcctgcggctggtaatgttgagctgcctaaccctgacatgcctgatgactgcaagtccgactacatggaagccagaagcatcattaatctgtctcctaaaggggccgctgcactccttcgtctatgccttcagaagctaatggtccacttaggcgaaccggggaataacattaacgctgacatccggtcactcgttcagaaaggactacccgtacgcatccagcaggcagcagacatctgccgtattgtcggcaatcaggcggtccatcccggagaaattagccttgatgacgaccctcagttagcacatggtctctttaagctgctgaatattattgttactgagcagattaccagaccgaaagaaattgaggctatgttccagagtatgcctgaaggtccgcgacaaggtattgagaatcaggaccgacaggcgagagaacagcaacaggcagcgaacgaataa

SEQ ID NO: 160326 - DNA, 498 bp, Enterobacter cloacae
atgtctatcaaattaacgaccatgcaggccgcttaccttactcgtgcaatgactacaggcggtggattaatcgagcttggtgaattggctaagggattgggtaaacagaaagcacatttgatccgtaagctggaagctaattttgacaaagagcggctttccaaaatggaaacccacttaaccgtaatgggcggcaaccataagaatgtagcccagaccgtcaaaacctacatgctcgactacaagactgctggcgctctggcgatgagctacgatcttcagttaggtgtagaagtcctcacgctgctagaggaggccgttcagactatcggcgctatgaccaaggcagttcaggagggagacactcaggcggcgctggaggcctctctgtccttctctgagtctttccgtaagcgtgtcgaatatttacctaccgactcagagaatgcgacccgtagcaaggccttgaagcgcctgagccgtaagggaggactctga

SEQ ID NO: 160327 - DNA, 192 bp, Enterobacter cloacae
atggctatgattgacccgcgcacacctagcggtaagttaactctacgttaccgaggtcttcccacgtctattctattgtcgatgctcaatttggataaagacgcaacgaatgaccgcccgttttattctcgtaatgagcttatagaacaattggtcattcgtgatatggatatcaaccgaagaaataagtaa

SEQ ID NO: 160328 - DNA, 192 bp, Enterobacter cloacae
atgaaacaccttgtgctgactctggcactattgccagccctcgcccatgcagcgatcacattaacgttgacggatgaacaggagacagacaacgctaaggtgtgcatctacagcaacgccaactttacggagacggtgacgatcagatcgtccgagcagtgcaagtacaccagaacatttgaggaggagtaa

SEQ ID NO: 160329 - DNA, 732 bp, Enterobacter cloacae
atggcaaaaaccctcgcccagattaaggcagattaccagtacacagacaaaaaaactggtgaagtaaaagatcgtacaatcaacaccccgcattacttccgagatattccacgcatttattctcccaacctccaggatggttacatggacttttgccccaaggcgcaaaagttgtactgctattttcaggggtgggaaaattcagggaatttctgttacgaaagccaggaagagcttggaaaggtgatcgatttatccagggagcgaacctgcaaattgattaagaaattgacagatgcagggctaatcacgaaagagaaaaatcctggttatcgttccaaagtttaccggacgtttccgatcactgatgctcacattaccccaccaggagatctgacagcgcagcctgtagcagcgtctgacgaagtgccagcacctgtaccagttaaggccgcagaggaaaaagcggatgttacgccggattgggatgcttgggatgcaccagaacacctggaaccgtcagcaccaataccgccgatgaatgacatggatgcagcctgtacggtcttgattcggaatattgacaatcaagcagagatggagagtttcactcagtttaccgacagggtttgtcgaaataatcgaaagatacggctaccagaagggatcgaggattatttcaagaatacccaccctgactattacaatatttttgacccaataccattttaa

SEQ ID NO: 160330 - DNA, 282 bp, Enterobacter cloacae
atgaccaacctttacctactgaatgaagatacaaactttcgcctcggctgtaatgacgtttgcagacgcatttataaccaccttgcaagcctccaccgtgagaatggaatcttccgttccagcgtcaaaactctggcatctgccttgggctactcggaaagcgggatcagatattggctatccctaatgaaggatgcaaaggtgataacgttaacgcgccgtggtagatattacgacttcgacgttaatcacaacgtttctttcattacctcgaacaattaa

SEQ ID NO: 160331 - DNA, 375 bp, Enterobacter cloacae
atgagtaagaaagaacggaataacattctacgaatcggtaaagcagcacaaaaacagcaacagcgattattaatctcttccctcgaagaaatccccggcactttgatagaacacgttgaattagtggattcacccccgccagacggtgaaacgtgggcggcgatgaatgacattctttcttcgtgtccgggtgtttattacaaaccacgaaaacgcaaagtttacacctgggacgatagccagctaaaaaaatggcagatgttaggcttcacctctttacgtcattacctaacatacaactcaattaataacaccgtggcgggagtcagggattttgatgaactatttaacatcggagacagttacaaagaataa

SEQ ID NO: 160332 - DNA, 222 bp, Enterobacter cloacae
atgcacgtacagataactcaaaccaaacgatttgcgcagcacgttaaatgctgccaatggtattacgaagagatcgacctcatcaccaatgacgcttatctaaccgatgaagagaaattagcacaactaaatgaactcgaagacaagatattaaccctcgcaacgccattccttgcagtggctaccaccataaaaacaacaatggagattttacattcatga

SEQ ID NO: 160333 - DNA, 342 bp, Enterobacter cloacae
atgaccaaaaccaatatcgacacactattgcaagacttccacgaccagctacatattccgctacttgatgcaaccatcaaagccagccgggagggaacgcctgagagcctcacagcagcgttgaaactgctgcatctggcatcggtggcaatgcaggggattattgctgtagtggagagcacagagagcctgagcgacgatcaggacgtgctgggcgaagcgtccagaatggcacagtctcttgtagcctgtatgcaggatttagacgcgcttgcgcatgacatagctgaagaatacgcagtactcgaaatgaataaaaattcattcaagatgaataaatag

SEQ ID NO: 160334 - DNA, 219 bp, Enterobacter cloacae
atgtttctaattaataacaaatcgcgtgtactcaaatacaaaaacgatgttctcaccatcaatcctcaaataattgagcaggtggcgcagtatgcaggttgtgaagtgtccgacgtgatcaaggcaatggaaacgtatttccctgatgaatcaccagaacaaaagccaaccattgatgatttgattgcacgtaaaattaaggactcaaccaaacaatga

SEQ ID NO: 160335 - DNA, 201 bp, Enterobacter cloacae
atggagatgattttaaaatcaagtcgtggcttgcacgtccgactgaaagcagatgatgcggaagggctgctcaaggtgagccagctttgcgagctattagagatttcctatacgggcgtaagagcacgtattttccgtggtgaaaccgttgaagccgcaattcatcacttcttggatcagaaaggcggtggtgatgcttga

SEQ ID NO: 160336 - DNA, 1857 bp, Enterobacter cloacae
atgcttgagattaataccagtgttataaaaaatactgtcaccttcgttgtggataagcagagtattgcagaggctaaaaaagccgccgatgacctgcaacgccatttttctaaggttaaagatcccaagctgcgcttccaggctcagaaacaacgccgacaatcagcacgagaaaaagtggcagatgctaaagcggcttctcctaaaacgtccaatgacttgaagcagcagcaacgccaggcagaaaaggctgggaaagcgcaagccagggaagcggctaagattgcaaaacgtaacgagacagccgatctgaaactccgaagcgccgggttacaaatacgtgggattaaaggcaagtacgggttagatcctgctaaacaatacgaggcggttaagtttgcgagggagcaaagtgaactcttccgcaagggattgatatcaagtcaaaaactcaatgcggaaataagatttcgtgtaacggagcttcgtagagaagcggcgctccaggcaaaaataactgcatccactcaggcacaggcggcagcattgcgccatgtgaagaaaaccgactatgcaggggctgcaaaggggcttaaggaaaaaggtatcagcggtattatcggcggcggtgctgggttgatcggggctacagcggctatcgctggcggcgctggtgtcctgtctcgtatccgtgacaaagggaatgaaaaccttgatctggtgagaaaatcggctcttgtaaaaaccaaccctgcggtagttcaagctatggttgcatacggacagcaacacggcatagacagtgccagtgtggataaggtgacggacaacttcaaagacgtgcgcgagcgcttgggcgagtcggtgagtaactccacattcgatcaaaaatctgggaagtggaaaggcggcaacggcgctatagacaatgttatgaacctgttcggatggactaaagccgacattgcgaagttccaggatcgtcctgctgacttcatccaggcaacagtaaacgaaggtcagcgccgtggaatgtctcaagcgtccatcgggcatctgatcgaggattacggggatgacctgatgcattacaccgatctattcctgaataatggtgcagagtttaacaagacgctaaaaaccctcgttgatagtggtcagacgctgaacgacgaacagatcaagcaaacctacgcttacggcgatttgagtattgcaatgggtaatctcatgaacggcgttgataacagtctgttcacgggctttatgaaaggcttcgctgatggtggcgacgacctcgtgaagaacaccaaagtaatcaccgaatcggctggaatgcttggagagggcttaggcgaccttgctaaacaggtgacgggcttcgttggtgagatttccggcgtaatctccgatctgaatgctgggcttagatctcgttttcctgattggtttagcaatgctaacaagccagcggccctggctctctatgatggtgctgtgggagattcagcaaatgccacggctgattggattaaatctaagacgggagtagatactcgcgactttggccctgcgatcatggattggttgggcgttggtggtggtaatgccggaactgctgccagccaatacagcctttcaggtgattctctgcgtgatagtgctatgtctcttggtggtggtgcgccagcgtacacgctgaatcctacgtttaacctgcaagtgaatccagaagtggggcttaccctgcaaagtgatgttagtcgcttgtctgattacatcgacttcaacgctaaagcgtcagcagcaagttttgaacagtcgctaacgttagctgttagcagtacaggcgggtga

SEQ ID NO: 160337 - DNA, 330 bp, Enterobacter cloacae; identical to SEQ ID NO: 104609

SEQ ID NO: 160338 - DNA, 1311 bp, Enterobacter cloacae
atgcttaaaatagaagatgtttttggcgttagtggaaaacaagttggaagctacatcgagcgtgaccatgtagatgcaaagttaatagatgctttaagaacagagaagcaaattatagtttatggagcatctaagcaaggtaaaacagccctggttaaaaagtacattagctatgacgatcatattttaattagtttatcacctaagcacactttaaaagacatatatcaatcaatacttcgaaaatgcgatgttttgcttagaacttcttatacagaaggtacaggagaaaaaactaaggtcaccggcaaagcatcaattcaaggggcggtagcgctgattgctaaagctagcgcatctctcgaagcacaagatgaaaaaagtaagaacatcacagaacagtacgatgagattgagtttaatttagacctaccagatgatgttgcgcatttgattcatcacgtcggcagtaagaaaataataatacttgaaaattttcactatcttccagaggaaatacaaagggcattttcttttgatcttcgcacctttcacgatctgaaagtaagattcattatcttgggggtatggaaagaggcaaaccgacttacgcaattcaatggggagctacaagatagaattggtgaaatacctgttgaaccttggttggaggacgattttaggagtatagcaaaaaaaggggaaaaccttttaaacataaaaataactcctgtaattgttgaaacatgtatatccaactcattcggaagcgttggcgtttttcaagagctcttaaagggatcatgtatcgaaggtggtattctcacaaagcaagacacaaccaaacatttcattgatgtagatgcagttaacactgcaatagctgtaaagacaaatgaatattctgggcgccatttacgaaacttagaaactatggctgttgcaaatagtgcttcgataattaaaggcaatcctttgccgtattttcttaattattatatcgtaatgcatattctatctttaggatatcatggaataaatggtgggattagcaaagaaaattttcttcatgctttaaaacaatcgcaccacaggaaggatgaattaaaaggccaccagttaattacagctttaaaaggtcttactgagttacaggcaaataaaggaattaatccccctgtaatggcttatgattcaaattcaaggcagctaaaggttgtagattcaactttttacttctttttgaagaatgcagatcttgaggaagttaagtcagaaattccttgcccaatggatggactagatgtgtag

SEQ ID NO: 160339 - DNA, 618 bp, Enterobacter cloacae
atgaaaagtagccttgaacaagctttccaagatgcagcacacacagcagaccgtgcagtcagcgctgcgatgctgaagtattcgaatgggttggtcacggatgaagacgacattactggggtgctgatcggccagttggacgctgcttttgacgatgaaattggtggtatcacttggtcttcatccattctcagacaccgtaaaggtgtcgctgcacaagagaagaaggccggagcagatatgctgtttcacgtctccatcaaaacaccacagctcacctattcaaaaggggttctgattcagtcaaagagaattgatgaagatattgcaatgacagcaattggtcacaaagaactgctggggcagtgtgacaaaatgcttgatatcaccccggcttcattcgttttcaactacacgaagtcagggatgcgctgcgcttccgcaacgaagattgcagggacaagcagtcgagtattaaacgactcgtgcaatctgacctcatatcggttcttcttggaactgttccgatgcactactggagaccgtaacattacatcagctaagtttgatgatcttcaggtacctcaaggcatcgccatcaagggaacactaggataa

SEQ ID NO: 160340 - DNA, 144 bp, Enterobacter cloacae
atgaaggcaatatgccactataaaggttgtaacaaaagcctgtcgaactcccgtaataagcgtttttgcagcaatgaatgccgccataaagctcaccgtattattgatgatgacaatatcgttaagctggtgaagcactcctga

SEQ ID NO: 160341 - DNA, 390 bp, Enterobacter cloacae
atgtacaacgccgaagttaatgggatgtttgatcgttatctttttttatcgcaggtgtttcgtcatattggtgtgatgcagtacaaggctggctggaagaaggatgggcgggaaacgttgctttcggcacattactatttgggtaactggaaagggacgatggcatatgaagaatggcagctctatggagataacagccaggcagtcattgaagataaaacccgcaggggaggcgaggccagggcgcggaagtttgactgggtgaaatctgaagtcatcaggctcctgggtttgggagctgtggctggtgaatggaaatcaaaagatgcggctattcggagtatatcgggtgagctaaaagcattcatcagtcgtgaagataaaaaataa

SEQ ID NO: 160342 - DNA, 459 bp, Enterobacter cloacae
atgattcgtcataaccagcttaccccctgctttgtgaagggggtaccgcgtatacttgaacctggcattttgtacgtttcaatggaatacggtactgtaattcacagttgctgctgtggctgtggccttgaagtagtcacacctctgaccccaacagactggagactaacctttgatggcgaagcaatttcgctttggccatcggtcggcaactggaatctgccctgccgctcacactatgtgattaaaagtaatcaagttatcgaggcaggcccttggaacaaatctcagattgatgcggagaagcgtcgtgacaaagcagcgaaggcgcgctactactcacaaactgaatcgactgctgcagctgaagagttgaagcagaaatctatcaatgtgcccacagggatgatgaccaataaggagactatttgggctaagttacgccggtggttgggttag

SEQ ID NO: 160343 - DNA, 1176 bp, Enterobacter cloacae
atgtcagccgcaccattcaatcttaatagcgaccttaagcgcttgcgtgaggaaggatactacgtacaaatcgtgggtggcttcttggtgatgcgtgaagtgccgtatgttaacgcgcagttagaaattaagaccggcacactcatctcaagcctttgcatgtctggaaacgtaactcaaaagccagagccgcacacgattcacttcgatggagactatccgtgcacatctcagggtacgcccatccaagctattgcacatcagagcgtagcggtggatctgggacatgggttgagtgctcagcacatgttctccagtaaacccgggcctgagggctacagcgattatcatcagaagatgacgacgtacgcgacaatcatttctggccatgcagctaatctcagacctgacgctactccgcgtgtgtttaaaaatcccgacgatgaggatggctgtgtatttaactatctggaaactgcttcggaccgggtgggaataggggcgttgaccgcacgacttgaaggtcagcgtatcgctattcttggtactggtggaacaggatcctatgtgctggaccagttggcgaaaacgccagtgagcgagatacgtctcatcgacggtgatgatttccttcaacacaatgcttttcgtgccccaggcgcaccgtcgatcgatattctccgtgaggtaccaaagaaggtggattacctggcgggtatctacagtaagatgcaccgccatatcgtgccacatgcggtgcagatgaacacagataacctccaccttttggatggaatcaactttgctttcctttgcatggacgcaggcgagcctaagcgcctggcggtgcagaagctagaggatatgggagtatccttcgtagacgtgggaatgggccttgagctggtaaacggctcgcttggtggtattctccgtgtgacggcaagtacccccaataagcgcgatcacattcgcaagcgcgtgtctttcgaaggtgggggagcagaaaatctttacgcgtcaaatattcaagtcgctgaactaaatatgatgaacgcggcacttgccgtaattaaatggaagaaactcctcggcttttatcgtgacttagaaaacgaacatcactgttcctatacgaccgacggcaatatgctgctgaatggtgactcgctatga

SEQ ID NO: 160344 - DNA, 756 bp, Enterobacter cloacae
atgaatactgaaaatataaacgatattgacaatgtaggagaggcaattcgcgaaggccgcgatctgcgttcggcacgcgcctaccaaatcctcttcgcacaggaaaatctggattttcgcgcaatcgaagtcaatgatcctgtaccactgggtcgtcagatcctgattgctgctggcctacgtgcgaatgatgattttagcctgtttgctattcttgaaacgggggatttcgaagacttacgccttgatgagcccttcgatttacgtggtcgtggcgcagagcgctttgtggccttccagaccgatcgcgatttcaaactgacaattaatgagagtcaagtatcatggggcaaacccgcgatttcgggctccgcgttatacgacctggcgaaacccaatgacggagatgccgttttcatggttattcgtggcggaaacgatcgccagattgaaccaaacgaggccgtagaccttacccctcctggagttgagcacttcatcactgcgccaaagcgcaaaccaaagattgacatcgtagtaaatggtcgcgaagtccaggtatgtgatagtcaccaaactttcgagcagttagtcgctatcgcttacccgggtgaagctccagcacctgagattgtgtactcaattacatatcgctgcgtggcctcaaaaccacatagtggtgaattggcctctggtggttttgttgaagtaaaaaatgggagcgtgatcaatgtcagccgcaccattcaatcttaa

SEQ ID NO: 160345 - DNA, 3390 bp, Enterobacter cloacae
gtgcaagccgtggaattggcccgcgaggccgctgctgttctacataatcaagctgtagctgccggacatgatccgtggaaaccatacgagtttgctgttgcagaggctgatagaagaggatttgacgtagagagcacaaagaaaggctcacctagtctgagaggcgcgcgagcacgtttttttccacaggagaagttcattctccacgaaaaatgcacaaccctttttgaacaagcgttcctcgttgctcatgaaatcggtcacgctgaacttggcgacggtattgaagaggatgaccaaggctatacgatagatccagcaagaaccgcagaagcttctccaatgggagctgaacgggttgtagactatagtcgcaggcagcgtcgagaggtccaaatggatctatttgcgcgtgagtttctgcttccccggcatgtagtaaaagcgctttatctggatgggatgagtgcgttaagtattgcagagaagcttggtgctccattcgatgtggttgcgcaacagatctttgatgcattgttactaccaccacctttacctgaagatacagagcccgcgattgaatacccattgaacgcagagcaggagaaagccgccgcccatcgaggcccggcctttctgcttgaggccgggcctggtacgggcaagactcagactctagtgggacgggtaaaaggattgctctccgatggcgtagatccacgaaaaattcttttgctgacgttctctaacaaagctgcgggagaaatggctgaaaggatcgctcgcgttgacacggaagctgcagctgcaatgtggattggcactttccactcattcggcctcgatctggttcgtcgatttcacgacgaactgaatttgccgctcgaccctcgcctgctggaccggacggaagcagtagaactgctggaacatgagtttcctgtattagatctggttcattatcgcaatctttacgatccaacccgggtgattgcagacatcctcaccggcatctctcgtgccaaggacgaggtagtcgatgcaaatacctacctcgcgttggcacaggccatgcgcgatagagctgttggtattgaagatatagcaacggcagaaaaagccattgaagtggccaaggtatacgccacttacgaaaccctcaaaaagcaggctcgatgcattgactttggggacttggtttcattgccagtgacgcttcttgaagaaaatgaagccattcgatctcatatccaatccacttatgagcacgttctagtcgatgaatatcaggatgtgaaccatagtagcgtacgactgctaaaagccctttgtggcgatggcgaaaacttgtgggtggttggagacgctaagcagtcaatctatcgcttcagaggcgcttcgtcattcaacatgactcgttttgggaatgaggatttcccaggcgggttgcgatatcgtttaaaaacgaactaccggtctgtacccgaaatagtgtcggcattttcaaattttgcgctgaatatggctgtaggggatgctgacagtggcttaaacgcagaacggacaagtgatgcccagaaacctgagctgcgctgcgtagatcaaggatttcttcaaacaccttctattgcggacgcgataaaggagatgcagaactccggttacaaatacagtgatcaggcaatcctgtgcacaggcaatgagaagctttcagaaatcgggcaacaactcgagctcttaggcatccctgtactttacttaggaagtgtatttgagcgccccgagattaaggattggctgacactgctctcactcttagtagatcgtcgtgcaatgggcttggtgcgaatagcttgcctacctgagtttacgatgtcactagatgatgttggcagtattcttacacatctgcgtgaagatgaaaccggaagtgactggagaaccaaaatcgatgacttccagatctcagacgatgggcgcataggtttagttcggcttgtcaaaacactgagcggctttagcgccaatgactctccttggagcgtcctggcaacggtacttttagacaggacgcgaatcgcagcccgtatggcaacatcaacggattgcaatatccgctcccaatgtatagcaacttggcaattgctcaattttttacgagcacaaccctccagtggtgaaggggtatttatcactcgtacattagatcgtatccgccgtttggttcggctaggagatgatcgcgatcttcggcagctaccggcggcagcacaaagcatagatgcagtgcgcctcatgaccattcatggagcaaaggggctcgaattccctgtaattcatgtacccggcatgaacgctgacactttaccaggtaatccgcagaagcaagtttgtccgccacccaatggcatgattgcggggagtggatccaacgccaaagagcaatttaatctggagtataaggcggagagagaatgcttattctacgttgccttatccagagctgaagatcggctatttctctatgctactacgcggaacgctgctggtagcgcccgaaagttatccgactttttaaaccgtattgggcccagcccggttcaaaataacgtgaaacctcaacatgcggtaatcgaaaagcccgaatcattaccagtgggctgggttgtcagcggagacctagttctaagtggtgctcagatttccctatatgagtcctgccctcgccgtttcttctatacacatattctccaaatcggaggacgacgaactccaacgccattcctaaagatgcacgatgcagttcgtaatgtattccaagagttggtcaacaccgcacccataaaaataactgacatagaagatagagtcacactggcatttgctgtcgaaggcctagctgaacacggttacgcttctgaatttaagtcactagctattggtatggttagttatttcgcttcgattagggaaggccacagctctgaagcaacttgtgcctttacaatgaagtttgggaaaaccgccatcaccgtacaacctgacgatgtattggtttatccagatggacgcaaaacatttcgccgtgtgagaacaggacataaaagagataaagaagaatttgacttaggcgcggctgcctttgtactcgcagcacgacaggcttttcctgatgcaatagtggagctagtacatctttctgaccaaacagtgaccccaatcgttctgaccgctaagcagttggataataggcataaaaaaatccttaacacccttgactcaatagctaaaggagtatttccagcagaatcatcatctcgagtatgcccctcctgcccggcatttttcatctgcggattgattcctgcaggcgtgctaaaaaaaatctaa

SEQ ID NO: 160346 - DNA, 582 bp, Enterobacter cloacae
atgatgacaggactttcacctcaagcatccctggaagaggtactggagtcattctctatagagcatgatgtaggtacagctaccttgcaaaaatatcttactgcatatccagcatttgccaatgaaatcatcgatctatctcgcgagatggcaagaacattagcagaggatgaggaaccactatccgaatatgatctccgcttgatcaattcagccgtaacacgcatccaaaatgctccaggaaaaatgataatagatccattcgctgatctttcagctcaaaaaatgcgtgatatatccaaagcactaaacttacctcgacaggtactcatggcatttaaggagcgaaccgtagttgtcggatctattcctcagcgatttttgagcagattagctgaacttctgcaaagcagtgtacagcagctcactacctcacttgaacagctgcccatggcggttgcaggcagttataagtccgacggaaaaccgagtaatgtcgagaagatttctttcgaacaaactcttcgagatgctgatctgtctgaagaggatatcgctaccttaatggaagaggacatttaa

SEQ ID NO: 160347 - DNA, 792 bp, Enterobacter cloacae
atggaggttgcattgatcgttcctcttcaaaaaaaaaccgaggctggaaagccttacacacgtatacctataattgaaactaggctaatggaacttagctctctttcagatggagatctggtagatctttgtaaacaaagtagggcacatccgaaatacgttcccagcgaatgccttctttacttcgttcgacgctgcacatcaactaaaccatccctttttgaacagctcttcaagattctttccgaacgaattcttaggaaacttccgaggcctgcaagccaaggcggaaagaccatatcaatgatgaatagcgacatccgagagggtgtgtatgaccgcttcattgagatgcttatgatcgacaaagcagactacgaggaacgattggacatgttcgaagtacgttttgatctggctttatcgagattaaaaacagacgctcaaaggaaatcttatcgggctgagaatagaaatgccgatttaggatttgatgatgattcagccgatcttaatccagaagttgagactgcatctgagggatatgatcctttcgcggccatagatatcgataattatcgttaccgttgtaggcttgatgcggcgattgagactctacctgaactacagaaaagaatcattgaaatgacccgattagatattccaatagactcgatagacccaaatgaggtgactatttcccaagtactcaataaggttgaaaagaccattcgtaatcaaaaaaagaaggcactcgcaagtcttcgtatactgcttcaaggggacctatga

SEQ ID NO: 160348 - DNA, 231 bp, Enterobacter cloacae
atgcttaatttgatgaataatctattaagaagatgtatcaggcgtttttataatagtatcaaagatgattgcatcaacaatattataggctgtgcaataattttccttatagccataatctccattttggtttctatttttgtcgataataacaaaattgcatttggaattatcgccttgatagtaacactgacattttcactaatatttttttacaacgaaaaagaatga

SEQ ID NO: 160349 - DNA, 144 bp, Enterobacter cloacae
atgcttccgcaaccgatgacaggcggcatgggctgggtgggggaggttttaaagacaaaacccctgctgcaaggcaccacccgccccctcaaatttttacgcacggtgatttttttgaaaataaaacagacaggaaaacagtaa

SEQ ID NO: 160350 - DNA, 357 bp, Enterobacter cloacae
atggcaagaccacccaaaccgcccgcctatcttgatgaaatcgcggcgcagcagtggaaagcgaaggcgaagcagctggcggagcgcggggatctgacgcctgccgactggaacaaccttgagctgtactgcgtcaattactcgatgtaccgcaaagccgtggaagaccttgccacgcggggatttagcatagtgaacagccagggcggtgagagccgtaacccggcactgagcgcaaaagcggatgccgaaaaaattctcataaaaatgtcgtcgctactgggctttgatccggtaagccgccgccgtaatccggtagaaacggaagaggaggacgagcttgaccgtctggaatga

SEQ ID NO: 160351 - DNA, 261 bp, Enterobacter cloacae
atgcctattacgattcatgaaataaaggaacattacgatcattatgagcttcatgatatgagtgcaatgcctaccgctgaatatcggaaggcgctttcagatggggcactattctggatcgatcatcatgactttgttcgaagcactctttcagaagaaatactggctactaatcgagaacaattggatgcgatgattgagcatttgcaagaatatagagataagatgccaacgccaccagattggatgagcgagaaatga

SEQ ID NO: 160352 - DNA, 393 bp, Enterobacter cloacae
atggaacggactgttatttgtaatgcgaaagcgatcgccttcggcggcgagcgtaagtttcgccaccgcgtcatccagcgtgcctttcagcgcagcgggccggtaaaaaagtttgatacgggatttaattgccagctggacggtattctggttttgcagattttcaggtctgggcggaatgtcgagaacattcaggaaaaagacggattcgcgatccgcaggcaagctggacggcagctttttaatacgaagctgttggccattatgttcgttaacctttatcactggcggcgacagcaaaaacggcacattggctgtttccggcgtggaattaatatcaccgtcatctatccaggattgcaccagagcgggcgcatcgcccgtattcattaa

SEQ ID NO: 160353 - DNA, 168 bp, Enterobacter cloacae
atgaccatgaactatgaaatcgaactcattttttccggcaaaacgcataaaatcttccgcatttttcatttggctgaggtcaggggcggggaaagtagtatctgtatagtttttgggatgatgatgcgtaagaagaattttaaatttacgcttacctgtaccttttaa

SEQ ID NO: 160354 - DNA, 246 bp, Enterobacter cloacae
atggaagatgaaaatgatttgacgtggtctgataatttcgaaacggtttataagcctgataaaggctatgatggttttgaagatgaatatggggctttttcaaccttcctacaacattcaaaaccacgtcatacaagcctaactatcaatgagttagacactctcagcattgtatgttcatacgacattcatacaactgtcttacgatatgcactcagcagtacacgggtgagcattgatttgtaa

SEQ ID NO: 160355 - DNA, 231 bp, Enterobacter cloacae
atgaacattactaaagccgttattgaaattcagcagcaagcaaacagccagatgctttcattaactaaagacagcactgaccacgatatcactaaaaacttctatgatgccgctattcgttatctagtgcctcatgacatctatcaaaatattgcacgtactttcatgcatacctcacttgaatatgtagcctcattggccgctaaggtggttaataatgaaaatgcctaa

SEQ ID NO: 160356 - DNA, 432 bp, Enterobacter cloacae
atgtggctggtgaattgggggggattcctgatgaagtctgctaatcctcaattcttaatgtttatgatggagctttatcagcgtacagatttaaagcccattgaaactatcgtttatagcctgatgctgaatacgtacagatattataaaaagagtcatattgaattttcaccctctattaaatatctcgctaaagaatctaagttttcagagcttactgtgaagaatgctctacagactcttaaaaagttagggctaatcaccgtcctgaaacgtgggaacggcatcacaggcaaagccagcacctacacagtgcagtattacagggagcttaagaccctgtttacccgtcctagcacaagcgacatctccaaggcagatcgtgaagcgcgtagcgatgcagatattcctgcaacggatagcgcagactaa

SEQ ID NO: 160357 - DNA, 318 bp, Enterobacter cloacae
atgaacaatattgcagaattacctttccctgaacattttttcttatatgagggaatgaagcttttgctgttaattgacttgttgcactattcaacgcttgcatataaggcgggatggaaaaacttaccatctgagatttatattgactttgcacaaatgcaagcggaattaaaagtatcacaccctgcttacagggcatcactgaaacgtcttgttaaagcaaagctattaactaaaatggcaaagcataaatacatcattgtcaattttcgtgatgtggctggtgaattgggggggattcctgatgaagtctgctaa

SEQ ID NO: 160358 - DNA, 837 bp, Enterobacter cloacae
atgaagaagattgtgatgggggctgttctgcttgctgtgtgtggttctgcatcagcagcagataagcctgatactatctacacctgtacacgtgaggccgataatggctttattgttcaggatgtgagatatacacaacacgagggggacaggaattatattttgttaggtgagcattacgacactcagaaaatatacttctataatacagtagatgatttaaagcgtggtgtttatgatagttctcagcaatccgctattaaaatatcatcttctaaacagatacctctgattgtgaaatataaaacagcttcagaggcgcttgaatatcattgtgattatgatgtggctcttagcctgatagcacaagatgattggaataaggaacaggaaaggaagcacagaacagcagggcaggaggccgcacttaaaaaggctgctgctgaacgtgctgctaaagcaaaagctgctgctgtgaaagctgctgcggctactgaagctgataatatgctctctgaccttaaccaaagcaagcctaaagccccacagcccgcctctggtggtgcatcaggtgcagagataagccagtatgccaacaccatcagaacagcgatacagagccgtttagacacgtctaaatacgctggtaaacgttgctctctgacattgcacctaagcagggatggaactgttcaggctgtagaccatctgacaggggatgataatctctgcaatgatgctatggctgctgtctatcaaatagataagttttctgcaccgcctagcgatggagtgtatgcagcattcaaagatgcaactttgagcttgcggctatag

SEQ ID NO: 160359 - DNA, 240 bp, Enterobacter cloacae
atgaaacgcatattaattggttgtgctttgattgtgtttttgggtatggctgttcgtttggtttacttgcagcagttctataatattgcaatgcaggaagctaatattgaatctaggctaggcactgaatgcaaattcactagaaagacccctcactgctatgtgttgctggaccaactacaaaacactgttaaagagtgggctgcttttaatattcgctggcatagagagaacaaatga

SEQ ID NO: 160360 - DNA, 483 bp, Enterobacter cloacae
atgaaaattaaagctgtggctatggctatgtctattgttgtgggtgctgtttctctttctggatgctgtttagtagtcgatgggaaaactcagccggtagcaattaaaactaatgtacctgctttgtatagcattagaaatgcagatggtcaggaagtcgctgatggtgtagcacctgctacagtgaatttaaaacgtggtgatgcaccttatacaatcagcttacgcagaacggcagacagtacgccagccacctctacaatcaatgacaatttaaatggctggctttggggtgacttgttctgcgggcttattatttgtggtggtgtagaccttgctacaggtagcgcatgggatttagataaagaggttactgtaactacaacaggagcgggtgtagtggttaatagtcctcttcaaaccattcagccaaaaggggcaggggtaactattaacaacaccgttaataacaagcagagctaa

SEQ ID NO: 160361 - DNA, 177 bp, Enterobacter cloacae
atgattttattaattgctgctggtttcgttttttttgtctgctttatgctttgggttatatatcagcaaactatcccacgtgctagctatgagattccaaagtggcaatgggatgcaatgcaagaccgttttaatgagcttgaatctgaaatggaacatttaagagaaataaaatga

SEQ ID NO: 160362 - DNA, 195 bp, Enterobacter cloacae
atgagtctggactataacgggaaatatgtaagcaaagcttcagcaggtggcaataacgccaaaggtgaggaagttgtatttacatttttctctgttctggattcagaagctaaatctactagctataccctgattgctcaaacactatctaaagatgatgtagatgaaaaatatacttgtgaggtggtgaaatga

SEQ ID NO: 160363 - DNA, 420 bp, Enterobacter cloacae
atgcagcaagctgggcagaagcaaaaagagtttaaagcatcattaacggaggcagatctaactgactttttccctaaaggaagcaacccggacagaggcgttagtttaaatatttttgatcactttatgacctcctacatgccctatatgtataacaaggtgttagagttaattgataacgccggtatagtagaaaaacgcacatttactgagcatatgtataacgttgattcattcagggagcagatggcagaaaataaaaatgatataccgattggtgaattatccagaaatgaaatgttccttaatatcgaaagcttgttgggagtgtcgctgactccaacattatctatgccgtctggcaatgatacgcttttgcggtttgctcaatatggagaagaggtaatggaaaatgtataa

SEQ ID NO: 160364 - DNA, 1113 bp, Enterobacter cloacae
atgcctactatttcagtatttgatcagcaagtatctacagccaccacgaaagtgattgaggctaatctcaacctgtttaactccgcaaccaacggcgctttgctgatgggcaccggcgcatccctgggtgattgggttgagcgcactttctgggccgctcagcagctcgtgcgccgtcgcaatgcctacggtaatggcaagctgtcacctactgagctggcgcaagcgctggagcgtgcgatcaagattgacggcggcaccctgcctctgaaagtcaccccagctctgatggaccgcctgggcaaaactccgcaggaggcagctgcggtaatgggtgagcaggttgctctccagatgattgaggattacctggcctgcggcctgggcgctttcatcgccgccactccaaaaggcctgaattacgatttcaccgctcaatccggtggcgatatcccgaaaatccgcagcctgatcaaggcgtctggtcagctgggcgatgctcaaaaccgcctggcgtgctgggtaatgtccggtaatacctataacgacctgctggctgaggatgctttcgttaacggtcagaatctgtttaagtttgaaaccatcaacgtgatccaggatggcctgggccgtcgctttgtggttactgacgcagcggcagctctggatgcttccgtgcctggtggcacctcaggcactgagaaagcccgccagcgcgtgctgggcctgatgcctggcgcggtaactgtgaccacccgcccactccagatgtatagccaaaccatcctgggcgaggagaacgtgtatgacctgatgcagggtgaatataactttgatctggcgctcaaaggtcacacctacattggcgctaaaggctccctgggcaatggcgataaggcaacatcaccaacgccaaaagctgagcagaacgccagcgctaacacctcagatgatgcgagcgcatccccaacgctggaaaccatcacggcatccaccagctggcagatcaccgataaacgcggaattactgctaccacgggccgcctgaaaggtgatgatctggaagtggcgaaaggcctgggtggcctaatcgtgactttcggcgagaactaa

SEQ ID NO: 160365 - DNA, 669 bp, Enterobacter cloacae
atggccttacaacgaatcattgatgcagcagcgcacggcgctctgcacgcttccctgcaaggggaatacatcaagcaggcagacggcagctatatgctggactgccctgatctcactgccgcgctggatagcatcacccgcctggagaaaaccaacgggcagctcaaagccgaaaagcagacactggcagagcgtaacgccgcgctgaccacgcaggccggtgctgatggtgctgagcatctcaagctgctggcgggctatgagggagatcttaaggcggcgcgtgatgaatccgcagccctgcgcgggctggcgatgagcaagcagctggaggaggcgctggcccacttccctgagcgtctgcatagcctgatcaagcctcaaattgccggtatgctggatctggtgaaagcagaggacgggagctacgcggtgcagatgaaaaccggcactgacggtgcgggcgtggcgtttgatggcaaggagtttggcctgcacctggcgaatgatgcaacgctgggcagcctgatgcagagccgtgcggtggggccaaccggcgcaacccgtgaaacaatcaaatccacaacggaccaccagcacagcggcgcgctggataaccgcagcattgccctgggcgcgatccaggcgatggacgcaaacggctactaa

SEQ ID NO: 160366 - DNA, 630 bp, Enterobacter cloacae
atggcaggcagaaaacccaaatacaaaaaagaatactgtgagagcgtggttgcatggttctcagagaagaaagatcaccgcatcaatgagagtgagaagggcgtgcaaaaagtcatgcctggtgactcgctcgcaaccatgaccggctacgcccgccatattggtgtaacgcgccgcacgttgatgctctggtgtgagcgctacccagaattcaaagaggcttatgagtgggccgaggagcttaacgctgaccagatcgcccgcgccagctttatggggtccacaccatcccaggctgccgctttgctgctggtcaactgccatggctggacctcagcagctcagggcaagatgctgaatgagggccgcaatgatccagccaatcccctgagtggggaaaccgtaccggaggcgactgcctttgtggtcacggtggtgaaagatcgtgaggatgcctattaccagctttggctggatcgcagggagaaaaacaagctcctgagcagggatgaggatgaggggctggagcagtttgagctttatgacgaaaacgacgcggagcagctgcgtgaggttgccaaagtgcgcgggcacctgctgggcctccttgagatgctgcctgatgagtag

SEQ ID NO: 160367 - DNA, 576 bp, Enterobacter cloacae
atgactaatcagcacccagcatacatggacggccccgcagctttgcgcacactgtatgcggaggcagagcggcgcgattcagacgctgatcgcctgcgcgctttctccaccccaaaaactcaaccaatcaccacctcactgagcgggaaggtcaacacattggcgggtcacatcctggctgctgctgcacgcggtgagattgaggatagcaccagcggctggcgcgatttgccaaaccgcccagagactcctgagcagatccgcctggagaagatcacgccgtccacctatcagatggcgatgatgggcaaggaggaggccagaaagcggagcagctcgccggtgctgatggctggcatggttttccgtaacgcctcggatggggcagcgtgggcaggcttgcacccgtcaacattcaatcaggcggtgcgccaaggcaagctcattgcggggaaatatcgggccgtcaggattgaggagcatgagatcagcccagggattattgatatgagagagatgagcaaggataggctggcgcggcacggttcggcattcatggctgcggaggccagataa

SEQ ID NO: 160368 - DNA, 270 bp, Enterobacter cloacae
gtgagaacacaggaagagattgaggatctgatttcgaatatcagttacagccagcaggctgggatgcggtacgcgcctaaagggctggaggaaaacagggttaagctggagatctaccgccaccggcatgagggtgatgtggtctgcgccgttgagcttgaattgtgggagcatgaagaatgcagcgtgtttaccacttactttgacggactccccgccgcaatggcttattatcgtgattgtatcgccagcattgaaagcagcctttaa

SEQ ID NO: 160369 - DNA, 1347 bp, Enterobacter cloacae
gtggcaaccgaaaacaacacgtttaagccagaggattttggcggatcaagaaaaatctcccctgaggaggccagcgcgggccgcgcagctcgcaaagcggcaactgacgcaggccacaaaccaggatcaccggcatggcgcgcagcctttgaggctcatttaaatggtcagacagtggatgcgcccaacgccctgcaaaccaccagccttattttttcccgtggctatgaagggtttgagcaggccactgaatgggtgattaaacgctttattggcgttggcacctttggctgcatgattggcccgtcaggatcttataaaacctttgctgccgtcgatatggcttgctgtgtggcatctggtaaagcatgggctggcgtttacaaaatcagcaatgctgggccggtgctttaccttgctggtgagggtgtgcagggcgttaagaaacgtatcaaggcatgggcgcagcagcatccaggatatgaggcagccacacgaaatatttttatccatgctggtggcgtagatatggcctctgacgctgcgcaaaatgagatcaagctggctattcgtgagattgcagatctcaccggtgtgcgccctgccctcatcgttattgataccctgggcaagtctctcaacggtgatgagaacctaaccaaagatatgcgcccattcatcaacggctgccagaaagtgcaattcatcaccggcattagcacattggcagtgcatcacaccgccaaaggcgtgagccgtgatggcagcgatgggatcagccatggcgggcgcggtagcggtgcgctttatgatgatagcgactttgagatccagatccgcaaggatggggagcagcgcgtgggaatctctcacagtaaagccaaagatgtggaaatggagcgagcttttgcccttgagctggtggagcaggtgctggcaactgaccaggacggtgagccgatcatctccatggctgtagctggccctaaactgccggtcactgagcgctctcctgatggcgtgccatttgataccaacgccgccaccggtgtgaggctggcgctcctatggcttgatactcaaccagaaaagcgcggcctccaatctgaatgcgttagccatctggaggagcgcgggctgagcaaggcatcagcgaagcgattcattgagaaagccaaagaggatggattgattgctgatgaatcgctcagcccccgtaaaacaatgcttaagctgctcattccggtggctcagccatacgttgatcaggccgctgacgatggcaagcaatcgcctgaatacgagccagggagctggggcggcaatgatagcgatcttccatactaa

SEQ ID NO: 160370 - DNA, 138 bp, Enterobacter cloacae
atgaccaccacccaccgcttaaccaccggctgcttttgcctggcctgccagcatcgccgcatcacccgccgcaagtacctccagcagcagatggcccgcaacaaaacccgcacggtagatgcgaaaacaaccaattaa

SEQ ID NO: 160371 - DNA, 327 bp, Enterobacter cloacae
atgagccgcttctttatggtctgccaggtgcccaacacaacgctggttacagtggcccacatcctcaaagcggagcgctggggtgcatcgaatgaggttgagctttccctcagctgtaagcgcgatccgtccggtgccagctcatgcagctttgaccctgatcagatgcgcattgtggatgcgtcgtttttgccaccagcagctgcggctattgcccgtgacgggaggccggtatgcgtgccatttgatgatttcccagccgctggtggcagtgatacgccgtttgaaggtgccagcaaagcagagctgcgggagctgctgaaatga

SEQ ID NO: 160372 - DNA, 339 bp, Enterobacter cloacae
gtgaaacaaatcaccctcaccaccagcccagatctgagcaatatcatgcatggctttgcccgtggcggtgcctgcctcccagaactgcacccagatgcgcctgccggttatcgtgagcagtatgaggccgcagtagacgtgtgcgcccattatgccctcaaaccgtttgagcctatcgccatcacctcaccggcgcactgcgttgcattctctgccctgctggtcaatctcagcgccctgctgcgtgctatcggcggcgctgccagcgttgagcaggaaatgcgtgagctaattgcttacatccatcttgccctgctgccagcaggaggccacgcatga

SEQ ID NO: 160373 - DNA, 1386 bp, Enterobacter cloacae
atgacaggcataatgaccgctgaaattttcatgcagcagcttcctgcaaagcaggcagaattttccggctccagcaaaaaatcacttaactggcctatgcgtaccgcgtatggcaaagggctggaattaaagctcacagcaaacaaattacagtggcggcaccggtacacgtttgagggaaaaccacgcgaatacgtgatcggctattacccgttgtttgacttccacaaagccgctgaccagcaccgcctcaacatgcagtccatcacctcaggcaccgatccgctggtggagcgccagcagggcaaagcagcagccaaagagaaagccattaagcaagctcaggacgtgatcacctggagtgacatattcagggagcataccggcgatgatgcatttacccagcttaaagatcgctctcaggctgacaccatttacgtatggaatcgttatttcaaagagcacattggcggtctgagcgtgcagcgcacccgctgggagcagattgaggatcatctcatcgccgtgcgtgatggcacctactccatcaaggcgggccacgccgtggaagcctgccgcaagggtaaactactgattgatgccctctggcaccgcgccagccgtaaggggttatgcgagggcggcgctatgcagaaaatcctcatgaagcacctgatcaccaaagcccacaaaaagagcgccaccagcatgcaagagattgaccggcagcgcgttgagcgagcgggccgcgtcctgagtccatttgagctggcccacgcatggaagcacctgattagctatgatcatccctatgcctacgcggtgcgctttatgttcctcaccggcgtgcgccgtggtgaggcgtgcggtgccctcagtgagaacctgatcaacaaaggcggcaagcagtcactggtgctcaaagatacaaaaaacggcacggattttgaggtgattctcagccctgaggcggttgaggttatccgtaaggcgcagcagtggcacgctgagctggtggacggctcacagccagtgcatatcttttcaaccgcgccagcggggcgtacaaagatggacggtaacaacctggccgcatggctgcgtgctttccggcgcaggcattgcccagatatgcccacatggagcagccacgactgccgccgcacgtttacaaccctgagcgttgatgagctgggcaagcaggataaggtggttgaccgttgcataaaccatgctgacgtgaccggcacggcggcgcgctataacaaggccaaaaaagcggcggcaatggctgacgtttgggccagctttggggcttacgttgcaaatggttgtcaaagccctgatgggagcgtggttgttatcgcatcacggatgggagggtga

SEQ ID NO: 160374 - DNA, 408 bp, Enterobacter cloacae
  misc_feature (247)..(256): n is a, c, g, or t
atgaatgatgtctcacaccgcgaatcgttcgcgttcagcgcccgggtactgggcgcgctgttttatttcgccccagacagcgagcagatcgcgccgctggtgagtgccctgaccgcaggtgactgggttcaggactggccgctggcggaggaaaacctgctgcctgtcgccagtatgtttaagaccccatcggatgaagcgttgaaagacgcctggcagcgtctgtttattggcccgtatgccctgnnnnnnnnnngcccgcccccccgtggggctcggtctggcttgatcgcgagtcagtgctgtttggcgattcgaccctcgcgttgcgtcagtggatgcgtgaaaaccatatcgcctttgagatgcagcagaatgagcctgaagatcatttcggaacgttgctga

SEQ ID NO: 160375 - DNA, 285 bp, Enterobacter cloacae
atgacgcaaacaactgatattttttatttattcattaagctcacgccaccgggactggcattactgctgtgggcgtacggggtttataatcagtcctcactgaaaaaactggaaaccatgcagttacagaaaaggtggcctgatctgcctggcggtttaaccatacatgacaaaaaagaagcactccacgcgatgatttctgcggaggaaaggaaaaccagagcatcgtttaagatggcgattttctttactgccatcgccattttctggacagtttatatctga

SEQ ID NO: 160376 - DNA, 210 bp, Enterobacter cloacae
atgaatgatgaaatacgccatgaaaaacccgttgaggtgaatctgcagctgacgcacagggaagcacaggcgctcgcacagctggtcaagcggcagggattcagtgactgccgccggctggcaacgtctgataatgaggcatacctgatgatggatggtatcaatcagctcatgaaagcactgagggaagagggctatgcaccacggtaa

SEQ ID NO: 160377 - DNA, 1059 bp, Enterobacter cloacae
atgcagcgtctgaacgtccgcaacatccccgatgaaatctacagacagtttgagcaggaagccgcccgccaggagcgcagcaccgaggcgcacgcccgttttgtgatcgcacagtccgtgcagcgtgaagcagctctcaccggcgccgatcgttaccgccgggagctgagcgcccgcctcaggcacctgttacccctggtcaacgaagcggcctcccgccccggccccaattaccagccgccgatggacgcggccgccctggcggagcgcctcggtgaggccaacccactggcggtgatgaactggttttccggccacgacgtcccggattttgagcaggccgaccgtctggccacttacctgggctgttccgcacgctggctgaaattcggcgagggacgcccgttcgcgttcggttcgcagcgacgccttaacggccacggcagcgcgtatgacgatgcgcgcgccctgctgacgccggacgccgccggcaatccggtctataagatcagcctcatccgcgaagactccccggaggggagtattctcatcctgcgtgagttccgcaacagcctgcaggcggagatcttctggactaacctccacctgagcgaacacgtcggcaataccggttttcacgatctgtgcgattttttcgccatgctcgagcagctgtatattttctataccattaacgatgtattcgtgaaaagttacgatatcgcccggggacggctgaagtatgaatttgaggagaacgactgtcacccgctgctgatcacaaaacgctgcggccgggaaaacatctggtgggaggatatctggcacgaagaaatgctgggtaagcgcaatccggaacgcaacggcgggtatttctggccggacgatcgggagattatcaatagggtcatggcgcacctgaaggagaagcagcgtctgatggataaggacgacctggagatgctgacgcgctactctttcgggatggacgaacaacgctcccgttacaggctcgccacccacaccggtacgacagaacaggagtctgacgatgaatga

SEQ ID NO: 160378 - DNA, 546 bp, Enterobacter cloacae
atggatatccactactacgatgaacatcaggaagaatttgaggcggttaagctggcgctgaagggaaaaatggagaggatctggggcgccatgctgaaagaaagcggggatagcctggatgacgaagccatgtacctgcacctgtttgaagagctgcagtttaccttctctccgtccagcttcagagagctcaccccgtcgcaggagctggatgaagataaaattgccgccttcgtggccagaacccgcggctataagcacggcatcacgatcaattgccagccgggccgcccgcagaaatggctgaaaggccggatccagccacttgaggacgcggcaggcacaaacctgtgctggatcgacacggccaccatcgtgcatatcggtgccggtcagcagtttgacgatcagtattatctcaccgtgaccacgcagaccggacagaattaccgcgtgaatgatctccgtctgcctggtcacctgctggaggccgcacagaaaaccctgttcagggcactggattcatccaccggcggtcatttctga

SEQ ID NO: 160379 - DNA, 462 bp, Enterobacter cloacae
atgatgaagaaacaactttttgccggcatcatgctggttgtggcgcacaccgccggcgctgtgaagggtgatgataccgaactgcagcagatttataccgaggcgggcattcaggggatatgcagcgccggaatgctggccgtgccggaagaggccagggatgaagtcgtcccgcagaacgtcagacacctcctggtccagtgcgcctatttcgatgagcagcagttgcgccggcgtgccgatctgccggtacagacatttaaccactgggctgagcgtaatgcggttcttaatctgtcggcagaccaggtatctgatgcgctctggctgtcagcgtggcgtgacttccgggcgcagctggcatcggcctacccggccacgccggaaaaaaaggcacagggggaagagaccgtacccgctggcacgaagcccggtactgagcatgggagtacggcggattga

SEQ ID NO: 160380 - DNA, 312 bp, Enterobacter cloacae
atgagtaaaagtgagacccgtcagaagacagcccttctacccagcatccgttgcacccctgaagacaagcaggcagttcgtgagaaggcggaggatgcgggtctcagcattggcgcatttatgctgagggctgcgttaggaaggaagattgccccgcagacagatcataaactcattaacgagctctcacgtcttggcggtttacagaagcacctctttaaagaagggaacggggtcggcagtaaggagtacgcagagatactgcaggccatcaaggcagccattttcaggatagagcaaaagaacgactag

SEQ ID NO: 160381 - DNA, 1692 bp, Enterobacter cloacae
atgaaaaagattcttattgttctatctggaatggcagttacattaacttttgttgtatcgacaatagttagatacgattctatgttgtctgacaagtctttttatgccataagcggcactcaggaaaactatgcatgggcaattgcaaagttttcaatccaattgtctgagttttactctcttgttaagagcgaagacaaagatatggataaaatccgattaaagctagatatcctttattctcgcattcatgttattagagcaagaagcgaatcgactgagcctttatataatcaagaagggtacaagcagatcatagattctatttattacaaaataaaatcggtagactcgtatataaacacccctaacccaaacattaaaaaagttattgagttagttaataaaattgaaccagactcaaaatcattgaacaacatagcagaccatgccgaggtcaatcaaagaacaaaagcccttgaggactttaaagaaaaaaggcaaagccttattattttattggcaatcgtaacagttttaatctttgctatgtttatcatagtagcttttcagttatataaaaccaataaattattagaagctgaaaaagctgcgtttaataataaaaatgcttttttgggtgcattagggcatgaattaaaaacgtctctgcaggcaatcacatcttcaattgaaataatatccttaaaaaattcaggattggattcaaaacatattgaaagactggagaatgccgcgaagaggatggaaaaccagatgaaagacctggcagagttcgctaaggttgacaatggaaatgtagtggtaaacaacatatcattcaaccttgccaaacttataaaagatacagttagcgaatgtgaatcaatttccaataaacattctattgatattagaacagacaatattagcgatacttatataataagcgaccctttcaggattgcacagatcacagaaaacctagtaactaatgccataaagtataccgacaaaggtcatataactataaatgcttttatagacggtgatagaacacttgtcatagaggttgaagatacaggaagaggcatcccaaaagataaactaaaatcgatattcctccctttcattcgagtagctgatggagtaaaagttcccggatttggtatggggcttgccattgttatgggggttgtcaaaacaatgaatggaagtattagtgtcaaaagtgagttagggcttggaagtctgttcagaataacgctgcctgtaaaaaaatcgactaaagaagaattggctatttccgatgttattcgaaatgaaggttttactgctaacgatctcagcatattgataattgatgatgatgagttggtttgtgagtcgctcgcatcaattttacagggtatatttcaagtagaatatacctcatctccggaaagggcgctagagaagttgcgacgtaaaccatacgatcttgtgcttagtgacctgcagatgccaatcatgactggcgacgagctttatatggcagtaaaaacaggctcaggtcccaacacacaaacaccatttattttcatcagcgcttattccagcgagagtccagttgatggggttgagcttcttacaaaaccagtcaggcttaacgatatacgcaaaagtatcgagaaaatatattcaaatagatag

SEQ ID NO: 160382 - DNA, 495 bp, Enterobacter cloacae
atgcataagtttaaactttcatttttcgccacgattttgtttgtgacctctcaagcaatggctgcgactgaagatataaatattgacggaatgattagccatagaaacaatgacattggatacacactcacattcaataactttattaaaatgccaatggcacacataaagacaacgacaccgtggacgaaaccaaaaactaaagtagattttgagggtgttagagttaaagacatattaaagttagtcggtgctcaagggggaacattaagaatgagcgcactaaatgattactcaattgatatccctgtctcagatgttgaaaattacaacatcatctttgcttacaaaatgaatggcaaaaaacttaaagtaagaaattttgggccttacttcgttatatacccactcgatgagcacgctagcgagataaacaacccattgtatttatcaagattcatttggcaggttaacaaaattacggtgctaaaatga

SEQ ID NO: 160383 - DNA, 930 bp, Enterobacter cloacae
gtgtctccctatggagtgaataaaaaaaagcctgttggtgatcttgcaccattggcatataaaacagtatgtaacaatgcattaaacaaggttaagattgattataaaaaaataaaaaaagtcaccataattaatggattaggggtaacccttggagattcaatcattggaatctctgctctgcatgcaattaaatctataaatccggatattcatataacattgattaggccggagcattgccaggactatgtcgaacaaatttatcacatggcatcaggcattattgataagttattatacttaccttttgacatctctaaaatcaaccatacagacgttaatatagatatgggaaatcagctttattgggaagattttgatagcatcgagatgcatgatttttttctaactaatcttggaatcaaccccaaaagcattaatgataacatcaaaaataactcctggcttttaaacacagatgtaccagattttgatctgggggagtatatactgttttgtcctaacgcgagtacaaagataagaagcatcccctcacgatttcatgttgaaattgttgaagaattgagccacgagttcggcgttaaagtattaggtttcaatgacgtagatcaccctaatttctttaatataagcaacatatccagtgatacgttatctttcgcaggaatcataaaacatgcatgttttttgtatacctgcgattcttctgcgcttcatttaggagcaggctttaatatacccacaaggtgtatatttaccactgtcaaacctgagttgcgtagtctttactatactaaatgtgaatcaatttatatcggaaataaccataccgaaggtgttcattgcagcgaagatgattatatgctggaagtattaaataaagaatttgaggaattttatgcataa

SEQ ID NO: 160384 - DNA, 843 bp, Enterobacter cloacae
atgaataacaacacaaactgggtcggagatctggttgcaaaagttctaacgagtggtggcgtaccggagaagaaacattcaatgcatgtggggcatgtccttgagatgtcttctactgcggccactaaaaaattggcaggaggaagtgaatggcgagttcagcagctgcttgaagttgtgcattccgttggtatgaggctggatgatttttttcgactttactatcaggaacaatctaataaggatgttgaagttcatgaggcagtttggagcgatggggaattgaatgagccctgtaagatctatatttctgaaaacccatcggaaccgacaaattactctgcattaaaaataaatgatgtgtggcatgttgttaaaacgagcagtatccgtgatgatgtgctatttgaatcaaaaatgaatattgatttaatcgaaattattccaaaaaaaatagacaaagaaaagcatagaattgctgtgcttgatgacgataaaaatatcgttcagagcctatcatctcttcttgaaggggatagatacacaataaaggaattctatagtatagatgaattagatgatgctatcgaacaaaccccgttcgatgcatacatattagattggattgtagataataaaagcgttttcaatacaattaaaaaaatcagatcatcaggaaataagcatgcgatggttatggttttaacaggacagttatccggggcagttgatagcgagatctcaagagctattaacgagcttgatattattggcccctatgaaaagcctataaaatctttcgttataaaatcaaatgtagataagttttttccaaacaaatag

SEQ ID NO: 160385 - DNA, 228 bp, Enterobacter cloacae; identical to SEQ ID NO: 109870

SEQ ID NO: 160386 - DNA, 720 bp, Enterobacter cloacae
atgaatgaatttaatcatcccgccacagacaaggatgatcagccagatatatcggccatcgtgcagcatgagaaaccgagtctgaaatatcttcttctggagaaacagtatgttctgggactgaacggtccctggcttatcggcattctcatcgccgccaccctggccatctggtatctctttggcaccaccaccccgtcatcacaggatgagctgaatgcggcggccggctttgaaaacgttcctccggcagcctcacaaccagacaaccggtcattgtcctcaacactgtcaccgccggccagcgataacgtgaaagaggaagtggccacgatggtgaacggcgtcaaaacctacgcggaagccaaccgtacagccatccagcggctgtccgacaccgtgaaaaccctgcagcagcaggcggccaccgcgcagcagctgcagagccagtatcgggaggagatcaacatcctgaagtcacgggtggcgacactggaggtggagaaggtcaacaccgcaacgtccgccccccatcgccagcgcctgctgacgtcaggcatgaaggtcagttcagtccaggacggtgcggcgtggatcttctggaaaaacaaaacctgggccgtccgtgagggcgataccctcgctgacggcaaagtcagcatcatccggatcgattcggcaaaccgccaggtatttacgactgaaggcgtgatccgttaa

SEQ ID NO: 160387 - DNA, 564 bp, Enterobacter cloacae
gtgacacaaaaaggtgttgatgatgtcgcctggctggatgtcagcggtgatgacacgccgccctcaccggttcaggtaaatgctgaatgttgctcacggtgccggtggcccgcccggcggcttttccggctccgtgaagcagagaacgacgcggtctgtgcagtctgctggataagccacaacctggacacggcctcagcacaccagggcgacctgtgctggttaccggggcttcatgctgcagacgtcgtgaacctgcaacggatcgcctgtatcgcgaccatcgccggcaacagtcacgcgaaaaaacaggggcagcgggtacttctatggatgcgccgccacaaacgggaaaccgaacgcgcctgggatacgtcccgcccggctgaatttgcggcggtgatgtcacgcttacacccggacgaccggcgggcattccgtcagcgactggcaggctgtcatctggtcctgccggccagcgtgttcagcgatctcacattgctgctgcctgccggcatggacgcggacaccctgctgaacactctcacactccccaggctgtag

SEQ ID NO: 160388 - DNA, 624 bp, Enterobacter cloacae
atggaaagccagcgggaacgtaccggcatggaaactttcgtgtcactgttaaaattctgggccgcgatgatctacttccctgtgtgcctgcttttcgcctttatctgtaccatatcttcaagatctgaagatgatggcaaggcgctactgttctgggtgctgtttgtgacgcccttcatcattcgtcagtttaccctgcgcaagcgacgccgcgcgctgaacagcgtggtgaatgccgtcagtggtgaggagtttatgccacagaaagggaacgtcatcatttcgggcaaccggacctatctgggcgtggatgccatccggggaaccctgctttacgtcagtatgcgccgcaagggggaatacgatgtgatggggctggacatgtccagctggacgcgggtggcgtataagggggatgtcatcaccctcaaaaccaaaaacccggaactccccagcgtcagcgtcgatgcaccgggcggtgagaagtattcctccgcgctatatgacgtcatctgtgcgatggagcaccggcagtatgccgatctgcagttccctcagaaggtccatgagcgtgcccgtaccgcccgcaaagagaccggactggcgatgttcagctacacctga

SEQ ID NO: 160389 - DNA, 1122 bp, Enterobacter cloacae
atgaacctgcttttatataaggccacaacgatgatgactccgacatttaatgcccgtatctccggtaatcacctgattgcttcactgaatgacgacacaccgattttttctctcaatttgagcgaggacccgagtttctggatcgagggaggcacactgatggccagccttaacacctacagcagccatccggtataccgggccctggactataaagaggcagaacaactgctgtctgtcattacccgggtactcagcgatcgtaaaccgaagataaagtggaagagcactctcctgcccgcggctgcgctgcttgttacctgttttgccgtctggcgttttgcgcctgcaacaccctcgcagggcgtgccgccgttcggaccggcagaaccccggaatgccacggcggaaacagccgcaccgcgcttccagggactaccggagctgcgcaaccctgcgccgggtaatccctattttggcaaccacacaataccgaatgccgacaatggccagccgatgccggcagcttcccctgtccggccctcagcaacccggccggtttccgtggccagtcaggaaacgctgagcccacacattatgcagaacctgcagaaagcagcaggccgcggctatttcaccgtccccctgtcttccggacacgaacggacactgtacgtttttgccgatccggagtgccctaactgcaaaaactgggagccggtcgtcgaagcattaggtaatgaatacaacgtggtggtcttccccgtctctgcgattggtaaagagaaatctgtccggaaaatccagtctgtcctgtatctggagacggcgcaccgcgcagcggcctggaagaaactgttttcggttgacgagggcatgctcaccattggcaaaaagaaaaccggtgacgctcaaaaagaagcccctgcacaacgcgatgataaacgctggaaaatcgccggcgaggcgctggccattaacgatgtcgcgttcaggcaataccgtatccccggcacgccctgggtcattgccgacgacggccgccatgtaccgcagtcaacgctgaaagatccggccaccctgcgcaccttcatggcagagcacagcaacgcggagaactga

SEQ ID NO: 160390 - DNA, 252 bp, Enterobacter cloacae
atgtctgaaaacacacaaagaaaaaatccccgccgtaataacgatgtgcaaatcaggacgcgcgaatttgcgctcatgctgggagtgcctgagcatgaactcggcgtcgccgcatccaccacaaatatatttcgcggaataccattaccggcgccggtaagtcagttaaagggaaagacaaggcagttctggctgtctgactgtctggattttgccgaacagttaaaaggaacatccgcagaaaataaataa

SEQ ID NO: 160391 - DNA, 822 bp, Enterobacter cloacae
atggaacgcatgctgcatttaggcccgctggtgctgccctgggcactgctcatcatgctggccggctggcaactgggcgtctgggtgcatgaacgcctgtccgtgcgccggggccttgcgcccggcccgcacggctggcgaatggctcttgtggcgctgctggcagcgcgcctgggctttgtgctgcgctacaccgatgaatatgtcgctgcaccctggtcgatcatcaacatccgcgacggtggctgggaaccctgggccggcctgggtgccgccctgctctactgcaccgtgttgtggttgcggcgcagcccctggcgccggcctgcaacggcaggtctggccacgttcactgccgtctggctggcgggcctggcgctgctgcacgccacggccccaccacgcgtggcagacctgccaccctggcacggcgtggcactggatgcgcgcaccgtctcactgccagatctgcgcggccaacccgtggtggtgaatctatgggccagctggtgcccgccctgcaggcgcgagatgccggtgctgctgcaagcgcgcaatgcaaagccacaaatccgcttcctgtgggtcaaccaaggcgaggcgcccgatgtcgtctcacgctttgccacccagcatggcttgccgcatgccgatgtggtgctggaccaagcctcccagctgggcagcagcctgggctacaaggccctgcccacaacgctgttctatgacggccagggccggttggccgcagtgcgcgcgggtgagctgtctgccgcaacgctggcagacaacctgggggtctcctcgttttcagtgcaataa

SEQ ID NO: 160392 - DNA, 1470 bp, Enterobacter cloacae
atgacgcccctgccgaaaagtctgcgcctgcgtttggtgctgggcctgagcctcaccatgtgcctcatctggggcggcgtggcggcctggcaattcaccaacatgcagcgcgaactgcgcaccatgctggacgatcggctaatcgcctcggcccgaatggtggcaggcatcgtggtgcagttccaacccatgcaactggccaccacaccgcgtgcgcaaaacgatgcactgctctcggtgatagcgcgcgatggcgtggcctgcgaggtgagcctggttcgcagcgaggtggattttttgcccatcgccagaaccaacaatattcctgacatggcgtccgcaggcagcgcgggttttggccagatcaccaagggcggaaagcagtggcgcacctatgtgctggaggaaaacggcgtgcgcgtggccaccgccgaccggctggacatgcgcgatcatctggtgcagaccttcctgcgctcgctggtgctgccttttgccctggcgcttgtcggcgtcctgctgctcacgtggtggatctgcacgctcagcctgcagccactgcagcgtttgcgcgacgagctggctgaacgcccgccgcaagacccaacgcccgtcaagtcaggccacgacatcaaggaactggccccgctcgtcgacagcctgaaccagctgctggagcgcatggacgccagcattgaacatgaacgccgctggaccacagatgcggcacacgagctgcgcacccccctcacggccatcaagacccatgtgcaagtcgcgcaaatggcgctggctgccaatacaccgaatgccccgcaggacagggtggccaacgccttgcgccaggcgggtgagggcatcgaccacatgcacgcaacgctggagcagctactgcagctggctcgcgtggaaacggccactgccggcgacacgcgccacacagtgggtaccgatattgcgcaagcctttcgactggcctgccggcaatccctgcaccgcgccaaaaacgaaggcagcgcagtgcccgccataacgctggacgcgcgcgaggtgccgtccgagcccgcggcctgggaaaccgtccagttgcccctggcgccggcgctgctgacctgcgccatcaccaaccttgtagacaacgcactgcgctaccaccgtggcccgacatccgtgagcgccacgctgcaatggcacgcaggcaccgctggcgacgggcaggtggaaatttgcgtgcgtgaccaggggccgggcctcacggcagatgaatgcgggcaggcgctgaagcgcttttggcgcaagtctggcagcgatccgggcagtggactggggctgaccatcgtgcaccgcatcgcagaaagtgcgggcggcacgctggtgctggagcccggcacacccggcctggtcgcccggctgcggctgcccacttgcgctgcagatgccgcccctgcgcatggcattgcaccaggctga

SEQ ID NO: 160393 - DNA, 222 bp, Enterobacter cloacae
atggttcaattttttcaaactcatatggggcaaaaattttatgagcgtgatattccagaaatggtaagaaagctcaatgaaattgcggacctggacgtgggcagcaacaccgtcaacgtgcacgtgcaccacctgcgcaagaagctgggtgccgacgtgatcgacaccgtgcgcggtcaaggttttcgccttggcgcccgctactgcgacagcacgacatga

SEQ ID NO: 160394 - DNA, 510 bp, Enterobacter cloacae
atgtcaagaatagtgattgttgatatagacaattgcattgccaatgttaacaaagcacttaaagataaaggatacagaaccgacatatatccatcacctgttccttcacgtttgtttgatgacggttctatttttaaaaatgcagaacctatgaaatcagtcattgaaaacatcgaaggaataatagacgacaaaaaagatatgtgtatgttccttacttcccgaccaaataaaaaacacatatcttctgaaattacaagacaatggattaatgaacacacacccttcacttttccgttttactttacagacggagtgccgaagggtgaagtgattaggaaagtcttttcggataaagcaattcgtgaatatgaatggatcatttttgatgattcccctcacgaaattataagttatctaaacttgaaaaacgacatcaatgtggatatggagatttatattccagcatgggaatacaatagccatattgatgttggaaagaaaatatag

SEQ ID NO: 160395 - DNA, 864 bp, Enterobacter cloacae
atgtcaattgcggttacaggtgctactggtccactcggtgggcttgtgattcaacatttgctcaaaaaagttcccgccagtcaaatcattgccatcgtgcgtaatgttgaaaaagcctctactcttgccgatcaaggcgtggaagttcgccatggcgactataatcaaccggaatctcttcaaaaggcttttgcaggtgtctccaagctgctctttatctcaggtccgcattatgataatacgcttcttatcgttcaacatgcaaatgtcgtaaaagctgccagagatgcgggagtcaaacatattgcttacacaggatatgcctttgctgaggaatcaataattccccttgcacacgtacatttagcaacggaatatgccatccgtacgaccaatatcccgtatactttcctgcgtaatgccttatatacggacttttttgtaaatgaggggctgcgcgcatccatagagtctggagcaattgttacgaatgcgggaagcgggatcgttaattcagtaacacgcaatgaacttgctttggctgccgcaacggttcttacagaggaagggcatgaaaacaaaacgtataaccttgtttccaatcaaccgtggacctttgatgaacttgcccaaattctctccgaggtttccggcaaaaaagtcgtgcatcagcctgtctcattcgaagaagagaaaaatttcctcgtaaacgctggtgtccctgagccgtttgctgaaattacggcagcgatctatgacgcgatttccaaaggagaagcgtccaaaacatcagatgatctgcaaaaactgatcggatccttgacccctctgaaggaaaccgtaaaacaagccctgaaaatgtaa

SEQ ID NO: 160396 - DNA, 627 bp, Enterobacter cloacae
gtggcttcgcgacgccgccgccggttcctgaaccggttgatccggtcactggccacgcctgcggggcgtctgaaaatcacagcagaactgcgccgccgcatccggcataacaagtattgggtcaatgaggcaaaccggttcggactggaaacgctgtgtgaactgttgctggccatccttgacgatcttgatttaagagactggcaaaccagacacaacctggaaacgctggccgaacgtgccggcttggccacgcgcagtcaatccggccatgtgtcgatctcccgtgccagccggggctgtgaccgcctggtctggctcaacgctatcattacagaaaaagcccccttcaatccttatgacgcccgctgtgcctgtaagcacatcgaggtcacagaagatttctttgccattctcggcgttccgctcaagcaggtttaccgggagcgcgcacggctgctgaacgtcgatcagaatgaagtcatccactctggtgatcagcggttaattgcgatcaaggttgaaaactggatgcgtaaggccgctgccgggttagccaggatgaaatcaaagcgtgacgccgcacgccagctaaaacaagcctactacgctcttacacccgcctga

SEQ ID NO: 160397 - DNA, 1119 bp, Enterobacter cloacae
atgtctgacaaaaccgtggcaaaaaccgtcatcgtgctgggtggcggcattctcggagtctcaaccgcctggcagctggcgcaggcgggcgcgcaagtcacactggtgacggaagcggcgctctgctcaggcgccaccggccgttccctctcctggctcaactcagctggtgagcgttcgcagccttatcatgcgctgcggatggcgggtattgaccgctatcgcacgctatttgcccgccatccacagcttgactggctgcgtttcgatggtgctatttactgggccgcagacgatgtcgcgggcaccaaagcgcgtcatgactatgaaaaagcgcagggctacgactcaaagctgatcaatcacgccacggtcggtgatgtcgatgcgcaggtgaatccggccagcctgagtcaggtcgcgattgcaaatctgggtgaaggctgggtcagtctgccgcatctggttgagcatctgatgcaggcatttcgtgcgctgggcggagaagtcgttgagcacgctggtaaagccagcgtgctaaccaaagacggccgggccagcggcattcgcagtgaaaaattcggtgagctgcaggccgatcaggtactggtggcgtgtggcccgtggacgccggaagtggttgccccactcggtgtgaagatacccaatagctctccggtctcaatgctggtgaccagccaaccctgcgatcacgcactccaggtggtcttgaatacaccacgcgctgcggtccgccctaaccctggcaacactatcgccgtcgatcatgactggtatgaagagcatatcgtcgctcaggctgacgggcagtacagcattgatacatctgtcattaaccagttgatggcggaagcgggtagcctgataggtgacggcgagccgttaacagccaacagttggaaaattggtctgaagcccattccaggagatggcgaaccagtggtcggcgagttgcagaacgttcccggctgttttgtcgttttcacccattccggcgccacgctggcgttaatcctcggcgagatactgacgcaggagatactcaccggcgtcaaacacccgatgctggcgaccttccgcccggaaagatttagctaa

SEQ ID NO: 160398 - DNA, 1074 bp, Enterobacter cloacae
atgccacatcaacaggttagaggcccaatccgcacggctctggtgggttttggcgtcgccggcagcgtgtttcatgcgccgctgattacccctaacaccgactatcgtctcgacgtcatcgtcactggcgatgcccaacgcgtagcgacggcgcagcaacgttacccacaggcgcgggtgctgccggactggccgacgttgcttaaggcaattgatggcggcgagattagcatcgatctcatcgtgctggccacgccgccggcgcaacatgcggagcaggctgtgcaggccagccagcgtgctatccatctggtggtggataagccgtttgcagcagatgtacaagcggccgaaatgatgatcgccgcagcgcagcaggctaataccttgctcaccgtttttcataaccgacgctgggacggtgactttctgacattacagcgcctggtacaacaggaagcctttggcaccgtaagaagttttgagtcgcgtttcgagtggtggcgaccgcagggatttggcaactggcgtgacagcgtcactcttgcgcagggcggcggtttgttgctggatctcggaagccatttgattgaccaggccatgcagctatttggcccggtagtccacgccacggcggagctggcacgccattccgggcctcagccggacagtgacgaagacagtttcgtctcattgctgcatcacaacggggtgcgttcccggctgtggatgaatggtcaggcggcattgaatgcgccgcgcttccacctgctgggcagcaaaggcgctttcacccactgggggctggataatcaggagccgcagctggcggctggcatgtcgcccaccgatagccagtacggcgtcacgccggcaggtaattttgcccgggccggcacggtcggggcaaccacaacggtgcccattgaacgtggccactaccccgctttctatcagctgttagcccacgcgctgttacacggcgggccgccgccggttgatgcacgtgaagcgctcagtgttttacagcttattgagcaactccatcggcagcatcgcgtacgtattgcctga

SEQ ID NO: 160399 - DNA, 747 bp, Enterobacter cloacae
atggctataccttctgcgtttcacggcgcgagcctggagctgtgcaatctgaccctggcgtacggcccgattgaggtgctgcgtaatgtgtcgctgagcatcgaacctggcaccaccacctgcatcatcggtccctcgggatcgggaaaatccaccttactgcgtggcatcaatcgcctgcatgagccgaagaaaggggatgtattactggccgggcgatctgtcctgaaggataagcccgattcgctacggttgaggattggcatggtatttcagcatttcaacctttttcccgatcatagcgcgctggaaaacgtggcgctggcaccgtggaaagtgaaaggcctcccgaaagccgaggctctggagattgcccgccagcggctggccgaagttggccttgctcagcgagccgatcaccgtccgcgcgacctctcgggtggccagcaacagcgggtggcgatagcacgtgcgctggcgatggagccggaagtgatgctgttcgatgaagcaacctcggcactcgatcctgagctggtgaaaggtgttctgacgctaatggctgatttgtgccagcgaggcatgaccatggtggtagtgacgcatgagatgggcttcgcccggcgcgtggcagaccaggtagtgtttatggatgaaggcgagattgtagaagccggcacaccagaacaaatctttgaccgcccgcaatctgcacgcctgcagcgttttctgtcggaggtactgtga

SEQ ID NO: 160400 - DNA, 813 bp, Enterobacter cloacae
atggatctgatcactattctttcccgtacgttttttgatattccatcgatgatggacgtcctgcctcagctgctggcaaccggactggttaacaccatcattatctctgtagcagccaccgtgctgggcacgctattcggccttatactggcgctgatgggcatctcgccctcccgctggctgcgcgtgcccgcgcggctgtataccgatctgtttcggggcttgccatccatcctcaccattttgttgattggtcagggcctggcgcggtttagctatcagctgtttggccctactccttatccgctgggcatttttgccctgagcctgattgccagcgcttacatgggcgaaattttccgctccggtattcagagcgtggaacaggggcagatggaagcgtgccgggcactgggaatgagctatggccgggcgatgcgcctggtgatcattccgcaaggcatccgccgcgtgttacctgcgattgtcaatcagttcatcgccatcatcaaagactcgtcgctggtttatctgctgggcctgatgaccggtcagcgtgagctgttccgggtcggtcaggatgctgccgtgctgagcggcaacctgtctccactgatgctggccgggctgttctatctggtgatcaccgtgccgctcacccacgccgtgaactatatcgacatccgctaccgtaccgggcggcgtcgcgccactgcgccacaaagcggcctgaaggagctcgatgaagtgcagcaaaagcgcaatgtggttccggcggtctcggtctcccttaccagcgagcaaggacattaa

SEQ ID NO: 160401 - DNA, 822 bp, Enterobacter cloacae
atgacatcgcacaaacgcttcaatcatctgaccgctgctctgttcggctcggctatgctggcttcagcctgctggagtgcatacgccgctaatgacagcaatccctggggtttgatcgagcccggtcatctacgtgtagccagcctgggagactcgaagccctacactttcaccgataaaaacggcaattttactggttttgatgtcgaattcttcaaaaacgtggcacatcgcatgggtattgaacaggtggactttatcggtcaggatttttccgccatcctgccggctgtggcaaatggtcagtatgatgccggtgtcgccgccattggaatcacgccgctacgtgaaaaaacagtcgacttctctactggctatctcgcgggctatttaactgtgctgacccgcagtgattcaggcgtgaagaacgttgaagccctggcgcataaacgagttggggtgattcagggcacactgcaggagaactatgcgctgcagcatttcaaacagtccgatctggtgcgtttccccgataacaacgcagcggtgtccgcgctaaacaacggcacgctcgatgccatgttcctcgactacgaagcggccaaagattatgccacccgcttcaggctggtcacggcggcgaacatcccttcttttgacgcgcctgcgggcgtcgccatcgccaaaggtaagcctgagttcaaagctgcgctggataaagccatcaaagcagcgatgcaggatggaacctggaaacagctgtaccagaaatggttccctggttcgccaatgccgcaacagtatctgcccggtggccaataa

SEQ ID NO: 160402 - DNA, 1077 bp, Enterobacter cloacae
atgaccaatgaaaatgctcgtttacgaagcccaaccgtcgccgacgtcgcccgcgcagccaatgtttccaaggctcaggcggcacgtgccttgggcggatatggttcagtgagtgatgacgtgcagacccgggtgaatcaggcagctgaagtgctgggttacaggccgaacgagttggcccgcagtatgaacaccggccgatctaataccattggggtgattgtcggcgacattgaaaacccgcattttggcctcgcgctgcgcggaatggcggacgttgcacgacaggcgggatttcacttgctgctgagcaacagcgatgaaactctggacgaggagcgggaggccgtgcgcgtgatgctggataagcgcgtcgatggcatcatcgtcgcgccgtgcagctcactgtttgaggataacgaacatcttcgccaggtgctggcagaagggcgttcattaatgatgtttgaccgggcagttcaagggatggaggtggagaccgtccaggcgaactttgttacagtggctaaacaggccacggagctgttactggcggccgggcatcaacgtattgcttatatctccagcatgcgctgcgctacaccttattcgccggccatgacgttgggtccaacgccggtagcgcaacgtgtcagcggaatgattgacgcctaccgggccgcgggtagggagctggatccggcgctcattcggcttaatgcactcagcgaagccaccattgagcagatactgactgaactactggcgctcgccgagccaccgagcgcgctgatagcctcggacaacctgattgcgataggcatcctgcgtggtctgaccaaacgtggcctgcgcgtacccgaagatatctcttttctgatgtacgatgattttccctggaccgagctgatgtcgccgccgctaaccgtggtcgcccagccggtatatgaaatgggacgcgaagccgcgcgccgattgatttgccaaatccgcaagcaatccgcaggcgccttacctgcgtttgacagctggatgatagtgcgcggctcggtaggggaaaatttatctgctgggtga

SEQ ID NO: 160403 - DNA, 585 bp, Enterobacter cloacae
atgttcaaatcgatcatgaccgtatcattgctggccgccgctattgcttctaccagcgcagtggccgcagacaattcggcgggtggtatcattaactttaccggcgcaattaccgatacaacctgtaccattaacggcggtaaaagcgcggactttaccgttgcgctttcccctatttcggtaaatgatgcgggcaacacggttggcctgatcactaaaaataaaaaatctattgcgctgacgttctctggttgttcaccagcagccgaaaaggccggtaccccgctgcaagtgtatttctccagcgcggataatatctccactgacggtaaatacctggtgaataacagcgtgaacgaaaacgatgccagcgtggcacgtaatgtcggctttgcgttagtggagccaggttcgtctacgcctattaccctgaaccagccttacctgacaaatattatgggtacagcgaccgcgccagattccgaaacgctgacgctggacgtttattactataaaaccaatgccgctgatgcaacggtcggtgcgttgagctccaacgtaacgtataccatttcctacctgtaa

SEQ ID NO: 160404 - DNA, 159 bp, Enterobacter cloacae
atgacagtcacccacaacggcaagcagtacatcgccaaaaagctcaacgataacgagtggcagctgacgtcggtattggctccgcgcgacaagctgactctgaaccgctggcagatgcacgttgctggcctcctggaacaggttgaggtgaaggtatga

SEQ ID NO: 160405 - DNA, 189 bp, Enterobacter cloacae
atggttaaatacatcctaattacttccatgttaagcgttagcggtcaaccagatgttaatgcttcaaaatttctaattttagattcagaccagcaatgcatagccaagatgggagaaattcagcgcccagctcatgaagaagggaggaaagtatatacctggtgcgtccctgccattgaagaaaaataa

SEQ ID NO: 160406 - DNA, 306 bp, Enterobacter cloacae
atgagcacaaatgtctggacgtggggtgggactttttttggctacatagcaaacgggaagctctatacgcatagagggaagcacgtagggaaaatcgttggtgaagaaatttttgacagaaagggcaattatcttggagaaatgcgaaacggtaagagactcataactaacaaatcaaaaactaataaacgctcctcctccttctccccagtggatgctggatcttgcgcgaaatacgtaaattatgtcggttatgtgatgtatgtaggctataaggatttcccctcacctgaagaattttcttaa

SEQ ID NO: 160407 - DNA, 138 bp, Enterobacter cloacae
gtgaaaaaatcagaggcgttgaaatacgcaatgataattggctttggattagccgctggcattcacctttacgtagcctgggcctccctgcttgagctttcctggggcgcggtgaaaggggtgtttaaccatggctaa

SEQ ID NO: 160408 - DNA, 570 bp, Enterobacter cloacae
gtgagagacagaacgcgcagctataccaccgacctgccccgcatagggttgccattccttacgcacatgcgtagcaggctggcggacgccgaaccggcgacgcagatttatacccagaccgaaagcggaacgttatataccttccggcaagccgacagctacgccatgacaatcaacggcgtgacgcgggtgattcgcactacaaccacgcaggccgggtatggcgtgcgggagtggtatgtttgtccccattgcgtgaaacgggtagcgaagctgtatatcggcccaaaggatattgcctgccgggaatgctggaggctccactacaaaagccaaagcggggataagttagatcggatgcgcatgagtatacgccgccagcggtacgccatttggggagacggtgagcagtttcgtaacctgtttaatcacccgaacacctttcctaagccaaaaggtatgcggtgggttacgttcgagcgaaaactagcctggctcatactgtacgaggctgcatactggcgggcattcagtccggttgtagataagatcaccgggcgtatgcggtag

SEQ ID NO: 160409 - DNA, 933 bp, Enterobacter cloacae
atggctattggagataaagcccgtgtaatccgaaaactgacccaagtagggtactaccgtctttcgggtttttggtacatatccaggattatacgaaccagcgataaaggtctttcatacagaacagatgattttctaccaggtacatcgtttgagcaggcgtatgatttgtatctctacgataagaaaatacgaatgctgatgatgaatgcgcttgagcggctagagattcatatccgttcagttatcgctcatgaagtaggtcgtcatgatcctttggcttatcgtaaaaaagagttcattaaccagcgttttttgtcaggtaccgtgagtcgttttgatgattggcttacagcccaggacaagaaaatagcaaacagccgtgatgaatgtatccaatggcatagaaatgaaaacaaggaaattccattctgggttgctgtggaaacatgggactttggacagatgtctcgctactacgcgatgttaaatggtgggatgcaaggaaaagttattcgacgcttcgggattgataacaaagttactttcgctaaatggctaacctgcctgaatctcatacgcaatcgatgcgctcaccattcacgtatttggaacagaacacatcctccggtccctattccagacaatcatttttttagcccactggggctaaatgccaacgcaaatgaacgactttacagtgcgatttgtatcatttggtacttagtaaaaatgattggacctagttcaacttggatacgacaagtagctgatttgattgatagcaaacctagtcttccgggctgctcatttgaagccatgggattaccaaggacgggttttcctcgacagcgttttggtgtcgatttgggctttgttgtcgctgataatgaacctattgagcctgagccaaccgaggaggctgatggctag

SEQ ID NO: 160410 - DNA, 342 bp, Enterobacter cloacae
atgactatacaagattgcttcgatgccgctagggcgcagtttatacaagaaaatcaggcactgattttagaaattgagcacgaatctacgctgcacgccaaaaacctaggcttgaccgaaagtgagttcatagactccgaactgtcccgccatttcgtatcttcccttcatcaattcagtaaggagcaggataccgcagtaacagtaataaaaatgtttgctcaaaacgaaaccgtcaaaaaagagcttctcatcgaacacttttcaaaagtcgcaagcaacataggggtaacgttggaagaatttcttgacttaaatcgtatggatgtaaacagcctttag

SEQ ID NO: 160411 - DNA, 204 bp, Enterobacter cloacae
atggctaccaagtccgttaatgcaaaatcagctactaaaaaaatccgctttccgcatgacctgattgaagagattgacgccagcgtagagcgagagaaagcagataactccggcgctaatttctctgcctgggttctggatgcctgcggccgcaaactcaaatctgagcagcgcaagaaagccagatcggaatctgaaagctga

SEQ ID NO: 160412 - DNA, 600 bp, Enterobacter cloacae
atgaaactaattaactcattcgccctgtcatgtttcttcttttcaattagcgccctcgccgcacaagagctggtaattaacaattcagccctacacattatctttgctgacggcacagaggctaatgtatcctcatgcagtgactttatctctctaaatcaagcaggtatgaagattaaggagctaccggatctgtcagaccctgattaccagcaggcgcatatggagctcagcaaatgcctaatgcattcttgggctatccagaacggatatacccaaaaaaccagttcggcaatcacacttgatgaggtagtgaagcacttccctgcgacagcagacctgagcccagcctctggttataaaactatgctgcaaacaataccggacttaaaaccgaaggatgaccgctttgtgtcacataccaaagaggaagggtatgtgattaatgatgcttggacatttaagaactcatccggccaagaggcagatttcgtgatgttggtgggctatgcaaccggaggtacaatggctgttgcccgtctctggcgaatagattcaaaaaccaccaccccctggggtgttaccgaaataaagccataa

SEQ ID NO: 160413 - DNA, 783 bp, Enterobacter cloacae
atgagtacagagttaaatagcggtactgtcggtggttttggtcacatgggaccaaatgacccctacaatgatggtcatagcggctctggaagttcgggaggtagttttaacggtggtggtaatggtggccatgataatagtagtggttcatcttatactgcatcctttggtctcatcactggccgacacccgataactgtcccaggtacgaagaatattaattctgtcgatctttctgctgtcattaataacattatacatcatgaaggtgcacgcaataacatgtacctagatactgcgaacaatgtaacagtggggattggtcgcatgctcccgaattcgcaagcaggctataatctgggatttactaagacacaccatattccgcgtggtcatggagattcagaagatgtagaaataagcgcaagccatggtgatatagatagcgcgtttaacgcaaccaaagagaaaagggcatccaatgtccatctctcagatcagtcaatggttgcggattgcgtgaatcaactggacaaggatcgtaccaccctgcgcaacatgtatactgacttcgaccacttcccgcaaccagccaagactgcattgcatgatatgctgtataatttgggagaagggaaattgcactctgaattccctaatttcaatgcggcagtaaatcgtaaagactggaccagagctgcgactgaaagccatcgcactggcatcggtgattcccgtaacaaagacacacacgaccagtttattgctgcaggtaataaataa

SEQ ID NO: 160414 - DNA, 441 bp, Enterobacter cloacae; identical to SEQ ID NO: 22297

SEQ ID NO: 160415 - DNA, 432 bp, Enterobacter cloacae
atgaatatccctactcatctgaaacacaaaccgattatcgctgtagaaaactatgatcgaattgacggcccttacgctgatgacacagatgccatggggctttccgttggaattgctcaatggaacacccccggatatacagagctatcagcaaaagtctggcgcaacaccggagaaaagtggtcacggcaatctgaagagttgcctcttcaccgtgtcatagacctcgcaacgcttatctgcatagctatggattacagtaagcatggtcgcttatcttccagcgacgacttcccggtcagtcgttcaggaggtaatcctgagttatctcgacacattgatttgatgaaaaacgaactaaaagagaatcacgagtatttagatgagagtcttaagcgtttagcagcagaactaaaacgtttaggttattaa

SEQ ID NO: 160416 - DNA, 480 bp, Enterobacter cloacae
atgagaaaaaagttatcactttgtgttccgttgttttttcttgctggctgcgcccaacaaaaacaacaaatgccagatgctaattacgaaaagttcgcaaaggtcgaggtggcctctgatgcctgcttaaaagccaacttcattacagcacaggaagcaggtcaggcgcattccaacatatccttgttcttaagttcatgggcgtatgactacgttcgttactcaaatatcttggcgcaaggacacgaagaattaaaaaaaataaagataacacaggaaggctgcaaccttttgcgcgcaaaaatctatcaagacaccatcgaggcacagagatatcaaaaacagatggagatggcagcacaacaaaaggccatagcagatcagcaggcgttacaatcaattcaaaatatgcaaaacaccttacctaaaacaacttactgtaaccagattggtacacagacaatctgtaacagctactga

SEQ ID NO: 160417 - DNA, 1041 bp, Enterobacter cloacae
atgattgattggatcactgctattgttccttgtttccatgaaacccctttagattctgggcgaatcactaaaatcaactcatccggtgagattgaatgggagtctcttaccgctatttctgttgttggtagccatgattcatcattaagacttaaaacccattctattaatgactttggtaacgggactcatatttattttgatgggaatccagttaaattccttcaaggccataacctttttggaacggataatttaattccattgctttgctgcgtattgaagaaaataacctctattcctgagcttggacttaatccaactgattttgatgttcgttcttgggaaaagggggatttcaagttaaaccgcgttgactgtactgttatgtttgatgttggcaatactgctaacgcactgtcttggattcgtcaggccgagatgaatgccactctttctcatcgtgggcgtggtcaggttactaaaggatctacgttatactttggtaagtcgtcgcgccgtagctcagtgaaattctatgctaagggtgaggaattccaaaagcactctcacgcagctttcttacagcttcctgcgctcgttgactacgctaatcgtggtttgcgttgtgaggttgttttacgttcgcttgagcttaatcatcgcggtctttcttccggttcggcatgggatgacttgcttcctctgcaaatagtaaatgattttataggacgtattaacatggctgacattactgctatcacttctgataggcttgatggtttaaccccttcatttaagaacgtctacgagctttggaagtgtggttatgatattaggtctatgcactctaaaactgctttttatcgttatcgtaaaggtcttatggatgccttgggtattgatattgccactgtccaatacaagcagcctgataatgtcgttcccttcatacgcatcatagaggctaagcctatgggtgtacctgattgggctattggcactgatttatattttgatggggctgttaatcatggctaa

SEQ ID NO: 160418 - DNA, 276 bp, Enterobacter cloacae
atggcatctaagcgcccgcgcaccacgcttcttcttactgatgagttgatgactgcaattcgttctctttctgatgtatctggcatgaccatgtcgtcgattgttgttcaatttttagagccatcaatccctgttatgaagcagctagaggagattgtcttggaggctaagaaaggtgctgctggtaatggtagggctattgttggttctattcttgagggtgccaataaaactcttgccgagcttaacagggaatttggagagttagatgattga

SEQ ID NO: 160419 - DNA, 294 bp, Enterobacter cloacae
atgactactgaaatcaccctggctgaagcaaagctgcattgtcgtgttgatggcaccgaggaggatgcgctgattcaggcgtacatcgatgcggcgctggaggtctgccagaagcatatcggcaagcggtttgataacgggctggagtttaccccggctatcaagattggttgcctgatgtacgtctctcagctgtacgagtaccgcacgatgattgccgatgctgaggcgaaagaggtgccgctggctatctctgcgctgtggtctgtctatcgtgatgtgggggtgtactga

SEQ ID NO: 160420 - DNA, 339 bp, Enterobacter cloacae
atgagagccgggggactgagaaaccgggtaactatcagggtattcactactcacagagatccatctggtcaggttattcagacctgggaagacggggaaactatctgggctgaggttaaggggatcagcggtcgtgaactggtagcggctggtgctgaggttgccgaagcaacgatccgcgtctgggtgcgtttccgtcgcgatattactgctgccaaccgtctgaaggtgctgactggcccgtttgccggggcaacgctcaacattatcgggccgcccataccggactcaggtatgacgcgccttgagattctatgcaaacaggggaccgagaaatga

SEQ ID NO: 160421 - DNA, 468 bp, Enterobacter cloacae
atggattataagcagcttggcatgagcaatcaggatgccgaatggctggcatcccgccgcttcacaattgaagacattgcccgcatgttcaacgtgtcgcccatcttcctgcaggaatacagcaacagcacctacagcaatttcagcgaagcgagccgcgcctttctcaccatgacgatgcgcccgtggctggcgaacttcgaacagcaaatcaaatcagcgctgcttgtggcctctccggttccgggaacgcgctatcaggtggagtttgactctgctgaccttctccgcgccacgccaaccgaacgctacgccacttatgagcgcggcattaagaacgggattatgaacccgaacgaagcccgtgagcgtgaggggatgccgccgcgtgaaggtggtgacgagtttagccaggcatggaagcaggaagtgaaaatcagcaaggaaaacaaggaaggtgacgcatga

SEQ ID NO: 160422 - DNA, 531 bp, Enterobacter cloacae
atgatttcggggttagacaaacgatctcaaagacggatgagagagatcgatttagagcgcgctaaagaggcccaggaacggcgtgaagaccaaaagaacagtaagttcacccaagtatccccaaagggctgggaacgcattagagagctttctaaggacaaacagggtgtggctgcaatcgcgctgtactcgtttttagctgagcacatcgatccaacgtgtggggctgtcgttgctgaacaacagtttttggctgacaaactgaacgttagcaggagcacgatcaagcgttggttaaactaccttgagaccaaaaatgcggtagtaagaatcccagttgccggcaacgtctgcgcctatgcgctagacccccatgaggtttggaagggttacaactccagcaaaggctatgcagcattcgtaagcaaaacgttggttaacgttgacggtgatgtacagcgccgaatcgttgccatgttcaaagggcaggaaggcgacgctaaagaccaatgcgacctgcctttagagtga

SEQ ID NO: 160423 - DNA, 213 bp, Enterobacter cloacae
atgccggatgcggaggcaggtaaagcattcctcgcggtaggcgacttcaagcgcggctatttcatcgtggatcacaccactggcgtgcgtacccgccctgacaacatcaccgaaccgggtttctacaaggtgcataccgataaatacctgggcggcggcgtggtggactccaacgccatcaaggtgcttgagctttccggctccggttcctga

SEQ ID NO: 160424 - DNA, 561 bp, Enterobacter cloacae
atgaaaacaatcgattttgaaatccgtacctccgaagtgagcgccagcaacaaaaagctggtgggctatgccgtgcgctggaacagtctctctgaaattatctgggacgagttccgcgagcagtttgcgccgggagcgtttaaagacagcctggcatccggtagcgatgtgcgtgcgctgtacgagcataactatacccagctgctgggccgcaccaaatccggcacgctggtgctgtccgaagacgataccgggctgcgcttcgagctgaccccgccgaatacccagcttggcaacgatgtgctggagctggtggagcgcggggatatctccggcatgagctttggtttccgggcgctgaaagaggcgtgggatatcggccagtctccatacctgcgcaccgtgaccgctgccgaactgcgggagattaccgttacctctatgcctgcttaccctgagtctggcgtggaaatcgctcaccgttcgcttttctcccaacatcctgaactgcgccgcgctggcgataaccgtcgccgctgggctgaattagtggggctctga

SEQ ID NO: 160425 - DNA, 324 bp, Enterobacter cloacae
atgctcaccatgtgggtgacggaggacgagcaccgccggctgcttgagcgctgtgacggcaggcagctggcggcgtggatgcggcagacctgcctggacgaaaagccggcacgttccggaaagctcccctcaatctcgccggcgctgctgcgccagcttgccggcatgggcaataacctgaaccagatagcccgccgtgttaacgccagcggcggcaccggccatgacagggtacagattgtggcggcgctgatggccatcgatgccggccttgagcggctgcggcacgccgttcttgagaaaggaacggacgatgatcgttaa

SEQ ID NO: 160426 - DNA, 324 bp, Enterobacter cloacae
atgctcaccatgtgggtgacggaggacgagcaccggcggctgcttgagcgctgcgacggcaggcagctggcagcgtggatgcggcagacctgcctggacgaaaagcctgcgcgtaccggaaagcttccctcgatctcgccggcgctgctgcgccagcttgccggcatgggcaacaacctgaaccagatagcccgccgcgttaacgccggcggtggcactggccatgacagggtgcagattgtggcggcgctgatgaccatcgatgccggacttgagcggctgcggcacgccgttcttgagaaaggaacggacgatgatcgttaa

SEQ ID NO: 160427 - DNA, 543 bp, Enterobacter cloacae
atgacaataaaaaaagaaattttcatctctgttgatatagaagcctccggcccggtacctggaaaatacagtttgctcagtattggagcatgtctgatatctgatacgaatgtgaacttctcatgcgaactcaaaccaacaacatccgaatttattcctgctgcacttgaaataaccggacttaccttggaagaattggaggacaggggccttccacctcaggaggcaatgctggcttttaaacagtggatagaccaggtaacgtcggcagatgatatacctatctttgttggcctaaatgctccctttgactggtcgtttattaactattattttcacatttaccttggcgacaatccatttggttttagcgcacttgatattaaagcattgtttatgggccgattggcaacgtcatggtccgaaagcaaatcgtctaatatgacgaaagtactcgatgtaccgatgactgctaatcataatgccctaaaggatgcaatatttcaggccaatttgtttagtgcggttataaaatttaaataa

SEQ ID NO: 160428 - DNA, 753 bp, Enterobacter cloacae
atgaatattaaaagtatcaatccattcggtgttccacatgacatatggaaaacacgcgaacctactaatgaagaaagtttggaaatgataaagcaaggtatatggaaaccttgtgtgagtatcaacgtacagattgataaaactatttgccatccaatcgatgcggcagagtttctagctgtaaaccaacatgaatcaaggcttgataggtttgttgcaaaatttcttgatacaagtgatgagtactcgaaatggttaagcctaatgccatcctttgtgcctattgaattgctagattatcaagattcatacccgccaaatgactttaatattattgatcaagcagtcaaaacatatgggatattactcccagatggacaattcttatttcacggcgggctatggccgagtgataagcatggtaatccttcctccacgtttgtaactgatagagtcctgtctacatcattttgcccaaaggttgctctaaataatggagaatggaggggaaaagcatgggatgctaacaggctggatctcattgttataaaaacgaatgcaactaaaacaaaggcatttgtctatgataaagaattagccgggcatggtcatgagttggaggttttgttcgcaaaaggggctacgttaaaatttatttctgaaagtcaagcattaaaaaccagagtagctcacaaatatcaatgcgcccctaaaaatatcaacacatatgttatatatgcagaactttgctga

SEQ ID NO: 160429 - DNA, 411 bp, Enterobacter cloacae
atgaaaacgattgaagaactacgaaacgagcttctaaaaattggtgagcaacttgggggaggcacaagaccaaatcattacttctttattcctgaccaacctgatggggttgcaacaccctatctggaaattcatgggaaagaatatcattttatcatcagtgaaaggggtcttgaaatacagcgaaaagtaacgctcagtgacgatgaaattctttattggtttgtggagagtgccgtggcggggctggcctcaacctatgcagcaaaacattcatctgaacgggaatacagagaggtttatttcagaaaggaatacagcttaatgctctcaatcaagcccgaatgggcaacaagaaagcgcaaagaaatcactgaacttctccattcgcaaagaagcgaacatcgttaa

SEQ ID NO: 160430 - DNA, 606 bp, Enterobacter cloacae
atggaaaaatcattggtcaatataaatgatctttcattggaaatgccgaaaggtaaaattttatctagcaccatcaaatggaagaatattgaatggacttttgactgttctgaatcggattttagaggccatgctggaacagcagtagaatatccgcattatcatttccaaatgagaattgatggtatgcagtttataaactttaatacgttccacttgcctttcagtaatgaagatctatttgcactaactatgggacgtaaccatcctgataaatttactcataacttcggtcaattcggaatgggtatggaagctgctatggcgtttgtggaagacgatcctaaatgggctttagaaaatatgagccgttcagatgacgaggcagactcaacctatcacatatctacattagctattgctggagagggagaaaagatatcaggagatctaattgctgatttgatcgaagagtcacgtgtaacaggagttccattaagtaaattaatgcaggagcgtttgccggaaaaaacgaacgttcgcaccttgatatctcccagtgaggcagtaccggagattgcgaaaagaacagagcataaaaaatga

SEQ ID NO: 160431 - DNA, 168 bp, Enterobacter cloacae
atggtcgggtacaggcagcttgcccttctcaatcatgcctttaactgctgcgggtgttttaccaataagacgggcaaattcctgatatggaaccgcatctgttctgcttacaagctggttagtcatctgctacgattctcctttagtgtgattaattgctctaaatag

SEQ ID NO: 160432 - DNA, 1668 bp, Enterobacter cloacae
atgacgatccgcatggcattttccgctatttcacgactgattaaagacgagtggtgggtcaaccagctcaaggcgcagaggatgcgctggcgcgaggcgctgctcatcgcagcaggtgaggtcaacaaagaccgttcaccttacgcaagcaaaatagtgatccgcgatgttcacgcgcgccgcttggctaatctcgaatacctgaaatcctgcgaactggaaaacaaaatcactggcgaacgtattgacctcataagcaaggtcatggggagtatttcgaaccctgaaatacgtcgtatggagctgatgaatactatcgccgggattgaacgctacgcgaccagcgttggtgacgtggggatgtttatcacgctgaccacgccatcgaagtatcacccgacccgtcaggttggcaaaggtgaaagcaaaacggtgcagcttaatcacggctggaacgaaacagcattcacacccaaagacggccagcgctatctatgccgaatctggagcctgatgcgtacagctttcaaagataacgatttagatgtttatgggatgcgcgttgtcgaaccgcaccacgacggcacgccacactggcacatgatgcttttttgcaaacccggtcagcgtaaagccattaacgaaattatgcgtcgttatgccctcaaagaggacggacacgaaaagggcgcgtcaaaacagcgctttgagtcacgccaccttaatcagggcggagcggcgggttatatcgctaaatacattgcaaaaaatatcgacggttacgcgctcgacggccagctcgatcacgacaccggcaagcctctgaaagatacggccgaagccgtcaccgcatgggcgtcaacatggcgtatccctcagtttaaaccgattggtctcccgacgatgggcgcttaccgtgaactgcgcaaactgccgcgtggggtgagtattgcctgcgagtttgacgacagggtcgaggccgcgcgagctgctgcagatgagggggactttgagcggtacatcatcgcgcagggtggggcaaacatgccgcgtgatgctcaggcggtcagggtcgcacgtaaggtgacggatgaggtcaacgaatacgaggaagatatcgagagggttgtcgggatttatgcccctcatctcggggctaatcgtgtccatgtaacccgtacagccgaatggcgcatcgttccaaaggttttggccgttgagcctttgaccttaaaaagcggctctgccgcgcctcggagtcctgtcaataactgtggaaagctcaccggctgtggcgatccagttatgacaccgacaccgtctgagcaagccgcagcggtgttaaatctgattgagcgcggggttatcggctggaatgagccggacgtcgtgaaggtgcttaacggggcgttaaaagctggcgcaccgcgcaaacatcggcagcaaagaagcaatgcgccgctcaaaaccagcgagcaagcgccatcagccaggatgacaaagcccgaaagggatcgcatcgcaaaaattcgtttcgacttagctcaggaaggcattaccccggaacggtggcagctagacgcgctggcgcgtggggcaacggtgatttatggcggtaagaaattcaaatattcggttgctgatgactggtctggatttgaaacataa

SEQ ID NO: 160433 - DNA, 156 bp, Enterobacter cloacae
atgcataatgataaagtaaccaacgaacagcaggcgcagagcaagtcaaaccgtaaaaagtgggctggttatgcgtgggaagctttcaaatggggtgttcgactgtttgatgttatcacacgcgtagtagactacttggaggggggtgatttgtaa

SEQ ID NO: 160434 - DNA, 309 bp, Enterobacter cloacae
atgttacataaagcccttcgtttgataaggcaataccataaagaatccttagttgagttatctgcatctttaggtattccaaaagacaaaatagtcgacattgaaagtggggcgtggtcgccgtcgattgatgttttacagcgatatgcatcccatttcgacatgcccatatcctctctagtattcttttcagaatcgttaggcacgcaaggccgtctgtctaagcggttgcgtttgaatttggctgaaaaagttcttgatatcctagattgggtaaataatagaaatgcaaaaaccgaaaaagcttaa

SEQ ID NO: 160435 - DNA, 897 bp, Enterobacter cloacae
atggattcgccattttacaaactcaaaagcaaacggaaacttgcggagctactttgtgttagtctcagtgatttgtcggccctgaaaaaagatgaaggcaattattgtatttttgagcaattatccaaaaaaggtaagttgcgtaaaatacaaaaacctttagataagttagatatagttcatacacgaattgcaagcttattatcgcgcattgctctgcctagctatttacattcgggtaagaaaggttgctctaatgtgacgaatgcaaaagcgcatctgaataatgataagatgatgacgacggatattaaatcctttttcccatcaacaacaagggtgatggtattttcctttttctactcggtgatgaagacttcatctgacgtcgcagattttctatctcatatatgcacttgccatggccagttgccaactggaagtcgaatcagcatgcccttggcatattttgcaaactccagaatgtttgatgaaatttatcagctttgccagaaattaacggtcaaaatgactgtgtatgtggatgaccttactttctctggtgctaacgtaaatagattgttttgtgcagtgattggcaagattattaataagcacggtcatgcagtacatccaactaaaaccaaaatgtacggtaaggaaaaaccaaagttggtaacgggagtgattgtgctaggcgattctttaaaagttaggaatgaacagcatcgattgatggctagagatattgaatgttggaaaatgattaaagatatggaaaaagcgaaagaaacttcgtttgcaaaaacactatttggtcgtctgcattcaatgggtgtcattgaccagcgctacaaatcgaaagtcctgactttaaaagttaacactgcaaattag

SEQ ID NO: 160436 - DNA, 432 bp, Enterobacter cloacae
atgctagaaaagatacgttttacaggatttgatattgaaggttcatccttgtatatcaatgaaaatgacaactctgaaggtggtaaatacaatttaaaattttcagatcagaaagttacaccacaacttgacgatgacggcaactttctctttatagaagtaacccctacaatgcaagggtattcacgagaaagacctgaggcagaagttgatgaagatgaagatgtaattttccaagctcaagtaaaacttacgttaacgtttgagtgcttccttgacgaagagttaacccaagatatatacaatgaaaactcatggttttttgaaaattacgtatatatctgtactaagcaagctatcgagaagatgctgaaagacacagttttagagacaatatctcttccctggtctccagtctatccaagaagctag

SEQ ID NO: 160437 - DNA, 462 bp, Enterobacter cloacae
atgaataacctgatgaagtacaaaggttactatggaagttcaaacatctcgtttgaagatggggtcatttacggaaagatcgaatgcataactgaccttatcacttacgaaggaactactgtagatgaactgcgctcagccttcgaagaagctgttgacgattatcttgaaacttgtgaagagctcggtaaagcgccaaacaaaacgatgagtggcacgtttaatgtcaggatcggtgaagagttgcataaaaaagcatatttagctgctgttgcaagaaatatgtctttaaatgactttgtgaagcaatctatagcagacgccgttaatgatagaaaagaaattcactatcactttgataaacctagcgaatttagcgagactgtctctttctcttactcaaggaagcgtacaagcgtgacatcttcttgggagatcgccaaacatggagctcggcattaa

SEQ ID NO: 160438 - DNA, 219 bp, Enterobacter cloacae
atgcggagaaacctcgaaaccagtgaggatgcgttgaaaggtgcttgcttcgcacggctgatgaacccgaatatctccagaagttacgccatggattacggtttcggcaccaaaaatctcagctcgtcgataaaaaacataactgggatgtcttataaatgggtggtcacctacatccagaacacaggaggggtcagtctcaaaagcatcagtaattga

SEQ ID NO: 160439 - DNA, 630 bp, Enterobacter cloacae
atgtcaatttcactcgataaagaaccgctcagaaccgtccggctttatggcgtgctgggcgccaccttcgggcgtgaatatcgtttatcagtagcttcaccaaaagaggccatccgtgccctgagtgttatcgtgccgggttttgagcgtttcctgaataccagtaagctacgaggtttaacttatgcggtattcagcgggaaacgaaacctcttaaacgatgagctcagtatggacaggagcacagaggaaatccgcatcgcgccggtgatcatcggcagtaagcgagccggggtgtttcagacaatcctcggggttgcccttgtcgctgttgctgcgttcgttacgggaggggccgcgatcgggattggtggtaccgcattcgctggtggatggggcgctgtggcggggattggggcatcaatggcgatcggcggcgtagtccagatgctttctccacagacaaccgggctcgccagtaagcaatctgctgataaccaagccagctacgcctttggtggagtaacaaacacgacagcccaggggaatccggtaccacttctttatggccgccggcgaatcggcggcgcgattatttctgccgggatttatgtcgaagatcagcaataa

SEQ ID NO: 160440 - DNA, 1359 bp, Enterobacter cloacae
atgaataattacataaagaaatattgggttgtatgtacatatatagtattggtgtgcgcgttctctactaacatttttatgcttaatcaaggagatttttcaaggtctataaatccatttgctgatttatttaatattaatattcatgttagtgatgttgtctcgcaatttaaaatgagagatgagtttcttgggtttctatcattctcttatgttagttctcataacgttatagtatatgcgtatgctttgctatcctcattgttttcagattattttaatatttatgtgtacgcaattattattaagtgcgctacgctactaacactctatgcactcctttttgaattgactggagatgtgattagctataataaaaaacaactcctattcttagtgttatctattccatttatatcttcttcgaatttagctttcgcatcatctctatatcaagagcaactctttcttgtttttatttctgcgctaatgatagttttggtgaaaagtgaaaatctaaatttattggcgtgttttgttattgtaagtcttatttcaacactaaaaagtcagtttttttacctgccattaattatgattttattcttcattatctacaatagagacaatctcaggttgaagatttcactgatggttatggcgctagccattggtgttatgtcaattttattcactaatggaactactaatctaaattcatatcattctacatacttcggagcctatctctataacgatctttcaggtgaggaaacccctgatggggttgatggtgagtgtataggtattgatgcttggggtaataagttcgatatagagaatggtattgttggcacagacatcaaaagtaaatgtcttgttgaggcgaaaaagtcagtgtttgcagaagcaataaaaacatacataaaacatccgcttgattttatactgataccatttgcagacagcgtgaaaccttatcttggtgaaaattattttcatatgacttataggtataggcttattaccaatcaggataatgtctttggtgtaatcaccaaaataaaaaacagcatgtttaatggtgttagatttcctgttttacttatcgcattcattataagtttggtttacaggggaagtaagttatcaggtgctgtgtttatcatttctctttatggaatgagtcaattttatgtatcgttcttaggtgagggatacagagatcttaacaagcatttatatggaatgaattcctgttttgatgttcttatttacattctttttataaagctggttagttggttttattctattaaaaataggcgtaaacagtttgtgtctataaatgtggattga

SEQ ID NO: 160441 - DNA, 327 bp, Enterobacter cloacae
atgccgcttatcacgctagaagacatcaagagccagctacgccttgaagccgattacagtgaagaagatcaatatctcactttgatcggtgctgcggctgagtcacgaatgtccgaataccttaacaggaatctctatcctgaaggtgcaacgataccatccagcgatcccgacgggatggttatgccagcgtctgtccgtctggctcttctgtttctggttactcacttctatgagaaccgttcagcggtcagtgaggtcgaaatggttgaattaccgatggcctttacctggctcgcgcggccgcaccggatttacccgcaatga

SEQ ID NO: 160442 - DNA, 270 bp, Enterobacter cloacae
atgatcatccttttaaaacctcttaagtggtcgccagacggttgccgaatcgaaaccattgaagccggggaacatgacgaacttccggcacgtgcgattgagattgccgggcagatcggcattctagcggagcctgaaacaggtagcggtgaagtcaatccaccagtgccacctcccgaacctaatccagccccttcacaggatgcactccctgagccagaacctgagccgacggtggtgactaagccagagaagaccgcaaaaaaataa

SEQ ID NO: 160443 - DNA, 1215 bp, Enterobacter cloacae
atggcagtagaaatcaaagatgtagaacaggtcgcgcaggaacttcaggcgaagtttgacgactttaaagctaaaaacgataagcgtattggcgcgatcgaaagcgaaaagggggcgctggcaggacaggtcgaaacgctgaacggcaaactgtctgaactggaaagtcttaagtctgatctggaagcagaacttactgcattaaagcgacctggcggcggagcaaaaggcaagtccgttaccgaacacaaagctgcctttatggaatttgtccgtaagggcaacgaagatggcctgcgcgaactggagcaaaaagcattgcagacgggggtggatgccgatggcggttatgccgttcctgaagagctggatcgtagtctgctgaatctgctgcatgatgaagtcgtcatgcgccaggaggccacggttatctcgctgagcacaccagactatcgtaaggtggtaaataccggtggggctaaatcagcctgggtgagtgaaacacatgctcgcaccgcgacagatacgccgactctggcacagatcaaaccgttcatgggtgagatttatgctaaccctcaagcgacgcagaccatgcttgatgatgcgttcttcgatgtcgaatcgtggatcaacagcgagctggcgctagggttctctgaagcagaggaaattgcgtttaccactggtgatggtagcgataagccgaagggttttctggcctatgcgtcagctctgacagatgacaaaacccgtccgttcggcacgctgcagcatatcctttccggggcagccacgggactcactgctgacgcgattatcaagctgatttatacgctccgcaaagttcatcgcaatggtgccaagttcatgatgaacaacaacacgctgttcgccgcccgcatcctgaaagataaagaagacaactatttgtggcgcccgggactggagcttggtcagccatcaatgctggtgggttacggcatcgcggaaaacgagcagatgccagatattgcggctgatgctaaagctatcgccttcggtaactttaaacgtggttataccatcgttgatcgactgggcacgcgtgttctgcgcgatccgtacactaacaaacctttcgttggcttctataccaccaaacgtacaggcggcatgctgaccgattctcaggctatcaaaattatgcagatcggcgcgccagctaacccgtaa

SEQ ID NO: 160444 - DNA, 654 bp, Enterobacter cloacae
atgccaatgactaagcagcggctggacattccgctgaaactgaagtccgtcagcgacaacggagagtttgaaggttatggctctgtgtttggtgtgaaggacagttatgacgacgtggttgttccaggtgcattcagaaagtcgctggacgcctggcgcgagaagaagtcacttcctgcgatgctatggcagcaccagatggatgagccgatcggtgtttacaccgatatgaaagaggatgacgtcgggttgtatgtgaaggggcggcttcttattgacgacgatcccctcgcaaaacgcgcacatgcccatatgaaggccggttctttaaccggcctttctattggctacatgctgaaggactgggagtacgaccgaacaaaagaggtgtttctcctcaaagaaatcgacctctgggaagtcagtccggtgacgttcccgtcaaatgacgaagcgcgaatcagcgatgtcaaaagcgcgtttgcccgcggcgaaatgccctctcaaaaaagtattgaaagagtcctgcgtgacgttgggctctcacgtacccaggccaaagcattcatggccgggggatattgcacactgaatctgcgcgacgctgatgatgtggactctgctttgaatgcacttaaaaacatcacattttaa

SEQ ID NO: 160445 - DNA, 183 bp, Enterobacter cloacae
atgatcctgacaatactcactccattggtcggagtgctgggggctctgttgctctcatttggggcgtggatgatttatccccctgcaggctacattgccggaggtctactgtgtctgacctggtcatggctggtggcaaagtttatctccaacatgccagcgaacaaaacgggaggtgactga

SEQ ID NO: 160446 - DNA, 210 bp, Enterobacter cloacae
atggcaaaagttctggtgctctattattccatgtatggacacattgaaaccatggctcacgcggtagcagaaggtgcaaacagggttgacggcgttgaggttgtggtgaaacgcgtaccggaaaccatgcaggcggaagccttcgcgaaagccggggggaaaaacacaaaacgccccggtcgccaccccacaggagctggcggattatga

SEQ ID NO: 160447 - DNA, 261 bp, Enterobacter cloacae
gtgctggagccgcagggcgatgtcattacggtcctgaaagaggggatagtcctcacgctggtgaccttccggggagcccgggattcccgtctgcatgtgtcggtgtggggcatgccgtataccgaacgttactgtttccgcccggcggaaatccggcgtccggaaattcacggcagggggaaggattcaaaaaatcctccggcaatggcaccggaggatgtgtgtattagagactgcccgcatggcggggggaacgcttaa

SEQ ID NO: 160448 - DNA, 390 bp, Enterobacter cloacae
atggggatttactggcgaacggagatggatgacgtgcgcggtctggatatatacatttttgccgacagccagcttaactaccggtttgacgtgcgcctgccgtaccgcgagccatcgggcctgtttgacggcgcagtggaatcggtctgggatgtgcggacctggcacagggttgtcaccggtaccgtcgccacacgggattacaactaccggaccgccaccacgccgatggatgccgcggtctgcgtgcgtcatgatgcggtccccagcggggagcattaccgctacgccgcgtcttaccgtgacgcgggtgacgacgccagcccggagccggaaaccgaatcaagcgcgttttatgcccggcttcatcacgagcgggatctcaattaa

SEQ ID NO: 160449 - DNA, 147 bp, Enterobacter cloacae
atggatggcgagaaaaagaaaggcaccatagttgtgtctactgaagaaatattcgatggcaacaacaaagagcatatcggcaaatctaacgatttagaaattaagcttctggatcttggcctgttaccattgatgacagagctttaa

SEQ ID NO: 160450 - DNA, 723 bp, Enterobacter cloacae
atgaatattgaactatcgattaatcttgattatagaattgatgctgatgatattgaatttgatgatattgttggtcattttaattatttatcaagtgagtttggttctttactgtcaatccggccagattggtatgaaacagggtattccaggaaacaggcattagaacatgtggcttttaataaaaatggaattaccgaagatacatatcaaaaatggttaaaaagatatgtaaaagatgctccattatttgttgaaagtgtttgggatggaaaagatgatgattgtagcagtggcatcagttacaggaaaatgttttttgatgaaaaaaacagagttgttgtgaattctgaactcaatattccatcaaatgagttaacagtttctaagatttttgatttaattacaaatatagcgaatgaatttaagtgttctcacatttcattagaaactaatggctatacacttcatggtcgaaatgtatttcctgaccgccttagctctgggtggatgttatatattcctcatgtagtattacctgagttaattcccgaagcagctagggtcatcccagtcatggatggaaataaacaaaaaggaacaatcgttgtttcaaccgaaaaaatattcgacggaaacaacaaagaacacatcggcaaagctaacgatatcgaaataaaacttctggatcttggatttttgccactgataacagagctttaa

SEQ ID NO: 160451 - DNA, 765 bp, Enterobacter cloacae
atgattatgatcctaccaggggctggaatggggggcgcggctaccggaagcgttggtgtggccggtggctcaaccggaacagcaacctttcccggagcaggaagccgcgatggaggctgggaagatgaggatatgtcttatcctggttcaggaagtgcgcagtccacgaagcagggaggatttgaatatcagggaaaacagtacgatcccatactgaatgaaccgatggccgtcagcgcggagacacacggagatttctgggaagatgatatggattactccgaaacggtcagttacgaaggtgaagacgcgaaagcggggggacaggcgaaaacggatgataagacctgtgaaaactgtcctccggaagggaaggtaatgccaatggtgaggcgttgctcgtgctggagtatggtaacaatcagctatcaaacacgtatttgtggcacattttataatccagaaactaaacagatacaggaatttaaatattgtggtgtatcctttgatggctggaaggataagctctgtcagttctgggaggcgaaggcgcggtatgatcagtttttcagggctgatggcaaaaagaagaaatggtggaaaggtgatgatagcgctataaagcaggctagcagacaccaggcggttgcaaacattaatcaaccattgaaagttgtttggatatttatgcaaccaataagctatagatacttctctatagtattttattatatgaaagatatagttgttcgttgggagccataa

SEQ ID NO: 160452 - DNA, 504 bp, Enterobacter cloacae
atgaacagctccagcttcagtattgctgcgcaacatctgattcattcatcagacgtatcagtgtttgctctggtggatgggctgcaatatgagcggcatttcggtgaggggctgtcagttcaacaacctgccgccatgtccctgttcgatacctggccggattcccgcattgcatttgcggggccgtggatcatggagatgaacagcataatggatttcagagaaaagctttgcgaactcgaagccgcgctgccgtcagtttcctggatgatatcttcttcctcgcttactgaactggctgctcatttcaggaaaaatatgaatatcggactaccggatggtcggactgcgttgctgcgtttccaggacccgcgcgttcagaagcgtctggcaacgatgctgaacgacctgcaacaccaggagttgacaggtttgatgcgtgaatggctgacaagagtggatgggaaagtctggtcatttaagcaaagggaattcatatgctga

SEQ ID NO: 160453 - DNA, 507 bp, Enterobacter cloacae
atgtctgctccggaagggatggccctgaccagcggggagcacctgcagatgacggccacgaagaacgttgccattaatgcgggcggggatatcagtgccggtgtcatgggcaatatgacggcgctggcgggtgaaaaactcgggctgtttgcgcgggaggggcagctgagcctgaaggcgtcggaaggcccggtggatgtccaggcgcaaaacgccagcctgcgactctttgcggagcagaagctgacgctgagctcggcgagtgacatctccttcgccggaaagaaacgtatcacgctgatcgggggcgggagttacctgcgactggaggcggggagaattgagtacggcacgacggcggtgtatttacgcaaagtgaaaaggacgatggcggcaggggcggcttcaataccggttaaggcgagcacagggggcggtatttgcctcagttgtctgatgaaagcggcgatgaatggcgacacctttgttataagaggtgagtcatga

SEQ ID NO: 160454 - DNA, 705 bp, Enterobacter cloacae
atggatgtggcattggtttccagtatgattagtggtttggttgctatcgtagcggttgtcattcccgcctttaatcagaatcgaataaacaaaataaatcagatgcaagagtcaagtaaaaaacataagttttatcttgaaccattaataaaatcttcagcagatctacaaagtagaatatataatataaccgaaggtggatttcttggtggttattatcatggtggtaaccagagacaacgggactatgtcatactgcacacaacgtatttattttcacagttttttgcttggtcagaggcaacccgtcaggatgttcagtttcttaatcttgaaaatgatgaaagaacacgaaggttgtcagaattacaagatgtaatatattcacttattcagaccgaccacttgggtaagtattttgttattttttctggagagcagcgtgcaattggtgaacgtatgcttgttaaatcagtcaatggttatggttgtattggttatggtgagtttataaaaatggacttggttaatcatgaaccttttttaaatcagttgaaacaagaagtggttaatatggctgatgattttattcattatcaatccaaatttataaaattacagcatgcacttatagatctgattgattaccttgatccgaaatatatcagggttactgagaataagcgtagaaaaatactactataa

SEQ ID NO: 160455 - DNA, 669 bp, Enterobacter cloacae
atgaaactgctgctattcacaatgttggcgtttatattgatagcagtcaacaacacttctactgcatccagagctacgcctttcgtagtgcgttacgaccgctatctgctggtcagcacgtcgccgcaacagccgccactcgaacagctcaccaccctgtccgttccgcccggttttcacccgacggtaggggaagctttgcagtacctgctgcgcgacagcggctggtctttgtgcctcgccgatgcacgccgggcgcagctttatagacttccgttaccactgagccagtaccgtaccggcccgctgcgcctgaaggccgcactgcaactgctggcgggcccggcgtggcggatgaccaccgacgaaaaccgccgtgaagtctgtttcgccagcgaccattccctccccccgacggtggcttaccgtcatcccgtgtccctccgccctttggggccgttaacggccccgttttttctcgccgggaccatacagcggggtgatatccgcctggcggttgtcgtgccgccggaagccgtttacctccatcaggtggtgtggctacgtaagggagagcagtggcgcgactggcggctggagcggtttgatgagcgccgtgcagtgttccgtcacggcaaacgtcagttgacgctgaagatgccggagtaa

SEQ ID NO: 160456 - DNA, 633 bp, Enterobacter cloacae
atgagcgaacaacgggccccaccttcgcctccaccacaagggccgattggctggctattgtcactggccggacggattattgggctggttattggggcgctggtgttgcgggtggtgctggaactggcggggctctatttctggtggccgcaggaggggagcaggcatgttttacaggtgatgaggcaggagcgggcggaactggttattgcgttacaaccgcatccgctgaggaatgaaattgttatgctgctggagaacggggcaactcgcatacttatggtcaataagctcctgcgaaagccgttcaccgccctggcttacacgctggtgagttttatgcagcgcctgatatggctggccgccatgctccccctgctctgcctgtgtgttttaatcgggctgacagaaggtctggtgcggcgagatttacggcggtttggctccgggctggaatccgtttttctccatcgttatatcatcaggtccggcagttccgtcgccacaacgctgtgggtgttttatctggcgcagccgctgtttctacccgcaatgctggttttactaactgcaggcttatggtttgggataacggtatggatagcggcagggagttttaaacggtggttataa

SEQ ID NO: 160457 - DNA, 309 bp, Enterobacter cloacae
atgcgccatatttcaatattcctgttactggtttttcccatagtatcacaggcctttgcctccccggaatctacccagctcgccctcgcgctgaagcaactcgacggcataaaaacctcgctggaacgcgcccaaacccgcgccggcaccgatccacagtcacgctactttttcgactacttgcaggcgcagcaggacatctccgccgttgaacagggcatccgccgctaccttagcccggcaagggcgcagccgcgtgccgtccagcccctgagcgcaagctaccaacggaagcatcccgatgactga

SEQ ID NO: 160458 - DNA, 1644 bp, Enterobacter cloacae
atgtattttaggcgagaaacgaaaatttatgtaacacacataaacgtaaactctcattatgtattatttaccgtcaggaaatcacaattgtttacatttaaagtgacaaataaaaaaacaatttcaacgcaaagggaaatcaatacggtttatcttttctttctcaactggaatgatttttcatatcgtactttgtttaacatggaggttaccgattccgaagggaaaaatcataaaattggacaaattaaaataggattcaatggacaaactacagatataagtacttatgataaattaccaaaagaattcccctcccttgagagtaatttttttagtcttgcagaaagccctgaattttataaaaacctatattcgttaggcgaacaacattgccacacaatattaaaaaaattaaaaaatgttgttataagtaaaacatcattaaaaaaggcatctagtgaagatgtttttaaaacatctttattaagagatgtaaatataaatacagtcaaagggcaattcacgcgattaatcagaggagatgaactcctttctgaattcgactttgagtttattcgacaaaaccataaatattctgatatgaatatcagattcaaagttgatcctttttcataccctcctagcaatattcacactctaattggcagaaacggattaggaaaaaccactattctcaatgaaatggttagttctatcgtcaaaagagactgcctagaaagtgtttattttgaagatgatttcggcagaaaaataagctcagaatattttagcactgtcatatcaatttcattcagtgcttttgatccgtttaatcctattagtgaacaaaatgatcctcaactaggtacttgccattattacattggattaaagaaagcagaaagtgatagaaaaaaaccaatattagaagatattagtgtattacataatcagtgcatcgaatctattaaggtatgcttctcggatgaatctaggaaaaaactatggattgaatcaattattaaccttgaatcggataccaatttttccgacctacaattaaccttactcactgagttaaatggaaatgcactgaaaaaggcttgtagtgagcgactacaaagaatgagttcaggccatgcagttgtatttatgacaatcagtagattagttgaaaaagtacaagacaaaacacttgtattgttcgatgaacctgaaagtcatttgcatcctccattattatcggcattcattcgctcattgagcaacctgctttataaacgtaacggcgtagcaataattgccactcattcacctgtggttgttcaagaggttccaaagaattgttgctgggtattaacacgtttcggagatgaaatgcgatacgctagaccatctattgaaactttcgctgaaaatgtaggcacacttacaaaagaagtgtttagattggaactggaacagtctggattccataaattactaaaagaaaaagttgatgaaggattaagtttcaatgaaattatgactgaatttagaaaaaaaattggttttgaaggccaagctattctcagaagcatgatcatgttgcgtgataaaggacttagtaaaaaaatgtcggatggtaaaagcaatgaataa

SEQ ID NO: 160459 - DNA, 858 bp, Enterobacter cloacae
atgaataaaataaactttccagatattaattgtgatggttttttctcaacatgtttattgtcggttagtcggagaaagcagggatacaaagaaaagcttactaatatttctaatttagttgaggaagaatggtcagtttttgatagatatataaaccccaaaaatctctatcggttatctccatgtagaataagagagccagatcaaataataatagaaaacgttacaaaaaaagaattaatggatctttattctacctacatgtgtaaacaaaaaagccagtccagaaaaatatacgatcttttgcgggcctcttcaaaaaatggaatatgcccactatgtggaattaatggtgtagccactttagaccattatcttcctaaatctcgatatccattacattcagtaaatcctagaaatcttataccagcttgcgaaagttgtaatacagggaaaggttctggaatatttctttctgaatctgaacagacattgtacccttacgatgacacgaataaattctattcaacagattggataactgcaacaataatcaaagatgaaatattaactttcgaatttttcgctaccccacctgatgagtggtctcaaaatgagcgtgagcgagttataaatcattttgaaggatataatctcagccaaaaatactctataaactcagcccaatttataactacagtcataacaatgatccgaacattactgattgcaggggatcatactaatgttcatgagcactttaataacttagcaagtaacgtcccggctaattccacactacgagctatgtacagggcggtcgcctctgacccagttatctgcagaggtgatttttaa

SEQ ID NO: 160460 - DNA, 711 bp, Enterobacter cloacae
atgaaaaggattgataatctaacagagcagtttgaagaattaaaaactgctatgctagcgtccttcggtgatacaattaataaagaggctgcaaagggtgtgattaaatacagaaggctttacgatgttttaatttccttgggtatgagcactagcagtttcatcaataataaattgaattggcttgaaaccttggaatcattagggatagataaaatattaccattagaaacacttcctgaacatgttagggaaagattgtatggggattctggacgtcgtttttctagttccaggacattgataataaagaaagataaaaaagtttacgaatgtcgcttccctgtgtcagtgtttcacaattgcgaaatggagttggagcaatttatacatctccaggatgacgttaagaaaacaattgcagagtcaataagagaatttgcaaggccggagtatttagctttgaaggaattagtcataaattcagatgagctattcagttctccagtgcaaaaaatgcttgatatagaaaatgatgataataggatttggttcagtagtgaatcaaaacatagcgcggaaggtaacttcagtcgggtttggaatggtgaaagattgtttggttctgcttctcaagatatatctctgaatgatgatatacaattgcatcaagagcaaggtgagcatactaagagtaatggtgctaactaa

SEQ ID NO: 160461 - DNA, 222 bp, Enterobacter cloacae
atgggggaatgcttatcacaaatgcacgtctcttccatatttattcagtactccctgcctcttgccatagtttttatagacgattttcatgccgctaacttttgtaaggaattttggtattatattaataaaccaactcgtcagaaagggaaagtgcagattacccaaccaacaagtgagttatttacccttctcattcacctcattctagactttagttag

SEQ ID NO: 160462 - DNA, 627 bp, Enterobacter cloacae
atggaatcattaagtactgaactattcaatattcttaaatttttgttacctgggtttttaagtgcatggattttccatgcatttacttcatatcccaagccgtctcagtttgagcgtattgtccaggcgcttatttttactatttttgttcaggcgttgacatatgcaattaagagcagtcttttgtggattggtagggagtactgctcatggggaccttggaccgcaaatgtcgctctagcttgggcgtacatagccgcgataatgatcgggttagtattcagcgtcgctgcgaatactgataagttccatgcatttcttcggttgtgtaggataaccaaacaaacatcttaccactgcgaatggtttggagcgttccatgcaagagagaaccaatgggtagtattacacctaaatgatgacaagagggttatggggtggccacatgaatggccttccgatccttccaaaggtcattttgttttaatgtttccttcttggctgaatggaaaggaagaaatccaattaccccaagtagaaattatcatattgaaagtaacagatatcagatgggtagaatttcttaacaaccctgaggagaataattgtgagcagaaaagcacctaa

SEQ ID NO: 160463 - DNA, 189 bp, Enterobacter cloacae; identical to SEQ ID NO: 153280

SEQ ID NO: 160464 - DNA, 291 bp, Enterobacter cloacae; identical to SEQ ID NO: 153278

SEQ ID NO: 160465 - DNA, 300 bp, Enterobacter cloacae
atggctatttctgcgtatgtgggcattcccggaagcggtaaatcttacgaagtggtggcaagcgtcattattcccgcctgtatcgctgggcgtcgcattgtcagtaatatttacggccttgccacgcaaagtatttatgattactgcgttgatattaaaaaggcagacagggaatcacttggtgaaattttacttgttcagaatgaagacgttcagaacgataatttctttccctacaaaacggattcaggcattgcggatgatacgttctgccgtccggggggatttaatctgtattga

SEQ ID NO: 160466 - DNA, 1563 bp, Enterobacter cloacae
atgcgcctgggcggtcattcagggtctggaaggttaggtattactatattgtccttactggtttcatccggtgtacatgctgatgcagtaacagcagacggatttggacgtgtaattcagcaaatggttgaaacccgtgaagctcaggttgtttctcaatctgcggggcgtgtattcgcaacgggtgccagttctcttggtatgggcgcgggtatcgccgtcgctgcggaggttatacgcgaacgtcctgacgtttttgattcaatccgcatgtgtggcgagaaagtgggtaatcctcagctttgcaccggaacgtcagtcttcgcggctgcttatggccttgcgaagcatacaattgacgattcgatatctacgggtatttcaagttttggcagtaatatgatggctgccggacagacaacatggggattgctggggcaggctgcgggtgttatttccgttgctgaccttgctttaaagcagggcgcaaaagctgttgaatatattacaagtggaataaaacaggatgatggaacttatttacttaatttgtccaatggcgctactgttacttcttctgttgcaccttcacctaaaagccctgttgctgtttatttgccttctgatgctactggcttttctgcgaagaatattcaggactcgataaacccttataatcagcaggttaaacctgttcagattgcgccaacctattacaatgttgatgcaccaccgccgataagccagccatttcctaatgatgtatatcgtgtgtcagtaaagggtactaaatatccttattcgactgatatcagggatgcaaagggcgatgctgtacttgtcagtgataatccggtaaagattgcgctttataagtcgattaatggttattctcattccaatgtgacttatcatgaggcttctgacgacaataacttacatatcaggatgccaagaaattttaaggtttattcggtttccgttaaagactttcagtatgaaaagccgaatccttattttggtggatattcatctattgtaactgttgttttatctgttgcgacaacaacggttacgcttgaaaattcatgggatttatgtaaaagcgaggaagtacctgcgccgggcagtacggctgacaatcccaaaacgcagtggaaaagtatttgccaccctgagaaggccgtgtataaaacgacgaatgatgttcaggatgttaaagaccagatattttttaatacagaatttgatacatcaaatttacctcaggtaattaatggcgaggttattgataatatagatttcaagccggaggaacagttaaacccggctgcgctggttaatcttattaatggccttgcaggtcagactgttgttcaggaaggatatcaggggataccgcttgataaaccttttacggcggctgaactgacggctgcggctaatgctgttggcgtaaaacttgataagggcttgctttatagtccggttgtcgttcctcagtcgtgggttaatgccagacccggtgcgggaacggatacaggtgtacaccggctttgttga

SEQ ID NO: 160467 - DNA, 711 bp, Enterobacter cloacae
atgcgtcagaaaaccatcgatgcgattatggcacatgctgcagctgaatatcctcgcgagtgttgcggcgtggtggcgcagaaaagccgcgttgagcggtatttcccttgccggaatcttgccgcggtgccggaggacaattttgtcctttgcccgaaagattacgcagctgctgaggactggggaacggtgatcgccatcgttcacagtcaccctgacaccacaacgcaaccgagcgaactggataaagcgcaatgcgacgcaacgcttttaccctggcacatcgtgagctggcctgagggggatttacgcaccattcagccgcgtggggaattgccgctactggagcgtccgtttgtgcttggccacttcgactgctgggggctggtaatgagctatttccggcaaacacatgggattgagttgcacgactaccgggttgattatccctggtgggaaaacgactatccggacaacttctatcaggattgctggtatgagtgcggattccgcgaattcgacgggctaccgaaacccggagatatggtgatcatgcaggtccaggctgataagtggaaccacgcgggaatactactggatggaaacatgctgctgcaccacttatacggacatctgagccagcgggtgccgtatggaggctactggcaggaaaggacgatgaagattttacgttacaaatctctgtgctaa

SEQ ID NO: 160468 - DNA, 756 bp, Enterobacter cloacae
atgagtcttaacgctgattttcagaaactcgaacctggtaatgtggtcaggcttttcgaagtagatggcacggcatttggcaccggtgaagtcatgcgctttcacagctacagtctcgcgcatactgaggctgaaatcctcgctgctggcggtgatgaaaataaactgcctgcaaaatctatctggtggcagggtaatgagtataaaccctggccctgccagatagaggggatcgaggcgtctaccagtggaagcagtgcgcagccaaaattatcggtggctaaccttgacagctccattacagcgctttgtctggcctatgacgatttgctgcaggcgaaagtaactattcatgacacgctgggcaaatatcttgacgcgaataactttgccgaaggtaatcccacagcagatccgactcaggaaaagctgaaggttttctacatcgacgcaaagagcagtgaaaccaacgaagttgttgagttcactctatccagcccgatggacctgcaggggcaaatgatccctacgcggcagcttcattccctgtgcacctggtgcatccggaacaagtatcgcaccggcgacggctgcgactatgccggaacccgatatttcgacaaaaacaacaatccggtaagcgatccgtcgctggatgaatgcaacggcacgctgacggcctgcaaactccgattcggtgaaaataacgaactctcctttggtggcttcccgggcacgtctttgatcaggagttga

SEQ ID NO: 160469 - DNA, 885 bp, Enterobacter cloacae
atgatgaaagtattagtaacaggggcaaatggacagattggttatttgttagcgcaaaagcttgctttagaaaatgacgtggatttacttgcagttgataaaactgaacttgatatcgttaattcaagtaaggtagctcagatatttgacagtttcaaacccgatgttgttattaatgccgcagcatatacagcggtagataaagccgaaactgaaaaagaaattgcctatgcagtaaattgtattgggccgaagaatcttgccgaaggtgcggaaaaatataatgctttgatggttcatatttctactgactatgttttttcaggcgataaatctggtatttaccacgaagatgatatcactggacctgctactgtctatgggaaaaccaaacttgatggtgaaaatgcggtggtacaggcatgcagaaaacatattattatacgtactgcatgggtgtttggtgaacatggtaataattttgtcaaaactatgctacgtattgcccagagtcgttcgcaactaggtattgtagccgatcaagttgggggcccaacttacgctggtgatatcgccgatgcactgattaaaataatgcaaaatattataaatgataacaatgaaaaattcggtatttatcacttttccggtttaccacatgttagttggagcgaatttgcagaagcaatttttgatgctgcatctaaagaaggggtgataaaagtcaagcctatcataaatccaattaccacatcagactatccaacgccagcacggcgtcctgtaaattcccggcttgatacgcagcgtattacgcgctgttttggtatagaagcaagtaactggaaaaatgcattacattctattaaagcttataagagctaa

SEQ ID NO: 160470 - DNA, 879 bp, Enterobacter cloacae
atgaaagggatcattcttgctggtggctccggtactcgtttatatccaataacgcgcggtgtatcaaaacagctccttcctatttatgacaagccgatgatctattatccgttatccacgctgatgttagcaggcattaaggatatactggttatcacaactgcagaagattgtgatagttttaaacggttactgggtgatggcagccatttcggcgttaatttgcagtatgcaattcaacctagcccggatggtctcgcgcaagcatttcttatcggtgaagaatttattggcaatgaaaaggtgtgtttggtcctgggtgacaacattttctatggtcaatcattcagccgttcattagctgaggctgtgaagcgtgacgacggtgcgacagtttttggctatcaagttaaagatcctgaccgttttggcgttgtcgaatttgattccgaaatgcgggcaatttctatcgaggaaaaaccggcgtatccgaaatccaattatgcagtaacagggctgtatttctacgataaccgcgtcgtcgattttgctaaaaaggtaaaaccttccgctcgtggtgaacttgagatcacttctataaatgaaatgtatttacaagatggttcgcttcacgtcgaactgcttggtcgcggatttgcctggcttgatacaggcactcacgaaagcctgcatgaagcatcgtcatttgtacaaaccatcgaaaatgtacaggggctgaaaattgcttgcctcgaagagattgcatggcgtaatggatggctcaccactgaacaagtaaaaagcttgggtatctccatgaagaaaaatgattatgggcaatacttgattaatcttgttgcagattccggtaaaaaatga

SEQ ID NO: 160471 - DNA, 1035 bp, Enterobacter cloacae
gtggaagattcaatacaaatttttaatatcaacaacttggacgatgttgagacactttttcatcgagtgatggatggagaagaaattcatatcgaaaacttgaaacttaatttcttagaaaggattgatttcaagttctttggtgatgaagaaaagtataatggtacattgcccgctagcctcgcacagggtatctgtgagttccaaacagagatctacaaggtcttcacagttatcaagtataagactgctaatcttcaaaagctcacaactgaagatcgtgaagccgcagagttggtgttcacaattaagcctggctgtacagaaattcttactccggtaaaagaactatttgaagcattcggcgatgcatttgggaaggttactcaaggtatgaatcctagacagaaaacactttgtttcctgttcgctgtagcagttatcggcggagcatgggttggtacgtcctatattgaccaagatgcgcaattaaaatctcagcaagttgagctccaattggaagagagcaagcaacgtgcggaaactgaacggttaactattcttcgtgatggcatgctttcagctatcaaagaaaaagaaggtgttgataccattgaaagggctgaaggtatccaagagcatagtgctaaagcttatactggcgttcttaagggtgcagccgatgctgacaaagtaacgattcgcggtgcaaacgagctagaactttctcaatctgaagtacatgaaataatcaaaaaccctattgaaaaagccagatcagaacaacgcaaccttgaagttgtcattgacagtataaaacgttcagccgataaattaaccctcagctgccacgagccaactggcgatgactccttccctatctatgttgataccagcttcataaacgaccctgacgagcttgggcttgttttcgatgcaatgaaacacaataaaactgtaaaagttcttggaagctataaaatccgttcaggtgttattgaacaaggtaacgcttcaactattacgaatccgtaa

SEQ ID NO: 160472 - DNA, 507 bp, Enterobacter cloacae
gtgactgattttttatcaagtaataactggcaagggattggtgtgatttgttctttggtaatgggggtctttggtcttttttttacaaggtattttggccgaagattatttaaagcaaaaaattctaaattctcaaagaaaacagaaaaccccaaggagctgattgaaggccaaacgactacgctttacggtaaagttagagacgaagtgtttccagggccaccaaactatgagtctatcaataatggtgataagcccctattttactggattctctatgtaagtgaaccaattagcttaattggtcggagtattgaagataatcagccttatgataaaggaaactcatgtatgtttcaattatgcctaacagagaatatttatgatgaacgtttggatattctcggtaaatatgttaaggctgaaggtgaaatattcttgggtcatacaggttaccacaacaccaaagctctacttaatgttcgttccattaggattatgaagtaa

SEQ ID NO: 160473 - DNA, 687 bp, Enterobacter cloacae
atggacatattgaaccttctagaggttttgaagccgtcagggaacgttgtaaccgtaaaaatagataatgcaaagaatggttttgaggcgctgtatgactttattatcacattggcacctacaataattgctatagttgcaattattgcttcttattatcaattcttgcgaagtatgaatcagcaacaggagcaatttagtaaaggcattgaccagcaaattgatactttacaactaaatgttaaactcgcaaccgaagtcgaattaaaaaaagagaattgtagaggggttcgagaagcatgtataaaattattgagtcatgctaccgacgcttatactagaagagctgctaacataaagtatagcgttatccccgataataaaaaaactgattatgactgggagcaaatgaatttaacttctgacgcatatttatctgcactaaagcgctttcgggatacagaatatctaatagaaacttatctcgatgaaaagttagatgctgagtttagtgaaagcatcaaagaacttgatgagtgcattagaagtgaaaattttagtggtaaagataataaagccgcaaaaagaaaatgcctatctctttgccaggcatatatcaagcgacaacagacggaaattgttgaacttccaaatacaatactgagcaataaacgaaacaaaacatga

SEQ ID NO: 160474 - DNA, 357 bp, Enterobacter cloacae
atgaagacttttgagttgttgaacaaaggtgataagtctgtaattgatatttataaagatgccaatgcaatgtgggatgaaatatttgctaaagagtggacagcatcaaatttatctgacacgcttggtagcgtccaaaccacatttgagtatagattagagaaatatggcctaaatcgttgggaaggacaagaaatattcgtaatcaccggattgacttatttcgataatgattatgatatgaatgacaataaagctaaagaagttagcttagcatttgaaatgagttggtgtagcattgaggttaagagcctcgcaaagagactttccaaagctctgtacattgagggtttttaa

SEQ ID NO: 160475 - DNA, 774 bp, Enterobacter cloacae
atggactttccaataccttacaattttgaacaatacgtcgcatggcacaatcaacaggttgaaccaggaggcgatcttatcgcaaatttaaattccttaatggaatcattaaaagataataaagatagattagtaaaactagcacaagtattagataacttaaatacagttcttttccgtgctaagcaaactgcagatgtagacgttaagtcatataagtgggagatactattaagcgatcaggtatcgacagaaaaatatagtgatgtttttaaatcaatcgaatccatagttgataaattgtggagaaaaaataaagatgcaactagtttcatcacaagtgaaaatataaaaaccaatattaaggacttggtaagaagttccgttgttttaagcactcataattttgcaaatgctttcagcaaagccctgccaaactggagggagaagttgcatattaataacataccattagatgattattcagacataatcgatataaaggttgagcaggaagcaaaaatggcaagtggttattttgcttatcatgctgatgttatttataatgacggagttcacgtagaaattcagatttattcgcagttaaatgaagtatggagaggtttgtcccataaactatatgaaaaaactcgactcctacaagatgtagaatatggccatggtactagcgcatcacgattagtttctctgggtcatttgcttcacttagcagaatgtgaggctgagcgtctacaaagggatttcgaacaataa

SEQ ID NO: 160476 - DNA, 234 bp, Enterobacter cloacae
atgtatacaccacgcaatgacttacccgccacaaaatctggcacagacctgctggccatgctggcgcaagctactcaggaaggtaaagcggcctccgccgatctgtgttctgcccgtctggataagctggccgcgtatgccgcgaacgaaggtttaagcgctgccgaaatcgttgagctgatccgtgaagaagctgcggccatttgcagcaaaggcggtgcggcatggaattaa

SEQ ID NO: 160477 - DNA, 705 bp, Enterobacter cloacae
atggaattaaatgcacgcaatcagatgttcgcggcaattttaggcggggctatctctggcgcgcgagtcaaagagggagccaccagaagcgagttaatacgccattgttggataatggcagaccaggcactttattttgctgacaaactggagacagagcagcaggtcgctacgcgctggattgagaaaggtttcgtgatcgttgataccgaaactaccgggcttggaaccgatgcagagatcgtggaaatctcaattgtcgactgcgccgggaatattctgctggataccctgattaagccgtcaaaatctattccagcagaagctaccgcgattcatggcattactgatgtgatggtggctgatgcacctacctggggggaagtcctgccgaatgtggttgagttaactcgtaaagggtgggttgcctataacgcgagttttgacgctcgcatgttgcggcaatctgggggagagtttggtctgcatgaggatatccgttcacctgaatgtgtcatgcaactttatgcaaactataacggcgaatgggatgtgcgccgccgtaaatgtcgctggaaaaggcttgttgacgcagctgctgcgttaaaggtctatgctggagaggggtctccacatcgatccctttatgactgcaaattaacactgggtgtcattctggccattgcaaatggcggtgccaaatga

SEQ ID NO: 160478 - DNA, 525 bp, Enterobacter cloacae
atgatgttgacacttaaaaatttaaaacaatatacgccagaatattacgagttgatgattcaggctgtctactttcaaactgaagatgggctggactggtattatcatttaagacgttttcagaatgatacgctgaaactttgctttgacgaaaagggcattatccgttcttttagttatgatgcggatcgtttatatccattgaatatgtctgtaacagaaattgataagtctgaagtgccagaaggtttaaatatttatggggagtggatgttagaaaaggggaagattatccctgtcccgtttgattatgtaagtcaggcggaacaaaaacgaacgcaactgatgaaagtagcgagcgaaaaaattgctgcgcttgttgctgcttctgaagatggggatattacagagaaagaggagtctacccttgcccgtttaagagagtaccggtccgctttgcgaagactggatttgagtgccgcaccagatgttcagtggcctgaggaaatcactgatgtggcgtga

SEQ ID NO: 160479 - DNA, 624 bp, Enterobacter cloacae
atggttctaagcattatggaagtattaaaaaacttatcccctttgcttccagtgatagtatcaatcattggattgagagcggggtggatatataaaagggacaaagtctttaactccagaaaagctattagcgaattttcgtacaacctctataaaaacacaaacgatgaaaattataagcgaattgctgaagaatacggcatttcagcattaacaaaagactcaaatctgacaccagaacagaggagaatacttttgcgttccaaagatccagtaagagatattgataattacagtaaatgtcaaaaacttttgtacattagtgataactcaacaatatttcagtggactaagaaaagatatcgattttggatttggagaaaatccgtagaaatagttagcctcgtcatttattttataagtggctttgtagttgcaatgccgttcatgtatagcactatgttcagcagtggtttggttgaaaaaataaacaagtcatcagctatgcttaaatttggtttggctgcatattgtgtgttaatgggaatcagtaccgggctgtttttcttacataaactttcgaccataaacatcgcagaaaagaccatcaaatctaaccgatga

SEQ ID NO: 160480 - DNA, 873 bp, Enterobacter cloacae
atgagtgttttttctgatatttctgagtatgtatgggacttgcttaacgatggaaagaaattaggaatttcaataggtgaggaaacaattagtgatctgatattaatcgagattgccagaagagactataattacctgacaataagaaaaaccgccaaagataaagaatcagaaagcggcactgattgggaatggtggatcggaagtattaaaaatggttgggtgcgatatgctatacaagcaaaaaaaatggattacaatcaatattcatataaaacgcttaaacacgaagtaggaaaagataaaaaactacaatatgaaatcttgagaaaacatgctaaaaatacgaaagcaattgcgctctatgcgttttacaactacccaaaacaaactgaacttgatgaatactggaattgtcaaaaaccaatatccaaaaagaaaatggggattacgattgccaatcttgaattggtagttagagcgattaatataaaaagagggaagaatttccctacgatacataaatttaaaacaacatatccactttgttgtttacttgagtgtgttagcacttacaaaaaaaacatctctaaaccctctattctcccacaacctccaaatgtgatgacactctcatactcgaacatttcaattctggcttcagattatgaaacaatagaacagcataaaataaacgagaaagagatcaatctaaatcatatactacaaggctatgatgtttcgaagttatttaatgatgacgaaatattcgataaagccaaggaattgttatacccaaataatacccctgtgccaaaacgaatattagttatcgatttagaactacttaaaaaaacaaaaaaagaatcataa

SEQ ID NO: 160481 - DNA, 1209 bp, Enterobacter cloacae
gtgtacctgcaattcagcggcggggaaatacagaagggactgataaccacgcagaccgaaacggtgatggcgctgtccggtcaggcggtgacggacaaagaaggtaaacgctactggccggacgggtcgtcgcgcgggttgctggcggagttggatgtgcagttgctgtcccggtatgacctggctggtcggggttttgagacgacagaagacagcccggtcagctttgaccatctcgacgggaagacgcagccgaaagggttggtgaagacgatttttgaacggtttttcagcgtggctgacaatgacggtaaaccctacagcaaggctgtagcatttaactatcagcagttgctggacaagattgacgacgcgaaatccccccgctataacccggaacaataccggcgtgcggtgcagaacccgtcaatgcgtgaccacctgtaccggctgtgcgtaaagcaccccagcgattggtactactcgtcggaaactccggtgtggaaagcgttctttacgccacagctgaaaagagatgcgccggagtggtatgcctacagcatgaagttcctgacggacatccgctggatgtaccgtgtggcagggatggtggaaaatccatggcatatgcatccgctggtttttctggatgccattaataagattggtatcactctcgatgaagccagagttcgggcatttatgagaatgattcgagtcggcgaagggactgttggtgaggttggatatgaaacattgtttggtaggaagtcattcataaaagattatcataaaagttttagtgatcatcctaatataacaatcaccagaggcccattaaaatcttctgcggctggagcatatcaaataatgggttatatatggaatgatcctaaaatgctgtcttatcgcaagaaatatgggattggcgatttttctccaaaatcacaagatgagttttgtgtgctaattcttaagtataaaaggaagggggctttagaacttatcattgatggtgatattgatggggctttagatattttaagctacgaatgggcaagtcttccccctgctagatatcctcaaccaacgaagagtaagagtgaagttatgtctctatacaataagtatttattagaagaaatctcaggggaaacagatctccacctgtcaatcggctacataaaacaagtttataatggtgtgtaa

SEQ ID NO: 160482 - DNA, 234 bp, Enterobacter cloacae
atgaaatacatgattctttgcctggcggtggctgcattgctttctggttgcgctggcgttcttcagaagcagcaacccatatgtaccggaacggccctgatcggcggacaggaaaacatcgtccagatttacggcgtgcgcaagcaaaataaccagacccagtaccgtgccggttacccatttaactggtcatgggttagcgcaaacactttcagttgtaccacttgccactaa

SEQ ID NO: 160483 - DNA, 1521 bp, Enterobacter cloacae
gtgcacgacgccgataacgtggcgattatcgtcaacgacaatggcttaaaagcaggaacccgcttcccggaagggctggaactgactgagcatgttccgcagggacacaaagtcgccctggtggatatccctgctgaaagcgaaattgtgcgttacggtgaagtcatcggctatgccgttcgttcgataccgcagggaagctgggtggaggagtcgctggtggcgctgccagaagcgccgccgctgaacacgcttccgctggcaacccgcgtgccggaaccgcttcccccgctggaaggctatacctttgaaggctatcgcaatgcggacggcagcgtcggcactaaaaatctgctcggcattaccaccagcgtgcactgcgtggcgggcgtcgtggattacgtggtgaaaatcatcgaacgcgatctgctaccaaaatacccgaacgtcgacggcgtggtgggactgaaccacctctacggctgcggcgtggcgattaacgcgcccgctgcggtggtgcctatccgcaccatccacaatatcgccctgaaccccaactttggcggcgaggtgatggtcattggcctgggatgtgaaaagctccagcccgagcgcctgctgcaaggcacggaagatgtcaaagccattccggcagacgaggccagtatcgtgcgcctgcaggacgaacgccacgtcggttttcgctcaatggtcgacgatattttgcaggtggcagaacgccatctggacaagctcaaccgccgccagcgcgaaacgtgcccggcgtcggagctggttgtgggcacccagtgcggcggcagcgatgccttctccggcgtgacggccaacccggcggtgggctttgcatccgatctgcttgtacgctgcggcgccacggtgatgttctccgaggtgactgaagtgcgtgacgccatccatctgctgacgccgcgcgccgttaataaagaggtcggcaagcgactgcttgaggagatggcctggtacgataactatctcgatatgggcaaaaccgaccgcagcgccaacccgtctccgggcaacaagaaaggcggcctggcaaacgtggtggaaaaagcccttggctctattgccaaatccgggcagagcgccattgcagaagtgctctctccgggccagcgcccgacgaaacgcggccttatctacgccgcaacgccagccagcgattttgtgtgcggcacgcagcaggtggcatccggcattacggtacaggtctttaccaccgggcgcggcacgccgtacggcctgatggcggtgccggtgatcaagatggcgacccgcaccgaactggcaaaccgctggtatgacttaatggatatcaacgcgggcaccatcgccacaggagaagagagcattgaggacgtgggctggaagctgttccacttcattctggatgtcgccagcgggcgaaagaaaaccttctcggaccaatggggattgcataatcagctggcggtgtttaacccggcaccggtgacgtga

SEQ ID NO: 160484 - DNA, 1173 bp, Enterobacter cloacae
gtggtcactaatgctcaatggctggcagaccctaagctgcgtcaggcattcgcagaagttgatgctgatcatttccgctgtcctgattacaacggcgttcaggctgggtctatcgcacagctggtgctggcgggagggacggacgcccagaggggcatcttccacggtgaagcacctaatattcgtggtgccttccgtatcaatctggacggaacaactgaactgaatgtgcctgtcacaagcggggtatttaccgcttcctcaacaggaacggtggcaacaagtggtgggttaactggtgggactacttctactaagccgattggggtaacactcgatgcgtcacgagcaagcgatgtgtacaaagacacggcaaacgacatccttggtgctcgcgccgttggtgttatatgggggcaactctttggccgcatcaataaccccggcagcatggatgccgcaacactggcggcaagaattgagcaggtaaacactcgagtaactgattcgatcaacaagcgctttatccgtggtttagatctgaccgtgtcgacaacgacagtaacggtttctgctggctcagctgtgatcccctctacaggggctcccctggaagtatcggcgccagttacagcaaatatcggggcgaccacagcgtcaacctggtatcacgtttacctgtattcaaacaatggaacgcctgcgattgaaatctccacgacattgccaacaccatatgcttatccggcgcatacaaagacaggtgatacgtcacgcagatatctcggcagtttccgtgttgatgcatcgaacggcgtgcgcggggttaacacggttgaaggaagggcttttctacaggtttcatggtactccgtcaaccgcgtattagccggaggaacagcgacaccgcgaacggctgtagacgtaagttctcttaacccagtcacggcacttacctgtttattgtctgcacacaacggcgctaccgcaggcgtggcggctatcggaagcactaatgaagcgtcaggcgatatgatcaacatcccgattaacttgaagtttacagcggagatcccgttccgctcgtaccctaacattttttatcaatacctgtccgccgtgtctggtggtgggctctatctcgatattggaggctatacctatgccagataa

SEQ ID NO: 160485 - DNA, 1143 bp, Enterobacter cloacae
atggcaaccgcgaatataaaccatacaatgatcacctgggcgcgacagcgtgcgggttattccttgtccgtatttgcagccaaatgttccgtgaccgaggagcgcctgagtctgtgggaatccggtgaacagcaggtaacgtttaaccaggcaatggttattgctgataaatctcatattcctttcggatacctgtttttaccggctcccccagttgagtcccttcctattccggatttgcggactcaggacagccggcccgtagagcaaccgagtgctgaacttcttgatctaattaaactgatgcagcaacgacaggaatggtacagcgattacctccggcaacagctagaaagccctaatccttttgttggccgcttatctgtacgacatagtgctgatgctatcgtgagggatatgcggcaggcactcgacgtcaagttgtttcctgaacgcgggcacagcgatgaatattaccgtgatctagttaaccgtattgaatctctcggcattttagttatgcgccaggcaagcctagggcatttcacccgccccttaaaggttgaagagtttcgcggctttgctcttactgatgactatgcccctgtcatatttatcaatcatgcggatgcgcctggagcaagactgtttactctcatccacgaattgagtcatatatggattggccagcccggtatttcggacggggatgcgcggacatcacgtaaggaagaaatcctgtgcaatgccgtggctgcagaatttcttgtaccggcagatgaattcgtgcagtcctggcgaaaagacgttgagttctgggaagaaaatctgggtccacttgaacaacaattcagggtcagccgctgggttatttcccgccgggcgctgacaatggacttcataacccatgaagattatgcccgttacattgcgcgtcttaaagcagaatggatggaaagagaaaaaaaaggcaaaggtcctggatattaccggaccaaaaaggcacaaatcagccagccgttttctcgtgctgttgtcggacaggctctgagtggccagcttctgttgcgggaggccagcgctctgcttgatgggataaaacccgctaaaatccctgtgtttgcgaaggaacttggtgtatga

SEQ ID NO: 160486 - DNA, 501 bp, Enterobacter cloacae
atgagatacctgctggatgccaatacatatattcaggcaaaaaatcagtattatgggatggatatctgccctgcttactggcactggcttgatcttcagtttgaactgggaaatctctgcagtgttgatatgattggacgcgaactgagagatggcaatgacgaactcgcagaatgggtcaagtcgcgtcctgaacatttcattaaaaatgatgatgatgaaacccaggcggtttacattgaactcgtccagtcagtgatggagggaaattataatccaggcaacagggataatttcctcgcaaaagcggatccatggataattgctaaagctaaaactacaggcgcagtcgtcgtcactcacgaagcactcctgagtgaaggaacgaaaaaagtaaaagttcctaatatatgccgtcagcttggagttccctgtataaatacatttcagtttttgcgtgaactgaatgcccgttttgttctggaaactccggtcagttag

SEQ ID NO: 160487 - DNA, 405 bp, Enterobacter cloacae
atgtacacacaaaacgtcaacgtcaaaaccgccgctcaagaatctaccggaagatgggggacagacccgaaaacgcgtctgacctgtgttatcgcggagcaaaagtcatatctggacgagctttgcgacgtatgcaatctccagctgagccagcacgatgaggctgaggaaattctgcgtcttctcagcttgatgagcgacaacgttcacaaggaaggcgtgctgtgctgggaacgttcatatcctctggtgtcgtttcatgtcatgcagccgtggttacaggctcaggctcatgccatccgcttatacggctttatcgggcaaaaggcgtgggacatcgcgcgtaaagacctttgcgacaacataaatttcgctcaggccatgttgcgcctggaagcgcgttaa

SEQ ID NO: 160488 - DNA, 1089 bp, Enterobacter cloacae
atgctcagccagcttaacctgcgttttcgcaaaaagctgatcgaggcgctgaaaatgcgcgccggtcgggaaaatacttcggtcaatgccctggccgaacgcttcctcgataacgggctgaaaacggccgccgccggcgatggatattttcagctggtcgccgatccggaggcgacggtccggcagctgtaccggcatatcattctcggccagaccttcggcactgctccggtctcccgggatgagctgcgcttcatcctggcgtatgcccgggaggcctttatttgcggccggaacagagtggccacgctcccggctctggacacactgctcgacatcacccgcgacctgctggcctggcaggtggagcatgaccgcccggtggacggtcattacctgaaggggatcttccgcctgtccggggaaaactggatggaagagtttgacgccttccgggcagagctgcgccccgttgtggaccagatgtatgccgaacacctcctgcgtccgctggagagcgactgtttcaacctcgccgatattcccgacagtgctctcgccaggattttcaccctgccgcggctgaaaaccgttttcccgctgatgctgcgcgggctggactggagcggggagaaggcccgagatctggctcaggagctgcgcccggtgatcccggccgtcacgcaaaccattgaggccggcacgctgcgccttgaaatccgcattgacggccagcaccccggagaacgccctggggcctggtacaccacgccccgtctgcacctgctgatcaccggccaggacttcgtggtgccgtacggctgggagaccttctccgaactgctgggcctgttcactctgtatacccgccatccggaagccctggcgcacggtcaccagggggagcgcgtgatgttctccccgcccgggcacgtcacgaaggagggatttttcggaatagacggcctgcggatttttatgccggcagaggcgtttgagacactggtccgggaattcaccgctaaatgcgcggaaggtatgctcacggaggccctgaccgggctgcgctgcctgtacggagatctgtag

SEQ ID NO: 160489 - DNA, 2208 bp, Enterobacter cloacae
atggcgactgaaaatgttctgtctcgcgccggctttgaaggcccggtactgaaggctgaagatgaccgttacgggtatacggcgatagcagaggggctggcgcgcagcatcagcgccctggatgaaaatgtcagcaccgtgattggtatcgaagggcagtggggttccggcaaaaccagcctgctgaacttactgactgaacacctgaagactcaggttccgaccaccacgcagattgtggttttctctccctgggtcaactcaccggatgaaagcccggtaagcgcgctgatgatgaccatcgcagccaggctgaccagtctggatacgtcggccatggtgctggcagaaaaggcagtgccactcgcagagaatattctcaactacgcgcagcagacttcgcgccggcttgcgcctgtgacgcgattcgccggtaattttgttccgggcctgggacttgtcgccgacggcatggacgccctggcggaaaccagcctgaagggacgggaacagactgcggctgaactccgggctgacattgaaggtaaaattgctgcgctggacatcagctttatcgttgtgattgacgatctggatcgtctggagcctgcgcaggcggtggaagtgcttcgtatggtacggtcggtcgcggacttctcgcgattccgctacgtcatgtgctacgaccgggatgtgctggcgcatgcggttgaatctggtctcggtgtgcagaacggcaagctctatctgcagaaaatcatcccgctgtcgttcagtcttcccagaccggaaagttttgatttgcgcagggaatttatggcgggtgtgatcagactctacacctctgtctgccggaccgaccccgatgagacacttcttcaggagctgagaacggtcacggatatgtacggggcaggtctgaaaactccccgagaggttcagcttacgcttaatgcgctggccttccgctacagtggcctcagggattatgtctggctaccggacctgtgcttcctgcagctcatccggacagtcaacccggatctttatgactggatcgagcactatctcaccgaaagggccgtggtggagtccggcgacggtaccgtcagcgaggcggagcaggctgagatggtcaccagccttggccaacacctttcactgttccgatcgtcagaagcgaaatccgtgacatcactgcgtcactgggtcccgggtatatcaggttataaaactgagcatctgaagctgttcgttcaggtggacgatgacgcaaaagccgtcctgacggccaaccggcgcctcggcagtgctgtctactggcgttactattttgcgtactcctccccgcagaatgtcctgccacctgactatttcaccgaactcttccgtaaggcaggaaacccggctgaacaccccgctctggcagaagagctgctgagccgcatcaacagcaacaacatttcctcccggacctggttcgagcatatacttagtcagctgacctggccggtaattgccgcgcgtacaactgaagaatgcgaaggcttcttgcgattcttctttgagcacggcgatgaggttattaagcgttacaccatccgtaatgaatggttcgaaccccataatctcgatatgaacagtgtggctgtccgcctgctggagaggatctgcgaagacaagcgctggcctgttcaggaacatttgagcgaaatgctggatacgggaaagtcgtggcgctggatagcggacttctttcgccagttactctggttgcacggccttgccggaaacaaggcgacggatgaacaaaagcagtttctacccccggaagaattaagactattgcagcgccggctggctttccgtcttgatgctcctgatattaccggtcagtttagtctggacggtctgctgcagtcccatatctgggcgtggtgcgatattagtggactggaaagcgtaaaggcatgggtacagaatgaaactgcagaggatgaaaaatttctcagatttctgcttgccctgcgttaccgcgggataagctctgcaaccgggcattacagggcgcttagcctgactcagatcgcggagtttacaggcagtgaggaacagatcaaaagcaggctgacaaaaatagaggggcaggggaattacagtgatcttgtttcagaggtgaaagctgcgatatcccgtaaccgattctga

SEQ ID NO: 160490 - DNA, 4266 bp, Enterobacter cloacae
gtgaatctggcggcggaagagaccacgcagggcgacagctataagtcaggccgtaaaaaagtgattaacgagtcggttcgccagtcgggaaccgacatcactgcgggtgggaatgtgactgttgtcgccggacgtgatgtaacggcgcaggcagcagatgtctatgccaaaggcgatacagccgtggccgccgggcgggatattaccctttccactgcgacggaaagtgactatgcataccgggaggagaaaaagacgtccggtgggttcctcagcaagaaaaccactcacaccatccacgaagaaacgcatacgcgtgagaaaggtacgcagctttccggcgacaacgttgctctccgggctggtaacaacctgacggtgcagggctcatcagttgccgctgagcgcgatgtggccctgaaggctggaaatgatctgaccgtggaggcagcaaccaacaccgacacgttctacgacatgaagaagacgaagaaatccggcgttttctccagcgggtcaggattgggtatcaccatcgggtcacagtcttcaaaaagcacccgacagggggcaaatacgacgcagagcgatgcccgcagcacggtgggcactgctggcggtaatgtcattatcagcgccggaaatgacgtccagttgagcgcggcagacgtggttgccggaagagcgaaggatgattcctcccgcaaaaccggccatatcgatatcactggcgacagcatcgccatccttcctggacgggatacgaccactgagtccatgaagcaggagaccaaatcgtctggcgtaacggtcagtgtgaaagcgccatttgaagacactgtgcgtaacgtgcgcgatatcgttcgtggtaagggcaacagcggcaacagcaccgtcgataaggtgaaggggctgggggcggaaggcggtgcgctcgcgcttgacggaccagggcagatgatggccattgccgcaggcagcacccggtcttcctctgagtcgcactacgagggcgagtttaacagcggcagccatcttgccgccgcaggcaatatccagatgactgccaccggtaaacagggaggcagcaacagcggcaatatcctgattgccgggagccaggctaaggccggtgaaacggtgatcctcgatgcgaaacgcgacgttgatatcactacgtccacagacagcgagaaatacggcagtagcacgaaaaatagcggctggaatctttcgagcgccctgagcgccggaagtgctgttcgcgccatcgcgggtgggggttcccacggcaatcagctcctgccgggcgggatgagcaaggcagagagcaacaatagcggcaaccggactacacaaaacgcgtcggtcattcagggctcagatatttatgttaacagtcgtgacggcagcgtgaatatcagcggcagcctgatgaccgccacggacgatcttctgctgtcagccacaaatggggatatctccgtttctgccggacgtgacacatcactcagtgagagcagcggcagcagcaaattgctgggaacgctgggcggcgatggttacagcgccacggcaggctaccgtcatgaaaaaaacagcagtcgggaagatagcagcctcgaaaacggattgcgcagccagctaagcagcaaaaacggtaacgttgtcgcgcaggccggtaacgatctctccctgtcaggtacggatatccgtgccggtaaatcggtgtcactcagtggcgaaaatgtcctcatgggggtgagccgggatacccgcgacggtgaaaaccacagcagcagcgcccagtatggtgtgacggcatctgctggcggctgggctgttgaggctgcaaaagccgctgagacggctgcccgcagcgcagaaaacggcgatgatccacggctgaccgccatcagaacaggccagtcggcggcaaccgcggcgcagggcgctatgtcggactcgtcgctcatcaaggctaaagtgtctttaacggcggggacgtcctctcaggacagtcgttaccacagtaccgacacgcagggcaccaccattaatgccggcgagaatgtctctgttcgtgccggaaatgacattgccggtatgggggtacagatcgcgggtaaacacgtggcgctggatgcggggcgggatattctgctgtcttcctcccagaacacaacccactctgagagtaaaaacagcggcagccagttcagcgtcggtgtcggtgtgagcctgattggtgcgcaaaacggcatctcggtggagctgggggcgtcacagcataagggtaaggaaaacagccagtcgcagcgcaatacgaacagcgttgtccatgctgatgaacagcttacggtgaacagcggacgcgacaccaccctgaaaggtgcggagctggaaggtaaccgtgtggtggtcaactccgggcgcgatctcaccatcagcagcgtgcaggatacagccagttataacagcaagcagtcttcgtcaggcgcgtccctcagtctgtgcataccgccactgtgttatggtgcctcttccggtagcgtcagtgcatcgggtgagaatatcacccagaatggtaagagcgtcgctgaacagagcgggatattcgcaggcaagggcggctttgccgtcaccaccggaaatcatacccagcttgacggcgcggtgattgcatccacggcgtctgcagataaaaatagcctcgacaccggtacgctgggtttcagtaatctccacaacgagagccagaccagcggcaacggctacacggtggcgctttccggcagcgcgggcggcagcggaaacggtgaaaatcgcaacctagcaccagccatcggtacgggccaggcagaagagagccacaccggaacgacctcatcagcggtgagtggcggtagcattgtcattcgcaacccggcgggacaaaaacaggatattgctgacctgagccgtgatacggctggcgcccaccacggcgtggacgtgaacggtgatgtgcaaaaggtcagggataacctggcggtccagagcgaaggcgcggcgctggccacctctgcgctggatgcttacggcaagtatgcggagcagaaagcgcgggaatccaatgcggcgctgggcgcgaaactggcatctgaaggaaaactgcagggcgatacgccgcaggagcaggaagcgttcctgaagacgcagcccggatatcagaataccgagtacggtccggggagtgccttctggactaagggcagcgcagcggcgggattactggcaggtgcgcttggcggtaacctgaaggcaggcgcggcagcaggggcggcccctctgctggcgaccctggtcaaggagcagaaagacccgacagcccgtgccgtgctgcacggtattgtggcggcggcgctgacgcagttgagtggcgggagcagtgctgatggcctgaaggctggtgccacaggggccattacggcctcggcgatgaccgaccatctggtcagcgcgctgtatggagataaaaaatccagtgacctgacggctgaggagaaacggctggtcagtagcctcgtgagtatcgcgggtggtctggcgggtgctgcggtgacggatggcagtgtctccatggcggcgatggcgtctgaaacggcgaaggtggaggttgagaataacacgctgggtgttgcacctccggttccggtgcctgttcccggggttccggtaagcccgggagatcaggtcaccaaaaacgctaatgacaaaatagcgtcagctgtggatgatctgtttgatgcagttgataaagccactcagtgtagctttgggcgtgcatgttcttcggatgattcagatcagggcttgaaaccaaatgtagccggaaacatgacggatgatgagaaggctgaatatggtggtgctggttcaggaacgccgggtggctggggaccggaagatgaagaaaaagcgcgagctcagcaggcacaaattgaagccaaaaagcaggttgaaagcttaggctatgatagcaataaggtttctcacatttttgctgataagcatcaaatggataaattagtttctgagtttggctctccagaggcggcattggaaagaatgcatgaagcagtacagcctttggcgaagaatccaggctcatatcagactggtagctgggtcaccgttagggtcggtggtaatgatgtagctgtaaaaggtattgtcattaatggtgagttcagaatatctacagcaacgatgaggccgttctaa

SEQ ID NO: 160491 - DNA, 744 bp, Enterobacter cloacae
atgattttctttagcattatcaatcataatcatgatcatatgatagtatctaatacaagtctggcacagatcgcagaaaaaaatcctgttgtaatcaaatcaaacacgccagcctctaatgcactcaaaaaatttgctgctagtcacaaaataacacttctggattgtgcttatggattaggatttggtgagaataataaccatgtttttcagcatctagttgaaaatcaattaattcgtgataacgattactttctagtaattaatccagacgtcatcattactgaaacagaaattgaaaaactatccagagtgataaaaacttacgaatcagatattttcaccattaatttattccatgatgaagatttcaaaaaccctgaactatccattcgccgcttccctaaattaaccgggccattcaaagggctattaaagaaagattatcgctctgacgcttacgataaaaaaaacatcattaacccacaacaaatagattgggctgctggttcttttttactatttaaaaagaaagcttatgaaaaactcggcggctttagttcgaagttctttatgtatttcgaagatgttgatatctgcagaagagcgaaaaaaatgaaaatgccccttacttacctgccagatattaaggctatacataaaggggcatttaacaacagaaaaatatactcaaaacctgtctcttatacacatctgacgctgccgacgagcgatctagtgtag

SEQ ID NO: 160492 - DNA, 1086 bp, Enterobacter cloacae
atgattgaagattacgatttagactttttagctgttggagacaaaactagtggtgatgcaatcttcgtaaggacttttgattctatatacggagcaaatataacccttattgacggcggctacgctgggactgcaagcaatataaaggactttctgtcaaagtggtatgaaaccaatactattgataacatggttctcactcatggagataaagatcacatatcaggtctaattaaaattatagaagaaggtgacattgaagttaaacgtttatgggcattatttccctggaactatgcccaagaccttattgatgggaactattttgaaaatagaaatagtactacatggttaagccacgagctccaacgattatatccaagccttaaagaccttgaggatttagcaaaaaaaaattcgatccctataagtagcccatttgcgggttctttcattggtgcatttgaagttctttcaccgagcaaagaattttatcttgacaatattgcatcttcagcaagaacagcagaggagaacaaaactcgctactatggaaggtcattatttgagtctgtttttgcaaaggctgcagacttcacaacaacatttaaggaatggggatatgaaaaattttccaatgaaagtacatctccagagaacaataatagtcttgtccagtttgcaactcttggctcgaaaagagttcttctcactggtgacgcgggagttgaagctattggcctagcattaaatcgaatatctaataaaacaattcctgtagccgacatatttcaggttccccatcatggatccagaagaaatttatcttcagaattactcgattcaattattggtgaaaaatttgcgactcagagagaagctgaggcagcagaaactattacggcagtgattagtgcaggaaaaaatgactctaaccatccaagaaaagcagttgtcagagccctatatcatagaggcgcaaagattttcgatacaaaatcaggaaaattccataaagggacatctactagaggctcttggataaaagcagtaaaactcagttatccatccgacatagaagaatga

SEQ ID NO: 160493 - DNA, 807 bp, Enterobacter cloacae
atggcattgaggaatgatattcctaggatagttagtcttttcttgactccatcaggtagatccagcgttatgctaatggaggatacagacagaaaacaacgaattgacgccctggaagggcaatactatcgtgcaattttaggtagcgagtggggaatatctcacctagaacaccattacggtgatcgctgggttggtgggggatgtagggatatttctgtacgcatgtctaatgaatacattcatcttcatgctggtatcctttcatgccagttacgatcaactattctaaaaaatgatgctcgcctgtgtatatgggaatctgatgacgtttcaggggctgttaaagctcatgaaattgagctttatcctgttgtggtaacggttgcagaagaatggattgtaaaatatgatcaagggctagttcaaaaactgtacgatacccgttgtaatgctctgccaaatgaaactgggggcgctattattggcgtaactgattttaagaataagacgattattctagttgatgtattccctaaaccagaagacagtcagtcatctcctgttttttttattcgtgggaaggaaggacagttggaggcattaaaacaggttcagaaactaacagctcacgttgtcgattatgtgggcgaatggcattctcacccacagggatattcatcgaaagccagcagtgaagatgaaaaattaatcaataagttgcatcaaaaaatgaatatagatggattgccagctgtaataatgattgttgcagaaaacgacattaatattgttgttagatcatga

SEQ ID NO: 160494 - DNA, 2415 bp, Enterobacter cloacae
atggcagcgcaaaaacttgatgatggcatgaatcgggggagtgtgtatttcgatgacaaaagcgacaagagctatacaaccacgctgactcacagccattgggtacattacaccagtggcccggagcgtcagtcagaaaactttgctgagtataccgaaggtaatgcggtgcaagctttcttgggaggaaaagcctattttactgcgttactgactgcctttaaacaggcccaaaaatgtatttacattacaggctggcaggttaactgggatgcccaactagcggaaggggttcgcctggtggatgcattactggaagccgtacaagcttcaccagaactgcaggtgtacattatgccgtggaataatccctcacaggtagaaacctattcggcggcaacagagagggtgtttgcagcgatgaactgtcatctgaagcgcaaggccttttatgttcagcgtgcgggatctaaatccggaatgatgttttcgcatcatcagaaatgcgtgattgtcgatgaagaggttgcatttgtcggcggtattgacctggcctacggacgctatgatgatcattatggtttgctggcaaatgcagacggacgacaggggatgaatatgtacaattcgtgtatcgcacctgtttcccggcaaaacagttataaccccatggaggaatatgtcatcccgacagggggattcctgcgggataaccagcaggatgaacggcaaaaagccgagcgtcggcaggctggcagcatacagcacattattgataacgtgctcagccatcagttctggcagtcatccgccacgtcaaaggatagcacctatctggacccgacggtccagccccggatgccgtggcaggattaccacatgcaaattgaagggccagcggtttatgacctggtgcgtaacttcgtgtttcgctggaacagttatagccacccctatccggatcatccgctaaaaaccacaattcctgaactggaaattccggcaacactaccggggaaaaaaggcaactgccaggtgcaggtgcttcgtagtgcctcactcgacatgcgtaaagatgaacataagagcatgccggacagtgcaccacaggccaggttaaagcaggacgatatcctgcgcagtattcacctgcttatcagtaagtcagagcactatatttatattgagaaccagttcttcgtgtcggcgtttgggaggtcatcgattagtgccgggagtgggctaagcccggtggcggatagcattaatccatcagtagctgcctgggcaacccggctcttggctgatgaaacgacaccgcaaaatccggtggcagaatggctgggagaccggattaaacgggcagtcttcagtcatatgcagcaggcgttccatgtgtatattgtgctgccggtgtatccagagggacggcttgatgacccggccattgtggcgcaaattcatttaacccggcagtccttagtctttggttcgaagagcctgcttaaccgtattcgccgtagcttatgggtaaaacaacaacttgagctacagacggtcccgcgcagggagtggtggcagaaaatcactgaactggaagagcagtgcggcgataagtataaaacaattccactggaagcatgcaatgagtatgtgacgctgcttaatctgcgcgaccacgccgaactaaacggcagggtggtaacagagcagatatatgtccacagtaaactgatgattgtcgatgaccgctatgtgctggtgggaagtgcgaatttcaatgaccggagtctgctgggtgaccgggactccgaactggcggtactgatatctgatacagcccattgttatacggacctggatgggactggcgttgctgcaccgacccgaaactttgcgcgcgaattgagacaaaatgcatggcgtaaatggctgggcagcgcagcgggagagtgtgcagatgtgctggataaaccggcactcagggcgggatgggaaaaaattcagatgctggcgaaaaaaaatgccgaaaattacgaagcagtattcaactttattccaagagataattatcaaccggatggaggtaacgattatcctggtagcactgaaagtaaagccagaccttctgtctggccggtagtttcggccaattctaccgcgacggagtctgataaagaaaatatgccgttctcggaaaaattctggacaagtaatagagcagccctgcatggagataatctgaaaaacattaaggggtattttactatgctacctgttcactggactgaggaggagaataatctgatcccttataatatgcggctgatagccaacaacaagcgtttaaatggtgatgaccttcaaattgctgttattcttgaaaacaataatgaaaatggagtattgctatga

SEQ ID NO: 160495 - DNA, 1230 bp, Enterobacter cloacae
atgagagctttatgtttgtcggttttatctacttgtctacttgtttcatttagcgcttttagccttgaatggaaaaatgagtgtgtgggctattatcagttagcattgccagataacctagaagtggcattgtatcaggttgaagattttgttaatcccagagaacagcccgaaaacgatggtgatataaaaacaaggctatatgcaagcccaaaaataaagttcgaaaagaattctttcgttcgggatgatagctctgtccaagcgcaatttactgaattctattatgggcaatataaattgggaatttcatcacagagtcgtacgtccattaattggtccgagtatcgaaacaaagtgatcgctaacagaaattttggtgtgaaggttgccagacaatatgaagaacgcaatctggaattgtttaacgagtctgtcacaccagaatcagaatttaaaagaaaacatgattatatcattaaagattacactgatgcttttgcgctatatgaaaacagaacttatagcctttttgtgaaaaaagatgaacgtttatatcagttctggaagaaatatcagaaggatacaggtgataaatcacaaacggcagagaaacaactgctggagagtgaacctgaaattctttcattacttaacagattccagtctcgcaaactctatcaggttcccacagcgcaaggcttttgtatgccctatggttttatcgccggagattctggtcatgaaatgcgtaatatgggggtaacttaccgactgaaaaatcatccggatgtgaccatattttttcaggatttaggcatggaacctggcccaagatttcagcgtcctgaaaatgaaagcagcaaggattttattacttatttgtggaacagaaaataccagtggtcatctttttcgaaagagttaatcagcccgaaatggcgcccaattaaaatggacgggcgtgacgggcttgggacttttgtgaaggcaactttccgtgatgttccagtatataactataaggaccaagtagttaatcgtctgaattatattaactatggttatgttgcctatgtgcagggcaatcataaagccagaaatctggagcctgatttattgctctatgttatgcaggacagtagtcaggttaaaaaccaaccaccgatgggcaaagatgacctggaaaaactggctgaacatattgtcagttcgattaagagacggtaa

SEQ ID NO: 160496 - DNA, 267 bp, Enterobacter cloacae
atgccgataggtttttgggtgggggtaatcacagttttcagcacagtgctgttaacgatgtcttttggggtgatacagatgtacaaggatacgatagtgaaactgtgcacaactaaaaatattacccccatagaggatagatttgaaatatcccctggagcggatattataaaaatatctgtcatagggaataaaatgaatgtaacctcacccaaaattctggctcaggtagccaaggatgttcgcaagcaacgcaaactgtattag

SEQ ID NO: 160497 - DNA, 711 bp, Enterobacter cloacae
atgaacgagaaaaaaataattgaaattgctaatttggaaaacgattgcaaaataggaaaggatagacactttatagccgctgaccgaaaaaacaaatggagaatttatcttggattatttgcagtagtaggttctgcgataatatcttcaggaataggcaagagtatactttctctgctagatgcctatattaaatcagaaaattgggccttttgggatgcaactctaagccatattttaccgttacttgttggtatatctacagctataataggttttcttggtttagaaaagcagactgctcaacatcgttatgttgggaatgcttacatcgaaatatcaagaaaggcaagatctatcttaaatgaaataaacaaattaaatttcgatgaaaaaataaaagaatatgaaccattactggagaaatacttagaaataaacaaagaaggcgagtcatgcccgactaataataaagactcattcaaagctatgaatatgaatgccaacagacgaaatgctataaagggtaaaattactgaattagaaaaagacattataaactttacccctaagaaaaaatgtaaaagaacgaaattgagtaaaatactttctaatagcataaaaataaaaatagcacatatcctattttcacttaatattattaggaaaagtgactatttacgatatgtaaaaagtctaatagcattataa

SEQ ID NO: 160498 - DNA, 960 bp, Enterobacter cloacae
atgagaaaagttatatgtttcatgctgttgatgctggtggtttcaccgatcgcccgagccagttgttcattttacagcggcgtgtccggagaagtgccgggttatctgaacttcggcaatgtggttgtccagcgtgatgtaccgataggcagtgtactcgccaccacaataacaggcgcttataacaacggtaatgccattgcgggatgcaagcgggaagcatggaccgctcgctgggagctgacgcaatggggaacgctgagtggctatggcaacggcgtctacaataccaatctcgcgggcgtcggtttacgcctgaccactgctcaatcgggcaaagttctgccgtatgaagccagctatccctacaatgccgggggctcatgggcctccattcctggcgatggtatcaagggtgaactgataaaaaccggagatatcaccagcggtaccctgaccgacgggatgctggcgcgcgcctcggtcgtcaaccagttttactttgctaacatcacgctgaatggaacgaacaccgtcacctctgccgcctgctcggtaacctcggtggatgaaccggtccagcttggcgatcacaacaggctggagttcagcggcgtgggctacaccacggagtggaaggcgtttaatatcgtgttggactgcaataaaagcgcgcatatttatgtgcagattgatgccacaaaagatgcgtcgaatgcgccaggcgtgatggccattgattccgaaagcggcagtaccgtggcgacgggcgttggggttcagctttacttcgcgccggacaacagcgcggcgcagttcgggcagataaaggattattttacttcgccaaatggagggatggagaccattcagctcaaggctcgttattaccagacggcttcagtggtgacggcggggcccgccaatgccacggcgacgtttacgctgacgtataaatag

SEQ ID NO: 160499 - DNA, 1533 bp, Enterobacter cloacae
atgtcaggatctatgaccgaaaaaaggattgctgcacaatatttgcggatgtcgactgagcatcaaaaatattctccagagaaccaacgggagtatttagagaaatatgcgaaagaacataatattattatccagcatacctatgacgatgcggggcgaagtgggctaagcctggataatagacctggcctgcgtgccctactacatgatgtcgaaagcggaataataaaagtatccttaatcctggtttatgacgtcagtcgctttggccgatttcaggatattgaagaggctgcgcattattcgtggcttttgaagcgaaacggagttcgtattatttattgtgccgaaccgttctctgaagagcagactgaactgttcatgttggggctttcttattcccgctatggcgctgctacctacagtaaaaacctctcggaaaaggtttttcttgggcaggctaaccttgtccggaggggatatcatcaagggggaatgccaggatatggcatacggcgactactcatcgatgagcatgccaaaccaaaagggcaacttcttcccgggcaaaggaaaagtttgcagaccgaccgggtcatattgattcctggccctgatgacgaagttcaggtggtgaaccggatatacgacatgttcatcaatgatggcaaacctgagcttgttattgcctcagaactaaaccggaagcatatccccgcagaaaatggactacaatggactcggtgcaaaatccatcagatactgaccaatgaaaaatatattggtaacaatgtttataaccgaacctctggtcgcctgaaaacccgcagcgtcaggaatccacaggaacagtgggttcgctgtgatggggcgtggcaacccgtggtatcaatagacaaatttgagacagccaaaagcattattgagtccagggccgtacaatacagcgataatgaattgctggataagttacgtcatctgcttaaaattcggggaaggctttctgggatcatcattgatgaagaggaattattcccatcaagcagtatcttccgatccaggttcggggggttggtgagggcctacagccttatcggatacactcctcagcatgattactcttatcttgaaataaaaaaacagattgctgaacacaacctctcttttattgatactctggtgcaggatatttaccgctacggcggctggggctcgatacaggaagatggctctttatatatcaatgatgaattttccatttctactcatttgattcgatgtcagcgtctgtcgtccggtaaactgcgctggaagattaagttcaatatgttacatcgttacgattgtatgatattccctcggctggatagttccaataataccgtggtcgattattttattttccccgccatagatattttgcatagtgatttaacgcttcatgagaacaatggttttattctcgaactgtaccggtttgacgatttgtcatgtctggaacgtctggttaaacgaaccttgctggagttttaa

SEQ ID NO: 160500 - DNA, 888 bp, Enterobacter cloacae
atgaaatcttttgatgaaaaaatagaacttattgatatcagtgatatttatatagctaatccgcggagacggaataaatttatccataatgaaattaaagagaatatcaaaactattggtctgaaacgccctatcagtgttcggcctgtacatgatggagactataaatatgccctgatttgcggacaagggcggcttgaggcttacattgagtatggcgagtcgaaaattccggccattatcaaacacgtcgatgaggaaactgctcatttgatgagcctggctgaaaatattgccaggcgaactcctcgtgcggctgaactgatggaagatatccggagaatgaaaaccagcgggctaacggacagggagattggtttgcgtctggggtacaactccagttgggtaaacggcgtgattaccctgctttcatcgggagagaaacatcttttacgggcgtttgaaacaggaaatataccgttgtatctggccgtggagatctcccgctctggtgacgatgagactcaggagttactgaccacagctctgaaagatggacatatccggggtgggcaaattaataagatcagacgtattctggcacaacgaaaaaaaggcgacaaaggtacggtcagtacggcattttttccggggaagaaacagaaaaaactcactcctgaggaactggctggtgtttatcaggaaaatattaatgaacaaaaagcgattctcctgaagtccacaatggtcaaagagaagatactggcagtgaaacagatctttggccacctgcttaagaatgatgagtttgtaaatttgttgcaccgtaataatattcatgatgtcccggcattgctgggtgaaagtgaagttctggaggagagctaa

SEQ ID NO: 160501 - DNA, 888 bp, Enterobacter cloacae
atgatctcacaatgctttgactcccgtttctataccttcaaagtcgattctctggtttattccagatcattaccggtgaatgtaaaattcagtactaagtacaaacagattaaagcctcggttgaggagtttggattaattgaacctataatggtttatattaatgacatcagtgaaaaaatcattcttgatggtcatctgcgcgttgaaattttaaaagaactgggtattgaaacggcgcactgcctgatatctcctgttgaggatacctattcgtacaataaacgtgttgctcgccttactattgtacaaacccagaatatgcttcttaaggcagttgagtccggtgtaccggttgaaaaactatgcgcggtgctgggaattacgccggataccctgattggcaaactgaaaatctctgatgggattgccccggaagtgatggcgctactggcagaaaaaaatgtgccccagaccattttctctgtgctgaaaaaacttaagccttacaagcaaattgaaatggttaacacaatgattagtattaataacttcacgcgtaagtttgcgctttcgatgctacacgctgtttctgtcgaacatcttgttgaacccaaaaaagacggcagcagagagacggatatcaggaaaactcttgagaggctggaaaaagagatggcttccgttcaggtagaaacacaacatcttcaggatgagtatgcagaaaataatctccggctggttattattaaaaatcacattgaacgccttttggataacggccagatagttaactggctgtacgataaccaccaggaatacctttcagtgctcaagcaaatttcggggctggatgatcttaataatctggttcaaaaaactgaatga

SEQ ID NO: 160502 - DNA, 927 bp, Enterobacter cloacae
atgagtgaaaaagaacatgacataacaaacgacagcggagagagcgtaacgtacacgctgcggaacattcccgccgacattgaccgggtgatcaccgacctggcaactcacgcccgtaagccaaaggcgacgtttctgcgtgagttcctggaagacagcttccgggacgtcatcgacagtttcgccctgaagaatcccctcatcgcctccctcgatgacgagctggccagttatctgggcgccgaggtcatggagaaacgctaccagagccactacatcacccgctggaaccaggaataccagaagctgctcgggatctcgacggaagaggagcttcgccgggtggtgctgaacaacacgcccttcctgcacgcccgtgccgaccaggtgctgaagggctggtcacgcattccgcgcgggatctccctgaccttttccctgtttgccgagatcgccggccgggacagggaaaccattgaccgggcctggaacaggattttttactcgcagctgcaggagaaaaaacaccgcttttacagggatattgatgttattcgtgccctgaagaaacagcatgccgtctgcggctatagctggaccagggatgacatcaccgtgcgcatttaccgcccggatgactacggctacggtgcctggcgggtgctactggtactggatgaaagtgtcattacccagacgtggaacatcccgtttccggaacttgacggacgtcgctttaccactgacccgggctatgacgccctgatcagcactgctcccgacagctgggataaggccttccgttttgtggacgggatttgtgagcttcatctttacagcaatggcgtggaagaagatcagaatccgacccccctgccggccgtcgctgaggcgttgatcgaagcggtggtgcaccatctactgtaa

SEQ ID NO: 160503 - DNA, 1461 bp, Enterobacter cloacae
ttgctttgccacggaacggtctgcgttgtcgggaagatacgtgatctgatccttcaactcagcaaaagttcgatttattcaacaaagccgtttgcatttactgtttccttccacattattttcccagcaataaccattggtctggccagtttcctggccgtgctcgaagggttatggttaaagacacgaaatgacacttacaaggagctctatcacttctggtcaaaaatttttgcagtaaactttggtatgggtgttgtttccggtctggttatggcttatcagtttggtaccaactggagtggcttctcacagtttgcagggagtatcaccggtccattgctgacctacgaagttctgactgcgttcttccttgaagcgggtttccttggtgtcatgctgtttggctggaatcgtgttggccccggtctgcacttctttgctacctgtatggtggcgctggggacactgttttccacgttctggatcctgtcatccaatagctggatgcagactccacagggttatgccatcgagaatggtgttgttatccctgtagactggctgaaaattatctttaacccttccttcccgttccgcctgttacatatgtccactgcggctttccttgcaagcgctttttttgtcggagcatcagcagcatggcatctgctaaaaggcaatgatactcccgcgattcgcaaaatgttctctatggcattgtggatggcattaatcgtttccccgatccaggccgttatcggtgatgcgcatggtctgaatactcttgagcaccagccggcaaaaatcgctgcgattgaaggacactgggaaaataaacctggtgaagcaacccctctggttctgtttggcctgccagatatgaatgcagaagagacgaagtacaaaatagaggtcccttatcttggcagtattatccttacacacagccttgataagcaggtgcctgccctgaagagtttccctaaagaagatcgtcctaactccactatcatattctggtctttccgcgtaatggctggcttagggatgctgatgattcttctcggggtggtcagcgtatggcttcgctggcggaaacgtctctatacatctaaaccgttcctctatttttctctcttcatggggccttcgggactgattgcgttactggccggttggttcacaactgaaataggtcgtcaaccatgggtcgtttatggcgtacagcgaacgaaagatgctgtttctgcacatggcgatttacatatgtcaatcagcttactggcgtttctgcttgtttacacctcagtctttggcgtcggttatatatatctcgtacgtctgatcaaaaaagggcctgtacatgctgaggagcatcaggaagtaacggatggaacacctgcccgtcctctgtcagcggtaaatgagggtttggcaacacgtgggagagacaaataa

SEQ ID NO: 160504 - DNA, 609 bp, Enterobacter cloacae
atgacggccgcgaagaacgtcgccattaatgcgggcggggatatcagcatcggaacaatgggtaacatgacggtgctggcaggcgaaaagctggggctgtttgcgcggacggggcaactgagcctgaaatccggggaagggccaatagatgtgcaggcgcagaacgccagcctgcgactctttgcggagcagaagctgacgctgagttcagcgagtgacatctcgtttgccgggaaaaaacgcatcacgctgattgggggcggaagctacctgcggctggaggcgggaaaggtggagtatggtacgacggcgatgtatatgcgcaaagtgaagcggactatggcggcgggaagcagtaccctggggcagggaactgctgaaatgcccgctccattaccaaatttatcatgtggtccaaatacagcgtgtttcagggtcctggattccttaacaggttctgaagatatggaatttgcatatcaattacagacatctaccggtacagtggttggaagaactgattcagctctgacgcatgcaataaattcagataccgaagaaaacgtaaacctagactatgttttccagatcagagcggggacaaggtaa

SEQ ID NO: 160505 - DNA, 639 bp, Enterobacter cloacae
atgtttgagcagcgcctgaagccccttaacgaaaccctgctgttctctgccccggaaggcgttgccgtgaccagcggggagcacatgcagatgacagccacaaaaaacgtcgccgttaacgccggaggggatatcagtgccggtgtcatgggcaacatgaccgcgctggcgggtgaaaaactcgggctgtttgccagaacgggccagctgagcctgaaagccagtgaaggcccggtggagatgcaggcgcagaacgccagcctgcgactctttgcggagcagaagctgacgctgagctcggcgagtgacatctcgtttgcgggcaagaagcgcatcacgctcatcgggggcggaagctacctgcggctggaggccgggaaggtggagtacggcacgacggcgatgtatttacgcaaagtgaaaaggacgatggcggcaggggcaaacgacctaccaattgcgtcattgaagcagatggcaatgatcactcagtattacgacagaacgttaagtttctcttcaaatgtcaactatcgtgttgaaacagcagatggagaggaattactttctggctcgggtacaaatggatatatcgacaagagtgatagtgaatctgagtactgggtctttttaagctga

SEQ ID NO: 160506 - DNA, 600 bp, Enterobacter cloacae
atgacgatgttttcatcttcaggcttgcttcataagtatagtataatgacaaaaaagtccatacttgtaatgaatgcttgttctagtctatattgtaatgaactaatgcatgttcaaaataattatgatggcatcaatgatggcatcattacatatggctatattggcagtgttgcaagctggttcgattgggattttattagaaagttatcttcaagtcgtccccatagtcggatagtcatcgttgggcctttatatgctaagcctgaaagtattccaccaaatgtaataattaaacctgcaattgatcataaagatgttcccgctcttataaagacctttgattatggtttaatacctttccaattgaatcaactaactgattcggttgatcctgtcaaatattatgaatatgttgcggctggcgtcccggtgattacaacttgctttggtgaaatgaagagtcgagtcaatgataaggttgcagtcactttagagcagcacctttcaggtattgagcctgagattgagaaaccaatagtttgggaagatagattcacttttttaataaaagggtacctgggtgctaaggaattttaa

SEQ ID NO: 160507 - DNA, 333 bp, Enterobacter cloacae
atgtactcattgattggtgttttgaataccggtctacattgggtaatcttttttatttttacaaatataggttttttacaatcgttaagtaatttagttgcattctctattgcgtcgagtttctcatatgctatgaactctaaatttaattttaaaaagaagccaaaaggtagctcatatatattatttgttacggggcttggtattcttagtcttttaataggttcttgcgcagatagattcaaacttagtgcctttgtaactttaattgtcttttcgagtttaagtttaattctgggattcttctactctaaatttatagtgtttaaataa

SEQ ID NO: 160508 - DNA, 585 bp, Enterobacter cloacae
atgaataaaatatctttggtagttcctgtttttaatgaagaagatgcaataccaatattttatcgagccgtaaataataacgaatttttgtcaaaaatgaattttgagatcatttttataaatgatggaagtactgatagaacagaagatgttgtgacaaaaatcatttctgatgataaacgcgtcatgttaattaatttatctcgtaattttggaaaggaaaaagctctttttgcaggcttaagtattgtttcctcagatttcattgtacctatcgacgttgaccttcaagatcccatcgaattaatagaagtaatgtatgactgtctacagaatcaatcattagatgttgtactagcaaaacgagtagaaagaagtagtgatacttatttaaagagaaaaactgctgagttgttctataaaacacataataaattatcagatgtaaaactcgaagcaaatgttggggattttagaatgatgcgtatgcaggttgtacgctccatcacccaaatgagtgaatctcaattatttatgaaaggtatcttcgcttgggtcggttataaaactgcagttgttgggtaa

SEQ ID NO: 160509 - DNA, 1182 bp, Enterobacter cloacae
atggcagcgaaagtcactttttttcaggtcggcaatggtgatatgacatttgtgcgtttggctgatacccgaggaacatctattctgattgatgtccatattcggtcagttgctgatgatcctcgtgatgatactccagatgtagcttcagccttacgtagcagattgaaatatgatgataaagatcgccctttcattgatgtctttatgctgagtcatccagatcaagatcattgtggtggtttacgaaaacacttttggttgggaacacctgaagattaccccgatgatcacctgacgcgttctgaaagacgtatcattattcgtgagctatggtcttcacctttgatttttcgtcgccgctctaaaaatcacactctttgtgaagatgcccaagcttttaattctgaggctcggcgtagagtaaaatattggcgggatcatggttatgcattcagtggtaaccgtattcttattatgggtgaggacgtcaatggtaaaactgacgatttgagcgcaattcttattagagccggagatactttctctagaattgatgggcaaatgtcagatgtgttttctgcgcgtcttttggcgcctgcgccgcatgaagatgacgaaaaacttgaagaggctctttctaaaaatgagtctagtatagtcatgaatatggaaatactgccctcagtatactctcgtaaccctatgcgttttttaatcggaggggacgcagaagttctcatttgggagcggttatggaaccgctacgaaaatgatgttcaagtgctggagtacgatcttcttcttacaccccatcactgttcatggcattctctctcttattatagttggtcacaatggggggaagatgctcaggtgtgtaaggctgcacgtaatgctttgggacaagctcgtaatggtgcaacaataatttccagtagtaaacagatcattgatgacgattatgatcctccctgtattcgagcaaagcgggagtatgatgatattttagataatgttgacgggtggtttagttgtacaggagatcttaaagataaggccatcctcgaatttgaagtagctattgatggtaagttgataccagcgattgttggtgctgcttctgcagcagctagtgtagctactgctgccgcacctcgtgcaggtattataaatcaatga

SEQ ID NO: 160510 - DNA, 807 bp, Enterobacter cloacae
atgattgataaaactacacgtactggccattggggtcaggagagacgacttgaattcattgattttcgtttactatgggaaggtcgacttaaccgtgcagatatcactgagtttttcaggatctccgtaccacaggcttctttggacttagctaaataccaagaaattgcgcccggtaatatggtttacgatcgtacacaaaaaacatacatcgcaactgttgatttcaaacctttatttgcaagtttcgatagtaatcattaccttaatgagcttcttggacgtgaaaatggaatcgtggatcctgacgacagtttcattgggtgggtccccccagtcgccagccttcctcttcccgccagacatgtgcaacctgagatccttatcggattaattcaagccatgcagaaaaaacaagctttagttgtcgactatcgtgcaatgactaatgaaccggcaattcgtacgctatacccaacagctttcgctcatgatggtcatcgttggcatattcgcgcatactgcttcaagtctgagatgtttaaagattttgtacttggtagatttttcgaaatcgttgaatttgtttcacctccagcccttgttccacaagacaatgattgggatacatttattgatgtaattattggtccaaacccaaattacgatgataaaaaaagattatctattgaacatgattaccaaatgattaatggtgaagcaaagattcgcatacgtaaagcacaattatattatcttaatcgtcgtttgaacttgaagcagtatgcgcgaatatgccaacgatga

SEQ ID NO: 160511 - DNA, 558 bp, Enterobacter cloacae; identical to SEQ ID NO: 86000

SEQ ID NO: 160512 - DNA, 147 bp, Enterobacter cloacae
atgagggtttgcttctacaccgccaaactcataaaccagggtgtttgtcagggactcttttacgcgtttcaatataccgtgttttataacgctgcccccgccatagacaatcatgacctttttaccctgcgggacttcttgtgctaa

SEQ ID NO: 160513 - DNA, 312 bp, Enterobacter cloacae
atgccgggcattcgtgcgcggtattccgggagggggtcggtcgaagctcaggccacgcgatgccagccgctcctgcaggaaaggccggaagcaaaaaccgtgcagaaactcaaaccaggtcatcaccctgatcccgtccgggataaagccaaaacgtctgataatctgcgcccgcagatgcgcttcattattcacggtgaaggtcaggatcagcgttctccggtcctcactcaaccgccgtatcagcagcgtggtcttgcccgagccggcaaccgcaaatatcactctcttatccatgccagtgcctcctga

SEQ ID NO: 160514 - DNA, 975 bp, Enterobacter cloacae
  misc_feature (813)..(822): n is a, c, g, or t
atggtgaaaaaattcaaaaagttacttttagagttcattgtagcagttatgctttcgctttctataccgggtatggctatggcagcagatgctggagtccctggggctatgtgtcagtcagctggagtgtggcagggcttgattaagaatatctgttggagctgcatttttcccatgaggataatgggcataggggcagctccagaaggcgctgctccttcacgtccgggttgctactgcacagatcagaacggcgtaccggaaataggttggcaattgagcttctttcagccggtgaagattgtagaagttgtaaagagcccctggtgcagcccctttcttgaaggcacgatgcttcaaaaatcgcagtttgatattggtaaaagcaacacaaatcagccaatgacagcaactgaagccggattttacgatgttcatctttgggagttcccaatcatgacaatgctcaaattactgattattggcgagtgcactgctgaaccctatatagatgccagcctgacctatataagcgaagtggaccctatgtgggaaagtgatctgcttacactcgtcctgaatccagaggcagtagtttttgcaaacccaattgcctcaatggtgtgcgctgctgactgtgtagcagtaacagcaggaaaggataatctcgctgcatacttttgtgccggatgcgatggcaacctttatccattaaccggccacatttacgcaaatgatgacgctgtaaggacgagttcactgataacccagcgtcttctgactaaactacatcgccagggactccagcatctnnnnnnnnnngtgagaaaacgtgggaatactttacacctcgttcccagtatcggctttcaatgcttttcccaactcctgaggcgaaagggccggattgctgtcatcgtcttggtgattcggtacatgactggtcaacccttaaaggtgggcgcaaaaaaatag

SEQ ID NO: 160515 - DNA, 474 bp, Enterobacter cloacae
  misc_feature (448)..(457): n is a, c, g, or t
atgagagctccactcgatgtaaccttaaggtcaaacatcaagctatctcattcggcggactcgatagatacggtcacatacaaggtgaacggtgaagtaatacccagcggcaaaaattattgggctcaactgatctcgggtttaaaagaaaagaaatacgagattacaattgatgttgttagtaaacttggacagagaggttcagcatctgttgagtttgatgtcgttaaaaacgcagtgcctaattgtacattgagctacacggaaaccaacctaagctggagctttaccaataaatgtgatgatactgatggaaaaatggttagatatgaatggttcatcaacggcgaattaaggaacgttttcggtagtacggctacactttctaaaaaccttaaccgtggtaagcaggacataaaagtaattgcttatgatgatagtggagacnnnnnnnnnngttttcggaccggctga

SEQ ID NO: 160516 - DNA, 375 bp, Enterobacter cloacae
atggaaatcgacgccgaccagcagatcccgctgctgcgccagctcgacgataagctcacactcgcgtaccgaggtggcgagcggcttttccgccagcacatgtttgccgtggcgcagggcggtgaggatggattcggtgtggtacgggtccggtgtcgccaccgagaccacgtcgatggcttcctcctgcaacaggacatccagccgggtatagcccatcacgccgtaggccatggcgaggtcgtcggagcgttctgtgtcggtgtcacagatggcgaccagcaccgtgtccgggttatggcggtatgcattcatgtggtgcttgccgtagatacctgcgccgaccacggcggctctgattttgttcatcattga

SEQ ID NO: 160517 - DNA, 237 bp, Enterobacter cloacae
atgagcctaactccaattgatatggtcactctcgcccgaaggattgaggcgcttgagagcgcatttactgtggctcttcactcaatttcaacagcattaccatcagtcaaatcagatgttgtagagaacctgaatcgacacgctcagtcctatgagggtaaagattcttacattgtctctacaagtcgagcccttgttcagagaattgaaagcttgaaccctacagttaaaggctga

SEQ ID NO: 160518 - DNA, 264 bp, Enterobacter cloacae
atgagcaaattaacttgcaaggttggttacgttaatccgcgttatgtgagttttgcagattttcttcgccagggtcgtgttgatgtgttggcaaagcaacttgctgaacgtcttgagattgaagctggcagccagagtgaagccgttgatttcgtgaagcaggttcttatcgatatcgccgctgacgacatgggagtgaaaaacatcgacgagccacgggagagttggcgttcacaattcgacgtaaaaggagccgcccaatga

SEQ ID NO: 160519 - DNA, 195 bp, Enterobacter cloacae
atgagcaacatcgacaaacaggcgctgcgtcaattagccgtggacgcaaaagaattggcaatcatcaagcggtacacgaaaggtatcgaagcgcagaagaaattcatcgctgtaatgactccggacacagggctggcgctgctggatgagctggaagctaaagacaggcagattgcgtatcttcaagagtactaa

SEQ ID NO: 160520 - DNA, 549 bp, Enterobacter cloacae
atgcctgaattgaatgctcaagaaaatgaacgacttaacgtagcggatgaattatcggaattgatgcgaggtcgtcctttagacacaatccaatatgacaacttatgcagattcatgatctatttctcattatcagaatcgaagatctccgaaatagccgcaggatttggtagaactgatgacttagcgagaaaactgatcacccataacggttttaatcaagatgttatagatgattgttacgcttactttattgggcgttacagagatcagcctaacagcgaaaacagatttaataggttggcaccagctcgacatgttttcggtccccaaagacaaaggtttgtcgagttactccaaaaacaggaaccctctctggaagagagaattagttttgtttttaaggtggttttcaggttaagacataatctttttcatggcgaaaaatggtcatacaacttgcaaggtcaggatgctaatttttctcatgcagtaacagttctcctttcgacgctgacccttactcgcggcgaaatttggcatccttaa

SEQ ID NO: 160521 - DNA, 258 bp, Enterobacter cloacae
atgtccaaattcaacatagcagttacatgccaagaagatcgcgacaaggttaacgtagtcctcgcagcttcgggtgtggtgtacagagagcgcctgaacatgccggttatcgctgaagtggtgatgcgcgagcagcctcacgagtatcaggaattcttactcgagaggctgtaccattaccgcgagctcagcttgcagttgcccaaggtaagcgacccgcgttatgtagagatggctgagaagagttcgaagatataa

SEQ ID NO: 160522 - DNA, 486 bp, Enterobacter cloacae
atgaatacaaaatataccgatgatgttttgctctcggcccttcgaaaatgtattgcgttacgtgatgaattgaactctcttggttttaccgataatggtggggccattcactcagtggagcgagtgctggagttattgtgcgtaagacgaaaatattccctcacacatattaatagccttaaaaaatcacacattgctgaacgcactctaggggcttctatggccttatctgaaggtaaaagtgtacgaatagagcacgttcacccgataagggaatggaccagaagcgtcattgataaggttaatgccaattgctctgatgacgaactactgtcttacattgatgagaattaccgattggttcttgtttcaaaagacgaagctaggtctctcgacagaaaaaacagaagcaagatagaggtaaaccggctggaaaatgcaggattagttttggatccaaaatactcgcctatgggacagaaataa

SEQ ID NO: 160523 - DNA, 222 bp, Enterobacter cloacae
atgactctgtctgtagacggcatcaaactctatcgcggcaactttgcggccatcggccagcaaattcagccattgctggatgcaggccagtgctttcgccttcaggtcaagccgtggcgtgataagcgcagcctgtcgcagatcgcgctcagccacatgtggtacacggaaatcagcgactacctcatcgcccggggaaagaccttcgctacgcctgagtaa

SEQ ID NO: 160524 - DNA, 321 bp, Enterobacter cloacae
atgccgttttatctcttcttacgccgcctgcgccgctcccctgccgcgttttgcgggctgatcgccatcgcgctgctggtgcttattgccctgctagcaccgtggcttgcgccgcatgaccccaactggcaggacgccgccgcgcgtctgcaaccgcccaacgcgcagcactggctgggtaccgatagctatgggcgggatctgctctcccgattaatctacggcacccgtccggcactggggctggtggccttagtcaccgttattaccctccccgccggtctgctggtggggattttgtcaggctactacggcggctga

SEQ ID NO: 160525 - DNA, 1113 bp, Enterobacter cloacae
atgtcattaattgatgaagtaaatgatagaagaaaagagatccgcacagatggctatgctatttctattggagaatggctatctttgtacgaaaacggtgaaatcgacatacatcctgaatttcagcgcatctatcgatggtctgaagcacaaaaaaccaatttgatagagtctatattattaggaataccagtcccccctatatttgttagtcaaagagcagatggtgtatgggacgttgtcgacggtttacaacgactgtcaacaatatatcaattcattggacaattaaaagatgaaaataatgaactcattccgccattagttctttccggaacaaaatacttacctagcctagaaaacaaaaaatgggaaggtgagggtgaactcggcgataatgaccctaatagtatcggtcaaaaccttagacttacgattaaacgttcaaagcttaacgttagtattattttgaaagaaagcgatgaaaccgcaaaatatgatttattccaaagacttaacacaggcggttcaaggttaagcgctcaagaagtcagaaattgcattttagtaatgttaaataaagatttctactcttggttatcggagcttgctaaatttgacaagttcactgaatgtacagcattgagtgacagggcgattagtgaatcctatgatattgagttagccttgagatttattatattctcattaattgaccctattgatttagattctatgggtgatgtcggtgtatttatcactgaaaaaatgcgtgaaatttgcgtagatgatagcttcgacactacacattggggcgacttgttccgtcaaacattcacaatacttgctgattgttgtggtgataattcatttaaaagatttaacactgcaaaatccaaatattccggaggattccttgtctcacaatatgaagctgtttcgtatggccttgcatataatatttcaaagggaaccgctgccgataatgtaaatgatcttgtatctagcctttggtcaaatcaagaattcacggactggtccggttcaggaatgactgctacgagacgcctacctcaccttataccattaggtagagaaatatttaaaaaatga

SEQ ID NO: 160526 - DNA, 645 bp, Enterobacter cloacae
atgataaaaacaaaagaggaacttattgataagatcgcagcagaccatatctggagactgcgtgaaattaacgagatgagaaatcttaccctaaaagaatactcgtctccaatacaaaaacaagtgctatgccgcgcaggcatagcactaatgtatgcccactgggagggttttgtaaaaaaaacaggaacctacttccttgaatatgtttctgcacaaagacattgcatcgaagaattaaaaagcaattttattacacttattgtaaaagggagaattgatagtgctcacgcatcgaaaaaatactccgcattcgatgaagttacaaaatatattttaagcaatcaaaaaagtcgagctcgaatcccagtaaaaaatgtcgtagacacccaatcaaatctttcgactacagtccttaaagaaatactttggtgcttaggcctcgactatagtttatttgaatcaagagagaaattgattgatcaaaaattagtaagtagaagaaatcacatagctcacgggcaagaaattgaaataggattagatgattttcatgaaatggtagatgaagttctgggactgatggaaacgttcagaaacatgcttgaaaactgcaccatcactgaaggttacaaagcggcataa

SEQ ID NO: 160527 - DNA, 684 bp, Enterobacter cloacae
atgaacgctgctatccaatctatctgctacaacatttctcaacaccctgaaatacgcaacacaccgttgaaacgttcccatcttcatgaggtgatttctgctctcttaggctatgccagccatgcggcaatggttgaagaagacaagaagccacagcttgaatatagcctttctgaagcagaatatattgttctgaatttgcctcaaggtttggaaagagcgctgaagtttggcgtatctgatgatgcatttcgtatcttcatctcagaattaaagtctggcttgtctgcgaaggtatccgaatcagtggatgatttttatgatgaccatattcgggaaatcctcgaagaagagatataccgagaagcgtcagactctggggagatggctgagagtaacgcttacttcgaatcccttccagatatggattacaaccttacattcagtggtgatctttggaagtcggttgatgagtggtcaatttctgatacgggaacactgtcaggtgagtatgatcccgaaggtgatcgtatgtacaacgggcatttgcttaacgtccaaggtaagttaacgtttgcaaaagcagggcgttcaggacttatttttttagaagattataccgagtgctctacagcgcgtgattattcttggttggacgatgaaccattggagatggacgactga

SEQ ID NO: 160528 - DNA, 375 bp, Enterobacter cloacae
atgtttaacaaactcgcatactcagcagtcgccctgaccgtttcgcttggcaccgtgatgtcctgtcaggcggaagcgatgggcaaggattacgcgtcggccttcaaccaggtaaaacagattaacgctggcgatcttaacgtcggttatgtcgatatcgggccgaaagaggggcaaccggtgatcctgctgcatggctggccgtacgacattcacagctacgctgaagtggcccccgcgctggccgcgaaagggtatcgtgtcattgtgccgtccctgcgcgggtacggcaccacgcgctttatttctgataaaacaccgcgaaacggccagccttcggcaatggcgaaagatatcgttaatcgtaagcgttaa

SEQ ID NO: 160529 - DNA, 1185 bp, Enterobacter cloacae
atgattacgatccctcacagattaaaacagatactagaaagagaccagtttctctgtggtgaaactaacgctacagtcggtgcatttactccttggtttcatgacaataaacttatcttttttcctgagtatacagatcatggaacaaatcatttacaagaagttcttaataccgcatcaagtattataacagatgaaagttggaatctactttccccccaggatgcagccgctataatcatttcaatactcctgcatgattgtgcaatgcatatatcagaggatggtttttattcattaatcgataataaatatccatgtttaaattcaagatatgtttcacaggaaatatcatggagagaaaaatggttgtcgtatttggctgaagcaaggcgatgggatgggaaaaagttgaaattgatttttggtgatatgacaccaataagagaaatcccattagataaaaatgatttaactagaagagatagattgctaattggtgagtttttaaggcgtgagcatgctaatttagctcattcaatagcattgataggagttcctccattaaaagataatccattgaaattacatttatccgataaaaaactttgcgatttaatagggtttatagcaaaaagtcataatttatcacttagaacagcaactgacaaattaggtactgcacaaaaaagaagtgcttataatgtccatgctccttatataatgggagtattgaggatttccgattatattcaagtacatagctcacgcgcagaaaaacagttgttatcagtaaaaagtctgacaagcccaatatctaacggtgaatgggaaaagcacaatagcatacttgatataaatcaaacacatgaagatccagaggcaatatatatcgatgccgaaccacaaagcccaataatatttaaagcgttaaaaaatttattttcagacatacaaaaggaactagattcgacttggtcagtaattggggaagtgtatggccgtttccaatcattagaaagattaggtataaatattaggcggatacgttcgtcattagatgatgaaaaactttacttacgcgataaaaagcctagtttcattcctcgcccattaaactttagaacatctgatgctgagatgatctcattattagttgctccactttatggaaataaaccttga

SEQ ID NO: 160530 - DNA, 1404 bp, Enterobacter cloacae
atgaacctgaatattattgagaatttctttcttaacatcggagcttcatttagaaatagtgacatatggaaagagatgcatgaaactgatggccattctaatgtccatcgcactggtcgcttcggagtaggtctgctcgctgcatttttacttggagatgaaattcttgtagaaacacggcatgtaagtgaaccaaaaggccttaaattttcttgttctaaagatagcgaagatataagcattataccctttgaatgccctattggtactaaaattactatcaatttatctgagtttgcactttcagaattacgtaataaagcagaacaacaaacatgggactggtattgtctttcatcacctaaagtcaaccgtttaattcaaattgaagggacagagcatgtcttagatcaaaaaatgaaagtaccttcaagtggtgatgacatttctgatttacagtggtatcgaattgaacatgttgattttgatgatatattatggcgtcctgttcataatgaacggcttcgtcaaataatatgtaatgggattactctctctcaacgtggaatatatttcaggcttaaaaaaaatgattctcctgtagacattgaaataatttctcctgatttggtaatttacgctcaagatggcaaaatgccgatcaatttgacaagagacggattaacatctgaaaaacttcccttcaatgaagaattggtattagatatttcatctaaacttgctcaagaggtttacgaaaacttttatacaaagccttccatacttaatgcaacgcttgttgaaaaatttcataataataatttaaaatttacagacaagtccatatatagattggaatcagtcgccgatttgttctatttcaatggcaaagtatatccatcgaatcatgttatcatttataatctgaagccggatgcaattttcattgacgcaacgagcagtttcgataacattaactctatcaatgttttcaatagcttcaatagtgcatttgtttatgtaccatttaacttgtcaagacgttctagatcttcaaaaacgcaattcgttagatcctttttcgacaggaatatgtatacaaatagtattccttgctgtggcaagaggttgttcatcaaattaacggaagtggatgaaatattaaagccaggaagtttaccaaaaagtgtttgggcaaagctatcccttgaatggaaaaatgaaaagtggtgcataatgaaagtcggaaatgtgcctgctctcacaatcgaccctgacgacatattcgtaaaaatggatagcgacaatcagacaatgtttgcctgtttatattccaattgggaattggatcatcaaaaaccaagccattctatctttgctgaagcctggaaagcaatcacgtga

SEQ ID NO: 160531 - DNA, 735 bp, Enterobacter cloacae; identical to SEQ ID NO: 4868

SEQ ID NO: 160532 - DNA, 213 bp, Enterobacter cloacae; identical to SEQ ID NO: 4869

SEQ ID NO: 160533 - DNA, 513 bp, Enterobacter cloacae
atggctgttccatcatcaaaagaagagttaattagagctattaatagtaatttttctttattaaataagaagctagaatctattacgccccaactcgcctttgaacctatattggaagggcacgcgaaggggactacgattagcgtagcgaatctggtttcctatctgattggctggggagagctggtgttacactggcatgaccaagaggcaaaaggaaaaactattatttttcctgaggaaggatttaaatggaatgaattggggcgtttagcacagaaattctaccgtgactatgaggatattacagagtacgaagttttattggcacggttaaaggaaaataagcagcaactcgtggctttgattgaacgattcagtaacgacgagctttacggtaaaccttggtataataaatggacccgaggtcgtatgattcaatttaataccgcctcgccttataaaaatgcttcggggaggttaaataaactgcagaaatgtcttgcagaatag

SEQ ID NO: 160534 - DNA, 399 bp, Enterobacter cloacae; identical to SEQ ID NO: 71840

SEQ ID NO: 160535 - DNA, 483 bp, Enterobacter cloacae; identical to SEQ ID NO: 74995

SEQ ID NO: 160536 - DNA, 222 bp, Enterobacter cloacae; identical to SEQ ID NO: 74994

SEQ ID NO: 160537 - DNA, 1131 bp, Enterobacter cloacae; identical to SEQ ID NO: 74990

SEQ ID NO: 160538 - DNA, 810 bp, Enterobacter cloacae; identical to SEQ ID NO: 74982

SEQ ID NO: 160539 - DNA, 816 bp, Enterobacter cloacae
atgcagagtgaaattatcacacagaaaaatggaaaaggtatctttgaccgcaaggcttggttagctgagtccaaaaaactgtatttatcagcaaagctattgagaagtgaaggtgaacgaaataaaaacctttttaagattacagataagaaatctcccgttgtgcatgaatatatcgacatagcatcctcaactgataaaactagcaggttgctgctggggtatgctttcgaaatgttattgaaatctgcgattcttttaatgaatcttggtgcgcaaaaagatactatagacactaagtttcgcgattacggtcataaactggataggatggctattgatttagaattggcgttaactgttgatgaattaaaattattaaaaattgcgtcgcaagatattgtgcttcaggccagatatccgattggcaaagttgatgatacaagttatatatccgaattaaacaaaagaaatatacaactggccgatggcaagatttttgtgggtatgattgaactgtatgacaaaataaaagatatagttgccaagtttgataatgactcaacgaattgtgcagagtttaatgtgcttagagggagcgattttattctctttatgcgaaacggaggtgggctgtcatcaagagcaatagtaaactttgcggctcaattcccggagggtaataaacgcaagtcatatttaaaagaaattattgagacgcatgctggcaagtttgcgttgttatatacatgtcgttgggcttcattttcattcttcgaagacacgggcaaaaagctcatcccgcttgaggagtaa

SEQ ID NO: 160540 - DNA, 912 bp, Enterobacter cloacae
atggctggtcaagataaaaataagattcccgattggaaagctctcgaacaacttgttgccatgattcaaaagcagctttctcctgatgctgtagtgcaacacaatgtgatgcttgatggtatccagagcgaaactaaaaggcaggtggatgttctggtggaacagtccattggtcagtacaagatgcgtattgttattgattgcaaagactacgcaaatccggtggatgtcaaaggcgttgaagagtttcacgggttagtacaggacgtatgtgcgcatcagggagcgttggtttgtcctgctggttttactaaatcagctttgcggcgtgcacagaaattacaaattgcgctttaccgcccagtttctacaggcgaccataaatggcgggcggaagtgactgcccctgtattgtgtgatttcagaaacagtttcatgagttttggcattagatgttctgctcctaaacctctgctaattccgaatgagttttacaagttgccagtctacagcccggagaacgagctattgggtacggcgttagggcttgctcagtctcggtgggatagtggtgctttaccgagtgaaccgggagaacatgatgagttattgatatttgagggggttaaaactcaaattgataatggatacggtgataaggtggaagtcaccttaactcttcgcctttttgtaaaacaaaatctatatctcggccatttacctgttgaagatatcaatggattacaagatgagcataccggacacattgttactaatgcttttacgctgggtggtctcaaccctgatgaggttgaacgagactggcaacggatcgaggatatgggcacaattgaatttgaacccctcctgaaagttgttggctataactgctacggtattggtcccggatga

SEQ ID NO: 160541 - DNA, 564 bp, Enterobacter cloacae
atggcatccgttcacacactgattacaggctgccaggccgcgccggaagcgctggcggaacaggcgcagcagcgcctttccctgtgggacaactggctgcggccagtacaggcggacaaccccaccggcgctgaccccggctacgacgatgattttcagctgatgcgcgaggaggtcaataaactttccggggcagatgccgacctgatttgtacccttgcggaaaaactgctgaccaccaccacaaaagatattcgtgtcgccacgtattacgcctgggcgcgactgcaccgggagggtgaagcgggactggcagacggactggatctgctggcgggtttaatgcagcgctttaacacacagttgcacccacaacgcgaacgcagccgacagggggcgctggagtggctcgccagcaccagaatgctcgacagcctgtctctgtacccggaggccaacaacgctgacaccctgcgcattgccggtgccctgtggcttacggagcaggtggcggaaggcgccatccccggcgcgctgtatcaggcgctggaaacccggttatag

SEQ ID NO: 160542 - DNA, 315 bp, Enterobacter cloacae
atgtcacagacacaatctgcaattttcaccctgacacatccttttactaccgcttccggtgttcgtgttgagcaaattgagctgaagcggctcacagtcaaagacctgaagcaggtacgcaaaatcagtaaagacccggctgactgggatgaaccgctgattgcccgcagtaccggcattctcccggaagacctcgacaatatggatttagctgattacctgcagttgcagaaacgatttcagcaagtcactgggctgggcaagagcgacgaaaacgctgatgcaggcgcaggggctgctggcgaggtggtttag

SEQ ID NO: 160543 - DNA, 921 bp, Enterobacter cloacae
atgatttttcttcgaacaggaaatggcagcgaaaaagttgacgactgggcgttagtcacttcgagaccaaactttgttgccaaaatagcaaaaggcgatcatcagtttgaggagattattggttactataaatttaaggaagaaatccactgtggtttaacagaatgtaaccagccacatcaaatgggttacatcgtcaaaacctcaagcggtatagaaaccaacatcggcaacaaatgcggaaaaaacgaatttggagttgaatttggtgaaaacgttctcagtttcaataaattcatgcaactcgaaacgaaccgagaaattattagtagcgcaaaagataaatgtgattcatggcaaaaaaatattgaagcactacgaagcctcaaacctactattgattatctttcgtttgctatcgaaaaaagtaaaaactccaacttttcgggtaggcttggagctgcagaaatccgccttttagaaaaaacgcagactagcgttgtgacgctttcagaagttgaaacagataagaagaccagaaccattctttttgcgatgaataaacatatgcgggaatccggtgaggcaacgagcgaatatgacatggggaaagtatcattcagccacgtactgttaccagagaataatcttcgcaacttatttgtatcaataaatgaagatctcaaaacaattcgcgccattggtctatcaacagcaccaagccctgagattgctgaagttgccagaatcgccgacacaattgaagaacgaatcaaacaactaaaaaacctaaagcatcaagccggcaagttcttaactaaaaagaacctaatgcctatcgccaataaaataaaatactctacgacagctgaagaaattgagtttcaaaactttataagctttttaaattggcttaagtaa

SEQ ID NO: 160544 - DNA, 204 bp, Enterobacter cloacae; identical to SEQ ID NO: 24366

SEQ ID NO: 160545 - DNA, 3558 bp, Enterobacter cloacae
atgacgacgacaatcatcaaaggccgcggtaaaggtggcagcaatcagacccgaacacccgttgaagcaccggacagcattcagtccattgcaagggcaaaggtgctgattgcgcttggagagggtgagttcgctggcgggcttgatggtaaaaacatttttcttggtgactcatcttcctacacgcctcttcagaacgccgacggaagttataacttcaataatgtgaaatatgagttccgttccggcactcaggaccaggactacattcagggcttccccggcattgaaaacgaacttcaggtttcatacgagctgaaacaggctgtgccgtacgtgcgcgcggtttccaacacgcagctctctgcgctgcgaattcgcctgggatggccaactcttttactccagaaaaacaacggtgataaagtcggcacccgcgtcgagtatgctatcgatctgtcggtcgatggcgggccgtatgaaacggtggttaacggtgctgttgatgacaaaaccacgtcgctttatgagcgcagtcaccgcgtcaatcttccgaaagcctcgactggatggcagttgcgggttcgcagaatcacgccggattccacgagcgtgaatatcgtcgacaccatgcgcgttgtggccgttactgaaattattgacgccaaaattcgctacgttaacacagcgctgctgtatgtagagtttgacgcaaagcagttccctaatggcattcctcaggttgtgtgcaatccgaaagggcgaatcatccgtgtacctgatacttatgatcccgaaacccgcacttattctggtacatgggagggcgtatttaaatgggcgtggacggataaccctgcctggatttattacgacatcattctgaacgagcgcttcgggctgggtcaaagaatcgatgcgactcagatagacaaatgggaactttatcgcatcgcccagtattgcgatcaactggtaccagacggcaagggcggcagcgggacggagcctcgttttcgttgcaacgtttatatccaggaccgtaatgacgcctggaccgtacttcgtgatctggcgggtatatttcgcggcatgacgtactggggcgacaataagatgtatgtcctggccgatatgccccgggatgtgtggcacatctacaaccacgccagcgttgttgaaggaaaatttacctttgcggacccgagtgaaaccacccgaaacactgccgcgctggtgaactggtcagaccctgccaaccactacaaagatacgcctgagcctgtttacgatagcgatctggccatgcgcttcgattatcgtcagctcgaaatgactgcgatcggctgcaccaggcagtcagaggcaaaccggcgggggcactgggcgctgcttaccaacggtatcggcgaggtggtgaccttcagcacaggcatggacgtcccccctgttggtgaggtgatcggcgtggctgctaacgagctggccggaagaactatcggcggcagggtgagtgcggttaacggccgcaacataaccctcgatcgcgctgctgatgtgaaagccggtaacaggctgtttttgaatcttccgtcaggcacagctcaggccagaaccgtccaggccgttaacggaaacacagtcactgtcaccacaccctacagcgaaacgccggaggctgaatgtaactggggtgtggactctgacgatctgtttatagcgcttttccgtgttacgggaacgcgggacaacaacgatggcactttcgaagtcaccgggacgacttacaaccctgatatctattccgctgttgataccggcgcaagactggacgagcggccagtcagtgtcattccaccgggggttcaggctcccccaggagatattgtcgtagacagttactctacggttaaccagaacattgcgattaccactatgcgtgttgcctgggattctgttcaggatgcagttgcgtacgaggcggaatggcggcgtgacagcggcaactggattagtgtgccccgaacgtcttctctcggctttgaagtgcagggtatctactcgggtcgctatctggtccgtgtcagggcggtgaacgccagcgacgtttcatcagtctgggcgacttcatcagaagtgaatcttacgggtaaagtgggcaatccgccgaaaccggtcggcttcatcgcttccgataatgtggtattcggtatcgagctgagctggggattcccggcgaataccgacgacacgctgaagacggaaattcagtacagcctgaccggtaccgaagacgatgcgatgctgctggccgatgtgccttacccgcagcgcaaatatcagcagatgggccttaagtctgggcagattttctggtaccgcgcgcagctggtggaccgcagcggcaacgaatcaggttacacagaatgggtgcgcgggcaggccagcatcgatgtatccgatatcaccggtgcaatcctggaggacatgaaaggctccgatacgttcaaagacctgatcgagaacgcggtggacagcaatgcaaaaattgctggtatggctgacgatatcaaacaggccaacgatgaactggcgcaacaggcgcaggaaatcgccaaaaacgcccaggatatcgggaaggttcagaccagcgttacaaacctgtcgagcacggtcggaggtgtgtcttcttctctgagcgagcttgagcagaccgttgcgacggctgataccgcgctgggccagcgaatcgacagcatcagtgtgtctatggacggcatggcggggggagtgaagaactcagccatcgcgattattcagggcaacctggcgcaggtggccgcgcgcaaaacgctgtcggcatcggtcgccggtaacagcgcgcagctggatcgcattgatgaggtgatcgtcaacgagaaggaggcaacggcgcgttcgctgctgagtgtgcaggcggaagtcaacgggaacaaggcatccatcaacagcctgaaccagaccttctccgattaccagcaggccaccgccacgcagataaacggaatcacggcgaccataaacggacatacgtcagccattaccactaacgctcaggccatcgcgaacgttaatggtgatctgaaagcgatgtataacatcaaggttggcgtcgccagcaatggacagtattacgccgcagggatggggatcggcgtcgagaacacgccatccggcatgcagtcacaggtcatcttcctggctgaccgcttcgccgtaacgcaccaggccggagccacggtgacccttccgttcgttattcagaacgggcaggtgttcatcagagaagcgctgataggtgatggcaccatcggcaacgccaagatcggcaactacatccagtccaataactatgtcgctggctcagtcgggtggaggctggataagggcggtacgtttgagaactacggttcgacagctggtgagggggcgatgaagcagactaatcagacgattagtgtcaaggatgccaacaatgtgttgagggtgcagatcgggagaattacgggaacatggtaa

SEQ ID NO: 160546 - DNA, 234 bp, Enterobacter cloacae
atgaaaaatatgattctttgcctggcggtagcggtattgctctccggttgcgctggcgttattgagaagcagcaacccgtatgcaccggaacagccctggtcggcggacaggaaatcagcgtccagatctacggagtccgcaagcaaaacaatcagacgcagtaccgcgccggttatccctttaactggtcatgggtgagcgccaacacgttcaccagcatcacctgccactaa

SEQ ID NO: 160547 - DNA, 201 bp, Enterobacter cloacae
atgattaagaagaatttcagattacagatggaatgtaatgctaaaacaattgaggaccttaatagggaggtcggacagcttaaatgtgtcgtaggtttcctcatggctcaactaccgccagaaggcagagaagcggttatcaacaacctaaaagaatacgagttgaatgattcagctaaggaatttagtcagttcctttaa

SEQ ID NO: 160548 - DNA, 480 bp, Enterobacter cloacae
atgctcacgatcgtaagcaaacggttctggctccctggcatcgatgataatggcaccgtataccccctcctgttcctgcagaccggaatggctgtggtaccagtaagtcccgttctgcttaaccttaaaggtgtaaacgtaggtatcatcaggctctatgcccataaaactcagccccggaacaccatccatattggccggaagaataatgccgtgccagtgaatggacgtctgttcattaagacggtttttgaccttcagggtaatggtgtcaccttctttccagcgaagaacgggccccggcaggcctccattgattgttttggcctgacgctcactgcccgtgatattgacggccgtttcaccaatggtcaggtcaaactgagtaccctgcagggatgcggcaactggcaggctcagactggaacgcgcattgaaactccatacgccaagacttccggctacgccagagagggttaa

SEQ ID NO: 160549 - DNA, 207 bp, Enterobacter cloacae
atgtgcctcgtgtttaactgtccaactttttggggtcagtacaccctgaggctccacaatgacatcataggtttcggcaacggcaatcctgaattcgtcaacggtaaccgggtttacatactggccatctgcagccacgaccgtcattttcagcccggggatacggatatcgaaataggtcattgccgagccgttgataaaccgtaa

SEQ ID NO: 160550 - DNA, 462 bp, Enterobacter cloacae
atgggagacactctatttcaagcatttgcaatgccgtcggattccacacggttagctcacaggaataggccatcttatcgggccatgatggctgaacagcaggaagggaaagattggatcactggggccagacttacagttccatgcatcgaccacgatcacgagaccgggctatgccgcctaatcctcaatcgtgccacgaacacgtttgaaggaaaagtcagagccgttttactggctcaagggtggccccctcaacggtttgctcaaccgctatttgatgcatggcagagccacactgaactcaccccgattctatatgaaatagctctggcggtctggccctacctaagctgggaacgcttcctaatgtacatccgaaatctcgccgtttactacgggacagcatgggtgtactacgaccatttgctttatgaaaagccttcaacaacaggacactaa

SEQ ID NO: 160551 - DNA, 432 bp, Enterobacter cloacae
atgaaactaactaaagagcaaacatccctcatccagcgtctttatgacgaacgtatcacgcaagcggaaaaagtagccttgtccgaagtcagcaccaccatcgtcttcaatgaggtgttcccgctggtcatcactaaggcggcagcttacctggacaacggttacatcctcaatcctcaggcctgcaaccattatcaatcttcgcctttcttcgaggtgagcatgttcaaaccgacgagtctgcttgagcaagagcgtacagaggccatagcggcagcgtctgaacttctgaagctggaaatcactgccgaagtgcaggaaatcgttcgccaaaaacgtcagcgtaatctggaaatcgcagcagcagaacaggaagccaaagacgcaatcactactgagcaagccattctcgcagcgttcacggaggtgtaa

SEQ ID NO: 160552 - DNA, 393 bp, Enterobacter cloacae
ttggaaaataaaaacttagcgtcaatcgacgtaacggactccgcacgtctgcgcggcaaggttgaccacaccacatggcacgcgtgcaaatcgcggctaaagctactgggcctgccccagacaccgaaacgaatcggcttccttctctggctggaacaccagcaacatcacgtcttcacctttgaagagtacgtggagagatggggttacaacaacgcccatctgcatctcaatgagtatgaaaaaagcggacttatccatcatcgcgacgagtattttctcagcgaaaccgccaccagcaccgatagcccattccgctgtaagtgctgcaaatccatcaatctgaacaaaatcctaaaagcaaaggagcgcattattaatgaaactaactaa

SEQ ID NO: 160553 - DNA, 1407 bp, Enterobacter cloacae
atgatgaaaaaactctcccagcgtgacattgatgcttttgttgccgcacaacatgcagagatttatggttatgttgagaatatcccctctgacgctcgccagcgaaaaataaggggagatgtaaccccaccactatcaccagatactggtcgggcgttcgcacagttttttcaagagttctatgaagatcaactcttcaacggcgaagcatccccgacggaatctttttttcttgagtctctggctcagcgtttcgatatttcaggtatggaaagtgccattgtcgcagcagcatccaggtacgacattcttttgcatcagtcgcagaaggccaatgcagcttttctgagtaaagatttttcgacgtactcccagatcctcgccgatatgaaacagaaaatctctccacctgtcgcagtgtctccggttgaagagcctgcgccagcgatgacattgcaagaggcatgggatggttttctggtgttcaaatcagattggaaaccgaagattcggaaggggaacgaaaagtacttcacggttatcagggaagtgctgggggctgatacgccagtgaacaaaatcacccgtcgcgatatcaaaaacttgctcgaagtggtggagggtctaccccgtcagaacaagaagccatataacaagatgacggttcgagagtgtttagatttggatgagattcccgaggatgaccttgtagcaccgaagaccgtaaaggattatttaaagctatgccaggggttgttctctacatacctgacgtcagaaattgatattttggcagcctcgccgacgctaaacgtccattatgaggcacagagcaaaagttatggtcactatagcctcaccgaaatgcgaaagctggtgacctatttcaggtctctatctggttggaaaaaatggatacctcttcttcttgcttatactggtgcaaggcgggcagagatagccaaattaaagcgttcggatattcgtcttgatgatgattctcaacggtactacatcatgattgatgataccaaaaccgaggctgggacaagacaagtcccactgtcccttagtttgattgagcatggctttctggaatatgctgcgggattttctgcggatgattctattttcccggagatcacaaactacaaccagatcacccgatttttccatgatactcgggaagcacttgagatcccttatttggatgattacaagcgtagacgtatcgtgcatagcttacgtacgactctgattactgaggccactaaaactaatgagcgctttcttgtgcaacagtttgttgggcatgagcatagcaactcagggcagatccaagtttatacccgcaagtaccttgtgtcggatttactcactgtagttgatggcatttgctgggactaa

SEQ ID NO: 160554 - DNA, 210 bp, Enterobacter cloacae
gtgaccttctcagcagagccttcaagcggtaaaggttctgtagaggtagcggtttacgccgcggttgaatccgatatcgctgaaatcatcgacggcgaccataaagagttcatggccgagcgggggctgaaccgcgtgatccgcgcgggctatgagctgctcagcctgcaaacctacttcaccgcgggcgtgcaagaagtgaacgcgtga

SEQ ID NO: 160555 - DNA, 684 bp, Enterobacter cloacae
atgaagctgtttgcggcgaagggaaaggtggcaatccaggcgcaggatgatgcgctggaggcgacagcgaaaaaggatatcaccgtgaccagcgtggagggccgggtggaaatcacggcggcgaaggaactggtggtgaactgtggaggtgcctatattaagcttagcggtggaaacattgaaatagccgatccacaaaacatcctgttcaagtcaaccaactggcagaagatggggtctgcaagcttgaataaatttccgccacgattgccaggttcctctggtaaaaatccttcagatgcagatattccgccacagacattacgcatcaacgtaccgcaagcaccaaacgcaacggacatcagttgggctggaatgccttacaccctgtatgcggatggcgcaatcgtaaaacaaggcgtgttggataaaaccgggaaggtggatgttgaccacaagcctgaaacgcaaagttaccggatggaaatggctaacggtgttagctatcagatccccatcgtgagtgcttaccgcaataaagaacaaggtaaactggctaatcgtggcctgcaacatcattcttcactgcctgactccgatattaattcgccggcctcgcggacggagcaccgcaatttatacgatgaactcctgaacggttccggtaacaaggacgaacgctaa

SEQ ID NO: 160556 - DNA, 1893 bp, Enterobacter cloacae
atgagtcaaaacgatattatttcccctgtcgcgactgttgataccagccagtgcgccatcatcaccccgtggtttgttgagaatactgagtaccctccagtgcaggcgacatatatgccattggtcaatggcgaagaagctttccgggctgtacatgaggccattgctaatgcaaaaaaaacggtcgacatcatctgctggggattccagccctccatgtattttattcgtgatggtaaagcgccctgtattggcgaactgctcgtcagcatagctaaagagaacaatgtacaggtccgtattctgggctgggaagcaccgttcaactccgcaggtgctgctgctggtgagtctaatctgcccggaaaagatatcatcaggtttggtgaccgaaacgggcaaagcgctgacgataagcaacatgcctatgatcgggagtggttttccctgtactcaaattccggggagtggataaaagccattaatgggccaattgtaagtcccgcgcaacctgcccgaaattcgccaatactgacccctgtatttgtcggacgcggatttgatttacttgagcgtgcagaaattgcttaccaggagttgctgcacagtgttgacagcggactctccggcatgccagcggcttatatggctatcgctccaacgcatcatcaaaaaacggtgctggtagactatgaattgccggatgatgctgttggttttgtgatgggtcataacatgctggatgaatattgggataaggatgaacactcatctaaacgccgtcctcctgcgttaggtagagagtttcccgacagggatacatgggcacccaatttagggccacgcggtaagtggccgcgacaggatatgtcctgtcgggttaccggccctatcctggaacaccttcatcaaaactttgcccgggcctggaaccgggagacggaagaaaatttgcttctgtcgcgcaatgccaaagctgttgctaaaaagctcaaaccccgtgcggataacggcgatcttgtgatggcccaactctttcgcacgcaattgcgggaagggaaacgagatatcgaaaagctttacctgaaagccgttaataacgcgacgcagtatatctatattgaaaaccagtattttcgttggccaccgctggccgaagcgattaaaaaaaatataacagcccaaaagaaagccgggcgaattcccgaaaaagacggttatttatatctgtttgttgtgtccaatgttacggatgaagggatgggggacggcacggcaaatacacagcgcatgctcgacagcctggggcgcggagatacaatccctgaactgacccgactgcgtcggatggatgaacttaaagccaaaatggacgaaccttcgccttatccggcgttgtcggatgaaggtattgcggaaggcttcagaaagcgtgctgaatatgaaaaagccgtcggggaactaaaaaataaagttgctgatgatttcatgatccccatagacgggttgaaagtacatatttgctcgctggtcgccaaagactctccaccagaggcgtggatgccaacgtacgttcactccaagataatgctgattaacgatgttttcaccacacacggttcagccaatatcaatacccgcagtatggaagtcgacagcgaaatgaatatcgcccatgaatgcgcaaaagtgacaaaggccctgcgaaaacgtttatggaatatacataccagcgggcagggtgttcaggatgatcctaagaatgcgtttaactcatgggactatctgcttaatcgaaaccatgataaccaatatggagcagagaagaaaaagccagaagcccccctcattaagtttctgtacgataaaacgacgttaaaggacaaggactga

SEQ ID NO: 160557 - DNA, 1284 bp, Enterobacter cloacae
atgcgccgactgttattgctgtcctgcctgatgctggcagcctgcgacgggggcagcgccccggccactgtgaacaaggatttttccatgaacccgctttctgatatcaacacccgcctggcctttacctgtaagcacgaaactatccctgccccttcagcggataccgatgtgctgttcaagtatgcccgctggctacaggtcaataacaggctgaaagaagataaaaccgtggacgggcaaatcgaaaggctgtaccggattgcggcggctaacgggcactacaaagccaatattaacctgcaaaacggggccatgcgcgggcagttcagcctcaccggcgcagagcacttacggatgagtcagcaactgattgatgcccgcgtggcgaccggctactactttgttgccatttttctgaaaaacggggcggcaggtttacagcaggatacggacatggcgttacgctattaccgcaaggcggctgacgagggcggcgctcaggcacaggcgtatgtggctgaaaaattgttcatggctggtacggcatatgatgttgcagcacaaatgcgtcgctgtgcagccgaacaaggggagggggcggctgcattgaagctgggcatcaatttacagggtaaaggactctatcaggaagcagtcgaagcttttcagttaggggtagcagcaggtgatgagacttctgcttacgctcttgagaagggatttgaagggccggaacctacagacagactctatcatctggggcagcagaaagatctggagcgtgcccgtcgttacaaacaaatcggcgacatactgagccgttactcctaccgctctcctgccgtcccggaaatcaacgatatcgtgccgttacccccggctccgttacccgcctgggatggcaaagtgaaatggctggaagcctataacgcgaatatcgagccgccaaaacctgatgaagcgctgattgaacggctggcgaaagacagacagctaaaccccgcgaccggcagaccgctgccagcctccccggactttgaaaaaaatgcagccattgttctgctgtgtaaaaccggtgaaccctgcccaaaaagcggctactggcaaattgcccggctaccccgtgagggcgtcagccagaacgccattctgatgtttaaagagggtgacatcatgcccgctgacgttgtggatatttatcgcgcccgcccctggccgtttagcgataaacatgagcagcaggaacagcacgtcgagtggcgttttttaaccgaggcataa

SEQ ID NO: 160558 - DNA, 1281 bp, Enterobacter cloacae
atgcgccgactgttattgctgtcctgcctgatgctggcagcctgcgacgggggcagcgccccggccactgcgaacaaggatttttccatgaacccgctttctgatatcaacgcccgcctggcctttacctgtaagcacgaaactatccctgccccttcagcggataccgatgtgctgtttaagtatgcccgctggctacaggtcaataacaggctgaaagaagataaaaccgtggacgtgcaaatcgaaaggctgtaccggattgcggcggctaacgggcactacaaagccaatattaacctgcaaaacggggccatgcgcgggcagttcagcctcaccggcgcagagcacttacggatgagtcagcaactgattgatgcaagagtggcgaccggctactactttgttgccatttttctgaaaaacggggcggcaggtttacagcaggatacggacatggcgttacgctattaccgcaaggcggctgacgagggcagcgctcaggcacaggcgtatgtgggcgatatactggctggagggactggaaatgtaccgaatattgcgcgacagatgcgccgttgtgctgctgaacagggtgagggagaggcagccagtgatcttggcgttaatttgcaaggtaaagcacgatatcaggaagctcttgaagcctttcagttaggggtagcggctggtgatggaagttccgcgagatttttagcaaatggatttagcggtcctgaacctacagacagactctattatctgggtcagcagaaagatctggagcgtgcccgtcgttacaaacaaatcggcgacatactgagccgttactcctatcgctctcctgccgtcccggaaatcaacgatatcgtgccgttacccccggctccgttacccgcctgggatggcaaactgaaatggctggaggcctataacgcgaatatcgagccgccaaaacctgatgaagcgctgattgaacggctggcgaaagacagacagcttaaccctgcgaccggcagaccgctgccagcctcaccggactttgaaaaaaacgccgccatcgttctgctgtgtaaaaccggtgaaccgtgcccaaaaagcggctactggcaaattgcgcggctaccccgtgagggcgtcagccagaacgccattctgatgtttaaaaagggtgacatcatgcccgctgacgttgtggatatttatcgcgcccgtccctggccgtttagcgataaacatgagcagcaggaacagcacgtcgagtggcgtttagttgcatga

SEQ ID NO: 160559 - DNA, 279 bp, Enterobacter cloacae
atgcaccacctctgtctgcgcgtcttcctggagggtaaaccagtaaaatatccccacctccgccagcaggcgctgaataaatgccaggtcgctttcctggtactggtttacctgctcacgcttcgggtagctctgtctgaggttgaactcgtattcccagccgtgcagaccgtgctcctgcaacacctgatccaccacctccggcaccgatttattgacgaagaaacggtggctgcggaactgtttattcagcagggaaaggaagggttcgagggttag

SEQ ID NO: 160560 - DNA, 621 bp, Enterobacter cloacae
gtgctacaggcggatgcgtacgccgggttcaacgagctgtaccgcgatggccggataacggaagccgcctgctgggctcacgcccgccgtaaaatccacgatgtgcacgttcgcacgccgtcagccctgacggaggaagccctgaagtgtatcggcgaactgtatgccgtggaggcggaaataagaggaatgctggcggaacaacggcttgctgaacgtcagcggaaaacgaaaccgctgcttagtaccctggaaagctggttgcgtgaaaaaatgaaaactctgtcgcgacactcggagctggcaaaggcgttcacgtacaccctgaaccagtggccggccctgacgtactatgcagaaaacggctgggccgaagccgataataacatcgctgaaaatgcgctgcggatggtcagtctgggtcgtaaaaactggttgttcttcggctcagaccacggtggtgagcggggagcgttgctgtacagtctgatcgggacgtgcaaactgaacggcgtggatccagaaagctaccttcgccatgtccttgacgtcatagctgactggccggtcaaccgggtcagcgagctgctaccctggcgcatcacactgccaactgaataa

SEQ ID NO: 160561 - DNA, 279 bp, Enterobacter cloacae
atgtcatctcttgattctgaagctaaacccgataatgcaggtcacagcgtactggctttaacaacctctcatagcctggtggttagctcttctgaaacatttcttccagatatgcgcaaagagctcggcattatcgcggatcttgttgagtcctataatgatgaactctgcttgttgaaacacatggctgtccagttcaaaacccacaatcaccagaaactttattcttatctctcaggctacaaccacagtatctctgaagcggatgggctttgttga

SEQ ID NO: 160562 - DNA, 504 bp, Enterobacter cloacae
atgatcgaggcgggcataaaagttggccgtctctgctgccggatcgattttgtcaccgcgcgccagatggcgcagccggtagtggtagacatcaccataggccaccccttcaccgtctccccgggtcatatccgctggtgccgacagcagtatgctctgtgcgtcccggtggttgtaatctttcgtggtgacgctggcttccaccacgttatgggtgatgttcaggccccacaccgagtcatccccgctgtcgctcatcccggacggactgttgactggcaaggttttaccaaataccaacgcccgctgcgcatcggcaaaatgcaccacttctgtctgcgcgtcttcccggagggtaaaccagtaaaatattcccacctccgccagcaggcgctggataaacgccaggtcgctttcctggtactggtttatctgctcgcgctttgggtagatctgcttgaggttaaattcatattcccagccatgcaggttatgctcctgtaa

SEQ ID NO: 160563 - DNA, 669 bp, Enterobacter cloacae
  misc_feature (624)..(633): n is a, c, g, or t
atgattaaaaaaaagggcttaggcttcaacgcaattacagcattgatcatgctcacgacttcgaactgcgtaatcgctgaagaataccaattgccagcaacaattaataacccggttgtaatgccagttggtgctgacggatttcagaatggagctgcaaaagccattattccgggtcaagctggttctgaacagtcaggtgcacaaacaaaccttagtgaagccggtaatgcgcagggacaaaaacctacaactgatctccctaccgtgcaactttccccagccagcaatgcttcgcctgcggtaagcgctattactggagcattatcaaataatcctagtctccccggatttgacgcacagacccgatctggtgcaattgatagctatgggagaccaacaggtacctcttcccagcagaatgcaaccaatgcgaccgccacgtcaaaagccgatgaactttatgtcgaagctcgtaaccgatataaagaagttcagcgtgtaaatgtgccgcctggtgggaatgtggtactgccagtttcacgaggacttcaaaacagaatatcgaccagcttcaagaatgcttctgtcagtacttctacccctgctgaagaggcaagcatnnnnnnnnnnaaaagaagctgcgcaatctctctatatttattttga

SEQ ID NO: 160564 - DNA, 489 bp, Enterobacter cloacae
atgaatgaagagatcacggttgttggtaacaaagcatcggaatcttataaaacacaatgggctctcttttttagtacccttttagggaatattaatccaactaatatttcctttgtgacggcctatgtcctcgatgccctttcacctgaactacaggctaaaacgagtgagtctttacaggagcagataaatatcatgcaggctcgtggtgttgagcagacctttaagcctaatgatatttactttgatccaaaaaatgacatggtctatgtctggggtaccaaaacgactcgacttgtaaatgttccggacaaaactgaatcatcgaaatggacttatgaatgggttctcgggatgaaaaatggtcgcccaagaattgcatatgtaaatcaatattccggaacaccgaatattaaaaaaattacgataaacggcaaagagcaactggcaacgctggataatccgccaccgtctacaggtaacaagtga

SEQ ID NO: 160565 - DNA, 600 bp, Enterobacter cloacae
atgtctcaggcagaattaaacagcgaactgattgccatcgtagccggtgatgtcatcgtatttaactatgacggtgaaacgcgagaatacctgtcttcgtcagttgagtatctggcggcaggtgtcggcatcccagccaattcatgcgtggatgcgcctgacaaaatcaaagacggctttactgtttgccgaacggcagatggcaaagcctgggagtatgttgtcgatcatcgcggtgaggttgtttacagcacaaaaacaggcgagaaaatttccatcaccgtaccgggtgattatccggaggataccactacgcaggcccctggcacactctatgataagtggaacggcagcgaatgggagaccgacacaaatgcacagcacgctgcggctgtggaagaggccgaacagcagataaacgcgttgcttgctgaggcaacgacgattattgctccactggcagatgctcaggctggaggctatatcgatgatgctgacgtgccacgcctggctgaatggcagcggtaccgctataaactgactaaagtcgataccagtaccgcgcctgccattaccctcccaacaaagccgggggtatag

SEQ ID NO: 160566 - DNA, 357 bp, Enterobacter cloacae
atggcaagaccacccaaaccgcccgcctaccttgatgaaatcgcggcgcagcagtggaaagcaaaggcgaagcagctggcggagcgcggggatctgacgcctgccgactggaacaaccttgagctgtattgcgtcaattactcgatgtaccgcaaagccgtggaagaccttgccacgcggggatttagcatagtgaacagccagggcggtgagagccgtaacccggcactgagcgcaaaatcggatgccgaaaaaattctcataaaaatgtcgtcgctactgggctttgatccggtaagccgccgccgcaatccggtagaaacggaagaggaggacgagcttgaccgtctggaatga

SEQ ID NO: 160567 - DNA, 153 bp, Enterobacter cloacae
atgactgagcaggaacagcagcggctgattagtgggctgataaagcagcgcgaggcatggcaaccaaccagacagagagcgcacacgaagcccgtagtaaagcgcatgagccagcgtgaccgggagcttatggaatgcttccgcaaccgctga

SEQ ID NO: 160568 - DNA, 591 bp, Enterobacter cloacae
atgctaaaaatccttgatatgccattagagcttcaacgtttgattagcctaaatctaatcaaaaaaacgctcgccattgaaataatgttaaaatattccaacgatcacaaaatggttttaaaacatatagaaggtttcttacctggcgttaagaatattgagactacaacgagcaaaattgtaggcatacctgaacacaatgcagctggagcaggaccagacaccttaaataaaggcggaccagaaaagaaaaattcggcagtcacacgtaagactttgggtattaagcgcctctcgcataagaaaacagaacggctaaaatctgaatttcttgagcttgtggaaagtacacatacggaatctataacgaatactcaaacagaactaaaatttggtagagatagtgcacacttgttcaaaaatgttgatagtaaaaatgtaatattttctgatgatggtgttcaaataatcttgaatgatgaaaagctaaatattttattgtctttacttaacgacgaaaatacagcaatcattctttctaaaccaaaattagaagagcttctggaaattcgagatctccttaaggaataa

SEQ ID NO: 160569 - DNA, 897 bp, Enterobacter cloacae
atgacaccgattgctatttatggcttttgttttacaaaagagatcccgtttgaaggtggggtactaacgcctcgcttcacctcagctcatgaactgataaccaacaattgcgacactactaaatatgttttaactggattttttacgccatctccatctatttacagcgatattactcaaactattttcgacctagcagcagttctgagtttcatagaacaaaaaaatgtcattttaggaggctctctggaagaagatgaaacaccttttaactttagagaaaacttaccattagaactaacccctcgcagaaacaaagggccagggaaaataattatcgaagactatttttcatcacatagccgtaacgagttcattcaaatggcaatgagaaaactcaatgaaaatgtacatgccgatcaaaacccctttagaacagccttttttaaatccatgttttcttttagagaaaaaatggattatgccgatgttaaatattttctcaacttttcagcacttgagtcattatgtcgatacattcaagatgacaaaagacccagcaaaacccctcaaataataacaacaactcttcagaactatggtttcaatgtatctaaagagaatgacccaacacctcagagaaatatcatgaattattgcaagctacggaattctcttttccataacggagagtatattgcatacgccaaagacagcatttgtagcagcattatcaagttaagcgactattcctccaatctaaatttgcttctaccattactactgattaagcacattggttttgacgacgggcttataaactgggactcatggtacgaccacaatccattcattagcttaaggccacatggaaataatattaatttgcaaatgtag

SEQ ID NO: 160570 - DNA, 147 bp, Enterobacter cloacae
atgcgatacgaacacaacactacccaaactaagggtaagattgatttcaaagctatccatgacagcaaagtcgagatgatgaagcgttttatgactgctaaagctgatgctgagcgcaaaggtgaagtggtctttaaaccactgtaa

SEQ ID NO: 160571 - DNA, 537 bp, Enterobacter cloacae
atgcattcgcataggctagtaacgccaggcttagccaacttcggcgaactatcatatttagatatagagtttgtgttttctggtgctccagagcgcaaagctacgtaccgtttagtgttctgccctccttcattagatcctgttgcagcggaaacaatgcatagaatgttaggaaatgaagtgtccactctatgtgtatctgtagttagttttgctgacacagtacaacttgacagagaacaggagcaaagagagaatccagttgaaggtgaagaaccgatcaacatgtttgctaaaccggaaggtgcctttgatcttgatatttctgagctacagtatctttacggtacattagttgacttcatgattaaagttgcagacaatgaaggtatccaaattttgtactttgcggctgaacgcgaagaacttatgtccacatacgaaaggtatgtgaagaggctaacgaagactcgtggcctaacttacgttaatgacggagcttcctatgcgatacgaacacaacactacccaaactaa

SEQ ID NO: 160572 - DNA, 735 bp, Enterobacter cloacae
atgagcatttttctgtataacgaaaattgctttgatgcatttccaaagatagaaagcggtagtgtcgatctggtatgcgctgatattccatacggcacaacgcagtgccgctgggactcggtattagatttacagctgatgtggaaagagctttatcgtgttgcgaagccaaatgccgcattcgtattgttttctgcacaaccttttacctcagtgctggtaaatagcaacctgcgcgcatggcggtctgaatggatttgggaaaaagggaatgcaacggggtttttaaacgccaagaaacaaccgttaagagcgcatgaaaatattgaggtattttatcgccatcagccgacttacaacccgcagtttacccataatcatcagcgccgcacatcaaagcgtaaaagtgtaaattcacagtgctatggcgaagcacaaagcctaacgcagtacgactcaaccagccgttatcctcgtgacgtgcaatttttctcaagcgacaagcaaacagctagttatcacccaacgcaaaagccgttggctttggttcaatatctaattgaaacatacagcaatccgggggatttagttctggattttactatgggtagcggtactgccggtgttgcctgtcagaaatcaagtcgccgctttattggcattgaaaaggatgagtctatttttcaaatcgcttgtgagcgtctgaattttaataaatcggagtatgcagcatga

SEQ ID NO: 160573 - DNA, 237 bp, Enterobacter cloacae
atgacccgtaaactttcaatgcgcccgtcaatcaatctcgtaatttcggaaccatacattactgtcgaagagttctgccgtcgcactggttataaggaagggaccgttcgccagatgtaccgtgagaaccgtttgcccatcaggaagaaagagggcttaaacgggcttatcgaaatcaacatggttgctctcactattgaagctgctgctggctgcgaaatcatattgcaggcctga

SEQ ID NO: 160574 - DNA, 594 bp, Enterobacter cloacae
atgaaagattttacgagtcgtaaagcaccaactttaccagagggtggtaaagacccgattgagcgtatcgttcaggcatacggcttttcatctcgacaagcgctatgtcggcacttagatgtttcacagagcacgatggctaaccgcataatgcgtgggaactttccggctgattgggttctgatctgctcgatggaaaccggtacttctcttgagtggctgacctatggacgcggtgactcgaacatcacaaatcaagatcaaccatcaaccaaaatcgaactcaaaaaaatcacaaatgggaacttttcgtcatcagattgggttaattacgacgctcagctcttaccaagtgatgttaaagccccgctattagtacatttcgagaaacaaaattacttggttgatatgaccgcggcagagatcaccgacgggctatggctcatcgaaattgataagctcattagcgttaaagagctttaccgttttcccggtggacgcatccgcgttgagaatggaaaagcctcatttgaatgcaaagcagaagacatcagggttttgggcaaagtcgttgcccgcactgaatacctttaa

SEQ ID NO: 160575 - DNA, 1020 bp, Enterobacter cloacae
atggctataaacaaattacccagcgggaaatggcaggtgcaggttttccccaatggccgagacggcaaaaggattcgccgacagtttgcgacgaagggcgaagcacaatcctatgagaagttcgtgaaagaacaggttcaggataagccctggcttggagagaaggcagataagcggcgggtaattgagctggtagaatcgtggtttaacacgcatggcattacgttggcggatggtgagaaacggcgaaccacaatggcgttcgcctgcaaggcgatgggaaatccactagctaacgaatttaacgcgaagatattcgcgtcatatcgggaacagcggttaagcgggaagatcacccgctctactcgcgtgaagacggtaacgccgcgcacggtgaatttagagctggcttattttagggcgatgtttaatgagctgcgccggttggatgaatggactgcgcccaacccgttagagaacgtgcgagagttcaaaatcagtgaatctgagatggcgtatctcaccattgaggagattagaaccctcctcgccgaatgtgagaacagccgatctaaagatctgactaccattgtgaaaatctgtctggcgacaggtgcacgatggagtgaagccgaaggcctgaagggcaaccaaatccgcgccggtcagatcatctacgtgaaaactaaaggcaagaaaaaccgcgcggtgccgataactgaaaaattacaggctgaactgccatccagcaggaaagcgcaggtgctttttaaaccatgctattcagccttcagaaaggccatgcaacgcgccggtatagaaacacctgcaggccagcttactcatgttttacgccataccttcgcgtctcatttcatgatgaacggaggtaatatcttggtgcttcaacgcatattaggtcacacggatattaaggtgacgatgcggtatgcacactttgctcctgatcatctagtcgaggctaggttacttaacccattaagtaaaataaaaaattaa

SEQ ID NO: 160576 - DNA, 651 bp, Enterobacter cloacae
atgaattaccccgccttgctttctcttgaaatggccaagttatgcaccaaagttgatcatttgagagtagggaaaagatggagtaatacagaaaaaaattatgctgttaaagaatatctattcgataaggtcgggagcttgccacagggagcaccaacaagtcctgcattatcaaacattgtttttaaagaacttgatgaattgctttttatgctttcattaaaccatgaggcttgctatacaagatatgccgatgatttaactttttctttccactcttcatcaagggctgaaatcatagcgtttaaaagattagtttcgaaagaattattaaagtttggattcaacattaaccctaaaaagactcgaatcgttcctccaggggcaaggaaaattgtcactggattaattgttaatactcataagcctagcattccaaaggaaattagagataaggtaaaagctgacttgtattattgtgagaaatatggtgtcattaatcattgcgtgaaaaataattataaatctattattggattctcaaatcacattagcggaatgatttctttcatatactcgattgatcccgttcaaggcggtaaatttaagaaggtttatgataagttaaatttacctctttttgtcttgtga

SEQ ID NO: 160577 - DNA, 990 bp, Enterobacter cloacae
atgagttttgatattaaggaattaaacagtgtcaaccaatggattgaacagtttgatctagttgatagatatgcagctgagttacttttacagtcacttaattacgttagctttgagaactttgaaaaaacaattctagaaaaagtggaagggttagtcaatgaattgcagataaataataacacatccattgcaatttttcccattagaaagaacacgggaaataaatttaataaaagcaaagaatataaagcggctaatgatagctcgggtaggattggacatattcttaaaaatttggaaaggaagcttcaaggaaggatcgaaatctccccgagggttatttcgatgtcacaaagcaaagtcagaaatattatttatgtagatgatattattgggtcaggaaacagatttttaaaattctggagaaatgatgtctcgaagtcaataaagagttgggtttccggaggttattgcaaaatttggattgttagtcatactattcatcaaggaggactgactaagttaacaaataatttaaaggcaattgattcatctagagtggtctgtggtaatctaataaaaaagtcagctttgttaagtaatgttactttgaaaaatttactaattaagtatggtgctagaactaataagccagacgcggctttaggttacaatggagattgttccccagtaatatttcagtatggctgcccaaataacgcgcctgcaatactttgggctactggtaatccaaaagttaatgcggctggcataacaactggtcgctggaatgcgatttttagcgagcgttcaattgatagttcattatataaattatttaacggtgaccttttttataaaacatatcctgagctattgtggaatgcagggcaatataagttggctttttcattttgtgaaaaacttgatgcttctaatgctgtctcttatacacatctgacgctgccgacgaagaggatagtgtag

SEQ ID NO: 160578 - DNA, 132 bp, Enterobacter cloacae
atggctcgcgcggatcacgcggttcagaccctgctcggccatgaaattttcacgatcggcgtcgttcatttcagcgatatcggattcaaccgcgttccaaaacgctaccactacagaacctttatcgcctga

SEQ ID NO: 160579 - DNA, 201 bp, Enterobacter cloacae
atggtcaacacctgtagtgataaaaatatcatcagtagtgttaactttatgattgttaaggtgaaaaaagatgcaaaaaaaaaggagccggaaggctccttattcgaagatattttcaggccattgggccttaacaactttgcctattatcctgcaattctcattacattcaatggcctgatagcgagggctggggtttag

SEQ ID NO: 160580 - DNA, 456 bp, Enterobacter cloacae
atgccaaagggacataatacgccatcgctgtatgaaatgctgagcggcaatttctcaggtggcctgaacctcaaccaggtcagcgaacagaatcaggtgattttatcagtactcgataacatgcagcgcatcctcaactgccgcgctggtacgctggctcacctgccagactacggcctgccggatatgacaaaaatcctccaggggatgcccggaaccgcccatcagctgatcaccacactgtcggccgtgttgctgaaatatgagccgcgcctgaatcgaattaacgtggtgatgcaggaacagattcaggccggtgagcttcgctacgccattgacgcggagctgaagggggtggggctggtgcgctacggcacggaatttatgcccgagggcagggtattaatccgtcatctgaaacaacagcaatacctcgatgcacgagccgccatctag

SEQ ID NO: 160581 - DNA, 303 bp, Enterobacter cloacae
atgaagattgtctggtctaaaacagcagagaagcagttttctaaaatcgatcctcgatatcagaaccgcattaaattcaggctggagaagatggacgataaaacatcacctgtcgcggatatcaagaaattatcttctcccgaaaaccactacaggttgcgattaggtgattacagggtcatttacaccttcggagacccgccgggtgatatctgctacgtagtggcagtaaaacgccggacaaccactacctaccttcatgaggagcatacggaatatgactattcagttcatcaaggatga

SEQ ID NO: 160582 - DNA, 1089 bp, Enterobacter cloacae
atgaacaactcagggaaataccttatatgggcagggctctccgttgtgggagcctttgccctgggctacatcgccctcaaccggggggagcagatcaatgcgctctggatcgtggtcgcctccgtctgcatttatctgatcgcataccgtttttatggccgttatatcgcgaagacggtactgggcgtagacggcacgcgcatgacgccggccgtgcgtcataacgatggtctggactacgtgccgaccgataaaaaagtgctgttcggtcaccatttcgcggcgattgccggggcaggcccgctggtggggccggtactggccgcgcagatgggctacctgccggggatgatctggatcctcgcgggggtggtgctggcgggcgcggtgcaggacttcatggtgctgttcgtctccacccgtcgcgacggtcgttcgctgggtgagctggtgaaagaggagatgggggcaactgccggggtgattgcgctggtggcgacctttatgatcatggtcatcatcctcgcggtactggcgatgattgtggtgaaagccttgacccacagcccgtggggaacctataccgtcgccttcaccattccgctggcgctgttcatggggatctacatccgctatctgcgtccgggacgcattggtgaagtttcagtcattggcctggtgttcctggtgtttgctattatctccggcggctgggtggcggaaagcccgacctgggcaccgttcttcgacttcaccggcgtgcagctgacctggatgctggtgggctacggcttcgtggcggcggtgctgccggtatggctcctgctggccccgcgtgactacctctctacgttcctgaaaattggtaccatcgtcgggctggcgatcggcattctgattatgcgcccgaccctgaccatgcctgccctgaccaaattcattgacggcaccggggcccggtctggaccggcaatctgttcccgttcctgtttatcaccatcgcctgtggggcagtgtctggcttccatgcgcttatcgcctccgggaccacgccgaagatgctggcgaatgaaaatcaggcctgcctga

SEQ ID NO: 160583 - DNA, 606 bp, Enterobacter cloacae
atgagcaaaattcttaatccggtagtgcttattcataagcgcgaaaacagtgacacctacgccgttgcgatcaccagcggcagccaggactatcacgacgccattctgatggcgacgatggaaccggacatgaccggcgatagcgtcgatatctggagcaaaacaggctactacatggcccaggagatagagcgctggcgccgggtggcggctctggcgattgcaagactggattctgccgatgataaaaatgtatggcaggctgtcggattcgcttttggtgctctcgaatgtgctgccgcgggcgaaattgcaggctccacacaaaacagcaggcacatcggaaaagtgcaggaggtgcaggtggtgcaggagcaaagcggcaccctccccctcgaggagcaagtacagagctgtaatagcccgggaagtgtgccggttcacggcgtcactgctggtaaaccgttgaccatcacccttccggcccttccttttttgggctctaaggaagagtggtatcagggcttcgccgctggcgccgggagcatgcgtgaggaatgcgctgcgatgctaatttcagccgggatcggcgtggaggtgaaatga

SEQ ID NO: 160584 - DNA, 213 bp, Enterobacter cloacae
atgaaaaaaggccagcattcagctttcccctgtgcgcgtaccgatacaccacgaggcatgacctaccgacagtatttggtctgccagttggcaccgctactcgcagcgcaattttttgaaaatagcgcatggactgattacgacgactttgccagatcactaatgatgatgactgacagcatcattgaggccgaaaaggagactgcacaatga

SEQ ID NO: 160585 - DNA, 579 bp, Enterobacter cloacae
atggttgattcaacgtttaacccagagccgacatcaaccggcatccgttttgggcgtcgagtaattggctattcgacggctattcgctcgctcgatagcggccgctatgacaggaatcttataaaaggtcttgaagtactcgcttgcatcatggaggcagaggaaagcggctggctcgaactcaacatcgagaagcagatcatcgtctggcgctggttgctcgccgcggtattcattaccgaggagcgggagaagaacgggactgtcgatgttccgaacgacgaaggcggtgttgatacagccgttatctattccggcgagcacggtgcaataagtgtctaccccgggccagagcgctttgctctcgctaaccatcttgaggccggcgccattgagaaatacggtcccgaccttggtcagcagatggcgctgcggatgtatcgggacatggttgttgctgacgataattccggattcaggttgtccgctatgggtcgggaaggattcaatctgctgcacgacagcttcatcgaacagattcagaaagaaggcatgcctgacatgccggttatgcactga

SEQ ID NO: 160586 - DNA, 825 bp, Enterobacter cloacae
atgaatatcgctattaaaacattcgattttaaatctgatgctggtgagttgctggcttcagttcggaccgtcatggttgaccaggcaccgtggttttttgctgtcgatgcatgccaggcgctggggctgagtgacacgaacaaagcacttttgtcggttgatgatgaggataaacgcgaacacgaacagtattcgggttcgggccgtaaaccgatgctggtcaatgagtctgggctttacacgcttattctcaaaagccgcaaaaagcaagccaggcgtttcaagcgctggatcactgctgaagtgctgccatcaattcgcgcgaccggagcgtacatcctttcaccaaacagtagccttcctgattttaatgatccggcatccgctgcccgcgcctgggcagatgaatatgaagcgaaaaacaaggctattgggtatgtacaccgtcaggctcaatacattgaacacctggaaaacctgtttcaaccaggcatgactcctttccagttctgcaagcaactcaacggtgtaaacgttcagcagattaacacctttctggctgatcacaactggttgtacgacgaacgccctgactctcgcaaagcctcgtggcgggttaaacattatgcccgtgatttgtatctgaccgagaagcatcagcgcgtggcccccgaggatgcagagagttttgacgcttataagcctgtgctgaaacgcaagggggccatctggctttaccgacactatctgaagggcaacctcccgatgaagcaaggctgggatggaaaatttacccacgatattgagctggcaggtgctgcatga

SEQ ID NO: 160587 - DNA, 1380 bp, Enterobacter cloacae
atgacgcctgtctggaaaaatgaagatctggaaggtgcggtaatcggcgctatttttctgcgtggttccgaccctgaggtactggatattctctccagagttccggccagcgccttctccgtaccacagtatcgggaaatctacaccgggatctgccgccaggcgcgagggaccggtgttatcgaccctgtattgctctgcgaaagcatgccaaagcacagcgcaatcattctggactcaagccgtatcgcatgggcgaaatcggcgcttgtttcctacgtttcgacgctggagcgtaatgcagctgttcgcgatgccgaagctgtaattgaaagggcgctggcagatctgcggagtgctcacaatggtgatgcagctttatcggcattcagggccgcacagaacagcattgccgcaatttgtctcgaagaaaagactgttcagccagttcatatcgacgacattcttcctgctgtagtggatcgggttgatgcacgcaaccgcgggctcgaagaagccagaagcctcatgacgggtattgaagagcttgatgcaaagactggcggcattgaaccaacagacctggtgtttatcgctgcgcgtccgtcgatgggtaaaactgaattggcgctggatattatcgacaaagtttctgagcagggccgtggtgtcctgttcttcagcatggaaatgccaaatatccagatcggtgaacgcatggtatccgctgccgggggcatgtcggtttcacgcctgaaaaaggctgcggattttgaagatgaggactgggccaggctgacaaacggtgtagagcgccttacaggtcgcagcatctggatggtagattcaaccgatttgacagtcgagcagatccagcagatagctacgcgccagcaactggcgcatccggaaatagcgctggtggttgtggattacctggcgctcatcaaaatcgaaagctctgcacgatatgaccttgccgtcggtgaggtgtcaaaagggcttaaacgcctggctaaatccaacaaaacgccagttcttgccctgagccagctttctcgtggtgttgagtcgagacccaacaaacggccgatgaactcagaccttaaaaactcgggtgagattgaggctgatgctgatctgatcatgatgctataccgcgatgaagtttataaccctgagtctccagcaaaagggatcgcggaaattaatgtgaccaagcagcgcaacggtgaactgggcacgatttaccgtcgtttctataacgggcatttccttccaattgaccaggacttagctaagcagcgttcggcgccacagcagaaagcccagaccagacgttactcaaaagaaagacattccagcaatgcagactattaa

SEQ ID NO: 160588 - DNA, 516 bp, Enterobacter cloacae
atgacaattaattctggtcttatcggtgttgtcattattgctggtctgtctatagcgctcgcaaagagttgctcagacgccagcagcattcagagtgataacgacgttctgcgtagtgacaactccttgcaggcgcaggtgatcgccacacagtcattcaacttcaatcggttcaatcaggttgcagaacatgccaacaggcttaactccctgatcgacaccagcaccgaagaaactgtaatcgaataccgggagattctccgccgtgaaaaaacctgtgatctgcctgttcctgctgacattgctggtgggctgctcgaatacgcgtaccgtttacgttccagcgcaatgcacgccgattccgacaggcctaacgcagccgatgatcgtaccgctgccaccagctcaataacttactgccaggctgtgctctggattaagccgctgctggccgtgattgagaagggaaacattaacttggctagcatacggcagattgagcaagagcggcgatga

SEQ ID NO: 160589 - DNA, 567 bp, Enterobacter cloacae
atggaatggtttaacgaaaatgccacagccataatagccgcaagctcagcactattatctgctcttatagccggtggttttgcgatattgaatgcttggttgaataatgttcaaaacaaccagcgactgaaacttcaaatcgaaaacgaaaaagctaaggagagtaaaaagctattccttgaaaaaggggaggagctttacgtctgtgtagataaatggataacctcatgccacgcccacctgcttagtggggagaagatattaaggaatcaattaacgccagaacaaaggcaccacctgttatcttcctatagggatggggagaactacacgcgattacaaacccttttaacgatttattttgctgatttatatgagtttaaaaaggaatgtagttcgtatcttatacgatgcgaacaagtagttgatgaatatatcaagggtatgtaccctcatcccaatgacgctcttttagcatttaaaacacactcggacttgtttcaagtttggtccgatgagttgattaagagccttcaactaaagttaatgaatcaggtacataattga

SEQ ID NO: 160590 - DNA, 273 bp, Enterobacter cloacae
atgaaaattgatgaaataaaagacactgcatttaacgcatcaatcaaacacggtggaacagaattctatgttgccaatggtttgagaggggacgagcctgtcaactccgaaggttaccttgtgatggtaaatgaaaatggtgaccgtgtggcattcagagcgcctggtggtgattggcaaatcgacgataaagtgtaccaagcctacagccctgatataccacattacgaaaatgctgtgcacgttcatgccagaatagaagcaaatgagtaa

SEQ ID NO: 160591 - DNA, 594 bp, Enterobacter cloacae
atgaaaattgaaaacggcttctttcctttagtgaaaacattgactgaacacaaggatgtttttgcggatgttgctgatgtcggtttaacagccgctggagccatcccgatattcgggtgggccgttaaggcctggaatgtaaaaaatacttttcaagaaaaaaagctgtatcgtaacactcaaatttttctggaaaactcgtcgataacagatgcccagcaattcattgatcgattcaactctgaaagtgagaaagaagaactctgcgacagcgtaatccaagtccttattgattcagagaaacccctgaaagcacaattagtttctaagttattgaatgctatatacgaaggaagcatcgctgttccggatgcgaatgaattattactgataatcttgaatgcctccgtaccttcgctgaaggccttggacctcttttatagctctaacccgcagggccatgcctctactttaagctcagatgccaagatttatggccctcttcttatgtctatgggaattattcatgtgcatggcaatatgacgagaatcacaaagcttgggcaattgctgtatcggcacacatttgcgtag

SEQ ID NO: 160592 - DNA, 231 bp, Enterobacter cloacae
atgagcaacgtaaagatttatgctggtttggttaacggtgacctaatgccgatcattgaaaataaaacctcaaaagagatcgttactgctttcacgggtgatgatactggtgcaccgccttcatctctgacaatcgaggtcattaccattagtggctctaaagtgaaaatttttataccttgcagcacggccccggcaagcgtgtctgtggacggactattgttacaatag

SEQ ID NO: 160593 - DNA, 615 bp, Enterobacter cloacae
gtgaagctgaacgccgaaagcgcgcgccaggccagccagcttgcggatgtcgcctccagtacggccagccgcggcgggtcgctggtagacgatgtggtcacgaccatgagcggcatttcggacagctcgaagaaaattgctgaaatcactaccgttatcaacagcatcgccttccagaccaatattctggcgctgaacgccgcggtggaagcggctcgggccggggagcaggggcgcggttttgcggtcgtggcgggtgaggtgcgtaatctggccagccgcagcgcgaatgcggcaaaagagatcgaagggctgattgcggattccgttgcccgcgtggagcagggggcgcagctggtgaacgataccggcacgacgatggaagctatcctgcgcgacgtgacggaggtgaccgtcattatgaagcagatcgccaccgcgtcagaggagcagagcaaaggtatttctcaggtcggcgtagccatcacgcagatggacggcgtgacccagcagaatgcctcgctggtggagcaggtttccgccgctgcggctgcactggaacggcagaccgaagaactccagcgctcagtgcagaagttccgtctctccgcgtaa

SEQ ID NO: 160594 - DNA, 1275 bp, Enterobacter cloacae
atgcgtttaactgatattgctgtaaaaaacgccaggccttccggcaagcaggtcaagctatctgatggaaaggggttgtatctgttggtgcatcctaacgggtcgaagtattggcaggttgcttatcgctatgatggtaagcagaaagtcttttctctcggcacgtatcccaatgttcccctcgcagaagctcgcacaaagctcgtagaggtgaaatctctgttagctgatggaattgatccactccaacaaaaaaaggctgtaaaggctgaggagcgcggtgattttacgtttgaagctgtcgcgcgcgtctggcacgataagatgtccgttagtgagcgctggatacctcaacatagtgaacgaattttaaacagcctcatcaatcatcttttccccacaattggttcaaaagatattacgaagctgaccactcgcgatctgcttcggcccttgcgtaaaattgaggccaaaggtcagcacgaaaccgcttcacgtctgaaacagcggatcacagctatcatgcgttatgccgttcaggaagatatgattacccataatcccgctaatgaacttggcggtacgttaatcacacctaaaagaacgcattacccagcgcttgaacttgaacagatacccgatctacttgctcgtattgatgcttataatggccgtagattaacgatattggctttaaagctcacgatgcttgtatttatcaggtcaagtgaattacgcttcgccagatggccagaaatagattttaaaaatgccttatgggttattccaactgaaagggaagaaatagaaaacgtcaagttttcagaacgaggttcaaaaatgcgcataccgcattatgttcccctgtgcagacagtcaatagaaatacttaaagagttaaaagatattagccatgatgtttctgatgggaaaggtctaatatttattggtgctcatgattatcgtaaaccaatgagcgaaaacacaatcaacaaatctcttcgtcaaatgggttatgacacccaaaaggatatatgcggtcatggtttccgcacaatggcttgtagttctcttgttgagtctggtatatggacagaagatgctattgaaagacaaatgagccacaaagagcaaaacaatgtcagggctgcttatacccataaagcaaaacatataacacagcgtcgattaatgttgcagtggtgggctgattatctcgatgctaataaggaaaaacatattatgccttttgattttgcaagaacaaataattaa

SEQ ID NO: 160595 - DNA, 258 bp, Enterobacter cloacae
atggatgaagaaagagtgttttcactcagctatgaacaactgacccggtttgcggaacaacgcatccggaaatgcaatctggacagccagggcgtgacttatctctgcgaatcagccaaagccggagccgtgctgatcttctggcatgaactggccataaatggctattcttcaatgaatgccataaagagacacgagctcattgacgccgactttcagcgcctcagaaacctcatctggccggatggtgacaggtaa

SEQ ID NO: 160596 - DNA, 591 bp, Enterobacter cloacae
atgactcagagccgccgaccgtctccactgcagcggagagtgctgattgtgctggctgcccttgatgaaaaacggccaggccccgtgctgacgcgggacatagaacgggtgctggagcgaagcggggaagccccggtctacgggccaaacctgcgcgcctcctgccgtcgtctggaggatgccggctggctgcgtaccctgcgcgccccaaatctgcagctggcagtggagctgacggatgccggccgggccgtggcacaccctcttctgctggcagaacaggaccgcctccgggcagaacagcgcgcggcggaagttgtcgtactgccgctgatcccgttgtcagtttcgcccgcagaaggtacttctgccaaagacctgccggtggagctgggcggcatgacgtatcaggcctgccgtggggattttgtggtacgtctcgacggcagcacatgtctgcagttatggaataaagaaggcagggtggtacgcctggagggcgatccgctggacgtggcgcagtggctgcatgcctgtcacgatgccggaatagaagttcgtgtacaggttaatgaaagtgtcactccgtaa

SEQ ID NO: 160597 - DNA, 456 bp, Enterobacter cloacae
atgaaaaccaaacttattgctctgagtgtattatgtgctgccatggttcctgcttttgcctctgcggcaacagtgactacccctggcggtgaagtccactttgtgggtgaagttgtcaacggcacctgtgccgtcgatgccgactcagtaaaccagaccgtacagatgggtcaggtacgtgctaacactctggcaaaacagggtgacgtcggtcaaaacgttggctttaatattgttttgaaagattgtgcgccaggcgctgacggcaacggcaacactttaccagctactgcagcgattatcttcagcggcgtaaccgttgataacaccactaatgctaaagtactggctctgcagcagtcttctgccggtggcggaccaacgtcggtattcaggttctggatcgcagcggccagccggttgcatttgacggttcaacggcaagcgcatccataa

SEQ ID NO: 160598 - DNA, 705 bp, Enterobacter cloacae
atgtttaaaatcaaaagcagagtattgaattaccttatcccttttttagcattttcatttttgctgtcttcttccgccgctaacgcgggtattgctctgggtgcgacgcgagtagtctatcctgctggcgccaagcaggcgcaactatcggtaatcaataccgaaaataatagtgcattcctcattcagtcctgggtcagtaacgcctcaggtcagaaaagtaaaagttttgttattacccctccgctgtttctgatgaagggtaaaaaagagaatatcctgcgaatagtggatgtaaccaacggcagtctgcctaaagacagagagtcactgttctgggttagcgtgaaagccataccctctgtcgacaaagataaaatggcagagaacaagctccagttagcgattgttaaccgtattaaactcttttatcgcccaaataatctgccaatagcgccagaagctgcgccggagaaactaacctttagtaaaagtgctcgcggcgtacagatcaaaaaccctacgccctattaccagacattaaccgatttttatgtaggctctaacaagttagaaggcgtgatggttcccccaatgggttccgaaaccgtgaaagtggctaatacgtccgggagtaaagtcagctacagagtgatcaatgacttcggtgcatttagcgcaaaaatagaaaaatcgctacagtaa

SEQ ID NO: 160599 - DNA, 2349 bp, Enterobacter cloacae
gtgcagtttgtcaacgcagaaaatgacaacgcggtcttaccctgcttcacgtcggccgagctgatgaagatgggcgttcgcctgctttccgttaacggaaaagacaccagcaaaatggccgcggatgagcagtgttatgccttaaccctgcttgttgagggcagtaccgcagattacaacgtcaatacgcagcggctggatattaccattccccaggcattaatgagtaacagactgagcggcgacgtttctccggatctatgggatgaaggtattaatgctggcctgcttaactacagcttcaatggtaataacactaaagacagaaatggttttgacagtaacactgcctatctgaatcttaatagcggtattaatattggcccgtggcggctgcgggacaactctgtctggaactattctgacgcaggctcaccgggtaaaaaaagccagtggcaacacattaatacctggctggaaagagacattaagtttctgcgctctcgtttgaccttgggtgacacctactcagacgaacagctttttgactccattaactttcggggcgttaaactggcgtcggacgataatatgctgccggaaagccagcgcggctttgctccggttgttcgcggtattgcccggggaaccgctcagatatccattaagcaaaacggatatgaggtctatcaaaccaccgtgccaccgggtccttttgccatcaatgatatctattcattaaacggcaacggcgatcttaacgtgacggtaacagaagcggatggcagtacgcagaacttcaccgtccccttctctaccgtcccttttttacagcgtgaagggcatacccgatataatctgattgcgggtgaatatcgcagcggtaatagcctgcaaacccggcctaaatttttccagggtaccctgttccatggtttaaaaatgggctggacgatttttggtggcagtcagctctcttctaactatcgcgcgctggatatcggccttgccaaaaatatggggatcctgggtgccctgtcatttgatatcacccaggcgtactccacgctggtcgatcgcagtaaacatcagggtcagtcaatgcgacttacctacaataaatcctttattgatacgggtaccagcattcgattctctgcctaccgctactcgactagcggcttttataattttgctgacaccacttacagcaatatggcaggttacgtttactctgatgatcctgccgatgagaatcagattgtttctgcctacaacctgcgacataacaaaaggggtaaatttcagtttaatattacccagagtctgaccgacagtacctctttctatctgagcggcacgcaccagacttactggggaacgtcgggtactgaacggcagctgatggcaggcatcaatactatgttcacggatgtatcagtctccgtaaactatagcctgaataaaaactactggatgcccagaaccgatacgcttctctctgctaacgttagcgtaccctttagccactggatgcgctctgacaatacgtcggcatggcgtaacgccagcgccagatacagtatgtccagcgacctgaaagggaataccagtaatttggtaggtctgtacggtaatatgctggaggacagaaacttaagctatagcgtacaaacaggttacgttaacggcaacagcggcggacatgagagcagctatgcctcgctcaattatcgcggaggctatggtaacgctaatgcaggctacagtcgtaacggcaactatcagcagctttactacggtgtgagcggtggcgttgtcgcccacgcaaatggcgttaccctcggtcagtcaatgagtgattcggtcgtgctggtaaaagccccgggggccagtaacgtctctgtgcagaatcagccaggggttaaaactgactatcgcggttacgccatagtgccatatgccgttgcctatcgcgaaaaccggatcgcgctgaaccccaatacactgccggataatgtggagatcgacgatgctatcgtcgatgtggtgcctacccagggcgcggtagcccgcgctgagtttactacccatactggtctgaaaattttgatgacgttaatgcataacaataaaccggttccgttcggtgccgttgtttcgttaggcaacagttcgggtatcgtcaccgacgatgggcaggcctatctcaccggcatgcctgccagcggaaaggtcaaagtacagtggggcaacagcccggacacccagtgtagcgggaactatgccattactgatgcagcgcctaaagataatctctttaaccagctgaccgttgagtgccgataa

SEQ ID NO: 160600 - DNA, 537 bp, Enterobacter cloacae
atgaaatttacgccacaaattatcttagcgagtgcactctgcttcacgccgctatcggtgctggctgacggggagcaaacaaccattactatcaatgggtatattgtcgacaatacatgtgtggtttctgaagaatcgctcaagataccggttgatctacagacaaataacgccaaggatttctttcgcgttggcaccaccgggcccgcacagccattttctattattctggcaccctgtggtcaacaggtcggcgacgtaaaagtgcagttttctggcgtcgcggacgacaccaataccgacctgctcaaaatagacagtggaaacggtacggcatctggagtaggcattgaactgctggataatcagcaacaacaaatagcgcttaacagcgacttcagctcgctgacggctgtcagcctagtgccaggtaccactaatacactgacttactatgccaggctaatgtcaacccactatcccgttggggccggtgctgtcagcgctacggcaacctttacccttgagtatcaataa

SEQ ID NO: 160601 - DNA, 513 bp, Enterobacter cloacae
atgaaaggttatctgttgatacgcgcagtgcctctgcttttgggattaagcgcaccactcgctcaggcagctgatgccaccattaccgttaacggtcgggtcgtagcaaaaccctgtaccgtatcaaccaagaatgtgaagatcgactttggcacgctctatgcctacagctttattaatgctcagtcgacttcccagtggaaaagctttgatttgcagttaaccaactgccccgtaggcacatcgcagattgttgccagcttcagcggcactccgaccaacacagactactatgctaaccaggcgacccaggatgcggctacgaatattcagattgagctccaggataccgctggtgcactcctgaaaaacggctcaaataaaaaagtgaccgtcaatgacaatgacaagagcgtcacgatccccctacaggtaaggctggtaagccttaccggcggcgcgacgcagggaactgtgcagagtgttattaccgtcacctatcagtatcaataa

SEQ ID NO: 160602 - DNA, 906 bp, Enterobacter cloacae
atgaaaaataaatatttatccattttactgctggccctggcatttacctctgctaagtcctgggcctttacctgccagtcgctgggcaaatcaatcagtacctcaggttcggtcaatgtttatgtcgatcttgatcctgagatccagcccggcaaaaacctggtcgttaacctcggcaactcgattcagtgtagaaatgatgcaagcaccgtatataccgaccctgtctgggttgattctggctccgcatttgtaagcgatctgagcggctttaacgggtatctcacctactatggtacacagtatcccttccctcttaaatcggcaacgggcgctgttaatcatacgtggggcacttttcgtccgtggcaaacagttctgtatatctcgccaatatcagccgcaggcggagtatttattaaaaaaggctcgcagtttgcgcaattaaccttaaaaaaacgcgactcattaaatgataatattcagaccatcatatggaatatttacgccaataactcagtcgagataccaaccggcgggtgcgatatctcatcgcgcgacgttaacgttgatctacctgattatgacgcaaacgcttctcaacaggtgaccgtgcctttaacggtcaaatgcgcgcagacgcaaaacctgaactttaccctatcgggtaccacggcgggcagcgacaccgtattccaaaatgtggccgctaacggtgcgcagggtataggtatccagatcctgcgtaacaatacgcccgtggttgccggagataaaaatgctttaggttacgtcagtaccacgccggtcagcctgggactgagtgcccaatatggcctaacctcgggtcaggtcacggccgggctggttaaatcagttattgatgtcacttttacttatcagtag

SEQ ID NO: 160603 - DNA, 723 bp, Enterobacter cloacae
atgattgcactcttacttctcttcttcgtcgctctcggtgccggagtactcagcggtgtcgtcggcactggctcgtcgttaatcatgctgcccgtcctcgtcgccacgtacgggccacggattgctgtgcctgttatggcgatcgcctcccttttcggcaacatcggacgggtgattgtctggtggcatgagattcgttggcgaccggtgtttgcctattcgttggcgggagttcctgcggctgttctcggggcgcacacgttacttacgatttctcctggcacagtggaggtattcctggcagctttcttccttgcgatgatcccgctgcgccgtctcatcagacgatcgaacctccacttgaatctctggcacatgagttttgccggggcgattgtcgggtttctgacaggattcgtgctgtccaccgggccgctcagcgtgccggtatttaccgggtacggaatgagtggaggcgtatttttgggatcagaggcggcaagcgcaatcctgctctacgctggcaagctagctacgttcggtatatcgggcgcactcgcgcagcctgtcctcacatatggacttgccatcggcatcgcattgttcgtcggttcgatgattgcgaaacgtctcgtccagaaactccagacgcatacgttcgagcttctcattgatgccgttctcgtcgctggggcagtagggatgatccttgctctcaaatga

SEQ ID NO: 160604 - DNA, 1872 bp, Enterobacter cloacae
atgacccctgctgagttatctgaaaaattgtgggacaacgccgaaagagttgcgaaatacctgcttccacgaggacaccttgagggcaaggagtggtgtgctggcaataccaatggtgatgccggtaagagcctgaaaattaatctcgggggtaagaaaacttgggcagattttgcaagtggcgatagcggagacctgcttgatctctgggtgttggtgcgtaactgccaactacacgacgcaatgcgagaagcgaaagaattccttgggctgaaggacgacgataaccactttgaggcgaagaaaaagaccttctctcgcccaactaaaaaaggcgttaaaaaagcgagtcattgctacgactacctttcttcccgtggcatcacccgagagacagctgatcaattccgtgtttcggacgcagtcgtctggtaccacgatgaaaaccgcgaaattccggcagtggcgttcccgtatcttcgcaacggtgagctgttgcaggtaaagcgaatcggcactgaacgaccaaatggcaaaaagttgatcatggctgaggctgattgcgagccatgtctgtttggctggcaggctatggacgcgaaagctcgcgctgttgtgctttgcgaaggagagattgactgtatgacctactcgcaattcggtatcagtgctctatcggtaccgttcggcggtggaaagggtgccaaacagcaatggatcgaatacgagtatcacaacctcgaccgattcgaagaaatttggttaagcctcgataacgatgatgtagggcgcgaagccgcaaaagaaattgctcgtcgcctgggggagcatcgttgccgcctggtagagctgccgcacaaagatatcaatgaatgtctgacctccgggatgagcgaggatgaaatctggcactacttggggaccgctaaattcttcgaccctgatgaactctgctctgcgggtgatctccttcaggaaacactggatgcattcgagcatcgagatgttggattattttccagcccgtgggattcgctgaacagtaatttcaaattccgcgccggagagctgacgctggttaacggagtaaacggccacggaaaaaccgagctggtgggacatatcgccgtcaatgccatgagccagggagtccgggtatgcattgcctcgctggagcttaagcctgggaaaatgttggctcgtcttacccggcaaaccatttgtagaaaaaacccagaacgtactgaaatcatcatgactaacgagtggttttctgatcgtctttgggtgttcaaactcaccggaacagccaaggccgatcgactgttggaaatatttgcctatgccagacgccgctatggaatagatcttttcgttatcgacaacttggcaaaatgtggactcgatgaggaggactacggtggacaaaaagaatttatcgataccctctgcgactttaaaaacgagcacaactgccatgttctgctagtaacgcatgccagaaaaacaaacgaagctgcaccaacagggaaaatggatgttaaaggcactggcgctttaactgacatgcccgacaacgttatggccgtctggcgtaatatcccgcgcgaactggcccagcgcaaagctgaaagaatggggtatgagagtcttgataaggacgaacagactgctatccaaatgcccgcctcgatgattcgcctgttgaaacaacgtgaaggtgagggctggatcggagacataggggccaactttgattcccgctcacaccagtttatcgagggtgataaagggcccttcaattacttggccggcaaacagcaaagtgaacttgatattgagtgggaagccaccaacgcaacgaggtattaa

SEQ ID NO: 160605 - DNA, 1725 bp, Enterobacter cloacae; identical to SEQ ID NO: 147260

SEQ ID NO: 160606 - DNA, 558 bp, Enterobacter cloacae
atgccttttcagtcatctggcaaagttcgtatttttggtggtgcagcagcaactggatggaatcacagcaggatattatacgatgataaaaatactgttgtagatagcaatggcttcataaagcaggcatcccctgttgttaaaattttcagtgatggtaaatatgaaactaacgacgaatcagaaggtgtcacggtcactcgtctggatgtcgggcaatatcttattgaaggctgtaaagcactcaattcagacgctgcctggggcggtatcgacggaggatttgaaatcccaacagacaggaataagcaaccgctcatatggctggattatgaggttagcgcggatggttctgtgctggtgaaaacctaccaccgaactcaccctgatgcgccagcgttcgccaggaatgaactggaaggcgtgggtgatggtgatccggtcgacatcccccgtgaccagtttgtgtccgttcgtgtcgaaatgcctgccgattctttatacaaccaaaaaatcagtgcggcagagctggccatgactgctgatgcgggtgaataa

SEQ ID NO: 160607 - DNA, 789 bp, Enterobacter cloacae
atgagtcagaaaatcattacgttatccggtgcggcgacagatgttctgtatgcgctgtttttccgtggcgcgcttcagtccggcgatctgccagctaaatctggtgctgctgagcttcgagaactgggattcgctgaaacacgccataccgcgacggagtatcaaaaggaaaattattttacctttctgactgctgaggggcaggagtttgccattaagcatctggcaaatactcgctttggtgttcccgctggtggttatatcggctgccctatagatgagccaagagacggcatcaatagctactgcccaatcgaagactttaaatggggctggtttgtcgataaatcagggcaagcctacatccataaggcgctgatcggtgatggcgtattgtctacgggttataacgtgaaattgaacgtgaaagtcaccgacaagggtaagcagcacgaagctggcatgaccctcggtgttgaagatggccagagaaacgttgagttcctggccgatcgctataaggtgcatgaaaccgtttcatccatcatcggaaacgccgtcgtaacaaaagcgaagataaatatcgcgcttgccgatgaaaagaagcaggccgtcattgatgccgtgcgtgaaagcgatttgttcgcaaccctccaggcaaagattgatgcgcaaacagcttcagtggttggcctgcaacaggcgatgcacgatgcggtgaacgatgctcttcgcaatgcgcttaagcccggcggcttgctctggaatgcacggtcgcgtggaatctga

SEQ ID NO: 160608 - DNA, 1023 bp, Enterobacter cloacae
atgaccatcaccactgtcggtatcgatcttgctaaaaatgtgtttgctgttcactgcattgaccaaaatggtaaagctgttctggttaaacccaaggtgtcgcgtgcagcactttctgaactcatcgcaggtttacctccctgtgtcattggaatggaagcctgctcgggtgcccactattgggcaagattattcaggcagtatggccatgatgtccggttgatggctccgaaatttgtctcaccctatcgcatggcgggtaagaccgggaaaaatgatgcagctgatgcaatagctatttgtgaggcagtgcagcggccgcatatgcgctttgtaccagtcaaagacgaaagccagcaggcaatgcaatgcttacatcggacaagacagggatttatccaggaaagaacagcaacgtataaccgtcttcggggcctgatatctgaattcggggttattgccccacaaagcactgatgctctgcgtcatgttgtttctgaccagaaggaaactctgccagtacaggttaggctgtgcattgatgatctattgacacatgtcactaatattgaagagaaaatcgccgaatatgacagggtattatctcgtgtggccaaaacagatcatcgcagccagcagttaatggaactgaaaggtgttgggcccacaacggcgagtgcgctggtcgccagtattggcaatgcccatgattttaagaacgggcgccaactggcagcctggttggggctaacgccatcacaatacagtagtggcggaaaatcaaagcttggcaggataacaaaagcgggtgatgcctatctgcgaaccctactggtccagggagcccgttctgtaatggtaggggcagagaatagaacggacccgtttagccgttgggtctgctcgttgattggtaggcggggatactggcgtgctgtcgttgcaatcgccgccaagaatgcgaggttgtgctgggcatcattacattacggcgatgacttcagactgtattcaacaacatga

SEQ ID NO: 160609 - DNA, 231 bp, Enterobacter cloacae
gtgaactttatcggcacggcggacaacccgctgacgccggaagagggggcgcgcgagctggcacggcggcagacgcacccggacctgcacgctcacgactttttgccggacgatacccggctgtgggcggcattacagtccgtgagcggtggcacctggaaaggctgtatttatgacaccgataaaatcattgaggtaattaacgccggtaaaaaagcgctcggcctttaa

SEQ ID NO: 160610 - DNA, 204 bp, Enterobacter cloacae
atgaaaaagacaaaaagacttattagacttaaagaggtgatcgagaaaactggctattgcagagcgtggatttacagactgattaaagataacagtttccccgctccggtaaagattggtgagagatctattgcttttattgaaagtgaagttgatcagtggatagatagcaagatattcaattcacgtaataaagccgcctaa

SEQ ID NO: 160611 - DNA, 1182 bp, Enterobacter cloacae
atgaagggtatgcagaagatcaaaaggggtaagaacttctcaggtgtggtccagtatgcattgaagctaggttcacatcatacaagtgatccaatcgtcattggcgggaacatgttaggtgattcagcctttgaactgatcgctgaatttgatggcactaaacagcttcggccagatgttcagaaggccgtatggcacaactcgcttcgattaccggatggtgaatcactaacggctgaacagtggtccagcatcgcagatgactatatggagagaatgggattcagtgatactcatctccgttgctatgtgcttcatgacgacgaaggccagcatatacacattatcgccagcagaatcgacatagtcagtgggaagctctacttaggtaggaacgaaaatcttataagcacacggatcatcagtgaacttgaaatcactcataacctgacagtgaccatgacagcaccaaagcaaccgaagcgaagaaaggtttcccgcaatgaacagatgctttcagaacggactggccttccctcccccaaggaagctctacaacagattcttgataaaagtttggcagatacacctgaccttttaacttttatcaagaggctggaagaagcggaagtatcttggaaggccaatattgcctctaccggtaaaatgaacggcttctcattctcttaccgcgatatagctttcaaagcttcgcagttaggcaagggttactcttgggcaaatcttcaaaagcaacttagctacaaccctgaccacttagaagcgatacgaaccaacacaccaacaaaagccccccctgctgctgctgctgctgctcctgctcctgctcctgctcctgctcctgctcctgctcctgctcctgctcctgcaaaagatgttgcaacaacggatattccaagggaaagcataagtgaaaaaattgtcgaactggaactacggctcagagaagacaaacggaatgaaatcgtagaaaagattcttcaaaaaaattccgtcaaaaagcaaaagcatctcaggctcatcggctggattccatttatcagaaggttcatagagcttctgcgaagctatggtaagagcattcttcataagacccctacaaacttctcagaagtctattcaacacatcatctaaaacctgcaagaaaaattcgtttatag

SEQ ID NO: 160612 - DNA, 201 bp, Enterobacter cloacae
atgccggcaagctggcgcagcagcgccggcgagatcgaggggagctttccggaacgtgccggcttttcgtccaggcagatctgccgcatccacgccgccagctgcctgccgtcacagcgctcgagcagccgccggtgctcgtcctccgtcacccacatggtgagcatcttgctccgtttctctgacaaaccggcctcctga

SEQ ID NO: 160613 - DNA, 216 bp, Enterobacter cloacae
atgggattttgggaaacggccggtaaaattgcaaaaggcgcagctaacgctttggatgaaaaagctcatgaactccaggcaaccaaaatgcgcttagaaagcaaaagcagtgaagaactaaagcgcctcattaaatctgatggttttttcggctcagccagtaacacagaaaaaagcatggcaatgaaaattctcagagaacgcggagacgtttaa

SEQ ID NO: 160614 - DNA, 216 bp, Enterobacter cloacae; identical to SEQ ID NO: 142298

SEQ ID NO: 160615 - DNA, 270 bp, Enterobacter cloacae
atgcacatttttgaatttaaaacaacacatagatttacagaacatgagattatgaattacttaaaaagcaaaaaaataaaagatttagatcactttaatgttgaagtgcttattgaacaaatagcaaagaatgaagggattgattattacgatattatccatcccaatgatgaagaaaaaaaagaaattattgaagaggcacggattgttttagatgaaataagaagaggagtaagaatagaaaaaggatttgaatatttgaaagaataa

SEQ ID NO: 160616 - DNA, 216 bp, Enterobacter cloacae
atgtatgatccgcgcgcctggttgcttttcgaggaaagattctgcaagcaacccgacaatgtaataaccttcaataaaattaccttcattatcgaagaggaaacatctgtcaaaatcgccatcgaacgcaatgcccatatcggcttcgcttgtgtcagcacggcattcttgaagaagagggtttggaatcccattagggaaatttccatcaggtaa

SEQ ID NO: 160617 - DNA, 207 bp, Enterobacter cloacae
atgagtttaataagaaaaaccacataccacacaccgctaaacggcttggaattagaaacaaataggaaaagaattggagtatatgtggatgaaattggaaagaaatggaaagttgaatttttattgagagattcagaacaagaattgaaagacaagaaggagagggaatttaataggagagaggttcagaacaaaaagagaaaatga

SEQ ID NO: 160618 - DNA, 231 bp, Enterobacter cloacae
ttgctgctgcaaacggaggcgggcgacgcgcggcttgagcaggtgacggctggctccgtgcatattattcctccttttacagcgcatcgtttgattaacactggcaacgagacgctatcctcccttgccgtctggccgagcattgcgggacacgactatgcggcgctggcagagggcttcaccctgcggatctttgcctccggggaaggttacgaggtgcgccatggctaa

SEQ ID NO: 160619 - DNA, 219 bp, Enterobacter cloacae
atggcgacaggcttttggactggcgacaaaaaaacccgctttgagagcgggttctttttaaaaattcatgtgcccttgcccatcctttcccggatgtgggggcgcagaagaaatcacattaggctttatgatatgcctaacaaatgtttcatgcgtgacaaaagtacaaccgcagttgatattttggcactggttgtaacgttctttggttgttgctga

SEQ ID NO: 160620 - DNA, 1206 bp, Enterobacter cloacae
atgaaaacaacgataaaccttgaatttgatatcgctcaattattcgacacgatacgtaaaaagactactataagaccccccattgaaattgaggatggtctaacattaattgaagactttgaaaaaaaatgcaataaatttagagcatgtctagatgcatatattgaatcccataataatcaattatgcagaagaataaaaaatagattaccgcccttaaacaaacttcaatccgggataataaaatgccttgagtgttttctttctggtgatataaaaacagcttatgacacatttgaccttatgctgaaatccagtttgatttctcgtcaaattgaaatgatttgtataccattatcaagtatatgcaatgatgagacccccttgttccgcgtcaggaaatcagatagaccgctatcatcaaggaaggatatgtttcacattccattcaaacaacgtcatctagtgaaagcacaaagatattctgttgccggattaccgtgcctttatcttggaacatctctttatatatgctggagagagatggataaacccgactttgataagctttacatatcttcatttaagacacagcaaaaggacaactcgttattattgcatttaggtccagactttctatacaggccatctttaattatttcaaaaacagatagaaaatatgactatgagaccaaacttgcctatctagccctatggcctttaatcatagcatgtaattatttgaagcagcatgataatgcatcctttaatcaagaatatataatacccaatctattaatgcagtggattagcagaaataacaacacagagatagcaggaattgcatatcgctcaaccaaactagcatcaaatgcagtgggtgccagaggtattaacgtcgtaatgcctcctaagattcgatatgatgagatgataaaaaacgatttctgccccaaattatgtagtgtctttaaattcaccctaccagtttcatggcaagttctaaaaactctcgactacagatctgaataccaagaaagtagagacatagagataatgagcaagagattaagaaggaagagagaccaagcgttaactggaagtattgatgatgaaattttaagcatctacaatcttactgacttttttaagctagaaatatgtatggatgaaatccaggtctatgcaggtgtaaaagcatgttaa

SEQ ID NO: 160621 - DNA, 135 bp, Enterobacter cloacae
atgagtccacgcagcctgtatgagtttaaaagaaggttctggagtgttttgttcatagctaatgtgctcctgctcgggttactaccaattattgggttgaattccgtggttaacgacctgttcatgagcctctaa

SEQ ID NO: 160622 - DNA, 378 bp, Enterobacter cloacae
atgcgcctcaataaaattcagcgcgaacaagttcgaatgaaatttggtggccggtgcgcttattgcgggtgcgaacttggcgataaatggcacgctgaccacgtcgaggcggtacgtagaaatatcagcaacggatacgcaatggacaggccagaaaacgacacgctcagcaacatggttccagcatgcataccctgcaacctgttcaaaatgtgcagcaccgttgaagactttcgtagtcgcatcgcaactcaggttgatgtgacgcgcagggcatcaagaagttaccgcacagctgaatcattcggcctgattcaaccaactaacgcgccggtagtgttctggttcgaaaaatatcaggaaggagtgaacgcatga

SEQ ID NO: 160623 - DNA, 252 bp, Enterobacter cloacae
atgccggttttctggccgctgttttacgctcaccggatatatgtctgcttgaggcgcaccctgagaagttgtttacgcatgttttatatgctgactggcgggcgcgtcttaaaacactcagtaaggttggcgattgagaaaggattgcgaagaattaattctttaccagaactgttatacaaccagaaactactacacacctcttctcaccttttacaggaaaatctattatgcaaacacagtatgccctaa

SEQ ID NO: 160624 - DNA, 441 bp, Enterobacter cloacae
gtgaagctcaagcgcaagcctaaagagcagcacctgcgcgcgttgcaacatccaaaagcgaccaaaaccacgtcaaaggccagagccaaaaaagagcaggaggcgcgcgagggcgaatatatggtcggtgagtctgagaacgtgctggagctgacgaccatctacgcgacaaaagcgcaggccatgcgcgccgctcaggctaagtgggacaagttacagcgcggagtggcggagttttcaatctcgctggctattggtcgggcagatttatttccagagacaccgatagcggtcagaggctttaagcgcgttatagacgagcaggcctgggtaatcagccgggtggtgcactaccttaacgggaacggctacacgacgggtttagagcttgaggttaaggtttcggatgtagagtatgaaagcgaagagttaatgcaataa

SEQ ID NO: 160625 - DNA, 213 bp, Enterobacter cloacae
atgcttataaacttccagcgaaccggcgttagcttctggatagttcctgccggtttgagcctgcgcgttcgctggctggtaatacagtcccgccgtggtgtaggcgttcaggtcggcggcattgccaattgccacggactgcccgttgaaaatatcctgcgcgctgatattaaaatcattagtcagcgcatgaccattaatcctgcgccctga

SEQ ID NO: 160626 - DNA, 204 bp, Enterobacter cloacae; identical to SEQ ID NO: 156621

SEQ ID NO: 160627 - DNA, 486 bp, Enterobacter cloacae
atgaccattaatcctgcgcccggatggtacgcgcccgttagcgttgtcattagcagccttaaccgctttcggcgttgcggccagaacctcagacgtgctgtcggtcgcactgctgagctggacgatacccttttgcgccgtgctggcgtcctgagccgtgtatttacctttggcaatgtcatacgccgccttaaccgctttcggcgtcgcggcgacgttctcagacgcgctatcggtcgcgctgctgagctggacgataccctttttcgccgtggtcgcgtcctgagccgtatatttcccgtcagcaaggtcatacgccgccttgaccgctttcggggtcgctgcgacgctctcagacgcgctgtcggtcgcgctgctgagctgagtaaagccctttgcggtgagcgtggcgtcaggatgacggcgggactgctcatgctccgcaatcttgtcgtcgacgtagtcctgcgttgccatcaccgttga

SEQ ID NO: 160628 - DNA, 159 bp, Enterobacter cloacae
atgccgggcagcgacccggccactaatggcgacctgagcgccgatattcgcaggcttgagcacgcgctcgcggcatgcgcgctgcagattgaaaccgtcaaagactgtcaggataaactcgatgaagaaagcaatcagcctgcgcaaggcgttaactga

SEQ ID NO: 160629 - DNA, 171 bp, Enterobacter cloacae
atgcgactgcgacgccataccggaggcgacttttcgcagcttctggaaattgggtatccagaaaatttcatcgacgtacaggtcgccgttatgactctgcgcggtgttggagttggtcccgaggaaaatcagctctgcgccgttgttgccgatgacaatcgggtcgcctga

SEQ ID NO: 160630 - DNA, 1101 bp, Enterobacter cloacae
atgaatggtaagatggatttagcagcttttcagcgtttagtggaacgtactcgtagtattgatggtgaagcgttcattatttgtcatgatgtgaacggtactgtgaagtttgaacttatcgatactatgcgaataccgactactggaaaccgaatttttgatgatggttcatatgtttctaatggtattcattttgatcgatatgggaaagtaattgagtactatgtaactcgtttgaatccttctacatatacgtatcaaacaggtgattatgaagtaattcctgcatcaaacatgcttcatctaatgatccaggactaccctaatcaagagcgtggcataccggatatcattgcaggtactactttattaaaagatcttgaagcctttattaaggcagcaatcatatctaagaaactatcagcctctgcaatggctttcattactaactcagcaggtagtgatgaagatattgattttatgaaagggtacgaacctgattactacgaaaatgacagcttacaaagcggtgctttagtagaacttcaaccaggacaaaacgtaacgagtgttaacccaaacggtgctactgatggtatcacagagtttgtagatactcagatgcaacaaatagctatgtctcttggtatcacagagcaatcactcagtggttctaccgcaaatgcttcattctcagcagcaaaactaacagaccgcctacaacgtcagactttcaagactcgtactaatgcaataaccacgtttgtattaaaaccaatatacgcacgctggcttaaagcagaaatgttacgtaatcagagtttaaatctgaaatttagtgatttcgataaattagtaaacgctaaatatatcagtgaatttgtggaatcccttgatcctctcaaagacgtacaaacccaagtactaatgattgataacaagatcaagagtcgttctatggttgtttctgaatttggttatgacccatatcaagtacagaaggaaattgaattagaggaagctaaaacaattaataataaacaggaagttattcaggatgaagaaacaactaacgagggaactaaacctacagaaaattaa

SEQ ID NO: 160631 - DNA, 1128 bp, Enterobacter cloacae
atgagcgggccgcttaagattcgttctgccgatgcgttgcgcatctacaatgcggaatacggcatgatttttcgtcgctcagaaactaatttttaccttatcccgaccgcaaaagaccagggcgaaaatggcggtataagtggactacgcccgctttatatcgacctcaccaacggcagagtgacgctgggtaacggagcagtcattaacggcggtcttgggctgggcgtggtcagcggccttggagagaactctattgccctgggggataatgacaccggcttcaaacagaacggagatggtgttctggatgtttatgccaacagcaagcaggtaatgcgattcctgaacagtggtataacgagttatatgctcttcaacatgaatgcaggcgcatcagtgagcagcactcttacctttaaaaacggtagcggtatcatatcagagaaaactggtgccaacccccgaagcggccgaatttattggggcggtgatgcgagtcgcggcaacaggatagaatttgcagatgatgctggctggaaggcctacattgagcgccatccctcgaatggtgtgcagttagtagtaaatggtcgaatcaatggaagtattatttattccagcggtgaggtacaggcgggaggaggtaaggcacgccttgctgctgacggaaatatctatggtgagaaatggggcaatcagtggcttgatgtatatctgagaaacacctaccagcctaaaggcagttacaccccggcaggacaggcatataccaaagctgaaagcgatggtcgttactacaccaaagcgcaaagtgatgcgggatacaatgccaaaaacaccgcttctctttctgctaccggagggtggcagcaggacaattcgaccggtctgattatacagatgggaacagtaacccgaacgggctacaacacagccgtcaattttcctaaggcgttccctaatttctgcatgggcgtcctgcttacgctcagcgatgcaggcacaggtaacctttccgactcatcaagcaacatcagatcgttaagccacagtaaaactggttttaattatggtgcgaacggcaatcctgaaaaaacagcattctgggtcgcatttggtaaatag

SEQ ID NO: 160632 - DNA, 564 bp, Enterobacter cloacae
atggattggggcaatggttcagatctgattagtgctgcctgtaatgcagtaatggcaggggtcgctgtgtatgctgctgcaaatgcaaaagattggctctcacctaaacttaatgagcgaaaatttaaatttgctgatgagcttattgatcagttctgtaggttacaacaggaatctttttacttgcacagtgatgtaaaacaattgattaatacagagcctgacgaacaacatgatgaagctaaattcaggttgctttgggaagagcttttgcaaaaagaagcagcatatagaaaaaacataatcaatttacgtacagcgatggaaaggatggatctttggggattgcagcctattaatgaacgcctttttatcaaaataatagactcacatctatctttaacatacgcaatacgagatgctttatctgtaggatctgaagagatttttttaaaactacctgtttgtttcgatttcgacatgatgataagtgaaaagtatagaactgttcgagcctcacataacaacataataaagcactatagcgaactctttactgattga

SEQ ID NO: 160633 - DNA, 291 bp, Enterobacter cloacae
atgcccgttttgcttttctactacctattagtttttaaagaaatcgttgatcctgaatcctcacagatagagcaaatcaggcataccgaactactacaggcaatttggttaagtactggcaatatcaagaaagaagatatacctaaatttaatatctatgaactcgactcactgaatattatttcaaataaaaccttagctgaacaacatgcagagagggagaagaagatcgcagaacaacaaaaagcaaacatgcttaattggatgggagtaaagcctaatggcaaataa

SEQ ID NO: 160634 - DNA, 774 bp, Enterobacter cloacae
atgggaatccgcccaccttaccgggcgccggtgccgtgtgggaatccgcccaccttgccgtgcgccgctgccgcgtgggaatcggcccaccttgccgcgcgccggtgctgtgtgggaatcagcccaccttaccgggcgccggtgctgtgtgggaatcagcccaccttgccgggcgccgctgccgcgtgggaatcggcccaccttgccgcgcgccggtgccgtgtgggaatcagcccaccttaccgggcgccggtgccgtgtgggaatcagcccaccttgccgggcgccgctgcagcgtgggaatcggcccaccttgccgcgcgccggtgccgtgtgggaatccgcccaccttaccgggcgccggtgccgtgtgggaatccgcccaccttgccgtgcgccgctgccgcgtgggaatcggcccaccttgccgcgcgccggtgctgtgtgggaatcagcccaccttaccgggcgccggtgctgtgtgggaatcagcccaccttgccgggcgccggtgctgtgtggaaatccgcccatcttcatgacaaaaatttgtcaaatgacaggctcatgtgtgctgatttatgtcagacgggattttgcttatcaattattgagaacagaaattttcctgaatcatcaatactatacttagcaagtaaaggtgttttctcatttatctgcttgagtgcaggatcaaggaaatatcgtttcaactctgccaagttcttctgcagggattccggtaagacgaaacggtcatttaaccaagcatga

SEQ ID NO: 160635 - DNA, 1779 bp, Enterobacter cloacae
atggcaacgcaggactacgtcgacgacaagctcgctgagcatgagaagtcccgccgccatcctgacgccacgctcaccgctaaggggttcactcagttaagcagtgcgaccgacagcgcgtctgagagcgtcgcagcgacgccaaaagcagttaaggcggcgtatgaccttgcgaaagggaaatatacggctcaggacgccaccacggcgcaaaagggtattgtccagctcagtagcgcgaccgacagcacgtctgaggcgctggcggcaacgccgaaagcagtcaaggctgcgaatgacaacgctaacgggcgcgtaccatcagggcgcaggattaatggtcatgcgctgactaatgattttaatatcagcgcgcaggatattttcaacgggcaggccgtggcaattggcaatgccgccgacctgaacgcctacaccacggcgggactgtattaccagccagcgaacgcgcaggctcaaaccggcaggaactatccagaagctaacgccggttcgctggaagtttataagcatgccggtatcactcagatttaccggatttataacagctcccgctcgtacattcgctcgctttacagcgggacgtggtcagcctgggttaaacagtatgatgcggccaataaaccctccccggctgatattaatgccgtgaataagggcggcgatgcaatgaccggggggcttaagattcgcgctgctgatgcgttgcgcatttacgatgcggcatacggaatgatttttcgccgttcagaaaataatttttacctaattccgacagcaaaagaccagggggaaaatggcggcataagttcactgcgtccattttatgcagatctcactaatggcagagtgacgctgggtaatggtgcagtcgttaacggcggtcttgggctgggtgtagtcagcggccttggggggaactctattgctctgggggataatgacaccggtttcaaacagaacggagatggtgtgctggatgtttatgccaacagcaaacaggttatgcgattcctgaacagtggcataacgagttatatgctcttcaacatgaatgcaggcgcatcagtaagcagcactctcacctttaaaaacggtagcggtatcacttcagagaaaactggtgccaacccccgaaacggccgaatttactggggcggtgatgcgagtcgcggcaataggatagagtttgcagatgatgccggctggaaagcttacattgagcgtcatccctcaaacggtgttcagttagtcgtaaatgggcgaatcaatggaagtattgtttattccagtggtgaagtactggcaggaggagggagcgcacgctttgctgctgatggaaatatatttggctcaaaatggggcaatcaatggcttgatgcctatttaaaaaatacctatcagccaaagggcaattataccccggcaggtcaggcctataccaaagcagaatcggaagcgcgttatggggtcggtaaaacgacgacaggtaataacagtgcttactacacgcacggcaacggtgctgtgtttatgcagtctgtgagaaatatttcagtcggcaataatgccactgtgaccgtgacgctgcctacgtcgttccctaatggaatcctcggtatcggttcgagttattacggtgcagggggtaataactcagcatcattttatctctgttcgcctgtcgggaaaaatcaggtgaaaattcaaacccataactgcaacggaacattttatttaaacgtaacaggttactga

SEQ ID NO: 160636 - DNA, 978 bp, Enterobacter cloacae
atgagcattttaatgttcttaactcaccactcccgtgacgagtctattttggaaaaggttgtaacacaatccaaaacattattcatcaaatcacacccaacaaaaatggaaatggatgctgatttcataaataagattgttgaaaaactaccagaactaccaataatctataaacaacagaatcggcttgactacagactggaacacgaagaagaaaaagatagaatagaagaggggcagtccagtagctttgaatcagtattaaactctgaagaagaggatgacgtcagttataatgcagcacaagcagaaaaggagaagagtgttattgaatcaagtgatttcataagagataccaaccttacatttaaatctctggaaatccttggacagctttctaggaattattatggttctttaaaagtaagtcaaaaaagaaagcttctagaagaggctatcaaagcaccattaagaactcttgattattacttttcaataatcgaggacaactctgacgctgcattagaattagttgaaaagaaaattcttgaaaaatatgatgggaaaattgattctacgacctcaaatgaggtaaaagaaactgccagaagattctttttcgaaatgatcgttagcttaagttattttttcattacaaagatatcatcttctattggcagcgcaaacttgcaaaatataattgatgaaatatgtgatgaaataggttcaaactcaggcaagttaataaaactggcaactctcttagaattgggtaactcagtatccgtagaagacttcagacgtttcttttcaacaatggaaaaaaatcatctatcggatagattattaaaggcaattgttgtcaattatctgtatatgtttgagcgctccgatagcgaaacacagcagatatgccatatcacaggtatcaactacaggtctatatccaaacagataggctttgatagaatcatttaa

SEQ ID NO: 160637 - DNA, 558 bp, Enterobacter cloacae
ttgcagctcagagtttttctgtgcaaacgaatagcctggcatcagcagttttacaccggccattgtgccagccgtggcaattccgacaccggcagcaccagccgccgccgcactccccgcgagggatttaccggtctgataccgctctttaacccggctcagctttgcctgttgctggctgacccgcgccagcgcctcacgttgccggttaagctgggcggtcgtctcgctgatgctggttttaaggcgacgctcgtcagccgacagcgttcgggtattaatcccggcctgagcaagctcggtgcgctggcgctgtaccgattgcctgagcccgttatatttgagttgcaggtcagcggcggatttttttgctgcctccatagcgcgcgcctgcgctttggtggggttttccgtgtttttaaactggacggccagcgctgcggcctcctgtttcgctttgttaagcgactgaccggtcacggcaagctgcgcgctcgctttcctgaatccgtcgattcgggacgcctgcgcgttaaggtcgcgcagggtcgtctgtga

SEQ ID NO: 160638 - DNA, 486 bp, Enterobacter cloacae
atgactatttcaaaaataggtattgaatatgacggagatcgtgagcatataaattcacatggcattctcgatgacaaaaggaaagatttaattgttttaaaacaaacaggaatgatgagattaagaatacaacctgaaatgcttcaaaaggatgaagacatcaagaacgtttataggtcaataaaaaaatattttgagcagtatacaaagcttttaccgaagaaaaaaataccagcatcctatgtagattgccctctgtgtgaaggtgttcaaataatgggtgctgaggcttgtccagtttgtataggtaatggttcagtaaagaaaaatttttatcgagtaattgatatcgatgtatttgactcatttgattgtccagactgtttaagaaaaagtgtaaaaaattgccgaaaatgtagaggaacagggtttcttaatagagatgaagctataaaaataaggcgagatgaattaaaaaatacttag

SEQ ID NO: 160639 - DNA, 276 bp, Enterobacter cloacae
atgataagaatggaatttaacacttacgatgatgggacatactatttcctgtatgttacagaggaagtacgtattgaaactaatggtgctgatggtttgcagatggaaacattcgattcgagggtaagggatttaggtgatccgttccagtacttaaccatcagagacagagagcgaaaggatgagtactttaatgaagccattataaacccgtatattgaagtggtgattaaagctgttgaagtacttgtttctattttatctattaatgattaa

SEQ ID NO: 160640 - DNA, 540 bp, Enterobacter cloacae
atggaatataaaaaattaaaccaaacaatacttgcatttgtcttgattctttcattacttttgatttgtgtcatcttgaaggcacttttttttggaaataataatttcgaatggggtagttttacagattggatcagttctttatcaacattgggtactttaggagtcgcttatgccgcatatagaaaagcaccagaatggatgtatcaaaagcactacgatatggtttctaaagttattgaagaagcaatatatgaagacttgagaaagttgtcatcgctaagcaatcagtataaaagccttattgtacacacatgcatgactctaaaaacatgcttaaataagcatgaagaattacctcatcatatgacagacactttagacaaagtagaaaacttgctaattgagtttttcaatttatcgtattcaatacaaaatagattaaaggcaatcccaaggtatagctatataatcactccgtatgctaagaatataatcgacatgacctgctccccgttgattagtacaccccgatgttag

SEQ ID NO: 160641 - DNA, 270 bp, Enterobacter cloacae
atgtaccattgcatgacagtttggacaaaggggaaccatatcctcaatcgggtttactacatagttctcacctactgtatgcagtggtttgatatgatgaacgtgtataaatcctttaccgtgttcgccatagactttctcaaagtcaaacccacaacacttgcaagaagtaccgtgatggtcaatacacacctgccgtgcttttggatcacgctcataggagtttactgtaacttgcttttttgcaccttcagcgtagttttcaggtga

SEQ ID NO: 160642 - DNA, 279 bp, Enterobacter cloacae; identical to SEQ ID NO: 127157

SEQ ID NO: 160643 - DNA, 165 bp, Enterobacter cloacae; identical to SEQ ID NO: 156623

SEQ ID NO: 160644 - DNA, 255 bp, Enterobacter cloacae
gtgctggagtacatcctgcgctacggccgtattgagtctgttaaccagacctttaagctgacaggtaaccacttcatcgcgtacgtgcgcaattcgcagtacatcaaaacgcgcattgccgcgccggtgggcaccttcatgatcccgcgccagaacccgttcgacaactacaactctctggtctggagtgctgtcggtctgcagattaagcgcgatttcaacggtcgctctaaagtgttcaacgcacagggttga

SEQ ID NO: 160645 - DNA, 210 bp, Enterobacter cloacae
gtggatgaggcccagattgtggctacccgcattatggacgcggcggcagtaatgaaggatgtggcgcaagaggccgtgcattgcaccctcagtatcggtatcgcctgcgcaacgcgagacacaagcagcgtggccgactggctgcaggccgccgatagtgccctttaccatgccaagcgtgaaggcaagaacagaatattcgcacactga

SEQ ID NO: 160646 - DNA, 1218 bp, Enterobacter cloacae
atgaaaacaaacaatctgtacagagaggtggtggtcgtcgcagatgactttaccggcgcaaacgatgcgggcgtcagcctggcgcttcgcgggaaaaaggtctgcgtggcgttccagacggtttctactgaacccactgatgcgctggttatcaataccgaatcacgggcgctgggagcatcagaggcggctgaaaaaattgcgcgcctcggcgcggatgtcgtgaacgcgcggtggctgattaaaaagattgattccacgctgcgcgggaacgtgggcgctgaaactgcagcccttcaggcactgagcggtaaacggcagatcgtcattgcgccagcatatcccgcagccgggcgcattacgcggcacggtcagtgtctggttaacggtatcccggtaaatgaaaccgaatttgccagcgacccgaaaacgccggtgccttctgctgacattgttgatctcttcttcggactggcggccaaatccgtgaccgtacacgacctggaaactgcgctggcgcaaggggatggcgtgctgattgtggatgcagagacggagggtgagctggatgccgttattgccgccgcgctgacctgcgagcagacgccgctgctggtgggatcggccgggttgtgcgatgcgctggcgcgccatctcgcgccggtccggcgcaaacagctgctggccgtcgttggctcgatgagtgaaatcgcgcagcgtcagattgcgtttgcgcttaacgcacctggcgtgtcgcgggtgttcattgatgttaacgacatgcttaacggcacaacggcagacgcattcatccgagttattcaggcgcttcaggcgggtaatcactgcattgtgcatacctgttcggatcgggagtcccgacatcgcgttgaggatatttgtagccaacatcaaatgacccgcgcggcgctgggtgacaagatttgtacttatctgggaacgctgacccgcgaagtgctggaaaagcaggcaccggatgcgctgtacgtttcaggtggcgatgtggcgatggccgttgccagcgcgcttgaggcacaaggttttgagattacgggacgcattgcacagtgcgtaccgtacggcagatttttgggttgtgcctggcatcggccggtgatgaccaaagcagggggcttcggaaaggaagagacgctgcgtgaggttttgcattttatcgaggagagaatgagtgactaa

SEQ ID NO: 160647 - DNA, 885 bp, Enterobacter cloacae
atgcgtaacaccataaagggcgtactgacggcaatcgtcaccccctttgacgcggatggcgacctgaacttaccgggactcacgcggcagatcgcgcgtcagctggatgccggtaatggcatcttttgcggagggaccaacggcgagtttttcgtgctgagcgaagaagaaaaactcgccgtcacccggcactgcgttgaaaccgtggcgggacgtgcgcccgttgtggcccatgcaggagaaatatctacccgccagaccatccgtcttggcaaacagatcgcctcactgggtgtggatgccatatcggtcataaccccttactttgttcccctaaagcaagacgagctaatcacgcactatacggctattgccgatgcgctgagcgtgccgatttatctctacaacattccagcgagaaccggtaacaccattgagcccgacaccgctcgcgcgctggcggagcatcccaatattatcggtattaaagacagtgccggtagttacgagagcctgagcggattcctcaatgcggtgaaagacattgacggattcgacgtgctgaacggccccgattcgctgatccatcagggctttgtcgatggctgctccgcctgtatttccggactggcgaacgtggcacctgcggccattaacgccatctggtcacgctttaatgcgggtgacatcgacggttcccgccgggctcaggaaagcgtcacccagcttcgcacggagttatacagcgtcgcgttttcccccgccgcagttaaaaaagcgctgcagatcatgggagaagacgttggagaaagccgatacgccgtggcgtttaacgcgcaacagctgcaacagatacgccagatagtgacagcgtcactaaattaa

SEQ ID NO: 160648 - DNA, 471 bp, Enterobacter cloacae
atgattattgggcatctcaacgccctgccactggcagggctaccgtcggcgttatacgccctgctttcccgcccggagtgcacgctcccggctcttatggcgcgcgcggatggtcgctggcaaccggagaatagcaactggttttgccatatcgggcctgccaggacgcagccgcgtaacgagcggcacacggagtaccatcaccagtgggcagatattcaggttgtgttagcaggcgaagaatatattcacgccggagcacttcccatcgggcggccgggtgatgaagagcgcaagccagatctgtttattgcctccgccgctgaacacagcgtcactatccgtctcggcgcgggtgattttgccgtcttttaccctggtgagccccatcaggcgctgtgtgctgccgtgtcgcccatgaccgtgcgcaaagcggtattcaaaattccccgcacgatgctggaggtatga

SEQ ID NO: 160649 - DNA, 792 bp, Enterobacter cloacae
atgaataaattaatttcaaaacacttaaacaatacatataatgccataactaataacaacttaatattaaccattaccatgtttgatttgataaaaaaatccgaagctcttaccgttgcaattttaacggcaagttgttacgtaactgcgtatctttttgaatgcggttacaataattttttcagcattccaaatgaattaatctctatttcagtaggggaaataatctcaaccacgataagtttgtttgtagcatctgttatcgctttttttggatgcacatttccatacgttgtaattacaaggcattttggatattataaaatcactgtaattgcatcattaatcgcctcgtttattacattcattctcttaaacatattccttattagtgggatcacaagggagactttaattaaagcttcacttgcatggatcataattaccttggtaatgtttttttgctataacgacaatgatgataataatttcagcatggcctatcctactatttctaaaatacatgatgtatcaggatctattttttggttaggtctggcatacattattttcgtaagtagttgcgggacatatattgcccgacaaaaaacaactttccacacctttacttcagataacactaaatatgctataatcaatatttatggagataattttattgcaaaaaaactcaaaaacaacaaaccttctggtgacatttttatctttaggcctgaagatttcaaaaaaaaaccgatcacaacttataacccaaaaactggaaagccttaa

SEQ ID NO: 160650 - DNA, 543 bp, Enterobacter cloacae
atggtgtcatctgacaatgctctcttaattatcgacatgcagcgcggcctcttccgtggcccggtttccccatgctccgcggacgccgttctggcaaatatctgcttgttaatcgcccgcgcgcgacaagcagaggtgcccgtcttttttgcccgccatatcggaccagacgactcccccttctcggagaaaggcccattaacacagctgatacccgagctggacgtgaagacgctggatgttgttttcacaaagcgctatcccagctgttttcgggataccgaattgaagcgtgaacttaatcagagaggcatcaagcagctggtcattgtcgggatgaaaacagaattttgtgttgataccacatgccggtccgcgccggagctgggcttcaggacggtattgatttcagatgcacataccacaatggacaatgaacatttatccgccagcgacattattggtcatcacaacagcacgctggccggtccgttcgtgacgctgtccactgcaagcgactggcattttaatacggtcggttga

SEQ ID NO: 160651 - DNA, 744 bp, Enterobacter cloacae
atgctgagaggtaaacgcgctgttatcacgggtggtggcggaggatttggtcaggcgctgtgcgtctggctggcacgagagggcgtagaagtggattttagcgcccgtcgggcggtggatattcaaaaaacctgcagcctcatcgcagctgaaggtggtgaggcgaaagggtatctctgtgatttagccctgccggaatccatttctgagttttcttcgcaggttttagattcagacaggccaatcgatattttaattctgaatgctgctcagtggttgtccgggacaatagaccaacaatcgagcattgaaatcgtcaataccgtcagttcaggcctgacaggttcaatcctgctcacccaggcaatacttccgggtttaagacgttcagagagtgcagacatcattgcggttatatctgcgtgcggtattccgaactttacagattcgattgcccatcccgctttttttgccagcaaacatggaatgagcggctttatcaccaaactgtcaaaagaactgtccctcgaaaatataagggtaaccggcatgtatccacccgattttgaacttaccgggttagatgcgcttgtcgacgatcgatcacgaatgggggagcgcttaatgaatggacgatcggtctgggaaacgatgcgttttgtgctgactcagccacgtagctgccatattggtaccgtctactttcagggacccactcgcgaagatctggaatgtcagtcctga

SEQ ID NO: 160652 - DNA, 774 bp, Enterobacter cloacae
atggaggacaatgctaaacttactgctaaaataaatgaacttgagaataatgttacagttgatgtacctaagcttttagtaagaataaatcagcatgacttcctgaaagggagcttagatattcaacttcccaagcccgaaggttttgaatttggacattcaccaatttcaattgaagacatcccggtgaagttgcgttctttaatttcagagggtgagttaaagctctataattcattgttaccatcaaaggatgaagttgataaatattttttgagatcttcattatatacggttggctgtagtagtcccatcaacttttcaatttataacagcggtcatgtcaaagctaataatgtactaataagaatgtatattcctgatggattaagagtgttaaagcattctgaggtttcaattttacccgagccgtctatcaatatgcctcttcaccccattaacttagctgaaaaaagagaaaagagttcagaacctgattctcttaaaattgttgttcgtaaagtatcacaagggttggcaaaaaaagttagatcgcaaacaccttcctcaggtcaaaaaacgcttactataagaaaggggaaaagcatatttggctccaaggatttcataagacaatctacacttcatagcctctcatctgatatttatcttattcctgaaaggttaggcgaattcaagataagagttacaattatatgtgatgagtatcgtgagtggagtgatgacataatcataattaattttattgagtga

SEQ ID NO: 160653 - DNA, 153 bp, Enterobacter cloacae
atggcgttacagggaaagatgattctgaacggcgcagattacgcgcctttcgatttgtatggggtgggcgtgttcatggcgcactcagggttggggccagcagaaacaatgccagttgcggacatgtcgccaatacgggtcctattcccttag

SEQ ID NO: 160654 - DNA, 729 bp, Enterobacter cloacae
atggcaagagttagcaaaagggaatctaccaatcataatagcgtgatggagttagtacattcagataagcaactaacacaggatgataaagagtttatcttcaataactatcaaggtgatggtatcggtgctacaggggctttctttactcctgaaatgctcgcatgggatttcatacttgatgctggatgcagtggagactgcatagaactatgtgcgggtataggtagacttagttactatcaatttttacgtaataacccttctcacatcacatgtgtagaactcaatccagaatacgtaatgattgggaagagggtactaccacaggcagaatggataactggtgacgctctacagtacacaccagaccgtttctatcgtgtcgcctatggcaaccccccattcggtaagattaatacttcagagggctatacaggccgttataaagggtctgaatttgagtacaagatcattgaccgggctagtgactacgcaagcatgggagtatggatagttccacagggtagtgcaggatttaagtactcaggtcatagctactatgatgatagcgtgcagacaccaaagtatcacagattcaatagagaaacgggacttgtactaactcccggtgtggggattgatacatccatttaccgtgatgaatggcatggtacgaaggtcatatgtgaatcggtgattgtcgattatgatggtatgaatctataa

SEQ ID NO: 160655 - DNA, 294 bp, Enterobacter cloacae
gtgattagtatcttagtagaactaataaaatctggtatggattttttcataaagaaaaaaacagttgaaaaagaagtacagaaaactaacgccgaagggcaaatagaagtaaacaaagaagagattgaaagagtatcatttcactggcgtaatgcactaggttttgtactgacactaatcattctctataactggattatagtacctgtactggatgcctttggtatcgtagtaatccaagtaccactagggcaacttttacaggtgcttttgattatggttggtggaagctaa

SEQ ID NO: 160656 - DNA, 321 bp, Enterobacter cloacae
atgaatttagatgaacatcactacggggaagaagtggataagattacattagatggagtacaaccgtttggtaactcctatcagtttgatctattccagttagataataaaaaaatcaaaaagaagattaaatccctagcaccagatactaagacgtatatgaatattgtctttagctatcgccaaacacagtggaatgatggagatacattagaatgggtatacaatagtattcctttcgaagttgtactactagattcacacttgcttagtgttaagggtaagaaattctatcaatacgtagtaggagtaaaaccgtga

SEQ ID NO: 160657 - DNA, 579 bp, Enterobacter cloacae
atgaaaatcaaaacacaggttaccgggttatcttctgcaaagggttacattaatcagcagggtaagttatacggaaatgaattccaaaatgaactaatcacacgcacacgccaactagcaaagacaatacaaacggatatgtcaaaggctatcgataaagggccagtaccttttactaataatgcagtactttacttttacaagaaagtgggtactagcgttaaatgtacaatcatgattaaggatattcaggcagaatatctttatgatgttattgtacagccaaatcccctaaagaaatttgttccgactagttcagcacgtttatctaaacagggcaacataccacaactaaaaagcggcttagaaaagggtaggtataaggtagtagtagagaacggtaaaaaatatctaatcgatactactaaaaaggatactaagaccaaaactaaacgcgtagtaggagtacgtgaaactaagaagagaaaactagtttatgatttctataaggaagcagaagcgggaattatcactattgtaagtagtatgcaaggtcactttaaactaaagaaaggataa

SEQ ID NO: 160658 - DNA, 717 bp, Enterobacter cloacae
gtggcgattcaaggtactgataaatttatatctagatctaaatctctttaccctgatcttttcggatatgatagggctaattatcataatgcaaatactaaattgtggttatattgtaaggcatgtaataaatattttgaagttttcccagtagcacattatagaagccctaaccacgagggttgtacattaaatagacctattaaacagagaacgaaatcactaaaaccaactaaagctagtataatgaataaattggtttctgataacaaatcaaactacaatcaaaattgggaatatgctaacggatggaatgaagagagactactagatggtaactatgcgggttttatctataccttctattttcccaagttagataaaatttactatggctctaaacagctatacataaaagtaaagaataaaaagaaaataaaaccatccagtaaagaaaatggatggcgagagtacacaagtagtagtacagaagttaacgaacttatcaatagtggggaagagtacattaaaactattcaatacgcctttcctctaatgagtgaaacactacttgtagaaacatccctcattactacattaggtttacatcctaactgtattaataaagcaataatgaataagtgtagtgtacctaatggggaacgtgcttatgaattatatcaaattataaaggtactaatagaggctctaagatga

SEQ ID NO: 160659 - DNA, 588 bp, Enterobacter cloacae
atgagatttctgagttttttaaccggacgtgtattccaggatctcctgcagcatggcaaagagatagaggaagctattgctcgtcgtgatacccgtcttttgaatcattccactcccgagctggaacggtatttttctcgtcctctcgacgagcttccgcgtcaaaacccttacccgatagcggcgctgttacctctgtttttagtggcatttacgttaaatcttctaccttttctccacatgttgcaggggttgtcgcctttacatcatgcactgagttttttcgtatcatcattgataatccttgtcacgctcattgttagtagcgtgcttcttgcccgaggggtgacgtcaggtttgctgggcgttatggcattgttcatcatcctactggtcatgaccctcgttcaggcgctacatcacctgttttctcatggcggaagcctttggccaatagtcatcgcatgcttcgccttgttactttgccgggtggtgatgaatagcagaggttttgtgttgtttaccctctattgtcgcactcagcgtcttgccagactggcacgtgaaatccggttaaaaagccgttaa

SEQ ID NO: 160660 - DNA, 690 bp, Enterobacter cloacae
atgtactatagcgctcaagtgatacgttatttacaggcgaataacatccttgcgttaaaactcgaccacgcattagcgggtgtaggaaaagccgtatcaaatcagattgaaacgatcggcgcaggtgctacgcgcgcgctgtattatacgtcttgctttactgctgaatatcaggatgtatgtcagaagcaaaagtccgaagacatgcgatttgctaagggtgtatatcatgtaatatggcatagagatgttgtgtgtgaaatgctcaaaatctattttgaagaagtattccggcacaaaacctccgatcaactagagcacatcaaacaattactaatggcagtaaatattcatatcgccgcaagttcactgacaaactcgggatttgctttagcaacagcatcatttgttgctgcgggcttgaatttaagtcttgaactcagtgtacagacaggacgaagagcaggcggttttgttgggattattggcgtatatggcgttgtgcagaaagcggcagatagcgcgagtcgtcttcagattacctatccagagtactactcggcattatatgcacaggaattggaaatgatgtacttcctgatagaaccattgtttgagcgagcaggagcgtttaaagcacaatgggggtcggatggtgaaattgcagatatcatcagaaggctgatttga

SEQ ID NO: 160661 - DNA, 174 bp, Enterobacter cloacae
atgttcgccatgctgccactctggtttatgccacccgtacgcgatactctgttcttacgccacgcgatagatattcatttgtatttaagaggcattgcattaaaaacgggatactgtttagtcgcacttaaaagagtaatttgcttaatatattttatattctttattaattga

SEQ ID NO: 160662 - DNA, 1314 bp, Enterobacter cloacae
atgaaatttttagatgacattatctcttcaatagctggtaatgcaaaaacacggataaatgatcctttcattggaacttttttctgcacttgggttgcttgtaactggaatcatttagccttacttttttggggagaaggaaaagttactgagcgcataaatgcattctatggatatctatatgaaactccattattaaaactaaattatatatttacgattccatttttaattaccttgttttacctcttgatatttccttggggagctgtagcaattaatttcatccagcgatgggctagcgaaaaacttcatggtcaggctgtagatattgaactagctaaaataaatcagcaaaaaaagttaaataaagaaaaactattgtctgatcctgataaacagtttcttgagcaactggcgcaactggatattgataagagacatgaaatacaagagcatctacggcaaagaggggctcgtttagcggctaaagcacttgaagccagcgagaaagctaaagaacaaatgttaaaaactcaagatgcagaaaataaagaaaaggtttctgcattagaattagagaaaaaaaccaatcaggcagagcttgaaaggattcgatttgaaagcagcacagcaaaggctcgagctaccttagcttctcatcgttttccttcagcatatttcctcatattgaaaattgaagagagcttaaaaaacgacggcataaaaatatcattacagtcattaagtaatattgtatcagttctttttggatatgaagattttgaagaattactagcagataaaaactttaataatgaaactttagataagattgaatttatttattatgatgatgagttggcaaagcgcctagaagaaattttgttagaagaggactcagagaatgaggatttaacttcagacatgctcttcgagcactttgaaattatcttcgatgacctgaatttctcactagtttccggtgacgaccttgctgaaaaatgcaaagaaaccttcgagaataatcgttacaatgtatttaatacggaagggttatcgggtgcaattgcagaatccgatactgtttttgatgaaatcgaagatattaacattgagcaatttgaatttgataatggtttttatacagaactttcagcgcatgctagtggctctcattacaaggaggaaggtgtttctgggagaagtatgtcagtttatattcagatgaagagtagtgtactgattgggaaattcggcctcggctctattgaagagggagatgtatcaggcactttagatgattacgaataa

SEQ ID NO: 160663 - DNA, 636 bp, Enterobacter cloacae
atgaaactcaaatttttttccactgatatttatattaataagaatgacgtggtaaataaaattaacgccaggccttataatgatcaagatggctttgggttcgttttgcaagatgattttttcgatggttgtaaagttcaatatattgaaaaaaatacactggaaagacagattgaaacacctttaggtgaagtaagtttgattcaagaggtttcttattacaagtttcaatttcttgtgcggtataattcattgaattctttggtttttattaatcctcctagaaatataaaatatgcatcagacatagttagaagtgttatacctgcgggtgtacatgtgacctccttgaatatcaatctcaaggaaaagattgaaaaattgaagcatgattttcaggctaagttaaagtgcgcaacattgagtaatatattctatgataaccatactcaggcaaaaacaaagttgagttcaactggtgatttatatgatttttactctgaaaacttcaaaaaaacaatcgctaaagtagatattattatatttgatattaacggaaagctctatgagttatctgatcttggtaggttgagcgtgcagggtgataatttgggtgatatttttgattttatctga

SEQ ID NO: 160664 - DNA, 1308 bp, Enterobacter cloacae
atgaataaatatcaagcgacaatattttctaccgacagtgacatttatacggcgttgcagtcaaataagattaaattatctgataattccatcaggcagattgcattcaatcgtggggttttattttctgcagggattgagagggatgcattaattgaaaaagtttccgagcttcccttttcatattctcatgtggtttcaatacaagataaattagctacaaacactaaccatgagatttattcaatccttcgtgtttatgatggctttgatgttaatatgctttatgatgtggttgaggcagtaattaaagcaagaagtgcgaagtttaaagatgaaattattgaacattcagggctgataggcaagtataatgttgatataaaatatactgaatatgacttccggagaggtaaatttcaacaaaaaaaacttaacggtggtaagataagctttcttaaaactaaaaactttacatcaataaggtttacacaaacaaaaaaaataaaaagtattcttaatgatattctccttcactataaggctaatgttttaaaatctataactttacaatttatagactggtctcatgtttctgaacaaagactaaggaatatgtttgcaaaggagatatatgattttgataaccgcttggcggaggatggtttaatatatgccgggctggagaaagttagactaagtctaataaaaataaaattggacagtgttagtggctcaaatagtgcagatttagatacagatacagatacagatacagatacagatacagatacagatacagatacagatgtggatgtggatgcggatgcggatgcagggggcagtgaagaaataaatgctgtcgaaaaagataatgatgattttgaacagggtaaagaaatagattctcaaaatcgtgtatttagaataaataacgcatcctatgatggtcattcattagtcgatgcaaagcaaatagaagagctttgtaatgaaggattttatcggagtttgatccgctggaagtcaagagtaacttttcttgtgaacaaccctataatcacttttgaaatcggatttgaagataaacacttttgtaaggatattaagataaagattcttcataagcaatactcgttctcaggtgaagataaagaaaaagttgaaagtcatgaatttgaccaaattatgaatgtcctagaagagaggatctttaaagtcaatgacatgataattgaagagttaaataaaattactatagctccaatggttcctgtgacattaacttcagagggggcaaaagaatga

SEQ ID NO: 160665 - DNA, 1104 bp, Enterobacter cloacae
  misc_feature (984)..(993): n is a, c, g, or t
gtggcggaaaccaagaacattgatgcggttgccggaattatttcatctaaaatttttagagaacttaaatggcagtttagcaagcatacagatttgaactgggcgtgttgtttagacacgcatttaaaacataatcaaaaggagaagacacatcctacagatgttgtgttcttttataaggatccatatactgatatttatcaatacattcagactgatctcaaatcttattcaaagagcacaatagaatcttatcaatacactgaaatacaaaaaacaattaagagtttagcacagcaagtagaatgtagtgtaagaagtcaggaatggagagatttatttctttcagaaaagaaagaaaaattccaagttcacgggatgttgtttatctataatcatgataatgaatatgataacgatttattgaataagctttcaaccattctaaaggcggaattgcattttcctattgattcttatctttttattatggatcccaaatctataaggttcctgatgagtgtcactgaagatatatcaaaacgtcggaattatgattgttttaatgggcagttgttggaaattttatgggagaaaatacctgcttgggaacagtgcggtttcttttatccagataagcataataaattagcttcgaaaggcagaatgttaccagccaccctggaaatgataacatcagggatgattttttttcagtactctcatgattttattcgtgatcataatggggcgactgtaactaataaaatactaaatatttattggaaggaggaagtagataaagaagagcagtttgtgtttttgattgaatacatattcaattatcaattattaaaccaatttgataagatatttatagtgactccatttagttctgattcgacaaaatatttggataatgcaataaatacttactcgaaactatattcatttacattagataaactgaataatctcaggagnnnnnnnnnnaggcagttgcacaacatatctattgataatacgacatccagtatttttccttttagggtgatcagtaaagatgtcaataaattgtgtgacttttctggagagaacaaatga

SEQ ID NO: 160666 - DNA, 456 bp, Enterobacter cloacae
atgagtgactttaagccttttgataaccagctcgccggactgcttgctgctctgtcacccgcagggcgtcgaaagcttgccggtgagattgcgaaacagctcagagcggcgcagcagcaacgcatcaaacagcaaaaagccccggacggctcaccgtatcaggcgcgaaagcgtaagcctctcagggctaagaccgggcggattaaacgggcgatgttccagaagttacgaaccagacgctacatgaaagccagtgccagtaacaatgctgctgtggtggagtttacaggcaaggtgcaacgagttgcacgggtgcatcagtacggacttaaggaccggccaaacgtacacgctcaggacgtgcagtatccagaaaggcaattattagggttcggtgccactgaaactcagtttatcgaggagatagttattaagtatttagaacgtaatagataa

SEQ ID NO: 160667 - DNA, 822 bp, Enterobacter cloacae
atgattctatcaagtacaactcacctttttagatttcggggtgataatatcaataccataaatgaacttgttaataatgttatttggcattcgaagattggggggttaaatgacccttttgatatgttatttaatttagacaaagatgcattaatgaggcttaataagtctgaccttgcaacgattataagagacactgcttttcttaaagagaatagggatgcaattgaatcatgcttttttaataacaagctggatccaatatacgagtttatatataagtattggggcgatacctttgcagatggcttgcttaaagagtttcagaggaatgtagctgctgcctgttttacaaaaaaatacgatagtagattaatgtggggatattatggtaatggtatgaaaggtatatgctttgcatacaataaagaaaaattaaagtcatcaggtatagagttctctgatgtcatttactctgatgaagctccgaagattgacatttacaaacacttgcttgagaaaaggcgagggcgcattttaaccattgatggtagttttgcgctggtcaaacatcgcgactgggagaaggaagaagaggtaagaagtttaaaattcctcaaaggcgatgatatttacgaacaccagcccggttttgccgttccgttgcaaagttgctgtattgatgcggtaattgttggagaacgattgacaggtgatatgcaagctttcatcgataattttgccttgaataatgatattcaagtattcgtcgcaaaagcagattttacaaactacaaaatccaaattaattctaaaaagtaa

SEQ ID NO: 160668 - DNA, 300 bp, Enterobacter cloacae
atgtcaaccccggtatttgagaagataaagctgattagagaatcagagagattaaataagaggcaattcagtgagttaacaggaatagcctatagctctcttgctggttatgagtccggagacaaaaagcccggagttgagcaaatcatgaaaatcctgcaacacccccggttcacaaagtacacgttgtggttcatggccgatcaaataacacctgaagctgggcaaattgcaccggctctcgcgcactttgggcagcagacaacaacgtcaccccactcagaccagaaaactggctaa

SEQ ID NO: 160669 - DNA, 141 bp, Enterobacter cloacae
atgaatcaccgctatctgccattaactgataaaggcgcatggctgactgaaaagtggtttggcgttatcatctacatcgttttgagttttatcgcgtctggacgtcattgtacgcgcagtcgttactggggtaagtcatga

SEQ ID NO: 160670 - DNA, 741 bp, Enterobacter cloacae
atggcaggtcatagtaagtgggccaacaccaaacaccgcaaagcggcacaggatgccaagcgcggtaagatctttaccaaaatcattcgcgagctggtgactgcagcgcgtctgggcggcggcgatgcgggttctaacccacgtctgcgcgcggctatcgataaagcgctgtcgaacaacatgacgcgtgacaccctgaaccgtgctatcgcacgtggcgtgggcggcgatgaagacgcgaacatggaaaccatcatttatgaaggttacggtcctggcggtacagcggtaatggttgaatgtctgtccgacaaccgtaaccgtaccgtagcggaagtgcgtcatgcgttcaccaaaaccggtggtaacctgggcactgacggttccgtggcttacctgttcagcaaaaaaggcgtcatttccttcgagaaaggcgacgaagatgcgatcatggaagcggcgctggaagccggtgcggaagacgttgtgactttcgatgatggtgctatcgacgtttacaccgcgtgggaagagatgggtgcggtgcgcgacgcgctggaagaggctggcctgaaagcggacaatgctgaagtctccatgatcccgtccaccaaagcggatatggatgcagagactgcgccaaaactgctgcgtcttatcgacatgctcgaagattgcgacgacgtgcaggaagtgtatcacaacggtgaaatctctgatgaggttgcagcgactctctaa

SEQ ID NO: 160671 - DNA, 1668 bp, Enterobacter cloacae
atggaacccaataatttcaggtatgacattaacgccctgagggcaatatccgttgttatggtggtgctttaccactttaaagtgcctgggttttcatcaggttttatgggggttgacatcttctttgctatatccggatacctgatgacggggatcataagcagaggaatatctggtgacaacttgagcgtaatgggcttttactccagaagattcaaccggctttacccggcgctagccttcatgattgttacggttatggtgttcggttattacaccctgacaaccgttgactatgccatactcgccaagaattcattatcatcagctttttttgtttcaaatgtttattattttttcaattctggatatttcgatcaatcctcacttctaaactggctcttacatacatggtcactttctgtcgagtggcagttttatctggtatatcctttaatattgctggtatgtagtaaaactttcaaaagtatcctgccggcgatcatcataatgatggcggtttcagtttacttttcagcaaccatgacattcgataataaggatgctgggtattttctcctgcataccagggcatgggagatgctggctggaggtgtagcgttcttcatcaatgggtatacgagtcatagatttaaatacaagaatattgcctcttattttggctggacgatagttctgctttctctggtaatgattccagaaagcacgatgtggccaggctatacggcaataattcctgtgtttggtgcttgcgtcatcctctctgtgaatgcagaccataagtttgtctaccggaatgcctttaccaaaaacattggactttggtcatattctatttatctgtggcactggccgatagttgtatatatatactcttctggttcgcttaacagcgctgctcatgttgtagccgggttgatcgcttccacagcgatgggattcatttcatatacatttattgaatctactggcagaaaaaagctgatagctaatttaggcatcgtctccatcccagttatgttggcgtcatgcatattcatcatacagacagaagggttgaaatatcgagtcggtgataagctatacgatattctttcttataaaatggactggtcctctcataggaatgcttcatgtttcctaaatcccaaacagaaacctgaagagtataagaagtgccctgatgtgataaatagcagcacgctattattctggggagactctcactccgcacaccttatatctggttttgtcaagaaaaaccatgggtataaaggaatagcagaaaggactggaagtatgtgcccaccactgcttggggcagacatcccagaaagaccatactgtaaagaaacaaataactatatcattgatgagataagaaatgacaagccaggaagtgttatactttctgcggcatggattggatattcaaaagttaatccatttgaaagattgaaggctacaatacatgcactaaaggatgccggtgtgaagcatgtgtatgtggttgggccaatccctatgtggatggacacattacctaacctcatcgaaaagaatgggctatcagcaataccattacttggaagagagaatgttagaaaagaaaccttctctgttgatgatgaatcgccacgggtttaa

SEQ ID NO: 160672 - DNA, 591 bp, Enterobacter cloacae
atgctgaatccaggattcgttacccgcaaagcgcttgctcactggcgggacgttcccgcttttctaccccagtttcaattccatgagaaacatcgaacggtcattcatactgctcaccctgaaactattctgccattgattgctaactttgacgtccggcaagaccccgtgattcggcggctaatgtcattacgtcaaataccgcagaaatttctgcgcaacccgcagcctaacgcgatcggcgactttggtttgcacagctttacccttttgaaaagctcagcatgtgagctgtgctatggcttaatcgggcaattctggcgagctgatttcggtctggaagacgtgccggatgccagtgcttttcagacgccagccgcaccgggcagtgcgaaactgttacttcgctatcggataacggaactggcgccaggccaacatgaactctgtacggaaacgttcgtctattgtccggacagaagcactcggctaaggatgacagcttactggctggtaatccgggcgggcagcggctggatccgtaaaaggacgctgaaggcggtcagagagaatattgaaagtcagacgtga

SEQ ID NO: 160673 - DNA, 159 bp, Enterobacter cloacae
atggaggaaatggctctgatggcggaaacggttctgatggtaccgtctcatctaatggccgagcgggttgtccgggcggaacagatccggatcgatctgggcatttttatcttcccgatacaaaacagcaatgcaacccggggaagcaggatgcaatga

SEQ ID NO: 160674 - DNA, 585 bp, Enterobacter cloacae
atgaatgcgtctgatactattgtgaatgagatcgaaaaagcattaaaacaacttattgtcatttgcaataaatactcgctgtcagtgcgtttcagcaccgtcaatgatctggacaatgccttcccgtccgacttacctcgttcaatagaggtggattttttatataaaaattataatcctgaaaagttaaagattgaaacaggcttcacgccaattaaacttcactcagtcagtgaactctcgaaggctcaaagtggttatgaacacttaccagataattttcttgttattggcgatgatttaggtggaggtaaacctataattgcggttatcggtgaagggagttcctctgtttatgcaggttatgatgtaattgaaccgtttcagatagctagtagtctctctgggttcatatattctttagctgagcttattgatttggtatatggtcaatacgatatctttgatatagcagatgataatgacgaagtaaaagatgattttattgatgagctgcgggaaaggattgtgcctcttattggtaatgaaaatttcaatgcgttttataattatttctatggatag

SEQ ID NO: 160675 - DNA, 363 bp, Enterobacter cloacae
atgttaaaactttttgctaagtacacatcgattggcgtactcaacacgctcattcactgggttgtgtttggtgtttgcatttatgggttgtccacaagtcaggcattggcgaactttgctgggttcgtggtagcagtcagctttagtttctacgctaatgctcgtttcacttttaaagcatccacttccacgctgcgttacatgctttacgttgggtttatgggaacgctgagtgctgctgtaggttgggctgctgacaggtgtgggttaccgccaatcgtcacattggtggcgttctccgccatcagtcttgtgtgtggctttttctattctaagttcattgtctttagggaagcgaaatga

SEQ ID NO: 160676 - DNA, 1263 bp, Enterobacter cloacae
atgtcaagtgagaagcaagcgggaatattagcggcggcatctgctttcttggttgttttgttatcttccgcaattgcgccaatgaatggcgaagactttggccttaccaggagattcaccacagaaaccgcttttgatagattatcatttgcatttagcagatctggggctcagatagaaaactggaatgcgaggttgggagagcagtttgctatctttagtctcagcctaccaaattggttcatgattattattgccataatatcgttatttgctttaactaaagtaatagcaaaaatagcagatatcaagtgtgataatgtatttgctttcttaaccacattttctattataatttgcctgctaccgagctttgagttaatcacctggaagactattttagctggttacacagtcccgctgataatcacactttatgtttctacggttttcctaaccaaagagacaatgattaccgttgtgatgtcaaagccaaggttactatttttcgtttcattggcatttctcgctggcgtttcttttgaaaatgttccggtagctatagctgtctttatgctcctatctttaacatttaacaagatgttaaagtcatcactcacgctagtccccttagcatgtctgattggctgggcgctgctgatgtctgctccatctaccgcaaatagggtagcgctttacaaaaaaatgtatgggtttaaaggatttagcgtagactatttcataaatagaaccttggatgttttgttgaacttttacaatacaaccatatggttgtttgttatatcggctatatgcctgctcactttaattgcatataagaaaataactaaagagatagtgtttttaattatcgctgctcttatggttgtcgggtcaatggttgtctctccttatacagaacctagatcatttgcacttgcctggtgcgttatgattgctgtagtgaccagagctatatttaattttgccactattacaacaaaggcagcggtaatttttggtattatcgggttggctaccagcctgaatttgttttctataacactcaattttaataatttaatgactgaaagggagagttacatacttagcaaccttggtaaatctagttgcaaagaaggattgtttgtatcaactcctcattcagttaatgattatagattcattaataatcgtgacatctggtacttcaataacatttctcagatatccaagtattacggatgcaatcttaaaaagtaa

SEQ ID NO: 160677 - DNA, 1833 bp, Enterobacter cloacae
atgtctgaaagcctcaataaaagcctacgagaactcattcactttgaatcgtcagaatacatttctgatgtgaatcaacacaacattaccgtctggaaattaaagatgaaaaccaccgttaaatttttggcctctgccgttgctctttgcattgtgccagcagccagtgcaatcactctggaacaagccgaggccaatttgaaaatggcgagcgtagcttcccgttttgcggaaaagacttaccgaagcgctttaagtaacgaacatacaactgacgtcgcgatgaacaatgcgatggatacgtacggcgttctttcaaaagaagccgctgcggcagcaacggcacacagcgatgcgatagatcaaatccagaaggcgcgtcaggcggcaaaggatagcagggcaacacttgcagctgcgcgccttgcattcaaaaatctcacgccaacaccggttccagcttcacagacggttcctcagaagatatctccaccgatgaaaaccccggtcgccatcccgcaggccacgccgcagaagctggtctccaccgccattccgcagccagtgatagccccggttgccatcccgcaggcgatcccgcagaagctggtctccaccgccattccgcagccgatgaaagccccggttgccatcccgcaggcgatcccgcagaagctggtctccaccgctattccgcagccgatgaaggccccggttgctgtcccgcaggccacgccgcagaagctggtctccactgccattccgcagccaatgaaggccccggttgccatcccgcaggccacgccgcagaagctggtttccaccgccattccgcagccaatgaaaaccccggttgcgatcccgcaggccacgccgcagaagctggtctccaccgccattccgcagcccatgaaagccccggtcgcaattccgcaggccacgccgcagaagctggtttccaccgccattccgcagccagtgaaaaccccggttgttgtcccgcaggcgatcccgcagaagctggcctccaccgccattccgcagccgatgaaggccccggtcgccatcccgcaggccacgccgccgaagctggtctccaccgccattccgcagccgatgaacaccccgggaccgatctctcaaaatgtcccgaataaaaaaaatgtactcactgcctcaccaacaaatatgacgacacaaattgtggtgacgaaaacgcagccgacaaccctttctccaggtctgccgaaaaatgctgtaatcaatccgcaaacgccgtacaagagtagcgtgactattatcgagccaaccacgcagcctacgtcgggcattgtcgtgatcagcaaagctgacaatacagcaaagcaaaccgctacagctgtcgcaccaaagagtaccaccaccagccagaccgctggctcaacctacaatgtagtcgctatcaatcaggttaatagctactacgttagccaggcaaataaccgtcaggttgcggataatagtcagcgtatcgacaacaatagtcagcggatccagagcaatagccaacgaattgatggcaacagcaaagccatcgatcgtaacgcaaaagagattgatgatactcgcgacgagctgaagcgtggcctgaacaacgcggcagcgatgtcgagcctccactaccattccgacaactcatgggcattatctaccggaaccgctaatggcgacggtgcagcactggcgggcgggcttcaaaaaggcctgacaagccacgttgccgtgaatatgcaggcatccacctctttcgacagtggatggatggcaggcgccggcatttcgggagatttctaa

SEQ ID NO: 160678 - DNA, 522 bp, Enterobacter cloacae
gtgaacgacgtgaagatagggattttttcagaagacgttgagtacgacctaagccagttcgattgcggagaagagagtcttaacactttcctgacggagcacctgaaacgccagcatcgtggaaagtttttgcggggttatgtcctcaccacacgagagacaaaaccgcgtattctgggctattacacgctctccggaagctgttttgaaaaggcttacctgccctcaaaaactcagcaaaaacgtattccttataaaaatgtaccgagcgtcacccttggccgtctggcgattgataaacgtattcaggggcaaggctatggagaattactcgttattcatgccatgaagaccgtttatttggcctcctttgccgtcggcattcatggcctgtttgttgaagcactcaaccataaagccaaagatttttacctcaaaatggggttcatacctctcctggccgagaatgcattcacgctgttcttaccgactaaaacctttgagagggtgtttgaagagtga

SEQ ID NO: 160679 - DNA, 270 bp, Enterobacter cloacae
atgtcagcactgaagaaacagcgcatcgatctccggttaaccgaagatgacaaaaacatgatcgaagaagcggcggcaatgacaaaccagtcgatttcacaattcatggtcagcacagcctctgaacgcgcagcagaggtaattgaccagcaccgccgcctggtccttagcgaagcatcctggaatacggtgatggatgccatcagtaatccgcctgcgccaaatgaccgcctgaagcaagcggctaagcgtctcctggatatggagtaa

SEQ ID NO: 160680 - DNA, 273 bp, Enterobacter cloacae
atgagtgatatccaacttttccgttacggtgcaagcggcgtaaaagaactttccggtaaagcagcaaccatcgaaaaagagctgcaatccttgatcgaatcccgcatggagatcttcctcggggttcgttttctcgacagtgaatacagcaccggtaagactcaccgtgggcgtattgattcgctggggctggacgaaaataactgcccggtcattatcgaatataaacgtcacagcaacgaaaatgtcatcaaccagggctgttttatttag

SEQ ID NO: 160681 - DNA, 1332 bp, Enterobacter cloacae
atggctggacttaaagagtataaaccttatgagcattatgaagatgcttatgcagtttggtataagaaaaaaccggctcactggaaatgtgagaagttcaaatattatttcagcgaaaaagccaaaaaaaatgcagcacacctaaaagctggggccatcagttttggagaggtaacttacaaggacgagaataatttatcgattgacactaaaaactcttaccaggaagtactcgcaggtgagtttgttataaatccattaaatctcaatttcgacttaaagagtttacggactgccctatcaaaaattaatgtagtagtcagcactggatatatcattctgcgtattcatggtctattaaatccccattactcccgttggcttttgcatcaattcgatgtttctcatatgaaaacattaggttctggagtgcgacagaccattaattataatgatattggcaactctttcttttgcaggccacctttagaagagcaaataaaaatagctatgtttctcgaccacaaaactgtaaagatagacagccttatacaaaaacaacaaaaccttatcgaactgctaaaagaaaaacgtcaggcagtgattagccacgctgtaaccaaagggctaaaccctgatgtgccgatgaaagattctggggttgagtggttaggggaaatacctagccattggcgaggaatctttggtaaaagaattttctcgaatgtgcgcaaaacagcgcaaaaaaatgataaacaacttgcagtaagccaaaaatatggtgttatccctcaagtattaatgatgcaattaaatgattctaaagttgtacttgcactaaaagggaccgaatcattccgacatgtagagaaagacaattttgtaattagccttcgcagctttgaaggaggtatcgagcatagttcttttgatggatgcgtttctcctgcatatacagtgctgaaaaacattgcgcctcttcatcattattattatcgtttcctctttaaatgccaaccatttattgcagcactaaaatcctcatcggacagtttaagagatggtaagtcaataagcttcgaacaatttggtaatatcaaatttcctttaaatacaattcccgaacaaatttttatagcttcatttcttgattacgaaacaacaaaaatcgacaccctaatccaaaaacaactcaaacaaattgaactcctaaaagaacgtcgcaccgcccttatctccgccgccgtcaccggcaaaatcgatctgcgcgactggacgcctcccgccaacagtaccgaaggatccctcaccgctgaggaggccaccgcatga

SEQ ID NO: 160682 - DNA, 1074 bp, Enterobacter cloacae
gtgaaaaaaaatcttttcatattaacgacgatgctgctggttatttccggcgcatcacatgccgcattagaatgtaaattcaacagcaatgatacgctgctcattatgtctccgggtatacagccggtcattactcccctgcctgttggcacggtaacgacacccgtgcagatcagcaacgccatcattatggagacgacgccgtcattgtcatcaagttgtgaagtaggtaacgacggtgaaaacgtttatcagatgactaacaatgccatgctggaaggtgagattgacggcaaagccacgtttcggacaaacgtcccggggattgtctacacgctggcgttttaccctgatggcaacggtgtaacggcctggttcccccctaatgcaaacgatttttacctcactggcaacgatcatgataacgaagatgccgtagatggaaaaacctggcatgttcgtatggagttctggcaaacaaacggatttaacggtattcctactgacgagaactttttgaccgcgagcagcggtcctatcgggcaaatcattcttggcaagccggatgggacgacaacagaagatcacccacgccctctggtgaatatgtcccagatgtcgtttagtattccgttgaatcgaccaacctgcgtattacgcgcgccaccgacggtcgatctgggtgactggtatcctggagaaatcgaaaacaataatacccccaaagtcgagtttcatatttcgggaacatgtgtaaataccacactggttgagtacactctctcatccacccatacaaccgcagataaaaaatattttaccaatgccgttgagggtaatagtggtgtcactgcggcaggtggcgtcggcgtacagattttcgataattatagtgataactatccagtccctgccgacagttccaaacgcgtcattgctgctggagcaatagttggcgatcccgtaaatattgtagacagatcaatctgggccaggctggtcaggattggcggcgatccggtaaccgtcggtggttttggcaccaccgtgacctttcaggttacctaccaataa

SEQ ID NO: 160683 - DNA, 582 bp, Enterobacter cloacae
atgagagtgagtatgaaaaaaaatctttttagcctgtccatcgttgccacaacgatgctggcgttatcaggttcagcgcttgctgaaggtaccaatctggacgttaacttcaccgccaatatccgcgaaaccacctgtgatatgaaactggttggcggtacaggttcagatacacagcaaacgctgaccattggtaacaatggccaggtgcgtattgatgatgtcaaagccggtacggcaaatgccaatttcaaaatcgtgatagttgaatgcccggcgtcgctgacttcattgaaaacaaccgtaaagggaactaaatcaggttatttgccatcagggattgttaaccaggcagcatcaggcgctgcagattacgcttcagtcgaaatcgccagagcgagtgcacctgaagccccctttgtcattaactctaccgtggatacggagcgcctggtctggagcccaacagaaatccagaataaggaagtaccattggtagctacattgcgtgaaacccagacaaacaaaatgacaattggcgattttcaagccgtagcaacctttgaattcagctacgagtga

SEQ ID NO: 160684 - DNA, 696 bp, Enterobacter cloacae
atgaaaggattatgtgtagggattattactactgctgttctatttgcggcagcttgtaaggcttcagaaccgccaacacaggtggtttaccgttttgatgagcatcgttatctggagctgaagggttgggactgtgaaggggaactctggtatacggatacaaaacggggcattcataccgagcctgtgagtcaattttatcggatatttacccgaaaatttattcatccctctgaacgttatattgcaattcccacctgggattctcccggctctatgatttcgaaagattatgggcaaacctggtttccttcagcattctctcctggagaaaatgagcctaacggtgattcttcgcctccgtacgatgacgttctttccttcaccgtcatcaacgatcagggatttttagagaccaaacaccggctgtatatgtcgtcaaaaccgtttgatgatccgcgaattttgccgggcgggccggggattcaatatcgtttagacaatggtgaaatggatgaaattacgccagatgccccaggatggtcctgggggatggtttattttacgaaggaaggtttacagggaaaggttatgcgccgtgaggccaattatcaggacctgcccgacaaagtgccggaagtgaaaggctacaccggttgggatcatatgcgttgtgacatggacgttgggaaataa

SEQ ID NO: 160685 - DNA, 408 bp, Enterobacter cloacae
atggcaggacaatcagacacggttcaacaacaggataccctgaatcgttatttactgtatttcccacgaagtaaaaccgtttcaccggatgttcattctttttgcggggaagaagaactcagtaagccctatcgttataccattcgcttcaccagtccgaatccgaacattgcagtcaaagacgttctgaacaagatggctgaatttattctgcgcgcgcctaacccgaaagcgaaatcgacctggcacaatcaggaatcctggttgccggtgcgccagattaatggcgtgatcacgtcattttcccgtctgaagtcgtccgctgatgaagccctgtatgagtgtgtgttggagcatgaactggcgctgttggatcggaactaccgttcggccgtttatgcgttgtga

SEQ ID NO: 160686 - DNA, 573 bp, Enterobacter cloacae
atgtggcgatggataagcggattactggtgttgtggtgtggctatggcgcggcggtgtgtccggtgtggtcgcaggcaaaagcagagaaagagattgcgtcgttaagcgcgcagatcaaacgctgggatgatgcctactggaagcagggggtaagcgatgttaatgacgacgtgtacgaccagcttaacgcacggttatcccagtggcagcggtgttttggcagcgagctttcagaagagaaactccccgcgctgacggggagcgtaaaacatcctgttgcccatacgggcgtgcataaagtgaccagcaaagaggatctgagacagtggatgcgtgcccgacagcatctgtggctgcaacccaaagttgacggtgtggcggtgacgctggtctatcgtgacggaaagttagcccaggctatcagtcgcggtgatggcctgaaaggggaagactggaccgggaaggtgcgtttaatcccgtcagtgccgcaaatgctcaccggcacgccgtcttacagggcgaacttttctggttacacgacaaccacattcagagccagatgggcggaatga

SEQ ID NO: 160687 - DNA, 582 bp, Enterobacter cloacae
atgtgtcatccaacacctgttcctgctgtgaaaggtatctatttttggtggtttaaagaaatcccccctggtgttccaattgagggatgcattactcaagagggatacacgttgctctatgtcggtatttcacccgataaaaaaagcaaacctaatagccgggctaatcttcggcagcgcatcaaaacccactataacggtaacgctgaaggttcaacactcaggcgcacactgggagttctgcttgcgacgaaaagcaatttcccgctccgtcgggttggttcaggcaagagaacgacatttactcatcctggcgagcaatggctggatcagtggatggaaaagaatgctaaggtttcttgggtcgcagatgaagaaccctgggtactggaagaaacgttgattaccagcacttcgttaccattaaaccttcaggggaacaaccacgcctttaaacccatgctctcagcaatgcgcagcaaagccatggctgaagccaaagtaatggagatcgcagatgaaacaggatctagcaggagtgtagttgcagaaatgataaagcaagctgtggaagtggactga

SEQ ID NO: 160688 - DNA, 255 bp, Enterobacter cloacae
atgagtttaagagtaacgacacagcaggtagacacctggaagaaacgtattcaaagggatgggttgaaaggttcgacttatttttgtcagcagagcggtgctgtgtgggtatctgcatccgttgaccaccaggcaatatgccagcgcgttttagggcaagactcgggaacaagctctctgtcgagctacctgcgctgggatgatgtgagtgcggttgatctggttgaactgctatatgcgattgaaacggcgtag

SEQ ID NO: 160689 - DNA, 231 bp, Enterobacter cloacae
atgtttaatttaataaatgaatttctttggcgttgtgttaagcgtttatttaccagtattaaagatgattgcattaatgatcttataggttggggaattattttttttattataatggtctccattttcgtttcgactctagtcaataataacaaagtttcatttataattatcgtctcgatagtagtgactatattttcattagtacttttttataaaggaaaaaaataa

SEQ ID NO: 160690 - DNA, 561 bp, Enterobacter cloacae
atgaatcgtgaaatgtttaatagactaatggctgacaaatataatgtagaaaagatttcaacattgatacaaaatgaaaataccttggcaactatccttacctcgcatttattacttgaaggtttcttagaggactggatttgtagccatttggatattgatgatctatttaaaaaaccagaaaaaggcagtggcaaaattgaaataagaatgtcttttactgcgaaagcaaaattagctcaaagattaggtgttgacattgatacataccatataattgaagaattaaatgctatcaggaacgatttttcacatcaaatatttcatgatggccctaatgaagcaaaaattaaaacactaatagaaagatgctcaaaattaacccctaaagatggaacaccgttaaatgacccaacatatgaaattggaatctactctcctgacgaaaccaaaagaaatttaattagagttaacgatgatgacacaccagttagaataaaatactttgctatagtttcacatatcatgctcttgcaattgctaaaaatcaccgacatttaa

SEQ ID NO: 160691 - DNA, 927 bp, Enterobacter cloacae
atgtcagaaccttcaatcgtcccttacgtaaaaaccactcccaaaccttttggtgtgaacgtcgaatggaaatggccggttagctgcttgtggctggagctgcaataccttcatgaagatggccgacttgtgaaagaaatcatccattggcctactatcaactaccttatttccggtctcaaagcaggtgagcgattgcagctgcgcctgcgtccgcgtccagttgggcaggatggctcagcaagagattggcgagccagtgactgggtcgaaggggtttcttctgtcgatgtcggagaaattgtaaaggcgctggacgaagagatccgtaacagctgcgcacttcatggcattaaaggtggctggtttgtcgataaaaccggcaaggcttacatccacgaggcgctgatcggcaatggcacattgtcagcgaactacagtgtgaagatgaacgtggattatggtggcaaacggtacgcagctggcatgaccctcggagttgaagaaggaaagcagcaggtaacgtttaaggctgatcgctttaaggtacatgaagccgctcaatcagccagcaataatgaagagacggccttcaatggtggtctggcttttggtggtttccctggggcaattagccatgatggagctaatcccgctgatggcaataatgccaccgctgaaccaatcagttcaattgcttcagcgacaggcacagccaccaagacgcgactaaccgacgagatgcaagaactggttctcaaggctgtacgtgaaagcgatctgttcacatcccttcagactgcgatagctgctcaggaagcctcaacctctgacttgaaacaggcactgaatgacgcagtgggcgatgctatccggaatgcgatcaaaccgggaggcgctctttgggcggctatctcacatcgatga

SEQ ID NO: 160692 - DNA, 315 bp, Enterobacter cloacae
atgctgttccttacagcaaccgtggacgttcaggcgggtcgcaacaggcggtttgttgtccagataaccggttacgggagtatgggagagcgctggatagttgaccgctacaacatacggcagtccctgcgatgtgatggtaacggagagagcatccagatcgatcccgcgagctacccggaagactgggatcttctgctcacggatgtcttcgagaaaatctggccactggcatctgatccgtcaaaaggcatgagactgatgtcgatggcggttgactccggcggtgaccgtcacacgtcacgaactgtttaa

SEQ ID NO: 160693 - DNA, 321 bp, Enterobacter cloacae
atgaaactggcgcgtgagttcggtcgcccggactggcgtgccatgcttgctggcatgtcctcaacggagtatggcgactggaaaatcttctatcaggacaattactttcatgatgtgcagctggacgctcacttctccggcttgctctacaccatctcaaccctgttttttgccgatccggagttaaccccggacagtttcagcattcttaatactgcaccggaacccatcgacattgatgaaccggatgacaatacgctgatggcgaaggctgcaggtatttcaggaggcgtgcgctatggcccagacggcagtcggtga

SEQ ID NO: 160694 - DNA, 1056 bp, Enterobacter cloacae
atgcggcaaacgacgaagcgttacgtatccagcagtccttcagccgagctgtggcgtcagcagtcccgctttacggttctggaagaggccgcgaagacccggacgctttctgctgaggaaaaatccctgctggccagtaaaagcgaggtgctttcccgtgcagagctgaacgcgaagcttggcgatcagatagtggcgcaggagcggcttaaccgcctgcaggatacgtcccaaaaatacgtcacgcagatcggcgagaaaacccgagcacttgcggaaagtgctggtatgagcagtcgcgctgcacaacgccgcaatgaggaggcccaacttcttcagggctggaaaaatggtggcggttccgaaaacgatgccggttatcagaatgagctgcaggggctgcatgcgtattacgccgagcaggataagcttcggggggactggcaatccggagccaaatccgcatgggcagattatgttgattctgcttcagatgcttatggccagatgaagtcgtttgccaccagtacgtttgatggcatcgggcaaaatatggctgacatgcttacgcgcgggaaggctgactggggtgactttacccgatccacactctccatgctgacacagatcctgatgaagcaggcgatgtcaggtctggtcagttcggccacaacagcaatgggatttgatggcggcggatacactggctcaggcgggaagtatgagcctgccggcatcgttcaccgcggcgagttcgtattcacaaaagaagcaacgagccggatcggggtctctaatctgtaccgcatgatgaaagggtatgccacgggtggtcttgtaggcggaagtggtgcagtaccagccgcaacgccttttggtgtgcgcgtttatgcgcccgttaccgttgaaaatgcctctgcgggaacgcagcaacaaggcgatggcgaccgcctgggtaaggcatatcagcaggtcatcaataagtctgtcagtgatggcattgctcaggctatccgtcctggcggactcatctggaatgccaataatcgcaggtaa

SEQ ID NO: 160695 - DNA, 273 bp, Enterobacter cloacae
atgagtcaggcacttaaagaatatattgatagttttcttgataaggatatgtccgctggcagttttgctgacagctatatgatgaaatggaaagctgagcgtgataataacctacttggaaaggatgaagataacctaagtgaattattatccagtgttttttgtgtggcagatatgtataaccctgataatgatcgtgaagaatatgaatttgatgatgagcagctacgaaaggaaataaataagctcatggatatttatactaataagtaa

SEQ ID NO: 160696 - DNA, 1206 bp, Enterobacter cloacae
atgagcgagttaaattatctggaaaaactgctagatgggacagaggtggaatggaaagcccttggagatgtcacgagtgtcttgcggggaaaaaggctaactaaaaatctgctttcagcagaagaaaaattcccggtatttcatggcggcttagaaccgttaggatattacaataagtcgaatcgtccggctaataccgttatgattatcaatgttggcgcttcagcaggtactgttggctatagcaccgttgacttctggtcctctgatggatgcttttgcttagagcacaatgagctattaaataatagatttttatatttcgcactgattggttatcaaagtttgctgaaatcaaaggtgagagttgcgggcattccaacacttgatgctatcgtagttaataaactacttatccccatcccctgcccagaaaatccggaaaaatcccttgctatccagtctgaaatcgtccggattctggataaatttactgcccataccgctgagcttaccgctgagcttaccgctgaacttaccatgcgtaaaaaacagtacaactactatcgcgaccagttgctgagttttgaaaagggtgaggttgagtggaagacgctgggagatattggtaatgtaaggatgtgcaagcgcatcctcaagaatgagactctgcctgaaggggatgtgccattctataaaattggcacatttggaaagaaagcgaatgcatttatttccagggatgtatttgaggcttacaagaacaagtactcctttccaaaaaaaggtgatgttctaatttctgcatcagggaccatagggcgtacggttatatatgacggagagcctgcttattttcaggatagcaatattgtctggctagaaaacgacgaaagtattgttactaataagtatctctggcacttctataaaatcgccaagtgggctgtttcagaaggtggaacaatagacagactctataatgacaacatcaggaaaacgaagattatcgtaccttacccgagtgatcccagtaaatcactcgcggagcaaaaccgtgtggttgccatcctcgaaaaattcgatgctctgaccagttcaatcagtgaaggcctacctcgcgaaatcgagctacgacaaaaacagtacgaatactatcgtgatttactgttcaacttcccgagaccagaaaccgccagcaactga

SEQ ID NO: 160697 - DNA, 246 bp, Enterobacter cloacae
atggcacttgttgtcacaaatggtgtggcgaaagccctgttaggcagagggctgaccgttgcaggaaatgccatgctgacgcgtaccatgggcgcttttgccggtcccgtgggctgggtgctcagttctctctggctgctgattgatttagccggtcccgcataccgggtgacgctaccatcctgcatttttattgcctacatgcgccagaagcatctttattcacctgagaatactgacgtttag

SEQ ID NO: 160698 - DNA, 480 bp, Enterobacter cloacae
atgaagattgcgctaacgctttctgcgactgtcctgatcctgacaggtgcgcttatctggggaatggttaaccgcacctcagcgtatatcgacgatcggtgctttgccaattttacctataccgataacacaaatgaaaaggcattcaatttcaaaggaaacatattctttgaattttcaaagaacaaaaccggacaatttaatttatccggtgacgtttcctatcagggacaaaactacacgttctcgcgctatgtaaagtttaactatgtcaatattaaaaataatgcctacagaataaaaatcatttcgcacgaaaccatggcgcatgacaatgtcccagcagccatctcacctcttgccattaagatattatttcttaccggcgaatattctatgtacctgcacaagcatgataataactttattacgattggaaattcactttcaccgttgatgaattgcgttatacagtcctga

SEQ ID NO: 160699 - DNA, 780 bp, Enterobacter cloacae
atgaaatatttgattgccagcaaagttatttacgatacggagagcggggaattcacccttcccggcgcagagcgccttgaggctcaaaaactgacgaatacggccaaccgtattctgtcgctgcttattgcttccccgggcacagtgcttgagcgtcaatatctgctggaacacgtttgggaatccgcagggcataccgggtctagctcttcgctcaaccaatatattagtattttacgcaagacgttaacctcactgaccgatattgaagagtcgatcatcgttgtcccaaaagtcggattttacttttccgccgatattgacgtacagcttctggatgagccctgtgcgccagcgcccgggaatgataacgttgcggcaaagaagaaaataccgtcgttgccgcttaaatacagtatcccggcgcttcttattttggcgttgattgcggccaatttatgggtttggagtcagccaaaagccaatgaacgctattccagagtcaatgagataggcaagctcgaaaaatgtaccctcaccacctatgaacatctttctgccgatgaacggcagcggttacatgaggtattgctgtcggcacagccgcagcttgcagaaaaatgtgcaaaccatttagcactgttaacggtaaacgttcagcccagcgtgttttatggcagcagcggacgcattttttactctttttgtcctttagattctgaaaacgaaacgctagcgtactgtgaaaatcactacgcctttaactggaaaatgaaatga

SEQ ID NO: 160700 - DNA, 1188 bp, Enterobacter cloacae
atgaaaatatctgttcaaaccgtgcttaacttattacataacattattcatccggtctctgccgatctggttaatcatttacaacgcacggccatcatcacctggtatttaagccagcgcattgggctggataaaaccgggatcggcaacgcttttctggctggcatgctgcacgacattggtacgctgagtaaagaccgcgaacacctttctcccggcagcgaggggtttcttgatgggcatgaacaactggcgggctcaatgacggcggggatccgtttcctgcaacccgtcacgccgatccttgaaaaccatcataccgcatggtcttcctcgggctcggacgatcttcctgtggtacatcatttggttaatatggcggatacctttgagctctatttacgcgggattgaaggggattttattacccaacgcgaaagggtcatttcggatttctttgcccaacccattcagtggcccgcccctctggagcaggcgctgcgcgaatctgcacgtcaggatggcttttggtttcgcctcggcaatccttcgctccctcaggtcctcaatgccataagcccgttacacgaccacatgctcgaccatcatgattttctcgaggtgtgtcagctcatctcaaaaatcgtcgataagtacagcagctttacgcgcacccacagtgccagcgtagcgcatgttgcggcccgcctggctgaactctacggttatgatgtcgatatgcaagaaaagatctgtattgcaggctatctgcatgatatcggcaagctttttacgccgctccatatcctggaaaagcatggcaagctcgaatcctttgaatacgccacgatgaagcagcacagctacaaaacgctggtgatgctgcatcctatctctgaactgggggatattatccgttgggccgccaaccatcacgagcggctggatggcagtggatatccgttcaggttaggcgccgcctcacttgatattccgtctcgcatccttgcggtggcggatgtgtttactgccatgacggaaaaccgtccctacagacaagggatggagagcgctaaggcgatggctatactccacgaagaagtaagaaattacagactggacagggacatcgtaacattgctggaccataatattggcagtgtaaaagcgcttgtcgcgatgtgttaa

SEQ ID NO: 160701 - DNA, 1173 bp, Enterobacter cloacae
atgagcaaatctttatttttcatctttgccgtattcagcctgataacgatccctggattttcagcccaggcggcaccacaggcccgaggcgtgacgggggatacctgccgtaatagtggcattatatttaaaagcgtggcggaagcggataaatcgcttaatttatcgtctgcatttatcacctcgacggtggttgaaaagacatataccaccagctggtcggggagtatgacctgtacctatggcaacgtgggtattgggggagtatttcaggatcacctctactatttcactgggtttaataacaacccggtgtatttgaattttaacagtgctgatggtgaaagcagttactggattaaggtgacctctgaaataaccggcagcagtaaagtcacggtgagcggtattgtggggatacactctctctcctaccaaacgcaatataccttgcgagcagagttactttcctcggcgcctgttggggtgtcgacctataccaaaaccaccaccagcggtgcgctgagcgtcattcctgccgtgatgagtggtaccggctcgggatccgactcgcccctgctctcctctaaaacgtatgcgaccagagcatggaataacatgatgtcagataccgcgcgcaaaagctgggataccgattatttcctcgcgtacgagaaaatgaccattcaattcgagccgaaagaaaccacctgcaatatgacgcgtgacatgaccgtaaaacttccgcctgcgccgctgaaagaacttaaaacgtacggcagaaccaatggggcggatttcaccatacccatcaaatgcggaaaccttgccggcgtaaaaacatctacgcggaatattaaggcctggctttccagcaatgatgtgatcactacggacggcagttcgcaaacgatggtaaatgatgaaacaaccgcgggcggggtcggtattgctattcgtagtcgatcttttatgggggatttcgaagaggtcaaactctccagcagcacaagcatgggaaatgccactcagatccttgatattgttaaagacgatgacattcaggatacgcaatatattcttctgcatgcttactacagagtgtatgacgcctccgccttatcgaccggcacggtggtcgcgaccgcacaaatcatgttcggctatgactaa

SEQ ID NO: 160702 - DNA, 2529 bp, Enterobacter cloacae
atggctatgcctggttcaattctgatgaagaacagatccctgtttcgtaaaagcctgttggttcactccgtcagcctcgccttatgttcctttggggcgagcggtgagacatttaatagcagcctgctggtcggtaactcagccgatatggactggagtaattcaaaactggtcatgacaccgggcgcatacgatctcgacgtatatgtgaataacgcctggcgcgggaaattcgacatgacgattgccaatgacggtaaagggacggtgcttgttctgaaagatgatgtgccactactgggtattcgcgatctcgacgatctcgtcgcgaataaatcagacgggcaaatcgacatcagtaccctgctacacggcggaaaaagcacgctggcgccaggagaattgcgtctggatttagaagtaccccaggcctttgtggtgaccgaaaaacagaactgggtggccccacaaaaatgggaccaggggattaatggggtatttaccaattacaacctcaactattacaacttttatggcctgcgtgaagggtataccaacagcgataatatctatttatcgctaaacagcggtttgaatatgtctggctggcatctcctcgataactcgacgtggatgcgctacagcaatatgggtaaagggtattggattaacaccacacgctatcttgaaaaaccgattgtcggtattgaggcattaatgcgcgtggggcgtacctacacaacgtccgattattttgacacgattcgttttcgcggcctgacgctgaataaaagccgtcaaatgctgccggacagcgaacgcgtgtatatgccggtcatcagcggaattgccaccagttcagccgtggtcagcgtttaccaggatggacacattatccatcagattactgtccccgccgggccctttgcgatccgcgatttaatgcccaccggctcgcgtggggatctctctgttgaggtaaagaacagcggcggaacgatagagcgctttgcggttcccttttcgtctatcccggacatgctgcgtcccggcaccagcgactaccagtttaacgtcggtgaggtggacatgcgcggcatcaatgaccatagccagtttgcgcagttcagctactctcgcggaatgaataactatgtaaccgccaccgccgggagtatctggagcgcggactatttctcctttctgctcggcggtgctctttctgttccctatgcgggatcgctatcagcgtcgcttgaacaagcgcagtatcgcttgccgggcgataatcgacgccggggagaaaaatacgcgctctcttggagtaaatccttcccgacgcaaaccaacctgacgctggcgtcgtattactatcgtacgcaggattacgcatcgtttaacgattatgtgttggcgaagtccaatattcaggattatggcggcaccggcacgtcaaccattaacagcaagcaggcgtttagcgccaacctcaaccagccgctgggcgatgggtttggtcgactttccctgacggcgtactggcgcgattactggcgcggccaaaagaccagccgccagtataatctgacctggagcaacgcgtataacagcgtcaattatgcggtatcactgcgccgctctgaagtcactcagtcgtactacaactatgaaacagattacgaaggtgatgttgttacgtcgctgcgcacccgtgggaagacggaaaataatctttatttctccgtcaatgttccgatgtcactcttcggcagtccgggaagcgttgcttcgcatgcgacggttcagcaggggaaatacgcttcatcagatataagcatgagcggcagcgcccaggatgtcgattacagccttatgctggcgcatgacagtgagggtaattcccgctccgccgatctctataccaactggaaaaacagcgtcaccagcctgaacagcgggctgacgctttcgcgcgagtatcgtcaggccagcctcggcgcaagcggcaatattctcgcgtggcgtggtggcgtcatcacctcaccgaataatgggcgaaactttgtcattcttgaggcccctggcgtcgaaaacgccgtggtcaatggggatacctctacgcgcacgaatcgcaacggtattgcccttatcgccagcgcaacgccttaccggctgaataacttccatctggaacaggatggttcaaaaagcagcgacgtcgatttacaggggaatttacttaatattgccccttacgaaggcagcataacgtatctgaagtacaagaccgatacgcgcaaagtttataccttcgacgtgcttgacagcgagggcaatcaactccccttcggcgcattggtttcagatagccatcatcaggaactgggttacgtcgcccaggggagccaaatctttgtgaagtctgacgcacagccagaggcaattcgcattaataccagtaaagccaaaatcaaaaaatcctgtgttattacgcagccgacagagcatgccgtcaatatctgccggtaa

SEQ ID NO: 160703 - DNA, 714 bp, Enterobacter cloacae
atgaccatgaaaaaacatattttctttctcttcgttgcgttcgcttcacacgtggctcaggccagcgtggtaattaaccagacgcgcgtgatttattccagcgaagcaaaattcgttaccgtgcaattagtgaatgagagcgataaaactcacctggtacagtcctggcttgatcaaggtgatgcttcagccgccccggaaaagattaaagttcccttttccgtcatgccgccggttgtcaaaatggatggccacagtggtcaaacgctgaaaatcgccgcgaccaatacttcctctctgccctcagacagagaaagcgtattttggttaaacgtgctggatgttccgccaacgccggaaggcagcaacgataattatctccaggtggcgatccgcaatcgcattaagctgttttatcgccccgcctcgttgcaggaactggacagtaaaattgttgaaaaggtcactatttccacctcaggaagtcaaacctgtctcaaaaacagttccccttactatttaaccattccacaggttgtgacctggcagggcggaaaattgaagcagaatcgagacgataatttactgagcgataccgcttttattccgccttacggttgcgcgctggtttccaacaaaatccaggccggttctcagtatcgtattacatggcttgatgattacggcgccaaaagattcagcacccttcactga

SEQ ID NO: 160704 - DNA, 510 bp, Enterobacter cloacae
atgatgatgaaaacgggaaataaaagcatgttcaataaaacagttatcgcagtcgctatgatgttttcgggcgcggcaatggcagcggaaagcaccggcgttgcgggtggcacaatcaccttcaatggttctgtatccgatacaacctgtgacgtgaccaccaacaatggttccgattttacggtgaacctggcgcctatatcactgacggatatgggtaccactactggcgttgtcagtaccaacaataaagacttcaccatgagtctgaaaaattgcactgccgccgacaccgcaaccaaaacgctgaaaatcaccttctcaagcagcaacctgtctgatgacggtaaatacctgaagaactacagcgaaagcggcgctgaaggggtcggtattaccctgaccaaggatggcaccaccgccgttccattcgacaccgcgttcaacaccggtctgacttctgatgatgtttccggtaccgacgcaacttactcctttagctacgattaa

SEQ ID NO: 160705 - DNA, 615 bp, Enterobacter cloacae
atgaaaaagacattggtagctttaattcttgtaaatgcatgtaccgccacgaccgcttttgccgccgcagatgcaggcacctggtatagcggggcgaaatttggctggtcacattattttgacaccaatacaggctctaaagcactcgagagtaataacagctctaaccatttcgatattgaccacgataatgttggtggcggtatctatacgggttaccaaattacgccatggcttgcggttgaaggtggttatgattatctgggtaatatgcagataaaaggccagcatagcgcgggtggacaaatgaaagcccagggcctgcagatgtctttaaaagccagctatgccctgacgaacaactgggatatctatggccgtgcgggtgcgatgggttaccgtgctgaatctgatgtaagtggtcacaatcgttttgagaccggtgttcgcccgcttgcggcagtcggtacggaatacgcattcaataaaaactgggctggccgcatggagtaccagtgggtcagcaacgtgggtaatgccaaccagattggcgttagcagcgatattagctccgttacggcggggttgacctatcgctttggtcaacacgattag

SEQ ID NO: 160706 - DNA, 402 bp, Enterobacter cloacae
atgaaaaaatttttctctccttcaaatataggtttctacatcgaaggtttaaattcacaaataccggatgatgctgtcgccgtaactgatgaaatatatgcggagtacacaaatgtagcctggcctgaaagaatgatcctgggtagtgatgataatgggtttcctgtctggaaagatgccccaccattgacagatgacgaagtaatttcactggcttctactgaaagggcaggtttacgaattattgcagacagtgaaattgcatggcgtgaagatgcagtgaatgcaggtattgcatcggaaattgaaacaaccgatctggctaaatggaaatcctatcgcgtcatgctgatgcgtgtcgatttattaaagccggtatggcctgaaccgcccaaagattaa

SEQ ID NO: 160707 - DNA, 180 bp, Enterobacter cloacae
atgactatgacgcatagtgacaagaaaactcagaagcattactcagtatctgacgttttcacccgtatgggcgtcgcaatggaagaactacttcaggcggccccacatatgatgcaggaaggcaagtttgaagggaatgagctgcatggcagactcaaagagaagcagaaagctgcttaa

SEQ ID NO: 160708 - DNA, 540 bp, Enterobacter cloacae
ttgaacttagagcagattgctagtctaagcatcagtaatcttcagatgcttctagacaacatgaagatgccgatagctgtcggtcctatcaatgacgaagactatgtaatcttgacttcaggttttgctcagcttgaatgggatcatggtttttcacgttatgggaaccgggacgataagtttgagttttgtctgaaactgttgtctggtccattaaggcatattccatctggcgcagctttgtgtacctttgatgaggacactggtgttattgagattcattttgttgaatccttcgtgaaggatgatgacgtaggccatcctctttacggtaacatgtttatgatcacgctttggggcgtgtatctgtttggggctgctgttgggtgttcagagattcgaatcccggaagccctgaatcataaagtggctaaccactacaaaaaatttggcttcgaaggcgatatcaacttgctttcggcaccatttgctacaattagtgatgtagtaagacgctatattacttctaacaaacagtag

SEQ ID NO: 160709 - DNA, 741 bp, Enterobacter cloacae
atgcctattcacaaaatctctggagcatttttcaaggacatgcaggtagagtggccatgcccagaatgtggtcagaaaactctgcaaatcattacagaaagttttgttcttaacgacacccatggaaccatcaaatacggtggagaagattggtttgaaccggaaatgcatacgtcaattttcagttgtatggctcgctgctcaagaagacaatgcggtgaagtcgtggcctgctcaggaaagagcggatgggaacaagagtgggatgaagaaacacataataatgaatactatcagtggcataaaccttacagtttttacccttccttacatccttttgaactcccagaaaaatgcccaactgaaatagccgaaccacttgaggcttcattctctatttttctaattcaaccaggtgccgcagcaaaccttatccgaatttcggtagaaaggatgctgacagcaatgggtgttgctgaacggaatgacaacgacaagcgcataaatcttcaccgacgattgggtatgctcccggcattatatcaaacgttttccggacctcttatggctataaaatttttaggaaatgccgggagtcatacttacgacggagttaaaaccggagacattgaggttgcttttgagatcatggaatatgtggtcaatgatttgttctctggccgtaaagaatctctcgaagttcttactaagcggctaagcgacaaattcaaagaagactaa

SEQ ID NO: 160710 - DNA, 615 bp, Enterobacter cloacae
atgtcaaacacaaaagaaaccccaagggcgatctcacattacaacttcacatctcaaagtggaggtaaagaagcaattactcgcattcttcaggcttatggattcagtactagacaggctttgtgcgatcatctaggagtatctcaaagtacaatggcaaaccgttggatgcgcgatacttttccgcacgactggcttattgcatgtcacctggatactggcgcatctatgctttggcttactacagggcaaggcagccccaccacaaaaacaatcaatgacagtggattgcttttgcaattaaaagaaatctcaaacgggatttactcatcatctgaacaggtccgttatgacgcctgccttatccccgcagattcaacagctcctttcttggtgaagtttgaaaaggctttctatcttgtggatgagttcaagggagaaatcaatgatggaatctggttgattaaattagatggttttctgagcatcaggcaagtttatcgccttccaggcgggcgcttacgtgtagagaatggcccagcatcctttgaatgcaccccatcggatattgaagttaacggtagagtgatcagcaaaacagcatttacagaatga

SEQ ID NO: 160711 - DNA, 1563 bp, Enterobacter cloacae
atgaagtatagagaaagtcaaactgacttaagtttaaggaaatggttttcaaattcactagagcacgcgcttttaagaaaagtagctcttgagcacggaaggttacgctccttatcttcatttgaaattaaaatagattatccattgctagcgatagcgggaagaaatggctctggaaaatcgactttattagctatgattgcttgtgcttatcacagtgttgaagataagcatattatgtctggaaaaagaaagccttactatacttttgcagatttcttcattcagcattccgacgaagtgcctcaagaaggaatagcaataggatatcatattgcccacaacaactggacaccctctaagacactacccacaggaaaagggattggcaggcaaatacgttttaaaaagaaaggaggtaaatggaataattacgacaagagagtcaaacgtcaagttatcttcttgggaattgaacgaatagttccacacagtgaaaaaagtcaatccaagagttatgctaagttatttatatttaatggctatgagttagggtgtgaaaatgaaataagagaaaacgtaggttatatacttaacaaaaaatatgatgattttaaatttgtttcacactcaagatataggttaccaattgtcacacatgaaggtaaaacaatatctggattcaacatgggagcaggagagaatgcgctcttcgaaatattctcgatattatactccgcagaacctggagcattaatcattgttgatgagatcgagttaggccttcatgcggaagcgcaggttaagcttattgaaaggttaaagtcggcctctcataaaagaaaactacaaattatattcaccactcactcagatataatttttggatgtattccagacgatgccagagtatatattgaaaatgttaattctaaaaccataattaatactgaaatatctcctgaatatgcctttgggaaattaagctcagaaaactctcaagaactcgatgtattggttgaggatgtagttgcagcaaagctgttatcaagtgttcttcctagtaatatccgctcaagattgcaaattgaagtaattggttcagctagctcattgtcacgtcaaatggctgctatttttcaaaggggaaagaaaaataaggtaataacgatttttgatggtgaccaaaaaagattgtataaagacaacctaaaatgtgcacattctatgctagaaaagaaccacgaagagttcacgcagtggttctcagagaatataaactacatgcccggcgatgagtggcctgaaaaatggattataagtaaaaatttagaatatgtagataatctttcaatactagtaaatggggaacctgacgttactacagctgcactaaatcgcggtacaggctcagaaaaacataaagaattttacgaagctgcgctattacttggtgttaatgaatctgaaatgctggatagatgttgtataaatctagcgatgatgtgtcccgacaatgtaagttatcttgtcgatttcataaaaaataaattatctgaataa

SEQ ID NO: 160712 - DNA, 1239 bp, Enterobacter cloacae
ttggaattagaaaaattcagctcaaaaaaaattaagattacagtcgattactatgatgatgctcacagaaatcttctaaacagcaccagcagatatgatcaatacttcattgacaatatgaaaaaaataataagcgagggggttgaagtcacgggggcagaatatttaatcaattccctggtatttaaacaacacaccaaccccgagaagtacactcaaagaaatgatttaatgagcgccataagttctgccactcaatatttcatagatgatcttgaaatatccaacaattccttacgcgttccagcaaattcaaatccagaagccgcaattgtaatgaaaagggttggagagtctattggtctttctgtagtttccagaataattggggttaacgaggcagattggactgtcattccagaattaggcgttaaggcttttgattttcgatatgctgcaacaactaaagggattgtacaggtcgagacaaagggtacacactccattgatattagcaagaaaaacaataacatatactcacacgccagtagcataaacgataaaaaaaatgaaatgtccactaacagcaaacacccatatcccggcgactataattatggaactatagctttctgccctaaaggtggaaataaaaatttgaaatgttatctacttgatccaccatcaggttcgtctagagaacgtttagcagaagctatattagctaaaaaattaggattttattatagatttatgaacttcatatctcctgactcgaaattaattaacttattacatgaaaggactcttgcatttgccgatggcaagttaaatcttaacacagcaaaaaagctagattactatggcacaagcaagagtggggattttgatgagagctttttcttaaataaaaaaacaattaaacttaatgggttaagagtatctggagattggttccatctcaaaaaaaactacattgtttttattggaataaaaaactcaataatcaatgatattgttttacaaagtaatgaaaagttgtcacaacttaaatatgaaactttctcacacaataaagaaataatattcaacatacagactggctatcaaaaacaacaattaaaaaggcttcaggaagaaaacggaaatatttataattcaaaggtattgaaaacaaaaggtaacataactcttttggcaagtggtgtagcaataggcatattgaaagtaatggattaa

SEQ ID NO: 160713 - DNA, 159 bp, Enterobacter cloacae
atgcgtgcccttactgagatattctgccaatcgactaaagtgctggtgctacgtttcgacttgtatgtcaaagaacacagcgagtctaatcaggtcatcagccagttcagtcaaacactgaatcgccacgggtttaacagacacctcagagtcatttaa

SEQ ID NO: 160714 - DNA, 1257 bp, Enterobacter cloacae
atggttaggccaataggtattgatcttttttctggtgcgggtggaatgtccttgggcttcgaaaaggcaggctttgatatcgcagcttctgtagaaatagatccgatccattgtgctacgcataaatataatttccccctctgtacaaccatttgcgccagcgttgaaaaattatcgggcgacgatattagacaattagctggtttagatggaaaggaaatagatgttgtattcggtggtgcgccttgccaaggtttttcattaattggtaaaagggctttagatgatcctagaaaccaactcgtttcacattttgtgagattggtaaaggagttatctccaaaatattgtgtttttgaaaatgttaaagggttaaccatcggaaaacatgcaaaattccttagtgaaattatcgaatcgctgaatgacgccggttataacgttctaacgccctataaagttttgaacgcttctaaatttggagttcctcagagtagagaacgactatttttaattgcggctaagcgcggacaagagttgccttcttatccacaaccattagagcattctgttacagttggggacgcaatatcagatcttcctgatgctgatacattttcagagcttaaaaagcaagactttgtccaagcttcttggacaacaaaatcgaaatatgctcggatacttcgtggtcttgagcaagataaaagtgattatggctatgatcgtgattttgattatagcttattaacgtcaagcttaagaacagaacatacacagttatctcaagataggtttatgtcaacgccaaatggtgaaacagagccggttagtaggtttagaaagcttgatttgaatggcctctgtaacactttacgagcagggactgatagcgctcgtggtgcatttacctcgcctcgtccaattcatccaacattaccacgagttatcacagtacgtgaggctgcccgtttacactcatatccggattggtttagatttcatagcactaaatggcatggttttaggcaattaggtaatagtgtccccccatacttggctcgggcggttgcttcagtgattatagataaattgaatataactccaaaaaaaccaaagaaggttctcaagcttggtgatgagtggttattaacggttgatatgaaaactgctgccaagttctttgaagttccagcagataccatcgctcaaagaactcggaaagaaaaaaaggaagtagtcaatgagcaagagtaa

SEQ ID NO: 160715 - DNA, 798 bp, Enterobacter cloacae
atgagcaagagtaataattatctcgctattattgagagaatatttttctcgcattatcaagttgggatgcgtgagtttgagttcaatagaacagaaatcgcggtcatggctgctgaattggggattgatatccccaaaaacgttggcgatgtgatctattcggtaaggtataggattgatcttcctgagaaaatctcaaatacagctgagccgggctacgaatggataataagtggtgttaaaagggcaggttataaattccatcaagttcgaatgaacagagtcgtaccaagagatgatcttgttacgataaaaatacctgatgcaacacctgagattatagaacgttatgctttaagtgatgagcaagcattgttggcaaaagtccgctataacaggctaattgacacatttcttggtattacggcatcttcgttacaaaaccacctaaggactactgtcaaaggtgttggtcaaattgaaatagacgagatatatgtcgcggtagataaatacggtaggcagttcgttatccctgttcaagctaaaggcgggaatgataaacacgccgttgttcagacgaaacaggatattttgtgttgtgctgaaaaatttcctcaattaatttgtaaggctgtttctgctcagtttatggcaaataataaaatcgcaatgtttgagttggttgttcaggatgatgaggtcaagattgttgatgagaaacattacttgcttgtttctgcttctagcataacggatggtgatattattcaatatattcaactagcaaaaccttag

SEQ ID NO: 160716 - DNA, 441 bp, Enterobacter cloacae
atgagcattaacggttggtactacctgcaccagaacaacgatctgatctacaagccgtcaccagatgcaattgcagacatccgagattcagattttgcggtttgctcatggcccattgacgtaactgaccgcaagtctgcatgggaaatgctggttgaagccagtgcgcttggtgctaacgatacccggattaacgaacttgctgagaagtggaattgcaatgaccaagacgctgacatgttcgcgagtgttgttggcgtagagattgagcaggatggcaatcagtggtgtgcgcacagacaagattttatcgacctccaagagtctccagctggttttggcgaaagcaaactgctggcgatggctgaccttgcgaggcaattaggaattcacggtggtcatttttggcggccaacattctcggatcttttgaagaaatga

SEQ ID NO: 160717 - DNA, 300 bp, Enterobacter cloacae
atgaacactcagcagattaacaacctgaaaaaaatcatgaccagcatctacagcgactaccagctgagtcagatgcactacgaccgccaggtagagctgatcgaggctattcagcaccaccagctgcaggagccgttttacgaacttggccgcaagggtgtgcgtcgtgaagtgctcgaggagctgatgatgagcgtcgaattcgaagaaactctcgcagcgtaccaggccgcactgaccagcatcatcgcgaagtgggatctggctgaccagctggacacggcgaggaacgcggcatga

SEQ ID NO: 160718 - DNA, 672 bp, Enterobacter cloacae
atggcctttatattcagccatgaggtgatgatcttgagggtaaacaacaatctggccaagcggacctcacgatttgctaaaagagcttttgatatttttggttcgctagccattattcttgttgcttccccacttcttggttatctctatcatcaggtgaaaaaagatggcggcccagccatctacgggcatgagcgcattggacgaaacggtaaacgctttaaatgcttgaaattcaggtcgatgatccttaattctcaagaagtgcttaatgaactgcttgcaaaagatgagaatgcccgaaaagagtgggagaaagattttaaattaaaagacgatcctcgcattactaaaatcggtcattttattaggaaatcaagccttgatgagcttcctcagctgtttaatgtcttaaaaggtgaaatgagtctggtggggcctagacctatcgttcatgatgagctgatccgctatagcgaggacgttgattattatttaatggccaaaccgggaatgactggactatggcaagttagcggtcgaaatgatatcgattatgagacccgcgtctattttgatgcatggtacgttaaaaattggtcactttggaatgatatagccattttgtttaaaaccgtaaacgttgtacttaaacgagatggcgcctactaa

SEQ ID NO: 160719 - DNA, 537 bp, Enterobacter cloacae
atgaatattattgatacaaagattttcgatgcaaaaattattgagcctaaagttttcggcgatcatcgtggtttctttcttgaaacttttcagaaagatcgttacaaagaaatgttaaacattgatctggattttgttcaggataatcattctcgatcatctcaaggtgttctgcgcggactgcatttccagcgaaataatcctcagggaaaattagttcgcgttgtcagaggtgaagttctggatgttgctgttgatattcgtaaagattcgccaacatttggtgcatggcaaggtgttttattgagtgaagaaaacaaaaaacaattttgggttccacctggacttgcgcacggttttgtcgtcttgtctgatgttgctgattttgaatataaatgcactgattactatgatccaacttctgaaggttgtctgctttggaatgatcctttcctgaatattgagtggaatattgaaaaccctaaattatctgagaaagataaaaatgggaaaactttcaaggagttattcctttaa

SEQ ID NO: 160720 - DNA, 234 bp, Enterobacter cloacae
atggataaagaaataacgttttcactcagctaccatcaactgacagcaagaacggcagaggtgattaaagctatcaaagaacgcagggggcagactgcagatacaaagctggcatgcgttgaggcggtcatacttctgtggtctgaacttgctactgaaggcgcatccgacatcagacaggtacaggatgacatccggcttcttcaggaattcgcaaacggaatgaaggcatga

SEQ ID NO: 160721 - DNA, 1506 bp, Enterobacter cloacae
atgaatgcagaaaagtcagatgagagttgggtttgtgctggttgtattgccgaagaatttttacgccacaggattcagaaggaaggaactttagagacctgtcattactgcgcggaagtccagccctgtttctccctggaggaggtatgtgacctgacagaaacagccattgaagctcatttttaccggacccccactgaaccgaacgatatggaatatgccagtcttcgtcatattgacggttatgagtggttccgtgagggggaggaaatcgtgcagctcattgaggatttactccagacaagtcgtgagcttgctgacgatattcagcagttgctcgaatacaggcattctgattttgattccgatgtgatgggactggagaccgagtttgcccgggagtcctgttatgctgaacgcagtcagatcagcactggccgtctcgattccatgtggataaattttgttacctcactgaaaactgaatcacgtttcatcaataatgccgtgagcgccaccctggacggcatattccggggggtagagacaatgcgcgcccgtggaaaaaagcctgtgattattcacgccggcccgggtaccgctatcccgtcactgtaccgtgcccggtggtgccgtaatcatcatgagatggaacagatacttgtgacaccggacaaagagttagggccgccgccgcatcagatcagcggtgccaaccgtatgagcgccagaggaatttcggtcttctatggcgccagttcagtcgatacggctatttcagagatacgtccaccggtaggctgcaacgtggtgtgcgctaagtttaacgttatccgaccgctccgtcttctgaacctgcctgcacttgaaagtgttctggagagtggaagcctgctcgacccggactacataaaaagacgtgagcaggccgcgttcctgtccacacttatcagcaggattgtcgctccggttctgcccggtgaagaagacttcagctatatcccgacacaggtcatagctgaatacctggcggatccttcccggtttaatcttgacggtatcctttatccctccgtgcagctgccgggggcggatctggaggaacggtataacgttgtgttgttccataagtcctcccgtgttgcctttatgactctgccggcaaaggaagactgcataatcagatatggccatcagtatgccgaagatgaatgggagccagatatctgtgttacagaggttatttcgactcaggaaaccctttctccgcgggcagacaggcatgatctttccggcctatcgcttcaggacgatcgccgggcaccatccctggagatagatctcggttcggtcagcgttcacggtatacgggctgcccggtttgaatactccactgatgccgtcaggcgtagcgcataccactataccccgcagattaaagaaccttcaggctccgtatctccgccatgggaaaccgcctctggtctggagaacgatccgttctag

SEQ ID NO: 160722 - DNA, 351 bp, Enterobacter cloacae
atggattcaaacattatggacgtggtggcacaagcccaccctatttatagcattggcagtattatttacgacatcatttacgggcgtacaggcggattactgaagaaagcctacacctgtggcaaggctcgtaactaccagcaaatggtgctttgcggcttactggcggcaatcaacatcgcatttgtggtggctatggctttcgccttcgctccgtgggtcaaggcaataatagtggcgaagttagcagcttcaccttttattgcgatgaccataaccggtgtcggttccaacgctgttaactatgtcttcggctggatagttgacgctatcagccgaaaggttctctga

SEQ ID NO: 160723 - DNA, 186 bp, Enterobacter cloacae
atgaatcagaaacgtcagacagtacagactcgctggctggacacccggcaaccagcgcagcgcaccggcaatgaggcggtgatcttctcggacgaatgctgggctggcggtttgcgtctggccgccagtccggccgttcactatgaacttgtcatggccgccatacgcaggacgctgattaactga

SEQ ID NO: 160724 - DNA, 1287 bp, Enterobacter cloacae
atgagcattaaatcagccgtcgaacgagccaggcggaagcgcactttctccaagaacgctgggatgacagaaaagcgtgtcacggtaagaacagagcaggaccagcgcgagctggacgccctgatcgaaaaacaactggcccgtttcgtcaaaacagaactctcaggggctgatgaaatgcaggccttttcgcctcaggttcgtgaagctctggagcatgccctgctgctgaaaggatcgccggacttcattaccccccatggtgccttcagcacctttatcaccaaactactggagaatggtctgacgtctgaagttgccccggccgtcgccatttatacccgcgtgtacccgaccagcgtggactatgtgcttaaatcagtgccggcaaaggcgagcaactatctctgccggtatgccagcagccaggccgtgatgaaatgggcagaagaaaaccccggctggcacgagaagatcatcgacagcctgaaggacgggacctttgccggatatctgcgacagatccgcgaggccatcggggcagcaaacctcaactatcgttttctgaaaatgctggagcagctctgtgaggacgcgggggagctttctcctgagctaaagcaacagacccagcagattctgagtcgagcaccggaaacgcttgtgctttccccccgtgagtggaatgaagactgtaataatctgcgtactttcgttctgtttttcatgctcagggacctggagacacgctacggagagagggcaaacccggacagaacctacatcacgccgttctataaccgtcagcgtgaggagcaaggcgtaatgaattcccagatcatcacttttcatgaatcacaacctatcgcccggagctatgactatggggtctgtatcggctggcgttacgacagctgggagcagtttttttatcaggtcagccacgaggctgtccatctgctcaatccgaagatcgccccggacggcatgctcagaaccagtgcccttgatgagggcatggcagtccgctatgccgaagaaatgctggcgaaatacctgccatatgtcagccgggcgtttgtggaaagcccggtcggtatggacagtccttaccatcacgcctgggaggcggccagaaaactgccgcatgatcttcttgcgcaaatccgtgcggaatttggcagcttcggtaccattgatgacccggtgcgattcgcagaaatgactgcgccgtggctgacaacagcagaagccactctgctcagcagtgattttcgctacagctaa

SEQ ID NO: 160725 - DNA, 297 bp, Enterobacter cloacae
atgggctatgtggaactggttgataccctcattgctgatggtcacaaaactatatcgctcgtttcaaataagcgtcttaccgatgatgaaaaagccatcattaaggaatatctcgtacttgatgcaagcggagatatcgttgccagaaagatacgaataccggaaggttatgactggtcaatggtcgactggccagggtatcggccgagcgatgacgctcaaatagtgttcggagaaattgaccttaataacgcagatacggcaaaagggtttttctttctgatggcctatgactga

SEQ ID NO: 160726 - DNA, 348 bp, Enterobacter cloacae
gtgaaacccaattatctcaacgatccgcatgcaaacgaagccaccgatgacattattggccttctgaaactgtgtcagcagctgcagtcagaaaaggacggcagggaacggccggagcccgggacatattctcgcgatgaggatgaatttgccgatcgcatccgttccgcatgcgggcacgccctgcagctgcgccggctgcttccgataacgacgaccctcagcgccatcggcgccgggatggaacgccggggagaaataagtgtgctcccgggcgaggattacgcgcagaaagcactggcacgacttacagagcaatacctgtccggcagggacaacaagcaatga

SEQ ID NO: 160727 - DNA, 270 bp, Enterobacter cloacae
atgaagaagctactatttgccgccctctttggtttttcatgcgttgccgctgcagcgccccagcccgttatcgacaccgatgccgtggcgcaactgactgaaatccgtaacatcctcctcacgaaccagcagaaggtgtacgcctgctccgatggcgagaagctttatactgttgggttgcagataaagcatgatggttctgaatacaaatgtgttttaaagaaagaccatgctgaatgggaattagtcccacgcatcgcattcaactaa

SEQ ID NO: 160728 - DNA, 558 bp, Enterobacter cloacae
gtgcggtcgcacagttgcagttcacgttctgatagtttaggggaagcccgcaatgggcttcctctgccgtttctttgtgagttatccccctgtgcactggctgtaatccccccgaactttctcccgctgagaccgttgaagatgaaatctttccgatatgtacatgtattgcatcagatcagcagtgttgctttcagcagcctgataactgcgccagccaccggtttttttattctgttcatgttatttggattcaaccactcgctcgccgacaccttccttgaacaggcccgatcacttaccggtgatgcaccaccaggcatggtaagagaatgtaaacaatcaaacgatagcggcccgccatctcctcttgtaatgcctcaggtatgcaaaacggtattaattgatgaggatgactggaaagagcgtgttgacgataccatcaggcagttttatctcactttctctgtattcggacttttattctggatgaccgcaaataatcaaccatctgaattaattggctggatacgcaggaaaagtaaacatcaaaattaa

SEQ ID NO: 160729 - DNA, 372 bp, Enterobacter cloacae
atgagtaatgcaccgcaactctatacactctatcaacaactccttgagcagagccatttaatgctgcgactggcacgccagggattatgggatgacttgataacctgtgagaccgattatgtcaacgcggtgcactcgctggctcgtatgacgcaggatatcgcaccttctttacaggtgcaggagcagcttcgtcccacgctgcggcttattctggataatgaaagccaggtcaaaacgttgctacaggccagaatggatgaactggcaaagctagttggtcagtcctctatccaaaaatcagtactttccacctacggtaatcagggcggtcatgtcctggtcccgcaaagtaatagcgatctcaattag

SEQ ID NO: 160730 - DNA, 900 bp, Enterobacter cloacae
atgagtcagaatgggcctgttttgtacttcccggctgtccgatatatttacaacggcaacggacttaacctgaacgatactatcaaccaggttccagtatttacgatacgaggtgagagccagacctcgacagaaatttacatgggtgacacgcgcgtagacgcatatttcattaacagcgacgtgaacccgtgggcgtctgaggtttctgatctgaagttcaccggctgcggtatcaagtatacctccgtagcgcaaaatcagagacgtggtactctgtacaaaaatcttattttcactgcatatcgagaatgcgctattggtcactcatctcaggactggccttattgcaagttcatcgatatagaattgtggcctcgcgctggatatagaactattggcattatggtatctggctggtctgctgggactatcattagcggtattatgtgtgctctggctgaaagcacgggcacatactcttactggctcaaactaaatattgcggctgctgatagcggtggttaccgtgggccatcaaccccaattctcattgaggattccggttattatcgtcgtaactccgtcgatggctccgcgggcgtatggattgtccctaacccaagcaccgctgataacgccgggcgcggcattgtgttccgcggaaacaagtttggcgcagagaatatgaacgcgtcatcatacaatgtgcttatcgctgatgaattaacagaatcaggaacgtggggtggaaatcgccgccatacgaccgccctgtcttccggatatctccgtggattagtgttcgataaaaataatgcacgttttgagggaaactcaaccactccttatattgtttcttacacacctcatatacaaagtttgaatcgccacggataa

SEQ ID NO: 160731 - DNA, 330 bp, Enterobacter cloacae
atgacagtgaaaaaccaggaacttatcgcggcaggattcaccagtaaggatatcgagcgaatcaaacgtcaccaggcgacgggggactcgcaggaaaaggttctgaaggatctggccggctatttcctgtcggtagcctggatcaccgccgggatggccatcatcaccctgctcaccgcgttctttggcagcgccagccatcttatctcctgcgtggttgccgtcgtctttctgctgattgtgctgcttctggtgatgccggtcagacttggctataaatcatggaagctgatgagatcacatatcagcgattccggtcatcacgggtaa

SEQ ID NO: 160732 - DNA, 804 bp, Enterobacter cloacae
atggatatcgcgctttttcccgggcagagccggcgtcagtgggctgatacaatgatcaatctggaagcccgtaagcttgtgaataccgcaaataccgtcgcggccatgcacctcagtgattcactgacccgtctgaaattcgtggatgaaataagacaggttgtcatgcaacagtttgacgcggcgaggagagcaaagagcgatgaagaatgcattgcctgcctgaagaacctcagggctgagaatgagttcctgcttgaacagtcgcgcatgctgaaaaccggttatgcccggatctacgctgaaattcagtatgtaacagagcagaataaaattatcggatacttcatatccgggattaaggtcgttctcgccggcgttcaggctgtgtttggcggtgtgatgatcgcaacgatgacgcctgctggtatgcttgccggtgccgttctggtcggtgatgcccttaatacggtatcacgggaggctgcccgtcagttcctgaatgaacctgcttcagaggggatccttgcggacggtgccatgtccgtagcggagtttatgggcttcagccgcgatgtcggcctggggatctttaatgcaaccacgcttgcagccaacgtttatggtgtatttggtctgaccgggaaagctgaggcctggcgtcttttccgttatcttcccggagactattaccgcaaggtggaaaccatgtctccgggcaaactgacgatgaaggttctgggatggggggtcagtgcaaaggtggtactggaactccttacccgtgatgaccggaatcgctga

SEQ ID NO: 160733 - DNA, 660 bp, Enterobacter cloacae
gtgttctggaaagggaacaggaagtacagcaggctcaccacggctaagaataactttgaacatctgctgtctgttgcgtcttcgcttccggtccaggctttgccggatttgattcgcgctatggtccgccctttgcagagtgatttcctgctcgcggtggcagaagaaggaaccgatgctcgtccggatttgacacccggggcatttttctttaatgccatcacagaggttcaggactatagccgtatgaaggcgggagaagttaatccagaagattacccgctttctctggccagtgatatggttcttccctggccgtggagtctttcccgttatatcgataatgtgtcccggataggtacggcaaaaggaagagtatggcagcaggatcgtactaatcattatgttgaactctggctgccctggcgcattggttttgttcggggaggtaatcactccatcacggccggtattctggcgggggaaggaacgttaatccctgaacacgtatgggatatgtcttttctttttgagcgaataaataccgacgggctccactggtatgttgacggtaagaaaactgaatacgtgaagtcctggcgcgcagctgcaatatttgagacaggcaggctaatggcttcttgtcctgacgacagataa

SEQ ID NO: 160734 - DNA, 618 bp, Enterobacter cloacae
atgcagctttttcacggaaccagacagcgttttgataagtttgatgtggcctacaagggaacaggtgagtccggaaacatcgatgcctgctggttcacggataattttaaaggagccagcaatcatgcgttattcaaaaacagaaatcccggacagccactggtttgccggtgtgaactgaactccggggcgattatcgctaatcaccggctgccgctcgcagagcagcccgatatcgcggcacgtctgagagatggacttcctgtcagcatcagtagccaactcagtaaaggccgggactggcatgccctgcgcgagcctcattacagcacttacaaagggcatatgttttatgtgggtaacaggcatgtggattcagatgaaatgatccgcttgtacctgaaatgtggtatccagggcgtttatgactgggaaggtatatttacggacagctatcttcacggtacaactaccgtgatatttgataccagtgcagtggctattattgacaaaatcgaatacggatctgacgactggcatagctggctgagtgaataccgggagaagaattgtgttctggaaagggaacaggaagtacagcaggctcaccacggctaa

SEQ ID NO: 160735 - DNA, 201 bp, Enterobacter cloacae
atggcacatccgatacattgcacgaaagtcgctggtatcacggagttcaaaagggatccgttagggactgtcgagtcagcagagggtgatgctattgctattctgaaccgtagcgcgccggcattttatcttgtaccacttgagctgttcgaaagcttaaaacgagacgcagaagcgcatcgctccagaggtgatgtttga

SEQ ID NO: 160736 - DNA, 663 bp, Enterobacter cloacae
atgacaatcaagaacggcaatctgcagtatgtagcggtaaaccaagcttttcttagattattaaaactccccaacgattatccgattgtaggaaaaacgttggaccagctccctacctccttagcttacctctcacaacgaatacataagcaggaggaactcgttatggaacatgaagataagtttacttcaatcgttacgcatccaattggtgagagcaactctatacatgccctgtgtttcgaatctagaccctattacgacgatgacgggatctgctcaggaacgatgcttcaagttaggcctgttgatatttttgggccagacagcttgctatcgggagacgttcccaaatcgttggtatacagggtaccgtccgagatattcactaatgctgaatgggaggccatcttcttaatctctctaaaatacagcaggaaaatgatgtctcggatattaggaacctctcttaaagcggtagaacacagaatcagccgatgcctgcagaaaaccgggacctcgtctggagccgaactattagacttttgcaaaaagaataactgggatgcatatgttccccctcgttttttaaagcctcggtttcgactattcagagctgctcctgatgcgtatctagttgactcatcactaagcagacagtag

SEQ ID NO: 160737 - DNA, 261 bp, Enterobacter cloacae
atgattaatgagaacactattaacgccctgcatagcgtatttcctgagctttccagaaaacagttagaaatcgttactctgtatgctcacggtaatgcatatgaaacaatcgctgacatttgcaatatttctgttgagacagtccgctcgcatctgaagcgaagtactaaagctctgaacttaaaaagtaacgatgcaatgcgtgcagttatattgtcacgctcatactttttcatgatttcattgatgatcacaaattaa

SEQ ID NO: 160738 - DNA, 213 bp, Enterobacter cloacae
atgatcaagacgcttcctaaagaactgatcttcgtttcaagcagttatgaacaatcagaagaatgtaaaaatggagctgtaggctgttcaggaaaagagattttcactttcatcgctcagaaatcaggtagtgacgaactaaagctcattcatggtcagccattcgataaatcgacatggaaagaaaataccgtcgctgtgaaaattaaataa

SEQ ID NO: 160739 - DNA, 162 bp, Enterobacter cloacae
atggcaaaccattggtctggtcagaagtgccccgaaaccggcacttacggccagtataaagatacagacaatacctacgccggttcatctcatgaccgtcacgttgataagggtgagagcttcccgccaagcctgaacaatcatcactttaccaagaagtaa

SEQ ID NO: 160740 - DNA, 714 bp, Enterobacter cloacae
  misc_feature (525)..(534): n is a, c, g, or t
atggttgtccctacctacaacggtggtgatatctggaagaaatctgcagcgagcatacgaaattatttttctggcgacattttagttatcgattccggctcaaaagacgatacggttagcatcgctaatgaaatggggtttagcgtgttgggtattaattcacgtgattttaatcacggcggtacccgtaatcttggtctgcggcaactagcttcgtctggcgatatcgtatttttcatgacacaggatgcgatccttaacgatgccgaatccattgaaaacatgattgcgatgtttgatgctgatgatcaactggctgccatttacggtagacaaatcccacacgatgacgcgaatgtcattgctcgccatgccagaaattttaactattctgatcgaagttatgttgtttcaaaggaaagcggtaaaccgttaggcattaaggctgtgtttatgtccaattcgttttccgcttatcgagtcgctatttttgaaaagttaggcggttttgcagagaatactatnnnnnnnnnncaggttataaagttggatatgctgcgaatgccgtggcaaaacattcacataactacactgctgttgatgaattttcacgatattttgatattggtgtattccatcaggaacaaagctggattagacgtgatttcggcagagcgggtggtgaggggaagaagttcattttatctgaaatga

SEQ ID NO: 160741 - DNA, 288 bp, Enterobacter cloacae
atgaaccacatacacaccaagaaaggcacatacacctacgaagaaggcgtaataaaagtcaccaatcagctatatggttttcaaagtcatagtggggaacggatgatttacacaccatcaagtggttttagactggtagatagcgacggacagataacaccaatagattacctaggagactatacagaagataagatgtttcaattatcgatgctattcaacgcagatctactacgcgatgcacaacatgaaatgatgaagattcacagaacctcgttatctaaataa

SEQ ID NO: 160742 - DNA, 363 bp, Enterobacter cloacae
atgacaaaaacaccaccagaactagtgaagatgattatcagcattgacattaatacatcccgtaatgctcacaggacaggggagtatggttacaataacgattgtcttttagaactacagaaagcattccccaatggggaagtatatgaaagtaatgtaacatatgatgaagaaggttttgaatataccattccaaatactaactactcaattggggtcaatcgtcgttggatgggtataattctaaatggtaaacctatctgcctagtatcacccaagactactaattataatcacctagatctatgtgaactaaacccaattgaacgtacatttgaagaaattctcataaagcatttttaa

SEQ ID NO: 160743 - DNA, 558 bp, Enterobacter cloacae
atgagaatactatccaattgctattttatagtttgtatagcgttgttttttagctttctattatattgctttcaattctcgggtatctatcctgatgtatccggtattctgcttctgtttatattaggaagttgtggggtatttcttttcatggggtgcgttatgaatcccgtaatcagaacttggtttagaaactcaaaaaatgcgattgcaaacgaacaaaataattttcggtttagttataaaccaataataatgattgtgttgttttttgttgttgaggttctttacaatggggaaataccacttgtcgagatgattcgcggtaatttatacgattatcgtgattttactttcccaggtgtgcatgtcatttttacatcacttacaacattttactgcattaaatcatattttgattatctgatatatcgtaaaaagagaagttttatcgcatctactgtttgtctgtgtctcttcatgctattgatgtatcgaagttacattgttttttgcattttaaattttcttaaatataatgcgcgctacagaggctga

SEQ ID NO: 160744 - DNA, 204 bp, Enterobacter cloacae
atgtttgaagatttcctcatagccactcgtgacaaaaccatttttaacacagatgaaataaatggattccagtccattttccttcgctttgtcattccaggtatgaatgaagttatcaatatcgggaatgtgatcatatctatagagcaggaacactggcttaccatctaccttgatataacggtcgtctttaaagaaaggtaa

SEQ ID NO: 160745 - DNA, 225 bp, Enterobacter cloacae
atgtcgtatgataaaaaaccactcataacagtttttggtgccaccagtaaacaaggacgtagcgtaaccagaaccctgctgcaaagtgggcgctatcgggtgcgcgccttaacgcaaaacacggactctcctgcggcgaaacagctggcggaacggggtgctgaactgagacaaatcacccttcagacgggcaatgatgcgcatctgatcggggcgtttgcctag

SEQ ID NO: 160746 - DNA, 573 bp, Enterobacter cloacae
gtgaaactatcctcttttgcaaagacctctgcatgggctattctgccagctctgctacttcttttttcacagtggttagctgatactatgacacaaaaagatgttgtgttgaattataaagcctccagcagatcagtgagcaacctgtacactacctatatagaaatctccaattactcagatgttgccattgacaaagccataatttcatcaaatccctcagatgttattatagcctcatacgatccagaaacaaacccttcaaaatcaaatgcttgggagggtgaaatattggcaggtcaaagcataaaaattttatatgctctaaaaaaagagatgcccatctcggcatccgctctaaactcattactcacagcggaatataaaaaaagaaataaagaaaccggccgacttgaatggagcaaagttaatctacgcgaagacagtgtaataacatcaggggcggcagtttatttattttggtttttccttccctttataacaacatcacttttaattattgccatttactatggtttaagaagatttttcccaagagcactcacaccttga

SEQ ID NO: 160747 - DNA, 474 bp, Enterobacter cloacae
atgagtgagcttaaaccctttgacgacaggctggccgggctgattggggcgctttcaccggcggggcggcgcaagctcgctgctgagattgcgaaggaactgcgcagatcgcaacagcaacgtatcaaacagcaaaaagcgccagctggtacgccgtatcaggccagaaagcgtcagccgctcagggcaaagtcgggacgtatcaagcgtgctatgtttcagaagctgcgcacgagccgctacatgaaagccagtggccgcgatgacgctgccgtggtggagtttaccggcaaggtgcaacgtatcgcccgagtccatcagctaggccttaaagaccgaccaaaacgtcactctcaggatattctatacccaaaacgtcagttactcggatttagccaagcagataaacatctaatagaggggctgacaaatgcacatcttacgaataatactgttactttaaatgccaaataa

SEQ ID NO: 160748 - DNA, 249 bp, Enterobacter cloacae; identical to SEQ ID NO: 123137

SEQ ID NO: 160749 - DNA, 471 bp, Enterobacter cloacae
ttgatcgagaaacactttgataaatttcttaagaattatttagacattaccccatcgcacatcgtaaagttcagagaaggaaaaaaagcaaaaagaattaagagtcactacatctccttacatactaataaaaaggatatggaaaatatagttgcagcatacgaacacttccgtgataagtatgatgaattaaaaaaacaatacattgaaactaatgagttagttgatttcacatatgatcttctgaatgaggatgaagacacctataaatcatacaaagttgctctacaagaaattcacatgagacttaatgatgtttcccgggatcttaattttatagaacatgaaataaatgaatctgaaacatcacaaatacaagaaaccttagatattctactttctaatatttctgcgcaagtaataaaaatacaaagcatgatcttcgatttaaaccgacttttgaataaataa

SEQ ID NO: 160750 - DNA, 207 bp, Enterobacter cloacae
atggggatgaagcatagctggttccatcataccgattgcacaacccagcaggccgaagagctcatggcggaataccagcgccgcggcgtaatggtagagcgcagcctgaactccgattatctcacctggaccgtcagcgtcaggctaccagagatgcgccgacaggaacgcacaccccgaacattccgacaaaaggtttgggggtga

SEQ ID NO: 160751 - DNA, 285 bp, Enterobacter cloacae
atgagcgaaagaattgccaaacttgagacaagcatagagcatctctcggcaactatgaaagcaatggatgctaagcttgataagttgatcgctgtagcaggcgatgaaaaaaaagttaatgctgtcatgttggataaattctctgaatatgacaaaaagctagataagaaacccagcaaagatgaagtcggcaaactgattgctgaagcaaccaacaagcaaattgtttggactatcgcgaccttcattgcggttgcgctcaccgtttacaagctgttaacttag

SEQ ID NO: 160752 - DNA, 1890 bp, Enterobacter cloacae
atgaaatccgagacgctaactgtccagcaaatattccaggatcgccgacaatattgcgttcctttctatcagcgagcctatgtatggactcaacgaaatcagtggtctgctttgctggaggatatcaccgaaaaagctcagatccgcctctcgggtacaaaaccgactccccattttcttggcgcggtagtgctggagccacaactcaagaacggcttgatgggcgtggacactctgcacattatcgatggtcagcaacgactgactacgctccaatatattctggcatccatccgactggccttgcgtgcaactggcctttccgatttagagatgctagtgctgccttgcttgcaaaacacaaacgaagcaacaatgcgaaataaagaggtcgaacgcttcaagctgtggccaacatttcgcgatcaagctcactttattaaaagtcttaacgttgataatttcgatgacctccgtaaggttttctctgatagctttacattgcatggcacactgcgtaagcatttcagccatcctccgtcactggaggcgctgtggttctttagtggcaactttatcaagtggattagctcggagggtcactccttacaacaaaatgcagaggcgttgattgaagctgtcatggcagacctgaaactggtcagcatatctcttgaggcagaagacgacgctcaaatcatttttgaaacgttaaatggccggggcgctgaacttcatgcgacggacctcattcgcaactatatttttatgcgcgctgaacatgatggcatcaatgccgctacgttgtatgaaaataactggaaaccctttgaagactcgtactggactgaaaaacaacgccgtggtcgtataaacaaacctcgcctagagtggctaattcacgcaacactgcaagcagaaaagcaacgtgaagtagacctttctcgcctttacaatgaatatcgggactatgtaactaagggctcgccttcacaccgagccgatcagcaggttgaactcctcaatagatatgctcttcaatacaaagaactgatcggtggtttgggcacaactcctatcgcgtgccttggtcgacgtatctcagcctatgacgtgaccacgatttatcctcttgcattgctcatttcagttgctgacatttctgatgctgaaaagacaaccatgtacaacgatcttgtctcgtatgtggtacgaagagcggtgtgtggcctgacgcccaagaactataacaacgtctttatgaatgtcgtgcgtcacttagctaaaaccggcatttccagtattgagttacgcagcacccttaatagcttgaatggtgaggcctcccgttggccgactgactcagaattcctcaatgcttgcacctctgcacgactttaccctggcaggcttgatgcgcagaagatgcgctcaatgctaaccgagcttgagggggaacttcgtcgctcggtgaaaactgaggagccagttgttccaaacctttccagtctcgatattgatcacctcatgcctcaaaactggtactcccattggcctctcgaaaatgggtataccgtgacaaatttagacgctacgtcagtgaatcagatagttctggccggcgctgagcttacacacgagcagcaacttgtctggaaacggcaacaagctatcgcaacgctgggaaatctaaccttgctcaacctcagcgtgaatcgttcggcccaacactctgcgttccttaagaaacgggatggtcttattacccataccagcctgcgcttgaacgtgccactgatcgctatggataaatgggatgaggagcaaattctcgcccgaagcgagttgctggggaatgctgcactgagaatgtgggcgaaaggcgattaa

SEQ ID NO: 160753 - DNA, 390 bp, Enterobacter cloacae
atgaataatccaaaatactcttccgctattactgatgctctatttatattactcccgtttttcgtgttgtttttaattaaatttatgcaaagtgatatttatgcaatgttcaggttatctgattattctctggctatttcaattatgtatgggcagttattggggaagacattgagtgtacatgaacgaaagaaaaaagatggtaactttcaactctttcaggtgatagtatttattgtgtctatattaagtattgttctttatgcaggattccagttaatagttaaagtccctgactttgtttataccacccagttgataatttttgttttaggcgttttcttttacattccaattggaacgttagtgaataaaattatagacaagtga

SEQ ID NO: 160754 - DNA, 867 bp, Enterobacter cloacae
atggatttgcaatactctatcaggattaatttcgacgaagaattgatggagagacctgaaagggtttttgaggcaatggggctttatgtaaaaggatttaatggactttacactgcttttgtcaagggggtcgatcacaatcttaacattcaatatggattaaggaaaactagagatggttctttaattgcagacgttggccatatattaaaggataaaactaagcatttaaatatcttttcagtttgggatggtatttataggggactagaaaaagctattgttgatgtaggaaaaatagattgtgaaggcgatgtaaaatcatttgtcgataatgtcaatgctcaattaccagctaatgacagccgtatttgtgaatgtgatgcgaatctttatgaagtggcaaaaaaccttaagttagtttttgaagggatgcaaaaattgtcaccaaatgaaacgaccgagtttggtataaatgataagtttcataaaattagctcaagtttcaatttccctcgcgccccagatgagctttttgaggataagataataccttttccgtctcgggatttactcactattaaacgacctgattatgtcggtaacgcccaatgggattttctaagtactaaaaggaaatcaaaaaaaatcagtgctaaaattttagatgagatatggataaatcgttggagaaatcatgaggttcagttttggcctggtgatgcacttcttgttaaaataatcacgaggcgctatgtgagtggtactgatggcgttgtaagttataaagatgaaatcattaatgttctggatgtaatatctcaggataaaatagaacaggcacttttggatttgaaagatgaataa

SEQ ID NO: 160755 - DNA, 2466 bp, Enterobacter cloacae
atgaacctaagcattccttcaaaagatgatgatcattatgaacttaacgagctgctgagacgcattgttggggggaatgcagtactctttcttggatcaggtttttctgctgatgcaagaggtgtgaccgatgaggaaatgcccttagctggccctcttgcaaatgctataggtgaattaggccattttgatggcgagagcgatttgcgctatgcagcagatcgctatatagatgaaaatgatcctcgttccatggttgatcttcttcgccaaaaatttacagtcaaaactgtcggacagcatcatagagacattgctaatgtaccgtggcgatgcatttatacgacaaattatgatctttgcattgaacgtgctgcctccgatgtgggaaaaataattacgactgttgatgtttctgattctcctgcatctttcactggtatgagtgatatttgtgttcatctgaatggctcccttaaaaatttgagcacagaaaccctaaataatgattttaaactatctactgcatcatacctttcacctgaatccttcctgacatctttatggcattttccattccaaagggatcttgaattctcaagtgcaatagtttttgttggttattcaatgtatgatatcgagattcaaaaaattttgcatctgaatgcgcattatgctgaaaaaacctactttataactaggaagtctacgaactctcgctcgacatatactttgtctaaatatggtaaagttcttcccatagaaacaaaagggtttgggctagcgttatcttcttatataaaaaataatcctattggaaaaacagagttctttctaacaagcttatggcgctacgagagtactccatatgataaagctattagggattcagatgttgatagttttttaatgaggggggatatagcggattctattatcgacgcatctcactcagaacaaaatgggtccccaatattgatcaatagagtaatgttgaaatatgcaaaagaattattatattctggtgcaaacattgctgttataggtgattttggaaatggcaaatctgttttcattcgacagttacgatcattattgacagggcagtcttttgatgtttacacggcagatcacaaagatatccatcaacatgatgatcttgataaattaataaaaagtggtgttaaagcattccttgttgttgactcgtacgagcagaatatggaacttgtgcagcattttgccgaacaaagtccaccgaacattcaactcattttgggtgcccgtactaataatcatgaacgatgcagaaaaactcttcttcagcagggactaaacctcagtgaagttgcaatagatgatctggaggaagaggatgtcagagaatttataaatatagttagcaatgcgggttattggggggataaggccgcaatatccacggctgctaagcgtaatctagtaattcaagattatagaaggcatttatctttaaatttgttagggctacttgaatctcctcaaatggttaatcgcgttcaagtattactgactgatttgattaaaaataaggacaaaaaggatacaatctttgcgattgcactcctctcaataattgacttcccattgacatcaagcctaatttctgacgtggcaatgaatgcagagatctatagttctgaattacggagtgatgaaaattttagccagttattccatatacatggctctcttattactacgaaatctagccttttcgcacttgcaatgatcacccatcagttcacttcagcttatatagttgatcaacttttaaaaattgtggagatgttaggcgatactcgtgctgaagtacaagaaaggaaagatatacaaaaaagtttgcttcgattctctgtagtagagcgtttactacctgagaaacaaaagaaaaacaatcttgttcgttattatgaacaagttaaattgaaagtttcatggcttcaacatgacccacatttttggcttcaatacggaatgagtcaaattacgtacaaagagtatgaaaaagctcaagatttctttaaacaagcatatgcccttgcatcacggagagacgggtatcacacgattcaaattgatacgcagcaagcgcgcctttatttacttcgttcattagagtcgcaggataatgctcagactcaaaagtacttcgtcgatgcaaatcaactaataagaaagttgccaaatgattcacacacatatcgccaagttgaattatatcgaaatgtgtttgagcaaaactatcccaatttttcaggtagtagcaaagcttattttgaacaagcctgtcgtgcaatattgcaagatataaataatgtgattcgtgatcaagagagatccactcagccttccaaagtccatgaaagagtaaaaagaatgcttgagaaaattctagatgaggtcaaaacaatgcgagtgaaatga

SEQ ID NO: 160756 - DNA, 813 bp, Enterobacter cloacae
gtggaattattaaatcgttttttgaagttagaagttctaaagcgtatatattatggtttattttcttcaggtgtggctgttttcgtgtattattgtgtgcgaattggtttttttcctacaggtttatcactttcagatgtgattttctttttcatggttattatgtccttttcactgtttttgttatttttcttgctttgctggtattccatttcagttgtaatttctaattttgcaatgaagtttataattttcgttcttcagatgcggaaaataaaggataagaggttgcttcgccaattcaaaggcataaatttaattgcagagaggatgaaaatttatagttatatgccttaccattattttattgctttaactggcgggttggttattttttctgggattaattctggaaagattgacacattatcagttaccctgtccataatgataatgtcaatctgtatatcattagttcctcatgcttatacagaccgaaggatcaaacgaggccataaaaaaaatcatctaatttctcttgtcgtattctcaatttttatattttttactctgtctggtatgccacctattctcaacgatacaagtatgagctatattggttttcggaaatatgatgttacggttactcttgaaggtagcgacttggaaatggctaggtatctaacaggaaataaaaatcaaactcactttaaatgtgatgctctttttaccgggataggtagtacgtctttattggagattaacgataaaaggattattgtaaaaaattccggcatgtcgctcgcattctag

SEQ ID NO: 160757 - DNA, 327 bp, Enterobacter cloacae
atggagaaacacgatcccaccgaatgggggcttcgacgcgatatcacgccgcgtgtaggagcacgactggcacaggaaggaaatcaactgcattacctggctgaccgggccggtgtcaccgacacctttaatgaagctgagagccgcaaactgaatgcagcatttccgcatttcgtggagcagatggagttaatgctactttccggggaactaaacccccgttatgcgcactgtgtcaccctgtaccatgatggatttacctgtgaagctgacacgcttggctcttatggttacgtctacatcgtcatttacccaactcaacgctga

SEQ ID NO: 160758 - DNA, 474 bp, Enterobacter cloacae
atgcctgaactgattttacccccagccttcccggtgaatgaacagcgtattatccgccgcgccatgcgcctgctggagaaatacctgcgccagcctggtgagcagtttcttgccgcgaattgtacgaaaacatggctacaactacatctggcgcgacaggaacgagaagtctttgtcgtactctacctcgataatcaacatcgcctgctggaacatgaaacgctatttctcggcacgatcagccataccgaagttcatccccgtgaaattgtaaaatctgcactgcgctataacgcagcagcggtgatagtcgcccataaccatccatccgggattacggatgcaagtaaggcagacagaaccatcaccgcccaaatcgtaaacgctttggggctggtcgaggttcgggtgctggaccatttcattataggtaatggcgaaatattgtcttttactgaacggggctggctgtag

SEQ ID NO: 160759 - DNA, 546 bp, Enterobacter cloacae
atggaaaaggattatcagaaggttatcgctataccttctcccacaatggtaaagatatttgcaaaacctgattgcagcaatatcctgccactcgttaatcgaactgctaaagctttatctctcattgtcggtttaatgttgtgccttccatcctccgcttacgcagatgaacaacgctatatcagcatccgcaacaccgatacggagtggactcctggtaatatctgttcgtatcagttccgcctggataacggcggtagtggtatgggttttggcccattggctgtttcgctgcggctgaaagacaagtcgggcaacacgctggctacgggaaccatggatgttgccccctttggtgacagtgatgccactcgttctcaggacgcttttctggagcatgaatgtgtcgaaaacgtcagtactgttgaaatcataaaggcgactgaagagcgcaacggctaccaggtcaggctgccactgtccattttcgacccacagtattaccagtcactgtcagtatcggttgccgggaagaaggcatcataa

SEQ ID NO: 160760 - DNA, 633 bp, Enterobacter cloacae
atgaaattatttaccactacattgctggctgccagcctttgcctgggtactgtttttccggctgacgctggaaacaccgtcggcactgttaaagcctggcaatacatgcaggccgacggctggagatcagccgatggtatggatgacaacacgctgcacaacatgctctatcaggccagcgtgattgataactacccatggacgaagcagtttctgctacgtgtccgtggcggcggtcccattttcctggccgacaagaaaacccacactattcgtcaactaaaactgagtcctgtcggtgaaacctacaatgacattgaaacggtttatcagggagaagacaaaggcgaaggctgttatttcgctatcatcgacaacaagtactcagtccgattacaagcagaggagagcgttctctacagctatcctaaggtcgataatattgataacgaactggctaaagtcaggcagaaattcagcccacaagtcgttacggtcattccggataactgcgtaaataaacaacagcaggccgcattggcggctaagcgctcggaagaggatcggaagctacagcaatgggtggcgcagcaaagcctggcggaattgtgtcgtcgcacaggcaactgctaa

SEQ ID NO: 160761 - DNA, 876 bp, Enterobacter cloacae
atgaaaaaatcagaaggtctgcaagccatcgaggaaccgttggcgtcactcccccatgccattggcaaacatattcttgaccatatttacaagctcactctctacgaaccggtcatcgggatcatgggcaaaacaggtgtaggtaaatcgtcgctctgtaatgcgcttttccaaagtgaggttactcccatcagtgatgtccacgcctgcactcgtgacgtactacgatttcgcctgagtaggggccagcatagcctgatactggtagacctacccggactaggcgagagcgagcaacgggatgaagaatatgaatctctatatcgcaatattctccccgagctcgatctcatcttgtgggttataaaagccgatgatcgagccttctctgtggatgaatgcttctatcggcgagtgatgactggctaccaacaacgggtactgtttgtagttaatcaggttgacaaaattgagccaagccatgagtggtatgtcaccggcaatgcaccatcaccgcaccagttggtgaatattgaggccaggctggcatccattcgtcagttattttcaccgctccatccggtgtgtgctgtctcagcgagaacagaatggaatctaccatcaatggtagaaaccatgatgcgttgccttccggatcgtgccactagcccagtggcgacgcaattgcatgggaggctatgcaatgagccggtaaaaaagcaggcacgtgagagtttcggcagggcagtaggtgaggtgtttgattctgcggaagcggcatcatttattgccgcgccactaaaagcggtcattcgtacagttcgcgatgccgtagcatccgttgcccgtgccgtttgggactggattttcttctga

SEQ ID NO: 160762 - DNA, 876 bp, Enterobacter cloacae
atggttagaatactacgcagtgatgaagagatgataaagtttctgggaaatgcattattacaagagggcattcactgtccaccgcatacaggagataaaaattatcgctcctatcaagatagagtcagaaaacattgcctgtctcttggttataaagcacaggaaatagaaaattatttcgccactgtggataaatcccatgaaatcgccatcccctccgaagtggatcagggatggtttgtaaatgatattcgcgcaagcttgtggttggcatgcgagctattttctgaattacacgaaatgaagttagggttgggtattcttgagccgttgtcccccgattcattacaacctaatcattctgttaggatacaaaatatcaggaaagtaatacatgcttggccgttaaatagcacgcctgcggagtatattaaaaataaaggggtggaatgggctaggttaattgagaaagatgatatgtttagtgattttctttctctggataagaaaatttcttcttggttgaaaaaatatctacaaaataacatttcttcttcaagtgagtatatctgtggtgaggctaatgacgaaattattgcgtggtgttataccgtttattttaaatggaaaaagaagaattcagaatcaccagacacagtaagtttatttaacctaaaatttaaaagtgcatggtcaacacaaaagaaccgaataaaaaacaaaataaccaaaaagcttaagccgctcaatgttcacatctctgaagatactcaccgtatgttaaggatgttagccttagacgaatgcatatcaaacgataaagtagttgagcatgcaattatggctgcatacaaaaataaaagatcaaagcagtga

SEQ ID NO: 160763 - DNA, 579 bp, Enterobacter cloacae
atgaaacgaccatataacgccaacccaaagtataaaatggatggactattgctgtctgatatcaatacgcatatggaggctatgttccaaagattttcaaaattactacctttcaggatcgactttgcctataaaaagaactcagcaagctttgggcatgtctgcaaacattcaatgtataacgaagtccaaatattgattaaagagttcgaaaaatcccttccgattgtgggctattactgggtgatcgagtacacgaagagaaaaggactgcatgtccattttgtttgctatctgaatgggcagtttcagaactgtcattatcctgtatcccgagctatggggaatatttggaaaaaagtgacagatcatgatggatatcatcacctttgcgtccctaaagatatttatgaagtcaaaattggcaaggtgatccgacattttgatacggacgagatcgatgatttgcgttatgtcattagctatctggctaaatgtgagcaaaaggaaaatggcatcatcgcgggtaaaagcgtgataccggtaaaaagcaaacgaggtaggccacgcatacgctga

SEQ ID NO: 160764 - DNA, 207 bp, Enterobacter cloacae
atgaccatcaaaccttccttacttgaagaccaatttgtcgatatggctttcattacccgtctattaggcgtcagtgataagtggatgtaccgactcatcaaagatggtgtctttccgaaacccatcaagctggggcgcagttcgcgctggctacaaagtgaaatagagtcctggttgcaggagcgtatccgccagtcccgtcagtaa

SEQ ID NO: 160765 - DNA, 576 bp, Enterobacter cloacae
atgcaagatacaatcgctcgctatgattttttactcaaaacctaccaaagctggcttaccgatctgaccaaactgactgtcaggcatggaatatgtcatcagaatatttatcccagccattaccttactctgtcgacactctacttcccggataccggccctgtacctggaatcgtgccacagtgcctgtaccgaatgatctataacaaaaccaagccagaaccgctgagtattcaaaatgatttacgtcttagcctggagactgacgggcagttgctttttactcacggaggccttgaaggtgtattgcttagcgagtgtgtcaggctcaagcaacgctcacttgccaataaactgataagcctgcttcagcagttcaataacgtggaatatcgccataagcttgtttggctattctggtatgaccgtatgctcggagcgcctcttgacgactggctggagaaccttaagaaaatgaatgatgaagagttctgcttttggctgttacagcgtcaggaagaaaactcagagttaacccatttaatggatgaatatgtgaattttacgcactactga

SEQ ID NO: 160766 - DNA, 309 bp, Enterobacter cloacae
atgccacgcacagcagacatacacgtcgccttcgttgcggtaactgagccatcccttcctccttctgccagaatagttgaaacgcaggaaggttatgatgtcgttgagaactcaacgctgtttaagcgcggagacaccttactcatttggttttgtggccgacagcagcatgcttattgggcaggtggcgcgctgattactgacgacggtgaggccattgaaggcgatgcgcttgatgacgttcgcctggtaggtgtagttacgcataccattcacccagtttctttagacgaaaatcccttcatgtag

SEQ ID NO: 160767 - DNA, 1089 bp, Enterobacter cloacae
atggttaaaataatgcacaaattctctagttctgaatcacttactcttgattacgcaaaggcgattggaattttttttgtcgtgcttgggcactatgatgcaagtgtgatgaacctctttaagccttatacattccacatgccgttattcttttttataggtggaatgacattaaattacagaaaaaaaacctctcactatctcaaggctatttcaaagtcaattgtactttacgctgctttaacttacttaataactggtgttatttctgaatttatatcaaagcattactccatccctgtattgggaaatgcatttatttccaatccaataacaaccataaccaccgcatttcagtacaactttgctaataacagactgtttgttgtggcgtggtttttggtagcctacgcaatagcatcgacagcttgcttctttatatgcaagctaacttataatagaggaattgaagggtctgcggctatattattttgtgctggaatactgctaggggtatttgccatagacgtaataagtccagcaaagacgtctcaggcagaaaaccttttagtgcaatcattggttgcattaatgttctttatgattgggaattcattacgtcaattcataagtgttttcactagcccgttcattgctctgatgtgctgtgtaattatctatctgttacgtagctatggtgtgacaagtgatttcatcatgtcaatatcttcatatccttacggctctgtgattaccatagcgcaagcagcctgtggtatttatatcgttatgtttatgtctgtcgcagtttcaggaaatagttgtcagtggctcctattcattggtaaaagaactaaatcaataatgtcctatcacatactttcttttatattattggacattatattttacaaggctggcatgtacagcattcaaaagacagacgcatttacccactacaaatcatggtttagcatgcctctttatgtctcctttgccatagcattgccagccattgcaaatcacctgtacttttcagttaaaaacttcttgaaacctcaatccatgttgaatcagaagagtacatga

SEQ ID NO: 160768 - DNA, 210 bp, Enterobacter cloacae
atggttcttgtcgataccgggaaagaaccagtaaacggaagtctggtaatagctaaacttaccgacgctaatgaggcgacattcaaaaagttggttatcgacggcggtaatagatacctcaaaggcctcaatccgcagtaccccctaatcccagtgaatggtaactgcagaattattggtgttgccattcaaactatgatgaagctttga

SEQ ID NO: 160769 - DNA, 354 bp, Enterobacter cloacae
atgaaaaaaataattttggctttggtggtttccgcgctgttatctggatgtgtcatgaagagcacagcccatgctggaaaagattttgatgaaactaagatttcacaaatcgttagcaagcagactacagaagccgaccttctccgcttgatgggtgagccagtgaaaaaggagatcgtcagtgaccatgaagttaagtggatctacgaatatgtaacttccaatgcggctgtaagaatgttctccacgaagccgaaagtcgatgttacgaaaaaagttctcgaggtactgatccgcgatggcgtcgttgttaatcacgcgtttacaaatccaggaaccacaacgtataagtaa

SEQ ID NO: 160770 - DNA, 378 bp, Enterobacter cloacae
atgaaaaaaggtttactgctactggccgttctggcgctgtcggcgtgtgatgtgaatgatgcggatgtggtttctaaaaacctcagcaccgcatctgacaacttcgaagtcaaccgccgtttcgtattctacaacgggatcaccggtgaatatctgctgaccatcgaagggctttgctctaaagataacagcagtacagctacaacccttggtgtggtctgccaggtaggcccgaaagagtacaagaagcacatgctgggcttaagcgataacgtcacctggtttatggaacaggttgacggtgtgaaaacaagcaaatacttctaccgcgtcaccttcaaaccttcagtaatcatccctgatatcgatatccgctaa

SEQ ID NO: 160771 - DNA, 528 bp, Enterobacter cloacae
atgaattacagaacggtactggacttctggttcagtgaacagagtcagacaaaatggtttgaacgggacgataactttgacgccataatcagtgaccgcttcacgacctgctggcaaatggcatgccggggagagctctcccattggagagagaacatactcgggcgtctggcagagattattgtactggaccagttttccagaaatctaaacagggaaaacgcgcacgcatgggcacaggatggcatggcgctgatcctgtctcaggaagcaattctcaaaccagaatggcatcagctcagcgttatgcaacgggcatttttgcttatgccctggatgcattcagaatcagctgcaatccacgataaagccactcttctttttaatgagctcggagacccttccttcatgcagcatgaacaggaacatcggtccatcatccttcagttgggtcgttatccacaccgtaatcgtcttcttgggaggacatcaacgacggctgaaaagacctacctcagtgagaattag

SEQ ID NO: 160772 - DNA, 879 bp, Enterobacter cloacae
atggtgatgctgaatgacattgcgcttttcgttgaggtcgttaaatttcgcagtttcagaggggcggcggaatcactcggcatgcctaattcaacactttcccggcgtatcagcctgcttgagaaagagatcggactgcgtcttttacatcgcaccacgcgtaagatggaactcacggaggcgggacttatttactatgaacgttgccgaagaattgtggatgaagcacgactggcacacgaacaactgggtgagatgctcgcacagcctagcggggtattacgtgcctcattacccgttgatttcgctagggtttatcttgcaccgatcattgctgagttttctgagcattatgccggaatcagttttgagtttgatttcacaccgcgtcaggtggatttgatttctgagccttatgatgtggccatcaggctgggggagcctgcagattcaactcttatcgccagaaggatagcccaactaccgcgctttctttacgcctcccgggagtacatcagtaaaaacggcgctcctcaaaatcctgcagagcttgtcctgcacgagtgccttcgcatgagtacagacagttcccctcaatgggagctgttacgtgaacaggagagagtaaaggtgccagtgcagggacgattcctgatgaacagcatgggtatgatcaaaaagtttaccgtaatgaatatggggataagtcttttatcagcgggactggttcaggaagaagtcagcaaagggattctggtcaatattttaccagagtggcaggcctcagcaatttctgtttatgccgtaactgaaacccggctattgccggcaaaaacgcagcgttttattgacttcctccgtgaaaaactgagtgaataa

SEQ ID NO: 160773 - DNA, 573 bp, Enterobacter cloacae
atgaaatttgaaagatttacgaatgacaattccgccttactgctcatagaccatcagacaggcaccatgggatgggtaacctcgaccacttttgacgaaatgaaacgtaacgcgctgattctggcaaaagccgctgcaattctaaacctgccggtcattctgacatcaagcatggaagaacatgcccagggaccgttgctgccagaactgaaagagattctgccatctgcatttgaaaaacgtatcaagcgcctggggatcgttaatgcaatggacgatgaaaatttcgccaacgccgtaaaggccactggccgtaagaaaatcattattgcaggagttactaacgacgtctgtaccgtctaccccgccctgacgctggtgagccagggttttgacgtgcaggttgtggctgatgctggcggttctccgacgaagatggctgatgatattgcgcttcgccgcatggagaagtctggcgttactctgaccacgacgaaccagctcatagctgaactggcaggaagctgggcaacggaggcgggagcgcaactggcacctatgctcataagttaa

SEQ ID NO: 160774 - DNA, 882 bp, Enterobacter cloacae
atgaccattcttgtaacaggcagtaccggaacaatcggttcccatattattgaaattttgaccgcgaaaggtgcggatgtccgtgcgcttatacgtgcaggtaaaaaaacggattttcctgcaggtgtgcagacagttactggtgatatgaccgatctcgagagcatgcgggaagcactgaaaggcgtaacaacgctatttctgcttaacgccgtggtgccggatgaactgactcaggcgttgaccaccctcgatctggctgctgatgcaggtatccagcgcatcgtatatttctctgttttcaatggcatactgttcagtgacgttccgcatttcacagctaaatacaatgtggaaaaggccattgaggatcggggtctatcggcaaccatcctgcggccggcctatttcttccagaatgagttaaccctgagagaggccattatgcagtacgggacttattctcagcctctgggtaaccgcggggcagcaatggttgatgcccgcgacattgctgaagtggccgctcttgaactgctccgtcgggaacagtctcaggttccgttaccacgatgcattatcgatgttgtgggtccagatctgatcaccgggatggaggccgccactatctggagcgaagcaacaggcaaggacgttatttatgctggtgacgacctgaagaagtttgaagaaatgatgcagcagtttgctccggctgttttaacccgcgacatcaagatgatgttccggggtttccagaaatacgggatgatcccgggagagtcttcacgtgacatcctcaccggtatgctgggcagaccgttgcgcaattatcgcgatttcgttcgtgaaacagttcagagctggaacgcacaggcataa

SEQ ID NO: 160775 - DNA, 756 bp, Enterobacter cloacae
atgaaagagattataaaaatagacaagacccgtaagcggggacaccaggcaggcggctttggtatcgatattctctggccaggccttgtactaaataaaggtgacagcgggattggtgggattggcagaatagaccatgcggcagtttctccgggaacagttatcccgatgcactcgcataaggatgatgagatcctgacttatttgcgcagcggactggtcaggcatctggatactgaaggaaacagtgaggaaataagccctacacgtcttatgctgatgggagcagggcatacatttcagcatgaagaacaggtcctgaaccagggtgggaaacttgaaggactacagatatttttgcgtccagttacacctgatttaaaaccatgtgtacagtttcacgattttgataccgcattcagtctgaaccaatggcgtaatattgctggcccggacaatgcgcccctggttattcgcagcagcgtatggattcaggatgcacgactggaagcgaacacctctctgccgcttccggtcactccggcagaaaatatctccagactgatatatgtttttgcaggtcaggtgaacatagaggatgtcattttgcatccgggagagagtctgctcgtcagttctgaaaaattcaccctcatggcgacagcacaaagtgacgttgttctgtttacaacggatattgccgccagcgttttcaagggcggtatgttcagcggaaatatcctgtctcactcttag

SEQ ID NO: 160776 - DNA, 900 bp, Enterobacter cloacae
atgtcaaactcagaccattattttgaacgtatagaaacaatggctggcacggattatttgttacgtgccggcgagggtgtacccgaaaagggcgtttatatccgaccgcacgttcatcttgagcacgaaatcatgtggttcagacgcgcttcgggttacttttgtatcggcagtgaaaagttcccggtcacagacggaactctggttttcgtatcctcaatgacacttcatgatatggaactggcttacacgtccgatcatgaacgttatcttttgcagtataacgatgccgccatttatcgcctgaaattccccctaccgacatgcaaacagaatacggggtttatcatgcaacctgacgcttctgccgttgcccggattcagttcttattcgaatggctgacggagcagcatcagcagctttgcacgcaaaatgagatcgacccagtcatgctgttgctccttaacacggtcctttctcaggcccgattcaccgaaaccctctccgtgcgccgtgagcaacataataccttcagtaatatcattgatttcgttgtgcagattgagcgtgacagggatttcaccctgtcactaacacaggcagctgaacgctgtcggctttctccagcgcatttttcgcgcacgtttaaaaaaataatgcatgtcagctttaaagactaccttgtccgcaagatggtggcccgcgcagcggagctgctgcgtaacacccgcctttccgtcactgaaattgcacatcagtgtgaatttacggacagcgcctatttctgtttccggttcagaaagacgatgggcgtcacgcccggggcttttcgtgctgccagccgatctacaaaacagttatccacccggcatgatccgtttcatgaaccggaaatttaa

SEQ ID NO: 160777 - DNA, 1362 bp, Enterobacter cloacae
atgtctgcactcacattcagagaaaagctgggttacggccttggggacggggcgtcaaacataatctggcagaccatcatgctgtttatggcctatttttacacggatgtttatggactcagtgcctttcacatgggcacgatgtttcttgttgtcaggatagtggatgctttttttgatgtttatatcggttttctggcggatcatacatcaacccggcatggccagttcaggccctatctgctgtggttttccctgcctttcggtgtactgggtgcactgacattctttacgccggaaacgggtgagaccggtaaaattatttacgcctatgtttcatatacggctttgtcgctgctatatacgctggtcaatgtcccttactgcgcaatgataaacaacctttcacgcgatccgcttgaaagggtctccatgcagtctttccggtttgcgttcgccgcgctgggtgggctgattgtctctgccgttgctcttcccctgacccgcattctgggaaatggcagccttcaacacggctattttttcgcaatgatgctgatgggcattatcagtacggtcatgttctacctgtgctttttcatgacgcgtgagagatacacccggccagttgatcgctcgcagaaatttagcagcgtattcggcgaattgcgtcagctcgcgaatgatgccaactggcgaagcatctttattctcaacgttgttaacctcacggcgggcatcctcaagaccggcggtgccatgtacttcgtcacttattacatgcaccgtcctgaactggtcagcatcatgctcaccatcatacttggggcaaaatttctcggctctatgtgtacgaccagactttttggaaagctggacaggctgttcgcatataaaatggcgatggccatgcaggcgggtatcatgatcctgcttttctttatccccgcaaaacatatactcgtcattttcaccatcaccggtattgttcattttattaactcgacggcgacaccacttcagtggagcttcctgagtgacatcatcgacagtatcgaaagtaagttaagcaaatcattcagcgggctggttttctcgaccaatctgtttgctatcaaggtcggtattgccctcggcggcgcactgacaggtttccttctgacgctgggtgattataccggcggtgaaggagtgcagagcgacgccgccgtgctgagtatacggctgctttttaccgtgatcccagcactgctcatactgagtctgatttatattctgcgcggttataaaccgcacaccgatcccgtaaccagtgaaagtaaatcggagccgtcagcgctgacaacaggggagagtcgatga

SEQ ID NO: 160778 - DNA, 1599 bp, Enterobacter cloacae
atgagcacaatacataaccctttactgccagggtttaatccggacccgtcgattattgaggcaaacggagccttttatatcgctacttccacgtttcagtggtttccggggatctgcatttataagtcatttgatttaaaaaactggaaacttatttcctgtccactcaacaggctgagccagctggatatgaaaggcaaccccgattcaggcgggatttttgcaccgtgtctgagcgaggataagggtattttttatctggtctataccgacgttaaaagcctcagcggtcgcttctgggatactcataattatatcgtcaccacgcatgatattgagggggaatggtctgaaccggtatacgttaacagcaggggaattgatccctctctgttccataaaaaggacggaaccaaatggctggtcagtatggagatgagctatcgggatggcggtaaagcgggtttccccagatggaacggcattattcttcagcagtacgatgaaaaggagcagaaagtcaccggcgaaacgctgaagatttatgcgggcagccgcctggggacgaccgagggacctcatatttatgagcatggaggctggtattatctaatgaccgctgaaggcgggacgttctacaatcatggcgtcacgatggcgcgagcccgcaggcttgaaggcccttacgaaacggatcccggcggacagatgctgactgcacgctatgactgccgtttgccactgcagcgtaccggtcatgcagaccttatcagaacggcttcagatgaatggtttatggtgcacctatgcggcaggcctcttccttcacggggaagaagccctatgggccgtgaaacagctattcagaaagtgtactggagcgaagacggctggctgcggctaagcaacgaaaagaacacgccagaaatgattgttcatacccggctgacggagcgaccctggcctgaaaccgcttcacgtgacgacttcgattcgccgaaccttgctcttcattaccatactcttcgtgttcctttgccggagtcggtgtgtacattgacggccagaaaaggctggctgcggctttacggaaaagaatcactcagttctcttcatacacagagccttattgcaagacgccagactgattttgcttacagggcgcagacctgtcttgacttcaacccgcgatcatttcagcagatggctggattaacaacgatatatgatactgccggttatatttatctgtatgtctctgtcggcgaaaacgggaagcggaccgttaatctgctgattaacgatctcaatactttttcacaccctgccggtccgggcatcgacattgaaagtgagctacctgtttatcttcgggttgatgtcaggcatgacgccgccttttactattattctctcgatgaacagaactggcatagcgtcggagattatgtcgagtacagcaagttatcagatgaatactataaagagagaggatatgaacgttttaccggcacctttgtgggactctgctgtcaggattttaccggtgaaaatgtacatgctgatttcgattattttctctatgagcctctcagttga

SEQ ID NO: 160779 - DNA, 828 bp, Enterobacter cloacae
atggatttacaagcatgggataacattatctctatcgcttcgaatgctgtaacagcgttgagtgtggttggcggcgtcatcttcggaggggttaaacttcaggagattgtgaagacgagaaaaatggagcaagctttcgcctctgcaatagcgcttaaagatgagattgatgctacgaggggccgttataatcgtatgcgttttgaccttacacgcataatgacatttatcgacacgctcgcaaagactggtcaaaaagtagatcaagaaagctactatcagattcaaggttccttgagagatatggcggaaaacaccttttgtattggtagctgtttcgtcaaagttcgtcactataacgttgccattaaacaaccagcctgggaaccattcaacgctcttctacactctgctggtgaaacgcaaatagctatatcaaaattagtaaacctcatcatgcaggccttgcttaaagagcagataacagcggaggaattcgagacaattcgtaatctttatgatgaacatggtgaacggatgaaaggcgttaattacgctatcgccgggatagatattattaagttcgatgatttgtttgacttcagcaaagttaacaaaaaaagccgggatcaacccggctctcatgttttattctttctcaatttcaacaacgcttcactaatagccttctcaagcccgttttgttcaacgtccatcatgaatgaggagcgcggaaccttcaggaaacgacacacggcgctaacgttcagaaaatctaaaacgcgctcgtctgcaactgtcagcaacgggaagccgttgttagtctga

SEQ ID NO: 160780 - DNA, 327 bp, Enterobacter cloacae
atgaacgatgtttacgaagtgtgtgttcaggcatccagatttgtaaaatggttatatacgggtgagaagttttttgagcgttcgatggagcattatcaaaagtcgcttccaaccggctttgatagaattctaaaaggactcccagaacaactcgagatattgcgaaataagtgtcatgatcacgaactggttttcaagtttgctatagtagaacctgctatttcagctacaaaaatttctagcggtcagttagcagtgcttggaactagttattcgtatattaaaagcatttccggatcggatataagagttatcgttagcccttag

SEQ ID NO: 160781 - DNA, 1548 bp, Enterobacter cloacae
atgtcagaaccacgtctgggtaatctgattaccgttttactacctgcgcgtagttacaagatcaactgcgctttgaccactgaaaaactgatgcctggaattgaacagtttgcatgtcgcttgctgctgatttttgatcagctctatcccagcgagttacaaaattactttggtctaaccgatcatgagcgagaggtattgcttgatggcttgctggctaacagactgatcaacattaaccctgatgggcatattgaggctagctcatttctacgtaagcatgcagctagtaatggtgggaggccaagtttagttaagtatcaagaacgtacggaggaagtggcattcgatctactaactctttcgatatgtaaaccgcaaccgaatcgtcgttttacttctggactgccagagctattgcctcggcatcagatcgggggagatgctgctgcggtaacagaggcttttagctcacagtttcgccaccatcttttgctcagccgcaacagcgagtatgagcgtcaaaggactagattatataagataatgggctgtagttcgcatgagatggtgcagctcccaatagagatagaggttagctacgatgcttctgctggtagcattgagccgcagaagtttactcgctcctatgaatatttaggtaacacccggctgccgctttcaaacgagctggaggctcatatcgcagattttttgggagaacataaactagatgaatttggtatcgactgtgaagatttctgtaaactagcaaatgataaagtattgttacaatttgctaatggttataagttcgactattccggctggatagaggctcgcgaacaacggaaaactggctacggtacttcattgactaccggtatgttaggggctatttatttaccgcacaactctaagctgttcattagtatgttgcataatgcattacgtgattatgtaggtaaaacagctccaaaagcgctgtggtatagcagtaaagtaccactgtggggagctaatggcagtcaactttcgcgttttactcgcgatctaggcgacatacttggcaattattccgatgataagattggtcgcatttcgcttttacatccaagtgctgatgaaggtgagaaacgtcaagaacgtaagcgacacttaggtcgttttccaaccggtattggccttacttcggaggctaagtttgatcgtttggagatcctcttaattcccgatgtgattgctttggtgcaataccacggtcaacctaattctgatagtgcattaaccctgccgattggttatataaccgttgagccagagcgtttagaattacttaacaacctaatgattaagcgaattgaaggggttgttgcaaccatcaattggtctgaatcaaaacttgaaaatttaacttcgctattacctgttgagtttctgattaaattgaataagaaaagtggtgaagatgtggatgctgcaatacaaaaaatacaaattgctaaccgtgctgaaaccgcacgggcaattttatcgctacgcaagtag

SEQ ID NO: 160782 - DNA, 4959 bp, Enterobacter cloacae
gtgaagtatcagatagtaggtggtgcaggcctgcaccgcagcgaaaccaaaacagttgatatgatggttaagcagttaccagatagttggtttggctatgctggcttggttgttactgatagccaaggatcgatggaaatcgatacgctaattattactgctgaccggctgctattagtcgagcttaaagagtggaatggtaacatcacatacgaaggggggaagtggctgcaaaatggtaagccacgaggcaaaagtccctatcagatcaagcgtgagcatgcactgcgactaaaagatttgttgcaggaagagctatctcgtaagttgggttactttttgcatgttgaggctcatgtagtgctgtgtggcactgcaggtcctgagaacttgccatcaagtgagagtcgctatgttcatacccgtgatgaattcttgactataggcaaccccaaaaattacgaaaagctggtgcaagacactaacttttctcacctttttgagggggggaagcctcggccaaattcagatgaggcattaccgatcattaagtccttctttgaaggcccaaaagtcaggcctttaccacttaaagaaagcggttatcttgcgaacgataagccattctttagtcaccctcacatggtctacaacgaattcagggctacccacaaagataatagtcaacacagaggtctgctacgtcagtggaactttgatgccctgggggtagcaaacgcaatgcaaacattgtggactgagatagctctgcgtgagactcgagtaggtcgcttagttcgtcatggcagtgcaactatgcaggattatatgttgcgtgcggtaagggaactatccgaggaggatataactgatgatgcccgtgagctgtatgagttacgccgtagttttagccgattggatgagatactagatagcgaagctgacggatggagtaagtctgatcgtattgatcgcgttcgtgcattattggctccattttctgaattacatagcctaggtatcggtcattgtgatattgacccgcacaatctatggtacgcaggggatcaaaagagcattgtcgttactggttttggcgcagcctcgctggagggacataatagcctggaggcattacgtccgacattgcaaagtgctccatatactttgcccgaagatgcttttgaagaggcagttgagccctatcgcctagatgtattcatgttggctgtaattgcttatcgtatttgttttgcaggcgaatcattactaactcctggacagatgcctgaatggcgagctccattaactgatccttttagcggtattttaaacagctggtttgaacaagctcttaaccttgagccaagtaaacgctttccacgtgcggacataatgctcaatgagtttaatgcggctactaaggaacatagccaagactttgatgaagctaaccagatttatcaagagttaaagcaaaacaaattctttcgcgaagggatgaacagcgttggtgtgttaattgaatttcctccgcttcctgaacagttgtctatggtttaccctgctcttgctgctattgctacgactggcagcatcagttatcactgtgaacaaggtgggaaagccctgcaggtaaaattgtgggatggcgtgattttgaatcctcagcaacctggtgttaaccgccgtatccacgcttttaagcagcgaatcgataagattacgcatattaatctgccaactcctaaggtgcagtcctgtggactattaggacaaggcggcttgtatgtagtgagcgagtatgtggatggtctaccgtggtcacagtttattgctgagaacgtgttagaacaatcccaacgtttcacaatagcggagacgttgatcaacaccattcatgcttttcatgaaaagcagttacctcatggagatctttgcccagagaaactgctggtacaagtcggggagcagacagcaattaccctgattggattgcttgaattcagtgatgaattaactgcagataatcgctaccagccagataatcctgaaagtactgatgcttttgggcgagattgctttgcagtatatcgtatggtggaggagctatttagtgatgatatgccagtattgctgcaagctgagttagaacgtgcaaagcaaaccgttgacggtatacctatcgcgctcgatcctttgctgcagtcacttcgagcaccggaacaagctgagattaagcaagttgtggagtctgagttacaggataatgtaattcctgtttgctggggcgcagatgattggccgcaagaagtgaagcttctagaacaaaatgatgggatctatcattttcaatgtaactggtcagctaacccacgctttgcgcatgaattgcgttgttacatcactggcctaggtgagcggctattggtagacctggatcctgataatcgcactattaatagaatagtgtatgaaaaaggattatcgatcgaagaaagtataaaggctggaaaatattcccaggctaaaattaatactcaactttcattacagcgtggctcacttaatcagcgtaatacttttattgaactactgtttaatctcgagccagtaattgacgccatcattgagcgagctaatcctaatcaagagatggatgaagatgacttcgatagcagtgagtcaagtccagttgagttgtggcaggcattgtctgacacagaagtagacctacgagatatagtcaacatcgattcaactgactttcaggaatcaccaagtggttgcttactctacccatatactacggaatccggtgctgacctcagctttgaacttgatgataagatcattgtttatattaaagataagcgtgaatcggtgcagttaggggagctgcggctaagtgagactacgccgaatctattggctattcgctttgatttcgatgctgctcgtaagcgaattagtagcggcagccagctacaattggagtcgatccgtgacaaatcatcaagagagttgcgtcaaagagcccttcaacgagtaattgaaaacaaagcagagatccagcatctgccacagtattttgattaccaccagaaaccctgtatgcagcaaatgcaaccgcggccatccgcggagacattacgcgagctttatgatcagcctggacaacgttttaatgatcagcagctcatggcgtttcagcagttggtcgagttgggacctgttggagttctccagggaccgccaggtacaggtaaaacaacctttatttcaaaatttattcactatctgtatcaacattgcggtgtgaataatattcttctggtcggccaatcccatgcgtctgttgataatgtagccatcaaggctcgagagctctgccatacaaaaggaatggaactggatacagtacgtattggtaatgaacttatgattgatgagggtatgctaagtgttgcaactaaagctcttcagcgacagattcagcataaatttcaccgtgaatatgacctgcgagttagctccttaggaaagcgtctagggatggctccattattagtcaaacagttatgtcagttacatcgtacgctgaatcccttgatggtgacatatggccaatatagccgtgagctggataaagtagaccagacaaagagcagtagtattagtcatcaagagcgactgactgaattattagaacaaagcaatcagcttaaactgcgaacacaagaaattattaactcaatattcgatgacagcttgcagaaaactcttgtctatgatgagaccttgataagacagttggctgagcaaattgccatacaatgcagttataacaatccagagaaccttgaacgttttatgcagttattggaaatgagccaagagtggatggatgtattacgcggcggcgaggctggatttgatcgatttatgttcaaaagtaagcgattggtttgcggaactcttgttggtgttgggaatcgtcgactagagctagctgagtccagttttgattgggtaatagttgatgaggctggccgagcacaagctgctgaattgatggtagcgctgcaatcaggcaagcgagtgttgctggtaggggatcataaacaattgccaccattctatcatcaacagcatcttaagttagcctctaagaagttagaactcgggaaagggatcttttacgagtctgattttgaacgtgcttttaaagcaacagacggcgtaacgctcgatactcaatatcgaatggtagaaccaattggcgagttagtatcggagtgcttttacgctcaagatatcggtaaattgcattcatcgaggaaagtctcgccagattggtattccgagttaccaagtccttggaacaaaactgttacttggatcgatagttcgagccctaatgaagccggtgcagaagagcaaaagggtaatggccgttactataatcaacgagaagtccggctactgttagaggctttgcagtcattgtcgagcgatgactgcattgcacagcttgagcaaactattaccacagagcagccatatcctattggtataatcactatgtatcgtcagcaaaaagaggaaattgacaatgctatcagtcgggctgaatgggcagcatcgttacgtggtttgattaagatcgataccgttgattcatatcagggccaggagaacaagataattattctcagtctggttcgcgataatcccaacaaactacaaggtttcctgcgcgatgcgccgcgaataaacgttgctatttcgcgagctcaagaaaggttattgattctgggagctaggcgtatgtggtcaaagaccaataatgattcagcccttggaaacgttcatgaatttattagtaaacaggttgccgtagatgaacccaactaccaaatcctgtgtggtcaaagtctgcttggagataacaactaa

SEQ ID NO: 160783 - DNA, 249 bp, Enterobacter cloacae
atgtccgagcggatgataaagtacctgccgcgtgaggccagcagtccggttgtggtccagctcagtacgccacttcgtaccgatttcgttaataaaaaagcccgtgacgattttggtgaaacagtcggctcggtactggatacagtaacttccctgcccctgataccggccccggttcgggcaatcattcaggctgcacacgacaccgtggtatcggtcgctcgtgccgtctggaatttctttttctga

SEQ ID NO: 160784 - DNA, 1077 bp, Enterobacter cloacae
atgcgcggtactaaaataattaatagagaaattaacataatcgctaatgaacacttcaaaaaacaaggcagctcccatgagttgcatcagtttgcctcccttttcaattctaattacctttcaaatcttgcagatatttttctaaaaatagataaaaaaaagactgacggtctacattcgctttattatggaattgaattaggatggattgataaaaaaccgcttgttgagtattctcaagcatcatccttaaagcaggttgaagtaggcgatgctttagtagtttacaataattatcttttggataatacgggtaggtatataaatacaattgatgaacgcgctgtgattattcaagctaaagtgacgaaaaacaagaaaaaacttccgagtgttacagtaacgcatgataattcttcaagaaaagagtatgcgctatatagtaattggccatcttttcgactaaaaaagaagaatgggttcaccccccattttaacctcccacatccacttgttaaaaattcaccatccccctatgcattttatcttgccgcaaggaaatcatattctaacgaccgtaaatggcagagtcactggatgggtgcgccttcgcaacgttctaatacgtgtaatattacagtaggagagatattacttgctttgaaaacaggaaggcccgttggtcattaccatgttggggcagacttcaagtcaaatccccagtgggaaaaactggttagaacaattctaatacaggtctcaatgaaccatactaataaaggttggtgtggggtaataatgccaaccagaataaaaggcaaaaatattcttaatgttaaatcaagatctttatctcttgcttcctttatgaaatatactttacataagacctttcacttgcaagaaatattatctttgcatcagcaagttcaagctaatatatccattgattggagcggggctatccatgctcataatgaacgacctgagagaaatatttttggaaagtttccaattttaattgtttcacgatttagctcggaattcctaacgtcctcagataataagttgggataa

SEQ ID NO: 160785 - DNA, 840 bp, Enterobacter cloacae
atgtttaatcttattatgaggtcggttgattgggatgttgggcgagaaatgatggaggtctctcgggtgtttgagtttactgatgaccatatatcaatgcagtttaaaaacaataactcacctgatcttgataaacttatttccctgccatgtctatttatgcaggaaggggtgggagatgaattggcttatattggtcaaataaatagagcaaaaatagttggtagagaagtatcttttgaatattcattagataatgaagttcctcctattacaaatggttttatctatgggaatagaatggcgttagatatgcctaaagactttgaattctcacggaatcactgggctgttaaggatgtagatctttaccgatttttactccggacggtcaggccaagacgtcaaagaccaacagtttttcatctttcagaacatgagaacattgagtcaatactggtttctgtgatgatgccatttgatgcggctttcaatgcaatttatagtagcattcactctgccgcagaacaaattggtctacgctgtcgtcgtgccgatgatatttgggaaaatccagcgataattcaagatgtagtcgccttaatagatagatcgcgtatcgtgatatgtgattgcacagggaaaaaccctaacgttttctatgaggctggaatagcacatactttgggcagggaagtaatattgattgcacaaactgagagtgatatcccgtttgatttacggcatcttcgatttattcgttattatggcaatgctcaaggaatagcagaattaaccgcagctttacaggctaaaatgcaaactattgtcggtcattaa

SEQ ID NO: 160786 - DNA, 864 bp, Enterobacter cloacae
atggaagataaagattttcctgccttataccagtctgctaatgacctttcattaaattcgcagtcgcaatttttcacagcgttgagattccatctcatcgcgttggttgttgctgctgttctttcaatcgtaagcgttacacattggattgtagccgccttgcaggtctttgctcttttagctgctttggcatgctctatctatctctttagtgttcgaccagaaaagctttggtatggagggagagctgtcgcagagtctataaagacgataacttggcggtacgtatgccgagctgagccattccaaggtgacgatcaggtcgctcggaaagattttcatcatacgcttaaggcgataattgagcaaaatagggaagtatgccgggccttgactgattatttagatggtactcagatttctcatgttatggagcaaatacgatctcagccattaaataagcgcaaaaaaatatatattgaaagtagagttggagatcaacatatatggtatgccaataaagcaaaatttaaccgtcgcagagctagatatttttttggggccttaatagcgatcaacacatttgctgtgatttgtgctgtggtgcgggttgctaatgtagacgtaccattctggccaactgatattttcgtcgcatcggcagcaagtattttaacttggatgcaagcgaagcgtttttctgaattagcagcttcgtactctttaacttcgcatgagatcgggcttgtaaaagaagaagcgaaacagcctaataccgacgaagaattttctgtatttgtaggcgatgcggaaaatgctttctctagagagcacactcaatgggttgctaggaaagatgtgtaa

SEQ ID NO: 160787 - DNA, 366 bp, Enterobacter cloacae
atgaccgcgtctgataaacaacttatttggaaaaaaagattctggaatctggggggtacagctctttttgtcatctggttgtggtatgcaggtttgagtgcagtaacgcttgatgacactgtaatatttgctgtcggcctaataacgtttgccatttcatctgttatcagtctgatatggcctacatctaagaaggatatcgtcagagtagcaagagtcacaggggatgttggtgcagcaagcctgatccttgcttcctacaagcatcttaatggatatccctttggtttatctgaaacctttataagtgtgtgtgctatcacgatctatatcatagtagcctgccggatattccgcgatatctga

SEQ ID NO: 160788 - DNA, 360 bp, Enterobacter cloacae
atgggacgttcagtaccggtgaagattggtcagaaagaattcaaatccaaaactgcagcggtcagctactacatgaatcaacgtacagatgtaaaagctgtcggggtcatttcagaaggtgactattttgaagagctgaaagaactgttcactctctattgcgacatttgtccgggctgggaactgaacggtcgcctgattgttcattttacggttcagaatgaacctcgttgtatcaatggcaactgggtgtctcatccctgctataaggtccaactgagcaatggtgaactgagaccgttttcggttgaaaaggcgataaatgccatcgtcaaagctgctgcagctgaacaactgtaa

SEQ ID NO: 160789 - DNA, 252 bp, Enterobacter cloacae
atgctgatccagaaaagcagcatcaggtccaattttgaagtagtgtccgtcatgcttgcgattaccgacaactgcgctgaaattttctgtatgcgtatcagtttcaaatcgtctgaacacaaaaggggagacaataaccattacattttctgcaagataggcatcggcagtgatatcgtcatggagtttaacaccaaagagccacaaccctccccgcgaagaccattttttatcgaatcgctccagggataa

SEQ ID NO: 160790 - DNA, 180 bp, Enterobacter cloacae
atgagagcagggccatcggccagtctccggcccggtctttgctgcaatccgtacagactcgagctgaatcaggagggattctgcgcgaacgagaacatcagaagtgtagtcttttattttatcccggaaaatgaggtaagcgacgccctcgaatgccagaaaaaagagcaaaccagataa

SEQ ID NO: 160791 - DNA, 147 bp, Enterobacter cloacae
atgaaactctgtgacagagcatggggagataccgtagcggcagataaaatcttcagacacctaaacaccatattttatgatacaaggtatgatgttctgattaatcaggataacgttattatgctcatcatattaaataaaaaatga

SEQ ID NO: 160792 - DNA, 234 bp, Enterobacter cloacae
atgcaggtaatagttattccaaaggaaagcgcgccttttttatacacgatgccggagtatgaaagtgtgtttctgtatcaagatggtaagggaaatgtacaggtactggacgtgaatatgcatttccttgaaaaggaagataaaaatgtttccacaatcatcactgcttcagaaaggatgattactgatacggagttgaagaagctcgtcagccaattacactacccgacttaa

SEQ ID NO: 160793 - DNA, 1725 bp, Enterobacter cloacae
atgcagcttaaaagttcacgacgtaattttattaaagggatcactgcagccggcattgtcggcggttttggtataaagacgttcaacgctttctcagcggtaagtatggtacaaccccatatgcttacaggtaacgatttcgatctgtttatcgctgaaacgcccgttaatatcaccggcaccatacgctatgccaaaactatcaatgccggtctgccgggcccactgctgcgctggaaagaaggagatattgtcacactgcgggttaaaaatcgtctgaaagaaacaacatccattcactggcacggcattattcttcctgccaacatggatggcgtacccggcctaagcttccacggtattgaacccgatgagacctttatttattcatttcgcgtgcagcagaatggcacctactggtatcacagtcattcaggttttcaggaacaggaaggtgtttacggcccgattatcattgatcccgctgagccagagccgtttatgtatgaccgggagcatgtggttatgctgaccgactggtcagatgataatcccactactgttctggcaaaactgaaaaaacagtctgactactacaacttcggtaagcccaccgtcggtgattttttccgtgatgccacggagaagggcctgggtgctactctggccaaccggaagatgtgggcagaaatgaaaatgaacccaactgatcttgcagacgtcagcggcgcgacatacacctacctcatgaacggtcagggcccgggtaaaaactggaccgggctgttccgcaaaggcgaaaaaatccgcctccgctttatcaacggctctgccatgacctacttcgatatacgtattcccggcctgaaaatgaccgtggtggctgcagacggacagtacgttacccctgtcagcgtggaagagttccgtattgccgtagctgaaacctacgatgtcatcgttgaacctcaccaggatgcctacaccatctttgcccagtccatggacagaagcgggtatgcacggggcacgcttgccgttcgtgaaggcttgactgccccggttcctcccaccgatccgcgtccctggctcaccatggatgatatgggaatggggggaatggatcatggcagcatggggaatatggatcacggacagatgcacggtatggacaacggtcacatgtcaggtatgggggacatgcagatgcatccggcctcagaaacaaacaatcctctggttgacatgcagaccatgatgcccgttccgaagctcagtgacccgggtatcggcttaaggaataatggccgccgggttctgacctatgctgacctgaaaagtatctttgaagatccggacggacgcgagccctcacgcaccattgaactgcaccttaccggccatatggaaaaatttgcctggtcttttaatggcatcaagttctccgatgcagagccgattacgctccgttatggcgagcgtgtccgcattgtgctgatcaacgacaccatgatgacgcatcccattcatctgcacggaatgtggagtgaccttgaggatgaagaaggaaattttctggtccggaaacacaccattgatatcccgcctggtacacgccggagctatcgtgtgacggccgatgcactgggccgctgggcttaccactgtcacctgcttttccatatggaaactggcatgttccgggtaatccgggttaatgaatga

SEQ ID NO: 160794 - DNA, 960 bp, Enterobacter cloacae
atgtcagagcctgagcgtggtgatatgaaacatgactttttccggtcggtggccggactcctggttttcacaaccgttgccgtcagcgcatttaccgtggctcccgatgcccgcgctgaagctctgcatgacatgcaggggcatgatatggggactgtgacgaacatggaccattccgcgatgagtaacatggagcccatgtccgggatggagggcatggaatccatgcagcctgctgccccgactgaaagcagaacgcccattccggcgctgacggacgcggaccgtcaggctgcgtttccggacgtgcatgggcataaggtgcatgacagcagcgtgaacggatatctgctggccgataaacttgaatggcagaaaaataataaagccagtgggttcagctgggacgtcagcggctgggtcggcggggatattgagcgcctctggctgcgtagtgaaggggaactcagtgacggaaaaaccgaatcggcagaggttcaggctctgtgggggcacgccatttcaccctggtgggacgtggtcgcgggtgcacgacaggactttaagcctggcaggccgctggcatgggccgccgcaggctttcaggggatgcagctgtacaacctggaaactgagctcaccgcctttgtcagtgagcagggacgcactgcactcaggtttgaggcagagtatgacatgctgctgaccagccggcttatcctgcagccgtcctttgaagccaatttttacggaaaggatgacaggatgcgtgaaaccgggaaaggactgtccgctaccgagctttccctgcggcttcgttacgaagtgaagcgtgagtttgcgccttatatgggcgtgtcgtggcgtcagctttatggcaacacggccaacatggcgacctgtgaaggagaacaagacaatgaatttagtttccttctcggtgcccgggtatggttctga

SEQ ID NO: 160795 - DNA, 381 bp, Enterobacter cloacae
atgaaacataattatgccggctatgtcatcgctgttgccgcctctgttgctgcttttgctgcgcaggcgcatccggaactggcttcttcttctcctgctgataaagcgcaggtgacagcaccgtcaaaagtggaactgcactttacagaaaatctggtcacaaaattttctggtgcacgcctcgtcatgactgccatgccaggcatgtcctctcatgctccgatgccggttgcagcaaaagtggccgccggtggcgaccccaaaactatggtgatcacgccagccaaacctcttgtgcccggaacatacaaggtggagtggcgtgcggtgtcttccgatacacacccgcgcaccggtaacgtcagcttcagcgtgaaataa

SEQ ID NO: 160796 - DNA, 933 bp, Enterobacter cloacae
atgaacgatcagacttttattgtcctccgttttttcctttaccttgaccttatgcttctgttcgggctgcctttatttgaactgtatgcagtaaaggggaggcttaaaagatcagtgtctttattcagcttctggtcgttcttctttattctgatatctgccggtatattgctgtcgctggcgaatatgctgctggttgcgcaggcgatgagtggcgtgaccgacgcaggtgaaattactctccacattatagggatggttatcgatgagacagcagtcggtctcagctgggttatccggcttgccgcactcgtcgcggccttcatcgggctgggcctgcgcctgcgccatgccgttctgtcgcgttacgttctcacactgtccggaggcatagcgctggcaaccctggcatggggcggccatgcggccatgaatgacgacttaagctattatcttcatctgttaagcgacatcatccacctgtcagcagccggtgcatgggtgggggcgctgacagcctttgccattctgttaagtcttaaaaaggtgcagacggtcagccacgtccggctgctgacagaagccctttcgggtttctcccgggctggaacggtgattgtgctgagtatcgtcatcactgccgtgattaatttattcttcattgtggaagacccggtcaactctctgccgggcagcaactacgggctgcttctgctggttaagactatcctgttttgtgtcatgctgttgctggcaaccgcgaaccgtttccggcttgtacccgcgctgggaattgcactcggtcagggacactataaaacagggattgcgctgatgcgcaaaagtattatcacagagttcagtgtgtccatcctgattctggcgaccgttgcctggctcggcacgctgccgcccggtaacgacatggggtaa

SEQ ID NO: 160797 - DNA, 687 bp, Enterobacter cloacae
atgaccactcttcttattgtcgaggatgaaataaaaaccggcacttacctgaaactgggccttcaggaagccgggtatgacgtcacccttgtgaatgacggccgccaggggctggagcatatcctgcagcagcgctatgacctgattattcttgacgttatgctgccttctcttgacggctgggacattatccggcagatgagaatggcaagccatgaagagcccgtcctgtttctgaccgcaagggataacgtcagcgagaaaatcaaaggcctggacctgggggctgatgattatctgctcaagccgttcgattttgccgagcttctggctcgtatccggactcagctcaggcgtaaccgctctcagtcatccggcatgtacgaaatagctgaccttgtgatggacgtatcccgccggagcgtcagccggtcaggcaaaaaaattcatctgtccacaaaagagcttgttctgcttgagttattgctgcagcgtcgtggggaagttctgccaaggagtctgatctcctctctggtctggaatataaattttgaaagtgaaacaaacgtgattgatgtggctgtccggcggcttcgcagtaaggtggatgatgacttcagaccgaagctaatccataccgtacgcggtattggctacgtgctggagatacgtgaagatgaaacgtaa

SEQ ID NO: 160798 - DNA, 1398 bp, Enterobacter cloacae
atgaaacgtaactggtctctgacttccaggctaagcctggtttttgccggtgccatgatgtccgtctggctgcttaccagtatgctgctggttgccgcgctgggcagttactttcgaagccaggatcttacgctgctggccggtaagcttgaactggctacagaactgctggaaagtgaattccgagccggaaagcctgatagcgccggaatttcccgcaagcttgccgacgccatggtaggccacagcggactttatctgtcgatcagcactgccgatagtcaaatactcgccgcgtatgcctcacccggtttcccggttccgcctgaccgctttgccggagcgaccaggaagctgaacgttctgcagacattggaggaaaacggctggcgctataacgtcatgataaaaaaaatcgacgcggggcgcacgggctggcatcaggatgtgctggcaacggccgccatcgataccggctttcatgatgaatttatcttggagctgaaagagtggctgatgtggtttaacggcggactgatttttctttctttcctcctgggctggttcgccactcgtataggactcaggcctctgaatgaaataaaccggctggcttcagccattaccgttaataacctcggtgagcgcctgccagaacgacatattcctgcggagctcatacctaccgtagccgagttcaacgccatgctggagagactggatggctctttcaggcgcctgtcagatttctcctctgacattgctcatgaactgcgtacgcccttaagtaatctgatgatgcagacgcaggttgccctgtctcgggagcgtgacgccgcaagttaccgtgaagtgcttttctctaacctggaagagctgagccggcttgccagaatgagcagcgacatgctttttctggctaaatctgaaaatgggttgctcgcgatggagagtgaaacgctttccgcaaagacagaaatcgaagaactaattgaattcttcgagccactggccgcagaaaatgacaaaaaaatgatactcgaaggtgatgccagtttaaaagccgatcgtctgatgttgcgcagggcgctgattaacctgataaccaatgctctaaaatactcttcagacagcacagcgataatgatcagggcagagcagcaggacgggatgggatgtattcacatatctaaccgtacggaaggcatcacgcagaaaagtttaagccgactttttgacaggttttaccgggtcgattcgtcacgcccgaaaaatacggacggtgccggtctggggctttctattgctcgagccatcgtccaggcccataacggtacgctacaggtttttatggacggtgacacagttaccttcacagtaaaattaccggcaacataa

SEQ ID NO: 160799 - DNA, 1740 bp, Enterobacter cloacae
atgcatatgcaaataacgaataaaacactaccgccgccagttttcttcatacaatcacttctgaaacagaactattctgttttaattttttcaaaaacctcacccaagtcgctatccgctgatgtagtggaactgaatacgttgaaaggcatgttagttcttgatgtttatgcatcaaaagaagaactggcgccttacttgaatgatggtaacctgagtcttgatattgaaataattaaaggtaccccccctacagaaagagagggatatagtttaagtaatattccggcctcgttaagtaaaggcgataataatatttgtcgcgtagaatgcatattgccagaatcatttttcactcatgacaggcgtggagctgtgagaatcccttttatttttgggatgagctgcagagcaaggatagagatatttacgcattttcttaatattaccgctaaagtaaaaaatctgtctattggcggatgcctcctcgagctacaattaaaggatagtgaagcaattgatattaacaaaaaaatacagggaatatacctttcttttccaaatggtgaaactttttcatccgagggtgtaattcggcatataaggtcttttggaaagcatggttatgtcgttgctggtgtggaattcattaatctacttccaaaacaatacgacgcattgtttcatatggtaacagaatctgaaagggaattagctttcctgagtggtatgtctggtcatgaaattaccaaatcacctttgtttatccctggctcaggtgagaagaactttttactaaaagaaactctggaacgagagaaaagagcacatcaaacgccaatggaaaaaggtattatagatatagcaaatcaacttcaggttggtttaatgtatatcaaaaccaagaattacttctctgcagaaatattttatgattgtgttgacgctctgcttgggttattaacccatgacagaaaagagttcttttactccttgtcttttatcagagaggagcctggctgggttaggcactctatcaatgttgcatcacgctttgcagatattatattaatccataacccgcacgcttcagagttaaaagaaactcttttgggtatacttttgcataacctcgggaagccccttctaattagtgagaaacttccctccttaaattcaagtttaacgtttgagcaaagaaacatactaaaggaacatgtaaaagttattttagataaatttaaagagttaggctgggaacccagtgccgtctgcaggaaagttattgaggatgccaatgaaagaattgatggtaccggatatccatcaggaaagaagcaccaacaaatggcgcctgtaataagactaatctcagtgctgaaagttattgaaaagctatccttccgacgtaatggctcgccagcgaatacgcctctagaagtgtatcgcattgtaaatcaggaacagaattcatatgaaaaaaaatggttggtatattatattcaattatacgggacttacccgattggatgcctggtaaaatattctggagggtttctcgcatgggttactgatattgataacaccggtcatcctacagaagtacgggtaatcaaggatcttcgttatcctgatgctaacataaatagtttgatatcagggtttgatttatcacaaataggaaagctcgaaaatgtagtcgacccattagattatgatatagaggtaaaaaaattatag

SEQ ID NO: 160800 - DNA, 3210 bp, Enterobacter cloacae
atgcttaaaaaaatcctagacagcattagctaccagacagataagttcatccgtgaaaacattcatgtaaatcaatcttacatggcactgaaatggaacggctttgaaaaaatactggtctcaggttcaaggcattacgttaaggcaatgcttatattgatatcattttttgcggccatttttattgtaatggtctcaggtaaaagttatataaaaccatttatagctgagtggtttcctgagtggtataccctgtttgacgcccagataaacctcttggggggacagcttaccattataggtattgtgtatcccatggttgttggccttgtcagtgtgatatttcagaggaaatcagcccggaaaatcgtacacgcagcttatcagacctattccggattcatgctggcaggtctgagcggattatgtctttctggcttcatgctctgcggattattgctgagaacattcgctggaaactataactacgcgataatttgtggaataagtattatatggatgatgcttaacattgcgctttctgtctggttctttgtgcaaagcctcagtgtgcttgacgatgaaaaacgcgaaagaatggtgttacgttatctcactgccgacatcttatcaacgcatgtgagaagtcaactgcataacgtttttttaaataagccggttgagagccaaattatcaaaaatgataaatttagcaacctcacctttgaggattattcattcgaaaaagattactctgctatcactagtgaatctccaaagcaggaagtcattaaagatatctatgtgtggccattgaagattattttatggcatataaatatgtatggacgtttaaagaaaaaacaaatagcaattgcgttgttttcgaagctggatagccgggatgagttcgctaccctacccctgtttaaaattaaaaatatcgagtcagacaatgttctggtaaatttattaaaacgttgtttccgcacaggcattgctactaaacgtcatatcgcaacagacagaataataaaagggcttttgggtgataccatagatgcgttagccagtgctgatatcaatgcttttgacgaggctattgaagggttctgtcgtgacataacaacttttacagacggatttaatttcaagcaagggctgcaaacagataatcttttgttattggcagatgacattttttgggagcgtagttttactgataaattatatacagagctttatcagcttttccggcaggctgttatacgcattgatgtatctgagaggttttataaaaagtgtatgaatgttccagtaatgctgtgttctaaaagagaaaacatttccttcaaagaaatacagcttgctttgaggtataccttttattcgtgggacattctcgtgcgctggggacatgccaacacggggaggcttgatttaacacagcgtcagagttatgaggcccttttgagggattttgtcgaaatctgggaagggtggactgatggtctgaaatacatatccaaaaaaactggtggtcagcagttataccatgacactctgaaagagcacctgttcacgttacccgacatagtcgcatgtgcagtgctgtcaggcgagcctggctctgttgactgggctgtggacttaatgaaccgctggcttcatactgcccgaaggtctgcggatggtcataatactgcactgttcagttggcaggagtttatagttacacaggcaactctggatggcgaaattgttttcagtccagaaaatacgccattaagaaaaccggttgaactttcgcaactccaggactcattctacaagaatacactgaccgatcttcgactcttaacagctgcttttatcattagcaaacccgatgcctttcaaaacacacaatgtcagtttactgtccgcactctgcttgacgggagtcttgtcgaaaataccggtagttttgaacgtttatctgaaaaattgaccagaagttcagacattatcgacgtttttatccgtttgcttatctggaataaagctgaccgcgatgaggcattaaattcaccaggaaaaattataaggaaattatcatcagcacatggtaaaagcctcgtaagcgggcgcacctatctgggaaggcgcctcgggggaattgaggatctcattcctcagatagcggagttgtctgttttgcgttgcagcgacacaaattctgtttcacctaaaatgaaagcaattgttgcttctaatctattaccatatcaatttttgcagaaaatcgtaagtaatcttgcatcactgcataacgccatcaataaactgaccggtgcagcttttgttgctgacgatgcttttaccgaaaaacaacagaaagtgtctgacttgatacaagagtatttggacctttttaccaatcatattcagcaagaaataatacactctccagtcagcagtacaattctggatagttttggaagtattatctctgaaatttttacaaaaaatttaagcaaaaaaatattgttttctctgtttggaaatattacacctgcccctgtagagaatagtaatataatgagacgcatcgttttccacatggacaagcaggatgtgactgacagattttctcgcaagatacacggatttgaagaaaatcgtgcatccgcattgatcgacgagcacgtacttgatttgttacatttgctgagtcgccaaccagctcaacggtatattgatgttacgtcgttctacgaacttctgagtgtggtccatgattacgatgacctccaggaaggtgactatctcattgtgggtgatgaaagattatggaatcaatttaatgagtacagagcgaatactatagatagtgtcgagggtaaagaagatatattgttttatgacgaagaccaaaaggtacagatccgtgggaaagaaaaaagctgttcgctctatatcaggcctcactttgatgctattgatgccctgcttgtgaataaaaactattttgaagagtacaaaataaaaagtgagggagagaacattttcacttttaatgctgaagaggttgatggcaaaccacttgaaatcgctttgtattctcaatatgaaggcgaagccgttttcaatggtcagattaaggtccgctttacactccgtaaagactctgtcagttcacaggccttgcctgatgaagacgcatcatga

SEQ ID NO: 160801 - DNA, 540 bp, Enterobacter cloacae
atgaccaccctctccccggacaccgtccgccgcattgaagacgccgctgccgccctgatcgccgccggcaccccgaacccgaccaacgagcaggtccgtcagcacctcggcggcggctccctgtcccacatatcccctgtgatgcgcgcgttccgcgcccgccagcgcgagcaggccgctaagcagaccgcgcccctgccgccggagctggcgcagctgctgaccggccagctggggctgctgtggcaggccgcggtgaaacaggctgaagccggggccctggcggcgcgcgagcaggccgacgacgacattgcccgggctgaccaggagcgggatgaggccctggcaaaggtggccgccctggagagcgagctggcggtgctgcgcgagcaggtggcgcgcctgaccgccaccggcgaacacctggcggcgcagctgcaggacacgaaagcggagctgaaggaagcccgggaggacggccgtcagcttcagaccgaactgctggccctggcccgccaggacgggaaggtgaagaaatga

SEQ ID NO: 160802 - DNA, 417 bp, Enterobacter cloacae
atggaacgtaagaaatttctggcaagcatattttgcggtgctcaatatgctttggccgagttaagggaacacaacgcccagggacccaatgcgaatgcgatagcacaaaatgcccgcaacaccattgaggtactggcagaattctttaaaaaagagaattataatatttatatggttgcctataacaataaagcacagcagtatgagctttattcctcccagcctgtttttgagttaggtgtaacctatttccatatattgaatccgggtaccatcctgttttcctataacaatgacatgaagtccgaggatacctttgatgttcccattgaccccagtagactggcagccaacagattcgatccttatgcgtttacgatactgcgccaggaaattcagcaggcgttaagtcagtaa

SEQ ID NO: 160803 - DNA, 267 bp, Enterobacter cloacae
atgaccaatagcgggcccaccctgaacctcacctacaatgaacttctcgaccagacacgagaggtgctccgtatgtttaactctcagcacagaacaccgccggacacgtttgatgcaggcctcagggtcggggttgtgcatcactggtaccgccttgccctgagtatgggcgcgacggtgtgggactgtcgtgaagatcacaagcagcttcgcctgttggcgggtcttgaccctgaagagctggagccgtctgacaatgtccgctga

SEQ ID NO: 160804 - DNA, 306 bp, Enterobacter cloacae
atgacgccagaaataaaacgcgttctgcgtaaagtgccattaataaagcatctgccggcactcagggtgatttactcgcgagcagagcttgaccgcttagaagatgaagcacgggaccttcgcaatgaatatgaacggctggcaactgccggcccggcggtacttgaggaattcaggaaggataacccccgcgtaacgagcgaactccatatccgtgagcttatagcattcaaggcatccaggctaaagcaggaattaggatgcaaagaaatatgtctggaccgggctcggaagtattcggaatga

SEQ ID NO: 160805 - DNA, 1050 bp, Enterobacter cloacae
atgaataaacatatttcctgtttaatcccattttgtctgactgcgtgtcaaaccacccacgtcagcacccaacccgatgcattgagtcttgttgaccagttgctggatgctcaaccggtaaaaattcaggtcgaacagaagagccttgcgcttgcaagcggccttaatttccaccccttaaagacgagtcagccagttacggtacagaaagcacagcttacgccttcagttaaaagcctgccgacgccaaaaagcctgcttcctaaaccggttactgctaatcctcaaccagccaacatccccaacgtcagtttcaccggggaggccgacccccttccgggcctggtgtcaaaagcagggaacaaacaatctcttgataatgctctgggagtaatcatcccgtcaggctggacaacggtgaaatcgacccgtttaaaatcgggcttcaaaactctggttagctggaccgcaggcgatcagtggccgcatacgttgagtaagctggcgcgcgaaaataaactccaggtgacgattcagtgggcttcgcgtcaggtcctgattgatctggctgacactcagcagggaactaaaactgtaacatcaaatccatgggcacaacctaaattactgaccaagccggctatgccgactatgccgaccaaacctgccgctccagataaatccaagccttcgcttatggccacacagaaaggcagtatccaaaaggcgtcattaccaccacctcaaccgaccaaaaaaatctggcgtgcagagaccgggactacccttaaagacgccatctttacctgggcggcagaaaccacctgtgattctaacccagacaaaaaatggaccgtcgcatgggtaacgaccacaaactatcgtatcgatgccccgctgcagtttaacggtacatggcgagacgcgcttaatcaggtattcacgctttatttaaaagcctcagtgcctctttatgccggcactaattctgcccagtgcgtacttaaagttgatgataagccggttgtggatgataaaactgtgcattaa

SEQ ID NO: 160806 - DNA, 510 bp, Enterobacter cloacae
atgcgactcgctaaatatttgcttaccgctctgattattcagagcattgggttttgcgcaagcgcagcggaagacgataccgggaaaataatctcagcgccttcagctacgccagttcagaatctgactattagtgaacttgaaagaatacaggctgagacagtgctttatgaggctcgagcaaatcgcgcgaaagcaatactcaactggaaaactaacgggaatgggcttgatgcaccagttcccgaattgagcgcgacagcctcagcagagaaggcaagagagcaggcccggattgatcgttctgaaagtattccacgaatcctggaaattgccggcagtggaggtcagctaacctgcagaatgcttatgccggatgggactgtggttgaggcaaggagtggtcaacggcttccaggttctgcttatacagttgcaaagataagttcccagggtgttcagttaaaaacagatgatgggaaattagtttctccatcttttacggagtaa

SEQ ID NO: 160807 - DNA, 1521 bp, Enterobacter cloacae
atgacagatattactcttccggttgctcagcatgacgacattctaattccttcaaaaatagcgcatcgcattcattataaagaagcagagcaaccatccctgtttatttctgaaaacgatcgttacgatgtacagattcaggcttttgtaagaactatcactgacaaaaagccggacgcttttatcaagttcctcccgcttgatgaaatacgcgccctgaacaaaggtgacaagattgtcactgatctgcagcttactggaccgcagaaaaaggttgtggaattattcagacttgcggtacagcgcaaggcatctgatattcatattgctattggcgaggaaggcctggcatttattagtttgcgaatacacggcagccttattcgtgttgatacgatcccagaagaggacgggatcactcttgcctcgacaattatcctttccatgtgcgatgtgacggagtctcagttcaacagccgccgtcctcaggacggacgaattgagtccaagtatcttgaaggactcaatttatttggagctcgctattcacacacaccgacggttcacggcattcatgccgtgatgcgcttaatacctgatgacagtgaaaatcctccaacactcagcaaactggggtttctaccggaacaacagaaattgctcgagaagatgttagtcactccagaaggaatggtcatactaagcggtcccacaggttcagggaaaagcgcgaccctgcgaacgatggccaacatgtatctgactttccatgattacgctctgaatcttgtgacgtatgaagatcccccggaagggcgtattaagggagccattcagtgtcctattgttgccaacaaaaataacccggacgacgtactgcgcgcatggcgcctgtatcttgcgaatacccttcgtattgatccagatgcgatcctggtgggtgaaatgagggaccctttctctgcgcaggcatgtgtcacaaacgcaatgacaggtcacctcgtcatgtcaacgacacacgcgaatgatcctttcaacattcttgaacgcctgatgacgcttgatatcagacctgaattattaactgacccgcaactgttcattgggcttgtcagccagcggctggtacccgttctctgcgaacattgcaggctgagctggaatgatgtggtgaacgatctgagcgatattcagcaacaactgatttctgaaacctgcgataccggtaccactcgcttcaggaatcagacgggatgcaattgctgtgaagaagggattatcggccgtcaggtcgtggccgaagtgatacatccggatgcgcaatttatgctcaatttccgcgaacgaggaaaactggcagcgcgcgaatactggataaagaaaatgggtggcataacccgtaatgcccatgtcctgaaattggttaatcaggggctggtagacccaagggcagcgcagcgtatttgccctcttgatgaagatcggcgattactgacagaaggagcacagaatgaaagctag

SEQ ID NO: 160808 - DNA, 1152 bp, Enterobacter cloacae
atgaaagctaggctgaactcctttatggccggtttatcagacctgtcttcaagcccggtgattagtaatttgaatgcgcggcgtaaagcctgcaaccgctggatttacagcaaaacgttttcgaccgccgaccgcctgaaactctacgaagaactggccttcctcctgagtaataatcagcgtctgaatgtggcgctggaaaatatgttatcaactgcattgagtggtggcccctcagctgcacgcgctgcggtctggcttgaagatattctcgaaagccttaataacggtcttcccctcgatcaggcattgtccgaatgggttccgcggggggaatgcgcaataatcagttcaggtttgcaggacggtaatcttccgcaggcactggagcgagcctctacggttgtgcgtggaatagccgaaatgaagtcgagtgtcttcagtgttctggcgtatcccttctttcagctggcagtcgtcatcggcctgctgaagatgatcaatgattattttatgccaccgatgacccgtatgtttcctagggaagactggagcggcgcaatgtggtggctcgggttaagcgctgacgttgtagccaaacaggggatctggctgggacttttcttcctgttgttctgtggctggacagtgtggtctctgccaaacgtaggaggacggccgcgacgcattctggactatctgattccctggtcactgtatcgggacttccagggcgtcgtatttttactgaatgtcgctgcactgctgggggcaaacgtaaaaacacttgatgccctaaataaacttgcaacccatgcgtcaccctacatgctggagaggcttaacgctatacggcgaagagtgaatgccggtgatcatctggggctggccatgcgaaattccggatataatttcccgtcgcgtgaaactattaacaaattagtgcttctgactgcagggcaaaatagtgataacagtcagatactgattgagcgatacgcaatgtacatgctcaaaaccactattaaatcaatgaagcgcagagttattcgtgtatccctcgcatgcttcggtctaattggcgcgtatatgggtatgttgctggcagtaatacagcagctaaatgaccttgcagatcatataggcagataa

SEQ ID NO: 160809 - DNA, 582 bp, Enterobacter cloacae
atgagtaaacaatgcacatcgcctgccacagaggtacatcgtggtgttctgggtattgagatggtaattatcctggctgtactcgcaatcgcagccataactatctttcttaattccagtggccttttcagtaaaaacgaaacatctaccgaaatgggcaatgcccagcaaattaccgttaatacccgttcgttgcttaaaaccggtgggatttataatttcaacggtgccgcagatatgaccggattgttaatcaaatttgatggcgctccgaaagctatgtcggtcgtcggtgatgcctcaagcggaactgcaacgctgattaacgtctgggggggcggggtaaccatcgagcctaccgcatccaccggaggcaaaacagggttcactttgacgtacaacaaagtacctttggcagcctgcactgttatggcctctcaaatgtcctcttcgtacggtgaaacgtcaattaacggcagcaaaacggtaggaaccgtcagctccgcaactgcaggaagtcagtgtacgaaagataacggttccacaggcaccaatatcctgaaatttaccagcatgacctaa

SEQ ID NO: 160810 - DNA, 645 bp, Enterobacter cloacae
atgaacctgacagcattgtacttatgtaccctgccaatgatttaccccgcgggaaaagcattactgcgcatatccgaatcctacattgagcgtatggatacggtacgaaagccggaaaatcaaatgcaccatgagctgtttaaggtttggctcatactgtgtgttgtcctgatagcggtaggtctggttggtttcctgggaccggaacaaatcatcagaggccttcttgtgggggcatggtgccttattcttgccgccctggatttagcgcgcttctggctcccattccgttttaccgcatcgctggccataactggcgttatgtattcgatttgggtcctcccggagcgtaatcccgcgcaattgctggctgaaatcagtttcatttttattccccttgagttagttcgcctgttggcaaattacattcaaaaagatgaggtatttggtaagggagatgtttggttaattacagcgctcgtttgctggtatccggcattcgatgtacttgctgtcacgctaatcgcgttatccgcagcaatttgtacgggtgccatgaccaagcagcgctacctgccatttggcccgtttctctgcctgttcgccgtcatcccggcgttcaccacactggacataatcatatga

SEQ ID NO: 160811 - DNA, 1389 bp, Enterobacter cloacae
atgaagaagaaaattcaccgtggcatggtgaacattgaggttgccattgccctggttatcgtcatgttcgccggtatatacggcatgaccaggtacagccagtatgtaactgagcttgaatggtccgttgaagcacgccatatggatgctgtaaccgcggccgctaaaagctacattcgcgataaccgtgagaccctcctggctcaggttggcgcgggtggaagtgtaaaacttaccggcgcacagctgcagcaggcaggctatttacctcagggttttacgctgaccaataccagtgctcagactttccaggtggcaatagtccgcaacccttcagacagtacaaaactggttggttttgttcttactcaggggggaaaagctattccttataaaggcctgaggtatatcgcccagtcagttaaagatgcaggtgggtatatccagactgcaaatcaggccgaaggtgcctatggctcctggaaaatgaatttatcaagttacggcttatccggtgaatcaggacgcctggccgtgtggctgtcatcggatgttctcggcgcagatgaccaggaaagcgatcgtctttaccgttatgcattagcaagccggcccgaactgaatcgcatgcacaccgcgatagatatgaacagcaataatctgaacaatgtgggcacgattaatgcaaaaacaggggcgttcactgaaaacatcacggccaaaaatggcggtttcagtgaaggggtaacagccaaaaatggtacgttttcagaaaacattaaagcccagaacggaaccattactgaaacgcttaacgcgaagaatggcatgttctcgcagggggtaacagcaggatcagatattcgttctaatgacggctgggtgataacgcagaactccaaaggctggatgaatgcaacccatggcgggggatggtatatgtccgataacgactggatgcgcagccttaacaacaagagcgtgtacaccggaggggagattcgtggcggttcaatgacatcggaaggcagactgacaatcggtgagtattccttacaccagaaagtggaagttgccggcacggcctgtccgcaaaacgggcttcaggcccgtgactcattaggcggcgcgcttttctgtaaatcaggtatttggggtagcctgggtgctgatgagaaagtgacgacctacagctcaacgtttccaaagaacaagatcgacatgggtcaacatgctatgtgcgcgctcagctacgttcgggtcattaaaattggatacgacgacgatacttcaagctgcgagatttcaaagtcgggtagtaactggatactgaccagtaccccagctcattactccaactatcgttgcgacgcagtttgcctcaattag

SEQ ID NO: 160812 - DNA, 528 bp, Enterobacter cloacae
atgtacaggctaagccggctattcaaccacaaccgatgtgaggtcatcatgcacaatatacgtcgtaccctttacactacattgctctgtctggcgtgcatcccttttgcagatgcagcgtcctgcagggctggtactgccgcgcaggcaggaagtcagacaggttacaaccgggctaaagaagcagctgatgcatggtcacagcggcagaataatgtctcagcatctctcggtgattgtctgggaaacatttcaacgacgattaccgcgccaacattcccaaacctggcggatgccttaaaccagatcggccagaaaatttgtgctgcagcgcgcgataagattaatgactatgttcccccaactatcgacccatggggtgatttgccttcaacagcaagcttgtcgtcttacagctcatacataccggccactcagtcccgttcagcagctcagctgcaggtaacaccgcagccagctgcaggtgattccgggacaggctcatcatccttcatatcactgaactga

SEQ ID NO: 160813 - DNA, 816 bp, Enterobacter cloacae
atgaaagaaagttattttgatccggacctggagccggaggattccgcattacctgaagttaatgcaatacccgcaaatgagctggataccccatcagacacggcggcggcaaaggaagtacctgcagcagctaaatgggggctgtggggttatgaccttaaaacgctattgcttgccggcgctgccgtgattgcacttctggcgtatgcattttggccagatgaaccgccagcccgggcgcttattcctgattcacccgcatctgctcagcaggaggcgaaaacagagcaagacctgcacacatccggcaaacaggacgaagaactgaattcagccagcccagatggcataccggagcctatgccatcccggtcactggctgaagaccctgaccgggaacttattgggctgacaggttccgttgataacaaggaggtcagtgagcttaaggagtatggcgaagccaaccggcaggcaataacgcttctgaatgacagggtcagggatagcgaaaaacgtctggctgatatcgagaaaaagttaaataccctcagtacaaagcaggcgtcagcgcctcagagggcccccacctctacgaccgctcaccgggtgaaaaacgtatcaacagccggcagtagcggcctaaaaggctggcgcattaacaccgtttatccgggcatggcctggataactcacaacggcagtacatggtccgtccaacccggggatcaggtaaatggcctgacaattcgcagtattgatgctgagcgccgaatcgtcgtaaccagtaaaggcgtgattcgccagggggattga

SEQ ID NO: 160814 - DNA, 528 bp, Enterobacter cloacae
atggacgccatccaaatcctggtccatgtagctgacaacctgaagaccagcggcatacgtctcattctggcgctggggttattttttggtgctttgggctgtctggccacattggtatcggtcatcaaacgatcccgcagtggtaaaccggcaaatggtatgaaagcgctggcgtcattctgcctgggcggcgctctcatcgccttacagcaaatgatgaataaagcggcacataccctgagttttggggatgtgtcattggatgcgattgcctatgcaccggaatctatggggcaggcaaagctggccatcgatgccgtgttaacactgctccgtgccgtcgggttcttatttttctatatgggtcttcaacgcatgaaaaggtctctggttgatggccataccggtctgtctgcccgggaagatgtgtcctccggcgcagtaatcgcaattgccggcatcctgctggcgtgtaacccccaactgcttgatgcactgcaaaaaactctgggtttaacctggaattaa

SEQ ID NO: 160815 - DNA, 954 bp, Enterobacter cloacae
atgctaaaactttctgaaaggttatatcccctgttccctattgaaattgaggcatgtttagatgatgaatcagataataagccagcccccctgcttattaagccgcctgagaatgtggcattttgtttatttgttgaacccataagtgagatatttcatttctgcgggatcacgcgcgatgcctgcggtaacgacaaagaaatttatcttctgccaataaattgcctctctgagcaactgataaagcaccgttcttcatctgctgataacgagcttctggagcttttacttaagcgctgccggcgatggctgcgtatggatctggaatacctgcgtttaacgttcccggtaaaacaggaaacgttcaatgttggtcaacaaatctggggccatgatatcgtcgcgccctctcctgctctcacgcaacgcgcacaccaactcacaggcggaaaatgtgcgatctgcgagtattacagccgacataacacactctttttcagagacggcaatccggataatcacgatgatgaaaatattgccgtggtttgcgctgtttgtgcgtgcagccgtcgccttaacaatctgggggcaaatgatggtgtgatggtttatctgcctgaacttaaacctgaagacctcagcctcatgttaagaacggttatcgcggcacgaaaacacgggaatgaccgtcagaaaaaaggtgccacagcagttcttaactggctaatcgagcatcgaaaagaggctgaagctttctggggtacgagccatccaggagagttcgggcaggcacttatacaggttcccgaggagaaaagagaagagctacaacagcgattaagacacatcgcccttattccaaacccggacatactttccgatcacatcgaacaaccagcagtccagccaacagactggctatctctgctaaatgagtatcgcagtcatccctga

SEQ ID NO: 160816 - DNA, 288 bp, Enterobacter cloacae
atgacctataagattaagttcaggactgacgcactcaaagagtggaatcatcttgataaatctattcagcaacaatttgctaaaaaactaaaggcatgtgcggagaatccgcacataccttctgcaaaactgagaggaatgcctgattgctataaaataaagttgcgtgcttcgggcttccggcttgtttatcaggttattaacgatgagttaatcattgctgtcgttgcagttggaaaacgggagcatagtcaagtttacaatctggccagcaaacggctcagatag

SEQ ID NO: 160817 - DNA, 681 bp, Enterobacter cloacae
atgtctgtgaaacattatgatacttacagcaagaattggcctgtagctgtagctggggttttatcaattggctatctgctatttattttaccttttcatttcgcttatggcttctggttgttttcaatgcttaacaaccctaaatatggtttacgccagcaagattattcgcaggcggtatttatttggatttccttagccattgccatttgcctgacgtgttactgtatatataagcaacgaaaaaatctcaaagctttcgcccaattcttccgcgaatcaggattgaataacccttcgccacaaaatattgccatgaatcgtactggctggggttacctggggctcgatacgcaaaaagggactatgctctacatcagtcacccggaaacgtccattctgaacttctttttcccacgcgacgttcgtgtaatggggtttggaatgtatgactggaaatcagtcgaacttgaaggcaacaagctgacaatctataccggtaatccagagctcccaacggtctcaattacttccggtaaagcagcaatgctctacgagaaaatcaatgccatgcgccatcaacaatggaaatacgagtatgccgtgcccggatgcgttgagcatcaggctgagaaaatcgcagaagcaaatggcctaaacctggtgctaccgccacagtaa

SEQ ID NO: 160818 - DNA, 150 bp, Enterobacter cloacae
atgaactggcgttccgatgtggtttacaacggtggcgatacgaccacctaccaggggtatgtctaccgtgcgaaatggtggacccgtggtgataaaccaggtaacagcgatgtatgggtgaaagaaggcgcgtcagcagactgcaaataa

SEQ ID NO: 160819 - DNA, 1104 bp, Enterobacter cloacae
atgaaatttatgaagcctaaatatctggcgcttttcgttgcagcggcgtccagctctgccttcgcggcggcgccaggtacgccaaccctcagcagtggcaatgataagtttgcgattgttgaagttgaccaggcagcgcaagactataacagccttgtgaaagtccatgatggcgcggatgtgaaagttgagtggaacgtctggagcggcgatgcgccaacctcggcgaaagtgcttctggatggtcaggccgtgtggagtggcgccgcaagcgcctccggatcagccaccttcaaagtgaaaaagggcggacgctatcaggagcaggttgaactctgtaacgccagcgggtgttctaaaagtgccagcaaactgatcatcgtggcggacacggacgggagccatctgctgccgctgaacaccaccctgaaggaaaataacaaaactttctctcaacatacggacaaagtggtgggtgcctatttccctgagtggggcgtctatgggcgtgagttcccggtggataaaatccctgcggcgaacctgaaccacattttgtacggtttcattccgatctgtggtggtgatggcatcaacgacgggttaaaaacggttgagaacggcaacagcttcgccgcgctgcagcgcgcctgtgcgggccgtcaggattacaccgtggccattcacgatccgtgggcggcattgcaaaaaccgcaggccggcgtgaccaactgggacgacccctacaaaggtaactttggtcagttgatggcgctgaaaaaagcccatccggatctgaaagtgctgccttcgattggcggctggacgatgtccgatccgttcttccagatgcatgattcagcgatccgtgcgcgcttcgtctcttccgtgaaagagttcctgaaaacctggaaattcttcgacggggtcgatattgactgggaattcccggggggggggtggcgtgtcggaaaatcttggcaaccctgctcaggacaaagctacctataccgcggtgatgcacgatctgcgtgcgatgctgaacgagctgtcagcagaaacgggccgtacgtacgaactgaccaccgccattggttccggtaa

SEQ ID NO: 160820 - DNA, 402 bp, Enterobacter cloacae
ttgcctggccaggagcagtgccgctgggatgctgccggtaacccgctggaaggttctgatgagaaggtcacggacaaccgcctgacgcagctgaacggcattcgctggcgctatgatatccacggccgcaccgtggagaaggataacggccagacccgctggcactaccgctacgacggtgaagatcgcctgacggaagtgattagccagccgcgggaccgcaacaaaccgcagacgcaggtcagcttccgctacgatccgctcggtcgccgcatcagcaaaacgcgacgccagatgatgggcggacagccaaccatcaagccggtcactacccggtttgtctgggaaggggtccgcctgctgcaggaggtgcacggggacgtgtcgctgacctgtgtctaa

SEQ ID NO: 160821 - DNA, 306 bp, Enterobacter cloacae
atggaaaataatacattatcaactcaatatatttcacgcttattaagtaaggaagaagacgacaggctagatgagctaaagaatattctatctgaattagatatatgcatcaggctaaggaaaataacgccgctccaaaaatatgagatcattaatgaaataaagcgagccattgcgagtgaaagaggaatttctttcgatgaaaagaactccccatctgataatattcatcgagggaatgctagcgccagtaatgatgacttagtggatttgatagcaatgcttaatagagggagaagtcaatga

SEQ ID NO: 160822 - DNA, 507 bp, Enterobacter cloacae
atgagtgatagtgcctataatatctattcattagccgtgtctagtcttgcattgctactgtcagtgtatacattcttcaaatcaagaaaagatattaaatttgctcaagagaatgcaagtgaagcattgaaattgcaacatggtacaattgaacttcaaattcgaactggtataactaacgcaagaaatacaataaacaacttaacacctatattaacaccatacttagcaaaaaaacaagcaggttcattgagcgtcgaggagtcttattctcttgatttattatataaaacttatgattcttgtattgaagatcttctcaaccaatatgatgaagcatgcaaaaaatatattgacggcaaagttgacagagcaatgttcaaagagacatattttcatgaaataaaaaacataacatcaagccaagacctttcttcctattataatttagaggcaacgaaatacacatccaccttaagggtgcgtgatgagtggataactgaatga

SEQ ID NO: 160823 - DNA, 1752 bp, Enterobacter cloacae
atgaaagatcttcgttacttcctaaaggaaagttatatcaatagcagggccttagttattggtataaacaaatataagaatgtatcccctcttgcctatgcagttaatgatgcattagaaataaagagtttactcatcaatgaattcgatttcgaggagggtaatatatcatttcttcttgatgaaaacgctaccaaagaaaatatattaagagcattttccagacttacaagggatgatgtcgaactagatgagaggattttcattttttatgctggacatggtgaaacacgaactggaatttatggtgaagttgggtttcttgtgccgcatgatgcaatcacagatgatctatctacctttatacgctgggatgaacttaccaaaaatgcagagttgataagagctaaacatatacttttcgtcatggatgcctgctatggtgggttggcattaacacgaggaataggtccaggaagtactcgcttcttaaatgatatgatgttgcggtattccagacaagtgctgacagccggtaaagccgatgagactgtcgcagattctggtggtcctttgccaaatcattctgtattcactggccatctaatagaaggtcttaaaggaaaagcattaaccgaaaacggcgtattaaccgccaatggtttgatgacttatgtttacaacaaagtatcaaatgataaatcttcaaaccaaagtccgcattacggatatattgatggtgatggagattttatttttaaatctccctcttggtccaataacaattcagaggaaacaacggataatgatagattaatttctattccctattttcagacagaattctctcctttaaaggctgaagataaaatcagaaaaacaaaacaattactggcgaatgattcatcctctatcgagttacatgactttgtgattgatgaagttaaaaatttcctttctgaaacaagtgaggattttttctcagtaaacgggcagtttactaaagaagaactccttgagaggatttctaaatatgaaaacatatctaaaaatataatactaatagtttcttgtgtttcatattgggctcgaacaattcatattccattattaagtaaagcattagctcgtgcaaccgacagactggaaagaggaggtggtttaactatatggttaaatctacggtggtatcctttaataatgcagttttatgcattggggatagctgcatttgaaaataaaaagtatgacacattatttaatattttctttataaaattagactcatcactttcgagcaatggtaagtcgttatatttctctgaagccatttccaatgctattcttgagctgactaggcaagatgtgtttaagcaactccccggttttgaaaggcatttcgtaccaatgagtgagcatctccataccatcttgcaaccattaattgatgataccctatttattgggaagaattacgaaaatgcttttgatgattttgaatgtttctttgcgcttgtcatcgcagatctgcatcatcagcaagagcgaacagtatggggacctatcggtcgttttggttggaaagaaaaaagatcgtacaattctccattatctaatatgattaaggaagccaaagaacaaggtattaactgggcgccattaaaatgtggattctttgggggggatatttcgaggttctctttagttgccgatgaatatttaaaaggaatatcaaatttacattggtattaa

SEQ ID NO: 160824 - DNA, 297 bp, Enterobacter cloacae
ttgatcaggctccgggcctgttcagccgcggcgcgttcgtcggtggagtatttcttcgacataatggtcaatggcaatattgtgctcacggctcacgcgcgaaatgaatatgtgcaaaagcgccagcgatgcgtggagtgtgactgcgaccagattgtcgaagtctttctgagtaaaacggtcattccccttcagtgtcgaatgctggagcaaggtgtgggccgtgatctcaaggacggctcgcctgtaatcactcgacagcaggacatccagatcggtctgaatcgccacggataa

SEQ ID NO: 160825 - DNA, 591 bp, Enterobacter cloacae; identical to SEQ ID NO: 143382

SEQ ID NO: 160826 - DNA, 306 bp, Enterobacter cloacae; identical to SEQ ID NO: 126971

SEQ ID NO: 160827 - DNA, 591 bp, Enterobacter cloacae; identical to SEQ ID NO: 143382

SEQ ID NO: 160828 - DNA, 591 bp, Enterobacter cloacae; identical to SEQ ID NO: 143382

SEQ ID NO: 160829 - DNA, 246 bp, Enterobacter cloacae; identical to SEQ ID NO: 141620

SEQ ID NO: 160830 - DNA, 591 bp, Enterobacter cloacae; identical to SEQ ID NO: 143382

SEQ ID NO: 160831 - DNA, 195 bp, Enterobacter cloacae
atgtcaacaatcattaagcgagataagcaacctaagggaacgggtaaggctcctgcattccagattcgcattcccccagagttaaaagagcaattcgataaagaagccaagcacgatggagttagtctggctaactggctaaaagaattaggcagagcagaattaaataagcgcggcatcgagccaaaaggctga

SEQ ID NO: 160832 - DNA, 1251 bp, Enterobacter cloacae
atgctgccgatcctgaccggcaacgtcggcattaacggcggtaacagcggcgcgcgcgaatcgacctacaccatcaccatcgaacgcatgccgctgccggaaaatccggtgaaaacgcaaatctcctgcttcagctggacggatgccatcgtgcgtggaccggagatgaccgccctgcgcgacggcgtacgcggcaaagataagctcgatgtgccgatcaagttcatctggaactacgcgggtaataccatcatcaaccagcattccgatatcaacaaaactcacgacattttgcaggatgagagtaagtgcgaaacgatcgttgtcatcgacaactttatgacctcgtccgcgaagtatgccgatattgttctgccggatctgatgaccgtcgagcaggaagatatcatccccaacgattacgccggcaacatgggatacctgattttcctccagccggttaccgccccgaagttcgagcgcaagcccatctactggatcatgagcgaagtggcgaaacgcctcgggccggatattcatcagaaattcaccgaaggccgtacgcaggagcagtggctgcgctacctgtacgccaaaatggtcgccaaagatccgctgctgccgtcctacgacgcgctgaaaaaaatgggtatttataagcgcaaagatcctaacggacatttcgtggcctataaaaaattccgtgacgatccggatgccaatccgctgaaaaccccgtcgggcaaaatcgagatctactccagcaagctggcggatattgcggcaacctgggaactgcaaaaagacgaaaccatcaccccgctgccggtctatacctcaaccttcgaaggctgggacgcgcccgagcgcagcaagttcccgctgcaactgttcggtttccactttaaagcccgtacccactccagctacggcaacgtggatgtgctccaggccgcctgtcgccaggaggtgtggcttaaccctgtggatgcggagcaacgtggtatcaaaaacggggatatggtgcgcgtcttcaacgaccgcggcgaagtgcgtattgccgcgaaagtcaccccacgcatcatgcccggcgtaagcgcgatgggccagggcgcctggcatgacgccaacatgagcggcgatcgtgtcgatcacggctcctgcatcaataccctgaccacgcaccgcccgtcaccgctggcgaaaggcaacccgcagcacacgaacctggtgcagatcgagaaggcataa

SEQ ID NO: 160833 - DNA, 591 bp, Enterobacter cloacae
atgagcgagcataacctgttgttgttgcatcacaaaccagagcgaccgaagcgtgaacataagggcaagatagcggtggcagaaagcgatatgcgctggtgttcggatggcttcgagttcggctgcgacaacggcgaaaaactgcgggtaacgttcgcgctggactgctgcgaccgtgaggccatagactgggcagcaagcacgggaggctatgacagttcgaccgtgcaggatgtgatgctgaggtcggtggaaaagcgcttcggcgacaggctgcccgacacagcggtgcagtggctgacggacaacggttcagcatataccgcgcatgaaacgcggaggttcgccaaagagctgaatctggagccatgtacaacagcggtgagcagcccgcagagcaatggcatggccgaacggttcgtgaagacgatgaaggaagactatatcgcgttcatgccgaaaccggatgtgagaacagccctgcgaaaccttgcagcggcgttcacgcattacaatgaaaatcacccgcatagtgcgctgggatatcactctccgagagaataccggcggcagcgggcatcgttaacttaa

SEQ ID NO: 160834 - DNA, 591 bp, Enterobacter cloacae; identical to SEQ ID NO: 143382

SEQ ID NO: 160835 - DNA, 591 bp, Enterobacter cloacae; identical to SEQ ID NO: 143382

SEQ ID NO: 160836 - DNA, 591 bp, Enterobacter cloacae; identical to SEQ ID NO: 143382

SEQ ID NO: 160837 - DNA, 687 bp, Enterobacter cloacae; identical to SEQ ID NO: 141658

SEQ ID NO: 160838 - DNA, 357 bp, Enterobacter cloacae
atggcaagaccacccaaaccgcccgcctatcttgatgaaatcgcggcgcagcagtggaaagcaaaggcgaagcagctggcggagcgcggggatctgacgcctgccgactggaacaaccttgagctgtactgcgtcaactactcgatgtaccgcaaagccgtggaagacctttccacgcggggattcagcattgtgaacagccagggcggtgagagccggaatccggcactgagcgcaaaagctgatgccgaaaaaattctcataaaaatgtcgtcgctgctgggctttgatccggtaagccgccgccgtaatccggtagaaacggaagaggaggatgatcttgaccgtctgggatga

SEQ ID NO: 160839 - DNA, 357 bp, Enterobacter cloacae; identical to SEQ ID NO: 141660

SEQ ID NO: 160840 - DNA, 504 bp, Enterobacter cloacae
atgccgggcaaccgcccgcattatgggcgttggcctcaacacgattttacgtcacttaaaaaactcaggccgcagtcggtaacctcgcgcatacagccgggcagtgatgtgattgtctgcgctgaaatggacgaacagtggggctacgtcggtgctaaatcacgtcagcgctggctgttttacgcgtatgacaggatacggaggacggttgtggcgcacgtcttcggtgaacgcactctggccacactggagcgtcttctgagcctgctgtcggcctttgaggtcgtggtatggatgacggatggctggccgctgtatgaatcccgcctgaagggaaagctgcacgtaatcagcaagcgttacactcagcgaattgagcggcataacctgaatctgagacaacatctggcaaggctgggacggaagtcactgtcgttctcaaaatcggtggagctgcatgacaaggtcatcgggcattatctgaacataaaacactatcagtaa

SEQ ID NO: 160841 - DNA, 396 bp, Enterobacter cloacae
gtgattgtctgcgctgaaatggacgaacagtggggctacgtcggtgctaaatcacgtcagcgctggctgttttacgcgtatgacaggatacggaggacggttgtggcgcacgtcttcggtgaacgcactctggccacactggagcgtcttctgagcctgctgtcggcctttgaggtcgtggtatggatgacggatggctggccgctgtatgaatcccgcctgaagggaaagctgcacgtaatcagcaagcgttacactcagcgaattgagcggcataacctgaatctgagacaacatctggcaaggctgggacggaagtcactgtcgttctcaaaatcggtggagctgcatgacaaggtcatcgggcattatctgaacataaaacactatcagtaa

SEQ ID NO: 160842 - DNA, 480 bp, Enterobacter cloacae
atgatattaaaaaaaagattaataattctgttaaattatcttgcgttaaaagatttaggcatcagtgataacacttatgctaattcagcattatgttcttttaatcctattttactaaattcagcaccaagcaaaaagtggcttcataaaatattaggagatactaaaaccgtcatattgcaaaaagtaaattttgaacaattaaaaaataactcgcaaagcacaatcaatttgataataatcagcaatagagcaggcgaatttatttatgatgtaaggttaacagatatgcttaataaacaaatacataccatacacgggaaatatgataatacttgtgattatattgataatgaatttacaaaatacattgatggcaaatttatgtcaaaatacactgatagattacatatacacactattgatcaagatgactttatagaagctacatctgtttatattttatatgaaattacttaa

SEQ ID NO: 160843 - DNA, 954 bp, Enterobacter cloacae
atgcgtattagcacccagatgatgtatgagcaaaatatgcgagggatcacggactcccagagtcgctggttaggatttggtgaacagatgtccacggggaaacgtgtaaatcggccttcagacgatcctattgccgcttctcaggcgattgtactttctcaggcacagtcgcagaacagccagtatgctctggcgcgcacttttgctacgcagaaagtttctcttgaagagaatgtacttggacaggtcaccacggctattcaggctgcacaagagaagattgtttatgcaggtaatggctcattaagtgataccgaccgcgcgtcagtggcaacagatttaaaagggattcgcgatcagctgatgaatcttgcaaatagcactgacggcaatggacgttatatttttgccggttacaaaactgacaatgtgccatttgatctaaccaatggtgattacaatggcggcgcagtaccgatctctcagcaggttgattctgcacgtaacatgcagattagccatacagggactgaagtctttgatacttttaccagcaatgctaagccagaacctgatggcagcacacctgaaaccaatctgtttaaaatactggataatgctattacagcacttaatacgcctaccgagggtgatacaacgaaggttgatgcacttacggatagtgtcaataaagcgaatcgaggtctaagcaattcgctggataatgttttgacagtacgtgccgacctgggaaccaaattgactgaactggacaagcttgatgaacttggcgataaccgcgcgcttggacaaactcagcagatgagcgacctggttgatgtggactggaacacagcgatctcctcttacaccatgcagcaggccgcgttgcaggcatcttataaagcgtttagcgatatgcagggcatgtccctgttccagctgaacagataa

SEQ ID NO: 160844 - DNA, 579 bp, Enterobacter cloacae
gtgctgacgtgtctggaagcgcgacttgcatgcggggtgtttgctccggtagtgccctttatcgaacggctactgcgagactacccgggggacatcggggctctggccccgctgtatctgcactgcattacgcttgcgccgggtgaggcgatgttcctgcgcgccggtacgctacatgcttatgtgaatggtacggcagttgaggtcatggccagttctgacaacgtgctgcgtgcgggcttaacccccaagaacatcaacgtggcagagttggtgcgctgtacggtgtttgacgaaaccccagccgaccgcctcaggatgcatccacagcgggaagaggggatgcagcaatacccgatcccggtaacggattttcgctttagcgtcactgaacattgcgagcagcaaagcatccggacagaccgtgcgcaaattctgctggtgctgaaggggagtgccacgctcagccacgccgagggtgcctccatgacgctgaacgccggtcagtctgcgttcatcccggcggtcacaaccttatggacgttgactcagcgcgggcagtcttgcctggtaagctga

SEQ ID NO: 160845 - DNA, 2304 bp, Enterobacter cloacae
atgtctgacaccgttttcccctacgcatggaatgccccgcgccctgcaatcggtggttttaagcaagccgatgcggcgccggggatcatgtatctgacgccggacggcaatcgcaagcgtttgtcgattgccgaactggcagaaacggatgaagcaccagaccggggccgggcggttcgtcgtcgcctggcttcactgcctcattttgtccgtcgtatgtatgctcaaaaacttgaacaggtagaccgtaaaggcaaacaagcggctgatgcctggcttatcaatacctttgaacgatttgttctgagtcgtatagatcaggttaacgagcagtatctgccgcagggggttatgcctgcggctttgttgcctctgcgtgaacaattctggcgcctgctttgggctggcaaaagagagctgaaaagactggcgcataaccttgctgacctgttgggtagcgagtttaaccgcgagtttgatttccagatggcccgcacgtccgatccccatttcgccaccctttcaggttatggccgcatggggtttcttgccaatcacctcaaaacgtcggtcccgtgctggacggcctactgcaaagaagaactggaggcggaagacgcactgaaagcagtggcccgcctgcagtctccgcagtggtggcttaatcgtctgcgccgtatgcatgctcgctggcgtgagcatctgatggttgcggccgggtatgtacacaaaaaatccgcaccgtactgcagtgacccatgtttgcaggaatggacggcgcaaaagaaagccaaccgcgaatttctgaaagcgatggagctggaagatgaggacaccggagagcgcgtatcgctgattgataaagtggccggcagcgttgccaacccagccaaccgacgccgtgaactgatggcgcgcatgcgtgggttcgaagatttagcgaatgaggccggactggccggggcgttcttcacgcttaccgctccatccaaataccactcaatgcagtacgacgggcgccggaacaacaaatacagcggcgcgtcaccgcgtgaaacgcagaaatatctttgcaaagtatgggcgcgcacgcgtgcggcctggctgcgcaatggtattcgcgtgtttggctttcgcgttgttgagcctcaccacgacgaaaccccgcactggcacctcctgcttttcatgcgcccggagcatatcgaaccggcaacagcaatctttcgtaagcacgccatgcgtgaggatgggaatgagccaggcgccgctgaaaaccgcttcgaaatgaaacccatcgagaaagagaagggcagcgcaacgggctatatcgccaaatacatttcaaaaaatattgatggctatcagcttgatgacgatctggatgatgaaaccggcaagcctctgaaagaaatggcccgccgcgtaagtgcctgggcgtctcgctgggcgatccgccagttccagcaaataggcggcgcaccggtaactgtttggcgtgaattacgtcgcctcggtgatcgtgagctggtcctgcaccccgaaattgagccagtgcgtcaggctgccgacagcagcgcgtgggatttgtacgtaagtgcgcagggtggcccgctggtttcccgtgatctcctgcgcgtgcgcctcagctatgaagtcaccgaaaacggcaacctctacggggatgacgtctccaaaatttccggcgtttattccccgatccgtgggccggaatcactgattcatacgcgcactaccaaatacaaaattgtgccgaaacgtcaggccgacggcgtttccggttttgaccttgatttttcaggcggccccgccgcccctcggagttctgtcaataactgtacgcgggagccgcgggaggttgaaaaacgcgccgatcctggcggcacggtcattaatgactgtgccagctgggcggatattggctctttatcccggaaagaaaaacgggtgattgcgcagcggctgagcgacgcggcaaggggaactaacaagcgcgtcaaagtgaggccaaaagccagccctatgacggagcaggaaaagcaaatgagtgagctgctgtctctgcgtggtgtggatgccagtgccggaatggtccgttcgttgatttctggcgcggtggttgcctttggcgatcaggtgttaacggttgaagaagggcgccttactgtccgaaaccgtacagcggcaggtgttcaacgtctgccgtcccagattgtggagattaaacagcaggcggatgaccttttgaaccgaatgaagcgtgcattttcagcgcgtgaatag

SEQ ID NO: 160846 - DNA, 261 bp, Enterobacter cloacae
atgggttccaaagacagcaattatcagattgtttatcgcggtgaagcactgcagacaatgattcccggtcagtgggttttctttcagcgtccaaaagagtacggcggtggattctggctagggaagacttacgaagatagtttctggattgagctggagcgcccggtatcgttatctgacggactcaattaccttaatgtgtgtacgagagttgaggctacaagccacgaattcgacgccaattattctctttttgactga

SEQ ID NO: 160847 - DNA, 804 bp, Enterobacter cloacae
atgaaaaaggcaagaagtcaactaagaattgttgatgatatttatgctctcgggcttgatgggtgcatcctttcaatatcaaccgatggtgtgaaagggaagcttaaaatttcccatgaaaagaaaactatcattacaggtttttggccattaagcctaaagacaattgcacgtaaaaatattagaaaagtggtattaagggttcaggaggggcaggtttggttagtatatacgggcaccttggtgacggttgataaggatggtgaacgaggtttagttcatctcaaggatgttaatctggttgggcaatctaccgttaaagcaaaaatattcaatcataaaatgggccccaaaggggtcacatatgttgagcatcagataaatttaacagagaaaccccaagtttggcgagaaggtgtcgagactataataatgacccggccagaccaatcgccatttgctaaggcagttagacagaactgtaagaatcgttgtattgtaacgaatactaaactgaaatgtatgactgaagcggctcatctaacaccacattgtaataggagggtaccggataaaagcaatgggcttcttatgcgcagggatattcatgcactgtttgatgctcatgagttcgcaatacatcctgatacattatgcttacatttcagtaaggctgcgttaaaagaattgggtgatgccattaaatttaaaaaactaacacaagagcagcttgaatcaccaattgataacagcaaactctgggaacggtgggaaatattttgcaatcaacaccccatcaaataa

SEQ ID NO: 160848 - DNA, 969 bp, Enterobacter cloacae
atggctgttatcaatactaacaccctgtctctgatgactcagaacaacctgactaagtctcagtcttcacttggatccgctatcgagcgtctgtcctccggtctgcgtatcaacagcgcaaaagatgacgcagcaggccaggcaattgctaaccgtttcacttctaatatcaatggtctgaccgtagctgcgcgtaacgccaatgatggtatctctctggcacagactgcagaaggtgcgctgagcgaaatcaacaacaacctgcagcgtatccgcgacctgactgttcaggcgcagaacagctctaactctgcttctgacatcgactccattcaatctgaagtgaatgagcgtatgaaggaaatcgaccgtgttacgactcagaccgatttcaacggcaaaaaaatcctaaataacgcaactgcaactgctaagaactatgatttccaggttggctctaaagatggggaaagcatcggtatttctatcaacagtgcggccggatggaacctggcttcgtccgacagtaatgcgggcgctgctggggccactactgcagtaacctcagcaggggtttatgcaaacacagttgctgcaacagatttgactccagttgatggaactgcgcgtaaagtcgacgccatcggttttgatgttgtctcagggaaagtaaaaggtactactttgcctactggtaatactccgctggcagacattgatgaagccattaaagcagttgatacccaacgtagttctctcggtgcttctcagaaccggttcgaatctactattaccaacctgaacaacaccgtcaacaacctgtctgctgctcgcagccgtattcaggattctgactacgcgaccgaagtgtccaacatgtctcgtgcgcagatcctgcaacaggctggctcttctgttctggctcaggccaaccaggttccgcagaccatgctgtccctgctgcgttaa

SEQ ID NO: 160849 - DNA, 360 bp, Enterobacter cloacae
atggaagtccatctcgggttgctacaacgttatcagcaattattaaaaaccagtaccaccatgctcgtgttaaccagagccgggcgctgggatgaacttatcgattatgaggttgagtatcttacatcggttgaaaaactcacaatgtttcaggacgccagcgagatcccgcctcatatacaggctcaaatccgccctatcctgaaacagatcctcgataatgaagtcgagttaaaaaccatgcttcaacagcgcatggatgagttaaaggctctggtggggcaaacgtcaagacaacataatctgaattcaacttatggacgtctatcaggaaatgttctcttccctaccgatctctag

SEQ ID NO: 160850 - DNA, 648 bp, Enterobacter cloacae
atggaaagcctgcttaaccctgtagaaaccattcgcaaaccccaacccaagaacgccagaactaggcgcctggaaacgcagcctgtactttcagagaaaaccagtcttacgccagggaaagaaatagccaccgagatagaacatatcatctctgcaacacattcagcaattttaccagcaatcattcttctggcgttagagacagccatgcgccgtagcgagatcgcagaactacgatggcgctttatcgaccttgagaagcgagttgcacatttgccagatactaagaatgggaatgcccgcaatgtccccttatcaacgaaggctgtcacgctactatcccatctaaaggaacattctaaacaaactgatgaaaaggttttcgatatgcgtgccgatgcaattacgcgtgcttttgatcgagcactaaaacgggccagagaaaggtatgaacaagctaacgcccaatgtgatgacacctttctcagagatttgaggtttcatgacctccggcataaagcaacctcacgcttggctgaaatcttccctatgcacgagctgacaaaaatcacagggcataaagatccgagaatgttaatgcgttattatcatcctaaagctgaggatttagcactgaaattgaaatga

SEQ ID NO: 160851 - DNA, 357 bp, Enterobacter cloacae
atggaattcaccaggcaagcgcttaaaagacttaacgaagcgccaattagcatcagacttatgaacggatgctttaaccgagccgaagctgtagctgagttctcgcgtcaccgtttcgagcttatcgttgatgtcactcatccagcacttcattggcaatgtggcgatcggcatgaggtgaagctctacctcatgaaaggtaactgcggacatcgtattgacatgccggattcgcttcaggcaaaggtggccgaaatgcaaaaagcggcaaccatgattgattcggaggcgagagaaatcagcttgagaaataccgaacttttcatgaatagtctcgctgaaatgggattcaactag

SEQ ID NO: 160852 - DNA, 201 bp, Enterobacter cloacae
atggctaaatttgctgtgggcgcgatcgtaaagcacaagtcatgcgatatcaaaggagtgattgatggcgttacggagcaggaaagcagacctacatggtatcgagtgttgttggactccggtgattacagttctcacgcagaacacgaacttcgcgcggctactgttgatgagcctcgcgtgtataagaaattagcgtaa

SEQ ID NO: 160853 - DNA, 258 bp, Enterobacter cloacae
gtgatcacttcaaccactgctaccgtatggcattcatcggttaaaggtcgccgttatttatcccgccgcgccgctatagaggccgaggcacgggcaataatttacaggctttacccgccagaaaagccagaattcgacaacgtaggcatgacatatcctggatacgacattaagcatgacgaccccgagcgttacgaaaagcttcatcgccgcatcaagcggctcattgagcgaagcgcggaggccagaaatgcctaa

SEQ ID NO: 160854 - DNA, 831 bp, Enterobacter cloacae
atgactctgaggtgtctgttaaacccgtggcgattcagtgatatgggtaaagtccatattctcggaggcattatcgaaaattcattttttggcatatatgcagctccagcgtcaaaccctacgtttctctcagatggtgcgattcttgttgatggagttgtgttcaagaagtgcaatcagttcctgagaatgggaggtgtacttggatggaaagcagaaaactgcacattcaaatcccatcaatggggcggaactacggcgacgcaacttgaaccagttattttatttaacaactcaactggaaccatcaaaggttgctggtttgacgccctgacaggaagcggagcacagacatacattaatgtgcaaggaggcctgctgagagtaagggacaacgatttcaccatgccgtccgtggcgtatttcccgatcatgtggtcgataacatttccaagcattgttggctcaggaaacagaactaacgcaacaaatctcatttctccagacataggatctccacaaatatacggagagccaaatccatccaagttgttggaatcaatcactggaagcgcaattccattcttggtatcgagctcatggacatctgcagctgctaagacagttgattcaataaccggtggaaaaccaggagatgagattactatacgaggaacggcagctggttcaagcgttacgtttaccttcagtggaaccgcatctgaaacaaggttagtgccactttccggagcaactgaaaccaaaacaggagctgcctggtccaaaagattcaaaaagatgtccggaacccagggatggtgggaagtataa

SEQ ID NO: 160855 - DNA, 801 bp, Enterobacter cloacae
atgggcgggcaactattcagcggcatgacgattgtaactattacactgattttgtcagtggctagtttatcgcttattttattttcaataaaaaataaaacagagatatgcaatagttttgtattctctgtaagcatgattgtgctttggccggtttatgttgtattcctgctactgtgttatcttatgttcttcagtgaatacgaaagcattaggcttgcttcatttgaaagatacacagccacattcttgctggcatggatcgtatcattcatttccttaactgcaagattatttacagaaaagacaaacatcttcgtaagagcagttctatgcgcgatgataatatcttgcataatctttattcctgagcaattctataaggatgccagcaatattacctctaacgataagtggataaaaacacgtgtcaatgtgaagaaatttacagatgacttgatgcctataatgaaaaatggtgataaagcatatttcattcaacagcagtcaaggggttttgagaaaaatatatttaactatagcgtgcttccacacgcagcaaatacatggtgttggactctaggaaagaaatactttgagagcgatgtttggacatgcgattatgacatcaatcaagtaacaaaagggtactcgtatcttgtaatattcacatcagaccagcaattttgggataataactctaagtattttaaaaactggagtggaaaagttgatgaaacaggaatttacaagataagtagaaatgatgaaggtatagccgaaatagttaaggttaaatag

SEQ ID NO: 160856 - DNA, 375 bp, Enterobacter cloacae
atgctggcatttgttgccagtctggcaacgggatgcacgccattaaaaccttccggatgccataaaaccactgcaagggctaattgcggttctggctactgggacgatcaggatgaatggggcgcgcaagcgcgggcgatcagagcagcgataaatgcaaaactggctgacccacaaaactggaaagggaagaagtgtcgattacacatagagtttgcacagaatggtaaggctttaaacatatcaactagcgacggtaataaagcatattgcgaagcggtaaaatcagcagcccagaaagccacctttccagcctttactaatcaggaagtgtatcgcgatttccaaaaatctcgctttgatttgcgcggttag

SEQ ID NO: 160857 - DNA, 309 bp, Enterobacter cloacae
  misc_feature (270)..(279): n is a, c, g, or t
atgcagcattggaaaaatgtgctgatccgaccggacagtacactgcgtgaagctttagaaattattaaccgtgaggctctacgcgtcgcattagttattgatgataataactacctgttaggcgttatcactgatggtgacatcagaagaggactactgaataatctggctctttcagcaaaagctgagttggttatgaatactcagcctgttacagcggcaagtaacgtttcttctgctgaattaaattcaatgatgaaagcaaaaggnnnnnnnnnnaaaaggaattttgtccatacccattcttga

SEQ ID NO: 160858 - DNA, 636 bp, Enterobacter cloacae
ttgaataacaaacctgtcgttcttataggcggtggtgggcatgccagtgtactgcttgatattctgcattcaaataagcgtgatgttattgccgtcgtgagcccgcaggacgtttcagaacggttgatctttacaggaacgaaaattcttcactcagatgacgatatcttccagtactcaagtgaagacattgaattagttaacggcattggtttgattccgcgatcgtcactcagaaagaatgtttcagaattctatgtttcttatggataccggtttgcaaacgttattgcgccagacgcattaatatcaacacacgccattctcactgatggcgtgcagattctttccggagcgatagtaaatgcagggactactataggttgtcattcaataattaatacccgagcagtaattgagcacgattgtcatttaggtgactactgttttattggtcctggagcggtgctatgtggacaagtaaataccggcgaatcagtgtttgttggagcgggttccacaatagttccaggaatgaaactgggcagtaattctatagtgggtgcaggtgccgtattggtacagtcattagaaaatggacaagtttgttatccggcaagatcggtaattaaatag

SEQ ID NO: 160859 - DNA, 1074 bp, Enterobacter cloacae
atgacgcttatcattgcagaagccggtgttaatcataacggcaacgaaaaactggcttttgaacttgttgatgctgctcataaagccggggctgatattgttaaattccagacatttaaagcgaaaaaccttgtgactgaacaggcgaagcaggctgactatcaggttgcgaatactcaacggcaggaatcgcagttagacatgttgagccgccttgagttgtcttgggaaacacatcatgcattgattaagcaatgtaacgaattgggaatagaatttctctctacggcctttgactcagaaagcctgaatttcttggtcaatgaattaggtatcaaacgcttaaaattaccttctggtgaactcaccaatgccccactggtgcttgagcatgctaggactggttgtgacattatcgtatcaacgggcatggccacacttgctgaaatagaagctgcattgggtgtgatcgcttttgggtatacctgttcagagggtgatataccttgtaccacttcctttgaaagtgcatatgcaagcctcgaaggacagaaggccctgaaagaaaaggtaaccattctacactgcacaactgaataccctgcgccaatgaatgaaattaaccttaaggcaatggattccttaagagaagctttcgacctccctgctggttattccgatcacagtgaaggtataactattcctatcgcagcagttgcacgaggtgcggtgattgttgagaaacatttcaccttagacaaaaacatggaaggtcctgaccataaagcttcacttgaaccagaagagttggctgcaatggtgaaagctatccggcagattgaagttgcattaggaaacaaagttaaagcaccaactgtttcagaaataaaaaacaagtcggttgcaagaaagagtttggtagccgcacagaagatcaatgcgggagaacctttcacatcatcaaatattacaatcaaaaggcctggaaacggtatgtcgccttataattactgggatatgctggaaaaagtatcgactaaagagtatttaccgggagacttgattattgaataa

SEQ ID NO: 160860 - DNA, 1164 bp, Enterobacter cloacae
atgggatcagcaaaacgcaaagtagcggtattcacaggcacgcgtgctgaatatggtttgctctactggctattgaaagatatccaggaggacagcgagctggaacttcagcttctcgtcagtggaatgcatctatcacccgagtttggaaacacctggcagcagatcgagagagacggttttgctattaatgagaagattgaaattctagtttcttcagatacaccagtgggtactgcgaaaagtatgggactgggggtgttgggttttgctgatgcattgaacagattaaagcctgatattttggtcatactaggggatcgttttgaagctcttgctgcagcgcaaacggctatgatcctccgtataccaatcttgcatctgcatggtggcgaaattactgaaggtgcatatgatgatgcgatccgacatgcgattacaaaacttagctatttacatgggacctcaacagaggtgtaccgggatcgcgttattcagcttggtgaacatccatcgcgtgttgtcaacgttggtgcaatagggctagatcatcttagacgcgggcattttatgtccgtcgatgaattaggcatatcactgaaatttcaacttaaaaaaccattcctgttggtgacgtatcatcctgtcacactgggtgaagaaccagcagaagcgagttttaaggcgttattagctgcacttgatgagttcccagaccatcaggtcattttaacctatcccaatgctgatgacggtgggagaaagatcattccattgcttgaagcctacgcggctaaacaacctgagcgtgtgcttgcgattccctcgctgggtcaggtgcgttatttaagtgctgtgaagcatgctgccgctgtggtgggcaactcctccagcgggattattgaagttcctgcgtttgacgttcctactgtgaacattggtgacaggcaaaaaggtcgattggctgcccttagcgtattgaattgtgccgcgacgaaagaatcaataacccaagcgttacatgttgctgtctcgcgcagttacaaaagttgcgatgaagacattgtgaatccatatggccagggggatgcaagttcaaaaatcattgaaatgataaagtccatgcattttgttcccggtaagaccttttatgatattaagtga

SEQ ID NO: 160861 - DNA, 1143 bp, Enterobacter cloacae
atgaatatcaaatcaattgtcgaatttgttcgcgacgtatacaagacgaatgaatttattcctttgcatgcgccagtattcaatggcaacgaaaaaaaatatgtcctggatactttagacagtacattcgtatcgagcgtcggcaaatacgtcgatgatttcgagcgaaagatggagtcttataccggaacggcgcgagccgttgcaacggttaacggaacggccgctctgagtgccgcgctctacttggcgggcgttaagcggggcgatcttattatcacacaggcattgacttttgtagcaacctgcaatgctctttatcatcttggcgcggaaccagtgtttatcgatgtttccccggtgagtttaggcctttgtcctgtcgcgcttgagaactggttatctgcaaatactgagataacagaacaaggctgcgtacaccataaaacgcggcaggttgtgcgtgctgtggtgcctatgcataccttcggtcatccggttgagcttgatgagcttattgctgtgtgtgagaagtggcacattgttcttgttgaggatgctgcagaaagtctgggatcattctacaagggcagacataccggtacgctcggtgactatggtgcgctaagttttaatggcaataaaattattaccaccggtggtggcggtatggtgttctgtcgttctcctgaagcgggtgtacgtgcaaagcatgtcacaacgactgcaaaggtgccgcacccttatgagttttatcacgatgaaccgggttttaactatcgtatgcctaatcttaatgcagcgcttggctgtgggcagatggaacgtcttgattctttcctgaaacagaagcgcgatttggcactgcgttatgaaacattcttcacgggttcagaattcaattttgttaaagagcctgactatgcacaatctaactattggttgaatgcagtcgtatgtgaaaatctggatgcgcgtgatgccatgctcgcggaaatgaacgacgctaaagtcatggtccgcccaatctggaaactaatgcatcgcctgccaatgtttgaaaaggcaatgcgtgatgacctcaaaaattctgaacagatcgaagctcgtttgatcaatataccaagctctccgatggaataa

SEQ ID NO: 160862 - DNA, 147 bp, Enterobacter cloacae
atgacgaaaaaaccctccgtcgttaggatttttctcataatcattcatgaagagatcgatcaaataaaaacaaaaaactatttaaaaaacatttttaaaataaaaacctataattatcgcaattttaggcaatttgaactgttttag

SEQ ID NO: 160863 - DNA, 423 bp, Enterobacter cloacae
atgaccacaataaaaaaccggattttcgccgccatgcacggcatgacaccggaggaatacgaactccaaaaggcgcgggacaatctgaagagcgtcaccgataaatttctggatcaacatccggaatatctccgagggagatttgccgaaggcaaacccgctaacgggttagagttgctcaaatcagcctcgcctgacacccctacgggtaaacggggcgaagccctctcgccaatgcgagacatctttggtgctgaacaacggattaaaaaatcgttgggtgctgatagtcgtccggcggtaagtcataccgctgaccacatagatcccgaaatgctggcgaaagctaaagcagcggctgctgctctcgcaaaatccgatcctgatcgttacgacaatatcatcaagcagcagggggtgtaa

SEQ ID NO: 160864 - DNA, 678 bp, Enterobacter cloacae
  misc_feature (663)..(672): n is a, c, g, or t
atgagaaaattacttattgatactgataccgcttctgatgacgcagtcgctattgtgatggcactcagagagcgtaccgttagggttgaagcaatcacagtagtcgttggtaactgtgagatcgaacagtgtgttcaaaacgcattagtgagtattgaaaaagccggaacatatgctcctcctgtattttccggaatgacaaagccgctttttaaaacccacttcacttctcaccatattcatggcaaagatggtatgggtaatatggaaaatccccccaccaccctaaagtcggaatcacttcatgcggtagatgcgattcttctttatgcagaaaaattcaaaggtgaacttgagatcgttaccctgggacctctgactaatctggcaatggcagtactgaaggaaccaacgcttgcgaaaaaaattaaacatgtttatatcatgggcggtgccggccttacttcgggaaatatcacgcctctggctgagttcaatttttttgttgatgcggaagccgctaatatagtgatgcaatcagggctccctatgacagtcgttgggtgggaaataggcatgggagaagctttcattaatgaagatgatatagcatacctcaatcaactgagccccttgggtcagttcgccgtaagatgcaacaannnnnnnnnnccttga

SEQ ID NO: 160865 - DNA, 762 bp, Enterobacter cloacae
gtgaaaaaattatatacaatttttttggcgcttttatgtttatttatgattcaggggtgtaagcaaaatatgaatttaaatcctcaagattatttcagcggccagcagttgagtctggctgaagctattcagcgcggggatatagatgaagtaaaaaaacttgcgtcacagactgaattgaacaaatccggtaagcaagatatgacacttctgttctgggccctggggaatagtataaatgagaataaaacgcctaaacatttaaaaattattactttgcttgttaagtcgggagctgatcccttacagccaagaccacagggaaaaagcagtcctgcagagtttgtattaaatgcagatagcgcagactggatcaatgcgctgcttgatggggggctttccccaaatgctgaagacaaaacgtttcatgaacctataatttttgaaaccattaaagcaaaaaatacagacacgctcgatgctatgctcaaacgaggggccgacattaatatcaccgattcactaaacagttcactgttgtttgaagcgttgaattatcacgcttatgaccacgtcattatgcttttaaaacggggggctgatcctgaaataagagccaaaaatggctggacgatgggtaatcaacttcaacgttatctgaacagaacagaagaaggcagtgaagaatataaaaaactaactgaaatcaaagagacgcttattcaacatggtggtaaatggccgccagcaccagtcaagtaa

SEQ ID NO: 160866 - DNA, 141 bp, Enterobacter cloacae
atgaatcacgtaaatgtagggggtgcagacacgaatgaagtgatcttcgtcacaaaaatggtggataaaaaaaatacgatggcgataaataaagcaaaaaccacccacttctgtgatgtaaatcacatttggttatcgtga

SEQ ID NO: 160867 - DNA, 543 bp, Enterobacter cloacae
atgaaagaaaaacgacgtgagattgttaatgacagcctgcgggcgttgcatgcgctggcagatctgatgccccagcttcacgcccattgttcgctgggtgagatgcttgagacgatcaaccgggccttcggggcaagcctggcctggattagcgttgatactgacgggctgcagcgcgtggtctgtgccggtgaagtgacctgtcactcatttgaggtggccgattttcttgccggtaccctgctggagaagcatcaccgcgcgtggcgggtcgtctactggaaagagaatatcggccgcgcattattctccgctcatcatcctggttattcgcaattgcaaagcggggtgttatgcaagctttcaacccataacggacaaggcagcggctatttctttctggcgtttgctgagccgttatattctctggccatcctgaaaagtattgttgcggtgctggtcgaaaaattaaaagactatttttcagaaattatcgtacgtgaaaaaacagcgcaggaaatgcagcgtggtgacccaatataa

SEQ ID NO: 160868 - DNA, 894 bp, Enterobacter cloacae
atgcgattaagtaccctttatatgtaccagcagagcgcgcaaagcatgtcggcgcgcatgagtcagagcaatgaaacctacctgcggatgtcggcaggcaaaacgctgttaaaagcctcggacgatccggcggcggccaccgatgcggtgaaatataaggatgcgctggcaaagcttgagctgtacagcgacgtgcgctcccgcgcgcgcggtgcgctggagcatgaggacaatatactgaatggggccgggaacttactgaccaccacgctgaaagagaaactcgtggcggcgggttcagatgcctattctgatgcggatcgtaatgccttaggcaaagagattgaggggattcgtcagaatttgctggatctggcgaatagccgcgacggcaatggccgctatatttttggcggtttccagacggctaagccaccgtatcttgaagacggcacctatgatggtggtaatgaagcgcggaaacagaccgttgcggacggcacggaaatgcagattgggcatgtgggtgaagacgtctttggggatatcttcgggatcctgcaaaccgccgtggatgaactttctaaagaggatattgattacgacgcgatgaaggccgcgctgagcgccgcaagccaggcggtcgacgcgggcatcgaccgcctgggcaaggctcaggccgaactggggaccaacctgcagcagctggaggcgctcgatatgtccggtgacgtgatgatcattgatatgaaagtcaaggtggacaccgccattggtgccgatacgggcgtgctggtttcgctgatggcggagtcgcaaatgtccgagctggcgctgaacgcttccatgtacgtttataaaagtatgcaaaaaatgaatctcttcaacagctga

SEQ ID NO: 160869 - DNA, 1650 bp, Enterobacter cloacae
atgaataatttatataacttagcgagaaacggcttaagcgttgcgcaggcggcgctcagagttaccggtgataatttgaccaacggtgtatcacatgcctacagccgccgtagcatgatcatcggcgagctgggcggcatgtcgacacagaccggtttttacggtttcggggctcaggtgaacggcattgaacgcgcttacgatagctttgctaacaaccagctccgcggtgctatctcccagtattccttcctgaatgggcgcatggagcagctggcggatatcgacaatatgctggccgacgagtcggataacgtctcggtatcgcttggcaatttgtttaaggcgatgtctacgctgagtacagccccggaagatgcggcggcgcgttcggccgtctttaactcactgggctcgctggccagccgctacaacgccagcggcaaacgcctgagcgggcttgaaaaaagcaccaacacgcagattgagcagagcgttaaggatcttaacagctacaccaaacagctggcggagatcaacaaacagctggagcgcgcccaggggtccggcaagccacctgcagacctgctggaccgccgcgatttgctgctggaagagatcagcaatcagatcgggattgaggtgtcggagaacgtgcagagcgggcgtgttgacgtcactctctctgacggacgcccgctggtctctggtgataaggcctacgcgctgaaaacctctccatcggcgaacgatccgaacaaaaccatcgtttcctatgtggatgccaacggcaaggagacgccactcgacgaagaccgcattactaaaggccacctggcagggctgttcaaattccgtaacgaggatctgacgctggcgcgtcaggagctggataagatggccttcatcatggccagccggatgaacgagcagaacagggacggtttcttgccagacggcactcagggcggggatctcttttccctgccacctattgctgccagggccaacagcggcaacgtggggacgggcaagctgggcccgattgaggtaactgactataagctggtcaacgccgaagagtacaccatcaggtacgatgatgctgtgggcggttggcgcgtgacgggggctgatggtcgggacatacctcacgtgccgggacgaccagacggaatcgagttcgacggcctcaaagttcagcttcccgacccggcaacggtgaaagatggcgacagcttcaccttcaaccccatgtccggtgccgccgaaggcctgagccgtaaaattaccgacgcccaggggtttgctgcctcggactctgcggacccagatgataaaggtaacaacaaaaacctgcaaaagatgctggagatccagaacgaagagctgattggtggcagcaccctggcagaggcttacgccagcctggtcggcaccatcggtgataacgcgcgcaacgtcaaatctaacctcacgagtgcagatattgatatgcagaccaagtttgagatcaaacaggcgctctccggtgtgagtatggatgaagaaaagatcaacctggatatgtttttgcagtattaccgcgccaacgcgcagcttctgcaaaccgccaacaacatgtttgattcgctactggcgatccgataa

SEQ ID NO: 160870 - DNA, 1194 bp, Enterobacter cloacae
atgggtttttcacaaggtcttagcggcctcagcgccgccgcaaaagcactggatgtggtgggtaacaacatcgccaactcgcagacagtcgggtttaaagcgggttctgttgccttctccgatatctttgccggttcagccggcctcggcgtacaggtcgcgggcaccagccaaaactttggcgacggcggcctgaaggccggcagttctccgctggatatgggcatcaccgggaaagggttcttccgcatggtggatgccgccggtagcgtattctacggacgtaacggtgagtttaaggaagatgctaacggctatatcgtcaacaagactaacggtctgttcttaacgggctatcaggccacggacggggtgatcaaccctggcgcgcctgtagggccgatccgtattccaaaggacgatatgccaccggcggcctcaacggcaggttcactgaccggcaacctgaagtcggatgacaaagttattgatcaaaccgccaatcctttcgataaggacaaaccagaaacttacaaccatatcagcgagattgaagcgaccgataacctgggcaataagcacaccatcaaagtctatttcgtccacacggatgatggcaaatggaaggcgtattccgaggattcaaaagcggcagagggggttgtgagtcacgatcttacatttgtagacggtaaactcactggcgctcaggatctggtcattaatcgtgcggggttcggcggcggtaacgatcttaaactgaccatggatttgagcggactgacgcagtacgccagcgatacccaggtcaagctgggtgaaatcgacggtcaggctcccggtaaattcaatagctatcaggtcagcgacaccggtgaagtgacggccatctacagcaacggtaaacgtcaggtggtggcgcaggtggtactggcggacttcgccaacgcaggcggcctggaaccgcagggcaacaacctgtgggcagaaaccgtgcagtctggccagccgttcctgggcctctccggcagcggtagcttcggcgatgttacgggcggcatggtggaacagtcgaacgtagatctgggcgaagagatggtcaacatgatcgtctaccagcgtaactaccagtccaactcgcaaaccatcaaaacccagtctgagatcctgcagacgctggttaacctgcgttaa

SEQ ID NO: 160871 - DNA, 729 bp, Enterobacter cloacae
atggcggtctcttcaattaacaacaacggcggcggctacggtggtattggtggcggtgacagtgcggccgatctgtcaaatcattttatgacgatgctggtggcgcagatgcaaaaccaggaccccacgaacccaatggacaacaaccagctcgcctcgcagctggcgcagttcaacatggcgtctggggtggaaaaactgaacaacgctgtcgtcggcgtacaggccatgatgggccagcttgccagcatgagtgccacttcctgggtgggccgcagcgtgctgattgaaggcgagccaaaggtctccttcggcagctcaggcattggtattcaccaggcgggcgtggtgacgccaccgaagcgtgacactgatgacatcaacttcgcgctagccggcgatgccgagacggtgaccgtgaccctgcatgacggcgatcaggcctataccgccgaactgaaaaacgtcaagtccggcatgaacaaattcagcctggacgatctgaaagacttcaagccggcgcagccaccgcttgataaagagtacaccgtgagcatcgaagcctcaaaccctgaaggggaagcaccgaccgtgtataccctggttcaggagcaggtgcagggcgtctcgatggatgtcagcggcccgatcctgcacctgcgggatcacgatccgatcggcatggataaagtgttcgtcattcaaaacaatcttacctacggaatgtaa

SEQ ID NO: 160872 - DNA, 1503 bp, Enterobacter cloacae
atggcacaggtcattaataccaacgcactgagcctgatggctcagaacaacctgaacaaatcccagtcttccctgggtaccgcgattcagcgcctctcttccggtatgcgtatcaacagcgcaaaagacgatgcggcaggcctggcgatttctaaccgcttcacctcttctatccgcggtatgacccaggcggcgcgtaacgccaacgacggtatctcccttgcgcagacaaccgaaggcgcgctggaagaagtgaccgaaaacatgcagcgtatccgcgaactgacggtacaggcaaaaaatggcaccaactcacagagcgacctggattccatcaaaaaagagattggcacccgtctggaagagatcagccgcgtagcggaagtgaccaacttcaacggcgtgaaagtatttgacggctcccgggaaaaaatcaccattcagattggtgataaagatggcgataccattgatatcaaactgaataagctggacatgcaaaccctgggtctggataagttcatggatgacttctctgagatgggctttacagtagagaccagccagtttaacgcagcgggtgatcttgcaactgcaactgatacttttgacgccagcaagctgggcattgctgacccggccgcgaatccttatgaattcaccgacattgaccgcactgcttttattactgctgcaaccggggttggcggtgatgttgctgacagagaggtaatgacagtagaaaaagatggtgccctacgcttctttgttgttaatgacgagaccaatgaagcccaggaggtaacagccacctttaactttaatccagcagtaagcaatgatgtaaccctcgatacagccgcagcaggtaaggtgctcagtgcagttgatgcagacatgcttatcaacggcaagccgacactgagtgataacgacaccaagcgtattaaaacgaatgatacggttaaggtgggcactgacgacgttgttcttgatgcagataaactggatgctatttcgactgcagtgtttggtcgtgatgtagctgattctggaatgcgcatgttctcctttgcaggcgcagcaccgaataccttctatgccatgaacaacaagggtgaggttaaagagtttactctggataacacaggcgctgttactggtgcacctgaggatgctcgtgcgggcaacgctcagatcgtcaaactaggcgccagccgcctggcgggtgaagacctgctggaacgcctcgatgattccctgactcaggttgccgatttccgtgccgacctgggtgccgttcagaaccgctttagctctattattgcgaacctgaacaccaacatcatcaacaccaccgaagcgcgctcccgtattcaggatgctgacttctccgtggaagtgtccgccatgagccgtgcaaacatcctgcagcaggcaggcgtgtctgtactggcccaggctaaccaggttccgcagaacgtactgtccctgctgcgttaa

SEQ ID NO: 160873 - DNA, 588 bp, Enterobacter cloacae
atgaaaccactatatcaatactctcttctgcgcagggccattctggtcgccatgctgggtgtaaccggtacctcatctgctactaccctcattgataaagacacttttatcgacgctaattctcctgtgaatgaaaactaccgcatcgaaaacggtgcaacattgtcagtcaacggtgccactaccggaaatattactatctctgacggacatttagccatgaacgggggaagcgtaaattttctgtacggcgaatatggtgctacagcagatatagcggatgcgatgcttaaggcagtatcgctggggggggattcccggctttctcgcacggtgattgagggacagttgagtatatggtttatgaacctctctgcgaacagtattagcgcacagcaattttatgctgccggagcgcaaagcaccgtcgaaaaagggtatttcgaacagactgagagaatgtacgcgggcgcagtctacctcacctccagcgaaggtatatttactgatagcgtgatcaaggggataaaaaccgcggtctacctggaaggaaatggttctgttgatctgattcgatcaagtatctag

SEQ ID NO: 160874 - DNA, 660 bp, Enterobacter cloacae
atgttacgtgaaattatatcatcctcatcaaaaggacatgctataaaatcaatcgaccttgatgaaatagactcaattctaagagactccttatcgattaaaaatatgagagaggctggtagtttctttactgggcttaaacttgcgacaaagactcttgattcatttcttgagccaataaaaataaattcggtggtgctagatcccacgtgtggtgcaggaaatctactagtggcctgttcacgtagattctctatctatcctactttaacacagacattaagcatatggggacaacagctgaaggggtttgatctctatgagatttttgttgaaagtgcaaaacttagaataataattgatgctttgaatagaggagcaaaaaaagattgtgatatcgatatagcattgaccctgcttccaaacataaaagtaaaaaatgcattagatgtatgtgaaatggatttgaaagatattactcatgttgtaatgaatcctccctttacaataacgccatctcctaacaactattattggaaaaaagggaaagttaactcagccggtatcttcatggataagtacatcagattgctacctgcaggttgctgtgtcagtgctattttaccggatgtactaagatcaggcagtcgatggtattga

SEQ ID NO: 160875 - DNA, 417 bp, Enterobacter cloacae
atgcataaaaccatcttgcaggatgtaaagctctacatgaccttcgacagtgaagacaatttcgtcatggtgaacaaaacctccggtaacggtcagtggttttgtactgactgccattgccctttgaagctgtgtaacgatacaactggagaagaagtctggtttgaacatgctcccgatgatgagataacgaaagcacaggtgacgggatgcggccatctgttagctgcgatcagaaagcgtgttttcatgatgcgcttacgcacgatgattgacgaactggatgcgctggtagcaacgaggcactggttctgtgtgtggtgccagtcgcactatcaaggggagaaacactgtaagacctgcaaaacagggatttacagtatcagcagggggaattgggccagaggttacaactaa

SEQ ID NO: 160876 - DNA, 801 bp, Enterobacter cloacae
atgaatgatagaatatttaagtcttacttgaaatatccatttcacagcataataaatgaatatccagatgcaagaaaacaaaaccttattactcatatggtgacaaagtggcagcgtgctattatagccttttatgctcctaaagctaacagtgataaggcgtataatatgataggaagtggtttccttatcaacatcaaaggggcgtatgcaattgtaacggcaaatcatgtgatggaacatttgcagcaaaacaactgctatttttatctcaacaataagttgttccctttaactaaaacctacatgatgaggaaccaattgcgggattatgcgttcatcatgcccacagaggaaattttttctcatgaaaaaaaatttatttatttcgatgatgcattttgccaagatcttgaaccaacatcttcagtaattatatctggttatccttccacaaaaaacagcatccatgtggacatgccaaataaaggccagcaattatatagcattcttttcaactattttgaatatgatagagatagtgaggacctctgccttcctttcgattctaaacccaaaatgatatgccctgaaatgtttgaacccctaagtcattctaaatcactaccatttctgaatggtatgagtggctcaccagttatgcaaataatgaaaaacacaaacactggtgcgctttccctaagagttattggaatattcaaggagcatcacaagaagaaaaagcagcagttggttgcaagtgcatttgatagtttctcaaaggagctaattatgctataa

SEQ ID NO: 160877 - DNA, 138 bp, Enterobacter cloacae
atggatctcgagtgtttccaagagtgggacggtagcgcatatctacgggaggtctcaaaatacatattggatatctataagactgagatttggaattcaggtgatatgccgtatatgtggcaatatgatattcgttaa

SEQ ID NO: 160878 - DNA, 2184 bp, Enterobacter cloacae
atgaacaacacgaaaaggcataaaacgctgctggctctcgccattggcgcggtcacgcactccgccctggcggcggatgaaaagaaagaagacaccctgattgtccagtctgcgcctgccagcgattttaaacccggcggcgaccagcttgtgccggcgttccttgacgggcaggtggcgaacggtggacgcatggggatgctggggcagcagaacgccatggacgtgccgtttaatatcatcagctacacctcgaagctggtagaagatcagcaggcgaaaaccattgctgatgtggtcgctaacgacgcgggggtgcagtacgtgcagggttacggcaacagtgccgaaaccttccgtatccgtggcctgaagtttgacggagatgacatgaccttcggcggcctgtccggcgttctgccgcgtcaggtggtggatgcgcagatggtcgaccgcattgagatttttaaaggggcaaacgccctgatgaacggcgcggcaagttcaggcgtggggggaatgattaaccttgagccgaaacacgcggatgaaacgccgcaggcaaaagtgggcgtcgactacacctccgattcccagtttggcaccacgctggatgcgggccgtcgctatggggacaacgaccagtttggcgcgcgcgtgaacctcgtccatcgcgaaggggaaagcggggtgcccaacgatcgccgccgcactacgctgctctccaccggcctcgactacaaaggcgacaatttccgcacctctctggatgtggggtatcagaagaaaaccttccatggcagcccgaccagcgtcaatatctccgccgtggatttcgtgcctgaaccgccgaaaaacgatcgcaacttctcgcagaaatgggcctacagcaacatcgaaaatgaattcgggatgtggcgcagcgagtacgacattaccgataactggacggcctataccggcctcggcgcacagcacgctcacgaagaagggatttacagcgcaccgaagctgctggataaaagcggtaaggcgacggtcagccgtcttgataccaaccgcatcagcgattccgtcagcgggatggcgggtattcgcggtaactttgctactggcttcgtaacgcataaagtcaacgtcggttactccgcgatgaccaaaaacgaaaaaatcggctggaaaatgtcgtcggcggcggataacccaaccaccaatatctatcacaataccggtgtggatatgccggacagctccagtttcaacggcttaggcggaaattacagcgatccgctcaccagcgggcgtacccggacgcagggctggctgttgagtgatacgctgggcgtgctggacgacaaactgctgtttaccgccggggcgcgtcatcagaaggtggtcattcgcggatacaacaaaattaccgggcaggaaaataaagcagacggtttcgacggcagccgctggatgcctacctacggcgtggtttacaagccgtgggaggcgatctccctgtatgccaaccacaccgaagcgctgcagccgggtcaggcagcccccaacaccgccaccaactacgggcagagcaccggcatcgttcactctaagcagaacgaagtgggcgtgaaggcggattttggtcgcgtgggcggctccctggcgctgtttgaaatcaaaatgccgtcggcgatcctcaacagcaacggtcattatggtcttgatgccgagcagcgtaaccgcggcgtggagctgaatgtgttcggtgagcccctgctgggcgtccgtctgaacgccagcgctacctggctgcaggcggagctgaccaaaaccaacaacggcctcaaccagggtaatgatgcgattggcgttccgaatttctatgccgttctgggcgcagagtatgacatcaaaccgattgatggcctgaccgctaccgcgcgcgtgaaccactccggcacgcaatacgcggacctggcgaacaccaaaaagctggacagctatactacgctggatctgggtatgcgttatcgcttcgccgttaaccacaatcaaaatcagatgacggtgcgtgcgggtatcgacaacgtgaccaatgaaaactactggtccggcgtggatgattcaggtacctacatcacccagggcgaaccgcgtaactttaaagtctcggtgggctacgcattctga

SEQ ID NO: 160879 - DNA, 930 bp, Enterobacter cloacae
  misc_feature (688)..(697): n is a, c, g, or t
atgaatattgctgtagtcataccatcctataaagtaaagtcgcacatcctggaggtgatcaagagcataggtgaagaagttgccaggatttacgttgttgacgactgctgccctgattcttcagggaattttgtaaaagagcacaacacagacccaagagtttgcgtgcttttcaacgaaaaaaacaaaggtgttggcggtgcggttatgcatggctatagaatggctattgatgaagggatggatatcattgtcaaaattgatggtgatgggcaaatggatccatcattaatcccattctttgtaggaccaataattcgtggtgaggctgactatactaaggggaatcgattctttagactggataaaatcagcgcaatgccaaagattagactgtttggtaatgccgtgttgtcattcatgacgaaaatatcctcaggatactggaatctttttgacccaactaacggatatacagccattcatgccaacgttgcaaagaaccttccttttgaaaaaataagcgaaagatacttcttcgagtctgatatgctttttcgcttaaactctctaagagcagttgttgccgacatacctatggacgcaaagtatgcagatgaagtgagcaatctaaaaataaataaaattatattcgatttcttaacaaaaaatgttagcaatttctttnnnnnnnnnnacatgtcgcttgcttctttagaactaccgcttggattaattttgttctttataggggcttttagtggagcggcaaattggttagagtcaattcaatcaggagttccctctacatcaggaacagtgatgctctctgctctgcctataataattgggcttcagttgatactggcattcataggatatgacatatacaacgttcctaagcaaccaattcacaaaaggtttaagtaa

SEQ ID NO: 160880 - DNA, 339 bp, Enterobacter cloacae
atgatttatctagtagtaataatctgcgtaataggcatagctgctgggcagattctatttaaattaagctcttcggcgatgatggagagtggcggccttttaactttgcaaactctatccgtgctcattccagctctagctctatatggcatcaccacgctggcatgggtttgggcactgcagaggattgaactgggaaaggcctatccgttcatggctcttgcttttgttattgttcctatagctagtcatttcatcttcggcgagaagttcactacacagtatgcaataggcgtggccctgattgtttctggaatactttttgcggttaagggataa

SEQ ID NO: 160881 - DNA, 156 bp, Enterobacter cloacae
atgaggaacgccaaagatgccgcagaagtgcgcttttgtactaacgtagccgctgtaaaaagcagagatgacaaaatgaagaaaccatgcgccaaaagcactgtggattctttccatccaaaagacttcacgaagaaatattgtaataactgctga

SEQ ID NO: 160882 - DNA, 531 bp, Enterobacter cloacae
atgaaaccgagttatgaagagttagagcagaagctcatcgagtcagagcgctacggccgccagactgatatcacaattgataatctggagatgcaacttaagacagagcgagaagcgaagttggcgttggctgcggagaatgcggggctgaagggtgcgtttgataagcctcaagcatatctatcctggcacgctattccaccaacctgggaagacccgctcccatgcggtgaatatcttgatgttcatgacgaggcaggacacaaaaactccgatggaactgattgctggccggtatatgccaagccagaaatcgaaaccccagccaccgacgctttcctggctgaagtgcgggcgcagggtgtggagatggcggtagatgtcgttaagcagtgctacgacaacatctgcgctggcggcctgcaagaaaaccgtaagtatgaagagtctattgtgcagcctcatcttgacggaattgatgatgagctaaaggaaattatcgcccagcttcgcaaaggagtgcagtcatga

SEQ ID NO: 160883 - DNA, 1029 bp, Enterobacter cloacae
atgacgccagcagcttattacaacgaaatcgacccgttcgctgcgcagtggctgcgtaacctgatcgccagcggtcatatcgcccctggcgaagttgatgaaaggagtattgaagatgtcacacctgacgatctgcgaggattcacgcaatgccacttcttcgccggaattggcgtctggtcccattcactgcgcctcgccggatggcctgacgataaaccagtctggaccggttcctgcccgtgccagcctttcagcgcggcaggcaaaggagatgggtttgctgacgagcggcacctttggccccacttcttccacctcatcagcgatcgcagacctcagcatgtctttggcgaacaggttgcaagcggtaacgcaaacacatggttcgaccttgtacaagctgacctggaaggaatgggatacgccttcgggcttgtgccgtttgcggcagcgggcgtcggtgctccgcacatcagagagcgggcctactgggtggccaacgccaacagcctcatcagtgaccggcgcggggacggcaggacgccagggggggatgaatattcaaacggcggtgatgatgtccggctggccgacaccggtagcgaatacaaaggatcagccagaaacaaagcggggtctggagaatcttgccgggctggtgaagatggctggctgggtaacgccaacgtcacgcgactggaaggactccgcgggaatgactgcgcagcgggatggaaagaacaggctcgatcagctcccgcgacaggcgtacgcatgcgggcccttgaggttaacggtttttggcgagatgcggactggctcttttgtcgagattgcaaatggcgtccagttgaacccggcacattcccgctggttgatggggctgccgcgcgcctgggacgagtcgagcccggggtggcaagagtggcaagcagcaaccgcgtcggccgactcaaaggctatggtaacgccataaacgcacaggctgcggctgaatttatccgggcctatatggagggtttgtga

SEQ ID NO: 160884 - DNA, 492 bp, Enterobacter cloacae
atgccagatatcactcgggaggaggtagaaaaactgctttcttacaatccggaaactggtgagtttagatggaagatcaaatggggaaatcagtctgccggaaatttagcaggaaatactgacaggcttggttatctcaccatccaggtgcacaggaagcttattaaggcccaccgaatcgcatttctcctcatgactggaagttggccgaaaagttacatcgaccacataaacagaaaccctcgagacaacagattctgcaatttacgcgaagtaaccccactccaaaacaccatgaatcgttccgtcgcatcaaacaacacttccggtgtcgcaggagtttcttatgaggagagaagaggaaagtggcgagctcacatcaaggtgaacggaaaaatgaaaagccttggatatttcaagcaaaaagaagatgcgatagcggccagaaaaaaaggtgaagaaactcacttcggcgaattttcagcacgataa

SEQ ID NO: 160885 - DNA, 1281 bp, Enterobacter cloacae
gtgccgaagccaaagaaccgggcgcgccaccgtccgaaagccagcgcaaaaagtaattcgtggttccgcatgcaggccagcaataacagcgaggccgacatttttatttatgacgaaatcgggtactggggcgtaacggcgaaacagttcgtcaatgatctccgggcgcttggtgacatcacccacatcaaccttcacatcaactcacccggtggtgatgtcttcgacggtattgctatctataacgcgctgaagcaccacggtgcggcgattaccgttcatatcgacggcctggcggcctccatggcctcggtgatcgcgatggtaggcaatccggtcatcatgcctgaaaacacgatgatgatgatccataagccatgggggtttgctggtggtgatgcgaccgatatgcgcgactatgcggatcttctcgacaaggttgaatccgttcttatcccggcttacgcgcaaaaaaccggaaaatccaccgaagaaattgcggcaatgctggaagacgaaacctggatgagcggcagcgagtgccttgaactgggttttgccgaccaggtgactccatccctgcaggctatggcctgtatccattcaaaacgtattgaggaatttgaaaaaatgccaaaaagcattcgcaacatgctcaccccgccgcgcaatactacccagcgtgacccggttattacccagcctcaggcaccgcaggcaaaaactgacccggcgccggatgaaaatgcgatccgcgcgcaggtgatggctgagcagaaagcccgtgttaacgccatcggtgatctctttgccatgttcggtaataaacacatggaactgcaaaatcagtgcgtggccgaccctgattgttccgttgataaggcgaaagatttgctgctggcagagctcggtaaaacggccacgccatccaacaaaaccacacaacagcatatttatgcgggcaacggtaatttcgttgcggatggtattcgccaggcgctgatggcgcgtgccggttttgaaggccaggacccggttgttgttggaaaacttatcgcggtggcaattaccgatatcccggctggcgataccggggacggttttactgagggtgttttcctcttgccaaaagtatccgcagatgcggttactgccggggcgcaggtgtatctgaaggacggcaaaatccagactgatgaaacggatgccgttgccgcaggcatcgcctgggaagatgcaccggcaaacaccaccgttgttgaagtgaagattaatgtctaa

SEQ ID NO: 160886 - DNA, 537 bp, Enterobacter cloacae
atgaaaattaatccgggtcttttctgcgttgtcgttattgctggcctttcggtcgctctcgttaagagttgctcaaacgccagtagccttcagagcgataacgacattctgcgaagtgacaacactttgcaggggcaggtgatcgccactcaggcatttaacttcaatcggttcaatcaggttgcagagcataccaacaggcttaactccctgatcgacaccagcaccgaagaaaccgtaatcgaataccgggagattctccgccgtgaaaaaacctgtgatctgcctgttcctgctgatgtcgctggtgggctgctcgaatacgcgcaccgtttacgtaccagcgccatgcacgcctataccgacagatctgacacagccgatgatcgtgccgctgccaccagttcaatgacatactgccaggctgttttgtggattaagccgctactggccgtaattgagaaggccaacaataacctggctggcatacggcaaattgagcaagagcgtccgcgagccttaaacaaagcgtggtag

SEQ ID NO: 160887 - DNA, 459 bp, Enterobacter cloacae
atgtccgaatatcacaatttgctgcacgttataagagcgcgtgtatgcgaaaacaggaacatgtctcaatctgcgtattatcaaggaagccagcaagacaaccaaattagaaacagaacggctttaattttcactctagagatggtgcttcaccagcatagactgaagtacgcaacgattttcaatccgcttgatggaaaggctgcactctaccatatgatttttatgaagactcgctggcagccatccgacatcagaaaattgcctcttgaagatgctttgtttgtcattcaggaggagttgagaatcgataaccttaattccgacgctcaagaagtgctgcagagcttcaacctaccgtctgtttctttccagtttgaagattttccagaagaggactggaatcatacggaaaactcaatattccttcgaagcctgactcagaaagtaaaccaataa

SEQ ID NO: 160888 - DNA, 270 bp, Enterobacter cloacae
atgcaagacggtacgcagcagccatatttctttaaccctggcatgacagctgagcagcttgaagactggcttgggcaacagaaaacccaccttgctcacttcaatcgcctggtgaaagaaaaagccgctctggaagaacggctggaagaggtgaaccgggttattggtttactttctgagtcaggcttcgaaggaatattgagttttccgtatgattccagtcctcttctggaaaatcttcaaactggaaagaaacagacggtaggttga

SEQ ID NO: 160889 - DNA, 315 bp, Enterobacter cloacae
atgcgtgatctgatccttcaactcagcaaaagttcgatttattcaacaaagcccctcggggattacgatcaggacgataaccttagagggatgatcacaggagcctggtacagcgccctgagactggagagagacgatcaccctggtctggtccattttcctgaaaactgtaagtatgtgctagacaccaatagtactgacttccagcagaactaccaggcgctgttaacccgactggactacctgaccaaagttgaaagcaaagtgtttggtgaaggagaccgtaacttcggctgtagccaaatcgaactgtaa

SEQ ID NO: 160890 - DNA, 2574 bp, Enterobacter cloacae
atgaaatttactctcaaggactatcagcgcgatgcggtacatgatgctctggcgaatctcaggaaggctcgacgttactggcacaacgagagcgacaaaagcgccttctctttaacggctgtaaccggtgcgggtaagaccgtcatggctgctgctgcatttgaagcattgtttcatggtgacgacgaatttaatttcgatgcagatcccggcgcggtggtgatctggttcagtgatgatccagcactgaatgagcaaacccgttttcgcctgatggaggcgagtgaccgtatcaactacaacgatatggtggtagttgaacatcccttcagtcggcgtaagttccaggctggaaaaatctatttccttaacacgcagaagtttggcaaaaaaagcctcctggtgcgcgggttcgatgataaaggcggccttttcgaagcagcccctgatgcacaggcttatacgctgtgggataccatccagaacaccatcgaagacccggatctgaccctttacttagtgctggatgaagcgcacagagggatgggctcgtcaacggcttccagtgaagctgctaagagtactattgtacaacggcttatcaatggttcggctggagtgaagggtattccagtagtgtggggtatttccgccacagttgaacgtttcgacaaagccattgccaatgctggtcatcatgtcaaactgccgaatgtggtggttgaccccgctaaagtgcaggaatctggacttatcaaggacgatatcattctgggtgtgcctgatgaagctggtgacttcgataccgtgtgggtacgccgtgctgccgacaaactcagggaagcgaccgatgcctgggcagagtacgcaagacagcaggaaaccgtgcgcgaagtagtgccgctaatggtattccaggtacctaatacgcctgacccgaatgaggtggggcgttggctggatacgttattctcccgttatcctgaattgtccattgacagtgttgctcatgtcttcggtgaacacaccacacaacgtttcggccaacatcaggtgccttatattgaaccgcagcgggtgcaggaatcaacctggatgcgagtactgattgctaaagatgccatcagcactggctgggattgcccacgtgccgaagtgatggtttccttccgcgcagccagccacaggacgcatattacgcaattgttggggcgtatggtgcgtactccattggcgagacgtattccgggtaatgagcgtttaaactctgtagaatgcctgttgcccaagtttaataccaataccgtgagagatgtcgtcaataccttgtttaagggcgatgatacctctcctccaagcggacgcatcctggttaaccctgtggagatgaaacctaacccggctgcttcagctgaagtatgggaagcatttgaagcgctaccttctcaaacccgaccacagaaaggagccagacccgccagacgtctgaccgcgctggcacaggaactggttgatgacggcattcttgatggggcagtcaggaaatcccatgctgctttgcacgctgttctggacaagttccagatagaaaatgccgagaaaatcaaaaacaaacgcaatgcagtgctcgtcgtagatggtaaggctgtggttgccagcctcaagaacaaagcaatgaccttcaacgaattctgggaggaggcggacgtaacggtgattgatgacgcctaccggcgtgcagcccgaattttcagcccggatgtttcacgtacctatgtcgaatatctggccggtaaggttgcggatcgagaagaggatgcagaggaatatctggaagcaatcatggaggctcgtgttaccgttgctggcatggggctggtgatggaggtgcaggattacttcgatggcgaggccgatagactggcgaaggcgtggctggccgagtacacaccgcaaatcaagtcgttgaaagatgagcgtaaagaggcctatcgtcaaatcgtcgaaatgagtaccgaaccgcaggatgtggatctggtcaggccggcgaacaagtttgaaatgaccagggtgcgtgaaggtgaaaaggaagctgaccttccagtctggaaacaccatttgttgtgtgacgaaaacgggatctatccggctctgttgaaccattgggaaaccaaggtttttgagatcgaaaccaaacgtgaaggatttgctttctggtatcgtaatccacagtacacagggcagtcgtcactgggaatcgcttatgttgaagctgaacagtacaagattgttcgtcccgatttcctgttctttgccgaacaggatggcaaaatggttgtggacctggtagatccacatagcctacatctggctgatgctttgcccaaactgaaaggacttgcgctatatgccgaacatcattctgatgcttacaggcgaatcgaatctgtcgccgaagtaaagggtaaattacgagtgttagatttgaaacggcaggatgtgcaggatgctgttgctaccgctgaaaatgcagaaacgttatttagtagcggacttgctgatgactatcagtaa

SEQ ID NO: 160891 - DNA, 324 bp, Enterobacter cloacae
atgctcaccatgtgggtgacggaggatgagcacaggcggctacttgagcgctgcgacggcaggcagctggcggcgtggatgcggcagacctgcctggacgaaaagccggctcgtaccgcaaaacttccttcgatctcgccggcgctgctgcgccagcttgccggtatgggcaacaacctgaaccagatagcccgccgtgttaacgccggcgtcggtaccggtcatgaccgggtgcagattgtggcggcgctgatggccatcgatgccgggcttgagcggctgcggcacgccgttcttgagaaaggaacggacgatgatcgttaa

SEQ ID NO: 160892 - DNA, 714 bp, Enterobacter cloacae
atgcctgatgcctctcccaactacggtggttctggcatctatggccgccagtttgatgacggaaatggtgcaggggaaggctcaccttcgaaagtcttaggagggtcgctaattaactattatggtgtggcattgaatgttggggctgggttgttcaatgcccaatgcgtaatcactcaaaagggaatcgcagcgcgaactaaatattcgactggtaattatttcgattggtttgcagtctataccaccatcaatacaactcgtgccagcgatggcaccctgaaagctgcatcgcctgtagtgaaagttttttcggatggcacataccagaccaacgacgaatcagagggctgtacagtaacgcgtctggccataggtgaatatctggttgaagggtgtgaggggctaaactcggacgctgcctggggcggcatcgatggcggttttgacatccccaccgaccgcaacaaacaaccgctcatctggctggattacgaagtaaatgctgacggttctgtgctggtgaaaacctatcaccgcaaacacccggatgcaccggcattcgccaggaacgagctgcagggtatcaacgatggcgatccggttgacattcccggcgatcagtttgtcagcgtccgtgtagagatgccgcaaaacagcatctggcatcaacgcacagctacggctgaaatacctgattcatccgctggttaa

SEQ ID NO: 160893 - DNA, 405 bp, Enterobacter cloacae
atgtatgtttcctttgatttaggcttatccagcgatgaagaaattataacagccttacaaacgatgttaccagatcttaggaaagaatatgaaattgagccagtcaaaacagaaaaaattggacttgcaaaaataagaaaacttgtcgattacaatattatcccaatgatggatctattgatttgggcaaaatttaaaaaagtaaaaatctcaaatatggtcttgtctcgtgtcttgtatcccgactttacaagtgagatcagaggagaagatcacattaaagatacagacaggcctgttgcagagaagtcattgagtggagaaacaacccgtagtctggaacattttatcagcaaaaacagccatctcctcaacataccgatttcggaactaggctctttctag

SEQ ID NO: 160894 - DNA, 312 bp, Enterobacter cloacae
atgtgtgtgcgagaatatgactaccaaattccttatggtgttataaaaggagagggtaataaaatcgtatcgatggaagagaaacctgtacaaagattttttgttaatgctggtatttatgtagtatcaccaaaaatttttaaaactgtcccaaaaaatcatcgcgttgatatgccaactctgcttgaacagcagatggctaataacaaaaacattcttatgttccctatacatgagtactggttggatatcggacgaatggatgattttaaaaaagctcaggttgattactttaccttaggtttagattga

SEQ ID NO: 160895 - DNA, 348 bp, Enterobacter cloacae
atgcaagatatgtatgaagtgatggaactttggggtgcctgggccgcatcagacaatagcggcgttgattggcacccgattgctgcaggttttaaaggtctagtgaaccacggtaagaaatcacgtttacagtgcgacgacgatcaaggcattattatcgatgggtgcgttgctagacttcgtaaattgaaacctgaagaatatcagcttgtcattgctcattttgtaataggaatttcacttcggtccatagcgaagaaaagaaaatgttctgacggaacaataagaaaagagctacaacaagcgctgggattcattgaaggtgttttatctattttaaatagttaa

SEQ ID NO: 160896 - DNA, 669 bp, Enterobacter cloacae
atgaaactttataaatatatgcaaaaagaacacagcgaaagtttttttgacacaggaaagattagaattggtacattgtttgactttagaaaaacagatgtacacaactcagtcattggagatgagaacgaaggctttcaagaaaaagtcatgcagacctcaggatctttcaagtttgaagaagcagatacagaccagtcatctttcctatcaaatttttttgttagaaaaccgggaagtgttggtgaattgactggggtattagaaggaaattggagtttagttcataggaaatctgagcctgattattatgtttactgcacatccaccagcttcaaccctagagtaatgattgaagatttcaaatacaacagctgcattgagatagttaaagctgatcttttcattaatgagttatttaaagccatgaagaagcatgccaaaactggagtctatgggaatgttagttacagcaggaaacaattggattttagggatgaattaaaattcccatcagtgatgataaaagattctaagtactactatcagcaagagcatagaattgcctggttgcccaaaataaacagcacaaactccatagagccaattttcattcaagttcctgacgctaggaaattttgtaaattgaagaagttatccggagtttaa

SEQ ID NO: 160897 - DNA, 348 bp, Enterobacter cloacae
atgacggatgcctatgagagaaggcgaactcagaccttcacagttcaagaaatagatgacttcgatacggatttcgcactccatttggagcaaagtgaactcgcagaaagattaggaacagagctgaaggtggtacatgttgattgggacgaatcccgacacatcagagatctgcctcccggtgtagagcccgaattttatgatacttatgtcgtatatgcggataagttgaatcccttcgctgtcatcttcactcaggatgatgactactcagattattacaggctacgccgccccgaatcacttgaagatttaaatgaggacatatcttactgggctaataattag

SEQ ID NO: 160898 - DNA, 201 bp, Enterobacter cloacae
atgacgatgttgatcgcgagctgcgcgaaaactggacccgtaaaggttgaagtcatcgacactggctgtgactgggtaaatccaatctacgctaccgatcatgactgggatgtactggacaagcagacgaagaaagacatcctggcgcataacaaagcgtggcaggcgaactgtcagaaggagaagctcgaaatcaagtag

SEQ ID NO: 160899 - DNA, 597 bp, Enterobacter cloacae
atgcaagtaaaaatggacttcactcctgcagaaaaggagttaagagcatgcaaaagatgtttagaacgtatgatttcagctgccagctatgaggagtacgaggagagctggagcgattttcttaacaggttagaaaaaatattcgagaaactcgataaggcttgctttccagtaaaaagtaaacttatttctctgatatcaaaagaaaatatgcttagaagttctgacccacttcttcaataccttaaacaagccagaaatgctgatacgcatacaatccaagacatagcccagcgagtacctgcatcctatggaattggctttaacatgagtcaaggtggaaaaaccgcttacatagatagccttaagatagtaaatggcaccattaccgaatataggggcagtcaccctctagtggtctcatttacgcctgaatcagttgaagtgaaagaggtggtaaaccgtaaagttagatacagtcctccatcatctcatctaggcaagccgcttcaaacacgacatccaacggacctagcaaaactaggtgttgaattttacgaacaactacttgaaaaagttaaagctgctttcctttaa

SEQ ID NO: 160900 - DNA, 399 bp, Enterobacter cloacae
atggggcttatggcgccaacaatggggctggataataagcgtcattccgcatggtgcgaatatggcttccctgagcaggtaacctacgaaaacctttatgccctgtaccgtcgcggtggtatcgctcacggtgctgttgagaagctggtgggcaaatgctggcagactaacccggaaatcatcgagggtgacgatgccgacgagagcgaaaacgaaaccgcctgggaaaacaagtcaaagcaggtattcaacaaccggttctggcgctcatttgccgaggcggatcgtcgtcgccttgtcggtcgttatgcaggcatccttctgcacgtccgcgatgaaaaagactggaaccttccggttacatggtgccgtctggtgccagtgatggtggcggcgtaa

SEQ ID NO: 160901 - DNA, 1770 bp, Enterobacter cloacae
atgacgctcttaagcaccgatccactcacccagctcgctttctccgttcacgaaaataaaggggtttttgctgttcttttaggttctgggttatcccgaacggcacaaatacccacgggctgggaaatcactctcgatctcatcaaacgcattgccgccgcgcaggacgttgaagaacaaacggactgggcgcaatggtaccgtgacaaaacaggtaacgaacccgactactcaaaactattagaagacctgacgatttcgcctgctgaacgccgctctattttgcacaactacattgagccgaatgaagaagaaaaagaagagggtaaaaaattacccacgccagcacatcaggccattgccaggcttgttcgctcaggccatattcgggtcatcctcacaaccaactttgaccgattaatggaaaatgcgctgcgggaacagggggttgaaccaaccgtgatttcctccgtggattctctttcaggcgcagaacccttgacacattctcaatgttatttggtcaagctgcatggcgactacaaagatgcaaggattctcaacaccgataatgaactggcaagctatcccgttgaatacaaccagttgcttgaccgaatcattgatgaacacggcctaatcatttgcggctggtctggtgagtgggatcatgctttgcgtgcagcaatactgcgggcgcccaacaaaagatatcccatgttctgggcagcaaaaaatccgccgggcacaaacgcccaggatcttatctcccatcggcaggcaaaaattatggaaatcaccggtgccgatgatttcttcaacacacttcagcaacgagtaaccattcttgaacaaagccgaaaacaaaacccattaagcgtcgaactgttaaccaacagtacaaaaaaatatctggctaaagcagaatttcgcattcaacttgatgagctcttttcaggtgagtttgagcgtttattagaagcaatgaattcagacacactctcccctaacggccgatggagtcctgaagagttcagtcaacgggtatcaacttatgaatcgataacagagccattaggtcgtatggccggaatactgggtcgttggggagaggataaacataaagaattaatatttgatatcattaataacatcatcagccattccaaaaaccacaacggtgggctgagtgcatggataaatctgcgcacttacccggcagtgatgattatgacagcgtatgcgcttggcttaatccgttctcgccgatggggcacattacacgagctgtttttgaaaaaaatagtgatcccccatcacgaaccgtgcagcatcattacgcttttatttttatggtcgtgggaaggcggtggtgatatctggaagcaattggatgggctagacagaagaaaaacagcgttaagcgatcatcttttgacgattatggatgaatggaaatccagcttcatcggaacaaccgccaacttcgaactctcttacgaccgatatgaaacgttagcatcactggcatactttgaggaacaactgtcaacatatccggataaaacccaaattgacatacaatacttccgtatgcctgttggccgggttggctggaatagttcttcctaccgcatactcacccaggaattgaaagatacaaacatccttgatgatttgttaacgcatggttttgccaacaatagcgaagaagacctggctctgtttttacgatgtttcgaaagcatcgcaggacgcatgagctggtaa

SEQ ID NO: 160902 - DNA, 243 bp, Enterobacter cloacae
atggacgaaaagaaactcaaagcccttgcggctgaactggctaaaggccttaaaaccgaagccgacctcaatgctttttcccgcatgttgacgaagcttaccgtcgaaacggcgcttaatacagagctgactgaccacctcgggcatgagaaaaatgcgcccaaaacaggctcaaacactcgcaatggctactcgtcaaaaacggtgttatgcgacattactaacaacaacggggagcagtaa

SEQ ID NO: 160903 - DNA, 2502 bp, Enterobacter cloacae
atggcggtggttataacctatgtatgtgagcttcacgaaggtgttcatgcccggcctgccggatacatcgcgcggctatgtaatctgttcggggcagatatcgactgggaaaacacccgtacgggactactggcaaatgcgaaaagcgccctctcgctgattgccagtgacacgctggtaaacgatacatgccgcatcaccctttgcggagaggatgaaacgcaggccgcagtccagttgcgcacgctgctttccgatctcccgacttttagccttgaaccggaaccaataaccacgcaggggtatctgccccgctgcctgcgcgagttgaacccacaggtgattcagggaactcgcataaataaaggcgcagccatcgccagaccacagataatgcagagcctgactttcaccgatattatcgcccgcaatccagggtatatcggcaatattgaaagtgaaaaagcccgctttcttaccggattagatgcgttacgcgtagagcaagaggccgcactcggaaaaaaccagggtattgaacacgatcttattgcggcacatctatctctgataaccgacatcgcatttcaggatagtgcgatcggttatctgaataacaacatgaatgcctggtcggccatcgcgcaggcgtcccttgacttttgccatcagcttgagcgctcgcctagccagtatctgcaggagcgcgccctggatattcttgatattgcgacgcagctcatcagtgcgatctatggcgaacaggctctggcttaccacccacctttgctaactgaaccgacaattgttttcgcctgtcatctgacccccaaccagtttctggcgctaaaccgcaaacaccttgcaggtctggtgctctcctctacggggaaaacctcccatacagccatactggctcgttcgtcaggtatcccaaccctggcggatatcgatttttcatcgctggatttcgatgtcgatcagctgataatcattgatggtgagtcggggatcctgattacccatccggatgagaaagttctgcgctactaccgtcatgaaattgccgtccagcaggatatgcagcagcggctgcgggaaaatgctttagcgcccgcaagaacccgcgatgggcatagcgtagaggtagccgctaatattgcaagcctggccgaagcgcaggcggcctttgaaaacggcgcggaaagcatcggcctgtttcgcaccgagataacatatatgggccgcgattacccgccctcctgcgctgaactgacaaacctgtataaacaggttgttactctggcaggggggaagcccgttatctttcgcaccttcgatatcggcggtgataaaccggttggatacctaagcgtcgacaatgaagaaaacccgtttcttggtttccgggcagtgcgtacttatccgcaatatcgcgaccttttttccacccaactgaaggctattctgagcgcctcaacatcaggtaaagccaaaattatgctgccgatgatttctcgggtggaagaacttatctggtgtcgtgaggtactggaatcggttaaacaggagatgcgccacgagggtctggcatttgatgaacagacagcgctcggaatcatgctggaagtaccttcggtactcttttctatggcagagatggcagaacatgcggatttcttcagcgtgggcagtaatgacctgacgcaatactttttcgccgcagaccgaggtaatgcacaggtaaaaacgctttatgacagttgcacgccaccgtttttacgcgccctgcaattcgcagtgaaagaggctcatcgcgccggtaagcctgtcgggttgtgcggtgaactcgctgctgacgaaaccattctcccactgcttatcggcattggctttgatgaattgagtatgaactgcaccgcgattccggggattaagcacgccctgggccaactcagtgccggagattgccggtcgctgacacagaatcttttgcaaaatcacaacgcacaacagttcaaagccgcattacaaaactcgagcgttagtgcggcgcaaaagccgctactgtcgccggagatggttttatggggaattgacgccgctgataaaaacgaggctatcaaaatgatggttgataacctgtggcttcagcagcgcaccaatacacgtgacaggctctgcagtgatatctgggctcgcgaagtgccttttcctaccgtcgttggctcgggctttgctatcccccatgcccaaacggacgctgtcagggattcctccgtcagtattgccacgctcaggcaacctatcgcctggggcggcgtcatggtggataccctgttcatgctgacgattagcaaatccgcgcaggataacgagcatatgaagtacttctccagcctggcgcgcatgctcatgaatgatgaatttgtcagccagattaaagcggcaaaaagcccggaagcgctttacacgctgatatccagaactctggtcttctga

SEQ ID NO: 160904 - DNA, 1020 bp, Enterobacter cloacae
atgttaaaactattaaaaaatactaaacgacattttatgaccggcgtctcctacatgatcccgtttgtcgtcgctggtggtgttctgttggcgctcgcggtgatgtttaacggggaagccgccgtaccggaccatggtttcctgaaggccatgtcgcaaattggtatggctggcttaaccctgtttatccccatcctgtcaggatttatcgcgtattcgatggtcgataaaccgggcatcgcgccgggtgccatcggcggcctgatggcttatcagatgggcgccggatttttaggcggcatgctctccgggattattgccgggctggtcgtctatgttctgttgaacctgatcgcccagcttaaaatcccccacttcctgcgcatggtattaccgatatttattattccgctgatcgggaccttcctcaccggcatggcggtgtattacatcattggcgacccgattgccgggctgatgaagtggcttagcgtctggcttggcaatatgcagggcgcgtcgtttattatcctcggtaccatcctgggctgcatgatcgccgttgacatgggcggcccaatgaataaaaccgcttttttctttgctgttgcactgatctcaacgaacccgcagctgatggcggcagtcgctgccgccgactgtactccgcctctggggctggcgctggcaacctttctgtttaaagacatctttaatgatgtggagcgagaagccggtaagccagcgataattatgggctttatggggataacagaaggggcaattccgtttgcggcggcggatccggtacgggtgatcccggcaattatgcttggcagtgcggttgcggcgatcctctcactatggtttggcgcaaccaacgccgccccgtggggcggacttatcgtattaccggtagtcagcaaccattttggctacatcgtttcggtggtcgccgggagcatcaccaccgcctttgcggtgaaagtcctgaagacagttatcaaacctcgggcataa

SEQ ID NO: 160905 - DNA, 855 bp, Enterobacter cloacae; identical to SEQ ID NO: 106733

SEQ ID NO: 160906 - DNA, 390 bp, Enterobacter cloacae
atgaccactcgtgcaacaagagatgagattcagcctttctccagcgaacgtcatctgcatattgtggcggtgaccgcgtgcgcgaccggcgtggcgcatacgtacatggccgcagagcaactggaaaaactggcgaagcagtatcactttgcgatcaaaattgagactcagggcgtactggggcttaagaatccaattaccgataaagatattttcgagtctgagctcaccatcatcgcatccgatattactatcgataatccttcacgctttgagggttgccgtattctgaatgtttgtattaattcgctgttactcaaaccaactgaggttatcgccgccattcgtaagtctttaaatctgccgcgaggcaacgttattgacctgtag

SEQ ID NO: 160907 - DNA, 741 bp, Enterobacter cloacae
atgtatcccgttgaccttcatatgcataccctggccagcacccacgcctatagcacggttcatgactatatcgccgccgcggtgcgtaaacatattcgcctgatcgccattaccgaccatggcccggaaatggttgatgcgccgcatccgtttcactttaataatttgcgtgtgctgccgcgcgttgtcgatggtgtggggatcctgcgcggtattgaggccaatatcaaacctggtggtgagaccgactgtagcgacaaaatgcgtgcgtcgctggatttagtgattgctggattccataagcaggtgtttgcgccagcggacattaccaccaataccgatgcgctgattgcagtaatatcgagcggtaaggtgcatattatcagccaccccggtaacccggagtatccgattgatatcccggcggtggtggccgtggctaaggagtgtcatgtggcgttggaggtcaataacgcctctttcgtccattcacgtaagggcagtgaggggaactgtcgcaaaattgtagcagccgtgcgcgacagcggcggacttctctcattgggtagcgattcacacagcgcgttttctctgggggactttagcgcctgtcagcatctgctggtggaggctgattttccagcatcaagagtgcttaatacctctgtgcgacgagtgctgacgtttctggaacagcacggcggggggcggatagccgagctttatgcgcttcctggctaa

SEQ ID NO: 160908 - DNA, 1995 bp, Enterobacter cloacae
atgtcatcacgaaaaaccctggccaatgccatccgtatgctgagtgtcgatgccattcagcgggcaaattccggtcatccgggcgcaccgatgggaatggcggatattgccgaagtcctgtggcgggattttctcaaccataacccgaataaccccgcgtgggccaaccgcgaccgttttgtactctccaacggtcacggctcaatgctgctctacagcctgctgcaccttaccggctacgatttgccgattgatgagctgaaaaacttccgtcagctgcattcgaaaacgccggggcacccggaagtgggttacaccgcgggcatcgaaaccaccaccgggccgctggggcaggggatagccaatgcggtcggcatggctatcgccgagaaaactctcgcggcgcaatttaaccgcccgggccacgacattgtcgatcacttcacatatacctttatgggcgacggttgcatgatggagggcatttctcatgaagtttgctccctagccgggacgctgaagctcggtaagctggtggcgttctacgacgataacggcatctctatcgatggtcacgtcgagggatggttcaccgacgacaccgccaaacgctttgaggcttacggctggcatgtggtacgcggagtcgatgggcatgatcctgaatccatccgtgccgcgattgatgttgcaaagtcgattaccaccatgccgacgttaattatctgcaaaacggtgattggttttggctctccgcataaagcgggtactcatgatgtccacggcgcgccgctgggcgaggctgaagtggcggcaacgcgtgaagcgctggactggccgtatccaccgtttgttatccccactgagatagcttcgcagtgggacgcccgcaaatcagggcaggctaaggaggctgcgtggaaccagcagtttgccacatacgcgaaagcgttccccgagctggcagatgaatttacccgtcgggtgaatgggcaactgcctgcagattttgccagcaaggcgcaggcgtttattgaaaaattgcaggccaaaccggcgaaaatcgccagccgtaaagcctcgcagaatgcgattgaagccttcggtccactgttgccggaattcctcggcggctctgcggatctggctccatcgaacctgaccttgtggtccggctctaaagcgattaacgaagacagcgccgggaactacattcactacggcgtgcgtgagttcggtatgaccgctatcgccaacggtattgcgctgcacggtggcttcctgccgtacacctcgacgttcctgatgtttgtcgaatacgcacgcaacgcggtgcgcatggcggcgctgatgaagcagcgtcaggtgatggtttatacccatgactccattggcctgggcgaagatggcccgacccatcagccggtcgagcagattgcctcactacgcatgacgccgaacctcagcacctggcgtccctgcgatcaggttgaatcggcggtggcgtggaaatatggtgttgagcgacaggacggtccgactgcgctcattttttcccggcaaaacctgacccagcaggaacggacctggcagcaggtgcaggatatcgcgcgcggcggctatgtactgaagaattgcgaggggcaaccgcagctgatccttatcgcgaccggctcggaggtggagctggcggtagccgcatggcagcaactgacggctgaaggtgtgaaggcacgggtggtctccatgccgtccaccgatgtcttcgacaagcaggatgcggcgtatcgtgaagcggtgttgccgcaggcggtttctgcgcgtattgccgtggaagcggggatcgcggattactggtttaaatatgtcgggctgaatggcgcgattatcggtatgcagacctacggcgagtccgccccggcggaacagctttatcaggagtttggcattaccgttgaggtggtgttgcagcaggcaaaagcgcttctggcttaa

SEQ ID NO: 160909 - DNA, 723 bp, Enterobacter cloacae
atgggtaatggagtacaaaataatacacactctatttatttcgttgtggtaattacgatgcattttcgtggaatattactggatttagacgggacgctggtgaactcgctggattttgttgaggcctgctggcgtttatgggccactacaaaagagctggatccgagggcggtatgccattatctccacggtaaacccgctttgagtacgctgcgccactttatgcccgatgccagcgaacagatcatcatcgacgaatttctcgcgctggaagagtttgaagcgagcaatactgacggcatcactgcggttaacggggctgttgattttctccgccagcttgagcagttgcaggtcccctgggccattgtgacttccgggtcgctgaaggttgcctcagcacggatccgacaagccggtttccccgctccgccggtgctggtgaccagcgaagatattcatcatggcaagccgcatccggagccgttcctgacgggggcagcccgactcggtctttctcccgctaattgcctcgcttttgaagactccactgccggtctgctttctgccacccaggcagggtgcgtggtggttgaagtcctgacccgccagtctgtagttcacgatatcgatacctggaaaaccattgataactacctcgacctgcgcgtaacgcgcaagggcgaggcagattttttacttaagattcagagggagttttaa

SEQ ID NO: 160910 - DNA, 2511 bp, Enterobacter cloacae
atgtcacagataattacgtatcaatgtgagctgaaggatggtattcacgccagaccggcgggacatatcgaacgattgtgtaatacctttcaatctgaggtgtgctggaataatattcgcagcggcattcagggtaatggtaaaagcgctctctcgattgtcgccaccgataccttactcaacgacgcctgtgaaattaccatcagcggtaaagatgctgcaaacgcggctcagcagctgagtgcgctgcttaaaaaactgccctccttcgaggttagccatgcagatgaagccgcagtgcctgcgggctatctcccgcgttcgctgcgggagactcagctcagttttattcagggttcacgcatcagcggcggtgttgccattgccaaacccgttcgtattcagagcctgtctctggacgaaatgctggcgcgtaacccgggcggtgagtattccacggagcatcagcagcgtatttttctggcgggtttagaggcgcttaagcaagagaagcaggctgcgctggaaattaaaaaaggcgttgaacacgatattttacaggcgcatttttccattatcaccgatgcgacctttcaaagccatatctcctcggcgatttccggtggtgacaatacctgggatgcggtgattaaagctgcaatggaattctgtgaaattcttactcgctcatcaagcaaatacattaaagagcggaccctggatgttctcgatattaccggacaattactttctgcgatctatggcccgggtatattaccgcagaacagtcttgaattaacgcaaccatcgattattctggccaacagtctgacaccaagccagtttctcgggatcaataaagagtttcttgccgggatggtattatccgccacgggtaaaacgtcgcacaccgctatccttgcacgttcgctcggtatcccgactctgacagatattgatttttcgaccctgcagctgaatgcagacatggacattattatcgatggcaatccgggtattttaattatcgcaccggatgagaaagttctgcgctattaccagaatgaaattgccgttcagcagagtatgcagcagcaaatgctggctaacgtctatcaggcagcaaccaccagcgatcatcatagcgttgagatagccgccaatattgccagcctggcggaagccgaggcagccttcagtaacggcgctgaaggcatcggactatttcgtaccgaaatgtcattcatggaccgcgaatccgcaccggactaccacgaactggctgagctctacagccaggtgatacaggttgcacaagggaagccggttatcttccgcaccttcgacattggcggtgataagcctgtcgactatatgagcatcggcgaagaagaaaacccgtttctcggcttccgggcggtgcgaacttatccgcgttatcgcgaccttttcgccatgcagctcaaggctatcctcagcgcctcggcttttggcgatgccaaaatcatgatcccgatgatcgccaacgttgatgaagttatctggtgccgtgaagtcctcgaagaggtcaaaagtacgatgcgtgatgaagggctggcattcaacgacagcatctcgctcggcgtgatgctggagatcccctccgttatcttcgcgattagtgaaatagcggaatacgcggatttcttcagcgtgggcagcaacgacctgacgcagtacttttttgccgccgaccgtggaaatacgcaggttgaggcggtatacgataactatgctccggcattcctgcgcgccatgcagtatgccgccgacgaagtccaccgcgcgggcaagtggataggtatctgcggagagctgggtgccagcaaagattttctgccgctgttcgttggcatgggctttgacgaactcagcatgagtggcacctctattccgggtgtaaaacatgcgctgcgggagctgagttttgccaaatgccaggggctggtacaggatattgtggcgttaaaacgttccgctgatgtcaaagtcgcgctgagttcaccggacgtaaaagcggtcagcaaaatgccgatcctcgctccagagtttattctctgcggactacaggccagcgataaaaacgaagttatcaaaaagatgaccgacaatctgtggctgcaccatcgcaccgataatcgggatcaattaaccgatgatatctgggcccgcgaagactcattctccaccgccgtgggctatggcttcgccattccacacaccaagtcagaccatattcactactccaccatcagtatggcaacccttgcgtcgcccattatgtggggcgatcaggaagtcgaaaccgtattcatgctgacggtgagtaaatccgccgaccctaatgagcatatgaaatatttctccacgcttgcccgaaagctaatgaaagaggatttccgcaatgaaataaaacaggccgaaaacgtcaacgtactctacaacctgatggccaatactttggccgtatga

SEQ ID NO: 160911 - DNA, 321 bp, Enterobacter cloacae
atgaagattgtcggagtcgcagcatgcattaccggtgtcgcccacacctatatggcacaggaagctatcgagcaggagtgcaaaaaaagaggttatgacgtcaaggtcgaaactcagggcggcatgggaattgaaaatgaattaagcgaagatgagattgccgaagcggacgtggttattctggcgattgctattggtatagaaggcgtcgagcgttttgaagaaaaagaagacgccggactggttatttcgttgaacccggcagaagtggttcgcgatccagcagcgattattgaccgggctgaaaaactggtgcaataa

SEQ ID NO: 160912 - DNA, 1104 bp, Enterobacter cloacae
atgtcggaaaaaatgaaagtcatcaaggatgatttagttaaagcattcagtaccggggtgtcatatatgatgccggtggtggtggtcggcggtatctgcctggcactatccctgattggtggtgagccggtcgcgggtaaaggcatggtggtgaccaacccattcttattaaacctcggcgctatcggcagcgcgggcctcggaatgatgatcccggtgctggcggcttatatctcctactctatcgccggtaaaccggggctgactccgggtttaatcaccggttttatggccagcacgccgctgggcgcagaccacgtggtaaccggttttctgggggcgatgctgctcggtattctcagcggctacgtggctaaatgggtaaaaggctggaaagtcggtaaggtgctgatgccggttatgccgatcatgattattcctatcgtctcaagcgtcatcgtcggcatgctctatctgtatgtactgattggacccatcggttttgccatgaaatggctggtttccatgctctcccatatgcagggaagcagtggactggtacttggtctgattgtcggggccatggcggcctttgatatgggtggcccggtaaataaaaccgcaacggcatttactctcgcattaatggctgaaggtatttatggtccgaacggcgcttaccgtgttgcctgcgctattccgccactgggcattgccctctctacttttatttcaccacgtaaatgggctgaagatgaaagacgaatgggaacctctgctgcctttatggggttaattggcattaccgagggtgccattcctttcgccgttaaaaacctgaagaccgttctgccatcaataattatcggcagcgctgtcggtgctggcctggcaatggttcacggcgttgaatcaatggttccacacggcgggttaattgctatcgcaggcgtcaataaagcacctgtatggtatgccatcgatatggttatcggcgttattgtcaccgcaatatgcctatatattctgcgccccaacataagcgagccggtaaaaaaagagtcggctaaaaaaacaatcacttctgatatgaataaagtctga

SEQ ID NO: 160913 - DNA, 1254 bp, Enterobacter cloacae
atgaaaaacacaatgaaacagtacgtcgattatattgttaacggtggaaaatcaacaatgctgggaattggccccatgtctccggcattaattcaggcctgttttgagctgggtaaagaaaaagacctgccgctgatgtttattgccagccgcaaccaggttgatgcagatgagtttggcgcgggttacgttaacaactgggatcaatttcgctttgccgccgacctgaaagcgatggcggaaaaagtcggcttcgacggtgattacttcctctgtcgtgaccatggtggcccatggcagcgtgataaagaacgtaaagaccatattccggaagccgaagcgatggcgctagcgcgccgctcttatcaggtagatatggacgccggtttcgacctgttgcatatcgacccgacaaaagacccgtatgtcgtcggtaaagtcattgatatcgaactggtgctgagtcgtaccgttgagctgatccgcttctgcgaagagtaccgtaaggcaaataacctgaaggagttcttctatgaagtcggaactgaagagaccaatggcggcctgaccgacgtcagcgcctatgaaggatttattattgagctgaataagcgtcttgctgccgaatcgctaccgcagccgctgtttatcgttggtcagaccggtaccctgacccgcctgaccaaaaacgttggccattttaacgataagcagtccgcagagctttcggctatcagcacccgtcacggcgtaggtctgaaagagcataatggtgactatcttccggatgagatcctgttgaaacatccaggtctgggcatcacggcaatgaacgtcgccccagcctacggtaccattgaaacccgcgcttatctgaagctggcggaagtcgagaaagatctggcagcgaaaggctttatcaagtcagcatctgatttaaaaaccgtcctgacccgcgagtgcgtgctgagccacaaatgggaaaaatggatgaccgatgagcacaaaaataagtccgaggaacagatctttaacgagccggaattgttgaaagagattctcgaactcagcggccactacaactacgaaaaaccagcggtagtcaaagagatgcagaccatgtttgctaatctgaagtcgtttggtgtcgatcccgagcgttatgtggttaataaaattaaagatatgatccagaacgaagcagagtgcttcaatatgccaggcctgaccacccgcgtcgcgcaggcaaaataa

SEQ ID NO: 160914 - DNA, 951 bp, Enterobacter cloacae
atgaatcagcttgaacaactaaagcagcgaaccacaattgttgccgacagcggggatattgacagcattatggcttaccagcctgaagatgcgaccaccaacccttcgcttatttataaagcggcgcagcttccgcaataccagaaactggtgaaagatgccgtcgcggcggtgaagtcccgccagaatggaaagccggtacagcctgcggatattgccgattacctggcggtgagtatcggggtgctgatcctgaaaaacgttccgggtcgtatttcaactgaagtggatgctcgcctctcgtttgatactcaggccagtattgctaaagcgcgggaaattattgcactgtatgaagagaaaggtattggtaaagatcgggttttgattaagcttgctgccacctggcaagggatccgtgccgcagaaacgctggaaaaagagggtatccagtgtaacctcacgctactgttctcctttgcccaggccagagcctgtgccgatgccaatgttttcctgatttccccgtttgtgggccgtatctacgactggtacaagaaaaacaaccctgataccaccttcaccgtcgagaacgatccgggtgtcgaatcagtgcagaagatctatcgcttttataaaatgcacggctaccgcaccgtggtgatgggggccagtttccgtacgccggaacaggtgctggcgcttaacggatgcgatcgtctgaccgtttccccggcgttgctggcgcagttgcagcaaactcagggggcggtaccaatgccgctgacgtatgaaggtgaaatccaggcgaagcccacagcgatgaccgaggctgagttctactgggctcataatcaggatgcgatggcagtggaaaagctcgccgaaggtattcgcctgtttgccgtggaccagaacagtcttgaggcactgctgagtcaatatctgtaa

SEQ ID NO: 160915 - DNA, 318 bp, Enterobacter cloacae
atgttacgtaaggttaataactttaaagtgttagtgtttttttcgcttttcggaatgtctatatctcaatggtggcaatttgtattttttagagaagactctcgtaaatgtttgctgggaatcgaatccatatttataggctatacccatcactggctcattagtctcgatgagatctttagctgcaagtttaagttttttatctcttatatattttccaaggctgacttctttcacctgtacaaaaatgcgctgaagatgccacttggagtatcctgcccgggcagcaacatcctctatcttcagcggcttatgtaa

SEQ ID NO: 160916 - DNA, 1422 bp, Enterobacter cloacae
atgaaattagaaatagtgtctgtgtcaattaaaggattattcgatagatttgattacacaatatcatttgataaagatatcaatattattacttcacctaatggttttggtaagtctaccatattaaggtttgtctataatttaaccaatggaaactaccattctttttttgcggaaacttttaatgaggcaacttttttaattggttattcgcaaaaagacgcgagaaagacttatagtccagatgaacagttgtctatttttgagaatgggcaggttttagagtcgggttataaacgcattcaatttaaaaaactgaatgaaattattacaataactgacttgactgataaaaggaatcgcactgtaataattgatcttttggctgaagataattattcggattcattctggaagcagatagatgttgtccatccgtatattaaacgtgtggcttataatacgtgggaaaatgaatatactggagaagtttataataaagagaaacttctgcaaatgtgcggtaacatgccttcggtcaaagaagggattcaagatataaagtgggtggaagatatagctagtaatctcaagagctattatataactaccgacagagttcgtgtaagcgattttcaggagttcgataaagggacaaactttagacgtaagtatcgaattcacagtaaaagtatgatccatcttttagctatggatgttaaagaaagaattcaaagtggtattcgtcagcaatttgaaatgagtcgccgaagagaatcaacattcccacagcgtttaataaaaagtttggagtctgctgaggggaaaacaacagttgatgatgttgttaaggcaattaaggatattcaaacctatgaagaaaggttctcaactttaggtatcctggctgataatacagaaagaaccactgagcaattaaatcagttttttgcatactcaagtgaaactggtttagcagttcttaaaacatatttagatgatattaaaactaaatttaaagttcttgatagtttagcaacacatctaactctcttcaaagaatcagtaaataatttattatcgttcaaaaagttgaacatcaatttagaatttggtatcgaagttgtttctgataaaggggataaaggtcctatcgagctttcgactttgtcttctggagagcagcatttaattgtcatgatagggaaaatgatatttggggcatctaaaggtgatcttgtccttattgacgaaccagaaatatcattccatccagaatggcaagagatatttattgatatagtcaataaaattagagagcttaaagattttaaagtagtaatggctactcattcaccgatattgattggtggtcggtgggataacgtgattgaacttgccgaacaacacgtaagggattga

SEQ ID NO: 160917 - DNA, 873 bp, Enterobacter cloacae
atgtccgcgagctcgctttatagatatcagaataatgaaagaactgttatagatcgcgctattcaaaattatagaagtaaaagaaagcatacagtatttgttgaagggttgtccgacaaggatttcataaagcagtggtcagagtcggattttatttttgatggcttttgtggaaagccgttaattgaggctattcactctctattaactcgtgatagagtgcgaggtcaatttaaagaacatatgaccttaatagcggatattgattacgatatatccgcaggtttgggaaggtgttctggggtgaagtatttcgttgtggatgatggttttaaccatatttataatgatttggatgtttttttaataaatactagagcgcttaataaaatccttgtaagtctaagaattgatattgataatgaccatgtcaataagcttagggatttgctatctcaagcgactaaaaagtttgggaaatatcgttgcgccgagcaagctttgcttaaatcatacaatggatctattttagagggtttggacattacgccattctatgaccctattacgttagaagtaaatgaagaacttttacgcaaatcgatacccaactggtctaagtcactatctatcgatgagttaatagaaactgcggacaaacttgaggctgaaaatcctctcgcatggtctttaactcgcggacacgatgcaactgagattttagctagtcatattaaatcagcattcgggaaaaaatttgtagataggacgtatattgaaaggcaattaaagcttgggtgtgaactatatgaatttaataatacagggttatgtaagcacctggtattaattggcgcgattattcttccctga

SEQ ID NO: 160918 - DNA, 549 bp, Enterobacter cloacae
atgtttatccgcactgatggtgaaattcactttaacaaaataaacaattctagccagcagtggcgcgcaatagtaaagacctcacttaacacaacagtcgatagcaatgggttcctcaaaacggcctcaccagtcgttaaggttttcagcgacggtagatatcagactaatctcgaatcagaaggctgcaccgtaacccgtctggccacaggtgaatatctggtagaaggctgtgaggggctgaactccgacgctgcatggggcggcattgacggcggttttgacatacctaccgaccgcaacaagcagcccctcatctggctcgattatgaggttcatgctgacggttcggtgttagtgaaaacatatcaccgcacgcatcctgtagcgccagagttcgccaggaacgagctgcagggtatcaatgaaggcgaccctgtcgacatcccttctgaccaatttgtctctgtacgtgttcaaatgccgcaaaacagcatctggaatcagtgtgcggctatggctgaagttcctgactcatccgctgattaa

SEQ ID NO: 160919 - DNA, 180 bp, Enterobacter cloacae
atgaccatatctgaccatgcggatttaatccgtcaactcgaagagtgccgcgccgtgatacatcaaaaaacagcacaggtgaaatggttacaaactgaaaatagccatttgcataagaagtgtgaagagttgcaaatggctgtagaaatacagagggagtttattagatcgcgaaattaa

SEQ ID NO: 160920 - DNA, 714 bp, Enterobacter cloacae
atgaccggtaaatattcacttatctatgcagacccgccgtggtcttatggtaacaccgtcagcaacggcgccgcagaaaatcactacggcaccatgaagctgatcgacattaagcgcctgccggtctgggaattagccgcagaaaacgccgtgctggcaatgtggtacaccggcacgcataacgaagaggctattgagctggcagaggcgtggggcttcaccgttcgcaccatgaagggattcacctgggtgaagctgaaccaactagcagagggtcgcatcaacaaagcgctggcagagggtgaggtggcagatttttacgactttctcgatctgctaaacgccgagacgcgaatgaacggcggtaaccacacccgcgctaacacggaggatctgctgatcgccacctgtggtaacgggctggagcggcttaatgctggtattaaacaggtggtatacagcccgctcggtgctcacagtgaaaagccgtgggaagtacgccaccgtctggagttactttacggcgatgtcccgcgcatcgagttgttcagccgctgcggagcgccaggctgggaccactggggaaaccaaagtattggaccggcggtgcagttgcaccctggctacgcgctggatatcggcggtttgacacgggcattcggaaatgcaccgctttcaccaacagacaaccagggccaggagcgtgcagcatga

SEQ ID NO: 160921 - DNA, 513 bp, Enterobacter cloacae
atgcttttgagtgagtatagcggtggagttataccaactggtgatttcaaaactgacgattttttgatttcattaaaagaagcatttaaatgtcattggcgtaatggccatcatccaagtttgggaaaagacacccttttcgagagacctgacgaggcgcttggttttcatctgagaaaggttcatgtagatattagtcagtatgcaaactactcttattcatgcactgaagaatgttggagtgaatgggcatgcggaccgatagatgaacgtgggaattatcgaccaaagccaacaagcaacgcttatctcatttacgcagttaatgaaagaagggatgcagcattgctagcgtattgggatccccctgcacatacaaaagcaaatgaagcagtttggatgaattccgttttaaatttcacaaaactttttcatgaaaaaaccaatactgcccctcttgcgagagctatcaatccatgggattactcatttagcatcaagaagcccgcatag

SEQ ID NO: 160922 - DNA, 330 bp, Enterobacter cloacae
atgacaaagcttggattcatggcgcgcggcccggttacagaccgttcgcctgtaaagcgtcgtaagactcgcatttctcgcggctcggttttgatgcgtagcaatcttgtcaatgtgattgataaggatggggttgtgctgcgcaaggttgctgttactcagaaaggtagccgtgcttcgatattttgtggcgctaagcgtgttgcgaatagcccaagcatgccaaaaatcaaagtaatctctgctgaagcttcggcagagttgtccttccgtatgttaaacacattagatgctcgaatgaaggaagaggacttcgatgcttttgagtga

SEQ ID NO: 160923 - DNA, 438 bp, Enterobacter cloacae
atggtgattgaagcagccgcttatgctgctgccatagcaactgccaatgccatcaggattcatgatgaggaagttgagcaaaaatacccggttatgttcatcactgaatacggccagcatgaggcattgttaaaaatccagggcacatcttttgaagggatccttgcggataagcttcatcgtgaatcatgtcaaacgcatataatgcaaccttacgagtcaaggataatcaaatctggacgctccaaggctaggcagaaattagttgaggtgatagcgaggtattataagtcatcttttaagcctacagtgtcacatgaggttgtaatgcgcgaagttccaaagatgtctgtcgaaaaatctcaggcaatctcccgaaggatgttcgcccgtacggctgatgatatggctcaggagctctacgacgatgccgaataa

SEQ ID NO: 160924 - DNA, 507 bp, Enterobacter cloacae
atgccgaataaattccaggggttggttcaccctggaatttttgggaaggaccctgagctaatacctgtcaaaaatgcgttcatagatcattggcgctacggccatcataaggatttcggaaaggacactctgtttcgagaccctcccaaagagatgctggaatatcacatccgccacgttcacttaaacatcggcaactatactgaaaagtacggagagagtggaacggaacaatgctggaaaaactgggcgtcagggaaaaaagataagaccaccaacaaacataaaaaaatcccgactagcgatgtgtatgtgatttatctggtcacgtcagagcgtcatgctttccttctcgattattgggatgaacctgctcataagacagttgaaattgacgaccaaaagcagaaactggttgttgaatgcgacagggttctaaggcttaaagagctggaatcaatgccgcgcgatgcggaattatgggatccagagttttatgtcgaataa

SEQ ID NO: 160925 - DNA, 2499 bp, Enterobacter cloacae
atgacggtatcaaccgtagttgaccataacgattacacgggtaacggcgttacgacatccttcccgtacaccttccgtattttcaaaaaaacagatcttgccgtctcggttgtggacctgagcgaaaacatcacggtgctggttctggacactgactatacggtgacaaatgctggtggatacagcggtggtaatgtcgtgcttaccgcaccgctgggaaatggctggaagatttcaattgcgcgtgagcttgaaccaacacaggaaactgacctgcgcaatcagggaaaattctttgctgaggtccatgaagacgctttcgataaactgacgatgctgatccagcaggcgtacagcgtatttcgcctggcgcttcgtaaaccgtccagtattgcaaactggtatgacgcactaaacaactacatcaggaaccttcgagacccatcacagccccaggatgcggcaactaaaaactatgttgacgttcagtttgatcaggctaatcaaacaaaccagaatctcttcaaaagaaccctcagggtccctgaagattctatacctcagcttcagcctgcatcagtaagatctaacaaaattcttgcgtttgactcggcaggaaacccaatatttatagtccctcaatcaggctctgcttctgatgtgctgatcgagttagcaaagccaacaggtgcaactctgatcggtggatttgatgaaggggctgcggttatatccgcaaagaaacatggggtggtaagtggtgttgactgcgctccaattatccagcaactacaggatatgtctgagtcactgcggttgccgatcgatttcagtggtattgacgtggttgcattttctgggatggttcgagttggtgattggttcgactggaatggagcaggtagattcaaaacaacaattaaaccattaacgctttcaaggtctatgttaggccctgcttatacaggttcttttggtgatgtgtacgcctggtttgcaaggaaaaacccatcttcaaatttattatttgcgagattgagaaatataggttttgacgggcaatatcaatcagggtattcaactcctacagataggttgattagagcattttgctggcacattgatggtgctgggaatttagggactgatatttctgctcaagaatgtcattttaaaaattgcccgcatgaagcatgggaaggttatacaacaaacggagggaaaatagatggtataagttatatagggtgctcttctgaggggacagatccaacggtaacagccgttggatttaatgcttttaaatgcatgaatggggttattgatgctccaggtcagtacggcatttacactataaaaaatatattatgcaaggacagcacggcaaaaggtcacagaacgctagccgatctaaaaagaggatgtgaaaggtgggtaatcgaatcctgtgaaacacaggatatgaatgattgtcaccacagttctgatggtagcagatatggtcttatacaagggtgcaagggggtacagactggagtttctcaagccacaaaaaatttcttcgaaacccagggtgagcacataaaaataaaagatattttttacaaggccgccacatcagggcaggcaggaaacgcagggatatttgtccaagattacggctatccttctgaaagtgttaaccaccagtcattgaacattatcatcagtgatgtttatgtatcaaatgtaaatagccatgcagtacgagttaataatgcagctaatattgaggtgttaaatgttgttgctgagttttgtaatgatgcaggagtttcatttgaatacgtgtcaggacatacagacggcattactgggcaggaaataatacctaaaaataatacttgcgggctagtatcaactcgaggttgttccagagaggtagctgttgcaactggaactgaagtaagatttttagcgcctggacttaacagttcgggcggtttccggctatcaaattcagatattgtatggactgttccgccttttgtttcaattcatgcttctaagtttgaaaattatgatagattactacaaagtgtaatctcatcatcaaatccaacaaagacagatgcagccacaaagccagtaggagttccctacgctttcaatcttaatgacacaaacgcagcatctgttcaaggtcttttaatacaaaacatatcactatttgacggcgatcagatacatgtcgcaatctatgttaaaactggcactgcgacaactgctgcgataattgcacgtgaattagactcatctggaacatcactatcaaatacatatataaggctatttccagaatcaacatggaaggaaaggaaattagcaataacaaaaaaatcttctacagccacctctgtagatatacttctagcaccagcatgtgacaatactggtacaacatctttaactggctctacagagtttgctgatattagaatctctaaacggccaatataa

SEQ ID NO: 160926 - DNA, 1059 bp, Enterobacter cloacae
atgaccatatcagagttactaaaaagaaataataacaaccttgatttcatacgcatagtattggcggttttggttattgttgggcatagctacttccttgctgatgctaatggtaaaactgatccaataaatagtttatttagctttacgtatagtggttcgctagctgttaaggtatttttcttcattagtggtttactggtaactaacagcttgatgagaacgcaatcatcaattgactttattgtttcaaggttttttaggatttaccctgcttttttcgtaaccataattgcctctgcatatatagtcggacctattgtgactgatatgtcaattggaaattacatgtccagcaaatggctagattattatgttaacaacaatttaattatgaatattaactataatctaccaggtgtttttgggggtaacttacatagattagccgtaaatggttctatatggacaataccttacgaaatatattcttatgttgttttactttctttatttatgcttgggactttaaaaaacaaggttgtatttaactgcatctgcgtaatagttatccttgcgccagtctttggttataataaattcctgtttatcgatagcggtcttcctgaggtgtatatgcttccaccttgttttgcgctaggttctttatttgcagcaaaccaaaatgaaattaaatccactgccgccttgccgattggttttttcattcttcatacttttataaaagacaatacactttcaatcttaatgttctatttttcagtatgtacttttgcattgtatgtatcacgattaagcctaataaggcgtattaatgtgaagtgtgatatatcctatggtgtttatttgtgggggtttgtatcccaacaaacaatttatcattttttgccaaacctgaatatccacgcaaaccaaataatgtctatagcaatctcatgcagtttaggatacctatcttataggttggttgaacatccatgcatgtcgcttggaaaaaaaataacaacgattcattctcgcttcctcgcgaaagcttaa

SEQ ID NO: 160927 - DNA, 423 bp, Enterobacter cloacae
atgcttaaccgactgaggagcattcagtctcggggattcccatggtatgtcgccctgcagggcgatacgatcattggctactgttatatttcccgttaccgcgaacgccatgcttatcggttcacggttgaaaattcgatatatattgatccggcttatcagcgccagggcgtcggaaaagcactgctcgatcatgcattaaaatgggccgaatctcagggatatcgtcagatgattgctgttgtgggtgacagcgctaacgttgcttctgttgcgctgcatatccgcgcaggatttactgaaataggcacattaaaggacattggtttcaaacatggccgctggcttgacacggttttgctgcaaatgaaacttggtgaaggcaatagtactctgccagaaggttcagatcttatgccttga

SEQ ID NO: 160928 - DNA, 237 bp, Enterobacter cloacae
atgtctctgattacacagcagctcccagcagcctctttagcctttgccagagcaaaggccagagagaagtattatgacaaaatgcgccctattgttgaggagcttattgaatttggttacggggaaaaggcactagctaatatcctgaacaataaaggtttattcacaagccacggtaaagaatttaacgctggcactgttaaacatcttctaaaaatgttggggtataaagaataa

SEQ ID NO: 160929 - DNA, 831 bp, Enterobacter cloacae
atgataaaaatgcttgaaggcctctttgtagacacgtctactggggagttagtagacccatatgaatatggatgtttaccacctgactatgatgtcagtaacgcagttgagatagctttaactggtctccctttgaaggagatctatactactactgcgttaattaaatcaggtagagggcgtaagcctaaggcgattgacaatccctattgttcagtgtttcagaatctggcacgtaaagaagttctaactaccactggcgaaattaaaacagtggctgttatgccatctgtgattgacgatttagttgcgggagcgttacgactgaaagagggtgcagacaatacagaaattccacaagggcaactcctgtttattctggcgcaccttcccacgctgtcagtagaaatcattcaggaactgttatcagcgaagcgtgttctgtggaagaaggacgttcccggcattcgttattgtcaatacctcctgcgtaaatgtgagagcgttattgaaagcctttcatatcacattgaacgtggcaacattgaaaagaattcagcatttgatttcaatcaggacgccgctgattacgctaaatacggatgcatcccgaattgcgtaattgccccagccccatttacagagggtgacagaatggttattcgtagaatggctcttgccggtaacacagtggcagcggatgcttatatccagaaagtagcagaaacacagaagcgtatgattgagcgtatttctataccgtctgttaggcagatagaaaatgatatgcgtttagagtttccttacgatccttacctaagcgaatactga

SEQ ID NO: 160930 - DNA, 561 bp, Enterobacter cloacae
atgaacgttgtaaaaactgatattccagatgttctcatctttgagccgaaagtttttggtgacgaacgcggttttttctttgaaagctttagccagaaagtttttgaagaagccgttggaagaaaaattgaatttgtacaagataaccattcgaaatcgtgtaaaggcgttttgcgtgggcttcatttacagacagagccatatgcacaaggtaaactagtgcgatgcgttgtcggagaggtttttgatgttgctgtggacttacgtgaacggtcactgacatttggcaagtggattggtgtaaaccttagtgcgcagaataaaaaacagctatggatacctgaaggttttgcacatggttttttaactatgacagagtatgcagaatttgtttataaaacgagttcctactatgctcctcacagcgagatgagcattaagtatgatgatccagatattggaatagtatggccctctcttgacgatatagttttgtctaaaaaagatgagaaaggtatttcgttaagaaattattcagaagtgatgaaaaataatttatga

SEQ ID NO: 160931 - DNA, 1032 bp, Enterobacter cloacae
atggagttaattaaggagttacccgaaatagcattattacgtgtgctttataatacacgtaatactattattttactgtcagctacagcaggatttcctgcaacgtataatgggcagtacagccgcccgtttctggataaatacgcccgtgacttgaactatcgcatcaggcagcgggatgttgattctgcttcgcccctgtcggcgatccgcgataacagaaaccttcaccgccctgtagcgctggaggtatttgacgatcaggtactggagtttttaccacaaaacgaggagcctgagttcaggaatgcatatcgtttctggctcaaaatgctcgaaccatactctacatcagttcagtttaatcgctatcataaacgagagtttcatcgtcagttacagagtatgttacttgcggcctatactggccggcacattttatgtattgggatcagtagccgtttttttgcgattatcgggaattttcttcgtgccaataagttaagtgcaaatccctatcgtggggttgctattcttgacaatgaaacacgtcgggggaatgatttacctcgtgtatttgaaatcactccttttgctgagcggcatagattgcgtgtcgtcatgtttgattcaaaactcaaccgggaagatccggtaagagactatctgcaaattgatcaccaaaacttagcaatatgcatggtttcccacttccagggggctggcacagggcttaattactatgtcacttatccggtaccgtcagaacttacaggagcagattcagagcaaatcgacttcgatgaattagcaatggtctgcggtagctactggagtcagattaatgcaactccatcgcgaaacacgctggaaaattatattaccttactcaagcattatgctcatggaagtgtgcctcgtcaggttggtgatttcgatacggatctagttgattctgatgctgcccaattgctggatactgaacctgtctcttatacacatctgacgctgccgacgaagaggatagtgtag

SEQ ID NO: 160932 - DNA, 1011 bp, Enterobacter cloacae
atgactgttttagtaactggaggtttaggctatatcggctcgcatactgtcgttgagttattaaataaaaacttcaatgttgtagttctcgataatttatcaaattctaatctgtcggtaattaaacgaataaatgaactttgcggtgagtcgttttgcttctataaaggagatatacttgatagcaatgtcttgaatgaaatatttcgatctcactctatcgaaagtgttatacattttgctgggttaaaatctgtcagtgaatctatttctaaacctataaagtactataacgataatatttccgggactttgaatttacttaatgtgatgaatttttttgatgttaaaaaagtaatatttagttcatcagctacggtttatggtcaaccccaaaaaataccgttaacagagcagtgtcctattggtgggacaacaaatccttatgggacgagtaaattcatgattgaaaagatcttgatggacctttcaactagtgatgcagaatgggatataacaattttaagatattttaatcctgtcggcgcgcatccatctggtttattaggggaagaacctaaaggaacaccaaataatctagttccttatttaacgaaggttgcaattggtgagttggaatcactctctatttatggtaatgattacaatactgtagatggcaccggagttcgggattttattcatgtatgtgaccttgccactgggcacatttcggctctggaaaatatgtcaggaaccaaactgaaaatttataacttgggtactggagttgggacatctgttttgaatttaatcaaaacatttgaaaatgttaataaggtttctgttccttattcaattacagcaagaagagatggggatattggcgaatgttgggcggatgctactttagcaatgagagaattaaaatggaaagctaaatatgatctggctgatatgcttaggcatgcctggaattggcagattaaaaaccctagtaggcgtaagtga

SEQ ID NO: 160933 - DNA, 399 bp, Enterobacter cloacae
atggaatccactggccgaggttatgaccaaaatggtgacctgcgttttaacttcttatcggtttatcatctccagccgctgcggatccacaatggctacctctataccggcagcgacgaagatatggcgtggtacggccgtcgctttttcaaaattgatatcatgggcaatgtcgtccttgaattcgacatgcgtgatgctgatggcaatcactatgcaaatactcatgatgtagtctgggactccgcgggcgacatttatatgtttggcaccgatagccctaaccgactaaccaacacgatggcgcaagatgcgctggttctgaaatttaacgatcagacagggaaaatgatttgggcgaaaactataccagcgaatatagtggttctcaaattctga

SEQ ID NO: 160934 - DNA, 4215 bp, Enterobacter cloacae
atgcgacttagccgcagccttgccagagaaactgactcagcagcagccctgagtattcttgtcaccacctgtggggagatgatgtcccgacgtgatggctgtgatgccttattattacgtaacatgctggcaggaaaagggattaaactggccgcaccgccacaatatcaggcggatatccatcaacttatccgccattctcagcacgttgctaatgtcttgcagcagtatgaaaccatcgataatccctccggccaaccgcttactttgcacagggaatgccaggatgcagttgagcaggctgtgcagtccggctcgttattaattattggtgaacccggagccggtaaaagcggcgtgctgaatgcgctggcacgtagcctgcgcaatcgtggggacgatgttcttgaactggcggttgatcactattcggttgagtcgctcgaaggactgagccgtgaactccggctagatcattgtctgactgaagtgcttgaagcatgggatggtacgtctcacggctggctgattattgatgcactggatgcgacccgtggggggaaaggtgaggccgtttttcgtcccctgatcgaacaggtactgaatcaaaaggggcgatggcgcgttattgcctccattcgcagtttcgatttacgtatgggggtgaagcttcgcgatctgtttaaaggacatcctccagtgtcggaacgtgccgatacgcagttttcttcggttcgccatattgttattccacgctggtcagataacgaattcagccagttactggaacaatcttcggcgctgacagcagcacttaagcagctttctgacaggcttcgcgatttagcaaaagtaccgtttaatacacgattgctggccgacctggtttcgcaatatgcggatattaatctgagtcgtatttcatcccagagcgaattattaaaactctactggcagtatcgcgttgagaaacatgggctgaacgcccggcagtgtcttaaggctctggttgatcatatgattgccactcgttcactcagggctccatccctgttgacgggcgcagatgctgatatgattgatacactctctcgtgaaggcgttgtcgtcagggaggctaacgatcgctgggtacagtttcgtcatcatctgctctttgactatgctgcggcaaaaatatcattcgatcctgacgcactcattgcgggaaccttgcgtttccctaaacagcaggctcaggggttgatgctttctcccgcactgggttttgtgctccaggaaatctgggattataacgaagatcatcacggtttctggcaagcagtaagtcatctggttaatgatggcgatggcgatcccattatccgtagttcgacaggccgaattgcggctgaatatcctgttgcacaaaacgacctgctctggctcgctaaacgtgtggcaatggacgatcagaacgttatttccacgctcagtcatctctgcggcgcgctggcaattcggtttgaagatgaaaaagaagtggctctgcttccatgggtatacctggtctctgctttaacgcctgacatcaataaagtcgcggagacgttgcgatttttgctgcatccgcttactaagcaggtgactgatcctgatctacgcaatattctgggtacagcctgccgcgccgtgctttcttatggccttaagcagagtgagccgggctattttgtcagaagtgctatacctctcgttgcagatactatcaataccgatgttgatgcatcttgccgtttactggagcaaattatttccgtcaaacgtctccagcattttggttcagaggaaattcccgtactctgttataacatcaataaaatcgcagatcgtgcgcctgagtttgtcgccagggtattcgagtttgtctacagctacgatgtcaccgaagaacgggaaactacgcttgggaacagccgaattctgcctttgagatcaaatgcccgacaggactatgaatcggctcgttattccctcggtgagtttttctcccattttctcgaacaacatcccgaacaggctgttgatgctgccgttaacgctttaaatggatacgttgcccggcgccatcctattgattcccctgtgatgcatttatccatttccgggaatgatatctctcttagggccgatcgcagccacatctgggcgtacaatcctacaggcgaacacgcgcatgacggagaagtactggttaagaaactatttcagcatttgaaaagcgcgactgaaccagacgtgttagttctcgcagaacttattcgtcaaaaagcctcactggcaatcttctgggccaggctgtttctggcggcaaatgaacgtaatgatagcctggttgattttctctggcccattgcagcgcaggaagcgtttatccggaacgaagatactcgtaaagatgctatcgatttggtcagcaaaggaattgcccggcgtccagtggaggaacggcaaatgctggagaatgcagcattccagtataatttctctggctatatttacccggaagaggcaaagaaacgactgttatatcgtcttttcaacgcgattggatcagataatctttctactgaagccgtccgggactttctgaaaaatacacagggggatgatgaaatatcaagcaataaaaggcttttcgatatttctccggtcaacgttagtacgggtataccttatgattttatcgaaggtctggatcgaaatgagccagccaatgccatgcttatcagtgctgtcaaaacagcaaaaactgcactggggttaacgacaaataatacactctcctctgaattatcgctggaagatgtttttagcgttctcgagccgcttcgtgaacaactcaatgctgcaaatattcatacctatgtgcgcacaaccgcagaggatgttattgttcgggcctgcgctgcggctgttgaacagaaattattaccacctgccaatgacaaccaggtagatgaactgacccctcattttttggacttattgcatatgacttctcgcgcaatatctccaactgtcaacgaagataccgaggataattttgccaacagcgttagctggggctctccttcaccgaggattgatgctgcacgaatttttctggatgtaattcctttacgtcccgatctgtatgatcgactgaaacctgatatcgaaaggatgttgattgaccctcacccggccgttcgccttcaggcatcaacacgcctgttaaggttgtgggatattgctccggatagcgtatggcattacctgaatgaacgcgtggagcaggaaatcaataccggcataatagagcatatggttggggatggaattagacgtctgctatataccgacccgacgcgttcttcctgtctcatccagaaactgctgggacgttttagtaacgatcctgaacgtcagcaccgtattcgcaagatagttagcatcgatctggcaattctctggggagtccatgaaatcagggaagcatatgatattcttcaatgctggattgtcgatcccactatttatagccatgaacttaaacaaattttatttacattaagggatggattcgttcttggctttgccgaacagagtacaccgaaggacattggaatcagacgacgggcgttagatatagcctatagcattattgatgctgccggaaaaaaactggaagagtcttcaccccgcaccgatctgacagagattgaactggaagacgtaagacgctgttttgcaattatagacggagcatgtctgcaacttcgctttgtttgtgaagggaaacataatcctgagaaaccattagaaaaagaagaacttaagagatttctaaacgaaactgaactgcacatgcggcgcattggtgattgcagcacgccacacactatttacaaccttctggaactgctggaaacgcttgttcctgtcgatcctgcaaaatgttttgatctaatggcccatgcattacgtcacggaacaaggtttggtttccagaacgaacatatgggaatggaacagctggtaaaaatgatgggggtgtttcttgccgactataaaatcatttttgaagaagaacaccgacgtacctgtttgatagaaagtctggatatttttatggatgcaggctggccatctgccaggcgtttgctttataggttgccggagttgattcagtga

SEQ ID NO: 160935 - DNA, 276 bp, Enterobacter cloacae
atgggcatttcagtccgggctttgctgcgcaaaaacgtcgagccttatgaagaactggggcttgctgaagataagtttactgacggtgagttaatcgattttatgcttcagtatccgatcctgattaaccgtccgattgtggtgacaccgctgggaacgcgcctttgccgcccttccgaagtggtgctggatattcttccggatgcgcaaaaaggcgcatttgctaaggaagacggcgagaaagtcgttgatgaaacaggtaagcgattgaaataa

SEQ ID NO: 160936 - DNA, 192 bp, Enterobacter cloacae
atgattgctgtcgtaggtgacagcgctaacgtcgcttctgttgcgcttcatatccgcacaggatttactgaaataggcacattaaaagacattggtttcaaacatggccgctggcttgacacggttttgctgcaaatgaaacttggtgaagggaatcgtactctgccagaagattcagatcttatgctctga

SEQ ID NO: 160937 - DNA, 270 bp, Enterobacter cloacae
atggccgcgatagcgtttagcctgaataagatagcgatattttcctattattacctggccgtcaatgcctccatcgccggtatagcgtttgtttctgatggttctgaagccatgcgcttcaaatccttccagcaacagttcttcaaacacaaaaggatcaattttcctcaggtagttaattttttgtgggaagcccggcaacgtctttatgcgctccagcacccgccgcgcactttgctgcttccttttgtgtcgtcggttgcgtactga

SEQ ID NO: 160938 - DNA, 621 bp, Enterobacter cloacae
atgatggttttactttatattatcttttgtgaaattgacatcgtgtcaccagggcagggtgtgataactggaggaaatgataaagtcgttattaaaagcccaagctccgggtttattaatagctttaacttgcaagagggagatcaaattgaaaaagggacggttttgttttcttataccaatcttgattatacttataaggggataacgcttaaagaccttattggtttcaataacaagaagataaaatttttacagcaagatagtaagctattggaaagcttactgtctgcacctactattcctatcgacattgatagggagactacgtcagaatttggatctcttagttattattccttcagagaggaaaatgatgctctacagatggaagaacaaagtttacaagagaaggagaaacttttgaatgaggaggttaaactacgtgaaaaacagatagctaatcttcaacgaaaagataatttgttacgaaaaggtggggcaagtgatattgatatattgactaattctgcggatattgaacgtcaaaaaacagatctaattagcgcactggatgaagagagagaattaatggctacgaagctaagtcgaacatcctaa

SEQ ID NO: 160939 - DNA, 1173 bp, Enterobacter cloacae
atgaaaggaatgcagaagatcaaaagaggtaagagcttctcaggtgtggttctctatgtgttaaagccaggctcacaccatagaaccgttccagaagtaattggtggcaacatgacaggtgattgctcacaagagttaatcgacgaatttaaccttacgaaagagcttcgctcagatgtggcaaaacctgtttggcacaattcacttcgattaccccagggagaatctcttaccaacgaacaatggaaacgaattgctgacgattacatgaagcgaatggggttcggtgatacacacctccgttgctatgttcttcatgatgatcaggctggtcagcacatacacattattgcaagtcgcatagatctcaatggcgggaagctctacttgggaaggaacgaaaacctcatcagcacccgcataatcagtgaactcgaattcgctcatggtctgacagtgaccaggacagcctcttcaattgcaccaaagcaaccgaagcggaagagaatctctcgcaacgaacagatgctatcagaacgaactggtgttccctgccccaagaagtcccttcaacagatcatagataaaagtttggcagatacacctgatcttttaacgtttatcaagaggctggaagaagccgaagtcggctggacagcgaatgtcgcttctaccgggaaaatgaacgggttctcattctcataccgcgatatagctttcaaagcttcgcaattgggtaagggctactcttgggcaaatcttcaaaagcaacttaactacaatcctgaccacttagaagctatacgagcgaccaagaaggctatccctgctcctgctcctgctcctgctcctgctcctgctcctgctcctgctcctgctcctgcaaccattttaaaaaccactgagagaaaggaaagtatcagtgaaaaaattgctgaactcgaactgcgactcagaaaagacagacgaaacgagatcgttgagaagattctccaaaagaatgcggttaaccagcaaaagcatctcaggcttatcggctggattccatttctaagaaggctcgcagagcttctccgaagctatggtaagagcattcttcacaaaacctacacaaacttctcaaaaatccatgcaatgcaacctctaaacaaggcgagaaaaattcgtttatag

SEQ ID NO: 160940 - DNA, 843 bp, Enterobacter cloacae
atgtatagcgactttgaagctgaactgaaaaataaaattctgccactggcaaggcaaggtgatcgagatgcaattgagttaaatgaagcattacgtcaccgggacagttttaccgatcctcagtcatatataaagcgtcttaaacgcaacgtgattattaagaaaaatgcttaccttagcgactgtgtaagccatttttatctggagcgtactgccgattggaaaagtgtaatactggctaaaaccttagatggttatggattaacagatatttcagctggagcaaatccatacaaaccggaatattgtttaccccaatatcatgaagccatggctgaagagtcatccggaactgaacagcgtatttttgcgaagattctgggattagatgccaagcctttacaacaatacatccccattccttcattgatgccacttctaattggcaatattggtgaatggcaattacatcttgtgctccaggaaatgaatattacgcccattccatcacaagagctatcacactatctggatagtcattgttatgagttgtttgatgtgtattgcattaacaagaaccgaattgttgcaatcgatgtaaaaaactggcgaatgcaaggaaataaccgtcaattagcgaaaaaaatgcataataactcattgggaaaagtcagtgagttgcagaaaatagttgcagcaaaaacacagtttgatggtgttgacgtcgtttatcttaatacccgatatgctttaaacagcctcaacattcgtgccgaacactctaaccataaaggcatctgctattataacctttttaaaaatatttcatcttatgaaacatag

SEQ ID NO: 160941 - DNA, 387 bp, Enterobacter cloacae
atgaataaatttgttgttgcctccttttttattgcgtcatttttaattactggctgttctacatcaggcaaccaaaaaataaaaaatgaaactgctcaaagtttacaatcaaaaatcattaaaaacaaaacaactaagacggagctactcgctcaacttggtgagcctgatacaagaactacactcgacagtggcaacgaacagtggagatactttatgtataacaatcagttcaatgcaacaacttttattccagttgtagggctgtttactggtggttcacagacacaatctaaaacacttgatattgagtttaatggtcaaacagtcagtaaatggactttatcttcggagaataacaactcgaagacaggcattcttaattaa

SEQ ID NO: 160942 - DNA, 210 bp, Enterobacter cloacae
atgccagttggcgactattttgccttcacggatttgataaatatccgtggcgataaaatctattttttgcccctgtcctttcagtttgccaaatgtgcctgtgaagcttccgcgaaaatgcagatgccttatggcacctcaattgagcagaccagcgccgcaacggcgaaaatcgaatacgttgatccttatcggacagattacgcataa

SEQ ID NO: 160943 - DNA, 786 bp, Enterobacter cloacae
atgccgatcctgaccccgatgaagcagcaaatcacgctgggggatgtggcggacatacgtgtcgtttccggcccgacgatgcttaaaacggaaaatgcccgaccaaccagctggatctatattgatgcccgcggcagggatatggtgtcggtggtcaatgaccttaagacggccatcagccagaacgtgaagctgagaccgggaaccagcgtgtcattctccggtcagtttgagctgctggaacacgccaataagaaactgaagctgatggtgccgatgacggtaatgattattttcattctgctgtatctggcattccgccgcgttgatgaagccttgctgatcctgatgagtctgccgttcgctctggtcggggggatctggttcctgtactggcagggcttccatatgtctgtcgccaccggcaccgggtttattgccctggccggggtggccgccgagtttggcgtggtgatgctgatgtatctgcgccatgccatcgaagcgaacccggccttatcccgacgggagacattcaccgcacaagcgttggatgacgccctgtaccatggcgcggttctgcgtgtccgacccaaggcgatgacggtggcggttattattgcgggtctgctgcccatactctggggaaccggcacggggtcagaagttatgagtcggatcgccgcgccgatgattggcgggatgataacagcgccgctgctgtcgctgtttatcattccggcggcgtataaacttatctggttgcgcaggtataaaaagcaataa

SEQ ID NO: 160944 - DNA, 591 bp, Enterobacter cloacae
atgaaaattaagcttttggttgccattttttcaatgggagtggttattaatgcttatgcaaaaaacattgatttttgtaaaacgatagagttcgataccggagattttaattacgcccccattgaacaagcgtcttctgattctgaatgtcgttataaaccggttccaatacagtataaagggataaaagatatattcaatcttacctcagaggcaaaccccacaggtggagcaagctatctcagatgggatgaatcaaataaaacgtatagctatgatgaagatgaattaaaaagtacaatacatgatattgcaaagcaaagtggcaacaataaatacattgaagcattaaatccaattgtaaaaataaaattcactccaaagggtaaaggaggtgtggttgtttctgatattgtttttgaggataaaaaaagaaaaccgataagcattgttagggatatatatttttactcgcaagatgattacgcagcagtatatagttccgctctaataaaatactctcagaaaaatgaaatctgttttctagaaaaagttgaatcagtttttgaatcaatgaatataaattggtga

SEQ ID NO: 160945 - DNA, 141 bp, Enterobacter cloacae
atgtccttcatgattggcatgtacaacagtgaaacgaatgtcgtgccggaggcatcccgcggggaagccataaatagggtgccgactaccggtatcgaacggatgacctacggattacacgtcagttgctctacctactga

SEQ ID NO: 160946 - DNA, 228 bp, Enterobacter cloacae
atgcctcaaaaaggacgcacagggctgaacgatgattcattcatcgacatgctatacatgacaaacgactcaggattttcatcccgctacttctacaagctcataaagagcggggaattctttgccccgataaagctcggcagaagttcgagatggttacctagagattattctgaatggaaagccaagcacattgacaaaagagacaccagccagcagttcacgtag

SEQ ID NO: 160947 - DNA, 1332 bp, Enterobacter cloacae
atgtccgcaggaacactgacactgactaataactcagcagcagtaaccggcagtggcaccgcatttaccaccgaactggccgccggagattttattgttgtgaccgtcggcggtattccctacacgctggcgatcaaaacagtgaacagtaatacctcactgacgctggttagtaactataccggacccactcaggcaggggcggcatggtatgccgtaccacgcgtggcgatgaacctggtcactgcggcgctggtggcccagagcgcggaagccctgcgtggtctcaattacgacaaacaaaactggcagagtattttcagcggaacaggaaacgttacggtgaccctgccagacggcagcagctttaccggacctgcctggagtgggataaccaattcgctcgccggaaagctggataaatcacagaatctgaatgatgttgcagacaaagcaaccgccagaacaaacctcagtttgggaagtgctgcgacggcaacggttcagacatctgtaacagatgctacttcagggcgtttgatgtctgtcggtgcatttggatggggattagggaatacctctggtggctccccgatttctggtggcataaactatttttcagaacctaccggattttatcaaacaaccgccgatactacaggggattttccggtcgatacttctaagtacggccagtttattaggtttcgtggaagcaataactctgtcacgcaaatatacgctactggattgggcgtggctaaaggcggtcgtatctggtatcgcacgcaggcagaaaatgtggccacgccgggttggcaggaattttacaccacctataacacgacaaaagccagtgacggaacacttaaggctgcctccccagttgcccgtattgtgaaaagtcaggaggaatgtcagcgcactgatatcgatgaaccaggctttgtctggtgcggatgtggtacggcgaacgccgaggcggagggaataaccctttcccgcctcaatgttggggtttacgtgctcaccggttcggcaggcctggcgtctgaggggtggcagatactgccgccgatggaccccggcggcatgggtgagttgggtgtggttgaggcagagcaaactgaaagcggcggactgactatccgcctgtttaagcgcaaatacatactgggcgaagaaggtgagatcatcaaaacgaaaggggaaccgatggacgtacctgcgaatagttggattgatgcccgactggatatgccagagaacagcatctggaataagagccagaaagaagcaagtgaggaggctttacaggaacctgcttcgtaa

SEQ ID NO: 160948 - DNA, 519 bp, Enterobacter cloacae
atggacaaaacaagaaaatacgatagagccctgcagttagaaattctcaacgctcttatagattgcgcccccggctcactcgacaacgttcaggagcgtgaacttcaggagaaatttgacagctacgagcacttcgtagcatgcatgctttatcttgaaatgcatggtttggttagtacaccctttattaaaagtcacccaatgggcagcggaatagaatacatttttaattcagatagttgcgccatcactgaaaaaggtatcgacttccttttagatgatggtggattaggtgcgattctaaaagtacaaacagttcgacttcataacgacactataatcgcgcttgaggacataattcgtgttgcaaatatgcctgaagatcagaagaagggattgatttcaaaacttcgagagcttccggcagacgccataaaacatttgaccctacaactgttatctcagggggttcagaatctgccccgcgcacttcaactaattcaaacagccctccagtag

SEQ ID NO: 160949 - DNA, 279 bp, Enterobacter cloacae
atgcatgacgttatgttgtttggtggaggatactttggtgagatttggcagacagatggtctctctggtcagcttgaacacttcgaaagacctgacatgcactttgtggatggggtaagtgatactgaagactttttgtttgtatcatttatgatttcggtgcaaccgatccgagggaaaaactatctaattgcctatacagacaagagaccttcaaacgaagaaattgaatgggcgtttttccatggtgacaggaaaccggagccgataactagctaa

SEQ ID NO: 160950 - DNA, 204 bp, Enterobacter cloacae
atgactaaaatttatgcaaaaatcgtaagccatccaagcggtaatttgacatttatggttaagcagataggtgcgaccatgtggacagataagataatagggcaaatatctaccccagcagacaatttcgatttcgtgtctcgcgttcaggcagatttgcaatccttttcaagggatgggatagaagtaatctggttgccataa

SEQ ID NO: 160951 - DNA, 279 bp, Enterobacter cloacae
atgaaaaacgaactgataactgtgtggcaccgggtcacattcatggttacagagggcggcgatcgccatgaatactcgactttcatcgagggaagcagtgaaacaggcgcagctgttgctgcggcagtcagtatctgcgaaggccgtgacgggttaagtaacccaactttcaaatctatccgtatcgcgaccaatggcgaggccgaatcgcttgatgcagaactcgatgcaattgccgaacgggaagagaaaaaactggagggcgaaggcaatgaataa

SEQ ID NO: 160952 - DNA, 765 bp, Enterobacter cloacae
atgaataatcagctgatgacattcaactctgtggatctcggtatttctctgagcgggatgctttaccgcggtaagcctgtttttgttgcggtagaggtggctattgcactgggctatgagcggccttttgacgccatctccactcactgtaagtcattgattaaattaaaacacggtgaaatggcgagtttaggccttgaaccaaaaccgaatggtatcagcttaattggtgaacctgatgtgtaccgtctcatcctaaaaagccagcttccatcggctgagcgagttcaggattgggtgtgcgaagacgttttgccatctatccgtgaaactggcggctatggtagtcaacgcccgaaatcccaagctgaaatcattgccgagatggcgcttctgaatgttgagcaggagcgccgccttaatcacgtagaagataaagtcgaggaagtcacggagactatcgaaaatatcaagcgtggatctgtacctgctggttggtctggttactcagtcctgaagatcaaatccggcatgacaccacctaagtgcaaaacgctggtcaaggcttatggggttcctacagacacaatcaccatgttaactcctgacgggcagcctcgtcctatggctatcgtactcgatgctgaatttatggcggccttccgtcacatgatgtctgaggcagagccacgcggcacacgttggtatcaccctaagatgggccttttccaggctatcgggtgggaggcgcacagtggaaaataa

SEQ ID NO: 160953 - DNA, 423 bp, Enterobacter cloacae
gtggaaaataaagcaatcgtaccggctggctctgttgagctggcccaccagcaagcactgatatgggtatgcgatgcttacctttttcatctggtcagcatgcatcgacgcccagtgtaccgccatcagtacggcgatatttcgctagaacagccagcgcttcagggattcatcgactcatatcttgaagacaaggggtggaatttagaacgtcgccgggcgcattacatcaacatgctcgatcttatcagccatatggaccgtaaaaactcggatttcattgactggggaacggtgccatcactaacaactcgcgggctgcgctggatgaatgcctgtttctcaaggctgggagaaatggttaacgcctgtggtggatgggataatgttgaaacattggctgacaggaaggcgaacgaataa

SEQ ID NO: 160954 - DNA, 597 bp, Enterobacter cloacae
atgactaaattttatgccccttccggggagggactcgctcaacctaaaatcggcctgcatggcatttctacgccaaccatgagtagtctggaaatggtcgattacattaatgccgaacgtcagttgaaagcagaagaggaggggatgtcattcccatgcaagaaataccgcaagcttcgccacgacagttttatggcgaaagtgccaaaagtcttgggggaaactcaatctccaaaattttttggagattacattgatggtaaagggcgagcccaatcctgctacaacttccccaaacgcgaggcctgcttgatggcaatgagttatagctatgagttgcaggccaaggtttacgactacatggaagagttagatcgccaggctcatggctaccttaattactcagtgcaagaactgcaggcaattgtagcgggagctcgtaaggtatcagatgaagactcaagtgacgctggccgccgtttgcgtaaacgtcaggacgatctggtactgctcgagaaagcggaatcgctggttgaaagcctcagtcagttgaagctcgattttatcggtagcgaacgtgatagggagattcattaa

SEQ ID NO: 160955 - DNA, 198 bp, Enterobacter cloacae
atgtctcactcattaattcgcctttccgaagttcaacgtagaaccggctatagcaaggcctggctctaccgcctgatgagtcagggtaaattcccgtcttccatcaaaattggctcgcgctccattgccttcgttgaaagtgaagttgatgactggattaaccagcgcatcgaagactcacgtaaggaggttgcctga

SEQ ID NO: 160956 - DNA, 783 bp, Enterobacter cloacae
atgggcttgtttcaacaaataaacaatgaaaaaaatgaactaatacattttgaaactttattatcagaaatagccaaacaagaaaatattagtttctcagatgcttgtgcaattatagctagggaagcatattggcatatggatgacatcccatttggtgagccgttttatttatatgattatgatgtcatcagtggctttaagaaaagtgatggtttttcaaaacaatctttaagtttcttaaaggatatggctcttggtggggtgttttctgaggaatctagccctgatttgaaaggtgtttattctagatgtgatggggggaatggatggtatcgtgaattttattttagagggacagagattactatggccttcattgatagtaatgtaaatattccgccatgtttagaaaaatttcgtgtacgtgccgataaattgctaaaggataagaaagaccgtttagcaaagaaaaaagaaaaggaaggccaaatagtagtatcacgtgatgaacttgaaaaagagatcgagctcttgcgtgctgagataacaagacttaagggcgaactaccttcacaattgggtgagtttagagacgacgatcctctcttgatcgcaattcaacttcgtaattctgagtggtcaaactatgacgtggatgaccgcaagactataccatcacaggatgcgctagttgcccagctaaagttggaatatgcaaacatgcctgatgctcaggctcgtgcaatcgaaaaggtagcatgccctattaagagaaaatga

SEQ ID NO: 160957 - DNA, 1011 bp, Enterobacter cloacae
atgaaagctgaaaagctttcgcaacttggtttggctgaacatgaaataaagaggcttcatgctggggagcgacctcctatttcgatgcaaacattgataaatttactttggcgcaaccgcagaacctgttgcgtttgtcgtaagccgaataagtcaattattgttcatcacattgaagaatggtctgcgtcacgagatcacacaataaaaaatcttgctgtactttgcctggattgtcatgatttagctcacacaaaaaagtcattaagtcaaaatctcactcctaaagaacttagagagaataaaaaaagatgggaagttatcgttagcaaacaggatacccagacactattcaatctaaaaacatcacgtgattctgctcgttgggactggataaattgtcgtcgcgtttttgaactttttaacaaactaaatgtaaccataaccaacttaagtgaatttaaaagccttatgaaatctgggtttattgatgagcgaggttttataacggatgatttaaaatgggatgtaggtaagtccaaacggaattactttcttgattttggtggctcttttaatatttcgagttaccttgattctattcttgaagtggtcttaaagagcacgcctgttattgatattacatcaattcttaataaaagaaatgagctcaaagcacttgtagatatggggagttttatttcattgcaagcaccgttctattttaaagtaatagaaaaagggtgctctgagaatgaagaaataaagcaagcatattaccgagggtataatctaagggtagagtttacttttgaatcatggtactgtacaagctctagtgcaaaatacggtgctatgtcagggcgtcatgtgcagactgtatttgggtttgtgcgcgatgtatttatgtgtgaagatgaacttgttatctcactctcttgtctcggcgcaggtacaggattcaaaagacatgagaatagaataaaatccgactttgatagatactattaa

SEQ ID NO: 160958 - DNA, 696 bp, Enterobacter cloacae
gtggctgcaggtaacgacagtagattttctacggtagacggaatggccggtgggaaaatcagttcatctgtcgtcgtgaatgccggttattccgttggtgtagggccacgtacacagtcagaagataattcagcatatctgctggcggtgtccggtagctcacccagtggtcaatatgtgaattttatacattactcctggtatgcaggctttgtcagaacgggcatacgccgtggcggtagccaggacgttaaccgttattcaatttcgatggcggtcaatgataccggcggaactaccagagagtgggcatttaatgccgatgggactgcaaatggatcaggagcatggaccactggttcagacgaacgccataaattcgacttagctgaagttagcggagcgcttgagaaaattgccgcgctgcgctgtgtgacttattcaaaatgggatagcgaggtgcgtcacgttggccttattgctcaggacgttggagctatttgcccggaagccatcagtatatctacagaaccagttcgcttctctggaaatcgtgaaattgatgattttcagttcctcgatatcagtggtttcactgcagcttatgcttttcaggcgatcaaagagctgcatgaaatggtgaataaacaggcagcagaaattgaggaaattaaaggactcatcaactcgcattag

SEQ ID NO: 160959 - DNA, 549 bp, Enterobacter cloacae
gtgatcgaaagttatattaatcacgagaatttagaagtagcgaggcagtctttagaagttgcatctgcttcagcaggatggagtttctcctcaatgtgggcaatgtgggtcagtgccatcggtgcacttgctactactggtgttgctggttttgctttgtcttcgtggaagagtcaagaaaaagcaaaagtaaaaatggaatttaaaaaagcaatactcaggcttaaccatgcaatctctaccatgcctagtaaatggaattttgtacatataaatgcagctagatccttattaggactgggcgttgaggtgcaggaaagtaatagtcatattttaagcattctcgacaaatataatgaaactattactgcctggagaaatgtttcggactgttggattatgtgcgagtccactttttctaatactgacatacacgcaaaattcacagagctagagcaactatatagtgaatatatcgaagggaacaaggaaaagaataatattcaatcgaagttaaaagaaatattagatactaaatttatattctaa

SEQ ID NO: 160960 - DNA, 549 bp, Enterobacter cloacae
atgttgggggatagaccagtgaaacttaatcttttccaagtcgcgattctcatcattgcttgcctgtcagtcgcactcgttaaaagctgttcagacgccagcagcttgcagagtgataacgacgttctgagaagtgacaacactttgcaggggcaggtgatcgccactcaggcattcaacttcaatcggttcaatcaggttgcagagcatgccaacaggcttaactccatgattgacaccagcaccgaagaaaccgtaatcgaataccgggagattctccgacgtgaaaaaacctgtgatttgcctgttcctgctgacattgctggtgggctgctcgaatacgcgtaccgtttacgttccagcgccatgcacgccgataccgacggaactgacgcagccgatgatcgtgccgttaccaccccttcgatgacatattgccaagccgtactgtggattaaaccgctattatcaactattgagaaaggtaatcataatttggcaggtgttcggcaaatagagaccgaacgtcagaaaagtagtttgcgataa

SEQ ID NO: 160961 - DNA, 519 bp, Enterobacter cloacae
atgaatcgtttagcaaggctactacttactgcgagttccatagctccagtttgtgtgacgttgattttcataggaattatgaagcacaacacatggcttatatacacaagtcttgttacggcggttgtaagttggatactttgtctgactttagtaactgtggccgaaaaaaactttgaaattcttagcaagaatattgactccgtgtcaccggcgaacaaagaagtaactaattactttcttagctatctgttccctttacttgggacggattcgattgcaaccgtaaaagagtatgctatattcttttatgtatcacttcttttatatatatccttttccgaaaactacaacttcaatcctgtgttagctttacatgggtataaattttatgaagctgaagatgatacgggggtgggtttcgtgttaatttccaaagaaattatcacgaatatcaagggtataaattttaaagttgtcaaactgactgaacacacattcctacatgtaaaaggataa

SEQ ID NO: 160962 - DNA, 888 bp, Enterobacter cloacae
atgccgttatttgccattatggataatcaaagcgctataaaaatagtgaggataaaactagacagggctgcttcgactatgattaacgaaacatttaatcagcaaaggcaatattttgaagcgcatcatgactcagtaattccattttacgctggatataaccctagctacaatgagagctttgagttagagaattttcatgattctaatttgcttatggatgcagtaaggagaaatactgcaatccccgagtggaaaccagaagaaataaatattgaccacattaaaggtttatttgtaggtgttggtgaacaaaatgctgaaaactgcattgccttacaaacctttaataaaaagcaaatattagacacatctaaatcttttgtaatgtccatcgtaggggcagcaaatacttttagcaaagctgaaaaggttggctttaatattgatgataaattagtcgccatcatcaaaaatgataaaatttatttccgaagctttttcaagcttcgcagtatctttgacatgactgtgtattttcaagaggctacagatcaagaccttgcattattttccagcaatgccgctttttctatacctgaggggctagatttgagcgttatcgcagacaccccaataagaaataagataactttaataaataaaagcggcattttagacgctgcattactgccggtattgaaagctgcagcagaaaaaattggattccctttaaaaatagacaataccggtggccatgaaagaattgaaatgccccaaacaaagagggaaattaaagctctattggactttttggatgaggatatctttacctcagaaattagccagaaggtctttaagagtaattcaaaaagaccttatgcatga

SEQ ID NO: 160963 - DNA, 324 bp, Enterobacter cloacae
atgggttttccatcaccagcagcaaattacacagagcaggcacttagcattaccagcatctgtggctatgacggtaattgccacacaagcgaaacgtcgactggttacgcgatcgctaacgttgccaaaaaaccttctatggttaactcggtcttaatttcgttctgcggaaaaatggactttgtgacagtccagggaaaagcactcatcacacaggagggggaggccattgaaggtgattcacaggacgatgcgaaggtaatcggggttgccacattccttctaaaccgtgtttcagagactgataatttaccggttatttag

SEQ ID NO: 160964 - DNA, 909 bp, Enterobacter cloacae
atgggtaaagtgactgcactcattgctagtgagattgaaaaacgtttggtttttcttttaaaaaaagctgatgtagatggaataaatactaaatccccatctatcaatgatggtttaaaaatgactcttatcagagatcaagcccttgaagttaatataagttctgaaaagatatatataaatgacaccactggtaaatcggtatatgaagcattgctttatgattatgcaatgggtcattacagacgtactaaacaaaatgaaaatctttcccaattaattaatggtaatccaaactgcaatccggtttggccacttgttaccgcatattattgtgcttttttttgcgcgattgacattggtagaatttttaacaaaataaatatcaactttgataaagaccaaattgatgagcttaacaggcgttcaagaaaaaatgacggcacaatttcatctcagcgaggttttcttggtgaggtggatgagaaaaataatattatctccttgagctctaacaatgaaaaaccacatgcgtacgcatggtttcaaattgagagtacaattttgaatcttgcttataaaaataaaaattggaatgagttaaagacaatgagagagataataaagagttcaaggtataataataaaggaaataaatggcttaatttaagtgataccagaaataaatggaattatactgatcctttattgtttcatgataaaggccagactatagggagtgatttcatgaaagttataaacaatcaattaaatgcggaagattggttggcatcggctaaaactaagaccgatgatatgagtaatgcaacttcaatcgcatgtttctataagatactttatgaggcgacaaccaaagcttatgataatatactggctgatgttagttag

SEQ ID NO: 160965 - DNA, 996 bp, Enterobacter cloacae
atgagcaaaattgtaaccacagctattgatctttctaaaggaaatattaaattctttttaacctcattaactacaaatgaattaatgagtacatgtaaaatctctcgtgtcaatgaaaaaactgagcagggatttcaaaggacgctggacacggctcgagccagtaaaatagcaaaatatctcaaagatggaaaggttatcccaggggcattaattttatcctgtcaaaaagatgatgatataagttatgatgaaaaaaaccaaagattaattatcgaaggttctgctgggctgttcatggttattgatggtcaacataggctttatggcagttatatggcatatgagactgacaataaaactagaattcctgtatgtatcctgtcaggtttaaatcgtcaagaggaaattgaatactttatagatattaactctaatcaaaaaggtgttcctaaaacattaaggattgaattaacaaaatatcttgtggaagagggatcgcttgaaggtattagattgaaattattcgaagatttgagtgaccatccagactcccctcttttaggaagattgagtgcttcacaaaaaggcagagggtatattactcatgttcctttccaggctgcattagatagggtgctgcaaatttcgcctctaaaagatttgccatatgatgataaactcgtgcttattaaaaattatttatatggtgttaaagagaatcttgttgaagttgggaatcaagacaagttattccaagcaaccttcttccaagctatattcagagtttttgaacaggcatgttctgtagcaataacagttggctcgaattataaaaaagaaacctttacatccttgttcaatgtgcttcagaaaatcaactatgaattgcattctggtactaacgaccaagcgattacagctttagaaaaagatgtttcagctctattggatattgaagtgaaacttaaaatttcaaagagggatcttttctaa

SEQ ID NO: 160966 - DNA, 1908 bp, Enterobacter cloacae
atgtctgttgagttaaaagtatttggtggtgcttacttcccaaaagataaagcattaaaaaaacaccccgatttaaaaccacttgcaaccgcagttaatgcggccacaaaagccatcgctgaggccgttattttcggtaagcttgctgctgaacatcctgaacatattgatgattacttcaaggtgaaaatctgggagcaccgcgaaggtcttccctgccctgattttgacgtcttctcacctgagttttttgatagtgtggccgtatggaatgtgaatgctggtgaaccagccgcggcgccacagccagacaccgacgaaagcgatggtatctctgaggtaaaaacgttgtctgtcagcggtttttccacctgctttcaggctgcagcactggctctgtttggcccgataacagaagttgacgccgcgcaatacaatcaaattgttgatctctctgttgacacagaaagcacgccagaacgtgagaacatggaggcaattcatcatctgccgcggatcctttctcttcacccagagaaacaggttgagttattggcatacgtggcacagaagttaaagcccacagataaatggccggaacgctcaaaagttatggagaagtggctggataccccggtcgataaacgcccacaggtcaacgtcccgcaaaatgaagatgaagaagtaattcgcactgactcaggcgcacgccttagaactggggttcctacagatcgcaatttcaagcacagcaaagacagtctgggtaacgaaatcgctttaggcctgctggcgcgtgaacatgaattcaacatctacacagtcgacatgccgttatatcagcaggctgagaagatccgactgtcaggcaccgatgaagaattcaacgcatggtaccgcatgttcatttccacaccaggtgggttggacttctcgcgagcaatcaatattgccgtggttaaaacggctccagaggacctttggaaagacccggttaaacaccgcgagtatttcaaccgcgtcatgaccgaatcagatcattcgaaacctgatccgctgatcgtcgatattgcatgtggccgctcctcttctcctatgcctcaaacgattaaagagaatgttactcatgatgaaaccaaatcgactgtaccgggcgaaactctgccaccagcagtttgccctggcaaagctgcgcaactcgacaaagaacttaacgaggcattcgctcagagcccagcacctgaacagcaagcagatgatcaaccgcgggtggagaacctgggcggcggcgtcttctctgtcgatgctctgatgaatacagccccctcaaatgagggcgaaaaacaggaagtacaacctgcgataaatgatcgagagattgaaatcgccaatgcattaaacgagctgatgtccgggcgcacaaacattggtgaccaagatgatatcgaaaatctcatcgccaccacgggtaaagatatcgagaaccttttcccgttactgattgcagatatcaccgcgactgaattttgtctgtcgcctgatttcagtgatgaagaagtacaggatgttgccactacgattcttgaacagtggtcagacgatatcagcgttcgccagaaaatagcacttgatgcgatcgtggaataccgccgcccggcaccaccaaaatctgtcgtgctcgatccgccagccgttactgcaaaaccgattgccgccccagaaccagcaactgtaacaaacgcgccgcattcgcctgttacctacctgcaacagctgaccattgctgccctgcagggcttatgttccaacccagcatattgcaatcagtatgaggaattaccggctatggccgccgggcttgcccgcagcgttatcaatcatcaggaaggctccagtgcgtctgattaa

SEQ ID NO: 160967 - DNA, 423 bp, Enterobacter cloacae
atgagttatatatattctgctgaaaacggggccttttataataatgaactggaggccgattatcgttccgccgaaacgtggccggataattatgtcaacgtgctcgatgaagactatgtgtcgctgatggaggggcagtcagacgggaaaataattatttcagataaaaatggctatcccgtcttagcgaaacctcccacaccaacctatgaagagcgcgtgagccaggcaatacagcaaaaaaacgtcttaatgaaggcggcgagtgactttattactccgcttgaggatgcggccgaactcggtatagctaccgtcgaagaggcagccgcgctacaggattggaagcgatatcgggtcatgcttaaccgggtggatgtgagaaccgccccagatattcaatggccagaacgcccagcctga

SEQ ID NO: 160968 - DNA, 1131 bp, Enterobacter cloacae
atgacctatcaactccacgtcgggcgttgcgaggatgtcctgaaaacactgccggataactctgttgacgcaatcgttacggatccaccgtacgggctgagcttcatgaaccacaaatgggattatgatgtccccaccgtagagcagtggcaggaatgcctgcgcgttctcaagcctggcggacacattctggcgttcggcggatcgcgaacctatcaccgacttgtggttaacgttgaggatgccggtttcgaaatcagggaccaaatcctctggatttacggcagcggcttccccaagtcgcataaccttgatggtgattttgatggctggggaactgctctaaagcctgctcacgaacctatcgtcatggctcgcaagccattcaaaaaaacggtgtcagcgaacatggccgagcatggtaccggtgcaatcaatatcgattcctgtcgcatccatactgacgaagcactaaatggaggtgctggcggtcttctttcgcatcagcgcgacggcacagaacctgttgctgattacgagcaggcaccagaggggcgctggccggcaaacatcattcacgacggaagtgatgttgtcgtgtcagcgttcccggatgcgaaaggccagcaaggagcgcttaacggcaatgagccaagctctaaaatgggtgcggcgaattgctacgggcaaatggaccggcggcacgaatcaactccacgtatcgatagcagcaagagcgccgccaggttcttctactgcgccaaggtcaaaccgaaagagcgcgatgaaggcctcgagaggttcattgctacttcagccagcgacatgaccggcggacgtaaagaaggaagcgtcggcattaacgatccgcgcgccggtgccgggcgtaccaatggagcgaagaacaaccaccctaccgttaagccaatcgccctgatgagctatctctgcaggctgattactccgcctggcggtaccgtgcttgatccgtggatgggaagcgggagcacaggccgggcagctatagaggaagggtttaacttcatcggcatcgacctgaacccggattacgtaaccatcgcttctgcgcgaattgctcactcattcaaaaagacgacggaggctgcttaa

SEQ ID NO: 160969 - DNA, 186 bp, Enterobacter cloacae
atggtcacggtaacccgggaatcactggccgaaaagattaagcgtctcgagtcactcggcaacgctgaatacgcattagggttaaccctgaacgaggaatatcagcttgcagcgtatcgcatgctcctcaagtatctatccggcgagggggggattgaagccaaaatggagagcagcaatggctaa

SEQ ID NO: 160970 - DNA, 603 bp, Enterobacter cloacae
atgatgcccgcgacaccaaaaacccacaaacgcaaatcaacgcaatataagcctcttacagcgatgcaggaggcttactgccagtcctacattaagacacctgaaaatcagtctcaggcggcgattgacgcaggattttcgcctaatacggcagccgtcaaagccagcgtcatgatgcgcgacgaaagaatccagaaacgaatcgccgaactgatggaagagcgcaacaagcgcatgcgcgtcagcgctgattacgtgctcatgcgccttgtggagatcgaccagatggatgtgattgacattctcgacgatgaaggtggactaaagccgattagcctgtggcctaaggtctggcgaacgtcgatcagcgcagtggatataaaccgcatcaggatggcgatgaaggatgacgaggaagatatcgagtccacgctgcaaaaaatcaaatggccggacaaggtgaagaacctcgagctgattggcaagcacgtcgacgtcaacgcattcaaagagcgcctggaggtttccggcaccgtcaccatcgccgaccgcatggccgcagcgcgccgccgcgtcaaagagcaggctggtggtgaagaatga

SEQ ID NO: 160971 - DNA, 294 bp, Enterobacter cloacae
atgcaagatcatttcttcacacacattaacgagctactcgtcatggctccgcttaatgcagatgatgacagaaatctattcaagagccagcgagttgtgcttaatggccgtggtttagtacagtgggatttcatactgcatgatggcactgactggcatgttaatcatgaggctccgatgatctgtagtgaagagcaacttaaggcgtttaaagaatctatacgccgacatctaaagcgaatcatcgcagacaaaattgacaggggtaatccatcatgtcaaaacgcagactga

SEQ ID NO: 160972 - DNA, 213 bp, Enterobacter cloacae
atgtccgtgcataccgagagcattgacttgcacattccggctacccgctcgggggtaaggaacatcaaggaacccctccggaccgctgcggcacatgtgccatatgccgtactgctcacacctggaagcgcactcaccagttttgatttagcgacaaggcctcacagaaccgatatcgaagtgcgctttcatgttgtgttacctgaagggtaa

SEQ ID NO: 160973 - DNA, 2880 bp, Enterobacter cloacae
atgacggtatcaaccgtagttgaccataatgattacaccgggaacggcgttacgacatcattcccgtataccttccgcatattcaagaaaactgatctggttgtgacagttgtagacctcagcgaaaacataaccgttctggtccttgatactgactatacggtgacgaatgccggtggctataacggtggaaacgtggtgctaaccactgcgttgacgtctgggtggcaaatctcaatcgcccgcgatttggaagcaactcaggaaacagacctgagaaaccaaggtaagttttttgcagaggtgcatgaaaatgcctttgataaacttaccatgctgatccagcagtgttttagtgctctgaaacttgcattgcgcaggccatcatttttagctaactattatgatgcgatggggtactacatcagaaatttaagaaacccatcacagccacaagatgcggcaactaaaaactatgttgacacgctctcaggaacaaatttcaacagaacatttagggtgccagagtctttcgtaaatcaacttccatcagtcgccggtcgaaaaaataaagtgctggtatgcgatgatgatgggcagccaacctttgttgttccgcaaagtgggtcagcgacagatgtcatgcttcaactggcagcaaaagatggatttaagaatattggcgcatgtgaatctatggctgaactgcgctctgttgtgccagtggttgacagagagcaaatcctattacgtgggtattactccgatcgcgttggatctaaatattgcgtttatgtctgggatgctgcatcaacttctattgatgatggcgggcgtgttgttgccgctaatggagtttcaacggggcgatggatacttgttcaaggaggtaatgaatttgacgcaagattatttggtattcgcccagagatcacatactcaggaacaatgactgatagtgcagaaatgttttcaaaggctcagacaagtgtaggatctaatggtgttatccatttccctcttccggatgggtgggctagcgctcattatctaataaattccgactattcgtataactggtcacaatcatggatttcggccgatcctggggtagtgattcattgcggcgctacaaatgatgatgaggggaaaaagcctcgactaaaaggagatgtagtttttaaccaaactacaccatcatcaacaaccgattacgccaccaggcgcggtggaaatagctacgatttaaaatctgcaatatcggcagcggttgcaacttcggttagtggcatgagtgctaaaactcttccgatgaatttcactcagacggcacgtgcaattaaatacaccaatctggacgtcaactcgtctggaataagttacacgtacgacgcttccgggatgacggtacaggcagaccaaatattctggagtgatcctggagctgcgggttcgtctgcgtggcaaggggtttcattcgcgcttaaaacaggttcggagtttgaggtattactggaaaatactggtagcggtagtgctggaagtatttttgttggggctaagatgctgggtagcgcagggagcagcagcaccacgctggggatgcgtatgtccatcacagtagtaagttctgatacagacagcactaacatccagttcaccaacggaaacacaattgttaagacagtaactgtttatcacccatctgagattctcagcgctggtggtacaaacggcgtacgtgcgggggttcgtatgcttgacacccggaaaattggcctgacgttgaacggtaaattaattcacaccatgagcacttcctcaacactcgttcgcgagggcattattttgatggaccaaaatgcacgctctaccatgagaattaaatacggttatcataaagtccgaaaattcaatccttacgcgatgcctaaaattttgacgtgtgtgggtgacagcataacccgaggcgcgcgatcatcgaatgaatggccgcgtctgttagaggcctatggcgagcacatgcctggcatcggacgaatcagatcggttaccaacacatcagtttcagggtggcgtcttcgtgattttgttatcaatattgctaactataacttcaccggctccgactatgttctcattcaactgggaacaaatgactgtcagggtaatgttggtttgactcaatattacaatgatatcgttacgttcggtaataaggtgatggctgatggagcatttccagtgtttggtatattccctaaatatacgtcatcaacaattactggcggcggtaatgctcctgtaaacatgcagcaaatagcgcaataccaggctgtcctgcgctgggcgtgtgatgcgaatgggttcgctctggcattccctgacgatttctttggggaaaactacggctatcttggggcgtttaataatgctgaccggttcagtgatatgtggatgaatgacaacattcaccccaacacacgcggacaaatagctatagcagcagcctttatatccgcattgtctcgcgagctggtattgccgtgtgaggcttctatttctcatcatgctaatctgaccagcggtgtgactgcttatttagaaaccacttacggattgcctgtcattaccagaattgatgatactgtgtacataaccggcgcggtacaggggggagctgctaatacttcagtcatggcaatccctgagtttgcgctcccgcctcaccaggtctcggcgacatgcttctcccgtgatgctggttcgctgggcgtgtgtcaggtttatgctcgacctaacgggcagcttgttgtcggtgagcagtataagagcaccactgcgggctggacggagatcaatatttcgtacaaagtttaa

SEQ ID NO: 160974 - DNA, 1971 bp, Enterobacter cloacae
atgattcatgaatctttaacaactaagcttttttttgatatgtctaatgtaaaatacagagctgatatagatggacttagatctgttgctgtgcttgctgtggttgttttccatgcattcccatctcttttacctggtggctttgtaggtgttgatatattcttcatcatttctggatatttaatatccactattatctttaacaacgttaacacaagctcttttagctttgttgacttctatatacgccgcgctaacagaatatttccatctctggtattagttctgctgtcatgctgggtgtttggctggttctctttatattcagatgagtttgcccatttaggtaagttgatggctggcggtgctggctttgtggctaacatcgtcctgttgtttgaaagtggttactttgatgctgcttcagagacaaagatccttttacatttatggagccttggaattgaagagcaattctatcttatatggcctgcgctcctaatcgcagcgaaaagactgaagattaattttcttttggtcacgatattctgcatattaatttcttttatatattcagttaaaactcttccagttgaccctacccttgctttttactcaccattgtctaggttctgggagcttctgttgggcgcgctgcttgcatgggtgacgataaatcagaaaaacatttctcgaggtgaaataaataaagggtatgcgttgcaacatttggcgtcactttctggtatggctttaataattatctcgctggtgttcataagtaaaaataactttccgggggttatggctatcgggccaactttcggagcaatgctaattataggctctggtccgtattctctattcaacagatacattttatcatcgcgaccactagtttttatagggatgataagttatccgctatatttatggcactggccgatattcacttatctgagagtcatcaatggcgcagagccatcatggatagttatgtctgctgctagcctgctctctgtcttcctgtccgtagtgacatactactgctgggaaaaaccaatcagatttagcaataaaaaagggctaaccgcaataatactgacgatatctgtcgcaagcatcggtttggctgggtactacactttcaccagcaaaggaattccgtcacgctcaacggttgagagcgccaagctcatcaactcccagttcgttggtgctgaatggaaattctctaaaaatgacatctgcctgaaccgctatccatttgaagacgcgaataattacaaatggtggttctgcatgcagaatgaagacaaaacacctgatgttttgattcttggcacaagttacgccaatcacctattcccggggctggttgataacgatcctgagcataaaacatttctgtcgattggaacgtgcgacccttttctcgacgcaaaacaatctgagtggatacccgccatccacccttgctatggtaaacgtgcagccgatcagtttaaatttatcaataatgttattaatagtaataaatcaatacatgccgttgtgattgatggtctatcagttaatcctgataaagaatacctgaacagaatcggaaattacgttaaaattcttagtgaaaagaatataaaaactatcattttcattccgcatgcgcggccaggatttaacactaaagcctgctttgccagaccgttcaaggagcctacgaattcatgcgtagtcaatgcggctgaacataataagactgtaagagcatatgaagcgttcgcacatgagctaagaaaacaatcaccaagcacagttttattcgatcagagcaaaacctattgtgatggtaaggaatgccattttattaataacaaccttccattatttagagatgaaggtcattactcattttatggcagtgacttgatagggaaggaattctacaatttcattagcaaacagaactga

SEQ ID NO: 160975 - DNA, 168 bp, Enterobacter cloacae
atggctaatagttcagaatcttttgcaagcatcgatcagatcacctctcgtccaaacttttcggcaaatttagagattagtgttgatagctttagctcgctcgttggccgctatcaccttagtgaaagcgttcagtgtcaggttaagacagagcatggaatctgctga

SEQ ID NO: 160976 - DNA, 150 bp, Enterobacter cloacae
atggagttaactaaagtcgaagccgaggcgattggctggctcttgtcaaagcactgggacgagttctcccaaactgctgaagagtttatgacgattaatgcgttacatcggttggctgaaaaatttaagcttgaggagcaaaaaaagtaa

SEQ ID NO: 160977 - DNA, 462 bp, Enterobacter cloacae
gtgggcatattgacctcagaggatggccttgactggtatgaatcacaggcacttttcgacccgaacaacctaaaaattgaatttgacagtgatggcatcattacccgcttgtcgatggacgtgtctgaactgtggcctgctgaccgctctgtcgccgatgttgcccctgatgacgtgcctgaaggtattaacgagaaaggcgaatggcggttcgatggaaagaaaattgtaccggtgcctgttgattatgcagcaatggcaatcaatacgaaatccgcgcttctggctcaggctagtgagcaaatttccattctgaacgacagagtcgagttaggacgcacaagagctggagatgaagaacaactaaagaggtggaagatattccgcctggatgtagaagacatcgacgcagaactcgcggatagacctgtgacttttcctgagccaccaacaacagattga

SEQ ID NO: 160978 - DNA, 1062 bp, Enterobacter cloacae
atgcaagacttaatgcctccggtgaaaacaccggacaatctgtttcacgatggcgacccgactcagggcatcgaagggaccatcgtcacagcggaatggctcaataatgaccagtcagccgtccgggatatccagcaggagcttgtgaatgttcttgcggcagctgctatgcaacctgacccgagtaaacaggaccagcttatcactgctattaattcaatcattgggggaagcattcccgcccctccagtaacaagcgttaacacgaaaacagggaccgtcgttctgagtgctgccgatgttggggcattgcctgccggaggaaccgcagcggcggcctctaagctggctacagccaggactattgggggggtagcatttgatggaactgcgaatattaatcttcctggcgtcaatacagcaggaaaccaaagtacaacaggtaacgccgcgaccgcttcgaagcttgcaacagcaagaacaattgctggtgttgcatttgatggctctgccaatatttcaatttctgctgccaatgtcggagcgctacctgctagtggcgggcgagttgctggtaatctggaaatatatacagcagcaccaatactccaattaacggaaacagatacaggaaagaaatattttatcgtagtcgatggtagtggatttcgaatcaacgaagactcaactggtggtaatgccattctttcatattcaggaggaagtaaaatactttcgtctgtaggccagattgcacctggtgcatggactaattttgatgcccgataccaggccaaaggaagctataccccagcgggacaggcttatacgaaagccgaatcagatggccgctatccgctcaaaacagcaacagttattggtgcgcgagtgggggcgcgtgggactctcggtagtggtaatggcgacacggatattgaagcgccggtaggtaactacattacgggacgcgtcggttcaaatggagatgtgcgatatacaaaatggtatatcagagctttccagataaatgtgaacggcacatggaaaacaattacagcctga

SEQ ID NO: 160979 - DNA, 573 bp, Enterobacter cloacae
gtgaagacggtcgacttatttcgggcgctgatgccgccggtcagctatgacccgaacggaaaatttctgtcagcagagcttcaggctgaagccaacctgatggactccgtcaaagcgtcagcgggccgcgttctggcgtcgattacaccgttctattcctccatgacactgtccgactgggaacgtgtctacgacgtcgtcccacgcgaaggcgcaacccagcaggagcgccgcgagaacgtactggtcaagatggccgccaccggcgggctgtcgattccttatttcaccagtctggccgccagcctcggctacaccatcacaatcaccgagccgcgcgcgtttcaggcaggcataaaccgggctggagaccgcctgttcgtggaggggatgcgctgggtatggcaggtcaacgttctgggagacagcacgcccaaataccgtttcagagccggagcttcggcagcaggtgaaccgctgctggcctttggtgaatccattttagaaagcacttttaaagaccttaaaccggcctttactgattgttatttcacgtatgaggatgacgaataa

SEQ ID NO: 160980 - DNA, 1071 bp, Enterobacter cloacae
atgtcgttcccggtccctaccgttgcggagagcaccgcccgccagctgcgtgatattgaaaacgcactacctaatgaagacgtggacaccggcacggacagcgattatggcgtccgcgctgctgccgtttctggcgtggctgatggcctttacgcttatcagggatggatcgtccgccagattttccccgacaccgccgacccggaatatctggagctgcactgtcggacccgtaacgtctaccgcaaaaaagccaccagttcgtcgggcacggccagcatcacaggcacagccggaaaggttctcccgatcggctccgaaatccggggcgaaggcgtgagcgtcaacacgacccaagcctgcaccgtcggcgacgacggaaccgggctggtcgctgttaaaagcacgtccaccggcgcactgacgaacacgacaaccgtgaagacggcgacgctggtcagcccgccagaaggtatcaacagcgcggtatccgtcaacccactgaccggcggcacagataaggagtctgacggcagtctgctggcccgttatctggatatcctgcgaaagccgcctgcgggcgggaacaagtacgactataaacgctgggcgcttgaaattgacggcgtcacgtcggcatatgttcagccactgcggcgggggctggggactgtcgacgtggcgatcacgtctgagaacgatctccctccgcaggagctggtcgacgccgttcaggcgcatattgaggacctccgcccggtcacggcgaaggacacgctggtactggctcccactaaaaagccggtggattttgtcatccagattaagactagcggcctgacggtcgagcaggtgacgccgctggtccagtccgttgtcaccgactttatgaaccgtctggagccaggtcaggaactgattgtttcccagctcgaaacccagatttcccttatctccggcgtgtcggaccgcaaaatcgtgaccccagccgcgaacgttccggcagtcatcaacgaaacaacatgggaatggctcaggcccgggaccatcaacgtggagccaatggcgtga

SEQ ID NO: 160981 - DNA, 351 bp, Enterobacter cloacae
atggaccagaatatttctacctctaccggcgactacacccaaacccgcgtttactcactacagaacgcggtctatctgcgccttgaaaccccgctcgggagctactgggcggatcctctcttagggtcccggctccacgagctgaagcgcgagaaggacgtcccacgcgttcaactgctggcggggcaatattcccgccaggcacttcagccactactggatgacggacgggcgcagaccatcaccgtcgacacggaaaaaggtccaacaggctggctgtttctctggattcgcgttaccgacgcctccgggacgccgcacaagtttaaacaccctgtaaggattgcataa

SEQ ID NO: 160982 - DNA, 663 bp, Enterobacter cloacae
atgtggaataaagtaaaccagcgcattcagcaggcgctacagaatattcgccaggctttccgtgtcgtcaccggttcgacagacagcacgacaaaagtccagatgttacagctcaccggtctggccggggagaagctggacggcgcggagtattttcagcattacggattcacgtccaacccgctggccgggtctatggggatagccatcccactgaacggggcgacgtcacacacggttatagtggccacggagcacggcgcgtatcgtctgacctccctgaagcctggcgaggtggcactgtataccgacgaagggaccagcgtcgtcttgaagcgcgggaagattgtcgagacgacctgcgacgtgtaccgcgtgaagtgtaaaacctttgaagtcgacgcggaggaaagcgctgactttaccaccccgcagctgaccgccagcgaacaggtcatcgcaacggggaaaatcagcgggaacggcgggatggccatcaagggcggtgaaggtggcgcgacggccacgtttgagggtacactccgccagaccggcggcagttatgaaacagacggcgatgtcaaagccgggaccgtttcactcactggccatgaacacccgaacggcaacgacggcaacccgaccggcgcgcccattgcctaa

SEQ ID NO: 160983 - DNA, 1212 bp, Enterobacter cloacae
atgcctacgcaaaataacgcgacggacgacgacaaaatcagcctggtcatcggcggcaaagcccacacggactggtccagctaccgcatcgacagtgattttctgaagcccgcagacggctggcagctgatgctgggactgcccgataaggttttcccggaggaggtcgtccggggcgcggtgattaaattacaggtcggcggcgagactgtcctcagcggcagaattgacaccgtccgccgtattgtctcccgccagacctattcgctggccctgacggggcgggatgatgccgccattctggtcgattgctccgcgccgatattcagcgcgaaccagctcactctggacgaagtcatcgaaaaaattgtcagaccgctggggatccgaaatatccgtatacaggccgaaaacgccccgcgtaacgataaagtcaccatcgagccgggaacccgggcatgggatgcactggaaaaggccgccgccggtcgcggtctctggccgtggttcgagccggacgggacacttgtcgtcggcgggccggactactccaccgaaccggtggcgacccttgtcctgaagaacgacgggaccgggaacaacgtcctgacgcttgaagaaaaccgctcaattaacggctgtttttcagaactgaccacgctggcacagggccacgcccgccacgccgacagcaaaagcagcacagcgccgctccctatggatatctggaacgatgacggaagcgtcagactgatggccagcagcgacgaggggaccagcgacggcctgaccggatcaaatgccatgaaggccgtggccacggatccgaccgtgtcgtactaccggccccagataatcaccatcggggacaccaacaacaaagaacaggtcgactacagggctaaaaaagccatgagcgatgcccgtctgtccggctgggatatcagcgcggaggtggcaggccaccggaccgccggaggcgttctctggcaacccgggcagcgggtccatattgtcagcgaaccgcacggtctggacgccgttttttttctgatgggtcgccagttcagcggaggccgcagcggcaagacgacaagcctccgctttaaggaggacggcgtctggatacccgacgcgttcccccgtgagaaaaaacgccgccaccgccgtggcaggaaaggcaagaacgacgtcgccgtggtggacgtctga

SEQ ID NO: 160984 - DNA, 1353 bp, Enterobacter cloacae
atgggatgggctgataacttacagcaggcatcattcaggggcgtcccgtttgacgtgctcgctaccgatgaacaaatcagccgcgaccacgcggcgtatgagtacccgaacgtcgacggcgcagacctgaaagacctcgggcgcaaggcgcggcccttccgtctgactgcttttatctggggagacacttacgaatacaagctccagtccctgatagccgcgctggacaccccgggcgacggcgagctgattcacccggtctacggttctgtcccgtcggtcatcgttaccgggtacggcgtccgccatgaggctgagaacgtcgacagctgcacggtcgagctgaattttctggagaaccgcaccggcacgacgctgttcgccagtccgctccctgaaatgttcggcgcgtcgctgtttgacgaactggacagtctgaccgctgagctgggggcgtttttcgacgctgtcaccgcacctttaaagactgttaacagcctggttaaacgcgccaaaacggtggaatcaacgctgattaatacgctgttaacgtttgagagtgacgtgaaatttacgaccgaacaggttgtggcgctggcggagagtccggcgcagtttatcgccgcactgagcggcgttctggaggttcacacctcaaacgtggccagctccgtccctgcgctggcatcctccgcgccggtgacgactatcggactgtccagcccgaccccggacgtggccacgtcatcgaccgttatcaccagctggaacgaaatcacggacgacatggacgagctggtcgcgctgccggtctcgttcgtcaatggcgataccaagccgacagtggcgctccctgtcgggtcagtcgtttcagatgtagcggacgtcacggtggcgtattctgtcgccgctgtgaccgagctggccagctccgccgccgcgatattgtccgacgacgcgcagtcggagctactgacaccggacgatatcgagaaactggtcgatgacgtccgcacgcggatccagtcctccattgaccagctccgcacccgttacgaacccgcccgggagctgattaccgagacgacctccccggtggggatccagtggctcgaacttgtcgaaaggctgaagaacatcgcgctggcccttcaggacttagggctgcttgtcctgtcccgccgtccgcctctgacgcgtaagaccgtcatggcggacagctgcctgcacctgctggcccatttatggtatggcgaccacagccgcgccaccgagctgcaacgcctgaacccacaggttcgggatccgaatcaaatcaccacagggatggtcttaaatgcctacgcaaaataa

SEQ ID NO: 160985 - DNA, 2229 bp, Enterobacter cloacae
atggccggtaatttcaaagttggcatgaccctgaccgcgaaggatgacgcctcggcggtacttgttaaggggcttaagctcaccactaaagccgccactgacgcagaaaaggccgtcgaacgcgcgggcaacgaacagcaaaaaaacaacgaaaagaacgcgagaagcgccagaacggcggcggaagaatcccgccgtgcagctgccgcccgggaaactctcggcattcgttcagaacaggccatccagcgggaaatcgcccagaccatcgccagctataaccgactcacccgggcgggcgtcgcttcagcccgggaacaggatcgcgccttcagggcgatgaaagaccgcgtcaaggagctgaaaaccgaaatgcgcggttacagccgcatgaatgaggccagacgaatcggcggaaatgcgctcgctattactggggggattgccgccggtggcgcagtactggcgcaaccggtagcccgtcagatggcctatgagcgcaacctcagcatgatggccaatactgccttcggggatggcggtcaggcgggccgactcgctggccgggcgaaactcgcgggaagtatacgcgaagcagtcgcttatggcggaggaacaaaagaagacgcttctgaagcgatgaaccagatgctggcaagtggcgtcgtatcatatgagaccgccaacaaatggctcccgcagctgatgaaattctctaccgcttcaggagcgtcatcggttgatctggctacgcttgcgattaaagggaaacagtcttttggtcttaaagacgaagatattcccgtcgcgctaaatatggcgattgcggcaggtaaggccggtaatttcgaactaaaagatatggccaaatggctggccccgcaaatggctgccgccggttctgccgggatgaaagggatggaagacttttccaaacttctcacgctgaatgaggccgcaggcatcaccgcaggtagcagcgacgaagccgggaacaacgtcgtgaaccttctggcaaaactcaccagccgtgaagccgctgattctgccgcccgtatcaaaataaatggtcacgggatagaccttcccggaacgctggccaacgcccgggagaaagggatagaccctatcgaggcgttttcccgtgtcgtggataaaatcgtcagcagtgataagcgctaccaacaactacagacgaagatggccgcgacaaaggacaatagcgagcgtagtgcgatcatggagtcgatggccaccattctggaaggaagcggtgtaggtaaaatcatggccgaccgacaggcactgatggggctgctggcctaccgtaataacccggcatacaggaaggaagtggaggcagatattcatgagcagcgaaccctcccggaaggtaaacgcgccggagatgaagactttgcctttattgccggaactaacgatttcaagattgaacaggcaaagaacacggcagacttcgcccagatggacagcgtcaaaaagctggccgatatggcgggatcggcagctgaggaagtcagcaagctggggcaggagttccccggcctcactactgccgtggctggagcaacgacggccataatgtcaatgacagccgccgccgtcgccttttcgggtctgaaattcctcaccggaggcgcagctggcgctgccggagcaacgggcgcaggtggcgcggctaccgccgccgcgagcgccgccgcaaaaggcggctcaatgctgggaacactaggaaaactggcaggcattggcggtacggccaccgcgctggccaccatgaccaccccggaggaagacgccgccagtaacggcagtgcggagcgctggaaagcgattcgcgcgaaatatccgcagagcgttatcgatgccgcgcgtaaaaaatatcagccgtggtatcagttcggcgaaggttattccaccgaaaacgaacaatggatccagcagtatctggccgaccagcagaacagcgccagcaatgccaccgtatccccgggacaggttctcccctccgcagtaccgcctgcaggtggagcaacaacgccagcgggtcagaacagcgcaaccacaccgcagacaccggcgacaacacaaccttcgacaccgctcaacgtgaccaatcaactggtcgtggatggccatgtgctggctgaaatagtcaacagctacaacgtccaggacggcaaccgtggaacaggaggaccccattaa

SEQ ID NO: 160986 - DNA, 159 bp, Enterobacter cloacae
atggctatgagccgtccagaactggacggctatcttgccgccctcagtaagctgaacggcaacaagccaggtaaaaaggaccccgcagcacctacccaccagtcgttcaaatcccgccgtaacaaacgcaaaaaagggaagcaaaaacatggccggtaa

SEQ ID NO: 160987 - DNA, 399 bp, Enterobacter cloacae
atgacacaggttaagactgaaaccggaaaattactggacgggatccccttcggggggacccttcataaggactttgagatccgtttgcccgttatgcgcgacaccggtcaggcgctggaagatgccgaggaacgctatggcgaggtgacgggcttcatggctgattccttttaccgggccgcagtcatggccagcacgttgatccgtctgggggatatcccgaacgaggaactgacggcagagctgctgcacgaaaacctgaccagcgatgattacgacgaactggtagctgcacggactaagctgaaggcaaagcggaacggcgggaatcccggctcgccggactccgccttgccatcctcgccctcgggcgatgtggtatcaccgaagaccgaataa

SEQ ID NO: 160988 - DNA, 375 bp, Enterobacter cloacae
atggctttagaagaatacgtcggctctattgtcctggagatcgacagtcaggaaattgagatcaccgacctggatgttcaggaagtgacaggccgaaagctcgttaagacgatgaacaaaaccggtaaggcgaaaggcttttcccgaggcatcgccacctatgagctgtccgtctcagcggttatcccggataccgatatccccgactgggcgaatctggaaggtgtaaaggtctccatttatccgctcaacaatagcggccagcggacctcgtatctggactgtttcacgaccgaagtcggcgagaagtacacggtcgataacgaggccaagattgatatcaaaatgaacgcactcagcaaggttaacgcatga

SEQ ID NO: 160989 - DNA, 1422 bp, Enterobacter cloacae
atgagtgaaatccagttcgacaccatcccgaacagcatccgaaaaccgggcgtttatattgagtttaacacccgtctggcggttaacacattgccgggaaaccctcagcgcgttctggtcatcgggccgatgttaagcaccggcacggcggacccgctcaccgctgtttctgttttctctgatgatgaagcagccacctgttttggggccggttcactggctgccagcatggctgccgctgccattaaggcgaacagctatctacagctggatgttatcggcattgaagacggcgacgcgggcgtgaaagctggcggcgcaattgccattcagggaacagctaccaggaccgggaccctgtccgtctggattgcagggacgcaggttgcgatcaatgtagaaagcggcgacaagcctgaaaccattatcccggcactggtggcggcgatgcaaaaggtcccggagttactggttactggggcatatgacactgaaaacagccagttaaccgttgcctgtcgctccaatggcgaatgggggaacggtataacgctgaaggccagcaccacatccaccgggctgacgctgaccgtcacaccgatggcgggcggtgaaatggatcctgatattcagcccgcgctggatgccgtttttgctgcgggccacaacatcctgatttgcccgttcagcaccgacaacgcgctggcggcactcagtgaacacctgaccagcaccggcagcgcgatggaacagcgcggcgcggtcggttgcgctggctggaccggtagcctcggaaccgggacgacactggccagtaacgtgaacgacggacgaatctcgatcccgtggtatcgcggttcggtcatgctacccgcgattctggccgcgacttatggcgcagtgatggccagcgaggaagacccggcccgtccgctgaacacgctaccgctgaacgggatggatgtcgtcggcatgacccagcgcgaaggccggacggaacaggagaacgcgcttcacaacggcctcacgccgattgaagtcggcccgggaaatacggtccagatcgtccgcgcggttagcacatacacggttaatgctcaggccgtggaagacccggcgctgctggatattacttctatccgcacactggactacacacgcaaagcctgtcgcgaccgtatcagccagcgtttcccgcgagagaagctcagcactcgtaccccgccgaaggtgcaaagcgagctttacgacgtactgacgaagctggaagacgcggagattctggagaacgtggccgccaacaaggacaagctgaaggtccagaaaagtggcacagaccctaaccgctgcgacgctgtaatacctgccgacgtggtcaacggtctgcacgtcttcgctggccgcatcgatatgattctgtaa

SEQ ID NO: 160990 - DNA, 264 bp, Enterobacter cloacae
atggcacaaatcaaggttaaggccgctcccgggctgaagttcccgatggagcgaaacgcgaaaaaacatatcaccggcgagccggtaacggtcgagagttcggcctactaccgccgcgccattgcagacggcgatctggttctggtgactgaggacaaaggcgacgttgtcagcaaggacacgggcgaagcaccggcagcggcggatagcaaagacaccgcgccggtacagactaaacagcaaaaaaaaggcggcttcgaatga

SEQ ID NO: 160991 - DNA, 669 bp, Enterobacter cloacae
ttgataaccgatatcgaaaatgcgctgaccgaccggctacgtcgtggactgggcgaaatggtctgggacgtcaccagctacgccggtgagctggacgaggatatagggaaaattatccaccggctgcccggggcgtgggtaactttcggcggcatcgtgaaaaccgaaccctacagcctttcccggcagaagtggaaaaccaccgggcggttcgtggttgtggtcggcgactacaacacccgcaacgaggaaagcacccgacacggcggcgtaaacctgaacgaagtcgggaccaacctgctggtcgagtcggtccgccgcctgattaccggtcaggatttagggctgaaaattaaggagttcgccccgggccgagtacgaacgttgtttaacaccagcgtggaagaaaaagcggtatcggtttttgcctgtgagttcgacacggtctggatggaaaacgcgctggagaatggccgatggcctgaacgctcgaacagcccggactctccagacgtggcgtttaacgtgtaccggggagaactgtccgacccgtacccggacctcctgcgcgtggggatgcgatatcaccagccgggaacccctccggcagaagacccgacagacctggtggaagtgaggaaaaaagaagatggcacaaatcaaggttaa

SEQ ID NO: 160992 - DNA, 432 bp, Enterobacter cloacae
atgccttacgccacaccagaccagtttcttaagacgttcagcgagcgcgagactatctcgctgaccgatgaaaagcgcaccggcacagtcaacagcgacaagctggaatttgcactgacccgcgccagtaacgtcatcgatggctatctggtggggcgttacaaaacgccgtggccagacagcccggggatccttatcggctactgctgcgacatcgcccgctatcagctggcgagcgattaccgggtcctgtcggaagaaatccggctgcgctatgacgacgcgatcaagtttctggagaaagtggccagcggcaaaattaacctcggacgtgacacatccggcggtgtgatccagtcgtcgtcccagatgcggatccattccggcattcgccagttcggtcgtgagtcaacacgcggaggcgcattttga

SEQ ID NO: 160993 - DNA, 456 bp, Enterobacter cloacae
atggaaaaggttattgatatcactgccaagcgcgacggattccgccgcgctggcatggtccacagcgagcagactcaaacctatccattaagccgtttcacaaaggcccaaattgagcaactccagaaagagccgatgctggtcgtggctatccgtaatgctaacgagcagcagaccgtcccggctgaagaattaaatcagcagttaataacgctcaccgcagagctggacggcgcaaagatgcagatccaaacgctgaccggtcaactgacggaagcgcaggaaaaatatcagagcattctggccttgcatgaggatgtgaaaaccgaggcggccagacagctggagaacgaacgccagaatgtcagcaacctgacctccgagctggaaggcgaacgccagaaggtcgcagacctgacgacgcagctggaagccgcaaccaaaaaagggaagtaa

SEQ ID NO: 160994 - DNA, 909 bp, Enterobacter cloacae
atgattgttaacaaggcgaatatctcggcgtttttcgtcaacattaaaaccacgtttaacggagcgttaaaagccgcgccgactcagtggcaaaaaatcgcgatgaaaatcccgtcgaccgggaaatcgaacgattacggctggctgtcaaacttcccacagatgcggaaatgggtcggcgacaaggtcatcaaatcgctggcggcgtttaattactccgttgtcaacgatgactgggaagccaccattgaggtcgaccgcaacgatctggaagacgatcagaccgggatttatgccattcaggctaaatccgccggtgagtctgctgcgcagttaccggacgagattgtctcggggctggtgaatgattcgtttacttccctctgctatgacggtcagtatttttttgataccgaccatccgatgggggctggcgttttctccaataaggggactaaagcgctttcatgctccacgctggacgcagctaaggcttcttatggcgcagcacgtacccagatgcgaaaagttaaggatgatgatggccgcgccctgaacgtaacgccaaatattctccttgtccctgttgcgctggaagatgtggctcgcacgcttatgacagctgaacgtctggaggatggtaaacccaatatctacagaggaacggcggaagttgtggttgacccacgcctgaccagcgacacagcctggttccttctggacacgtctaaagcgatcactccgttcttctatcaggagcgtaaagccccgcacctggtcgaacagaccgacatgaacgcggacgacgtcttcagccgtaagaaatttaaatatggcgcagaagcccgcgccgctggcggctatggtctctggcagctggcctatggctccaccgggacggaggcgtaa

SEQ ID NO: 160995 - DNA, 399 bp, Enterobacter cloacae
atggatcgcaatacctggcgaaaagatggcttgctcattccttttctggtatcgggcggcgtcaagatttacggcggccacatggtggccatcaacgcggatggcttcgccgttcccgcagatgctggcagcgataccgattcgctggccgtgatcggcgtgtccgacgagttcgtggacaacgcagacggcgcagacgggggcgcgacgattctggttcagcgtggcgcgggcttctgtctggccaacagcacagccagccccgtcactcaggcactggtgggacgtcgctgccaggtagaaaacagcgtgaccgtaagcgctgacgctaccgcgaagcgcaccgccggaacagtaatggaagtttcaccagacggcgtctgggtctttatctcttaa

SEQ ID NO: 160996 - DNA, 1107 bp, Enterobacter cloacae
atgctgcgtatgaaaacacgtatcgcggcactagccctagaaatcgcaaaagcgacccataacgagatccaactgttcccggctggtgagttcagcgcggtggatggtcgtccgaccgatgtcgatggcggtaaatggttcctgacggctgaactggccgctgcaattgtttcgcaggtggcctccgtggccacgccgctggtgattgattacgagcaccagacgctgcgcactgtgaacaacggccagcccgctccggcggctggctggttcagcaaggtggaatggcgcgacggcgatggcctttatgccgtcggcgtggaatggacagacaacgccgccgcgatgattgccgccggtgaatacaaatttatttccccggtattcctttacgacaaaagcggcgctgtcactcaactgttacacgccgcactcactaacacccccgcgctggacgggatggacgcggtcatgctggccgcagccagccgtctggcaagcctgtcaactacaacggagaccaccacagtggatgaagaatttttagctgacctgttaaccagcctgcgctggatgctgaatctgcccgttacctcaacacccgaggatattaaaaacgagcttcagaaagtgatcgacgccatttctcagggtcagggaacagcggcggcttctgtcggcctgcttaatctgctggctcagcgtgatgaacagatcgccagtctgtcggctaacgtttacaacccggagaaacactctccgattgaagtcgttaacgacttacgcgctcagctggcccagctgtcccagaccacgaccgacagcgaaatcagcacgctggtgacggctgcgctcacggatggccgtctgctgccttcacaggagcaatgggcgaaggattacgggaagcagaatctggcaggcctgtcggcttatctggaaaagcagccacgcatcgcggcccttaaccagacacagaccagaacattcaacccaccgaaaccggaagacaaagtcaacgtgtctcagatgacgccggagcaactggctatctgtagcgcgttcggcaatgacccggcagaaatcgccaaacaactgggggaataa

SEQ ID NO: 160997 - DNA, 552 bp, Enterobacter cloacae
atggccaaagactcactggatttaaaagtcgatttaagcgcctgtaatgcggggctgatgaagttgatccgctctacaagacaacgccacgacctgatgaccgcacttgccggaaccatgctggacgcggtggaggaaaacttccagcaacaggggcggcccaagtggctgggatggagtccggcgtatgcgaagaaacgcggctccggccagatactccagaagaccggacgactggccgccagtattcgcgccgcgattacgaacgacgacgccacggtagggacgaatgtcagatacgcgcggatccataacgaaggcggcgaaatcaggcacgaagcccggacgacgaatctgtattttaagcagtacaagaacggcagcgtcagccgccagttcgtcaaaaagcgcaacagcaattttgtacagagcgcgactatcggggcgcatactgtgaaaatgcctgcgcgtcctttcctccagctcacaggcgaggatatcaaagagctggaaagcacagcgatcaggtattttataaacgttattgactag

SEQ ID NO: 160998 - DNA, 1164 bp, Enterobacter cloacae
atgccgacagctgatgatgtggatctggggtacgcgtacacgctcgcccctgaggaagcgatcaagtatttcgaaagcaagggctacgcaataggctttaactggcacgacgtccagacggtcgctcacgcccgggcgttcacggtcgcgggcgtcatgaagctggacgtgttacaggatatccggggcggactacagtccgcactggataacggagacacctatcaggagttcgtcaaaaaccttcagccgttactggagtcaaagggctggattggtaaggggctggtcgctgatccggagacgggagaactacagggcaagcagctgacgccccgccggttccagaccatcttcgacaccaatattcagtccagctacaacgcgggccgctatcagcagcagatggccaacgtggcggatcgtccctactttgagcgcgtggcggtgatggactcccacacgcggccaaaacatgccgccctgaacggcttcaccgcccgggcagacgacccggtctgggaatatctctatacgcccgacggctacggctgccgctgtcgtattcgcgcccgttctcagtctgacgtggagaagtacggcctcaccgttcagagcagcgagggccggatggtcgaagtggaacaggaatacggccagcccgggaagaccctcaagacgatgggccttaaaatgccggacggctcagtctacaccgccgacccgggcttcggtttcaatccgggcaaggtggccttccagccagagctggaaaaatattattacgagtctgcgcggcagtacgtcaccggctccctgacgggtcccgattttgcgctgggcgtgaagaacgtcgcgcagctggacaaccagcagcgctatccgctggccgttctctcgccgtcgcaggtcggcaagaccgccgcagaactccagaccgtcagcgtttccgcgccggtgatgcagcagctggccagcgcggccacaccgccagcgttgtcggattatgtgcttatccagcagaccatcgagcaagccgggcagcttgcgcaggacggaaaagcctggcgttattcgctgcaatacggcgagcgctggtccgtggccactgtcgagggcgacgagctgactggctggcagatacaggataaaccgggggaataa

SEQ ID NO: 160999 - DNA, 1593 bp, Enterobacter cloacae
atggcgcagattgtagatataaacgggcgaccgcttcagcgcgagaccctcaaaacggagcagacggtcagggtcgcggagcgtatgcgcatttatcccgatcacccatcgcgtggtctgaatattcgccgtctgccgcgtattctggaggctgccgaacagggaagccttcaggctcaggccatgctgttcgccgatatggaagaacgcgacggccatttattcgcggaaatggagaagcgtaaaaacgttctccttacgctggactggtccatcgaaccgccgcgcaacgcaaccaaagaggaactggacctgaccgccgccgtggatgactggctgcgtgggatccccaatatggaggacgtgattcttaacgggatgaccgctgtcggctatggcttcagctgtcaggaaatcgcctgggaactgacagacaaaatctggctcccggagtccatcaacctgcgcccccatcactggttcctgaccctgccggacaagggcgacgagatccgcctggatgatggaagctatcaggacggtaaaaacggcgcggagttgtggccattcggctggctggtgcatcgccataatgcccgctccggcttcagcgcgtcctcggggttattccgcgttctggtctggccgtacctgtttaagaacttcgcgctgcgcgaccttgcggagtttctggagatttacggcctgcctgcccgtatcgcctattatgcgcagggaacgagcgacgaagaccgcgaccggattctggaggcacttgtccacctcgggcatgaggccgtagccgccatcccgcaggggaatgaaatcaagttcgaagaagcggccagcggcggtgctgatacgtttatggccatgattgactgggcggagcggactgtatcaaaagccattctgggcagtacgctgaccagtcaggcggacggtaaatcctccaccaacgcgctggggaacgtccacaacgaggtccgccacgacatcatgaccgctgacgcgcggcagatggagggcatgttcgccggtcttatcagccaactggccgcgttgaacggctacgggcatatccacccgcgtcgtttgcctcgtctgtcatttgatacccaggaagaaatcgagatcaaggactgggcggacgcggtggccacactggtgaatgatgtcggtatgacggatatcccgacgtcgtgggtccgtaaaaagacgggcatcccgacgccgaaggatggcgagccagttctggtcccgaccgcaaaccgcatcaccgccccggccagcctgagcgctatccgggagggcctgaggctggcagcgctcagtacccagaccaccgtcgaggacgacccggcgcagaacgctgtcgaccgggcagacctgcccgctgatgccatcaatcagggatttagtgagctgatggccccgcttgtcgccgcgcttcagaacggccaaagcgcagacgaggcgatgaacattctggccgaagcgtggccgaccctgccggatgacacgctccggcagctgctggagcaggccatatttaccaccgacgtctgggggcgcttaaatgccgacagctga

SEQ ID NO: 161000 - DNA, 1641 bp, Enterobacter cloacae
gtggctaaacggaaaatctcactaaaggaatttcagcagagtttacaggaatatattgccaacctccgccagaccatcgaggcggagtgcgagggcttttccactgacaaggccgaagccgacaagcgccgcgccgccgtggccgacccggtcacgggatatgatttttttgtcgagacgtatttcccgcattacgtccgcaaccccgcgaaaagcgagctgcataaatatctgttcaagcgcctgccgcaaatcatcgccagcgaggacggcgagaacgacgccatcgctgcgccccgtggtgaggcgaaatcgacgcttgtcagtcagctgttcaatctctgggttatcgttcgcaagctgaagcattacccggtcatcattatggacagtatcgaccaggcctatccgatgctggaggccatcaaagcggagctggaatttaacccccgtttaaaaaatgatttcccggatgcctgcggacaggggcgcgtctggaggatggggactatcgttacggcgaacaacatcaaggtaacggtcgcaggtagcggtaagaagctgcgcggcctgcgtcatggcccgtatcgtcctgacctcattatcctggacgatatcgagaacgacgagatggtccgcaacccggagcagcgcgacaagctggcgcagtggctgacgaagaccgtcatgccgctgggcgaagcgggcggcaaaaccgatattgtctatatcgggacgatcctccattacgattccgtactctcccgaacgctggacaacccgatgtggacgacggcccgattcaaggccgtgatccagtggcctgcgcatatgaaattatgggacgagtgggaagaacttatccgcaacaagcagacggaggccgccgaggcgttctatcagcagaacgaggccgacatgctggccggggccgtcgtgtcgtgggcggcgcgtccgctgctggcgctgatgaaaattcgcgttcgtgacggtcatgacactttcgacagcgaataccagaacgacccggtcagcggcgaggatgccctgttcgtgggctgtatccatttctgggttaaccgccttaatgagtgggtattttatggcgcactggacccgagcctaggcaagaaaaataagggccgcgacccgtctgccattctggtcgggggctttaaccgttacaccgggattcttgacgtcgtggaagccgatatacgccgccgcctgcctaacaaaatcatcgaagacgtgatccagtatcagcgggagtatttctgtctcgcctggtccgtcgaatctgttcagtttcaggagtttttacgcaccgtgttaatcgaacgatccgccgcgctcggcgtcccggtcccggcgatgccggtcattccgctggaggataaggccctgcgcatagaatccatccagccccatatggccaatggattgatccgactcagtccgacccaccagacgctgatagaccagctccgtcactatcccaaagcggaccatgacgacgggccggactgtctccagatgctctggacgctggcggtctcgcgtagcgcgaaatttcaggttcacaccccaaaaagtcaggggcgtgacggacacagccgcttcggctcagggggctggtaa

SEQ ID NO: 161001 - DNA, 501 bp, Enterobacter cloacae
atggcaaggccgcaagaagaaaaggacagggtccgcagcggttatatttttgaccagctcacgctggagatggcggctatgcgctgttcggtcccgtatgacaccgcacggcgctggaagatgcaggccgccaaagcaggcgatgactgggacaaactccgggcagctcacacgctcgcgggggacggcctggagaatgtggccagaaccgtcctcattagcctggtgattaagtgccagtcaacgctggagctaatcaaccagaacccggatatcaaaccgaaagagtccgtcgagctgctggccagcctgtcggatagtctcagcaaggcggtggcctccagtaaaaaaatactacccgagaccgaccggctggccacggcgctggaagtcgttcagatgctggggacgtttatcagtgagaaacatccaacgctttacgcgccgtttctggaggttctggagggcttcgccggacagctggagtccgactttagttaa

SEQ ID NO: 161002 - DNA, 204 bp, Enterobacter cloacae
atggcggtacttagtttccagtcatacggctatacagctgaacccacttacgtaatgagtgagcgaatcactcatttttacggggtcgattataacgggcggagcgggacgaccatcgttctggacaccggaaaggaagtcaccgtcggcgagtatgccagcgtggtacagcgcaaaatcgaagacgctcagaaggacgaatga

SEQ ID NO: 161003 - DNA, 393 bp, Enterobacter cloacae
gtgattagcaaagcactgttaattctggccgccgtggttgtgggctggttcgcggtggacagctacctgtccacccgggcggagctgaagacgctcagggacgacaatcaggagctgagccgccagctgaaggcaaaccagcaacagcacaacgcggaaagcgctgtcgggcagcaggggctggcatatagccagcaagggacagcgaaccaggagaaaacgaaaattgagatccgcacacaaatcattaaggaaccttgcgcgggccagcctgttcctgatgccagcgctggccggttgtggcagctcgccaccgaaacccgcgacgctatcctatcagatgatgcccgcaaatctgacggcgtcacgcctgccgccgctccccggcgataa

SEQ ID NO: 161004 - DNA, 471 bp, Enterobacter cloacae
atgaaaatcagcaataacgggctggaccttatcaaaacgtatgaaggtctggagcttacggcatacccggacccgggaacgggcggcgctccgtggaccatcggatacggtcacaccggccccgaagtccacgccgggctggtctggacccggcagcaggccgagcaggcgctggccagcgatgtggcgcaatttgaacgcgacgttaccagtctggtgaaggtccagattaaccagaaccagttcgacgcgctggtctcgtttgcctacaactgcggaagcgatattgacgaggacgacatcgccgaagggctgggcgacagtacgctgctgaagaagcttaacgccggtgactatgacggtgcggccaacgagttcccgaaatggaacaggtccggcggcaaggtgatgtccggtctgaccaagcgccgcaacgctgagcgctcgctgttcctgacgccatgccagtga

SEQ ID NO: 161005 - DNA, 345 bp, Enterobacter cloacae
atgaacggacagggattctgggagatttcattgaaatggatcgctgaaaatgcgcccgcaatttatgccggtctggctgctattggagtgtcgtcgatgatgagcattaaagacggtaaaccgaagaaatacaccatcaccagcgccatcgtctgcggaattatcggaatgagcctgtcgggtctgatgactcatttcggcctgcccgctaatgcctcctcgcttgtcggtggggttgtcgggttcctcggggcggacaagctgcgtgacatggcgaacacgttagttaatcgccgcatgagtggcacacagcaagaaggaagcaacgatgaaaatcagcaataa

SEQ ID NO: 161006 - DNA, 489 bp, Enterobacter cloacae
atgacgcgaagcggagggcaaaacgtgaaaatcaccgttaaccacgacgagctggcgcagctggagaacctgctgccggactcggccaaaacattgatctacgttctgggctatgccgcagccacccggctgattaaccgtttcggcggtgtgacgctggcggccaaaagcggcgcagcccgtgagcgaactggcggcgtccatgctctcttgcgcgaagtgctgagcgaggaagaatccggcaagttgatcgcgtatctgggcgcggaccagttctacatcccccgctgtgatgctgccctgcgccagctgcgcaacgcccgcttcgtggcagcggtcgcagaacgtcaggaaggtggcctgtccatccgtcaggcgttcgcggtgctgtgtcctcagttcgggataagtgaccggataggatgggagttaattcgcgcccgggccggaagtagcaaagcggaacagcctggattattcgacaactga

SEQ ID NO: 161007 - DNA, 420 bp, Enterobacter cloacae
atgacgcctaacgttaaaaagatgatcggggctattaaagccggtcagacatatctcggatgggatgatgcaacctatcgtgcaaccctcacccgactgaccgggaaaaccagcgcgacccgttgcaccctggaagaactccagaccgtcaaagagtacatgcacacggcgggattcccccgccagtcccgaaagcatggccgccgcccttcggtcccaaagacccgcgaggggatgctgagcaaggtcgaggcgcagctggctgacgcgggccgtccgtggagttatgccgagggcatagctaaacggatgtttaagcgtgagcgcgtggactggctgacgaccgaagaactcaccaagctgatgcaggcgctggactatgacgcgaagcggagggcaaaacgtgaaaatcaccgttaa

SEQ ID NO: 161008 - DNA, 555 bp, Enterobacter cloacae
atgacagttaacaagctaacacctcagttaatgcaggaaatttatgaagaggccgtctctgctgaatgcttcgaaaaagagaatgtggattcagcctgttttgacctactctgcaaaatggatgaagcgggtggcctgtcacatgtagtgcgaaaactcattgatatggttcggggtaacgaatacgagtttcaggagtaccgcaaagaactacctggcggactgttcgaacttcacaacatcaaaagcgatgcccgggcgatatccacccgtctgggcgacgctctgacccgcaacagtgaactggcgatccaactggaaaaactgaatgcggacggatcaccaaatcaaccgggcgatgataatcaatatgtttatcactattgtggattgaatgaagactcgcgcttctatagcgggatagcccagttaagttacaggatcgtatcgaaagctgaactggatgcttttgcctcccttctgactgagaaatacggtgagggttttaaagagatcatatctctttcttatctggggagggttcatgacgcctaa

SEQ ID NO: 161009 - DNA, 219 bp, Enterobacter cloacae
atgcttaatgtcaaaggctgtgaataccgcgataacggcaaaacccgcgtttataccttcagcaatctggccaccgctgtggaggtcccggagtaccccgggagcgctggtctcaaattttacgacgtcgctggccatgcaattcacaaggcgggcgataagcgggaaatgaaacaggctatcgcgcgttacaaatcaaagtggagactcgcgaaatga

SEQ ID NO: 161010 - DNA, 513 bp, Enterobacter cloacae
atgaaaaggcttatacgtgcattcgaccatcatatcgccggggccgggctgtcagatggcgatagcgtcaccattcgggagtgcaaagaagcgctggagcatgtcatcgatatgatgggggcaactccgcgccctctgaaagtgatgatttccggccctatgagtggggttcctgactttaatcaccccctgttcaatgccgtagcgacggagctggagcaacagggctttgaggtttacaaccctgcgacactcccggacggctggagtcatgcacattacatgtccgtgaccctgcaatgggtcgacgaggtggatgcgctttatatgctggacggctgggagcacagcaaaggcgcggtgatggagtttgatcgcatcctgcggggccgaattccggtatttcattttcaaaccctcgctgcgttcagggccgctctgacgcgaagtaaagccctgagcgcttcgctggtccgctggcctgccgtgatggaggaccatcgtcatgcttaa

SEQ ID NO: 161011 - DNA, 720 bp, Enterobacter cloacae
atgaataaggaaaaatatctcgccaaaattaaaaaactgctgaatctggcccgtaaggcaaccaacaccaacgaggccgccgccgcgctgcgtcaggctcagaacctgatgcgtgagcacaacgttacagagctggaggcggaatttaccaatatcagcgaggcaagcagcaaaggctcgccaaaccacgcccagacgccgcccaaatatctggtttatctggttgaggtgattaaacgcgcgttcggcgttcaggcgtttttcagctggcgcgagggcaagtatttttataattctccccgccgtgtcgtcacgttctacggccccgacactcgtcctcagattgccgcctacgccttcgacgttctggcgcgtcaaatgaccgccgcacgtaaagagtttatcggcgggttgcacaaaaacaccaagccagcaaaccgcaccgcgaaggcggatcagttctgtgagggctgggccagcggtgtctggcatatcgtcgcagaactggtccccaccgagtccgaaaccacgctcatggaactgtaccgtgagcgccagctcgccagcgggctggaagccggagaatgccgtgaagcccgcaaggcgaacgggggcaacctcgccagaaccgccggttatctctctggcaggcaggcccagttgagccacggtgtaaacggcacggccagcgaaacaaagttaatcggaggtgccctgtga

SEQ ID NO: 161012 - DNA, 378 bp, Enterobacter cloacae
atgaaaacattaactttggttgaatttcgcgagcaactcaaagcgcagaacgtagacaaactggacttcgctttaatctgtcctgcgtgcaggacggttcagtctccgcgaatgctgatacaggcaaatgccggggtcaattttgaagaagtccgcaagttcattggcttcagctgcgtgggccgtttcaccggtaaaggttcaccaactgacgaaaaaagcaaagagcacggctgtaactggacactgggcgggttattccagatacatgaactggaagttattaccgaggatgggacccgtcacccacaattcgaacccgccaccgccgaacaggcgcaggaactggccagccgtctgggggcttccgatgaataa

SEQ ID NO: 161013 - DNA, 192 bp, Enterobacter cloacae
atggatgctaaagcgtttaataaggcccacccaattgggacgttatttcgccacactgcacactctggccttcgtgatgctccgctggtgataacgacgagcgtggcccgcgattttaagtgcggttgtatcgttgaaataaacaaggagccgtatttcgttaaagtggaaacacttcgaaaagctggctga

SEQ ID NO: 161014 - DNA, 150 bp, Enterobacter cloacae
atgaggaaagtccagaaagccaaaggcgatattctgtcacgctggatggggttttacgggcttaagcgtcgctggtatgaattcgatttattggcccgttggcgtctgaacagacacctgaagaggaataactttttttatggatgctaa

SEQ ID NO: 161015 - DNA, 657 bp, Enterobacter cloacae
atgactactcaaaacagcgaagtacaagcagttaagcaatacaccaccgtgcaggccccggaaggctactggaccgacgctcgcggcgttctgactcccgtcagtctggttaaaccgattgaccaggaccgcgacgcactggtcggggaactggtggaactggcgattagcgtgtccagcgctttacgggaactgaaggaacgcgccatcgccgatattcaggcgttcgttgacctttcggctgagaagtacggggcgaaaaccggcggagccaaaggcaacgtaaccctgtttacctatgacgggcgttttaaaattcagcgccagatggctgaaaacatcaaattcgacgaacgccttcaggcggcaaaaaaacttatcgacgagtgtctggccgactggaccaaaggcgcaagccccgagattcacgccctgattagtgaagcgttcgccagtgactccgagggcaatattaagacagggcgcgttctggccctgcgacgcctcgaaatcagcgacgagcgctggcagaacgcgatgctggctatcagcgaatcggtccaggttgtcgggaccaagtcttatattcgcgtttatgagcgcgtgggtgattccgacgagtaccgtccaatcccgctggatatggcgggggtttaa

SEQ ID NO: 161016 - DNA, 279 bp, Enterobacter cloacae
atgactaatagcataagaactacacagtttttgaaggcaatggagtccgccagtctggttatcaaagctctgatggcggagcgtatcgaggttcgcggtgtttcattaatcggcggaaagcctgttattcgcgtgaagccctgcgcgttctgtgagcgcatggtccatgagggcaaggctttttatctggagttcggcgctaacgcccacgggcgctaccgtcaggggcagtacaaggtcaacggctgtaaggtcgtctggtctgaatctttacactaa

SEQ ID NO: 161017 - DNA, 267 bp, Enterobacter cloacae
atggcagctaaaaaagcgttatatacagaacaggatttcaaacgttttgaagatgaaatccttgctcaccatgtcgtacttcattcaattcttgtcgttctggctcaagccaataacgagctatatctggcactgataaaacaactcacagcagaatctaactaccttgaaaaacacttccctgaactgtctggctcactgccagagctggataagttcattaaggaacttatcgaactcaaacagaatgaacgcctgtctagttaa

SEQ ID NO: 161018 - DNA, 888 bp, Enterobacter cloacae
atgattactcaactgaatgaacttatgaccctgcgcaaatggtcccagactcaggtcgcccgtgcgattggtaaaagtccggcggtaattagccagtatttacagggcaaatatccgggcgacgttgccagcctcgaaagtgatattgcggcattaattaaccgcgaagccgaaaaagaaaaaggcaaacgcttgtctgtttcatttgttcgtacctataccgcagcccgctgccttgaggtcataaagctggcccatctggactgcgatatcaacgtcatttccggcgatgccgggatgggtaagaccatgattatgcgccagtacgcggcagagaaccggaccgccatcctgctggaggctgacccgggctacaccgcccgcgtggttctggaggagctttgcgcgaagctgggcctaaatcgtcgcggcaatatgcacgaactgagcgatgccatcatcaacgcgttacgcgattcagggcgagttattttaatcgacgaggcggagaacctccctctacgggcgctggaagtaatacgccgcattcatgataaagcggggatcggagttgtgctggcagggatgccccgtctgattatcaacctcaaaggtaagcgcggcgaacttaagcagctttattcccgcgtgggctttgcgctgacgctgggtgaggttctgccgcgcgaagacatcgacgccatcgcggccagcgtgctggacgatgcgcaggagcctgccgtcggtgatgccctgttcagcgcatcaaaaggcaacgcccgccgcctgtttaagctgctgcgcggcgtccaccgtcacagtcaactgaatggcgtcccggttgacgcaggcgcggtccgtaagttctcggaaatgctcattaactag

SEQ ID NO: 161019 - DNA, 2064 bp, Enterobacter cloacae
atgtttttcgtcgtgaaagaactcatcggcctgcctggtatgccgaagacagagaaagggattcgtgaagctcttgccagacgtaccaatggcgcggcggagctggttcgtaaacgagaaggcagcaaagcgtttgagtatcacatcgacgctctgccatctgagacccaggaagttctgcgccagcgtcactatcaggaagtgatggaagcgcccgcagaagtcgccgcgccagttccggcaaccgtcgacacgaaaaaaacgaccatcaaaccacgcgaaacgctggaagttctccagcagtgtccggcattgctggagcgcgaagtcagccaactgacctcaaagcaaaagcagatcgcagacgcaagagctgctctcgcgcaggaagtgatgaagcttatcgaccaggctggcatgagtcgcaacagtgccgtgaattacattgttgaaggctcccgcgctggcacgctgccgggtccggtgatgcagatggccatgctggcaaacgcccgcaaaggtaatcgtctgggggtcggacgcgccagtcttcaggagtggtattccgtctatcagctgaccgttaacgataccgacaaacgtctggcaatgctggcccccggtcatcataaagccactaaacccgaggacgttagttggctgcctcgcttcctgtcctactggcggaatacgaacggcccgaccatgcgtttctgctatcgcgacttcgaagcagactggaaacgcgagtttcacgaccagcccgcaatgctcgcggtcatgccgtcctatgacgccgtttgcagagtgatgaaaaaactaccaaaacgcgagcgccttcgcggtcgtgttaccggttcagctgcacgagcgctggaagtctacagccgccgcgactggtccacgatgccggttaatggctgctggatttgcgatggtaagtcactggatatgaaggtgaagcaccccatcagcaaaacagcatttaccccggaactgacgctggtcattgatggccgcacgcgctttgttgtgggctggagtctgtcctactccgagaacgtgcgcggggtttctgaagcgtaccgctacggaatacagcattacggcaagccgctattcgtctatacggataacggttccggccagaagaacaagacgctggatgccgaaactactggtattttcccgcgcatgggaattgaccatatgacgggtattcctggcaacccgcaggctcgcggcatcattgagagactgaacggcgtaattccttacgctatcgctcagcgtgcgccgacattcaatgggcgcggcgctgaccgcgataatctccgccgtctgatggtagccgtggaatctgccgagaatgcgctgagtcagggtaaacagctcaatacacgccagcggcacgcagtggaagccgtgccggaatgggatgttgttctggaaataatccaggaggagattgatctctacaacaatagccatgagcacagcgagttaccgaagtacaacggcaagcacctgaccccggctcagtatcgcgaggccgttctggctactgaaggcgatgaaatcgaatatctgaccgaaatggagttgcgcgaaatgttcatgccggaagaaaaacgcattgtcgaacgcggctgggtccgtctcaacaataaccgttatttttctcacgaactcgctgattttgatggtgttgaagtccgcgtggcatatgacacccgcaatgctgaggaagtgattatcaggaagatggatggcgcatttatttgcaaggctctgtggaatggcaatacccgtgcagctgttcctgttgctgagatggagcgtcaggagaaagcccgcactgagcgccgtctgggcctccttgagaagaaagcagaaaaagttcgcgatgaaaacagacccgcactggatgcccctgtattacccgattttaatttcggccagattctccagggggaactccagcaggcagaacagcacgactatcactttttagaagtcgaccgggaacagcacataaagaagaccggcacacaccatgaataa

SEQ ID NO: 161020 - DNA, 258 bp, Enterobacter cloacae
atgacggttagaaatgaagtgcgcagcacagactggcacccggaaatcatcaaagcggaattgcaccgccgtggaatcacgttgcgctctttatcagttgaggctggttacaaggctgattctttgaaaagtgttttgcgtgtcccttgcgtacgttacgaacagatcgtcgctgacgctctgggaaccacaccggaatctatctggccgagtcgctacgaagccagaaataacagttatatgcgtaaggcgtcataa

SEQ ID NO: 161021 - DNA, 555 bp, Enterobacter cloacae
atgaaaaaagaacctaaaggtgtttttctcgaagatggaaaagaacctgttatcgacagaatttttaagctgattgaccgatacccttcacgaagtgctgctgcgcgagcgtgggatataaacgtgaatacgataaaaaactactatcgcagacaagacatacaaccagtcccgcgtcctgcggtattgaaaaaaattgcggagcatgaaggaatttcactggaatggttaatgactggtgaaggtgaggaaccctcaaacctcaaaccaaaaaacaccacaaagacaccaatcgctccaggcggtgtttatgtcggttccgatgggcttaacgcactgttgagcctgttaactgagcaggaaaggcaatcgctttaccaggcaatggttagaaaaggtgttgatacgatgcttaatctaattaatgagcttgcttcccttacaccatcagaacttgaaagacttgctcgcctagcgcaacagattagagagggggcttctgaagatgataaagaaaacgagttaactcaccccacgcacaaacaagccggttaa

SEQ ID NO: 161022 - DNA, 1011 bp, Enterobacter cloacae
atgtcgatcatagatccccgttgcagtggtacagatacgataaatatcgtttctgtttctggagggaaagacagccttgcgcaatggattttagccattgaaagcggtgtgtcttatacgactgtttttgctgataccggccatgagcacccccaaacaatggaatacctggactatctggaatccaggctgggaaaaatagttcgtgttaaagctgatttttctcgtcagatagaggggaaacgtaggttcattgcagaaaagtggcctgtctctctggttgaagagtgcggaatgtcgccagaagaagcggcggaacgtattcaccatgcactggaagttttgaaaccaacaggcaatccattccttgatctctgcatgtggaaagggcgtttcccgagcactaaggcgcgtttctgcacatttgacctgaaacatgaaccggtacgaacccaggtggttttgccagcgctggatgagttcgacgaggtaattagctggcagggtgtccgggcgcaagagtcaccggcgcgggccggtttacccgcctgggaggaagacgcagataacacacctggtcttcatgtctaccgccccattctaaactggttacatgaagatgtatttgccctggctaaacgccacggcattaaacccaatccactctatgagcaaggttgcagccgtgtcgggtgtatgccttgcattcatgccagaaagtctgaactggcggaaatatttagccgctggccggaagagataaagcgcgttgcggagtgggaacgtcttgtagcggcatgttctcgccgtggaaattctacttttttcccttcaactcatgacccgcgtagagcggaaaagcggatcgacgttatcaccgttgatgaatacggcattgagtcttaccgcgattgggcaatgactacccggggcggggcgcaattcgatttgttggcagagtcaaacgataaatcggtgtgcagcagcgtttatgccggggtgtgcgaatga

SEQ ID NO: 161023 - DNA, 1047 bp, Enterobacter cloacae
atgaataaccaccctgttgcttactacaacgagattgatcccttcgccgcgcagtggctgcgcaacctgatcgacgctgggcacatcgcccagggcgtcgttgacactcgctctattgaggaagttactgcaaatgaccttaaaggattcacgcaatgccacttctttgccgggatcggcgtctggtcttacgccctgcgccgtgccggatggtcagatgatcgccccgtctggacaggttcatgcccctgccagccgttcagtgcctgcggaaagcggcagggaaaagacgatgagcgccatctcttccccacatggtttcgtcttatatcggagtgccgccctgacgttatctttggcgaacaggttgcgagcaaagacggcctcggctggctcgacgatgtacgcgatcacctggaaagagcggaatacgccttcgcaggtttcgatctctgcgctgcgggcttcggtgctccgcacatccggcaacgcctcttttgggtggccgacgccgaacgcgagcaatgtcaaaaacgcctatcaggatccccagaaagtcatagccaggatgttggcggggcggcaatcgaacctacaggattttgcctgtctggcgggctggaacactcctacagcaacggatgggaagggcggatatgtgggcgggaggattcgaaacgggaagatttcaacggatcggttggatgtaacggcgcaactttcaggctggcagacgccgacaacaagcaacgatcgcaagccgaatcagcaaaatgcgctaacgagttatcgggaggacggaacaaaaattcagaaacggttgcaggatttggcagcaatagccgggccaatgcggttaacggtttctggggatctgctgactggctcttttgccatgatggaaagtggaggccagttaaacccggacttaagccgctggttaatgggtttgccggacgcgtgggccagttgcgtgcctacggaaacgccatcgttgcaccggtcgcggaagcgttcataagtgcatatctggaaagcgcgcaatga

SEQ ID NO: 161024 - DNA, 390 bp, Enterobacter cloacae
atggtcggtgaaccaatttccggcgctgccgctgcaacggtgactattacaggcgtcacatttgccagcatgttatcaggcactgacgcgggcgtttttgtcggcgcttttgccggggctgtggtgtatgtgctttccgctgctgagttaagccggtttgctcaagttgggtatttcattgcttcttttttgattggcgtactcgcggcagatatgacaaccgggtttatcacgttggcgatcggtaagtacctccctgacggcattacggtgggtaagtctattggtgcaaccgtcgccgccgcgctgggggtttatgtgcttctcatgctcagaaaaataaacccagggcgtttattttcggggggtggcgatggtaacgctaaatga

SEQ ID NO: 161025 - DNA, 321 bp, Enterobacter cloacae
atggtaacgctaaatgaacttctgcttatcgtgaatgcaattacatgcgcagtaatcgcggtaactttgggtacttatcagcgcaacggggcaaagcataagcgtctggctgctttgtttgcctgggtgctcattgtcgcgtgtggttccgtcaccatcctgatcgttaccggaaagtattcaaccgcaaactttgcggaaacggcgatcaatatggcgctctgtgtggctgttttatcggccaaaggcaacgtaatgaagattgttaacagatcggacgtaatgagcataagcaaacgaggtgcccgtaatggcaaataa

SEQ ID NO: 161026 - DNA, 393 bp, Enterobacter cloacae
atggcaaataactttaaattcagtcagcgaagtgaaaataacctgcgtggtgtgcatcccgatctggtgaagatagtcaggctggcgctggagctttcgccggttgatttcggcattacggaaggtttgcgtactgtcgagcgtcaaaagcaactggttgcggaaggtaaaagccagaccatgaacagcaggcatatttccggtcacgccgttgacgtcttcgcttatccaacgcctgccggttcatgggactggcagtattaccagcagatttcccaggcgtttaagctggcgggtaaaaatctgggcattccggtggagtggggcggagactggaagacgcttaaagacgggccgcacttccagttaccttatgccgattaccctgcctga

SEQ ID NO: 161027 - DNA, 183 bp, Enterobacter cloacae
atgcgttatttcaaccctgagacaatgaccgaagtattaccgggcatccacgatatggctggggccatagagctgccagacgataactggttttttactgctactgaaattcctgaaggtaagcaactttcagttaatgataaaggtgagccgattctaattgatgttgtgcagaatgaataa

SEQ ID NO: 161028 - DNA, 384 bp, Enterobacter cloacae
atgaaaaagttaatcatggtacttgcgctatttagccttgttggatgtaagcccggtgctgataaagctgttgaactggggcagaaggaagttgcttcaagtatgcgcgatcctgatagtgcgaaattcaggtatgtgcgtttcgttcagaaagatgaagctgccgatggtgctgttgtcggttatgtctgtgggcaagttaatgccaaaaatgcgtttggtgcgtatgccggttttgcaccttttgaaatggaagtgtcgatgaaatcgaagggcttcttctcaaaaggggtaacttactctgtatttaacaagcaactgtattcagagccgggacaggtaaacatggccgaatatgcgaagaagtgcggccctgatcaatag

SEQ ID NO: 161029 - DNA, 846 bp, Enterobacter cloacae
atggaaatccacctgcccgcagagctgcgtgcagtctgcgatctcagcacgctgaaactggaatcaggctcgttcgtcgaggatgatctccgccagtatttcagcgacgtcctctacagcctgaaaactacagccggcgacggatatattcatgttctggtcgaacaccagtcaacgccggacaaacatatggctttccgcctgatacgctatgcggtggccgccatgcagcgccacctggaggcaggacataaaaaactgccactggtgataccggtgctgttctatacgggtaaacgtagcccgtatccgtactcaacccggtggcttgatgagtttgacgatccggcgctggcaggcaaactctacagcagcgctttcccgctggtagacgttacggtcattccggatgatgaaatcgctggccatcgcagtatggccgcattaactttactgcaaaagcatattcaccagcgggacctggcagaactggttgaccggctggcgcccatcctgctggccggatatctgtcttcattacaggtaatatcgctggtacactatatagtgcaggcaggcgaaacatccgacgccgaagcctttgttcgcgaactggcacagcgtgtgccgcaacacggagacgcacttatgactatcgcacagcagcttgaacagaagggcatcgagaaggggattcaactcggtgaacaacgcggcattgaaaaaggcgagcgcgaagccacccttaaaattgcacgaaccatgctgcagaacggcattgaccgcactaccgtcatgaaaatgaccggtctgactgaagacgatctggcgcagatccgccactag

SEQ ID NO: 161030 - DNA, 876 bp, Enterobacter cloacae
atgtatattccacgtcccgcaaaattgctgtttaccatcgatgacggctggaatacgtttctcgaaaaattcggcgaccgcgtcactccctggacccgcctctgtgtcgagcgcatgctcgcctgtggcaccacggagatgggtgttcgtcgctattgctgttcatcatcagactgcacccatagccgcttcttctgccagagctgcaggtcaaaagcctgcagagcctgcggcttcaaagccacggagcagtgggtgtcgcagcagcgacatatcctcccggactgcgactggcaacacatcacctttaccatgccccacctgctgtggcccttcttcaacaacaactggcccctgcttaatgccctcttccgggccgccacccgcgctatgctccggtgggcccgcaaacagggcctggaggtcggtatcttctgcgctcttcatacgtacggcagacagctcaaccagcacccgcacattcaccactccgtcacccgcctgctgcgccacagctataacctgataaatcccggcagtttgccggggctgggccatatccacgataaaactcagtggcagcggcatctgcaggcgcagtacggacgacgctggaaagtccacttcgcgaagaagacccggggtgcctggcggagcgtcaaatatctgggccgttacctgaagcgaccgccggtgtcagcagcgaagctcaggcactacagcggcggcgccgtggtgcataactattacgaccaccgcacgcagcagtaccggcaacaggctctgactcaggaagagatgatcgggcgctatatcagccatatcccggcgaagcattttaagatggtgcgttactacggttttttatcaaactag

SEQ ID NO: 161031 - DNA, 864 bp, Enterobacter cloacae
atgaatggggtggtaaaatattttattatagcacaagttgctatggttagtttgttgttaattatgagaagtgagcgtcaaatgaaatatttagcacgcattctgtatatcttgttcatttttttatttagcctaccaagggtggttaatgcaacacccccccccgatacggtttttatcctggatataagatcaccagtggatatcttccagaatggtttttcttcgtttggtgatgatgctgatttattacggcacgtgtcaggggagtctatttataatagaaattcagcatatatatctacaacatctaactggatttcaattgaacaatttgcgcgaacatctatgcttccgaatagtattgcttatgtgtatacgatcaggccatctacaaatttttatgacgttaatggttcccttcttcatgcaaatatgcagcatgcagatcaaccccgtgttttacgtcagagtcttggtttattcagaaactatgcttgggaggaggagtttgccgcgtatagacggatcgcaaatagccaaataaggtatgcgcaaactgtaactagtgaccaaaatgggaatatttctatcagtgccgtacatttaaataatattcattatattgatgttcctccacgcattaataattcatatcttgacctggttgatcagaatataaataacacttattatctgggggatattgagctggcccctgtttcagcggcatttggtctggatgggtgtactcattatttaaagagcaaaactgatacttgtaaagtgcaaaagatggaggatgttactagatttgttaatcgtgcctttatattttttgcactgcaaaacgaggaagactga

SEQ ID NO: 161032 - DNA, 405 bp, Enterobacter cloacae
atgattaaatacttcagcatcccactactggcgttgagtatatactcaataaatgcagaggccgattatactaattgtttaccttcggcagactatacttcatcatcattcgatgccgttgtggagtctgttaagttgggatgggctgctatggacgatagggtaatatacgaatgcgtcattcatcttaagaatatagacgaaaaacctccgaaagatgtaactgtatcacccttgtataagaatctgaatgacacattggcgacaagcaatcaaatatgtagctatttttcaggaatatattcaatggatagagttcttaaagtgaaaacatgccagaaaaaaggtgttcctacaattttcttaaattatgtagagtttaaaagatggaatttaaaaccatga

SEQ ID NO: 161033 - DNA, 594 bp, Enterobacter cloacae
atgaatgaaatgcctttttattctcataatcaagagaacgtttatgatcttgattatgattattgggtcaagaatagtagcgggaattggattaatagaggggttttaaatgataacacattacctctatacactctctatacaacccttacgggacatgggacatctccttctcataatgcaacagttgaaagtgaattaacgaaatatcagcatgatttatatatgaggctatcttatattactgcattggttttgtttttatcgttcaattcctttgctgaagacaatttgttgttaagtaaaacttgtaagctaatcgatagttctaacaatacaattagctctgtaagggttaaaacacttgcagtgttttctgtgaggcttagttcagaccccttagccaaatcaattgtagtgcagtttactgatatggcagggaaaattacagggctatcatacgcactatcagctccatcaccaacagataatattattgtaaattatatcaatcaggcagcattaaacaatacattgttggatgtttgttatgattcaaataatggaattataggtgtttccaatgacaagtaa

SEQ ID NO: 161034 - DNA, 531 bp, Enterobacter cloacae
atggctgatattccttttggtacaatcgtaatgtattcaggttcaagtatccctggtgggtggttactttgcgatgggaaaaatgacacccccgatctgattgacaggtttatccttggtgggcaattagctgacgtcggaggtaaggggggcgggagtgttacaggggccagggattcccgtacctgtacaagaacaacatccagacagccggtagatatgaccgcccgggcagacggacacacgctgactatgaatgaaattccggctcatcatcatggacagggtgacctttatgattacgattacggctttgcttttgggcactggactgaaacgtctaaggggcattggattaatggcggcaaagtggataacaataccgccccccgttatgcgccaaatacgggtacggatggaggtggacaacctcattcacatactgtgacggtcacaaacactgagcatgaccataacgccaacatcatcccgccgtattatatactggcatttattatttatgttggttag

SEQ ID NO: 161035 - DNA, 468 bp, Enterobacter cloacae
atgaaaaccggtgaaaaagacctgccgctgattaagcattttgaggggctgcgcctgtgggcgtatcagtactccgcaaacgtctggaccatcgactacgggcacaccgccggcgtcaggcccggcgatgcgataaccccggagcaggccgatgcgtttctgcgcgaagatgtggcggatgctgagcgggccgttagccgttttgtccgcgttccgcttacccaatgccagttcgattcgcttgtttcctttacgtttaatctggaagccggaaacctgcgttcctccacgctgctgaagaaaactgaatgcacgggggctgcagagcagctcctgcgctgggtcagtgcaggcgggaaacggctccccgggctggtacgcggagggaggctgagaaatctttattcctggattcggcggtttatggctgaaatacctgcagaaggtcatgatatgaactgtggttga

SEQ ID NO: 161036 - DNA, 723 bp, Enterobacter cloacae
atgcgaataacccgtaatgcccgcagatggtgtctgcccggcctgctcagtctggcgctttcagcgcccgtgccggtagtttgtgccgccagtatcgaggcgggtttttctccggaaggaacggcgctgcaactggtccttaagaccattgactcagcacagcaggatatccgcctgatgggctattccttcacctctccggaggtggtcagggcgcttgtcggagcaaaacgccggggtgtggatgtagccatggttctggactggaaagccaataccggaaagaacaacaacgccagtaaagctgccataaaccttctggtcggtgccggcattccggttcgtactgtcagtgcttacaaaattctccacgacaaagtgatcgtcgccgacggccgcaacactgaggtcggctcatttaacttcagcgtggttgtggcctccctgtgtggtgcactggtctgggggctgaaccagcgatattttgaccgtaaaaagcaatcagtggcctttattatctcgtttgttatggggattctgggggctgatgtgacgcttgaagtcgttaaaataatcgttcccgggattttctctgatgagcgggcgataggggcatttctctgtagcgctcttgtaatcacagtaataattaatattatcgccagggtggattccgtcatgaaaaaaggaacaaaaaacaatgccaccagatataaaagataa

SEQ ID NO: 161037 - DNA, 798 bp, Enterobacter cloacae
atgttaacagtaaagtgcaccgcactggcggtgctgatgaccagcgctctgttgtccggtatggcaaatgcggcggagaaagccacacctgtctttactccggagcaggaggcccgcattggtgaaatcgcgaaagactacctgctggctcatcctgaagtgctggttgaggtcagtcagaaattgcaggcacagcagcaggaaaagcagcagcaggcgatgacggcggccgtgattcagcatcaggcagcgctactgaacgataaaggcacgccatcatatggtcccgctgatgcgaaagtgacggtcgtggagttcttcgattaccagtgcatctactgtgcccgtctggcccctgaactggagaaggtgataaaagctaatccgggcgtacgctttgtgttcaaggaactccctatcttcggaagccgctggccggcgtccctgacggcagcaaaaaccgggctacaggtttatcagcaaaagggcagcgaggcttatctgcagtaccataatgcggtctatgccaccgggcataatgagggcaagctgacggatgctgatatcagcacggctgcaaaagctgtgaagttagatgtgaaaaccgcgccggatgttcagggtaccctcgaagatatcggtgcgctggcacagcagctgggttttggcggaacacctgccctggtggtcatgccgtccagtggtgccagcgcggacaatgtgactgttatccctggtttcactgacggcgaaaccctgaacgccgctatccagaaagcggcaggtggtattcgctga

SEQ ID NO: 161038 - DNA, 684 bp, Enterobacter cloacae
gtgaatgatgacaaaacccgtccgcgcctgagcctgaagcgtaaggccccgtcagcagacacgtccgtacctgccagcgaggcgggggcggacatcacggtctcccgacggaaaacggtggtggtgaacaccgggcccaaacgcaataaaaagccgctggcggatgacagaccgcccgcctcccggatgccccagccgggcaaagggcaacccaaaaagacaaaggaaaaaaaacaaccagcactcccacccaacaaagcggtggaggtaatacctcctccaccgaagaaaaagccacgccctggccgttcggcgcggctgatgcgcccggcggacgccgtgcagacgctgagtacacactggccgggccttttcgctggcggtcagctgcgcccgctgaccgtcggggtaagtgaacagctctttgccgatgcagaacgccgggcactgcagttgtcgaagaaggtaatacgtcgctgtctgaaaacgctgacgcggacggaaacgtatctgagcggcctgacggccggagtcgcatgctacaacgcggatggctctgttgaatcgctcattccgcctgagcgtgaacgtgcagccacggcaaagcttgcgagggtacaggcagacaaaccgaagaaacaggcggcaaacgcacccgccatagatgaaaaaaaggaacattaa

SEQ ID NO: 161039 - DNA, 5157 bp, Enterobacter cloacae
atgctgaccgtatcatcgacggctggcggcggagccagctactacatggcgaaagacaattattactttctcggcaatatggaagcgtcctggatggggaaagccgcagagctgttagggctggaaggccccgtggatgcgaagacattcgatgatgccctggccggtttcttcccgcagggcgtcgatctctcccggatgtcgggcggtcagaatgttcaccggccgggttacgatctgacgctgtcggcccccaaaagtatttccgtactgggtgtggtactgggcgacagccgtattctggaggcccatcagcgtgctgtcggtgtggccatgggggaaattgagcgcctggccagtacgcgagtcatggtggatggggtcagccagacggagatgaccggtaaattgctggccgccgcttttcaccatgacacctcgcgtgagcttgatccgcagctgcatacgcacctgatagtgatgaacctgacggagtacctgggggagtggaagacactttccagcgataaaatcggcaacagcgggtttatcgagaacgtctatgccctgcaggttgcgctgggcaaaatctaccgtaacgaactgcgtcaggccgtggaggagatgggattccggaccgtggtgaccggcaaaaacgatctgtgggaaatcgagggtgttccggtagagatattttcacagcgtacgcaacaaattcgggaggccgtcggggatggcgcttccctgaaatcccgtgacgtggcggcgctggatacgcgtaaggccaaacagaaagatcccgaccgggtcgaactgctgaccgactggatgaaccgtctggagcaggaaggattcgatatcggcgcgtttcgccaggaggctgaagcccgtctgaaggctatggagagtgacagagcaatacgcccggagacgaccccggacgatgttcgtcaggcggtgagcctggcgatttctcagctcagtgaaaaacgtacccgctttacctattccgatgtgctgaaccggacgctgaacagtctcgatgcgcgggagcagattgcggtgatggcgcgttctgccattgaactggcgattgaggaccagcagctgataccgctggatcgggagaaaggtctgtttacctcctccattcatctgctggacgaactgagcctgcagcaactggccggggagatgaaatccactgtggtggtctctggcggtgttcccgcccggtcctctccgtctgcaccggtgatgcagcagattgaagcagaccgtccttcactggcgattgtcagccagcccggaggcgcgggtggtatgcgtgaatcggtgctggcaggcgtgcagctggcgcagtcacagggacgggacgtggtggtgctggccaccgaccgcagcagtgagcgctggctggccgggcagcccgggctgacggataaagtgataacgctgaaaggactgtcagaggccccgttgccggccaacagtacgctgattgtggccggggcggagaagctctctgtccgcgatgcgctgacggtcaccgaccaggcgcttcgcgcgcagtcgcagctactgatgatggacagcggcgggcgcagcgggaccggcaatgccctgcagacgctggaggcggccggggtgacccgctaccgggcagaaacggaacgtaccgtggccgtcagcgtggtcagtgagccggacaagaggcagcgctatgcggctctggcgcagaattatgtggcgatggtgagccaggaagagaatgtggttgtccaggccagcggtgagcgcgaacagcaatcgctgacggcagcgttgcggcagacgctgcaggaggaagggctgctcgggagtaaaacagcgaccatcgacacgctggtaccgcagtggctggatagcaaaaaccggcgccagatggatacgtaccgggagggcatggtgcttgagcagcgcgcgccggacagccgggtatctcagcgctataccattgattgcgtcagcgcggagacccgttccctgatgctggtcggggaggatggccagcgacaggggatgaagctcagtcaggtggacagcagctggagcctgtaccggtcacagaccgttgatattgccgaaggggagaaactgacctggctggcgcgacagggaaaacagcgtgccggtgacagtgtcacggtcactgccgtgcgaaagaacagcctggtggtggagcaggacgggcagaagcgcgtgattcgtaccgacgaaccgctgaaggccggatatggttacgttacctcaccgggaaagcgcgtcagtgagcagggcacggtactggccgcagtctccggccgggataccggggcgacgatgctcaataccctggcccgcagcggcgaacacatacagctttataccccgctggcgaacgatgaagctgaacgccggttgtcccgctcaccgctgtaccgtaccgcgctggcgcaggttaacccgcagaacggtgaactggctgacgcgctgtcggcggcgcaggaggcactgatgagtccggctgagaaagcggtaaggcaggcggtgtcgctgacccaggggagtgacgtggtgttcagccgacctgatgtactggcaaatgccctgccgttgcacccctccctgcgtcagggggatgtggaccaggagctggcccgccaggtgcagaccggggaaattatcccggtgccgggaccgaaaggcatcgcacagcagctgtatgtgacggccgcgagttatgaggcggagaagcgcgtcattcgtctggtggtggaagggctggacacgcaggcgccactcctgagccacgccgacccggcgttgttcgccgggctgacggccgggcagcagcaggcctccggcctgatactggagagcactgaccgcttcatcggcatacagggctatgccggggtggggaaaaccacccaactgaaaaccgtactggcggcccttgatccgctgccggcagaccagcgtcctgatgttgtcgggctggccccgacccaccgggcggtgggcgagatggcggatgtgggcgtcaaagcgcagacgctggcgagctttctgatggatatggagcgccgcattcagggcggagagaagcccgatttcagtaagaccctgttcctggttgatgaaagctcgatggtgggcaaccgggatatggccgatgcgatgagccatattgctgccggtggtggtcgtgcagtgctgagcggtgaccgggaccagctgctgccggtggataacggtgcgccgttcaccctgctgcaggagcgtagtccgttagataccgccatcatgcaggacattgtgcgtcagagtccggcactgaaaccggcgatcgaatccgtcattgcccgccaggtgccggcggcgctggacaccatccgcagcgtgacgccggatacggtgccgagagcgccaggccgctggtcaccgacgcaatccgtggtggccattccccagacgaaagaacagaaggaagaacagggtgaccgggtaatacaggccatcgtcgatgactttaccggtcgtaccccggaggcgagggacaatacgctgattgtcacccagaccaacgccgacaagaacgccattaataccgccatccacgctcagctgcaggagcgcggtgagcttggccgggaggtctcgattaccgtactggaccgggtgaaaacgcagaccgacaggctgaagtcggtagcagggatggctgcgcagcacggtaatattgcgctgattaacgaccgttactacaccattcgtgccgggcaggacagccgccagaacggttatgtcgaactgattgatgacaccggtcaggcgcaggcgctgtcagcctttgagagcagtctgcgggacatcgcggtgtttaaaccccgtgagattgctgtatcggtcggggagaaggtcagtttctcccgttctgaccgcgagcgcggacgcgaagcgaacagcaactggaccgtcaccggcgtgacaaaagacggcgagctgcagctgactcagggggaggagagccgcatcctgaacccgaacgccgacctggccgaccgtcatctggactacggctatgccggaacggcgcacaaggctcagggagccagcgcactgtatgtcatcgtgcttgccggcgtggacggtgggcgccaggcgctggcctccctgcgggatgcgtacgtcggcctgtcgcgtgtaaagacgcatgtacaggtctataccgacaatctgggtaagtggctgacgaaggtctctcagcctgcagagcggcagacggtccacgatgtgttgctggctgacgatgaccgtcaggcagcgaccgcacggcagctatgggaaaaggccacgccgttgtctgacagcgccctgggacgggctctggcaacgcagctgccggaggcgggcgaagcccgctttatccacggcagcaggaagtatccggcaccgcatgtggcgctgccggtgcatgatgccagcggcgtgcagcgggcggttttgctgcgggaggtgcagctcgacgacgacggtcgtctgcggggcctcagtgataacccgcgcctgctcggcagtgaggatgccacactggtggtattccggcaaagcgaaaccggcctgacccgtcaggcctcggacctggcagaggcccgacagctggggctgcagcatcccggcgacggtattgtggtcgtcagcggtgaatcccccgccgatgccatcatgaagcgcctgagtggtggtctggtcctgtcggacagcgtcagcgctgatatttctcaccattctgtaagcaccccggcagacatatctgacccgatgagtctcagaacgccggaagagcagcggatggcgaaagcactggctgaagaggcccgacgccagcagcatcaggaggccgccccgcatttgcctggcgataccgaacgtccggatgcgctgcagcaggcggagcgcgcagaatcccgcgcgctgcagcgtgaggccgaacagtcccggcagcaggagcaggcagaggtgagtcaggtcatacagcaggagcgtcaacaggcgcgaatgcgagaaagcgtggctgaccagcttcaccgggttgaacgcgagatagtgaaagagaaggaaatcggtgagtaa

SEQ ID NO: 161040 - DNA, 2190 bp, Enterobacter cloacae
atgagttccactaagcatattacccagggcggacaggtattcagctatatgctgaatatgtttatgcaggtcaaccgccgcattgccttctggttattgaatcttttttttgtgctgacaccgttatttttctggatgcgggtgccgtggcaggatatgcgtaacggtgggctgtactggtggttatacctgtctgccggcggtgaaaaagcgttgttcaacgtaccgcccgtatatgacgtgccctatgacggacaaaccctgcattttacctccgctgccattctgaaagacccctatatgacctatgccggtcagctgacgctacaggagctgtttattgctgtatttctggcgagctgtgtggtgctggcggtggcgtatggcgtctattatctcctgcgccggctgggtgagaagcaggcccaggacgatctggtcggtggccggacactgacagaagatgtgaaagctgtggccagaaccctgcaccgcaataatgaagcatcgccactgcattttgaccagttgcctctgctgctcgacagtgaggtcaaaaacctgttgctgcatggcacgccaggctccggtaaatccaatgccctcaacaagctgctgcagcagctgcgcgcacgcggcgacatggtgattgtctacgacaagggctgttcgctggttaagcgccactttaatgaaaacatcgataagctgctgaacccacgtgataagcggtgtgaaaactgggatttgtggctggagtgtcagaccacatcggactttgattctattggcaatacgcttatcccccagagtaccaaagaagatcccttctggacggggtctgcccggaccatttttacctcggtatctaaacgtttccagaaagacccgcatcgcagttataacgcgctgttgcgtaccctgctggccatcaatctgaaggcactgcgggaatacgtgcagggcacggaagcgtccaacctgatggaagagaaggtggagaagactgctatctccattcgtggtgtgctgaccaactacgtgaaagccctgcgctacatgcaggggattgagcgcaccggtaaacctcgctttgccatccgcgagtggatgaagcaggtcaatgaacctggccagcgtcacggctggctgtggatcacctctaacgcccgggagcacgagtccctgaagccactgatttccatgtggctggcgcaggcagcgaactgcctgctggagatgggagagaacccgacccgtcgggtgtggtttatctacgatgagctgacgtccctgcataagctgccggaacttccaggcgtactgtcggaggctcgcaagtttggtggctgttttgtcctcggttttcagaacaaaccgcagctggattttacctacggccgtgaatttgctgacgcaatgatggatttactcaatacccgctttttcttccgttccccggatgaaggcgtggcgaactatgtgatgcgtcagctgggccagcgccgggcaaaggtgtttaacgagcagtacagctatggtgcggataccgtgcgtgacggggtgtcgttcagcaagcaggaagatgaccagtatctggtcaactactctgacgtgcaatccctgccggacctgacctgttatgtgaccctgccgggggcgtatccggtggtgcgcatgaacatgacgtacgagaagttacccttcattgcggcggaatatctgcctcgcgaactgaacgacagtctggacccggaaatcgaggaggaaattacccgccgcgagctggatgaagacagcatcgacaggctgcttgcggtacagagcaacgagcctgctgtacaggcaacaacagcaccagttgccaccgtaccttcggtcactgctgcaacagaaaccatcaattcatcacccctgccaccggctgcagcatcgacctccgcgcctgatacccggagtagccaggtaacggccagtccggcccagaacggtggccgggtaaaggaatatgacggactgcaggtggatacacagaccggcgaaatcctgactgagccagatcgttacgaagactatgcggcgtacgagcaggaggccctgcaggcgatgcgggaagaagagaaaaatatcctcgttcaccgtgaacatgacgagccggacagggagtatgagccgggggaccgctggtaa

SEQ ID NO: 161041 - DNA, 231 bp, Enterobacter cloacae
atgaattgttctgataatgtcagttctgatgccgtattgcctgaagaaaatatttcgtcttcgcgtcagacaggaatgggatacgcccatataaaacatcttctgcctatgatgaaatggaataatgatgacctcattattatttatgatccggctgttgcatttcggaatgcaacttttgaggagatgattatctcgctgtcatgtgaatatgccggggagcagaaatga

SEQ ID NO: 161042 - DNA, 759 bp, Enterobacter cloacae
atgaatgaattaatggatagagactttaatcctgtgctgattgatgaggttgctgcatggcttttctggttgatggttcactcagatgggtttagttcaacacgggaaaaggttctcaaatctcatggtgatgttttactaaaaagcactgagaaatcgtctgtattctcaatgcataaaattaatgaactctctgatgacgccattaatcaattcagtgaggaagttgcgcggtatgcgtatcaaaaatcactggatgaacgaaacatgattggtattgtatatcaggaggatatggaaaaaggccgaaccccttcagcagagagcattgatgccagtgcgttcaatattcctgttgttgtttcaggtgatgaccttgagtgtcatggtaagctttgtatcagatatcctttgccttctgtggtaattactaatcgaaaacctgaacccagatattttcgtgtccaggataccaactgtctgggttttgactatccaatatatatttctcctgattcagcgagtgatacaggtaatggacaatggctggttactggtgtgttttatattccagagaatacaaggattaccgggcgcagatggagggagattattcctaattcgatatgtacgacgtatggaggtatcttctatgggaatgattctcgaataaaattgggatttcattggggaggggataaaacaggcgtcatttatactgtaaaatcactatttaaacgccttttgaaatttaattga

SEQ ID NO: 161043 - DNA, 588 bp, Enterobacter cloacae
atgacgataactaaatcagatattgaaaatgatgttaaaagactcatgtcttcattggaaaatgattatgagataccaacatcatggatgatcattaaacccataataaataaaatgttggttgtttattgtatgcttttcttggcagctataatcaatggtgttgtgtattatgataaagagtatccattagagatttttcttgcgggttgttttttttctgccatagcaagcattgtgctgacagtgatggcactgattatgacatatggtaatctttccatcctgatgtgcattccaaaaaatgttcgtgataactcgctgcttattaatcttggaaagaaaaaacttatggcttatggatacgtgatcgttgcgattaatgtcgttgttgcgattgtactcataagcgagcgaagggattttatcattggctacggaatatcttggtttgcttgcatgattatcggtggaattaccttcagcatgtccatgagccgctatatgacgccagcagtggtagccacgctcgataagattcgtcaggtagtttcatcagaagccaatgggaaacaattacatgaatga

SEQ ID NO: 161044 - DNA, 2919 bp, Enterobacter cloacae
atggatgcggtttatgtcctgagcggcggggagttcctgacggccatctttaacggcgtggctgtcctgatggggaccaccgagtgggcctcgatgtttcgtattgcggcgctgatgtcggttatggtgttgtttgccacctacattcgcggtcatgacccgctggaggtgctgaagtttattgctttctttatgtttctcaccagcgtgctcatcatacccaaacgaacggtgcaaatcattgaccgcagtgacgccaccagtgtacatacggtcgctaatgtgccgctggggctggcggcaccggcaaagtttatcaccggtatcggtaccgccctgacggaaggctttgaggctgtattccataccccggattcagccacctacagtaaaaccgggatgctgttcggcgccaacctggtggggactgcaaccgactttgccttccgtaatggtgacctggcagagttgtttaccgcttatgtgcgaaactgcgtggtaggcgatatgttgcttaaccacaaatactccttccaggagctgatgaacaccgaagatccgtattcgctgatattcagcaagcccagcccgttacgtggtgtgatggtgccgtatggtaacagtgcggcagtatcgcatgataatccgactggagaggggttcatgacctgtcaggacctggcaaaaaatgttctgcaaccccagttgaccaccgatacccagaatggcggtaagacctgggactactatgttgcccggctcaccggtggaaaaaccaatgccagcgcgctgtttggtaccctgctgggtgacagctacagctattactacggcggtggctccagcgccagccagattatgcgccagacggtggtgatgaacggtctgaagcagggcattgcctccaccagtgcgcagaacggcgatgccgccggtctggtcaacctggcctcgcagtcgtcctataccaagatgcgtctgagccaggccacgtcaaccagtattgccaccacctacctgcctttgctcaataccgtgctgctggcgatggtgattggcctgttcccggtaattatcctgctagcctccattcataccctgactatggaagtgctgaagggctacattttcacactgatatacctgcaggcctgggggccgatgttcgctatcctcaactacgcggtcagtatgtatctcacgggtaaaacagggacgctgagtttttctctgtcgaacctgtcggttatccagcagacccatgcggatattggttcgattgctggctggctgtccctctccattccgttccttgcctggggtatcgtgaaagggttgggtagcgcagtgtcgcaggccggtaactacctgggtacggcaatgaacagtacggcctcttctgaatcctcccgtgccggcgacggcagctgggcctttaataatctgcagaccgacaacgttgccggcaataagtgggacaccaactacgccagccgtagtggaatggccatgacccagatgggaaacggtgccacggcgacccggacacaaagcggtgcatcggtctacgataccaccggtgcgatttcccggctgccgaccgatattcagctggaccgttcggctgtcagtggattccagcgtcagcagcgtgaagcagagagtcagctgcagagcctgagcaactcgctgagtcactcggccagtaccgggacctcacagctgtcgcagtgggccagccagcgagggagcagtgatactgtcagtcgtggcgctgataacagcatcagcgcgaatgatgcggcggctatcagtaaactacagagtgccgtggcgcgttatgcgcgtgacaataatgtcagccaggctgatgcactcagaacggcaatggaacaaagccagaatatgtctttgaatgccggggttggggcttatgcgaaatttgactcgaacagacagtttgcagggaaaatagtgggatttgctaccggcgcttctgttggtggtgacctgcatggcaaagtcgattataacggccagaatggttcttctcatggcaccagttccgacatgagcaaccggaccagcagcacgaaggacttcagcgctcaggatctgaaagatatccgccatggcgttgatgtggtcgccagtcaccgcaccaccgacaacagcagccacacggataacgcctccggttcgttacttaaccagatggcagcgaccttcagcgacatgcgtactcaggccagtcagtacagcgacacacaaaatcgcagccatgaatatgcgcagatggcaagttttgtggagaacaacagtgcagccatccgtagcaatgccacccaggagtttgttgaatatgcgaaacagaatcatccggatgctgaacgcgtgctgactgacgtatccagcccggaagcgcgtgccgagcgagaggcactggctggtcgttttgtggaggaacgcatgatgccgcagctggaagcgcagttccgtgccaatcagggacgagctgcagaaggaatgggcgatacggttgctgccagtgggttacagggtgtcaaccatagtgattttgaaggccagcaacaacatatggcgcagacggctgccgggcatggtgtgaaagctgatggtgaggtggctggtgaagtcacacaatcgagagcgaatgcacagcgaagtgttgattctgctcaagaaaaggtcaatcatcagcaatcagaggtgaacaaacagtatactaatcttgagcaggaacatcaggtgcagggacgtcgttttgatgacgcgaataaggctgagcatgaacgccaggatgagttccctgtttttaatcatgatggagagttactagacaaagtcaataaatcattagacgagttaaggaaagggagtctgaatgacgataactaa

SEQ ID NO: 161045 - DNA, 1368 bp, Enterobacter cloacae
atgcgtaaaacgcttctggccgggatactggcgctggtctgtagcgcgtccgcgtatgcagatgtgaacggcgatcttaataactacttcaacaagctgggttttgaaggtaatgccaccggcgctgctgcctggcaggggcaggcagcaggttatatgaccggcggtaacctgtttctcaggagcccggtgaaacagatgcaggtgatgtcgtttaccccgccgtcactgaatgccggctgcggcggcatcgatgcctacctggggtcgttctcattcattaacagtgatcagctgcagcagttcatcaaaaacctgatggccaacgcccaggggtatttctttgacctggcgctacaaaccgtggcgccggagctgaaggacgccaaggactatctgcagaagctggcggcggacatgaacagcatgaacatctccagctgccaggcggcgcagggcatcatcggcggcctgtggccgaagacccaggtctcccagcagaaggtctgtcaggacattgcgggggaaagcaacctctttgccgactgggcggcctcccgacagggctgcacggtcggcggagagatgaacagcgtgctggataaggctggtgacaaggacaaggaccgggtgctgcgtaacaaaaacctgatgtgggagttgctggggcgtaatgccatgcttgacggggatactgaactgaaagaaatggtgatgaacctgaccgggacgctgatatttgaccgcaatggcgcggcaaaatctcttataccggaggtaaaccaccagggattactggtcgccctgatgaagggcggtaatgttgagatccagcgctgcgtctcgagcggcgactgcctggagctgaaaaacgggtccgtgactatcagcagtaaccgcgccctgatatcgcgggtgagagacatgattggcagtatccgcgataaattgcgaactgatgaaccgctgtcagcggcggagaaagggtttatccagagtacctccattccagtgctgcgctacctggtggacccgatgcaactgagcctcaatgtagacatgctgtcctcactgtcggattacatcgcctacgacattatgctgcagtatctgaaagagctgattgaacaggccaaactctctctggccagccggaattatgatgaagaggtgatgaaaccgctgagggccaacatcagcgaatccagccgtcaggtagaggccctgcagcaggaagtacaggtgaaaagcgatgcgctggctgagatggaccgccagatgagctacctgcgtcagcagacttcaagccagctgctggatcgctatcagcagaactaccgcttcggcggcagcgaagggggcctgtga

SEQ ID NO: 161046 - DNA, 342 bp, Enterobacter cloacae
atgaaacaggcatcttttctgatgaaacttgctgttgtcttttttctgctggcgatcgcctgtggctttgctggctggggcgcatggaaatactggaacgccatgttcagtgcgctcggttatggcattgcggactttgtgacgctaaatgcggaaaatcaggcgatgaaaaccccgctcaatctgactatgtatgccatgccggtcggcttctggtgtgcagcggccggctttcttgccgcatccggtgtgtcttttctccttgatgttattggtgatatcaaaacgcatttcgttgatttgtatttagccatgcgtagtaaggatgataaccatgcgtaa

SEQ ID NO: 161047 - DNA, 546 bp, Enterobacter cloacae
atgaaaatccaatatccaaaagtggcgctggggctggtactgatgctgagcgggtttgtattgatggcgcacgcctcgacgctggatgagctaaaggcgctggaagccggcaagtcagaactgcagccccgggcagaggtaaggtcagtaccagagacttctactacgcctgcggggcgggcataccgtcttccggatggtcgttcgataaatactgccgattatcgactggtgttgtttatgcagtcttcctgtcatttttgtcagcagtttgatccgcagcttatccagctgtccacgcagacgggctttaaggtgttcccctatacgctggacggaaagggcgatgtgagttttccgcaggcgatcccggccccgcgtgccgttctcggccagttctttggccccggtaataacggcgtgacgcccacgacctggctggtgaacgtgaataccctgcagagctggccactggcgcaggggataacggacatgaacagtttgctgcagaggataaatcaggctctgatgttccatcagaggtag

SEQ ID NO: 161048 - DNA, 297 bp, Enterobacter cloacae
atgacaaaagaatgcatttctcatcataagcacgaacaacagatcaggcaggagaacctgctgatgttctgtggcatggcctttatggcagcggggcctgtgttctggtatctggcggggatggcgctggatgcgcgggctattagtctggggccgaacaaggttgatgttcttgagtgggtcagtattgccgtttcgctattgctcagtctctgtggtaccgccctgggtctggcaggctgggggctggcgtcatggcatgcctggcgagcggtacggcagccggagggactgtga

SEQ ID NO: 161049 - DNA, 816 bp, Enterobacter cloacae
gtgaagcggacactccctgtagccttcctgttgcttgttaccggggctaatgcaaccgcagccagtcccgaactgtcgcaaaccgcatttccttcgtctgctctctcatccaccgggacctatgtggatacgcccattgtgggctggcactggtacaacgaacctcagccagaagaggaggttgaacaggatgatgacactgtcccgctcagcgccctgccgccaaacctgcagatgtcacttctgcagaagctgacaaaagaaaagctcaacagcgccatattgtccccttccccggagaaagcagcggactacctgcgcatgcagtcttatctgatgaacctgtccgggcagtttacgcagtcggccaaaaaggcgttgctgctgtatccggacctcgattacaacctggagcacagccgctataacggcaccgcaaccctgcagcagacggcggcccgtcagcagcagaatgatgccattcataatctgggtcagcgctatggcctgtttatgttctaccggggtaacaatccgcaggatctgcagatggcggccacggtgaaccagttctcacaacagtacggactgtcgttgatccccgtcagcatggacggtgcgcgcagcgaagtcctgccacagacccggcaggacagtggccaggcagcgaagatgggcgtcagccagttcccggccctgatgctggttgaaccgggcagtgagcagtatcagccactggcctggggcttcatgacgcaggacgacttagcccgccgcttcctcgatgtggcgactgattttaaggcgcaatactaa

SEQ ID NO: 161050 - DNA, 1830 bp, Enterobacter cloacae
gtgaaaaaacagctaataccgggcattttgttgctggcaacggcggtatccgtactggccagcccgcagtatgacgaggcggcaaagtatgccggcagcgtgaagaatcaggggatgaatgtgatgaaggggaccgacccggcggcgacgatccccggctacaccgcgaaaccggatgaatccggttattacggcgggaccaccgccaccagtaatcccgacctggaaaacgccggcaacagtgagatgcataacggagaagccggtaagaccatcatggaggtcattaagaatcgcccgaaggatctcatctccaccgacgccccctttatcagcggttcgctggatattgaggataaggctgaaaccatcatgtccggtaccgatacgcagtgcaaggacgtgaacgtggataagacccaaatcaccaattacacctgcgaacgtaccccggcggttgaactggcctgtacacgcaccgcgggtcccggaggaggtcatgaagaagatacaacagaagacaagcgtttcgttatcagtcacgatcgcttcacgttttcacggagtggaaaacagatagtgtttggtttttccccgccggaaaccggggtcgtcctctctgccagtctcaacatcactactcagtcctacctgtggaactcaaaagtcagttttatgaataccacttttaatgctggctggaatggtgactttacgctgaatgcggtggggatgcagctaaataaggataaggtggttcaggggacgagttgttcgggtaatgggtcatgtaccgggtcagtggatgacatcatattcagacagcttcagcagggacaaacacgcttcactctgacagtgatgatgagagtacccgcaaaaaaatgggtaccggacgtggtgtggtcagaaaattgtccgttcgacaaaacagaccaggtgctgattaatagcgtctgtactgaccctggtggcgatcgcacttttgccgtcaacggtgagaattatgttctgcacagcgactgctggcagtacaccgacacgtatgtttctcagtcggccgataacggcacctgtaacgactatatgcagaaccctgcctgtaccgtcggctccacgacctgcctcgacagcctgaacggtacttgtttgcgtgagcaggtggtcttttcctgcgaggaaaaggtgagcggtagtgcgcagctgtgcggtggtgaactggtctgtaccgatggcagttgtgaccagctggataacgggaagtcgaatgggtttcagtcagccgtttcggggctggccgcgctggccgctgctggtaaagatatcgccgccctgaatggtgtcaacgtctccgcctttaccggtgagggccacagctgtcgtaaggcgatggcgggtttcagcaattgctgcaaggacagcggctggggtaacgatgtcggacttgccagctgcaacaccgaagaaaaggcgctggcggaggccaagaagcgcaaactgagtatctacgtcgggtcgtactgtgcgcataaggtgctcggcgtctgtcttgagaagaaagaagggtactgccagtttgagagcaagctcgcgaaaatcgttcaggaccaggggcgtcgcggccaactgggtattggctttggcagcggaagttcgccggactgccgtgggctgacggtgccagaactgcagcgcctgaatttcgataatattaactttgccgacttttatgatgacctggagaacggtgccacgctgccggcagaccaggagttgcttgaccgcgtcaaagagcaaatcgccggtaaggtgacgggaggaggccagtga

SEQ ID NO: 161051 - DNA, 627 bp, Enterobacter cloacae
atgaaccttaaaatttttaccatgctggtcggggcgctgctggcggctgcctgcgtacaggccgatggcctgacagacgagcagcagctttttcgtgccctgcgggagcagagtgcagcgatacgccagcttccgcagaacgccgcaaccatgccggacgtcaacgcccttttgcaggacaaactctccggggctgatcggcagtggataggtgatatgcagcgccgggtgcagtcatctgtcgcaccggacagtgaggcccgtccggacgctttgtatttcctgtcattttccatccccgaggaggggcttaagcagatggtcccggcggcaacgcgctttcatattccggcgctgattaatggtctcgtggataacaacttccgcaaaactgtggaatcggtctttcgtctggcgcgggagaacaatcagggtggggtgcagatagatccccgtcagttcagtaaatacggtatcacctcggttccggccctggtggtgacctgtgatgccggatatgaccgcctcactggcaacctgaagttaaaagaagcgctggagcggattgctgcagaaggggattgtgccgatacggcgaagaagttgctgaaggagggtgcatcgtga

SEQ ID NO: 161052 - DNA, 996 bp, Enterobacter cloacae
atgacattcagactttctgcttttctactggcctgcggtctgaccatcggtaccggtacgcaggcctctgaacccgaatgccaggggcgatttgtcaatccgatcaccgatatctgctgggaatgtatgttcccgatgtccatcggtaatgcgacggtgtcgtccggttcgctgccggatacggagaacccgtcgtcccccatccagttctgcccggttccgccgcctgtctttcagcgtatcggactggcgattggtttctgggagccgtttgccctgaccgatgtaacccgcgcgccattctgcatggtcaatctcggtggtgtgagcatcagcgccggcaagctcggcagcggtggcgggaaacgccagggggcggtcaataccggcgccttctaccacgtccactggtacaaataccctctgacctggtggctcaatattatcaccgacctgggctgcctgcagggcggggacatggacatcggctatctgtccgaactggacccgacctgggatgacagctcactggcctctgtgctggcccctgaagcgttcctgttcgccaacccgattgcgcagggggcctgtgccgctgatgcgctggccagtgctgtctcaaaacctttaaacccgctgttctggtgcgccggttcgcacggcagcatgtacccgtttacggggtttgtctccaatcaggccagcccgcaggccgccagtgtgctgctctccgagcgaatggattacaagctgcatcgccaggggatgatcctgaacagtgtcggcgccgatacggccgtgtgctatgagtatccgtcgcccattatgccgaaagatcgttaccgctatcagatggtcaacatgtatccggatgcgggacgttgccacccgtttggccgtaccgtgatggcctgggaggccgggcatgccacgccggcgagccgacagaactttggttacctcatctggcgcaagcgtaactgcgtcttcctctga

SEQ ID NO: 161053 - DNA, 399 bp, Enterobacter cloacae
atgttgttcccgcttgttattaccctgctgtgtttcaccgtcggcgcgctgctgttggtggtgatattccagcgacgagaataccgtcgcctgcgggcggatgccgatgggatcgtgatgcgctatctggcggttgctgagcggtttgagtctctggtccgtgagctgacggagccttacggcggtgtattatatgatttgatggaggtggagcagcttgcggcccggatgaaggcgttgcccgaccgtgaaatacgggagaccgctgagcgtattcttgagcgcctgaatgaacgaatgcgcatgttactgaagcaggtgtcagaccgttatcgcctgtctgatgccgatcggcagcgctggctgagtgaaccggaatacccggaggtcggcaaatga

SEQ ID NO: 161054 - DNA, 627 bp, Enterobacter cloacae
atgcataaacgatacctgacgttgttgttccttgtctgtccactggtcgggcaggcaaaagatctgggctcatggggagatgtctggccggtgcaggagcagagctttctggcgctgattcaggatcgcctgcaggggttgcaggataacggccagatggcggagctgcagcaacagttccaggaccgggtggtggagcacacgctgcgcccgacaccggtagaagggctggttacagacacgcaggcacatacgtcctggtatgacccgacctttgtggttggccagacgctggccgatgcgcagggtcaggtctttgcgcgtcagggcgataccctgaacccgctggatacgctggcgctgaataccaccctctattttatcgacggtgatgatacgcgtcaggtcgcctggatgaaggcgcaaaccccgcccacgccaacctacaaggtcattctggtcaacggcaacatcaaaacggcagcagatgcgctgtcagagcgtatctacttcgaccagcaaggcgtactgacgaagaaactgggtattcactacattcctgcgatggtcagtcaggacggtaagcgcctgaagatcacctcagcccccataaaggaggcccgataa

SEQ ID NO: 161055 - DNA, 216 bp, Enterobacter cloacae
atgagtgacgaagtcgatgtggcccaggacgttgttgagctgacgaacaccgtggcggtgctggctattcgccatcagttgcaggcagcggggagcgaatattgccagtcatgcggtgaaactatcccggaggcccggcgtctggcggcaccgtgggcagacacctgcacgccgtgccagagcgtactggagcaccgaaataaggtggggtactga

SEQ ID NO: 161056 - DNA, 483 bp, Enterobacter cloacae
atggcaggtacagtcgtgaatcaaccggagtcccctgaattacaaccttctgcggacgttaccccggcagacggaacgtgtcataacgtcgcttcaacatcatcccatcaacgtcttagtcgccgtcgccggcgctgcctggtaccggtggcctgtgtcaccgcttttattctggtcatgaatgccggcatctcgatgttgctggcgcagtggcagcgaccggagacggtgagcttcgatatgaccggtacggtgaataactttatggctcaggtagccgggcgtcatctcagcgatgatgaggttaaagccaccaccgcgcgttttaacaccgtcctcaatgctgcgctgaccgactggcaacgccatcacggtgccgtcatcctggtggcaccggcggtggtgggcggtatccgcgatatcactgcggatgttcaggcagaggtggcgaaccggatggcagaaggagacagtcatgagtga

SEQ ID NO: 161057 - DNA, 2616 bp, Enterobacter cloacae
atggccctgcatgatgaattgttccgtcgcctgatgaccgactggcagcggaaggacggtgccgcgaaagccggagaggcgctggatgatatggactacccttctctggtcagcgtgctgccttaccagcattacgataaagacagcggcctgtttgtaaaccagaacaccatgggttttatcctcgaatgtacgccgctgattggggccaacgacggtatcgtggaggccctggacaacttcctgcgcaacaaacttccccgtgaacaaccgctgagcgtgctcctcctcgggagcaagtgcgtcagccatctgctggataacggtctgtcagacatggcctggcagggggagcaggcaacgcgctttgaccatatcacccgcgcgttctatgaacacggcgccctgtacggactgcctaacaacaaaggctatccgctgtcgctgcgtaactatcgcctctttatcagctacgccgagccgttgcgtcgtgatgttgatgagctgttcgcctcgctgggtcagacgctgagtatcgtgcagcagtcgctgtttgccgcgaacctgcactctgaggtgctggatgaccgggggctggtcgggctggtccgtgaaattgtgaacttccgccatgatcgcatcacgccaccgcccgatgaggtggacccgtatgaagagctgaatgcccagtgtgttgcccgctccatcaatctgaaagtgacgccggattgtctgcaccagagccagtcctccgcagagggggggcgggtgaaaacccgcatcatgagttacatgccggagaagaatccggtgaagtttgcgctgtggcagggcgggaacaacctcagcaatctgctggacccgacgtcgacggtgccgtgcccctttgctatcacgctgacgacagagctggatgttcaggcgaagagtcagaacgaagcggtacgcaagtttgccaccaacgataagcgggcaaactccccgttcggtaagtgggtgccgggggttaaaaaggccgcccgtgagtgggacggattgcgtgagcgactgtctaccgggcagtcggcgctggcgcgctacagtttaggcgtcacgctattctgcgaggatgataatgataaggccctgatgtgcgaactggcgctgcagaataccttccgcgccaatggcatttcgctgtgttcgcccacctttatgcagctgcgtaactggctgtcgctgtttccgttcatgatgccggaagggttatggagtgatatgcgccgcagcggcgcgacgctccgggcggagtccttcaatgtcgccaatctgttgccggtggtggcggataaccgtatctgcccgaaaggcgtgcccattccgtcgtaccgtaatcagctctcgtatctggatctgttcgacagcaagtcagggctgggtaatgacaactataacctcggggtgtgtggcacctccgggggtggaaagtccttcctgatgcagaccatcatccggcacatccttgacagcggagggcgggcctgggtgttcgatatgggggattcgtacaaagccctgtgcgccaacgttggcggggtctacgtcgatgccaccgacctcaagttcaacccgtttgccggtatcgtcaatattgtggaatcggcagagagtatccgcgacctgttgctggtcctctccagcccgtcaggcaaggtcgatgataccgccaagtctattctgctcaacgccgtacaggcggtctgggaaggggaggcaccgtcgaaacgtcgcggcaacgcggtactgatagacgacgtctccgacctgctcaacgtctggaccacaagtgagaagtaccgggacgccaccacggtacgtaatctgatggaggagatggtggtgtcgctgcacaagtacaccaccggcggtatctacggcgaatacttcaacagtccggagccggcgctcgatgacaacgttcggttctgcgtgctggagatggggcgcctcaaaaacaaacctgacctgctggcggccatcatgttctcgatgatgatttatgtcgagcagcggatgttcctgtcaccccgtagtgagcgtaaggcggccatcatcgatgaggcctggaagctgctggcgagtgaaaacggctttattggtgacttcatcgagaacggctaccgcaccgcacgtaagtatggcggcgcctatatcaccatcactcaggggattgaggactttgacggtgacaaggccagcatcgcggcgaaagccgcctggtccaactcgtcgttcaaaatcatcctgcgtcagaaccgggaagccttccgcaagtacaaccagaagaatgaggggcagttcagctcatcggagcagactatcattgaaggtttcccttcggccaaagatgcgcacttcagcgcctttatgctgcgcgtggccggacaggtctcgtatcaccgcttgatcctcgacccgctgagccgggtgatgttctcgtccgacggcgatgactttgagtttcgtgaacagtgcctgaaggaggggaaaactgtccatgaagcgctctggttactggcccgtaaaaaatacgctaaggaaatggaggtgctggaaaaatggcaggtacagtcgtga

SEQ ID NO: 161058 - DNA, 588 bp, Enterobacter cloacae
atgaataaattcattatgcctttactggcaggcgctggcctgctctccggctgtgccgggatgaactctgactttgactgtaatactgtggcccatgaccgctgcatcaccatggagcaggctaatcagcaggcggcagggcgttcgtcgtcttccccggtgatgtccggcgttgatggtgatgcgggaaagacggacgcggctgttgagaccctgccgcgccttgcaccggttccggtctcaccctcaccgctgaccggtattcaggcggccacccgtgatgcgggtacgcgatcggtaagaacgacgacggggagcctgctgctgcccgcgtcgcgcccggttcgtccggatgtgggaggcccggcagtaccttctcaccggccagccgtttctcctgccttgccggcatcatcacctgtcactgaagcccagcgctatgccgataccggggttagtcagcctgtacgggttaatccaaccacggctagactttggattgcgggctggattgaccgggatgatgttatgcatcaaccgtcggtcgtgtctttcgtggtgaagcctgatcactgggccgggagctga

SEQ ID NO: 161059 - DNA, 246 bp, Enterobacter cloacae
atgcgtaaaccacaacgccatcctctggcttcgttgtcttccccggagctggcgcaacacattctggataactgcacgacgtttatcacgctgaaccagcccgctcacccattctgcctgcagggtgagccgcaaagtggccatacgatagttgtcgggcgtaccggtggcggtaaatccgacctctgcgctcgcgtcaaaaatgatgtgcttcgccgttccggtgatgggtgcactgatgagtga

SEQ ID NO: 161060 - DNA, 381 bp, Enterobacter cloacae
atgaaaacgttatggacagatatcagagagggatggcgggcgatgcaatatcactacactggccccggtgcggcgttgcacgtaatggctctggtcacccgcggcctgctgtggtgggtggtgggctgcattctcctttttacggtctacggcgggttactgctgttttatctcgtacagaagccggaacaggtggcatcaacgattccgggcctgctggcggtggttcatgaggtagtggctctctggcagtggcagtgcatcacagtactgagctcggtcctgccgctgttctgcttgtgggtgacgcttgttcattttatttgggcacgtcccgctaacgctgaccgtacccgcattccgttcaacccgcgtcgttaa

SEQ ID NO: 161061 - DNA, 1356 bp, Enterobacter cloacae
atggctaacattaacgtgctgacccgtcgcaagcagatggcggtgctgatagccgtggcactgggattaagcgctatcggcggtgtcgcctggtatatcggtgcaccatcaaaggtgtcccccggtaagagccaggcaaaaaaaccggtaccggatatgaccggcgcggtgacctccagtaccttcggtaaaaaagtcagcgatacggcggtagctgacctgcagcataccgcgaatgaagccgataaaaagctggccagctttgagaatcagctcaataaactcgccagtgaaaacaaggcctaccgggacaaaattcagtcacaggatgatgatatcaagctgctgcagacgcagattgatgccatgagccaggcgggggaaaacggcagcggtcatgcgtcgcctggtccgggagtgccagccggcaccctgcccgtaggtggcggttcaggcgctgtcccaccgccgaccgccttttacccgggcgttcccggcaatcagacgacggtgaatatcgccccacagctgaatcaggggctgtccaccatgagtatcgattacggcgaaaaaaaggatgatgcgccggcgctgccgtatattccgtcggggagttttgtcggggcgacggtgattgagggtgcggatgctaacgcttctgttacgggggagagcgcctcatcaccgatgcagttccgcctgaccgggaaggtgattttaccgaacgacggggaatatgacctgcggggctgctttgtaaccgcagccgcttacggtgatatctccagtgagcgcgcgctgctgcgtaccgaccgtctgtcctgccgtgttcatggccacgttatcgaccagcccttcaaaggacacgtctcctttatggggaaaaatggcatccgggccgaaccggtcatccgcaacggcaaaattgtcggctatgcgtttgccggtggtgccatcgatgcaatgggcagcgccatatcgaacgtcggctcaaccagcgttggccttggtgcagcgaataccgtcagcggtggcgatgttgctcgcgccgggttcggtggtggtacgtcacaggcaggcaaaaccctctcagattacttcatcaaacgcgccgagcagtaccacccggttatcccggtcggtgccggtgtacaggtttcggttgtcttccaggaaggtttccagctgcagtatgccgacgtgaagaaggagaagaagcctgctgtatcttctcaggaaaaagcgaccggcaacgggatcaccatcaccaaagaagcgctgcgtaacctcaatctcggggactccgtgggtgccatgaaggaccagatacaggcaggaatgcaggaatcgatgtga

SEQ ID NO: 161062 - DNA, 777 bp, Enterobacter cloacae
atgaaaagaaaaaataacaggcatggcaggcaccgtctggcattgctggtcagtctgctctgtctgagcggcactgtgctggcagagccggtggcgatgttaccagtaaaaatccccgtttcgccggacagccaggtccgggttgcgctcagcaataccaacccgaatctgctggttgtgcctggcgataagattatcgccgtggacagtgcgcaggggatgtttctgaacgacaacaaggcgctggggcaggccaacggtggcgtgcagctaatgaccgcccagactaccccgttcaccttctatgtccgcacggaaggtggactgaccgtttccgttattggtgttccgcagaaacgggatggtcgggtgctgcagtttatctccagccgtccggtacagcatgatgatgcacggcgctgggagcagtctcagccgtatgtgcgcaccctgatctctgttcagcaggcggtactgagcgtcggcgtaccgaaagggtttaccgaagcacctgtcgtggctgtacccacattttccctgccgggctggttgtcggtgacgcctcaacaaatgtggagcggtggtgggcttcggctctatcgactgacggtgcgtaaccgtggtgccagtgagctggctataccagaacgactgtttcaggcgccaggcgtacgggcagtgatggtgtttccgttcagtaccacgctgatgcctggcagcgatacgcaggtgtgggtcacggtcagcaacgacggggaggggcaagctaatggctaa

SEQ ID NO: 161063 - DNA, 570 bp, Enterobacter cloacae
atggacctgaaggcaaagcgcctgtcggcccgctacacatcactcatctttctgctgcttctggtgttctttggtcttagtcttgccggcaacctggttgcctggttgcgactcgatacgctgattaacagccgtgaagagacctatataccgatggggtttgataccccgttcacactgacgcgcaaccggatggatgcaaactatctggagcaaactgccgaatcgctggtcttcctgcgctacaacgtgtcgccggaatcggtgaaagccaatcacaaagcactgctgcgcttctttgataacgaagagcgtcctgccatgcaggaagttctggccagcgaagcgcagcgcgttatcgacaataacgtcaccacggccttttacctgtccggtttcgacacctacccggcttcggggatcgtcgatattcacggaacagtacagcagtggataggcaatcgtaagcagctgccggaagacaaaattatccggatggcactgcgctatcaccggggtattaccaccattcaggatttcagggagcaggtggatgaaaagaaaaaataa

SEQ ID NO: 161064 - DNA, 306 bp, Enterobacter cloacae; identical to SEQ ID NO: 95039

SEQ ID NO: 161065 - DNA, 405 bp, Enterobacter cloacae
atggctgatatttcagtgataaatcagggggcggacgttgtctgcaaggggaataaaaagggactgctctcacgcatggtgtctgccgtgaaagcggtgccgttgctggtgaataaccgtaccgcgaaggcgctgtttaagtatgtggcaatgccgctggcattatttctggcggcgcgcggtatggcgcatgccgaagacctgacggcggccggcaaacaggatgcgacggatacctttggtgaagactccaccatgatgtactacttcatgattgcggaagtggtgctggtcttcctgctgtacctcaaatcacataacccggcgaccttcctgcttatcccggtgtttatcgtgattaccaaaatcatcttctccatcatttctgcccgctccgggggctga

SEQ ID NO: 161066 - DNA, 150 bp, Enterobacter cloacae
atgagccagaaaacaaccgcagaagacgatttggttcgcccgaaatccatcggcgtgccgctaaccaaagctgacagcgagaagctgtcagagcttgtcaaaaggggcaaacgctcacgccagctggaagccatgcatgcgtatgcatga

SEQ ID NO: 161067 - DNA, 765 bp, Enterobacter cloacae
atggctacacacgatcgtatggttatggctgcacacgatcgtatggatctggatgtcagatctcaagcctttttaaaggatttttatcacttccacaaaaattcttgtgatgcatggtatataaaagatgcaaatcatcgatttgtcgatgccagcattacattcctttcacgtttttcaccttctgatttaacatcggtcataggctttggtgatgatgccgtttcagaagcatcggccagagatattgccctcatgtatgaatttgaatcgctggttatgtcgcaggataaaaacataaccattctgacccggcattattttacggactgtaatggtgtcaattcttatatattaaagatgaaaccatggcatcaatctgattgtgttggagtgatcgtttatgtttcagatctagctgagattaacaaaaagacggactggctatcgttgttgttacttggagttcaggtaacatcatctgatcttaaattatttaatgataaatgtattaacccgaagctgtatctaaccgaaagcgaatggactattgcctggttagtcatttgtggtttttctcttaggaaggtttctgattttattgatatgaagagacagtctgttgatttaaaaatcagccatgcttatttgaagcttggtgtttccaatagagaagaactattggaaaaggctcgacgaaataggtgggtgaattttatccctgatagatttattgcagattctaatgtcataaggcttggctag

SEQ ID NO: 161068 - DNA, 381 bp, Enterobacter cloacae
atgccacggcagaatgtttatatgaagcaaaaaacaattgatggtatccgacaaatcgtcgatatgagaaggggtgagggcgcgacagcttctgatgccaatatctccagtgtctgttccgaaatgctggaactgggaatgcgtgtgtacctcaatgcaaaaaataagaaggcctcagatgcagaagctggtgaggatgtatttcaaagtgcgctttttgaagaggttgtaaaatcaagaatggcatcacaggagatactggcgctgatgttttctttgcaggatataaaatctgatagtcgtaataattacgataaattggtcgacgctctaaaagaaaaaacagatttacgggtcaaaaaggtactcaacagagagtag

SEQ ID NO: 161069 - DNA, 831 bp, Enterobacter cloacae
atgtctcaactcagttttgccagcttctttgaccaggcgaaagaggctgcaccagttacaccctctaaacccgtattgccagccgtgaacgcgccgacgataccgcaccggatgatgaccactgacgaagcacggcgccagtttatcagcgtgttcagggataccgcccgccagctgcgccgctgggaggttttcagcgactttatcacgctggcggccagcgagctggatatggcgcggatcagaacgccggagaacattgagcgcagccgtgaaatctgtgcgaagtacagcgggagcgatatcagcaatctacacacgcttttctgcatgatggttagcgcactggagtcgaaatttcacgactttctcggggcgattttcatggagcttgagctgggcgacgaccgcaacgggcagtatttcacgccgtatcacctccagtcgctaatggcgaagctgctcatgcaggatgtcgaacagacaatcagtcgggaaggtttcgtgacggtgagcgatccggcaagcggcgcggcggggatggttgtggcgtatgcggaatatctgctggaggcgggctataacccctctgagcacatgttcggtagctgcatcgatattgatccgatcgcggcggatatggcctttatccagctatccttgctgggtattcctgctgaggtgatcacgggcaatacgctgatgatgcagcttaacagtgtcaggtatacgccggtgtactacatcaacaaatttgagaagcgcctggacgatcatcgccgtatcagcgcaatgcgcgaatttatgcgagcgatgaataaagctgcataa

SEQ ID NO: 161070 - DNA, 321 bp, Enterobacter cloacae
atgcatttacacctgaccgaatcttccaccctgttgggaatgcaggccaccgctgaagcagagcgggcgtactggctgagccgtgaaaaggtggcggtgaaagaacccgctgaaatcgacgtgcacgccttccatgatgcgctggggctgatgtacccgatgaactggcgcagcagtgagaacggcgagtgtgaaaccttcatgctggcggagatggtctgcggcaacgtgaccgaaatctacgcgaggatcggtattcgttattacaggttgcgtgactacagcaaccttgaccacacggagattctggcacgcatgtaa

SEQ ID NO: 161071 - DNA, 453 bp, Enterobacter cloacae
gtgaacaaaggactgacattatcgacgctggttgccatgacgcaggaggattatgagcagtttcgctctgatggctggtcttcacgtcaggtgctgacgaaggctgttttgggggagctgcttttgccggagggctgggtggttgcacccgaatgccactctgaatacggtggtgtatggcccgttagcctgcggtatgttccaccacatggcaggcactggttcatgctgaccagccccggtgaagtctgtgaccactggatgctgttgctgcagtctgccagcggacagcggattaaatgtctgagcagaatgccggtgctggatacttttctggttaacagactgctgcagcgggctgatgtgctggataaaaagcggtatacgctggcgggtctggctaatgaactggctgttttcacagaaacggcagaacacgggcgtcgtccctga

SEQ ID NO: 161072 - DNA, 309 bp, Enterobacter cloacae
atgacagaagttcagtatgcctttactcatttcttgcgaatgtttgttgtaatggccgtgattaccgcaggatatggatatctcatcatcagtgttgttatgacacggaagcgcgcatttattcttcagttgttgtctcttgccggactcggtgcgttattttcattcctggtgttcaggagtgacagtatttggtcaggtgctccggaagtgtctcaggcaatactcatcggaatgtttactgcgacggtcatttttttcatgtccagcctgcttattcgtgccgccgtgcggcttatagccgaatga

SEQ ID NO: 161073 - DNA, 750 bp, Enterobacter cloacae
atgatcccctcagatctctctctggttcccttcagccctgagcgacgcgccgcgatggaagccatcgctgaggttgagcgcagacggtcgcgcggcgcggtgtcagcggcgtacccgtatgccagcgccttttttcgccggctcacgggcagcacgcgcatctcactcagggaaatccatcattttgcgccggtgctgacggcacgggagctacggggcagcagggacagctggctcagtgccatcgatgccctgattgaaagtcgcgggacgtgttgctggctaccgcttcctgtcggtgcaggtcagcgcctctttccggaggtggcctttcagcagaccgagcgggttcgctgtcaggacgccctgcgggatgaaaaatacacccgccagcgccgtaaggaagcgtgccagcgccgtaaggaagcgtgccagcgcgaaacagcatatcaggcgctggcggggcaggcggagattgagctggcattccataccgcggaaacggtcagcagctggagcgcacactggtcggggactgaacttcgccagtacgacctggaggagatgttctggcgctggagcgcgcgtttcccgtcgctggcgccaatggagcgctggatgacggagaaccagcctttctggtcggtgatggctgaaacggatgcgctgtcgcgggaaagcacgggaactgtcaggcagctggagcgctggatggtacccaacaagctgacagcacggagccgggtatga

SEQ ID NO: 161074 - DNA, 282 bp, Enterobacter cloacae
atgataaaaatactggttatttgtgatgatattccgcctttctttatgaccgcaaacgaatacgtgagcgagatcgttttcagtaacagtaaaggtgatttttataaatttcccgtccatatacttttcggaagttccggtaacggggagcctgtagcgctactgattgcgggggaaaaaaacatatcattttcagacgctatgaagctttgggttaacgttagcaacaaaaaaccgcacaggcattatcatgtcacctctatgagaagaagaaaaaagtag

SEQ ID NO: 161075 - DNA, 1665 bp, Enterobacter cloacae
atgtttaataatcttgaagtgtgtcaaacggtacttaatatgcttcctgaagcagtctttatgaaagacaggtacttccggctggttttcttaaatgaaaaagcctgtgatttattcgggaaatcaagggatgctttagtcggcagaaaggctccggatagtatgacggctccggaagtatacagaatgttaaaaatggaacagtttgtcctgaaaacaggagagccacgggaatttgaagaacgtattcagggaaaaaacagccagtccagagacatcttaatcaggatatccagactggtcctccatacagaaccttatctgcttatttcactgactgatgtttctgttttacggcaatctgaggcacagattcgttatctggcatatcatgaccctcttacgggactctacaatcgggccgcattttttgaaaaattacataatattttgaacggtgaccataaaagcgaattacaccggggtgtgcttatattatttgatattgatgattttaaatctatcaatgacacatggggacatcacgcaggcgatctcacattatgtgaattttcacgtcagcttctgagagctgcaccagaacattgtttcagcgcaagaattggtggcgatgaatttgcattacttattgaaggtacattatcttctggtaacgctgaagaattatgtcttgaaataattgaaaatatgcgcaggccgcttaatttaaacgggctgtcttttcacatgagtatttcagccggtatatccattctgaacgcgcctgatattgtgcccagtgaatgtttaaggaaagcaggtgcggccttgtatgaggccaagcatacaggtaaaaacagatattttatctattcagaaacgcttgacaaagcatttataaaaaaaagagaaatggaaaaagcattaacccgggctctggcaaatgagaatggtctggagtgtgtttatcagcctctcgtcagatccagtattgatgaaattatcggggtggaagttctggcccgctggaatgatccggaactggggggcatttcgccagtacagtttatccctctggctgaagagtgtggcctgattattcctttaggcgaatacatactcaggaaagcctgcagagaattacgaagctgggatgatttatctgtctccgtgaacatatcagcagttcagcttggtgaggaaaattttgctgaaaaaatccttgagatactggatagcgagcatttcccctgtgaaagacttgaacttgaattaacagaaaccgccattattcattctgatacgcatggtcgggagcaattaaacatacttcgtgaaaatggtatcagggtggcacttgatgattttggaacaggttattccagtcttagtttgttaaaaaatctgatagtggacagtgtaaaaatagataagtcatttgtgcagtcagcccctcagttgccggatgctgccgccattgtgagtgcagtatctactctggggaataaactgaatctgcaggttattgcagagggcgtggagactgacgagcagcgtcagtttcttgtgaacgcaggttgcactcagttacaggggcacttactgtcacaccctcttacactggacaaactggagaatctgatgatgggaaataaaaacccctga

SEQ ID NO: 161076 - DNA, 324 bp, Enterobacter cloacae
ttgcttcgtaccggtaatattgccgagagtcgccggctgaacattccccgcaccgcgtattactggtacggcggtgttgtcgcaaagcgggtggccatgatgctgggttgccacgatatctacctgtggaacgaaatgatgcggccggacagtgacgtggtctttgtgggtgatgcgcgcaatgtcgtcccctgctacttcatctgccagcagatgtgccgcctgctgaaagccgctggcgtaagcagcagggggcatggggaagcagtgatgagctggatgaggctgcgcaccggtatacgcagcggctggctgaggggataa

SEQ ID NO: 161077 - DNA, 219 bp, Enterobacter cloacae
atgatcatcgctgagaatctgacctatggctttaaaggtcaacggccggttttcgagaatctcagcttccggctggggcagggagaagtgctgtgtgttcttggccccaacggtgcagggaaaaccaccttgctcaaagttattgccgggatggtcgctgatgattctcatgtgtgtagtgaaaggtgtgatcacccttacccacgacagaatagataa

SEQ ID NO: 161078 - DNA, 237 bp, Enterobacter cloacae
gtgacgatcctctcgggtcttatcgtcgcctcggtatttgtagcttttgtctctgtgctgaaatatctggccgatccggaggataccctgcccgccatcgtattctggctgatgggcagcttttcatcgctgatcaaaacagaagtcttcaagcctgatcccgctttttatgttctgctattacgtaatttacaggctacggtggacgatgaatattctctctctgggcgacgatga

SEQ ID NO: 161079 - DNA, 360 bp, Enterobacter cloacae
gtgcttgatcgggatgttctgtttaataaagaagtgcttccggcactctcaacattcatcattgaaaatgttcgagtggtggaggtcacggatcaggcactatacggaattggtccggatgaatccttcctagttccgcgctttagcaagccgctgtcctctgatattgctctgcctttcggttatgtagcaacggctaccagccgcaatcttgatctggcatttgctgatccggttgatttccgtatctggagtgtacaggacaagtttaagaacgtggagctatttgcggaaagctctatcttgcctgttgtgtaccgtccggatttcattacacgactgacgaacgacgcagcgtaa

SEQ ID NO: 161080 - DNA, 210 bp, Enterobacter cloacae
atgaactttgatatgcgtacaaaccaaaattgtgcatctttttttaacccagcaaccaaggcatttgtcgtcgtcgattcgtttgacaactacgagttcgatgttcgtgctggtactttatcacgcactgaatttgtgggcacaatcacagcttcgaacgatgaagagttgaacaagaaattagctgagatcacggctgctcatatatga

SEQ ID NO: 161081 - DNA, 375 bp, Enterobacter cloacae
atgataactcaacagcaaattgatgatttagttgcagatattaacgatatcttagaagaagatagagctagactgaagatgtcatttcattttgctgttgatagactcaatgatcagcgtaacaaacctccaataacgctagatgaattgagagtgatttttacaaatttcattgaacaacacttgcagaccattttaggcaaagatgaggggttctccttcactattaagtgccagaaatcaggtattgctataccttgcgccatagagcatgaacttgaaattggtgcaacgtgggtagtacagcaagtgatcaccatcatgcggaatccgaactttaacccataccatggtgatgtcatcttcgatatttaa

SEQ ID NO: 161082 - DNA, 192 bp, Enterobacter cloacae
atgaactatctggagtttatcgaaaccagcgctttcagtatgttgcgtaaggatctcatggatgatgatgcattccgggagttgcagacatatttgctggaagctcatgatcgtggagacacaatcagtctaccgggggatgcagaaaggtccgctggagtcgccctggaatgggaaagcggggtggggtaa

SEQ ID NO: 161083 - DNA, 312 bp, Enterobacter cloacae
atggtgccgggtgcctcccggtgccttaaccccacctacccgtatgcaagtcaaacgcgcagagccttcaacactgctctgttccttttgacagtatccagcagagaagaaccgactggatggggcaaagtacactcaggaaacgggtggactaagcaggcccgcgaggatctcggcttctacgttgtcacagagagcgtccccctgcgtcaaatgccagacatcgtgaatagtctgtcccgtctcaagatcgtcagtcgtgccgtggcggtaataagccacctgaaccacgtcattatgctggacctgtag

SEQ ID NO: 161084 - DNA, 255 bp, Enterobacter cloacae
gtgtcggcggagttacaacgccagctggcgcgtgagtgggaaggctggctggagaacgggaaaggcatccgaacgctgaaaaatggcgtcctcaccgaatccgccattgacagcgttgatccggtaattttatccctgttcagccagagaccgctggcattgcaccgtggcatcggtcatgcgatgacggtaaccggattgacggatgcgctgtgccactggcgcataaaaatcttgctctctgcgggcttgtga

SEQ ID NO: 161085 - DNA, 330 bp, Enterobacter cloacae
gtgaaggggattactgtgtttatatcgaaggccatggccgcgtttgtgacggtcgcgcaggaaaagagtctcaagcggaccgcggagaaactgtgtctcaccgtgccgcctgtctcccgaatgttgaaaaataccgaaaactggttcggtgaaaagctggtcattatcgaacgtaacagcgtgacgctgaccccgtttggcatcaacatctaccgtcagatattgccgcgctatctgtccctgcagaatctttcgaagcggaaaagtcgtgcccccgtcaccatctcctcgccggtggtgcatgccgcattttttgatgaaatcctgtag

SEQ ID NO: 161086 - DNA, 180 bp, Enterobacter cloacae
atgcatgaggccattgaagccgggcgcgggataaaggcagaagcacctgcagttgaaccggctgtggctcatcaggatccttttgagcagctcaaaaagctatccgggctaaaagagagcggcattatttcggaagaggaattccggacgaaaaaaagcacattaatggggctgatttaa

SEQ ID NO: 161087 - DNA, 246 bp, Enterobacter cloacae
atgagtcacgaaccggatcttagcgttgccagcgatctctccgccttcactggcacccactttgtttatacctatgacaacggctggaagtatgaatggtacgcccggaacgacactacctgtgattaccggatccatcagggcctggtcggcggacgctgggtgacccgccagaagatgcacgccgtccagtttgcgacgggcatttacaaggtggacaggcacctgcgtcagcctcctgtttga

SEQ ID NO: 161088 - DNA, 612 bp, Enterobacter cloacae
atgcgtttggataattgttgtgaagacttaagtcttatcagcagagttattgctggtgtgactttagatgcttctcagcatctgaacaaaccctccagacatgtacactctgccgggcgtagactgccgcgccctggcgcgcctgttaagcaggcggctaagctttcaggcttttctgagtgggaagcccgcgagcgacctcatattgattccttgccaggtagtcagcctacccgggatgaaattcaaaaatttcacggttacgcggaaaaacttcatcagatgatggtcagccacatcaggctgacacaacagatttctgattacagtgccgaacaaattcgtgattgcgtcgacagggatcaataccatcagctgcagaatattgaccttatgatccgcgggctggaggggctggtttcaaacattttacgcggccagtatcggcctcacaccagctttgtgaaccttgcaaaggccatcaccgaatatcgtgttgcgctttcggatcttcggatgatcctagatcaggcttttgttgagcgtgaagtggtggagtcacgcacagagtgtgttgatcaggacatctttgccggtttttcctttcactaa

SEQ ID NO: 161089 - DNA, 201 bp, Enterobacter cloacae
atgaaattttctcacaccgttctgactggcctgctgatgctggccccggcgttatccgccgtagtggccaccccggcggccaccggctgcgaggccaaacgccaggatatagagcagcagctccgttatgcccgggcgaacgggaacgatcaccgcaccgccagtctggaaaaagggctgtctgaggtcaacgtgcactga

SEQ ID NO: 161090 - DNA, 456 bp, Enterobacter cloacae
atgaaatctgctctgatgacatctgttattctgacagcactgagtgtgcctgcttttgcaggggataaaatcagccagccgctggctgtgacgaaagtgtactgcggggccacctttgatgcgccgagaggcgtctggtcggggacgtcgtccacggacgacctcgtgtccagcgctgtacaaacggtgaagaacagcgggtgtgcgttttcagatttcgcgactgaagcaggcccgacgcccggagaggcggattttcgacattcgctgaccagtatgagaaagaacatggataacgccttcagtagaaggcaggcgtttgagcgaagtatgggtgcccaggaactggcgtgtttgatccagcgcacccaacccaaccacgccggctgcgtaaaccgtaacgccgcaggcgcggcagcatgcttcgcggacgttgcccccctcacgccagcgtga

SEQ ID NO: 161091 - DNA, 561 bp, Enterobacter cloacae
atgtttgcattcaatcacctaaatctattcaaaaacaaaaggttgttggtaatggatatgacgaagaaaaccactcaggaactgccaagcggtagtgagaactctttcggagtaagattatcaatagctatgaaactttcaggtgatactaaaagttctttagctcgaaagtctggcctctcagaggctgccattaggggatatctaaaaaacgaatcatctccaagtattgctcaacttcttaagttatctaaggctttgggtattaaagcttcttggttgataggtgagggtgatgatcttcagtcaaaacccgatatagaacaagaagtatccttgctgattatgttgttcaggcatttgtcaggaatgcatcgacacatgacgttgaagctagtgttatcggcattagcaaatcaatatcatgatgttagcgagaaagatttagaaaatctcacttctccggtcattgacatggcagtgaagatcaatactctgagccaagccgataaagaaacactcattcaaaatctcggacttgatctcaaggttgatacatag

SEQ ID NO: 161092 - DNA, 735 bp, Enterobacter cloacae
atggcaggaaacccggctgaacatactgctctggcagacgaaccgctgagccgcatcaacagcaataacatttcctccctgacctggtttgaacatatcctcagccagctgacctggccggtgattgccacgcgtactacggaagaatgtgaaggtatcttgcgattcttctttgagcacgccgacgaggtgatcaagcgttacaccatccgtaatgaatggtttgaaccccataatctcgatatgaacagtgtcgctacccgcctgctggagcggatctgtgaagacaggctctggcctgttcaggaacgtatgagcgcaatgctggatacgggaaaatcgtggcgctggatagcggacttctttcgccagctgctctggatgcatggtcttgccggaaacagggcgacgcatgaacaaaagcaatttttgccccttgatgaactgagaatactgcagcgccggctggcgttccgtcttaatacccctgacattaccggccagtttgagcagggtgagttattcctgtcctatatctgggcatggtgcgacatcagcggtctggagcacgtcagagtctggtttaaggaaacaacccgtgaggatgaaaaatttctcagattactgcttgccctgcgttaccgcgggataagctccgcaaccgggtattacagggcgcttagcctgactcagatagcggagtttctcggcagcacggatcagatcaaaaaatag

SEQ ID NO: 161093 - DNA, 231 bp, Enterobacter cloacae
atgcgaccacaatctgacaatttacttgtcaaaattgtatatttttccgttactttcattttctttttggcgatttccacaaacctgatcctgttttttttgattggattagggatagcagaaatgaatgaacgagcaataggggcacttgtcagtattgctctggctctgatccagttaatgagaaaacttattactgagatcggaagagaaaatagtaacggaacctaa

SEQ ID NO: 161094 - DNA, 981 bp, Enterobacter cloacae
atggcacagataagctttcgtctcagcgatgagtcaaaaatgcgcgctgacaaggttcttgagcagcagggttacagtgcaggcagttacctgcagggcattgtggagtacatcgcgcagaatggcacccttcctgtggtgatcgaatttcgcccggtcgcgttaaaccctgaagaggtgtttcaggaagccattttccagttccgtgaggcttatgttgactggcgggccttttgccggaatgagttacaggtggaccagatgacgccgctggataagctgcggacgcatattaatgcaatcaatgcggcctatgaattttaccagcgaaatgagtctgtgatccgccaggccccctcgcaactggaaaaaatcaatggcggggatcccttccagtcggtgatgttctcccgctgcatcgagtatttcccgtccctggtcgggtgcctgcgcaaggcggtgagctgtgtccatatgaacaatcgcccggttcagcagggggacctggacgaaatggagcccgtattagcccaggcggcaaaggccatcgatgagctgcaggcgatggcgaacacctcggtctctgcggagacgctgatccgttttatgctgcgtgatattcaggaagcgctggactgtgcgacggagtccacacgtgaacatatcccctatatgatcgcccgcgcctggcagcaacgaatgactctggcgatcggggaagccgagaaaaaatataagcggcttggcacatcggaacaggacgtggcgctggccaggctgagacatgacacccgtctgctggccacgaaggtgacagagtatgtggaaacgacatcggagccgatgaccggatttgatgtggatttccttgaccaggtggtggcatattttcatgaggtggtcagcctgtcgggctgtgtatcggcctccatccggacggatgccggccagccgggaaattcaggtaacgacaacgcctga

SEQ ID NO: 161095 - DNA, 156 bp, Enterobacter cloacae
gtgagcgagctggaaattgtcagggaaggggacagcatcattctgcgtcccgtccggccgacctggggctcgttcgcacagctcgaaaaagctgacccggactttatggcagagcgcgaggacattgtcagcgacgaaggacgatttaacctgtga

SEQ ID NO: 161096 - DNA, 408 bp, Enterobacter cloacae
gtgaacaagatctatatgctcgacacgaacatctgctcgttcatcctgcgcgagcagcctgaagcggtgcttaagcgcctggagcagacggtgctgcgcggccatcgcatagtggtctcggccatcacctactccgagatgcgtttcggtgccaccggtccgaaggcctcgccgcgccacatacagctggttgacgcgttctgcgcccgcctcgatgccatcttgccctgggatcgcgccgcggtggatgcgaccacggagattaaggtggcgctgctcctcgccggcacgccgactgggccgaacgacacggcgatcgccgggcacgcgatggcggctggggcggtgctggtgaccaataacactcgggaatttgagcgggtaccgggcctgatgctggaagactga

SEQ ID NO: 161097 - DNA, 735 bp, Enterobacter cloacae
gtgagtgaactgaagattgataatcctgcccagagactgctggacttactggagcaaggaaaaaattataagagggaagatatctgccgtgtagtctggcaacagatactgcaggttgagggaagggaagaacagcatctccttacccggctggcattcgcaatggcactgcctggacgcattattcagatcagagaggacaatttttcctccctgcgtggcaaatccagccactggaaaaatcacgtggataaagcatttgtctcacaaggcttaaacaccacctggagtacattccaggatcacatcgatgatcgtacactcaccgcgcttggcatgttgtccgatttgtttgaaacccggggagcacgtgtgggtatagaagcagaagaaatcgatgctctgctggagcggataacgcaactgcgtagcgagatccgggagagcgggctttccgctacgatgaaaaccctgctgctaaaacagatagcgcagattcaggaggcgctggagtcatacagtatttccggtgtcgagccggtaatggacgctgttcagtccacactgggtctggtagtctgcatcccgaatatcgtaatgagattagcaaaggcacagggagccagttcggcgataaaatttcctcactgcttggcgatgtggcaaatgtcgttaccgtggccggtgcattacctgctctgccagctgccattcagacagcacttagccttctga

SEQ ID NO: 161098 - DNA, 534 bp, Enterobacter cloacae
atgcctctagatgaaaaagataagtttgatcatgacatgattcagaagatgattacccgtactgacgggtttcataactatgcaaatactaaatcaactataattatcacctttattacagccatactggccgcaataggtactaattcaggaagtgctgtaacatacctagaagcaaaaggttgtcatgaactcgctattatttttaagctactgattttattatcaatagcatttcttatatccggatattatttcgctggtcgaaccgttattccctacattaaaacaacctcaaagagaaacttttactcattcattgacacagtgaaacagttcaactccgagcaggaatttgaagaagaaataaagaaaatgcccgtcaatgaaataaccagcacgatgatttcgctgcagtacaacctttctcagggtctggtcgaaaaataccggctacatcgcctcgccatttttttaattcttttcgctgcaataccgttaatgattaacaccctgataatcttcttcgtataa

SEQ ID NO: 161099 - DNA, 1368 bp, Enterobacter cloacae
atgagcaaacaatttaaagatctattcagtaaggcccgaatggatgtcagcagcggtatgaaaacgggtagtctaaaaaaatcaaatgtgtatgccgattcgacacagaaagcgatttttgaaagtgtgaagaaggggagtcgtagtgatagtgcagagatttttgcgaaagcaagtcttgagaactatgctgaagatgccatgccctccgcattccgggatgttaaaactgaattacggaaagttttttgtaaaaaaactgaagtcactgaaactatcggctgccatcctgattttgacgatctcaaaataaacgatgaactccgaaacggctatgccgtgactatgttttttgatatagccggttctaccaaacttggaaaaacgtatccacctgagatggtgttcaatataaagaacacaatcataagatatgtcattgaaataattcaatcttttgacgggcatgttcatcgtattatgggcgatgctgtgatggcatttttccgcagtgaagtaaaggccacagatggtaaaaaaatagacagtgcgattgatgccattaacgccgcagtatacatacttgaatttatggagcaggttatccggccagaactgggcgatcagggttcggaagagcgtataggcgtcagactgggcattgactacgctaaagatgatgaaatagtgtggggaaactacggtgtttcaggtgcatttgaagtaacggcgacgtcatatcacgtagacgttgcggctaaacttcagcaagcggcagatactgatacgatcatgattggtgaaaatctcaaatcgctgcttggtttagggacggagtatctgtccacaaaatggaaatgggtgaagaatgaagatggttcagaattcaagcgctattatcggcatgtaaagcctaactatagagtcaggggatcacagataaattactcacaatatgtttttgacagcgcagcatattttaagtttctgccttatggaatagaaagcaaaagcacatcagtggtactaacggcaactgcagataacatagaaaaaaaactgtattgtccatgttcagaaagcctcgacaagggaatgtcgctaaacttccatgtaatattcagtgctcctgcagggcagccatatacgctcaaggctgttaagaggaacacgggccctgaagctgaaagaaactctgcgttaaaggaagtgaaaaaagatagaatcatgagtttctatgcaggtcagtggcatgctgatatttctgaaagtaccagttatcatggtttacatcatatggaaattaaaatttatgacagtaatgataaagaagtcgatagcacaatattcagcattttcataagctga

SEQ ID NO: 161100 - DNA, 228 bp, Enterobacter cloacae
atggctggcagcatttcggggaagcgcaggccgacagctatatcgaccatctgtcagcggtgtttcagcttctgggcgggaacccggcgcccggaactgggtgagggtatatttgcccttccttttgagcatcacgtgatttattttctgcagacagaagccgtcgtgattgtcattcgtgttctgagtcagcatcaggacgccgggagacacctccactggcgatga

SEQ ID NO: 161101 - DNA, 267 bp, Enterobacter cloacae
atggcacgaaccatgaccgtcgatctcggcgatgaactgcgggagtttatcgagtccctgattgcatcaggtgattaccgcacgcagagtgaggtgatccgcgaatcccttcgcctcctgcgggagaagcaggcggagtcccgtctgcaggcattacgtgaccttctggcgaaagggctgagcagcggtgagccacagacgtgggaaaaggatgcattcctgcagaaggtcaaatccggcatgaggacatccggtgaggagcgttaa

SEQ ID NO: 161102 - DNA, 222 bp, Enterobacter cloacae
gtgaacaaaatgtatatgctcgacacctgtatctgctcgttcatcatgcgagagcagccggaagtggtgctgaagcacctggagcaggtgctgcgtaatcagcgtatcatggtctcggctattacttactctgatagcgtgttctcagcgcccgtagcaactgacgacgggtatccattgacaataaagcacaaggtgacaatttcagtgcgcgtttggtaa

SEQ ID NO: 161103 - DNA, 1560 bp, Enterobacter cloacae
atgaaattaaaaaaaagggcactggcagccggtattcttgctcccgctatcctgcttggactgctgtcgtcaggcatggccttccgtcagctggacagggacagggccgtgacggcggacattcttatgaaccaggtcgatcacgtcacatccattgcccgccatgcgagcctggtgaccgctaaactttccaccctgccctgtgaaagcgtccagcagcagatgacggagaacggagccctgaccccctatatccgcagcaccggactgatccgggatggtatgttaatctgttcgtccgtgagcggcgcaaggcagcaaagcgccgctacggtttacggtgttgccgtttcagcccccacaggcagtctgaaaatcatcgcaacagaaggtaccagcagcgtacctgggagtgcggctgttatctacgcatacggcgcgggcaaccggacgacggcgttcagcgtagtggacgcacggtacttcacggacctgatggattccctcgatgatgagaatcattcggttcagcagctccggttcaatggcgggcctgtcatttcgggtcaggagaaaatcctccctcacgcaaaaatgttcacagctcagttccgttctgatgtgagtcaggcgcagcttcaggttcttacgccgcaactgtcgctgcgccattacattctgcgtaatctgcttttcctcggccccctgtcttttttactgaccttggccatgctgtacatgtggcgccgctgggaatcaagaaagatgtctctggcagatgaaatcaggaaagggatggcagacggcgaattcagggtgcattaccaaccggtctgtgaaacagcaacaggtgcctgttccggcgcagaagccctgatgcgctggcagcgtcccgacggtagaagcatttcaccaatggtgtttatccgggcggctgaagaggaaggcctaattgtcagtctgactcagcatctgttcagcctgatagaagaggatgtcaggggctggcaggtgacagcccccttccatctgagcattaatattgccgcccctcacctgatggacaggtcgtttactgctgacgttctgagactgtgggtgtccctcgacgccgcgtttcgtctggtgctggaaattaccgagcgcagcctggttgaggacacagatacggcttcagcgaaacttcatgagcttcgccagaaaggctgccaggtggccgtggatgatttcggtacgggctactgctcgctgagtctgcttcagagcctgccggtggattatctgaaaattgacaaaatattcatcgacagcctggcgtcggccggagcggatacgccagtactggacaccattgtcggcctcagcaagcgcctgggcattaccactattgccgagggcgtgacggcagagcatcaggtcgactggctgatgaaaaatcaggttcattatgtgcaggggtattattatggccgccccatgcctgcagccgatttttatcggtggtacagagaaaaatgcacattcctcacggacgaactcattgccggtgatcaacgctaa

SEQ ID NO: 161104 - DNA, 375 bp, Enterobacter cloacae
atggattgcgagccgggcatgataaatgcaagcccattgtcacttaatgtgagccgcgacagttaccagtgtacggatgcagtgattcaactcggtgagcgagaagaatacctggtaccggagtcgggccaggatccagagttcgacgatctgaacgtcaacttccacctttggcttgtctctgggttttctggggcggggtggtatcaccacaacctgataatgctctgccagctgctggtaggagggattcagttcgggatcgtaacgacaagctttgttaaccccgcttttcaggctatccgggaccaggatttcggggataccaccgaagaactccagcatcctgacgtggctgagaaaccagtctggtag

SEQ ID NO: 161105 - DNA, 312 bp, Enterobacter cloacae
atgcctgtttcaattctgtaccatcctggtttaaaagtggttgtcgcctcgttttgcggtgcgctggtctggggggtgaatcaacgatattttgaccttaaaaagcaatcggtagcctttattgtctcttttattatgggcatactgggcgctgacgtaacgcttaacgtgattagtacaatcgttcccggattttcctctgccgaaaaggcgataggtggatttttctgtagtgctttgatcattaccctgataaccaacctgattcatcagataagcttgctgcagaatactctgggaaaagaaaaataa

SEQ ID NO: 161106 - DNA, 441 bp, Enterobacter cloacae
atgaaactcagtgaatatggcttggatctgatcaagcgctttgaaggactacgtctggaggcgtatcagtgttcagcgggggtatggactattggttacgggcatatcgccgatgttcgtcctaaagataggattgatgaaatgcgggctaattcgtttctgcttcaggatgttgctgtgtcggaaagcgccgttggacgatttgttacggttgatcttagtcagcaccagtttgatgcgctggtttctttaaccttcaatattggagctggacattttcggtcatcaactcttttacaaaaactcaatgctgaagactattccggggccagtaaggaatttttgcgctgggtcattgccggcggaaaattccttcccggactggttcgccgccgtgctgcagagaaagaaatatttatgcggggatatatatctgaataa

SEQ ID NO: 161107 - DNA, 723 bp, Enterobacter cloacae
atgaattatctgatcgttgagccaaaaactaacccgatgttaagtggcgggacgggtgctgcaagatccatttttatccatacggttgattccgattcaggaactgatataaatgaggacggcgttattaacttaacctgtgataatgagcatgtttatttttctgatagtgcagatggggtaaagaataaaacgctggagttaccacttcgaacaaaaccttgggaagtttatcttttgattgataatgattatgtattacgggataaattcattattaaagctgaactgaaaacgacaaatatttacctggagtcgaccctcgaaacatatttcgaagatggtagtacccctccggatgatatgaaatttgctttacttgaattgcaattacccggtggtttggtgaaagaaaaaaaagacattaacgtagtttttagtgcttttagaggagacgatgcagctaaaaataacaaaatcgaaattaatatacctgacgaagcaggtggacatattattacttatattgacaacaatgaagtcgaccgtggaaattcatatacttatacttttcccagtggtgtggtttccgcaagagtcagtttgcgattcgataaaaccggattggggactgtaacctataaatttgtacctgaaaagccggcggacaacagcccggaaataaaaagattttatggtatttcagcattaccagaaaaataa

SEQ ID NO: 161108 - DNA, 150 bp, Enterobacter cloacae
atgggtatagggggaacagtgttcctgagtgaagcgttaaccggcgagtacattatgttttataaacagaatgatggcctggaagccatcatcttcaatggaataacacttgcttactacgaccggaaaactcaaagtgtggtccgatag

SEQ ID NO: 161109 - DNA, 270 bp, Enterobacter cloacae
atggtctgtcagatggcgctgaccagccatctgctgacagcgacgatgaaaaacagtgaaaacgagctcgctgagcaccttatagagcagaccggcgataacaccctgacgttagtggataaaggttattactcactggggctgttaaatgcctggagccaggcgatgctccctctcaggaagggggcgcagtatgaagaggtcagaaagctggataaaggcgactatctggtaacgctgaaaaccagccctcaggcgcgaaaaaaatag

SEQ ID NO: 161110 - DNA, 306 bp, Enterobacter cloacae
atgcccgcctgcatgaactgccccctaagcttaaccgtcgcctccagcacggttgtgctaattgaaaaaaggcacgccacttgcaagcaggttcattgcgacagtaagctttacaagaccatgggtgaggccgcgccgagcgaaaagggcatcgcgaccgaaacagccggaaaccaggccgacagtctcactggcacgctggtttccgcgctttcaggcgtggatacggtagtcattatatcacttgatgtgatgcgccagcctgccgttggcggcaatgcacatgaccacaaggtctggccgtag

SEQ ID NO: 161111 - DNA, 1143 bp, Enterobacter cloacae
atgtatatcccgcgcccggcaaagctgctcttcaccgttgatgacggctggaaccgttatctcgaaaaacacggcaacaacgtcagccagtggacccggctttgtgttgagcgcatgcttgcctgtggcacctgcgcaatgggcgttcgccgctactgttgtgcctcacagggctgcacccattcccgcttcttttgccagagctgcaagtcaaaggcctgcagcgcctgtggcatgaagtccaccgagcagtggattgctgagcaacagcacctcctgcccgactgcgaatggcagcacatcaccttcaccatcccccacctgctctggccgttctttaacaataactggccgctgctcaatgacctgttccgttgcgccacccgcgccatgctgaagtgggcacgtaaacagggcgtggaggtcggcatcttctgcgccctgcatacgtacggccgccagctcaaccagcatccgcatatccacctctccgtcacacgcggcggactcgccgtgaagcacggtgtctggcgagacattttctttaagaagcacgccgtggaggaaatctggcgcggcgctgtcattcgcctgctgcgccacagctataacctgataaatcccggcagcctgccgggcctagggcatattcgcgacaaaaaacagtggggccgctatctggaagcgcagtacgggcgccgctggaaggtccatttcgcgaagaagacccggggtgcctggcacagcgtgaaatacctcggccgctacctgaagcggccgcccgtgtcggcctcccgcctgcggcactatggcggcggcgcggtggtccaccactacctcgatcaccgcacgggaaagcataaatgccagacgctgagccaggaagagatgatcggacgctatatcagccacgttccggcgcggcattttaaggtggtgcgctactccggctttctggccaaccgcaagagggggacgctgctgcctctggtgtatgaagccctgcagatgcaggcgaggaaaaagccggagaagccggggttcgcggtgctgatgaagggcttcctgggcacggatccgtacaaatgtatcctgtgcggcgaccggctgcgttttgccggggctcaggcagagtacgcttag

SEQ ID NO: 161112 - DNA, 264 bp, Enterobacter cloacae
gtggtggccgactgggccggcctgaatcactattctctggccctggatgccgcaaacccggacggctgccactttgttttcagcggaagccggtactgggaaaacgtcaatcttctcagggtgaccctcgccggagactacccggaaaatgccggcatctgcgtcaggtttatggacggctacacggagataacctcatcctgctatctgtccccgtatccgtcggccgtattcattcaaaaccatcctgccggtcagcaatag

SEQ ID NO: 161113 - DNA, 258 bp, Enterobacter cloacae
atgtcatcttcctcattttataccgccgccggcaacttcctcagcgccgtccagggcggcgttgacccacggacggggttgtttaccgttaacctgccgctcgctaacctccgctccggcgacctggccgggcccggactgaacctgcactactccccgcttaatagtcgggacgacggcttcggctgcggcttcgccctcaaccttacccgctatgacataaaaaaaagggtaagcgttaagcgagcgccgtattga

SEQ ID NO: 161114 - DNA, 201 bp, Enterobacter cloacae
atgatcgcaccaacccggagcaatggtattcagcttcttttacagttcacccataaaatgctgaaactttattttactcttaattttgcaatgctaaataatataaccctgataactgcctatcaggcagtcaagttcagtagcaagttccctcagggggataaaatagtcactgccgtcatcatgatggcgaagacataa

SEQ ID NO: 161115 - DNA, 594 bp, Enterobacter cloacae
gtgaaaatgaataaaattgcagtagcgacagggtttgctctggccttatgtgcaggagctgcaaatgcaggcggactggcttctggtgcaggcaagatcatcactgttgacggcgggaccgtccacttccagggcaagctggtcgctgcaccctgtgccgtaagcgatgacaccagcgaccagactgttaagctgggtcagtacaccacccaccactttgccaaaaaaggctccgtgggtatggttaaaccgttcgaaatcaagcttgaggactgcgataccagcgtggcatccactgcggctgttgccttctccggcatcacggatgcaaccgatccgaccctgctggccatcaaccaggacgatactagcactggcaccaccacggccaccggcgtcgctattaaaatcctggataatgccagtaatatcgtaaaactggacggcaccaccttcaccgacaagacgaccattctggacggcgacaacacgccggctctgaaattcacggctcagtacgtcgccttgtctgataacggcgccactggcggtgacgcgaacggggacgttaatttcatcatgcagtaccagtaa

SEQ ID NO: 161116 - DNA, 579 bp, Enterobacter cloacae
atgaaatattcacaaatcctgaccgtgctcgttgtccttcagtccctttattctgccggtgtccctgcaaaaaatctccaggtcattgtaccgggcggggatgtccaccttcgcgggcagctgatcaacggggcctgcgctgtcagcgcggacagccaggatttacacgtcgatatggggcagtacaccacgcatatcttcgtgaagcccggcgatgtgtccgctcccggggtggcattcacactccggctcacagactgcagtcccgatatggcggacggagtggggatcgccttcagcgggcagaccgccccaaaggcacccgatgccttccgggtctcggtctccgatgcacgaccgacagggatatccggcggggacggcttcaccggcctggggctgctgatttccgatgcggacggcaacccggttattcccggtcacaggcccgacgtgtttcaccgcccggacggcggcgacgtcgtgctgcactaccttgcccgctaccggtcaacctcccggggtgtctatcccggcgacctgcacagtgacgtgcgttttgatatcgcttatccgtaa

SEQ ID NO: 161117 - DNA, 693 bp, Enterobacter cloacae
atgcagaacgcgcgattttttctctccctcatcctggccgggctggccgcctctgcctgccagccgtcccttgccggcggcatcgcaccgggcgccactcgcgtgatttatccggagtccgataaccaggcctcgctggcggtcacgaatagcgacagccacgaacgctacctgatccaggcctgggtggagaacagtcagggccagcgcgcccgggaatttatcgtcaccccgccgctgtttgccgccgcgcccaaaagtgaaaacaccctgcgcatcgtctacaccggtaaacccctcccggccgaccgggaaatggtctactggatgaacgtcaaggccattcccgccgtcgacaaaaacagcctgaagggggttaacaccctgcagctggccgtcctgtcgcgcatgaaactttttatgcgccccgatggcctgaagatgagcgagccggagtcggctaacgccctgaagttccagcagacggccgggcaggtggtggtgaaaaatccgacgccgtattaccagtccattgtcaacctcaccgtcggcggccggaagcttgagaacacgatggtcgagccgttcggacagctctcactgaaggttccggccggcgcgtccggcccgatccgctatcagacggttaacgattacggggccatcaccgcacagaaaacggcaacgccgtaa

SEQ ID NO: 161118 - DNA, 2685 bp, Enterobacter cloacae
atgcctcatttcagcctaaaggaacggtgccgcaagcgggccctgccccggcttcgctattccgcgcttgcagtattcgttgcccttacgggagctgcccgggcgcaggactggttcaacccggctttcctggccgcggacggcggggaagtggccgatctgtcccgctttgagaacggagcgggacagctgcccggggtgtaccgcgtggatatctgggtgaacgacgagtttgccaccaccaatgccctgcgctttgaggcggcgaaacccggccaggcgaaggcaggggctgcaccggatgcggccgggacagggacgcccggcggggcagaaaaaccgtcggatgacggcaccgggctggttccctgcctgaccgtaaaatggctgaagcgcctcggggtgaatatcgcgtcggttgagtcgctgaaaaccatgaaggacgacgggcagtgtgtggacttcattcgccttttcccgggggcctcggcgtactacgactttgcctcccagcgcctgacgctgacgttcccgcaggccgtcattcagaacagcatccggggttacatcccgccggaagagtgggatgagggcattaacgccggtctgctcgactacaccttcacgggcaacaagagcagcgacggggataactactacctcaacctgaccagcgggctgaacctgggggcgtggcgcctgcgcaacaacagcgcctggacctaccaggactacgtcgccggctatcgtgagcaaagttggcaaaacatcgccacctacgcggagcgcacggttattccgctgaagagcgagctggtcctgggggacagcagcagctcgggggaggtctatgacagcctggggttccgcggcgtgcggctctacacctcagacccgatgtatcctgacagccagcagggatacgccccgacggtccggggcattgcggcgggtcgctcccgggtcaccgtgcgccagaacgggtacgtgatttaccagaataccgtgcagtccggggcctttgaaattaccgacctgacggccacctcgtccagcggcgaccttgaggtgacggtgaaaaatgaagcgggcgcggtccagacctacgtggtgccctactccactgtgccgctgctgcagcgcgagggccgcctgaaatacgacgtggtggccgggcgctaccgcagcggcctgaccgggaaggacgcgccgctcttcgtgcagggcacgctggcacgcggttttaccggaggggtgaccgtttacggcggcagccaggtggcgaagcggtatacgtccgccgtggccggggcagggatgaaccttggaacctggggggcagtatccgcggacgtcaccactgcccgcagcgagctggctgacgggagcacccacaatggccagtccgtgcgctttctgtacgccaagtccctgaacaacattggcactacctttcagctgctggggtaccgctactccacccgtggattctacaccctggacgaggcggcctgggacgcgatgaacggctaccagtatgagtggaaggacgacaatgacggccgggggccgcactacgagccggtgagctaccacaatctgcgaaacagcaagaagggccgtctgcaggtgagtgtatcccagcagctggcggatatcggctccctgagcctctcggccacgcggcaggattactggaacagcacggggagcgacgactggtatcaggtcgggttctccagtggctggcacggcattaactataacctggcctactccctgagccggagcaccgggatgccggaaacggaccggatggtctccctgaacgtgtccgttccattcgggcagtggctggggcatgacatggctgagcacaaccagcttaacagtatgtacgccacggcccaggcgagccgtgaccaggatggggtgacccggatgcagaccggggtcagcggcaccctgctggcggggaataacctgagctacagcgtgtcgcaggggcacagcagccggggcgggagcagcggcaacctgaacctgagctggcagggcgaggccggccgggctggcgggggctacagctatagtccgggcgagcacgcctggaactgggacctgtcgggcgggatggtggcgcatgccaacggcctgacgttcagccagtcactgggcgacaccaatgtactgattaaggcgccgggtgcgaagggggtgcgcgtggaaaatgagacgggcgtaagcactgactggcggggatacgcggtgatgccatatgcaacggtgtaccgccgcaaccgggtggcgctggatgtgaagagcctggacatgcacacggacctggacgacacggtgcgggacgtggtgccgacgcagggtgcgcttgtgcgggcggaataccacacccacgtggggctgcgggccatgttcagcctgacgcatgacgggcagccattgccgttcgggacggtggtgacggagaagacttcagggacgacgggtatcgcgggggacgagggagacgtatacatgacgggggtaccgctgacggggctgctggagatggtgtggggcagcggggctgaaggcagatgtacggtgccgtaccggctgccggcgggaagcgagagcttaccggtagtgcggatgacactgaactgtatggcgggaacgaagaagtga

SEQ ID NO: 161119 - DNA, 444 bp, Enterobacter cloacae
atgagcggtcaaattattgtaccccagacctgtgaactggacgcgggtcagacaatcaccatggacttcggcgatatagccgcctccgccttcccgcaggcaggggccggtaacaggcccgcgcatgtcaacccgcagacccacaacatcgccatccagtgtaaaaatatcgatgcacaggccctgctgtccctgcgcgttgaggcagaaaaaacctccggcaacgccattgtctcggataatccggaccttggctttgtggtcgcggacggcaggcacaacccgctgacgccaaatacgattgacagcaaaattaaatttcagctggatgacggaggcgcggccacggtccccgtcagcgcctggcccgtcagcgtgacggggaatcagccggccgaaggcaaattcacctcggagggctacctgcgtgttgatttcgactaa

SEQ ID NO: 161120 - DNA, 549 bp, Enterobacter cloacae
gtgttgatttcgactaaaactctcgctgctgtcacgggcctgatactctgtgggctgctgaatgccacgtcagcgcatgctgacggtccgctggctaaaatcaacatccgcctcaccggcacggtggtggcaatgggttgcaccgtggacccgggcgatgtagacaagacggtcgacctcggcgggtgggccacaaaagatatgaaaaaagccggccagaccacccgccaggtgccctttgccattcacctcacgggctgtaccgcaagcggtgtcaccaccgtattcaccggcacgaaggacaaaatcaggcctgaactcctggccctgaagagcgacggagccgacgatgccgccggcgtggccgtgcagatcatggacagcaccgggaagcgtattcccatggggggcaatgccccccgcggcgtcgtggatgataacggcaatctgaccctcagctttcgggcaaactatgtcgccaccggggacaacaccgtccggccgggcgaggccgatgctgataccgtgttcacactgacctacgactga

SEQ ID NO: 161121 - DNA, 1803 bp, Enterobacter cloacae
atgtccccttcactgtttccggccggtcgtcagagccggctgcactctgtccttcagattgcggtcgcaactctcctgtgtgtctggctgtgcctgttcctgcatatcccacagtacaatgccggcggcggagaaggcgtctggctgccctggaacgtcctggcctgggccgtggcggtgaccgttatgctgctcacagcccttctggagcctttcggtcgcctggttatcaccccactggcccggctgctgtttctgaccgtggccctgctgaccctgccggtgatgtggtgcccgcagcccgaatgggttatttactcactgccgcgcctgtacggtctttggggtggagcgctgttttaccttgccctgctgcagtgccggttcagccaccgtgcgaagcggctgtttctctggtgcgtttcctttgcggctcttgtacagggactctccgtactggctggcctgtattatccgacactgctgagccctctcagccaggccttcctgaagaccggtggccggcagtctctgggtatttttcagcaggttaacgttaccgccagcttcctggctaccggcatggcactggctctggcactcttttaccgccagtgtctgtgccgcgctgtccggcctgcaggcgtgtcggcctcccttatgttcagggtgaaaacagcgtatctccttatgctgatggtctttctgccctgcgtgctggttctgacccgctcacgaatcggctggctgggtggccttacggtgtatattgtggccatcgccactgccgtgctgacggcgcggcgccagcgtggccgtcagcacgggctgccggcatggtgtccggcagcaatcgcgctgttcccgctggcgggcattgtggcagggcttttgctgatgaactgctccgtggcgcaggccattgaccacggcggctcgaaccatcagcgctggctcaccctgaaggtgacctgggagatgatacgccagcacccctgggccggatggggcacgggcagcttcctgatgcagttccagcactatatcgccacataccggcatccgaacccgagccgggagctgatgggacatccccacaatgaaatactttatgtgtggatggagggcggtatcgtggccctggcagggctgatggtggccggcggagctgcggtgatgctgcttaagaaaaacgggtcgcacacccggcgcctgatggcagtgtccatgctgccggtgctgctgcacaccctggtggagtacccgctgtatctttcggtaccgcacgccctgaccctgctgctggttgcgctgaatctggaccgcggcggtcagcgtgccggtcccgcggtgtcgggcgcacgcgtaatgggtatccggaaaatcgccagagcaggcctgagctgcgtgattgtaacgggctgcgtctggatgctgggctccctgtatggagcataccgggtcaatgccctgctcagccgttttgaggcgggccagctggcgcagagcggtcgggccatccctgccgcagacgtgccgtggatgctgcggagccgctatgaggctgacaggctgagcctggagcttgaagcgtacaaccgcagcggtgacctgcgcctgctgcgtgactacgtgcaggataacgcccgctggctgaggacgcatactgacccggacaactatgcagtccaggttgacgtattgtgttacctgcaccgcgaacgcgaagcacagcgataccgttatgaagggctcctgctttttccgtatgatgagcgatttgccgggcaggtctgcaggtaa

SEQ ID NO: 161122 - DNA, 882 bp, Enterobacter cloacae
atgaaactgaaacactctgcgcttgccgttatgctggtaacaggcgtatgcgcttctgtccctgcaatgtccgaaggacagcctgcagcgtcggcctcagcggagacagccacgacatcagccagcgccagtgcgcatccgctcacctctgctgctccggtagcttcccggacattcaccccggagcaggaagcccgtatcggggaagttgcaaaagactatctgctgtcccatccggaggtcctggttgaggtcagccagaaactgcaggcgcaacagcaggaagcgcagcgggcggccatgacgcaggccgtactgcgccaccaggatgcgctgctggatgataaatccatcccgtcgtttgggcctgccgacgcgaaggtggcctttattgagttttttgattaccagtgttcagtctgcgcccgtcaggcaccggtgattgaatcgctgatgaaggcaaaaccgcaggtacgctacgtgtttaaggagtggcctatttttgcgcaacgctggacgccgtcactgacggcggcgaaaactggcctgcaggtctggcagcagaagggggcggatgcctatcttgcctatcacaacgccctgtatgcgaccgggcatgatgagggtaggctgacgcaggcggacatcaacggggcggcctctcaggccgggaagctgaagggtaaaggtgatgaaatgctagaggtgctgtcacgcaccgatgcgctggcgcagaatctgggactgaggggaacgccgggaatgatagtgatgccggtgaacggcgccagtgcagataacgtgacggttatcccgggtggagccgaccagaacacgctgcaggccgccatcgataaggctgcgggccagcccggggagtaa

SEQ ID NO: 161123 - DNA, 150 bp, Enterobacter cloacae
atggttaccgtttccacgcctgaaagcgcggaaaccagcgtgccagtgatactgtcggccaagtttccgacatttacggtcgcggtgcccttttcgctcaatgtgtcagggccgctgtcgctcagcgttgcctcagccgtgatctggtaa

SEQ ID NO: 161124 - DNA, 153 bp, Enterobacter cloacae
atgatgaagaaaaacagcacacccactccccatgatgcaacgttcaggcagtttcttacgcaaccggatgttgcccgggatttcatggaaattcatttgcccgcagaactgcgggctatattagtgtctgcctatgtggcatggtcgctttag

SEQ ID NO: 161125 - DNA, 1719 bp, Enterobacter cloacae
atgaataatatgcagaggttatttattattgttagtgggatatggctaaccctgataatgcacctccctctctttaatagtggcggggatggttttatcctcccacaaaacatcctcacctggatggtggtaacctgcatatgctgctccgccatattcagtttaaacagtctgaaaatttacttctctcgtacgtcaatgcttctattgataagtgtatttttgatgacgcttcctgtgctttgggcacgatcatctaaccaaatatatgaatcagtaccgcgttttatgggcatgtggggtggggtaattttttatatcagtctgctgcagatgcgtttcagcgagcgaactcggtggtatattatattattcattgccttgtctgcttgcatagaaagcttaaatgtccttcaggaactcttttatccacaaacgctagattcgctcagaagtcaatttattgaacataatggccgaggcgctcttgggacattccagcaggttaatgttactgcgagctggatagcaacaggtctcgcatcgtgtctgagccttgcatattcactttgtatcagacgttatccgtctgatgacagtaagtcggcaatgcggaatgtattctcgctttatggtattttttattctttagctattattctactgacagccacacttgtactgactcaatcccgcacgggatggttgggaggggggttctgttgtttaattctgtatgtcttaatcgcaaaagcccttaggggaggcgattctttcaacataaacggctgtctgattattttcgccccccttgcaggtatcctgacggggctatttatgatgaatgttaccgcttcacaggcgctggctcagcatgcaggatcaaaccatcagcgcttacttacacttaaaatgacctgggagatgataagaattcatccgtttacgggctggggtatcggcagttaccgtctggcatttcaggaatatcttgccagtcattgtcatcctaacccatcccatgaactgatggcacacccgcataacgaacttttatatgcctggtttgagggaggcattgttgccctggctggagttttactagctatgcttgccgccataaggctactattctgccagaaggatgcagctagcatcatgcgctggacgatactcattcctgtgatgattcacacccagcttgagtttccactttactattctgctgctcatttcattgtactccttttagtaatggtagtactggaaccgaaaaaatttaatccttcagattttaacaaacctggccttaatcctactacacgctatattatgtattccgtggctgcatgcctcacttgtatcattgtgctttggctgggaagtatatttagaatggagaacgttctaagtcggtttgaagataatacactggcagaccctaattatattacatgcatatacctacctccgttaagaggccaacggtacagacatgataagaatacgcttcatctcattaacttttatgaaaagcatcaactagtagaactagatgattatctgacagaaaacgaacaatggttaaaatttcatccagaccctgatgattatctttatcagtttgaggtgctaaactttatagggaaaaaaaaagaagctgaagtatatcgccaacatgcagctttacttttcccatgggacattaggtttcgatga

SEQ ID NO: 161126 - DNA, 873 bp, Enterobacter cloacae
atgaaattatcttcaatcacattcatagttttatcttttttaatgtcaattactgctcattcggaaacaatatcggtaccttatattgttgatgttaaaatcttacctaacaatcaatgtaactccgctcagtatgtttcaccttactgtgcctccattacgtattcatcttatgatgtcaatattgactcatcttccttgaatcaaaaaatcccttcaggatacggttattttggtatttacagtgtaaaaaccagagataacggtgtgcgttctaatctggcatcaaacaactcgtttaggtacagtagtcaagataatttaaaatgggctgaccttttagaaaaatttgaaaaaagttacagcaaaaatgggacggttttggcaggccttgagaatgacaccgacgattacaaaaatgcctgcattgcgttcggattgtttgatggctggtatgatgactatatgttacctaccagcaatacttgtgttccaataccacgacccaatgtttcctgcagctttaatgtcaatgacattaatttaagttatggtacattgaatactaattcaattgacggtacgacacaacagaaaagtttcgtggttaattgtaccgaaaatactgacgtcgtttattcattaataaacaatgactcatccgggcttgtcgaaatgacaagcgatacagcctcatcggttatttattctcatttatatatagatgggaactctatgtcttcttcaacatttaaatccactgaaaaagagggtgacaacaatcaccaactcacagcaacactggaaaacagtaatggtgcagaagcaggtcattataaagggtctgcagttcttatcatatccccgcaataa

SEQ ID NO: 161127 - DNA, 534 bp, Enterobacter cloacae
atgaatatagtgcgttactatagtattgcgtccagggccatttgtatattattgctttctgccccctgcttctctgccggactaaaaataaatctggatgcggatgtgatttcatctccatgtactgtcgttgacaaaacattatcggtaaaaattgatcccgtatctaagtactatctttataagaacggaaactctgctggcactgatttcgctataaaattaagtgattgtgatcccagcattgccagcagtgcgcagatttcttttactggtactgaggcatcaggattctcgggtaaattagctgtagacagttcaagtcaggctcaaggcattgctctgggtttgttcaatgaaaacgatgattttcttaagattaatgataacgtaacaaaactaaaacttaacaatggcctaaataaagttccatttaaggtgaagattttcggagttcctgtgaatatagagaaaaaagacatacaaccgggtgagttttcagctgcggccgttgcgttaataacctactcttaa

SEQ ID NO: 161128 - DNA, 603 bp, Enterobacter cloacae
atgctgtcagtaaagcgagatatgagtctgattgcgccagtcggtatggtcgtcatagtgctactgaccgggatgagccgggctgcggcatctgacaccattgctgacggggacaacggcacgctgtatgtgaacggggagctgacgcgcggtgcctgtaatattgaaacgacttctcgctggcagaccatcagtatgggtaatgtcacgaccggtgagctgacatcacccggagaccgcggtcacgccacggcagtccacctgcatctgcgtaactgtacagaaggcggaccggatgaaggaagaaagcgggaaggcccggttgtcagggtggttgaccagcctgaggtgcgtgtcagcttcctgagtgagcgggacgctgatgacagggagctgtacgcggttcagggcgcgaaaggctttggcctaaggcttgaggatgcgggctaccatgttgtggctccgggggatataccagagccactggtcattgagccgggaagtgacgagctgacctactggctgcagccggaaagaacgcgcgcccggctgcaggagggggcatggcgcagcgttataaacatgaggttcagctatgaatag

SEQ ID NO: 161129 - DNA, 762 bp, Enterobacter cloacae
atgaatacctttacccgcaccgcgctggcggccagtctgctggccggtcttgtcgtcagccagcaggcatcagcggcactcgcgcttgaccgcacccgcgttatcttcccggggggcgagaaatcggtcaccattagtgttcataatgaaaacccgtcgctgccgtatctggcgcagggctggctggaagacactaagggtaacaagattacgtctccgctggtcgtggtgccgccgcttcagcgcgtcgaggctggagcatccacgcagctgcagattaaggcactgcctgtggcggactcgctgccgcaggacagagagtcggtgttttactttaacctgcgcgaaattccgccccgcagtaaggagccaaacacgctacagctggccctgcagacgcgcattaaattgttctatcgtcccaaaggaatccagctgtcgcacgcgcagatggccacaccgtggcaggagaagctgaccatgacgcgtcagggcgatggctacgtggtgaataatcccactccgtactacatcagcctcgtctcggcaggttcagcgaacaaggacagcgcccgcgagaaaaaatttaatccggtcatggttgagccgaaggggagtgcgccgctgggcgtcagcgcttccgcgttgggcgccacgccgtccattgcgtacgtgaacgattacggcggcacccgggtgctgaaattcagctgtggcggcagcgcctgtcatgttaccggcgacgataatttaagaaactga

SEQ ID NO: 161130 - DNA, 2475 bp, Enterobacter cloacae
atgaagctcagctatctgacttactgtctgttgctatcaatgacctgcaggtatgcgctggcaacggacaacgttgagttcaacactgacgtactggacgtaaaggaccagaaaaatattgacctgaaagagttctcccgtgcgggttacgtcatgcccggtgagtatacgctcgccgtgcgcgtgaatgataccagcctgcaggaggagagtattgtttttacgaaagacagggcagaccccggaaacagcgaagcctgcctcactcgcggccttgtggaacgatttggatttacagataccgtgcttgaccacctcaagtggtggcatgatggccagtgccttgacaccggcagcgaggcagtcaagggcatgaccgtcaggggagaactttcttcctccacgctctacattgatattccccaggcttatctggaatattccagtgcgacttgggatccgccttcacggtgggatgatggcattcccggcgtactttcagattataatgccagcttcatgaaggtgcagggccagggggactacgcgtcaagctcaagcctgagcgggaacggtaccctgggggcgaacgccggggcgtggcgtctgcgtgcagactggcaggccagccgaaatcagtacggaacgggaaacacccgccagcagtggcagtggagccgctattatctttatcgggctattcgcagcctgcgcgcgaagatggtggtgggtgaggattatctcgactctgacctttttgacaacccgcggtttgccggagtcaggctggtttcagatgacagccagcttccgccaaatcttcgtggctacgctcccgaagtcaccggtgtggcacgtacgcatgcgaaagtcacggtcagtcaacaggggcgggttatctatgaaagtcaggtggcacccggtccgttcaggatccagtctcttagtgataccacccggggaaccctggacgtcacggtaacagagcaggatggttcgcagcaaaaatttcaggtcaataccgcgagtgtgccttatctgagccgcccgggaatggttcgttacaagctggctaccggcaggccggatgatttgcgtcaccgggtaaatggccccctgttttcgacgggggagttttcctgggggataaacaacggctggtcgctgtacggcgggagcctttttgccgatgattatcagaacatctctggcggcgcagggcgggatttaatggccttcggtgccctgtctgttgatatgtcaacagcccgcactcagctgcccggacaggacagcgtcaccggtaattcctaccggctgagctactcgaaaacgttcgactcgctggacagtcaggtgacattcgccggctatcgtttttccgagagaacctacatgagtctcagtgattatctggatgcaagagaggacggattaaggcccgccggcagtaagcagatgtatacggtttcccttaacaagacgttcaggagcctcggcctgagcagctatatgaacatcagccggcagacttactgggggaatactcctcctgatattcgctattcgctgtcgatggccaaatcttttgacgtcggaacgtttaaagatatcaacctgtcgctgtcagcctaccgcagcgcataccggaatacgcatgaccggggtggatatctgtccgtttcggtgccgacaggagacaatgacaacgtaacctggtcagccagtgagactaacggcgccctgcaacagacggccagctatttttcaacggttgatgatcataacagctatgaggtcacggccggtaccgggcgctccggcacgacaggaaatgcttcctggtcgcaccagggtgatgccgccgacgtggatggcagtgcgggctggcaggaaggtcgttacgtttcaggtaccctgacactgcgtggcgggatgaccgccaccgcgcacggcgcggcactacacagaacggggcattctggtggtacccgtctgatgcttagcaccgacggggtgtccggagtgcccgtgcacggctacggaagcacaacagacaccaatgtcttcggcgtggctgttatcagcgacgtctcaagctactaccataatgaagcccggattgacatcgaccacctgccggacaacgtcagcgcagtgcactcggaagccgcggccactcttacggaaggggctattggctatcgcagcttcgacgtgcttgcaggaaaacagtccatggtggtgattggtctgcgggatggcgggatggcaccgtttggggctaccgttaaaaatccgcgcggacagcagaccggtctggtcggcgacgccggaagtacctggctcaccggcatgaatcccggggagcggatggacgtggaatgggacggtaaaacacagtgttcgttcacgctcccggctcagctggatgcgccctccctgttgctgccctgcacgacggcaaaggcataa

SEQ ID NO: 161131 - DNA, 552 bp, Enterobacter cloacae
gtgccggtattgtcttttcgcagaatgaacgtttacagcctgctggtttgtataggcctgttgctgtctcaacgtcaggtatcggctaacaccacggatcacaccagggtttttcttgatggaaatatcctcgacaccccttgctcaattgatcctggcagccgagaccagaccatacagatgggtgcgactccggtcagcgttattgcccgcgacggggcgggacgtacggttcccttcactgttcaactcagggactgcgaccttgcgcgggtgaaccgtcagcttcctgactggcagggcgtccgggttattttcgatggcattaccgacggacaggactttcttgttcacggcaccgccaagggcgttgcgttacgcatattcgatgccaaagggcatgtggctgtaccgggcaccccgctgccatcattgccgctcattgcaggcgaccaggctctgaatttccggatgcaacttgtcagcgaccataagtctatcaggaaaggggaatatcacgccgttatccagtttggtctcagttacttctga

SEQ ID NO: 161132 - DNA, 537 bp, Enterobacter cloacae
atgaaattaaataaaattatgtttgtgatgggcctgggtatgactgtcatcagcggtgcggcaatggctggcaatgatgcttcaaccaccaccaccaccgacagcacccatgtttacttcgatggctcaatcaccaacgtaccgtgctccatgcccgatacgtcacgcgatcagaaagtacatctgggcagtattgcttctcatgtgctggaaaatggcggaacctctgatgaggtgcctttcacattcgagctgaaagactgccctgcgggtaataccgtgacggtaaccttcaccggtacctctgatgaaggacaggataatctcatcacacttggcagtggtactgcgactggtgctggtctgcagatccttgccgacggcacacctgtaaaactgggcaccgcaactgcgccgaagacactggctgaggatgacaatgtgctgacctacgatgtgcagcttaagggctatggcaaagacgtaacaaccggcgatttcaacgcagtctccaacgttatgtttacctacaactga

SEQ ID NO: 161133 - DNA, 582 bp, Enterobacter cloacae
atggaacttccggagcgaatagagcaggtgagggaagaccatttttcttcactcaggaacaaatctacctactggagaggtcaggtcgaaagtgcatttacctcacagtctttaaatgggcgctgggttacgtttcgaaaccatatagacgaaagaaccctgtccgagctgagcctattatatgatgtttttgaaacacggggtactcacgcaggcattgctgcagacgaaatcgaatcactgctggtaagaattacagaacttcgcggggagatacgcagtgctgaactccctctcacgatgaaaaccatgctcctcatgcaactatttcagattcaggaagcgcttgaatcgtacagtatttctggtatcgaacccgttatggatgctgttcagtccaccctgggacttgccgtcattgatcctgagtacaaacaagaaattaaatcaggttcaggaagccagtttggcgacagaatgtcctctctgcttggggatgtggcaaatgtcgtgactgtggccggtgcgttgcctgcccttcctgctgcaattcagtcagctctcagcctcctgagtaaataa

SEQ ID NO: 161134 - DNA, 156 bp, Enterobacter cloacae
atggcatcttttttttacttttttcaccatgcttttttgatgcttattgtattgattgtaaagatttttttaaaattctttcatagtgaaatcaccacgaattttcttgtgtttttgcttcgtcatagtttggctactggcaactcagaccagtga

SEQ ID NO: 161135 - DNA, 282 bp, Enterobacter cloacae
atgaccagcaataacagcacgttcagcttcggcgagtgggaaaaaaacgcgctcagtaaccttggaagcctgcaaatccgcgtcagtaaagccctgcttaagtatcagggtagcaccgataaaacggcggtcggagaggctgcaatccgctttatgagcgaactcagggatgcagccagacgcatccggaaagccacgccagccattcagcagaaagtagacgagattgccgacatgctgtgcgtgatggcgcaattttccggtatcacgttcgacgaataa

SEQ ID NO: 161136 - DNA, 567 bp, Enterobacter cloacae
atgatgcttaagtttctgtccgttctgctgtatcgccttcgatggcttgcctgggcttttcactatctgattgtctggccggccgccacgctgatgctgctggttgccatgcttttgtggatggaggacaccacgcccggagaggcgatggcgcaggaaattatggccgtcacgcacaacgtcagcagtggcgagtttcgtattgcggcctgccgcgatgaacctttagacccctttatacctccagccccgcagggcaagtcctccggcctcacgctgcatgacgctccctcaaccgtctgccaggacagaggcagcgtcgtcaccgatgcgaaaggatatgccgtgcatgttaatgactcactgcgggtggttacgggcctgtgggtagtgctggccattgtattttcagggacagcgctgcttatgggatgtcatccgtatttctgcctgtacggtcagatgcgctcagcgtggtttcgctacggtatccccgccagccgcccggcccctgcgacggaagcggtaaaaacggccgacaataaaaaggagggggatcatgagtaa

SEQ ID NO: 161137 - DNA, 2823 bp, Enterobacter cloacae
atgcaggaaatctatgtcatcgcgggcggcgactggctgacgcagacgctgaatgccatcgtcacgttcatgtcgacggagaactgggttgttattcggcgtattgcgacggctttctctgtgctggttgtggccatttcgtggatacgacgccacaacattatggacatgctgggctgggcgggcgttatcgtgctgatgtcgctactggtcagcgttcgcacctccgtacaaataatcgatatcagtaatcagacaaaagtctataaagtcgataacgtgcccgtcgggcttgcactgcctgcatcgctgaccaccaaaatcggatatgcccttgttcaggggtatgaaatggtgttttcccagcccgacagcatcacctacagcaaaactggaatgatatttggggcgaatctgatttcacgcagtacggactttttatcacagaacccagagataacgacgatatttacggactatgtgcagagctgcgtgatgggcgacattttcctgaacggaaaatacaccatggaagatctgatgaacagtgcagacccgtatacgctgattttctcaaagccaagtccgctgaggggggtattcaacaataataatcagtttttgacctgtgaagaggccgctgcggtaattaagccaaagcttgccctggatactcagacaggaggaaaaacctggagttactacgtgcggcagctttttggaggacgcccgaatcctgacattttgttcagtcagatgatcggtgacagctataactatttctatggtgccggtcagagcgccgcgtcgattgtccgtcagaatgtgacgatgaacgcgctgcgaaacggcatcatgagctatgccgcacgcaacggtgatacctcaagcctgctgaatatcgccactacgtcatcaatggagaaacagcggctggcgcatgcgacggtcggccaggtggctttacgctcacttcctatgtctcagacgttgattgtcggtctgaccatcggaatattccccctgatggtgctgggcgggatgtttaacgccgtcacccttaatgtgctgaaggggtacgtgctggctatcatgtgggtgcagagctggccgctgctttacgccatcctcaatagctgtatgaccttctatgcgaaggccaatggttcaccagtggttctctcggagctgtcgcaggtgcagataaaatactcagacctcgctaccacggctggctatttgtccatgctaatccccccgcttgcgtggggcatgctgaagggactgggggcggggttctcaaatctttacagccacctggcctcttccgctatcagcccagcagccactgctgcctctggtgctgttgatggtaactactcctacgccaacatgcagaccgagaacgtgagcggcaacagctggaataccaacagttctactatgttcggacagatgagtcagcagctgggcaatggagcgacgtccacacagatgcgtgacggcagtacggtgacagactccacccaggcagcgagtaagcttcccgtgagtattaattttgcccgtcaactggcctcagcgcagcaggagatggcgcgcgaggcccagacgcagtcccagagcgcgatgcagagctttagtagcagcatgtcaagcacgtggcagactctcagccagtttggcaccaatcgggggagcagcgattccatgacgcagggcgccgacagcacgatgagcgctcaggactccatgatggccagcaagatgcgcagcgcggtggaaagctacgcgaaggcgcataacatcagtaatgatcaggcgactcaggaactggcttcacgtagttctcgtgcttccgctggtctttatggcgatgcaagtgcacatggtggtatagggattaaggctttcggtacaggtggtggtgttagtttcagggcaggtgctaaagccggcgtcgactttgatgatttagactctcatcaggcaagcagcagcacgcgagcgagccaggatgcgcgtcatgatatagatgcaaaatccaccaaagacttcaaggaggccagcgattactttaccagccgcaagataaatgaatcgggcagtcatacggataacaacgccgcatcacgtgcggaccagttgtctgcatcactgagttctgcaaaacaaagccttgaacagtactcgaccagtcaggcaagcagcaaggaatatgctgaaatggcatcccgaaccgaaaccatgagcgggcaggttaacgaagatctcaaccagcagtttgcccaatacgttcgtaaacaggcaccgcatgatgccgattctttgctaacggataccggttcaccagaggttgcagcgaaacgaagagaactggcctggtcatttgtacaaagtcaggttcagccttcggtggataatgcgtattcggatgcgaaagatgggctgggtcaaagtatggacaatgtgtctgcggggggcgggcgtcaggaggtgttatctgaccatgcggcgcataaggcttccattgagagtgcaacgtcagacgcaggtattaaagggaatgtgaaaggctcggtagacggtatgatgactgagacgcgaaataatatctcagggacacaaagtgaaataaagggagcttcagcgtccgtcgataatcagtattcagcactggagcgccatcaccagtcagaagcgaataatcagggtgctaagtacaataacgagaaagcatcacaaaacgctattccgggagctgacagtcctgaagaacttctggaaaaagcaaagaaactggagaataatcacaagaaatga

SEQ ID NO: 161138 - DNA, 498 bp, Enterobacter cloacae
atgaaagagctgatgcgaattatgtgggttctgcttatacagtatatcgcctgctcgcttgcagggtgggcaacatccgtcacgctcctgatacttgcgttgctgattatgtggcagggtatatttgcatggattaattatcgagttcgcaagcagaagtgtttgtatagtcaggaagatgtatcaccagtaatgtacatggttctttctgtccccgcgctctgtttccctgtgttggccctatttatatttttcgggctctcgatctacagggtctgtgtaataagtggtgtaactgttggagatgaatctctaaaagaacagttttattttgaccgtaagtttcaaagtgatccgtttccttatgaatcaggactacacgattctgcgggagtagggttgaatccagctacaggattgccaatgtgcgggctagttgatacttctggtaatttttatgggggttcatctgaatcatacagacgctcggacagttag

SEQ ID NO: 161139 - DNA, 1011 bp, Enterobacter cloacae
atgtttcagttagatatcgatgtcagcaagaacaccctggatttatgcctgctgcgggaaggtgtaaaaggcagagtcaaaacccgcagaattaaaaacgatgtcaatgcggccagtacagtaatcacctggctcggtaaacaacaatgtgctcctgccgatgtccatatcatcatggaagccacggggatttatcatgaatcgctgggatatggcctttacagggccggagctaaagtttcgctcgccaatccacaccgcagcagagagtttgcgcgtggcatggatattctgacgaaaaatgaccaggttgatgcttatatgctcgcctgctacggtgcacttaaggtgcccgaaccgtgggttcctccgccagagagtgttcgttatctctgcgccctcctgcgtcgacgggatgcgcttgtcactgaccgcagccgcgaaaaaaacagactggaaaaatgccgggcaacagacattccgcctgcgatagctgaatctatcgaaaatgtgcttcgtaacctgagtgcagagattgaacatcttgacgaattgatcctgactcaccttgatcagcatcctgagttaaagaaggattttgacctgctgacatcaataaaatccgtgggttttcagttaggtctgaacatgctggttatcctgcggagtcatcatttcgatacagcagaacaggttgcggcgtttctgggcgcggtacccgttgaaagatcctccggcacctcggtcagaaataaacctaaattatccaaaaacggcccgccggaaatacgggcgaagctgtatctgtcttcgatgtgcggtctgagatttaacccggcgatgaaagcgatatatgagaggttatgtctgagtggcaaggcaaaaatgtgcgccataggtgcactgatacgaaagctcgtccactggtgctatggcgttctgaaaacacaaaagccgttcgatgctgaatacctgtctttagatgcgcgtagcgcatgtaaggcggcatga

SEQ ID NO: 161140 - DNA, 162 bp, Enterobacter cloacae
atgctgccaaacgaaggtcactgccttagggcgaaggtcaggctctccccgcttcatgtgatggtagctaaccagcacatctctattacatacaaggggaagggggattggtggaacctgtcaacaagtaaccggcttcgccgggctaccggcgccctgtaa

SEQ ID NO: 161141 - DNA, 858 bp, Enterobacter cloacae
atgagcaccatcctgaaatgggcgggaaacaaaaccgccatcatgcccgaactgaaaaaacacctcccagctggcccgcgattggttgaacctttcgcgggttcctgtgctgtcatgatggcaacagactatcctcattatcttgtcgcggatattaacgctgaccttattaatttgtataagaaagcggcctaccatcctgaggaattaatacaggttgcatgggtattgttcagcgaagataacagtgctgaaaagtattatgaaaatcgtctgcgttttaacgaagatacatccctgaccacgctggagcgcgccgcattattcctgtatttaaatcgccattgttatcgtgggttgtgtcgttataaccaacgcgggaaatttaatgttccctacggtaattataaaaatccatatttccctcatgcagaaatcctgacctttgctgaaaaggcagtgcgtgccacgttcatctgcgccagctatgacgaaacgctggcaatgctgacggcgggtgatgttgtttactgcgatccgccttatgacggtacttttagcggttatcacactgccgggttctctgatgatgaccagtatgatttggcatctattctggtgcgccggtcatcagaggggcacccgatcgtcgtgtcaaatagcgacacccgcctgattcgttcgttttaccgaaatttcacccttcaccgtatcagcacaaaacgcagcataggagttgctgcaggagaagggaaaaccgcaggcgaacttattgctgtactgaaaccaaaagtttggactggcgttgatctgtctggcggccctgattactcggttgtgcgtgaggtgcgcgtatga

SEQ ID NO: 161142 - DNA, 1797 bp, Enterobacter cloacae
atgtacgcacaacctcttgaattcattgataatgcagagttaacccttttgcagcgatatcaaacgtgtaaagccatgtctaagggctatgcggctgattttgaagatgatgaaaaaaggctgattcaggctcgttcctactgtgtaagagttgtgagggcttactggtcctctgtggctcataagctcggcgcttcaatcaccataaagcctgttgcgtcttctgtgcttattgatgatgtagctttggatgccgggcaactggcggaaagaactggagagctgattgctttatttcctgttgaagatgccggatttttgatcggttcaatatacactgtcatgttgcctgctgcttaccgttctgaaaaaggggcgtattacaccccacctccattagtggaacgcctacttgatatggcagaaaagagtggagtcgatttttcaaaagcttcagttattgatcctgcatgtggtggtggggcatttttggcaccagtagccttaagaatgttgaagaaagagaaaggttcttcacctgagtggattttcagaaggctaactaagcgccttaaagggattgagatcgacccctttgcagcatggatgagtctggttcttcttgaagctgctgtcatgcccctttgcataagcacgaaacgtcgtattccagattcagtaattattgttggtgatgcactcattcaggaagatttaggagagttcgatctggttatggggaatcctccttatggaagggtatctctaaatcctgaattacgtacgaaattttctcgttcgctctttgggcatgcaaacttatatgggctttttacagatcttgccgtccgattgattaaacctaatacaggcgtaatagcttttttgacaccaacttcttttctaggcggtcaatattttacctcgcttagaaatctgttaactcagtttactacaccattctttttcgatttcatttctgaccgagatggtgtctttgacgatgtattacaggaaaccatgctggcaactttcaagtcaggtcagcataacacgaaggtttctgtttcatctttgattcctaagggtcttaacaaagctaaaacagagagtttaggtaaagttgatgtcgaaagcggcggtaaaatttggttattgcctcgaaaaaaaacagatgtcgcatttataaataaaatcaaaaagttaactgtgcgcctttctgatgtgggttataaagtttctacaggacaacttgtttggaacagattcaaaccacaattaagacagttcaagaagaaaggttattaccctttaatctgggcagaatctgttacccacgaaggattcaaatttagtgctaccagaaagaatcatgtaccgtttatagaagttatgaaaaatcaggattttctcataaccagaaatgagtgcctgttagttcaaagaactacatctaaggagcaggaaaagagaattatggcagcaataattcctcaagatttcattgatgaatttggaggggttgttgttgaaaaccatgttaatgtgattagtgcagaagatttgctctctggcgtcaatgctattgtgattgaaaaaatactcaattcagtaaccgttgacagaatatttcgttgtattagcggtagtgtggctgtttcagcttatgagttaaatgctattccattacctgatttagcaaagttaactgaattgcaacgttgtatagaatctggaattagctcctctcaattagagggggttattgcaaaaatttatggagtttctgcgtcatga

SEQ ID NO: 161143 - DNA, 1095 bp, Enterobacter cloacae
atgaagatgcccaatctaccacaaataaatgagatacataaaaggcttgtggatatattccctgaaggaactgaaaacaggaattatgtcataagagaaatggcggctaaaactatttttgtcatgctttatgcaggggctatagacggcaacgaaaggtggattagacctagccaagtgacggatatgggtaatgagcagtctgctaaacaatcatcagatgaacgtacctcttggctcaacgatactctttctaaaaaatgtactcgaccagttgacgcttggtacgcagcaaactctcgagagcctatcagggatgaaacattaagaggggggctaataccttgtcatgctgttcttgaaaggaagggaattccaacgacatcttcgaagccgagatattgtctcaatgcttcatttgcagagctattcaacccagaactgaccacagcagagctatctattaagatacaagattggcaggaaagtcatctcaataaagcggcactcgccaggatacgtctcatcaaatcaagtatttccaattctgatgagagcctgactgtgacttttcccggtggagaaaagagaacgctggcacccggaccatctagtgtaatcgctaaagaagttattgaagtttttgcgccaaaatttctaaaagttccggcagttctatggctttcagaatcaggtaataaagtggttactcgtgatgaagagcttgctagttctttgggtttgaagatagatgcctctaaagctctgccagatattattcttgttgatcttggtgaagataaatcaggctccgatatgcttttcatcttcactgaggtagtcgccactgatggcccagttaatcgtgaaagaaaagctgcattaaccaaaatcgctgccgatgctggatttagtaataaaaacctcgcattccttacagccttcatggatcgcggcgcatcgccttttaaaaaagcaattacagagctcgcgtggggttcatatgcatggttcgtttctgaacccgaaaatcttatagatttacgtgatgggcgtgcggtcaaactcagtggtggtcgagatcctaacagctga

SEQ ID NO: 161144 - DNA, 186 bp, Enterobacter cloacae
atgcgcctgtttaatccgataacgttaaccgaagttattccgggctttcatgacatcactgatgcaattgaattgccggatgataactggtttttcaaaacaactgagataccggaaggaaaaatgctcgccgccaatgagaacggcgagccagttttgattgatgttactgtaatggagaaatag

SEQ ID NO: 161145 - DNA, 435 bp, Enterobacter cloacae
atgagcaattatatttatagcccctccctgaatcttttttatgatgcagatcttgaggagacatacaaaaaggctcatagctggcctgacgatggtttaaatgtaacagacgagattttttcaattttcacaggctcagccccggaaggtaaagtcaggatctgcgggaaagataaccggccagcctggggcgatattccaccaccaactcatgatgagcttgtgtccattgctgaggcggaaaaacaatcacgtattgaacaggccaatgactacataaacagtaagcaatggcccggaaaagcggcgattggacgcctgaaagatgacgaactggcacagtacaatttgtggctggattatctcgatgcgctggaggaagtcgatacctgtactgcgcctaatatagactggcctatttctccattacagtaa

SEQ ID NO: 161146 - DNA, 1956 bp, Enterobacter cloacae
atgaacacagcaaatcgctctaaacttcttagcatgacagttaaaaacataggatgcataggtgagaaccctgtcacagttgcattagataaagtagtctgccttgtgggtaaaaataactctggaaaaaccactattcttcgtgcttatgaacttgccaggggagatataaagttcatcccttctcaagatagatatcttcgagcaaaagaaacctcaccttccgagattgttctggatattcatatacccgataacataggaaatatttcaaacgaatggaaaataattgatggggaattgaaaattgtacgtagtcgctggcagtgggctgctccagactataaagctatcaggactacatggcatccaaagggtggggaagatggtaaaggcgattggtcagaagataaaaaagcaggtgggttagataacgtattcaactctcgcttaccaaaagcaatcaggattggttctttagaggatgcagaatcgaccgagaaaacgttacttgccttggctttacagcctttaattgaaaaattaaacttagaaaaacaggatgcagaatcaaaactaaccaaggcaataaaagctataactgagcacattgataatactagctctcatcacaaacaaagctttaacgaaatatcacaaaaagtaactgatggttttaagagtgtattccctgaattaagcgtctctttaaatataatgtcaggaccaatgtctattgaaccagataaaatcattaaaagtggttcaggtttaattgttaaagatggcgagcttgaaacttctctatctcaacaaggtactggagcgagaagagcgctcttctgggcaatgcttcaagttcataaccagctggagagagagtcagaaattcgtagaggctaccgtaagggactgattgatgagaaagaagccttagacaaagagactaagaaaaagggtactaagtcagacaggcttcaagagattggtttaagaattgaggaaatatcagcattggtcaaacattttgacgatggggggagcattcctcaggacaaagaagatccagcattacctggttatcttttattaattgatgaacctgaaaatgcactgcaccctctcgcagccaaagcagcacagcgtcatctatataacttggcggagaatcctgactggcaagtcatcatgacaacgcactcaccttattttataaatccatttgaagatcacaccacaatagttagacttgatagaagttatcaagataacaaagacattctcgttaaaacctaccgttcagataatgttgattttgaagcagatgaaaaacagagattacaagcgctacaacttatagatcccagtttctcagaaattttctttggctcattccctattctagtggaaggtgacactgagcatgccgctttcttagccgccattgttaaagaaaataatgaactactagataaaatcacaattatacgggcaagaggaaaatccatactccttccaataattaaagtcatgaaccattttaaaataaacttcagcatagttcatgattgtgactccccattcaaaaggaacggccataataatggaatgtggaccgagaataaaaaaatccgagatgctatccaagaggctagaggaaatggccttactgtaagacatcgaattagcatccctgattttgaaagatttcttggtggcgatgaagagagcaaagataaaccattcaatgctttcattaaaatccaaaccaatgaaacattaaaatctaatgtacaagatttgctgcatgatttgcttactggagagagtcacgattgtttcccccctgaaaaattatctgaaaaagaatatcttgatgttcttttggaagatattacagaatgggcatcaaaaaacgacttaaataatgatgtaagattctttggctcgctttaa

SEQ ID NO: 161147 - DNA, 375 bp, Enterobacter cloacae
atgccaaatacgctgatgaaacagctgacagaaatgaaattgacgggaatggtgttgctggtcatgtgtgaatctctcaaaggggatcagcgtaaacagaaacgtttgctacaaaaaaaccggctaaggcttgaagcctcggtccacgacatagactaccagccagcgagaaacctggagcgttcgcggatcgctcagctaagccggaacgaatgggtggtcaggggtcagaacctgctgatagccggtgcctgtaactgcggcaaaacctatgcaagctgccagcaggtttacagcgtacagtactggcgactgagccggttattcctgattatgactggagcatattcagggtcagggatgacaggggtctaa

SEQ ID NO: 161148 - DNA, 1134 bp, Enterobacter cloacae
atgcgctttttctgccaggtgttcgctgacccacggtttgtcgggaaaaccgattccggacatacccaggaacacaatattcagaataatgactccagactgggtatcgccatacggcataacctcacagccggcgacagcgataattttgtactgggctattacgaaacagggctccacggactggattcctcgaccgacggactgagtaataatgtctatacccgtcaggcctatgccggattcggaaatgaagtacttggtatcctgaccttcgggaagcaatacgcgccgacagactggtgtctaggggtagataccacgtatgcctggggcgggaaaagcaaacacgatcagacagggatgtcgacggaccttgtcaattctgcagggatctattatttcactgacaaccatcttactgtgggcgtaatggcacaggggaatgacaacgtgaataagattggtttcgcaaattatggaaacggaccagaccttcatgatgcatttcgtgacggccctgcgacggtgcacaacggcgcggcactggcagctcagtaccggtgggataatggtctgacactgtctgcggcggcggcctacagcaacttcacggtgaattcaggcatcaatgaaggctgcaaccctctgggcccggatgaccattgttatcattacacggatcctgacggacatccctatgacgggaatgcttactccatggggatgaatattaagtatacgacggcgctcggtgagttgccatggtacaacggggcacaagcgacctggtacatgaaccgcgtaaataacgttgcatcagcgaccactggccattatcgtcataacccgtctgcggatgatgatcaggaaaccatcttcggactggaatatgattcgcagctccggctgacggacagctggagtgtctacgcggatttcagctggctgcgcggaggcgatgcaatggataaccagcatctgcagtcaaccgtgctgggtaccgactatatgctcggaaaaaatgcagtcgcatttgtggaatacggttaccagaaagcctggggcaatacatataacgactggaacattgacgaccaccttggcgctgttggttttcggatctttatttag

SEQ ID NO: 161149 - DNA, 939 bp, Enterobacter cloacae
atgcactcgcaggcaacacgacgtcagttcatcctcgccggactggctgcactgacagccagtactatggctatccccgccgcaaatgcactctcagacaacagacgacacgatgcagataaacccggcccccccctggtgatgatagatgcaggacacggagggaaagactccggcgcagtcgggcgtgaaggcacagaagaaaaacatgttgtactggaaatgacaaaatacctgcaggacatgttgatcctggaaggagtagctgccaggctgacgcgcacagaggatatctttatcccgctgtatgaacgggttcagatggcgcatgaccatcaggcggatctgtttgtctctgttcatgctgagggctttaccagcccgaaagtccatggtgcctcggtctttgcgcggtcaatcgggggagcaacccgtgctatggtgcaatacctttctgagagtgaaaacgcagccggtatgatggcaggccggaaggccgctgccagagagcattacctgcaacaaaacatctcctgtccggagcaaacagaaaccagcagacaaagtcttttgctgggatctcaccttattaagcacatcacctcagtacaccctacgtacaccctacgtacacccagacaacagaacaggccgccttcgatgttctcaaatccccgattatcccctcagtgctggtggaaacggcctttattaccaacgctgaagaagaaaaactgctcagtactacgtcattccggttccggatggcccgggccatctcagacggcatactggattatctcagggctaatcaattcttataagaaaagcggtaacaaaatatactgtcatgaaccaatgcccccaaagcgcttgcctgctcagtcgcagcacccgggagagcatcgtgacactgtagcaaatccccctccggcgtga

SEQ ID NO: 161150 - DNA, 636 bp, Enterobacter cloacae
atggacactttcgcgaacatggacactaccgtggacaaaaatacgccttacaacagaagaccctggatcttcacagcgctgagccttcggtttaatgaggccctgacttaccgtgaaattgctgagcaactgaacattagctcatcttccgtacataaaatgttcactcgttttcgacgcaccggtattaactggccgttaccggaggaatacacgcctgaacgtctggaggaggagctttacaccttcaatctggagacaaatcttcccgtaaaaaaacgccgtccggactggcctctggaattcaaaattcgtatggcggagctgaccctgcaaccagacgccagtgtggctcaaattgcacgtgagcatggtattaacgataacctgctgtttaactggcgcaatctgcatcgtcaggggctactggatcctgccaacagagcggcgcttatcccgattacgatggagcctgttacccctccgcccaggcaaaacggtgtcgtatcaacagatatacccccagttatcagctgcaggctgacgttgccaggtggaagcctcaacctgaccggtccgttgactcctgaacttctgtgtggactgatcatcgaactaagggatagtgattcatga

SEQ ID NO: 161151 - DNA, 315 bp, Enterobacter cloacae
atgaaaattagtgagcatggacttaatctcattaaacactttgaagggttacgtctgcaggcctgtcagtgctccgcaggcgtgtggactgtcggctacgggcacaccgccggtgcccattccggtgatgttattgatggcgcgcaggcagaggcttttttacgcaaggatgctgtgggctcagagaatgccgtcaacaggctggtaaaggtttctcttaagcaaaaccagtttgatgctctggtctcgtttgttttcaacctcggctgcgataacttccgcactgccgggaaaactcaatgccggggattataa

SEQ ID NO: 161152 - DNA, 1041 bp, Enterobacter cloacae
atgaccacactaacttatgatgaccccaacgatattgatagcgttgaattaactatccagactggatccggacacaattctccggttatatatgcaaacggcaggaatcaacttcctgttgagattatagccaaagcattcaaggaaaatgatgatggagatgatgttgtactaaatttctctgatgaaatctggaaccatattttgaatctgcgtcacgccgaatctgatgaaaaattgaactggctcggtaattcaggatggtgttttaccacaacagaaaatgatttcagccgggaggttcaggccggggaagttcagaattggctaccatcagaacgcgcagccctctccgatggtagtaaacaaattattatgtatgtttacacattcaataacgaatccagacgcatcgctgttagcattgacacggataacggaaaacatttcaccacagcggatgcatcctctggtgctgaaaaaatgtctgtaagcgtcagcacattgttctcccgggattacactaccgccgacattaccacttcctctgatgacttaggcaaaggggaggccgtttactcaaaagacagttatgtctaccttacctcccatcaaacgaatttttatttttcacttaaaagcaattataattatattcttaaatacgtgtattcttcttacgcaggaaacgataatgaaaaccagctcagcatgtactggtctttctgggaattcgccggggggttgtacgttggatacgcatggccacaaaacctgagctcacctcacggtgttaatctgtatgctccccaaaattatactttcagtgaggctatttctgtatcgcgtcaaaatacagttgtatttacagttctggaatacactgctaacaggactgtggaatatattagagatgtgtttaaacaaagcggaaattcagctgcctggggaaccacacttaaagtcttcgatcagtttggtgagtccggacatttcaagatcaattatgatagttcttccgtctggttagagaatatttaa

SEQ ID NO: 161153 - DNA, 234 bp, Enterobacter cloacae
atgctcgtcccgatctttatgggcaacccgctggcctgtgcggtagcggcagaatgtctggccttgctggaaagcggcgcatggcggacccaagtagcggccattgaagcccagctcagaaccgagctgcagccgttacgcggtgcgggcaggtcgcttgagtattttccgcagtttaagattgtagagttgcaggttttccctattttgcggtgcatacaggatcctttctga

SEQ ID NO: 161154 - DNA, 546 bp, Enterobacter cloacae
atgaatttgcctgctgctgaagtgcagccgttcagggtgctgttgctgggctgggtgatccaggcgagggatcacagttttaccgagattatgggcgcactggatgcttatgctatggattttgcagagaatggaccggcgatagtggccagcgatgagaagatggcctggcgctcgcggcagaccggtgactggtttgaggcctatgaaaatctgtttaccgaagatatcgaccttccggccatggaagcaaaaactattatcctctatgggcaaaagataagtctgccggcacttaagccggttaacatcagccgggaaaaatttgaccagttcatcacccagggcaagggctatccgtcgcaatacgcttcatatgactatctgcggaagctgggccaggcgatagaaagcggtcaggaagtggaagatgtctccgggctggcttcagaaaggatcctgtatgcaccgcaaaatagggaaaacctgcaactctacaatcttaaactgcggaaaatactcaagcgacctgcccgcaccgcgtaa

SEQ ID NO: 161155 - DNA, 246 bp, Enterobacter cloacae
gtgctgaacacccgtgccttcttccgctcgccgtcgcgcaatatcgccgagttcgccgccggtgaaatcggtgagaaagaaatcctcaaggcatccgaacagtattcctacggtttggacccggtacgcgatggtacctcggtcggcaaggacatggagcacgtcaccctggtgagtactccgatgtccagacgttgccggatctctcctgttacgtcacgcttcccggaccttagcccgccgtga

SEQ ID NO: 161156 - DNA, 396 bp, Enterobacter cloacae
gtgctgaccaacgacgtcaaggccatccgctatctgcagggcatcgaaaataacagcgagtcattcaccatacgcgactggatgcgcggtgttcgtgaggatggtaaaaacggctggttgtttatctcttccaatgccgacacccacgcttccctcaaaccggttatctccatgtggctgtccatcgccattcgcgggctgctggcgatgggagaaaaccgtaaccgcagcgtgtggatcttcgccgatgagctgccgaccctgcacaagctgccggacctggttgagatcctgccggaggcgctaagtttgacggctgctttggtatccagtcctacgcccagctggaagatatttacgggcagaaaccggcggaaacgctgttcgacgtgctga

SEQ ID NO: 161157 - DNA, 300 bp, Enterobacter cloacae
atgacttacagggtcagattcacggaagatgcattgaaagaatggcaaaagctgtataaggccattcagcagcagtttgcggaaaagctaatgaagtgcagcgaaaatcctcacattccctctgcagaacttcgcggaataaaggactgctacaaaataaaattatgtgcgtctggttatcgcctggtctatcatgtggttgacgatcaattaattatcgctgttgtcgctgtaggtaaatgtgagcatagtgatatttataatctggcaagcgaaaggatgagttcaaaaaggatctga

SEQ ID NO: 161158 - DNA, 8619 bp, Enterobacter cloacae
atgcctaatacctacgcaactaaaaaaaagcaacagaaagagcccggcacggaatgcacacctgaatattttgatgttcaggcagctgactgtgcgcaggcagacggtttccccgcagaggataacgccagagcgggcgaaactgccgccacgttttcagtcaccgacagcgttttttatgctgatttgtatcctgatccggatgaatttactgctgacgtgcagccactctctcccgccagccgggcggccgcgatgcaaagccacattgaagccgcctggctggaaaagcttccgcagttcagcgagtacaaagcccggggatataacaccctggtgccgggccagtacgcgataaccgttctgcaggcggtgctgcaggaaagcactgctccgggaaaaaacgccgtttaccagaagctccgcacccaggccatgcgtctgctgcagttacagccggattttgcatactctgctccgtcttcggaaacggagtatcagttcagcagcctggccgaggagatagcgagcgctctgccggtggcggaagccgccgggcgggtcagtgaatcagagtggaaaaaccgcgccgctgaagctactaaccagtggctgaacgcgctgtccggcgaggccatcaggcgtcttacagccatgaagaagctgccggtcagccgtgactacgccagccaattgagtcaggagctgagcggactgatgttcagtagatcctgggaccacacggcggaacatggagcctttagccggcttatgacgtcactgcaagctgaggaccggtttgcccggagccaactggcgttcagtttcgacagaagcgccggccggttgcttgcctcggccaaagaagcacggaagtacgcgatggcggccctgtatggcggacaggtgctgactgacctgaagtacgccctggcttacgatttacagtggtcgtctgaaacgtctacattcagcccggaagcagaccaggacccggtaatgcgtactatgctggaggccgcagacgcagcgatagatgccgctgactggcttagccgggaggcggcggagctttcttccgcagaagagccggcaggtgcggagcatgaggaagatctgattgatagtacgggccgggctattatcaccgccatcaaaaagactccccggaagattatcgaactcagcactgaaatccgtctgcaggcgggtctggtgcacagcgacatgaaaaaagctgccgccgtgctttcccgcaggctgggacagcggccggcggtttattctgaaggggtaaggaacgccgtcagagcaaccgggttgctgctgctggatgagctgcatcaggctaaacgcctgatagcggcgttacctgcacacgcgcgggtgcttcaggaaaccgcagagcagtatcaaaatgtgaccgggcagaccactggtctgattacccacccggtgctggcggaggtgctggctgagcatctcatcagcgaggccgcacgctggcgcagcaggaaacagcaggctgagtcggggctggctaacctgctggcgacgctgacggagtttgctcaggaaaaaaggacggaggactttcgtcatctgctcgatgtgaccctgttcactgaccgggcagaaagcggcgagttggagggcataaaagcattcagtcagaccgccagtcaaatcgtcagcggccttgcggacattgccgtcgaggccgaggcctccgcggtgcgtctggccgggcatgggcacatcggggggggcgagctgatgaagaaagcaaaggcctggctgcagcgcctgtggctgctggaagagcaggtcagcgcgggcgttgctgatgtcacaggggcaacgctgaaatatttttcgcggggggggatgctggccaggggggtggcggaatgggcggaggcgctgaaacagcagcatctgcagactgttgacgggagcgaacgagagacggaggccgcagaatttgaggcggcgctgctggcggtggtcgaggcgcaccgggatgttttcgctaaggacaaagacccggaagcgaaggggttcatgcagcgactgaagtctgaacttcggcatgccgcacagggtacgaccgtctatccgccaacccctgaggaaatccttgccagaacgcgcacgctgccggaagacgtgcggcactgggctgagaggaaggtggtaagtggagccgtgtcggcggcgctgaggcaggggtttaggctggtgagcagcccgttgtctctgcctgtgaagctggtgatgcgggggggccggatgggcctggcgctgcaccggggtattggggccataaaccagggggtgagggtgggtgagggaacgccgaagcggttcaggaacgagctgatccagcgggagcttgcccggggaggtttcaggctaacgatgtcggtgctgccggcggcggcgtgggcaatggcggcaggcagagttgcagtgcgtctggtgctggaagatgaataccgcagaagagtggtagaggacagtgtgctgaatctgggcgaggacctgctatggcgcggagggtatgcggtattgaacacaacgctgcgtgtcctggctgcggagctgattgatgggtcgggagccggggatgatgtccagaggctgacggaggtgagcagacgtcttgcagaggcagagaaggcacagactgacggtgaaacgggagccgctcatgctgtcagtcctgaggtacaggaggatcggaatgaatccgacaaggaccgtagccataatattagaaaaagaggagtgtcagattgcgatgtggaagggcttattcatagggtggaagcaagtaatagcgttccctggtctgaatattcagaagaaacgagagaacaaatttacttctttgcattaaagtacaggttgaaatgtattgcatcagacatctatatccctaaaaatattcgccttcaggctgtttctgcaattgccggggataaaaacttaaggccttattacaatgaatataagccatttgcgaatgtttttctctcttctggtgaatattcaaacgccggagttaggattgatttaaataatagtgagcatgtgttaacatccggatttttggagagggatataacagatgtaaatatttcacagatggccagactgcttaataagcaagatagagatagattcggttcgacaaacaccctcaggaaagaaataattaaagacgcaattcggggagttcaggacgacagcacgagtagtctggaaaaggtttattctgtattggttaatcaagacaaaagtcagttttacaaaatccctaaggagcacaaaaagcaaatttactacagtgcaatagcctacaggctaagcatggtggaaaaagatatccacacaccgcaaaacctccgaagaaaggctgctttagcaatggagggagtgccactgctacagcctgtttatatagataacacccctctgaataatgttttttttcttccggaaggcccgaatctaaaatctggggttataatagactttaatataccgaaccattatgtgattaatggtcagaatgactttcatgaatctttactcgaaagggttccagtaactgggtttcaaaatgcaattgatgagaggagttttcttttgggtcgacctcgacatacagaaccgtcgacagcaaataagttagccagtgcaattgatggtgaaagtgaaaattatttcaattcattaaacccacctttgatcaatatatctcagttagcggactttctatatgaaagttccagtgtagaaaacgatatacagcagtcgtcgatagatgaacgtgagatagtgaggaatgcagtaggagggaaagatcttgccagaaccggcgttagcgtaggtgaggttcaatacaagcttgaaattgtatgggaaaatatgagcactgcagatgtattggagaatattgctcatccgtttcgatatttttccggcgatgtacaaaaaattgttagcagcgctaatggcgactcaatacaggtgacggaacaaaaaatagaacaagccaaggcgatgggggactgggcggatgtttcggaaaattttattctttcgttttcaggcatcgggaatgctatcaatatactacagtcggccgccagtatcggctccagtgtagcaagaggtgaagaacctgatgcactggaggtggccggttttcttgccgctgttttacacgttccggcagataaggcagcgattaaaataagtaaaaccagcgtggctgcagggcgagctgtcaaatatactgctgtaatatacggaaaatccgttgacctggcaggggtgggccgcagcattaagtatgcagcagacaccggcgaacctcttgcgatttatcaggccctgctgaatagcggtttgagcatgcgtgattcttatcatctgacaagaggcatcgctgcaaatctgaaggacaaaacgggaccgggaaaaaatattggtgaaatagcttcgttcgaacaactggagatgctgagcacatcagctgtcagcgctgaaagtccgttgagaacattcagatttggtcgaacaacgctgtcaggcagaatcagacagggtcggcttgagatatcaagcgatggaggccgaacctggcaacagggaagtgacatacagctgctggcgtacagattgcagaacgctggcggaacgccccgactgccgaagatatccgcagtcgataaacaactgactgaaaaaggcgcgatatcgcttaaaggccgcgggcttcttgacccccagataaatgagccagtaagtgtaccttatgattttgttcgggtagataaatattctgcaatggacaggccgctccccgtgtcagaaaatgcactagaaaaaaatctcagtaacaaaatttcgacggccaggggagattcattgtcttcgaaatcttcttccggcacggcaatgggccggtggaagcaaggagacatcagctcgtcagttgaattcataggcgttgataatggctcttcaggttgtattggtatccggatatcattgaataaaattactcagaataaaccgttaatagtatcagcaggggaattaagtggctgcacaatgatatatgccactgacgatcgctatctttatgtgtatcattctggtcaggaaccgggtgatcttggctgggcaaccagtcagcaaggcgtggacgccatatataaaagtcacaaggctatgacagggaactcaatcccagaactggaaaacagaagattaaacaacaacgatttgccaaaaatattttcaggttataactccagccagataacttatatgggaaaaacgtctcaggatacaggcgacacgcgaatttctgctcagggttatcctaacgtaaaaacttttgattataacgcagcaagttctcggaacagatacgatcccagacttggtcttgcgtatgctgtaataacaaaagatgggaacactgtaaaagtttccgcatattctgaggatgtttcttttaatcaatcaagcggcgacatgaaagttttagctagcggttatgaaaaactgaacgttaatacgccgtcagaagtggctgagccaatgcgtccgctgcaaaatgaaccatccacatcagcggacagcagtcggttgggtagtgcaagaactatcccggaacagacgtatggctcacgtatcaccgacaatcgactgacaccgtcctctgactattatccggtatatgcaagtccctcccgcattaataaactttcttttgacaaccccactcagcataacataagacttaacaaaattagcaggatagttctatccagagcgttttccggcaacaggattaagtcttacgataatcgctcttccgtatttaaagaagataataactttcttattagccgcgccccctatggaacaaaaaaaataggaaacaatatgaatccagatgtacttaaaaactctgtttacgatatggaattaaaggtaagtcaattaaaaaggatgctggaaaattactcagggagtgataagtcggaattttatgaaaatatgcgggttattgaagacaatatcgaagatttaagaatgggtgtgaaatcacagagtgatgattcgaataacattgccacttataccctaatgaaaaagggggcttcactggaaaatgtaaataatgtttatgggctggccagttttgaatttgacccacagagcgccgaccttaaaaccaggtttgttaccgcgcacccttatgctattgttaataaatacgctggggtcaaagattatctgatacacagcaatctcattccggagtcggatttgtcaaaatataacataaaaaacgtagcccgctatctggtggctaaatccgtacgcagtgaaatcaattattatgaatcaattccagcgataaaagtaaagactctctcatttgaaggggctaatcctgttactcagcggatgggttacagacttgaaaagttaacttcttttgtctcatttaaaaataagaaagaacctttgtacgctaacgccgaggaggaggccagagctttagattttgattttcaagacgaagccagtgcgcagcatccagctgaagacccttatatggagatgatggcatatttaaaaaaagatattcgcaattcatttttacctgtcaggcatatggaggttttttctgacgaaagaactcagaaagcgatcgactctatcctgaaagagggtaatgcagaactggtggatagcgatgttaataatggcagagcaagttctgataatgagataaaagcattttctgaaagggttactgactccaccaataaagcatttgagaagttgtcgaatttaaaatcaatgtttgagctggcagaatcccggcccgaactcaaagctaagctgaaatcatggattgacgaagctgtcggactaaacgatgaggtcgttgtaaatcttgataaggtagataatgctgaaatatcagagatgtcctatgaaaggtttaaattaaatgtgaataatatctacagttttcttcactcacaggttgagcagaaatatgatgccttcatcctgttcagatatcgccagtttgactcatctaaacctgatgcctacgcgctgcgttatgacagaaggaaacgaattatgctggctgtcttgcctgaacatcaggcgcatggtggattaactgacacaattatccatgagagctcgcataattctgctgatacgcttgatcatacttatttaggtaacgtgcgcgatgaaacaggttcatttccgtcctcatttgaatattctatgcgagatccgaaaaacttttcagccacgacaagaacaatcgatttaagtacgaactatgctcttggtctgccagagaatgccaaaacctccctggagcaaaagagtatggcagatctaattcttacgaacagccgcctgattaaagcagacacgttgctgaactccgcagaatacaacacatatatgatagatgtgctaagcaaatacaaaataaacgactcacagaccgatttttattcacctgtcccccgcaataaacgtactgctaccgggggggacgacagcctggacaggacaattttagaggcgtcggtagaggtttcattgccaacccgcgcaatacaggatgtcagtgatctggcgcctgccgaacggcaagtcgaatcacgcagtgaattttctcaaatcaaagcctcaaatgaccggacatcagcacagctgcctatagctcagtcatcacaaaaccggccgaatattcgtgattcatctgtttctgctgagcatcgggcacctctgtcgaggcataaaggaacctggtctgatcctaaatcattcaatgagccgggttctgctaatgatatttatctggataaagggaattattaccagctatgttctgacggcactcctgcagattatgaaacgtctgatcttgatgcaaatttgatagtttatggaaggtctgaaagaattgttgttgatgatgatttatttgaaaacgccgatcgtatttttcctagagaagcatttttatgggatgcaagaattaagcgcccactcatgggtaataagatgatatacagagataatgaaaataacctgtatatgttaattaatggggtgtactttccttttaaattttacgacggtgtaagtggatatatttattggggggaaggagctataacagttattaaagtaaacggcaaatggacgcggggcgggataatgccgccagaaagtaaagctgacgattcactgatacgtgaagtgtcccgcattacttccctttatggaagggatggcaatttacattttacccctccctccttgggagattttaaatcaactgcaggggcgtcaatatataaagataaaaatgggaagtattatatgtatattgataagaagtattatccgtttaattatggtgttcatgactcgagggatactgttgcaaagtaccgaggccggattggaacagtaaaagtcggtcctgttaatttaatagtttatcgtaaaaaatggatgtgggggactgattcgttttga

SEQ ID NO: 161159 - DNA, 153 bp, Enterobacter cloacae
atgtttaatttacgactcacgctgatactactcgcagccagcggcattcttatcacgtacaccaccgtaaatcattttcgcggcgaagcgcagcgatggaaacaagaagctgagcgtgtcacagcaatcagccgccagcagcatgggccatga

SEQ ID NO: 161160 - DNA, 876 bp, Enterobacter cloacae
atgccagccattactacatccgctaacgctattattgaagttaaccaggctttacaggtaattttaaaaaaatatcttccggattcggatctcgatatccgtttcgatctgccggatgtcaatactaaaccggcaacgcccaccgtcagcatatttctttatgatgttcatgaggatttgcagctacgacagagtgaaatgccccgtgtcaacgtcgtcaacagtacattacgtgcgggctgggtgaacctgaactgtaattatttaatcacctactgggaaacgcaggagggcagcggttccgatccgagcagtaaacctgataatcaggcagcacaaattatgacgcttatgctgcgggcattgctcaataaccgggagctggaaggcattgccggtgcctatacccgcattattccgccacaggaaaacctgaatagcctgggcaatttctggcaggcgctgggtaatcgaccacgtctgtcgctgatgtactctatcaccgtgccgattctgctggataacagcatgccgcagacgctggtgaaaacgactagcagtgacattgtgccagcggcaagcgtagatctgaaggtactgaataataatctgtggaaaatactagctgaacagttgggcagcgatggggcgcagaagctggccagggtccgcattaacagtcagcagcagacagcgggagatactaccgcaataaagcttagcgtaaacatttcaggcactatcgataaagcgtatcaaagtagtctgcaggcggaaatggaaaaatgggaaaataagcagagcaccatcatcactattaacggcgccgctgtacatattacagcattgaacagtaaagaattaaattatgtataa

SEQ ID NO: 161161 - DNA, 2079 bp, Enterobacter cloacae
atgtcaatttctgtaaaacccgtgtttttcccagactatcagcagggtagcgacgatgaggatttctctcgctgccttgaacgcatcgatctgcggtttcagcaggattattgtcggcggatgggagagcctcctgtcagcctgaatcacttttttctgccacatgatgagatcgtccgacgtcttgagatgcccgagggccgtccctgctggcagggacggcatgggacctatttacccgatgctgaggagacgctcagcggacggctgcattttttgctgagcgccttcgatttaaccgtcagcgagcgtgacctgttgctgctcgccctgctgcccaggctgagtgagcattatagccagctggccgacagcggtctgggagagggcgtaagccgaagtctggtatcccgactgttttccgcctcgtcaagcgcatatcgtctgttgcagtcggcgctacatcccgcttcgccgctgtttcagtttcagttgctgacagagataaaacctgtcggcagccgtaaagggcctgcggaatatgttgtcagtgaagcactctggcattttttgtgcggtaacgacctgccaacaaccacgcgttatccctgggttcgccgggcgatcgccgatgataacgcaacctgtcccgcttcccttggcgaaaacctgttccgtctgtgtttcagcaccggagataaggccccgcccgtggtggtactggaggggcgcgagctggatgggcgggagtgggcgctggcggctatgtgtgccaatgatcagcggcctctactgtgcgtgaacacagacctgctggccagcctgccggagcctcagcagcaacagacgatgagcgaaataatccgcgacgctctactggaaaaggccgctctgctgtttgaaaagcagagtctgtctccgggtgagaaacccggctgggtgcggacgctcgaacggctgttaccgctggtccggctgccattatttatgctggccgatgccgcatccgttgcgccagccttcgcgggtttgagctgtattcatctggtgatgcctcagcccacggctgacgaaaaagcggcgttgttgcagcgtgcatggccgcacaggcccactgccggagagaagcggtcgctacgaagtctggtccagcgctacgccttcgatccggcggatataccccagataatgcaggaagccgatgactaccgtcatctgagaaatgtggacgcgctcttactccctgaggatctccgccagacgctttcccggcgctcgcgtaaaaacttcggcaagctggcccggcgcattacccccgttcgtacctttgatgaccttattgtcccgcccgtattacaaaaacagctggcggaaatcctggcggtgattcgcctgcgggagagtgtgaccgaaaagcactttagccacaaaaccggcggaaataccgggatcagcgccctgttttacggtgattccggcaccggtaaaaccctggcggcggaggtgctggccgggcagcttgaggtcgacctgatcaaggtagacctctccaccgtggtcaataaatacgtgggcgaaacggaaaaaaacctcgcgcgcattttcgatcttgccgaggccgacagcggggtgctgtttttcgatgaagccgacgccctgtttggcaagcgcagtgaaaccaaagatgcccacgacaggcacgctaatattgaagtctcctatcttctgcagcggctggagagttatccggggctggtgatccttgcgaccaataaccgtaaccatcttgacagtgcctttaaccggcgtttcacctttattacgcgtttcacttatccggatgcagagctgcgggcaagaatgtggcaagcagtctggccgaagacgctaaagctggctgaagatatcgacttttccgcgctgggcgccagcactgagctgaccggggctaacatccgcaatgttgcattactggcagccgtatttgctgccgaagagaaaaaagatcgggtttctctggcgcacgttgaacgggcaatcaaacgcgaactcggtaagctcggacgcatttcgctctga

SEQ ID NO: 161162 - DNA, 1359 bp, Enterobacter cloacae
atgagtcagtctgttattaatcatctggttctgcagataaaaacccaatatcgtccagcgggtgaaaagatgctccattccccgctgctaaggcccgataatttaaaacgggtaattaatcaggtaatagcggagctcaaccccgcaggcaatattcacaccagcactctgacgctggatttaggggttattccgctggcgcagtttgcaagggagtttaatctgcggctggcgcaggcgttagcggacaatctgcgtcggctgcctgtggaatcccggccccacacgctcgctctcaccgctgacccggccgcgctgctggcgcagcttcggccggaatcagcgtcgctttatccgctggcgattctgtgcctgcagcccgctctgctacagcagctcttgcttcaccaccgtccggaacggttattgctgctgctaaaaacgctgttaaacccgaaggggcttttaccgcagtatgcctatcgccaggtcacaggtagccgtctggcgatggccgcgttcggttttctgcttcatgaccgggaggggattaactggctcagcaataacgcccccccggtcagccagctggcgacctggcaggacgccattgccaccggcgaaattgttgttgaacaggtgctggatctgttgataagccagccccacaatccggtggtgacatcccgctggctgcggccgctctggcagcgaaaagcggtacgcacgcttattcacaggcaggccgggacagaaaccgtgcgggagatcgacacccggctcggtcagaacccacggcaggaacgggatagtggtaacgggagtcaacctgcggtcaggccgacattgccagtcaacaatgccggcctgctcctgctgtggccgctcctgcctcagctgctggcccatatggaactgtgcctggaggggcaatttctcagtgatgccgctcgctggcaggcggtccagagcctgcactatctggcatggggaagggattatcccgcagctgaaagctttccgctcaatcagctgctgtgcgggatagcgcccgatatcgctatgccggagagcgcatcgttaaatgaacagcagcaacagcagatagaccactggctgaccgccgttggccagcaactgccggggtggcaagcgtttagcccggccgatatgcgccagctgtttttacagcgccccggggaggtggttaccgatattcagccgccgcagatagcggttaaccccgaggcattcgattacctgcttcgcgactggccctggccgctaaccctggtgtcgttgccctggcttgaacagccgttgacccttatctggcctctgcctcatctgacaggataa

SEQ ID NO: 161163 - DNA, 993 bp, Enterobacter cloacae
atgactgacagcaaagataaaaaaaccaccgcaggcaaggcgaaaaccgcttcaggtagcaaggcgaaagccaccgccacagaggcaacccagtccgtagcaaaaagtaccctaacgaccagcaccctgcctactgcggctgacttaaaagatcgctttaaggcggggagtatcccattacaaacggattttgctgatttgattgatatggccaatgtgggggtgcaggcggtcgggcaggctgcaggacaaaatgggccgggagcaggcatgagcatcaatgacgccgggctgctggagcttaatattggcgcttttaattttaaagatgacaagataggttgcagcccgataaaagcgaataccaatgacaataccattgtcgttgatcttgatgtcggcactcaggatacagggagtggcctgggtgtcaaagcgggtaatggcattaaggttgatgctgacggcgtaagcgttgatatggccgtggtgatacccagagggattattaccatgtttagcggcagcaaggtgcctgacggctgggcgctgtgcaacggggaaaatggtacgccggatttacgcgacagatttgtgctgagttcttcgttggagaatagtaacaaattcaataaaacggtgttttctggcgatattactgagaaggtcgtttctctgaacagtagtgcagaaaagccggggtcgggagtcactgttgaaggacatactctgacaatcagtgaattaccatcccacgggcatgatattgtaaacagctcacggaagtatcttcaggaaggcgctaaagtttctggtggttcagacgatcactggcctccgctttttgacgttgggaattcgaagattgtgacgaccgaaatcggtggtaataaggcgcacacacataacgcttatctggataatacaacgcatgcgcatcaaattgatgtaagtgttccttactacaccctggcttttattatgaagtcataa

SEQ ID NO: 161164 - DNA, 2922 bp, Enterobacter cloacae
atgtctaaagagaacgcgctatttcagcaggtaaaagacaacattgcgtttgacacgctctggccgcaggtgacagagaccatcacaacctatagcggcaagttgtggaccgatacgggcgatcacgatcccggcgtgaccctattgcaggccgtgacctggaacacctccgacctgagttaccgggcatcgctctcagttaacgacctgttaacgcaacagggggaacccaatctgtttccgatagactttggtccgcagaacgtattgacctgtaatgcggtaacggctgaggactatcgccgtttgctgcggagcctcactttttctgacttagaaaactctacctccggtgaccctttcatcttcactgaagcgcgaatagtgcgtgagcctgaagataatcgttttcagtggtggtatgacacggaaaaacggcactacgtctttagtgagccacagggcagtgatgataataaaaaacaaatgtttttacgtggtaacaactggttataccttgtgccaagcttttctctagaaaactttcttagacaattaccagactttaggtctatctatgaggagtgcctcaaaaactttctccgcgattatcgtaatctgggcgaggacttttcccgtattatctggttgagtccgatagctttttatcctcagttaaccattgaacttgccgaagaagttaacgacgttagcctgatagtggtggagatttatgagacgcttaaggcgttgatcctgccggaggtgaagcgtcataccactgcccaactgcaaaaagccggatacagtaatgaagctatttttgaaggcccttatttacacaatggctggcagacggactctgcgccgatcattaccgacagcggtataaccattaaccttagtcagctgtttaaccggctgctggcgattaacggcgtggccagtatcagccagtttagtgccggtacgctgcctgcacacatcacggcggtcagcgacgacgcctggtcatggcaggtggccagcggctactacccgctgctgtggggctttgggccggcgacaatactggcttccgacagcagcccgctaaccctgatcgccaaaggggggatttatcaacgccctgacgtaaataagatccttgcatatctgcaggcgcctgagcatattaaaaccgaaccggtcgtgctgcccgccggcaagctgcgcgatctggcggcctatacgccagtgggcgatcgcctgccggagtgctatcagctccagcagcccgtggcggtgattaatgacactatccgtgagctgcatcagtttctgctgccggtcgatcaacagctggcggacggctgcgcggaacttgccacgctgccgcagctgctggcgtttacggaccgggataagctgaatgcgattcgcggcacccgctggccctatgcggcggattcggtcagccagcaggtccaccagcaatatgcgcaggcgctgaccggcttccagcagcaggatacggccttttttgccgcagacggcagcccagatatggccaatttttcccgcgagctggattttattcagtatctgctgggctactttggtgcccaccgcgccgccagacccctgacgctaaatctgacagattttctcgccacccagcgtgcctttctggctcagcagccgaccctcggctatgaccgcatcaatatccgtatcgaccaggtttccgccctgcaaaagcgtatcgcagcccgtattggtctggatagcgaatgttttgccgataatccggatctcggcaagctgccgttctatgtcattgagcatcgccagctgctgccgctaatgcctgataaggcctatagcgaagagcagaccccaacggattttatctcttacaccaggccgaaggtgaccatcaatcagaagggcagcgccggaaaaattgttcagggtcagctgattgatctgattgcctatgaagggaacagtaaactgtatgttaagcagcagctggtcatctccaccgatggtgacagctttacgctcgatacggcaaatagtctgcagctgcaaaacgatctggaccgtcttcaggctgcgtggaacggctcaaacaagggcaatctacgctggcagaacagcaatatctggctgcaggatatggattaccggctgaactatgctgatacccagccgggcgacagcaatcagcggttgctgtccagtaacgatcagagtccctatccagcgatggttgccgttgacgacaaaatcattattcgccccgctggcctgataccgacgatacctgacgggcaggcaaccgctaaagcgtcgtccgtgcgggcagacgactggcagctggaggctactattgtcgcgctcaatgaggtcgacgggaccttaacagtcgaaaaatcggcggacagtaaacatgattttcccaaagcggaggaggcctggcgctaccagtggaatttcagtcaggcggcctatgccactgcggaccgcttctcctttgtggtcagcattgtgcataaccgcagcatgattgaagcaaacaatatcgacccccaaaggctaatcgactggatgcagcgcgaggtgatgacggagttcccggcccatgtctcggttatcaacctctggttgagcgactcggcgtttaaaaactttgccgccacctataagcgctggcagaacaacggcactccgctgggggatgacgcctttgccattatgcagatgctgaccctgggtcatctgccggtaacccagctgggtatcggcctgatgcgtatcgccaccgacgagcagaaagcggcggtggtgggcgaagaaggcacagggtgggataccagcgtcatactcgatcaggaactgttttatgtacctcatgaccttccttccaccttataa

SEQ ID NO: 161165 - DNA, 1788 bp, Enterobacter cloacae
atgctggagctcgataaactgaaaaacatactggacgctgaagtcgccacgggtgacttcatgctggacccgcgtaccccgcagcagcggctggaaaacatcgccggctatagcgacctgatcccctttgccagtaaccagatagcaaactgggacagcttctggctgaaggatacaacggcgcaggcgctggccgatatttataagagcggttcatttgacgcgcaaacactgccggtacaacagacctttttactggcgttgctgcagctgctggaaacgccggggctgctgctgaatacgctccccgcccgtcatcgcctgctctactatcgcgacctgctgggtttcagccagcgcagcgcactgccggatagcgtggcggtcagctttagcctgcagagcaatactgaggattacctgttaccggccgggacggcgctggatggcgggcaggacagcgcgggcaatacgctgacctatctgaccgatgagcttctgctgattactccccagcagctgagcaggttgtgctggacccggcacagtgactacgaagtctcaacggtcctggatgtcgaaaacggtatcactcttcccgatgacggcatccgcctgttaagtcaaacgggccatgaagaaaaatcagcagtgacggggcagtcgatctatctcggcttcagcgatgttaagcccggtgaaaccctgtcgctctactggtccctggacggctcctcgcccctcgaccttacgtggtcgtattacactctggataaaaaatgggtgccgctggcggcaggggtgcaggacagtaccggcgggctttccggcagcggcctctggcgagcggtattgccggatgacagtgcccccggcactgacgcagaagcagacatttttcctgatacatattactggttaagagcagggattgaactgagtgacgacgtgccgaaactcaggggcgttttctccggcgcggtgaccgccacccttgataccacgggtgatatcgacgacagccacttcgcccaggtcttacctgcggacaccatcacccagctgacgacgccgcagccggaaatcagcagcgtcagccagccgcttccttcaagcggcggccgggcaccggagacggaagcagcaatgattgcccgtgccgccacccgtatttcacaccgccagcgggccattagctggggcaatatgcgcagtatgctgatggataactatccccagttgtttgatgttcgctttcccgatgcggaaacgctcaatcatatcccggccccagtcacccagaccctgctggcgatccccgacagccgctaccgtgacaatgacgatgcgctacgtccgacattaagcgccgtgcgcctgagcgccatggcggcctggctaaagcagtacgccagcctgtgggttgagcctgtggtggtgaaccccatctatatcgatgtcaccgcagcttataaggtggtgtttatcgacggtatcagcccggactatggctatagccagctgaatagctggctgcaacagcgttatatgccctggggggaagaccagcagcaggcggtgacccctggcaatcagcttgattattaccagctgctggcaacgatacagcagtcgccgatggtacagcgtgtgctgtcactcacccttaagcgcccggaaaaagatgctaaagaacagcagcagaccatcagcgccggggaaaatgaagtcctgattttagttccggtgccgagagccaataacacgagcggagagcattatgtctaa

SEQ ID NO: 161166 - DNA, 417 bp, Enterobacter cloacae
atgagtaactctattattgtcgacggcgaccagcttaaatttgccgcacagtttggtattaacacggtcactccgacggccacgccggttattcacggaagcggggaagccacgattgaagataaaaaaatctgtatcctcggtgatgaagcaaaagtttctgttccggcaagctaccaaaatggagattaccctactccaggggctggcaggatcaccatcattaaactggcaaacgatcagcaagccccgttcgccacggccgaaaccccggtgattctggtgggaagccagtttaccgcatcctttacgcctgaggctccggcatcaggtgataaaggaccagacccggtgacggccccctcgacgggttccggcgcctttattaacagccagtcatttgttactgcgggataa

SEQ ID NO: 161167 - DNA, 423 bp, Enterobacter cloacae
atgaatgacgataccctaacgaccgtgctcgggcgctgttgggcctttccgccacagttctctcccggcagcggagtgaacatggccgagggcactgaggcagtgctacaaagtttacaggtattattcctgacgcagaccaatgagcgaataatgcgtgaatcctggggggccgggatgaatgattttctctttgaaaatatctccgatgagctccaggcaagtattaagacacgtattgaagaaatcattcttcgctatgaacctcgggtgatcctgacagaagtgattgtcatgccccgcaccaacgatctcagccgcctgcagattaccctgacggtctcgctttacggcgttgatattaccgggacgatcgaagggaccctgaatcttaatgaaggtcagatgctgaggttaatatga

SEQ ID NO: 161168 - DNA, 1497 bp, Enterobacter cloacae
atgaatgatatcaccctgaaaattgccggaaagatctgtccgctgggcattagtcggttgcatttacagcagcaagttaatgagatcccgacggcccagctggaactacagctccccaccgacagcaacgggagcagcgacagagaggcgcaaaatgccgccgccagcctggctaccggcgcagacctgtccattgcgctggataacaagacgctgttcagcggttatctgacgtcgaaaagaatcatcctgcacggcaaaatctggtcaatccgcctggaagcacggcatctgttgcagaagctggcattttttcccgcctgtcgggtatttcgcgagcaggatgacgcgaccatcctcagtatgctgttccagcaggccggcgttaaaatgacgcgcaaaacgaccactcagctggcaacccgccacgatcagatggtgcagttcagggccagtgactggcagtttattcgcagccggttatttgccaccaactgctggctggtgccggatgcggccagtaacggcgtgaccgttgccccgctggcagagccgctcgccgtatcgcacaagcttgagaattacgcccagcagagtgggtatagcctgtatgacatcgacctgacctttgataaccgctttacgccggacagcctctccttacagggctgggacatcacccgccagcagctgagcgtggcgcaaaaaagcagcgccaacgactttcgtccgtggaaaaccagtcaacatcccacgtcgtcgcatccacggagttatcagctggcgttcagtcggataccggaaagcgcgcccgccacgcttgcccgctcgtggattaatcaccagcagctgaccggggttcagggacgcattgtgctggaaggtacccgggacttccagccggcggaaagtatttccctcagtcagtttggtgccgggctggacggaaccgccatcctgaccggcgtcaaccagcggtttgataccgttgagggctggcgcagcgagttgctgataggcggaatggagcgctttcttccgcaaagccttcctccggttcagtcgttgcatattgcgacggtcgccagttttactgccgacccgcaagggctggagcggatcccgatctccctgccggcgcttaacctgcccggtgagtatatttttgcacgcctcggaaaaccctgggccagcaaagccagcggattctgtttctatcccgagcctggtgatgaagtgattgtggggtttattgaaagcgatccgcgttatccggtgattatcgattcgctgcataatcctaaaaataccgcgccgattgcgccgggcaaggaaaataatattaaagggctggtgataaatagtggtgatgtgacggagcagctcctgtttaacaccggggataatactttcacgattaccgcagatacgctttcgctcacgggaaaaaataaggtggagattaccggtaccagcatcaatatgaagaaaaaataa

SEQ ID NO: 161169 - DNA, 693 bp, Enterobacter cloacae
atgagcagcctgtttgcacgaggtctgtctaagctgaccattagcgcctggaaagacagggaaggtaaaattccggtgggtaaaatgagcgtgatgtacaacccggaaaacatccagctcgattataaaacgcaataccggacggaagacaccatcaataaagcggcccgcagcaataaatatgtgctctcggagccagccggcctgacccttaatttgctgtttgacagccagatgccgggcaacagtactccgctggagacccagctggcgatgttaaaatccctgtgcgcggtgaacgccaatagcgaattcccctgctttttacgcattacctggggaaaaatgcgctgggaaaataagggctggtttgccggaagggccagcgatctttccgtcaactataccctgttcgatcgtaatgctaagccgatgcgcgcgacggtgcgtctgagcctggtggcggatgaaagctttgtgattcaggaaaatgagagaaacagcaaggcgttatccacagtgttgatcgacgtaccggacatggcttcccttcctcagctggccatcggtgcaagcaccacgcttgtcaggcgtgtggattacctctcgctggcctgggataacgatctggatactctggatgatttccagcccggcagcgtactgcaggcgataaaagggacgggactatga

SEQ ID NO: 161170 - DNA, 168 bp, Enterobacter cloacae
atgaccattgagatccgcgagctgatcgtcagggtggaagtaacggactcttcgctgcctgttccagtcttacccgctacagataattcgccatggcatgaacaacgcctgctggaacaactgaaacgtgaagtgctggagtatctgcaggaaaggggggcactatga

SEQ ID NO: 161171 - DNA, 453 bp, Enterobacter cloacae
atgactgacctaccggttgttgcccatcgttttattgttaattttatgtttgacatgatcccggctccgctggatatcgcctttcagagagtatccggcttgtcgcgcgagctggaggtgagtcaggtccgggaagggggcgaaaatgcccgtaacctctggctggcagagaaagtcaattacggcagtttactgcttgagcgcggcgtcatgaatgcgtcgatattaaccacccagtttgatcgggtgctgcggcgggaaagcacccagtgggccaatgtggtgattctgctgctgaacgagaacgatctcccggtcaccacctggactctgagtcatgcgctgccggtacgctggcaggtcggcgatctggatgccagcagcaacaccgtattgatcaactcacttgaactgcgctatcaggatatgcgcctgataggggggaaattatga

SEQ ID NO: 161172 - DNA, 1233 bp, Enterobacter cloacae
atggcaatggttaatccccgggtttctcttagcgaaaccctgcttagctcctctgcggctaaagatccggtcaccacgccgctgtttattgcttataccctggttccggcggagagcgtaaacaggatgcagccggtcagcgtggcctctttaactcaggcggagtccctgtttggcaacagcggaaccctggcgtattcgctgcgccacttttttgaaaacggtggcctgggctgttatgtactgtcgctggggatgggtgttcaggacagcttcgtccgggtgaaggcgctggtaacggcgttacagagtcaggaagtgcaggaggccgtaacggcggaactctatagcggcctgctgctggcaccggaactcagtgaattaaatgatgtgacaaagggttcggcttcagagatttccagcctctggtatcagggttggacggcgctgctgcaacttagcagcacggcagcacagcgttttgccttactggaactgcccgacgatccggccagggccactgcactttgccaggcgtcattctctgccgatctctgtcagaacggtgccgcatggtggccgcgattagaaactcgctatctggtcagtagcgcgaaggacacggagtatcgcctgctgtcaccgctcccggcggttgctgcggtaatccaaaaaagcgcgggaataaatggggtctggaaggccccggccaatatcccgctgataaaaacgctgcggccggtggccaatatcctgcagtcgcaggtgctgctcggcactaaggggatgtacgctaatccgatccgcagttttaccggaaaaggggttcgcatgtggggctgtcgtaccttactgaatgatgaggcctctccctggcgctatatccagacccgcctgttggccaacagcgtggaaaggcagttaagcaaactggcgcgggtgtttttattcgaacccaataatgcccggacctggatgaagctgaaggggcaggcctggacatggctacgccagcagtggctgggcggggcattttttggcaccaccgaagaagaggcctttacgctgagtatcgggcttaacgaatccatgaccgctgacgatatccgcgccggaaagatgatcctgcgggttcagctcgcattgatggctccggctgagtttatcgatatcagtctgacgctggatatgcgtggaagttcagcattagcggttagcgggagcgcatcatga

SEQ ID NO: 161173 - DNA, 1101 bp, Enterobacter cloacae
atgtctaaagccactaccgttccgggtatttatattgaagaagatgcctctccggcgatttccgtcagccagggggctaccgccgttccgctatttatcgcgaagttcacgccgctggatgagaaaaataatggcgtgatgctgcgcatcagcagctggctggattttagccagaaattttccaccaccgacgtaggcgccgctacggcgctgcaactctatttccagaacggcggcggagcctgctatgtctttgcgctggctgacggtacgaaaggggataccctgcccgaactggccgaccagacgggggagattacgctgtttgtggtacctgaaagcgaggccgtttaccgcaacgcggtctatagcacgctgctggcctcgctggaaaaaaataagggctattttctgctggccgacagtagcgatggcaaggtgccagacggtctgggcagctccgcgcatatcgccgtttattatcccgcactttcggtgatgacctcacagaaacaggaggacggcagcgccctcgtcgttcaggtcccggcttccgcattgatggctggcgtgtactgcaaaaccgacagccaacgcggtgtctggaaggcaccggctaacgtagtgcttaacggcgtcagcgatgtcagcgtccgggtatcggatgatgaccagggcacgatgaatacagcgggtgtcaacgtgatccgctatttcagcgaccgtggaattgttgtctggggagcgcggacggccctgcagaatgatgataactggcgctatatcccggtgcgtcgcctgtttgacgcagcggaacgggatattaaaaaggcgctgcgtccgatggtctttgagcccaataatcagctcacctggaagcgggtgcaggcggctatcgatcactacctctaccgcctgtggcagcagggtggtctggcggggaataaggccgaagaagcttattttgtccgcatcgggaaagatatcaccatgagtaccgatgatattaatcagggcaaaatgattgtccaggtcgggatggccgccgtacgaccagccgagtttattatcctgcagtttacccaggatatggcccagtaa

SEQ ID NO: 161174 - DNA, 1071 bp, Enterobacter cloacae
atgacggtaaacaccagctatcccggtatctatttaagcgaagaggcgtcgctgaatttttcggtcaccagtagtgctacagcagttccggctttttctttacgctatgttagcggtatgcatcatcccgaagaaaatattaacgcgttttattcatggccggagtttctggcaagcctgagtggtgatgattcctgttgggaatattatcaaagtgtacgcttgtggtttatgtgcggaggcggcaaatgctatctggtacataaatctgctatcgaggaagccgttcgcaagtatgatgatattaccatggttgttgccagcggtactgaaaatgacattgtcgaccagtttaatgaactgattagcagtggctatcgtatttttggtttatttgatgggccaaatgaaaaaattgatgggggtacagtccctgatgacatattaaagaattatcctgcgaccccttatggggcaatttactatccatggtgtcaatctgcagagggtaagagcataccgcccagcgccgttgccgctgccgctattgccctgaccgatagcacccgcggcccctggaaagccccggcgaatatggtgattaacggtatcacgccaaattacccggttactgacgatctgcagggccgctttaaccagggtaaagcgctcaatatgatccgcacatttccggacgttggtaccgtggtctggggggcccgtactcttgaggacagcgataactggcgctatatccctgtgcgtcggctgttcagtatggtggagcgggatattcagaaagccctcaataaactggtctttgaacccaacagccagccgacctggcaacgggtaaaggcggcggtcgacaattatctttaccgcctgtggcagcagggcggtctgctcgggaataaagccgatgaagcgtattttgtccgcatcgggaaaggtatcacaatgaccacggatgatattaatcagggaaaaatgattgtccaggttggaatggccgccgcacgaccggccgaatttattatcctgcagttcactcagaatattgcccaataa

SEQ ID NO: 161175 - DNA, 450 bp, Enterobacter cloacae
atggccgtaactgcagatgaaattgccgtacagtatcctatccccacctaccgttttattgtcacgctcggcgatgagcaggtgccgtttaccagcgcgtcgggtctggatattacttatgacactattgaataccgcgacggcaccggcaactggtataaaatgcccggccagcgtcaggcgattaatatcaccctgagcaaaggcgtgttccccggtgaaaccctgctgtatagctggatcaattctatttcactgaaccaggtggaaaagaaagatattatgattagcctgactaacgatgccggtaccgaagtgctgatgagctggaatattgccaatgccttcccgacttccctgacctcgccctcttttgatgccaccagcaatgaagttgccgttcagcaggtgacgctaatggccgatcgggtcactatccaggcggcctga

SEQ ID NO: 161176 - DNA, 450 bp, Enterobacter cloacae
atggccgcgaccaccgatgaaatttcagtacagtatcctattcctacctaccgctttattgttaccctgggggacgagcaggttccctttaccagcgcgtcgggtctggatattacttatgacactattgaataccgcgacggcaccggcaactggtataaaatgcccggccagcgtcaggcgattaatatcaccctgagcaaaggcgtgttccccggtgaaaccctgctgtatagctggatcaattctatttcgctgaaccaggtggaaaagaaagatattatgattagcctgaccaacgattccggtaccgaagtgctgatgagctggaatatcgccaatgccttcccgacatccctgacctcgccctcttttgatgccaccagcaatgaagttgccgtccagcaggtgacgctaatggccgatcgggtcactatccaggcggcctga

SEQ ID NO: 161177 - DNA, 429 bp, Enterobacter cloacae
atgaaaaccggtgaaaaaggcctggcgctgattaagcattttgaggggctgcgcctgcgggcgtatcggtgctcggcagacgtctggaccatcggctacggccacacggccggcgtcagacccggggatgtgataaccccggagcaggccgatgcgtttctgcgtgaggatgtggcggatgctgaacgcgccgtgggccgttttgtccgcgttccgctcacgcagtgtcagttcgatgcgcttgtttcctttacgtttaatctcggttccggaaacctgcgcacctccacgctgctgagattactgaacgccggcgattaccccggggcggcaggccagctgctgcgctgggtaaacgccggcggaaaacgactccccggactggtacggcgaagggaagcagaaaacgcactttttctggaaagataa

SEQ ID NO: 161178 - DNA, 291 bp, Enterobacter cloacae
atgaacgactatcttcagccatttctgctcaacgtgaacgccgttgtctgcgcggtgaccgccgggaggctcttttcctggcgtctttcccgtcgtccggccagcttcatgcaggggctggttatctactttctgattgtgtcgtgtgccaccgtcaccatccggaccctgaccggggaatactactacgccgactggtccgaggccgtgattaacgccgcgctgtgcctgttctgtcttctgaaagccggcaacctttttgaacaggagccttcccatgaaaaccggtga

SEQ ID NO: 161179 - DNA, 309 bp, Enterobacter cloacae
atgctgattaacctctttggcgagctttacggtccggtcgtcattgccgccttttccggcgccatgctgtttatccttctccagcgcaccttcaggggactgaataaactgctggtctttctggtgtcgttcttcatggggataaccggggcggacactgccgtatccctggcacagcgctatcttccggcagacatccatatggacagggcggtgggggcgtttctctgcagtgcccttatcgtttcggtggccatgacggtgatatcccgggtggagcatcaccggcataccggccaccaggcataa

SEQ ID NO: 161180 - DNA, 309 bp, Enterobacter cloacae
atgagtcagtctccttatgatgatgagctcagagccatccgttatattcagatccgtggtcaggatatcgcgaacgctcacgagacaattaacagtgatatagagagccttaaggcacagttgaccgggctaatcagcggcactgaacttgatgaagcggagcatctggcgcttaaagaacatcatctgcgagaaatgaccccctcagatactgccatgcattctattgatctcaagaccatatatagcgaggctaaccagcgtgtatgcggtgatattggactggccacaatactcatccacggatga

SEQ ID NO: 161181 - DNA, 273 bp, Enterobacter cloacae
atggcaattcacctccaaccctgtcagttcaatcatctagcgatttttagcacagtcagttttcgaaggggcaccggcgcgatagttatttcgggtcagcccgacatggcgtctgtccttactatcagcaacagcattaaagctgacaaccgtgaactggaaagtgccccaatagtaagtcatgatttcttcatcactttaatggtgcactttttcacctctcacacagcaagttatgaatacgaggcttgtaatggacactaccgaaactga

SEQ ID NO: 161182 - DNA, 315 bp, Enterobacter cloacae
ttgcttcattcgcacgaagaggtgcagtgcatcagcatccgtaaccgtctgaatgattttatgcaggcgcacggcgcggagctggccgccgcccttgccccggagctgataaattattccgggcagcattccgccattcagcgctgcgccacgcagcactcgatcgactatctgcgtgaggcgctgcaggtctggctggtcaccggtgaaaaaattaattattcggcgcaggataatgacattttaacggctatcggattcaggctagacgcggcttcgtgggatgatcgtcgtgaaaaattcacacccgcatag

SEQ ID NO: 161183 - DNA, 1428 bp, Enterobacter cloacae
atgtctcagagctttaatgctttaccatcaattctagaaaaatttgaagttttagggatgaattcatataaaaacatttctataagctttgaaaataatgtcaaaataatttctgccgaaaatggtactggtaaaaccactattttaacatttctatattctctattaacagggaaggttagtaagttaattgagtatgattttgaatcaattaatatcaaatttcgcaattctgaggagatgtcgatctcaaaaaaagagcttttccctaattttgaaagtgattggtatgatagaattagctctacttctatagcattcaaacgaataaaatatcacggggtaacaccaaatgagttatatgagttagcttttttggctgcatctggatatggagaagatttctttaaatgtcgagggtataaaaaactttatgatgattctcccttggataatgaagatattagagctttatgcgaagacctactccctcagttgattcaaagtgagaagtatgagggtattgagagcaaaataaaagaatccatgggggatttgaaagttctctatcttcccacattcaggcgcattgaaagtgaaattccagagtttgaagtaaggaaaacaaatagaaatggtgtgaggaggatgaattccaaagaaagtgattgggataatggacttatgttctttggcctgaatgatgttgagtcacgtcttaagtatatagaaaatgatatacgtcgaggaacctttgaatcatattcaaaaataagtgctagaacgttaaagcaattattgactggtggtagttcatcaagtgaaattgaagttgaatccattgatcttgttacactcaacgttgtcttgtcaagattagggatggcagatgaaattactcaagaacgaattaagactttaacagaatcaggggagattaaggatgctaaatatgaatctttgcgctcgtttttgggacagttggtcgaaatatatcaagagaaaatggaatatgagcaagcactagagtcatttgttcaagttgtcgactcttattggaatgttcaaaatgcggaaaaaagattttcatatgataaaagcagcattacggctcgcgtaataaatcaattcactaagaatcctttgccattggggtctctttcttctggtgaaaaacaaattgtaagtgtattcgcacgcctctatttggatatgggaaagaaatatttggttttgattgatgagccagaattgtctttgtccattgattggcagcaaaaatttcttcctgatattctgaaagctccaagttgtgagcaattgatcgcaataacacattcaccatttacttttgagaatgagttagatagatatgctggtttcatgcgtgtatcttataataaaccttctgagggacaaaatgactga

SEQ ID NO: 161184 - DNA, 255 bp, Enterobacter cloacae
atgttgttaatgctgcccgcgacgctctccagccctaccgttttgccgctgatggtggatccgatgttattgatatcccccagcgcgctcaggttcagcccgccgcctgcgctcagcagcccggcgttgaggttgctcaggctgttgctgctgtcaattgagagcccattctgcgccgtaattgtactgccgctgttaatgacgttcccgcccgccagctggacgttattgccgctaatcacgctgccgctgtga

SEQ ID NO: 161185 - DNA, 249 bp, Enterobacter cloacae
atgaatacggtcggcaaagagctgcatattattcgcggcataaatcagtgcggtattgagcaaggtgcccacagcattcatcgtcaggctgccagccgtaccggtaaagccatttacggttatgtcactcaggctgttaaataccacgtcgccgcctgccgagaggctaccggctgcattgagcacaatacgttgcgcgctgaacgtgctatcacccttacctgcagtgaactggccgttgttggttaa

SEQ ID NO: 161186 - DNA, 390 bp, Enterobacter cloacae
atggttcgcgaggctgcccgcgctgacggcgagagattgcccggcggttgtgctgcctttcagttggctgtggccagacgtggtaagcgtgatgttcccgctggcatttgttgtgctgcggctctcctgcgtcagcgtctgcgcgttgagggcaatctcggaagcactgagatttccctgctgcaccagctcgcctcccttgaccaacagctgctgacccgccacaacagaaccgttaagcgccgcgtttttctcagcatttacggcaagatgacgacccgcgcttgcctgggcatctgcactctggatcagggtggtcgcggcaagcgtagcgtcatttgctgccgtgaacgcaccgccgttttgcgtcagcgtgccgcgggttgttaa

SEQ ID NO: 161187 - DNA, 528 bp, Enterobacter cloacae
ttgccacccgctttatggtccccgcgtaacgttacgtccgccgcgctgaccgtggtgctaccgctggcaagggtgtttttcagcaccacttttcccgcgctgctgagcgcaatatccccctgtcgcgcgttaaggttgcccaggtttacgcctacccccgtttcactggagaccagacggatccggttagcgtacatgccgcccatcgcaccggtgtctaccgcgaccttcggggctgtaccttcaccttttaacgcactgacgctgccatccgccgctacgcggttcgcccctgcaacgacacgtaaatctttcgcatgcagttgcgcgttgatctccgtcgcacgggagatgatcgacaccgcatcgctctgcgagccattgaggcccgcgccctcgatggtgaccgccccctgggttacatcaagagattgcagcttaccgctggcatcaagcaccggtttacccgtggtgagggtcacattcggcgtgttgataaatccgcagccgttacaggtgataccgtag

SEQ ID NO: 161188 - DNA, 621 bp, Enterobacter cloacae
atgtccaagcacgcatttaaaaatcataaaaacattatcgatgcgctacagcatataattacaccagcagaaataaataaaatatcgaaaggtaaaagaatatatgaattaaatacacaaagagagaaaaaagtgttttttgtcatagaaggtgattatttaattcgttcaaaggtaaatgataaaatcattgagattgtgtcatctccatttgtaattggtgtcacccctactctcgaacctttacaggtttatatcgaggcggttgattatggaaaaattcacagcatggaatatacccaattctggagtattactaaccacaaaaatttaacccaagatgtaatggggattatttccggatatcattctgatttaataactcgtttgctattacatcacaacaacacagaagagcagattaaaatgcttgttcaactatggactgaatacccgagcagggtgaaaagcagattttcattacttttctttatagtgaatagtctttcagtatccaagagcaccgtgtgtagagttttaaagaaaatgaaacaaaatgggtgcattgaaatgaataatggcaaacttatatcttatacaaaccttgatgatgttgcctga

SEQ ID NO: 161189 - DNA, 1770 bp, Enterobacter cloacae
gtgcatagtcaattagatggattaaaacaatataaaagggaaataatgtccattggcaaaataaatcttttttttgtcagcataagcggtatctggttgttgctgctaatgcatctccctttctttaaccgtggcggaagcggttttatccttcctcagaacactttgacatggatggctgtaacctgcctgtgtagtgttgctttatttaggttgagtggccggccacttgtattctcccggacattagtcttgcttctgactggcgccattctgttaactctaccgatactatggtcggagacttctgatttactggcagagtccctgccgcgctatgtgggaatatggagtggagtatttttttatgtctgcctgctgcagatgcggttacccaatagcgtgtgcaggtgcataatgctgcttatcgtgttttctgcatgtgttgagagtggtgtcgtgctacaggagttattttttccgcaaactctggatccactcagaagccagtttattgagcagaatggtagagcagcccttggaacgtttcagcaggttaatgtgaccgcaagctggttagccactggccttgctgcatgtctgagtctggcatatacattctgtttcagacgcagcgtggcagatgactgttcatctgacaggagaattacattttcattctgcggaattttttattccgtaataatttttctgctgacatccacactggtgttgacacagtcccggaccggatggctgggaggtagcctctgttgccttattgtgtttatcttcatgatacgagcctgcctgaaaggcggcgctgtcagccacaacggctggctgattatttctgcaccgcttgcaggtgtattggcaggtctgctactgctgaatgttaatgctgctcaggcactggcgcaacatgcgggttctaattatcaacgcctgctgactcttggcatcacctgggagatgataaaggtccatccgctcagggggtggggtattggcactttctgtctggcgtttcaggaatacctggccggacacgctcaccctaatccgtcacgtgagctgatgacgcatccccacaacgaacttctgtatgtatggtttgaaggtggcatagtggccctggctggattagtgctggcactctttgctattctcagattattattttgtcagagaaatgtgacggggattctgcgctggatggtgcttgttccagtgcttcttcatacccagttggagtttcctctttattactcagcagctcacttcatcgtattgcttttggtaatggctgcacttgagccccctagtctaaactccactgaggacgacatggttgacggcagtgggttggttcgctccgttttttgtgctggagctgtaggggttgcatgtctcgtcctgttatggctgggaagtattatgcacctagagtataccctgagccgttttgaagataatttactggcaaggccggataatattacgcatatatatattcctcccctgagcggcctgcggtacaggcatgatatgaacacccttcatctgattgactattatgacagccatcagtccggcgagcttgaccgctatctaactgccaatacccgatggcttaaacaccatccggagccggatgactatgactatcaggtccgggtgctacgtttcagggaacgtgagggggaagctgaaatctatcggcaacaagcagccttgctttttccttgggatgtcaggttccggtaa

SEQ ID NO: 161190 - DNA, 477 bp, Enterobacter cloacae
atggctgggaagaaaccatttttctatatcgtgtttattttttttcaattaataccaatcgttaccgcaagggctgatagtggaattgttaatgttagtgtcgatgttatagcggatccatgccatataaatgtttcagatgttgattttggagatgtaaacatagatgatattgacggggtttctttttcaaaagaaattccatatagtgttgattgcggtggtgaagagacaaagcttaatatgagattgacggctacagttgcaagtgttggtacaaatgtagtttccacaaatattgataactttggcatcgccattttccaaaataaatcaccactcactatttctgagccactggcaatcgaagtgtcttctttgcctgttttgactgcggtaccagtgaaaaaaaaaggtgcagatgtttctgcaggtggtttctctgcatcaatcaccttaactctagaatactcttga

SEQ ID NO: 161191 - DNA, 867 bp, Enterobacter cloacae
atgcggcagctacgatggaggttaattatgaatagtataaaaaaagcacttgcccatgtcgttctgttaatttctgtattgatgtctaatcaagtttacgctttggttatagatactgtatggagagatgatactcatctcgcaagtacgatttatcgtcttgatctaaattcgacagagccagttccatgtagtggggatacagggtgtcatgttggtgttggttttattcttaaatcagagccacaagccggggttacggtagataattctttattcgttcatgggagtactgtcggagaggtggagcaggatttcttaaaacagatcgggtcattgccttgggcaacgacagaaacctttgtagtgcgggacaatcataaaaacccaagcgattattgtgcaacattggtacatattgttggtggtgagtggtctgggaactacagacagttaggttcatcacaatgtacagatctaccacctaaaaatgttacctgttcgattacaccaaacacaattgatattagtcatgggaccttaacgtcgagtgaagtaaatgggcatgttgcatcaaaagatgcacaaatttcatgtactgaggacacaagtgtcacacttcgctttgaatctgcggattcctctattgcattgataggcaaggaggagagtggtgatgtaaccgaggatgggataacaagctcaataaaaattaatggtaatgatgctaaggattcaacgtttactttaaatgatattgatagcacaggtatggttttaaatattacttccatattgcattcttctggtaaagtaaaacccggggcttacaatggaagcggggtttttatatactcccctaattag

SEQ ID NO: 161192 - DNA, 531 bp, Enterobacter cloacae
atgaaaagaatgctcggggttttcctcatactgatgtttacaatcatgatgcgctccgcgattgcggatgagaatattaaattcagcggtacacttgtagccctgccatgtaccataccggaatcagaccagcacataccggttcattttggaacggtaaacgcgcacgatctttatctgggacaaactatgcccagagttccttttactctgcatcttgatgactgtgatcccactatcgccggaaaggtgagcctgacgttcgtcggtgttgaagaccctgagttgtctggtctgctgggactggacagcagtcagtccggtgctacaggggtggcgattggtctggaaagtgcaggtggagacaaaattcttctgaacaaaagaacgttggcctatgaactcagtcaggggaataatgagcttcggttcagggcatatatcgccggcgagcctaatgcgttaaaacagcgaacgatacagtcgggagaatttaatgcggcagctacgatggaggttaattatgaatag

SEQ ID NO: 161193 - DNA, 513 bp, Enterobacter cloacae
atgaatagaattcatatggtcaccggagctgtgcttgtgctgataggcattagcacgtcactccaggcggggactaatttcataagtggagaaacaccctccgcaacagctaccttaaaaggaaatcttataaaagcaccagactgccatatcaacaatgataaaacgattgaggtgtcttttggtaatgtgggtgttaataaagtggacggcacacaatactccagaaacattgattatattgtgacatgtgatggagacagtgatgagcatctgtacctatccgtgggggggacccgagttatctgggatgatgcggcagtgaaaacctcagttgacaatcttgcaattgaaatacggcagaatggcaaacccattaagttgggtagcaacttaaatattgacctgaacgcgctaccctttctgactgctgtaccagtaaaaaacagtggccagggactgctggcaggagactttactgccggcgcgacgctgattgcgttctaccagtaa

SEQ ID NO: 161194 - DNA, 603 bp, Enterobacter cloacae
atgctgtcagtaaagcgtggggcgagtctgattgcgctggtcagtatggccgtcatgatgctgctgatcgagatgacccgggcagtagcatctaacaccatcgctgacggggataacggaacgctgtatgtcaatggagaactgacacgcggagcctgtaatattgaaacagcctcacgctggcagaccatcagcatgggtgatgtgacttccggtgagctggctttgcccggtaaccgggggcacgccacggcgatccatctgcatctgcgcgactgtacggaaggtgggccggatgaagcaggaaaacaggatggcacggtcgtgagggttgttgaccagcctgaggtccgcatcagcttcatgagtgagctggacgcagataacggggagctgttcgctgtgcagggcgcaaaaggctttggcctgaggctggaggatgcaggctaccatgtagtggcacccgggggtatagcagagcctctggttattgcgtcggggggtgacgaactggtctactggctacagccggaaagaactcgcgcccggctgcaggagggggcatggcacagcgtgattaatatgaggttcagttatgaatag

SEQ ID NO: 161195 - DNA, 762 bp, Enterobacter cloacae
atgaacacctttacccgcaccacgctggcggcctgcctgctgaccggccttgtagtcagccagcaggcatcagctgctctggcgctggaccgtacccgggttatcttccctgggggtgagaaatcagtcaccatcaatattcataatgaaaacccttcgctgccgtacctggcgcagggctgggttgaagacacgaagggcaacaagataacgtccccgctggtcgtggtaccgccacttcagcgcgtggaggccggagctggcagccagctgcagattaagtcgctgcccgtggcggactcgctgccccaggacagagagtcggtgttttactttaacctgcgagaaattccgccccgcagcaaggagccaaacacgttgcagctggccctgcagacgcggattaaattgttctatcgccccaaaggcatccagctgacacacgcgcagatggcctcaccgtggcaggacaagctgaccctgacacgccaaggcgacggctatgtggtgaataaccccaccccgtattatatcagtcttgtttctgcagggtcggcaaacaaagatacgggcaggactaaaaaattcaatccggtcatggttgagccgaagggaagtgtcccgctgggtgtcagcgcttctgcgctgggtgccgcaccggccattgcatacgtgaacgattacggcggtacccgggtgctgacattcagttgcagcggcagctcctgccacgtcgttggcgatgataactttagaaattga

SEQ ID NO: 161196 - DNA, 2475 bp, Enterobacter cloacae
atgaagatccgctatctgacttactgtctgctgttgtcaatgacctccgggtatgcgctggctgtggacaccatcgagtttaatacagatgtgctggacgttaaggaccagaaaaatattgacctgaaagagttttcccgtgcgggttacgtcatgcccggtgagtacacgctcgccgtgcatgtgaatgataccaacctgcaggaggaaaatatcatctttctgaaggacagagcggatcctggaaacagcgaagcctgtcttccgcgtagccttgtggagcggttcgggtttactgatgctgtgcttgatcatctgcagtggtggcatgacggccagtgcctagacaccggcagcgaagccgtaaagggtatgacagtcaggggcgaactttcctcttccacgcttttcatcaacattccccaggcctacctggagtattccagtccgacatgggatccgccttctcgctgggatgacggcgtgcccggcgtgctttcagactacaatgccagtttcatgaaggtgcagggccagggtgactatgcgtcaagttcaagtctgagcggaaacggtaccctaggggccaatgctggcgcatggcggttgcgtgcggactggcaggccagccgcaatcagtacggaacagggaacacccgtcagcagtggcagtggagtcgctactatctctatcgggctatccgcagtctgcgggcaaggctggtagtgggggaggattatctggactctgatctctttgataatcctaggtttgctggcataaggctggtctctgacgacagtcagcttccgcctaacctgcgtggctatgcccctgaagtgaccggagtggcacgcacgcatgcaaaggtcaaggtcagccagcaggggcggatcatttacgaaagccaggtggcacccggcccgttcaggatccagtcgctcagtgactccacccgcggtacgctggatgtcacggtgacagaacaggatgggaccctgcaaaaatttcaggtcaacaccgcaagtattccgtacctgagtcgccctggtatggttcgttacaaactggccactggcaggccggatgatttacgccatcgggtaaatggccctctgttttcaacaggtgagttttcctggggaatcaataacggttggtcgctgtacggcgggagcctgtttgccgatgagtaccagagtctctcaggcggtgccgggcgggacttgatggcgttcggtgcagtgtcggttgatatgtccacggcccacacgcagttgcccggacagaacagcgtcactggtaattcctaccgggtaagctactccaaaacgttcgactcgctggacagccaggtgacctttgccggctaccgtttttccgaaagaacctacatgagtctcagtgattatctggatacacgggaagacgggatacgagcagctggaagcaagcagatgtatacggtttcactgaacaaggcttttcgcagtatcggcctgagcagctacctgaatatcagccggcagacttactggggtgataccccaccggatattcgctattcattgtcgatggccaaatattttgatgttggaacattcaagaatatcagcctgtcgctttcggcctatcgcagttcgtaccggaacacacatgaccggggcgggtacctgtctgtttcggtaccgacaggagacagtaacactgtgacttggtcagccagtgagaccaacggtgcactgcagcagacggcaagctatttttcaactgttgacgaccataacagctatgagatcacggcaggcagcgatcattccggcacgacagggaatgcgtcctggtcacatcagggggatgcggcagacgtgaatggcagtgctggctggcaggagggacgctatgtttcgggctccctgactttgaggggggggatgacagccacggcgcacggcgcggccttgcacagaacaggacatatgggcggtacccgcctgatgttgagcactgacggaatctctgatgttcccgtgcacggctacggaagcacaacgggcaccaacgcttttggcgtggccgttatcagcgatgtatcgagctactaccataatgaagcccggattgatattgaccacctgccggacaacgtcagtgctgtgcactcggaggcagcagccacactcactgaaggggctattggctatcgcagcttcgacgtgctggccgggaaacagtccatggtggttattggtctccggaatggaagaatggctccgtttggcgccaccgtcaaaaacttgcgcggacagcagaccggtctggtcggcgatgccgggagcacctggctaaccggtatgaatccgggggaaaggatggatgttgagtgggacggtaagacgcagtgctcgttcactcttccggcgcagctggatgcaccctctctgttactgccctgcatgaccgcaaaggcataa

SEQ ID NO: 161197 - DNA, 552 bp, Enterobacter cloacae
ttgtcaaccccgtactcccgtaaagtaactggacttagcctgttgttttgtgtcggcatggtaatgtcacaaggtcagatatacgccgctacaaccgatagcgcgcgcgtgaccttggtaggaaacattctcgacactccctgctcaattgacccaggtagccgggaccagacgataccgatgggcagtacttcggtcggggttattgcccgcgatggtgccggccgttctgttccctttagcattcagttgaaggactgtgacctagccaggatagaccgtcggcttcctgactggcagggcgtccgggttattttcgatggcatttctgatggacaagactttttggtaaacggcacagccggaggtgtggcgcttcgcatcttcgatgccgaagggcaagctgccgttccgggaaacccgctaccatcattaccgctcatcgcgggcgaccagacgctaaatttcaggatgcagctagtcagcaatcatgaacctctcaggaagggagaataccacgccgttatccagtttggcctcagttacttttaa

SEQ ID NO: 161198 - DNA, 531 bp, Enterobacter cloacae
atgaaattaaataaaatgatgttcgtcatgggattgggtatgtctctcatcagtggtgcggcaatggcggatgcatcaactacaacaactgacagcacccatgtttacttcgatggttctatcaccaatgtgccatgctccatgccatcaggctcgcgtgaccagcatgtaccgatggggagcatcgcctcgcacgtactggaaaacggcggtacctccgatcctgtctcctttaagttcgatctaaaagattgtccggtaggtaataccgtagccgtaacctttgatggtgcaagcgattcaaaggacaccagcctgctgtctctcggtagtggtactgcgtcaggcgctggtattcagattatggccgaaggggctccgatcacactgggtaccgctaccgcgcaacagaaactgggtgaaggcgataataccttgacctttgatgcagagttgaagggtaacggttctgataccgttactcccggcgatttccatgcggtttctaacgtcacgtttacctataactaa

SEQ ID NO: 161199 - DNA, 267 bp, Enterobacter cloacae
atgactgttgtcgcggataaaggcgtacctcaacctgacagttttgcgaagtacgccaaaggaatgaccaaccgcgagattgccgccgcgttcaaagaactgtatgacgccgatgtctcgcctgcgctatacatcaatatcgaaggccagaaagaagggttgctgggtatgtggcgggccgaaaatgaaggcgcaaagttcttgctgaacatgctcacaaaatcacgttctgaacgacattctcattgcctgtgtgggattggctga

SEQ ID NO: 161200 - DNA, 279 bp, Enterobacter cloacae
atggttcgagggctctacattgatgacgatgaaatcatgaagcaccgacggatggcccaactcaagttgatgctcaagcacgcacttacccgcgaccaggctgagctgaccgaacatctggtcaccctgctgattgcgggttacactaccgatgagcagctggtcacactgatgaactggatgatacagacgggagatacaaccagacccgaagcattcttgcaggaactggcccgccggctcctgcaacacggtgatgaccatgaccggtctgactga

SEQ ID NO: 161201 - DNA, 453 bp, Enterobacter cloacae
atgaaaatcggtgaaaaaggactggcactaattaagcatttcgaaggtctgcgtctccgcgcgtatcagtgctccgcaaacgtttggacaattggctacggacatactgcaagtgtcagacctggcgatgtgataactcccgaacaggctgatgcatttctgcgccaagatgtatctgaagctgagcgaatcgtaagcagtctcgtgcgcgttccacttactcagtaccagttcgatgcgattgtttcctttacgtttaatctgggttccgaaaacctgcgtacctccacattgctgagattgctgaacatcggtaattactccggggctgcagaacaactgctgcgctgggttaatgccggcgggaaacgtcttcccggactgatgcgacgaagggaagcagaaaaaaaattatttcaggggttgacggttaataacgattcggacttttaa

SEQ ID NO: 161202 - DNA, 573 bp, Enterobacter cloacae
atgtgtaaaggtgctatcgcaatatgtgcttcagggccttcactgtgtgatgaggctattcatcgattacgtgatgaaaaaataccaacaataatggttaattccagttggatgatttatgctgaatgccaatacatttttgctgctgacagtgaatggtgggataaaaattataaccttatcaactcaccagcgcaaaaatggacgagttgtaaaatggctgcacaaaagcatggaatacatcattttaactgtcagactgaaatgacatttaactcgggattgatggcgatcatattcgccataagtcttagagttgacgatattttcctccttggatatgactgctcactagaaaatggggggcactggcacggaaaacataatggattaagcaatcctactgattacagtattcgccgttggaaaacagaattcgaaacgctggcaccggaaatactcagaaaggtcaatgttgttaactgtagttctgaaagccggttgacgtgcttcccaatggcttcacttgaaaaaatgcttaagagaataaaatggaagcagtcacctgtttaa

SEQ ID NO: 161203 - DNA, 1056 bp, Enterobacter cloacae
atggctaatattataacactaagttcagaagttcccgatgtcgctcccggtgagacagtggatctggttgccaaagttgttgacagcagttcgggcacggcagtagaaggcgtgacggtcaaatgggcaattgtgtctgccgccacaatcgcgaaactcggtaacctgaccagtgttacatcagtgacgggatatgccttgaatacagtagggtgcgatctcaaggcagctgtaactgtaactgtaacgctggacgacgacactgatacttcagctacactggaggtcggtttttactcaaccctgctgcctgcgcccgttgtgcctcaggcaacgaacggcgtactgaccgaaaaagagacaagtggcctgatacaggcgttgattatgcgccataacgatgatcctgaactgggagatctctataattttcactggggaaagtcaggcatttcacgatttgatgacggcaccagtaatacttttccttggattagtaatattaaaaacgatttcatgccaaatgaagtgctgtcagatgggaaatatacaatttattacaccgtaaaagacctcgcgcagaacgtttcgtattcagttccgacaacaattacgatcactggtggaacgtatattagtccgatttatgatgctccggagttcccggaaatcacgaataataccatcggatggtatgacacttttgatggcgtacaggtgaaagttcctcttccccagttttctgataatgctgaaattttttcaggaaatacgatcgcgctctatatgaaagtgttcgatagggattacaatacagaacttatcgcatccaaagtagtcgccacttacgtcgttacccaggctgacattgacagcaataatattttattaacgcttccggcggaaatgattactgacagcaaaggcacctttgataatgtccggggactgttctggtatactgtaacaggcagtggttctgtgtcggtatccggttcctcatttacccgtaggctaattattgatacgatccaacctcataaacctcgtgtttaa

SEQ ID NO: 161204 - DNA, 1329 bp, Enterobacter cloacae
atggtaaacagagctaactatcttcctgcgcctgatttgccgcagatgacgaacgattattccattagcattaacgacctgagtgtggcaggtggagtatttgttcggatacaagagtatgaagacgctgcacgtggtgattatatcaccatattctgggacaaccgccctgtcaaagaagtccttgtggataaattatcctctgactttcccattgttgaggtaataaccagtgatcttgatttcggtccgcattttattaaatatactgcaacggatatagccggtaataccggaacgtctgtaggctttaatgtcaacattactgaaggtcaacctgacgttatatatcccccccctgttttcactgatgccgtaaacggtgttatagaccaaagtagtattacaacaaatactggtaccaatgtttatgttaccccttatgccaatattgcagtaaatgacacagttactcttttctggaagggaacgagtgcgtcaggagatattcacgacagtggtatagacagtcgagttctactgactacagatatcagtacaggagtcacatttctcattccgtacaataaactcgaattacttcaggataaaggcatggtgaaggcctactaccaagtcagacgacgtggtgctgtaactggcgtatctgaatttagcgaagcaacgcttgatctgagtggggaaggaaaagaactccgtatgatgatatcgacgggagcggctaatacagattatgacgcaattcatcttcaccccctaaatcagggagaaattaaaggcccccccggggcagctgtcatcttatctgtggtaggcagtgctgtttttgatgagtccgattcgggaacctgtcagatccagctgaatcaggatggaatgggccgtttcagactccgttcactcatgcaagagagtgttgacgttagcgcagaaactgtgcgcaaccccggtgtcggtccccggcaaatcgttcgttttggcgcatacgccagaggcaatggtaatattcagtatcttaattactccaccggggcaccggccaacggattaattccctgttctgtgtacctcaaaacagccatgtcatctgggatgcgggccgaaataacgaaggttcgagtgactgtgaccggctccgcaatcattgatggttattccagtcagtcagctgatattatgctgaacgctgacaagtctgctgaaatagacattattaacaacgttgcggaaacggtaaatgttgagctgtccttacccgaatcatcgggctctgtaaaccaactttcgttagtatttaatagtttctaa

SEQ ID NO: 161205 - DNA, 1512 bp, Enterobacter cloacae
atggaaatagttaatttcagcctcaccccagatgccgccatcgcgaatggtaaagataaaatcagtgccagtgcattaattataagtggcaataattacgtaccgaatatacctgttgtttttagtattaccacaggtaccgcccaattttcaaatggctcaacatcctttgtggcttcgagcaacagcctcgggatagtatctgccagtctggttgacacgactgaggaaactgtcgtgatcggaattgcacttcagaacgatcccactatccatgattcccttgccgcaacctttacccgatcggacaataatgttgatactatcagtctgctactggtatctgatgatgccagagctgacggcgaagaccagaaccaggctgaacttcagactctcagtggcgctgttcccgttgctggtactaccgtttctgtctcgcttacaaacggcgcggtgtttatcgatggtgataaaaaagccgagattacaactaacaataaaggtcgggcctccctgccgtttactagcaccaccgccggtaagtcaaagctcaccgcctggctcactaatgatatttccgtttacaattcggtgacggcaatctttgatcctacctcacctgaaatatcgctggtactggacgttgtttctgacaacgcgcaggcaaacggcaatgccgtcaaccgtgttcgcgctaccgtaactgacagtaacacccaaaagcccctttctgggcagacggttgagtttaccgtgatttccggcagcgcttcctttgataacggttctgtttcttacagtgccaccactgacagtaacggtgaggcatatgcctctgtcagagatcaaacggttgaaacagtcaggctaagagtggtcgcaggaggaaacactgctactggtgagattcattttaagcaaacgcagtcccctgttaagattcaacgagtctataacagtaatcaaacctttcctgccggaggaccctctacatcctggtttggggctactttttatgctttagctgttggaggtagtggaacatattcctgggaaatagattcagaaaacattgatgttaactaccttcctgaaaatagccatgaatctgaatttatatttgcaagtaatcttcctaattatggctcttatactataacagtcaccgatactgaaacgcacgaacaggactcttatacattttatctggatgcattttttacgcactatgcagaccctaaattttatgcagaaatgcttttgattggatttgataactgccctacgactgatgaattatcacgcctttataatgactggggaaatatgacgccttatgggtttattcttaaagaaaactgggggtggtactgggcttcagagtctgatttgtttattcagactaaagttcgactggttgatgggcaaaaaaaatcagggttcgatcaaatattggcatgttgtttttcccaggttcacagggcgaagtctttgtcatgtgctaattaa

SEQ ID NO: 161206 - DNA, 609 bp, Enterobacter cloacae
atgcctcagaaaggaaacaagggaagcaacacgcgcgccatcattgtgggttctggcccctcggcccgtggatttgagccaccagatggagtgaccattatcgccgttaatggtgcaatagaatggttgtcacgggccgattactttttcacgcttgaccccagtgcttcaaacctccatcgactgcataacccggtaccgaatgtgcattactgtgccgctgttccggagaatatcccgctgccagcacatacagaaagactggttcgcgtctcgggggggggcagggagcccatacaccacggttctcctgagtggtggctctggcgctggtcagccgtgatgacgctgagcgaactgtcgggacatattcattccggtaacagtgcgtggggggctcttggtctggcttatcactgtggtttaactaacgtggcgttggtgggagtggatagtacggatgaccggcgtattgaaggtggtcatccatgcaatctttctcatctgccgctgctgtttgccagcgccctgcatcagattaacgtcgtcagctgcggatatctcactggcatcccgcaacaatcacttgaggactggttgaatgactga

SEQ ID NO: 161207 - DNA, 573 bp, Enterobacter cloacae
atgactgagcccgtatttgtttcgttctttaccgagaactggatttacccacagttggcagaacggcttgcagcacaactttcgtcgatgggactccggcacgacattcggcggatggagaagggtaatgactggctggctaacacacgtattaaggcgcatttcattcgccagatgctggatatttatcccacaatcatctgggtggacgtcgacagtgatatacaccgggtacctcgcatactgatgaactttagggaagatctgctgttgcgaccccattcaacggttccggggcgcggatggcatgtttctgttatgggctggaaatcaacccaccagactaaagcgctctgtaacgcctggatacgacaggccgatgcagcaggtggtacggatgaagccgcgtttgatgttgtgattggtcgttttaaagacaaagtcagcatcggccatataccactgaaataccaccgtttgcctcacgaacctcagaagcatgctgtcatcactatcggcatttcaagggatgaagacaaactgcgcatcaagtaccggcagggattcaaatga

SEQ ID NO: 161208 - DNA, 732 bp, Enterobacter cloacae
atgttaagacaaacagtaaaaaattatcagattacagacaaaagcagactgttgagcggaaaagctagcggcacctcagcctctcccagacggctcattttcgatattccggttgataccacatctgtcatcagcgtgctggacatcggtttcggctcgggcagtctcggaaagatggtaaaaaattgccctgcaacgcagcactgggaaatagatggtgttgacgggttcgagcccaattgcttcgactccggcctggtgagtgacagggtgtaccgcaatatctggcatggtcttgctcaggacttacctgcctcttcactctgtccctacaacattatctgcctactggatgttatcgaacatcttccggcagactgcgcaaagcaactgatggagcatttattaaacaacatgggtgaggcatcctttttatttgtcagtacaccgctctggttttatccacaggacagccagcagcctggcgatttagaaacgcatttcataggtgtacccgccacttcaatgatgggacttttgcctttaatgtatgccgttaatcctccacttgtggggggctttgtctatcagaaaagcagccgggattatatgagtttattttgtccggttacggacaggggattcacttacgaaaaagggttgaacgttgcccgggccattaactgccatatgtcacccgggatgacgtacaaaataaaccgtgacgaataa

SEQ ID NO: 161209 - DNA, 702 bp, Enterobacter cloacae
gtgaccgtcattgccactgtactgaaatccggcggtgaatattgtccggagcatgtccagcgtctgcatgcgcagtttcacggactgctgtcagtttgtttttctgacgtaactgtatctggtgttgaaacggtgccgctacgctatgactggcctggctggtttgccaaaatggcgctttttgatcctgataccgtccacgatgacatcctctatttcgacctggacacactgatcaccagggatcctgaacactatcttaatgatgactctttccggatgctttctgatttttatcatccggagaagccagctagcggaatgatgtttattcctcatgacacgaaggttcgcatctggaacgaatggatttctaacccgcaaaaatggatgcgtgaatatcggggcgatcaggatgtcctggaggccatctgtggccgggatgttgcgcgctttagcgaaagagttaagtcgtacaaaattcacgtcgcggcaccaggtatgccgggctggaacccacggcgttcgcgtggtaacggaagaatcccgccggatacggatgttttgtgttttcacggttatcctcgcccctggtcagtagatttacgacatataggattgctgtgtgactcatataatcccgacgcagaacctgattcctgccggaaattatcaggaagagtccgcaaccacaggaattga

SEQ ID NO: 161210 - DNA, 1143 bp, Enterobacter cloacae
atgtctacatcattaacggttaacacgacaagcggcgcaccagccgatggcacgacgaccaacaccgccaccgccacgctgatgaatggagatacatatatcagcgatgcacaactggaattcagtattgtagcgggcaatgcgatttttaccaacggaacgaataagattatagcccgtacatcctccctgggagagtcctcagtaacctttacagacacggtggaagagaatgtcacaatcctcgtgattctgacaagtgacgcgacggtctatgaaactgcgagttcatcgttcagtgcagacggaggtaatgcctttgaactggcactgacgacaaccagtacagccgtcgccaacggtatcgattacaatacggcgacggccatgctactcaaaaaaggcgtacctaccagtggtgagaacatcatatttacgatcacaacgggtcatgctgtatttgcaggtaattcgaaaacgacgacggtcacaaccggtattcaggggatggtatctgtcaaatttaccgaccagaaggtagaaatggtcacaattctcgccaccgttgagaaagataattcagtctatcagactgcctgttcaacgtttgcaccttcacaggccctgtcagtcgtaagagtgtataatgataataatatagaattcacaaacggcgctcctcatacctggattccgtctgcgaaactatacgttgaagtaaatgataaaagtgattcggttacatgggctactagcaatcccgaatttaagatttatggtagcaatggcgtaggtacaataacatttcctggaatacttaattcccccccagaggaaatggttgtcgtaatcgctgaaaatttaactgaatatgtaacatatgaattgacgtgtgatttttcaattagaatggttaggggggctgaaattggaattgatggttatagttgtgcgacacaggcccaattacttcaagtttacgatgaatggggcgacatgagcacctataattggcagttagactctgataacttaaaatactccgaagaagatcgccgttctacaacaaagattgttgatatgaaaaatgggttagtcattactgaatctgtcaaagatgttaaagtagcagaaagaaactag

SEQ ID NO: 161211 - DNA, 1932 bp, Enterobacter cloacae
atgaaagagaccgtgtccatatccgacaacagcgggaaagccactgtgcacttgatgtccgcaaaagcgggtggtacgaccatcagtgcaaagtctggcaaccagaaagagggtggtgtagttcacttcagcgggaatagtgctaccgcgaaagtcagttccctgaccgtcacaacagatggcagcccggcagacggaaagactgtgaatgtggcacaggtcacggtggcggatgcgaatggtaacccgctgtccggtcagacaatcacctggaaggcggataaatccacggtcgcctttggtcagtcagcggtaaccaaccagaaaggcataacgactgtatcctataccgacacaatggcagagtccctgactctgactgcgagcctggcgaacggcagcagcgccaccgcgtcaagccagtttgtatcagacagtaaccgcgccagcctgaaagacctgaccgtcacaacagatggcagcccggcagacggaaagactgtgaatgtggcacaggtcacggtggcggatgcgaatggtaacccgctgtccggtcagacaatcacctggaaggcggataaatccacggtcgcctttggtcagtcagcggtaaccaaccagaaaggcataacgactgtatcctataccgacacaatggcagagtccctgactctgactgcgagcctggcgaacggcagcagcgccaccgcgtcaagccagtttaagactgatctggataatgcagtgatagctgtgaccacaaccaccggcgcacgagccgacggtagagcccaaaatacggtgacagtcacactgaaggatgacaggggggatgcgctgcaagggcaggctgttaccctcagcgctagtggtagcgcaaaactgtctgcagcatccggtacaaccgacagcaacggcctgattcaggttacactaacggacaccacggcggagactgtcactatcactgcagcactgagtaacggcaaaacggcaacgacgcagggagcatttatcatttataccgtcaccgttctgacgaccagctctgcaagcgcgaaggctaatggcagtgcagacgtaacgctcacggccactgtaagcgacgacagtggcaagattgtggccaacgttccggttgctttcagcgtgacaggtagtgcaacactttctgccacaacggttagtacgaacgaaagcggacaggcacaagtcaccctgacggatgtcaccggagaaacggttttggtaacagcgaaagcaaaagacaacagtaatgatgtcggcaaaactcaggatgtgacgtttgttgcttcatccataactggtgtggccccccaggggacaacccatatcttcaacccgggttccgggttcccggaaacggggtatgctggcgctgagttttacatgctgattgatggctctgatgtcatcaatgattatacatggagcagcaaccgatcatggttgacgatagataataacggtcttgcgacgatgagggctccaggtaacagtgattctccagcctcttctgagcgggaagtcaccatcaccgccacgccaaaaaaagggggggcgacgctgacatattcgtttactctccggaagtggtacaaaatttccacacgagttagtgtgactaacggaggggacaaccaggtgagttcagcctgcaatcgttataaaggaacaattgaatctgcctcagatctgacgagcggtgcggtgtcgttggtgggtaagctatttggtgaatggagagatagcccttctctggcaaaatacaatttttactgggatgctgaaacgaccacaacctggcgggcgaaggaagacattgctttcatctatagcacgggtattaccggctcagcctccttgccaggctccgcatatgtgatgtgtctgatgcctctaggaaattaa

SEQ ID NO: 161212 - DNA, 369 bp, Enterobacter cloacae
atgccgatcatagcaccaattccccgtgacgaacgacgcctgatgcagaaagcaatccataaaacgcacgataaaaattatgcccgcaggctgactgccatgctgatgctgcaccggggcgttcgcgtcagcgacgttgcaagaacgctctgctgtgcccgttccttcgtcggtcgctggattaactggttcacgctgtcgggtgttgcaggactgaaatcattacctgccgggcgtgcccgtcgctggccttttgagcatatctgcacgttattacgtgagctggtaaaacatgctcccggcgattttggctaccagcgctcacgctggagtacggagcttctgacaataaaaatcaatgagatatga

SEQ ID NO: 161213 - DNA, 477 bp, Enterobacter cloacae
atgactgtacaaagtaagatccgtacgggtgcatcctcacactatcctgcagaatggcagagtatcgactgggccagatgctaccgggaagtgcgcggactacaggcacgtatcgtaaaggctacacgggaaagaaaaaccggcaaaataaaatcattgcaatgggttctgacccactcgtttagcggcaaagctcttgctgtcaggcgggttactgaaaataaaggcaggcgcacacccggtgttgatggtattacatggtcaacgccggaggctaaatttcaggctattttatcactcacgcggcgtggatatcgtccccagccactgaggctgctccttattcctaaacgtaacgggaaactgcgaccactgggtattccaaccatgcgggactgtacgcctgccgggctgatgcagacgtcgtcctgcagcacgggggctgttattacagcaatcgcagcagttttttcatga

SEQ ID NO: 161214 - DNA, 255 bp, Enterobacter cloacae
atgcagtaccagcgggtttccctgacggatgcgcgaaacaaccttatcggcagtcaactgcttagcagtgatgccattctgaataaccaaccgatagagaaggtattgctcagcgaggttacttacaacgcagcgggtcaggtattacgtgaaaccacgagttccccgagccttgccataatctcatctaagggctattgctgggctggcaggcgtatcaaaaatgacggtgatacgcgtctgcagaagcgctga

SEQ ID NO: 161215 - DNA, 258 bp, Enterobacter cloacae
atgacggtgatacgcgtctgcagaagcgctgaaggagagggggccgctccactcactgtcgctgaggacgtgaaacacccagtcgtactgcttagccagctccagcgcacaggtcaggcgaaaaaggtcgttctgctcagacagttcaccggtgcagctgcgccagagataatccagcttatggcgcaatcgcgcacgaacgccgagcgtccggccctgattgagtatccagtcaacatcggtggccacgtcgcgtga

SEQ ID NO: 161216 - DNA, 2184 bp, Enterobacter cloacae
atggaacagcaatataccaacgatctgattccggaattagtcgcctcactggcgcgtccgccattctcagcggagaaaaaggccgggatgtctgaaggtgcccgtcagacggttgaagagcaggaggcatttctgcctgaacatccggtggtggcgatttaccggatcgcggttgacggggcactgacccaacgcggcggagtgatacgtgctgcctggaacggctttgagagcgggcaaaaggtcaacgtcgcgctggaaggtgatgaggtggtttatcctgacgacaccacagcccagattgttaccggcagagggctgagccgaagaggctgtatcattcacggtaaaaacgccgggctgcacggggataagacttccactggggcgcaatgtatcgcggcccgccccggtatgtcggtcatggggctgctgaagctctatattggcgacaagaccacgccctgccagaagtgcggggaagtgggggtaagtgtggacggcgatcaccggcactcaaacagcgtcgctgttgtggtggatggctcggcaatccgttgcgggtgtccgcaggggaccaattttctgattgccccgggtacgataccgcagctttcagcatcaagcgccaggatggcaacggtcgcagccccggagccggaacagcatgcacaggccgctaaaaaagagaagcccgaaaaggaaatcacgctcaccatcggggtatttttcgacggcaccggcaacaatgctgttaacacacagaatatgatgaaagcgtatgccgcaggtcattacaggctggatgacccggaagccgagtccattctggcaaaatgcgcccgtgaaaattttggtgtgtcgggcagcgatgcaaccagctataccgggtactacactaatattcactggctgagtacgttatataaacaggacatacctgtagatacaggaacagtccagtccgccgtgtatattgacggaataggcaccgacgcgggtaaacctgacagcaaactggggcagggttttggtatatccgataccggggttttagctaaaacagatcaagctgtagccaggctgaatgatgtacttgaccagagtataagagatattaaaaggcaggtgaccgacagtaaaattttaatcaaatccctgcagttcgatatctttggcttcagccgtggcgcagcagcagcccgccattttgccaaccgcatccagtcggaagattcggccattatcagcgcaatacgccaggccatgacgggcataacgttcgatggttttccttcaggcaagacccgttttatcggcattttcgacaccgttgccgctatcggtaccccggttaatggcctgaatccgcacagcgcaaatacaggtaacgtgaagctcaccctgcgccccggcgtggcggagaaggtttttcatatcaccgccgcgaacgagtgccggttcaactttgcgctgaacagcgtgaaaccggcatggccggaactggcgctgcccggcgtgcattccgatatcggcggcggatatctgcccgtcacgaaagaagacctgtttctgacccgcccggctacggagacggtcccgtacagccagcccggcgaaaagacacaggcctaccggcaggctgtggcgcagttgcaggcgctggataaatcgccctgtctggccccgttgctgagaaccaatgagatttcggcagaaacctggcatgacgaccggcttcctccggaccggtacggccagatgcagaagcgcagctttgcggcactgaccctgcggggacggactgtcagaaacgactggtcccgcgtggcgctgcgggtgatgcttgaggctgcacaggaagccggggtggtatttaaccctattcgcgcatcgaatcatgaattacacctcccggatgaactgtcttccctgtgtgacaaggcgctggcgatgggtaaggcggtccgcaacggccagacaccccaagcgttcagccaggatgagctggatgtgattgcggagaagtatattcactgctcggccaactggaatgccatcgtggtcaatactgacggtttcattcacgggggcgcatctctctctgcgctgattggctttatcaaccggccggatgagcagtggaaacgctccgtctacagcatggacggaaagaaggtatga

SEQ ID NO: 161217 - DNA, 603 bp, Enterobacter cloacae
atgaggctgataacactttttcccctgctgatgctggtatggtcagcggctgcagcgcagacgccggaagacaccggcgaaatgccttacggcgaggtcggttttgcgtttttcactcccagggaattacctgcagtggtgacaaaagcactgattatcgacaacgaaaaggtggtgtccaccttccgtacactggacagtacgcaggaaaatcctgacagcgtgggaagctggagcagtaaggtgagcagacatgctcagttcaacaaaattcggcattctcctgcgcagatgctgttctgctggaactccattatcgacaaaaagacctacgagactcgcattactttctcatcagtcctgcgggaaaaaatatcggtgccaaccggaaaggactggcgtggaaatacggcctggtatgacacgctgttgtttggcctggctccggaggggaaagtccgcatatggcttcagaacagcgccccggtcgccaatctgccggtcggaccacgctgtccggggataaactggacgcctgtagagacgtaccttcgcggattgattttaactacagcattccgaatggttatgatcaggacataa

SEQ ID NO: 161218 - DNA, 819 bp, Enterobacter cloacae
atgtccgtttcagtgtctgtaaatggtggcgctgctagttatttcaaaattggtgatgtgatgagttatattaaacgattttcattttttacaggtgtctttatttcagtgttgtccatattaacccccgcatacgccacaccggtaattggtatcggcagcatgtacgacgttctgacaccgggcatgttgagtatgaccaagcggatttataacaccggggattcgacggcctttgtgcgcgttgaacttcttgaaataaaacccgggcgtaagaacggggaaacggaagtcccgcagaaagaattatccgggaccaccccggagcgtaatcgtcttattgtcacgccacagcgacttattattccgccgacaggttttcaggccgtgcgtattctgtggccgggggagcgggggagtgaacggtatttccgcgtcaggttcacaccggtcatgcctgagacggatgacagttttggtctcgataaaaagaccatgagtgaataccgcaaaaataccctgcatgcaggtcttaacgtgcttacgggttacggtacgatagtgattgtccagcccgaaaaaccacagtttaacacgatgatagacagtaccggtgccggtatcaccgtaaaaaataacggtaatgccactgtgtcgttggataacatccgacagtgtaaaacggcgaatactgactgcggtgccgtcacgcgcgagtttattctcccggggagaacacacacagtggaaaaaaaggccggatataaaacgaatttcactctgattgaggggaatagcaagcgggtgttgagttattag

SEQ ID NO: 161219 - DNA, 534 bp, Enterobacter cloacae
atgaaacgtaacttctccgttctgaatacttctctgactgccgcactgttttcctgcgccgttctcggcagtgtttccgcgcacgctgctgacagccagagttataccatcaacctgacagccacagtcccctctgactcttttcaggttatcccggtagacgcaggctggattgaccagacccaggatatgggctacgacatcgcgaccagcaaactgaaggtgtttgagaaaccgttccagtacaaaaataccgcaggcggtattcaggcaaccctgacagggaatctgtccactgatggcaaaccccagctgtcaaacggaaccgatgtgatccccctggcggtgagcttcaataatgttgcactcagcaaaactgccaccaccgtagtggaggctgatgccgcaaaagcaggcggacgtaccgcactgaaaatatctcaggcggaagataaagcgctggacgtgaatggttcatttaccggcagcgtgtcaatgatttttgagccggtagtgacggcaccggaagcgtaa

SEQ ID NO: 161220 - DNA, 2460 bp, Enterobacter cloacae
atggaggccgcagcgggtgactgctgcggtttttttatgaagaaaaaaagcctgcttattcttgccctgttccctctgactgcgccggcagcggatatgacgctgccggcaaatatgcgtggtctgcctgaagacttccgccggtatttttatgattcagaactcattgtccaggtttacctgaatgacacgcggctgtttgatgccgcagtggcgctgaaagagaatggtgacatccgtctgttacgtacccttgatgatgcgcaggatacagacccggaaacccgggccctctggcgtggtgtgctggagaagggcgtatcggctgggcaatgtgcgaaagactgtccttccgggctgatggcggttcagtaccggctcgacaactccgtgctgaagctttacaccgcaagctatgagaccgcccggacccggagcgcctatattggcatgccggcagatacgccgggtggtgtcataatgtacaacgatgcgtccgtaacaaacacgtcatccacgcgcagctggggtataaattcgtccctgacgtcgtccctggcaggctggagccagagagcgtctttccagtcgtccggcacggagggtgagtatcactacagcagtgccagcctgtacgagctctacacccagaaagagtttcagggcagtttcgtccggctgggggtttttacccctgacagtgataccggtaatgtgcagacagccggtttcggttacgacacagtggcaggggcgatgtgggggacctctgatgcgcttctggtcagtacggacagcgtcagcgcctggccggtttatgtgaccggacgcaatcagtccatcgcagaagtctggcgtgatggtcgcctggttcacacccagcagttacaggcgggtgtgcaggcgctggacacgcggccgttaccgggcggtatttatgacatcaccatcaagattattgaaaatggtcagaccgtcgacacgcagcaggcgcagatttacaaaccacaggggtggtctgacccgaaccggcgctggcgcatgaatctgtggagtggtcagcgcaggacgctggccaccggcgacgggagggggcgtgaggatactcccttctcagtcggtggggggattgatgttctggcccatccgcgggctgttctggggctcagcggggcggcaaaggaaaaagagcaccaggtcagaacgcgggcaaatatcacgctttcacctgatgactccctgtttgcccagtacacgctgggtaacactgaatatcagttaaatcagaataccgacatccgttactaccgcaatattcccggtggtggctcagccagtctgttctggcgctcaaccacgacggacgtctacgggcacagaaccacatcccgtcagcagggggatatctggggcagctcactgtcactgcgacttccgcggtcaacgtctcttatcgtcaacgggcagtatatggatacggactggcgcagtgggtttggtgccgatatgtcgttgaccacgctggccaccctgtcgggtcgtgacatgaacttccgggtgagcgcatatgaccgccctggctttaatgaccgccgtcgcgaccacggggtcgcatttggcgtcagcctctcgctggccccggcggcacggcacaccctgtcggcagaaacgggcatgaaccagaatcaggggtattccagcctgaactatcagtggcagcagggagatgacagcagcatccgttctctgggcgggggagtgtcctacagtccgcagaatacggttatcagcggtaatgcctcagttgataccccgtacgtcagcggggatggttatgtgcagcataacactcgcgggagcacgaacacggcaggggggaacctgagccaggtgcttgttatgggcggcggcagagtggcctccgtgaacggtaacgccagccgcagcatggaatccgcgctgattgtggatgtggagtctgatgatgaaaccgcgaatgtactggcttccggccagatggccgagatacagctgaaagcaggacgcaatattgttccggcggagctgtggaaaaaaagtactgttcagttcactgcccgcgggggagaaagtgtgcaggtgttcccgccctccggcagcgtgcagatgcggcgcggcagcgtgaaatacataagcgtgaaggcggtgaaaaccttcacggtagtgggaatgctgcaggatgagaacggaaacatactgaagaaccgctacgtgaacagcgacgtctccggcgggatgataaacgccgaaggtgtactgacactggactccgggacagcaaaccggaaacttacggtcagggcagaaaatggacagccggcaatgcactgcgcgctgccggcggagatggacaaagagaagaacgtacagtttgtcagcacagtgacatgccgggcaaacggttcaggagaaaaacaatga

SEQ ID NO: 161221 - DNA, 1272 bp, Enterobacter cloacae
atgagttactcagtatcacgtgcgctggcgggcatggtgttgcttgcggtaagtacggtgggtatggcggcgaccatgaacatcacggcgtcgtttgcaccctcgatggacaaaccggaaaacaacaccttcacgaacaccacgccacagagtggattttgtgccacttggccagcaagttgtgttggtggtgaaaaaagcctggcgacaggtttgatacttacaccatctaaagggctcaccccccaggatgataaaagagagagtcttttttttaaatggccttcttcttcccgaagaataatggttacaaatacagaaacaggaaatacgcaggaggtacagttcagggtatcgtcgttcagtggccgctatactgcaaatggtgatagccaggtatacgaatgggggaagggggggagtgctttcagtatttatcctgatggaggatgtaggagcttgcatccggggtggggcaatagccacgggctggcatggctatggagcatccccgagggaaattccgggtgttataaaatcaccagcgttgaacgccctgttgggggaagtaactttattaataacgttactgagctaagttttggatatgatctaaatgcacccgccccgttaaaaatggacgctggggtttacaccggaacgttatcgctgagcgtcggcccgggaggcgatattgattttggggacaactttcaggcgtcagacacggaactgacaatcaattttaccctgactgtaaaccacgaacttaaattaaccactaccgcagatgaccaggccgtgtccctccaaccctgtacttcaggccgaacctgcacggaagatgagggggcggccaactgggagcgctggatggtgacgcgtatcacgccacaactgaccggccggagtaacttcagtctgtccagctctggtgcttttacggtttatctggcatgtgagcagcagagtggtccggactgcgtcctcagaagcgataacatgccctcacagacggtaccggtccggacgctcctgacattacccgataacgtcgttgataacgtgaccggctcaaccgtgtcaaaacgcaggctggaggtggggcgtgatttgacgaaaaacgtttttgcgacaaagacgtttggtcagaacagggccggaggcattgattttctggtcgaccagaaagatgttgataccatgctggctacacgtccggatacctatcgcggagcggttactgtcatcttcgacccgaaaatttactga

SEQ ID NO: 161222 - DNA, 492 bp, Enterobacter cloacae
atgtgcgcagatagctcaggagtgtttacgttgaaagagatcgatcgggttaaaaccatccaggatgtcatcgaccatcgcctgacaacacaccgggcggctgagaagcttgggataagcgatcgacaatgccgccggctgcttgttcgttaccgcaatgaaggcccgcttggtatgggcaatcgtaaacgcggaatgcgcggcaaccgtcaactggctcctggtatcgcaactcaggctctcgggcttatcagaactcactatgctgatttcggtcccacgctggcacgggaaaagctggaggaacgtcatggtcttttgctcggtaaagaaaccgtacggcggatcatgatccgcgccgggctgtggcttccgcgcaaacagcgtgctgcccggatccctcagccccgttatcgcagaccatgtactggcgaactgatacaaattgatggctgcgatcacgactggtttgaaggtcgcggtccggcatga

SEQ ID NO: 161223 - DNA, 897 bp, Enterobacter cloacae
atggatgatgcaaccagcagactgatggaactgctgttcgtgaagtcagagtccaccttctcttattttgaggctacccgccattacattgaaaaatttggtaaaccgctggcattttacagcgacaaagcgggtatttttcggattaacaacaatcatgcgacgggcggtgacggtcatactcagtttggccgtgcgatgcatgagctgagcattcagacgctctgcgcagagaccagtccggccaaaggccgtgtggaacgggctcatctgacgctgcaggatcgtctggtcaaggagctgcgtttgcaaaaaatcagcacgatggaagacgccaatgcttttgctgagacttacatggcggactataaccgccggttcggaaagctttcgggacatgattttgacgtacaccgcccggttgagcatgacgaggatctgtcgctcatattcaccgttcgtgaaaagcggaaggtatcaaaaaagctgacagtgcagtacgacaagatcctgtatctgattgaagacagcgagttcagccgccgggccatcggtaaatatattgatgtctaccattaccctgatggtcacaaagagctgcgtatgaatggcacagcacttccgtgctccaccttcgaccgcctgtcagaaattgatcagggtgagctggttgacaataaacgactcggcaaagcactggaactcatcagcctggtgcaggcgaaacgcgacaatacccgctcgcagtccgttccttcaggcgatggtccgtccagaagacgtcctaaacctgccggcaaaaagacccagcgtgagctggaccagaatgatattcttgaggcgctgcagcagctacagtcacgctccggggagattttcggtagcagtgcagaataa

SEQ ID NO: 161224 - DNA, 633 bp, Enterobacter cloacae
atgctccgttatgagttaacacccaataatgccgggtttgttctgtggggagattcagccgcactggatgagctgcaccggttaatccattacattgttgaagaaagccctctgattgagattaaagacggctttatactgtcgcttgcctatgacattcgtaaggcacgtgaaggctgtcgcagggctgagcagcatcagtacgaagggcaggacacttatcagctgtacggcgttgagctgctgtggcccctcgtgttgcttcaggcggccattctgagacgagcaatggcttatattcagaccgataaaaaacagttatcagtcatgtatgcttttgaatatgttcttgaatctgcgctggctgatttattcccgaaaagtcacggggagataatgacagtggcccgtcatgcttcggattctgatgcagaatggctggagaataacactgacagcagatgctgctatttcattcagttaccgccagaattcagaacgcagctgttgtgcaaaatactctgttctatggatgcgctgtggagtaaatatacccgggatccacaggataaaaaaatgctgcgcgacatagacaataccgcacctgactggcccgatgatatcaactggtag

SEQ ID NO: 161225 - DNA, 345 bp, Enterobacter cloacae
atgcagcaggcggtgacgcagggcatctacgacacggtggtggtacctgccaccagaatgaccgttgccgccggcgatgcggtggggttcctcggggaagacattgtccccggcgggctgaataaggcggaaaccgatccgtatgtgcatattgaggtgctcagtaccgatgaccggctgccggattttctgcgtaatgctgccggtgtcacaggcggggaaaaatatcttcatattcgcccggagagcagtctgtatacccgcagcggcgataccttcaccaaaaccagcgggaaggtaaggaaagatattcacaaaattctgccgcaggccaaatgtccgtaa

SEQ ID NO: 161226 - DNA, 714 bp, Enterobacter cloacae
gtgaagatctgtttctcggcccgaaaggcgaagggtaaagactacagcacgctggatgaaatgatggcgcaggtgggacgcgaaccccacggcacgtggctggcggggaccaatggcatgtggcacggcggcattcatatcagccgtgaaagtgcgctggcatcctttctgacggcgggggacgttgatacggcagtaccgctgccgtttatggccgggggcgaggtggtggcttaccgtctgaacagtcagtacctgaccgatacctggctggggcagacgctgcagtattccagcacgtttgtgctggtaaaatcggtctgtacgcccgatccagacaagccggataacagcctggagttttacgcgttctatctcgggctgaccccgccgtcagcctttccggcgctccagtgttatcaggtgactgccggaggtaatggtctgcgaacccggcactacagcgggcaggagaagacaggtgagcctgcgccggtaccaacgggaaaactggcagccgggcagaaagtggtggtcctgcgtgagaacctcttcgggctggacggacatatcccgaccttcgggcttgcccggcgcctgaatgaacacgatgagatgaccggggaggcgttctgggtgtcgcttgatccgttgtatatgaccccggagggtaagtacacggcgcacctgccggctggatgcagcaggcggtga

SEQ ID NO: 161227 - DNA, 249 bp, Enterobacter cloacae
atgcgatacaaaatactgactgcagccgaagaaaaaagactggcggatgcctttgtcgcgcaggcgctggcgatgggtctgaaaggcaacaaaaagctgccgaaagccattaagctgcaggtgcgggacagggtgatggcctccattgaggccgaccggaaagccgctgaagcacagcaggcccgccgtcaggcgcatgaggcaacggagacaaccttcacctggaaaccggcgatccgccggcgctga

SEQ ID NO: 161228 - DNA, 228 bp, Enterobacter cloacae
atgctgacggaaaatccgcagctcacggcgattcagaagcagctgaacgaacagcagcagaccgccaccctgatgctcgaggacaggaccgcccgcgaagccgaacgccggcagctcgatgaagaacgcgaccacctgcaggcgaaaatcagcgggctgacgggcgcgctggcgcaggaaaagaagcgtgggttctggtcgcggcttggactgaccccgccccggtag

SEQ ID NO: 161229 - DNA, 390 bp, Enterobacter cloacae
atgaaaaaaagtaatgtaaatcattctaaagacatcaacttaagtcatgacgataaagagatgaacgacccccgggttattttttatgacaattttccggaaaatgatctcgagagttggaatgtcgtggataaaagctccagcgtcgaaacaattaatggaaaaaatgtactcgccttaaatggtctcgatggaattggtgcccaacttgataaaataacaaacagttattgctacctgaatcttacgttatctataatgcttgagggacaacgcggccagttaaatgtaacgacaagcaacaacgtgttttatatatgccaactcaagaaaaacaataatgaaattattgacttggatgcactgatttcgggtctgaaactggggtga

SEQ ID NO: 161230 - DNA, 189 bp, Enterobacter cloacae
atggcggtggacacaaagggcaaccgttctgaccggagtgacacccagttgatggtgttggccccggaggtgaataagcagacctccaccttcacgcctgccagcagcgtgctgccggcggacgggcagagtgtgcaggtgctgattctgacactgtgggatgagataataaattattttcatgcatga

SEQ ID NO: 161231 - DNA, 489 bp, Enterobacter cloacae
atgttaatagtaacgattaatcaatatctcaggcggggtctggaagctctgtgcggagagccggtgatggatccccactctgaacctgtagtattcattccggagcgctcagacgatatatacatttatacgcgaagcgaaggggaacatgattcgctgatgctttttctgtccgtactgtcatcccggcggatcgtggtacacagaaaaaataaaggtgcaaggggcgtttttgatatgtccaccgggatattttgtaacagaaaaaaacagctatccccccgggagagggaaattttaggggctttgttgcagggggcatcttgcaaaactactgcagaaaagttcagaatcactgaaaaaacagtgagtacacataaagagagagcgctcagaaaactggggataagaaactttaatcatttatacctggcgtaccggtactggcaacgatgtttacgtgtatatacaaacctatctcctctttag

SEQ ID NO: 161232 - DNA, 231 bp, Enterobacter cloacae
atgaaaaaagcaatgattgccgcctcagttatactggctgctggttgtacaagtgctcagaagcaagaacagccgatcggtttagcaaaccctgcgtctgttcactgtattaaacagggtggaaaactggatatcgttaaagaatccggtggtgaggtggggtattgcaccttaccatcaggtgagcgaatcgaagaatggtccttgttccgtcgtgacggctcgaaataa

SEQ ID NO: 161233 - DNA, 462 bp, Enterobacter cloacae
atgtgctggcaaaaaagaactgacgctggcgcgaatgggtccgggatctgcaggcacgctacggagccagcgaagggaaaatatgctttgccctgcgggtcagccgcagctcgttcaggtatcgttctgtggcggcagacgacagtgcgctacgcctgcgtatcagggagatcagcgaaagccgggtccactatggctaccacagagttcacgtcatgctcaggcgtgaaagctggcgggataaccataaacgcatctatcgactctacagcgagcagggtctgtccctgcgtctcaaacgtccacgacgtaacaaatcggcacagcgccgacaaccccactctacacgcgggaatgtctggggatctgcatgggccagaatctgcgctcaacggaggttgcagagatgctgaacaccattgcgctcagacgtcctttacctcaattgctgaaaaccgataa

SEQ ID NO: 161234 - DNA, 3441 bp, Enterobacter cloacae
atgtacaaacgtagccttttatatttagtgatgtttgcagaacccttttgcagcataaatgtgcatgccagtgatgtcattgtaccgaccacctccggggactatctgtatgagcagggggatatcaacggcagccttattgtaccggcaggaacgacggtgacaggcgatgttattttcgcaccgagccccggtagtaccatcaacaatatcagcggcaacatgattaactacggtaccgtcggtggcgttttggaaaatggatttggagggagccccggttctattaccggtagcctgatcaacgcgtcttcgggctccgttcaatccatgttaaataacaatggcagtactgttggcggagatatggtgaaccaggggactattcagcagtttcttgataacctcggcaacgttaccggttctttcgtgaatgacaacaccggaactttcgggagtacagccgtttttagcgtaatggaaaacggcgggatcgtgtccggagatatggtcaacaccggaaccggctacggctcaatggagaatgtcgggactatttccggcaatttcatcaatgcgggctccctcaccagtgaccccgcggtcgataaccgctctgtggggacaatgatgaaccggggtaccgttgccggcagcatgcttaacgagaccggggccgctatcttcggaacgatgctgaacgacagtaccggcaccataggtggggatatggtcaacggcggacaaattggcacggacagtacgctggcgggggatatggtcaacaacggcagcattaccggagccatggtgaacaccggcaccattggcacggtgtccagcagctccatttcaggaatgtacaaccacgggaccctcggccttgacatgaagaactcgggccagattaccggggccatggacaacgacggcaccatcgccggcagtatgattaacaccgggaccgtcgacgaggacgccttcagctttaacctggacggcgggagcatgtccaacaagggcactgtcggcgggagcatggtcaacgaggccggcgcgaccgtgaagggcgaaatggtcaacgaccagcaggggaatattaccggcgacctgataaatgccggacagattgtcagcgagtcggagaacagcggcacgttccagaacagcggaacgctaaagggctcgatgattaacctcggcgcggtcggctcgttttcgaacgttcagacatccgggatgtacaataccggcagcgtcggcggggacatgattagccgcggtaccgtcaacggcgcgatggacaacaacggtaccgtaacgggcaatatggttaacgccgggaccgttgatggcgatccggcaagcgaaaggcaggatggcggcagtatgtccaataacggtacggttaacggcagtatggaaaacgccagcagtgccgcaattacaggtgaaatgataaatggcaaagatgccgtcatctcgggtgatatgattaacgcgggaaccattactgctgaccccgctgagctcggtgttggccgggcatcgggtaatctcagaaatgatggcaatattagtggcagcattattaataccggcacagtccagggcggtatcgctaatacaggttcagtcggagacaggataatcaatacagggaccgttaaaggcgatatcctcaataccggaaccatcaatggcggtatatacaattcagggacggttgaaggcggcgtgcagctgcgggatacatcgctgaccattgcaggtgctgatgcgtctgttaccggagatatcactggtagcgacctgtcggttattcatatcggcacgtctaccggtgcggcagactataccgcatcttcaggtgacgatgcgactgtcggaacgctctctgttgtacagggcagccgtcttgagcttgctgacggggttcagtggacaacatcgtcctcccagtcagatgccgtcagtaacgcggggaccctcgtgctgggtaaccagagcgccctgagcggtaacctgactaactcaggaaccctgagtttgagcgatgacaacagcatctcagcaaccataaacggcggtgttgtaaacgccggagccattattcttaaccccaccgctacaagtgccgggaacacgctgaccgttaacggggactataccggtgccgcgaacagctcggtttctctgggctcggtgctgggcggagacggctccctgacggacaggctggtcatcaggggcaacagcagcggcgcaagtacgctgtacgtggcgaatgaaaacggctccggcgcccggacgctggaggggatacagcttgtcgaggtggatggcacgtcatccgcggtcttcacccagggcaaccgcgtggtggccggggcctacgactattttctgcagaaaggcgacgcgagcggaaacgacgctgggagctggtatctcacctcgcgtaaccgcttcgccgtgcgcccggaggccggtagctacacagcaaacctgcaggcggccaacacgctgtttgccatgagcctgcacgaccgtgagggtgaaaaatcttacgccggaaattccggaggaatgtggttacgccaggaaggtggacgtaacagggtcagtatgtcagatggtcagaacaaaactaccgccaatcgctatgtggttcagttaggaggcacattatggaaatgtactgtcagcgacaaggacagttttgaggtgggggcgatgggcggctatgcgagccaaagcagtcacacgcaaaataacctgaccggatatcgttctaaaggttcggttgatggatacagtgcgggcttgtatgccacatggtaccaggatgcggaagcaaaatccgggctttacgtggattcctggcttcagtacgcatggtttaacaatgaggtcaagggagacgacctcgctcccgagacttacaacagccgtggggttatcgcatctgctgaatccggttacaacgtgctggcaggaaaatggacgacccataccgggattcagaatacggtctggttgcagccacatgcacagataacctggagcggcgtacgggcagacgatcataccgaaagaaatggtacacgcgttaccgcaagcggtgaggacaatgtccagttgcgtttgggtatgagagcttatattaacgggaaaagcgccctggaccgtacagacagtcgtgaattcgagccttttgtggaagcgaactggatttacaatactcatcagtatggcactgcattaaacggcgacgccgatacccagaagggggcaagaaatgctggcgaactcaaagctggtgttgaggcacatgtcagtgacggggtgtctctctggactaacatcgcacaggttatgggcgggaaaggatatagcgatacccaaggcacgataggcttaagctacagattcagataa

SEQ ID NO: 161235 - DNA, 459 bp, Enterobacter cloacae
atgaagaatttatcatgttttattggttcactgctgcttatatcaggcccaacttgggcagcaacaacaccagcgacagattgtgttaaagcagacaaagctgcgattgaaggattatttgatcggtggaatgcgtcactaaaaacaggtgatgcaaaaaaggttgctgacacctatctgacggatgcagtcttattaccgactgtctctaatcaggttcgactgactgacgcagagcgagtggattactttgagcacttcctgaaaaagaaacccgttggtaaaattgactcgagaaccattcggattggttgtaacaaagccattgatacaggtacttacacctttacttttgccgataagacaacagtttctgctcgctatacgttcacttacgcctgggatggccgcgactggaaaatatcgtctcatcactcttcagcgatgcctgaatcctga

SEQ ID NO: 161236 - DNA, 312 bp, Enterobacter cloacae
atgtccgttccggttctgtcccactctgacttcagagtggttgtggcctccctttgtggtgcgctggtctgggggttgaatcagcgatactttgaccgtaaaaagcaatcgatagcctttattatctcgtttgttatgggcattctgggagctgatgtgacgcttgaagtggttaaaatgatcgttcctggcattttctctgatgacagggcggttggtgcatttctctgtagtgctttagttatcactctgataaccagcctgattcaccgggtaagtctgctgtggaataatcagaaaaaagaaaaataa

SEQ ID NO: 161237 - DNA, 1029 bp, Enterobacter cloacae
atggcgaataaagttaagttaacttatgacactccagtggccgctgttagcgaaaagattaccctgactgctaaagtgactgatgggtcagatgagccggtaccgaacgcaacgattacatggtccgcatcatcatataatgatgtcgtcacgctgagtaataattcaggcacaactgatgattcaggcgaaaatacaattgttgccgtgtcaacggcaggtgcccaggcaaccataaaggcggctctggatgatggcacttatcaggaggttaaggttggattttcttcggataaattatctgcgcctgatgtcttgcaggcgattgacggagaactcactgcaagccaggctctggatttggtccaggcggaaattaaaagacacagcgacgctcaggcgacagatctatatgtgttttactggggaatcagcaaggcgaagcgagccgacgatctaaaagatgatacttttccatggctgatgaacgttaaaaatactttctccgctaacgatattctggccggaggcatatacaagctctattataccatcacagacccaagcggtaacaccagctattcacccgtgctgacacttaaagtcgaggagggtgcatatattaattcaatctatgatgctccgttgttcccggatctgaaggatgacgttatcaatgaagcagcaatctcaaatgatagtggtgttcgcgtcaaaataaactgccctcaggataacgatcgggcaaaactggtttcgggtgatgttctcagccttaacatgcgggttcatgatgaaaaagatgagcaggttatcgtcgaaacagaaacagtagcgacttataccattacggatgatgatatccaaaaaagctctgttgagttttatttacctaaaaatgcagtcactgacgaaaagaaaacttttgatggagttaacggtttattctggtacaccgtgcagggcgtggaggataacggtaactcatatacaacaaagatatttattgatacagtctcaccaaattga

SEQ ID NO: 161238 - DNA, 1335 bp, Enterobacter cloacae
atgatgcacgatggattatatgacgtcattttgccacaaatggggcagggaaacaaaataagcatgtcgttaatcaaaaagtccggaggtgttgatgttttcgtccctgagtatcatgaccccaaaaatggtgattatattgatatctactgggatggttatatcgataaggttattccgatacatgatgtaagcaaccagtttcccttatatgaccagattgaaaaaaacatctctccgggtacacataccattatgtataccgctacagacaaaagcggtaatacttctgagtccagcaccataactatcagcattacagatgaagaacctgacaacaaatatcccgcaccttcgtttcctgatgctactaatgatgtgatagatgatgagagtatcagcctaaacaatggaacacatatcctgataaatccttattcagatatagtatcaggcgatgcggtcaggctgtacgtaagtctgtatgataacagcgacgtacaggtctggtcaggttatcgggatgagatggtaaacgatgccgatattgttgcaggaataaaagaattaatcaatgcggagacactcgataaggtaagtagtgggaaaatttgtgctcattatcaggttgttaatagtcgtgcaattaaagggatatcagatacagcctgtgccacaatcaaaaatgtcgcacctgctacgggcctgaatattctggttagtactgatgcacctgtctatgatgcgaattcttttatgttgaggccttttaaccgaggggttattaccggaaaacctggcgatgagattaaggtttcagtaggtggtagcgctgtttttgaaagtaatgcgcttcctgaaataacatgcaagctggacaccaccggtgaggctacatttcgtctgagagataaccggccagaagatgttaccgtaaccgccagaaatatgacttcacccaatgagacggtgagcaaagttattacttttgctaattataaaaagggcgatggtaaaattgcgtacattgccaactcaactggtgcaagggcagatgggattatgccatgctcagtatacctgaagatagccgatattgatttcaataataaaaaaaacacagtcacaaaggtcagagtgaatgtgaccggcagtgctttgattgatggttataatgttgctactgccgatattgctttaaacagcgactttaccgctgaaattgacgtcattaacgcagtggcagagaacatttctgcagaattaacactgcctgaatcttccggaaccaatgagaggatcctattgtcgtttgaacagttaagtagtaaataa

SEQ ID NO: 161239 - DNA, 1191 bp, Enterobacter cloacae
atgacttaccagttaaaattaactactacctccagcgctgtggcagatggcacgtccgtgaatacggcgacagccacacttatgcaggataatgtgtatccgtcagggaagagtattgttttcagtatcaccggcagtgcactctttaccaacggtcagcagatgattactggagttaccggagcaaatggggtcgtcagcgtagcatttcacgatctcgtggctgaaaccgtcattattattgctgctttgaaggaagacgcctcggtaacagcaaccgccccctctgttttttcaggggcgccgtcagatgataataaacttaatctgtcggtcatcacaaataatgcaaaagcgaacggggtcgacaagaatcaggttcaggctgtggtgacctcagaaaaaaacctgcagcccgtaccggggattacctgctccttttcggtggccggaggaagcgccgagtttaataacggcagtaaaaactatattggcacgacggatgcaggcggtgtctgcaacgcctatctgatcgatacaacagtagagtcagtcgccgtgacggcatcaattcccgagggtgtaacgcagacccagaccatcacgttttcaggcggtgatgtcctgcgcattacccaagctgcaacactcaccggtaagcctttcaccagtggagcgccgacaaccgcctggattggcgcggagttccagattttattcagtggcggcagtggtgtggttgactggacggtagataatactggtctggcagttcaggatgcatcttcttatgagaaagtcatcctgaagtttgctgaaatagccgaaaccggtatccggtatatggtaactggtacagaccgcaatacaggggaagtggtgacttacagcttcctgcttgaagacttctacgtttcatttggctcaaaagagattctggatatcttatggacgcagggagatacaaaatatctcccttcccccgcacagttacatgatctctatgctgaatggggtagcatgtctgattatgctggctggactgaaaaaacggatgtttactggactaacctctttgacctgacatttgctgcaacggtggttaatatctcaaccaaccaggaagacgtggtcaagatccctgctttacattcgcgcggatatgcaaagttaagtaattccagaagttaa

SEQ ID NO: 161240 - DNA, 1503 bp, Enterobacter cloacae
atgtataaatatctggcagttatgatgctagcctgtaccgtatcggggtgtacaacccccacttcagtggagaaggttcaggccagcaaaaaaaatgcagtgagggcctttgatgaccgctcaacggatgtgaatattaccaactgggtcaccgggccaaccagtgacttagttttggtcgacaaaggtattgacggaggtgaatggaaatcatcaccaccttctgaaatagggtttaactctgcggggaagatgggcacaacatctaacgcctggcttcatggtgcaggtgggtgggtaaagtataaagtaaaaagtgatggtgcaatcctgacgttcacctggtttaatccatatgcaggcagtaacagttataatacctcggcagatcctgatgactattactttacaaaatcaggtagagatggaaataatacttctgtcacatggtatgtcagacgaaaagagcagccgacgccattaactaattactcggcaataataatggcagacccacaaccatggagactggcttctggtggagaccccaattctgacagtcagaatggcagtgaatggcgagagataaatcagaatacgtttaagtcaatactaactcatagtgatgttaagtttcatattaataatggcgacctgagtgagttcggaagaaaatcccagtatgatgattactctaaaatctatcattcttcaggcgtttttgtcaccgaagggttgggcaaccacgattatgccaacaacgtgaaagactgtatggattatgaagcctgggggacatcgaaggatggttgcgctttgagcgcagtagccagggaatacactgccatccagaatataaaaaataatatcgctcagatacccggaacttccttcaggtcagatgcctacagaagggctggggtagtgggtgaaacggttatggaagactacactggcagccttgcttattcatgggatgttggagatgtccattacgttcagttgcagaattatcctacgtatagcgtgtcactgtcagccatttcactgaatctggaggggtcagcaaagataacggactcattaaactggcttgctgatgatttggaaaaagctgacctgcgaggaaagatttctgtaataaacttccatgatgccagaccggcgtcagatgatggtgattcccattttttagataaaaataatttaaccgaactttcccgttttaaatcaataattacatcacatgatgtgaaggcgatatttgtaggtcatactcatcaacagctatattgtcgggcgacagatgatgccgtttttggaaatataccggtctatactgccggagctctttttaaaggggattattacctccttaatgttaaaggaaaggaaatcactgtgaaagcctacaatggaaaaacaggaactcctgaactgatgcaagatctgggtgttataggtagtgacacgagtttttcaagcacatgtagtaagttgtga

SEQ ID NO: 161241 - DNA, 561 bp, Enterobacter cloacae
atgaatgacacctcctctgacgacatccttctgctaaaacagcgcctggccgaacaggaagcgttgatccacgcgctgcaggaaaagcttagcaaccgggagcgtgaaatagaccacctgcaggcgcaactggacaagctgcgccggatgaacttcggtagtcgttccgaaaaggtatcccgccgtatcgcacagatggaagctgacctgaaggcacttcagaaagaaagcgatacgctgacgggtcgggtggatgacccggcagtgcagcgcccgctgcgtcagacccgcacccgcagaccgttccccgaatcacttccccgcgatgaaaaacggttattacccgcagaaccctgctgcccggagtgtggtggcttgctgagttatctgggtgaggataccgccgaacaactggagctgatgcgcagtgccttccgggttatccggactgtacgcgaaaaacacgcctgtactcagtgcgatgccatcgtgcaggccttcgcggcccatcgagcggggtatagcaggaccggggttgctggcccgcgtactgacctctaa

SEQ ID NO: 161242 - DNA, 219 bp, Enterobacter cloacae
atggaacgactgacaagctctatctcagtcgggctattggttacgttcgcagtcaggggatcctcaacggatgttattgtcgaaatgaccatggaactcctgacacagagtattgctgattggatgatcgaagttccgaatgagcgcttaaaaaatacgccgcaaaattttggcgggttcccgcttacaaccccttttagaaaaaccattctatggtga

SEQ ID NO: 161243 - DNA, 501 bp, Enterobacter cloacae
atgtctcgaaaaatcaataacgaatatttcaatcataactacacacacttagaaatccccatcgtcttccaaatttatatggataatctggatgaaccgtgcggagttaaagatctttcctcaacatttgtatatgctaataaggcataccatgacttgctcaacctacccaagggatacaatgtcacaggccgactagatagcgaacttcccgccactacatcagaatacgcttcgatgtttcaggcgcatgaccgtcttgttgagaaaacaggtaaacgtcggagttcactagaaattcacccctttggaagagagcaacagcttaaagcttacttctttgataaaacacctttccctgattcatctggaaaaaccgttgggacttttttccaaggtcgtaaagccgaacatttatctctgcgtttttatacaaaaggagacaaggctgaatccttattacttacgcttccgagcaatatattttcagaaatagagtag

SEQ ID NO: 161244 - DNA, 213 bp, Enterobacter cloacae
atgatgtgtcaggagctgttctggcacatatcggtgccaacctttttctctaataaaatcgataagcattcgcgtattagtaactcccgctttatcatatatcatagcaattatgttttttatatatccttcagaacgattcatttttattgcgatttcttttctgcacaagtgagatcgcaaatagaatataatcatctactctatttctga

SEQ ID NO: 161245 - DNA, 381 bp, Enterobacter cloacae
atgaaaggtttttatgaagaaattggcaacgcggtgtatgaccctattgccggcatccgaattgcccctttgcagaagggaactgcgctgaacagctttggtactcgcatggatgagggagcaaaggttagttgccatgtgcatacgcagggtgacgagtggtattccatgctggatggggaaggcgttatctaccttgccgatctggtcgatggcgaattgaagaataagcggcattatcccgttaaaaaaggagacacattttgcatctccggtaatactgcgcatcaggtgtgtgcaaagacacaactcgattttattttcttatgccctgattcacacctgagcacggacagaattgttttagatgacctctgctaa

SEQ ID NO: 161246 - DNA, 372 bp, Enterobacter cloacae
atggtccctaagcgactaaaagcagcaagaaaagccgcagggctatcacagaaaaagctggctgaactaattgatgtagatggcagcaatcctcgctctcgactatctaattatgaagttggtcggttcacaccttcttttgatgttatcgtccgcatcgcaaaagcactggattatccggaaagctacttctacacaattgatgacgatgtggcagaagctatcctgaaataccatcgggataagaatagcgatgctctcaacccgttttatgacgctcacgatgatgcgcgtaagtacaaggcatcactggatgaagcaaaaaaaatggttgagcgtcttctggagttcatcagtaaatccgcaggttaa

SEQ ID NO: 161247 - DNA, 546 bp, Enterobacter cloacae
atgacccttacggggatcggttcgggcgagagcatgatggatttagaaaaacttaacggacaaaactggtatcttgctcagtacattactggcggcaagaaccgcgaaaaccttttctcctggctttcagatcttgatgtcactccctggactccattaaaagttagctatattcgccgctcggacaagatttgcagttaccgtcggcgaatcgcaccactctttcctggttactttttccttaaggccaatttggccacacagcctgtggacatcatccggcgtcactctgctttttgcagttttgtgatgaacggttcgcagatagcacctctccagccatcagtagtgaccggactgatgaaacttcatccggacccaacgctgaacctgagcgctacagaagaactcgaagcagcctcacaaacgcggctttctgattctcaatatcaatatctgttgaatctggatcaggaaaaccgtccagtctcacgcgttgcgctcctgatgaatctggtatttgagcccggacagcagggattctga

SEQ ID NO: 161248 - DNA, 567 bp, Enterobacter cloacae
gtgtaccccgttgataattctgttccgcacctgctctggtgcattttggtagcactacgaactgctgaagaagactctccatttccctcggaaaaagcccgccggagttttatttctgactggctggatatgggacgcgataaccctaactttcggggcatggcttcagagttcaccaccctacgcgaattgcttgagaagacagataaagccacctgcgtgacggacacgctcgctacgctgcttgaccatgcttatgcggcagaacagtgcgacttttttcgtttcagatccgcgttcaacacgctacttcaacttggctggcagcacacagtctgccgctttccagagaacatcacctccgagctgatgaaccgaaggaaaggagaccgcaggcatctgctgcaattgacccgcactgagaatgcctttcactccgtcggaaatatggttaagccaatcaccttccagcttcttttttccaaaaaggatgaggagcagctcgatgcagaaacgacattcacccggtacagacgatcatataactatcaacctgcacctggttga

SEQ ID NO: 161249 - DNA, 423 bp, Enterobacter cloacae
atgcagaaacgacattcacccggtacagacgatcatataactatcaacctgcacctggttgagagcacgtattacaacagcgcgacgggcaaggtcatcatccaccccaacaccaaacttaatacactgtaccgggtggatggcaaaaccaggcagtacctgcgatcactccaaaaactgtcacgtaaagaatccgcccaggcgctgtatctttatctggctgaactccccagcacattctacagaattggctttgacaggctgcgcgagcggctccagctgtcctctcacctcggtaatcagaacgccatcgtgaagaaagcactgcagcagctgaaagatattggctttctggagtattccgttgaaaaggagaatgacgattacgtcctgaatatcctgaagcggaacccgaaactgtga

SEQ ID NO: 161250 - DNA, 609 bp, Enterobacter cloacae
gtgacgttgacagataaatcaggacatctggcatggtgtgccctggctgcgcttgcgctggccaaacaggacggtagcgtgcagtcaccggcacaagaaaacatttttctcacacgatggcttgctacagcattgaaacaaaaacgcttttcaaaggatgttgcaccagacattgagtggcttttgaagcaagggcgccagctgggagtcagcgctaaactggcgaacaagctaaactatctctggcgttcctgttctggagtgttgacggaacaaaatgatatgttcaggctgacatacgcccttgagatggcaaaggatatgcactggacttatcgtctgctaagtgatcgggaatggtctggccgctatgccgtagttccaaatgctggggtggacggcatttatatgtccaggacaaatttagatgcggcttttgataatgatggccggcaggtaaaccagctgattgcacgtcttacgggtaatgttgcgggagtggagaagcttttcgatcggtgtggctgggcagttgaaccctacacggatggcgctgaaatatttaaattggttgcggccattgaattaccacgggctgagactgtttaa

SEQ ID NO: 161251 - DNA, 5037 bp, Enterobacter cloacae
atgtcatccccttctttttatagcgctgccggcaacttcctcagcgccgtccagggcggcgtcgaccctcgcaccggactgtttaatgttaacctaccgcttgctgacctccggtccggcgacctggcagggcctgcgctgaagctggctctgtgctattccccgctcagtgaccaggacgacggctttgggcgcgggtttgccctcaacctcacacgttatgaccttcttaaacgacgtctttacctctccactggcgagtcgtacccgatcagcagcgcggggactgcgatccggcagcaccagaccctaaacatcctcataaacgaacgcaatggttacatttcccgggtcatccacaaatccggtctggtggaagatcttgtcctatataacacggcagcttacacccgccaattgacgaccgctgatggacggagcatttcttttagatgggactggaaccgcgatggtagaggcgttcgtctttcttcagtagcagagtcttggaacgggcgtaccacgacactttgccgcgcaaactactctgatgacccgaagcaggctgctattttttcagtccttcctgaagatccagtttcaggctacgaaatagtgttttgtgtaaatgacggagttctgcgcagcgtcaccagctacgttactgacccggggctgacctggtcgttcgggtatgacctccagaatcctaaaaacattgaaaagcctgttccccgatatctggtatctatgtcctcgtccgcagggctgaaagaatcggtgacttacccttggagcactggtgcgttttttcccgatgggatcgaccttccccccctgcctcgggtatccacccatattattaatcccgggaacgggcagccgaaggttgaaacgcgatgggaatggacggaggaaaactacctcggcagaggtgtgcccggttttaattcttcccgctggagctctaacgttgacgccatgctgatcagacaagcacccgactatacttatggctctaccgctaatgtttccgggtgcagggtcaaccggcgttataacagttttcaccaacttatcctcgagcatacgctgcgagatgggaaggagttcatagtcaggacggactatttcacccgcccagatgtcactttgaatgagcagccccggaactatcagctcccgatgcagcaggtaaaaacatggagagtgggcaataagcacaaaaacagaataactcgctggaactatgacatcgagggcaacctgattaagcagtggtctccggatgggacggttacggaatacacctggtatcacccgcatggtgagggtgaggactgcccggccgacccacacggcttcaggcgttacctgaagagcaaaaaggtcataccgcggcgcattcagagtgacgaggtcaacacccatacccggcactactggaaaaagctcagcagcctgtcgggggacggctacgtcgtcctcccggaccgggaggtgcaaactaccgtgctcccggttcgtgatcataagcatggcggcataaagcgtctcaggtctgggagcagccatacgtaccacgacgacaggcagaatatgctgacgtacgggcgggaaaaacagcgcaccaccacgtactggccggacgttgcgaatcgcccggatgaatcttacacccaggtgcaggactttagttacgcatctttggcggagggtttcagtcagactgaagctctcaccacccacgataattttatcctgacgcgctccaccctgcggcactcagttctggggtacttgctctctgacacagacgcgcagggcgtggtgacaaaatacacctgggacaaggcagggcggatgctgacccggactcacgcagtgggcacgacctttgagacaaccttcacccgaagctatgccgtcgagggcactggactggtgactaccgacactgatccgcggggcaatcagacgaaaatcttttatgatggcgtcggacgagaggtgacccggcagcagctggacctcgacgggccgccggacaaggacggtaaaaaacagtggtacgaagtgtcttttcaggggtttaatatctttggtgaggttgagcttactaccaatcgggattggctgacgctccctgataagaatatagaacgttttgttattaactccactatatatcgtgatggtttcggtaaccctagcaggcagattttctcagacggtgtgaccgtgacggacaacactgatcttgtggccctgacccgaaccgtgacgtcctcgggcggagggatgacgtcggccacccggaagaccgagctggccccgcacctgcgcctgccgatgaaggagacgctgtccggcggtggacttaattccgtgcggaaatacaaatgggacgggcaccaccggctgcgcgagatgacggacgaaaacggcggcgtcaccacgtatacctgggatgacgcgggccgtctgctgatgcagacgctgcccgacggcacggtggtgacccgcacctgggcacgccacctgagcggggagtgcctgaccagtatcagcgtgaccggcaacgacggccagggaaaggcaaaaacctggaacctcggcacgcagatgttcgacggtctgggtcggctgacctcgtcggagagtggggggcgatacctgcagtacctttatgatggcgtctcgccggtgccgaagtccgtcatgaccgcgtcgggcacgctcatcagatacaccagggcggtaccgctggacaacgccctgacggcgctgagcgccagcccagggatggggtcgcaagccgtgcccgttgaacaggctttcactcgcgacccgctgactggcagtctgctgacggcgacggagggcagcacggtgacggaaaatatcctgttcccgtccggactgctgaaaggtgaacgattcacgtctgccgccactggtgtccgcgaggcgggctttacccgcacgcttggcggggcgatgaacgggtacacggacccggtcggcaaaaagatgaccctgacgcgggacgccttcgggcggatgaccggaactgtagatgacgacctgaccgcggacctggagtacgatccgctggggcgtgtggcatcatacaccacgacggatccggtgacgaaggtcacgcttaccacgacgctagcgtacgatgccctgggccgggagatgacccgcaccgtaaccgacagtcacggaaaggcaatgatgcagagcctcacctggttcccgaacggtcagctcagacagcgggtcacccgggctgaaggacaggacgttctgacggaaaaattcacctacgatgcccgcaatcgcctgacggactacacggcggcggggagtatgctgcctctggacggctatggtcaggtgataacggcacagagctacgtagttgacgccctcaataatctgatcagcgtcaccaccactctgaaggatggcgatgaggacgtggcgacgtatcactacaaaaacgtatatgacccgatgcagctgacgtcggtggagcatacccataaagcttacccgacaaaagtcacgctgaactatgatgcggacgggcggatgacgcaggatgagacggggcgaacaagggactatgacgccgctggtcgtctggtcagtgtaagtggtagcaccggaagtaaatacagctacgatgccctgaaccgtatggtgttccagatgttgagcggcgggcacagccggaccctgtattatcgggggagggagcaggtgtgcgagctgaagaccgcactgaataaaatcacccggctgattaaaagcgggcacacctgttacggggcaagcgacggcagcggcgtgacgctgacggcggcggaccggcacggcagcctgctgctgtccctgaaggccggagagggcggcgggacaactcacgtctggtcaccgtacggcgggggcgaggtggtggacgggctgccgggctttaacggtgagcgtccggacccgctcaccggaaactatcatttaggcaacgggtaccgggcctggagcccgcgactgatgcgcttcacgtgccctgatagcctgagtccgttcggggcggggggggggaacccgtacgcctactgtgccggagacccggtgaacctgactgacccgacgggacacatcagctggcagggctggctgggtatcggtctgggcattctgggactgggtgccatggcatttacggccgggctgtctatagctgcagcgggtgggcttatggcggccatggccacggcttcaccattagtagtgggagtgggcacactgggtgtgctgtcggacgtgacggccatcgcgagcggagtgctggaagaggtgaatcctcagggatcgctcatactgggctgggtgtctttgggagctggtttggcgggtatcggtttggttggagtaaatgccttaagatccaaatttgtgattcgccgggagatgaaaattgaatcgccgagggttctgggaacagaaaatttccattttaatccaaatgggccatcacagggagtccacgtaacttatacagcaattgatgtagatagtggtatccctcgactaaacattgtcgctcatggtcaacccggtagagtattatttcatcgcgaaacctggatgaatgccgatcaactttatcagaggctggcccacgagggggtaatgcgtgatcgattttatcagattcgaatgttgacttgccacagcgctgatgctccgcctgggggggttagcgtggcggcacgtatggcacagttaactggactacccgtagaagggtatcatggcaccatggttatgaatgaaatgtttgagattccatttctgcatcatatgttcggattacaacactatgtcaacactgcctatgtcagaggggggcgggctgaagcaacagcactaatgcatcattatcgtgctgtaatatcaattgggcccgataattccgcgaataacatacctgaaacatttttatcaatacctgggacttaa

SEQ ID NO: 161252 - DNA, 447 bp, Enterobacter cloacae
atgagctttgtggacaacattaaatacgtcagacagctgagcgtgatggatgaattcggcgggctgggtgaggccgcaaaaatcagtcgcttttacgtggtcttccggatcacggacaatgagggtaaggacatgcgggtgagcgaggccgacgtgatggccgccatcgaggaaaaaaacatcctgattgccgactgggccgggctgaataactaccccctgtccccggacgcggcaaacccggacggctgtcactttattttcagcgggtgccggtaccgggacagtgtcaatatcctcaggattgccctctccggagactacagggaaaatgccggcctcagcgtcaggtttgtggacggtgagacggagctgacgtcatcctgttatctgtcccccttcccgtcagccgtcttcattaacaggcactccgcaggtcagcaatga

SEQ ID NO: 161253 - DNA, 420 bp, Enterobacter cloacae
atgagctttattgattcggtaaaacatatagaacgattcgccgtcattgatgaatttggaggaaggggaaatccggagaaaatcagtcatttttatattgtactgcgcatactggatgataacggagagcccgctgaaatcaccttcggtgatattaaagacgccgtcaaaaaagagcagctcgtgctgaccgactacgtgggatttactgatatccccctcggactggataaaagcagcccgttcatggttaaagacgcgaaatattataaaagcaataattttatctatgtggaccccgtgacgttccgcggggatatcagcgtatgcgccaaaatcaaagaaaaaaaggacggcgacctgattgcctccacctgctaccagtcagactttccatctgcattttacctctcgaaataa

SEQ ID NO: 161254 - DNA, 228 bp, Enterobacter cloacae
ttgatctgggagtttggtattctgctaaattctcagtgttactatccgatactgcgagccacttatcacctgctaatcttattttttattcaggtacgctcgatggcgaaaattctggaggtaaagtttatttcaggaatatatcaattactcaactccagccagaaagagtcgttacttttgaaaatgactcttgggagtctctatatgaaaagaatagtgatttaa

SEQ ID NO: 161255 - DNA, 312 bp, Enterobacter cloacae
atgatgtccgttccggttctgtcccactcagacttcagcgtggttgtggcctccctgtgcggtgcactggtatgggggctgaaccagcgatattttgaccgtaaaaagcaatcagtggcctttattatctcgtttgttatggggattctgggggctgatgtgacgcttgaagtcgttaaaataatcgttcccgggattttctctgatgacagggcggtcggtgcatttttatgcagtgcattgatcattacttttatcacaaaattaatgtccagaattaatgcgattaaaaaggttaagaaagaagaataa

SEQ ID NO: 161256 - DNA, 396 bp, Enterobacter cloacae
atgtacatcccccgccccgccaaactcctcttcaccgtcgatgacggctggaaccactacctcgaaaaacacggcgacaacatcagccagtggacccgtctctccgttgagcgcatgctcgcctgtggcacctgcgccatgggcgtccgccgctactgctgcagttcgccggactgcacacactcccgtttcttctgccagagctgcaagtcaaaggcctgcagcgcctgcggcatgaagtccaccgagcagtggatcgcggagcaacagcacgtcctccccgactgcgaatggcagcacatcacctttaccatgccacacctgctgtggcccttcttcaacgacaactggccctgctcaacgacctgttccgctgcgccacccgcgccatgctga

SEQ ID NO: 161257 - DNA, 834 bp, Enterobacter cloacae
atgctgaagtgggcacgccggcagggtattgaggtcggtatcttctgtgccctgcatacttacggccgccaacttaatcagcacccgcacatccacgtttccgtcacccgcggtgggcttgacgttaagcacggcgtctggcgcagccttttcttcaaaaagaaggccgttgaggaaatctggcggggggccgttacccgtctgctgcgcggcagctatgagcgggtcagtcccggccccctgccgggcctgggccacgtccgcgatgagcgccagtggcggcgttacctgaaggcacagtatggccggcgctggaaggtacacttcgcgaagaaaacccggggaacctggcacagcgtgaaatacctcgaccgctacctgaagcgcccgccggtgtcggcttcccgcctgcgacactacgccggtggagcggtggtacactattacctcgatcaccgcacgggaaagcataaacgcctgacgctgagtcaggaagatatgatcgggcgctatatcagccacgttccggcccggcattttaaaatggtgcgctactccggctttctggctaaccgcaagcggggcacgctgctgccgaaggtttacgaagcgctggaaatgacggtacgggaaaaaccaaaacgccccgggttcgcggtgctgatgaagggcttgctgggtacggatccgtaccagtgcatcctctgcaaaggccggctgcgttttgccggcgccgtggcaggtgagcacgccacaaaaatgctctctgacaggctgcatcagaaggcgaaaaaacgatggctgcggatgcctgagttggatcggtgcgcctga

SEQ ID NO: 161258 - DNA, 4983 bp, Enterobacter cloacae
atgccaacaccttcattttatacccaggcgggtaattttttaaacacggtacagggaggtgttgatccgcgaaccggactgtttaacatcagcctgcctctggcaagtctgcattccggcagcctggctgaccctgcttttgcgctgtcactgcaatattcccccctctccgtacagaatgaagggttcgggcgtggtttttcccttaatctgacccgatatgataaaaccaccggccggctggtactgtccaccggggaagtttaccgcatgagcagcagtggcgactctgtcaggcagaaaaaactccggaattttctttataaaaaaacggatgaccgtaactgcgtcgtcattcacaagtcaggtctgactgaaaatctgtccctgtatgactctgtttacgtgccagtccttatcaccacgccggaggggcgcagcctgaagctgacgtggggaagtacatacaacccggtgcgcctcctgaaggtagaggacgataccggcgtggtactttgttcagtgagttaccccgatgcatcggtagccagtacctcattcaggctgctgcccggtgatgacagctacggttacgatatttcattcctgttcacccgggcattactgaccagcgtagccagtaacgctgacgggatatggcgggaatggtcgttcagttatgatgatgtcggaccgggtaaaaaataccgtgtcattaccggcctgaccacgccattgggcatgcaggaaacggtggcatattacgcagaaaaagggatgaactttcccgatgtggccgggctgccccctctgccctgcgtggccacgcacacactcagtccgggcggcgggcagcctgaaggcatcacacagtgggaatggacgcaaaaaaactacctgggtaaggatgcgggactgaaccagtggcagccggacacggatgcgatgctgaatatactgctcagtgattacgtttacggctccaccgagaaaaggatggataaggatggcacgaccgtgctgtgtgaggtgacgcatcgttataacagctatcacctgctggtttccgaaagcaccctacgcgccggcaagacctgtacggagacaacacagtattatgcaatacctggtgccaccttcgacgaacagccggaacagtatgccctgccaaaaatgaagacggagttctggcggaatgataacagcacgccgcccagaatccgtaagactgcctggcagttcgataaagcggggaacttgctgcggcaggtcgcgccgaacggtaccattacggagtatatttattaccccctgcagggggaagataaaggttgcccggctgatccgcatggtttcactcgctacctgaaatgtaaaaccgccacgccccctccagtgaaaggggatgaagtcccggttgtcacggcgtattcctggcaaaagctcgacagtcttaccggtgggggctatgccgtgatacctgcccgggtgaaggaaacgaccggaaatgtccagattgttgttgaacgcacgtattacggcgacaaaaatgacgtgctgacgtacggtcgggaaaaggagcgcacggtcacgctgtttcctgatataacagatgacccgaaaacgtcttttatccggaagcaggcctaccggtacgagtcccgggcagacggcttttttcagtcagaaacactgaccacgcacgatagtatcagtgtgacccgttccacattgcgacatccgactctgggccacctgctgtcagaaaccgatgctcaggatgtaacggtcacacacacctatgacaaaatcggtcgcccgctgacccggacggtggtgccaggaaccccgtatgaacaaataaccagatggtcataccgtatcgatcccactggcccggtaaccacagagactgatccggccggaaaccagacctgcactggctttgacggccggtgccgcaggatactgcagcaacgcctggataatgatcttacgcagacaatgtatgagactgccacatggtcttacactcccctcggagaagctgacgccagtagtggcactgactggctgacactgaatcgtgaaaaattcagtgtaacaatgaccgccagccgtgatggctggggaagcatcagtgagctggccacttctgatggcataaagactttgcaggtgaccgaccctgtggcactgaccacctctgcttatactcagggagaggggaatggaaaagaactccgtacgggaacgtttacatccgtgctggatgaacgaggcctcctgcccaaaagcgatatcaggacagacattaatgcgcagacatcctgcatacgatcatatcagtgggacggtttcggccgcctgcggcagttaactgatgagatgaatcacagtacggcgtggacatatgatgctcacggccgtgtactgactcagaccttgcctgatggcaccatcattgagcgaacatacgcccctcatctgaccggacaaaaagtagcaagtatttgcgtaaagacaaaacaggatggtagtagtaacaacaaagtgtggcaactgggttctcaggagtttgatggtttaggcagactggtaaaacaggttagctgtgggcggacgacatcatatacctacgacggcccttccctggtgccttcagctgtgacacaaccctcggggaataaacttgagtttgagtatatccgtgagctcgggaatgccgtcagcaaaataacgtcaggaaacgtgacgcagacatttgcgtatcatgcagcgacaggggcgctggtcagtgcggaagaaaatggcgtcaaaattcagagaacacggtatccctctggccgcctgaaaaaagaaaccagcacgcaggctgaatctgtatttgacgccgattactggtacacgctgtcaggggcgaccgaccgtgtcagggatattggcaaaaaaacaacgaggtatacacgggatgcatccggacgaatcacgacgattactgatgatgcgctgaccgtcagcctgaaatacgacctgctggggcggttgagcgagcaggaaactactgacgttaaaacgcaggccacgctcacgattgggctggcttatgatgatttcagccgggaaatcagtcgcataatcagcgacagcacgggcagtaacattaccctttcccagacgtggcagaaaaataacctgctggcaacccgtattacccggaaggacggtgtgcagatacgtaaggagacgtttgcctatgatccccgcaaccggctgacagaatataccgtgagcgggagcagtctgcctgtggatgcatacggccatcagatgaccgcgcaaaaatatcagtacgatgcgctgaacaacctgacgacggtaattacgaccctgaacatcgaggctgccaatattgatgttgcaacttatcactatgatcatactgatgatcctatgcaactgacgtcggtgaagcactccctgactacagtttatccggcaaaaatcgcgctggaatatgatgctgacggccgagtgaccaaggacgagtcaggcagaaagcgacattatgatacgtcaggacggctggtcagcatcgatgacagttaccgctacggctatgatgccttcaaccgactggtcagccagacggtcggcgatacagacactcgtcagctgtactaccggtcagatcggttggtaaacgaagtgcggacagcgcaacagaagcagaagatcacccggctgattggtgacgggtatatctgtctgggcgtgagcaacggagacggcctgacgctgacggcgggtgaccatcacggcagcctgcagtggtcccgtgacacccgggagaatgcgggcacagcgcacgtctggtcgccattcggtggaggaaagccctccggggtgctaccggcgtttaacggagagcgggccgaaccggtcaccggaaactacctcctgggtaacgggtaccgggcttacagccctgccctgatgcgcttcaccagcccggacagcctgagtccgttcggcgctggcgggatcaacccctatgcgtactgtgcgggtgatccagtcaacctcactgacccgtccgggcatatcagctggcaggctataacaggtatcgtactgggtgttgtcggaataggcctggcgctggtgacgggcggaatgtcggtaatggctgccggatgtatcggagcggctgtcgatgctgcgtccaccaccaccatagttgtgggcggactcggcctggtggcagatgtgacaggaatagcgagcggggcagtggaagaccgcaacccggaggcctcacgcattctgggctgggtgtccatggcgaccgggcttgcatcactgacgactggcattggtgcgggaattatgaaggcttccacaaaaaatatgcaatttaaccgtattcagagtataggaaacgaaggtgaaactatggtgatagattcacctcaggtactgggcggacatgcatttgcagggcagacctcaccaggagatcttgtgtttacagctgttgatatggatagcggaattcggcgtttaaacatttcagcgcatggcaaacccggatttgtggaaatcaatcatgggattacagcaaacgcagaggatctttataatgtgcttaaagacagaggtattttggatcaaagctttgatgagatccgaatgctcacttgtcatagtgcagatctaagtaatgagggtaatattattgcacagcaattatcccgattaaccggaaaacccgttgaaggatattttggaaaaataactgcaatattaagtatggattatggctcgggggtaactataccggctcgacatatgttaaatgatgcatatatacgaggcggcgcacagggggtaagtgacttcatggcagcaaacagtcaatatttaataataggtccatcaccttatgtaagcactaatttttcgcacaagttttatccataa

SEQ ID NO: 161259 - DNA, 1119 bp, Enterobacter cloacae
gtgagcgctaattctgaagaattactgtatgattcacctgaaaatattactagtgttgatttaaccatccgggctgcatcgggtaatataagtcctgtcatttatgccaatggccgtaatcagcttcctgtggaaatccttgctaaggccatgaagctggttcctggaaccatgcagaatatagtgcttaaattttcgcaggaaacctggcttcatattcttaacctgcgtcatgctgaatccgatgaaaaactcacctggcagggcagtacgggatggtgttatacccacaccgcaaatgattattctcgagaggtgataatatccggcagcgtgaatgaatcacgttatatggagcccggcgatgaactcatgactttttttgtttatacggataacacggacataaagcgtattgccgtcagcattgacaccgatggtggcaaacattttaccacggcggataatgcctccggggcagaaaaaagttcagtttcggtgcgggctgtgccaccacagatatatcgggtagccgacttattacaggataaggtgaccaatctggggaaaactcaggtttcgggtcattacgccaataacgatgttaaatgggcgcagaaaattgatgcgtattataacaattattatttttcagtaaacagaataataaagaactatactgttggttatgatgaaatagtagattaccgctgccctgaacgctgtgatatatactggagggatggcaatcatgatcagcatatattgatagaaaacccttcggacatacaaaacggaacagccaccctgggcttttatggcaaggcggtatggcacgaaactttggatgccttcgattccacagcaacttacgatctttttcagacatttaaatacaacgaccgtccagccacggtctgctggacgcagcttgtttttttggcttcccaacactggatcccccctgatgatatggatctgaatgttaatggttttgaccacctccatgcttttgataagcaaccctggtttcaattctacgatctgtacggtaattatggagcattcaacatacggtataattccgcctctaaaatgttagaagtagaccagcgataa

SEQ ID NO: 161260 - DNA, 486 bp, Enterobacter cloacae
atgagttttgtggataccgtaaaatacgtgcgccagctcagcgtggtggatgaatttggtggccgcggtgatgcagataacatcagtaaattctacattgtcttccgggcaacggatgacagcggtaatgagctgcaggtcagcccggaggatgttgaggaggccctgatggaggccgagccggatattatcctgagtgattacattggtaaggaggtatggcatattgccatgctggacaacgacgccacctgctactttaagcttgccggggttgatttcagggataatgtcaacatcatcaccattgaattaaaaaagaatttttacacggatgacaaaataaaaagcacgtccatctgcgtgaagtttttgcaggatgtaaaaaatgatgacggcagcacgaaaaaggctgagctggtctccagctgttatctgtcagactttccgtcaaccttttatctgaaaaagaaaaacaacggctga

SEQ ID NO: 161261 - DNA, 1266 bp, Enterobacter cloacae
atggacatgcacaactgggacatggtctgtgccgtcgcctgcagccggctcaatgacaggctgaaggcggaggttcacaaaaaccttgggacgttcagcttttctgacccggccggtaaccagatttccggcgagtttggcggctgggaaatcgtgccgggcggggatgcgcagcggattaaccttctcacgccagtatcagccggcacgctgatgtctcccgatttgggaggagaggttatctccgttgacgggctgtgcccgaagctgcaggtggagctggcctttgtcagcgcgggtaacggtaatgacgacacgcacctgaccttcagcctgctgagggtgtgtcaggcagatgaggtgaaagccggtgagggcgccgtggtggtgcttgatgcggataccacacaacgtttcccgcatccgctcatccctggcgtgttctgtgagatgctggcgcagatgctggttgcccgccgggatgacatcgggttcttttttgccgaactgctggcaccggacggggacagcgcctggatgaggctgcatcagcttaattacgcgtacagtgagaatatccgcggggaggatggcgcgctggccgtgcttggtatccttgccgacaatccgtcgccgccgtcgcccgaaaatttgcagctggtgtttgattcgtccctcattcgcgacggcggtacctgcggtttcatggtttcgcaggcggcgttcatgcgtcacgtggtgctcccggccctgccgtcagtatttgaaggggcgtcgaccgggcagttctcggcgggtgatgatggcgtgatacataacaatggcgccatcgccctggatgactttcgcgggtacacgccgtacttcaccagccttgacgtgcaggtcgtggacgaccggctggtcttcagcaacgccgccggacggtgtgacgtggtgtacaacagtagctgggtgagctttaacctgtcgggctctttctccacgtccttaacccgcgacagcagctattaccgcattggtatcgacgctgttaccgggccggcgttcagcattgaaaaacacgatgccgccgcgctcgccatgtggatttttggcggctgggtggtggatgctctgctggaaggcattaaaagtcacatgaacagcttcctctggagctttagaaaccacgaggtgaaatttgacgtcctgcccgtcagtttcagcaccggcagcgcttataccgcctgtgggctggcggaaaatttctggatgcgggactga

SEQ ID NO: 161262 - DNA, 1626 bp, Enterobacter cloacae
atgagcgatatttcaaccaataactgggacgtggtcaatattactgaccttgaaaccctgaataaaatcattagcaatacacaggatggcagagcttacccggataagttcgaaggtcaggatgtaaacgatgacctcaatctgaatatcagcatgatcggttcatggggaggctggacggtaaccagtgacgccagcggggcgaaggtcaatatgaggtgtgatattacagaaggcagctttgtagttaacgaccacagctatgattttaatgatggtgataaccactcatacattgatattgagctttccctgaccggcatgtccgccagcccggcggattacgtccgcccaggcgataccgtcacggctgacacgcgctgttatcggcttatggtcgaccccgacagtccggtaactatagaggatgtggtatgcactaacaccaaaattaatgaagacacgtttctcagggggttactgggaacgctcatgggggagtggtttaacaataatatcggtgagattaaacacgttttctccgtaatccttattggcctgcaggctgaaaatacagattttcagtggatgtatccttctgcatacagctatgccgccagcagctccatcgataagaaaacggcaggcttcggggccctgactctggtcgacgacagaacaaataccggcgcgctgtcacagaatattgatgtcacggctcttgagctggtgaagcctcacggcgctaatctggcgctgattatcagcaagaccatgtttgtgaaacatattctgatgaaggcagccgtcgacatggtggatggctcaactgaagccgattttactgtcagtgaaacagggctgtccctgtcaaataaccgggagatggtctggcaggatttcgatgatggccagggaggaacctattctccggtgttacctgaggggggactggtccttactcttgagtctgactttattcacctgtccattaacggcgctcaccaccggcacggagggatgtgtaccgtttatatgggggttgaacagaatttccgttacaaggtggaaaagaatgcccaggggcagcccgtcttcgttcccgatgaggaaaaaacaggggcgggtgatgcccatgtctcctgctcggttgtgtttgatgagtgggtaaatgctctggaacttgccacaggcattttagcctccattgcgacagtttttgcgcttgggacgggaatggcgggtgccatcgcggagggtactgcgctggcagccgatgaggctgaatctacggtgacattttcctttaaaatatggaagttcgccttcaaccttgaaaagcttgcgcctatggctgttgccattcagaacggagtaagggcctgtccgacagtgtttaacgtggtaaaaattgcgtcccgcgtcggctttttcgtcacgggtggcgtcatggctggcgcggtgatagccaaatatatttacgagaaagattacagtgatattccgtcttttcaccacctggccgacatcatcaccggctccagcgtctggccgggcattgcgcataccgaacttaaatccgccaccctcgccgacagctttgttatcggcctcgaaatgaaatag

SEQ ID NO: 161263 - DNA, 2040 bp, Enterobacter cloacae
atgaaaatcagtgagcacggacttaatctgattaaacacctggaaggattacgtctgcaggcgtatcagtgttctgcgggagtatggactattggctacgggcataccagtggtgtacgccccggagatatcattgatgaagcgcaggccggtatctttctgcgccgggacgttgctgcgtcggaaagcaccgttatgcgcttcgtgacggttgcactgaatcagcatcagtttgatgctctggtctcgtttgtcttcaatctcggtagcggtaactttgcagcctcgacactgctgaaaaagctcaacgccggcgattatgccggggcggctgatgaactccagcgctggattcatgcaggcggaaaatcccttcctggtctggccagacgcaggaaggcagagcggacgctttttctgaatgatcccactccagctgtttccacaggtggctgggacgttatcagtatcactgaccttggtgcgcttaaccatgtgattaataactccagtgcaggccggttgtacccggattctttctctgtagattccggtgatgattcagagaaaatcagtgtcacaggaacatggggggcctggaatgtcaccagaaatgccagcggggcaaaggttaatatctgctgtgacataagtgagggtacggttacgtccggcggaaacacttatcccctttgtgccggcagtgaccctgcatacgtggaaattgagctttcactggctagtatttccaccgatcccgcacaatgggccagacgtcatgagatcatcaccactgacacgcgcggtttccagctcatggttgatgctgacagtcccgtggtagtgaacgcctcagcctttccgggtctccctgaagggctgcttaaacggttgttacctgcagtgatggaaatatggttcagggacaacctccctgaatttaagcagatttttgccgttatccttgttggactgcaggctgaaaacacagattttcagtggctgtatccttctgcatacagctatgctgccagcagctccatcgataaaaaaacggcaggcttcgggatactgactctggtcgacggcaggacggataccggcgcgctgtcacagtatattgatgtcacggctcttgagctggtgaagcctcacggcgcaaatctggcgctggtcatcagcaaggccatgtttgtgaaacatattctgaagaagattgccacacgtctggtaaaagattccaccgaggaggatttcactgtcagtgaaacagggttgtccctgtcaaataaccgggagatggtctggcaggatttcgatgatagccagggcaatgccatgtcaccggttttgcctgaaaacagccttgttctggatctgcaatctgactgtgttcatctttatatctccggtgcgcacttccgtccgaacagcaagtgcgaggttttcatgaatcttgagcagacattccggttccggcaggaaaaaaatgccgggggggagcccgtgcttgttccggatgaaagtggaataggcaattttaacatgaccttttcagtcaggatcaatgactgggtaaattatctggaactgtctctgggcgttattacgctggtgtgcaatctgaccggactaggcatgtcagtgtacggtgctttatttacttcggctgaaagaagcatggtccctgaggccgtgaatgagttagtcggcttttccttccgtcatacagattggacgcctgacccggatgatatcttaatgatgaccgctgaaattgataagggcgcaacctctgcccctacgcttttcaatattctcaatgtgatgacagtattaactgaaactatctgcggaacagcgctggaagcaataatattcgaagatgcattctgccagggaaaatatgataacttcccttcttttcggccgtttacagaaaatatagctgattctgtgatctggccagatagcgtcagtgccgaacccatatcgattctgctcgctgacgcccttgttattgggatgattttaaaataa

SEQ ID NO: 161264 - DNA, 315 bp, Enterobacter cloacae
atgatactcgttccggttctgtaccactctgacctaaaggtggttgtggcctccctttgcggtgcgctggtatgggggctgaaccagcgatattttgaccgtaaaaaacaatcagtggcctttgttatctcttttgttatgggtattctgggagctgatgtgacgcttgacgtggttaatataatgttccccggatttttctctgatgaacgggcgattggtgcatttctctgtagtgccttagttatcaccctgataaccagtctgattcatcgggtaagtcttctgcagaataatcaggaaaaagaaaaataa

SEQ ID NO: 161265 - DNA, 423 bp, Enterobacter cloacae
atgagcttcattgactcagtgaaatacattgaacggtttgccgtcaccgacgaatttggcggaaggggaaaatcgaaaaagataagctgcttctatatcgtactgcgcgtcaccgacgagagcggagagcccatcgaaatcaccctgggggatattcaggacgccgtcagaaataagcagctcgtgctgaccgactacgtggggtttactgacattccactggggctggcggacgacagcctgtttaaggtcacagacgcaaagtattataaagagaacaactttatttacgtgaagccggtgaaatacacaggagacatcagcgtctgcgtaaagattcaggaaaaaaaggatggcgaccttattgcctccacctgctatctctcagactttccgtccacgttttatctttcgaggtcatag

SEQ ID NO: 161266 - DNA, 447 bp, Enterobacter cloacae
atgagctttgtggacaacatcagatacgtcaggcagctgagcgtggtggatgaattcggtggtcttggcgaccccgggaaggtcagcttcttctgcgtggtcttccgcgccaccgataacgatggccaggatatccgggtaaatgaagccgacgtggtggctgccattaaggaaaaggatatcgtgatggtcgactggaccggcctgaataactattctctggccccggatgccgcaaacccggacggctgccactttgttttcagcggatgccggtaccgggacaacgtcaatcttctcagggtgaccctcgccggagactacccggaaaatgccggcatctgcgtcaggtttatggacggcgacacggagataacctcatcctgctatctgtccccgtatccgtcggccgtattcattcaaaaccatcctgccggtcagcaatag

SEQ ID NO: 161267 - DNA, 4884 bp, Enterobacter cloacae
atgtcatcctcctcattttataccaccgccggcaactttctcagcgccgttcagggcggcgttgacccacggacggggttgtttaccgttaacctgccgctcgctaacctccgctccggcgacctggccgggcccggtttgaatctggctctgcgctattccccggtcagcagccaggacgacggcttcggccgcggcttcgccctcaaccttacccgctatgacataaaaaaaaggcgcctgtacctctccaccggtgagtcctacagcatcagcgaaagcggtaaagacgtccggcagggcaagttcaggcacttcacctttgaaacacagggcggcgtcatctctcaggttgtgcacaagtccggcctggtggagaccctggcccggtttggcgcggtggcgtacacaaccatgataaccgaccccgcggggcgggcgctgtatctccggtgggaccggcaaaatgagatgtcccgcctggccgaaatctttgagcttcaggacggggtgaggcgcagcactctgctgagcattgcctatccgccaggtaacgcagcggagccagtcacgaccgtcaggctcgctgacgcgggctatgatattgatttcacacagcacgacggcgtcctgcgcagcatgaccagccatgccacagacccggagtcgacctggacgttcgggtatgattacgcccatccctggtacaataaaaagcgtgagccccgctatctggcctccatcacctcgccctcagggctggaggagtcggtggagtatccctgggtgaaaggtgcggcctttcccgacggggtcggcctggcgtttctgccccaggtatccgtgcataccgttaagcccggcaacggacagccggtgattaaaacgaagtggacatggaccgaggagaactatctgggcagaaatgctccgggccgggatttctcccgctggacgccggataccgacctgttgctggacgtgctggcgcgcgggtacacctacggctcggaagcgcggctgatggatgacgcgggcaaccgggtgctcagaacggttttccggcgctacagtcattttcaccagctgctgtccgaacgcacgctgcaggacggtaaagagcacacggtcgccacgcaataccatggtcagtccggcgcgatgatggccgggtattccctgcagtccctgcttcctttacagcagacagaaacctggacctcgggcgggaaatcgcgccagcgggtcacccgctggcagtatgacggggccggaaacctgattaaggagtgggccccggacaggacgattaccgagtacacttactaccacgcagacggtgagggcgaggagtgcccggccgacccgcacggttttaaacgttacctgaagcgcaaaaaggtcaggccgcgacgcattcagggcgacgaggtcaacacctatacccggcattactggaaaaagcttgattccctgcaggaagaggggtacttcgtggtacctgatcgcgaggtcgaaaccactgtgcttccctcaggagacccgacaaaaaaagacgttcagcgcatcaggacgcaggtcagccatacgtatttcagtgaccggaaagtcctgctgacatacggccgtgaaaaacagcgcaccaccacgtactggccggacgttgcgaatgagcccggtgagtcgtacacgcagacgcaaaattttgtttacgtaactgcgcaggaaggattctggcaggacgaaacgctgaccacccacgataacatcagcctgacgcgctcgaccctgcggcatccggtgctgggccatctgctcagggaaaaagacgcgcaggatgtggtgacagcttacacttgggataaggccggccggatgctgacccggacgctggcgcagggcacgccttttgagagaacctcatcctgcagctacgtcatgacagaaaccggtctggtggtcaccgccactgacccgaagggcaatcaggtgaagagcttttatgacggggcgggacgggaagtcactcggcagcagcgggatacggacggtacaaaagaatggtacacggtgttctcacaggtgttcagcgtgacggggcagccccgcaccagccagacgcgcgactggctgacggataccgcaaaggactatacgctcagaaccacatcggattatgacggcttcggtaacctcagcagacaggccacctccgacggcgtgattgtgacggatatcaccgacccggttgccctgacccggaccgttcagtctgccagtggcggcgtgagttcggccacgcggtataccgaactggctccgcttttgcgtctgcctcagaaggaggtgctgcgcggcggcagcggggaggcggtgcgaaaataccagtgggacggccaccaccggctgcgccggatgaccgacgagaacggcggggtgaccacgtacacctgggatgacgcgggccggctgctgacgcagacgctgcctgacggcacggtgataacccgcacctgggcgcggcacctgagtggggagtgtctcacgggcatcagcgtgaccggcaacgacggccagggaaaggcaaaaacctggaacctcggcacgcaggccttcgacggtccgggccggctgacctcatcggagaacggaggcagaaatcagcggtatcgttacgacggcatctctccggtgccggagtccgtcacgaacacgtcgggcagcatcatcacatacacccggacggcccccctggacaacgccctggcggcgctgagcgccagcccggggacggggtcgccggccgcgccggttgagcaggcctttacccgggacccgctgaccggcagcctgctgacggccacagaagataagaaggtgataacgaatacgccgttcccgtccgggcagctgaaaaccgaacggttcaccctgcccggcaccggtgagcgggaagccagctatgcctgcacgctcggcggggcgatgagcgggtacacggacccggccgggaaaaagatgtctctggtgcgggacgctttcggccggatgacccggacgaaagacgatgctctgacaacggacgtgacgtacgacccactggggcgggtgaagtcatacaccacaacggacccggcgaccggggtaacgcttaccacggcgctgacgtacaacgccctgggccaggaggctacccgcacggccaccggaagcaacggcgaggcgatgatgcagagcctcacctggtttccgaacggtcagctcagacagcgggtcacccgggcagataccgtgctgacggaaaccttcacgtacgatgcccgcagccgcctgacggactacacggcggcggggagcctgctgccggcggacggctacggccaggtgataacggcacagcgctatacctttgacgccctgaataacctgattaacgtcaccaccaccctgaaagatggcgacaaggatgtggcgacgtataactacgataacgcggatgacccgacgcagctgacgtcggttgagcatacccacaaagcttatccgggcaaaatcaccttgagctatgatgcggacgggcggatgacgcgggacgagacgggcagaacgcgcagttatgatgcagccgggcgactggtgaacgtcagcggctctcccgacagcacctacggctatgacgcgctgaaccgtctggtgactcaggtagtgggaggctctgacgcccgggtcctgtactaccggggagaggagcaggtgtgcgaggtgaagaccctgctgaatgacatcacccggcttatcagaaacagacacacctgcctcggggtaagcgcaggcagcggcgtgacgctgactgcgtcggaccggcacgacagtccgctgcagagcctgaaggccggagaggccggcgggacaacgcacgcctggtcgccgtacggcgggggaaaggtggcgggcgggctgccgggctttaacggtgagcgtccggacccgctcaccggaaactatcatttaggcaacgggtaccggtcctggagtccgcggctgatgcggtttacctgtccggacagcctgagcccgtttggggcgggaggcatcaacccgtatgcgtactgtgcgggggacccggtgaatctcaccgacccgtcgggacacatcagcgcgggcggctggctggtcgggttgcttggggcggtgttcacgggaggaatgtccatcgcccttgccggcgggctgatggcggccctggccagcgcctctcccctggtggtgattgcgggggggctgggcgtgatggcggacgtgacggccattgcgggcggagcgctggaggaggtgagtccggatgcctccggcatacttggctgggcgtctctgggctacggcctggcgggactgggggttgggataggttcttcagtagtagcaggagttgctgctgcgagaaaagcgaacaatccagggcgtgttttcgagtcgatgttggcacgcggtcgtgtaagaggaattttggaaaagggagtgcctacagaggagtggcctggttttcaatatttgccttacaggagcaacgccgttcaacgcatgcagttaaataactctacaccatactttgcaactgaagaattgacaggctgtgcaatgtctgtcagacgatcaggcgggaacgtaaccgttttacatattgcggctaattatatggataaaccgttctggcgtttaatgcatcccacacgaaatatacttcgcgagaataagtacggaaacattgctcgattcgccggagcgcgagtaggtaatacgtgggcattcggataccaatcatatacgcgtaataatctaggtttacccatgaaggttggaaattcagtcactcttaactggtag

SEQ ID NO: 161268 - DNA, 870 bp, Enterobacter cloacae
atggaaatccacttgcccgcagagctgcgcgcagtctgcgatctcagtacgctgaaactggaatccggctcgttcgttgaggatgatctccgccagtatttcagcgacgtcctctacagcctgaaaaccacaacaggcgacggatatattcatgtcctggtcgagcaccagtcaacgccggacaaacatatggctttccgcctgatacgctatgcggtggccgccatgcagcgccacctggaggcagggcataaaaaactgccactggtgataccggtgctgttctatacgggtaaacgcagcccgtatccgtactccacccgctggctggatgagtttgacgatccggcactggcaggcaaactctacagcagcgctttcccgctggtagacgttacggttattccggatgatgaaatcgctggccatcgcagcatggccgcactaacgttgctgcaaaagcatattcaccagcgggacctggctaaactggttgaccggctggtgcccatcctgctggccggatatctgtcttcatcacaggtcatatcgctggtacactatatagtgcaggcaggcgaaacatccgacgccgaagcctttgttcgcgaactggcacagcgtgtgccgcaacacggagacgcacttatgactatcgcacagcagcttgaacagaagggcatcgagaagggcctgcagcagggaatccagctcggtgaagagcgtggtattgaaaaaggccgcaacgaaggcaaactggaaggtaaactcgaagttgcccgcagtttgctgaaaatggggatgcctcatgcttccgtgctggaagcaaccggtctgacagaggacgaactggcacaactccgccactaa

SEQ ID NO: 161269 - DNA, 216 bp, Enterobacter cloacae
atgcacccccgggactacggcacattactcctgccggttacactgactgaaaccactatgcctgctgagtcatcggcccccgctataccgcatgttgcagccagggagacctgctgtgaagtggagcttacttacggaatactgctcatccggggcgaactgactcctgaacctctgcgtatgctgatcggtggaatgaaggcgggtacacaataa

SEQ ID NO: 161270 - DNA, 306 bp, Enterobacter cloacae
ttggtgtatccagtcgcagtccggctggcggttaagctgagcggcaatccacaggtcggtggcctttttaccgtaggaggggcagacccggctgtggccgggcttaacatgccgacagccgggattatcccagccatattaattaacgccgatgatgcgggtgtcacaggccagtatctttatgacggcttccacttcgatattgcacagaccgcccgcatccgggaaagaggtccagcactggttagcattgaacagctttttgagcgggcggggactgaaaccagcaaccaccgggcagattaa

SEQ ID NO: 161271 - DNA, 324 bp, Enterobacter cloacae
atgaacttacctgacttatttatacccaatttatctgatgggaagctggattgttatgccgtaaaaaatggggttcagctggaaataaaacaatacgacaatgcacaaccaaatgacgtaattatcgttttttggggagatgtctatgtactgacacaactcgttaacagtgtaggggattttccttttatctttaatgtatccaaaaattttccaccgtcctgtttattagatggtacatatgaagtcagctatgttgttataaatacacaaacgttccaaagatctaatacggtatccgttgctgtttctacagtctgttag

SEQ ID NO: 161272 - DNA, 138 bp, Enterobacter cloacae
atgatctttcatatcgcggattcaattatcttcaatagtttggatggaaccttaaaatctgaacatgaagcagagggattgaaactatctttaaaggcaacaaaactcttgcaggtgttacttgatagccgggggtga

SEQ ID NO: 161273 - DNA, 618 bp, Enterobacter cloacae
atgcctaaaagattaatgaactatcatggccgggttatctcttcattaaaagaatttgcttcagtatcttcggccgataagatctcatatggaaagcagttttataaattttgtgactcgaaagttcggagagtttattttattacagaaggagattttattgttcgctcaagaaatggcaataaaataataaatattatttcggcaccatttgtaattggcgctatgccttcgcttgaatccccgccgatttgcttggaaaaaattgattatgggcgaatttacagtcttgaatataattatttttggagtcttgtgcatcacaaaaaattgcattcagacgtaatgagcattctgtccgggtaccactctgatttattaaactatatgcaggtacagaaccccgatgctgagattcatacattgaatcttatccggagatggagtttgtttccctgccacataaaaaaaagattttcgttgttatatttcctaacgaacagttcttttatatcaaaaagcacggtatcaagaacacttaaaaaattaaaggatgacggtgtcatacaactagatagaggccggttatcggcaataaaacaacaggtctttaagtaa

SEQ ID NO: 161274 - DNA, 396 bp, Enterobacter cloacae
atgacattcatgacaacagccgcagccacccggtttatccgccacgggcacacctgcctgggcgtggccggccccacaggactcaccctgaccgcagtcggtcacaacggcagcccgctctggtcacttaacacaacctccggagccggacagcttcacacctggtccccctggggtaacgggaaaaccaccgacggcctgcccggctttaactgcgagcggccggaccccgtcagcggcagctaccatctgggcaatggctaccgggcctataacccggtactgagacgctttaactgcccggacaacctgagtccgttcggggcgggtggtattaacccgtacgcctactgtgcaggggacccggtcaaccacgctgatccagcaacatcctga

SEQ ID NO: 161275 - DNA, 324 bp, Enterobacter cloacae
atgaacttgcctgaattatttataccaaatttatctgacgggaagctggattgctgggccgtaaaaaatggggttcagctggaaataaaacaatacgacaatatatttccaaatgacgttattatcgttttctggggagatgtttatgtactggcgcagattgttgacagtgcgggtgattttccttttatctttgatgtatctaaggattttccgcccgcttgcttatcagatggtacatatgaggtaagctatgcagttgtaaatacaaaaaaattccagatttctgatacggtgtccgtgactgtttctacagtctgttaa

SEQ ID NO: 161276 - DNA, 654 bp, Enterobacter cloacae
atgcaagataatgtatacgcttttaaaaaacaatcttttactgcggaaaatgatgagcatccaataaaacgaaatacttccttcttaaaaaggaaatcgagaactgaagatcgtattatttttgaagatgatttttcatccaaggcactggggaaatggaatctcaaatttaatggtgctgaaataacaagtgatgagggatataatgttttatctctttcagccctggatgagggaggactgggaacgcagattgacaaagcagttgatgacatgtgttttgttgaggtcagtttcttttttaaacttcaggcatccgattctatttgtaagtatcttttaattcagggaggatatgggactatcgagacccaggtagcgacagaatctttacaggtcggccgatggtacaagtcttcagctattgctatacttccggatacgtctgactatgagcaaccgctaaatattattttttatggtggtagtgaaagtgactctgacgttagaacattttacagagacataaaagtcacacagttaaaaacatataaggaaattttatttaataatgacgagtgggtgaattatttccaaaaagataacggcctaaagtatcaaataaaagatgatatgtacttacacctacgatga

SEQ ID NO: 161277 - DNA, 1980 bp, Enterobacter cloacae
atggccaccttgacggacagcaatgggcgaccggtcgccgggcagactgttacgtggaaggcaccggacggagtaaatctcagcgaaagtagcattaaatcagacgccagcgggaaagcgaccgttaatgttacgtcagtcgagggcggcagtgcagccctcagtgccacctccggaaaccagacggccagcggaacggtgcacttcaccggtaatgccgccaacgcaaaggttgcccacctgacggtcatcaccgatggcagcccggcggacggtaaaacggcaaacgtggcgcaggttatgatcactgacgctaacggtagcccactacccgggcaggctgtgatctggaacgccgacaaatccacggtgaccttcggccagtccgccgccaccgacagcagcggcagaaccacagtgtcatacactgataccgtagccgagaccctggccctgacggccactctgtcaaacggcagtagcgccacgaagccgagtcagttcgtctcagatgagagccgctctcgtctgaaggatttgaccgtcaccagcggggcgcaggcatcaggcagctataccaacatggccacggcgactgttaccgataccagcggtaatccactgatgaataccaccgtgacgtttagttccaccggcagctcgaagcttgctgccacggccgtaaagaccgacaacaacgggcaggcacaggtcacactgaccgatacggtagcggaaacggtgcaggtgacggcgaagttagcttccggcaacagcctgacgaaagacagcagctttatcgctgacctcgacagtgcggagttgactgtgaacgccacctccggtgcgatggcggacggcgctgccactaataccgtcactgtcacactgaaggacaaaagcggtgctgcaatatccggccaagccgtcacactgagtgtgaatggcggagcaaaactctcggcaacagccggcagcaccgacagtagcggccaggttattgtcacactgaccgatacctcggcggagaccgttgcggtcactgccgcactgggtaacgggaaaaaaaccaccgcgcagacggcgttcattacctatgccgtcacggtgctctcggccagcaccaccagtgtgaaggccaatggcagcagctcatcgacccttacagccacggttaaggacggcagcggcacggcagtggtaaataccccagttgcctttacggcaacgggcaacgcgaaactgagcgtctccaatgtgaacactgacagcagagggcaggcctgggtcacgctcactgatacgaccggcgaaactgtctcagtaacagccagggcatcaggcaacagtaacgatgcagggaaaacgcagagcgtgacgttcacagagtcggctttcactgacattcttgtttcagataccaatcacacatttagcgttgacgaaggtttcccggaaactggttttaatggtgcgcaaatggccttttacattgatggttcaactgattacgcaacggattacacctggagcagtaatcggtcgtgggccagtgtaaaccaaagtggagtagtgacattcaatggtacagaaatgcctgcatctcctgatgtgataattaccgcaaaaccaagcagcggaggtaaaacgttgacttacagcttcactatcaaaaagtggtttactcagcgagatgccattagttataagacagttgaagcaagctgcgatttcattagcgggagcagtgttccatcacgatctgatcttactcagggaaccgtttctgtaattggtctgttgtttggggagtggcgggacagccctgccctgataaagggacataattatacatgggacaaagagacagcagccacatatgcggccggagaggatattgagttgattcttcattcgggtcaggttgttcactccgggaatcccagcgaattatcatcggtcatgtgtatgtctcaatag

SEQ ID NO: 161278 - DNA, 570 bp, Enterobacter cloacae
atgaaaaatcactattttgttctcacacagaatttttttttataccagggggtcagatctctgttgccagggcactactgtcaccacatcaggttcgatgagtcttccccccggtggggggaagatataacagatccggtcacgcttattgtggatggtacaatattctatgctgggatatggcaggcatatagtaccttgttgacctactttccaggcattgaggttatatggctcactcgtgaagacactgggctggtttttcctgccggacgagaaggtgatattttactgagatatcgagctggccttgatgaaattaaggtggtattaaccggttcaagtaatggaaataaaagaataacttcactgaaactgactcgcagagaatcagaactgttccacatgtttatgtccggcatagatatagtaacaatatcgaatgctacaggtaaatcagcaaagacgttatatcttcagagactgagggttatgaagaaggctggcttcagaagtatctgctttatgcagcaaatctacagaagaaatagactcctctggtatccgtaa

SEQ ID NO: 161279 - DNA, 222 bp, Enterobacter cloacae
atgtttacctctggcacggttatgcctgatggtggaggctatccgttcggcctgacttttccgctccggattgatgcaactgacgggaaaccagccctccagacgctttcctgctccgaacttgcgtctgcccaacaattgacggtgaaagccatccacaaccagataatgtttttttttggacaaaacgatgggctgggtaaagccgtcctcctccagtga

SEQ ID NO: 161280 - DNA, 456 bp, Enterobacter cloacae
atgggcctcggtgccttccccgccctatcgcttgctgatgcccgggggttaagagcggattaccttgccttattagccaacggaatcgacccgcaaattcaagctgaagttgcagaggaacagcagcaaatcgcaatggacagtattttttcaacggtcgccgctaactggttccagctcaaaagcaaaagcgtgactcctgattacgcaaaagacatttggcgctcactggagaaagatgtattccctgccatcggtgagatccccgttcagcaaatcaaagcccggacactggttgaagctcttgagccaatcaaagcccgtggggcgcttgaaactgtacgtcgactggtgcagcgcattaacgagataatgatttatgccgtaaacacaggtctgattgacgccaatccagcatcaggtgttggaatggcctttgagaagcccaaaaagtaa

SEQ ID NO: 161281 - DNA, 564 bp, Enterobacter cloacae
atgccgacgctacggcctgaagaattaccgaagctgatgcgttctttagttatgtcaaatctatctgttccgactcgctgtctcattgaatggcaactcctgacgcttgtgcgcccttctgaggcctcaggtgctcggtgggcagagatcgatctcgaagcaaagctttggaccattccagccgaacgaatgaaggccaaacgtgagcatattgttcccttatcgcctcaagcgttagagattctggaggtgatgaagccaatcagtgctcaccgtgaacatgtttttccgagcaggaatgatccaaagcaagcgatgaatagtcagactgctaacgctgctttaaagcgcattggatatggcgggagactagtcgcacatggattgcgttcaatagcaagtacagcactaaatgaagccggctttaatgctgatgctattgaagcggctcttgcacatactgataaaaatgaagtgaggcgtgcatataatcgctcactatatattgaacaaaggaaagatttgatgtcatggtggggaaacgtggttaggaatggggcataa

SEQ ID NO: 161282 - DNA, 678 bp, Enterobacter cloacae
gtgtgccacaatctgttccggatttttgcgatactgcagaacaatttcgttattacggtttaccaggtcgtagcggctgcccgacagggtgcgcatggtctgcacgttagccgggtcaagctgccagcgccagtcgtgaccaaagccccagttcacatccagagcgacctgcgtgtcatgcatgcccctcccctggcgctggtccgcgctcagggttatcaacggtactggtgtgtactccactccagctgtgacagcgtgtggattgtgttgaaggtggtccttatcaaacagggctacctgctgaccagcatactgctcccacaccagttttccgcccaacgacgggtaagacggcaaccacccttcgacgtgaaggtcgtatccatcagcgggcttctcctgccaggtgccgtcaaagtcgcgcgaggtgtgccagcccgtgctcccgaggtaggtgttggcagagagcctgaggtaatcccgccaggcttcaccaccaatacccacccgacgattatgcccggtaaagtcgtcgtcaaaaaagacattgcccccgaacatccagccattttgccagaaggtacgcacaccgtatcccaggttaccggtcaggcgatccgagggcttacggacaccactttgcaaaaacaacagggactggccgttatcatataa

SEQ ID NO: 161283 - DNA, 525 bp, Enterobacter cloacae
atgacaggtaataaccagcttattttcacgaaagccattgtgcagaaatccggggatgcccggccggaatggaaggtaaaaaaaatgaaaatcagtgagcacggaattaatctgattaaacactttgaaggtttgcgtcttgatgcatatcagtgttctgcgggagtatggactattggttacgggcataccagaggtgtacttccgggagacattatcgatgaagttctcgcagacagtttacttcgtcaggatgtggcagcatccgaaagcgcggtcagacggcttgtgaatgtgccactgaatcagcatcagtttgatgcgctggtctcgtttattttcaatctcggcagtggtaattttgcagtctcaacactgctgaaaaagctcaacgccggtgattataccggggccgctgaagagtttccacggtgggtccattccggcgggaaaccgctatcgggactggtgcgtcgaagggaggcggaaagaaagttatttatggatggatatctgcccatataa

SEQ ID NO: 161284 - DNA, 153 bp, Enterobacter cloacae
atggtcatgcgcgggcagctcatcgaccgtaagcttatgggcactgaccgttacactgatgtcagagctgtttttatttgtgttcagctcgaagtgttttttatttttatcgccggcggttttttctgtggattttccaccgatatcatctaa

SEQ ID NO: 161285 - DNA, 969 bp, Enterobacter cloacae
atgttcaacgatattccttctgtataccaacatctggtatcccgcctcactgattgcctttcagtctgtgttattgctgtagactggagcggttatccgtcatctgagctcagtgtgctgcgggcaagtctgttgtgcgacggcagggctatccctctgatgagtaaagttattgcctcccgttatcagaacaactctgccgttcagaacgcgtttcttgatcagatggctacggctgtcggcaaagataaacgcgtcattatcgtgaccgatgcggggttccgtagcagctggtttcatcatattcgttctctgggatgggattttgtcgggcgtgtcagaggaagcctttattttcaaattgccggcgatgaagagtggcagatggcacgggatattccgtcaacgaagaagccgcgttatctggggtatggacggctggcacgtaacacctctcgtgattgctccggcaatttttataccgtgcacaaacgggccacaggcagaaaaagcagtcagcacttcccaaatacagacaggatgtatcgtaaaagcgcccatgaaccctggctgctctttaccagcctgatggagtataaaccacgggaaatagtgaagctgtatagccagcgtatgcagatagagcagaattttcgggatgaaaaaagtgagcgctatggtctgggacttagggcaagtaaaagccggggagaaaagcggatatctgtgctttgtctggtcgccagcctttatagcatcattatgtggatgacaggatattatcttgaaaagaaagggataaacctctggttccaggcaaacagtgagaaatcgaggagggttttattgtatctgacactaagtgagaatgttattcgactgtcatcagggcctctgtcggggatgaaccccgacagagtatatgccgatatggcgagagcctatcgaaacatcatcatggtgtattga

SEQ ID NO: 161286 - DNA, 255 bp, Enterobacter cloacae
atgatggtcacggtgctgcccgccttcgccgtgccgctgatttgcggacgggtgtcgtcggtgagcgcgccctgcgacaggctgccggtcacgctgccggtgtcgtcggtcacggcggtgatttccaccttgcccgggaccacgtcaacggtgatgaccacgtgcgagccttccggcccggtgttgcccgacggatcggtgacggtggtggtcaggtcgtgtgcgccgttcgccagcggctggtccggggtgtag

SEQ ID NO: 161287 - DNA, 507 bp, Enterobacter cloacae
atgatgactgtcgctgaaaaggtgaaaacataccgtctgaaaaaggcatggtcacaggaacaactggctgaagtcgcctctctttctgtaaggaccgtgcagcggactgaaaaaggccagaagcctagtctggaaacactcagcgcgattgcttcagcctttgatataaatgtctctgatctctcggaagagaattacgtcgccagccaggctcttgatgaacgcatcagcgaagccaaaactcaggtagcgcaggaaaccaggttttatcggattctggtgactgctgttctggtatgcaccgcattaatgataattaactatctgtttatcccgaaaagttactggtccgttgtggtcactgttatatggggaggacttgtcatattcaggggaataagagtgtttatcatgcgggggaaaatcgctttatggcaacaacgcaggttgcagaaaattcttcggtcaggaaataaaagaccggataacgaaaccactgaacggtga

SEQ ID NO: 161288 - DNA, 507 bp, Enterobacter cloacae
gtgaacgaaataacatatgaggatctgcgccagaaacgcaggcaaggggatttcttattacatgaaattgagacagaacttcagcatgtcgcggggcttttagtgactgagtatattaaaagcctttatctaaaaaaacgtcgtggtcaccctctgcctgaaaattatgtgcatattggtcttgatgaggaggagcatgttgaatggtcacattcatattcaaggctggtgttagatgaggagcaaaggatgtttttcccaatcaggacactccttggggaggatactgaactcggcactgatgaagcagttatctgctgtactctcagtctggagaaagacctcatttgcgtcgaactacaatgtgaagatggtcaaatgatagacacgtttaaatttgccaaggcggcacaaaaggaggctctacgtaaagtggcggtacggctgaaaacacatattttttctcttctggtagcagtcgcgggctctaaacacgaaatgtcgtag

SEQ ID NO: 161289 - DNA, 519 bp, Enterobacter cloacae
atgattgaagatgaaaatttctttaggattaaaggccttgatgaaactactcttcattttaactatttatcagattcattgagcaaggaaaatattaggggttatataaatgttgatttaaagtctaataatccaacatctaaagttaaaatttctcaattggaattgttaacaaagtggtattttgaaaaaaatgaaaatggaaggagtcgggttttaggagatagtgcaaacctaaaaatgcttgataaagtacttggtgatgcaagagctgaagagtatttcagaaatggactgggaacaatcactgaggcatttaatttagttgcaattaatgcagattctttcaatcaagaaattgaacaagcgttagctggattaagacgagcaaacaatacgattcataatgtggataagcatttagattctactaggctaaaactcaaagaaatctttacgatagctaaaaatatgaacacgatcataattaatatgtcggaagatcagtgggatgattaa

SEQ ID NO: 161290 - DNA, 270 bp, Enterobacter cloacae
gtgttaagcaaaactcaaaaaaatttcttgtggatgattgcagaaaaaacaatcggcgtagtgggccttttctttataaatgctttggtggctaaatacctggggcctgtggtaattgggcaaatagcaattgcaactgcgatttttcaaattgttcaggttgtaggggtgtttggcagcgatagtatattctataaaaggataagcacaaacttgattggcggcatacaattaatgatgcctgtatttgtgttgagaagtataatatga

SEQ ID NO: 161291 - DNA, 285 bp, Enterobacter cloacae
atgatgaacatgtataaatcctttaccgtgttcaccatagactttctcaaagtcaaacccacaacacatgcaagaagttccatgatggtcaatacaagcctgtcttgcttttggatcacgctcgtaggagtttactgtaacttgcttttttggcccctgctccatatcaaacgtgaaaagatcataaccttcagctatcaactggatgtgttcaatagcttgaatgtatcccagattttttcttgtcctaccatcaactactttggttttccaccgctcccttag

SEQ ID NO: 161292 - DNA, 186 bp, Enterobacter cloacae
atgcaatgctgggttgatttgtctgaaggtacgaactttcgtatttataaatccaaagagtgcaggcttatggaaactccggaaaaaaccttatctctggctttcatgaaagttgagcaatcacttaaccggcgcaggtggccacacgccccctttctgaataagtttctcttttatttcgtttaa

SEQ ID NO: 161293 - DNA, 255 bp, Enterobacter cloacae
atggggtgcttaattgttaccggtataaatttttatatgctggcagaaggtgaatcatacccaacccctaatatcggcaataattactccgtttcttacgtggttttcccttacgaaggcaaatgggtcgctcagaagcttcgtaaaggcggtcgttggatagatataacagacaagcgattcgacaccgaaaacgaggctttcaacttcacatacgaatacgcattcacgcacaaagaccgacacaatttttaa

SEQ ID NO: 161294 - DNA, 282 bp, Enterobacter cloacae
atggctaaccttcaactggcagttaacggtgaatacttcgaccagatgaagtcaggagagaaaacggaagagtatcgcctggttaatccgtattgggggcaccgcatccacggtaaagattatgaccgtctgatcatcacccgtggttatccgaagcgcgacgatatgagcaagcgtatcgacatcccgtatgacggttacgaaatcaaggtgatcacacatcctcactttgggcccgagcctgtgaaagtattcgctatcaaggtgaatatcaatggctaa

SEQ ID NO: 161295 - DNA, 600 bp, Enterobacter cloacae
atgacaactaaccacccggcgcacggtcctgtatcactcgagcgcctgcaccagataagcgaaatactcagcaaagcagcagcacaaagcgacggcggtaatctcggctacgcaatggctgacgctgtgaaggtgattgatgatctgctggaaatacctgaaacgttgccatgccccgtatttcttgagccaggacttaagtttggtaaaggcgttccgactcggtttgtgttcggtgcgttgcgccgccgcgctgactactacgccgaactggaagctatgacgccagaacagcgagcagagcatgatgcagggatagcagagtttaaagcgatgctgggacatgatagccgcgcagacacgcttcagtcgttcggtaattccgaacaactcaactatccggcaacttcggattgttggtgccgtacttgccgccccgtaacaatgagtgacatgcgattcgtcgtttgccttgactgcggaaacaagcgctgccctcgagcaaatgaccacaggaatgcttgcactggaagtaacgagccaggacagattggtagcgcatatccagcagcaccacagcaggaggtgaagaatggctaa

SEQ ID NO: 161296 - DNA, 177 bp, Enterobacter cloacae
atgacagattttagcgcaacaaaacgtaactcatcgcttcaggattggggcgaggctcttgaatgcatggtggagctgaacggtaaagattttgatatcactgaaatggaaattgaagccgcatacgaggcgcaaaagcgcgttgatgacttcttttatgaagagtggggtgattga

SEQ ID NO: 161297 - DNA, 426 bp, Enterobacter cloacae
atgacagcactcaacaaacaggctcaggcgattatttcagatatcagactgaagcgcggctctggtgatgtttacgcgccaatcattcgctgggatgaatttgaggtgattactggcgctctggaggacgcagataagcgtattgaagagggaatttgccgagctaatcgtgagcatcatcgcggtttcatgatggcctgtaaccacctgaaagagcatgcaaacatccattatgccgacgccgccgagatggaaattgctgcacttcgccagcggattaatgaactggaatctcgggaaattaaccttccagcagcatgtgctgatgatgagtatttcatagatggagtttttcaggcgttgcgttacgagcgcgatgttgaaagagcaatccgcgccgctggcattggcgtgaagggggagtga

SEQ ID NO: 161298 - DNA, 258 bp, Enterobacter cloacae
atgagcatcgcaacaatgatgaatactggtttagctcttattgggtggttatacatcatgtttaaagccggtgaatggtttatcggtatcgcctttaagcaatgggtatccagaaagaaacaggaaaagagacagaaggctgttaatgagctgtatgacgcattcaacctttctgagattgagcctggcgggtccgttcggctggaaacaaaaggcgacttgacaatactgatgtttcgcaaggaggcagcccaatga

SEQ ID NO: 161299 - DNA, 432 bp, Enterobacter cloacae
atgaaacaaatagcacaagaaaacatcattgagttagcgaagttaggacatgagcgtgcggctgaattgaaagcatcatgcggtgctgtcgacgtgcgcagcctggcgaaactgattagcgatctggctactcaacttgaagtgcaactggtgcgaggtaatgcactggcggcggagaatgcggggctgaacgttttcatcgaggaagaatgctttgtctactcaagcgacactccagagcctattgatgcgaatgactgcaagcctgaaaccaaggtcacggacgctttcctggctgaagtgcgtgcgcagggtgtggatgctgcaatcgagcacctgaacaagaaattcgcaggcactggccacatcggtgttccggtaatgtctctggaatggttagcgcaggaacttcgcaaaggagccgagctatga

SEQ ID NO: 161300 - DNA, 300 bp, Enterobacter cloacae
atgaaaggcaaacaggcaattctgcgttatctcgaaacgcaccggaccttcaccgcgaaggatgtggctgccgagtgtggcatgaccatcaactgcatcacgaagaacgctctcgagctggagaaggtcaacaagctcgtgcgcatcagcaaagtctggcgaacagttacctatcgcctggctactccggaagagcagtccggtaccgcgcgcagctgcagcaatggaatattcaacgaatgtcgaaacagcgcggcgatgaagagaattctggcgttttacgggagagcatcagcatga

SEQ ID NO: 161301 - DNA, 180 bp, Enterobacter cloacae
atgccgagactgattgtgcttttgaatgtcgatgacgctgaaggcgtagagatagccaaggatgaattcgacgaaaacttaacgtttagctcatggcatgaagccgatgactggtgtgcgcgaaacacgagaggcgtttgggttaaaaccataaaccttgatgacgatgatgatgactaa

SEQ ID NO: 161302 - DNA, 249 bp, Enterobacter cloacae
atgagcaacaaaactggcggtccagcattcccttactcaggggttcataagggcgagaaagtaaatctgatagtcgatagccatggcatgacgttgagagactacttcgctggaaaggttttgcagggtgttatggcatccggaacttctatgagcattggcactaaccacgaagaagagatgcttgatatggctagagcattttactcgatggccgacgccatgattaaagccagggagttgccatga

SEQ ID NO: 161303 - DNA, 324 bp, Enterobacter cloacae
ttgcttacggataagttccaaatcagcctggcaactggcgcatgtctggcagccaggaacggcagcgcgccgaggctcggggatatcctccccgcattcttcacagtgctcagccgatacggcattgcggtcgatgcggtgagcggaaagggcagcgttacgctgaagctcttcaatctctgctgctgtgtcgatgatgtccatggtcaatgctcccggaactgtctgttaattcggttgaaggtgaacgccagcaataaaaaaggccgtgatagcgacccggggaattttgttgtcattgttctgctccgaagcggcgattaa

SEQ ID NO: 161304 - DNA, 1428 bp, Enterobacter cloacae
atgcgcattgacagcagactcgaaaggcaagacctaacgacacgtcaactcttcttcattgagtgttggtcaaacctttgtcacagagacagcatcgacagtgacagagtgagctttaataatattgttaactcgcttaatgagttcgatttcttattcagaatgggtaataaatttagcgctgaaaagaaaagggaaagggctgtcacagaattattgagcattctgaaaactgacaaatgcttgactgcacctccgtttaaagaaacatccgataatatatctaatcttttcaatccttataacatcctcaaagacccctctaaaagccccgttgaacaaaagcaaaatctgtttaaaagcctgtgcactgaacttagagtaaaagtagatgaacattatatatctaaggccattgaggaaattgaaaaggaaatttataaagaaacagaacctaatgacgatgaattaactcacttgttaagtttgacaaataatctaatgagcgtaatgttatctaatggaataccacttaccgaatgcttcttgctttacaataacattttaatgcgcccagaaaaagggggcttcaaagaacgattcgattcctggaaaggtaaactgatccaaccaaactcagactatgaagtaagatttaagttgggaaatgaggaattgtataatcttctcatcggcgatgcccccgagcagagttttaacggttgtttatttactcccaggaaaagggataacgggaaaaagttcatcactgccaagattttcacttctggcacatcaatgttttgcgccagaaataatgcagagcaaaaactcatggatgcccttgatgttattgcatatatggttggcaagaatgaaataaaaatacaaaagcagttcaaaatacaatcactaaaacctgaaagccagcctgtataccttaataattctgattatgaaattagtgctaacacagatcggttaacaaaaacggaattcatccatttcataaaatctatggatagtctattcaagaaagcctcgccagaggctaaaaaaaagatcagttccgtttttggttttttacgaaatggtatcaataatacatctaaagaaagccgattcacatcatgctggtcagctctggaatcgctaacactgggtgtttctcagcatgaaatcaagcatgatgcacacgtaatactttcagtaatcccttgcgtgggtttggattacgtcgtgaaacaactcttcgctttgagagggattattcaatatctgaagattatacctttctcaaaagacactatttcttatgatttgtgcaatatgaacctaggtgagctttacaaatcattaaagaacgaagatataaagaattatcttttaaccaatttatccgcctatccacacgcattattttcataa

SEQ ID NO: 161305 - DNA, 612 bp, Enterobacter cloacae
gtgaagcggtttaagtcgtctaaagagggccatggctgcctcaagaagctgcttgccgaagccatgcttgttaaggaggcttcaggtggctctggggcaaaagtactgacgacagaccagaagcgggaagccgtgatgttgttggttgatactaacggccagtcgcaacctgatgcctgcaggcttacagatttgtccctgtcgatctgccgttatgacgctcagcgcccaactgctgatgtacattcgtcagagcgtaccactgagcacgcacctgaacgcacccgttttggttatcggcccatctggctgctactgagtcgggagggtattcacgtcaatcacaaagcaggtatactgcattacccaccctcatggactgagcgtaacacgcagacgaccgaacggtttccgcttctgcccctggaggtgccgaacctgacctggtcgatatattttgttatggacgtactggtccgcggttacatgatcaagtgcttgagctgcgtggatgattttcacgaaggagtgtgtgacgattaccgcctcatattgcatatcagatgggctggtcacagatattctggactgtatcgcgctgttttgtggtga

SEQ ID NO: 161306 - DNA, 468 bp, Enterobacter cloacae
atggcaggagactacagaatttattatctcatcgataatgaggaacattctcttaaaaagtggttggagactgatgcaccaacacttcagagcgaagaagttattgaggcagttatgagtgtagccccacatggtaaagcacccagtatcctacgtcttattgatttggataaagatggaaaaccaatggtttatgacgagtttctcattcaaggctttggtggcattaacttcgggcttatttatcgtcgattgggacatgatggttggttctatcttacagatcctcaagtgtacggttttagagaggggagtataattacggataataaattaaccgtcgtagcgaactctcgttattcattttctgataaagctgatttcccggtaatagctaccatcgattgggacaggcttagtttacgttatggatataaggagctttacttagtccccacatcggcttag

SEQ ID NO: 161307 - DNA, 225 bp, Enterobacter cloacae
atggatttatacgaggtacacatgaaaaacagcttactgttgctgatactggcgatcatgccagccctggcgaatgccggacagataaccatggtcaacccgcaggaggaacagacagaaaacggaaaaaaactgtgtgtttacgagaatagccagtgtattttcacctacaccacgaaaggctcatgcccctatgcgaaaacttttaacacagggggatgctaa

SEQ ID NO: 161308 - DNA, 1101 bp, Enterobacter cloacae
atgaaagacagtaaatattttagcaaagaacagtatcacttgcttctcaagtgcgctgaattgaacgattttactgaatggaatgactatatagcaaatgttgttggagcgattaggcttgccggtgctaactttgatggagtagacctcactgatgcgatgttttatcgtccagatggtatcggtgtaaatttgagcgaagccactttcaggggctcaaaactaacgagagtggacttctctgattgtaacttacttgatacgaattttgaggatgcaaggataacaaattcattttttaataatgctcacttgaatagatcacagcttaagggtgctatatttactatggtccatttctcaggaactgatctaacccaagccaatcttaagagcgcggaattattattttgccatttctatgaagctaaattctatcatgcagatctcagcggagctaaattccttggaggtggaaataatcctcttgttggtaaagaacagcgcatgaatctgtgcggtactatattccagcatgcaaagtttgataatgaaacctactttgattttttttatgtatcacgtgaaacagactttaggactacttcatttgaagctgcaaactattcacctggattacgtcaaacattgagatactgcaatcgaagacatagttggaaagactggtatgagaaacagaacaaggctctagcatatgttgcaaagattttctggggttactctgattatggacactctataaaacaaactaccttatcaatttttaaaataagtttcattttttcaattatatatttctgcttcccatcattaatacatggactcaataggcatgattttatcggtagtatatatttttcatttgtaactatgacaaccttaggttttggtgacatgtatgctacagatagcttaattgcccgggttatagtagtaatacaggtgctttacggttacgtcttgctgggagcattgattaccgttttatccaccctgtttacatcagatggcccagcgcagggtctgatcaggcatccaaagcatgcaccaataaaaataacatttaaaattagaaagtaa

SEQ ID NO: 161309 - DNA, 249 bp, Enterobacter cloacae
atgactattaacaaaaagcaatcctcacctaagcttgcctctcaagcagcgaaagctctacaagatgaaaactcatctgaaattaaaaagaagcttgctgcttctgttgtcgcacaagcccgcactggtaaacaaaccggtgctgagatggagacagtggcttccgatgttatgaaaagttcaaagtatagcgaggaaactaaaagctatgctgcatcattgttgtcgcagtcgaataaacctcgttaa

SEQ ID NO: 161310 - DNA, 654 bp, Enterobacter cloacae
gtggcaaggactgaagaggagcgagctcaggcaacatcaattttcgcaacttacaaagctgaagttgataagcgtgagctttctaatactgacaattatgataagaacatcctgacgttatcatctgctggccttgccatctcattaactgtcttcaaagatatagcccctcataatcaaacggcacatatttggctgctttactctgcatgggtgttatttggaagtgccatattatcaacaatattcagtttcttgattagtaatgcagcactgagggctcagttagaaattgctcataaatattacatcgaagaagatgaaagtgtttttgggaaagtaagcctcgaatcaaaggctttggattgggtgaatagattttcaggtggtttttttgttttagctataatctcggtcattgcatttggtgtgatcaactttgatagaagagcggaggttagcaaaagcgatatggttaataaaacgcagcaaattaataacgatgggttgccaccaccaatgatgcaaagagtacctgttgataaaggtgctacagtccccctcatgcaaccagtaacacaaacaaatcagccagatacaactgcgatagaccctcagtcatctgcaagttcgactggttcccccaaagaataa

SEQ ID NO: 161311 - DNA, 324 bp, Enterobacter cloacae
atgagaacactgacacgggctttgacaattgcattattaatctctgcatcctgtctcgctaaagcatcatctttggaagaccaagtcattgatttgagctgtccaagcaatgttagcggcacacttcacatgaataattcctggcaggatggctacttcaaggttcaaggcttcggcacacttgcccttaaatcatttgaacaacaggacctcgaacgggccgtgctcacgttcagtaacggtgatgtgagagccaaaattcggacatgggtcaaggataacgtcattcacttctatctttgggatcagggcgactggcagtag

SEQ ID NO: 161312 - DNA, 1566 bp, Enterobacter cloacae
atgacatcatttgataatgcattaaaatctgacgaagggaactcagtttaccctcctgatttagctaaggctatctttgaactcgatattcctgatcgaatttatctaaaaacggcaatggagtttgatgataaatatattgttaacaaaggaaataaatggactttcgattattcaggcagtcggcgatatcttgttttcaatcaagattatatctcaaataaattaaacaagtatatctgtttcaaatatgcatcgacgagatttccaaccaaacttccagcgttgcaccttgattggaggaatatcatttcatattgtcgagaacatggtgggttttcgcttagtacgctccgattatttatcgaaaaagaggatattgataatgctactttttattccgtgttattcggattaaaaatactttgtgctgaaacattcccaggtttcaatcttgaagattacgatgatcttgagttcgtccctcgaccgtatctcgaacattggggggtttaccaagaaatcgataatattcttgaccctcttgaaaaaaacatgatttgcaatggactgtttgaaatggcttcgttgttacgcgatggcaaaagtttcagtcacagcgaagtgcgcaatgcagctatccttgggttggcttatgtaacgggtgcacgcccagtacaactcgctaggctggcggtcaaagatgttcgtatcgatacacgaaatcaggaatctggtctgattcgatacagtgtttttttaccatatgctaaacaaagacgagtgacgacagagcggttatttctggcgatccccccagaaattggggagttaattatgaactataccgtgagatacaagaaaaacccagaagataaactattcgatttcagcgtttcagctccgcattatgtgtctcaggcaattaatcaggcaatcctaaatttctgtcctcctgaatatcaagccgccgtagcatgtggcgaagctgcattgcccacaattacacccactgatttacgccacaatgttgggcactctttggcgatgcaaggtgctagcgctgaagagatagcacatgtactggggcacacctctcttgccgtagctaaatactacattatggctactcccgcgttggccttgatccgtgctaaagcgcttgggtcgaatcccgtttggcaaaatatggtggctatgatgctcactggggaactggtcgactcagcacattggaaaggccatccagtggtgggactcgttggtgacgagttgcatgataaaattggtggttgctccaggaacagtagtacatgccctttcagcgaagtgcgttcttgttacggctgtctgtattatcgcccttttacggatggtgaacatcaggctctacttgaatgcgtcaaaaaagaagtcgatgaactaatcgctatttcagacggtgtaggtaattcccgaaatccgctcattttaatccatgaaaccacacagtttgaaattgagtctgttatcgcccgctgccgttttcatcaggaacaggtgaagtccaatgaaaaatcactttga

SEQ ID NO: 161313 - DNA, 2367 bp, Enterobacter cloacae
atgaaaaatcactttgagcattttcaggcttttattgaagagcaaaaaaaatggttcgaacagcacctgtctgctgattttgcccaaacatggaatgatcatatctgggtaagtggtaaccagggaagtggatggttgcgagggaacggcagaaatacattacgttttgatgagatgaacagattcaaaggtattgtagaacatctgcccatcgacaaagaatatagtcagttcatgaaagctatgctggtagtggtttaccgacagggaaataggagtatgtcgccagcggtggcaaaggcaactttgatgattctgaaacgatggtaccatgcgatgctttatgagacaggacagacccatccatcttacctgagcacagttgtcattcaacgagcgatggatcttctcagtagcgtttcatctcctagtgaccccaatacagctaactataaagggcggtgcgttagccttcaaaaattggtcaatcacttcacatttacgttggttaaactgcaatacaactctgatgtgaagtataccaacaaaaccaacttgacccgcaaagcccgggaaaccatggcgctgaaacagcaggccaagctgtctgataccactaccgatggtgaagatgcgttgattaccattcgcggatttctgaacatagttgcattaatccagcgggtggaaagtgatgctgagaaaatcgcgttaaattgcctgttgttattggttattaccggctttcgctccattgaagcgtttaatctcagacaggatgccctgtttaaacgccagattgatgatccggcaatctgcaaacgatttcaggacaagggattacccgattattttcttggtatccgttatgttggtgtcaaaggtgctggggagcgaacgcattgggtagaaccgctggcagtaccgctggtcgagagtatattcagtaccgttaaaatgttgaccgcaccaatacgcagccatcttacctatctacgggcaaaatcttttgctgattacctgccacaggccatcagcaacatgcccggtgaacgagtcgaactggacgatgtggtgaagtacatcacccaaactacctcaagttttcggggccgggcaggacaacgggacaaaacatccaaagcccttagcaaaagaggtgtgctgcccgttcaagaaataccaggcccgaaaaacagcaaatctatctattattccaagactgctctcaatcattacattaagaccgaatttggcctggcgaatgccaacgaaccctgtacacacgcctggatggaaaatggcaaacgctaccaagttaactacgaggatctgctatttctacacgagaagggttcgctggcattaaagcgcacactggctttgctggctacaccgatacccttcactaacacacttatgaataaattcttaggcaacgttgagcctgatggatcagtattcagcaaatatcaattactggaggaggatggcacctcgacgcggatgcgtacccacattccccggcacaacatcaatacctttcttgctattgcggatatctctgaccacttacaggcaatgttgatggggcgagtggacatcacgcagaatcagcattatcaacatctggcgcttgcagaacggcgaaaagccgcctcgttggtgcccttgcagccgatttcgacagcactaactgtctcgccctcttcgtcctccattgctacgccactggatatcgtcaaacggaccggccaactggcggtcacggaacacatgactttggaccataccatcaaagccaacctgcatacttttgacgatcgggatgatgtagccaggtttgtcgaggcgtcatttgctaacggcctctttgaagatgttgctgccgcctttgaagaaatccgcgacgcagaaggaccagagcaagcctctgacatggtggcaagacatgccgtgctgtatccgctgaaatttggctcctgtatgcgggaagttaacctctggggatgtccttatcgactgaaatgccagagtgctgccttttgtgaacatttcacgctgacaggccggatagatgagctaccaaatctgattgccaaaaaacaggctttacagcaagcacattcgaaattgacccaacttactcaacatcagcctgattaccagaccagactggccgacatcgaacgacggttacagcaactcgaggcaatacaagcacaatggcatcgtcgtgccaagactcaacaactggttgctgctgagagtgtgttgtctggtggattaatcaccgagggcaaagtccgtacactggcccagctttttgcacttgaataccaacaattgatgcaggagaatgattga

SEQ ID NO: 161314 - DNA, 195 bp, Enterobacter cloacae
atgacttttaaaaaacatttaaagttaaataagtccatgaaagagagagggcaaagcagagtccgccctctcccttcacaccctgataagcctcattacaaagaggataacagcgtacaccactatatgctagtccttaataaatataatcccagccagcgcgagatgcaacctttaaaatttgagcagtattag

SEQ ID NO: 161315 - DNA, 945 bp, Enterobacter cloacae; identical to SEQ ID NO: 158344

SEQ ID NO: 161316 - DNA, 423 bp, Enterobacter cloacae
atgtttgacgctgacgccatcactaaacgattaaatcagtgccttgatctacttttcctcaagcagcccttaagaactgtattcggaatgctggtggggttcattatttttgttttagtttactcatttaggctggcgatagctcaaagtctttttgaagtagatcgtgtacattacactgcatgtttcgttatcggtcttttgattgttcacacaagaacaattattgacgctttccaaggcacagctgttgatgaagaaataaatagcatgatcggtgttgttatgaaacagccgcacttatccgatctacaaaaaaatatgatgatcgctgaaatacttcaaaaggaaattgctgctataggccaaaagagattagatatggcctcacaagaaataaccgagaaaaagacaactgattaa

SEQ ID NO: 161317 - DNA, 1254 bp, Enterobacter cloacae
atgaaattcatcaactcaacagcactactcgcattgtcactgtttctaaattctggttcggcggtagctaatgaaaatcagagacttattgaatctgccgcaggtggagatatcatttcgcagcgtgatttaggggtaaactatctaaaaggcataaacggcttcgaaaagaactatcctcaagcaaaaaaatggctcacatcggcagtggaaaaaggagataagccagcctctcacgccctcgcattaatgtacacatttggatatggcgtcaacaaggattaccgtagggctgaacagttatataaaattgctgacaatgcggtagaaggtgctgcctacaataatcttgcagttttttatgaaaaaggcctggtaggtaacccggactctgctttagctattaaatactataaacttgctgtggctgccggcagtccagagtctatgtattatttaggtgcgaaatatctgtctggaaacggagtccctaagaatagtaagaaaacttttgaattgtataaaaaagcggctgataaaaactatgtaaaagctattactagcctggcctcattgtatgatgaagggattggaacaaaacgagatgatgctgaagccattaaatggtacaaaaaggcagcagatcttggagatcctatgggtatgtcaaatcttggttatatgtacattcatggtgaaggcactccaaagaattattctcttgcccgctcatacttagaaaaggcggcagataaaggcaatgaggcggccttggcaaacttaggatatttgtatttaaacggattgggcgtaaaaaaagactaccaaaaagcaagtgaactttatcagacatcttgtgacaaaggcgaaaaaattggctgcgactcacttaatgatatgaagagactaggttattttcgcacgtctgtaaaacaaccaaagaataaaattgatagcaatcgtcttattgcaaaatcaatagataaaggtgtaaatgcgacatttacttggcagagtgacgttgccaccttcaaagctaataatggaaaaattgactgtaactttctacaagataatacagacaatgcaggaaatcaggcaacatcctttgtctgcacagacaatgtccagattattttgaagcgattcaatgaaagcaataatgcctaccttgcggttatgacagacaacttcaaaactgaggtaaagacgttctctgtgaacgtctatatttccgaagttaactcaaagtaa

SEQ ID NO: 161318 - DNA, 795 bp, Enterobacter cloacae
atgaaagaagacattcaaaaatccgtgacagagatgattgataaatcgggcgtggaaatcgacgctgacgaacgccagaaaattgttggtgaagccatcgatgcggcgttggagcatattgcacaggtgctgaagactgtatcgcttgcagaaggttcttcttacatgcgggtatgggttcgctttggagagtcccctgaattaccgggcattaaacagaagcgtgccgcgttggtggctttcatgaagaagggtgagaatggctcgattgagatacgtaccggcgcctggtacgacggccgtatcgtcttcacgaattatgcccaatgcctgcatggtgaagagcttcttagtgtcgtagacatcaccctaagagcgatcaaaaacagagcggaaactgaagaggacacagcctgcgccgcattcctaagcatcatcgaattgcctgaagtaatggaacgttcttctgagctgaagaccccgcctggtctgctggatttagttgtaaatgctgacaccaagaaggcggtgcagcgtgttcgtgaggttgaatacggtaccatctgcgatatgtgccatagcgaccttgacctggtgcgcatcattgtcgatgcaggacaggcttgcgatggcgtcctcgcgagctttgcggggcaggttgtccgtctggctaatgatctcccaatggttaagcaggaggccaaatcatatgccgttcaccacgccaatgaactacttgagccatttagattcgaggccgcgcaaggcaagatgaccggctgggcgacctggtaa

SEQ ID NO: 161319 - DNA, 1590 bp, Enterobacter cloacae
atgacgataccagccaaaatagataccactaatttactcactatacttggagtgatcgctgccgtatgggcaataattactcctaccagcagactgcgatttcgtttttgtatgactcggtgggacctagtaatcattgggctgatttttatactagctaattatttggtttttgcacctgcattaagacaagttggactgtattacagtttcggaccgtggatatggggattggatagttcgagtgcagtatatctattgtttctcttggctgcctcatatcttttcattcggctaaaatcgccaacattaaatcgaggtaaaataacactatttcttgagctaattgagagtttacatcttaccaaaaaatatgatgagttagtattgttagttgagcctcagttagacgaaataatatcccttgctaatggaaaaccgaaccttattgttcaatggattgataagctatatggcggctccgttcgaaatgcgttattgaatggagaagaacccaaagaacgaaatgtcttggtgaaaggtctatattccctactaagtcctttgcgtgaaaagctatcatcaaattatgaagccagtgataaagcccgagaggttttgctgaatatactaacttctcctgatcttacaaggcatctttcacttgcatatcctcatttttgtttgaggcttattggtgctgatgaggtcgttcgttctgatttcattgatagatttattaattcgctgcttgactcacctggtagtcgtctttatgtagaacttaaaaataaccaaaatacatgtactggaggacgtcttgcgatacctgaaaccaaccgcttgcttcactttttctttgccgactcagtgtatgcaagtaaaagtggcatatatagagctataggtgaatctgtttgctggcgtttagatgaagacagtaagttatcagaaatactaaacaagccccttggctcttaccgtgagcaaagtagatttagttgtcctattaattctggaataacaatgttcgaaattatggtgcatcaaggtattcatcaaagattgcaagatcatctttggctgcattatttcaaacactttgctgaaaaaatattatatcaaatgaaagttcagagtattgactcaatcgcagaacatcaaacaccatatcactatcttctatgtcgcctattcggtattgctatagattgggcagaacaaagttcatatataaaaacagttaataattctaaggaggatagtaggtatatccctaaggaagcgacgaaagtattaggctctatgttagagcatgttattcctagcctgaaattgaaggggtactcaaaagtatccatattacagatggttgtcacctgttacaccaggctcgaagaaaggcagattaatgatataggtgaggcattattgatacacacaacaacgggggaatttaactctacaagtttaacatatcgtaggaagcttctatcgatattcaaacgaatggacccttacttacagggaaatgcaaaaaaattcagagaaaagatagaattggctattcaaattaaacttaacaggtaa

SEQ ID NO: 161320 - DNA, 381 bp, Enterobacter cloacae
atgaccgatatggatatcgaaaaagagattatggccaaaggcaaaacggcaccgcgtattactccccagcacattgagggcattattcaaagcgagcattattttagcgcgtatgatggagctaaatcgggcggtgaagaagttgtgcaaatctggcacaacaaagacgatctggaaaaagaatatgaggtgctatctcttctaactttctgcgttctggtgctgcgcaacggctttgtcgtcaccggcgagtctgcgtgcgcaagcccggagaactttgatccggagatcgggcgtaaaattgcacgccagaacgcgattgccaaaatctggccactggaaggctatcttctcaagcagcagctgcacgaggtgaagtga

SEQ ID NO: 161321 - DNA, 987 bp, Enterobacter cloacae
atgattggcggtagacatttttggggcgaaaggggaagattgagctttaacaaggaattaaaaatgaaatcaccaaagacaaacaaccagtcaccaaaagaggcgatgatttacccaaaatccagtgcctacggacatgccggggagtatttattcgcctactggatatcacgatactttggctggccttgtcgactattgagtgttgacatgggaattgatgctcaggttgaaatgtttgcagatgacaccaaatcaacaggggcttttatttctgttcaggttaaaactacctcaagacagatggaagaaagtttaagtgttagagttggtcttgataaccttggctattggagttctcaacatgagccggtagtaattgtgcttgtaagtcttaatgaaatgaatattaaagatgagcctgaaatatactggcgtcatttagatagtgaaagccttgataactattctgagaaggcacgaaaaaataaggattcaaaaactaatattatctttgaatcgcacaagcatcgtcttcgtccaatgcacaagcaggattggtcgaagctatggatgaccgagcttgacaaggaagttgttgagatggcaacgagttcaaaacatgaacttatgaaagtcattaacgaagtaaatgaagaaattgaagaatcaggtttgccggaagaggattttaaattccctgttgcctgggagacctatcctcattccttgaatagattgcttaatgactatgatgaatttttaagacttaaaactgataataaactacttgtcatgcaataccctgtagttcaggaatatatggaactatgcgatcttcatttagaccgactgctagattacttctcaaatttggcatatcactttagaggtgagagttctatttttaaagatgaaatggaaagctgtttccccgtcaatgtgcaaattcaagagatcataagaaataacatatataactattaa

SEQ ID NO: 161322 - DNA, 135 bp, Enterobacter cloacae
atgaaaaaaaatcttcaaaagcgtgaggtaatttattgtaattacctgaatttattcgttttctacctgataggttttgccagaatacgctcaaccaaaactcggaaacgcaccaacgaaaacataaggagttaa

SEQ ID NO: 161323 - DNA, 228 bp, Enterobacter cloacae
atgagacacttaatgaagtgcggcggaaagatgcttctgctgttcatcgcgagctgcatgataagtggctgcgtgattaagacacagaccgtgggtgtacaattctgcgatgtcgcaaatcctatctatgtgagtagagaggattttatgaccgaggaaacagagcggcagctgcttatccacaatacgataggtgaaaggttgtgtaagtgggagcaccggagctga

SEQ ID NO: 161324 - DNA, 384 bp, Enterobacter cloacae
atgctgaacgagaaacgttctatacaaactattcgcgattgcacgagtattatcgaaactcatgtgctgcatcagcacaagctcgaagtacgtaagctcaataacgacgctattgaacctgaagactcacgcttcatcgttaccttcaaagacgatgtcgagcgcgccggtgcaagcgtgaaaccgttggctgaagcaatttacctgaatggtcgtgttcgttttgtagtgaagccagccaaacagtaccctgagctgtctcgttttatcgaggctttttcggaggttattgaacattctattcgccgcttcttgcgtaatcatggtagcattgtcagtacggttaaggctgatgactctgctacaagatggctcctacactag

SEQ ID NO: 161325 - DNA, 750 bp, Enterobacter cloacae
atggctcctacactagataccgcatattcaaaagatctaagcgagtttcctcatcaaggggagactcgtgttgctcgttttggctttctcatcaacgaagcctccctctataaaatctcagaaattgaaatcatcgagccagaagatgacatttgtctgtatgtctctatggagcgagtaggtgcgcacgaccagagcgacctgagtgaatttatcttagatcgagctgatgaagatgcccctgaagaagagatcattaaagaggcgctccagtccggacttctggacgaaagcaaaaacacgatcgcaggcaggatagctctgcgtgaatatagttttgttgaagacggcaatcagatcgaatgttaccaggtagcaggggtcgaaaccgtcagagcgcttcgtcagcgaggattgtgtcaccgtacctatcttttccttcttcattggtacgagcatttggtctgcgacgataaacaaaccattcctggcgctaagatctgggctggccctctcatgcgtaccggcgatgtgcgtatatacaatgccaaaacagaaacgttcgaggacgtgctaggtgaatacggcatgggcaagaacacgggttttttaccttggaatcgtgggttactgctcgatcccgaactcagttcatggctgcctaacaaagttcaggtcaatgtacagaagttcattgttctaatcatctctcgttgctcaagagcacccgtcggcctatacattaaataa

SEQ ID NO: 161326 - DNA, 666 bp, Enterobacter cloacae
atgactaggatcattgtggttggcggcacgaagggtggcccgggtaaatcgaccgttgcccagcaaatagcggtttgcctgaaagttaaaaagaaaaagaaaacccaagttaccgacatcgacatccagcgcaccactaccagctggtgcgaagaccgtcgacagaatgaagatctcgatctcattcctttcgcttacgttcaggaagacgtcgttaagcatctcaaatcgcttcaggggcgcttcgattatgtggttgtagacgcagggggcttcgactccgaaatccagcgacaagctatgctgatggctgatgttatcgtcataccgctgcgccctaaacgccgtgacctgaaatcgctgcgcgacatcgacccgattatcgacaatgtacgcaatgtgaacgagaaggtgaaaatacgtgccgttatcaaccagtgcccgtcactaccttcccaggtgtcgcgtattctggccgccaaagaaatcgttgagacgtttggtatcgaagctgcaccggtcaatttgtacaaccgtaacgtctacgatgatgcagaagaggctggtcgttctatctttgaaatgactggcgccgaacgcgacaagaaagcagaagccgagtttgaacagtttgttgattatatcttgagtctggaggaagagtaa

SEQ ID NO: 161327 - DNA, 228 bp, Enterobacter cloacae
atggcggtaaaacttattcgggtgtttctcgatccacttggccagttgtcgtgcattttcagagagcactctagctctagctacggctgtcttagctataccgaccatcacggtgggtatccatttgatatcaccctcatagcctttccccgcaaaaaaacgccaaccatatcgttctatcccttcacgatccgtttcaaatacctcgcaatccacaggcagtgctaa

SEQ ID NO: 161328 - DNA, 270 bp, Enterobacter cloacae
atgctggtaacggaaataggctttggcaaaatcaatgaaagcagggtcttgcgtctcttccagtatgggttttctcgtaataatgcccaacttggcaaatacagttatgtttggccaaacaggatcttcccaattgagatcagagccgaatacagtcaattgatctcggcactgggatatgaatgcttcaaggttttctgctgctgtcagcgtagcctttggcttaaacaggaaaatctcagccattggttattgctccttgttaactaa

SEQ ID NO: 161329 - DNA, 573 bp, Enterobacter cloacae
atgtgcaatgggaagtactacgtcgattttgcagttaagcattactggaacggtaacgaagatagctcaaaatattacgtttatctcatcgaatttgacgaagaagagcacgcacttgcgtcaaatcaggtagcggattcaatcagggactctgagatcaaaaagcaagagccagaagctacgatcatcagggttaagcacaatgagagtgatgactggtttgaactagtacgtaacaacaacgggctaattggctttgaatcagcacttttatcaggtatttctgctgcaagctgtggtgttgttggcgacagaattatcattgattcaaagtccgccagaaatgcttatgacgacataaaaaaccagagtgcttggttgctaaactatgagaaacagcctttgagagggatcgaagaagcgttaaaacgatgtggtattcactatgaaaaagcacgttcaaaaacaagcagacaactgagagtatcgctggagtcgttaagctcttcgctatgccgttggttgcctgatagcgccgccgaatacgtccttcaaaacctcaaaccagactga

SEQ ID NO: 161330 - DNA, 981 bp, Enterobacter cloacae
atggacaacaacttcacatcatactttaccaacaaaaaatatgtaacaaactacaactttaatggtaagggcatgatttacatagaaaatgagagagactacgttttttgggagtctatattcaatgcgcactttgacggaatgtatgaaattaaagcatccattaagaatgatggaaggcgcggtaaagatgcattgttggaattgattccaacattaaataaaagctgtcttttggccatcgatggtgattttgattacatatcagaatgcgactaccgatttggtaagtttatgtcgaatgcgtatgtcttgcatacgcacagttattcacgggaaagtgctgttttttcaaaatcaaaaatagatgaagttgttagtaagctaaggctaacattgccttgcacctttgatgtaaacaaaccgattcaaattatatctaaaagatatttcaaaccgcttgtcggttttttgtacctcatgagaaaaaatagagacgtagcaataaacatcgacatacataaaccaataaagaagtgtgagttcagaaaatacataaataacgacttcactagcaatgataagatcattcaagaaatgacatccttgcttgaaccaatcgaaaatgagatttactcatacatagatgagagatctatggagttttcctcttttgtagagcaggctaaccgtaaaggactaaaagaggatagcgcttatagatttatatcagggcatgttcttaatgataacattttgctaccaatgctagccagaataaaatttttaatggagcggcaatcattccgttctatagcatctgaagacactagcaaagaaaacaagtcaaacatgatatctgcaataaaaaatcattatcgagacaattgcaaggtgaaaacaataattacacacctaaatctttgcgccaatgatgaaatcagcaaaatgataaattccaaggtttctgcaatacattaa

SEQ ID NO: 161331 - DNA, 1008 bp, Enterobacter cloacae
atgagcgtaaaaataaaaaaattaagtatagagaatctcttcgatgaacataatgttgaatgggttttggacgatgttaatgtattagtgggaaagaatgggaaaggcaagtctgtaatattgaatattattcacagcctactgaataaagaagagtccacagaagtaaattattgcaaaaaggccaatatttacttaaatgataaacgaatgatatcaagaagaaacgacccatcttcaagtgagtttttaaaaataatagcatctcaggtacttaaaggcctgtctgaaaataaaaaggaaatcaaaaaacttgcaaaaataaaaaacaaagagcaagaggagaagattaaatcagaaatggagttgattttggaaaaactatcatccaaagacactgaagctccaaagggatatttcgttgagatgggagaaaaagagaaagggaagcaagaagaaaaaggtaaaataaatacaacttacatatcaaccattaacatgagtgccaactcaacaaatgaaataaagaaaagttcaggcgaaaaagtgatggttttagactttgaaataaaagaggagaaggatgctgcattaaaaaaaatagcaagcggcttaaggagcagcgaagaaaagaaaacattacttgacgttttaaatggtttttttaaagatacgaaaaaagaggtggtaatagaggatgatttaatagtttttctagaagataaaaaaacaactatagaaatagaaaaattatcatctggagagagacagctgatttatacatttcttagagtctttaattctgagagagaaaaccaaataatacttctggatgaacctgagatatctctacatctttcatggcaagaaatactaatctcatcaataaaaaaaataagagatgattgccaaataatattagtaacccacagccctggaatagtaatggacgggtggatgggtgcatacaaagagattgattctataattactaaagccgagaagtaa

SEQ ID NO: 161332 - DNA, 486 bp, Enterobacter cloacae
atgaaaatcgatatttgtggtgttgcaaatgtgccggaactagcccgtctttttgttgaaatggaggattattacttcggtcgcggagttgtaagctatgaggatatgagcgcttaccttgctgacaaagtattctctacttattcaggtgttacggttgtcggtgctcgtaaaaacggagaacttgttgggtttgcaactttttcgctgatgttccctgcgccgctttgttccggtcaggcatttatgaaagagatctttacgtcagaagcggcacgaggtcagggtgtcggtaaatcgctaattaggtttatcgcaaactttgccctcaaacatggttgttcacgccttgactggactacggataagtccaatccgaaggccggggcgttttacttgtcacttggcgcgactctgattgaggaaaaacagtactttcgtctggaggggaaggatcttgagacgttttcttcactcgcagagtga

SEQ ID NO: 161333 - DNA, 840 bp, Enterobacter cloacae
atgcacatagaatttaagccgtcatctgactttaataacgttaaaattaatagagctcctgacggcgctatggcagaaacttttagctgcaatattaactggggcgagaatcttgacagcagaagctatgtgaaatgctttagcgatcgcaagattatggcaatttctaacgaaataactggttatattttggcgaaggaggcagggctgcctgtacctgaaaaatgtgctttaatagcattgccacaagaaataaaagatgaatttaaatccaggtctggcgaagagtgctttgaatacggatttgctatgatgatggccgacgggagcacgcctaacgctattataaaaatgcacagccctgatgaggattttgcaaattccatctttatggatgctttaaataaatggcctcaaacagctaggcttatagcgtttgatgaatgggttgccaatgaagataggaatttaggtaactttattattacgccaaataataatattgtggtcatagatcatagtaatctcccatgcgaaatgctatgggagtgtgatgacttaataaatgaaaaggcatacaccaataaattggtgttgatttatgaattatgtaaggtaaaggggcgttcatactccattcctgatgatgcctttattaataaagaagctagccaccatgctttaatattaacttcttcaattgcagagcttgaagcatggtgggattatcttttagatcagccaagaaaagctaagttgaaagattttttgaacgtgcgtgccaacaaagcaagaacattgccttataaccagcagtctgggctaaggatgacagcatga

SEQ ID NO: 161334 - DNA, 852 bp, Enterobacter cloacae
atgataaacatacaagagttacttgccgcaagcaaagctaaggaaaacaatcagcttgttaaaggggtttggttccttattcaatggtcacctgatgactatagccaagagcgttttaatattggtgttgctttttcatcagaaagaggcgagaaacaagttaagttcaccaaatccttcaaggaattatctaattggtatggtggtaacttaacaaagcaaggtgatatggttataaaaatagctacccatacttttattgggaaaagccttgataaattttccagtgggtttttcgagagtggaattcattatgtccctatgggtatggctcaaggtgagtctatagaaaaaataatgaatgtgctatttaaagatgtagttcccatggctcaagaaaagcaaaatatcgctagggctagttatacaacaacacgaaatattataactgttgttagagaagctatatcaaaaaatagcgtgcttaaagacattatgcctgagaatccaatggtggaaacgctttcaggaatttcggttaaggttcctattcaatttagaagtaatgcaggaactatagtgtcggctgattacgctacgagcgatacagtagaaaatgagttgcttaggtcttttagagatattgatcttatcttaaatggcaatgattttgataatgtaaatagctttctcttgttgccagcatctgccaaaggggaggctaaaaaaattagcaatctaattggtgattatacatcttctttaaaatctaagggcgttgaaactattagtgctcatcagccatcatccctagtgaataaaattgatggttggtataaagaggttgcataa

SEQ ID NO: 161335 - DNA, 1086 bp, Enterobacter cloacae
atgcataatagccagcttaatgagctttcaattcctcagaaagagagaatttctccaagcggacgcgaaaatacattatcatcaataattgaaaaaattgcaaagcaatccacgcatctgtcctctgtgggttataaagggttatgtgtaggcaagtttactgataaaacgaattggaagcctgaaggtgagaatgtaatacgggctggaaaaatacaagagcgtgataatcatggcagaacgtatatttatttttgccctcatgaccgagttatggggtcattaccgcttcgctcgatagggtggcaagggctacctaatgataaaaatggtaatccacatccattaattgtgaaatttaaaaataatttgtaccagaggatgttggccaggaatacgccatgcggttcttatcctgataagcagacaccatttggtactttacctgatggaaaaccattttgggatgatgatggtgataaatatcaaagtagtagcattacatatcctgaccctccaaaatggcaaacagtgtttgtaaatgcagagaaagtccctgagcctattaatcccagtgagctggccgaatttgacgaaaccagagtaggtaaagagcatggctcaaaacaacaggatgggtggggtgagatagcccctaaaactggaaagaaaaatgacaatacatatgataactatgtcaatttatatccaaaccaagatgtcgtaatcggctataaggagcttccaagtggttatgtgcaagagataacaaggaaggaaactttcgaagaaaaagataaaaggttacgaacttatgtttctcaaccaacagatcacagcacactgcccggaaacaaggaatttatgaccagagtagtagcttatgatttaccgataggttactgcgatgctacatgggataaagaatttctttcaacgctccgatatcttgctgattggaccactggcgcagacccttatatgaacactggggttgttgaaagaattaatgaaccttcaatgataagtcgggaaacgggtttcgaggaaattattcgagaaaaggcaaaggagtatggttattaa

SEQ ID NO: 161336 - DNA, 144 bp, Enterobacter cloacae
atggcggatttgttaatttactttgggcgcctctcaaacgtaacaatatctcagctaaaaaacatgatgaaaataaattctcacccaacccagtttggcgtacagactttggatattttaaggattcaatccttgatggcatag

SEQ ID NO: 161337 - DNA, 612 bp, Enterobacter cloacae
atggatttgatctataaagttctggcttcattgggtggaatatcttttattgcatctggtgtgttagcttggattgggaaagtttatatagaaagatataaggctcggttaaacaaaaagactgctgaatttcaatcagagctaagtgcaaccaatgaaaggatcagggctaagctggataattctgtttatgtaacgaaagcatattttgacaaggagctatcagcatatagtctaatctggaattcgatgttcgaaacaagagaaagtgtactaaagttaaggcctgcaatggatcaggtagaccctgaagaaccatttgaagagcgtaagttcagaagattgaaaaattttgcaggtgcatttaattcatttgttataagcgttgagtctaataaacccttcattgcaccagaagtttataaaattcttgactcttttcggaaggagtgtcgttccgagtcaattttgtttgaacatggtgaccctgagttagattgggtgaaatattggaaagaagcagaattgaatcgtacaaccatcagcaagctttttgatgaaacgtgtgatgcaattcgcaataggatgcatacgttaactgtggttacttag

SEQ ID NO: 161338 - DNA, 198 bp, Enterobacter cloacae
atgaggaaatccgaagttattaaacatttcggaggtgtctgtaaaaccgcgaaagcattagggattaaacatccctctgtatccgaatggcctgaaataattcctgaggttagggcttatcaggttgaaaaaataaccaacgggcgtttgaagttcgatcagtctctttatccgaattctactgatatagcctcgtag

SEQ ID NO: 161339 - DNA, 282 bp, Enterobacter cloacae
atgctcaacgcccctccgcctgacgtctctgtggacgtctgctttctccccctcaccctaaccctctccccaaaggggagagggaattatttgcaccctctcccctttggggagagggccggggtgaggggagccttatcagtttgcgctgtagttcatcaccacaccgctcaggccggagatttgcttcagctcgccaagcgaacctttgagcttatctttagacgcatccggccccacgaggatacgggtaattttaccctgtaccggcgtggtgggtga

SEQ ID NO: 161340 - DNA, 306 bp, Enterobacter cloacae
atgaaaaaagtattagctctggttgttgccgctgctatgggtctttcttccgctgcattcgcggctgaaactaccgccaccgcagtgcctgcggcatccaccgctgctccggccaaaacggttcaccataaaaaacatcacaaagcggctaaaccagcggcagcacagaaagcgcaggccgcgaaaaagcaccacaaaaaagcgacaaaacctgcggtagagcagaaagcccaggcggctaaaaagcaacacaaaaaagcggcaaaacacgaagcggctaaacctgctgcacagccagcagcgtaa

SEQ ID NO: 161341 - DNA, 513 bp, Enterobacter cloacae
atgatgaagtgcccaattatttcattaataacatatttccttttctgctatacaccgatctgtcagtttattgtgcaggcttcgagagtgttaaagggagggttaaacttatactcaaatgttcccaaccaacttacctggataaatttattagggttaatgcaatgggcatggaacccaaatggaacgggataccatttaatgccacgaaacatagccaacagcattggaccaaccgatcttggtactatgaaaaatatgccaacgtttttcccggatccttatagcgctggaatgcatgaagaactatatagagctattaaaaatggtactggaaaaaatcaagggccgtggcaaggatccgcggacgatctattaaatgtgactagccgtaatttagattccgtttcacatataacaaacgatttaaggtttccttcgacggctggaatcttagtcaaaatgtcactcctaaagaagcagattcagaattgcttgcgttgttcatattga

SEQ ID NO: 161342 - DNA, 348 bp, Enterobacter cloacae
atgaaggggataactcttgctgcactcttactgctgcctctgtcaacttatgcaagctcctatcaatgtgaagctcttcagcaagggcaactgggtagcaatgggaagacagtcacagcacaatccagcattgaaattgatggttctcagatgcacttcagtttaaataacgcaagctgggatctctcgtacatcggggagaagcaaattgccaagctctatagcaccgacaacggcagtgtcgccgtgtctttcattgacggcaacccgctcatttttgttctgcatctggttaatgatgacggtagaaaaggcacttacaacctcagcgaatgctctgagctataa

SEQ ID NO: 161343 - DNA, 315 bp, Enterobacter cloacae
atgaaaaaactattcgcagccgccatatttttgtcagtgataccgaacgcttatgcattgagtcatggagataccgccaccctaaaagaaggaacatttaactgtaagaagctgaccgacttttacgagatgatcagttacatccaggacaaagaccaacagggtatgatgggcctcatcacttccggtaaatgccgtctcctaaaagaatcgatgacagttgagattcagaacgtagacgataaggggtttgttttcttcattaccccaggtggtcatggtggatggtcagccacacagttcttcaaagaataa

SEQ ID NO: 161344 - DNA, 186 bp, Enterobacter cloacae
atgacgtgtcacagaattgtcatgcaggatgcctggcgtcgctctgtttttattttaccccgttaccatggggaaattaaaatgaagcagagcacacttttcaccgcattaaactcgctcgtaattacctcctccgttcctgcgaaaccggttaataataatcgcgctgcgacgggactgaaataa

SEQ ID NO: 161345 - DNA, 1092 bp, Enterobacter cloacae
atgtcacatctgatgttatcccgtcacgggatctggtactaccgcagagtttattcaacacctcggagacggcgcgagattcgtatttctctgcgcacacgttcaaagcgcgaagctatgaaacgtgcagagcaatacatcacctcacagcctttcgcctgtgttccccaggccatcccggcacactcatcttctgccctggctgcacctgcactggtgaacgagaagaaaccattatttccgaacctgaaaagtgagcttgagaagtacgccaacgccaaaacggggtctgtgggtgagcgcgagattttgacgatcaacaggtgtgtgaatgcgtacctggctgctacgaaagaaccatttagcaaaagaagtgcagcggcgtttgttgatggtctggaaggctcagcatcgaccagaaaccgttacatcaagaagaactcggcgtttttcaaatggcttgcgactcgtacagatgaagacattcgaaacccatttgagggaatgggagtgaaggaaacaaccgcaccgatggatcgccgtcctgcgtacacgttcaacgatctgaaacgcttgcacattgctttacatggcgtgaaggattggaagcggtggatcattctgattggtcgctattcggggatgaggcagaatgagatctgccagctttaccacaatgacgtgatgaaagttgacggggtttggtgcttccgtgttgataacctgaatcctaatcagacgataaaaacggatagttctcggcggttcgttccgatccatttgcaactgctggctctgggcatactggatttcatcaaacaaaggaaagggcatctgttccccgaactaactttacacctcggcagctatggtcactattttagccgctggttcacgaggttcaggggtaagcatggtttgcctgagtatcattcgttgcgccactacgccgccacaacatttaaacagaatggtttccctgagcagttcgcttcacaagttctcggtcactcgaatgcgacgataacttataaccgatacgggaaaggcattagtgtttctcgtctgatgaagttagttgaagtactgtaa

SEQ ID NO: 161346 - DNA, 1620 bp, Enterobacter cloacae
atgctcagcagaatccggaccctgaggtctctgttttcaaaaggcggaccagaaatagtacatcatatatccacagtcacgcccgtcggctatcacgccccgcgtggggcaggtatgctgtgcgccaccccgctacgaaaaacctgcctgcagcaaatatgggagaacagctctctgcccgcagacatgtatcagcgactctatttagcgcctcttaatggtttgttagccagggtacagaatgtgccggccgcgcaacagggaaggtggttgcagtcagacggtttcggcgaccttacgctgcagtttacgacctgtgcggtcaggctggcaaaagggtacatgttcccccccggggcggcacctgaagagcaggcagcgcagaatgttatgtggaatgcggtgattttctggtcagcgctgttctggcacctgcctcttcttgcgactctggagggggagttgcttgacggtaaaagctggcttccgggaatgaccgttcctgactcaccctatcgtttccggttccgggaggctgagaacacatcagcgtttgcggcgcttgccgccgggcaacttatgccggcagaggcaacgggctggctggcagagaatcccggggcactgggcaaccttgccggcgcactctggaatcagcatccgggcatgccattgatacgaagcctgatgaagcaggccgctgaaaaggtggaatcgccttcacaggagatatcaggtgcacatgacacagtcagtaccctcgcagagtcggccctttccgttctacaaacgccttctgatcaaaagactgaattacagcctacatcagaagtaacccccaaaactgcaacgcccgaaatctcagatacgcaggttaatcagcttgcatcttctttaacacctgtctcaatggttgatggctgcaatcccgtcagcaatgagaaggcagactggattaccgaatgtgattctgtcgatatagaggaagctgatacagagatgctactgagtcttttcagtgcaaccgaaatgactgaagtgactggggccaatgcgggtgaagaagagtcctcagccagtgataaagcagatgacgggtcagagtttttatctcttgatgaacagcctcccgaaactgataagcatcaaataaatcagacagtagcggaagactctttccctgaacaaggtgttgaggataacatcccgtcacacagcattaacattgacgtaaaaaaaacagtgaaaaaagatgaggctggcgctgaattcctcaggtggctttctgaagggctcaagagcaagcaaatcgacattaatcagccagattcgagggcgcatgcagttgcagggttcatctttctcagggtgccggacatattttatctttacatcagagaaagcggatcagagctcagcagggattacatacagatggaatttgagaagctgcatattcacaaggtgcgcaggagagagcgttttattaaagcaaaactgtaccactctcctggtaaagaaggcacgtttaaacctgtaagtggatatcttgtcaagactacacaccttttcagaggggagtcttcccctgaagacagcaggcttctgtctttcctgtaa

SEQ ID NO: 161347 - DNA, 276 bp, Enterobacter cloacae
atgatgatctcatatcaggaacttgttcgcaccttccataagaagatcgacttcgtctatgtggcgggaaaaataaccaataaagggaacaccgcttttcgcgtcaatgcgaccggaacctgcctgaagccgaatccggaatcaccgactacgccgtgtaccaaaaacttctacctgatgccggatacctcgcgcgctatcgaggatatcaacgtgacggataaccattttcatctcggaatatgggacctgaaacagttcatacctgttaagtaa

SEQ ID NO: 161348 - DNA, 504 bp, Enterobacter cloacae
gtggcggataacgaaggtaaggtcagtgaaataggcatgctggcgaccaaaattattacccgggaaaattatgtcgttaccgtgcccaatgcggtggtggtgagcggtaagatcaccaaccttagcgcgctacagcccgatggcagcctcaatctgacggtcagcgtcactattggttatgacaccccatggcgtcaggtgcatgccatgctggagctggccgcgaaacgggcaaaagggattgatctttctgagccgccgctggtgcgccagttagggttaatggactggtatatcgcctacgagttgcaggttcgtctgctgcccgaccagtccctcgcggttgcccgcaatgaactgcatagccagatacaggatgtgtttaacgaatttaacgtgcagatcatgtctccgaattttgttatgcagccaaagggcagcgtaatggttgccaaagagaactggtataccgcgcccgccaaaccccctcagggcgaaacctga

SEQ ID NO: 161349 - DNA, 465 bp, Enterobacter cloacae
atgaaaaccagtattatcaacggctcggaagtgtctaaattatccgtggcgattcaattgagagcagagcacgtgcgctcaggcagggctggtgagcctgcactacctgcttatatctgggccagagaacgtgataccggcatacatccccactatcacctgacgctgctgttcaaccgcgaggtctatggttatctgggtgattacaccaaccgtgatgcagataatatggcaacacgaatacagaaagcgtggtgtagtgccattgggcttgaatatcctgactacgcgtacctcccgcatttcccgaagaatcacagtgcgtggttcacccgacaagacgctttaacgttaagtcctgattattatgacttcctgctacgagtcgcttacctggcgaagtacaacaccaaagacttaagtgacggttatcgtaactttggcacgagccaactgataacttaa

SEQ ID NO: 161350 - DNA, 153 bp, Enterobacter cloacae
atgattttattaagcaataagaataatgaaatccagtttcatggtaaagtggtcggaaattcccgtaacgcctgcatcgttctcagagcggccgatcaagtttggttttgtgtcataggtgcgtccggtaaaatcagtcctcagaatagataa

SEQ ID NO: 161351 - DNA, 687 bp, Enterobacter cloacae
atgcataagattgatagaactatagcaacgccacctgagagcttaagtgactatgactatcaaactcagacttggaaagatttggctaccgattgcaaaaaagctttacgtgccgcacttgttgaaatgcagggcatacccggagtaactactcctgacgctgatgaatacggcctacgttgtgcttactgtgaatgcgcaatatacgatgcgggtcatatcgagcatttcagaagaaaaaatcggagtcattttcccgagctgacttttgtatggcataacctattcttggcttgtggctctcaaactaattgtggacactacaaagatcgccctgaagcagcgccttataacccagatcaccttattaaacctgatattcacgatccagaacactatctgtattttcactcatcaggtcaggtatggcctctagaggggttgagcgaaaatgataaacgttgcgctgaagagaccattcgtgtattcgggctcaatagtaatgtactttcaggcgctcgtaggtcagctttaaccatctatagaagcaaaattctcgaagaacttaatgagatttcagagtggtcagagtctgaccgggtagattatttaatggaagagattgaagctactagatgggagccttatgcgacaacaattaaacattttctacagaaaaaaagataa

SEQ ID NO: 161352 - DNA, 1332 bp, Enterobacter cloacae
atgagactgtcacgcatcacattgcaaaactaccgacgttttgaaaagttcgagattgatctacaccctgaactcactgtgattgcagcgcgtaatggtcaagggaaaacgactattctggaagcaattgcagcagcactagggccttttgtgggagcttttgatttcgggcgttctgagcacatacgccgcaccgacgcacgctattctgtgcaggacaatagttatgaaaacgaacaaaactttcccgttatcattgattctgagattatcgagccagtaatccagtggcaacgagcattaaatagcgctaaaggccgtactactacgaaagaagctgctccactgtctgatttgggaaaattactgcaggaggatctgcgtaaaaactcagacgtggctctgcctgtgttgcgttattacagctccaagcgtttgtgggttagccacaagaacactgcacgcaaagcgatactaaccgaaagtcgtactgcaggatatgaggattgcttatcttctctctccagttttgcgcaactacaggattgggttagaaaggcaacgaatgcaatccaacaacaacgagaattgccgggctatgagaaatccaatttagaagcaaggctcaagggtataaagaaggctgtcgacactgtaatgggtgaggaaggatggagccactttcaccatagcttcatatatgatgagttagcgatgtatcatccggaccatggagcgttaccaataagtttgctcagtgacggggttcgtgccatgatctcattagcagctgatctggcattacgctgcgctcgcctcaacggtttcctaggtgagtttgcctcccttgaaagttcaggcattgtccttattgatgaggttgatctacacctacacccagcatggcagcaaagggtagtgcaagctttacgtaaagcattccccaaactgcaatttatcattagtagccacagcccccaagtgttatcaactattaagagcgataatattcgtgtcgtattcagaaataacgatgggcattggctggcggagtcacctgctcaagaaatcctaggtcgtgaaagcgcaattgcccttaacgatgtcatgggtgttaaccccattcctcctgttgaagcagcgaagcttattgcgacttacactgcagtcattgaaaatggggatgatgatagtgacaaaggtcgcacactgcgcagacaattagtggatatttatggtgaaaagcatcccgtattgttagatgccgataaactgatccgttttcagagatttaaactgcgcaagtcctctaaagatgaggggcagggataa

SEQ ID NO: 161353 - DNA, 522 bp, Enterobacter cloacae
atgacatcaggcggaaatccttgttcattgagagcggtactggcgatagaacgcaaaccatgggagacgagaacgcctcctaatccagctcgcttgagtgctgcattcactgtttggctgttcattggttgggttggtttgatgcgactgggaaagataaattatcgaccaccactgagagacttcatcatctccagaatagcgagagccccatcagatagtggaaccgaatggtcccggttcatcttcattcgcgctgcaggaattttccattcgctagcattgaaatcgatctcatcccatcgagcctcagcagctacggcagggcgggtaatggtgagaagctgccacatgaacaagcaccgcgttgacacactgatacttgccgtacgcattgtttgcattaattgtggaagcttatccggactgatactcggcatgtttttcttttgcggtttctcgaatgctttcccgatgtttacgctgggaaccgcatcaatcaggcccgtgttctgcgcataa

SEQ ID NO: 161354 - DNA, 246 bp, Enterobacter cloacae
atggcaagaaaaaccaagccgttaactgatacggaaatcaaagccgccaaacctaaagatgccgattaccagctgtatgacggtgacgggctaactctgttaatcaagtccagtggcagtaagctttggcaattccgttactatcggcctctgaccaagcagcgaaccaaacagagcttcggtgcctaccctgccgtctcgctttctgatgcacgtaagctcagagctgaatctcgagttttatag

SEQ ID NO: 161355 - DNA, 285 bp, Enterobacter cloacae
atgttaaacgttcctctattcattgaaggcatgctgggcatgggtgacaacatctaccagcgcgctttcgttaagcagttgccagccggtacttatatccggaccgcctggcccgaactgtatgaagatttgcccgttctgcctgttcgcagttttacaacgctccgcacgcagcgcaaaaacgagtaccggacgcaggccgcttttcacctgccgccagatatgcgccagacaaaacgaatttttctacggtccggatcatctacggcgcggttcaatatttga

SEQ ID NO: 161356 - DNA, 381 bp, Enterobacter cloacae
atgaaatatgcacgtattgatgatgggattgtcgttgagttattcgaaaccgatggtgatatttctcagatgtttcatcctgatctggtatgggtggatataacgagcattaaaccccagcctgataataactggacttatgacggcaaaaagtttagtccgcctgttgttgattatgtgaagctggcagagcaggaaaagtcctatcgtctgcttgaagcagagcggatcactgccgactggaaagtagagctttcgctggggatcattagtgacgatgacaaaaaaaacctgatcgcatggatggagtatattaagcgggttaaattggtggacgcctcaaaagcgccggatatcacctggcctgttatccccgtctga

SEQ ID NO: 161357 - DNA, 477 bp, Enterobacter cloacae
atgccgcaaaatataaggccggaaagtaccaaatggtgccaactctcgccaatacattttgcaaatttgttaagcatttctcttttacggagtcaggcgcagctatgccgccgaccacctttcacgccaaaaacaagtaaaacccttacaatacattcagttgtagagttctctcgtgactggtgcgatgacatgacaaattcgaacgatttttcacgaaaatttaacatctggttattatttagcacattcgtctgggtcagcgtcgaaattactaatatcatttcggttatctgtcagcaagccccagagtatcatgtgagtaaaataacagagcgtttgtgggatttatgggcagagaagcaaactggaaataaacaacctcttgaaaatcaacaaaagagggttattagcagaacttattatggctggtgcgtatttcaactttatttatatgatttgctgatattcacgtaa

SEQ ID NO: 161358 - DNA, 471 bp, Enterobacter cloacae
atgtgccttcaaccaatgatcatcatatttattatgactagtagaattgaagaaaaattaatcatgcatagagcaaagggatttgcaaaaagtatcgatgggattgactcctactctatctcattagtgaatgagaaggattttacttggcatcgtgaggagttaaaaagagttaactccataaaagatgaaattgaaggatttcattttgaacaaccggttaatgtaaaggaattggtcgaaaaaacgatagatatattacatgtggataacgagggtttctgttgctttatctatgagggtgttgccagtgtatgtgtccatgtgaacgattttcgtttatttttagcaagcctttttaaaataaatgatacttatgacatatgtctcctttttgaagatccagacagggtttttattatcagtgatgacgagcattctttaagggtatattacaaaaaaatgatttaa

SEQ ID NO: 161359 - DNA, 1104 bp, Enterobacter cloacae
atgtacaggcttatgttaactgttttgcttttgtatccattttcaacctttgccacatgtgtgttgaatacgagtaatacaagcatgttacaacaggaacaaacagttcaaatacccttaatacatcagattatatcggttggacaggatatgcccgtaggttctgaaatatacaggcaaacttaccgctcgggactaagtccctacaaggtaacctgtgcaagtactaacggttattttagagttaaacgacagattgattatacccctcaaccagtgtcagggtattctggaagcgtctatacaacagtatacgaaacgggtattcctggagtgggtattagtatatggaatggttcaaaagtcatatggccttatgaagaaattatatgtctcagtggtgatgatataaattgtacagtagataatccttatagtactaacgcctttgatataacacttataaaaacgggcgatatcaccccaggactccttgatgctacgaatttgccagcggtttcgataagtcttgggaagcaaacagagaattatgtaaaaattgcaacttactcttttactggcagcattcagattaatacttcaacctgtacgacacctgattataccgtcccattggggaactggtcgcaaacgaggtttaagagtaaaggatctagcagcccgtgggtgcccgccagtattgttttaacgaactgtaccagggcagttggaaatgcaacgagtggaaatgtctggtcggaaaacgcttcaggcataaccacaggagccttgacgcctaacccctggactgtttcttttacttccgtcagcggcgttattgatgctgataacggcatcatcgctacggacacgtcagcaacagatgctgcacaaggggtagggatacagctcagccagggtctacctgacagcgcaggaactaaccttataaaaatcagtgatagtgcaataaccggaacgttacctacaacgggagaaacgtcatatgtcattccattatcggcgcgtattattcagaccgaagattctgttgtggcaggtaacataacgggaaaggtggtttacactttaaattatctgtag

SEQ ID NO: 161360 - DNA, 141 bp, Enterobacter cloacae
atggccagggcgacacaagccatttttgatatcaaaagccttcaggaataccccggcaacgccggggatacggccagtcctattattttctcgtcctcaggcatcagaaacgccatgtggctgaaagattacctgcaatag

SEQ ID NO: 161361 - DNA, 501 bp, Enterobacter cloacae
atgattgagttggcatcagaggttgttaacttcattgtaaataatattggattgattttttccttagttgcattagtgttatctttcttgagctataggaacagtaaattagtaaaaaagaagaacgacaaagatgctctttataaatttaagacggaagccttactcaaggcgcgggaatttgaaattgcttttcaagattcatatgataagatagatggctttataaaagaattgcaaggaaataacagcctctttgcagagccaaagaatgtaattttgaatgagttgatttcacagcgtgacacattctataaacagtgtgtgcttgacgccaaagcaacttgtctaaaattaatagataactttgatacattaagtgaagacgaatttgcggaatatcataaggtttttaactctgaattggagagattaaaagcaaataataaaagattagattcaaaatttacgtatttaatccagagtattgcagtaaaataa

SEQ ID NO: 161362 - DNA, 159 bp, Enterobacter cloacae
atgtcaaaagccacgaatacagcagccactaagcgcaacaaccgtaagactcacgcccgtaaattcctggcaacaccagaggggaaagcctggcttgctaagaagcaggaagagcgagaggaaatcaagctggcgcgagcggctaacaacatgttttag

SEQ ID NO: 161363 - DNA, 630 bp, Enterobacter cloacae
atgaataacgttcgtctgtatgccagggcatccaccgccgagcaacacgccgaccgtgccgttcctgcgctggaggatttcgctaatgagcgtggttggtctattgctgcgcgatacatcgagaacgccagcggtgcgcggctggagcgtcctgaactgatgcgcctgctgggtgaggcggaggctggcgacgttctacttgttgaaagcatagacaggctaagccgcctgacacaaaaggaatgggcaacactgaaacagaggattcaggataaggggctggtgatcgtcgccgttgacctgccaacctcgtggcagttgctgaacgaaaccgcgtcagagctaaccagcggcatcctcagagccgttaacgcaatgctgatcgatattctcgctacaatggctcgcgtggactacgagacgcgactgatgcgccagcggcagggcatcgcacgagccaaagctgaggggctttaccgtgggagccagaaggatgttgctgcccgcgagactgtccgggaaatgctggggcagggtgtgaaacctgagcgcatcatgaaagctgccgggataagccgtgcaacgttctatcgcatcaagcgagagctggccgccagcgttacggagtga

SEQ ID NO: 161364 - DNA, 1890 bp, Enterobacter cloacae
atgccaacaaacctacgccgcctgcttgcgcaggctgctgacgccgaaccgctgaacactgcgattgccgaagctcagcaactggttgcggagaagatcgttatacctcattccaagttatgccctgtcaaacagcgacctgtgaaggctgcgtttaacacggagtccgggcagtatttctacaatgcagatggttccgttatgtcgttccgtgaatggaaagaggcgaacggaatcggacgcaagacacacgcccgccgcgctgatgctgggctacgtcagattatccagcccggcgacgcaattcattgtcaacgcgctgagattgatcaatggctcaacaagaagcctgcccggtacgccgaaccgctgccgccagattttcccggcgttcgcgttgacgatgccgctctgaaaccacgtgagcacgccatcccggaagcgaccacagggcaaaacgcctttcttaaagcctgtcgcgagttcctgatttgcgacgacgccaccctgaaaagaatcagccggggcatgagtcaactggaagcgatgcgccatgcaggctttaccagactgggagacaccccggaatttcgccagttatggtgcggtgagctgaaacccacagatgataaattcaatacgctgaatctgcattgtgacgttgggggcgctgacctgccgccgtccatcccgccgctggttacagcgccgtacaggttccgcgaactggagcaatgcgaccgcccggcgttcgtgccattgccgccgccagatggtggcgactggcgacccggccagcaggacgtagccgccgctgtgtttgcccgtgaccgcgatatgttggccgtgctgcctaccgggtacggcaagacggctgcgttcacctatgccctgcaattcgagtctgatgctggtgacggcctgaccgttatcgttgtgccgacgaacaccatcaagcagcaggtgctacagcagttaagggaggctggcgttcacgcggtggcctttggcgataaactaccgaagcggcgtaatgcgcagcagcttgcggggctggctgctggggcgtttcgggtggttgtcgtttcgcctgagcatctggtgccggggagtcaggtgctggcggcactgatggccgcaggtgtggacagatttatcatcgacgaagttcacaccgttgatgactgggagtttcgctctgctttccccgcgatgaagcacaccttgcaaaatgccttccccgctgcgcagcgttgtgcgttcactgcgaccctgcgaaaaggtgatgagtttgagctgatgaaagagctgggctgtcgtggcgagttcctgaccttccgcgtcagcgctgccagagaaaacatccagcttattcctgttcagcaatgcgaaactcagcgccgggctgccgttggtctggttgatgtccttccggtggatgagaagacgctggttatggtggacagtatcaagatgctttacgcgtacctcgacgagctgggaagccgcgcccggccttatcattccgacacccgccgcctgagccgtgaccagcgacacgctaacgctgagtggtttgccactacgcccggtgcggttctgattgctactaaagccttcgggctgggggctgatatctctggcgtgcgtaacgtaattgtcacttatgttcccgaagacctgcccgatttagttcagatgatcggacgtgccgggcgtgacggtcaacctgcccgtgcttttctgctgtggtcatcgttggctctgtatggcgaccccatcacctatgacgccgactctgccccggtgccgtccggtgtacctgatgagctggcagcgttgtaccgccctgaaaactgcaattggggttacatctcccgcttcctctga

SEQ ID NO: 161365 - DNA, 177 bp, Enterobacter cloacae; identical to SEQ ID NO: 80941

SEQ ID NO: 161366 - DNA, 396 bp, Enterobacter cloacae
atgaacgataactcttcgcttaatgggttagtgtaccttgctgtgctgctggtgctttatcttatcccttctgttatagcttacagaagatggcacagaaattttaagcctattctggttttaaatatattccttggctggacttttcttggctggttagtctgcctggtatggtctctctcatcaaatactcagactacggaggtggtggagaataagaatcaaaacatcgccaagaaattcttcttagtcagtgctgataccaaagagcgaattcaggggttttacacggatgatggagccttgaagagcatcgatgagaatggattcacgatttccaatgcgagtaaaaatgcagagggagggatggattttatggtggaagcatctaagtag

SEQ ID NO: 161367 - DNA, 216 bp, Enterobacter cloacae
gtgaaaaaggaggaagagccaatcaccagctttatctggtgtggtgcaacggtgtgcgtttatacgcaggtagtgaagtttgcagggacgacgatacagcaagcgctgcgcttacctatgcagcgccatctgttaccgaccaacctaataaaagttgtaaacgaagaagtggcgaaggctggcaaattgccggaagagagccccgccgcagaataa

SEQ ID NO: 161368 - DNA, 204 bp, Enterobacter cloacae
atgaaacatttggtgctgacactggcactgctgccagccctggcgaatgccggacaaattacgatgaccaacccacaggaagaacagacggagaacggaaaaacgctgtgcgtgtatgagaacagcaattacctgttcacctacgtaactaaggggaaatgtccctatgcgaaaaccttcaatacagaggattcagaagagtga

SEQ ID NO: 161369 - DNA, 1506 bp, Enterobacter cloacae; identical to SEQ ID NO: 24081

SEQ ID NO: 161370 - DNA, 276 bp, Enterobacter cloacae; identical to SEQ ID NO: 24083

SEQ ID NO: 161371 - DNA, 267 bp, Enterobacter cloacae; identical to SEQ ID NO: 24084

SEQ ID NO: 161372 - DNA, 267 bp, Enterobacter cloacae; identical to SEQ ID NO: 24085

SEQ ID NO: 161373 - DNA, 294 bp, Enterobacter cloacae; identical to SEQ ID NO: 24078

SEQ ID NO: 161374 - DNA, 834 bp, Enterobacter cloacae; identical to SEQ ID NO: 24079

SEQ ID NO: 161375 - DNA, 159 bp, Enterobacter cloacae
atgaaaatcaacttcacccctgagacttatcaggcgctgatcgcgcgtgccaatcgtgaaaataaagccgccgccgcactggtgagcgaattaataacaacagtccttaacaaagaggaaaccaatgaaccaaagaagaaaagtagtaaaattcgttga

SEQ ID NO: 161376 - DNA, 615 bp, Enterobacter cloacae
atgaaacgtgtcggcataaaggctcaggtcggataccggagcccgcgggctcgtaaaggcgaggccagtatcgtgtcgcccaacaggcttcagcgacagttcaatccggatgctccggatgaacgttgggtaacggacataacctacatcaggacccacgaaggctggctgtatcttgccgtggttgttgatctgttctcacgcaaaattatcggctggtccatgcaatcccggatgacaaaagacattgtcctgaacgcactgctgatggctgtatggcggcgtaacccccaaaaacaggtgctggttcattcggatcagggcagtcagtacacaagccatgaatggcagtcgttcctgaaatcacacggcctggagggcagcatgagccgtcgcggtaactgccatgataatgcggttgcagaaagctttttccagttgttgaaacgcgaacggataaagaaaaagatctacggaacgcgggaagaagcccgcagcgatatttttgattacatcgaaatgttttataacagtaaacgtcggcatggttctagcgatcagatgtcaccgacagaatatgaaaaccagtattatcaacggctcggaagtgtctaa

SEQ ID NO: 161377 - DNA, 243 bp, Enterobacter cloacae
gtggcccgcctgagtcactactactgtgagatcaacgtgctccatcccttccggattggcaacggtatcgctcagcggatcttcttcgaacagctcgccatccatgcaggctatcagctgagctggaaagatatcgacccgggcaaatgggcggcggccaaccagagcggcgcaatgggcgatttaacggccctgaacgccatctttgccaaagtagtgagcgaagcgcgggaaactgagtag

SEQ ID NO: 161378 - DNA, 444 bp, Enterobacter cloacae
atgttacttggcaggttgcctagtaattataagttcgtagttacgctacgtaccccaatggaaaatatcccagagcagcaccagcatcgtataattaacgtcgggccaatcaatgttaatcagtgcccggcgttgtatcattattgtgatgctctctttttacctacgttattggaatgctttagtgccagttatgtagaggctatgtatttcaaaaaaactatctttacatccgatttatcatttgctcatacagtatgccatgatagcgcattctatttcgatccctatagcgttgatgatatcagcgataagatcatttccgggatagaaaatatgcaggttagagcgataaaacaagaaaaggccgataagctttttagtcagcttccaacggcgagggaaagggccttaatgtatatgcatagcattgacaagttataa

SEQ ID NO: 161379 - DNA, 864 bp, Enterobacter cloacae
atggggcagccggtgaataaaacggccatcgggcgcgcctgggtgcgccatcagggtatgcaggaggcgtcactgacggcaaaaatcatcccggccacccggcgctttcctgaaccggcgctggcgctgccggtgtatgacaacaatggcaggagtgcggggctggccctggtttccctggtcgccagcccggaggggcggatgactcagggggagacccgaatggtcatgacagagcgtgcccgtggagccgtgctgcagcggagtcagtccggaaacacgattgtggccagcgacctgacggccgcacttgatgcagtacgacatcacccgaaggacggtgtggtctggcagaccggcgatgagccaccatcagcacatctgctgaaagtcagcggaggtatcgttacggaggccgcatcagaacacaaactgatccgtgaccaggaggaaaccacacgacagacagaaaaagatatgcttaacaaagccgctaaagcggaaaaagaaaagagtgagactcaggagcgtattgttgtgccggtggaggacgcggtgcgtattatgcccgggatgctcgaggttgacgaccggaatgagccgacgattcctgacggaaaagtgctcattcaggttgccagctcggacagcgttagccacgatgagattagccgtcatatcagggcagaaaaggaaccattggccagcaaagtcgcttcggaacgtgcgggagtcagccgcattgtgaatgagctggccaataccgagcgggatattatccggcaacccgaaaatagtgagcgtggccgcatgccggagcgtgaagaacagacccccacccgtaccattcagaaagaacgctaa

SEQ ID NO: 161380 - DNA, 780 bp, Enterobacter cloacae
atgaagcgtgtcctctgtggcctgcttatggcgctggcgagccatacggcgctgtctgaggaaattgtgacgccagcggagccgttcaccggctggtcctggtacaacgaaccgaagaagccgcctgaacagccagcgaaaccgccgcagcctgcgcaaaaggcgatcccggatctcagcaaaatgtctcctgtggagcaggcccgcgtactgaaagggtacacgcaggaggcgcttaaccgcgccatcctgtacccctcgcgggaaaatacggcgacgttcctgcgctggcagaagttctggacggaccgggcatcaatgttcagtcagtcctttgcggcggcacagctgagtcatcctgatctcgattacaacctggaatacccgcactacaacagcatggcgccgtttacacaaacgcgtgatcagcagacgcaacagaatgctgttgaacagctggcccagcagtacggtctgttttacttctaccggggcagtgacccgattgatgtgcagatggcgggcgtggtggcggactttgcgaaaaccaacggaatatcgctcatcccggtatcggtcgacggccaggtggcggccaccctgccgcaaagccgtccggatacggggcagtcccggtcagtggagcacactcagcaggggctactgtggctgtgcaatggcatgtgggttggcgcggggggcatggtgatttttgccttatgccgctggctgcgccaggacagaacgcagaagcataatgaggccgatcatgaacattaa

SEQ ID NO: 161381 - DNA, 273 bp, Enterobacter cloacae
atgcacacacgaaacgtcaacgtcaaaaccgccgctcaagaatcttccaggaagataggggaagaacaaaaccctgtttctgtcgcacgggagtgggtggctcaggccacttcgctgaaagatggtgtcaccgtcaccctgtccgatgtgtcccgatacggagacgttcaggtggagatcagaacctacggaacgcttaactggcgcgcctggtcatttgacccggattttcttttggaactgaaacgcaatctgcaatacgtgcagctttaa

SEQ ID NO: 161382 - DNA, 1290 bp, Enterobacter cloacae
atgcttaaaaaattcattcattcttcagaacctgttctgaaggcgctgcaggatcacgcagcttttatagagttttcaacagatggcgtcatttatgacgtaaataaaaaatttcttgatgttgttggttatgaaagagacgaattgattggacagcaccatcgcatattttgtgatgaagactatgtaaaaagtacagattatgagtctttttggctaaaactttctgccgggtactcgttttctgacaagttcatgcgttataaaaaagatggctcgataatatggcttgaagctaactacatccctattaaaagcagggggggtaaagtaaaaagcatcataaaaatagccagtgatataacagagcgtattgtcatagctcttgaaaaggatgcgttattaaaagctgcaagtctttctatgggaatgatcacattttatccatcgggacacattatcacagctaatgataattttttaaatgctgcaggatatagcctggcagatatccagggtaaacaccattcattattttgcgataaaactttcagtacatctgctgagtatgcacttttttgggaaagattaagttgtggtgaaacgctgaccggtgtataccggcgcatcacgaaacacggtgcggatttgtggctacaggccagttactgtcctgtttttgattttaacggaaaggtaatgaaggttgtcaaatatgctcaggatattacaaaacagaagttaaaaaatgagtttgaagcacaggcggcgcataaggcatatgatgtgtcatctttaactgcggagcagacatcacatgtcagtgcagcaattgcagaaacgtctgttgctcttgaagacgcaattaccactaccacggtgctgaatgggtatattcagcaattatcacagcgctccgcagaaataactgaaatatcaaatactatccatgatatcgccgtccagacaaaaatgctttcactgaatgccacaatcgaagctgctcgggctggaattcatggtcggggattttctgttgtggctgctgaagtacgtcttctggcggacaggatagattccgctacgaaacaaatttcgggtattactgagcagaacagcgaactctgtaaaaagtccgtagtgaaaatacgtgagagtaatgatgcgatcataaaatctgtcaatacggcagaaaagaccgcagaaataatctcgcaaatcagtatgaatgcctcggccatgatggcggttgttgaagagataaatactgctgtacaggctgaatcatag

SEQ ID NO: 161383 - DNA, 759 bp, Enterobacter cloacae
atgattaattccaaccagagaaacgaagaaaaaagacagctttctttatataacatcgaacttttgaataccggctcagatgaacgtttcgatcgactgacgagaatagcggtaaggttgtttgatgttccaatagcgctggttacactaattgatgaagaacggcagtacttcaaatccttatgtggtgtggaactgcaaccaataaataaaatggtgtcattctgcaattggattttaaaaaccggacagcctttggtcattgaagacacattgatgaatccaaactttttaaaaaatcctctggttaccggctatccttttatacgtttttatgcaggatatccggtgcgtttacccggcggagatatagccggtgcaatctgcgtgcttgacagttcgccaaaaatcttttccccagagcaaatgtctttgctcatggacctcgcagcaattgtagaagacgagtttgaattattacaaatagccattaaagattctttaactgaacaatttaacagccgctcctataccctctttcttgaaaaaaccttccgcaaagcacgattaaaaaagagcgtgtttagtgtcatcgttattgatctcgatgagttcaaatttatcaatgacacctttggacaccatgaaggcaatagagtgctgaaggctttcgcccgcatccttgaagaggttacagcaggcaatcacatgattgccagactcggtggtgatgaattcagtattttacttactgactga

SEQ ID NO: 161384 - DNA, 570 bp, Enterobacter cloacae
atgctgcgtcaggaggggctggcgtctgaacggtttccgcttctgcgtctggatgccccgagcctgacctggccgatggagcttggagaaagaaatactgaaaagtttgtccgtctgttcctgttgccgggagtaggtcattgtggcggtggtgaagggttaaatcagatagatttgctttctccgctgatggaatggaccgaacaacataaggcaccagatgttctgatttcgggcaagttggcctctgatactcatgaaaaagtggcaatgccaccaatgcagccgcagggaacaatgtctgaaggcaaaatgaaagcagaatctctttttcatggtctacagctgaccagttctccggttgctgcagctatgccattactctacgtgctgctcaccgctgttgtgcagggcttcaggttcagctctctggcgaacttccgcgtttcatgcgcggtatacgctgaaccgttatccttcagccactgtatcggagtatccggcaacctgtcgccgaaacgcttttccaccgacctcagcatcacatcctgcaccctcgaactgtcgtag

SEQ ID NO: 161385 - DNA, 561 bp, Enterobacter cloacae
ttgccggtggcgaaaacgctgggtgagtatgacttcagtcaggtgccggaactgaataacgctcagttctggcagctctgcgaaacgacagactgggttgatgccgtagaaaacgtcctgttgttcggtgccagcggcctgggaaaaagccttctggcggaggcgatcgtggatggtgttgtaaggctgggctaccgggcccggttctacagtgccggagagctgctgcaggagctgcgtaaagcgcggacacaactaaaactgaacgagcttctgctgaaactggatagctaccgggtgatagtgatagacgacctcgggtatgtcaaacgcgacaacgcggaaacgggagtgttgttcgaactgatcgcgcatcgcgatgagcgcggcagtctggtcatcactagcaaccatccgttcagcacgtggggcagcatcttcgtggatgaaacgatggctgtggcagcagccgaccggctgatccatcacggatatattttcgagctaaaaggagaaagttaccggaaaaagacagcgaaggcagtaaccagcgtggcttaa

SEQ ID NO: 161386 - DNA, 255 bp, Enterobacter cloacae
atgactacgatatgcccgcaatgcggttctgaccgcataagtgagcgtcatattggcaggaagacgggaggtattgctggaggatttgatattaaaaatagtgatattatttacggggtaatggaagataaatttggtaattctactctcatgtacagcagtctgactatagtaaagttctggctgaaattgaacatgatagtgaagataagaattatgttaataaaactcatgaatatcttaagtgatgtttaa

SEQ ID NO: 161387 - DNA, 147 bp, Enterobacter cloacae
atgcaatcgaacggcctgatgctgttcctgtttgggaccccgatgatgtgtcagttcattatttcaaagcgttatttacgggtgaaccagcttcgaatggtaatcctactcaggtttggcttcaatgtttcgacagacggcaaataa

SEQ ID NO: 161388 - DNA, 414 bp, Enterobacter cloacae
atggaaaaatctaaacatgacgatcagcatcgtgatcgatttaggaaagataaaaatctaaggttgttacgccatttttgtattagtgtgcgtttgaatcaggcagagctagagcttttaaacaacagaaggggcaagcataaaaaaggggagtggttaagattaacctttttaaatcacactccaaccaacatcccgttagtaaatgttgaagcttggaaaatgttgtcagaattatcgcaaaagctaaatcgaattgcgatccatatcgatggtaagagcaaagacagcaagcttactcatacagagcttttcgcagtgaagcgattactcgtagagcttcgcaataaccttctaagaactgattttgggagtatctatcgtgaagggtatgcggaagatcaaaaggggtaa

SEQ ID NO: 161389 - DNA, 1143 bp, Enterobacter cloacae
gtgaagggtatgcggaagatcaaaaggggtaagagcttcgctggtgtcgttcaatatgtattgaaaccgggagcacatcataaaagtgatcccattatcattggcgggaacatgttaggtgattcagcccttgaactgatcgctgaattcgatagcaccaagcatcttcgccaagatgtcgcaaaatcagtttggcacaactcgcttcgcttacccaacggtgaatcactaacgaatgaacagtggtctagtatcgcagatgactatatgaaacgaatgggattcggtgatacccatctccgttgctatgtcttacatgacgacgaaggccagcatatacacattatcgccagcagaatcgacatagccagtgggaagctctacttaggtaggaacgaaaatcttataagcacacggatcatcagtgaacttgaaatcactcataacctgacagtgaccatgacagcaccaaagcaaccgaagcgaagaaaggtttcccgcaatgaacagatgctttcagaacggactggccttccttcccccaaagaagctctccaacagatacttgataaaagtttggcagatacacctgaccttttaacttttatcaagaggctggaagaagctgaagtatcctggaaggccaatattgcctctaccggtaaaatgaacggcttctctttcgaattctcaggaatagctttcaaagcttcgcaattgggtaaaagctacagttgggcaaatcttagtaacaggctcaactacaacccagatcatctagaagctcttcgaacgggcataccaccagaagaaccccctgctcctgctcctgctcctgctcctgctcctgcaaaagatgttgcaacaacggatattccaagggaaagcataagtgaaaaaattgtcgaactggaactacggctcaaagaagccaaacggaatgaaatggtagaaaagattcttcaaaaaaatgcagtacaaaggcaaaaacactccagacttagtggctggattccatttttaagaaggttcatagagcttctcagaagctatgggaagagcatcctccaccaggtccctccaaacttctcagtagtctattcatcacattatctgaaatcttcaataaaaattcgtttatag

SEQ ID NO: 161390 - DNA, 594 bp, Enterobacter cloacae
atggaagttgttacatcattgatatttgatgcacttgcagaaaaacattcgtcattaatacgtgacgaaataaaccttgaagatgtaatagataaaagcttagttagtaaattatttgataaactgactacatcaatgaaagggtacagcttggtaagtgtgaccgatgtttatgtatataatccagataaggatgatggaacaggttctcatattaaaaaagcatctctatcaggaactggtgtaacgttatcacaagaattgggttcattatataaaaaaggtttttatatttggcgaattgtttggacagttacagatgatagatatctcgattcagatatctatgaggttgaagctttattttcagaacctgaaacctgttcagattttgcatttttggttaaaggttattatcctgtgaaagttgatagtacagacatcactgatacgcaccataaaaaccgagtaaacctcagtaaaagtgaagagatgaagttcaataaactagtattaaaaacggccaaagatcttttggaggggttttcaaatttagatgaaaacggcaaggatgatgaggagggcgctatatga

SEQ ID NO: 161391 - DNA, 378 bp, Enterobacter cloacae
  misc_feature (349)..(358): n is a, c, g, or t
atggacaacgctgaacagcaatttctgaacgatctggatactaaattctggaaagccgcagataagctacgcgccaatatggacgcggcaaactacaaacatgttgtactggggctgatctttctgaagtatgtttcagatgcctttgacgcccgtcagaaggaactgagagggctgtttgaagacaagtccaacccggacaacatttacgcgctttttcgtgacgattacgacacagaagaggcgtaccagcaggcgatcgcagaagaactggaagtccaggactattacaccgagaaaaatgtcttctgggtgcccaaactggctcgctgggaaacactcaaaaccnnnnnnnnnnattctggggaaagacgatag

SEQ ID NO: 161392 - DNA, 1500 bp, Enterobacter cloacae
atgcaaacttcgagagctattaataaaaatatcggagggaatgactctgagaaatatctttctaagctgtgtgagagaacttttttaagcttatggagttatccaaatgtttatactgatgaaggaaaaaaaacggcggcgggagatgggaaggagctttgtgatcttctggttgtatttgaaaatcatgtcataatattttccgataaagatatttcatttaaggattccggggatttaaaagttgactgggggcgttgggttaaaagggcggttattaaatccgctgttcaactttatggtgccgagtcatcattaaaagaaagacccggtaggttatttcttgatgctaagtgtaatgtcccttttccaattaaagtaccagagtgtgacgaaattatcgttcatcgaattgctgttgcaaagaatgcatcaaaaaaatttcaagagcattctggcggttctgggagtttgattatatgtccgcgcatagtgggaaaccaacattttgatactccgtttatgatcggtcagcccattgctgacaagccttatgtacatgtttttgatgatgttactttagatattatactttctgaactcgatacaattgctgattttatagattatcttagtaagaaggaagagttcattgcttcgggaggactaaactcggcagcgggggaggaagaacttttagcatggtactatataaatgctaaagatgggcgtgagccggggttttatatagagcaaggagtttcagctttgattgttgagggggcctatgaatcgcttaaaagtcttcctcagtttattagagggaaagaactaaactctaagtcttatttttgggatgcctgtatagaaaatttcgcgaaacatatgcttggtggcacaatattgtctgaaggggctttttcttttgatgagatgactcgaggtctaagaattatggcatccgagaggagattttcaaggcgtatactatcaagtgcaataattgaaaaagttacctccatccctcatgggcaaagaggtgttagagttttggtttctcccagtaacattgataatgggtatgtttggctagtagttccggtgccagaactttgcacatcatatgatgattatagaaaatatcgtaaagatatcctctatgtttactgtacttcagcaaagctacttttcccggatattaaatatatagttggagttgctagggaaccgatggggggaaatggaggggaagatatggtgtttattgattcaactcagtggtcagaggatgactacgctagagctcgaaaagatagagatgaatttaaagctttacttcctgataatattaaaagaacttatggtcacgattatcaatttcccattctcccgggagactatcctgaaaaagaaattttaagagatgaaaagaatagtaaagccagaattaaacggattaaaaaggcacaaaaaaaagcgcgtagaaataacagaaaatga

SEQ ID NO: 161393 - DNA, 780 bp, Enterobacter cloacae
gtgcaggataacacttcaatttctttatacatttccataggtggttttatcatatcctgcctaggatttttaaataccattcgccagtcaaaatacaatagaaaaatagaacgactaagaacttatgacaaaatttatttcgatgtttgcgacttgctactattcgactacaaaataaaatcacagaaaacatacacatcagaagataaagatttagaacaagctgtcaatcaatttagtcagttacactggctggagcaaatatatggcccagatggttatgaacatataaaattcaagaataaatcagaccaagccagctttagcaaaaaagtatcagaggaatattacaaatttcaaagagaaaaaagcttgtcattattaggaaatcaatcaccagttatgcatactgataatgaagaatttaataatcgttttcaacgtgttatgacgcatattaaggagaatatatctctttttagcaaaccaattagattagaatgggaaaaaacaagtttaagggaacccgaggaaataaggatggaatatatcgcacttgagcgagtcaacagccatgcttgtgaagaactggaagaaaaaattgacgacccataccttaaaatattccttttgataagacaagaacacagactgctaaataagcagaacacagaaaagctattggatactttgttcaatttaaaatggcggctttcaaaatcattaagaaaaaccaagagaaaaatgtcatgtaaatttaagttacactccgaagattga

SEQ ID NO: 161394 - DNA, 837 bp, Enterobacter cloacae
atggcaaccgggctgcgtattctcggtgtatccctgcattttttgggccgtcatgatgtcgggcgtgattatctccaacaatctcttgattggtatgaacatggtgaattaagccactctttccgttttggtcttgatcaagagagcgccggtcaggcctttctgtctcgtttactctggttacagggtgagtataaggcagcgaaacagatggcatggcgcggtgttaaaaaagccgctcgtttgcagcatgtctgttctctttgctgtgcactggctgaaggcgcttgtatgacagcagcactggatcgtaatccgcgttgggttataaaggccgcaaactggcttattcatctggcaaaaaggcatgatttatatttctggaagacatacggcgagctgtttcttgtttgggctaaacagttcagtcataccgatgttagtcaaaccacactatttagctcgttgcgggcgatgggattagactggcaatattcccccttgttgtcagaaattgataccggggtatcactgagagccacccgccaggatcatgaaaactggtgcacgcctgagctgatgcgtctttctgccactcaattacctcctcagaagcaacgcctgctgttggagcaggccctggacaaagcgcgccagcaacaggcttatggctgggccctccgtattgcttattcattggcgacattgcaggctgaagccggggaaaaatgggctgctaaacaattgatacaggacgctttaaatgatgttgatgactcagacaatgcgacggatgtaagaagtgctattgcgttatgtgcccgaataggggcctga

SEQ ID NO: 161395 - DNA, 1419 bp, Enterobacter cloacae
atgaatataaaccaaatacttacttctgaacgtgggtctgttgtagctcccgctggatgcggtaaaacacagctaatcgttgccgctttaaataatccacacagtaaacctattttggttctaactcatacaactgctggggttgcagcccttaagaagagacttaggaaatttaaaatagcaaaccaaaattttgtggtaacaactatcgatggttgggcattacgagttgctcacaattttgctgcatcttgccccatgcactcgtcggcagaaagccctaagctattttatcccgagatgcggcgggttgttaacacattcattgcttctggtgctctgtctaaaattcttaaagcatcgtactcacgactttatgttgatgagtatcaagactgtaatatggatcagcaccagttaatcgtttcactttccaaccaattaccgacagtagtttttggtgatcctatgcaatgtatctttgattttagtggtgcaatgcctgactgggtgtctgaggttgagcaacagtttccattgttaggaaccctaacgacaccttggcgatggaataatgccaattctccaatattgggagaatggattcttcaggctcgtgaaattttaatgtctggagaaaaggtcgatttgagttcttgcccccagcacattttttggcatccccttagtggagattatcaaactgatcgttccagcaattacaaagtcgaacgatcgatattagaactctatcctaatgacagcttattagtcattggagcgtctatggatgaacaatctcgtcacagttatgctcagggaaatccccgtatagatgttgttgaacaggtccaactttcgggaattataacggcagctcaagaatttgacgaaaagaaaggaaaatcacttgctgattcaatcgtagataatgtatctaaaatgattacgaatgttgatgcagcagtaactaagcgccgtattgataccattctaaacggtcgtaatgaaaaaccggctacagaatgcgaacaagcattatgtgatgttgtaaattccaattcacggtcaagtattttatctgctcttctgcaattggaaaagaatgacggggcacgtgtttatcgtaaagcagcctttaaagccttaaaagatacaatatctatgtctattggtagtccacagaaaagtatgtttgagtcagcttctatcattcgcgagcgtttacgacaagtaggagataatcgaataccaaaaagggcaataggttccacgttactattgaaagggcttgaagcagaccattgtttgatccttaatgctcaaggccgtggaatgaacgcgaggcatctttacgttgctctttcaagaggggcaaagtcagtcagtgttttttctacacaccaatatataggatga

SEQ ID NO: 161396 - DNA, 279 bp, Enterobacter cloacae
atgagcggtaagcgttatcccgaagagtttaaaactgaagcagtcaaacaggttgttgatcgcggttattctgttgccagcgttgcaatacgtctcgatatcaccacccacagcctttacgcctggataaagaagtacggtccggattcttccgctaataaagaacagtcagatgctcaggccgagatccgccgtctccagaaagagctgaagcgggttaccgacgaacgggacatattaaaaaaagccgcggcgtacttcgcaaagctgtccgactga

SEQ ID NO: 161397 - DNA, 1086 bp, Enterobacter cloacae
atgacaggaatcgatttttcttttgaaggtttgactattgaaagagtgattgcacacagaatttttcctagatcagcatctaaaacgatgacacctgccaaacttagtcaacagttgcttaacttcagtggtgaggccatagatgctttacaacttagaatcactgaagctcttgctgcaaggtcacatggcattgaaatgtcaattcgagagggagtagcggatagttttcttaacttagctgcttctactatgcatacttctgatgatattttcataaaagtaagtcaacgattagctaacaaattgactgaatcacagttcaatagtggtgccccaggggggatattgataatcgtctctggtgaagttggggaagaacagaagccttttctcgctgtcatcaaagctgaaacccaaactggcttcagtacacatgaaaacgaagaacagttaacaatgcaattcctcaatgaactattactgacaccttcacagcgcttttataaaattggctttattgttgaaaaagatgctgctactaaagatgaaaatgataattaccctttctcatcctttagagcatttttattcgaccatttaatgacctccactgacaccagcaaagctgcgtcatatttttacaattcatttctagggatggatattagctcatcctcaaaaaaactaactcaggatttttatgagacaacaaggaagtttatcaatgaatcgtccatgcctgaagaagtcaagcttgatttgcatgaagctttaagagcagaactacgctctaaaaaaacgacattaaacatcaacgcgtttgctgatgagcatttccctggcgagattaaagataaatataaaaaagccatttcagacaaaagactgccgcaaaactcctttattaaggataccgattacatttcttcgaaattaaaaagacgcagtcgcttaatattctccaatgatatctggatgtcagttcctccagaaaactttagggaacttgttgaaatattaccaagtgacgaccataatataaccttgataaaaatcaatggtaaattaacgagtcagctatga

SEQ ID NO: 161398 - DNA, 342 bp, Enterobacter cloacae
atgaacgatatgtatgaattaatggaccgttggggagcatgggcggcagatgaaagcaacggcgttgattggcaacctgttgctgcaggtttcaaaggtttattgccacatggcaaaaaaactcgatttcagtgtaacgacgatgagggaataaaaatcgatagtagcgtttcacgactgaagaactataaacccaaggaatacgagttggttattgctcattttgttattggcatctcattacgtgcaattgccaaaaaaaggaaatgtgcagatggtacgatacgaaaagaattacagacagctatgggttttattagcggtgttctgtccatgatctaa

SEQ ID NO: 161399 - DNA, 348 bp, Enterobacter cloacae
atgaccccgggagaggctgagaattttcgtcgccatcaccaggcgaacaacgttatccgccaggtttttgcctgtgcccacactgtgggacagcaccaggtttcgttgcagttcggtcagacgttccgccggaatacgggtttgcgccagtttgccaaacccggtattaatgccgtacaccacgtttcccgatgccacaatgcgggtgactgtttcctgggaggccagcacatcggcacgggcctcttcggccagcgcaaggcggacattaccctggtatatttgtcgcaacatgggcaaatggacatgcccgggttgcaggcggcaaagggtgtaatcggtggatga

SEQ ID NO: 161400 - DNA, 414 bp, Enterobacter cloacae
  misc_feature (371)..(380): n is a, c, g, or t
atgcctgcttattttgctacacaagccctgcttgctgaaggatgggctcacaatgtgcgtctggatgtcgatgctgccggcatgttaaccgccatcacgccggacagcacagcacaggatgctgtccggctttcaggtccggtgatcccgggtatgccgaatttacactctcatgcattccagcgggtgatggccgggctggcggaggtggccggaaacccgcaggacagtttctggacctggcgtgacctgatgtatcgcacggtgcagcgattaacgccggaccaggtcggtattatcgcccgccagttgtatatcgagatgctcaaagggggttatacccaggtcgctgagttccactatctgcacannnnnnnnnnttgcgccagcaggcgattatccgccagcagataa

SEQ ID NO: 161401 - DNA, 705 bp, Enterobacter cloacae
atgaacctattcaaagggcggcattttcagcgtgacatcatcctgtgggcggtacgctggtactgcaaatacggtatcagctactgtgaactgcaggagatgctggccgagcgtggtgtgaatgtcgatcacaccacgatttaccgctgggttcagcgttatgcaccggaaatggaaaaacgactgcgctggtactggcgtaacccctccgacctcagcccgtgtcacattgacgaaacgtatgtgaaggtgaatggtcgctgggcctacctttaccgggccgtcgatggcaggggccgcgccctcgatttttatctctccccacgtcgtaacagcaaagccgcataccggttcctgggtaagatcttcaacaacgtgaagaagtggcagatcccacgctttatcaacacggataaagcgcccgcctatggccgtgcgcttgcgctgctcaaacgcgaaggccggtgtccgccagatgttgaacaccggcagattaagtaccggaacaacgtcattgaatgcgatcacgggaagctgaaaaggataatcggcgccacgctgggatttaaatccatgaggacggcttacgccacaattaaaggtattgaggtgatgcgtgtgatgcgtaaaggccaggcctcagtattttattatggagatccgctgggcgaaatgcgtctggtgagcagagtctttgaaatgtag

SEQ ID NO: 161402 - DNA, 639 bp, Enterobacter cloacae
atgaccaccagtgagagccagcaggcgcaaatcagcatccggggtttacacaagcgttacggcgacaatgtggtgctgaacggtatcgattttgacgtactccccggccaggtcattgtaatcattggcccgagtggctcaggaaaaagcaccttcctgcgctgctgtaacggactggaactgcctgaacaaggggatattacgctgtgtggtaaagcgctgatccgtcaggggaagccattaccagagaagcagttaaatgctctgcgccaggacgtcggcatggtgttccagtcgtttaacctgtttccccacctctccgtgctggaaaacctgtgcgtagccatcagccgggcgctggcgatgtctccgagcgtcatgttgtttgatgagcccacttctgcactggatccggagctggttggtgaggtgctgcaggttatgaaaatgcttgccagtgagggaatgaccatgatggtcgtgacccatgagatgggcttcgcccgtgaggtcgctgatgtggtggttgtgatggacggtggaggcatcgttgaggcgggcacgcctgaccagattttcaccaacccgcaaaatgagcgcacccgtcagttccttaatgccgttttaacgcgtcagtaa

SEQ ID NO: 161403 - DNA, 207 bp, Enterobacter cloacae
gtgaggaccactatcaaggaaaataaagtcgtagtcatgctggagcttgtcgataatgttctctttaagcaccgcatgaatatttttccctggcagatgttcttcacacaatcccttccagccttcagcaaggaatgcatcgtcaatggaagcggggattacatcaacaccagggataatagacggtactataaaatcggaaagtaa

SEQ ID NO: 161404 - DNA, 1023 bp, Enterobacter cloacae; identical to SEQ ID NO: 78996

SEQ ID NO: 161405 - DNA, 1023 bp, Enterobacter cloacae; identical to SEQ ID NO: 94639

SEQ ID NO: 161406 - DNA, 279 bp, Enterobacter cloacae; identical to SEQ ID NO: 101065

SEQ ID NO: 161407 - DNA, 504 bp, Enterobacter cloacae
atgccgggcaaccgcccgcattatgggcgttggcctcaacacgattttacgtcacttaaaaaactcaggccgcagtcggtaacctcgcgcatacagccgggcagtgacgtcatcgtctgcgcggaaatggacgaacagtggggctatgtcggggctaaatcgcgccagcgctggctgttttacgcgtatgacaggctccggaagacggttgttgcgcacgtattcggtgaacgcactatggcgacgctggggcgtcttatgagcctgctgtcaccctttgacgtggtgatatggatgacggatggctggccgctgtatgaatcccgcctgaagggaaagctgcacgtaatcagcaagcgatatacgcagcgaattgagcggcataacctgaatctgaggcagcacctggcacggctgggacggaagtcgctgtcgctctcaaaatcggtggagctgcatgacaaagtcatcgggcattatctgaacataaaacactatcaataa

SEQ ID NO: 161408 - DNA, 624 bp, Enterobacter cloacae
atggctacatggcacaaccttacaaattaccctgaaagcgctcaaatgctgtactggaagggcataaattatccacatatctggagtgacgatgctgatgaaattgactacttcatcggaaaaatgatgctttctgatagatatatatccgcatttaatctcgtaaaacatcgtatggaaaaggtttcctggcaaaacctattgaaattgttaaacggattccgaactaccgctgaaaaagatgtaccaatgccagatggttggcatttgtccaaggctatagaatatcttgaatcgtcaggacaggtatcgcgtttagatttggccctactggaattcttctttttctcagcattcagaaattgtgaaaaaggagcgaaaaacctttatacagaattactttccaatccaccactctttgtgcaattaatatgtcttgcttataaaccagaatccgagaaagagtataaacaagatgaatccttaatggctgcggcacaacaagctggcagagttctggatcaagggaaaggcatccccggtcagaaatcagatcatagtattgatgaatacgtatttagtaactggattggtaatccccccgaaaaaccagtgcatgaataa

SEQ ID NO: 161409 - DNA, 357 bp, Enterobacter cloacae
atgaaaaaaacatacgaagagctagaagccagatgcgcggcgttggctgcggagaatgcggggctgaagtcagcgattgaaaagcatgctgacagttacatcatgtgcggatattgccgaactgagcgcgatggcaagaacgacgatgtttgtgaagtgcttgattcaaccccagccaccgaagctttcctggctgaagtgcgggcgcagggtgtggagatgctggcatctctggctggtaatgaatgtcagcgttacaagtcaataaacgaccgttccggcgcgagaaagtggaaaagtatcgtaattctgtgcacggacttcgccgcccaaattcgcaaaggagtgcagtcatga

SEQ ID NO: 161410 - DNA, 231 bp, Enterobacter cloacae
atgagcaaagaaaatcatggcggaccagcttttccgcacataagaaagccggtagccccaggcgtggaagaggttattaccaatggtggtatgtcgctgcgagactatttcgcagcaaaggcaatgcaggggaaattatccaatcctgaatggatggcaagtgatgcacgcactgcaactgaggcctacgaaatagctgacgcaatgctccgcgcccgggaggcatcatga

SEQ ID NO: 161411 - DNA, 822 bp, Enterobacter cloacae
atggttgagcaaatatatagcgattacattagagaatattgcaaaaataattcgattgtttttgtcaaagagtcagaaaatatgatcgagagttttttcaagcttgatcaagatatgcctaatgagtatcgctggagattttcaggtctggactctatcgctaaacaagctaattcagcagatacacctcaagatttgaataagatttattggatagatcagactcgtaatatagaagcctatgcgattatgtcatggtggcgcgggaatgagttagttaggtcttgtctcaatggtttgaatactcaagaagtcatcgttccagctgtagcagcacgttcattgctagaattatcaactgtattcttgttaaatgctaatactctggaaaaaaatttcgaaaaaatcacattccctcctgaagcgatagttgtttcaacagatattgaaaattttgtagcaaaaatgatttggggaacacggtatcaacccaaagacgaattattaactcagacaaatattatgacagctcttaaaaagctcgctaagagtcctggagctgaagatcttatgtctacctatgaatttttgtgtgatatcgctcatccaagttttattggtaacaccagttattggtcacacattgaggccaaaaaccctgatggttctgaaagacgccttatgtcgcgcttaacagatcggcaatacaatactgaaattacagataaaacgatatgggctttagcttggtcatcagcttgcatgcgtaacgctttcttaatcatgcgaagtgcctatgttggcttgctcaacaagatataa

SEQ ID NO: 161412 - DNA, 801 bp, Enterobacter cloacae
atgtcacaaaataaaattgaaaaaagtctatacccaagcactgtctttcattttactgaagaatacagcacgcttataaaaatactatcagatagatgtttcaaagcctcttacgctgctgaaaaaataataggaattgaatcagaacgaaactttggtatacccatggtatctttttgtgacattagactttcgcaactaaacgagcatacatccaagtacggacattttggtattggtttaaaaaaacattgggcacttgagtgtggtatgaatcctgttaattatttaaaccaaaactgttctatgttttcatactttaatgctcgaatgcaacaaatgagcaaagcattaaaaaaaatcagaatcgaaaatggttataattcatcaatctacattagaaacagaagaaaatatagagatctaattaatgtattgagatatatgaaaaactacgaagcccccctttacagaaaaggagttttagttgataaaaactatagatttgcaaatgaaaatgaatggagatacgttcctgacattagaacagatataataccaataaaaatcattaaaaagtcagaaaattcagagtggaaagatctcgccaacgaaaagttatggcaacataaagaatcaaacttactctttgactacaatgatatcaaatatatattcgttcctgatgatcaaaccgccatagatttaataaaacatttcagcacaggcaataatggtcactacggtcctttattaacttcaaaaatatttatttcaaaacaagtctttgatgacttatga

SEQ ID NO: 161413 - DNA, 507 bp, Enterobacter cloacae
atgtttagatggtgtggtgctatgatatacaaattgatttgtgactgtttttcaaaatataccattgtactgatagataaggtcgtacttgaaggttatatgaaagcttatcattctcatgaagaatataatcatattcttcatgagtgtactgatgctccgaaatgtggttggattattgaggcgagtccttggaatgagtttagagtaccatgtttgtatataaatagtgaaaatgaaatttgtattgtcgatggaaggcatagatttttgtggatgaaaagtaaggggctaaataaaatacctgtggcgctcactgaggaaacagaaaaaaatattctatctaagaatatattattgaatcaatgcaatggctatctaaatatcccttgggagttcgttggaaatgaaatttctgatgagcaaagcaatgaaattaatatagaggaaaatgttcagaatcttatggtaaaattaaaaagcatttcgggaaatagcagtcaataa

SEQ ID NO: 161414 - DNA, 348 bp, Enterobacter cloacae
atgaatacaagtaaccattacaacgatattttttgccgtcgcctgaagcaggctcgactggcaagtgggctttcacaaaaacgcctggggatcgcggcaggaattgatgagtttgtcgccagtacgcgtatcaatcgatatgaaaagggtgtacatgaaccgggtacggagattgtgcaaaaattggctgaggttctgcgagtgccgctggcttacttttatgctgaagatgatgatttggctgagttgatgttggtgtttttgtctttgccagaagaaggacgtaataagataagttcttattctagagaaatttataaattatgtgttattgtgaaaaataaataa

SEQ ID NO: 161415 - DNA, 180 bp, Enterobacter cloacae; identical to SEQ ID NO: 104237

SEQ ID NO: 161416 - DNA, 786 bp, Enterobacter cloacae
atgaagtgtttttataatcagaaaaatcactgtgtagaacaattaacaaaagagcatgttatatccaattccgttctgaaacaattaaacaaaagagaatctggaagtataactcaagccgatgtgtataataataagatattatttaaccatgaacaagtcattagggatgtttgcaaaaaatgcaataacataagcttatctatttatgacaatgcgggtaaagaactagttataaatttaattaactccacgtcaaatgagcctctaaatatcccttttacggaagcgcatctaggatggttgcttaagagtcactttaacttttttagagttataaaaaacagtttggataataaaccattcaaagttcaacaaagaattaaaaatgctctaataaaacacaaaaaaatacctaccgactccttcattatcctagcaagaaacttagataacaccccggaagtatggggtgatgtggaaacaaaacactctctccctgttctacctcaaattcattacaatagtaaaactatattgccgcaagaaatagtaatttcaaggctcacaattaggcaacttgatacagtattgattctaccttcaaacggagtatacaagaaatttgagaaaagagcagatgattctatgtatattttaaaagattggggaggtggatattgcaaacttgaacttaactccatcttcaatgaaagaagattgaaatttaaaaatatatttgggatagacaaactctccccatatattgatcgagcattttcataa

SEQ ID NO: 161417 - DNA, 1698 bp, Enterobacter cloacae
gtggaattggtaaatttttcagtaacaaattttagaagtataacgaaagcgcataaggtatcaatctctgatactacgatattaattggtagaaataacgaaggcaagtctaatttattaagagcacttgatgttgcaatgagttctctgcaacgccatgcctttgaacatcgctatggaagacccggtgtaaggagtatatctcgcagagatgagaaaaccttttattgggaacgtgacttccctattaacttacaatctagaaaatccggaacccaaacaattattaggttagagtttctgttaaatgatgatgaggtgactgagttcaagaacgaaatcaagtcaaatgtgaacggtactcttccaataattattaagattggtaaagatagcattccaagcattgaagtatcgaagaaaggcaaaggttctaaaactctaaattccaaatcaggacagatagctaattttattgctaataaaataatatttaactatatacccgccgttcgtactgatcaagaagctatagatgttgtaggtagaatgttatctcaaagattaagagttctagaggatgatgaaacgtatttaacggctcttaaaacaataaaagatttgcagcaaccaattcttgattcattgagtgaacgtatcaaagaacctttggaacaatttttgcctggaataagctctgtaagtatagagattcctgacgataccagacgaaattcattacgaagagattttgagataattgttgatgatgggaccccaactagtttagcatttaaaggtgatggggtaaaaagtttagctgcacttggcttattaaaggatcgtgtgagaacagatggtgcttcaattattgctattgaagaacccgaatcacatctccacccagcagccatccaccaacttctaaaagtaataaaatcattaggagaggagaatcaagtaatcttgtcgacacacaatcctttattcgtcgatagacaagatattaaatcaaacataataatagataaaggtgctgctacacctgcaaaaagcattaagcaaatccgtgatctgcttggtataaaagcgtctgataatctcactaatgctaattttgttctggttgttgaaggcgaagatgatgcgattgctctcacagcattgtttaaaattttaagtaataaactcaggcaaatgattgaaggtcatatgttgatagtcgagcctataggtggagccggcaatctaacatataagcttagccttttaaaaaactcgctgtgcgtctatcacacgtttttagataatgatgatgcgggtaggaatgcttatgcctctgctgaacaagaaaatcttcttgatatcaagtcaaacacttttgttaattgcaatggttcaagaaactctgagttcgaagactgtttagatccagcttcgtacaaagataaaatcaaggaagaatatggggtgagtttagattgcaaagaatttagaggaaatgaaaaatggagcgatagagttagaaaagcattcttaactcaaggtaagcaatggaacaataatgtagaagcaaaagtgaaatatacagttgcaaattgtataaagaagaaccccgagaatgccctaagccaacataaacgtaattctatagatgctttagtggtaagtttagaacaaatgattgggggtaagtga

SEQ ID NO: 161418 - DNA, 309 bp, Enterobacter cloacae
atggatattgaaagtcttattgccgcagcaaatcgggcccagcaggcagaagatgcaggtttaggtaattgctcgcggatatggcatgtggggttctttttgatgggatccatcggaatattgaacaggatgcaccggagcatcgtctcagcaatattgcgcgtttatttcgtgcatttcctgatgatgcacaaaaaacaaacaaagagtaccactcaaaattttatatttctggcctgggtactccttttaatgaaactctcgttgaaaaacttcacactatcatggacagcggtctgggcagtataa

SEQ ID NO: 161419 - DNA, 294 bp, Enterobacter cloacae; identical to SEQ ID NO: 125611

SEQ ID NO: 161420 - DNA, 354 bp, Enterobacter cloacae
atgaataaagaatacgtcgaatttttaaaaatgctgtctccgtttattatacttgctatttcaacgatattaataccctggattaaaaggttttattcttcatatatttcttttttctctttacctacgagtaagaaaatagaagcaatagaatatatcaatggttataaaaaaagtagtaacaccctggaaaaactaaagcacaaaataataataagcgattataagctgcatgaaaataccgatttatcaaagtgtgtaattagttttttcggtaatgactccaacttactgatagtgttttatgttcagataatgcccgatgactttgtcatgcagctccaccgattttga

SEQ ID NO: 161421 - DNA, 771 bp, Enterobacter cloacae
atgtacctcgttaaaagctgctatgaaagagataacattcagaacaggaagaccataaaaataggcacattaacagaataccgtgatacagaagatgaacaaatcgctgatagacatgaaggctcaataaatttatttttcgatttaaataatttccatatgccaataccactccacaatgaaataaatacctttagtcacgcatccagcaatttttatttaaagaacttacagttacggcccaatccattattttcgaaccatctttatgctaaaagatattcagcagaaagttcattgttgaaattaaatagatacattttttgcatatcagctttgcagaatgcacttatgtgtcaagatatttttaaagaatatgatgacttttggtattttaatagtgacagggtaaatttattcggtgatattatttctagtgccattattaaagaagtcatcaacagaaccaataatgatgaagagctatttacgacatcaataaaaggtaagccattgaatcttcgctggtacgccaatcgtattgtttacacacaaagagatattgaaattgacaacttaaaactctacaaaaatcaagatgaaattagatactatctatcggagggccacatggtcaaacctaaaagttttcaacacgaacaagaattcaggttcatctttgatatttattgcaatggtacattagtacatccattaaacaaacctttgttcgtcgatgctcaatactttttacctctcatcaagaaataa

SEQ ID NO: 161422 - DNA, 270 bp, Enterobacter cloacae
atgagcactactctaaaagaatggctcctgaagactatcgcggagctcgaagaagagcgcgattctatgcccggcgcagtaaacgaagatgcggccaatgcgcttgtggcgatgaagattgctcttgcatcgctgatccatggtaaagccgaacaaacaaactaccgcgctatcgttgagcggatagctgaaatcattcacggaaaggttaatgatatcgatctgcttacggtaacaattaagagcatgaaagataatttgcagaaataa

SEQ ID NO: 161423 - DNA, 144 bp, Enterobacter cloacae
atggcccgcgcggatcacgcggttcagacccggctcggccatgaaatctacacgatcggcgtcgttcacttcagcgatatcggattcaaccgtggcgcaaaccgccaccactacagaatcttcaccgatcgaagattttactga

SEQ ID NO: 161424 - DNA, 1221 bp, Enterobacter cloacae
atggcaattccatcactaaacccgaccgttatacacacgaaagccatagaaaaagatattaattttcaaggacttagaatagttcgaacgcaatctgatcctttggcaaataataactttaataataacggttatgaatttcagagtgctaccgctgaatatgtacgccttatcgcaacggtttcaagaaaaggattcattggtccaaaaggccaatcgagaattgttgcaactattcatccaactctgcgcaaattcactgatttggtgcgatacgacccatctaaccctcctcctgatgattacaatgcccttggcatgaaagaaatgcatgaccgtactcagagcgacttcaaagggcagaaagcacaaaacaaaatggattttcgtgactatatattggagggaattcgtggtgaccgaccgctttcgttaccgacgatttctggatggcaatcagaaacagtttttgacaaaacagtatttgtcgcatttgatgaaagcgatccgaatgtgctttatggatacatttaccttcccaagtcccctgtcatgcaagcagatggtcaaacccaaactgctgcgctattcgcagttgcccattcaaaagatgctatagatacgggcgcgctagatcagttgattgttacgcttgatgttgagttgaacgttaatgaaagaagtgcaggtcagagttttgccgatcgaaacggtcggggttcgaaaaaaaataagaatctggtcataagtctcgacacgtcctctgcacttagtgaattgagaatctctgcaattgaaggaacaatctttcaggatcggttggctaccggaagaaacacgagtacaagtgagtctgcaacgaagtatttagttgatctcagtacaatggagcaaatgctcttgaatgttatatctgaagggcgccttaaaaccgaacattttaagcgttttcatgtcgatcactttcttcctttcgctaaagattttgtgaagatgttggaaaacttgtttgcgaatgattggttagagaatacacctaatgggaacgatccattccggaaagtctttgtacatgggtggccgtttgcattgaaagcgatcgcacttgcttattacgaggcgcgtatcaacgaacttggccctctgtgcaaagcgattaatgccaaggatactggattgacagtgacctgctccccgttgattagtacaccccgatgttag

SEQ ID NO: 161425 - DNA, 792 bp, Enterobacter cloacae
ttgcagttgctggttaagccggccgatttccttcagtgcggcatccatgtccagtgcagcaccctgcgctttcgcctgcgcatccgcactgacaaacaaccccttccctgctctcagggttccccactcatcggtgcgcagctccgttccctgaccgcgggcttttccctgagcgtgcaccaggtgaccagtgttaagctgcgttttgccatattccgtcgcgagcttgatatgctcctcaccgcgcttatcctccatccgcagcttgttgttcgccggagtgcgcagcacgttgcgggtgtggttgtcgcgggtcacggggtcaggatgttccgagtcgtgcagcgcatacgcgatgtacggcaggtcgatgtcgccgttgctgtacgcaatcgccacttcggtcccgtcggtcagtggcgtatgccagccgtacgtctctccggcatacggtttcgccatccgcagccacaggtatgcgaatccctgttctgcatcgttccggtcaaagtccagcctgacgcggtagcgtccgtgctcatccagatgggcgtaaatgtcatttttctcacggctctcaatccgcgccggaagcgtgccgtgaatttccgggcgcgggctatccgccgggcggaaacagtagcgctcagtgtagggcattccccggaccgacacatgcaggcgggaatcccgcgctccccggaaggtcaccagcgtgaggatgaccccctctttcagggcatcaatgacatcgccctgcggctccagcacctgaccgggcgcgaggagtga

SEQ ID NO: 161426 - DNA, 771 bp, Enterobacter cloacae
atgcagcaaaaaacgttactcgcctgtctcattggcctggtctgttctggccaggcgatggctcagcagatggagactgctgccattaattttgatcaggaaacgcttcgttcactggggataaacccggacgtatcaaattatttctctcgcaagacgaagtatttaccgggtagcgtttccgtcgccctgaaggtgaatggtgataataaaggcaacgttattgctcgtttcgacaacaacggcgatctctgtttcgacaaaccttttatggagcaggcaggattaaaagttccctctgactatgagtccggctgctacgattataccggtcatatcccgagcgctattgtggaggcttcgcctgcgcaagaatctctaagtctggttgtaccggcggatcggatagcaaacagcgaatcggatatcggagcttatacttccggtggcactgctgcgctgttgaattattctcttctctcctcgcgcaatgagtttggtgacgggcactctgactattcacaggccatgctggacggtggggtcaatttcgacgactggatcttacgtactcagcaactgctgagccggagcgacggagaattcgagagtaataactcgtcgacctatttgcagcatacttttgtccccctgaaaagtaccctgagggcgggcgaggtcaatatcaataactcccttcttcagggaacgggatctatggtatcgagctttcaccggagagcgccttacaacagggcggtagcggagtga

SEQ ID NO: 161427 - DNA, 432 bp, Enterobacter cloacae
atgtccgcaggaatactgactctgacaaataattcagccgcggtaaccggcagcggtaccgcctttaccaccgagcttgccgtcggcgattttattgttgtgacggttggcggcatcccttacacgctcgctatcaaaacggtgaacagcaatacctccctgacgctggtcagtaactataccggaccaacgcagggcggcgctgcatggtatgccgtgccgcgcgttgcgatgaaccttgttactgctgcgctggtggcacaaagcgcagaagccatgcgcggcctgaactatgacaagcagaactggcaaagcatattcagcgggactggcaacgttacagttaagcttccagacggtagtgagtggaacggaccagcatggaatagttttatcactgagttgaacaaaaagccgacaagagcagtttag

SEQ ID NO: 161428 - DNA, 1023 bp, Enterobacter cloacae; identical to SEQ ID NO: 78996

SEQ ID NO: 161429 - DNA, 597 bp, Enterobacter cloacae
atgaaaaagagtgcattaatgttggtgctgctggttttgaccggttgtaccgcgatggataagctggcgggaatgggggtcgtatctcaacaaacatctgcctttgacaactcaacagttatcgatgtgtccccaaactccctctatgacccaagcagtgcttggggaacgccaatccagttaggagcgatttggtctagcgctatgccgaacgaagtagggcttgttctttcttatagttcaaatatttcaaatggctcgtcagcctatttaagcctgacggctctggatattaatattgatggtaatatttccagctacaaggccaatgaatcaaccagcttaaatagcagcgggtacaatacggtttctaaaacaatttatacatccagcaaaaatactattgtaataccatacgaagtattacagaaaatggttgcgtctaaaaactgtcgtcttcgcatacatactggtcagggtaaccaagatataaatttctcagctgagcatattcctggtggtaaggctactgcgattgtttctatcaaagaattcatgtcaaaagtcgatgcagtaaaagcaagaggcggggcttag

SEQ ID NO: 161430 - DNA, 234 bp, Enterobacter cloacae
atgaaaaccctcaccctcacagaacaccaagcggcattgttagccaaacagctattccaacgtgtgcgcgccaataagttggcaagggattacttcgccgcagaggccagtcgttacgaatatgtgttctttaatccggtagaaagtaaaagcatgcaggagattgtcggagtctataacgccctcattcacgatgacttagaagtactccgttctatggatcgccattcctga

SEQ ID NO: 161431 - DNA, 267 bp, Enterobacter cloacae
ttggttaacttgaaaggcagattggcccgtcttgaggataaattgtccccgactcctccgctcccagaaattgtctttcatacgattattttggtagccccagacgatgcccggcgcggccactgggaagaaccttctgaaaacacgcgctaccctattatcacgttttatgcggccactgagaccgagttcgaagcgcttcgtgcacaacatgcactggcccgtcttgagcgcacctccggcatcgaaccatccgtaagcgagtaa

SEQ ID NO: 161432 - DNA, 636 bp, Enterobacter cloacae
atggcagttaaatattcagagcagtacatcaaaggcgtaggcacttctgaggtaatcgggcgcatgcacgaaccggtagcgcgtcaaattaatgccctattggcaaagcgcaagaacattgctaatgatcgcacccgcacagatgaggaaaaagcttcgctgtataagcgacttaaagatgagtatgcgaaagcaatggagaaatcagtgaacggcttagcgcgtgagctactggtcattatggacaataatatgcgtgctaaagaaagcgctcgcggcaacatgtctatgctcgaatctgtacaactcatcgcagctttgcgccaggccggtgttcaaggtgaagacctacgcagcgcagctattagcgatgttcgaatcgcccaggcgatggtcaatgtacctgaagcagtagtgcgcgccgcaaaatggacacctgaagttgccgaagaaatgcttatgcgccattttcctgatatacaggccgctgaagctcaatgcaaagctgatatggcagcttacgaccgtctggtggaagcgcgtgacgaagtacttaacgaaactgagaaacgagcaccaaaagcggtattagaaacccgtgtcgatgaaaatgaaatcttaaagacaggcgtctga

SEQ ID NO: 161433 - DNA, 276 bp, Enterobacter cloacae
atggcaaacggacacggtggggcaagagcgggagcaggccgaaagcgcagccctctgccgaaacaactcaccgacaatgcgttaaagcgacttgccgagttggttgaagaaggggacgttcaggcggtgagaatggttatcgacagaagttttcctgcgcttaagtccattaccccaatagggacactggatgctgaattgctcaagctgaagattaaagagctttcagagtttgaggaacgcctagccgcgctcgaagcgagcaatggtaaataa

SEQ ID NO: 161434 - DNA, 2469 bp, Enterobacter cloacae
atgtcaactgatgacgtaattatggcaactgatgccaacaatagcaaagtattattcaaactgaaggcaaagaacaacagcacggaaccaaacacatggcttcgacgtactgtgcgtatgctggagcgcagcggctacgccgctataccttgcctagctaatggtgccactgcgtcatatggtgaggggcagacatacccacgcaatcactcagtctggcagggccgcaatattaaaagcgaccgcgttgcctttcggcttgatgatgtaattctcctggattacgacggtaacaaagccccacagggcgagattatcagcatccatgaactggcagatttacttggcctgtctgacctgatgcagttttgcacacagaagaatgatgacggtgattcgctccattttctgtttcgctggccagagggggttgaccgtagcctgtataaggcagccaacaacagtaagtggcagaaacatattgatattaagacaggcaatcagctctgctatctaaaacgtgggaaacaggttgtcgagggagtattaccctgcattgacgatttgcctgaagctccgccagcgctgatggagactctacataaggcaaacatcattcagcctgaaaagcccctctccgccagtggcacagagagtgacattgaatggtttaatcgtgcagcacctgaatgggaagctttgttttttgaatacggtttcgaaaagcagggtaataaatggctgcacccggaaagcaccacaggcaatccgggcatatcaatcaacaaggacgggcgctacatttcctctcacgggagcgatccgctttgcgatggacacagccatgataaattcgacttcgtagcccaatatcaatatgagggcgacaagtcacagctcctaagtaagattcgccaagagcgtcaggcttgtcttgacgaggatttagctgatgaacaggaatggacatcaccaaaagaattgaagagcgaactggtgccagttgccccgttcgaagccagtctattgcctgcggccgtacgcgcctatgtcatggattacgctgcccgtatggataacgcagcgcctgactatgcggcaatatcggtaatgattgcagccggtgcagttatcggcggtgcggctcaaatacaacccaagcggaatgatacaggctggaaattggttcctaacctgtggggaagtgccatcggctacccttctgcaatgaaaacacccagcctcaaatgtggactcgatttgctggcacattcgcagaaggttcttgaccgtgactttatgagacgccagagccgttatgaggctgaaaaggctattcatggcgcaagacgggccgatattgaagccagaatcgaagcggcgacacaagccgctaatagcgcgttatccgccggggaaaatgacgattacgaggctgccgtgtctgagcttatgcgtctccaggaaagtctgaaagccgaaccggatgaacctacatcgcgtgaattaatggtcaatgacgccacggttgaatcactggcaatcatggcgaacaataatcctatgggtgttatggttttccgtgatgagctgagcggttggctcgccagtctggacagcccgcagcgccctaacgatcgtgcattttatctggaagggttctcctgcggttcgtataaacaatccagggtaagccgtgcgcccctcaaaatagataggctaattgtcagcctacttggtgggattcaaccgggcaaattagcccctattctcgcctctcgcgcttcaggtgatggtgatgacggtcttttagagcgtattatccaaatgtcagtattccctgacctgtctggagaatatagggatacggctcccgacttagcggcggagagtcgcgctaagtccgttttcgaaacattagccggaattgctaccgctgccgtatataccttcagcgaggatgcccagaaaatatgggatgaatgggccgccggtcataagaagcgcgagcaatcggcatcggcagactggcaaggtatactcggtaaatatccggcactatgcgcaaaaattgctctggttcaccacatattgactgaggctgacggcattgattatgaaaatgacgcatttagccctgcactgaaggtttccaccgattccctatgctgcgctcttcgctggatgcagtaccttgagagccatgcaacgagaattaccacttacttccgtgctgaaaaggaaatgcttccggcaatcaccctaagggatcggctttggcaacttagcccggcttttactcgtaattcgttagggcaaaaagattggcaacacctcaagagcaaagttggccgggagtcagcgattgatcagcttattaagacaggccacatccgcgaagtcataaccccgtctaagaatggaacaggtcgcccttcagtatccttcctcgtaaacccactaatttag

SEQ ID NO: 161435 - DNA, 186 bp, Enterobacter cloacae
gtggaaaaactgatctctatcgcgcaacttgcacgcatgttaaatcgccaccgcacgcgtatctatgtctaccaaaaatccggctatttaccccctgcggtcatgcgcaacgggcgaactataggatggcttgagtcggatattgcccgttggatagaagagaataaagatgtgcaaaacaaataa

SEQ ID NO: 161436 - DNA, 339 bp, Enterobacter cloacae
atgagcagacctttatccggtctatcctctttgcaaattaaaattatccaagaaatacaacaaggaagcacgtatgaagccgcatcttgcgctgcgggctataaatatccctctgatttaaaaaaaccagcgaaaagagcaatgtgcaaacttaaaaaagcagccctgaacgaggagatcagacatgcaatcagacagaagtatccagaattaattctaatggggtccgatacaaatacccgcctggaaccctttacagaggttaatcataagtttgcggaaattgacgaaggcttccgaaatttcaccgaaagtatgcttttcagggttgggacctga

SEQ ID NO: 161437 - DNA, 1158 bp, Enterobacter cloacae
atgctgaatgatgcaaagctccgggccttagctcgcggccacgataataccagcccgaaaaaaattgcggatagtaatggacttgctgcgcttgtcagaccaaacgggcaaatctcgttcatattccgattcaggttgaataccaaacagcaaaatttcacgctgggccaataccctaatctcagcctgaaggccgcgcgtgaacgggccacacagtgccgcaaatggctggctgatggatttgacccacgtgtgcaggcccgaattgagaagcaagccaaccgcgagcagctcaccgtaagacaagcggttgatttctggcttacagatagtgaaacagcggcggcagatagttaccggaaacagttcgagaagcatattttcccgcacctcggggatctgcctatcgaccaactcgacacagccgcatggttgaaagtattcagcgatattaaacgcggtacttatcaccgcgcagccccgaacgctgccgcttacgtttttggtttgaccaaaacagcaatgaagtactgtcgggcgcgtcagatggtcaagacaactgtcttaaatgatctcagcgccggtgatgttggcgctacggtcaataagcgtgaccgggtgcttaaacagaatgaacttgacgacgcggtgacgtggacaaatgacatccgcaatccattttactatcgggcgttactgaaactgctgattactttcggatgccgcctgtctgaactgcggttatcaaccttaaaagagtgggatatgagcgctatggtgtggacggctcctaagcagcacacaaagacaggtatagaaatacagcgcccgattcctgctgcactggcaccgatactgacctcccttatgaatgacagaaagagtggcctacttttaaccgagaagaaaacagtcggctcagtgtcgaactacataataggcatttcacgcaagttaggccatgactcatggacagcccacgatctgcgtagaactttcgcaacccgtcttgctgatatgggggtgcatcatcacgtcattgaggcgttgctgggccacactcttccgggtgttgccggtatttataatcgtagccatttaattaatgagaagcgcgaagcgcttgaactctggatgactgaaggagtgaaactatga

SEQ ID NO: 161438 - DNA, 2067 bp, Enterobacter cloacae
atgaacgccattacccaaaccgaagcccgcgccctcaacaccgccgccgctatcccgctggaagccgccgacccgaccaagaacctgattttggttccgctgtcgcggctggtgtcgcgtcctgctggccgcaacgtgcgcaagaccccgcgcatgtccattcccgaactcgccgcgagcattcagcgtgtcggcctgctgcaaaacctcatcgtcattgccgccgccgatggcgagcattacgaagtcgtggccggtggccgcaggctggccgcgttgaagctgctggcgaagaagcgccgcatcagcaaggaatgggaagtgccttgcctgttggtggccgatggcaccgcccgcacggccagcctcaccgagaacgtgcagcgcgaagccatgcaccccgccgaccagttcgaggcattcgccgcgctggtggccgaaggccgacccatcgaggacatagccgccgatttcagcgtcacgccgctggtggtgcagcgccgcttgaagctggcgaacgtctcgccccggctgctggccgactaccgcgccgaagccgtgacgctcgatcagttgatggcccttgccatcaccgacgaccacgccgcgcaggaaaccgcgttctacgacgcgccgacgtggcagcgcaacccttcccaattgcgcgaccgcctcaccgagcgcgagattgacgcataccggcatccgctggtgcgtttcgtggggctggatacctacggagccgcaggcggtggtgtgcgccgtgacctgttcgcggaaggtgacgcgggcgtgtatctgaccgatgccgcgctgctggaacggctggcgcaagacaagctggcaggtatcgccgccgaggtgaaggacgaaggctgggcgtgggtggatgccacccccgccgtgacccatgccgacctgcacgccttccagcgtgcgccgagggagcgccgcgaaccgaacaagcgcgaagcgcagcgcatcgagaagctgcaaaccaagatgcacgaactggccgccgccgtggatgacgcgcttgataccgaggacgaggaaaaggccgatgccttgcaggaagaaggcgaagccgtgggcgagcagttgcaggcgctggaagatggcttgcaggactacggcacgaccgtgaaggccgcagccggtgccatcgtcaccatcgaccgcaacgggcaggcagtgattcatcgcgggttgatgcgcgaggccgaggccaaggcgctgcgcacactggaacgcctgcgccaaggtttcggcagcgaaagcgaagccgggaacgacgacgaaggcgaggacgacgagcagcccaagaccgccgccatgtccgacaagctggcgcagcggttgagcgcccaccgcaccgccgcgctgcaaatcgaagtcgcccggcatccgcaagtggcgctggccgcgctggtgcatggcatggtgcagaccgtcttgcagggcagccactacggccacgacttgccgctgggcgtgagcctgaaagcgcaagaccggctggaaggcatcgccccggatataccggattcgcccgccgccgtggcgctgcgcgagttgcagcaggtagcaggcgaaggcttgccggaggacagcgccgaactgttcgccgtgctgctagcgaagtcgcaagatgaactggtgcggctgctggcgatatccgtggccgtcacggtggacgtggtgacaccccgcgccacgccgcagcaaccgggcgcggaactggcgcaggctgtcggcttggacatggccgcatggtggaagcccaccaatgagggttatttccggcatgtgccgaaggccgcgattctggaagccgtggagcagtacgccccggcgcacgtcacccggctggcgaagttgaagaaggccgacattgccagcgaagccgagcggctggccgatggcaccggctggatgcctgccatcttcaaggccgaaggcaccgacgacaccacggcgcaggatgcgccgcaggcggtgacgaacgacgagccggaagccatcgacaacgacgacgagcagcaggcccacgcactcgccgcctga

SEQ ID NO: 161439 - DNA, 843 bp, Enterobacter cloacae
atgtccagcccgccagggcaagccttgcagcgcgaacagctcgacctgttccgcgcgctgccgggcgacatggcaccccgcgacagccaggacttgatggcctttccgttcttctcgctggcgaagtcgcggcgtaccgcgccgatcgacttccgcgccggcggcatcaccatccgcgtggagggtacgcaggagcacggcatcgcaacgatatgggatgccgacctgctgatttgggccgcctcgcagatcgtggaggcgcgcgacgcgggcttgcgcccgtcgcgctggatacgcgccactccctacgagatcctgcgcttcatcgggcgcggcacgtctctcaacgactacctgcgcctgaaagccgcgctcgaccggctgcaatcgaccacggtggccacgtccatccgcgaaaccacgggaaggcgattgcatcgcttctcgtggatcaacgagtggaaggaactggccgatgccagcggcgtgccgctgggcatcgaactgatcctgccggactggttctatgcgggcgtgctcgatgccgccttggtgctgaccatcgacccagcctatttccgcttgaagggcgggatcgagcgctggctgtaccgcctggtgcgcaagcacggcggcaagcagccgggcggctggcaattcgacttccggcacctgcaccgcaagtcgggcagcgctgcgcgcttctccgacttcgcttacgacctgcgcgtcctggtggcgcggcagtcgctgcccggctacgtcctgggcatcgagcgaatgccggacgacggacaagaactgctgaccttccggcccgtgctgcacacggcacggggataa

SEQ ID NO: 161440 - DNA, 612 bp, Enterobacter cloacae
atggcgttaaaaggcaaattaactctcaatgatgcagattatgctccatttgaacttaatggggtaggcgtctttatggccttttccggaaacggaatatacagaaatcacggtggttgcagggttgtgccggataatggacctaagcgctgggcgtacctcgccgttgttctcgacctgttctcaagaaaaccagtgggctgggccatgtcgttctcgccggacagcaggcttaccatgaaagcactggaaatggcatgggaaacccgtggtaagcccgtcggggtgatgttccacagcgatcaaggcagtcattatacgagcaggcagttccggcagttactgtggcgataccggatcaggcagagtatgagtcggcgtggaaactgctgggataacagcccaatggagcgcttcttcaggagtctgaagaacgaatgggtgccagcgacgggctatgtaagcttcagcgatgcagctcacgcaataacggactatatcgttggatattacagcgcactaagaccgcacgaatataatggtgggttaccaccaaacgaatcagaaaaccgatactggaaaaactctaacgcggtggccagttttagttga

SEQ ID NO: 161441 - DNA, 483 bp, Enterobacter cloacae
  misc_feature (422)..(431): n is a, c, g, or t
atgactaacgccgcaactatattagaaaccgaaaattcattactggaagaaaatattggtaatctgttacccgcaaatgttatatctacaaaagcatatgcgaataaggaacaatattacctggttaaggccaaagatttgtttggtattcctgaaatgtccgaggatatgatagttccagtatttaaacgtttatctccacatcgtgcaaacctgaataaggattatataccgaatgctcgtatacttgagcaagtagtacaattgctcgtaagtaacgatatagatttaagtgtatgcctgaaaggggagtctggttctggtaagactgaaatggcaatgtacattagccatatgctgaattggccgctaaccataaagcaaatcaacagtaatattcgtgctgatgaacttgaaggtgnnnnnnnnnngagcgtagtctcattaacggaaacaccagttttgtgcccagcgagcttgtaa

SEQ ID NO: 161442 - DNA, 564 bp, Enterobacter cloacae
atgactactggaaaagcaaatgaaattgcttttgatgaaggcagaaaagaaagctttatcaagagactgaaatcgctagtaggaaaccgcagcgtcagggctgcagctaaggattgggggttatctttctctacacttaataactatctatctagagggactgaaccctctttttcagctatgcaagcaatcgcatcaaaagagcaggtaacactggactggctggcctttggtgttgattccaatttgagtcaaacaagggctaatgaagaggctcggaacgtgtatatcgacccaatcaaaagcacttggaacatgatttttgatactctgggacctgaagaacagaaagaagtcctcgattattgtttgaaagaaggtgcgcgaagcatggtggggcttattgcctcaatagcagaagcagacagaacactgatgggtctgagtctagatgagaaagagcgcttactgaggcttaatgagcaactgaaaaaagggtcatctgagagcgatcaaggcatagccaaaacagaccttcctgaaacaaccaaaaaggccggttaa

SEQ ID NO: 161443 - DNA, 225 bp, Enterobacter cloacae
atggaaagaaatgaagtgcgtgactggcatcgcattgacattgtcgccgagcttcacaagcgcggcgtgacaatgcgcagcctttccaccagtgccgggctaagccccgacacgctgaaaaatgcgctggctcgttcatatcctaaaggtgagcgcattattgcgagtgctctcaatctggaaccctcttcaatctggccaagccgatacaacaaggatttgtga

SEQ ID NO: 161444 - DNA, 2094 bp, Enterobacter cloacae
atgtttgtcactgtgaatgaattagttggccttcccggtttgcccggcactcagcaggggattcgcggaatgatgaacaagcggacagccgacgcgccaactcttgtgcgcaaacgtcagggtacaaaggctttcgaatatcacattgactgccttcctgactctgctcagaaagcgctacgtgctcgccagataaaagaactgatgaacggttcaccgaaagagctgcctgtcgcccctgttaccgcatcgactgcgccacgcgtcaaaggtgccgaggaaagcaaaatcgcggtgtaccgcaaatgcccggcgctgatggagcagaagctgaacggtctgacagcagcacagcgccagactgctgacgcgcgtatggcgctggtcgttgaagtgctgcgcctcggtgaactgccgggatacagccgggcaaaagctattcgcgagatcgtgcgtcaggctcagagtggtgaactacctgagcggctggccgctgccgtctcaatggcgaacgccaaaaaaggagcgtcacggtcgctgagtgaaatatcactcaagcgctgggtggcggattttaataagacccgctccgcagctgaacgtcttcttttgcttgcaccgggcaaacgtcaggttgttaagccggaagaaatcagatggttgccagagttcctgagcttttatcgtcggcctgacgggcgcggtattcaggaggcatacgatgattttgctgctgaatgggctgagcgttatcaggatgatgccctgatggccgcagcaatcccttcttacgatcaggtgtgttatgccatgaataaattaccggtagtggttaaacagaaaggccggatcaccggcagtgagttccgccagtatgagggctttgtccgccgtgactgggagtcacttccggttaattacgtctggattggtgacggccacggtatgaagatgaaagtcgcccatcctgaccacggcaacccgttctcgccggaggtgacgtttatcctggatggtagctgccgttatattgtcggctggagtctggcgctgtctgaaagtgtgatagccgttgccgatgccctgcgccacggcattaaaaaccatggcaagcccttcctgtactactccgataacggtggtggtgagaccaataatacctttgatgcggagctgaccggtattctgccccgcctcggcatcgatcaccggctgggaatccctgaaaacccgcaggggcgaggtattatcgaacgtctcaaccgttctctggccatgcgtatttcgcgccagttcgccacctactacggcactggcgcagaccgcagcaccgttcgccgcatgacaaaagcgctgcagtcggcgacgaatgcagcgaataaagggaaagagctgacggcaaaacagcagcagaccctgcgcgatctgccctcatgggaatcactcattgagcacattgaggccggtgtggagtggtacaacaaccgcccgcatgagtctctgccgcttcgtggtgatggtgagcacttcactccggcgcagttccgccgctataagctggagaaagaagggacagaaatcgagtggctgtcggagctggagctgcgcgagatgttcatgccgcagatagagcgtaccgtcaaccgctgtgaggtccgtttattcaataacctgtattactccgctgagctgaataacgagcacggtaataaagtgctggttaattacgatattcacgacgcaacaaaggttgtaattcgtcgtcttgatggttcctttatttgtgaggctgtctgggatggtaataaacagcaggcattcccggtcactgctgaatatcaccaacgccagcaacgcatcaaagggatgcgccagcgtggcgaggagaaagtccgtctggccgaggctgagaacgtccacaccctgccagctccggcagagcaggaatggctgcatggcaacgtctatcgccccactcgcggtacgacaccggtggcgctggcggaagtggaggatgcggaatacagcgaggatgaatatctgaataactcgctggatattctggaatcaaataagcgtaaaaacgcgatttaa

SEQ ID NO: 161445 - DNA, 948 bp, Enterobacter cloacae
atgtctgaggtgaatatttccgatattcgcgaggttctgcgcaaccttgtcgatggtaaccgttttacttttgctcaggttgcccgtgaaaccggcttatcaaccggtgtggtcagtggcttcatgaacaacaaatatgccggtgataacgaccgcgtcgagaaagccctgcagcgctgggtcaataaacagcattctgctgccgaactgccggagccgccgcgctttattgagacgccaaccgttaaacaaatctggacagccttccgctatgcgcacctgacggagtgcatcggcgtggtctgcggtaaccccggtgtcggcaagtcagaagccgcccgcgaatatcgtcgcagtaacgataacgtctggatgataacgatcaccccttcatgtgccagtgtgctggagtgcctgaccgagctggcatatgaactcgggatgaatgatgcgcctcgccgtaaggggccgctggcccgcgcactgcgccgccgtcttgatggcactcagggccttgtcatcattgatgaagccgaccatctgggtgctgaaacgctcgaagagctgcgtctgttgcaggaagctacccgcgtcggactggtgctgatgggtaaccaccgcgtatacagcaacatgaccggcggtaaccgtaccgttgagttcgcccgtctgttctcccgtatcgccaaacgtgtcgctattaacaaaaccaaaaaggccgatgtggccgcgattgcggatgcctggcatatcaccggtgaaaaagagcgtgatttgctccagcagatcgcacagaagcccggcgcactgcgtatccttagccactccctgcggctggcggcgatgacggctcacggcgcgggtgaagctgtcagcgaaagctacattcgcaaggcactgcgtgatctggatctggatgttgatgtttcaacgttactgaggggttaa

SEQ ID NO: 161446 - DNA, 240 bp, Enterobacter cloacae
atgattactgaacgtattgctgaacatgttggtatggccaccgctgcgcaggcatggctgcaggcgcgcggtagtcgtgttatggagatgcgggtgtggatgcgccgcccgtgtctggaaatcacctgtccgccgactgaactggtgaacagggctaatcatctgattgaacgctgccccaccgggacccgttccgtgtggatggccacccttgaaggctgtcatgttatctggaggtaa

SEQ ID NO: 161447 - DNA, 288 bp, Enterobacter cloacae
atggaaaagcgccgtatgtggactaagcaggaaattcagttcgttcgtgaaaatgccggaaagctgacgtcacagcagattgccgacaggcttaaccgcacccgtcaggctattcagtctcaggctaaccgctggggcctgtcggttcttgttcaaccagcagacgcgcatgatgcttatctttgccgcgagctttataaagagggtctgaccattccggttattgccgaaaagatggaattaagtcgtcgggttgtttcgaatattgttttttcagaatgctattaa

SEQ ID NO: 161448 - DNA, 618 bp, Enterobacter cloacae
atgaatactttaaataccattccggaaggttaccggattaacgctcaggggcatttagttcctgaatcacagattaaaccactggataagctgcgcgatgagctggttatcggcgtcgttgaagcggcccgtctgcagcgccagtcgctggtcgagttcaagctgggctctatggcaaaagtcgatgattttgttgacctttcagcagcggagtacggcgtggagtatggcggtgccaaaggcaatgtcacactggccagctttgatggccgttataagttggttcgcgccgtaggagagcatcgcatctttgatgagcgcattcaggcagcgaaaaagctgattgatgactgcattcatgaatggtctgccggagctaatgaaaagattatggcaatggtcgatcatgccttccgtgtcaataaacagggccggattgatatcaatcaggttctgggtctccgctcactgaatattgacgatgccaaatggaatgaagcgatggacgccgtcgcggacgcgattcaggtgacgggaaccagtcagtacctgcgtttatatgagcgtcaggatgatggcacttataagcagatatcgctggatttagccaagctctga

SEQ ID NO: 161449 - DNA, 498 bp, Enterobacter cloacae
atgaatccgaaaaaaaaaggtatttttgaggctgctttcgccaaatggggatttgaatctcaggtgctggttctttctgaagaagccagcgaattatctgctgcctgttcgcgttttcttaaccacaaaaccgacatcagcaaagtggctgaagaagcggcggatgtcgagatcatgattgagcaactgcgtcataacggggtgggccccatgatagacaatgaaaaaaatcgcaagatggcgcgtctggctcaggttgttggtgttgagtcgcaaccagtcagcccctttggtccgtccgttctggggctgctggaggaagcgacagagcagatggggctggcagaaaccctctatcgcgacaccaaaaccagcaatcgttatgccgccgcccgcgcccgtacggccatcagtctgctgatgcaggcggctcagaagatgatgcgcgagcagcagtatgccgaacgtatgcggacggaggataaatctcatggctaa

SEQ ID NO: 161450 - DNA, 306 bp, Enterobacter cloacae
atggctaaagcaaccaccctcgaaatgctgaatcagtgctggagagagcagcgcgttgccacgcacagacgcgcattcagcgcggcaggtaatttatcggaagaccgttgggcgcaggtgtttaatgcccataagcgtcgggttctccgccgcaagggattgcgtaatcgtgctgtatgggttgcatccagactcaatgatattcaggtctggtctgcacttattggcagtaaccggaagcatattggattacccccgcagatttatcgtgtaaccggtaatggtggaaaggtggaggtgatttaa

SEQ ID NO: 161451 - DNA, 555 bp, Enterobacter cloacae
atgactcgctcaaacgcaatccagattatccatatcgccaaaaatcagctggcgcttgacgatgacacttaccgctccctgctgggggcggtagttcccggcaagtcgagctgtcgcgagatgaccatcatcgagctgcagaatgttattcaggcgctggaggctaaggggttcaaaagcaaacctcagcgccgctctaagcgccgcatgtctgccccgtcagatgtgagcctgaaaatccgcgcaatatggaaaacgatgtttaaagagggttttatccgggacggtagcgatgttgcgctcgaccgttttgtccagcgccagacacgtatccgtaatggcggcgctggtgtctccagcctggaatggttgcgcggtgatgccgaagcgaatttccttgagagcctgaagcaatggcacattcgggcgatgagagaggctatgttagcacaccgcctccgtctccctgaaaatccggtcaccggcgaagaaagccgggactatgacacaatctgcagcgcttacgctgacgcagccagaaggtggaaaaaatga

SEQ ID NO: 161452 - DNA, 399 bp, Enterobacter cloacae
atgagtatgaatgacgatctctttggtgatgtgcaggacgacagcattctggatcacatcgacggtgagatggaaagctcccgctttccgtcgttattggccgaactgaacgctttattgcgtaaggagcttgagcgctttggctatgacccgcgccactccattgaactggtcgcagccatcagcagtaaaatcggtgggatgcagatttattttcctcgcggtcaggtgctggaacaactcatcagggatatgcgcatctggcgagatttcaaggggaataacattccagaactggtcgaacgctaccaggtcacctacaaaacagtgtataaagctatcaggcgtatgcgcaggctggaactaagtaaacgtcagtattcgctggacatggagtga

SEQ ID NO: 161453 - DNA, 324 bp, Enterobacter cloacae
atgattggtggtatttttataaatttagtgattattgtatgttgcttctgggtgttttttgatgcagcaaacaatcatattggaatgcatactgttaaagatggagttaacaaaggctacagaagcggtttgtctcctatcgtttggggtgctagttctttatttatttttccattctttatctatttatacaggagaaaaacactgctttctattgctaaggaataccctgtacaaacggataaaagcactggctttataattgtttttttgattgtatctgcggtgatgatttactcattcaaagattttctatttatctag

SEQ ID NO: 161454 - DNA, 579 bp, Enterobacter cloacae
atgacaacatcatttacccccgcattttctcacgcgctcgctttcgttctcgcccgcgaaggtggttatgttaatgacccgaccgacaaaggcggcgaaaccaaatacggcatttccgacaggcgcgatggtcttgccgatggcaaaaccgacgtggatggtgacggtaaaccagatactcgaattaaggacctgaccgaagaacaggccggacagatttatttccgcgattactggtatccggcttattgcactgactggccagacggtatctcactctttgtctttgattcctccgtgcaacatggcgctaaaaaagcgatccagctcctgcaggatgcagtgggcgtcaccgctgatggcattgtcggccccaaaaccaccaaagcagtaatcggcgctgatgccgaatggctgctgacccgctgttttctgcgccgttcccgctattacgccgagatcatcaaagccaattcttcgcagggtaaatacctcaatggctggtttaaccgtcttgatgagctggcgaacgcctgtcaggaggtcgtcggtggtcaggtctcggttccccggagctga

SEQ ID NO: 161455 - DNA, 219 bp, Enterobacter cloacae
atgggtaagggctgggattcatcgttacgcgcggggcggcgggaccgcctccgtcaggaggtacttcacatggtagccggtggccctccgcccgttccacaggactacacaggctgtgacggtactcatgccagctactaccgcaaaggctgggactccgtcgatacaagagacatcgtctggcagtgccagcgatacaaggaaaaacatcatgtttaa

SEQ ID NO: 161456 - DNA, 408 bp, Enterobacter cloacae
atgtttaaatcgttgaataccgactggctgaagctggcattgctccgggtatttcagtccggctggacggtggtgatcctggtgggattgtcgctgctgttctgcagcttcactggccgtcaggcgtttattgtctggtggctcactttcgccggtgtgctgttaattggggcgagcgtatggctcggcaatctgccttaccgtctgctgcagccgggtaattctgctcgccggtggtcaggtatgttgtcctggataatctggggagctggtttcctgttgctggccgtcgctcccgcgaatgcaaaagacccgtggatcctgctgtttaatccgctggctggactgactgccttccttctctggttatgggcttcacataaggagcccctcaaatggatccgataa

SEQ ID NO: 161457 - DNA, 606 bp, Enterobacter cloacae
atggatccgataaccctttccaccgtggcctccgtgttgctcaaggcgggcccctctctggtccgcactgtcggtggctggttcggcagcgataccgccagagccgcagactcggtggccagtattgtcgagaccgtcaacggtgccatcaatccagccgaccagcagcgtgttctggagcagaagctggcacagttgccccccgaacagctggtacagctggaaaccctcaaggtacagctgcagcagttccagctggagcgggacaaggcgcagatggccgaccagcaggccgcgcaacatgaacagcaggaaaccatccgcaacggcgacaacgccacggacgaatatgtccgtcagacccgcccgctgatggcccgcttatccctctacagcagcattgcctacgtgatgatcatgtctctgggtcagcaggctggcgcggtggccggtgctttcggccatgcgtttaccatgcccgaaccagactgggatatcgcgctgatgctggcgaccccggcgctgggttatctgggtttcaggacgctggacggtttcgcccggtacagcaaatccagcaaacacaaggtcatggtgggtaaatga

SEQ ID NO: 161458 - DNA, 231 bp, Enterobacter cloacae
atgactaaagcatttgatcgcgccagcgaccttgaaatggaagaacgggaacggctcttaaaccagcatttaaagcgtgttaaagagctaccggatgagtacgggttctgtaacgactgcggcgcggcgattccggcgaagcgactccgggcgctgccgtacgcagcgacctgcttcacctgtcaggccatcagagaacataaggggaagcatgggctgggaaatcattaa

SEQ ID NO: 161459 - DNA, 303 bp, Enterobacter cloacae
atgggctgggaaatcattaagggtaactgggcgatcatctgggcgctatttatgtccgccgtgaatgtcatccagctcctgctggccaaaacctacgtcaaacgtgaggagctggatttgttgcgtacccgtctgcagggcattgaaaacaccatcgcggggctacccagccagaaagaccttcaccagctgcagctggagatgagcaacctgcggggcgatttgcgcgaactgggcccggcgattcgccaggtgaaacacgtcagcgatctgcttctggaaaacgagctgaaggaaaaataa

SEQ ID NO: 161460 - DNA, 288 bp, Enterobacter cloacae
atgcgtgacattctcgaccaggaccagcgcctggttattctgcgatcccttatcgaatgcggtgacagcgccaacgagtcgattctgcagacgtgcctgcagacttatggccatcgcgtttcccgcgataccgtgcgcacgcatctggcgtggctgcgtgagcagggtctggtcagtctgacggatgtttccggctgttatgtggctgaaatcaccggtcgcggtgatgacgtcgccagcggtctggctacggttccgggggtgaaaaagccccgagcgaggggataa

SEQ ID NO: 161461 - DNA, 288 bp, Enterobacter cloacae
atgatggctaagactaaaccttataccgaagcacagcggcgtattttttatcaactggccgcagtcatggtttgttctgagattgagtctcaggttatcgcgccgctgagcgagaaagagaccggaaaaccttatgaccgcagctctcctgatagctttaccaacacgtttctgaacaagaatcctgagttcagacgtgcatttgaaacgctgggtcgggccatcaccagagagcggaaaaaccagctgcagctggcaaaggcagcaaggagcaaacatggcagttga

SEQ ID NO: 161462 - DNA, 576 bp, Enterobacter cloacae
atggcagttgagaaaccgacccgtggccgcccctccaaaatcgacctgctgcctgatggtgtacgtgatcagctgcatcagatgctgcgtgagaaacgccacacccaggaagagatccgcgaggccatcaacgaactgattgacggccacaacctgccggaagacatgaagcttagccgcacgggcctgaaccgatacgccagccgtatggaagagttcggggccaaaattcgcgcctcccgcgaaatggcggaaatctgggccgcgaagctgggttctgcgccgacgtcggacgtcggcaaattgttgatggagtttgtgaaaacgctggcattcgaaacgtcgatgtcactcgctgaagaagaaggcccggttgagccgaaggccctcggccagctggcgctggttgctcagcgtctggaagccgccgcgatggccagccacaaacgcgagaaagagatccgccaggccttcgccgaagaagccgccgcgcaggcggagaaaatcacgaaaagtgccgggctgtctgcggaaaccgccgctgatatccgtcgccagattctggggatcgtatga

SEQ ID NO: 161463 - DNA, 1587 bp, Enterobacter cloacae
atggccggaccattgtcagcgcaggaacagttacgtaatcagtccgccagcgccattctggcgggcgagttcgacgcggatcaggtgctgctgccgtatcagcgccgctggattgcggacacgtcccagctcaagattgccgagaaatcccgtcgtaccggcctgacgtgggcggaagccgccgaggcggcgctcagcgggtcaatgtcaccggaagccggaggaaccgacaccttctatgtcggcaccaccaaagacatggcgcgtgagtttattgacgcctgcgccatgtgggcgaaggcatataatctcgcggcctccgcgattggcgaggaagcgctggaggatgacgacaaggacatactggtttacgtcatcaactttgccagcggcttcaaaatcaaggcgctatcgtcaaacccttcaaacctgcgcggtatgcagggtaacgtcatcatcgacgaagcggcattccagaaagacctcgctgccgtgctgaaagcggcgctggcgctgaccatgtggggctctaaggtccgtttgatctccacccataacggcattgaaaacctgttcaataccatcatcactgacagccgtgcgggcaagaaacggtactccgttcaccgtattgatatcgaactggccatcagcgaggggctgtatcgccgtatctgtcaggtgacgaaaaagccgtggtcaccggatgccgagacggagtggctggcgaacctgctgagcgataccgccaccgaagaagacgcccgcgaggaatactactgcgagccgaagaacggcggcggcacctatctggcccgctccatccgtgaacgtgcagcgaggggagccggtcccgttctgcgctttaccggcacggcagaattcaatgccatgccggaaatcatccgggcgctggatatgcaggaatggctggatcaggaggtgctgcccgtgctgaacacgctgccgcaaaaccttcgccactgcctcggagaagactttgcgcggtcgggacacctgaccgtttttgcgccgatgattgtcaacgatgacaccacccgcaccgtgccgttcctggtcgagctggccaatgtgccctacaagcagcaggagcaggcgctgttctttatctgcgatcggttgccccgccgcgacggtatcaagctcgatggccgggggaacggtaactatctggccgagcaggcggcggagaagtacggcgctgaggtggaggtggtgatgccatccgtcgcccactaccgcgagaacatgccgcgcttcaaggccgcgttcgaagacgatgaactggtactgccgaagcatgaggacgttatcagcgacctcgggcagattgtcgttcagcgcggagtgccgggtattgatgaccgggagaacaccggcagcgatggccacaagcgtcacggcgacagcgcgtatgcgatcttcctcgcctttctcgccagtaaagaggactgccagcgctacgaactgcaccggcttaacactccccaacagcagcgcaacagcgacagtcatcgtcagttgcgtatcacccgtggtcttaaaaatcagcgaggactgctctga

SEQ ID NO: 161464 - DNA, 1572 bp, Enterobacter cloacae
atgttaaaaaaacttaccggggccatccgcagcctgttgagtccctcaacgggtgagccggtcactgtcagtgaatcggatatgaaacaagcagaggcccgggccgggagcgtcagcgtcaggcgaccctctccgggcatcagcgtggcgagtaccatatccccggccagactggccggggtgttacgtaatgtgacggaaggcaatgctactgattactttatccttgccgaagagatggaagagcgcgacctgcactattccagcgtcttacgtacccgcaagctgaccgtcgccggtattcctccggcagtggaagcggcgagcgacgatgaacatgatgtgatgctggctgatgccgtacgcgatctgattgagcagccgcagatacctgagctgctgtttgacctgcttgacgggctcggcaagggtgtgggtgtctgcgaaatcctctgggacacccgtgacggctggaaaccccgcgactacgaatgggttgacccgcgtttcctcaaaactgaccgcgaaaccctgcgccagttccgcctgctgaccgatgagcagccggttgatggtatcccgctgacgccaggtaagtatgttatccattatccccgcctcaagtccggtctgcccctgcgtaacggtctggcccgtctggtggcggtgatgtatatgctgaagtccttcaccgtccgtgactggtgggcgttcgccgagaagtttggcattcccatcgtcgtcggcaagtacgggaccaatgcctccgatgagcagattaagatcctcattgacgccatcagttccatcgcttccgatgccgggtgtgctatcccccagagtatgcagcttgagatgcaggagacggccagccgtaacggcggtggtgctctctttaaagaaatggcggagtggtgcgacgcccagaccagtaaggccgtactggggcaaactatgaccaccgatgacggcagttcgcggtctcaggccgacgtacatgaccgggtgcgcatggatattgcccgctgggatgcccgtcagctggaaaacaccctcaatgagtttctggtccgtccgtttattcagttcaactacggcccgcaggaaaagtatccgcgtgtgaagctggctatcagcgagccggaggacctcaaagcctttgtcgatgcgcttatccccctggttgatcgtggtttgcgggtgcaggaatcagaggtccgggacaagtttggtctgggtgagccggagaccggcgcggtggtactctcgccgtccaacagcttctctgccttcagcccggcaccggcgctcaaccgtgagcaactggcgcttaaccgctcgcaggacgatgcgattgatgcgatggtcagcgaggcgctgaaggactgggagcagaccggcgatacatttaccagtccggtgctgcagctggcgaaagacgcggggagctttgaggagtttctggcacgtctgccggacctgcagaagacgctggaacctgccgcgttcgtcgagcagctggcgatgctgagctttaaggcacgtgcactgggagatgcgaacgatggctaa

SEQ ID NO: 161465 - DNA, 843 bp, Enterobacter cloacae
atggctaaagctcccgatattatccccaaagaggcactcgcctggctgaagtcgaaaaagctgacgccgggcttcgattatcgcgatgtctggaagcaggagcacagcatcggttttaccgtggcgaagatgacgcagctcgacctgctctcagacgtcaaagcgctggtcgaagacgcgatggccagtggtcagtctttcgctgaattccgggaggtgctgaagcctctgcttgtgaagcgtggatggtggggtcagcagatgatggatgacccgctgacaggtgagacaaagccagtgcagctcggcagcgatcgtcgtctgcgcaccatctacgataccaacatgcgtactgcccgtagtgctggtcagtgggaacgtattcagcgtactaaacgcgcaatgccctatctgctgtatacgctgggtccgtcacgcgagcaccgcgccgagcacctgaaatgggctgacctctgcctgcctgttgacgacccgttctggcagacacacatcggccccaacggctggggctgtaaatgcggggttcgccaggtcagcaaatacgagtacgatcagttacagaaaaatggtgtcccgcgcaacgtgcagcagctcgacgacagcggacagccaaccggccatgttatccgccagaccgtcccgatccgcaccgaagccccgccggtcaaacgggtgaagtgggtgaacaagcgcaccggcgaagaggagatggtgccggaagggattgatccgggctgggactacaatccgggtatgcgccgacaggccgaactggagcgccagctggccgcgaagcaaaacgcctttgacagtgacaactaa

SEQ ID NO: 161466 - DNA, 972 bp, Enterobacter cloacae
atgccaaagcctgcaacacaactcgaatttctggccctgtgcttcgagcttcccgacctgtcggatgccagcacgccgctgccggaatggttgccgatgatccctgcgggcacattcactggccgggatggccgtacgtgggtaaacgacaatccgcaggccattattgccacgtcctttcgttacccgacgttgccgtttgatgccgaacactccaccgagctgcttgggcctaaaggtgaagaagccccggcttatgcctggattgatgccatgcgcgtcaacgccgacggcagcattgacggtcatatcgaatggacgcctgacggcgaagcgctcgttcgcggtaagaagtaccgctattacagtccggctttccgtcatttccctaccggtcaggtctcgcatctttccagcgctggcctgaccaacaaacccaacctgtatttacccgctcttaactcggagaacaccatgcctttacctgtgcagattgccacggcactggggctggctgagaccgcgtcggttgacgatgccgtatcagcgatccagaccatcaagaacagcgaacagaccgcgctgaaccgtgctcagaacccggacctgtcaaagttcatcccgcaggagacctatcaactggcgctgaaccgcgctcagacagcggaagatcgtctgaagacactggatgagaagacggccaccgcgctggttgacgatgccgtaaccgccgggaaagtcgcgcccgctaaccgcgatatgtatctggccctttgccgcagtgaagaaggccgtcagcagtttgccgagttcgtgaaaactgcgcagccgctggtcaatcaggacccgtccaaaggtaaagagaacaaggggcagcagaccacgctgaccgaaaccgaactggcgatgtgtcgcagcatgggtcttacccaggaagagtttctcgccgctaaaccgaaacaggagcaataa

SEQ ID NO: 161467 - DNA, 903 bp, Enterobacter cloacae
atgccgcaaccgtcagcagaaatcctgcacgcgctcaccacctccctgagcgcagctttcacccgaggtctcgcaggtgtgactccgcagtacctgcgcattgctactgaagtgccgagcggctctgcgtccaatacgtatggctggctctcggacctgccgaccatcaaagagtgggtcagtgagcgccagttcgcgcagttgtctcagtacggctataccatcgccaacaagacctgggaaaactccatccgcgtcaagcgcgaaaatatcgaagatgaccagattggccagtacagcgtcattgcgcaggcgttcggtcagcaggtcgccgaattccctgacacgctgagctttccgctgctggttgccggtttcaccaccctgtgttttgacggccagaacttctttgataccgaccatccgatggcgggcggcacctacagcaacattgtgggtgatatcgcaaccgacaaaggtgagccgtggttcctgattgatgaaagtcaggtgcttaaacccatcctttaccagaagcgccgcgcctttaacttccaggcactggatgacctcagcagcgaacacaccttcaagaacaatgagttcctgtatggcgtggatgggcgctgcaacgtcggttttgggttctggcagaccgcctgcgggtcccgcgcaccgctgactgtcgccaactatgaagcggcggtgaaggtactgcagggcatgaagcgcgattccggttcgccgctgggtatccgtccgaccacgctggtcgtgggtccgaacaaccgcgcagccgcgaagaagatcatcgacgcaatgctggtcgatggcggtaactccaacatctattacaaggatgtggaaatcgtcgacagcccgtttatcaccaccccggcgtaa

SEQ ID NO: 161468 - DNA, 621 bp, Enterobacter cloacae
gtgagtggaacgaaagaaaaagcaacgggtaagcaaagcgctaaaggtcgcgctggcaagatttcagcgccggaagtggcacaggctgatgcatctgacctgccgggagctgaacggtcagtcacattaccagggcattacgttgcggtgggtgcgtcccccgtcagcctgaagcctgtcgatgctggtgcgtttcagtcatcgggtgacgtcattaccctgaccggggataacgtcagcatttccgcgcctgcggcccacatttcaactgaccaccttaataccgttcagggtgaattacagacaaacctgacccccgaaggtctggccgccggtggcggaagtgagaaccttatcaccgcatcccctgcaaccgatgatttggtggtgctggaggttcgcgccagacatgagcgcgggttctggcgctgtggccgcttctggccgcgtgagccggtgcatgtgtttgtcagcgacgatcccgatggcgataacgaggcgaacgcgctggagggtgatgtggtggtggagtgcttcatcagtcacgaaaccgccgagcgcctgaaagctgagcctcatctggtggtgacggtcctgcagacggtagcggagaaaggctga

SEQ ID NO: 161469 - DNA, 441 bp, Enterobacter cloacae
atgggtatttacgttacccgtgatgacctgctggccacagatggttcgctggtatggactatggccatcgacaaggcaacgaaccagctcgacgaggcgaagatagtcacggccatcgaggatgctgacgctgagatcaactcgtttctgtctaagcgctatcagctgccgctgaacatcaccaccgttccgcgcccgctgcaccgggtagccgtatccatcgccatttactggctgtccgagcgcgacaatcagatcactgacctgattcagaaacgctacgacagcgccgtccagaccctgaaggagatggcgaacgggacgcgcgacctaggcctgccgaccgacactccggctcctgagactgataacggcaggatgatagttgtctccgataacaaacgtctgttcacccgtaacaacctcaaaggggtgctgtga

SEQ ID NO: 161470 - DNA, 543 bp, Enterobacter cloacae
atggggatatcggttgaggttatcggtgctgagaagctgcagcagatgcgactggccatagagaagctctccgacagctcgctgcagcaggagctgctggagagtatcggcgctgtcgttgaatcgcagacccgccgccgcatcagcgacgagaaaacctcaccggctggcgagcgctgggaggaatggtccgagggataccgcaagacccgcagcgggaatcagagcctgctgcaggggaatggcgatctgctcgacagcatccagtacatcgtcgagcgtggccgcgttcgtgtgggttcgccactcagctacagcggcgttcaccaggacggttttgctggtagcgtcccggtcagcgctcataagcgtctcattcatcaggcgtttggccgggcgctgaagcatccggtctggcagaccgtgggctctcatacccgcgagatgaatattccgcagcgcgagtacctcgggctgtccaccgcaaacagtgatgagctgatgcatgtcatcggcgatttctggagtgaggtattaccgtga

SEQ ID NO: 161471 - DNA, 612 bp, Enterobacter cloacae
gtgagcaatgaacgtccgtccctgctgaccaccggctccacggtctccgccgctgagaacatagtggcgtggctgaagccggagctgttgaacgaacctcagcaaaacaagcctgaccgcgtcagcgtgattgaacgccatatcggccagttcagcaccccggctgaggtcaaaacctggctgtcagatcgtgatggctgtatccgtctggccgcactccgggtgcgcaacatccgcgctcaggctggcggtactgtcggcgaaatcacctgggcggcgtatgtgatggccaccgatgcatggggctatacacgtgatacccgctgcgaggtgctggtcggtaagctggttcgccgtattgtccagcgcggggcccctgacggcatgaaggccgaacgtctggccacctccgtcagcgccgacaatatctattccggcgggcttaacgatctggggctgaccatgtgggccgtgacgtgggaacaggagttccgcctggatgatgtgatcgaccttgccaccctcccggacttcctgcgactgggggccacgctgcaggtcggcgatggcaccatcccgattgaaggcgttattaacgtaagagagccataa

SEQ ID NO: 161472 - DNA, 210 bp, Enterobacter cloacae
atgaaaaaacatatcaagcccgcccacgcggggctgctggtgcgaaaagctgatggccagcgcctcagtcctgaaggggaaacgctcctcatgagtgcatggtggcatcgccgcgaagctgaaggtgatgttgttatcaccgatatccaggctgaatccgtaaccgaaccggcggaagtccgccagacccgaaccgcaaaggagaagtga

SEQ ID NO: 161473 - DNA, 1482 bp, Enterobacter cloacae
atgtcgtcactgggtaatattcctgctgatatccgcgttccgctggtgtacatcgatattgataattctcaggcgctcgacagcgccccggcgcagtcgcgcaaaattatcgtcatcggccagcagagtgcgaccggcaccgctgccgctctgacgcaaaaccgcatcaccagcgacggcaccgcagaccagctttacggcaaaggctccatgctggccgggatgctcaaaaccctgcgtaaggcgaacagctataccgaagtgtgggcgatgggcctggctgatattgctgccggtgctgcctcaaaagcagagctgaccatcaccggcccggccactgctgcgggtacgctggccctgctggttaacggtatatcggtgcaggttggcgtcagcgctgacgataccgccgacactaccgcgacagccattatcgccgccgttaacaaactgcccgatacgcaggttactgctgcgctgaaagcggattcgaccgacgtcgtcaccctgaccaccaactggaaaggcgcgaccggcaatgcgatggacgtccgtctcaactactataccggcgagcagaaccctgcaggcgttgcggtggccatcaacgcctttaacggcggcaccggcaccccggatattgcggcggttgtcgcggcgctgggcgatgactggtacaccgatattgtgttcccgttcaacgatacgcagagcctgaatactatccgggatgaactgctcgaacgctgggggccactcaagatgattgaggcacagctctggacggcttaccggggcacccatgccgaaagcggcaccttcggggaaacccgcaatgactggctaatttcctgcatcgggaccaacatcgcaccgcaaccgcactggctgtgggcggcatcttacggcggtatagcgtcatactatctggccaacgacccggcccgtccgctgcagacgctggtgctgccgggcatcctgccgccggtcaagacagtgcgctgggatatgccggagcgcaacctgctgctgcatgacggcatcgccacccattacgttgatgccagcgacaacgtctgcatcgagcgtgaaatcaccatgtaccgcgtcaaccagtatggtgacgccgatacgtcgtacctcgacgtgcagtcaccggcgacgctggggcgtatccgctacgtcatcaaaaaccggttcaccaaccgctatccgcgtcacaagctggccggggatgatgtgctcgacctgcttgatccgggccagccggtgatgacgccgaagattgcccgcgccgagctgctggatatcgcgctgactgagcttatcccggcgggtctggttgaggacttcgacgactacaaagacacgctggatgtgtatctcgacggcgacgataaaaaccgcctgaacttcatctgccacccgaacctggtcaaccagctgcgtgtgctggccggtctcgtccagtacaaactttaa

SEQ ID NO: 161474 - DNA, 354 bp, Enterobacter cloacae
atgagcattctgggccaggcggccatccgtattaatggccgcgaaatcaaaaccacaggtaagtccaccctcaatccgggcggtaaaacacgtacccagcatatgggcggcggcaaggtctgggggctggcaggcaagatggcgggtccctcgatccagatgaccatcgcagctgcagaggatgtcgatgtggttgaaatcagtggctgggagggggttaccgtcatgtttgaaggcgataatggtctgacctacatgatgaccggcgcggcgaccgctgaaccggccacgctggatgaagacgctggcaccatcagcgccaacttccttggcgaaaaactggtgaaggtgtaa

SEQ ID NO: 161475 - DNA, 384 bp, Enterobacter cloacae
atggctgagatgaaaatcaccttaaaacacggttacgtcgccggtaaaggcactgacgatgagatccgctacaaagaagtgacctttcgcgagctgacctcaaaagacgttatcgacgcccagcttgaggcggagcgcgtggtcatcggggagaatggcaaggcggtggcgtactgttctgaggtgctgatggggctgggtatgctgcggcgacagattgcttctgtgggtgagataccggggccattgtccctcaagcaaatctacgcctttcacccagaggacctggagttactcagcagtaaagcagctgctctcgatgacctgctttcggagaccgcgtcacgggggcgacctggtgccgctggcgacggcgctgagtaa

SEQ ID NO: 161476 - DNA, 1797 bp, Enterobacter cloacae
atggcaaaccgcctcaccactgaaatactcatcaatctggcaggtaacctgaccgccaaagcccgccagtacggtgccaacatgtccgagttcgcccgcacaaatcagcgggcaatgtcggttgtcaaagccacgacggcggcggctggtcgtggtctggatgcgctgggcaatcgatataccaccatgattgccggttttgccggtggtgccatgttgagagactttgccgcgacagatcgccgcatcacacgtatgggactggcagcagagaagaccaaaaaagaaatgtccgagatgtttggcggtatgcaggatgctgcgatcaagtttcgtgtcgatgacagtgaagtggtcagcgcgattgagaaagtcgggacggtgactggtgatattgattacggctataagaaccgaaacatcatagcaccgtctatcgctgcgtcaggtgctgatggtgaaagtatcggaggactcttctctcagttcacaaagtttaacctgagcaacgagaaagacaccctgcaggcaatggataccctgaatcagctcggtaaagaaggtgcgtttgaactgaaggatatcgccgaacgcggcgtaaaagcgttctcaatgtatgccgccgcagggggaacaggtgtacggggcgtgaaggacgtcggcgtggcgctggagagcgcggtcgatgctaccggtgatacgaccactgcctctactgcagttgagaacctgattcgggatctgcagcttccgaaggttgtgaaggagttgcgccggaatggcataaatgttttcggtaaagacggaaaaatgcgatcactgccaacactgatgggagagattgcaaaaaaatcagggaataaaggcgcagaaactcagagcgcacgcttactgggggccggatttaatcaggatagcatcctgttgcttagcagcgtgacgtccggtaaaggtgcggagaacctcaaacgctataacggcgtagtggccgatggtcagggcattatgaaagatgccgagtatgcatctaaagatttcacatcagccgtcactgcactaaacaccacctggaaaaaatttgcaaacagcaatctcgcaaaaccagtccaggagctggctgatgcaattaattccgttgaccaggaaaccgtccagcactggctggagattggtaaaaatatcgccatcgcagtcgggggggttattgcagcccgcaaagcgtttcagtttggtaaaggtgtctgggacgtacttaatccaaataaaggtaagggtatacctaatggtatcgctgatgtgtttggttcaggtgtaatgccagtttatgtgaccaactggccagcaggtgggctgggtggaacaggagaagataaggttaacgatcttcttgatactaccgccgaccttccaggttggcctggaatgcttgcccggggtgggttaattgccagtaagttgatggggttaactgatatggaccctttttcggacgaaggacgcgaagaactccttaaaagggttcagcagaacaatgagcgttcaacgatgtgggaggacatcaaaaactttttcacgtcttcctcgccgtcacctgcgggttaccaagacccgtcgccgtgggcgtctatgcagccacaaaatcagtctggctacccattcctgcagcaacctgagctgaaaggcagtatcgaggtctctgttaaagatgatcgggttcaggtgaccagcgtcaaggtcaacgcccccggcgtcaccatgagtgcgggtaccggattacgcagtacggagcaagactaa

SEQ ID NO: 161477 - DNA, 1257 bp, Enterobacter cloacae
atggccatcaagtgggaagacctgcgtgatgcttcgttccggggcgtacctttctttttccgcgacgtcgagggcgctggcggccgccgcgccatcccccatgcttaccccaaaaaagaggtgggctggacggaagaccacggcgcggtgctgactcagcagcagattaacgcgatcctgctcggcagtgactacatcgaccagatgaaccgcctgctggccgcgctcaatactgccggtcccggtgaactggtgcatccgtggttcggcgttcagaaggttcaggtgggccgcgttacgcatcgtctctccaccgaagaaggcggcattgtctacatttcctttgaggtgtacgaggctggcgagcagttgttcccgtccggcaacgaagacaccagcgccaccacgctcagcgcggcggacaaggtcaaggaagcgctggccagcggtgattatttcgcggcgctcgacggtgtcggcagcatggtggataccctgctggaggatatggagggctttgtcaccagcctgccgaccctgccggatgcgctcagcgagtggatggaccgcctcaaccggtttaaggacctcgccggtattgtagccgccgcacccggtgaaatgatccgcgatattactggcctcatcagcgatatgaaagacctcgtatctgagcccccgttcgcactgcgggtctatgaccagctacgcgataagtgggaaggcgaccgggcagcgcagtctgcgaccaaatcccttgtcgataacatcagcgtgaatactgataccggctttgccagcagcgtcacaccggcatcgacgccggagaccacggcagcgatggagaccaatatcgacgacttccgccgtctggtcattatctccacgctggtcgctcaggctgaagcggtggccaccgcgacctttgaaaccggtcaggatgcgcagagcaccggcgaccagctggcggagcgtctcggcgagaccgctgcggaagccgtcgaaagcgggctccgtgagctgtggcgctcccttcgcgaattgcggttcgcggtggtaaatgatgtacgcatccgcagcatccagttgccggaactacgacgcgtaacgcctgcccggacagtgccggtcatgctgctggcctaccgcgagaccggcgacgcggagaaccgggacgaactggtgacccgcaaccggctgcgctatccctcctttattacgccttcacagacgattgagatcatcagcaatgactga

SEQ ID NO: 161478 - DNA, 1086 bp, Enterobacter cloacae
atgactgaagagttaacccttgacgttgacggcaaggtctggggcggctggacggatatgaccatcaaccgctctctcgacaatatcgccggagagtttgatttgaccgttaccgcccgctggtctgctgcggctcctcgctccatcaagccggggcagtcctgcaccgttgatatcggcagcgaccgcgtgctgacaggctacattgacgactttattcccagctatgactcggagaatgtctccctgcgcgtcatgggtcgcgacaagaccggtgaccttgtggacagttcagtggtcgataaatccggtcagtggaaaggtcagaagctggagcaactggcagccaccatctgcaaaccctacggcatcgaggtggttaacgagaccgacaccggcgacgcctttggcagcatcaccctcgaacagggtgaaaccggctttgaactgctcgaccggctggccaaacagcgcggcgttctggtgacgtcagacgcttacggtcggctggtcatcacccgcgcatccacccaacgggccggagtggcgctaactctcggcgacaatattctggctgcacgtggacgcttcagctggcgcgaacgggccagccagtacatcgtcaagggctccgccagcgcgggcggttcaacatgggacgaccagccggtgaagatgatcggcggccgtcagacggtagtcagcgacccggaaataacccgctatcgtccgaagattctggtcaacgaggacagcctgacggtcggcggtgccagcgcccgcggcgaatggcacaaggctcatatgatgggtgaagccaataccaccgaaatcaccgtcgcgggctggcgtgagaacggtatcagcggtccgctgtggcagacaaatcggctggtgaaggtaaccgatgccattcagcagctcgacgtcacctggctgattaagtccgtttcctttatggaaggcgatcaggggcggctgaccgtgctgacactggtcccgccagagtcgctggatatgcctgaacagaaagctaaaagtaaaggcaagaaggcaaagacttccgtgggggtgacatgggactga

SEQ ID NO: 161479 - DNA, 540 bp, Enterobacter cloacae
atgggactgaacgcagttaacttttcccgctctatcgccgctatgggccgccgcctgcgcctgatggtggaccgtgcgctggtccgtatcgtgacggacagcctcggtcggcagaacctgcaggtgcagtcgctggccgatgagactaacgacgacgtcgagcgcttccagaactatggcttttccagcgttccgcctgcgggctcagaggcgattgtcgttgctgtcggtggccgtcgcggcggcatggtggccatcgccgtcgaggataaagggagccgtccccgtggcggtgaagaaggcgacgttgttatttatcatcaggaaggccatattattcgcctgaaaaagaatggcgtgattgaaataacagggaagacggtaaatgtggttgccgaagagagctgtgacattatcggtaaacagataaatatcaccggccccacttctttcagtgaagatattcaggttaaggggaaaagtttccttgaccatattcataaggatggtgacggtgaaaacacgactaaacccttatga

SEQ ID NO: 161480 - DNA, 453 bp, Enterobacter cloacae
atgaccatcagaataaactggcacctgcccgctggcggcgatatcgagattgaacacaatggcctttcgtttgacgagggccttgtttctttggtgtatatctgcctgtttactgatgcgcgggcagataccagcgacgaaatacccgacggcaccgatgaccgtcgcggctggtgcggtaattcttacagcgattttgaatggggctcaaagctctggctgattgaccgtgaaaagctgaccgaagaggtcaggctccgcgcggagaattacgcccgtctggccatgcagccgttattacgctacggctatgcgcgaaatgcgcaggtcattgccactattccccgtattaactggctggcattaaccattattctcacccgcccggataaaaccgagttaaccgtcgaaataaagaaacgctgggaggcggtagaaaatggctacatttaa

SEQ ID NO: 161481 - DNA, 1077 bp, Enterobacter cloacae
atggctacatttaatgtcccgacgctccgccagcttattcgtgccggtattcaggatttagagattgaactcgaccaggaattaccgattgttggcgttgaacgcgcgttaaataccgctttcagtggcgctttacgcgacgtctacgattatcagacgtggattaaaaaccagattatcccgtcagagcagtccgccgacgaaaccattattgataccgcccgctatgaaggcgttattcgtaaggccgcatcctatgccagcggaccggtcgccttcaccggcacccgaccgctgccgctcgataccgaaatgcagacgcaggacggcgtgcgctaccacgtcaccgccacgaatgacccgtcagcaggaaaaatcaccgtcaccgtgcaggccgacgagacgggtctcagcggcaacctgacggcgggagacgtcctgaccctgatttccccggtggccggggtgaacagcgacggcgtggtggcggatgccggtatctccggcggcgcggacgtcgagtccgtggccgagctgctgacccgcctgctgtaccgcaagcgtaacccgcccaccggcggcgcactgcatgattacgttatctgggccaccgaactgccgggcatcagccgggcatgggcctttgactgctggcacgggctgggaacggtgggccttgcgtgggtctacgaccagcgcactgacattatcccgaccggcaccgaccgcgaagccatgcagcaatacctgttccgccatcaggacccggctaccgggacatacgtcggcaagcccggcggtatcgaggtctggcccattcccctgacgctcaagccggtgccgctgaccatccgcatcattcccgatactgcggccatccgttctgcagtcaccctgagcctgcaggcgctgtttcgttcggtctcgccgggcgacacgctgctgctatctgccatccgtacggccatcggctcatcgataggggtcacggattacgagctggacctcaccaccaatcaggccagtgagaactacgagctgctgacgctgggggctgtcacatggcgcatcgtgtag

SEQ ID NO: 161482 - DNA, 585 bp, Enterobacter cloacae
atggcgcatcgtgtagaggactggcaggacgtcctgcagcagctgatgccgcgcggtaaagcgtggccacgcgaccagacggcagcgctgacgtcactgctccggggcttcagttcccgcctgcagctggcggaggcgaacgcggatttgctggtcactgagatgcgcccggagaccacagacttactgctggctgactgggaggactatctcggcctgccggactgcaacgccatcccggacggcttcgaccgtcgccgcgatgccgtcgtggagaagtatcaccgtaagggcgggctggccacctggcaaattgagcaggccgtgaaggatgcgctgggcttcaccatccaggtgaccgaaattctgccgcatcacgtcatgcgcgacatcatgtatccgatttattcgcataaataccgctacctgctgcaggtgacggtcacggatatgccgatgatccgctttcgcagtatcagcaacgtcctgacgccgttaatcagcctgcaggcacagatactggaatgttttttacgtcgttaccggctcgctggccacgattatgattttctttacgaggtttaa

SEQ ID NO: 161483 - DNA, 756 bp, Enterobacter cloacae
atgtatcacctggataatgcctcttccgttcctgatatgcccgctattaagccggtattatttaccgagcgccgctggtttaccgaaggcggcgacggtattgcgccgagttatccgggcgcggactggtttaatgctattcaggcagaaatgctgaacgtgctggctctggcgaatatcacgccgaataaaacgcagctggatcagtttgctcaggccatccgtattttctcctcggactatatgctgccgccgggtattcctctggcgtggccgggtgcgacagcgccgaccggttttatgctgatgctgggtcagagcttcgataaaaccgcctatccgcgtcttgctgtcgcttacccctccggcgttctgccggacatgcgcggccagaccattaagtttttacccgcctccgggcgggcgctgttgtcttatgaagccgacggaataaaggctcacgctcataatgcgacaattagcagcacagacctcggcactaaaacaaccagcgacgacaacgagcactttcatcagggcggaatggttgctccgggtgatgtctgggacagcgattatgtggtcgggtcagataacgattctcatcgcacccgcaacaataccagcaccgcaccagcgcatcatcatacggtttatatcgggccccatgcgcacacggccacggtggccagcaccggtaataccgaaaacaccgtcaaaaatatcgcctttaacgccattgtgaggttagcgtaa

SEQ ID NO: 161484 - DNA, 876 bp, Enterobacter cloacae
atgtcatttgaattctctcagagcccgcaggccatctggctttatcagtacgatgtcgatggtgtttatatcggctccgtttttatgactattccggcaggtacgggcctgcccgttaataccacgcatattccctgtgagccgggtaaaggccagaccggcatatttaaaaatggcgtatgggaatatgtggacgatattcgcgggacccgttactggaatattcacggcaccggatttgttatttcggcgctgagtgagtcactgcctgaatgggccgttaccactgaaccaccggtcgctgatgccggttacgttctgctgttcactgatggccagtggacgcaggtcgaagataagaccggtcagctttattatgagagcaacggcacgaagcgtgtcgtttctgatgcgtggttcactctgccggagggctgcacgttcatagaaccgccagaggacaagccgacgttcgtcacccgctggaacggctccgaatggatctaccttaaagacctgcgcggccagcttgcctggaatactgaaacccgcgaatcaacaacgatactggaggtcggccctgttcctgacggttacaccccaaaaatgccgggccagtttgatgagtgggatggctcagcctgggtgaaaaatgaagagtccgagcgggcttaccttatcgctcaggctgaccgtcagaaggctaagctgctgtctgcggcatctgagcagatttcactactgagctatgccgtcagcagcggtcaggcgactgacgatgagaccgcgcaactggctcgctgggaagagtatcgcctcgccgtgagccgtatcgataccacgtcagccaatatcgtctggcctgataagccgtaa

SEQ ID NO: 161485 - DNA, 1812 bp, Enterobacter cloacae
atgtaccatctcgacaacactagtggcgtcccggagatgccggaaccaaaagatgtccagacaatctcgaccagatggttcggagagagtatggagcaaggtgggataagctggccgggtgcggactggtttaataccgttcaggccgaactgctgaatatactggccaattctggtattgaacctaaaaaagaatcattcgatcagttaagcgctgcaattcaggttctgggagatgcattgcttcgcccgcaattgcgggagccggatggcgggaaacgagtcaacatcggcaaagccagcgtaagtgatgtggtatccaaaaatatcatgtcgtacgtcaatgactctgacagagaggcaattaccgggactcttggagctgagatcgtgctggactacgcactcaaatcggctattgacgatggagttacggtccttgtatgtccgccttgcccaggagtttatgtattcggaaaagacccggtaactcttcctcagggtttctcatttgaaggtggttccagaaggacatacacaatatcttcaaacgcgtcatccaacaatgcggggacggtatttcgcctgtttaatggggcctccgctattttcaaactaacctcccgacacacgttcaggcgggttatttttgatgggcgcgataaatccgttcgttttatgcaaggcgacgaccagacccagtggtgccgcttttttgattgcggaatacatcgctggagtattggtattggtaactcaagccctaatggctactcagccacgttaatcgtatcggggggtacaatctccagtaatactattggggtgagaaacgttattgactccttgtttttagggacaacaataaatgccaatgaagagaatggtgttgagctgatgacaggggcaaataacaactcatttatcggcgtcaggaatgagtggaataatggtgataactactatggatatgggtgtaagcgaatactgattcagggagaattaatagacagggctggcaaacgtgcagtagctgccgcgggtggcgcacagtttactctttctggcgtagcggtgcagcgctcaggaaggttagcaactgagggtagcgtggatgatgctcactattatatcgaaggcgatggttcttccataatagaaaccgcagttcataccaccacaggtgcaaacgatgatggatcaggaagacgatcaccgtcgtatatactagccactggtggtagttcttccgatggtaaaagtttcatcgcttcagcatctaacctttcaggttacactggaacttcgtggctgcgttcaggggtggtttcaacactgtcagtactcggctgctctggtgtggaagatgtgaagaactttggttttcgtcgcattagtgatggtgtgcaataccttggtgatgcagtctcatcgctgtcgttatctggggcaggtagcactgcaacactaaccttcaaaacaacagcgcaggctttttcgcggtattccgctgagttacttgttcgtactctggaatttagagtgcgtaataatataaatacaggagccgttgcgtattactctgttaacttaattatctctcgtgagcaagcgtcagctgctttagcggtagatacagcctctgttagaactttctctactcttagtagtgggacgtgggggatcgcttctgcttctccaaccggggtttctctggctttttctgtttctggcgatggtgcaacactaacagttacattaacagctgttgattctgcaagccgggttattagcgcaagactaagggcataa

SEQ ID NO: 161486 - DNA, 168 bp, Enterobacter cloacae
atggaacacgaaacaaacgatgcatttgatatgtggtatgcgaagttatgccagttactgcacgagaagggcaaaatagcaccatataaagccgcatattttgagttttttgagcgaggccttacccctgaagatgttgttgaagatggggataacttgccttgttag

SEQ ID NO: 161487 - DNA, 507 bp, Enterobacter cloacae
atgagtcaggctttcacatttacccttaagcgcagttgctttgatgaaaattataacccgtcagaaaacacgcgtaccaccaccaacttcgccaacctggcgcgtggcgagaagcgtcaggagaacctgcgcaatacgctgatgatgatcaacaaccgctttaacgcgctggcgagctgggataacccaaaatccgaccgctatgccgtcgagctggagattatttcagtcgatatgaatatcggcggcgattttactttcccggccatcgaaattctgcaaacgacgatcgtggataaaaagacccacgagcgcatcgaaggcatcgtcgggaataacttctcatcctatgttcgtgactatgatttcagcgtcctgctgctggagcataataaagatcagccccgttttccctccccgagaattttggcgagctgcacggcaatatctttaaaagcttcattcattctgcggaatatcaggcgaactttaaaaaagcgccggtga

SEQ ID NO: 161488 - DNA, 606 bp, Enterobacter cloacae; identical to SEQ ID NO: 147199

SEQ ID NO: 161489 - DNA, 693 bp, Enterobacter cloacae
atgcctacagaattaaaaccgggagataagaagaaccgtctgacctttttagaggaattgccatcacaaaagaaacacaaaatgggtttgtttcagtgtgagtgtggaaataaaaaagccatccgcctatgtagcttcaaaaatggatcagttaaatcatgtgggtgccttcatcgagagaccgtctcaaaaattagcagaaagcatggaatgacaggaagtcgcgagtaccacagttgggactcaatgatgcagcggtgcaacaatataaataacaagagatatgaggattacggaggccggggaatactcgtatgcgataggtggcgggaattctcagcattttatgaagatatgggaccgagaccaaaaggaacaactctcgatcgaatagacaactcctctggttattttcctgaaaattgcagatggtcgacattgtctgaacagcagtcaaaccaaagaaaacgaaaaggaagtacatcaaaatttgttggggtatcgaaaagaccttcaggtcggtggaccgcacacataacaaaaaatgggaagactaaatatctcggtgactatgcaaccgaagaagaagcctcagcagcttatcaaagcgctaaatctcaactaggttcatccatcaataacggtgaggtgcgtgatgtttgcactcattcaacgaggtcagatttacgctga

SEQ ID NO: 161490 - DNA, 126 bp, Enterobacter cloacae
atgacaataataaaggcagagattaatttctctgcctttattacagattttattggtcaaaaaatgttaaagatgattaatctgaagttatctcagatttctgatgttcaggttcgtgtccggtaa

SEQ ID NO: 161491 - DNA, 843 bp, Enterobacter cloacae
gtgagtgtatcttataatagagtcatagttgccttttgtgaaggacagcatgacgtcgcttttcttagcagaattcttttagttaatggattcctacttcaagatctcaaaattggtcaattacctccaccgtttgataaacgctttgaaaaagaactaagtcaagtaagaattccagataaaaaacttggttttcagccaaacgggccgaaactaccttctgtttgtttctatcatgatgggaacttaatttttatacataatctaaatggtgatggcagaagtcgtgaaagggctgagttagttactatgtataaagaactttctggtacagatgacttcagtatagaaattgcatatagatttttatacttttttgatgctgatgaacttggcattgatgcaagaataacagagattaaaaatgagataggattagaagaagctactcaactctccaatggtagtattattgatttcgatgggagtgaatggggtggttatatttttcatgatgttcaaactcagcttggtaccttagaggatcaattgttaggttattttcataacaaaagccaacaattgcagcaagatattttgagtttccttcaaactaatttattgatacaagaaagaacgaggcgatttataagttctaatgctggtgaaagttatagtggaagatctcagtattacgaaaaaaaatccgttttaggtatgtatgcacagctccagttttcaggtgttagtaatgctgttttgattagtaacacagattttttaaaagctgtcgatattaatggatgtcagcaatgtactctaattaatagcctttttatatga

SEQ ID NO: 161492 - DNA, 2238 bp, Enterobacter cloacae
atgaatgtcgagcaaattcgcccgcgcattagcaaaaatttaaaaaatttatttctagatcctaataactaccgttttgttgacaatgaccagcacaagccagtctcagaaaaggacatgctagatccaacaattcagcgtaggactcgcttttttatagaaggaaatagacaagagaatatcaaagatctaatagcaagttttaaagctaatggatacttagatgttgatgttattcaagtaaaggatttaggagataacaattatttagtccttgaaggaaatcgtcgtgtaacggcgctgaaagcattgcaggaagcacatgaaaagggttttgatattggaaaactagacccatcaatttttagaagtgtgcctttcgaaatccataataatcaagatgttgaaaaacatttgattgtgatgggattaaagcatataagtggcaataaaaagtggtcaacatttaaccaatccaagctgctttatgattttttaaaaccatatgaagacaaaactcgagatgagtatgttgaaaaagaagatgagctagttagttcgctcggtatttctaaaactcgtcttcgctctatgcttagagtttataatctaatttccttatataaaacaagtgagtatggtgagcaattcgaaccaagtatgtttggtatttttgaagaaataatcaaaaagcctgtaattaaatcttggttagactggagtgataacggttattatgctcgaaatttagtgaatcttgataggcttttttcgtggatctctaaaacagatgaataccttgagaaaaatgagctagaagatgacattgaagaggaaagtaatggtgaatacgttgagctagaaccaataattactaaatctcttgagatacgagatcttgctctgttcatcaataatgaaaaagccttgaaggtaatggaggatgagcgtagccttgcaagaggattagctgcgagtggttcagtaaatcagcaaaactataaaaatgctttaagcaagcttgaagactccttaaaggatttaaatttatatagtagcctcataaaccaagaagatttgcgcttattagatgatgcaaaagaaaaacttacacaaataatgccaaaacagacggctataaatatcgaaggaggaaactatacaactaattttgagtatggagtaaaaaaacactttaaatctattcatatcaaaaaatataaattctttaaaaatttctcattggataatttcaataagattaatatcattgctgggtttaataatgctgggaaaacttctttacttgaagcgatttacttattgacgcagcgtaatgatatatcatcgcattttaatcttattaggcaaaaaaataaaatcagtactttgagtccaacattgttgaatgctcttttccaagataaaataatcttatcaggagtgtttgatgatagtaatgttactgttgagatgattaaatatgatgattcttcaattgataaacaagatgactatatagcgtcttatagcttaaagtctagcattgatggagaatttagaaataacacagtccatacttttattcatgaacgtatgagaaggaatgctgatcaagtttcgcatttgtgttcatcgtcatttaaaagcccttatttctacgatatagacgatttgctcactgattataacaaaagtataggtgcaagtttaacgtctgtaactgactcagagtcagatgatttaaatatacaatccgctatcggcctggttattgaatttatgaataaaattgagccaacgataaaagatgtcagattcactgaggacatggagctcaaaaggtttatcgtagaatcagcatatgattttaacagaagtttcgatcttacctcttatggagagggtattcagcgcatcttttatatagccttatcttttgctgcgtgtcgcaacggtgtactttttattgatgaatttgaaactgcgattcattatagtttactattggagtttactaaatttacgcaacaacttgcagaacgtttcaatgtgcaagtgttccttacatcacattcgggtgaatgtatcacagcttttttaaataacgattataacaatgattgcattactggatttcagttaagcaaagttgacgataaagtagttgtgaaaagggctgatggcgaaagatttggctatttgataaaaaatattgatcttgatattagaggctaa

SEQ ID NO: 161493 - DNA, 210 bp, Enterobacter cloacae
  misc_feature (186)..(195): n is a, c, g, or t
atgagcctttctgatgctattgaccggattccgacccagtacaacgaggttgacatcgctaatattcattgggctgactgcgtgatccataccaaaaagaaactgactctgaaagatattcacgtttgcctgattaaacgcgaggagagcgttataggtattgtcgaaaccctgtcgtatgtcctnnnnnnnnnncgtatgtccgtgtag

SEQ ID NO: 161494 - DNA, 1293 bp, Enterobacter cloacae
atgccactcactgatattaaagtaaaaaatgcccgtccctcagagaaacccgtcaaactcacagacggacaggggctctatctcctcgtgcatcccaatggttcaaagtactggcaactggcataccgtttcagtggaaaacaaaaagttttctccgtcggcgtctatcctcttgtttctctttcagaagcccgtaaaaaacgtgatgaagccagaaaactcctgagcgacggcattgaccctgttcagcagaagaaaaataccagaaacgaaacggccgggattatccgttttgagcatgttgccagagaatggcatcagaaactttcactcagtgaacgctggtctgaagcacacagtgatcgcgtgttaagcagcctgattaaccatgtattcccttctatcggacgatgtgacatagcccggttgtcgacacgggatcttcttgtccccatcagaactgttgaaacagcgggacatctggaaacggcttcccgtctgaagcaacgactcactgccattatgcgctacgcagtccaggaagcgcttatcagtcacaatactgctctggatctggagggggccatatcagcacctgaacgtacccacaggccagccctggagcttgaggctattcctgacctgctgagccgtattgaaggctataagggccgcaggcttaccatactggccatcaggctgaccttactggtgttcattcgttcaagtgagcttcgttttgcccgctggcctgaaattgattttaaaaatgcgctctgggtaatcccaccggaacgggaagaaatcattaacgtcaggttttccggtcgtggttcaaaaatgaaaacaccacactatgtgcctctcagtcgacaggccatgcagatactggaggagctgaaaacactaagctacgatgcaactgacggtcaggggctgattttcgtgggctgtcacagcattcataaaccaatgagtgaaaatacagtgaacaaagccctgagaacgatgggttatgatacgaaatcagatatttgtggtcacggcttcagaacaatggcctgcagttgtctcgtggagtcagggaaatggtctgaagacgcaattgaaaggcagatgagccatcaggagcgaaatcaggtccgcgcggcatatattcacaaggcaaaacatctggagcaacgtcgcctgatgctgcagtggtgggctgattacctagatgcaaaccgggacggaatggtcaggccatttgagttttcctgcgcggaaaccacaaacccggtgaacagctaa

SEQ ID NO: 161495 - DNA, 405 bp, Enterobacter cloacae
atgtccgaagcactaaaagcattaaacaacattcgtactcttcgtgcgcagggccgtgaactgccattagaggttcttgaagaactgctggaaaaattaagcgttgtcgtagacgaacgccgtcaggaagaatcttccaaaaaagctgagcaggaagcacgtcaggaaaaactcgattccctgcgtaaattaatgcttgaagacggaatcgatcctgaagaacttctgagctctttctctgctaaatccagcgcaccaaaaaaagctcgcgatccgcgtccggcgaaatattcgtttaccgatgaaaatggtgaaacgaaaacctggactggccaagggcgcacccctaaagcgctggctgagcagctcgcggccggtaagtcactggatgatttcctcatctaa

SEQ ID NO: 161496 - DNA, 864 bp, Enterobacter cloacae
atgaagattgattaccctcatttatatgaaattacaaatgagcgttcagtaaaaaaccaaaaatatttcttaaatggcataagggcagaatatgcattattgatatttatcgctgtaaatagctctctatcttacatggaaaaatacagtgtaaatttagtgttatttgttctgctaataatgttattacttgtcaggaacattataaacttcgaacaaaaatggtacaaatatagagcggttaccgaatcaataaagacaacaacatggaaattcgcaatgaaagcggaaccatttaatggctctgaagagataaatgatgctaagcaatatattggttacataaggaatattattaaagatagcaagtatgctattaagacagaaacgctaaaaaaccttgaaggggatacgtttagtatttgtttaaaaagcattagagaaatgaattatgagcaaagaagagatttatatgtggaacaacggattgaagaacaacgaacatggtatgcaaaaaaatcggtattcaacaaaagattagggagagcatgggctgtagctatactgattttctatattctatctcttactatgacggcactccttgccgaagatctggtccaagccgcatcgctaccaacagaactgattacaaccatcatttctgctctgattggctgggtgcaaattaagaaatacaatgagctttcagcatcatatgcccttacagcacatgaaattgggctggtaaaagaacaatcgtattatatttctggtgaaaaagattttttagatttcattcgagatgctgaaaccgctttctcacgtgaacatacacaatggcaagcaagacgagttgcataa

SEQ ID NO: 161497 - DNA, 399 bp, Enterobacter cloacae
gtgagtaaaacatacagcatttttattagccattgttgggattacaatgattcgttgataaatctaaagaatttattaaacaaggaagatgggcttgtggcatcttatgaagaagtaactgtagatgcgcctataaactcagaagatgaaaaatacatcaagcgagtactgaaggcgagaatatccgcatcagatgtgtttattgttgtagcaggaatgtacacagcacatagtgattggatgaaatgggaaattgaaacagcagttgctaataacataccagttattgggattaaaccgcatggttcacaacgaacgcctcaagttgtcacagacaatgcgaaaattattgttggatggtatacaccatcaattatatcagccatcaaagactgctaa

SEQ ID NO: 161498 - DNA, 939 bp, Enterobacter cloacae
atgtctgaaaagtcggcagtgctacacttcgacttaaatcacattgcaaccttacagtatgaacatcttggtgatgatatcggttgttccgaagcgagaagaataaaagggcagctgaaatcattaatggagtcggcattaaatgaaacacgtatagatagcccagtctatacttacctgccagatttaaacactccgacactaacggcacaagaaataaaagaaatcgtaaaggattcagatgaagcagaaaaggaatggggatatatttttaatagcgcagaagaaaagttgaagtttggggatttttcaaatgcaaaggaactctatcaaaaagcgctagaaataagacctagagatgaatacttaattcaaagactaacactctgtacatacaaggaaaaaatagaatcaaaaagcagagtgatgagttgtatggatgcaatggttattttatcagacttatctcctgaaaccagtaacgacccagaaacaacaggaatggcgggtgccataaataaatacatatggatggacactaaagatatcacgttcctaaacaaagcaatttcattctataaccgtggatatacaataaaaaaagattactataacggtgaaaatttagcgctttgctactttgagaagtctaaacagctaaagaatacagaaactgcaaatgataaagacatcgtatttaatgagattcttgcagaaaaaacgttcaagtccgtacttgaaatcactgaggggatcatagagtcaactaacttcaatgaacgaagtgatgtaaaatgggtttacgcaacagcagcaaagtcagcatcatatctagagttaaaagaaaaagaggatttatacagtagtaagtttaaatcactctgcgacaactcatgggattttaatacatttgaagaaaacaaaataaagaaggattga

SEQ ID NO: 161499 - DNA, 534 bp, Enterobacter cloacae
gtggttttttacatcattggacctcaaacccctaaatcaaatgatgagtatgtgcagggattaatcgacgagctggacaggaacgggatttctatttcttcaaatgctactccatgcccggtctgtaacaacggtttcctgcgtaagcgcaaggggcaaaatggcttcttctggggctgttcttcctatcctgtatgtaaaacatcatttcctgatagcgatgggaaaccagcgactgagaagaaaacaactgaaggcgcgattgaccgtctgaatgtaccctgcccttcctgcaataaagaaatacttgtacgccctaaaggattcttctgtactgggtgtggtttcaagctttggtcggaaattgctggtaaaaaaataaccaacgctcaggcagaaacgttgatcaaaaagggtaaaacaggttcgctcaaagggtttactagcactaaaaccggaaaaaaatttgacgctaccttagttttacaggataaaaacactggaaaaattggtttcgagtttgctaaaaagtaa

SEQ ID NO: 161500 - DNA, 465 bp, Enterobacter cloacae
atgcgtaacttcgtgactcgattgagagtatggtttccgcccccactcatcttattgctgtttttcgtcactgatgtgttgactgcaatcccgcgttttaccttcgacatcgtgaatatagtgctaagcgtgttgctgaccggtgtttgtattaccatgatactgcacaccgcttggcagatgagcacgaacggcacgacgcttaatccgcttcatccggatagaaccaccaagctggtaactgtcggttgttacgcatggagtcgaaaccctatttaccttggaatgagcgggctccagttatccgttgctctctgctttggcagcctggtggggatacttgctgtaccgttgtttatgtttgtagtagccagattacatatccatgttgaagaggtacagcttcgaaaacgtttcgggttggaatgggaacgctatacccaacgggttcgtcgctggttatag

SEQ ID NO: 161501 - DNA, 1095 bp, Enterobacter cloacae
atgtccatcatcacaaaaaaaagtctggtagcggcggggattttaactgcgctaatcgcgggcaacgctgcaatggctgcggacgttcctgctggtgttcagctggctgagaagcaaacgctggtacgtaataacggtgcggaagtgcagtctcttgatccgcacaaaattgaaggtgttccagagtctaacgttaaccgcgatctgtttgaaggtctgctggtgactgacgtagacggccacccggctccgggcgtggcggaaaaatgggacaacaaagattttaaagtctggaccttccatctgcgtaaagatgccaaatggtctgacggtacgccggttaccgccgaagatttcgtctatagctggcagcgtctggcggatccgaataccgcctccccgtacgcgagttacctccagtatggccatatcgccaatattgatgacatcatcacgggtaaaaagccagtaaccgacctgggcgtaaaagccatcgatgccaacacttttgaagtgacgttgagcgaacctgttccgtacttctataagttgctggttcacccgtccgtttctccggtaccaaaatccgcggtagaaaaatttggtgaaaaatggacgcagcctgcgaaaatcgtgaccaacggtgcatataagctgaaggactgggtcgttaacgagcgtatggtgctggagcgcaacccgcagtattgggataatgccaagacggttatcaatcaggtcacctacctgccaatctcttctgaggtaacggacgtaaaccgctaccgcagcggcgaaatcgacatgacctataacaacatgccgattgaactgttccagaagctgaaaaaagagatcccgaaagaagttcacgtcgatccgtatctgtgcacctactattatgaaattaacaaccagaaagcaccgttcaccgacgtacgtgttcgtaccgcactgaagctggctctggatcgcgacattatcgtgaataaagtgaagaatcagggcgacctgccggcttacagctacaccccgccttacaccgacggtatgaagctcgggaattcagataataagtgcgacactcatggatga

SEQ ID NO: 161502 - DNA, 1224 bp, Enterobacter cloacae
atgaaaatcctcgtctacggaattaactactcgccggagcttaccggtatcgggaaatacaccggcgagatggtcgagtggatggcgagccagggacatgacgtgcgggtgattaccgccccgccgtattacccggagtggaaggtaggcgaacgctattccagctggcgctaccgccgcgaagagggggctgcgaccgtctggcgctgcccgctctacgtgccgaaacagccctcgacgctgaaacgtttaattcatctgggcagctttgccctgagcagtttcttcccgctgatggcgcaacgtcgctggaagccggatcgcatcatcggcgtggtgccgaccctgttctgcacgccaggcatgcgcctgctgggcaaactctccggcgcgcgcaccctgctgcacattcaggattatgaagtggacgccatgctcggactggggatggccgggaaaggcaagggcggcaaggtggcgaagctcgccagcgcctttgagcgcagcggcctgcacaacgtggattacgtctcgaccatctcgcgctcgatgatgaacaaggcgcaggagaagggtgtcccggcggagaaggtgatcttctttccgaactggtccgaagtggcgcgtttccgcgatgtgacagaccaggatgcgcaggcgttacgcgcgcagctcgggttgcctgctgagcaaaaaatcattctttactcaggcaacatcggcgaaaaacaggggctggagagcgtgattgacgccgcgcttcagctgagcgaacacccgtggatgttcgtgatagtcgggcagggcggcggtaaagcgcggctggaaaaaatggccagcgagcgcggactgaccaacatccgcttcttcccgcttcagtcttatgacgcgctgcccgcgctgctgaaaatggcggattgccatctggtggtgcaaaaacgcggcgcggcggatgcggtgctgccgtccaagctgaccaacattctggcagtgggcggaaatgcggtgattacggcagaagccgcaacagaattaggccagctgtgcaacagctacccgggcattgccgtttgcgtagagccagaatcggttcctgcgctggtgaccggaattgagcaggcactcgccatgccaaaagagaacacggtggcacgtgaatatgccgaacgcacgctcgagaaagagaacgtgctgagccaatttattgcagatatacggggataa

SEQ ID NO: 161503 - DNA, 966 bp, Enterobacter cloacae
atgacaaaacaacgtatttttgtcgccggtcatcgcggaatggtgggttccgcgattgtccgccagcttgaacagcggggcgacgttgaggtgattgttcgcacccgtgacgagctgaacctgcttgacagcaaagcggtgcaggacttcttcgccagcgaacgtatcgaccaggtgtatctggcggcggcgaaggtgggcggtattgtcgctaacaacacctacccggcggatttcatctacgagaacatgatgattgagagcaacatcattcacgcggcgcatctgcacaacgtgaacaagctgctgttcctcggttcatcctgtatctacccaaaaatggcgaaacagccgatcgccgagagcgaactgttgcagggcacgctggaagccaccaacgagccgtacgcgattgccaaaattgccgggatcaagctgtgtgaatcgtacaaccgtcagtataaccgcgactatcgctcggtaatgccgaccaacctgtacggaccgcacgacaacttccacccgagcaattcgcacgtgatcccggcgctgctgcgtcgtttccacgaggcgactgccgaaaacgccccggacgtggtggtgtggggcagcggcacgccaatgcgtgagttcctgcacgtggacgatatggcggcagccagcattcacgtcatggagctggatcgcgaggtgtggcaggaaaacaccgagccgatgctgtcgcacattaacgtcgggaccggcgtggactgcaccattcgcgagctggcgcagaccatcgcgcaggtggtgggctacaaaggacgcgtggtgtttgatgccaccaaaccggacggcacgccgcgcaagctgctggacgtgacccgtctgcatcagctgggctggtatcacgaggtctcactggagcaggggctggccagcacctaccagtggttcctggaaaaccagcaccgcttccgggggtaa

SEQ ID NO: 161504 - DNA, 1461 bp, Enterobacter cloacae
atgatcagaattatagggtgttccttatgctgcgccgtcggcattgaccactcgatggaaaccttactccgcactgatcctgagaagtacggctaccaggctggtctaaaccgccttcagcgtttcctgaccaaaatccagtacgactggagccttcgggattatatcggccgcaaagtgtttgagggcgggtatgtgcgtcttcagcccaatgttttctcgtcgtccctgaccgaacgactgttccatatctgttgcagcctcgattacgtggaggcccagcgggccgcagcggtgcgggaaaagttactttctggcgaggtcgaagatacggcgcataaccgccgcatggcggagccgcagtttcgactggtgcaggaagccaacgtgctgcatatcgactttctctggtcactgcattgctttaacccgcgaccatttcgcgccatcgaactttaccgccaggtgtgggaagggggggcactggatctgctcgacgatgagccagctatgcaacccgtaccccgcacgccgatgccagcaccacgctggatgaagttgccggaaggccgtatcgggacgtcatttgacgggctgtctgatccgtctgccgaaatggcctattttgacggtcgggaggatgaccgtgcttcccgcagcctgctgagcagcggggaaagcctgaacatcgttgcattcgaagaagaggatgagctgacggtcgatgaagacactgcgtcctggattatctggcatgaatatgacggattacgccagcgtgtgtctgacggtgagtttacccccgtggcggcggcacagtacctgcttagatacggcgccgtccgaatttcccgggggaaaggtgcggtgtaccaccgcctcgctcaacgcgggcaggccttttcacgtcttggcattaacgaccagacgccgctgccgtccctgctcgtcagccaccgtttcaagatcctgaccgactgcgattaccgcctgctcgttgcccgtaaactgcgggggcagcggcagaaactgcgcttctggtgctgtgttgcggcctgtgtggcgctgcacacccacaaccgaacgcctcttggggcatggatcacgacgcaactggagaacgaacgccagcaacatctggcccggacgggtgacgaactgaaagccggtctgctcgacgctgtactgactctctgtaacctgcggattaagcctcaatcaatgcaaccggaggaacggttgtattaccgggctgtcagaaaacgctttctgacgacgttagccaggtgtatttcccaggagtacgacgaaaccttacgggaggttatttgggcgctgaggatgctgtccggtccccagtcttcgaaaaagacgggattccggcatgtggatgattgccgggagagtactgcggcactgttaaggcctctgctgaatcgtctggtccgcctgctggcgtga

SEQ ID NO: 161505 - DNA, 471 bp, Enterobacter cloacae
atgcaaagctcaatgtcgttattagccattaccggcgcgttaatggccggtgcaatgagtcctggtccgagctttttattcgttgcacgtaactcgattgctttgtcacgaaatcatggccttgcgaccgcgctcggcatgggattgggttcgctggtttttactgtgctggcgctgatgggcttgcaggctatctttattgcggtgccttttgcgttctgggcattgaaagtgctgggcgggttatatctgatttatctggcggtgaaaacattacgttccgcccgtctgccgatgagtcatgaactcaatactgaaatcaccagcatgtctttgcgtaaaaccatctcgtttggtttgctgacgcagttaagtaacccgaaaacagccattgtgtttgcgagtgtttattcggccctgttgccacaaaccattccggtggccttttatttggcactgttgcaaagttag

SEQ ID NO: 161506 - DNA, 957 bp, Enterobacter cloacae
atgttcatcggtgtgttgtttgctctggcggcaggagcaatgtggggtctgatttttattggtccggtactcattcccgaataccctgcggctttgcagtctgttggccgttatctggcgtttggcctgatctgtttacctctggcctggcaggacagaaggcggttgtctgcgctgaatcgcgctgactggcttgaggcactgaaacttgccgcgatcggaaatctgctttattacttctttttatccagcgcgatacaacagatcggcgtgccgatctcatccatgatcatcggggtgttacccgttgtcgtgacgatctgttcaaatatcagctatagccaccgggatggtaaatttgcctggcgcgatctgctgccttcgctggcactggttctggcaggattagtctgcgtcaatctggccgagcttcagggaaagaccagcggctatgatgtgccgacgtatctttccggtattgcgtttgcgttcatggcggttgcatgctggacatggtatcccatgcgcaatgccaactggttgcgcgtcaacaccactaaaagccctgtcacgtgggctacggcacaaggcatcgccaccctccccctggcaatcctgggttatggcttagtctggtatcagttacaactggtccagccctcgttcgatatgcccctggggccaagaccctgggtattcatcgcgctgatgtccacgatcggattattgtgctcatggttaggaacattgtgctggaaccaggccagccagcgattaccaacggcgctggccgggcaattgatcgtatttgaaacactggccgggctaacctacgccttcttgttacggcaggaatttccgtcactcctgacgatgatcggcgtgatgatactgatgctgggggtactgaaatcattccggataaaacggatcatgcccctgcaaagtacgagctga

SEQ ID NO: 161507 - DNA, 213 bp, Enterobacter cloacae
atgaaagaaatcgtgattacccgtgagcccgttgaattgttcaagatcctgaaatttgagaaccttgccgcaagtggtggcgaagcaaaagccatgatcgaggatggtctggttttggtgaacgggctggtggaaacccaaaaacgcaaaaaaatcgtctctggcgatattattgaagtcatgaataccgaatacaaaatcgtggcagcctga

SEQ ID NO: 161508 - DNA, 1005 bp, Enterobacter cloacae
atggcgaccatcaaggatgtagcccgtctggcgggcgtatcggtggcaactgtttcccgtgtgttgaataactcgtcgcaaaccagtcccgaatcgcgggaggcggtaaaaaaagccatggatgaactgaaatatcatccgaatgccaatgcacgggcactttcacatcagggcaatgaaacgctgggtattgtggtagcggatgtgtcatcaccgtttttcggcattatggtcaaagcggtcgatcaggttgcttacgataccggtaattttttgctggtcggtaatggttatcatgatgccaaacgggaacgtaaagccatcgaacaactgttacgtcaccaatgtgccggcattgtggtgcatgcgatgaagctgtccgatgaagagctggcgcattttatggaccatgtgccaggcatggtgattatcagccgtactgtgccgggctatgagtcccgctgcgtaaatctggacaaccggtttggtgccgcgctggcaacgaatcacctgatacaacaaggacataggtcaattgcttacattggttccatgcagcagattgctgatgcgattgagcggcagcaaggctacacggatgcgttaatccagaatggtattccggttgatgagcgactgatcattcaaagttcgccggatgagctgggcggggaacgggcggtcattgagttattgaatcagggaagaaagatgacaggcattgtctgttataacgatccgatagctgtaggcgcattatccacgttgatagataacgatattaaagtaccgaatcagatatcggtcatcggttttgacgacgttctgatcaattatctgcaaccccgcttaaccacaatccgctatccggtcgtggagatggctagacaggcagcccgactggcaatcgcattagcgcatggtgagccagcaccggatgtcaccaatctgtttactccgactctggtgcgtcgttattcggttgcacccgccgtatcatcctag

SEQ ID NO: 161509 - DNA, 1272 bp, Enterobacter cloacae
atgagttttgaaaaaaacaatctcgttcgtaacctgacactgggtgtcgttgtggcaacctgtagtatgtcggcgctggctaaaaagaatgaactaacgatctgggcatgggatccgaatttcaatattgccattatggaacaggccaaggcggcttatcagaaaacgcatcctgacgtgactatcaaagtgaccgattttgcgaaaaccgatctcgagcagaagatgcataccatgctggcgtccgggatgacgaaatccctgccggatattgtgctggtggaagattacaacgcaccgaaattcctgagttcctatcctggcgcgtttgctgacatgaccggcaaagtcgattacagccagtttgcaccttacaaagtcgacctgatgaccatgaatggtaaaacctacggtatgccgtttgattccggcgttactggtatgtattaccgtaaggatttgctggcacaggcaggcttcaaatccgaagacatgcaaaacattacctgggatcgtttcattgaaatcgggaaagtcgtgaaagccaaaactggcaaagcgatgttaggtgatgacccgaacgatttgaggctgatgcgcgtcatgctgcagtctgccggcagctggtattttgatgaaaaaggcgcgctgaacatcaagaacaacgaagcgctgaaagaagcgttacgtatctataaagacatggcagatgcgggcattgtgcggccaaccatgggctggtctgaatgggttggtgccgttaaccacggtgatgtagcgaccatcacaaccggtgtctggatcacggcatccgtgaaatcggccgctgatcaggcgggtaagtgggcggttgcgccgacgccgcgtctgaacattaaagacggtactaaccagtctaacctgggcggttccagctggtatgtgatttccacgtctgacaacaccgaacaggcgattgatttcctcaacagtgtctatggcaaagacagtgcgttttatcagcagatcctgacagaacgtggcgcggtaggctcttatctgccagcacgtaccggtacggcctatcagcagccagatgccttctttggtggtcaggcgatctacagcgattttgcaaactggctgggcaaaatacctaaagtgaattacggctattacacctatgaagcggatgccgcgttagcttcgcagttaccggcttactatcagggtatgccactggaacaggttctggaacaggtcgacagtcggttagctttacaaattcaatag

SEQ ID NO: 161510 - DNA, 915 bp, Enterobacter cloacae
atgtctcattcaggtgttatgcccatgactcaggttcgtagtcgcaattttcaccgtttttacgatatcaacggatggggttttgttctggcttcactcacgctggtgacgctgttcatgatttatccgatcctgaattcgctttggttatccatgcattccggaaagggcaccatcgttcagtttgttggcttcggtaatattacccgcctgatgcatgatcaggtgtttattaccgcgttaaccaacacgctgatttttctgattgtgcaggttccgctgatgatcctgctttcactggcaacggcttcctgccttaactcgccgaacgtccggttccgcagtttcttccgcatggccattttcctgccttgtgtcacgtcgctggttgcttattccattctgtttaaaagcatgtttggttatgacggcatcgtgaattccgcgctgatgacgattggcgtgatcgataatccgattccctggctgaccgatccgttctgggcaaaagtgaccatcattctggcgatcacctggcgctggactggttacaacatgatcttttatctggcagcaatgcaaaacatcgacaagtcgatctatgaggcggccaagctggaaggtgtgtcaccggttcagacgttcttccatattacggtaccgttactcaagccggtgatcctgtttacgtccgtcatgtcgacgattggtacgctgcagctgttcgatgaagcgatgaacatcaccaatggtggtccggcgaactccacactgacgctgtcgatgtatatctacaacttgtcattcaaatttgtgccgaatttcggttatgccgccacagtctcttacgtgattgtgttctttgctgcggtgctggccttggtgcagtttaaatttgtacaggacaaaaaataa

SEQ ID NO: 161511 - DNA, 828 bp, Enterobacter cloacae
atgacgacctctaatttctccagacaaaaaatctatcagggtgtgatgtacctgtttctggtggtgatcgcctttgtttctctgttcccgtttttctggatggtggtcagtagcaccaacaccacggcagatatcaaccaggggaagatgtctttcggtactgcactgattgataatttcaccaagctgagtcaggtagtcgatctgccgcagattttctggaacaccacgaaggtttcattactgggtacgtttctgaccctggtcatcgcgtcactcgcgggttatgggtttgagatttatcagtcaaaactgcgcgacaaggtttataacctgttgctgctgacgatgatgatcccgttcgcggcactgatgatcccgttgttcagtatgatggcgaaagcgaatctgctggatacgcattgggcggtggtgttgccttccgtcgcctcggtttacatcattttctacttccggcagtgcaccaaagccttcccgaaagaactgctcgatgccgcccgcgttgatggcgtgaaagagtggcagatttttgtctatgtgttctttccggtgatgcgttccacctatgcggcggcgttcattattactttcatggcgaactggaataacttcctctggcctctgatcgtgttgcagacccccgatatgaaaaccatcaatctggtattgtcgtcactgtcgtcggcttatgtccctgatttcggggttgtcatgatcggtacggttgcggcgacattgccaacgatcgccgtgtttttcgcaatgcaaaagcaatttgttcagggaatggtggggtcagtgaaatga

SEQ ID NO: 161512 - DNA, 2241 bp, Enterobacter cloacae
atgatgaatttatgcgagagttttgataagcagtggcgtttcattccgggtgaatttacgttattcaccggcgctgaactggcggtcgctgaacaggttgatttaccgcataccgcggtcgagctgccttataactacttcgatgagaccacgtatcagcgcaaattcagttatcagaaaacgctgctttggcggtctgagtttgcagagaaacaggtctggttacaatttgatggcgcgatggcggatgccaaagtgtacctcaatggcaagctgctgaccggacatcgtgatggctacacgccgtttgaagtattgctgacgccgcatctgttacagggcgaaaaccagatcaccgtggtgatcgatggcagcgaaaatcctgaaatttccccgtttggcggtcggatcgattacctgacttatgccggtatttatcgcaatgtctggttgaaaacgaccgatgcgttacgcattaaaaacgtacaggccatcgcggaagatgttttaactgacgagaaaacactggctgtgcgtgtttatctggatcagatcgtcgcgggtaatgatgacggtgagctggttgcccgtttaacgacagccgatggcaagttggtggcggaacatcgtcatggcatttccggttcccgggcgcaggatgctttccggatgacaggcttaaccggtatccggttatgggatattgatgagccggttctttatcatcttgcgatcagtatcagcggaaataacttcagtcaccagttcacgacgagagtgggttttcgtcaggcagaatttacgcccgatggctttctgctgaacggccgcagtctgaagatccgcggcatcaatcgtcatcagtcatatccgtatatgggttatgcgatgggggctcatgcccagagggcggatgcggatttcatcaaaaacacactcaaattcaatctggtcagaacctcgcattatccgcagtcaccagcatttttagatcgctgtgatgagctcgggctgctggtgtttgaagagatccccggctggcagcacattggtgatgaagcctggaaacagggggcgatcgcgaatgtcggcgccatgatccagcgtgactggaaccatccatcgattgtgctgtggggcgtccggatcaatgaatcgcgtgacgatgatcatttctatgaacacaccaaccggctggcccatgcactggatccaagccgtcagaccggcggtgtccgttgtcataccagcagttcgctgctggaagatgtctacaccatgaatgactttgtgctgaacggcggcgaagttgcgctccgtgatcagcaacaggtgaccgggcttgatcataaagtaccgtatatggttacggaatataacggacatatgttcccgaccaaacggtttgatccggaagaacgccagcatgaacacgtgatccgtcatttacgggtgctggatgcctgttatgccgatccgcatatttccggctgtattgcctggtgcctgtttgattacaacacgcataaagatttcggcagcggtgatcgcatctgttatcacggcatcagtgacatgttccgcatccccaaatttgctgcttacgcctataagagtcagtgtgaagtcagcgatgagccggtgatgcaacccgtgaccttctgggcgcggggtgaacgctgcgagtgcctgattctgccgctgatcatcctgaccaactgcgatgagatcgaattcaaagttggtgattatccggtgaaacggctgaaaccggcggtgaaacaatttccgcatctgccgcatgcaccggtgatcatcgatgacgatgtcatttcaccgcaggaatttggtgaatggggcatgaaatgggagaccgtctcgctgcgcgggttacacaacggccaggtagtgtgcgagatgcagatgcctgctaatccggtggcgacttcgttacgggttaaatcggattacagtgaattaccggccaacgaaaaagcggctacacgtgtcaccatcgaagctctggatcaatgtggcaatttgctgccatttctggatgacatcatttcggtttccgttgacggcccggcaaaaattatcggcccggatcagctggtgctgaaaggcggcgcggtcggactctggcttgaagcgggcgatcacggcgggctggtgacagccacctttaccagcgcccggctgggtagtcaggcgcttgagttaaccatcaccggtgagtga

SEQ ID NO: 161513 - DNA, 1116 bp, Enterobacter cloacae
atggctgatattacgctgcgtaaagtcgttaaacgttatgaaaaaaaccagaccatccatggggtggatctgcaaatcgacagtggggaatttgtggtgtttgtcgggccgtccggctgtggcaaatcaaccttgctgcgcatggtcgccgggctggaagagatctcggaaggtgaactctatatcgatggccggaaagtaaatgatgttgatccggctgaccggggtgtggcgatggtgttccagtcatacgcgctctatccgcatatgacagtcgcggagaacatgggttttggcctgaaaatgaacggtgtggacaaagaagagattgccaagcgcgttaacattgccgccaaaacattgaagatggaacaactgctggatcgcaaaccgaaagacatgtccggtggccagcgtcagcgtgtggcgattggtcgggcgattgtccgcgatccgaaagtcttcctgtttgatgaaccgttatcgaatctggatgccgagttacgtgtggaaatgcgcttacagattgccaaactgcatcatgagctgggtaacaccatgatttatgttacccatgatcaggtggaagccatgacattggccgataagatcgtggtactgcgcagcggaaatgtcgaacaggtcggctcgccattgcagctttatcatgcgccagccaatgaatttgtcgccggttttatcggttcgccaaaaatgaattttattgatgccactatcgacgcgatcaccaatggcaaggcgtcagttcgtctgccggatggacaatgcatcatgctgcatgtgactaccgatgccattaccgtgggggaaaaggtacgcttaggtattcgcccggaacatattcatatgcaggtcgagcagggcgatttttcgctgacgttccagagtgaagtggtggaacgtttaggcaattcgacttatctgtttggcaattactgcggtaaagaagggtttaaagtgcatgtgcagggagataaagccgtagcgctttatgaagacatcaagctgggtattcatctgagcgattgtcacctgttcaaccaggatggtgtcgccatcggacagcgtgaaatcacttcagagagtaaacattaa

SEQ ID NO: 161514 - DNA, 2121 bp, Enterobacter cloacae
atgaattatgatgcaataacgttgcatgggcagaattcgacgctgattctgaaaaccgggccagctcccgagattgtgtattggggtgagcgagtaaagactcaacctcatgtaaacgatatctcaccaatcacacgtgcggttccgcatggccgcctcgatcttgatgtaccgcttacactgagcccggagcatggccgtggtatgttcagcagtccgggattagaaggtcatcggaatggttatgactggtctccggtattcgccttccattcccttgaacagaatggcaattccctgaaaattatcactgaagacactatcgccggcctgaagctggtcattgatttgattcttgatcctgccaccgatgtgcttcagatccggcatacgctgaccaacatgaagcccgatccctatcaggtggatcggttcgcggtaactcttcccctccccgaacgtgccgatgaattattggcctttcatggtcgctgggtacgagaattccagcctcaccggattaatcttaaacacggcagctatcagcaggaaaaccgccgtgggcgcacctcgcatgaacattttccggcattcattcagggctcgacaggttttaatgaacaacagggcgaactctgggggttccactttggctggagcggaaatcaccgcctgcgttccgatgtcaaaacagatggccgccgtttcatgcaggcggaagcgctctattttgccggcgaaattcagctggctgaaaacgaaagtgtcagcacgccctggatctacgcaacttacagccagcacggtctgaatgcgatgagccacgccttccaccagtttgtccgtcagcagatcctgcatttcccggtaaacaaaccccgcccggtacatctgaacacctgggaagggatctattttcagcacgatcctgcttacatcatgcagatggcgacacaggcggccaggctgggcgttgaacgttttattattgatgacggctggtttaaaggccgcgatcatgacagagcagctctgggtgactggtatctggacaagaaaaaatacccggacgggctggaaccggtcgtgaatcatgtccgcgcactggggatggaatttggtatctgggtcgagccggaaatgatcaatcctgattccgatctgttccgtgctcatccagactggctgctggccgtaccgggttatcaccagcccaccggacgcaatcagtacgcgttggatctgcagaatccggctgtttttgcctatctgctggagcgactggatgacctgctgagccggtatgatatcagctatctcaaatgggatatgaaccgggaaattgttcagcccggccatgacagtaaagcggccatcaccggacaaacgcaggcggtttatcgcttgtttgatgaaatcaggacacgtcatccactggttgaaattgaatcctgtgcttccggcggcggacgcatcgattttgaggtactgaaacggactcaccgtttctggacatcggacaataatgacgctctggaacgccagcaaatacaacgtggcatgagttacttcttcccgccagaagtgatgggctcacatatcggcagtgctcactgccacagcactgcccgctcccacagcattgcattccgcggtctgacggccttattcgggcatatgggtgtcgaactggatccggtcaaagagagtgctgaagaacaggccgggtttgcgcatttcattgcattacataaacagctgcgtccgctattgcacagcggcaaggttgtccgtatcgaccatcatgatcccgccatgatgattaacggcgtgattgcggccgatcagaccgaagcggtgttcctgatcagtcagctgaccatgccgacctattcactgtcgggttcattgcgtttgcccggattacaggctgacaaaaattactgtctgactgtgctggaaaaaccggcccgctttgatggtggcgtcatgaaaacacagccgcaatggctgacgcagcatgaaactattctctcgggagaatggttagccaagataggtattgcgctgccggtgatggatccggaaagtgcggtgttactgcagtttaaattggtttag

SEQ ID NO: 161515 - DNA, 369 bp, Enterobacter cloacae
atgcataaaaccgagattcaatggctaaacaatgttgaagaaaaagactacccggcagcactctcctatctcgggcttatataccctccggaacaagccgcatcattcgtcgacaggttaaaaactgccgatatcaccgaattcaaagctaaggatgttttccgtgcttctgcgctgtcattgctgggtattagtaatctgcatgtagaaaaagaccgtgaaaaaattcgcacgggcaaaccgttgtctcctttactgcttgtccgtgatacggccaatggcaaagtcgtcattgctgatggttatcatagaatgtgtgcgatatacgagttcgatgaagatgcatggcttaaatgcaagattgtttga

SEQ ID NO: 161516 - DNA, 309 bp, Enterobacter cloacae
atgaaaaatacattcgtacgttttgccgctgttgccgcgttatctctggctgctatcactgcccaggctaccgtcaacacttatcaggcacatggttctgttgttgctgttaatgcggcagaccagacgatcaccgtgaagcaagatgccgtctctgaactgggctggccagcacgtactttcacttacaaggcgaatggcagtaatgtactgaacggtatcgaagccggtcagactgttgatgtgaaatttacctcatcaaatacattcaatgcgaacgcccatttcgtaacacctgtatcacaataa

SEQ ID NO: 161517 - DNA, 807 bp, Enterobacter cloacae
gtgaagaagattgctttttttgatattgacggaacgatggtgaatgttccaaacggtatgttgcacccatctgatgagactcaacaggtgattaaaaaattccaggaacaagggaattatatcgttgttgccactgccagaacgcagatccctgagagtgttcgtgacatcaattttgatggttatatttgcagtgatggtcactatatcgaattccacggtgaaaccttgatcaataatgtgttcactgatgacgagatcgatatgcaattgcaggtctatgaagcacacaatggcagttgtgcgttaggtggctattcaggcaattgggtgagttcgcattccgatccttatctgaagcaacatcacgccatttatagtggcagcgatgacctctctcatattcctctggtctcacattgcgctggcgaaattaaggcaaactcgattgctgccgttttttcttctgccgaagatttattcgcagccaaagctaaattacctgaaaaatgggccatcaatgcctatggggatgatgttgatattcggatggatgtgcatctagaggggttctctaaaggaaccgcttgtgaatatttatataatcatctcaatattgataagcacaatacctacgcgtttggcgatgggcacaatgatatcgaaatgttgcagttggttggcactggtattgcgatgggaaacgcgtctgatgttgtcaaagccagtgctgatgcgattactgataccgtcgataataacggtatagccaaagcctttaaaaagtatctggccattgattactga

SEQ ID NO: 161518 - DNA, 681 bp, Enterobacter cloacae
atgaaatcctatgaatggatcttgttcgatgcagatgaaacattgtttgaatttgatgccctccgcggtttaaaactgatgttttcacgctttggcgtcgacttttccgatgctgatttttcagaatatcaatccgtgaataagccgctctgggttcaataccagaatggtgaaatatctgcggcgcagctccagcatcaacgttttgaatcctgggcgcaacggcttgatgaaacgccaaaaacattaaacagtgcatttctgtctgcgatggcggatatctgtcagccactgaatggggccgctgatttgctgaataccctacggggcaaagtgaagctcggtattatcactaatggctttaccgagctgcagcaaatccgtctggagcgcaccggatttcgggagcattttgatgtgctgatcatttccgaacaggttggcgtggctaagccccatccggatatttttgaacatgccctttctacgatggggaatccgtcccgtgagcgtgttctcatggtcggcgataatcctgactcggatattttgggtggcctcaatgcgggcttgcatacatgctgggttaatacagataacaagcctgtgccggtaggcatcacacctcactatcaagtttcatcattaccggagcttgaatcgcttctgacacagtattga

SEQ ID NO: 161519 - DNA, 402 bp, Enterobacter cloacae
atgacaacgtacattgataaacttgctctgtttaccatcttggataaaaaactattagttgttcgctccagaggcaaatcgctgttttatctgcccggcggtaaacgcgaattcagcgagactgatcatgaggcgctgatacgtgagatatcagaagagttaaccattgatttagtgccttcgacgataacctacgccaccacacttgaagcgcaggcggatgggaaaccagaaggtacgttagtaaaactgacatgctatttcgcggattatgatggcgaaccaatgcctgctgccgagattgaagaattacgttacatagacagccgtgatattgaagtttgctcaaaagcagcgctcctgtgcgttgattggctcaaggaacatggctacatcaattag

SEQ ID NO: 161520 - DNA, 822 bp, Enterobacter cloacae
atggcgaattgggtcgatttggccaaagatgccgaaagcgggattgaaacgatacgcgcccacttttccgggcatgcgtatgatccccattggcatccgcaatatctcatcggggtgactgaacagggacatcagcagtttcattgccgtcggcggcaggtaaacagccatcagggtcatgtgttcatgctggaacccgaagaactgcatgatggtcatgcgccggagagtgccgggttcacgtatcagatgctctatttcgatccggcctggctgcatacccgtatggccgggttatatgaaaaaatgccggatgggttcgaattttctgtcgcctccactttaacacaggatccccagctggcacttcgggtttcacaggccttccaagcttatcattttcaggaattccggcttattaaagaaacgagtatcgatttattactgagcagtctgatcaagacaaattgggttcaggtagtcggacaaacatcagatcatcatccgctgatcgcaagtaaaatccgcgatatgctgtatgagcatgtgtgcgatgaaatcggtctggacgagcttgcagctgaagcaggaatggaccgtttcagaatgaaccggatttttaagtcggcttaccaaatcgcgccttatcaatatttgctgcaattacgactttcaaaagcccggatgatgattgcggccggctcaccccttgcggatgttgcatcgacgttttgttttgccgatcagagtcatttaggccgctggtttcgccgttgttatggcatgacacccgcgacctatcagaagatatgcagtggttaa

SEQ ID NO: 161521 - DNA, 612 bp, Enterobacter cloacae
atgatggaaaatctgttttcatttatctgttttgcatttgttgcctcaatcacgccggggccaaccaattttctgattctgagtcagagttcccggcttggtctggggaagacgtttcccattgttgtcagtgccagtatcggcgctgcggcgttggtctgtctgacagggattggtgtcgggaaggcgttacttgcttacccattcgtaaaagaaatgatgggttggctcggtgttttatggctcacgaaattggcctggcagatcgcatcacagccagtgaaggaaacggataattcatcttctgatctgccgacactcggtgttgtcggcggttttttgatgcaggcggtgaaccccaaggcgtggttaatggcggttgccgtgatcagtgtttatgccacatcagatacgcattatttctggaatgtttcgtatttgtccgccgtttttctggtgatcgcgattccttgtctgacagtctgggcattggctggccgcttggcgggatcattgatccgcaagccgatgcatgtgatctggctgaaccgcgtcatgggctggatcttgctggtctctgcatggtctgcgacactgaatctgtcggtgtaa

SEQ ID NO: 161522 - DNA, 444 bp, Enterobacter cloacae
atgagcaaacatgaccaaactctgccactggtgtattcctgctctggctgttcaagtgcagcccaaatggctaatcacttagcaattcagttagacagacaaggcgatgcagaaatgtcatgtattgccggtgtaggtggaaacgtgaagcaattggttcgcaccgcctgctctgggcggccaattattgctcttgatggttgtccgttgcaatgtgttaaaaattgtctggctatacatgacataactccgacacaacatattttgttgaacgaactgggggttaaaaaacgcctacgcactgattttgatttagatgaagcaaacgtgttaatcaaaaaaatcgctgaaattgctgaacacttgaaaataacaaatacagaaaatatggagcctactttatcacccaaagcctctgtaattggccaaatcagctttgggtga

SEQ ID NO: 161523 - DNA, 588 bp, Enterobacter cloacae
atgcataaacaaattcaccctaagtcactttactggggaaacactgtaattctattgaataccatagatgcaacaggttcaactaacattaccccaatctcatccagctgggcactttcgaacaacatcgtaattggactcagcttaaacacaaaagccgtcgaaaatatcgagtcctgcccagaagtggtacttaacatcgcatcagcaaatcttgctgacaaaattgagtctattgccagatatacaggtaaacagcctgttccgcctgaaaagttaaaatcaggctttagttattgcgaagacaagtttcttctcggcgaattcacagcacaaccatctcaaacggtacgaccattacgtatacaagagtgcccacttcaagttgagtgtttagtagaaaatgtaataaaacgggacaatcatgcgattgtagaattgaaagcaaactatattcatgcggaagaatcgctgcttaaaaatggtgaaattcttgatgccaacttgtggaatccattgattaataacttcagaagctatcacggaattaccgaaagtatcgggaagaattttcggtttgataattaa

SEQ ID NO: 161524 - DNA, 423 bp, Enterobacter cloacae
atgctgacaaaaaatcaattcgaagctctctctgaattccgttaccagttgaagcgttttcttcacttcagtgaagctgccgcaaaggagcaggggataacgcctttgcagtatttgttgcttttgcatattcgggggtatccggggcggaattgggcaacggtgggtgagctagctgaaaggcttcaaatgaaccacaatgcaacagttgctttgcttactcgatgcgaagaattggatctggttgaacgcaggaaaaacgaaaaggatcgacgtaaagtcgaaatacacctaacagctaagggtgattcatatttgcaaaagctagctcaacaacataaaacagagctgcaatcgcttcagaagacttttcaggttgcccagataacggcatttaatgaagatcaagaaccaactatttaa

SEQ ID NO: 161525 - DNA, 288 bp, Enterobacter cloacae
atgagcaactctatcgacgcgcaccttactgatgaggtgattaatgcagcattcgaaaacacgaatttcggccgcactgatttccgcaccatcctggctgaaaccgtaatgaaacgtgctgccgggtttcactctggctggactgcaacaaccatctgcatggggcttggcttgctgagctcgaagaaccagagtgcaactaagctcgggctgacgttcgctttccatcactactacaagccatgcgtgcgtgaagcgctgatgccagttcaggaggccgcccaatga

SEQ ID NO: 161526 - DNA, 255 bp, Enterobacter cloacae
atgtctgactggaacattgcagcaaagccgcaggaagaacgcgacaaggttaatgttgacctggcagcctccggcgtggcctacaaagagcgcctgaatatgccggttatcgccgagcaggtagctcgtgagcaaccagagcatctacgagagtatttcatggatcgcgtgcggcactatcgcgagcagagcgttgcattgcctaaggcatctgatcctcgctacattgaaatgactgagcaaaatgcaaaataa

SEQ ID NO: 161527 - DNA, 261 bp, Enterobacter cloacae
atggaaaatagcatgagcatcacaacgattcttgaaagagaaagggagcttgatgatcttgttaaggtgtgcctcgatgagcttgaggtgattgacatccatggacagatttactcaattcctctttcccacctaacgaacgcagagcaggtggtacattgggtctggaagattgctgagagaggtgatttcgccatggatgttgttcgtaaatttactgaagttgcgtcccatcatgtggggtttgacgctaaaaaataa

SEQ ID NO: 161528 - DNA, 198 bp, Enterobacter cloacae
atgacttgtgaagtatgtaacaaacaaccccttggacgaagggacccgcctcttccatgcatggtcttgcaaggcgataaatccgttaacttcagccatcacggacgcgaagcaaacgagcgttattacaaatgctcggaatgcggtcatgagtggatgagagagacaggaaattgcggcgaaggctggattccttaa

SEQ ID NO: 161529 - DNA, 183 bp, Enterobacter cloacae
atgctgtctgacgggaaagcgctttcagaaaagagtttgaaaacagtgccagtaagcttcgctctttccaaaatgcccatttgctccagcgctcgcagtaatgtaaaaatctccttcgaaaacaatcatcctatcagagtcgaagcagataactcgctttggatacaggtaaacagcggttag

SEQ ID NO: 161530 - DNA, 216 bp, Enterobacter cloacae
atgaatcactatgagaaagggcgccatgtccccgacattgatacgcttcgacggatggcggcagagttaaacgtgccgttgaactactttttttgtgatgatcagacaacagcagaacttgcattactcatatctcggatgacagaggaagagcgaagcaacctgatcgaagcactcaaaacgtcttcagatgtaagccactctgacaaaaaatga

SEQ ID NO: 161531 - DNA, 261 bp, Enterobacter cloacae
atgagtagaatcaataaacagttaaatgcgccgaacagcaatatttatacacctgtatttgttgagagtattttaaaagttaatataccagttagtatttatcttaaatcggcagatcattttgatgacaaatatatcatctcaacaagtgatagttgggtattcgattattcagggagccgccgctatgcccactttcgtcaggataaaatcagcaaccaattaatcaaatatatttgcttccattatgcatctgcctaa

SEQ ID NO: 161532 - DNA, 225 bp, Enterobacter cloacae
gtgtgccactacaaagggattatgaaacgcatcaaggccaaggggattccggttattatttacgaaccggtgatgcaagaggatgagttctttaattcccgtgttgttcgcgatctggatgcttttaaacaagaatctgatgtcatcatctctaaccgtatggcggaagaactgtctgatgttgcagataaggtttatacccgcgatctgtttggtaacgattag

SEQ ID NO: 161533 - DNA, 150 bp, Enterobacter cloacae
gtgttgccgctggtctcatgctacccttgtccccgctataccgacaccggggcacgtatcacaattaaagacagtaccctggtattaaccgatgctgactaccagcttgaatacgttcaggcggttaataacatgctggatctcacctag

SEQ ID NO: 161534 - DNA, 243 bp, Enterobacter cloacae
atgctgggcgtgatccgcgacccgcaaaatgcagcaggcacggccagcgtcaccgacgcggccacaacgaaggctgtactggcaaacacgcaggtcacctccagcaaaaataaactgacgattggcgctgaaaacagcgttgcggacgatcacattgccgtaagcaatggctttggtgcggccaattacgctttgagggcaacgatgcaccgtcaattgaaatcgtcggtaatcaggcgctga

SEQ ID NO: 161535 - DNA, 258 bp, Enterobacter cloacae
atgtttatcgacccggcatggccagatggcggcacgctggcagacgcatcaaaagtcgccagcggcggcacggaaatcaatggtcgcattgctgtaggccaaaacgcgttgctggtgctgggcgatacctcgaccactgcggcagaagcagcgtttgccgacagtcagttgaagtggggtccgcagggttatcaccgctgcgctggtaatccaggcaccacagacgctcacggcaaactagggcggtttgcgcgttga

SEQ ID NO: 161536 - DNA, 321 bp, Enterobacter cloacae
ttgcgcgttgacggcgcgctcacgggcaacaccgggatatatgatgcggaatacaataaagccgggttcgcggaccattctctgctgatagttgacgcacaagacataaccggtggcaaagccgcgctttccgccgttgacgggacgttaaccgtcgtggattccgcagcgctttacgttgcgaatgccaaagctaaccagacttacgttgtcgctaagggctttagcgatgtgcaacttaacggtgatggctggcagaaagacaaccttttgttaatggaatggtcgccccctacatcttgtgccacagtgaggcgataa

SEQ ID NO: 161537 - DNA, 720 bp, Enterobacter cloacae
atgaacgttaagactatcggcatcgatttggcaaaagaggttttccaggtccatggaattgacgaacacggcaagcggttgttcaacaagcaactcaaacgagcaaacatgctttccttttttgccaacatcccttcatgtttgatcggcatggaagcctgtacttctgccctcttttgggccggcaaactaatgtcgatgggccataacgtcaagctgatggcccctcagttcgtcaagccctatgtcaaaaccaataagcatgatgctgcagatgcagaggctatttgcgaagccgtcacacgacccaacatgcggttcgtgccggtcaagacccctgagcagcaagccgtattggcacttcaccggagttgtcagagtttcatcaagcaacggaccgctcaggcgaatcaaattcgggggctattggctgaatttggcatcgtcgtgccacgggggatccagcagctacagttacctgagatcctggaagatgctgataactcgttgccatctctgttccgtgtacagctgagtctattacagcaccatatgacatatctgttcgatgtcatcgctacgctcgacaggcagattgagcagtgctaccgccaaaatgcgctatgccagcgtatcagcaagatccccagcattggcccgatcaccgccaccgcactcattgcgactatcggcaacgccagcaatttcgaaaatagctga

SEQ ID NO: 161538 - DNA, 681 bp, Enterobacter cloacae
atgaaccagaaatcacaaaacaaaaacacactggacctcttcaaaataaaattaccagaagaactcaaaaaaccattaaaaacagagttggatataaacacactcaattcatcgaaccagaatgctttgtttcattgcaaataccctgagcttttgaaagcaatgattagcgccggaataaacattaaccatacagacacgctgggcagaaacgcgctcttttacaccaatgacgctgaatgtgtcgggttactggtaaaaaatggaatcaacataaaccatactgaccttgaagataaaaatgctcttttctttgcagccagagaaagtttagtcagagaactaatcgacagcggcatcgatattaatcacactgacaactatggaagaaatgcccttttttccgcctgtgagcctgacgttgtacgcctgctcattcaacgaggtataaatgtcaacaacagggacatatatagtcataattctgttaacattaccggcattgcccctgacatactggactactacggaaacagtttaattttttacccttataaaaaatcagtcacagacattttaatcatagatcgtcgcctcctgtttgccaggctaaatatgttgtggtggatttgcaggtcatcaattgcagccatagatccggactttgccaaggtgatgtga

SEQ ID NO: 161539 - DNA, 876 bp, Enterobacter cloacae
atgatgactgttatctccggtgcatgtcgttatgtttttaataaagctttagagatagcagtacaaaaccatatagcaggtgaaaagtacgttccttacaacaaaactgcacctttgttagtacagtggaaatcacaggaaagcttatcctggttgaaactggctccctcgcagtctttgcaacaatcgctgaaagatctggacagagcatttcatggctatatctccagaaaatctggtttcccaaaattcaggaagaaaggaactgatgaatctttccgtttccctcaacaaagagtgaaagtggatgaggtaaataaaaaagtttatctgcctaaaataggatgggtaagataccgtaaaagccgggatgttattggtgaaataaaaaacattaccatttcccagacagccaataaatggtacgtcagctttcaaacacagattgagataccggaccctgtccatacatcaagcttaacggctaaagtcacgttaagcgatgaaggaaccatattattatcagacggcaaaaaatatgcccttcctgaaacttatagcagacactttaatcagctcaacaaactaattagacagaaaaacaggaagataaaaagcagtcaaagctggctggctatgcatcatagtataattttaaaaaaagcaaagttacgaaacatcctgatggatttcctacataaaacttcaactttaatttgcaataaccacgctaagatttcagttgatacggaaaagggaaattcggccagaaaaactagtccactgccggtcaatttcaaaccatacgagtttttgaggcaactaaaatacaagcagtcatggaacggtggttctgtatgtgtggagcagacttag

SEQ ID NO: 161540 - DNA, 2049 bp, Enterobacter cloacae
atggcacaagtcattaataccaacagcctctcgctgatcacacagaataacatcaacaaaaaccagtctgctctgtctacctctatcgagcgtctgtcttccggtctgcgtatcaacagcgcgaaagatgacgccgcaggtcaggcgattgctaaccgctttacctctaacatcaaaggtctgactcaggctgcgcgtaacgccaacgacggtatttctctggcgcaaaccactgaaggcgccctgtctgaaatcaacaacaacttacagcgtgtacgtgaactgaccgttcaggcaaccaccggtacgaactcttcttccgatctggactccatccaggacgaaatcaaatcccgtctggacgaaattgaccgcgtatctggccagactcagttcaacggcgtgaacgtcctgtctaaagacggttctctgaaaattcagatcggtgcgaacgatggcgaaaccatctctatcgatctgaaaaaaatcgactctcagacgctgggtctgaacagctttaacgtgaacggtaaaggttccgttgcgaacactgcggcgactacggatgatttgaagcttgctggttttacagcaagcaaacctgatgccaaaggcgtgaccacttataccaatacagttgaaaatgatgcagcaaaagcatccgatctgctggcgagtgttacgaatggttccgttgtaactggcggtggcgcgaatgcgctgggcgttccggcagcggctggctatacctatgatgcttcaactaaatcatacagtttcgacgcagctggcgtggattcctcaaaagccctgagtgcgattaacccgaattccggtgatgtttctcaggctacagtaacaatcggtggtgaagatcagaaagttaatatctctcaggacggtaaaattaccgcagcggatgataatgcgactctgtacttagacaaacagggtaatctgacgaagaccaactccggcggcgatgccgccgcgacctgggatggtctggtttccaatagcaatactaccgatccggctaaccgcacacctgtaaaaacgaaaatcaccttaaactccggtgctgcatccggtatggtagttaagtctcagggatcaggtactgagtcaacaaacgcagctggtatcacagcaaacggcccattctccgcttcaattaaaattggcggcacggcgactgatgttcgggttgcgacggatggcaccatcactgcggcagacggttctgaactttatcttaatgctgccgatggcaaactaacagctaccgcaactggaaacaccccagcttcattaacagctttagctgcaaacagccatggcactgatgcggtaagctcaacgatcactgtgacttctggtactgataaagacaaagtttacgcatctgtaggtggcactggtaacactgctttcaccagcgcacaaaaggtagaaacggttgatattgagaaagcacacattagtgctgacggcatggctaatctgaccaaaagtgcagacttcactattgctatcgcctcaaaagacgacgttgctgttaaaacaaattatacagttacaagcggcgtggtaaaaactgcggcgaacgctgaagtttatgtcgaagatggcgcgctttccgcaaataaagaaaaagaagttagttattacgcccagcaaaacggcactatcactaacggcactggtggcactatctttgaaaccgccgatggcaaactgactaccgatgcggcaaccaaatcagaagccactgccgatccgttaaaagcactggacgatgcaatcagctctatcgataaattccgttcaagcctgggtgctatccagaaccgtctggattccgctgtgaccaacctgaacaacaccactaccaacctgtctgaagcgcagtcccgtattcaggacgccgactatgcgaccgaagtgtcgaacatgtctaaagcgcagatcatccagcaggccggtaactccgtgctgtccaaagcgaaccaggtaccgcagcagatcctgtctctgcttcagggctaa

SEQ ID NO: 161541 - DNA, 315 bp, Enterobacter cloacae
atgccaatgaccaacagtctgcgtaaaaagctcatcgctgctgcgggcggcggcgcgatgctcatcgccacggcgtttcttggtgaccatgatagtgtggaagggcggaagtacgaagcctataaggatgtgactggcgtctggacggtctgcgatggtcataccgggcgcgatatcgtccggaacaaaacctataccgaccgggaatgcgatgccctgctgtggaaagacctgcaaccggcaaaatgcaccgttgaccagctggtaaaggtgccgatactggggtttgcacgccttagtggttaccgacgatga

SEQ ID NO: 161542 - DNA, 228 bp, Enterobacter cloacae
atgagaacaatcagggttgttggtatcgatatcaccaaatctgtttttcaggtatatgtctggatggttgatggttccattaactggaacagaaaaatatcgcgtcagaaattgcaatgtacgctttgccagtatgaaccgagtacgttaaccgtgatggaagtctgttcaatctcttattaccggggcagaaccccagtgctatgggattcaacgcccagcatgtga

SEQ ID NO: 161543 - DNA, 408 bp, Enterobacter cloacae
gtgaacgagaatacagacggttctggcggagcgggttacttcgactttaaatataccgtggaaaaagatttaagcgtcactctccgggccagatataaccatcgcaactatgactcagaaaacaactacagccgcaaaaagccagcggacaccctcgaatcgcatctgggtatcagttacaccatcaataaagactggaattactatctggaaccggcctactttaaacatctgaatgacttccacgcaggtaacggtaagggacaccacgttgaggttgataacgtgctgacatatacaggctttgaccatttccagccttacgtatcattagcttatatggatcgatcgattgcagagaataatgaaaactaccgaattcgtctgggtgtcagatataacttctga

SEQ ID NO: 161544 - DNA, 324 bp, Enterobacter cloacae
atgttacgactgttgatgatgacagcctttatctacaccagttctttaatggcggctgatacagggctggcccgtagctatgtgagcgaggatgcgatcactatcgcaaagggattggaggacttgaatgctgatccggttctgctctctgtcgttgtggatgtgaactcccatttcgcgactaaatgccgcaaggtggcatcaccccacgagctcgcaatgaaccccattgtggacgagctggtggacttgaagcgcaccaagaatgaaaccccctatcaggaaggcatatcccggcaaagttgctcgcagcttgagaactga

SEQ ID NO: 161545 - DNA, 2196 bp, Enterobacter cloacae
atggatctgtacatttgcgaaaagccttcacaggcaaaagatctggccggtgtgttgaagttgacacaacgcggtgacggcttcatccatgacggaggcaagcgcgtcatcacctgggcgttcggccatctgcttgagatgtatatgcccgacgactacgacgagaaatacaagtcatggtctctcgactctctccccattgcgccggagtcatggcagagcaaagttcgccagaaatccgccaagcagtacaagatcattgagggcttggtgaaaaaggccagtaccgtctacatctccacggactacgaccgcgagggcgaggccatcgcgagatcccttttagacaggttccgctactcaggcccggtgcgccgtgtttgcctgacagccctggatgaatcaagcatccgcaaagcactcagcaatatcaaagatggtcaggatactgtgcccctgtactacgcagcccttgggcggcaacgtgcagactggttgatcggcatgaacgtgagccgcctctataccgtcctggctcgacaagtcggtttcgagagtacactccatgttggaagggtgatcacccctactgtcgctctggtgtgtcagcgtgaccgggatattgcgggcttcacaccctcgccatactgggtgctgggcgtcaacgttgctgttcagaatgggcagtttttggcgcagtgggtaccgcccgaggagtgcagcgacgatcagggccggtgtaccaataaagcctatgccgagcaagtcgcctcccagatcaatggggctcaagccgtcatcagtaaggcggagacaaaacccggtaaagagtcggctcccctgccatttgacctcaccgccctacagcagtacggcagcaaacgatggggctataccgctcagcaggtgctcgacgctgcccaatctctgtacgaaacgcacaaagccactacctatccacgaaccgacagccggtatctaccggagagccagaaggagaacatctccgacatcctccaggcgctcatattgtccgatcaaagggtctccgggctggtggccggggctgacccacatcgcaaggccagggtgttcaatgacagtaaagtgtccgcgcaccacgcgatcatcccgacaccagccagaacgaacatcagcgccatgtcggagatcgagctcaacctgtacgatgcgatccgccgcttctacattgcgcagttctacagcgagtttgagttttccaaaaccgtcattgaggtgcaaagtggccgtcacctcttcgctgcgtcaggcaaaacaccaaccaagcaaggctggaaggtgttgttcacctctgacagtgagagtgacccgaaggaagaaggtgaggatgtcgatgcactgattgagcaagagaagttaccccgcgtcagccaaggagaaccggcgttattgaaaggggccgatcttgcgaacaaaatgacccgccccgccccgcatttcaccgaagccaccctcttggccgcaatggagaacatcgccagattcgtgaccgaggagaagttcaagcagatcctcaaagacacggcaggcctaggcaccccagccacccgagcgagcatcatccagggtgccgtggataagggttacttcaagcgtcagaaaaaagtgctgatcgccactgagaaggcccatgcgctcatagcggtactaccaccagcgatcaagtcaccagggatgacggccgcctgggagcaggaacttgaaaaaatcgccactggcgccgggaacatgtctgtcttcatgaaacagatctcatcctggatatgccagatggtcgagcagctcaagacggcggcccctgctcttacacaggacggaggtgcaatggtaaaggcctttgccggggcaaaaccccagctgcatgtctgcttcaactgcggtggggagacactgatccggatcaaggggaaaaacgggttcttctggggttgtaagaacgaggcttgcaagaagacgttcccggataacagaggcaaaccagagaaaaggatcgcgactgaggattgccctgcctgtccggactgcgccagcccgatgcgactgaggaaaggcaaggcacctggaaaagtcagagccaccaagttctggggctgcacaggatacccggattgcaagaccacgatgcctttcaaaaagtccgattttcaggattga

SEQ ID NO: 161546 - DNA, 615 bp, Enterobacter cloacae
atgagacaacggctattgattcttggggtcgctatgttggccgggtgtgcggcaaacacacccgaggctccacctgccccgcaggccccagcgatcaacgacaaaccggcgagggtcagccgggagctgactgttgcgtgggacaattatgggcggggcggcgcggcgctgagacaaccggcgtttgtccatgtgttggggcaggatggttcgctgacatccaacatcgccagcacaacatcagaaaccatttcccttccggcaccgatactgacgcccggtgacatcgctgcgaccatgacggcgttcgaagggatccaatccggcaatcgccaaggctactccgtttatgagatttcccgctgggagcgttattgcaacgctggcaaagggatggacgagcacgactggcgctttatcgatgcccaaggtgcaacgaatgtgccttcggaagtgatcaccggctgcatcccgcctgttcacacctcccacggttatttacaggcctggacccatttctgtaccaaccaaggcgtaacccccgatgaccggcgcattgtgcgcgagtctgtgcgcccctactcagtggtgaacccatgcaaagcactgaaataa

SEQ ID NO: 161547 - DNA, 3042 bp, Enterobacter cloacae
atgttgagtgtcctgaacaagttgtttggatggggcgggagcaagggggagtcccctcagagtggcaggctcttgccgttgaaggacatggatgaggaagacatccctcgctaccctccttttgccaaaggcctgcctgtggccccgattgacaagatactggcgactcaagctgaactgatcgagaaggtcaggaactcactcggtttcaccattgaggacttcaaccggctggtactgccggtgatccaccgctatgccgcttttgtgcatctattgcctgcatcggaggctcatcaccaccggggagctggtggactgtttcgtcatggcctggaggttgccttctgggccgctcaggcatccgagtctgtgatcttctccattgaagggacacctaagcagcggcgggataatgaacctcgctggcggttggcgagctgtttttccgggttgctgcatgacgtgggcaagccgctcgctgatgtgtccattacggacaaaaatggggtagtgacctggaacccctactttgaatcccttcatgattgggccggacgcaatcacgttgaccggtactttattcgctggcgggagaagcgccataagcgccacgaacagttctctctcttggcagtagatcggatcatcccggtcgcaaccagggaatatctctcggagtctggcccgctgatcattgaggcaatgcttgaggccatttcaggtaccagtgttaaccagccggtgacgaaactgatgcttcgcgccgatcaggagagtgtatcccgagacctgaaacagaaccggctcaacgtggacgagttctcctatggtgtacccgttgaacggtatgtgttcgacgctatccgccgtctggttaaaacgggaaaatggaaggtcaatgaaccgggggccaaggtttggcatctccagcaaggggtattcatcgcttggcgtaatcttggcgatctctacgatttgatcagtcacgacaaaattccgggcatcccacgggatccggatacccttgccgacattctgatcgaacgcgggtttgctgtacctaacactgtgcaagagaagggagaccgagcgtactaccggtactgggaagtccttcccgagatgattcaagaggctgcgggctctatcaagatccttatgctgcgccttgagtcaaatgagctggtcttcacaactgagccaccagctgccgtggcgggcgaagttgtgggtgatgtggcggatgctgtcatcgagctcattgatcctgatgaagcgagtgacgctgatgatgagtcagccagtggcatgagtgaaagcctgctgtctgctgagcaagaggccatgaacgcgctggctgggttgggatttggggatgcgatggagatcctgggaggaacagccagtgacgacaatgctacccagccagcaccagtagtggacaccactccaccagcaaaaccagcaaaaggggctggtggtcgtggcgggaagaatcaagccaaaaaaaccgctccggcagcgcccgaacaacagcagcccgagccttcgcctcaggagatcgcgaaaagtaccccgccgctggccgtggaaaatccgctgcaagccatcatggatgtcggtgggggcttgggtggcctcgacttcccgttcgatgcgtttgttgcgggtaccagcatgtccgatgagcctagccaggcactagcccctgaaccgaaacaggatgttgccaatccggacaacccagacacacccaatctgggcctgatgaatcaggttttcccgaacttcatgaatgatgagtccaccggagatgtgggtgggatggatctacctcctgcgtgggcgatcgaggaaattccatcattccatgcctatgagggtgaggtaggccagcctggaaaccagtttgtgagtgaagaactggctggcgccgacgctccggatgccaaaggcgagctgctgacattgatggcaacgttcggagaggcagggcccattctggaacgagcaattttacccgtgctggaagggaaggcgacactaggtgaagtgctctgcttgatgaaaggccaggcggtgatcttgtacccagagggcgctcgggcactcggagctccgtcagaaatcctgacagccctattccatgctcaagccattgtccccgatccggttatgtccgggcgtaaggttcaggacttcaatggcgtcaaagcgattgttctgacggaacaattatccagcgcgttcattgcggccatcaagcaggcagaatctttactggggggctatcaagatgcctttgagcttgttgcctctcctgagatcaagaaaacccagtcgaaaaaaaatagaggtcagaggaagacaagccgctcggaaagtagcggagaagatagccatgcagcctctccagaaagagctcaggtggaggaaaagcgcgtgattgccgatgcgcagctcatcgacgtgtctgtcgagcccccatcgccaccagtcgatactacgccaccacctgacaaggttgtgccgcggaaggaatcacggggcaaggagaaggtggacaaaccaattcagcctgcaccaacaaccaaacctgccgagggaactcaaaatctcgctcgcttgccgccgcgtgagcagccaaagcctgagtctcagcaaaagcaggctagggtgattgacgtaggcaatatcgcgttgccaggcccagatctccccgaggaactgagcccgaggagcatcgtgaaggaggagacggttgatgaggcgctctatctcccaccgaagatgactcccgagaaagcgattcagatgctcaaggagatgatcaagaaccgcagtggacgatggcttgtcagcgctgtgcttgaagaagaaggattcctcactaccagcgacaaggcttttgaggttatcgctggggaatataccgggatcagtaagcatgttttgggtggcactttgcgccgagcacaaaggagaccgttgctcaagcaacgccaaggaaaactctatttggaggtagataaatcgtga

SEQ ID NO: 161548 - DNA, 1872 bp, Enterobacter cloacae
gtgacaatgacctatgacccgctcgcctatgagatgccgtggcggcctaattatgagatgagcgccgtttttggctgggtggctgcatccgtcggggcgctggcggtccagcaaattacggatatgccgccggaaccgttctattggatgacgggaatttgtggtgtcatgacaatggctcgcctgccaaaagcaataaaactgcacctgctccagaagcatctaaagggaagggatctggagttcatttccatcaaggagctccagaagaaggttcaggcctcccccgaggatatgtggcttggatatggtttcgcttgggaaaaccgccatgcgcagcgtgttttcgagatcctaaaacgagactggacctctatcgtgggcacggagtcaacaacaagcaagattgttcggacgatacggggcaagaagaaaaaagaggttcctatcggtcagccgtggatccacggggttgagccaaaagaagagcacctgatgcaaccgctcaagcacactgagggccattctctcatcgtgggtacgacgggctcgggcaagacccgtatgttcgatacgcttatctcccaagccatcctacgtggcgaagctgtgattatcatcgatcctaaaggggataaggagatgcgcgacaatgcgcgtcgggcttgtgaagcaatggggcaagcagagcggtttgtctctttccacccggcttttccggaggagtcagtccggatcgatccccttcgaaacttcacccgtgttacagagatagcaagccgcttggccgcactcatcccctcggaaggtggtggtgacccgttcaagtcgttcggttggcaggcgctgaacaacatcgcgcaggggttgatcctagcgtatgaccgtcccaacttgatcaagctccgtcgctttttagaaggcggcgccgatggcttggtgatcaaggctgtgcaggcatatgcagaacgcgtgatgccggattgggaagccgcagcggccccttatttggagaaggcggccaatgggtcgcgcagtaagctcgcagtcgctcacatggcattctacaacaacgttatccagcctgagcacccaagctcggaactggaaggtctgctcaacatgttcaagcatgatgcgacccacttctcgaagatggtttcgaacctactgcccatcatgaacatgctgacctccggtgagctcgggccactgttatcgcctgatgcaactgatctcagtgacgagcgtcagatcaccgattccgccaagatcatcaacaacgcccaggtggcgtatttaggtctcgactcgctcaccgataacatggtcggcagcgctctgggttcgatcttcctctcagatctgacggcggtagcgggtgaccgctacaactacggggtgaacaacctcccagtgaacatctttgtcgatgaagcggcagaggtaatcaacgatccctttattcaactcctcaacaagggccgcggcgcgaaattgcgtctcttcgtggcaacgcaaacctttgccgactttgccgcccgtttgggtagcaaagacaaagcgctccaggtgctggggaacatcaacaacgtgtttgcgctgcggattgtcgatgcggaaacacaagagtacatcgccgaaaacctgccaaaaacacgactcaaatatgtcatgcggacgcagggccagaacactgacggaagtgaaccaatcatgcacggtggtaaccagggcgaacggttaatggaggaagaggccgatctcttccccgctcagctgctggggatgctcccgaacctggagtacatagccaaaatctcaggcggaaaaatagtgaaaggtcggctaccaatcttgaccgagaagtaa

SEQ ID NO: 161549 - DNA, 585 bp, Enterobacter cloacae
atgtgctgtaagaaatatgatggatatcaggttgatacctattccgttaacccgtttgatcgcgtgatgaatgcgctaaaaagtcgaggccgtaagaacgcccacattctgagcatcttgcagctggattggcctgcgtctgaatcgatcatccatcgcctgagcgactacatcagtgacagcatcaaggccaacgaggagccggtgatttatccgatcatcgaggaggccctgctccgctatagccagctggtattccatgcgcagaagtataaatacgaagatcctgccaggatcagtgcctttttagacaccctcatcacggagacctgcaaggccctggagattcaaatcgcggcaaacagtggggggggggcctggtctgtcgattctggcacctcattttcggcctggtgcaccgaccaccccggcgacctttcgatcactccccatgctcatgaggacgaatcctctctgcgtggcctgctgtatgacctgcttatctgtgaaagcgtgaaaaatgttctgaggagaacagactatgaacaagccgtggttagtggtcgtctggttgctcacccttga

SEQ ID NO: 161550 - DNA, 630 bp, Enterobacter cloacae
atgaacaagccgtggttagtggtcgtctggttgctcacccttgagctactcgcgattttgatattgatcccaggggattggactgacagagcgataaaaaatgagtccgttctggtgaaacaaagccttggtatagaggctcaagattggatacataacaaggccacgacgtggtaccaatccagcatcattgactccggtttctacgacggtatgtacaagacgttgatcccctctgaggctgagcgggcgcggtcaagagggatggagggcatgggtaaggattggtttgtgtgggtcaatggccgcatggatgcctttgtgaacatcatctaccagttttacacccgagcggcactcctgctggcatgggccccgtacatgctgatcttgttcgccccggccatctatgacggctggatgacgtggaaaataaagcggaccaacttcgactatgcgagccctgtgctgcatcgctatagcgttcgaggaacgatgttcatcatggcgggattgttcatctgcttctttatcccgttcgcgctcgacccggttgtcattcctctgacgatgatggcctgctgtgtgctggtgggccttactgtcagcaatttccagaaacgagtttga

SEQ ID NO: 161551 - DNA, 393 bp, Enterobacter cloacae
atgaaattacaaagttgtttgcagctgattatggtagcagtgggagtgctggtggctggtcaagctactgctgcatcgggcgatactaacaacaccgataagattaaggctctggatgcggcctgtcccagctgtgtgacggtggcgaacgatgtaatggctattcgggcggagcattgtcagctcaagaacacatccgccgagatgatgattagcaccatgcgcaatgatccaatgtatggctttatgcaggctgttgactcgatggtggagcctgcgacttataagaccatcctgacggccgcagcaacccaggtcgattgcggcaacccgcaaaactggatcgacatgacgcagaaggcgctcaagaagagcacccaaaaagttagctga

SEQ ID NO: 161552 - DNA, 570 bp, Enterobacter cloacae
gtggttgaccttgggcaattccaacatgtacggggggtagttgtgaatatttttaatggagctgatgggagcagatctcaaattgttcgtgacactttcttggtgccatcattattgtttgctctctttgtttactggtgtggactggaaagatatctcaatggtttgtctaatccgctcccaatgaaatttattctgtgtacatcgctttttattagtgccatgtatgagttgaaaagaggttcatttcgagcagatatggtttctctcctagcgacttcaattatttttgcggtatctccatggttagcctgtgaataccgcaattggtacttgaatttcattgatcagcttaaaggtgttcaggaggcaactgatgcaataggacatgagtatattcgggctgtagagaatccggcagtaggaatcggttcttgctttgcaatggcactcgcaacgataaggttgccacttaatcgtataattaaggcatctttggaaagagcttttattgtgaaaaattctgattctgtatgcccccactgtgggcaggtaacccatcatttatag

SEQ ID NO: 161553 - DNA, 174 bp, Enterobacter cloacae
atgacaacatctgaaaatcattcaccctctgcaatgcgcggggaactatccacagctatacagcgcggcactgaagaattcagaactattggccgcgagatgacggtaacgaaagcattcgggaagctaggcatgctcgcggtaaaaggtattcctttgttggccctgtcatag

SEQ ID NO: 161554 - DNA, 2295 bp, Enterobacter cloacae
atgtgggatggtggcttacaagagcaggaagtgttggctatcgagaaaataaaggctgctttttcagccaatgtatctaagcctgacaagcctgtccgtggcggttcaattggcgagcagctacaaagctatggttttaccggcaatggaatgttcccctggaaaggttatgcaggttttcgatttgttgaggcaaaaaaagagggtgaattcgatttagttattgtcacacactgcaacgtgatcattgttgaactgaaagattggaaccatcagcctgtaaccgcgcgcggagatacttggtataagggtgacaagaacatggggcgctcgcccgtaagcgtgacccgtggcaaaaaattcatgctagacaacaaactcaagcgtctggcaaaccgttttacgaacaaaggctataccccgtttgttcatttctttgttgtgatgaccggcaatgcggacttcagcgcgctgccggaggaacaacttcaccatacgatctcgttaaaagaattcctgaaatttgccgatcggcggacgttcaataactacttcaaaccgcaccgaggttccgaagttcttaacaaggattttcctctttttgataatctgttcctagggcctcagacggcgccaaaagccctgagagttaatggctacgaggctaaggatatgattttcgaacaccctaaaaaggtgtatcgcgaatacttggcaaaatctgagatatcagcgaatagcgaagcgctactcagagtgtggaattttaagaatatcgcgggaacaaaagcgaataccccggaaggacgagctcagatcgtttcacgtgagcgcgaagtgttacagcacatcaatcaccagaaccgtgacctgtataaccactgtctcaggtctctgacgagtttccagaaagacgaggtcacggccgagtacagtgaagtctatgaacttccgccgggccatgtccggtttaatgagtttatcggaaaatatggtaaggccttttctgatatggatcgcttgaacgtggtgaaactgctcattgcgaagtttagtgatctccatgagatgaaaatagcgcacagggatatagccgatcacagcctgtggatttcaccttcaaaagaagttgctctttcaaactttatttcggcttaccaccggccagccggaacggtcggtgattaccgtaagcttttatccgtaggtgcaatcgaggtaaaagacatgcttgatgagggcgagcttacgccttttcagcaggatgttcatgccctgggccttgtggcctggcatttattaagcggtacgcgcatgtcgccaaagagtctggagaaagtacaggatagtatgctaaacagccaacactggtattcatatgtattactggatgccgttgctgcaaaatttacttccgcgacagaattttttgatgccctgaaacaagccgagcctgctggcaagactatcccaacatttgatgatactgagcttgatccttaccggcatgctatcaatcactctcgtcagtaccgggaagatggtgactttctggtcgaaacatccgacaaagaagtctatatctcgggtggaaggctcgtgaaggcctggctgaacgcgggggggcagggagacgatccgtcaattaacttccaggttctgaagtttttaaagcaggttgagcagctttctttagttaaaccaacgtatcttcctgaaattcgtgaattcggtatcgcatcaaaatcatcaagcctctatatggtcacggatcaggtacatggagaaacctgggataaaatgctggtccccgatgatgaaaaaatcgctcttattggtaagttcgtcgccgccgttgagcatttacacggcctcggtgtttctcacggggatatccatcctggcaatgtgatgcttgtgacacagagtcgttcgcttttcctcatcgatatccccgatttttcaccatccggtgacgaacctaaaaaccacagctacagccctgaatacatcgataattgtacttcctttgaacgcgacaactatgcagtgatgaaaatgtcctgcgagttgttaggtttgtcatgggggcatgaatcagagtttcatcagactattgcgaatgccatccgagctgagctggaagacttggtttttgggtttaagcatttaggacggtttaaaaaagcgatagacagtaataacttagcatcagaacaagcacttatagagataacagcaggaaacgccgatgtgaatcgccatgggtttaacagacacctcagagtcatttaa

SEQ ID NO: 161555 - DNA, 228 bp, Enterobacter cloacae
atgtcagaagaaaatgccagaaagatcgcaacggaattggagcatcgtgggctgttggctggctggttgcagtttgggccagatggggagcgtcttgatatggtgctgatgatgaacttagagcatgaagaagtggagtgccaacgtcattttgctcactgtgttttcaatggcactgcgctgacagagaaatccccggattggcttagtgctgtactcaaacaatag

SEQ ID NO: 161556 - DNA, 615 bp, Enterobacter cloacae
atgtgtaactgtcagacaatggctcgcgatctcagtgagacaatgggcgggaagtatcccgcaagccttcatgctcccttgtgtgaggactatcagcaggtgccatttaccaggatcgaggttgatggttcagggtgcatcgtccccgagtcagaggccgccgccgtgatcatgaaaatgcagtggctgggggataatgctgtggatgtggcgggccttctgccagaccataattttcaccataaagatggtgttctgatcattcaccagcacggcggtgacgtcaggataccgaaaggtgggaggttcgccgttgatgatgctggccatgctcataaagtattgatgctcacaagacagtttactttgaaaccaaacggtactgtgactgcctgcccgcggtgtggcaacaacactgaatttatcggctgctcaattcaagtggtagaggactgctgcgaagtgtttgtgatttgcaggtgtaactttgatccgacagaacagaacactgaccaccgctatgaggatgtaatgggtagcctggatcatgacaatctcatggttgctctgtcgtgctggaatagagccctcgccgatacagcagcaaccagctga

SEQ ID NO: 161557 - DNA, 246 bp, Enterobacter cloacae
atggcgggtgtaaaagtcagcgagctggaataccaagggcggctggatggtcgtcatgcctgggtgcatgatggattctggttctactggacagagaaagccaacgtggtgacgtccgatctggctgggctggagccattctgcctacttcgcttggcattggtccggggcgagcagaactccattcgagcattcacgaaaacagatgccaagcgcgggatcatcgatatgttgaaccgtaaatag

SEQ ID NO: 161558 - DNA, 282 bp, Enterobacter cloacae
atgaagcctgtaaaaatcccgcggcgggttgatgaacccccccacttgctcctgtggagtgccgatgagttggccccgatgctcctggggctgacgattggcgtcatcatcggaaaggccctcatctgcttcatcggcgggctgctcgttaccaacctgtatcgccggttccgggacaaccatccagatggttacctactccacatgatctattgggccgggttcatcgcgaccaaggcaaagtcgatgaaaaacccatttgtacggaggtatttaccttga

SEQ ID NO: 161559 - DNA, 636 bp, Enterobacter cloacae
ttgaaattgaaaacctatctcaagacctgggaagggacccaagcagagaacaagtggggccgtcttttccaggcggggctgttagtcatagtgttactgctggtcatcaaggtttttacgaaagacaccattgtcaccatgcagccctacaccctttctgaggaggcatgggttacgaaggaaaatgcctctcggtcttacaaagaagcttggggctttgcgttctcacagctgcttggcaacgttacgcccggttcggtggattttgtcaaagagcggttgagccccatgctctcgccggaaatctatcaggatgtcattgatgccatcgagatccagtccaagcagataaaggaagaccgcgtaaccatgcggttcgaacctcgttttgtagagtacgaagagaagagcgacaaggtatttgcttatgggtactcctatgtgaaaggcgcgtcatcgcaacaggaggagcgtggggagcgcacttatgagttcgtcctcaaaatctcaaattacgccccttctatcgattacatggaaacctatatgggtaagccacgcaccaaggctgtgctggagcaactcaagcgtaaagaagaagaaaaggaacggagaaccaatgaagctcaacgctaa

SEQ ID NO: 161560 - DNA, 906 bp, Enterobacter cloacae
atgaagctcaacgctaaatacccactcttggtgcttgccctgtacgcaacaggggtgatggctgactcctctgaggatgttcctgttgtccccgcgagtgtgatgaaacagggggtgcctgcccctatcggaagtagtggggtgatgggacaggttaacgagagtcctgtgctgacgatgaatccaggtgtgaaccaaatcatcccgatcgccatcggccatcccaatcgaatcgtcactccatttggcaatccagaagtggtttccacctcactgagcggcgccagtgctgatggacaatgtggtgaagtttgtatcaaggaaaacgtggtctacgtcgcaacggacaaggaatatcccgttacgatgttcatcacggaaaaaggctcagaggcccaggcactgagcctgactatggtgccgcggcggataccgccccgtgaggtgttcctcaaactcacagggagcgccagcatgggcggaggctttgctaataccaaggcggatgcttgggagaaaagccagccctacgttgagaccgttcgtactgtgttccgaaagatcgcccttggcgaggttcctcaaggctacagcatgaacaatatcccagccggagcggcggttccccggtgtgcgactggcagtatccgagtcgatttttcgaagggtcagtacatgatgggacaccatctcaacgtattcatcggggtggcccagaacacatcgacccagcccattgagttcaaggagtccttatgtggtggttgggacgtagctgctgtgactacctggccgctgaatgttctcgaaccggggcagaagacagagatctatgtcgcgatgaaacaaggtcgcggtcaggcctccacgtctaagcggccgtctctgctgggggggcgtcaatga

SEQ ID NO: 161561 - DNA, 1326 bp, Enterobacter cloacae
atgaacattagccagtattggagtgagctcgaccccaaaaagaagcgctgggtagccgtcgctggtggtgtgtttgcccttttcgctgtcgtcacggttttctccagtgagccaaagaaagaggaacggcgtgggcgtcaggaaacgatcaagaacgtactgacagataagaacacgcgggaaatagggatcgactccctttcagctgatgtgaagatggtctcgcgtgaaaatgcggatctcaagaaagcgctggagcgcgtcaattcagagctggagcaaaacaagcagaaagcagggaagggggctgacgtcgatcgtgaaatttctcgcttgcgccaggatattgagcaactggcaaagatgaatgatgaactggcgaaaaaggtagatagcggaaaagggaatagcaatagcaccgaggccaccgggaatgctgatgccagtgtgaccaacactccaaggaacagtgctaatagccaattcatggacaaaaaattggactacaaggatccggctgccattttcagggatgctccattgccagactctaagggccaagctcccggtagtaaaggcgatggcaaagcgcctgcaaagaccggcatccagattgtcagctacacccaaaaggcgcctgaggcagataagtcaaagggagctgatgatgattccttgtatctgccttcgggatcgatcctgactgggacactgataaacggtatggatgccccaacatcccagggggcccgccgcgacccattcccgtcaactctgcgtatccagaaagaagccatcctccctaaccggttccgtgccgatgtgcgcgaatgtttcctaattgtctctggctacggcgatctgagttcggaacgcgcctacctacgtggcgaaacattctcgtgtgtacgtgaggacggtggggtgatcgaggcgaagctcgatgcttatgcggtcggtgaggacggtaaggctggggttcgtggtcgagtggtatccaaacaaggtcagatcatagccaaatccatgatggccggttttttgagcggtgtctctgaggcattcgacgtcaacccagtacctgttgtcagtacaaaccctggttcaaatacccagtatcagtcggtttggtctgaggacatggttcagggcgctgcggccaagggcgccagcaaggccttggatcgcatcgcgcagttctacatcgacatggccgaagggattttcccggttatcgagatcgatgcaggccgccaattggacgtaatcatgaccaagggcactaagttgcaaatccgttcgaccggggagagccagaaaaaatga

SEQ ID NO: 161562 - DNA, 567 bp, Enterobacter cloacae
atgagcattgtgaccaaaatgggcagtttcacagacgagattcgactaggactgagagtaggatctctcagactgttgggggtcggtgctgcaatcatgctgctcgcggggtgttcatcactcaatatcggggaggaggaatacagctgtccaggtatgccaaacggtgtgcagtgtatgtctgctcgggatgtttacgccgcaaccaacgatgggaatgtccctcgtccgatgaaggaagatgaggcaaaagcgaagggggagggcgaagccaccccctcggccgtagccacgaacacatccggagacccggtaatcgacacgtatgtcgctccgcgtttgccggatcgcccaattcccattcgcacaccagcgcaggttatgcggatctgggtagctccctgggaggacaccaacggtgacctcatcgtaacggggtatgtctacacggagattgaaccgcgcagatgggtgatcggggatggtacacccgaaaacgagccggtgttgagaccgctgcaatccgtgcagcacgaactgaaaacagaaacaaccacaacaaagtag

SEQ ID NO: 161563 - DNA, 405 bp, Enterobacter cloacae
atgaacatgaatgtaagtcatacaggtccggtggcgaatgcctccgcggtaaacaaaaacaacgcgctcttcctcctgatgggactggtggcggtggctctcgtgctggcgccggattccgtccacgcaggcactggcgggactgcgtttgatgatgtctggaccaccctcaaagactggacgcagggtacccttggtcgaatcgttgctggtgccatgatcctggttggtgttgtcggtggaatcgctcgccagagcctgatggcattcgccatgggtatcggtggtgggatggggctgtacaactccccgacagtggttgagtcgatcatgtctgcaacactggaacatgccgacaagatcgccccggccgcaatccacctcaccaatgggctcgggggctaa

SEQ ID NO: 161564 - DNA, 1158 bp, Enterobacter cloacae
atgttaaaacacaaattgaaattaccagccttgctgggggccctggcggctattttcacgggaacagcccaagccgagttgttgcagtattcctttactgcaccggggggggcacaaaggacgttagcggcgactgccaactatgccaatccgacgggtaacattcgattcgctttgagtgcaggtattgaccgtaaggtcaaaatctcggtgctgcgaacggatggtaccttgatctctacagtaaccagtcatctgttgggtgcggccgaccggatcactgtaggcggcagcacctactatggtgcagagttgcaactagccgcaccggttgcgggtacctataagctcaaagcagagattttatctgcggccggggcttcggttcaggcggatgagtatcccctgactgtcgatgtcaccgctccgacatatgcgtcagtggcaccagaagcaagcaattatgggcaagtcaccactggtaccctctggaagctgggtattggaggggccgaagagaacgccttcaagctcaccggtatcagcgatagtacgccggtaacaagcgtcaaagcgaagctgtacaggcaggatagttcgttatatcgaaatgtcgctattccttacgatgcagccaatcatgaggcgcgaaagccgttcgaaagcggatttttccctaactctgatctggatgaacagttcactctccagttcgaaatcgcagatagtgctggaaacacaacgctgacggacgcgcaaaaagtgatgtttgataacgtcaccaatgcccctaccgcaccatttggtgtctttgaccccaacagctcaaatatcctagcgccggggttgaccgggtttgtgtcttataccgatggtatgacggtgaaaacaaacccaatcaaactggcgtggcgtgtgccgcgtaataactggcatgaataccgggagggcgggatcaatatggtcaatgccctcggtcagatgaccaaggccggtgaagatagtcagtatgtctacctaatcacaacttccccctacgggcacactgatgggaactactggcgctgggtcaacttcgggcagtgggggggggggttattgattacgatttggtcctatccccctctgcccccaaaagccccagattgctgggagtag

SEQ ID NO: 161565 - DNA, 861 bp, Enterobacter cloacae
atggtgacggtatgggaccaccccgaactgacgacaccagcgggtcaataccgtagtgcaagtgataccggtaactgggtgaactcagatggcactattttctatccttatattggtaaagttcaggttgctggcaaaacgctgagtcaggtgcgtcaggagattgctagtcgattgactacctacattgaaagcccccaagttgatgtgagtatcgctgcatttcgatctcaaaaagtgtatgtgacaggggaagtggcgaaatctggtcaacaacccattactaatatacctcttactgtgatggatgcggtaaatgctgcaggcgggttagcaactgatgctgattggcgtaatgttgttctaacgcataatggtaaagatacaaaggtttctttatatgcattaatgcagaaaggtgatttaactcagaaccatctcctatacccgggtgatattttatttgtcccacgtaatgatgaccttaaagtctttgtgatgggagaagtcggcaaacaaagcactatgaaaatggatcgtagtggtatgacacttgctgaagcattgggtaatgcggaaggtatatctcaagcaatgagcgatgcaacagggatttttgttgtgcgccagttgaaggaagataagcaggggaaaattgccaatatctatcagcttaatgctcaggatgcttccgctatggtactaggcacggaattccagttacaaccttatgatattgtctacgttacagctgctccactcgttcgttggaaccgtgtaatatcgcagcttgtaccgacaatcacaggtgtgcatgatatgactgaaacaatgcgttatattaagagatggcccaactaa

SEQ ID NO: 161566 - DNA, 561 bp, Enterobacter cloacae
atgtgctgccggggctcaaaaaaacatcctgatatcgccggagataatgggctgggtcgctctcgcggtggttttggcacccaaatccatctggcgacagacggaagcggtctaccgttaaatatcatactgagtcccggtcagactcacgaaagtcaatttgcacaacgtcttctggacggcattggtgttcagcgtcaaaacggcagcatgaagcgtcgtggtcatgcagtgctggctggcaaagcctactccggacattcgttacgtaacgaactgaaaagaaaagggataaaaacggtcattccccgaaaagccaataaaaaaatggcagcagatggtcgttcacgactcaatcgagatgcttatcgcaatcgcaacgttgttgagcggtgttttgggtgcctgaaagaatatcgccgtattgccacacgttacgacaaaacggcgagaaattatctggcgatggtgaaactgggtgcattcggctgttttacaaaaggttatgtaattaagggacacagcctagtttttgtagttgacgtccagggagaacattga

SEQ ID NO: 161567 - DNA, 171 bp, Enterobacter cloacae
atgcgcaaagaaccacttgaaacaaatgtgaccgacgggctggcagaaatgcatgaagccgcagagcttatacctgaagataaagtagaggaacttgcggaaaaagcgaaaaaagaagctgaagaagctacttctgaatatcgtaaaaaacatgaagaaaagcgaacctga

SEQ ID NO: 161568 - DNA, 204 bp, Enterobacter cloacae
atgccaatgataagtgatacatgcgttgtgtcttccggggatttagattttcttgccttaagctttgccaggatgcgtgttcagggccgtcagctttccataaatgccataaccggcaatatggatgaagactgcagggtatggttcctgaaacgttatgaatattactttgctcagttgaaggaaaaagagctggcagagtaa

SEQ ID NO: 161569 - DNA, 234 bp, Enterobacter cloacae
atgaaaagaataacaccattagcagcagttatagttgcgttccttacacttacgagtgttggttgttcttctaaccaggccattaaaactacagacgggcgtactatcgtgactgatggtaagcctcatgtcgacgatgataccggtctggtttcctataaggatgcccagactggcagaacagagcagattaaccgggacaaaattaccaatatgagcgagctggacaattaa

SEQ ID NO: 161570 - DNA, 228 bp, Enterobacter cloacae
atgaaaaaagttttttttaccgcttttgcggcaacggttgtactgtcagctctgacaggttgtacacgtaccagttacgcgatacataccaatgacggtcggacgatcgtcagtgacgggaaacccagtgagtcagaaaccggactgctcggttacactgatgccaatggtgtgaaacaacaaattaacaaagccgaagtaagaaaggtagccgaaatacctcattaa

SEQ ID NO: 161571 - DNA, 627 bp, Enterobacter cloacae
atgcagcggaaaacgcatcgcggcactgaagcaggaagagacggtgaagccccggacgctggcgcccagggggctgaaaccgtgcaggtaccgacgaccggagatagtccgttgtcagcaatatggctgatggatgccatctgtgaaccagtcaatctcaggcaagccctgaaaagagtgaaggccaataaaggagcagcgggagccgacggcataagcgtaagcgaactgccgggccaccagaaacactactggccggaactaaaagcgcaactgttgtctggcagctatcttccgttcactccaggaagaatggtcatcccaaaatccggcggtggtaaacgtctgttgggcatcccgacatttgtggatcgcttcatccagcaggcgataatgcaggtgttgcaggcgcagcgggatgcgtcgttaagtgacagcagctgcgggttccggcacggacgctctgctcatcaggcagtgaaacaggttcaggactatattagctcgggatatcactgggtgggcgatataactttctcattgagcctccatcattatactttcgggtttgtaaaacgtaacgataccctgatatacaataagagtataagtggaataatgatctaa

SEQ ID NO: 161572 - DNA, 1032 bp, Enterobacter cloacae
atgctgaaccagagcgaaacgcgcagcgtcggcagtgaagtggtgggtaaaggtaatatctcattgctggcgggtgacacgcttcgtgcgcaggccgccactctctcctccgatcgggcgctcacgctcagcgcaggcaacgatatcactctcgcagcgggtgaaaacacgcagcaactggatgagcggcataaagtcgtgggcggtaatggctggctgtcgaaaaccactacccgcacccatgacgtggtatcgcgtcagacggcacagggcagtgaattgagcggcgacagcgtcagcgttaccgctggccgcgacctggcgctgcacggcagcagtgtggccgggaccggagacgtgacgttgctggcggggcgcgacctgacggtcggaacggcggaagagcgtaacagcgaactgcaccagacgcaggagaaaaaatccggtctgatgagttccggcggcattgggtttagtatcggatcgcagagcgtgaaggcgaccgacaccggcgcagatgtcacgcaggccggcagcaccgtgggcagcgtgaatggcgacctgactatgggcgcgggtaatcacctcgccgtgaccggctctgaactggtggcaggtcaggatatgacgctgaccgggaaaaatattgatatcaccgctgcgcaaaaccagagccgtcagacgcatgtcgttgaacagaaaacctccgggctgacgctggcgctgtcgggaaccgcaggcagcgcgctgaacagcgtggtacaggcgacgcaggatgccaaatcggcgggcaacagccggctgcaggcgctgcagggcgtcagcgcggcgctgtcgggtgttcaggcatcgcaggcagtcagaatgaatgacgcacagggtaatgacggctccggcaccaataccatcggcgtcagtctctctgggcagccagtcatcaaaatcgagccagcaaagcgagcagatatcggcgcagggcagcagcctgaatgcaggccggaatctcacggtttcagcgacgggcaacggtga

SEQ ID NO: 161573 - DNA, 1035 bp, Enterobacter cloacae
gtgggaagccagcttaaagccggaaataatgctacgctggcggcgaaccgggacatcaacctgctctcggcagaaaacacccgtttacttgatggcaaaaatgaaagccatggcggtagcgtgggcgtcgggattggcgcaggttccggaggctggggaattaacgtttccgccagcgccaacaaaggcaggggcagcgaaagcggcaacggcaccagctatacggaaaccaccgttgacgccagtcgccaggtcacgttgctgagcgggcgggataccacgcttaccggcgcgcaggtgaacggcgaaacggtgaaagcggacatgggacgcagcctcactctcccctcagagcaggacagcgaccgctacgattccagacaacagaatgccagcgcaggcggcagcttcagctttggctccatgagcggctcagcaagcgttaatctcagccgcgataaaatgcacagcaactacgattcgatggttgagcagaccggcatttttgccggtaacggcggatacgatatccgtgtgggcgagcacactcagctggacggcgcggtcattggctccaccgctgcggcagataaaaatcgccttgataccggcatgctgggattcagcgatattgaaaaccgtgcggagtatcgtgttgaacatcagagcgcaggtttcagcaccggcggcagttataacgggcagttcgtcgggaatatggccaacagtctgctgaccggggcgaataatcatggtcaggcagacagtaccacgcatgcggcactatctgatggcacgcttatcatccgggaaccgcagcatcagacgcaggatcccgcgctgctgagccgggatgtagaacatgccagccagacgttgtcgccgattttcgataaagagaaagagcagaaccgcctacagcaggcgcagctgattggtcagattggcaatcaggtgtccgatattgcccgtaccgaaggcagtatccgcgccacgcaggcggccacccgggcacgggagaatgcgtcagtatag

SEQ ID NO: 161574 - DNA, 717 bp, Enterobacter cloacae
ttgcgggaagccaaagacgtatgggagaaagcgcatccggggcagacggccagcagtaatgacatcctgcgtcaggtgtatgacaccacgtataacgatacgctgaaggcgtccgggtttgggacctgcggccagtatcagcaggcaatacaggccgcaacagcggctgtgcagcaccgtacatcgcaagaggtgatagggcatcatactgagctgagcccggaaggcaaagtggcggcgcatgctgtggtaaatgctgcgctggcggcagcccagagtcagaatgccatggccggcgcagcgggtgcatccacggcagaaatggtgggcatgattgccggagaaatgtacagcaaaccggtaaacgaactggacgacacgcagaaacagaccgtctcggcgctggccacgctggcagcgggtctggccggaggcctggtggacgacagcggcactgcggcggtgagcggggcgcaggcgggaaaaacaacggttgagaataattatctgagcagtaaacagatagatgcgtggtcggccgaaatgaaatcctgccaggcaaatggcggtgactgtagcggtattatcaagaagtacgaggaactgagtaccgctcagcaacaacagcttatcagcgactgtgcaaccagtccgacaacttgccagcagaaacatggtgatgtactagctgatagtctggcggtgagcaggcgatag

SEQ ID NO: 161575 - DNA, 519 bp, Enterobacter cloacae
atggtctacgatctgactgcgacctgggcgcatcagatggacgctaacgggatcattgccagtaataaagtgtcagagcagatcatggcgaaatatggccttgatcaggctcaggccgatattattgcgggtgtggcgttaagtgcgctgggtggagtgagtaaagctggtaaaggttccggtagttccgcaagcagcacagctaaaccttcgattaatcaaggccagcagaataaacacgtaccaggagctaatgaatacaaaatagcgtctgaagctggattaaataaaagtgtactcacagttcagcctgattcattactttcaaaattaggaacaggccaacaggtcggtaatacggctatcggaacacctggttctaaggaaagtattaactatggcaaagtcattgggaactatatagatcctcaaacaggcgtgtccacgccgactaccaatggtattgttcactatggaagaaatggtgttcatattgttcctgcaaggccaacggagtaa

SEQ ID NO: 161576 - DNA, 180 bp, Enterobacter cloacae
atgaaaaaacaaactgattttaataactattttaagctatccatacaaagggctttacttggtaacgttactaataatatgcgagcaataacggcagaactaagtgaaaataatattaagctattttttattatgatggtgaaatacatgaaaatgacgaagaaaccgtttctgaaatag

SEQ ID NO: 161577 - DNA, 531 bp, Enterobacter cloacae
atgatccaatccccgaaggactggctagtgaggaaggagtcatggccgcagtttggtatgaaagcagcccttatgctgctggctttgctgttggcgggcaattggttcatgaacaggtaccgcattggtatcgacccgcagaatgaaaaatgtctccctgggtacacggtgtatctgatcgatttaaatgatcggtcacttcaaaagggggccatttactccttccacgcaaaaaatctgcaaccgctctacaaagacggcacccgcatggtcaagatcttggccggaatgcctggggacgtagtggagattgaccaggcatggaataccacagtgaacggggaagtcgtcggggaggggctccagctcgcccgtaggctgaatttagatgagagccagttttacggtaagcggacgctgacggaaggacactactggtttatggggcagagcccttttagtttcgactcacgctattgggggacggtgaacgatgagcaaatcattggtcgcgcttatcccctcttataa

SEQ ID NO: 161578 - DNA, 330 bp, Enterobacter cloacae
atggacatggacatcaacatcaaatcgattgcaattgccgctgtactcggtgccgctggtggctttggtggcagctattacgtgctgaatgaacaaacctcggccatgcacgatcggctgaaccagtccccgcccatcgttgtcgtggatttcaccaaagttgcagcctcatatcctgctggggcctccgcagaagaggtagagaagctgatggtcaagaccaatgacgcgatcctcaaactcaaggacgcgggttacttggtcctcgatgcggggtctgtggttggggctcctagcgatgtctacctgccggaggattggctgaaatga

SEQ ID NO: 161579 - DNA, 2445 bp, Enterobacter cloacae
atgatcgtgaccataaagaagaagctcgacggtgcgttgatccaggaacatatgcgagcctctggggtgatccctgtacttgcctatagcgaagatgaacaggtgttcctcatggatgatcagagcgccggtttcggttttatctgtgagccgatgtgcggggcggatgaaaaggtacaggagcgtatgaacggcttcctgaatcaggagttcccttccaagacgacactccagttcctgttatttagatcccccgatataaaccaagagatgtaccagatgttgggactgcgtgacggcttccgtcacggtctgctgagccccgtcatccaggagcgaatcaactatctccagcaccacacgacagaacggatcatggcgaggaccaacaagggcatctacgacaacggcctgatccaagaccttaaattgttcgttacgtgcaaagttcccatcaaaagcaacacacctacagagactgaactcgttgagctcgaccaattgaaaaccaagattgagtcctctctccaaacggttggcttgcgaccccggacaatgaccgccgtgaactatgtccggatcatgagcacccttcttaattggggacctgatgcttcttggcgccacgatgccagccgctgggaaacggataagccgatttgcgagcaactcttcgactacggcacagaccttgaagtcagtaaaaatggcatacgtttgggcggctatcacgccaaggtgctgtcggcgaagaagctaccggatattgcctactttggggatgctgtcgcctatacaggggacctgacggggggtaactccagcatcaaagagaactacatggtggttaccaacgtcttcttccctgaggtggaaagcaccaaaaatacccttgaacgcaagaggcagtttacggtcaaccaagcttacggtccgatgctcaagtttgtcccggttctggcagacaagaaggaatcttttgacacggtatatgagtccctgaaagagggggccaagccggtcaagataagctactccctcgtgatttttgccccaacgaaggagcgagttgaatctgcggcaacagcagcgcggagcatttggcgtgagagccgtttcgagctgatggaagatcgctttgttgccctgccgatattcctcaacagccttccgttctgcacagaccgggacgcagtgcgtgatcttttccgatacaagaccatgacgagcgaacaggcagccgtcctgctaccggtgtttggtgagtggaaaggtaccggcacatttcatgctgctttgatctcccgcaacgggcagctcatgagcctgtcgctgcatgacagtaacaccaacaaaaaccttgttattgccgcagagtctggttccggtaagtcgttcctgaccaacgaactgatctgctcctacctctccgagggcgctcaggtgtgggtaattgacgccggtaagtcctatcagaaaatgtcagagatgctcaggggcgattttgtgcactttgaagagggaacccacgtttgcctcaacccgtttgagctgatccagaactacgaggacgaggaggatgccatcgtgagcctagtgtgcgcgatggcttcttccaaggggctgttggttgagtggcaaatctcagcactgaaacaggtgatgtcctcgatatgggaagagaagggcaccacgatgaaggtggacgacatcgctgagcgctgcttggagggcgaggatttgcgcttgaaggacgtggggcagcagctctatgccttcacatcagaaggtagctacggcaagtatttttcaaacaagaacaacgtctccttccagaaccaattcacggtgcttgagctggatgagctccagggacgaaaacacctgcggcaggttgttctgctccagcttatctaccagatccaacaggaggtgttcctgggggagcgcaaccgcaaaaaggtagtgatcgttgatgaggcctgggatctgctcaaggaaggcgaggtctcagtgttcatggaacatgcctatcggaaattccgtaaatatggtggcagcgttgtcatcgcaacccagtctatcaatgacctgtatgaaaacgcagtggggcgggccattgctgagaactccgcgagcatgtacctgctcgggcagacagaagaaaccgtcgaatcagtcaaacgagctggtcgtctggccctctcggatggcggtttccacaccctcaaaacggttcacaccattcagggtgtctactcagaaatcttcatcaagtcgaaaagcgggatgggcgtcggccgcctgatcgtgggcgacttccagaagcttctgtactcgactgacccggtggatgtgaatgccatcgatcagttcgtcaaccagggcctcagtgtcccagacgccatcaaagcggtgatgcaagcccgccgacaagcagcataa

SEQ ID NO: 161580 - DNA, 726 bp, Enterobacter cloacae
atgggggtaaaaatgcttggaaaaattcttggggggctgatggtgctcgggataacgactatcccggctccattggttgcagcctcaaagctagaaattacagaccccagggcggccaagatcaaggagattgtgaccctgcccatcaaggggatcagagcagtcgagagcgatggtcagatcgtcttcatctcagacaacggtaggtttgtcattacagggcagatttacgatgtgtggggtaaaaaacccctcagctcgatgtcggaaatgcgtgatgtcgccgaccgtttgcatctccaagatatgggaatggacgttgataagctgaacaccatctcgtttgggcatgggcctaaggatgtggtgctgtttgtcgatccacgttgcggtgtctgccacaagttgattggtgaggccaagccattggctgagcaatacaccttcaagatcgtcgttatccctgccctaggggatgaatcaaaccagcttgccaaagcgctgcactgcgcgaaggacaaaaccaatgcactggatgcgcttctgaataacaccctgggtactctcccgtcaaaatcgccatgcgatcccgctcaatatgaccagaccctgatgacggctcatctgatcggtattcagggggtgccattcgtcattgcacccgatggccgtgtaagcaagggacgccctaataacctgaaagcatggttggagagtgcacaatga

SEQ ID NO: 161581 - DNA, 723 bp, Enterobacter cloacae
gtgacggcacggccgatcggcttctcgggcaagctggaagaagctgtttatgagtggacgttgccggaaggggcggccattgaagatcagaagcaaccggcagcgcgggtgttcacgatgggcagcgcgggggaatacctggtgaagctcaaagtgcgggatgcgcggggcaacgagacagagctggaggagccggtggtgctgggcgaggccgaacagtacgtgattgacctgcaatactcgggctcgaacccggatgcgcgtgagccgctggatgtgctgctgcggccgtacatctcgggtggtcatccgcgggatcggatcctgacccgccagtattcggtggatgggaaaccgctggagagtgcggggttctatggccgcacgacgttgcaggcgggtgagcacgagatcaagctcaaggcgacgtcggagatgggcaaggatgtcgagggcaagctggtgctcaaggtggcggagaacaagctgccgacgtgcacggtgcgcagccgggagacgataggctcgtggattgtgtacgcagggtgtgaagacccggatggtcggatgaagtcgtatcagtggacggtgggaggtgaggtacaggcgatcaccgcggaccgtctgacgatcagcaagggcaaggacggcgtgatgccgaccattgcactggtcggtgtggatgactccggtggtcggtcggaagtggtctccctgaactga

SEQ ID NO: 161582 - DNA, 474 bp, Enterobacter cloacae; identical to SEQ ID NO: 125585

SEQ ID NO: 161583 - DNA, 222 bp, Enterobacter cloacae
atgataagtttatcaccaccgactatttgcaacagtgccttttattttattatcccggccctcgccttctgtattgatgccggctggtatgtgattgtcgcttttgttctgtcgtcggaagcgccaagaaaaacctatctgaaattcaaaaccttcttcgacaccactgcgggctccgtgatggcgttactgggtttgaaactgatcttcagcaacagatag

SEQ ID NO: 161584 - DNA, 420 bp, Enterobacter cloacae
atgaagtcttattatgggaaatgtgcctgtggcaatgcggaatattctattacgctgccacaggatttgagttgttatacaccgcgagcctgtgactgtgatttctgtacaagccggaaggtggaatatttgtccgattcggccggaaggatcgaaatcaggagtgtgctgcccttgcagcgtctaaaacagggctcgaatcaggcgacgtttctgagttgccccacatgcgcaacgatactgggtgttgcctatatcaccgataaggtcagtgtcggggcggtcaatgcgacctgcctggtcgataaagcagcattgcaaccagcgatatccgcctcgccaaaacagctgacggcagaggaaaaagtagcgagatggctgatgttgtggagctcgttaaaaatcacagaacatggctga

SEQ ID NO: 161585 - DNA, 1395 bp, Enterobacter cloacae
atggcagatgaaattgcccgtggcttatggttacccgggacacgatttccttccatacgggcgagcgcttcccgttttcatgttggtatcaataccgttaaaagtgcataccggttacttgaagatcgggggctgattattgcccggcctcaatccggctatttcgtttgtgaacaggcgcctgtactgagtgattcggggttttcatcagtggcaggtgaaaaaatctctctcagtggcgtcagccgattgctttcaatcatcttgtcacatcaacaacagggcgattgtattgatttggctttggcctgtccttccggggaaaaatattatcctgccgataaactcagaaaactgacggctgcagttctgcgttcagaatcacaactgatgacaacttatgttttacctcccggttctgagcgattacgccaacaaattgcccggcggggataccggttgggaatggcgttaaaagcagaagatattctgctgacacacggtacgacggaagcgctcagtctggcaatccgggctgtcaccaaacctggcgacatcatcgcggtggaaacacccaccttttacaatttgtatccggcaatccgggatctcgggcgtgaaattctggaaattgaaacgtcgactcatacaggcctgtgtctggacacactgcagcagtatcttgaacagaaaaaggtttcagccgtgatcacgataccgacgggacataatccgctaggttttacgatgccggtagaaaatcggaagcggctggctgcaatggcggcatatcactcagtcccggtcatcgaagatgcgatgtatgccgagcttcaatatacatctggaatggttccaaatataaaggcgtttgatttcgatggctgggtgcttgcttgtgccagctatacgaaaacaatcgcgccagactaccgggtcggctggctggaagcgggaagattccgggatatcgccatgcaactcaaatttacgtccagtgtgggggagtccgtcttattgacggaatcactcggtaagttcttggagaatggcggatatgatcatcatctccgaaagatttgtcagttttatgcggctcaaattgatcgaatgagagccttgattatgaggtattttcccaagggaacattggttagtcgaccgcaggcggggtttgttttatggctggaactgccggcgtcggtcgatacgctggtgttgtttcatcaggcgttggaagaaaaaatcatctgcatgcccggcgttctctgttccgggggcaaacgatatcaaaactgtctgcgtatggctgtttgttttgatctcacgccagcggtcgtgcaggggattgcaagacttggctcgcttgcaactcagcagatccaatcattgtga

SEQ ID NO: 161586 - DNA, 876 bp, Enterobacter cloacae
atggccgtaccattcaaacaagttgatgtttttacaacaaccccatttaaaggtaatcctgttgcggtggtaatggatgcacgcggattatccacagaacaaatgcaagccatcgccagatggaccaatctgtcagaaacaacctttgttctgcctgccaccaatccggcggctgactatcaggttcgtatttttaccccaggcagcgaactgccttttgccggtcatccaacaatcgggacggcatatgcgctgattgaagctggagtgatcgcccccaagaatggttgtttgactcaggaatgtggagccggactggtcgccttaacggttgaaccaactgctgatggcaatctctcgatctcctttgagctgccggaaccggctattacgccgctgatcgaagcacaaacgcaggctctggaatccatcctcggttgcgctatagataaggatttcacaccggcattggtcgatgtgggtgcccgctggattgtggctcaggtaaaagacgcccagtctgtactttcagccatgccgaattatgaagccttacaggaacatgatagaaacctggggatcaccggtgtttgtatctatggccggtacactccggattctgatgcgcacattgaagtgcgttcatttgcgccggcttgtggtgtcaacgaagatcctgtctgtggcagtggtaacggcagcgttgccgcgtttatgcgtcatcactcaatttgcgtcacagaagagccgcttatccgttcttcacaggggaaaatactgggtagaaagggagaattaacgctgaagttagccggaggaaaaatctatgtgggtggttgtgccgtaacctgtatctccggcacactcaattattag

SEQ ID NO: 161587 - DNA, 846 bp, Enterobacter cloacae
atggctgaacaattatcaccttatggaaataatccggtatctatgtcaacggttagcagagtgagaatccctcatctccaacagatgaaagcatcgggaaagaaatgggcgatgctgaccgcttatgacatgtacacggccgctattttcgaggaagcggggatccccgtacttttaatcggagattctgcttcaaataacgtacttggtaatgactcatcgctccctattaccgtggatgagcttcttcctctggttcgggctgtatcaacatcaacacgtagaccattgattattgccgatttaccatttggttcttaccaggcatcaccggagcaatgttttcacactgcggttcgttttatgaaagaaggtggtgcgcatgcggtgaagcttgaaggtggcatcgggatggttcctcaggcagagatgctggcccggtcaggcattcctgtaatggcgcatatcggttttaccccacaggctgagcatcagctgggcggctacagagttcagggacgtggcgataatgcccggacgttgattgaggcggcaaaagcgtttgaagcagcaggtgcatttgcacttctgattgaaatggttccgggtgagattgcggctgaaatcacccgttcggtttccattccaaccgtgggtatcggcgccggtaatcaatgcgacgcgcaggttttagtctggcaggacatggtcggattacgcagcggcaagttacccagatttgtaaaacaatatgcggatatgcggactctgcttttaaatgcggcaaaggaatatgcgtctgaagtagaaactaacatctttccggggccagaacatacgttctag

SEQ ID NO: 161588 - DNA, 156 bp, Enterobacter cloacae
atgttttctgaaaaacaagattcaggccaagatggagagaatctagattctgatgggattagaaaaacactggaatcacttgatttgactgaagaacagcgacagttccttgattttttttgggaacaaggtgagaaaaacaaaaaagattattag

SEQ ID NO: 161589 - DNA, 387 bp, Enterobacter cloacae
atgataaaaaagacccgcagccctaatagccatagtggttttgtccctgaaaacacagcgggggaatggctgttggtcagtacagggtatactgtaattgatgcaagtcctgccttctgtaaacttatcagcagaactagcagtgaactgaaaggcctcagccttcaaggtctcatatcgcaagaaacttgggaagatattgcttcagagaaaggctctccgcgtgttgatgccttgttgtgtgatttttccttcagtcgtagtgatgataaacaattcttaaaatcagccctggtgctccctgttattgaggatatccatggtgcagcgttaatgattcttttcatccctgtaaaagtgaacacggcatatcaaaaaaactcatag

SEQ ID NO: 161590 - DNA, 1599 bp, Enterobacter cloacae
gtgactgatgagaagggcgtaattatcactgtgaatgataaattttgcgctatttcacagtattcccgcgaggagctgataggtaaaacacaccatattattaattccggactccatctcagcagtttttttagcaatatgtggaaaataatcagtcaaggcattgtctggaccggggaaatatgtaatcgggcaaaggatggttcactctactgggttcataccactatcgtgccgctcctgaattcagaaaacgaagtcgttaaatatattgcaattagaaccgatattacagccaggaaaagagccgaggagaaagtatatgaaatggcttattatgatgaactaaccggattacctaatcggcgttttattatagaaacccttaatgctgtaacctccagcgatagccctgatagatattatcaggcactgatgattctggatttagataatttcaaagaggtaaatgatacatccggacacaattacggtgatgagttattgcgcctggtatctgagcgactgaaggccttctcaggcagaaatacaattgttggaagatttggcggagatgagtttgtaattatttctaattttatatgttcagatttggattcagttgtgaagatgtctttttctcttgctgaaaaaattaagaaggagattaatttcaatctgaaaaatgatacacaggtattacataatacagccagtatcggtgctgtgatttttaacggaataaacttcgaccaaagcagagtacttaaacaggctgatattgcactatataaagcaaagaatcttgggcgaaatcaggtctgttttttcaggccggaattccagacagaactgaatcataaaatacagaagacaactgatttacgtgatgccctggccaggaggcagttcgaactctactaccagcctgtcgtggacatttcacagaatcttatcggttatgaggcactgcttcgatggaatcatcctgaatacggtatcttacttcctgattactttataccggaactggagagtaccggccttatcgtcgagacaggtcgctgggttctggatacggcctgtagtagactttccttgcttgaaaaaaaatatgcttcacgggagatgaaaatatccgttaatattagtgaaaaacaactgcattcagctggctttgttaacagcgttcttaacgcagtcagaagtaacaatatcctgcctatgcagttacggctagaactgactgaaagtatgttgcaaaaaaatgtggaagaaacaattcatattatgaaaatgttgcagaacgaaggaattgcatttggtttggatgattttggtaccggatattcttcccttaatattctataccgtctcccggtcgagtttttgaaaatagacaagacattcgtcagtgaaatactccagaatgaatcttcatataaaatagtcaaattgataacaggacttgcatcggttttatcgataaaggttgtggctgaaggggtggagaaccaggagcagatggctatgctcagcaagatgaaatgtgattactttcaaggctatctcttcggtaaaccctcgtctttggattaa

SEQ ID NO: 161591 - DNA, 723 bp, Enterobacter cloacae
gtgacggcccgccccatcggtttttcgggcaagctggacgaggcggtctacgagtggaccctgccggaaggggcggtcattgaagatcagaaacaaccggcagtgcgggcgctgacgataggcagcgcgggtgaatacctggtgaagctcaaggtacgggatgcccgaggcaacgagacagagctggaggagccggtgaagctgggcgaggccgaacagtacgtgatcgaccttcaatattccggttctaatgccaacgaccgggagccactggatgtgttgttgcggccgtacatttcaggtggtcacccaagagaccggatcctgacccgccagtatttggtggatggcaagccactggagagtgcggggttctatggtcgcacgacgttgcaggcgggtgagcacgagatcaagctcaaggcgacgtcggagatgggcaaggatgtcgagggcaagctggtgctcaaggtggcggagaacaagctgccgacgtgcacggtgcgcagccgggagacgataggctcgtggattgtgtacgcagggtgtgaagacccggatggtcggatgaagtcgtatcagtggacggtgggtggggaagtgcaagccatcacggcagacagactgacgatcagcaagggtaaggatggcgtgatgccgagtatcgcgctggtcggtgtagatgattccggtggtaagtcggagtctgtttccctgaactaa

SEQ ID NO: 161592 - DNA, 690 bp, Enterobacter cloacae
atgtgtggacgctttgcacaagcccaaacccgtgaagaatacctggcctaccttgccgacgaaggcgatcgcgacatcgcgtatgacccggcccccattggccggtacaacgtcgcgcccggtaccaaagtcctgctgctgagcgaacgcgacgaactactgcacctcgatccggtgttctggggctacgcacctggatggtgggacaaagcaccactgattaacgcacgtgtagaaaccgcggccaccagcagaatgtttaaacctctgtggcaacatggccgggcgatctgttttgccgatggatggttcgaatggaagaagtcaggtgacaagaaacaaccctacttcatccaccgggccgacggtcagccaatctttatggcggcgatcggaagcacaccgtttgagcgcggcgatgaagccgagggatttctgattgtgacgtctgcggctgataaaggcctcgtcgacattcatgaccgcaggccattagttttgtcaccagaagcggcacgcgagtggatgcgacagcatgttggcgggaaagaagctgaagagatagcttcagatggtgcagtgcccaccgataagttcgtctggcatgcggtaacgcgtacagtaggaaatgtaaaaaaccaggggaggaatttgatagagcaaatagaaatcaaatctgatcttagttag

SEQ ID NO: 161593 - DNA, 546 bp, Enterobacter cloacae
atgacatatccaactgtgatcgtgaatggtgtctctgtccgagtggacgagaaggggcgctatagcctgaatgatcttcatgccgccgctgtcctgaaaggtgaggctactgagtcacaaaagccgggcaagtttattcgtagtgcatcagtaaagcgtttcgttcaggcgctggcaggcaaaggacaaaaatgtcctttggaagataaccaggcacttagagtaattcgcggtggtgacgagcccggcgtatgggctgcagagctactcgctattagatatgccgcctggattaagccggagtttgaaatccgcgtttatgaaaccttccgcgaggctgtgctcaacggtcttagtaatatgaaccgactcaaccgacttgacctgctgatcgccaatgagaccaaagaggtcagcgcatgtgcccgggcaatgaataagtggggcgtcggtggtcgcaagaagcttctcaattgcgctcgtgagcggatcgtcagccagatggatcctgacatggtcacgctgatggaagcaaaggtcgggtag

SEQ ID NO: 161594 - DNA, 222 bp, Enterobacter cloacae
atggaacttatcgaccacgatacgggcctggggcagcacagccttgaccgctgcccggtaggggttccacatgtccatgctgacgatctcgaccttctgccggtctttcagcttcatcaggtagttggtcaccacgtcctggcggcgggtggccagcaggtcgagcagggttcgctcctcaatgttggtcagaatgcagcggtagcgcttgttcaggtatag

SEQ ID NO: 161595 - DNA, 1152 bp, Enterobacter cloacae
atgattataaaaaattggaccttaagtgtaattattgttttttttattttatcgatatttcctatacttcacattgatgattttgttttttatcaatggtatgtgtcagtttgtatagggtttgttatttttagaggtctaattaggcttagtatcggtttattaagaaagctaggttacaacagacgtagcgtagctattgtaggtacaatgcctgatgggattaaattatttaaaagctttcaagaacagacatggctcggttttgttgttaaaggtatttacgatgatgaagagttagataattttgatggaatcccatatgcaggggatttgaataaactagtcgaagatgcaaaacttggtaaaatagatcgcatatatatcgctctcggcattgagaatgaattaaaaataaagcatgttgttagagagttaaccgatacaacatgttcagtattgctaattccggatctttttactttcaatatattgcaatcacgcactgaagaaattaatggggttccggttgttcctttattcgatacgccattaaatggaataaacatggtatttaagagattagaggatattgttgtttctattcttattattactttgatttctcctattttattgattattgcatgtgctgtgaaaatatcttcacctggacctgttttttttcgtcaaattcgatacgggatggatgggaagccgattagagtctggaaatttcgttctatgaccgttatggaaaatgatagtaatgttaaacaggcaaccaaaaacgacatccgcgttacaaaagtagggaaattcctacgtagtatttcccttgatgaattgcctcaattcttcaatgtgctttttggccaaatgtccgtagtaggaccaaggcctcatgccgtatctcataatgagcagtatcgttctcttatccaagggtatatgttaagacataaggtaaagccaggtattacagggttggctcaaattaatggatggcgtggtgaaactgatacattagaaaaaatggaaaaacggattgagttcgatttactatatatccgtggttggagcatttggcttgatttgaaaattatatttctgactgtttttaaaggtttcattaataaatctgcgtattga

SEQ ID NO: 161596 - DNA, 306 bp, Enterobacter cloacae; identical to SEQ ID NO: 6030

SEQ ID NO: 161597 - DNA, 1206 bp, Enterobacter cloacae; identical to SEQ ID NO: 6029

SEQ ID NO: 161598 - DNA, 216 bp, Enterobacter cloacae
atgaaccactatgagaagggccgccacgtcccggatatcgatacgcttcgacgaatggctgatgaacttaatgtccctctgaactatttcttctgtgatgatcagaagacagctgagcttgcattgctcatttctaaaatgactgagtcggaacaaattagcttgattgaacggctaaaagaatcattaaaggttaatgatgatggtcaaagatag

SEQ ID NO: 161599 - DNA, 552 bp, Enterobacter cloacae
atgaataatcgagttattaacgctgaatcgtatatattttctgctatttattttgccgaaaaggactatttcactattaatgatttagcactcatacttattgaacaattatcactacagaaaaccttttttaaggcgaaagctttcgcttacaatcaaatacaaaaccttgttagaaaaggcttattgaacaaagtaagaaaaaaaggaattaatcaatacttgtattctaaaacctctgattttcatactgccattgaggacatagatttaatcgatgtagggacaactcccctccaactccttataaaaaacaaaaataaagaaagcaatacaaatggtacgttggcagatcttattgataaatatagcagtgagcttgagaggatttcaggagcattggaaatttatcaagagttgatgatagtcatgcctaatatgaaaaaagaatttaagcaactctctatcgaacagcaaagaaagtatataaggacgaatgaaaaaataaatacattaatgaaaattgtcggaaaaccatacagaatgatctaa

SEQ ID NO: 161600 - DNA, 273 bp, Enterobacter cloacae
gtgcagccaggccagcttttgcccgccgggcagcgtcaggccggtcaggttgctcagggcatcccattcgtagcccaccgcgccgttaatgccggactcgctcagcacgcgcccggcggcgtcgtggcggtaagcgatctcatcgctttcgatacccagggcaacgccttcggccgtcggcgtgcggcggatgcgggtaatctggccgctcaggtcgcggaaatggcggtttgcatgaaacaatcatgctactgccataccctgataaattaa

SEQ ID NO: 161601 - DNA, 255 bp, Enterobacter cloacae
atgaacaagaaaaaactcttcgaaaatgcagcgcctcaggcgcacgacctccatgatgccaaccgcatcatccaggagctatggaacaagctacgcgagtacgaggaccgtctggctctctcttctcgtaactcgtccaaatcaccatcctccgactcgcccgcggctaaggcggagcgaaaaaagttgcgacgcctcgtggccgaaatcaggttggcgctcaacctggacacccggggcatcgacgagaactaa

SEQ ID NO: 161602 - DNA, 1101 bp, Enterobacter cloacae
gtggccaatgccgcgccatccttccgtcaccaggtgtttgaactgcccaagttgccgctggaaatcaccgaataccaggtattccacggccactgtcagcactgcgatgcgctcagcaaaggcgaactgcccaattcggcacccaacggccaaatgggaccgcggttgcttagccatatcgccgtgctagcagggaaatatcatctgagtgtgcgcaaaattcagagtttgctgcacgatcagtacggcatgaccttttcggtgggcgccatctcggaagcccaggggcgtatcagctcgatgctgacccccatccatcaagcgctgaagcaacatattcagaaggcgccgatcatccatgccgatgagaccacgcatcagcgcaatggcgagtcgaatacccggtggttgtggttgatggccagcaacgatgcggtgttccagaacattcgttacttccgcagtcaggacaatgccaagcatctgctgggttcggcaccccacggcgttgtggttaccgaccagtgcgccagttaccactggctggatccgacacggcatcaattctgcctggcgcatgtccagcgcaacctgcaagagatggcggattatggcggcggcggtcagacagcctacctaggacatcggctggtcgtgctgttgaagacggtctttcgcacccagcaccgttacgagtcggggctgatcggtgaacagatcagactcagacggatggagcgattacggcgcagtatcaagacggtactgtgcaagggtgccgaggttcccgtgcgacgttatgccggtcgctgccagcatattctcaagtatgaaaccgggctgtgggtattcttgcagcatccagggacaccgctgaccaacaacgaggcggagcggtgtattcgcggcagtgtgatcctgcggaagatctgtttcggcacgagttcagaccggggagacaagttccgctcgcgggtgctgtcggtgattgagacgagcaagaagcgccagctgtcggcactcgaagtgctgtgccggatcgtcacagcggtcatgacaggccagccctatcctgacgtattcaacctgacctcggcttag

SEQ ID NO: 161603 - DNA, 948 bp, Enterobacter cloacae; identical to SEQ ID NO: 34943

SEQ ID NO: 161604 - DNA, 411 bp, Enterobacter cloacae
atggccgtcaatcagaccaaaatctccgatgacttgaaagcgctggtcagcgcacctgaccaatccgaatttatctttgcctttatggccgcctatggactgcccaaggccacgatcacgcatatcaggcaaggggggagtcgcaaccttgccaaagaatcgggccacgttggcatcaactcaaagttctactttcagccggtggatgaaggcgccgatatcgagctcctttttgaacagcggattgcagaatgtgccagcaccaagcacaaataccgcttcgtcatcctcaccgattttgttcgcttcctcgcgtgggacgttctgactgaggagagactcgatactgagctcggcgaactgttccgcgaatatggtttcttcggcactgttgcaaatagtcggtggtga

SEQ ID NO: 161605 - DNA, 318 bp, Enterobacter cloacae
atggctaaacgtatgcaagataaagaaagcattgccggagtgtcatggctgattgtccttgctctgtcatgctggggcggcctggtccgataccttattgacgttaagcagaacaaagctacctggagctggatcaacgcgctggcgcaaattgcagtgtccggctttaccggcctgattggtggactgatcagcgttgaaagcggactgagtctttacatgattctggttacgtctggcattagcggagcgatgggctccgtagcgcttacgtacttctgggaacgcctgacggggatgaagaatgcaaaccagtga

SEQ ID NO: 161606 - DNA, 273 bp, Enterobacter cloacae
atggcaagcgttaacgttcattgtccccgttgtcagtctgctaaggtgtcccgacatggacagaattccgcaggccatgacagatttcgctgccgtgactgccatagtgtctttcagctcccttacacttatgaaacccgtaacccgggcattaaagaacagataaccgaaatggccttcaacggcgccggggtccgggataccgccaggcccctggaaatcggcattattaccgtcatgcggactttaaaaaactctcgccacgacgaataa

SEQ ID NO: 161607 - DNA, 534 bp, Enterobacter cloacae
atgagtgatgcgcgcctgttacctgcaggctcatcgcctcttgaggtggctgctgcccgagcctgcgcagatattgaaaacacacccattccgttacgccgcctgtggagccctgacacctgtcctgcaaaccttttgccgtggctggcgtgggcgttttccgttgaccggtgggatgagaactggccggaagaaaccaagcgtgacgttattcgcagtgcgtattacatccactgcaacaaagggacaataggcgcagtccggcgtgtggttgagccgctcggttacgtcattaacgttactgagtggtgggagaatgacgacccggcgggcacttttcgtcttgatatcggtgtactggaaagcggcatcaccgaagaaatgtatttagaaatggaacggttaattgcggatgcaaaacctgccagccgacacctgattggtctgaatattatccaggacatagcgggctatatgtacaccggcggtgtggcatatgacggcgacattattacggtttacccggaagagtga

SEQ ID NO: 161608 - DNA, 909 bp, Enterobacter cloacae
atggcaaccgttgacctgagtcagttacccgttcccgatgtggttgaggaactggactatgaaactatccttgcggaacgcattgcgacgctgatttcgctctatcccgaagaccagcaggaggccattgcccggacgctcacacttgagtcagagccgattgttaagctgctgcaggaaaacgcctaccgtgaagttatctggcgtcagcgcgtcaatgaatcagcacgcgcagtcatgctggcttatgccatagacagtgacctcgataatatcggggcgaatttcaatgttgagcgtcttgtcgttacgcctgctgatgacaccaccattccacccaccccggcggaaatggagctcgacgccgattatcgcctgcgcatacagcagtcatttgaaggaatgagcgtggcgggctctacgggtgcctatgaatttcatggccgtagtgctgacgggcgtgtcgctgatatttctgttatcagcccttcccccgcgtgcgtcacgatatctgtgctctcgcgtgagaataacggcgcggcgtctgatgaactactgagcattgtgcgcaatgcacttaatggtgaggacgtgaggccggttgctgaccgtgtaacggtgcagtcagctcagattgttgattaccagatacgcgcaacgcttttcatttatccgggaccggaaagtgagccggttcgcgcagcggctgaggcgaagctcaaagcctatgccagcgctcaacaccggttagggcgggatattcgcctgtctgccatctatgccgcgttacatgttgagggggtgcagcgtgtcgagctggcagcaccagtggctgacattgtgcttgataaaacgcaggcctccttttgcacagactatcagatagtgattggtggctccgatgagtga

SEQ ID NO: 161609 - DNA, 222 bp, Enterobacter cloacae
atggcagacacaattgatttagcccaacagcgtgagcaggaagaccgcgagcgctacatcaacaaagcgcgcagccgtatctctgcgccttcccgttttttctgcgaaaaatgtgacgcaccaaccccagaagctagccgcattgcggttccgggcgtggatttgtgcgtgacctgtcagcaaatcgacgagctcaaatctaagcattatcggggggtatga

SEQ ID NO: 161610 - DNA, 228 bp, Enterobacter cloacae
atgcgtaataccgaatctcgtagtttaaaggctgatgccgaagcgctggccgtattgctgacagatgccaaaaaagaggaacgcaaagaccgcgccctcgcagtttcaatccgtcttgaagcactggccgtgcatatcacgaataagcgaatgacctgttttgaagtggctgaactgttgcgttccgaggctacccgctacgaaaacgaatcacaggaactgcactaa

SEQ ID NO: 161611 - DNA, 201 bp, Enterobacter cloacae
atgtcacgcgatgaattaagaattgttttaggtgccatgattccaaatatggaggaaggttttgaaattaaaacccgcgacggcgcaatacttcgcgttgaccctgagtgggagtgctgcaaagaatttaaggatggattaaaagccgaaatcatcaagcagttaaaaagcaaacctgctgttgtatttggatacagttaa

SEQ ID NO: 161612 - DNA, 228 bp, Enterobacter cloacae
atgctgaaaaatgaaccctcattcgcatctctgctcgttaagcaaagtccgggtatgcattacggtcacggctggatcgcgggtaaagatggtaagcgctggcacccgtgccactctcagtccgaattattaaaagggctgaaaacaaagcagccgaaatcgtcaggctttttaattattcgtattgttcactttattattaaagggattaaacatgtcacgcgatga

SEQ ID NO: 161613 - DNA, 510 bp, Enterobacter cloacae
atgttagattttcgcgtttcgtcacatacacacttcgatgacgcttgcagaaaattcgcagcctctcacaacgtaaaagagctggctgtaaaggcaggtatcaagccgcatacgctttacaacaagctcaacccagaacagccgcaccagctaactccccgcgaaatatggacgctgacagacctgaccgaagattcaaccctcgtcgatgggtttctggctcagattcattgtctgccatgtgtgccagttaacgagttggcgaaagaaaatttgcaggcttacgtaatgcgcgcaatgagttccctcggtgagttggctaatggcgcaacatcttcagaccgcctgacgacagcaaaaagacatacgatggtcgagagtgtgaattctggtatccgtatgctgtcactgtcagcgatggcgttgcatgctcgccttcaggctaatccggctatgtcgagtgtggtcgataccatgaccggcattggcgcaacatttggtttagtgtga

SEQ ID NO: 161614 - DNA, 588 bp, Enterobacter cloacae
atggaaattgattcagaaatcagtaacgaacacgtcttagataggatttgcgaaatctacggattttctcaaaaaatccagcttgcgcggcacttcaatatcgcagctagttccctgcaaaaccgctacacacgaggagctatctcctatgacttcatagtccattgttctctggaaacaggtgcaaacgtagagtggttgcttacaggtaaaggggaaaagctatccggtagtaacatcaaggcatctgttgaatctgaagagttaacagttaaatcattcacattaagtgaaggtcggttgattaacggtacagatttgaggatatctaaatctttctttaatcgaacccttaacaacccacaatgcatattttcagacaatgcggctcactttattgagactgataccttgctgtcagatggttcgtggcttgtagatattgagggagcaaaaagcattcgtgagttaacgattttaccaggcagaaaactacacgttgccggagggaaagtgccttttgaatgcttagttgatgacatacaaacattagggcgcgtggtgggtatatatagtgaggtgagttga

SEQ ID NO: 161615 - DNA, 711 bp, Enterobacter cloacae
atgaaaaaaattaatgccctcaacgggcagggattcgctcaccctgaagccagccagagcgatattttaattaatcacaaatcggagccgcgtatagattcccgccttatttcagagcgagccggaatacaacatgaaagcctaagcgcgacgattaaatcgcaccagagcagattgcgcgagctgggatcactgcctcgtcagtcactcaaggaattaaccgatttgaaatcgggaaaatccggccgaaagcgtgggcgtcctgagattagttatctgctgaatgagccgcagctcgactatctgctgcgtatcacccgagggcgtgatcctgaacgtattaaccagttcaagctggatgttacgaaggcattcactaagcgccgcgccgcagaacctatccgccgtgagtacctgcctggctaccacgaaagccgcgacggattaaaagccctgggcgcacaacggcaccattacatcaatctggcccgcgctgaaaaccgcgtggctggtttgtctgatggtgagcgcggtaccgcagacgaacagcaattggggctgttggtggtgatgcagaaaatcgaacaggcggcctttaatgaggcggtgcgtaatggcatgagtccaggcgatgcggtgcgtgaagttgcccgccgtatggatgcgttcgccagcctgatcacttcatcgccagtgttggagattcgctga

SEQ ID NO: 161616 - DNA, 339 bp, Enterobacter cloacae
atggaacctggacgattcaggcacagggttaaaatcctgaactttacaacctcccgggattcatctggtcagccagtggagtcatggagtggtggcgatccggttccggcagaggtgaaagggatcagcggcagagagcaaatgtcaggtggcgcggagatggcacaggcaacgattcgcatctggatgcggttcaggcctgaggtacatgcttcctcccgcgtagaggtgctcagcggcccatacaaaggccaattgctgaatattatcggtccacctgtcgccaacccgaacggtactcgcctggaaattctgtgtaaaacaggagctgaaaagtga

SEQ ID NO: 161617 - DNA, 279 bp, Enterobacter cloacae; identical to SEQ ID NO: 161396

SEQ ID NO: 161618 - DNA, 489 bp, Enterobacter cloacae
atgtttttcaaaattgttagaaactttaaagccaagattggaccgttcttattaaccctgtttttggctccaggttatgttcatgccaatacgtgggaaataaatgtcacaagaaaagatagtaatttatatcaaattactgggaaggattcttttgttaatactaaatattgtgacgcatatctcagggttgatggctatgataaaaaaataatttttacagatagcaaggattcatgtgatgtagataatgtatttagcatggttaatattgactcaggaaagtatgaggtagaggtttctaaaaaagaagataactggtatgaggtttatggtacagataatatgataaaaacatcaatgtgccttagtctggctctcaatgaaaaggctattttatccatggatggttatagtgcaggagagttgatttttgatgacggagatagctgtaatgtagaaggggtctactctcctgttcgtttgtga

SEQ ID NO: 161619 - DNA, 1872 bp, Enterobacter cloacae
atgaaaatagaagccgatgtaaaaaatatatcaaaattaagcgattattattttttagttcccgattatcaacgtgagtatgtatggaaggttgatgatcaggttgaacagtttatcatggatttagacaatgaataccaaccagagcagaaagatcaaaatggttattttctcggttctgttattatcgtaaagaatggggaaaagcatgatgttattgacggacagcagcggttgaccactattgtcatcactatgtgtgccttacgggatctattaaaagatagattggatacacttgacaaaaaagggctggaatatctgaaaactattgaggaatggctctctagttatgatattaatagtgaggaaaatctaattagactagatcttcaatatgaagaaagtcgaggatttatttcgcggttaattgaagggcaaaccaatacctttgcggaaacagcttcagtaaaaaaaatggctgacgcgtatgatcacattcgtgattatcttaaataccaattgcaagatagcttgaatggattaatctccttcgctcgcttttttttaacaaaagttgagctggttgtcattgaatcagagaacttaagtagcgcattaaagatcttcgaaacgatcaatcagcgtggtgccagccttaatgctatggatcttgttaaaaatttgattttcagtcagataaaagaagaacagttttcggcaataaagacaacatggaaatccatcactaataaccttgagtcttgcggcgaaagtgataacccgcttcgttttttacgttactttctgatggcacgatatcatcacgggattttgcgtgaagatgatatatataaatggatcatttcagctgagggggaactgtcgttgcagtataagacacgccctatggtcctcgtcaaagaattggaaaaattatcagaacgatacgctaacctggtcaatgcaacaaatgaagcagcctactggcgtgaaaatatccgttttccaaacgtaagtaacattggatatattaataaatatcgctcacgtcagcatttggttttactaatggcattggacattagttgttctgatgatgtaatggatttcttaggtgctcaacttgagagctttttattctttacaaatacaatggctattcaatcgaagacatatgagcaacgctttactcaatgggctgtaaagcttcgggatgtgaaaacgaaagcagaggttgcaaatgttgtttcagcaacacttataccttttgttgtggagcgtttagatgaatttaaagaacgattctcaattattaatgactataattttacgcctcagtatcgccaacgttatgtattgggtagattagagaatcatatccgccatctttgcggttttccggaaaagagccagcaggctattcagcagatgcaaattgagcatattcttcctcagacggtacgaaacgcccctgaaaacggggagttctctgatgcaaatcgaacaagttatctctacaagattggtaatgtaacattattagagggtacaattaaccaatccgtcaataactgcaatgatttgagtgaagactggtttttgaaaaaacaaacagaatatttaaactctgaaatcatcatgactcgattactccactcccagtactcaattggtgataacactgcattaaatcgctttaagctgaaatatggatatgaatatcaagactggtccgcggaaaacatcacatcaaggcaacgcctgctgatggatcttgccattgactgctggcgatttaatgatcagagaatagatgcttatatagtaaataacctgggcactggacccggaaacgaatttacgctgtaa

SEQ ID NO: 161620 - DNA, 825 bp, Enterobacter cloacae
atggcaacagataaaagcaaagccaatggtttaaaggaaagtgtatgggaaaaaaatgatatcccgccgcttgaatactgctccctaaaccgggcgaccagattgttgggctgtgaaatagatgatctgtggcattggcaaaatataggagcgataaggtttgccatagacattggaactgatgtgccaatgaatggagcaatattcccgccagaaagcgatgaaaacacaatcaagctagagagcgtgatcgatatggtaaagctgattagtgatgctgtcgtttatcatggtttatacaagaagggtttcgaatttacacttactggcgatccagcaatttcaaatggtcagattaactttgaaggtctttgtggcggtgtctttaactttgaactcactatagacaggaataatcctgagcgttggggttccaaaaactttgtgaggatagaagaaaatgagtatgccgatctcttcatcagggttggagagttgagtgatttagacggtcaagaagataaattgttcattacccgtgcatacatcgaggagattcataatgccaaagaaaatggattctatttgagttcaaaaggctatgtcggacgtagatcgttgccaacggtacgcattacttcttaccagtcagagatgattgcctctttgttgaggattgtcggattctctgatgatgaaatacataacctgccagcagagcaaatcaacaccgaattggggcaaatggctgccgtgaaaggggttcgtatagcccagccagataaaaatacctgggccaagtggagagaaagatttacccggtga

SEQ ID NO: 161621 - DNA, 276 bp, Enterobacter cloacae; identical to SEQ ID NO: 86187

SEQ ID NO: 161622 - DNA, 171 bp, Enterobacter cloacae
atggcaacaccatcagtaaaaccagtcctgctcagtcgtaatcaaatcgataagcttaaagcgctacaggagcaggagcgaagaaaatccccactaggccttgccccatcaatccatgttatcgcgcgtcagattatggatcgcgccctgaatatgctgaaggaggcttaa

SEQ ID NO: 161623 - DNA, 396 bp, Enterobacter cloacae
atgatccagtgcgcaagactggcacttatcgacagcgatgttatggcaatgccgatggggtatcagacgctgattggtgaaaccggcggagggctttccggaggacaaaaacaacgcattctgctggcaagggcgttgtacaagaaaccgggattcctgttactggatgaagcgaccagccaccttgatgttgagagtgaaatccggataagccagaccttacgtcaactggggcttcctgttctgctgatagcccatcgcccggaaaccatagcctctgcagaccgggttttgtatctggcagacggctacttaacggagctgaatctccagcatacagtcaataatggcgagtctgtttgtgaatatactaatgacgtgatggcaaaaaattaa

SEQ ID NO: 161624 - DNA, 834 bp, Enterobacter cloacae
  misc_feature (31)..(40): n is a, c, g, or t
atgtatgcgcctcatataaacgattgggtgnnnnnnnnnngcgctgatatggcaaccctccttagccgaaatgcccaaaggagaagcaaagaatgcttatccgataagcgtatagctttagttggttgcggaaccattggtgggtatattgcagaattgttactccgaaacggtgccggttgtgggaaaggtttactgcatttatttgatgatgatatctaccgtcctagtaattttggtcgtcacattttaccttcacatgattttgggtggtccaaagcgctctcactcgcaacaaaacttcaagactctgtgcatttacagaccagagtagaaggattttataagcaattccccatcagtattgatgttatgaaaaaatatgacattattatcgatgcaacaggtcgacctcctgtttccaagcgtattgcggctatcgtaagacagattccctgtgagcaaagacctattattatccacgccttcaatgatggtaatggacgagcatccaaagttttaatcgatgatggccgaagctgctatggatgtatggttactaatccagcaaaataccataatggtatcgattcccgattttacaacctcgatatctcaagtgaaaaaaataaaagttgtggtagcacatacacatcttatgatgcggcggtgagtaatataacggcatctttggctcaacaggcagtcttgagtactcttgagcctgacctcaaatggacttacaacgagcatatgttagaaggtggacgttcactgaaacctcagtttttgccacatcagcctaactgtcctatctgcaatgaacataactga

SEQ ID NO: 161625 - DNA, 1281 bp, Enterobacter cloacae
atggctgctgaagttgccaggaaaatgctggagctgaaactagtagatctcatcctatgctttgcaccttcatctgtggtggttgcatccattgaaagtactttctcccatattcttcaaaggaactttaatggtggtcttggtgcagtaggtgctgcgtatacttatcatagcttgatgtatttcgataaaagcttctggaagtctttgcagatgcatcgggtattagttattttcgacgaaatccatcattgttctggcgattcgctggataatgctaatgtgtggggcggggaaatcctttctcaagttcagcaatgtgccagttactctttggcactaacagggactccatggcgaactgatagtactcctatagtgctctcaaattacactgatccggatggggagatctgttgtgactatgtatatggactacatgaggctattgtcgatggtgtttgtcgtaaacctaaaatcgccttgataaacagcaataatttagtttattcatcaaaggataatgttcagttttttggttccatcacagatttcctgagtgaaaccgttgcttcgtatcaatcaataatttggcatccagaagcaatgaagtatgtactagaagctggatgtaaaaaacttaacgaaatacgcaaagttaattctgatgcgggtggtttagttgttgcttcttcagtcgagcatgcatataagctactgaatattttggaaaaagagtttgaccaaacagcgataattgtgacgtaccacgatcgagatgctttggctaagattggatattatcggcaatcaactacagaatggattgttagcgttggtatgattagtgagggcacagatatccccaggctacaggtctgctgccatttgagttctgtcaaaacagaactttacttcagacaagtattgggcaggatattacgggtgaatcagagtgaaaatcaggaagcctggttatttacaatggctacaaatgaactgacattattctcaaacagattggccgaagatttacctgaagattataaagttatgcaacaacaatctgatgattggtcattccctacaattgattctcagtctatgcctccagagtttgtgcggaaaaatggtatatctaaaataaaagagattgatttagaaatggatattggtgaaataactacatcgtcacctacgatttcaagtcaaacaaaacaactaaaaatgggctcaatgcatcaacaagtgatagatgcatttttattttcaattatttaa

SEQ ID NO: 161626 - DNA, 765 bp, Enterobacter cloacae
atgagttcctgcctgctgaatgacttcaaaagtagctggctctctgtacacttccccatgacagacgacttagggcaaaggctgtggccggtcaccaggcgctttcaggccaccggcagtcatctgacactggcgctgaagggcccggtcgaggctgcactactgcttgataatacccccgaaactatccgtcaggcatattctgatggtaacccctacgagaacaatcaaatgaaccgggataccagccagacactggaacaggttgtccgggacaggcagagtattgaatctgcaaaacagaaagtacgtgaagcacaaaaggtcagcgtgctggcatatgaggcctatgtcagaagagcatcgcctcccgtacgaaactcccatggaagttattgtaacgacacggctggtacaatggccacgatgttcacttcccgggccaggagaaacgggctgatccccccggaagaaacgctggcttgtgctgacctgttaaactgctggagttgcaaacatcaggttctggtcgaatcagtaacggatttatggtgcgtgttaagcttccgtgaatatctggaagaatcacaataccttcacctggataaagcccattacacaaaaaactttggccagaccatcgtaaacattgatagcaggctgaaattactgaatcaaaaaacactacaacatgcccgtcgaaaacttgctgatgaaggacgacatcccctgtggtcagatgtgcaaagcacagatatgacataa

SEQ ID NO: 161627 - DNA, 1278 bp, Enterobacter cloacae
atgatttcacgctggcaatggattctgaagcaaacatttaagaaactctggttcagagctacgttattcgcaattgtcgcgataataacggctcttttatctattctttttaaatcaatgattcctgagtcggtttcagtgaaggttggtgcggaagcagttgataacattctgaacatactggcatcgagtatgctggcagtgaccacattttcgctgagtatcatggtcacagcctacggttcagccactactaatgttactcccagagcaacgcgtttagttgtggaagacgtaaccacacaaaatgtactggccaccttcattggttcctttctcttcagtctggtaggaattattgccctcaatatgggagcctacggagaaaggggaagagtcattttattcattgtcacactcgttgtcattgccctcatcctcatcacattgcttcgttggatacagcatttgacctctctggggagggtcggtgagacaacagcaaaagtagaacaggcggccatcgaaacatttattgcgagagccagaaatccctgtctcggcggatatccatggcttgagagctatgaacagccgaaaggaacggttgcagtttatccgaagaagattggctatgttgaatatattgatatggagaaactcagcaagctgctggccaatgatcctcgtcatgtataccttgtggcgcaaccaggcagtttcattcatccgtccatgccagctttgtacctgagtcagggccaggagtcatcaatctgcgccgatttacttgagacgatcattgtctcggatgtgcgttcatttgctcaggatccccgattttgtcttagcgtcatggccgaaatagcctgcagagccctttcacccgcagtgaacgatcctggaaccgcaatcgatgtcattggcagaggtgttcgtatactttctgcttacgcgcagaataagtctcatgaaattgaagtgacctatccttcagtacacgttgcgccacttcagaacaacgatctcctggaagactttttctcacctgtcgcacgcgatggtgccagtatgagagagattcagataagagtgctcaaagggctatctatgctgagtacgggttggcctgagatgtttgctgatgccgcgcacactctggcaattgaaacattagagcatgcaaatcgcgctgaccatatagactccgatagagaattcataaaatcaatttattttgatttgttttttgatgaaaacgctaataagcaatcatag

SEQ ID NO: 161628 - DNA, 1998 bp, Enterobacter cloacae
atgagtgaaaatgaaacaatcccaaagaagtctcacagccagattaacaaagctgtattctttacatctgctttgttaatttttcttcttgtcgcttttgccgctgcattcccggatgttgctgacaaaaatttcaaactacttcagcaacaaatcttcacgaatgcaagctggttctacatccttgctgtggccctgattttattgagtgtcacgtttctgggactctcacgctacggtgatatcaagctgggtccggaccatgcgcaacctgatttcagctatcactcctggtttgcgatgcttttttcggcagggatggggatcggcctgatgttctttggcgttgctgaaccggtgatgcattatctctcacctcccgttggcgccccagagactgttgcggcagcgaaggaagcaatgcggctgaccttcttccactggggtctgcatgcctgggcaatctatgccattgtagcgctgattctggcctttttcagttaccgccacggtctacctttaacgctgcgttctgcactctatcccattattggcgatcgcatatacggacctataggccatgcggttgatatttttgccgttataggtacggtctttggcgttgcaacatcgctgggttacggtgttttgcaggtgaatgccggtttgaaccacctattcggggtgcccattaatgaaacggtgcaggtcattctgatcgtggccatcacggggttagcgacgatttctgtggtgaccggcctagacaagggaatacgtatcctgtctgagctcaatttgggcctcgcgttgttgctcctggcgctggtcctgtgtctggggccaactgtgcttctgctgaagtcatttgtggaaaataccggcggttatctttcggaactggtgagtaaaacgttcaatctttacgcatatgaacctaagtcgagcaactggctggggggctggacattactgtactggggatggtggctttcatggtcgccatttgtggggatgtttatcgcacgggtctcacgcggccgaaccattcgcgaatttgtcaccggcgtgctgtttgttccggccggctttacgctcatgtggatgacggtgtttggtaacagcgcaatctatctcattatgaaccagggggcgaccgatctcgccaataccgtccaacaggatgtctcgctggccttgttcaatttcctggagcatttcccgttctcctccgtgctgtcatttattgcaatggctatggtcatcgtcttctttgtcacatctgctgactcgggggcaatggttgtagatactctggcatcaggtggggtggcaaacacacccgtctggcagcgaatcttctgggcatcgctcatgggagttgttgcaattgcgcttctccttgcgggagggctgagcgcgctgcaaacggtgacaatagcaagtgcattacccttctccgtgatcttgctgatatccatatacgggctgttaaaagccctgcgtcgagatttgactaagcgtgaaagcctgagcatggcgactattgctcctacggctgcacgtaacccaattccctggcagagaaggttacgcaatatcgcgtatctgccgaaacgatctcttgtgaaacgttttatggacgacattatccagcctgccatgacgctggttcaggaagaactgaacaagcaggggacgataagccacattagtgacgcagccgacgatcgtattcgtcttgaagtggatttgggcaacgagctgaattttatatatgaagtgaggcttcgcgggtatagctcacccaccttcgcgctcgccgcaatggataatgatgagcagcagactgaccaacatcgatattatcgcgctgaggtttatctcaaagaaggcggtcaaaattatgatgtgatgggctggaatcaggaacagttgattaatgacatactggaccagtacgaaaaacacctgcacttcctgcacctggttcgttga

SEQ ID NO: 161629 - DNA, 438 bp, Enterobacter cloacae
atgagcaattacattgagtttaaggcaaaaacggttagcgacagagcatatggagaggctaagtttctggcatttgccgcactgctgttattcgtgtctgattgggacctcaacattgctattggtaagttttccaagattgccagagtgaaggaggttgatgacatgctggctggtaatttcattggtcttaacccttacatccggtacgacgtggctaaagctgtgaagaaattgcaggataactggccgattgaataccaagagttggaacattgggatgtagaaaaatctatgcgtgaggcatatgaaaagtggtgttcgacagagccagaattcgctccacctcttttacccgacctgtatgttacccaacacgagaaagaagtcgcacgagacgaggaaatcaggcagtggattaagaacggagatgtttga

SEQ ID NO: 161630 - DNA, 693 bp, Enterobacter cloacae
atgattaacgaccgtattcgcgaagctcgtcgaaacgttagaatgactcaggacgcgcttgctaaacgcattgggctgaccaaagcgacgatttcccagtgggaatctggcacgacaacgccaaacggaaaaaatctaattaatctggctgaggcgttgaatgtatcccctgaatggctgctgacaggaaaaggatctgagtcaaaagaggtgacgtcaaacgctcgtgtagaaggtggtttttctgtatgggactccgctacgccactagaggacgatgaagtggaaatacctttctatcaggaagtcgagttgtctgccggaaatggtacttatgtagacctggatcgctcagggtgcaagctcaggtttgcccgctccaccttgcgcaaagctggtgttgacgtaaattgcgcagcatgtgttagcgttcatggtaacagcatggaccccgtactcccagacggtgcagtggttggtgtagatacatcaaagaccagtgtcaaggacggacagatgtatgccatcgatcaggatggtttacttcgcgtgaagctgctatatcgcctacctagtggtattcggattcgttcttttaaccgtgatgagtacgcagacgaggagtatttcaaccatgacgctaacaagattaagatcataggtcaggtattctggtactcagttctcctctaa

SEQ ID NO: 161631 - DNA, 171 bp, Enterobacter cloacae
atgaaaaagacaagagctatagaactggcgggcagcaaagctaaattagccagattgctgaaggtttccaaaggggctgtgtcccagtggggcgatgatatacccgagttgcgggctttgcagcttgagaaaatcttagcgaataaaactactgccagacaaaaggcgtaa

SEQ ID NO: 161632 - DNA, 222 bp, Enterobacter cloacae
atggcggccgctggcgcgaccatgactggtgaaaagcgcactatgactggcgcgataaccactggcgtccgcacgatgaacatcgcgatcgtcacgatcatcaccgtcatgacgatcatcgcccggggccggaccggaagcaccattaacacaaaccccgccagctggcggggttgtcttttattgctcgtgacgcttaaacaccagctcgttttttcctga

SEQ ID NO: 161633 - DNA, 270 bp, Enterobacter cloacae
gtgagcgaagcaaaaccacaagacggcagtaccgtgaaagggtatcgcaaattaagcgatgcagaaattgccgctatgaatcgcttgaaagaactgagccgcgaatttattcgtgagctgcgaaacatccagattgatttattaccgcaggatcctgctctttcagatcgcaccgctgcctaccgtagtgcttctttagcgactacaaaaatgcaggaagcatgcatgtggggttgtcgttctgtcgcacgacctgatgctgattgctaa

SEQ ID NO: 161634 - DNA, 615 bp, Enterobacter cloacae
atgaatacatttcacgaattaaatatcatgacgtcacgcggcgatattcacggcgccttttcgctcatccgcagctggagcgaaaacgtcgcccggaaaatcatgaaaaaagcgggctaccctgtgacgccgcacacggggcgcgagttctggacgtgggtgcaggagaccctgatccgggcggcccacgagcggcgctgcggctaccgggcgcgcgctgaacgccgggcaccggtgcgtcgctggcggcagcaggccgcggaagactatgatgcctatgcgcagatgatggcgtcagacgccgcgccgcaggctgaggctgccccggagggaaatatagcgccccccgatgctgctcctgaaaaatgcgtcgccgtccgcggccgcgcagaacgcctgatacacctttgccggcagcgcgagccagcgccggcacgcgccgttccggtactccagctccggcacgccggtggtcggatcgtagcccgcgctgcgaaacagctgagacgtcacttcatgcctgttcatggtgtggctcctgtcagggccatcgctcacgtggccgccgtccggaaaagcggggtgccgccgggcagcgccccgttcagggagtaa

SEQ ID NO: 161635 - DNA, 279 bp, Enterobacter cloacae; identical to SEQ ID NO: 161396

SEQ ID NO: 161636 - DNA, 501 bp, Enterobacter cloacae
atgatcacttttgagattcgtatggaaattaaagtcctgcacaagcggggaatgagtatccgggccattgccagggagctgggtatttcgcgcaatactgtccgcagccacctgaaagccaaatctgaaaagccgcagtattcaccacgcccggcaccatcatcactgctcgatgaataccgtgattacatctctaagcggatcagcgatgcgcatccctacaaaatcccggcgaccgttattgccagggaaatcatggagctgggctatcgtggagggcttactatcctgagagagttcatccgtaaacagaccctgccagcacaggcagaaccggtcgttcgcttcgaaaccgagcccggacggcagatgcaggttgactgggggaccatgcgaaacggcaagtcacccctgcatgtgttcgtcgctgttctgggggtcagtttggatatagagaattattgtacgataagcctgttttttgaacagacttacctatag

SEQ ID NO: 161637 - DNA, 261 bp, Enterobacter cloacae
atgaaaaggattcgactgtttataggtgttgtgattataggtgctctgtcggggtgcgcagcagtccagtataatgatggtgaaaaggtcagtattcagtccgatgcttggtacgggctggatagtttgcataacactgctgttaaggcgtgccagcaatatggcaaatcgaaagcagtttatctccatagcgctaatatgaacccgaacttaccgaaaggtagtggggtgcaaaatactatctggaaatgtgagccataa

SEQ ID NO: 161638 - DNA, 279 bp, Enterobacter cloacae; identical to SEQ ID NO: 161396

SEQ ID NO: 161639 - DNA, 873 bp, Enterobacter cloacae
atggtggaagtcatcgagccgttttatcccaaggcgggcaatggccgacggccctatccgctggagaccatgctgcgtattcactgcatgcagcattggtacaacctgagcgacggtgccatggaagatgccctgtacgaaatcgcctccatgcgcctgtttgcccgattatccctggatagcgccctgccggatcgcaccaccatcatgaatttccgccacctgctcgagcagcatcaactggcccgtcaattgttcaagaccatcaatcgctggctggccgaagcaggcgtcatgatgacccaaggcactttggtggatgccaccatcattgaggcacccagctctaccaagaacaaagagcagcaacgcgatccggagatgcatcagaccaagaaaggcaatcagtggcactttggcatgaaggcccacattggtgtcgatgccaagagtggcctgacccacagcctggtcaccaccgcggccaacgagcatgacctcaatcagctgggtaatctgcttcatggagaggagcaatttgtctcagccgatgccggctaccaaggagcgccacagcgcgaggagctggccgaggtggatgtggactggctgatcgccgagcgtcccggcagggtaaaaaccttgaagcagcatccgcgcaagaacaaaacggccatcaacatcgaatacatgaaagccagcatccgtgccagggtggagcacccgtttcgcatcatcaagcggcagttcggcttcgtgaaagccagatacagggggctgctgaaaaacgataaccaactggcgatgttattcaccctggccaacctgtttcgggtggaccaaatgatacgtcagtgggagagatctcagtaa

SEQ ID NO: 161640 - DNA, 483 bp, Enterobacter cloacae
atgtctgctgtgtctattgttattccgttgatggttgctgtttctggctataagtctgctttgaaggatgaagctaagcgactcgaaactaatagagctgagcaaggtcgcacatatacatattctctgcttgttctgtgtgctctgttcctgtcctttattcctcgctttatggggttcccagagcttgtaggtgctcttgttgaaagcgttgctacatatacagcgttatatgtggctgtgcgtgggtgtgctgtatatatgcaatataagcgcttgcctaaagacgcctcattattatttacgctgttctgtgctgcttatgctgctatggagtttattgccaggttttattcaatgactaggtcagtgactattcctgattgggttagttattcctgtcttgctatgatagtgcttgttccgttcttctgcatcggtgaaatgattagtgtgaagcgttctaagaaggtggctaaataa

SEQ ID NO: 161641 - DNA, 150 bp, Enterobacter cloacae
atgaaattcttattaattggccttactctgatgtggctgcttgtctgtggtggtattgctggttttggtggtgtggtattcggtctggctgtgggctttattctctatggcttaggtgttgtgattcgtaaatggtggtgcaagcaatga

SEQ ID NO: 161642 - DNA, 927 bp, Enterobacter cloacae
atgaatatttttagatttcttttattatttattctcactgccgggtctgggatgagctttgcagcatgcacgaataacgcaactactccaaccatcaatattaattttgggagtgtaattgcacaaagagatgcacttcccggcacaaccgttatatcaaagacgggttactatagtatgaactttacgtgcactgatactaataatacttatcaggagacaatgtatttcaatgcattgggtaactacctttatgatataggtatcagtggctatggtttgcgactttcacaaaacgatggggccttaaatttccttcattatttccctactggtgcaagccttatgggaacgcaaaatggcacatatcgttataaagcggagattgtcagaacaagcggtgctcaaggttcaggtaattttctgactggcaaacttgctgacgcatctattgtaaatcaattttatatagccagctggtatgttacaggaggtagcattaccacgactgcttgcagcctaaatacagggtcgttgagtttccctatggggaatattcctactacgagttttggctccactgtaggtacaacgtcaagtagcgcacaagttactcaaaacctggggttaacatgcaatccgggtgcgaatataaatgtttcactaagcgggcagcaaaatcctgatgtatcaaacacaagtgttttagcactgtcaaaccaagggttgcctggagttgcacagggtattggagtacaggttttatatggcggagtacctcttaaccttaatggaaacgtgttactcaagcaatctactggcggcgctgaatcgctaccgattgttgttcgttattatcaaacgaagccgaacattgctcccggttcagccaacgcaacagcgacattgaatattacgtatcaataa

SEQ ID NO: 161643 - DNA, 510 bp, Enterobacter cloacae
atgaaatttatgtatttagtcctggcttcgtacattatgatgccgttgttatcctattccgcagatacggtaacgattaacgtaaccggtaatatagtagcgtcgccctgtatcgtaaatggtggatcgaacagccttaatgttgatttagggaatatacaagcaacagcactctcgacgccgggggctgcatcaacgccagtgacatttacactgtcagtgacaaactgtccgaatggtaccagtactgtcagagcagattttgatggttctgcatcccatgatgcgcctaatctctatgagaatatgggcacggcaggaaatgtgtatattgctttgtatgatggcgtaacaggtgattctttagggccaggatgtactttgtttaaatctgttcaaagcgaccgtacagcgtcgattcccctcaaggttaatgcgtattcgattgatggtactacaacgccaggttcaattaatacggctatcgttctcacgatgagctatcagtga

SEQ ID NO: 161644 - DNA, 156 bp, Enterobacter cloacae
atgtatattctgcacatagcgttttttcggcgagatccaatgaaaaagctgtttgtgcagtttagtgtgcagaaatctgcaatttactggaaaggctatagcttctctaccgttcgcaaagctattcacggctcgtcattttctggtaatcattag

SEQ ID NO: 161645 - DNA, 900 bp, Enterobacter cloacae
gtgcgtggtgctgttgccggacccggtgcacccgtggccggactgctggtggggatgatgcccggcaggctgaacgacggcgaacaggattttatcgaccgtatgcgcctggagcagatgcatgaagccccgagccgggtgcgctatacgtgggagaaggacagcagagggaacccggttccgcatggctggcacacaccacctggccgggacagtgtgcgtgtcagaaaaatggagtacgacaccagcgcgcaggcgtacaccttcaccacggaagaagatccgcacatcaccattatctggacgcctgaccgaacggtcgaggaaaagccgtggaataccggcaaccaggcgcgtccggtgttgccgaaaccggtgatagttgacccgctgccggataacaccggcataacggcgaccaccagcccggcaccggaggaaaagcatttcgcggattacattctgatcctgccgttccctgacctgccgccgatttatatttatctgaggcacaatcccggacaggtcacgggcaaagggaaaaaagtaagtggcgtatggctgtcagatgctgataagggggatggttctccaattccagagcagatagctgacagactgcgtggaaggtcatttaccaattttgaccgcttcagaggggctttctggcaggaggtggcacgggatcctgaattatcaggacaatttaaacggggaaacgcaggtaatataagagcaggaaaagccccttcaccgcgagaaagtgaacaggttggcggaaaaataaaatatgagattcatcacattaagccgatcgatgaaggtggtgaagtttacaatgtggacaatatggggattgttactccaaaacgtcatatagatattcatagaggtatgtga

SEQ ID NO: 161646 - DNA, 252 bp, Enterobacter cloacae
ttgaaaactattagcgactacacggaaagtgagtttttagatttcgtcagaaagatatttgatgtatctactacttctgaatctgaagatataaaaaatatcttggaatttaaaaggcttacagaacatcctgacggctccgatcttatcttctacccccgaggagaccgagatgatagtccggaaggaattgtgcaagaggtcaagcagtggcgtaaagccaatggtaaacctggctttaaagaatcttga

SEQ ID NO: 161647 - DNA, 228 bp, Enterobacter cloacae
atgaaggtgatactactggcactgctatggtgtacggcagtgtttctatcgttactcacactatataaagttattccaccggaagcgcagtacactattgcggagcattttaaaatatatggcgacgaattgatcatggatttcgttctgtacctttttttaggtgtttccgcattcagtgcgtcagttctcacactagccctgtatgttcttatacggaaaaaataa

SEQ ID NO: 161648 - DNA, 1866 bp, Enterobacter cloacae
atgcttgatctgaatgttagcaccctaaaaaatacagtcaccttcgttgtggacaagcaaagtattgcagaggctaaggccgcagcggataaccttcaaaagcacttccagaaaatagccgatcccaagattcgcttccagactcagaagcagcgcagagctaaagcgcgtgaacaagtagcagatgctaaggtggctccctctaagagcgccagtgatttaaaacaacagcgtcaggctgagaaagcggcaaaagttcaggctcgtgaggctgacaagctacgccgtcgcaatgaaaccgccgatctaaagtttcgtagcgctaatctccagatgaaaggtgtagctggtaaatacggtattgatccactaaaacaactggaatttgcacgctttgctaaggaacagacagagcttttccgtaacggccagatcagtagccagaagatgaactatgagctacgcgaacgcattgctcttatgcgtcgtgaggcagcgttacaggcaaaagtaactgcgtccactcaggcacaggcggcagcactcagaaatgctaagaaaaccgactatacaggggctgcaaagggtattaaagaaaaagggctgaatgttatcggtggcggtgctggctttgttggtgctactgctgcattagctggcggggcaggagtcttgtctcgtatcaagcagcaaggagatgaaaatcttgagcttgtccgtatgtcggaacgtaccaaactgaatcctaactctgttaaagcgatagtctcttgggggcagcaacacggtgttcagagcgccagcgttgacaagatcacggacggcttcgggaaagatacccgcgaaaaaatcagtgaaaccctgatgaacagccaattcgataagaagtctggtggctataagggcggtaacgccaacattgaagaaatccttaacaagtttggttggaacaagtcgcagctttcacagtacgaagacaacccgctcgattttctccaggcaactgttaatgagggacagcggcgcggatattcagatggagagcttgctcacttgctggaaaacattttcgatgatggggcgcactatgtagacctgttcaagaataacggtgagcagtttatatcaacactgagaaaacttgtcgattccggtcaaactcttaacgatgagcagatcaagcaaactcttgcatatggtgatctgagtgtagcgatgggtaatctcatgaatggcgttgataacaacatgtttacaggctttatgaaaggcttcgctgatagtggtgatgagcttgtgaaaaatacacaggcaatcaatcagagtgcagggctattaggtgagggattaggtaatctctcgaaagaaatcaccaggtttgtgggtgagatttccactgttgtgagtgatatcaatgcagggcttcgcgctcgtttccctgaatggtttgctgaaaaagataaaccagcggcccaggctctctatgatggtgctgttacaggctctgccaatgatgctgcgcagtggatcgctgataagacgggcttcgatacccgttcagtggctccggctatcaaagattggctgggcttcggtaatcagcaagcagggactgcggcgaatcaatataaccttgcaggtgattctctgcgtgattctgcaatgtcactcagcagcaacgagccagcgtacaaccttgcacctgtattcaatctaaatcttgaagcgtctgttccgctcactattgccagtgatagctcaagattgagcgattacattgattttcaggcgagagcctcccaagccagcttcacacagtcgctaacgctgcaaatgtcatccggtcaatcatcaacaggcgggtga

SEQ ID NO: 161649 - DNA, 768 bp, Enterobacter cloacae
atggcaaaaaccctcgcccagattcaggcaaaacacgagcacacatatcaagatgaagacggaaaaactgtaacatcgcaaaccttcataaaggacttcaccttcttcgaagacattgaatacctttattcaaaagattgccccgatgggataaaaatcgacagccatcacgttggtttgtattgccgctttatgagctatcaagcgaacggtagtcattgctacgagagtcacgctacgttagcgagaaaacataaaacatcatcttcaacggtaaaaagacgtattgaagacctaagaaagttagggctggttataacgaacgaacacccggatcccaatatttcatcactgctttatactgcattaccacttactgatgctcatgttatcccaccagatcaactaccagcagcccccattatcatttctgacgtagtgcctgagccagacaccgcagaggaaaagccggatgatgcgccgaactgggatgaatcagcaccaacagattatgcgacggcaaagcctgagcctttaggactgcctgagacgattaccgatgaaatgaaaatagatgcagtgtgcgatctgctatcaaaaacggagagtttacggcaacaaagcaggggggacacatttataaactacgctcgtcgcgttttgaactttaacaataagagattaccttccagattagaggaaaagttagaggagagttttgaaagtagattccctcacttttactcaagatttggaataccattttaa

SEQ ID NO: 161650 - DNA, 411 bp, Enterobacter cloacae
atggcaggagtattagcaagtacggcggcagctatagggattcttgataaagcggtaagcatcactcagaagctggcaaataacagcgatgaactggacaaggctacgctcaaacttgagttagccaatctaatggtcgaacttgctaacgccaagatcgaagcgataacaacacaaaccctacttttcgacgctgaacagaaaaataagcagcttgaagagcagttaaaggataagcacgcttttacgtttaacagtggactttactggaaagaaggagataaaacacccttctgccctgcctgtaaagaaaaagatgagaaattcatacacttgcattactttgctggaggcggtagttacactgctggttggtactgtaaggtatgccgcaacgaatttgaagcatag

SEQ ID NO: 161651 - DNA, 552 bp, Enterobacter cloacae
atgtgtattaagggattatctctgttcttctgtgccgtttgcgttggttgtagtgggtactcgcagcggcaagagcacttagatgtgcctacctactcggagagctacgatcaagccctggggtggttagtgactgctcgttaccgggattcagaaaatgcagaaatcgttatgtcactggttggagacttttgcaggagcaaagggaaggaggcgactctctataagacgactgctggcaacacatccactattcaagaagtttgggcttgtcagactcccccaatgctaaatgatactgacatacttagcggggtttattgccattttattgctaacgcgcctcgctactctgcggatttttcaaaccgtcagaaggaagtagctgagcaaaaatttgtaacggctttcttgaaaaaaaggatcgaataccctgtcggcggtttttacgataagtaccagggtaactttgcttcttgggctgtggccaaacatgatgaaagcatcagcactgataaagtccgccagtggtttgacaagcattgccagtaa

SEQ ID NO: 161652 - DNA, 921 bp, Enterobacter cloacae
atgactacaaaaaaaattttgaatgctgacaataaaccctcccttacgtcccccaaaccgatcgattcggttgccgagtatgttagtagggttatgaaattaaaaaaaaatggtacccggcctacagcctttagagggcaggcatatcataaatgggaagtcgaacctaaaattcatagaaaaaatattgaaatctatgatgatgaagacaaagcaattaaggatgttatttctttagagtctgctgaatttcaaaatgatcgaactatgtttgataagttagttaggatgcaacattttggcttaccgactcgtttacttgatgttaccactaaccctcttatagccctatggtttgcatctgatatatataattcagacggagagcaggatggcaaagtactcgggatgtatgttccacctgatagggcaaaatattatgatagcgacacggttagctgcttatctaatttagctagtctaagaagtgaccaaaaggctgagatacttagacttgcagaagggaaaattgataaaaaactatttaatgaaaaagaagtcgtaagttacctctgttactatattggaatggaaaaacctcattttaaaacagaggtggttccagaagatcttttatatccgctatatgtaaaacccaagttaaacaataagcgtattattgctcaagctggagcctttttactatatggcgcaaaaaattacgatcccagaggacgaagcagccccattaaagctgatcaacttataattcctgcagcctcaaaaagtcttatccgtgaagaactagaggttttagggattaatgaaagaacgcttttcccagacatcgagagggcaacaaaatttgtaactatgcgatatcaaaacgaattacgcagaaaacaagaatccttactgtag

SEQ ID NO: 161653 - DNA, 1176 bp, Enterobacter cloacae
atgtatttctataaatatttaacggctaacagcttaagtatatcaatgcttcgtcatggcgaagtcttttttgcctcccctcaagaacttaacgacatacatgaatgcaaacctcaatttatttttagcgccaactcagaagtatggtcaagatttattgatgataccctttcacatgtttgtatgaaactcaactttaaaccacaatcagaactaccaaaaaaaatctcatcacttaagagtgagttactacccctccttacagggaataggaaacccaaaacccatacttacgattctttattaagcgaattaaccaatggctttggtaaatacatatttgggaaattagacttcctagatgcattgaatgcagtgagagctcttgaatcctaccttcagaacgatttggataaaaaaattaaaaatagctattacatgacatctttttctaaaagcgccaccaacttaacaatgtgggggcactatggtaatgcggaaaaaggctttgtaattgtctatgaatcagaagatggaaatgtaagcattgaaagtgatattgataaatttcccagcattaaaaaatcaaatgaaggtacatacgtcgttggaacatctaaaaaaagcagcacgcaattaatcgaggtcgtatataaaaataaacctgttcgtgcaaatggatttagagaactcattcctaaactccactacacagatcaagaaagtgattatgattacccagagaatttattagcaagcatcccaaaattcaatgaagatgagattggacgagtaaaattcaccgactggaaatatgaaaaagaattgcgcttacatttacctgtacatgaagagctcgactcaccttttaggagcattaaaatatgctcacaccatatcaaaggcgtcatacttggctcaagaataagcatcagcgacaaaaacaacatccttgccgcttgctattatctaaaaaaatcacaaaacattgagaatgacatctttgtgtttcagtcaaataatacacatggtcagtacaagatcaatgttaatgcattaggaaaaattcgcgaccttcagtttgataaatcaacttatttggtgatgattaacaaaagtgatcacctcgcgcgtgaagaaatagatcggataactaatgccattaatatgagttag

SEQ ID NO: 161654 - DNA, 384 bp, Enterobacter cloacae
atgatagaacaggcaattaaaacttcgcttgaacgtctgtccggaatggctgtttatcctctcctgctaccagacaacgagcaaaacggcattacttttcagctgatttcagatccggatatcgaaaacggcatggtgcgcacagggctgatagctggccgctttcaaatctctatgtacaaagtgggtgattacaccggactggtaaaactggataaagctatctggactcactggaaaggcattatccacggagagcttgaaggttatccggttcaatatgtccagcgtgggaatattctgcaggacaaggcgacccttaccagcaatcaagttcagtacaggctcatccgcgattacgtactttatttttatgaggagtaa

SEQ ID NO: 161655 - DNA, 585 bp, Enterobacter cloacae
atgaaaaagtatctttatctaaccaaaaaagaatgggtatcaccttggacaagaggtggtgtagtccccctgtatcgggccagcaggtatttatctgatgaaagaaatggggttatgactcctgatgaaaatttggttgatgcctcaactcatgatctcaatgctttcaaaggaatcatagaaatcagaggcaactcaacagtcacttttacagataccattataaatgggaccttacataaagggtcgatgcactttgaccgtaaagttgaggatggactagttctgtgcttggctaactctaaaagcattgaactatccataaaacttggaaaaattgcttgtgttgagattcttgatatcgatttcttaaaaagacatcttgataaacaaatcggaatcacgagccttatgaaggaatgtgaatacaccgatggtcataatagaaatcattttttaaaatcttcacttgatgcgtggcaggatgagtttcgacttttctggccaggggccgattcggtaagagtatctataccatcaggaatagcaaaagaagttaaatttaataaaaatcagttgaaataa

SEQ ID NO: 161656 - DNA, 468 bp, Enterobacter cloacae
atgacgaacacacagaacgtcaccgagttacaaccacgcatgaccagagagcagcttattgacgcagctcgcaaggcagcccctctgcttcctgccgcttacggctggatggttaacgaactggctacgcgccttgatgttaccagcgtcgcgctctgtgaagcattggagcagcgcaaggagttggcaaaagaaaacagcgcgcttaaatttggtgttcagagtatccacgacaccttcacttcaagtgacgatgaagatgttttcgaagctatcaaactcgttcacaccctaccaactacggcaactgatgttgttgctcgggaactggccgcagacagtattgatgaagctgtccagatggttatttcactgattaaccatcaggcacctggtgttgttgctgttctcaacatccttaatctgcattcttccaacctgcgtgcggggaatgttaagcatggctaa

SEQ ID NO: 161657 - DNA, 591 bp, Enterobacter cloacae
atgattaccgaaaaaaataatgttttttattgcgactgcggattttctttccagagaggtcatagtggtgcgcatgactgtgctgatggtctgcgcaataaattggccgattctgaagacaatctcgcggcgctggctgcggagaatgcggggctgaagtcggtgtgtgatgagactatcggatggcagcaatcaaccgatccggtgaatgtcgaaagcgtcagaatgctggtcgacattaaaaccccggcgacggacgcttttctggctgaagtgcgggcgcaggcacgaaacgaaggcatcaactatgccgccagtcgtctcgccgctgcattcaatcacggtttcgttgataagccgctggctgaagtcctcgacgtggtgcacatgattatggacaccaaagaagagctggcaaactccacgctaccagccgctgacgggttatctggagaatatgcagagaaatttctcacagagtttgctgggtatgctcgcaaaggagaggaacctgaagaggggcaatcatttctcagcgatgaagatagccaggcattcgtcaaagcattcacgaaaggagacgcccaatga

SEQ ID NO: 161658 - DNA, 399 bp, Enterobacter cloacae
atgagcaacatcgacaaacaggcattgcgcgaagagttcaagatgatgcaggagtgctacagcgacccggcagacagagatcgccaagttatttacatcgcggcagaggcgctgctgaatgagctggaagccaaagacaagcagataggcgatctgaaagcaacagcggcacactccaatgctggatggaaggaggcgcatgaacaggaagcccgcgccgaggccgcagagaagcggattgctgagctggaggcgaagctcgaaactgcagacaaattgcaagatagcgcgtttcgtcatggtcttcagcatggcttcagtttaggtcaaacggataatcaggctggatttgaagagtgcttatcagcatatggcacgcggggtaaagataatggctaa

SEQ ID NO: 161659 - DNA, 654 bp, Enterobacter cloacae
atggaactttcacgggataagattaaagaaataatcaatgacgattggcttttgatggatgattgcgaaggaaataaaaactgtgatgttgtcaaagagctggcgcgtatcgcgctggcattgctcgaagcggagcctgtggctatgcgctggcgttatcttcctgatggtattcatgggatgggtgagtggaattatcgagaccagggatatatcgacactcttaatgcttatcatctcagcaggcaaaaggagttgctctacaccgcccctccagcgccggtatctgtgccggacctaactgcgctggataaccttgctggagaaatgctgacccatgcgatgaattgcgaaaggagagtgtctgtagcctatacgcactgtgcgcatcgccttgctgaagaggtcagagatttgcgcgccgccatgcttcagggtgccgatggcaactcccctgctggttgggtggcttgcagtgagaggatgccggataagctaattccggtcatggtgatgtacgcagacggagagatgtggtcggctatctggactggaacgaaatgggatgatgggactgaattccccgacccacacgcagtcacgcattggcaagtgatgccagcagcaccgcagcaggaggctaaaaatgtctaa

SEQ ID NO: 161660 - DNA, 276 bp, Enterobacter cloacae
atgatgaatgaactaatcgatcttattttacctcataaatctgtattttattatgatgatttggccctcggtgtaatgcttgcgttaatggtggtggatattgatttgtcttttgattacaggaacaaaaagcactggggtgcatataataaattaaaatcattgaaggactctccaggaatctaccacttatatatgccgatacgtatcccttcccgacaggaatgctatatttgtgtgccgctgagaattttcacagactataaggttttttaa

SEQ ID NO: 161661 - DNA, 126 bp, Enterobacter cloacae
atgtggggcgttatgcgcaggatagtggatttcctcatcaaaaacattcgcgaacactttatgctctatatcttattgtgggcgctgctcgctatcgttgatgttatatacattgtgttttattga

SEQ ID NO: 161662 - DNA, 1344 bp, Enterobacter cloacae
gtgagcaacctgtcgctcgatttttcagataatgcgtttcaacctctggccgcccgtatgcggccagaaaatttagcgcagtacatcggtcagcagcatctgctggctgcggggaaacccttgccgcgcgctattgaggcggggcatctgcactccatgatcctctgggggccgcccggcaccggaaaaaccacgctagctgaagtgatcgcccgctatgccaacgcggacgttgagcgtatctcggcggtaacgtctggcgtgaaggagatccgcgaggcgatcgagcgcgcgcgtcagaaccgcaatgccggacgccgcaccattctctttgtcgatgaagtccaccgcttcaacaagagccagcaggatgctttcctgccgcacattgaggacgggacgatcttcttcattggtgcgaccaccgaaaacccgtcgtttgaactcaactcggcgctgctgtcccgcgcccgcgtctacctgcttaaatccctgaccacggaagatatcgaaaaggttctgacccaggcaatggacgacaaagcgcggggttacggcgggcaggatatcgttctgcctgacgacacgcgacgtgcgattgcggagctggtcaacggcgatgcgcgccgcgcgctgaacacgctcgaaatgatggccgatatggccgaagtggacgatgcgggcaagcgcgtattgaagcctgaactgctcacggaaattgccggcgagcgcagcgcgcgtttcgataataaaggcgaccgtttctacgacctgatctcggcgctgcataagtcggtgcgcggcagcgcgccggatgcggcgctctactggtacgcacgtatcattaccgcaggtggcgatccgctatacgttgcgcgccgctgtctggcgattgcgtcagaagatgttggcaatgctgacccgcgcgccatgcaggttgcgctttcagcctgggactgcttcacccgcgtaggcccggcggaaggcgaacgcgccattgcgcaggcaattgtctatctggcctgcgcgccgaaaagcaatgcggtctataccgcgttcaaagcggcgatgtcggatgcgcgcgagcgcccggactacgatgtgccggttcatctgcgcaatgcgccaaccaaactgatgaaagagatgggttacgggcaggagtatcgctacgcccatgatgagcctaacgcctacgccgccggggaggaatatttcccgcaggagatggcacaaacgcgctattatcatcccacaaacagaggtcttgaaggcaagattggtgaaaagctcacctggctcgccggacaggatcaaaatagccctataaaacgctaccgttag

SEQ ID NO: 161663 - DNA, 351 bp, Enterobacter cloacae
gtgcgccgactggaaagacagggttttattcagggctatacggctctgctgaacccgcattatctggatgcctcacttctggtatttgttgagattactctgaatcgtggtgcgccggatgtgtttgagcaatttaacgccgctgtacaaaaacttgaagaaattcaagagtgtcatctggtgtccggtgatttcgactacctgttgaaaacgcgtgtgcctgatatgtccgcctaccgtaagctgctgggggaaaccctgctgcgtctgccaggcgtgaacgacacccgtacctatgtggtgatggaagaggtcaaacagagcaatcgtctggttattaagacgcgctaa

SEQ ID NO: 161664 - DNA, 195 bp, Enterobacter cloacae
atggtagatagcaagaagcgccctggcaaagatctcgaccgtatcgatcgtaacattcttaatgaattgcaaaaggatgggcgtatttccaacgtcgagctttcaaaacgtgtggactttccccgacgccgtgccttgagcgtgtgcgccgactggaaagacagggttttattcagggctatacggctctgctga

SEQ ID NO: 161665 - DNA, 228 bp, Enterobacter cloacae
atggtgacggtgatgttctggtttgctgaggtagtggcgaatgtctcccacgcaccaatgttctcgtcatactcattgataagctgcgacatagcctgggccaatccgtcgacggagattatgtccgacaccaaaatcccatatttctgtccactcagtgccggagcggcggcaggtgtaaccatcatcgaggtggagctgtccacgcttgagatctggaaaatttga

SEQ ID NO: 161666 - DNA, 315 bp, Enterobacter cloacae
atgcgtgaattaagagctggtggtatggcggttgttatttcttccggaaatacggacgaggttggaagggttgttactttggtctgcactctcaaaagtggagaattttacaaatttccagatggagaaaaatacgcgcttgtcaccaaaacccctgagttcgtatgggtggtagaaggcgatgtatctgtttacacccacaccaagaaaagctctggtggaatgtcgattttcagggcaaaaagcctcatgccaatcgaaggcggtgacttctctgatgaaatccggtcagaaaaggagaagtcgcatgcgtaa

SEQ ID NO: 161667 - DNA, 663 bp, Enterobacter cloacae
atggaactttcacgggataagattaaagaaataatcaatgacgattggcttttgatggatgattgcgaaggaaataaaaactgtgatgttgtcaaagagctggcgcgtatcgcgctggcatcgctcgaagcggagccggtggcgtatatccgctcagctcataacccagatggattttgttttgctgatggaattcatccgacgcatcgccatcaaagactccctttgtcgacattgcaagatggatgctattggaaggtaactccgctttacaccgcccctccagcgccggtagtggattgcgttccgcttggggattctccatatgatgttccatacagcatgccatcaaaccttcgtgaattgattgctgaagagatagggattctttttagcgatgatgatgctcagagtgtgtggaatgtgtgccgtaacgccgccatgcttcaggttgccgaacctgtaacgacggcttacaagttgccagaggggtgggtggcggtgccggttgagccgacagcggaaatgatttcttcaggtattgccgctcattacaagcgcaaccaaatacagattcacgacagacctgcgccggggccgatggaatgtgcttatgtggcaatgctcgcagcagcaccgcagcaggaggcaaaaaatgtctaa

SEQ ID NO: 161668 - DNA, 210 bp, Enterobacter cloacae
atgagtacaacggaaaatgttgtgattttatacatatcggttggagtggcgacggctatttttgcacttgctttcaacctgttagtaaaaaaagaaaatcgcttatccattgaggaaatggttttgatacttgccagattctcgtgttcaaagcctgtgattttcactttcatggcgctgtttgcctgggtaatccttaagaggttctga

SEQ ID NO: 161669 - DNA, 393 bp, Enterobacter cloacae
atggattacagcaagctaagcgactttgaaattaacaaacgagtggcgatcgcaaatgggcttttggttcaggaaattgacgatagcaaagccactggcatgacgagcaaatatcacgaactccgcccacacactgtttgggtgagtgatggtcaaaacccatgggagcaatatgcgccaactctttgctgggaggatgcgggtccgatcatcctgaataatcgcattagtctggtttgggattgcgctgaagatgccagttctgagtggtggaatgctgttgaccaattcgatgaatgccgcgttcagtatcagtccaacccgctgcgcggagcaatgattgtattcctcatgatgcaggagtcagccaatgttcaggatcatccagcctaa

SEQ ID NO: 161670 - DNA, 1158 bp, Enterobacter cloacae
atgaagaaaattttatttgtaactgcgcgttttccttggccaatcattacaggggatgctctccgtgcctataatcaaataaaagagctttcgaaaaacaatttagttgatgttttttctgtagaaaaagcaaacatttcaaatgatagtgttagtaattgtattaatttttgtgattctggtaatttatctaagattagaaaaataaagaatataattataaattctggaaaaactgcgttgcagtgtgcgatgtataatgataaaaagtcttggggcaaattaaagaatcttttgattgcaaataattatgacatcataatttttcagttagttagattagaatatcttatatataaaactatttctttaagacaagaacaaggtattaagtcgttaatttattgtgattttgttgatgctctttcattaaatatgcaaaatagagctgcaacagaaaaattttttatgaagaaaatatgcgatttcgaaagtaaaaaactatctgtcgttgagagaacaatatacgaagtaattgatgcaggacttataatttcagaaagagatgctaattatataggtagaaaagattttaaaattatacctaatggcgtgagcattcctacaataaacagaactaaaaaaaatgacgatgacattataaatttagccttttggggtaatatgagctattatcctaatgttaaagctgcaatctttttagctaatttgtacagcgagctacctaaagggaaattcaagctccatattgtcggtgctcaaccatgtaaacaagttttggctttgcataaaccaaatgaaattatcattcatgggtatgtcgatgatttgaaaaacttgctggcgagtatggatatagctgtatttcctattttcgacggttccgggcttcagaataaagtattagaagcatttgcattgggcctaccagtaataactactaatatagtcctggattcaatgccaaaactcagtgaatacgctatagttgccaatagcaaatctgaatttatccgttctatcgaattttttgagcgtaaagatgaggtgattaataaaaattctctttgtgcgatagatgtattgaagaaagattataactggaatcttataaactgtgtgacaggaatgaaatga

SEQ ID NO: 161671 - DNA, 501 bp, Enterobacter cloacae
atgagtacaaatattagtgaaatcctgaatgatttaaaaatcaaaatgaccgattggaaatatccattagaaaatcctattacagaacaatacattgaaagcataactaagaggaaatcaacttctagtttaaacccaatgcttgaaaaattgggtgatgaagtttgtctattatttgtaaatcagcctgattatgttacatttttagaaacaatggatggatttgaatataacggattaatcctattcagtctttccatacctgaaccattagttagaaatttatttgttattaatgatttctacagagataatgatgattatattaaccctgatcttgctcaaagattagtgatcggggaagatagtatttctttatttacttatgatactaaatctaatctctttgaaattagagataaagttggtacaggaaatgtttttggttcatttgatagtttcgctgatttcttaagagagatccttgatactgtagcatag

SEQ ID NO: 161672 - DNA, 681 bp, Enterobacter cloacae
atgtacttttacaccgcatttgcaatttctttgtttatcagctcacgttacaggactttgttctgttcaataatcataatagtaatattagtatccctgcaattatcaaactctggatcattatcgttcgatgcccaaaatgtatatttaaacgaagactctttatttaggaatgtttcatttttagccaacccgatagtttttgatttcataattggaatggtcgtagcagagttgtttttatctaagttatacaataaaatcactccaattttaaatatattatcgccggttatattgtgtcttggtttggcaatgtttgcctctatgtttagatatggaaatggtattacaaacggaggattgggtgcactattgatattcgtgtctattttacactatgatcttagcagatcaataaaataccctaagccattaacttatcttggtgatatatcatattcattttatatatcacacgttttaactattagtctatgcgatagatactcaagtttattttatgtatacactcaggttcaaggctggagaagatattgcgtagtgatcttaatctccttggcggtttctatagtgctgaggttattgatagaaaaaccatcagggaaactatcaaagcatcttgttggtaaattaaaaaatagagcaatatctgaataa

SEQ ID NO: 161673 - DNA, 660 bp, Enterobacter cloacae
ttgccgattcatttaaaagaagttaacgatgttatcgcattacacagtaatactggtacatttgtggcgctcagggctacaggcaatatttttgcatggggaagtgctaaatacggtgctgatataccagacaatatagcaaacctgtcggacattgtttctatacatagcactgatacaactttcattgctttgagaaaaaatggtagtgtggttttttggggacaatcgtattacttaagcgagctgccacaagaaattgcgtgtctgactaatattatcgatgttcaggctgctattaatggcagctatgcatttttaacatcagatggagacgtatactgctgggggcatgtcgctaatcgtatgccccaaaatgtaacaaatgtagtttctctgacaggcggtgcctggaatgcatttgcggcgcttcgtcgtgatggcactgtattagcctggggagataaatacgaaggcggagatactaccccggtagctcatgaattatacaacattcgcgctatctattcgtgtggctatcgctttatcgcgttgcgtgatgatgatcaagtctttgagtggggcgtagaggcaagaaccgacatttcaaaaatgccggcaaatttacaaggcaatatcacctatagcttcgttaaataa

SEQ ID NO: 161674 - DNA, 750 bp, Enterobacter cloacae
atgaatagttatgtttcaatatctgatattcgtgatttaaaagttatgggagccagaacgcaattaggaaatgcctgggcaagttcaacacacaaactgattgcgcttgataaagagactctactacccgtgagcgttgattggtggtatgaggatgaatccacacctcgccatactggccccatttttaccgatacacgtcccgacgtgcgactgcttgcaaactctgatatctatcgtctgggtgacgttattaatatcagcaatattggtggttcaggtggcgcattggccgctattaaaaatgatggtgttgttgaagcgtggggtgtgccagaaagcggtggtacttctccgaccagcgatcgtaatcataatgttagggctatttacggtgggcgagaaatttctgccgccattaactctaatggacaggtttttacctggtctgttgatggtaataatcctctgccggatcacattgcagcactgaccgacatagtagctattaaagtagctgaatatgggtatgatagcggaagcaattcttatcttgcgttgcgggctaacaatcaggtagtacagtggacagacggtgcgcctcgtgacgattttccgaaagatattgctgaacgcaaggatttcgtcgctatccagactacggaatatgcctttgcaggaatcacccaaaatggtcacgtgatcgcatgggggatggtgcatacggaggcgagttgccgattcatttaa

SEQ ID NO: 161675 - DNA, 147 bp, Enterobacter cloacae
atgtacaaacaacactatccccaacgattttgcatgacaagcatatattcttacgatgaatataatatttttaacataatcgttttggttatgagcaacaacatacgccgaatgcgggtttggctggagaagttcttctcattctga

SEQ ID NO: 161676 - DNA, 855 bp, Enterobacter cloacae
atgagaaaatcaatattcgacattgtttttaagttacataaaaagcagccatggcttgcagaaaaacatgacgaagtttctactcttctatttgaagattgcaaagatgataatcaacaagatctaattatagaattattagatagattcatatatcttgatgattctaaatttaatgatgctctaaccaccctttgcgatgaaatcgtaactgatccatctcttgaaagcgatcaaactcaaatagtttctttatctgctgataatagtcctgacagtggacaatatatactgtatgccttaaaacctaggcttgaaaaaagagaatggcgaaatcatatatccgttaatagatatggtgcttcttttaaagaatttaatagacatggtggcgttcacaaaaagatagttttagttgatgaattcataggtagtggacaaagtgcaattggtcgatttaatgaattgaggcgtatttatgaaaggcaagggattgtagatattgatataaaaatcttcgtcattgctgcatctaccgttggattagagagactaagacaagaaaacataccagttacttatatatatgaaataaaacgtggaatcagtgatttttatgataataaggaaaagaaagagagcctactcacgataatggatatattggaaaagacattatcacaaaactacaaaggtagagacttaccaaaaaatggttatggagaaactgagtctctttacgctagaactgaggggaatacgccgaatagcgtattcccaattttttggtggccaatatatcttgatgaaagaagcaggaaaacattattaaccagagccatgggagacgcataa

SEQ ID NO: 161677 - DNA, 339 bp, Enterobacter cloacae
atgcaacataaaatagaaatcgaaattctaaaaattttgttaaagtcatctcatggtttagaagcattcaccatatttaaaagacttaaaatatctttttcatctttcattaaaaatatgacttcattaactaataaagggatgattgaagaagccaaagaagagttttacaaaataacaagcataggtatttcgcaactcaaccttgcaaaaaaaaataatagcacgtatacatggttggctcttccagaacgatttgaacctgaaaaatttgatgtaaattctttttatattcctaaccgcagacttcttgataaaatcactttcaaaagtgaatga

SEQ ID NO: 161678 - DNA, 1005 bp, Enterobacter cloacae
atgagacgtgaatgggaagatttttatcttgaaaaaggtataaataccaattttatatctacttatcttgattatattaaaactttagagtctcgaaacattcccgtaatctttgaagttgaacacttatctaagcttattggaataaaataccctgaaatcaacgacattgtttttggaacaaaatcgttttatcgcgaatttaaaataccgaaaaagaaaggaggatatcgaaaaatatcttcaccttatccatcgctacgtaagtgtcagacatggattcatgaaaaattgctatattctttacgaactcataaaaatgcgtttgcatataagaaaggaaaatcaattatagataatgcagaacagcatttgaataatcatttcttacttaaaattgacatcaaagatttttttcctagcataccaataaattgggtaattaaattatttgattctctgggatatgcgaaaaatgtatcttatgcactagcatcattatgttgtcttgacggttgcttacctcaaggcggcatcactagcccttcactaagtaatatattactttatccattagatgaacgactgtcaaaattggcgttaaaatttaatttgaaatatagccgatatgccgatgatatggttttttctggcgaagcgattccgtcaaaatttattagttatgtaactgacataattgaaagctatggtttcattttaaataaagaaaaaacgaaactgctgaacaacacaaaacaaaaaatagtgacgggaattgacgttagtaaagataagttacaattaccgagaaaaaccaggcgtgaaattagaaaaaccatgcattatattaaaaaatacgggatttttagtcacattaataatgaaaaaattaaagaccctaattacataaaaagtttagaaggaaaaattcgtttttggttacaagttgagccagataaccaagaggccagaagttacattgaacacattaatcaaatgaagtaa

SEQ ID NO: 161679 - DNA, 150 bp, Enterobacter cloacae
atgaacgggcgagcggagctgccatcccggtggggagcgttacagcagctacaggatattctcattgcggcaggcgtgccgatggaaaacgtcaccgtggtggtaccgaggaatggggtgatgaggaacagatctcaaagagtgggttga

SEQ ID NO: 161680 - DNA, 837 bp, Enterobacter cloacae
atgggaataccttttcctttcttttataaattttcagcattaaatataaactcattatcagctttagctgaagggaaagcttggttttcaagattggctgactttaatgatcctttcgaaggtcagtttctgattaagcgcccagatatagaacttgataaagaaagattgtttcagcatatgggtaatacactccctaaaaatgttctttcagaaccagtttcagaaataatcaggaggaattacgaacagtctccggaaggtttcaaaaaaactatagagcaggcaatatctacgacatataatagatttcacaatgcctttcagaatatcagtgcattttgtttagcaagtgatataccaaatgtagatgcatcacatgttagtaatgttatgatgtggtctcattacgcagatggtatgaagggattctgtataaaattcaagccagagtatttgttgtcatcattaagagaaatgaatgaggcaaattttaatattgctcaagttcactaccaagatgaaatgtataacgtagacttttttgatctggttgacctttcaaaaaatgtttatacgcaggccatacatactaaacacactggttgggaatatgaatacgagtgtagaataattaccgaaaatcctgggttatataaatattctcatgatgcaatagattccatattcattgggagtaaaatgccattgcctcaccaaaaaatattgatagatatttgctctgtaaatattccgaatgttaatatttttagtgttaggactcatgcatctggttatgctgtagagttaggaaaatatcagaaagttacaaaatga

SEQ ID NO: 161681 - DNA, 1068 bp, Enterobacter cloacae
atgaatagcaaaataatttccgttcattaccttagggccgttgcttgcattgcggttttggtgagtcatttttcaggacttcttataattaacggtaaccccataccttaccttgaaagaggtgctttcggtgtggatttattctatataataagtggattcatcatttatatttcatcagaaaataaagaaagaaacacacctgctaagtttattgcaaaaaggtttttcaggatatacccactgatgattgtagcatgggttatagggatgacttttgtatttagttacagcggagcgtgggggttcttctctccgctcctgcttgtatatcagaactatgatgggcttgccccaaagtttggaacacatgcgatggggactccatggactctggcatatgaaatgctgttttatggcatattcgtttttgccttatctattacacataagtatcgcgcagttctgtctgttggtatcttgttgttaatccccatagctctgcaaattgtatttaatggttctttctctattctaagctctgaatttgcaaaggcagatgagagcattccgctatatgggctaataagaatggctagcggaacaattatgttcgaatttgcgataggcatagtattgggtgttttatttaaaaaaatgcgcaagattgatatatcatcaacagcatctacaataattttttattctggagcgctgttggcgttagcaatacttatgacaaatggagatttgatatcaacatttggtttgcaaggatactttatcccttctcttattcttttcctgtctttcttcttcagagataaaacatatactatcaagcacaatgatttccttgatttttttggcaacatctcatactcactttatataacacattttattatttatgtgtggatagttcaccacctcgatcgcgtatggatggagccagtgcgtggatacccaatagtaataataggaatggttgttagcgtgattttttcatgggcttgcttccatctggtagagaagccaggcgttaagctagggaaaagattttcataa

SEQ ID NO: 161682 - DNA, 840 bp, Enterobacter cloacae
atgagtatggttcataatgaattttcaactaaaggatctggaaactactcttacttcatgtttaagagatttatacgtatatatccagtatacatattcctttatgttgcatctgttatacttgcaagcgtggagcatggcataacagagagcccattatcatttttgattaatggccttctgcttcaatcattgttcgggtttaattacattgcctcgtcatggtcaatatctactgagatgtttgcatacctgttgttcccggcaatgctaatgactatatcaaaaacaaagtacattataccaatagtaattgctgctattgcatcacttatttatctttcggtaagcaatgagatactggcattctctgttaatgcttcaggaggtctgaagtctatccttagatgccttgcagattactctttgggagtgacagcatatgttttatttgcaaatggaaagtgcataagcaaaagagtttcatacgcattatgcttcactctcgctgcattcttagttttcaggcaggttgatgtttacatcattgtgttatgtgcattgataatcccgtcgcttgttgatgaaacaaatgttgtttcaagagttttatctataaaacctatacattaccttggtcagatatcctattctttatacttggtccattctttattggtaaatcagcttgagtttttgttcagcaatattgaaactggaaaaaccacggtaatatttatctcctcattattaatctcaatggtaacttatcacttaattgagaaaccgtgcagggtacacctttcaagatttggggcggcattcaacaaccgaagttga

SEQ ID NO: 161683 - DNA, 657 bp, Enterobacter cloacae
atgaacgcatgttcgattacgactatttgtgaccaaccactatcaccttacaagccagccttagcgctggctttttttatggccagatacaacacaggcaattcagtaccgtcaaacgaagttaaagatttcagcgataatgcccagattgtggatgagattgtccacttacagcagccaacaactcaagaccgtttcggtaacgaccttaaaacgtggtacggagttcagcaggatgctaacgaggcgatagtggcatatggatatatcacactgtatagcttcgaagacggaaatactctgacgctgccaaatcaggttcttcgacttgaggcgacaggtgagcattaccgctgggatggggtatttcccaaggttgttcctgcagggtcaactccagattcaacgggaggaattggacctggagcatggctgtcggtgggagatgccactctgcgaagtgatctggttaaaacaactgggtcttcgctcattggctacaagtatccatcaacttgcagtgtctcaaggacgatgcaagacaagcttagtgattttgtatttcttgaggactccggggggaaggatgacggaggcgtaaccgataactctctggcatttcaaaaggttttcgcagcaggtcacaggagaatttag

SEQ ID NO: 161684 - DNA, 876 bp, Enterobacter cloacae
atgcagtggagactgaagcgccgcaatgcaggcttgccgtgtagtgaggtagacgcgagtaatgacgagattccaggtacgcatcaatctgaatccttctcatatagcgcagacacatacgaaggacagtattacacccgcaaagtaacaccttcagcaggccgagggcgttatgccttccgtattgtgcgtaccaacaacggctcagaccagttaacagaccaggcgaaactggagaaggtttattctgttcaggtgcgcagtaacgttgttgcagaagataccctgattcgctgtgtaacgacggcgacagaacaggccaccggcatcaaggaccgaaagtttaacgccgaagttacgcgcaagacgatcacatggaatggctctcaggtagtcaatacgctaaacccaagccgaagttttgcagatgctgttttgcattcgtttgttgtgattgcagggcgcgatgcaagcgaactagatctggacgaactttattccatcgatgcgtcaataaaatccagtaatgagcacctcgggtggttcgacttctcatttggtgacatggacatcagtcttgggcaacgcctgcaaactatctgcaacgccgctcgtgtcactgtcttccgtgatgggcttaaatggcgctttgtgagagaggagaagaagccaatagtctctgctcagtttgatgccagaaacctcgcaaacgacgatactggcggaacgctccagtacagggggcatctgccgacaagttatgacggcgtggagctggaatgggttgatgcatcagacaccaatgacgacggtacggacaaaaaagcctacatcaggctccgtgtagatgctgccagcaagcagatactggaatag

SEQ ID NO: 161685 - DNA, 267 bp, Enterobacter cloacae
atgtacctggtggtctttccttcctggctctcttacctgctgtggaataaaggcattgcggctatcggtgcaacccgcggggagatttattcccaccttattccgctgagcggcggtctgttcagcgtgatgttcctgcacgttacgttgcattcgtatcatctggtcagcacggtactgattctgtttggcattgccctctgctctcgcgcctcgcaaaggaaagtcgcgaagatcgaacgcgcagacgaaaaagtacagatatga

SEQ ID NO: 161686 - DNA, 276 bp, Enterobacter cloacae
gtggttatcaaaaaacttgtccttagctctcttagaataattctactcatcgggattttcgttattgtgtcatggttagatgtttcttatctaactgaacacccattaataagcaatgaaatagccattaaactttcctatatatttagcaacaacccaacccctgaagatatttattatagttatgattatgcgttaattgcatttaacattttaacctctctttttttatatattgtaacaacgaagttagttaaattaacaaggattaaataa

SEQ ID NO: 161687 - DNA, 177 bp, Enterobacter cloacae
gtgaactatggattattgatgatagaccgtagtcatgacgaggcaatgttcgaacttttcctagccgatccatcttatctggcggagttgctggcggagagttttcatgatgatcacacggatgagttgtccaacttggagaggcagctatcggtaacgtttggcgagagaggttaa

SEQ ID NO: 161688 - DNA, 1770 bp, Enterobacter cloacae
atgagtgaagagtggattctccagactaaggaaacccgcagggtattttctaacgcggcatgggttcctttgagagcatcagttgagagcaataaaggcgatctaaaagaagtaggctatgtcagagaatatttcggctgtggctctgttgcattcccgtcagagcatcgccagctagttgaggaacgtcttggatggagcgacataggcattgggcacacagtcgcgccttatgcatacgaagatggatattatgcgtccattgaccaatatcaatacaatgataaagagccaataggtgtcaatctagtctatgaacatccgcagcctgttgttggtggtagaaaatggatactgagccctgatttggttgtcgcgctgcacttggtcaaagagggaggcaactgggtcagacctgaagaaaatttcgttgtggtagctcgcgagacagtgagtgaggatggcgagcatagtcagatagaaataaaaagagaatttttactcgactatctagcggccagaaatctgtcgctccgcctttcatactatcgacagagggtagaaaatgtccccgtatttgagggcagcgcatattcaaatttgcagcctcacaatgaggatagagataatggtaaatttaccctaattgttcgcaagcttgatgacgtctttgggggacgctgggcgatgtttcgagcctggcgaacggacgtagatgagggtgaagacgcccctgtgatgggccctgagaatgactcgaacactgactatgaaagttctgaggggcatcgtggaggctataaaggtgtacgagtagagggggagttttggcgtgaggaatggatagaccaccaatcaaaaagccttcgcgttcgcggagatgcagatccgaacctcccgcaattcatcgtggaaaccgatggaacgcgattgggatcagcagagcttgataacgaggacataggccgctggctatggtttcgggtcagcgtcgtgaatgagcttctcaattgtcgaggatttcagttggcgtggtacacggctgaaactggatctatcaattccacatcaggatataaaacgcatttcggcataaacagttcggatcttatcaccgtatatgcttatgacatcgcacgactcgccccatgggagcagcatgtttgggcggggcataatgtagctcctgaaggaaaggtttcaagtgagctgctggacgcgcaggtgagggcgaaaccggcatccacatatgcggttgaagaaatgttttttggaagcatgaggcttttggaagacggcttcaggcataaatacgaaatatcgctgttcacccatgatattgatgacatcgaagtagggcagcaaatatctaggtttgcaagcaaagatagagtgaccctactcagactagccaaggacatcattcgcgtattctcggacaggctcaacgtaaccgaactacgcaagctttctacacaccaagagaaagccaagctcggttcaaataagttacttcaaagtattttggctgagaaaactggagatgataaagccaagagagtatttgctgagattgccggtgcttatgatatgcgagtgggagatgcacaccctacaggctcgaagataacagatgcgatcaagctcgcgggcgtcgatgaagaagactcgccattacggcagggagagcaactcattcacaatgttgggcgatcgatttggtacatagggaaatttttgttcggtgagactgacgagtcggacgagtag

SEQ ID NO: 161689 - DNA, 207 bp, Enterobacter cloacae
atgaaacccaacccggtcatactgagtgataccagactgtgcaacctcgagcctaaggaaaatctctacaaagtgaatgaccgtgacggcctctacgtggccttcacgccagcgggttcgatttcattccgctataactactcgatgcacggcaggcaggaggctatcaagcgaatgccattgcttaatcccagcatgctgtcatga

SEQ ID NO: 161690 - DNA, 1113 bp, Enterobacter cloacae
atgtcatttaccgatagtctgttaaaggaacgtattctcgcagccaaagagaaaagtcttttttggctaaagaaaatgcaactccctaacgcaacgccaggcgtattacgcgttagcgaacttcaccagcccgaacaatggccacagatgcttctgccggggacctatgatggtacgatggctcgcgttttacttggggatgagatcgccggtaaaaaggcacttgcggactggatattgagtcatcagctggaggacggttttttccagttgccggggttgtgctggaatgaaacatggaaaggaccggatgctgaaaaaacgcggcagtacatgcgttttcatacaaccaattactgtatggggacgctggaagtactggatcaactggatagaattgaactgccatttttgaaaccctaccttgacgctcagtatttttgggcatggttaggtcaacgtgatatgcgcgatccctggctggaaggtaacaatatcgtcaatatcggaagtttcctgttactcgaacaacagagagaaccgaacggccctgcggctcaacgtttgcaggatatgatcttctggcataatcagcaaagcgaaccctattcaggcttttggggaccgggtcaacagtacagccaggaagctttattgtttgcgctctgcggtgcgacgcataatttacatgtattttatgcactcgatgaacatattccctattttaaccagtcgataagccgttgcctggaacaacccttagccgttcgcagcagctgtattgatgtcgatattatcgatattctggcgcacggccacgcgcgttgcccacatcgcagtgatgaaatcgagcaatggctccgcagtatgctcgtgaaattgcttgactttcagaattcagatggtggattcccggacaccttacttggcgagcgagggtatgatggatgggtgaagggatataaagagcctcagggacatagtaatacgtttgccacttggttccgatggatagctatcgcgatgatcgcccacgttttgtggcctcaatggcaggactggcgtttccgtaagacgatcggtattggatattttaaaaacgtgtcgaggtga

SEQ ID NO: 161691 - DNA, 1311 bp, Enterobacter cloacae
atgggtcagtttcaggatggtgtcagcaatgaagcagtaaacattggttctacaaccagtcgatatcgatggacaatttgcgcgttgctctttttttctgtcacgataaataatctcgacagatctatattagggttgctcgcgccaatactgcaaaaagatattggctggaatgaaattgagtacggtaatattgtgacggcatttcaggctgcctatgccttaggtttatttctatgcggtcgtttcgtcgacgtttatggtgcacgcctggttttacctgtcgcattggccatctggagtttagctgcgatggctcacggtatggtcggtaccgttataggatttatctacgcgcgaatcttcctggggctgggggagagtgctaacttcccttcagctgtcaaggttgccgcggagtggttcccgaaacgggagcgggccttcgcaacgggtatttttaatgcagggtccaatgtcggtaatatttttgctcctgtcattattccatggatagcattgcagtggggttggcgtgaagcattcatcgtaaccggtgccatagggtttatttggattgttttctggctgatattatacggaaaaccagagaaaattaagaaagtaaataaagaggaattagcctggattaatcaggatgatgacgctgatattacagagcaaatacctcaaaaaataagctggctggggttgctgaaatataagcaaacctgggcatttgctatttgtaaattcctcactgacccgattttctggttcttccttttttggttaccgaaatggttgcatgacgcgcgcggcattgatatggcacatatggcgatgcccttggttttaatcaatattctggcaacaatgggcggtcttgcaggcggttatctcccggcatggatggtgaaccgtggtgtggccgtcaataaagcgcgtaaagcgacattattgttatgcgctacctgcgtgcttcctattttattggtctcgaatgtttctaatctttggggcgcagtgttgctgattgggcttgctgtggcagcgcatcagggctggtcggtcaatctttatacaagcgtatccgatatgtttcctaagcaggctgtgggagctgttgtcggtattggttgcctgattggctctctcggttcaattattttcacccaggctacaggccatattttacaggctacaggaagctattggtctattttcctgatgggcggttttgcctatctgctgggtttcctgattatgcatttattaattccagcaatgtcagcggctaaatttaaataa

SEQ ID NO: 161692 - DNA, 1797 bp, Enterobacter cloacae
atgctggaaaaatcggacctggctgaaaacgccgttgaatgcttacataacgagcaatatgaccaaccctataataagcagaatctcaatcatactaatctgttattcacgggtggccgagaccgtgaaagcctgagtggcgagtggcgctttacgctggatctacacgacacaggattaagacaaaaatggcatcttttagagaaaagcgacgctgagacacgtcgcgatccttacgattacgatcctttttctggcgataccgttcctgtgccgggatgctggcaaatgatgaaagaaaaatggttttattttgaaggaagtgcgtggtacacccgggaaattgattatatcaaacaggatgctgatgaacgtattttcttacgcatcggcgcagccaattacgattgcaaaatttttgtcaatcatcattttataggcaaccactacgggggctctaccccatttagcgcggaattaacgtctgtattacaacctggagagaatgtgttaatgttatgtgtgaataacacccgcaccactgacaggctgcccttgagaaataacgactggttcaactatggcgggatataccgtgaaattgatattgttcgtacaccgcaaatttatatcagggatctgttcgtttatttagttcctgacggaaagtataataaaatagccgtgagaatagcagtggaaggcgatgcgaaggaggtgaatttctctctcgctgaactgggcatctccgttactcttccggtgatgaatggcattgcagaagctaacctgtctgctgagccgcagatttggtctcctgaacaccctaaattgtatcgcgttatggcatcgttggggcgtgactgtgtcagcgaccgggtgggtttcaggcaaattgacgttgtaggtacagatattcgtctaaacggtgagtcgctctatctacgcggcataaattgccacgaagatgatctgttattgggcaaaatgactaacgaagcggatattcgccgccgttttcatgatgctaaggagctcaactgcaactacctgagactggcacattaccctcaccatgagatggtcgcacgcattgcggatgaggtcggcttgctgctatgggaagaaattccaaactactgggcgatagattttaaaaatccgacaacgcaacgcgatgcacacaatcagttgatggagttaatctatcgcgatcgaaaccgtgccagcgtaattatctggtcagtaggtaatgaaaatgccgataccgatgagcgcctggattttatgagtatgttgattgatgctgcccgcaaggccgatcccagccgtttgatatctgccgcttgccttgtcaatcatgcaaaaatgaagattgaagatcgtcttgcagactatcttgatatcatcggtctgaatgagtattacggctggtacgaagagaattttgacgatctggttgtgctgggtcaaaactcgtcgccaacaaagcctgtcgtcatcacagaaaccggtgccgagggagttttaggcgaacatgcacctcagtcggggccattctcggaaaactatatggcggatgtttaccgtaaacaaacagagtatctgccaaaactcaattatatacgcggctttaccccatggttgttatatgactaccgtacagaaagacgtcagaacccttatcagaaaggattcaattgcaagggactcattaccgcagacaaaataacccgcaaaaaggcattttatgtattgcgtgatttttatcagcaattaaaaaatgccgagtcataa

SEQ ID NO: 161693 - DNA, 1062 bp, Enterobacter cloacae
atggtcctgcgtgactatatggaggatgaggcagcatcgtggcaattagtcaatgcgctgcaggtattacctccggatgtgagggtatcaataaaggcagttgctcacggttatcgcccgggttttgtaaataaccctttattgactcagcttaaagggcgggtcaagtggattgagtttgatatgtgggggctagagtacggctggactctactaccgtgctacttattagaggaaattcagggccgtttgagttgggtcgaaagtatggctggtgaggagttggaagcgattacgggacggcttagttgggaatggatctctaacagttccctgattaattcagtaaattcagtcaacctacatggcttagcgatgtttggccgtgagatctttatgtcagaaaaacaggcgtttcactgctggctcacggatatgcttgagcgtaaggtagatctggccgaattaaacatctttcatcaattgtatgcctgcagctatgaatggatgagaaagaccccctatatactgggacatgtgttacaccatttcagccaggtcccggtaagctatgcgcaagccgtaaaacaactacagtttcatttgcttaaatcagatgattatgcggcgacagtcttgttcccgataaacgatcccgatattggacgtgaacagtttcagcaattagtgttagagaaagaacgcgctatgtttttggcacaagactcccgtaaccggctctttcaaataatacattctattgatatgtctgatgagaaaaaagatttattcaagcgcgtctgggatcgcgtgccgtactacactgaaatgtttaacagagttgcgcgaagtgtcgctatgaaaatgatggtcgatcgttacggccatcagagtggcatatcttcatttcaattaaataatgaaattaatgaactgcgccttttagcaatacgaatttctggatggattgataaagaagaacaacaacagcctcattatctggctatgctatttgatcctgccagactacttagcctggcagaaagtttgacagaaagttga

SEQ ID NO: 161694 - DNA, 228 bp, Enterobacter cloacae
atggtcgtgaaaatctgttgcgtgagcatcaggaacatttattgtatttacaacgagtatgtcgttattgtcaggcatcgggcattggcgtttggttgcaaggcgaagcactgccgcgggatggaaaaatacaagaaaaatatccagaatatgctttggttgataatattagcgcagatgaaattttctggaaaaatttttatcaacacgcactctttgaagctttag

SEQ ID NO: 161695 - DNA, 213 bp, Enterobacter cloacae
atgccgataacaccggcattatcctttctgaagatccgctggatatcgagtaataaaaccctaaacgtgaaccataaaaaaaccgccaacagcaatgtggcggtttttttgtccctcgggattcgcggtccgttgggaagatttgcaacctttaaccaggatttttatcttaccctggttcaaacctcagataacctcatcgaccctttataa

SEQ ID NO: 161696 - DNA, 843 bp, Enterobacter cloacae
atgactgacgattttcagaaagaacagctgatagcggcacgctatggcgagaaagacaggcctgaaaatattatctggaacaaacagatagaagggttactctgccaccgttcagtcagaagcttttcgccgcaacctctgcctgaatactggtttgaaactctggtggcagccgcacagtctgcctcaacatcctcaaatctacagcaatggagcgtagtagcggttaccgatcctgagcttaaggcacaggtaagaaagctgtccgctggggatagcggtctggctaatggctacattgaagaagcgcctgcgatacttttatgggtggctgacctgtcgcgtaatcatgatatgaccgtggcggatggtctgaatccgggtgtgcatgaatatctcgactcatttgttatggcgactgtggatgcctcgcttgcctcgcagaacgctactgtggcggccgaatcaatcggactgggaaccgtttatatcggggctacacgaaacaaggcaaaagaactagccgaacttattcaactgcccccgcacagctacgttgtatgcggactggttgtcggatggcccgatccgaaaagcaacgcaagtattcgcccacgcctgcctcagagcgtggtcgctcaccataaccgctacaacgcatctgactttgacgcacatgttaaaagctatgaagaagcgttccatgcgtttcgtgaaggactgggaatgaaagacaaaacctggaaacaggccgtacaaagctcagcaacaagcatggactatatggacggacgccagaaccttcgcgctacgcttgaagatcgcggattcggttttaaataa

SEQ ID NO: 161697 - DNA, 585 bp, Enterobacter cloacae; identical to SEQ ID NO: 94276

SEQ ID NO: 161698 - DNA, 396 bp, Enterobacter cloacae; identical to SEQ ID NO: 94277

SEQ ID NO: 161699 - DNA, 846 bp, Enterobacter cloacae
atgacgattgcaatcactggtgcaacaggccatcttggccagttagttattgaaaaacttaaacaaaaagttgacgcttctgaaattgtcgctctggtaagaacccctgcgaaagcagctggcctgggtgtagctacacgcgaagctgattacactcgccaggatacgctggatgtagcattgaaaggagttgataccctgctgcttatctccggcaatgaaatcgggcaacgtgcggtgcagcacgaaaatgtaatccgtgctgctgtaaaaaatggtgtaaagcgcatcgtgtatacgagcttgctgcatgctgacaagtcaccactcaacctggcaccagaacacgtccagacagaacaggctctcaaaaactcggggctggactatacaatcctgcgtaacggctggtattcagaaaactacacgggttctattgcacctgcgctgggccttggcgctttttatggcagtgctggcgaaggtaaaatttcctccgcgcctcgtgaggattacgcagaagccgctgtagtggcgctgaccgggcaaggccacgaaggcaaaacctatgagctggccggagatgaattctatacgctgactgatttagctgcggaaattacggctcagagcggcaaagatattccttaccgtaatatcccggaagcagattacgcggcggcactaaaaaatgcaggcctgcctgatggatttgctgaggcgattgcgtcatgggatacgggtgcctctcagaacgcgttgtttgatgacagccatgttctgtcaaaactgattggcagaaaaactacgcctatcgcagtaagcgttcagaaagcgcttgcctga

SEQ ID NO: 161700 - DNA, 429 bp, Enterobacter cloacae; identical to SEQ ID NO: 94279

SEQ ID NO: 161701 - DNA, 1374 bp, Enterobacter cloacae
atgtacaataaccttccggccctgagtgagagtatcctttgggatgacaaccttctggctacagactatacggaactggatgcagaagcactgggaagtgcgttaaggagctaccttcaggctgtcagtgttctgcgcggggagtggcatcccctgcatgactctccgctcagcctgtggattgcccgtcacgatcaactggctctttatcgccccggcctgctgtcggctgaacgcatcatcctgaccgatacactggaggaagcggtgctacgccttgataccattgagtcatcggaagcgatggatcagctgatacattacaatgcaaccgatcggctggcagatatcaggaccggcgtggcgcagttcgtgcgttttgtgaaggacaattttctgctgatccaggccggctttattgccttcacaccctgtgaatcagtccggcaggagcaggagcgtaagatgcagctcctgcaggataatcccgaccggcatttccttaacgccgtgatgcccgcagaggtggtccggctgtacgagaggagcgtgaaggtgcggggggtcagacgggtcagcaatgaagggcatatccgcttcgtgtcagaaaaaacactgccggacgaaatcatgctggagctgcgggactgtcagagcccttttaccaatgcctatatgtaccaggagctgcagccagtcgaagtggaagaagacggcagattcagggcaaggatcacccgcggtaaacacgaaagccgtaaagggtatgaccgatgggtgcgcggggccatgaaccggagtatctactttcattatcacgggctgctgactgatatcagtcagtcagcccgggccggcgcctcacttgtcacccgctgtccgctgcagggcaaaatcctgcagaaactcgacgcatccgggagactgtcacgcagaatgcttgaggttgaactcccgtttctgcagaacttgtcgcttcacgacattttccgcatccgcaccgattatgagccgagcgtaacagccttcagacgcacgctgcgtgactgtgcggttgaaatggagcgggcatctggaccggcggagatcagcctgctgcagcagcgtttccgggagcgaattgctgatgaagggctggatgatctgcagcagaaacttgccacatggaagcggcggagtatacaggacacagccctgctcgccgtgccggctgtgctgggttacatgggggcgccttcattgctcaatctggccgccggagcggccagtcttctgcaggccgcgctgagtgcccaccgtcatcatcaggaggttatccatcatccgtcctggtttctcctgcgcaccacagatattcagcggctaaaaaaatag

SEQ ID NO: 161702 - DNA, 1089 bp, Enterobacter cloacae
atgctcagccagcttaacctgcgttttcacaaaaagctgatcgaggcgctgaaagtgcgcgccggtcgcgaaaatacttcggtcaacgccctggccgaacgcttcctcgatgacggcctgaaaacagtcgcgcccggcgacgggtattttcagctggttgccgatccggaggccacggtccggcagctgtaccggcatatcattctcggccagaccttcggcaccgcgcccgtttcccgggacgagctgcgcttcatcctggcctatgcccgggaagcctttctgtgcggccggaacagggtggccacgctcccggccctgcgcaccctgctcgacatcacccgggacctgctggcctggcaggctgagaacgaccgtccggtggacggacattaccttaaagggatcttccgcctggccggggagagctggacggaagaatttgacgccttcctggcggtgctgagccccgtggtggatcagatgtatgccgaacacctgctgcgcccgctggaaagcgactgttttgtcctggcggacgtgccggacgccgtgctgggggaaatcttcaccctgccacggctgaaagccattttccccctggtcctgcgcgggctggactggagcacacagaaagcgacagcgctggcgcaggatctgcgcccggtgatcccggccgtgacgcaaaccatcgaagccggcaccctgcgcctcgatatccgcattgacggccagcatcccggcgagcgcccgggcgcctggtacaatacaccccgactgcacctgctcatcaccggccaggacttcgtggtgccgtacgggtgggaagccttctccgaactgctggggctgttcacgctgtacgcccgtcatcctgaagccctggcgcacggccaccagggtgagcgcgtgatgttctccccgccgggaaacgtcacgccggagggattcttcggcatcgacgggctgcgggtttttatgccggcagaggcctttgagttgctggtcagccagatgacaagtgacacggttaccggtcagctggcagacgcccttaacggcctgcgctgcctgtatggagatttgtga

SEQ ID NO: 161703 - DNA, 321 bp, Enterobacter cloacae
atggtacgaataatgaaaaagcttaccgaaaaaggggtcaccctggtattactaggctgtacttcctgtgtcgctgacgcggctacgcatgaaggaatgcagggacttgagccagcaacaacaatgatcaagagtacccagccagtagctgataatctgcaaatctgggtgccagtgttttccgccttcattggtggtttgatggcaatcgccggcggtatcgtaacccagtggtttatcgcccggaaggaaaaaatgaaaaggtacaaaaacttgcttccgacagagcattcatcggtgccggccttatcctctatctga

SEQ ID NO: 161704 - DNA, 168 bp, Enterobacter cloacae
atggcgaagatccggcatatagatgagcagggctttcacttcggaggcgaggaggaacgccagggagcgccggttaagatggccatccttctgagtgagaccgcggtcggaaagtcgaccccatgggctatcggcaacagtgaaatgcgttctggtgaaatggggtaa

SEQ ID NO: 161705 - DNA, 1272 bp, Enterobacter cloacae
atgtttgccctagccgatgtgaacagcttttatgccagctgcgaacgtgttttccgcccggatttgaaaggaaagccggtagtagtgctcagtaacaacgatggctgcgtaatcgcaagaagtgccgaggcaaagccctggatcagaatgggcacgccgtggtttcagatgaaaaacgaaaggtatccggaaaaaatatacgcgttctcaagcaactatgaactttatgcctcgatgtcggcgcgcgtgatgagctgcctggaggagttggctccgagggtggaacagtattcgattgacgagatgttcctcgatctgaacggtgtggagcactgcattgacctggaggacttcggccggcagctgcgacagcaagtgtatgactgtacccgtctgaccattggcgtgggcgccggaccgacgaaaaccctggcaaaatcagcccagtgggcctcaaaggagtggaaacagtttcgtggcgtgctcgctctgacccgggggaatcctcagcgaacgcggaaactgctttcactgcagccggtggaagagatctggggcgtgggaaaccgtattgcacgcaagctcaatgtactgggcattaagaccgcactcgatctggccctgacgaacccggccttcatccgcaaaaatttctccgtcgttctcgagcgaacagtgcgcgaactgaacggggaaagctgcatgtcgcttgaggaagcaccgccaacaaagcagcagattgtctgcagccgcagctttggtgagaaggtcactgaatacgattcgctccgccaggcggtctgtcagtacgcagagcgggcctcagaaaagctgcgtaaagagcgccagtactgccggcatatttccgtattcatcaaaacgtctccgttcgccgttaaagagccttactacgggaacttggccacggagaaactgcttacccccactcaggacacccgggacatcattgcggccgccacaacggctttggggcgaatctggaaggacgggcaccggtatgccaaagccggtgtgatgctgaatgacttcaccggctccggcgtctcgcagctgcagctgttcgacgaacgtccgccacgtcctcacagcgctgagctgatgaaggttctcgatggcattaatcattccggtctgggacaggtctggtttgccggacgagggattgcgcctgcatggcaaatgaaacgcgatatgctctcccctgcgtacaccacccgctggaaagatattcccgttgcgaggatcagataa

SEQ ID NO: 161706 - DNA, 1146 bp, Enterobacter cloacae
atggtaagagccaacatctatgacactgcgaacgatgacgattcattcgagcttgatggcgacgatgatctggagcttacctcccatcctcataggatgggatccgatacagagattcgcatagcaaaagaacaatccagcgtatttgaactgcttcgtcgagaaagccgaggaagcctagtcctggcccccgatttccagagaaaagatgtctgggataggaaaaaacaatcagaactaattgagtcaattctgatggggattccaatcccattgatatatttatttgaagatgaaaatggcgtcagacaaattatagatggtaagcaacgagtgtcagctttgaaaaagtttttatctgacgacttcgaacttaatgaattaacgatgtttcctcatctaaaagggctacggtttagtcaaataccgaaactattacaagctaaattggaagattaccagttacactcatatgtaatccaaccaccgacgcctgaatatgtaaagttcaatatatttgaacgtgtaaaccgagcagggatgaatctcaataaacaagagatgagacatgcgttataccaaggaaaggcaactgagttgattcaaaggttagccgaaagcaaggagttcctcctgtccactgggggtggcgtgcgtcctgatcgtatgcgagataggtatcttgtattgaggtttgtggctttttacatgtttcagaataatgcaatgccaatggtggagtaccgctctgatatagatctttttttagcttcaaccatgcgttttataaacgtgaaagcctcaagagaacttatacaagaaacagaaaacgcttgtataaatggtatgcgtaatgcatatcacctagcgggagatacggcatatcgcttcgaacctaaacgtggcgataagagaagaccagtaaatatgggtctttttgaaatgattgtttatgcgttaagctatatagatatcaataaattaaacccgcaaattaattatagagatatagttaatgaatataaatataacctagaagaagctggggtgttcagtagttcaatagatactattgattatgttaacattcgtttcgatcttgcattggaaataacgagggctctcaaaaatgcttacgcatattga

SEQ ID NO: 161707 - DNA, 1047 bp, Enterobacter cloacae
atgcttacgcatattgacataaaagactttaaaagcatacatgctgaaagtcttgaattaaagcctttgacgatattaactggaactaattcgtctggtaaatcaagtgtcattcaagcaataatgctaatgatcaaatatggtaatggagctaaccgttatagcatggaagaaattactcgatatttgagtgatttttctgtaatcagaaataaaaaaaacaacgccaagattgtttctgtatccgtaagtaatgaaaccgatactcatgatttacaattaactcctgaggttattattgcatcttctaatttagaatatgtttatgagcccattggagaaataaaaaccccagaaatgctttacctgaatgccaatagaatgggagcacaagagcaaactgccattagtgaacggagagtcggcaatacaggcgaatttttgttttcaagctttgaaaaaattaaaacaaatacagtaccagaagagatgcaaaaattcagtaattcagcaacaatctcatatcagttggctgaatggttaagttatataagccagacaaattcagagttaattacagaaacgaatggggataaagtaaaaatatcctataaaatcaaagatctagaaggcgaggtttcgccgttcaacctcggtgcaggaatgagctatataagtaaagttctaatcatttgtttgatggcaaagaaaggcgatatagtattaatcgagaaccccgaagttcagttgcacccaagatcacaagcattacttggtgattttcttacacatattgctagttgtggcattcaattagtagtagagactcattgcgaacaccttataaatagaattgcgtatcaaatatatgacgaacaattttctgctgatgatttaataatacactataaaccgactgtagatgaacagtttatatcattgttgatcgatgaaacagggcagtatgttgatactaatggaattcaaacaagttttccatccggattttttgatgcgactttagaagaattaagaggaatgaggtaa

SEQ ID NO: 161708 - DNA, 747 bp, Enterobacter cloacae
atgtctttagggaaaatagtcttggatgactctcttttatacgcatatttaaaaggggctaaaacaaaaaaatataataagttaatgaggaaatatatacatcctcatgttacgaatttccaacaaatatctagggtcatggcaaacattggtgatttgccaaatgaaagagcgatgctatctcaaatggctaatgagcctcatagtcatgatgacttacaaactttagctttaaagacgaccttcaaaatcattttaactgatgatataagcaaaccctttccgtttgtacattatgaaaatgctattgtaaataatcgattaacatttcatttagcacctactcaaagccgaagtgatttaacacatcacttgcaaagattatgtcaaaatgccaacaaggttattatttgtgacaattatttcgcacataattggcagcatactcaatcgctatttttatcagtcctgccaagaaaatcattattaatagaatatgcagacacaatgccacagacaacaactactttaaacagcgaatatatcacagatgattatattagacaacgatggcatgaatggtcagttgctcagaccacatactctaaatataataattgtcatgatcgatacttattaattgagtcatcaacgagtaaagttgaagtaatgatttcaagtggattctcacatatttggcaaccaaaccccaaagaaataacatgcgttttcagtgaggttatatga

SEQ ID NO: 161709 - DNA, 480 bp, Enterobacter cloacae
atgacgacaagtgatatcatcgctttaggtgcgcttgcagtatcaatctacaccatcatatcatccgaagttaaatccagaaaaaacgatagagaacaaaaagttattaaggatgaacaagataggctacgtaagttgcttctggaaaaagaaacaaagtccgctatcaatgaaatgaaggctgagcttggagtccgtttggtgaatatagccagaaataattataggctaaagatttacaacagaggtaaagtcgaagctaggaatatagaaatcctctttcctgataatgatggtgatgaatatcttgcaatatcggatgtgcaagacaaattcccatatgagatactgcatccgcaacatggaattgagatcattgcagtaataagttcagatagcaaaaccaaatatcgaatcaaactcatatgggatgatagttataaaagaaggaatgaagaggagtttttcatttcactatga

SEQ ID NO: 161710 - DNA, 276 bp, Enterobacter cloacae
atgaagtttaatgctgacaaatacagtagaaaaataactttattatgccctgtgtgtgggggttctgaaatggaatgtattgaacattcagagatagtcaaatgtgtaggatgtggaaatgaattcactaacgatgagttaatccaagaaaatggcgtaggtattgaagctcatgctaatgaagtaaaagaagagttgacaaaggatatacagaagcagtttagcgacatactgacgaaagcttttaaggggaataaaaacataaggatcaaataa

SEQ ID NO: 161711 - DNA, 324 bp, Enterobacter cloacae
atggctatccgctcaacgcttcaaccctggctgtttcttctggcggccgtcgcttcggaggtcgcgggtgtgagcacgatgaagttggtggcgcaggaacatgactggggtgcgctcttgttcatgtacgccatgatcggcctgtcgttcgcgtttctcgcaatggcgatgaaacagattcccatggccgtggcctatgccacctgggagacgttgggactgttggcgattgcgttcattggctaccgctacttcggagaaagcatgagcgcgggcaagttgctgggcatgagcgtgctgattgttggggtcgttctggtttga

SEQ ID NO: 161712 - DNA, 1533 bp, Enterobacter cloacae
atgaaacatacgatgaaaccggctttaacacccctgcggcgatgggccttgctcgctgtcgtgggcatcggtctgctgatggtggcactggacatcaccatcctctacacagcgctcccgtcattggcgcgcgaactgcacgcgaccagtgcgcaggggctgtggatcatcaacgcctatccgctggtgaccgcaggcctgctgctgggcgccggcacactgggcgaccgcatcggccaccgttcgatgtatctggccggcctggtgatcttcggtctcgcctcgttaatggcggccttgtcgcccacacctgacgtgttgatcgcggcccgggtcttccaggccgtcggcgcggccgcgatgatgccggccacgctggcgctgatccgcattgccttcgagaacgagcgcgaacgcaatttggcgatttcggtttgggcgagcctgtcgctggttggtgccgtgctcggcccgctgcttggcggtgtgttgctgcagcactactggtggggcgcgatcttcctgatcaacctgccaattgtcgtgctggccatcgcaggcacctggttggtggcacctcggcacaatcgactgcacgatggcgtggcccgcccgtgggatggcgtgtcctcgttgcaggtgttggtggcgttgtctgcgctggtggccgcgatcaaggaatgcgccgcgcctcagcaatcgtggccacttgcactggcgctgctggtcatgagcgcaggggctgcggcactgttcattcgccggcagtcccggctggcgtatccgctgctcgacttctcgctgttccgcaatccggccttcacggcaggcgtgctggccgccgccttcgtgaccttcgccacgggcggcctgctgctgagcatcgcccagcgttttcagtgggtggcggggttcacgccgctgcaggcaggactgctggtgtcggcgatctttctgggtacgctgcccagcggcttgctgggtggggccttcctgcaccgggtcggtctgcgctggctgctttcgggtggcttggccgtggggggactgggtgtgctgctggcggtgttcggacagccgttcggcctggctgggctggtcactggcctggtggtggctggcagcggtcttggcgccacgatctcggtggcctccactgccatcgtgggcaacgcgcccgcgcatcgcgccggcatggccgcctccgtggaggaagtcgcctacgagttcggcagcctgttcgccgttgcggtactgggcagcctactggcgggcctgtactcggccacggtgcaactcccccctggcgtgccagaggcggcacgccagggcatggccgaggcgctggacatcgccaagggcgcgggggccgctgggggggcactgttcgaggccgcggcccaagcattcgaccatgcctaccagcgggtgatggtggccgctgccgtgttgctgttcatcggtgcgctggtgacggcacacttgctgcgctgctacgggccaggcaccgcgtcggcctcggcagtgcactga

SEQ ID NO: 161713 - DNA, 885 bp, Enterobacter cloacae
atgcaatggacactggatcaacttcgccaattcgtgacgaccgccgacagcggctcgttcagtgcggctgctcggcagttgggcaaggcccaatcggcggtcagcaccgccattggcctgctggaggccgacctgggtgtggaattgttcgaccgctcacggcgcaacgcgcagctcaccgatgcagggcaagtgctgctgctggaagcgcgcgagttgctacgccaggccgagtccctggacaaccgcgcacgcgccctgcacggcggtagcgaagccacgctgaccttggcgctggacgaagccttgccctatgccgcaatcagcgccttgattcgcgagatcgccacgcgttttcccgacctggatctcaccctgctcaatggcactgccaccgaagtagccagctacgtggatgaggagcgggctcagatcgcctttcatttcgtgcgtggcgcactaccggcttgcttcgatcagcgctacatcggcgccgtgccgcaaggagccttcgtggccgaagggcatgccctggcgcgactcaaaactgtccagcgtaaggatctggccaggtaccgccaactcatcctcgaagccgaggacgtacaggaaaccgcctacagcccccgtctgtggcgctcggacagtttctacagcatcgccgagatggtggccgatgacctgggctgggccatcctgcccatcaacatcggcacctaccaggcctatcgcaagccactaaagcagttgcattgcccatcgctcgcgctacctccgctgtcggtgcgcatgctgtggtgtcagggctggcacccgacgctgaccgtgcagtgggtgcagacccgcttcgcggaattgattcatcaggcacaaactaatccgtaa

SEQ ID NO: 161714 - DNA, 849 bp, Enterobacter cloacae
atgacagagggcattccgaccctcacattgccatcaggccaagccgtgccggttctgggccagggcacttggcacatgggcgatatcaacgcctccctcggtcaggaagtcgccagtctgcgccatgggctcgacctgggcatgacactgatcgacactgccgagatgtacggcgatggtgcctccgagcgcgttgtaggcgaagcgatccatgcacgccgcgagcgggctttcgtcgtcagcaaggtactgccacagcatgctacgccacagggaattcgtgcggcctgcgagcgcagtctgcgccacctcggtattgagcggatcgacctctacttgctgcactggcgcgaggacgggacgtcactggcggatgtggtcgttacctttgaggcgttgaaagccgaaggacgaatatccgcctggggtgtatccaacttcgacgtcccggacatggaagatctgctggcggttcccggcggcgatcaggtcgcagttaaccaagtgctctacaacctgtcccaccgtggcatcgagtttgacttgctgccctggtgcctggcgcgcgggatcggagtcatggcctactcgccgctggacgaaggtcggctgctgcaccataaagaactggcacgctttgcgcaggcccgcggcctgactgcagcgcaagtggcgctggcgttcgtactggcgcgccgtggggtcatcgccatcccgaaggcgggagccgccggccacacccgcgacaaccgcgatgcgctgtcgatccggttcggtgcctcggatctcgcacagctcgatgcgctgttccctccgccgcaatgcaagatgccgttggagatgatttag

SEQ ID NO: 161715 - DNA, 576 bp, Enterobacter cloacae
atgatggatctgacaattaccaaggccactgtggccgatgcccgagaggctgtacgcctgatcgcactagcagatgaagatgcagtaatggcgatttctggccaagccaccttggccgacgcgctcgcccggtacgaacaggatttcacgcgcaccgatgtgtacttcggctacgaaaacgtgatcgtggcgcgcaagggaactctcgtggtcggatgtatcctgtccttcaagggaacagacgaggatcgctacgcggccctcgacagccagggcggggagtttcccagggaatcggatgacgacgagatttacatcgactcgctcgcggtcgatccggaccaccgtggcggcggtatcgccaagcaattggtgcgcgccgtcatcgagcaagcggctgcgcagggtttcaccaaggttagcctgttggccgatgtggccaagccgcatttgggcaagctctaccgcagcctgggttttgtcgaggtcaagcgcatgcgctacctgaacgacgagtacgagaaactggtttttgacatggtgcaggccaacacatcgcagggatacgccatatga

SEQ ID NO: 161716 - DNA, 606 bp, Enterobacter cloacae
atgaagcaagtgcaactgatttgggcgcatccgcgcgccgactctctgaccgccagggtcgctcaggcgatcactgaggaactgcaacagcgcggctggaaggtcgccgagctggatctgtaccgcaccgggtttaatccggtactgcagcccgtcgatgaacccgactgggccgatcccgataaagcgtactcctccgaggtcatgaggctcgcctcggatctggccggcaaggacgcggcgttcattgtgttcccgatctggtggtactcgactccggccattgtcaaaggctacatcgaccgcgtctggaaccatggcatcttctacggcagtggccgcagactgccgttcgatagcgtgcgctggatcgccctggccggcgagtccgaagcctcgttcaccaagcgcggtctggacaagagcatgacccacctgctcaatgtggggatcgcgggcttctgcggtgccaaggacagccaggttcacatcctctacgacaccctgggagagcaggcaacggatctgcctgcccaacacgcggcgctgctcgtgcaggcgcgtcgcatggcggccgattgggccgaggcacagcctggcgcctga

SEQ ID NO: 161717 - DNA, 789 bp, Enterobacter cloacae
gtggtggaggtgcgcggttcctccgaggtacgggcggccgacaggaacattgccgcgctggcgagcgatggcctgtatcgcaccgatcatcatctggcgatcgagcaaggacgagccaagcctggccgcgatccgcaggaagtcgtcgcggcccacgtccgccgactggaagccctgcgccgggctgggattgtggagcgcgtggtcgatggtttgtggaaggtaccggacgacctgctggagcatggccgccagtacgacgcccagcgactgggcaatgtagcggtggagctgaaatcgcatttgcccatcgagcgacaggctagggtgatcggcgcgacctggctcgaccagcaactgatcggcggaggcaaggggctgggcgacctcggctttggtggcgttgtcaagcaagccttgcagcagcgcgccgacttcctcgaagaacaggggctggccgagcggcgcgggcagcgcgtgattctgacgcgcaacctgctgggcgcgctgcgcaaccgggagctggcgcaggcagccaaagacattgcggccgaaaccggcctggagcatcgcccgatggcggatgggcagcgcgtggccggtgtctaccggcgctcggtcatgctggcgagcgggcgctacgcgatgttggacgacggtatgggattcagtctggtgccgtggaaacccgttatcgagcaaaagctggggcaacgggtcgcagcgacgatgcgcggggtaagtgcgtcgtgggaaatcggaaggcagcgtacccattcgattgggtag

SEQ ID NO: 161718 - DNA, 1557 bp, Enterobacter cloacae
atggctagcgaaaatgataaaaatcataaagttagagtcgcacagtacttgaggatgtctaccgaccatcagcaatattctttacataatcagtccgaatacatcaaagattatgctgaaaagaacaatatggaaatcgcttatacctacgatgatgcaggtaagagcggagtcagtatcgtaggcaggcattctttgcagcagttacttagtgatgtagaacaaaagaaaatagatatacaggctgtattattttatgatgtgagccgttttggtcgttttcaaaacagtgatgaagctgcatattattcctttctatttgagagaaacggtgtagaccttatatactgttctgaacctatacccactaaagatttccctttagagtcttctgtaatactgaatataaaaagatctagtgctgcatatcacagcaggaatttatcagaaaaggtatttataggacaagtaaatttaataaagcttggttatcatcaaggcggcatggctggttatgggctgagacgtcttttagtagatgaaaatggcatagctaaagaaatattgagtttccgcaaaagaaagagtattcaaacagatagagtaatattaattccgggccccaaaaatgagataaaaattgtaaatagaatctatgatctctttatagattataacgtaccagaattcattattgctgagagattaaatgaacagaatatacctgcagaaaatggaacattatggactcgtgcaaaaatacatcaaatcttgacaaatgaaaaatatattggaaacaacatatataacaaaacctcatctaaactaaaaagtagacttgtaaaaaaccccaaacatgaatgggttagatgtgacaaagcatataaacccattatttcaaagaaaaaatataataaagctcaagatataattcagctccgatccatacatttgactaatgaagagcttttagaaaagctaaaacaaaaattggaatctaatggaaaactatcaggatttatcattgatgaagatgatacaggcccttcatcttctgtttacagaacccgatttggtggtcttttaagagcatatactttgattggttataagccagaacatgattacagctatctccaaataaatgaagcactaagatcattttactcaggtataattgaggattttaaggggaggattttaaaaagtaactgctatatagacgaatataaatatgccccaatgctttacatcaatgatgagcttttaatttccgtccttattactaaatgcatacatatgaaatcaggtaaacttagatggaaggtccggtttgataactcacagaaagcagacataacaattgttatacgaatggattcacaaaatatttcgcctcttgatttttatatcataccaaagatagaaaacgaatatagtaaaatgtgcatgacggaaaaaaacaacattcgattagatctctatagatttgataatctggataaacttctacaaattattactcgaatgaaagtgagggaactatatgctgcctga

SEQ ID NO: 161719 - DNA, 1263 bp, Enterobacter cloacae
atggcactaactgaggtaaaagtcagaaatgcgaaacctactgaaaagcccgtcaagttaacagatggggatggtatgcatctcctggttcaccctacgggttcaaaatactggcggcttcaatatcgcttttctggtaagcaaaaaatgttggcgcttggtgtttatcccgaagtgtctttagcagaagctcgtcgtagaagagaagaagcaagacaactcattgccaaaaatgttgaccctggcgaaaagcgaaaaaaagaaaagattgaagagaaaggcttactcatttttgaaactgttgccagagactggcactcaagcaacagaacctggtcagacagtcacagaactaccgtattaaacagcctgatcactcatgtgtttcctgttatcggtaagcggaacattactgagcttaaaactcgtgatttacttgttcctctgaaaaaagcagaggaaactggacatcttgaacttgctgcccgtttacaacaaagaatcactgccatcatgcggtatgctgttcacaatgctttgattgaccaaaacccagcttacgacctcgcaggcgctgtaaccacggccaagagtaatcaccgtcctgcccttcccctcgaacaacttcctgagctcctcaaacggattgatgcctataaaggaaaaggtatcactcaaatagcagttcaattaactctactgactttcatccgttcaagcgaacttagattcgctcgttggtcagaggtgaatttcaaaaactacttatggacaatccctgcagaaagacaaggattggagggcgtaaagtattcaaataggggctcaaaaatgaaaacccctcatcttgtgccgctaagtaagcaggctgttgtattatttaaaaggctccaagttataagtggagaaaaggatcttatgttcattggttttagtcgcgatgacaaaccaatcagcgaaaacactgttaacaaggctcttcgcaccatgggttacgacacgaaggctgaagtttgtggtcacggttttagaactatggcttgtagtgcattaattgaatctgggttatggtcaagagacgccgtagaacgtcaaatgagccaccaagagcgaaactcggttcgggcagcatatatccacaaagcggaacatctcgaagaaagaaagctcatgttacaatggtgggctgactaccttgatgccaacagaaaagaacacattacaccgtttgaattcgcccagagaataaagaaaatgagttag

SEQ ID NO: 161720 - DNA, 816 bp, Enterobacter cloacae
atggcagaacccgcttggctcggatatggtggcttggcagcaagtgcattttcagcagttgctgcgtacttagccattagacaatccattattcaaagaaaaatctcgaataaagtccagataatcactaaagatgtaaaaataaagttagataaaacaaaaatagtaaataacattgcttttaacgttctgttaaagaacatcaattgctccctaccaatattgaatattggtctcggcccagcattaaaatttaaatatcaatgggtatttgactacgagaaattcatgttcttgaatggaatcaaaaaacttgaaagtaaatataattgcgaaacagcagaatacagagaagctattcgtgccaatgaatactgctaccaattcaataaagaggggcacatttatatatctattttaggacatagtgaatcccgttggtactcccaagaagaaaaatacttagatgtagtgtatatccttccctggagcgtaaataaagaggaagtgaatctttccatccctaaattaataccgattttattatctaattatctccttgataaaacacactcgcatgatgaaatgttaacatcaatagatggtcctgacctaataattgaatatgaagatatatcagggacgataaaaaaagagattttttcctctaaatataaaatcaacgcattcagtatacggggcgatacagtagaggctactttcagtatgacattctcacatggcataagttggactgccttagtactacaaaggatacgtaaaagatacgatgaatggaaatccgatttaatttga

SEQ ID NO: 161721 - DNA, 1176 bp, Enterobacter cloacae
atgggcacgaaagaatcgtctaaactcccacgcggcgtaaccatcaggaagcacagcagtggtgaaaccatcaatataacgttcacatacaagggggtgaaatgcagagaacccctttcaaatctagaagtgaacaacaaaaaccttaaatatgccgagcgtacgctcggcgaaatccacaacaaaatcgagcgtggaacatttatctatgctgagtatttccctcgttcggtgaggttgaaaattttcggtaattctgccaccgggaaaacagtgaaaatgtatcttgatgaatacctgaagatctgcgaaacgaggcatctttccccctccaccattggcgggtataaaaaatgccgtagcgcactgtctgaacttcacattttccctgccagtgagttaacgccagcggcattgaagcattggatccagagccagaagacaactctcaaaaccatcagaaaccagctttcttttctgcgctcgtcacttgatgaagcagtaactgatggtgtgcttcaaattaatccagtttcactggttacagcatcacggtatcaaagcaataaaagcgatgcagaaagtagctatattgtggatccgctgtcaccagctgaggtaaacgcgctattaacatcaacaggcaataagcagtgggagaacttattcaggtttgcgatccagacagggcttcgcagttcggaactatgcgcactccgctggagagatattgattttgttgagaagacggcgcatgtacagaatgccagcgtttctggagtaacgaaaggtacgaaaacgaaggcgggcatacgcaaggtagaattaaccgaggaagcgatggttgctctaaacgaacaaaagccatttaccttcatgaaggatggctgtgtctttgaggatcccaagacaaacaaaccatgggccagcgcggatgccataaggaaaaaagcctgggtaccgacgttacgaaaagccgggatcaggtaccgtaatccttatcagactcggcacaccttcgccacacgcctgatcagccgcggcgtaaaccttttctggctagccggccaaatgggccacaaagggcctgagatgctcttccgtcattacggacgctatctgaaagagtatgataacaacacttcaatcacaaccttgaacaaagttaagaattga

SEQ ID NO: 161722 - DNA, 573 bp, Enterobacter cloacae
ttgaacgacttaatgattgacctcgaatcaatggggaaaaagccaaacgcgccgatcgtctcaattggtgccgtattttttaaccctcaaacaggtgaacttggccaagaattttatacggccgtctcactcgaaagcgcaatggttcaaggggcggtaccggatggagaaacgattctttggtggctaaaacaaagccctgaagcgcgctcagctatttgcgttgatgatgcgatgcctatcactgatgcactgtcggaactaagccatttcattcaccggcacgcagataatccaaaatacatgaaggtctggggtaacggtgccacctttgacaacgtgattctgcgtggagcttacgaacgcgccggccgcatttgcccttgggccttttggaacgatcacgatgtgcgcactattgttacgctcggtcgcagtgtcggtttcgatccgaagcgtgacatgccttttattggcgatgtgcacaatgccctagctgatgcgcgacaccaggcaaaatatgtatcagcaatttggcagaaactgatccctaccaccagcgacaaattttaa

SEQ ID NO: 161723 - DNA, 666 bp, Enterobacter cloacae
atggacttattgagccttctagaggtgttgaagcctctcgatcacgtagttacagttaaagtgagtaatgatgtcggattgtgggactcactcagtaaatttgcggttgcaataattccagccttaatttctttccttgcactacttttttcatattttcagtttaaacgtaatgttaaatatcaaagcgagcaattttctttaggcattgagcagcagttaatggctttaaagttaaacaccagacttgctactgaaatagaactaaaaaaagatgtatgcaaagaagttagagcggcttttgttggctttatgaaatatcatgtagaggtatatcagagtaaagtcagcttccagagacttaacgataaaattgatgatgaaagcattaagcaaaaaatagagttaaacaatattattattagtaaaactcatttaatgatagaaagcaaaatgcttcttgattcctatttagacttaaatgacccagaagataaagaattttttgatcaacttaatgaaactacagatattgcagttaaagggggagacggttctggttatgatttaggatattcgcaagggaaatgtagtcgacaatgtttcaaatacattgaaagaagacgtaaagaaatcaccagcctggtagatactatcggaaactga

SEQ ID NO: 161724 - DNA, 339 bp, Enterobacter cloacae
atggtttttgatttcgtcagccatgccagcaattttttcgttgctgtccaccgcgttctcaagcaggtctttgaacgtgtcggaatctttcatgtcctccagaatgtcattggttatttcgctgacatctatcgaggacgtgcccatgacccagtcggtccagtcaccggcattaccgatacggtcaatcaggcgcgcgcggtaccactggcgaacgccggcaggcatgggaccatgctgataatctgcagccgggtatggcaccaggaccagcagttcaggattggcaaagtcagaggttgtggcgcgctgaatctctgtataggccgtgtcgcctga

SEQ ID NO: 161725 - DNA, 279 bp, Enterobacter cloacae
atgctttcaatgaaagaagcttacggtttcgttgcgcagcatatcaaggatttatatgaatcagctcatgatattagactagaagaaatcgatcatcccactcctatgattgatagagagattgtagtaacggtcagcttccttttgccagcgtcagcttcgacttctggtattggttctcttctggctgtttcagctgcacaaaaccgaattttcaaaaaagtagtcataaatgctgaaactggtgatttcattagcttgaaaatgctgaagtcctaa

SEQ ID NO: 161726 - DNA, 486 bp, Enterobacter cloacae
atgcttgttaaacctgttttgattgatacgaaccttctcctgctatacctagtaggtttattttcggaagaagctatttctcagtcaaaaagattgagtagctatagcatcaatgatttccgcttacttcaaaagtttcttgatggcttatctaaaatattaatcacaagcaatatagcaacagaaatcagtaacttgattgattttaacggtgagtcattaaaaagattctacgcaatttttgatgcattccttcaactaccgcaagtcgaagaagtacatttggaaagtaaattaatttcttcaagaattgatttttcaatttatggtttgactgatgctggcattaatagtttagctaaaaaatttttaatacttactgatgactcaagattatattcatattactgcggtaatatctgtacttcatctgatccaaataacgaaattattaatttttatcatattatccaatcaacttggtaa

SEQ ID NO: 161727 - DNA, 162 bp, Enterobacter cloacae
atgatgcaaaaccaaacggaagaagcaaaaagaatcttaaaaacagatggttacagcggatctaacccggtgttatctagactgatggaagaagttagaaatgaaaaaaacacaacggtaggtagccgttatgatcgagtccataatcgccataaccgttaa

SEQ ID NO: 161728 - DNA, 1011 bp, Enterobacter cloacae
atgaatgataccacgatagaaaaagtggtggaaaggattacggaatatagtcttttacaggaaactggatttgccatagttttacatggaggtgaacctcttcttttgggggaaagaagacttgagagtttattgtcaggtttaaggagagttttaaatcctcaaaaatacccgataagtatacaaaccaatggtgttttgataactgtgaaaattttgaacttatgttcaaaatatagagtaagcatttcggttagcattgacggcacaagaaaagctaatgatatcgcgaggtttacacgtggtggtaacagtagttttgaggatgtaattaacggaattaaaaaattaagttcacaccaagaccacgccttcttgtttgcagggacattatcagtaatacaaccgaatattcctgctgaggatacatatcattacctgaagagtataaactctccaagtatagattttctatttcaggatggaaattatgataggatgccttatggaaaaaaagatcttcaaactactgaatatggacagtggttagctaaagtatttgaactctatatggaagatagcaatcctgttccgataaaaatactggatgatattctcaagatttatttgggtggttctccaataaaagaagggaaaggaaataatgagtttggtattttgataattgaatctgatggagagattagaaagaatgatacattgagagcatcatttgaaggtgtcgattttttcaaaggacgtccgtctgttcataatacttcattaatggatgtagtagaaagtgaagaatatataatttatacgaaatcatcttcacctttatcagcagaatgccagttgtgtgaatataaagatgtatgtggtggtggaatgccattatatcgatggagtaaaactaaggggtttgataatccatcaatatattgtgcggatcataagatagtgattagtacagttaaaaaattcttgcagcggtctaaattattatga

SEQ ID NO: 161729 - DNA, 1494 bp, Enterobacter cloacae
atgaaaatgacacgcttagaagctattaaagcatggggaagagcaagccgtgaaggtaagcctattcccgatgatgttagaaaggttctgatcagcactcaaaatgagtgctatcacgatttcggtatagaagctcctacagctaaagttagagttagcaaagagcaagtaaaaaggaatttgaacggtaagaagccgttagctacatctggtactatccgtagtacgggaggtgctttaactcctgaacaaatggaaatatacaaccaaaaacgcaagttagataatcaaaagcgtaaaaataaccctcaactttattcaaagctaatgcaagattttattgcatctggtttatctaaaaaacaagccgctaagaaagctagagcaattattttgagtgcaaatctagataaactaaataacgataaaaaaccttctgctgtcagaacaaaccgaattattaaatccaatactttacctaatgaggagacgattaaatctgatccttggcacatagcaaaagttaagcaagatgcgatcaatttatctaatgtcgaacaaagacggttcgacacagcacttttaagacgtcctatttcatgtattgaatgcaaaattgactttaaatcatttggtgcatttgtagatcatactaatgatgttcatcatactagcgtaagtacacctaagttaattgtagaaaatgaagcacctattgatattgtggatatagtcattgagtcgcctgtattgctatctactgagccagtagagccagttgtttctgttcctattgccaaaacgccagaatcatttagtgacaagtggatcaggttgtttgcagataaaggttacagtgctgcaatggttaaagcgtttaaacgggatgcaattaaagagaatatgacggcattacagatacatgattttcttagtgtctgtaagccctataaagcccctctagaaacacctgtacgtcctctagaagcgattattgtccctgactctgaacaagaaaacaccattacagaggccatagaaacgcttgtagaagcacatgtagcatctgttgctaatgattcctcctacgctgttaccctcgctgattctattgagcaagctttgtttgctgatcgcattgttcgtagccgtaccaatcagaacgagtttaaagaacgtgtagccgctaactttggttatcgttgcgctattacgaatagcggagaagcgttagaagcagctcacattgagccagtaggaacggggaacaataacacttctaatggggtgcttctgcttgcttgtttgcatcgtctttttgacgctggattgatggctatcgagcctgattctcttacagtgcatttcaaggctgattgtacatactttgctaaaagtacgttggaaggtaaaaaactaaatgatcactcagtacctctgaacaaatcaggattgttagaacgctggcttagctttaatattgatagaatttag

SEQ ID NO: 161730 - DNA, 1155 bp, Enterobacter cloacae
atgcacaatttattaaatatgctgcgctataagagcgagggtactgatattgacttcaaatctgcacagtaccgctttaccaatggctctgaaaacgataaatcagaactgcttaaagatattcttgctatagctaattcctggcgcgatggcaccggatatatcctattgggatttaaagatcagcgtcccaatcctgcggaggtagttggaatccatgacagcattgatgactctcgaatccagcagttcgtgaacagcaaggtgaagccgaagcttacattcagttatgaggaacacctgtatgaaggcaagaccatcggcattatttcgatccccaaacagaagcgcccgttttatctcacgagtgcttacggaaaactcaaaagcaatgtcgtttatgtccgaagaggaagcagcactgatgaagccgaacctgtcgaaaccatagcgatggggtatgaagacaatggtcgtgcggagatgaaaatcgagctctccctgcggacacctgataatgacactcttcccctcaactttacccacacttaccttcatttcactgaggagtttccagactttgaaaggccctcaaaaccacttgggccttttgacatgcctagtgtctcaagcatttatagggacaataggaatttcttccgcgagtatgcagaatatatgcgaatcaataaagcgcttattatgctaagactagtgcttctcaatcggtctggcgtgcagttgtccaacgctaaagttgaactaaccattgagacaacagatttccatgtgaatgtaatcgcagtaagtgatttgcctgaaaagccaaaaccaacgcgaaatacgctcgacttcgggaccattaaaggcggcccattgtttaatagagataacaagttggagataatcgaaggtgcccaaaatccagaatgccacattcgcttaggatctctattgcctggggagcaggccagttcggagctcattgcagttttgccggaaggtccgggacgcatgcgcattcgcttgcgtgttttaggcggtgaattggccacgccgattgagcaagagtttgcagttgagacaatgggtgatcgtctctctctagactttaagggtttcagagattacgtcaccactgaacaagcgaagtga

SEQ ID NO: 161731 - DNA, 312 bp, Enterobacter cloacae
atgaaagctaagaaaaccaaaggcaacaaatccaaaaccagcaaaccccaaattattacaataaataacaatagcgtaataaatggaaaactgatgtgtactgtaatcatgaatgaagacgatcttaaagcctgttttgagacacttccaaataaatatggagaaccaatagtaggtgattacaagggagtattgatgagttttttgtgcaattcaatctggtatggattcggtaatgctattgttgatgtagttcttgatgatgctattagagagcaagtcaaaaaacttgaagaacaaaataaaatgtaa

SEQ ID NO: 161732 - DNA, 1203 bp, Enterobacter cloacae
gtgaagggtatgcggaagatcaagaggggtaagaactttgctggtgtggtccaatatgcattgaagccaggttcacatcataaaagtgatccaatcgttattggcgggaacatgttaagtggctttgctcttgaactgatttccgaattcaatggcacaaaacagcttcggccagatgttcagaaaccggtttggcacaactcgcttcgcttacccaacggtgaattactaacgaatgaacagtggtcgagtatcgcagatgactatatggaacgaatggggttcagtgatacccatctccgttgctatgtcttacatgacgacgacggtcagcacatacacattatcgccagcagaatcgacatggccgatgggaagctttacttaggtaggaatgaaaacctcatcagcacccggattatcagtgaaattgaaatcgatcataacctgacagttaccaagactgctcctgcgattgcaccaaagcaaccgaagcgaaaaagaatctctcgcaacgaacaaatgctatcggcccggactggtgttccctcccctaaggaagctctccaacagatacttgacaaaagtttggcagatacacctgaccttttaaccttcacaaaacgactggaagaagccgaagtcggctggacggcgaatgtcgcaagcacaggcaaaatgaacggcttctctttcgaatacacaggcatagctttcaaagcttcgcaattgggcaagagctactcttgggcaaatctcagtaatcggcttaactacaatcccgaccacttagaagctctgcgaagcgacatatcgataaaagaccaacctgctgctcctgctcctgctcctgctcctgctcctgctcctgctcctgctcctgctcctgctcctgctcctgctcctgctcctgcaacagttttgaaaaccactgagagaaaggaaagcataggtgaaaaaattgctgaactcgaactgcgactcagagaagacagaagaaaagaaatagtagaaaagattcttcaaaaaaacgcagtacaacagcaaaagcatctcaggtttatcgcctggtttccatttcttagaaggtttgcagagcttcttcgaagctatggtaagagcattcttcacaagcccctccctggattctcaaatctcaatgcaactcagcatctcagtcggaaaagaaaaattcgtttttag

SEQ ID NO: 161733 - DNA, 402 bp, Enterobacter cloacae
atgagcgaatctataaaaatactaaataacattcgtacgcttcgtgctcaggcgcgtgagttttctcttgaaactcttgacgaaatgcttgagaagctgactactgtggtagaagagcgtcggcaggaatacgtttcctatcgcaaggagagggaagagcgtcaggccaagcttgaagctttccgcctgcaactccttgaggatggcattgacccggcagagctgctctctggtttgagttcgtcctctaaaccaaaatccaaccgtgaaccacgaccggctaagtacaaatacatcgatgaaaacggtgaacagaagacttggactggtcaaggtcgcactcctaaagctattgccacagctattgaggctgggaaggctctggaagattttgcgatctaa

SEQ ID NO: 161734 - DNA, 1317 bp, Enterobacter cloacae
atgaagggaatgcaaaaaatccgcaggggtaagagcttcgcaggggtcgtgctttacgcattaaaaccagcttctcatcataaaaaagatccgatagtaattggcgggaacatggatggaagcgatgtcggagagttgattgcagaattcaatgcgactaaaacgcttcgcacggatgttgctaaacctgtctggcacaattcgcttcgcttgccgaaaaacgaagcgctgacagatgctcagtggtcagggattgctgatgattacatgtcccgaatgggcttctctgaaacgcacctcagatgctatgtccttcatgatgatgcggccggccagcacatccacattattgccagtcgtatagatctatccaatagaagtctttacttgggcaaaaatgaaaacctcatcagcacccgtatcatccaacagttagaaatagatcaccatctgaccaaaaccaaagggccagaatcggtagcatcaccatacccagcttcgttatccagaaaatccccgccccaaaaaccgataatcgcgataccgaagcctaaaaagctatcgcgtaacgaagcgatgatggagaagtataaaggagagctatcacccaaatcggttattcaggaagccctggaagcattacttgtcgataaaccatccaccactgattttgtgatgcagcttgccgccaacaatatcaaagcgcttccgaatattgcctcaacagggaaaatgaatgggttttcattagaatatcaggggattgctttcaaagcttcgcagttaggtaaaggttattcctggtctgccttacaaaacaggctagattaccagccggaacgcgacaatgctttcctgtttgcattgaaaatgccctcagtcagtaaggcatcggttagcgaagcgcctgatagtgccatagcaacacatccacatgaaatcacaacaacggaagctaacagccccatagcagcgcttatccatgataacagtgctggtcaggacgaatacactaacgcttcagtcaaaccgattcacttagaagcaggtgctggtgctcaagaagcgtttgcaaccgaagagttaaaagtagcgcccaagcgaagctatgcagtgtcagcgttcaggtggttggaatacatcccctacctcgatgtaatttatcgtatgttgaaaaacctcaaaatccccccccttaaacgccttcgaaaacacaaaaccatcactggcgtgagaatgatagagataacatcatcaccccccaaaactgccattgaaacaccacataaatcgcatagagcttcgctttcaatgtag

SEQ ID NO: 161735 - DNA, 204 bp, Enterobacter cloacae
atgaaaaataaaattattttttactttgttttaatagtgttgttatttattttgccaatttttttttactggggttggtggtttcttttcaatgaaaagaatacactttcttacatgagtgtattctcatcattatccataatattaagttttttatatgtgccgttgttggtgatatttttttcaatactttttaaaaaatag

SEQ ID NO: 161736 - DNA, 933 bp, Enterobacter cloacae
atgaaaattgaagaaaaatatgatcttgcaatcggaaaccctccattttccaaggtaaatggtaaatgtgccaaaaagggactttatattgatcaagctataaacaaagagacattgaatctttctgcaatgtttcttgaaaaatgcatccaaaatagtgaatgtgtttctttagttttgaataaaacgattttgagtaatcacgaatttcgaatttccagggaaattctaagaaaaattgagattagaaatattattgactttggacgctatgggttcacaggtgtgtccattgagaccatgaatttaatcgtattcccgaaaaataagccaagtaaaacgctcatctataatatgaagcataatcttcaaatgttgcaatcacaagaatacattactgatccaacattcccttgctttgttatttatcgagatgagacatttgatcttgttgcaaataaacttaatttcgactgttttaatgtttatagagatagacaaataactaaaaaaatgacttctgattatccaggtaaaaactcactatgggttctcaaagcaaaaaacatcactgataataatagtgtacaacacattcagaattatgatcagtatattgacgaaaaatcagcacaagaacttagcgtttataaatttataaatgatacaagcgtatatttaacgccaaatatgacctacaatccgagaattgtgaggaatgtacctaataccttggctgacggctcaactgccatattaattccaaaaacccctacggagttaacggaaaagcaaatagcttatttttctagtgatgaatacagaaaattttatagcattgccagaaatttatctactcaatcaattaacgttgacaaatcaagcgtctttttctatgggatattaaaaaatgacaccaaacttgatagctaa

SEQ ID NO: 161737 - DNA, 603 bp, Enterobacter cloacae
atgacaccaaacttgatagctaaatattttagcactagaaactttgatattagacaatctggaaatggaagatggatagatcaaaaatgtgctcttgactcagtttgttttgttgcagactgcgttgttgaatatcttcgggagggaggtattcaaccatttcattcacctgatatttggcgttcagaatatgccgtaaggagtgtgcaactttggtttagcaaaccagatcctttgacaccatcgacacttgatgaatacaataaattttttagacagccactaaagatgctatgtgcagcagatgtattagaagaaaaattagtgggtaattcaattgaattctctgtaaaaaatatggatatattagaattcatatctattcgagaacgtaatgcatatgaatttctttgtctttacatcgaaaaaacccttaaagatagtggattatgggactcgtttgaaactttctttgacgagcaaactaatgaatcgcttcaatatttgaaatttaaatttgctgagttttgcattaagtatacaaaaataaatacgcacgttgaagcaaatagaatttttattaaagtattaaatccaacctaa

SEQ ID NO: 161738 - DNA, 894 bp, Enterobacter cloacae
atgcctacaatctcgtcgtctaaagtaccatccccaaagtcttgggatgaatttgaagaaattaccttatcggcagccaaattgcgttggaactctactgatttttatcgttatggacggcagggacagaaacaggacggtgttgatatctggggatatgatggtaaacgccacatcggagttcaatgcaagaatacgacaggcgagctgggtttggctgttgttgaaactgagatagcgaatgctgaaaaattcatgccaaaactggagcatctctacattgtcacgacggccccaagagatgcgaaacttcaaaaatcagtaagggaaatctcccagaaacgtagcaaagctggagatttcaggatcgatgtgcttttctgggatgacatttgcaatgatttggcaaaggatgaagatgtattcttcgggcactatcctcaattcaagtctgatgataatccggggaaaaagcatgacattgcattatggagtgaactcacgacgttgcttcgctctgatggtgtgattagtttcttggatcgtacaaacatggccgggttttcgttccgtgaatcgcagcttgaaccgattcgtgaattttatttcgagtggaacaacccggagcacgagttcattacgcctgagttagaaaaaattaataaggaactttggtcagaggttgataggtactacaaccttattgccaatgaaacctttccagcaaataatccacaatttagtacagtaccccctgaatgggagtttgaacaaccagataggttttggcgggttgtgaatgcgctacatgatcacgctgggaagatcgtaaaactgcacgcagaagttgtacgcatcgggcgagggaaatttttgaacagtggtaataaataa

SEQ ID NO: 161739 - DNA, 621 bp, Enterobacter cloacae
  misc_feature (598)..(607): n is a, c, g, or t
atgactaatttatcttatttattttgggtaaacccaattaggtataggattactcagtcttggactggttatgattctacactggaaagccattctagattgcctgatatcaaatcagttattgcgattgctgagattttttcaaagagggatgaacaattatctttaagagacatatttactacatctgtgcttgctttacttatgtgcgcaccgagtaggatatcagaaattttagctttgccagcggattgtgaaattacagaatgtgatggaaagggcattcaaagatacggtttgaaatttttttcagcaaaagggtatgaaggtaatataaaatggattccaactctaatgatacctgtagctaaaaaggcaattaccagattaaaagaattatcaagtcaagcgaggttattggctgctgaaattcagaaaaatcactctaattcaacgatgggaacccttaaagagaatatacctcaagatttcccttggtatgatagagagaagaaaattgaatattctaatgcgctttgcttgttaactgaaggacagttaaatcaaaacaaaaagaaaatgttagataagttattcnnnnnnnnnnaaaggacattttaa

SEQ ID NO: 161740 - DNA, 390 bp, Enterobacter cloacae
atgaataatatatttatttttgaaccaagtaatataaacaacccacactataatgttattaagttcatcgagttttgtaaggataccatttctaataataatttaacaacttcctgggaaagcaataaatggaaaggtttatatagatttactaagtttaacttaaaaaacaacctcagcagcaaggaacgcttagatgatagttttattaattttgctaaagcatatatgttgcatgtgcattcattcaataaagctaagacgaaacactcaacattatcaatgttgaagattgtagaattcgttttactgaaaatcaatatggaagctaatgtaagctattgcaacaattcagtttttgatgaatgcataagaatagcctctgaatag

SEQ ID NO: 161741 - DNA, 225 bp, Enterobacter cloacae
atgctgttagggtttgttgggcttggtgctgtggttgaaacggcttacttaccggcaatacgaaatctttttcctgatactccgcgctgtttaggttttgatattcatcccgagaagcagcctgaaggggtcacacgttgcgcgtcgctcggtgaacttctttcccacccgctggataccctgtttatcaccacttcctccctgtaccatctcgaggtactttag

SEQ ID NO: 161742 - DNA, 231 bp, Enterobacter cloacae; identical to SEQ ID NO: 129799

SEQ ID NO: 161743 - DNA, 954 bp, Enterobacter cloacae
atgtatcgcataagccctgaaaacattagtaagcatatcaatgaaatatcatccctaagaattggcagttataaatctttttttaaaactgcgagtgatgaagaggcttatgggatatattgctggaatggggagctttcatcaagaataagcttagcaataggtatttatgaagttttgctacggaacaagattcatagcgcattaagcaacttcttttttaacaacaaaaatttctgcaatggacccttaaatggtacagtggattcctgtgactggtataatcatatatccacaacttcgaaattcagttcttatataaaaagagagcttaccgacgaggacggtaagttattatctccgcccccataccctcatcaaatcatatcaaaattgagccatggcaaatggagatatgccttcaaagtaaccacagcctcaaatggaaagaacatcccgtgggatagcttacttcctagtgttttcccagagtaccgttctgactttaaaaaacctagtgtgaaagaagctgttttcatgcgactgaaacaagttcatctactgaggaataggatttcccattttgaaccaatctggaaatttggagacttaaaaaatgaagctggtaacaaatcaataagaaccgcaccaaaaaacactctcgagtgtcttggtaggaccaaaacagaatataaatatatagtagatatcatctcttggatgtcttctgacatgtatgacttctatgaaaaaactagaaaccacaaagaaaccttagatctcttggaactagatgccattaattcttttaaagaaaaatcacaaacaataataattgatttagattctgaaaatctttcacaggaaatagaaactgccatgtctaaaagtaaacaaagaaacaataaagtggagctaaggaaagccgggaaatttgtagcaattttgcgctag

SEQ ID NO: 161744 - DNA, 150 bp, Enterobacter cloacae
atgaatacgatgaaaacgtttcttaagcaaaaatatcttttaaaatcaatgacatacttaaaagagagcctgtcactgaaggcgacagtagaacgcgtacgcgctgcggtgtgcaacaccttcgctgtcgccttcagtgacaggcactag

SEQ ID NO: 161745 - DNA, 201 bp, Enterobacter cloacae
atgaccaggtcccccgatccacgacaacgtactgagggtttccgtaaagcggaagcttcgctgaggcttgaaggcatggaccccgccggaacgccgctgtacgaaagcatcaaaacgcgcattattgccggggacatcacctacgaacagggacgggcggaaattctggctcattaccagaagcatgcggacggccactga

SEQ ID NO: 161746 - DNA, 186 bp, Enterobacter cloacae; identical to SEQ ID NO: 122330

SEQ ID NO: 161747 - DNA, 153 bp, Enterobacter cloacae
atgatgggttgtcgtgcctttgtctttaattccgtgactttcgcaatgttcaacactttcgtcaaatatatctataaggctaagataattactaccaattttagcaatttgtcctgccatatcactttttttacttttaccaacgtgcattaa

SEQ ID NO: 161748 - DNA, 285 bp, Enterobacter cloacae
atggaagaggccaacaaaaaactgaaatctttgcctgagtggaaagactacatcgttaaccactacggcattatgcgaactggtatcggaggacagtctggccgtggcttcggtttcgcgatgctatccacgtatggcggtaagcacccgggtcgtgatgactgcctggtattcgctatcccgaacaacaaagaagagcgccacggtgaagtagagataccgggaaacttccagaaaataacctacgggcagttttacgacatcgttaaccatccgaatgaatga

SEQ ID NO: 161749 - DNA, 273 bp, Enterobacter cloacae
atgcatcagcgttatcgccgcattattgccagcgccctggccctgagtcgtttcagtctgttcatccccactgtggcccaggccgggtacagtgattacgagtcgttccatctggtcagaacggataacagcccctcgggcggggcacagaaaatctgcacctatcaaagtatggtcactcggaaatatgtccagctggaaatgcccaatacctgcccgggaatgatgtttcgaaacctgaacgacgggcagttttacgacagaaccagctga

SEQ ID NO: 161750 - DNA, 297 bp, Enterobacter cloacae
atgcctttaagcctttgtctcagcctgtcgaccttggtgggactgattatcgcgtttgttgatacccgtattgccgggttctggtattccgcatgggctgccgtgttgctctgcactctgccagggctgggcgtctggctgggcaatatcatccgaaaatggataatgccggatgcggtttatggaagcaccggtgccgtcattcaggcccgcctgttctgggcggtggtaccccagttcattggctggttcatcggatttatggttgccatgagcttgctgggtatccgggcctga

SEQ ID NO: 161751 - DNA, 240 bp, Enterobacter cloacae
atgctttctcccaccgtactgccacccgggtcattcagtcgtcagcaggcagaagctgttaccgcagcataccgcaatatcttcattgaggatgaccagggaagccattttcgcatggtcgttcgcgacgtaaaagggcagatggtctggcgggcattgagctttgaacctgacgccggaacggcgctcaacccgtatatccggcagtacggtatcccgcgagcgttatctacccgctaa

SEQ ID NO: 161752 - DNA, 459 bp, Enterobacter cloacae
atgacctctctcaccccctacgccctgaccccggctaatgagccgcacttcaccctcatggccaccgccgctcctgatgaacagcgtattcatttctggcctcagcacttcggcactatcccgcagtgggtagcgctggagccctgcatcttcgcctggatggaccgcttctgtgcggattacagcggtggtatctggcagttttacaccctcagtaatggtggtgccgttatggctcccgatactgatagtgatgagaaatggtgcctgctcaacaacatgaacggtaatagcgcggagatgagtgcagaagccgcaggcattgctgtctgcctgattgagttcagccatcacgcctgccgaaccgaatgctatgccatgacagagcactattaccgcctgcgggactacgccctgcagcatcccgaatcacaggccattctgcgcattattgattaa

SEQ ID NO: 161753 - DNA, 240 bp, Enterobacter cloacae
atggaaacctccctttccccacagacagcggcgttgtcactgagctcacaacgcacggtaaaacgcgcgctgaaactgctcgaccgccacctgcgtgagcctggtgtggcgttcacctccaccagcgccacccgtgactggctgcggctgaaaatggcaggccttgaacgcgaggcgtttatggtgatgtacctgaatcagcagaaccagctgattgcctatgaaactctgtttccataa

SEQ ID NO: 161754 - DNA, 426 bp, Enterobacter cloacae
atgtacatttacagtgcaaaaaataattcgttttacacgactgacctgaaagatgcatatgaatcagcggggtcatggccagatgatggtgttgatgtcgatgaagcaacatttaaggcgttcaccagcactccaccagatgggaaggttcgtggcagcaattcagatgggagtccggcatgggttgatattccaccgctaacacatgagcaattagtgtctgcagcagaggctgataaacagaaacggattgattctgcaaatgcgtatatgaacagcaagcagtggccggggaaagctgcgatgggtcgtctgagtgacgcggaaaaggctcagtacaatttgtggttagattatctggatgcactggaaacagtggatacatcaactgcgccggataccacctggcctgttcaaccagcatag

SEQ ID NO: 161755 - DNA, 3075 bp, Enterobacter cloacae
atgatgggtacgcgagataaggtaggcagtaacgccgaagcaagtcagcaggcagcagtggttccgtcaggttgtaaagcctgtaaacgtgagggcgttgccatttatcctctgcgcgtggccgcaattccacagcctctggtaaataccggttggcaacctgcggttcctacccaggatattgagctaaccgggggggagtttaaatatgcccttcgcaccttgcgtcagggctatgtttatgtactgctggacaaatcagtctggcaggcctaccaggtcaccgccgaaggatttttacgtcagttcaatgcctacgagatgccggaaagcgaaacagtggattcactgagcccagcatgcctgacgcaaaaccatgatgtgctggcaagcttcatcaatattgatcctaactactcgcaggcgatggtcggatttagcagcgatccatggtgtaaaacggtcctggatgaatataaaagtggaaagcgtcctgctacacgttttacgcaggttaccgtctcggatggaaaagcgacgatagaaggagcaagccgtagcctgacactcgatccctctttgtctgcgctcaaaagcaacgcgctggaatttgcgacggaatctttcccttccgtagtaggcaaagatgccgaccctgacggggcccatggtttttacccgcgaatggaaaagagcaagcaaaccgctctgggtaaccagattgctcagctgcaacagcagtatggcgctccagtaaaagccatcgtactggatgacgtcgtgggcgtggtggaggaaattaaccacggccgcctggatgtggttcaggcgcttgccacgtacacgtctgaaaagagtaacattcaccagaaaaccatttcagatgcgattgtgcagatacgggcatccacaacaaagcagactgaaaacgatccgaagattcagggattctccacgccgggttacagcacatcgtattccgtcagccgtgaaagtgcggttgctattgagttacgaaaagctctgggccgcatggaggaatactacgacgagcctgcgcgtgcggcttttgccagcagttggcagtcaactgtagacggttataagcaacagatggcagctatctggcaggatctcgacaacctgtatacctctacgctttggctgttgcttctgaataacgactactcgccggaaaccagcgtagtcagctggcacttccagctgcgaaccattaccgcttgtctccagggtagcctggccgggtgcgatactgaaaagctccaacaagggggcaaaaaaccgcagtgggcaggctggttggcagatccaatgagcccaccgctgatggctttgctgcgcaataagcatgatttttcagcagaagtgttcaatggatcgctgacctattcgaacctgaaagcagtgctgaacagcaaagaggccagcgcttttgttaacaacaaagcgtaccagcaattagccgcaagcctggtcagtgcgattggcggggcgtacagcggtctgtggagcctgctgtctgaatcagccaaaggcggtgtgttaaggacgttgcagggggtggcgtatgtggcggaaggcagcccggttgtaaccgtttttaccggggaaatgaccatccgggattatcagaatcttttgcgcacccagcttgatgttcatgggaaatcgcccctgactatgcagaccgaagaggctggcggggcaatgcgttcaacgcgtgttgggcactggttacaggttaccgacccggtcgtgctggagcaaaaaatccaggttcgcctgacggctccgctgagcaatcaggggaaattatccggcattaccatgctgacaccggatgtgattgataactcattaactcgcggtgaaatcgcgctgggcccggcagagatgcgcggcataggccgctaccaggccacaatatcgaccgatttccagagtggcctgctggggttgatcctggctggaatattgattaataccaccttcaataatattgaagccctgaaaacggcgatgccgggcgatacgcaggcgcaaatgtccatgacctcgggctcgctgattgcgctggcctgcggggttgaaatactgggccaaggctcggcggtgctgaacttatttaataaaggtgattttttgatccgcagtgccggggtaatcggggggctggctggcgctattgatggggttgcgttgggaatgaaaacgctaagtttgtggcgtgacggagactctacagcggctgctttctacggatttgcgacagcatcagtgatcgctagcagcacagttagtgttatatccagtgctgctggtaattttgccatcttcagtgaaggcgctattttattaggacctgtcggctggtgtattgtacttggtgtagtggctgttactttgatttctattggaaattcttacattctttcgcccttggaacgatggttgacacatacctgctttggtaaccgcgacgagtgtgatgagagtgaggtggtgtggcataaggagagcctctctgatatgcgcgaagccatgaaggcgctgcatgtcattgccagcggcgtgtctgcccaacttgtaggtgattggttcgccgatatgacgaacaacactcgattgctgggcaaccggatgatggcggctcgggttatccttgccgactgtagccctacgggctccgactggctggtagaactgaccgctacggggggcgggtcacatcaggtgctggcccgcagtggatcagatgcaaagctagcaggactaaaaacaccagaaccgcagagctatgaaacagcggcccagcagattggtcgaggagaattgacgcctatggtacccgccgtgatgacaaaggcaatatctgcaacctctctgaatgccagttggctggtcgctgaaggaaaaccgcgagggctgcaattggatggtgaattcccattgaacctgtcccgtttcactggcgcggagctgacggttacctactggccggataaaaccaaccaggatgatcgattacaaatgaccactgaactggacagctaa

SEQ ID NO: 161756 - DNA, 759 bp, Enterobacter cloacae
atgccactgctcacttttgaagaaccccaaccgagattaaatcctccagtcagctgctggcgggaagatatgcctgaaaaccacgagccgcaattagtgcctccccaactgcgttggttgacaacacagaacgatacttacctggaagtcccgcgttacagtacagaagtcatttggtggggaatgctttttacagcagttttaattttcggagtaatggttttctttgttattctctgcttgtcgatgtgtttttatctttttgcatctatcggcttctttatattttcctcaatgatatccttttttgttaaaatgtattttgttgttcctcgtaacctacctctccgctttaaccgtaaacggcaaaaaatttatatatttaactacaatcattcacgccttccatggcttaactggccagtctccatcagggtgtacaactgggaagatgtttacggcgaaataattttttcccctacgccaggagaccggggataccgtctgtatggtgcggtttgcaagccaggtacttataatgttgtagatcgttttctgttggcaagagaatgggaagagcgggagcaactcaaccaaatctggagctatctgtgcatctatatgaaaggcgagtccgatttgccggaaccgagatttaagggccgtccggatttctggcgaccgcgtaaggcagataagtggcctgatgaaatggaacgcgagtcaaccacagctccaactgaaactctgcaatcctag

SEQ ID NO: 161757 - DNA, 789 bp, Enterobacter cloacae
atgccactacttactattgaatcacagccaagactgaatccgccgatcagttgctggcgggaagatatgcctgaaaaccacgaaccgcagttagtgcctccccaactacgttggttgacaacaaggaacgatacctatctggaggtgccacgctatggtacggaggtgatctggtggggaatgctcgggagcgcgattttaacctttgggttaatggtttttatgttaacgatttctattttgatacagaatatatatcttataatcgtaacattagttgtatttttctcacttcttcttttttgcttgaaaatgtatttcgttactccccgtaaccagcctcttcgtctgaaccgtaaacggcaaaaaatttatatttacgactataaccggtcgcgacttccatggcttaactggccagtctccatcagggtgtacaactgggcagatgtttatggcgaaatcagtttttcccctacgccgggagacaggggatatcgtttgtatggtgctatttgcgagccaggtacttataatgttgtggatcgttttctgttggcaagagaatgggaagagcgggagcagctcaaccaaatctggagctatctgtgcatctatatgaaaggcgaatccgacttgccggagccgagatttaaaggtcgtccggatttctggcgaccacgtaaggcagataagtggcctgatgaaatggaacgcgagtcaaccacagctccagctgaaactctgcaattctggactgataaaacccgcctgaataatagcctgtaa

SEQ ID NO: 161758 - DNA, 414 bp, Enterobacter cloacae
atgccactacttaatattgaatcacagcccagactgaatccgccgatcagctgctggcgggaagatatgcctgaaagccacgagcctcagcttgtaccgcctcagttgcgttgcatgacaacgcggaatgatatttacctggaggtgccgcgatacagtacggaggtgtcgtggtggatgatgctaccaatagctattttactatcgggaatagcgcttgtttttatcacaatgtttttcctaatgagtttttatatattagttgttattggtttggctgcttttattccaatggtcgtatttgtgctgaaaatgtcttttgttgttccacgtgatcaaccgcttcggttgaaccgcaagcgccaaaaactctacctatttaaggctttgttgaataaatcagatttcgggtaa

SEQ ID NO: 161759 - DNA, 312 bp, Enterobacter cloacae
atgccccttctcaggttcgattgggttatgccagcgcagggttcggctcagaaccagtggaatcgttcggcgagaatcaacaataaacctgtggcggaaaggatgttcaatatcacaaccgttctactggatacgttcatggtatgcacctttgggtttaaagacctgttcaagagtagcccagcatcttcgaaatgcgagcgcaggggagaagcaacctgcaaattcgtgcgtaagcgccagcccatcaatctggccgcagagggtgcaatctcctttccgttagtgttaacattacgtcgcttgccgtaa

SEQ ID NO: 161760 - DNA, 1029 bp, Enterobacter cloacae
atgactaatatgatagaaagccatgatggaaacgagccaaccggaaaagcgaaaggcgggaaggcccttgcagaaaaaagaacccctgaagaacgaaaagctgcatcccagaaagccacagctgtaaggagggagttggcatctctgcctgaggttttttatggctcccctgatacgccgctggaaattgggggggttaaattagaatgctacgtattagatgacgcagataaaacgcgagtaatcacagcaggcggcgctggggttgggttgggatttcacccctcaagcgcgtcagcgcgactcgttaatatggttactagcgaaagaatattaccctatattaacaatgagttagttcatcagctccaaaacccaataaaattcaaatatccttcaagcaacgttgtcggcatggcatatccagctactattttagcggatatttgcgatgcgattttggctgctagaaaagaaaataagcttcagtcacagcagcagcacatcgctgcacaagctgaaattttaatgcgtgggttcgcgcgcgtgggcattgttgcgctgattgatgaagtcaccgggtaccagcgagatcgaaagagggatgcgctggcagcaattcttgaaaaatttgtatcaaaagaaatgcgcccatggctaaagactttccagctcgacttctttgaggaattatgcagagtttggggttacgcgatgccagaaaagcccggggcatatccacccgtttttgctcacgttattagagatattgtgtacgacaggcttgcgccaggggtccgctctcaattgcaggacttgaagaagaagcgaggcgggaaaatgcaccagtggcttaccggtaacgcgggatataatgatttaacccggcaccttggggagctcacgatgttattacgggtaactccagatggcgcaaaagatcaattcatggcaactttagaccgtttcaaacctaagttaactattgaagagttgattgacgcgtctgatgcacaaaaagcaaaataa

SEQ ID NO: 161761 - DNA, 708 bp, Enterobacter cloacae
atgtgtgttgctatcgggtacatgcgttactcgtcaaaacttcaaggtgcaggttccaccattcatcgtcagaaaagcctaattaataaatgggtagaagaccagaaaactcatcacggtaaagtgtatgaggtcaaattctacacggataaggggctgtcaggttggacaggtgaaaacttacttgcaggtgcgttaggtcgattgattgaggaagttgaagccggtggttatccagaagggacaccaattatcctcgaatccatagacagcctttcgagacaagggcacgaagaagcaacagcaatcttacgtcgattaacctctactggttgtgtagtacacagcattcttgaccgtcaggttgtccagcgttcagacctgaaaacattcattggtgcaatgcaaattatcgcagtggctgaacgtggtagggaagagtcagacatcaaatctgaacgtgtgtccagttccaaagaacgtaactatgaacttgccaaacttggtaagaagctggtgacaagaaatctaccaggctggatttaccttgaccaaaaagggaagatgcagattgaccccgcaaagcagaaactggtgaaggaaatcttcgaaatgcgccttgctggtcacacatatcagggtattgcagagactatgactaacagaggtgaacccgttctcaatgagcgtaaaggtgctcaacgttga

SEQ ID NO: 161762 - DNA, 897 bp, Enterobacter cloacae
gtgaacgacaaatacaaagagattgaagactacttcccctcagcgattaccaaagaccttttctatgccgtcaatgacctgaatgttcctgctatacgtagtcgtgagaagaagcaatatcctgagacagtcttcctgtttaaaggtcttgtaaaatgtcgctactgcaaaggtaatgtttttctcaatggtgcgaaacctggatattggggaagaatacggtgtatcggtcatcatgataaagtctgtgatgctccatcgttaccgcgccacgactttgaacagagtctgattacaagaatgttcccgctgctgaaatctatggatgtcagtacagaggaaaatcccgttgcagtgttacaggcgaaaattgaccatctgacgaatatcctcgaaggttactatgataaccttgaagaaatacctcgtgaagataaacctcgtcgtaagagtatcaacgagcgtatctccaaacgtgccaacgaaaaggaagagtacgagagacaactcgtagtagttcgtcgcaagatggaagttcgaactgagaatacactttcagatttgaattatgatgactatagcgacaggttgaaaatgcaactggtcatcagtcgtaatattgaacgtatcgtattggattcactcttcgataaggttcatatcaaactggtcaatggtaatgcactgatggacttccccctttacggtgatgtggatggggcgaggttggttattactgccaaagaaaacacaggtatcactgatgttgagagaatccttggtttagatgatgcaatgcctacagtttacaaccttgctccgtccagtggggaatttatggatgacagggagttccccgaagtagaaccagattaccccaatatcaacgagggttag

SEQ ID NO: 161763 - DNA, 1128 bp, Enterobacter cloacae
atgaacgaaattataaaaaaatttagcgcttctttgaatgacactctaattactgattttagggatgttgtaaatgaaggggagtttgcgtatcactatttttctcataggggagggaagaaccaatttagcccaatatgctcttgcatggattggataagtgtctctgtacggtatatcactaatttccctgagttctcaaaggatattgatgttaaagctatgcaagtctactcactaatttcatcaatagatattgcagtagaggcattgcaacagttgcatcgaataattgaaaatgaccataaattagtgaggtggccttttaatgagtttaatcacgttttttcaaataaaatagcgcacttatcaaacaagaaagatgacgagtattttaaagaggtaaggtcaatttttggtgctcaccctacgaacctttgcaataatggtgagagaatgtttgcaagttggcctcattttcatgctttcaacggaaatgactttactgtaagtatttacaataatatacctggcaaggatgatgttatttttgggattaagattaatgaacttttaattttcctcaaagaaagatatgaatacttggtagggcttaaagatgcagtcgtagcaatacgcgacaagcactacgaaaatctcattgttaaaattatcccaaagagcggcaacatacatgaagaattgaaaatcttgctttcagaggttgttagtagaggtgataatgattattacaaaatggaagtgcaggagttaatctatctctttgaggcagatataaaagaagctcatttgttggttgaagctaatgaatttcaagggaaactgcttcctgtggtggaagagattagatgtaatttgcaaaacatgactctggttgacttgactacaactgaaggtgttattttttcaagtttaccgaattacgctttaagttacgaacttcaaaagctgttcacatggttgcattcagacagatatgacccaatgggtaattattatatcgagcagttaaataagttttcaaaagggcggtattgcttcagtataactgataatgaaagcactactttactcaagttgcgaatgatgctgcatagtcaccaataa

SEQ ID NO: 161764 - DNA, 570 bp, Enterobacter cloacae
atgaaagaaactgaacatcatcactctaccaatcttatgcacgccctcgcgaacaatgaaatggcacttttgggtgatatgatggttggtacaaggcctgatttaaaattcgagttagtagcagatgaaactaaagaatgtagagtaagcgaggatggccaggcgtatttcaccccaaaagaagttaacttttactgtaatgatgtaaagattgaagactcccaagaaaaaagtcttgcgtattatctcatgcgttacggagaatgggaatccagtgattccactgcggttatgggggatgacgatgaattattgagtgtgtacttcacgttcgaaccgaatagtagagaaaatatggatacaaatggcttcgagttaattggtaatttaagcacaatgataactgctgcttttaatgagcagacaattcgtgagcagaccgtgactgccattgataccagacatgagccagaagtttttggaattaccatccctaaagattacaaaggtaaggttttgccactttggagaattcaacagcaacccaatcctgattttgcgattaaataa

SEQ ID NO: 161765 - DNA, 192 bp, Enterobacter cloacae
atggttgcaatttttaacctcaacaaaaatatgagtgccatcattcaaaatcagtctgtaatcaggtggtattatatctgcatcaatagcaatcgcttcacctgcatcttcggattttatgaaaagacatcctccaagccccgcagcaaggtgtttgaagagtgtctcaattcgcttgccatgtataagtga

SEQ ID NO: 161766 - DNA, 873 bp, Enterobacter cloacae
gtggagaaagtactgacgacaggccagaagcgggaagccgttgagtttatgtgtgatgcgaccggtctgtcgcaacgtcatgcctgcaggcttactggtttgtctctgtcgacctgccgctacgaggctcagcgtccggcggctgatgcgcctttatcagggcgcatcactgaactggcgctggagcgcaggcgttttggctaccgccgcatctggcagctgctgcgtcgggagggccttcacgtcaatcacaagcgggtataccgtatttaccaccttaatggactgagcgtaaaacgcagacgacgccgtaaagggctggcaaccgaacggttttcgcttctgcgcccggatgcgccgaacctgacatggtcgaaggatttcgttatggacgcactggccaacggtcggaggatcaagtgcctgacctgtgtggatgatttcacgaaggagtgtctgacgatcaccgctgctttcgggatttcaggcgttcaggtcacgcgtattctggacagcatcgcactgtttaggggctatccggcgacaataagaaccgatcagggcccggaatttacctgccgcgcgctcgatcaatgggcctttgagcatggtgtggaactacggcttatccagccaggtaagccaacgcagaacgggtttattgagagttttaacggacgctttcgcgatgagtgtctgagtgaacactggttcagcgatattcttcatgcccggaaaacgattaatgactggcggcaggattataacgagcgccgtccccattcatcgctggattaccagacaccagctgaattcgcaacggactggcgaaacaggaaatatgaagaaaaaccaaccgacattactaactga

SEQ ID NO: 161767 - DNA, 267 bp, Enterobacter cloacae
atggtgagtatcatcaagactactggcaatacctctactggtttgcacatggttcagagaagcgggaagaagtttaaatttcggtgttgcgtagactccatcaaacgccttgtgtctgtaaccgttaagccagagcacatgcactactttactaaccgtaaagatggagtgtttcactcagacctgtacgatagaccggaacaatgtgctgacgagttgattcagttcatcttcaaatgtactggaattaagtgcagtagagaatga

SEQ ID NO: 161768 - DNA, 1251 bp, Enterobacter cloacae
atggaaagcaaagtagttgttccggcggaaggtaaaaagatcaccctgcaaaacggcaagattaacgttcctcacaatccgattatcccgttcatcgaaggtgacggtatcggtgtagacgttaccccggcgatgctgaaagtggttgatgccgctgttgagaaagcctacaaaggcgagcgtaaaatttcctggatggaaatttacaccggtgagaaatctactcaagtttatggccaggacgtctggctgccagcagaaacgctggatctgatccgcgactaccgcgttgctattaaaggcccactgacgacgccagttggcggcggtatccgttccctgaacgtggcactgcgtcaggagctggacctgtacgtgtgtctgcgtccggttcgttactatcagggcaccccaagcccggttaagcaccctgaactgaccgatatggttatcttccgcgaaaactcagaagacatctacgcgggtatcgaatggaaagcggactctgctgacgcagaaaaagtgattaaattcctgcgcgaagagatgggcgtgaagaaaattcgcttccctgagcattgcggtatcggcatcaagccatgctctgaagagggtactaaacgtctggtgcgtgcggctatcgaatacgcgatcaccaacgaccgtgactctgtgaccctggttcacaaaggcaacatcatgaagttcaccgaaggcgcgttcaaagactggggctaccagttggcgaaagaagagttcggtggtgagctgatcgacggtggcccatggcagaaaattaagaacccgaacaccggcaaagagatcatcattaaagatgtgatcgccgatgcgttcctgcagcagatcctgctgcgtcctgcagaatacgacgtaattgcctgtatgaacctgaacggtgattacatctctgacgccctggctgctcaggttggcggtatcggtatcgcccctggcgcgaacatcggtgacgagtgcgctctgttcgaagcgacccacggcactgcaccaaaatacgcgggtcaggacaaagtgaacccaggctctatcatcctgtccgcagagatgatgctgcgtcatatggaatggttcgaagccgcagacctgatcgttaaaggtatggaaggcgcgatcaacgcgaaaaccgtaacctatgacttcgaacgtctgatggaaggcgctaagctgctgaaatgctcagagtttggcgacgcgattatcgcgaacatgtaa

SEQ ID NO: 161769 - DNA, 282 bp, Enterobacter cloacae
atggctaaatttacagacgtacacgacctgttaaccgcttatcaaaaacaggcgcgtaaagtgccagcaaagggcgtttatgcatcaaaacagcgccgtgatgaagtacaggcggcgcacgcaagaaaggtaattcgtaagcggaaacgctctgttggcaagtccaacaaattaggcggccgacgccgggctgaagtattggcagcgctgatttgcgaaatgaattttttggcgctggtgtgtcgttcaaaccgtaagaattccatccagggagaggactaa

SEQ ID NO: 161770 - DNA, 321 bp, Enterobacter cloacae
atgatggaattaacgccgcgtcagagtgaagtgcttgatgccatagtgctctacaaggacagaaccggattcccgcccaccttgcttgagcttgccgggttaattggctgtgcatcaccgaacgcggctgcagagcacgtgagggctctaaagaataagggttacatctccattgctcccggcgcagccaggggaattaccgtcgtcaaaactgaatgggatgcagatcctgtatcgatcgttagagacctgttatccggtggagacaaggcaagagataacgctatccaatggctgaaaaaacagggggggactttatga

SEQ ID NO: 161771 - DNA, 474 bp, Enterobacter cloacae
atgaaaatatcccagttagcaaaatataggttaaataatattaattggcttgttaattttggtgtagcaacgacactccctggtgttatccaggctcagtctcttagtttatttataaaagaattgaatagcgatgaatgggaaggtactaccttggtggttggtaataaaataacggattatctcgcaaaaaaacacactaacaagtatcagcactggaattctttagtcaaagaagctaagaatgttgtggagaatgatattatcccaaaaataatcttcccggagtctgaaaaaggctcaatgactgagaacttaaaatgggaccttgtgaattacttgcttgaagacgcgtatagtacttttcttcaagagccattcttttttgacggattaattaatgtttatgaagctgggcatatgccctgtggatggtcaggtacttggccagcgggcaaactagttatctattga

SEQ ID NO: 161772 - DNA, 270 bp, Enterobacter cloacae
atgaatgagttacagaaacaggggttagagcttcgtactaaagcaaaagaactggctcttgctgctttggcaaagcacccagatggacgcattaatggtaagggagttaagcaagcagaagtatttcgcctctgcggtctggactggggagattaccctaaagcaccaagtacgcagcaacaatactgggcagtagcccttctccgcgaacttgagtcggaaggaactgtggagcaagtcgaagagaaaggcccctggcgtttaaagtaa

SEQ ID NO: 161773 - DNA, 1332 bp, Enterobacter cloacae
atgagcattgaatatacattcaattatcgcgatgagtttctgcgtaagcctattgctgaaaaactaatagcccttttggactctgatatcaacatatctccactagtaatagatggaggatgggggactgggaaaactgagtttagcaaaaaacttgcaaatcatatcgaaagcaacaatcaaaatcataaagtggtttacatagatgccttcgctgaagatcacaatgatgcacccatattaacattaatggcaggtgttgctgcacttttgccagaaaataaacgaaaggaattgattcaaaaagcactaccagccattcgctttggtttaaaaaccattttcaaagccggtacaggatgggtactaaaacaaaatgcagatgatatcgctgatggtttcgaagatgccatcaaggaagccacttcgagtgctattgacggtacaatagaaacattattagacgaccatatagaagctcaaaaaaacatcgaaacgctaagaaatacaatttcaagccttacagaagaatttaagataaccataattatagatgaactagataggtgtaagcctactttcgccctttcaattattgaaaatataaaacatgtatttgagataaaaaacttaaattttatattggttgcaaaaactcaacaacttaaggcttcaataagtcacctatacggctcatcgataaatgcagagcagtatctagacaaattcataaaatttacatttgttttgcctgataaatttaaaccagataattacactcctaaccatgcatcagtcgccttgtgggagattttaaaagatggctctccgaaattaggtgaagtaaacgagtcctgcggacacatcataaaaactataatacagagagctaagttgtccttacgtgaggtagaaaccttatcacgccactttgaaatataccagattttatctcaatcggggataggcccagggaaaatatttggatattcattataccgaacattaggagtaatactgtattctctaaatcgttcattggcattaagttatctagataattctgcagacccaacaagcgttgttaacacattaggatttacatatttaagttacgatgaagatatctacagggtggataataccgaatatgctatttatggcataatatttgacaacattgatacctcttctccattttttattaaagatgatgaaacccgaaaaaaatggactgaacacgctacctatgattttttccaaaaaggttttgatgccaggcctccccaacaacttgtttcatccactattgaggttatgatgctgaactaa

SEQ ID NO: 161774 - DNA, 735 bp, Enterobacter cloacae
atgtttggggtcatggtgcaacattcctctttcagtgcggcttgtggagagccgttgtttaacgtgattagtagtgaaggctccaaaagaacacttcgagttcaacttaagatcgcttttggaatctgtcaacgcattttagattgctttggaggtcttgtggatttcagtagcggcggtaagaaggtcattgagcgtttggttgaggcgtacggcttcagtacgagacaggcactttgtgaccacttgggtgtatccaagagcacaatggctactcgctacatgcgggacatattccctgcagattgggttttacagtgtgccatagagactggtcatccattagaatggttgtcctttggcaaaggagaaaagaaagtctcacatacaaatgctcagattttagtgccagcgaaaaaattaatttctggcgcgctaattgaagatggttcgtatgtttttgataaaacgttcctatccgaaaaaatacactccccattcattattagagaacaggacaacgagtatatttgtagtcttaaatatgatgatataagcgatggattgtgggtaataggtatcgatgaaaaaatctctattcgaactctgacccgcctacctaataacagattatatgttgaaggaggaaatcgcggatttgagtgctctagagatgaaatacaaatagttggaattgtttggtattgcatacttaaaagagccgaaaaattttag

SEQ ID NO: 161775 - DNA, 342 bp, Enterobacter cloacae
atggctattgaaggtgctacaacggctcgcacgataagcctaggtgaacgctatgaagggttgaaccacatagcggaattaagggcaaaggtatttggaattaacattgagtcagagcttgagcggtttattaatgaaatgagcgaccaacgggacgcaaataataaacagaacaagcgggcactagccgccatatttttcatggcaaatattccggcagagcgtcacggcgtcaaaattagtgagctgacgactgacgaaaagcgggagctgataaaggcaatgaaccattttcgtgcagtggtgagcttatttccaaaacgtctgaccatgccgaattaa

SEQ ID NO: 161776 - DNA, 234 bp, Enterobacter cloacae
atgcgaaatattgaaacccgaaccaccaaaaccggaccagatgatgccgggcttaacctgatgttgactgaggcgcgcatggaagaacgccggggccgcgctgatgtatttgctgctcacctggaaaaactggcggtgcatatcacccgcggcaaactcaacggcaccgaagctgcagagctgctgcgtaacgctgctgaaaccatccagaacgaagcgcaggagatccactga

SEQ ID NO: 161777 - DNA, 531 bp, Enterobacter cloacae
atggcggtagcacagaagttaataatattacaaaacgattttctttattcaaataacggtctagaacatatgaacaagttaatgttaatagctttgactgcttccgcattagcgggttgtacttcacaggctcaacgtatggcagattgtgaagctcaaggtattagtcttgatgcttgctacactgctcaacaaaacaggcaagcgactataaacgcttcagctgaaaagcaagcaatggaaaacgcgcaagcgctctatccagttcaaaaagcacaatcagcgcatggtttacctaaaggctgtacacaagtgatggatgcagcggggcaatgcaataccaaaacaccaaaagtgaataacatcactcaggaagccgatcatgtcatgaataaacctatctctgatagtgcggaatatcttcttgctaaaggctggaaaccgaataatggggtatggaagaaacaaggctatacgctttcgctgactgtggataatgaaatagtagttagctcacaaatcaaaaaatga

SEQ ID NO: 161778 - DNA, 129 bp, Enterobacter cloacae
atgatgattgatgcattatggccggactttgggatgattagcggtgatgtggtcgtgggtgtaatcggctatggcgcatatcatggggctaagtgggtagcggatcaggttggaggcttgataaaataa

SEQ ID NO: 161779 - DNA, 147 bp, Enterobacter cloacae
atgccattaagcgcacaacagctggccgcccaaaaaaacctgtcgtacgtgctggcagaaaagctggctcagcggattttagcgggtaaatatgccccggcagcatcctgccgggtgagatggagctgggtgagcagtttggggtga

SEQ ID NO: 161780 - DNA, 915 bp, Enterobacter cloacae
atgatcaacttttttcgccgtgcgggcctggggtcgaaactctcgctgctgactggcgtcagtgtcgccacgctgtttctgctattcacttttctgctcagccaaaaagccagccagcagcttgaagcccttgcggtcgaagatctgcataatcagtccaccggcatggtcgacatggtgcagatgtttaataccagcctgagtgaagaggttgagagctatacccgtctgtttaccacctttttaccgcagcccctgaacattgataattcccaaccccagacgattaacggacttagcgttccgcttctgaaaggcggagacaccgggctgcatgaaaataacaccctttcggacgagttcctgaaccgtacgggagccatttcgacgctgtttgtacgcagcggtaacgactttgttcgcgtagccacttccctgcgcaaagagaatggcgatcgggcaatgggtaccgttctggataacgccagcccggcctttgccgccgtcaacaaaggtgaagtctaccgcggcctggcgctgctgtttggcaaacgctacatcacccagtaccagcccgttaaaaacgccgaagggcaggtcattgcgatcgtctttgtcggggtggacatcacccactcctggaacgtcatgcgcgagaaaatcctaaaccgccgcctgggcgagagcggtcacttcttcgtgctggatcgcagcaacggcaaaacgcgcgggcaatacctgttccatgccggcgaagagggaaaactgccgaagtgggacgcagcgacgcagcaacagcttctgagtgacaaacccggcacgctggagcgtacaagcgacgacggccggacgctgaaaaatggcctataccccgctgccgggctggaactggactatcgtgggcgaagtggataa

SEQ ID NO: 161781 - DNA, 312 bp, Enterobacter cloacae
atgcgcttaaagagtgattacagctatggcaataaagtagtttataacaccttcccttggcctgatgtgaccgagattcagcgtaagtccattattgctttggccaaaactgtgttgttaactcgcgagaattaccctgaaagcacattggctgaattgtatgatccgctaaaaatgcctgcggatcttttggaagcccaccagaagctggatcaggccgttgatcgtctttatcgtgacaagccatttaaggacgccactgagcgtttgagcttcctgttggaacgctacgaagctatgactaaggcataa

SEQ ID NO: 161782 - DNA, 1893 bp, Enterobacter cloacae
  misc_feature (687)..(696): n is a, c, g, or t
  misc_feature (1741)..(1750): n is a, c, g, or t
atgtttcttgccctggataaacttgttaatcagggtttacgcaaagctattgtcgcggtccctgaaatgtctatcggaggttcgtttaaagatactaaacttacgaagcacggtttctttgctgactggaaagtaaaacctgaaaataatttgtgcattggcggtggagaggctgggaaggttgaagcctttaagcgatttatggcgagtcctgacgacattctggtctgtactcatgctactctgcgttttgctttcgataagctgaatattgaatcgtttaatgattgcctgattgcaattgatgagttccatcatgtctctgcggatgaaaacaaccgtttgggtaatctgattgatgctctgatgaaaggttctaatgcgcatattgttgcaatgactggttcttacttccgaggggataccgtacctattctgcaacccgaagatgaagcccaattcacgaaagtaacctatacctactacgaacagctcaatggataccagtatttaaaatctttaggcattggctaccatttttatcagggtccatacatcaaggcactaccttcagtgctggatgcaagcaagaaaaccattatccatattcccaatgttaattccggcgaatcaacaaaagataaacatgccgaggttgatgctatcctggatgctctgggtgaggtnnnnnnnnnnggtgaggtgcaacagcaagagccagataccggtatctatcgagtgaaacgcaaaagcgatggcaaattgttgcgtgtagcgaatctggttgatgataacccagcagaaagaccgaaagtacaggcgtatctgcgtaatatccactctgccgacgatatggatatcattattgcattaggtatggcgaaagaggggtttgactggcctttctgtgaacatgtgttgaccattggttatcgcagctcgatgacggagattgtgcaaataattgggcgtgcgacacgggattgtgaaggcaaaactcacgcacagtttaccaaccttattgctcagcctgatgctcaagatgatgatgttaaagtatcggtaaacaacatgcttaaagccattaccacctcgttgttgatggagcagatcatggctccaaatattcaatttaaaccacgatctcaatggaatggcgagccgttacctgccaatacggttctggttgatgatcatgcattaccggtatcagacaaggttctaacaatccttaacggtggtaaaaacgagatcctggcggcgctaatggcgaatgagcaggtggttaaagaggctattaccgagtcaacaccgcctgagataattactcaggtagtgttaccatcggtgatacaaacgcttcaccctgacctgactgaatacgaactagaacaagtacgcagtggcattttacagagtctttttgtaggccaatgtggtgggttagttgatgaagccgatttgccgccggatgccatcattgataacagtccaggccagcgttccggaaattcgaatgattcattaaacgtaaacaaccagtttataaaaatgggtgataaattcataaatattgaaaatctgaatatcgacctgattgatgcggtaaatcctttccacggtgcttacgagattctatcaaaatcagtcactgcgacgatgctaaaaactattcaggaagcagtcagagcgaatcaggcgcaggtatctgaggaagaagctgtgatgctctggcccagannnnnnnnnnggcccagaattaaagcatttgccagcgaacatcagcgggagccatcactgaatgccagtgacgcaatagaggttcgttatgcagaagcgttagcttacatccgaaaaatgaaacaacagcgtactgtgcgacaggaaccgtaa

SEQ ID NO: 161783 - DNA, 1263 bp, Enterobacter cloacae
atgctcagactttctcctgttcaacctcgtcataaagtgaccattgacgatattttttctgacgctgatgatctgggtttactggtggttgaaccactgaaaatgtattcacctacgggtaatctttcggtcagtcggttagaagagattaattcgttttatgctgttcacggtcatcctcctcgagccgaatcggatgagtttaaagaaacgttgcttgctcaacgtttgcgagcactcagagataacaaacaatgccatgacgtgttgcagccgtttgatatccacggcttgcttgcggatgaaagcaccgggaatccctatgaaccatcggtatcattgttaactccccctgtcgtggttgataaatctgagttggtcacttcgctggaggatatctttgctgatgacgacgatggattgctctcatttgctgagccggatattttcacgttaaaacatgtacctattgaaaagaaaacacagcctgacgaaattgccaaacggcagccttgcccggattttcatcgattttccccactgtttgagacagtccaaaatggtctgaaaacgggagcgttttcatttgttcgcttccgccatgagttaaaaatttatgaaggtgatttttttattctcaatggggttatgggctatgtcgataaagttggcgagaggttagaggaatatggtccctggaatgcccgtctgcatctggtgttcgaaaacgggactgagatgaatatgcttttcctctcacttacgcatggtttggtacgagacacagaaggtcgcaaaattattctgaacggccaaaatgtgcggccagatgagacaccggttccaacaggatatgtctatgtccttgccacgcatagcaaccagcccgctcttcaacgtttcaaacctgatttatataaaattggctttaccaaaggaaccatcgaagagcgcattaaaaatgctgaaaaagataaaacttttctcgaggcccccgttcggatagtcatgaccacacaatgcttcaatattaacacccacaaactggaagcgcttattcatggttttttagggaagcaacggctcaatatcacgctgagaggtttggatggacagacctaccatcctcgcgaatggttccatgcacctttagcgactgtgctgtcggtaatcaagtacatccttgatggtactatctcgcagtaccggatggataatacgacaggaaagatagtagctaagagagattctgattattcgtga

SEQ ID NO: 161784 - DNA, 1152 bp, Enterobacter cloacae
atggttcttgtaattctgattggtctgagtattaccctgtctcgcttattcaccgggaataacaacgtatggttttctgttattgtgcccacagtgattattggtggcgtgatttttgtcaggtttattaattatcttgtccagcagttagtggcgaattcacatgacatgctaagagagaaaaccattatccaggaggtccgccggggacggagggcgttacaaatattattcgctgagtgctgtaccgcgcattctctgtgtgaaactccatttgcatcaggcagtaatagtcttgtgaataatgaaaatgttttcttcccccagcgctcctggcgtggtgaagaaaatgttcgcttaagccagttaccaaggccaataaaaattaaagaagaaaagcatcttagcctgcttttcgcagtccttgccgaaaggcttgcaatatcgttttctgcttatccaaaggaaagacctgtcatggtgttactggatttcacgtcatcaatacctgaggaaaaagccattaatttatggcagaaggcatggcagaatgcaggtattcaacaaaccttaaaccgtattaattcttttggtgctcaggccgttgatgaatggctggatcataatattcgaagtgatgccctcttgttgattttgtcctggcattatgcgcccattaatacccgagattctgcagaagcgatatgtggagtattgtttggcaatcgtcttacgcaagaaacgcttccctcacttgctattcttcatcgtccggaatctggtgaaggtgccgatgaggacttgcgttatgccattacgcaggcgctggactgggggccagtaaaaagtagtgaaatacaacatctctggttaagtggcgtggaggatgaaatggataattacgccactcttataaaggcgattgcagattctgacctcaaaaacgtatctcaaaagacaggcactcacaattttaacgattatcttggcgatccgggaaagaccggagtctggttagctattgttgctgccacacagtcgatgcagcaacagcgggtgcatcatttattaatttgtcgcgaacagcagaatgggaagttctggaatatggttgtatcccctacagtacccgatgaggagcgcgaagaatga

SEQ ID NO: 161785 - DNA, 1299 bp, Enterobacter cloacae
atggacaatggccagtttttagatctattatactcgaacctcacgttatatttgtctttgttgggtctggttttcataatttattatgcatggtttggtaataaagttaggcatgttgcagaccctctgatgattggttttgttgcacaggttttttcctgttcagttgttttattgttagagtttacctcagagatagatgatttttatttctattcttttttatatactgaggttatgtttttaataccattgttgtttatgcggaaaaattatgtaaagattaatgatgattcccatgaacgctttctggcttacaaacgttggaattatgggtactccagtttttactacacaactactattttactcatcataacgagtatatattattttgctattgtaggtattccaatcttaaatcaattatcgaggttggatacaaatgaatcagctggaattatttcatggtttaccgatgtctactgggtttgtttcccagctatggtagctattaagagatatgtttatcgtaggaaaagttttgtcgactacgtgctattattactttgttttgtatgtttgctggttaaaggggggaaatctgacttcttctttatgattgtatccttatttttagttaaggaagtatatcaaatacgagaattagcaaaagttgtaaagatactatcatatatatcccctttaataattctgggattgatggttgttattttcagtgtttggggagccaacggcagtgtggtttcggcgttttttgagcgttttgttttgtttggtgatgttttttaccaaggttatagcaaaccatttatggattcgttaccaaaggatatttatgtctgggattatttttttggcggtacaataaacaaattgtctatgattcttggttatccggtcaaagacaaagtcatttttggatacgagatttcaaaatactattataatattgacagtggaattggtcccaacgcaagacagaacattcttgggttgtatttgtttgggccatatttttgtggtgttttttcgtttgttttagggctaatatatttggcaataagacgtggtacatttttagtaaataaccgaacaagagcttattcattaagagttgtattctatattatcttttgtacctattcttgttatttatttatcgacccaactttgacatggggtttgtatttaaaaacaacgttcgtatttattttcccgcttattgtgtcgctacttaatcaatctatatataataggcgattaaaaggtgtataa

SEQ ID NO: 161786 - DNA, 1140 bp, Enterobacter cloacae
atggcccttttaggccaaatacaaagtctggtaaatgcatttaatggtgttattaacgcacctgtttcaaatagcgtgatacgttataccgctgagcaccatgaagatggctatgaagcatgtagcccatggtggcgagctgctttattttggatgttagtattatatatcattttactgccaattggattatttttaaaccactatctatcacaatggttattcggtggggctgaatatcaatgggttatttatttggcagtgttcgttttgcccttcactgctattgggaccttagtcaattctgtcataaatggactgcagaattacaaactctatgtcttattgggaatagtctctgtttctgtttctggtgcggttatgacagcgctaatcattagatggaatattgatggtgctctgatagccgcagctttgcaatcggcattgataggcatttcactgattgttatgagcattaagcagccatggtttagattcagcctatggtttggtaatattgataaaaaagcattggctgacacatggggatatattgtgatggccatcatcactgctatcgccatgccggtggcattgatgcttattagaaacttgctggtagctaatgaaggatgggccgctgctgggatgtggcaatccgtgtggaaaatatcagaagtgtacttgggggtatgtaccatggcgcttagtgcttattatctcccaagattgtctaaaataagtgattattattcgattaaacatgagatttggaacacaggcaaaataataataccgattgtaataattatggccgttacaatttatttgttacgcgatgtcgccatcactgttttattcactgagcaattcaggaacgcaagagatttatttggcattcaacttctgggggatgttgttaaaatagcaagctggctttatgcatttcctatgatagctcgaaatgcaacaaaatggtttgttgcaagtgaggtgtttttttctgcaacgttggttgtgctgagttattattttatcctgcattttggtgttcagggcgccaatatagcttacttattgaactatactctctattttatttttgttgtgacaaatttaaaaagaatttctagctga

SEQ ID NO: 161787 - DNA, 510 bp, Enterobacter cloacae
atgcaatcgacagtaaacgccgggggaacggcgatcaggaagcaattttcgtctgggaaaacgttaccggggcattctcatcaaaagacaacgccttcgggtactttctcgcaggaatggctggagaaactgaagcattcgaacctggtccacaacctgcaacaggatgcagcagcaaatactggcgctggcataaaaaagcccgtaagcacgttccagtctggtcaaagcgtggtgttgttattggacgacagcgccgagtggcctggcgaacctttgatgctcaatacttcggattggcccagcgacgcccgagaattctccttgttgcaagcgctcgaacagacatcgatcccgcagaaatattatttgagcccgacagcgtgcgcaggattaatcccccgtcaaagcagacgcccgtgcctgtttgtctcacagcgcgaggggcaggctctctcgatgacagagaaacttacattgttacgccagaacgccgaatcagacacctga

SEQ ID NO: 161788 - DNA, 543 bp, Enterobacter cloacae
atgaaagtgtcaactgtccgcgcggatcgcttaaaccctgacgtttgccacctattgaataggactggcatggtgttccgccggcgactacttcaggcgcgtctacttctccggatcggaccgcagccgcgatttttgtcatgtcgccgaggttcgccacatgcggccagtgatgtgccagcacggcggacggaaacgcctcgatttcggcaaaccatgctggttgccatcccagtgactcccatgcgacgcttgcggcttcaatcccactgcaaacagatccgtatctcatgctgctacctgcttttcgttaagttcttcagccagtcgttgcgccttcagtgggttggtaacgacttcaccccacggcagcaaccatccgtttttctctttgagccagggcaggcgcaccgcgccaaccctgatttcgtcctgtgcgtgtgtcatgtcacacaccgtcaaaagggaatgtcatcatcaaattcaggaacttgcggaccgctgttctgctgcaagcgagattgtggtgcgccgccagtctga

SEQ ID NO: 161789 - DNA, 1071 bp, Enterobacter cloacae
atgaaaaaagaaagattgacgaactttttcaggatagcagcctacgtttctctggcctttcctatcgtggcttgtactgctggcaagttagatcctgcgaaagccctaaccacaatgcatgttgtcaagagcgaggattacaagaagcggcccggatgggatgcgctggtccgtttgggtattgatgattgcaccacatacaaaaatggcggggaaagtgttttcaaatggggtgatcgttcatgtgatgaaaaaagcatcattaagtcagttaatgaaaatcctcaatctataccaattttttatgccgcttatcatgagtatgggagctatgaagttggctctatatcgactttcgaacatggagcgagagtcagtgacgagatggctaaaattccgcttaatttggctactgttttgagtaatccggcaagagttgatgccatttacgatgattacgaaaatgaccgctggagtatgggattaaacaaggttagcaaaagcgattttaaaaatagcattgcaacatttaccaaaaacagagacgcattagcctccagttatcaaaaggctcatgatgaaaatcaaaaacaatatcaggcagaacgggatgcacgagttaagcgtgagaaagcagaatcaatagcttctgagagagagattaaccttgtgctatggcagaacccgacgccagagcagcggatgattattgacgcattgcacactgttaaatttactatcaggaatgatggtgttgcatacgctaatggtcgtcgctttatgtcagtggccgggctggagtccctcaaaaatagcctgaacatgagtatggagtcatgctctgatgtaggggcgtatgttgacgaaaaggtagtaggtcgggcatgtgtgcaggctttagcgagggatattgttgagtgggggaaaactgctaaagatagctctatttctgatcgggcatggaacgctgccgcagtcgatggaagtattacctacaaccctatcaagtgggaaattcttttctctcattgggctggtatggcacgagtttacgcttctcgcgggtactaa

SEQ ID NO: 161790 - DNA, 198 bp, Enterobacter cloacae
atgatgactatccctaccctcactcaaacaaaattcacctggcgctttcttgcgcttaatcgccacgataaaaaagccaaaccttgccgtctgtccgttgaggctgcgaccgaacgcgaagcccgccgcatccttgcgccgcactttattttgtctctggccgcacgtctgccagtgccggaggtgcgccgtgtttaa

SEQ ID NO: 161791 - DNA, 720 bp, Enterobacter cloacae
atgccaagtgtagtttgtttcaatggacaaaagaataaagaatttttctgttggcttcctaacggtaagagctgcgttgcttaccatgaggctgggcacgctgttgccgcatggttattatgtgttgatattgatagcatttcggttatggatgaatttggattcttgggtgaaaaacatgctcttgatgaagaatgtattggggcggtttaccactccttctgttgtacgtgggatcttaaaagattgcgggaaagtaaatctggcattatagaaaatggaaggagaatatcatttatcgaattccatgcagatgcaataaaaagagatattcaacgtaatttattcatatctcttgctggtccggtgtgtgaggttgaatatggaggcggcaatatatttagccctgcttgttcatttagcaaatgctcaccaggttcggatcgggcgaaggtcgaggaaatgcttgattcattttgcgaatgctatcaagaaactgttcgagacgatatgcttcagcacatgattaacaaaacagaatcgcttgttaagcaacactggaataaagtagaaaaattagcctgcattcttgagcgcaatcattttatccgtggtcattctcttaaccaaatactaggcatcaattttgttgaccgggcaactccgttttttgagcaggaatcaacttgcagcggggcttcaacgggttttaacggatga

SEQ ID NO: 161792 - DNA, 534 bp, Enterobacter cloacae
atggaactgaaaacagaatgccttcctgcaggcgtactcggctataaggcctgtacatataaagcaaaagactgggactcgacgaaatatcgtaacgaatcaaaaaatgatgaggagtggtccggattttatgttggcagtacggaaacgttgacgcttggctatatgcctgactgcgtcgacaatcagggaaatggaacggcatatcttaatatcgtgaacatcaacacacccgcgcgaattattgtatgtcacgatgagaggtttaaatctccaacgcaagacaaatcagcactattaaaagagcttaaagaagcgttacgcagaatgaaaatcccttttgcggatagcgaccttttaatacccacgctcgcccgctttcaattctacttcaaatgttataataatgaagatagcaacgacatggaaattattatcccgaacgacctggttgataatgtcacactacaaagctataagcagcaaaactttataaacgggggcgagcaggcactgataaattatgttaaataa

SEQ ID NO: 161793 - DNA, 1170 bp, Enterobacter cloacae
gtgaatattgcattaactgattttttaactggcttttccagagcgcttgacctgttaactccagaaagtggaaatcgagggctacgacgcgcttttatcgcaatgactctgttacgtcagcaaaaagccagtgaggctgtacaacaaagggtctttgttgcagcattactttatgaattaggctcggaaagaagctggggtttatccgattgccaaaatctttttagccaggtttcaataatatccgacagcatgcctcttatatttgaaaaaaatgagccgcttatttattgccgtttactcgatctggttgataattttgatctcctcaccctgaatgaacatcatcgaggtcaatatcctacatctgccattgaaaccctgtgcgattcaatcggctcccgttattcactggatgacatcctctctctgcgagaactcgaataccattctgacatctgggaaaagctcgcctcacccaacttgttaaatgatgtccgggcaatgtcgcccttttcatcccgaacgctgaatgaggatgacctgaaccagctcgcaagtttcttcgccagaatagttgatctgcactgtcggcatagcgtgccctattcacccatggtggctaactattgtgtaaaacttgctcaaatgtacggtttctcgcaatcgggaattaaggagttacgtctggctggcttgcttcatggtataggaaaacttgctcttcccgccggtcctgttatgaagtcgtgcgctttgaatgctaacaccaaggcatatttgaaagcgtatccaatgattacacgcgaaatcctttcctcaataccgggtatgttcaggactggtgttattgcaagtagcccacatgaacagcctgacggcaaggggttgcccgaaggtttatacggaacacagttagatcttagcgccagaatcatttcagtcgcctgtgagtatgtttctctgcgtgttaactgtaacggcatttcacccagttcaacggcagttgcactcagccagatgcaaataaaagcggcagccggtttactggatcctgacgttgttaacgcactgaggatggttattgactacgaagatatgaatgccgttaaaagcatcaagattgatgggttactggagggcatgaataatgataagagttatatttga

SEQ ID NO: 161794 - DNA, 576 bp, Enterobacter cloacae
atgaaaaagttgacttctatggcaatggcgttagctctcactggcgtcgccggttctgcttttgcaggaacatcgacagacaatagtaatgcgacagcgctgcacgcttcaaccaccgttcattttaacgggttagttgaagaaccgacgtgttcttttaaaggtaaatcgatgaaggtggtgctgcctgtggtgagtaccgcagcttttgcaaacctgacagagggacagccagcattaaatacgcaaaagaaagatttttctctctatatttcatgtgcagatcaatttcaagccaacaggatgcatatgaaaattacggggcaaggaaagaacaatattcttgaaaatacccacggtacagcgaaaggaatggggttgcagatctttagcggcgacggaaataccgtcctgccaatcgggcaagagttaaatagcgatactgcaggtctcactaacgccttcctgaataatgataatacacttcaacttagcacgaaatacgttcgtgcatctggcgatgttactggtggtaaactcgctaccgatgctgtatttgaaatatattataaataa

SEQ ID NO: 161795 - DNA, 1068 bp, Enterobacter cloacae
atgccattcattaccaaaaatgccgcgcaaattcgcaccgacattctgcgggatatcaaaaatctcctgcagttgtcagatgacaagctggggcctgacagcgactggtatgtccgggcgtcaagtgtggccagcgttgccgaggggctttatcagcatcagggatggatagtccgtcagatattcccggatacagctgattccgaatttctctatctgcatgcccgtttacgtggtttaagcaaaaaagcggccaacagcgcctccgggcccgccacatttaccggcgaaccgggcgcggcagctgccgctggtcttgtgttcaaacgcgacagtgtatcgtggacaacaaccgaagaaattactatcgggtcggatggaaaagcatccgtaaatgcaatgtcttctctgtccgggactgcgggtaataccacctcagtcacatcggcaacgctgaccactacacctgacgggtttgacagcacagtgaccgttggtctgatgactggcggtacggatgaggaaactgatgcggagctgcttgcccgtctgcttgaaatcattcgccgacctcctgcaggcggtaataaatatgattacaaacgctgggcactggaagtatccggcgtatccgcagcatatatttaccctttgcggcgggggctgggtaccgttgatgttgttattacgtctgccggtgggctgccttctcaggatgtgatcgacaggacgcaggctcacattgacgatgtccggcctgttacagcaaaaaacacgctggtactcatgcctgtcatccgtacatttgacgtactcgtgaaggtatcactggagggcatcaccctcgccgcagccaaacaggctatcgctggaacccttgaggacgatgactcgcgccgtgagccgggagtggcttttattcgcagccaggcggggacattgatttctctcattcctggtatcaccgactatgacatcgttacaccatcggcaaatattcaaccggtaatcgatgccacgaaagtcgaatggctcagattagggaatgttgaggtagagctgctatga

SEQ ID NO: 161796 - DNA, 573 bp, Enterobacter cloacae
atgagctacttcactctgttaaatcgcctgctgccactcatttcgtacagtctggggcagcccctgcttaatgcatcattgcgatcagaagcaggcgtgtttgacactctcgatatgtctgcaggacttgtcgaaggtggcgttactccattttatgcccgcagccttttatctgactgggagcgcgttcttgaccttactcctgctgaaggtgccacataccagcaacgccagcaacgtgtactggccaaactggctgaggtcggtggtctcagtattccgtactttactcagttggccagcaaccttggctacatcatcacaattgatgaaccgcaaccgttcagggcgggagttaaccgcgccggtgatcgcctctgggttgaagacattatctgggtctggcgcgtcaatattcagaactcaggaacgcaatcctatcgctttcgctcaggcagttctgctgcaggtgagcgtctgactacctttggtgatccggttattgaagaagtcttccgcgatctcaaaccagctcatacattttgctacttcgcatatcaggagaatgaataa

SEQ ID NO: 161797 - DNA, 1080 bp, Enterobacter cloacae
atgcggcccttaatgccaccggtgcagacgccggataatcttttccatgatggtaatccgctcacgggtgagctggggaccattgttgatgccgagcatctgaataacgtgcagggggctgtcagagatgcgcagtcggagcttattactgtcctgaccgctgccggtattaacgttgatccaacaaaacaaaatcagctgttaactgcacttaaagcccttttactgagtcgttcaaatccttttggtgatattaagtctgatggtgcagccgcgattgctaccgctctcacaaaccttggattgagcactgtagtccggggggacagatgctttcttgtagggttcgcatcaggtgaggccaatcagccttacatgacgcattttgcgtctcaggaagtcgttaagctggctaccgctgaaagccccacttttaccggtgcgcctcttgtcccggatgctctcccggggaattacggccaacaggctgcaaataccaagtttgtacacgataaaattgcagaactggttaactcatctccggccacgctggatacgcttaaagagctggctgacgcgctgggtaacgacgcacactttgccacgacaatggcaaacgcgctggcaggcaaacaacctaaagatcaggtgctgacagatttaagtgggaaaactgttagtggaattcttgcgtatttcggactgaaaacggccgcgcagaaagatgttggtacaggaccaaatcaaatacctgacatgggcggattcacagccttactaggagataacggttgggcaaaattgcctagcggattaatcttccaatggggtattgcgggaccgttaacccctcaaaatcctgacgctgtggctaatttcaatattacgttcccaaataaatgtttatttattactgaacatgaccagggtaacgccgcccagaaatctgtaattcagatcggttatgtaactaccacggggttcactgcgtataacctcggcgtattggacagaaagataccatccgggctccagccaccgatcacggcatctattccctggtttgcaataggatattga

SEQ ID NO: 161798 - DNA, 432 bp, Enterobacter cloacae
atgaataactacgtttacagctctaaaaataatgcattttatgctgtgttgctaaaagaagcgtatgaaatggcaggttcctggcccgatgacggagttaaggttacggatgcaatctttcttgaatacactgcaagcgcgccagaaggtaaactacgttgcgctgataatgatggttaccctgcatggactgatattccaccacagactcccgagcagttgcaggagcaggctgaaaaagagcgtcagcgtctgcttaactatgccagcagcattacagaggactggcgaacagagcttgcccttgggatcatcggcgatgaagataaggctaaattgacggcgtggatggcgtacatcaaagatgtgaaggcaatcccggtatcagttgcgattgagcagggattcagctggccaaataaaccagcatag

SEQ ID NO: 161799 - DNA, 831 bp, Enterobacter cloacae; identical to SEQ ID NO: 119722

SEQ ID NO: 161800 - DNA, 495 bp, Enterobacter cloacae
atgaaaatatttcacagactgataagtatgctaagtccgccccaggttcagacacaccaaaacgggtgggtgaaaaacctcatccgatcgcgctactctgcctctgatgaagggatgatgagtgatcaaaaacatatggaaattattttgatgcggcatggagaacctcagcacagaggtgagccaaaagtgtcgtgcagggaaatggcggagtggatcgagagctataaccgctcttcaacgggcagcgatagaccttctgaaattgctcaaatcctcgcgtaccgagcgctcacgtttctcagcagccctctcccgcgagccctctcatcgttgagaacgctggggtgtgaaccgggcttaattgatgaggtttttcgggaagcggaactgccggtatttcgtatcccaggttacggttatcgcctttttactgggcggcgctgtttcgcgttctttggctctgcggcctgtctggcgaagcagagtgcgtaa

SEQ ID NO: 161801 - DNA, 636 bp, Enterobacter cloacae
gtgctggccgcaacggggctattgaacggccgcaaagccacgacgcactggcgctacattgacgcgctgaaagtccgctaccctgacatcgacgtggttgaggatgtactctaccaggatgaaggcgatattctgacgtccgctggcagcgcggcgggaatcgatctctgtctgcacgttgtgcggcgggattatggcatggaaacagcaaacagcgtggcgcgtcggctggtcattccccctcaccgggatggttcacagccacagcagctgacccgcccggtggcgcagctgcgggaaagccagcgtctcggccagctgtttgattttttgcacacgcatcttatcgaggcgcacagcgtcgactccctcgcgcgtcgggtcggaatgagccagcgcaccttccttcgtcgcttcgaggcggcaacggggacgacgcccgcacgctggttaatcaatgagcgcctgctgagagcaaaagattatctggaaagtagccggttaagcatcgacagcatcgctgaacagaccgggtttggtcaggcgtcgacactgcgtcatcattttcgccagcagttcgcactttccccggctcagtatcgcaaacaattttcacgtccgggtactgcacgctga

SEQ ID NO: 161802 - DNA, 132 bp, Enterobacter cloacae
atgttttttggcgggggaataaaagcgaacatccttgttcatttattgctcattgcggaggggggggcgtttacaggtttagatcacgccgtcaccgccatcggaacaccacacctggccggacgtgaatga

SEQ ID NO: 161803 - DNA, 1236 bp, Enterobacter cloacae
atggtaaaaaatatgaagctaagtttgaatgcgtctagcattaggtctgcgttactattctctattgttttcgcttatctgtatagctacgcttctactataggcctgtcatctacaaatgacgaccatgtattcctttctgtttttaaaaatggaacagttttagattttatcaacaacaattatcacacatggagtggaaggacggctattgaattcttgatggtttctacaataggatattctttattctggaagttagggattccattatctatagttttacttgcatactcatcatgccgtatttcaacatgcagcaaatcagccacttatatttcaatttttgtattactttttagtttaattcctggtgctattaatggcgatgctgcctggtgggttactggattttacaactacctacttcctgcgtcagtagccgtgtatatattctctgttttatttaaaggtgatagcggttattttgttaaaacgttatgtataccgcttgctatatacgtctcctacatggagcaggttactttatgtcttattgtttgctccgctataattcttgcatttatgccatctacaaggagtagatatttttatttgttgctttcgttaatttcagttaactttgcaatatgtatttctgcgccaggaaacataaacagactccatttagagactgctaattggatgcctttatttgatcatttcactctgacgcaaaaagtgtcgcttggatttgataaggcatatcaattcataacattcaagtataattatccattgcttattgtttcattacttacggtacttataaggcttaagaggcaaatcgtaacccaccgtgtatttgtcatgttgattgttgtatcctcatttatacctcttatggtgtatcattctttatgtggtagtttgttttttgagggtaacattattgacaatggaaatgcttcacggctagttatctattttaattatgcttattgcattgcgcttgtagtttctttgctattcctaatcatagatatgatgtttgacaaagtaatgtcaggactgccgcttgcaggtattttgtgtggctttatgtcaattgtgattatgggcttttcccccaccgtatacgcttctggagttagggtttactttgtatttgagattcttttaataataacttcaatgtacatgttgaaacgactaaaagaattaaacgaccagtag

SEQ ID NO: 161804 - DNA, 1227 bp, Enterobacter cloacae
gtggcgattcagatctctgttgtaaatgcagtgtttttcagtattacaggtacacctatctttgaatctaccgttaataactatacatatggcgttgaattcaggggtggcctgccatcattaatagcaccgctcacagggttacttagcaatgtttgcagcgataccataagattccggagatttccttgtgcgttcagggtgggagatggtagtgatttacaaatatctgagatacaactcaacgcgcaaaccaaccggtgcaactgcgcctgtgaagtaaatggatcgcaagcaatagttactattaacgggagtttgttaagtgagccgcagactgatttcacatacccaaaagtactttttaatgctatagggggcgtaatttatcaaacctctggagaaacagtatcaagtgttgacaatgatggtgtgattgcacaaatcaagcaggtaagctcgccagcgtatggaaatccatttggtagtgttaaagtatcatgcacacatgttgagtgtgcaggtctattgatggctgttgataacaactcagggattgttggggactcagacagtaaatatagctgcgtttcattctctaactgtcagggtagcatgttaaatggtgctggcgaactgatagcaatacgagtcgacccatatgaaggtacattttctgctgacgataactgcaacttctatactagcgctacacgaaccgccagaatagtatatagcatctcaacaaaatttaactttgatgtttctgctagagcattcagaaaaggtttcggagtgctttcctcagaaataggaagtggtaatgttaactggattcacgatgttcagccaatcatcaagatgtcagtcaaccctgtgaccatcccatcaacaggaacagctccgctaagcttctcatcaagggaggcgaccggagattataccttctattatggtgatacaagcagcggtgggatagtgctaatacacaatctaaacatgctaaatctttcaatctcggtgccagcgacagattcattagcaattgtagttaaagttaatggggttgaggtatttggatgttcaaatagtgggtttgttactcttacaaaggaaatgataccagttgggtcagttattgagtttcaagcaaagaatgggactggaggatcagtaactacaaatgcggcagcaagaattattgcatcagcatcaaatataagatga

SEQ ID NO: 161805 - DNA, 228 bp, Enterobacter cloacae
atgcttcttgatggcaaaccggttccctacaaccgcgctgacgttacccgtcgtctcagcgatcatatccatgagaacaggcacagtaaccgttacgaggatgagatgtttgtgattaagtattttcagaagggaactgcacacatcgtattcaagcgacctgagttgattgataagctgaacaacatcatcgcccgacactatccgggagcactgccagcgagatga

SEQ ID NO: 161806 - DNA, 204 bp, Enterobacter cloacae
atggagaaattaaccaccgaagtggctctcaacgttctgattgactggctgcaggacaacatcgattgtgggaacatgattattttcgacaacgacgaagacaacaccgattcagcagtgctgttgccctggattgaacgtgcgcgtcaggacgttcgcgatctccgtcatcttcaacttctgcgacagaccagtacagattaa

SEQ ID NO: 161807 - DNA, 819 bp, Enterobacter cloacae; identical to SEQ ID NO: 39291

SEQ ID NO: 161808 - DNA, 234 bp, Enterobacter cloacae
atgccagaacttactgtactgccttatggtccgtttacccgccagcagtcagcggctgtggcgtcacaatacaccaacgttgctacagaggatgaccagaacacacattttcgcctggtggtccgggataccgacggcaggatgcactggcgggccaggaactttgagccggaggcgggttactggctgaaccgctatctcaccagcgatggcattcgcagagccacaacgtaa

SEQ ID NO: 161809 - DNA, 453 bp, Enterobacter cloacae
atgaacaacatgctgaaaagtgttatttccgctgcgaccctgagtctgtgtctgctgacacccgctcatgcagaagagcaacgttatatcagtatccgcaatacggacactgtgtgggtgcctggtaatatctgtgtttaccggttccgccttgacaacggcggcagcggggaaggcttcgggccactgaccctttccctgcgcctgaaagacaaacagggtaatacactggctgtgggggagatgggcgttgagccgtttggcgacagcgatgcctcccgaactcaggatgcctcactggaacatgaatgtgtggaaaacgtcagttccgtcgaaatcatgaaggcgacggaagcctctgagggttaccagactgacctgccgctgtccgtgtttgacccgcagtattatcgtccactaccggtgtcggttgccggaggtaaggcatcctga

SEQ ID NO: 161810 - DNA, 543 bp, Enterobacter cloacae; identical to SEQ ID NO: 39288

SEQ ID NO: 161811 - DNA, 453 bp, Enterobacter cloacae
atgaagaagctgaaaggtgttatctctgctgcagtcctgagtctgtatttgctgacaccggcccatgctgatggcggttttcagggtgccatcaaaggcggcattccggcctacacccgcgatgtaaaacacaacaaacccttctggtgtaaccagtacaaactggtgagaaagatgtgtgaagtggtttcgcaatcggaaaatgggcgcgttgccattgtcagaatggtccccaccgactggaaatgccccaacggtatctggggtgtggttgaccgttctaatggtgacgccatggagttggtcccgacggcgaaaatgtccctggagcagtactgcagcaaggcattcagtgcaggttttgtcaaaccacagaacaggaaatcactggccgacgtcgtgatgtactacaacggcaagccagtcggttctttcgaatacattgaagagtga

SEQ ID NO: 161812 - DNA, 453 bp, Enterobacter cloacae; identical to SEQ ID NO: 39286

SEQ ID NO: 161813 - DNA, 636 bp, Enterobacter cloacae
atgaaattactcacctcggcggcgctggccgccagcctctgcattacctctgtgaccccggccatcgcagaaaatatcgtgggttcagttaaggcctggcagtacatgcaggctgatggctggaaatccgctgatggatacgatgataaccgcatgcataacgagttataccaggcggtcgttcttgataattatccctggacgaatcactttctgcttcgtagcagaggcggtagttcgctttatctggcagacaagaaagctaaaactgtcaaatacatcgatataaaacctcgcgacgagtatccgttacatcttcaggtagtttatcggggaattgatgacgggagtggctgttatttcgccattgtagatgaccgaatggcaaactactggacgattgttgaagatcgtcttctctatcaggacccacctgttgaagacgtcgatgcgaaagcagctgagcttagaaaacaactcacgccggaagtcgtgatgatggtgaaggataattgtattgacaaacagcagcaggctgcactggcagctaagcgttctgaaaaagatcgagagttgcaacagtgggtggcgaaacagagcctggcggaattatgtcgtcgtaccggcaactgctga

SEQ ID NO: 161814 - DNA, 1329 bp, Enterobacter cloacae
atgagccgcagggagttgttcagcgaatttcttgaaaatttgaatcttgaccttaaacaggcaaaaaagatcagctatcactatcgaaaaataaccaagtcattaaatcttgcgttcagaggaactagttcccgggtagcaaatcgcttgaaagtggggtcagtaggtagacataccgcaataaaaggcatatccgatctggatatgctttatattatgccccccaatcagtatgaatattataaccataaggataatggtcagtctgcattgctcacagatgtcagaaacattctggcggaagaatatcctgaccagacggtgaaaaaggacaggctggtcgttcaggtcgtctttaaaaactttcatgtcgaggttcaaccagtattcagacaggatgatggcagctttaaattccctgaaagctataatgggggagcatggcgcattacaaaacctcttcacgaaaaggcggctatgaccgcattttcgcgagataaatccaacaatctgcgcaagctgtgtaaaatgatcagagcctggaagaacctgcatggcgtcaatatgggtggcttactgatagacacactggcgtatcgctttctttcatcaacatcagattatgacaataccggaaatggcagtctgggagtcctcgccagagacttttttgaatatctgtcaaatgaggagagaagggaaaggtatctcgcgttaggcagtaatcaatatgtacgtgttaaatccccttggtttggtcgggcagcgaaacacgcgtatgaactatgttgtgatgccttagacgctgagggtgctgccagtgaaaatgaccgctggcgcaaagtgttcggacgagccttccccagacgtaaggtggatattatggaagcccgcctcgctctggaatcgcatgcggctgatgctgctccctgggccgataccgaagagtttatagaggaaaaatatccggtggatatcaagtactcactcaatcttgactgtaccgtaacccaggatggtttccctcccagaagcctgagggagatgcttaccagaagatttcgcctctccgcccgaaaatctctccttttccgggcagacctgacagaaatggaggcagaggaaccctacaccgttatgtggaaggtactgaacgtgggtgacgaagcacgcagaagaaatatgatccggggacaaatcgttccggacggcggctactatacgaagaaagagactaccgacttccgtggagatcacgtggtagaatgctatgtgataaaaaatgaggttgtggttgcccgggcacagattgaagttcccataagctga

SEQ ID NO: 161815 - DNA, 576 bp, Enterobacter cloacae
atgacgcaatcagagatgctgaaattaatcgcccgacacggttataacgtcggatttggcgctaagaaaaactttgccacctatgatctgatttgtaaggcatccggttggattagctttatttctcttgctgtcggtgtgttcgcccttttcattcctgagctggccacaaacgtcatctccgcgatattaattatatttggtgttgctaccatgtacattcagttttatgactcggaaaagcagagttatgaaagtgcggggattgagcagaccaaaatttttaatgaacttgaagtcatataccgcaacgtgaaaagcgatgcaaactttgactatcagcatacacagcaatccatcgacgctatcatgtcccggttttacggtacagtcattagcaaacagatcttcggaagtaactggtacgcacattataaattttactgtgaatttgagaaagcatgggttgaagaagaactgaacctgacactgaaggataaaattccgctttcgctctgctttctcgccggtctggtgatcattttcactatagctgtcatctggaaaacgtcctga

SEQ ID NO: 161816 - DNA, 291 bp, Enterobacter cloacae
atgacgttatctgtcgctttaaaaaatgtgcttttgtttgcacctctgctggccattatgcaggccaatgcagcgttacccacctgcgagaatgagattaaggacgttaacaccttcctgtctctacaaggtgccgcccgaataaatgatgtggatgaactggcaaaaacattgcgcagtctcacacaaaccgggcgactgccgtcccgatatatcaccatcgatgacgcaaaacgccagggctggtcgggaaatgaatcagaatcactctgggggggctttgttgaataa

SEQ ID NO: 161817 - DNA, 318 bp, Enterobacter cloacae
atgaataaacgccacatcgcgcggcgagattttcgcctcgactaccatctgatcgtcaagcgggacaaggctcatcagcttgccgttcggcgggataacgcctcccacggtcgtgacgtcaatatccttcacgatcccgcgaaccggggcattgaaggtcagccgggtcagggagtcctcacgccctttcatcaccgaacgctgggcctcaatctccgcattggcttttgccagctcttcacgggcgcgaacgtaatactggtttttcatctcggtgattttattctcaagctcatttttttgacgctcaagacgtaa

SEQ ID NO: 161818 - DNA, 168 bp, Enterobacter cloacae
atgacttacgcgattttcttgttagtaactgcagtttgtgcattcggtttaaattatctgacaaacaaaatatgtcccgccatggttgtgattaataagagtggagtctctaatgtacatgccttacggtgtatcacatcgttcctcctccttctggggctttgttga

SEQ ID NO: 161819 - DNA, 702 bp, Enterobacter cloacae
gtggccgtcagcgggggaaacacttttctgtctgcaaaagaacgtttccgcgtacaggtctgtttcaaaaatgccataacacatccagatgaagatcggctgctggccgagctgttgactgttcatcacttcctggctgacacctctattttatggtacatggagcaaaaaacttatgcttgctccacgacctgggccaccacgtccacatggctacctgatatctatcagcgtcaggccagcacacccaatgtggtaaagattatcaaatttatgcacgcccggtttcctggcctcaaaacggttgtagaaacaaatgagcagggctatgaacaggcgcttaccagtgttgattttgagattccttactggccagtgctgccgaaatttgacgctgatataggaacgatacaagtaacgattagcgggatgatccgttacacagaaacgatgagcaataaaaattgtaaaagccctctcgacttaatgataaaaagttttaagtcagggttaatcccgatagagaaaatgccgttgagcaagaccgaaaggcttatgcctctggatatgaaagccgtaggtttgatattcacacacgcaacatggccgaggtttcgttacatttttgtaccggacgaggcgggaataatgaaactggttagcgtggtcaaattaagattaaaacctctggaggaaaaatga

SEQ ID NO: 161820 - DNA, 972 bp, Enterobacter cloacae
atgaatactgactttgcacattacaacgaagagcaactacgcaaactcggtgagctgcacagtttactcggtcatagcgatatcggatcatcttaccttgccacgctaccggagccccgtagtgtggaggagttgaatcctccacaggaaatcaatgtgactcattcggtgcccgacgtagacaccctggtggatatttaccggcagcagcgggttgataaagtccatgtcagggatgaacattattcaaccaaaattacccgaaaatatcccgggtttgttgtggttaaaaataatcatgacgaagtgatgtcgctggtgggtgaaatcaaccggcttcgcgacaaatttgctgatgctgtaaaaggtatcactcattaccaagactcacggtcagaaattctgcaccagatttacccgtggctggtgactttacaggtgtcccgcaatatccggatcgttaccgagaaaattaggtccctggggttcacctggcaaatccctgtcattcataaattcacccggctggaaacggtaatagaccgcctacgcagggagataactgagcttcaaccggatatcaatctgacaaaacaggatgtagaacgattgaaacaggagcggaccgaagaaatcatgatgctgtcgttgttgaatgatgaagtgtgtaatgacgatgaatcttcgagaaaatttcggcttatccgggaaagtaactttcctgctgttaacgtcaatatccggtacaccagtcctgatgatccgaatgacgttcatgggccgtacaaactcaacttccgcgcgcctttacctttaattttgtttagtgaaccggaccgatttaatccgttaaaaaattacgtaaagggtgaaaggcagaagcgcggcagttttaatgaaaaatatcgttctgtcctgccccgtatagggctggtggaagtcatcaaggagtcgagaagagccggtttctaa

SEQ ID NO: 161821 - DNA, 408 bp, Enterobacter cloacae
atgagcaaagtgcattgtattagtggtattacctggaaaaactccgatagcgcggctttcaaagtatatgccagcattggtgcggtattaagccttggcctgatcactgctaccgtaaggaactatgaaattctgcaactgactgttccgtatacctggtatgtcttcttcactgtattttggctcttgttcccgtcctttacggtctctttccgtgagcaggaagggcgtttattcacctcgatgggcttttacgggttgaaactgctcacgctcgaccgtcctgtctccgatgggtactggctggtcacaatggagaaaaatcgttatcgccttgtcagagtatgcagggatgggcgacgcctgtctgtatggctgacgtttaagtctttaccagagtttgtttaa

SEQ ID NO: 161822 - DNA, 465 bp, Enterobacter cloacae
atgagaaccagtaaattgaatatgattttaaaagaagaaatcgttttgggcatctacagctggcttcaaatgactccagtcagcatgctggtaaggaacataaccagcgatcatggaggggattacgcaatcgtccgctttaccgtcgatagccggggggttcagatggggcctaaggctcagggccagcttctctgttcattcggattcaatgttaaggaatcctgtgaggccgacacaaaagacggtccagccctcataaaggcagaaatgatgaacggcgttatgcagctggtaccggaatgcattgagctcactgacagccaaacccaggcaatcaggaaagaggtatccgtgcttaacagggtttgtgcaatgcaactccagggggggcatgggaattcaaggtcactgtgggagaaagaaattcttccccggatgaaaggctgcagacaactacattga

SEQ ID NO: 161823 - DNA, 243 bp, Enterobacter cloacae
atgaaactaaatgagacgtctggcgcatgtgatgatgtgcatctaaatacatttgtcatcgacccggcaacagcccgacgttttgagtgcgttaaagagatggttcgtaagcaggggttccataatatcacggagccagaaattattgatgctatattgtctgaaataacaacagcagatgctgccgaaatttttattgagtacaagttaaaaaccacaaaatctctgctttctacagactag

SEQ ID NO: 161824 - DNA, 255 bp, Enterobacter cloacae
gtggtatcaatgttcagctcaatgcttccagaacagtctcgcgtgatacatggtccatttggttttggcatggatactgagattgaattcattaagaagcgaaacagtgctgacgaaggttatctcgttatttttcttaatcagctagactcttactcatggttaaaacttatcgcgggtgattcacctgaaaaagcaattgcgtacaattttgacttcattcctgatctggagagtgaaaatgaaactaaatga

SEQ ID NO: 161825 - DNA, 537 bp, Enterobacter cloacae
gtggaaaatataaataacgatgtaccacagcatcaaccttaccgaaatgaaaaggtatttaattccggtaagacagcacttgagctcaatttttctgagaaaaatggcagtgtgaatcttatccttgcggggcctttagtatcgaagccgggaagttttgactggactggtccaaaggccttttcaacaaagctgagtgatgatgaagtgatcaccttgtgtatggcgtttcttcgccttactcatgaggctgttctgaaagataaaaaaacaaagcaccataataagcaagtctacaaaaacgtaaaagttacttttgatggtaaatccacagcaatgatggaggggggagttgtagctattaacaaagacgagagagacattaattttatacataaaattagtattgatcctgccgcttgccttcgcttaggtcttttcctcttgtccgtcatactggcccgaaatccaggggttccatctgacgcggttctaacgtgcatgcgtcttaatgcaaatgctcaactacaaaagtaa

SEQ ID NO: 161826 - DNA, 153 bp, Enterobacter cloacae
atgacaaatatcattctgtgtgatgtaacagccagcgtcagcgaacttaaaaacgatccggtggccagcgccggtgccggctgcggctactcggtcgctattattgacagcaaccggcctgtttttttattgtgtgcccgcggttctgtatga

SEQ ID NO: 161827 - DNA, 234 bp, Enterobacter cloacae
atgctgaatgatttcaccgggtctggcgtttcgcagctgcagctgttcgacgaacgcccgccacggcctcacagtgctgagctgatgatggttctggacgagatcaacaactcagggctgggtaaagtatggtttgccggtagagggataggcccggaatggcagatgaaacgtgagatgctttcatcggcatataccacccgctggaaggagctgccggttgcctgtttctga

SEQ ID NO: 161828 - DNA, 936 bp, Enterobacter cloacae
atgaacaaaagtacaattgcattgatgatggccatgctttcaggtactgcttatgctgactctacgcagttaacgccaaatttctcaccggaaagtgtaactgtatctacctccgccgggatgttaagcggtaaatctcatgaaatggtttatgatgctggtacaggaagaaaggtcagccagctggactggaagatcaagaatgtagccattttaaaaggcgacatttcctgggatgcatattcgtttctgacactgaatgcacgaggctggacatccctggcttccggggctggtcatatggacgactatgactggatgaacgataatcaatcaggatggactgaccactcatcccaccccagcacgaacgtcaactatgccaatgaattcgatctgaacgcaaaaggctgggttttccagaatgaaaactataaagcgggtgtaatggctggttatcaggagactcgattcagctggactgcaaccggtggttcctataactacgataatggtgcatatactggagaattccctgctggtgaacgtggaattggctatagccagcggttttccatgccgtacattggccttgtaggtcagtatcgtattaatgattttgagttcaatgcattgtttaaattcagtgactgggttcgggcgcacgataacgatgagcactacatgcgggatttaactttccgtgagaagacgaccagttcacgttactatggcacttcaattgatgccggatattacgtaactccgaacgccaaagtatttgctgagttcacctacagtaaatatgaggaggctaagggagggactcagattattgatactaacagtggcgagtccgcctccattgggggagatgccgccgggatatcaaataaaaactatacgattacagcgggcctgcaatatcgattctaa

SEQ ID NO: 161829 - DNA, 297 bp, Enterobacter cloacae
atgagcgagcataacctgttgttgttgcatgacaagccagagcgaccgaagtgtagacataaggccaaaatcacgttagcagaaagcgagatgctcaggtgttcagatggcttagaattcgtctgcgacaagagtgaaaaactgcgggtcacgttcgcgctggacttctgcaaccgtgggggcatagactgggcagcaatcacgggaggttatgacagttcgacggtgcgggatgtgattctgaaagcgcatcggcgacaggttgcccgatacagcggtgcagtggctgacggataa

SEQ ID NO: 161830 - DNA, 477 bp, Enterobacter cloacae
gtgagagctgaaacgaaagaagctatgcggatgtttttggggggacgttgctacacggctaaacaactcgagaaggactatctctctgaagtggcaggttacagcgacgaccgctgggaagcgccgcaaagagctgcccggctggcggcagcggtaaaacgctacaaaacctctgagatgctgcgttttatttttgccaccatcgcgtatgatcccgacccggatctgaccccgcttgccgtgaggcggctgtgtcaggccttgttcggcagaaccggtagccagtggcttatagtggaaattttcggggtgaagggacggcagcaccgcagcgatgacagcactccggaggccgttgaaaaaatggcaaccagatatcgtcacgccgcaggactgcactgggctgcaactctggcggaaattgagcgggtaaagcgcaactatcagacccaggttaaggcatccaggaagggataa

SEQ ID NO: 161831 - DNA, 315 bp, Enterobacter cloacae
atgcgaacgacaagtatcaccctgtgtctggttttggcgagttttggtgtatccgctaaaatccttgcagacccagaccttacttaccaggcaaataaaacgtgtgctaaacgagatgtactggaactgaaagtccctttagaagccaataatccctcctcccccacatggggtttggacaagggcatggtgcaggccacaattgacgcactgaaagaaaatccagacatcgccccggctgactctgtagcctgccaacaggctgcaataaaacagtatcgggctgggcaaaaacactacagtaagctcaggtag

SEQ ID NO: 161832 - DNA, 204 bp, Enterobacter cloacae; identical to SEQ ID NO: 94232

SEQ ID NO: 161833 - DNA, 249 bp, Enterobacter cloacae
atggcatttcaggttctgaccactacagcagctagcattactgaacttaaacgtgaccctatgggtactttccacgccggggatggcgctccggtagccattcttaatcgtaatgagcctgcattctactgtgtgccaccggcactctatgcccagttgatggagcttctggaagatgaagagctgggacggatggctgatgagcgaagcggagaaaaggttatagaggtcaatattgatgacctataa

SEQ ID NO: 161834 - DNA, 285 bp, Enterobacter cloacae
atgacctataagctggctttcaacgaatccgctctgaaagaatggaagaagctgggtcatacactacaggtacagttcaaaaagaaactcaaagagcgcctggagaaccccagagttccggcatcacagctacatggacgtaaggaccagtataaaattaagctacgtggtgccggatatcgccttgtctatcgtgtagaggacgacattgtcacagtcactgttatcggcgtaggcaaacgcgaaaacgacgacatttataatgcaacccttaatcgcaattga

SEQ ID NO: 161835 - DNA, 1344 bp, Enterobacter cloacae
atgacaaaagagaccattagcatgagccttaaagaacttgaccgtctccagataattcgggattcagtcagccgccagatcacccaggagcaggctgcggaccgtataggcatatcaatccggcaggtgaaacgtctcgttcagcgctaccggattgaaggtcctcagggactggtttctcgtcgccgaggacaacgtcccaataatgcttttacgtcggaatttcggactctcgtcatctcacttgtcagagataaatatccggatttcggccccacttttgcctgtgagaaattacgggagctccatgagctggctttgtcggccgaaactttgcgcaagtggatggttgaggaaggtttatggcgtgagcgccgccgaaaaactgcccgcatttatcagcgtcggcaacggcgcccatgctatggcgaacttatccagattgatggttctccgcatgactggtttgaagagcgagggcctcgctgtacattaattgtctttattgatgacgccaccagtgcgcttatggtgctccgcttcgctcctgcagaaacgccccgcgcttacatggaaacgttacgtgattatctcgacaaatatgggcgtccccttgccctgtattctgacagacacagtattttccgcgtgaataatccggaacgtgaaggcgagctgacgcaatttacccgtgcaattaaaactcttgggatcgagccaattcacgctaacagccctcaggctaaaggccgggttgagcgtgccaatcagacgttacaggacagactggttaaagaattacgtcttcgcaatatcagtgatatcgaaacagctaacctgtggttgtctgagtttgtgaaagattacaactctcgcttcgcttcgatcccccgtgaaaatggtaacgcccacagggagattcttcattctccggaagaacttaactacatactcagttatcagtcccctcgtgtgctttccaagaatctgacctttcagtataaaacgagtgcatatcagatccgttcagaagggcaggtataccgtctcaggcatgcgattgtcacggtttgcgagaactttaacggtgaaataacggtgcttcatgaaagtcggtcgttgggttacgagaaatatgtcgatgggcctgaaccaataccgcttgatgatgaaaagagcgtacatgagcgtgtggataatgcgaggtttggtttgcgatcaaaatattacgtaaaacctgctgctgaccatccctggatgacacggagaacgcagagtaaagatgatgtgaagccgccaacgttacccagaaagaaagtaggcccggatacgaccccaaaatag

SEQ ID NO: 161836 - DNA, 189 bp, Enterobacter cloacae
atgacactcactgcatattaccaattaagaaatacaaagtcctcaggtcttggtttcgaattgctgaccagtgagccgggagcctttattgtgctggaagaatgcagttatgagaaaccgtatgaattgcccgttatgggcataacgggagtgcaggcgatcgttcgactgcgttcagctgcacgatga

SEQ ID NO: 161837 - DNA, 417 bp, Enterobacter cloacae
atgcggcaggcaatttgccagtatgctgaacgtgctgcggaaaaattgcgtcaggaacgtcagtactgcggtcaggtgtcagctttcataaaaacctcgcctttttcaaaacatgaaccctattacagcaaagtctccagcgaacagctctgcattccgtcacgtgaaacgtgggacattatcgtggcggtgggccgggttctggataaaatctggaaagacggacataactatgcaaaggcgggtgtcatgctcaacgatttccgtcactgcggagttacccagctaccgttatttgatgaagggaggtcgtatgcaaacagtgacgcgctcatgaacgtactggatacgataaacaactcaggcaaaggaaagtatggtttgccggtcggggcatcgcaccggcgtggtcaatga

SEQ ID NO: 161838 - DNA, 996 bp, Enterobacter cloacae
atggaattaacgcaagataaggctgacgcgtttgcccgcattcctttgacctatttgcgcttggaatacccgaaccacatcatgcacctacttaatgatgatggcgacgtgctgctgcctcgtgaactgcacccgattttttacggttgttttgactggcattcggcggtacacggctactggctgctgctgcgctgcgtgcgtctttatccccacttaccgtgccagaaggcgatcgttgagcttttcgaccaacacctgaccaaagagaacgtggcgaatgagctggcctatttcaccgcaccgttccgcgactcgtttgagcggccgtatggttacggctggctgctggcgctggcccaggaaatgaaacagtcgtcgctgtcgcaggccgcaggctggtatcagacgttggagccgcttacccagtatattcgcaaccggctggtggattaccttgctaaactcacctatccgatccgcgtggggacgcactacaacacagcgtttgctctagctctggcgctagattatgcccgagctgtagaagatagcgcgcttgagcaggctattctgtcctctgcagagcggttttatcttgccgacacgcgctatccggcccactacgaacccggcggcgatgagtatatttccggcgccttgacggaagcgttattgatgagcaaggtgtcggcggacttttccgcctggtttgacgcgtttttgccggatgtcggctccgttgcggaacttatgaacccggcggaggtgagcgatcgtaccgatccgaaaattgcccatctcgacggattaaatctcagccgtgcctggtgcatgaagcacattgcgaaagcgcttccggtcaaccatccggcgcagcaggtgctaagtgatgcggtggcgaaacacctgacggtgagcgtcgagcatgtggtgggcagccactacagcggctggcactggctggcgagctttgcgttgctggcgctggagtaa

SEQ ID NO: 161839 - DNA, 318 bp, Enterobacter cloacae
atgatgacgcttatcaccattaaccgtgtgtattacctgattggttttgtcgtgatgctgctggttgtcatgacccttcgcgatcgcgccaatccaaagcgttttacaaccgcgttgttctggtttttgtttggcgggatcttcctgtttggcgacctgatggtacaggaactcggtaaatccttggcgtaccgcatcatcggcggcggcgtcatcgctatcgccctgctggcgggatttagcctagtcgggatagggtactataaaatgtccaccgaggaggcgcgagttgcctcttcgaatatactcaagaactga

SEQ ID NO: 161840 - DNA, 333 bp, Enterobacter cloacae
atggccgaaggagcggcgctgaacgaatacggcgaagtcccacagcacattcgcgacaaaatcaaagcccatgccgccgcgtgtgacaacatcgcagttttcttcggagaagatatctttattgcttttggcgcagtgctgctaattgacgcgtttctgaaagagaacggcattcagggtatcgaaccgctgcatatcggcctgtgggccattccaaccgccattgcggcattaattattcatattacgcgcctgctgagcctcgatgccagcatccgtcgagacatcatggaatggcgagcagagcagaggatgcaggagcccacacaatga

SEQ ID NO: 161841 - DNA, 321 bp, Enterobacter cloacae
atggacggtactacactgttgccgctgatcgggataccgatcgtggttattggttttgcattgcgcttcaacccgctgctggtggtcgtggtagcggggctggcgacgggtttgctggtcggtatggatttcggcatgctgctggaaaccttcggtgagaagttcgtgaacagccgttcgctggccaccttcattctgatcctaccggtcattggtctgctggagtattacgggcttaaggaactcgcccaggcctgggtggcgaagatcgctagtgccacttcggcgcgtattctgatgctttattttgttgcgcgttaa

SEQ ID NO: 161842 - DNA, 339 bp, Enterobacter cloacae
atgacttcagaaaagagtgctaacacccatcacgacgatatcaacgacggccggatcgtttcctcccgccatctggtgtcggatcgctgcgcggagctgtcggagctggaatatgcgctaattatgaccagcaacgcattcaacaaatggatggtgcgctgcatgaccgcagcgggtgaacctgacatgggcgcctttgacgtctccctgctacatcatatgaaccaccgcatttcctcaactctcgccttacggtcaggtttttatcatctggagaaaacgggatgggcccaaaaggtattcggccagacggatgctgacagcatcaggactggctga

SEQ ID NO: 161843 - DNA, 123 bp, Enterobacter cloacae
atggctgatgttctggaaggtttcatcctcatgggaaatatggaaaacttacggttcgaattttctcttaaagattcacatgagaagcttaaattattttggcgatgtctggatgttatatag

SEQ ID NO: 161844 - DNA, 270 bp, Enterobacter cloacae
atggacgtacaacccaacgtacagactgacacggtcattaaggcgtttctccgctcggagttgcagttgatacggagtcaaaaaaaactactcagtgtgttgcctcgtgatctcgcgtccgactaccgctatataccggagaacctgctggagcggtttttccatcctgccactgatgcgcgtctaaatagaattgccctgtcagaagccaggccaggcagcctgctagttcccgtgtcaacgggaagcctgttttatggggtgagttaa

SEQ ID NO: 161845 - DNA, 450 bp, Enterobacter cloacae
atgaacccgataattacggcacatcatgaaatcgttatcgagaactcggttcgctatatcgagttactgaaatcagaggcatcaaaaattctggatgaatactgggaggcctggaaggcgcggaatcaactgatatcccagacctcgtatgcaaacgggggaagatttatatccggtcgttttgctcctgtgctgagaaaggttggatcgtcgcaaaagctgacaattgtatggaaaggtttttcgcccaggttcaaaaacaaaattaaacatcatggcgtggttgttaaacctaaactcataggttacagcgttagttgttttaaaaataccctggactgggaactggagatgatccaggaaacagaaaaaaaattaaaccaatccgtgaactactcgcggaataccatcaacgaaaactggccgacatcaaaagactggaaaaactga

SEQ ID NO: 161846 - DNA, 789 bp, Enterobacter cloacae
atggctggcaacgcatccccaaaaactgaaccgcgtaatcaacgaaacgctgtaaataaccttcctttagggatggtcatttcaaaattaaagccactttcaagtgatttctatacacactttcataaaaaaaacagagcctgcctgcgccagtttaacgccatctccaatgcaatttataatattttccgcctggtagaaggtgaccaggcgacaagcactaaagttcagaaatggctctccggtgtttacgatgaactgtcgggtaatgtaaataccctcaatgagcagattgacaaaaatgtcgccagactacttctggatgattcatcatacgaagggtttgactatggtatatttgaaattcgctggaaccacccattgttctataaattgctggatattatccagaccgccaacgtcctgactcgtcaggcacaccagttgtggttatgcggtcagatatcacaacaggttcatgaccgaattatcttgcaactcctgagctcactgcaggttgctatggacaagattactaaaatactgaacgttgaaaatcgtgtgaatggaaaatacgacatattaccattcatccagagcattaagcggtttaaatcggtggaactttatattgccagtctcgaaccgaaggcccttgctcagtccggttacattgacatttcagctgatactggcagtgagcagacattaaaaccagaggaagtggcaggctctggcaagccatctgacaaaacacaatcttctgccactcctgtttcggcacaataa

SEQ ID NO: 161847 - DNA, 297 bp, Enterobacter cloacae
atgaaaaccgaacccgcggaggaaaacattgctgagatcacagataagcgcctgaccatcggaatggatgaacttccagttctccgtgtactggatgcgttgtgttataacgagaagcgtcgagctatgaactatcccaattcagaaatggttaacatcggctggttccagcgtaagatggctccttttattaacgttcacagcgatcacttcaacaacagaattaaccttcaggaagcccgatatctgtcgggcttttttctacccgggagcaaattactctgcaccccattctga

SEQ ID NO: 161848 - DNA, 843 bp, Enterobacter cloacae
atgttgttacttcacgaggtccgtcaccagcggctgcgcaacaggatcattcttgccgttgcgctgctggccgctatcgcctccatttcgcccgaacagctcggcatcacgctatacaagctgtctctggtttccatagctgccattctcggctaccaccctgatcgagcactgtttccttacgccagcccggggagctatctgatagaagattggaaagagaacctcggcaagccggtgccagtgagccgcaatgagcctgaataccccgttgcaacgggctatgagctgatttgccgccgttctgctgcgatgtgcaccgattgtcgcggcgatctgcttcggcgtgacgatggggctctaacgatgatccgactcgcgcagtctctcatcctgcttagcctgctgagtggttgtcacccgttcttcgctgccagcattcaggttgaggcccggcaataccagcgcgagctgacccgcaatgcacgcgctgtctgggggcttaatgccccagtaccatcccttcaacccagcaggcggtctgtaattttttgcgaaggccattaccaccgccaggtacggcggatgctgcagatctatcagcgtaatatggagatctacgcctgctggctgcaggagtttttcccctgcggcatctgtgttagccgcccgaaaggctgctttatgttatggttcgagctaccggagcaggtggatatggtttgcgtcgcgaagcagttgtgccggctgaagatcttggtcgcgtcaggatcgctgttttcggcatccggggagtatcgagcaactgcgccctgccgccaatcgagaagcataaagagttga

SEQ ID NO: 161849 - DNA, 345 bp, Enterobacter cloacae
atgcgacgtaattcacaaaaatggataccatttggattcgatacggtttcaaataaaattgttgatatcgccagcgttgagaatggcctttcatgcaactgtgtctgtctcatttgtggaacatccttgattgcaaaacaaggtaaaaaccaaaaatggcattttagccacagcacagaagtaaaaggggtttgtagtgagctcacactacaacatataaaaaaatacataaaggttaaaatacaggaaaaaaataccttgctcttcctcatcttctgcaaggtaaggagtaagggatcgttaacctcaaaaatctcgctggtggtgggattgtttgtggcctaa

SEQ ID NO: 161850 - DNA, 255 bp, Enterobacter cloacae
ttgttgaaaagcctaaatgtgcacagtagcctgagagaaacctatctcctgaagttcaggaagtgcagcacggcagaaactctcgataaagtttttgaacgtatcctggataaattaaatgatgaaggaggggatataaataagataaccagcttgaatggagcgtatgatcaccgcagagctgagatctacatgaaaaaaatctatgacaaaatacctgcctctgtgtggcatctcatccccgatgagatctga

SEQ ID NO: 161851 - DNA, 1137 bp, Enterobacter cloacae
atgacagataaaactaagctggttgcgattgcacgaaccgatgacatgagcgctcttgaagcactcaagctgttacggtttcgccgttacaatacggcaagaagtcagttaagagtcacaagtgtctggtctgcatggtgcgccaggcacggtctgccccccttccccgttacagcagttgatgtcgagcgctatattaatgggctgaatggatccgttaaaatggcgaccatttctcattttattgcatgcctttcaagcgtaaacagcagcctgggttttccagacttccgcaacgttctgatcaaagcactggttcaggtatggcgggcgggggagaatgagaaaaaaatcgtcaccggtcaggcccttccatttcttatatccgatctcaatattcttcgccggtcactgcataaaagcgacgacctgagagacatacgcgaccttgcaatgatatgggttgggtttgaaaccctgctgcgtaacgtggaaattcgaaggattaaaaccggcgacctgaaatggcaaaatgacacgtcctgttaccttctggacgtcatgcggaccaagacaagcctctcaagtaacctggcatttcagctctcaccacaatgcagtcagcatgtcagacggttgattgagacggtggaatacaccgatactgaaaccttcgggcaccgttttctttttcagcctgtgaacatccatacaaaccgatatttcccacccaccagcagtaagctatcacggggtaaatccatagacaggatgctggtcaaagcaggattcagtcaggggttactgacgcagctacagaatgaatcaaaggtatcacgggaagatgttggtatgctgtcctctaattcactgaaccaggcatttgcacgcctctgggggattgccgggaaggtcggcgacagtaaccgacagtccgggcggtaccggacatggacaggacacagtgtgcgtgtggggggagccatagagctgtttaaggccgggtactccctggaaaagattaccgagatggggaactggtctgatccaaagatggtcttccgttatatccgtggatatcttgccagtgaaaaagccatggtaagctttatgcgtaatcatctggacgatatatag

SEQ ID NO: 161852 - DNA, 270 bp, Enterobacter cloacae
atgaataataaaagaacgattaccacgcgagagcagattaaaattaatggagaaattcgtgagagaacagcaacccatattgttacaggtgctcatgggtacgaaaccctttgcataagtggttatattgttgacacaaacgagatgggtgaggttatccataacagcgaaaaattagcggaagatttgttacctgttacttgtcctacatgcagggtcatttggtatcacacgcatgaatttacactcgatgattttgacagtctttaa

SEQ ID NO: 161853 - DNA, 1368 bp, Enterobacter cloacae
atggcagtctggttggcagaaaaagcgctgttgcctgatggctgggcaaataatgtcggcataaccgtgtccgaagaaggcatcataaccgcgctggaaaagaactcagcgccgaatccgcaggcgacgcgcatcaaaggggtcgtcgtgccgggtatgccgaacctgcactcccatgccttccagcgggcgatggccgggttaacggaggtggcgggaaacccgtcggatagcttctggacctggcgggatctgatgtacaggctggtagataaaattacgccagaacagctggaaaccatcgccagctatctgtacatcgaaatgctcaaagccgggtacacctcggtcgccgaattccactatctgcatcacagcagcagcggcgcgccttatgaagagcggacggaattagcgctgcgtatcgccagcgcggcgaaacataccggcatcggcctgacgctgctgcccgtcctctacagttacgccgggtttggcgcgcagccgccctccgttggacagcgccgctttatcaacgatagcgacagctacctgaatatgtacgagtcgctcacatcgcggctggccagcgagccaatgcagcgtaccggtctgtgcttccactcattacgggccgttacgccggagcagattggcgccattctggcctgccatcctggccagcagccgattcatattcatattgctgaacagcaaaaagaggttgatgactgccaggcctggtccggcgagcgcccggtggagtggctgtacaaccatcttcccgtggattcgcgctggtgcctgatccacgccactcatctgacgcctcaggaaacgatgaagatcgccacatccggtgcggtggccggcctgtgcctgaccaccgaagccaatctcggcgatggcatattccctggcccacaatatctggagcataacggcgtctggggaataggttccgacagccatattagcgtcagcgtcagcgaggatttacgctggttcgaatacgggcagcgcctggtagcccagcgacgcaaccggctcatcgtcccaggcgagcctcacgtcggcaacgtgctgtatcaaggggcactacgaggcggcgccagagcgctgggccaaaacattggccagctaagtgtaggatatcgggccgatcttgtcgtattggatagccagaatccctttatcgccagcgcagaagaccagatgttgctcaaccgctggatcttcgcctgctcatctaatcccattaccgcggtgatgactggcggacgctgggtgattgaggatgggcatcaccataaagaagaatctgtctctcaggcatttattcaggtaatgaaagatcttgcagcctga

SEQ ID NO: 161854 - DNA, 762 bp, Enterobacter cloacae
atggcgcgtaacgacctgtcaaattcggattccatggatgagttacttgaacatcccgcccccttttatgaaagggtaaaggccatgatcaaaaccaagatccacagcggggcatggcccgcgaattaccgtgttccttctgaaagcgagctggtcacgctgtttggctatagcagaatgacgattaaccgcgcgttgcgagaactgaccgcggagggcttgctggtgcggatgcagggggtcggtacttttgtcgccgaaatccgcggccagtcggcgctgctggacattaacaatatcgctgacgaaatcgccagccgtggccatcgccaccacgccagagtcttcagactgacggaaatcgaagccgatgcccagcaggcgttcagctttggcatgcagcagggttgcggtctgtaccattcgctgatttgccattatgaaaatggcgtaccggttatgctggaagaccgactggtgaatatgcaggttgtgcctgactacctgcagcaggattttacacgtatcacgccgaacgcctatctctcctcaattgcgccgattgttgaaggcgaacacgttattgaagcggtcaacgtcacgcgggccgagtgtgtttacctggaaattgatgaacatacgccttgtctgcaggtcaatcgtcggacgtggaccggccgtcaggagaagaaaatcgtcaccagcgtgcgcctggtctatcccggtccgcgttaccgcctggaagggagcatgcgcaaatga

SEQ ID NO: 161855 - DNA, 558 bp, Enterobacter cloacae
atgatccgtctgctccctgccgggttgtatacggaaatgccctggaaaaacggccagggcgtgacgcgcgaagtggcccgctatccggaagcgggggaatatgactggcgtatttccctggcgaccattcgccagcctggtccgttctccgcatttcccggctacctgcgcaatatcagcgtgctggaaggcggcgggatgtacctgacaatcgatgggcagcgcagcgcattgattacgcctttccaggcgctggggtttaacggcgcgagcggcgtatcctgtgagattgtcggcggcccgctgctggattttaatgtgatttaccgggaagccgctatgcgggctacggtgagctggtgcggggcggggacgtggtcgcatcagggcggactgcggatattgtttaatgccgggcccgcgttgcgggtgagcgtcggcgaccaacgctatttactggaacattacgacagcctgctggtggatgaagcggtggcgctggttatccaggactctccgggcgcgcgtctggcccgcatcacgctgattcccctttaa

SEQ ID NO: 161856 - DNA, 1533 bp, Enterobacter cloacae
atgacaactcctctgaacggcagcattaccctcgggcgggcaccgggtactgtggatgagatagtgcggattgccgacggcgcgccgatcgcgctggagaaggccgcgctggataatatggcgcgggtcagcagccgtattcagcgcgctattgaacaaggccaggtaatctacgggctgacgaccggcgtcggcgatctggtcaccacccggctttccccggacaggatgacggatactcagctgaatatgctgcgcagccacgcctgcggagtcggtccggacctgacggtgcgtgaagtgcgggccatgatggcggtgacgttaaaatccctgctgcagggatacagcggcgttaccccggcgctggcgcagcgtatcgccgatatgttgaaccgtcaggtcacgccgtggtcacccgccggcggctccgtcggttacctgattgccacagcccatatcggccttgcggtcttcggcgaaggcaaatgctggtatcagggagaactgctgccggcgcaacaggcgctgacgcgggcgggtatcccgccctatgttcccggccccagagagggtcacgcgttggtcggcggcacctatgagatcaccgcgctgggctgcctggccgtggcggatttccagcgtctgctccccgtcgccgatatggcgggcgggatgtgcctcgaggccatgcggggcaatacgcgcggctacgatgcccgcctgcacgccctgcgccctcatcccggacagcaggaaaccgcgcaaaacctgcgccgcctgctgaaaggcagcgagatcctggcgcgttatcgcgaccaccgggttcaggacgcgcttagtttacgctgtatcccccagatccacggcgcggtgcgcgaccagctggcccactgtcggcagattatgaccatcgaactcaattcggtgaccgataacccgctgtttctggtagaagaagacaggcttatcgtgatgccagggggcaacggtcacggtgcgccaacggcgctgccgctggatgcgctggccgttgccattgcccagttgagcaccgcttcccaagcccgttgcgaccgaataaccaatacgcatctcagcgggctgccggcctttcttatctcgccggattcggggtactccgggatgatgatcccaccctacgtcgccgctgcgctggcgggcgataaccgcagtctggccggcccggccagtatccacacggtatccacctgcgccggtcaggaagatcatgtcagcatgggggttgcctccgcacgcaaagcgcttaaggcggtagaaaacgccgtagacatcgtcgccatcgaactgctgtgcgcctgtcaggcgctggagttccatcgcccgctgcgtgccgccgtgggcagcgaggcgacgctggagagagtgcgtcaggcggtgccgttccgggataaagatacgctgctctaccccgatatacatgcgctacgcgccctgattcatcagggcgaactcagcgcgatgctgcaggcattgtgcgaagaggagtga

SEQ ID NO: 161857 - DNA, 876 bp, Enterobacter cloacae
atgaatatgaaaaaacgtattttgacgctgtgttcagcgctgctgctgtcggcgacctcatcggcctgggccgcgccgaaagtcattgtcggttctgcagacttcccggaaagccaactgctgggcaccatttatgcgggtgcgttagaagcgcaaaacatcccggtggagaaaaagctgaacatcggcagccgcgaagtgtatatcccggcgctgctggacggctccatcacgctgatcccggaatacagcggcgcgctgttgagctatctggatgcgaaaaatgcggcacacggtagtgaggacgtcgccagagagctggccgctaagctgccggagaaagttaaaatgctgcagatctcccaggctcaggatatcgacgttctggccgtgacgcagaaaaccgccgataaatataaactgaaaaccatcgccgatttacagcctgttgccagccagctggtgctgggcggcccggcggaatggaaaacccgccatgaggggctctccggcctgcgcgacgtgtacgggctgaactttaagagttttaaagtgctggacgtcggcgggccgctgacgctcagcgccatgaaaaataaccaagtccaggtcgccgatctgctttcaacctcgccagcaatcaaaaaagatcgccttgtcgtgctggaagacacaaaacatctgttcgcggcgcaaaatattgtgccaatcgtcgccagtgaagcgctgaatgacgccgtgaccaccacgctgaataaagtttctgctcagctaacgactgaagatctgatcgacatgaacgagaaaattgccgaatttgtcagcatcgacgatatcgcgcatcagtggctggtaaaacacggatttagccaataa

SEQ ID NO: 161858 - DNA, 681 bp, Enterobacter cloacae
atgcttacctggtttatggatcccatccactggtttggtgagggcggcattttcccccttctggcgcagcacatcagctatagcgctgtcgctctggcgatcgcctttatcatcgcgtttcccgtcggctgctacaccggccataccggtaaaggggaaggcctgctcatcggtaccaccaacgccctgcgctccctgccctcatttgggctgattattctgctggtgattttactttccggcgagtttgagtccgatatggcctttattctgccctgtattctggtgctggtggcgctggcgctcccgccgattgcgctgggtgtgcatgcgggtattcgcgcgctcgatccctatgtccttgatgccgctcgcggcatggggatgacgcggctgcagatcctgctacaggtggagttgccctgcgcgcttccgctgatcctctccggcgtgcgcagcgccacgttgcagattatttccaccgccactatcgcagcctatgtctcgctgggaggattcggacgtctgattattgacggacgcgcggcgaacgatttcagccagatgatcgccggcgccatgctggtggcgctactggctttactgatcgactgcttgttctctttctcgcaaaaaatagtcgtttcacccggtattacccggcgtattaaaaacccataa

SEQ ID NO: 161859 - DNA, 645 bp, Enterobacter cloacae
atgagattcgattggctatgggcgcagagcgataaaatcttcaacctgtttctctggcacagctatctcgcaattgtgccggtagtgatagggttaattctggcgatccctgtcggctggggtattcaccacctgccatcggtcaagtcggcgatcgttaacctgtttggcttactctataccattccgtcactggcgctgtttgtgctgctgcccccgctgctccacacgcagattctggaccccattaatgttgtggtcgcactgaccatctacagctttgcgctactggttcgcaccgtctgcgacgggctggactccgtatcggccgatacccgtcagtccgcggcagcgctcgggtataaacccgctcagcagtttttccagatcgacctgccgctggccgtgccggtgattggttccggcctgcgcgttgccgtggtgtctaacgtcagtatcgtttccgtcgcggcattaatcggcgcaccgcagctcggctcgctgtttaccctgggcttccagctgcaatttctgacgcccatcatcgccgggatcgcgctcagcatcattctggcgctgctgctggatatgctggtggtttacgccactcgtcaactcagccgctggcaacctcagagaggataa

SEQ ID NO: 161860 - DNA, 1098 bp, Enterobacter cloacae
atgattaccttccagaatgtgactaagcactacgacaacggttcggtcgtagtagatggccttagcctggtagcgccgggtggcaaaattacggtatttgtcggcccttcgggctgtggaaaaaccacctcattgcggatgattaaccggttagtggaaccgtcatcgggccgaatcctgcttaacggcgaagccaccgagcaaatggatatcgtgcaactgcgccgccgtattggctatgtcattcaaaatgcaggtttattccctcacaaaaacattatcgacaacattgccaccaccgcgattctcaacggcgccgccaaaagtaaagccagagccagagccggggaattactggaagtcgtcggtctggatccgcaaatcgccaaacgcttcccctggcagctttccggaggccagcagcagcgcgtgggcgttgcccgcgccctagcggcagacccggagtttatgttgatggacgaaccgttcagcgcggtcgacccggtggtccgcgaacagctgcaggaagagtttttgcgtattcagaaagaggtgagcaaaaccatcattatggtcactcacgatattgatgaagccatgaagctcggcgacctggtcgcggtacttaaacctggcggcaagctggcgcagatggcctccccaggcgaactgctcaatacgccgcaaaacgcctttgtggcggactttatcggcaaagacagaggctatcgcaaactgagtttccacgccgccgacacagaaaccgggttacgcaacgagccctatgccgagctggactgttccttcgagcaggccaaagagatggccatcgaccgctggctgctggttacccaaaacggcaaagcgtttggctggttcgacacccatcagccggcaacagcaattacccacgacaacatcaatctgggggcgacgttccaccagcaggggagcccgttgcgccatttgctggacgctgcgctgagctcgcccaaccaccgggccgtgatcgtcgatgaacggcaaatcccgcaggggaccatccacctcgatcaagtactcgacatgtgtaaatccacgcgccaggagggagcatga

SEQ ID NO: 161861 - DNA, 1677 bp, Enterobacter cloacae
atgagtaaacaagcaacccgttttcgcgatgttgaaatcagagccccgcgaggcactaagctgaacgcaaaaagttggttcacagaggcgccgctgcgcatgctgatgaacaacctggatcctgatgtcgccgaaaatccaaaagagctggtggtgtacggcggtattggccgggcggcccgcaactgggaatgctacgacaagatcgttgagaccctgaagcagctcaatgatgatgaaacgctgttgatccagtccggtaaaccggtgggggttttcaaaacccacgacaatgccccgcgggtgctgatcgccaactccaacctcgtaccgcactgggcaaactgggagcacttcaacgagcttgatgcacaaggtctggcgatgtacgggcaaatgactgccggctcatggatctacatcggcagccagggcattgttcagggcacttacgaaacgtttgtggaagccgggcgccagcactataacggtagcctgcgcggacgctgggtgctgactgcgggtctggggggaatgggcggcgcccagccgctggccgcaaccctggcgggagcctgttcgctgaatattgaatgccagcagtcgcgtatcgactttcgtctgcgtacccgctatgtcgatgagcaggccagcgatctggatgacgccctggcccgcatcgcccgctataccgcaaaaggagaagcggtatccatcgcgctgcatggcaacgcggcggaaattttaccggagctggtaagacgcggcgtgcgcccggatatggtgaccgaccagaccagcgcacacgatcccctcaacggttatctgccgctgggcatgagctgggaagactaccgcgctcgcgcgcagtcccacccggtggagacgatccacgcggcgaaagcctcaatggccgaacacgttaaagccatgctcgccttcaggcagcagggcattcccaccttcgattacggcaacaacatccgccagatggcgaaagagatgggggtggaaaacgcttttgacttcccaggctttgttcccgcctatattcgtccgctgttctgccgggggattggcccattccgctgggcggcgctttccggcgatccgcaggatatctaccgcaccgacgcgaaagttaaagcgctaatacccgatgatgaacacctccaccactggctggatatggccagagagcgcatcagcttccaggggctgccggcccggatctgctgggtcggcctgggacagcgcgcccggctgggcctggcgtttaacgaaatggtccgcagcggcgagctgtcggcaccgatcgtgatcggccgcgatcatcttgactccggctccgttgccagccctaaccgcgaaacggaagcgatgcaggacggctccgatgcggtctccgactggccgttgctgaacgcgctgctgaataccgccagtggcgcgacctgggtttccctgcaccatggcggcggcgtagggatgggtttctcccagcactccggcgtcgtcattgtatgcgacggcagcgatgaagcggcggagcgcatcgcccgggtgctgagcaacgacccggccaccggtgtgatgcgccatgcggatgcgggttatgacatcgcgattgaatgcgccagagagcaaggactcaacttgccaatgattgcggactaa

SEQ ID NO: 161862 - DNA, 1395 bp, Enterobacter cloacae
atgaaaaataacaacacaacatacatcgaaacacgttctattgaacccatccctgacggtgaaagccacggtagcatttttagccagttcaccctgtggctgggggctaacctgcaaatcaccgccatggtcactggcgcattaactattgtattcggcgggaatgttttctggtcgctggccggtcttatgctggggcagattgccggtgggattgtgatggcattgcatgccgcgcaagggccgcagctggggataccacagatgatcagcagccgggtacagttcggcgtctacggcgcctgcctgccgattctgctggtctgcctgatgtaccttggctttatcgccaccggggcggtgctgtccggccaggcgatctcagcggttttccatactacggaaaccagcggcattctgctttttgctgccgccacgctggttatcgcctatgtcggctatcggttgatccacctgttgggtaagctggcgagcctggtggggattatcgcgtttatctacctgctgtggaaaatcagttcctttccggctattggcaacctgctgagtatccgaccctttagctggagtacgtttttaaccgccaccggccttgcggcttcctggcagatcacctttggcccctatgttgccgattattcccgctatctgccgcgcagcacctctcccgggaaggtctttttcgccgtcgggagcggttcggtgattggcgcgcaaatcgccatgaccgtcggggtgctggctgccgctctctcgcagggaaaactggtcggtcatgaggtggactatatcgtcggcctgggcggcaccggcgcgattgccacgctgttatatctgagcatcgcgtttggtaaactgacgatcaataccctgaatgcctacggcagcctgatgtgcctggcgacggtgtacagctgcgggaagcagcgagtgcgcgtaagccagtcggtacgtctgctggtgctggcgatgattattaccctggcgaccgctatcgcgattatcgggcaacactctttcctgtcggcttttaaatccttcctgttgttcctgttgactttctttacaccgtggagcgcgattaacctggttgattactatttcttcaaccatcaggcgatagacatggaggcgctgaacgatccgaacgggaaatatcgggcgtggaatgtgacggggctcggggtttatctcgttggagtggcggtacagacgccgtttattgatagtggattctattccggcccattcgtgaagatgctgggcggtatcgacatctcctggctcattgggctggcgctaccggcggggctctactatgtcctgcgcaaagcgcagtccgcagcggcggctggcgccgccatcagtcgttaa

SEQ ID NO: 161863 - DNA, 1209 bp, Enterobacter cloacae
atgtataccctttggcaccactgccggatcgccaccatggccgcagggcattatcagttgcttgacgatggcgcgatgctgaccgacggcgcagtgctgttatgggtcgggaaccgggcagaattgccggacttacccgttgcgcagcggatggatttgcagggcagggtggtcacgccgggactggtggattgtcatagccacgcggtgtttggcggcgaccgggcccgggaatttgaaatacgtctcaacggggcgagctatgcggagatcgcggctggcggcggcgggatcgccagtacagtcaacgccacgcgacaggccagcgaaagccagttgctggagagcgcgcggcagcgtatccgggagctgtgccgggacggcgtaacggcgctggagatcaaatccggctacggcctggatctggctaacgaacgtaaaatgctgcgggtgatccgccgtttaggcgacatattgccgctgaccgtgcgcagtacctgcctggcggcccatgcggtgcccgtcgagtatcaggagcgggcagatgcctggattgactatatttgcgaacgactactgccggaactgcatcaggaagggctggtggatgcggtggatgcgttctgcgaacacctggcattttcgccctcgcaggtggagcgggtctttcagaaggcccgggaactagggctgccagtgaagctccatgctgaacagctaacgctacagcatggggcggcgttggccgctcgctaccatgcgctgtcggcggatcatctggaatatttgtgcgaagaagatatcgccgcaatggcacgccatgggacggcagcggtgctgctgccgggcgcctattacttcctgcgtgagaaacagctaccgccgctggatctgctgcgtcagtaccgggtgccgattgccctcgccagcgatttaaatcccggcacctcgccggtgttgtccctgcgtctgatgatgaatatggcctgtacgctattccgcatgacgccggaagaggcgttggctggcgtgacgcttaacggcgcgaaggcgctggggctggatacagtttgcggttctctggaagccggaaaagaggccagcttcgtggcgtgggatatcgctcatccggcggagctaagctactggctgggaggctccctttcgaaacaggtgatttatcaaggtaaggaggtttattgtgattaa

SEQ ID NO: 161864 - DNA, 810 bp, Enterobacter cloacae
gtgattaaggcgtttgatttgcagcaggggaacctgccgcttctggtcagtatgccccacccgggaacgttattaacacccgaagtcgcccaggggctcacgccgagggcgaagcgtctggaagataccgactggcatattcccttgctctatcagaccatcgcggacatgggggccagcacgttatgcgcccgctattcccgctatgtggtggatatcaatcgcccggcggatgataaaccgctttacagcacggcgacaaccgggctgtttaccgatatcttttttgacggcgaagccctgttcgtgtcgggcggtgcgcctgacgcggcggcgaaggacgcgatactaaaacaggtctggctgccttatcaccaggcgcttgccgctgaactggcacgcctgcgtgagaaatttggctatgcgctgttgtgggatgcgcactcgatcaaatccgtggtgccgcgcttgtttgaagggcgcctgccggatctgaactttggtacggcggacggcgccagttgttcgacgcagctcagccaggcgctgctggcaagctgcaatgcgttcccgcagtatagccggatactcaatggccgctttaaaggcggatatatcacccgtcactatggcgatcccgtcaaccatattcatgctgttcagctagaaatggcccagtgctgctatatggatgagaagagctttgcttatcttccggagaaagggcagcaggcgcaacaactgctggagaggttgattaatactgcgttgcagtggggacgagatcagtacggcgagcccggaatgtga

SEQ ID NO: 161865 - DNA, 222 bp, Enterobacter cloacae
atgacattcaccgaaattttgaataccgggctcgccttcatgggttggctattcatcatggtccagaccggtaagtggtttacctctgctgttctgaaatcgtgggataaacaccgcaagtcatcacgtcgtcagaaggctattgatgagttatacgacgctttcgaactgcagagcattgagcctggtacaaccttcgtcttgccacaaagggcgctctga

SEQ ID NO: 161866 - DNA, 249 bp, Enterobacter cloacae
atggcgaaaccacgcaaactctctaccgacaccatcggacttaaaaatagtgtggatgcgggggccggtgacaattcgatcgccaaaagacttagcgacaatgccaaaagcgatcatatcccccaccgcggcgccagcctgttctttcttccagaaacgataactctcgatcctgtagtaaagacggatgatgccgtgagcgaacgccattacatcagagcgggtaccacccagcagaccagcgtttag

SEQ ID NO: 161867 - DNA, 630 bp, Enterobacter cloacae
atgtctgatggcaccacccgtttctcttacaaaggtcagccgcttttccactatatgggctgctccaccttcagtgaatataccgttgtcgctgaagtgtctttagccaaaatcaatccgcaggcgaatcatgagcatgtgtgtcttctgggttgcggtgttacgacaggtatcggcgcagtacacaataccgccaaagtacagccaggtgactcggtcgctatttttggcttgggcggcattggccttgcagcggtgcagggtgcacgtcaggcaaaagcggggcgtatttttgccatcgctaccaaccctgagaaatttgaactggcccgctcattcggggcaacagactgcattaacccgaaagactatgacaaacctatccaggacgttctcattgagctgactggctggggtgttgaccacacgtttgagtgtatcggcaatgtaaacgtcatgcgttctgcgcttgaatccgcgcaccgcggctggggtcagtcagttattattggtgtcgcaggcgccggtaaagagatctccacgcgcccgttccagctggtcacctgtcgtgtatggaagggctctgcttttggtggtgttaaaggccgaccctgcttcctggcatggtag

SEQ ID NO: 161868 - DNA, 180 bp, Enterobacter cloacae
atggtcgccaggtttaacgctagtgacgccttcacccacttccacaacaacgccggcaccttcgtgccccagaaccgccgggaagacaccttccggatcgtcaccagacaaggtaaatgcatcggtatgacagacaccggtgtgggttatttttaccagaacttcggctttgttgaataa

SEQ ID NO: 161869 - DNA, 312 bp, Enterobacter cloacae
atgcgtgatctgatccttcaactcagcaaaagttcgatttattcaacaaagccaggcaccgtcagcgatcaacccaagacagtgatgcgcatccgcggcctgcaattccgcggtgagcttcgtcagctcaacggtgatgaagccgaacgcgccagtaaacgctactaccagcgctttcccgctgcccgcatgatgcactcccccatctggaccattgatatcgacgagatgaaatttaccgacaatacgctgggatttggcaaaaagttgaactggtggcgtgaaggtgcctcatccatttctgcaaactga

SEQ ID NO: 161870 - DNA, 441 bp, Enterobacter cloacae
atggaaaatgtgaataatcacgcggcgacgatgacgcagcgtagcgtatcactagcaggtgcacgagatatcattcggacggcacaacgaaccgcgcgggaaaaaggctggcagattgccgtcgcggtcgttgaccgtgcgggcgaactggtagcgttagagcgagacgatgcagccatcggcattagcccgattgtggctatcggtaaggcgcgtaccgcagcgctgctacgcgctccttccggcgaatttgaatccttcatcaacggcggtcagccaagttttctcgctacgccaggcgtgacgcctcttgaaggtggtgtaccgcttcggttaggcgaagaggttataggtgcagtgggagtcagcggcgcacatggtgcgaacgacacgcgggtagctcaagccgctgcagacgctctggcaaaagaggataaataa

SEQ ID NO: 161871 - DNA, 729 bp, Enterobacter cloacae
atggcggagttacagggtaaaaaattgctggtaataggcggtagttccggcattggatttgccgtggcgcaccgcgccgggctggaaggcgcggtcctgacgctgctgggccgcaatcaggctcgtttggacgaggcgcgcgccctgcttgtcgcacaaggagtgaaggttagaaacataatagcttgcgacgctcacgatcacacggcgctgaccgctagcttcgcgcagttagagcctttcgatcatctggtctcgatggtaggagacgtgatggccggtggttttctaaaggcagacatgaagactatagaacatgtcattcattctaagtttctaaccaacgttctgatcggcaaactagcggcgaagaaactgcgctcaggcggttcacttacctttacggccggaactggcggccgggcgcaacatgcctgtgcaagctatgtcggtaatctcggtattcaggcgctggcgcaaggaatggcggcagaaattgcgcctgagggacgggttaacgtggtggcgcccacatggactgtcacaccgttctggcgtgaccagcctgagttaaaggtggaagaaactcgccagcattttgccaacctgattccgttgggccgcaccgcggaaattgacgagcttgcgtcagcctatttgtttctgatgaaaaacgattttgttaccggtcagcaattggcgatcgacggcggcataatgctcggctaa

SEQ ID NO: 161872 - DNA, 1281 bp, Enterobacter cloacae
atgaaaaataaaaacatatatgttaaaattccttttcattatggagttcataaattcaaaatatttaaaggccatagatggggagctttagatcattttttacttcaagagattagcctccaaccctatcctatagaagagctatcattaaaatctaatcttccacaacggctcataattgaaataatattgccatttatgaaattgggttgggttgaattagttgaattgaattctaaatacaacttcaggattaccagcaaaggaaggagtgttgctaatcgtgaggaactcccttatgaaagagagccactggaatctactcggaagtttttaatagatccaatcacagcaaaatgttatcgagtaaatgcaagaaatcaaaactatcagatatatcctacatcaagagcaaatgaattacttaagaataaacactcgatatcaacagaactcaaaattaaaaaccccaaacattcaccgttcacatcagacattctaaattgtgttgaagatactgacgaagaggttatagggtatgaggaaagagctaatgatagaccttattatcaaaatagaacttttgctatagcacaagttgatgaagcagataacataacgggtgttccatctgatatctcaaaagaattagccgcagatattatcgctgcagctaatatgaagcgaagtgaaataaatactaatatagactctcttagcaagaactcaaaaataagcacttataataccgagtcttttgaaaatagatttgaagaacactatattaatgaaactgaattccgaataatatcaggttcagacagccatcgagatcatcttatcgcgatgatcgataaatctgttagtagaatcattatccattcaacttttatacacttaaaaaactttgaatcaatctttcagaaattaactgatgctgctaaacgcggagttcaagttgatatcttatggggccaagaagaacccgatgatgagagaagtatcggaagttataaccaatttcttgagggccttaagtcttatagagaagaaattataaagcttggattaacctccctttttacaatacattcagatccaacaggttctcatgcaaaggttatagtatgcgatacaatggaattcggatattgttcaaccatcggttcatgtaactggttagcaagtggatttaataggtatgaatgctctgttttcgtaacaaatcaatatttattgcgagtcatagaattagtaataatgcagaaagacctattttaa

SEQ ID NO: 161873 - DNA, 258 bp, Enterobacter cloacae; identical to SEQ ID NO: 133439

SEQ ID NO: 161874 - DNA, 744 bp, Enterobacter cloacae
atggtatttccagaccaggccaaggcgatcacaaaccgcatcgagaatgctatgacgaaagacttgcgtggcgctgtaggtaaaaccctcggtccgcaagaggcggctaactacatcaaggcaaactctgattactccaatatctacaacaaagtcctgaataagaagattgctaacaacctgaacaaagcaacaaatcaggcaacaccagagctcatcaatagcgtcgtatatagtcgtaatgcatcagatataaagcgtatttggcctgcattggatgataaaggaaaggatgctatgagggccgcgtacattagccgcatatccgaaaagactggcggctcacctgctaaattcctcacagaggtcaataaactcaaacgtcaggccggaggtgagatatacaacaccattttcagcggaaagcacatgaaggaacttgatgcattgcatgaggttctgcgagagactgcgcgcgctgattctgcaaatgtggtaactcaaacaggacaggcactagctaaccctctaaggcttggagctggtgtagcttcaggcgggacatcattagcatcagaggccgggtatgggctggcaatgagagtgtatgagtcaaagccagttagaaacgcactgctaaggctagccaatgcgaagcctggaacgccagcatatgaaaaagcattaaacaatgctgccaatctcgcaagaccattaattgtatctcaggctgcgcgagaataa

SEQ ID NO: 161875 - DNA, 231 bp, Enterobacter cloacae; identical to SEQ ID NO: 129799

SEQ ID NO: 161876 - DNA, 1113 bp, Enterobacter cloacae
ttggtagaaaacaaatcaccgatgagtccattcaactacttaattactaaaaatgaaaaatcaacaagaaaaatcagtattccacatcctatagtacaatatgagattggcaatttaatacactctaatgcagagtatattacatatttatgttcgaaatctaattttagtatcagaaaacctaccgcagttgcatcatattattacgagtcttcaccattcgattctcaatataattcagaattaaaggatgacgatgtcgctcagcaagacacaaatgaagaggaaaaatattcatcttcatatttctcttatgatggttacactctcctttataagttcttcaattcactaaaatttcaatctatagagaaaaaattctcatattctttgcgctttgacattgctaaatgttttagcagtatttatacacatagtataagctgggcaataaaaggaaaggctttctctaaagaaaacctttcttcaaattcatttgacagcaagtttgatcatttattgatgaagatgaatgataacgaaacaaatggaatattaattggaccggaattttctagagtttttgcagaaataattttacaagctatagatgtagctgttgagcgagatttagaagaaaaaggatataggaataaccttgattatgttgtaaagaggtatgtagatgattattttgtatttacaaaaagtgaaaatgtggccaatataatttatgagtcatttattcatgaaatgtctaaatttaaattatatattaatgagtctaaagaacagagagaaagaaggccattcattactaaacttactattgctaaaacgcatgtattaagtgaggtcagcgatttttttaaatcaattaaacgggataaaaaccatttacctaaaaatgagtggggaacaatcccaagtattgtatttatctacaaaccgtatactcgctccaacactttaataacgaaatttaaatccattgtcaagcaaaatgatacaaattatgatgcctttagtgggttaatgatgtctgtacttagatcgagattacaacgaataaataaagagataatgtatattacagatatagaaacctattga

SEQ ID NO: 161877 - DNA, 180 bp, Enterobacter cloacae
atgaaaatggtgattgttgtagatcgtaatattgaaactggcaaattagctaatgctattgctcattgtagtcaggggattaacgttgataagcacgatgaatacagcaccagtaatggtattacgtgcacccttagcaatcaccctatagtaattgtagcggctaagaatgctaactag

SEQ ID NO: 161878 - DNA, 831 bp, Enterobacter cloacae; identical to SEQ ID NO: 119722

SEQ ID NO: 161879 - DNA, 258 bp, Enterobacter cloacae; identical to SEQ ID NO: 133439

SEQ ID NO: 161880 - DNA, 258 bp, Enterobacter cloacae; identical to SEQ ID NO: 133439

SEQ ID NO: 161881 - DNA, 252 bp, Enterobacter cloacae
atgagttatcattactattcaaaaatttcctggcttcgtaatgagtataacatgatatattattactatttagttcaatgtaattatctttaccaaacaatctattgggcaactctaaatatgcatattgtgaataacctaaatcccatgttttgtcactcgttcgatggtcaggttgaaatggtgttagtacataaaaaagttctttccctttcaatactacatcatatcgattgtgttctgaggtattaa

SEQ ID NO: 161882 - DNA, 543 bp, Enterobacter cloacae
gtgtcgcccaacaggctccagcgacagttcaatccggatgctccggataagcgttgggtaacggacataacctacatcaggacccacgaaggctggctgtatcttgccgtggttgttgatctgttctcacgcaaaattatcggctggtccatgcaatcccggatgacaaaggacattgtcctgaacgcactgctgatggctgtatggcgccgtaatccccaaaaacaggtgctggttcattcggatcagggcagtcaatacacaagccatgagtggcagtcgttcctgaaatcacacggcctggagggcagcatgagccgtcgcggtaactgccatgataatgcggttgcagaaagctttttccagttgttgaaacgcgaacggataaagaaaaagctctacggaacgcgggaagaagcccgcagcgatatttttgattacatcgaaatgttttataacagtaagcgtcggcatggttctagcgatcagatgtcaccgacagaatatgaaaaccagtattatcaacggctcggaagtgtctag

SEQ ID NO: 161883 - DNA, 837 bp, Enterobacter cloacae
atgaagtacattagagcaggggtttcgtctattttagaaaagggcgatactaataaaaaaactctaaataaccctgatattaaaagaacttttgccatcataatatctatcgaaaattatgccccaagaggtgaaaagacaatttcaccagtgaaatatgcaaataatgattcgctagagttcgaaaaattattaattaacagtatgaatgtgaaggaagaggatatttattcattcaccgatagtcaggccttaagatctgacttacagaatggtttgaaaagcatattttttcaactaacagagaatgatcgtttagttttttattatgcagggcatggatttcataatggtattacaaattacttaactacctatgatacttatccatcaaacttattggatacaacggtatctttacgtgaaattttattagaccctctgaaaggcacatactgtaaaaatgccttgatatttattgattcttgtgcagaacacctacaaaaagacagtcaaagaaacaccgtttttaatatggattatgaggagttcatgttaatagcaagtgagtttcctagctacagcattttcctttcttgccaaactggagaaagttcattctcttgtgatgaattaaaacacggcgtatggacataccatttaattaaagcgttatcaggtgatgttaaaaaaattaataactgcgaatttattactgataaatcattgcgagactatttatcgacacatgtctctaaatatgtaaacgaacaactccatctaagtcagaatccaaaagccatattagaatcaagctatgaaaatatcatcatttaa

SEQ ID NO: 161884 - DNA, 297 bp, Enterobacter cloacae
gtgtcgtgtccaggccggttaaactggctcacctctcgcgccggtcgctcccgcgtgtggtgggctccctcggttggtgagcaggtgttattgctggccatcggtggtgagctcgataccgcctttttgctaccgggcattttctctgacggggcggttatcgaatacgagcccgaaagcggcgcactcttcgtgtcaggcatcaaaaccgccgacgtcaacgcgtcggattccattacgtccaccgtacctaaagcctcgacccgcatcacgctcgatacaccagaggtggtatga

SEQ ID NO: 161885 - DNA, 273 bp, Enterobacter cloacae
gtgaacgccggcgtggagaaggtcgagcaaactgaatcgcagctcacggtgatgattggcaatgtcatggagatgtcttctctgattaaggagataggccacgccacgcaggagcaaacacaggcgctgaccctgattaacgcgtccatctcccgcatcggtacaatgacccaaaacaataccggtatggtggataacgtgacggacgccgcacaccatctgacgcagcgcacgacccgcctgcaacaggcgattgccgtttttggcggttga

SEQ ID NO: 161886 - DNA, 240 bp, Enterobacter cloacae
atgaaaggcagcgttattatcattggtgcgggtgtcagcggcctgtatgcgggcacactgcttgaaaaagcgggagtggattacgtgatactggaagcgaggaaaagaaccggcggtcgcgtactttcaggtcaggcgttagcaaacacgcctgatggggttcatgtggacatggggcgacctggttctggccggaaattcagcctgacttcgcacacctggttcatcaacttggattaa

SEQ ID NO: 161887 - DNA, 834 bp, Enterobacter cloacae
atgccaaaccacgttacaaacgaaatccgcgttatcggcgggactaataaacagcgtctcgcgtttatccgatcaatcaccaataagcgcgggaatattgatttcaacaatatctctcgcatgccgaagagcctgatgattgacgaaagttcctgggtggaaaaacttgccagcgctatcgctggcgagcacatgggccgcttcgcattcgaggaaattgaaagcccatccgcagtaatagaaatgatgcgcaagcacggaagcacggacaagttcataaaaaaggttaagcaacacgcattgatgcgcatcgaaaataagcgccgttacgggttttattcctggtacgactggtcatgcgccaaatggggaacaaagtggaatgcctacagtgtagaaatgccaatcaccaggccgcgtgaacgcgttaagcgtggctaccagcatcgaccaacgcacgtcagagcatacgagaaacgtgtcttcaaaaagaagctggcacgtcatgcagcaagcggtgctgctttggtgatccgctatgaaacggcatggagttgcccagagcctatttaccatgaacttgccagtagattccctcaccttgaattccatatcagttttgctgatgaagacatgggcagcaactgcggaacagtcctcctgaaagatggtgcatggtcagcagatgacattgctccgcgctggagtgaacagaccgaagaagaacatttcaagtggcgaaagtttgcttttcaggttcgctacccaggcgactcgccgctacagcacggcatgaatgaccagtacaaatacgacgaagacgaagacgactga

SEQ ID NO: 161888 - DNA, 216 bp, Enterobacter cloacae
gtgatgcttgaggccataaaagaggcgcaggcgacggcgaaagccgataaccgcccgctggcaattctcggctatgtgctcggaaccgaccaggactcaccgtccctggcacagcagtgtcagcttctgaccgaggcaggggtgatctgggcgagcagcagcaccaacaccggattactggcacgtgaatttgtctttaaaggggagactgcctga

SEQ ID NO: 161889 - DNA, 252 bp, Enterobacter cloacae
atggtctctcacatttttctgtcagaaaccatcggtcgcctgctgccatcggtcttagacctgaatctagacacccagaagtccacctacagccttagacagagtgtcgaatacctcagcattaagtcgaccagagagaaccatgtagaggcccacagagaggaatacaagtttatagaccagagtcaggagagacttcaggtctgtggaagtcgtagacactcagccctccttacgattgatatgttataa

SEQ ID NO: 161890 - DNA, 1158 bp, Enterobacter cloacae
atgctcaccgttaagcagattgaagcagcaaagccgaaagaaaaaccataccgccttctcgatggtaatggcctgtacctttatgttcctgtatccgggaaaaaggtatggcagcttcgctacaagattgacggtaaggagaaaatcctgaccgtcggaaaatatccgcttatgactttgcaggaagcaagggataaggcatggactgcgaggaaagacatctcggttggcatcgatccggtaaaggcgaaaaaggcttcgtctaacaacaattcatttagtgcgatttacaaggaatggtacgagcacaagaagcaagtctggtcagtaggctatgcaactgaacttgccaaaatgtttgatgacgacattttacccatcatcggcggtcttgagattcaggatattgagccgatgcaactgctggaagtaatccgcagatttgaagatcgcggtgcaatggagcgagccaacaaagcccgcagaagatgcggcgaggtttttcgttacgctattgtcaccggaagggctaaatataacccggcacctgaccttgcagacgccatgaaaggataccgcaagaagaacttcccgttccttccagcagaccagatgcctgcattcaacaaagcactggcaacattttcaggaagtatcgtatcgctcattgcgacaaaagttttacgttatacagccctaagaacgaaagagcttcgttccatgctatggaagaacgtcgattttgaaaacaggattatcaccatcgacgccagtatgatgaagggacgcaaaattcatgtggtcccgatgtcagaccaggtggttgaacttctcactacgctaagctcaatcaccaaaccagtctcagagtttgtttttgccgggcgcaacgataagaagaagccaatctgcgagaacgcggtattgcttgtgatcaaacaaatcggctatgaaggtctggaaagcggtcacggatttaggcatgaattcagcacgattatgaacgagcacgaatggcctgctgacgctattgaagtgcagctggcacatgccaacggcggatctgtgcgcggtatttacaaccatgctcagtatctcgataagcgcagagaaatgatgcagtggtgggcggattggcttgatgagaaggtggagtga

SEQ ID NO: 161891 - DNA, 276 bp, Enterobacter cloacae
atgctgcatgcagtgaatacgcagcatggtctccagcggatagggccgtcggccattgcccgccttgggataaaacggctcgatgacagcggtcatattctgccatggcaaaatctgctccatgcgggagaggaaaatctcttttcgggtctgacggcgcttagtgctgaattcactatcggcgaaggtgagttgatggctcatgatgtccctctgggatgcgctccggatgaatatgatgatctcatatcaggaacttgttcgcaccttccctaa

SEQ ID NO: 161892 - DNA, 390 bp, Enterobacter cloacae
atgggttttccatcgccagcagcagactacgttgaagaacgcatatcacttgataagcgtctcattgcccacccttcagccacctacatgatggtagctggcacgacatatctgcgtgcgggaataatgaagggtgccatgcttatcgtcgactcatcgctgacgccgaaagacggttctctgcttgtctgtgctgttgatggtgagttcaggatcatgcgttacaggacgctaccgcatccttgcctggagaaccctgaggatggaaggagggagccgttaccatcgaaggatgatgtgtctgatacttcgcggccggtatttggtgtgatcacctacagcatcaacgatgctcgctctggagaattcgacgactgcccggtgatgtga

SEQ ID NO: 161893 - DNA, 171 bp, Enterobacter cloacae
atgtgggtgcgatcgctggagaagccggtattcactaatgtttgcgtgtctgatgaatttatccggatgtatacggatgcggattcggttgagttttcacttaaggacattacgagcgatctggatgttccgcgccttaactccttaacggtggagctgcaagatgactga

SEQ ID NO: 161894 - DNA, 297 bp, Enterobacter cloacae
atgagtacttttgctgtagtacccgcaaatcagtctgcagataataatgcgaaaatgatttatcagtggttgagtggtctgtctgatcgacagggtaaaaagctcatttcaggtatttttggtggctatagcaatatcggcggcgtcgatgctttttccctgcaacaaggaaaagacctgcaggccctgaccgggaaattcccggctatttatagcgctgactatggaaggtgcgaacaagttcctgatatgagatcatcatattcatccggagcgcatcccagagggacatcatga

SEQ ID NO: 161895 - DNA, 435 bp, Enterobacter cloacae
atgaatttaagagcgttctcagcccccatactcaccctggtgctacttataacagcctgttcaaaccatactcaaaaaacaaacgtcagggtaatgcccggcaacgataaatcagcggaagttgatgatcttttaggtaacccagggtctccaacatttcccccggatcattcaaaaatagtcgtatatgcagcacaaatacggaatgccattgttgccgaaatgtacgaacccgatgcgtataaaggaaaaacctgctctattcgtatctatcttcagcctgatggttcagtgaacagtgcgacagcaaaagagggtgatgcaaaattgtgtaaagcagccatttcagcgattacacgagcgaaaatacccgccgcaccagataacgaaacatatcagagggtcaaaaatgccgctcttgatttcagactatag

SEQ ID NO: 161896 - DNA, 1272 bp, Enterobacter cloacae
atgtttgccctggccgatgtgaacagcttctatgccagctgtgaacgtgttttccgcccggatttgaaaggaaagccgatagtcgtcctgagcaacaacgacgggaacgtaatcgctcgcagtgccgaggcgaagccctggatcaaaatgggaactccgtggtttcagataaaaaacgaaaggtacccggaaaaaatatatgcgttttcaagtaattatgaactttacgcctcgatgtcggcgcgcgtgatgaactgcctggaggaactggcccccagggtggaacagtattccattgatgagatgttcctcgacctgaccggcgtggagcactgtatggggcttgaggacttcggccggcagctgcgtcagcacgtgtatgactgtacccgcctgaccattggcgtgggcgccggaccaacgaaaaccctcgcaaaatcagcccagtgggcctcaaaagagtggaaacagtttcgtggcgtactcgcgctgaccaggggaaatccgcaaaggacgcggaaactgctttcactgcagccggttgaagaaatctggggggtgggtaaccgtattgcacgcaagctaaatgtgctgggcataaaaaccgcgctcgatctggctctgacgaacccggccttcatccgcaaaaatttttctgtggtccttgagcgaacggtacgggaactgaacggggaaagctgcctttcgcttgaggaagcccctccgacgaaacagcaaattgtctgcagccgcagttttggcgtgaagatcacggagtacgagtcactccgtcaggctatctgtcagcacgcagagcgggcctctgaaaaactgcgtaaagagcaccagtattgccggcatatttccgttttcatcaaaacgtctccgttcgccattaaagagccttactacggcaacgtggctacggaaaaactgcttacacccactcaggacaccagggacatcattgcagccgccacaatggctctggagcgtatctggagggatgggcaccggtatgccaaagccggagttatgctgaatgacttcaccggctccggcgtttcgcagctgcagctgtttgacgaacgcccgccacgccctcacagtgctgagctgatgagggttctggacgggatcaacaactcagggctgggtaaagtatggtttgccggtagaggaattgcgccatcctggcaaatgaaacgcgatatgctctcccctgcgtacaccactcgctggagagatatccccgttgcgaggatcggttaa

SEQ ID NO: 161897 - DNA, 219 bp, Enterobacter cloacae
atgccaggaaccggcattccactccaattgcccaacggcattgtaggcaacaagacgctcttcaaattttgctttatatttctctatataaataagaagattatccgcctgtttattaagtattgttatttgcgtagtcattgtctaaatagccctccgaacgtttgccatttcaatgcgagccataacctgatttacatgctgtttcagccgcactaa

SEQ ID NO: 161898 - DNA, 702 bp, Enterobacter cloacae
atggtcaataaaaaagacgaaacccggcagtgcgctaacactaaccgggcttcagtgccaacaaaccaccgtaggaatgatgacatgaacaatatacagaacaatgaattgactttccacaatactaatttttcctatatggaaatggctggtcaggtttggctgacagcatctgagattggtcaggcgcttgagtacgctgatgacaaagctgtgcagagaatttacagccgccactccgatgagtttacggagaaaatgacaggcgtggtcaagttgaccacccctagcggaacgcaggattcacgcgtgttttcgcttcgcggaactcatttaattgcgatgttcgcacgcacgccaaaggctaaggaattccgtcgctgggtgctggatgtcctcgaccgcgaggtggcgcaatctccagtcgcgaagcagttcaccgacgatgaattatgctcccttgcgtatctgtggcgttcagcggcagtgatgtatgaggcatgccgtgaagtacatccgctactgatagttgcagagcatcgcttgactccgcgtttctgctcgattggcactaattacagccgtgggataaataaagctcgcgaaatccttaagcgggaaacgaaccacatcaaagaacaaccatggggagatagcgactggaaaaacgtattttcatacgggaaaggaattttgcagtga

SEQ ID NO: 161899 - DNA, 3672 bp, Enterobacter cloacae
atggctggcactgttagcgcaggaacaatcgtttatgaagttgacatggacacagctcgcctgctgcaagggcgtcgggatgttgatgccgcactgaatggattgagtggcagtatgggccgccttgaagccagcgtgtcccgcactgaacgctccataggatccatggagaggacaatgtccagcctgagcggagtagctaaggggttacttgcggcgttatcggttcagcaggttagcgcatacgccgatgcctggactgagcttaacaacaaggtttcgaactctatccgtacaggtgaaacgcaagccgaagtgatgcagcgcatctttgacatcagccaggctacgcagtcgacgctgaacggcacagcagcactgtactctcgactggaacgaggcaccagaacctacaataccagcgccgaagaccttgccagactcacaacgattatcaatcagggttttgctgtttccggggcaaccgcgcaagaagccgaaaacgctattattcagctctcgcaaggtattgcctctggcgttctgcgcggcgaagaattcaactctgtatctgaacaggggagtcgactgatggttgctctggctgattcgctgggagtgtccatcggtcagttgcgcgcaatggcagcagaaggaaagttaaccactgacgttattgtgaacgggttgctttcgcaaggtgatgcaattggaaaagagtttgctaataccacagtatcaattgccaaagggttgcaggttgctggtaataacgtaacgaaattctttggcgaaaattccactgttaagtcttttgccgccggctttcgcgattcggttataactgcttcggagagtctgagtacgctgagtgatgctctgattgtggtcagtgcagtcatgggaagtcgttacgcagcagctatcacgatggctaccgctgaaaagttaaaatccactgtggttacagcacaacagtccgcagcggaaaggcagttggctaaggatgaaatgggggctgcacaggcggttcagcgcagagcgatcgttgagcaagaggctgcaatagcagagcgaaccagagcagagcaaacgctggcaagcctcaaggcaacaaacgccttaacggtttccgaggttgctcatgctgaggccgaggtcgcgagcatcaagataagccttcaacaaatccaggccgaaaaggcattggaagcgcagagacttagagcacaaatcaccgaacagggccgcattgcaacggccacaaggatggcagaagtaaggcaggcagaagctgtcctcacaacgcgcctggcaaatgcagaagctgcggctcagggtgcaaggtctgcggcaattacagctgccagcgctcaaatagtaactgcaaatggggctgttgcaactaccaccgaagcagtgagggctgcaaatggccgactggctgcgtcgcaagaggtcgtggcagctacgagctttactatgctcggcgcgctcaaatcagttaacgccttcctccttcctcttggaggtgtcgccggtgttttactggcagtcgccgctggatggtatctgtacgctcagaaccaagcccaagccagaaaagaaaatatagcttttgccaatacgcttcctgatgtcattcaaaagctaaaagagatgaatcttgcacaggcgcagggcgtgagagctgataccgtcagttcaatcaaggcgcagaaggaagcaatcgaagacctggaatcgtctattagcagcctagagtccgagcacgaaaagtattcaacgctggctaagcaattcggcgttactgaagacaaaaataacggatatgtcatcaaggcggaaaatgcagccaacgaattagctaaaaaacgtcgggacttaagcggggcaacggcgacccttcagcagacagagggcgcccttcaccagattaatgtccaagttaaccaaggtatcgttgcccaaatgaaggcggcaagagacaacgctttagccatcgcagaggcagaaaagcaagcctcattcctcggtggaactcagacttttcttgctgcaaagcttgggcagacaacggagaagtttaaagaattcaactctgaggcattaaaaatagactggggtggcaaggagggtgagaagctcattaagcaagctgagcgtcgcctggccctgtctaagcgtgagggggaggccagggccaggcttcaggctacatatgatgccgaggatgctggagtgactgacgaaagagcagtcaaagcacttcaggaaaaatatgcggccacggaacgcgccacgcaagccaggaaggatcagagcaaagaggataagtcagcagcatctgaggctaaaaaatcagcctcggctactgaatctgttgctcagaaactggcaaatctgaagcagcaggcagggctggctgccggatcgacgcaacaactcagccgcgagcaagccatccttactgcccagcaatccttgggtgcagcagctactcaaaaagaccttgagcttgctggtcagtatgctgcaaccaaatgggatacggccaacgcactcaaagcgcaggccgcagccgagaagctcctgccagaagcgcgtgaaaacgccagctataagcaggatgttgaggatctgaataccgctctggctgctaagaaaatcagtcaggagcagttcaatcagacatctgagagactggaggcaactcaccaggcaaacctcgcaaaaatccgcgcgcagcaggcggtgacgccacagcaagaggcagttgcacaggttgatccagtgcagcaattagctaatcagcacgcacagcaactggcccttatccaacagttcgagcagcaggggttattagctcaccagaatgcattagcccttaaaaatgctgccgatacgcagtatgagcagcaaagaaccgctgcacaatgggagcttcttagccagcagagcctggggtacagcatgctgacaagtgcattagatgcgttttcaggtaatgcatctaatgcgttaaccgggctgatcaccggaacgatgtcagcgcaggatgctatgcgttcgctcgggaatacgatgctgaacagcgtggtcaatgcgctagtccaggttggagttgaggccctcaaaaacttcattatagggcagacattgggcgcagcggctactgctgctggagcatctcaggctgcaatcttggctacagcttgggctcctgccgccgccatggcgagtctcgcttcatttggggcaaactcagttcctgccatgaccggaattgcttcaacggtaggcatggcacagggccttgctttaaccggtatgcgttacaatggcggcccggtgaatgcaggaggtctttatcaggtcggtgagcgagggaaacctgagatttaccaggccagtaccggtaagcagtacatgataccgggcgacaacggcaaggtgatcagcaataaggatatgcagggtgggggaggcatcaacgttgtcttaaatgttcagaactataacggttcatcaatagatgcgcaggccagttctgacggcaatggcggcgtgactgtggatttaatcgtcgctgacctgaacaacggcgggccaatcagtaacgccataaccagcaacatgaacgttaaacgcacgccaagagggcagggctga

SEQ ID NO: 161900 - DNA, 534 bp, Enterobacter cloacae
atgcgaaaaagaagtaaccgaccttctatacaacgataccctgagaacaataaatcatccttttccgttgcgcctgtgctattcctgggtaggatgttcatttttaccaatgggggtaggggtatggcaattcaaattcctggcagtgttgaggactattataaagaagtcgaactgccggatggcaatataaagtacacggcgaatagagaacggataagggcagtggttgccatcataaacaaagaaattcaagatgtaatatcaaatggtggaaacgcgcacactgcatctttggatatcgctgatcagttcaatgagtttatttcttatgcaccatcattagctcagattgaactgtcggaaaagtatgctgaagaaatgcaagctgcagtaaacgatcttaatgataaaacggatagagttaatcgcgaaattgtggaaagggatagttcagttcacgccattgggcaatggattggagcagggattttgcttattttcatgttggtgttattcggaattttcaaataa

SEQ ID NO: 161901 - DNA, 990 bp, Enterobacter cloacae
atgatgacgacagcgcaaaccagaatcgggacgccaatcgtaccgcgcaataaaactgaccccacgcagtcatcgcggcaggtaagccggatgttcaacgatatcgaagaccggtatctcaacattaagcgccgcctgaaggatgtgttcgacctgcgactgaccgggcgccagcgggaaaccaacggcgagcggtcatggatgatgtgcaacaacgagggtgcagagccgtcgctgtaccaggtgaacgccggtacgtacatctacgatatgacagcggcgcaactggctgacctgttgcaggtggttcagacaatactggatgacgagcttctcgacggcggcaaccagaacatttgggctatggattacgtcgcagctgagtacgagcgtggcacgcttggggcattcacgaatctttcggtgcagtcaccggtatacgccagccagacgacgttacagcaacttctgtccagtgcggcatatcagaaccagatcgccagcgcatacgtcagcacgtacagcgactggaagggtatttcagatagtgcaagggctgatttagctaatgtcattgccgattctatcggacgagggattaacccgcgcgagacggccagcatcgttagcaagcgcctagatgtcagcatggctaaagccaagaacatcgcgcagacagaacaagttggcgcgctgcgggaggctaactggaatgagactgactggtccgctgacaggctgggtttaaataccggcctgctgtggctgtcagcgctcaagccgtcgactagagcgtggcacgccagccgtcacggcaaggtctacaccaccgaagaggtgcgcgatttctacagtgaaatgaagaaccgcgccaactgttattgcagccaaatccaagtattactgacagatgatggtcagatttataacgagggattggctgataaattggctgccgagcgcaagaaatggaagcctgacgaaaagtga

SEQ ID NO: 161902 - DNA, 213 bp, Enterobacter cloacae
atgagtcgtgaatctgaattcgcttcagctcgcatgcgtcattcagtctggtgcgaatgttatgacgaggtcatgagcatcccagcgaaaggtgaacgttcaaaacttctcaggaaaacagccggtctggtccgggctgatcggaatgagagaagaatggatgcgttcctgcagacatgctttgcagagagtatggagggtaaccatgcgtaa

SEQ ID NO: 161903 - DNA, 831 bp, Enterobacter cloacae
atggaaaccaaatttctttcagacggccgcaaggtcgttgtcgttggcgctctgaataatcaggaaacgatcgtccaggaagtttttgtcacgcagcagggagatgaaatccccggtggtgaacgctttgttgtgaagagcctccacgatcagccagtcgaaacctacctgtccagagaaaaaatgaagcaagagcaggcgcttgaaacagctaaatctgcattagccaaagtgaacgacgaaattaagtcgacaaaaaacaagctttctctttggcgggatatgctcaagcaaaccagcgtactttccgatcacatcgacgaacaagattttagctacttcattgatgtgatgacaggaaagatgaattacgcggtgtctgacacttacggcgttccaaaaattgagccttttgcggaattcatgtcagtcattgacagaggatggcatggcgaaaaatacgaaggaattaggctgctttcagttttaggaaactcaaacggcaacatcagttttcaagcaaaccgctggccagatggaagtggaaattacactgcggtcgccttcttccatactcatgaggaagcgagggagttcgtgaagatgaaggtcgtaagcaatcttgataaaagcaaaccttcaacaaatgaactgaaatcattaactgatatggggattaagttctctcaagaagagttggctattatccgatcaggggttaaaaaaagaagcgaatcactgataagtcatgctaccgaggcattcaataaagccactgaaaacgcaaattctgaactcgcctatatcgaccagttaatctctgacatctaa

SEQ ID NO: 161904 - DNA, 1899 bp, Enterobacter cloacae
atggggcaaggtgcggatttcgcccgtcagcaggctgaggtgtctgatgagctggctcgcaagacgcgagatcttgaggccgcaaaggataaattatcccggacagaagaaaccgcgtcagaggcgacacgcacgctcacgaacaacatgcttacggcgatgggagttcatgatcaactcatcgaaaaatcctggtctcttgagcaagttcagggtgcggtagcgaaagcctttggtgatacagctgatgaaataaaccgggccaatcaggcagggaagaattttgatccgaaagcactgcaaatttctccggccacgaaagagggcgataagcttatcctcaatcttgaggagcaaaacgaacttcttaaaattcaggatgagcgacaaagagccgttgttaaagctcaaatgcaagccgccaaggtaactgataacaagaatcagatatcatcagctggaaagcttgctggagaaaactacgacctgcaaaaggccgaagaagccagaaaaaaaacacagcgtgaaagcgaacagcaggataaacgttctgcaacatccgctgattctgtggctcagaaactggcgaacctgaaacagcaagcggaactggcggcggggtcaactcaagaactcagcagagagcaggccatgcttaatgccgagcaatctcttgggaaaggcgcgactcaggcccagatcgcagaggcccgccagtatgctgcagcaaaatgggatacggccaacgctatcaaggcagagtctgcagctcagaagcttcttcctgagtcacgtgagaacgccacttacaagcaggatgttgaggctctgaacacagctctggccgcgaagaaaatcagccaagagcagtacaacgctacgtcagaacaacttgagcagcaacatcaggttaatctggcgaagataagggcgcagaaaattgcaaatgtcacgcccgtacaggatgcgcaaggaggaattgactcagttcagcaacttgccaatcagcatgcaaccgaattagccatgattcagcaattcgagtctgataaaggaaagctaacacagcgtgggatagagcttgctaatgcagctaatactcaatacgaacatcaacggatagcagcgcaatgggaaatatggaaaaaccaaaattctgcgaatgagttattggcagccggatttgactctttagctggcaacgcttccaacgctttcacggggatcctaaccggaagcatgtctgctcaggaggcaatgcagtctctcgcaagcaacgcgctgaatagcctcatcaatggctttgtgcagatgggtgtagagtgggttaaatcagctatcaccggaagtgcagctcaaattgctgctaccactgcaactacctcggcggccgtggccggcacggctacgacaaccgcggcgagcgtttcctctgcggcggccacgaccgcggcgtggacaccagctgcaatcgtcgcctccatcggatcgttcggtggtgctgcggccattggtatcggtgcagttattgccgctatggcgatggctggtggtatcgcaggtaagcgtaaaaatggcggtcctgtatcagctggttcgatgtaccaggtaggcgagggcggcatgcctgaaatctaccaggccagcaatggcagtcagtacatgatccccggcgacaacggaaaggtgattagcaataaggatctgacgaatggcggaggtggtggagtagtggtcaatatcaacaactatacgtcgtcaaacgtagatgcgcaggcaacaccagacggaaatggagggtggacagtggatgcattcgtttatgacctcgataacggtggccctgccagtcaggccatacagcgaaatcaccaggcaccacgtaaggcaaggagttaa

SEQ ID NO: 161905 - DNA, 348 bp, Enterobacter cloacae
atgaaccctcctatgtacgagcgggtaaaaaaccttttccaagatgcagggctaaccaccggtcgcattgttcagttgcttttttttgaagacactaagaaggcaactgacgcatttatcgtatttgcgccaaataacggcacaccaatcagaagcgatctcggttccgatcattacgtaatggttaacgtcatcggtccaaaagataagagagctgctacggctcaggctgcgcagtctattgtcgattacattcaggctaatccaatggctgatgaatgcgttgggtacatacagaacatggcaggcatatcagaactttaccccggcagcgcaggaagttgctga

SEQ ID NO: 161906 - DNA, 369 bp, Enterobacter cloacae
atggtcgccagaataagaggaataccgcaggcgaaagccaacctcgataagttgatcaacgacattaacggccggaaggtggttagggcgttacagtcagccatgatcatgggtagctctcaggctgcgttatacactcctatcgacacttcaacgctaatcaacagtcagtacagggaaatagtcatcaatggctcgctggtaaccggcagagttggatattctgccaattatgcgatgttggtacatgatccaaacgttaagcagaacttccgacgtcctactgcgcagaaagaattcctgtctaagggttttgaagacaccagaggtcagatcgacgccttggttaaaaaggagttatctgtatga

SEQ ID NO: 161907 - DNA, 369 bp, Enterobacter cloacae
atgtccagcattgcttcgtggagctatacagctcaggcaacaatctggcgtaaccttggcaagactgaatcaggcgacccaataggttatacggagcctgaagtcattctctgcgattatgaggggggcctatcaaggagaatcgccaacgtttcggcatcacttggcgatctcggttctgaagtcgtcattaagaacactttctggactgaatatgatcaggcatctacaggcgattacctgctgattggtatatctactgaactagacccgattacagctggagctgatgaaatacggcagattatacgctatgccgacactttcgagcgggtagcggatgactatgcaatcctgactggagtataa

SEQ ID NO: 161908 - DNA, 387 bp, Enterobacter cloacae
atgaaacctgagcacatcaagctgctggcagataaagactggcggctgtctgcgcttggctataccaccgttcctgacttcatgatcgacgcctacctgtgcaagctggcgaagatagaaccctgcctgattgccgccggttacgacgattgcgatctgatgctcatccaagtgtacgcagtcaccttgatggctctgacggcgtacacgcagcggattaagtcgcagggcgctccgtccggtgcctctcgctcgtttgactacggcgagagcgtgctcaacatgcgtgacgcgctgctggcgctggatacgtctggctgtacatcaggattacccattgatgtcggtcagaaagtagggttgtttctcgttgttggtgggtgttag

SEQ ID NO: 161909 - DNA, 189 bp, Enterobacter cloacae
atgcgggagaaatgctttgtggtgcagcgccgggtgattatcttccggttgccgtcgatgcagctgcaattcactgcactacaaaacattccagttattgccggggtatttatccgcgcccggcgcgtgatttccttcactttccacagtcaaaggaatgccgtagactggatattccacagtcaataa

SEQ ID NO: 161910 - DNA, 348 bp, Enterobacter cloacae
atgacggaagacgatatctacctactgctggcatctctggctggtggacaggtttatccttatgtcgcgccgcttggcgaagacggcaaaccgtccatctcaccgccctggattatcttttccatcgtttctgatgtttccactgatgtgctgtgtggacaggcagagagcagggtttccgtccaggtcgatgtgtattccgcaaccataacagaatcacgctctctgagagggttatccctcgcttcgcttaagccattaaaccctactgaggtggtaaaaatctccggttacgagccagattatcgtctctaccgcgccaccctggattttaaagttaccccctga

SEQ ID NO: 161911 - DNA, 339 bp, Enterobacter cloacae
atgcaggctggaagactacggcatctaattaccatccagaacttcacggcaacgcgggattcttccgggcaaccggtagaggaatgggtggacggagcgaacacccgagccgaagttaaaggtatcagtgggcgtgagctggtggctgctggtgctgaaacagctgaggcaacagtacgggtatggatgcggtatcggcatgatgtttcggcagcctcccgaattaaggttacgacagggccatttaaagggagcactctgaatgttgttggtcccccaatacctgatgcaaaaggggttctgcttgaggttctctgcaagctgggggtggagaagtga

SEQ ID NO: 161912 - DNA, 324 bp, Enterobacter cloacae
atgtttccaactgttccagaactccggcttcagtgtcgaattgatagcgatgattcgactgaagatcagatgctatccctttacctcaaggcctcagtgaagcattccgaaatcattgttaatcgccgcctctatgagaatgaagtacccgcagaagatcctgatggtttgctggtatctgatgatatcaggttggctttaatgcttctggtttcgcattggtatgaaaaccgtgagccagtaaatatcgtgaatatcacaaccacattgccattcgggattgaggcaattctcaagccatacaggataaggcctggtacgtag

SEQ ID NO: 161913 - DNA, 240 bp, Enterobacter cloacae
atgttcatacttaaaaagaatgttaagtggtcccctgatggctgtcgcgtggaagttgtggcagccggttcgtatcaggatggtgagttaccagatcgctttttagttattgcggaagagctgggggtcattgatacagttgaaggtggtgaaaaaaaacctgatgctgatcagcagccagagcagccagagcagccagagcagccagagcagccagctccacagaaatcaaaaaaataa

SEQ ID NO: 161914 - DNA, 414 bp, Enterobacter cloacae
atgcggcttgatcattcgaatttcacgttctttcccttcatcagcatcatcatcgctgtataccgcataggtataaccttcccgatggggtttatcaattattcactcgttccgtatatgacccgtattgagcagcgaatcaacatcgggctggtgaaggaatcaaagcagggcgtgtactacgcaaaattcaatgccggcgcattgctgcgcggggatatgaagtcgcgatttgaggcgtattcaacaggcattaactggggtatttactcaccaaatgactgccgggaacttgaagaacttaacccacgcgcaggcggagatatttaccttacgccaatgaacatgacgacgaagccgtcagacagcagcaagaacaaaacaaccgaggaacaacataatgccgatgactaa

SEQ ID NO: 161915 - DNA, 186 bp, Enterobacter cloacae
atgatcctgatgattctcgccccactgatcggggtgatgggcgctattttgctttcgtttggtgtatggatgatttatccgccaggaggcttaatcagcgccggtatgctttgccttatctggtcatggctggtttcccgcacgctttcgctggccgggaaaacattgcgaggggggactgactga

SEQ ID NO: 161916 - DNA, 942 bp, Enterobacter cloacae
atgaaaaaaactttaagcctaaaagatgcaatgcgtatccttcacgttatcgaaaccgatgaaggaatcgaactacaaagcgcggctggcacggcaaaatatgatgcgtggggcgcacgccgtgaggtgaatggtatcccagagtactttccctcctctgtcacggtaaataagcgtccgcaagcgctagtggatgataaaggaccatctgtacctgatgactcatgcgcaccattggtacgcacaatgaagcttcgtgttgagctggacacatcaggcgcacaacaggctgttgacgaactggatgacaaaatccgtaacagcgatgcattcaaagtcctgaaagatggctggactttcgaaaagaacggggtgctgattattaataacggcgaggtgttcgttaccgatgcgaagatcgacgatgccgtattgtctaagagctacagcgttaaattaaacgtcgccggcaaaggcaagccgcacgaagctggcatgaccctcggtgttgaaggtgagaatagcaaggttgagtttctggccgatcgctataaggtgcatgaagccgctcaatcagccagcaataatgaagagacggccttcaatggtggtctggctttctgtggtttccctggggcaattagtcatgatggggctaatcccgctgatggcgataaagctaccgctgaaccaatcagttcaattgcttcagcgactggcatagccaccaagacgcgactaaccgacgagatgcaagaactggttgtcaaggctgtacgcgaaagcgatctgtttacatccattcagactgcgatagatgctcaggcagcatcaaccgttgctctgcaacaggcagtgaatgatgtagttggcgatgctattcgcaacgcactgaagcccggtggaatgatttggacgagctttcaatcatgccggcattaa

SEQ ID NO: 161917 - DNA, 552 bp, Enterobacter cloacae
atgggggtaagtgcgctccccacaacgatggctaacgcagcacccgataacgcagcggcaacgcctgctccgacggtacctgtggtcgcccaggcgaccgatccggttatcaccgcggcacccggtcaaacggaaaacgtcattccgaaccagcctacggacggcaacaccctgccggcagacagcaatgtcgtcggtcaggtgatgctgggcgtacagggagcaaacgcgcctattgtcgcggaagatgccccgtcacgggacgtgaagctgagctttgcgcagattgcgccgccgccgggcagcatggtgctgcgcggtattaaccctaacggcggcattgagttcggtatgcgcagcgatgaggttgtctctcacgccatgctgaaccttgaatacacgccatcaccgtcgctgttgccggtacagtctcagctgaaggtttacctgaatgatgagctgatggacgtcctgcccgtcacgaaagagcaactgggtaagaaaacacaggcccaggtgccaattaaccccccttttcatcaccgactttaa

SEQ ID NO: 161918 - DNA, 426 bp, Enterobacter cloacae
gtggaattcacacctgcagcactcaaccccggaacactcaccctgccgcttttcactgaacggtgtgcggccggtttcccctctccggccgcggactacaccgaatcggagctggacctcaacgaatactgcattcgccggcgccattcgacctattttgtccgggccatcggaaactccatgacggatatcggtctttactccggtgacctgatggtcgttgataaagcggaaaaaccccggcatggcgatatcgtcattgccgagattgagggggagttcacggttaaacgccttctgctgaccccccgccctgccctgcaggcgatgaatccggcttaccctgtcctgtatccggacccggagacgctccagatttttggcgtggtcaccgcgtttattcacaaaacacggggcacggactga

SEQ ID NO: 161919 - DNA, 399 bp, Enterobacter cloacae
atgaaaaacagaaaagattttgtaaatgacttaattatctggatatacaaaaatatagagatgccactaaaaattgatgatgtggctatcaggtccggatattcaaaatggcatttgcagagactgtttttttctgaaacagggcagagcctgggaggttttatcagagagaaaaaattatgtcttattttagaggctgttatcacaacaaatgaacctttgataaacatcgcgatgcgatttggctttgactctcagcaatcattaaccagggcatttcggaaaaggtataatgtcccaccgcaccggtgtagaaaaaatgccgtaaatattaaaagtaagtcttctagggagcaaggtaattactcgtatcataaggatgagtttttaaatctttag

SEQ ID NO: 161920 - DNA, 1581 bp, Enterobacter cloacae
atgaaaagtgaaatccttaaccaagctgcatatcctccttttgaggaacaatcagctttagatgaatacatagcatttatttcaaaagaaatctcgtgggatagcatttcgataattagtgatgaaggaagttcgaatattttaatagtaactgtaaatgatgacgttgttgtttctagtctaaggattaaccttccgccagctgattttatcaataccgtaaagaaattatcaaaagataagaaagttaagttggtctatttacagggcgataatatctcagaaagtgatttatccagcctggatgcaattcaaaaaatagcttttcgcgctaaagaacaaagcgcaattgttgatttgccaatcattgaggaatttataactagaatagatgaaggtagtaaaaaaaaagggcgtggcgaaagttttggaagtgagacacgtcaagctgtaaacttagccagtcatggtcgatgtatgtttacaggatgtggagaaaatttaaggattgatgatttaactggggatggaggtaattattcatatctagctcataatgtggcttcttcagaaaatggtgagcgaggcattcctgttttatctggtattctctctaacgatccaaaaaacattttattattgtgtgataaacatcatagattaattgacagagttgcagcgtgtaattacccagcggaaaaactttctgttattagagagcaatttatctctgatgcagaggaactacttgatgggctaaaatttcaacccattccagtttattcagtattatggcctgtaaatactcacgttgtatcaccacctaataaaaaagagattgcgaattgcctttcaacactagagttgaggatgcaaggtagccttaataaagttttgaatagtgatggagcaacaaggagtgtgccagaacttcaaaaaataatcatgccttctagcataaaaattgcggcagagaaaataattcagcaaacaaatgattcaggccatagtgctgccttgtttgcatttggtcctatgccttcactggtaggtctaggagctattttaggaaataaaagtcagtatattccaatgttaagatatcgtgatggagcaacttggatgtggccaaaacaactccctggaggagagttttatatagtcgaagggttagactctataaaacccagtgaagatattatcatatgtattgctttaacagcatttcctgaggtaatgaaaaaaaaagcatcggagctaagcgatgaacttgattcatcaattataatttatagccctaaatataatgcatttggtaatggtgcaattccacaccccattgatggtatgaaattttcggcaaggctacaatatgattttcatacttttaagtcacagtatggcgtcaagaggatgcatgttctgatttgtgcatcaaatgctgcagcagtatttataggacaagcttttgatttgcatcacccagaaatgatagtgtatgatttcagaggggaaagtatggaagcagtaatttcgattgcaaatgactcctctgaaacttcaataaattctattatttag

SEQ ID NO: 161921 - DNA, 207 bp, Enterobacter cloacae
atgaagaaagcaatattggtgatatcgggactactgttttcaccgttggcggcagcagggcagatcacaatgaccgatccccagcaggaaatgacggagagtgggaagacgctctgcacataccagaacagcatttacctgttcacctacataacaaagggcaagtgcccatttgcgaagaaatttgacactgatgatgctcagtag

SEQ ID NO: 161922 - DNA, 156 bp, Enterobacter cloacae
atgaatatccgatttaaccccgaggtttttaatgctctgcgtgaagaagcggcccgaaaagggctgagtattcccgcactcgttaatgccattgtcaaaaatactatcctacaaactgaggaaccaaatgccaaaaaagaaaaaactcgtacctaa

SEQ ID NO: 161923 - DNA, 774 bp, Enterobacter cloacae
atgccaaaaaagaaaaaactcgtacctaattcaggtaagtcaatcgctgagattatgaaagataacgaagcgacaaattcagatggaagcatatctcaggctttcaccaaaaattatgaccacttcgaagacataaactgcatttactcggaaaaatacccggaagggaaaatgctcgaacttctccacatcgttttatactgccgcttccagcgtttccagagtaatggaaaaaaatgttacgaaagccaggggcgattaggccaaatatttagaagtgaccctggaacgataggcgataaaattcgagatttggtagacatgggactggtgacaacagaaccgaatcccgatcccaagtatgacactcttctgtacactgcgttaccgcttactgatgctcacgttatcccgcctgatcagctaacagcagcgcccattatcgtttctgccgttatttttgaccagccagcacaaatgccagcccctgaaccagttaccgtagaggaaaggggaggtgatgatgtgcccgattggttcaacactaaagacgaagttataccaagaccaacaccaccaatgaatgaaatggatgcagcctgtacgatcttgattcggaatattgacatccaggcggaaacggaaagtttcacccagtttaccgaaagagtttgtagaaataatcgaaagatacggctaccacaagggattgaggattacttcaagaatacccaccctgaaatctatgacgatttcgacacaataccattttaa

SEQ ID NO: 161924 - DNA, 681 bp, Enterobacter cloacae
atgcatcgtatagacacgaaaaccgcgcagaaggataagttcggcgcgggtaagaacggttttacccgtggtaacccccagactggcacgcctgccaccgatctggatgatgactactttgatatgttgcaggaagaactctgcagcgtggtggaggcatccggtgccagcctggagaaggcgcggcacgaccagttgcttaccgcgcttcgtgcgctgctgttaagccgcaagaatccgtttggcgatatcaaatcggatggcacggtgaaaacggctctcgaaaaccttggtttgggagaagcggcaacgaggaacgtcggaacggataccgggcaagtaccagatatgagtagttttacaacggggcactctggagcagcagactggccgattcctaaatctggatggagtaaggggccggatggggtaattacacaatggggtattttcggtttccccgttggacagacagggacgaatgttgttttcccgctacctttccccgcgcgggtcgaatcaattacactgacaatggcagatatccaggagtctctgctttctccaacaaccatgcctgcttatggagttaactcaactggtacttcaagaacgggttttacagcccgtatgtcaggcgtcggtgggtttaatctttgctatatagcgaaagggagataa

SEQ ID NO: 161925 - DNA, 444 bp, Enterobacter cloacae
atgaataaagttaaaagtgtttacagcccgtccgaaaatgcaatctacaacgcagcgctatatgaaagttatatcaaggaggggacatggccgcaggatggtattgaaatcagcgatgaggatgttgtcagatttaatggaggaaataagccgacaggcaaaatgctgggaatggtttcaggggcccttgcatgggttgatgagcctccgctttcaccagaacagaaaatatcagatgcagaaaacatgaaagccacatttcgtgcaaaagctgacagtgaaatatcctggcgtcaggatgctgttgatgctggtatcgcaactgatgaagaaacttcaactctcacccaatggaagaaataccgtgtgctgctgatgcgtgttgatacgtcaacagcacccgatattgaatggcctacgcctccggcagctcaggccagatga

SEQ ID NO: 161926 - DNA, 306 bp, Enterobacter cloacae
atgaaaaaaagaaatttcagcgcagagtttaaacgcgaatccgctcaactggtcgttgaccagaactacaccgtggcagatgcagccagcgctatggatgtcggcctttccacaatgacgcgatgggtgaaacaattacgtgatgaacggcagggcaaaacaccaaaagcctcccccattaccccggaacaaattgaaatccgtgagctcaggaaaaagctacaacgtattgaaatggaaaatgaaatattaaaaaagcctctgtttttgaactatggaagaacggaacaggcttcagtgaaatag

SEQ ID NO: 161927 - DNA, 948 bp, Enterobacter cloacae
atgaataaccataacgaatacaatttattttactgccagactaaagaagaagtccaggattgcattgccgcaggcattgatattaactctctcatacattggggtgaaaatgcactgttcaagaactgtcacaccagtgcgattcaggccatgattgaagcaggaattgatttagaccatacagatcattacggaaataatgcgctatttatcaattcttccccagaaatactcagcctcttaattgattcaggcattaacattcaccatacaaatgacaagggagagaattgtctttccagccataggtatgacagagcaagcacagaaaccctcattaatgcgggtgttgatattcaccataaagataataatggtcagacccttctttataataacttggataatctctgttttgattatttggtgaataaaggttgtgatcttaatcatagggataacaatggcaacacagttctggatttgcctgaccataaaagttacaaatatgattttatcgtaatggctattgctcgtcaccttgataaaattgatactccccctacactatttaaacacttaacgattaagtgcttacccctaatggcgttactgcatgaaaaaggtattcatttcacggtagctgaacactgtacattttcactttacgtgagagaaatgaaagctttttttatcgaattaaaatcctacaccgatatcggccatgttcaattttacaatatggacaataaacacattggcagctatacggggatcgagatagtaaaatggtttattcgaaatggtatcagaatggacgacgatatactcagacagcgttccgactccgataaaattttatcttatatcgcaggaagagagaaaaaagacctgttaagagaaatgaagtcagagattccccgtgcacctgtgcgaaaaagactctaa

SEQ ID NO: 161928 - DNA, 441 bp, Enterobacter cloacae
atgaaaaaacaaatctacccaaccctcacaaactaccttgccaaaactaaaaagaatgcagatctctacagattatataatccacaattttctgtattcagcaaaacagccaatgaagaacaggatttttatttttgctacttctctaggcatatgattactcagagaaatatcttaaccctattttcaattcatacatttctctcttacaacgcaagcaagaaagagacaattaaatcatttgtagattttctcaaaaaaacaaaccgtgacaccttcaacaaggcattccagtttcgcgggtgcaatattctttatcaaaacaagaagagagaggttaaggagatctcatggttttcgttctcacggatctatgacgatatcgtagaaataaaagagtataaaataaacaacaacacttacaacaaaattgcagtctaa

SEQ ID NO: 161929 - DNA, 1224 bp, Enterobacter cloacae
atggctagaaatataattgtttgttgtgatggcaccggtaatgaggtcaacacagaattatctaatgtgctaaagttatatcgggtattaaaatggtctgatgagcaagtggtatattacaacccaggtatcggtacatacagtaagaacaatacttggcagaagtatagacaaaaaattaaaggtttatgtcaattagcaacagggtatggacttgatggagatgtcattgatgcatacaatttcctttgccggaattatgagcgaggtgataaaatttggctctttggttttagccgtggagcttatacggtacgtgttttggctgggtttttaaatgtaattggtttgcttagtgcaaaccaaaataatcttgctgactatgcattttctgcttacaaaaaatcgattaatgatgttaaaaataaaagattagatgcaaaggctgaaaaagaagaaattgtttctgcacttgcagaagcatggcatttttcacgcgtatctaggacaaaaaaagttcaaatagaattcattggtgtttgggataccgtctcgtctgttattgcccctagggtaaaaggaatatcattagatttggaaattctacgatatactgatcataatctgattgtcaaaacctttcgtcaagcaattgcaattgatgaacgtcgtagaatgtttagattaaaacattggaatgagcctcagaaatttcgagttaaaccgtttaaaccagcatctgatgtcgcacaagatataaagcaagtttggtttgctggagtgcattcagatataggaggaggatatccagaaagtgaaagcagcctttcaaaatatccattagattggatgcttgaagaagcacgcgctcatgggttgctaattaatcaaagcatggcaaatcaacttgtgaaaggtattaatcgattgaatagtcgttataaatacgttgcaccagatgaagcaggatgtattcatgattctctgatttcatattggaaattaattgaatggttacccaaaaggcttaaatggaaagaatggcccgaaaggagagggtttctgggctggtatcttccctgtggagaacctagagttatacccgaaaacgcaaaaatacatagatcggttcaatggcggatggaaaatattgaaacctataggcctgttaatttacctgaatcatacgagtttgttgacacattaaggcgaaaaaaaatgtga

SEQ ID NO: 161930 - DNA, 237 bp, Enterobacter cloacae
atgcagaataacttattagtaaactggacgcgacagcagcactgtagctcgcgcacaaaacaaatctccggatcgagtgtccttaacgacctgtctcaattaatcaaaaacggcgttctgctatttcttaacacaatccgtcgccaagagctgaggcagattgagattggcattgtagccaaaacgactatctacgagatgggtgcggaagtgagtttccgcctcgctttaatctga

SEQ ID NO: 161931 - DNA, 2142 bp, Enterobacter cloacae
atgctcagcaacgagtttttgcgctttttccaaactttaaacacagcagatgtacccggcgatgtcagaaaaatggcgaacctagtgtgggataatatggatagtattatccctttaggtaccgcccagggtcagcggattaggcgtatcgttgagctggcgcagaccggttgggataccctcagtttggaagtccagccactgcctgaacagaactccgaacgcgcctccacgttcagtcggctaagaaggctgtccgttggaccgttcagaggatttgctagacaggaggaatttgatctggattcgcgtctggtactgatttatgggcccaatggtactgggaagtccagtttctgcgaagcacttgaatatacattactgggcagcgttgctgaggctgaaagtaaacgctttcgtaatcaaaccgactattttaggaacgcatacgccaatcagttttctccgcctgtgattactggtgttggagctcaagggcaggatgtggagattgaggataacgaagtacagcaccgcttttgctttgttgaaaaaaaccgtatagacaatttttcaagaattgcggcgctggccccggcaaggcagaccgaactaatctcaacgttattcgggctggatgcattcaatgattttgtccgaaattttactgcggagattgatgccagatacatcgatcttacaggcgtgaaagccgctcaactggcagaaaaacgccgcacactcgatggggccatccaacaactggaagcgggtaaggcggatcttgaagaactgacttctgaggaacagacgctggcttctggttaccgcgagggcctttcttttcatcagatgatgattgaattaaaaggggatgagcaaaatatcggagccatccagcagcttgagacagagttacagacacctcttccgaacaagagtcacctgacctgtgcgatgttgaaggacttaagtggctctgttgaaactgtattggcggatctgtatggcaaacagaagcaactggcagaagcgagtctgcaggtttcgtttaaaagtttattcgaagcagtcgtccagttacagagcaccagcccagaacagtgtcctgcatgccataccccactccagcaagtcacaaaaaacccctacagacatgctagtgaggaattgctgaagcttgagtttttgtcagctttacagggtgaaatagctcagttggaacaatcaatcggccagcagatgtaccacgtctcgcaagttgtcggcatctgttgccagtttcttcctcatgaaaatgttctcgaaagattccgggaagacaatggcatcgctttgtggcgtgatctgcatcaaccagcagacgatggtattactccctggtctcttctggagaaacaggtgatgcagttggaagaagaagataaaaaaacagaagtaactactaaattgcgagaatcccggcagcgtgatcttgtgagactgcgtgagtcagaacgtcagataacaatattacagacaagaagaagtgcgacagaaaaggccatcgcggcagctcagttgttgattggtaactttgataaggaaaacaggcagcttattgaggaggttgcacttgaagaatccgtcgtgagaaaaaacagtgaaatatcagtagcctattcccggttcgtattgcaattgaacgcctataaagagggtttgcctcagcaattggttgcgaatctcggagacggcattgttactctgtacaacgcattcaaccgtaatgacccaccaggagaaaagctcgctggtatcaaactccctctgatgcagaatcagcgaatggaggtggcattccagaacaatccagcgcaatattttgatgccctgcatgtgctcagtgagggacatgtacgctgcctagggttggctattttgttggcaaaaaacatcagtgagcaatgcccactgttgatatttgatgatccggtcaatgctatcgatgacgatcacagagaatctattcgaagaacgctgtttgaagacgccttctttgcagataagcaaatcatcctagcctgccacggagaagagttcttcaaagacatacagaatttattgccagcgccagtggctgtgacctgcccccaggattag

SEQ ID NO: 161932 - DNA, 270 bp, Enterobacter cloacae
atgaaaaaaataaaaacaataagtatctttaaatcaaatgaaaacatcccttttatgacgtgtatcgtaaacgatatagaagaaagtaaaaatggaataaagcttattctggaaaacggcgaaagcttcaatattaaagattacggttatttcttcctgtcagagggcgaaggcgatttggacagggagcgaatggtaagtagttacagaaggttgatttctgaactcagtcagatcagtgaagaaaccgtaaaatcattaatgctctga

SEQ ID NO: 161933 - DNA, 480 bp, Enterobacter cloacae
atgagaaaagtaaaaacagacaacagtgacttaatcgaatacgtaaacacagtcaaagaactaaaaaatcatatttcgatagaagaatacagggatgaataccgtaggctacgttctgatgatgttccgttgattcaagctcaaaagttcaaatctgcacatactgaacttcgtagactggaaaaaaagagagaatctcttattgaatactttattgacgagttaaatcccatcagcagttcaaaagctaatacatcagcaaaattatcaggtaatcttgatctgtttaacgaacgtgtattataccgtaaggccatttcagaaaagagtgataaagaaattgttgccttggtcataaaacagcgtacagaagtcgctatggagttccaacgctcagttgaacaaagtcttgagcaactctctcaaatctcgtcagagttcgattcatcaagccaaaaacgtagaaaaatgtctctttaa

SEQ ID NO: 161934 - DNA, 351 bp, Enterobacter cloacae
atgggtttcgaagagaaaaaagaacaagctatttccattatgaaaagcaagaaaatgtggagcagtaattatgcaccccctctgctacgtctcgcatggaaaatagggatcagaatacctccgttgcctttcgcgccattctggcaagtcgctttgttgacgggaataccgattggctctgtctggggaatactgatgtggttttttacatggaaggatgggggaatgctgccagcagatgctatagctaggagtatctttgctgacctttgtatggggatttttatggcgttataccactggtggagaaaggtagttaacaaccttcctgactgggataatcttggatga

SEQ ID NO: 161935 - DNA, 234 bp, Enterobacter cloacae
atgggcggtaaagttcgtggcatatctcagggcaaggccaatctgaacagactgattgatgacatcaccgggcgcaagattgcccgcgccattcagtcagcactcattatcggcagctcacaggccgcgctttatacccccatcgacacatcgttactgattaacagccagtaccctataatggtaaaacggcatctacatggagtaaaacattacaggctggtacgattctaa

SEQ ID NO: 161936 - DNA, 1374 bp, Enterobacter cloacae
atggcaaacaatgttgccaatcaatctgtaaataacccaccgaaaatgctaaaagaagtgttgcttaatcttagtggagttaccaacaacgttgtcaactacgctatcagtggttctacactttacgacatgctgcgtggtaccgatggttcaggtaaaacatatcaggagcgccttgctgaatctccatgtgatattgtttattgtaatcacgggatcaacgataatcagactggaaaggatatacttcaatatagaaaagatttaattcagtttgtcaaaacatcacgattaaataacgctacgccaattcttgttactccaaaccctcaaacatcaattcagctaggcagtcctgtcaatagcaaaagatttccactttttgtagaggttatgcggtctgtagcgaatgatatgtcagtagatattgtagataataatttctacatgaatcagtcatttaacgtgtttaatgttaacaacctattccctgatggagttcacttgagcgatgccgcatacaggcagtatggttacaatcttgccatacctttgattccttgccatagtttagagctcgcaggtgatgtttcggggctgaatggggctttatggtatacaaattccacaaacgctcaaatatctcaacaaggttcaagatgtggagagataatatcttgggaaaaagaaggtaatccaactgggattaattatcctgtaattctattacgcggtatgaaaagtattagcattaaccaattggtttggggaagttcttcaagggctaacgcatacattaattccgcatcagcaggtatggtttaccctaacaaaaatcttggaaatacgtcaactttagattgggattcggtaacaaagttaaatgttgattgtttcgcagggttaaatgttgttggtttgttgatagatacttcttctccaagtataggtactgggatgacatttgctggtgtagttatccctggtggcagtgtttcatcaatgacaagtgtttcaggagactattactcaacggaaacattatgtaacggagatttcatttctttaaattataattttgttgacggaacagagtgttatgtctctgatgactcaggaggtaaagttgcttccatcaagttaaatggttcaactgccagggctgctattttcaaagacaatactgagatttccggtataaatcttgctacttctgttgctccaggcatctatcaggttatttttagaattaacgatgacgcaatgcagttcttttttggcgcttcgtcaggaactataatcacaacttctacactttcaaaccttcaactgaaggcctcatcggctagcttcgcgttggtaagaggactatga

SEQ ID NO: 161937 - DNA, 1119 bp, Enterobacter cloacae
atgatgaacagaaggaaatttgcaaagcttatagtggccggcgcagggttaatgactcttccacggctagcaactgcgaaatcaagtagggatcgcgagtgtgggagtatggttaacaatcttactcttctaactaacgttaaagataaattatcctctggagagaatgtaaggattgactgttatggtgactcagttatttggggttccacgccttttgatattgccaaacaatctaatcagtctgctcctaaggttcttgagagtgtccttcgcaatattttccaaaacaaaaaagttattgtaaataatttcggcattcaaggttctacgctgcttggatttgtgtcaggtgatgaccattctcagggtaacattgagcttaaatcgaaaaataaagcggatgtgatctatttaaattatggaataaatgatgcgctacaaaatattcctttggagcaataccgcttagcgcttcacaggacaataaatgcctgccatgaaaatggagttgcgttagtattcgttacacctaacgttatgggcgttaatggattcgggagtttaaaaaactcctcaagattaaaattatatgttgaagagatgaaatcagttgctacagaaagaagcattgaggtagtagatcaattcgccatgacgacgcgtgacactctaaaacatcacccaaaaactattatccctgatggggctcatttgtccgactctaattataatcagttgggtcataatctctcactaccaatggttaattacgctgaccttaggaaaggtgacacctttaaattcattagcgctgattttggaagccctaatgttataagtgttgcaactgataactgcgagttattggtttcaggaagcggtctaaaaactatatgcatacctttgttggtggatgaagaaacattcttatcagttgaagtttctggtaaaaaggtttatgtaaatttgaatggtgcatttcgtggtattaattctgataacacagagatgcgagtaaatataaacggtgaaaacgataggacgggattgaaacttttgagcatctcttcaaatgatgaatttactttaaaatcaataaaagcgatggcgttttaa

SEQ ID NO: 161938 - DNA, 1101 bp, Enterobacter cloacae
ttggtgaagagcaattattcagctatttattaccctaatagctatattcaagatcaaaggtcattaatgacatatctttttatttatgatgagatacattttgttacttttgctccggactcaagaaaccctacggattattttaaaaatttacctgactgtacggaaatatcatcaattaccaagaatggtgagagaaaatttttagtcacacgtgatgaagtgaaatctaatttaagtgggagtctggatgataaaacaattcaagtaattgaattttatcagtttatacagcgatacaaaggctttattggagactcaattcattttcacccaaatatgctagcaagtcttttctccacgcttacagataaaataactggtgaaggtcttcctatttctgatttgatgaaattatttcttaggcaggatcctgcaattgtagcatttgataagtttcaaaaggaatttcctgaggtaaaaactgaaacattgtgggctactgttcccacagcaatgaaccttgcaaaagaaaaagaattaatactagtaagtgataactcagagatatctgtcccactattatctaacaaggtaagaagtgtcaagttcttaacaagtattttggctgaagaatgcgtgaagattgctatacctgattgtagctcagctaaccctgaagaaatttttgagattagagaaaagttaaaagatacgttagttccatttagaatgtcattgcaaaagctatcaggtgatttacgaaagtccttagaagaagatatggcaatagaggacattaaaggggaagctaagtttattgtcgaaagtcaaatacaaccggcagtgtttgagttacaacgaagtatagaaaaaagtaactcaaaattactaaataatgtttttggtaggattttaagttggctcccttacgttgcgaaggcttatactatgcctacccctgacaatttattagcagttgcaaaaaaaatgggtgctgattcgaagtcagtttttgatgctatagatgatctttcgtatactaaagcccaaggtctatcctttttattacaagtagagaaagcgacaacgaaaaagtaa

SEQ ID NO: 161939 - DNA, 126 bp, Enterobacter cloacae
atgcatgagcgtcagagcgataacgtcgcggaaacgcctattcatggttatgtctggctgagcatggagctagcgcggcagctggagctactgtcgcatctcatttgccgggcgctgcgcaaataa

SEQ ID NO: 161940 - DNA, 4830 bp, Enterobacter cloacae
atgaatgcgctttctgagctgttatctaaaattgaaaatgcgtcaccaacgcaacgagataaaggtactacttttgaaaatctttgtgttcagtattttcttaatgagcccaagtatgcagaattatattcctctgtattgagttattcagcttgggttgaaaagtatggtaattcaatcggaattactcacaaaaaagattcgggtattgatttaattgctgtaactaaaaccggcgagtttcatgctatccagtgtaagaactataatcaaacaaaaatagcaaaaaaagatattgatagttttctggcggcatcagacaaaaaatattttactcttcgatatattgtagcatctacagataactggacagaagaagctaaagatatgcttagggataaatctatccctgtaacagcattagggttaatggatcttgaacaaagcgctttagattggtctctgtttgattttgagtctgtgtacaaaccggttctgaaagctaagaaacaactgcgtccgcatcaggaatctgcacttcatgcagtgaaaaacgggttgaaaacggcagatcgtggtaagcttattatggcttgtggtacagggaaaacctttacctcgttgaggatcgctgagtcggttgctggtcgtggtaaaactgtactgttccttgttccgagccttgctttactgagccaaacactggatgagtggacacaggatacattgattgatctgcgatgttttgcagtctgttctgatagtgatgtagggaaaaagaatcacgatgacaatgtggtagtcgggatcagcgatctgaaatatcctgcgacgactaatgcaaagagtcttgtaaaggcatttaaccagcctgacatttttgccatcaacaatcagccacatatgaatgttgttttctcaacttaccattctgttgacgttattcatcaggcccaaaatttggggttccctgaattcgatttcatcatttgtgacgaagctcaccggactactggagcaacatttgacggtgatgatgagtctgcttttgtacgaatccatgacaacacctatatctcaggtaaaaagcggttatacatgactgctacgcctcgcatttttggggatgatgcgaaggagactgaaggtgttactttatgctcgatggacgatgtcggtttatacggtgaagatttatatgtcattacgttttcaaaagccgtgcagttgggaattctgtgcgattacaaagtgattgtactggctgttgaagaaagccatgttagtcgacgcatacagtctctgttaaaagatgaaaataatcagcttaaagtagatgatgctgcgaaaattgtgggatgctggaaggccttagcaaagcagggattggcatcttctgatggcattcaaccagacgctatgaaacgtgctgtcgcattttgccaggttatcgaaaaagactacaaaggtaaaactcataaagtcagctcaaaactcattacagaaatgtttggggctgtggttgaggcctatcaggcttctgagattgaatatctcaaagaagttcagcaaaatcaaaatgttgatccatcattaaaacttcaatgccaagttcaacatgttgatggcggaatgaatgccacgcagaaaaaatcaaaaatagaatggctgaaggctgatactgatgaaaatgtatgccgaatcttgtcgaatgtacgttgtttatccgaaggtgtcgatgttccctctttggatgccgtgttatttttaacgccgaggagttcacaagttgatgtagtacagtctgttgggcgtgttatgcggcgtgctgaaggtaaagaactgggctatgttatccttccagttgtaattcctgctggggaagaacctgaaaatgcattaaataacaatcaggcttatcgtgttgtatggcaggtattaaacgctcttcgtgcgcatgatgaccgctttgatgccatgattaacaaacttgaatttaacggcaaagacaccgcacgaatggaagtggttgcagttgctgataaagtggtaaaaaaaaccaaacgccagacgaaaaaatcagagactgtcgcgaaggctcgtaaaagcaatgggatcggagctggtaccatccaacctcctgagcagttggatattgagttttcagtcggagaaattgaacgagcactgtacgccaaaattgtcaaaaaatgtggtaacaggcatcactgggaggattgggcaaatgacattgcaaaaattgcccgcacccatattgatcgtattcatgccattctggaaaacccagcgaatactgctgaaatttcagcattcaaagcattctctgacgagttgcgtgatgacctcaataatagcatttctgatgatgagatcatcgaaatgctggcgcaacatttgataacaaagcctgtatttgatgctttgtttgctgattataattttacagatcataacccgatgagtatggcaatgcaggacgtactcaacaccttacatgaacaccatctagaaaaagaagctaatacgctcaacagcttctatgagtcagtgaaaatgcgtgctgacggtattacgaccgcagagggtaagcaacaaataatcgtccagttgtacgataagtttttcagaaatgccttccctaaaatgaccgagcgtttgggaattgtatatacccctgtggaggtcgttgattttatcattcacagtgttaatgatgttctaaagcaggagtttggacaaacattgggtgatgaaggggtgcacatcatcgatccattcactggaacaggtacatttattacacgtctgttgcaaagtggccttatctcatctgataaacttgcctataaatttaaaaatgaaattcatgccaatgaaattgttttgttagcatattatattgcagccatcaatatcgaggcggtctatcatgatatcacaaatgagtcagcttatactccattccagggaatctgccttaccgatacctttgaaatgtatgaaaaagacgatttgataagcgatgttttggttgataatagtgaacggcgcaaacgtcaaaaggcgcttgatattcgcgtcattattgggaatccaccatattctgccggtcaggaatcggcaaacgataataatcagaatgtcaaataccctcagttagataagcgtattgcggatacttatgctgcctatacgtcagcaacgaataagaatgccctgtatgattcttatattcgagctattcggtgggcaagtgatcgtataggcgagaaaggtgtaatcggatttgttacaaatggatcgtatattgattccaactctgcagatggtttacgtaaatgtcttacggaagaattcagcagcttatattttttccatctgaggggaaatcaaagaacctctggtgaaaaatcacgtcaagaaggtgggaaaatatttgggagtggaagtcgagctccaattgtaatttcaatcttggtcaagaatcctaatgttcaggctcatggtcagatatattttcatgacattggtgattacttaagtcgtgaagagaaattggagaaagtttctgaatttaatagtgttaatggcattactaaaattaatggttggcagttgatcgaacccgatgagcataatgactggctgaaccagcgtgacgagagatttaattattttatcgagatgggaaataaaaaagataaagactcagtttgcatatttagcacctattctaggggggttgctaccagtcgtgatgcatgggtttataacttctcagcaaaaaaaaagaagaaagatccggagtttaaagaaataattgataccacgagaattagctggaaccgcagtttgctcaatgactttaataaattaaagaatcattcctttgacaaaaattgtatttataaatcggtttatagaccgtttaacaaatcaaatctatattttagcagggcgttaaacgatatggtttatcaaatgcctcagctatttccaacagccgattctgataacttggttatttatattaacggtagtggcaatggtgggaaaccgttctctgcattaatagttaatgcaattccagatttgaatatgcagcactcaggtgggcaggggtttcctttatattattatgagaaatcttcgagtgatgaagtagttaaagaatacaaaaggaaagaagcaatttctgacgcaggattgttttatttcaaagacttttactcaactgaaagcataagcaaagaagatgttttctattatgtatacggattgcttcattctgaagattatcgtggacgttatgctgataacctttctaaggagttaccgcgtataccttgtgtcaaaaaatatgacgacttcgtgattttttctcaagctggacgagatttagccttttggcatttgaattttgaagaagtcgagccatacaaagcaactattgattctggcaacttaaattattctcaattaccgaaagaggatttttatgtagagaagatgaagtttgctaaaaaggctgacaaaagtacagtcatctataacaacaaaatacggataaaaaatatcccatctgaagcctatgattacgtagtaaatggtaaacctgcacttgaatgggtaatggaacgacagggtgttttaacccataaagatagcggtattgttaatgatgccaatgactgggctatggaagctatgggaaatgcgaaatacccattggaactatttctaagagttatcactgtaagcctggaaactcagaagatagtaaaaggattacctaaactcgatatataa

SEQ ID NO: 161941 - DNA, 228 bp, Enterobacter cloacae
atgcggtctattgaaacactcggtgctaagcgcaagctaataacaactaataaaagtatcatcaattacgacttttttgatgagaacaacattctggttgttgataacacagttacgaaaaatcaagtcgacgaattcctacaaagaaaatacaagttattagaggcggagatatataataaatactctgttaattactgggttcaggattttttaagagaaaattga

SEQ ID NO: 161942 - DNA, 564 bp, Enterobacter cloacae
atgcagtacctttaccattttacatcgcagaaagctgctgaaaagattgtagctgatggttctatcttgctaggacggtttctctcatccaatggtgttgttatggaaaactcagcagttagtttgactacagacaaagatcccgttgggcacggtttaccagatggtagagaaatcactctaaaacaggctgaaacattaaaatattacaccataatcaatgacaggcttcattccatcaataacataaaatgcagaatcactatagcccctacagggctagatattgtatccgccagtgaatactataaaaacagcccagatttattacgcgggctttccattgctgcttattttcctgttggttttgatggcatcggtccaactcacgaaaaagatatattgattaaatccaaagcatctacttggtggtattcttttgtgcctattactgttgcatcaaatataatatcttttggcattgatataactggtgaaggtaaacactatgaggaattgtcaccacctgatttccaacaactttgccagtatatacatcaatga

SEQ ID NO: 161943 - DNA, 699 bp, Enterobacter cloacae
atgctggcgatctaccatgatgcccaaatccgttcaggtaaagtcatacatgagacgaaatgggtttctgatagccatatgctggcacacagttatgctgtcaggccaatgacaaggacttcgttgtttaactatggacgggctatgtatcgtctggaaaacaacgtgcctaaagatgatgtatcagtgagttctgaatacatatctgaatacctgaaacagggagggctgaatccttctaacaagatgctgattgaaattgatctggatgaagccagcagtgacgatctggcagaacacctaaaagtgcttatcactcaatggcagaagcacctgaatgtgcctaagccaccggaaaaagatttccgttttggtcataaaacattccaaaagatactggattacaaaatcatcccgttgatggatctcatcggttgggaacagctcaacaagcagaaaatcccttatccagtattggctggcatcctgcaccccgatatacgttatgccagaggcagcgagcaaatcaaagacactgattaccctctagcctatgagttcttgaacaatgataattatttcaagtcgttgaatgattttttcataaaaaacatgcatgtgaaaagttccgatatccttgctgtcatcgggatgaatgacaaacctgaagacaaaaagaaaacaagggatgttcgctga

SEQ ID NO: 161944 - DNA, 219 bp, Enterobacter cloacae
atggttcaaatcgtagcaaataaaaaacaacgtcttattcgtttaccagaagtgattagaagaacaggatttggaaagacatggatttatacgcttattaaagcaggactctttccatcgcaagttaaaacgggtttaaggtctattgcctttatagaaagtgagattgatgcatggattgaaaaaatcatctctgattcacgacctatatctgaataa

SEQ ID NO: 161945 - DNA, 300 bp, Enterobacter cloacae
atgaaaaatatcaatgagtcatctaccaatatttttactactatggcaaagaatctttatatctcggggatacgtatatataaagaacaaggagaacttgaggtattagcggctattatgttggatagcgacagaacagagttatatctttcgcatgttaaagattatctggcaaaacgctttgatgaacacatggaagaaatgggtaaaagagaaagactgatttatgttgatatggataaagttatgcatgaaatgagatatgttcatactcaagcattactttttagcatgagttaa

SEQ ID NO: 161946 - DNA, 219 bp, Enterobacter cloacae
atgtttggtttttcctccggagccctgatgacttttaatgatgatgagcgacacctgcttgtgtccgttgtttcgggctggctccggcgtgccgaaggggatgccggagccatgatgctggatgcataccggcagattttgtctgaaaccgaaccggccgcaagggcggtcatgctcgaatttcttgaatcagttcgcattcattacgtttcgtcctga

SEQ ID NO: 161947 - DNA, 363 bp, Enterobacter cloacae
atgttaaagctatttgcaaagtacacctctattggtgtgctgaacacccttatacactgggtggtttttggtgtttgtatctatgtcgcgcatacaaaccaagctcttgcaaacttcgcaggtttcgttgtggctgtgagctttagcttcttcgcgaatgcaaaattcacattcaaggcatcgactacaacgatgcgctacatgctatatgttgggttcatggggacactgagtgctactgttggatgggctgctgatagatgcgcacttcccccgatgataactcttgtcaccttctccgccatcagcctggtgtgcggtttcgtctattcaaagttcattgtctttagggatgcgaaatga

SEQ ID NO: 161948 - DNA, 306 bp, Enterobacter cloacae
atgaaaaaaagaaatttcagcgcagagtttaaacgcgaatccgctcaactggtcgttgaccagaattacaccgtggcagatgcagccagcgctatggatgtcggcctttccacaatgacgcgatgggtgaaacaattacgtgatgagcggcagggaaaaacaccaaaagcctcccccattaccccggaacaaattgaaatccgtgagctcaggaaaaagctacaacgtattgaaatggaaaatgaaatattaaaaaagcctctgtttttgaactatggaagaacggaacaggcttcagtgaaatag

SEQ ID NO: 161949 - DNA, 1035 bp, Enterobacter cloacae
atgttaagggatactggcggcataaaaccccatgagcgtaagcgggctgtagctcacctgacactgtctgagcgcgaggagatacgagctggtttgtcagccaaaatgagcattcgtgcgatagctactgcgctgaatcgcagtccttcgacgatctcacgtgaagttcagcgtaatcggggcagacgctattacaaagctgttgatgctaataaccgagccaacagaatggcgaaaaggccaaaaccgtgcttactggatcaaaatttaccattgcgaaagcttgttctggaaaagctggagatgaaatggtctccagagcaaatatcaggatggttaaggcgaacaaaaccacgtcaaaaaacgcttcgaatatcacctgagacaatttataaaacgctgtactttcgtagccgtgaagcgctacaccacctgaatatacagcatctgcgacggtcgcatagccttcgccatggcaggcgtcatacccgcaaaggcgaaagaggtacgattaacatagtgaacggaacaccaattcacgaacgttcccgaaatatcgataacagacgctctctggggcattgggagggcgatttagtctcaggtacaaaaaactctcatatagccacacttgtagaccgaaaatcacgttatacgatcatccttagactcaggggcaaagattctgtctcagtaaatcaggctcttaccgacaaattcctgagtttaccgtcagaactcagaaaatcactgacatgggacagaggaatggaactggccagacatctagaatttactgtcagcaccggcgttaaagtttacttctgcgatcctcagagtccttggcagcggggaacaaatgagaatacaaatgggctaattcggcagtactttcctaaaaagacatgtcttgcccaatatactcaacatgaactagatctggttgctgctcagctaaacaacagaccgagaaagacactgaagttcaaaacaccgaaagagataattgaaaggggtgttgcattgacagattga

SEQ ID NO: 161950 - DNA, 228 bp, Enterobacter cloacae
atgtatggtaattcagtcatcaaaataacgttggtcaccatcacaaaattcacatcctcggatatggctcagttcaggaacgctatcgctcaggtgaccgcaacaaccacatacatgaagctcggtgtaatagatgaaacactgagtgcaaagatagccgtctccaaatttacatacgctttcaggagtcatgcaattggtacatccagcaggaaatacggagagtag

SEQ ID NO: 161951 - DNA, 510 bp, Enterobacter cloacae
atgaatggttcgaagaataatagccctgtgcttgcatggacttgggtatgggatgattgtggatttgaattaaatgtcagcaaaaatgtttctgaattatttgatatgtttagacagcatggtactaaaagtgaatgtggtggacagctatttatagatgtgtcttataacaatggactttggctatcttatgtaacattaccacatccatctgataaatcttcaaaacactgggtggaattaaattctgatagatgtaaatttgagctaaaccaggcagaggataatgggctggtttttgcaggttattggcacacccaccctcaaattgtgcctacactatcgaatcaagataaaatcagtattcaacgtttttatgccaaaaacaaacatattataagtgctcctatttttattatagtcggaacgtcatcatgccaaaatgggataagagcatgggcttataaaaacgaaaattataacgagggtttttataaaaaggagtcataa

SEQ ID NO: 161952 - DNA, 126 bp, Enterobacter cloacae
atggaggtgcctgaagttaagcgcctgaagtcgcttgaggaagagaacgccagactcaagaagctgcttgccgaagccatgctggataaagaggcgcttcaggtggctcttgggcgaaagtactga

SEQ ID NO: 161953 - DNA, 540 bp, Enterobacter cloacae
atgccattatctgaattgtatatctcagttgacattgaaacgactggacctattcctagtatttacgatcttattagcatcggagcttgtatagtaggaaatactagtgaaaattttagccgcctaattaagcctcaaggcggaaaggtagataatgaagctttggcagtaacaggcttaaaattagaggacctaactacgggcggccatgaaataaccagagcactcatggacttcaaagaatggcttgcgcgaataagtagcgatgataaaaagatagtcttcgttggctttaatgctgcttttgattggtcatttattaattatgcctttataaaatattgtggtaacaacccgtttggatttacagccctagacattaagtcttattacatgggtaaattcgggactctttggcaagaaacaaaatccagcattattgacatcaagttaaaaacctataacactgcaaagcatgatgccctccaggatgcaatttaccaagcagagatttttagaattatatcaagcgatagataa

SEQ ID NO: 161954 - DNA, 501 bp, Enterobacter cloacae
atgattaccgtcaatcaggagaagcttgatatcgttgcagagatgaagcctcagcgcgttgtgataacctggatgatgacaggtgttaactcaattcagatccctcaggaagcggttgcaggtattcttgataccataaatcgtataaagagggtttccccggaatcgaaaatcattgttatcggtccggtgccacagtggaaacaaaatcttgttgcagtaatgctgaagtactgggatgagtttcatacttacccgccaaagtatatggactttgaacttgataaaagcatgttcgcatgggatgaggcgctcaaatctggccttgagccccatgcggtgaagtacatttctgccctcaatgagatgtgtaacgagcagggatgtataaccagggtcggtgacggggtgaaagacttatctgccgctgactggggacaccttacccccgcatcttctgcatatcttgtcgataagattaaaggtcagcttctgaattaa

SEQ ID NO: 161955 - DNA, 555 bp, Enterobacter cloacae
gtgggtacggtgatgagcggtgtcctggcaggtatccttgctggccgggctatcggaggccttattgttcagtatttcggctggcgcggtgtctttttgtccggcgcgatcatgacattgctggctatatttttcatcttgcgcattttgcctgctcagtcgttgccaacgccaaagtttaactatctggcggtattacgttcattaggacagctgtggaaaagcgagccgcaggtgcgtggtgcaactcttacacaagcaatgctgtttgcctccttcagcgtgctgtggaccgtgctccctttctggttagctcatcgctacgattacggtgcagggataaccggcaccctggctgctttggggttaatcggtattctgtgtgcgcctctggcgggaagtttcagcgatcgtcagggaccattccgaatggttgtttttggtgtgatactcatgctgctagcctggactgttttttggagatggaacagtattgtgggtatggtggtgggcattcttgacctgcccccaggattagatacaaccgtcagttag

SEQ ID NO: 161956 - DNA, 153 bp, Enterobacter cloacae
atgtgtcgaatgaaagattgcctcatgatcaataccattgatatcaatatcacgccaacgttcttgaatcctttgctcacgttgatagagctttgtattagcaccatccagtgtaatgttctggtgactgccattgtatcttatgtaatttaa

SEQ ID NO: 161957 - DNA, 1386 bp, Enterobacter cloacae
atgttcctgctaaaacgactaagcatcactacggtatttatcctgacaggatgcgtctcgctggcccctgaataccagcgcccgacgtcaccggtaccccagcagttttcgctgtcgcgtaacagcctgacgcccgtggagggcatgtatcaggacaccggctggcgcaacgtcttcgtcgatccgcaaatcgcgggattgattacagaggccctgaagaacaaccgcgatataaaaatggccgcgctgaaggttgaagaggcccgggcgcagttcaacgtgacggatgcggatcgttatcctcagctgaacgcctcctcgggcatcacttacagcggggggcttaagagtgacaaacccacttcccagcagtacgacgcgggacttgcgcttagctacgaactcgacttttttggcaagctaaagaacatgagcgatgccgaccgacaaaactttttcgccagcgaagaagcccgtcgtgccgtgcatattttgcttgtcgctaatgtgtcccagagctatttcaaccagcagttggcctacaaacagctgcgtatcgcgcgggatacgctgtcaaattatcagcagtcttacgccttcgttgagcaacagctggtgacgggaagcacgaacgtgctggcgctggaacaggcccgggggcagatcgaaagtacccgggcagaaattgccaaaagagagggggagctggcacaggctaataatgccctgcagctggtcctcggaacgtatcgcgcgctacctggcgacggcggaatgaacgccagcgatattgcgccggtaatactgccgccccatctttcatcggcaatattgttgcagcgcccggatattatggaggcggagtatcagcttaaagcggccgatgcgaatattggcgcggcgcgcgctgcctttttcccgtccatctccctgaccagcgggctttcaacgggcagcacggaattatctggcctcttcacgtccggcagcggcatgtggaacgttattcctaaaatagacattcccatttttaatgcgggcaggaataaagccaacctgaagctggccgaaattcgccagcagcagtcggttgtaaattacgaacaaaaaattcagtccgcctttaaacaggtcgccgacgcgctcgcgctgcgggacagcctcagccaacagcttgctgcgcaacagcggtatcttgattcgctaaacatcaccctgcagcgtgccagagggttatatacccgcggtgcggtcagttatatcgaagtattagacgcggaacgcgcgctgttttccacgcagcaaaacattctcgaccttatttatgcccgacaggttaatgaaattaatctcttcaccgcgctgggcggcggttgggtcgaataa

SEQ ID NO: 161958 - DNA, 420 bp, Enterobacter cloacae
atgccagagaaacagcgcgcagacgatggccaccacaataaactcttccagcagtttataactcaggttatcaatggcccggtcaatcagctggctgcgatcgtacgtggtaacaatctcaacaccttccggcaggctggccttcagcgtctccagtttatcttttaccgcggtaatcacttcacgcgcgtttttacccgaacgcaggatcaccacgccgcccgcgacctctccctgcccgttaagctcggcgatcccgcgccgcatttcaggcccggtttgtacgcgagcaacatcacgcagataaaccggtactccgttctcgccggttttcaggacgatgttattgaaatcatcaatgctctgaagatagccgctggcccgaaccatatactctgcttccgccatttcgaccgatga

SEQ ID NO: 161959 - DNA, 315 bp, Enterobacter cloacae; identical to SEQ ID NO: 155981

SEQ ID NO: 161960 - DNA, 885 bp, Enterobacter cloacae
ttgcgtattgttgacagtctgcgcagccgtgggcgccgtcggcgttccggtcagggcagggcttgccagtggggctttcagtgcaagcgcgttagtaatggtggtgctgaaattaggatcattgttgatagccgcagcaatttctttcagcgtgtccagcgtagccggggcgccattcaccagggcgatcagagccgcctgcacaaacgcagtcgtggcaagctgagtggtattgttacctgcagctgcagtcggggcttttggggtgccggtaaacgtcgggctggcttttgtcgcatattgcgtatgcggatcagctgcagcaagatgcgccgccatcagctcatcgacatacaccttcagttccagcaccttgtcatcaacatattttcgggttgccagcactacggacgggtcaattttcagcgtaatgttatcggtgctgctggtaatcagtaccatgcgcactgtctgcgtgcggccgcttccctctgccagctgcggcttgtagctctccgggcagttacccactgcgatcagtgcgcccgtttcatcaaacagcccaacctcacgaatccaccaaccgccctcagtttcaggaatcacctgctcagcaataatctggctgctgttctgcggatcgatgtaaagcatgttcaggtcagcgcgccgcttttcggaaaccagcttcgtctgttgtgcgctgggagttggaagcacgccgccgccatcccccaccgccatctgggtaattttcagcggcacaccgagcgcggcagcgcttgccagtttcgccgcgccaatatccgtcagcagggtataaaattttgcgctcatgggttcactctcattgtgtcaataacatggacggcgccgccctcgtag

SEQ ID NO: 161961 - DNA, 405 bp, Enterobacter cloacae
atgtcgttctcgccggacagcaggctcaccatgaaagcactggaaatggcatgggaaacccgtggtaagcccgtcggggtgatgttccacagcgatcaaggcagccattatacgagcaggcagttccggcagttactgtggcgataccggatcaggcagagtatgagtcggcgtggaaactgctgggataacagcccaatggagcgcttcttcaggagtctgaagaacgaatgggtgccggcgacgggctatgtaagcttcagcgatgcagctcacgcaataacggactatatcgttggatattacagcgcactaagaccgcacgaatataatggtgggttaccgccaaacgaatcagaaaaccgatactggaaaaactctaacgcggtggccagtttttgttga

SEQ ID NO: 161962 - DNA, 516 bp, Enterobacter cloacae
gtgggaaagttaacgtgggtcgtcagagctgaaatatataagctctttttttggaatatgaggaatgtattatatttaggtaagccaacctttttctataacattaagaatataatatttggaaagagatttagaatttatccgcacgccagagttgagctatctaatgccgcaagttgtgagttcggtgataacacggcaattggtgataactttcatttaatatgccagtcaaaaattctaatcggcaacgattttttatgttcatccaatgtgtttatttctgataccgaccattcatttcaattaagtagtgtgccttttattaatcaaccttgtgtgactaaggatgtacacattggtaacaatgtcttcttaggtaaaaatgtggtgattctggctggtactaaacttggagataataccatcgttgccgctaatgctgttgttagaggtaatcatcccgataatgtagttcttgcgggcgttcctgctaaaatcatccgcgtattataa

SEQ ID NO: 161963 - DNA, 162 bp, Enterobacter cloacae
atgaaactgccgcgaaacgcccttatctggtgcgtattaatcgtgtgtataacgctcttaatattcacatgcctgacccggaaccgcttatgcgaagtccggctaaaggacggggacagggaggtcgcggcaagcctggcttacgaatccaacggtaagtag

SEQ ID NO: 161964 - DNA, 231 bp, Enterobacter cloacae
atgagaaataacccctgcaagacggagctgaaagtcgcccgcagccagcgtaacaagctccgtaccatgtcggcaaagctgaaagagatgtgctgcgagtgggacggactcagtggctggctggaaaccgaaagcgagcagctggctgagagtatagacaggcatcttgaggcgctcgaagaccagatccgcgagtggtcagaaggtacggataaccgggagggatattga

SEQ ID NO: 161965 - DNA, 732 bp, Enterobacter cloacae
atgatcccgtcctcacacgcgctcgtttccctgaagcctgcccgtcaggctgcaattcaggctatcagccatgttgagtctgcccgcgaacgcggcgcacgcctgcccgccatgccgtatgtgcgtacctttctgcgccttctcacgggcagcggacgcctcaacgccacggtggccagtaaaataccgggcctgcactgggtgccaaataaccgccattcgaacctgaaacaggtcgaggaggcgcttaacacgatgattgccaccagtggcgaagcctgcccgctgccgctcacgactgacgtacaggccgaactgtttcctgaagtcatgcacacccgcaccggtcgacggctgcaccggtccggcattaagaccacgcgtcagcttcgccgccagtcgcgcgagtttgaacagcgctggaaactgcgccagaacctgctggagcaggcgaaaatcgacctgaattttcagtcaccggaaaccgtctgcacctggtacacccggtggagcaacgagtttgacgcggcagagcttgccggaccgttctggcgctggcagtcgcggttcgcgtcgctgaaggaacttgactggcttcgcatcagcggtgagccgctgtatgcagtgatgtatgaaatatcatatatcgtgcatgatacgccggaatatatccgtaccgctgaacgctggcaggtaccgaacaagttgcggtatcagcagggggcagaatga

SEQ ID NO: 161966 - DNA, 435 bp, Enterobacter cloacae
atgaccatgcaatatgacctgaaccgaatcaacaccctgaccgccacagacctggagtttatccgtcagcagggcgaggacgcgcgccgcgccctcagcgatgccgtgaccggcctcctgtcgacacctgaaggatggcgcgtctgcgccgagttccgcagcgagttcggcggtttcttccccgtccagtgccgcttcagcgcggacggcagtgatgactggcatctgtgcgtgtgcagccccggcgaagtctcgccgtactggcttctggtgctgctctcctccggcggtgaagtggtgcgtaccctttaccagagcgacacgctacagcctgaccggataaaccagctgatcgcgcagctggcaggtatgcaccgctttaactgcactgccagcaccgtggcgaacctgatgagcggggaggtgacagcatga

SEQ ID NO: 161967 - DNA, 366 bp, Enterobacter cloacae
atgcagaaccttaacacccgtccggcgacccgtaaggtcgggcagagcaccgaaatcgtgaagctgctgcgcattcaggccagcgaaacccacgtggtcgagtttgacaacgtggacacccgttttaacgactgcaacaactggcaggtgatggcaggggacaagcgtgtcctgttcagcaaccggatgtatgaacgtttttcagatgtgaaatcggggattctggcaacgatcaacgtgtgtgaaaactgcgccagcgaaacggataaagcgatgctggaaggggcaaaagtcatgatgcaggttctcgacggctatccgtcctttgcggcactggcagcacacccgaaacgcattaccggttaa

SEQ ID NO: 161968 - DNA, 351 bp, Enterobacter cloacae; identical to SEQ ID NO: 159238

SEQ ID NO: 161969 - DNA, 255 bp, Enterobacter cloacae; identical to SEQ ID NO: 156097

SEQ ID NO: 161970 - DNA, 186 bp, Enterobacter cloacae
atgaatcgcagtaaagccaaattgtatctggctatccatataagacaaatcgatcgcagcatcacgcaaaagtatagagcgatacttttcttcaaaagaattaatccagctattaaaatcagctttcataaattcctttttgtaatcgtaaaactcgcccttaagtacattcagtttaccaattaa

SEQ ID NO: 161971 - DNA, 132 bp, Enterobacter cloacae
atgctgcctgaaacaaatgaattcccaataattcaaattgagattgcaaaaataaaatttcttaaccctcgaactagaaataaggtagtgcatgaagggattaagcaagcctataagcgtgagagcgattga

SEQ ID NO: 161972 - DNA, 474 bp, Enterobacter cloacae
atgtctggaccaccgaaaaccccgacccatctacgtttggtgaggggtaacccatctaaacgcccgatcaatgagaacgaaccaaaacccccttcaggggtacccccaacgccgaagcatttcgacaagcaggggaaatactggtttaaacggatggccgacgagcttgatgctatcggtgtgatgtctcagctggacgccagagcccttgagctgctggttgaggcttataccgaataccggcatcactgcgacacgcttgaagttgagggctacacctaccggaccgaaacgcagaacggggatgtgctgatcaaggctcaccccgcagccatcatgaaagctgatgcctggaaacgtctgcgcgccatgcttggtgagttcggcatgacgccagccagccgcacgaaagtgaatgcaaaaggtcctgatgcggttgacccgctggccgagtttatgaaagcgagggattaa

SEQ ID NO: 161973 - DNA, 609 bp, Enterobacter cloacae
atgacgggtcagcaggcggatctccctgtcgaacgggaaagcgtaacttacgctggtaatgtcactggtagaggacaggtcaaacccggcataacactccattccggccagatcctcttcggtatagtcgagcgcacaggcatcccatgcaccggcgcccatccacggcgtggagccctgacaccagatattgaaacgtttggtcagcatttccacccattgcgacggtatgccccgcgctttctggattgtggattccagtttcgccgcgtcaacggacacatgcaggttagggttggccttgatccacatctcaggctgctcaacctcgctttcgtcgtccagctcgtagatcaggacaaacagcgaatcgttgctctcttccccggcaagaatctggcagcagtagtcgtaatgctgtttacaggcggagacaacgttactcccggcggtcgtgatggcgaacaaaatcgcctcaggacgtgcgcccatacccagctcaagcgcggaataaacgccgttatccgggtgaaggtggtattcatcgacaattgccaggctggggttagtcccctcaatggtggccgctttcgccgccagcggctttaa

SEQ ID NO: 161974 - DNA, 993 bp, Enterobacter cloacae
atgccgtactggaaaagggggctgacgatgatcgttaagtttcatccccggggacgcggaggcggtgccggcccggttgattatctgctggggaaagaccgccagcgcgacggtgccagcgttcttcaggggaagccggaggaagtccgggagcttatcgacgcctcgccctacgccaaaaagtacacctccggggtgctgtcctttgccgaacaggacttaccgcccgggcagcgtgaaacgctgatggcgagcttcgagcgggttctgatgcccggactcgataaagaccagtacagcgtgctgtgggttgagcaccgggacaaggggcggctggagctgaacttcctgatcccgaacacggagctgctgaccggcaaacggctccagccatactatgaccgcgccgaccgtcctcgcattgatgcctggcagaccatcgtgaacggcagtctggggctgcacgacccgaacgcgccggaaaaccggcgggcactggtcacgccgtccgcgctgccggaaacgaagcaggaagccgctcaggcgattacgcggggtttactggccttagcctcgtccggggagctgaaaacgcgtcaggacgtcactgaggcgctggaaagcgcaggttttgaggtggttcgcaccacaaaaagcagcatcagcattgccgacccggacggggggcgaaacatccgactgaagggagccatctatgaacagtcttttaacgctggcgaaggacttagagcagaaatcgaaagtgcagcagcagactaccggcgagatgctgaaagccgcattcagcgagcacgagaagtctgtcagagcggaactgaacgaaagcgagaagagaatcagcgccgccatccacgaccacgaccggatgctgtcctcagccatgagccagcgtacgaaagggatgctgcgcatggtcagccacgtctggctgaccatgcgcagcatccctttcgtacgctggctcatggctga

SEQ ID NO: 161975 - DNA, 678 bp, Enterobacter cloacae
atgactgaagaaattagcaacagcaatagcaatagcaactatcccaataaagaaaaaaaatggaaaataatcatcaaaaatatttttttctttattgcatgtttaattgctctttcaattagcatattttatctaatcaagaacgtaaaacattatctaaaacctctaagcaccgatataatccctgattacattagcatcctccctattattgcaggcggtctttttatagcactatggtatatttaccgaggtaaatccgttaaatcattaaatgatgcaatattatttgcatcagcaagctatgctttatatttatttttattcgattatgaattttataaaagttttacagatttgcagtacattgcagaacacctctatcaaattggtataaaagttttaatacttatttcaactgttggtaaaactttaataacaatagtcgaatttataaatgacagacataaagaaaaccaggtaataaagcaaaagaaattgaatgctgaacccaaaaatgatggaccttcggcttctgttatgaataatacaccatcaaatactgcaataccagacttaataactcacaataacttttattacaaattagttctatttgtagcgattggaatgacaagtgcaccttgggtttttatttatttacgcgactatatttaa

SEQ ID NO: 161976 - DNA, 588 bp, Enterobacter cloacae; identical to SEQ ID NO: 127155

SEQ ID NO: 161977 - DNA, 711 bp, Enterobacter cloacae
atgcgtgagaaaacagtcagcgccatactggcgcacgcggcctcatcgtgtccagacgaatgctgtggcgttgtcatacagaagggacgggtagagaaatacatcccttgcagaaatcaggctgaatccccgactgagcagtttgaattgtctcctgaagattatgcagcggctgaagagcagggcacagtagttgctatcgtgcacagccatcctggtgacggcgcgacaacccagcccagtgaactcgacatgctgatgtgcgatgccactgaattgccgtgggtaattgcatcctggccggaaggggatattcgcactgtcatgcctcgcggcgatcgcccgctaactggtcgccagtttgtgctcggtcatgccgactgctggtctctcatcatggattatttccgcactgagcacggtattacgttaccgaattacagcgtggatcgtcactggtgggagcagggcgaaaacctctacatggacaactggtatgagtgtgggttcagggagttcgacgggccttcccagccaggtgacatggtaatcatgcaggtacagtccacagtcccaaaccatgcgggtattttgcttgagggtaatgtgctccttcaccacatgtatggccagctaagtcagcgcattccatacggtggctattatcgtgaccgtaccatcaaaattcttcgctataaggatttgatgtaa

SEQ ID NO: 161978 - DNA, 195 bp, Enterobacter cloacae; identical to SEQ ID NO: 141587

SEQ ID NO: 161979 - DNA, 285 bp, Enterobacter cloacae
atgcaaaatatcacctttaccccgccaaatcctgagcagcgccgcacccttctggaggagtacggctttaagttcgaccgtcgaatccgtgaagaagaatgtagcgagatcactagcctttcccgttccagccgttggaaaatggaacagcaggggcgcttcccgccgcgctgtcattttgggcgcaatagctgtgcctggcttctttcggatgtgctctggtgggtacgtaatccgcctgcagtagagaacgtcaataacccgtacagccgtaaatctgcttaa

SEQ ID NO: 161980 - DNA, 378 bp, Enterobacter cloacae
ttgcgcttcattggctgcgcgggcgctggcgttactgtcggcaaggttggcttcgtaatttcgcagttgctcacgcaatttaacctggtcaatcagcgcagcattctgcaataccgtctttttctgggcttctgtcagagaagcaagttcgccctggctgacctggtatttaaccttcgccagttcagtattctggccttgcagggcaatctgctctttttgctgcttgataaggcgcttatacacatcctcggttttctcgccttcggttttaccacccttcgccttaggtttgttggcctcattattccgccattcagcaagaccgttattaataaactcctgacggcctgtctggaattgcggatcgctggttaa

SEQ ID NO: 161981 - DNA, 285 bp, Enterobacter cloacae
atgcaaaatatcacctttaccccgccaaatcctgagcagcgccgcacccttttagaagagtacggctttaagttcgaccgtcggatccgtgaagaagaatgtagcgagatcaccagcctttcccgttccagccgttggaaaatggagcagcaggggcgtttcccgccacgctgccacttcggccgcaatagctgtgcctggcttctttctgatgtgctctggtgggttcgtaatccgcctgcagtagagaacgtcaataacccatacagccgcaaatctgcttaa

SEQ ID NO: 161982 - DNA, 165 bp, Enterobacter cloacae
atgtggtcgtacaaaacggacaggatcactggtgaggtgttgccaaaactctccgatggctatgagcattgctgggatggtattcgttacagtctcgacggacacattaaacgtaagggccagatggccgggatgatgattcctaagcgtctgcaacggcgttaa

SEQ ID NO: 161983 - DNA, 234 bp, Enterobacter cloacae; identical to SEQ ID NO: 143049

SEQ ID NO: 161984 - DNA, 672 bp, Enterobacter cloacae
atggcggagtatggcgttttactgacgaccacgagcggggaagtatgggtgaccgctaacagctcgccaatcgctctacaggcgcgaaagacagcggcacttcagggaacatcggggtttaataccaaagtgacgcacacattccccgcaggtcagcctgttgtcgcgttcgttcattgtacggttgaggtcgaaatcacccagacgataagcggtaacaccatcacgattgattttctcagaccgaatgcaaccggcacagcgtacgtttattttttctctattttcccgcagacaaagccagactacgggctggccgtgtgggatgcttcagggacgctgattttaacaaacgaaacgcgcacgctgagcgatgttgtcaccctcggtaccgccggggtggatgccagctcaggatacaacatcaatacaactctggcggggaagtgggcctgtatgcctgccatgctggggctaattaccggggttgtatccgccggcggtcagccgcaaccctactcggccatatacaagagcatggcaaagcttgagggaagcaatacgcggatattcgccaggccgcagacaacccccggcggcaaccttcagaacgttgcgtattcgaatctgaggaacgtgattatggccattaactgcgccaactatgattga

SEQ ID NO: 161985 - DNA, 759 bp, Enterobacter cloacae
atgaactcggtcaccatatccggtggccgcgtgacgcagaactccacgatgaaggacgtaagcatcagtgagcgtgagagtacgtacacgttccccggaagcatctggcagatatttcctcctggccagcgtaaaggagaaggcctgcttattgatgacagtactgacttcctggcgattaccaatgccacgcagtcagggcagtgtatctggaaggggaccgtcaatatccccacaggcggctggacagttcccacgatagcggggtacgacaagtccaaatatatcgtctttgggcgctgcaatagcggtaacaccgtcgatttcgatggcaacaccgtcaggttcttcagccctccatccaccaacgatgatgctccgacgaccggcacgatagatattgtcatctttgccagtggcgtggcgcctcagccgggcaccgggctcaacatcttcaatgcagccggggcctgcacgttttcaacgacaaagcggcctttcgtctacctcaaccagctatggacaccttcgaaaaatgccgtgagcatcggcagcggctatgttccgctgggcagattcgggctgatggctcacgaagtaaatggcatgtacgtgtatagaatgttcggaataaaaatacagaacggcagtgcttcagttcagggtgggaaatatcttgggcgcgagcggtatgcaatttttggtaatgacacggtaacgccactgaaccttcccgttctacccgatatgtacgtctga

SEQ ID NO: 161986 - DNA, 510 bp, Enterobacter cloacae
atgacgggtaaggagtcggatctccctgtcgaacgggaaggcgtaacttacgctggtaatgtcactggtagaggacaggtcaaacccggcataacactccattccggccagatcctcttcggtatagtcgagcgcacaggcatcccatgcaccggcccccatccacggcgtggagccctgacaccagatattgaaacgcttggtcagcatttccacccactgcgacggtatgccccgcgctttctggatggtggactccagtttcgccgcgtcaacggacacatgcaggttagggttagccttgatccacatttccggctgctcaacctcgctttcgtcgtccagctcgtagatcaggacaaaaagcgaatcgttgttctcttccccggccagaatctggcagcagtagtcataatgctgtttacaggcggagacaacgttactcccggctgtcgtgatggcgaacaaaatcgcctccggacgtgcacccatacccagttcaagcgctga

SEQ ID NO: 161987 - DNA, 159 bp, Enterobacter cloacae; identical to SEQ ID NO: 150307

SEQ ID NO: 161988 - DNA, 270 bp, Enterobacter cloacae; identical to SEQ ID NO: 143064

SEQ ID NO: 161989 - DNA, 180 bp, Enterobacter cloacae
atgcgcatcctaatgattattgatggtttacccggtggaggagccgaaaaaacggttctcaccctctccagcggactgacagaactggggcatcaggtcacccttttctccttacggaaggtgtgcgactacgccattccggaatggcatcgattttcagattgtgcaggatacctgtaa

SEQ ID NO: 161990 - DNA, 312 bp, Enterobacter cloacae
atgaaaaaagctattagccagctgcttggcggcaacatgctttcgaaggttcttggattggtcagggaagttttgatggcaaaattttttggtacaggagatatcaacggggcttaccgtattgcgcaaacgggaaccctagtaccaataaacttcatgaccagtgacagccttaattcagcattcatcccattatataagaaatatctcaccgagaatgaatttcgtgcttcgaccttcaagctctgtatgtttattttttttgcactgatatctgtacttatattttgtcgactgagttacttaagataa

SEQ ID NO: 161991 - DNA, 738 bp, Enterobacter cloacae; identical to SEQ ID NO: 117462

SEQ ID NO: 161992 - DNA, 306 bp, Enterobacter cloacae
  misc_feature (230)..(239): n is a, c, g, or t
atgtcagaaaaaaaactggctgttaaatggactgacagggaaattatggatgtttacataaaagcttttaaatccacattagagttgtttgacgagcttgtttcatgtgatctgttaactaaacgaaacgcttttggcaagttagaaataaatccaatattcgaaaatcattttgaatggatcatgtctgaagcttttgaaatagtgggaaatcatcttggttataatgnnnnnnnnnnaatctcaaataaaatgccactggcaaacatctgccagagggcggtgtttgcattttaccggagttaa

SEQ ID NO: 161993 - DNA, 210 bp, Enterobacter cloacae
atggaaaaaatcaccacgtttatcgcctactggctggccgtggggctggcgtatgtcggggcaatgtcccccgaaaagatggcgctttacgtgggcggcggatgcgccatttttaccgcgctgacgaactactggtttaagcgcaagacgtacctctatctgatatcgctcggactcgataaaggggctattcgtgaaatcaatcgttaa

SEQ ID NO: 161994 - DNA, 855 bp, Enterobacter cloacae
atggcaaagaaagtttctaaatggtttcgcatcggcgtcgagggtgacacctgcgatggccgcgtcatcagtgctgatgacattcaggaaatggccgatacgttcgacccgcgcgtctacggctgccgcattaacctcgaacatatccgggggctgctgcctgacagtctgtttaagcgatacggcgatgtagtcgagctaaaagcggaggttatcagcgatggctctgcgctcgacggcaaaaaggcgttgtttggcaaaatccagccccttgacgagctggtcagcatggttaaggccgggcagaaggtttacacctccatggagatccgcccgaattttgccaacagtggcaagtgctatctggttggcctcgccgtcaccgatgacccggcaagcctcggcaccgaatacctcgaattctgtagccgcgccacgcagaacccgctcgccggtaaaaaagaccagccgggcgatctcttctctgtggcctcactcgctgagctggaatttgaagacgttcccgacaccatgctcaacagcctgaccgacaaggtaaaggccattttcagccgtaaacaggccagcgacgacgctcgtcttgcagatgtgcatgaggctgtgacgaccgtcaccgagctggtgcaaaacaacctcaccgccaccgaccagcgcgtcaccgagcttgagaccgaactggctcagcttaagcaggacgtgaccagcaaggccgaagaaagcgcgcaggcgtttaacgacctcaaaaactccctcgataacaccgaaagccagcgccagccgcgtcgcgagctttcaaaaggtggtacgggcgacgagctgctgaccaactgctga

SEQ ID NO: 161995 - DNA, 426 bp, Enterobacter cloacae
atggatgccaccggcaacctgattgacgagatttatcaggatgacccggagctggttgtcatcaccggtcgcaagctgatggcggataaatacttccctatcgtcaacaaagagcaggaaaacagcgagtcgctggccgctgacatcatcatcagccagaagcgaatcggcaacctgccagccgtgcgcgtgccttacttcccggcgaatgccctgatggtgacgcgtctcgataacctgtctatctacttcatggatgacgcgcatcgccgcagcatcatcgaaaacccgaagaaagaccgcatcgaaaactacgagtcaatgaataccgattacgtggtcgaggcatacgctgccggttgcctgattgaaaatatcaagctaggtgacttcaccgcacctgctgcaccggaaagcggagagtaa

SEQ ID NO: 161996 - DNA, 177 bp, Enterobacter cloacae; identical to SEQ ID NO: 156107

SEQ ID NO: 161997 - DNA, 303 bp, Enterobacter cloacae
atgaacaagtcagacagggggaagcgggcgagcacgaacgggaagagcaacgccgtgattaacaaaaaggcgctggccattgtcggggtgtatcttttgcccgtccttggtgccttagcgctgatcaatggtattgacaggctttcagacaccgtatggatgtatattacgggcgcgtacgatcggatccatgccgcacgggagctgtgtgttgcgatagtctggcttctccttccggttttatgcctgggttactttctggagtgccggaaaatcctgcgccatcaccagccgcctgaataa

SEQ ID NO: 161998 - DNA, 159 bp, Enterobacter cloacae
atgatgcgtcagggggtgatttccgccgttatttttttactgctggcaatggtggccatgatctacatgccggaggggtattcagcgattacctgggccataggcgcagttgtggttgtgacgctgattttaattcgtgccaaaaaaggaggggattga

SEQ ID NO: 161999 - DNA, 237 bp, Enterobacter cloacae
atggccctgaacgtgcgcaccattgagcgctgcatcgcagcggaaccggaaaattttttccggccaatgagtgcccttgtcaccggaacggtgacaagtatgcacgcacaattacacgaacaggcagcacccatgcccggcctgacaggccgggagctatatcataatgtgggatgctatatgcgaaagttgaaggttaatactgcggaccttaagcgtcaggattctgaccggtag

SEQ ID NO: 162000 - DNA, 2058 bp, Enterobacter cloacae; identical to SEQ ID NO: 32296

SEQ ID NO: 162001 - DNA, 141 bp, Enterobacter cloacae; identical to SEQ ID NO: 36145

SEQ ID NO: 162002 - DNA, 141 bp, Enterobacter cloacae; identical to SEQ ID NO: 36145

SEQ ID NO: 162003 - DNA, 192 bp, Enterobacter cloacae
atgcttgtttacatagaacactattacctttatgacttctgcctgggcatcctgtgcatcgacgttttgcatgtgcttaagatcgtgaaaagtagctggcttaccttacagatgaaggcgttctcaataagacgcatgattgacactgaaccaactgggcgttttaacattgcgcctggtatcaacgtttag

SEQ ID NO: 162004 - DNA, 708 bp, Enterobacter cloacae
atgttaagctatttaagaaagagcgatggacttactgttgctctattaaccgcaagttgctatgtagcggcttatttttttgaggttggctatgcacgccatgttggaatacctgttgagataatctcaatatcattaggtaatattgtttcaacatcaatattccttttctttgctactgtaatagctttctttgcgtgcactttcccatacattataatcgcaaggaattttggaaaacataaaatagcggtcttatcttcatttgttctttcacttgtgatctttgcacttctgaatttttatctgttaggtgagttaacaaagggcattattataaaagctatttgttcatggctcttcctgacatttgtattttatctgctgataaatgatgataacaaaactgttgattcagaaaaaccaaaaccattgttcaacaagatttacgatatcacgggattaattttttggctgtttttcccatgtgcattctttattatgaactgtggtatatatagcgccacacaacagacttcattcgatactttcgttttaaaaaaggatgagtatgcaattttgagaatttatggagacaacattgtcacaaaaaaaatcatcaataaaaaaatgtctaatggcatctatattttcaaaacagatgactttaaagaagttcaaatattaaccaaaagtaataataagtga

SEQ ID NO: 162005 - DNA, 408 bp, Enterobacter cloacae
atgaaaatcaatcatgaatatctgaaaggtcttttggaggcttttgaagcatctggtgagccacaaacaaatatcagaaaacttcaggaagcaggttttgactacaggacggaggaatttttattccatatgcgcttgttagacgaccgcaatctaatagccagaacagatgggaaatatggattcggttatttcgaaggttctgatgatggtggttcgtggggggtgttaccgttacgcctgacagcaaatgggcatgatttcctggaagctctaagaaacaaagaagtgtggaatacagttaaaaatggcttcaaagatgccagcatcggaacattagtagatgtctcaaagcgattgtttgatggtttcgttcagaaaaaaatagacaatatccttaattcttaa

SEQ ID NO: 162006 - DNA, 441 bp, Enterobacter cloacae
atgatccgcaaatggcaaagtgaggacaccgctccgcttttgagtctgtggctggagagcaccaccgaggcgcatccgtttatcgacgcaagttactggcaagcgaatgaagcggtagtgcgggatgaataccttcccgccgccgagacctgggtctgggaagaaaacggtaccctgtgcggttttatcagcgtcatgcagttccagttcgtgggggcgttgtttatcgccccggcgttcatcggaaaggggatcgggcgtgcgctgctgaaccacgttcagcagcactatccgtatttaactctggaggtgtatcagaaaaacgtgcgggcggtgaatttctatcatgctcagggttttcgcatcgaagacagtgcctggcaggatgatacccaacacccgacgtggatcatgagctggcaggcggatcaaacgccgtaa

SEQ ID NO: 162007 - DNA, 1872 bp, Enterobacter cloacae
gtgacgttccgcgccggggatgtggttgtcccgctgtatgacgataccggcgcgctggttaaccttcagcttatcagttctgacggtctcaaacgcaccctgaaaggcggggcggtaaaaggggcgtgccacaccatcgaagggaaaaaacaggcaggaaaacgcctgtggattgcagagggctatgcaaccgcgctcaccgtgcatcacctgaccggtgaaaccgtcatggtggcgctgtcgtccgtgaacctcctttctctggcgagccttgtccgtcagaaatacccggcctgtcagattgtcctcgccgccgaccgtgacctgagcggcgatggtcagagtaaagccgctgcggccgcagacgcctgtgagggcgttgtcgccctgccgccggtgttcggtgactggaatgatgcgtttatgcagcacggcgaagaggcctcgcggaaagccatttatgacgccatccggccaccggcgcaaagcccgtttgataccatgagcgaggcggagtttaccgccatgagcgccagcgacaaggctctgcgggtgcatgagcattacggcgaagcgctggcggtggatgcgaacggacagctcctgtcccgctatgacaacggcatctggaaaaatatcccggccgccactttttcacggaatgtggctgacttattccagcgcctgcgcgccccgttctcatccgggaaaattgcctcggtggtggagaccctgaaactgattattccgcagcaggccgcaccggcacgccgtctgattggttttcgcaacggggtactcgatacccaaagtgggatattcagcccgcacagcaaatcgcactggctgcgcaccctgtgcgatgtggatttcaccccgccggtagaaggggaaacgctggaaacccatgcgcctaacttctggcgctggctcgaccgggcggccagtggcaacccgacaaaacgtaacgtgatcctggccgcgctgtttatggtgctggcgaaccgctacgactggcagctctttctcgaagtgaccggccccggcggcagcgggaaaagtattctcgccgaaatcgccacgatgctggccggagaggataacgccacatcagccgatatcgacacgctggaagacccccgtaagcgtgcctccctgattggcttctcgctcattcgtctgccagaccaggaaaaatggagcggggacggtgccgggctcaaggccatcaccggcggcgatgcggtgtcggtcgacccgaaataccagaacccgtattcaacacatattccggcggtaattctggccgtgaacaacaacccgatgcgctttaccgaccgcagcggcggcgtgtcacgtcgccgggtgattattcatttcccggagcagattgccccggaggaacgcgacccgcagctcagggataaaattgcgcgcgagctggctgttatcgtgcgccagcttatgcagaaattcagcgacccgatgaccgcgcgcgcgctgctccagttgcagcagaactccgacgaggcactcaatatcaagcgcgatgctgacccgacgtttgatttttgcggttatctggaaatgctgccgcagaccagcgggatgtttatgggtaatgccagcatcgtcccgcgtaattaccgtaagtatctctatcacgcgtatctggcctatatggaggccaacgggtacagaaacgtgctcagcctgaaaatgttcgggctggggctgcccataatgctgaaagagtacggcctgaattatgagaagcggcacactaagcaggggatacaaaccaatctgtcgctgaaagaggaaagctacggcgactggctaccgaaatgcgacgaacccgtagcaacataa

SEQ ID NO: 162008 - DNA, 342 bp, Enterobacter cloacae
atgctggtggacaccttccacacgctgccgattggcgacaacccggtaaacagcaacgcgtttctggcgctggtgcgggctgccgggctgatcttcctcaacgggctgatgctggcgctgccgatcattaccctgctgctcaccgttaacctcgcattaggtttactcaaccgaatggctccgcagctgtcggtattcgtcatcggctttccggtgactttgacggttggccttttattaatgtcattattgatgccacttatagcccccttctgcgagcatttattcagcgagatattcaatctgttagcggatattgtcagcgaacttccacgcaaataa

SEQ ID NO: 162009 - DNA, 474 bp, Enterobacter cloacae
atgattcaggcattattgttgatgatggtaatcacggtcataccggcattactgatgttcagcgcctacgatccgaaaactatttttactatctccttcgcgttattcgctcttcagttcatcacgttttggtgggagctggcaggctggcttgatgacagattgatcaccatcctctatgacaatatggctgagcaggggattgcaaacagctcggtgcctttcgcggctttctttagttcaacggctgatggatggattatgaacctggttctggggatgatgtacttggtatttcccgcgttttgggtaggaatgcttagctggattggcgttaatttgggaacagcaataactactggattagaaaaaggtggttctcaaccacagcaggcgggagccgaggctggaagaggagctcagcagattgttacagataaagtcgggggagctataaaaggaagcttcaaatag

SEQ ID NO: 162010 - DNA, 780 bp, Enterobacter cloacae; identical to SEQ ID NO: 6153

SEQ ID NO: 162011 - DNA, 1023 bp, Enterobacter cloacae
atggtcacttttgagacagttatggaaattaaaatcctgcacaagcagggaatgagtagccgggcgattgccagagaactggggatctcccgcaataccgttaaacgttatttgcaggcaaaatctgagccgccaaaatatacgccgcgacctgctgttgcttcactcctggatgaataccgggattatattcgtcaacgcatcgccgatgctcatccttacaaaatcccggcaacggtaatcgctcgcgagatcagagaccagggatatcgtggcggaatgaccattctcagggcattcattcgttctctctcggttcctcaggagcaggagcctgccgttcggttcgaaactgaacccggacgacagatgcaggttgactggggcactatgcgtaatggtcgctcaccgcttcacgtgttcgttgctgttctcggatacagccgaatgctgtacatcgaattcactgacaatatgcgttatgacacgctggagacctgccatcgtaatgcgttccgcttctttggtggtgtgccgcgcgaagtgttgtatgacaatatgaaaactgtggttctgcaacgtgacgcatatcagaccggtcagcaccggttccatccttcgctgtggcagttcggcaaggagatgggcttctctccccgactgtgtcgccccttcagggcacagactaaaggtaaggtggaacggatggtgcagtacacccgtaacagtttttacatcccactaatgactcgcctgcgcccgatggggatcactgtcgatgttgaaacagccaaccgccacggtctgcgctggctgcacgatgtcgctaaccaacgaaagcatgaaacaatccaggcacgtccctgcgatcgctggctcgaagagcagcagtccatgctggcactgcctccggagaaaaaagagtatgacgtgcatcttgatgaaaatctggtgaacttcgacaaacaccccctgcatcatccactctccatctacgactcattctgcagaggagtggcgtga

SEQ ID NO: 162012 - DNA, 894 bp, Enterobacter cloacae
atgcagatttttatcgcggcagtggatgaaggcagtttcgccgccgccgcgagacgttttaagctttcggctgcaatggcaggaaagcatgtcagcgctatagaatctgatctaaatgtacgacttcttcagcgttcaacacgccgtcttagcctgacggatgccggtgagcggtattatgaacgttgcaaagttattcttgaggttcttgaggatgcgaaccgggaagccagtgatgttcagaaaacaccgaaggggttgcttcgcgttgcagcaccggtcgccttcggtgcaatgcatcttggtaggatcgtatcacgctacctggagcaatttccggaggtcagtctggacgttgtactggaggataaatacgccgatctgctcgaaaatcgaatcgatgttgccatccgagttgggcgttttgaggatccgacactggttacgcggcggctggcaccttgcaggatggttttgtgcgcttcaccggagtatttgaaaaaacatggcacaccagagacgccggatgatctttcccgtgcgcctcgactggcgttcagccaggcggtttcagcgggagactggacgatttatgatgcacaaggcaggccgcacagtattgaaggcccatgccgtatgactgccaataacattcagttgcttcttgaatccgtactggccggaacaggcattgcttacgggcccaactttgtttttggcgagcatattaagcagggcaagctgataaagctgctgccagcataccggacgactgaacttactattcaggctgtttatcccagcgcgatccgtattcctttcaaggttcgcagctttgttgattttattgctaaagcgttaggagatacaccgctgtggggagaagaaaattga

SEQ ID NO: 162013 - DNA, 1161 bp, Enterobacter cloacae
atgaaaattaaggtgaatggaacgggtatccacattgagcaacagggcagcggtgaaattgcactggtatttttgcattattatggcggttcatcccgtacatgggagagcgtgataagtcagttacctgaccactaccgcacagttgcaatcgaccaccggggctgggggggctcagacgcacctaaatcaggataccgaattggtgaccttgctcgggatgccgaaggggttatttcagcgcttgagcttaaacgctacattcttattggccattcgatggggggaaaagttgcccaactgatggcgtcgcgtcggcatgcaggtcttgaaggcctgatgcttatcgctccctctccaccttcacctatgcgtctcacgcctgagcagcgcgatacgttatccagcgcatataacagccgcgaatctgtcggctttgtgattgataatgtcctgacagcgggggcactaagttctgctctgcgtgaacaggtaatcgaggacagtttgagggcctcatccgaggccaaagaaggctggcctaatacggctatcggcgaagacattacccaggaagtggcctcaattaatgtccctgtgacggtcatttcaggggagttggatcgtgtagaccttccggctactctgcaaagagaattgctgccccttatttcacatgcatcaatgtatattattccagacgtcggacatctcttgcctctggaggcccctacagaggtcgccagccacctgttaaaatttacagccgccattgaaggggggacagcagtctaccattcgcctgtcgaaacgatagccgcgtttgatgatgctttcaatgcaggcagggttgatgacctgctggctctgttcagtaaccgtgccactatgaaaatgactgatggtgtggtcatcgaaagcgatcctgaaaagcttcgggacacttttttgtcactgacatcatcccagccagttatcagaaaccatatccgctcgatcctctccgccggtgaaattgctctgcttattattgactggactttgaccataaccaccaaggatagaacactgcacgaagagtccggtacagcaacgcaggtgttgttgcgaagcgttgacggaggttggcggctgctgatttcaaatccatcaggaacgtag

SEQ ID NO: 162014 - DNA, 213 bp, Enterobacter cloacae
atgaaaaaaatactaaagtgcatatttaaaataaccttgtatattattaatttaccctttctgctttggtatcttacgcgagttaaaattccttatgctaactttaaaaacgtagccatttctttatccaagcattttacaagaaaacccttaaaaaatgcggaaataatttgcgtgtgcattatggtgctttctttgtatacccgaatataa

SEQ ID NO: 162015 - DNA, 2988 bp, Enterobacter cloacae; identical to SEQ ID NO: 34915

SEQ ID NO: 162016 - DNA, 285 bp, Enterobacter cloacae
atgatggatagcagattaacgaaagaatggcttcagacaactatcgcggaatacgaattgaggctgcgtgatctgccgccttatttggatacgaatagccgcatcgagcttgaggcgtttaagctggcgttgtctgtattggaggcagccccagatggttggcaactggtacctaaagagatcacagtggatatggagtgcgctatatcaacagctgatagctattccctcgcctggaaaagggcgctggctgttgcgccgaaatgcgagagaacaaaaccatga

SEQ ID NO: 162017 - DNA, 381 bp, Enterobacter cloacae
gtgacctacaaatatgaaaatctgtgtgagaaagggttcgttcgaattcccgtaagcagggccatgcacaacaaaatgctgccaaaccgcaagcaacgatttggagcaaaaatcgagtattactttgagccagagtctcagattttcgaggcgcagtacttcacttcggtatggatgaaggtcttgcttatcgttgtaatgtttctacctgcgatcttcatgcaaggcgttcctgaaacattccgtgatattggcgatttaattcaccagcgtgaaagagggaagttcacggctgatagatggtttttgaagcatgacaagacgacggatggcttactggaaggttacataggcaagaaattacgtgagataaaagcatga

SEQ ID NO: 162018 - DNA, 336 bp, Enterobacter cloacae
atgtcgactgctgaatttttgaaaactctggactatgaacagctgaagtactgtcgcgagctgtgcaataaccgtattcgggctattgaagctgaagaaaaaaaggttgcatgggcggttactgacggctcggtcaactatggctggtaccgaactgaggactacctgaaagctgtagaatgtctaacacgcgaagcggagaagcgctggaacgaagagactgaagaagacaaatccaacccggaaactcgcgggtggttgaacttttctatccagggccagcacctacctgtatccgaatacgaagcgttatttgctgatggccagtgggggtaa

SEQ ID NO: 162019 - DNA, 747 bp, Enterobacter cloacae
gtggaacttaaaagcattcgagcctgtgtatctacagctctatcagatctgcattatctccagcgcggcatccttgaggttcagctggagcagctgcgtctctccagctccggccgttacactgaaaaaccaaccagaacgattcgtttaggtgataacgcatctgacgagataaccatcgctgccgagcctgttcgttatcacgtaggtaaatccttcaaacagtcttcaatgcttctcactgaattagatttcatgaccgccagctggcgtcgggctattgagcagctaaatagtgaagaaaccgcatggttacattattgctatggctccaaacaaaattataagaatgatgtgattatttgccagtggctgtggctggatttcttaatagaacattccagggctggcttcaaaaaaatgaaagctccgacaaaagcactcatgcgtaaattaacttactacggaatacagcaagttaaatgtgaaatctttcgcgatttgcatgatgcagagtttgatgggcaggagcgagacgaacatataagttccttattaggtgtgtccatcgatagctggcataaggattataaaaaacgctggttattaatgaaatcacgatgcatgcatcttaacgataccgcgttgttaaatgcggcggagaagcgcagtgaaatcatcgaaagccatcgtgcaggaagtgccgatctgtctgtgccagcaggttatgttcaggaagccggataa

SEQ ID NO: 162020 - DNA, 915 bp, Enterobacter cloacae
atggttaacatgcaaaaaaccattttggcgatgattatacataaatggctgaagagcgattatgttgtcattgacacagagacaactgggcttggtgaagatgctgagattatcgagatagcggtcatcaatatgcgcggtgaaattctgctggatacactggtgaagccaacccaaccgatccccccggaagtaaccgaaataaatcatatcaccaacgaaatggtcgctaatgcaccagcgtggcgtgatgtgttcccgaaggtgttggccatcatcagtcaccacaaatggctggcatggcactctggttttgatgcccggatgctgcaacaatcctgcttaagaactggttttttctccaatgaaagcccctcttacattgccctcataacatcccgcattcacactagccatattgacgccaaagccgtctacgaccagtggtatggcgagttcgacgagaagcgtaaagcattcaagcgtcagagcctgacaacagcagcttcgcggcacggcgtatcggtggagggagcgcaccgcgccctggctgattgcaagatggttctggccgttctgcaaaaagtctgtgcttctgtctctcagtctgaattaaccacagataaagaattacccccctgcccattctgctatggcccaccctcgctgttcactcattacctgagtgacaaaggttatgcccctttatatcagcccgttaattatggcgatgatggtctgtacgtaggttcgtatgtcttttgtcatgaatgcggcgcacagggtgaagaggcaggaggtcacgcctacgaagattcagatgtcacccagctcgaagctgaagcgaagaaagtctggtctgaacggaacgagcgccatcgagacctgtatgtctccagcctggggaatgagtga

SEQ ID NO: 162021 - DNA, 357 bp, Enterobacter cloacae
atggctgaagtgagcaacggtcctgtatcgacactgccaggccattcctccagcgtcccaaaaggtgctaaatgcgatgaacatccggatcgcgatgcctttcgccgaatccagggcgaaacagattcgtttggctgcgaataccacgatatgtgccaggaatgttacgacgaatatgtgcacgaagccaaaaatgccgatcgttcaggaaaatgtgactggtgtggccaacacgatgagcacctgtacccgcaccgggatatcgaagaagggagccatgggcgcgtctatgaggtgtgtaaaccgtgtattgatacagagcgccagcgttgggtagaagacgaagaaaggtggtga

SEQ ID NO: 162022 - DNA, 567 bp, Enterobacter cloacae
atgagcaaatccctcaaagaactgtatgcagtccctgagtggatgcgccaatttctgccttcatttaataacacagggggcaatgatgtcgaggagctgctgcacgacgactgcaccagcatgtttgccaactccgttcgctacacgtttatcgtttccgcgcgttcccagttcgccttgctgatggatatgtatagcaaaggcatcatcaccggcagaaccggtgcagctaaatgttccgacaccctaaccgatggtcaattacttttccgtttgcaggacttctatggcgcaggacaagacgccatggagattaacgatcacgaatatgctcaggaatgtactgacgttgtaagcatcattcgtgaggtcattgaatcccggaaagcgttgaaagccgcagagaagcgaattgctgaaatgcaggcgttagcgagtggcgtaaagcagttctcagagttccagatttgccattacggtgccactgaggactatgcgaagggctatatcgactgccagaacaattacaacaaagtgctgttcgccgcagccgggaaaggagagtga

SEQ ID NO: 162023 - DNA, 267 bp, Enterobacter cloacae
atggccaaacgagtaaagattaaagaactgtacctggttatttcttctgggggaactgtcgttggatgcggtattgatgcccccagtgcgtggcgtgatgcagtagaggggtcaggcatccattcgaattggaaggacatggctttaagtgggcgctatgcaatgaccactgcggaggcgaatgcaacgtatgacaaagaaaagctggatgaaagttttacgtactggcgtaaggccgcagccgaacactacggaaggatggactaa

SEQ ID NO: 162024 - DNA, 222 bp, Enterobacter cloacae
atggataaaaaaacgcaattgctcgaacgacttcgccagagaagtgaaagcagcctagccagcggaggagatggttttgtttttgcctcgatgctggcattcgatataggtctgaatacaaggacaattagggaaatactgaacaatgctgtcaggaatggagccctggaaaaaaaggaacgtggcgctggccgtgcacataagtaccggacaattcagtaa

SEQ ID NO: 162025 - DNA, 288 bp, Enterobacter cloacae
atgaaagtaaaaggcatcccgtttaaccaggttaaggaaaaactgctaaacaccccggaggctgtccggggctaccaggacgcagatagagagctggccctgttagaaatgctgtacgagatgagagaaaaggccggtttaagcaaatcggccttggctgaaagaatgggaatacccccatctgcgattagccgcctcgaaggaaacccgcttggggcaagtatgaagaccctgaacaagtatgcccaggcatgcggagctaacatcaatattcaggccatctactaa

SEQ ID NO: 162026 - DNA, 222 bp, Enterobacter cloacae
atgaactatgaaggtaatgaaaaaatgcgtaaggacgctgcggttatctcgaatgaattgtatgaaatctggcagaaggtcaaacagtttgaacgcgagtacagcttcaacagcaagaacctgaccgaccgtctggcgggtcgcctgattggtaccatggagccaaagctggcagaactgaataaatttatggccgacattgaatttcaatttgaagattga

SEQ ID NO: 162027 - DNA, 228 bp, Enterobacter cloacae
atggacgtaaagaaaattcgcgagaatatgactgagcaggctttaagtattgaaactgttatgcggggccacccccgcatctcattgcaggcattaagcgaagcatgcaccttgagcgccgcgacaactgaatttattttggcacagatggtttgtttcggagtagcgcaacgaggcgcatttgggcgttattcgttaacccaggaatataaaaacgggaaattctaa

SEQ ID NO: 162028 - DNA, 333 bp, Enterobacter cloacae
atgaaagtttatattgctggcccgatgaccgggcgtgagaactttaaccgcgaggaattcaacaaagaagccgaccggctgacccgccacggccacaccgttctgaatcccgccagccttcctgatggtctggagcagcgcgaatacatggatatctgctttgcgatgctccgttgcgctgatgcaatcatgatgctgccaggctggcaagcgtcgtccggtgcgactgccgaatatcactacgcgtacaaaatggaattgccagtctacacggttctgcattatccgcctgtagcgcttgagaagggaattgatgagcgctttttacaatga

SEQ ID NO: 162029 - DNA, 999 bp, Enterobacter cloacae
atgagcgctttttacaatgaatttgaaagatatcctgcatcatggctaagcaacctgatcgcgaacggttcaatagcaaacggcgttgttgatgagcgctctattgttgatgttgctccgtcagatgttatcagtaaaacgcaatgccactggtttgctgggattggagtttggagttatgcgttgcgtttagcaggctggccagatagccgtccagtttggaccgcaagtctgccatgccagccgtggagctccgcagggaagggaggaaaatttgatgacgaaagacatctctggcctgtgtttttcagactcgttaaagagtgccgccctccagtcatttttggtgagcaggtttcaagcaaggacggccttgagtggttctcatctgtacaagctgacctggaaaatgcgggctatgccgttgcagcggttgatacatgcgcagcgagcgtcggtgctccgcacatcaggcaaagaatcttctggatggcctacgactactgccagcaacacgaaaacggcgatcaaggatgtagtgaaaatactggccagaagagctgcgggacggcagtcgaatttgcaggatgtagcagtcctcgccggatggaatacaccgacagcatcggattgcaaaggcgggtatcagggcgggaggatacgaaacgggaaattatcgaccgaccgactggatgtaacatcgcagttggcgggatggtcagccgtgaccatcccacagctgaatccaagccagaaagttacagccccctggggaccatgcagactgactcatactggagagatattgactggctcttctgccaggatggaaagtggaggccagttgaacccgcatcattcccgctggttgatgggactgccggtcgagtgggccaactgcgcgcctacgggaacgcgatagtcgctccgttagctgcggcattcattgcgtcagcttgtcaggcaatacaggactttgaacaggaaaataatatttag

SEQ ID NO: 162030 - DNA, 771 bp, Enterobacter cloacae
atgaaatatttatcgcttcagcaggcgatgcttggcatgcgtgtaaccatgacagacgatggtttcattctgaaaagcccggcaggcagcgcacattacgatctgaagggtcgccgccacacagttaaaggtaatgcggaatttttaccgatgcatttacgggtgaaggataagcgtcagcctaatctcagtcgtattgtctttgagaaagactgtacgactatttacggagctaatggaaaaccacgagtacgcattggtaattgggatactccgaaagaaccgaaaggctatcaatttaaggcaggtggggtattgactgtcaatgacgggcaggtgttcgttaccgatgtgaagattggcgatacgttgattgacgatggcgtattgtctacgaactatagcgttaaattgaacgtagctgacaaaggtaaaccgtacgaagctggtatgactctcggtgttgaagatggccagagcaacgttgagtttatggctgatcgctatacggtgcatgaagcggcttcatccatcatcggaaacgccgtagcaacaagcgcgaagacgaagtttcggcttggcgatgaaatgaagcaggccgttattgatgcagtgtgtgaaagcgatttgttcgcatcactccgggcaaatgttgatgctcagacagcttcaatcgttggcctgcaacaggcggtgcacgatgcggtaaacgatgctctccgcaatgcactaaagccaggcggtgctatatgggcccagctgggacgctaa

SEQ ID NO: 162031 - DNA, 201 bp, Enterobacter cloacae
atgagttatacccgttgcacctattgcggttcacatctgcatacggtcgctaactgccctaaaacatggggcggttcatcacgccgtgtcagcctgcgctgtagctattgcggtaagaccgggcacaactcaagtgcctgccctcacaacgcgagcagcgggcgcaggcggagcctgagcgacgacttccacctcgattga

SEQ ID NO: 162032 - DNA, 270 bp, Enterobacter cloacae
atgacaattgattttgaagtgaatgctacaggtattgatgtttcaacaagtggttaccgtgaccacgtaaatttagaagtccgcggcgtggagctctcagatcttatctctgaaattgaagggaaagcgctctttcatgaaatcgatcttgatgactacatagactgggctgaggccgctgggcataccgatgacattctggatcgccttgacgctgatgaagtaattgagtggcttcgcaggaaaggtcatctggaggctgagtcatga

SEQ ID NO: 162033 - DNA, 192 bp, Enterobacter cloacae
atgctctacacaaaagaatggtacgcactgatggaagcatttgaaaaaggtaatttcggtcgctatcgccttgaccgggaagagaaagaaatgtggcagcaaaaagtttattaccagaacggcgaggctaacgaacttttcaaagtttaccttgctggatacatgaatgggcgtgcaacttacatgaattag

SEQ ID NO: 162034 - DNA, 177 bp, Enterobacter cloacae
atgtccgaatctgtccagctctataccgtgggcgtagtaaatgctttgcgtcaggtagatgtatttggcgcgcgcttcaatttcaggatggagaacaccaacagcagcaaagagatccggaacctgaccgccttttttaagccagccagtaggcctctgtcgtatcagcgcaagtaa

SEQ ID NO: 162035 - DNA, 213 bp, Enterobacter cloacae
atggctttcaagaagtctacccaaactcgcccggaatttacatggagatttctctccgcttctgagcgctaccctaccgccaaaccattggtgatctacgtcaacgcatccagcgaacaggaagcccgcaacactatgccgggggtaaacctcatttttgctgctcgcctcccattccatgtctttcaggttgtggaggtacgccatgcgtga

SEQ ID NO: 162036 - DNA, 2337 bp, Enterobacter cloacae
ttgaaactaacaatagacacactcaaaccatttcaaattaaagcagcaagtgaaattgctgagatgattgcaacttaccctaaccctccttacaaaaggaggtttgatcccgaaaccggtatgtcgcttcccttcctttgcaggctaaaagctattacggggagtggtaaaacgccgatactttcactcgcatgtaacaaaatcggtgatggtattatcctttggacaacaaacagaggagcagtcatctcacaaacaaaaaataatcttagtgttggaggaaaatactccaatttacttcctgacgatgtaaatatcctgaatttaaatgagattacggaaactgattgggtcgatatttgtcgtgccaaaaaaggcttaacaattatccttgctactgttgctttatttaatagagatggagatgctctgaatgttcataaagacagagatggcattagtcattgggatgttctttcaggaaagggaccagaaggtagaaaccgccaactttatgtagtctacgatgaggctcatggtggtacaaaagctcagttctcaagattgaaagaactcaatcctcgtgcatttattttagcatcttcctccgaaatgtcaggcgatctcattgatcttttgcctggaaacaatgtggatgaaaaatctttatctttaaaaactcaaacagtagtagtttcgacaccattagttgttaaagaaggactattaaagacccgtctttatctagtcgattgtaacacttctcgattagatgcattaaccgaagctaatactaaatggcaagaacttagcactaaaatgagtagctttaatacttggcctgtaatttgttgcattgtaaattcaacattagcaggcttagaagtttgggaatcgttggtcactcagttaaaagttgatccaaaaagaattgcagttcatttagcaaatgtaaattccaatttagccaatgttaatcctaatgcaccgtggagcttattagtcgatactcataaagctaagaaaagccctgaagatttacatgatgaaggttattcacatatcatctggaacttatcattaagagaaggttgggatgaaccatgggcgtatgtagcttaccttgatgggttaggtaaatctactactgatatctcacaaaaaattggtcgttttttgagacagcctaatgctactccttttgatgatggagacttaaattcagcatacttttattttaatgttccagataaagatttttcagaacttgttaaaactacacaaaatgacctaagtgattcaggctatgaaatagtctcaatagaaagtaatagtccgagaccacaaacgtcgagagaagtgcctgttaaaaaggaagtgtttgtttctaaagtcgcagaaactttcggtgaagaccttgaaatattagaccaaatactactttcaaatgtgcctcttttttctgatgagagcctccgttcaaaaggaaaaatgcatacaagagttttagatttagctaacagttgtgaagatttggatcttaataaagaagaaacaaaagatgacaatgctgatatttctgtctgggaatatttagtctcacgattaggaacttatgataaccgtatagcccgaaaatcagggacatgttttactccttttgtaaaaaatgatcctaagatgaaacagcgaatgcaatttggctcagatgcaatgttgcaaatcaacaataatttatcaaatattattcgtctgcttaataatgagtttcatctcgaatatgaatacgatgacatatatgcggtaaagtcatttaatttagtttcaccagactatcaatatgaagacttaaataaaagaaacagatacaaagttaactcctttaaaaatgccttgcattcagaatataatggcctgaataaatttgagttagaaattgcagaatctattgattcattaggagttgattggtgcagaaacccatcaaaaacaggttataacattcctattcctgaaattggtcaagggacttctaatttctttcctgattttttattatggggtaaaaaccaagtatgggctttagatccaaaaggttcacatttaattaatgatgcgatttttctaaagcttatggctgtatcagatatcaatgataaaagattgagattaaaggttggatttgtattagaaggcgaatatatgcttggtatcaataatcggccccaacttcagagtaaaaatggttgtactttaatttataaaaagaactcatctatcagagctaaatcatacccgacgtcaaaagaactaattaaagatttgcttgttttatag

SEQ ID NO: 162037 - DNA, 585 bp, Enterobacter cloacae
atgagtgacttagaatcattaacaaaaaacggattcaatataaatagcactgataactttggtaaaacccctattttttattgtaaggataaaattcaattcagattgcttatactttttggggctaatattaatcatgtggataacgaggggaagaacctattgttttatgttaatgagcctgaaaatgttgagttgatgttgaagttagatataaataaaaatttaactgatatcaaaaatcattgttttttatctcatgagttgtttcatacgataccagatgtattttcatcacagctaaaatctactgaaaaaacgaatatagaaattttccaagtgttcactaacacgcataattgcttaaaactacttaatgaaaaagaaattaaatttttcctttccaagaaagttcatatcaattttgatcctctttcaaatccagtaccatttcaaaaaactcttggcttactgaaagaaatagaagcatccccagatacaaagtttacattctactctgttgaaaataaaatatgtaatttatacacacttcatcaattagagaagaagataagcaagggctaa

SEQ ID NO: 162038 - DNA, 705 bp, Enterobacter cloacae; identical to SEQ ID NO: 8686

SEQ ID NO: 162039 - DNA, 366 bp, Enterobacter cloacae
atgggattcccgagtccagctgctgattacgttgaatcgcgcctgtctcttgatgaggcgcttatccagaaacctgctgctacgtactacatgcgagcgggtgagaccatctaccgctgcggcatcatgaaggatgcactcttggtcatcgattcgtcgcttaagccatgtgacggctcgctgcttatctgtgactgcaacggtgagtttaaagtaaagaggtatcgcacataccctcagccgcatcttgagaatgtggctaacgggaaaaaggagaggctacctggcaatgacgagggtattagcggatcgctaccaatattcggggtaattacgtacatcatcaacgatgcgcgaacgggttag

SEQ ID NO: 162040 - DNA, 348 bp, Enterobacter cloacae; identical to SEQ ID NO: 6026

SEQ ID NO: 162041 - DNA, 504 bp, Enterobacter cloacae
atgcttccgcaaccgatgacaggcggcatgggcggggtgggggaggttttaaagacaaaccccctggcaaggcaccacctgccccctcaaatttttacgcacggtgatttttttgaaaataaaacgcgatggaaacgagaaatttttatggcaagaccacccaaaccgccagcctaccttgatgagttagccgcgcagcagtggaaagcgaaggcaaagcaactggccgaacgcggggatctgactcccgccgactggaacaaccttgagcttttttgcgtcaactattcgatgtaccgcaaagcagttgaagaccttgccagccgtggattcagcattgtgaacagccagggtggcgagagccggaacccggcgctgagcgcaaaggccgacgctgaaaaaatcatgatcaaaatgtcgtcgctgctgggctttgatccggtaagccgccgccggaatccggtagaaacggaagaggaagacgagcttgaccgtctggaatga

SEQ ID NO: 162042 - DNA, 153 bp, Enterobacter cloacae
atgactgagcaggaacagcagcggctgattagtgggctgataaagcagcgcgaggcatggcaaccagccagacagagagcgcacacgaagcccgtagcaaagcgcatgagccagcgtgaccgggagcttatggaatgcttccgcaaccgctga

SEQ ID NO: 162043 - DNA, 444 bp, Enterobacter cloacae
atgccgtggcaaccactacgccggtgcacagagccgggatgcaataaacgggtgaagtctggcaagtgtgacgagcataagcgggaagcgtggcgggcagaggatgccagacgcggccaccgacgcgcccgtggttattcagcctcatgggagaagtaccgcgctcagtaccttaagcgctatccgctgtgcgttgagtgtcagaagctgggcctctacgttcctgcaaagattgtcgatcacatcatccctatcaacggcggtgatgatgttctgttctggcctgagtggaatcatcagccgttatgccacgcgcatcataaccagaagaccacacagcaagacccaaccaccaaagcgaagcgaaaagcagggctgtatcgtgagcaggaagatcgtgcagcccatcgcaatgactggatgcatgaggctgacaatgactga

SEQ ID NO: 162044 - DNA, 360 bp, Enterobacter cloacae
gtgcagaatctcttcctgcaggtaggtgcgcacagccccggtaaacggctcggtaacggtatatttgtacttatgctggccgatacgctcaggtacaaccgccccgggtgcatatggatgcaaggattgcggctggccgtcgcggccccactggatcaccgcataggcgttaccgttcagcagacaatggcgcatcattgtgcgtttaaactgataaggcgtctggcagtcgttcggctgctcgttcaggagaaaatccactgggtgattactcagccattctcgcgcctcacgaccattatcattacggacgcggtagagatagcagggcattgttgccaccgcctcactgataactga

SEQ ID NO: 162045 - DNA, 309 bp, Enterobacter cloacae
atgcgacatgataacgcctccgttggacttgaagccgcgcatattaaatggaagcagtttggcgggccgtgtgagatcccgaacgggctggcgctgtgtgcgattcatcataaggcgtttgataaaggatcgattgggcttgatgagagtatgcgggtgctggtgtccgaggcagtgaatgggaatgggatcgttgggcggttgttctgggattttgcaggaaagcaaattgcgctgccggtggtgaaagggaattatccaggtgaggggtttgtagagtggcatcggagggaggtttttagagaatga

SEQ ID NO: 162046 - DNA, 267 bp, Enterobacter cloacae
atggatggctataaatatctaattggaaagacaaaacttggctttggaattgcattggtgtgggaagcaggcaaagccaatggacatcagcccttaacaagagaaatccgttcagtaattatggatgaggctaagaaagcgaatgtgaacagacctgtttatatttatgctgtagctaatgtatctccgttgaatgatcagctttaccgcttccagcagattcctgattcaattctggcgagattaaatttactggaagaagagtaa

SEQ ID NO: 162047 - DNA, 384 bp, Enterobacter cloacae
atgacgccaatgatgtttgagcgtgtgcgaaacctgtttgttaatacgggcctcacttccggcttcaccattcagcaactgatgtatgacgaccccggaaagctcactgaagcggtgattgttttcaggcccaacggcggcacaaatatccgcaacgaactcggttctgaatatcacgtaatagttgatgtcatcggcgcgaaagataagcgcaaagatgcggtcaacgccgtgcagcgtattgttgattacgtacaggcaaatcccattagcgatagctgtgtgggccacatcgaaaacatcgggggtattccgccgccagttttgaccgaagagggaaggatcgttttccgacttcaattcgcttgcctctacggggagtaa

SEQ ID NO: 162048 - DNA, 744 bp, Enterobacter cloacae
atggcagcaaattgccctacagacaacaccaagttgtttggccgcgccattgtgctcgaagtagctgatggctgtgcagacacaatgccgcttgagtcggaatggatggctttagcagctggcaccagtaaaggctttgacttctcgccgaacagcgttacgtcagatgccgatgacaccaaaggctacgttgagaacatcgttaccaacgctgactttaccatctcatttgagggtgaggttcgtcgtaatgacaagcttgaccaatatggcgtgttccgcctgattaagtacttcaacaccgagattcaggcggcgcgtcagccgactatctgggttcgcatggagttcggtgcaatcacattcatcggctacatgctgatcaacgctttgagttctgacggaggcacaaatgacatcatcacgttctctaccgaatttaaggtagctgctgccgatacaatccaggttatcgacactgaagatgatgtggctgttgcaagcgttagcgttactccttctaccagctctggcgcagttggcaccacagtgcaattggctgctaacgttctgccggcagacgcaactgacaagactggcgtctggtcatcctcagatcagactaaagcaacggttaactccagcggcctggtgacgcgcgtcgccaccggcacggcaaccatcaccttcaccacgaatgatggcggcaaaactggcacaagctccatcactgttactgcgtaa

SEQ ID NO: 162049 - DNA, 675 bp, Enterobacter cloacae
atgacgccctataaagacatcggcgagtgcctgataacatgcggagaggaggaatacttcttccgctcatcattctcggcaatgagccgtattggggaaccgcaagagatcgtgcagtgtttttatgacctgcataacgatgaattagcgcccattattaatcgagctgtagccgcttatggcgcgatacctcagtggctaatcagtcaaatccataaaacggattacggacgccgtgcgagaaacgctgccatgtctgttctgactgcatgctgcgacgctgatgtgagtaagctgattggcgaatatgtgccggggaaaacaggtaggaaaacattcctgtataagcctggcgagatggatttgttctcaatgatagttgtcgctcaatcgctgatcacccacggaataatcggcaaggctaaggtgaggaagttgcagaggcatgaaagcaataaggccgtgaacgagttcagggtttttgagtacatcaatgccgccagaaaccacttcgtgatgagcaggaatgaggctgagcagttaagcatgactgagtttcagatgatgctggctgccaaataccccgaccagaaaggctttacccgtgaagagtatgacactgcccgggacgagttcttagctagacgggaaaggcggagggcgagatctgcttaa

SEQ ID NO: 162050 - DNA, 234 bp, Enterobacter cloacae
atgattaagctacttatctgcatggctggcgctgtcatgctttcaggctgcgctggagtaattgagaaacaggaaccaatttgcagcggaacggccatcgttggcggtcaggaaaataccgtccagatttacggtgttcgtaaacaaaataaccagacgcagtaccgagccggtgatccctttaactggcgctgggtaggtgcaaatacattcactggcactacctgtaaataa

SEQ ID NO: 162051 - DNA, 240 bp, Enterobacter cloacae
atgccccgtcagccggatattcatgctgcttttattgcggcaatacagcaaaacccaaaaggctatctttgcctttacacagataagtttatcgctgagttacaggacagacactggcattttagtcagtccgatgccaactcatggatccagcgttaccagccagactttgccgacaagagcacggacggcagcggcaaccgttactggatccttcgcaatatggggagggtgcaataa

SEQ ID NO: 162052 - DNA, 858 bp, Enterobacter cloacae; identical to SEQ ID NO: 156396

SEQ ID NO: 162053 - DNA, 225 bp, Enterobacter cloacae
atggataactaccacattaccaaagatggcgataagtggaagcttcaaaaggaaggaaatgaacgatctagcaagactgcaacaactaaggctgaaatcatcaaagctactcaggattacatgtccaacaagactggctctgtaaaaatccacaaagaggatgggaagtttcaggaagagcgcacttaccctcgcaaagctgatcctaaaaagtctaaaggttaa

SEQ ID NO: 162054 - DNA, 1035 bp, Enterobacter cloacae
atggctggtgaaactcaaaatatttcagaaatggcagaaaaaatttctgccgacttatttaagtggttcaagtgggagttagttggggcaactaatgaaaattttccatgcatgaagtcagatcaacataaaacgaaggctggaaaacatcctacagatgtagttttctcctacaaagatccttacttaaatagaacaatatttttgaatacagacttaaaaagttatgtaaaagggtcgattacatcgacatcaatgagaaacgctttagtttctttagctaactcaattgattgcgctgatgggagtaaggaatggaaggaaagatattcttaccaaagtggttcatcagaagtaagagggatgctgtttgtttataatcatgatggtgaatttgatcaatcattttatgatgtattttatcaatcacataatgccgagactgataaaactaaacgcggcatcaatcttgacaacatccctttaaaacaagggcaaaaaatccacatcattgagccaagaactataaattatttgcaatcaataatttcagatttatcgcagttaagtcataatagagaatttcctctagggaaaaaatatcaattcttttatcctgacttatctcttcataaagtaagtggggcaccagaagaacaccctgccacaattgagttacttacagggccattcctgattattaagcaccaagatgtaaagcattgtaatgaagaaactttacaatgggaaaaaacttatgaccacggatatatcatttactacaatggggtaggtgaaaatgagttagaatttgtgtatatattggatactctttccaaatatcaattattagatgggaatgaaaaaataagaattagaattatcaatcctaatatatacaaagatgttcgtggaatttttatgcgtgcaaaagaaacatattgtaaagagtgggggtttgatagtcataaaagaacaataattaatgcaattgattttcatcaggtagagttcctgtttcttatacacatctga

SEQ ID NO: 162055 - DNA, 477 bp, Enterobacter cloacae
atgagggttaactcaagtacgcctgaaagcgtaagtgccaacacctttgcgcccgagctcacactcgatattgttgtgttccacgcattcgaagccctgctcagcaaaccaacgcttaataccgtcgtcagtgaaataccagatgtgctcgttcttcctgaaatggtgcgaacgaagaatgtctccggcatcggtaaaaattgggatcgacacgaaaacaaactctgtagcctgctgtaccgccagctccggctcgtcgatgtgctccagtacatcccacatcgtcagcgcgcgccactgactggcgtagaggtcagcgaatgcgccccgctcgttcagctaggcgataccagccggattaacgtcatacccaagtgttcccggtcgggtagagacgaactgaccggcaccgataccaacgtcgagaacaggaccgtgaaaatggcgcgccaccagctcaatacgggattgcgttaa

SEQ ID NO: 162056 - DNA, 1074 bp, Enterobacter cloacae
atggattttatctataataattatcacatatggagtggaaggacagcaattgaactactaatggtttccactataggatattctctattctggaaattgggaattcctttatctatagttttgcttgcatactcttcatgccgaatattaactgctaaaccatcagctacttatattgctatttttgttttgcttttcagcctgatccctgcaactataaatggcgacgcttcttggtgggttactggattttataattacttacttcctctatctgtggctgtgtatattttttctgttttattcaacgccgatagcggttattttgttaaaattatatgcataccgcttgctatatacgtttcatacatggaacaggttgctttatgtcttattatttgctctgccataatgactgcatctatgccatctacaaggtgtagatatttttatttgttgcttgcgctaatttcaattaactttgcaatatgcatttctgctccaggtaacattaacagactccatttagagactattaattggatgccgctatttgatcattttactctggtgcaaaaggtgtcacttggatttgataaggtgtatcagttcattacgttcaaatacaattatccgctactcattgcctcattacttactgtgcttttaaggctcaagaggcaaatagtatcatttcacgctctccttatgttgattcttgtatcctcatttgccccccttatggtatatcactctttgtgcggtgggttgttttttgagggtaacattactgataatgggaatgtttcacgattaattgtctattttaactatgcttattgcattgcctttgtagtctctatgttatttctaatcatagatatgatgcttaataaagcaatatcaggattgccgcttgccagtattctgtgtggctttgcatccattatgattatggggttttctcccacagtatatgcttctggggttagggtttactttgtctttgagattcttttaataatttcttcattgtacatgttgaagtgctttgattttttcaatgagcggtag

SEQ ID NO: 162057 - DNA, 606 bp, Enterobacter cloacae
atgacaccgcagcaacgtcgcaagcattttaccgctcttaacgcagtggcgaatgccacgcataagcgctatctggggaaatccgtattacttacagggatccaggctggctggatcaaatcactcctttgtgtttggggggaaggtgttcgtggtgatgttgcaccccgaaaaccaaccgggcattcatgctggaatgtaatccgtgggaaaaattggtctgacaaagcgatcgagcgcttcacaacagcgctgaatcaggcgagggaagagggttttcgtggagaacaggccatgaaacgcgcgcgttcaattctttggcccgaaccacaagtcagtgtgatcgatgaggctatgagcaacgacgacgtagaatttgtcgaggaagcggttctgcaggcgttcgagttggccgatccggtttacgtggttggatgccagtattacaccacccgcaaaaaaatctccgatatctccagagagctgcagcgtttagctccatggctgacagacagagaggccagagagcgtgtgcgttggtgtcttgagatattccgggcaaaggtttttctttctgtgcgccggggcctggagaaagtttcatga

SEQ ID NO: 162058 - DNA, 1068 bp, Enterobacter cloacae
gtgagagcattacttaagcccgacatcgctcgcagtctgggtgttgtcttattgaagccaggcagcgaactgatgagcctctttctccaggggcgcattctgatcgagccagaaccaaaatcaatgtcacacctgccttcgggcagggtccctgatgcccggcaaccacttgcagaagataaatccctcgagtcttttttcactgatgagcgagttatcaaagctgctggtggcatgcctgctctggaggcatggttacgccgcaggtatcagcattgccagtggccacactccgattatcaccatgctgaactggtcacaatgcagtttgagcccggtgcaatgcttctatgctggcattgtgataatgaattgcgggaccagtctacagagcgactatcggcgctggcacgtaagaatgtcattgagtgggttgtggattcgatattgatgtcactccgggctggtaaagatcgtgagctttctgtcgcagaactgtgctggtgggccgtgtatgccggtgtggcagatgccattccggaaggtctggccgccagggcgctgaggctaccgtatgagccattccctaccgtctacaaagaaagcagcattatcgcagcagacaacaggccaaccattgccctgcaaggaaagataaaagcagcaggggcattgaaaagatgcaggccgggagcaaaccagcaggagacacaggaacaacatccgaaggtattagcgctacgtgcggatccagagtcaccagaatcttttatgctcaggccaaagcgtcggcgttggacctgcgaggactacacccggtgggttaaagctcagccttgctctggttgcagaagacctgctgacgatccccaccacattatcggaaatgggatgggcggtaccgccaccaaggcccacgatctcttcgtgttccctctgtgcagagagtgtcacgacgagcttcatgccgatgtagcggcgttcgagaagaaacacggctcgcagctgcagctgctgttccgctttctggattgggcgctggcagtcggcgtaatagtaaataagtaa

SEQ ID NO: 162059 - DNA, 1728 bp, Enterobacter cloacae
atgcgtgagatcatcgttgataactttgctggtggtggtggtgcgagtaccggtatagagctggcgatcgggcgtagtgtggatatcgccattaatcatgacgaaaacgctattgcgatgcataaaacgaatcaccctgacacgctgcattattgcgagtcggtgtttgacgttgacccaagcgccgccaccagcggtaaacctgtcggtctggcctggtttagccctgactgccgccacttttccaaagcgaagggcgctaagccagttaagaaagagattcgcgggctggcgtggattgtcctgcgttgggcgctggcagtacgtccccgcgtcatgatgctggagaacgtcgaagaatttaagacatggggacctctgctggatgaagaattacgcccggatccagagcgtgcaggtgaaacgttcgaggcatttgtcggcatgctgtctacggggatcgcggcgaatcatcctgcattggctgaagtttgtgaattccttgccattgagccacatggccagcaggcgcaacagctgatcgccgggcttggctatgaggttgattatcgtgagctgcgcgcttgcgacttcggcgcaccgaccatcagaaagcgtttcttcatggtcatgcgctgtgacggtcgccagattcagtggcctgaagcgacccatggtgatccgaaatcattggaggtacagagcggcaagctggcgccatggcgtaccgctgcggagtgcattgactggagtatcccgactctgtccatcttcgaccgcaaaaagccactggcggaaaatacgctcaaacgcatcgcgcgtggtattgagcggtttgtgctgaacaatccgactccgtttattgtgaagtgcaatcacaccagcagtcgcacggcatatgactgctttcgtgggcaggatattgatagtccgctgcagactattaccaagacccacggatacgctgtcgttaccccgtttattgccggtaatggtggtagcgaatatcaggcgaaacctcgggcgataaataagccagcccacaccgtgttgaaagaatctcgcgcctgcctggtggcaccgatgatagcccgccagtttggtaacagtaccggacacggcgctgatgaacccaatggaacggtaaccgctggcggcggtggaaagtcgcagctggtgacaacctttctggcgaagcacttcggcggtaattatgcggggccaggtgccgctatggatgcaccagcgcataccgtaacgaccactgatcaccatgctgtggtgacctcgcatctggttcacctgcgtggtacctgcaaagacggtcggaaagtggatcggcccatgcctactgttaccgccggcggccaacatatcggagaggttcgcgcctttctgatgaagtactacggcaatgaaaaaagtggcgtatcacttgatgaaccactgggaactgtcactaccaatgatcgttttgggctggtaacggttgatggtgccgactaccagatcgtcgatatcggcatgagaatgttacagccacatgagctttatcgggctcagggattcccggcaggctacatcatcgatcaggattatcgcggcaaacgctatgcaaaagataagcaggttgcccgttgcggtaatgcagtacctccgccttttgctgaggcgctggtgcgggcaaatcttcctgaaatgtgctcagagcagcgggaggtggcgtga

SEQ ID NO: 162060 - DNA, 414 bp, Enterobacter cloacae
atgaagaccgggatgattcgcgcaatcacgttagatgacggggaagttatggaatttaaagagttaccgacagacgttcagaaaacagcagctcacacactgcattctgtgctgagagacatcgggaaagatatagaaaccgagccagcaaaagatctggcccggaacatcaagacagctttcattgagctttatcaggtgggtactggctctgaaactatcgagaccaagaccgtatattcgccagcattcacgctgaaaccagaagcactatcaggcgaggtaagcatcgagattgccagcgaacttctcccggtaatacgagaaacaattcgccgtcgcggtttggatggaagttacgatcatgacgtcctgcaagttctcaggacaatggtgacttcactggggatttga

SEQ ID NO: 162061 - DNA, 279 bp, Enterobacter cloacae
atgttgtgtgcctgtcttttcaccacttcaggctcggtggtatccttctcagctcgcataaccaggaaggaaatcaatatgactaaagaagaatttgtcacttatgtttttgataaagcggttgaaatgtatgccgctacacaccagtcctgtaatccccttgataaaccagaaggtaaagatgatttcgacaaaatttaccgcttcctggaggaccgctatatcaaaaggctagaggacgcagggatcaaatccccagtgaagtcaccattgtcctga

SEQ ID NO: 162062 - DNA, 309 bp, Enterobacter cloacae
atggctgggtggacgtacaagggggaagcaactatgcgaactgtaggattcgttaagtatgcagccttatatagtatctgcatcatcttttcatggtggctatcaagctttggtaagcccctgaacggcataacacaatgggctatggatactgcctatattactttcggttccggcctgagcgggtcatatgaagctgatgcagatccagtaagattcatagccttaatcgtgatggtactcatctacgctacggtactgttcctgctcatacgcttagccctcagaaagttccagcacaaacgctaa

SEQ ID NO: 162063 - DNA, 540 bp, Enterobacter cloacae
atggatgctttcaatctgctgtggagcattacgggggtagctttcattatccttattttcgtcgtgttgctgtgtctgttgggatttatgacctctgccatagcggaacggcggactgcaaaggcaattgaatctgggcttcctgaagaagctcaggggctacttagtgatctcacctttcagttgtcggctcatagcactacgcaggttgatcacattctcgtagccccacatggtatatacgtcatagagcagaaaaactacgtaggcaagctctacggtactctggaggaaagccactggcggaaatggactcagtcccgaaccctcaagttgcagaacccgtttaagcaaaaccaggggcacatcagggctattcagtctgctcttaaggctagagaactggaatgtatcaatgtcgtcatcataaacggacgttgtaagtttgatggcatcaagccggaatggttatgtatggggatggacgattttatccataaagtcaaacaacgacgagggctacggttgttcacaccgtga

SEQ ID NO: 162064 - DNA, 783 bp, Enterobacter cloacae
atgactgacattataaacagtaaggttttcagtttcaccaacaccgaagacgcatttaacgaatgcaccaggatcaccaatcttaaaacaggggttacagaattcctatcacctgacgataaacaattttatgtaagaatgcgccaccgctactattacttcgttagagagttgggaagaagttattatgatgacgttgatcagattggtcaaagtattggtgttagttcggcaacagcaacacgaattgttgcaaggctacgaaaagtaggattgattgccagcgttaagccaaagcgatcaaaccagtggacaataaccgacattacaccggaaaatttcctctttgagcgtgatatcaacgcaaccaaacgtaagaccgcgcccgaatgggtagattgtctaaaacatccagtgtttggcaaatctaatgaagacgtaactccagaggtgcaattagaggagcaacgcgaagagacgaaagccgatccgatgtgcgagtttgacgaaataacggaagaaactaaacctattccaaaacgggaaaaaccaaagtcagtaacgaagaagaaatctacaccacctccaaccagagaaatagaaatcgaagtcgttaaccctgtctcaatcggggtgtatcgggatgaatgggagaatcctgaaaagaatctacctgtttcacaacatccgaaaataagatggatgctcattaacggatacctggactacacaatcaatcccaaactcaaatcaatctacgaggaaatagaacatttatgctga

SEQ ID NO: 162065 - DNA, 1068 bp, Enterobacter cloacae
atgagtgagtggtcaaacgtaaatctagcgtcattgttgtcgtttggtaatggcaaatcccggccattagattctggaaatattccagtatatggcggcaacggtattatgagctatgtatctcactttaactatgatcatgaaacaatcataattggtcgtgtaggggcctattgcggtgctacttattatgaaaataagcccatttggatttctgacaatgctctgtcagccaaagcggttggtgaacataatacaaaatatttatattatctattaaaaaacttagatttaaatcaatttgcagaaggttcaagtcatcctctgctaacacaaaagctgttaaattcaattgaaacaaaaacagcattaaatcctaatgaacaaaaatctattgcctctgtgctgtcctctcttgatgacaaaatagatctgcttcatcgccagaataaaactctggaatctatggctgaaaccctgttcaggcagtggtttattgaagaagcacaagatgaatggcctgaaaaaagcctcaatcaatatgtggatacaggttctctaaccaaagggaaaatatctgaacttcaaaccatgctgttatcagaggcaccaagtcgagctaaaagattagtcaatgagtttgacataataatatcaacagtacgcccagatcagtgtcattatggtatttgcattgatccaccgtcaaatctcgttgtttcaacaggtttttgcgtcatttctggcaaatcaattagcccattttttatttactatcttttaacttctgaggatatgaccgaatatctgcactcaatagcagaaggttctacgtcaacctatccttctttaaaaccagaagacattggcaatgttttattcctctatccaggtgaggaaaaattaaaaaactttcataaacttgttggctcttactggaacaagattcataacaactacaaaaaaatacagaccctagaaaccctccgagatactctcttaccgaagctgatgagcggtgaagtacgggttcagtatgcagaacaagcaatcgcgtcagtagcataa

SEQ ID NO: 162066 - DNA, 501 bp, Enterobacter cloacae
gtggatgtgctgattaataattccgggaccgcgcgtaatgtcttattccgcgatatgcagcctcaggagtggcaggccgttatcgataccaacatgaactccttatttaacgtaacgcgtcaggtggtggatagcatgatggcgcgcggctgggggcgcattattaatatctcctccctgaatgcgcagattggcaccgtcgggcaggttaactactccaccgcaaaatatgccgtgcgtggctttacccgcgccctggcgcgtgaggtttcggcgcgtggcgtcacggttaataccgtctctcccggctatctggccaccagcaaactgaagacggtcactcccgttcaggtcatcgataaaatcgttcaggaaattccggtccggcgtctgggatcgccaaaagaaattgcctctatttgtgcctggctggcttccgatgaagcgggttatgccaccggggcgaacttctccgtcaacggcggtatgcacatgagttaa

SEQ ID NO: 162067 - DNA, 1038 bp, Enterobacter cloacae
atgaccgacttcactacaaatctacatcatgatattggattattcataattgatttaaaactacctaatattgacggtggtgaagcgcaatttaatggattaacgatattagagactatcaagaaatctagtaaacaagaatctcttttattagctatcagttcatttccagatgaattcccaaagctcagagatttctacgaatcacatggttgtattctttctacttattctaacaaaaaagggtggaagtcgacacttgagcatttactgattcaactaaataaaaatacaactctcgactttttgattttttgtgcattaaaagaagagcgaactccttatattaccatgattaatggtaaaaaatgtaatagacggggaattgatttctatgacattgatatcggagagaaaaaaggttcagtcgtccttctgccatccatgggacttgttaatgcagctatcatcgcaggggcttgtattgatcgttataagccatcaattgtagcaatgagtgggatttgtggtggttttacagataatgttaaactgggccaattacttgtttcaaaaatggcatacgaataccagtctggtaaatggactgatgatggctttaagcaagagccttaccaagtatccaccgatcagaatacattgacaaatttaagcataatgatcgaccaagatgattttcttaaagaacttgaagaaggttatagtgcgactaaacctgatgaaccaactccacctattttctccatttttactagtggttcagctgtagtagcatctaaagagttgttaacaaacatacaaaatcatcatcgtaaatcaggtggcttggatatggagatatttgcaatccatcgtgctactgagttatccatcaataaaccattatgtatttgtgcaaagaccgtcgtagatctttgcgattcgaataaagacgatgatttacatatatacggaagttacatttctgctaaatttattatattagccattaaaaatcattacaaattaaatacataa

SEQ ID NO: 162068 - DNA, 495 bp, Enterobacter cloacae
atgacatttaccgtcggtgaaaactatccattcagggacatacagaagcgttataaatccctgaaaccgggcgaaaagggactgtcgcagggcgggtttttaaatccctcgcgtggcaattcctctacattaattcgagccatctttgcgcgcagaggcgtcaatggccctttggataatctattgttcatttctggcgataatgcgtaccgaaactacttcaaccgtcttgtgaaagtgcaaaaggaatgtagcccattcctctattttaaagaaatcaatggcgagtggtcttatatggggcacagtcaggtggagcgtttactggaacccgactcaaaagcattaaccctcttgcttgacaaaatggggtgcacgctggaaacggttggtgaggtgggtggcaaaccattgtggcagctttccgcattaggagggcaaggttttatcagaccgcgtagactggaatttatagcggtcttacagcaggattga

SEQ ID NO: 162069 - DNA, 819 bp, Enterobacter cloacae
atggataagttttcatttggtaaacctttcaaacttaatgactacgttatatacccgtgcccaggttgcggaagaagcagtctgaaactcgataaagaaacatttaacgcaagggtgaccggtgaatcacatagcattattgaatttctcggctttgaaacagaattgattaaagaggtttttacatcggttctggtttgcgaaaatcatgaatgcgaggaagttgttgtctgctctggcacaggtcatgttgagatggatattgccgtaaatgaacgcggcgagcagatacaggaatactttagctattacacacccaaagtattcataccaaccctacagtatatagatatccccacagaatgcccatccgaagtatgtgaaaatttacaagaggcattttcactgacactactttcgcctgggtcagcagcaaacaaggtaagagcggcgatagaaaaccttttgtctgaatacaatattccaaaatacaaactagttaagccgaaaggtaaggccaagcgcgagcggcgcctcatatctctgcacgagcgaattgccatagctgcacatagaaagaaaatatttgaaaagttaaatgagcttttatttgccgttaaatggctgggtaatgaagggagtcacgcaacatcaggtttaactcaaagtgatctctttgatgcgtaccggttgactgagcacattctcaacgcgctctatccatcaggtgtagaccttcagaaaagggcgcgggaaatagtaaaaaacaaaggtgtgaaaaagcaaaaaaagaagttttcccgaacatcaactgtttaa

SEQ ID NO: 162070 - DNA, 231 bp, Enterobacter cloacae
atgactacggctatcggtaagtggggtaatggtgcgggtttgcgcattcctcagccgttcatgaagcagcttgggcttagtattggtgatgaggttaaattccacgtcacggagaaaaaattagtaataactaagtctggcccaacgctcgaggaactgctgggacagtgcaatccggaaaatcgccatcaggaatatttttgcgagtctcagggtaaggagatgctgtga

SEQ ID NO: 162071 - DNA, 465 bp, Enterobacter cloacae
atgactttttctcaaaaaaaaattaaattaacacttatctatatgatatcaaacgataaaaaaattcgtcgtgaaagcataccaatgattttagcggggcgctggggttttacagtcttagaaaactacggatggacgacaatacctaactctttgttatataatcaaaaaaaattaggcttggataatactgagctgcttctacttatacatctgatttcgttcatccactatggtgatatgccagcatttccagctatatcaacccttgcagacagaattaaccaacatccaagaacagtacaaagaacaataaataagttattgaaaaaaaagataataacaagaaagataaggtcgaagtcgagcggtgataaggggttaagcaatgtctatggtatagaaccactcatcgacattttagcaaacctgcaagatgcgccctcaagtactaatttaccataa

SEQ ID NO: 162072 - DNA, 450 bp, Enterobacter cloacae
atgactgatgatcggacactgcaactccgcgtaaccgggttccgtaaagctgaggcctctctcaggcttgaaggtatggacccgtccggaaccccgctttatgagtccgtaaaggcgcacattctttccggagagatcacctacgacgaaggccgtgctgagtactggcttatcaccagaagcgggcgaacgataactgacgcgggcggacaggaaatgttttgtggccaccgccgcttcgccggcaccacaaaactgtcggacaagatgtgtttttggagtaccgccggcaccaaaaacatttcatcaggcgcagcccgataccctgaatttcgtacgtacgaaattttgcttttgttcagatcgagggcaggattcgcaaagtgctggcgtttgcactcacatcctttagacgttgcgatgcaggatagggcagacgccgcaaaatga

SEQ ID NO: 162073 - DNA, 450 bp, Enterobacter cloacae
atgaaaatacttttggttgaggatgaagtacataaaagagatgagttaatacaatgtgttaaaacagtttacggaattgaaccacaaatagtcgattgcgtgaatgatgcggttttggctgttattgacaatgatttcgatttgattattttagatatggccttatctacttttagcgataactcaggagataagaaaaaaggacatgaccaagctcaaggtggaatagaagttttgagagcattaaaatcgcgtaagaaaacaacaaaaataataattatcacccaatatcctgatttttacattggcggcgttaaagtgaagttgcaaaaatcaataagtgttgtcaaagaaaaatataatcaagatataattggtgccgttttatatacttataaatctcaacctactttgcaaaagataacatctatactgagaaaacatgcatga

SEQ ID NO: 162074 - DNA, 906 bp, Enterobacter cloacae
  misc_feature (880)..(889): n is a, c, g, or t
atgtcggttggaaaaaaattaaatcaaatcgagtacataatagaagcagaatcaataaatacaagagaaaaggtatcgaagcttcaaaaatattttgatagtagtagaatttatgttgatagcgtatcgatgaaaaattggttagacagtaaccctacgatgtccacagaacaatatcgttcactattcagtcgctcagaggctattatatcaactgcgcaaagtgataatgaaaatgaatcagatatattatatatacagctagtaaatagtggtgactatcttatacctcaaattgcaaaagacgcttttgaacaattttgccttaataacgaatttggtattcagtcttacctcggcagacgaattagacataatactctagatggtgtaacaacagatactgtagatgcggtacttcggaaacctgaacatagaatagtacttgcaaatcaacagatgcaaaggatagttgaatcctggcttgcatcttataaagctattgttgataaactcaggcgtgaacaccttcaatttaagtctagtaattccttatttaacgcatcgattgacactgatgattccgcgaccagtgaaaatattcgcctcttaacaaacactcttcgttcaaccggtagaagtgaattgctaaatgagctcatcattgcgttttgctggaagcaaataacacctcaacttgaaaatgccgcaaggtttattaggacaacactattacaacaagcaaaggattctatcgataaacacttccaaaatcacagcattggggagacgcagattgtagcagagctacacgaagcggtaaacgaagtatttatcaaagtttctgattggttccaagttcctgatactggattcatcnnnnnnnnnnatctcagcttcaattaa

SEQ ID NO: 162075 - DNA, 948 bp, Enterobacter cloacae
atgaatgcgccagttctttcaatagtcgtgccttgctataacgagcaggaggtttttaatctttgcctatctgagttatcttcgcgcttagaagaaatgatagaaaataataaaattgcaagaacaagtgatattgttttcgttgatgacggaagcaaagatgacacttgggctttaattgaaaaagcatctatttctagccatcatgtcaagggcgttaagctatctagaaataaaggccatcagacagcattaatggcaggcctttcctcatgcactaaatctgatatcacagtaagtatcgacgcagatcttcaagatgatacatctgtaattgagaaaatggttgatacctatcattctggcagtgacattgtatatggcgttaggaatgacagaacttcagacagtttatttaagaaaatcaccgctgagactttctataaagtgatgacaaaacttggtgtaaatcaggtagaaaatcatgctgacttcagattgctaagccgtagagcacttgattcacttttgcagtacaaagagcagaatctatatattcgaggccttatacctcttattggatatcctagtgacaaagtttactactcacgacacgaacgagttgctggtgagtcaaaatatcccctaagaaagatgcttgccttagctcttgaggggataacatctttttccgtgaccccactaagaattgtcactgcactcggttttataatatcaatattttctacagtcggcgttttctatacattaatgcagtatttcttggggcatacagtaagtggctgggcgtcgatgatcttggcaattctttttattggtggggttcagatgctttgccttggcattattggtgagtacgtaggcaagatttatatggaaagcaagaaaagacctaagtttttcatcgaaaaatcaacacatcagtaa

SEQ ID NO: 162076 - DNA, 660 bp, Enterobacter cloacae
atgattgattatgatttacttcatcgttcttctgttcaaatagaaggtcacataacctccaaatggtattatcttgatatcctttatgaaaatcactttttattgctgatcgcatttgtatcatcacttgcaatttcaattttatctaatggagtaaaaagcacattcagttatgatgtaaatattattcttatttcgatcttaaccttatttgcattcttcactctggcacaaacgaggcttccatggtatggctatccacatactttgttaatgtgttatgcaacagctatacttatcggaaaatccaaacattcatgggttcttgtggtgcttgtcattcttccaggttcaatcatccaattaaactctatatatagagaaatatctacttaccgtctacctgatatgtattatcaactatctatgattaataaagatggaaaaggggcgatttacaccccccaaaatatatcacaatctgaaagagctgcattaatggtttatggtggatttagccaagaacagataaaaatatcagggcatgatagtggttattatttactcaagcgaagcaatgatacttttgacggccccaaagataaatgcatgttaatttcgcgtgggaatgaatttaatattcacacttgcaaagattaa

SEQ ID NO: 162077 - DNA, 723 bp, Enterobacter cloacae
atgagtgaattccgtcagtcttcctctcgcgaagctaaaattcaaattgaaattaatgaaacaggagaatatatcacccgatttccacaaaacgccaaagcgagagaatttaatgatcgtctagttgaaaaaataaaagaagacaataaagacgacccagcaagccttgaagaaatatcattagaatcagtaaaggatcctgtagaacggagcaggtttttcaaagaattaattgttagcatgcctaaatataaatgcgttgatgtttctgatgtttatgttacacaccctattttagaggcaagaaaatcatccgagaaagatgctgatgaggatactgatgatgattcagttatagatactggatatcatatatctaaagcctctctcaaaggccgaggtgtcttagagtcaccagaacttgaagaattgcttaataaaggattctacatttccaaaattatttggtgttctattgtggatggttttaaagattcagataaatatgagtttgaggctcaatttgtagattcagataattgcaagcttttctcttatttagttcgtggactttataaatataaaaaaattaacgaatttactaatcgtcaaaatgtcgtaaaagataaagaaaatgtgctattgtggtctatagaaaaaacagcgcgagaaattgcgaataaaataatctcatctcatacacttgaggttgtcactgaatag

SEQ ID NO: 162078 - DNA, 282 bp, Enterobacter cloacae
atggtcgaaaataatacttttaataagatcgttgtaagtaagcattcccgtaataaaagcgttaacgaagcgaagctctcacaaagccagcttcgttctcattgcgtcagtgtcagattaaatgatgcagagctaaagcttctcaatgagaaacgtggccgtcatcgtaaaggtgaatgggttcgtttagccctcattgaaaagcttccagtaactgtccctcctatcaacttagaagcatggaaatctctgagcgaaattgacctgctccccgttgattag

SEQ ID NO: 162079 - DNA, 717 bp, Enterobacter cloacae
ttgcaacagtgccccatcatccggcagcggcgcggcccggccaatcggctgggcttcgcggtgcagctctgctacctgcgctttcccggcgtcatccttggcgctgatgagccaccgttcccgccattgctgagactggtcgccaaccagctcaaggtcggcatcgaaagctgggacgagtacgggcagcgtgagcagacccgacgcgagcacctggtcgagctgcaaacggtgttcggcttccagccgttcacgattggccactaccggcaggctgtccagttgctgaccgagctggccatgcaaaccgacaagggcatcgtgctggccagagccttgatcgagcacctgcggcggcagtcggtcattgtgcccgccctcaacgccgtcgagcgggcgagcgccgaagcgattacccgcgccgtgttcttcaaccgcctgggggaaatccgcgaccgcagcttcgagcagcagcgctaccgggccagcggcctcaacctggtgacggcggccatcgtgctatggaacacggtctatctggagcgggccgcgaacgccttgcgtggccacggtcaagccgtcgatgacggcctgttgcagtacctgtcgccgctcggctgggagcacatcaacctgaccggcgattacctctggcgcagcagcgccaagatcggcgcgggcaagttcaggccgctacggccgctgcaaccggcttag

SEQ ID NO: 162080 - DNA, 129 bp, Enterobacter cloacae
atgagtataatggatactatttttatgcaaaactgggcgcgagagcacaatctggagttcagaattggcctgacatttatactgcctatcagcaatgggcagttgctgaatccatataacaagatttaa

SEQ ID NO: 162081 - DNA, 150 bp, Enterobacter cloacae
atgaaagagagcattttgtccctgctcgttaatatggtgcacattaatttcatggctgagcagaaaatccagtgcttcaggggttctacagccaaaaatggcattattgccgttactgttaacagcattaatatcatagccagcttttaa

SEQ ID NO: 162082 - DNA, 1389 bp, Enterobacter cloacae
atgcaaaacgtctggtatcacctgaggcgcccgacgctggtgcgccgaattatcatcgcccagatgctgctgctgaccctgctgtggtgtctttttctaaccttcattctgtgggaggacctgcgcagccctcccatcctcacgggcagtaaaacatacgaaaccgtttttaccctggttgagcgtatggacggacgtccgcaggatcgtaccgccgtgctggaagcctttagccaggccctgcgggaaggttacggcggaggggaagatcccgtgctgtcgattaacctcatcgttcgcaagaataatgccgttatttttgcctccgacggtgcacctgcggggataacaaacacccggttcggcgaactggagcacgtacagagtgaagatcgtacctggaccagccgcacccttaaatcccctcactctgacgtggaggtcaccctcttcacgccagccagcggctggaacttctttatctatctgaactcacgcggttactacatcctgccgctgctggtctgcttcccttttcttctgtttcccgcgtggctgtcaatccgcattgcgatgcgcccctggaacaaggtggtcaatgaaattacgctacgcacgcctgacgatctctcccctttaaaagccgttcccggacacagggagcttcgccagatggtggacgcgatcaatgacttccttgccagagtgcgtgaaagcgcggaaagggaacgggttttcattgcggatgccgcgcacgagctgcgtacccccctcgcggcgatgcgcatcaacgtggaagcgctgcagtcctgggtcattagcgagagccagcaggagctgcttgcgggggtgattcgcagcaacagccgggcagcgcgtctcgtcaaccagctgcttctgatgatgcacagcgaagcgcgcattgatacggaaatggagaccgtaccgctgacgacgctcatccaggagcgaatggccgagctggaaccgctggcctctgcgcgcaggatagaactggaattcttcgccgaggatgacatctggatccccggcgtcagggaacgcctggtgtcgcttattgataacctcattgagaacgccgtgaagtacagtcccgagggcgggcggattcaggtcgacgtctgcacatcagatggcttcgcgcggcttcgcgtttcagatgcagggcccggtattccggttgaactgcacgagcgcgtgttcgaccggtttttccgcgaccccaatcaggtgcaaagcgggagcgggctggggcttgccatcgtcaaggcggtggcgcagcaacacaacagctgcgtaaacctgagtacttccgctgaaggtggcctgatggtgacggttgacttcccgaaccgcacgttttgctaa

SEQ ID NO: 162083 - DNA, 1563 bp, Enterobacter cloacae
atgaaaaaagcggtgtattgctatgctcgcgtcagttcgagaggacaagctaaagatggctatggtatgtcgagacagcaagaaatgctgcgagattacgttgctgcatacgatgattctcaacataaccgtggctatgagttgggggacataagttggttgtatgctgaaggtgtgtctgcgtatagcggaaaaaatatcgaagatggttctgtactgaaaacctttatagatgatgtgttacagaagaagatcactaattccgtattagtcattgaaaaccttgaccgttttagtagagccgcaccgaaccgagcagcagggttgttcttgagtctgattaatgcaggatgcgatatccatgaggtggaaacagaaatgatacatcaccaatatagtgatctgaatattatttcaggcggcttacagcgagcacataatgaaagtaaacgcaaagctcgtttaagtattaaaaattgggatgaaagaataaaaaacaccatcgacggaacgtctgttttaactcatcgcgtgccatcctggattgaagtaaaaaacaacaaatatgtattaaaaaaaggtgagtcagaaaagtacaatcttatttttaaaatgtatgctgacgggtttgggcctgcagcaatccgtgatgaactaaaaaagagaggaatgcagataaatgaaagagaaccaacaatcaatcacttaatgaaaataattaaagatcagaggcttataggtaggtttaattctacagggcgtaaaattttagatggtatgtctatctaccctgtcgttgttgaaccagaattatttgaagcggttaatgatttaagaaagcaaagaaacccattagggaagataaatgtaaaggcaaataatttatttgcaggtttgtgcatatgtatgaattgtggaagatatgtgcaagttaacagtgttgataaaaaaggtgatacatattttcgatgtggcggaagccttgtaaaaatagataaatgtaaagagagaggttttaagtacaagattgtagagaatgcgttactagaacatctcaggaattttgacttctctatgctgagaagtgatgataatgacatacaggttaaaataaactatctttcaatggagttagtttctaatgaaaaatacagcaatgaaattctagctgatcttgaaaaagaagacatacctgaccctaatgataggcgtatactgaaaaacattcagcgtcgtattagtgagatccgaaatgaaattactatactgaaacaatcaaatattggctacgaaacttttaatgatctaaaagattcatatactgatgatttgctagacccaaaaaatacaaagttaaggcttgattttaatgtaaaggttaagcgtgttattaaaaatataaaaatgaagcgttatgataatactatcatgctggttgtgagttatgtcggcgttaatgagaaacaagctatggtaattaatagtaagacaggagcggttgtttttatggcagtgcaaaatgatgatctaaaatcaattgagtacttaattaatgataattaa

SEQ ID NO: 162084 - DNA, 1932 bp, Enterobacter cloacae
atgaaagacgccatggtccgaagaaaaaaaataagcgtcaagacgttgatgctgttgtccattttcctcaccgtaacggtgggctttacggcaacgatcgggtttatgatgtggcagtggatggcgcagcaggaggttctggccaaaaaacatatccgccagattgccgaggtgcaagcgttgcaggtcagcaaacagctggattctgccctgactgccgcccgggacatgggcaacagcgccctggcgctgcgcgaggcgggcgtatccgatcgccagagcctgaaccagctgctcatccactacctttcggctcacccacagtttctctccatgtcgatggcctttgagcctaacgcgttcgacgataaagatgccgtctgggccggtcagagcggtgaagatcctgccgggcgctacgcccgctacgttgaccgggacgccaccggcaaaccggcattacacctgctgacggacatcgaaacgcccggcagcggtgattattatctgctgccgaaacaacggcataaagatgtgatcatcgaaccctatatctatccctacaacggcgtggacgtaatgctcacctcgattgccgcccccatcatgcgcgacggtcagtttctgggttcggtcacctctgacttctccctcgccacgctgcaatcgaccatcggcgcgattaaaccgtggaacggcacaggctacgcccttctcctctccgcagctaataacgtggtgtccagcccggacaagcgcgcggcgggcaagccttacgccggtcagattgccggtcatgacgtcacccgggtaaacgatccgctgctgaaggaggacgtgttcatcacctggcaggacatcgccgtcggtaacagccagacgccgtggaaactcgccattatcacgccggtcagcgaagtgatggccgaagcgcgcgcatttttactgaaagccatcatcatgatggtgttaagcatcgtggcggttagcctggtcatggcacagatcttcacccgtaaagttgaccgtccggttgggggcgaaccttcggaggccgccgggatcgccctggccgttgcccggggagatctgaacaacaccatcccggttcgttccggagatacccacagcattttttatgccctgcacgccatgcagatgcagctcaagcgcatcgtcgacaatatcaacgaagccagccactccgtgcacggcggcaccagcgaaatttcggcgggcaaccttgacctcgcctcgcgaaccgaggaacaggcggctgcgattgttgaaacggcagccagcatggaagagatttcggtcacggtgaagaataacgccgacaacgcccacaaggcgaccacgctgaccgatcgcgccgcaagcctcgccgggcatggcgaaacgctggtaaacgacgtggtcgtggtgatcggggagattgacgagagcgcgcgtaagatcggcgagattaacagcattgtcgatggcatcgccttccagaccaatatcctggcgctgaatgctgccgttgaagcggcacgggctggcgaacaggggcgcggcttcgcggtagtcgctggggaagtgcgcaatcttgcccagcgaagcgctaacgcggcaaaagagatctcccagctgattgccgagtcctcagggcgcgtgagcaaaggcgttgagctggtcaatgaaacgggggtgatgatgaaacaggtgattgaagcggtatcgcatgtgcatctggtcatcaacgatatcgttcaggcgctggacgagcaaaatcgcgggataagccaggtcagcaccgccgttaaccagatggacagcacgacccagcagaacgcctctctggttcagcagatctctgccgcggcgctctcgctggatgagcaggctaaatcgctcgagaagacgctggcgttcttccattcataa

SEQ ID NO: 162085 - DNA, 483 bp, Enterobacter cloacae
atgcatttaatgcgcggtacacgtgttcgtcctctgagtgaaatggaaattaaagcgatagctgtaaatgcttgctttgcactcggatttactagtaagtataaataccggcgtagaccgcgcagatttgacgtagcgctggaaacattatctcaatggaatattgtcctcgatccaatggatgatgacgaatggtttcaggaaacgctgggtctaacgattggacactgtgaacctgacaaactgactatcagggttccaaaccatatctatgaaatggcatgtggcggtgaacgatcagcgttatttgttatattccatgagctcgggcacttgctactacaacataagccagccttacactttgcgaatgccatgccggaacaaaatgaagattctgaatggcaggcggatcttttcgcagaaacgatgctcgataaattgggctatcaaacagcacagctttgctttgaattttattga

SEQ ID NO: 162086 - DNA, 150 bp, Enterobacter cloacae
atgaaaactggctattgtccaaaatgtgggaattcgtgtgaagtaaccttcacgccctatgtaatgaaggatggtaaaatcatccgccctaaaaaggcgaaagtttttgttatccctcattgcaaatgcagcgagaaaaaagctgcttaa

SEQ ID NO: 162087 - DNA, 750 bp, Enterobacter cloacae
atgattaccctactttcaagtggtcttttctcttacgctaaaagttcttcgcgtactaatcaggattctattcttgctccacagtgcatcgataatggctatttgattgctgtcgctgatggcgttggctcgtacttgggcgcagaacacgcttcacaaacagcaattaaatatttagcgaacctaatcaatgcttcttctatccaagatcttgatagcctcttcgccacaataaaagaaaagatttctgcgttatctgacgctgatgaatcctatttagaagctgcaacgacgttgacgtttgcatatgtaaacaatcaaggtttgtacattggtcatgttggtgattgtcgtttgtatattaaaaaagataataaactcaaacaactaacgaaagatcatacccaacatcaaaaactgttggatcagaagattttcaataaaaaagaacttaaggatatgggggggaaaaacaccctaacaactgcgatttctaaagttatcccattggaatttcaacaaacgtttattcctgcgtctgaagttttcgaagacaacgaagaggccactctctacattctttcagatggagcacaccacttctgggataagagaccaagattctcaatcactactttgagcaatccaaactgttttgcagctagcttgcataaacgaattattcgtaatgggcctatagatgatttttctttggttgtagccaagttcaagcgcagcagtgttaactaa

SEQ ID NO: 162088 - DNA, 789 bp, Enterobacter cloacae
atggaagaacgtcatcacagctatatccttaaaactattgaagaaataggaaggggtgggttcggttacgttgaaaaaattgaacttttcaatgttaacggtcacaaatgcggtgactacgccaaaaagattttggcgcaggatcatgggcttagcaaagaggacttcaaaagaagattcaaacgggaagtggattatcaggctaggtgtacgcactcgaatatagcgcctatatatctacacaatcttcaggttgatagtccttggtttgttatggatctcgctgaaagtgatttaagtacagatttagcctcaggcacgctcgataatgcaagcaaaatgcatattgcagaaatgatcctttcaggggtacgtttcatgcatacagagaaaactaatgatccaggacgtaagccagtatatttacaccgtgatttaaagccatctaatattcttcgttttaaagatggagtttacaaaatttccgattttggtttagtaaaaaatgcaggaaaagaaagaccagaatctgagcttttaacaagagtcgctacagccatgggaacgctcaaatacatggctcctgagataacaacagctgggcattactcagagcaaactgacatttttgctctcggagtagttattgatgatatggggtttgataacgttaatggtattagacagttaatcgataaatgcaccgcctggagagctgcaagccgatacaaatcggttgatgatatgatgcaggaactggctgatataaaaataaggaatgggctatga

SEQ ID NO: 162089 - DNA, 858 bp, Enterobacter cloacae
atgagcacaatattgaaatgggcgggcaataaaatcgacgtcatgccagagctgaaaaagcacttgcctgccggttcccgtctggttgagccgttcgcgggttcatgcgcggtgatgatggcgacagactatcctcattatcttgtcgcggatattaacgccgacttaatcaacctttaccagaaagctgcgcagcacacagaggagttaatcgcttgtgcgctgatatttttcagcgaagataataatgctgaaaactattatcaaaaccgcctgcgattcaataatgatacgacgctgactgcgctggagcgcgcggcactgtttttatatttgaatcgtcattgttatcgcgggctgtgccgttacaacctgagcgggcaatttaatgtgccgtttggcaactataaaaagccctatttccctcacgccgaaatcctcacctttgcggaaaaggcccggcgggccacgttcatctgcgccagctatgacgaaacactggcaatgctgcaggcaggtgatgtggtttactgcgatccaccgtacgacggcactttcactgcatatcacactgcgggctttaacgaggatgaccagtatcacctggcctcaattcttgagcaccgctcatcagaagggcatccggttgttgtttcaaacagtgataccttgctgacgcgttcgctttaccgaaacttcctcctgcacagcatcacaaccaagcggagcatgggtgttgacgcgggggagcgtaagtccgcagaggaaattattgctgtatccagggtgctgcgatctcgccgtactcattccatccttgcacgggtttgcccaggaattgatgaggccagggcgtga

SEQ ID NO: 162090 - DNA, 813 bp, Enterobacter cloacae
atggtttatcagttctctttgcccccgctggtgctgcatgcggtgcattgtcagaacgtccggacgctgagccagtgggcggcgtcgctgacgttgccttccacgaaaaccacctggtttaacttcctggcctcgcatgacgggattggtatgaatccgttacgcggaattttacccgaatcggaaatcctctcgcttgtggaaaaacttcaggctgaaggggcgttggttaactggaaaaataacccggatggcacacgcagtccttatgaaattaatgtgacctatctggatgcattaagtacgcgtaacagtcctgacagccaacggattgcccgttttattctggcgcatgccgtccttttaagcttccccggcgtgcctgcggtttatatccagagcattctcggttcccgtaatgattatgcaggtgttgagcgcctgggatacaaccgtgcgattaatcgagagaaatacacggcagggaaaattgatagcgagcttgaagataaaaatagcctgcgttctcaggtctattgctcgttaagccagttaatcgcgctgcgtcgggcggagaaagcatttcacccagacagcgaggcttattttagcgcgtcaggtgaacatgttttaaaaatcgttcgcgtggcgggttgtggtgaaaaaataacggcgctgtttaatttcagtgacggcattcaaacggtggaatccgatattcaatccggaaatgacttgatcaccggaaacgatattacagacaaaaagttgaccctacatccatggcaggtgttgtggattaaagaaaactaa

SEQ ID NO: 162091 - DNA, 894 bp, Enterobacter cloacae
atgaagagtattgtgacgatagcggaatgcctgaatgcaagacaggatgaataccggtatttgttaatagatccattgaagtcagtaatgtcgtggaatcccttgcatcctgattgcctgaaagaggggaaaggttctaatttcttgcagcgggtactgcgtccagacctggcatggtcaccggagcactgtccattgttagtgctgctggcttcgccaggcgaaaattgcgaggaaaggttaattgaagagagtgaagaatatgctctcggtgaagtcctgtatgagaaacgctatgtttgcggctggatgagcgcttcattagatcctcaagaaatggcgacctggattgcagagttgtgtaaaaaaatcagaccgggcgcaattgtgccagtgtttgaacccctgcgccttgaactgttacggagcacggcagatcccgctcagttgtccacgttgctggcacccatcggtcgctggatattcctttctgctacaggagaacagacggtcttgtcaggtgcagtaaacagtaaggaatggcaactaaagtgggggactgaaaaggcactggataactatcgtgatatctggcgtctgctttcagcgtggggtcttacctcaggacctctaccgacagacgctgcccgacaggcagcaaaagcttgggctggatcgggcaaagttgggcttaaccatctgagcgatcggatttttctcgtacttaattcgctgacgttaccagccagcgtgaccatacacgatgaaatgaaggcgctcctgcaaaaagtggccagcaacccagatttgcatctcacgcaacttatgaaaacgctcccggacgcagtctggcaggaacagcgctcgcctgagccgaaagtggaaggaatttaa

SEQ ID NO: 162092 - DNA, 279 bp, Enterobacter cloacae
atggcgaaaggttactatctggtgcagggggataaaaccacctgtggagggaagatcctcgagggcgatccaactaacacgattgaggggatcccagttacacgcgaacaggacagtgtgacgtgtgggaaacatgccggcacttataaaattattggcgctattccacaaaacttagtgaatggtcggaagtttgcgggcacgttacacagtaaaagtggatgcccgtgcgcggcgacgttaataccctcccatcgggaacgcacctacgaagcttaa

SEQ ID NO: 162093 - DNA, 552 bp, Enterobacter cloacae
atgttgttagaaaacggatggctggtggatgcgcggcgtgtgccctcgccgcaccacgattgccgcccggaggatgaaaagcccacactgctggtggttcataatattagtctcccgccgggtgaatttggcggcccgtggatcgatgcgttattcacgggaactattgatcccgatgctcatcccttctgtgctgaaattgcacatctgcgcgtatcggctcactgcctgattcgtcgcgatggtgaagtggttcagtatgttccctttgataagcgcgcctggcatgccggcgtgtcgatgtatcacgggcgcgaacggtgcaacgatttttctatcgggatcgaaatggaaggcacggatactacgccctacaccgattcacagtatcaacggctagcggcagtgacccgcacgcttatcggactctacccggctatcgccgacaatatcacgggacacagtgatattgccccggagagaaaaaccgatcccggcccggcctttgactggccccggtttcgcgccatgctcaccgcgtcgtcagaataa

SEQ ID NO: 162094 - DNA, 603 bp, Enterobacter cloacae
atgataaaagacaagctttgtgacaacaagattagagttttgtatgtagcaattttcgtagttgtaatggtgttagcatggtttgggcgctcatttatacttaacgatacgtctaaatttaacttgctcggctacatgggtactgtagtcacgatattaggcttaataattacattcttagaggttatgcatggtgtagtagttagtaagagtctgcataagcaagcaagtgaaatgcttgggcattttaaagacaaagaatttgaattgttaatgagtgaactagtaaccgttcttgattatctaatttctgatgttgatgataaaagtttcacaatagctttaagacagttgtcttctttttatagaatacataaacgtgtaaaatccaactatgttgaatattatggtaaggatgattcagatgttatagataaaataaataacattgaaaaaaacatctctgctttgaggtatacaaaacaatcagcaatgataccaaacaaagtaatgattgatttaaacgaagggttgatagacgttaaacgtttttttgttaataaacagtctgaattaggaggctccaaaaatgctgccagctaa

SEQ ID NO: 162095 - DNA, 303 bp, Enterobacter cloacae
atgctgccagctaatatttacaacatggttaacaaactgattgaaatgacccggtcagggcaagtgtcatggagttttgactattataatgataaagtgtctgcgtcattaccgcacttttcagtgagcatactttcccgcttcgatagtgatactgggatttcatatttgcatgtggattattttgataataacaatcgtcaatcttatagattttctacagatatgtatgaaacgcaatatgatactgtcagggtgttatatgatgaggctcaagcttcaaatttagacataaaattctaa

SEQ ID NO: 162096 - DNA, 444 bp, Enterobacter cloacae
gtggatgacctgcagagggtggatgactggctggcggccctgctggcgaatctggaaccggcagcccgcaaccgtatgatgcgacaactggcgcaggagctacgccggtcgcaacagcaaaacatcaggctgcagcgcaatccagacggaaccgtctttgagccgcaccgggtgacggccagaagtaaaaaggggcgcatcaagcgccagatgttcaccaaattgcgcaccactaaatacctgatggccgcagccactgcggactctgccagcgtacaatttgcaaataaggtgcagcgtatagcacgtgttcaccactatggattacgtgatagagttaataaatctaattataaagtgaaatatccacaacgtaatcttttaggttggaatgatcgcagtaaagcatcaatttatgaaattttactgcgttggttacaataa

SEQ ID NO: 162097 - DNA, 741 bp, Enterobacter cloacae
atggactcagaaaaccataagctgcttgataaaatttcctcatcattcttcattaaagctgacacacttttcaggaccatttcttttcagaatgtcgcaatcgctcacgcgaccaaagaaggcaatcctaagctatatgatgcttataaaaaccttgaatcattcctagagaagcacactccagatatatctcaaaacggcatacggcatgatttagtagacaagcacatgccgtcattatgttttagttcattggtatctgcttttgaggactacataatagaaataactagattagtctataaactgaaaccagaaagcctcgacaaaataaaatgcgattatggtaccttcaaatcatcatcaacagatgaactatgggatcttttagtaaacgaaggcttagccagcttaacttttggttcagcaaaagagtacatcaacaaattttgcaaactaacatccatcgacaaaaagataattgagccgaaaataaaatcgtacattgaaataaaggcaagacgagatactggtgttcataacaactggctcaaagattctcgttatgaaaaaaaacttaaggaagtagggattcagccagatcacaaaaaaaacctcacaccagatttggattattttagatattctttcgatgtttgtggcgacctagtaaagctgataagtaacaacatcgccctagaacttttaaatgaaagaagaatcttccctaatcaaatctaa

SEQ ID NO: 162098 - DNA, 996 bp, Enterobacter cloacae
atgagtatcaagaaactcgatgatggtcgttatgaagtggacgttaggccgcagggtgcagacggaaaacgcatcaggcgcaaattcaacacaaaaggcgaggctcagtctttcgagcgtcatgttttggtcaattaccacaacaaagagtggttagagaaaccagcagaccgccgaacgttaaaagaactattagaccggtggtggatttaccacgggagaacgcacgagcggggtgaaattgagcgaggtagattgacaacaattgttgccaaatttgccgaaatgggggtttccagagctgaccagctaacaaggaaaaccataactgattatcgcgtggtaatgatgaacgaaggtttaaaaccagcgagtgtgaatcgacatctggcaataatgagtggagtgtttactaagctaattgatgctggtgaataccattctaacaacccattcagggaggttaagccactacgtgaggctataaccgaaatggcgtttttgtcgcaggatgagattccgttactgctgtcccgtctcgatggggatgaactaaacgcaactctcgtctgcctttccaccggtggccgttggggcgaggtctcaggtttgaaagcggagcacatcattaatcagatggttacgtttatgaaaacaaaaaacggaaagcgaaggacaatccccgtttcacacgagctgataaaacggatcaagacgaaaagctcaggcaagctctttaatgcaagttactacaaagtacgtaacgccttgaaagaggttaaacccgatttaccagacggacaggccgtgcatgttttgaggcatacatttgccacacattttataatgaatggaggtaacataatcacattgcaacgcatcttaggtcattcgaacattcagcaaactatgacctatgcacactttgcaccggatttcctgcaagatgcagtgactctaaacccggtgtcaggaatgtccataatgcgtccataa

SEQ ID NO: 162099 - DNA, 300 bp, Enterobacter cloacae
atgtcaagtgaacaaagcgagaagttgaagcttatccgtgagtctgaaaggcttaaaacgaaggaactagctgaattaattgggattaattactacacatatcatggttatgagtctggaaaatctaagatgccgatggatgcagggatgaagctgtttaaacatccgcgttttcgcaaatatcgtgattggttcatgtttgatgaggttgacccagcatccggacagatagctccggctctcgcacactttgggcaagacgaaacaacctcgcagcactcagacaaaaagattggctaa

SEQ ID NO: 162100 - DNA, 432 bp, Enterobacter cloacae
atgtccaaaaacctcgagttatttaaccagcagacggcggaaatctttgcagtactatgggacaacttcccagtaccacaggtcatttcctacgcgaaatttcacgccgcgctacctgatgactactttgaacaacttaactcaccggaaatgaaagcgttaagagaactacgtagtgtggttgagggcacattcacttttcttaatgaaaatggctacatcttgcacagaacagaccatcagacctatttccatgatgtacgcctgactgagaaagctctcgctgtgctcaacataaaacccgaagcacttggtggtaatgaaacgatgggcgataaaattatcagcgcggtgaaagatgggacgccgggagttattgccggtgcggtgacgaacttgctgactctcggcgttaacttgataacaagctaa

SEQ ID NO: 162101 - DNA, 249 bp, Enterobacter cloacae
gtgaataatctaccagtatctattgctaagtttcttttatcatcagtaagcgcaataacaattgtactttcagtcttccttatttttttaattttcgacatgtggctgcaggaaggtattccgccattcgaaaatattaaattcagcgtcgcaatgttttttacaattataatgctgcttgttatatgtcagtgtcttaagtattacactgacatggctatagatcgacgagataacatcagccgatga

SEQ ID NO: 162102 - DNA, 705 bp, Enterobacter cloacae
atgcttgaagatatcattaagtcttacttgtatacgcagtataacgacgatgatgatctccaggcgttcgtcactgcgtataactccatggcccaggaaatttattcatggatgattaacgccaaccttccgatatttgttggggggtataatgctggtgaccagttaaaatggattgcccgtgggatttatggcgttaagccgccggtgctggtcagtggaaagcaatccattttcggaccgtacaacgctgttctgttcaaccagttgccattcaatgggcgaaaggtggttaatcagtcagagcaggttgtcgtttcaggcgatctgtttaagcgaatcatgacgtggaatttctacaaaggtgacgggtattactttaccatcccatggttaaagcgccggataatgaggtttcttacaggggttgatggcgtagacgtcattaacgatcagaggtggagtatttcggttctgttttctgattctggggcgagcatatcgatcatcaaagggtacaggaaactcactgatgcctccatgttcaataacttttcctacaattcacagacgtttaaccagaagaaaagccttctaataaaaagtacgaactacgaatatgcatcgttgttcaagcagacctttgatagcggcctgcttcatatgccattttatcagcctgttacagttaccatcatcggctga

SEQ ID NO: 162103 - DNA, 213 bp, Enterobacter cloacae
atgacaccgtctgaattaacaattcatatcctcgcgtttattggtctgattagttgcattctgtttggcgccgtatggatatgcgcggcattccgaattctttgggtgtatgccaattattcagccagtaaagccataaaggcccatcggttcgccatgagaactaaagccagaacaaaggcagcgtggaaacggtgggggatagatgtatga

SEQ ID NO: 162104 - DNA, 351 bp, Enterobacter cloacae
atgatcggaatactcaagccggtaccggaatctcagtggccggtacgatgccacgaccccaaacggagcaacgtgtgggctaactcttactttctggtccaggagtttcaggaagagaacggcgtcatccgtctaacggttaacaccaccagcattggcagttcaggtcggtggaaggacggcatcagctgggatgcattgcaggaaattaaaaacgcagtcggctatcaggaccgggatgccgtagagattttcccggcgcaaaaagacctggttaacgtagcaaacatgcgtcacctgtggattgttcccgaatctatccctttcgcatggcgaaaagatggacattaa

SEQ ID NO: 162105 - DNA, 351 bp, Enterobacter cloacae
atgaaacgcttttccctaattgctctggttctacttactggttctgcatttgctgcaacagaaggaatcaacttcaagtatcagaaacactattcgtgtacgtggctgttcacaggcacaccacagcaagcccctgacctttacacagcggtaaatgctaactctggtgcaatgtcactacagcgtccaggagcggaggtctactatgctaagaaaatcactgaggatatttgggaagaaatcaatcctacacctggtcaggatgcagaagatatacgtgtccgaactgatggagttttagacacctatcaaggcagtatgaaaatcagttcctgtatcgaagtggagtga

SEQ ID NO: 162106 - DNA, 1998 bp, Enterobacter cloacae
atgtcagtaaccgagtctaaagcaaaaacccccgcgaaaaccagcaaaaaagcagttaaacctgccgaagccgcagcccttaaggcggcgcttgaggctgctcagattgaaatggtgccgctgtcggcgctcgtcaaatccccgctgaacgtccgtattattccgtacccggttgagagtgtcagggaaatggcagactccattatcgcggtcggcctgatccagaatctggtggttcactcgctgcctgatggcctgtcaggcgttgctgcgggcggtcgtcgtcttgctgccctgcaactgttgctcagtgaacagcgcatcgatgccgggtatctcgttgtcgtcaagcgcgtcagcgacgacctggctgtggtcgcctcaatggtggagaacaaccagagggcggcgatgcatccggcagaacaaatcagcgggttccgcacgttgtctgagcagggtaagaccccggcgcagattggtgaccagctggggtacagctcgcgccacgtccagcgcatgctgaagctggcgaaccttgccccggaacttctctccctgctggcagagaacaagctcgacgtggatcagtgtcaggcgctgagtctggagaacgatccggtgcgtcaggtggagatttacgagcgcgtgaaggcgcagcacagctatgcccccgcgcacatgcttaaacgcgctatcactgataccgaaatcggtgtgaaccactcccgcttcgtgtttatcgggcgtgagatgtatgagtctgcaggtggcgtggtgcgtgaggatttgttcagcgcccaggagggtgatggtacggcagatggtgtgctggtcgaacgactggtgcaggagaagcttgagtccgccgcactggcaatcgaactgcaggaaggatggtcatggtcactgtcccgggagggcgcggtcagaaactacggtgacgaccgcgaacattatctgctgttaccagagccggaggcacagtacaccactgacgagcagcagcgtctcgatgaactgtacgccactcaggagaccactgaaacgtttgaagatgaagccgcgattcaggtactgattgacgaaattgaaaatgcggcatcgatccgggcgtggacaccggagcagaaagcagcctgtggcgtggtggtcagcctgtatgacggtgagctttgtgtccagcgaggggtgcagaagaagcctcagaacgaggcgaaagaagggcagggagagaatggcagcagcggctccctgcatgtggtcagcagcaagccggatgtgacggaggggatcagcgccccgttgctcaaaaaaatgtcttcagaaagaacgctggcagtgcaggccgcccttgtacagcagcccgaaaaagcggtggccctgatggtatggcggctgtgcagttgtgttttcgattactgcaataccacccgtcatccgttcgtgatgcgtcttgaggtgcatcacagtgggctgaccagcgaagcgccgaccggaaagagtggtcaggcatggctgagtctgatgcaggagaaagcccgtctggaggcgctgttaccggatggctggaagaaggatttcaccaccttctttacgctcgacggacagactttgatgagcctgatggtgttctgcacggcctgttcggtggacggggtgcagacccggacaatgggacataccacacagagcgacctcgatggcgtggaaacggcgctcgggttccacctgcgcgactggtggcagccaacggcagaaaacttcctcggtctgctcagtaagaaccagattgtggaggcgctgaaagatgccggacagtcaggcgctgcgtcagatgccgggaacatgaagaagggagatgccgccagccatgctgaacaatggctctccggtacgcgctgggttcctgcctggatgcggtcacctgatgcgcaacctgacgccgctgagggtgaggcgacagactctgatgaccatacggcacacgcagcctga

SEQ ID NO: 162107 - DNA, 375 bp, Enterobacter cloacae
atgagatactggatactggttgttctgctaaatggattgtttgcgctggtcatgcactttgccgcgccggaattgttcggaagcactgagcattatgtcggcgctgggatctgtgctctgatagcgatagttattacctggcgagatcctccagggatgctggacaacgcgctcttgtttctctttaagtggggaattgtggcttctggactggcgttttctgtctggggcatcggatacaagctggaattctggggggaacataaccccgatgaagttttcagcggcgcattcgacaccatcctgccgaatctggcggtgttgagcggtgttctggttctggtcagtggctgggtcttctggaggcgaaggtaa

SEQ ID NO: 162108 - DNA, 219 bp, Enterobacter cloacae
atgaacacacagaacgtcaacgtcaaaaccgccaccaaagaatcttccgaaagatgggttatgtccggcgctgaacctattgctgcaaaggtactggcattccacggacaggacgccagctatgcatttaacgtcctggctgatttgaaggcagttggtgcgtcatatgcacggcggaacattatcgcagatatgttccagcgtttaggtgtgaattaa

SEQ ID NO: 162109 - DNA, 324 bp, Enterobacter cloacae
atgaaccgtagaaatatgaatctgcgtactgatggttttgttcgcaatatctattcccgtaacgcgttcgacgttattcgcgcagatgtggtgttggctggcatggaaaaacaggccaatcgtggatgtggcctgcattacgagatttatgagtcccgtctgttaggtatggccatgaattacctggcagaactgccactgaaagaccgtcctgtatttatcggcacagcggcgaaaagaggctacatgctgacactggcagaggaagaacgcgcacagggtgaatgtgacgatctgatgaacgaactggcggcagattactga

SEQ ID NO: 162110 - DNA, 387 bp, Enterobacter cloacae
atgccacgtatacaaacttttgtcagcaatcaggttcgtgaagaaattgaatctctggttacagaaaggaggcaggaaggcgcaacggaacatgatgccactgtatcgtcagttacttcgatgctcgttgaactcggcctcagagtataccggattcagagagagaaaaaggaaggtggctttaaccagatggagtataacaagatcatgttggataacatggccagagtccgggcaatgtgttcagagataatgaagatgggcgcactaagtcatgaagttataagcaatggtaactttgataatgaagtcatcaaaagatccatagcaaaatttgcagaagaccaggtaagtattttctttcctgaagaggaagaaacggactaa

SEQ ID NO: 162111 - DNA, 282 bp, Enterobacter cloacae
atggttatcatcgatcctatccgtatggaaattttacgcaagatctttcctgaaattaatgatgtcaaaattgaagtatttactctttttgcttttggaatggctattagagaaatttctgattacagacatacgaccacacaggcagtctataagacccttaaggaattgtgtgaacaatatagcgcaccttccaatgaagcccttaagactttgtacatcacacgacttgctctgcactcctttcttgaactcagaatagagcttcagccagaggagtaa

SEQ ID NO: 162112 - DNA, 168 bp, Enterobacter cloacae
atgattcaagatacccccctgaaaccacgtccagcagggaaatttatccgactttatctggatggtgttgtttatgaggagctaagaaagaaagccaaaaaaaatgccaggccagtacaaaagacggcagttcttattattgaggaggcattagggttgaaagagtga

SEQ ID NO: 162113 - DNA, 216 bp, Enterobacter cloacae
atgggaagcagaaaagccaatgtgatggtcgtggggaaaactggcagcggtaaaaccatgacactcagtcaggtcactcagtttttcctggcgaagtctgacgtaagccagctcaaagaaaggtattccggtaatgacggagagaggatagcggaggctatccgtcagaactgcaacatctggtatccactgaaaccaggggatgaaggtcaataa

SEQ ID NO: 162114 - DNA, 444 bp, Enterobacter cloacae
atggatgcttctttattacttctgcgagatttcagcgacctgaccaggccggagttaattgcccgggctaaacacctggatatcctccgggctcgggtggcgtatacccatgataatttttctccccggcagctaagggctttttccctggccaccctgatgttgttcatgagctacgtgttaacggattccatccttttcagtggcgtagccggcctgataactctcataggggtactgcgttattcccgtttacccatgacatggcacacgcaactgaaagacggtatttcccggatcgagagtcttcgaagttcgccgcttcgtcagatggatgaagccaatgcccattatgactggcattacgcctcttattgtctggctgctgaaatccagcttatttactcagcgctttcgcagccagccagacccttcagcgcataa

SEQ ID NO: 162115 - DNA, 615 bp, Enterobacter cloacae
atgaaaaaaatcacacttttgctggcaggcagtgccctgctgttatccggttgtgcaggtgtcaaaagcagtttcgactgcgatgccacaacgtctgatacctgtatgaccatgacgaaggctaatcaactggcccgggacaaggcggcaaaacaggcgggaaagccggctgcgggcgggctgccttccctggttaatcttcctgccgcctctgcggcggcggttccgtcagcatcccgtgccgtcgtcaatgtcccttccggtgcgcgggtaaccagcaacagacccgcagtatcagctggcaccgcaacaggtataagcacgaacgccgcagcgtcaacactgacgccacgtccggttgccggaacgccggtcacaaccactccgtcatcagtggcttaccgtccgatcggctccgtggttacaccggcaccgtcatgtcagagcgtgcgctgtgaccatcctggatcggtgcatccacaacgcagccaggatcagatagccacggtctggattgcaccctgggtagacagcgataacgcctttcatcagcccggtcgggtgtcctttgtggtcagccctgccgactgggttcttccgtcccgggtaaattaa

SEQ ID NO: 162116 - DNA, 621 bp, Enterobacter cloacae
atgtttgtgaacaaggtattgattttcctgctcgctctgttgaccacagggctggctcaggcaactgaacacacggaaaaccgtcagtttatcaaggaacagctcagactggatcgtcagcgatttcagtctctgcaaactccagatttcctgaagcaggcacgtccggtagcaccgcaggatcagtcatttctcgacgctcaggcacagcaattccggcaatccatgcagcccggtgagcgccccgttgatgctgctctggtttttgtttcattctcaatgccccctgatgaactgaaacagcgcgttcaggacgcggcagcactcaatattccggtggttatccgggggatggttaacggcgacatgcgggccacagcgaatgctgtcgctggtctggtaaaagagagcaataccggaggcgtgcagatagacccaaccacctttcgtaagtacaacattaccgccgtaccggtactgatcgtcgcctgcggaaatcagggcgataaagttgaccgccttcagggtgatctcacgctgcatcaggcgctgaagcgcgtggcagaagagggggactgtgcgcagaccgcgaaaagcctgctgggcgaggaggctgaatga

SEQ ID NO: 162117 - DNA, 1830 bp, Enterobacter cloacae
atgaaaaggatactccctttactggtggctacggcatcggtctttatggtgcaaccgctcatcgctaatgagcagtttaatcagggtatgcagcaggggaaagcgaacaaagggcagggtgctgatgccattcagggatttaagcccgctgaagtcatcccgggctacacgacatccccctctgaaagcggatactacggtggggtgacctcgtcgggtgtggatatgacatccccgggttctgcagcgttaaacagttctgaggccgggaaaactattacggaatccattcttaatactcctgcaagcaacaaaccatcgcttgatgcaccgtttatttccgagggactggatatgcaggcgaaagcggaaaccattacaggcggcggttttgacggatgtgtggaccagcctgcgagttttaccgaaatcaccacacatcagtgtctgcgggacacgaaaattgagcagtactgcacccgcaccgcgactattgtcggcgactggaaggaaaccacagaggttaaaacctatacccttaccgcctttaatttcagccgttccggaaagcagattgtgttcagcgtggcagcccctgaagccggcatcatccacagtgcaagcctgaacgtgaccacccaaaattatctctggaattcccgggccagctttatgaataccacgttcaatctgacctggaatgacaccattgcactgggaggcgcgacagggatggtgctgaccaaaggacagactctcagcgggacaagctgcagcgggaacggcagctgtaccggtacgctggataacgtcatctttaaccagttcgtcgggggcagttctcgtttcacgctgacgctggtgatgcaggtgaaaagcagggaatgggtgccgcgggtagagtggtcagaaagctgcccgttcagcaagtctgaaggcgccatgaccggttctcagtgcgtggagccgggaggcacccggtccgtcgttgttgagggaaaaacctacagcattcatcaggactgctggaaatggcaagacacctacctgacccagaccgagacagaaggaacctgcggggagtatatgaaggactccgcctgtacggtgacgcgcagccagtgtgcagataccgtggatggtttttgtgtgagtcagcaggtgacgtactcctgtgaacggaagaaaacgggtaacgggcagatttgcggtggtgagtttttctgtacggacggcagctgcgcgcagggccagaccggaaccagcaatatgtttggtcaggccgtctccgcgctggccgcggtcgctgctgcaggcgaagacgtggcggaactgaacggggagaacgtcagagcattcactggcgaggccaaatcctgcaaaaagatggctgcgggcttcaataactgctgcaaggattccggatggggtcaggatgtggggctgtcgagttgcagcagcgatgagaaagcgctgggcaaggctaaagagaaaaaactgacggtctatgtcggggaatactgcagtaaaaaagtcctcggcgtctgcctcgagaaaaagcgcggctactgccagtttgattcaaaactggcccgtattgtccaggagcagggacgtcgtgaccaactgggcgttggcttcggcagcggaaagtctccggactgtcgtggcataacggtggatgaactgcaacgcctcgattttggggtgatgaacttcagtgatttttacagtgatcttgatgctggcagtgaaattccggaagaccaggcgttgctgaaaaaagcgcaggacatcatcgccgaaaaaatgaaggagaacgccccatga

SEQ ID NO: 162118 - DNA, 2898 bp, Enterobacter cloacae
atggccgttgatacgatttacaccgttgccggcggggcgtggtttcaggatacgctcaatggcgtggcggcattttttaacagcagggccggagactcactgattgctatggccactgccgtatcggtgattgtcggggcggcaacctatatccggacacgcaatattatggacctggtcaaatgggccgggttttatgtcctggtgattgccgttctggtcggggacaagcggaacgtgcagattattgacctgtctgagcctgcggccatctatcaggttgataatgtcccgaccggccttgcagccccggccagcctgatcactcgtattggtgccggaatggcacaggtttacgattttgtgtttgcccggccggacgcgctgacttacagcaaaaccgggatgctgttcggcgcgcagctggcggcggggagcagtgatttccggttctctgagccggaaattcagcgcatgttctctgattacgtccacaactgcgtggtgggtgacattatgctgaacaacaagtacagcattggcgacctgatgaattctacagacccatatgcgctgatattcagtaaacccagcccgctgcgtggcctgtatgacaaaaaccgcaattttctgacctgcgagcaggccacaaccaaaataaacactgattcgagtgatatcagtggacggaatatgttcccgtttctccagcaggtgcttaaccggatgcacggtttcacgaaccaggtctttggtccgacaaacggtgccagtacggcactgttcaccgaaatgctgggcgacagctataactattttcacggcaattccatgacctccaccgaaatcatccgcaagaacgtggtgatgaatggcctgcgcagtggtctggagagtttttcagcgcagaatggcgatacggccggactggtgaacactgccacgcagacatcgatggcaaaaatgcgtctgtcgcaggcgaccagtgcgtccattgccgccaacacgctgcctgtgatgcacagcgttttgctgggcatgacaatggcactgttcccggtgctgattgttctggccgtggtgagttccctgtcctggaccattatcaaaggctacatctacaccattgcttatctgcagatgtggcccattctgttctccatcctgaaccatgcgatgaatttctacctgcagggcaaactcaacgggacggcggtgacgctggccacgtttgaccagatacagaatacctattccgatattggcaccacagccggctggctggcgctgtccatcccgtttatcgcatggggtatggttaaaggtttagggcaggtggtatcgcaggcggggaactatctgggacagaccctgcagtcagcctccacacagtcgtcttcgcaggcgattgacggtaactggtcctataacaatatgacgacggggaatgtacagggtaataagtgggataccaactacagccatcgtgaaggccatatgaccaaccagcttgagagcggggcgacgaaaaccctgacttcgtcaggtcagcaggtgttcaataatgctgagtccatatcaaaactgccggtggatatcatgctgggtaaaacggcgacaagcagttggcagaaacagcaacgcgatgctatcagcgaggctcaaagcctgagcaacagcttgtctcagacctcaagcctggcgacatcgcagttaaaccagtggagtcagcagcgtggtaacagcgataccactgtttcgggtacagacacgtcgactaacagcaatctgaccaaagcactgaacaccattcagtctattggttcccgctatgcccgcgatgaaaataccactctggcggaaggtattcgggcagcggcaactaaaagtcaggatatgagtgccggagcaggcggaagtgctcagatttctttcgattccgatcgacaagttctgggtaaagttgctggactggctaccgggatgaaagtctcaggagaggggcatctgaaggcagagtataccggcaggagtggttcttcgcatggtaccagttccgatttgacccatcagggtggaacaagcaaaggtttcagtgcgcaggaactgaaggatttccgcgacgcaatggacgttgtgacgtctacccgcgtgacggacagcggcagccataccgacaatgcatcatcatcccttgctaaccaactgtcttcaacattctccagtttgcaaagccaggcatcgcagtttaacgatgcggttacccgtagtcatgaatactctcagctggccagctatgcagaaaataacagtgccaatattaaccagaactactctcaggagtttgtcggttatgtcaccagtaagcgcccgggtgaagctgataaactattgtcggatgcagccagccctgaggtgcgtgcagaacgagacaggatggtccaggaatttgtggaagatcgcatgaaaccacaattgctgcaggaatttgaacaaaataaaggacgaaccggtgacggaatcggcggtgtcggcgcatcatcaggtcacgtagaccttcaggcggaatacgctcagcagcagggcagcatgaatgcactggccagtgcgaatggagtgaaacaaggtaatgaggttggcgctgatgtacaacatcgccgcaatagtgctgaatctcaggtcgataatgataaaaattctgtgaactcatccggtaattctgccaggacggattacaatcgcttgcagaatgaacatgaacagggtaataaaaactttaatgaagctaagatcgcggaagaaaaaaggcaaagtgataagattggagacaatagcattggaaggaatgatttgaacagaatcaaggatgaattgcaggataagtttaataaagagtaa

SEQ ID NO: 162119 - DNA, 561 bp, Enterobacter cloacae
atgaagcgctcagaactggaaaaggatgctgcatatgttcttgatgaaattaagaatcgagactatgagattccatctaatagccagattctaaaagttattttcagtaagttagttattgtttacgctatccagctattttttattgctgctgatgtgtttataaatgctgggcgagtggaatatcattattttgatacattggtgatagctcttggttcaaatgttttttttagtcttgtttttttaatgtcatcctataattttgtctgcatgagaattgcattaggcaacgagataagaaatcggtcggttttaattgggttaattgagaaaaagatccacttctatagtgtttttctcctgttcacaaattccatagttggagtgattttactgtgggttggagagagttttgtctcaggtctgggattttcatggtttgtgacatttattataagtgctctatttttacagggttcgttatctcgatatatgacacctgcggtggtgagtagtttgtcaaaagtgaaagaactgctctccgcaacccccaaataa

SEQ ID NO: 162120 - DNA, 342 bp, Enterobacter cloacae
atgaaaaataagcaaatcgctttatctgcggttatctccggttgcctgtcattaagcgggccgacgtttgcttcgtcaaaagggcctgtacttatccattcagaactacctgaacagattatggcagcgcctaccgcggtgcctgagcaggtcacgactaacgtgcttctgcgacagattctggcggaggtgataaaggtaaacagcctgaaggaggataaccgctgtagcgatggtgagaataagtattctccgggttacatcatcagcgttggcaataaaacgctgcgatgcgatatcagcaaggactacccgcaatggatcgaggggaacaaagcttga

SEQ ID NO: 162121 - DNA, 243 bp, Enterobacter cloacae
atgtcgcagatcgataatgcagtaacttcctcatcgaaacgagcttaccgaaagggtacgcctcttagtgtaagtgagaggaaaatgcgttcggtatcccgtaaaagggagactcataaacctgtaaatgtgttcatccagaattctcacaaagataaactggacgcattttgtcaggagaatgggttaactcaggcagaagcgatagagctgctcataaaacgagaattgttaggtgagtag

SEQ ID NO: 162122 - DNA, 213 bp, Enterobacter cloacae
atggaacgaagaagtatttcatcaagcatgattcgtagtattgggtacgacgaatctatttctacattagagattgaattcaatagtggtgcagtatggaattaccatgattttcctattacatgttggtatgaatttgatggagcagaatcgcacggtaaattttttcatagcttcataaagaataattatcgagagtctcaagtgggataa

SEQ ID NO: 162123 - DNA, 1761 bp, Enterobacter cloacae
atgaagactgattctacatatttaggaaaggttattcgtgtggattccagtactgtagaggtagaagtttcatcagaaataccttccgctgcgccaataataaatggacgattgtataaaattggccagatcggcacatttgtaaaaatgccaatgggaaatattactatctacgctatcgttgctgcggtaagtgacagaccgttcacagatagtagcgatgatgagtatagagtaagctcaaaatttctttcagtacaactgattggcgaaaaaataggtgacagtgagtttgaaaaaggagtgggtacttatcctacaataggtgatgaagtacaccttgtaatcgaacacgacttatttgcaatttatggtgaaaaggatgccggttccattgaaattggaaaacattcttcatctgaaaatttaggtgttcatgtagatactcataacttaattttacgtcactgtggtattttaggctcaacaggtagcgggaaatccaatactaccgtcagtattttgaaatctattctacatggttacgttggttcaagaattatattggttgacccacacggtgaatatgcttctgcatttcctgatgccaaagtacttcgaattaatgaagtagcatccccattggtgataccattttggcttatgacctttgaagaacttgcctattttcttgtaggtgctgatcatcgcgatgaacaaagaatagaatatcgtttactgagagatcttgtaacaaagcttaagaaagaaaacttaaatttaaaagctgggattgttaatgaaaatcttatcacagccgactcacctattccttttagcgctaggcagctatggtatgagatgaattggttacttaatgcatcattttcttctgcaaagaaagatgaacaaactagagatacagcaaatgaactggctgctggggatgcagaaacattgactccggcaacctttgaagcatatgtaatgggaaatacagctccatataaatctcaacacgcagagtatttttcttatgaaaaaaaattactttctcgactcagagatacccgatacgattttctgttcaatccaggtgattacaaaacagcagattctgaaaaagatttgcatgatttactagctgactggataggctgtgagcagcgattaacaatactagatcttagcggtgtaccatttgaggtgttagatataaccataggcttgattacaagatttgtttacgacagcatgttctgggggcgtaaagagtcatataccggtaagcaaaggccaatactcttagcatttgaggaagctcatacgtatttagggaaaaatgacaagagtaattattcaaaagccgcagttgagaaaatatttaaagaagggagaaaatttggcgtaggagcgctagtcatttctcaacgcccctcagagttgtcagagactataatttcccaaattggcacgttgatagctcttaggcttaccaattcaagtgatcaatccatagtgaaatcatcagcccccgataatctaaatagtcttatggatcttctttcatctttgcgtataggtgaggcagttatttcaggtgaggctataaaaattccatctagagttcgattgaaattgaatcacccaagacctacaagtgaagatccaaagttaattgaatgttggacaaaagcattttctttcgatgctgataattataaaattgttgtaactaaaatacgtgaacagaaaatataa

SEQ ID NO: 162124 - DNA, 1194 bp, Enterobacter cloacae
atggaagaaataaacctacttaaagaaattcgtgagctaaaaagtcaactatcctacgctaaaaatattggtttctttatgggggctggtacctcctgtgctttaggcttgccaaatatatctcaattgactattcaagtcgaaagtgcattaaccggatcattgttggattattttaatgttattaaaacagacttatcgaagcctgatgaaacaattagcattgaagatattcttaatcagataagacggattcgcgaaataactgaagaaaggcctgatagagaattcctcggggtttctggcataagcgcgcgtgatctggatattgaaatttgcaaaaatatttataatctaatcacggagaaagaagttagtgctaatctgactgctccaaagaaattttttgcgtggttaaacatgcaaaacagagatttttcgaaagagatttttactacaaattatgatctggtaatagaaaaatctcttgaagcaattcgtgcgccgtattttgacggtttcgttggttcttatgaaccatttttttggcaagaaagtgtcgaaacacttgttcgtagaaatgatctaactcagaactggattcgattatggaagatacatggttctcttagttggttttggaaaaaaagagagaatctgaagtcgcataaagttatacgccttgggaaagtagataaaattgaagaagagaaaaatgagatagtcatttacccatcaaaagaaaaatatgatctatctcgtagacaaccttttttagtttacttcgaccgccttaaaaactatttactaaatggtgagcttctattcattttcaccggatactcatttttagatcagcatataaatgaaattatttttaattgcttgaggcaaaacaacaggcttagtgttgtagtctttttttatgcagacagtgaagttaaaaaattgcattccctttcggcaggatatctaaatctatctgtattcggaccaacaactgcgattataaacggaacattagggaaatggtcctttgaccaatccgagctaaaaaacaaagaaaaatgtgatagtttttggaatgctgaaggtgaaaaattcttgcttggtgattttaattatttggttgagttcttagttggtaattctggtcgtagtagtgagattgaggtatctataaatgaagactga

SEQ ID NO: 162125 - DNA, 555 bp, Enterobacter cloacae
atgcctatcgattttttgactgaagagcagaagcaaaattatgggcgttatgcggcagagccgaacgaggtacaactttcccgttattttattctggatgaaaatgacctgatattcatcgcacaaaggcgcggggaccaaaaccgtcttggtatagcccttcaactaacatccgtccgatttttaggagcgttcctgcctgatttggctctggttccgcacaatgtacaaacctttgttgccacgcagctttcaatcagtcggactgatattctggctgaatacgcaaaacgagaaccaacccgctgggagcattatgctcaaatcaaaaaatattatcactatcatgagttcggggagtttccgtggacattcagattgaaccggttgctgtatacccgagcctggattagcaatgaacgccccagcctgatgttcgatttcgccaccgcatggctggtacagcataaaattttattaccaggaaccacaacactctccagggcactgttgcaaatagtcggtggtgataaacttatcatccccttttgctga

SEQ ID NO: 162126 - DNA, 429 bp, Enterobacter cloacae
atgaatttcaagcatttgtttaataaggaaattattttgaaacttctgaaaactacgctcctactctccctcgttcttacgtcctttacctcgcaggcaaatgacgtcgccactctgaaaaaatcgcttaagccgtggcagcccattgaagtctcaaaaagtggcgacactttaacggtggtattaaacgagaatcggatcacccctgacgtttacgatgctgtcatcagctcgggtgcttgcatggatatttggacaaaagacgtcccagcaaaatatcttaaatcgacaaaggagctgcatatcctcaacaagcataaagctcaggggtatgttttggagcagccgctaaacacctgtaatgaaatgggaaaagagcaacccgaaagagcgaaagtgattatgctttctcatacgcaccttttctga

SEQ ID NO: 162127 - DNA, 744 bp, Enterobacter cloacae
atgaacacagtaacgatcaataacaaacagcttccggcagtcgaatatcgcggtcagcgcgttgtgacattcacaatgattgacgaagctcaccaacgaccagaaggtaccgccagacgtaacttcaatgagcaccgtgagcgctttatcttgggcgaagattacttcgtggtttgtgcggacgaaattcgtatgcacaaaatttacccaatttcaggtaaggctcagggtgaggtggttcttcttacagaacagggctatctgatggtgactaaaccatttaaggacgatctggcctggcaggttcagcgcgaattggttaatagctatttccgcactcgcgcaccgctgacggaaattgagatgattgcagcaatggccgccgatgccgttcgccagcagaagcgcctgaatcatgttgaagagcagatcgaaacggtcacagaagctgtggagaacatcaaacgcgggaccatgcgcgccggatatgtcggttaccgccaggtggtagccaaaagcggtatgagtgacgccaagtgccggaatttggtcaatgcctaccgcatcccgacagacacgcacgaatttatgaccccagacgggctgttgtcacgcagggctatcgtcgagctggagccgtttatggccgcgtttcaccagatgatgtcagaagctgaaccgcgcggcacccgctggtatcaccctaaaatgggcttgttccaggcgattgggtgggagggctaa

SEQ ID NO: 162128 - DNA, 579 bp, Enterobacter cloacae
atgattcattcagcctttactccggaaccgacatctacaggcatccgctttggtaatcgggtcataggttattccgtcgcggttcgccaactcgacaatggcaactatgacaaacgaattccggatggattagatctgctggcttgcatcatggaagggattgaaagcggctggtttaccccgtgcatcgagaaagaaatcatcatttggcgctggatgcttgttgccgtcttcattaccgaggaacaggagaagaacgggactgtcgaggtaccgaacgacgaaggcggcgttgatacagccgttatctattcgggcgagcacggtgcaatcagtgtctaccccggaccggagcgctttgcactcgctaaccatattgaggctggcgccattgagaaatacgggcctaacgttggccagcagttggcgctgcggatgtatcaggacatggttgttgttgatgacgattacggattcaggttgtccttaatgggccgggagggtttcaaccttctgcatgacagctttatcgaacaaatccaaaccgaaggtatgccgggcatgccggttatgcactga

SEQ ID NO: 162129 - DNA, 2448 bp, Enterobacter cloacae
atgttgctcaagtttgatgagcttaatgctctccctatccctgacgttttcactaacgtcactggtctcggcaccaaatcctacggcactgattgcgttatacctgaagatgacacctgtccgctctgtggtcatcataactgcttccgcctgcacaccgacaccaatcaggcacactgctattcctgcggcgaccactccagcgtgattgacctggtgatgaaactctgtgacctgtcatcaccggtggaagcagcaagcgctatcacaaaaatggagttcgaaccatatactccggcgacagtcgtccaggcagaaccagagccggatacccgtaatctggagcgggtggcagaaatcaacgcggcaacagctgagtattatcaccgaaatctgctcggtaagatggatgcactcgtatatcagacggtaacgcggggtcataacgttaaaactttgatggtgactaaggtcggatatgctgatggcgggcttgtagcggcactacgtgagcgtttcagcgaagaggaaattctggaaacaggaatggcccgcctccagaatggtcgcctagtagattttgcacctgccggggtgtatgtctacccgcatttcgtcgatgggaggggcgtccgtttcacctttaaagatcccactggtaattttaagttccagcagccgaagcggtactggttatcaggtgctttttggtacggacaggactcgctggaacgttctggtgccatcgcactggtcgaaggtgagaatgaccgactggcgttgatggaagtgtatgatggcccggtactggcttctattggctccatcagtagtgaacaggtggggttcatcaaatcgctgggccgcgaggtgattaccttcttcgacaatgacgacgctggggaccgttaccgccagaaattcgatgcccgtcacattatcgtgccggagcggggcggtgatattgacagctatctccgtggtggtggtgactttatggctctgctcgctgtgttcacgccgaagtttgaggtcatcaagccgctactgcctggtgcctgtgggtctgaaagcttcaacgataccggtaatgccaaccgtatggcccgtctctacggacccgatctgcggtatatccgtgaaaccgatgcgtttatccagtgggtagagcacagctgggttccggccggagtgcaggtgctggagtttgccaagcggactgccgctgcggtgcttgccgaaggtcaggtaatgatcgcatccgatgacgagaatatccgtaagcgtggagcggaccaggttgcctatgccaatcgcctgcataacctgggactcatgaaggcgatgatcgagctggtcaaaccgaaggtggagattcgcacggtggaactggacgccgacccgatgctcgttcgtgtcaaaaacggtgtgattgacctcaagatgcagcgctaccgtgaaaaccgccgtcaggacctgattaccagtgtctgcccggtggaatatgacccgaaagcggccagtcttctgtggctgcggttccttgcagagattacctgcggtgatgccgagctggctgcctttctgaagcgtcttgtgggctacatgctgacgggccggaccgatgaacaactcctgtttttcttctacggtcacggcagcaacggtaaatcgacgttcatccagattattcaggccctgatggggagctacgcgacgcagattaacagtgacgtcctgatggctaaccgcagcgttggtggtcccaatgcgtcactcgccaaactgcccggtaaacgtctggttgttgccaacgagctgcccgaaggtggtcgcttcgatgacatgctcattaagtcgatgaccgggggcgacacgctggttgcccgtcaggtctacggcaagcatgaaattgagttcaccgctcagttctcgctggtgattatcggcaaccataaacctgcgattcacgatatgtcacacggaatgtggcgtcgtatgtgcctcatccctttcgcggctcagttctcggcggaacaggcggacccgacgcttccggctcgtttgctggctgaactgcccggcatccttaactgggcgctggagggggtcgcagagtggcaggagcacggcctcaagcgctccctcccggccgcagtagtcaaggctaacgacgattaccgcgaagagagcgacctgctgggtgagttcctgagcggctgtatccttcagcctgacgcctacaccccggcgacggaactttaccaggcattccagacgtttgcctgcgagggcaatgaatggcgtatgacccaacgtgtctttaacaaaaagatggctgaacgtggcttcaccaagcttcgtcgtgacagtaaggccggtttccgtgggattgctctcactgccgacatgccacgcgtgtttgagtcggtgaagctgaccgtgtag

SEQ ID NO: 162130 - DNA, 198 bp, Enterobacter cloacae
atgagctgcatactgccgttacagcgtagtttcatcgggatactggagaagcaccgtaagccgggcgagtgcatcctcaacttccgctcaccggattattcgccagaaagtggttaccgcccggttgaaatccgcctggtcggtgacactggcagcgaaacttcacagcttactatcggacaggcgtctacgaggtga

SEQ ID NO: 162131 - DNA, 1398 bp, Enterobacter cloacae
gtgagtactatggaacaagtggaagtggggaaataccagccgtatcctgagtataaggattctggggttgagtggcttggtgacatcccgagcaattggtctgtttattctttaaaaagaagtgttacggggtgtacaaatggtatatggggagatgagccaaatggtgagaatgatctcattgttctccgtgtagccgacttcgatcggaataaattacgaatcagcgatgacaagttaacctataggtcaatttcagagaaagagagccgttctcgtctacttgcaaagggcgacttactcattgagaaatctggtgggggtgacaaaactcttgttggttgtgttgttctctttgataaaaatttcgcagcagtcacctcaaatttcgtcgcaaaaatgagtgctcatgatggatactatagcggatttctgaactatgcattcagtcatttgtataatggtcggataaactacccctcaataaaacaaacaactggcattcaaaatttagactcagaatcttatttgatggagcggttttgtttcccaagttatacggaacaacgcaccatagccgccttcctcgactatgaaaccgtccgtatcgacaagctgattgcacaacagcagcgactgatcgaactgctcaaagaaaagcggcaggcggtgatttcccacgcggtcaccaaaggtctgaaccctgacgctccgatgaaagattccggcgtagagtggctgggggaagtaccggagcattgggttgtatcatccatcaaacatcttgtgtcccatcctattattgatggacctcatgtatcaccgactaaacatgatgagggggttccatttatatccgcagaagcattagccggtgggtacattaattttgataagaaatgggggtatatatctcctgaagagcacgcaatattttcaaaacgatattctccacggagaggggatatcctgatggttaaattgggtgcaacaacaggtatctgtgcaatggttgagactgatgaggattttaacatttgggtgcctcttgctgtaattagacccaaagacagtattaattctaaatttatgctctatctaatgaagtctgactcggtcagaaacgacatccaaatatcatggacgtatggaactcagcagactttgggtctcgctacgcttgcaaatatatgtgtaactatgccgccatatgatgaacaggtagaaattgttcaccatatcgaagaaacgataccagtgttcgaaaattctattaccgcagcagcaaaattagagagtttattgactgaacgccgtaccgctcttatttccgctgctgtgacaggcaagattgatctgcgaggctggactgcaccgactccggaggcagcagtatga

SEQ ID NO: 162132 - DNA, 708 bp, Enterobacter cloacae
atgaaaggattatggacagatctgacagctgcagctgtatttatggcagttggttgccaggcgaaagagccaccgacgcaggttgtataccgtttcgatgaccatcgatatctggagctgaagggctgggactgtgaaggagaactctggtatgtcgatgctaaaaaaggcattcattcgcaaatagccagtcaattttatcgaattttcacgaaaaaatttgtgcatccttcagaacgctatattgccataccctggtgggggaatgtaacgggtggtttttcagtatcgaaagactatgggcaaacgtgggtaaaaggtggtgcatcaatgtcaccgggagaaaatgaacctgatggaagtaatgccccttattacgacgacgttctttctttcacagtcgtcaacgatcagggttttttacagacgaaacaccggttgtatatgtcgtcaaaaccgtttgatgacccgcgtattttgcctggaggccctggaatttcttatagccttgctaatggggaaaaagacagtattacttcggaagcaccaggatgggcttggggtttgatttacttcacgcgagaaggacttgttggaaaaataatgagtcatgaagccaactatcaggatcttcctgacaggataccggaaataaagggctacaccggctgggatcatatgcgttgtgacatggacgtggggaaataa

SEQ ID NO: 162133 - DNA, 666 bp, Enterobacter cloacae
atggcagttggttgccaggcgaaagagccaccgacgcaggtagtttaccgttttgatgaccaccgttatctggaactgaagggctgggactgcgagggtgaactctggtacacggatacacagcggggtatccacacggagccagtcagccagttttaccggatatttaccaaaaaatatgtgcatccatcagaacgttacattgcgcttccgacctgggattctcctggggctatggtttcgaaagattatgggcaaacctggtatccttcttcgtttgctcccagcgaaaatgaacctaatggtgattcatcacctccttacgacgatattatttctttcaccgtcgtcaacgatcagggttttttacagacgaaacaccggctgtatatgtcgtcaaaaccgtttgatgacccgcgtattttgcccggtggtccagggattaagtataccgtggatgatggtatggggagcaaagtaaacggcaagctggaacctcgatttcctggcccagcctgggggctggactacatcaccaagcaaggtctgaaagagaatacggcgcagtttaaaacgaactatcaggacctccccgataaagtgccggaagtgaaaggttataccggctgggatcatgtgcgttgcgatatggatgcggggagataa

SEQ ID NO: 162134 - DNA, 699 bp, Enterobacter cloacae
atgaagataaaacgtatagcaggtattgccctggcggcagtgttgggggccgcaggttgcaatgcctcagagccaccgacgcaggtggtgtacaggttcgatgaccatcgttatctggagctgaagggctgggactgcgagggtgaactctggtacacggatacacagcggggtatccacactgagccggtcagccagttttaccggatatataccaaaaaatttgtacatccttccgaacgttatatcgctattgctagttgggatgttagtgggttccgagtatccaaagactatggaaaaacatggcaggtcgcacagttctctcctggtgaaaatgatcttaatggaatgaatgccccacagcaggaagatgttctttctttcaccgtcgtcaacgatcagggttttttgcaaacgaaacaccggctgtatatgtcatcaaagccgtttgatgacccgcgtattttgcctggaggggcgggtattcaatatgagcttgaggatggaacaaaaggagatataaaacccggaactgcggggtgggcttggggaatggtttatatgactaaacaagggctaaaagataccgttcaggaacttcagaccagttggcaaaatcagcctgacaaagcaccggaagtaaaaggctataccggctgggaccgtatgcgttgcgatatggatgcggggcgataa

SEQ ID NO: 162135 - DNA, 1458 bp, Enterobacter cloacae
atgcaggtcactattgatggtgtcccgtttgtgcctgcctgcgcttcagcgtcacggattggcattgccattactacccacaaccggccagacgttttaaaccgcgccattgagcagcacattaaacatctacccgccggggcgctggtggtggttatcgacgacggctctaaacctgtcgcagtagtgcctgacggcgtgcagctgcttcgccatgaaacatcactcggcattgtcgcttcgaagaacgccagcctgtcagccctgatggatgccggatgtgagcatctcttcctgtgggacgatgacgcctggcccattgctgataactggcacttgccatacatcgaatcaccagaacctcacctggcttaccagtttctcgatctggctggcacgaataagctgaacgatatggcggttttgtaccgggatgataagcacatcgcttacacgggacagcgcggcgtgatgctgtattaccaccgcagcgccatcgagaaggtgggcggattcgatccggtttatggtcgcggcatgtacgagcacagcgacctcgccctgcgcatccataacgcaggactgactacgtgggcttacgctgatgtcgtcggttcagaaaagctgattcattctcttgatgagcatgaggccgtagagcgttcggtaccaaaaccagaccgacaggcgctggtggaacgtaacgttaaaatccacaacgaacggcgtgatgccgggtttaccgattatgtggagtaccggcgacagcgcgacgtggttatcactacgttactcaccagccagcccgacccgcagcgcggtacgaaaatgaccgcctctcctgacatgctggctaaatgggcgtcctcgcttcggaattgtggacgtattgcgctggtggatgagctgcagacggcaccggcagacgttgagctgtatcgcgtcgctgacgtgaagatgaatgtctacttccggcgctggctgcacatctggcagcacctgcgcgatcatcatgaataccgtttcgtctggtgtaccgatggaaccgatgtcgaaatgcttcgcgcaccgtgggaagaaatgcagcccggtaatgtttatgtaggttcagaaccgaagacatacgctgacacttgggcaaagcagaatcatccagagcgtatctatcaggagttcatcgaagcgcaccgcaacgatgtgatgctaaacgctggtctgctgggtggtacccgctctgatgtaatggcgttcgctcacggcatcatccgtctttactacaggatcgagagttatcgtttctggaagaaagaacaggctggcgccgcggtgggggatatgatcgcttttggcattgtcgctaagtcttttggcgatcgaattgtcaccggcccccgcatccacactatttttaagtccgatggtgtcggtagagagtttgcgtggtttcgccataaatag

SEQ ID NO: 162136 - DNA, 1311 bp, Enterobacter cloacae
atgctttataacactggcaccattgctatcaacggaaataccgccaccgggacgggtacaaactggacggcacccgccagccaggttcgcgctggccagacgattatcgtcatgtcgagcccggtacaaattttccagatctcaagcgtggacagttccacctcaatgacggttacacctgccgccgctccggcacttagtggccagaagtatggaatcctggtgtccgacaatatctctgtcgacggactggcacaggccatgtcgcaactcatcaaagagtatgacgagaatattggcgcgtgggagacgttcgccacaacctcagccaatcagagcatcactgtaaccatcaacggcacctccgtaaccatccctggcatcggtaagctggcacagaaagggagcaacggcgcgctagctgtcgaagacggcggaaccggggcaaccacggcagaaggcagtcgcacaaacctcggtttgggaaacagcgccaccaggagtgttgggacggtaactggtaccgtagctgctggcgatgattctcgcatcactggtgcccttcaaaaaactggcgggacactaacaggtcagctgaatttgaaaagcgcgccaatcgctgccgatgctaactctgttatttctgccaacggtgggcttgatgttgatctttctaaggggttcgttttaaaaggaaaggtgcagcagggggcaggtagggacaataatatacttacaatctcgggtgatggagatacgccaacaacaggatatgtaggcgcatttcagtacaaatggtacagcgatagctgggttgcgggtattactcgagggtctggaacggacactctggcttacacaatttactattatggaccaggcactacaaaatactgggcattcaattacgatggttctgctacttcgcaaggaccctgggttaatggttctgatgaacgtcacaagtcgaatattgaggcggtagcgcaacctcttgctgccatactctctcttcgcggggttacttataatattaaggatggtggtaggggtgtcgggctcattgctcaggatgtagaaaagtggtgtcctgatgctgtcaaaacatacggagaccgcaggtttagcgacggcacggtgattgagaattttaagtttctcgatacatcaggcgtggctgccgcgtaccatactgaagcaatcaaagaactatttaacctggtggaactggcgcttaacgatccggacaaggctcgtgatgttattaaagcggtgaaagctgcctctgagcttagcaagtcaggttcgtaa

SEQ ID NO: 162137 - DNA, 339 bp, Enterobacter cloacae
atgaaaaagttattatttttgatggccggtatcgcgctttcttcctcagccttagccgctgagaaatttaaagagattgatagtaaatctcttggtgataaatggccgcttacctttgagcatgcaaaagtatcctgtgtaaatagtcactacgtttttgtttatgacactgatacggatgaacgctatcccttaagcggcatggctaagaacgccgtcaagtctggaaaaatggaagggcgagatttaaaagaagttctaaaaaaagaccctaacgatccattagaacgagctgatattgctcctgttttcagtgaagccattgcgctttgtgaataa

SEQ ID NO: 162138 - DNA, 864 bp, Enterobacter cloacae
atgagttctgaactcgatgttcagtggcgtataggtgcatcaaatggcgtgttagagcgcgtaatgtcagcctatggcgtcaagatgcaaaaggatttagctgacctgttgggcatcgctaaacacagcgttagtggctgggttcaacgcgatgcaatacccggcaatgtcatagttaggtgttgtcttgatactggtgctgatatcaattggcttgtaagtggtgagcttgcaaatgcaaaacatgagcgagtcggttgcaagctaaagggcaaagaactctatgacgagatcatgacgaacgggggcaaaaccgttttgcgcagaattcttgatgcttatgggtttactatgcaaaaagagcttggtgatttattgggtatttcttccggcactataagcacttgggtcaggcgtgactttttcccgggcgatgtggtggtgacctgcgcacttgacactggcgtttcgttggagtggctttctacaggcaaaggcaagatgcgagacggcagggaaagtgaatctcttagcgccttaacagtaagaaaatgtcgccttgaagctggcgagcttaaagatattgggcgttggactccagaccttacaatggttcctgaaaacattgatgaattgatctttattgatggagtaggcgcatcttggcttgttgattgttctaactcaaagatcggtaatggtcgttggcttattggcattgatggtgcgctcgatgtttttgatgtcatcaggttaccaggtggaaaggtcaggctttcaaataagtctgcggagtttgaatgtaatctttcagacatcacaccatcaggtgcagtgatttttactttggaaaagcatgtttaa

SEQ ID NO: 162139 - DNA, 357 bp, Enterobacter cloacae
atgacaatgaacaattcgaccgagaaaagccgtttcactaaagagcagttaattgcgcgtatcaccgataacgcagcgcgcataaagcctgaaatgcagattaatgaaaaacgccggattgaagcgctaatgaatttacaggtgctgaaaatcgcactggcagcgctgaccgcgccagattacatcccgcctcacgtactggacgcgatgagcaatatgtgtgacgggggctttaacgcgcaaggaatctgggatttatgccgggagtcaattttgccccctgagccttgccctcgttgcgggacagtatcaagcagaccagacggtgctcattattgccatgccgctgatgcataa

SEQ ID NO: 162140 - DNA, 855 bp, Enterobacter cloacae
atggcaaagaaagtctctaaatggtttcgcatcggcgtcgagggtgacacctgcgatggccgcgtcatcagcggcgatgatattcaggatatggccgacacgttcgacccgcgcgtctacggctgccgcattaacctcgaacatatccgggggctgatgcctgacagccagtttaaacgttatggcgatgtaaccgagcttaaggcggagattatcagcgatggctctgcgctcgatggcaaaaaagcgctgtttggcaaaatccagccgctcgacgagctggtcagcatggttaaggccgggcagaaggtttacacctccatggagattcgcccgaactttgccaacagcggcaaatgttacctcgttggccttgccgtcaccgatgacccggcaagtctcggcaccgaatacctcgaattctgcagccgcgccgcgcagaacccgctcgccggtaaaaaagaccagccggacgacgttttctcagtggcctcacttgctgagctggagtttgaggacgttcccgacaccatgctcaacagcctgactgataaagtcagagccatttttggccgtaagcaggccagcgatgatgcccgtttcgccgatgtgcatgaggcggtgaccaccatcaccgagcaggtgcaaaccaatctcaacgctaccgaccagcgcgtcaccgagctggagaccgcatttgcgcagctcaagcaggacgtgaccagcaaagtcgatgaaaacgcgcaggcgtttacctccctgaaaagctccctcgacagcaccgaaagccagagccagccgcgccgcgagctttcaaaaggcggtacgggcgacgagctgctgaccaactgctga

SEQ ID NO: 162141 - DNA, 2679 bp, Enterobacter cloacae
atggctgttactaatatcgctgaactgaacgccctcgtcgagcgcgttaaaaaagcccagcgtgaatatgccaatttcacccaagaacaggttgataaaatcttccgcgcggccgcactggctgctgcagatgctcgaatccctctcgctaaaatggccgttgccgaatccggcatgggtatcgtggaagataaagtgatcaaaaaccactttgcttccgagtatatctacaacgcctataaagatgagaaaacctgtggcgtgctgtccgaagacgacaccttcggtaccatcaccatcgctgaacctatcggcatcatctgcggtattgttccgacaactaacccaacgtctacagctatcttcaaatcactgattagcctgaagactcgtaacgcaatcatcttctctccacacccacgtgcgaaagacgcgaccaacaaagcggcagatattgtcctgcaggcggcgatcgctgctggcgcaccaaaagatctgattggctggatcgaccaaccttccgttgagctctccaatgcgctgatgcatcacccggacattaacctgatcctggcgaccggtggtcctggcatggttaaagccgcatacagctccggtaaaccagcaatcggtgtgggcgcgggtaacacccctgttgttatcgacgaaaccgctgacatcaaacgtgccgttgcgtctgtactgatgtctaaaaccttcgataacggcgtgatctgtgcatctgaacaatctgttgttgttgtcgattccgtgtacgacgctgttcgtgaacgtttcgccagccacggcggctacctgctgcagggcaaagagctgaaagccgttcaggacattatcctgaaaaatggcgcgttgaacgctgctatcgtgggtcagccggcttacaaaattgctgaactcgcaggctttaccgttccggcaacaaccaaaatcctgatcggtgaagtgaaagttgtcgacgaaagcgagccgtttgcacatgaaaaactgtctccaacgcttgccatgtaccgtgcgaaagatttcgaagacgcggtagagaaagccgagaaactggttgccatgggcggtatcggtcacacttcttgtctgtacaccgaccaggacaaccagccagaacgcgttgcccacttcggtcagatgatgaaaactgcacgtatcctgattaacacccctgcttctcagggtggtatcggtgatctgtacaactttaaactcgcaccttccctgactctgggttgtggttcctggggtggtaactccatctctgaaaacgttggtccaaaacacctgatcaacaagaaaaccgttgctaagcgagctgaaaacatgttgtggcacaaacttccgaaatctatctacttccgccgtggctcactgccaatcgcgctggatgaagtgattactgatggccacaaacgtgcgctcatcgtgactgaccgtttcctgttcaacaacggctacgctgaccagatcacctctgtactgaaagcggctggcgttgaaactgaagtgttctttgaagttgaagctgaccctaccctgagcgttgtgcgtaaaggtgctgaactggctaactccttcaaaccagatgtgattatcgcactgggtggtggttccccaatggacgccgcgaaaatcatgtgggtcatgtacgagcatcctgaaacccacttcgaagaactggcgctgcgctttatggacatccgtaaacgtatctacaagttcccgaaaatgggcgtaaaagcgaaaatgatcgcggtaaccaccacttccggtaccggttcagaagttacgccattcgcagtagtaacggacgatgcaacaggtcagaaatatccactggctgactatgcactgaccccagacatggctatcgttgatgcgaacctggtcatggagatgccgaaatcactgtgtgcgttcggtggtctggatgcggtaactcacgccctggaagcttacgtttctgtgctggcatctgagttctctgacggtcaggctctgcaggctctgaaactgctgaaggaaaacctgccagcgtcctacaacgaagggtctaaaaacccggtagcacgtgaacgcgttcacagtgcagcaaccatcgccggtatcgcgtttgcgaacgccttcctgggtgtttgccactctatggcgcacaagctgggttctcagttccacattcctcacggtctggcgaacgccctgttgatcagcaacgttatccgttataacgctaacgacaacccaaccaagcagactgctttcagccagtatgaccgtccgcaagcgcgtcgtcgttacgctgaaatcgcagaccaccttggtctgagcgcaccgggtgaccgtactgctgcgaagattgagaaactgctggcatggctggaaagcctgaaagctgagctgggtattcctaaatctatccgtgaagcaggcgttcaggaagctgacttcctcgctcatgtagataagctgtctgaagatgcattcgatgaccagtgtactggtgctaacccgcgctacccactgatctccgagctgaaacagattctgctggataccttctacggtcgtgagttcaaagaaggtgacgttgccgctgtgaaaacagaagctcctgtcatcaaagctgacaagaaagcgaagaaaagcgcttaa

SEQ ID NO: 162142 - DNA, 897 bp, Enterobacter cloacae; identical to SEQ ID NO: 161762

SEQ ID NO: 162143 - DNA, 3243 bp, Enterobacter cloacae
atgaataaaatctttaaattaatatggaataattcattgggccaatggattgtatgttcagagcttgggcgaaaagggaaatcatcatcgaaaacggctttattgattggtggtgttctgatttcatcttcgagtttagccgtagagtgtactcaaggatcaaatggctcagttacagtgaataatgcaaataatactggagcaaatattaactgtgaagtatccagcattttacctgaaataggaaatacaagtgtttggaatactgggtttttagtttatagccaaaacgccaacagaagcataacgctgaccaatgatttaaccacaacacttaagggatcgggggggatttcagtctatggtactgcacctaactttacatcttcttttaatgccgttggaaaaacactcaatcttacaattgcaaatttagatgcgaatagtagcaatccaaacggagataatattgcaaaagcaggattgggagtatcgcatggaggtacatcaaccattggtacgttgaatctcactatgttagacctacctaggggatcaacatctggtgaacgatttgaacattatggtgtagttgctggttcaagtgttaattcagcagaaacagctgcttttaatgggatgaggtccaaagctatatttgataatttaaatattaaaatgagtgcaaataataacccatcctttttgttatcagattatccgttagttgtcggtattcgtgcaattcaaggagcaccaaaatcttctggtaatggtagtgctggttatgtagaggtgaataaagatttaaacattgatattaaaaatcaaaaaaatgatgcaataggaatttatatttcgggttcggagcaaggtggtgtagtaccagaagttcatttaaacaacagtaatatcagtattgagagcacatctactcgtgcaaatgccattcgtctagggaaaacagcatcagttggtacaggcgagggtcgtttgtattctaaaggaaaaatggtaattgatacgacaaaagcagttaatgattcagcaattgatattatttggcagggcgctttattagatgctaactcggagacttctagtaccgaaatcaaagcaggcaaagaggctattagtattagtggtaatccaagtcaggccacagatcagacgacaacaacatttaataatttagtcatcaataaaacagccacaaatacggcaagtttaattactgtaggaacaaaccagaaaaactatattttctctgctagaggtgataacacttcactgatctctaatacaggaaataatgcatatttgattaatgttcaaggagcaagtacaacgccaagccaagtcaattataattttgaaaacggatatatgcagggacttgtaaataaaacagacagctctactttaaaccttaatttaaaaaataatgctacatggcaattagaagcgaatggaaatagtactcaagcaaactttacaacactaaatttaataaattcacaactagttgctcatgatgtgaatcgcagtaatttacttataaatacacaatctgcttttaacttaaaaggaaacgttgttgcatccaactctcaaattgatctggctaatggtgtggctggagataaattaaccattactggcgactatacaactggaaataatacttggctaatggactcttatttaacgggtcttggacagagtggtgatttaggtgtagacggtaaatcatatacagataatgtcaaaattacgggcaatgtgatcgataaaggtattgattgggtttgggtcaataacttaaatctggttgatccaactggaaaagaatccattttgatgtatgacatcgatggagcatccaatggtgaatttcttttacaacgtcgtgttgttaaaggtggttacgaatatcttttaaataaacatgcagatggtgactggtatcttgaaagtttcaatatgaaaggtgaaacgggtgatactggcgcaacaggtcctacaggagcgacaggtcctacaggagcgactggtcctacaggagcgactggtcctactggcgcaacaggtcctactggcgcgactggttctacgggtgcaacgggtgatactggcgcaacaggtcctactggcgcaacaggtcctacaggagcgactggttctacgggtgcaacgggtgatactggcgcaacaggtcctacaggagcgactggttctacaggagcgactggttctacgggtgcaacaggtcctacaggtccatatcaaccagtcattcgcccagaggttggtagttatacttttaatgccaatattgctaataacttatttgtccatcgtttagaagatcgtattggtgcaagtgaatacaccaatatgaataaagatgatgttggtcaactttggttaagagctgtagggggctataatgaatttgaagataaatctggacagattgataccgatggtcatcattatcttttacatgtaggtttaggtttggcaaaatttggcgaaaaagatgaatataatgtcggattaatggctgcttatggtaatgcacggagtgattccaaatcatctattacaaattataaatcatcttcaaaaatagatggttatggctttggtttgtatggaacctggtttgaaaatccgactgaaaaaactggtgcatatctagatacatgggcaatgtggagtaagtttaaaaatgaagtatctggacaagattttggaacagaaaaatatgactcttcagggattactgcctcaatagaagctggttctagttataaatttggacaaagtgaaggcgttagttattggattcaaccgcaaggtcaatttatttaccaagatgttcaattaaattcatttaaagagaaatctacaggtacgctaattgataaaggcaagggcaatattcaaactcgtcttggtgcaaaagcctttcttgtggtccctacagatattgcagcgagctcaaactatcgcccatacgtcgcattaaattggatttataattctgaagacaaacttgtgaagttagataatagttactatggtatttctggtaactcaaatttgggtgaaattaaatttggtgttgaaggacaaacaagcaaaaacagttatgcattgtttaatctttcatatcagatgggtagtaataactatagcgatttcattggaaatattggttggaaagtgaatttctaa

SEQ ID NO: 162144 - DNA, 1197 bp, Enterobacter cloacae
atgacactttgcttaaatatgattgtaaaagatgaaagtcatatcattgaacaaacattagaaaatatatgtcaacattttaagttggattactgggtaatctcagatactggatctagtgatcgtacaccagagattatcgaaaacttttttaaagcgaaaaatattcaaggtgagataatttatgaagcttggcaaaattttagttataaccgtaatattgctttaaaagcttgtcttggaaaaagtgattacattcttatttttgatgcagatgattctttaataggtgagttaagtctaccggctttacagaaagatgcttattattttcaactttccaatgaagatctctctgtaaaatatttaagaaaactcattattaaaaataatgatcagtatcattggcgtggtgttttacatgaatatttagaaaataaaaatgaacaagaggtaggggaagttcaaggcgattatgtcgttatctcaggtcgaaagggtaaccggagtttagataaagacaaatacttaaaagatgccaaaatccttgaaatagcttatatcgctggtgatgatccagatttattgccacgttatgcattctattgtgcacaatcatataaagatgctggacagattaataaagcaattgaatggtatctaaagcgggctgaattagatacgggttggtatgatgagaaatactgtagttttgaacaattaggcttactttatgaaagtgaaaaaaattataaagacgcactatcgtattggcagatggggatagcttatgacccacaaagggcagagtgttggtatcattcggctagacgacatagttgggatcatcatcctgaattggcttactgttttgccaaacaagctagtgaaataaaaatgccagaaggtaatcgtttatttttaaaaaaagatatttataaattttggtcactatatgaatggtgcttaaatgcatacaaacttggaaaatttgaagagtcttatctagcctttaaaaaattagtcgaacactgtccagaagaccttgtaaatcgtttaacgcatcaaatgaatgagtatcgttgtcttattatgcaagactctttttatgatgtacaaattttagcagtcaatttaaataaaattggcaaaagatatttactagaaaatattttaaaagattttagtaaatcttga

SEQ ID NO: 162145 - DNA, 1212 bp, Enterobacter cloacae
atgatgaacgaacaaaaactaaaagaccttgcagcagaatttgctaaaggaatcaaaacagaagacgatctcaatcaattcacccgattgttgactaaactcactgttgaaacggctctcaatgccgaacttaccgaacatctcggacatgaaaagaatgctcgtaagaacggttcaaatgctcgtaacggttattccagtaagaccgtgctgagcgatgatggtgagattgagatcaccacaccacgagatcgtgatggcacatttgagccacagctaattaaaaagaatcagactcgtatcacgcaaatggatagccaaattctatccctttatgccaaaggcatgactacccgtgaaatcgtggctactttcaaagaaatgtacgatgctgatgtatcgccaacgcttatttccaaggtgactgatgctgttaaggagcaagtcgctgaatggcaaaaccgtccgctggatgcactctatcccatcgtctatatggactgtattgtagttaaagtccgtcataatggcagtgttatcaacaaggctgtattccttgccttaggcattaatcttgatggacagaaagaactgctcggcatgtggatggctgagaatgaaggtgcaaagttctggctgaatgtcctgactgagcttaaaaaccgagggttgcaggatattctgatcgcctgtgtggatggactaaaaggctttcctgatgccattaacagcgtatacccgcaaacccatatccagctgtgcattatccatatgctgcgtaacagcttgaaatacgtatcatggaaagattacaaggcggtcactcaggatttaaaagccgtttatcagtcacctactgaagaggcagccttgatggccttggatcaattcgcccaaacatgggatgacaagtacccacagatcagcaaaagctggcgtacacactgggagaatctaaataccttctttgcttatccagccgagatacgcaaagccatctataccaccaatgcgatcgaatcattaaacagcgtaatacgtcaggcgatcaaaaagcgtaaagtctttccaacggatgattctgtacgtaaagtgatttacctggccattgatgcagcatctaaaaagtggaatatgccgattcgcgactggcgtttagccatgagccgctttattattgaattcggtgaccgcttaagcaatcacctttaa

SEQ ID NO: 162146 - DNA, 501 bp, Enterobacter cloacae
gtgaaaaaaggcgatcctcaaatatggcgtgaaggttttgctaaagaacttcgcgctaggggagttgaagctgaagcaacaccacgcgctacacgtggcgtagttaaaaaaggtattgatcaggcgattcttcatattcgcaagcgtggattaaccccggaagtcgataaagccaaaatcaaagagatcgtagaagagtttaaagatacgagggccggaaagcctgcaaaagcgaaaccgtgggaaaagaaaatacagacaaggcagcaggaagttagaaaagggtggctatcggcggcgcaggaacttaaccagagttcagagccgggcgataaaaagcttgccgctgatgttgtgaattttgttaataccatgcctcctatggctacggaacgacatgaaatggccaaagcagttagtcagaaactagcaagccagcagcccggaaaaaagcaaaattcaactggcagagatagagataacgatcaggaagaacgataa

SEQ ID NO: 162147 - DNA, 249 bp, Enterobacter cloacae
atgatgatctcatatcaggaacttgttcgcaccttccctaagttaaactactggtctgatatgtataaattaatgatacatgtcattatttttgcgaaccaaaccaacaataaggtcatttatgaaaaagttaattatggtagctctggttgccgcagctgtttctggctgcgctcaacaatcattttcagtaaacaaaggcataacgactacgccacagcaagttacgacacatcatttcttcgttag

SEQ ID NO: 162148 - DNA, 1284 bp, Enterobacter cloacae
atggctatctgtgtccgtaaaaattgcactctggctgtttgtggaaacattaaagagagatctaagcggctctgcaaacgacattatgccgcatacaaccaaaatcgaatagctaaagaagataaagcattatcagtttgtcagtattgcggtctgtccctcgcaaaaatgagaaacaaaaaatactgttgcaaagcacaccgccaacttggttccagaaaacttttagggaaaatcataacggatattattgggttttcttactgggggcatattcaacatcatattaaacgaagcccattagaactggcttcaattaatggagtgcatgacatcactggtatgtatcaattgtatcaacgtaaaacgaagcatcaaaggagctatgttttagaactcgaacaacgtgatgtattgacggagaaatcaaaaattaaacctaaaccacttctaaggttggaaatttgccatttctatccggtaaatagtggtggtgaaaatgcacctgataatgtgatcattgccccattgcgaatcaatcgcatgttaaaagatactattccataccaaggtagccattttccaggattgaaagctttaggaaagaaaatactactgaatggaagtctgtacgatggtctagttgcacgatttggaaaaatagttgtagacgaagaactctcatcaattggcaaactgaagcaattccatggcaattgcgctaaaaatccggagtttaggggaatgcatcatgaatttcccctactaatgctgttaattgaggaattattacgcttagggcaccatgacattgttaaatttcttcaaggtattcggcgagattacgaggggcttcttcctatctatgttgaattagtggctgctatcatgttttatgcgatcttaacaggtgatcgtgaccgcttcctgatgcgtttcatgaggattcagcgttggtttgacgatacgacttcatccacaaggcatccatttcgggcatggggcagggacaactacgaaagatgcatgtacctactcctaaggcaatatctacggctgttttttggctcagctattgagagcccccgagaaattgtcgatctctacaatagttttttctcacttcaggttgttgacgtcggggagttgggcgaaatcgtaagcttttcctatttcaagggaagacagagcaaagtgaataccttttttatcattccagagtatgtgtttgacacactacctaggtcaggggacgcttttgggattggttcaatacttagctga

SEQ ID NO: 162149 - DNA, 894 bp, Enterobacter cloacae
atgtccaaacactctgattcacatgatgcggtaaacgcattccaagcctgccttagcttcctaccctcttcttcaaccgaacgcatcctgaagcagttaaagcaatccattgactacgagcctgtaattggaattatgggtaaaaccggtgcaggtaaaagcagcctttgcaacgcactattccaggagcaaacttgtctgactagcgagcttgtggcgtgtacccgagaaccacaacgcctggtcctcacagtgggtgaacgcagcataaccctagtcgatcttcccggcgtgggtgagactcctgagttcgatgctgagtatatggcgctctatcatcgtttgtttattgaactggatttggttatttgggtattacgggctgatgaccgcgcccgggcaatagatattacaactcaccgattgctgctttctaatggcgcagatccatcacgtttcttatttgtgataactcaggctgaatgtattcctccgttgccaactaacgctgaatgccaggatcggccttctccaacacaatgcctttcgttggccaccattagtgcccaaattgcgggtcagtttccatcttctcatccggtaatagcagtttccgcacatactggctacaacctgacggtccttgtagagcttatggtgcatgcattaccaatacaggctagcagcgccttttatcggcaattgaaaccagagcacctgactaaagagagcaacgatgctgtacgccagcggtttggtgagatggcaggaagtgcatttgatacggtgataaaccctgactctttcccgtcaggctggaccttctttttgagaaaactgcgccaaaaactagtgctacttgcaaccgcgttatgggacagaatctttggctaa

SEQ ID NO: 162150 - DNA, 690 bp, Enterobacter cloacae
atgtccgtcaacgagcaagactcacgttacgaccgactggcgatcagattatcggtcattattagccgcctacttgcgggagaaacactctcactcaaatctctggtggatgaatttggtgtctctgaacgcactctacaacgtgacttcaatcagagactaatccatctggatattctggatgaaaatggacgataccgtttgaatgattgccaaccacctgatcattcatcgggcgcattctcgtttatccgtacaacagggattgcgcggataatcccggtgcaagacaggcaactaatgaaccttctaatgaacgagtccggggtttcaccttgtctgatctggcatgcccctctgaaatcccatgtcgcattacccgagttcttttcccgtcttgtgcaggctatcagtcagaaacgacaaatcactgtgttggttgaagggcagcgtcacgaagcattggagccttaccgtcttattcactatgtggaggaatggtatctggtggtgtgtcagtcgggaaaaatccgtgtgtttgttctgaccagtattggtgctgtcacgcttgatgaggtgcgctttaagcgtcgcgaagatatttcatacctgactgctggtgagggctttatcgccgcactgcctcatttccctcttatcaacgacatcgtgaattcctttcgtttttaa

SEQ ID NO: 162151 - DNA, 543 bp, Enterobacter cloacae
atgaaaaacttaaacctggtcagaaactcactgcttgcggctattctggggctaacaacctttcatgcttctgctgcctggacggtgaatggaacattctgccagtcgaacagtgataacggccagatgttacttcgtatcagaccatccaccatcggcatgattgaaaacaaaccacagtgcaacggacggggggcttttgcgctcaccagcagtaattttggggttaacgacgtggtttatccgtcaagtgtgatgtgtaacagccagtcgcaatatcaggccgtgcagaccacagtggcaacgcgggatattcagaccatcatcagtacacttaaggcgaataaaaaggtcaccgtcaatacctttggttcagctttcacattcaacaccgctgattttgcccacgtatgcgcagccattattaatcagagtacgcccgcgctagaccctcaggctgcctataagcaggacatggaaaaaatgggttatgaacagggacaagacggccagtggcggaagaaaagcaaaccagcgtactga

SEQ ID NO: 162152 - DNA, 348 bp, Enterobacter cloacae
atgttatttggaatacgtaacaccctagcgtatctattactaatcgttggtcttgtcacatctggagttacctgtgccgctatcaatcagtatgaccagcaggctgctctgacaaccgcagagaaaatgtacgacgctatacagggtgaaggtgcggcccgagaagccaactgggaatcaccaaagttgttagcggatataaaagatccgattattccgggaaatacactccatgtactggagttcagtgttatggacccgaccaatggtgcatatcagcgtattcatgttctggtaaatgaggatggcggtgttgcgggagctgaaatcctttatgccggtcgctga

SEQ ID NO: 162153 - DNA, 945 bp, Enterobacter cloacae
atgcaggaaaacaacccgtcatcaaataagggcgaggtttttgaatatttagtattagaacaggtgttaaaagaatatgatttttcctttgaagagattgagagcggatgggtagatggtggacatgatggcgggattgatgggctatatatcataattaatgggcatttattacaggatgtgaatgactttgtgtggccaaagaaaggtactgacttggcaatctatatagtgacatgtaaacatcatgacacatataaacaagcagttcttgaaagtttaatttctactgtcaatgaattatttgattttagagtgcctacatcagaattaaatggccagtacaacgatgaagttaaaaagaaaagagatgatttaatattttcttataaaaaagtctctgctagaatgaatagttttaatattcactttatttatggctctagaggtgaatcaacagaggttggtgaatctatttatagtcgggctgagcagataaagaaaatcacagaagaatcatttggccactgtgatgttgatttttcatttttaggtgcaagagaaattatcagtctttataggcagactcctaacttttctttggagttgccatatttggattcattatctagaggcgaacgttacattttaattgttaagcttagtgactattataagtttttaactaatgaaacagatcatactttgcgtagatatttgtttgaatcaaatgtaagagattttatgggcttgaatgccgttaatgaagatattaaattaacactttcagaccagggttcacctgatttctggctgttaaataatggggttacaatattatctacatctgctcaaatgatagggcaatccatttacatggaggatatacaaattgtaaatggtctacagacatctgagtcgatatttaggcattttgacaattga

SEQ ID NO: 162154 - DNA, 984 bp, Enterobacter cloacae
atggttaaagttattgtttcgaatgatgaaagtgtgcgtgatcagattattcgggcaactaataaccaaactgcagtagagcaatattcacttcatgctacagaacgaattcaaaaagatgtagaagaaattcttttacgaaacggattcttttatgatagaaggaagaatttttataaaaatcaaggtgttccacgagatgctattgtaacacctctatacatagcctcgggtttaacaactctggttttgaaaatgccatacaatgcgagcagaatgaaaaccagagttttaaggaacgaaggcgcgtataatacaattttctcagagcgtcttgatataaatatttggcctaagatagccttgattcttaaaaaaacagatgaatacttatattctataagaggccattcaggaggtgaagggttcctgaaaaaatggcgtcaaatattggcattctgttcagtttctttgtatttcttgaaattcgactttacgcttaaagaactcttatcgattgatatagataaacttttcaacaaaaacattcctgatgcttggcagcaaatcgcgaaattatctgatgattttgtcgtcgttaacagtaaaaaattaagtagaaataacgtcctgtatttaatgctttatatgcagacggtatttaatttggataacatagagtgtgttgaaaaatacaatagtgtttatgattctataactggactatcacgtccatatagaaatactaaagttaccgaagagtttgtagagactgtgttttctcgactgccaccacaaccatggaagattggtatgcatcgcgatattataagagctttggattgtagcactgcacagtacacaattgctgtggaattattaattcaggcagggagagtttatagacaaaaagacggcgttttatatgatttaacagggaaaattgttgggtttgatgaaagtcgtgcaaatcaaaaggtttga

SEQ ID NO: 162155 - DNA, 978 bp, Enterobacter cloacae
atgagtaataaaaatgcgcttgcagcactgctgctcactattatgagcgcatcggctgctgccaaatccacattgaatctctataccagtcagctgaatgacgatgcgcagatgaccgtcaacgcatttgaaaaagcacacccagatattgaagtgaaatggatccgcgacggaaccactaagctgactgcacgtttgcaggccgaactggctgcgggcgctgccacaccggatgtgctgttgctggcagacagtgtgaccatggaatccctgaagaatcaaaatctgttaacgccttataaatccccgcaaacggcacgctttgatggcgcgctgtatgacaaagatggctattacgccgggacaaaactgattactaccgggattgcttaccacagcaaagccccggtaaaaccggaatcatggaacgatctgcttaagcctgaagtcaagaatatggccaccctgcctagtccactgtattccggagcggcacaaattcatcaggccgccatcatgaacgacccgaaattgggttgggcttattatgaaaaattgaaagaaaacggtgcgatgccgcaaagcggtaacggtgcagtgatgagtgctattgcttctggcagcaaagcctatggcgtgctggtggactatatggctattcgtgaaaaagcgaagggcgcaccgattgaattcgtcttccccaaagaaggggttagcgtcgtcaccgaaccggttgccattatgagcaacagtaaaaatccagaggcggccaaagcttttgttgattttgtgctctcaccggaaggtcagcagctggtccttgagcaaggttttctgccggctgatgccagtctgcctgtaccgcaaggcttcccgcctcgtgacagtatcaagctaatgccactggatgcagctaaagcactggcggataccgaagccaacaaaaaacgtttctctgatttgttcggcaatcgctaa

SEQ ID NO: 162156 - DNA, 1713 bp, Enterobacter cloacae
atgacaagtatgacaatgcatcagaatgccagtaatcactccatgaaagggctactctggttattattgtgtctcgtcgcattactgagtttattacccagtttgcgcctgctgctttcagccttaatggactggcggcagggcagcgacagtagtctgtggcgagtattgaataatcgggtcacctgggtcgcgctataccacagtatttataccagtggcttaggcactctcatctctttgcttcttggcagtttgtttgccttttgtctggcgctgaccaatatccgtatgaaacagatatgggtctttttatttatgctgccaatgatgatccccccacaggttactgcattaagttggttacaactctttggttccaatagtattctgttgaacagtattggtctggcgccggaatttggtagcgtgaatccgctttactcccctgaaggcatcgcgctgttactgggtattcagcacgcaccgctggttttcctggcgttacgcacgcaattgcaatgtttacccaaagaacatattgaagctgcacgcttgaacggggcttcgctgtggcaagtctttttcgatattgtgctgccgctttgccgtaccgcactgtggggaggcgcaacgattgcttttgtttctgcgctgggcaattttgggatcccggcgatgctcggtattcctatctcttattttgttctgcctatctacatctatcaggcgctgtccagctttggcccgtcgatgatcaacgaagtcgccgctctgtcagttctgatgggtattctggcgattgcgattgtgactttgcaggcgaaaatgcagcgccgctacgctttgccattaattggtatggcaggtcgttcgttagcctttactttagggaagtggcgtctgggtgtagaagtgctaatgggactggtgttatttgccattctggtcgctcccttactggcgcttattgcgacctcactggtgccgaccatgggggtacctctcaatggtgatacccttacttttgccgcctggcgcagcgtttttgatgtgcaaagctctgcgtggcgagcactcactaacagcatgttgctgtcggtatccgcggctatggtattgctggtgctcagtcttcctctggcctggttgctggtacgttactccagccgtccactgcgctggctgcatagcatgatagatattccttacacactgccaggtgtcgtactggctatcgcctgtattctgctgttttctcgcccactccccattctggagataagcctgagtggaacactcacaattatctttattgcctatctggcgcgttttctcaccgtctgtttaaaaccggtgcatagcagcatgatgcagctggacccggcgatggaagaggctgccagcctggctggcgcgcatttttcccggcgtttaacggatatcgttttacctctgctggctccggcagcctttgctggcgctctgctggtatttttgactgcggtaaatgaactgaccgtttctgcgctgttatggagtgccggaaaagagacgctcggagtcgtgatattcagtctggatgaaagtggcaataaggtgctggcatccgccatttcagtattcgttgtcgtattagtcgcaatggtgatgttgcttctgagtgcgtttagtaagtatttaccaaaaggagttatcccgtggcagagctaa

SEQ ID NO: 162157 - DNA, 1029 bp, Enterobacter cloacae
gtggcagagctaaaactggaacagcttagcaaagtatttggcgaccagactgttgtccgggatctcaatctgactatccctcagggcgctttcactgcgctactggggccgagtggctgcggtaaaaccaccacgttgcgtattctggcaggacttgaggagctcagcagcgggcgtttattgctgggggacaaactgctggcagataatatgacgcatactcctcctgaactgcgtgatatggggatggtattccagtcttacgcgctgtggccccatatgacggtcgctgaaaacgtcggctatcccttaaagctgcgtaaggtcaaaggagcagcgcggcaaaagcaggtgatggatgcgctggatattgtcgaactgggggcttatgccgaccgttctccccaggagcttagtggcgggcagcgacagcgtgttgctctggcacgctgtctggtttctgaaccaaaagtggtcttgctggacgagcctctggctaacctcgacagacacctgcgtgccactatggaacaaaccttccgtgattttcatcgtcgtaccggcgcgacctttgtctatgtgacgcacgatcaggcggaagcgatggcgctggccagtcatattgccgtgatgcataaaggtgagttaatgcagtggggggctcctcaggatttatatctgcgcccacaaaatgcctgggtggcaagtttcattggtaaggggagcattttgtcattagcaacccccgctgatgtgcaacatcttgatagtcagctactgcatggcagttttagcgacgggacgccctatggcatgcaacccgtgctcgtgcgcccggaacatgttcaggttaccgatacggggctgagtgccagagttgaagggtgtatttatcagggggagcgctatctggttgatttgcgcctgtctgatggccagcaactgactgctttccaccatgcctctttgcaacaacagcagaatgtttgtgtgcgcttacatcagggctggcgcctggagaccgcatga

SEQ ID NO: 162158 - DNA, 1059 bp, Enterobacter cloacae
atgaaaatagagattatcagcggtctgaaccgtaaagcaccggcggccattctactgtgtgctgaaggccagcgtatcctgctggatgcaggtggggcgctggagcccgatgaggcattatggcaggttcctgcggatatcgatgcggtattactcagccatgatcatgccgatcatattgccggactcaaccgtttacctcgtgaggtaccggtttattgtagcaaggtgacagcacaagcattgcctttaggtcacaatgtacgctgtattgatgtcagagggaccttccggatcggtgagataacggtgacgaccggaagttgtggtcatgcttatggcggcgtctggtttcatcttggtatcgatggcggagtattttatagcggtgatatcagtatggagtcagcgctgtttcattttgacccgccgccaccggcccgtattgctctggtcgatgcttcttatggcctatatgatgttcctcagcagcagcaactggataagctatggcgctatttattgcaaccccgtttatgcccggttccgccttcaggtcgtgcggttgagctggctttgctgagagcgcgggacaatcagccgaatatcgcgatggatgagagctgccggaatatgatggagcaaatggcctgtcagaatgatggtagcctgcgggaaaatgtggcggctgaactgcagtctctggcgcaagtattgccgctattctctatcgaggcgcctttggttctggcttctgatccagatggcatgagtggcatggcggggagattacgggaacggcatgattttcatcaccgtactttatttactggccatcttaatcagctttctcgtcagcagtggctggcaggagacgtcgatttttgtcgctggaatgttcatcctacgctgagttgcttaaaaaaactgacgaccatgctgtcatgtcagtacttcgctccgctgtttacgccgctggattatccggcacaatggcagcaggaattacaatgtgaaattatcacttcctcgacgattgaaatggaattatgtcaataa

SEQ ID NO: 162159 - DNA, 561 bp, Enterobacter cloacae
atgtcaataatttgtaagccttttgtttttgtgcgtcacggtgaaactcccctgaatcgtgagaagttgatcggtggaagtaccgatgttccgctgacggataccggcagacggcaggctgaaatagcccaacctttgctggctcgttttcagtggagtgttatcggcgttagctcattactgcgtgctcagcaaactgcccaactggcggtacctggcggtatttataccaccctcgatggattacgtgagcgtgactggggcgacttagaaggtctgccaggagaggcgattacgccctatgaagagacacctccgggaggcgaaagctgggatacctttcttggcagagtgacggtagcggttaactctctattaagtgaatttgagtgcccgttaattgtcgcccattcaggtgtcttccgtgtactgaactattacgcttttggaacaccttacggtaaccgtattggcaatgttgagccgatgtggattttacccggaaaaattccagaggagtggcgtattatgccgctggcacagcgagataacctgctctaa

SEQ ID NO: 162160 - DNA, 528 bp, Enterobacter cloacae
atgtcagccagtaaatcaaaaagcggcgcaaagggtaccccaactccgcatgacctcgtttttaaacagtttctgacccacaccaatacagcccgggattttatgcaactgcatttgccggcagaactacagtccatctgtgacttcaatacgctgaaactggaatctggcaactttgttgaggaagatctgcgcccctatttcagcgacgtgctttatagtctgcaaactgttaccgataataatgcttatattcatgtgcttattgagcaccagtcttcacccgacaagcatatggcgttccggttgcttcgttatgctgtggcagcgatgcagcgtcatttggatacagggcacaaaaaattgccactggtcataccgattctattttataccggtaaacgtagcccatatccgtactcgacccgatggttggacgaatttacgatcctgaagtggctgaaaaactctacagcggtgattttccactggtcgatgttaccgttatacctgatgacgaaatcatga

SEQ ID NO: 162161 - DNA, 927 bp, Enterobacter cloacae
gtgtattacaactccacctcctatatccgcacgttttacaacggtgcgtggtcaggttggacaaggcaatatgacgcagcaaataaaccgacaccgggagatattggcgcggtaccggcaagtggcggacgtgttgcttacctggaaaatgcaacgtattacaagactaacccggccggatggtatggcggaggtgcttttgcagaccagtaccggaataatgcagcaccgtttcttgtcccctacggctttgcatcgacaaaagatgtttctcagtacctgccgattgttaagggaatatctcatactgaagtgcatggatatgccgcatcggtaagctttggcatcctgcgttcaggaaaagccgattttggtgctgctgttattaatattgtcggagataacggcaatgcagccgtatatagctatgatgtcaacggcacatttaatgcacccggtcaggtctatagcggtggaacgattgttgccgcaggacaaattagcagcggaactcatatcattgcgactcagggggtttttgagtctggcggtgcggtaagggtgtattcttcaaacaaccctccgacacaatatgcagttagagactggattactagcgtagggcttgaaggtaataatccctcggccccttatatgcgtcaggagtctagcgggaatcttgtccgtctggctacgcaagactgggttaattcttattatgggatggttaacggattcaggcgcggcgggcagcagcttcagaaccctacagacgcatttttcggcaactgggaatcaccagccgggtgcgttgttacaggtattacgatggaaggccgaagcgacgggcgaaagctgggcgtttattaccgccagatgcaatatttcaataaacaaactaatagctggattaacgtcggggattaa

SEQ ID NO: 162162 - DNA, 1461 bp, Enterobacter cloacae
atgcaaaacctgatcaattctttagcagagggaaataaaaaaaacgtttacattttttatttctttctgattatgttaacattttcaccggtaattttcttttcatatgcattttcagacgactggtcaacattctttgatgctataacaagaaacggttcttcgtttcagtgggatgttcaatctggtcgtcccgtttatgctgtgttccgttactatggacaaatgttaattaatgatatttcttcattttcgtatttgcgtctttttaatatattaagtctggttgtcttaagtagttttatttacaacttcatagacagcagaaaaatatttgataaccccgtattcaaagtaatatttccgctgttaatttgcttactccctgcgtttcaagtttatgcttcatgggcaacatgtttccctttcactatttcagtattgctggcaggtattagttataataaatgtttcccacattcgaagcagcgatcgtcattgccagaaaaattagcatccattgttgttttatgggtggcatttgcaatatatcaaccgacagcaattacattcttattcttttttatgcttgatagttgtataaaaaaagaaagtagtttaactgtgaaaaaagttgcgacatgttttatcattttagttatcggtgttgcaggcagttttataatgtcaaaagtacttcctgtctggctatatggggaatcattatcgagatccgagttaaccgcagatatcggtggaaagatgaaatggttcataaatgaatcactaataaacgctgtaaataactataacatacaaccagtaaaaatatattcttggttctcctcgcttgcaattttaatcggcttatacactattttagtgggaaaatcaggcagatggaaaacgttcatagtcatagcgatcgggataggttcctacgctccaaatttagcgacaaaagagaattgggcagcattccgctcgttagtggccttagaacttattatatcaactctatttctcattggcataaatagccttgtcagtagaatttttaagcaagcatttgtctggcctcttatcactttaacaattatgataatagctcagtataatattataaatggatttattattcctcaacgctctgaaattcaggcacttgctgcggaaataactaataaaatacctaagaattacacaggaaaattaatgttcgatctcacagatcctgcttacaatgcctttacaaaaacacagagatatgatgagtttgggaatatttcattagcagcgccctgggcgctcaaaggtatggctgaagagatcagaattatgaaaggatttaatttcaaactatctaacaacgttataatttctgagaccaatcgatgtattgatgattgtatggttatcaaaacgtcagatgcaatgcgaaggtcaacgataaattattag

SEQ ID NO: 162163 - DNA, 981 bp, Enterobacter cloacae
atgacaacctcaactgatataaaaagcactccttctttagctattgtggtaccttgctataatgaacaagaggcttttcctttctgtctcgaaaagctttcgaatgtactaaattcattgatagccagaaataaaattaacaacaatagttatcttttgtttgtcgatgatggtagtcgtgacaatacttgggcacaaattaaagatgcctcgaccgcttatcactatgtgcgaggaataaaattatcaagaaataaaggacatcaaattgccttaatggcagggttacgctcggtcgatacagacgtaaccattagcatcgatgcggatctacaagatgatgtaaattgcatcgaaaaaatgattgacgcttacagccagggatatgacatagtatacggcgtaagatgtaatcgagatagtgacactttttttaaacgtacaacagctaatgcattttacgcaataatgtcccacatgggtgtaaatcaaactccaaatcatgcagattatcgattattaagtaatcgtgcgttggaggctcttaaacaatataaagagcaaaatatatatttacgtggattagtgcctcttgtgggatacccctcgatcgaggtgcaatatagccgtgaagaaagaattgcaggtgaatcaaaatatccaataaaaaaaatgcttgcgctggctctcgagggaattacctcattatcagttacaccgttacgaattatagctatgacaggttttataacttgcatcatatctaccatcgctgcgatttatgctttaattcaaaaaacaacaggtactacagttgagggatggacatcagtcatgatcgctatattctttcttggcggtgtgcaaatgctttctttaggtattataggagaatatgtcgggaaaatttatatagagacgaaaaatagacctaaatatttcattgatgaaagcgtaggtaatgatagcaatggaaaataa

SEQ ID NO: 162164 - DNA, 378 bp, Enterobacter cloacae
atgccaagttcaggcccattatggcaactaatgaaatatgggttagttgggatagtcaatacactaattacggcagttgtaattttcctgctaatgcatttgggtcttggcatttatctgtccaatgcgatgggttatgttgtaggtattgttttcagcttcatagcaaacacaatatttacatttacgcaaccaattagcatcaatagactaataaaatttttatgtgtttgcttcatttgttatgtggcaaatatcattgtcataaaaatatttttcgtttttatgccagaaaaaatatattcagcacaaatccttgggatgttcacatacactatcacaggttttattttaaacaagttctgggcgatgaaatga

SEQ ID NO: 162165 - DNA, 1083 bp, Enterobacter cloacae
atggcgaagactaaatcagttcgcccaccgtttgtcgtgggcggcgttgatacgcataaggacctgcacgttgctgcagtagttgatgaaaacaaccgcgttttaggcagtgattttttcgcgacaacccggcagggatatcggcagatgctgacatggatggcatcttttggaacggttgcccgcatcggagttgaatgtaccggttcttacggcgctggcttgctacgccacctgcaaaatgccggcatcaccgtgctggaagtgactgctccggataaaatggaacgccgcaggcgtggaaaaagtgacacaattgatgctgaaagtgccgcccacgcagctttctcattgatacgcactgtcacacctaaaacacgaagcgggatgattgaagcactccgcgttctgaaagtctgccgaaaaacagccgttgcagcacgtcgtattgcgctgcaaatgatccagatgaatatcgtttcatctccggatgaactacgtgatcaattacgtaatctgacccggatgcagctgattcgaaccctggccgcatggcggccggatgtgacggcgtatcgtaatgttcaggatgcttatcgtattgccctgaaatcgctggctcgacgatatcttgaacttcacgatgaaatagcagacctggatatcatgatcgcgtcaatcgttgatgagctggcacctgagctgatcaagcgtaacgctatcggctatgaatccgcttctcagctgctcatcactgcgggtgataaccctcaacggctgcagtctgagcctggcttcgcggccttatgcggagtcagtcccgttcccgtctcatcaggaaaaacaaatcgccacagactgaaccgtggtggagatcgcgcagcaaatagcgccctgcatatcatcgctataggccggttacgtacagatacgaaaacgcaggagtatgtcgcgaaaagagtcgcggaagggcactcaaaaatggaagcgctgcgctgcctgaaacgttatatcgcacgcgaggtcttcacactgcttcgcaatcaaaatcggcagattaacagcactcaaataacgacttga

SEQ ID NO: 162166 - DNA, 432 bp, Enterobacter cloacae
atgaaaaaatacttacgttcactgatgttggatgccctgctggctgtagtcctgatttgggggctggtatcgccgcaaagcgctgccgttaactttgtggccgcatgggcgctatttggcagttttgtctgcattggtgcgagcctcgccggtgtggtcgcctatgagtactggctacgaaacacgggaaaaagtattgccgtcaatccagacctaatgaagatattccgcgccgtcttttgtcgaaagcctgcacgggcgcgcaaagcatggtctctcattgttttctctgctacgacggtctgtttacttggggctggctggctctttacagctctggtctatctgctctgtgttctggcctttaaagccgttcgcgagacataccgccaacgcattgaggaggtggctctgtgtccaaattcattgtga

SEQ ID NO: 162167 - DNA, 777 bp, Enterobacter cloacae
atgaaaaaaataagaaaaggggatgagccacaattattatctgaatataaattggctaatcctaatagtgactggaaaaatggattcagacaaaatgcgggctttgaagccattaagtcagttaccaacaatcttaagactcaacaatttgggttgtgtgtttactgtgagattgatcttaaggatgctgggggaattggatatgatgatttcagagtagaacatttttttcctgaaaacccaaagaaaaatgagtctagaaatgatggcattaactatgctttgcattggccaaatttatttggatgctgtaccggcgggaatacaccatatgtagtagatagagaggaaaggtatagtaatccagatagtcattgtgacgtaccaaagtcgaataatgattggacagcaatcatccttgatccaattgctgatattcctgcatttccatcactctttgaatatactgaaagtggtattatttcagtatctagccattgtcccgaggacaaaatccaaaagactcataacactattgaatatttaaaccttaactcaaataaaattgaaaaattcagaggtgcaataatacaaaaaattagagcggaattactttcatttcctgccgaaaatattcaagaagcgttaaatgaattatctaaagtctatcttttaccaaatggtaacgagagattatccccattcttctcaacaataagatggtatctaggccctgtggcagaagaggttttactggaggctggatatgatggttaa

SEQ ID NO: 162168 - DNA, 534 bp, Enterobacter cloacae
atgaatgatacccgcctgctgccggtgggctcgtcaccgcttgaggtggcggcggcgcgcgcctgcgctgagattgaaaatacccccgttccgctgcgtcgcctctggagtcctgacgactgcccggcaaacctgctgccgtggctggcgtgggcgttttccgttgaccgctgggatgagaactggccggaggccacaaagcgggatgtgatccgcgcggcgtggtacatccacgcgcacaaaggaacgattggggcggttcgccgcgtggtggagccgctcggttatctgattaacgtgtccgagtggtgggaaacgaacgacccgcccggcacgtttcgcctcgatatcggtgtgttagagaccggcatcaccgaggaaatgtattacgagatggagcggctcattgcggatgcaaagccagccagccgccatcttatcggcctcaacattattcaggatgtgccgggctatctctacaccggcgcgctgacgtatgacggcgacatcatcacggtttacccggataagtga

SEQ ID NO: 162169 - DNA, 354 bp, Enterobacter cloacae
gtgtggacgtcgggcatcggccacactgcaggcgtcgtgccgaagggagaaatcaccgaacgtcaggcggcggcgaacctcgtcgcggatgtgctgaacgtcgagaaacgtctggccgtgtgcgcgccggtagaaatgccgcagcacgtttacgacgcgctggtcagcttctcattcaacgtgggaaccggcgcggcctgccgctcaacgctggtttcgtacatcaagcgtcatcaatggtggcaggcgtgcgaccagctcacccgctgggtgtatgtgaatggcgaagttaacaaggggctggagaaccgccgcgcgcgcgagcgtgcttactgcctcagggggattcaatga

SEQ ID NO: 162170 - DNA, 168 bp, Enterobacter cloacae
atgatccataaatactccctaggtaaatctgacgatattgaactggctaaactacaggggcttttatccttttcgaaacatatagagcctttatttatcgaaagaatgatgaaaaaatactcagttaacttggtagataaaataatctctggtcaatggaggaaataa

SEQ ID NO: 162171 - DNA, 168 bp, Enterobacter cloacae
atgacgacggccacgctgtatgagcgttttcgcggcgtggatgcgaccgccaaaggcgacaaaaaggcggacagcatcgacagcactatcgatgaaatgtggcgggatatgcgctggtctgtggcgcgcatccaggacaaagcgcgctgcatcgtggggcaaatctga

SEQ ID NO: 162172 - DNA, 417 bp, Enterobacter cloacae
atgacaattgaatatgtctggagcccgtcaacagcggggttttatcccattattgaaaaagagcgtctgattgctgccggggaatggcctgaggatggtgtggacgttacaggtgaagagtacggtgcattgtttcctgcgccgccggggaagtttatcgatacgctcgatgggcgtcctcaatgggttgatatgccgccgccttctgaagagcagctgattgctatggctgaaaatgaaaggacggcaaggcgtaccgttgccaataatgaaattaactggcgccaggatgctgttgatgcgggaatagccacagaagaggaaaccgcaggccttgcggcatggaaaaaataccgggtcttgctgatgcgtgttgatacagcaaaacccgtatggcctacacctccgggggagtag

SEQ ID NO: 162173 - DNA, 420 bp, Enterobacter cloacae
atgtattacagcaaatcagtgaacgggtttattcctgatcaatggatggaagatggtacttataacccggtgccaacggatgccatcaaacttacagaacaggaagttaaagagtttcatggagtcagcaccccagggaaaatggttgacgtgatcaatggtcatctcgcatgggttgatcttccgccaccaacacatggcgaacaggtggcagcagctgaagctgagaagaacaggcgggttaatgatgcaaatgattacatcagcagaaaacagtggcctggcaaagccgccattggtcgactaaagggtgatgagctggcgcagtacaatctgtggctggattatcttgatggactggaggccgttgatacctccagcgcacctgatatcgagtggcctactcccccggaggtgtag

SEQ ID NO: 162174 - DNA, 267 bp, Enterobacter cloacae
atgtttgttgaactggtttatgacaagcgaaatgttgaggggctccagggggccggagagatcatcctggctgaactaacaaagcgggtgcacaaaatttttcctgatgccgaagtgaaggtaaagccgatgcaggcgaacggcttgaatagtgatgccagcaaaagcgatcgggaaaagttgaatcgcatgctggaggaaatgtttgaagaggccgatatgtggctggtgtctgaattcccgacggttcgccaggctgggctgtaa

SEQ ID NO: 162175 - DNA, 603 bp, Enterobacter cloacae
atgggtgttaggcaagatgatgaaggcaagtatgttaccagtgacaggccgtttaaacagtatgatcatggatggcaggcacaaaatgcagagagctggcaaaatgcatgtgatgccagcaaatcagttagtcagccgagccagtcttaccagacgccacagtttacagcagttgccggtcaatctgggttaagcactctttttggctatgccacgataatattaacattctgggctattcttaatttttttattcttattcccggcctgagggcaagttttttattacaaagcgccggaggtttttttgcaatacctggggcaggtatagggtttatacttagagttgtccatttaatactttttgccccttatgtttttatatacccttggagtgatggtgacattgccaaacaatttttttaccagatgggtgtgatagccgtaatttcgattccagctctaattctgtggaaaaagttaaagaaaaccatactttattttacaggagcacttgcgatattatcctatatctccgtaggtttgctggcacttaacaatgacttatgggcttcttttgaagtttatccctttttaaactag

SEQ ID NO: 162176 - DNA, 453 bp, Enterobacter cloacae
atgaatgaatttgttttggatgctaaaaacacgctagagaaaatttcatctttcaaatgtgcttcttttaaaaaattgagtgatggttctttaatttttcaactagattttgagggagaccagttttttggaatgttcaagcattttcttgatgaatatttgcttattaatattaccaatcctataacttatattgatgatgaagaagcaatagtcaattttgaaatagcaaatgatttcaataaaaaagcaatcggagttaaaggtgtaattgctgatcttgaaaagaaacaggtcatgttttctagggaagagattgtccgtattaaagataggttcaataaggatttaattgatgaacgtattaagttttcaatctctttacttcataagtcattggatattttttctttaagcatggatgaatttgaaaatggccgagaagagaagtga

SEQ ID NO: 162177 - DNA, 561 bp, Enterobacter cloacae
atggccgagaagagaagtgatactggactattcattattggctggatcgcgacggcgcttgctgttggattaccacttatatttttgctatgcattcagaagtattatcctgaagcctaccgtcagtacggtgataaaattgcaataatagcttacttgattgcatcttttttcagtggactctatacttcgtacagagtttcatgtaaagcagatgaaaaagatctgattatcagcggtctcagaaatgaaattgatgagtctaaaaaagcttatcaaagcctttcgccaaaagaaaaaataatttcattgcttcatgagatacatactaagtctggtggtttgaataaaacagcaattcagaaattattaatagataaaattggtgagataaacaatgattcatccttcaatacacgctatgatggcgcattgtgtgtaagtgacgagcaatttaaagctagaacaaaagtgccaaccaatttaaattcggcttacaagtctgaaaatttggatgaatataaacaagttgatatgaaattttcttccaaacggagatga

SEQ ID NO: 162178 - DNA, 858 bp, Enterobacter cloacae
atggccgacctgtcgaatgggtataccaaggtcgctaacgagatccaacagctcaagcctcgcctgagaatgtcaggccgggagtggcaatgttttgaggcggtgatctggcttacctacggctggaacaagaaacaggaccgcgttacgaacacggtgatcgccgagcttacagggctgagtgattcccacgtttctgatgcgctcaaatcgctcgcagaacgcaaaatcatcttcagtcagaagcaaggcgtgatgaaaacggtcggtataaatactgacctttctgcctggattttagacaaaccgaaaacgggaaaagtcttcccgaaatcgggaaaagtgttaccgaaaacgggaaaaaccttcccggaaacggtagacacccaagactataacaagaacaatattaaaatatcctcgtctcggaattctgacgaatcccgaaaccagaaaactgaaaagtttctctcacgccatccagaagctgccgccgggatatacaccccggcaggtaaatcatggggatccgctgacgacctcaaggccgctcgctggatttacgacaggcttctcaccgtcaacgcatcgctatccgaacccaactgggctgaatgggcaaacaccatcaggctgatgcgtgtccaggacaagcgcactcactacgaaatctgtgacctgttccagtgggccaaccgggacgagttctggaaagacaacatcctgagtccttcgagtctgcgcaagcagtgggatcagctcaccaccaaacggctgcgtgcaatcggagcggtaaaaccatcccggggcggcattgacctgcataataccgactggattgatggagtgctggaatga

SEQ ID NO: 162179 - DNA, 201 bp, Enterobacter cloacae
atgtcgttctccgcactttttagtgcactgagcaagctatcaaatatctacctgccactacatcagtgccagaaacatgatcagacattcagccccctcttgctctgcctccccatagcggccatgatatccgttccggtcaatgagtctgacgccgttgcacgcggagagtcgctgatcattgtcgatttggcgaagtga

SEQ ID NO: 162180 - DNA, 1053 bp, Enterobacter cloacae
atgaaagaatttactttgatttttttagcgttattttcattatcagttgatgctcaagatgctttgccgggagaggatctggaaacctgtacttccacacctgtgtcagtctcgttatctggtacagcgcattttcagcgtgattctccggtaggaacggaaagcgaatatataaccccggatattcagcaaagtgtgacctgcgcattaatcagtattaaggacggcataactgatagagatgcatattaccaattctctgccagcggtgagagtgaaagtgggatgccgggggtgtttaaaacgaatgttgagggcgttgggataagattttactacgatgttaaggaattttctggctttacctactgtcagagggagaatagtgaagaatatataagaacgaacggttcgtatataggtctgaaatgccactggcttgatgatacgccttctgagagagttacaagccttatcagagcgaaattagtaaaaacaaatccatcaataacttctggtacagttacgtcaacaccagccatgataaattcacgcatggcttataatagcactttgtttatatatccattaggcagtataaatatttcatcttcgatcaacaccctatccgataaatgcacaataaataataataacatgtcatttgacattgggaatgtcagcataaccgatttcgacgggcaaagtggatacgcgcctgctaaaacgtctgtgcagaatttaaacctgagttgtgacaataatgctaatatcaacatcaccctcactggaaatcaacatcctgattgttcagagcaaagtgtgttggcactaagtaatcaggggcaaccgggcgttgcacaaggcgtcggtgtacaattgctttataataatatacccattaaattaaatgaaatgctgaaccttaaacactccagcggaggtcaggagatattcccgatagaagctcgttactatcagacaaaagataaagaccagattagacccggcaaggcaaatgcaacagcaacgttaaacctcacctatcagtag

SEQ ID NO: 162181 - DNA, 735 bp, Enterobacter cloacae
atgggccgaccagccaagccactagacagaatcaaactgtatgaccattacacctttgaccaaaccattaccgagctgcttagagtcaagagaccttacggccaatctaaacgcgccacaggagagcctgttagcttctatgtgcatccaaatggctatgccactgtctctgtactggggaagtcctatcgtcgctccagagtcgtctacagcctgtgtaagggtcccatccctgagggaatgttcgttgaccatatcgacggtaaccgactcaatgacaatccttacaacctgcgcctagttacaccacaacagaaccagtggaatagagacaaccttggaggcaaacttcagaactatttgccgaaagggattgactttgtaaaagctgagggtcgctacagagcgcgtattaagatagacggcaaggtcagagcgagactctcttatgaggtcagggagcttatggtctggctacaggaacagcgtcagaagctacacggtgagttcgcctacgatggatggaccgactggacagaggcagaccagaagcgagcagacgagcgctacggggtgtccaagcctgaagggtataaaccaaggaagagacgcttaccagtctatgctaagacgcatgatggactgaaggtctactccgagtcaaaaactggacgtctctactttaataagctgaacaagaagcactacatcgacgaagagtctgtggtggtttga

SEQ ID NO: 162182 - DNA, 564 bp, Enterobacter cloacae
atgtcaaaccttaacgctaaccacatcatctacatcgacggtcaaccattcaaagcgaatgaggacgggatgtggaacctgaccgaaatatggaagaccctgaagctgccaaggggtaaggcaccctctgagtggaagactaaagaggcgaaacgctttgcatccactccggtaaaattgcggagtgaacgagtaggttccacacagcacatcttctctaacaagcaagtgaccatgaagtatgccggatgggtctccccctctttcgaagatatggtctacgctgcctttgagtcaattctggcaatgcctgaagtccagaccgtggtggtcaacaagatggtggagctgggatatcacgccgaagctgagctactggagcggcactccaacgctgaccgagactacgcgcatgaccagatgtctaccctgtttagtaaagcggacggacgcaagcctgagcgcctgtataaggccgtcaaagctggtcacctgaccaaggacaaggccttgagtctactccctgctggtagcgtctgggccgcacgagtggagggactctaa

SEQ ID NO: 162183 - DNA, 1524 bp, Enterobacter cloacae
atgcgccatgcatctatccccgtagctgcagccacgacaatgtttttgctcggcgtttttatcatcaatttacaggtttggtattctgcacgggccgatagcctggcagaggcgcactacgtcgtgcggaacatgaatgttattcttaaagaagctcgtcatgcgactgagatggcaaagcaacttgccgagaatgagtgtgatgctgaagggcaatatcggctgggcaccgaggcggcattacagcctcacctgagaacgatcgttattctgaaaaatgatgcggtctggtgctcctcgttaccgggaaaccgcgtattgttggtcaacagctcagtgctgcctgagtcatcactgctcctcgtcccttcggccagtaccgtcaacggtcttccggttctcttataccagacaattcacgccggaagccggatcatcgttagcatcagcgatagccatatccgggatgcgctggatatgccattaaatggcgttgaatattccctgagagtaggcaatacccttttaagcctgacaggtgatgtgacggcggcagaccatacgaagaaagagatattaacggtaaaagcctctggttatcctttctcggtacaattcaactctccacctctttttagtcttaagagattattcaatcgagccggaggcgtggtgttattcctgctgataatatcgtctctctctgcttatattcttcaacgctatatttctaaggatgtttcacccgaagagtcactgcgcatcgccatttacagaaatgaaattattccgtattaccaacccgtcgtgagcggcaaagagggaaccttgcggggtgtggaagtgctggccagatggaaacatccacaatcagggtgtatttctcccgcatccttcattcctcttgcggagaaatccggtttaattattcctttgactcagagcttaatgaggcaggttgcaatacacatgaatgctattgcgacattgctgccggaagggtttcacgtagggattaacttcagcgcttctcatatcgttgcgcccacctttgttgaagagtgtctccactacaagcgcagcttcactcaacaggatctcaacctcgtcgttgaggtgacggagcgtgaaccgctcgacattgatgaacatctcgttaatacattgaatgagctacataataacggatttgccattgcgctggatgactttggtacgggttattccggcctgtcctatctgcaggatctgcacattgactacattaaaatcgaccagagctttgttgccagggttaacgcgaatgaggactcaaccctaatccttgattcggtactggagttggccaaaaaactctcaattagcatcgtggcggaaggcgttgaaactgaagagcagctcgattacctcacacgcaatcatatccggtttttacaggggtatttcttttacaaacctcttcctttcaaggaactggtcaaagttctcttgtcgaagccaaaagttaaggtcagggtggaataa

SEQ ID NO: 162184 - DNA, 2601 bp, Enterobacter cloacae
atgattgaaaatgacgtagctactgaaaaattactgatcaaaaaaagaagtgtgaaagatcttgctgattatattagaattatgtcaggcacatcacctaattattcattattccttggcgcaggggcatcagttacttcaggaataaaaactggatatgaattagttcaggaatggcgagaggagatatacaaacgccttaaccctgacgagtattcatctcctaaagaggcaattacatggttaacaaaaaatcatcccgattggtatgatccatcaaatgaatactcctcattatttgagaaaaaattcgatctaccttctcaaagaagaagatttgtagaattacaagttgataaaaaactcccttccattggttatgcttatttagtcgaattattcgaatcaaaatacctcgacacagtgtttactactaattttgacgacttaattaatgaagcgttctatcaattttcatctgatcgaccattattatgcgctcacgattcttctataaaaggaatttcaatcacttcatcaagacctaaaataataaaactccatggtgactatctttttgatagcatcaaaagctctttgagagagaccgagtctttagaaaataacacgcgtgaaaaactagatgaattcgcaaaggaatacggtctaatatttgtaggttatgctggtaatgataactcgattatggaggttcttaaatatctacttaaacaagatgattaccttagaaatggtatttattggtgtcgccgaaagaacgatcaaatatcacctgaactgttcaaattattaaatcatgataaggtatattgggttgagattgatggattcgatgaattaatggcggagttggttcatgaacttggctgtgaattgtctctaagcggagctcaaaaatccacgaagagagaacgaatgattcaaaactttattaatgatgattttagtttaaataaaaataattacattaacaatgatttaataaagcttaaaaaacacaccctgacacaagatatctcatcacttataaatgagctatcagaaaatgataacgacaatcaaaaaattcctgagcaagcttttaaaaacttgctattcattgacaatctaattaaagacaaaaaatataatattgctgaggataatttgaatgcattaattagagagaatattaacagtaatatgaagtcaaaatacctacagcgattaataaatatcaaagaggatcaaaacgacactaaatcagcgttagaatatagcgatcgacttattgaattggatgaattcaatcttaattacgcactctctagaactaatatcttccctgaattcatagataaaataaattatctaaagagcttatctgataaattcaaatatagcgtcgaccttaaatatcacctatgcaatatttcattgcgttatcttgaagaacatgatgaacacgaaggtataataacattctctgagattaagagtctattggatgagagtattcgattgagttctagtctagataacagagcgtggcgtttaaaatatgatacaattaaaattcagaacatccaaaatcacgtaaaaaaggaacagcacgagcaaactctgcaactgctaaatgaaataaaagaaataaaccctatacatgacacttacttatacttatattcatcttatgtaaacgataagaaagataaaactgaaacgcttaaatgcatcgaaattctaggggaggcttttaaagcctcgtcaaagtctaagaaaaagaaaatacttcgttatctatcaagtattcacttgggtttatttgaaattgaaagtgaggaagacaataaggaattaatggaaggttttatcgccaagtactctgaggataaggacacatcgaatattgctccatttataattttcaaagcaagatatgagatcggatgcaataaagacatagacaaaggtatattacttgcgaaagaagcgatggatagtatatggagacataaccacatccaaagcattgtagatatattattaattgataaaaacaatattcctttaattgatgagtttttagagtcattgcctagagacacatcagaaatactactcctgaaaattaagggcgaggttgccaggcataaaaaagattatatgttagcactgaagctttttgatgatgcgcataagaaaaaatgggactttggaacatacatcactgcaaaagtttacacattgttgcttgcgggaaattataatgaagcaatacgcattgcagatcatagcattacaaaaattaaagatgtaagggaccgtgatgtattgattattaatagagaaactgcgaaaaaacgcattgagcaagaagttaaaaaacatgaattacattcaattcttgctcaccatcaatctaaaggacaagtagcaatgtgtgcatttttcttattaggtgatgagttaaaagcgaacagacagctacagtcttgtatagaacgagattatatgaactacttctattttttagaatggcctgctctaccagaaaacgttctatctcgttttaatattgcatcacaaaaagttgcataa

SEQ ID NO: 162185 - DNA, 1695 bp, Enterobacter cloacae
atgacgcataatcaggtgctgggaatcgatctcgggacaacgaacagcgcggtcagcgtttggcttgaggggcggccagtgctggttacgaataaaattggtgaggttctgaccccttcagtcgtgggtcttgatgatgacggcaatatcctgacaggccgtcctgcccgggatcgtttacaaactcacccgcatctcacgcaggcgagctttaagcgtttcatggggacagacatccagcttccgcttgggctaaggcaatttcgtgcggaggagttatctgctctgctgcttcgccagttgaaagaggatgctgaagcctggcttggccaggctatatccgatgcgatcatcaccgttccggcttattttaatgatgtacaacgacgggcggtaaaaaatgctgccagcctggccggcctgaatgccatccgccttttaaacgaacctaccgcagcttctcttgcttttgggttactggaaaacagagaacaaaaatatctcactttcgatcttggcggtgggacattcgatgtatccattattgatatgtttgagggcgtggtggaagtccgtgccagcagcggagacgtacgcttaggtggagatgatttctcggatgccattctgcactggatgttgcaacaacacccggctctaaaagcagcccccgatacggtgagggccgagctgctggcgaaagccgaaagcatgaaactgacgcttagccagcatgcacaggccgaggtcactctatgctggaatgatacggagtggcgatggttaatgaatgaagagcaatttgcccagtgctgcaaaccgcttttaaatcggcttcaacatcctgttcagcaggcgctcaatgatgcgcgtttctcagtgcgcgatctggaccatatccttctggtgggaggggcgacgcgcatgccactcgtccgccagactgtcgcgcgactttttggtcgcttcccacgtcacgatcttcatcccgacgaagccgtagcccttggtgctggcgttcaggccggtatggtcatgtctgatgtcgccgtggaggatatcattctcacggacgtgatgcctttttctctgggtgttgaagttgccaggcggagttcggagcgtcttgagacggggtttttcctgccactcatcgaacgaaatacctttctacccgtgagtaagatggagacagtcaataccgttgaagataatcaacgcactgtattgctgaagatctaccagggggaggcgcgcaaagttcgcgataatatttttctgggtgaaatgagtattgatgtcccacctgcaccggcgggagaggtctctctggatgtccgctttacctataccctcgatggtttgctggaagtcgaatgtcagtgtcagggaaaccccgccatctcaagacggattattgaaaaagtgccggggcagatgagcgatgaacaaattgccgagagtctgcaaaagctcgccgcactcaaaatccaccctcgcgatcgtaaggaaaacgtcgcgctgttggctcgctgttcgcgactctatgaacggctgctgggggacgagcgagcctgcattgaccggcttacaacagaatttgagtgggctcttgagagtcaggagccgcagcggattgaacgttctgcacgagaggttgaactttttctcaatagctacgaaggggtcaggtag

SEQ ID NO: 162186 - DNA, 1335 bp, Enterobacter cloacae
atgagcatctggcaaactcttgatattgctcctacagaggatgaatcggaaattcggcgagcctacgcacgccagttaaaaaagaatcgtcctgataccgaccccactggttaccaacgcctacgggaagcctttgacgatgcaaaacgcttagcaaaggaaggcaaagagaaggatccacaacgtgttttagtcgatgaaccagcggcaatggttgatcgtcaggaagaaactgatgaacgcgtgaccgttttcttaccagagcgcgaagcgttatatacggaacaggaaatatctgctctggcttataagctcgtcaacgaagaaatatccggcattgcttctctcaagcatctctccgcccgcattaacgggcgaggaagtcttgaacaacaacggcttttcagtcaacgtcttgccgctgcactggctgaacaggctggattaactgaagcgcaacttgatatcgtggcggaaatgctgaactggcggatacatgattacgactttagccatatcatcccgctttaccttcaacacgccattaatcatcagatccgccaaactgaaatcctccgagcctggcagaaaatggaggcggaagggaagcagggatcatggcgggagaggctggctattaagctgctcagaagtgaacacccgaacgtacctttttggatacgattattgccgggtttgattgaaactatggcaacacgatatcaatacgtactgcaatcttttccggaaatcctcccccggctcaatccttttattctgcagttcctgcagagagcacgattaggcctcacatcggcggggcttttcttattggcattctggggttttcttttcagcgctattttaccctccactgggggtattaccctcgtcagtaccattacaattgcaacgcttattttctacctttacgtcagcgatatggtgttgataagcgcccattccagacctagattgctcagcgcttttttaggcattgagttcctgctttcactcattattattcagtggttctttggcggactctattttgctgctctttcggccattactacacccggtctggggccaccactcctgatgacggcgatctttttgctgctgtcggcgatagccgtatgggcagtgtggccgaatcgaaaagtaccggcgatccgcttgcccggaattatcatgagcaggctcttttccagtccatggcggatccttgaggtgatgaatttcgcctggtatagctttatctggcttttcattcattactttatttgtgctgcggttatggcggcgctgattaatcagtttagtgagagatga

SEQ ID NO: 162187 - DNA, 1788 bp, Enterobacter cloacae
atggctaaaaaaagaatagatataaatatttatttattgaaagaaaaatgtggtgggaaagagttttgggatgataaagagtttattgctaaaatatctggggccggttcgtcctcaagaaaaatatcgactcgtaagcatctgataaataaagaggggatagagggcgtactttatgttaaaagtcctataaataagactagtcctgaatggcttgaatttattcaacctgcattgggcgatgaagtgaacactaatcaatggaaaaatcaatctatttcagcattgttagttattcaaaaacattccagacaatttgctattgctttcggtcacggtcgacatttacttgaatcaagggtaattgaggatagattcggtattaaggttgtgcttaatagtgtattaccagataaaattagatcaatggatcgccaaacttttgaagcatcccctaaaattagtagagtgcaagctatcaaagcttcatctgtatcagattattcaattaatcctgagcaagatttattaagggctttagttggtgatacaaaggaaccatatgctgacttgtttgggaaggtaattgcaggaatagattcttttaaagcatctattccaacagagttaaataaacttaatgattttttatcattaatattggagcgctcaaagtctaaagattatttagataaaactgtagatggacaaccaagtgaattttcttgggttgaaaatttaactccggttaaaaataaggagcaaattgaacagttggaagcaatactatgtaaagaaatttcatccggagtaaataaaaatatttggttagctataccagaaattcttgagtggtcgggcttgagagggtttaagtataagaaaaatataacagatgaagaaatttatgaagtattagatcttgagttgtttataagtacctttgagaaaggtttttcaattgaagcattaaaaagaagagatgtctttgttgtttattcaaatgaagtgccggacaaatcgttccctgcttataaatgtctttattgcgaaattaagcagggtaatgaactgtttatattaaatggagggagttggtatcaggttgataatactttccaggatatggttgaacgatattaccgttctttgccaataaagaaattcgaattaccatttgtggaataccatcattctggtgaaggcgattataatgaatacatatgcaaacaaaaaaatagtgaatatcatatgtttgacaggcagttggttcagtatggagggagttatgacaaaatagaagtgtgtgatatttttaaagtaaagggtgaaaattctgtgggtgaatttatccatgtaaaacgcgggcgcagttcatcatcgttaagccatcttttttctcaaggttatgtggcttctactttaatggtaagggagtcggggtttgtaagtaagctaaatgaacagcttttaacaaaggatgttttggagttccctgtcaaatttgaagcaagaggctatgacgttatttttgctattgtagatggagcgaaggaaaaagatctcgacattccattcttcagtaaggtgacattgcaaaatattggtaaaactatttcatcctatggttatgtagttaagttaatgcatattcctgaatctgctgagtatcttgagaaggttacagagaaaaaacgacaagctgcagaggcaaaaaaagccaagcaaaagttacccacaaagcttaaagaaaagaaagctcgagtggttaaatcaaaagcagcctga

SEQ ID NO: 162188 - DNA, 1434 bp, Enterobacter cloacae
atgcgcttttcggaatatttcaaacttaatcgttctcaagcttatctagatttcgttgacataccactagatactgacataccagtttttctagaccctggtgctattaaatccttagattcgaattgggggcaagaacttacatctcacttgcaaagtttctttgagaaggttttaaaactaatcaaggttggcaaaaatgctgaagcacaaaaattgttagcctcgttgaatgagaggaatgaatttcatttaggatattcgtccgaaaaatctcgtggacatggttttggcgctggctccgctcattcggtttggaatgcactaactcaaagtaaggccgtcacaactggattgttaaaagatcttgaagatacagcgctactaataccaggaatcgggactgacatgatttctgatgcagtaagcaatattttaagaggtccatttataaaatacacacaagaaatatgtgaatattatggcgtaaaattaacgcccaatattgattctgggccaatatgggatccacatgaaggaaagtggtatagtgaatttgtatcattaccaatgacaacttatgggaaagtaatattagttcctaagctattggttagacataggttatgtttgcaatatgacgagttttataatcattatttattgccagaaatgcaagatgaacatttaagaaacaactcttccttggtagaggtattaaaaaatggcacgaggcgagtaactaaaaaaagtttaaaaaataaatatggaagtgataagccttctgtaattaatcaaaccttacaaaggcctgatgtatttgaagattataaacagcataaagaaaaaaatccatctgcaccattatcacatgaagttttcaatgagttagaggaaatcagtgacaaaattgacatatatccaatcctcaataaattaaaatcattaaagccgggtacaaaacaagctggggagtacgaagatcttattgaagagatattttctgtaatattctatccttcattatgttatccaacgaaacagaaaaaaattcatgatggtagaaagaggattgatattacttataataatgaagccaaatatggtttctttaattggctttcgcaacattacacatgccctagaatttatgttgagtgtaaaaactatacgtcagaaattgcaaatcctgagttagatcagttatctggtaggttctcaaggaataggggaaatgtaggtattctcgtttgtaggaagattgaggataaaaaattattcagacagcgttgtcttgacacggcaaatgatggcagaggttttatcctgtcaatagacgatgatgatcttgaaaaaatgtgtgatgaatatatgaacggtggaaatcaaaacttccataccttaagagatttgtgggattttttgattgattaa

SEQ ID NO: 162189 - DNA, 609 bp, Enterobacter cloacae
atgaaacctgaaaattacattataaaacttattggtgagctctctgaacccgcgcgtataagagtcggccgccaacgccaaatcatctcactcgatcaacttgaagaaccgatgacgttcattcttcactccggcatcgtcgccgtctaccgtacgagagaccagcttctgctgaagtttatcgaagccccgatgatcgttggcatgaatgaccttattgataccaatgcgggcttttatatgcaggcctgcggtgagattagatatgaaatcaaaccacgaaaatccacacttgaaattattaacaatcgcaatctttggcaggaagccgcctattcgtatatgtatgccataaaacggttactgcaagctcacgaaacttcggttgggttgtctacatacgagttgattcgtttaaaccttgtgtcactaatgaccgaaaaagaggaccttcgtctgtcgattaatgcctgtgactatatacaggaaaaaacccatctttcgcgcagtcgaattatgaagatcctgagcgatttgaaaacaggcaactatattaaaattgaacgtgggctcttaatggcaataaacaggcttccggataactactga

SEQ ID NO: 162190 - DNA, 558 bp, Enterobacter cloacae
atgtttaatctcaaatacgtttttttgtcaccagtagcatgtcttttgctctctgctggtatggtccattctgcttttgcagctgacccggttgccattaacgtaaccggaacggttgtcgcttcaccttgtacgattgatgactccgccgcctcgggcttaactattccgcttggcacattgcaaagcgccgacctcaacgcagcaggaagtagctcagcatgggtacccattaacgttaagtttaaaagctgcccggcgggtacctcaagcattaccgcgacattccacggaacagctgacgatgacgatgctacaacactctacagcaatacagcggtcgatgacggtacaaacttagcggcgaaaaatgtcgcggttcagctggaaggtttggatagcgaaccttacggcgatggcaaaacggcgaccatcgacattgcttcagcaggtgcaacccccccctttaaaatgcaaacgcgtgccttcagtaaagccggtggcgtgacgccaggcagcattaaagccgccatcaccatgtcgttcacctataactga

SEQ ID NO: 162191 - DNA, 675 bp, Enterobacter cloacae
ttgaaaaaaatattatctgcacttcttagctgtgttatttcgtccagctgtttttacgctaacgccaccgttaatattggcggcacacgtttgctttatgacggtgcgaagaaagaagtgtcattgagcgtacgtaatccggatagcacaccttatttaatccagacggtggtgagcaatctcaacgacgatgcgcaaaaaccgccgtttgtcatcaccccgcctctttatcgtctgaatgggggcaaggagaacctgatgcgcattatccttgcaggtacgctgccgcaggataaagagtcaatgtactggctgcgcgttaaagcgatcccttcagcaccgcgtgaaaagaatacactgcagatagccgttgctaccagtattaagctgatctatcgcccggatgcgctaaaaggcgctgatgtggaaaaagagagcgaaaaactgagctggcggataaccggtaaccagctggaggttaaaaacccgacaccgtatttcattaattttaatgaaattacagtggccgggaaaaaattatccaatgtcacctgggtagcaccgggaagtaccgcttcgtttaccctgcctgcaggtgtgaatggcggaaatatccagtacagcgtcatcagcgacttcggcgctgtcggcaatatgcactctcattcagcttaa

SEQ ID NO: 162192 - DNA, 549 bp, Enterobacter cloacae
atgaaaaagcaagttttggctattattgccgcgtcctttatcgctggtactgcgtttactgcacaggcagcaagtacgacactgacggtaagcggtggcacaatccagtttttggggtctgttgtcaatgcgccttgctctgtgagtgctgattctgaacgcggtatcgtgattcttgatcaggttactctggacagcatgggtgctaaaggtgagacctctggtcaggctaaggcgttcaatatcagtctggaaaattgcgatgtgaccacctatacaaacgcgacagtaaccttccatggccagtccagtccagaccaggctggcgtgctggcgaataccgcgggttctggtgcggcaaagggcgttgcgctgcagttgtttggccctgatggtaacaaactggacgtggaaaaagagtcctcgaaacaaattctgtctaccggaacgaataaaatcccgatgagtgtggattacgtgacgactgctgatgccgctaccgcgggggcagtggaatcagtagcaacattccaggtcacctattcctga

SEQ ID NO: 162193 - DNA, 537 bp, Enterobacter cloacae
atgtttcgtctgtttttaatgataattattacaccgttactcagtttctttgcttgcgccagtagttctaataatctgacgggaggcgatgtgcatttttatggtgcagtggttaatgccccctgttccatagaagcacaaagtcttcatcaaatcgtcatgatggatccagttttgtcagcaaattttccgtcgcctggcagttgggctgcaccgaagacttttgggatcaaactgggtaactgcagtaataagctatttcagtttgccacagtggcttttacgggtacaaccgatgcgaatgacccacaggtttttaaggccgggtttggcccagatgcagcgaaaggcatgggaatcggtatttttgacagtaatggaaatttagttattcccaactcagcaccactttcacaatatccgattcttgatggagaatccgttttatattttaccgcaaaatatcggtcggtttctgaaaaggttgtagcaggcgacgccagtgcggcggtaaacttttcagtaatctatcagtaa

SEQ ID NO: 162194 - DNA, 708 bp, Enterobacter cloacae
atgaaatctattttgacattatcacactatgtacgcgttttgttaaccgttgttggtttaatggcttctgtcatttccctcgcattgtcaaataacgctgctgctgcgggtgtagctttaggggcgactcgtgtgatttatccgcaggacgctaaacaggccagtattaatgtgactaacagcgatctgcatgaatccttcctggtccagtcttgggtatcagacgataagggtaataaagtgccagcttttgtcgtcacgccgccattatttgtattaaaacccggtaaggtcaacatcttgcgtatgatctataacggcccagctctgcctgaagataaagaatccgttttttatctcaataataaagcgattccatcgctggataaaaccaccctgacgggtaactccttgcagattgctacccagtctgtgatcaaactttttgttcgcccggcgcacctcactgttaagccagtcgatgccgctgccatgttgcgttgccagtcagaaggcccaaacctcactatttctaatccatcgccttatttcatcaccctggtcaattttactgttgccggtataaaacagccgaacatgatggtgccgccaaaaagcagccagacgatcaaaggggctggtgccgtcaaataccagacgctgaatgactacggcgcggtgaccgctgagctgagctgtaaagcttaa

SEQ ID NO: 162195 - DNA, 2634 bp, Enterobacter cloacae
atgggtatccggaaagaaaaacgcatgttatcagtagtgcgctggcgcatttcgccgttggcgctgatgattggcgccagcctgttttcaggctgtgtactggcggatgagtattttaacccggcctttctgagcgacggcaaagggcaagtggccgatctctcgagctttgaggcgggtggcggccaggcgccaggcacctatcgcgttgatatttacctgaataatgattttgtggtcagccgtgacgtggaatttagggcacaaaaagaggttaatcccaacgccaaaactgtggatgacacggggttggtggcatgtctgtcagcaaaaacgctgtcagatatggatattgaacttaacattcctgacgataaaaagcaggctgctgacgggcaatgtatcactattgcttccctgattgacggcgcgacagcaagctttgattttggccatcagcgtctggatctcagcgtaccgcaggtggcgctgaagaacaccgcgcgaggctatattgcaccagaaaaatgggatcagggcattaatgccctgctgatgaactacagcttcagcggatccaacagcaaagatcagagtggtaaaagcagcagcaattttctcggcctgaacggaggggttaacgttggcccgtggcgctatcgcgattactctacctttaaccgtaataccagcagtaatgggcaaacatcaaccgagtgggagcacgtcagcggctttattgaacgcaccattatctctatgaaaagcgagctgacagctggagatagctatacctccggtgaggtcttcgacagcatcagctttcgcggcgtacagctggcttctgatgacaacatgctgccggacagccttaaagggtttgcgccaacggtgcgcggcattgctaacagtaacgctcaggtcacgattaaacagaacggttatatcgtctaccagacctatgttgcaccgggtgcatttgccattaacgatcttttcccgacatcttcgagcggagacctgatggtcgaagtcaaagagcaggatgggaaaacacaaacgtacagcctgccctactcggcggtgccgttgctacaacgagaagggcgtctaaagtactctcttaccgccgcgaagtaccgtaccagcaacgatcaacaggatcagactccgtttggtcagggtaccctgatgtggggtctgtcgcacggcattaccctttatggcggcacgcagttctccagcaattacaaagccgttgcgttaggagcgggggtcaatatgggagactggggcgctctgtctgcagatatcactggcgcgaaaagtacgttgattgacgacacgcagcataccgggcagtcgctgcgcttgctgtacgctaaatcccttaacgactttggcactaacttccagctgttgggttatcgctactccacatccgggtattacaccttcgcagacactacctataagcatatggatggttataacagcgatccggagaacgaagataccgatccgggcaatgaccatcctcactggtatgactattacaacctttactacaccaaacgtggcaagttgcaggtcaacatttcccagcagctgggagaactgggttcattatatgtgagcggtagtcagcagacctactggcacaccgagggtaaggatacactgttacaggtggggtacaacacgtcgtggcacgatatcaacctcggtctgagctacaactacagcaaatcctctggccagccggaggcggataaaatagtcgcttttaacgtttctctgcctatcggcaagtggctgtcgccaaaagacacgactacgccaaataacgcctttgccacctacagcgcaaaccatgacaaccacggtagcgccacgcgtaatgccggtatcagcggcaccctcctggaaggtaacaacctgagctacagcgtgcagcaaggttttgccaacaacggagcaggcaatagcggcaatgccagtctggctcatcaaggcagttacggcagctctaacatcagctacaactacagcgataacggtgattcccaacaggttaactacggtatctctggcggcgtagtcgcccatcgtcacggagtgaccctcagccagccgctgggagaaactaatgtactgattgaagccccgggtgcgaaccgcgtgcgcgttgcaaatgccaccggcgtgaagactgactggcgcgggtatgccgtcgtgccatacgccaatacctaccgcaaaaaccgcattgcgctggataccacaacgctgggtgacaaagtggatattgatgatgccgtagttgacgtggtaccgaccaaaggggcactggtgcgtgcttcatttaaagcccatgtggggattcgtgcactgttgacaatgctgcacaacagcgagccgattccgtttggcgccaccgtcacgcgcgacgatgaaggcacaggcagcattgtcggggaagacggtcaggtctacctctcaggacttgcaccgaagggcaagctaaaggttcagtggggtgagggggccgatcaggcttgtagcgtagactatcaactgcctgtagatgcagaaaacgccgctattacccagatgaacgttatctgccgctaa

SEQ ID NO: 162196 - DNA, 498 bp, Enterobacter cloacae
atgatttttttgctgccttcaggcgtgtcggctgcggactcaacgttggcggtcaccggcaacgtgatcgccagtagttgtgaggtggatacgggaagcgaaaatcagaaagtgaagatcggcaccttttccggcaaagatttcccgtctgtgggaagcacttctgcatttaaggcgatgaacattaatctctcaaattgctacgacaagctgacgacgattcaggtgacattttccggcacgtctgatgtagataaccctacattattggcggtgacagataacgggactggtgggacggtggcaacaggggttggcgtagagttactggacaacagcggtaaaaccataccatttaacgaggaagccccacagacgtttgaactggatgcaggaaataacacgctttcgttcctgctgcgctacaaatctacacgttatcccgtcactgcgggtgaggcctcggctgtgatgtatttcgatttaacctatcagtga

SEQ ID NO: 162197 - DNA, 528 bp, Enterobacter cloacae
atgacttctggacaatggaaaggtgtgattattcttctgatggtgttatttatttcggcggctcaagctcatgatggtacggtgagtatttctggaaccattcaggataatacctgcgagctggcaccggattcaaaaaataaaacggtcaatatgggggctgtcgcagggccgcagtttagacggattggggatatttctccggctaaaccttttacgcttagcctggagaattgcggcccggcggccagcgaggcgacggtgacattttcgggcatggcagatacgcagaaccctggtctctatgctctcgacgcgggtgctgattcagccagcggtctggctctggggatttatgacagtaagggtcagcgcatcgcaccgggagaaaccagcgcgggcgttgttctgaagccagggcaggcttcggtgacgatggatttttcagcgagatatgtggctgttttggatagtgttatggtgggaagtgcgaatgtgacggtgacgtttgttgtaaattataattag

SEQ ID NO: 162198 - DNA, 1059 bp, Enterobacter cloacae
atgggcttacaatctcgtatgaaatactgtgttttattgatgttgttatttatttcgttctcacagagttgtttcgctgtaggatcggatgaaaatgtatgcaccagcaatcccgtatctgtcgtcctttcgggtgatgttcattttcaaagggacgatcctgttggtcaggaaagtgattttataaatcctttgatcggaacaacattgacatgcaatggtattctggataccggaggggctgatagagatttatggttcaaatttttagtcgtacctactcagagtgtttctggatttgatggtgtttttgcaacaaatcttgccggagtgggtataaaatattatttcactattagtgatttttctggtttttcagtatgtggtgcagaatcttcacaggattattttaggaataataattcatattacggattgaaatgtcattgggtgcatggtactcaaaattcctcagtcacagtccaaataaaagcaaagttggtaaaaatagcccagtctttaaaccctggcgctcttttgactattccttcagtaattaacacaaaggttgaatataattacacaggttatacgaaaaaaacctcagacattaatctgacatcatcagtgaaggtcttttctgataaatgtacgttgatgaatgataagttgctgtttgatatgggaaatgtcagcgttgataaattctcatcacaaataggcttttcaccggacaacagtgtcactcaaaatatggtacttagctgtgatgcaaatgcaaatattaatattatgttgactggggttaaaaatcctgactcatctaaagattcagtgttgtctttaagtaatcaaggtcagcccggagtggcggatggtgtgggtattgaaatactgtatgatggtcagtctctggaattaaataaactgctaaaccttatgcgatctaatggaggacaggaaatcttaccaataaccgcccattattatcaaacgaagagtcaggtaaaacctggcaacgctaacgggattgcaacgctgaacctaacctatcagtaa

SEQ ID NO: 162199 - DNA, 339 bp, Enterobacter cloacae
atgcgcgtggcccttgagttgccctttactgaacactgctggccgtttgggccggagtttgacgtgtttaaagtgggcggaaagattttcatgatcgtcgcggtcgcgcacgtacgaccgcacgtcagcctgaagtcagacccggagaaatcgctgttaaatcagcagatctatcgcgggatagagccgggctaccatctgagtaagaagcactggatttccctttacggcaccgacgacgtgacgccggaactggttaccgacctcattcatgattcctggaatctggtggtggataagctgccgaaaaaagaccagaagtggatccgtccggtctga

SEQ ID NO: 162200 - DNA, 438 bp, Enterobacter cloacae
atgaaaaaagaaattattggtaaggtattgacctcagcattattagtaagtgcaaccttctctgcatttgctgctgatacagttgatctgaaagtaaaaggggtgttgggtaatacagcctgtacaccaacgctgagtaatgatggtactgccgattttggtcgtattaaaatgagtgggctcagcgctactgatgtaaatcagttaggtaaaaaagaaatcacattaacgattacatgtgatgcagctatggcagtaggtgtttcttcaatggatggtcgtagctcaagcctgcaagcactcctgattactcagggtacgagcaataacgttaacatcaactctgctgcctgggagtttggtttaggtcagacaacgggaggcgttaagcaggggcttataccattacaaccgctaccacagatgcagcaggcgtaa

SEQ ID NO: 162201 - DNA, 717 bp, Enterobacter cloacae
atggtgaaatcaatgtctaaccgtaattatcctttcagtttgttattttttattttgcttggtgttttaaatactccttccgctaaggcaatgggattgattccagaaacgtccatgctattcatcaatgaagaagcgaagggtgggagtatgaatgttaaaaatagcgatgaaagtccgcagcttctttataccagtataaccgagttgcccggagaaaaaggttttcacctgattgcaacgcagccagtaacgcgtgtggagggcggcgatactcagcatgtacgatttgtattgcaaaccgatgcgccattgaaagtggaacacatggcacgcgtcgtttttgaaggaattccgcagaagaaggtaggaaaagacgctgttggatttaatatccgtcaggatttaccggtgattattcatccgtcaggcatacctgaacgacaagatgcatggactctgcttacctggaaagtgaatggcacaactgtcactatgcagaataccagtccatatgtcgtacgttttcagccacagagtgtagcattaccgtctaaaacgacgatcaaatttccgcgcagctatatattgccaggtcaatccatagtggttgatacgggtagatctctcgcgggagatactcaggtcacgttcgcgccggtcagtcgctatggtgtgcaaatagaaaattatacagcacaactgaacgcacattaa

SEQ ID NO: 162202 - DNA, 2475 bp, Enterobacter cloacae
atgaaacctgaaaatataacgtttaaaataggcattgtgtgcagtgtactcctctgtgctgcgatcgatgcaaaatgttttgctgcagataacatggctgaatttgacaaagacgttttgaagacacgtggtcttgatagcgctttgagcgattactttgcggataaagcgaaatttgcaccaggacgaagcccggttactctgtatgttaatggaaaaaatattggtagcgtgactgctcgatttgataatgacggtgagttatgcgtcgataatgatttcctgacagcggcagggctgcagatccccgatgagataagtcagttttttaccgggcaagaaaatcaggatgctaaagctattccagagaaaaaggctgatacctgttttgattataaaaaatattatcctacagccattattattaaacgccctggtcaagagcgtctggacctcattgtacctgaggaggcacaagtccatgacaatatgcttatcaaaaactatcaaaagggcggagcagcaggtctgctgaattacgacgtctttacgactaaaaatacctacagtaatgatcaaagtcattatactcaggcttcggcggaagaaggtcttaactttaacgactggcttttacgcagtcgtcagattttcacaaataatgatggccagttgagtaatgatgcgctgtatacctatgtacaacatacgtttgttgatcagcaagcattagtgcaggctgggcagatctacatcagtaataccttattttctggctccgcaatttccggcgtgcaaatggttccagaagcaggtcttaacgttaactcgggttcaggtgtgacggttaagggtattgcccagggtccacaagcgcgtgtcgaagttcgacaaaatggcgcactggtgtattctacgctggttcctgctggtcctttttcgctaagtaatgttccgattaccagcgtaaatacaccgcttgatgttaaggtaaaagaaactgatggctcagagaaccattatgttattcccgctgaatcattgcatcctaaccagctaggggggccacaggggttctccatcgccgcaggtaagcttcgggatatagacagtaacgatgaattgccttatctgctgactgcatccaaaggctggaaaatttcaccctggatgaatgtgagtgccggtggattgacggcaacaaaatataatgccctggctttctctgcggatgtttcacctgtgtctgaaacgcttctgtcttcggtcattaaagcttcacaggattctaaagatgataataaaggaacggagaccacgctcagtgccagttattcaccaggcaataatatttccttgtctgccgccgcgtcgcatttcacctcaggttatcgtgaattagccgatacactgcaggatgattttattcaatatagcggtcaatacagcggtaacgtgggatggagtaataacatattaggttcatttaatcttggatacagcctgaataaaggcagtaagggtgaaagcgacacgcgttacgttacggtggcatggggcaaaaccttctcgcgattcagcataacggcaaactggcaaagccagttaaaccgcgatgacaatgacaatgacaatcgcaacaccaatgctgatatgttttatgtgaatatgagtgttcctattggttctcagcgtgtcggcgcgtatatgcgcaaacaaggtgattccgagcacagtggattgcaaagcagtggaactattagccctgaggtctcttattccatcgccgcggagcgcgacatgtctgacaatgaaaacagttttgatggcagcctgagcgacaatttgcatttcactcaactgggtctcaatgcagggacaacgggtaatgacaacaagaattatggtgcaagactgagtggcggtgtactggcccattccaaaggcgtgacattttcatcgtatccaattgatgacaccttcgcgttagtgtcgctggatgaaaaagtgagtaatgttgaaatatcgactccgtccggtgacgtttggacagatcgctgggggcgtgcggtgatcccttcactgcctgcttatcataatgctcgcatcgaaattaatactgaaaccttacccaaaaatatcgatgtaaacaacggtatttcaatcgttgcgagtggacatggtgccgtgagccaggttcattttggtgtgatcaatacccggagaatcatgttacatgtttcgcgccaggataacggaatattgacgaaagggagttctgtggttgatagcaaaggtaattatgttgccactgcgattgaagatggtctggtatttttaagcgatgtgcaaaatttaccggccttgtatgcagttgatgagaagggaagacatcaatgtcagttgcatttcaaattgccagaaaaacaagaccttaataacttctatgaggatatcaccggagtatgccagtga

SEQ ID NO: 162203 - DNA, 561 bp, Enterobacter cloacae
atgccagtgagacattatatgaaatatatcttggcaggactgatgcaattggtctgtatgccatattcacttgctgattgccaggtatctctgtcacagcatgatgttaactatggtcaaattaaacctgacgatatcgtcaataccgttaaacagtggaatgcgttagcgcaacgagatgttcatctcacggctttgtgtactgaaccacaaaagatggcgctgttctttagcggtaaatcgggagagcaaggggcatttattttcggcgatcggagtgggctgttcattcaggccactcaggccacactggatgggaaaaatgtttcgctgagccatactgtttcccatgacccgtttgttattgcagggcaaagcggggatgatcatctcgtccaggcgcaacagggattgattcctgtccagggttcgcagattctggctggtaagcagttcagcgttacgctcacactcaaacctgttcttaacaaaaatgagcttcatgtcagagataagcatgatgttatgagcgatatacagattaatgttgaaacggaataa

SEQ ID NO: 162204 - DNA, 1437 bp, Enterobacter cloacae
atgtggccaacattagatgatgctgcaatcagatttaatgttggcgactctgacaaacgtcgttcggaaagaccaaggcaaataatcaaagaaaaattcacaagtaaagtaactatatctgacctacctataacgcatgaggtttatacaataattgagtcaaacagatgttccactgtagaagatacaacaataaaactaagggagagaaatttagtcccaacctcatttagcataaagggaatattaaatttactgcatcacctgaacgtctgtgaagaatataatatatacactaacaaacttcttccttcaagcaggcaatcaattgattctgaaacaaacctttatatattaaaatcatcagaactcccttatataaaaaaagccacacgtaaaataagaacttccccagggctggttggcatatcaaacttttcaactttccttaaaaataatgaagagtgcgtgacttacaaagaaatattattagatataattcgttctcgggatgacatttggttatcgaatattaatggcgactattggtatatcgtagaagaaagagaaaacactctaattaacaatttagggaaaattaaaaacatcgctgatgttgttaatattgacacgctttctattgtactattgaatgcttttaaacgaagaaccccacctaaaggtgctatatatcctcccgcaaatgttttaaaaaaatatattgaatcgtctcggttcactgagtttgatggctatgctgtaaagttaacattagcagctgctaacttaagagatatagaaatcgatattattaattacatgcaaaataaagaggccattagtttcgtagaggtcaagtcttttcttgagcggaggggttatagcaaacccaacatagataaagcaatactaaattcaccacttatttttgttgataaatccattcggaaaagttacacatacaccttgttgcaaaatgaatattttgcaagtgaaatcgccctggatagatatgaggagtataaatgcaaattattagcagcatgtgccgagggaacggatactgaaactacaagcatatcgcgaaaagagcagcgattattgagaagttggctttttgaaaataaagaaagtgaaacttgcgctatttgctcgaatgtattttcagtgaattctctggtcgccgcacacaagaaaccaagatcgatttgttctttcaatgagcgagtggatcctcatattgttatgcctttatgtaaatacgggtgcgattatttatatgagtgctgctatgttactattgttgatggtgttgtaagtgataatatttcactcagactatcaaaatttgaatgtgattatattgaaagaattagaaataacattattgacaaacgctggcttaaaggtgatttaaattacttccgaaaaaattaa

SEQ ID NO: 162205 - DNA, 132 bp, Enterobacter cloacae
atgcgtcatcagaactggcatcatgccgacatcatcgccgcactaaagaaacatggctgcgttgtcccgaaaggctggcctttcctcatccacactggcaaacgcgcttacccgaccatggcccaaaggtga

SEQ ID NO: 162206 - DNA, 714 bp, Enterobacter cloacae
atgagagaaatagagcattttaccgatgatcggcacaaagcctggtgtatccattgcggttcacccattattgaccgtcataccaacagagatcacgtcccgacaaaagggttactagaaagacctttgccgccccatgtaccacaagtcgaagtatgcaaggaatgtaataccggcttctcattggatgaagagtacttcgttacttttctgagttgtgtggaggcaggaagcacagacccttcagcgcagagaaatccaaaaatcgggagggcacttacacgtaacccatccctggctgctcgactacaggcagctaagcagattacagtggatgaatatggcagtcagcagattctttggctacctgaaatagaacgcatacatcgggttattttgaaaaatgccagaggccatgctttctacgagtacggagagccaatgttggacgatccagtctctgtaagtgccgttccgctgatgtctatgaatcaaaaccaacgtaacgatttcgaggaagccgttggcccctttgctggctggccagaagttggaagtagaatgatgactcgtgtcatgacaggtcaagacttagatgatggttgggttaatgttcaagatgacatctatcgatacgtggtatttcaacaaggcatactgacagtccgctcagtcatacataactatctcgccacggaggtagtttgggaataa

SEQ ID NO: 162207 - DNA, 705 bp, Enterobacter cloacae
atgtattacagcaaggaaattatagaaagaattggatccgataaagatcttgcattaaggctcgatcgcgccgtcgcgggagtaaaggacggtgccatcgaatatttaaataatcttggtgatgctaccacgcgattgctttattatacgtcttgctttacagacaattatcaggatgtctgttcacaattgcgttcagaagacaagaggttcatttttggtgttgtagaattagttaaacacagagatttaatcttccgcatggttaagatatatttagaaacaatgcttaaaaacagaagtgaagatgagaaaaaaagcatactccagaaagtcatacccttcacaaccaattattcagttaaacaagtttcgaaattcggcttaatttatgctgttacaaagtacatatgttatagcaatcaaatgaataccgcagtgcaaagggtgttaatgacaaaagttgctgggagaacgggtggcgtatttttagtgttaaacggttatgcaatgattcaacacgctgccgacagtgccaataatcttaaaaaaaaccttccgttattttaccatgcattatatatggaaaatattgaaatgatgttctttctcatcgaacccgtaataatgaaagctggctatctgaatgtttatacagcgtcagacaatgatattacgaatgcatttataaaaatggcccaataa

SEQ ID NO: 162208 - DNA, 207 bp, Enterobacter cloacae
atgcgagaattcattaagagcatcattaaacttattatcgaagactggaagaatgatttgaaagcatatggcacaatttttgtcattgtgatcttatcaacgataccagctaccttcatcgaggatgaccaaaccgcaatacttatcattggggctattgttgtgattgttttttatatagcgtacttctacgagccaaaaggatga

SEQ ID NO: 162209 - DNA, 399 bp, Enterobacter cloacae
atggcaggacaatcagacacggttcaacaacaggataccctgaatcgttatttactgtatttcccacgaagtaaaaccgtttcaccggatgttcattcgttttgcggggaagaagaactcagtaagccctaccgttataccattcgcttcaccagtccaaatccgaacgttgcagtcaaagacgttctgaaccagatggctgaatttattctgcgcgcgcctgacccgaaagcgaaatcgacctggcacaatcaggaatcctggttgccggtgcgccagattaatggcgtgatcacgtcattttcccgtctgaagtcgtccgctgatgaagccctgtatgagtgcgtgctggagcatgaactggcgctgctggatcagaactaccgttcggccgtgtag

SEQ ID NO: 162210 - DNA, 363 bp, Enterobacter cloacae
atgttaaagatgttcgccaagtacacttcaatcggcatcgtcaacacactcattcactgggtggtttttgccatttgcatttacgtttttcacagcagtcaggcgatggctaactttgccgggttcgtttttgccgttagcttcagtttcttcgccaatgccaagttcacgttcaaagcaccaaccaccacaatgcgctatatgctatatgtcggctttatgggttcattgagtgcagcagttggctgggccgccgataggtctgaaatagccccgatcgtaactctggttctcttttccgcaatcagcttggtctgcggattcttctattcaaaatatatcgtcttcagggataagaaatga

SEQ ID NO: 162211 - DNA, 1602 bp, Enterobacter cloacae
atgactaaggcacataaaaggattttagcttccttatttatgtttatattcacgacatcaatatttgcaatgtatgttggtgtgaatgtcctggacttcaaaagagtcggatggctgatgataggagatccggggcagagttggtcaggatggaatttcttccgtaacactccattgttacaatggcctctgggtttaaattataactatgggatgggtgttggtggatctatagtctatacagactcaattcccattatggcgtttatattcaagccttttagtgactttcttcccgcaagatttcagtatcatggtctttggatgtatctttgctttttgcttatgactttttcagcgtggcttattcttcgtaagctaactaagaatgagatattttctgccgttggatcttgtttcttttgtattgccccaatttttctaaaccgcgccggaggtcacttcgcattaggtgcgcaatggctaattttattcgggttttatctatacattcataaatcattttgctttaaacgatgggccttacttttagttctagctacgacaatccatgcataccttctaataatggtgtatgcggtattttcatttgatgtattaaataggttcctgtcaaatagactctctttaaagaaagcttttgtattttttgtggcttactcggcattgatatttttcacaatgcagtcaactgggtactttgttataaagggttcagacccataccctggattcggctttcttaatatggatcttgccggttggttcaatcctggagatcagcgatattcacatctgattttgagtcatggtagtcaacaagctaactttgagggtataaattacctcggcgttggcatcatcatccttcttttatttatgtttattgactctatattaagaaaagatttagatattaagagaataataaaatctccaatcctatacttctgctttttcatggctgccgtttctataacttatagaataaacttctatggatttaatctcattgaaataccaatgaatgatttttttctaaagataggtgggatttttagatcttcaggaagatttttctggccggtaacaatgatcttgatgttgattgttctgacctatttttcaaagagatctaaaatctcaagctatatattaatccctgttcttttaatatcagtagctgatgaaagcaactttttcaaagctgtacgagatatatacacagggaagccgtacagttctcagatgctgagcagagaatgggaagtgatatccaaagggaaggatacaatcatagctattgattatgacgagttcagcctaaagcattggctgccatttgctgagtttgcttcatctgaaaagatgaaacttaattttgggtattttgctcgagctgacatggcagctatcaataataataaaaagtatatagatgaaattaaaacagagggtaggctaagggataatgagatttatattgccacaaatgaagattggcttaaaaagccaatttccatctatggcagcaaactcaacataaagaaaattgacggttatttcgtcgcttacctgtag

SEQ ID NO: 162212 - DNA, 2943 bp, Enterobacter cloacae
atgtcggaaaatttaggtggtattgatatcaccatcgcattggataccgctcaacttcttgacggtgccaaggatgtgcagaacgcgctgagtcagatagacagttcatcaaaaaagactggccaagaactcgatgggcttgataacagcacgtctcaaacagggtccgcgtttactgagcttgctggttacgccaactccatggacaaccagctgcgcaagctgaacaccaacgtgagcggaatcgcccgcgcaatggaagaggcccgcagcggtaccggcggtgctagcagtgaattcagccgtgccgaatccatcatcgaggcgctgggtaaccagttggctgtgctggacgaagcgcaggagaatggcgcgcgtagtgccgcagtcctggctgcacagttgcgtgcagggtcgaaagccaccgacgaagaaaaacagaagatcggcgagcttactggtcgcctgtatgacatgaagactggcgttgaaaatggcgcgaagggcactggaaactggaaaaccagcatgcagcaggccgggtaccaggtacaggacttcatcgtacaggtgcagggcgggcagtctgcgctggtggcgttcgctcagcagggatcgcaactagctggcgcattcggtcctggcggtgcagtcgttggcgccataatcgcccttggctcggtactggctggcgtgctgattacttcgctcaatggcggtaaaaacgccatggatgcgctgaaagacgcagctgaagcgatggataaggtgatcaccatttcctcgcaaggcgtggccgcgctttccgacaagtatgctgccctggcgcgcgtaaatgccgacgtggctactttgctgcgaaatcaggcgctgctcgagtataaccaggccatctcaaagattcctaaagccattagtgacgcgtctgatgctttcattacgttaggcgatcgcgcactggcggcggttggcggcgcgtctccaagcatcaagaagttcaacgatgagctttctgcgcttggcgttaccaccactgactggagccaggccattcagcaggccaacagtcaggggcaatatgcctctggcattgtgaactctttatcttcaacggtcagcaccctttcttctcgccttggcatcagcaagcagtcagcgtttgatctggcaagagagctatcagacctgagcaataacccgtcaccggaagcacttcaggaactggcgaaaaaactccaggagatgcagtcctcatccaaagatgggcagtcagccattgctgaactggcaggtaaacttgtcgatctggcgagagaggcagccaacgcgaagatcaacgtagacagcctgaataagtccacggataaccttaccgccggacagaagaacctgatcaagcagtctgagcgcaacctggcactatcgaagctccagggcgaggcccgcgcgcggctgcaggcgcaatacgccgctgaagatgccgggtttgcgaaggatgatccgcacgccaaacagatggaagatgatgctgctgctacgtacaaaaatacgcaggcgcagaagacgcttcagtctgagcagaagaagggggcttcccaggctgattctattgcccagaagctggcgaacctcaagcagcaatcggagcttgccgctgactcaacgaataagctgagccgtgagcaggccatcctcgctgcacagcagtcgctagggaaaggcgcaaccaaagagcaaatagctcttgccggtcagtatgcggctaagaaatgggatacagccaacgctattaaggcagaagctgcagcgcagaagctactccctgaagcggctgagaacgccagttacaaacaggatgttgaggacctgaatacggcgctggctgcgaagaaaatcagtcaggagcagtacaacgctacgtcagaacaacttgagcagcaacatcaggttaatctggcgaagataagggcgcagaaaattgcaaatgtcacgcccgtacaggatgcgcaaggaggaattgacccagttcagcaacttgccaatcagcatgcaaccgaattagccatgattcagcaattcgagtctgataaaggaaagctaacacagcgtgggatagagcttgctaatgcagctaatactcaatacgaacatcaacggatagcagcgcaatgggaaatatggaaaaaccaaaattctgcgaatgagttattggcagccggatttgactctttagctggcaacgcttccaacgctttcactgggatcctaaccggaagcatgtctgctcaggaggcaatgcagtctctcgcaagtaacgcgctgaatagcctcatcaatggctttgtgcagatgggtgtagagtgggttaaatcagcgatcactggcagcactgcccaaatcgctgccaccacggccacaacctcggcagcagtagccggtacagcgacgacaaccgcggcgagcgtttcttctgcagcggctaccactgctgcgtggacgcctgcagcaatcgtcgcatctataggttcgttcggtggtgctgcggccattggtatcggtgcagttattgccgccatggcgatggctggtggtatcgcaggtaagcgtaaaaatggcggtcctgtatcagctggttcgatgtaccaggtaggcgagggcggcatgcctgaaatctaccaggccagcaatggcagtcagtacatgatcccaggcgacaacgggaaagtcatcagcaacaagcagatgaattccggcgccggcggtagttccgtgcctgtcactatcaacattcagaactataccggagcaactgtcgacgcgcaggcgacccagaacggcaatggagtgacgatcgatatgattgttgccgatatcagccagggtgggcgcatcggccaggctatccagcaaaatcaccaggcaccacgcaaagcaaggggataa

SEQ ID NO: 162213 - DNA, 177 bp, Enterobacter cloacae
atgctaaaaatctatgtactcacagggctggtaattggcgtagttcaatacattatgctgccaaaaatcagaggttacagttacgcgactgattttattttgttgattgcatttaacatactggcttggccattaacgccagtgtttattttaatagattacctaagaataaagtag

SEQ ID NO: 162214 - DNA, 183 bp, Enterobacter cloacae
atgaagctgtcgctagacgatgaaacatatgcaattttacgtgaagagtctgatcgactggggattcgtgttccacagctgatccgcaacatatgccagaacctggcaaaacatgttcaacaacgcaacgaacaacaaccgcacccagcagggagaaacaacgatgggcaacaaaaaaactga

SEQ ID NO: 162215 - DNA, 189 bp, Enterobacter cloacae
atgacgagcaggcacagcagcaagaacacggacagcaatcccctgatgtgtcccccacggcgagtgaacctgtgcaacaggctgatagtgtggcctctgcatctgccgaggatgatcctgaacagcgatctggcttttcacagcctgctagtgatagcagcgatgatgtttccgctcatgatgcggtga

SEQ ID NO: 162216 - DNA, 351 bp, Enterobacter cloacae
atgtcgagcaacccaataaacgtacttgatactctgcaacgaaccgtcagcattacgattaggggcagcgtcaccgctcagagcattgataaactcttcagtaaccacaccatcttcatcgaagatcgttatctgcttcagtgcttcaaaataatgctgatcgatcagagctacgaccctgtcaacatcggtttcaccgtgttcagcaccgtactccataaatccgaaatcatcgggaccattttcgcgccagagcttaagatcaaaaatgtcggcacgctgtggcgtttccgaactgttcaccgcatcatgagcggaaacatcatcgctgctatcactagcaggctgtga

SEQ ID NO: 162217 - DNA, 2133 bp, Enterobacter cloacae
atgagtggctctaataaaattatcgtttcgactgtaaatgaaatccgcttcgaaaccgacagcgcgtcatacaaacgtagccttcagaaaatcaaatcgcttaaggcagctcacgagaagcccgctaaagcgctggagaaggctcagaagaaagtgcaagtctctgaaggcaaggcagcacttgccgcagcgaaagcccagacagcgaagcttcgacaggctgaacaactgtctaaacagcaacagaaacaagctcagatacaggccaaaatggagcgggacgcagtagcccacgccaataaaatgacatcacttcagtctcgccagttatctcagcaggagcagaaacaagcgcagagtgccagactagcagctatatctgacaaggtgagacaggcgagtcgctcccgtgcaatgacctacaaccctaacatgcttggagttcactccgatccatctctggtggcacgtcaaaatgcagcgatgaaccgtggtcacggcgctgttgctgctgacatcgcagccaccaaaaaggcgatggccctggaggagaagcgccagcgtgagaaagaggcaggtcttaagcgcgaggtgacttattacaacagtttgcgccgtagcgctctgaccctggctaatatgaacggcgctgacgttgcaacccgttacaaggcgatcagtgcagcaaaagaggcactcaaagcccagaaagaatcgcgtttcaccaccgaagagacccgttttgaggtggcccgtatcacaaaagaattacgcaagcatgcgaggctgcaacagcgtatcacccgtgagcagaaagccgcaggtgttcgtgctggtcgtgttcgtacaaaaggccaaggaggacgtgtcgctcttgccgctggtcttattggtggtgcgtcgctgataggtggcatgggcgtagctcgtgttggtcagaccctccaggggagtcttgaacgctccagagaggcgcagcaattaaggcagtatgacattagccaacttgaatttaatgctatccatgacgttgtacagaagcgtacagggtacgacctgactgtagataagtatgcgtccatgaataaggattacttcgagaaagcaggtgagctaataaataccggttcctttaaaactaacaagcaaggggtaacaacattcagcggaggtggtgaacttgccgatctggtgaatgcagttcttagcaaaaccaaccagcgaacagcccagaaggtgatcggtgaactccagaaattagacatgggaacctttgttacatacgtccggcagttgggaaaacaatttgcttggtctgaaaactccatgcgccattttttggaggcgatcgatgacggatcggtgcttctcagcgggcttacaggggagggtgatgaggttattgcccgtatgcgtcaactcgcttctgaaggatggaccctatctgatgcacagcaggccaaccttgataaactggcggcgttaggtgctgagtacaaccgagtgcaaaccagccttgcagatcatttctcagcctcgtttgttgaaggcctggggcagtacgctgccaatactgacactctacgtcagaatatgactggactgatcccaatttccgatgccctcggcgttgcccttggtgagctaaccaccaacattctctcattcgctggtcgagtcggtgaagaactcaagaaaggcgcaacactgccggatgcagtctacaacaccgttgtggatgactctgcgaatagcaccgccgattggattaaggaaaagacaggcttcgatcctcgtagcatcggtcagacgcttaagcagatttacccgtggttggatagttcagcaccaagcaatattggctcaggcacggcgtataacgatccagcgctagcattaaacgttcctggcctgaactatctaacaacccaggaaccaacgtttacggttccgacaattgacagcatgacgcagcgacagccgattcctgttgcggtcactggcgaagctgagattaaactctcaccgcttgatattaacgtgaatgacggcgctattaacggtttgattgataccaagataagggagaacaaccacgcgcagaataacctcatccttgggattgcagactaa

SEQ ID NO: 162218 - DNA, 336 bp, Enterobacter cloacae
atgattgtatcttctgaagaacgttcattccgggatgtcgtaatttaccgtgatgatcccgtcttttcacacaagaccaaaacctttgccacactagcggtggatgcggttcccggaacattgctcacctccacaggtgaggcatacgcaagcggtagcgatctgctaatcgctcttgatagccacaaggcaggctctaatgtccctgtgattgtggttgaccgtggttgcgtactgaatcgagccggattgattggcaccgatgcaaccgccgttgcgaatgctatcgctcaaattgaggcctctggcctgaatcgtgtttctgtttctgaataa

SEQ ID NO: 162219 - DNA, 1059 bp, Enterobacter cloacae
atgacaatttctacctctggcttcaaagtcaaatatttcactggtgcgtataaagagaagtttggggataatttcctgcttcaggcgctggatatcttcaaagataaaacttctccactacctaagctggagatcgacgagcttcatgaaaatatgcaggccgtttcttctagcgttaaccgatattcgacagaagttgattcgacagaacgcccacttggaaaaaaccgcctgattgaaattccacattttgtaactgttggaacggtgagcgctgctgacttccagtcacgccgccgtatcgcgactcagcgtcagacactacgtgatgaactaatttctgatgagggtattcgccagtatctgaaattccgagccacaaaagaggaatatctcgctcgtgcattattcgccggacaggttttatcaccgtatactcaagatcgccccattttggattttgaaaatgaattcggtcagaccgtagcaacagctaccgtagacgctaccaaagcaggtgatggtccgttagaggatctggataccgctgcaaataacatgcgttttgctcttggtggttggctaagttcaatgcgtggtgtggttgttctgtgctctccagaagcatacaaggcgatcaagttccatccgtctatgctgaccctgatcaatcatggtgtgctgccagatagcaatctgtttaacggtagtgttaaggaaagtctgccagcattccaggcgatgacaattgacgggttgacctttgttaatactggtctgctgtatcgtgaattcattccggctggagaggccttcatggttccggtattcggtgcaaacaatctcgttggcagcgacctgcaacccttcgaaatttaccacgggccagcatcacgagatgcgcgtctagcggcagaggaagctgagagtcaattcttccagtattcgtgggaggaccacctgcacaataccactgtccaatccgagtacggtctgctgccgatttgctataaccagtcaatgattacccgtctaacggtgaatactgctgaggcataa

SEQ ID NO: 162220 - DNA, 216 bp, Enterobacter cloacae
atgagaattacaatttcaggtgttggtgggctgcctttggtggtttcacatgtcaagactctagaggataacgacctgattaatgtcagtgggctatgcagggcactaggagatattccgcgctcttcatttctcgataaggtcgagcgacttgggcttgagggggctatcaagcattacctcaacctacagcgacaacgaaaactgaaaacataa

SEQ ID NO: 162221 - DNA, 597 bp, Enterobacter cloacae
atggcgaaagttgaactaaatagtgaatttatcgccacagtggctggggatattatcgtctataactttaacggtgagtcccgtgaattacagtcctcatccgttgagtatctcgccgtaggggtcggtattccagtcttatcctgtactgatgcgccaggagagcaaaaggagggttttgccatttgtcgtacagcagactttacggcgtgggaatatgttaccgaccatcgaggtgaaacaatctacggcaccaaaactggtgaagcacttgttgtatctttaccaggggattacccagaagagaccacgacgctggctcctgctacgccatacgatacgtggaacggcagcgagtgggttacgaataccgacaagctacataccgcagacgtggaagctgcagaaaagcaaaaatcagctttattagttaaagcgcaggcaacgatcagcctatggcagacggagctgcagttaggcattatcaatgataaagataaggccagcctgatgctctggctgacctacataaaggaattgcaagctgtcattcctgacgctgcaccaaatatcaaatggcctacaccgccggtttaa

SEQ ID NO: 162222 - DNA, 600 bp, Enterobacter cloacae
atggctaaagctgaattaaatcaggacatgatcgccacgatggcaggggaaatcaccgtgtttaactacgatggtgagacacgcgaatatctgtcttcatacgttgagtatctcgccgtgggggtaggtattcctgcaaattcctgcgttgatgttccgggagagggtaaaaccggctttgccatttgccgtacagaagacctttcatcatgggaatatatcactgaccaccgtggtgaaacggtatacagcacagagacgatgcaacaagttgaagtgacggcactgggggaatatcccgaaggtgcaacgcccaatgcacctgcatcaccgtacgataaatgggacggagaaaaatgggtcacggattctgccgcaaaacatcaaggtgatattgctgatgcagaacaataccgacaagcactcctcgttaatgcagatgacctaacctccgactggcgagtagagctgatgctaggcgatataagtgaagaaaataaaaagaaattgtcgtcgtggatatcttataaagctgcggttaaagccgtcgatgtgtcgacggctcctgatgttagctggcctgttaaaccggcggtgtag

SEQ ID NO: 162223 - DNA, 168 bp, Enterobacter cloacae
atgatgatctccctctcccctaaccctctgggagagggccggggtgaggggatcaaaccgcacaatccacctaaaccgcacaatacatcacccaacaatcccccaactttcacaatcattagctattatggtttccggaaaaataatcactcaactaacgattcctga

SEQ ID NO: 162224 - DNA, 483 bp, Enterobacter cloacae
atgtcattacccgcatacatgtttctttatgatgaaaatggaaacccgatcaaaggcagctgcaacgtttcgggcagagaaggcgcgattgagatccttaacagcaattaccacatccatcaggtttgcagcgccaacacgggcaatcttatgggggccagagaacatggggcattcactatccataagcagatcgacaaaacgtcgccttactttgcagatgccttatgtcaaagcaaaaggctacagaaagcggttatccactactatgatgtgaacgaagcaggatttgaattcgaggtgtaccgcataacgctggatagtatcgtgattatgtctgtcgatgctgcccatacctgggttccgggggcgcctggtcataatatgatggaaagcatcgggattcgttatcgcggtatcgagtggttttatctggagggacacattaaatatgaggatcactggaataaggtgcctcagtga

SEQ ID NO: 162225 - DNA, 540 bp, Enterobacter cloacae
atgccgttagtgaagattgggtccctctaccttgatggagagggatgtaaaaaattagttactggtaattttcccgatgattacgccacgcactttttcgccatcgaagtaataggagaccgtattactctggatgaatccattctgtactggcgtctcctgataaaaaagcatcgctttctttctggaaggtcaaaaagaattttctttaaaggtgtaatgagcttttacccactcgtcacgaatgagaggcagttaagagaactggatggatggttagtttctactatttatagagctttattgttaagatcaaaacttcttgctcagcatggatataacagaaatcatagtttcccattcaatcagtctaaagttaacttacttactaattgttcaaaagttaaaattaatggaaaaaaattattggagattcctagtttccttttgatcagcaaagcattaaggaaagggttaatagaaaatggcattgaaagagtaatgaatcccaattcacaaaattacaactaccgatggtag

SEQ ID NO: 162226 - DNA, 1143 bp, Enterobacter cloacae
atgccctgggatgcgagagataccatgtcattacgtaccgggtttgttttgttcgcctcgcaggacggggcgaacatccgttacttctgccgtcactacggcatttcacctgccaccggctacaagtggcttcagcgctgggttcagggaggcccgtccggccttcaggaccgcccccgcataccccgtcattccccgaaccgctcgtcagacgacattacagccctgttgcgcatggcacatgaccgtcatgaacgctggggagcccgcaagattaagcgctggctcgaagaccaggggcaccgcatgcccgccttcagcaccgtccataacctgatggcccgccatggtctgctgccgggcgcttcaccgggcattcccggcacgggccgcttcgaacacgacgcgccgaaccgcctctggcagatggattttaagggccacttttcctttggcggtggccgcagccatccgctcaccctgctggacgaccactcccgtttttccctgtgcctcacacactgtaccgatgaacggcgcgagaccgtgcagcagcagctggtcagcgtgtttgaacgctacggcctgccggaccggatgacgatggacaacggctcaccgtggggcgacaccaccggtacctggacggcgctggagctgtggctgatgcgccagggtatccgggtgggccattcccggccttatcatccgcagacgcagggcaagctggagcgttttcaccgcagcctgaaggccgaagtgctgcagggaaaatggttcgcggacagcggtgagctgcagcgcgcctttgaccactggcggacggtctacaaccttgaacgcccgcacgaggcgctggatatggcggtaccggcctcgcggtatcagccgtcagcgcggcagtacagcggtaacacaacgccaccggaatacgatgaagggatgatggtcaggaaagtggacatcagtggcaagctgagcgtgaaaggcgtgagtctgagcgcaggcaaggcgttcaggggagagcgggtcgggctgaaggagacggaggaaaatggctgctatgaagtgtggtggtacagcactaaagtgggggtgatcgacctgaagaaaaagtcgatcaccatgggtaaagggtgttaa

SEQ ID NO: 162227 - DNA, 198 bp, Enterobacter cloacae
  misc_feature (27)..(36): n is a, c, g, or t
atgatctactggcaagaaaccatggcnnnnnnnnnntccatgatctactggcaaaaaaccatggcgggatgctggaagcagtgctcgaacaattgcaaaaacgtttcccctttgtgcatgagccgcaaatcgtgggaatcgaagttttctgcgatttctggcataaacaacggtcagtatcagcgacacgagcaatga

SEQ ID NO: 162228 - DNA, 150 bp, Enterobacter cloacae
atgaataaaacgtggacccgtaccgcgatggttgttgtggccgccgccgccgtggcgttctgggtgttcttcgacaggcagcgcgctccggaacggcagatggattccgcccttaacgcgatgcccgcctggcaggtgatcaaggagtag

SEQ ID NO: 162229 - DNA, 702 bp, Enterobacter cloacae
atgaataaactttatacacttgagacgctgctgcacaagttggatttgaggatatttaaacgcatcccagttgtctttcaaactgaagcgtctgaatgtggcctggcctgtctttcaatgatatgcagtttttatggcaagcaggtcgatctactgcaactccggcaacaattcaatttgtcatcacgtggggtcaaccttcatgcgataaaagcaattgccagtgaactggagatgtcgtcacgcgcattgtccgtggaccttcaggaattacatgccgtgcgtaagccctgcatattgcattgggattttaaccattttgtcgtactgattaaggtcgataagaacagcgcggtgatccacgaccctgcgtttggacgacgggtgattagcatgcctgaattgtcccaacattttactggtgttgtgcttgaggtatggccgggaaccactttctcagttcaaaagaagcaaaacaggttaaaagcctccacgttattaaagaatatcaacggactgatgacatcactggcgaagatatttttcttatcgctggtgattgagttgatcagcctgctgttgcctgtgggaacacaattagtcacggatcatgtcattgcatccggagattacggtttacttaatatcatctgtcttgggctgtttattctgattctgttacgtttgacggggctttgttga

SEQ ID NO: 162230 - DNA, 336 bp, Enterobacter cloacae
atgctgcggttgctgccgctcatggcaatatggccgaactgccaccacgactcatgggaagtagggcgaaacgcctcaagtgtgttcttgatcattgatgcgcagagcttgaaaaacacgaagccagtagccttgaagggctatgacgtaggcaagaagaaagggagctctgttggcgctaacgcgctgcaactcttcactgaacaggtcataaagcttgctggccaatacggctaccttggccagccctttgtgcaaggtgtgcaagaaactctagatgtacatgtgacagtgcagatcaccaagcgaagaaaacctcaaggtgtcagtcattag

SEQ ID NO: 162231 - DNA, 1140 bp, Enterobacter cloacae
gtgaatccagagcagatcgaattcaacaaatttttgagccaacatcagaaagacgccagcataaaagcatgtttgcgagtcagcgacgataaaattaagtgttctgggaaaattatccacgcccactccatccaacggggaaaaatcctcgaatctatcgcagatgtaggtggagaaaacgaggggaaggtctatcaccttggctttacgccagcagatgacatgcaatccatgcagccggagtttaagctacaaggaatcaaaaaattcagcaccttcacaggattctgcagcggccacgacaaagccatattccaaccgattgaagatgtagcgttcagtgcgacgaccaagcaacttaacatctacgcctatcgggctgcagcaaaggagttacactccaaccttgagtcgaagaatttttacgaagttctgttgggcgacaagttaaacgttgatgactttccgccgcacttccaactgacgcttccgctgattaagtcgggcaaaaacgcggtccctgactacatactcgaagccatgttgcaaggggagaagaaccatcaaattcgggtactgcacaagcagtgcggacataatatttctgagctgaagcagatctgcgatgacctgacagatgctatagaacgtgaggagtcgttgggattcgaacacatctaccatgtcctcgacggcgctttccttgtagcatgctgcgcatcgttcatcccatacttcgaccatgatgggaatcggatcatatccaagctggaagagcagcaaatggctcaatcgagcgtagcgagcaatgcagatatgaagaacgtgatgctcaacgtttttccggaaggcggaaaaacccacgtcatattcaccttctctaagggcaaccagagcttcaagtcctcgataggacgtctgctaaaacttgaggatgaagcgctgaagataggcctttcaaacatcgtgctaaactacgttgagaactccgcttacggcccgaagtacattaacgataatttcagcccagaacaggtcaaacagattgcagatgtattcgcggtctccgcatgcgacagaagtaagtttcgaaggaccgatattaatctatttgttggaaggccaactgctgaggcctaa

SEQ ID NO: 162232 - DNA, 783 bp, Enterobacter cloacae
gtgaccaagagggacgacttcaaagcagccacgaaacatgcacttgcccgtcgggctgcacacttttgttccaatccgcattgtctcaagctcacgatcgggccgcattctgatccaaacaaagctttgacttcgggtcacgccgcacatattcatgcggcttccgtactcgggccacgctacgaggtctcgcagaccgtcgcagaacgaacgtcaatagataacggtctgtggctttgtcgggagtgcggagttattgtcgatagtgacgagtgcgcttacgacgcggacttgcttcgcaagtggaagaaagaccacgagaatatggtgtcagaggtccgcaccgaaggatattcacgcagccttgccttgcttcaatctgggcgtatggagccacagatagctaaggagattgtctctgcaatgacggatcgccgatcgttatgggccacattcgatgccgaatgtcccgaccacgtccgacagtcgcttgatgaacttcgccggcggttcaccactattcgagggaatctccttgatggaacagcacttgatgaaatactgctgtcgctgaccaagacgattctgattttcttcgacgcaatgaagtcagtcaaccttagaatattacaatgcagctcagctaatcctgaatggctccattttaatgacgcgttgtcagcgcttcggaaatccataggaatgcagattgccaacctcgcaaatgcctatgaccttgccttgtgcaaagatcttcagagtattgcgccggtcagaatctag

SEQ ID NO: 162233 - DNA, 1170 bp, Enterobacter cloacae
atgcttaaatcagcgagttgctctgattatcttgttggtaactttataaaaaaaatcatcaattcagaccattttgacaatacaatcattgttcttgtttcagatcatttgatgatggctaacgctgccagtaaagagcttgacagcattcaggacaagcgtagaaacaactttattattataaaaaaaggggttaaacctactaaaatcgcaaaaccaggaacattactggatgtatggccgactgtacttgatatctcttcggctgataaacccgattttggatttggtcacagtttacttcgcaatgaaaaaagccatatattacaatcatgggaaaaatctaaaaacataagtaattatttaggattttcatcctcactatggaaatacccttccctaaatgacaaattctcatttaaggatggcatattgacaattggtcaacaagaatataaatggcctctcttcggatccgctgacaagaataaaaacatcaagagcatttattttgaagcctttgccttaaacgcacaaaaattaaccaccgaagataatattcttttttatataaatgattgctctataacatctcatagtaaaaaaggcttatgtggctatgagttaacacataatggtacagtacagtatcaaataaatgaaaaaggtcttttcaatcgcagagaactcagtgttgcctctcctttgtttactgagaaacttatcggtatttcgtctgggccacttaatgttcagacaggaatttatgataatattcaagagcaaaccatgccatatggagttaatttttataagctggaaggagaaaatagaaaactaaaacttatggccaacgttgacacatgcaacaatgttcctgttgatactaacgcagtaaaaaaattaattgataaagacaactcgcccctcatcattgcttcaaatgagtctgttttttgtatcccttatgaaaccagaccatcaattaacgaattattgcgctctagtgttgctactcaacttgcccccagacagcaaataataggtacttatactaaaaatgatacgaaattcattttaggaaagcctgaaattccattagatgtgtttatagacaaaacaaattttaatctggaagaattatgtacaattttaaacgactgtaggtga

SEQ ID NO: 162234 - DNA, 255 bp, Enterobacter cloacae
gtgcttgtcgtcctgcggcataacctcgacagcattaagtcgaaagcacgcatcctgctctgctgggttgatgaggcagaatcagtcagcgaagtagcctggcagaaactgagccctacagtgcgtgaggaaggctcaaagatctgggtggcatggaacccagagcgcgacggtagcaccactgacaagcgtttccgcaaagaggctggcgacgacttcatcaccgttgagatgaactatagggacaacccgtga

SEQ ID NO: 162235 - DNA, 492 bp, Enterobacter cloacae
atggctgttcctgcatatatttggctttataactctactggaaccctgattcaagggagtagcaatgttctgctgcgtgaaggtgctattgaaatgcagagctttaaccacggcgtgcatatcccttacgataatacttttggaaaacttacggggacgcgtgtgcatgaccagttaagttttaccaaagagctcgataaggccacaccttacctgaatcgtgccgtctgtcagggcgagacactccagcaggcaatcattaaatggtatcggattaatgacgcaggcgtagaggaagaattcatgcacgttattttgaaaaacgtcaaagtggtggctgtcacgccagtgatgcacaattttaaaaacactggcggtcaaatgaataaccctactgaatccgtgtcgctggcgtatgaaagcattacctggctatatctcgacgggaatatttcttacacagactcatggaaccagcgagtggtggcctga

SEQ ID NO: 162236 - DNA, 549 bp, Enterobacter cloacae
atgatcacttgccgggttgattttaaccatctttacgacgaggggcgcgtagcccgtttggatgtaggcggggtaggttcatttccggtgttttccgggctgggcgatctcgccaacaaacctgaatgttcgtacatgacaaatgccaccgtccctccagggagttactggattgtagatcgtccgtcaggtggattattttctcacagccagacatggttcaaacacgcgtttaccggaaataactactacgactggtttgccctgttccgcaaagacggtgtagtggatgactacatgacctttgacgttgacagttcacatcactatcagcggggtcattttcgcctgcatccaccgcgtccagatggttctggcatcagtgagggctgcatcaccttctttctttcgcgtgatttttacatggtacgtgctgctctgttgaaggctcaccggcaccggattctgcagggggataaactctgggcttatggtgatattacggtgattggtaatgcctcagggagttgcgatgtcacgccccgctaa

SEQ ID NO: 162237 - DNA, 1539 bp, Enterobacter cloacae
atgcggatgctgggcatcgaaaacggctctgcctattcaaagtcctgccgaatccttatagatcaactttttccattggatgcatccgataaacaagtcgctcaaaggatgtacagaactgaagagtttgctaaatgggaagcagctaattcacccaaaaagaatggctcattgatcaatgcttctattgatgaattatgccgcctggattcaagaaaaaaccgcgtctcagtaataaaatccgtccgagaattaatcataaaactggccgcgagtggactaagcctcgatagaatcgttgagcacgtccgcacctcaacacaatgggagcagcagctcctggacgaaataaaaattgcccatgaagcggtaatcgctgaagaacgccgccgactagaacgggttgaaagaggcaagaaagttgctcgcatgccgcgtgatatgaggcttagggcatggaaagtgatccgcacccgaacagttcaacatgaagataaaacaattctggctcaacatttaaggaatcaagagcgttatttcctcgaaatggaacgcttcgccaagcaagcccaggcttatatcgatgaagataaagcaagtatcgaggcagcccgtattcaggatgaatacagacgccgccgccaggctgaagagcgagcgctcagggacaagctgaaagatgcccgactcgaagctttagagaaagaaataacattagaggaagcacagcagtttgtccgggaaaatatccctcacaacgctcgcagcggtttccgtgagtggttcaaaaaagaatatggtggtgacctgagttgccttatggcagcagcaaaggagtttattgctttgcagggtgaaaagcccgctaaagacatcaaagataaggttatagctcgcccattcgggactgacattcccattgagaacttcaatagcgttcacgccatgatgcaggaaaccggcactgggaatgatgccgatgcgcgccagttccgcttggccgtaaaagatcaaggtgtagctatttggccggatgatgatcctcgcaagaactcacaaacggcactcgatgggcgtcgctgggaagtgcttctgccacatttacggccagtagacgcagagcttgatgattatgtgcctgagaaacgtaaaggcagacgtgcggcttatggtgccttatcacgccctgaccagaaagctttcagcgatagtgtttacgacaattgctatgggcaaggtgtagttaccggtgcccgctcgcgtagacgttgcgaagcagcccaccttgttgaacattgtaaggatggtgttgaccactggagtaatggtctatggctaagtatagacatccaccggctgttcgacgcaaatcagtgtgcgattaaccctgagactctttgtgttcatttcacacctgacgtcctggctgaagatgaagatctaaaagggctggagggtcagtcgatagcaatgaccaaaaaaccaattaacgcagcattcctttgggcgcgctgggaagtattcacatcaggcgattga

SEQ ID NO: 162238 - DNA, 591 bp, Enterobacter cloacae
atgcaaattgaaatttatgagtctacctataatcgccttgccgcattggttaaaggctttgagacgcctgatgctgtgattaaccgtcttattgatgcttttgagacagaccagaataaaaggccagaattggttttcaacccttcaaatgaagatgatttcaaacgcgctgttctccagcataatcaaatcaaagttgaaatgtttaaatccgatggcacttgcgaacagggcacatggaacgttcgtgctatctctgaaacctcttcactccgtgcaaacatctggagtggttatctccggggctggaaagaaaaaggtatcgtgcgcgcagtattcactgttgtggaagacagctcaaagcctgaaccacacgaaagcgtaaaatggggcgagtacaccattagccggttagagagtgggtcaatcattgttgaatgcgatgggaatgctgttccagtcgttaaaccggttcttcgtcgcgtggccgaggctctgggcatcgatcagaacaactcaaatggcaatccaatgaatactcgtcagctcggcggcgaaatcattaaagccttgatgacaaaagctgaataa

SEQ ID NO: 162239 - DNA, 561 bp, Enterobacter cloacae
atgctcggcgttaacttccatccattcgttggcgaaaaatactataacagccgttatggcgcgcgcgtcatggtgctgggagagtcgcattatggtgacggcattgatagcgctccagacttcacacaatatgtgatccaggagcatgcggttaagcctggcctcccattctttaccaagctcaccaatgtgctgcgcggttctgtcgattgccctacagaagaagaacggatcgaaacatggaagcacgtcgccttctataactacgtgcaggaatttgtaggggagagcgcacgtatcgcgcctacaaccgcaatgtggaaagcctcttatgcaccattcctggaagtggtgcgtgagctggagccgaatgtaatcgtagttctggggtccaggctttgggataacgttccgaatctaccacctgaataccctagtgaatggtgcagcatcattcaccctagctcgcgaatggcgtatgaaccatctatggccgcattggcagaatcattaaggaaggttggtggtgtgtatccgcgccgggaaacagccgctctctga

SEQ ID NO: 162240 - DNA, 276 bp, Enterobacter cloacae
atgagtgcggatagcgacatcaacaaaatacgcgaaacattggatctgatgagcgaaacgaacaggctcaatgcgcaggctgggctggcgcgcgccagacgcaaagaagaacgccgccatcgagtagaaagccttaatccggtggggcgtttttttggccgtgcatggctggagctgatagacgcgcctgcgggagccgcaatgctcattttcctggcaggcatgggatgctgcattgccattgccattgccattgccgcagccgttttgcgttag

SEQ ID NO: 162241 - DNA, 471 bp, Enterobacter cloacae
ttgaacatctaccttgccgcctggtttattaaatatggcgatccagacgcagactttgaccgcatatcaaaggctgaatggattgctggccgttacatccgtgaaaatgggatgagtgagtttgagaggatcaaatccgaggttagaactgtagatggggagccttgtttgctgcttcgggctatgctggacggagtgttacctactccccctaccccacctcgcgagccacccgcccctggcgctaatcctggcccagcctacatccgatatggtaaaagccagccgattgatgagagcgaaaaacaggcggtgatcgagttcatcatggcgagacagctcgcatccgggcgcaaaaatatcgatcacagaaagactattgctgcgctgaatgcaaacggagtgctgattaacggtcgccggtggcagcgtcccgctttcgcaagttttctcgccaaccatttccgctaa

SEQ ID NO: 162242 - DNA, 1041 bp, Enterobacter cloacae
atggctaagtcaagcgttacgaaaatttcacacaatgggcatacttatgggcttcagtttggaggatggttaaatcataggtacggtgatgcttctaaggctttgtttgagatatacaccaatgatattcgcctcccggatatgactgttggcgaatacaaatccgccaaaaacgcagagtatgaagccttggaaaataaacgtgatatgacgtttatgaagtatctaaagcaatcctttaagagtgaatatggctacgactgggatgagtccatcgagggcataaaaaaagctatcaacgatagctgtattccctaccttcttcgccagaaaaaggatgcctctgtaaacgaaagatcgatggctctgtttcgcgctgctgataacggccatgttgcctctacctatttcattgctactgcgctaagtgatggaaaagaagaggaatgcttatcgtggttaaccttagctcataatcgagggcatattggtgcagcatacgatatggcagcctatttcgatcagataggaaatactgtcgactccttacgttgtttaatcatttctgctgatagtggcttcgacattgcttatatgaatctcttcagcatggatttgctgaagaagatactaagtatccaagaaggctctaagcttgattctatgctaaacgagttgattgatggttcccataattcctgcgctcgatacttcaaggcagtacgtcttttggtaggagacacgccagcagaaggtgttagccttttaaagaggttccgacaaaatccgaagaaaaagcctgctgataaagatattgacgatgtttattacaatcaggtggcttttacagaagaatttgcagatgccgttctgagtgatattagttcaaaaaaacatcccttaatgtcattaatggagagatctcttgagttcgcaaaccctgaccgtgcaaatgagggtaaatcaattactgtaggcttcaatgatttcagagagttagttggagtcgttaaaaaagaacgattagatgcagaggtatga

SEQ ID NO: 162243 - DNA, 222 bp, Enterobacter cloacae
atgtctgacaaaccaaaatttcctgtccctgcgagtcgcaaaattaaaggccgcgcccttacacgtatcgatcaagaacagaaaatgatcaattctggctctttaggctctgaacgccttctcatcaacgtcgctcttgatttcatggaaaagcatccgggtatgtcctgggagcaggctttggttgccgctatgggttactgcgaacgtactcatagctaa

SEQ ID NO: 162244 - DNA, 327 bp, Enterobacter cloacae
atggttgatgaaaccaccgaagttgagaagaacattgatgttgttcttgataccaacggccactttatccatctggcacagggtatttcgcttaccattccaccaaagacgaacatccctccgtttttgtttaaaccgaagagagcacttacgtgctatagcatcaatggcgctgccctggatggaaatgaacacttaatgttcattgaggattccgaaacgcatgctatgattgttccaaagtacgatatgcacatcctggaatatgagaaacacttagaagcaacccgcccactttgggaggttcaaaatgatgatgaagaatag

SEQ ID NO: 162245 - DNA, 285 bp, Enterobacter cloacae
atgatgatgaagaatagagttaactacgaaaaagcaattaatcagatggtcgcagatggggcgagccgccaggctctctttgccttcattaacggcatggttgatggttatggtcgtgaaggtggctcccttgctttcaacatcctgaatgatgtccttgataacgatctgccagaagatgttgaagatgccgttgttgacgctctggaagcccttagcggccagtgtaaccgcatttgctggataggctccggcgattatcatctggcaccgcaagccgcataa

SEQ ID NO: 162246 - DNA, 330 bp, Enterobacter cloacae
atggcttttgaacacctaaaacatcttaccgataacaaccgaagcccccttttactggccgcttgtattacaggtcacgactacaatgatgcgttgatgattctgcgtgagcagggctgcaagctggcagacacaattaaggccgggaagcgaattgaaacggggttgatggcgctaacgtgcgaagccctggagcacaaagcctataagactattggcgagtatctggcctttgccggaggtgctgcggccatgcccgaacatctggaagaaatcacattggctgtggccgagttgcggaaccggcgagagcggagctgggaagcatga

SEQ ID NO: 162247 - DNA, 414 bp, Enterobacter cloacae
atgaatttccatgacgtttatctttacattgtcgttttcagccatcagcagccagataaacattccacctgcggtctggcgaacatcgctaacaataaccccatagtgttccatgacggtttgataagcatgttgcgcaagtttgacgctacggaaatcttcaccaacgaatgcagaaacaacctgcgggatacgcgcagggaacccgccaggtgggaccagttcgaattcaaaaacaaaattcgcggagatttgacccgaggtgatatggcggaggtaaagacgagctatgccatcttcatcagaaaggatggctatatgctcgtcgccagcgtcatcaatgatattggcaaactccaggcaagcatcatcaggttcaagccaaatgagattcttatcgtgcccgtcgattag

SEQ ID NO: 162248 - DNA, 342 bp, Enterobacter cloacae
atgattacacatactcgattcactatcgctgatgactatgcccttttagggagttttggcgtacccggcgttcaaggtaaattcgaagtacgctcaaacaagacccgtaaaagtcgccctctgctgattgtcgttcatgagaattggcgcgatgctggctgtcgtgagcgcgtcgaaccagtcgttgttgtgcaacttgaagctgatggccgcaaaaaagtcaccaagcaagaagattcagcctttgctaagaagatgaatctgagtgatttcggtcgtcgcgcgattgaactgtttcaactcaatggaatggaacacacggcgcaatgtcaccacggctaa

SEQ ID NO: 162249 - DNA, 375 bp, Enterobacter cloacae
ttgaatgcggagatcatcaccgccgagctggcgcgcgcggacattgtggagggtatcgcgttcgatgaagcctacgcgctccttagcgaagctgagaagaccgtggaattcgatatcgagcgaatcaacgaccctagccgcacttaccctcaattcggtggagtgacgttttctgaatacctgagtaaacgcgaggcggagatcgcccgtgacaccatcccacctgttcagtgcggctatcaagtccaccttggctatcgtggcggcatcggtttaaaaatcgtcgtggcagagccggtgctcacacgcgagattatcgacaactcgattcgttccttcctgaagggcgacatgcccaaaataagagctcactga

SEQ ID NO: 162250 - DNA, 195 bp, Enterobacter cloacae
atgacctgcaaacacaaggtatttacctctctttcacgccgccagcgtcgcgcgcgcacccaatacatcgagaccctgatccaccgtgagcgccaccgctgcggagggctgcactatgatgactgtgagccagcagaagggcataactggatctggagagacattctgttcctggacaaagactccgccacataa

SEQ ID NO: 162251 - DNA, 261 bp, Enterobacter cloacae
atgatccccttcgtgctggcttgttatgatgcggacgcccagaaagggctggacctgcaacaatgggaagcagcgcctgcagcgttcgctgtggctccagtggaggacaacacggcgctggtgaagctgcttaacatgtgcggcatcacaagcgatgtaaaattgatgaagtttttagctgccgcagaacgtgaacgcggtattccgaaacgctgggttgataagcggcctaaggttgcgcgcgcgagcatgctggcttga

SEQ ID NO: 162252 - DNA, 231 bp, Enterobacter cloacae
atgatccgcaacatgttgagcgtctttgcgcagtttgaacgcgataaattgattgagcaaaccaaggcaggattagtgcgcgctcgcgctgaaggtaagaggcttggccgtccggtagctacaggcaccagggaggacgtgcagcgcatgaaagaacagggaatgacacaagagcaaatagctaaagagctgggaattaatgtacggacggtacgccgtcactggaaataa

SEQ ID NO: 162253 - DNA, 399 bp, Enterobacter cloacae
atgagccgggtctttgcttactgccgcgtgtctaccactgaacagaccacggtcaaccaggttatccagatcaccaattctggcttcgctgtagaaccgcatcgaatagtggaagaagtaattagtggttcggttcaggcatccaagcgccccaagttcaatgcgctgttcgataagctagagaaaggcgaccgcctgatagtaaccaaaatcgaccgcttaggccgtgacaatatcgacgtgcaacagaccattgataagctgctggctgctggctgctggctgctggctgctggctgctggtatttccgttcactcattagacattggcgcaatcgatctggcaagcgcagaagggaagatgatccgcaacatgttgagcgtctttgcgcagtttga

SEQ ID NO: 162254 - DNA, 351 bp, Enterobacter cloacae
atgaagcgcattatcaccattgccgcagtcctgttcctggtggggtgcgcccatcaaggccgcgaaaactacaacgcgcagcacaatcccgccgcgaccacccccaacgagtacgcccagcaaatgcgcgaatacatgagcggtgcaatggcgggtatagagcatggtaagacttgccatatcgccctcaaatatgacgtttcagggctgctgatggacgtgaaatcacagggtggagatccggcactctgttcccagattttgcattacatgaccgaccctcgctatcccgtgcctgcggcaccggctgaaatgcgcagcgcaccaatcgtgctggacttcaactcatga

SEQ ID NO: 162255 - DNA, 165 bp, Enterobacter cloacae
atgagcgaccaatccatcaccactgccgacgatgaagaccgccaagcccgaaaagcagccgctagggtgttttacgaaagcaacccgaaggcgaccgtgccggatgttgcaaagcagtttgatttatctattgctggtcagcagaggaacgctggcgagcggtag

SEQ ID NO: 162256 - DNA, 417 bp, Enterobacter cloacae
gtgaagacgctcaccggcctgccgaaacggtcggtggctattgttaagcgcgcaatgaagtttaacggcggggagttggatgacggacagcttcgcgcccttgccatgctcgcgcatcacaaagaacgcaaccgggtggcatcaatcctttcccgtgatttgcgtctgacgctgaataagctcaccaaccagcgcaatatcccaggaccggcttcaatggaggaagtgaagaaactggccttgattgccgatgcccagaagaaaatcagttcggagctacggcagatctggcgacttgatgacggcgtgaccccgatgattgacgatgggatcggtgcagccatcgacgctgcggaagtaaaacgccaggctatttcagcgctgccagacatgaagcctgcggataagctgtattga

SEQ ID NO: 162257 - DNA, 657 bp, Enterobacter cloacae
gtgaagcgcggcatcgccggtggccacgatgttcccggtattgctcagggcgttgcccagccccaaatccaggtcctgcgcctgaatatcgccccggttggtcaggtcgctgcccctgagggtgaacccgccgttcaccagcagcagaccggcgttatcgagcgtatccagggacagattcaggccgcttccgctcaccagctgcccggtggcgccgttgctcagcgcgcgggtggtcagcgccagcgtgtcgttaccctgcagcatgccggtgttggtcagctgcgcggcgttcaccgtcagcgctttccccgccagccggccgtcgttaaacagctgcgccgccgtcagcgtgaacaggttctggctgagcagggcgccggtgttgtccagcctgccggtcgcggcaagcgtcagggcgtccagcgcctgaacgctgccctggttattcaggcctgcggcatccagcgtcgcgctgcgcccctgcaggctgcccgcgttgctgagcgtttgtccgctcagggtcagggtctcaccgcccgtcacctgcccctgagcctggttcgcgaaggtgttgccggaccaggccagcgtgctgctgccctgaagcaggccgctgttctgcaggtcgccccgcagggtcagcactttcgctag

SEQ ID NO: 162258 - DNA, 441 bp, Enterobacter cloacae
gtgcgcaatcgtgcccgccgtcaccgacagggcgcctttcgccgcctgggtgccgttcagcgcggcgttctgcgcctgcagggtgagcccctgcccgctctgcaggtgcgcgtccgggccggtggtcaggtcgccggcgctgacggtgaccgcccccgccgcgtccgtctgcccgttcaggctggcgctgcgggtcgcggtaatctgtatattgccctggctggtcgtgcgggacgcctgaccgctggtcagggtgccggcctgcgccgtcagcgccgtcgcgccggacagggtgccgttctgctcaagcacgcctgcggtcacgttcatcgcgccgtcagccagcaggctgccgtcgttacgcagggtctgctgcgccgtgacgtccgcattgcccttcgcgctcagcgtgccccgctgcgccagggttccggcgcttaa

SEQ ID NO: 162259 - DNA, 426 bp, Enterobacter cloacae
atgtcgcgccccgcattcacctgcccctggttactgacggtgctgcccgtcaggcggatatcggccgcggcatcggcccggctctggccgtccagcaccagctgcccgccgctcagcgccaggctctcccctgccgagaccgcactgcccgtggatgacagcgtgccgccgctgctgagcgtcgcgcgggtatcgcttccgctgcgggtattcgtcagggtgatatccttcccggccgccacgctgagcgcgcccctgccggtgacgctgccgccgcgctgcgtcaggctgccgccggtggacagcgtggtgtcgccctggcccgtcagcgtggcatccgaaagtgccactccctgcccgcccgcgacggtcagcgccccgccctgtgccgacacgccgccaccgttgacggtcagggtgtcctga

SEQ ID NO: 162260 - DNA, 1311 bp, Enterobacter cloacae
atgtatatgctttcacttaaaaatatattctccctgaaccgcccgcgctcagccatttcgtatgacgcaatttgtcagaataagcctgtcattgaattcagtccggaggggataatatataaagccagccctctttttctctccactatggggtacagggctgatgaaataatcggtcatcatcatcgtatattctgcccatcttcgctggtaagttcaccagaatacagtcagttctggcagcgccttgccaggggcgaaagctttagtggcaagttcctgcggctggcaaagggaaatcgttcagtatggattgaagccagttatatccccgttactgaccggcgcggtcgtgtgaccaaagtcattaaaattgctgccgatatttctgatcgcgtgcattctgcgcttgagcatgaagcagtcctaaatgccataaaccgttctatggccataatcaccttcaatcctgaagggatcgtgcttgaagcaaatgaaaatttcgccaatgccactggctataagcgggatgaagtcatcggtaagcatcatcgtctgttttgtgccgagacgctttacaaaagtgatgaataccgacagttttggcagaggctgaatcagggtgagtttttttctggtcagtttccacgtcttaaccgtcagggagaccctctgtggctccgtgcaacttataaccctgtctttaacagtgacgggcagctttataaaattgtgaaattcgctacagatgtcacgggtgatgtcctgcgaaaccagagagagcaggaggctgctgtgcatgcatgggatatggccgtgcagacccgaggaagtgcgcagaacggtgccagtattattgaaagtagcatccttatgattgacagaattgcgcaggggataggagctgtctccaccgatgtatcccggctcaacaatcagtctgaaagtattgacggtatggtggaaaccatccggaagtttgccatgcagacaaggcttattgcactgaatgccgcgattgaagcagcaagggcgggcgcatccggaagaagttttgcggttgttgccgcagaggtgcgtaatcttgcggcgagcgtcagtagcgcgactgacgaaattgagcaagtcgtggccagcaatagtcaaatggccaaagatgttctcagtggaattgaaaacagtctgatgaacacccgggaaggggttacactcatgcgcgaagcgggtgaagtgatgaccagcattcagaggaatgctgcaggggttgagactgcggttaaggatgtcgccatttcagttaaagccggatag

SEQ ID NO: 162261 - DNA, 912 bp, Enterobacter cloacae
ttgctcaaacaaacaacgataaaaacggatggtcggacatatgaagtattcctgccatacatcatcaatgaactacctgagcgtcatagcaaaagaccctctcaatggttcaaggcagcactgaaacgtcttcaggggtcccctagcgagctgcaaacaaactgcacaccagagcttatttccggcgagtgggatcaccgaacaagctggatatcggcctttgacgccctagctttacttgccaatagtcctgacagctaccagaacgatgatctcatcaacgaaatcgaagataaaacgggggtaaaacttccagtaatgtccggaagaagcaggcatgaggccatatttggtggactgctcaacgaaacccttaaacgcattacagaaaccagcggtagacaattcagggtcatcacacagaagcatttcaacggaagaaagtaccgggtcgacttcgttgtcaccctagagggagcaccaaaacaatacgtaattgagtttgatgaggcattccacgcagagaagcggcaacgagaaagggatttagagcgtgacagatggttcagaaagcatgaaacaacgctgaagctcatcagagtgaagcacgaacaccaagacgtctggcttaaatgccttgaaggtatcggagaaccacgcccaatcgagcactattacgctcactgcatccgagttgccagcgagatcaggtcaaaaacggagcgggttattaccggggaatcatcaaaagcggcctacgacccggcgaaaaattgctgttcctgcctgctaaaacgcaataaacaccgcctgaatgagctgtctgacatcatggaagacctcaatattccattcagagcaaccgatcggctattcgtaacccgacgcacccccagtaaatacgggctttaa

SEQ ID NO: 162262 - DNA, 222 bp, Enterobacter cloacae
atgagtgttagtgatgatatttggcaagatatacaatttggttcgttagagccattctgccgtgatggttttttcccatcgccgcaaaccttttcacgagttttctgggagcagtatgtcgaagccggcaatgctaaatgggatgactatcgaccagcgttagacgatctggtcaatagaggccatttgaaacacagtgataacgggtggtacgttttttag

SEQ ID NO: 162263 - DNA, 585 bp, Enterobacter cloacae
atgtacgagaattacaccagagcacttctggtattggatgtactggagagagcctgtgaaaagctccagctaaaccaacgggtaaagctgaaatcggctctaagtagaaaagggcttctcgctgaaccgtcagtagcctatctgatggattcgttacgcccgaaagaagctaagaggttctgtgtcgctatgtcgatgattgaaagccatatgtcgcggctaaatacagcagataggctctttatcagtgcggaagcaccggcaactaaaggcttctacatggtccatcttcgtgaccatccaaccatcatcgaactggctcgcaggatgatgatcggcgaacgacgcttcactgacgttgacccgcaactgatcgacgttgcatctagcctcgctagcagccctacatggtgcgtcagagtgctaatcccaagcatcgacccacggaaagcggcaatcatcatcagcaagttatcagcgttggttttccgggcattagaacgaatgaaagggaagccagtaccacagcaatacgtagcccaaattcagcgaatgagctacgaactacagcaaatgagatactaa

SEQ ID NO: 162264 - DNA, 453 bp, Enterobacter cloacae
atgacaacaaaatttaataagtttgaaattcattcagctttccagtctggcaagctgaatgaaccatttttcgtcgacttacctcatttgaaaccagagcaccaagttgctctcacaaccttcttgggtaaaatcactcgagaggaacctctagtcggcaaaaacaaaccttcttggctgaacgacaaccatcaaaaaattccgggtactgatgcctatgaggaaggaaactattggcattatcactgtgggccttacagtgattcagttaaggttcggtctatgacctacaacttgggttttaacgctcaaggcctaacttctaaagaagtgattcattatcaaaagctagaagatggcactgtgctagttgtagggttttctccgatccacgaaccttttcctcgctctgatgaaccgcatcacaatccgttatttacttctgaagagtaa

SEQ ID NO: 162265 - DNA, 189 bp, Enterobacter cloacae
atgttggcaaacgtacggtttggtaaagacagctgcgattcagagcgtcgccagcagtacaaatctcgtgctgacgaagtgctgctttctcgctcaagcaaaaatcagacctcagatggtctgaaatgcaattctcctcagtctgatgacgctatttttgatatgctatccgcttactttcaaaagtaa

SEQ ID NO: 162266 - DNA, 561 bp, Enterobacter cloacae
ttgaaatcagaaatcgaactaaaaaaaaccagtgattctccttttgagatcccggagaagatcttagccatttggggacgaagtatcctagtgtcgggttggacgtctgtgcctaacgaactgctacggaaccagtcaaagcttggcctcagcaatacagagcttgttttagtgattcatctaatttcatttttacataatgctgatgctcgagtttttccttcaatcaaacatttatcagaacggatgagccaagacagaagaaccatacagagaacactcggcaaactcgtcgagcaagatttattaagagtaaaagtacgctctacaggcaaacaagataagggcttgaccaacgtttatgacctaacaccgctaatgcttaagcttatcaatctgcaacttccctccctcaaaataccaaccgaacaacacacgtgccctttatgtggaaaaactgcgattacgcgtgaagaaattgagaagcagtttggattcagaatggataaagggaaagaacgaactcagagctggtgccgaagttgccgtggtaagaaataa

SEQ ID NO: 162267 - DNA, 192 bp, Enterobacter cloacae
atgaattcagatgtccagaaatacaccatcagtgaagaagatatcgctggcgaaatcagccgcattaaagaggatggacttacccatgacgaagcactcaattatgcagaatcattcagtgttggttatgacaaggctgaaacaaaagacaggtttattagagagataaacagcctttttgataagggctaa

SEQ ID NO: 162268 - DNA, 315 bp, Enterobacter cloacae
atgcacacacgaaacgtcaacgtcaaaaccgccgctcaagaatcttccagaaagatggggggaaaaaccgtgtcgtacacgatcctcgtcgctgagacgaaaaaaaactctgaggaggaatcggacgttctggagttcagcagccttgctgagctgaagaaactgcgcagacgttgccccgaaacaatgcgctgcacctatttctacgccctcagcagcggcgtcgataaacagttccgccatatccatgtggctgaagctgaccacttcaaacagtttgtgcgcctgatcgagcgcgcaggtatcgacatttaa

SEQ ID NO: 162269 - DNA, 462 bp, Enterobacter cloacae
atgaacgttaacaccccggccgctgcaccaatggcctttttcgttccgtcacataacgccgtttatgaccgggcaacaaagctggaagggcagtgggtgactcagcgtgaagcgataacgctggaatccctgcgccgcctctatccggatgcggagttgatccccgcgactctggtacaggaaaagcagaatgacggctatcgccgtccctgggttgaaatcaccgaggcccggtacatcgaccagatggaaacgctgccgcctgtggactggtgccgaggttttggcggggagtcgttcaagtcgatggagtttacgggcggggacgtgaccgcgatttttgtacggtacggcgcgcgtttctttgagtgccatgacctgcacacccgccatcaccgggagctgattggcgacgtgatcgcccgtttctgtctcgatgcgccgctgaattccgcgcattaa

SEQ ID NO: 162270 - DNA, 327 bp, Enterobacter cloacae
atgaatttcacccgccagcccctccaccaacaggcagaacagctgcttcatggcgtccagatcgtccggctgataccgttcgcagatgcgacggctgttttcgatgttctccggcgagcgaatacgggccatatccagctcgctggctgccagggtgatgaagtcgcggaacacttcggaacggcgcatatttttcgccgtctgacggaagacactagcgaactctttacgcgcctcagctggcgacagcatccgggcaggcgcagaaccctgcggctgcggatcaatctggtctgccaggaacagggattcaaaactcagttgtga

SEQ ID NO: 162271 - DNA, 1005 bp, Enterobacter cloacae; identical to SEQ ID NO: 31749

SEQ ID NO: 162272 - DNA, 234 bp, Enterobacter cloacae
atgagccgccgtggtaaccgccacaataatgcggttgcagaaagctttttccaattgctgaagcgtgaacggataaagaaaaagatctacggaacgcgggaagaagatcgcagcgatatttatgattacatcgaaatgttttataacagtaagcgtcgacatggttctagcgatcagatgtcaccgacagactatgaaaaccactattatcatggactgaccccacgcccgtag

SEQ ID NO: 162273 - DNA, 294 bp, Enterobacter cloacae
atgaaacgtgccggaataaaggctcaggtcggataccggagcccgcgggcacgtgaaggcgaggccagtatcgtgtcgcccaacaagctccagcgacagttcaatccggatgctccggatgagcgttgggtaacggacataacttacatcaggacccacgaaggttggctttatcttgcagtggttgttgatctgttctcacgcaaaattatcggctggtcaatgcaatcccggatgactatggaaattgtcctgaacacactgctgatggctgtatggcggcgtaatccttaa

SEQ ID NO: 162274 - DNA, 327 bp, Enterobacter cloacae; identical to SEQ ID NO: 162270

SEQ ID NO: 162275 - DNA, 432 bp, Enterobacter cloacae
atggcctttttcgttccgtcacataacgccgtttatgaccgggcaacaaagctggaagggcagtgggtgactcagcgtgaagcgataacgctggaatccctgcgccgtctctatccggatgcggagctgatccccgcgactctggtacaggaaaagcagaatgacggctatcgccgtccctgggtggaaatcaccgaggcccggtatatcgaccagatggaaacgctgccgccagtggactggtgcagagggtatggcggggagtcgttcaaatcgatggagtttacgggcggggatgtgaccgcgatttttgtccggtacggcgcgcgtttctttgagtgctatgacctgcacacccggcatcaccgggagctgattggcgacgtgatcgcccgtttctgtctcgatgcgccgctgaattccgcgcattaa

SEQ ID NO: 162276 - DNA, 270 bp, Enterobacter cloacae
atgtctcatttgaactacaaccatctctattacttctggcatgtctacaagcagggctcggtcgtgggcgccgcagaggcgctctacctgacgccacagactatcgccgggcaaatcaaagccctggaagagcgcttgcagggaaagcttttcaagcggaaagggcgtggcattgagccgagcgagctgggtgagctggtgttccgctatgcggacaagatgttcaccctgagccaggagatgctggatatcgttaactatcgcaaatag

SEQ ID NO: 162277 - DNA, 1302 bp, Enterobacter cloacae
atgcgggcgcttttaggtagtgtggctaatacaactgttttgccgggtgatgttttcgaaatagactcaactgtcgctgatgtacatcttatttcgagtttaaacagacgaaaagtcattgggcgtcctactatttatacagtggtggatcgtgcaacaagaatgattgttggccttcatgtttctttataccatgcttcatggcgagccgcccgacaagcgttagcaaattgctttatgccaaaaaaagaatattgtagattatttggaatctctattactgatgatgattggccttgttctcacattccattaacattgatgtgtgacaacggggagatgattggtcttaaacctcaggaagagatgacccccctgacaaaacttgagtttgcgccagtcggtagaggcgacagaaaaagcattgttgaacgctgtttcggcattctgaatgatgaggttattcataggcttattggaacaacacgaaggggaaagattgttaaaggagagccaacaccgcaatccagggcttgtttaacgattcaggaggtcacgtctttactgattcgggagatacttgcacataatcagagaacgtatgaggaactggcttatatcaatcccttactgattgaaaatgatctcgtaatatcaccaaaaaatagttggatgataagcttaaagcacgggagattcagcgcaagagccgttggggccgacgaagtgatcgcacgattgttaatccctgtgaacgctaacattaccgccggtgggattcagtacaataatcttttttatgaatgtgatcctgaaattgcatcaggtgtcagagtatttggaagaaccacttgtgaagcaagaatagatgacaattgcgtagattatatatatgtaagatttgacaaaaatagcattttcaaaaaacattacctacttaagaaaagagatgtatttaaagggaaagctcatcttgatacagatgtaatggctgattgggtagatactcaaaaagaaattaatttatttactctggattcgctcagcaatatcaataataaagatgaatttaacaggaaaggtaacgaaagattaaatgaaatatacgaatctcgccgggtacatggtaaagatattaaaaagaacaggaaaaatgaacttgattcattagggcgaactcatgttgctaatggaagatctgaacccctacttccttcatccagtaatgttctgcttttgcctggccgggaggagaaacaaagatggttaaaaggtaagaagaagactgaggacgcagaataa

SEQ ID NO: 162278 - DNA, 2013 bp, Enterobacter cloacae; identical to SEQ ID NO: 144561

SEQ ID NO: 162279 - DNA, 681 bp, Enterobacter cloacae; identical to SEQ ID NO: 19849

SEQ ID NO: 162280 - DNA, 930 bp, Enterobacter cloacae; identical to SEQ ID NO: 19850

SEQ ID NO: 162281 - DNA, 381 bp, Enterobacter cloacae; identical to SEQ ID NO: 19851

SEQ ID NO: 162282 - DNA, 897 bp, Enterobacter cloacae; identical to SEQ ID NO: 19852

SEQ ID NO: 162283 - DNA, 1818 bp, Enterobacter cloacae; identical to SEQ ID NO: 19853

SEQ ID NO: 162284 - DNA, 738 bp, Enterobacter cloacae
atgtattctaccgatgtcgtaaaagaaaatgcctacctttcagccacccgctcggggctggaatcgaacgagatcgctactcttcagcgctccttgccttcccggtttaatctgcggcatttgaaaaaaaatgaatcattaaaactcgtactgcaaaagaaagcgggaaaatcacgtgtcgtggcctataaatttacgtccggttcatttaattacacggcgtatcgtatatcagataaaaagttctataacctttccgatacttccgggaaaggcagtctcgattatccgttaccggccacagcaagactcagttcgcctttcaatcctgcaagacttaacccggtatcgggaaaagtgagtccccataatggcattgattattccatgcccatgaacacgaaaatagtcagcgtcatcgacggaaaaatcacccgggccgaatacaacagtaccatgggatattttgttgaagtaacgggaaaagccggtgttaaaactcgctatctccacctcaataaaatactcgttactaaaggggccagggttacccggggagacgctattgcgttatccggtaacagcggacgttcatccggtcctcatctgcattacgagctggtcatcaataacaatcctgttaactcactggcgttccggacggcggcacccgctgataacaaactcgaacagcatgcctttgcgcatgccagagactacgaacgatacctggactga

SEQ ID NO: 162285 - DNA, 237 bp, Enterobacter cloacae
atgacccgactgaccaacctgacggccgccgagaaaaaatttctcgacgaggctgttgccgccgctgagagagtgtcaggcaagaagctaaatcagcagaaccggcatatcgtcctgaaccgggcgcgggcgcagatcgaatcgcagcgacatgctgaccgtcagcgggcgttacatgatgaagaacggcagcaggcggattttacatggtcacgtccgcgtgcgccgcgccgctga

SEQ ID NO: 162286 - DNA, 291 bp, Enterobacter cloacae
atgagtaaaaacctgtcatatatgttaaattttttatatcaaataaaaaaccacccagatattctttcttacagaaaagttgagcttagtgacgactacggggcttcacttggtgattttagaccaatacagataggtatcggtccagataatcgaatgtcagcaaatagagttgtcatggatctatgtttgtttatgttgatagatgccttaatagatagggataatccagaccttattggcgctgtctcttatacacatctgacgctgccgacgactccttacgtgtag

SEQ ID NO: 162287 - DNA, 621 bp, Enterobacter cloacae
  misc_feature (488)..(497): n is a, c, g, or t
atgcgggtgccaaagttgtcacaattcaaaacccccctccgttaccctggaggtaaggcaaagttctctccacacattgagcaaattcttcgcttcaacaacttagtcggaggctgctacgcggaaccctatgcaggcggagcaggtgtggcattaggtttgctgctcaacggtcttgttgaggacattttcataaatgatatcgaccctgcactttatgctttttggtctgctgttgtaaatcataacgaatcattgtgtgaaatgatttacgaaatccccgtaactattgagaactggcatcaacaaagagacatactgcttaataacgataaatatagtatgctcgaagtcgctttatctactttctttttgaacaggacaaatcgctcaggcattcttaaagctggtgtcattggaggtaaggaacaaaaagcaaagtggaaattagatgcaaggtttaataaacaggatttaatcaaaagaannnnnnnnnntatgttaagggtgccgaactatatcgcaacttttatcagcatgatgatcatgttaaaattgctaaaaccttgcgaaatatcacacttccctggattgtttcttacgataacgttaatgaaataa

SEQ ID NO: 162288 - DNA, 357 bp, Enterobacter cloacae
gtgccgctgggcatcgaactgatcctgccggactggttctatgcgggcgtgctcgatgccgccttggtgctgaccatcgacccagcctatttccgcttgaagggcgggatcgagcgctggctgtaccgcctggtgcgcaagcacggcggcaagcagccgggcggctggcaattcgacttccggcacctgcaccgcaagtcgggcagcgctgcgcgcttctccgacttcgcttacgacctgcgcgtcctggtggcgcggcagtcgctgcccggctacgtcctgggcatcgagcgaatgccggacgacggacaagaactgctgaccttccggcccgtgctgcacacggcacggggataa

SEQ ID NO: 162289 - DNA, 255 bp, Enterobacter cloacae
atgcaggccgcgcatcgccagttcgccggcgatgtgcgtggcgagcgtggtcttgccgacgccgcctttctggttgagaaacgcgaagatcatggcgcggccctccgagctggaaagccggcctggccgtgccgtttcgtggttgtccaccgaaacggcgcgcttctactaaaagttatgtatttcttgttaggtaagttagagggaacgcaaacccgcgccgttgttggctttccggcgttttcgtactcctga

SEQ ID NO: 162290 - DNA, 165 bp, Enterobacter cloacae; identical to SEQ ID NO: 144070

SEQ ID NO: 162291 - DNA, 927 bp, Enterobacter cloacae
atgagtaaaaacctgtcatatatgttaaattttttatatcaaataaaaaaccacccagatattctttcttacagaaaagttgagcttagtgacgactacggggcttcacttggtgattttagaccaatacagataggtatcggtccagataatcgaatgtcagcaaatagagttgtcatggatctatgtttgtttatgttgatagatgccttaatagatagggataatccagaccttattggcgaggattttataaccaaatataaaaaacttgacactgaaacaacacatttatttatacaaaaagaatgctttcgattaattagattaattaggaatgcaatcgtccatgataatgaggctattacttttgaaggtgaatataaaaaaatcaaagaagatgaagtaggtatacccacttatcaagacacaagaaaaatgcttgtcaatttgaaagggaagaaaaaagacgaaaaacttgatatgtatcttttaggtaaagagtacttaaattttattatttggtttttagttttcgaacaagttcctcaaggatatagtttattaattttgaagagtgcttataataagttattattaaatataaattccatttcagatagaatgggagactctataaaaggatgtccgaacctttcatcctctgtgctattgaaaagcttcaatagatatgtcatctttaatgctattatcacggaggatgatgaaaatatttgcataaagattaaggattattcctcattttgctgcgactactactgggaaattggttcagaagtttatttattacctctggaggccttggttatagatagtgaagggttagggaaggtaagcaaaaataaactccctgagttcaaagtttctaaagtatttttagctaaatatttaaataaatcgatttaa

SEQ ID NO: 162292 - DNA, 225 bp, Enterobacter cloacae; identical to SEQ ID NO: 129758

SEQ ID NO: 162293 - DNA, 468 bp, Enterobacter cloacae
atgagaacccatttcgagtatcagaaccggaaacgccagcaacaaccccagccagaagcgtcttgtcatgtcgcgaagttcatcactcgtccccgtggatgccgtagctacgagcggctccagtgccattccacagacaggacagcttccgggaccactacggcgtatctccggatgcatcggacatgtccacacaccttcagaaatctctttctccgcctggcggtgagactgttttatcttatcagggctgacttcatggtggtcgtggtgatggtgatgttcactggcatcttcggtaaaataatgatcgggatgggctttaaatttgctctcacagctggcggagcagaaataaagctgatggtcctggtatcgaatgctgctgtgcgccttgtcaggcaggatgaccatcccgcacacgggatctctcaccttatgcaatgcgtgactctcgtccggggatga

SEQ ID NO: 162294 - DNA, 4071 bp, Enterobacter cloacae
ttggcagatattgatgcggatattcgcctcgctatgatcgctgcgcgttcatcgttcgatggtgtcgtaatcacgcggttactactttgcagcgatgaaatgtccaggcgtgcagcagcattggaacatgctgatgaactgcccagggcaatgttaaaggctggatatgttgatgctgctttttcattcgttcaagattttcctaatgccggttatgaagtagtagatgcacttttggagctaaatgagttcgatcgcgcaaaagaactttttgaagaacttgagccactgtcacaattacattcatctcgatttgaaaattacggtcattctcataatctcaatgagtttaaaaaatgggcaaggagagtttttcattttagagactatgagcagatcaagcaggcaatagactttatttcagttgaaggcatgacaaaatccccagagtacttagcagaaggaaatatcgattcgataaatacacagctgagattagaggtggctagggcaattgtatgctggcaagcagatgtggatatccaggatatctgcgataagttagaaattaaagaagaagaacacctagggcttacaattcaggctgggttttcggctagagatcgtggagacaaaaaactagcactagacttattcagcaaagctattaaatcacctggctttgataatatccataatggatggagacgttctatcgcattattttccgcttcatccaatttttttgaaatagcttcacgactttttgacacccttttcatgccacaaataaaaatggctgacaaagaaatggaatcagtaaaagcgcttgtaactgcaataatagaacatgtgcagctagctacaattcttggaaagaaattacctgaagcaacattatccgagcatataatttttcggcccttgcaatctcatgcgactgaggcaggacatctgctcggtatggcaatgaaagaaacagactctataacatctggcagtgttcaaagagcctgccgtatgcttatgaaatatatattaaaactcaattcccattctggaagtgaccattatcaagctcaagtagctttacaaggtacgttacctattattaaaacattaatccaaactgcagcattatgtggtttgaaagaatatagctccgtaaaaaaagaaattgacattgtatttcccgtgctagcactaaaaggtaattttctactgcgtcatgagttagcaattgtcatgtatcaggctgatggcgatcgggaaagcgcagctgcgcggcttgaaccaatgataaatgagcttatagaaaatacgcctagcgagcaacttgaagctctagcttatttagcaaacagttttactgccattggagagattgagcgtgcccgaagcttactttcttcagcgcatgaccattgttttggttatgctttggcagcacgtaaggatccgttatactcgatttggcgaaatattctagtcttagctaatgccaccgatcctgatcagcgtgaccaacgaataagacagcttatgcgccaagttgatggcatgaaagagactgaaggggcaaacgcagcatatcgtttaactgaagtattgattaatgaatccatgtatattaattcacatagtggatatcaaattgctcagacgctgacgaattggggtatgataccgtggcccaatcaggttaatgagctaatgataggcattctgagaggcagaccagaattgctgcttacatgtatttcaatttggtgtaacttatgcctgccattctgtatggaaccacattatcgtgatccctcacatgtcggtgattttatagacatagctgtcgatacttctgaattgacgttactcgttgaagttgtttttattttattagatgccatagaagttcgcagtcgagctcacgaacgtctcactttactcaaacgcttacatgctgctgcgagcagacattcgtttgaaaacattcagagaattgacaatgctattagccgctggtcatttgaagaacctccggcacgccattcctacacaccgcaaaaatacgacgatgcctcaacccttgacgaactgcaattagcatttgaaacggatggaaagaagcttgattataatgcgtcctctcgctttcgtgaacttgcacactctgcttcattagatcaagttatgcatgtttatgaaagctgggattgtttaaagtctgatgcacgttgccgtttttttattgccgagcggcttgtgaaagatggaaagactgaattagtaagaaaattagtacaagaatatgatgccagtaatgaacgagagaattattggagcccatggatgggagggagacagctcgacttctatcgcatacgtaaattgcttgacggagataaaatataccgcgaagcatacgaaaacctcatcgactcgatcgtagcaggtaaagaaaatacaatgtcactactgatggatatagattccatcttacctgttatatgccaaaatcccgactggcctgccgtttggtctattctggccgaacaaatgtcatcaactcgtgaatataatcttggtactccatttgaatttaaagaagaagtcatgacagatgagagcctcctctcggaattgttatactttgcattgaggttaccagtatcagaagtacgacgacatgcaaggcattgtgcacttgagcaagcagatctaaaaccagcaggacaaaacgtgtttgagtctacgatgataaaactccttaccggtatccttgatgaaccacatcaagcattacaaatcttacttatgctagaacacaatatttttgcatttcggctgcatgattatgtggccagtcttgcaaatcatcgtgatgttgccgtggctgaagccgcatgtttgttagcacaacgttggctgattcctgtatccagagattttcacccattgccactaacctatcagttgactcttggaggggatcttaatcatgacaatcttttatcagactcagcaacaggagccatgtttgtagaaactgacttaggttggacgcagatgctccgccctgttgctaaggtattggcaagtctggctgattgtgatgaaaccaacatacgtcagcgcgctgcaacatttattcagaagtgggggggattaaaagtattcggccaagaaagcattaaaaccgtagaatcccagttacgtatattatcaatgaaaattacttaccaaaaacctcacgcatatattggaatacttgcacttcgtcatgtggcaggagagctacgcagggcaggcctactttcgaaaagggatttgccaacactcttggaacagttggatgcgcctttaccgccggccccacctgtaaaaatttgtgttcggcctaaagggatcaagaggccacttaaagtaccgaatgtctcttggaatgaatcggaggaggcctgggttaaactcgtgagtgaagataccaaaccttgggcagagcaggtcgacgaatttgttatcgctgaaatatcacaatttaaaattcatgatgcccgacgcgcggattatcaagtttaccgttttcgctcgccacaactatccgcccatactgaagaattttggaaatggtatgggagtttacctgcagccgtatggctcggagaaattgttccacttgatgaggaaattgcaacgacaatagtaaggcgcattgtaagttctattggcacaatgtctcttcaggacttcccaataactttatgccctaatctacagtcatttcttggatggcagaattgcaatgaggatcctaatgtttatctcgataaaaactcgctcgctgtcgcaagattagttcattggagagatgctggccccgtggatatagatgatgattcaatttggggagaaggttgctatctatcaattaccaaagcaggtttggcacaaattcagaacgtccttggtgaactcatagttcatagttttgccagtcgtgaagttcaaaaattgttcgaaggtgcggaaaaaatgaaaaaaaccgccgtggattactactcaattcattaa

SEQ ID NO: 162295 - DNA, 420 bp, Enterobacter cloacae
atggtgttaattcctgaactggcggccctgacattggcgctatcgatttatacctcagcctttatcgctgagattattcgtgccgggatccaggccgtcccgcacgggcaacacgaagcggcacgctcactaggattaccgcatacggtgacgcttcgccaggtcattattccgcaggcgttgcgggtcatcattccgcctctgaccagccagtatcttaacatcgtcaaaaactcgtcgctggccgccgctattggttatccggatatggtgtcactcttcgccggaaccgtgcttaaccagaccggacaagccattgaaaccatagccatcaccatgtctgtctatctcatcatcagcctggtaatttcactgctgatgaacctctataaccgtcgtatagcactggtcgagcgctaa

SEQ ID NO: 162296 - DNA, 3171 bp, Enterobacter cloacae
atggcagaccgcaatttaaatatcagggtggcattcagcgccctgaataatatgtcccgccctgtcaacgcggcgcgccagagtgccgccgcgttggcgtctcaaatcaatcagaccaaaaccagcatcaaagggcttgagcgtcaggcaaccagcttcgaccgcctcaccgcagccaataaaaaaaccaccgaacaactggcccaggcgaaagaacaggcccggcaaatggcggcggcttatggcccgttacgccagcgcagcgccgaacaggttgccgccctcaatcagcaacgtgcagccattcgccagttaacccagcagcagaaaggtgagcagacgcagcttaatcagttgcgcgccagcttctacagcgaaggcattgcgatccgcagcgccagccgggcgacggaacagatcaaccagcgcactgcgcaatacaatcgccagcttgccgaacagcagcgacggcttgacgctgtaaaccaggcgcaggcccgttacagccgcgccaaagaaaccggcgaaaagatgatgagcgggggaatgaaaaccgccgcagtgggtgcggcaaccctcgcacctgtcgccgctgcggtgaaatcctacagcagtcttgaagacgcgatgaagggcgtagccaaacaggtaaacggcttgcgtgacgacagcggcaaccgcaccccgcaatatgaagaaatgcagcgggcgatcatggatgccagcgaaaagctgccaatggcaaacggtgctgttgactatgccgccctggtcgaaggcggcgcacgtatgggcgtcgcaaacagcgatgatccgtgggaaaaacaaaaagccgatctgctgtctttcgccagcatggcggcaaaggcttctgttgccttcgaacttcccgccgaccagctttctgaaagtctcggtaagattgccgggctgtataaaatcccaacccaaaacattgaacagttaggcgacgccataaactacctggacgataacgcgaagtcgaaaggctccgatattatcgacgtgctccagcgcgttggcggacttgccagccaactggattacaagcaagccgccgcgctgggttccacctttctgacgcttggatcacctgccgaagttgccgccagcgcaaccaatgcaatggtgcgcgaactatcgatcgccacagtacaaagcgataaatttttgggtgcgctggatgaaatcggcgtcaatgctgaaaaagtccagaaaagcatgtcagtggacgcgatgggcacaatcatttcagtgctggaagcgtccaaaaaacttgcaccagataagcaggtagccaaccttactcaaattttcggtaaagagttcggcgatgatgcgcagaaacttgcgaacaacctgcccgaactacgccgccaaatagaactgacgcagggcgcagccgccaaaggttctatgaatcgggaatctgatatcaataaagcttccctttcagctcagtggcaactgaccaaaaccggcgcggttaacgcattgagttcagcaggggaaacgctccgcgaaccgctgatggatatcatgcttaccgtcagtaaggtagttggcagcgtccgccgctgggttgaggcaaatccggctttggttggctcaatcatgaaagtcaccgcagccataggcgcgttgctggttgtcgtgggtggcctgatgctgaccatcggcgcagtgctcggcccgatggcacttgttcgcctcagcttcaccacgctggctggctccggtggggtaactcccctcataggctcgctgggaaaattatccagcacattacgcgggctgatcccctcactatctggcgtgggccgaagtattaaagactggcctgccctcttccgatctgctgcgtctggcattacccaatttagtaaacaagctattggcgggttaaacacagcgttaatggcactttcacgcggtgctgttgctgccggacaggggctatttaccctaatcacaaggcctatgacggctataacctggcttggtaatggcctcagaactctggcgacctccggtttcggcgctttgctgaacgttggacgcaccgtaatgatggcgttgggtggcgggttatcattacttcttagccctattggaatactggtaatcgctttatcagcagcagcgatcgccgttattaaattctgggaacctataaaagcctttttcactggcttttacaccgggttaatgagtggcttacagcctttaacctcagcatttagtacagcctttgcaccactagccccactctttgactctatcggtaatgctgtcggtggcgtctgggagtggttcacaaaactattcgaacctatccagttctccagcgaagcgctagcctcctgcaccagtgccggggaaacgttcggtaaggttgtcggtaacgctctatctgcattaacaccaataatcgaaggaatagcgcgcggtataggatgggtactggaaaaactcggcgccatccccgacgcaacaaaagcagcgcagcaagctgcggaaagtatgcacaaagaccctgttgtctgggagtgggatccgcagcaaaagaaaatggttaaaaagggttggaactggtcgccgaaagacgatcagcagaagaaaaccaaccagaagcaacagcaggccattgaccagcagaaaaagcaggaaagcttaattaactcgctcaagggcccggccaacatcgtgccgaagatgagcagcagcctggacaagatcgccaccaataccacggagaagaaagacgggcccggcgaaatcgtcttcaagaataagcagccctatatcccgatccgtggcggatattcggaaccgcttaagcaggcacagcgccagctaccatcccttaccgattgggtgacgcagcaggccggatcgctgatcgcttccgttaccccctggcaggttgagaagcccgccgcacgggtgcccgtttcggtgtcgccgtctgcgtcttccgtcgctgcgctgatgcctgcgccgggcggcgatgtatataaccttaacttcgactttagcggccagaaactggatgaagaaaccattatcaggcgcgtgcgcgaagaacttgcgttagcgaagcagcaagccgaccggcgcaagcgttcccaactgaccgatcacgtctaa

SEQ ID NO: 162297 - DNA, 456 bp, Enterobacter cloacae
atgacaattaaatttagtgttaataaacaagcgttttatgatgaaaatacagttgctatacccgatgatgcagtggttgttacccatgagcagcatctatcgctgattagtggtatgaacgatggtgaaagacgtgtttacatcggtacaacaggtgagctaacactgtcagatagtaagccatctcaatggcatacctgggatagtggcagcggcagctggactatttcagatgatgcgcgggtccagcttgcagaaggtgagagatatcgtcgaatccaggaggcaaacgactttatcaacagacagcaatggccgggaaaagctgctatgggaaggctgaaggataccgaaaaagcccagtacaatttgtggctggattatcttgacgcgctggaagcggtggacacctccagcgctccaaaaattaactggcctgttcccccggaggtgtag

SEQ ID NO: 162298 - DNA, 573 bp, Enterobacter cloacae
atggagcgcgtcgccgcacgcgtctgtgcgtcgttgggtgaagtgcccgtgccgctgcgccagttgtggaacccgtggacgtgtcgggctgatctgttgccctatctggcgtgggccttctccgttgatcgctgggatgaggcctggccgataagcacaaaacgaaaggcggtagccgatgcgttctacctgcataagcacaaggggacaaccagcgccgtgcggcgcgtggtggagccgttcggctttctgatccgcatcattgagtggtggcagactggcgaaacacctgggacgttccgtctggatattggcgtgcaggaccagggcataacagaagaaacctatctggagctggagcgtctgatcggtgatgccaaaccgtgcagccgtcatctggttggcatgtccatcaacctgcagacaggcggcccgtattttgtgggtgcagccacttataccggcgaagaaatcacgatctacccgtatatcaacgaaaccattatttccggcggcaccgcttatgagggcggcgcggtccatgttattgacacgatgagagtgaacccatga

SEQ ID NO: 162299 - DNA, 624 bp, Enterobacter cloacae
atgacagtggcaatcactaaccaaaataaatctctaccatatcttgcgcaatcctgggtggaagacttaaatggtaataaggttgattctcctttagcagccctaccacctttgcaacgtgtagaacccggtgcaaaaggtcaaattaagattcaggaaacaggcaatgtgtcggttttccctcaagatagagaaacattattttattttaacgtgcgagaaattccgcccaaaagtaataaacccaacactctccagctcgcattgcaaactcgggtgaaattattttatcgtcccaaatctttacaaatcgctcgaggcgatgacaatgaagcacagaagaaattaaccctgtctcatcagggtgaccattatgtactcaataatcctactggttattatgtaacgattgtcgaagcatctggttcagaaaaagccccgaatgtaagtgggttcaaacctgtcatggtagcgcctaaaagcagcgtaaccttaaacagtagtgctgcatcactaggaacaaaccctgttcttacttttgtgaatgacttcggtggacgccctaagcttgtatttgcatgttcaggcaataactgcacagtaaataaagttaaagtaggttaa

SEQ ID NO: 162300 - DNA, 1791 bp, Enterobacter cloacae
atgactttaaataaaaaatcagccccatccctgaacattggcaagaccactcatctacctccggctgaaggcgaacgtcgagcaatacgtggttacatgggccagtatgaaaaggcaggtgcagccatttatgctgagttggagtatgggcaattaaagtggattggggttgcagatcgcagtgcaggtatcgctgatgatctcgttctgggatttgatggagtggtcatcgggcaccaatttaaaacatcacgattcccaagttcatttactctaccaacacttttgactggatctgctggattactcaaaccattagtttacgcttgggaaaagctatgcaatacccatcccgattcccgagttgaaatccgcttggtagtaaacgattacccatctgtgaaagatactattggttcagaagaaccagcacatagcgccgcttttctttatgagtttgggcgttttcctgaccgttctctacaagaatggcgatccggcaactggcataattttatcgaaaaattaatgcaacattctggattaaatgacaataacttcgaaatgttcattcatgcgttacgcgtaatatacggttctgctgcagattttgttcagtcatataagctgagtgctgagcaggctaggttagcgtctgaaattgctcaactattacctcggctcgtttcagattcaagagataaggatcgctggtcccgggacgaaatattgcatgaactgggttggaaagatccgattaaaactcgtcatattcatcaattcccgatcggtgcccatgttcagcgcaatcgggatacagaattacaactgctccaaacactacgcaacacagttaatggttatatagcgctaattgggcctccaggttcggggaaatcgactttactgcaactggctctggctgcagagccaaatgtccgggtggtgcgttatctggctttcgtgcctggagcggcacaaggagtaggacgcggagaagccgatgactttttggatgatatatctgcccagttacgtaaaagtggattattgggcatccgtcttcgaaataataaccaatttgaaaggcgtgagcaatttggggaacttctcaaacaagccggtgaacgttacataagcaatgctgtcaggacagttattatcgtcgatgggctcgatcatatacctcgtgaagaattaccagtccgttccctattgagcgaattacccctcccctcggccattcctgaaggtgttacctttgttctcggtactcaacaccttgaacttaagcatttaaaaccagcagtgcaagagcaagctgcagcctcaggacgttttgtaacgatgcgtccactgggaagagtggcggtcgcaaggatggcagatacccttggtcttagttcaacaatttcgcgggtaaaactttacgaactcagccgtggtcatcccctggctgcaaattatctagttcaggcgctgcttgtttctgatgcggatgctatatcaaatatcctcgccggaggaatgaaatttgatggtgatattgaatcggtttacacctcagcatggagagaaatcgtaaatgcccctgatgtaatgcatgttttgggattccttgctcgtattgaggctccaatgcccctgaggcttttggcaacaatcattgatgttcaatcaattgaacgtacgctaaaaactgtccagcatttacttaaagaaacacctcacgggtggaccgtattccacaatagctttcgcctttatgtactctccaaacggctttgttga

SEQ ID NO: 162301 - DNA, 549 bp, Enterobacter cloacae
atgcgtgtttgtagcttccgccatcttacgcaggcccagattgagcccttcagcgagcaggacgttgagcagaccgatccggtcgcgacatggagccccggttctcagatgggtaaacgcatctgtgaaaccaagggctgcatcaacttcaagcagcatgtcggtaatccgaacggacggcattcggcgatacagatccagtatgagtgcctcggcaccatccggcacgtctgctgtcaacctgtcgatccgcaacgttccatcttctatgctaccgtgcggaatagtgccgttacgggcagcccgggccagccgcttaagagcgatcgtgagtcgcgcctttctgtctgccagccaatcctgtgggttggaaggcacggccagttttgcattttcctgcgccgcgatcatcggcaccagtacctgcttgaggtcaccatagcggcgcgaatgagcgagccagacatctccggaacgaaaagcatcccggaggtgaaagagtaccgccacttcccaaagacgggtatctcctttttcctgagctcgtaa

SEQ ID NO: 162302 - DNA, 1023 bp, Enterobacter cloacae; identical to SEQ ID NO: 78996

SEQ ID NO: 162303 - DNA, 171 bp, Enterobacter cloacae
atgcatatcttcgccggtatcgcccagtgcattacgattattggcattccggttggcctcgctaatttcaaaattgccaccatcgccctgtggccggtaggacgccgagttgttccggtcgaagtggcgcaagccgcgcgtgaagccaatgcccgtcgtcgttttcagtaa

SEQ ID NO: 162304 - DNA, 1116 bp, Enterobacter cloacae
atgacgttaacggctttagaaccctataaaacacagatgatttccccagaagagttgatcttggatgccaaaaacccgagactttacaatgggaaaagctttaacgacgccgcagatcctcacgagttagtcaaggcgttgtctgatactgctgatcttgaagagttgattaaatctatttctgaaaatggatatatgtcaattgaacccttaatcgtaatgaaaaagggggataaatatgttgttttagagggcaaccgtcgccttgctgcaattaaattacttactgagtctggtttagctcaaaagtgtcgtgttgttgtacctaaacaactagagcctcatgtaattaaaagtttagaagaggttgcagtttatttagtaaaagacgaatcagaggctcgttcgtttataggcttcaagcatgttaatgggcctcataaatgggattcttttgcaaaagcacagtttgcttataaatggtttgttaccgaaagagcaaatgggctaactattgaccatataaccaagaagcttggtgacagtaataataccgtgcgctcgattgttagcgcaatgtttgtcctagaacaagcaaagaaccaagaaatctacgatattcatgcagatagaatgtctccgaagttttcattttcgcatttatatacggccttaaatcgttcagagtataaagattttttaggtcttgaaagagactggaacgttacacttgaagataatccagtaccgcagaaaaatcttgagaagctgaaagatgtacttatcggtctttatggttacaaaaaggataagagagcgtctttgatatcttctcaaaaccctgatctaaaatacttcggggaagtgcttgccaatgaggcttcctatgaagcatttaaatctggggttgaaaatttatctgagctatataagcaagcaggtgatcctcttcagcatatcaaagatgcattcctcgaaattaataagcaactagatacaatatcttctgtcttggataggactgactcattagatgatacgaccaaaaattatatagaacaatttaagaagaaaatatccaaagttcatttccaattgaatagcattgagggataa

SEQ ID NO: 162305 - DNA, 1020 bp, Enterobacter cloacae
atgcagttgctgccctatcccgaaagccatcatatccaagttaaattggattggttagagttatcatgtctgtcaaacatgtacctgacaattagaatttcagaggttagaaatatccttgaaaatttagactctttttcatcaactgatataggtgaagaagatgcggaagtggaaaatgagattcagcggttattagagcaatatcagcaaagaaaacatattcttggttcaagttatccttttgtttttaatgaggatactttgtgtttagaattgactgaagaaagcttggaacagttgagcgtagatcaacatatctacttatactgtttatatttttcccacatgtctgcttcacgattatttagcggtttggaaagtccgacaaatcagcagagagatttattacagatagctgcaaccatagctttggccggttattctcaaggacatagtatatcttttggatggccaaggcctgatagttcacgcttttatgaagccttaacccgtgctgtagatttaataggggaagggagagtaaaagcttttgaagatgtaaacctatatttacaatcacggccacacaaagatgctgggatagatgttatcgcttggaaagataacaatcctcgcgatgtgtttcctgggaataagctagtatattttgcgcaagttgctagtggaaatgattggcgatcaaaagctgttaaagaggatgtcgaagttatacaacgtcactggctatcgcaaagaatatacaggattattgatgcgatagttattccttttgattttgaaagtgacgatgagtctattaaaagagaccatatatcgcttatcgctgaggaatttggtgctgtgttgcatagactaagattaccaacatgctttaagcaaggattagacctgctgttgtctaaccctgaactgctaattgaaagggctggagaaataaatactatttctcaatatgttattgagactactgcaacactacaagctgaagcggcctaa

SEQ ID NO: 162306 - DNA, 1008 bp, Enterobacter cloacae
atggaccagagaatcctcgaacatgaggcaataaaacaacttagcaagaaatcggtacgcaagttgtttggggttcatgatatcccaagagccagctcaccatttcgctatccagggggtaaggacaaacttacctcatttcttgctattttccttacacataataagttaaatggtgcacgattcattgagcctttctgtggtggggcaggcgcatctttatcattgttattaggtggttatgtaaaagaaatacatcttaatgacaaaaactatgccctctattgcttttgggaacagttaataaacaacactgataaccttttggatatggtattccaaaatgtcccgcgtatcgaagaatggcataaacagaaagaaatttaccagacaagtattaccgatccgaataaatattcgaaactagagtatggttttagtgtattttatctgaatcgcgcaaacagatctggcgtgcttagtgcagggccgattggtggtttagatcagtcaggtaaatataaaattgactgccgctatacagtaaacactctcataaaaaaaattgagaaaattgcaagcatgcgtgattctatttttgtgtacaatgaacactgcatcgacttcttgaaaagatttgatgataaagaaaattacgacaatgattttgtttatctcgaccctccttatgtaaaggaaggaaaaaatatttattcaaaaaacttttgttttgatgaagatcaacataaagagttaaagaattatattgctggatatgctaaccgctggcttatatcttatgacgatcatccattggttcatgaactatattcaaaacatggcactcgtgctgtagaaatcagctatgtaatgaatcaggcgaaggttggaaaagagttaatgatagcagattccagattaaggatgccagagtctttatttactgtcgacatgttaaatactgttgaaaaaagtgaaaatgatgacactgaaattaaaacggcctaa

SEQ ID NO: 162307 - DNA, 261 bp, Enterobacter cloacae
atggcttctaaagaccttaaatatcaggttgtttatcggggcgataaactggaaaccatcattcccggtcagtgggtcttcttccaacgcctcaaagaatacggtggaggctactggtttggaaaaacctatgatgattgtttctggtttgaaatagagcgcccggtttcattagctgaaggtctcgaatttttaatcttgattacgaaagtacaagcaacaagtcacgaattcgacgcgaattattctctgtttgactga

SEQ ID NO: 162308 - DNA, 192 bp, Enterobacter cloacae
atgtccaagcccgccagttctggcgggcttttgcttatatcaggcacctgcatgaaaaacactacgcaaagcgggcaggcgtggcggggctacgagcgcgcggttttggggttaatcgcggttttggcgcctcaatgttgggcgggcatggtcattttttggggctggtcgtgcgcgcctgcgtcgtggtga

SEQ ID NO: 162309 - DNA, 2157 bp, Enterobacter cloacae
atggcgcgtaacttacaactggcgctgcagctgcttgcccgtgacaccggctccaaagtgcttaagcaggcgctgcagggcatcagccgtgataccaaatcggcccaaaagaccgatgacgagctggcgaaatcccgccagcagaactcaaccacagcgattcgcgcctcccgttctcttcaggacgaataccgtcgcgccagttcggcgcgatctactcttggtattcgttcagagcgcgatattcagcgtgaaatacagcagaccatggcggcctataaccgccttacccgcactggtatgctgtccgcaaatgagcagaaccgggctttcagggccatgactgacagggtcaaaacgctgcgaactgagcttggcggcgtcaatgactcaatgacgcgcatgcagcgattccgtgctgcaggttcaaccgtggcagcagtagccggtgggttaaccgctgcgggtatgattataaaagacccggttcagcgtcagatggccttcgaacgacgtaatgcagaaatagccaacactgcatataacgagctgtctggacctgagcgtattaaaaaaatccccgttatcaataacgctatccgcaatgcggtgcgctacggtggcggtacgcctgaagcagcacaggatacgctgaatgctctgtttgcaggtagtcttgatgaaaagactgctatgaaaatattgcctgatattactcgttatgcttcagcatcaggtgctaacccacaagacctggctaaaattggtatcagcgctataaaaaactttgacattgatccgaaagacttacctactgtttatgataagtcgattcgttcaggggaaaatggcaagtatgaacttgccgatatggcgtcatctttatcattaacgctcaccaaagctaagagtatcggtatgtctggtcttggtgattttgataagatattagcattattacaggcaaatgcagaaacagctggtgataacagtgctgcatccactaacgtcaataatttacttgataaaatcacgagtgctgacattcaaaatactttgaagaattataaattcagagggaaaggtggaaaggcacttggttacattgactatttggctgagcaaaagacaaatgggttaagcacaccagatatcgttatgaatgccgtatcagggattgtatcagcagataaaagagttcaaaaactaaggagcgaggcaaagaaatataaaggcacggataaagaaagcgatatcctcgcagctttggatattgttgtttcttcaattacgtcaaaaataattgctgaccagcaagctagtactgctttgaaaacaaatataatgaagcgtgagtttataaaagatcaaataaaaggaactgagaattcgtccggggctggagctgcatcttttgaagtgatgtcatcaaccaatgattttaaatcgcaacaatttgaatcagagaaaatgttctccgagcaggatgcaatgaaacctcttgccgatttatacggtgatttgacgtcaaaactcaccgattacgctaaagaatatcctgagctaaccacggctatttctggtgccactaccggtattaaagccatgacagcggcggcggtagcttttgcaggactaaacttcctgactggtggtggaattaatttacctggtcgtaatcctggtggcggcatcccacccgtgggtggtggttctcgtcttggtgggatattcaaaaatgctcttcgctatggaggccgtattggtggccctctggcagcagcatatgcagcctatgacttgaattcgacctatgacgaagccagagatagcgctgataaaagtggtatggggactggtgagtatctctttaaaaagactaaagagcgggaagcaaacaaaaaaccgctattcgatgttgatgttgggaaagcagtcagttcctggtggagttcaccttcagcaatcggccagcaaaattatcagactgcaggtgggtattccattccttcgttcatgctgccacagcagcaacaaaaatcacaacccattaacctcaccacaaagttgattctggacggtcgtgaaattgcatcagcggtcaatgaatacaacggcgaacaatccgttcgcggctcaacaggaggcccgcagtga

SEQ ID NO: 162310 - DNA, 1317 bp, Enterobacter cloacae
atgcggcccttaatgccaccggtgcagacgccggataatcttttccatgatggtaatccgctcacaggtgagctggggaccatagttgatgccgagcatcttaataacgttcagggtactgtcagagatacacagtcagaacttcttacgattctggcttctgcaggtattaacgttgatccaacaaaacaaaatcagctcttaactgcacttaaagcgcttttactgagtcgttcaaatcctttcggtgatattaaaactgatggcgcacctgcgattgctaaggctctctcaaaccttggtctaagtgacacagtagataaagccgaaggagctgtccagaaaactggcgatgaaatgagcgggaagctaacgctgccgcaaacatcttcatttggcgtaaatgttaataacaatatcggtggaagttcgattgcgattggtgataatgacaccgggtttaagtcaggtggtgacggaattatttcccttatcgccaatagtgttgttgccgggtattttagtgaaaatgaattacagcatcacggaaaggtactgacaaaaatctttcaggctatttcaaccggaaacgcgacagagggggctggagggtttggttctcaacttaccagcggagcaccattttatagcccggcaatagtgcgtcaaaataatgataacaattactttcctttatggaagcaaattgtaagccttcaatcgggttatccggtagctgcgtcaatgggattactcactacaggtgagccgaatttcccacagattgtgctccatgcgaaaacagattttgaggttaacgataaactttgggtttttgatgttgcaacaggtgagctgcgctctccggcattaattaaagctggagaggctgttttaaacacaaacggagatattagtggctccgcatggggtggggcgctaacaaactggctcaatagtcaactcgctactcgcgacgcaaatattaatgcgcgtgccacggtagactgggttaacagcaattttaataagaaaaacacggctacattaggtttctcaggctggagtcgtgatgagtcaacggggctgattatgcagtggggtaatgtggataatgccaggggaacctactcgttcccacgggcattcaatgacacctgctttgccgtctttgccacaaataaggatgggcagggcggcgcgattgataacgcttatggttatccggtaagcaaaacgcaattctatcttgccagcaaagcgaactctggcgctgataccgcatacggcatttcatggtttgcactggggtactga

SEQ ID NO: 162311 - DNA, 414 bp, Enterobacter cloacae
atgactgaacaatattactacagctattcggcgaagggctttttctggctgaaagcagatgagctaaagggaaacgatattcccgctgacctgatacccgtcagcgaggaagaacacgccgcactgttcctcggtcaggagcgggggaaatacattaaccacactcctgatggacccgctatggttgaccagccggattacttgccagaagaactcattgcgcaggcggaaagcaaaaagtcatggctgatgcagacggctaatgatgctattgcgcccctacaggatgccgtggatttggagatagcgacggagggggaaaccgccgctctaactgaatggaaaaagtatcgggtcttgctgatgagagtggacacagcaaaacccgtatggcctcccgtaccagaagtataa

SEQ ID NO: 162312 - DNA, 1461 bp, Enterobacter cloacae
atgcttaagaaatatttaatatatataccgttctcggttttattaacgtgtgtattataccaactatattacacacttagttttaataatttcccaactataactgatggggccacagtcctgctgctaggaaaagaggtggctggtggaaatgtattgttaagggggtgggagctttccacggtgcccttttactttactgaggttgtgatttatgcgttatcctcactaatagttgggtactcaaaatcattggcttttgtaataccatcaatactatatgtggttattatatggctaatgtttagcttaagtaaaaacaagcttctttcaatatctctcttaacattttttgtggtttttcctgctgatatggcagttacttccatgctttctgcttgcatccatatggggacatatgctttcatttttgcgtcaataattttacttgaaaaatacgatgcaacagaaaatatagtcaacttaatcattgctacaataatcagcgccctatcattgttcagtgataatatatcaatgtttatttatataatacctatgattttagcatctacagttatgtttgctaaacatagagaaaaaaaatatttaacgctagcatttagtgctgtggtatcaattttgatatcaaaacttattaaatatggattttcagtgcaaaacgggttccacttacctggaataaacgacataagggtggtgacgtatgagaacatatcaaacaacataaatacagccatacagggtacattactattctttaatgccaacatatttgggcagccattaaagttatcctatgacacattttctatattttctaggtttttaggtttccttgctcttatctattttgccgctaaaagggcattaagatttagatgtttatcattcactgatatactgataatttcttcaattgtgcttatgttggcggcatatgtcggaagcaacctacctagaaatatttggactattagataccttgtgcctgtatatttaatgctagtaatttttgtatcaagagaaaaatatgaaaataaatatatacttctttccgtattttttgctggaatggcatctggagtttcaacaataaacatacaagaatcaaatgagaagcacgatcagtttgcttgcataagcgaaaagataaaacaaagtggcggggagtttgggtatgccacctttgactatacaaactcagtcggcatagactcaactttaaaaattgctaacattaagtttgaaaatggtaaggttgtaagagatagatggcttacaaacaatgaatggtacaacaaaggaaacaatttttttatattacctgacgatactcaggttaacatagtaaaaaccgagtttggaactccccattcaatagaatatgtttgtaatgtcttcattttaacatatgataagaatataaatatagaatga

SEQ ID NO: 162313 - DNA, 1077 bp, Enterobacter cloacae
atgtctgaaaccattctctggggcgacctggaaacctactgcgagatacccatcacgaacggcacgcacgcttatgcggaaggtgtcgaggttatgctgatcgcctgggctatcaatgaaggacctgtacgtgtatgggatttaaccgctggcgagccaataccggagccgttgcgtgtcgcacttcgtgaccctgacatcctgctttatttccacaattcgcacttcgaccgcacggtgctgcgccatgcaataccgcggcttgctcctgatgtaacgcgctggcgtgacacgatggtgcaggcgctggctcacggcctccccggcgcgctgggtgcgctatgcgaggttctgggcgtccctcaggacaaggcgaaggacaaagaaggtaaagcgctgatccagctgttctgtaagccacgaccaaagaacagcaaactgcgccgggccaccagcaaaacccacccggaagaatggcggcgctttgtagcttacgccgggctggatatcgaggctatgcgcgaagtgcataagcgcctgccgaagtggaattataagggtgcagagctggcgctatggcatcgtgaccagcagatcaacgaccgaggcgtttgcatggatgtggagctcgcgcaggcggcgatcgaggcggtagacctcgaacaaaaaagcctggcgaaacgcacgcaggtaatgaccgacggcgaagtgcaggcggccacgcagcgcgatgcattgattaagcacattgttgaatcctacggcgtggagctgccggacatgcagcgcagcacgctggagcgccgtatggcggatcctgatttgccgtcggcggtgaaagagctgctggctattcgcctgcaggccagcaccaccagcaccagcaagtacaaatcgctgatgaagggcgtgacgtctgcgcggcacgctgcagttctgtggcgcatcgcgtaccgggcgctgggccgggcgtttattccagcctcagaacctgccccgcccttcactcgagcaggaccagatagacgagggtatcgaggcgctgaaagccggatgcgccgatctgcttttcgataa

SEQ ID NO: 162314 - DNA, 459 bp, Enterobacter cloacae
atgaaagtatcgtttcagatcaagctgtttatttcgctggtcgcctttttctcagtgctgttcgcattactgggcggatattattatgtcgatgtcggcaggcagctttatcaggaaatgagcgcgcgcgcaaaaatacaggccgaagaaattgcgcttattccttctctgcgaaaagaagtcgaacaaaaggatatccagggcatccatgactttatgcagaaaatagccgcccgcagcgacgccagttttattgtgattggtgacaataaagggctgcatcttttccattccgtgtttgccgaccgggtaggcaaaacgctggttggcggagacaacgacgaggtattacacggcaaaagcaccatcaccatccgcaagggcgggttaggcatttcgctgcgcagcaaagcgcccattttaatgatgccgggcaggtggtggggattgtttcggtag

SEQ ID NO: 162315 - DNA, 1371 bp, Enterobacter cloacae
atggaaaaattaacctgttttaaagcctacgatattcgcggcaagctgggcgaagagctgaacgaagacattgcgtggcgcatcggccgcgcgtacggcgaatacctgaaaccacaaactatcgtgctgggcggcgacgtgcgtctcaccagcgaatccctgaaactggcgctggcgaaagggctacaggacgcgggcgtcgacgtgctggacattggcctttccggtaccgaagagatctattttgccaccttccacctgggcgtggacggcggtatcgaagtgacggccagccataacccgatggactacaacggcatgaagctggtgcgcaagggcgcgcgtcctatcagcggcgacaccggtctgcgcgacgtgcagcgtctggccgaggccaacgacttcccgccggtgaacgaagcgaagcgcggcagctataagcagatcaacctgcaaaaagagtacatagaccacctgctgggctacatcaacgtggcgaacctcaaaccgctgaagctggtgattaactccggcaacggcgcggcaggcccggttgtcgatgcacttgaagcccgctttaaggcgctgaacgtgccggtgaccttcgtcaaagtgcacaacacgcctgacggaaacttcccgaacggtattcctaacccgctgctgccggagtgccgcgacgacacccgcaacgcggtgattgagcacggcgctgatatgggtatcgcctttgacggcgatttcgaccgctgcttcctgttcgacgagaaagggcagtttatcgaaggctactacatcgttggcctgctggcggaagcgttccttgagaaaaacccgggcgcgaagatcattcacgatccgcgcctctcctggaacaccgtcgacgtggtgaaggccgcgggcggcgagccggtaatgtccaaaaccggccacgcgtttatcaaagagcgtatgcgcgaggaagacgccatctacggcggcgagatgagcgcccaccactatttccgtgattttgcctactgcgacagcgggatgatcccgtggctgctggtgactgagctgctgtgcctgaaaggacagagcctgggcgaactggtgcgcgaccgcatggcggccttcccggcgagcggggagatcaacagcaaactggcacagccagccgaggccatcgcccgcgtcgaacagcactttgccattcatgcgctggagattgaccgtaccgacggtatcagcatggcgttcccgcagtggcgcttcaacctgcgctcttccaacactgagccggtggtgcgcctgaacgtggagtcccgcgccgataccgcgctgatggaagcccgaacgaaggacattctggcgctgttgaatcagtaa

SEQ ID NO: 162316 - DNA, 213 bp, Enterobacter cloacae
atggcagaattcgttgtatctggtgtgttctggtatggatttgtgggctggtgtaccgctcagttgcacctttatatgggcttttattcgcgttatcagggggcaaaacgctggattagctggtcagttatctgcctgctctggccattaaccctgccgctttttgtcgactatgttagccaacaggatgctgggggcgacagccatgactaa

SEQ ID NO: 162317 - DNA, 909 bp, Enterobacter cloacae
atgggacgtacaaaatcacaatcagttgaattagttgaagatgtaccactagacggcgaccttaacatcagcctcaatgcaatgactgaacatcgcattgaaatcatgcagcagtttggtgatggcctgccgtatgaacgagatcgtatcgtacatgagacgcgtttttacatggcgcagagtgcggaagccatgcttgaagcgggtaagaggctagttattcttaaagaaaatgaaccgcatggtgactttattgaaatagttgaatctcagttatctctaccaaagcggactgcacaggtaatgatgcaggcatcactcaaatatctttccccaaaacttgaatcaaaagcgcaagcgcttgcgcttttgggaaaaacaaaactcttcgagttgatgaccgaagatgatgacgatctggtcgaattggctgatggtggcactgttgccggtatgacacttgacgatatcgatcgcatgaccagccgtgaactgaaagctgcattgcgcgaagcccgcgaaaccaactcagcacagcagcgtgttctcgctgacaagaatgagaagattgacgcgctctccaccaaactggagaaaaaatcccgtattcagccacccaagcctgacgaagaggtgaagaaactgcgggctgaagtaacagcattatccaccgaagcggaatcagccatcaccgttcgccttttcagcgcgtttgaaactctgtgcgcatattgcgcagaaaatcagattgatacgcccaaagattttatggcagggcttgtttgtgagctggaatatgccgcccgcagccttcgttcgacctttgatcttccagataccccgacaggcaacgctgctccagcctggctgactgagccagaacctgagattaaccggcaggaggcgtaa

SEQ ID NO: 162318 - DNA, 441 bp, Enterobacter cloacae
atgactatacgaaaatttctattaccaacgatttttcttctggctgggtgtggtgataatgctgaccctactgacgtacaaagctcagcagcagatcacgctgtctttagtgttgagaccgataatccgattgtaaagcgcgagctgccttttattcgccgacagtgtcctggtctggacaaatacgctgttaatttcgataagtttgaggtgtctgatgacagcatgcggccagtaacaacagtgcaattccatatcaaagacgataataatatcccgaatgattacgctgcctctgggaataactgcttcttatttatatcgaataatgcccatgaagtgaaaatatctaaatcagcctgccagtccgtttgtctcgacagaatggatgtacctggtggtgatatggtcataaaactcgataaagaaaaatctcgttag

SEQ ID NO: 162319 - DNA, 654 bp, Enterobacter cloacae
gtgtggactagcctgataaaaaaactgccgtggcgaggcatgctgctggccgttgcggttgcgggcgtagtgtatggcctctaccgctggggctacagcgagggacacgacagcgctgagcgcgacgggaatgtctcactcagtcagctgcagtcgcagttcgatacgtaccgccgtgagcagacggagatggagaacaccgcgctgcgggcctgggcaaaacgctatcaggagcaggtagccgcaggccatcaggcagaggccgattaccttgagcagattgctcagcttgagagccagaacaaacaattacaggggcaaattaatgatgtcacacagcgctggattgatgaaaaaggcaagagccatcccattgagtgcgtgtttactcgcggtttcgtgcgccagtacaacgcagccctcggatatgacgacgcatccgtcgacagcggtcatgcaggcagcgctaccaccgctatccccggcactggcacagcgccccggcctcctgaagcccctgacgccgggctacgcaactcaggcgtctcccagcgtgacgtcctcgccaacatcatcgacaacgcgaagcagtgccgcatctggcgcagccagataaacgggcttctggacgaacgggaaggattacagaaatga

SEQ ID NO: 162320 - DNA, 327 bp, Enterobacter cloacae
gtgcgtgccacggtagactgggttaacagcaattttaataagaaaaacacggctacattaggtttctcaggctggagtcgtgatgagtcaacggggctgattatgcagtggggtaatgtggataatgccaggggaacctactcgttcccacgggcattcaatgacacctgctttgccgtctttgccacaaataaggatgggcagggcggcgcgattgataacgcttatggttatccggtaaacaaaacgcaattctatctggccagcaaagcgaactctggcgctgataccgcatacggcatttcatggtttgcactggggtactga

SEQ ID NO: 162321 - DNA, 423 bp, Enterobacter cloacae
atgactgaacaatattactacagctattcggcgaaaggttttttctggctgtgtgaagatgagctaaaggggaatgatattcccgctgaccttatacccgtcagcgaggaagagcacgccgcactgtttctcggtcaggagcggggaaaatacattaaccatacgcctgatggaccagttctggttgaccaaccggattactcgccagaagaacttattgcacaggcggaaagcaaaaagtcacgtctgatgcagacggctaacgcagagattgctccattgcaggatgcagttgatttggggattgcgacgacaaaagaaaccgctgcactcaccgagtggaagaaataccgcgtcctgcttaaccgtgtggataccagtaaagcgccggatattgactggcctgttcccccggaggtgtag

SEQ ID NO: 162322 - DNA, 150 bp, Enterobacter cloacae
gtgttactcaccctgatgaccataggcgcacttgctcatgttgatgcgccgcgcgataaatgcgcccatttccgtgagataaatggcatcgctgcggcgtttcaatatttgcaaaagaattacattcctactgcgttatccttcctctga

SEQ ID NO: 162323 - DNA, 1023 bp, Enterobacter cloacae; identical to SEQ ID NO: 94639

SEQ ID NO: 162324 - DNA, 990 bp, Enterobacter cloacae
atgaaaccccttagtctcgaaaaagcttttcatatcgcattcttcgacaaagattcttttcataactttctttcatttcagccatttcagcaaactaaattttcaacttttgaagaaagattaattgccgaacccagttctaaacttaaagaatatcataaattcataaatgaattcgttctttcctacttgaaagtgaataaggatgttgtattttcatacaggaaaggaagtagtacttatgatgctgtaaaacttcacgctaaaagcaaagtctttttcaatactgatattaaaagtttcttcccttctattactcgtgaatatgcgcgagcggttttatttaacaacttatctaacattcccatatctgatttaaatgtccacttagataaaattctagactatatcattatcgatgactcattacctgttggttttccgacatcaccagctttcagtaatgcatgtttatacgattttgatgttgctttgcagcaatactgtgctaagcatgattatatttacacgcgttactcagatgatattattatttcttctgaaaatgacgagggttttgataatattaattcagttgtaattgagctgttaggtgagtttgggaaagggcattttagtctaaatccgacaaaaacgaaactcataagaaaaggtagtaaaataaagttactgggaatggttatcttgccatctgagatagtttctgttgatataaaaataaaaagaaaacttgagcatttaattcatttttacataactgacaaagataaatttttagattcgataagcaaggatcctaagattaaaactactgggttgaatgatagtgagatccttgaaaaaggagttaattctgtttctggtcttttgaatcatataaatacaatcgataaaaaatacctcgataagcttaagaaaaaatacggtaacacgattgttgatatgcttttttttaagaatgtgaattaa

SEQ ID NO: 162325 - DNA, 1353 bp, Enterobacter cloacae
atgaaaataaacattgagatctcaagaattcagcatgtcgaacttatgtcatttgctattgatctttctgaaaataaactgacttgtattgtagggaaaaacggaactgggaagacaacgcttatcaaagcgattaaaaatttacaatcagcagatacattcataaagacatcttctagatatatattcaactccgaaagtagaattgtttataatattaacgacgaagatattatatatgcctatgatgacaagttaaaagtaatagatacaaagcaaataattccagcagagataaaatctaatctttatgtagagttgcctattccgcatggaatgaggtttaataactttccaacacttagtaaaattgatgctgaacttagaaaaagtattgcgtttgaaagctatagcgtccctgatgacttgataaatatattcaaggtggtatatcagtcatcctcctacaataatctcaagtcattttctgtaaagaacgaaacatactacttcagattgaatgataatgggacttatataagagaggattactttagttcgggtgagtatttcattttgaatttatttagaatgattgagctcaaaagaaaatttattgttattgatgaaatagatatatcactggattcttcggctcaagtccatcttatagatgtactaaggaattattgccagaggcattcggtgaatattctattcacaacacattcacttgctttaatgcagacactgaatgatgatgagttgtattacatgtgcgaaaatgatgctggcacatcaattgtaaatcgctcatataatttcataaaaagtacactctttggattcaaaggatgggataaatacatccttaccgaagatgaagtcctgcaaagttttttagaatacattattgatgcctctgagaatgagtacttctacaagtataagataatatatgtagggggaggaacaaatgtcattgatttaatgcggcgtaatcaaaatgagacatttctaactactcatcaaaatgttatctctgtgttggatggagatcagttaggtttgaggcatgctcgtggtgataatattttatgcatacctttccaaagcgttgagaaagatttttatcaagcttacgaaaaggatgattcaattccgagagttaccgtcagaggtaacgataaactcgataaaaaagtttatcgtggggttgtcaatacctataacaatggctgggatgaaaataggatttttaaataccttgagagattaaagcctgctgagtgtgaaacctttaggcaacaaataagagcatttcttcaacgagatattgtggctgccggttaa

SEQ ID NO: 162326 - DNA, 1410 bp, Enterobacter cloacae
atgaatatacttatcgttgaagatgatgctagttttgcagaagaaataaaatttcgagttaactcattatgtcgtgaaccattatatactgttgcagagagctatgaagatgcttcatttttaattgagtctgaattttttgatatgatatttttggatttaagaattccgaccgttaaaggcaaaatggatagcgaccctcaacatggtcgaaatttattggatgtagctatatctcatgctcctgggacgccagttttcatgcttacaggttcatccgccgaatcgtttcttccagaaatgatggaacttagccatcaagtcgatgtgtggggacacgggaaaacgcttcctttaataggatttcatccaaaacatagactaaattctcttgatgaaaaaataaggcattatttcgaagctttcgactcggtaagcgaagttgagctcaatctatcatgtgagttaaacatttccaccacaagattaattaaaatatttacagcattagtaggtggtgtatattgcaatgtggaaagaattggtggcggtctatcagacgcgtcagtttataaaattggagtagatgatggttctgggaagagaattcataattcaatcgctaaaataggcctcccatctaatataaacgatgaagtcgaaagacacgatagatttatatcaaggctagaatcgtttgcaacaccaagaaaggttgctgttttggcctatggggctaaaaaaacatcaggtgttttctatagcttagcgacagcatccgaactaaacggcttttcattcataaatcagggttccaccgttatcattgataggttgaaaagtatactggagcgatggactaactctgcaccacaacgccgaacaactgtaaaagaaatcagagaaacattcattatagataatgacttccagtcgatatcaggtttaattgaacatgattggatcgagaggtttgaaactaactttattcaagtaaagtgggggtgtgttcatggggatttacatggtctcaatgtactggtttcaccggacgagaaaccagttttaattgactatggagacgtaggagagcgagcattaagtacagatccaataacattcgagcttagtacttttttccaccccgaaggtcctttaaaagataatgactggcctaattctaacacagccctcaattggggccagcctgatttcgttgatgaacaatgcccgtcacccgacttcttcaataattgcagagtatgggcggaaactgtatctgtcggaaaacgtgagcgcgcggctgtagcctatggttacttggttcgacaactaaaatacccgggctgtaatgttgaaagagtaaacactctccttgctggggtaaaaagactttttgataccgtttga

SEQ ID NO: 162327 - DNA, 894 bp, Enterobacter cloacae
  misc_feature (832)..(841): n is a, c, g, or t
atgactcgcgaggaagccttgattgccctaacaagtgaaaattcccatgcaaaatttaaggcagttcgagagcttgagcgtttagcacttgaaacagacattcaagagttattaaggatcaaagcatcagaatctgatacttacctaatcagaggaatagagcgcttgattcgaaacctacactccaataattctattgaggacactgaacccgatattataccacaagaagtcagaaaaaaattgcgagcagaagcgattgaatgggttgctgggctgctattacatgagataggctctaaactagggcttttggctagcgcaatttctaatgaattacccaactatgctgtatcacgcacaagaacacgtattgaacatcttcaggatacttttgatggaattgaagaactgaagaaggcaacatctgttccccagcctattgatatggatctacctactttaattaaagatattgttgaactggagaggactgataaggacattgatgtgtcatttgttggccgaactccattagttatattctgcgatcgggggttgttaagactagccctttgtaatggaataaaaaatgccatggaggctgcaatatctctttcaaatgaagatagaagagcttcagttataattagttgggggcaaacagaccgagatacgtggattagtgtgattgacaatggaccggggctacctattaattcagcgcattcatttactctgggtgaaacaagcaagtctggacacttaggctttggtttgggaatagtaagtcaggcaattgaaaccttgcatggcaaagtcgagctccgannnnnnnnnnattctgagtcagaaggagctgtttttgaattaagatggggctttaaatcatga

SEQ ID NO: 162328 - DNA, 1839 bp, Enterobacter cloacae
atgtacatacagcgcgtacagattgaagagggttttctggatggtcttgatgtccaattcacatcaggtcttaatgccataattggagcaaggggaaccggaaaaacttcactaattgagattataagattctgtttagatgcaaccagcacaacaatcgagactacaagacgtagtagagatcacgcactttcagtattgggttcagggcaagtcacagttactcttgtagatggtgacgatactattctagtgagtcggactgctagcgatcccatccctagggctacaactttttttacaaaaccagttattttttctcaaacagaaattgaaactgttggacttgaagcgtcggggcgattgaaattaattgacggcttcgttaaatttaattcagataaagagttgcaagagcgagagttaattactgaatgtagaaacctaacacttcagattgaagcaagcagacgagaaattgatgaactcgaacaaactcaaaattcccttcctgcattgaaagatgagttgagatctgtaattcaagccgaagagaatgtttctaaaacctcaagtttactaaaacaaaaaacagattcactttcaaagcaaactataagtatatctagcacaagtggaattattgagcaggtttctagaattaagaatagcgtggctgtctggagtcatgaagttaaaaaaggaattgatagtgcacctttagactcatccaactttgacggaagtacaaaactattattaagcccaatgataggcaagattgaaaatatcaaagccaatttaacaaatgaacttaatgaagttttaaaagtatactcggagttggagtcagcattcaatagcttcagttcaagcaaaataacaatggaggatcaggctcgtcaattaaggcaggaaatagaaagtattcaatcaggttcaggaagcatcctcagaagagggcaagaactaagagagaatattgctaaactggagtctgttagctcattcttaaccaccatgaaaaactctcttaaccagttaatagatatgagagctgaatcacttgataaaattgataaaattcgttccgaaagattctccgctcgcctagcagctgcagagcagttaaataagatagtatatcctaacataaaagtttcggtataccgaaacggacaatataagactttttcatctgctatttccgaaattttgagaggaagcggaatacgttatgctgatgtggcagaatcgatagccaagaacatcagtcctcgtgcattgctagaagctgtcgataattttgatgtcgaactgatcaaatatgctgcaaatatcaatactgatagagcatctcgtattctttctcacttaaaaaactgtgagcttggtgatatctgtactattaacatagatgatgatatttctttacagttgctagatgggactgactacaaagatattgctgaactttctactggccaacgatgtacagttgtgttaccgctcatactttctcacatgaatggaatgttgatagtagatcagcctgaagatcatattgacaatgcatttatcgcagaaactctaattaaagtaattctttcaaggggcgaccagggacaaattatattctcaacccataatccaaatattccagtgcttggggatgcagatctggtccttcacttaggttccgatgggcgaaggggattccgcttatgctctggcccattggatgagatcaatgtagtaaacgcaataagcactgttatggaagggggggctaaagccttcagccagcgggctaaattttatggggagcgcattaaataa

SEQ ID NO: 162329 - DNA, 159 bp, Enterobacter cloacae
atgcaacgcagacgctacttaatgcgctacataagcgaagatgagccagctggtgttattcaattcagcgccttgttagatgtccgcttctggcacgaagcggacgaactgactgagcaaaaggtccgctatgagcaatcagcagacgttcataattaa

SEQ ID NO: 162330 - DNA, 465 bp, Enterobacter cloacae
gtggaaggtttaattattttagctgtgatcatcttagcgctatacaaattggtgaagatggtagcagcaaagctgtatccctcgtctgacgtgatgagagcacaggcgaaatggggtgctgctggcaaggatgcctggggacactatcccaaggaggaagagcatgttggattgttcgaacagatccggcgtgagcaggaggaacgcaaccgttcagccagtaatgcaacaacattctataactcaaaggaatggcgacgtttacgctatcaggccttcagaaagtatggcaacaaatgctctgtatgtggacgtggcgcaagtgaaggaatggtgatgcacgtagaccatatcaagccccgttcgctgcatcctcatcttgcactggaactatccaatcttcaaatcatgtgccatgagtgcaatgtgagcaagagtaatagagatgaaattaaatggagatag

SEQ ID NO: 162331 - DNA, 150 bp, Enterobacter cloacae
atgattagattgtctcttgaggaagtattagaagggcttgaacgtcatagttttatctttgaagacgaacagcagtactcactgattgtgttcatcctctccagcatttactcccaagcatcgcaggagccaccgcaatggaatggctaa

SEQ ID NO: 162332 - DNA, 138 bp, Enterobacter cloacae
atggaatggctaattgctggcggtgttctgctgctcatcctgtggttagccttaatcacactgctgctgcaccgaaccaaacacgacagtattaaaaccatccttagctacatgaaagatgatgaccaaatcccgtaa

SEQ ID NO: 162333 - DNA, 393 bp, Enterobacter cloacae
ttgaaattttttaaagcagcagcttttttaactcttgccctaacgtcctacaccgcacaggcaaatgatatctctgtacttaaaaaatcactcaagccgtggcagccgattgaagtctcgaaaagtggcgacacacttacggtggtactaaacgaaaatcaagtaacaccaacaatttatgatacggtcattagcaccggtgtttgcatggatatctggacaaaggatgtacccgccaattacctcgaaaaagtaaaggaactccatatccttaataagcacaaattcaaaggctacgtgctggaacagcctttagccacctgtaacgaaatgggtaaagaacaacccgaaagagcaaaagtgattatgctttcacatactcatcttttctga

SEQ ID NO: 162334 - DNA, 1248 bp, Enterobacter cloacae
atgcatgcaaaggatgtttttactccagggaaatatcccacccatactttagtcgacgttcatttagcatctaaagaacaacaactcaaagatgcacttgaactaggaacaatgcttgtttctatatctgggccatcaaaatcaggcaagactgtatttgttaaaaaaacattaggaaatgaaaaccttatagaaataacaggcgcaggaatccactcagccaacgatttatggatgcgagtgtttgatatattaggcactcccgtcacccaagttcagacaacaacaaatacgagttcattttctggaacggggaaagcttctggacaggcaagtatatttgttgcaaaggcaaatattgaaggctccgttacggggggatattcacatgcgtcccagacagccgaaagtttttcagttgaccctctgcaattattaaagcaagaaattggggggaccgattttgttgtctttatagatgactttcactacatcagtaaagaggttcaggcagaattagctcgacaaatcaaagatgctatagccaacgactgtaaatttatatgcgcttcagttccctatcattcagatgatgtcataaggggaaattcagatttaagaggtcgtatttttaatatagactttgattattgggatgaaagtaatcttacattaattgcggagatgggtttcaaacttttgaatatcactcccgacactaatgtcatttcaaatctggtaaaagaatctgcaggctcccctcaattaatgcagtatttatgtctcaactcatgttatgaaatcaatgctcgttcgacgtcaataacctctactgcgtatcctgacaacccagaccttttagaacgagtttgtaggagaacacttgcctcggccgattatagttcgattgttgataaaatgcgcgatggacccaaaacgagaggttctgatcgtaaggcatatatatcaacaaaaggttggcaaggtgatgtttacgttttccttttaaaagcaattgcgctcaatccgccaaccttaacattccgatatgcagacttagtgtctcgtgttcaatcgttatgcattggagaaagcccatctggctcgggtataaccagcgcttgccaacattcaactgcaatagctaatactgctgcagcaaacaatatcattgaattcgaccaagaaaatgacgtccttgatattagggacccatatcttttattttatctccgctgggtagattaa

SEQ ID NO: 162335 - DNA, 456 bp, Enterobacter cloacae
atgagtgactttaagccttttgacgaccggctcaatggtttgattgctgccctgtcaccggcaggacgccggaagcttgccggagagattgcaaaggaactgcgcaagtcgcaacagcaacgcatcaaacagcaaaaagccccggacggctcaccctataaggcgcgaaagcgtcagccgctcagggcaaagaccgggcgaataaaaagggcgatgtttcagaagttgcgcacgaaccggtacttgaaagccagtggccgtgaaaatagagcggtcgtggagtttgcaggtaaagtacagcgaattgctaaagtccatcaatttggtttaaaggatagaccaaatcaatttagttcattagtaaattatgatgctaggccattgttaggaattgatgattttagtaggggtttagttgaaaaaattattatgcaagtaataagcaaaggggggtga

SEQ ID NO: 162336 - DNA, 855 bp, Enterobacter cloacae
atggcaaagaaagtttctaaatggtttcgcatcggcgtcgagggtgacacctgcgatggccgtattctcagcggcggtgatattcgtgaaatggccgaaacctatgacccgcgcgtctatggttgccgcattaatcttgaacacattcgcggtctgctgcctgatagcgttttcaggcgttatggtgatgtggccgagctgaaagccgagcaaattgacgacgactctgcgcttaacggtaagtgggcgttgttttccaaaatatccccgaccgatgaccttatcgcgctgaataaagccggtcagaaggtctacacctcaatggagattcagccgaattttgccaataccggcaaatgctacctcgtcggccttgcggtcactgatgacccggcgagcctcggtaccgagtacctcgaattctgtcgcaacgcgaagcacaatccgcttaagcgctttaaggccaaccctgaaaacgtcttttccgtcgccacactggctgagctggagtttgaggacgttcccgacaccatgctcaacagcctgaccgacatggttaaagccatttttggccgtaagcaggccagcgatgacgcacgtttcgccgatgtgcatgaggctgtaaccaccgtcaccgagcaggtgcaaaccaacctcaccgccaccgaccagcgcctcaccgagctggagaccgcttttgcacagcttaagcaggacttgaccagcaaagtcgatgaaaacgcgcaggcgtttacctccctgaaaagcaccctcgataacaccgaaagccagcgccagccgcgccgcgagctttcaaaaggcggcactggcgacgagctgctgaccaactgctga

SEQ ID NO: 162337 - DNA, 258 bp, Enterobacter cloacae
atggcaggtcatgacttagattttcaagtggtttaccggggtaagaccttagagtattaccgccccggagggtgggttttctttcagcggccaaaagagtgcggtggcgggtactggttagggcgcacgtatgacaacgtttttatgattgaatacgagcggcctgtatcactcaatgacggcatgagctacttagacactctgcgaaaagtagaggcaaaaagtaacgaatttgacgcgaatttttcactgttttag

SEQ ID NO: 162338 - DNA, 234 bp, Enterobacter cloacae
atgagccatatgcgaccgccgccggtgcataccacaacaagtattaagctgatggccgtcgtgcatcgcctgcagcagattatgattaacgagaatctgacccctgacgagctggtcgggtgcgccggtatcgtaagagataaccatcgcaaatatagcgacatcagcaatctgaaaattgagatattcgcaccggcaaagggtcctaaaattccgccaccatggcgaccgtaa

SEQ ID NO: 162339 - DNA, 465 bp, Enterobacter cloacae
atgagtaaaattcatgagttaaaaatcttaccagtgcattttaacgcggtgaaatctggagaaaaacgcgctgaatttcgtatcaatgaccgagattattcttctggcgacgttctcaggctacatgaatgggaacctgaaaacggatataccggaaaacgtgtatcagtaagggtcacagacgttactgatttaacggtttgggtgggaaactatgtgatgttgagcgtccagctacttgttgaggatgaacctagcggtatgtccctgttgaactggaaagaacttagcgataaagggctagttttcagaattaatcacgaaattttacacccgttaggactggctgttggttatgaaacacttaacggggtttcggctggggctttcgtcgctgatgatggtgtctggcaatattctgacgagctgatcgcagaagcgaaaaaaaacgggtggttaaaatga

SEQ ID NO: 162340 - DNA, 1338 bp, Enterobacter cloacae
atgagccaagaattagaattaaattttgacactcgagacgagtataacagaaagatcatagctgaaaaaatagtaacattactggaatcaccaataagtatatcccctattgtaattgatggtggttggggtacaggtaaaactgaattttctaaaaaattagcaacgctaattaacaacaaaaatgacactcacaaagtaatatatattgatgcattcgctgaagatcataatgatgctccaatactcactatcatggctgcaatagtaacattatttccaaatgacgataagaaagaaataatttcaaaagctcttccggcaattagatttggacttaaaactgtgttcaaagccggtactggttggatactaaaacagaatgctagtgatatcgctgaaggattggaagatgcaatcaaggatgctgccaattcagccatagatggaacagtagaagcgctcctagacgatcacattgaagcacaaaaaaatataactgcactcaaacaggtattggtcgaactaacttcagataaaaaaataaccatcattgtagatgagcttgatcggtgtaaaccaagttttgccctttctataattgaaaatgtaaaacatattttcgacattaccaatctcaatttcgtattagtagcaaacacttcacaattaagagcatcaataaatcatatttatggttcatctgttaactcagaacaatatcttgataaatttgtaaagtttacatttagtttaccagtaacatttaaagcggatggtcataacgacgttttaacatctgtttatcactggcataaaatttgtagtcaatcagaaagtcttgcattagctaatgaaagatgcggcgccttttttgaacagtttattaagcgtaaaaaagtttcattgcgggaggtagaaacgctagctcgatacgtggagatatatcaattatttactaataatggaattagtaaagagaaacagataggttattgtttttatagaaccttagctgttattctttattgctttggtagagatattgcgttgtcatatcttgatgacaatatagaccctgaagcattgctttatttatttggtgttactaaatttgattacggcgcagataaatataaagttcataactttgagcgtgctttgtttgggataacctataaacatatctcgataacatccccgcttaatccccccaatcaagaaatcaaaacagaatggtcggacgttagcgactatcaatttctgaaagatgctagtggttttagtgagccagccttaatttttaagcaagcaataaaagcatttttgatgcaatag

SEQ ID NO: 162341 - DNA, 570 bp, Enterobacter cloacae
atgaatttagaaaaaggcggccgcggagccatagagcgtatggttgaggcctatggtttcaagacaagacaagccttgtgcgaccatctaggcatatcgaaaagcactcttgcaacacgctacatgcgtgattcattccctgcagaatgggtgattcaatgtgcacttgagactggcacgtcgctaaattggctcactactgggcaaggctcactacaaagttcacaaaaagaaaacaccaaagagattgaaaagaacattttatctagcggaaaactacttcctgacgggttctatgttttcgataacagctttttacctgaaaaactgaaaaaaccttttgttgtgatcgatggcacatcagagtttatctgcgatagggattatggagacgtgcgtgatggtaagtggatcgtaggtatcgacggcgaagttgctatcaggaaactgacccgtctgccaggacaccgtctgaatgtcgaaggtggcagcagttcctttgaatgtaaaatagatgagattgatatcatcggaaaaattagaagcacaatagtgaattatgtaaattaa

SEQ ID NO: 162342 - DNA, 240 bp, Enterobacter cloacae
atgatgcgaaatagtggaacgtgtaccaccaaaaccggaccggatgatgccggtttattccagctgtttaacgagactcgcctggatgagcgtaaaagctgtgcctttgccgtttccctccgcatggaggcactggcgatccacatcctacataaggaaatgaccggaattgaggcggcagaactgctgcgccgtgaagttgctcgttatgaagctgaatcacgcggggactggcattaa

SEQ ID NO: 162343 - DNA, 1410 bp, Enterobacter cloacae
atgatccaaaaaggatcgcaatgggccggggccgccagaactggcgcgctttccggccagtcatgcacctgcatgaaaaccactacacaaagcgggcaggcgtggcggggatacgagcgcgcgcttgaacatgacattgtattgataatggattactataaatttttcggaattgtgagacaaatcatgcttaaatttattagaacaattcagcaaaataaaataaatagaaaaattgatttagatggtagtaatatgatcattgttgggaacaatggtgcgggtaaaaccagttttttgctggctattaaagactttcttacaaagatagttggtgaacaacagctattgactaattctgatttacataagtacatcagtgacaacaaaaatgcattaatgcactatcccgctgaatccactaattacattaatactcaaaacgcgattgattattataacgagattttagaacagagagaaacattaaatatagatttttgctcaaatgctacgcttattaatgagataaaaaaaggaaagtttgtttttagattctttgatgcatataggagatattctagtaattcttcagggcttctcagtagtgtagatgagttatacgaacagttcgaaaaatctccgataagtaatgatgtcagcaactactttcagcgctatttagtatcaatgtcaaattatgcactaattgagcgaggtgctggagagttagatgagtatgaacgtgttactaaaatcatcttaaaaatggagcatgatctacaaaatctttttgatgatgcctcaattaagcttgttttcaatagaaaaaaactcactatggaaatagcccaaggagaaaagccatctttcgtgcttgaaaatcttccctccgggtttgcttctattttggccgtttatgcagaattaataatgcttgctgagttaagtcgaactgaacgagctaatatcagaggggttgttctgattgatgaaattgatgcacaccttcatgtttcagttcaaaagagagtattagagtttttctcaacaagcttccctaatattcagttcatcatatccacacattcaccatttgttattcaatcggtatcgaatgctattatatataatttgagcaatgaagagtccctagagaatctatcggtgtactcatatacttcaatagtgaaaggtcttttaggtgaaacaagtaattctgctaatttagaggatgttctcactgaacttgatagcctttccaaaagttctaacttcggggaacgttattctgagttactctctaagctggaagataactatgatgttctagatgctaaggctcgggctgttgttatgagtgcgaaatctaggtttgtggattgggaagagggtattgacaatgtttaa

SEQ ID NO: 162344 - DNA, 675 bp, Enterobacter cloacae
atgtttaatgttgttcgatcacaaccagctcccgccagtcttgcaaggcaaaatagttatcgagggcatgatgttattgaagcattacgagccatgtttcataacaaatgctatttatgtgagcaggactctgtggcagacccagaagtggaacattttagacctcataatgatgaacccaatttactctatggttgggacaatttatacttttcatgccgccgttgtaatagtgttaaaagcaacagtcatgttgatttacttaactgcactgatgcgaatgtaaatgtgtttgatgaaatagttcattatgctggaaatgctgctatgggggaggttgaaattagagctagtaaatcacgtccttcacagcaaacaattaatacggtaaatttaataaataaatgttttaatgaggaaggtactagtctacgagaggtgtctaaggaaagtctattagaaaaactattggacgaacttgccgaatattcaaagtggagaacagttttagcatctaggagaagtactcaacagagcattcaggaggctaaggagcagcttgcggtgatgtgctcaatagcatatccattttctgttttttggaagtggcatatattgaatgatgttattgttaatagaaaatacccattaattagagctgagttgggattttaa

SEQ ID NO: 162345 - DNA, 426 bp, Enterobacter cloacae
atgacacgcacgctggcgatttttttgctgctactggcggcgctgggctggcagtcgtggcggctcaacaacgcccgccacaccatcgaaacccagggcgaggcactggaaaccaaaacgcaggcactggcgaagaaaaacagccagctgatcggcctatccattctgaccgaaaccaacagccgggagcagatgcggctttatgtggcggcagagcagaccactgcgctgctgcgtcaccggcagcaccggatcgaggaactgaaacgtgagaacgaagatttacgccgctgggctgacactcctttgcctgctgacattatccggctgcgggcgcgtccggcccttgccggaggtgcagcttaccgtaaatggctgtcccagagtaacgccgtgcagtctgaccccgtcagcgccgcgcactaa

SEQ ID NO: 162346 - DNA, 444 bp, Enterobacter cloacae
gtggataatctgcataaggtcgatgagtggcttgccgcactgctggcgaatcttgagcctgcagcacgtcaaagtatgatgcgggaactggcgcaggagttgcgccggaatcagcagcagaacatccggctgcagcgaaatcccgatggcagcggatacgagccacgtaaagtcacggcgcggactaaaaagggacgcatcaaacggcagatgttttcaaagctacgtacggccaaatacctgaaaactgtagccagcgcggattctgccagcgtggagtttgtcgggcaggtgcagcgcattgcccggatacatcactacggcttacgtgatcgtgtaagccgccgggcgccggaggtgcgttacgcagagaggaagttattgggatttgataaagaatcgaaggaattggttagtaattatttaatttcagctatagcataa

SEQ ID NO: 162347 - DNA, 918 bp, Enterobacter cloacae
atgaataaccacaatgaaaatacggactcaaccgaacttgagattgttgtgccattagatcctactgcaccgccatctatcaatgaggaaagggaaaaatacaaaaaagaacaacaagagcgaatcgcgaaatatgtggtcggagggagagatctcggagggaaccttataataaaaacttattctcgcggtgatgaatatgtaatatatgaaatagccgacgtccccccacatgaatcaatgcttgtctacatcgactctataatcgaagaagatgagtctatgatagatagataccatgcagccaaagaaaattttgatgagttcatatcccattgctataaatacaactgttcatccatttataaaaaacgagctgcaacggttttgtccgccattattttagacaaaaacaaagatgataaaaaccacttccaaaaaatcaatgaagacatagtaaaagattatgagaacacaacaaaaggaagaaatttatatcagttaggagcagtatccttatcacttacattcatcaccctagcaaccataatctacttattgagagattggtcattcatgagtgagaatcattacatctcagttgtgatatatgctgcggcatttgcatccatgggaggatttatttcagtctctctcaaaataaaaaccctacacactgacagagagcttaacgataggatatatttcctttacggctcagagcgcattttattttctatcatcgcaggcattcttgtgtacttcatgcttaaagggaatcttatatttggcttcttaaacaatacaagcgacatctcgttttcaacctatattatttgcgcattatcaggatttagcgaaacactaatccctaacacattgagaaatttagaaaccaagtccgaaccgaaaaattaa

SEQ ID NO: 162348 - DNA, 180 bp, Enterobacter cloacae
atggaaatcaaagaacttggcttagttaaggcgcgtgtggaacttgttaccgctatgctcaaatgtgctactgcatttgttgtgttagttggtacggtttacaccgttcttaacatggccttcaactacgactgtttaaatcatggaaatagaagttcaacgatgggaacacaaatttga

SEQ ID NO: 162349 - DNA, 774 bp, Enterobacter cloacae
atggaaatagaagttcaacgatgggaacacaaatttgaaattaggccaggggtttgggtctatgtcccaagtgtcaggacaagtgaacttggggaacgcatacttcaatcaatcagaaacaagtggattccgccactctatttttatcatttaagaaccggcgggcatcttaaagcagccagattgcaccttaaaagtagttttattgctgttatagacattaaacatttttttcagtcaactagccgcagccgcatcacccgtgatttaaaagcctactttacctattcacaagcgcgtgaaattgcaaaattttcaactgtgaagaacctgtctgatactccccataagcacgtccttccattcggttttgtccaatcgcctatgcttgcgaccttttgtttggataagagtcatttgggtagtctactgcgtcgcttgaacaaacatcccaatgtgaaacttagtgtgtacatggatgatgtgatcatatcctcaaatgatattgttcaactgcagacgacttacgacgaaattttactagcgatggataaatcgggttatcaagtcaacatgattaaaacgcaggcaccatcatccctaattaaagtattcaatttgtatttgagtaaaggaaatatgaaagtcacctcacagaagatgagcgactttctcattgatttctatgcgagtgactacgagccacacaaaataggtgtcaaaaactacgtcgaaagtgtaaatccagagcaagcgaaactattgaaattgtaa

SEQ ID NO: 162350 - DNA, 441 bp, Enterobacter cloacae
atgaatacacaaaatcatcagttcacggagcataccgcaattactgcctcagtggtcccggacgagttacgcatcggcttctggccgcagcactttggctccatcccacaatggataacccttgagccccaaatcttcggctggatggatcgcctgtgcgctgattacagcggcggcgtctggagcttttacacactcagcaatagcggcgcatttatggctccagagcctgacggtgagaaatggacgttgttcaacccgatgaatggcaacgatgcggagatgagcggagaggctgccggtatagcagtctgcctaatggcttacagccaccacgcctgtcgcaccgagtgtgacgcgatgactgagcactattatcgcttacgcgacttcgcgctgaaccatccagagtgcagcgccattatgcatctcatcgactga

SEQ ID NO: 162351 - DNA, 222 bp, Enterobacter cloacae
atgcctgaactaccagagggaccgttttcgcgccagcaggcagaggcggttgcggctcaatattccaacattgctatagaggacgaccagggtacgaatttccgtctggttatccgtcatgagcgttgcatggtctggcgagcctgggactttgagccggatgccggttactggctgaaccggtatatcactcgttatggcatccgcaaatttcctgcataa

SEQ ID NO: 162352 - DNA, 876 bp, Enterobacter cloacae
atgcaaaaatctgacggccttctggccattgagaagcctctggcttcactaccccatactcttcgcagtctaattcttaaacgccttcgtagtctcacacagtacgagccggttattggcattatgggcaaaagtggggcaggcaaatcgtctctctgcaatgccctgttccagggagaagtcacgtcggtcagcgatgtggaggcctgcacccgcgatgtgctgcgcttcaggctccgcaatggcaatcacagcctgatgattgttgatttaccaggtgtgggtgaaagcgagcaacgcgatgaagaatacactgcactgtatcgccgcatcctacccgaactggatttagtgttatgggtcatcaaggctgatgatcgggcactgtcagtggatgaacacttctatcgcaaggtgatgctgacgtatcagtaccgggttttgttcgtggttaatcaggccgacaaggccgaaccctgtcatgaatggtgtaccaccgatagcacgccttcacctgctcagcagttaacgattgagactaagagaatcgcgacgcagcagttgttcctgccgcaccatcctgtctgtgtggtgtcagcccgcacagggtggggcgtggaaacccttgtcgatattatgatgcatagcctgcctgaccgggccaccagtccactgacaacacaacttcatggaaggctctgcaccgagccggtaaaaaagcaggcacgtgagcgctttggtcatgcagttgatgaaatgattggcaatgtggagtcatcatcttttctgccagcgcctgtaagggctgtgattcgaaccgtgcgggaagccgtggtgaccgttgcccgtgccgtctgggactggattttcttctga

SEQ ID NO: 162353 - DNA, 927 bp, Enterobacter cloacae
atggacaataaacctttagaacacttggcagaagatcatataaaaacaatacttagtcatgctaatatcaagtttcttaaaccaaattatgacgaaaatggttcagaccttgttttattgaatccaataaacaaacatcttgcaaagcaggtaattatccaatctaagggccggaatgtaactaccagtagcagcaatgtcactattccctccaaatatatagtgtcaaacttcatatgcttcatctatctgaaaatcgatgatgacttcaataattattgctatgttttttttcacgatgacatattgaattggaacttaaatgcagagagttatgctttgagtgtgccaaaaaaattcagagagtcagattatttcaataatcaccaattcaatccaaatgtgcacataccgaaaatcaaaaaaatgcttaaccaagcacctattctgaggcagagttatgtgcattttgaggatatggctttaaaagaaatattattcgaaatgtggaaaaaatatgactcatttccggacttaaatttggtaaaagccctttatgatgacttaagtagtttaacaagttctattcccttagatatttttttaatctgcacaatcgctaaacatctaaataaaatggaatatagaactcttgattcatttatgcaggatttgtatgacattagaaacatcaacaagccaatatctcaatcactgatcattcatgacatcgaaaacattaaaaggctcgatgggacttgggctatttcatatccaatcgtgaagtttggacaagtgaatgtcacttatgatgggatagattacaaaggactatattgtcatattggtgataggaaagaccatgtagaagtaatgttatttgataatggagattatctttgctttggtcaaagattggatatttaa

SEQ ID NO: 162354 - DNA, 834 bp, Enterobacter cloacae
ttgaagctttttgattatctgaagatggagtttcctagtctgacgcctgaagctaccaaagtccaccttgcacaaatgaatgattataaagaggatccgttggttaaattccgtggagggactttcgatgactggcaatgctggcagaagcggctggagtttagccgaagatatgtcgtttcactgatcaggatcccggggactgaaacttggctatttgcgggagcatttcagcagacaggcaatgcgggaaagaaagcataccctgatcgtgaggaattgtattatcagtaccaccttcagaaaattcctgagactgaagaatacgcaggaaggatgtatatcagctttaaaaatacagcccgcaacttcattcgcctcggtgaaagtattcagagcggactggttatcagctcaatcactccagtacgtctgaccttcggcgagtttccaggctaccgcaacgttgtgctggatcggaatagcatcggcgcgatcctcagacttaatctgcaatcctggcgcaccgcactgtccgtggttaaaggcatctatttattaacagatcgggatggcggaaaactttacgttggaaaagccgatggaatcgatgggatatggggccgatgggattattattttggttccgggcatggcggcaatgtagggcttaaggaagctttcggcacaggtgatgaaaatcgactgcagaatatcactttctcaattcttgaagtcatggatcttaatgccgaaaaaggtgaaattgaccgtcgcgaaactcactggaaacaaatactgctctcgcgggagtgtggacataaccgaaactaa

SEQ ID NO: 162355 - DNA, 792 bp, Enterobacter cloacae
atgtctaaagaacgccgtctctcaaagatttttgcaaaagatggtaaatcagtgacattagcgctggatggttactatttttccacgaaaacaaatggtattgataatacgattaaccaactgcctgcattggtggaacaagggctggattgtgcgttggtcacgtacggtatgctgaaaaattttcgtgagccattaaattctgtccctgttgtattacgcgtcgatagtacagtcagtatttttgataataccgttcccgatactaccccgatgtttaccgttgaagatgcgttgaaagtcggcgctgaaggtgtcgtctgcatgaccttcccgggtgctttcaacgaagaaaaaacgcacatcatggcaatgcaactggcacaagccgcagaccgctggaacgttccgctgattgtcgaatcacttccatatggctaccccgtgaccagcgacgactcgaacaacccggcgattatcgccgcctcggctcgagccgcagtggagctgggggccgatgtcatcaaaacacgttttacaggtacagcggaagaccgcttgatcgtcgaagcggcaggcgttcccgtccttgcacttggtggcccaaaaaccggcattgatggttacttcaggtttgttcagcactgtatgcaggttggggctaaaggggtggcagtgggtcgaaatatcactcaggacccgcgaccagacagagtggtcgcaggcctgaatgctatcgtccacgaaaatgcctctgcggaagaagcatacagcctctatatggctaaataa

SEQ ID NO: 162356 - DNA, 552 bp, Enterobacter cloacae
atgtttttaaataacaccatcattccttcagttagaaagtataaacattttgacaaggcattatcctgtgcatcggaatatgttctgttgtcagaggccaatatcggcaatctgcaatcactgataggcaaatgtcatcaaagtggtaagaaggttttggtccatctggagttactcggcgggtttaaacccgatcaggctgggatcaatctactgaaaagttattataaagttgatggtgttatttcttccaatctctccgccctgcgctatgcaaaaaaagaggggttattgactatttttcgggtgttacttatcgattctcgatcgctggatcagtctatcgatatcgttaaacataacccgccggatgcaatagaaatcttacctgctgaatatgcctgccagtgtctggaattgattagccgaaatttgaatggctttgacgtgatattcatcgccggaggctttgtaaagcggaaataccttgtagataaaatattccatgccgggtttaaaggaataaccaccagcgagccgggtttatggtaa

SEQ ID NO: 162357 - DNA, 1539 bp, Enterobacter cloacae
atgaaagatgaatatgtaatgggtatcgacaatggcgggacagtcactaaggcggctatctacgatcgcaacggcagcgtggtttctatcgcgtcaaaatccacccagatgctgacacccagggaatttcataccgaacgcgatattaccgaactgtgggcggctaacatcgaggtcatcaaaaaagcgattgagcaatcagggatcgacgccagtcaaatcaaaggaatcgccgtcaccggacatgggaacggtttgtatctggtagatgaagctggcaacccggcccgcaacggcattatctcaaccgacagtcgggcaaaagagtacgtggaaaagtggcaaaactcacccgagtttctgaccgacatcctgcctaaaaccatgcagtcaatctggaccggacaacccatcgctctgctggcatggctgaaggataacgagccggaggtgctgcagaaagcacataccatttttatggtaaaagacctgatccgcttctacctgaccggagaggcttatcttgagcttactgacatatccgggaccaacctgattaacgtacgtgaccgcaagtatgacgatgagctactggcatggtgggggcttgctgacctgcgcgcgaaattgccacccgtcaaactgtccacggactgctgcggtcggataaccgatgaagtcgcccgtcaaacaggcttgtgcgcgggcacgcccgtctctggcggcgtgttcgatatttccgcctcgtctgtcgcctccgggatcaataccctcaataagctggctattatcaccggaacctggagcatcaatgaatatgtgactgaccatccggttatcgataaagatctgtttatgacttcgatttacccgatcgacggtaaatggctgataaccgaagccagccctacgtctgctagtaatcttgaatggtttatcaataatttcatggagaacgaccgggaaactgctgctgctcagggctcttccgtctatgagttgtgcaataccttggtcttatccacgacgccagaagagagccatctgctgttctttcctttcgtatttggctctaacaccattcccgatgcctcagcaggctttattggggtgaacagtttccataaaaaagcgcatttcctgcgcgcgatttacgaaggtgtggcgttcagccatctctatcacaccgagcgtttacggaacatcaatccggatttgagtcggaccatccgaattgctggcggagtcaccaactctccagtctggttacaggtctttgccgatatcttccagtgcacgcttgagattgtcgatgtcaaagagcacggcacactaggtaccgcaatgacagccgctgtaatgattggctggtttgatgatgtctttgccgcgtccaatgaaatggtgcgcgtcgcgcgtaccgtgacaccgaatccggcccatcagcaagtgtaccaggacaaatatcagctctacaaaaacctgttatctgaaatgcagtccccatggaaaagctgcagtaactacatcacgcattaa

SEQ ID NO: 162358 - DNA, 762 bp, Enterobacter cloacae
atggatctaaatctgaaacaccgcacagctatcgtcaccggtggtgcgacgggacttggccgggagtttgtcctttccctggctaaagaaggcgtcaatatctgtttcacgtacatgcgtgatgaagagtgcccggagctactgattgaacaggtgaaatccaccgctggcgtcaaaattattgcggtgaaaaccgatcttgccgatgagaaaagccgggagcgtctctttgcggcctgcattgaggaaatgggaaaggctgacattctggtcaataacgccggtatctggctcagtggttacgtcaccgcgataaccccgcaggactgggatttggtaatgaacgtgaacctgaaagcggtattccatttaagccagctgtttgtgaaccactgcctgcaacaagatcaggcaggcagcattttgaatattacctcacaggccgcgttccatggttccacaaccggccatgcccattatgcagcgagtaaagcgggcctggtggctttctctatctcgctggcaagggaagtagcaaaacagaaaatcaacgtgaacaacatcgccgtcgggattatggacaccgcgatgatccgtaaaaatattgaacaggacccagcctattacgtcagccggattccagtaggtcgggtggctcagccaaatgaaattgccgacatcggggtcttcatggtttctcctaaaaccagctatatgacgggagcaactctggatgtcaccggcggtatgttgatgcgttaa

SEQ ID NO: 162359 - DNA, 996 bp, Enterobacter cloacae
atgaaatgtctggcgatagccgatctttttatcaacaaagcgatgatggatgcaggtcttaacgcgctcagggataaaggtatcgacgttgaagttcgtgaatggtcacatgaatcagtcgaaaaattgcaggaggataatctgcgggtcgagcaggaaggcgcagaagcggtcgcgttacccgcagccttactccaggatgctgacgacgttgaaatcctgataacccagtttgccccggtcaatacagcggtactggataaactgccaaagctcaaatacattggtgtattgcgagggggcgttgaaaacgtaaaccagcaggtcgcactggcccgaggaattgaggtaatgaacacgccggggcgcaatgcccgcagcgtggcggagtttacggtcgggatgatgctggctgaaatgcgcaatattgcccgttctcatgacgcattacgcgataagttctggcgtaaagacagccctaatcatcaggctattcctgagcttggcggtaaggttgtcggtctggttggcctgggccatatcgcccaactggtcgcgggctttcttagcagctttggcacagaaattatcttttatgataagtacgtatcgggccacgaacgctatgagaaagtcgatactctcgacgaactggtaacgcgggctgacgttgtatcactccatgcacgtatgacgccggaaaccgaaaacctgatcaatgcgcatcatttcgggttaatgaaaagcagcgccattattgttaacactgcgcgctccgggttaatcaatgaacgcgatctgattgacgctctacaggccgggaaaattatgggagcggcgctggatactttcgacgatgagccgttacctgatgacagcgctttttatttgctgaataacgtcaccatcaccccgcatattgcgggaagtactctcgacgccttcagcaattcacccaaactatttgctgagatcttgctgaagaaactcagttaa

SEQ ID NO: 162360 - DNA, 1263 bp, Enterobacter cloacae
atggatattatcaacagcattattagtctgggggcatcagtaatgatgccagtaatattctttatcatagcactttgctttggggtaaaaattggcacggcatttaaagccgggatgctggtcggtattgggtttgaaggcgtcggtctggtgattggtctgctgctgacgaacattggcccggcgtctcaggcaatggtcgagcgcatcggcctgcagctgaatgtcgtcgacaccgggtggccgaccgcttcaacgattggctggggctctccgctgatgctgcctgtcgtggtcggttttattgtcatcaatctggccatgctactgctcaaattaaccaaaacggtgaatatcgatatcttcaactactggatattcctgatcatgggctcggtcgtgtatgccggaaccggtaactactggctttctgttggcataacatttggtatttttgtcttaacgttactggcagcagatttaaccgccccgtatttacaaaaaaattataatctaaaagggatttctttccctcaccttacctgtatagcctacgtcccctttggcatagcctgtaattacattattgataagattccgcttatcaataaaattaattttgatccggaaagcattaataaaaagttcggtgtatttggtgagccgttaacgctgggtttcgtactgggattgctgctggcattccttgccgggtatgacgtttcggctgccgtttcgctggcaatcaaggtctccgcggcgatgctgctgttgccaaaaatgattgaaatactggtgcagggattgcttatcgtccgtgatgccgcagaagcaaaattgaaggccaaattccctgaccgtgacttttatatcggcatggataccgcgttattgattggcgaaccttcagtcctagccaccggactgctgttgatcccgatggccgtagtgctgtctatcattctgcccggtaaccgcgttctgccatttgtcgacctcgcttcattgatgttcctgctggcgatggtcacaccattctgtaaacgcaatatgttccgcatgttcattagcggcacgctgatcgtcagctgcattttgtacgtcggaacggacatttctaaggaatacactcaggcggcggttaactccagcattccggttccggaggggatgtctgaaattaccaatattgtcgggggggcgaccacaccagttggctggctggctgtgaagtttggggagtttttcagtacagcgccttaa

SEQ ID NO: 162361 - DNA, 1506 bp, Enterobacter cloacae
atgaaagtgctgagcaaaagacaaatattactggtaaatcgattagctcaggaagatggctggctaagcacggctcaggccgcgaaaatccttcatatctcagtgagcaccctcagaagagatgttgatgctatcaacgactttttcgctgataaaggcaatcacatactctgcagacctggcctgggcatgaggctggatgcaagtgaaatagtgtctttgccagtcacatctccagacgaacatgttgctaatatattaaaaagcaaaagactcattggcatcatcactgatttgctgacgcactcacccacgccattatccattacttttttgtcagacaagtatttcatcagccgctcctcaatcgtagaggatttaaataaaattgataaatggctgggcagtttttcactggtgatgataaagaatcatacgggaacgtatgttgaagggaatgactatgatattcgcatggctctcaaggagatcgtaacacatagcgtattatgtaattatcagatgaccgatagtcgaatcgacagattttctcgtgtacaactcataaaagagtttggtaaagaaaacgtcgcgaactgtatcaacctcatcaccttcatagaagatgaattagcatgtgcaatcagtgaaccctactacaccaatcttttttcacatttactggtcaccatcagacgaatggagaagtgtcatcctcataccgataacgagaaggttccagttcatgataataaagaatggaaagttgcagttaaagcaatatcatggctagagggaaaatatacattttcctttccagagattgaaattaactacatctatcagtatctgatttcatctggaaaagatacgaccttaaccaaccttccagataacgattttcaggataaagaggcggtaagttatgccataaatctgacaagtgacatctctcagtcgcttaaatgtgatttgatatcagacaaaacactgttgaactctctggtcatgcatattaagccgatgctaaaccgactaacttatcggataattattcacaaccctcttcttgatgaaataaaaaaagaactctcagatgttttcgctgctgtcagaagcgccactataaaaataaataactatgataaacacgatcccccttcagaggatgaagttgcttatttaagcgtttatattcaggcagcaatagaaaaggttaaagagaacaaaaaaattatccttgtctgttcaagtggagtcggcacatcgcagcttctgtatagccggatcaccaaagcattcccggactgggagattgtcgacattgtgcctggaagcaggcttaaaaaaacattatctgaaaagaagtgtgacttaatcatttcaacggtgaggatagaagaaatgatgatccctgtggcatatgtatccgctcttttttcagcaaaagatattattcgcgtgacggaaacattattcaccgaacgcaactctcaggagaaataa

SEQ ID NO: 162362 - DNA, 474 bp, Enterobacter cloacae
atgttagataaaattgttttaagtgatctattaagcaaagcctgcgtgataactgatatgcaggcgaacagtaaaatggatgtcattgagcaactgacgcagtcgctatgcgaagaaggtgtaatcgataataaacaaggttttatcgctgacgtgcttgcaagagaagcactggggtcaacgggtttcgaaaatcagattgctattccacatggaaaatctcagtgggttaaagaaacaagaattgctgttgccaggctaaaggagactgttgactgggaaaccatggatagttccgatgtcaaactggtgattctgtttgccgtgaaagacgtcgacagcggagcgggacacataaaagtgctggcccgtatatcaattgcattaggagatgatgacgtcgtcgacaaattacttaatgccagctcacaagaggaactgtaccggttaattctcagcaataccggggagtag

SEQ ID NO: 162363 - DNA, 1407 bp, Enterobacter cloacae
atgaaaatcattgcaattaccgcctgtcccactggcgttgcacacacataccttgctgaagcaaacctcaaaaagaacgcctgtaaaaaaagcattcccttacttgttgaaacgcatggcgctgttgaaagtgagtatatttttacagaggatgatatcaggcaggcggacgtagttttaatcgccgccgataaggttattgatctctcgcgctttaataataaaaacattatccgcgtctcggtaacgcgtgcagcgaaagatgcttctgggttactggatgatatcgtttctggaaaattacagcctgaacggtatcttgcgtcagatatttcggaaaagcagtcacaaaaagatacggataaatctctcgtttcccagatttatattcatcttattaccggcgttaacttgatgattccgttcgtggttgccggtggcattctgattgccctgagtttctcatttggcattaccgctgcaacacctggagatccaaatttcagccccgttgcaaaaatgctttctgatatcggtggaggtgccgcttttgcactgatgctgcccattctttcacttggcatcagtaaatcgattagcggcaatatgggtatggtttccggggccgttggcggcatgatggcaatacaaacgggctcgggatttctcggagcactactggccggattcctggcgggatatatcacgctgctgattgtgaaatatatcaatctccctaagtccctggcaggcctgaagccgatactgatcgtcccgttactgagcgtttttattaccggtgcgttgatggtgttagtcattggcgagcccattaagtttcttctcgactcgctaaccttatttcttcagaacctcgggaataccaacgcagccatcatgggacttttgataggcatgatggtggccttcgacatgggcggaccgctgaataaaaccgtctgcatgtttgctatcggcctgatgtcgacaggtatctatgaaccgattgccgcctgcatggctgctggcatggtaccgccgttaggcattgcgctcgccaccacgctgtttggtcgtaagtttacccgtcaggaaagagacaccggcaaagtcacctatgttcttggcctgtcttttatcacggaaggtgcaatcccttacgcagtagctgatccgctacgtgtcatccctgccattgttgcaggatccgggcttgcaggggctctctctatggcgctgggatgtgcatcaagagccccgcacggtggcgtatttgtcatgtttattccgaatgtgatcaaccatgttgtcagctatatcgctgctattgctgcaggcgcattactgacggcccttattcttcgttttattaagaaagacagtcctgaaactgtacaggagatgtaa

SEQ ID NO: 162364 - DNA, 861 bp, Enterobacter cloacae
atgcttatgaatatgaaagacgttttatccatagctcagcaaaataaatttggcgttggcgcattcaatattgcctctgccgagtttgccaggctcgtcattgaggttgcagaaaaacttcgttcacccgtcattcttgaagtgcatcctgatgagcatgaatttaccggggatgattttatttactatcttcgcgaactggcgattaaggcaacggtgcccgtcgtcatccatctggaccacgggcagacactggaacaggttatgcgggccattcgcaccggctatacatctgtcatgatcgacgcctcagcccttccatttgaggaaaacattgcgatcacccgccatattaccgaagtggcccatgctgcgggcgtatctgttgaagcggaactcggcacgataggtgtggctgagggcagcagcgaaggcggacacgctgaaatcctttataccgatccacagcaggctgaacagtttgtgagagagacaggagtcgacacgctagcggttgcgattggaacctcacacggattatacccggcaggaaaacagccgaaactggatatcgagagactgaaagccattaagcagcgactgagcattcctctggttctgcacggtggttcaggtaacaaagatgctgaggtggcagaatctgtccagcacggtgtcagcaaaatcaacatttccagcgatatgaaaaaagcattctatattgcactggaagaagaactgaaatcaggaagtcatgaacctaacgctctataccttaagccaatggatgcagcgaaagagattgtgatccagaagatggatttattctcctccatcggcaaggcggcgctttacggctaa

SEQ ID NO: 162365 - DNA, 417 bp, Enterobacter cloacae
atgtttgccaaatcctggatcgatctcgacgagaatggtcgtctgtccggtgctcaaactgcgcagaccgccccttatgaccgctatatctgccacctctgcggtagcgtgctgcaataccatcctggatacgaaactgagcgtccgtggttcgggcacactgacggcggcctgacggagaatggcaggcagcattgcccttatgtgaatccggaaagcagtgaaacccggctgataaaccggctgcaacggtttgtgcctgacgcccgtccaaaggtcaggaaagctgactggcactgttcgcaatgttctggtgattaccatggggaacgttattgcctgaactgccaaaccggaaagttcagcatcgtggccacttccatagcaagtatgggagaggtgatattagaatgctga

SEQ ID NO: 162366 - DNA, 399 bp, Enterobacter cloacae
atgctgaaatgccatctcgctattacgcccctgggccatcacatcaccgctgaggatgctgtcaacaccagccccagagtctggagctgcattcactgcggttgtggactcatccttcatgcaggctcacaacaggaggcagcctggtttgaacatgaccagctcaatgtcgccaacaagttgctgatgggatgctcatatctcgacccagaggtgaaagaagacgctcgacaaagaaagctgaagttgatgctggcagccgtggagcctgcaccaatggttttgtcgtggcactgcgttttgtgcaaaagagattatgatggagaaagacactgtcgaacctttggcactggcatttacagcacagaactgaatctaaagacagcctcgccatcctaa

SEQ ID NO: 162367 - DNA, 3282 bp, Enterobacter cloacae
atgagccatattttcacggaagcgaagctggaacaggccattatctccctactgggacagcactcgaatgcggaaggccaaccctgttaccctcattttgtcggtagcaatgtgccgcgaaaagagaaaagtgaggtgctgattacggatgacctgcgccagtatctggccaaccagtatcagactgaggggatcactaaaggggagatttctcacatcctccatcagttgcaggctctccctgccagcgatctctaccagagcaataaaaccttctgccactggctcagcaacggctttttacttaaacgtgaagatcgtaataagaaagacctctatatcgagctgatggataccagcaccttatcagagcagttagctagcttattcacagggcatggcgaagagattgccgaggtgggcaataatatctaccggttggttaatcaactggagatagaaggccaggcccgggacggcggactgcaactgcgtatccccgatggtatcttgtatgtgaacggcctgccgctggtagtcttcgagtttaaatcggcggtacgtgaagaagaggccaccacctacgacgcctggcgccaactttgtgtacgctacaagcgcgatatacctaagctgtttgtctataacgcgctgtgtattctcagtgatggggtgaacaataagctgggaaacctgtttgccccttacgagttctactacgcctggcgcaaggtgaatggtaacgagtccgccgagcaagatggcatcaatggtctttacactctgatccaagggctttttcatcctgtccgtttgctggacgtgttgaagaacttcgttttcttcccagacaccagcaaacaggaagtgaaaatctgctgtcgctacccgcagtattacgccgcccgcaagctttactacaacattaataaagagcgcaagcagataacggctaacggcgagaatatcggtggcaccggtaaagggggaacctactttggtgctactggctgtggcaagagctataccatgcagttccttgcccggttgttgatgaagagcgtcgattttgccagtccgaccattgttctcattaccgaccgcaccgatcttgatgaacagctctcgaagcaattctgcaatgccaccgcttttatcggcgatgcagttattgaaccggtcaccagccgtcaggatttgcgagacaagctggccggatgcgctagcggcggggtattcctgaccaccatccacaagtttactgaagatatccaactgctctccaatcgcagcaatatcatctgtatttctgacgaagcccaccgaagccagatcaacctcgacctgaagatcagcatcgatgctgaaaccggaacggtgaaaaagacctacggctttgctaaatatctacacgactcgctgcctaacgctacctatgttggctttaccggcacccctatcgacgccactctggatgtatttggccccaccatcgatagctacactatgaccgagtcggttaacgatgaaatcacggtgcggattgtctacgaagggcgagctgccaaagtggtgcttgataacagtaagctggaagagattgagcagtattatcaagaatgtgaaaaactgggtgccagtgaacaccagattgaagagagcaagaaaaccacggccaatatgaattccatcctgggcgatccggatcgcatcgaggcattggccaaggatttcgcccagcattacgaaaaacgggtgacggaaggttcgactatcaaaggcaaagcgatgtttgtctgtgccagccgcgagattgcctacgatttctacaagagtttgaagctacagcgccccgattggttcgaggcgaaacaggctatcgatggtgtcgcccttaccgagcaagagaaaaaagaattgatgagccttcctctggtcaacatggtaatgacccgaggccaggatgatgaagaggccatgtataatttgcttggtactaaggagtaccgccgggagctggacaagcagttcaagaaccctaagtccaacttcaaaattgccattgtggtggacatgtggttgactggttttgatgtgcccgaacttgatactatttacatcgataagccgctgcaaaagcacaatctgatccaaactatttcgcgggtaaaccgacgctttgagggtaaggaaaaggggttggtagtcgactacatcggcattaaaagccggatgaacatggcattggctatgtactcaaaggctgataaatctaactttgaagatgtccagcagtcactgattgaagtgcgtaaccacctgcatctgcttgctcaggttttccatacgttcgacagccgcgattacttctctggtgcaccgaccctacaactggaatgcctcaaccgggccgccgagtttgccctgcagactaagaagattgagcttcgctttatgggattggtgaaacgcctgaaagccgcctatgacgtttgcgttggtagtgaagagattactcaggatgagcgagagcgaattcatttccatttggccgtgcgttctatcgtcttcaagctgactaagggcgatgcgccagacaccgcgcagatgaaccagaaagtgcgtgagatgattgccgaggcacttaaggctgagggagtagaggagatatttactttaggcgaagataaagctgagaccatcgacatatttgatgatgagtacatggctcgcattggcaagatcaagttgcccaacacccggatgcaactactgcaaaaaatgttggcaaaagccatcagcgattttcaaaaggtgaaccaacttcaggggatcaacttctccaaacgtttccaagctctggttgaacagtacaaccagcgtaaggagaacgacgtgctcaacggtgaagagttcgatacattcaccaagcaaatggccgacatgatctacgacattaagaccgagatgatgtcgttcgccgatattggcattgacatggaagagaaagcctttctcgatatcctagcgcatatgtgcgagaagtacgatttcacctatgacgacgataagatgttggaattggccaaagagatgaaggtgattgtcgatgacagtgcccagtaccccgattggagcaaccgcgatgacattaaggccaagctgaaagtagaccttatccttctcctgcaccgctatggcttccccccggtagccaatgatgaggtctacaagagcgtgctggagcaggcggagaactttaagaagtacttgcatagctga

SEQ ID NO: 162368 - DNA, 1401 bp, Enterobacter cloacae
atggggagtaattggaaaacgacaaagctgcttgaccattacgatattcgttctgggttatcaaaaccagcaaaggactttggtagtgggcatccatttctgacatttaaggatgttttttacaactactttactccggacgaactgggtgatttagtacagtccaatgacaaagaacgagaaaactgctctgttaaacgtggtgatgtattcctaacgcgtactagcgagacaatgcatgagctgggcatgagctgtgttgctctccaggattatgaaaacgcgacctttaatggtttttgcaaacgccttcgcccccatcagaacagcgagttagtgcctgaatatgtagggtattatctgaggagtactaaatttcgacaatccatgctcgctttttcaacgatgtcgacacgagcaagtcttaacaacgaaatgattggcaggctagaaatatcttatcctcctgaagaggaacagattgaaattgcaagagtattaaaaaacctcgatgacaaaatcactctaaaccgccaaataaaccaaaccctggagcagatggcgcaggcactatttaagtcctggtttgtagattttgaccccgtggtcgataacgccttggatgcaggttttttcgagcaggatttagagttttctgatgagttactgcgccgtgctgagttccgtaaagctgcgcgtgaaagcagcgatttcaaaccattatcgaacgatattcgtcagcaattccctgccgcttttgaagagtgcgtcgagccttcattgggtttggaaggatggatacctaaaggttggcaggctggagaactaggtgatgttcttttactaagaaatgaacggataaaaccatcgagtgaaactaaacgtattccatatgtaccaattgaatgcattggtacaaaggaaccactcctttcaaaatcaaaatctggtgaagaagctaacagtagtctgattttgtttaaggaaggggatattctatttggagcaatgcgtccatatttccataaggtatgcattgctccatttaatggagttactcgctcaacagtttttactctcacagctaaagattcggaatccctatatttctcttttttccaagcatatcaggaatcaactgtggaatatgcaacccttcattgtgaaggatcaaccatcccatatgctaagtggaaaggttcgctagaccgaaaacctatagttttgcctacaaaagaagtacaacatttgtttcatcagcgggtcaaatcatttattgaatggggcaactcgagtaatgagcagtctcaaagtcttttaaaagtacgagatactcttctacccaaactgatttctggtgagcttcgcctcgatgaaattgagaccgaactcgtcagttaa

SEQ ID NO: 162369 - DNA, 1605 bp, Enterobacter cloacae
atggctaaatcaccaaccaagaaagctggcaaaggcttcgaagaaacgctttgggataccgccaaccagctgcgtggcagcgtggaatcctccgaatacaagcacgtagtgttgagcttggtattcctgaaatttatcagcgacaagttcgaagccaagcgcaagcagttaatcgacaacggccaagaagcctttgtcgatatggatgttttctatcaacaggataatgtcttcttcctgccaccagatgcccgctggtcttatgttaaagcccgcgcaaagcaagatgatattgcggtgatcatcgacacggccctttctactatagagaaacgcaatgcgtcgctaaccggtgctctgccggataactacttctcacgccagggattagaggtgaaaaggctcgcttctctcattgatagcattgagaacatcgatacgctcgccaacgaatgcgaactgaccgaagaggacttggtgggcagggtctacgagtatttccttggcaagtttgctgccagcgaaggtaaaggtggtggtgaattctatacccctaaagcagtggtgactttgcttgctgaaatgctcgaaccctatcaaggtaagatctatgatccctgctgtggctcaggcggtatgtttgtgcagtccctaaaatttgttgaaagccatcaaggtaagagtaaagacatcgctatttacggccaggagttgaccagcaccacttataagctggccaaaatgaacctggctgtgcgcggactttccggcaatctgggagagcgcccggctgataccttttttgccgatcagcacccagatctcaaggctgatttcatcatggctaatccaccttttaacctgaaggactggcgcaacgaggcggagctcaccaacgatccgcgctttgcaggttttcgcactcctcctaccggcaacgctaactatgcttggatcctgcacatgctttccaagctgagtgaagacggcactgcgggctttgtgctggccaatggctccatgagttcaaataccagcggtgagggagagattcgccaaaagttgattgaagatgatcgtatcgaatgcatgattgccctgccaggacagctgttcttcaccacccaaattccggtctgcatgtggtttatcagcaaaagcaaaaaagccaatcctcaatatggctaccgcgatcgtcgcggcgagaccctgtttattgatgctcgcaatcttggcacgatggtgagccgtacccaaaaagagctgactaaagaggatatcgctaccatagccgataccttccacgcctggcgcagtagcgagagcgaactcaagcgtcgtatcgaggccaatgaaatcagtgtcgagcaatatcaggatcaagctggtttctgtaaagtcgccacacttgatgaaatcaaggataatgactttgttctgactccgggccgctatgtgggggcagttgatattgaggatgatggcatcgcttttgaaaccaaaatgcacgagttgactaagaccctctatcgccagttggatgaagcgataaatctggatcagactatccgttccaatatggaggcgctggggtatggggagtaa

SEQ ID NO: 162370 - DNA, 1491 bp, Enterobacter cloacae
atggcttggtgggattggtgtatcggtggcgtggtctttctcttcattcactatttagtatttgctcctgttttagagaagcttgggctgtactacagcctagggccatggaaatgggggctcaatagctcaagtgcggtttacctacttcttctctctgtcgccttatactacttttggcgcacaaggtctcctaaactggccagaggaagagttcgcatcttccgcgagctaattgaaaatttgcatcttacaaagcgttacgacgagctggtgttgctagttgaaccccaattgtcgaaacttatttccttaactaagcagcaatcttggcttgttcgcataattaatcatctagacaaacccaacattgacatgtctgctctatttgacgggattaaacctcaagcaagaccagcttggcgcgtgtacataagccctttactccagtatttgaagtcgtgccgtttggctcgcacagaggccaatatacaagcccgtgaaatcctcttaaatctagtcacctctcctgagctgacaattcacctggctcttagccacccacatttttgtcttaagctccttcaagccgacgaagtgatacgctccgacttcattgaaaactacatggatgcgttactcgatgcaccgggaagccgcctctacgtggagttaaagaataaccaaaatctgcttcgtggaaatcgtctgctgctaccggagaacaaccgattacttcgattcttcttcgccgatgcagctttggcgatgaataacggtctggataatgccattggcactgcggtgtgtcggcgactggatgaagataataaactagccgagaggttgaacaaatcattgggatcctactatgactcaggaagatttcgttgcccgatcaattcgggcttaacgctctttgagatcatggtccatgagggtattcatcagggcctgcaagaccatatgtggttgcattactttgggcacttcgcggaaaaaattttgaagcaaatggatacgtcacccgatgaagaaatctatcaggaatggcctacaccttttcattatcttctttaccgcttaattagtatcgctaccgattgggccgaacagtgcgcgctcattgatgattcagagattccggaggcgacacgctccgctgataaatttgaccaacactatatttctaaagaagcgaccaaagtccttggggtaatgctcgaatacatcatcccaagcgagaaattatctcctgcattcaagagatatctgctggaagtggtcgtacgttgttacatcaaacttgagaacaatcccaggttatctgatgtcgcattggcactcttgactaacgtaattatgggtaaggatcttccggcaaaaatctcttatcgtttaaaacttcgggatgaatttaggagtattgaccacataatgaggaaggatgctttgaagtttgaacaaaccttagatgaatcacttgcgtga

SEQ ID NO: 162371 - DNA, 822 bp, Enterobacter cloacae
atggtatctgttctatggacgagtaatctattggaggttgcattgatcgttccacttcaaaaaaaaactgaggctggaaagccttacacacgtatacctgaaaatgaaatcaggttggtggaacttagctctgtttcagatggagatctggtagagctgtgtcggcagagtaggacacatccgcaatacgttcccatcgaatgtcttctttactacgtccgacgctgcgcatcaactaacccatccctttttgaacagctcttcaaggttctttcagaacgaatacttaggaagcttccgagatccgaaagccaaggcggaattactgtatcaatgacaaatagcgacatccgagaaggtgtgtatgaccgcttcattgagatgcttatgatcgacaaagcaggctacgaagaacgattggacatgttcgaagtgcgttttgatctggctttatcgagattaaaaaaagacgctcaaaggaaattttatcgggctgagaatagaaataccgatttgggatttaatgatgattcggccgaccttaatccagaagttgagactgcatctgaggggtatgatccttttgaggcaacagatatcgataattatcgttaccgttgtaggcttgatgcggcgattgagactctacctgaactacagcagagaatcattgaaatgacccgattagatattccaatagactcgattgacccaaatgagatgactatttccagggcactcgataaggttgaaaagaccattcgtaatcaaaaaaagaaggcactcgcaagtcttcgtatactgcttcaaggggacctatga

SEQ ID NO: 162372 - DNA, 582 bp, Enterobacter cloacae
atgatgacaggactttcacctcaagcatccctggaagaggtactagagtcattctctatagagcatgatgtaggtacagcaaccttgcaaaaatatcttgctgcatatccacatttttcaaatgaaatcatagatctatctcgtgaaatggcaagaacattagcagaggatgaggaaccgctatctgaatatgatcgctgcttgatcagttcggccgtcacacgcatccaaaatgctccaggaaaaacgatgatagatccattcgctgatctctcagttcaaaaaatgcgtgatatctccaaaacactaaacttacctcgacaggtagtcatggcatttagggagcgaaccgtagctccaggatctattcctcagcgatttttaagcagattcgctgaactgctgcaaagcagtgtacaacatctcacaaccgcacttgaaaagccccccatggcggttgcaggaagttataagtccgacgggaaaccgtgcaatgtgcagaagattactttcgaacaactccttcgagatgctgatttgtctgaagaagatatcgctaccttaatggaagaggacatttaa

SEQ ID NO: 162373 - DNA, 759 bp, Enterobacter cloacae
atgaatgatttaatatccattattatgcccagttttaattcagctaatacaattagtaaatctattgattctatagttaatcaatcgtatttgaattgggagcttttgattaccgatgattgttcaacagataatacagcatcaattgttagtgagtatgctacattagacttaagaattaaaatatttaataatgtaacaaattctggtgccgctgtaagtagaaacaattcaattgaaagagcaagtggtgactatattgcttttctggatagtgatgacttatggcataaggataaattgaaagaacagctttcttttatgaaagattataacttagatttttcttttactgcatacgaaatgattgatgagaaaggtatcgaatttggaaaaatagtggatcttcaaggtgataatcgatcttttgattactatgatatgttgcgtaaaaaagctactttaggttgttcaactgttatgctaaagaagtcagctttcagcgattgtaatatgccattgataagaactggacaagattatgccttgtggcttaaattgttaaaacagggtaaaagggcgtatttattaaataaagtactaacgcaatatagaattttacctgattctatctcccgaaataaatttaaaaaatgtaagaggcaatggcaaatctacagggattttgaaaatttaaatatttatcagtcctccgtgtcatttgttcattacgcttggcgagcaatttttaggcgataa

SEQ ID NO: 162374 - DNA, 402 bp, Enterobacter cloacae
atggataaaccagacccacgaagaaaaattacgttctacctgaaccctgaaagtaacgctgcagagcgttatgtctgcgaagaaattgagaaaatgccgcagggggaaaggggtaatgtctggcgtgctacgctgttgtctggatttgccctgagaaaacaggatgagaggctgccacacctgctggcagcccagctcacggattccaccacctttgaggaaatggttttgcttatgcagtcggttttccctgaggaaatgaaagcgttaaacggtcgcaggccagcttccaggaacgggccagaaggggccagtgctgagcaggaatcaggttcagataccgattcagatgccgataatgaaacccggcgcaatgcacagaacatgttcggtggcgggtaa

SEQ ID NO: 162375 - DNA, 264 bp, Enterobacter cloacae
atgttactggttaaaagccatgctgaacgattgatccacagtattctgcgcgtcaggaacatccctgaatcacagtggccggatctggtcaaaaagaccggcaggggaatgatactggcaggcgtggccgtcgtggtgcccggtgttctggttgataacatctctgtacctgtgactatcgcgatgcaggtctgctatgcctcactgattggtctgggcgttcttctggcttttgacgagaaaaaaccaaaggggcggggataa

SEQ ID NO: 162376 - DNA, 204 bp, Enterobacter cloacae
atgcaacttgaaaaactgacaggagacgagcgcacgctggtcgttgtggcactgcaggcgctgtaccgggagagattaaccgcatcaaatgcggtctttacggtctgtagcctggctggaaaggatcagccgcgggaagatatttttggaatacgtgaagtagaggatgcgctgcgccgtattggtgcggccccccagagatga

SEQ ID NO: 162377 - DNA, 492 bp, Enterobacter cloacae
atgggaactgaaacgatagttactctgtttaaatacaagcgctggatagatattgaaacactacaagcgattaaaaaaattgattcatctgcttatgcagaaaagcgccatctgacgctcagattgatgaatcacatacatgtggttgataatatcttcagagctaacatgaccggccaaaagcattcatacacagcattaaatacgccagagactccctctgttgatgaacttcagataaccatgactgaatgtacagactggtacattcaacatgtcagttcaatgtcccccgttgaccttgctgaaacaatcagattccagtttgtcgatggcgggaaaggtgagatgaaggcgatcgatatgctcaatcatgtgctgtttcacgggacatatcatcgtggcgctgtaggttggttactttcagaaagcggcataaccccgccaaaagacgttttgaccgtttttctaagagatcataaccccgagtaa

SEQ ID NO: 162378 - DNA, 693 bp, Enterobacter cloacae
atgtcccgttttattctgggtgactgcgtgcaggtgatgtcccgttttccggcgcgtgccgtcgattttattcttaccgatccgccgtatctggttggctataaggaccgtaccggccgcaccctggccggggacaactctgccgaatggctccagcccgccagtcatgaaatgtaccgcgtgctcaaaaacgacagcctcatggtgagtttctatgcctggaaccgcgcggatctgtttctgaatgcgtggaaaacggccggcttccgggtggttggccatatcgtctttgccaagagctacgcctcaaaatcgacgttcgtgggttacacccatgagagcgcctacctgctggccaaggggaggccgcagacgccggaccgtcccgtcccggatgtgatcccctggaaatacacgggcaaccggcaccacccgacagagaaaccggtccagagcctgcgaccactgattgaatccctcacgcgtccgggagccattgtccttgacccgtttgccggcagcggctccacctgcgtggccgccgccgaggccagccgccgctatatcgggatcgagatgcttgagcagtaccacgctgccggtgttcgccgtctggcgcaggttgaacgggcgagaaggatgccggcagccaatgacggcgcgttttaccccgactggccggaggcggcatga

SEQ ID NO: 162379 - DNA, 222 bp, Enterobacter cloacae
atgaactatccgggccttgaaacccttcgcgcggatgtggccgcgctcagcaatgccatgtgtgacgtgcgaatgctgctgaaccgcctcgaatcgcagcaccggcacgacgcggcaacgctcactgaacgtatggccgcccagaccctgcgccggatcaacaccctgcttctggaggcgtaccgcgaagccctggtactggacgagacctttcaggactga

SEQ ID NO: 162380 - DNA, 822 bp, Enterobacter cloacae
atggtcagtttcgcaagccgctatcgtatgccaacttcgatccgcaaagaccgtccgctgacgaatgacgaattacagcgcatcgttccgagcgcgttctccgaggataaacacgattcacgctctgaacgttatacgtatatcccgaccattaatattcttgatcgtttacgcgaagaaggttttcagccttattatgcaacgcagtcacgtacacgtgaccaggataaacgcgactttacaaagcatatgcttcgcctgcgtcgtcatgaccagattaacgggaaagaagtaccggaaattattctgctgaacagtcatgatggttcaagcagctataaaatgatccccggtatgttccggcaggtttgcagtaatggtctggttgcatggaaggattttggcgaaatccgcgtgccccacaaaggggatattgtcgggcaggtaattgaaggcgcttatacggtgctgaaaacatttgacgcggttgatgaaaatattgacctcatgaaaagtattcagctcacattgcctgaacagcgcctttttggtgcgaccgcactggaacttaagtacgatgggaaaccagcgccgattacaccggagcagattattaacccccgccgtgttctcgacaaagggcaggatttatggaccacgtttaacgtggtacaggaaaatgtgatccgtggaggaattcgcggcagaacgcaaaaaggcaagctgaccagaacgcgggaagtcaccggaatagatggcgacatcaaattaaatcaggtgctctggaaaatggccgaggagttcgcaaaactgaaggcctga

SEQ ID NO: 162381 - DNA, 465 bp, Enterobacter cloacae
atgcgtgaagaaaaacgtaacaacgacctgctcaggaacatgcggatacatcttgctgaatgggaggcgggacgccccactccggcagaaagccggctcatgtttatctggcttgtcatgtacctgggggccgggtggccagctctcgcgtactgccagccactatgggcgctgggtttcctggttgtctggttctttccgagtcaatggatatgcagccgaattgtcccccgccacaacgaaagctgggcggaggtattcgacaggatgctatccgcttatgaacccctgaaccttcctgcctgggagcacctgaagcgacaggctgaaacagaggggctgacggccagcaacgtcagcagctggtatcaggaagaagcaatgtccgtctggccagaaaagaaacctgacctgaaatttctcaacaacaatccagaccgtgagaaagagtccgggagcaagtga

SEQ ID NO: 162382 - DNA, 396 bp, Enterobacter cloacae
atgccttcgatcaggacacgttcttcattactcaaaatcctgcacgactatcgctatatcctcattcctgcactggtattcactatcgaactgacagtgtgggcagtgctcaatcttaaaggagtgggtgatataggctgggtctcctggagagtatccctgctcataagcgtcttcctcgtatactttagcggctctgcctttaacaaaagagatgactggtattttctgtatggttcagtcgttccgtggggcggaatgctgatagcggcaagtatttatggctttatccagatgaacctgaactttctgacactggacctgttttatgccggcgtgtttggaagccttgctgtgcagctacttttcactgtgattcattgcacaagcaattaa

SEQ ID NO: 162383 - DNA, 351 bp, Enterobacter cloacae
atgatatttctgcttgtactgtcctgtattgccgggggcgcaggttgtgtgattaccactgcattgttacctgaatcactccgctggcgaggcatacaatgcggagtatttacggcaattgttcagggtagtcttcttaaggccataccactcgacagggacgggagcgaatttttgattgttgccggattcatacttgcccagtggtactccccgcgtattgcagaagaaaccagtaaattgaccgtgcatttcggaataccttctgtgccaggttatttgatgatgtatatccagtgcctggtgcttattggtgcaggctggttacctgtctggatggttctgagatga

SEQ ID NO: 162384 - DNA, 489 bp, Enterobacter cloacae
atgttaaaaacgcttttcaccctcatccgtgatgcagggcgggttgccctgtattcctttgtcctcggcccggccctggtgctgtacgtgcttgtgatgctggcggcgtcagagggttcactgtcccggcaattcctgacgacctttcattacctgactgacggcgtgcctgccggcaaggtcatggggtgtactaatgacaatgagatggtgcgccgtttctcagtaccaggacccggagagaaggtaaagcccgcgcctgtagcagagaatgcaccgcctgacgtgctgtgtcagcctggccccgtagacagcgattcatgggcgcgttcggttgatgcaaccttacgcaacgtctggatgatggcggtgatgttgggctttggagtgtggtttgtatcccgtcgccggtacctggctgcccaaaaacgcatttcaccagacacgcattcgattttagtactgcagaacaaggagaaagacgaatga

SEQ ID NO: 162385 - DNA, 558 bp, Enterobacter cloacae
atgctgacatttaacgatgtaaaccgagatttcaaagcaatattagaaggcatatcagatactaatcggcctgtaccatcaacatccaatgcacttaaagttgcgtttattcttccactgataggtgttgtgctctcggccataaccttcggagtagtctgtgcaatttctaaccatcgcgaatttagtattgggcttttaagcagctatatcctttctggaaatgcgataccggtatatatagctattgttgtcgggtttattcaaggtcttatgttattaccatacgtaagcctcttccattcgattccacaaaatgtcaggaaaagtaccccgctgatcgcgcatatgaagagagctatatttaaaggaacagtattctatatagctacattactcttaacatgcttaatgtcctattacgatgcgatgtacttgttctccacaccaatcgtgatgatcatgtcaattattgctgcatcgatcaccgttaatctgcaggtgagtaaatttggagttggagcattaatcgataagctcatgaaaaacctaagatag

SEQ ID NO: 162386 - DNA, 1410 bp, Enterobacter cloacae
gtgaatgaaaaactaacctcattccttcctgctgaacagcaaatcggccaggaacatccgctgtatgtggcccctgagggctctgccacgctgccgtttcgccggaaactggcgtccattacgccgggcataacgacatctcagcgcagtagttccctggatctcatcgccttgacgcggggcgagagcctgcgacatcccggatctctcgatgccctgtttaaggttctgactcttcatacagatccggtgacctgtatcgtctccggatctgtaaatgagctggctgcagaatacgattttgccctgacagagatgcacggggcgttgtctgcaaccggtgcgacagattccggggctgccgggatgcagaacagtgatggctgccgttcggtggccagagcgcagactcgctcacgtcactggtctgaattaccggcagaagaacaggagcgtttctggcaggacgtggatgccggtctgcagaatgatttcctgatcgcccccgccaaaaaagtgacccgccgccgtcgcggagatcactcaacgaaaccaaaatgtgagtatccttcctggttccgtcctgagcgttacaagaaactgtcaggacagctcggtcatgcctacaaccggctggttaaagttaacaaaactaccggtgaggtgacgctgcgtgcccatgtttcacggcatcctgtctttgttgccggacgtcgcaaagcggggcgtaaatacgcgttccgcccggagcgtcagcgtctcatggatgccttctggccattgctcatcagtttctgtgatgccggcaaacataccgtagtcctgtgtgtcacacgcctggccaaagagctgagtccgaaggatgcggacgggaatgtcattcctgaaacagaagtgaccgtgtcacgcctctcccggctgattgatgagcaggtacgcttcggcgtgctggggcttgctgaagagcgtaagtgggatcgcgaatcccgcacctggctgccgacgcatgtctacatcactccgctcggttttcagatgctgggagtggacatggacaagctgcgccgtgaacaggaaaagaaactccgtctcagtgccgaacgtgaacagttaatacgagaaggcgtgatgagggaggatgaggatatctctccggaaaccgcccgtaaacgctgggcatttcagaagcagcgggatgccctgaagtaccgcaggaaaaaaggggccgagcgcaagcgtgccaacaacctgataaagctgccggcagatgaacggctgcaccagatggaaaaatgggtatacaaaaccctgccgccggatgaagcgtactggtgtacgcctgagcggctcactcagctggctgttcagcatctctatcaactggacctggcgctggcaccaccggactaa

SEQ ID NO: 162387 - DNA, 492 bp, Enterobacter cloacae
atgactccactacacaaactggcggtcatggcggtaaacgagcttcttgaccgtaaggctatcacactggatgtgcctgccactggcgaccagacaggcggcgaaaccggacacatccatacgcagctggccggtaaacccggcgtgatcatctggagagatatcggacatggagaactgtgcatcagtgtatggtgggactacgatcacagtaagcatccgcaggcctatccggaactgccggatggcacgccgaccaaagaatgttttacaacctcctcccctctggccagacgccagcattaccctaaatttgtcggcgtaaccctgtctttctggctggaacgcaaaaccggcaaatggatccagtgccataacgggacgttcaccggacatgacacctatgtccgcagaggcatgctgtcagcgctgaaggcgctcccgaccgttacaccgaaggggtttaaagccacgggacgatttttcaactga

SEQ ID NO: 162388 - DNA, 423 bp, Enterobacter cloacae
atgaccgcaccacataaactgcctcgtaaagaagtgttcctggttatgaaggaaatcagcagtggcgaaatcgtcatggctgaaggtctgcttgcagcctcaaactattactttgacgcactggccagagccgcggcgcaacagtcgtcttctgtaaccctggaagaattcgacccgcagtaccgtttagcccagatgatttatctgccaaacgaacgcaccggtaaatggcacgccacgcaccattctttcggcggatggcctgaatttgttcctgagatggaatatattgtttccgtcgcggcgtactccaacagcaaagccagaacgctggaaatgctgaaggcgggcgtcgagtattcagagctgatcctgaatggctcagtggcgccgcgcgaaggcgaattcccgttcgacctgtaa

SEQ ID NO: 162389 - DNA, 771 bp, Enterobacter cloacae
atgaaacttttcgtacccgacgtgcttcacaacctcaggcataccggcagtctcagcccggccgcactggatatggtcaggctcatggcacttatggccatgctcatcgatcacatcaacacactctttctgacgcctcccgaaccgctgatgtatgcgcttggccggatggccttccccctgttcacgcttatatgggcgatgaacgtgcaacgtacaccagaacgtctgcagctaagggcaaaccgtctgtggctctgggccatcgttacgcaaccggcgttcagtctggccttccggcttcaccagccgtggtgggcactgaacattctgttcgtgttcgccggcgtcacgcagctgctcgccctgcagcaccggtacggcagaaagggaagtcttgccggaggattgctcctggcactcatgatttttccacttcagccggcaagctacggactggcgggtattatgctggccgtcagcctggcgaccgtgacaggcagaagtacggccgaaacgaaatgcctggctacctgcacagccgtgctgtcacttctctgcttaaacggactttcccatatactgagtatgcccgcagaaacattattactggccacactgcctgctctggcgttccccctgattacggtagccctgtgcagggatatttgcccggaaggacggcagcgatttatgccgcgtaatttcttttattttgcttatgcaggccacctcgctctgattggcctggcacggtatctcttttcatga

SEQ ID NO: 162390 - DNA, 396 bp, Enterobacter cloacae
atgaaaaagaaatcgggcgatccccgcaaacgacacgcgatgaaagcggcggaacaggccataaaatcagaaaaagccagacgtatggctctgcttgaatccagagaatctgaattaaaggcagaaaccctcaggttggtggaattatttgaagaacagttcccggaatcccctgggttcctctacgatgaagagctgtacatgaaaattttgggtatcattgttctgcaccgtgccagttgtgaactgaatgatgaacctgaaaaattctgtcctttcggacaactcgatacgctcggtccgttgccggaaatgaggaaagaaatcgaagcgtttctcatcagtaaccgcctggataaagctgaaacctggtatgtttttgaacaaaggacatga

SEQ ID NO: 162391 - DNA, 213 bp, Enterobacter cloacae
atggcattgtcctgtattcagccccttggattctgtattccggataacatccggacaggaattaatgcctcgtgcataatgcaaatggtattaaggtttgaagcatgctgttctccctgtagcagttctgaaaaagtcatcccatgtcctttttattatataaatattttctgcgtaaggctggaagaagaacttattataaccttcctttaa

SEQ ID NO: 162392 - DNA, 249 bp, Enterobacter cloacae
atgcttgagggaaagaaagaaaaattacattgcggatcaatgtgtttcactgttaatggcagcgatcaagttatcagcgactttgttgactatctgaaaacctctgccattcctgcagtagatgtaaggatcatcgccgggcgagaccattcaggaagaataaaaatagcgataacgggaaatattgttacgcaactgtccccgacagcattaaggcatcagttcattgatggctactatagcagataa

SEQ ID NO: 162393 - DNA, 174 bp, Enterobacter cloacae
atgtcggttatccttatttttgcgggattgcgtacgtttacgttctgctggacctctccccctttgcctgcactgcaaccagacagtaaacaggaagccctgactcgccgggacgagcgcgacatactgaggcctggggaaacgacgcatgatatctgcggcttttactcctga

SEQ ID NO: 162394 - DNA, 423 bp, Enterobacter cloacae
atgcgtaagtcatttaaaatactcacactggccgttgtgatagtcgcagctgcattaatctggtcctggccctatataacaatggagtttgctggcagcgcgcactatagcgagcaggatacccggcaatatgaattttatacgccggatattctgaaaaaaatgccacgtattacaccccgttatgattttgattttgcaaacataactggcccggcatcgcatgtgtatgccgtaaaattttatgggacaatggaaaccaaagaaatagagaattacctgaagctttccggatacagtcaaaacaaatgtgactccggagacatatgctggcgaagcagtgacccacaggagtcagtttatgtagagactctcaagggagaaaacactgtcattattcaggttgtatataactttacgtaa

SEQ ID NO: 162395 - DNA, 702 bp, Enterobacter cloacae
atgagtactcgaagcgatattatcgatggccagcagagccaccttaaatatggtcttatttacacagaggtactgggctggattgatttgggtcatgcccagggcacggacatccggaatttgctgagaagaattgacgcaggtgaatcatccggcatgcagtactatgatgtcgcctattcgcagtccatggttgatccgaccaagtccatgaaaatgggaaagtttatccggtggcgaatcaagcgcggtcgttcatatcaggaacgtaaaagtattgcgctggcgatgatgatgactctggcaaggaagttcgagggactccagtcatcctttcctgtcagtctgacgacagacagtggtttcagtggcgaggacctggtgtctgatttgctggggttctatagagtcgtctcagtccagaatccgtttgatatgctgcgcccggtcagtaaagaggaagcacttaaacgctgggattattatggaaaaatcggtgcatggaaaaatgatactttccggcctttgctgttccctgacccggaacgcttcccgaatgcccggccacagaagggcgacttacccaattttatgaaaacagtcaggccctggagtgatttccactcagatatagttactattgccagcgacgacggctcatatatcgataaagctaaaggcggagcgctaccgtatgcgtaa

SEQ ID NO: 162396 - DNA, 672 bp, Enterobacter cloacae
atgtgtggacgtttttctcagtcactgacacgcgctgaatacctggcttatctggccggtgatgccgacgcgaagttttccgcagtaccggaaccaatcggacgctacaacgtggcaccggggacgcgtgtgctgttgctcagtgaaagcaatgaacagctgcatctcgatcctgtcctgtggggttattccccgtcgtggtggcacaaaccaccgctgattaatgcccgtgttgaaacagctgctgagggacgtatgtttcgtccgttgtgggatcacggacgcgctatcgtctttgccgacggctggtatgaatgggtgcgcgaaggaaacaggaaacagccgtattttatttaccgcaaggatgggcagcccgttttcatggccgcaataggcgcgcgaccttttggtctgcgggatgatgaggaaggatttgttattgtcacagcggcagcggataaggggcttattgatatccacgatcgtcgtcctctcgtcctgacgccggatgctgcccgggactggctacgcgagagtctcagcggtgaagaggcgggtaagacggcagaacacggtgcagtacctgctgatgcatttacctggcatccggtttcacctgcaatcggcaacgtccggaatcagggggcgtcactgagagaacctctcccctga

SEQ ID NO: 162397 - DNA, 753 bp, Enterobacter cloacae
atgacaagcaaaattgatcgggcactctgtgccgctacagtagtggtcctggctgcactcattccggtgataatcttaagttgtgccactaaaaataatgatatcagcaactggattatcgcgcttgctaacgtggccatggccgtcgccgcctttgcggcatatcgtaaggcaagccagtatctgaatgagtttttttctaaagaaggttataccctggctattagaatggtgaatgaaaacctgataaaccttaacaggaagaatgaactcctggagcgcgccagtagttttaatgcattctatagcggcttaaacggaatcacgccgtccgcatcccggcttcttatcatacagacccgaattctactttttaataagacccgaacccggcatcgtcagctactcaacaactgtgagcagctgtccatacagatgctcagctacggcattgacgccgtagaagatcgtaaacaggcactaataactatgcttgtctccctgaaaacatgtctagattatgcagataaacttgaaatgcatgttatgaacgacttcgaaaattacaagaacgcagtgggaaatagtaccaagcaatctcagcctttctaccttacgaacaataccgcaacgactaacctgatagacgaaatgacgaaggagtggaatattatggtcaacagttacgataattttttcctggggcaggagaaacgtcatatacgggatcttttttgctccaagaaaaattaa

SEQ ID NO: 162398 - DNA, 192 bp, Enterobacter cloacae
atgacatcagacataaaacgccgtatccacgccttccgtaatgccctggtacttgcggccgatacccgttcacatgaatgttttcatatgggccgctggaaagagctgaacgaatttccccatggctgctgcgataatatcagttgtgccgttgaactgttggcgtttgacggcatacaaacgtgttcctga

SEQ ID NO: 162399 - DNA, 474 bp, Enterobacter cloacae
atgttttatgtcgcagaagcactgatcgttattctggtggtcttcatttttctgcataaccgccagaagacaaagacatttcagaactgtcttgcggtagcgggcgttctggctgccctgggcaccatgcacctgatccacgtgaccctccagaaagagtatggtcgtgcaagggatgtcaccttttacgatgcagatcatcagctgaccgtcggaatttactgtatcaataatcacgttatgtacagggaaaaagactctgtccggcggactgactatcctctccaggaattcaatgataatgcctataaaggcacgctctctaccagaatgagctgtgctaacggtgtattccttgatgcggagggaaacgccataggacgtaaccgggttctgaaaatcgtgacggaaaacgtcctgaccggcttcctgccttttaccgccagtacctccggtgaatccgtaagccactga

SEQ ID NO: 162400 - DNA, 1227 bp, Enterobacter cloacae
atggtgcaggtaacccgtcgtccatcaccgctgcagcgccgggtgctgattgtgctggccgccctcgaggcgcgccatcccggaacgcccgtgcctacccgcctcattgaacgtctgctgaccgacggggggcatggtccggtatacgggccgaacctgcgcgcctcctgccggcgcatggaagccgcgggctggctgcgcaccctgcgtgcgcaaaacatgcagctggccgtggagctgacggatgccggccgtgcgctggccactcccatccttgcagaagaacaggccagccagctggccgaacagcgtgctacggaagtgcgggttctgcccctggtcccgcccggccaggcggacgaggctgacgaccggccggtggcgatgggcgatcgctggcacatggcttgccggggtgactacgtgatccgtctcgacgggaccacctgcctgcagctgtggaacacagccgggcaggtgacgcgcctggcaggcgatcccctggaggtcgccacctggctgcaggcctgccacggggcggggatagctgtccgggtgcaggttaatgaaagcaccacgccggaggcgggcacgctgaacggtaccgcgccggaagacctgaccggcacctggtactgccagctggacgtcgcacttcaggcacaggggatcaccggtctgactgaggatattcgccttgccgtggtgagccctgaggaagccctccggtcgctgccggcaccggcgcggctgttgcacgttctgcgcgaaagccgggaggcgttcccgcttacttccagcgcgtatgaagaagacacgcaggctgcactggacaccctgttggcccggtccggattcacggcgggccaggcacaggagctgcggctgcaccgcatccgctggccgcggatgagtcaggaagacgctgaccggcgcgagctgaacagcctgctggatgagctggaacagcgacagctgtactgcaaccgcgggcagctgacggagattgtgttttccccggttcgcagacccggcgagcactggacagaccgtctgcagtggctcctgatgacggacggattcgggttccggagtccgctgtcccgtgacgcaggcgcccgggcgctggcgatcctggccggttacacggggcaggaggtggcggaccatctggccacggtgatcgtctggaacgacgacagcgcgggtaccgggcctgaattatga

SEQ ID NO: 162401 - DNA, 261 bp, Enterobacter cloacae
atggataacgaagtgacgttttcactcagctatgaggttctctttgctgaagcagagattctcatccgggatataacaacgttcagccatctccccgttatgcaggacgatatgacccggggggagttacgggctgtcatccgtttctggagccatgctgcagccaaaacaggttgtccggagatgactgtcgtccaggataagtaccgactcatgcagcttgctggtcttcctgagggggatgaatcatggtgcaggtaa

SEQ ID NO: 162402 - DNA, 303 bp, Enterobacter cloacae
atgacagtattttcgcaggaaagtgagcgtgttccggtgtctcttgaagcagcatggcgggcactgaccgccctgggtcatcagcggctctggctccgtcccccggatgagcggggcgttaacacctggcttatcgtgacctgggacggcctgacggtggccgagcgtatccggatctccggctcctggtggctgacaggtgatgcgaatgccatctacaccaatccggagcggatcgtcccggacggactggaagagctcacctggctgtcggtgcagcggcaaatgaaggacggtttctga

SEQ ID NO: 162403 - DNA, 309 bp, Enterobacter cloacae
atgggaatgtttgacacggtcacttttcgctaccgtctgccggacggggtaacgggtaccgaattccagaccaaagatctcgactgccaatgtgaatcttacgagatttctactgaaggccgcctgcttcgctggatgggagacagtacgcgaaccgatacctgttttgacgggatgctgaccctcactgccgatgacggttatcatctgtattttgaacatggaacgttaaagtggattgaggtgtactcccatggcgctcaacgctggccatttgagccagaacgatgccatccggagctgtactga

SEQ ID NO: 162404 - DNA, 348 bp, Enterobacter cloacae
gtgaaacccaattatctcaacgatctgcattcaaacgaagccgccgatgacattattgccctgctggaactgtgtcagcacctgcagtctgaacaggacggcagggaacggccgacgcccggggcatattaccgcgatgaggatgaatttgccgaacgtatccgttccgcatgcgggcacgccctgcagctgcgccggctgctgccggtgacgacgaccctgagcgccatcggcgccgaaatggaatgccggggagaaatcagtctgctcccgggcgaagattatgcgcagaaagcactggcacgacttacagagaaatacctgtccatcggggacaataaacaatga

SEQ ID NO: 162405 - DNA, 552 bp, Enterobacter cloacae
atgaatgttgtaaaaacagatattgaagatgtactaatacttgagccgaaaatttttggtgacgagcgagggtttttctttgaaagctttaataagaaaagctttgaagagataacaggacgtgaaattgaatttgtgcaggataatcattctaaatcctgcaaaagcgtattacgaggtcttcattaccagctagctccgtatgcgcaagggaaattagttcgctgtatagttggtgaagtttttgacgttgctgtggatatacgtaaagaatcagagacatttggtcaatgggttggggtatatctttctgctgagaataaacgccagctatggattcctgaaggttttgctcacggatttgttgttcttagtgatactgcagagtttcaatataaaacaaccaattattacaatcccacttctgaacgatgcattgcttggaatgaccccgttttagatgtgcattggccaatttctgaggaagaagtaattctatcaggaaaagataagttagctctaagttttatagaaaatattaaggatgaataa

SEQ ID NO: 162406 - DNA, 180 bp, Enterobacter cloacae
atgaatttattagttaaaattattttagaagtactggcattcgttttttgcgtgtgtgtactcttaccattctacatggtttgtttcatcatctacatgatcttaggtgtactaacactgcctttgaagatcccatacattaaacgagtggtactgagttacctgaaacgggaaaaataa

SEQ ID NO: 162407 - DNA, 879 bp, Enterobacter cloacae
atgtataactatttatcgaaaaataaaatgaagtttatcagcggtgattgtggtagtggtaaaacacactcgttggtacagcaaattttacgaacaccagataactatattgttgtgcagggtacattacatcttacacagcagaccgcaaaagatttaggtgaagtggcaaaactaatcacatcagtaacatcaaaaaatgttcatgaggatatgattgagtttctgctaaaccctacacaccgtgtactaataataactgatattgctttcctaaagatacgtgatatgacgttactacaaaaatggaaaatctatcttgatgatgttgtttctttccatcactttgctacacctaacacaaaccagaaatcactcattgagaatgagttgtttcatagctttgaagcagtaggttataatcacgaaacggctaaacctgtcaccgattttgatgatgtagtacttgaaaatgccgctaaagcgtttgctttcgtgcagcagtacgatcacttccttttcaatgcacgtttctttgagaaagtaggtggtactaatcagtacaagcaggagaaagaccaactacaggttatgtcatgggtaaacctaaaacgcttcatagggcttgatattacctttatggctaatgactttgagaacacccttgtgtacttgtcttcacctggaagttttgaacgtactaccctaacgctaatacagcgtacagtaccactaaatcaacgcatgagagtacattactttagtgatgtacctttgacggcatcactacgttcaaactccccagaacagtttgagaaggttttagcatgggtacgcaataacctcgccgattacatctttatgaatcgccacggataa

SEQ ID NO: 162408 - DNA, 438 bp, Enterobacter cloacae
atgcttaaagatgagtttatcggcaaggtcattggcaagccgtggaggaaccgcgcctgcactttcgacgcgatggattgctgggcggtggtcgtcctttattaccggcatgttctcggtatcgagatacatcagacaccggattacgaatccgggcacgacttcatgacgtgctacgacggtgatgtggtgttctggcggcgcacggaatcattcacagagggtgatattttcgtcgcgtgggtaggcagtaagccggttcatgttggcctgattatcgacgggaaagcactgcacagtcgcggggaaaaggggcacgtcagatttgacgcgatacggacaattcagaagctattcaccagagtggagttttaccagtatgccggtaatcgaaattcagcgcgtcccggggatgccgaaggacagggcagtaattga

SEQ ID NO: 162409 - DNA, 495 bp, Enterobacter cloacae
atggcgataccttatccagactggctccctctggcacagaaggcgaagaccccgacaactgatactggctttcgaacagatcagcccactgtcggggctccgattttccagaagctgacggacgacctcaagaccactttttctctcacatggattttcacacgcgaccagcacagagctttcatgcaatggctgcgcagccctgattacctcgacaacggtaatcagtggttcaccatgccgctgggaaccgggacaggagaaagtggggtagaggttcaggagttgcatttcctttcgcggccgtcatggtcacaaaccgggtcggtgtttacatggaacggtgatgtgatagcccggaagctggttaactcagacgatgaatttgacgacatcatcattgaattgccgccaccgtggggatcatggctcgatattatcgtgaccgggtatcctgatgggcgcgatccggaaagtctgccgagggtgccgtaa

SEQ ID NO: 162410 - DNA, 207 bp, Enterobacter cloacae
atgtccgatatctaccaaatcacgctaaccaccacatccaaagaaaccttcaccggcctgatgaaacgcagccagcctgaaatcattaacgggtttgtagcgctggcgactgacacaggtgagtggcgttactttcgcccggatagcgtggagcagtttcactttgtgccggtggtggaagaaagcgaagaacacataacggagtaa

SEQ ID NO: 162411 - DNA, 234 bp, Enterobacter cloacae
atggaacagcgcaacctgctgattgtggcggtttttcagtttgtccagcgcctgacggatcggctccacgtcgcgctgacgcagcagtttaccgataagctgaagctggcggcgacgtccttctttcttgattttctgtgccagttcaatggcatcacgcaggtcctggtcgagcgggatcttatccagcgcgtttttacccagttctaccatttctgcgccaagctgttttaa

SEQ ID NO: 162412 - DNA, 537 bp, Enterobacter cloacae
atggctaaaataaaaagtgttaaaaacgacctttctaaatggaagattaaagaaaccgacttgttcagtaagaaagttactaaagcatctaaactggcttcagtagaacttcaaagggatattaacagacgagttgataaaccaactaactttactcgtaatgcagttgggttcaaattcaagtatgacaagaacggttcaaagaacagaatcttcatcaaagatgttcaagcacaatatcttgcgcccttgattgattcaaacagaccagtcgataaatttgtgcctgttcccggaagtacaaacgcctttggtaacattgttggattaagacaacgtcgaaatcttgaagaagttaagcagagacataacggaacagaacgaacagtattaattaagaccactgcaagaagaaataaacgagttgttgcaatatttgagcgtaataagaaacgtcgtaaaacaattggttcttgggacaagatatcagacaagatattcaaaactgttaatcggttggcaggagcacggcgataa

SEQ ID NO: 162413 - DNA, 321 bp, Enterobacter cloacae
atgtttacccatgccgattttccatgttattccgaacaagaactaaaacaatacaaagtatctggccgtattccagaatcaatgaccgttccatcaagtcctgacttagttaaaattgagcgtatgaaaaaacgtcttgttaacgataacgatgttttcttcattagtactcagaagcttaaaccaaagcatcgatttaaagaaggttctaagtacaaaattgaaggaccattccttgaaggtgaattccaatgcctctttaaaatggaatatatctacaaaggattccgaatggttggttatatgtgccagtacatctaa

SEQ ID NO: 162414 - DNA, 288 bp, Enterobacter cloacae
atggattcaaaaaagaacggcgagaaggatgagttggatttgataatggaacgcatgatggacccatgttatccggtgtacattaaagaaaatgatattgttgttttcccgattgagccaaatgtgtatcggttttcatcggttgaagaagctgaaaaacaaggatatcacgtaaaagatatggagcattatgatacgttgagtatcacagaaaagaaaaactataatctttattatgccccaactcgtgagatgaaaccaagaatatacgactttaaggaagattaa

SEQ ID NO: 162415 - DNA, 1518 bp, Enterobacter cloacae
atggaactcgcttttagttacgcccgattcagtacaaaatctcagtccacagggaccagtctagaacgacagttgaacgcttcaaggctgttctgctcagagcgtggtcttacgctcagtcctaaaggatatcatgacctaggcgtttcggggttcaaacaagtaaaaagaccagaacttgaacagatgctccaagccattcaatctggtgatatcccatccggtagctatatcctcattgaagctatcgaccgtttatctcgtaaagggataagccacacccaagatgttctcaaacagattcttcaatacaaagttaaagtcgcattcgttggtgaagacgctaaaacactggctggacaagttcttgatgaaaattcattgaacgatctaagttcagttatcttagtggcgttggctgctgatttggctcacaaagaatcattacgaaaatctaaactcgttaaagcggcgaaatcaatcattcgtaagaaagctactgaaggacataaagttcgtggtcatacaatgttctggattgattggtctgaacaaaaacaagatttcgttcttaatgaccgggttaaagacgtacacaaaattattgagctcagacaagaaggacatggtccacgtaagattgccaagatattaaatgaacttaatatacccggtccaagaggaaatccttggaaccatatgacagtcactgtggttcttagaagtcctgttctttatggtgcttatcagacacaccaaataattgatgggcagaaagttccagatgttctacttgagaatcattatccagctgttattactcaagaagaatttgtaactatccaagctgacagttcaaaatcaaataaaggacgcccatcaaaggcaaatccatttagtggggttcttagatgtgaatgtggtcaagccatgttgttctcaaaaagaactaatcttaataaagacggcgaaccactagaatacgaatatcatttttgtttaggacacgcagaaggacgttgtaagaacaataaaagaatacgagacctcgttccgttattggttagtcttatggacaaactagttattaaccaagcaccaaagaaaaatctaaatgttgaactgataaaacaaaaagaacaaaagattgaacagttgaacaaaatgcttattgaacttgatagtcctccattgagtgttctgaaaacaattcaaacactagaggctgaacttgatattcttttgaacacacatgttgaagaaccagttcaaactgatgtacaaacattgagcacaatcactgatgctcaagagtataatcaatatcttaaacggttagtgaaaaaaattgttgtctatcaaaagaatggtccaaagaacctgcgtatcaaagtctacaaaaccgatggacattatcagaactttttggtaaaaaatggtaaggttttattcaagtctgacactaaagcactaaaggagttaatagatggattcaaaaaagaacggcgagaaggatga

SEQ ID NO: 162416 - DNA, 828 bp, Enterobacter cloacae
atgtcagaaccttcaatcgtcccttacgtaaaaaccactcccaaaccttttggtgtggacgtcgaatggaaatggccgggtggctgcgcggtgctagaactgcaatgccttcatgaagatggccgacttgtgaaagaacgcctctactggccaactaccggataccttatttccgggctcaaaactggtgagcgagtgcaggtgcgcctgcgtccaattgcagaggatggctcagcacgagattggcgagccggtgactggctcgaaggggtttcttctgtcgatgccggagaaattgtaggggcgttggaccatgaaatccgtaacagcgatgcattcaaagtcctgaaagatggctggtctttcgaaaagaacgggacgctaattattaataacggccaggtgttcgttaccgatgcgaagataggcaatggcgtattgtctacgaactatagcgtgaatctgaatatcaacaataatggcaaacagtacgctgcgggtatggctattggagctaaagatggccagagcaacgttgagtttatggctgatcgctatacggtgcatgaagccgcttcatccatcatcagaaacgccgtggtatcagccacgaaggtgaagtttaagcttggcgatgaaatgacgcaggccgtcattgatgctgtacgtgaaagcgatcttttcgcagccctccaggcaaagattgatgcgcaaacagcttcagtagctggcctgcaacaggcgatgcacgatgcggtgaacgatgctatccgcaatgcgctcaagccaggcggcatcctctggaatacacggtcgagtggactctga

SEQ ID NO: 162417 - DNA, 381 bp, Enterobacter cloacae
atgaaatttatgaacctgaaattttataacttcaaacctagaaaaaatttatatgatgggaaagagaatggtttttatgatttttcagaaaaaatacatattccatatttaaatgttgagattgaattcaggaatataaacgcaacacctctttgggatgtcgataactcattaaaaaaagaaattgtaagtaatatttctggagttaggactttgacatttcatgatgatccagaaccttcttataaatataataatcttgatgtgtatatttattcttgttttttggaaaataaaaatgttcatattgtattggcgcaaggtgaaagtcaacctgccagatataaaattatattgctaggttcagtaattgttgggtaa

SEQ ID NO: 162418 - DNA, 759 bp, Enterobacter cloacae
atgtttcatttcgtttatcacactatcattaaagcaaacactgatggaagtataagacactacatcggtaagcacagcacttcaaacttgaacgatggttacgttggttcaggtaaaatcatcaaacgcatccttaataaagaaaagaaaaatccaggtacatacgaaatcagttgttctcgttctaaattctttgaaagctccgatgaagcatatttctttgaagaactagctatcagtgaagcaagagataagtttggttcatcattaatcaatatcagtgatggtggtgtagctcctattctccgtggtgaaaatcacccaatgtatggaagaaaacattcgccaaatacaattgagatatttaagtcaatcaataaaggcaagaacaatccaatgtatggacgcactagtgggatgaaaggacgcaaacaatctgaagatgccaaacgcaaaatatcagaagcaaatattggtaaaagaatgcctcctaaatcaaaagaagccatggaaaaatttaaagcatcaagagcatggtataagcccacttcagaaacaatagagaaatatacaaactctattaggaaatctaaaggtggagcgcattgggaattttacgatgagttaaagaaattatggaatgatacagaaatgcttggtagagggtattttagaaagttagcagtagagaaaggatatccagattgttgttacaaaagaatgattgttaatttccaaaaagatatggggctcttatga

SEQ ID NO: 162419 - DNA, 660 bp, Enterobacter cloacae
atgaactacaacgactcaattaaacaaaagttccttgctttatgcaaagacccaagtttcatcggtgcatacaacgattttaatggaacatctaaaacagttttgactatgtctgaactgttttctgtaggcactttattccatttcgtaactatcaatatgttgaatggacaagagcttttaattactgatagttatcacgatactgtttttaatggtaaaacatatcttgcttcaggtgatttcaccgatatcagtactgttcaagaatcaaaggaaattaacaatatcagcttaagtgtcaaactcagcaatgttcggactgagtacataactttgataagttcaggggctttaaacaatgccgatattcgtatcgatataggtttcaaagaccctaatactggacagattagtgaaagttttaatattgacacagggtcaataagcaaactcacagttaatattgatttgtcagataatgatagtgaaaatgaaacagaagtggagattgattctacttgggctgttcttgagaaatcggcccgtaaccactgttctgatgcaattcacagaagttatcctggaaatgagaacgatactttttatgcaagaatcgggaagtggaattcagctcgtcgctggactagtgtcaaataa

SEQ ID NO: 162420 - DNA, 372 bp, Enterobacter cloacae
atggctacgttacaggaattaattgcgtgtgaaatcagtgatttttttgcagggctggggcatccgggcgagccagagactcccgaggaaatgcagcgacagttaatggcacgcgttatgccactcctaactaacgacataacgcatgtgaattgttcaataattgacggaggtgtgacagtgggctggcgtgagttagccctgcgcgggttggtgtttcgtatcaattacgaggttttacacccgcaggggttggcgatgatgtacgaccctgaaacgggtaactctataggggcattggtagcctctgatggtgtttggaattactcggacgaaatcgtcaaatcggcaaaacaaaagggatggctgtga

SEQ ID NO: 162421 - DNA, 819 bp, Enterobacter cloacae
atgattctttcaagtgcaactcatatcttcaggtttagaggggataacatcaatactataaatgagcttgttaacaatgctatttggcattccaaaaatagcattcttaatgacccatttgatatgttttatcattttgataaagaatcccttaaatgtttcgataagtcggacatatcaaccctgatagatagattggataaaattacaggtgaagggggggagcttcgagagctattaggtgaaaatgagcttggtaagatttatcaacgctttgatgaagtgtggggggacggttttgctagtggttttctaatcgagtttcaaaagaatgttgcagtagcaagttttactaaaaattataatagtagattgatgtggggttattatgggaacggaatgaaaggaatatgttttgcatataatagagaaaggttgaaggagtcgggtattgaactttttgatgtcacatatgacgataaagcccctagagttgatttttataaatatctccttgagatgactcgtggtgagccggtgtctgtgaattttgactttgcacttgttaaacattctgattgggagcgagaggatgaggtaagaagcttgcatttcctcgatgctgaggctgtttatgaacatcagagtggtatcgaagttcccctgcaaggatgttgcattgatgcgataattattggcgaacgtctatccggagatatgcgagtttttattgaaaatttcgccaaaaaaaatggcattgaaataatgacagcaaaagctgattttacaaattataaaatccaacttgagtctaaatag

SEQ ID NO: 162422 - DNA, 201 bp, Enterobacter cloacae
atgctcattaggacggtctttgaggccgtactgatggacccgcgcgatacgctgcacatttccggtaaattccaccacagcaccgttttcacggccactggctttcatgtaccggttagtgcgcagtttttgaaacatcgcccgtttaattcgaccttttttggctctcagcggctggcgctttcgcgcctgatacggtga

SEQ ID NO: 162423 - DNA, 1176 bp, Enterobacter cloacae
atgaaaagttcagaatatgtattagaggataaaagagttgattgcctctctgttatacatactaccaagttatctgattatttgtcttttgctgaaaaggcttatgaagataaaggaggaatctatggtcaaagagcacctttgaaaactaaaacggctcagactatacgtgaaagaatggtatcggatataattgatggggcagtccttccacctatagttattggtgtaatagttgatgaagagacttatgagaaaatcaaggccgtttcagatgaatgttctttcgaaaaattaaatgattctattgataaaacatcattatctatcattgatggaatgcaaaggacaactgcattcttacaggctgtaaaagaaaatgaaagtgtttatgataaaaccattagaatagagtattggttttctaaaagcatgaatagtttgatttacagaatgcttgttcttaatacagggcaggtgccatgggatataaaaagacaacttgatacaatatatgactctataataaaggatttaaaaaaatcaattcccaacttagatataagactgattggccagtcgagccgaagaacacaagcaggccaatatcaaagtagtaaattaattgaatacttcttatgtttttcttctagaaaaacagatattgatctaaaagaaaaagtttcagaagatttcgcaagaatggatgcaattgagtcaacttctgacaatcattttcttacgaactttaaagcagttctgaaattaatggttgatttggatcatgagttctcaagatataaagatgaacaacaagaaggccgtataaaagttggtaaagatattttcacaagtataccagctggtgttggattcgttgcagctgcggctgcatacatatatggccctccagggttcaaaagttctaaagaagaaagtgatagatgttgccaagaattaattcaaaaagtttctggtttaattgagcggctttcagctctcgaggaagatgatcttgggaggttcttgcaattttcattgctgaatgaaaagcttagtgcaagatcaagtaaaataggtcaatacgagcgagagttttattacaaagcatttgaagcttgtatgaaatatgttgatcgtttagaagactttggaccttgttggcaggcaaaataa

SEQ ID NO: 162424 - DNA, 1113 bp, Enterobacter cloacae
atgtcatctataagagaaagtatagattatatatttgatactttgtgtaatgccgggggaggttcaaaaacccggcataaaatgaaacctgctaaaccaagcagcgatgagatagagtgctttaagcgtttgaagtttaaagccgaggatatgtttacattattaaatggaaatgcattttaccattttcaagagcataaaaaagatgctggaggaagaataacggtaatagattattttgctgtgaaaaatatatttccctcggaatttaaacaagagatgtttgaggagtattttagtttatgtgatgtcactgaatcttttttcgtttttttgtgcccatcattgaaactaaagattagggaagatgttttgccacaagaaatattgaataacattcttttccagcaagatgatgcattatatcaagggcactatatacccgagctaatcgattactttgagccagttacaatatttcgtttggatgatttatccacagattttaatagatcatttctgtcaagtgcttattatttactaagtagttgtcaggatgtgattacattacctttggctggggagactatcgataagttaagagggttatttattaagaaagttaaaataccaaaggataatgtgtttttatcattgacgtcctcacatttaaaacactgttttctagaattgtataggtgtatagaatggttatatgttattccaaggagtagacgccttaaaggggctattcaatattccaagcccgcatatgagcttgctgtgcattgtatagatgaattgtcatggagaagaaaagaagaagattcactatcgagaattgtgactgatgtgcttaaaaactatgaaggtgtgagttttaaattagtaggatgcggtctttttaaaaatgtaaatatagattcagacggtattgcaaagcatctttattcttttcgaaaccaatttgtgcaccaatttgaagcgcgaaaggaaaaagatgttatcaatgagcatcttattgaagttatagacctgattgctgacttcataattcatgcttatgatttatatgatgtggatattatcccatggcgggacgagcaagtttga

SEQ ID NO: 162425 - DNA, 426 bp, Enterobacter cloacae
atgtttaaatttaaagcagacctatcaaaattcttaaacggatatatcgggcaggaacataagttcggacagaacgattgcaacattcttattgctgattatctagatactttcattggtactgattacgcgtccaaattaaaaggacaatacggctcagtccaagaaggtcttaaaaaatgttatgaccttgtcggatttaataacgttttcgaagcgtgtgaaaaccacttggaacgttctgaagaaatcaaagacggttcagtagtactgattaaaaagaaattcagaaaccgtaattattatcaagcctcaattgtcattaataacaaagttcttatcgagaataacaaccgatatgaaatccatccggtagaactttttgattatgacttaatatataacaggagcaaacaatggcaatag

SEQ ID NO: 162426 - DNA, 471 bp, Enterobacter cloacae
atggcttttgaatttgatattttcgctggcaactatgtcagtatctactacaactctgatattacaaacaaagatttcgaagctcctgaattcgtagaaatccctgaaactggtgcattcccggcaactggtatcgaacgtgaagtaattcaggctcctaactttactcacaaatataaccgtaaactggctggtcgtggctctgttccagatattgacctgaccgttaactatattcctaagtctgtgcacgaccaattgtacaaactgtgtgaagactctaaacgtggtcagttcaaagttgtttattgggtagacgatactaaaactgtgggcgtaggcaaagtctataacggctttattactaacgctacatttggtggtggtgaaaccgaagttgcatctctggcaatgactctgtctgttgatggtggtccagttgcagttggtgttattgaacctaaagaataa

SEQ ID NO: 162427 - DNA, 1695 bp, Enterobacter cloacae
atgcgagcatatagagccaatgcccaaggaactatattccatgaactgtgtgattccaggacaggttctgaaattgcaacttatacaggtcaaacagcccaagtaaaaatacaagccttaaaagatgatggtcgtcagtggttgcgtcattctattatgcttggtggtgattataatcaaacttcaggcttaggatttggctcaattgctcttggtgataacgacacaggtttccgatgggtccgtgatggtgaatttgatgttatgaacaacagtcgtgtatctgttaagttcacatcatatgccccgcaccgaatgcaagtacataaaggtgctttgattaagtataccgataatgatgacgctgaagttctcgctcctgaccgttctgcacttttgcaaattaacaccaatattgatggtaataatttctctgggaatggcctcactcttattggctataacgaaaatggaaaatatcatcattatttccgtggtaaaggcgcagttaacatcaataatgacagcggtcttattgtgacaagagatgcagatctgcaaagtgcactgaacgtaaaaggtcaaactaccgcacaaggacgtattaattccttaggtggtattcaaatgaccaacgatacaatgatggaatgggctcgtaatacggactttgcacgcattagttttaaaaatactggtgatgacgattcagactcttatatgaagttagtgtcaggcgataacggcaacgagtatttcaaatttgttagtgtatctggatcaaccgaacgtcctttatttgatatccgttatggtgataatttctctcactataaacttggtattggcggttctcgaaatacgtttggcagtaataactctttatcattaggttggagtcaaacaggacttgtcgctgaaggctcgggtgtattaacttctttcgcaaacggccaatggaaccataagtcttgggatgatggttcgctggaaattaatggtaatagacatgctgcaacacacacgcaccaatggaataatcaatatggacaacgcgctcctgttcatattaatactggtgttgtttctggcgcttcagattattatcctgccgttcgacatgttactcaagctaatggatacggttatagaacagcccttgattttggtactctgcgtgaaaataacggacaatttggtgttggtattatccgtgtggcaactgatgaacgagttccaggcgatgggcaagacgctatatttagattcatcatcaatggaaacttcacagctccgggtcaagtaattccaggaagttttgctaattttgatgggcgttaccaacttaaggcaacttctgatatcgaacttaaagataacatctgtgatttcgatggtaaaaaatctcttgacaacatcgaagcaatggactttaaaaagttcgaatataaagactctctcggtgtcgagcgtcgtggtgtaattgctcaagatattcaacacatcgatcctcaatatgttactcgtggttctacttctgaaatgactcctgaaggagaagttattgaaaatgaatatcttgcccttgatacaaacccattattaatggatgcattggcagctattaaagttctctctcatgaagttaaatcacttaaggcagaacttcaatctcacattaccggtcattgctga

SEQ ID NO: 162428 - DNA, 687 bp, Enterobacter cloacae
atgggctttattactgaagataaagactcacaagaacagcttgatctgaataatctaaatggtgacgacgaagaagaaccagaagaaattattcaagaactccaagcgggtgtaattcagaaattacctcaaggtcacgacattaaacaactgaccagcactcaaggtggcgatgattttattagtttcaccaaccgattagaaaaccatatcgctatgggctttggtttcttcgaacagggttatcgaggtgatacgtcaagtatcaactattcaagtgctagattcggtgatcaatcacaacgagtaatgttctcaaacgttcaacgactgatgcaagaacgagtcttagacgtcatatatgaacgttggttgcaatcggctgtattaaacgacgaaatccctatcagcatgacaatggttagtttcgttcttaatagtacggactggtcttatccacgatgggattcaattgaccctaaaaaagaaattgaaactgatgttcttaaaattgagaacgggctggtttctcgcaaatctgtaattagttcttacggtgaggacccatctgttgttatggctgaagttgaatctgaaaaagatcttcatgttccaaaacaacaagcaaaagttgaagttgctgaagcacctgctttagctgctaaagaagacctagaaaatcagtaa

SEQ ID NO: 162429 - DNA, 168 bp, Enterobacter cloacae
atggacgagaatttcattaactacttgtggatgtccgtactcattttcgatttcacgctgaacaggagtttcagaactaaaggcgatttcataagttccgtcttcagatgctttaatatcctgaacagcgtattcgcgtttgagcttcatacgttgtccttgaattaa

SEQ ID NO: 162430 - DNA, 1335 bp, Enterobacter cloacae
atgaaacgtattgatgaaatgactaccgaagaactgctggaaatgaccattgcagaaatcgaagcactttctgaagaagatcgtaaaaaacgcgaactggttattgatgaagccgctgctgaagccgaagccgctgctgacgtagaagctgaacaggttctgcaagataaccctggcacccctgaagaagatgttctgaccgctgaagagcgtgaagaagaaatcgctgaaatcgaagaaatcgctgagcgctataaagttggtcgcggtgaagttcgtaaagcaatcgcatcaaatatgactgctcgtcagttcaaacgctctattaaacctaacaaagctccggcggtaattcgtaaaatggaaaaagatactcaagctaatatcgaagctaaattcgatctgaacaaagttgttcgctctcgtctgaatggtactgctctgaatggtcgtgaagcagaatatcatcaggaaatgctgaaaaatgcacagcgttccggtaaagaatatcgtggtggtgctttcattcctgcatcagttctggctaaaggttctcgtgctggtcagacttccgctactctggctcctatcactgaaattactcagcgttatgattctctggttgatattctgttgcctcagtctgttcttggtaaactgaacgttgataccaagactggtctggataaaccaatcagcgttcctaaatttactaagtctgctgttgaaaacttcggttgggttccagaaaacggtgaacgtccattgggcgaaatgaccactgataacgtgaacatgactccattcaccttcgctggtggtgtagctatctctcgtaagtctgtgaacactctgcctaacattggtgattacatcgctgaccacattgttaaagcttcacgtatcaaactggaacaggctgtattcagtgctactgctactcctaacttccgtgacggtatcgctaaacagctgattgatgcaggtctggttaaaactggtgcgttctcctacaaagcgttcttggctgtaatcgctgaactgactgatgccggtgttactgaagaagaaattaagttcatcatgcgtggtgctgtcaaacttggcggctgtgacgtattcagttctggtgttctgccatccgatctgattatggctggtgatttctctggcgttaccatcgctgaatgggcaggtttagagctcgacctcgataccaccactctgcgtgcttctggtcagattatccctactgtctggtgcgatatggacattgcggtaactgatccatctcgtctgtttgttatgcaggctaaagctcctgcttctaagtaa

SEQ ID NO: 162431 - DNA, 738 bp, Enterobacter cloacae
atgtatgatttcgataatcaagtgaaagataaccactctgttttttattatgctaggtatgtagatgatatagttattgtcactagtggttacgaagatagtgatgcttttattgagaatgtaaaatcaaaccttccaaatggattgcgttttaatgaagggaagaaatattatattagcgatttaattccaaaatcttccaaaaaaacaaaccgtgcaccctccaaaaaattgttatcctttgaatatttagggtacgattttagcgtgggagataaaattgaagagtgcaatataagaggattctatagggtaattgaaattgatcttgcacatgcaaaggctaataaagtaaaaagtagagtgatttattcgattgttgattttaataaaaccaatgattttgagttgctatgtgaaagactaaaattcctgtccacaaactttagtgttttagattcagatagagtattaaaacggttgtcgggcattcattttaattatcctcttattgatgctaaatcttctaagcgccttgctgaacttgatgtgtttttaagaaaggctgtattatcatctagtggtaaggttttctttgattttcatgcgaacttaaaccaatgcaaaaaatatcgattacttaagattagttttgttagaggccatgagaaacgtcatttttttcattattcagcttcaaaaatgatgaaaattcaaaggtgttggaaatatgtctaa

SEQ ID NO: 162432 - DNA, 537 bp, Enterobacter cloacae
  misc_feature (29)..(38): n is a, c, g, or t
atgatgaagattcaaatggctgatgatgnnnnnnnnnntatcgctggtactcttcaaggtctattaggcgaacagaacaaagtagcacaggccgcgttcgctatctccaagggtatctcaattgctaacggtgttattaacgctcatgaggccgctactaagtctatggcactttatcccggtccattgggtatggctatggctgctacttcgtatgcgaaagtaatcggtgaagtaatgtcgatgaaatcaatgacgcttggacagttccactctggtatcgataacgttgctgaaactggcgattacacattacagaaaggcgaacgtgttgttgaccgtcgtttgaaccaagatctgaaagattatcttcagaagaacgacaacgacaataccgaacctcaaggccaaccaatcgacgcttcaatccatattggtggttcagtaatggatgaacgtacactgatggcggcgctgaagaaacagcaacaaactcttgtgcagattgttcaggacggacaacgacgcaggatgtaa

SEQ ID NO: 162433 - DNA, 2160 bp, Enterobacter cloacae
atgaccacgcaacctactcaagacgcggtaccgagcgaatcaccacgtgatctgaagttcaatgcaggcaaaattgacgagttcgttacttccatgggctggacctataccgatcgctttggtgtgaagcattacaccatcgagggcatcaattacctcgcgcagcaggctatgaatgccttcggttacgtgatccttaccgggaaaacgttcaccactggcgccaccatcaataacccaaatgaagtcctgctaaacaccgcagacggcgaatactacaagtggaccggatcgttcgcatcaggccctaaagtagttccggcgagttcaactcctgcgagaactggcggtattggccctggggcatggatcggtgttggagatgcttcgcttcgaactgcacttgcagcgctgacaggagcagggcttgtaggtttatctgttggtacaacttatccagccaatacagtcggatctgccattcaataccgcactccgcagatgtatggtattgagccaagcactacaaacatcattggtgctggtctggatgccatgtttgccgcaggtggtgatattcgttttgagaagccaggtacatatatcactgatagaacatgggttcttcgtagcgggactcgtttgtggattggcccaggggttacgatcaaacttgctaatggctcaaatgtgcctgtttttaagaactactcatacgcaaataacgcaactgctgacgcgtatatcgaaatatgggggcctggcacgattgattacaatggagcaaaccaaactgttgtcggtcttggctcaatggcatcaattcttaaaggtattacaagcctgaaaattggcggtggcattaaggttattggtgcaaacaaatatgcatggctggtttgtaacgtcacatacttaactgctgttggattgaatttcgacaccaatagtgacggcctgcactgtcagcctccaatccgccactcatatattcgcaatcttaaaggtaagacaggcgatgatatgctggctttcaccatcggtgactacgccaactataatatcagcgagcctggtgacttctctaacgtagacgtcgcgggcttattctgcgaaagcgctctttgtgcggtgaagatgacaggcgacggcacgggtaattttgtacgcttccgcgtttccgggatttacggcgataccctgcacgccgttttccgcgtatggggcgatactaatctgacaaaaacttcggttaaatatttgaccatagaggacgtgcacgccgttcctggctctgcttacaacacaatagagattgatgaccgcggtttcggtacgtctgggtatagcattgaaatcgacgagatacacattaagaatgtgtatacggcaaacaatacccagcaaaccgtaaacttctccggcacatttggttctgttatccactccctcgtcttagaaaacctgccaagaaatgcattaacaattctgggggttaataacgccgggacggtggcgattgataatgtatctattaaaaacggtaacgtcatattcccagataacgccaacgccgctgtagttattaaccgcggcaccatatccaacctcaacatagaagatgttgcttgtacttttgttaacactactaacggccagattgccagactgattggcgcatgcaccctatacagggctaactgggttaatgtgtatcaggcccgaggttcgaggggatggaaccatataaatgcggcaatggtcggcacgacggagctaaaccttgttaattacacatgcgacggcgacggtcgtatcgcccaaataaccgcgtcaacgattacaattagaatgtccaactgccgccgtattaatgatactggcgctcagaccgcattctttgcaagcggtggagcaattacgttgtctggtagtctggaaaccgggtttaacactatcggcacaaactctggcggtgttattaaaacaacgccaggcgttcacaatatcccatgtaacgttgatcttctcacatccgttgatggtgcgagcgtgcataacctgaatacctctctttcctgtggggctggaagggtgttggtgcaaacaaaggtatggaaaaaccttttctctggggctacatataccagcacaatctga

SEQ ID NO: 162434 - DNA, 549 bp, Enterobacter cloacae
atgaaacctgagcaccttaagctgctatctgataaagactggcggctgaacaatctttactggatcaccgacaaggatggtaagcccacgcgcttcaggatgacacctgagcagcgggaatacttcgaggggatccacactcgcaacatcattttgaaagcacgccagctcggtttcacaactgaggtgtgcatcatccagctcgacgcggccctgttcgagtcggcgaagtgcgcactgattgcccatacgctgaatgatgcaaagcgcctgttccgagaaaaggtgaagtatgcatacgacaagctgccggcagagataaaggcggccaacccggccagtaatgactcttctggtgagctcgtctttaagaagggcggatcgctctacgtaagcacgtcatttcgtggcggtacgctgcgctacctgcacgtttccgagttcgggaagatatgcgccaagtatccagacaaagcccgtgaaatagtcactggtgcgtttgaggcggcaacagcatcaaaccgaacacagataacacggtctctctga

SEQ ID NO: 162435 - DNA, 156 bp, Enterobacter cloacae
atgatgaaagtgtcttggggtttgggttatacccacaccccatcatgctcgattctcaatcagttcaagattcaggagtatgaattctatgtaccaatccagcaagataactggacggcctcccagcccggttttgccataaattatcctttgtaa

SEQ ID NO: 162436 - DNA, 333 bp, Enterobacter cloacae
atgaatagaagcgaatgggattggtgtctaaataatgatgactctctttattatttcccaatcaaccacaccgtaaagggaaactacagaattcattttgaactgagtggctctcacaacctcagagtttctgacgctgctctagcagggaagcccgttcttctgttcgaatacgttgatgaggatgatgaccgtccagccattattggattcattgaagcagattccactatcgagtccatgattgatcatctcaacagcattgacagcatttaccacgagccgatatacaaatgcgtgtatgaatgggcgctacaacttttctatcgatag

SEQ ID NO: 162437 - DNA, 198 bp, Enterobacter cloacae
atgtgggttaccggaaaagacgcctggttctttgccaactacgacccgcgcatgaaacgcgaaggcattcaccacgtcgtcgttgagcgggatccgcagtacatgaccgatttcaacgaaatggtgccggagttcatagagaagatggacgaggcgctggcggagatcggattcacgtttggcgagcaatggaggtaa

SEQ ID NO: 162438 - DNA, 147 bp, Enterobacter cloacae
atggctaatcatgcgaacaaaaaaacacccagccgtatattattcatccgcgtttcgcttgactgcaaagcaaacgggccagcagacgctgacccgtggaaagggaaaatgacacacctgccctcaggcggtctttttggcaattaa

SEQ ID NO: 162439 - DNA, 165 bp, Enterobacter cloacae
atggcaatttcatcgcgaatcacacttctcggcgcgctggcgctgtgggcctttcaggcgcaggcggtagacgtcaccgtcgcgtatcaaacctctgcggaaccggcgaaagttgcgcaggcggataacacctttgccaaagcgagcggcgcgaacgtcgactag

SEQ ID NO: 162440 - DNA, 156 bp, Enterobacter cloacae
atgtatgcttgcggaagcgttcacggcttcggcttcggcttcggcttcggcttcggcttcggcttcggcttcggcttcggcttcggcttcggcttcggcttcgtggagcatactgatgctcttttagcaggaaagaagcttagtcataggaattga

SEQ ID NO: 162441 - DNA, 486 bp, Enterobacter cloacae
atgttagcggcagccctggttgctacggtgggattcttcttgtgcatttttagcatggcgagagtcattaacgacgtcgtgtcaaccaatatggtgagacgtttgccgctttccatggggcgctattgtagtgacgatgcgggcctgtgggtatctgtaccgcagggggtagaactctgggtaagtgtctatgactcaggctggacggtcttacacaaaaatgcagtcaagttccttgagactacacctgacccttccgtggcccttgaatcctttgctgacttaacgagccccacaagctggagtggcagccttgcaaacatatggcaggcacgagctgacgctttcggtgaactcatccaccacccgcgggctgacatttcagacgctgcaagagacatccatgagcgcttaatgcttatgattgagcgtcaacgggatcgggaacagcaggaagatcgtaaaggcgaacagcgatttgagtga

SEQ ID NO: 162442 - DNA, 126 bp, Enterobacter cloacae
atgagcgagaagcggacgttcgagtggtctagcaagcaggtgggggttttgctaacgtggttgcgtatcaataacaaggggcaggtcacattgggctacagtgaataccaaaagtggtttgtttaa

SEQ ID NO: 162443 - DNA, 930 bp, Enterobacter cloacae
atgaaatttaaagctaattccattagaacattagatcgttttttgaaatgttgtggtggtcaagacaatataatattaggtatcaaattagatgatttgaggcctgaaaaactagctgaaattggttttgagacttcgccagaagaaggcctatcgataataccaagcgttattggtaagtttactagtttcaatgctaatggaaaggaaatccttcgacctgatttaccaaaagaacaatacagcgttacatatacaagcactacatacgactggcatagaaatcctcattatggaatgcacacccgaacagccatgcggatagcaagagagcatattcctgcccctgctataatgatctctgttgctaaaacaaaaaatgggaaatatataacctcacctttactaaatttatctgatgaaaattcagagctaaacattcacattataaatttaatgctcgaatgttttgatgagatagaaattttagatacagtaaaagaaccattaataacaacaaaattcaaaaaagtcttatggtctgtattacctaaagggaaatacccatgggaagaaatatctaagataatagctactaacacacaaaaaacctcagcatcagatagtgataaagaagtcatcgaatccagacttaagttaatcaatgtctacaaacctgatttcattgctactggtcatgcgggattcaacggatattttatctttggttttgaaagtaaaaatatatacgtacttgaaagtattttccttgataatgcaacatacattttcaaagaaaattgggaaatattatctcaattaactaaagccgagattatcaacggtgaccttgaatatgagcgtatcattcataataaagtttggaaacgagcaataggtgaccgcttatcaaaagccttaagaaattaa

SEQ ID NO: 162444 - DNA, 597 bp, Enterobacter cloacae
atgtcaacatcaaagtacccaaatgagatcaaaataaatcccaatcagggtggcaaagctgcgattgaacgattggtagaggcgtatggtttttcaacacgacaagcattagcagatcacctagatgtctcgaaaagcactttggctaacaggtatatgcgtgacacgttccctgctgattggataatccaatgcgccctcgaaactggtgtatctctcaattggttaaccactgggcagggtctaaagcagagctcgaaaacagcgactactgaagaactggcgcagttttctttcgctgctggcaaaatggttgaagatggttcttgcgtttttgacgcatcatttcttcccaccaatctttcatctccgattgttgttcgtgatggtcgtaccacatacatctgtgaccaaaaattcacggaagtgttagatgggtactggttgatcaatattgatggaacttattccgttagaatgattacaaggctgccgaaaggcatgattaaaatctctactgcagaaaatagttttgaatgtgctttttcagatatagaagttattgcatgtataagaagcacaacagtttcacattga

SEQ ID NO: 162445 - DNA, 897 bp, Enterobacter cloacae
atgagcactatcctgaaatgggcgggaaacaaaactgccatcatgtccgaactcaaaaagcacctcccagatggacctcgactggttgaacctttcgcgggttcctgcgctgtgatgatggcaacagactatcctcattatcttgtcgcagatataaatgctgatcttattaatttttataaaaatgcttcccagcatactgaagagttaattagttgctcgtgggggctgttcagcgaagataataatgctgaaagttattatgataaccgtctgcgttttaatgaggattcatccttgaccgcgctggagcgcgccgcattatttctatatttaaatcgtcattgttatcgtggcttgtgtcgttataaccaaagcgggaagttcaatgttccctttggtaattacaaaaaaccttacttccctcatgcagaaatcctgacctttgctgaaaaggctgtgcgcgccacgttcatatgcgccagttatgccgaaacattagaaatgctgcaaataggcgatgtggtgtactgcgatccaccctatgacggtactttcgctgcatatcacaccgaaggttttagcgagaaggaccagtatcacctggcatctatccttgagcgccgttcttcagaggggtatcaagttgttgtgtccaacagtgatacctcgctagttaattctctttaccattatttcacccgacaccgtattacggctaaacgtagcatgggcgtggaagctggagatgggaaatctgcagaggaaatcattgccatttctgagatggttgctcccgtgcctttgtatgggcatgcaataactttttatcaacgctttaaaagacaagggattaagtcaaaaaggaataaaaataatactgggggtgagctgtga

SEQ ID NO: 162446 - DNA, 150 bp, Enterobacter cloacae
atgcgtattgaaataatgatcgataaagagcagaagataagcaggcaacactgtaatctcttgaatccgagctttaccgaaatttgcgccctctctatcaaaaaacggcaatccgcatacgtaagggaagcgctaacggcctggagctga

SEQ ID NO: 162447 - DNA, 477 bp, Enterobacter cloacae
atgtacagtccattacagattgcgaataagttcattgaacttggccttgcaaataatactcctattacccagatgcaagctcaaaagctagcctatattgcgcacggcatatctttaggtcatcgaggggtaggcattttgagcgatcccgtttgtgcttggagatatggtccagtaatgccatcgctttatcatgctttgaagcattatggcaaagctcccatcactcatccgatagctagacaagatgatagtcaggtttctcctgaccatgacgcttatataaatgagctggttcaaaacgtgtttaggacctatgggcactttactgctgaaacgctttctgcatttactcatcgctctggcactccatgggatcagacttacagggcgggcaatacgattattagcgatgaaacaattaagaattactaccaaaagctgatgtctcgtgatcctagttgcatcggtttgtaa

SEQ ID NO: 162448 - DNA, 633 bp, Enterobacter cloacae
atgtctgagaacaagaacgaagcgctaaaaaaacaacttgaggaaggccgacaagttctttccaacatcgcagaaattcttgaacaaaaagaaaagttcaaatcacctccttccttggcatcgatgcctattcctcctttggaagaattcgttccagccgcatctggtcctgaacctaggcccgaacccaaacctcagcctcaagttgaggagggcacggaggaaccagagtcggccacggacgagttgcaagaggcgtggctagttagtttagataaaaaaaccaatgaattaactcagtgtttgaaaggtattcaagaatcaattgctaccctatctaaaaatgtggagcatcttgaggctgaggcaagaatcaagaatgcggaagctgatggaaagctggcggataatgctttacgtaaacagatggcggatcgcacgtacggttttatggtcgtttggtgcttgtttatcggctcgctgattgcaagctatttgattgcttacgaaggtaagcccccaactgagtttatgcttggtttgctaggtacatgcacgattagcatcattgggttggtcgggttcgtagtaagcggcctgtttaaatcgccaacaaaaaaagaggacaaatga

SEQ ID NO: 162449 - DNA, 597 bp, Enterobacter cloacae
atggcgcgcttgaccactatccgactgtatggcgcgctgggtacccgatttgggcgtgtccataaactggccgtgcagacatcggcagaagcagtaaaggccctatgcatcaatctggacgggctggaagactatctgatgaatgctaaaaaaaaaggcatgacatttgcggtgttccgcggtaagcgcaatatcggcatgcaggattttcaggagcttgctggcggcagtgatattcgcattgcaccggtgatggaaggggcaaagaaagcgggcatgttccagactattctcggcgccgtgatggtggttgcaggcttggctttggggcctgttggttggggggtagtaggtgctggtttcgcgaatgggcttatcatcggcggcattacctctatggccggcggtatttatcagatgctgtcgccacaacccaaaggcttacaaatgcgcgatgatcctgacaacaaaccatcctatgccttcggtggggcagtcaacactatcgcaatgggcaacccggtcgcgcttctttatggtgagcgcgaaattggcggcgccataatcagtgcggggatcgtggccgaagacatctga

SEQ ID NO: 162450 - DNA, 324 bp, Enterobacter cloacae
atgagcaatatcaatgctggagatatggttttgattgttgctggtgctggcgttggcaggtcaggaattgttgaggggtgcattccgcctggtgacagcgaaaggatttatgctcatgacaaaagctatgacgtaacagcaacaaacacaggtgacagtcctgtctttgtcgtttccgcgcctggattctcaacaacgtttaaaaacggagaaaatctacgtggttttctcattaaggaacggaacgagattttgaagataaacggtcacgatgatgagtccatttttgatgattgcgatgtaaattgcggagcgacagcatga

SEQ ID NO: 162451 - DNA, 396 bp, Enterobacter cloacae
atgagcaacatcaacaaacagggccgccaagtgcagcgctatgcaaactttggtgtcgacatgatggagtgggccgacggtggctacgtcaaacactctgattatctggcgctgctggatgagctggaagccgtacaaaagacttccgctgcacgtcttggcgcaatagacactacccacaagatgttccagcgcgaacgagacagagctgaggcagcagagaagcggactgctgatttatcacaccatctccagtgcgcgcacggttttatcgagcatacagaggcgtttggccacgaagcatcaaacgggattctgtgttgtggtgacgcgcagtggaacattgatgagtctaagtcggctctggccgcagccggtaaaggagaggcatcatga

SEQ ID NO: 162452 - DNA, 213 bp, Enterobacter cloacae
atgggtaagaaaaacgacggtggctacgctttccctatggaggcgacagatgccacagcttggagggattgcaatcagggaatgacgttgcgcgactacttcgcggccaaggctatgcaggcaattgccgacccatgccatagtccggaattgttcgctaaccgcgcatatgaaatagcagacgcaatgctccgcgcccgggaggcatcatga

SEQ ID NO: 162453 - DNA, 267 bp, Enterobacter cloacae
atgtactttgccgtttcgctggaatgcaggaataatattcgatgtacacagtatttctgcttttctgatgggatgacaatgaaaaaatttatccagattgacagacgaattgttgtaaatggagtttcatatctagtcagatgtgaagagaaacccaacggtgaatggtctgtttttgatttagaaagaaagttcaacatcataacgcgcaacaaggaaactgcatttaccgagtgggaggcagaagcaagcactcgaaacgaatag

SEQ ID NO: 162454 - DNA, 315 bp, Enterobacter cloacae
atgaaaagcatggctttaattgttgcgggtgcacttcttttagcgggatgcgctcaagagcggcctttgacatcttatgatgatacagggctatgtatcttaaaggggcaggcaatgggttacggcaataccgacattatacccaagattcaagatgaatttgcccggcgaggcgagttgagcatttccaaagctgactgtgacacctacaccaaaacaggtattcaggatgccaaggtcaaaatgaaaacaagcgatggcatcattcagcagtccaaccagtcgatgatgatcaatgccatccaaggcaattaa

SEQ ID NO: 162455 - DNA, 744 bp, Enterobacter cloacae
atgactaagatgaatttagcagttaacggttctgttgtcaccgaaaaaactattgacagccagtatcttctggagatggtcaatgccgctcgtaagcagtgtggggaaccagctgtccgtaataacaagttcattgaaaaggtgattgatgaacttgagggcgagacctacacaaaaagtgtaggtcgtaagaatggtcaggatattgaagtcattacgatgtccattaagcaggctcttcgcgtggccgcgcgcgaatctaaagctgttcgccgctctctggtcgataagctggaagatatgcaggcgatcccggcaatgccgaaaagccaatctggcatcaccgagtaccgcctggcaaaagctgatcagctgaaagcgcaggccctggaaaagaacatcgccaacgcccgtgagattatgtctctgctgccgcgccttgacccaatggcgcatcagacgctggcggcctcgctgattaatccgctgatcggttatgacgccattccgcttccggtcattgaggagcattaccatacggctggcgaggttggcgagatgcttggggtgtctgctcagaagatcgggcgcattgccaatgccaataacctcaaaacggagcttcacggcaagttcttcctggacaagtcggctcactccagcaagcaggttgaggcgttccgctacaacgctgagggcgtgaaggcgctacgccacctgatccatggtgctgacgtggcctaa

SEQ ID NO: 162456 - DNA, 279 bp, Enterobacter cloacae
atgagcaatcaagagttaactgaagttatcgtaacaaagtacgcgctttcaagtggtccgtttaaaattatggccgatgtatcacatggcggaacaatggcttcgtacaggcttcctgggtgctatttaacgacagttcacggtaaggatttttggctgaatgaggctgatgctttagctgattgcgagcgtcgtcgactggcgaaaataaagtctcttgagaagcaaaaaaagaaactcgaaagcatgactttcctcattgaaggagccgcccaatga

SEQ ID NO: 162457 - DNA, 633 bp, Enterobacter cloacae
atgagccttgcagatcgcgtaaaacagaaaagactcgagcttggattgactcagagtcaggctgcagaactggctggcattcgccagcagtcttggcagagcattgaagacgggaagactcttaaaccacgtaatataattggcatagccaaggcactatgttgcgatgccgactggcttatgaatggcggcacgtttaagccaattgaagaagtgaacagcaggagagttcctttgataagctatgtccaagcaggcgcactggctgaaaagccacctatcgaagcctttgatggcagctttgagtacatacttactgactctgatttatcggagttcagcttcggactgagaattgaaggcgactcaatggagccagatttcaaggacggagatatcatcattgtcgatccggaagtcgagcccgcaccaggggaattcgttgtcgccaaaaacggcgggaaccaggcgacatttaagaagtacagacctacatataccgatatgaaaggctgtcagcattttgagttggtcccgctgaatgacgattaccccgtcattaacagcgatcatcaaccactgacaatcattggcgtaatgattgagcaccgaatttatcgcagaaagcggtaa

SEQ ID NO: 162458 - DNA, 321 bp, Enterobacter cloacae
atgggaagcgagttaacgtttcaggatcgcactgtcgtgccatttgataacggtgacgggaaaatctggttcacgacagacgcgctggccgaccttcttggatatgcaaacgccaataaggtttccaacatctacaaccgccacaaagatgagttcacggatagtatgactaccgtgaccaaagtgaggaaggatggaataaacaatagcttacgtgaagttgagtgcgtattttctctcccagaggtgcgcaccttatcggcatggtctcccgtaccaaggtcgccaaagacctgcgtatctggatgctcgacctggtag

SEQ ID NO: 162459 - DNA, 1062 bp, Enterobacter cloacae
atgactgacaatagtagttctaatatcaataaattaatacccggaagtactgttggaaggggaagaagtttcacgcttgaagcactacctgaagtaaatgaatggagtgatggtcgtgctaaaattcagtatggaaatagtatggatttctatcgttcatgggaggaaccaacagttattatttcagatggcgcatacgggatattaggatttgaaggtgatactgctgatcattcttccattgctgattggtatgaacctcatattgaagagtggagtaagagagccacagcacaaacaacattatggttttggaattctgaaataggttgggcgtcagtgcatcctatattagagaaacatggttggcgatatgtaaatgcaaacatatggaataaaggaaaaggtcatattgcaggtaatgtaaatacggctaaaataaggcgcttccctgtggttacggaagtttgtgttcaatacgtatttgaaccaaaaatcgatgatctaactttacagcgttggctttatcgcgagtggaaaaggaccaaactagccctaaagaaagcaaatgatgcatgcgatgttaaaaacgttgcgacgagaaaatatttggatcaggggcatttatggtacattccacctccagatatgtttgagaaattagccaattatgctaatgaacacggtgacgtgtcgggtaagccatatttttctcgtgatggtcttgttccaatgaccgctcaagattgggaaaaaatgagagccaaattctattgtccgatgggatttaccaatgtttgggaacgaaatacccttaaaggggcagaaagaattagcgttcctggacaggcggctaaagctgctcatttaaaccagaaaccattggaccttatgtctctgattatagaggcatcgagtgatgttggggatgttgtttgggagccctttggtggattattttcagcgtcaattgctgcgcatagtctaggaaggcgatcttttgcgggagagatagatccaacttattttcaagtaggaatgaatcgttttctctccctctaa

SEQ ID NO: 162460 - DNA, 1152 bp, Enterobacter cloacae
gtgggatttatcttatgtcaaaaatgccgtggcagaggaaaaggaacgttcgattgccaacattgcgcaggcacaggccgagatccggggaaatttaaatcctatggagaatgccatacttgtgacggtgttggcgagttttaccaaaaatgctcagattgttttggtattggagagatttattctcctgtcgagcaaaatgaagaatcacaatatttaaacggtctaaataaaatgaaaacatctgatattattgaaattgcgactgatcaattattaaatcttgaaagccgtgaatttgatgttatatctgtttcgaaaccaacttcccccgaagctgctgttaatcttgcaaagattatatcaaagctctctccaattgtaggtaatttaattgagtttcatacttgtgaatatctcaactctcaggatacatataaagaactgggccaatggatacgtcaagacccgggtttccccgatacgatttttgtaagcgaagaaataacacctacaccaggctttgaaataaaagcatggtttccattagcaacagagataacagccagatttaaagatagtcaaaaccatttcactgaagatcaaacttatgtagcaatgctggcatggctaccggaccatttaatttttggaaagccaaaagttattgatactgtaattgtttctgcaatgtctgttgcaaaagcaagagaccaacattaccatcgcccaccagattacattgttcttgaaccggaagataccacatcaagaacaggtaatttacagcaaacaaatactaatggttacaaattccaaggcaccgcagagcagttcattgaagcccagcagctagtagcatcatgggatgaaaatgccacacaatacagcccgtcacctgagtatcaggaattactaagaacactcatcgcaaaatatccataccgtttagatacaaatttcgcaaaaatggatagaatagttcacccacaaatagaaagttttaaaacacgcgtacataatacattattccatggaaaaaccattggcgcctggaacagacttctatcgagaggaaatgagtcagaaatacttatagcactttctgagacatttggaatatccgacgacggagaaaccgccgtcgaataa

SEQ ID NO: 162461 - DNA, 258 bp, Enterobacter cloacae
atgccgagaccaaaaacacagagtgagcgcgctcaaatcattagcaggatcaatgagttagggaaagagcgtggtcgtatcacaacgaaagaagtcgcttcaatgttcgatctgcatcgcaccaccgcagagaaatacatacgaatagtccttgcacggggcgaactgattcgatacggccgttgcggcatattccgtgatcaacgcacaataatcgatttcgacctgaaacgcttctcacaccagaaagtaaggtga

SEQ ID NO: 162462 - DNA, 909 bp, Enterobacter cloacae
atgaaaaatgatatcagaaccctcgaccttaaccttcttaaggcccttgatgcattactggatgagggaagcgtgactcgggctgcacagcgcctctccctgacgcagcctgccgtcagtggtatgcttattcgcttgcgtgattactttgacgatccactctttgttcgcaccagccacggtatggtccccacaatgcgggccaacgaactttctacgcctgtaaaacaaatcctcactgatatcgctatcctgctgaaaccaaataaatttaaccccatgacggtggaactgacttataccatcgtcgcaacggactatgcacttaaggctgttgtcgttccgttgatggctgagctaaaacaacgtgcaccgtatattaaaatcgccgtgcggcccgtggacaacgagcgaatgtatcagcagttgtctcggggtgaagttgatctggctttgataacaccgcaaacaacccccgaagacctgcatgggagagcgctctatgaagaagattatgtctgcgtagcacgacgtcatcatcctctggcagcgagttcagaaatgacgctcgagcaattttgcaaacaggaacatattctggtgtcttcagaaggtaacttcaccggtgctacagatgaagcactggataagctcagtctgaaacgacgagtaggcatgtcagttaatagttttcaggtaatacctgatatattacgagtgactgatatgattgcagttgtacctcaccgcatggtcctgactaacaacgaactcatcattctccctttgcccctgaaagtacccggctttaccaagagcatggcctggcatgagcgaacccatcgtgacccaagtcatcagtggattcgtgctttatgcgcagaagtaagccaacatccctcgccctga

SEQ ID NO: 162463 - DNA, 507 bp, Enterobacter cloacae
atgaacgcgattaactggccagaaggctttgttccgggttataccgataactttgtttctaatgaaatgatcatctcaggtctgaacgtcaatgatgtttggccgttcctgagtcagccattgctatggccggaatactataataattccgccgatgtgcgcttttatgacaacaaaggtccagaactagaaaatggggttcgcttctacttcagcacgtttggtttcccagttgaagctcaggttgtggagtttgttccaccagctgaaggtaaacctgctcgtctggcatggcacgggtgggccggtgaaaaagataccgctcaacgactcgatgtccatcatgcgtggctactggaggatctttccggtcacagggtccgtatcctaacgcaggaaacacagaacggagttccggcaaaagatctggcaaatatacgcccgaacccaatgcttaatggtcatcaggaatggcttgacggcctgattcgagcatcaaagaaataa

SEQ ID NO: 162464 - DNA, 672 bp, Enterobacter cloacae
atgttactaaccgcacctgaattgacggcaattattgcagtcgctggcatcgcagttcagttctggattgcttatttagctcggcgacagattgcgaggcaactcgatctccagcacttgatttcacatcgcaccacagcttctttcgttgcggacaaacggcagaagtggattgatgaactgcgaacagacatggccttccatctggccttatcgcaggagatcatctggaagtgggattccatgcgccaacgtgcgcatctacgcattaaggaagacgccagtaatattgatgggacggttgaccaagtcaaggccggtaagattttacaggaaattgccgataagttctcaccggagaatggagcgcgtgaccgcgagcatcaggaacgacacacccgaattatgttccggctaaatccaaatgaggagttgcacatcaagcttcggcaatgccttgagtgcatccgggtcggacttagcaaaactcaaggtgcgaaaacacgagccgaagctgatgagcaacttaacgaaacgattcgactgattgctaaagcacaagaacacacgcaagatatcttaagagccgagtggcagcgagtaaaacaggaagttgcttaccctgaagcgctgatttctacaattcccaagcctgtctcgagcaaagagtga

SEQ ID NO: 162465 - DNA, 390 bp, Enterobacter cloacae
gtggagactgccaactccagggaaacatccataaaaagagcaagtgaaactgagactctggtagccctccctgtgagggcatttttttacaatgcggtgcttcgcttgttaaatatcgagtcttttctaaaatttaatggtgctttgctatgtcaggtaaagccgtcgttcaggaatacccgtgtgttcaaggacgagccatccctagttttttctttccagctctatctgcctaatgcccgcgaagttgttgttacccttctcaataacggccaacagaggcttaatccagagaacggcctggcaatatgtcattgcgctggtggcagcggcacgatcatcggcttcgtcaactgtgtcggtatcggcgtgcattgcgctggaacgtaa

SEQ ID NO: 162466 - DNA, 1131 bp, Enterobacter cloacae
atgatcgagtcagcaattaaaaccgccgtcgagcggattacgcctgctgcttccccggcgctgagcggccagaaatacggcattctggtatctgacaatatctcggtcgacggtctggcgcaggccatgtcacagctcattaaagactatgacgagaatatcggtgcgtgggagacgttcgccaccacatcggcaaatcagagcatcaccgtaaccatcaacggcacgccagtaaccatccccggcatcggtaaactagcccagaaagggagcaacggtgcgcttgcaatcgctgacggcgggaccggggcaaccactgcagaaggcagtcgcacaaacctcggtttaggaagtagtgcgacaaaggacgtcggaacggctgccgggaacatcatgcaagtgggcgcatttgggcttggaactatcaacggagacggcccactgttggacgctatggacgcatttacaccgacctgtttctcctcccatcaaaatgacggacagacccagctcgggttaactgcaaataccggtattacgtctatagtcgtcaatcggggcagccgaccaacccgtattcatcaggcctacattctaaggcggacgtggttttcgtattacggtggctcgtcctggtcatatcaggaggcgtacaccacgggcaataccacgaggtccagcgatggaacactgaaagcagcatcgcccgtggtgaaagtattttcggatggtgcataccaaaccaatgatgaatccgaaggcataaaggtcatccgtctggacgtcgggcagtatcttatcgaagggtgtgaagggttgaactctgacgcagcctggggcggaatcgatggcggttttgacattcctgcagaccgtaacaagcagcctcttatctggctggattatgaggttaacgctgacggctcggtgctggtgaaaacctttcaccgcacgtatcctgacgcgccagcgttcgccaggaacgaactgctgggtatcaacaatggcgatccggtcgatatcccccatgaccagtttttgtccgtccgtgtcgagatgcctgccgattctttgtacaaccaaaaactcagggccacagaactggcaatgactacggatgaaggtgaataa

SEQ ID NO: 162467 - DNA, 438 bp, Enterobacter cloacae
atgcgcctaagacctgataataatgataatggtggggcaaatggctatagcttcacattcggagctgatggcagatttacctgcgttagtgtaaatcagacttcagatgaacgagttaaatttgacaaagagcccgtcagcaatgctctgaagaagatatgctcactgacgggctacacgttcggcattcatctcacagaatcggagtctatacgcagcgcaggtatcatagcccaggaactggagcgtgttcttcctgttgcggtaagttcaggcggcaccggcacaatgcagaatggagaggagattaacgatctcaaaaccgtagattacagtgccatgagcgccctgtatgttgaggccatgaaggagctggccaaccggataaaaagcattgagagtgagcttaccgaactcaagacccgatccgcgttatag

SEQ ID NO: 162468 - DNA, 348 bp, Enterobacter cloacae
atgcgctattccattccgctgtttgtctacggacagggtatcccgacccttaaagagggggcgcatcatgccctggccgagacccgaaatctgagctggcgcgtgacccacgagggaggacagcctgcattacaggtacgtaatcagggggatgtgcatgtcagattaagccaggtgtcactggagcagggcggacagaaacgcaccgtagcggagggattactgggttacgtcctcccgggcagcacccgcagctggccaatacccgctggcgttcgtcagccggaccggatgagcgcgcagattaatgccagggatgaacaatggcagtcgacgcccgtcaactga

SEQ ID NO: 162469 - DNA, 174 bp, Enterobacter cloacae
atggagttcattttaaaatctataaagttgtttgtaaggttaatggctatctattgctcttacatgctcttaagtggtacctctagggaggatgtggttcttatgtctcttgagggcttggtgatctttatatgggcggaaatggaatataagcaatggaaagaaaaccgttga

SEQ ID NO: 162470 - DNA, 948 bp, Enterobacter cloacae
atgaaaatttaccgcccactttgggaggatggggccgctctggccccgcaacaattccagcagcaagctcgctgggatgaaaacgttgcctacatggtcgctgggatggttatttctcatccctggggggtgattgctgcagagtttgatgatgccgcgcttgcgcttgcgcgtctgaatgctatccgtctggtggtgcgtttccaggacggcacgattgttgatacggatctggcggataatcttcccccggtctgtgatttatcagccgcaaatggctctgagacagttgaggtggtagccgcattgccgctgctgagcgccagtggtggtaaccttgataacggacaggacagtgaacgcccgcgtcgctggaaagcagagcgtgtggtagtccaggaactggccgggtatgaaaggggggaactggctattctacgtaatgccatcactctgcgtttgtccactcaagaaaataccgcatacctgacctgcccgctcgcccgtctggtgcgtaatgctcagggacaatggagccgggacccggctttcatcccaccgatgctttccgtttctgcaagcccgttgctgatcaccgaactgggtgatctgctggtgcgcctgcaggcacgacgtaagcgtctgatggccatgcgccgtgagagtaacgagcgaatggcggactttgcagtcgcggatgtctccctgttctggctgctcaatgcgctaaacagtgcagaaccggtgttaacagaactgctacagactccgggtcgtcacccggaactgctgtaccgcgacaggaggttcgtgacggggaaggtctctatcgtcgggcctgccgtctggtgcaggaggcaaaagcggcgctcacggaggcaggttacagcgacatcagctgtgaccatatggtgtatgccctgtgtgctctgcttgatgagagcgtga

SEQ ID NO: 162471 - DNA, 1509 bp, Enterobacter cloacae
atgattaattcagaaaaaaacatggacaataaaatcaggccattagtgtttgtttttggcttgattttattcttttattacaatttgttatcatcgaactattattatattgatgacattggacgttctcttgaagggtattccggctggtcccgcaacggcaggcctctggctgacttgtttttttatgcattaagctttggtgcgccattgccagacatatcacctttgccacagatactaggcatagcatttttatcagtgggcgtatacctgacagctaagaaatatatatgcagaactgaagacaacttcctgagctatttactttgcattcctttagttcttagcccgttttattttgaaaatatgtcatacaaatatgatgcatttccaatgtcgctgtccatttttttttcgatgttaccttttataattagaataaatggaccattaatacaattaacagtttgcgttatatccattctaacttcactatgtttataccaagcatctataaatgtttatgtaatttatactatgctttacgtattgaataaatttaaagaagggaaagactttgatggctttaaggcgattggcttgtcaattactggattattattaggttattttatatactcctggttaatttcacctagatttgttgaaggggattacaatttaaagcacagtcagataagctcgtttgagttggattctttgagcaatgcagtttttggtaactttaaaatattctactatgtgctcagcacctctatgagcacaacattgttaaccctgatacttattattgcctgcatggctctaattggcgctgttagactatgttgtgaaaagtcagagtctacaggcattataagaatattacgtaatgcaattatcatactttcacctttcatagtcttgctgatgattgctgggcctatgctgcttctcaaatcagcagtagtttctgcgagagtttttgttgcattcggagcagtgcttgtattttacaatattcttgcatgctggatgtttgggttacgttcaaagataatgtggttcctatccatcatgtatttgatttatatggccggcgctgcgtttagttatggaaatgcgttggataatcaagaaaaatacgataatgaagttattgctactataataagcgatttaaatagcaataatcttgcaaacgccaaatatatatcctttgtaggaatgcttccaatttcgccagaagggcgcttagcaataaaaaaatacccattccttgctcacctgattcacccaacgataaacgggagatggtcttgggggctaaggcacattaaacacttcgacatgaagcacgacttcaattcaggtgaatactacgctaatttgaagaacaacctctgcgactacgctcccgtaacaaatgggattgtgttcaattcatattatgataagagtagtgacagtgttatttatgacttcacaaaaaaactatgcatataa

SEQ ID NO: 162472 - DNA, 1014 bp, Enterobacter cloacae
atgaaaaccactatagatgctcgttgcctggctcctagcgcaatcaacattatttcgatatccggaggtaaagactctctggctcagtctttgctggctatagaatcatgggttgaacatctcaacgtttttgcagataccggacatgagcacccgcagacaatggaatatctggaatatcttgagcaaaaactggggccagtaaaacgtgttaaagctgactttacccgccagattgaagggaagcgcaagttcattgcaacacgctggccagtaactctggttgaagaatgcggtatgtcgcctgatgaagctgcagaacgtgttgcccaggctttagaaattctgcacccaaccggaattccatttttagacctttgcatgttgaaaggccgcttcccaagtacaaaggcgcgcttttgctctactgagctgaagcaccaccccgttcgtgactgggtggttctgcctgcacttgaagagttcgaagaggtgattttgtggcagggtgtacgcgcacaggagtcaccggcgcgcgcaaacctgccggagtgggaagaagatgcagacgacacacccggtcttcatgtttaccgtccgattctcaaatggcagcacgaagacgtgtttgcaatcgctaaacggcacggaatcaaacccaatccgctctatctgcagggctgtagccgcgttggctgcatgccatgtattcatgcccgcaaatctgaactggcggagattttcagtcgctggccggaagagataaagcgtgttgcggagtgggaacggctggtagctgcatgttctcgccgtggcaattcgacatttttcccgacgacgcatgacccgcgccgcgctgaaaagcgcattgagctcattaccgttgacgcgtatggaattgagagttaccgggactgggcgatgacaactcatggcggagcacaatttgacttactggcggaatcaaatgacaaaacagtttgcagcagtgtctatgcgggggtgtgcgaatga

SEQ ID NO: 162473 - DNA, 552 bp, Enterobacter cloacae
atgattcatactgttcattttttatgcccagtcaatccaagcacagtaagcttgcttcaaaacaacattttgtcagcaatagctcaaggggcaacccgaatcaacctacacatttcgagctctggcggcgacgtaacatccggctttaccgcttacaatttcatcaaaacacttccaattccagtttattgcttcaacattagcaatatagattcaattgctaatgcgattttcctcgctggtataaagcgctttgctaatcatggatcaagatttttgttgcatccctttcagtggaacttcggcggaatgcaaagtgtcgatcacgaacgaatgcgcgaatgggtatctagtttagatcacgaccttgaccgcctcgtttctatctttaacgaggaaactgtttccgctggacaattcactgactggcgtgagctgatcagaacttcttccattcttaatcctgagagagctgcaactctcggccttattgaaggtattcaggaggctagcatcgttgaacccaatgctacctggtggattaattgttga

SEQ ID NO: 162474 - DNA, 336 bp, Enterobacter cloacae
atgaaaaagttatttgtcaccttgggtattcttgggcttttagggtgtacgagtatgaaagatatgagggaaagcaaaccgatactggttgcctctagtgataaaaacccttctgaattatccgaatgcattttacaaaaatggcaactacaaactgtgtttaatgtttttatgcagccacgaggaaatggatttactgtgtatttagaagggcaatgggaagttgcagacatagatgctataggtaagaactcaaaggtttctttgtataagaagggttcaatgttcgacgggccatacaagaaatatgctgattgggttaacgaatgtctttga

SEQ ID NO: 162475 - DNA, 603 bp, Enterobacter cloacae
atgcaagaaataatgacggaaatcgaacttggtggcgtgttaggaaagttattcgggagggttcataagcgagttatttctactccccaagaagcaggtaaggcattggctgctacggtaaaaggttttgagcagtatatgataagcagtaaagctcgtggattaacatacgcagtatttaaaggtaaaaaaaatttaggcgtagatgaattaggttatcctgtcgcaggcgagattattagaattgtccctgtaataatcggaagtaaaaaagctgggttattacaaacaatattaggtgttgtgattgtggccgcagctgtttttgcaggaccagcgggaatggctgtgttgtcaggggcgcaggcttttagcgttggagctatcggtgcttcaatggctcttggtggtgtaattcaaatgctatcccctcagccaaccgggctcgccagcaagcaatcagcggacaataaagccagctatgcctttggcggtgtgactaataccgcagcccagggttatccggtaccgttgctttacgggcgcaggctaattggcggggcaatcatctccgcagggatttacgtcgaagaccagcagtaa

SEQ ID NO: 162476 - DNA, 327 bp, Enterobacter cloacae
atgcagtctgttggaacatcagatattaattttaaacacgtcaacggcgatctcgatgttgctgattctcttgaaaacatctgtcaaatggagtttaagcgattctactatcttgatgatgatgagcagacagagcgccggggcgtaattgctcagcagatcgaacaaatcgacaagcaatatgttcactctgctgagggcgtagggaaaatgacgcttgaccttaacccactgatgatggatgcccttgcagccataaaggcacttaacgcaaaggtagcagaacttagtaaacaggttgatgaactaaaacagggtggagcttga

SEQ ID NO: 162477 - DNA, 1323 bp, Enterobacter cloacae
atgcaagcaacagccacaacactcgactctggcgcggaaaacgtcccgttcaactcgcgcaataaagttgtcgtcgcatcgctgattggcaccgccattgagttcttcgacttttacatttacgccaccgctgcggtcatcgtcttcccgcatattttcttcccgcagggagacccgacggcggcgacgctgcagtctctggcaacctttgctatcgcgtttgttgcacgtccgattggctctgcgctgtttggacactttggcgaccgtattggtcgtaaggtcaccctggtggcctcgctgctgacgatggggatctccaccgtggcgatcggcctgctgccgacctacgaaaccattggcattctggcgccggtcctgctggcgctggcgcgttttggtcagggtctggggttgggcggtgaatggggtggcgcggcgctgctggcgaccgaaaatgccccgccgcgtaaacgcgcgctgtacggttcattcccgcagcttggcgcgccgattggcttcttctttgccaacgggaccttcctgctgctttcctggctgctgacggatgaacagttcatgaactggggctggcgtattccgtttgtcttctctgccgtgctggtgctgattggcctgtatgtccgcgtgtccctgcatgagacgccagtgttcgcgaaagtggccgcggcgaaaaaacaggtgaaagtcccgctgggcacgctgctgaccaaacacgtccgcgtcaccgtgctgggcacgttcatcatgttggcaacctatacgctgttctacatcatgacggtttactccatgacctacagtactgccgccgcgccggttgggctgggtctgccgcgtaacgaagtactgtggatgttgatgatggcggtcatcgggtttggtgtgatggtgccgattgccggcctgctggcggataaattcggtcgtcgtgcgagcatgattacgatcaccacgctgatcattctgtttgccctgttcgtcttcccgccgctgctgggttcgggtagcccggcactggtgatggcctacctgctgattggccttagcctgatggggctcaccttcggcccaatgggcgcgctgctgccagagctgttcccgacggaagtgcgttataccggtgcgtcgttctcctacaacgtctcttccattctgggggcgtccgttgcgccatacatcgccacctggctgcaggcaaattatggtctgttctacgtgggcgtttacctggcggccatggcggcgctgacgctgattgcgctgctgctgacgcatgagactaagcatcaggcactgtaa

SEQ ID NO: 162478 - DNA, 840 bp, Enterobacter cloacae
  misc_feature (23)..(32): n is a, c, g, or t
atggtgctctggctcgccagatnnnnnnnnnntcgccagattgcacaaagaattaaatcatcatttttgggtatccttgttattgatgaaatgcagaggcttaaattttcaagaaccgggggtgagagtaagttgattgattttttacatgaaattgtagattccatgggggtatctatggttttttgtggaaatcatccttttgacgagacgctgacaaagaaaatgagaattgccaggcgggcagagtctggtggttacatgaaaattaagaatgttagatacgattcacaagactggcaatcgtttattcattatttatggccattacaatggacaaatgttgaaactccattaaatgatgagttaaacgaaaaattattcattttatctaaaggcaatattggattggctcagatgatttatcggggggcacaattaaaggttatcggtagcggcaatgaaatcatcactggcgcagtcttgtcggcctctgtaccggtactcgtgagtcatacggaggaatataaggatactccactcccgggggccgcgactgaagatgaggaagctaaatggctctctgcatctaatgagggtgatgcttcggctaaaatcatggcagagaagtccctaaagtctttgatccctggggatatagacaggccacagcacaaggaattcgtaggaaaaatagacgaggttttgcgcaatttcgacgagaaaatactgtctcttgaccacgatcttgttatcaacagaacagctgaaaagaaaaatacctacgatgctcttcagcgttgcgggcttataaatatagatccacttaataaattgtaa

SEQ ID NO: 162479 - DNA, 2562 bp, Enterobacter cloacae
atgagtaaactggacaatttcgacaaccacacaccaatgatgcagcagtatctgaagctgaaagcacagcatccggaaatcctgctgttttaccgtatgggcgatttttacgagctgttttatgacgatgccaaacgtgcatcgcagttgctcgacatttcgctgaccaaacgtggcgcatcggcaggtgagcccatcccgatggcaggcatcccgcaccatgcggtagagaactacctggccaaactggtcaatcagggagaatccgtcgccatttgcgaacagattggcgatccggcgacgtcgaaggggccggttgaacgcaaagtcgtgcgcatcgtcacgccaggtaccatcagtgatgaagccctgcttcaggagcgccaggataacctgctggcggcgctgtggcaggacggcaaagggtttggttatgccacactggacatcagctccgggcgttttcgtctgagtgaacccgctgaccgtgaaacgatggctgccgaattgcagcgcaccaacccggccgagctgctctatgccgaagatttcgccgagatggcgctgattgaaggtcgccgaggtttacgccgtcgcccgctgtgggaattcgaaatagataccgcgcgccagcagctgaatctgcagtttggcacccgcgacttgatcggttttggcgttgaaaatgcgccgcgcgggttgtgtgcagcaggttgcctgctgcaatacgtgaaagacacccaacgcaccgccctgccgcatatccgttctatcaccatggagcgccagcaggacagcatcatcatggatgccgccacgcgccgcaacctggagatcacgcagaacctggcgggtggcatagaaaataccctcgcgtcggtcctcgacagcacggtgacgccgatggggagccgtatgctgaaacgctggctgcatatgcccattcgcgatacgaatacgcttgtctgccgtcaacagacgattgccgcattgcaggatcgttacaccgagctgcagcccgttctgcgtcaggtgggcgatctcgagcgtatccttgcccgtctggcattgcgcaccgcgcgcccacgcgatctcgcacgtatgcgtcatgctttccagcagttaccggaactgcgtgctcagttgagcgacgttgacagcgctccggttcagaaactccgtgaaacgatgggcgagtttaccgagcttcgcgaactgctggaacgcgccattatcgatgcgcctccggttctggtgcgtgacggcggcgtcattgcccctggctacaacgaggagctggacgaatggcgtgcgctggccgacggtgcaacggattatcttgataaactggaaatccgcgagcgcgagcgtcttgggctcgacaccctgaaagtggggtataacgcggtacacggttactatattcagatcagccgcgggcagagccatctggcaccaattcactacgtccgtcgtcagacgttgaaaaacgccgagcgctacattattcccgagctgaaagagtacgaagacaaagtgctcacctcgaaaggtaaagcactggcgctggaaaaacagctgtatgaagagctgtttgacatgctgatgccacacctggccgatctgcagcttagcgccagcgcgctggcggaactggatgtgctggtgaacctggctgaacgcgcggaaacgctgaactatacctgtccgacctttaccgacaagcccggtatccgcatcactgaaggccgtcacccggtggtcgagcaggtactgaatgagccgttcatcgccaacccgctgaacctctcgccgcagcgaagaatgctgatcattaccgggccaaacatgggcggtaaaagtacctatatgcgccagaccgctttgattgcgctgctcgcctatatcggcagctacgtcccggcgcaacacgttgagattggccctatcgaccgtatctttacccgcgtcggggcggcagacgatctggcgagcggtcgctcaacctttatggtggagatgaccgaaacggctaacattctgcacaacgcgacggaacacagtctggtgctgatggacgaagtcggacgcggaacatcaacctacgatggcctgtcgttggcatgggcctgcgctgaaagcctcgcgaacaaaatcaaagccatgacgctgttcgccacccattacttcgagctgacgcagctaccggagaagatggaaggggtggctaacgtccaccttgatgcgctggaacacggcgataccatcgccttcatgcacacggtgcaggacggtgcggcgagcaagagctatggcctggccgtcgcggcgctggctggcgtaccgaaagaggtaattaagcgcgcgcgtcagaaactgcgtgagctggaaagcctgtcaccgaatgcggcggcgacgcagattgatggcacacagatgtcgctgctggtgcctgcggaagagacgtcacctgcggtggaagcactggagaatctcgacccggattcactgacgccgcgtcaggcgctggagtggatttatcggttgaagagtctggtttag

SEQ ID NO: 162480 - DNA, 426 bp, Enterobacter cloacae
atggaaataggatcagtaagtgattgggttagtgcggctgccaatattatcatggctggttgtgctgcttatgctgcgaaaaacgctaaggaatggattacccaaagacattatgatgaaactcgtgtttttatgaaaataatgacagatgttgatactaatttatgtagatacatttcttcctctgatggaggcaatcttgagtttgctttatcccttcgctattttttcccagcagatgaacaaatcaatataattgggctaaccctatctgagaataaaaaaacagaacttctaaatgagtatattaagttccgtgaaaacaaaattaaaagctggatagaggcaagagattacgcccacaatcccgatcatgtttataaaacacagccagatttttataactatctaaaaaatataaaataa

SEQ ID NO: 162481 - DNA, 507 bp, Enterobacter cloacae
atggggggggatttggatactcaaaataaagtaactattgcaagtgagtcttattgctataatttcaaagctagagccaagcgtgccgtcaagaaatttgaattttggagagaattatttctctacttttttatcggcagcatgggcctttgggtcccttatgctcttgaattatctgataatgctcttctttttgacccaataaacgcattgactttcggaatagcaaccttatgcgtcattttagaggctaggatttttatgtctgactctgatgatagaaaaatgccagaaattactaagctaattgtcttaggccttacaatagtattggtcttgacgtatattaagggagtgaaaagtcatggtggaaacatatttttattcctaaattgggtgaatatctccttaggggctacgataattttatggttcattcatcatgtcaattcgtcgagatatgattctgaaagtacaaatgggatgttagggggtgactttgagtaa

SEQ ID NO: 162482 - DNA, 180 bp, Enterobacter cloacae
atgtttttaggtgcttttattgttttggcgggaatcctttctcttttagagagccttggcattgttgctgccgaggttaagtggggaatgccgttagcagttatttgctttggcttgcatttggtttatgaagccattagagccaggaaagaaagaatgggtgagaaaggatcttcttga

SEQ ID NO: 162483 - DNA, 198 bp, Enterobacter cloacae
atgaaaaaacgggttccccgcggcctttgccctgccttttctctctcactacatctcctgttaatacttgagtcagtgtccgcagcgcccgccgcagtctcacgtccggagcatcgcgaccgagtgagcgaggaggcgcaatatcacactcttgtcatcattccgcttacgcatcgccgccgcatttccccctgctaa

SEQ ID NO: 162484 - DNA, 345 bp, Enterobacter cloacae
ttgagtacaaaacgcgacaagatgctgaccatgtgggtcacgcaggatgagcatcagcagctgcttgaacgctgtgacggcaaacagctggcggcgtggatgcggcaaacctgtctcgatacccgaccggcgcggtcatcacggctgccgtccatcgatccggttttactgcgtcagctcgccggcatgggcaataaccttaaccagatcgcccggaaaattaacggcggtcagtggtcaggtgctgatcgggtccaggtggtggctgcgctgatggccatcgataccggccttgaacggctgcggcatacggtgcgggagaacggagctgacgatgatcgttaa

SEQ ID NO: 162485 - DNA, 273 bp, Enterobacter cloacae
ttggctactgacgctcaggtaaaagaaattaatgcactcatcaaaaaatacccggactcatgctccatctgtcatgaagtctatgatgaggatgatgtgacctacaccgtttttgggtatgaccggaaaggtaaaatacaggtcaccacgggatgctgtgccggaatgctgacagagccggttctgctgggtgtctgtgggtgctttgacccggaagaacgtgacgagatcatgcagaatcaccccatggcaaagcagtttttcacagagtga

SEQ ID NO: 162486 - DNA, 699 bp, Enterobacter cloacae
ttggattcctatccaattaactgcatcgagttagcaaaaagcctgggtgtggacgtctcagaggcagacttagacctcaagaaatttattggctgtttgtacatcacagacgatgtaacagcgattttgtataacaaaaacataaaagaagaaggcaggaaaaactttactatcgcccatgaacttggccattacttcctccaccaacaagatccatctcaccaagttgcatttagaacactatccgacatacagaaccagccacactcgaagcaaatagaaagagaagcagaccaatttgcagcatatctactaatgccagagtctgatttcctcaataaaatacaagccaaatcgcatgatatagagttggtattggagctggcaaaacactatgggactagcgctacagccacatgctgtcacttaatagatctctcagaacaacctttggcggctgtatctctcaacgcagacaatacaacaaggtggtataagaggaatcatcatttcaaagactttcgtttggaaaaaggaacaaaaatagacatctcatcgcattcaccacagcagcaagaaccagcgcgttctgacatatggtttcccatacaatcatcacaatggagcttaatgtcatcgtcactggatatggaagaatacagccaaagactgtatttaatatcaggcaatagagcttaa

SEQ ID NO: 162487 - DNA, 300 bp, Enterobacter cloacae
atgcttagcgaaaagatcagagagctgaggacatctcgcgggctgtccttggagcaattagcggcacaagtaggctcaacaaaaagctatatttgggaactggagaaaaagccagatataaaaccgtcagcagatcttgtatccaagatcgcccaagcattagatgttacaatcgattcactaatggatgctcgaaaaacaaacgatagagatactgtattctttagagaatacaaagagctagatgatgaaacaaaagaacagctgatgagcatacttaaagcaataaaaccaaggtaa

SEQ ID NO: 162488 - DNA, 510 bp, Enterobacter cloacae
atgacgcgaggtgagcgtgtaatagcgttcattgagcgcttttgcatcgtgccggaaggtaagcttatcgggcagccaatgctgttggaccccttccagaaagaattcatcctggatctttacgacaatccagccggaacggatatggcgatcctcagcatcgcccgaaaaaacggtaagacgggtttaattgccggaattctgctggctcatctggtggggccagaagcggtacagaacacgcagattgtcagcggagcacttagccgggaacaggccgcaattgttttcaacctcgcggtgaaaatggttaacctgaaccccaagctgaaggagattgttcacattacgcctagcggcaaaaagctgatcggcctgccgtgtaatgtcgaatacaaggctttatctgctgagggtaaaaccacgcacggcctttcaccgattctggcgattctggacgaaacagggcaggtaccggacctgcctggaatagcttcactcaggcactga

SEQ ID NO: 162489 - DNA, 1191 bp, Enterobacter cloacae
gtgcatgtcaaaaatactttttacacaacaaccataaccgtcatcattgtctcgttgatcatttcattgtcgcttgccgtgcagattgcaacgtcccgacagcagtcaatccagcagatcaataccagcgttgccaacctgagccataccctgaatgtctatacagaaggcatcatacgccaaagtgaaatgttgattaccaccgtttccgacacccttgaaatttatggcatgaccccgcaacaggcgatcaatattcagcgaatgataagcaatcaggataaccttcttacccagattaataatgtggttgtctatgatgcgcagggggatatcttcaccgccttgcacgaaactttagcaggtccccgtaaaggcgcggaccggtcattctttgtctatcacaaggaaaataaaagccagcagatatttattggcgagccagtgataagcagaaccaatggtaaatgggttattaccataagccgacgccttgagactcacacgggggcatttaacggcgtcgtggtggtgacgctgggtatcgaaaactttctgaccctttatggacagatcaatatcggacacgcgggcgttattggcttaacgacacaaacaggcgttttactgattcgctacccctttaagaatacctatatcggtacgattttttcagattctcctctcttcaggaaatacctaaaagtacaaaatacagggatagccagctccgtttcccggtttgataaaatcgaacgcatttatgcctatgagaaaaacagccgctacggactggtcacgacggtggcggtcagcgcggatgaagccctttccccctggcgcaagcaggcgattcagcttgccttacttattttcgtttttaccgcgatactcatcgtggcgtcttatttcctgtattccgacttatccagaaaaacacgggataacaaagcgctacagattattgcctcggaggatgccctgaccgggctttataaccgacgtattttcgatgaaaaaattctctccgacatcgcgatgtgcgcggcagaggacgcgccgatttcgctcctcctcgtggatgtggactacttcaaaaagtacaacgataactatggtcacccggaaggggacaggtgtctggcattactgggaaactgcctcagggaaagcctcactcgcgacaactag

SEQ ID NO: 162490 - DNA, 1242 bp, Enterobacter cloacae
atgtggaatatctggccgtttggccgtaagtctgaaccctccgaacagcgcagtatgaccattgatgagtggctggcgatggcagggattcctaataccggatcaggcgagcatgtgtctgcgggtactgcggaatctctgcctgcggtcatgaacgccgtatcagttatcagtgaggcggtggcaacaatgccctgctatctctaccgcgtccgtaatgataatggtcgtgaggcgcgagaatggctgagtaatcacccagtggattttctcctgaacgagcagccgaacgactgccagacgccttaccagtttaaacgcacgatgatgcgtcactgcctacttaatggtaacgcctatgcggtgatccagtggggccgtgacggccagccacaatccctgcatccgtatgcgccgggggcggttgttcctgagcgtatcggccagcataagtacaaatacactgttactgagccgtttagcggggctgtgcgcacctatctacaggaagagatcctgcacctgcgttactccaccgatgatggttttctggggcgttctccgatctccatctgccgtgaggcgctgggtttaggtctggcacagcagcgccacggtgccagcattatgaaagatggcatgatggcggcgggcgtagtcactactgctgaatggctcgatagtgtgaagggtaagcaggcgctggacgcgcttgagcgctacaaaggtgccagaaatgccggtaaaacgccgatccttgaaggtggcatggactataagcagcttggcatgagcaatcaggatgctgagtggttggcctcccggcgcttcaccatcgaagatattgcccgcatgtttaacgtttctcccatcttcttgcaggaatacagcaacagcacctacagcaattttagtgaggcgagccgcgcctttcttaccatgacaatgcgcccgtggctggcgaactttgagcagcagattaaatccgcgttgctggtggcatcgcccgtacccggaatccgttatcaggtggagttcgactctgccgatcttcttcgagccactccaaccgaacgctacgcaacttatgaacgcggtatcaagaacgggatcatgaacccgaacgaagcccgcgaacgcgaagggatgccgccgcgtgaaggtggcgacgaatacagccaggcatggaagcaggaagtgaaggtcagtaccgattctgagactaaggaggatgcgtcatga

SEQ ID NO: 162491 - DNA, 249 bp, Enterobacter cloacae
gtggaatgtgagaagcaggggctctatgtcccggcaaaggtggtggatcacattatccctatcaatggtggtgaggacgtcctgttctggcctgagtggaatcaccagggcctctgccagacccatcacaaccagaagaccactcagcaagaccccatcactaaacataaccgtaaagcgggtatgtaccgtgagcaggaagagcgtgcagccagccgcaatgactggatatatgaggagaacgtatag

SEQ ID NO: 162492 - DNA, 165 bp, Enterobacter cloacae
atggtgagcgcgatgaatgagaaagacgtggtgaatctgtaccaatccctgactcgtagccgtgatggcttcatgcaaggccgcgccaagcgcaacgagcgcaagccagtgcctcgcatgagtcagcgtgaccgtgaggtgctggattgcttccgcaaccgctga

SEQ ID NO: 162493 - DNA, 2268 bp, Enterobacter cloacae
atgaccacgcaacctactcaagacgcggtaccgagcgaatcaccacgtgatctgaagttcaacgcaggcaaaattgacgagttcgtgacgtccatgggctggacctataccgatcgctttggtgtgaagcattacaccatcgagggcatcaattacctcgcgcagcaggccatgaatgcctttggttacgtgatactgaccggtaagacgttcaccacgggcgcaacaatcaataacccgaatgaagtcctgctcaacaccgctgatggcgaatactacaagtggaccggatcgttcgcatcaggcccaaaagtggttcccgcgaactcaacaccggcgagtactggcggtattggcccgggggcatggatcggggttggcgattcttcgttgcgcgctgcgcttgctgcgctgtcaggggccgggctggttggttttagcgatgatgaaacctacccggatgggactgttggcgcaacacttaaagaggttaaagagtggtctatcgccaatgattcagcatcctaccgttcaaaaaatatcagtaagttatctgatgtacactataaagtcaggatgcgtcagacattcactgcattgttccagggtgattcaatgactgctggcatggatagaacatctactgacgtcattcctgcacaagatggtgactatctgactcgggcctctgttaactatccatataccttccaatcattcatgcgccaatcttccggtgtttcagtgaatgtagtaatgcgtgcagtgtctggattaactgcggagcaggcggtcaatcgtccagaatggcaggcaaacccaaattgcaatatcgctttccttatgtacggactgaatgatacatggacaggtgtgcctatcgatacatacatgagcagcatggaaacgttaattcgacgctttattgactggggcatgggagttgtagttttaactccagcatccggtgggcaggggttaactaacggactcgcccaaatttatggccagagaattaaaaatctcgcaaaagtgtatggctgtgcacattttgatgcacatgaatctcaatacaacaggatttatggggtcgttcagtcagatgatacccacttcaattcggcagggtactcccaattaggcgttcaactttcaagtatggtgatggcaggtggtttgctcgaagaatattcaccagtttcaagtgaacgacaaacatggccaggaaagcaagactcctctattggttattgcgacgcagcaggtaatatcaacataaattatgtcactaatggatatacacttcagtcaccagctggtcaaataagctccgggtcgtctggcttaatgacttattcattttatcttgatgctgaggctgctgaggtagaggtgatagggtcatggcaagactcaaaattattctatcgcatagataattatgctggaggggcagggcagccatattatgcgtaccaaggtaatgtgagtagtgatctttctttaagcatggttggtaccgtagcagtaaccatgaggatgctcgatggtggcctgtacgctgcacagagaaagaatcttggctcaataattggtaggggatggaagaccatttccatatataatgcaactaatggcacagcaaatactgatgcttttattcagttactgaccataaggccaattcctgtgcatttagcaaattcctctctatctgggataattagaggaacaaaggacactatgaccttaagggtgccaacttcaattggtgccacggcaaccccttcagcacagcaattaggaagtattgtctttccaatgccatatgacctttatccaaaatcacaaggaacaggaaattggtatgactgcgggatggcaaagcttacaataaagtgcaatggtggtacgcatggtaatgcctactttgaagctcttattagtaaggcttctggaggaatcaatttccttgtaactcctcttcctaattcattgggtacatggccaacgtttactgcaaccctagtggggaaagatagcaacattatttatgctagaaactcaataggaatgaatatgcctttacgtgatatagcccttgtagggaatgtaaggacatttacaggcggggtgtcagacaaaagagggatgtatttacaaatcaccgctacatggccaactggtacagagaaaacaggatattactcattaactgtagaatcagctgctggaggttcaggagcaactgcgatttccgctatgtag

SEQ ID NO: 162494 - DNA, 438 bp, Enterobacter cloacae
atgaaaacacccgataagacagagtcagagtttctgcaaacattagcccgtatacgcagcgcaaatggaaggagacatcatgacgacgcagaggatcctgacaagttaacgcaggtaaacaggcaacgcgtttcaccaggcttaacacgcgtcgatacacgcgatcgtcaggatctcttgcacgcagccattcgggacatattgttgggtaaaatcacgcaaggagaagcactgaggaaactcagggtcgaggtgttggggctaaaacaggatgaatatgcaaaattagtcagcgtatcccgaaaaacattgtcagatgtagaaaataacagaggcaactattccgctgacatcattaacaaaatctttaaacccttcgggcttcaaaccgggctggtgcccatttcaaaatcgctgatagcctcacttttctcataa

SEQ ID NO: 162495 - DNA, 1095 bp, Enterobacter cloacae
  misc_feature (1058)..(1067): n is a, c, g, or t
atgccaaagattcgtcatatagaggtagagaattttcgggtaataaaaaagctttcgtggtcaccatcccccggtctcaactgtttaattggtcctggtgactcagggaaatcgacgattcttgatgccattgaccttgctcttggtgcaaggagatcctacacatttaatgatgctgatttctatggtttagacgtaagtaaaccgatcactatttctataacgatcggaatgcttaatgatgaattactgaactttgaaagatatgggcattttttacgatcatttaatgctgaaacatgtgaaattcatgatgaaccacatctggactttgaacctgtattaacgttaaaacttgttgttgagagtgatttagaaccagattggcggctctattcattaagagcagatagtgacggagttgagcgtcgtcttccatggaaacatcgtgagatgatttctccatcaagattaggtgttactccttacaataatctcgcatggggtagtcgatcagtgcttaacaagctttcggaggagaagtttgatgtcacttctgtcttaacacaattatcacgacagactcgtaatgcgtttgctgctaatccagtagaaggcttggataaagttcttgaggacgtaaaattaataggtaacaaattgggcgtacctttaggagagcttaaggcgttattagacgttaatggaatcaccctgtctaatggtgctattagtctgcatggtaacgatggcacacctttgcggcagttaggtactggatcctcccggttacttattagcggtatacagaaagctacgagtcagtcaacaatgttacttgtggatgaggccgagtatgggctggaaccatacagaatatcaaggctccttaacgagttaggggcaaaagaagagaatccgttacaacaagtatttttaactactcattcaccatatgttttgcgagaattacagtcaaagcaattgcatgttataagaaaaaaacacctcatgcatcaggccgatggtatatctcataatattcttagtttaggtgnnnnnnnnnnggtggtgatgatcagcaggcgacgctga

SEQ ID NO: 162496 - DNA, 597 bp, Enterobacter cloacae
atgaacacacaacgcctcgcccgcgactggcgtctccctaccgcaggggcgatgctgctggctattctgtttgccagttttaccctgcatacacactggagcgcctttatccagtggtgtcttgccactcaaattaccctgcaccgttatctggtgatgtatctgctgcagctgaataaccaccagtacagcggcggactatggctcttaacaggcgccttcctttatggcgtgctgcacgccatcgggccggggcacgggaaattcattgtgacgacctatctgaccactaataaggaaagcgagcgggctgcccgggtcgttcctttccttggcagcctgatgcagggcgtgagcgccattctgtttgtctttattctggcggtggggtttaacctcgcctcaggggatattagtaccagccgctggtatgtagagaagataagcgcagtgctgattggtgtattcggcgcgttcgtcatttatcaggcattaaagagcctgcgtccgcgcagaatgacgatctcggccatcagtcccctccatcagcacaatgaacactgggctgcggccatcacggcgtgggtgccgacctga

SEQ ID NO: 162497 - DNA, 1119 bp, Enterobacter cloacae
atggctaaaagcttcgctgtttgggtagaagataagatagataataatgaaaaatcgtcagtaagtatagatgaattacatatcaatttttggtgcacaagaaaccctttaattaattgcattgatcttggcatcaaattttcatgtaatgagtatgaagttaatgatagttctttaaatatatttattcctttctctatccctaaggatagaattaaagatttaagtgttaatatggaagcggataaagatctagtgtcagctatttttaatgaccatatttctgttactcgcaatgtgaaaacaaaacacgtagtttacaacttagcttccaatcttgactctcctttggcattaaataccagtttagattttaatgatcttgatggtagatatgatgatcgggttagcgtggtcgtgaaccatgagttcactaaaatatcttttaaactttccaaatgcattatcgatcgtacgtctcttgcacagattggcgacaatgatggactaaaatattacatacgctttcgtttggatggcttaactgaggaagaaattaaggtactcattcataaaactgaaaattctgataaataccttaagccacttaaagacgaattagtggtaatagatttccgagttaatgagcttcgtgttcttccaaaagatgttagaattagtctggctaatgcctgtgcttgtccattgaagtatcatctttttgtcattcgtgatgaaacggatgaatatcaattatctcattcagggcaaagttataaaaaatgcagaatattagaaggggaaacttggcaaaaatatttcgaagaaaatactttcaagaaagaacaatcttcaatgatatatcattgggaaaaagattgtaataaatcgaatgcaactgcaaataatggcacaggaacttgttctaatactacgggtaatgatagaaaaaacaatggtcataaaataaccgactttattgctgtagctaagtttaagcaaactgagtccccatttttgactatatgcatatacatcacattgataattgctattagcattttaagtaatttaatttacgattttctgaagtggtatttcgaatggtttaaaagttga

SEQ ID NO: 162498 - DNA, 603 bp, Enterobacter cloacae
atgcatgtacttaaaagttatgataaaaaagcttttgaggatttaaagatagatgtcccttcttcaatagggaagataaatctattgatactggatagctattctgattttcaaaatagccacgtaaaaaaactctttgaaaatgccgataattattatccaaattttaataattggtataatcataaattaataaaagatgttgttaaagatagttcggtgtgctgtaattacttcaacaaccatctgtattcggatgaggtaggaggtttgtcagatcttaattttcctactgggcgatttgttattgcagcttcggtagatgaaaattttgcgggtttgtctgttttaaaaaaacacccctcagaatataaaatatctactttttttgttgatgataattatagtggatttggattagggacgttattattaaactgctctctttcggtactacgggataaaggtgtcaatattactgttagtgaaggagctttggataaaatggttccatttctgacaaaaaacggctttaaggaatataaatcaattgttggagaatattacaagaataaaaaagaaacccattttgttaagaagtag

SEQ ID NO: 162499 - DNA, 489 bp, Enterobacter cloacae
atggcatttgtaaacagaggctgcactgttcacggtaaaaatgttggactacatggagataaaacctctacaggtgcacaatgtattgccgcccgccctggtatgtcggttatgggcaagtggaaactttacattggcgataagaccacaccttgcccgaaatgcggaaaagttggcgttattgttacaggagatcaccgtcaaacaaacagcgaagctgtcgccgtagacggttcaatcatccactgtgattgcccgatggggtcgaactttctcattgcgcctggaaccgtggagatcaatgagccattcgccgcgtcagagccaccagtaaataaaactatcgcagcagcagcgctaagtacattacctgtttatgcaaaatcctgccttcgtggtgtaggttgcaccgatgcaggcacagagcaagagttactcgataattttggtcatgcaggctattaccgtgcagcgcctcaggcagagtaa

SEQ ID NO: 162500 - DNA, 384 bp, Enterobacter cloacae
atgttcactgtaaaaaccattatcaatggtgtaacccatatctgcgagttgcctacattcacagtagctcgacctgactcagaacgatttgacgacatcctcaagcttacaaatgaccactctaaccctgactttgctatctggctcccggatgtgtatgccgacccagagtgcaaacacgcactccaggaagaggagttgattgtcagtgagcgcgatggcgtattggaccatgatgccatcgctgtccttattgaagacttcgaaagccctgagcatgcaaagaagcgcgcctttgatggcatccgttaccagttcatctatccgggtgaccaggtttacgtgatgaactctcacggctcaaccatcgaaactgttaagtag

SEQ ID NO: 162501 - DNA, 744 bp, Enterobacter cloacae
atggcaaaaccggactggggagcactgcaagaccagttcctcgccgagcatgccaaaacaggtatttcccccaaagactggtgccaggctcagggactgaattactcgaccgcaaagcgctacatcaagattgcgaatggtagtgcgaattcgcaaaaaaaaattgcgaataaaactgcgaattcgcaggcaaaaaaaggcgataaggccagaggtagcaagccatctgatggtgattgcgaatcctccaatgctgcgaatcctccagatacgaaacccgaacgtgtgcgcaggaacgtagtcaccaaccaccctcctttccagcctggcaaccagaatgcccttaagcacggcggctacggtcgcaggatgctgctctctgatgcaatcaccgaagatgcgaagctgctcacgctcgacgatgagttgttctggctgcgcgcggcgaacctgacggcggcggagaacattgggcgctggcaggctgaactggaactggccgatgatgacaaagcgaaggatctgcactcactgatttcctctgctgaaaaggccatgcatcgcaacacgcagcgcatcgagtcgctggagtacaccaaaggatcgatagagaaacttcgtgtcgatgctgcttaccgcgaacgcgccactgagaaagtggaaatggaaatcgacatcatgaaggacggcgacagcgacaacgcgatcgtcgtacacaataccctgccgatacctggaagatga

SEQ ID NO: 162502 - DNA, 1143 bp, Enterobacter cloacae
atgagtgtttattactcactgtgtctaatagcagcatgtttaaccactgccctagtgctttttagccttcctgtatttcgattcattgatgaagatacgacaacagcgagatcaaacagccttgacggcatgcggttctttcttgcgtcatttgttattttccatcatctggattgcgctcacacttacataaccactggaaaatggacgccaacctctgaatggttaatctatatggggaaatacggagtagcactattctttatgacaacggccttccttttttggggtaaagtaaggagcgtacaaactgtagactgggttgagctctacaaaaaacgcttcttcagaatcgtaccacttgcattattctgctcattaatagcattaataatgctgttttctttaactgaaagcaaagagcttacgatagatacagtttctaatgttcttgcatggtttgatggcggactttggaacagcaggccacctgtaacttccttcgataaatcatggatggcgctggctggggttacctggactttgagatgggagtggatattttattttgcattgccactattttttatgtttaacaggtggtccattgagttagctatagttctatttgctttctcggtgtatttcctccctgatattactcgcgatgcgtatctttggtcgtactttttcgctgggatgctttgtagggaattgaaagatagaataagtcttacaaaggttcaggctaacactttgttggttgtcactatagcattagcattccttgctcagccagacatattcagatcaccagagaagttctttttagcaatcatatttttcacgatagtttcaggcgcggatctctttggtttcttaaccactacagcagcaaaaagacttggggcaataagttacagcctatacttaacgcaaggcttagtgttattccctatgtctttatactttagaaatgaacaaagcttctcgttagatatgaaaggaatggcaattttgttttgtgcgtatatcatgatatgtctgatctctgcctttacgttccatttcattgagagaaaattcatgcatggtgttaaactaaaatatagaaaccaccttagcaacccttcaactaaataa

SEQ ID NO: 162503 - DNA, 387 bp, Enterobacter cloacae
atgggattcccgtcaccggcagcagactttgcagagcgccgcatatctctcgacgagaggttcatagcacaccctcacgcaacgtactacatgcgagcgggtaacacgtactaccgtgagggcatcattaaaggtgcgctactggttatagactgctcgctgaatgtgtgcgatggctcgttgctgatttgctgcatggaaggtgagttcagagtgaagcgctaccggtctagcccaaggccgcacctggtcaacctggagaacgggaagcgcgaggagataccagaggataccggagaggatacgtcgcagcctatattcggagtgataacgtatatcatcaacgacgcgcgttcgggtgagtttgatgattgtccggtgatgtaa

SEQ ID NO: 162504 - DNA, 1014 bp, Enterobacter cloacae
gtgagtgaattagcaatcatcgaaatcgcgccggagctggcgccaagcatttacgttgaaaacggtctggataagttccttgaacagatccgtgaaggcatcaacgaagttcctgacctgagcacagccaaaggccgcgcccgtatcgcatccctcgccgcccaggtatcacgcagcaagacggcagttgaaaagccaggccgtgattacctgaagcgcctgaaggagcaaccaaaagtggttgaagcagaactgcgccgctttgtgaccgaatgcgatcagcttcgcgatgaagtacgccgcccacttactgaatgggaagacgcggaaaaggcacgcactgaagctctgcagcagcgccttgtggatttgcgcgcactggctgaagtgatcgacaccgccggtaactacctgccatctgctgatattcaggttcgcattctggaagctaaatccgtggtgctggatgacagctggcaggatcgtaccgcagaggctggtgttgcaaaagactcaaccattcagcagctggaagcatcgctggaagtggcacaaaagagagagcacgaagccgctgagctggaacgcctgcgtaaagaatctgaagaaaaagcacgtctcgagcgtgaagaggctatccgccgggaagcagcggaacaggctaagcgtgatgcagaagcaaaagcacaggccgagattgatgctgctgcacgccgtgaagccagtgaaaaggcaagggccgaagaggcagaacgccagcgcatcgaaacagagaaacgagcaactcgcgaaaaagaggaagcagttgctgctgaacgccgccgacaggaagaagaacaaaaacgcatctccgatgaagaagcgcgccgcgccgctgacaaagagcaccgccgcaccatcaatcgccaggttattgctgatctggtagcacaagggattccaattgagtgggctgagaaatgcctggtgtctttcgcttccgggaaagtttccggtcagacaattaaatactga

SEQ ID NO: 162505 - DNA, 354 bp, Enterobacter cloacae
atgagaaagcagttacaggctcttggtcgactcaagacaggccagatgaacaagacggaagaggcttatgccgagcaccttgagttgcgtaagcattccggtgaggtggcctggtaccggttcgaaggaatcaagctgcgactggctgacaactgtttcctgactgtcgattttgccgtgatgttggctgatgggcagttggtgatggtggacgttaagggcagtaaggcggtctttactgacgatgcgagagtcaagatgaaggttgcggcagacagctatccattcgtctttcaggttgcttatccaaaacctaaaaagctcggtggtggatgggagattgaggagctatga

SEQ ID NO: 162506 - DNA, 603 bp, Enterobacter cloacae
atgagcacaaagaccaacgctgctggattaattgtatccggggataaaaatccgaactggaagggcgggaagatcgaaaaggtttgcgccgtatgtggcaagcaataccaggttaagcgggtcaactcttcatcgcgtttttgctcgcttcagtgcgttggtatctcacagagaggaagggcggttaaccgagagccaaagcgtgaaactaaaacatgctgcgtttgcggatctccgttttctgttttcaaaagccacgcaaagcgcatgaagtgttgctctaagtcgtgctccaacgaaatgcggtcatctctcatgaagggcgacggaaatccaaactggtctggtggcttatcacgcttgccatatccgtgggacttccgggagacgagcaaaaaggtgatcgaacgtgacggttttatttgcaagaacccagggtgtgacggaactgacgaacgactcaccacgcatcacatcaactacgacaagcaagactgccgacaggagaacctgatctgcctttgttcgagctgtaactcgaaggctaatttcggtcggcataagtggcaacagttttacgaatcactgatggcaaagagatag

SEQ ID NO: 162507 - DNA, 132 bp, Enterobacter cloacae
atggattttgagaactatagcggcagaactcttcgtgtttattcgctgatgctcaactttgtcgtggtaatcgctgtgattgcactgtcggcgtttggtatctggctgattaatgaatgggtggcggcatga

SEQ ID NO: 162508 - DNA, 207 bp, Enterobacter cloacae
atgaaatcatgtttaaccaaaaaagaaatgatcgactatatcgaaaacgaaaaagcctttggtataaaaatcaagaacgttaatgttatccaaccaattactctcgatgaaatgaaaacattatttaaagattttactccaccacagtcatttaggtatattgacccaaacatgctggtttttttgaaagcaaagattaaagggtaa

SEQ ID NO: 162509 - DNA, 747 bp, Enterobacter cloacae
gtgaaaataattgcttattttgacattcaacaaaaaaatatttctttcatagacaaagcaaaatctgatttatttttaacagcatcacgggaagttatcgagaagtggatatatgatctaaatacgaaaattattgaaaacagaagaatgaaacattacttcatgcaaaataataatgattatcaatctggaaccttcctttatagtcattgcatgctgtctacagttaaatctgtttttttattgtttgattgtataaaaaaagaaaaaagtgaagatgcatggatggcattaatggatgcttatgactaccttgatgtagctgaattgtttttagaaaaatatagattacaaagtgacggttttataccctttaaagaaaaaataaaaaacattgaacatactatattccctaataatctgttatatgtcagtccgggtgcaaaagaaaccctcggcgaatgtaacatatgtggtaacaacttttttgattgcagtcatatagagagagatatttacaacggtattttttgccaacgaattaacagggaaattttagaagctgatcatatagctttagtagacaatcctagagataggcgttgtgtcatacgaacaatacaagataaacatggttcactacttgatgtttttactcgaaagaggacagcccctaagaatgaggaatcagagcatatagttttaaatgtgatattacacactttccgtagacctgaatttaattaa

SEQ ID NO: 162510 - DNA, 621 bp, Enterobacter cloacae
atgttgatggtaccgccccagtacgcggtctggatccccgggcagatgccgcacagtaacagggccacgccgggggcgcagctctgctttttgttcattgagcccggcgccgccagtctgcccgaccgctgttgtacgctgaaaatgtcccctctggtgcgggagctcattttatctctggcagaaaaatcgcaggcacagcttcagcttgcggccacatcccgactggtcgatgtcctgtttgatgaactgccgctccagcgtcaggagcatttacagttacccgtctcgccccatccaaaaatccggctgatgagcgagaagatggctgaagagcccgcggcctggcagacgctggtacaatgggcaagccacttcgccatgagcgaacgcaacctggcgcgactggtggtaaaagagaccggattaagctttcgtcgctggcgtcaccagctgcagcttattgtggcgttacagcatttgatcggcgggaaatcggtacagcaggtggcgcagtcactgggttatgactcgaccaccgcgtttattaccatgtttaagaaggggctgggtcagacgccagcgcgttacatggccagcctgactacgacttcccgataa

SEQ ID NO: 162511 - DNA, 447 bp, Enterobacter cloacae
atgaataagagtattttggtattattaatggctatgtctacagcagctacagcttctgatttctgccgcgtcgttacttttaatgactggaccgtaagtaatgctaagggtgtaagtaaggaggatttgcataaaaacacatccgctgaaattttcatgaaaacaaatggcaagcttttctatgagccaattaaccctgtagaccatacaatgttaatgggaatcacttatctgggagctatgcctgactctcatattattaacactgtggattctagtaactctaatacattcacctttgagcctcataccaatagcttctacgaagctgatgtatttatacctaatgaagagcaacgtgagaaaggatttgtttctagtgcccagataatcaaaggtagttataagggctgctctgataaacagaaaatgcgcttacgtgcttga

SEQ ID NO: 162512 - DNA, 921 bp, Enterobacter cloacae
atgggtgagcagccggtaagcagtattgacctgtacgggctgtactcaatcgccgaaagcctgcctgacgagcgtctgggttacttcgactacacgtttgacgatgagaatgactcgctgggcgaccgtgtccaggcgatctgcaatgcggcttcagtggtggcgtactgggatgacggcgtgctgacgttcacccgggatcagaaagttgattacccggcggccgtattcaaccgggccaacatgaagacggacgagtacaaaatgacgtacgaggctactcttcctggcggctacgacggcgtgcaggtgtcctacgttcaccaaaccacgaacaacaagacgtacattaactaccgggtcctgaacggctctatcgtcgagcaggaagctgagaacccgaacaagcttgagattgtcggctttcgcaacgagtaccaggcacgggagcgcgcgctacgcgaaacaaaacgcctgatctactccagggtgaagatgaacgcaaaagtgttcgaagacgggattatccaggttggaagcgtcattcagatgcctgatatctacgacagcaaccagcagcagggttacatcaccggccgctccgggaataacttcgataccagcgagccgatcacgtttgccggttcgatgtatgtgcttgtcactgatagcctgggtaacccgacgctacgttaccttgccaccgcgcgcagcgacaccagatatggattcactgcggcagtacccggcatccagctcaatatctgggacggagacacggtgcagctcccgtcgcgttatctaatcgccacagttgaagaactcaatagtcagctatggacggtcaacagcatcaaaccgaacacagataacacggtctctctgacggtcgccgaatacagcgacgctatctatcagtaa

SEQ ID NO: 162513 - DNA, 498 bp, Enterobacter cloacae
atgatctgggcattcgtcaaagtgtactggaaacagttgcttattgtgttgatgcttgctgtcctggctgctggctgccgtatcgcctgggtgaatcatggtgtaacgcagtacgccgccgggtatgcgaaggctcaggccgaccagaaactggctgatgataaagccaggtcacaacgtgatcaggagaaaacacaaattgaacgtgaagcacaatcccgtatcgatgtggcgcgtgttgatgctgagcatgctaataccgctgctgacggcctgcgcgcagagcttgacaaaaccaagcgactcgccgaacactataccggatctttccccactggcacgccagccagcaaggtcatcggtgtgctcgccgacatgcttgaagaaagcaaccgagtttacaacgcaacagcagctgaggctgaaaagtatcggattgcaggagaatcctgcgaacagcaatacgactcactgaagaagcaaaaatcggggcactga

SEQ ID NO: 162514 - DNA, 366 bp, Enterobacter cloacae
atgctgactttgataagttcatcaaagactttccttatgttgttgaggattaagatgaagcatttcattattgccgccacactacttgcttccttgggtgctaacgcttctgcttttgtctgtaaggatatgaacgggaaaaaagccactattgaaaatggcgttgccaagcagggggaatttatggggtatgcaggcaagcactactatcactctggaaccgctgaggatggtagtagcatctttacctttgatgaacagaacaggctctatgttcactgggtaaatgatggtttaactattgtcactgtatttagtcctgttatgcctaaaattaatgaatttgaatgtaggggaactttctag

SEQ ID NO: 162515 - DNA, 1311 bp, Enterobacter cloacae
gtgggttcgtttattaactatttttacaccgacgtgctgggcatttcggcgctggcggcgagtaccattttcctgattgcccgcgcgtgggacgcggttcacgatccgctttttgcaagcattatggacaccattaacagccggttcggcaagtttcgccactttttgctgatcgcccctttgttgatcaccggcgtcacgctgctgtcgttctataaaattgaagcggacatgaccaccaaaatcctctacgccggggtgacctacatcctgtgggggacgctgtatgccatctccgatattccgttctggtcgatgtcgtcggtgatgaccaacgactccgcccagcgcacccgcgcggtgacggcggcgatgctcggggtgaacgccgggattgcctgcgccaatatcttcttcccgaagctggcggcgttcttcgcccagtacagtaacgacaaaggttactttatggcggcgctggtgatgatgctggtggggctgccgctgatgcttaacggctttatgcagatcaaagagcgcgtgccgccgagcccggaaaaggtgaccatccgcgataccttccacaacctgcgtcagaacaagccgctgtttatcgtcctgctgtcgttcttcttctgcgtgttccataacgtggcgggcgggctgtatatctacttctttatcaacaacctgggcgacggcagcctgcagatggcgattggcgtgatggggattgtcgcggcagtgctgtgcctggtcgccccgatgctgacgcgccggatgcagaagcggaagttgtttatgatcctctgcgggctggacgtggcggtgcgcgtggtgatgtggtttgtcgggtatcagcaggtgacgttgctgtttatcctgctcggcctgagcaccctgtttgtgatgatgaccaacatcctcacctcgtcgatgattgccgacaccatcgagtacgcggagtaccacacccacaagcgctgcgcggcgattactttctccgggcagacctttaccggcaagatgtcggtggcggtgggcggcgggttgatcggcgtgtttctgacgatgattggctacgtgccgcaggcgcagatccagagtgaaggcgtgctggaggggctgttctttgggatttgcctgctgccggcgatagggtcgctgatccgaatgggctttatgtcgcgctttacctttaccgaggagaagcatgcggagatttgtcggctgctggcagagcgtcggcatcatttaaaaaatagccgtgcggaaaatgagcggctggagcgcccggcaccggcgaactaa

SEQ ID NO: 162516 - DNA, 201 bp, Enterobacter cloacae
atgcgtggccgtcataaggagttcgacggcggcgaaaacaaacagggcgaaagcggcacgaccaaaatcgcgaccgagtgctcgtactaccagctcacgattgacggcaaagaggtcattgagattgacgtcgttaacatggtgatgaaagtcgacggcgtcgaccgtctcgctgagcaccgccgggcgattggcctgtaa

SEQ ID NO: 162517 - DNA, 273 bp, Enterobacter cloacae
atggtgagcaaactcaaacagcggcgaatgcgccgccttaaagcggacgtggcctggtggcgggatgaggcagaggattgccgttcccgcctgctggaactggccggggaagtcgacaggctcaaaaagctggttatccgcgtgccgatgccggtggtggttccggcggagattatccagcgcatcaattttaaaggtgcgtttgccatggggatcgaacgttatggcgacgcgatgctgaagttggcgaaaaaggaagatagtgatggctaa

SEQ ID NO: 162518 - DNA, 198 bp, Enterobacter cloacae
atgtgccatatgccgtactacagcgcggagatgatgctccgcttatccaccgccattacttttaagcccaatatgctgctgcggtactcagggctactgcacaagcggttacataaccacctccgcaatccgattgatttcttaattcgttacctgaagggtaataataacatccgaatatgtcaatgcactacgtaa

SEQ ID NO: 162519 - DNA, 693 bp, Enterobacter cloacae
atgaatttatttgaacgtttgctgcatcgccgtctttgcaatgagcaacctgctgacggtggcgccgcaccagcatcgtctgaaccagcagctgctggtgatgctcaggcacctgcaggcgaccaggcgaagccagaaggcgataagccacagccaggcgctgatggtgacaaacctcaggaagataagcccgctgatggtgataagccagccgaaaaggctgaaaaaaaccagaagcaggaaggcgcgccggagaaatacgagtttcaggctggcgaaggcgttgagctggataccgaagctctgaaggacttcgagccggttgcccgcgatctgaacctgaccaatgagcaagcgcagaagctggtggacgcctacccgaaaatccttgccggtgtgcagcagcgtcaggcagaagcctggcaggcgcagacagagcagtgggcggctgacgtgaaggctgacaaagagatcggtggagacaagctgaccaccaacctcagcgcggcgcagcgcgccctggaccagttcggcacgcctgagctcaaagaatacctggagggaaccggtttgggtaatcacccggaactggtgaaggccttcatcaaaatcggtaaagccatgtctgaagacggcatggtcgatggcagtaatcaaggccagcgtagtgcggccgaagtgctttatggctaa

SEQ ID NO: 162520 - DNA, 345 bp, Enterobacter cloacae
gtgcaggaagatacttcatttaaaattttttatgatgctcatgataatgagcttgcacagcataaaattgatgcaaaaacgttaagcatttctattggtgcgatggcagaactgattagtgcggcggacaagcgtctacatgacgggcaagagacagttaagctaatggtgacaaatccagctgaggctgggtcattgggcattgcttatacaattattgaacttgttccttcggctatcaacgtagctaaggtcattggattaactgggatggcaggtgcggtcattggtgctcctgcactcgccctagtaagacagttagggacaaaaaaagtaatcgcttga

SEQ ID NO: 162521 - DNA, 210 bp, Enterobacter cloacae
atgcgtaacgaggattttcactttgtcggtgatggtcgtggccggcgcagggtgttcgttaatggcaacgaggtaaagtgctgtgtatgggccgaccttaaacgaggcgtcgtctgcgttcatccactcccgctgcggatccacaagcgaaggcggggcgaggtttactcccgcaagcttcgcggtgaaataacaatcgaatttatttaa

SEQ ID NO: 162522 - DNA, 270 bp, Enterobacter cloacae
atggccggattaaccaaagagcagcgcgcgcagcgtgaggctgaaaagcttgccgcgcagaacggcgctgaacagaatcctgctcagcaggaccagcagcaggaccagcagcaggaccagcagcaggaccagcagcaggaccagcctggtgttgagctggtggtcatggtgcgtgacatctcagagtttcccggcggcccgctgagcgctgaggttcaccctgacgaagtggataactggctggcgctggactggcgtatggaggaatag

SEQ ID NO: 162523 - DNA, 354 bp, Enterobacter cloacae
atgccaatcgactatcgacgtatgcgcgcgacggcgacccggttgctaaccgagaacgggaagacctatcccttaacgcgcggcggcaccactacccgcgatcagttcgggaaagaggtaaccactacggccattaccgggaccgtaaccggtgttatcaccgaatactcctcccgcgaaatcgacggctccctgatcgccactggcgacaagaagctggcggccacgttcgaaacggaagtgcgtattgatgatcgcatcgaaatcgacggcaagatgtggcgcgtggtacagccgaatccggttaagcctgccgatgtgctgatttcctacaacatccaactgagggcgtaa

SEQ ID NO: 162524 - DNA, 801 bp, Enterobacter cloacae
atgtctgaacctaaaagcattcatcatgtaacaacgacacccaaaccttttagcgtaaacgtcgaatggcaatggccggaaagccagatgtggtttctctcgctggaactgcaatacctccgtgaagatggccgtttcgagaagaagcgcatctactggccaactaccagccatctgatctccggcctcaaggctggtgagcgattacagatacgcctgcgtcaaattgcactggatggctcagcgcgagactggcgagtcagtgactggatcgagggcgtttcttctgtcgatgccgaagagattatcgaggcgctgggcgacgaaatccgtaacagctgcgcacttcatggctttgaaggtggctggtttgtcgataaaaccggcaaggcttacatcaacgaggcgctgatcggcgatggcaaattgtctgcgaactatagcgttaaaattaacgtcgccgacaaaggcaaaccgcacgaagctggcatgactctcagtgttgaagatagccagagcaccgttgagtttaaagctgatcgctttaatgtgcatgaagccgcttcatccatcattggaaacgctgtggtatcagccaagaagatgaagattaagcttggcgatgaaatgacacaggccatcattgatgctgtacgtgaaagcgaattgttcacggcaattcaagtaaatatcgatgcacaaacagcctcactcaccagcctgcaacaagcgatgcacgatgcagtaaatgatgcaatccgcagcgcgctgaagccaggcggtctgctgtacaaacgataa

SEQ ID NO: 162525 - DNA, 369 bp, Enterobacter cloacae
ttgctgcactggatcaacctgtgcaacagcctcctgctgcggcgttactgcctgctgggcgcggattttggcgaggtttgcctggtgggttgcttccagtcgctcagatgtctgattgaactgttcctgactgattttcttcgcagacagagcggtattcagatcctcaacatcctgcttatagctggcgttttcgcgcgcttctggcaggagtttctcggcagctgcctgcgccttgagggcgttggccgtatcccattttgcagccgcgtacttacctgccagggctacctgctctttggtggcgcctttcccgagagactgctgtgcagccaggatggcctgctcgcggctcagcttgttcgttga

SEQ ID NO: 162526 - DNA, 300 bp, Enterobacter cloacae
atgctagaagcaagagtggcgaaacttgaagctgatgtagaaaacatcaaaacaaatctgtccgaagccagaacagatattcgcgaactgacaaaaaactcctcagacacaaaaacagatgtgtctacgatacttcaaaaacttgttgatattgacgagaaattatctagcaaggctggaaaagattttgtggatgttaaagttagcagcctaaagatttggatgttagggattcttttattgtcaatcgcaatgcctgtaatttcatttttattaaatctttacctaaaaaaaccataa

SEQ ID NO: 162527 - DNA, 339 bp, Enterobacter cloacae
atggacaagaaagaccaatttaaaataattactctcaaggttctcttggacttcattgtagaaaataagattgatgtaacatgtcgtctttgtggtcattcgaatctctcggtgccacaaatacagattgccagcgatacgccaggtgagtcaaatttctctcaacgcgtaaatatatttaaaaacaatagcttatactcagactctgccgacatgtactacatatctctaatttgtaataaatgcgggaacactctacatattgatgctgatacagtttttttgtgggtaaacaaaattacgattccaaatactggtgatgaaaaaaatggcaagtag

SEQ ID NO: 162528 - DNA, 270 bp, Enterobacter cloacae
atgacaattaaccttaacgaagatcatttaatagcgatagaaacttatgagcagtggactgagttgcgcaattccgaagccagcactacatatgaggtactttactcttcgatttttatgagtcatgtaagtgaaagaaactatcagcaattaacaaccacacttcgtcagtttgaatctattgatatcattcaaaaacacctaacgggtgagaaaattcaaaaagatgaattcatactagttactggacttgaatcgccacgggtttaa

SEQ ID NO: 162529 - DNA, 393 bp, Enterobacter cloacae
atgaaaccccactatcgcattgcaatcgtcgtcttcattctcagcctgttcgcaggcgtgtgctggtcagcctggtattacagcgacaaagccagcagggaaaaggcgcgtgccgatagcgccgagcagcaggcagaagctgcgaacaccgtcactgccaacgtcattcaggccattaacgtcatcaacgccatttcagaggccaatcaggatgcaaagaaccagatcgcactggagtcacagggagcccaggcagatatcaaagtggctgttgcgaatgatgattgcgctcgtcagcctgtgcctgttgcagctgctgaccggctgcggcaatacgcggacagtttacgtaccggttccggtggtgccgcttccggcaaatctgacaactga

SEQ ID NO: 162530 - DNA, 816 bp, Enterobacter cloacae
gtgaatcttgaaaacaccgtgaaataccacttcgcgaaatccacaatgattagcgactccccgcacgctactgcatcagattcattgaccggcaccgatatcatggcggccatgggcatgacgcaggaacgcgctgccatggggtatagcgcatttctcggaaagatggggatcagcaataacgaccgggagagggctatcgcgctgctggctgattacgcgctgaccaaatgcgacaaggttgctgcgctgcgcaagctggacgccggggttaagccgctggtgatgcgccagctcgccgccttcgctttcgaggactattctcgcagcgcagccagcgttaagcagtgcgattgctgcgcgggtcaggggttcattgaggctgacgtttttacaatgaaatcgcactacaccatgaggctgccgcagtgggcaaaagacctgaagcagtcgccgagtgatttcgagattaagcgacaggtgaaggaggtggtgcgtgtgctgtgctcgacctgcaagggtaagaaagtcgtcagctgtgcctgtaacgactgccggggccgcggtatcgccgtaaatcagaaagaaacgaagaagcagggcgtgccggtgtttggttcctgcaagcgttgcagcgggcgtggttatgagcgcatcccctcaactgacgcatatgcggccatttgcgagataacatccgccattactctggacacctggaaaaagtcagtgaagccgttttacgaccaattgatatcaaaattcgacgtagaagaagcttgggccgaatcacagctgagagcgataacacgataa

SEQ ID NO: 162531 - DNA, 123 bp, Enterobacter cloacae
atgaccagagctgatttcgaaaagtatcaggccgaaagcgttaagcgcgccagcatgcgtccagtagcaaagcacagccagaaccagactaagaccaaacagccagagagggccgcagcgtga

SEQ ID NO: 162532 - DNA, 345 bp, Enterobacter cloacae
atgaccataacaatccgtgagcaactgctggcagcactgcgtaataaccctgggcttaactccgcactactggcctcaatggttggcatgaccagcaaaaagatatcgggaacgattagcgcactagtggccgatggattgatttcctgtgaagtccgctatggccagcgcctgtatagcctgaccagttacggaatgcgctacgcggccgacacagtaccaggcaggaagattggcacaacgaagttaattcagcggacggacacgaacgtgatctgccaggagtgccggaatagcccggtgatgaagcgagtattgatggtttgggggagggtaggggtatga

SEQ ID NO: 162533 - DNA, 222 bp, Enterobacter cloacae
atgaaagaatggtttgcgacccttatcgatgacctgaaatttctgggggcggagtttaagagagagttttcggatctggagatcaggccgatgacggctgaggaggtccggcgtagacatgatgagatgcaccgttcttccgtggccgggaagttagcacgtggcgttttgcaaatcaggggcggggaactgaccttttatggcatgaggcgtgacaggtag

SEQ ID NO: 162534 - DNA, 522 bp, Enterobacter cloacae
atgtctgttactgattgcgttgttgtccttactgctcgaggtattacgcagatactacgtgagggggggagccaggcatggcggctagatccaagccatgctggtaaatatgaatatgccgtctgcgtccagaatacgaaaccttcatgggggactcctgaggctaagcaccatcacgcttttctgataggtagaatttccggtgtcagccgttctcctgagtctccggagacacgctggattttaaattttgattcttatgctgaaattgatattcctaaccagtgggatggaaacagaaatcctgtttcatatggcagcctaaaagatattggcattgatatcagccaacttgatttcaaaccacttcaaaaagtcttccccttagaaccggaggaacacgttgaagtcggatgtgatggcgtgggtattaggcctctaagtatccaggaagcaaagagtgggctggccatgaagtttggggttagtgaagaggacatacagatcactatcaatggctga

SEQ ID NO: 162535 - DNA, 450 bp, Enterobacter cloacae
atgctgtaccagctcggtcggcatggtggccaactgcacctccagatcggccaatgcttcgcgccgacgttcgacgaactggcgcagcacggcaagctgcgcggccgcttcgtcgccgtccgcggtatccaacgcccggcacagccgcgccagcgcgtcgagaccgatacccgcttcgaaagcagcccgcacgaagcacagccgttgcaaggccgcatcgtcgaacaggccgtagccgccaggggtgcacgccaccggccgcagcagtccgcgcagcaggtagtcgcgcacgatgtgcacgctcaccccggcattaagggccagccgggacaccgtgtaggcgttcatcgaacacctcctttttctcacccggcgcagcaggaaagctgcttcacatccttgttaaaggtctgcgccgcgagcttcagtccctcgaccatcgtcagatag

SEQ ID NO: 162536 - DNA, 351 bp, Enterobacter cloacae
atgctgtgccggctcggtcggcatggtggccaactgcacctccagatcggccaacgcttcgcgccgacgctcgacgaactggcgcagaacggcaagctgcgcggccgcttcatcgccgtccgcagcatccagcgcccggcacagccgcgccagcgcgtccaggccgatgcccgcctcgaaggccgcccgcacgaagcacagccgttgcaaggcggcatcatcgaacaggccatagccgcccggggtgcacgccaccggacgcagcaatccgcgcagcaggtagtcgcgcacgatatgcacgctcaccccggcatcaagggccagccgggacacggtgtaggcgctcattga

SEQ ID NO: 162537 - DNA, 1674 bp, Enterobacter cloacae
atgctatacgagcatgatgaagattatgtcaatgacttaactgatcgcgtatttttaattaaaagagagctagaagcaggtacgctaaagattgccgctcatctcgttgatggtttggctgaaagcctcagtaaaatccgattgaggcctgatggaaaagtcgtgcctcaaaccgtggatggtcgaataagagcaatgggtgttgccgttcttcattttgtggaacgtaacgaaataaaaagtaaattttctatacatgaactgcaagaggcctactttagaattctttttgacaattttggtgaatattatcaaccaattcctaaacagggtgctttgccgcatcaggtagcaaattttttaagtaaaaatgaagagtgtgtaaatgaacttgatagcttgtttgaggagttctataagagggttttagaattttggtctactgcggcagaaataggagttattcatttacaagatggacgtcaactaaaggcgaatttcgctggtgacctatttcctgcatattcaaataattctgtatccatcgcaggactatatgttgatacaataattcttccatgccctatactgagggttggacgtctccataatcatacaactaagagcgaattttgtaggctttttttcaaacatgttctgacttttatgacttataaagatattgctttggaggagattgaaccccatatagttttaatactaccggacgaaagagattatacacctgcgaaaactaatgatttgttaaagcgaagcgagccccatactttagctcacgcaggttatctattcgataggaagttttcagataaagatgaattacaagaattctgtaaacatttagatagcattgataaagttatatcggaattaaaaaaaccggatagacttatttttgatactgaatgggagagtggtgctgaaaatcagttaaagagattaatgtccgacaggcggcgtgtatcactttcgtggtttgataatcatccagggatggagatatatgcgacttgtatcggtagaatgccgcaagcactctcagctaaagataatgctaaccagttaggggcaacacctttcattaatgctcaaacttcatggctttattacacttggttattggaatatgaatcaagtaactacgaagctaatactgaacagatcaaagatctccatatggttcatgctctctcaaaaggccatcaagaagaattttcttggctggggaatatcccggcagataaaatcatacaattaagaagaaagggccttttagaggaagtgcgggaaactctatcgtttggcgttgacaagttaattagttcgtcccccaatcagtacaatagaactatgcaaaaggtcattgataatattgatgttgagtttgcaaagcatcaacgatttatagcgaatgcaagaaaagaaaaactgaaaatatttggcttggatgttacgccttgtatagtgagtggtgtgatatcaatagctgccgcttatacaggcaatgttgcgttaggaacaataggtgccggtttgagcatgtggggatttccaaatataaaagatattagtacgaaatttaaagagcgtgatgaacggctgaataactataaaaattctgcaattggcatcatgtttagtcatataaaatga

SEQ ID NO: 162538 - DNA, 186 bp, Enterobacter cloacae
gtgaccagacaggaatccgccgccctcaacatggccaaatttatccgctcacagacactcctcctcctcgagcggctcgaacagatggatctggatgaggcagccggctgctgtgagcatctgcacgatcaggccgaagcgctttacgccatgctgaacgcacagataggcgaagatgatgcgtaa

SEQ ID NO: 162539 - DNA, 573 bp, Enterobacter cloacae
atggaacccatagaagctccggagtcgctatgcatctattcaggcctgcacaggcgagatagccttagttttcttaacagaatagaagtgctagcagtaaatgaggggaagagagttgagattgatcttactaaggtcgtttatgcgtcagctgcagcctcactccttttctttgctattgtaagccgagcacaattgctaactggggatccgcatatatttcgttttaaattccccaaaaaggacgaaaatctagccggtcatggatggattgtcagcactggtttgtcaaaagcattggttgcaggtaccccttccaaacttgaagctctaacctcagaaaaacgctttttccaatcagcagtggagccatttgctcatatggcgtctacggttggtatgctgcaatctggtgcccatcttaaccatgatcagcttcatttacttgtaacagctattggagaagctttactcaatgtatcccaccatgcttacgacgaccctcgttttcaattaacacttgagctctttgaaggtaaacgatggtggcagtgtgaatcgccacgggtttaa

SEQ ID NO: 162540 - DNA, 195 bp, Enterobacter cloacae
atgacaaccggcggccatccaccgcccaataaaacacagaaaaatgcgttgaagtcttgtattaaccgttccgttcgccgcgataaggccaagaggatttatgagcaaccctatcacagtaggtttttcaggcctgacgaagcgaattttcgcgggtcggtcaaagccaagcaaattggcgcccggcgttcgtga

SEQ ID NO: 162541 - DNA, 345 bp, Enterobacter cloacae
atgaaagagttcaagggtactacgggaaaatggagtttttctcacagtagcgcaagtgacgacaatgtggcttgcttagaaattaattcatcagaatcgctgcacgaaattgcttatctacaaagtacaccaccaaacatcggaggggacgggcagacatctttcgataaaacaatcgcgaatgcgcacctgatagcagcagcgcctgatttgctcaaagcactgcagtgcttggtaaaaagttacgacgatttcagaaccagaaccggaagagatagcaaaccgcaatctccagaattactgaaagcgaaggctgccatcagcaaggctctgggggaggactga

SEQ ID NO: 162542 - DNA, 555 bp, Enterobacter cloacae
atgcgtaaaattttactcgtggcaagtcttgctgctcttttatcgggatgtggtgagaaaggcgactttgaaaaggctatcaacgcgcaaatatcaaaatccaatgtgtgctactcactgcaggacaataacattgtgttcaataaaggtttccccatccgggttaatcacggctatcgttctgctggatacagtgccagtgatgaaatcttaaaaggtctggctaatcagggactgcttgatgtttctcaacaagctaatggtttcagtagtgtcgatgttctggaagtaacagacaaaggccaagaggttgagttttgggaccgtgagaaaggtgcctgtgtcggtcatcgggcagttgctgaggttaaaagctggactgaaccgagtgagggtaatggcgttaaaatgacgcaagtgacctatacgtggaaactggatggtgtgccgggctgggttgataaaaatgctttctccggcgtgaaagggatgtctgaaccagaagaagccaaaattgttctggtgaaaaccaataacggctgggtcacaaggtaa

SEQ ID NO: 162543 - DNA, 441 bp, Enterobacter cloacae
atgcgcctcatcaacaaacagcgccaccgggcgtttaccttttttgaccagctcctgcagttcccgctcgcgacgttcaccctgcttggggatctgcacctgcttatcctgcgccaggtcgtaaaacagggcgttaatcagcgtggcgagccggacactctgtttgtcgaccgacagggaacgggcgacaatgattttgttttcatccatcagttgctgctgcaggcgtcgcagagtgactgttttgccacttccgaccacaccacagacggctatcagacgcccttcgcgtatcgcccctttaatgtctttcatcaactgcttatggtgagcagtttcataatacctggcctgttcaatagactgcgtcagcccataatgctccatcacttcaacccgcatggtcttctcctggttgtctgttacgaaaatagtctctga

SEQ ID NO: 162544 - DNA, 360 bp, Enterobacter cloacae
atgacaaccttccagttggtctctttcttcccgccgaggctggactgggtatgcagccacagctgcgtcgactcgaccggggagaagaacggccccacaaccagcgcctcgttatcgttcaggatgaacttcgtggtgttgatcgtggcattcgccgggatgtcctgcgggccttcgagctggttcatcgtaaacgtataccagcgcaccgggttaacgacggcgccgtcgttagtttcaactgcggagatcagcgtgccggagaatgtcgcatcggtagtaacgttgcctgacgcagtgctgtatgtcacgttgatggtgaaggttacagcgtgcggcagcaccagccccatgaaatag

SEQ ID NO: 162545 - DNA, 150 bp, Enterobacter cloacae
atggcgggtcaccagagcgttatatttgcgctcgcggctaccaagggcgttctcagtcgccctcacctttacccgcaccagcgtgtctgtcgggtgaacgacattggtccggatgttaatgctgtggatttcctcaaccttgagcagtga

SEQ ID NO: 162546 - DNA, 312 bp, Enterobacter cloacae
gtgtgcagccacagctgcgtcgactcgaccggggagaagaacggccccacaaccagcgcctcgttatcgttcaggatgaacttcgtggtgttgatcgtggcgttggccggaatatcctgcggcccctccagctggttcatcgtaaacgtataccagcgcaccgggttaacgacggcgccgtcgttagtttcaactgcggagatcagcgtgccggagaatgtcgcatcggtagtaacgttgcctgacgcagtgctgtatgtcacgttgatggtgaaggtcaccgcatgcggcagcaccagccccataaagtaa

SEQ ID NO: 162547 - DNA, 246 bp, Enterobacter cloacae
atgcggcagcaccagccccataaagtaatcgaactcggcctgctttttgattttcatcgctatctggccgccggaatacgtcccgctgaccacattcgttgcggtggcgctctctaccgggaaatcgctggcctcgttctgcccgggaacctcttgcccgtcaacgtcatcaaagccatatccctcgacgatctgggggatgaccacaccaggcggatagaactggaattcagcaccagccagtga

SEQ ID NO: 162548 - DNA, 255 bp, Enterobacter cloacae
atggcgaaggtaggcttccggatcgataccattcagcctgcacgtcccgatcagtccgtacagcagggctccgcgctcaccaccgtggtcgctgccgaagaagataaaattctttttcccaagacagacggcacgaagggctcgttcggcagcgttgttatcaggctctgccaggccatcttcacagtagtagcacagcgcatcccactggttcaggacataagcgaacgctttgaatcgccacggataatctag

SEQ ID NO: 162549 - DNA, 555 bp, Enterobacter cloacae
atgttcccacgttatcaccaatttgatgcagttaccgagattgtaaaagaccttagcaaaaatggtgttggaacaaactacctctgtgaacatagtgcagggtcaggtaaaacttcaacaatttcttggttgtgtcattcgctcattcggttgcgtgaagatgatggaacaccgttttataactccattatcgtcgttacagacagaacggtacttgatgcacagttacaagatgccattcaacagattgatcatcaaaaaggattgatcgcagccatcaatcgtgatgataaagaaaactcagggaaatcgaaaagcaaacagcttgaagatgccctacttagcaataagcccatcatcattgtaacgattcaaacattccctcatgtcatggaagctattttaacgcatacgagtttgagtgatcgtaactatggcattgtgattgatgaagcacatacttcacaaacaggctctacagcgtcaaaattacaagctacacttgctttaaaatcaagtgaagatattctactaaaatgctatttgggacgttga

SEQ ID NO: 162550 - DNA, 210 bp, Enterobacter cloacae
atgatgtcgcactacggcaccaccccgctcattcgccagtgcgtcactccaggcatgatggcattgcatgaaggccgcacttatcgcgtctccgcagtcattcaggagcgcaaatgggtatacctgcacaccgatgctgaaatcatccgtctcagtgactgcgtgattgacgttcttttggacggtcacggcaaccctatccagcactaa

SEQ ID NO: 162551 - DNA, 216 bp, Enterobacter cloacae
atggaaaaaatcgaagctgtaaggttggatgttggcaagactgtagacatcgggtttaacaaagccgttgagattgttataaaaactacaggtggcaccgtaataaagggcatgatacccgcaaacgaacgcttcgttgtcaccaatgggggtgatatcgaaagtttcgatgtgaatatctatgacaccaaatccgggccacaaaaaattgattaa

SEQ ID NO: 162552 - DNA, 147 bp, Enterobacter cloacae
atgaaacgcgaaggcattcaccacgtcgtcgttgagcgggatccgcagtacatgaccgatttcaacgaaatggtgccggagttcatagagaagatggacgaggcgctggcggagatcggattcacgtttggcgagcaatggaggtaa

SEQ ID NO: 162553 - DNA, 390 bp, Enterobacter cloacae
atgaatgatgtgggattatacgaaaaaaatgaatcaatgttttttgctatttgcacgaccttatcattatattgcgatttcatttacgaaatagcatatggatttcataatgaagcggtaatgatcattgaaaatgaaaagtgtgtgggacaggcacttcaaattcaaataaacaatctgttcgatgattttgattactacaaaaaaatgaatggaacaggaaaagaaaaacgggaagatatagatgaaaaagaactctttaacaaagtaatggcagcacataaccaaggagtaaaagtgataatcatgaagaatcttgaggctaatcttagagcatcagtagatggcccggagtattggaaacttaaaataataaaacaacccatttaa

SEQ ID NO: 162554 - DNA, 315 bp, Enterobacter cloacae
atgttggatgagctggatgccaaagacaggcggattgctgagctggagttgaaactagaagccgcagagaaacggattgctgagctggaggcgcgggaggtgaaattgcctaatcctcatgctcacctcatctggattcaggcaggccatgcccatgatgactattgggatgatgttgccgtttctcatagcgaaaaggataagtgctgcgacggttcagatcgctatccggtttatgctctctgggaaatcaaagaggcactatctgctattggcatcaacatcgccgcagccggtaaaggagaggactcatga

SEQ ID NO: 162555 - DNA, 288 bp, Enterobacter cloacae
atgagtgaaaaactgataaaagaatcccggaaggttttcatgcatatggcaagtttattctatgaaatgaaaataaatacgcttaaggaaatccgacccgatgaagtagagatgttaatgaaggatgatgcattcatggatagtatctataaggattgtatcaaaaatgcaagctcatcgtttaaaaaagtagtcagggccgagtattttgaagtaggacattcagtaaaaatggttgataaggtggtggtattgataacactacgtgttaatcataaaaaatattag

SEQ ID NO: 162556 - DNA, 1095 bp, Enterobacter cloacae
atgaaaaaaaatattttatccatacattatattagaggtatatcagccctaatggttgtattattccattttcgcggcgtattaaatgatgtttatgctcaaaaagatttaggtaacatactatttagatggggagagataggagttgatgcgttctttattataagcggatttattatttgcctttcaacaaaaaataaaacaccagcaaaagagtttgtgctaaaaagatttttcaggatttacccggcttatatattatttgtagcattcagcatatgcgtagcttataaaacatccccagcatccatgacggatataatcaacgcacttctgattttaccacttgattactcaaaaggtggaccattctttggctactcttacttaacagtcgcatggagtttgttttatgagatatctttctatctaatatatatgctatcaatgattatatcacataaatacagggggcttatatgttcaggcatgattgctgcattagttttcattcctcagttgttagaaagcggcacaatatcgttaaatccaatatctcaaagtaagtttgaaacattgctttatttaaacatccttacatcacctatgatgttaacgtttatcgcaggaatagctatttatgaagcgattcctatcctgcgctttgtatcattgcacttcagcgagtgggccataaggatacttttttatagcgggatatctttctttatatattgttttttaactgggtttaattcctggcatggaataacaaactctgttttattcatcctccctgccatcacattcgcaatattatatgaaatgaaaattggcgtatctgaaaataaacccctcacgtttctaggtgatatatcatactctttgtatttgagtcatcttatagtattaagcatcctgaataattatgggggtgagttttattcattgtcacacgggtttagcaaaatgtttattcttgtttcttcctctttaattctatcctacttggcttacaatgtaatcgaaaaaccgtcaacaaaactttgcaggaaacttctctcgtatcggcctcggtttaatgctttaacatga

SEQ ID NO: 162557 - DNA, 1446 bp, Enterobacter cloacae
atgttattaaaaaatagagaaacagagcgtgaatatagcctaattgagtatgccaaatactcattacctttaattgctgcttttatgcttattgtattctcaattgataaaaattttggcgatgataatgcaagaacagttgaccgatactttgggtgggaacaggaagggaggcctattgcatctttaatagtgtacatactaaatggaggtggactgttaacaaacatagcaccactatctcaggtgttaactatattagttggttgcttgacatgcgcgattataggtcgatatgtcattaaaacacacccgttaacttgcgcattagctaccgcggtaatatttacatcgccattttttattgaaaacctttctttcaaatttgactctctatcgatgtcaacagctatgcttttttgttgcattccttttgtgacgatgaaagaaaaaaatgcattaatttcttcagcggcttgctttgcattcaccctactaagccttatgacctatcaggccgcactgccactattctatgcttgcatgtttgtttttatcttttctcagagtgaatttacaaccaaagattctaaaagatgtttttattctcttttactttctgccgcagctctttttttatatacatttttcataagcaaaatttttgttcaaacaggttatgctaccgagagcgctaagattttaaacccaatggagccgggttttttggattctttatatcgaaattttaatttcgcgttaagaccaataggagatctcttaaaaagcaacattttgccatattacgcaacggcattacttgcattaccagtagcgctatatttgtcgagaggatctttctttgaaagaaagttcattttcattatttctttttgtgcaatggtttgttcaataattatattctatataactaagactccatcaatcaacgcaagaatgatgatatggtttaatgctacaatgtttgtaattttttctatcattgccaaagcattgtcattacggtggtttttagcgctttccgtacttcctgtcatatttaatttttcactagccaatgattatcgtgtctcacagacagagcagttaagatatgaacgaaatattttgcagtcgatatactcagatcacaaaacatttagacttaatggcgatgtgataatttcaggccgagccccgcttagctatgtgactcagggagtcgttgacaaaaggcctattattggtgggctgatgcgtcaggatatcggcacatggactactgaaaaattcgcaaagatagaaatgccatttattaatattaaatttaccaagcgccctgaattaaagtgtggtgataaaattattacaaaaaataatatttacatgatgcacgaagtggatggtaaggtgtttataacattcgataccaattgcataaaataa

SEQ ID NO: 162558 - DNA, 2133 bp, Enterobacter cloacae
atggctactacacctactcagaactcggttccaagtgaatctccattggacctgaaatataacgcaggcaaaattgacgagtttgtaacatctctcgcgcaacagtacattgaccgatttggtaatgctcattacaccatcgaaggtcttaagcagcttgttcttcagcacatatacaaccttggatggaacccggttggaacatttcaggacggcactactgtctcgtcagctggtgatatcgttcaggatgaagcgactgggatgtggtatcgatgggatgacctttcaactttgccaaaagatattccatcaggctctacaccagattctactggtggcgtcggtgatgggaaatggctggctgtagatgtcagtgatgtgttgcgtaagcagctgtccgaagaaaatgggatgacattaataggtggttctgtttatgtcgtagactatttctctggcgcattatcagcgcatgcagggaaatcgaaatttctcatgacaagggggcatcatgcgatcggagtcggcgctgcaacttacctgcgtgacggtacaactggatcgccttcaacaggtaatgagttaaagttctttgatgctgatggttttggctgggcttatcagccagtagctggtgaatacaacgttgatgctttcggtctggtaggtgatgcagaatcagaaggagccagtaacgtagataagcttcaggctatgctcaatttaactggtcgggctgattttgtttctggcaaacaatatttcttcaataagttctacagcaatctgccaaacactgataaatgcgcgattattcttacaagaaaatgcatggtatacagcagaaatgactcagaactttgcatgataggagacacaaccgaacccacaacattcgcaaagtcgctttttggagctacttatgacggggctgcaaatggcagcatcttcaattgtaaagtgttcattaaagattcaggattattcggtatattcagatatgtacacgaccttacattcacagatatgtatactcatggtggtaacttacccgatggagctctaaccactgaagccggattccgctgtcatttagtattatggggctgcaagcgcttcaaaatatctggatgggaagcttatgctgcgccagatactacagacttcacaatacctaagataacttattcaggcttcgcgatccgttgcctttcctcatggctttctacttccgtacaagactgtacagatggagatattgccggatgctctttttatggcttttcctataatgcaactgagattgcaggtccgacaactaagcgcattaatgtacatgataacgtatattacgattgctgccttaccccattagattttgataagggatgtcaggactgccatggctacgacaacacaataattaggccaagaaaaggtctttttccatctagcgttggaggtgatcagtgggttgcaatgagaattcaggggttttccgatggggcaagtataaacattacagggttcggatgctccctgagaaataatttggtggttgatgccggaggattaaatgattcatcgaatacatttatattctgcctcgtagatcagcaagattctgcgatcatttcaggaaacaggcagcgaaactccctggcattaagaggattttggataacaaagtcaaataacaccacctttagtaataataaggtttttgctattgactttatgaactatacaagcgcaaatacagacaatctgtctatacgtgggaatgatattgataccaccggctatattcttaacactgggtcaacagggaacgggtttgcgtcaatgttaagaatgatatggaatggaaacaactttcgtaatgtcggatcgggggctgggacaactagcgcctcagatggaatatatcttagaaccaacttaaacgcatgttcaggtattttcatgggcaatcagataacaggctacaacagaccttacgttacacaatcaggtgctggtaataaggcaacattcaaaggaaacatggctgttaactgccctactgcgcctgccgtcctggactctgcaacgcagtcagtggaattcacatcggtcacaggatattaa

SEQ ID NO: 162559 - DNA, 681 bp, Enterobacter cloacae
atgaaatcatgcaagaaatgcggcgagactaagccgttgacatctttctatacaagcgaccgatgcactgatggttatcgtggtacgtgcaaacagtgtgctactaaaacccaatgcttacctgcggaagaaaatggtgttgtccccatcccatcggcagatcggctaaatgagctattcgagctagtaggctccgatctagtggcaaagaagtccagaggatgcgtaaaaagcggttcagtttgcggctacaaacggaaagatggttatatcagagtgaaagttgatggcgcgttggtaatggcgcatcgggtagtctggaagatgtataacggtgatgagcccacctttatcgaccacataaatggcgatcgctcagataaccgacttgaaaaccttcgggctgtaacgagctctgataataagagcaatgagtcgctcagggtcgattccacgtcaggctttattggcgtgacctggtataccccaaccatctcgaccaaaacggcaaaatgggtggctaaaatttccaaagagggcaatgagaagcatattggctactacatcgaactcaaagacgccgtccttgcctacaatgcggagtgtttgaaattgcatggtgattacggattacgaaaagtagaacacaacctgaataagctccgagagttgggtctttga

SEQ ID NO: 162560 - DNA, 486 bp, Enterobacter cloacae
atggaagttgtataccaggttgttgaaaaagacagaatcactaactctcatagagatgcttttgcagaaatgctaaaagctcaaggaaaggttcaaggtgatctggctacaaaagcggataggtgcatggcgatatgttttgctttctacaatgatgagcttgctgctattggtgcaattaaatgtaaaactgtatcggatttttcggctcataaagctgatttaatttcacttgagccagagtttgattgggagctgggttatatctataccgtcccaaaatttgaaggtcaagggctggctcggaatgtagtcgcgattttgctagaatcttttgggaagagtaatttgatggcatcaactgagattactgaaaatccaggaatggtacatatattagaaagaaatggttttaaacaatatggaaaaccatggaaaagcgcaatacacggaaattatttagggctttatcttaaattcaaatga

SEQ ID NO: 162561 - DNA, 1290 bp, Enterobacter cloacae
gtgcgtacaaaaatctcagactgttcttacacagataaaaacggttacacatggcgtaaacggtttaaaaattccacgatcaacatcgtcctcaaaactcgtgaccacaacgaagcgctcaagaacgctacgctcatgacgatgaagtttctggaatactcgttaacgccaaatatggacgtaaaagcgattggaattttacttaagagctatcgtgacaccatcgttatatcgtccaaaatggcaagcctacaagccgttctaacgagcttaaacgttgatgtgaccaatcctactcttgctatccctgctgtagctcaggtggctgctgtagagcttaaacaagctgaggctgccgtagctgctaatcctcgtcatacattcgaagaagctaagacagctttccttgaagctaaccctgaatggcgtggtaagacggttacacagtccaaaacagcaaccaatcgtctgattgcatgggctgctactaacaacattatgtatgttgaagatctgaccagaaatgatgttgagctattcaagaaatatcttgatgggcttggtctggttaactcaagtaagaacacttacctcaatagatatgtttcgctctatcactatctgattaacgtaaaagagtgggtgagtaagaatccatttgcaggagctaagtacaagaatcttggaacaggtaagaaaaaggttcctatgacacatccacattaccaacagatcacagaagaaatggaagataaatggttctggatgtgtgctcttatgcaccattgtggtttacgtatgaatgaagccgctcagattacatcaagagacttcgtagagattagagggatcaagtgtgtctctatctacactaacgatggtaagacgttgaagaacacttcttctattcgtgacattcctttgaatgatgatctgcttgctatggggatatgggaagagaagcctcacctgttaggcactactccaacgtgggttaagaccactacagaatcacttaacaacgagatagctaacgttctccctcagtacactacacactgtttccgtcatggtatggaatgtagactacaggaaatgggagtacagcagaacattattgatttcatcatgggtcattcaccgaaaggtgagggagctaagacgtatacgaacaggaagcctctcagcgtaatgctggaagctctgaacaaagcagccttaccagaagcagacggtgaaggggatcatgttcaggaagcgatacaggaagctatgcagagcgtagcctag

SEQ ID NO: 162562 - DNA, 480 bp, Enterobacter cloacae
atgatgaagaatgttaatttaatcctcttaggggatggtacacagcctcaagaacgtagaatgaaagaggcattgaagataagcaaggatgtgaaacctgctgctgtgttggatgctgtgaaggaggcttatgatggtacaggaaagaagcctaagctcaactatgctcaactagcacgatggagaaaaggactcacctatcatcgttcacctgctcctgtagacgctgttgatcaatacaccgatctgtttacaccactctaccaattgttagagaaccctgttgtggttgcttctctcgatatagaagagtttaaacaacgattgaaaaaacagattgaagaacgtaagcagaagttgattgaagaaagacagattgaagctgaacgtattctgaaagaagcagaagaaagagataataaacgatttgaagaagaatataataagcttctagataagatgaaagaattaagaaaatag

SEQ ID NO: 162563 - DNA, 258 bp, Enterobacter cloacae
atgccagaaaataaaagcactacggatgatgaagagagtcttctctacgatgaagcctgcaggatggtagggcagtgctgcctgatgctggccagtaacggtgcggaaacccatcgcgaccagctggtttatcaactgaaaaggcttcactggaaattcatggttgaaacagacgtttcacacaacgggattctgtttgccatcgagcagctcgctaccgcgcgggatgacaaattcggttcacaaaccgggtcatga

SEQ ID NO: 162564 - DNA, 153 bp, Enterobacter cloacae
atgtctggtaatgaagctgaaattagcacttacataatattaggtatcttgatgttcacctgtgcttctgttttctgcaaaggcttactgagcagtctcggtactttggctgctctggggatgtcagtgttttcgttgctgacttggttctga

SEQ ID NO: 162565 - DNA, 1437 bp, Enterobacter cloacae
atgaaaaatctgcctgtcattttcaacaatcaacattcagatacccataccgtatcagctgctttatgtcagctgaggcacgattccagatctaaaccgctcccacacgagcaacgttattcccttcttaagggttgtattcgtttgttgcaggaaaacaaggatgaactgtgtgaggcctacagtcaggattttggtcacagggcacatgccagcacattactttccgatattttgggttcaattgaagcactgaagcattcactgagcggtctgaaaaaatggtcgcaggatgaaccccgtgaatcacccttcccggatacgtgttcttacattcaatacagaccgctgggggttgtaggtgtaatgagcccgtggaattttccactggtgttaactttcggaccactctccggtatcctcgcagcaggtaaccgggcaattattaaaccttccgaattcacgccatcgggaagtcggctgctctgtcatttgatttcagaatatttccctccggatgaaattttgactgttcagggtgatgccggtgtctctgcattcttcgcttcccttcctctggatcatctggtgtttaccggtagttcagcaacgggccgacatgttatgcgtgcagcagccgaaaatcttacgccggtaacgctggagttaggcgggaaatctcctgtcatcatttcagaaagcgccaacctgaaaacggctgctgaaagaataatgacggccaaagcatttaatgcggggcagatttgcatcgcccccgattatgttatggttccagcaagatacgcagacgaattcatcggttacgctgtagcgttcctgagaaaatcatacggttcttatcttaagaatcctgacttctcgtcaataattaatgcagcccacagcagcagattaaatgaattgatcgacgatgccacgaaaaattgtgagcgcatcatttcagccagtgaggagctggatttgccgtctgaggggagaatcattccacgactcattctcaatccctccgacaattcacgcatcatgcaggaagaaattttcggcccgctgcttccgattattacgtatgaaaaaacggatgaatgcattaatcggatccggaatggagaaaaaccgctggcgttgtactattttggacaggatgaaaatgagttcagagagttacaatgttcaaccgattctggtgcccttgtctttaatgatgtgatgagtcatgttttggtgcacgatctgccgtttggtggcgtggggcattccggtatgggagcctatcatggagaggatggtttccgtcgattttcccatgcacgcgccatttttattcagtctgatacaggtttatcgaacctactcatgcgggcaccatttacggacgaaaaaattaatcaaattacctccctgataaatcagccctga

SEQ ID NO: 162566 - DNA, 612 bp, Enterobacter cloacae
atggttgtgaaaactctgacttcgggtctggcagaagaaacgctgatacgccggtttacgctcgcagtgggtacgcccctgactgcgctgatgatatctctggtatttgccttctggtcgctcggtctgcgacagggacgctcaatgctgcaactacttgaaataagtcagcgcagtttcccggtgcttgctgggattgtattcgttatcggcgcaggtggagccttcaactctgttctgctcaaaagcggagtgggggaagttatttcaggaatgttgctcagcacccatattaatcctgtcatactggcctggtttattgcctggataatgcacctggcagtgggatcggcaaccgtggcaatgataagcgcagccagtatgatcagtccgatgcttgccgcagatcatcaactgactccagaaattctggtaatagccattggtgcgggttcaattagctgggctcacgtgacggattcagccttctggatagttcgggaatacctgggaatttcattatccgaagcgctgaaaaagtttacgggggcaacgatccttgcttcggttgtggcgcttattgccacccttattcttgatcacttcatctga

SEQ ID NO: 162567 - DNA, 1224 bp, Enterobacter cloacae
atgcatatcccccgtcccgctaaacttcttttcaccgtcgatgacggctggaaccgttacctcgaaaaacacggcgacagcatcagccagtggacccgcctctgcgttgagcgcatgctcgcctgcgggacctgcgctatgggtgttcgccgctactgctgcgcctcgccggactgcacacactcccgcttcttctgccagagctgcaagtcaaaggcctgcagcgcctgcggcatgaagtccaccgagcagtggatcgcggagcaacagcacgtcctgcccgactgtgaatggcagcatatcacctttaccatgccccacctactgtggcccttcttcaacgacaactggtccctgctcaacgacctgttccgctgcgccacccgggctatgctgaagtgggcacgccggcagggtattgaggtcggtatcttctgcgccctgcatacttacggccggcaactcaatcagcacccgcatatccacgtttccatcacccgcggtggacttgacgtaaagcacggcgtctggcgcagccttttcttcaaaaagaaggccgttgaggaaatctggcggggagccgttatccgcctgctgcgcggcagctatgagcgggtcagccccggcaccctgccgggactgggacacattcgcgatgagcgccagtggcggcgttacctgaaggcacagtatggccggcactggaaggtacacttcgcgaagaaaacccggggagcctggcacagcgtgaagtatctgggccggtacctgaagcgcccgccggtgtcggcttcccgcctgcgacactacgccggtggagcggtggtacaccattacctcgatcaccgcacgggaaagcataaacgccagacgctgagtcaggaagagatgatcgggcgctttatcagccacgttccggcgcgtcattttaagatggtgcgctactctggctttctggccaaccgcaagcggggctcgcttctgccgaaggtttacaaagcgctggaaatgacggtccgggaaaaaccaaaacgtcccgggttcgcggtactgatgaaaggcttcctgggcacggatccgtaccagtgcatcctctgcaaaggccggttgcgttttgccggcgccgtggcgggtgaacacgccacaaaaatgctctcagacaggctgcatcagatggcgaaaaaacgatggctgcggatgcctgagctgaatcagttcgcctga

SEQ ID NO: 162568 - DNA, 573 bp, Enterobacter cloacae
atgattacccaagctaacatcaatgaagaccttcgcatggtgtcagaaaacctatccgacacgtcgcaacaattagttaaaccaatccacgctttgaagctttcatttttctttccagtttcaatagttgttggatacttaatcgctttgattatcgtgaaaatccaatacgtgccccacatgaatagttttggggatgtcgttactttcaatgatgcgatgagtgctgaattagcaactaatggatttgcgctattgttttctgtgattataggctttgccttatacggtccagcactggcgtatcttacagtaccgaaaaaagtacgagatggatcaattattatctcaagcctacgaagaacttgtaagaagacagtcgtgtttatgatagtgctcaattggctcttctcattgttaggggttatggtaagtactgttttcttatgcgctgccccagcaatgttattgatgtcattgttcattactcagatggttattaatgccgaggttgctagatatggtttctctgctgtcttggataaacttaacaaactggtaaaaaaaatctga

SEQ ID NO: 162569 - DNA, 210 bp, Enterobacter cloacae
atgggaattttatgtgagaagtgtgatgccaataatgacccggatattgatagttattacaatggcgtagttgaaaacaatttaacctcttacacctacgctgctaaatttacttgctggcgctgtaagcatgaaaatgacgtcaccattgacacaatctcatctgatgagattgaagaagtgcttaactctcaaatcaggtataactag

SEQ ID NO: 162570 - DNA, 339 bp, Enterobacter cloacae
atgaacccgaacagaaagccaccacaaaaattcgacaacatgtgggatttaattactgaactgaacgctgtgggtcatcctgatgataacctctggtacaaaggggatattcgtgccggagaggaacaggtcttttcacccaggtattttctatcagcggcctgccgtttaatcgggcaacgcaacagtgacggtaaatggacaacgttgtacggatacgacgatccagtttcactaggagggccagcccctgcaggagcacataacctagccaaaatgaaagatacattagaatttttcgtccctaaaggtgatggtcccgtccaggctaacgaatga

SEQ ID NO: 162571 - DNA, 636 bp, Enterobacter cloacae
atgaatagagacgttctttatcgcgaaatggtgcctggagactacagtaatctcctgaaactggttatagatacttggcgatataatgaatgggtgactgagaaacttgttgccccacttgctgagaaattcatggtagagacacttttgaactcatctcagcgtatcgttgcgacatatgacgggaatttaataggagttttagccgcagaaactgctattgaggatccgttttcaattttatgtaaatgcaaagaaattgatgccttgttaaaattaacggagaatgatactggtgactccacaatcttacatcagtacttgaagacaaaaaggctaaatctggatatgcttgaatcccgatatgaatgttatcaggggttaataagtttgctcatcgtcaaggatgggtataaagggttaggtatcggctctaaattatttggaatggctaatgattactttcatgataataatgtcagtcgtttttatctgtttacagatagtgcatcaaatgtacgcttttatgaaagcaaaggtatgcgcagagtgagagagataagttacaaatgggatgaaaatgatgttcagtcaatcgaagaatattacatgtatgaagggtttactttagaataa

SEQ ID NO: 162572 - DNA, 330 bp, Enterobacter cloacae
atgacggctctacatgttaaccaatatattgcgctgactctgtcagtgattatggagactacagcaggtgtgctggttactgttccgctaaggtttaatatagcagtaaaaaatgctgccttgttcgggagtatttttgtttcctttatggcgctggactatgctttatccggcatcagtttctcggtagcttacccggtatgggcaagcgcagggctggcatttactgctgtcatttgtgcagcatttaaggccaaaggattagttaaagctggcgcgcttggcatatttttaatcattgcaggtgtcatggttattttgttttcttag

SEQ ID NO: 162573 - DNA, 579 bp, Enterobacter cloacae
atggaagcgccagggttacgagaagagttattgtctgcagcagtcaaattgtttgtaaaagacgggattgaaaacgttaaaaccagacagctaactgattttatggggatttcaagaagtcatatctatcattacttcagtgactggcaacaactttgcctggaggcctgttcgcagcatcttgaaaaagaggtagagacttttatccaaaccgctgataagaaagaccctttaacgaagttacatatttttactgattactatcttccgggccacaacgactcaagctggtatctttatcgtgcagtcaactaccttggcattcacaaccctgcttatgatgaacttagtagaaaagtcgctggtttgtggttaagtgaaatgcaaaaaattcttatcgaaggtgtcagtcttaatgtattccatgctgctgattgtgcccgcacgtcgcgtcagttgatggcgattttgaatggttactccgatgtcttaattactaattttgaacagggtgtcacaaagactattgatgaggacttgaagcattttcttgatgaattcatagtccaggccaattga

SEQ ID NO: 162574 - DNA, 2211 bp, Enterobacter cloacae
atggctcaactcaggatccggggcgtaagaagctacgcgcctgaccgggatatctgctttgatctcagcagtaaggtgacactcatctacggccagaacggctcggggaaatccacggtatcaggctatttttatgaccggcaggcggataaataccgacactgcgcctttgagagcccgcacatcagccactttcaggtctttaatcaggaatatattgacagcaaattcgcccgtgcggactatcagcccgggatcttcactctcagtgaggccaatcaggaaagccaggataaaataaacagtaataataaagaaagaacaaaactgagtgcccgcctggagaagcttaatgaggagattgcacaaaaagaagggatgaaagaaacgatcgtcgaccactgtgccagggatattttcaaccggacagtcaatgacaggaaaatcctcagcgatttccttgatggtgccaaaattaaaagatcgttttacgaacgtatggttgcaacaccgctttcagacgtgcgtaccacaactgaggaactgactgataaatggcgaatgttaagtcaaagcgaaggaacgcttgtcagcgaaattcatattccacgaacaactgtcttaacggaagaaacaataaaactgatgcgggaacctgttgtgcctgcaagcagcacgcaattctcttcactcattcagaaaatcggtaatgcagactgggtgcgccaggggcaacattatatacacgacgatgtttgccccttctgccagcagccctttgatgtcatggcctttttgcgcgaactcactcagatgttcgatgaatcttatcagacttctcttggagtgctgagccaggcagcagaagggctggctcaggactgtgatgccctggccgaatttgaacaccgcgttgcaactcattctttcgttgatgagggaagtcagattttatctctggtgaaagcggtaaataaaggctttcagattttgttacagcaactccttaataaaattaaagaaccgtctctgaaggtacagcctgagaaccttcaggaatccctgttcttactccagaatgaagtggatgcgttcaatacccgggtacgggaaaataaccgactggctgaaaactttacccaggaaaaaaagtccctgtacgctgatatcatggcgcatctcagagggatttgcgaagagttctttaccgaacgtgacaggcagcttggtgaactacagaatgaaattaacagtaggttgcgtgatggcgggatcctcgaagcaaacaagaagcagctggatgacgagacgaatgccctgaccggacaactctccgacatacaacccactattgacagtatcaacgcgaatctcaggctgctggggatcaccggctttgagatcatctgccatgatgctgagatgaaactataccgtctgcgccggggaagcgagcctgagaaggcggaagtattcaaatccctcagtgagggtgagaaaacaatggtttctttcctttatttcatagaatcatgctccggcagtctcacccctgaaaccattcacccggagaataaacttattgttattgacgatccgatttccagcctgtcacataactatatttatgaagtcgcagctcttattaaacggaaagttataaagtcaggtgcagcgagacatgtagtgatactgactcacaatatgtttttcttccaggaaatactcttaaacagcggccgcctgcaggataacagagaggcaccggtgaactggtctctgcttcgaattattaagtctgactacagttcctgcgagaagctctccatgcacgagatactcaatgaatatcaggcgttatggcagaccctgaaagacgtcagagatggaaaaacccagcctattgtgctttttaatacgatgaggaatattcttgagtactatttcagttttgcctgcaaaactgaaaaacttaaagaggccctggagtctctggcaagtgaacacagcgatgccggagaatacgattcattttatcgggctatcaaccggcactctcattctgatggccgaaatctcttttctacaggggtcatcgataaggaacgttatctgagtatgttcagaaaagtgtttactcagacagacgacgatgatcactatcttgccatgatgggggaatcagcagacctgtcggaaacagtggagtaa

SEQ ID NO: 162575 - DNA, 1095 bp, Enterobacter cloacae
atgctgagccagctgaccctgcgctttcacaaaaaactcatcgaggcgctgaaaattcgtgctggccacgaaaacacctccgtcaatgccctcgctgaacgttttctggacacagccctgaaaacccccgcgccggatgacagctatctggccctggtggctgaccgggagggcgccattcgtgagatgtaccgtaaaatcattcttggccagaccttcggcgtagccccggtcacgcgtgatgaattgcgtctgttgctcggactggcccaggaaggctgtgtccacggccgcaaccggctggtcacccgtccggccctgcagatattgctggacattaccggcgagctgctggcctggcaggctgaacataatatgcccatcgatctaccctatctgcagggaatttttcacctgcagggtacggcgccggccgctgaatacacggactttctcgcgacgctgcgtcagcgtccaatcatcgaccagggctacgccgaacggctgctgcgcccgctggcgtcacagtgcttcgatctgcgtaccttcccggaggaggccctggcgcagatcttcaccctgccacgcctgcaggcgcttttaccgctggcgctgcggggcgagtcctggtgcgaggaggatgcgcgccagctggcagaggccactcaccccgtgatcccggcagttagggagacgatagaagcgggtacactgcggtttgatattcaggtggacggacaggagatcgccccgcggcccggcggctggtatgaagttccgcgcctgcacctgctgatcaccggccaggattttgtcgtgccattcggatggactcatttctcggagctgctgggcctgttcactctgtatgcccgccatccggacgcactcgcgcatggccaccacggtgagcacgtgatgttctcaccaccgggtaacgcctcaaaggacggcttttttggcctcgacgggctgcggatcttcctgccgccagacgacttcgaaacgctgattcgtgagctggttgcgcgctgcagtgaaggaatcctggctgatgcgctgaatggtctgcgtggcctgtacggagatctgtaa

SEQ ID NO: 162576 - DNA, 2256 bp, Enterobacter cloacae
atggctcattcaacagaaccgcagttgtccggaaaacaccccgaccgggccgtcagcacaccggaggaagatcgctacggatttacctacattgccaccgagctagcccgtgccattcaggggatcggacgggagggcagtgccgtagttggtatcgaaggagcctgggggacgggaaaaaccagcctcctgaacctgctgcgcacggcactggatgaacagaaagaagaacggacgtatgtcctgagcatttccccctggcttgacggcagtgatacgtcactggtggcatcacttctgttgccggtcgcaggcatcattgccgaagaagaaaaaaaacggcttacagacgtcgaacgggcagatcttaaagagaaggaaatgctgactgacactacccgcacgctcatggattacacccgagcgaccgcccgaagactggctccgctcgcgcagatcgccgccgtgatacccggggtccccgatgccagcggagccctgaaagccctgtcggattcggactggctgaaaggaaaagaaaaaaccacggcagaaatgcgcgccgaaatcgcaaagaaaatcgcggagctggatctgagtttcatcgtcctgctggacgatcttgaccgtcttgaaccggcgcaggcggtggaggtggtcaggctggtgaaatcggtcgccgattttccccgttttcgctacctgctctgttatgacaaagctgtcctgtcacaggctatcagtcaggggctgggaattcctgatggcgacctgtatttacagaaaattgtgcagatctccttcggattgccgcgtccggaaacctttgtgctgcgccggcaattcagggaagaggccatcaggttatacgaaacggtaaacgggcaagccgcagagccagttatgcgggccgctctgacgagcgtcgccgacatttatggtgcagcactaaaaacccccagggaggtccggatagccattaatgcgctggaattccgctatgcgagcatgcgggactatgtttatttcccggatctgtgctttctgcaactgctccgcaccacgaatgtcggcctgtatgactgggtggaagcatacctgtctgaacgggcagtggtggagtccggcgaaggctatgtcagtgaagaagagctgaaagtaatgaccgggagcctgcagactcacctgtcccgatattttcctgactcagcgcataccatcgatgcgctgagtcagtgggttccggggatctctaccggggtgacggacctttccatccacctgttcaggacgggaaacgaacaggaaaaatccttgctgaccgcaggaaggcggctgggtagcctgacgtactggcgatactatttcgccttttcggccccgcaaaacgtcctgcaaccggaggttttcgacaaaatcttcgcggtggcaggtcatccgggaaaacagcaggaactcgccgaattgttgctggggtatatccagaacataaatttatcttccaggacctggtttgagcacatactgacccagctgacccagccacatatcgcatcccgcactcccgctgaatgccgcggtttgctgcgattcttcctggactacggcgatgaaatgctaaggcgctaccaggcggaagatccgcggtttgagttgcatgacctggacacctacagcgtggctgaccgcctcatcaggcggatgttacaggataatgcagacgataccctggtcttcctgacagaactggcccggaacggccgggcctggtactggatgacagaatatgtgcatcacctgctgtggcaacacgggatggccgggggcatatcgaaagatgaacaggaagagtggatgtcccaggacacattagagacgtttcgggacacgcttggtttcaggctgaacagtacagccatcaccgataaactgccggatttcaccctgctgaacaggtatatccatgcatggtgtgacattagcggagtgcacgccgtacgggaatgggtgacctctcagatccaggaagatgaggcttttctgaagttgcttttacaattgcgggatcatcgcaccaaatcagtaaagagggggtaccgtaccctgaaactggccagcctgaccgaaattctgggggaggaagagctgattaaaatacgtatcaggcatatcaaaaagacaggctattatgcagaactggttgcccaggtcgagcaagccattgcaggattccggtactcacaatccgatcgctaa

SEQ ID NO: 162577 - DNA, 1545 bp, Enterobacter cloacae
atgaaatttagaaaatcggtgctggctgccggaattctcgtgcccgcactcctgatcacactattgtcatcaggtatggcttatcgacagctggacagggacactgccgtgacggcgggtattctgatgagccaggtcgaccacatcacatccattgccctgcgcgcgaatctggtgactgccaggctttccacgcggccctgtgaaagcgtcctgcagcagatgacggagaacggggccctgacgccctatatccgcagcaccggacttatccgggatggtatattaatctgttcatccgtgaccggtgccaggcagcaaagtgccgatgatattttcggtgttaccgtttcagcccctccgggtcggataaaagtcatcgctacagaaggaaccagcagcgtgccaggccatgctgcagttatctacgcattcggcgtcggcaaccggaccacggcgttcagtgtggtggatgcacggtatttcgtggacctgatggactccctggatgatgaggatcattcggctcagcagctccgctttaatggcggacccatcatttccggtcgggagaaaaccgccccccgatccaaagtgttcaccgctgagttcagctctgatgtaagtcaggcgcagcttcggatccttaccccgccgctgtcgcttcgccattacatcctgcgcaacctgattttcctcggccccctgtccttgcttctgacgttagccatgctgtacatgtggcgcctctgggataccagaaagatgtctctggcagaagaaatcaggaaagggatggcagatggggaattcagcgtgcactaccagccgttctgtgacaccgaaactggcatctgctccggcgccgaagccctgatgcgctggcaacgtcccgacggcaggagtatttcaccggaggtatttatccgggccgctgaagaggaaggtctgattatcagtctgacgcagcatttgtttggcctgatagaagaggatgtcagagtctggcaggtgaacgcccctttccatctgggtgtcaatattgcggcccctcacctggcggaccggtcgtttactgctgatgttctgagactgcgggtatctctggacgccgcatttcgcctggtgctggaaattaccgagcgcagcctggttgaggacacagaaacggcatcagtgaaactcaatgagctacgtcagaaaggctgtcaggtggccgtggatgattttggtacgggctactgctcactgagcctgcttcagagcctgccggtggattacctgaaaatagacaaaatattcatcgacagcctgacgtcagccgatgtggacacaccggtactggacaccattgtcggcctcagcaggcgtctgaaccttaccaccattgcggagggcgtgacggcagcacatcaggttgactggctgattaaaaatcaggtgccgtacgtgcagggatattattatggcaggcccatgcctgccgccgatttttatcgatggtacagtccgatatgcatgcataaggccccgccagggccttag

SEQ ID NO: 162578 - DNA, 132 bp, Enterobacter cloacae
atgttatatcaggaaatgactcgtattcaccctcccaatttttatctcctgggattttttttaactctctccagtattttataccttcaacttcgtgcgattctcgtgcaggggtatatgtatgaagagtga

SEQ ID NO: 162579 - DNA, 822 bp, Enterobacter cloacae
atgattgatgatccattaccagacgattggagagagcttcaggcaggtgttcagcgaatttttcgaaatgtgggtatgaaggctgatgttgaagttgatttacaaaccccacggggtacaattaacgtagatgttcttgctattgataccagaagtgttgataaaataaaatatattgtggaatgtaaaaattggtctaattcaattccgcagtcagtagtacattcttttactactgtaatgcatgaaacaggtgcaaacatcgggttcatagtcaccaagcagggactacaacaaggagcaattcagtatacgaacatcgtcggtatgacatatttagagttccaagagcgatattttgaagcttggtggaaaaggtatttctgcccccgcattggtgatgcggctgatgagcctttccaatatgtcgaaccattcaattctcacagagatcgtgaatatgataggctcactcccgaaaaacaggactgttttgatcggctgaaaaaagataccgaaataatagtaacgttttttactatgtttaatattggcattatgccaaagctatttaaaaaaagtgatatcctcatcccacaaaagaatcttgatgaatttaagtcaaaactttcaacgttattaggttttacagttaatacggattgtcgtacttttagggaccttttagaagcaattataaattatctattagaagttaagggaaagtttgatgcaatatttggtgggtctatatttgaacctaaaaatagtttctctggggtgacttttgacggtcccccactggatgaaggtatatattaa

SEQ ID NO: 162580 - DNA, 771 bp, Enterobacter cloacae
atggaattgtattgtgagagctcggatgagaaagatgcatcatatcttctttcttatataaatgatgttattttgcctgcttcagtcgatttttttgaaaaactagaatctaatacgttgagattgcatcatgttttctcatttaatgcaattcttgctcatgcgacggattatatagtttatatcgttaacaaaaaagtcagtatgaaaagagtagatttcctgagaggttttgatgaaagatactctgttgatggttgtagttttattaataataagttcgagctgttagatgctgtaaataattcatttaaacacgttgagttaaaaaaggaacgatatcctgaactgataaaaagatatggtgatctttcattccactgcttaaaagaaatttctggaaaagttttctttagaatgcctagctatcagtttgattattctagagtagttctaaggccaattgcaaaaatattcgattgtgggctcaaagataataatgatatcgatgattttataaatggaagaatctgtgggagttgtggttatggtcatttttcatatgactatgaaccatatgacgcaaatgatagaatgatagattactgtaacgcacagtgtatggactgcggtgagtatgaagatgactgtgattgtcatgattttgaatataataaagaaaaaggtaaatataaccctgatttagatcctaacttcgatttcgatgatgttatgtctaatattagtggcacaagggagtggagtaagtga

SEQ ID NO: 162581 - DNA, 681 bp, Enterobacter cloacae
atgccatcaatgacgtttgtagtgctcgcaaaatcagtaaaacataagaaattctgtgtcgctggaaaattatttacaaatggagttattggcgactgggtgcgccccgttaaccccgatactgacactgatgcacttacatataaaaacattgaatattccagtaaaaagcacccagaaatattccatgtaacttcatttaaatatctccgaaacgaaccacatcagattcagagagaaaattactcaatcgacccttctatttattggagtaaagaagggattttcagtgttgataatattgatagtcttgttgataaccctccaacgctttggattaatggtagctcttcatataatggtgagaatgaccgctttctatcaaacttagttgttcaacctctccagtctttatatttcatacatgtcatgaactttagaataagaatcaaaagagaaggagctgactttggtaatgacacgaaaaaatttagaggttattttacatacaataatgttagctatgcacttgtaattactgatccagagatttacagtgcatatggacaaaaaaatgtgggtacttatgatgtaggagcatgctatataacattgagcactgcgcctcataatgatgggtattgctacaaatttattgcagcagtagttgtgttagcttaa

SEQ ID NO: 162582 - DNA, 441 bp, Enterobacter cloacae
atgaaggtattttcgattggttttactgaaaaatctgctgaaaaattctttactctgattaaatcacaatcagcgattaaaacattaattgatgttcgtttgaataatgtttctcaacttgcggggtttgccaaaaagaatgatttaaaatacttccttagagaattgtgcaatgttgactacctacatgtgcctgatcttgctccaacaaaagagatgctaactccttataaaaaaggggatgtatcctgggaagcttatgaggataacttcttgaatcttatggcaaaaagaaatattgagcgaatggataagtccatgattgaagatagctgtttgctatgtagtgaacacaaaccccaccactgtcatcgacgtcttgtgatagaatacttaaacagccactggaatactgattttgaggttaagcatttgatatga

SEQ ID NO: 162583 - DNA, 351 bp, Enterobacter cloacae
atgtcgattgattaccaacttatgcaggccagaacgacccgcatgctcaggcaaaacggtacggaatacagcgtaatccgtaaaggctctgtgactgttattggcggagtcgagcacaaaacggatgatgttcagttcactgcgaacggggtaaaaaccgaatatgagccaggcgaaattgacggaaccgtcattgaaaacggcgatgtacggattgccttcactgctgagaaggaaattaaaaccggcgatctgattgacgtggacggcgtaagccaccgcgttgttaaacctaacccggtgaaaccgggcgctgtggtgctctgctacaaagctcagttgagggcataa

SEQ ID NO: 162584 - DNA, 861 bp, Enterobacter cloacae
atgttttcaattgcagctaatgtcaggaattcgctaggtgagtgccccctctggtgtgaaagaacacgcagagtttattggaccgacatcgaaggcagtgaacttctcgccttagaggagggatcaggtattgtgatgcgatggtctctacctgaacgactaggatcctttgcttttaccgaaaaagatgatgtgctattgatggggcttgcatcccggcttggcttctatgaactcagtacaggtagtttcactaaagttgcagactctccaggggattcgggcactcgtataggtgatggtcggtgcgaccgttttggtaattttatatttggaaccatggatgatagttatcctgttaaagccgtcggtcaatttcacagactcaattcggtaaaaatgagtatcgagacactttccctaccaagggtggctatccccaacagtatttgtttcagccctgacggcggcacaatgtattacagcgactctatgcagggccgtatattctgttgcgactacccctctctaaacaaccagcgagtgtttacagaaacagagggtaaaggggcgcctgatgggtcatgtgtggatgcaatgggctatttatggaatgccgaatggggaggaaatcgtcttgtccgttacaagcccgatggaacgactgatgctatactgccttcccccggaatccagagcacctgtcccaccctggcaggtgaagaattcacaacgctttattgcactagcgcaagcgtgggccttcctgaaccatcaaaacatgatggcgcgttgttaaaggctaactcagcagtattttccggtttacctgagagtcggttttcaacatatgaaatgtaa

SEQ ID NO: 162585 - DNA, 918 bp, Enterobacter cloacae
atggatcggatacaggcgatgcaggtttttttacgtgtagctgaagccggaagctttgtacgcgcagcagaaacactgtcgctaccttcatccaccgtcaccagcacgattaaaaatcttgagaagtatctgcaggtgcgtctgcttaatcggacgacaagacgagtgagcctcacccctgaaggcctgcagtaccttgcccagtgccgtgagatcttgtcgttaattgaacacacggaatccagcctgaccaattctatcaggcgacctcagggtcgattacgggtggatatgccaggtgggatcgctcagttcatcgtgatgccaaatcttaaagacttctaccggctctatccggatatctatctgatgattggcgtaagcgaccggcaagttgaccttgtacaagaaggcgtggattgtgttatcagaaccggcgaattaaccgactccacgttggttgcccgtccgcttggaaggtttcgctggataacatgcgcctctccagagtacctcagtaaatacgggattcccggaacacctgatgagttgataaagcatcgggcgatccattacttttccgcttcgggaagacgaaagaatgaactgcgttttaggcgcggtactgagatgctttccgtcccagttaaaggtgatgcggccgttaacgaaacggggctttatatcaaactgtgtcttgaaggtttcgggcttgcgcagcttgctgagaatattgtctctgaacatctgcagaggggaacgctggtagaggttctggttgaatggcagccggcttcagtcccggttaccttgctttacccgcatcagcgcttcctttctcccacagtccgagcattttctgactggatagccaagattttcacagatggcgctggagatataaattcctcgttgtaa

SEQ ID NO: 162586 - DNA, 954 bp, Enterobacter cloacae
atgagttgggataatgattcattgtggtcaaaaagtaagatttattttcaaagagcatttaatgatgacagagattcagagatttttggactatggtgcgcaatggggcttgagttactttcacggtcaactatctcacactttagtccgtgcttacttgctgagcctgataaagatcaaaaaaatctccttgcagctttaggtcttaacgcgaatatgtcgcaggctaagtctatatctacatctcaggtattgaaactttgcaaagatttgattccagatttcaatgaggaggagatcacgatagctttggctttggctggacgtagaaatgaagaggttcactcaggcaccgccgcttttgttgaatataaacctcaacaatggattggggcattttataaatgttgtagagtgttatcacaagcgcaagatagaagcctagaagatctgtttggtgaagatgaagcgaaagcggctcatgaaattattactgaacttgataagcaggttaagaaatatgtaataactcaaatcaatgcttatgagaaagtttttaatgataaatcatcggaagagaaagaggcaataaagctaatcgctgaacagcaaggcgaagatctttctcataaaaagcatcacaaggtgaaatgcccagcatgttcttgtaccgctacagttcatgggaatgaatatgggaaagagcaagtggaaaacaaagggactgagataataactaggcgatcagtaattccaactgtattttcatgtccagcttgtgggttgaaactaaatggttatgctcaattagctgctgccggggtagcagatcactacacaaatagaacacattatacccctcaggagtattatgagttaatcgacccgaatgatcatgaatcaatggcctcatatgcagaggatcatgggtactatcactttagtaatgattga

SEQ ID NO: 162587 - DNA, 633 bp, Enterobacter cloacae
atgtgtttttatatgaataaatataatattgtagaagaatgcgattcagtagagagctttctatcgttggctaagagtttaggtgaaataatccctcaccctaatggcgaagtatacgatgtgattatagcaaatgacggtgttaatgcaaaaacaggttctttcagtcaaaatttcggttttgccgaatttccattgcacaccgatactgccttttgggcaataccagcaagattattaataatgtggtcacccgaggctagcacaacatcaacaaccatgttgtcgtggagagatatagtagacgctttctctgaaagcgaaaagaaaatcattaataatgctatatttaaagttcatacatatgaaagtgtaaattatcgaggtgtaaaattctcttctccattaggaaatggatttagattcgatccgaatataatgacacccgcaaacgaacaaggtaggaaatttatagagatatttcatgaaataatccgagggatgaatttaattaattttaattggtcgggctcaaatgctttggttcttaataactggaacatgcttcatggaaggagtaaggtcgagaacaagcatgcaatccgaaaaatatttagagcttacgtgaggtga

SEQ ID NO: 162588 - DNA, 240 bp, Enterobacter cloacae
atggagaaatgtatgaactcattagacaaagcaattgcaaaagctggtagcgcagcaaaactagccgcgcttctatcaactagcaatatgaatgtgagccattggcgaaaccggaacaaagggcgagttccacaaaatcgtgtgctttccatttattacgctacgggtgttactccccacgaactgcgcccagatctctacccgaacccaactgatggtttacccaaacaggagccttaa

SEQ ID NO: 162589 - DNA, 1608 bp, Enterobacter cloacae
atgtcagacaaaatatttgaattcaaaagctacccaatagttttcataggttctggcatttcaaaaagatatcttaaaaattatccaacctgggaggaattgctgcatgaatattggaaaaaaacaaacccggaaatagatttttatagttatttattaacaataaaagaaaaacataaaagtttatttgataatgaatctgatttagatcacaaaatctataccgaagctgcttcaaagattgaattagatttcaatcgaatgtttactgaaaacactatcaagcttgatggattagatgctaaaagagtttttagcgagaacatttccccattcaaatattccatctgccagagattctctgtaactcaacttaaagatgatattaatcaagaggagctaaactcgtttaaagttcttctaaaaaaagccaagatgattattacgacaaactatgatgcttttatcgaagaattactactagagcaaaacataacacctaaactttatataggtaacaatggttttttcgaagataccattggttggagtgaactctataaaatccatggggatattaaagaccctaaatcgataattataaacactgaagattacgagaagtatgatgacaaagctatccttataagcgctaagattttatcgaacatgataaaaaatccaatattatttattggttactcgctaacggacagaaatgtaaaaaaattgctttcggatttttcatctcaattacctaaagaagatggtcgtaaatctgctgaaaggattatcctcatacaacataaacctaacgagcaagaggttgaatcaaaacagattacagaccaacagttgcaagttacttatacttcagtagaaacagataattatacaaagatttataatgagattagcactgtcaacgaagggttgtctccgtatgatgttcttcgttatcaaagagccataaaaacacttattgttaatgaaggcgagaaaggtaatttaaacacattattagtttcaccttccgaccttgaccggttagaagaaagtgttaagcagggtaagaatctagtagtcgcattgggcgataaaaaatatgttttcactcaaataaaagaactcaattatcttgaggattatttatttgaaaaaaacgaaatatcaaataaattagcaatcgagttcataattggctcaacaaacactttaagacttccattttctaaaattatcgcatcctccagtgttcaacagttagagttaacaccgaaacttttgggtagattaaatcaaagaatagaaaggcatggcaaacttgatgcgataacatctgcaataattttagataaagtaaatgcggcaaaagatttttttgaaatcgatgagataaaaaattcggggctaagcaaacagaaagagttatttgttataattaaaaacataaaaaatctctcatatgattcgttagaaaaatatgtaaaaaatgaagctttcccacagttcaaagtttgtgaaaatgacaatttaaaaacggactacagaaagttattcctagcctatgatttgttaactaatggtgacattgaaaaattgcaataa

SEQ ID NO: 162590 - DNA, 321 bp, Enterobacter cloacae
atgactacagctaaagagctaattgataatgctcaatgtaacctgattatcttaggtgatgttaaggctactcaatggcgtaacgataagaaacttacctacgctaaagctaggcatgaagcagagcatattgctattacctgctctactgatgatcgtaaagcagaagcaataaagtttgttcctttggttaaagagaagaagcttaaatggtctgagattagcaaagagatagaagctgttggtggtagtctagctcttcaaagctggtacacattcaccgtgacctgctccccgttgattaatacaccccgatgttag

SEQ ID NO: 162591 - DNA, 207 bp, Enterobacter cloacae
atgaagaagatagctattctctcactgaaagtatttgctctattcgctgtaatcacttggattgtaggtgaaaccagtgataacgatactgcttggatgttaccagcactcttaacgttcattgctattcttcctgctatttgggtaggtgcattaattaccatcactgaatcaatcaattttgttaaaggcggtattaagaaatga

SEQ ID NO: 162592 - DNA, 357 bp, Enterobacter cloacae
atgaaaaaggtattattaggtgttgttttagctgctgttgcttcttctgctatggctgaggatgctaaacatatgcttgttaacattcactgcactacattgcataactatgttttagatgattcaaaaagtgatgttggtgagatttcttttaaagggaaactatatccattaagtagcttttcatttcccaagaaaggtattggttctttagtttggaaagatgtaggcagtgatacagttacgctatcaattgatgaaacatctgttaatccagaagataacaaatatgttgcttttgactacacacctgatggtgttaaacatcgttgcttagttgagaatgattcagaatga

SEQ ID NO: 162593 - DNA, 303 bp, Enterobacter cloacae
gtggataagaatatagagatgtttcttaggcttggtggtgtatgtttctgtttatctgttgtaacgatgttatgcactaattcatcaagagttcctattttacttgcagcctttagcaatgaacaattgtttgatggttctattatctccggtgctctgtgtgtagtgctgtttgttctagctggcattagctacctaatcaatgcaatgaagcttagaaaagctaagcgtgaatatgaatggtctaaccagattaacactggtttcaaagaatggtctgatgaactaaggaacaagaaatga

SEQ ID NO: 162594 - DNA, 540 bp, Enterobacter cloacae
atgccacgtgaatcactaattgctttgtgtggctctccagaagctaaggttgagtttactaaagttagtcatgctgtcatgcaacatgctcgctatagtaaaagcggcacagcatcacaggcggcattacttatcaatcgtctgttttctggctgtattgccctgcttcctttcaatgatcgtaagctggctgctttctgtcttgaagcactagacaaatcatcaagctggattgaagcacattcagaagaagtgaaggcttatcacagtaagcaaaacctgaaagaaggtgatgtgtttattacctacaactaccagcataactatcacagcgtttactggtggcatggtgagacatgcagtgatgtaggtatggtctggaactgcaaagcattgtcttgggatatgctggatgaatggtttgtaaatgactttgataaagtagttcacgttctttgcaacatccccattgataagccaaacggcatcattcaggcaatggaagatggtgttaagtggatagaggctaatagccattga

SEQ ID NO: 162595 - DNA, 426 bp, Enterobacter cloacae
atgtatgttccaatttggttagttgccgtagtagtggttggtgtcggtgtagcgattaatcattactataagttgtacaggaagtgggaagccatagcagtcaacaattataggcgatggggaaagatgaagtacgagtatgagtgtgtagcagatctactcatcttagacagggattggctttgtcaaaacctaaaacctgagttacgtgaagaactatcacaaaactttcgtgtgaagtggcttaacaatccccagtattgggaaggactaagtaaaaataatcaattgtttgggccatatcctgaatacgaggaaatcagaaagcttgtgtacgagcattttcaagaatacaaatactgggatgttgatgaagagttatctaattacggtgtgaagatgaagcgctattcacgagactggtga

SEQ ID NO: 162596 - DNA, 666 bp, Enterobacter cloacae; identical to SEQ ID NO: 148000

SEQ ID NO: 162597 - DNA, 978 bp, Enterobacter cloacae; identical to SEQ ID NO: 160636

SEQ ID NO: 162598 - DNA, 294 bp, Enterobacter cloacae
atgacaatagatgaattcgaattcatggtagaggtttgtcgtttaaaaaaaataaatataacctctataattgatgcatgcagtaaagatgactcctcaagtagtactcaaaaattcaatgtgatgatgcatattcacaaaatatatcctgaaggtattccagatagagaaataattgttaaaactagaaattatttattcgaggatctcattgaatcgatgaaaaaatctaaatcacactgggatggtagggtaagtgattatttgaccattaaacagtttcttttaagttag

SEQ ID NO: 162599 - DNA, 498 bp, Enterobacter cloacae
atgaagaacagatcgctgtttcgaaaaagcctgctggttcattccatcagcctcgccttgtgctcgtttagtgcatacggtgagacattcaacagtagcctgctggtcggtaattcagcggatatggactggagtaataatcagttggtcatgacgccagggacttacgatctcgacgtttacgtcaacaacgtctggcgtggaaagttcaccttaacggtcgccaatgacgatcggggcaccgtacatattcataaagaagatgccacgcaactgtctattcaggagctggatgatgctatcgcgaacgctcactccgacatgattgacattaatacgttactccacggaggtaaaagcaagctggtaccgggagagttgcgtctggatctggaagttccgcaagcctttgtgaaaactgacagccaaaactgggtggcaccgcagaaatgggaccagggcattaacggtctttataccaattacaacgttaactaa

SEQ ID NO: 162600 - DNA, 1056 bp, Enterobacter cloacae
atgaaacaggtgattaatcaaaaatgggcaaatggatatgataataaaaacgcaccaacagttgaagtgttagataacagtcatatattaatcatttccgacgctgatacagattctgatggtagcccagacgctgaaattattgatccaaaatttggtactttacagacaagcctaagtcatgaaaatgggtggaaaggtaaaggaaagtttgtcaatgctcgaattataccctattttgtacttcctagtaattggttcatggttactggaattaagatttcgctaggtgatattgcaaggctgagttataaaaactcctccatttatgctatttatgcagatactggaccaaaagaaatcatcggtgaggcatcgatctctgcagtcgaatctcttggcgttaacccttggggaaagaatggaaaaatagttagcgggataaattatggagtcagttatgaaattattaaaaattctgcaaatctcgagataactgtaagcttcgaaacaatacagtcttatggcaaagaattatttggtgaaaaaataagtttaatttcaacaagcgaatcattgaaattagataacattttatccaatcaaaaaaatgggaaggcagaaacctttgtctcattcttttcttccaattatggtgatgttagggatgaagttttgaggtggttcgcccctataaataacggtagccctacccacaatggttgtgttgcacatttggttagctgtctgaagttgtgcaattttccatatcctgatttggattcccctgccgccatcaatgtcgacaatttttcagaatgggctgttgccaataattggtcgcgtatagacgatcgtagcaatatggaaccaggagatatttgtataagtggacccaaatcagagcctcatgaatttgatcatgcttattgctttgtagcatttgctgactctggctatgcgtacgtattacataaccaaaatgttggaattgcaaagcgctcacttgatggtgttgggtgtggggtatggcgctacgcacttaggatgccgtag

SEQ ID NO: 162601 - DNA, 738 bp, Enterobacter cloacae
atgagaacatttagccttgctatttgcacgcttctttttgcttgtacaaacccttatcctgtatccgtacctaagccaggtaactatcctggtattactttaaatgcagactacgatgcacttgtaaaaaatgtacgcgactacggtgaagaactgagtcaaaaatcacataaattacagtctcagaaatatgcctatactgattttggctaccttggttcaattgtgtctgttattgccgcggcaagcggtgctttaacgactgcattatatagcggaggtgctgctgttggaggaggaatggctgctcagcactataattatgactctcagattcaaaattatagtgtggcaaggaaaaaagttcagtgcatataccgaaagcttaatgaaagaactgtgaatgaatctttgttaataaagtttgatacccatagcgatatcgccaggattctaaccccttctattaatgatgctttggatgatatttattttgaacttgatagtaaacaatcttctatcgatcttaaaacgcctgatttaaagcttttagctaatgcattctctaaacaaaaagaaatatccccaaaaatagccagccttaacaatggatcattacctattaataactataagaataagtcaaaaaatgaagaaaatagaataattcttgctcaaaatatactactgggagtatctatatgtaaggttttaggtgatgccccgcagggggagtag

SEQ ID NO: 162602 - DNA, 645 bp, Enterobacter cloacae
atgctagatattactaacttgtggctgttttctttatcggtgttacttctatctataacgcctgggcctgatatggcctatgtcattggacagagtgttgctaatggacgtcgtgctggaatattgtccgctacaggtgttgctttagggagctgtactcatgctgtggcaagcgcaataggattgacggctctcataaccgcttctccattgatgttcacaatcattaagtatgctggagctacttatctggtttatctcggagtgagaatgctcgtagatacgctgcgagtaaaaaatgagaacagcgaaacaagcatgcataataaagcaaaatcgaaacctgcaagtttgctttccaaagggttcattacaaccataacgaatcctaaagttctcctgttctttatctctttctttccacaatttgtatcgccgaacggtgaacaccatgcatcttcttttttactgctggggctggtttacgcattgattgcattcttaacagacctaacctttgctttgctcgcaggaggggcatcggggctcgtttcagaaaacagaaaattgcagaaagctcttgatcgcattgttggtggaacatttgtcgcactaggaattagactggcgctgactcatcgttga

SEQ ID NO: 162603 - DNA, 453 bp, Enterobacter cloacae
atgataatagtagagaaatcagatccattttcttcagaatcccatagcttaatcgaaatgctgtcagctgaacttgccgcaattactggcgataatggcaaaaccaacttcaccgttgaagctatgaatgatgaaaaagcattatgggtattggcaaaaaatgcacaaggcaatgcgataggatgtggtgcaatccggccgttaacgcaacatatcgccgagcttaaaagaatgttttcagaccggagcatgcctggcgtgggcagtgcattacttacttttcttgaaacctccgcaaagcaaatgggctatcgagagctaaagctggaaactcgacatataaaccatcgggccgtcggtttctacgagaaaaatggctatgcccgtattgagaattatggtccatacataggccgagaagaggcagtctgtttctcaaaaacattgtgctga

SEQ ID NO: 162604 - DNA, 810 bp, Enterobacter cloacae
atgagtgaaattactaaagagccagtagaacaggtcaagcaagcatttaaagacaggatttcaagccctttatggggttatgtatttttctcatggcttggcttcaactggcaaaatattgctaagttatttatgagcaaaagagatgttgaagtaaggattgccgaaataacctctcaggggtggttttttgttcactacatcgtattaccagtgattgttggtgctgctctggctgccgtttccccctatcttcagcaatggctggctgcggcacataaaaaggcagaggataagaggaaagctgatacgctcacagaagagttaaggcttcttgatgttgatatggttaaaaaaaggaagtctattgaacttgcaaacgttgaagaattaactaataaaagtgagcaagctaaagttgataggcaggatgagaggaataaaaataggctcgaatttcaaaagttgaggggtgttaaaatatctaaggcaatagatgaaattgaaaagtcatttaataatgccaatgataaacttcaggataagttgaatgaaattaaagttgctgatgaaacatacaagctaaaaatgcagactcttgaaaacttagcagaaggtttgaataaggttgctgaactatatcacacatatcgggatgtcaactctagggaagagtttgcatcttttttgtctgaaattaaaaaaggtgattattttggctcagcacagcttgataagaattttgaggcaatggcccatagagaatctttgttagaagtttttaggagaacaacaaatattaagagttaa

SEQ ID NO: 162605 - DNA, 1269 bp, Enterobacter cloacae
atgtcccttaccgacgcaaaaatccgtactctcaagtcttctgtcaaaccttttaaagtctccgactctcacgggctatatcttcttatcaaacccagcggctcacgtcactggtatctcaagtaccgtataagtggtaaggaatcccgtattgcgttggggtcgtatcctgctgtgtccctttctgatgcacgacagcagcgtgaaggtatccgtaaaatgttggcgctgaacatcaacccggcacagcagcgggtagttgaacgcggagcctgcgcaccggagaaagtttttaaaaccgtggcactgtcatggcataaaagcaataaaaaatggtcgcagaataccgctgaccgtctgcttgccagcctgaacaaccatatctttccggttatcgggcacctgtcagtatcagaacttaaaccccgtcatttcattggcctgctgaaaggcattgaggaaaaaggtctgctggaagtcgcgtcccgtacgcggcagcacctctataacatcatgcgtcatgcggttcatcggggattcatcgacagcaaccctgcagccagtcttgacggcgtcacaacaccgcccgtcagacaccactatcccgccctgccactggagcggttgcctgaactacttgaacgcattaaggaatatcatcagggccgtgaactgacccggcttgccgtcctgttgacgctacatctgttcatccgttcgagtgagctgcgctttgcccgctggtcagagattgatttccaaaacagaatctggacgatccccgccacacgtgaagcaattaccggagtgcgttattccgaacgcggtgccaaaatgcgcacctcgcatatcgtgccactatcccgccaggccatcaccattctgaaaaagattaaagatatttccggtgatggtgagctgatatttcccggcgatcataatctgtataaaccgatgtgcgaaaacacggtcaacaaggcactgcgcttgatgggttatgacacgaaagatgaaatctgcggccacggattccgggcaatggcctgtagtgccctgatggaatcgggcctatggtcacaggatgcggttgagcgccagatgagccatcaagagcgcaacaacgtgcgtctggcctacattcataaggctgaacacctcgaagcccgcatgctgatgatgcagtggtggtcggattatcttgatatatgtcgggaaacctacgtaccaccgtatgtccggggtcagaaaaaccgcaacgagaccgcctga

SEQ ID NO: 162606 - DNA, 645 bp, Enterobacter cloacae
atgtttgctgattttggtgtcattaatttctggacgtatgtcctcggggcaacgctgattgttcttgttcccgggcctgaaacgatgtttgtcattaaaaccagtattgccggcggcacccgacggggctttgctgcaatattttccatcctcctcagcgatgtgatcctcgtgttgctcgcgtggtgcggactggctgcagtgatcagctccacacccgcgctgtttaatgccattaaatatgccggagcggcctatcttttttatctgggagtccagactatacgtgggatttttaaaacagatgccggaaaaaatgaagcccgggaagcgactgacaatgccggaggcattatcgggcgaggcatgctggtcactctgcttaatcctaaaacgctgcttttttacatctcattttttgcccagttcatcaatgttcatgcccagcattcctggatggcgttcatcatccttgcggccgtcatgttcgcgatcacctttgtgtattttggttttctggtctactgtggctcctttctgctgagccgcctgaaaggtaaccgtagattatctgccacaggcaatgcactggtggggatcttttttatcggatttgcagccagactggcaaaagccacctcatga

SEQ ID NO: 162607 - DNA, 792 bp, Enterobacter cloacae
atgatgaaagaaaatctgattggaatgtttgattcaggccttgggggcttatccgtcctgagggcgctgatgactatggctccggatgagcctgtagtatttgtcgcggatcagcagtactgtccgtacggaaatctgtctgaccagagcatccgtgacagaagccgggctatctgcgactggcttaccggccagggtgtcacgcaaatcgtggtagcctgtaataccgccacgagcatggcgattgagtttctgcgtgcacggtattctgtacccgtaacgggcattgaacccgcggtcaaacctgccacaacacagactgttaccggaaaaattgccgttctggctacggcagcaacgctgcggacagaaaggtaccactccctgacagatcgctacggcaggtctgtcaacgtccacgcggtgacgccggaaggctgggttgaagcagtggaaagtaatctgacggacgataatacacggtacagatacgttgctcgggtgattcagccgttgcttgatactggagtggatcaaatcgttctgggatgtacgcattatcctttcctgcgatcttatattgaaaagaccgtgtccacagagattgtcatacatgatccggctccggcggttatccgtcaggtcctgtctttgatgaatccggggcccgtgtcccctgtgcccgaaaaggaaaaataccgtttttacacaaccggcagtcctgcggacatgcaaatggcgctgtacagactgctgggactgcgtgcggttgttcagcggctgtccgtctag

SEQ ID NO: 162608 - DNA, 393 bp, Enterobacter cloacae
atgccgttgttaaaatttgacgtcatgaaaggccggacagaagaggaaatcagatccctcctggatgcggctcatgaagccatggtggaagcctttgacgtaccggaaagtgaccgttaccagagtcttacacaacacaaccctggtgagctgatacttcgggataccggcctgggctatacccgcagtgaaagggtggtgcttcttaccgtcgtttcaaggccgcggacgaaagagcaaaagcaggatttttacgccctgctggcccgcagactgaaagagaaatgtggtctgtctgctgatgacctgatggtctctctcgtggaaaaccgtgatgaagactggtcattcggtcgtggaaaggcggaatttgtcactggcgagctggagtga

SEQ ID NO: 162609 - DNA, 891 bp, Enterobacter cloacae
atgcagaacacagatatgctgccctccaacactgccagccagacctacaaatggcatgagacagaaggagtgaacattttttaccgggaagccggccctgccggcgcgccagttatcgtgctgctgcacggctatccctcaacctcaaaaatgtacgctccgttaataccgcttctggccatgcgctatcgcatcattgccccggattttccggggtttggactgagcgatgcgccagagccggacagcttcacctatacgtttgataatattgcccgccttctcggcaggtttttgagtgagatcggggtggcggagtatgttctcttcatgcaggactatggcggtcccgttggcttcaggatggccatgagcaacccgcaaaaaattgccgccattatcatccagaatgcgaatgcatatgaggaaggacttgggcagaagtggtctaaactggccttatactggcaggacccggaggccaatacggaccagctggatgcgtttatgtcttatgagggggcccggcagcgacaccttggaaatacgccatcacctgagcgatataaccctgaaacatgggaggaagaatatctcatgctgacaagacctgaagcccgggcggttcaggcggcgcttttttatgattaccagaacaacgtgaaaagctacccccggtggcaggaatggatgcgtcagcatcagcctccggcgctgatcctgtgggggaaatacgatccctccttcattgttccgggcgccgaggcttacaaacgggatttgccggctgcggaactgcacctgctggatgccggtcattttgcgctggatgaggcgaatgatgttgtggcacagctgacgctggcgtttctggatcgcacgcttcgctga

SEQ ID NO: 162610 - DNA, 1191 bp, Enterobacter cloacae
atgatttcagtgaggtgttaccagccggaaacaaaagcttttttactttcagcggccgcctgtggtgttctgattatcggaatgggattcggccggtttgccttcacggggatactccccgtcatgttgcaggagcatctgctcagtctgagtgaggggaatttcgcggcctccgccaattatgccggttacctggccggtgcgctgatgctggcgaaagcacgcccgtcagatgccagggttctttgtgcaggctcggtactggtgacgctggcctgtcttgccgccctggcttggctgcgctcacccgccggaataattgtggtaagggggattgccgggatagccagtgctgtgagtctgatatcggcttcactttggctgctgcagcacatgaagcatgctcacggtgcgccgctgatgtacgccggcgtcgggcttgggatctttatctctgccgagtgtattgctctgggtaaatacctcgggttgtccagcccaataatatggacggtctgtaccctcagcgtcgggctgctgtatggcatcatcttccggcttcttaacagtccgccagacaccctgactgactatcacagacctgccagcttcaccgcagtcagcggagcgtgtacacagtcagcggctctgaaattacttgtcatctatggcctggccggatttggctatatcatcacggccacctacctgccgctgtttctctccggttcgcttgcggggctggatcccgtgcaggtctgggctgtattcggcctggctgcggtcccttcgtgctttttctggcatcgtctggtgcagcgtgatggttaccgccgcagcttccggctgaaccttgtgcttcaggccatcggcgtactgctgccggttttcagccacggtctgatgttttgtctcgccagcgcgctgctggtcggctttacctttatggggaccgtcaccattgcgcttcccgaagccaggcgtctggccggtgcggtcagctttaacatgatcgccgccatgaccgcagtctatggcatcggacagatagccggtccgctgattgccggcgagctctattccctggccggatcatttaatccgtcccttatcgccgcagccctgtgtctgtttgcagccggtatgctggtcttccttccttccggccacgtggctttatctgaggagtaa

SEQ ID NO: 162611 - DNA, 918 bp, Enterobacter cloacae
atggaaacgaatctgttgatcgtggatataagccatgacagggtggtggttgcggaatttgatatggtgcagaggctgcccgtctgtactgatcaatattcactggtggagcacagggatgtggacgcggtactggcggtgcattttggccgcacacggcacagcgctgccgaaacctgctgcgtggtctgcgatgcgctcagatcaggcgagtgggtaatcccctttcacgatccgcgaatgcgttttacggagaatacccttaagacactgtcggggatcaaaaatctctttttcctgtcgccagcggaggcactggccttcagtaccctgatgcctgcagaacagggtattctgcatctggccggcgaggctgcactcagcggatctgaaattaacctcacggttgaactggataatggtgtggcctgtagtctgctatcgtccggcgcaaggggatgggagcaccaccgcatcaccggtgagccggaagcgctgcgggacatcccctttcttcaggattttattcaccacagtggcataaagctccttctgagtgaaagggggctgacgaagctgcacgactgggtgtgtatccggaacggcagggatgcgcagggcctgctgtcgaccgatatactggcggaacagggaggtgaagatgaagaagcccgtgagctgaccgctgaacattactttaccctgctgcagggttttatcggatatctgcgatcggttctgaatagtaaggggcacggcccggttgtcatcatccgcacgtccagtccttctgagtttgaaaggcgctaccgtcggcatgcggccgcgtcgtctgcggcccccgtttacctgatccgtcacgatacgccacgtctctacggggccgccgcctggtatacgcagttcctggcccgctga

SEQ ID NO: 162612 - DNA, 888 bp, Enterobacter cloacae
atgaaccatacgtctctggaaatttttcaggttgtcgcagaagagttgagcgtggtgaaagcggcgaagcgtctggggcgcgtgcagtccagtgtcacaacccgtatccagcagcttgaagaagagctggatgcacagctgttcatccgggaaaacaaaaaatttcggctttccccacagggaaagaaatttctggtttattcgaagaaaattctcagtctggctgaagaggcgcgccaggcccttcaccccggcgagccgaagggtgtgctgactctgggggcaatggaatcaacggccgcaagccggcttccggcgccgctttcggcctttagccgttactgtcccggcgttcatctgaagctcacgacaggcccgacccggcagctaaccgacaaagtgttaatgtccgagctggactgtgcgctggtctcgctgccttgcgatgaaagcggggacttactctgccctgagaatctgagcgttcaaccactgtatgcggaagacctgcgcctggttctgccggtctcgatgggaacggtgaaaaaaatcggggacatcccggaagggcagctggtgacgtttgcaaagggctgtacctaccgggagattgccgtcaggctgttaagccagatgtccggcaacggcgaaaatattcagatccaggaagtaaattcctaccatgccatgctggcgtgcgtagcatcaggaaccgccatgtgcgtgctgccgcaaagcgtgctgaccctgatgccgttgccggaagggctcaccacactgcctgcgggaacggcagtcactcagcttatctggcggcaggacttcagctcgccggccctggataaactgctttctgtcctgcagaaaacctcggacatcagtgggtag

SEQ ID NO: 162613 - DNA, 1119 bp, Enterobacter cloacae
atgtttctcgtgcggagattttatgtcttccctctgtaccacttcaagcaggtaaataagatgaataacactctgtgcgaacgactgaacatcaggtaccccatcattcaggcacccatggcaggcgtctcaaccccggagatggcggccgccgtcagcaataccggtgccctgggctgcatcagcgtgggggcgtccacgccagggcaggcggaagagatgataaacaaaacccggagtatgacggagaggccgtttggcgtgaacgtgttctgtcatgcgcacgctccgcgtaacgaggcgctggaaaaagcctggattgagcgttttcgtgagctgttcgcgcgctatgaagctgaaatccccccggcgcttacggaaatctattcatcctttcaggataatgaaagcatgacggacgtgctgctcgccgcggcgcccgccttcgtcagtttccatttcggcgtgccgtcgccccgggtcgttaaccgcttcaaaaaacgtggcattgtgacttgtgccacggcaaccagtgtcagagaagccctgcttatcgaagccgccgggattgatttcatcgttgcccagggctatgaggccggcggtcatcgagggattttcgagccccgggaggatgacagccagcacagcaccttcacgctggtgcagactgtcagaaaagcgtgccggctcccggttattgcggccggcggtataatggacggcgccggtatcgcggcgatgctcaggatcggagcctgcggggttcagttgggaacggccttcgtactttgccccgagtcctcagcgaatgaggcctaccgtcaggccctgaaaaatgaaaatgcagccagcacaatgatggttacagcaatttccggtcgcccggcccgctgtatcacaaacgatttctgtgttctttcccgtgacattgcaaaagactatatcccaccttatcccctggcctacgcactgggtaaatcgctggcggctgccgcggctgcccgcggagatcatggattcggagcacagtgggcgggccagggcgcagccctggcccgtgagatgccggcggctgaattagtgcaaacgcttgtcagcgagatgcagggggtctga

SEQ ID NO: 162614 - DNA, 483 bp, Enterobacter cloacae
atgaatttaaatattgatgagcgatatgatttcttaattgaaaagtcctttgaaaatgccagaggcatgattaaatacaaatacatagacaatataaacattcgaacattaaataaatggattgataattttcaaagtcgagacgaaaaatacttaagcgcggctattttaaactccttgatattcagaaatgaagagtcaattaagtctataggcgctgatatatttcaaatcatgttgcctcaacttctcgagcaagaaggaatatataaagtaagcaatataaaagactggatgaaactcttgaatggtcgcaattgtagaagtatcccaattagatttacagccattgatgatgtggataacaaagcagttaaaagtagtagtatcatcctgaatacattacaaaaattgttttttgatagcactctaggaactgtctcttatacacatctgacgctgccgacgatactccttgtgtag

SEQ ID NO: 162615 - DNA, 225 bp, Enterobacter cloacae
atgtccgtacgcgctaaattccgctgccacttcattcagaaagcagatgacaactcccaccgcactatccacatgagccctgtgacggctgacaccgaagaaaataaaacgtggtcaaagtacacacctgacggccagttgacgatgcatgtgtccaacccggcagcattcgaccagttcgagcaggggaaggaatactacatcgacattcaactagctcagtaa

SEQ ID NO: 162616 - DNA, 552 bp, Enterobacter cloacae
gtgattacccttgctgatatcaaaactgcatggcgttcaatagtgctggtggccgtagttatcgttgttgccatactgtgtgtcctgctggcaaatagccgctctgacgtcgcaatgctgaagagtgataacgacgttctgcgaaatgataacactttgcaggggcaggtgatcgccactcaggctttcaacttcaatcgttttaatcaggttgcagaacatgccaacaggcttaactccctgattgacaccagcactgaagaaaccgtcatcaaataccgggagattctccgccgtgaaaaaacctgtgatcttcctgttcctgctgatatcgctggtgggctgctcgaatacgcgtaccgtttacgttccagcgcaatgcacgccgataccaacgaacctgacacagccgatgatcgtgccgctgccgccagctcaataacgtactgccaggctgtgttgtggattaagccgctactggccgtgattgaaaagggcaacaataacttcgcgggtattcgtgaaatagagaaaacaagagcctcgcattag

SEQ ID NO: 162617 - DNA, 300 bp, Enterobacter cloacae
atgaagagttctaaccgtaacaggactatcacaattgctgaggccgttattgccgcagacaagaaggataaaactgtttacccagcgtcaagtttggttgaaatctggaatgcaaaatacaatttggtaccaccgaaagatctacctgctttaaagaatcaggtggagcttgaagttgctgctattcgcggtgctgaagctgcggactataaaataggcttagttccttatggcaatttctttgcagcgactgtttttggtagccatatgcctgctgagccagatttcaacgagaactaa

SEQ ID NO: 162618 - DNA, 174 bp, Enterobacter cloacae
atgaatacgaaaaaataccagcgtactttgacaaatgcaactgtaaaaagactccgtatggcacctttagcaattttcttatacgtggtgcctgccttatcatttcaaatggatttggaagttcattcaggtgatatgaatatcaagcaatcaatcatcttaaaaactaactaa

SEQ ID NO: 162619 - DNA, 609 bp, Enterobacter cloacae
atggccgcagggctgaacgacgggaaccagcataattacagcacctccctcagcggcggcatcgccctgcatggtcatggcattacgtttgcaccctacccgattaaagacacctttggcattgcgcgattaagcgagccggaaagcggtattcaaatcaccacgcccgatggaaccgtctggaccgatgcgtggggacaagccgtggtgccgggtctgcgcgagtggcaaacctctcagattgtcattgatgccagctccctgccacagggaatggatttatcgaacgggatacagaccgtttccgcagcttacggctcattcgcgcaggtggatttccacgtgctgaacacgcgtcgtctaatgctgaccgtgaaacgccctgacgggtcatggctcgccagagggcttagcgtggtggataaagacagccgttatatcgtgagcgtaatggataacggcagcgtgtttattcccgacgccacggatgcgcccgccctgtatgtggtggacgacaacatggcaaaaatttgccacatcacgtattcgctcagcgaagacaaaaataccgagtcctattacgaaaaagcagaaggaatgtgccagtga

SEQ ID NO: 162620 - DNA, 387 bp, Enterobacter cloacae
atgggatttacacctccacagttccctgacgtggctgacctggaggccgtgggtgaaggcattgctcacgtaacggaatatggattttgtgtgcatgatttttccatgttgccatgccagaagcatcgagactgcttgagctgcactgaacaagtttgcatcaaaggtgatgatgaaaaactggaacacttgaaaaaacaacgcgatggcattcgcttacagcttggtaaagctcaaaaagcctctgaagaaagtgtctacggtgcagatcgctggagccagcatcaatgtaagaagttagatagagtcgggcagcttatcgagattttggagtcgctaggcactgcgaatggctcggatcaggagttcagtccactgaagcgctag

SEQ ID NO: 162621 - DNA, 177 bp, Enterobacter cloacae
atggctaaatatttgaccagcaaggacatcaacatcctaatcaatctgattgataattgggaaggcaagttgggatggggagctctatgcgaagcggtggcacctctcattggtataaggccgacacgccagactcttaactcgcacgcgcaaatcaaagctgcgttcgggcattag

SEQ ID NO: 162622 - DNA, 2388 bp, Enterobacter cloacae
atgacaaacaaaaaagacctatcagagcgcgacatttgcaccatgtttatcactcctgcacttgagcgcgcgggatgggatatgaaaaagcaagtgcgtgaagaagtcggcttcaccgatggccgtatctatgtaaagggtaatttaaccacgcgcgggaagcgtaagcgtgctgattacattctctactacaagcccaatattccagtcgcggtgattgaagcaaaggacaataaacactcggtaatggacggtatccagcagggacttgattacgctaccatattggatatcccttcggttttcagtagtaacggcgacagcttttatgagcacgaccgcactgctagcagtggcaaggttgagggggaacttccactgcatcaattcccgtcacctgaagagttgtggcaacgctacaagcgttacaagggtattgaaagcccagaggccgagcgtatcagcgcccaggattatttctttgacggcaccggtcgcagcccccgttactatcagcaaattgcgattaaccgcaccgttgaggctattgctaaaggccagcagcgtattttacttaccatggccactggcaccggtaaaacatacacctcgtttcaaataatccaccgcttgtggaaagccggagccaaaaaacgcattctgtttttggccgaccgcaatgccctaatagaccaaacccggcgcggtgatttccgtcatttcaaagataagatgacggtcattaagcagaaaaaaattgacaagtcttacgaaatctacttggccttatatcaggggttgaccaactatgacgaagacaaagatgcctaccgtgaattcagtcgcgattttttcgatttaattgttattgacgagtgtcatcgaggtagcgcttcggaagacagcgcttggcgggaaattctcgagtatttccgtgctgccactcatattggtctgacagctacacctaaagaaaccgaggctgtctccagcaccgagtatttcggggaccctatctacacatactcccttaagcagggcatacaggatggctttctcgctccttacaaagttttgcgcgtagggttaaacgtcgatctggaaggttggcgacccgaggctggtaaaactgataaaagcggccgagctgtggatgaccgtatatacaaccgaaaggactacgataaacatttggtgatcgacgagcgcacacagaccgtagccaacaagatcacggagtacctgagcaaaacaaaccgctttgataaaaccatcgttttctgcgtggatattgatcatgcccagcgcatgcgcgccgccttagtcatcgccaatagcgacctaatgtcacaaaaccctaaatacatcatgcagatcactggcgacaatgaggaaggtaagcgcgaactggataattttatcaatccggaagaaacctatccggtgatcgccaccacctccaaactgatgaccaccggcattgatgcgcaaacttgtaagttgatcgtgctcgacagtaatatcgggtccatgactgagtttaaacagatcatcggtcgaggtactcgtatcaatgaggagtgtggtaagacctttttcactattcttgatttccgcaatgtcactgacttatttgccgatccggatttcgatggcgaccctgtacgcgtaaaagagttgtgtgaagaagacgaatttgaagcgccgaaagacgagttggctgagggtgaaaccatcaccgatgacgaaggtgaagaaattatattcgagccgccccttgagccacctgccattatcgacggtggtgacattatcagcgaaccaagcaaaaagttttacgtcaatggtgtcaatgtcgccgtgctcaatgagcgcatccagtatatggatggcaacggcaagttgattaccggcagcctgaaggattatacctgccagagagttcgtgaacagtatcagacgttggatgacttcttgaacaaatggcaccgagccgataaaaagcaggccattatcgacgagcttgccgagcaaggcattgtgctggaaaatctcaaagcaactatcggcaaggaaatggacattttcgacatgatttgccacgccgcttttgaccaaccaccgctgacccgcaccgagcgtgtcaagcaggtacaaaagcgtgatgtgttcacccaatacggcgaaagagcgcgcaaggtgctggaggctctactggacaaatatgccgacgaaggaattgaaaaccttgaggacatcaaaatcctcaaggttaccccgtttgatcagttcggcactccgaccgagatcattcaacttttcggtggtaaacagcaatacattcaggcattgatccaattagaacacgccatctaccaggccgcgtaa

SEQ ID NO: 162623 - DNA, 1986 bp, Enterobacter cloacae
atggcaagcatatcaggcatagtaaaatctacacgcaatatcatgagacaagatactggcaccggtagtgatgagttgcgtattctgcaactgggctggatgttgtttctgaaaattttcagcgacaaggacaaagagctggagttgatggacgacaactacagctcgcccattcccgcagggttgcattgggacgaatgggctggtgacgacgaaggcatgactggcgatgagttgttgcagtttgtcgaccgcaagctgttcccatccctttctgaaattgatctctcgaccgccaaacgccgtgccgtgctgttgcatgaggtgtttgcgaataactataactacatgaaatctggcattcacctacgccaggttattaacaagcttaacgagatcgactttaacaacagtaaagatatccatctattcggccggatctacgagactttcttgagtgaactgcaaagcgcgggcaccttgggagagttctataccccccgcgccgttacccagtttatgaccgagatggtcaaccccgtccacggcgaaatcgtgctcgacccagcatgtggcactggcggctttctcaccgccgttatcgaacatctaaaagccagcgccagtaatatcgctgagcgtgaggccattggtcagaatgtgcaaggatgggagtacaagccgttgccttatatgctggctaacaccaaccttatcctgcacgatataactacccccaatatccgctttggcgattccctgcaacgccctttgagcgaatacagccgtcaagatcgggtaaatgttattatcgccaacccgccctttggcggagtggtctccaacaacaatgaaaacaattttccgcagatataccgaaccaaagaatcggcagatctgtttttgattttgatgatccatcttcttaaggacggcggccgggcggcaattattttgcctgatgggtcgttcactggtgatggcgtcaaacagcgcatccgccagaaactgctggaagactgcaatgttcatacgattattaggcttcccaattcggttttcaaaccatatgcaacggttgccacaaatcttgttttctttaccaaaggaagtccaacaaaagaaatttggtattaccaacacgtttgcccgccagaaattaaggcttattcaaagactaagcctattgataacaatgactttgaggctattagaggttggtggtccaatagggtcaatagcgactactcatggtgcgtctccattgatgagataaaagaaaggcaattcgaccttgatattaagaatccaaatcgactgaaagtcgatgagggtatggtggcaagggattatattagggcgattgatgaggatctaagggagatatctgaagaggtgaaagatattttcgattcatactttgaattatctgattacacgattgtggagttgggtgaaatatgcaggattgagaaaggacagattggtataacaaaggctataccgggagagtatccattagttacaactggcgaagataggaagtctcataatgaatgccagtttgatggtgaggccgtatgcatacctctcgtttcatcgacgggacacggacatgcatcaatcaagaggattcactatcaagatggaaaattcgcgcttgggaatatattagcggcagcaattccaaatgatatgtcaattgtttcgacgaaatatttatatttctatctgaataattttaaagatgatgttgttgtgccgttaatgaaggggatggccaatgtgacattgtctattgcgagtataaaaaaaattaagattgttttgccgtcaatagaggatcaagaaaagctggtggttttgatggataagtgtgagagattaagaaatacacttttgaagtctgttgatgattccgagtcaatgattaaggctgttcttggcgaaattattacgtctgaatggatggatgatatttcataa

SEQ ID NO: 162624 - DNA, 276 bp, Enterobacter cloacae
atggacgaaaagaaattcaaagcccgtgcggctaaactggctaaaggcctaaaaaccaaagctgacttcaatcagttttcccagatgctgacgaagctgagtgttgaaacagcgcgcaatgcggaccacctcagacacgagaaaaacgacccaaaatcaggcgaatatccagctgtgcattatctatatggtgctaacagcttgaaatacatatcgtggaaggagtacaaatccgtcaccagtagactgaaaacctcccataggtggccttcatag

SEQ ID NO: 162625 - DNA, 156 bp, Enterobacter cloacae
atggaatcacacatcctcacagtcgatgaggcctgtgcatttttcacgatatcaattggagacagcaatgagcgatacactcatgccgatcaccgatgtgtgcgcggcaaccggctacaagaagccaacaatttacgaatggatgcgagacggtaa

SEQ ID NO: 162626 - DNA, 303 bp, Enterobacter cloacae
atgaaagagcttcgtttttatggtgctagtgacgatttatttgagtgtgaaggggctatccgagaagagattggatgcttcagcgtggctggaatttaccatctaaagtcatcagagggagagatgcaggtaattgcaaattacaccgataacgcttgctggtctattggggtctgtcaggttgaagaagatttgccgattcctaactggccggcgtcgtattccacacacgaaaaaggctacagcgtcatgctcacactgcaagtacctgatgacaccattctcgtaatggatgatgaatag

SEQ ID NO: 162627 - DNA, 588 bp, Enterobacter cloacae
gtgaaactgattgagttattggttaagaaacttggcggttggcccatcgataaaaagcaccatgcttttattgcgcaggataatgatggtgatttatgggcttttccatctgctccatccatgaattcagggcggggagactgggaagtaaattcaggggatgggtgttacttattcaatcttgaagtggctgatgacaataaagaagcaatcattactcgcgagcgatacgaagccgcacttgcagccagcaagacagaatggagtgggaacggtctgcctccggtgggcatggaaatagaatacaagtttactaaagtaaactatcgcactgatttctctcgaggaaaggtgctggcctacggtatgcataatgtcttcatggagcactggtcaagtaagaatgagtttattcagccattggataaaatcgagttccgccctatccgctcagaagaagataagaagcgcgatgaaatcattgaagctttgaaggaagggttaggccacgcacatggactgtacgacctgatgcagatttaccaccttctgaataacggtaagattccacacatccgcatcgactag

SEQ ID NO: 162628 - DNA, 285 bp, Enterobacter cloacae
atggacgaactcaaaaacttcagcgcgacggactggttatttttcgccacgctgctgatcgtatggttttacatggttacaaaatcgtatagctggttaataggagttcttattcgccgcggatggagattgtggaatcgtaaggacgagcaaaccctggctatggactctttttatgaggcgttcaggctggcagatatcgagccggggcagaggatggttattactaccgaaagcggaatgacgattcacatactccggcaaaaaggtgatcgtcatgcctaa

SEQ ID NO: 162629 - DNA, 276 bp, Enterobacter cloacae
atgagcacaattaccacagaacggctgacaaaaattctctcagaaactcaggcggtaattagcgaatgtaactcgcgttgcgttcatggatccgtcgaagtgaatgccaggttgtttgaaaatgtgttgatggagttactgcggcaccgcgcttccatgctcgcagcagcaccgcagcaggagtgtaagcacgagtttgtttatggatggcattcttacggcagtaaatctggatatcaatgccgattttgcggaaagttgcaggaggcgaagtga

SEQ ID NO: 162630 - DNA, 252 bp, Enterobacter cloacae
gtggctatctggatggaattacgttgcgagcgacgtggcgaaggccgcagcagcaggaataaaccttgtttctctgatgaaaacagcgggccaatgctgatggcagatgacacgaagaaaggcgtttcagtggttgccggtgacttatttgaagaggccaaaagtgacgggtggaagcgcctcaaagagggttgggtatgccccaactgtattgcttatgaaaacgccgctggctcgggtaaaggagagtga

SEQ ID NO: 162631 - DNA, 378 bp, Enterobacter cloacae
atgagcaacatcgacaaactggctttgcgtgtacctgaacgcgaaaaacatgattggagccatgcggtaatgcgcgagtgcgaattctgcctgcagtgggctcttacagttaagcacgatgacggtggatgcatatgcgccagttgctgcgactcggaatatacaactgcactttccagcgctcttgtggtggcaatagaacgcgcacagaccgcagagaagcggattgctgagctggaggcgaaactagctaaccccgtagtgctcccgaaaaccaatggttactggaatgagcaagaaaaggcgtatgaagaagctattacgctcgctaagcggcaggttcgtctggctgggtttcgctgtgaaggggatgaatag

SEQ ID NO: 162632 - DNA, 174 bp, Enterobacter cloacae
atgaccattatgacattagagcgagttcgccgcgtaagtcgattgctagttacatatggtatgccaagactttattgccctgaatgcggtgcctatctggaaggtggtacaggtgaacttcaggactgccattgcggatggaaacagccaacttacgaggaggccgcccaatga

SEQ ID NO: 162633 - DNA, 264 bp, Enterobacter cloacae
atgagcaaattaacttgcaaggttggttacattaatccgcgttatgtgagttttgcagattttcttcgacagggtcgggttgatgtgttggcgaaacaacttgctgaacgccttgagattgaagctggcagtcagggtgaggccattgattttgtgaagcaggttcttgtcgaaatcgccgctgacgacatgggaatgaaaaatatcgacgagccacgggaaagctggcgttcacaattcgacgcaaaaggagccgccaaatga

SEQ ID NO: 162634 - DNA, 483 bp, Enterobacter cloacae
gtgagcaaactgtatgagattgcaaacagctacgccatgctgatggatgccgactttgatgccgaagagatagccgacacgctggaaggaatggaaggcgagcttacggataagattgagcaactacttgctatttgtaagaacgaaacaggatacgcagagcgcctcaaggaagaggctaaggcacttaacgagcgtgcgacagtaatcaataacaaggtcgataacatcatggcctacattgctacttcaatggaaatgatgggcaagaaaaagattcgtgccggacttcatcaggtaactgttcgcgctcctgtagagtctgttgaaatcactgatgaaggctcactgcctcctgagtacgttgaatacgtcaccacagtcaaggcagacaagctagccattaagcatcaacttaaggctggtaacgcaatacccggcgcatctctaaaactcggaaagcctacccttctcatcaaataa

SEQ ID NO: 162635 - DNA, 903 bp, Enterobacter cloacae
atgagcaatatcgttgagtttgttaagcagcaggagccgctattctgcggcgctttaactgagcagacagttacctgggcaaaagaaagccagtttgctattcagtatttccagaagaatgacttcctcgccaaaacggccttatcgaatcctaccagcgcacagaacgcgatcatcaacgtagcggctattggaatcacgctgaacccggctagcaagctggcttatctggttcctcgagatggcatggtatgcctcgatatcagttacatgggattgctgcatctggcgcagtctacaggctccattaagtggggtcagtgcaaactggtgtactcagctgacacttacgaatcaaacggccttgatagtgctcctacgcacaaatacaacgcgttcggtgagcgtggcgaggttgttggtggttactgcacggttaagactgctgatggcgactatctgacggaagagatgagcctggcagaaattaaaacggtagaggctaccagcaaggctaaaaacggtccgtggaaaacgttctgggaagaaatggcgcgtaagaccatcgtcaagcgtgccagcaaatactggcctaaggctcagcgtctggataacgctattcacttgctcaatgaagatgaaggcatgcatcaggagcctgtcatgccgcataaatcagaggaagatattcgcgaggatgagcgtaaacgccagcaggagattatcgagcacgttcaagtgctatgcgatgagatggcacaggctgaaaccatggatgatctgaagcgtatctttgcagatgcttataaacgcacggcaggaatgaagctgcagcagaatgtgcaggcgatttacgctgagtgcaaggctaagctggaggtgacaagtgagcaaactgtatga

SEQ ID NO: 162636 - DNA, 294 bp, Enterobacter cloacae
atgacagcaaaaactattgaagttacatgcaaatgctgccctgacaaatttattgcgcgtgtttcagacagaaaaaggggctgggctcagttttgcagtaagtcatgtgcggccttctggaagcaatatggtcgccgtcgagggcatcagtccatagagatgcgtgaatcggctatcgatagaaataacattgaacgaatgcagcgagaaattaattcgtattcaggctcgccccctagagagttcgtttatgttggtggatttggtccgtgggatgaccataaggattgttaa

SEQ ID NO: 162637 - DNA, 309 bp, Enterobacter cloacae
atgcgcctgacgatgacagacaaaacagagattaagcaaatcatcgcgagcttctctgatgaggataacgcgaagattgataagcgggttgaaatgctgtgcgcaaacatgcggccggtgctcaacatgcttgaatcacacagacctgatgatcacaccagggcagccgttgaatggcttggcgaagatgactgcaactatcaggaattcgctggcgaggttatgtgggacatattcagaccgcgcgttgaggttgagcatgctatggctatcttcctgcgccgacattcgtatgaggatgcagcatga

SEQ ID NO: 162638 - DNA, 135 bp, Enterobacter cloacae
atgatgcaactaagcctcgcgggtagcggcgtcatgtccgcttatttccccgctgaatccgaattatccaaacgtgttcgccgtcttattcgtgctgctcgtaagcacctggagggtttatgtcaccagttataa

SEQ ID NO: 162639 - DNA, 177 bp, Enterobacter cloacae
atgagttgcattgaacaagacaaggcaaatgaattatcaattttcatttgtgaatttctccgcagttttgaccctgctgaatttgatgatgaagacggaaatggaggacataccagaagcgctgctattgccgacgcattgtctgaacatctggttgatgctggtttttcaaaataa

SEQ ID NO: 162640 - DNA, 177 bp, Enterobacter cloacae
atgcgctacatcgtaatgaatgaaggcccaaatcgtgctcagcgtcgtaaatctcgccatgatgcaattagcaaccgtgaaaagcgccgtgcagctcatcgcatgaatcgacctgagcgaatggatgaagtaagtgcaggccacatgaagctctgcaatttcttcggcattaagtaa

SEQ ID NO: 162641 - DNA, 813 bp, Enterobacter cloacae
atgggcgtcgctagacttgaagactatcgcaaacctcccggtgaggttgtggagcatcgtgtggcagaactcgacgatggttacacccggactgcaaacacactgctggaggctgtcatgctatccgggctaacccagcatcaactactgattgttatggctgtatggcgaaagacatacggttacaacaagaaaatggattggatcggaaacgaacagttttctgagctaacaggcatggctgccaccaaatgctcaacagcgaaaaacgagcttatcagaatgggggtactcattcaggaaggtcgtcaggttggcatgaacaagaatatttctgagtggaaaacgaaggttaaccgaatcggtaaaacatttaccgaatcagtaaaactaacctttaccaaatcggtaaaaaggtctttaccgaatcagtcaaacacaaaagacaatattcaaaagacagaaaaaaaagaaaacacacagtcatcttgcgatgaccgcgaactggttaaacctgaaaagcgaaagactgttcgcatcaactacaacgaatatctcgaagcctacaacgaaatcgtgggcgacagattaccccacgctgtagaggccaacgcagagcgtcaacgcaaactcaagaagctgattaactctcttgctaccaaaaacatcgatggctaccgggcatacgttaaagcgttcatgaccgctgcaaggccattccattttggcgataacgatcgcggttgggtggcgacgtttgattaccttctgcaaccgaaagtattaaccgcaattcgtgagggaacactatga

SEQ ID NO: 162642 - DNA, 1374 bp, Enterobacter cloacae
atgagacaggatatcgaagccagcgttatcggcggacttctcctgggtggattgactcctgcagctggagacgttcttgcaacgctcgaaccggaagcattctccatcccgctctaccggaaagcctttgaggtgatctgcaagcaagcgcgtaaccgcaatctgattgacgctttgatggtcgctgaggaatgcggtgatgagcatgctaccgatgtgatgatgactgccaggtcatgcccaagcgctgcaaacctgaaaggctacgccagcatggttgcagataattatcatcgccgcctggtactgaaactgattagcgagatgcgagaccctatcgagaacggaaccatcgacgcatcaggacaggccatggacgaactggtaaagcgcctgtcggctatcaggaagccgcgtgacgagattaagccagttcacctgggagatatcatcaccgactacacagatacgcttgataagcgcctgcgtaacggggaagagtctgacaacctgaagaccggcatagatgagcttgatgcaatccttggcggtattaacgccgaagacctgattatcgttgccgcacgcccgggtatgggtaaaacagagttctctctcaagctggcagaaagcgtagcaagcaggactttgcctaactcagagcaaaaacgcggagtgctgattttctcgatggagatgagcgcactgcagattgctgagcgaagcattgcaggagccgggatgatgtcagttagctcactgagaaacccaacgcgcatgaatgacgaagcatggggaagggtagccgaaggcatgaagcgactggctggacttgacgtgtgggtagtcgatgcatgccgcctttccgttgaggaaatcaggtctatagcagaacgcctgaagcaagagaatccacacttgtcgcttatcatggctgactaccttggcctcattcagaagccaaaagcagaacgaaacgacctggctattgctcacatatccggaagcttaaaagctatggcgaaggagcttaaaacccctgtcgtatcactcagtcagttatcccgtgaagtagaaaagcgacctaacaaacgcccaaccaacgcagacctgcgcgactcaggcagtatcgagcaggatgcagactcaatcatcatgctgtatcgcgaggctgtgtatgacgaaaacagccaggccgcaccttatgcagaaatcatcgtgacgaaaaaccgctttggctcccttggaactgtatatcagggattccgaaacggtcactttgttggctgcgaccagaccgaggccagagcgaaatgtacagctgccagccagcctcaacagaaggggcgacgatattcaggagccgatgtatga

SEQ ID NO: 162643 - DNA, 462 bp, Enterobacter cloacae
atgaacacacgagacaaaatactcaaccaccttgaaacaaacattcccgcctcagcagcacagttatcaaaactcttcggatgccacaaatcacacatcaacctcttaattcgtgacctagttgcagatggtcaggttgagattgagcacatcagtaatagcgtgaagtattaccggttagcttcgcttcatcacgatcgcacagaagctgtcatgcgctatctggatgagcatgaaactggaatggccgttgagatatctaacgcaacaggaatcgacaagcgactggttacgaagatgctcaagcaccttcatgaaaatggtgaactgcatcgtgactggtgccacaagaacgcatgggtatacagcaagaagccggtgtttaactttggtgcggctaacccactgactgcatttatcaacaaggcattgagagaggtaagaagtgagcgatattattag

SEQ ID NO: 162644 - DNA, 357 bp, Enterobacter cloacae
gtgagcgatattattagccacattggcaacacaatatttggcatgtaccagcgtcaattttcaaacgattgggatgtgagactagatgaagcaataactcatggcgaggtgataaaagcaggagaacacaccatagagataatgcacggtaatgatttacttagcatatggattgaaaacaggtggtatgccttcggtcatctttactatgcaaatggcaagttcgtagaaaggaatattcaatttagacctcgattcaaaactatgaaaagactctgggctctataccaaagagagaggtcggaatttctagaaggtgaatataaaaacctgttcaataacaccccagcacgctga

SEQ ID NO: 162645 - DNA, 249 bp, Enterobacter cloacae
atggacgaatcaggaaagcagtttgccgaagcttttgaagaattaaccgggtgggaattagaagactatccagaccaggcatatgcagatacatgctgggaattctggagaatgtctcgcgcagctatcgagataaaccttcctgaaaataaatggcacccatgcgattgcattgacgttgtaatcgcctttgacagggatgatgtaatcgagtccatccgcgccgctggaatcaaagtgaaggagtga

SEQ ID NO: 162646 - DNA, 219 bp, Enterobacter cloacae
atgtattggacgccagtaagcaaaattgaggatatcccatatggagattggttggtccaactggatgatggaaaaatggtgactgctcatattagtcaattcatgcaggtagttggtggtcgattccatttcgacatgaagccaatcgttgcgtacatgtcgttgcctaaaccttatgtcgaggttagaaatgaaacagacgatattcctcaggagtaa

SEQ ID NO: 162647 - DNA, 399 bp, Enterobacter cloacae
atgattctaatacaagccggattcggactgagcataaagcaagggcatatgcttggtcagaaagaatccaacagaaagatggttgctataaagatgccatttgtctgcatttactggctcaacaaacacgcaactacctattggtacgaatgcgcgcgagcggcgttcaatgaccctgggtggttcatagaaaatcatcacgcagttcggcaggctaagcgcaaggcaaccctgaccaagatgaaggcttaccaacaagcatgggaagagcatcggtcacgttatcagaaagacatggagaagcttgaagatgaaaatcaacgcctgaagaaaaagcttactgaagcagtgagagatatggaagccttctcaagaataattgggaggaatgatgcttag

SEQ ID NO: 162648 - DNA, 189 bp, Enterobacter cloacae
atgcttagccaaacagaagcccaatcctacgagcagcagagcatacgtcgaacgttgtgctgtgcgcgttgcaataaagagctcaaaaaagacgagacgcatgtctgtaatgaatgcgacctgaagatgtgcatgaataatctggttttccatatgaccggaaaagatatggaggacgaaaatggctaa

SEQ ID NO: 162649 - DNA, 597 bp, Enterobacter cloacae
atggctaacggcaaatcgcctaagccaaagacctgcccaatctgctctgccgaatacatcccccgaagctctctccagaaagtctgccacaactacaaatgcgccattgcattcaataagcaacgcgatgctgaaattgctgcgcgtgaacagcgtaagcgtgacaaggaaactcgcgcaaagtggcgaaagcgcaaggctgaagttaagccgctaaagcactgggaagacctgacgcagcgagtagtgaatgactacatccgcgagcgagacagagatttgccatgcatcagctgcggaacatgggcgacggtacagtgggaagcggggcattttaggtcaagaggcaaggcatcacacctgaggtatcacgaagacaatatccatgcgcaatgtcatcaatgcaatgtgcatctgtcaggaaaccaacagcagtaccgcatcaatctcatagccaaaatcggcgcagaacgcgttgaggcgctcgaaaacaacaatacccctcaccgatacaccagagaagaactggacgctatcagaaagcgttacagggctctactgcgcgaactggtcagggctaggcaggaggcagcatga

SEQ ID NO: 162650 - DNA, 549 bp, Enterobacter cloacae
atgacggataaatcaaacaccccggtagaaattaaagacctatggcgaacgccgccagagatattccacgcgctaaatgcagagttcaatttcgtgttggatgcagccgcaagtgctgcgaatgctctttgccgtcactacattactgagcagcaaaacacgctatttacgccatgggcagaagtcatgccagatatccccggttatgcatggatgaatccaccatacagccgaccaatgccattcgttcaggtcgctgcgcaagagaatgctgacaacgctatcgggtgcgtaatgctgctaccggcagatacgtccgtgttgtggttcagggaatccatcaagacagcgcatgaagttcggtttatcacaggtggtcgcctctcatttctgaatgcagaaaccggtaaaccagtaaacggcaataacaaaggttcaatgctcatcatctggcatccatatccacgctcaggagagtgtcgaatgacagcggtagatcgtgatgtgctgatggagtacgggcgcagattcatgaggaaagcagcatga

SEQ ID NO: 162651 - DNA, 267 bp, Enterobacter cloacae
atgacagacataagtagagaggtgtgtgaggaatatctggatgcgctggtaacagtggagctatccgtacgattcgcacaactagaagaccgcaagattaacgccaccatacgcgcgacagtaacagagttactcaagcgcatccgcgacaagaaaatccgcgccatctttgcaggattagcccgtcagccattccctgatggagcactgaagatgatgcgtcgccagttagacagcttagtaggagaacccgcatgtgctcagtga

SEQ ID NO: 162652 - DNA, 156 bp, Enterobacter cloacae
atgttgactttatttacgatcgcctatgtgttcatggccggaatgaccactgaatacacgcacacaaggcagaaagagcttggctacaaaaccaacctcatatggatatctcttttcgctggagttgtctggccatacacaatctggagaatttaa

SEQ ID NO: 162653 - DNA, 765 bp, Enterobacter cloacae
atgaacctggaaaacgcagttaaatttcacttcgcgaagtctacgcagataaacgatacgccgcgtgcaacgtcctcagagacgttaactggtactgatgtgatggctgccatggggatgacacaaagtcgagccacgttaggttacagcgcgtttttagggaagatggaaatcagcagcaatgaccgtgagaaagctattgaactgctgacccaatatgcacttgagcactgcgataaggttgccgccttacgtaagctcgaaaatgatattaagccaaaggtaatgcaagtgctcgcaacattcgcatttgctgactattcccgtagcgccgccagtacccgaacctgtgattgctgtggtggcaagaagtttatcgatgctgaagtcatgacaatgaaaagcatcgggcagccttacatgactgagcgcaaggaaacggtgaaggtgctgtgccataaatgcaaagggaagggaatcctgactaatgcctgtcagtgtaacggtaaaggcgtggtagtcgacaaagagaaaactattctacagggcggcgttcctgcatataaaacgtgtggtcgctgcaatgggcgtggatatgctcgattgctgccagatgcagtacggcaatacatctgcgctacggtgattgatgtgcctgaaaccacatggcgcaggtcatacaaggacttcttcgaaagcctggtcggtgagtgcattaagcaggaggaatacgcaaatcagatgttgagcaaagtcactcgctag

SEQ ID NO: 162654 - DNA, 504 bp, Enterobacter cloacae
atgggaatgtcaccggcactcagaaatagcgttatcgcagcaataccagcgggtgccatagcaatagcatctttccttataacaggcccaacaggaaatgatgggctggaaggtgtcaggctaaaggcgtatcaggatgtcgttggagtatggacggtatgctatgggcacaccggtaacgatattatgcttgggaaaacatataccaaggcggagtgtaatgcactcctaaataaagaccttgcgacagttgccaagcagattaacccatacattaaatctgacattccagaaacaacacgtggcgcactctactcgtttgtctataacgttggcgcaggaaatttcaaaacatcaacgctgctttacaaaataaaccagggcgataccaagggtgcatgcgaacagcttcgccgatggacgtatgctggcggcaaacagtggaaaggactggtaacacggcgcgagattgagcgcgaagtttgcgagtggagccagaaatga

SEQ ID NO: 162655 - DNA, 537 bp, Enterobacter cloacae
atgaaaacttgcaccaaatgcggcgagtgtaagccgctatctgaatttcacagagatagccggaaatcatctggctatcgggcctcctgcgcagcttgctgtagagccgcacaggcagcatggtaccgcactccccatgggcaggaagtaaccaaagattataacgcctctgataggggcaaaaccctacgaaatcaggctactgacagatatcgtgagactgaaaacgggaaagaaatcaggagggttattaaggctagatatgacgcatctgaaaaagggaagatcgtcaaaagcaataccatttcagcctacaaagagcgcaacccgataaagaatgctgcaaggtataaggccaacaaggcggttgagagaggcgtgatcccgaagcctgattgctgtgaggcctgcggcaaacgcgtaaggttggaggggcatcattgcgattacagccttccgctttcggtaaaatggttttgtcgtaaatgccataatgactggcataaagagcatggccccggactgaatggggattag

SEQ ID NO: 162656 - DNA, 909 bp, Enterobacter cloacae
atgtcagaaccttcaatcgtcccttacgtaaaaaccactcccaaaccttttggtgtggacgtcgaatggaaatggccgggtggctgcgcggtgctagaactgcaatgccttcatgaagatggccgacttatgaaagaacgcatcttctggccagctaccgtatgccttatttccggcctcaaagctggtgagagattgcaggtgcgcctgcgtccaattgcagaggatggctcagcaagagattggcgagccggtgactggatcgaaggggtttcttctgtcgataccgaagagattattgaggcgctggacgaagagatccgtaacagctgcgcacttcatggccttaaaggtggctggtttgtcgataaaaccggcaaggcttacatccacgaagcgctgattggcgatggcgtagtgtctcaaaactacagcgttaaattaaacgtcgccggcaaaggcaagccgcacgaagctggcatgaccctcggtgttgaaggtgagcatagcaaggttgagtttatggctgaccgctttaaggtgaatgaagccgctcaatcagccagcaataatgaagagacggccttcaatggtggtctggcttttggtggtttccctggggcaattagtcatgatggagctaatcccgctgatggcaataatgccaccgctgaaccaatcagttcaattgcttcagcgacaggcacagccaccaagacgcgactaaccgacgagatgcaagaactggttctcaaggctgtacgtgaaagcgatctgttcacatcccttcagactgcgatagctgctcaggaatcctcaacctctgacttgaaacaggcaatgaatgacgcagtgggcgatgctattcgcaacgcgctgaagccaggcggtctgctgtacaaacgataa

SEQ ID NO: 162657 - DNA, 750 bp, Enterobacter cloacae
atgtcacgcattactatttttccgggtgaaaagtacggttatcttacaattattgaagaaaccaaagcccctagccatataaaaacaaaaggtctcagatactttttgtgctcttgtgaatgtggtgttgttaagagcatttccatggggtcactccgtagtggcgctgttgtttcttgcggctgttatcataagaaaaaaataacaaaactgcataatggcaagccaatcacagcttattcaggatattcgtcttggacatctatgcttgatcgctgtcgaaatcctgcttgcaaggactttccccactatggcgggcggggtataacagtctgcgatgaatggagcaaccccgtgaattttgctcatgacatgggtgagaagcctaaagggttctcaattgaacgcatagataacaataaaggctattctccagagaattgtcgatgggcaaatgctacagagcaaggtcgcaacaagcgcaataatcataaagttgtcgtgagcggagagtcggtaactatgagcgcagcatggcaaacaaatggcatgaaagagtcaactttttacaacagactaaacgccggtatgaatgccgaagatgcgttagcgaaacctgtacgaaaccgaatcccttacgtaattttgaatggcgaaaaaatgcaacttaaagaggccgcgttacggactggcattagcaaatacattctcaggaaaaaggttaggcccgacctctccataaccatctag

SEQ ID NO: 162658 - DNA, 192 bp, Enterobacter cloacae
atgagtagccgcagcacaccaatcatccaccggcctgatcgggttggtggatggcgttaccagaaagatgccgccgccaaccgtgcccgcctggattgcgatgagccgcacggctccagtgagaaaatgaccaccgcagagcgtgaaatggcgcgcctcttaaaccagcccggagtgagtgaaaatgactaa

SEQ ID NO: 162659 - DNA, 1518 bp, Enterobacter cloacae
gtggaaacagaaaacaacgcgtttgatgaggtattggttgacgattttggtgatattgccgcagagcttgcgcttaccggcatgcccagcaagccagcacaaaataaatcaaccccaaccaaagagagccatgcttatcaatccggcaacctcaacgccatcctggagcgccaccagcaccctgccgcccgtatgtttaaggcgctggcagctcaaacccagatgcctgaggactccaccacgctggtggggctgggctgcatctctgtgatcaactcataccggtacgccgcagatattggcaccggctaccgtgatttgatgccggtgggcctctatgtggtatcagagcagccatcaggcatgggcaagagcgccgttatcaacgctatcctgcgcccgttttacattgagctgaacaatcacgcggctgcacgccggaaagcccgtggtgagaagctggcaacgctcaaagatgaatctggcaaagccctgccgaaagccgccattgaggccattatggctgagatgccccagccgccgatcacgccggtggttgatgccactctccaggcgcttgagtccaaaatggcagccgctcagggtggcctgttttcgctggtgggcgcagagcagatcaccgctaacaccgctttggggattggggccgaaaagcagaccaacgccgcatttttaaacgttggctttgatggtgatcacttttcctctctgcgcgttgagcgtgtgggcgtgagcggtcagatccatggctcaatcgttatctttgcgcaggatggcctgctggataacattgtgaccgtttccgcaggctctggccttgctgagcgcgtgcgctacgtcattgagccatccaccaaaggctcacgcgttttcggcgtgaacaaagcccgtgcagatctatcgctggtggctaacctggtgcatgtggttagctctgacctgcctgacttctttgacctgcaaaagctggagccggtcaaatggtctgaggcggcgctcagcctgattgatgattactcaaacgcggttgagccgatgattggcgacggcggcaaatggggcgatccgctcatcgctaacaccgtgagcaaaggccgccagaacattatcaagatggcaaccaatctcaccatcctgcgcaaaatgcagggagagctaacaggccatattccagccgtggatctggatgatgtgcgctgcgccattgagatggagcgctggttgatggaccaccattatcaaaacctggtggctactgacaaaatcggcctgagtgctgggcttaatgcggtgctggcctactttgaccggagagagggcgcttatggcactaagacgctatgccagaacctgaaaaacactaagccgtttaagggtgccagaaaggccaatgaccttatcagggccacgctggaggaggccaaagtgttggggtatctgacggccttgccattgcaaggcggtgagaagtattaccggctcaacaagcgaaaataa

SEQ ID NO: 162660 - DNA, 159 bp, Enterobacter cloacae
atgtttcaaatggggaatgcgaaggtatggaagacatactcatgggcgttcctcgggactgttgttgtgttgtgttgtgttgttgtgttgtgttttattattttaaaggtgacggtgtcacgcctgccggaatcggacacacgtacggcttttcggtga

SEQ ID NO: 162661 - DNA, 696 bp, Enterobacter cloacae
atgaaaaaccttgccgagagcattcgcaattttgaccgggaacaggctcgccgtgtagcgcacaacctgcctgagcagtacaccgaacgcgagcaaacgcagcaggttgcgcagattatcaacgggctgttcgtacagctggcggccgcgttcccggcaagcctagttaatcgcagccaggaggacgtgaacgagatccgccgtcagtgggtgctggccttcaaagaaaacgggatcaccactctggagcaggtcgaagccggcatgcgcatggtacgccgacaggagcgtccgtttctgccttcgcctggccagttcatcaagtggtgcaaggaagggcgaagggttttggggatcaccaccgctgacgtgatggctgaatactggaagtggcgtaagctggtgtttcgttacccgagtagtgagcagtatccgtggtctaagccggtttactaccacatttgcctcgagttgcggcgccgcggaaccgatggccagttgagccataaagaacttgagcgtgaagctggcgatattttggatatgtgggaaaagcgtgtgctggccggggagccaatcccgccagttcgtcgggcgttggaggcgccagtggctccgaaggggcctacccctgcagagcttttgaaatctaaatatgagcggatgaagactgaaagatatgatgtagagcgataa

SEQ ID NO: 162662 - DNA, 852 bp, Enterobacter cloacae
atgaaaaatatactcttagcattgattcttataacttcaacgactgaagctgcggttttacgatgtgagcaactaaaagcttggaatttgcgtagttcccatgatttaccagatggtcaatcatcaagtcttttagtgggaatagaacctagcggaattgcattaggctctccgaagtataaaaactttcacataacgcttgactttccaaattcattgacaagcactgcgatagctgggaattatattcgtatacaccactctttttcagatggcaatgcctattcttactccaccactcctattcctgcaggagttaatacttttagtgtcaccattccatgcaatgaaaacgtaaaaaatcagtgtaatataaaaaactcaaccacaaatatcgtgctaacatcagaatactattcttcgaaggttgcaaaagtcaacaccagcgtaacaatgcctgtcgatgagaatattatcaatgtatctgcactcataacatccaataacatacaagtatcggacataaaactgacgaccacaagaatacttaacgcagtaagccaaattgaagattctattactatacctgacacgattaatttagggccattatcccttgggcaaaataacaataccaacgcaacgatatcctatacaaaaaacacaaacaacatacctatccaaatacaaaaacgttcaattacagaatcgacaaacctgactgtaaatgatgagatagtcaatacaaccatgctgttcacaccaccgctcatatttgggttaaacttattaccatcatcgcagccaggtgaaaaatcagccacagttggcttgtcgtggacatgcccctaa

SEQ ID NO: 162663 - DNA, 831 bp, Enterobacter cloacae
atgaaatatatatttttgttgttttttttaatactaactaaggctgatgctgctgaattaaaatgctctaatttttactcagagtctgtgtcgggagtgagcactctcgacggggcaattgtgctaagtgtttcaccacctgcatttatacaagcattgcaaacaaaaatgactacaaaatttgaactcaactctctcaaaccagcaatgatacaagccttatcaggaaatcatattatctatcgaactgactacccaatgtatggaaagcctgtaattgaccaagtacagcatggaggacaaattacacagagcacacctcaaaatattcaatacacttggtatttggacaacagcaatgattaccgtacaacccattacgtccttctatctggttctccaacagaagcttccccacctgtaatcaatgaggtgattacaggagaaagtattctttctgctcatggagtctctgttgtaagttactcaaatggccgggaacaattcgtcgaagccaatttgaatcttagttctgtactcaaaaccactgattcaataaactttcctagtattatagacattgaaaatttgagggttggaaccaacaattccgaaacatcaatcgactacgcaataagcactaactctattccaatatttttcgcaaactccaccactcccggtggtgcgcaattaatgcttaacaacaatgcaccggtactaccaataaaaggatacacgccgccattccgctttgggatgcatgtgttacctaatgcccagccaggtacttacacttcaactgtaaatgccacgtggacttgcccataa

SEQ ID NO: 162664 - DNA, 534 bp, Enterobacter cloacae
atgaagtttaatatctctccacgaagagttattttcgggctactttttggaatgccctttctaaatcaacacttatatgctgccaacgttacatctacgcaatttactgttactggagttcttgaggcgaagacctgttcttttaatgaatctgcacttacggttgaccttccggaagtcgatactcatactttaaacaatagtaatgatatacaaggaaaaactcaatttacattatcaataaattgtagtggcggtgttacatcagtgaacattactccttcaggcgtgaccgtttcgggcggtgatagtactctgttcttaaacacgagcactgcaagaaatgttggattaagactactggataaaaatggaaatatactgactccagatggacaaaaaaaggtgacctttgaatattctgcttctggcggcaaatacacattttctgctggatatgctccaacaggaagtggacgagtaacaggaggagcatttcagtcagtgatagaattcacccttaattatagctaa

SEQ ID NO: 162665 - DNA, 576 bp, Enterobacter cloacae
atgaaagatttagcccatgctgtaaaaattgaatcacccgttgcaagtatcagtcatctgttaccgttcgaacagaagcagcacctagagcgtttgtactttccaaaggttcaacacgccactgacaagatgtctaaagctgaatctgaatatcaggatgctgtagaatctcgttcagtgttgattaatcagaagaccgctgaatatctggctaatccttcagaacgtcacggattcattgtgaaacaggtttacccgactaaccaacagcaggtaattgagagcatggctgatgctggctatatggtacaccgtgtatctgttggaatggttacctttatccgtatgccaaagaacgctaaagataatcctcttcaggaaatcacagataaagctaaagcagaagctgaatcaaccattgacaaaatgattgagcgtttgaaggtaaaagcctctgaagctgtccaccagcgaaacaaaattgttattgaagctcgtaaagctctggatgctgtaaaagactttactgattacctgaacgtgattgtaactgactctgaagaggtgaccaaataa

SEQ ID NO: 162666 - DNA, 183 bp, Enterobacter cloacae
atgaaaacatattacaaggtaacaggaaaaacctgtcacactatccacgctgaattacgaaagattggtgatttgattaacccaatcccgaacaagaaatatcacatcaaaagaatgatgactaaagccactcgcttattactcatcaaatcaatcagtgaaagaattaaaaataaccgttga

SEQ ID NO: 162667 - DNA, 147 bp, Enterobacter cloacae
atgagcaagacaaaagcagtccgaattaaaaagacagataatcaacttgtgaagctgacagccgtcaccgctgaaacaacaatcagaaagactctggaaagtatgattctgaagtcttacgtaaaacacattgaggcagttaaatga

SEQ ID NO: 162668 - DNA, 1212 bp, Enterobacter cloacae
atggccttactcactgtcaggacggttcaggctctcatcaaagcaggagaaccggggaagtttggagatgggcgaggcttgtacctgaaagtcccacaaaaaggtgaggcgtattggatgcttcgatatacaatcggctctaagagacgagaactcacacttggcaaggtatcccatctatctctgtctgaggtacgtagcctcgctgaggatactcgaagaaaagttgccaccggagatgatcctattgctgaacggaaacttaaccgacctaagcaaatcacaacggtagatggattgtttgaagactggcacaaagacctggttaggcggttgaagcatccacaaatcccagaaagggtatacaagaaggatattgcccctactattggtcaactttctttgacgaagataacccccattgatatccggtcaattctgcaaaaaattacagatagcggaaggccaaccatttcaaacgatgccctactctacatgaagcaactctttgaccacagcattaagcttgggctgcttcagagcaacccagcaatggcgttcaaggtcaatgatgcaggtggaatcgaaaaaagcagagaaagagcattaagtcttgaagaaattggtcaggtgtttaaagttttcagagaacactctgacagcttctctcgtgataactaccttgcctgtgccctgctactactccttgctgttcgcaaaagtgagctaaccgaggctccttgggcagaattcgatttggatgagaaaaagtggtctttacccaaggaaagaagtaagtctggtgtaggaatcgtcatcccgcttcccccgctcgctatgaagattcttgaagagctaaaggtcagagcttttggttctgattatgtctttcctaaccgcagatccagtaagaatctacacatgggaaaagacacactcaacagagccatagcgaaactgttcggtatcgagcctggcaggaagcagcagccaccaaatgttatgggtgatattgaatatttcacagtccatgacttacgaaggacttgcagaagtttacttgcatcactgtctgttcccccacatgtcgcagaaagatgtctgaaccacaaactcaaaggagtcgaagggatttatgacagatatgattactatcaagaacgaaacgaagctcatttaaaagtgtcaaaatcactgaagccatttatttag

SEQ ID NO: 162669 - DNA, 810 bp, Enterobacter cloacae
atggttttcgtgattgataatagggttttctatcgctcggaagatggtgctatatggccatccggagacgaaggctctactgtcattctgaccctgacaatgaacagacttcttgcatgtcttctggaaaagcatggtcaggttctgacgcgaaatgaacttctggcgagtgtctgggatgcttacggtctgcgttcgtccagccatacgctgaataaatatatttctgagttgaggaagcacttcgtgcaactgggcattgccgatgaatgtatcaccaccttgccacgggtgggctttatgtttaacagtgatattgaagtgagggaaatcgctaatccctcaacgggcgaagcggttacggcagaaaataacagtcagatcgatgcaccttcgattcgcaggacgcgaccacagggcagatttaaggtctcttattacgcgctctctgtgattgtcattttcatgagcgctgccctgttctggtcagggttggcaatacagtcagaatcgccgcgccaactggaagctgtaacgccacattttttatttaacttcggcacctgtcccgtttataccgtacagagaaactcagcatcgcttattgaacagaagaaaaagatatttgaagaagtcgctgaatcaaaccagatccagtgtctggaaggttcgcatttcttgtatcaggtttcggaatattatctttatggtagcaaggggagggtattcataagtcggtgcactcaaaaaaacaatgagtatatctcttgcctgaataactactggagtggttatgaacgccaccaataa

SEQ ID NO: 162670 - DNA, 486 bp, Enterobacter cloacae
atgaacgccaccaataaaaaatacggtatcgtagctgttattttactgacgcttcttgcgttgtctgcctggttctttgtgcatatgcggcagaaacaaggagccctgaatgttaactgctccaccattttgcagtataaccatcaggcacccaacttcaccgccactcttgaatatattttccgccttgagaaaaacctcgatggttatgtggtgatatctggcaatattcattctgagcggggggttcacgtagtttcccggacaattcacttcaactatgtcatgaacaggccgggcgagatcgagatttcggatatgcgttatatcaaaaatgccagagacactgctgatgacgagagtttcaaacgtagcttcttttatgttcctgagggagccgttcgccagcttcggatcaacccgtcgcgtaacggctggcttatgggtaacctccagtctccatttgcgctatgcgtgaacaggtaa

SEQ ID NO: 162671 - DNA, 1344 bp, Enterobacter cloacae
atgaatgattcattagaaatgcggggagaaaaatcaatttccgtgggctatatgcagacggaagtgggaataattccgagggattgggtagtcgagcctttagaaaattttactgctttcatttcctatggtttcactaatccaatgccaactactaccagcggcccatttatgattactgctagagacattgcaaatgggagaatacaatataatagtgctcgtacaactgatttaaatgcatttaataaattacttacatcaaaaagtaagccacaaaaaaatgatttacttctaaccaaagatggaactcttggacgtttagcattagctgaagatgagttgatttgtataaatcaatcagtagctattctcagaccgaataaacgcataataccgaaattcttccaacttctgcttgaaagtccgttttaccaagtaaggatgcttgaggatgctggtgggtcgacaataaaacatatttacatcactatcgtaaatagaatgttaattggtttacccacagatttaaaagaacagaaatccatcgcaactgccctttccgataccgatgatctgattaccgcacttgaacagttgatcgccaaaaaacaggacatcaaaaccgccaccatgcagcaattgctgactggccgcactcgcctggcgcagtttgctaagcaacctaatgagactctcaagggttataagactagtgaactggggatgattcctgaggattgggaagcaaaaccatttggcgagttgtttgagtcatcgcttcatcgccgaactatgcgaaaagaagacattgtttcttttgtcggaatgcaggatgtcagcgaaaatgcacaactaattgaacaatcgcaactgtcatttagtgaagtaaaaggtggatttacttatttcgaaaaaggagatgtcttggttgccaagataacgccatgctttgaaaatggtaaaggctgtcacactgaatcattactgactgatattggtttcggaagcacggaatttcatgtactcagggccaaaaactcctctcattcaaaattcatatattactggacaacaaataccaatctgaggaaggtattagaatctgagatggttggtagcgcaggccacagaagggtacctttatcagccattcagaattacttaatcccatgccctcaaaccaagatcgaacaaactgctattgccaccatcctctccgatatggacgatgaacttgaggcgctagagcaaaaactagccaaggtgcgcgatataaaacaaggaatgatgcaacaactgctgaccggacgtatccgcctgccattggatcatcagccatga

SEQ ID NO: 162672 - DNA, 894 bp, Enterobacter cloacae
atgatccttgttgaaaagcgtcttatcaaaaaaccagcatcactagtaggaagcaagtcagctgctgcgacagagcttacaaaagcaaaagcccattataaccagaaaaaaccaggtacatcggcttatccttttgcagtgtacaaagcaccagatgttgttaaagcgttaaataccctctttcataacaagtgtgcctactgcgaaacggattattcagccactcagccgatggccgttgaacactaccgtcctaaaggcggtgttactggcgcgccgaaacaccctgggtattggtggctggcagctgactgggataatttattgcccagctgtaacgactgcaacagccatcgtggcaaattgcattatgttattacgtctgataggcaagtacatctagaaacaatagagagattaagcggtaaacagaatcattttccgattgcatgtgagtctgcgcgatgcacccggccctgtcatcatttaatccgagaacaacctttgctcctaaacccgtgcaaggatgatcctacccggcatctaaaatggatttttactcaactgaattatccttttctcatacccctagatgaacgggcagaaaccaccatcagtctgtgcggactgaatcgcaagcgactgctggaaaaacgcaaaaagaaactggatgatatcagtttaagagtaaccagtattcgtcggttagcctacagcattgcacagctaaaaccgacagaacgccatgtccttgaagcccattttattgatgagatcgcgtcattaaaggcatatgaagatagtcaggaagaatggtcagctatgtcgcgagcatatatcaatctacatctggctaccctagaaacagaattcaaaacgttgttttcggaataa

SEQ ID NO: 162673 - DNA, 2145 bp, Enterobacter cloacae
atgagaaaaatcacaagatccagggtgccgcctgaagcattaagttttagcagaattcgtgaacaacgacgtgagctggcagagtactacaagcaattgcccgcagaacgcgtgctttcccgcccgccatttgatcctgagccgttatataacaacgaggttcgcatgaggttgatgcgtgagtttcaggggcgatgtgcctggtgtgaacaacgtgtcgacactccagaaattgatcactaccgaccccgtggaggagcacggtttggtatcaacagtcaggtagcccccgattattacggatggttcgcctatcaatggcaaaatctcctactggtctgtcgagaatgtaatagggcgagatcaaactggtttcccctgagtggacgtccagctcagatccagtgtacgtggtcagaggcgcagagaaccgaaaaaagtttactcctgaacccctctgccgataatccctgtgagcatctcagtatccaacgtgacggtttattgttacctctcactgagaaaggtcataccactattgaaattttacagcttaatcgggagccactacgatataagcgtgaagaggagataatcagtttaatctcggaacttaatcagcatacaaatacgcttaccatggagcattatctaattcacacggaacgccccggtgtagcgattatttttctcaacaccctgctgcggatagttgctggtgagtacacaaatctacgctataaaccacttattacgtttaaccgtgccctagatgctgtgctgaactcttcattgccactcaacgaacttatacgtctctggtctgacttttcctttcctcttcctgatacaaaccaaaaagcagactgggcgaacgaagcagtaaatgagagacgtcgtagtcttgcctcacaactcgttacaggcattacactacataattttaagagttttgaagattttactcttgatttcactaatattactccaccagaagacttagctccctgcgtggcgttagtaggagaaaattccaccgggaaaagcagtattttacagggaatttgcctggccctgatgagtcgacagcaacgtaatctattacgcctagattacgaaaattacctgcaacgcgatcgtgaaggctggcaacgtagccatatgaaacctgccagcattaccctcaccctagaggatggtagtacgcgcacattaacgatttcggatgaagggctcgtgtttagtgacaatgactggcctgacttcatggttctcgcttacggtgcacgtcggtatttctgtgaacgaacccggaggactgccgtagggaagtcactattttatcccactgctctgctgcgggatgttacgaacgaattagcggacaaagatgatgaattctttgcctctattgctcgtgcaatgaaagaaattctgtcactggaacaaggagagtttctcctgcgggatagtcatcgcaatattctggttcgcgctcatggtcgtgatacaccactcagcaagatgagcgacgggtatcagtccttgtttgccatgagcctcgatattatgttcagaatgacccattactggagaagtcttgaatcggctcgtggagtcgtacttattgatgaaattgaaacgcatctacatccccgctggaagattcaggtcgtgtcagcattacgccgcgcgatgcctggtgttcaattcattttttccacacatgacccactatgccttagaggtctaacccaacatgaagttcgcgtgcttttccgagatccccatcagcagattgtcgaattgagtgagttgcctcttttgcaaggcatggatattgaacaacttttaacctctgactatttcgggctattaagtacgctcgacggtacgcttgaaaatctactcaaacgttacgagcatgcaatacaacgaacgccaggtcagcagagattaatccatgatattgaaagagaactgagccaataccgagcattgtccggaaaccctgtgcagcgtgttatcgcagagggtattgcccgctatgtcgagcaggcgcgccagacgcctttggaacgcgagaaactccatcaggatgcggtaagaatgattgtcaaaagcttgcaggaggcacagcgatga

SEQ ID NO: 162674 - DNA, 621 bp, Enterobacter cloacae
atgaccgacagtaaatttggcccattgaattctggttatatgaaacgtatgacggatgtcaccaactttgcaacaaatgcccatgccagaacagccgtattcaccttcgttctcagactgcctgagtaccgcgataacggtgacagcaccgtctgcaaccctgacctcaggccaggattaatggaacgcttcaaaggggcgctgaatgcccgtatagcaacccatcagaaacgacgtaagcgggaagaaaaccaggtatgtccaactgaacttagaaatctgtgggtacgagaagtggggaaaagcggtaagtctcattaccacatggcgatattcgttaacaaagatacttttaacggcttggggaattattcaaaggaaggccataacctggggagttacatctgcgaggcctggctaagtgcgctgggtctgctcggataccctgagtacagaacgctggtttccctcaacaacacgccacactatctggagcgccttcgggtggaccgctttgggcaacagttactgaaactacggagccacttaagctattttgccaaagaacacaccaagtcctacaacaaggaagaacgctcattcgggggaagtatcagataa

SEQ ID NO: 162675 - DNA, 165 bp, Enterobacter cloacae
atgaatttacggatggggattaatgtgtcagagggtgaaaaaggcagagtgctgccggatatttatcaacaaacgcagatgcgattactggtggtgaatgtttcactgacagatattcatgcaatgctgattagtattgacaacaaccattaccagttatcgtaa

SEQ ID NO: 162676 - DNA, 240 bp, Enterobacter cloacae
atgaacacatcccccgcattgctgagcgaccagcttgtcgatatggcattcatcaccacctataccgaaatgacggataaatggttctacaaactcatcagcgaaggccagttcccgaagcccatcaagctgggtcgcagctcccgctggctgaagagtgaagtcgaaacctggatgcagcaacgtattgcgaattcacgcggtaacggagtatgtctgtctgaaagaacctcgaaataa

SEQ ID NO: 162677 - DNA, 933 bp, Enterobacter cloacae
gtgcccagccatcatcgaatcactgtcaacctgccaacccgagagttctgcagttccctgaagggactggcacagaagcgagagttgacgatgtccagacttgtcctggacatcgtcattgcatgcctgaggtttgatgcttcctcagcccgctttctggaagagttacgtcatgacttaaaagaagggaattcaggtgaagaaagctttaacggaaatgagacggggattttacatcgcacaaccaaagtggtaccgaaaaaggatgccggcgatacctgggagcagattgtactgaaagctcaggaatgtcgacttcctgattatgtattcacaatgtctgaaaaaagcagtcagggcgggttccactctgacgctaaaaggaaaatgagtgataccgccagagaagaaatgcggaaggttttgaaaaaatatattttgagtaaggtacctgcgattaccagtcaacttggtggaacccctgcttttcttcatatgttcgtcaaaaaagcaatggttaagtattatgaggataatgacacaggctgtaatgtcagaattcagatcacattgcatgtgttacctctttttttgaatgatgtcaggaatagcagacttgattttcccgggatcagattccgacagttcaaagctctggctgttaaaggctgggataaaagtaaatatgaaaagatggtgtttattgagaatgcttcagaaacgaagtcaggagggtattttaccggtatggcctggaataaggtggggaatacagatgaaatttatgagggctatgagatttttaatacaggcagtgcagaagaactacataatatatattgcagagttcatatgaacgaccgggatgtgaaactcaaaaatacaataacggtttcacttccaggaaaagataacccgacattaccagagtga

SEQ ID NO: 162678 - DNA, 891 bp, Enterobacter cloacae
ttgtcagaccgtattcttaccgggcaaattcctgatgccctgaaacagcccctttcctgtctccctgccactgtatcggaaatgatggtcgaacgaatactccggtgtgttcactacgagccggtgattggcattatgggaaaatcgggagccggaaaatcaagtctgtgcaatacccttttcagtccgccacctgccagcgtggatgccgtcaggggctgcacccgacgtgttaaccggtatcatgtccggcgcgggccacatactcttcatatcgcagactttcccggcattgctgaaaccccggaactcgacaggcagtatcgtcggctgtaccgggcatggtcctcaaaactggacctgattgtctggggacttaaagcggacgagcgcgcctggaaagatgacctgcgctgctaccgtgaactgctgaacacaggagcagagccggaacgttttctgtttgtcctcacgcaggccgacaaaatggagccctgtcgcgaatgggacaattcaaatcatcagccttctgcaaaccagtctgaaaacctcgccaccaagacagagcttgccatgacactgtttgccgcagtccatccggtcattgcggtatccgccacggaatactacaacctggagctgtgggcggaggcactgattcaggccctgccggttaacagctgcagtgccgtttcacgctacctgaacgcagagttacgcactgaacgtgttcagcataccgcacgggaagggttcgtcagtgtcgccggaacgatttttgacgaagcggcttcagttgttcagacctcagggaaactggtgcgtcagttacagcgactccgtcggcggtttctgtcccttattcatgtcgtctggcatcttctgttctga

SEQ ID NO: 162679 - DNA, 552 bp, Enterobacter cloacae
atgaaatcatatccattactgcgtcaggacatttttgcctggtgcctcgcggccgtactccctgcaatctgggtcgtgctgttcctgaattttccacagacagtcgcacttgtcatttacatggctgttgccctggcctgggtattgctggaccggacaaacctgatgaaacagggcgtcacgctcccttcttttctctggttctggttcccggtggtgtatctgcgccagcgcgaccagatgcagggtaaaccctggcggctgatgcaggtctggctcttgtgtaccgtgctgtcattcgtggcgatatacctgcttaaccagcgctctggtacggaaaacctcgcgcagagtgcctgtagcgtggtgacaaaaatcctgcgggatgaggggtttgatgagcgttgtattcgcataaccggtatgcaggaagaagtgaagggtcgattctggcgggcacaggccctgctgaacaccggtgtaaaggagccggtgaccattgaggtcaggggccgggatatttatgtcgttttacctgaagcaggagagtga

SEQ ID NO: 162680 - DNA, 516 bp, Enterobacter cloacae
atgaaaaccctgaaaaccattacccggcatctgctgatgagtgcagccgtgttattcaccgcgacatcagttttgcatgcagcgacgacggacgcgctccctcaggcacctggcccgcgctgtgcaaaaccggtgttttacgcgcagactgtgaaccataaaaaagaagtggagatttgtattgtaaccccgtcagtgtcgtattcgttcggcaaagtgggggcaaaaaacaaagaaatggatattaccgttcctgcaggcaataccatttatgcataccagagcaatcaggttatcagtattcagaactttactgtcagaaatggcgatacccgctatcaggtctcagcaggctcgaatgatgccggagaaccattcgtttccctttatgtatataagggcaccccggagatcggcaagctccttgcagagataagacttgacccggatacagtagtcaacaatatcagtcattcgctggctgaagagggggttatacaggcagacagcctctga

SEQ ID NO: 162681 - DNA, 822 bp, Enterobacter cloacae
atgcgcttagccagtcgcttcggacgaattaaccagatacgccgagaccgtcctttaacccgtgaagaactgatgcaggtcgttcccagtgttttcggagaagacaagcatgcatcacgctctgagcgttacagctatatccccaccatcaccctgctggaaaacctgcaacgcgaaggctttcagccgttctttgcctgccagacccgtgttcgggacctgagcaaacgtgaacacaccaagcatatgttgagactgcgccgtgccggacagattaccggtcaacaggtcccggaaatcatcctgctgaattctcatgatggttcatcaagttaccagatgctgcccggcatattccgcagcgtctgcaccaactctctggtctgcggccagtcctttggcgagatacgtgtcccccataaaggcaatgtggtggaaaaggtcatcgaaggcgcttacgaggttctcggggtctttgaccgggtggaagagaaacgcgatgccatgcagtcactgctgcttcctcctccggcacagcagtcgatggcgaatgcggcgctgacataccgttttggtgaagaacaccacccggtgaccgccacgcagatactgacaccccgacggtatgaagaccgtcaggatgacctgtggacaacgtaccagagactgcaggaaaacctgttgaagggcggcctgcccggacgtacagcaaaaggtaaacgcagccatacccgtgccgtgaacggtattgacggcgatgtgaaactcaatcgcgccctgtgggttatggcagaaaacatgctcgagtttttcgggcgttaa

SEQ ID NO: 162682 - DNA, 444 bp, Enterobacter cloacae
atgaatacacaacactttgagttcgctgagcaggcagcaattactgcctcggtggtccctgacgagttacgcatcggcttctggccgcagcactttggctccatcccacaatggataacccttgagccccgaatttttggctggatgggccgtctgtgtgccgattaccacggtggtatctggaacttttcgacgctcagcaacggcggtgctttcatggctcctgagtcagagcacgataagacgtgggcattgttcaacagaatgaacggcaacggcgcggaacttactggcgaagcggcagggatagtcgcctgtctgatggcttacagccactacgcctgtcgtaccgaatgtgatgcgatgactgagcactattatcgcttacgtgacttcgcgctacaccatccagagtgcagcgccattttgtatctcatcgactga

SEQ ID NO: 162683 - DNA, 324 bp, Enterobacter cloacae
atgaaaactctacctgcaacaaatccgcaggcggcgacgctatgtctgtcgcccgtggcagtctggcaaatgctgcttacacgcctgctggaacaacattatggtctgatactcaacgacacaccattctgtgatgaaacggtaattcaggaacatatcgatgccggtatatctttggccgatgccgttaattttctggtggaaaagtacgggctggatcgtattgatcgcaggggattcaactgggaagaacagtccccatatctgcgggcgcgacaggcaactggtttattgaaaagaaatcgtattagcgcggcacggtga

SEQ ID NO: 162684 - DNA, 1020 bp, Enterobacter cloacae
gtggatttctttaaggcaattgaaggaacggaaacatttgaaaagttaataaaatatgacgatagctttgagaatataaaatcatttcttgatgaacttgaatgcacccctaacctaccaaatctaaaaagcattctttcgaatatcacattaaaatatggagatgaatttctctatcaaaaaggcttaggcaaaagaaacttaatatacattttccttctgtttgcttattataaatctaatgaagaaagttttaatttgtgttgcatagaggaacctgaggcacatttgagcgttaataatcttcgtgtggctgtagatttcataagcaaaacaattaaagagagcaattccctactccagactttaatttcctctcataacccaaacataataaacaagcttgaattaaataacgtagttgccttgaccggaaataaagctgttgatttaagctcggcagatcctaaacttcttgattatttaagaaaaagacctaactttgacatactcaaaatgttattcgcagacaaagtaattttagttgaaggccctagtgaagaattattaattaacacattccttttaaggcaatcatcataccttaacaatattgaggtcattgcagttggccaaagaggatatcgtacttttttagacatatggcttacacttaataaagacaaccccaaaaaattaatcggtatcattcgagatttcgacaattcagatacatctaaaactgcgcatgacagatacgacacagagaatgaaaacgtattcattagaactacacaggggtatactctagaatatgatttcgcacgtgctggtaacaacacaaaacttcttagtgcactttttgaagttgacgaaaatgaagatgcagttgcacgccatatgattcttggaaaaacatctcgaatgctgcaagtgtgtgatgcaatgtcaagagaggaatcccctctagcaattgtattaccagatcatattcagcaggtagttgaggcattgtcatga

SEQ ID NO: 162685 - DNA, 1374 bp, Enterobacter cloacae
atgatcgatatacaattagccggagctggcgcaggaaaaacttttggcttagcagccgacataactaattacatactaacttgtgatagcagcaagaaaatatttgctttaacctatacaaattcagccacaataaaaatacaatcagaagttaagagaaatttaggttacattcctcaaaatctaatcattcagacagtacatagttttttattgcatgaaataatatatcctttttcgaactattctttaaatgaaatatacaatgatatttctttgcaacccatcgggaaccctcaatataaaaatgcttttttcagtcgtttgaaaagcagtaatattattcatgctgaaaatgtatatcacatttcaagaatgattttagataaaaattgttctcggcatagcaacagagcaaaaaaagcgagagtggattttattttatcactcattgcatcaatcattgataaaatatatattgatgaggtgcaagatctagacgaagaagctctaattgcgtttgatgcattaggtcaacatataaatatttatatgatcggcgatactaagcaagcattgaaatggacaggttcgttgcgagactacattgctaaatcaagcaattctgaacatgttaatttactccccataaacaacattacgcggagagttcctactaatatactatcaatctctaatttattttgttatcagggtcaagaacaagaatcgttaaacagcacccttggagttctaaattacattgaatcttccagtgaaaactaccactcttatttaaaagcaaagtctaccatagcgttaatttacatagagcaaaaacaaggtgtatatttaacaagacaacaatccaaaaaaatcactttcccaaaagaaatcaaacacaaaatatcacaaataaaacataacaaaaatccagaattgtttgaatccgctttactcttagacctcattgatttagttgcatccttgggaataagaccagcattaaattcttttttaagaaaacacaacattcaactttccactccagaatatggccagttagccagttgcttagatgacgagcaaaatataaatgacgactttatagtagtctccagtattgatgcagttaaaggattggacgccgatcattgcattttcatcttaacaagaaatactgcaaggtacttatgccgtgaagtacctcaagaatctcatttcaacaaagaatggatgcgtatgtatgttgcgttgacccgcactaaacgcgagctaactttggcaattgaccataatttattctcgaccaaagaaatcgccccttttatacaaaaaattgaactcttagggtttacaaaaaatatcatttaa

SEQ ID NO: 162686 - DNA, 912 bp, Enterobacter cloacae
atgaagttattcgctgttttggatatagaccatccaatggttgcctgggaagttgccattggtagagtattagcaatgccgattatagacaacaaaggccttgaatatccaaccccttctttatggttgtataataacattcaatctactattaaagataagttcatgagtgatcttcagtctgagttttacattgagaaaattcgagcggaaaaattccctgataaaccttctcgacttaatggtgcatttttctttgagtcaagggaagatgccgtaaaagcatgtaaaatgtgggagtgggagaacaagatagattatatctctgaagttgatttcaatgaaaccagctatgttaagctagactctaactggattacgttaagaataagatgttgtgaaaagtcagaggtggctgattttgttgataaatattacaatggggagaaattgttttctggcaacgtattaaatgagattatatgcaccgggagtgggaaggtgttgaatgcttcacttaggcgaatggcttataataaaatactcaaaaacaaacctgactcgtctctgttactagcccttgggattagttgctatgcgcaagatccaataaaataccgagacattgttagagttactccatttataaatagaactaatgaggggaatgttgtagggtcatttataacaaatcttcaacatgttaatgaagaccaggaaggaatagggaaattggcaaagcgatacatacacaataatggacggacattaattcttcctggtctaaataaacttggcgtccctcttgaaataagaagaccaataaatgaggaaacacttttttcactttgtgatttaactcctaatttttttgaaatatcggaaaaagattttattgctatggtgtcctaa

SEQ ID NO: 162687 - DNA, 309 bp, Enterobacter cloacae
atgccacgcacagcagacatgcaagccgtctttgttgcggtagaggagccattaattcctctttctgcaagcatcgttgaaacgcaggaaggttatgatgtcattgggaaggcaacgctgattaagcgcggtgacatattgctcatctggttttgcggtcgtcagcagcatgcatactgggctggtgacgcactgatcaccgatgatggtgaggccatcgaaggtgagtcattggatgacgttcgacttgtcggtgttgtaacgcacactattcataggatatcagcagacaacaaccccttcatgtag

SEQ ID NO: 162688 - DNA, 1434 bp, Enterobacter cloacae
atgaatccgtttcaggactatttaaagcgcaatggaatttatttctctctagcactgggagggctttatgtccttcctatcatattggcaaatttctattacgttgatgacttagccagaagcgtggctggctatgcccgatggtctgataatggcaggcctcttgctgagtacataatcaaaggaatgtcctttggcggaagagtcattgaccttgcacctttgcctttaatactatcagttctggtagtggtgttatctggttattattactgctttaaggctagtatagaaggaagagtaactgtagccattacatctgtttcgcttctgatctctcctttttatcttcagaacatttcctaccggtttgatgtttttactatgtcgctttcggtagccgcatgcgttcttagctcagcggttttattaaacagaagtggttatgcgagatttattctttctggcttgttgatcgttgcctcccttagcctttatcaatcgtctgcaaacatatgtatagcgatgattggacttaatgcactaatttcgtatcgaaacactcaattcaaatctacgttcttagaatcagtttgttacgcctctacaatagtggtcgcactcctcatctataaattctgcatagcctccgtttttgtcagtggtgtttatagtgagtcgcacgcagagtcagcctcaagcatagaatctgtaatcaagacaatgaaggcttatgcgtggatgttcaatgaaacattcatcggcaactatggcaaggcaatgtcactgttggccattcttccactttcggcaatcgcataccacgctgcaacaaaaaaagacgctaaatttattattgtttctatcctgtcaataatatctatcgccttttcttacattggcgtactcatagcgttgcatgatccagtcatctatccacgtgttttagtcggtttctgtggcattgttttttctggatttgttgcgacaagtctcttctgtaagaaaatgacgccggttctgattattcctcttgtggctagcattcttatctcctacagttatgggaattcattgagcgctcaaaaggagaaggaaggtttcgtttttgaattagttgctaaagaggtcataagcaaccctggtattgaaaaaatacgtttcaatggcacagttgatatttctcctacagcatcaaacgcggctgagaaaagcggaatcataaaaatcatcaccccttcatacatcagaagtgattggatgtttggcgcgttccagttacacagaatgggtgtgaaggtagatcatgactctgccgttgatattaagtcaattataaaaaatgattgcaaaaacagagttagcaataattctttattcagcactataaagagtggcaacactttgatttttgactttaacaactgtaaatag

SEQ ID NO: 162689 - DNA, 1083 bp, Enterobacter cloacae
atggctacgcaacctaccaatttgcctgttccgagtgaatcgccgcgcgaccttaagtttaacgcggggaaaattgacgagttcgttacctcgctggtaaacacttatgttgaccggttcgggaatgagcattacaccatcgaaggactgcgctggctggcgcagcaggccattgcccagtatgggtggatccctgttggtacattccaggctggggcaacgttaaccctcccgaaccaaatactgaaagacacaactgatggagaatactatcggtgggatggatcattcctgccagatggcaaagtcgtgccgaacggttctacaccaggaacgactggtggtattggggttggggcatggataagcgttggcgattctacactacgggcattacttgcttcagcgaatggcgctgcacaagtaggtaccagtcatcgtggactgttatcctcagatctcaatgctatagaccgcaggccgagcgggtatggtgattctgtttcggcagttcttggcaatggtcatgatgttcatattgatgagcaatacgctatcaatgacgccgccgttcttggcgatggtcaggttattttcggcgctggcgggagcctgaatactgtcagccctgcatcatatgccgtttatattgataaccagagaattagcgcagcacgcgctatgctgttagaccttaatttaactggcactgtcactcctgaagggtctccgggttactccgtacttgtgcgagagactcaggataacgttattgcaaacatgcactcatcaggcttcactggtggtgtcgaagctaaccaaaccaagtggcttcaggttcgcggtatccgagtaaccgattcagtctatcatccatcaaggactgctggaggttatgcggtcgtaacaggaaactcagaaaatagtcttattgatggagttatgtttgacgcttcgtcaggcaatgatggccgtcatatgatttatatttctcggtatgacaggaccgatggtggatacgacggtagcaaaaacaccattgccaccaacatgattgtaagcgtacagcgagaaccgtattga

SEQ ID NO: 162690 - DNA, 183 bp, Enterobacter cloacae
atgagttttcagacagatttgaacagtcagtcaggccttgttaaggttaccgtcactcttaataagggccgtggtaagggtgtgcattcgtattccgcagaagcagaaaacgaagaattagctaagagcagcgttttaggttggctcgaataccaaggctaccagccagaagattacgaataa

SEQ ID NO: 162691 - DNA, 486 bp, Enterobacter cloacae
atgggaacatcattctggttaacagttggaaccagcgcactgatcggtgcgtgtttaacaggactttggaatatcgtaaaagatattctttcacgcagagctgaggccaaagctcttgagaacggtttaatcgctgaagttaaaacactttcccatctgttacaggttcggcgatataaaaagacgctggaagatacgctacaagaaatgattgctaacaatcaggatactgttgagtttagcgtttttatccatgacaatttcaatcctgtttacagagctaacgttcaaaaaattggcatgctagacaatgggttagtagagcatattgtcaaatatcatgcttacctgtttgccttggtatgtgacttacatgagaagtctattttggcaaaggatggttatactcaagatgcattaaaagagatggtgcaaattttaaatgatgcagaggctatctcagataagattgcaaattataaatag

SEQ ID NO: 162692 - DNA, 1230 bp, Enterobacter cloacae
atggggctctatacagaaagtaaagttcttagcgaattgaagataactaacagctatctgttaacaaatcttcctgataaaagagcttacgatacaggaaactataaaagtgaaataggcggagttgagtttttttcagggagattgctgcatctctggaaggagttttattctttagtagaaaaccatagcgtatggctagatgagaacacacaatactgtcaagaaaaaaatctcttaggcttttattttacagtcgaagattttacagaagataggtttttgtttctttctagactgattgagattttatatgagtactatttttggacaggctattactcacacctaataagtgatgcggaaattgacaagcttgttcaatattatattggttcaaaacataatgagaaagatctcttatgggttaaagaaaagatgcaatatgctctcatgagatgggtgttaacaagcaaacgatttatagaagctaaagagttcctttcgaaattggatgaacataaagaacttgccatcaaatctgaagccatcagagatgcagaaagtaaagtacagatagaatctcttacaaaggattctttgtcatcaataagtgacagatttaatacgatcattcactccataaaaacagatgcggatgaagtaaaaaaattggctaatgatgttgccaagtcattagaagaagtccaggccctcgaggaaagagtttctaaacttcgaacgcaatataatttcgtagggctaagctcagggttcagtcagataaaagataagaaggaagaggaattaaggacttcggaagttgcttataagaacttatttgggtgtatgtttatctgccctttgattatacttgtggttcatgttttttttcccgagaaaataccgcaaggatataatgttctacaagtgcttttgcctatgattacaattgaaatggtgatgctctactttttcaggttatcttatttagaggccaaatcattgcgtgcccaacttttacagatagatttaaaactaagtctttgttcctttattgataattatgtcaaatatagaaaggaacataatacaaatgttagaaaggttctggatagctttgattctgtaatctttagtcctatacaagctaatgaaaacaatatcccatctatgtttgatgggatggaggctttggcaaatctagctgataagataataaaaaaatag

SEQ ID NO: 162693 - DNA, 1131 bp, Enterobacter cloacae
atgacctatcaactccacgtcgggcgttgtgaggacgtcctgaaaacgctgccggataactcagttgacgccatcgtgacagatcctccgtatggtctgagtttcatgaaccacaaatgggattacgacgtcccgacagttgagcagtggcaggaatgcctgcgcgttctcaagcctggcggacacctgctggcgttcggcggttcgcgaacctatcaccgccttgtcgttaacgctgaggatgctggcttcgaaatccgcgaccaaatcctctggatttacggtagcggctttcccaagtcgcataacctcgatggtgattttgatggctggggaacggctctgaagcctgcccatgagccaatcgttatggcgcgcaaacctttcaaaaacacggtgtcggcgaacatggctgagcacggtactggggctatcaatatcaatgcctgccgcatccctaccgacgaggcactaaatggcggtgctggcggcctgctttcgcatcagcgcgacggcacagaacctgttgctgattacgagcaggcaccagaggggcgctggccggcaaacataattcacgacggaagtgatgatgtcgtgtcagcgttcccggatgcaaaaggccagcaaggtgcgctttccggcaatgagcccagctcgaaaatgggagcggcgaattgctatgggcaaatggaccggcggcacgaatcaactccacgcatcgatagcagcaagagcgcagcccgattcttctactgcgccaaggtcaaaccgaaagagcgcgatgaaggcctcgagaaattcattgctacatcagccagcgacatgaccggtggacgcaaggaaggaagcgtcggcattaacgacccgcgcgccggtgccgggcgtaccagtggcgcgaagaacaatcaccccaccgttaagccgatcgccctgatgggctatctctgcaggctgattactccgcctggcggtacagtgcttgatccgtggatggggagcgggagcactggacgggcagctattgaggaaggctttaacttcatcggcatcgacctgaatcctgattacgtaaccatcgcctctgcgcgaattgctcactccttcaaaaagacgacggaggccgcatga

SEQ ID NO: 162694 - DNA, 216 bp, Enterobacter cloacae
atggcacaggtcattttcaatgaagagtgggtcgttgaagccagactgactgaaagaaccggccttagtgaagggcaaatcaaaagttatcggctgaaattgtggatcgaaggcgttcatttcaaaaggctcaccgctgaaggtgagaccgataaccggaatggtgttctttggtacaactacccccgtataaaccagcttgttcaggaggcttga

SEQ ID NO: 162695 - DNA, 897 bp, Enterobacter cloacae
atgatactggccataagttctagctttgacaaaacgatagactatatttctcagaagcatggccctgacgaattctatagattcaacattgatcacctatcagattacgaaatatcatatggtaaaaatggctttagcctaaaaaataatgaaggattaactctttctgaagaaaattgctcatcaatttactatagaaaacctacccctgagacgttgcctgattttattaaaaaaatttaccacccacatatttacagagaggtgtttgctttcacagacggtataactgaagcatttagtggaacatgcctgacaaaaccatcaattctacgaaaggctgacaataaaatttttcagttacgtaccgcattaagtttgggtttcaaaattccaacaccattaataacaaactgcattgacaatgttattaatgaactgactacaccgatactaaagccattatcatctggtataattgaacatgaaaataaaaaagaattcgttcaaaccaatttcgttgactttagcaaaagcactaaaacgttaaaatactcaccttgctatttccaaaattttcaagacaaggattatgaagtccgtattaccatcatcgatgaacatttttatcctgtaaaaattgcttcaagaaacaaattagactggagaaaaaacaataatcatatagattatgacatcattgacatacctactcacatcaaagaaaagtcattgcttctcatgaaaaaattagacctaaagtttggttgttttgactttatagttagcgagggggaatggtattatctagaagtgaatgcaaacggacaatgggtttggcttgaaattgaattaggcctagacattagcaaaaaaataatggattacttactatga

SEQ ID NO: 162696 - DNA, 867 bp, Enterobacter cloacae
atgaaagggagtgtctacatacatcaaaatagtttgtctaccgattttaaatcgatactttctgtatcaggcataacatattcggatatcttaaactattcattgtctatcattgaaaggaaaattaagacactttttaaagattataaagagttttcaaaagatgaaagtggcgagcgtcaactaatcaatgctattttatctgtggtgaatttcacatattttatatatgcagttgctcctaaagtgaatagcactataaaattatgcaggataattcagcaagtaattatgtttgttaaagatcaaaaaataggcgaggaatatcaacacattgtattcaaatgtgtatttgataattcgtgttctattttagataaatactccattgataaaacaacaccgatcgaaactttgtatttgttagtgctgattaggcagcttggtaaatattattggttaggtgaaaaaagcttgatgaagtatttcaatattggctttgaaggtggtgtctactcatttgatgataatttgaattacttttccattacttctctaatgttttatatgagtgacaaaaaaagatatgatggggtcaggaaacatcttttgcttcatattgaaaatatttatagcatgaaagttgatactcttctaaatgagtctgaattggttcacttaacgttggatctaattgcttgcccatacatacctgtttcttttaaaaaaactctgctttctcgttatggaattgaaaaatcgtatgtgaaacgaattatttcattaaatgaatattggtttacaaaatggaatgactttgattttgcgaaggagctggacgcgaaacttagcaacgctgtatactga

SEQ ID NO: 162697 - DNA, 2034 bp, Enterobacter cloacae
atggatgaaattttccagtttaagccaaaggctacgctgacagcagcacaaaaccttggagtattcatatccaagtgccgagaacaattgattgtattcggttccgatctaaattgggaagctcctgtttggccaaacataacagtgtttgccaagctaggcattattacgcgaacacctatgcagggagaggtacaagaccctgcgttccttgatttcgccaaagcctattttcgttaccagcaggggcatcatcccactgggacaaagaatgaaagtaaggccctccgtgcgattgaggcggctttaattcaagtaaatgggaatgcaaatattgatggcctgtcgatttcagtactggatgaagccgctgaattggcaaggcagcactactctgatggtgctgcatatcattgtggccgagagattgagcggatggctaagtttgtcgttgaaaatcgacttgtatcaagtgctgtgcaaaattgggttaatcccattaagcgtgtagaggacaaaaacaaaacaggcagagaggctaaaaaaaatagggaaaagaaactaccgagtgatattgctctcaacgcgcttgcggaaatttttgcaaatgatccaatggatggaagagacatatttacaacatcggtgtttgctatgctgatgtctgctccttcgcgcatttctgaggtgttagctcttcctgtagattgtgaggtgttcgaaaccgatagcgaagatatagaacgctatggttggcgtttctttgctggtaaaggctacgaagggggtatcaaatggatacccactgtaatggttggcgtcgctaaaacagccatcaccagaactaaaatgttatctgagaatgctcgacagctggccaagtggattgagatacatccggataaattttaccgccatcctaactgccctgatgtcgctgatgatgagccgttgacaatggaacagtcctgtatggctctcggtcttgcttgtgaatccaaaaaacaatgtcgttcttccctctacaatcgagggttagcccaagaagatggtgcgcacacactaaaaagcctgtggcgacatgctatggcgcgcttgcctgatggctttccgtggtttgataaagacaagggaattaagttcagcaatgctttgtttgcacttaatgtaaatcagttccacgggaaccgcggatgtatacctattgaattgcataaaccgactaataacttctttaataatgatctgacgcctcgagaggctttgaatgaaaaatatgtcagtatctttgatcgccatagttaccgtgcagaaaacggagaacggattaaattaacctcgcaccaggctcggcacttacttaacaccatagcccagcgtggtgggctctcaaacttggaaattgccaagtggtcggggcgggcagatatgaaccagaatcgaacttacaaccacatgaccgaatatgagttggttggcatgtctgaacgcctcgatccctcaaaaggtctatttgggcctgctggagaggtggtaaagcaccttcctgtgactatgctggagttcaataccttagagcatgccgcagtccatgtgacggagtatggctactgtgtgcatgattacaccatgagtccttgtgagaagttccgagattgcgttaattgtaccgaacaggtttgcatcaaaggcgatgatactgaaaagttggatcgcattaagaaacgtctggagaagtcggagcgactgttttttcttgctgacgcagcggtggaaagtgacgagataggaactgatcgctggtatcagtaccacaagaaaactgttacccggcttcgtgagctagcggctattttagataatccagacattgaaaatggtgcccagattaagctccggggcaatgatttcagccagcttcaccgtgttgtcgcaaagatgtctaatgaggccatcgagcaaaaaggcaaagaaagtgaagaagctgtgatgttagatgatttgacaactttgttaggaggtggccttggctaa

SEQ ID NO: 162698 - DNA, 1191 bp, Enterobacter cloacae
atggtggtggatcgttcttctggccttcctgagtattaccctaatctttttttaacaactcaagtccgcaatagaggcgatgctttttcaacgatgttagcggcagctagcaacctagttatgttgttacgttttgtggatagtcgtggcatcaaccttgagcagcggtttttgagtaaagacttcctcaaaccacatgagcttgacgatctacgagattttgctcagcgtaagcaaggaaagaagccattaatgacgccctctagcccttggttggaagatgggactatatatatcgttaataacgggacacagcattctaggctgacaacgtttgccaactatttacgttggtatgctatgaatatcttaaagacagctgaactgaatattgtcgaacagattaatgctatgacggagcagataaaggcgcgccgatcatttaaaaagggtagaaatagtgatttgcaagatagatccttgagtgatgctcaactgaatgcgctatttgaagttattcagcctggttcagaatctaatcctttctcaaaagatgttcagcgtcgcaatcggctgatggtcttatttttgttttatcttggtattcgaggcggcgaattattaaacatcagaatacaagatatagattttagtactaataggattcgtatagttaggcgagcagacgaacttgctgacactagaaccaatgagcctaatgccaaaacaagagaacggctattaccgttgaaggagtccttggttcaagaactgcatcgttatattactcaagatcgcaggaaagtccgaaatgcgaaaaaaaatgactacctttttgtgacttacaagccaggaccaacggtgggaaaccctatctctaagggagggtatcataaaatcttttctgtgatcagatcagtatcgccgaaattgtatgcagcgacagggcacgcgtttcgtcacacttggaatcgcaagttttcagaaagaatggatgccctagatgatcaagttagcgaggaacgccaagaacagctccgttcgtacttaatggggtggagtaatggctcaggaaccgcagcaacttacaacaagcgttttatccagcagcaagggtttaaagcggctttggctttacaaagtaataatggtactcgtcttccagaggacttaaagaatgacgacgaataa

SEQ ID NO: 162699 - DNA, 225 bp, Enterobacter cloacae
atgggggagctaggtgtcgttgaggcagagcaagccgaaagcggcgacctgacgattcgcctgtttaaacgcaagtacatgcttagcgatgatggtgagatcgttaaaacaaaaggtgaggctattgacgttccggctaacagttggatcgatgtgcgtttggacatgcctgaaaatagtatctggaatcagcgtcagaaagaggcggctgaaccttcttcgtaa

SEQ ID NO: 162700 - DNA, 186 bp, Enterobacter cloacae
atgagcgctgaacgtcttgattatcaatggcggcaagttgggggccggtctatcaaagacagtgcaaccatagtcagatggtgggccgcatattacgaaagcatggggcagccgacagaggcgagctgctgcagaaaaatagctgatgaagtagagtccatgcagcaggtggtggcgaatgcctaa

SEQ ID NO: 162701 - DNA, 174 bp, Enterobacter cloacae; identical to SEQ ID NO: 162632

SEQ ID NO: 162702 - DNA, 450 bp, Enterobacter cloacae
atgattaccgaaaaaaataatgttttttattgcgactgcggattttctttccagagaggtcgcagtggcgcgcatgactgtgctgatggtctgcgcaataaattggtggaggctgaagccagatgcgcgacgctggctgcggagctgagtgcggttgaaacaattcacaacgacgccgtgttcatcacagacgaacactatgagcaatgcccgccggaagtgcagaaaatgattcgttcactggcggtgttgcagattcctgagtgccacgctttcctggctgaagtgcgggcccgtgctatcgatagtctggtagacatcaagactaagcagttggcagatatgcatcccgatactcatgcgttcggcgcaaccgccatgtctatccgcagccagattaacgaactgcaggtgttcgccgcccagcttcgcaaaggagtgcagtcatga

SEQ ID NO: 162703 - DNA, 390 bp, Enterobacter cloacae
atgaaactggtgctcccgttcccgccgagcgtaaacacatattggcgtcttcagacaaaggggccaatgaaaggccgtgtgcttatcagcgaaaagggaagggcatataaatccaacgtaagaaggtcagtgatagagcaactacgagctatgccaaaggcatccactgcattcgcagacgttgaaataattctctatccgccagactaccgcgaccgcgacatagataacttcaacaaagctatctttgatgctctgacatatgcctctgtgtgggtcgatgataagcaggttaagcggctaactgttgagtggggcgagaaggtgaagggcggaaaggttgaaataacgattgttcagttcaaaccgagggcgggtgcagccgcctga

SEQ ID NO: 162704 - DNA, 297 bp, Enterobacter cloacae
atgagcaagttgaaagacttggtttgcagacctgaatttttgagtgttagcagcaatgaggtggctaaggagtttggcaaacgccatgaccacgttctgcgtgatattcgagttatcttcaactggttagggcttccggaagaccatctttcgggaacttatacagatgataagggcagagtttatccatgctataggctcgataggaaattagctctggtgttgctgacatcctatgacaacgcttctcgcttgaaagtcattgagcattttattgagaatggtggtcagctatga

SEQ ID NO: 162705 - DNA, 906 bp, Enterobacter cloacae
atgtctgaacatttaaacattcctcaggtaactacagagccaaagcctttcggtgtaaccgtcaaatggaaatggcctgaagtgggccttcggtttaccggtctggaactgcaatacattttaagcaatggggagtttgtgaaggaaatcattaactggcccattacagagaaaaaaatttccggccttaaggcgggcgaacgccttcaggtgcgcctgcgccctgttacagcgtatggtgtggcgcgagactggttagcgagtgattggattgaaggaatatcgtctgtcgataccgatgaaatccttcaggagctgcaagatgagattcgcaacagcaaaacgtttgaggtattgagtggtgaatgctttattaccgatgctcatatcgccgatgacataatctccgccaactatagcgtgaagattaacgtgaaccacggcggcaaactgcacgttgctggcatggccggctgcattgaaggtgaccagcgcaaggtcgtgtttgaggctgaccgctttaaggtgcatgaagccgctcaatcagccagcaaaaatgaagagacgcccttcaatggtgatctggcttttggtggtttccctggggcaattagtcatgatggagctaatcccgctgatggcgataaagctaccgctgaaccaatcagttcaattgcttcagcgacaggcacagccaccaagacgcgactaaccgacgagatgcaagaactggttctcaaggctgtacgcgaaagcgatttgttcgcagtcctccaggcaaagattgatgcgcaaacagcttcagtagttggcttgcaacaggcgatgcacgaagcggtgaaagatgctcttcgcaatgcgctcaagccaggcggcatcctctgggcggctatctcacatagatga

SEQ ID NO: 162706 - DNA, 510 bp, Enterobacter cloacae
atgcaatatccaaccgtatctgtaaacggcatttccgttcgtgtcgataatgaaggtcgctataacctgaacgatcttcatgcggcagctgtagcaaacggtcaggctactgagtcgcaaaggcctggtgccttcatgcagagtatgcaggttaagcgttttgtacgaacattaagcgatgcaatgaaagttgcatcggtcaaagttgtcaaaggtggtactgagcaaggcacctggggtcttgagttggtcgctatacgctatgcagcatggctgaatccattgttcgaaatcaaagtctatgaaacatttcagatggtgataagaaaaggcatagatgccatgtcacgccttaacaaaatcgaccatgtgattaacaccgaaaccaaagcgattagccaatgtgccagccagatggcaaagtggggtgttggtggccgcaagcggcttctacacacagcacgggagcgcgtagctgatgaagtacagatgtatctccccggtatttaa

SEQ ID NO: 162707 - DNA, 540 bp, Enterobacter cloacae
atgaagtacagatgtatctccccggtatttaaagggcgcgtgaaccaagataacattcggttttgctaccgctcgatccctgctactcttttggcaaaattgaccaaaggggatagggatatgaaaaaatcattattggtactttctttgttaatcatggctggttgctcaacaagcgtaacccctccaagccaagcttcgtttgcaccatctgacagagtctttaaatttcataatgtggatggcaaccagtcaattactgttatcagagatagcgggtttataggcggtggatgttttgcatctgtttatatcgatggacagttgtctgcaaagttagatcctaaagaaaaagtaaagttttatttacccaagggtgaacatgctgtaggagccgccttggaggggcggggattatgtggcgcaaatgaagcaagacaagagcgctacataaacttaagtgatggagaaaataagtatgtgcgagttttcattgatgagggcggagacttggatataaggcctacgaccttaaaatag

SEQ ID NO: 162708 - DNA, 240 bp, Enterobacter cloacae
atgttcgttgaactggtttatgacaagcgtaatgttgaaggtttggctggtgccagagagattatcctgaccgagttgacgaaacgggtacaccagattttccctgatgccgaagtgaaggtgaagccgatgcaggcgaacgctttaaatagcgacgccagcaaaggtgatcgggaaaagctgaaccgcatgctggaggaaatgtttgatgaatccgacatgtggctggtgaatgattag

SEQ ID NO: 162709 - DNA, 576 bp, Enterobacter cloacae
atgcaatatgggtacgcaagggtgtcaacttttgaccaaaacctcgaattacaattagaagcgttaaatcggtcagaatgcgaccaaatatttgaggataaaatatccggcgcgaagtcaaaacgccctgggttggataagatgatgaagctgctacgacccggcgataccgttatcgtctggaagcttgatcggcttgggcggtccctgattcaccttgtagatttattgcgctatttccgtgcgaacaatattgaattcgtatccatcaccgaggggataagaatcagtacctcaataggccgtttcgcatacacaatgctgagtgcagcagccgaaatggaaagggagaatattattgaaagaacgcgagcgggtttagccgtggcaagggcaaaggggagaatcggcggcaggagaccgaagctaacaccagagcaatgggctcaggctggccggctgattgcaaacggagtagacagaaagcaggtggcgatcatctatgatgtggccgtatgtgctttgtataaaaaattcccggtaaataaagacgttacacgaacttcaacaccttaa

SEQ ID NO: 162710 - DNA, 240 bp, Enterobacter cloacae
atgccacgcacagcagacatacgcaccgcctttgttgcggctacacaactcaaccccaagggttatcgttaccttagaacagacaccttcatatctaagttgcgggagttaaactggcatttcacccaggaagacgcaaactcatggatagaacgctatcagcctgactttgccgataagacagcagacaacagtgataaccgatactggatcctgcgtaacatggggaggattttctaa

SEQ ID NO: 162711 - DNA, 1923 bp, Enterobacter cloacae
atgacaacctacgctaccaataacgcactgggttcaaccgacccgcgcgatttgtatgacaactcgcaaaatttcgattttgctttgaatgatattacggccctgatatggaaagacaggttcggtcgtgatcgccgttcctggtatggacttgagagcatggttgctgatgctgctggggcatttggctacattgtactttccggcgtttccttccagacaggcgctacagtacatcttaatgagttactactggatgaggttacaggcgaatacttcaaatggacaggggcgtatccaactgatgggaaaatcgtacccattggctcttcgcctgatacctctggtggtcagggaccgggtaaatggcttggagtaggagactcgtcgttaagaacagcgctggcatcagctaatggtgatgatttagtaggcacgacacatcgcggtaaattaaaacttgatctcaatgctatcgaccgcaggcctagcgggtatggcgattcagtttcagcggttctggccaatggtcaggacgtagaaattgaaaaaacatatttacgttccagcccaatattaccaacagattaccaggttattgatggtaagggcggcagtttaacaatgaatgcggtagctcgtgcagttcattcagagtttaaaaaaggattcacacttcgtaacttacgcatcataggcaacatcataaacggaccatcaacaggtaacgtggcgtatggggtgcaattagaagacagtgaaaactttaaaattttaggccttgatgccagacagttcagcggctctatggaacttctgcgctgtacagattttgtagtgagagatgtatatgcccgcaacatgcgctaccacgataatgtagcggcaggtgggtatggagtgctgttaggagggagctctcgtggactgattgatggaattaatttcctagctagtgcagcagatggagatttaggccgtcacgctttctacatctctttagatacgtcaggcaacatttgtgaagacatcattatcaaaaatgtagtggcacgctatgctgatattgataatagaaacatgccagcgggggttattcgtagaagtaaccgttgcatgattgatggatttaatgtcgctggttctaatggtggctttggccttaacgcacagaacggtgttattcaagaccttcaaatacgcaacggacatatgaagattattcagtatgatgataatgctgtatatggcatctcaggtggagtagatggtcagccaggcaccgtggtaggcctacgtgtagacaactacacatttgaaggagagattaaagctggtataactcctgcgtctgtgcgtcttcatgcactagctgttacttgtcgtgacagttatttcactaatacccgtattaaaagtcacggcagtgccaaccctattcttgtggcttctggtgcgtttaacgtcacattcgatggaataaaggactttgtttcggctgggaatgcttcaggtgcagccttaatacgctttatggggagcaatagtaatattaaagtgtttaacatcgacaccgcccgtgcgccattcgttggccttgataatgtcactgatcttacagttaactgggagaggtttgctcgaattgttagcgctaacggaacggtaacaactacggatacagaatcattgataagcactgtatctgcaactggcactggtgaattaacagtttcattcaagccacatgttaccgctgatgctgtgcgaaaatgcacagtcactcctgctagtgttgcaggtttggtgatcctccctgaaatatccggtaaaaatctgatacttagattctataatgggagcggcgtacttgttcctttgggttcatctatcgttagtgctgatataaggttacactcatag

SEQ ID NO: 162712 - DNA, 3078 bp, Enterobacter cloacae
gtgacaataagaatttatccgtcgaggctgccaggcgagccgctggaaactcacaaacatggtgatatgagcctgtcgggttggcttacaaataatgtcgatggatggactctcgacagagaacacccaattaccattgaggtagatggtaagccggtaccacatgatgaatggccatccataaagattagtcccgaaagtgacgtaaaaatttaccccataccctacggtactggtcttgagattgttgcctgggcagcagtagcggttgcggtagcaagtgccgcgtattccatctacatgatgagcaatatgcagaccgggggttatagccagcccggtaatggcgatcagataaaccttaaccccgcgaaagcaaacagtgcgaaactcggcgatccaatcagagagatttttggcaagtaccgcgtctggcctgattatgtcgtgcaaccagtaagccgttttgtaaacgaaaaagacttgataaccagtatgttccttaatattggagtgggtaatttcactattccagtttctgagatgaggatcggtaataccccattttctgcgtttggtgctgatgtctcgtataccatttatccgcctggtgcagacgtctctggcgacagccgttctgaaaactggtttaactctcctgaggtaggaaatacaacgtctgggactgcgggccttgatttaggttcaagcggaccagaaacagtcagtgttgttgccgatggtctattgctgaataccaatacagtaactcttattgggtcctcatcaagcgatgaagatacagatatacctccatcgtggactactggaactattattgatattgagtcccctgacacttataccgttgatctcaacaatggttatagcgttatttatggctcagtatctgaaatggctccggttgttggcatggcgatgactctggaaataaacaacgatagctttgatttatttgtcgcggcttccagtccagcagtgcctgctgttccaggagtggggggaagtacggcaagcatagccgctagtgcttcaccaacaacttacgatttcagcagcgctcctcagacatttacattaacctggaagactgtcacctacactgtgtcgctaatcagtaattatgtaacgatgagcgggctggtaaatgctataacaagccagatatcggcatcaggtttaagagcaagagataactcagggcgtattgttattgatgaagtcagcagcccatatgctggtggatcaataactcatagttcattgccggttagtgttttcggtagtgcgccagttgatactgtaggtgttgcctcaacaggtggtacggctgcggttcctgccagtatccgtctcgcatatgattccgcaacaggcgcaaaatttgcggggataccgcttggtctgcaaaggctgacactttatcctacggattacagttataaaattactgctatttcaggcctgacaattagtgtcagtagggttcatgttactgaagacgcttcagggaacaaagttataacagacgacccaacatggcctggtttcattcagcgtaccgtgctcgatggctccgttactggcattaatgatgattatgactgggttggacctttccttacttgccctgacggggaaactacaaatcggattgagttcaaccttaactttcagaatggtctcgcaaaatataatagtaaaggtaaaaaacgttctcagacagtcgcactgtatgttcagtaccgtttagtaggttcggcaacatggacgacgttgggacttagctacactcgaaatattgaagatcagataggcttcacaagagcaattgatgttacacctggccagtatgaaataaggatgagaaggaaggacccacctgctggtggttcaacccgagatcaggtttactggcaagcattgcgatcacgtctcgccaaaaggccaacaagctatcgtgatataacgactctggcgcttagcattagaaccggaaaccgcctgggtgcgcaatctgacaggcgtataaatatcaccccgacacgtcaatatgatgaaggaagccctcgcagtataagcgccgccctttaccatgtgctcaagtctcttggatatcaggataacgaaatagacaggtctgcaattgattctcttgaatcaacgtactggacgccgcgaggggaaacattcgactttgcaacaacggatagtatttctgctcttgatatgctgaagactatcaccggtgccgggatgggttatttcctcctgtctgaaggtttggcatcggctggcagagaaggtataaaaccatggacaggaataatcactccacaggaaaccacagctgagctaaccacttcgttcaaggctcctaatgaagatgattacgatggtgtagatgttacctatatcaacgaactgacatgggctgaggaaaccgtacaatgccgcctgcctggtaacccgtctccgattaaagttgaaaacttccagcttgatggcgttctcaaccaggacagggcgtacagaataggaatgcgtcgcttactcggttatcaattgcaaaggctatctcacgatacatcaacagaaatggatgctctgtgttaccagtttatggacagagtcattttcaccgacgacatcccaggaaatctgactttaagttgcctgattgaggatatgagctatgacagcctcgccataaccttgaagctcagtgagccacctgactggagttttccagacccacgagtaattatcagggatcaggaaggtaaagcatcagcgttactcgttccaacacgaatagacgactttactattacggtgccttactcatctgcattatctcctgaaacatggattatggatgacccagcagtagagccattacgtctaatgttttgctcatctacccgtgtaggttatgacgccctgataggggaaatatctcccggaagtgacggcacaaacgatgtaacggccattcagtacaacccagcaaaataccagtatgacgacgccacttatccaggtgatgtcgtttaa

SEQ ID NO: 162713 - DNA, 276 bp, Enterobacter cloacae
atgagggatggaggtttatcggttgacgagccagtcaacatcgaaggaataacggtacttcagtgttgtaggatcgcgcccctgttggttccagcgggttatataagctttaccctgtatggcgtcacgcaaagctctggccgcattaagagcgtcgctgtctgtttcgccgtaaacatcaacctgaagggaaaagcgatcaatgtctggattctgtttaaggtaattatctggttctccatcaacgttctgccaaaccgcgtagggataaactaa

SEQ ID NO: 162714 - DNA, 540 bp, Enterobacter cloacae
atggctgatggagtagaggtaaaccttaccgggcttgattcgctccttgcaaaaatggaatcagtctctgaagttacacgtaacaaagctggcagattcgcccttcgaaaggcggcaaacataataagggatagagcgcggagtaatgccacacgtatagatgatcctcttactaaagaggccatttataaaaatatctctgttaattttggaagtcgtgaatttcgaagaacgggaaacctaacatttcgggtcggtgttatgggaggcgcaaggcagtatgccaatacaaaagctaatgtgagaaaaggccgtgccggtgggacgtacaaaacatctggtgataaaagtaaccccggtggtgatacatggtactggagaatgcttgaattcgggacggagcatgcagccgcacgccctattatcagaccagctatgaacggtattgatgggcctgtggtgaatacttttgcggaagaaatggagaaagctatagatcgcgcactacggcaggctcagaaaaagggtaataaatcatga

SEQ ID NO: 162715 - DNA, 333 bp, Enterobacter cloacae
atgcaggccgggaaattacggcaccaggtaatactccaagagccggtgacggtacagaatcctgatacgggagctgtaaataaaacctggcgtgatgttgcaattgtctgggctgaggtttacccgttatctgcccgtgaattcatcgcggcacaggcatcgcagggagaaatcactacccgcataactatccgcttccgtaccggtattactcgaaaacatcgcatcctttttcgcggtggtatttacaatatcgaaggtgttttgcctgatccgaaaagcgggaatgaatatcttacgcttccgtgctcaaaggggttaagcgatggctga

SEQ ID NO: 162716 - DNA, 1209 bp, Enterobacter cloacae
atgtctgatgtaaacgaattgctgaaaaaagtttctgcgaagctggaagaagtatccggtgaattcagccagaaggcggaaaaagcgattaacgaggctcaggcctccggcaagctttccgcagaaaccaaagagtcggtggataaaattgctaccgaatttaatgccctgaacggtgcgcataaaacgctggccgcttccctgggggagcttgagcaacatgtggcaaatatgccgctgaatgccgcaaaggaagttattcagtccgtcggtcagcaggtagtttctgctgacatgatgaaagacattcgctctagcctggaaggtaataaacgtattgccgtgcctgttaaggcggcactgaccacagtggatgtaggtggaaccattgtcgctccgcagcgcctgcccggtatcgacaccacacccaagcagcgcctattcatccgtgaccttatctcccctggccgcacgcagtccaacaccatttattacgtgaaacagacagggttcactaataacgccgctgctgttccggaaaataccaccaaaccttacagtgaaattgagttcgctgaagaaacaacgcccgtgcgcaccattgcgcacatgttcaaagcatccaagcagatcctggatgattttgcacagcttcagtccactatcgacgcggagatgcgctacggcctgaaatatgctgaagagcaggaaattctattcggcgacggcaccggcgcacatctgaagggcatcattccgcaggcgacggcgtttaatccggcatttgcggtagagcgtgaaacaggtattgaccgcctgcgtctggcgatgcttcaggcgcagctggcgcgcttccctgcatcaggacatgtgctgcacttcatcgactgggccaaaattgagctgaccaaagatgagcttggtcgttacatcttggccaacccggcgcagctcactacgccgacactgtgggcgttgccagtagtggccactgaaaccgcgcagtttatcggtaagttccttacgggcgcatttaatgctggtgcgcagctgttcgaccgtgaagaagccaacgtggttatctcaaccgagaacgccgacgatttcgagaaaaacatgatctcgattcgttgcgaagagcgtgcggcgctggcggtataccgtccagaagcatttgtctggggcgaactgtccggtgctggtagctaa

SEQ ID NO: 162717 - DNA, 768 bp, Enterobacter cloacae
atgaatactaatgatattaaaataagtattatcactccaacctttaactcagcctcgacaatattacaaacttataattctatttcggaacaaacccatcataactgggaatggcttgttacagatgattgttcaagcgataatacaatcagtatcatgaatgccatatgcgaaaaagactcaagggttaagttgtttaaaaatgcagtgaactcaggcgcagctgttacaagaaataactcactggcaaacgcatcaggggattatatatctttcattgatagtgatgacctatggtttacttcaaaacttgaaaaacaacttaattttatgtttgccaatgatttagattttacattcactgcatatgaccttgtcgatgctcatggaaatcctttggataaggtggtggatttacaaggcgacaactttagcgttgattattccgatatgcttaaaaaaaaggctactttgggatgttcgacagtaatgttcaaaagagcagctttttcagatttctttatgccattaattagaactggccaagattatgcactttggttaaagttattgaagtctggcaaaaaagcttacttgctaaatgaaatattaactcgctatcgtattttgccaaactcaatatcacgcaataagattaaaaaaagtcaaaggcaatggagtatatacagaaaaattgaaaagttgtccttggtacacagtgcttattgttttagcttttatgcttggcgtgctgtattccgcaaataa

SEQ ID NO: 162718 - DNA, 639 bp, Enterobacter cloacae
atgctaggatttatatcattagttgaaagctattgccgttgtattatacgcagagtattgattgttgataaacaagcaaggtccttcagtttcaaaaataacgtaagctatgctgcagctgtttatcatgaaaaaaacattctaccagaagctttattagaagatgccacattcatctctgaatcaaatatacttgacaccattaaaatatttaccggattacgtatagatagacaaaaatcaccatctgtaatatctgctttgcagaagtatgaacaagtatgccaactacggcattgtatagttcaccgttcaggtttattaggtacaaaaaatgctttaaaacttggccttgaacagcattatacttttttagaaaaaccaattattattagttatgatgcaatacagtctattatttcagtatgtgataatgttgtaaaagaattaaatgatgagattttcaacctccttcttgatgggattgctcaacaatttgaatggactggagaccttagaaaagataaaaaaacattctcaaaatattttgatgttttttattcttcaagcgcgaatgctaataaatctgctgaattaaaaaaatgttatcgttctttttgcagccattatggtttttag

SEQ ID NO: 162719 - DNA, 408 bp, Enterobacter cloacae
atgtctacagggaaaacgctgctcgccctcgcgctgagcgctctcttaccagcaggtgccgcatgggcggcgaataatgacaccatcatttattgctctgaagcatcaccggagtctttcaacccgcagatcgccagctcgggcccgtcattcgtggccagctctcaggtcctgtataaccgcctgatcaatttcgacccggtgaaaaacaccccggtaccgtcgctggcagagtcctggacaatttccccggacggtaagacttatacctttacgctgcgtaaaggggtcaagttcaacagcaataaatacttcaagccgacccgtgattttaatgcggatgacgttattttttccgtcatgcgtcagaaagaccctaaggaaggtgcgaacaagttcctgatatga

SEQ ID NO: 162720 - DNA, 126 bp, Enterobacter cloacae
atggaaggaaaaatggcgaaatcagacgggtatcgtgcaatgaatatgtatccgcacgatgtcattatgcaggaagccaacaagtgtgtccggctggcgattaagaatggtatcgtcaaactgtga

SEQ ID NO: 162721 - DNA, 1764 bp, Enterobacter cloacae
atgctgaaggctatcagggagctcctggtcggtacccgggcggtgccggccaggaacaacgcatcatctcaaccctcatcatcagcgggacccgcggggtatttcatgccgcaatccgccacgcaactgctggctatgcctgctcgtcaacagtgcctgcagcagttgtgggagaacagtgcgctgccaaaggatttgttcgagcagttttacctgcagccgctcaataagctggtaacgctgatgcaggtgctgccggcaacccggcagggcgagtatgccagcgaaggtggcctggtcgatatcacgctgcagacgacaacctatgccgttcgcctggccaaaggacatatgctgcccccggggtcgccgccagaagagcagtcagcccaaaatattctgtgggacgcggtagtattttacgctgcgctctggcgttacctgcctctgttcagccaggtcgagggtgaactgttgagcggccgcccgtggttaccaggtgtgacggcccccacagagccttaccattttcgtttcagacctacagtgccggacccgactatgacgatgagccaaagcgcgttggttgcgtgtcgtttgctgccggcagaggcggtcagttggttgtccacgttgccggcagcagcggaggccttgatgctgatagcttcaggccaggccagctcactgccggtcattgatgatattgtccaggaagccatcaggctggcgcgcggagagggcatagacatgaatgttcccgagcctgttaacgtcgccatccccgttccgtcagttccttctggtatgccgtctgaacttccgagcgtagtcccaccgaagattgaactggaagctagtgcctctggaggtgatttgcacagtaccgtgattagtgaacaggtgtctgacaaccctgaagctgcaagtcatgatgctggcgctgcggttactccggaagagggaatacctgttttgcctagggatgtattgctgagttcggcgctggatacgcctgtcaatgaattgccactgacagagatggttgtcgtgccagaacctgtagttgaggctgaagaagatatgcaggcgttgctgtcactgatgaatgtcagtgtagttgtaccggcaaacccggtcgggcaggatcaggaggctttccccaggaatgggggctcactttcagagcatgaccttgcgccagcacagggtatttctactgtaatcgaagagggttatgacttaccggaacagaattatctgtcagtaagcgaaccggagttgacaggatacgctggatataggtcgtccaggcaacatgagctacctggtcatcaggagcaggagattgcggtcacgacagagcagacgataaatgtaccggccgcagaggacaataccggtgaaacattttggcagtggttgtgtgcaggtatcaaggaaggacggatcccggtaaatcaggagggggcacgagctcatatggtcagcggttttgtgtttctttgtgtacccgaaatttttcatttgtatatcagggagtgcggtaaagcgcgttccgacaggaacggtattcagaaggcttttgaaaaaatggtgaggcatagagtacgtaaaggtcagcgattttttattggtcatttgtatcaggaaccagttgggagtggtccgtacagacgcataaatggttatctggtcaaagccaatagtttatatggggggagaggtgttcctgaggacagcccgtttctgctgatcccgtag

SEQ ID NO: 162722 - DNA, 1458 bp, Enterobacter cloacae
atgtcttattctgatacgcctgaacagactgccaacatcggttggtctgggcaccgccttgtcatcagggcgtttgccagcataggcaaaacgtccacgctggtgcgattcgcgttagcgaatccagacagcaggatgctctatcttgcctataactgggcagtaagggacgaagcagagcaaaaattccctttcaatgtagactctaaaacttcccatcagctggcctggcccagcttcgggtgccactatcaacaacggttgacgagcaatctgcggatcactgacgttgcccgtcaactcaatacgcgttactggcctctggcacgtgcggtcattacgaccttcaatgcctttctgtgtagtgtcgatagcgacttcgggccacaacacctgcctgatgaggatgtccgcagcgggttatcagcggagagaatcctggccgcagcgcaacggctttggtgtgaatccgcgcgccaggacggcacttttcctgtcacgcacgatgtctatctcaagttgtaccaactctcacagccaaacctatcacaccgctggcagacgttgctatttgatgaggtgcaggacgctaatccaatcacgcatgctctggtgctgaaacagcgctgtaatgtggtgttggtcggcgttcgtcatcaacagatataccgttttcgtggcgccgagaacgcgctggatgcaccggtattaattgatgcagaatggttgaacctgacccacagctcccgttttgggccagcggtggccagagtggccaacatgtggctggcccgccagagcgaaactctgcctgttatcggtgatggcggagaggactgtgtggtgtcctgtctgacgaaagaagcttgggttcagcacgtcacggtgttaagccgtaccgttgccggtgtgaatggtacagcacttgacgccagcctagccggtcaaaaggtgttctgggtgggggacattacgggctacaaaaccggggagcaggaagacctgtactggttctcgacggatatgcccgaacgcatgcactcgccgatattgtcacaaggataccgtgattttgatgaatatgagttggtagccaaaacaagcaaagatccggaaatgaatcaggggctacggcttcttgatcagtatttcccgctgccgcagaagctgcaggtgatgcgtgagcatgcagtcactgacgagagtgcaacccaggtcacaatctctacagcacaccggagtaaaggtctggagtggccagttgttgtcctgaatgaggactttgtcgatatcactggcccgctgttgccagaggatgaacgtacagatgaaaccaatcttctgtatatggcggtcacccgtgcgcggaaaaccctggtcatcaacgcgttgctgcaggcgcttctcgacgaagaagacacagggaacgagagcaaaggggaaacggcagtatgctga

SEQ ID NO: 162723 - DNA, 1044 bp, Enterobacter cloacae
atgaatataagaatattcattgctatggctttgctttttatcagtcaaagtatatttagcgctaccacgcaacctcatattgtgattcttgctacaggaggcacgatagcagggacggcagcaagtacaacacaaacatcgggttataaatccggtgaaattggtgttcagacattaattaatgccgtgccagagataaaaagtattgcacgtgttgatggtcaacaaattgctaatattggcagtgaaaatatgaccagcgatattattttaaaactgtctcagcaggtgaatacactactggcgcgggatgatgttgatggtgtggtgattactcatggcacagatacgttggatgaaacggtgtacttcctgaatctgacggtgaagagtgataagcccgtggtattcacggctgcaatgagacccgcgacagcgatcagcgcagatggcgcgatgaacctgttggaagccgttactgtggccgcagacccgaatgccaggggccgcggggtgatggtggtattaaatgatcgtattggttcggcaagatttgtcactaaaactaacgcgaccacgctggatacattcaaagcgcctgagcaggggtatctgggggttattgtaaacggtaaaccgcaatttgagacgcgagtggaaaaggtgcataccctgcgttcagtatttgatgtgcgaaacctgcgcgacttgccgaaagtagtgattatttatggttaccaggatgatccggaatatatgtatgatgcagcaatttcgcatcatgttgacggaatcatctatgccggaaccggggcgggttctgtttctgtcagaagcgaggcagggatcaggaaagcagaggaagccggaattatagtgatacgttcatctcgcacagggaatggagttgtaccaaccgataaaggccaacctggactcgtcgccgattcattaaatcccgctaaagcccggatattgctgatgacagctctgacgcaaacaaaaaatcctgagctgatccaaaactatttcagtacctactaa

SEQ ID NO: 162724 - DNA, 1320 bp, Enterobacter cloacae
atgttttggacggaattgtgttttattcttattgctttgatgattggcgccaggatcggcggcgtatttctaggaatggtcggtgggttgggtgtgggcgtcatggtattcgtatttggcctgacaccttcaacaccccccattgatgttattcttattattctttctgttgtattagctgcagcatcattacaggcagcagggggactggatttactggttaaactggcagaaaaaatcctgcgacgtcacccacgttacattacgttactggctccttttatttgttatatttttacctttatgtctggaacagggcatgtggtatacagcttgttgccggtgatctctgaagtggctcgtgactcggggatccgtccagaacgcccattatccatttccgtaatcgcctcacagcaggcaatcaccgccagcccgatatcagccgcaatggcggcgatgattggcctgatggcgcctttgggtatttcaatttccacaattatgatgatttgtgtccctgcaacattgatcggtgtggcaatgggggcgatagcgactttcaataaaggcaaagaattaaaagacgacccggagtaccagcgtcgactgactgaaggagtcattcagccggttcagaaggaaagcaaaaaaacagaagttacgctgcgtgccaggctctctgttgtgctgtttttaatgagtgcggttgtgattgtattgttggggcttattccgtctctgcgcccaatggttgaaacagcaaaagggctacaaccgctttcaatgtctgccgcaatccagattaccatgctctcttttgcttgcctgattgtattgctgtgtcgcccgcaggtggatcaaatcattagcggtacggtttttcgtgccggagcgctggcgattgtctgcgccttcgggcttgcctggatgagcgaaacctttgtgaatgggcatatcgaactgatcaaagcggaagtccagacacttttacaacagcatacctggctcattgctatcatgatgttttttgtatccgcgatggtcagcagtcaggccgcaacaactcttattttattgccgctggggttggcgttagggctgccagcctatgcgctgattggttcatggccagcagtcaatggctatttctttattcctgtggcgggccagtgtctggcagcattagcttttgatgacaccggaaccacgcggattggtaagtacgtgcttaatcatagctttatgcgaccaggcttagtcaacgtcattgtttcggttaccgttggcttaattattggaaaaatggtgctggcctga

SEQ ID NO: 162725 - DNA, 849 bp, Enterobacter cloacae
atgagcatcagcgttataggtattggtgacaatgttgtcgataaatacctccattccggagtgatgtatccgggggggaatgcattaaatttttccgtgtatgcaaaactcgcaggcgtacctgctgcttttatgggagtctttggcaatgatgaggctgcaaggcatgtgcaggatgtcttacatgagttgcagatagatatcacccactgccgtcattatgctggtgagaatggatacgcatgtattcgactcaaaaatggtgatcgggagtttgttgccagcaataaaaatggggtgctgcgcgagcatcctttgaaactatcacaagatgatctctattatatttctcaattcaatttagtacactccagcatcaacggttttctggagccagagctggaaaagataaaacagaataataatcttatttcgtttgatttttccgggcgcggtactgatgaatatttcgaaagtgtatgtccatggataagttacggttttatttcatgcagtggtttatcatcagatgaaataaaagaaaagcttgagaaaatttatcattacggttgccagcatgttatcgcgacccgtggacatgagggggtttattatttttcggccaatggttatcttgagtggcatcctcagtatatcgaaccagtggatacgctgggagcgggtgacgcttttttaaccggttttatgctctccattatgcaatccggtacagataaacctgataatgaaatagtgatgtcagccatgcgagcgggagggcaatctgctgcgcaggttttatcacactacggcgcattcggttttggcaaaccttattctgcctgttaa

SEQ ID NO: 162726 - DNA, 978 bp, Enterobacter cloacae
atgatgagtatgaaagagattgttagcgacattttggccagccaggtggataaagggggagtaaaatacgtttattatgtggcctgcggtggctcttatgctgcgttttatccggcaaaagcctttttagagaaagaggcgaaaggtcttaccgttggcctgtacaacagcggagaattcattaacaacctgccatcggcactgggagagaacgcagttgttatcgtggcttcgcacaaagggaataccccggagaccattaaggcggctgagcttgcacgtcaacatggcgcaccggttattgggttaacatgggtaatggattcgccattagtcgcccattgcgattacgtggaaagctacacctttggtgataacaaagacattgctgaagagaagacaatgaaaggtttgctgagcgcagtagagctattgcagcagactgaaggctatgttcattacgacgacttccttgacgggataagcaaaattaaccgaattgtctatcgtgcttgtgagcatgtcgcagagcgggctgtggcttttgcgcaggaatacaaagacgacaaagttatttataccgtggcaagcggtgctggttacggtgcggcatatctccagagtatctgtatctttatggaaatgcagtggattcactcagcctgcatccacagcggtgaatttttccatgggccttttgagatcactgatgcgaacacaccatttttcttccagctatctgagggcagcgcgcggcctgtcgatgaacgcgctttaaacttcctgaaaaagtatggccgccggattgaagttgtcgatgcgaaagaattagggttatctactatcaagacgacggtgatagattatttcaatcattctctctttaataacgtttatcctgtctacaatcgcgcgcttgcaagggctcgtcagcacccgttaaccacgcgtcgctatatgtggaaagttgagtactaa

SEQ ID NO: 162727 - DNA, 720 bp, Enterobacter cloacae
atgatggagcagcctgacagcaaaagcgcgaagccactctataagcagcttgaggcctccctcaaagaggccattctgtgtggtgaatatcaacctggacagcagatccccactgaaaatgagctaagcgcacaatgggaggtcagtagggtaaccgtgcgaaaagcactggacgcgttaacgcgtgaaaaactcctgacccgcgtgtcaggtaagggaacgtttgtttccactgaaaaatttcagcgtagtatgacagggataatgagtttcaccgagttatgccagtcacaggggcggcgacccggctcacgtactatcaaatcagtcttcgagtctatcgatgatgagacacggtttttgctgggcatgactgccgaagaaaaagccgttgtcatcgaacgtattcgctatgctgacgatattcccgtctcgctggaaaccgtccagatgccaccacgttttgccttcctgttacaggaagagcttaacaatcagtcgctatacgagtgcttgcgtgagaaacacggtctgtggtttacccactcacgaaaaatgatcgaactggtttacgcgagttttgaggttgctcattatctgggcgtagcagagcattatcctcttatcctcattaagagtgaaatgatcgacaacaaaggcgaattgtcctgtgtctccaggcaactgattgtcggcgataaaattcgtttcacggtgtag

SEQ ID NO: 162728 - DNA, 726 bp, Enterobacter cloacae
atgttgagtaatggactgcaacagcatactgctgtcccgctatacagacagttgaaggacaagatcctcaacgatatatcttccggcaaacttgccgaaggggtaaaaatagctacagaagtcgaactgagcgagctttataacatcagcagagtgacggttcgtaacgccatcaaagagctggtagatgaaggttatctggttaaaaaacaggggaaaggtacctttgtctgcctgcctaaaatcgaacgtaaagtggagcatctgctgagctttacagacgcctgtgacagcagtcatctccccaccgccagcaaggtgctgcgcaccgcgatcctcaacgattatcaccatgttcgcgaagcgctgcgcttaaatgatgacgattcgctgttctatattcagcgtctgcgccgcgcgggggacctgccgctgatgctggagaataactactattcacttaagcgatttgggtttttacagcaggaggatctgagcggatcgctgtatcagcttttacgagaaaagtacgcgattcagccgacccacgccggggagacgactgtggagatggtgcgtgcccatggcgagacggcgacgttgctggagcaatcccccggtgagcctctatttttaatgaagacgctgattctggacttcgactaccagcccattcactacggcgaacagcttatcgttgccgagcggtataagtttaatttttaa

SEQ ID NO: 162729 - DNA, 1419 bp, Enterobacter cloacae
atgcgtattccaacaataaaatgggctgtaccccactgctacgctctgatcttttttatcattatcgtggttgccgttttaacgtggcttatccccagcggcagttttgattatcacaccgtgaccttgccaggcggcgaaaccaaaagcctggtggtgcccgactcctatcatgtgctggataaagtgaccaccgatggcgatttacgccaaggcttttccgctgtccttgccgcccctctggagggcattatcaaggcggcggatgttatcgcctttgtgttggtggtgggcggtgcgtttggtattatcatgagcaccggcgccattgagcgcgccctgcttgcgctggcgcagcggctggcgggcaaggggattctggttattccgctgtcgatgacccttttcagtctaggaggcgcgaccttcggtatgagcgaagaggtcattccactctacgccatcttcatttcactgatgttcacgctgggttatgactcactgactgccattctgatcctgtttttaggcacgcagattggctacgttggcgcgatgaccaaccccttttccgtattaatcgcccagggagttgccggtatccagggcaacccgcagctctggctacgcgctattgcctgggtggtttttaccgctatgtcgattatcttcaccatgtggtacgcccaccgcgtgaagtgtgatccgaccaaatcgccctcatatgaaagcgactgccagaaccgcgcgctgtttatgggaacgcaatccggcaatgtgcagttctccctgagcgatcggctgatcattatcgcttttgtccttgcgctggcggttatctcttgggggcttatcacccgaggctggtacatggtggagatcggcacagtctttttagcgctggggctgtttgcgggcatcgtcaataaaatgtgcgtcagtgaagtggcggaaagctttgtcggcggctgtaaagagttcgtctacgccgcagtggtgattggcctggcgcggggcattttggtggtggcggaaaacggcaaaatcatcgacaccatgctgtatggtctgtcagagatgcttgatggcctgccgcagtatgcttttacgacgctgatgctggtgagccataacatcattactttcttcgtgccgtcctcgtcgggggaagcggcgttaaccatgccggtactagcaccgctgggcgatctggtcaacatcaataaagaggcgatggtgatggcctatcagttcggcaacggtctcaccaaccttatttcgcccaccggcggcgtgctgctggccgggctttctattgcccgagtcggttttggccagtggctgcgggtgatcatgcgcctgtttccactgctgtggctgaccagtgcaatttttgcggccatctctgcctgggtttaa

SEQ ID NO: 162730 - DNA, 1569 bp, Enterobacter cloacae
atgaatattcatcatgctgcagatattattttgcggtcaaatagtatatttactgctgacagcgaaacactattttccggttatattgtcattgctggcggtattatttctgctctggtgccagcagtcgaagatattagcccctggcgcgggccgcagacccagttttacgacctcgacgataagctgatttgccctggtatttgcgataatcacaccttttttaccggctatatgagtatgcatcgcggcgtggatcttagcgccacggacaatagtgcggcggcgttatttttgctcaaaaaggcggagcagaacctgcctaccgggaaaggtctctacgcctggggatggtcgacggcgcgatggggggggcaacctgccagcgctgcgcttgacgtggctttccctcaccggccggtcgtcgccatcaacagcgataaaagctactgctggatgaaccaggcggcgattgaccgctataggtttacgcccgacacctgcagcgcagagtcgagggtacgtctgcttgaagaaatgcttaacgacaccgaacagttgaaagaagagctgcgcaccttcatggcgatgttggcatcgcgcggcgtgacggcaattaaagatatctgtttcgatgatgctcccacgctgatagaagcctgggccggactggaggcggctgacgaattgtccctgcgcgtcagtctggtcagtgagccggtggacgcgccgatgaatttccccttcgcccggcaggcgcgtgaccgtttccattccgatcggctacgttttcacggctttaaattaatggtggatggagttattgccgatcataccggagatatgctggagccctacgctgaccggcctgagacgaataacgctaaaccggtggattacgctgccctgcgccagcaggtgctagaggccgaccggctgggtttcgactgttgttttaatgccgaaggggatgccgccatacggcgctgcattgatatcttcgccgaatgccagcgcaccaatccgtcacgcgagcgtcaccacgccataagcgacatggagtgcccgcacccggacgatattccacgtcttgccgcgctggacctttctgtcgaggtttacgcgcagattctgctgcttaaccacagtgagtcaaaagcctatatgcgtgagcgcgccggcgaaacccgagaggctcagttctttgactatgcggagttgtttaacgcgggggttctagtaactatcggcaccgatttgccgctgtttataacgagtgtccctgatgcgatgtacgccgcctgttgccgacgttttgttgacggcacaccgctgcagggatggcagcgcgagcgtggcatgacgcgggcgcagctccttaaagcctggaccatcaacgctgcccttcagcatggaatggtcgcgcagaccgggagcctaaccgtgggaaaacgtgcggatatcgccgtattcgaccgcaatctgttcgcttgtgctgacgacgaaatgcgtagtgcgcgagtggtgctgacgctgatggatggccgtgcaacgcacaatgttttatag

SEQ ID NO: 162731 - DNA, 831 bp, Enterobacter cloacae
atgaaagtgatcggtattggcgataatgtcgtcgatcagtatgcccatattcgcaccatgtaccctggcggtaatgcgctgaactttgcggcatatgcttccatgctggggcatgaggcggcttacttaggtattttcggtaatgacatcgcggcgaaacatgttatttccgtactggaacaactgggtgtaaaacacccgcactgtttatatatcgccggtgaaaatggttgtgcgcagcttaaaatagatcagggcgaaagaatatttcttggttctaattccggggggattcgtaaaaccacgtcgatggagtttatttttgcacatacggactacttgcgtgagttttcgctgatccacagcggctgttatagctatatggaagagcaacttccggcattgcaacggttaagtattcccatttcatatgatttctcagatgattttgtgctcgaagaggcgctgtcgctttgtcagtatgtcgatttcgcctttttctcctgtgcggattacagccttgagcagacccgcgatattatccagcaggcgcacaacagtggcagccggatcgtatgcgccacgcgcggcggtgagggggcaatcctgtttgatggcaaacagtggtatcagcaggcgccggagtatgttactcctgtcgatacgatgggggcgggcgatgcgtttatcaccgcgtttctgtgccactacctggcgcagcaaaacatggcggatgaggaggcgatccccgcaagtcttaagcaggcggcgttattctcagcgaaaatttgccttaaagagggggctttcggttacggcgtgcgttattaa

SEQ ID NO: 162732 - DNA, 195 bp, Enterobacter cloacae
atgaatgccatacagcagcatgctgcagcgcttctggatagtgttgcacgatggaatgaagtgacgactctggctaaattacgctatcaggccgagctggcacctgatttcagcctcatggactggctgaagaatgacgaactggccctttcacgctatctacgatttttgctttctcctgatgaaactcattga

SEQ ID NO: 162733 - DNA, 1023 bp, Enterobacter cloacae
atgttaaagcttgaagaattgcttgaatatgcagagcaactaaaggatgctaaaaaagctaaaatcactttatattttgtcacccgacatctcaaaattggcatgagtaaagcggcaaaagttacagacaaatatgattttaaagtagttaaagcacctatagctcctgacatcgctgacttttttaaaagtacgttatcaaaccaaatcatttctcatgcgtcaaaagatgatattgaaatgaaaaattacactgtaattgatgacgatattgataataaaatttatgcatatgcgatgaataatgccatttcattctccaaaataatcaatgaagacatcaaaagtgacaaaccaaacgtccttacctctttagccgaaattcaggaagatttgtgggcatactgtattaaagttcaaaacggtctggaactcacctactccttccgaaaaataagcaaaggaaaagttacaaccaacgagcctcaaaatattggccagcgtgtatttgctctatttgacaaatcagataaagaattaagagcatttgatggtagcgctgtaaactttgatgacaaaattgactgcatatatatacaaaatcaattctatgtattccataaaaaaagctttgaatctattgttggactcgatgctgaatttacagaagctgcgcaaagaactcttaatacgattaaagaatttgacctagttgacggcttagatattattgaacaagctattctacataagccatccctaagaaaaacgcttgctcatatcgctgaaaaaggcaatcacaccacattgaataaggatgaagtacaatcaatgaatggtgtgctaaaaatgttccaagatgaagaattcaccatcaatgatgagggaaaaatcgtcattgaagatgaaaggcagggacggaattttctccggcttctcaatgactattataaacaaggtatgactacgaagaaatactatggtaccgacagcggtaacttaatcagcccagtgaaaaattag

SEQ ID NO: 162734 - DNA, 237 bp, Enterobacter cloacae
atgatgacttttaccttgaaagattatgcatcccaagttggccaggtgcgagctggcgagcgtctgggtgtgactcaaattgctataagcaaagccgtgcgctcaggtcgaaatattgtcgtgcacgttacggatgatggaaaggttagcgcatatgagagcaaaccatttccagcgaaggccaaaaaaaacaagtctgttaagtccattcattcaaacagcggatcaggagtgtga

SEQ ID NO: 162735 - DNA, 342 bp, Enterobacter cloacae
atgaagtatgtctttatcgaaaagcatcgggctgaattcagcatcaaagccatgtgccgggtactgcgggttgctcgcagcagctggtatgcctggtgtctgcgtcatcatcagccaggcccgcgccagcagttccggctaatctgtaatgcagctgtccgtaaggccttcacggatgaaaaacagcgttatggtgcgccccgtcttgctgatgagcttccggcgtacaacgtcaaaactatttccgccagcccgcggcatcaggggcttcgtgcaaaggctgcccggaacaatttgaaaaccagaacctcgcctagggccgtgtccacattacgtgggtaa

SEQ ID NO: 162736 - DNA, 729 bp, Enterobacter cloacae
atgccagctacggaacgctactcccatcaactcctttacgccaccgtacgtcagcgcctgcttgatgacattgcgcagggcgtctacaagtcaggtcagcaaatacccactgaaagcgatttatgtgcactctatgacgtcagtcgcattactattcgcaaagcgataagcgatctggtgaaagatggtgtgttgatacgctggcaggggaaaggcacgtttgttcagagtaaaaaagtggagaacgagctgttaaccgtaagcggctttaccgattttggcgtttcgcaagggaaacgcactcgggaggaagtgattgcacaagatcgcgttagcgccgagccattctgcgaaaggctgaatatacaaagtagtagtgaggttttcagattgctacgtgtgatgtatctcgatgacgagccgttgtttatcgattgctcctggatctctctctcgcgttacccggcatttgatgaaatttataccgcaggggcgtcaacttataagctctttcaggagaagtttgatacccgtgtagtgagtgacaaaaagaccattgatatttttacggcaaccaaatctgaagcgctcaggctcaggtgtgagctgggtgaaccgttgttccgtatcagtaagattgcctatgaccagcacaacggaccggtccattattcagagcttttttgccgcgctaatcgcgtgagtctgacgattgataatcggtcatga

SEQ ID NO: 162737 - DNA, 786 bp, Enterobacter cloacae
atgaaacggctagcaacggtaggcgataactgcgtagatatttatccccaattaggtaaagcgttttccggtggtaatgccgttaacgtggcagtttacagcacccgctatggaatgcacccgacgtgtgtcagttgggtaggggaagatgattacggtgaaatgttaaagcgtgatgtggcgcaacagggtgttgatatttcccatcttcgctccaaaccaggagtgacggcacaaacccaagtcaaactccgcgacaatgaccgtattctgggggattacagcgaaggggtgatggcgaattttaccctaagcaacgaggacatagcgtggcttaaaaccttcgatattattcactccgccatttggggtcatgccgagtcgtcgttcccggtacttaaggctgcgggtaagattttgacctttgatttcgccgacaaatgggaaagcccattgtggcacacattaccggaacatctcgattacgtgttcgcctctgctaatgaggataccccgtggctgcgggaccgcttacaaacgatagtgcagtgtggtgctggtgtcgctatagccacccttggcgaatgcggaagcctggcctgggatggtgagcagttttggcgaatgccggcggaaccggttgatgtggtcgataccatgggagcaggggattcatacatcgccggttttctgtgcgctattgccacaggactaccgatcattgatgcaatgaagcaaggtacgcagagtgctgcccgcacgattaattatcatggtgcctggtaa

SEQ ID NO: 162738 - DNA, 831 bp, Enterobacter cloacae
atgaaaacgggtatgtttacctgcggacatcaacgattaccgctggagcaagcgtttcgcgatgcgcatgaactgggttatgacggacttgaactgtggggtggtagaccgcatgcgttcgcaccggatcttaacgcgggcggtattcatcaaattaaagaactttctcgcgtttatcagatgcccattattggttacacgccggaaactaacggttatccgtacaatatgatgctgggcgatgagagaatgcgccgcgaaagcattgatatgattaggcttgccatggatatggccaaagagatggcggcgggatttataactatttccgcagcccatgcgggttacctcaccacgccgaaggatatctggcggcggctggaagataacctgcgtgaactgagtgatcacgcggaaaatatcggaatggacctgctgcttgaacccctcactccttatgagtccaacgtggtgtgcaacgcaaatgatgtactacgcgcacttgaactcataccatcacctcggctttacagcatgattgatatttgtgcaccgtttgttcaaggtgaaccggtgatgagttactttgacaaactaggcaataaactgcgccatctgcacatcgtcgatagcgacggtgcgagcgacagccattacgtgcccggagacggcaaaatgcccttgcgcgaactgatgttcgatatcattgataggggttatgacggttattgcactattgagttggttaccatgtatatgaacgagccgcggctttacgctcgacaggcgctggcgcgttttcgtgacttgctacctagggaggtacaatga

SEQ ID NO: 162739 - DNA, 1023 bp, Enterobacter cloacae
atgttgaatattgataaaaacaccgtggatttcttggtaactgaaaatatggtgcaagaagttgagaaaattctggagaaggacgttcctcgtgttcacgccattgtcgatgagatgattaagcgtggtattgaccgcatctactttgtcgcctgtggctcgcctttgaatgcggcacagacagcgaagcatcttgcggaccgtttctccagtcttcaggtttatgcaatttccggttgggagttttgtgataacactccgcatcgtctggattcacgctgcgctgtaattggtgtttctgattacggtaaaaccgaagaagtgattaaagccctgaatctgggtgccgcttgtggcgcactgaccgcagccttcaccaagcatcctgacagtccgatcaccacggcagccgagcatgtggttgcctatgaagccgactgcatatgggaaatccacctgttgctctgttacagcgtagtgctggaaatgattacccgtcttgcaccacacgctgagatcggaaaaataaaaaatgacctgcgcaagctgcctcaggcgctcggtcatctgatacgtacctgggaagataaaggccgtcagcttggcgagcaggcaagtcagtggccgttgatttacaccgtatccgccggtccgcttcgcccactcggttacaaagagggtatcgtcacactgatggaattcacctggactcacggttcagtgatagagagtggtgaattccgccacgggccgctagaaattgtcgagccaggtgtgccgttcctgtttctgcttggcaacgacgaaagtcgtcatactaccgagcgtgctatccattttgtgcgcgaacgcaccgataacgtgatcgttattgactatgcggacatttctcagggtctgcacccgtggctggctccgttcctgatgtttgtaccgatggaatggctctgctattacctctccatctacaaagaccacaaccctgatgatcgtcgttattacggcggtattgttgagtattga

SEQ ID NO: 162740 - DNA, 1341 bp, Enterobacter cloacae
atggaaggccaggaactactacgtaagctcggattctggagcgtgcttgccatctccgtcggaacaaccgtcggttctggtatttttgtttcggttggtgaagtggcaaaagccgcaggtaccccgtggttcacggtgttagcttttgttattggcggactgatagtgatcccgcaaatgtgtgtttacgcggaactatcaaccgcctatcccgaaaacggcgcagactatatctacttgaaaaatgccggtagccgaccactggcatttctgtccggctgggcaagtttctgggctaacgacgcaccgtcgctctctatcatggcgttggcaattgccagtaatctcggttttttgataccgctggacccgcttacaggtaaattcgttgccactggtctaatactggcctttatgctgctgcatctacgttcggtagaaggtggcgcgatgttccagacgcttattaccgtcgccaaaattattcctttcgcgattgttatcgggatcggtattttctggctgaaaggtgacaacttcacagcaccagacagcgccgcgactaccagcgctgccgcaggaatcatggcgttgtttgctggcatttctgctaccagttggtcctacaccggtatggcttccatctgctatatgactggtgagatcaaggaccctggcaaaacgatgccacgtgcactgataggttcctgcctgctggtactggtgctctactcactgctggcgctagttataaccgggctaataccgtttgaaaaactggtcgtatccgaaacccccatctctgacgcattgagctatattccggggttaggcagcgtggcaggtgtgtttgtcgccatcactgcgatgattgttatcctcggctcgctctccagttgcgtgatgtaccagccacggcttgaatacgcgatggcaaaagacaaactgtttttcaaatgcttcgaccacttgcacccgaaatacaagacaccggatgtttctatcatcctgcaatgcgccctcggtatcttcttcatctttgtatcggatctcaccagcctgcttggatatttcactctggtgatgtgcttcaaaaataccctcatcttcggctccatcatctggtgtcgcaaacgcgaggattacaaaccgctatggcgcacaccagcgttcggcctgatgaccctcgcggctattgcctctagcctgattctgttggtctcgaccttcgtgtgggcccccatcccagggcttatctgcgccttgattgttatcgtcaccggcttacccgcttatgccttttgggaaaaacgtaaccgccggttggcacatgtttcttaa

SEQ ID NO: 162741 - DNA, 426 bp, Enterobacter cloacae
atgaaagttgaattaaccattgctcgtactatagaacttcctaagggtgcggttacgactctggaaaaggaactgttaaaacggctccagaatcagttcgatgagtgcagtttagtcatacaccgtgaaggctccgatgggttaagcgtttacgatggcgaaaaggactcgaagaagaaggttgaggaaatttccagcagacctgggaaagcgcagatgactggttttattgagacagcatgcgacaactttcttgtggggaggagagattggtggaataaaagaagaattaccaaacaagggctacgcggtcatcagatgccacgatggagttgtcttggcagaactgcactcatttccagaatgcgatcgcgctttgatgtatgggcgtggagatatggtgtctttcactccattaaaggatga

SEQ ID NO: 162742 - DNA, 1071 bp, Enterobacter cloacae
atgcctaatgaagatactattaatgtagatggggattcaggaaacaataactcaggctcaaatcccggtggatggggtgggaatagcggagatcattccgataatacaaacgtaaatgtagatgtattgcgtccaggtgattcaattaacactccatatggtaaaatcaccattaatactcagggattgccggttatgaacggagtcataatgacacctgataactcgtcaatggtgacgactgttggtggccgcgccgttcgcgtcctaaactccactttgaatacgtcaaaaattacatgggccggtggtcgaaatccaacaactgttgaatcaattgttgaaaaacatcttactgtagctcagagcattgaagcaggaattattccggctggttatttattgaaggatggtaaaattggctcgatgcagccaaagtatcaaaaaatcagtagtggccatggtgaatacacagaggtgtataaaggtgagcagttcgtagaaatacctgaacttacagcggcttatcagtcaatctctgtctatgcaaaatttacggcagatttctttaaagaaacttcagcactttatggcgaaagagcatcaacattagcgcagcaatttgccgaacaggcaaaaggtaagaaaattcgcaatgtagacgatgccttggcaacctttgaaaagtataatcgtaattatggcagtaagcttaacgcagcagacagggctgcaattgttgcggcacttaactcaaaaaatttcgcacaaattgctacaagcatgagtaaatatagtcgtacttttggctatgttggtaattttattgattttgttgacacctttattgaatttaaaagggctgtcgaaacaaattcatggcgtggatttttcgttaaggttgaagccctggtcgctggtcagactgcaaccgggattactgccttcgtctttgctgcaatgacaggtttgccgttaggaattatcggctttgcgttaatgatggcgatcattggcgcgttggtggatgaaaaattaatggaacgtatcaacaatcagttgggtatttaa

SEQ ID NO: 162743 - DNA, 1728 bp, Enterobacter cloacae
atggctgttatccgccacatcagcattcagaattttcgctcaatacggcaggcagaatggtttccaggttcagggctgaattgtctgatagggcctggagattcaggaaaatcgacctttattgatgctattgacctagtactcggagcgcgaagatcgttcacattcagtgatgcggatttttatctcatgaattccgctactccagtctgcatcagtgtaactctcggacagcttgatgacgggcttcggaaccttgagaactatgggcgttatcttcgtggtttcaatagcgaaacaaaagaaatccatgatgaacctctggcaggagatgaaaccgtactcacactgagaatggtcgttggagcagatctcgaaccagactggtgcttattttcagaacgagcaacagtggaagggttagagaaaaggttactgtggaagcaccgggagcagttaagccctactcgccttggtgcaacctcgcatcatcatctggcatggggcaaccgctcagtgctgaataaattatctgcagaagattttgatatcagttcaacgttggccgaactgtcccgacagacacgacacaactttgctgcccgacaactacctcagttggataacattcttaccgaggtcagaaccattgcaaatgagttaggcgttcaggttggagaacttaaagcgctgctggatgtgaatggcgtctccctgtctaacagtgcgatcagcctgcataacagtgataacacgccactgagaatgcttggtacaggatcaacccgattgctggtgagcgggttacaaaaagctgtcggggggccggggatcatactggttgatgaagcagagtacggactggagccttacaggatcagccgactcttgaatcaactgggttctcgtgatgatgaacctacttcgcaggtattcatcaccacccattccccatatgttctcagggaactcaaggcaacccagctctgtgtgttgcggaaactagaacaaccgcccccagagccttcacacaatttcctgacactaagtggggacgataaggaacaagctaccataagggcctgcgctgaagcctttttcagcaaagccgtaattgtgggcgaaggtggaactgaggttggttttatcagagggctggacttgtacagacaacgcaggggaagaactggctttcaggatcagggggcctttgctacagatggcggcggcggggacaattatttcaaacgcgccgaggtttttgcacaactgggatatcgtactgccttattaaaagattcagatatcacgacacctgcacacaggcaacagacagaacattgccgggcaagcggcgttaccatttttgaatggggtaatggtttttcaacagagggagccctgctggcttggtgtcctgctgagactatccgtgacatcgttcttcttgctgcggatctgaacagccaccaacaagtggatcagcacattcaaaactgctcccaaggggcttataactttgacacatgtacaggtgaacctacagaagaaatgagaacgccagtggctcacgctgctggcaaatatggctggtttaaaacgatcgggaaggctgaggatctagcggagaatatcgtgggtccggtcttcaatcagttttcacgaccattcaaagcaattataagagatctgctggcgtgggcagcagaaaacggtgacccacgatga

SEQ ID NO: 162744 - DNA, 1416 bp, Enterobacter cloacae
atgagtgtggatgccgttttaaacgccagtaaaggcctgattgtagcgccagcgggatgtggcaaaacccacctgattactgaagcacttggttttgcgcaaagtaagccgtatctcgtgctgacgcatacaaccgcaggtgtaacggcactcaaaaagcgactgagccgttttgcaattcctccgcggaactatgttgtgacaacaatcgatggatgggctctgaaaatagctggctgctttccgggattgtgtccgctcggtgcgggtcctgaaaatccaacctttttttacccttctcttcgccgtgccgtacgggatctggttgttaacggtaatattagcgaaatcatcacagctacttattcgcgtttgctggtcgatgaataccaggactgcaatagcgagcaacatgaattgacttgtgcgctttcatgtttgctaccaacggtagtctttggtgacccgatgcagtgtattttcaactttagcggccctatgcccaactggaaccaaaccgttgaaacttttttccctactctggcaaccttacaaacgccctggcgttggaacaatgcacaaacgccagatttgggccagtggctccttgagcaaagacatcgattacttctccgggagcgtatcgacttaaggtcctgtcctgactatgtacgttttcggcctcttttacgaaatcataatgacaatatccagcgccagcagcgcgaatattactcgctgctgcgacagtttcccaacgactcggttttagttataggtgattcacgaagagtgtcatccaggcatcaatttgcacaacgaatcaatggtattgatgttgtcgaaccggtagatctgagtgacgtgataaaaatggctgcatcccttgacgatgctagtgctgccaacgtgatgccaaggcttttacaggcagcagctgaactgatgacaaacgttggcgttagtacaaccttacgaagaattagttctattcaggccggacgaaacagaacagccccttcttcgcttgagaatgcattggtagcacttgctctggccccaacccgaaaaaatattcgaacgacactccttttgctcgaagagaaggaagagacacgcgtattcagggccggagctctgcacgttctaaaagatgcgataaatctgtccatcagttcacctgacaaaagcattagagagtcagcatcagttattcgtgaacaacgtagataccaaggtgaaggacgcgtatcgcaccgttcaataggctcaactcttcttctgaaaggtctggaatgcgaccacgcggtgatactagatgcgggaaatatgggagcaactgatttgtatgttgcgctctcaaggggagctaaatctgttacgatcttctcaggtcgtgatgagttcacaccctaa

SEQ ID NO: 162745 - DNA, 282 bp, Enterobacter cloacae
atggaagcggccaccgtataccagtgcttcgacctctttcatcgcctcagagaaattgcgaaccgtctgcggcacttctaccagcggcaacccttcttctgccagcgagaggctgaactgcgtggcactccacggatcgaagccaatttctttcaggctctcaccagcaacccactgttgcagctcttccttaatctgagcatggtcgattacatccccgtcggtaaggatcagcttgtccagctctgcccacttacgatagagctctgccatctgacgtga

SEQ ID NO: 162746 - DNA, 240 bp, Enterobacter cloacae
atgccagtccatcagctcaataggctggcctgccagcgcgccctttacgtgaggcacaaacttatagaaattcaggatgtgctgcgcgcgcggctcactaaagaaaattccgcgctcttcgccgtgtgccagatcgtcaagaaaacgctgacaggcaaggcgcacaaactcacaggcaattatttcccccgccacgaccctctcggcgtagcggatgccttctgcaaccttagccattaa

SEQ ID NO: 162747 - DNA, 864 bp, Enterobacter cloacae
atgctacatgccttaaacttctcaatacctgatgattcttttctgttgagtggtattaattcaactacattaatgggtgatttaaaacttcaaaatccgataaaaaaaatcagggaatcaataacaaaatcaaatggacacactgattctattaatgagtccattaattatgaagaattcaaaaaaatctggttccctgatgtaaatgcacatgtttttatttcccatagtcatgtagataaagctaaggcaatagccttggctaactttttatattctaagtttggcattcgttcatttgttgattcagaagtgtgggggtatatggatgatgcactccgtgagctaaacaacaatcacaataaatttcctgggcaagagaatacatatatttatgaacgatgtaataaacttgcaagcaatttgaatatgatactttcatctgcattaataaaaatgatacatgaatctgaatgcctgatatttattaatacaatcgactcatgtattcgtgatgggaatgagtttagaaccaagtctccatggatattcactgaattattaatgagttcaatgcttgaaaagcgcgcacataaagatcgtccattggaattgcgcaaatcacttgatgagtctcgtgcagtagctgcgaatgaatcatttgaccaagctttattttcatatccattatacttaaaacacatgcataatgtaaccaatgacaaaataaatagaatcaatgagataaaaccttacggtttatattccacaacgactgttcacagagatacggtataccactttaaagtcgatgatgtattcaaaaatttagactcgatctataagctggtcatttatagataa

SEQ ID NO: 162748 - DNA, 426 bp, Enterobacter cloacae
atgaatgtaattgaatctaaaattgctggattagggttcctgcaggcaattattgccagaatggctaataattccttttatattaaagggtgggacctaacattatttgttgcattagttgcattaaaaaaagatgtatcacaatattcgagctatttactacttgcgttaatagtgagtaccatagcgttctgtttattagatgcttattatctacaacaagagaggatttttaggaaaatatataactatttggccgaatcaacttcagaatccattaattatttcagcattaaccctgcgctatataaagataaactaaatggtgaaattctttcatataaaagctcattaacttccacatctattcttctttttcatataccaatgtttgttgctgtttttatcttttttgtattgttttaa

SEQ ID NO: 162749 - DNA, 246 bp, Enterobacter cloacae
atggaagcggcctccgtataccagcgcctctacctctttcatcgcctcggagaaattgcggaccgtctgcggcacttccaccagcggcaaaccttcctctgccagcgcgaggctgaactgcgtggcactccacggatcgaagccaatttctttcaggctctcaccagcaacccactgttgcagttcctccttaatctgagcgtggtcaataacatcaccatccgtcaggatcagtttgtcaattag

SEQ ID NO: 162750 - DNA, 360 bp, Enterobacter cloacae
gtgcagaatctcttcctgcaggtaggtgcgcacagccccggtaaacggctcggtaacggtatatttgtacttatgctggccgatacgctcaggaacaaccgcccccggcgcatacggatgcagggattgcggctgaccgtcgcgcccccactggatcaccgcataggcgttaccgttcagcagacaatggcgcatcatcgtgcgtttaaactgataaggcgtctggcagtcgttcggctgctcgttcaggagaaaatccaccgggtgattactcagccactcccgcgcctcgcgaccattatcattacggacgcgatagaggtagcagggcattgtcgccacagcctcactaataactga

SEQ ID NO: 162751 - DNA, 1269 bp, Enterobacter cloacae
atgagtttctattctatttactctgaaatcagagagggatctattggtgaaagaattaatagagcgttgcatttctatgatgatgttatttttcattcattctataagtgtgatggatcaatatttaatgatatagactacacatctgatagactcggatcgagaaaagatagagatgttttattaagtgatttattgcatgctctcaattctgaagggtttcaattcaataattatgataatggaacaccaagtatagagttaatatgcaaagtgttattcgaaaaaatagcatttgaaacaaatgcaaggggtagtgacttttatacaccatatggtgtttcggcgttgttatctgagttggttttacccttggaaggtgattcgatttatgatcctgcctgtgggtcaggctcccttttattaagcactatccagaaaataccgaatagtaataaactgcaggactataaggtatatggacaagaaattttaaaatcctcatggaatatttcgtatattaatatgttcttacatggagtttacgaatgtgaaataaaatggggagatatttttatcaatccacaatttcaagatcataaaggagaattggagaaatttgatgttgtagtttcaaatccaccattctctgtgtccaattgggggtatgaagaagcttctagagacaggtttggtcgttttgctctaggaatgcctccacaatccaaggctgattatgcatttatcttgcatatgattgcttctatgaaggatcacacaggtagaatggcagttgtggtcccacatggcgttttatttcgaggcgcaaatgaagctctgattcgacaaaatttaattaagaaaaatttattagacgccgttattggccttcctgaacgtttgtttgcctcaactaatatagcaaccgttattttaatatttagaaagaacaaagtggattcaaacgttttgtttatagattcaacgatgctttttgaaaattcaaaagggcggaactatataacagacgagaatatcaaaaaaatatcagaggttttctacgaaagacaaggtttagataatttttcccatgttgcctgtttaagtgagattgaggctaatgactataaccttaatattactagatatgttaaacgtacagagaaagtccagaatatggatctgtattctttaattgatgagcaaaataaattacaagaagagttgagttttttagaaaaagaaatgaaatcgtatatccgtttttaa

SEQ ID NO: 162752 - DNA, 339 bp, Enterobacter cloacae
atgagagccggtggactgagaaaccggctaacaatccgggtattcactactcacagagatccatctggtcaggttattcagacctgggaagacggggaaactatctgggctgaggttaaggggatcagcggtcgtgaactggtagcggctggtgctgaggttgccgaagcaacgatccgcgtctgggtgcgattccgccgcgatattaccgccgccaaccgccttaaggtgctgactggcccgttttccggggcgacgctcaacattatcgggccgcccataccggactcaggtatgacgcgccttgagattctatgcaaacaggggaccgagaaatga

SEQ ID NO: 162753 - DNA, 207 bp, Enterobacter cloacae
atgctaggagcagttgaaggacttacagaggaagacttcaaaaaattctatcttcatgtgtgcaaaagcaaaagtataagtattaatggaaatcttggatatggcggttttgagttaacctatttattttcaaaatcaacacccaataacaatatttccatgatagtacataaagatgaaaactggaacgaattatttaagaggtaa

SEQ ID NO: 162754 - DNA, 162 bp, Enterobacter cloacae
atgattccatctatgttaaaaatcatggtgaacattataagattgaacaaggtatcgttctctgaattcatttcctttgtatactctatttttatagatgcattgaaatgtaatagtgttggcaaaaataaattcgaacaaattcttaaaaacggattttga

SEQ ID NO: 162755 - DNA, 1857 bp, Enterobacter cloacae
atggcgttttggaatgatggttacgaaatgagctataaaaaattcaggctcgacataaatgggttgagagcctttgccgtgctgagtgtggtgctttaccatttcggcgtgccttatgtatctggtggttttgtaggcgttgatatcttctttgtgatctctggcttccttatgacaggaattgtgcttgagcgcgtagatcataaaggggtgctagatttttatatcgctaggtttttaagaattgtacctgctctggcggtagtagtctttgcacttatggtttttggtctatttgccttgagtactaatgagtttgaattacttagcaaaaacgcaatctcctctttgcttttttattcaaataattattacgcaattcactctagttattttgacccctcatctgaatacaacttcttgcttcacacatggtcactttcagcagagtggcaattttacattatttatcctctacttgtaatagcaatcaagaagttacggattcctgttggcatcgcgttatctacaatattcgctatatcgcttgcagttacattgatgcgtataactggaacaagagaggatatcttctatcttctgcctacaagggcatgggaaatgttagcaggtggccttgtatacatggcatctgttcgttacaaacttccagaatggttaaagaattgcgatggttacggcatagctctaattgtcgttgcagttgtgatgttgcatagcaatggttactggcccagttactctactttcgcccccgttataggagctgcgatagttcttcttgctaatgaccagaactcagtttttacatcaaacagaattgctcaatgggctggtaaaatttcttactcagtttatttgtggcactggcctattgttgtagtaatgaaatactatgacattgaatttaatgccattaatatttctcttggtgtgattgcatctttcgcgcttggtgatatttcttataaatgcattgagaatatattaagaaaaagaggcaaactcaaacttaatttcatattatttataactgttctttctatatccgccgtcatagctgtaactaagggattggcttttagattctcaggagatatgaaagaagtcgctgagtacagaatggacaaaagtaaatggtttcctgatacatgttttctctctacgcatcagggaccagagggattctctggctgtcaggataaaatgagtcctgattctatggtgatttggggtgattcgcatgcagcccaacttgcttctggcataagagatgttataggaaataagagagatattgttcaacgtactgccggtttgtgtggtccgattccaggagtggaaataggacctaatatacaatgtaaaaatattaatgcgtatgtatacaacgaaatattaaaaagcaaacccaatactgtaattcttgctgggctctggaaccgatatccaatacgggaaaaactgaaagatctagtaagtaatttacacagatcaggtgtgaagaggataatagtagtaggcccattcccttactggaaggatacggcactgaatcttattgagaaatttggcaatgatggctctggtagcttgccgatatcattgatgaatgaaggggtgtatgtattgggaaatgataagttcctttctaattttgcgcatgaaatagattatgttagctacatttcacccattgatgtgatatgtaaaaatggaaaatgtataaatattatacatgagaatggaaaggcctatccattacaatacgacaactctcatttgtcagtggagggttccagatggtttattgaacaaaacaagaatagattttag

SEQ ID NO: 162756 - DNA, 477 bp, Enterobacter cloacae
atgattgagttaaaagaagtaaaaaaagctttatcaagtatagatgaagttacaaaattaaaagacacagattatggtatctctttttattataaagaagcctttactgatttgagagtgcacgctaaagaacctatgatttcttcaaggattgaagtctctaattcttttcagtcacctcttgattttaatagtgtttccgatgctgatggtatagctaaagttgttaatttgacaaccgcaacaccatgcaaaactatctttattggatccaaaaattccaatggtgcattcataataaaaaatatttcctcagataagttagatattttttcagagggtagccaaaatgaagatatgcggagtaataatttaaagctgacgatctttaaaatgatgcttgaaaattttgcttgctataaagacctgagggtagtggttgataattataaatctggagcgcaaagtgaaaactaa

SEQ ID NO: 162757 - DNA, 261 bp, Enterobacter cloacae
atgggaaagatgacgttcgtatttgagtatgaggacggtaaagagccgccgcttagcgctggcatgtcgtttatgggcgggaagattgtagcggcatctttcagtgatgcgctagaggacaatgcgccgcttgataccgaaataacaagcgaagggctgaccgtcgatatcatcgtggcagaccttaacaacggaggcccaatcagcagcgctctggccagtaacttctcggtgaggcgcaataaccgatcgcagatttaa

SEQ ID NO: 162758 - DNA, 567 bp, Enterobacter cloacae
atgcgaacgcaagaagacctaaaactgctttatgaaaaaaacacatcgagatacgaaaaacacttgcaccatagaatggatattacatcaatcatcttaaagggacatctctttgctgaagagttgttaatggacattttaagattgcattgtcgtgatagcaaaccaattgaaaatatccaattaagctttcagcataaattgaaacttgttcaggcactttttggctcccatcttactgggtttcagtaccctgaaaaaatatggccagttttggataacttgaatcaattacgcaatgctttggcacatcaaattgactcacctaaggctgtcacgcgtctaaacgcgttcgtcacatcttcctgccaactatttaataaggatgtgaagatttctattgttgaagcaataccagtctcagacaaagacttaactgacgaattactgaggataatgttttatctgttaggttttttgggttgcattcatggtattgcttatcttaatccgccatcgccagacaataaaaatactccaataaggataccagacccaatgaaatga

SEQ ID NO: 162759 - DNA, 624 bp, Enterobacter cloacae
atgacttcacgtgtctatgcttacctcagagcttccaccactcagcaagacgcaacacgcgccaaaggtcagttggatgagttcgctacagccaacggtatgaccatttcaagctacttcacagagaatgaatcaggtgcatcgctacagcgtcctgagttgttcagactgcttgagattgcgcagaagggagatgttctcttagtggagcaggtagaccgcctgtcacgtttgagcggcgaagactggaacaagttacggtcactgattaatgagaaaggtgtgagagtggttgccttagacctgccaacaagccaccagcttattcagtcaggtgatgagttcaccagcagaatgcttgaggcgctaaacgggatgatgctggacatgttagcggccattgccagaaaagattacacagaccgtaagagaagacaggctcagggcattgtaaaggccaaatcagacggtaagtacaaaggccgtccagaggacacacagcgtaatgagagaatagccaagctgttacaggctggtatgtcctacactgacgtaatggaaacggtgaattgctcaagggcaacggtggcaaaggtcagtaagagtctcaaagagatggcttaa

SEQ ID NO: 162760 - DNA, 291 bp, Enterobacter cloacae
atggatgacgaaaaattacgcacctaccttaaagctattggtatggggtgctttgtgacgtattacagcaagtttgccaacaccaccatttcacgtgctgacctcattgaactgctgcatactcaggaaggatacacagaaaaaagctgtgggagccgcaccagtaaagcgagagcaatcatttccgcaggggcaagtgaagaagcactaaggctaattattgcgtctaatcgtgttaacgatgatttaagggatgaggccagaaaattactgatgaaaatttttccgtaa

SEQ ID NO: 162761 - DNA, 198 bp, Enterobacter cloacae
atgaagaaaagaaagaaatactttactatcgtagcggaaaagacacatcaattctacatgcagtataagagcctttccgaattaacagggattacacctccctctggttataccccacctcgtatgatgacaaaaaccagaagatacgaagttatcaaggctatctgtcagaaactgaaaccccttgacagaatttaa

SEQ ID NO: 162762 - DNA, 522 bp, Enterobacter cloacae
atgaatagtcctacacagaaacgaattgaaatcgaatcacatttcatccccaaaattaaagctgcactggaaaatatcgaagatgcaaaggatatttacaacgcagacagcctgaataaagatactcttattgctatcaagactaagcaactaatgtctcagccagtcgaagattatggattcagaatccgacaggttacacacccagcgatggtacagaccattattcagaacatgatgaatgagaattatattgtgtatgagatgggcgctggatttatcaaatttgtacccttacagcagtcaccaaaacataacccgcttgctgagattgaaaaggcatgtaagaaagctgctgagaaatttgttgattccggaatcactgagaaagcgaataaggtaaataatgccatccatgctcacaatgtattggtgaaacaggctgaagaggcgttatcgggaatcaaaccgtttgaatcctatctgtctgtgattgtagccgatgaggtgggtaatgactaa

SEQ ID NO: 162763 - DNA, 177 bp, Enterobacter cloacae
atgaatcaactcttcaatgaatatggtcagaaagtaagttgtaatcttctgatgacgctgcatccatcgcttatcacaaagctggaaaagctttctgaacagattggtcaaggcgtggtatcagaagaccaacgtttaacactggcaatcggggagatgctcaggaggtttgaatga

SEQ ID NO: 162764 - DNA, 204 bp, Enterobacter cloacae
atgacgctttatccgtgtaatcctctgaagtctcaaggggatgcaattccgttaactcaaaatctcgccctgaatattcctgtcccaatgctacagaagctggacagagtaggttatgaacttgcgggacgttacaaattgggcggattatcagagcagcgcgtgagattgctggcattggctcacctgattgaatcggcatga

SEQ ID NO: 162765 - DNA, 519 bp, Enterobacter cloacae
atgtcctacttccacaccttgctcgccgaggtatgcaccggcgttgcgccagaggttaacgccaaggcgctggcctggggtaagcagtacgaggaagatgcccgcacccttttcgagttcaccacagacgtgaaagtcacggagtctccgatcctgttccgtgacgagagcatgcgcactgcgtgctcccctgacggcctgtgcagtaacgggtttggccttgagcttaaataccctttcacctctcgcgacttcatgaaattccgccttggcggtttcgaagcaatcaagtctgcgtacatggcccaggtgcagtacagcatgtgggtgaccgggaaagacgcctggttttttgccaactacgacccgcgcatgaaacgcgaaggtattcaccacatcgtcgttgagcgggatccgcaatacatgactgatttcaatgaaatggtgcctgagttcatcgagaagatggacgaggcgctggcggagatcggtttcacgttcggggaacagtggaaatga

SEQ ID NO: 162766 - DNA, 588 bp, Enterobacter cloacae
gtgagtctacaaattaattttgactcaggtagtcctgaggttctggatagagtgattgaagcctacgggttcaagacaaaactagccctagccgatcaccttggtattgcgagcagcagtttagctatgcgctacaaaagaggtttttttccatctgatattgtcgtgcgctgtatggccgagactggagtcactttagagtggcttgcaacaggtaaaggaaaaaagtttgatgatgaagcactagatatacttaacatcccccgcaagaagttggtagacggccaactgtttgaaagcggatatgcaatgcttgataaagtgttcttccgtgccggagtacctctacctacgaatcctttttgtcttttggatgagaaatcacagtacatcgttgataagtcattttcggaggtatatgacggtgactggttagtagatattgaaggtaagatcagcatccgaacattgactcgaattccgataggaaaagtgcgtgtgagcggcgttggaatggcatttgattgctccgtagaagatattggagtaatagggagagttgttttaataatttcagagggtaaataa

SEQ ID NO: 162767 - DNA, 870 bp, Enterobacter cloacae
atgaataattcagaatcatttgaaaaagaaccccgtgacagtactcaaaaaacgtgcttcataatcatgcctattgccgatcatccagattatgatgttggccattttaaccgtgtttatgaacatctgattaaacctgcatgtcttaaagccggatatagagcaattagagctgatgattcaaaagcctctcacatgataatgtttgacattttgaaaaaaataattgaatgtgacatggctatttgtgacttaagctctaaaaatgcaaatgtgttttatgagctaggactcagacaagcatttaacaaaaaaacaattcttatcaccgatggattaaccaatactccttttgatattacgggttttagatatgttcaatacaaccctaacctaaggattgatactgtcattcgcgatatcagcgaagtatccgcaatgcttaaagaaacagaggcagctccagaggatgatgtaaactcaataattaaacttttgagaattcagcctgcacatattgaccgtttacaattgagtgctcaagactcagttttattcgacatgattaaaaatcttgatagcaaaataaacaacctcacctcaacacctgctttccccaaaaatttaaagcgagacaataactttaccctgagcttctcagatgctttacgccttgctccaaaaacgataaacggaagaaaattcaggaacgcgagaggttttattggagtctatgcaggtgagactccagacggctatcacatatttaaacaggacaaccaagatattatatttgaaccatggtctgaatatctaaatgatatttattgggataaggaacctagtcaacaaaatgaactaggttcgtag

SEQ ID NO: 162768 - DNA, 1041 bp, Enterobacter cloacae
atgtcgataagaaaaaaaacggatggcaaatggattttggacttttaccctgaaggaaaaccccaggggaaagccagcaaacgcatccgcaagacgttcccaaccaaaggcgaggctcttgcataccaaaatcacatcttggaaaacgtccacgtcaaaccttggatggacggaaaagaggatcgccgtaaattgcgcgacctagtaaaccagtggtttgatgaacatggcgttacgttggacgatggtgaaaagcgcaaatccacaatggaatttgcctgtgaaagcatgggcgatcccctagcacatgaatttgattcaaccatgttttccctatataggaaaaaacgtctatccggtgaaatatcccgtaccgttcgcgttaagcaggtttctcccagaactatgaatttagagctggcctattttcgggcagtgttcaatgaactgaagcgactagggcactggaagctagacaacccgttgaccaatgttcggccttttaaatccgaagaagctgaactggtataccttgagagtgaagaaataactagactcttagatgaatgcttgaagagtcgaaatgatagcacttattgggtggcttgcttatgccttttaactggtgcgcgatgggatgaggctgaatctttaacaaccaaacaaattaaaaacctgaaagtcagctttttcaagacaaaaggcaacagaaacagaacggtgccaatcagccataatttttttgaatcactcccaaaacctgagagacctggtcgttacttcaaatcatgttattcagcatttcgtaaagctgtagaacgtgccgaattgaatttaccagatggccaactctctcacgttctaagacatactttcgcaagccattttatgattaatggcggtaatatattagtactacaacgcatactagggcataccgatataaaaatgaccatgcgttattcacatttcgctcctgaccatttagaagaagcgataaagttaaatcctctgaataagatgaactatcatggaacctag

SEQ ID NO: 162769 - DNA, 1266 bp, Enterobacter cloacae
atggaacctagaaactcagtatatgaaatattcaaaacttcacgtgatattcctgctaactatgtagaaagacctcatgttgatgaagtttttattgaaacactccttcaagaaaaccatatcgttatttatggaagttcaaagcaaggtaaaacctcattacgaaaaaaacatttagaagaaaatgatgctgttgttatcacatgcgataataactggagtattgcggacctacagctagcaatacttaaaaaggttggtttcaccattgaggactctacaaacattaaggtagatggctccttgaaaataaaatttaaaatccctgggattgctgaaattgaagccggaggtggtgcaggtcgagataaaaaaacacatgattttgccataaactccaatgatatcaatgatataatccatgtcattaacaaggttgggttttcaaagtatattattttagaagagtttcattatctccctattcaaacacaaagggatttttcaatcacattaaaggcttatcacgagctctcgaaagtttgtttcataatcatcggagtttggttagagaacgatcgaataacagctgccaatggtgatcttactggaagagtaaaatctataaatgcagacctgtggaaaaatgatgatttaaataatctttttagtaaaagtgaacgtttattaaatattgtttttgatgataagttcaaacgaaatcttatattaaaagcaaatggaaatgtctttcttgttcaaaaaatatgccttaaggcatgtcaattaagcgatgttcactttagacaacttgagagtaaaactgtcggcaccaatattgcccttgacaacgagatcaaagaagaacttgatatgcaaaatgcaagatttcgtcgtctattgatggattttagcaagggctttggtaaaacagaattaaatctctacaaatggattctatttgctctgctaaaaattgagaaaagcatacttgaaattggggtgtatgaaaaagtaataagagagactattaaagaatcgcatcctaataaattcagcgtgacttcaaggaagttatcacaagcgcttgcccgaagtgtagaactacaaacaagacatgggattaaacctatcgtctttgagtatgacgaaaacaaaacaaaattaaaggtacttgataagtattttatgatgtggcgtgaatatcaagatgttggtgaactttttgaactcgcatcaatattctctgatgatgacactgaataa

SEQ ID NO: 162770 - DNA, 888 bp, Enterobacter cloacae
atgagtggtcgagttaatggtaaaagcattagcaatagttttaccaaaaggttctttgtgtgcttaattaaaattgcattatttttatcaggggtttttacagttttactaattccatttggtgctttttttatttttgttgtgttgtttttgaagatgcggttatctcaaaaggcaactcacttataccacttctcgaatggagaggataattttagcaatatactaaagtctagatgtcttatgtcattaacaggcggtagatgttatgctacatctcggttcaatcctaatctgggtgttagtaccgtaggggataaaaatcaaaaattctttatagtttttaaaggcgaggcagtctcttttttcaaacccattgtcagcaattgcagagattacttccatatatggaagtggtggaaaagctttcgttgcgaatgggtgagtcgtaatttaatagatatagggctcccaaactcacttacaattcatacaagaataaaagtatctaaaggatttttcaccagaaagaaaagaattgtttactacaattttgttgttgtcgattctttggaatggttaactgagaagaattacattctgtctctacagaaaagagttttttggttttttgagtgggtgctttccttttttatttggtttgctgcggcaacgttaaattatattttctattgcttggaaaataaaaaagaactaagtgcgccaatgaatgacttgattcttactataaaaaacaattgttgcataagtgtgactgtggtcttctttattgcaataataggttgtatttctcacagcaaactcaaggcattggcaataaatacaaggaaaaatattcagcatgaaaagtataaaatcaaagattag

SEQ ID NO: 162771 - DNA, 573 bp, Enterobacter cloacae
atgaaaaaaaatcttttcagtctgtcagccattgccctgacgatgctgacgtcatcaggttcggcgctcgccgagggcacgaatctcgatgttaacttcacggctaatatccgtgaaacgacttgtgatatgaaactggttggcggtgaaggtactgatacaaagcaaacgttgaaaatcggtggcggtcaggtacgccttgacgaggtgaaagccggaaccgcaaaagctaatttcaaaatcgcgatggtcgaatgtccatcatccctgactggattgaaaacgacggttaagggaacccaatcagctgatcttacctcggggcttgctaacagtatagcaaaagccagcgggggcgcagattactccgctattgaaattgccagagccgatacaccaagtgccccgtttattattaactctaccgtggatacggagcgtttggtctggagtgcaacagaaatccagaacaaagaagtggccttagtcgcaacattacgtgaaaccaaagcaaacaatatgaccattggtgattttctaaccacggcgacttttgagtttacctacgagtaa

SEQ ID NO: 162772 - DNA, 564 bp, Enterobacter cloacae
atgaaatttaaaacaactttaatcgccctgtccgtttctgccaccctgtactctgtaatggcaagtgcagccattacgggtaccagtagtgttcagatggactttcaaacaaaggtcataccgggcacctgtaccgcaaaagtggttaacgggtcaggtacagaatccagtgaaattgcgtttggtgatgtatacaaatccgatctggtgaataaaacccgcgtcgaacctctcaaaattaccctcacaaactgctctggggtagaaaaagcaacggtagccgcagcgaaaagcgctggcggaggatgttcaggagggtacggaacgggggattcctatgcggctggtttagcgacaggctttgaaatctggtccggcgctgtcgatacaggtttgttgatgagctgtaacacaccaccggcccctcaggaagtcaccatcactaacggctcgggtgagttcccaatgaactcacgtatcgttatcgcgcaaggcagaggcatcaatgatgtgggtacaggtgctgtaagtgcgccagtgacttttactgtcgcctatcagtaa

SEQ ID NO: 162773 - DNA, 219 bp, Enterobacter cloacae
atgtggttacttgcgaatacgggttcgcagctcgtcactcatagtgacggttctatccagtatagcgcactaaatagcagtgatcggacgttggttccctttatgaatgccgtattcccgctgcgcgttgcgctggcggtgcagaaaactgacaccctggcgattaccgacgataccccgatcgacggccaggccaccatcactttgcattatctgtaa

SEQ ID NO: 162774 - DNA, 255 bp, Enterobacter cloacae
atgttatacaatgatgagaaagaagttttcagagggtggcttattgagcataaaaaaatcaatagaaaagtcgctggggatatattgtcaagagtcaatagagcttcaaagataatagatgttaatgatttaaactcgacggctcatttaatatctgatcttatttctagtgttgagttcaaagtgttgactgtttctgttcgttctcaaattaaacgaagtgtgatactttatcgtgaatttaaaaaaatgtag

SEQ ID NO: 162775 - DNA, 912 bp, Enterobacter cloacae
atgaaaatcgcggatcttttttgcggatgtggcgggttatctcttggagcagaaaaatctggcatggaaattgccatagcctatgacaattgggatcctgctttggaagtttataacaataattttacacacaaagctattaaagaagacatatcaaatgttgataagatatctttggagatctcaaagttatgctgtgatggcataatcggtggaccaccatgccaagatttttcttcagcagggcatcgtaaagaaggggaaagggctaacctcacaaaggcattttcttccatagtatttaacgtgagaccacttttttttattatggaaaatgtttcacgtacaatgaagtcaaaaacgtttagtgaagcaagaagcgtatttaaaactgcaggctatggattgaccgaggttgtgctcgatgcaagcttatgtggtgtaccacaggcacgaaaacgttttttttgtattggggttttaggcgatgttgacaatagccttttagagttaatccaatccagattatcaaccaaaaaaatgacagtgcgtgattattttggtgacgaacttggggttgagcattattatcgacatccaaggaattataatcgaagggcaatatttacaattgatgaaccttcagcgacgattaggggagtaaatcggcctgttcctgctgggtacactgggcataacaatgattcatctcctttgtcagaatcgatccgtgagttgactactcaagaacggtctatgattcaaacgtttcctaaaaattttaaatgggttggttcaaaaacaaatatcgaacaaatgataggaaatgctgtgcccgttaatttagctgcgttcgtaacaagatgcgtgcatgaacatatattagataagaaaaaaattgaggctgcttga

SEQ ID NO: 162776 - DNA, 1089 bp, Enterobacter cloacae
atgatcgatgtaaataactcaacagggaaactgttcggaatagaatattcaaacagaagtggcaaagatttgtggggtaaaaatcaatttaatagcacttttcctttatcccttgcatgttatatgcgcgaaaaaaacatacctgttatttatctaactttagatgaaaatttaaaagttgttcctgttgagctttctgtagatgatttattcgggaccactctagaaccatctgaaattttttactcatttgaaacgcagtacaatccttataaggaaattgcttacgattctattgagagagtagatttagtgatagccgaaaaagataaaaacaaaaaaggtaaaacaactgatggaaaacatttacgagcacttgaagttaaactgacggttgtgcctgataattcaacatgtaatttgagtgatgatttatgggctccagaaattgtaataaggcctgcgacaaccatgtattgtgctctaggcacagcgatttcatgtagtccacacaaagatgaaataagagaaatttttgaaccagtatgtaatggtgtaaaatcttggggcaatgaaacagaagcatcttcgcttttaccaaatctattagatgcgctagactctttccaaattaaatttcattcaaagcaaactcctacaataatgcagccgatatggaaaacacaaggaaaaactccttttttgcatgacaatgcttttgatatctttgtttggagtgactttgctttagcccggcttgttatcgatttagctaaaaaatcaaaagaaaataaagtttcaagacatgcccgaagtgcactgaggttaggtagatttttattcgagtattcgagagcaggcaaagcgcatttgcataatatctattcagaaatgacatattctcaccaatcagacaaagagttttctgttggaggacgagttacacataaatatatgaatcattatagacttcggaatccgattcttagtaaggatattgtaaaggaaattattcttgatggaggtgaaaaaaatctttcgccagaaagaagatttgatcagtcagtttacttttcttcgggctattga

SEQ ID NO: 162777 - DNA, 1134 bp, Enterobacter cloacae
atgaccgccacagcagaaaaatttctaataacaaatgaaagcgaatttgaagctttcatcgctaaaatgatgggtcgcaaggatttggactctgacgaattctgttttccagacctagagtttaagggctggcctacgattagcatcaacgttaagggcgacaaaaaaaggtatagctcgtctttaacagcatctatgctattcggaatggcggaactcacaaacgagatccagaaggcgtttaccgtcattaggcatgacacccataacaggcaaaaacttaccaactcagataaacatttacttgatattgtttaccatataagtgaaggttcaagccaagcagatggtgattctgatgcaattgttaatggagcagtatcagtgatcaaagaagcaatcggtaaaatgaatggtagacaggcactttgtgccctggttgctattgttattgccgccggcactgttggctggaaagttgcggatgaatactgggaaacccaacgccaatcatcctctgatcagatctctcttgttaaagagtctaccagtgctgtccttgaatctcagaagtccacactcgagcttctaaaaacaggacaaacaacagtcagtcgcgaagttctggcccatggtgaagatggccgtaacaagttcttaaaaagcattgctcaagatcctaaagtgtccacagttaaactgggcgagcaagttatcaatcgtgatcagctgaatacctataaccagcgtcagtctgttgatcgtaaaaaagatacaagacaggacgaattttacattcgcggaatctcacgttctggcgctacgaaccaagacataagcattgctgtgataagagcatcaaatggcgaaggctttaccatcaagacaacagctgatatcacttcaacagatgagcttttagttttttctcaagcagtagcaactgagtctccgcttgagatttcctatctagaagtaactgaaaatggacatgtttctgctggtcagcttattaacatcattcctcaggctgaggacataatcattgagaagcacgaactcacttctcatgatgaagatacgcctatagcgctgagtgacagcaccgataactcgaagagtaaaaagaaataa

SEQ ID NO: 162778 - DNA, 426 bp, Enterobacter cloacae
atgtatacccttgaaaaccctttaggtatagtgaatggttttaactataaatatatgagagagtttatttataatgaaggagagatacctaattatctgatcgagaaaaaaacatccttagctaatagccgcgattttaacatccaaaaaatattacgggatgacattagctatgaggattcaatgaaaaatgacggtttgcaagttatagatcttttggcttctggtatgcgtaagcttttaaaaatgagatttgcagataatactttaatagccaatctactcggcagtctcatgatacagcagcaatataataatccgcccatagacataattgttttcgatgaaaaatctgctgctttaagaaaagaattagatgagcttgtaaaaatattaattaaaaactcaaaacgaatgatacgttga

SEQ ID NO: 162779 - DNA, 654 bp, Enterobacter cloacae
atgaacgatgccgacattgacctgataaacaaaacgttttatccgggctggctgatggtcagccagttgcgcagcggccaggaggtaaaggacggcgaagcgctgtaccgacgggcctgccggtgggtgaacgccgcgcgtgaatcactgaacaaagccgggttcagcaccacgtcctgcgaacatatgctgtatgcgtactgcgccctgatggatgagagcgtgctgaaccgggataaacaggatgacggttaccgccagtggcgaaaagacccacttcaggcgcggtttttccgtaccctgaatgcaggagaagagctatgggagcgtatccgtacggccctgcgcgaacctgcgccggatgtggcagtgctgacctgtctgtaccgcactctgcaactgggcttcaccggtcagtaccgcacgcaggatgatgagcggcgtgaggatgtggtgcgcgcgctcagtgagcgcgtaccgccgtttgcgctgacccaggaaacgcctgtggtggtcagggcatcccgcctgcgcagcggacgccggatgtactggctgggctgggcggcgggcgtggtggtgctggcggcgctgtggttcaccttctcctctgtgctgtcgcagatggtggcgcagattgcggggcagggataa

SEQ ID NO: 162780 - DNA, 1437 bp, Enterobacter cloacae
atgttacaaggcgagtctcaggatcagggtgttaagaagtttttctctatgcctttttattcaattgacagagatacagttaatgatatttattctggtttagaccaaaatcaggtgataataattaaaggtagacgtttctctggcaaaaccacattattaaaaagtatagcaagaaatattaagagtaaaaaaagctattttttcccttcgataaacaccctcaacatagaagatattaaacgcttatgttcgattaaaaattccatttactttgttgacagtaatgtaattacttatcaagaagcaactgctatcagaaaagcaattccagaacttgcaaagaataactctaacttcgtcatagcatgcaacccaactgaatcagatatagccaatactttcccttctgcagataatgaaaatgatttcttcgagatatttaatttctttactgaaaaagaaaccaatcaaatcaatagaaatctctcttctttaggaattatagaatggagaaacagaaagaatcttcttgaaaatacttttgatactgctgctgcttatcctatgataaaacaaaaaatttatattactaaggattgcagtaagattgaattcaagtgtttgattctacttgctattcttgacaaggcatttatctctttaactcgtgtgattgggataggaaaccacgaagccaaagagatcacagcaaaatatgcgccgttaattgagataattccaacctcagcaaccgaaagcaatcaaaagtctagatataaaattgtaagcaactctaagtcatggctgcttcatactataaaagagcaattcatagagtttggttttgataaaaccaaaactattttggttgaaatgataaacgaattaagaagaaataaaaacaacgaagatgttggtaagaaaataattatgtttgatactataaatttacttttttctcgaaaaaaaggcgcggggcgattaattttgagactatatgaagaactacaacctcttcttagtcaagatccagactactggcttcagcgggcgaaagcaatgggaactgttcttaaaggaagagcacatcttttggaagctattgattatgcaaaaaaggcctttgaagatggtaaacgagaaaaaacagtactaaatgctgaatttacccttgcaaacttatacgggaaaatatgtgagacaacaaattataatgataaaaaattagtcagcgatgccttatattggtattattctgcaatcaggaacaacaattacaatcaaaaatatattaattccatgttagagattacaaaatggaaaaaaggtaatctttactcactctgcagtaatattatttcaaataatataaaactaacgaatgaagaaaaccttatgttcaatcatataaggaaatttatcgcaactaaataa

SEQ ID NO: 162781 - DNA, 264 bp, Enterobacter cloacae
atggaactcaactacatcaagtttacggaatcagtaatcgatttaattcttacatccctcaaggaagcgcgatcgtttcgagtgcaaggcgaggaagaagccgcacgcctccgcttcagcatggctgatacagcatttactgtttggacgcacgctgtggagaacattgcgcgcccaggacgtaacgaggaaatgatcgccattgaccgtaaagcaatggcgggggctttgaaagactacttaccagaatggcaagacctttaa

SEQ ID NO: 162782 - DNA, 618 bp, Enterobacter cloacae
atgaaagttatttcttttttgaacccgaaaggcggcagcggtaaaacaaccagcgtgattaatattgcgaccagcattgcacgtaataataaagtggccgtagtggatacagatccacagcaaagcctggccaactggaataaagcggaaaaggcgaattttgacgttttcacagtcacctcagaaaaggatgtatatacgataagaaaagaattaaaagattatccttacgtgatcattgatggtgccggtgcgctttcagttattaccgccgcagctgtgatggtcagcgaccttgttatcattcctgttacaccgtcacctttagatttttcggcatcaggcgcagtaatcagcgttcttgaggctcaatcatacaatcgccccgtagagtgccgcttccttattacgcgaaagattgaacaggcctctatgctgaaagtgttacgagaaagtattgcagccaccggaatttcccctctcagaacagcaataacccagcggcagagctatgttaaatcagtcctggatggtgaaacggtatttgatacaaatgacggtgcagctaaaggagaagtagaagttttggcggctgaaatactgaaaatcgttgcgtaa

SEQ ID NO: 162783 - DNA, 240 bp, Enterobacter cloacae
atgagcctgataaaacagaatagcggaaccgccacaacgaataaggtcatgacattcggagagaaccgggatctggataaagtcattgcatcggcaccggcagccgttcagaaacgtataaatttcaatatgccagaagataaacaccaacgccttaaagcggcttgtgctcgtaaaggtatctctatctctgacgtaatgaatgagttagccgactcatggttaaatgaaaatgagtaa

SEQ ID NO: 162784 - DNA, 444 bp, Enterobacter cloacae
atgaacgatgcatttaaaatgaaacaagccgtatttaacgcgcaagatctctataagatgctacgactgagcatgataaaatactttccttacgatacggcgactatccaatctgatgaaatactaactattttcctccagaaagaacatcgcctagatattgagatcgctgatattcaggaagaacgtgggctgattttcagtggtaacggctattatatctataaagatttggataaggaagaaaaggggccttatcactcgtcggcatggtatgtcatgcaggttgctaagtggcacaaacaagagcttggtcttctcaatcaagatctggatgcgatgcgccaatggcttaaattgaatgattacgttaaaggcaacctacctactgataagtttttaaaggaagagaacttgattattgctgattcccacgcaaaataa

SEQ ID NO: 162785 - DNA, 687 bp, Enterobacter cloacae
gtgactgaacaagtacgttcacctaaagcccggccatcaccggctggcgtaccaaatcaaaccccttgctataatgttgcttcgcgcaagcgccgccgctttctgtctcgctggattaaacagcttgcgactcctgctgggcgcttaaaaatccataacgagctgcgccgccttgttcgtaaaagccggttttgggttaactcaccgaacaaatacggactggaagcagcctgtgagttaatgttagctatccttgatgatttagatttaagaacatggcagacacgccataaccttaaaatcttgtcagaacgagctggcctgacaaccaaacataagcacatttcacgcgccagccgtggatgtgatcgcctgtattggttgaatctaatcatcaccgataaagccccgtttaacccttacgatgcgcaatgtgcatgtaagcaaatcgaagttacggaaagtttttttgcggcgttgggaattcctctgaaaatggtttatcgggaacgcgcacgacttttaaacgcagaccctagcgaagttatccatgcgtgggattcccggcttttacctattcgtttacataacattcagcgcatggccacagctggtttagcccgtatgaaagcccgccgtgaagctgcgcggcagcgtaaaaaagattactacgccctaccctcatga

SEQ ID NO: 162786 - DNA, 1719 bp, Enterobacter cloacae
atgaagaaaaatttctatttcattctttttgctcttcttttattaataacattcactgtgtcttgtttggttaagtataacagtctcttgtctgaaaaaacgttatatacagttgccggaactcaagaaaactacggattctcagtggcaaaattcatcattcaattgaatgagttgtacatgctcgttaacagtgaaaatgacattgatgatgtgagatttaaattagatatacttttttctcgctttaatgttatttatgttaggagtgaggcgacagcgcctctttacaaacaatggaagtatgaagaaaccataaatataataaatacaaagcttgagaagattgattcaatgctttcaaatgagcatccaaattatagagatgtaagttcgattatagctagcattaagccgcttactaaaaccattactaaccttgccgacatggcagaaattgcacagagaaacaatgctctaaaggattttcgaagcaaacgccagcagttatggactcttctgtttattacgggcgggttaattttactgctcctttttgttcttttcatttatattagtaaaataaacagattgttgctttcagaacgagcggcttttgctagtaaaaatgcatttttagggatggtaggccatgaacttagaacatctctacaggcaattgtgtctattattgactcagtaacaaataatttaaatggaggaattaaaccttgccaaatagaacggcttgaaacagctgtttcaaaaatggagcgccagctaaatgatttggcagagttcgcaaaaattgataacggatctgtagaagctaattatacatataatagcctgaaagcaatcgttactaacgctgttcaggattgcattgctatctacgaaaaaaatgacgtcactgttaaaattagaagtaatgttgatgctgtaatttttacagatgcacttcgcctaaatcaagttattgaaaacttaaccagtaacgctataaagtacactgagcgtggagaagttaatgtagattactacatagaaaaaaataagttattaaacattgttatttctgacacaggaaaaggtattcctaaggataagcttaagttcatattcaaaccattttcccgcattaacgattcaagttctactgtgcctgggttcggcatgggattagctattgtcgctgggataataagattgttaaaaggcactattcacatatctagtgaagtgaatgtaggtacaatcgttacagttaaaatacctgtcaagttgggtaatagctggctggcaatggctgagacgtcaccctcagcacatggaaaagtcttaggcgatcttaaattgttagtcattgacgataatgaaatggcctgttcttctctctcaaacttgctcacgaacgcggggtacattgtcgaatctacaacctcgcctgaacgcgctctggaaaagctcttacgtaaaccttatgacgttgttttgagtgatttgcaaatgccgggaatgaccggagatgagttgtatgcaacagttagcagaagccaaagccccaatagatctacgccattcatattcatcagcgcttacagtgatatgagttctataggagatgctccactgttgactaaacccgttaggttgaaggatctaaacgttaaaattcatgaggttacatcaaaaggtgagagtgtcagaagtgactaa

SEQ ID NO: 162787 - DNA, 489 bp, Enterobacter cloacae
atggttaagttattttgttttctgactacactggtattatcagttaatgcatattgcaaaattggtgatttagtaattgatggatctatcactaattctaacagtgataaaggttatgtggttactggcgcacagtttgattcattcccgcgcagtgccattactacgacaactccttggactccaaccggaaaaaaagtgcggtttgatggcgttgagctaaactatatattacaacgtgctggcgctgttggaacgaggcttaaatttcatgctctcaatgattatgagatcattgtgagtatggatgatgttgaaaaatataatattttattagctacagaaatggatggtaaaaggcttaaggtacgagattttggaccatattttcttatttatcctttagatgaacattatgttgagcttaacacgccgcactatcttgctcgtttcatatggcaggtaagcaaaataacggtgctaaaatga

SEQ ID NO: 162788 - DNA, 984 bp, Enterobacter cloacae
atgagtgatttaataaagtattccggtagtttgataagtaacgataatttgatcgtggcaccttatgattatcagaaaaaaaactatggtaatctcagtagattaaataatgacttaattaaaaactggaatttaaaaggattttctattgattactctgaagtagatgaacttaatgttatcaacggcatgggagttactttgggtgattctatcgtcgggatttctgtactagcagcgataaaagagaaaaaccctaatattaaaattagagttatcagaccggagacggcacctccttacgttgaggaggtgtacaaattagcggcatcagtcatagatgaacttgactacatgccctttaatattcatgagttatctaagtcggcgttgaatgttgatgtaggaaaccaactttactcaccatatttccatgttatggaaatgcacgattactttattcaatctctcggcttaaaacttgatgacataaaccatgacgtgttaaccaataaatggttaaacaatatagactatggcgcgccgatttatgaaaactacacactatttactcctttagctagtacaaaaataagaagcataccctctgtattttactatgatattgtggaaatgctttcaaaccgagatggaaaaaaggtgttaggattcgtcgacgtaaatcatgaaaattatttaaatatagcaaaacacataactaacacaaaagattttatgtcagtcattaaggctgcaagcaatgtttatacctgtgattcgtctgcattacatatcgcagcgggatttagagtaccaacccaatgtgtttttaatacaattcctccggaattaagaataaaatattatagcaattgtaatccagtgtatgttggaaattcaaatctagaaaagatacaaagcagtgaagatttatctttaattaaaatagtggaaaataattatagggagtatttttatggttaa

SEQ ID NO: 162789 - DNA, 834 bp, Enterobacter cloacae
atgccagaacttgatgattcaagagtgatagaagtactagcgaaggtattgactcaaaaagggatatctaaggttaagcacaatagttacataagtaacgtgctacaaatcactacatcagctggttataaaaagttaaatggagcgacgaaatgggaggttcagcagctcataaaagtcgttgaatccgttggaatggatatgactgaatttttccgcatgtattatgaggataacaaagagtttcataatgcaatctggaacgatggtcgaagtgaacattcttgtaaggtttacctttatccagaggattcagacattaatacagaatattcagcgcttaaagtagctgatcagtggaacatttatccgacaagcgatttaaaagatgaactactttatgaggcaaaacgtagtattgaaagtattgtgattaatccaaagttaatcagtagcgcaaagtacagaattgcactattagatgatgacgaaaacattaccacaagtttaaaagaaatactttcaaatgaatcttatcatgtagatacttatgataatctgaaaaaactttctcaggttgttacaactaatccatatgatgcttatgttctggattgggttataggtgatgaaactagttttaaattagtcaaatccataaggctatctaaaaataaaaatgccatgattatcgttcttactggtagactatcaggaataaaagatgatgaaattgtaaagtcaattcatgattatgatatcgttgggccatatgagaagccaattaaatcaggcattataaagtctaatattgataaatattttacaagatag

SEQ ID NO: 162790 - DNA, 309 bp, Enterobacter cloacae
atgagcatgcaaactgttcgccgtaaggcattgcgcaataatccatattcaacacttggcagaccggttaaacgcagctcccgtgatcgcatcacacgagccatcaacggcacttggtctgtccgtgagattccagaaaatatccgcgagcttgtcattgaacgggcagctattcgcgctgaaataatcaccctgaccgtgaaagcgcagggtttaagaaacacagatgtctcagttcgtattgccgagaggttacgacgaatcgatgccatcacttcactgttggaaaaaaggaaatgtcatgtctga

SEQ ID NO: 162791 - DNA, 216 bp, Enterobacter cloacae
atgtctgacacctctcgtgctccggccttactacctgacgcattatttacccccctgactacgtacacgcacaacgtgtattcggttaaaggcaacctacaggatgcaacacttaccagaataggcgtcgcactggctgacagtcggggcgatatacagctttttatcaacccggatcatgcaaccggtaaggtactgctctataaaaaggactga

SEQ ID NO: 162792 - DNA, 654 bp, Enterobacter cloacae
atgttaaccactgccgcgctgttccagctcgcaatgcagtgtgcccccgccgttcaccccgataccattcacgacattacccgcaccgaatccggtttaaatccgtatgccattgctgaaattgttccggtaaagggcggcaggagccgcgtaatttcccatatgccgacgtcgaaagacgaggcgctaaaaattttggaggacattaagcagaagaaacaccgttattcggtgggactgatgcagataaccagcactaacttcccgcagttcggcgtcagcgccgaatccatgttaaatccgtgcgacaacatgaaagttgccgcgaaaatcatcattgactgctatcaacgaggaggcacattacagcgagccctgagctgctattactccggtaactttaaaaccggcctgcgccaagaaagcgcttttggcaacacaagctatgtacaacgtattggctacgttgttccatcaacaaagcaggacaagctagccatacagaacggcacacaagagagtcagacggtcgatagcataacctatccatcacagattattcgtggtgctctgcctgttgccagcaaatctaatacttacgaaatcaattaccctccacaggtagtgagaggggaattactcatatctaaataa

SEQ ID NO: 162793 - DNA, 300 bp, Enterobacter cloacae
atgtctttaatcaataaaatgaaatcaaaaatcaatgcggcctgggcaactttcacagtaggtatcttaccggctgcacaggcaatcgctgatgatggattctcaaaggctaatgaaggtcttaataagtgggctgttggcctcgcaagtttgtcggttgctacagttacgctttgtattctgtggattggctataacgtcttgtttgacggaaaagagttgcgccaaatgaagaacgttatcatcggcggtattcttattggtggcgcgtctggttttggtgcctggtacatggcataa

SEQ ID NO: 162794 - DNA, 2751 bp, Enterobacter cloacae
atggccatcctaaataaagggcttacacgcccggcggcactcttcggagtgcctttagttccgcttataattgtgtttatgactatcaccctgatatcggtctacacacaattttattgggcgctcttacttctgataccggctttaatcgaaatgagaagtaaagcacaacaagacattcattactttagcctgcttttattgtcttttaaaacacgcggcaacagagctgttaacaagttctatggcgctaatacaatatcagcaggtaagtatgataatgtcgacattacggagttctgcgaaaaaatgcggcttaatgagagcgtagatatttccaagtacatcccttactcaactcatattgataagcatatcattaaaaataaaaaaggtgatttgatatcaacatgggagctgggaggaaccattttcgagtgtgaagatcatttccatttagatctgatgaccactcaattaaataacctaatccgttcttatgaagggatgccgtttacattttatattcatcgaatcagagacagctttactgatggatttgaatgtaattccggtattcctttttctgacgaactggcgaggctttactatgcatcgataaaaacacgcccgttccgccgctgccggttgttctttacagcttgctttatacctttgagcaaacttgaaaaggcagcccttaaacgaaagagtacaggtgacagagaaacagcacttaacgaagcgttgaaaatgatgcgtgagcattgggggatgctgaacacctctctttcccgatactctgcctctccgctcggtttgtacgaggaaaaaggacgcctgttttcctctcaaatgtcattttacaatcgccttttaacgggaaaatggcaaaaattcgccgttacacgcacgccattttatgacgttctcggctcggctgatctgcatttttctacggacacaggccagtgtagtaacgttgacggccagacgtttttccgaagtctggaaatcaaggatcataccgttgaaacctccaccggcttgtttgatgcgctactgtatgccgattgcgattatgtcctcacacagtcattcacctgtatgggtaaagaggaagcaagaaatcatataaagctgaccagtaaccgactcaaagcagcggaagacgatgctatttcccaacaggaagatttactcactgcacgagacatgcttcagtcagggcttatctcatatggtaagtatcacctttccctcgtggtcagttcttccagctccgaacaggtgataaaggacactaacgcgctggctgagccgattaaagacctcggcatcattatgacactttccacgttatcacttcctgcggcttatcttgcgcagttacctggtgtttacgagctgcgtcctcgcctggtgccggtgagcagcgctaactttgcggaaatggccagtcttcacaactttaacccccataagcgcgaaggaaacccttggggagaagctattggcatagccaggacaccatcagggggaaattactatcttaaccttcacaacagccaggagggagttaacgacttcaacgagaagccaccaggtaacgcgatgatcatcggcagcaccggcacggggaaatcaaccctgctggaaatgttcaagcatctgatgcagaagtatcgacgtcctgaaaccttctctccagaggcgaagataaagcgctttacaacggtgacgttcgacaaagatcgctcggctgaaatgtccattcgtcaggctggcggggcgtatttccgcattaaatcaggcgaaccatccgggtttgcgcctggccgactccctgccacaaagcgaaatatcaactttgtaaaacagatatttcgactgataaccaccaggaacgataacgttcttgatccacgtgacgaggaacgactcagtaaggctattgacaggattatgcttgattacccgcctgaaaagcgtggcaatatcgtaacccgtgtactggaaatactccccgaaccacctacgaaagaagcccgaactaatgggttacgtattcgcctgaaacaatgggcgagaggcggtgaatttggttgggtgtttgataatgacgaagacactttcaatattgaagatattgataatttcggtatcgatggcactgagttccttgatgataaagatgtgcgcacccctatcactttttaccttctctaccgggtaacgagtctgttagatggccgccgtcttgttcttttcatggatgaattctggaaatggttgcttgataaagagttttccattttcgcccttaatatgctgaaagttattcgtaaattaaacggcatatttgtacccgccacgcagtcgccagaggaaatgtgtaagcacgaaattgcagcggcaattatcgaacagtgcggcacgcagatttttatggccaaccctaaagccagcgaggacgattacgttaataagctcaaagtaccgcgcagcgtgtacgagaaggtaaaagacatagatccgggttcccgtcaattcgttattttaaaaactccattaaggcgcggtgaaacaaggccgtttgtttcgctggttactctcgacctctcagggctggggcgttatacgaagctactgagcgccagcgccgacaaccttcaaatctttgactctatttataaggagggaatgaaacccgaagagtggaaagatgaaatgttaagacgagcaatttaa

SEQ ID NO: 162795 - DNA, 729 bp, Enterobacter cloacae
atgaaattgagaaaatccctgatatccacgcttaccgccacgtttttattctcttcatacgcttattcaggtattccagtagttgattcgctggcaaacgtcacctcaattaatcagtggacgcagaagctaacacagtggacggaaaccgtgcagcattataaggatcaaatgaattcttataagcagcagttagctacggccacaggtatcagagacgtccagttgttccttaaccaggcaaaaagcctgtctaatgatataaaggctcttaaagagagaggtatctctctaaatgaccttttaaccaaccctaatggttcctactccgctgatttatcgagcttgtacagcaaatacaaggtctttgatagctgctcagatggcgctacaggcagttatcaggagagctgtaagaagctagtcattaaccaggctgcggctatcgaagacacaacggaagtacaggaaaaaattgctgacacactcagcgatattgctgacctgtccagcagaatccagtattcacaggattcaaaggaatctcaggatttagctaacgttgtgtcagctaaaagcgtgcaattgaatgccttaacatcgcagtgggaaatgactgttaaacaggcagaacagcgtagtaagatgcttgaggcgcaaaaacaaaaggaatttgcgaaacagcaactcaatgcgccggttgctgatttaaatagcttaggaatttaa

SEQ ID NO: 162796 - DNA, 273 bp, Enterobacter cloacae
atgaaaaataaattaatcaccatagcatttatcttttcggctgtattaataaccggctgtgaagataaaacttcagttgactggtatgtgaaaaatcataaggaaatgattgcaaaatatactgaatgccttttagcgaagtcatggcaggatgttacttgtcagaacgccagaagtgcaatgaaccttgaaagtgataagcctgatgttaaagaaggtctaagggcggcacgtcagaaggtaatggatcgaagccttaataaagggtcttag

SEQ ID NO: 162797 - DNA, 1011 bp, Enterobacter cloacae
atgagtggaggcatctttgttggtatggaaagccagataatcagcggctttcatgctgtactggctggtgttacatcaacttatggcgcatggatggcgggcattttcacctcaagtcttacgggctatattgtctggcgaggttatcagacactagcagggaagctagatcgtccggttgaggacgtggtgtgggatgtcgccaagatgtccataatcatgatgtttgtaaccaatgccggtggctacctcgatatgacggctgcggccattaacgggattagggatggagttagcggtgacgcctcaatttgggctttactcgataccgtttgggcaaaagcgcaggatttgggtagcgccctctatgagcttgacgactccacatatgttcccgttaatggaggtatcgctgagtttattgtttggataggtgttgcgtttatggctggggttacggcttttgttaatttgattgctgaactcattatgatgttaatgctgactaccgcacctatatttatattctgcctgatgtggggatggttacgaccaacctttaataactggctccagactattttaagttgcatccttaccacgttatttagtggattggctttacaggttgtaatgaactacatcaacgcgatactgcaaaaagcatcagtaatagccaaagatgcaaatattgtcacaatcgcgtttcaggtcgggttagctgctgtaggtgctggaatcataatgtttgtggtgtataagctttcctgcatgcttgcaggagttgcagctcagggagctattcaggggatggcgactgcgggagtaagtcgcggtttttcctctgctaaaacttcctctagtaccgctgcaaatcgtttgggaaatattggtgatcgtgccgcgctaaaccttcagggtagatcatcaccaacaccatcagcggcagctaatcgcaaggcatctattgaaaccgccttgagaaacaaaagccaaaactcaggcagttaa

SEQ ID NO: 162798 - DNA, 687 bp, Enterobacter cloacae
atgtctgatttagctcaacaggccattagcgaatcaaaaacatttgagactgcgcttagaaataaggatgctcgctttgcaaaagcgggatgggtaatagccggttttatggggttaatgttaactggtgcgatcagcgcgattgttatcatgctgccgcttaaaacaactcaggtcgatttatacgcgatgcatgaggaaacggggcgtattcagaaaataaccactgttaactcagaaagtttttccgcttctgatgccctcaacagcgcggaggcggccagctacgttaaacgccgtatgcgttacaactatttctcgttacagcgcgattacgacgacacccaggcattcaacagtgctgatgttaaccgcgattaccgggcggaatttgatgccccggatgcgccagataaaaagtggaataaagcggcctatgtggtcgatatcgatgtaatttctaacgtccattcagcaggtacaaaacctgatcgtattgccatgctccgtgttaagcgaacggtacgccgcattgctgataactctgaaatcgtcgattactggacggttcgccttacctatcgctatttgccacaaatggaactcacaacggatcagcgcgaagtaaacccgttcggtttcacggtcacgagctggacgccggttaaggaaaatcacaatgaataa

SEQ ID NO: 162799 - DNA, 909 bp, Enterobacter cloacae
atgaataaaagccttatggcgctcgcattgctgtttacaacggcaaccgcatggagcgcggcgcttccaaaagggagcgcttacgacagtcatatgcaaaatattgcgtacaacagccagaactcaaccatcgtttatacacgcgcgggattcgtcaccacgctggtatttgatgatgatgaggaagttatagatgctactgccggttttccatcgggctggacagtaaccccggataaaaaccgggtgaagatatggccacagccgattaaacagcctgtcaccggcgctgacggtaagaacgtggagcaggtctttaccccgacagataaagactggcaaaccaacctctttgtaacgacgacgaaacgctattacagcctgatgttacatgtgattgatgatgataaaccaacctccgggctggcgttcgttatccgttacaactatccagccgatgcacgtcaacagtcggaggcggcaaagactgcgcgtcagaaagagttacaggaggctcaggcgaaggagcttattcaggccgactttaaaaaggcgacagctccccgcaactggagttacacgcgccgcgtggccaaaggttccgaatcgatcactcctgattttgcgtacgacgatggccggtttacttatcttggcttttcgcctcaaaaacgcatccctgcgcctttcgtcgtggttaacggcaatgagcaggtcgtaacgccgacctttatcaccgaaggtaattatcgcgtgatggttctccgctccctctctccgcgcttcgtacttcgttacggtaatgatgaagcggggcaggttgtcggcatcgagaacaccggttttgggaaagtcactaccgctaacggaagcactgtatcaccttccgtcacactggaggctaaataa

SEQ ID NO: 162800 - DNA, 1272 bp, Enterobacter cloacae
atggatgatcaggattcaaataagaccacggcagaacttgaggctgaagcaagggaacgggcaaaagcagagattgcagggcagaaaacaacggccgcagaagcgccgccaggacaacctaaagtcgttattcacaacaagccaaaaagcaaacgcacgttgatagttgtcgttatcagtttgcttgcgcttgttggtgtggcaatcggcggggattatctgatgaatatggctaagggggataattcagagcagaaggaggaaacaaaagcccctaaatccaatagcatgacgcccagcaaagaacgtaaaggcatggggcgcgatgcaaaccccttcgaggaccaggctaaacctgctgattctggccacacagaccagcaaccacaggaagccgccgcccctcagccggtaacattcagcaaaaccagcgccctctcgctgagcgggggaaacgcagggaacagccagcagaactaccagcgctcaaactcgcagggaacggttacagagaaccgcaccgatgccgccagtgatgcaaggctggcacagtgtaaaaaggtactggtcagatccccggacggtaaattaacttgcccggacactgagccagccaccgaccaaaccggagatggccaaaacaccggcgtagccagaattacgggagttaagcgcctcaatctcgatcctaatctgtatatccctgtagaccgtcatatcccctgcgccctgttgaaacgctttgtttcggacgtggccgggaaaatgacctgcatgattagcgaggatgtgtatagcgcaaataactttgtacgccttattcctgccggaaccattgcacggctgatctacagaaccggtacgcttaagaacggcatgggtcgcatgtttattggggttacagagttaagaacgccagagcctaacgcgctggtcattcctatgatggatagccaggctgttggccagctcggtgagaacggcgtggatggctggattgacgagcactggatgaagcgtatcggtaatacgttaatgctcggtactgtgcaggacgtggccgctgctgctgcaaatacttcccccagtacagatcggaacacggactatacggagaatacccgcgccgccactgctgaactggcaaaagcgatgctggaaaacagtatcaatattccaccgacgatgtacaaaaatcagggcgatatcattgctcttgtcaccggtgctgatatcgatttttcaggtgtttataaactgcataagaggtaa

SEQ ID NO: 162801 - DNA, 1029 bp, Enterobacter cloacae
atgcaggacaaagttgataacgtcgcccttgaatatatgaaggaggaaatattgggggaatacctcaatattccagggctaacagaaattgccataaaccgtgcaggggagcttcatacaaaggtaaatggtaagtggtcaatgcataaatgcaatgtcacctacgaacagtgtgaagcgttcgccagtgcgttagctgtgtggcaggatgataacattgatgaaacctcccctatactctcggcaaccctacctagcggccagcgttgccagataattttccctccagcatgtgagcgcggaacaatatcaatcacgatccgtattcctgattactatcagcgaacacatcaatcatatattgacgatggattttataaccgcgttactggagtggaaaaaaaggagagcaaagatgatgaattagccgagatttataaaagcggaaacatcccattattcatagaaaaatgcgttgaatacgggaaaaccattattgttgttggtgaaaccggttctggtaaaacctcctatatgaaaatgctactgcgttatatcccgttaggattacgcatcgtgactatagaagacaaccccgaaataaagttttatcaacattcaaattatgttcacctcttttaccctgccgatgccggtgaggatgcgatcgtaacgtccgaccgtctggttcgtgccatctatcgtatgaaccccgacagaccattacttgcagagattcgaggccgtgaagcatgggatgcgctaaagctgattgaatctggccaccccggtttcatgtcgtctcttcacgccggtagccctaaagaatgcatttccggcctggttgatcgctgcatggagcatccagcgtgccggggcatgtctgaacaggtactacgaaggaaggtattacgctgtatggatgtaatcgtgagcgttgatatcaatggaaacgtgcgccgtgtaggggatgtgtactttaaacatcttcacctggacgctatgaaagcgagttttgaaaatgaataa

SEQ ID NO: 162802 - DNA, 252 bp, Enterobacter cloacae
atgttattgggctgccagtcgcttaaatcggtgttcatggcggctgaggctttatcccattcaaccggtaaaggctctggaggtgatgaacacccggccagtagagccacagcagctgtgaggcacagaattttattcattttcaaaactcgctttcatagcgtccaggtgaagatgtttaaagtacacatcccctacacggcgcacgtttccattgatatcaacgctcacgattacatccatacagcgtaa

SEQ ID NO: 162803 - DNA, 306 bp, Enterobacter cloacae
atgaaaaaagctgttattagcggcatggtttcccttgccttattttctggcctttcggctccggtaatggcgcgtgatgcgtgcgaaactgtattgtgcctttatggaaaagtcactggaaatagcggcggcagtgaatgcagtcaaccagaaaaggatttttttaatattatcaaaaagaataagcatggttttttacccaatcatactctggatgccagaaaatcctttttgaatcagtgtaaatctgccgaccctaaatatattgcagagatattaagtaagttcggaaaagtacgtatgtag

SEQ ID NO: 162804 - DNA, 2007 bp, Enterobacter cloacae
atgaaagtgaacacaaagagtttaacaatcgcatttacgttagcaacactcagtgttgctgcgaatgctgataatacgatcctggggaacggtgcaacagctacagctgagagtggggctactgtaataggtcagtcggctgaaggtggatatcaggctaccgccgtgggggatagcgcaaccgcagcgaactatggtgtggtgctggggcactctgccaccgcatctacagcaggcgtggcaattggcaaacagagtaatgctgagggtatttattcctcggcggttggcgttggggctacggcaaaaggggggttctcacaggcatacggttacttagcttctgcaacgggagactcttctgttgcaatgggtaatggagctaaaaccagtgggtatggctccttatctatcggtggaagcgcgagcagctcagacgattacagcatggcgctgggaacggaggcggtaaccagtggaaacagaagtattgccctcggtgctcaatccagcgctacaggcggtggtgctactgctttaggcgcggctgctactgcatatgggggggactccttagccgtaggctccagctcaagtgcttcgacggcagcaacaacagccgtcggtagctattcgaaggcctccgatgttggtgcatcagcttttggcaccaattctgtagcggcgggggcgtcgtcttcagcttacggtgtaggagctgaagcctgggctgaaaatgctacaagctacggggcgtatgccttagctacagacatatcctcaacggcatttggagcatatgccaatgcttctggtgtttactcaatagcgatcggagacaacagcaagagtgaaggaaaatccagtattgctattggccgtaacagcgtttcttcaggggattattcattttctcttggcgattacgcaacagcgaacggtgattacaccgtggctatcgggcataacaccatcgctaatggcgctggctcccttgctatgggctggaaagcatcgagcgacggcctagggtctatcgcatttggtcaggcatcctcttccgcagggttctcgtcggtagcgctaggcggcgaagcggcagcaagcgcggataatagcgtcgctgtgggatatcaatctgaagcagtgagaaataacaccgtttcagtcggtaatgcttctaaccagcgtcaaatcgtcaacgtggccgcaggcactgaaagcacagatgcagtaaatgtgcagcaactgacggataaaacagcagagacattaaatgctgcaaataattatacagaccagaaatcagcggagacattgaacgctgcaaataattatacagaccagaaatcaaaggagacgttaatcacggctaataattataccgaccaaaaaacaaaagagacgttagaagtagccaataactacactgacacgaaagtaattggtgctgttaatacagcagttgacactgcaaatagctacactgacaaaaaagctgaagatacattaaagagcgcaaacagttatacagataataaagttaataacataaccagcgtagcaattgatgaagccaatatctacacggataagcaagtaagccaaacgctgaataccgcaaataactacacagatacacagacaagaaatgaagctgttgcgcgtgaaaaaggtgatcgtgaaacattagcctccgctaatcagtatacaaacagtaaattttcagagctgagtaaaagcgtaaaccgtctgtcagaccgtatcgacaagaaccgcaaacgtgctgatgcgggtactgccggagcaatggcgatgacagctattccaatggttgacggtaaagatgtcagctttggtatggcaatgagcggataccgggatcagggagctattgcagcaggtatgggattccgtaccagtgacaggtcagcagtaaaaattaatacagcgtgggattcacaaagcggtgtcggtgtggccgctggattcgctttaggctggtag

SEQ ID NO: 162805 - DNA, 576 bp, Enterobacter cloacae
atgcaatatgcactagttgaatgtcaaggtaataagtttctacttgatgcgacagagtttggattgttggaaaattggcaagataatccaattaaagatttattagattttgatgaatcaaatcaaccgtactatttatgttatggtggatatttattaaaccctgatattacagatactgatatctgtgaaaaactaaagaaactggagggtcatgggttagctgcaattgatgacactacgttgaactgtcataaaattgctttgtattctatccatacactacctgtaatctctatcgggcatcaaaaaatcgttcctttcgcggcattaattaagtctgatgactgcataatttccaaaatttcagcgaaatctaatttcgcagtaagtgcatttctgagggtaaaagaatgggatatagcaactaacattctcaatcgggaaggtatcttcgcttttaacggtgcggaaatgagatttaaacaaccagtaagtgaaagaaattggaaagcgttaatctttgaagaacgcgttattcgctgcgctaacaatttaatacgatgcagaggataa

SEQ ID NO: 162806 - DNA, 312 bp, Enterobacter cloacae
atgcctttcaaaaaaggctttatttccccgccgtggcagcacgtccggggcgattcagttagtgctcttagtctggtgctccgggcacagaaaaatgcaggtcgtggttgtggcctgcattatgaaatttatcaataccgggtgatggctgaacttttcgacatcctgaccaacctgaccaccggtgacgctgcaatttttggggaggttgccgcaagctgcggttattcagaccttaaccccgaagctattgatgaagcatatgaggcatacctcgccttactatcagaaatcaggagagatcaagcatga

SEQ ID NO: 162807 - DNA, 2208 bp, Enterobacter cloacae
atgagactttggattgcagaaaaaccctctgtggcgagcgacattgttaaggcgctgggcggcagtttcacccgtcatgatggctatgccgaatcatctaccgacatcgtgagctattgcgttggccacgtccttgaaatggttcccccggaggtgatcaacccggcctatgccacctggtcacttgatacccttcccctacagctgtaccccgttcggctacagcccaaagagagcgtggccaaacaagccagcacgcttattaagctgattaaaaggccggacataaaaaccgttgttcactgcggcgatccagacgacgaggggcaattgcttgtcgacgagctgcttgaatacgccggtaacactaagcccgttaaacgcgccctgattaacgataacaccgcgccagcagtaaaaaaggcgatcacatcgctcagagacaataaggagtttcgggggctgtatctaaaagccctgatgcgtagcgccggtgatgcgatttacggatacagtatgactcgttgcttctcgattaaaggccgtgaaaagggttacaggggcgttctttccgtgggtcgggtacaaacgccggtgctcggtattatcgtgcgccggtggcgtgatttcacagctcatgaatcggcatattactacacgctggcgggtaacttcctcagcggttcggacgtgatcagcgctcgctggttaacgtccgaatatgcgccggtggatgataaaaaacgcctcattgataaaaaatgggcggaagggctcgccaaaaatctggcgggtaaaccggccagtgtgctggccgctgccgtcgatacgggcaaagaaaaagccgccccgctgccgttcaatctggttcggttgcagcagtatatgaaccagaaaaataagctgacggcacagcaaacgctggatatcacccaggaattacgtgaaaagcataaagcgatcacgtacaaccgttccgactgctcctatctgtcagatgagcagcacagcgaagcgccgagagttatcgaggcgctaaaatcgctgaacgattttaccctgttggacactgatgctggccggaaaagtaaggcgtttgacagcaaaaaagttaccgcacacaccgcgattatcccgactgctaacgtaccggatttggcgaagctaaccgccaacgaaaaggcggtttatctggccattgccagattctaccttgcacagttcatgcagaaaaaaacctatgacgaggccatcgcagagattaaatgctgcgacgagtcattcagggtttccgcccgtaaaaccacgcacactggttttacggctctgctcggcgaagataaatcggacgacgaaccggacgatgataatacctctgcgttcgagctggtgagtcgtttacgcaccggtgaaacgctgacctgccgtgatatcgacgtgagcgagcaaaagactaagccactaccgctatttaccgaagccagcttactggcggcactggttcgcgttgccgattttgttgcagatccgcgaatcaaacagcttctaaaagataaggataaagataaaaaggacgaacacggcggtatcggtacaccggctacccgcgcggcgattatcgaaacgctgaaaaagcgaaattacatcaccgttgagaagggaaaattcatccctaccgaggcggggctggcgctaattgatgcgcttcccgcgtcggtcacgcaaccggatatgacagccgtttgggctgaaaaacaagccgctattgaaagcggtcagatgaccgttgagaagtttattgaagggctttacgcggaagtttcccgcctgatcgaaagtgctgaaatcaatataagcgcctcagaaaccccggcgcaaaaaacggcactggcgcggctttctgtaaattgtccgtcctgcaattctcagctcgtcatgacacctaaaacctgcgcctgtaccggctgtaaattcaaaatctggcttgagtttcgcggcaaaaagctcacccaaaagcaggttgaaacgattatcggcaagggaaaaagcggcgagattaaaggtttcaagagcaagaaaaccgactccacctattcgatgtttgtcaccctggcaaacaaggaaacaggtgaactcggtttcgaatatccaccccgcgatccgcttaaaggattaaacgtatctatgccaaaggaactaaaactatga

SEQ ID NO: 162808 - DNA, 390 bp, Enterobacter cloacae
atgaaccctattcagcaagcattgtcctcaaaacgcacccttaaaaaattcctgtcggagtgcgattttgttttccttaatacgcttaacgagcagatcacggccagcttgacggaaagaaaagcagagcatgaagcgcaggaacagcagcaaagagagcgtgaagcaaaacgcctcgaattgcttgaactgattaaggctgaaggtttttcaccggaagaattcgccagcatccaaacagccccaaaaggggctaaacgtaaacccaaatacaagtatatcgagggaggtattactaaatactggtctggtgttggccgcgtaccagtagttattcagcaggaacttgacgcgggtaaaaccctcgactcatttctcattcaatcttga

SEQ ID NO: 162809 - DNA, 462 bp, Enterobacter cloacae
atgtttaaaaatagaaaatctgaaaacttggccaaagtaattaaacagagtgaaggaggcattgaaaagagactcgatgaaaacagagaactgctggaactcatcattcgtgaaagtccaaatctgcttaaagacaacccccatatagtgcatcatttcaaatccactgagcagtacatccttaaggtttctggagcggcaaacatcgatattgatgttaaacgcatacgcccattccctgaactcgcctctccaaagacatttaatgttgttagggtcgttgctcaatctaccaaagataattcatctttaataaggcagcttgaagctgcaattcattatctacaaaaaggattttctaaaggagtagatcacgatgacgatatcggttttactttcgaaacgactatcgaagaaaattccatttttggcgatgaatgtgcagcaaccagattagaataa

SEQ ID NO: 162810 - DNA, 237 bp, Enterobacter cloacae
atgctcgcgggggtatactcccgcgatctaacggcgtgcggcattccgcgcgggctggacgcccttactgcatgtcgcatgggggtaatgtcatggctggacgccacgccaaaacccccgaaggtcaaaggcggcacaccgtcttgcgctacgcgcgaccaccccctaaaagacgcctgttttgacctttttcttcgccttgttcgttcctcacaaagcgaattaaaaggaaactag

SEQ ID NO: 162811 - DNA, 1998 bp, Enterobacter cloacae
atgttatttgaccgtttaagctattggctatcaccgatagttaatagtgcattgtggttttttgagtttttgcagacgcatcagctgattttagcgctgctgtctggtgtcatgctgccgtttatattcatgctcaaaaaagatgagcaccagaacgccccattctggaagaaacttattttcggcttttcaatgctgtgctttcttttcggcaccatcgcgccggttcctgtctggttcctgcaacgcatgtatgcggggcgggatgaagtcgccattccggttttaacatggagcgtattgctggcgttcacggcggcgggacttattgcgcatatccttttacggcgcttgctatccccggagctggataaagcaaaacgtagtctggtgaaaaagaccggcatggagcgtgacagtcgaacagacgtcagaagtgtgaaagagcttttgccgcaaacagttgattatgatccttcggattatatcgacctgagcaaaggtattttcattgggctgtctaaggatggccaacctcaatacatccccgtaaaagaatggcaatcacaacacgccgacattatcggcaccaccggtgctggtaaaggcgtggtgacgggtattctgctttatcaaagcatccttgccgatgaaggtgttttcattctcgatcctaaaaacgatgagtgggcaccccatttgtataaaaaagcctgtaaggatgcaggtaaacctttcgtcctgattgacctgaacaagcaggaataccagatgaaccttatcgacggtattaccgccgaccatctggaggaattattcgttgcaggtttcagcctggctgaaaaaggtgaagcagcagacttttaccgcatcgatgaccgcaaggcggcgagaacggcggcgcagttcgtcagccagaaccccggcgctacaatccgggatatctataacggggagtatgtgcagggtatcggtgaaacgataaaagcgtttcacggtaaaaccgaagaactggcgatgctgaacagcattaacgctcctggcggttttgctctaaaagagatttttgataaaggcggctgctgttacatcattggctcaatgcgtaactctaaaatcattaccgcacagcgtatgattttagtaaggcttttccagctagctgaattacgtgatcgcgttgcgggtaatgttcgccctatcgccatctttaaggacgaggtgaaatatcacctttctaaaccggcgcttgaaggtttaggagccgcacgtgataaaggcgttcacatcttaatggcgcatcagtccattgctgatttaagagactgccccgcagatttaaacggcgatgccgttgtgggtgcggtggtagaaaactgtaagtttaagctggtttataagttgcaagatccagacacagccgaatggctggccagaatgtcaggcactatcctggttgatgatgaaagccgtaaggtcacaacaacggcggtactcactgaaaaaatcgacgacgaacgaacgattcgccaggccgaaagttattacatcgacggtaatatgctgcaaaacctgccgaagttcgttagctacattttcagcgccaacacgcttgccttcccttccctgatcgctccgttgaaagtgaaaaagcaaccgctggaaatattcactattgcccctgaaatggcagcggcagcaccagacgttaaaccgttactggattttgatttcgaccaggaagaaaaaccgcaagccagcccggaaatagtcatgcccgtaaacagggtcattgaaaccgaagacctccctgtactggtgataccagagcaaaccatgcagatagtcgatccacattatgaaagctgggatgaagaacaggaagaacaagaagaacaggaagaacaagaagaacaggaagaacaggaagaacaggaagaaaaacctgagcagaaaaaagaggaagaaaaaacctcgttgctcgatttcaatttttaa

SEQ ID NO: 162812 - DNA, 747 bp, Enterobacter cloacae
atgcttttagccacgaacagcgagcgccgcgagcgcaaccatgaaaagatccgcatactgcttaattttttgaaggaagagacttacagcgactttcaaaccctcaatatgctgtttggttttaaacatcataaatcactttatgatttgctggataaagtcaccaaaatggggctgatacagaagcacacgcttgaatcacgcgccagcaaaatagcgctgtggggcatcactaacgatggtattgccgtagttctgacaccggacgataacgtgatgccgtcacgttttgagccatatcgcatcaccggctggtcacttgatcaccatcttgataaccagctcgttcgcctcaccctggagaaaaaaggcgcggttaactggattaacggtgatcgctcaacattccttaaccagttcaacgtaaaacaccgcccggacgggcttatttccctccctgacgggcgcgtgatagcggttgaaacagagcgccgcattaaaaccaaagcgcggtatcagtccattatggccagtcaccttgtcgctatcagtgataagcactggcgttacgttttttacgtcaccccggatgaacaaaaaaaacgcgccctgcatgtcatttttaacagtatcagcagtgtgatcgtcaaaaatcagcacgtcactctggaggctaaacaccgcgatgtttttcgcatctacaccacggaagaactcaaaacactggagttatcaaactatgcgtaa

SEQ ID NO: 162813 - DNA, 528 bp, Enterobacter cloacae
atgcgtaaaaccttacttattactctggccatcgctatggcctcgccactgttcgcagtggccgccccgtccatcgacgtgggattttccccggcaataagtcacagcgcgtcagaggttgttttaagcggtattaagagcgctcgccacagcatcgatgttgcggcgtacagcttcaccagtaagccggtggccacggcattgattgcggccaaaaggcgcggggttgctgtccgggtggttgccgaccaaaaggcaaacaacgacagatacaccgccgttacgttcctggctaatcagggtgtgccggtacgcctgaatagccagtacgccatcatgcacaataagtttatggtcattgatggtgatacggtgcaaacaggctcgtttaactacacggccagcgccgtaagccgtaacgccgaaaacgcgctcctggttcgtgggtcgccagaactggcgaaagcgtaccagggggagtttaaccgcctttggaatgagtctacggcacttactgaacggtattaa

SEQ ID NO: 162814 - DNA, 951 bp, Enterobacter cloacae
atgactatgacccagcacacccaaactagcgcccctaacaccgcaacggcgaccagcgtatccccgctggagcagtcaggctcctcaaaaacgaaattttctaaaggcaaaagccaggccaaaaccgatatttaccaggtagtgacggatagcattattgaagcgctggaagccggtgttaaaccgtgggtgtgtccgtgggtgcgtaatggtgcggcggctggtttaccggcgaatatggccaccggtacggcatacagtgggatcaatattatgttgttgtggtgtagcgcagcgaaacagggctttcaggactcccgctggctgacctacaaacaggcacaggaaatgggcgctcaggttcgtaagggagagcgcggaacgacagccattttttataagacgctggaaaaagaagccgaggacggcgagatcgaaaaaatcccaatgctgaaaagcttcaccgtgttcaacgtcgagcagatcgacgggctggccatcgatgctgcgccgcagccggtgacggaatttgacccactgccgcaggttgaagccctgctgacccgctcaggcgcgaaaattaccgagcgcggcgtaaaggcatactatcagccatcaacagatgaaattgtcctgcctgagcggttccgcttcgcagatgccgcgaatttttacgctaccggtttgcatgagctggttcactggacgggcgcgaaacatcgtttaaatcgtgagaagggcgggcgttttggttctgagaaatatgcttttgaggagttgatcgcagagctgggaagcgcgtttttaatggctgatttaggtgttactggagaggttcagcacgaaagctatgttgcttcatggctgaaagctttgaaaggagataagcgctacattttccaggcggcaagcgccgcatctaaagcgcatcgatatcttatggactgctga

SEQ ID NO: 162815 - DNA, 693 bp, Enterobacter cloacae
atggtctgtcatatgaccccccctgttgctctatttaaagggtgtgtgatgcaagatcttcacagtaaagactcagtaatcaatcattatgccgatcgttatcaatgttatatgccaattgatgtccgtaatggattaagaagcaatagtatagatgcgtcgaattcatctctcccatgggatgtaacattacctttagtcacgactgaagatgtttcacgtgataaagcgcttggggcgtttgtgggattggctgttggggacgccgtcggcaccactcttgagtttaagaaaagagacagtgaacatgtagcagatatgattggtggcgggccttttcaattaaaacctggtgaatggacagatgatacatccatggcattatgtctggcagagacttatctttcagaaaacagaatgcacaccgatgtgcttagaaaatatatcctgaaatggtatcttgacggagagaatagcagtaatggtcggtgcttcgatatcggcaatacgacgcggttcgcgcttgaacagtatatgcgtgtcggaccttcctggtatggtaatacagagaaacacactgctggtaatgctggggttattcgtcaagcaccggtgtctatcttttgtcgaaaatcactgcgtgcgatttacttcgaatcacaggctcagagtcgagcacgcatggcgcggtag

SEQ ID NO: 162816 - DNA, 225 bp, Enterobacter cloacae
atggaagcacgtagcatcgttacacagaaatttggtctgattgcacagcagaatggtttcgagctggagttgcaggttctgaaaagccagagcggcttctatatcggcacagctaccgaggaaggtttaccggtatcgagagagtcggtggaatatttctccgatcccaacacggcagcgctggcgcttacggaaaaccgttggacacagcgagttgatgcctga

SEQ ID NO: 162817 - DNA, 240 bp, Enterobacter cloacae
atgcctcgatactatgaaatagattcagcctggcgagcatccatccagcgcgagccgaacggcaggcagacagtacagacagaaacgtttgtccgggagctggcgaaaattaattttgactggagctatcggcaggctaaccagtggatagaaacgtatgtgactgtattccgggacgtatcccctaatgagggagaaaacaggacgttccagctgtataacccgaacggagggcgctga

SEQ ID NO: 162818 - DNA, 534 bp, Enterobacter cloacae
atgactatgacccatcacacccagactagcgcccctaacaccgcaccggcgaccagcgtatccccgctggagcagtcaggctcaacaaaaacgaaattttcagaatacaccgacgtaaatgctgcatcttatgtcattgccattgcagatatggcacgccgggaagcaaagaaaaatctaagagacgctaagtttctaatccagtggaaaacggcgcactgcggggatgtcgataatggcggtgaggttactgcggcatttaaagacgtgtttgcgatccgaacgaaagcaaattttgatacagcactgttggaaatccagattgctgccactgagttttatgaacgctggcatcgagatgcaagatgccgccatacaatccgcttatgcaagggatatgatttaatcgtaactcctgagcaggttgaatctacggaagcagcaaaggcctcaaaaaactacagctgtcgccaggctgcaaccgaattgctgaataaggccgggatagaaattccaaggtttgatgtactttag

SEQ ID NO: 162819 - DNA, 726 bp, Enterobacter cloacae
atgctcaaaggatatccgggttataatcttgtttatgatcctattaataggggagaagagaactctccactttacgcgcttcagttggttcttttcagtatagcttatgtcaattttaattggtcaaagcaacgtaggttatttaatatagccttaatgcttgttgctactttctttagtgtaatttatcttggttcgagagcagcattttttctaatagtgattttcttcactctgaaaataataaccaagaaaaataacttattattcctctttgtattgcttattattacagctccaatattaatcagtttcactagcgatctgaatataactaattcatttaactttggcggattttctgaacgaggtcttgatagcccaagattcagtatgtttatttacggcatatcaaatttcttggattatccttttggcggattaaaagtacatgctgagggctatacaggtatttggttccataatatgctcttagatttagttagagtatctggcttttacgtaatgtttttatggctaacgatcctcgtgctaaccacttatcttttaatgaaacttaaaaataagcaatacatcatacttttcatcataataaatattgcttttatgcaagatttggcattcgatggattctttaatttgatggcgctggaattctatttaatcggagcatccttgtttaaggagcgaaatctgaatgtttaa

SEQ ID NO: 162820 - DNA, 234 bp, Enterobacter cloacae
atgtccgtgcgtagcttgtaccgcatgtttgccgggaaagggctggtggtagcgcagtatattaagaaccgtcgcctcgatttatgcgctcaggcgctgcgttccatcagcgatgacgaaaagctggcggggattggctacagctggggtttcaccgaccatagccatttttccaccgcctttaagcagcgtttcggggtttcgccgggcgaataccgcaggcgttatcgctag

SEQ ID NO: 162821 - DNA, 471 bp, Enterobacter cloacae
  misc_feature (457)..(466): n is a, c, g, or t
atgtttgtaattaataaattaatttggcttggatatactgtatcttctggagcagcaagggttataatcttctttttattgactcttgtgtttgtccaaaaagacattgcgctctttgctgtttattattcattcttaactgttgcagtgatattcctcggtcagggacttggtacaacgctcattaaagatggctctgaagtgagcatgaaatactttaattacgttttactccttagtattgcagcagcctcggttattaccttagcactggcgactccaacactagacttaaatttaattgacaccttaatattcgctggctctcttgcatgcctggctatcaaccaaatctatcgttattattatatttattataaaaaggcactacctggcttaatttatgatttgctagcgctggttctttttgcggcaggaatgctgctgtgcaaactgnnnnnnnnnnagtga

SEQ ID NO: 162822 - DNA, 1878 bp, Enterobacter cloacae
atgaccagtcgcattggtagccctgatacacaggcagatattgatgttcgtacttgtctggatagctcgccaccacgttcatttgtcatggtggctggtgctggttcaggtaaaacaacatctctcattaaagccctagcacatttggctgatacccgtggttctgctttacgtcgtgccgggcaaaaaatatcctgtataacgtatacagaagtagctgttggtgagattgccgctgacgttggtaactcacagttatttcatatttcaaccattcatagctttctttggtcggtcatccgcccttttcatttagatatcgcaaagtgggtcgtagcgcgaatacatgaaaaaatagctgaaaagcaagcccattatgataagcccagaacacaagctaaaacaaaatctcgtcttgaagatgaaattgcctatctctctgctcaacttgagtgcattgatgatgttgataaatttatctacgggacaggaagtaactatgcgaagggtattttagggcacgatgatattcttaaactcgtccctgcttgtgttgaggctcatccacttttgagaaggattgtagccaagcgctttccatttgtttttgtcgatgaaagtcaggataccgatcctgatgtgatctctgcgcttcgaactattgccaatgacaatcctgacatgtgcataggattttttggtgatccgatgcagaaaatctatatgagcggagctggtgctattccgttaagtgatgggtgggctgaaattacaaaaccagagaatttcagatgtccgacgtctgtacttggtgttatcaattcgattcgtgcttctggggatggcctccaacaaattcgtggacgaacaactatcgtagatggtgttgaacagactgtatcaggcacagtgaatcttttcatcttgccttcaaatgtggaacgaagtgcctatctcacatctgtcagacgttaccttgcaaatgaaactagcgatgaacaatggctaagtgatacacgcgaaggtgatgttcgtctgcttgttttggtacatcgcatggcagctaatcgactgggattccctaatttattttctgctcttactgataaggcaccgatgagcttgagtgaaggggtgaacgatgggtcagcttggccgcttcgcccatttgtccagcatattcttccaatttttgaggcggctcaggcaaacgatcaatttcagattatgtcgattatgcgtaacgagtgcccaaagctggagccatcacgactgcatggtcaagctatggtggcagttttaaatgaactacaacgagacatcaatggtctgctcgcactgttagaagaaggatcgcaagcaacagttcgggatatattactacacgttagagactgtgaactgctacgtcttgatgatcgttttgataatcatttacgtgatgaacctgtgaatgatggtaatgatgattttgaaaatgttcagaactatctaagatgtgatgcccatgaactttgggcgtaccgacgctacctttcagaggaatcaccttttgccactcaccatggtgtaaaaggtgcacagttcgagcgtgtattggttgttattgatgatgaagaggctcgcttcagccaatattcgtatgggaaatattttcagtacattcccctgtccgacaatgatctagccaatcttgaagagggtaaagagtcagtactcgaccgcactcgtcgccttttttatgtatgttgctctcgtgcactgaaagacttggctgttgtcatctttgttcccgatgttgccgtagctcaatcggcaatcgttgggcaaaatttattcccagcgtcggtaattttaggagcgcacgatctggattag

SEQ ID NO: 162823 - DNA, 318 bp, Enterobacter cloacae
gtgctgggggcggcgcgcgtctggctgttcccgcatgcggatggcgctatcgacaacacgctgatgtgggtgattgcgatggcggtggccgggtgcctgtttgtgatcccaaccgcggcggagatcccgattattcagaccatgatgatggctggtatggggaccgcaccggcgctggcgctgctcatcacgctgccggcggtgagcctgccgtcgcttatcatgctgcgtaagtcattcccggcgaaagcgctgtggctgactgcggggctggtggcgttgagcggagtgattgtggggagtatggcgcttgtgtga

SEQ ID NO: 162824 - DNA, 291 bp, Enterobacter cloacae; identical to SEQ ID NO: 156237

SEQ ID NO: 162825 - DNA, 1317 bp, Enterobacter cloacae
atgctttataacactggcaccatcgccattaacggaaacaccgcaaccggcaccggcacgaactggacggcaccgggcagccagattcggattggccagacgttgtttgttctttctaacccggtacagatgtttcagatcacggccatcaacagtgcgacgtcactgacgattacacccgccgcgtctccggcgttgagcggccagaagtacggcattctggttactgatagtctctcggtcgacggcctggcgcagagcatgtctcagctcatcaaagagtatgacgagaacatcggcgcgtgggagacgttcgccaccacctcagcaaaccagaacatcaccgttaccatcaacggcaccgccgtaaccatcccaggcatcggtaaactggctcagaaaggcagcaatggggcggttggagtttctgacggcgggaccggagcaacgaatgccgctgacgctcgcacaaacctcggtttgggaaacagcgctacacgagacgttgaaagtcagttttccccaggttccgcgtatctgaacggagctgctgtcatgacccaggttcatcgggattaccgcagtctcgcctcttatgactctatagcccaatatcctctcggcatgaccttcgggattcagtccggtggtaatgcgtggggaggaggaagcggagtagatacatacacgggtatgctaacgctacgtgggtggcatgatccgtcaggtggtggctatgtgtcgtggcagcttgcgtcaacctctcagggactgaagtatcgtcagggcaacggtacaattcagggcaatactaacgtcgggttctcaacgacgcacaccctttattcgacgcagaacgccacgaaagccagtgatggaacgcttaaagttgcatcaccggtgatcaaagtattttcagatggaacataccagactaacgatgaatctgagggctgcactgtaacgcgtctggccacaggccaatatctggttgaaggttgccaggggctgaactcagacgcagcatggggcggcatcgatggtggttttgacatcccaaccgatcgcaacaggcagccgcttatctggctggattatgaggttaacgcggatggctcggtgctggtaaaaacctatcaccgcacacaccctgatgcgccagcattttccaggaacgaaatagacggcgtaagtgatggtgatcctgtcgacattcccggcgatcagtttgtgtccgtccgtgtggaaatgccgcagagcagcatctggaatcagcgtgccgctattcctgaggctcctgattcatccgccggttaa

SEQ ID NO: 162826 - DNA, 867 bp, Enterobacter cloacae
gtgagtaagcagaattccgaaaccactacactttaccgtcaggtaaaaaatccgaatccagttttcattcctgaaaagggaaagaaaacccttccgttctgtgaaaaaattcgcgagaaagctgttggcttcactgagcgtgcagagttccaggcactggttgctatgctgatcgcccgtggtgagcgcaaaaagcgcccgccagtgttacgcatacgggcactggaagcatccgtacaggcaatgtgtcactattttaatccccttgctaatcgcgttggttcatcgctcactaccatgagcattcgctgcggactggccacagaaaaaaaacgtctgtcgatcacccgtctgacgggtgccctgaagtttctcgctcagctgaacctcattacctataacaccgaatacgataaagaaattggctgtaatatccccacagacatcactttcacaccgttgatgtggcaggtgcttggggtgtctgaagaagccgttgctgctgcgcgccgcagccgtattgagtgggaaaataagcagcgtgagaagaaagggcttcctcgcgccggtgctgatgaacttatcagtgcggcctggtcattcgttcgtgaacgcttccgtcagtaccacaagtcacgctatgaacacggcatgaaacgtcacagggcgcgtaaggacgctccgcgaacgcgcaaagagatcgagctgctggttcgccagcaaatccaaaaagaaatcaggaaaggccgcttcttcggtaatcttgatgcggttcgggcagagatagaacgccgtgtctcggagcgaatgaagctttcgcgtggccattacgcacgacttggtgatgcattgctggtcacaacctaa

SEQ ID NO: 162827 - DNA, 786 bp, Enterobacter cloacae
atgaaaattagccccgacgatagtttcgatccggatagttttagtgagccggtaatcggaattgcgtccgatttaggtgtacacgattcaggacaacacagtcaccttcgtcatcagctgctcttttcagcgtcggggagcatcacaattgaacttgaacaaaccctgtgccagcttcccccccgccgagcagcctggatccctgcaggaacaattcatcgcgccatgatgcgtggtgtgctggcctatcgttccctctacttttcaaccacgcttccgttatctctactgccactgcaaatagtcgaggttaatcccctgttttttgaagtcatagaacgaatggcattctggccatggggaatgctggcagagcaacaggccagtctcattaacgttttctgtgaagaaatacagactgcacgcacagaaaactggacattacagctcccctcagacgctcgcctgaacttatggctggatggagtacgtacgggcgaattacccccacgccttggccagttgtcccaacagattggtgcatctgagcgcacgataagccgggtctttatcagagataccggaatgaattatcagaactggcggcagcagtggaggctgctaaaggcaatggaaatgctgtgtgacggatggcagttaagctatgtggcgcaacagctggaatttgtcagcgacagtgcattcatcacgttttttcgacagcatacaggtacgactccagcacgttattcacttaagaatattgctgaaaaaagtccccgctga

SEQ ID NO: 162828 - DNA, 1128 bp, Enterobacter cloacae
atgaatagtattattcgccctcccctgtggctgctgacgctgcttattatgtttccacaactggtagaaactatatacagccctgcgttgccagatatcgccagatcttttcaggtaagcagcgagcgtgctgctcagacgctttcagtctattttttctcctttgctgccggagtggcattgtggggctggctgagtgactggttcggacgacgtccggccatcatggctggactcatctgttacggagcgggatctgtaatggcaattgtgtccaccgattttagcgtattactgctggcccgtatggtggcagccacgggtgctgccgccgggtctgttgtagtgcagaccatgctgagggacagttatgaatcaacctcactggcccgcgtcttttccgtcatgggagcggcgcttgcactgagtccggttttcggtctggtaagtggaggctggctggtaagtctgtacggccataccggcgtatttattgctctggcatcactggcgataatattgctaatactggcagcagttttactgccggaaacgcggccagagaacacgctcagaatccgggggagcggtctggcgtcccgcatgatccgggacggtatgctctggaaaaatgcaatactcgtagccctgctgaatacaatgttgttcagttattacagcctggctccgtttcttttcaggctgctggggtggagctccagggcattcggatggacggggatattactggcacttgcttcactctcgggcagcctcctgaaccggagactgttaacaaccggtataacaccggaacagctggtacgtcatgcatgtacactggctctgctttccggtgttgctgcctggtggttgcagcactcggcgtggatacttataccggtagccggaactgtaattgcctatggcatagcgatacccaacgtgttgagccaggcgctgcaccgttatcgcgaacagaccggagctgcgggagcattattcggcttgagctattacttattactgggaatgatgctggggctcgccggcatggtgcagcaactgggactggttctgacaatctgtgctgctatgtctcttttgtgcagtgtgtcacgtgggtga

SEQ ID NO: 162829 - DNA, 570 bp, Enterobacter cloacae
atgtattctgaaaaccaaagaattattattaccggcggaccggggtcaggtaaaagcacgctgctgaattccctgcgcgcaaaaggttatccgacggcagctgaggccggacgcgcaatcatacggaaccaggtggcgatcggcggaaatgcgctgccctggaaggacagggaagctttcgccgggctgatgctgaactgggagttacgctcgtggcatgaagctgctcaaagcgaaacgccatttttctttgaccgtgggctgccggatatagttggctatcttacgctctgtaatctgccggtgccgccccatatgaagagagcgactgaactgttccggtatgctcataccgtgttcatcgcgccgccatgggaagacatctacgtacaggatacggagcgtaagcagtcattcggggaagcggttcagacgtaccatgcaatggctgaggcctacggcagatgcggctataacctcatcaggttaccgctttgcgggccggaagagcgggctgaaattattttatccagcctgtacgacaggcatcaccacggcgagccctcctga

SEQ ID NO: 162830 - DNA, 396 bp, Enterobacter cloacae
atgatgaaaaatattttagctgcattaactgttttcatatcgttttcggcaatggctgagaaaaggaatatacacaatgagtgctcctttagagccgctacgctttcggatatggtggcgctgtataaagagaggcaatgcagcaaaaatcaggctaagcagttcatccatgaggtggcgaccggtgaaactcaaactctcaacagctgtatcccaaaaagcagatacaaaaacccagacttcattgatggcaataactttgaaaagtggtctgattctttaattgagaaaatatggtccaatacaatgaaaggccctgacaactacggtacttttatggatgcgtgcatgaaaaatcctgacaagtatatcggcggtcagtggctctacaaatga

SEQ ID NO: 162831 - DNA, 633 bp, Enterobacter cloacae
atgattatttccagcctgatagcgattgccaccgttctgacaatgggggttatcagcccgggtcccagttttatctatgtcgcgcggaatgcggtcgtccactcccgacgccacgggcttgtgaccgctctcggtaccggcgtgggcgctgccattttttcgctggccgccatgctcggcctgcagaagctgctgctcatggttccggagctgttcatggtgctgaaagttgcgggcggggcctatctgttatggcttgctgttaaaatgttcagggacgcaacccggcctctgtatctggcgcttgacggcgataaaaatgacggcaggacgctgatgatgacgttccgggatggcttactgacgcagctcagtaaccctaaaacagcaatcatttttgcatcgatcttcagcgccctgctgcctgaaaatatcccggcccttttttatgtcgcgatcccgctgatgagtttcctgattgattttggctggtacgcgatcgtttcgctctgcctgtcctccgaaagaccgcgcagggcttatcttcgtctgaaaacctcagtcgatcgggcatcatccgcggttctggcagcactgggtatgcggctgatttattcctcctttgttaaataa

SEQ ID NO: 162832 - DNA, 1548 bp, Enterobacter cloacae
atgaaattacgaaaaagggcgctggctgccggaattatcgtacccgcaatcctggctacactgctgtcgtcagggatggcctggcgccagctgagcagggacacgtccgtgacggcagacatactgatgagccaggtcgaccacatcacgtccattgcccgccatgcaagcctggtaaccgccaggctcgccactcagccctgtgaaagcgtcctgcagcagatgacggagaacggcgccctcacgccctacatccgcagcaccgggcttatacgggatggtaaagtaatctgctcctccgtgaccggagccagacagcaaagtgccgatgagatttttggtgttgccgtttcagtacccacagggaagataaacgttatcgccacggaggggaccagcagcgtgcccgggcacgtggctgttatctacgcttatggcgccggcaaccggacgacggcattcagcgtggtggatgcccgatacgttacggacctgatggactccctggatgatgagaatcattcggttcagcagctcaggttcagtgatggccccgtcatttccgggcaggagaaaatctccccacgtgtgaaagtgttcacagctgagttccactctgccgcgagtcaggcgcagcttcaggttcttacaccgacgctgtcgcttcgccattacatcctgcgtaatctgcttttcctcggtcccctgtccctgctactgaccctggccatgctgtacatgtggcatcgctgggattctagaaagatgtctctggcggaagaaatcaggaaagggatggcagacggcgaattcagcgtgcattaccagccggtctgtgacaccgcgactggtgcctgctccggcgccgaagccctgatgcgctggcagcgtactgacggtagaagcatttcaccggtggtgtttatccgggccgctgaagaggaaggtctgattgtcagcctgacgcagcatctcttcagcctgatagaagacgatgtcagggcatggcaggtgactgaccccttccatctgggcgtgaatatcgcagcccctcacctgacggaccggtcgtttaccgctgacgtactgagactgtgggtttctctcgatcccgcttttcgactggtgctggaaattaccgagcgcagcctggttgaggacactgaagcggcatcagcgaaacttcatgagctacgccagaaaggctgtcaggtggccgtggatgattttggtacgggctactgctcgctgagcctgcttcagagcctgccggtggattacctgaaaattgacaaaatattcatcgacagcctgacgtcggccggtgcggacacgccggtactggacaccattttgggcctcagcagacggctggggctgaccaccattgccgagggcgtaatggccgcacatcaggctgaatggctgataaaaaatcaggtaccttacgttcagggttattattatgccagacccatgccggctgccgcgttttatcagtggtaccgggagcagggcgtgagactgaaagacgacgttattgcgtaa

SEQ ID NO: 162833 - DNA, 804 bp, Enterobacter cloacae
gtggcactcaaaatgaccattctggtcgaaaaccatctgtcgcctcacgcggctgcaggaatgcagtcccgtgcaggcctctccatcctcctggacgacggagagagccggatactgtttgactccggcccggatgaaaccgttgctcacaacgccaggctaatcaacgagccgctgacagatctgaacgcggttgtattatcacacgggcattacgatcacagcggcggaataacgtctcttgacccagggacgaggattatctgtcatcccggagtattacgggaaaggtatgccgctgtcaggctgccgggaaaggtcattcctcttaagaaactttcggtcgtggagcgtttttgcggtcttgacgtggagtacagcaaaaccccgcgcgtcgtggcgggacgttttgtctggagtggtgaaatccccgtggaaagcccggagccctggggttataccgattacaggaacgccacgcctgattatgtgtctgacgaaggcgcacttatctggcgctcgtcccgcgggctggtcattatgaccgggtgtggccaccgtgggctggagaacaccgttcgccactgcgtgaacattacgggagaaaaccgcgtctacgcccttatcgggggatttcatctgcgggcagcgtcaccgctcaggctgataaggctgaaagcatttttgcgtgagctcgcacctgagcatgttctgggctgccactgcaccggaagatggggaaaactgtggctcaggaatacgcatcctgtagcgtgcggagataccgttatttttgaagagtaa

SEQ ID NO: 162834 - DNA, 486 bp, Enterobacter cloacae
atgaccgtcgcagagaaagtgaaagcccttcgcctgaagaaggcctggtctcaggagcagctggcagaagtcgcctcgctttctgtcagaacggttcagcgcactgaaaaagggcagaaacctggtcttgaaacgttgagtgcgcttgcctctgcctttgacgtcagcgtatctgagctctcggaagaggacggggatgccgtcaacgcgctggatgaacgtatcagtgatgccagagcccaggttgcccgggaaatgacgttctggcggatactcgcaacggctcttctgacatgtaccgcaatgatggttatcaactatctgctgactccggaaagctactggtccctcgttgtgaccgccatatggggcagccttgttatgttcagggggctgagggtgtttgttattcacgatcggcttaagtcatggcaacagcgcaggttgaataatctcctccgtccgggcacaaaaaaaggaaaataa

SEQ ID NO: 162835 - DNA, 507 bp, Enterobacter cloacae
atgaacctgtctgaatttttcagtcatgtaccgatctgggtctggctcctgctggcttttttacttcgtcgtggttttaccgccctttatgacagggaaatgaaaaccggacggctttttttgctcccggtagtgtttcttgtctggggaggctacggaattatgactgaaacagaaagggcaggggtaagtctcaccatgatgatcgcaggattactcgcgggaggagcactcggctactggatgtggggatcacaacctcccctgcaggattcaggcaacccgggcagggttatcagggccgggacgccgctgacgctgggaatgattgttattactttttgtacaaaattcattcttacttcagccatcttcctgcagcccggtcttgcggcgtcagcgagtttttgcatgctgatgggtgggctcaccggactgtttgatggtgtattctggggaggcacgttaaggatttttctcccgtggtacaataaaagacttgtctga

SEQ ID NO: 162836 - DNA, 870 bp, Enterobacter cloacae
atgcgaaaaaaccctcccctgaaagccctcaaatcttttgaagctgccgccaggcacctcagctttacccgggccgcgaaagagctgttcgttaccccagccgccgtcagccagcaaataagaattcttgaggagcgtctgggtatcacgcttttcagacgacagtcccgcagcctggagctcacagaggaagccgcgatcctctatgacggactgcacgaagcgttccggactatagaaaatatttatcatcagtttgaaggcggggaatataaggaagtcctgacgctgggctgtgtaggcacgtttgcccttggctggcttgaggccaggctggggcgtttccagacgcttcacccccatgtggatgtccgtctgcgtattaacaataatatcgtcaatattgctgcagaggggctcgatctggctatcaggtttggtaccgggatatggccctcaaccaataatgaaaaaatattcgacgcgccgtttggcgtgctgtgcgacccagaaatggccggacggcttcgtgcaccccgggatttgctgaacgaaaggctgcttcgttcttaccggatgaatgaatgggaagactggtttcgtgaggccggggaggacgtcgccggcatcagcggtacggtctatgactcgtcaggactgatgatccagaccgtcatacataccggcggcgcggcgctggttcccctgaatatgtttacacgggagctcacatccgggcaggttgtgcagcccttcgaaacggttgtcaatgccggcagctactggctgacatattcaaaatccagaatcatacgccccgtagtcagaaccttcagggcctggcttctcaacgaagctcatagtgattaa

SEQ ID NO: 162837 - DNA, 858 bp, Enterobacter cloacae; identical to SEQ ID NO: 21685

SEQ ID NO: 162838 - DNA, 498 bp, Enterobacter cloacae
atgtttcggacactgtacataattagtttgctcatcgtgacttatccggtaagtgcggatattaacggcaggattgttcgtgtgctcgacggggataccgttgagattcttggtgaggggaaccagctgaagcgtgttcgtcttgccggtatcgatgcgcctgaaaagaaccaaccctttggccagcgttccagacaggaactctcatcgatggtgacacagcgcatcgttaccgtcactggcgaggatgaggatcgttacggccggctgcttggcacggtgtggcttggcgcgaaggatgtgaatgccgaacagatccgtaagggactggcctgggcatatcggtatcacggaaaacctgtccggagcgactacgcaacactggaagacgaagcccgtcgtcaggctacaggtctctggtcagtccctggacagacagaaccctggcgctggcgaagcaagcatcacgagagaggttcaattagcgacgccccctga

SEQ ID NO: 162839 - DNA, 2022 bp, Enterobacter cloacae
atggatttagttttagataatcatactaaaagctatgcagtacaaaattaccggcaagacatagacggtctccgcgctgccgctgtcctgcttgttatattattccatgcaggattatcgtacttcccttcgggctttattggtgttgatatatttttcaccatatcaggattcctgattaccggaaaagtcatcagtgaaattgaaagaggaacattctcactaactaattttataaaaggcagattatggcgattgcagcctgcactgctggtgacaattctcggcgccatcattgtagcgacatactgctacattcctgacgattacaccgcattcgcaaaaagtgccaaatacaccactcttttcttatcaaaccagtattttgataagcttagtgcagcatacgcatctcctgactctgattacttcctgcttttgcatacatggtctttagcaattgaatggcagtggtattttttctttgcgcttttcgcgaccattttgacactgcttgtcagtaaatttaaaagaaaatttgcgtataaaccgttcctttatggctggttgttacttaccttaactgcaacaataattgttattcttatcagcctgtactcgtccagtcagcattactactcattaaatatgcgcgcttttgagtttctgattggtggaagcgtagctttattaaaggacagaattcagataaccaacagatggataactaatcctctggcagtagtagctatcgctgtacttatctgtacttcaggtttaagcataccagttgaggcatatccaaatagctggacactgcttgtttgccttgcctcagcaatattactgataaaccagaacacattcgtaaatcgaactttacaattagcaccgataaactacacaggtaaaatttcttattctctgtacctctggcactggcccatatttgcagcgttcaattatcttgagatcactctgtccggcaagacactgtgcattgcgctggtgataactgcaggactggcagtgcttacctatcacggtattgaagagcgcttccgccgggttaagctgtcatttgcaaagagtatgatcctgcttgtattgctcccccttacggtctgcacgggcctttacacattaaccgtgaaaacgaatggtttgccacagcgcttcagcgatgaatacaatcactcgttacagctgttgaattccgcttccgagaatgccgcatcgagggatggctgccttagtggaagccaggaccttacggactgtcagttcggcgaccatgaaggttcgaagaaagcctttctgattggcgattcaaatgctaaccatttctggggtttttatgatgtcttggctaagaatgctggcataaaaatgtactccctcaccacgtcttcgtgcctggcattaccgggaatttatcagtatgactggtggaaatataaaggcgtcaaatatgaagaatgtcatgataacgctgagaaatattatgataatataaaatcaaatcactatgactatgttattttagggcatgtgtggtcaaattatttttctgcccagttaatcactaaagatgaggatgagcgaagtgaggcactctcagccagtcgatacgaaatggcgttacgtacagccatacgtactatcatagattctggttcaaagccaataatcatgttcaccattgcgaacatgccacgcaactatcaaaactgtataaatcagcatgttattcatcgacgcccatttgacatcaatgaatgtgatatgcaaaacccggcaaataccaacggggaaaaagtcacgcaactgatgagtaaaatgaaggctgagttcccaacgctgacctttattgatcctaaatcaatacagtgcattagtggtaaatgcattacaaatattgatggcgtaactgtctatcgtgacgtgggacatcttaccgactatgcttcctataaattcggtcagctgtacctaaatgaatttggtaatccattaaagtga

SEQ ID NO: 162840 - DNA, 654 bp, Enterobacter cloacae
atgagcacaggcaacgtcaatctcatcgtcacctgcacgcgccgcaaaaccataacagccggtcaaaccgtctttccatatgaacacgacgccggaaatgcttatgaagtctggctggaaaggctggccagggcgcggaacgacggcgctgccataacagcaggtgaactgtatacgggccagcactggagcagggctgctgcggctgcaaaacgtaccggcgcagagctgtgggtgatttcagcgggtctggggctgctgcacgtatcagacccggtggtcccttatgaggcaacgttctcctcgatgccgtttagtcacagcagactatgggaaagcctgacagcttgcccgcctgctgaacgacggtatgcttccctgaggacgctgatgcagtcgaggcctgacgatcggtttgtggtggccgcctctccggtgtacctgcgtgccgtcgattcagatctgtatgcaggaagggaggcgctctgtaccccggaacagcttgttgtggtgacgtcaaaaggttaccagggaatcctgaagggcagcgtcatttataccagtgcagacatgataaatgcgctcaacacgaatatgactggcctcaatatcagctatgccactcagttacttgttaacgacgtatgtaaataa

SEQ ID NO: 162841 - DNA, 1221 bp, Enterobacter cloacae
atggccgctgagaaacaccgccgcccatcgccgctacagcggcgggtgctgattgtgctggccgccctcggtgcgaaacgtccgggaccggtggccacgcgggatattgagcgggtgctggagcagggcggggacgccccggtgtacgggccgaatctccgcgcctcctgccggcgcatggaagctgcgggctggctgcgcaccctgcgagccccgaacctgcagctggccgtcgagctgacggacgccggccgtgcgctggccgccccgcttctcgctgacgaacaggcgcgcgtcctggcggagcagcgcgcgacaacggtccgggttctgcccctgatcccgcccggccaggcagacgaggctcacgaccggccggtggagctggacggcatctggcacctggcgtgccggggcgactacgtcatccgcctcgacgggaccacctgtctccagctgtggaacacggccgggcaggtgacgcgtatgacgggcgatccccttcaggtggcgcagtggctccaggcctgccacggggcgggtattgcggtccggatgcagatcaatgagagcaccacgccggaggcgggcacgctgatcggtaccgagccggaagacctgaccggcacctggtaccgccagctggacgtcgcgcttcaggcacaggggatcaccggtctgactgaggatattcgccttgccgtggtgagccctgaggaagccctccggtcgctgccggcaccggcgcggctgctgcacgttctgcgcgaaagcccggaggcgttcccgctcacggctgccgggtatgaagaagattccggcgccgctctggacaccctgctggccagggccggattcacgtcgggacaggcacaggagctgcggctgcaccgcatccgctgggctcagatgagtcaggaagacgctgaccggcgcgaactgaacagcctgctggatgagctggaacggcgacagctgtactgcaaccgcgaacaactgacggagattgtgttttcgccggtccgtaaacccggcgagcgctggactgaccgtctgcagtggctcctgatgacggacggattcgggttccggagtccgctctcccgtgacgcaggctccagggcgctgacgatcctggccggttacacggggcaggaggtggcggaccatctggccacggttatcgtctggaacgatgacagcgcggggatgccgtcatga

SEQ ID NO: 162842 - DNA, 285 bp, Enterobacter cloacae
atgtccagtaccgggccgacactgaatctcacctatgacgaattgcttgacgaaatcaaaagcatccttcgcgtgctcagccggcacagcagttcttcccgggatgactcttccaccacggctgcctttgacagggggagttgcagcggcgccattgcgctctggtattcactggcattatcaatgagggcgccggggcgcgactgtgaggaggatcgcagacagcttcggcttctggccggactgatcctcgaaaaccaggagccgcctgccgatggccgctga

SEQ ID NO: 162843 - DNA, 3120 bp, Enterobacter cloacae
atgtttggaaaacttctaaaaagtctctcatggcaggtgagagctgaactccgacggagcctgaagtcgaaccgggattacaaaaaactacgctggaacccggtggagagaatacttgtttcctgctccacccattacgtccgggctatgctaattctatggtccgcagccttcggggctgttggcgtggtcgaatattttcgccctgtattgcaacctttcgctgtgcagcattttaagggcattaccaagctttcagactggatgtctaatttactgggtagccagttgactataatcggtattgtttttccgctggttgtggggcttataagtgttttgtttcaaaagaaatcagcaaggatccatattcagtccgcgtatcaacttcattccggatatatgtttgcgggcctgagtggtcttttactggctgcatttatcgtgttgggcggtatgacgttatctataggtgacggatatcttaatacttctttcgccgtaacagcttttgtgtggatgcttttcaatattactctgtctatctggttcttcgtctcgagtctgaatgtcctggatgagagcaagcgcgatcgactaatgaataagttttttttgtctcagatagtggatgactatattcaaaaagcatatattcttgcttggctccgatatccgggggtaaatataggtgaggattacctcggtaatattaaaatactgccttactcaatctcagagaaagacgacatgcttcatgtcaaatctaatatcagtaaaggtgatgttgttatagatatttatataaggccacttttatttctgctaagaaggctagaggcggtagatgggcaggatgcggaaattatcattttgccctcctttggtgttcgttctggtgaactaactttattgtcatcgagaaatgtcaagcctgtttcaggattgtggcggtggttatttagccgttgtattgtaacagggcgccctaagaacaaaagggatctggatgatattacttttgatttctttggtgaggcttacgatgcgcttaacgataaaaatattagcgtcttcagaacagggattgaacgattaacagatacctatacctctatcaaaagaagttataactacggggttgataaaaattatctggatgaagtaaaagaatcaggttttagccatactttcagcgattcattccattatgaattgagaaagttttttcgtgaatccgtaaaatcaacggaatattcaggcgaatatttccgtgaatcgatggccattccattgcatgtgtacagaaaaacacagagcactcattttaccgatttcagacaatttttactctcgcttttcagagtatggcatgtgttaaacgagtggaaagcaggacagggtgtcaccctctcggccagccaggagcaaactcatcaagaacttgtacgccattttattggcctgtgggagggctggagtatgagctcgatcattggcaaaccagggagcgaagattctactgggcgcctgatgtatcatctgcataacaccgccaggctgcttattccgtcagtggttgcagataatgcttcttccgtacgatatgctcacgacgttctctgtctctggtttaaccagagccggtttccacggcactgggaggaagagtaccactggcacagtttcttcctgactccggattatctgtctctggatgaaacagactcgcagtgggcaatgttactcagggggcgtccatataaaaaagatgcggccttatccattatgtttgcaaatgccttgtctgatttacgcctgttaatggcaggttatctcattgcgcattttgaaccccaagaaaagatagatttagctgatcttgttaaccatatcattacgtctgaattatatgaagaaagagacactcatgatacgctgacacctgcgttcagacgttctgtcgatatcattgatatgatactgagaattgagcactgtaatcttcatgcgaatacaaactggtacagcgggctatcagaaaccattgaggttatgaactcatataatgaaaggccttacattccggggcgtacgtatacaggagtacatgaggatttagggagcctctacggagcattttccttgctggctataaagctcgccagacctgctgagcaggttacgcagcgtgctaatgacgcccttgcgggagggttgttttcctatttcagtaaagtgagaataatttctgttcttgaacggctgaaacgtgatccttcagtcccttatgaaggctatatcatttcagacgcggattatgcaacgaacgtggttttctttaatgacgttctggataaatacattgaggtcttcagtcgcagcaaagtggcagatatcgttgctgccgaagtagatcttgaacgtctcaggaataccgacactcgtctgacaaaagaacttcctggggtattgtctgaagatactctgcttaactacttcactttttctcaaaattcagaatgcgatcgcaactggctggtgagatacattcctgtgagtgttcccaaagattatgttgccagagaacttaatagtaatttctacggagattttccgtctgtatcagatgttaggacaaatatttaccacagactgcataatttactgtggcaatcacaggctaaattaacgatgaaggtcaaaaacctcgaaacactgttaatgaaagtcgcgcaacggtccgccgatcagcagtattacatactggtgagctatggttcccgctttagcgaagaactgagggaactggtttatcagccggaaaggcatgacgcgtttagcatacaggttgatgtttcagccagaggtagccgcactctgcccttcaggatcaataactgtcttatttaccttgtcctcaattccgaacaggaattttcggttatggtcagcgcggaatccttcggtgaactcaggctgttcaggtacccggatggaaccctttttaacaccttctacagcagtagtgacaatccacttgaaggcgtgatgacaacgctctgggaaatggagatggaaatcactggtccactggtggcccggtttgaacatcgctga

SEQ ID NO: 162844 - DNA, 666 bp, Enterobacter cloacae
atggctgactggtttatcgcgaccgaaggcgtgaaggtggtgaaggacagcgccagcctgtggccgcagatcattacggcggtttcatctgcaggtgctgcattcggtggtgtgtggtacgggcagcggctgataacccagcgggagaaggaagcagcagcgacaaagcgagaatctgagctttattttatttccactcagctggtatttcgcctcgaacgatttgcccagggatgcgcggaggtggttaatgatgaagggtttgaagatgataaagggtacacacgtactggtattagcgctgagccattctcaacagaggatattgacggtgactggcgggtactacccagcaggattctttaccgtattcgtgaactgtcagtgctgatcccagaagccagccgttatatcagtattgtcagtgactatgataatcctcccgactggcagatgacctttaaagaacgccgttatcagtattcacgtctgggtctgcgtgccatgatactggccaggcgactgaggcgacttaatgccatgccttcatcacaccttgataataacagcccctggtcagtacagaacgtcttatgggctgagtggcgaaaacaacgaaagtccagagcacgacaagctcgtgaggttcctgactatgatttgtaa

SEQ ID NO: 162845 - DNA, 465 bp, Enterobacter cloacae
ttggagcctgcgagaaaaaatctggacggaaagcgtcagcgtcccttgctgaacagaggcgctctgtcagagtgcataagtaatgaaaggctttcacggcagaaacggacaggaaggcagaaggcgccggttaatccggcgttcccttgcggccgccgtggcggtcagtgggagcggcgctgccggaacggcagctgcaagcgggatgggttcaggtatcgcttgctatccgtcaggacggagacgcgtgcggctccgcgtagcgcggtgggcgtacggccaccacgcgaagtgcaggcgacgacccggcagcgacggggagccgaaggtacccagatgtcagtcctgacaacatgcttttcgtcgtcatttagcatcacattaatccacaaaaaaaaatcaataaaagtgcagaatctgcactttattcatatatactttcccacaaaaaaaacactaaaataa

SEQ ID NO: 162846 - DNA, 834 bp, Enterobacter cloacae
  misc_feature (751)..(760): n is a, c, g, or t
atgagtctggcgttagttataaataggcttgatggtcatatcaatgatttcatgaacaataaaaatataaatagtgctaggaaagctggtgaagctatctgcaagattattcttggtgacacaaactctgccattgacacaaatgttaaatatgatcagttgatttcattattaaacaccaaaaatacaaatttacctaaatttttccttagtaaaattcaggctgaattgagagtgttacaatcatatggtaatgctgactctcatgatagcgaagaagctcttaacacaaatgatcttgtaaggatacagcgagcaattataggtttattaggttatttattcgatagtaaagatgactatagtttagattataaaattcctgattttatttatggcttattaaatgaatctagtaatggaaatgagaactggcgctgccaacaaataatatctacaatatatccaaatagaaatgtcattaagaatataaaagataaagattttgagtttcatgtcgtggaagatgctgatggtcggcacattgcttttctcggtattagtcgcaatgtgagttttacagatgtatttactaaatcattatcatctgaaaacctaggtaaaaccgatagtttgacttttttattccctctggaaattagcaaagcaacagggactccagttaaaaatagaaaggagtatattcagaaaaaatcaaatacttttttaccaaaggataaaaatattaaannnnnnnnnnggataaaaatattaaagttagttattatttttatgaggactatatttgggataaatgcctgccagcgcatataa

SEQ ID NO: 162847 - DNA, 600 bp, Enterobacter cloacae
gtgaacggaaacaaggcatccatcaacagcctgaaccagacgttctccgattaccagcaggctatggcaacgcaggtaaacagcatcacggcaaccgtcaacgggcatacttcagcgatcaccaccaacgcgcaggccattgcgaacgtcaatggcgacctgaaggcgatgtataacatcaaggttggtgtctccagcaatggacagtattacgccgcagggatggggatcggtgtcgagaacacgccatcaggcatgcagtcacaggtcatattcctggctgaccgcttcgccgtaacgcaccaggccggagccacggtgacccttccgttcgttatccaaaacgggcaggtaattatcagggatacggtaataggtgatgccactatcacgcgagcgaaactggctgaaacaatcagctcggttaactacgttcagaaccaggctggcctgtctataaactttaggacgggcacgcttgaaaactacggttcaaccgcgggggaaggggcgatgaagcagactaatcagacgatcagtgtcaaggatgccaacaatgtgttgaggcttcagatcgggagaatcacgggaacatggtaa

SEQ ID NO: 162848 - DNA, 597 bp, Enterobacter cloacae
gtgaacggcaacaaggcatccttcaacagcctgaaccagaccttctccgattaccagcaggccaccgccacgcagataaacggcatcacggcgaccgtcaacggacacacatcagccatcacaaccaacgctcaggccatagcgaacgttaatggtgatctgaaagcgatgtataacatcaaggttggcgtctccagtaatggacagtattacgccgcagggatggggatcggcgtcgagaacacgccatccggcatgcagtcacaggtcatcttcctggctgaccgcttcgccgtaacgcaccaggccggagccacagtgaccttaccgttcgttatccagaacgggcaggtgttcatcagagacgcgctgataggtgatggcaccatcagcaacgccaagatcggcaactacatccagtccaataactatgttgctggctcagtcgggtggaggctggataagggcggtacgtttgagaactacggttcgacagctggtgagggggccatgaaacagacaaaccagacaatcagcgtgcgggactccaggaatgtgttgagggtgcagatcgggagaatcacgggaacatggtaa

SEQ ID NO: 162849 - DNA, 453 bp, Enterobacter cloacae
atggctactatcccaacatcgattcaccctttatttaccgtttccttcaatcacaaaaccgacttcacggaactcgcggacaactgcgagcgttttagtgaagcgctggtggagtgccatgatcctgtgcagaaaatggcgttgtgcgggcggctttgtgcctgtctggccttattacaaccgacgttgatggaacctgtgccggagtttttaaaagagagcctgacggtggatgaaataccattgcatgtacctgcttttgaagtggaagcggaccaggtggggcattactgccaggtactgacacaattgatagtgagtgggtctctgacggtggaagccgaaagagtcatcagtgatttactgtatgaactggtgggatattacgccgaaacgttaaaagcgccgcgttggctaagaacaaaagaaggaagcattgagctgttagactag

SEQ ID NO: 162850 - DNA, 228 bp, Enterobacter cloacae
gtgaaaatcggtctgaagcttaacgccgacagcattaatgtgctggcgctgaacatgggaaaaatcgcggtcgatgttgacggtatcgagatcgctgagcagatagctgccgttaatgctcaagggcttacactgcgtatcgcggaggaacccggcgacgtgattgtcgaaaccagctctcgccttcgtctaagcagacttgtaagatcacgccaagcggaccgataa

SEQ ID NO: 162851 - DNA, 381 bp, Enterobacter cloacae
atgcaaactttaccgttacccgaacctcgggcggctgagccatgtccgtcgcccgtgcaggtctggcaactcctgctcacgcatctgctggataagcattatggtctcacactcaatgacacgccgtttggcgacgacggcgtaattcaggcgcacatcaacgccggtatctctctgtgcgacgccgtcaacttcattgtggaaaggtatgaactgttgcgcactgaccacagcagctccagcctcaccgagcactcttcactgattggtgccatcgacatcctgcgtgcccaccgtgcaaccggcctgatagtgggcagcggctacagcaccatcacccgcatcacaacgggccagtatcgggaggacaaaacacagtga

SEQ ID NO: 162852 - DNA, 327 bp, Enterobacter cloacae
atgcattctgaacaatggggactgacgtgcggtaaaacgccgtgcttcagtgccaagctggtgcaggaaggcaaccggctgcactttctagctgaccgagcagagtttagtggcgacttgagcgacgatgaggcactgcgcctcgaccaggcttttccggtgatattgaagcagctggaacaaatgctttcagccggtgagctgaatccccgccatcagcatcgcgtcactctgcatcttaacgggctaacctgcgaagccgacacgctcggttcgcacggctacctttacatcgcgatttatccctcagcggtagctaccggctga

SEQ ID NO: 162853 - DNA, 687 bp, Enterobacter cloacae
atgcacaaagaacccgttgttatcgccagttttccgcaattaatacactggtttgatgacgaagccaaaaggctattggcgaaaagtgagcaggtacgtatgctcagttacctatttcggcgtttgtcgctttatttcggcagtgcactttgtttcttcattttatgcctagtgatgacgtttaccaggagtgtgacgctcgttatggtcaatgattggttgaattctgtgccagaggctctgagctggtgggcggggctggtactgctggttattaatgtcgcctccattttgttttttcgccagagtaaccggattgcggccatcatactctccagcttgattctaatcgccttgatggcactattcttcgtggcattagatgccgaacaaccggtaatcgttgggatttcgcttgcgggaagtgtgacgatcatggctttgattgctaataaaacactgggtttcactcgccgtgacgagcgttaccaactgtttagccgccgtgctaattttttggctactctttatagatcgcagcaagcaatgaactctgtctttacgcaggagaatttgcaggagttaaagcagtttaacgaaaatctgtggagtaccaagcaaagtgatactctgagtgattcattctacctcctgaagaagcttgaagataaacttagcaaagattga

SEQ ID NO: 162854 - DNA, 198 bp, Enterobacter cloacae
atgccatacattcgagtagagaaagatggcctacagtatgaaggtgagtatttctgtgaagagaatatggttacagtctttggggtgagaggaggacagtccagcgtggttcttaatgggatgacagaaatcgctgctgctcgtactgcgttgcgaaatcttattagagaaaatcagattgatcctctaactgattaa

SEQ ID NO: 162855 - DNA, 315 bp, Enterobacter cloacae
atggatgttacagaagacgccttactacgttctggctttactcagtctgatgtacagaagataaaaaacaacgttgaaagctatggcggcacgttgggagaggcgattcaggatctagctaatcgattcaggatagttctttggatcttttgcgctttcacagcaatgtttatctgggtaattatttcaaatgaaatagaatacgtcatatcaaccgggatcggtttattcatagcaatgctgattgctgtttttgttcaaccgccagtcctttcttacaaatcctggcggttctggagaaaatacaggggctaa

SEQ ID NO: 162856 - DNA, 474 bp, Enterobacter cloacae
atgaaaaatgtttttcaaatgtgcttagtgatggttatacaatttgtagcgtgttatctgtcagagtggccgttgccggaaatactatttttcgtcttttttgtttttatatggcaagggttgtttttatatttgtcttccaaaattcaagagaaaaacaaccttccaggatatgagtgcaataaaatagtttggtatgcatttatacctattgcgacattattcccgccactacttaccttgctggcaattgtagttgggtctttgtatgaattgcgaagggttagtggatgtaaaagttataaaaattggattgagtcacaaattgtcttaaattcatcagaggatgacaatgaggttgaactggaattcaagtctgttgagtttgatagatataacccagctactggtttacccatgataggcggagtggatatatcagggaatcccagtggctcaacaaggcataattag

SEQ ID NO: 162857 - DNA, 741 bp, Enterobacter cloacae
atggagaaaaggatgttgttagcactggtcacatcttcagtcgccctttctgggtgcggagtgcataacgtagaaaacaccgaaccgagtaaatatcatcgtgctgcagactatgcttctgatgtggttaaacgttcagggtgtatagggagaattgacgatttgctttttagctcgggggaaatattcgtgaatgattatggattgaattattcatctagtaatgctggtcttcattgcacgaaaacctcatttcgagagtcaatgtctcgatattgccaaagtaaatcaggtgtttttttagatggttggtgctcagtagacgatgtccctatttttaaggttgatggattcactacccttgaaaggggaccatctcagtctgcagataaatggattcaatccagccgccattggggatatgaaagtaaacgagaacaacaagtaaagtcagatgagcgtcagcgtagcgaaatggaagaaaaagaacgggtagtgagagagaaaaacatggaggttgatactaaagttggtgatttgatatgtcgagaggattacgaggcgaaaccttatcaatatcctggggttgcatactacaaagcatacgtggaaaaaaaagagaaaaataaactacagttgcgattggtttggcacggtggtgataggtttgtagttaacgatataactaatgtgaataatataatctggtcaagtcctaaagggtggcgccattgcaattga

SEQ ID NO: 162858 - DNA, 261 bp, Enterobacter cloacae
atgtcgcagatcgataatgcagtaacttcctcatcgaaagaaaagcgttcttaccgaaaaggtaatccgatgactgcttctgagaagcagttagcggctgtagctcgaaaacgaattacacataaagaagtgaaagtctttatccgtaaccctcttaaagatcgcatgattgcgctgtgtgatcaggaagggataactcaggcccagttcattgaaaaactcatcgagcgagaactgagtgagcagggactgttgaagtaa

SEQ ID NO: 162859 - DNA, 765 bp, Enterobacter cloacae
atgacaatccttataaaaaccttaaaaatcatggcatcaggtgttgttttcatttcaggcataaccgccgcatctaataccgtctatttcttgccagaggcaaaatcagcgggtgtcgccagccgcgaccaaaaagccctgatgtttctcggcatggacagggatgtaaatctgaagggaatatgcttcgcgatggcaaagcaatcatcatcgatcgtgccgctggtggatatcactgcaacaactgataacggcagattcacgatgcatgggctacgcccaaataataacgacgatacaaaggaattggtctgctctcttggttcagaggccggggatttcttgactggcatttcgaagtctacattcgttaacgtgaagctggatttcaatggcgagatccgcagttacagcttcgatactagagagttcaggaaaatattgactgccaatgggcaagacgtgtgggcaaaagcagctaaaggctacactcagggagtacgtgcccccattttctatggaagcgatagcgaagtccccaaaaacaatgcagtcaactcaaacgtcgatacttacagttataaagcaagtgatgagaaacttaattcggtctggaagagccttagccctgaaacccgaaaacgtttactccgttcgcaaagagaatggataaagcaaaagtccggctgcaataatgaacagaaatgccttatcgacatgaccaataagcgcattactgaactggagtctgaaaatggaaagtaa

SEQ ID NO: 162860 - DNA, 708 bp, Enterobacter cloacae
gtgaatcttaaagatttatccggaacgactattttgttagctatgctctattttactgcttatggcttttatagcggctttagcgatttttttggtttcccaactagttttatatccataggcgtccctgaattggtaaaatattcggtggttgtcacaggtataatcttttctctattagcgttattgcacttcgacactgaagaaaaacatatttccttttttgttagctgtttttttatcgttttagcaggggggttggcactctctatgttctactttatgggtggaaaagggtatcttttcgacaacaatactaggcagatagttggtcgctctgtgcttataggtatttttgcactgatgggggtaagatccttttccgtgtttatacgaaacgggtttaagttcgaaggtaaaacccacggcgtaatgcttattggtacatctgtatttctccccagtgctatgggctgggcttttgcttatttgccctacgatactatgttttactccaaagataacaaagcgtacatactcgctaattattctaataattttgtacttgggcgttgcttaaaagaacgatcggaatttttacttgtggaaaagatcaacggagaagttactcccgtttcaacgaaagaaacacaggaaatgaaaacgtgtttccttcgagcctcaagaaacgctgtaaaccaatcttag

SEQ ID NO: 162861 - DNA, 981 bp, Enterobacter cloacae
  misc_feature (164)..(173): n is a, c, g, or t
atggcaacactaagcaagctttgtttgtatctgaacgatgtctactatgggtatggcaccgcatcaatcttgaaaaagatccagaaaaatacttccctgcgtttgaagttatatggcaaagttacattaacatttcagctgaatatttttccaaagttcaaccnnnnnnnnnnatattcaactgaaagttcactggtcaacataactgtatttgaacaaattggtatacttgcaactctcggattaaataattttttcctcgcccataggaaagataataatggtggtgcgcttcagattcataatgccgatatcgttgccgatagcttgtgtgcgttaattataaacaatcccgcatctggttcgccacgtcttgatgagaatgccattgaaattgctcttggattaatatttctttcgctgatggggagaaaggatgctgtcgaaaaatggcttagagaactaatttggaggttggactacgtactcaggattggacgagaacatccgatatcaacagattctattgacgatcttattagcatggaatgcaatagcgatgatgcatatttaaaagaaaaaacaacaaacatgtcctggattatccccactttaatgggatggtgtgtgatactggaaaaagaagaaggatattccgcattattaactggaataaaagattcatataaaaatatatgctcccagctatggcacccaacgaatgacctttatagacacctttactttcatccagctcaatccttcactggtgagaccgaggcaccaatagcttttccggataatatgaatgattacaagaagagaatggatgaactacgtaaaaacaaaagatataatatttttaaagagtcaagtgcgacacaggcaggtttaattatactcgattttattgcctgcagacattttagaactcctgtacccgctgtactttggtatggcatgcaaaaaaaaacagagtga

SEQ ID NO: 162862 - DNA, 381 bp, Enterobacter cloacae
atgaaaaatcatccggaagccaccggtaaggtggggattaccggtttttgctacggcggcggcgtatcgaatgccgccgccgtagcgtatccggaactcgactgcgcggtgcccttctatggtcgtcagccgcgggtggaggatgtgccaaaaattagcgcgccgctcctgcttcattatgccgagctggacaaaaatattaacgagggctggcctgcctacgaagccgcgctgaaatcaaataataaggtttatgaagcgtatatctaccccggcgtaaaccatggatttcacaacgattctaccccacgctatgaccagcccgcagccgagctggcctggtcgagaacgttaagctggtttaaaaaatatctggaatga

SEQ ID NO: 162863 - DNA, 1281 bp, Enterobacter cloacae
gtgagtaatggtaatttggctttaaatatcagtaaagaaaaaaggcaatatgttggcgattttctggattgcattgttgattgtttagatctgaccgaaacacaacacaagcatattaaaagtgcctaccactccgtgggcaaattcctttctgaaggtgacaaccctattcttaaaggggccatgatttattcacagggaagcgtccgtcttaacacaacggttaagcccaaaggtagtgaacagtatgatgtggatctgctttgctatttgccaaatgccagccatattaccggttgggcgcaggtgctagacgctgtccgtgatcgcctgagcagtcatgagacgtaccgcaaaatgctccacccgctcccaagaggctatcgcatcatgtatgcaggggactatcatctggacattactcccgggattgattggagtactaatccaacggaggaaaaccaccctcttcttgtgccagacacgcgcctaaggggctggaaagagtctaacccagcaggttacgcgacgtggtttgacaatatcactgaaaaacttcctacgtttttaacgcgtatggtcgcctgcgaaaacttggctaaatctgcgtcagtaagaccattgccaaatcacacccataagaagcttctgaaccgcattgtacagatttttaagcgtcatcgcgatgtctgggctgcaagccaagggaaagattatattgaattcaaaccaatctcagcaattattacaactctttctgcacacgcatataaccatatctgcgatcagaaaacgacttacgatacagacttcgacgtaatactcgatgtactttacttgatgccgaagtttattgtaggcagcttaggtaactaccacgtctccaacccgagtatgccagcagagaattttgctgaaaaatggaacaacccggaaagtggaaaaggcgaaaggctcaaaaagcactttgacttgtggcataaggctgcgattgaaagcatcaatgagattgcagcctcggagggcgaagatgaattactcgaaaacttaagtaagtattttggggaacgaccagttaaagctgtgcgtgaagcaatgcttgagaatatcaatgccgcacgaagccaaaataatttgaacgtccttcccttcaccggagcgctatcagcaggtgctgtaactggaactgcctcagcccgattggtaccatctaataccttttatggtggagaagcaacatcatccgttgtggtgcaaaagaatactttctttggggattga

SEQ ID NO: 162864 - DNA, 528 bp, Enterobacter cloacae
atgaacgtattcagacctcatcggcgactaactctagctgaacaataccatgggcttcgtgcccactttcctgatggcaaatgcacaatcacgggaaaaaacaagaagctagtctgggagggcatgcttaagccagtcccatttagtcgtgggtataaaattcggctggaatatgcccctccttccgctccacgttgctttgtggtttctccagatttgaaaaaattatctgatggtaagaagatccctcacacttatgcttcgttagcatcgtcgaaaataacacagctatgtctgtatttaccaagagaaagacacccagataaacatgccgaatgggtgccacagtaccaattgagtgaaacaatacttccctgggcttcactttggctgttttactttgaacagtggttgcattctggcatatgggaggggggaggcgcacatccaaatgacgatgacgatggcatttattatgaaaaaatcccgcgccaggggacttactcgcgagacagaagaaagccgtaa

SEQ ID NO: 162865 - DNA, 1092 bp, Enterobacter cloacae
atgagtgaatactggaaacatcagctttccaaaattatcgactatatgacccgtcaaaagcgcccgggtgtattgatgatggtaacaggggcgactcttgcggcaggcccgaagttgttgagctttgtgtttaagggcacttttcacggagagtcactttctatcagcaccgctgaaggcaatgtggtaagtgactatatagtaccaatcataggtgggatactcgttcttgctggtctagtttttttatctatcggtgaatatcagtctatcaagcaaaactctcgcaaacgtatcttactaattactggtaatggtctaaggacaacgacaggtactggtctggataaagttgtccgaacagtattgaaaggtttgattcagccacgggacattgacattacccaacgcatccgggacggggttgttatcgagcctgaatcaactttcaatcgacagatattgcccgaaaaggacatcattactcaaattttatgtaaaggtgaaccagaccttacgcaggttgcttatggtggttttctccccgtgccatttaccttcttcctcggaaatgttctggatgataaaggggatgtcaccgtattcgactgggaccgcaaagatgagaaatggaagcatatctcttcaaataatattgatgatggtgaaagctttgtacatgaaaccatcatcgaatcgacttcggaccagatagtgctggttgtttcttgctcctacagggtgaacatcgagcaagtgaccagaagttttgccggtcagggcattgagcacatttatcttgaaactaacaggttcgataatcactggtcgctggcaaagcaacgacgtctctcactggagtttgcagaaaaaattaaaactctgtccatgcagggtatccgtactgtacatctgatcctatcggcgcaaagtagcatcgtcctcaattttggccgacgttatgacaatagaaatatggccgatgtgattgtttatcaatatgaacagtcaaatattaacccatatccttggggtgtatatggtttgtcacaccgatatgaaaatagtgggattgttatgcggcctgattga

SEQ ID NO: 162866 - DNA, 549 bp, Enterobacter cloacae
atgataaatgatgagatttatatttcagttgatgtagaaacttcaggtccgatcccaggtgagtttagtctcctttccgttggtgcttgtctcgtacataacccgacagaatctttttatgtggaattgcaacctgacagtctccatcacgatgctgaagcacttgcagtaacagggttgagcttggaagcacttcagcagaatggacttcctcccatccaagcaatggaacacctttctgaatggctcaatacgataaaacaaccggggatgaaggtaattttcgttggacttaatgctccttttgactggtcctttatcaattattatttccataagtatattggctataatccattcggatttactgcgattgatatcaaagcatattatatggggctaacgggatgttcttgggctgaaaccaaatcttcacgcatggccgagagatttcatcccgtcagccaacctagccacaatgctctggatgacgcgaaatttcaggctgaattgtttgcgttgatgactgaagggcagatcgtcggctga

SEQ ID NO: 162867 - DNA, 252 bp, Enterobacter cloacae; identical to SEQ ID NO: 31771

SEQ ID NO: 162868 - DNA, 630 bp, Enterobacter cloacae; identical to SEQ ID NO: 31770

SEQ ID NO: 162869 - DNA, 1131 bp, Enterobacter cloacae
gtggacgtgggccgttcttaccaggggattgcggaacaatatacaaacagtcaatttattgatttcggtaaaacccctgacttcaccctaaatccctttgccttcctaactgacatcactgttaacgacgatgtatttaacgaagcacctgaatttaccggtgaatcaacttcaaacgatgcagaaaaagacaaagttgctcagaccataatggttttgaatcagctaaaaattatggcttcagagaaaggccttatcgatgattatcaacaatcagtgatgcttcagcttattgcagaagagtaccaagaatccagaaaatcaggtcggaccggttcaataaccggctttgctctgcgttgcaagaagcatgaagacaaacgtataaaggatattggggagcaactcggagcatggtgcgaaggtggaatttatgggcaccggtttaccgatacgttgcctccaatcaacttcgacagcagatttattgttttggaactggaggagctaaaaggcaccccccaccttcagacagttgtattaatgtctatcattcaggctgctcagcatgcaatgttcatcaaaaaagatgggcgtcgtcgcttgttcatccttgatgaagcatgggagtacattcgtcctgataattcatcaggtgccggaaatcaatcaaaccaattcttctcttccttcctcgaagcggcatggcgtaggttcaggaaaacaaactgcgctggcatctgtatcacacagtcgtttgaagattattttacttcttctgttggccgggccctgactgctaactcgccttggaagataatcatgaaacaagaaaaagaaagcattgaagcaatgaaggctaataaatatttttctacttcagatgcagaatatgaacgtatgaaaaatattcgtacagtcaaaaaggtgttttcagagatgttagtcaggttcgaaaacttccaagagatctgtcggttatacgtagaccggaaaatggagctttgttttactacggatagtgctgacaggagtaaattatgggaaattcaaagccgcgagaattgtagctatggcgaggcaatagaaattctctatgctcaagaagtagcagcgggtttggccgcgtag

SEQ ID NO: 162870 - DNA, 510 bp, Enterobacter cloacae
  misc_feature (435)..(444): n is a, c, g, or t
atggccgtaactcgcgagcttgaggatggcgcaaagcttttaagagggtatcttactttcactgttatgggtagtaatgccaattctgtgcagacagcagctaacgatctcaaatccttttacctcgaaagccgggtcaaagtagcagatgattcctttatcgttttcccgtcatttatgtcatgtctgccaatgtgcaatgacccaaagacaattttcgaccttgaccgttccgaagtagtgagcaacaccggagcggctcatatgacaccgatctttgggccctggaaaggtaatacagatagaccagtactgagtttagtttctcgtgaaggtcaactcatgggacttgatattttcaagacttctgcaagctataacatggttattggtgcaacgtcaggtgcagggaagtcattctggacagcatatctnnnnnnnnnnatcttggagctggaccgcgatctaataacctcgttcattatcgctcaacatttaagcattttttag

SEQ ID NO: 162871 - DNA, 198 bp, Enterobacter cloacae
atggcatccttaatcgaactcgacatggtctgttatgagttcaatcaattcgaggaaacggataaatatttcaacgatacttataactacggcaaataccatcctttcaggatagacctaaaaaatatcttgagttttatctgcgtaagacggcgtaagagcagtaatttattccattcaaaacaaaccaaacgttaa

SEQ ID NO: 162872 - DNA, 519 bp, Enterobacter cloacae
atgaatatcaataaagatgacgaactccttgtgatagttaagtatgaaggaagattttattggttcgttgcgttcaaggaaatgtggggcttcgacagagttaaatgggtagaggattttgtgaaaagtggggtggaaataaaccttcaggatatccataaggaaagatatgacataccagtagtaaatgaaggaaacgcgcagatattcattgatgatttaattaaagatggttattcatacgaaaaggatgacatagctgaggagttttataataggctttcgcaaaaaacaacttggtgggatatatatgaacttatgccggatttatttatagactttgataataaaaaattatattcggaatatgttgagagtatgcattatcaagaatatgtgtctgatggttggcacggtgaacttgttgatttttgcagtaatggatcgttacctcaagatgaaatgttctggataaaaaatgaaactgatcatagaagcgttttgatcgctaaaggataa

SEQ ID NO: 162873 - DNA, 237 bp, Enterobacter cloacae
atgccctggactgagacccgacctatgcaacgccttgattttatccgtgcctgccatgcaggtacggattcttttctgccctctgccgtctcttcggcatcagtcgaaaaaccggttacaaatggcttcagcgttttgacccctctgacctgtcatctctctctgaccggtcgcgtgctccgcactcccactcccggacagttcctgatgatatcgccgggcagcttacggccctga

SEQ ID NO: 162874 - DNA, 882 bp, Enterobacter cloacae
atgtggctgctcaatcatcacgtcgattttaccgtccccgctgccagcactatcggcgatatcctcaagcgtgaaggcctggttccggataaaaagcgaaagcgcagaaccccgggcaatcgccagcccctgaccatcatcagtgagaacaatcaggtctggagcgctgattttaaaggcaagttcaggctgctgagccggaaatactgtcatcccttcaccctcaccgacaatcacagccggtatcttctgagctgccggggagcagaccgggagagcgagcccttcgtcaggcagtgcctgacggatgcgttcctggagtacggtctgccggaagtcctgagaacggataatggtcagcctttcgcaggaacaggtatcgccgggttaagtcgccttgcagtctggctgataaagctgggcatcagaccggaacgcatcagaaaggggcatccggaagaaaacggccgtcatgagcgaatgcatcgttcgctgaaaagtgcagtaaaacagggcaacatatttatgacgatggaagaacaacagcggtggttcagtggctaccgggaagagtttaactacgaaaggccgcatgaagccctggcgggtgcaacgcccggaacggtatggcaaccctcaggccggcactgggatggcagggttcctgaatatgcttatccggaaggaggtacggtctacagggtgaaatcaagggggacactctatatggggaaaaaggggacggtgtacctgagtgaagcgctgactgatgagtacatcatgctggaagaacaagatgatggcctggaggccatcatctttaatggaataacgcttgcgtactacgaccgaaaaacccagagtgtgctccggatagactga

SEQ ID NO: 162875 - DNA, 291 bp, Enterobacter cloacae
gtggccaatcccgatggccaggtgggtcttgcccacgcctggcgggccgatgaagatcacgttgttgcgctcgtcgatgaaccggaagtccagcaggctgttgatctggcgcttgctgatggtggtctggtggcgatagtcaaagccctccagatgcttgtgcgcaggaaagcctgccgtcttgtaattgcgctgtacccggttggcctgacgctgctggagttcgtattcagccagtcgctgtgcaaagctcaggaacgacatttcactggcttcggcctcggccagtaa

SEQ ID NO: 162876 - DNA, 207 bp, Enterobacter cloacae
atgacggaatatttgctccgaaggatcaatatctttgtaccaactttttttaccagcagcggctgccagtatcttacgatgttcttcttcaaagcgatggagacaatcatccagtctgtaacgattttgagaagcactctggatagccgcatctaccgaatcaaaacctttacggtcaatagcgatcgtaagaatggcagcgattag

SEQ ID NO: 162877 - DNA, 1725 bp, Enterobacter cloacae
atggcaacgggattttttctgtatcacctagataaaaccacctgtggggggcgtattctctcaggtgcatctgatgatacttacgagattggtggtgtggaacgtcagcaggtccgggacggagatccagtgacctgcggaaagcatgaaggacgtttccgtgtctgtggcggcatgggagacacctacgaagtcggaggtgtcctgaaagagtgggcgggttcactggatagctacagttcctgtccatgccgtgcccgtttcgttccgaccgtcttttctcacacttacgaaagcgactgtaacgctggtcgcgtggcagaacgggagcaggcagagaaacgtgcggagcctaatgaggtgaaaaccgctccggtccctgtatttgctaagtcttgtctgcgaggggctgggtgtaccgacgccggaaccgaggatgagccacaggcaaactttgcagcgatgggcatttaccagtcacagcctgcttctccacctccagagtcatcatcaacagtgaccagcaacgagccggaacagcacgctcaggcggcaaagaagaccaaggactccagacaagcacctgtgccagagaggaaaaaatccctgttcgacaaagtgagcggcttcttcttcggtgaggcagaagcgatgccattgcctccggtagtaatggggggtagtgcagaagcgggtatggcggcaactgctggcggagcgacagcaaaactgaacaaggacgcggcgaaggcgttgacgtatcagatgaagcacctgtccgggccaacggtctgggaaagccggtttgagctgaatttaccgttcgtggtaatgggaacggtgctgcactcaatgctgaaaggcgaaaagtctgacctgttaacagcggaacaactgctggcggtagcccagagcggcggtacggtgccaacgcgggtacgctataactgggtggaagaccaggaaaccggacggctgaaagcggtggggtatcacaccagcccggaaagcggacgcgatcaggtgagagtcaggctgatggaaaagcggtttgacgggaaataccgcttctggggcgacgggccgggcggaaaggtacagataacctggacaccagccgatgctccgggcagtaaggacgccaacgggtggaatactggcaatgagggacaacaggccgggacagtgacgataccgggactggaatatcctgatacagagggcgtgacggtcactacgctacccatgccagaggaaaaagacttccgggattacattctggtgtttccgggcaacgtccacccgccgatctacatctatctcagcaagcctcctgtggaactgctggaagtagacttatatagtaacttcacaggtcgagcacgaaacggtactcatgctgatcacatgccctcagccgcagcagtacgggcttacttacgacgcgaattcccagacgcaaaaccggccgaaattgatcgtatggcgaaagacgttgcgtccatcatcattcctgctgatattcaccaaaaactcagtgccacttatggcggcagaaatagccctacgcaaatacagcaagactccagagatttgcgagcagctgtagaacgggacattgagaccatacgcccagagcttaaacagcgtgggataacagatagccaaatcgatgaagccaaagctaagatgcatcaattaaatcatgaacagggattatattaa

SEQ ID NO: 162878 - DNA, 468 bp, Enterobacter cloacae
atgaccattaatgtcgaagcattgattcgctgcttaggtaagccgtatcaggaaatttttgatgccggattgatcccctacaagaccaagccgacaggctatccgggagatcctgatctaacattaagcatgatgaatgaaggaatttacttagcttttaagcgagacggtacaacgctttattctatcgagctttttttacagaatcagaagaaaacgaactataaatttcctaatgagctgccatcaccactacaacctgaaatggtgcgttcttgggtgcattcacaattcgggcctcctgacagattcttgcctccccggaagcggttacgccaggagattggctacactgatttgttcaccatgatggatttccatatccctattagcatgcaagttgattacgatttacaggagcgagtcaaagaggttgcattcatagcaacatcagaactccgctggtaa

SEQ ID NO: 162879 - DNA, 435 bp, Enterobacter cloacae
atgcacgatgaaatcattaatcaggcccgcgaaatcctcactcaacggctctatcgcaccgacgcactaacatcaccgcaggacactgcgagctatctggcactacagcctggcgaccaggagcaggaagtgttcagcgtgatattcctcgacaaccagaaccacgtcctcagatatcaggaaatgttccacggcaacatagcgacaactacggtctacccgcgtgagattgcccggctggcgctaaagctcaacgccgccgccataatctgctcccataaccacccatccggcaacgcaaaaccctcgacgcaggacaaatcgttaaccttggggattcagaaagttatggagcttatcgaggtccggcttgtggatcacatcgtcgttggtggtggtcagactgtttcattcgctgaaaggggctggttatga

SEQ ID NO: 162880 - DNA, 762 bp, Enterobacter cloacae
atgaatattatagatactcttcaaaatgacctagagcgcgctatagcgcttcaaaatatactaatcgcaagagctactggggcccaagatgaagctaatacagattatgtgcttctgagaacctattttttacaaaacccttcattacttcagttgttacctgagtttgtgagaacgaatcgctccctgaaagagttttggggatttataaaaaaaactgaaaagtatgatccccgaagagaactgatttatagtgcatttcaaccagtgctagactatctagaagggaaaaataaggctccagcagatgaagacatatctgatgtattaagaaagtttaacgaggatggcgtacacgccgtttgggcaaaagcacttgaccgacgccatacagatcctgatggcgctataacttctgcaagaacacttcttgaaacggtttgcaaacacattcttgatgatatgggcattcaatataataataaaaatatcgaaatgtcagaactttataaaaccttatcaaaagaacttaacctatcagccgaccagcacactgaaagtattttcaaacaaattcttggcggttgttctgctgttgttaatgggctaggtactcttcgtaataagctcggtgacgcgcatggaaagaatagctcatcaattaaaccatctccacggcatgcagaactcgctgtgaatttatcaggttcaatggctctttttctaattagctcctggttaaacattaaagagaaaaaataa

SEQ ID NO: 162881 - DNA, 279 bp, Enterobacter cloacae
atgtcgaagacaaaatgtgatatgaacatctggccggaaggagagcaatttaccctggaagtaatcatgccaacgggagcggggatttcgggagaaggatttgagtcgtttggctatgaagattttcctgtcatggtgacgttcagggctccggcgttcgatgtagtggtagaaatgtggagaaatactgatccggctaaatcatttggcctttttcggcaattcatcgagtgctgggagcaagaggataagctgctggcgggctatttgtatgcatga

SEQ ID NO: 162882 - DNA, 594 bp, Enterobacter cloacae
atgcatagcactgaggtaatgacgacgactaagctgagcggttcattagccaaaatatttggaagggaacataagcgcctgatcactacgacgcaggaagctatccgtgctttgtgtgcaacgttgcccggattcgagaagtatctgaatacgagtaaatctcgcgggctgacattcagtatttttcgtgggaaacagaatattggggaagacgaacttgtgttcccagttggtggtcgggaaattcgcattgtgcccgttattatgggaagtaaaaggtctggcctgctgctaacgattttcggtgcagtgctggttgctgtgtctatctggatgccaggagtgagtatagcagcccgtaatatgatgttcgctgtcagtgcatctatgacgataggtggggttgctcaaatactatccccgcaacccggtgggctggcgagtaagcaggatgcggataacaaggcatcctatgcgtttggtggtgtaacgaacacaaccgcccaagggaatcacgttccgctggcttatggaaagcgccttatcggtgtcgccatcatttcggcggggatctatgtcgaagacaaaatgtga

SEQ ID NO: 162883 - DNA, 195 bp, Enterobacter cloacae
atgtcaacgactattcaacgcgataaacaacctaaaggggcgggaaaagctcctgcgtttcagatccgaatcaaccctgaactaaaagaacaaatgaatgaagctgcgttaaaatccggaatgagtttaggtaactggctgaaaaagttagctcgtgatgaactaaggagacagggaattgaaccaaaggcgtga

SEQ ID NO: 162884 - DNA, 822 bp, Enterobacter cloacae
atgagtatatatcattacaccgatttacatggtttaaaaggtatagtagaaggtaacgcattatgggctaccaacataaatttcttgaatgataaaaatgagtatattcatggatttaagtgttttcgaaacacaatagagtacttggatgaagaaattaatggggtgccagtcaaacaattattaaagcaagctattgaaaatcatatggatatccatgagaatcctgataacttcaaatccaaacatgtttactcgatctctttttgtagagaatttgaccagctcagccaatggcggggatatggaaattctcaaggcgtatgtttggagtttgatgaaggtgagttggttaaaggattagatagtgatggcctaacatttctacacaatgatgtaatctatactagtgaaaccagtacggtggaggtaaattataaaataaaaaatctttttgaaagcattgcacaatcagcaccagatgtttttgattcattcataaattttattaggcttaactcacttatcagttcaaatattcctttttttaaaaacattggcttctccgaggaaaaggaatttcgtttggtttttagtccgttgctaaagtttcctcatattaaattcagagttggagcatatggcttgataccatatttggagatgaaaatgagaggtggagataaaattcccataaaaagaatcattataggaccatctaaagatagagagcttcttaaaaatggagtttatatgttccttgaaaataataattattcgggaatacctattgatttctcctcagtaccctatcgaagctga

SEQ ID NO: 162885 - DNA, 768 bp, Enterobacter cloacae
atggactatataagtgatgaagttttaaataaagttatagtggatttaacatctagggcgaaaagcgctaggaaggcaaggtttttaataggtggttcgatcattctcatcgcatccttactttcagggtttatctcttacagattaacctcatttaactctgaaagtaatataaatagaacaatgagaattattaacagtagtatgggaagtaatgaagatggaggattgagagaatatattaatagagagttagagcaagtctatgaacgcgaggaaactgttcgtggctttattgaaggaaacggaaacctgaagttgtctgataaggacaatgtgaatggtaatagggatagcacacaagtaatccaagcaattaataaaaaggaagctttcgacaatactgggaagttggtcgatttttacactaaaattatgtcggctaataatggtaggcctatcaataaaactgacgatacttatagcaacctaatcagcaccatagcattatctgcaggtatcgtaggttttctactttacatacttcaaattgctgtaagttttataagatattactctcggcttgcagagttgtatgactcacaaaaaacagcattgattgcttgcgatggaaatgttgattctgcaaaggttttaatgggaatattatctaatgaccatatcggattgggtaaagaaccaactacgttatatggaaaagcattggatgtgatcggcgaaatggctaagtccaaaaagactgattaa

SEQ ID NO: 162886 - DNA, 708 bp, Enterobacter cloacae
atgaaaatgtgtagagtgacaaaaaagacaatgtcggatggttgggttatcaaagaaatcgattatcacgcttacgaaggacaccatcactactattatctaggtaaaagagcaccggttgtaaaggtcggagaggaaaagttagttaaacagtatgctggttatactcttatcgagaaggatttacgcagcgtacttgtatggctaaatgagattgagagtgtaaatcccggttatttttctcgatacgaggattcacagaaaatggacttagttaaaggttattttgttgccgctttaactttctacggtaaatgcttcacggtaagcaaaggaagagggcttaagtatgatagagtcaacgttcctgaagagcacagagaaacacatgatattattatggaaatgcgtcataattttacagctcatagtggcattggctttgaaagtgtaaaggtaagcctggtactgcatcctgatatatattccgatatggagcctcaactcttcacggaattaaggcagcctgacctgtccctggatttaattaaagaaatgattgtcatagttaaaaaacttcaagagcaggctattaaaaaaaggacagccgtaggtaataagtttctaactgagattgttcgacctcaagggaagatattttggtatcaaaaaggtacttatgatgaattttacacacctgatttttaa

SEQ ID NO: 162887 - DNA, 747 bp, Enterobacter cloacae
atgaaaaaattccttaaaaattacatctttctaaaaaaaattgattcgggccctctgagggccttacttttctgcttaatatctattattttgctaggtattttactattcgtgacttcatttatttcaactggaatacatgaaggtttttttagtcggggtttttgtttccataatacttgcattttaaattttactaaaggttattctcagtcgatattaatattgcaagcaactttcatattattgggattggtagcaagtataggtggtatagttgttgctttgcttgggtacactaatagtgtcagcgtgtcagctctcggtaaccatatatcgcactttaagatatttcaagagtacttatcatatgaaataaataaaagagaccgtctatccgcatcttcatttgatatattcaaatggtataatattatttttaataaatctcgttctggctcaacatccatatctcaagactactgtgatttaattataaaattaaacaatgccataagtgaatcaaatactgcatgtacacgagctaaatcaggttctttctcttacgtaaagcaccaaaatgatatcacaactttacttcgagattttggaataatccatcctagattacctagaaatgattactatgaggttgaagatcaagtttttgaattgatagacaatataaatagagagttttgctattcatcatccatagaaccattagtaaaaagactgtatagatga

SEQ ID NO: 162888 - DNA, 1224 bp, Enterobacter cloacae
atgcctcttcatatacgccatactaaaaaaaacactgtttccgcaataaattcaattgattcattatgttctgcgctaagtataacaaaatccgaacttgaaacagtgttaacaattcctgataaagaaagatatactccttctgaagttgaaaaaagtgatggtactacaaggaatgtttataatccaaaatcattgattagaaaaattcaacgtcgtataaacaggagaatatttaacatatacactccgaaaggacgagaaaaaaagaaccctcctattatttgggcatcgtatttattcggctcaattccaaatcaatttttagatgaagatattgaacaaaaagattacattgcatgtgctcgagttcattgtcaatcgaaaagtcttttaaaagtagacattaaaaattttttcgataatgttcaagcaatacatgtcgagagtattttctctaattttttcttttttagtgatgacgtatcaaaggctttaacaaatatctgctgttatgaggggcatttagttcaaggagctttaacgtcaagttatttatcttgcctatgtctgcatgacgttgaatggaagattgttgatagattatctcgaaagaatttaaggtacactcgcttagttgatgatataacagtatcatcaactgtttctaattatgacttttcatatgcaaaagatataattattaatatgttacacgagaaggatttacctgttaacttaaaaaaaactcaacagtattatacatcgactactccattaacagttcacggcttgcgtgtttcattttctgaacctcgcctcccttcagatgaggcaagacgaattagggcatccgtgcgcaatattgaaaccttagcctctgaaagaaattaccgcacaacacatgcttatagaaaggacttcaacagatgcatggggcgggtcaataaacttaaacgagtgaatcactctcaatatgaaagcttagtaaatcgactttttaagcttttccctttgccatccaaaaaagatcttgatagagtatctatttccttagccaaccttgaggacgattatcataaaggtaagcatgatacttattggtattggaaaagatatcatagagtgcatgaacgcattaacattttacaacgaacctttgtacgtgaagccattatatttcgcaataaagccaaaattataaaaccgagctatatacaatga

SEQ ID NO: 162889 - DNA, 387 bp, Enterobacter cloacae
atgggtttcaaaatcacaagcatcgatcaaactaattcaaattacactaatgaagggggagtatttaaattcgttttagatgggtatcctgatgagaaatggcgtaacaagttttctgatgctgtaaattcttacaggggaagaaacttcagcaaggcccctgtaaaccctgttgataccaattttgttgaagcttatgcacaaattcatggcgatatgaacttggaatttgtatcaaaggagctcattgaacttattgaaattgctaacaatcattatgatcaagaagttcatgaacttgctgagaagcaaagaaaggaaagagatgatagaacatcgttagatacggaagtttctaatcaaatatctaaaattaaatttagttaa

SEQ ID NO: 162890 - DNA, 357 bp, Enterobacter cloacae
atgaatcaagtgatagtacgtaccaaagatgaacttgaacgcgcacagaaaagtaaagctgaaaccattcgaatagaaggcgagcttgctaacaaggttcgcaaaggaaaaacagtggcaaaggcaagtggggttacacttgctgcgattgctgctgtattagccgcaacaccttttaccggtggtttgtctaccatgggactactcccggtagctgcatatacaggatttgagattgctacgattattgctgctgcatccattggcatagcactccttgttgctgtctttaaagattatgaggaaatcgaggcaggtgacggccgattagttctcagacggcgtagcaagaattga

SEQ ID NO: 162891 - DNA, 486 bp, Enterobacter cloacae
atgcctgaaattgttgacccaacagactcattgataagttttcagcatgcactgtcaaatggtctaatcagactttctccatgtgtagttcacaccgatatgaaagtgcttttagacgatgctaatggtacccccaggattacttacgcctttgttcaaggagagactgttaaaggtgttgccgtatatgttccggtcgacccagtagaaggtaagccatgttttggcgtcggttatgctgtagctgatggatttaaaatgcagggcgtcggcacaacgctcttcacctcaagcatcgaagaaatgcgctatggatttagaaactcgtttagtgaattctatgtagaggctatcgtcggagttgataatcaggcatctaacaaactagcttcgaaagttttatctgttacgcctgactcagggaaggattcccactctggcaagcctatcaatcagtacatgaagcttttcagtaccaccaagtaa

SEQ ID NO: 162892 - DNA, 537 bp, Enterobacter cloacae
atgctgggggatagatcagtgaaatttaattttttcccagttgcaattgtcgtcattgctggcctgacagtagcacttgttaaaagttgttcagatgccagcaggctgcggagtgataatgacgttctgagaagtgacaacactttgcaggagcaggtgatcgccactcagtcattcaacttcaatcggttcaatcagattgcagagcatgccaacaggcttaactccatgattgacaccagcaccgaaaaaaacgtgatcgaataccgggagattctccgccgtgaaaagacctgtgatctgcctgttcctgctgatgtcgctggtgggctgctcgaatacgcgcacagtttacgtgccagcgcaatgcacaccgataccagcagacctgacgcagccgatgatcgttccgctgccgccagctcaataacgtactgccaagctgttttgtggattaagccgctgctggccgtcatcgagaagggtaacaatcacttcgctggcataaggcagatagagctggaaagaaaaaactag

SEQ ID NO: 162893 - DNA, 1053 bp, Enterobacter cloacae
atgatgataccttataacgtagcagacgttcgattccaacttgggcaaaatataggtcaagaaggtagaaattcggatgtttttttggccacagacattcatcttaatgcagaaattgtaatgaaacgaatgtcaaaattgaaattaaacgctaataatttttttgatgaagctcaagtattgtatcgttcctcgcatcctaatgtgattccaatacactatgcctgtcaagataacgatcatatatatttggccatgccttattacaataagggttctttgaaacaaatagctagaaatgaatcattaactgtcaaacaaataattaggtatactttacattttttaagtggcttacacaatatacattcaaaaggattagttcatctagacattaaaccagacaatattttaatttctgacagagatgaagctgtccttagtgattttgggttagctaaaaatttaaatgcaaatggtcaagccgctttaactcgtcattacgtgatccatttagctccagaggtttttggacaagctcaaggccaggcacctgtaatagacagactttatgatatttatcaagttggagtaacattgtaccgcttattaattggagaaactgccttcaaggaacaagtaaatgcaatttggcagaacggtgaaaaaatggcactaaggagggcaataaggacaggagatttcccaaaccgaactgccttaccggtccacatccctaataaattgaaaaaaattgtaaaaaaatgtttggaattagatccggacgacagatatcaaagcgttttagagctatcgaatgcactagctgcgattcctaatgaaggaacgcaatggaaagtcgacattggtcaggataatacgcagtatatgtttgaaaaagaaggcggttcaagcgtaatactgaatttattggaaaatggttcatgtacagcgtacaatgtaaatgcaggtggtaatcgttctaggatcagagatatgtgtaaggatgcagtatctaatagagatctgtataatttcttaatgagtaagtga

SEQ ID NO: 162894 - DNA, 201 bp, Enterobacter cloacae
atgatgagcaaagttactttagataaaaataaatttatcaaaagggatcactttgcctcaagaaaaatcgatcctaagttaaagaaaaagtctctcgagcagaattctggcgcatggtctatttctgagggctttagcttggatgatggatacgatatgcttgtttacattaaaaacagttcccctgtaacggggaactaa

SEQ ID NO: 162895 - DNA, 282 bp, Enterobacter cloacae
atgtccaaaaaacatttagatttagcagttcgttatgtgaattctagcgttgtaacggagttagcaattaaagctcaagaaatgacaagttcactacgtggggatatcgatcatcttaaagatacaatgctggcagccgatgccggaattggtattgattttgatgaattgaccgaactttttaatcacctctctgccgctgaagaattgctgtttcgttgcgaaaaggctggcagaactgtcagtctggaaatgcgtaagatacttactgaacttgaataa

SEQ ID NO: 162896 - DNA, 231 bp, Enterobacter cloacae
atgcctggcaccgatcgttgccgttgccacgtaactacgggggcggttaacaacctcaaccgtaatttttctccctttgaacttgatggtgtaaaaagtctgtttgtcgctgcgaccatgctcgccatatttatcaaaatggcatttgagcgcggcggcgcatgctggcccgccgatgctgtctcccttgctacggttaatcagacgcacaggagccttcctgatggttga

SEQ ID NO: 162897 - DNA, 168 bp, Enterobacter cloacae
atggaaaaccagtcttactccccattttacagcgaactctccctcaatcccgatctcccaacccttgctgagcgctgcaaactgctcaccgaaatcctccttgactgcaatcgctccctcaaacgcagcccgtatgccgttgccttggtgcatacctggaagaaatga

SEQ ID NO: 162898 - DNA, 1458 bp, Enterobacter cloacae
atgaatcgaaaaatgactgcgttggttatcggaaatgcaagttatccggggcaggaattaaaaaatagcactaacgatgcagaagatatgtatacggcgcttagtgagtttggattctccgtaatccatttatccaatgcaacccaaagagaaatagatgaggcggtcaaatcattcagggataacttgaacagcaatgatataggccttttttatttcgctggtcacgggatgcagataaatggcgaaaactacattactgctgtagatactgattttggtaccgagattgatgcaaaatactcatcctacccattaaataaagttattgagataatggaaaaaagtggcaataaaaccaatattattatattggatgcttgccggaataatccttacgagcgagcgtggcatagaaccccagctcaaagaggtttagctccattgtttgcaccgaaaggaactattgtagcttttgcgacttccccaggtgaggtcgccggcgacggagtagggagaaatggttgttatactgaagctttacttaaacatataaaatcgccagatattccaattgaagaaatgtttaagagggtaagaaactctttagctgttcttacaaaaagtaaacagacatcttgggaacatacctctttatcaggcgattttttctttaacataagtttggttagctcaataggaaaatatggaaaggaatctattgccgataacttgtttaatgttaaagcaggcatcaggctccacggggtaataaccaaattaaaatctcatgactggtacattcaaactcctgccgcaagaagtattaagactgaagatattaatcaatcagatattgactcggtttttgttttaggtaggaatatttatcaggcagcttgtggaggagctcatggtgcgagcgaatttatatcttcgttccgtgataaaactcacgacgtcatagaggaattgagatctgccatattagatgggatgttatttgagattttctttaactcaaatggtgagttaagagataacttcaaaacttctaagttcaatagcgtatttgaacttcaaagatattcagaatttgatgaatcattcaaattcatatcagacatcttagcgatctaccctaataagtttcatataatcccaggtaaaaatagaaatgtttcagtagatgtggaaactataattaatgataaagatgaatacaaggtgataggtgtttatctgggcggtgtaaacctcctccggcaagatgaggactttggatactatgaagatgagggggttgtcccatatgaggcactaagaaagctagcatttgaaagacgcttgtcggaagaaatgctcataccaaatgctaaacttacaatcaattttgattttgcagctgatggtcaatcaaaaattttattcccgtatggccatacggtggcaaaataa

SEQ ID NO: 162899 - DNA, 1209 bp, Enterobacter cloacae
atgtactcactaaaaaatttacctcccttatatccaagacctactcctcttaaaggagttcgctggctttattctttgttttttattacatttctttgcataataatcacacgcatgtttggcaggcacattaaagattatgacttttggttcttcgctgtcggtatcccctttacatgctggtttgtaattggctctatctatgtcatagttcggatgctaaagaacataaaggcggacggctacgataagcgacgaaaaatgtggatcctcagtgaaacacaaaagagcagaagagcgtttcatgttttgtcagtctcattaatcaccggtcatcgagttaaagataaagatgaattgttaaatttattgattgcggataaatcaattatttccgcacaaagagacaggaccgggaatgagggcgtaagattaagtttgcttcctggctatgacaataatgagaatatttcagaaatgatttctgatatattttcgcaattgatttgtcagcttccgttgaaatatatctcatgtaattcatgcatatctgttttattggatgtgtcatcagtaatttccgctgggaatatcaatgcgatgtggcatgaatcatggcgggagtttggtggtttacactcttatgaattactggaaaagaaaggtccggtaattttagaggattggttaaacaccaaaaccaaagaaaattcacttcttctcgtcgtggcattacaaatagcaccaattcatgcggctaatagtgcagaaactgcagttgcattactacttggtaacaggcttatgcagggaacaataaacccaatagcaatacttcatcgtcccgatccctctccaactgaagagcttgaatccggcatgcggatggctgcatataatgttccgatcaaggatggtgtcatcaaacacctctggctgtctgggcttaatgatcaacaacatgccgaagtggtgataaatcaaaataaatcacctgcccatgcggttgaaaacgatactgtcatcaacctcgatagcgccatgggatgcgcaggagcggcagccccatggttagcaattgccgctgcctcagaaacggcgcagcaaacacagttaccccagatgattatcagcggtgacacgacacaggatgtgctgtggagcacgcttgttaccccaacgtttttcagacaggagatggatttgtga

SEQ ID NO: 162900 - DNA, 597 bp, Enterobacter cloacae
gtgattaaaacacatgactcaatcagaacgattcgcctttatggcatcctcggggctacctttggtcgcgagtttaaactctccgtatcttcaccgaaagaagccgtccgcgctctttgcgtcatccttcctggcttcgagcgttacctgaacaccagtaaacaacgcggtctgacctacgccgttttcagcggtaagcgtaacctgaataatgatgaaatagtcatggatcagagttcagctgacattcgcatagcacctctaattgttgggagtaagcgagggggtatcttccagaccatcctcggcgctgcgttagtcgcggcagcaatttggatgccaggcgtaggtatagctgcgagtaacattatgttccagatcggtggggcaatggccttgggcggcattgtgcagatgctctcgccgcagacaaccggactcgccagcaagcaatcagcggacaacaaggccagctatgcctttggtggagtaacaaacactacagctcaggggaatccggtaccacttctttatggccgccggcgaatcggcggtgcgattatttctgccgggatttatgtcgaagatcagcaataa

SEQ ID NO: 162901 - DNA, 648 bp, Enterobacter cloacae
atgaaactaaacaatgaaataaagggttttctaaaatggattctaatattaagccctaccataattggtggtttacttttggttaataatattttcagttgcgatttcaatctatggggtggcggtgggcaattattaacaggactaggattatcattttttttgttgagaagggtgatatggggtgagttcgattttaaagtcggcggggggatgttcgctctgggcgttttattaagtattatcggcgttttctcaagctctaaggctcttgatcgagactatgtgaatctgcgatctgatttaaaagacgcatttatcgatgcctccaataattgccaaggtgatcggcgatcctatctcaatgcggctcaagtttgtgctatggcaccggtgatggacttaatggatttgaattatcagttgatgaaggcgaagtatcttcctccaaccgcctcactgattgatggtgtgtaccattccaatgatggtgcgaaggttgatgcctgtttggtgagctatttttctttttccacacagtgcccaaatagtttcgtgacgttcaatcttaaccatcctgaaatgaagtcggttgaatcactaaaacagtgctcttcattttggcaatggattcaaagttgggtgtga

SEQ ID NO: 162902 - DNA, 462 bp, Enterobacter cloacae
atgagccgtttaacagcaatcatctgcgctgtcgttatgtgcctgctggtttccatgggctgggcgattaaccattaccgcgacaacgccatcgcttataaaaaccagcgcgataaagccactgagaagctcagcctggcaaacttcaccatcaaagacatgcagacccgacagcgagatgtggctgcgctggatgccaaatacaccggagaactggctgatgcgaaagaaaccattgagcgtttgcatagcgatgtcattgctggccgtaagcggctgcagctcaacgcacactgtcccgcgaacggagcgtccagcaccggcggcctgggcgatgcttcccgcacccgacttacttactccgctgaacgggattatttcaccctcagagagcgaatcgccacagtgacgaagcaggttggctaccttcaggaatacatcaaagggcagtgcttgaattga

SEQ ID NO: 162903 - DNA, 855 bp, Enterobacter cloacae
atgaggaaagctgggttagctacgaaagaagaagttgtatggtttgaaaaaacggtagagtacaaatttattgccgactgcttagaaagaggtatcattaaaagcataatgcccttaagcggttatcgcgaacaaatcggggatgcagttacagtattaaatgaagcttttaggaatttcaatttttatattattgaatttaaaaaagaacttgacgatgcagggttttatcaagaagttaacaaaaaatttattaagaaattagaagggtacaaatctgctaaaacttgttttaacaaaagcaataaccattcttcaaataaagggcattattttgttggtgctaaatatcaaggaggggaattccaattggttgcaagggattattttgcaccctctaggaaaaccattaaaactttaagtgaggtacttacttcagaaaatggaatgaagcaagaagaattctcactatatgtaagacgcttcacatctcataaaaaaacgaacaaatgttatcaatgtcgtgattcaggtaatggaggatctactgtcataacacctaatgggcctaatcctaatgggatacatggattagatgtggaaaaagatataagtgtggttgttgcgataaatccttctaataaagaatgtataacttttccattaactttggtgcaattgactgatggattgggaggcgcgcaagcagtaattatttctcctgatgtaggtggaggtagtggtgatggcgttgtagtaaataggcaggttatcttttatcatgcaaattactcagaccctgaactggatgaaattccacggcctgatgacatgcaagaagaaatactaggttag

SEQ ID NO: 162904 - DNA, 216 bp, Enterobacter cloacae
atgggtttctgggaaattgctggtaaaatagtcaaaggtgcagcaaacgcactcgaagagaaggctaacgagatgcacgctattaagttgcgccttgaaagcaagagcagcgaagatttgaagcgtatcattaaatctgaggggttttttggttcggccagtaattcggaaaaaagcattgcaatgaaaattctcaaagaacgtggcgaagtataa

SEQ ID NO: 162905 - DNA, 3837 bp, Enterobacter cloacae
atgcaatttgtaacaaacggacctgacattcctgagtctcttttgcaggctcatgaagaaggtcgggtggtatttttctgcggcgcgggcatctcataccccgcacgtctgccgggctttgaagggttggtcaaggaaatttaccgactgaatggaacaaaaccttcggaacttgaacaagctgctttggatcggggccagtatgatgccacattagatcttctggaacgtcgtttacccggtcagagaattgccgttagacgggcccttgtgagtgcgctgaaaccaaacacccgcatcaaaggtgccgttgatactcaggctgcgctgttacatctggcacgtaatcatgaagggtcgctaagactggtcacgacgaacttcgatcgtatttttcatgtagctgccaaacgtactcgtcagaccttccacgaatattcatctcctatgttacctattccaaagattagtcgatgggatggactggtctttttgcatggattgataccaaataagcctgatgatactgccctaaatcggttagttgttaccagtggcgatttcgggctggcatacttgactgaacgctgggctgcacgttttgtaagtgagttattccggaactatgtggtttgttttgtggggtatagtatcaatgaccctgtattacgctacatgatggatgctttagcggctgaccgtatgctgggtgaaatcaccccgcaggcctgggcattaggtgattgcgaaccaggacaggaagagcaaaaagccaatgagtggggggctaaaggtgttacccctattctctacaatgttcctgctggtagcatagatcattctgccttacataataccctgcatgcttgggcggaaacataccgtgatggggtccaggggaaagaagcgatagttgtcaaacatgctcccgcacggccacaggatacaacgagacaggataatttcgtcggacgcatgctttgggcattatccgataaatcaggattacccgcgaaacgcttcgctgattttgatcccgttccttcactggactggttgctggaaacattcagtcttgagaattttgggcatgaagatttgattcggtttggtgtccctcctcaggaagaggaggatacgaagcttcgttttagtctggtccgacgcccagcgtcttacacacgtgcgccttatatgtgtctggcatctcgaggtgtagccaatagccaatgggatgatgtgatgaatcacattttccgctggctgatacggcaccttgacgacccccgactgataatctggatagctgagcgtggagggcaccttcaagaacgttgcgtttttttgattcaggatagattggacagactagctacgcttgagcttgatggcaacaccgctgagctggatagaattagattaagctctcccaaagcagttcctggccccctaatgcgaattttatggaatttactactcagcgatcggctgaaaccaccgggacataatcctgatctatataactggtttaggcagcttaaaagggatggcttgtccactactatgcgttttaaattgcgtggattacttgcaccaaaggttttattgagaaagcccattcgctgggattacgacgtaagtgttcctcatacaccgcttagcatcaggcacttggtagactgggaactggttctcactgctgatcatgtgcactccactctgaatgaacaggattgtgacaactggaatatagctttacctttactgctgaatgattttcaacagcttttgcaggatgcactggatctgttgcatgaaatgggagaagctgatgcgtttaaagatcgttcatactgggatcttccgtctattaccccacactggcagaatcggggatatcatgattgggtgagtttaattgagttactgcgagattcatggctcgcagtaaaggctaatgatgtcccacgcgcgacaatcattgcaaatggatggtttgagctcccttatcctaccttcaaacgactggctctttttgccgctagccatgataactgcatcccttacgaagaatgggtcaaatggttgttaagcgatgattcctggtggctgtggtgtgttgagaccaagcgggaagttaatagattgtttgtgttacaaggtaagcatctgagcggatttgcgcaggagaatcttgaaacagcaatccttgcaggcccgccacgaaatttgtaccgggatgatcttgaagatggaagatgggaatatataactgatcgttctgtctggttacatctggctaaattaaaagcctctgacctaaatctgggagcagtagcaacgacacgactggaagaaatatccaacagatatccaacgtgggagttggctgacaacgaacgtgacgagttctctcactggatgagcgggacaggcgatccggattttgaggacagccgagagattgaatctgctcctcgaaaccgacatgagttggtcacatggttacaaaaaaaagaaccagaacaccagtctatgtacgaagatacctggcgagatgtttgccgtacacgattctttcatagcgcatatgcactttgcgaactggcgaaaagagatatctggctcactgagcgctggcgtgtagctctccaagcctgggcaactgatgatctggtttcacgctcgtggcattatattgcacccatagtccaggccatgccagatcattatctcaaggagattatccatagtgtggcatggtggatggaaacggcttctaagtttataaaccaccaccaagatatacttatcgggctctgtcgcagaatactggcattaccacttgaagctggtaccgatgcgaatattgtcatcaacggcaataaatcatacagtccggtcgatgctgcgataaatcatcccatcggacatgttactcaggttctggtgaacctatggttcaaacaagagccaaatgataacgagcaacttcctgattatcttaactctattttcagtgcgctttgtgatcctagtatcaagcgatttgttcatgggcgagtgttgctaagttcacagctcattgcacttttccgtgtagaccgcccttggacagaacaatatcttttaccattttttagctggactaatccctttgaagcgaagtctgtgtgggaaggctttctctggtcgcctcgcctttaccaaccattgatgattgcctttaagccccaatgcctcgatagcgcaaaccactatgcagaacttggtgatcatcgtcagcaatatgcaactttcttaacatacgcagcacttggcccgacagcagattacactacggaagagtttcgtgccgcttttgaagcactcccgccagaaggtcttgaacaatgtgctctggcactctatcaagctcaggaaggggctgcggacaagagagaggattattggaaaaatagagtccttccgttgtggaaacacatctggccaaaatctcgtaatctgcttacttcgcaaatgaccgtttcactggcccggctaataattgctaccggcgatgaatttccttcggctttgaataacgtacttaattggctagtacctgttgaacacccatactacttagtgcatcgtctgcatgaatccggcctatgtacccgttttcctgtcgaagcaacattgctactgggatccatccttactgatgataatcggcagtggttatccaatgaatatggtgcttgcctgaatgacattatccaggcagaaccaaaacttgagcaagacgcacaatattcacgtctaagagactatttcaggaagaacagtgcctga

SEQ ID NO: 162906 - DNA, 294 bp, Enterobacter cloacae
atgttaccaaattcaatagcaagttttgttaggcagttaattactgagacccaggacagtgtcgttaaatgggattattattcagatgaagataaagtaatgactgagtatcaaggaatgcgcgttgcaatagattatgcttttgactataaccaagaagtaggtgtgcagcgcttgaatattatccaaagtgatggaaggcattttttctttgcggtagctgaacacgatgccggttatatgttattaaaacaactctacaatgaagctcaggcatctgattttaaattctaa

SEQ ID NO: 162907 - DNA, 591 bp, Enterobacter cloacae
atgtgggaaaaaattaaagataattggattagatgtttatatgttttattatgtggactgatcgtttttctttgttatctatatcagtctgacgtaataagtatcagtgagaatatgaatttgttttcatattacgcatctgttgcgacagttatagcattattgatttcaataatggagatattgtataacgttagcataacgaaaagtataaaggctcggtctatgttcaatttgacgagattcaaggatgcgacagggttgagttatgctcatgaatgtgtttcatattatgatcagtgtctaagtgatcttgctacgaaaaaatattcacttttagctgcaaatttcactatagcaaagaaattacatataagtcttgctaatcactttatgtctaaggaagacaaaaaagaatttgatgagaaagtggcttcattaaacgaattggaaatgaaaataatagcgacgcgtcatatttcgccgtcgaaccctttaggtaatgcccaaattaaagaaatgcaagaggcattactcactgtaaaacaagggtttgaaaccaaatatacattcaagacatctgaggattga

SEQ ID NO: 162908 - DNA, 468 bp, Enterobacter cloacae
atggtcacggcgtctactggtatgcggtggggtattaatatggacaatacttatttttacagcgcggaaacaaatgcgttttatgtttcttcgcttatatcagattacgagcgagccggtactttacctgacgatattagtgaaatatcgaatcaatggtatgaatatcttatcagtggtcaggccatggggaaggtaattactccagatgaagacggaaggcccgtattgtctgagcctgagccccccacgccgcaggagatgagggagattgctgaaggggaaaagtccaggcttattcgggaggctggtgaagcaatagcggttttgcaggacgctgatgagcttggtatggctacagaggatgagttatctgctctcactcgctggaagcgttaccgtgtgatattaaaccggctggatattagcaccgcaccggatatcgagtggcctgaaaaacctgactga

SEQ ID NO: 162909 - DNA, 2322 bp, Enterobacter cloacae
atggatgagaaggataatcatttatgttacctaacccgtagggaatttccattgagaaattttgaggttaaagttgtcaatgaaaaaaaatggtataatcctacgcaaaggttctatttaaaagatttgtattcaatattatttgatggtgatataaatgatgatatagaaagaaaattgtttggcccaatagatgataacggttcgaaggctgttcgggcttttttgactgatgataaagggcaatggcattataactttcaggacttatttatttatctagatgcgcaaaaattacgaacacccaaaggtttggaatggattaaaactcagtatcatggtttaagccaagaaaaacttatggttgagatgcaatcactcaggactatgcattgtacattgtgggcagagggtgtgagggagtttgtctcagccgaagattcagatgttaagttcattgtctcagatcatcctataactatctataattacgcttgtcctcccgactccgatgcatgtctctttccaaaagatcctgatatctccttgaagggttctcaaactatatttcctctggataaaaatcggtgtttgattttaactaatttagaatatgcacaatcgccagaaaatgtgaacccactggaacaacgtactaatgctacacgcctgcgtcaaagcatggttaatactattaatttcatcaatactcgcaagctaactagagagcaagtaattcaaattaactatattataaaagcaagatcaagagaatgtatcgcagcgggaagagaagaatggctattcccagaagatgatgttaaatgtgattggtctgaattaaaatacactctcctgccaaaattgagtgatttatttggatttgggggggagatgattgttaaatttgacgatggctcagtttactatcaggatgaattcggcagaacaactcaaaaaaatgaatttctaagaaaagaaacagtcgagttacatttgggttgtaatgatccttgtggatgcggaagcggcaagaaatataaaaaatgctgcaaagatataccaattgaaatgcgaacaacttgggattgtcttagtataagagaaaggaatcttattttttgccaatgtataaaggatgttttgaggcttaatgacggaaagttttgggatgatgttagaaaggagttgttagataaacaaattcaggaaatatatggattttatgaattcttatggccgaaggataccgatatttattcgttgctaccaaaaccagatgggaaaagtcgcgcattatattcgggactgttggatataagatcaatattctctaacgcggtaccaatgtcttcattttttgacgagtttttgatccaaagccctttaactaatccactaaacattaagcccgagtttaatcctattaatcaccctgaggagtacaaatatcaagcgttaaaagaatttttgtttatgcttgagttggagccttttattgagaaaggttttgttaatgttattccagaccctactgaatttgatattcacttgaagttggaaatgatgaggatggtagagcagcgaagacataagcaaaatgtatataatggaactgaacttcaatttcatcatagtttggcaattcaagatgtattgaattcctcggtgggagtgccaaaggaagttaaaattaattatattgctcaggagttgaatattgatttaaaagaggctgagctgcgttttaatgaatttgagaaggcttctgaagattcaccgttaatgatgctgcaagatacatcattgcaggggaatgggcagattatgtttaacaagatggagcctaattatgaaatgtcattatttattgcgcaggtgacaggttctgttgtgctgagcgatagttttgcacgatgggagcaattaatgactgctcagcatcgcgaattaggaatggtatgtcttccatggggagatatgcttcaagaacttaataagttaccaattgatgttgcctacatggaatcgtttttcaaatcacaggggttatttgcgaatgtcagaagtgtgatccggtctttggttcgtatgttagatgaacaggactatgatgagcgacatttatccgttactaaaaaaatgattaatgaagtaatgacaagtattggtcagtctggtaagtcattaattatgagggatctaaaaatattatgtcctaaacatggttttcacgatgacaatgttcagcgtttattggtaagttcaagttgtttaaaatataagcggtatgtgacggcaatttttggggttgatatttaa

SEQ ID NO: 162910 - DNA, 456 bp, Enterobacter cloacae
atgagtgaaattaagccctttgacgaccggctcaatggtctgattgctgccctgtcaccggctgcgcgccgtaagctggcaggagagatagcaaaggagctgcgcaagtcgcaacagcaacgtatcaagcggcagaaagccccggacggctcaccgtatcaggcgcgaaagcgtcagccgctcagggcaaaaaacgggcggattaaacgggcgatgttccagaagctgcgcacaagccggtacatgaaagccactggccgcgaaaacagcgcggtggtggaattcaccggcaaagtgcagcgtattgcgcaagtccatcagtacggactcaaagaccggccaaatatgcatgctcaggacgtgcaatacgcagaacgccaactgctcggattcagtagagagaataaggagctcatcgatatgcttatgattagctatctaaacaggtatcactaa

SEQ ID NO: 162911 - DNA, 1734 bp, Enterobacter cloacae
atgaactttcaagctgaaccagttacaataaacacattgctgtctgttaataagagatatttcatacctaggtatcaacgagatttttcatggacaaaggaaaatatagatgaattatggtccgatctcgttagtagcattgaaaagaatgacaacaacacttttacctgtgaagaatatttcattgggacactagttttagctggtcgagatgatagctttgaagttgaggttgtggatggccagcaacgcctttcggtaattacaatgtttatctccgcaatttgtcgtgaattatatacatctggttcggagagagctgccacatcaacttttgaaacattcattaaaggtgtagatagacaaggaaacagctttacaaaattagataagagatctcagactaatttcttcagtttgttaattcaagatttggtacaacataattgcgaagcatcttccgaggaggatgcattagttaaaagcgcttacattcaaataaccaagcttataagtaaaccgtcattaaaaaagacatttaatttttcagggcgctattctgatacagactatataaatactctcaatgctcttatagacctaatagctgatcatcttaaagtcataagagtaaatgtattaaataatgacgatgcatatactatatttgagatattgaacgcaaggggtattaatctaagccctgtagatttaataaaaaacaaaatcctacaagaatgggatggaacatatccaattgactttgcaaaaacgaaatggaatgaaatcatttctcttttatcatctcgtgaagtttctgcggggcttgaggaatactcaattcatcactggaccacaaaatttgcttacacaagcaagagaaatttgtataaagcatttaaaaaacaatgggttcttggaaatataactgccgatgtatatttaaacgaacttcatgaagattgccaaatatatataaaaatcatatcacctcaattaggtgattggcctcaagtagatcaacgagcaatatataattctttgaccgcattaagaatatttaatgttagtatcatgcgttcatttcttctctcattatttaaagctagaaatagccaaatcattacacagcgagttttgattcaaacattgagtaaaatagaaaatttccatttcatgttcaatgcaatatgtagcctacgaccgtcaggaatagaaggactatatgctaagtgtgctcgtaatctttactatgcagaaacaagaagagatgcaactttagtcattgatgaattaacgaatacgcttgagcaaaaaagaccaacaagagaaagctttatcagtaaatttaaacaactccaattcttaaatgaaaacacaattaataagaaactaatacaatacattttcacaaaaatggaaagattgttaagagaaaatatagagtttgaaccaaatgatttgtcattagaacatatttcttcccaggtcgatacaaacattagctcccaaataaaaggctctattggtaaccttttaccacttggacaagatataaatagtagagcgaataccagaacctttacggcaaaaaaagcaatttatcggaactctgattatagaatagtggaaagtttccttttaaacaatcctcagtctacttgggacgagcaggacataaatagaagaaccatgaatttagctgaaatgtcctatgatgtgatctggcattga

SEQ ID NO: 162912 - DNA, 1101 bp, Enterobacter cloacae
atgaagattaagttagctcacgttcaggttttgcctaagatgtcaggtgcccaacaaatttcttttgatataatgaaatctttagattcttttacttatgaaaagtttctaatttgcgggtctggggctggagagaaagattttatcaaaacctttgaagatataggtgtaactgtaatattaatacctaaactacaaaggaatattagtttaaaagacataagggcattcattgagctctaccggacttttaaaaaatataaatttgatattgtacatacaaactcgactaagccaggcataattgcaaggatagcagcgaagtgcgcgggagtaaaaaaaatcattcataccgtacatggtatcgctttccattcacatgttaagcagtatgtaagatacatctactgggctatcgaatatatatcatgtttttttggcgatattaacgtcttagtcaataattattataagaagtattaccctggggtaaataatgttattgtttataatggtgtcgacttttctaattttaaaaaaatagaaaacaaaaaaataaaagataaaatccatttcgcttatttagcacgtcttgatgagcaaaaaaacccacttgaattcattgaagcaattgataaattaaagaaaatggaccccggtgttttacgtaaggcaaagttttctttagcaggggacggagatttagctttggaatgtcggtcacttatcaaaaaacttaatcttgaaaaagaagtgtcaatgttaggttggataagggacaaaagttcattttataacgatattgatgttttatgtcagccatcacgttgggaagcctttggactagtttttgcagaggcagcattttttcatataccagctatatctcgaaaagttgagggaatacccgagatagttatcgataaatacaccggttacttatattctgagggtgcggatgatttggcccttctaatgaaaaaaattattgacgaacctgaagtaattaactctcttggtaaaaatgcttttgatcatgcaatgaaaaattttacattgcaaaaaatggtgtgcttatatcaagagctttacagacaataa

SEQ ID NO: 162913 - DNA, 585 bp, Enterobacter cloacae
atgttcactgtggaatatctgaaatcgattaaatcaagagagcctatattgtccagaattatgaaaaaggttgagattcgacctgaaacagggtgctggatattcaaaggctcgaaagatagatgcggttatggatgcattaaaattggcaagcaccagctcggggcgcataaggttgcttatttgatgcttgttggggattacgaccaaaagaaccttgagttgatgcatcgttgtgacaacccgtcttgtgttaacccgtctcatttatcacctggaacacataaagagaacatggatgactgcctcaggaaagggaggcacacatcgcagaggggtgtttttattgaacctctttacggtcgtcaggctgagtatgcaagttcaaagctaataatgacgtgttcgccaagaaaaatggcgactacgaataaagaaaaaacatatgcaggtagtttttgcaaagtgcataccgacaacaatttaagggttacctctaacggcgcttgttgcttttgccaggcacaatatcaaaaaagcaagagaaccaactgcgataccaaatcaatgaagtgcattttctaa

SEQ ID NO: 162914 - DNA, 207 bp, Enterobacter cloacae
atgtccgacatctaccaaatcactatcaccaccacatctaaagagaccttcactggtctgatgaaacgtagtcagcctgaaattgttaacgggttcgtagccctggcgactgacacaggtgagtggcgttacttccggccggatagcgttgagcaattccactttgtgccggtggcggaagatcaggcagagaaagcagcggagtaa

SEQ ID NO: 162915 - DNA, 897 bp, Enterobacter cloacae
atgttccgggatatcgaagagcggtatctcggcatcaagcgcgcgctgaaatccctgttcgaccagcgccttatcgggcgagagcgagaggtaaacagccataactggcatttcatctgccacgacaatggcgcggacttgcggctctaccaggtcaacgccggcaagttcatctacgacatgtcggcgcgggaactggctgacctgctggaagcagtgcagggcattctcgacgattacctgctggaaggcggagaacaaaacctgtgggcgatggattacgtcgtcgcagaagttcagcgcggcacgctggaggccttcaacaacctctcgcagcagtcgcaggtgtacgccagtcagacgacgctgcagcagcttttaaacagtcccggttatcttaatcaggtggcgtctgccaggctgacaacgtttagtgactggaaggttatcagcgacgccgcacgcggcgatctgaccaacatcatcaccgatgcggtagcgcgcggcgttaatcctcgtgagactgccagcgtcatcagtaagcgtctcgatgtgtcaatgtcgaaggccaagaccatagctcagactgagcaggtcggcgtactgcggcaggcacaatggaacgaaactgattgggctgctgaccggcttgggttgaataccggtctgctgtggctgtcagcgcttaagcagaccaccagatggtggcacgccgctgaacacggaaaggtaaaaacgacagattgggtcagggaattttactcgcgggatggtaacaaatatcactgctactgcggccagattccggtgttgctcaacgacgacggcagcatcttcaacgagggtctggctgataagctggcagccgaacgtaaacaatgggctaaagcagcctga

SEQ ID NO: 162916 - DNA, 318 bp, Enterobacter cloacae
atgcaaaagttaagaatcgaaaaaccgggctgctggggcacgatcgatggcgtattccagcaactgcctgtaggtcacgagttcatcgcggcatccgttccgccagcgttcgcgggccgggcctcagtcgtcggtgaagttggtgagcagcagcttgaagtgtcgactccaggcggcaaaaatcctgagcagtctgagcagtctgagcagtctgagcagtctgagcagtctgagcagtctgagcagtctgagcagtctgagcagtctgagcagtctgagcaggcagacgttaccgctaaaacgaaaaaggcgaaataa

SEQ ID NO: 162917 - DNA, 1851 bp, Enterobacter cloacae
atggctacgcaacctacaaacctgcctgttccaagcgaatcgccacgcgatctgaagtttaacgccggtaaatttgaccaagtaattacttcatcagaaatattctatgaagatagatttgggaacaagcactacacagtagatggtaatacgtggttagctcagcaggctatatcagagtttgggtatatcactatcgatagcttcgaagaaggagcgactctaacgcttgcaaaccaagttttaaggttaaaggcaagcggggaatactatcggtgggatggatcattcctccctgacgggaaaatagttccccagggttcaactccagactcaactggaggaattggtgttgggaaatggctttcagtaggcgatgcgacgcttaggcctttagttaagcaatcagtcaatccaataaatgatcaaggtagttttctttctgataataacattaagatttccactcttacatcatcattaaatacttcaagtatatttttaataccatcttattatcagttgaatggtgtgggatttgcgctaggaaaggaaagcggacctgcaggaagggttatttctaaaactggaaatgcaacaaccacactttcaaatcaagataaagcgcctgatactagggacgcaattattgctattgatcctcaatgggtaaatggtagatggccacaggaaacattaatcaagaatatatctctttatggtgactcttcatcacccaatgctgttggattgtggatctttcagggcagctatttttcaatagaaaatctcagcacaggatactgcaagaatgcaatctatattgcagactcatgggtaagtaactttaagggatgtaaggctttaaatggttcttttgttgttagcagaggaacgagtcagcgttgggaagggtgctttgctaatggagaagcaggtactagaggtgcatattcattcaacgacttaacttactcaactttgatttcatgtgcagcagatcactcccctagaactgcatattttttcaataccggttgtgaaatgacgctggttagttgcggttctgagtttgcacaggccactgatactggacttggatcaatgatagcagggcttgacaacaacaagttgagcatcattggttacaagggagttccgacagcaaaccagacaactccgctgattagcataggaaataatagctcctactttattcagaactgggagagtaacagcaacagctatccaaataccatcgatatttctattaacggggataatagcgtcatcgtcgttgagaatagtatcttttcaggcggacgattcttgccagttgttcagttcagaggtgatcacccaacaagtttcgttattgttaagtggaagggcaatgaatatatttataaatctccaactggtggcggcacagtaacagctccagagtataagtatagaagctcaactttcactccagcattgaaagtggacaatgctaccagcaatattacctattcacttgcggcagggaattacaaaaaaaatggcaacgttataaccgtcaactttgaattatctgttgccacgcttggaacggcatctagtaccggaatagtgagtgtggatctatcgtctattccatatgcgccagcagataatgtttcagtagccattcaggttgctaacgcagcgtcatacaccagctctggaggaggtgatctgaactcaggtgctaaccaggtattcccggtatcaagctcagccgtaaacatgagggtgtctaacctgcaagctggaacaaggataaagggatctgtaacatttggcgtgaatggcacatcgtggaactaa

SEQ ID NO: 162918 - DNA, 1506 bp, Enterobacter cloacae
atgaaaaataacattgggcaaaatcaggttcgcgaaatcaagttatacaaaagcaggtatggtgcatcatttttaatcacgctactagctttatgctttttatatatattaccgatcattcttgccgacaggatgtacggcgacgacatcctaaggtctcaacaagggtatactaactgggatataaatggccgacctcttgccgatctgatgatgaagggactttttttatttggagacaacattgctgatatttcaccactcccgcttattctgggtgtgattttgttctcagcgtcatctttatattatgccagaacaaacctgtctgagtttagcccatacacatcagcagtaatcatgtttttcatcattgcaaatccattcttcctggaaaatctttcatataagtttgactctctgcctatgcttgtttctgtggcagttctgttcattccatttttccatttcaaaagcggggtgtcatggtttgcagcgtcggtctcggcaattttggtatcattatgtatataccaggcatcaataggattttttgttgctcttagcataatagaattcatgagaggggtgtttgtttctaatgctagcaaattctctgaattaaaaagagcctctcttcgccttacacaactattgattgcctatgcaatatatagtccaatatcaaagcattacgtatggggaagctataacataaagcattctgagattgttggcttcaacaaagaaggtatagttgatgcagcaaacaatgctgtaatgtaccttggtaaaatatctttaatggcctctcaggctaagtggattgtttgtgctgttcttgtcgctgtggttttttacacattaagaataactattacaagcattaaaaataatggttactcagcgttttttaacgcttttataatcacctttagccccgtcatcttactttttgtttcatttgctcacttgagcttgcttaaatatccggtaactgataacagagtgcttgtttctttcagtggtgtgatgttatttgcagcgatatcatcaatgagcattagcaagtcaaaacaaacacttcctgtgatagcttttattttatgcttgttcccatttgtgttttctttttcttatggatcagctcttaaataccaggcagaatatgacaaggtgctttcatcagagttagctcgagagatatcaatcatagaccctgacgcaaaagcaaaggtgtttatacttgggactcagccctcatccgttcagagagcgaatataatcaagagatttccagcaattgaaaccctcgtcccgctatactactctggtggttggtggggtacgttcatgattcacatgtacggggttaaaaatgagttcactggcactaaagatttagaccaggtttgtgatatgaaacttaggtatagaaatcagacattttctttattctcgcttgagaacaaaattgtcgtcagtttcatcagagagaaatgttaa

SEQ ID NO: 162919 - DNA, 504 bp, Enterobacter cloacae
atgaaactaccaaccacgaagcaggaactccttgacaaggttcgcgccagccaccgaaagctcggggtagaagctgccaccattcccgccagccactaccggcacacggccatgatctggcaggagccgcgcctgcataccaacgctgcgatggtcctggtggacgtcatcgtctggaacacgatgatcctgcagttcgcgcatgatcggacgcctggaccttcggcgtccttttactcgccgagtgcgatggcgcagcgggccgagcgtctttctgccggcttccagcgccgtttcgcgggcagagaccttcgcgagctggaagccatgctcacggagggacaggaccgggtgctcgactgcgtggcgcaccattcgaacgcctcgcttttcgatcccgcgttgagcccgatgaagaccctcgggcgcaagatccagttcttcacctccaccgcctacgacgacgcgctgtcgaggctgcgccagtggaagcaggtgctgtag

SEQ ID NO: 162920 - DNA, 846 bp, Enterobacter cloacae
gtgggctactgcttcgcagccgccgtcaccgccgaggacgcgcttaaggccaaggccatttcctgggtcatggtgggcggtctcgcgggcgccatcatcgggccgcagttggtgatcttcacgcgcgatgcggtagcgggcacgccctacgttggcagcttcctcagccaggcgctgctgccgctgatcgccttgccgatcctgctgatgctgcgcacgccgagccagacccaggccgaagcagtcgccgatagcggtcggacggtgctgcagctcttggcgatgccgcgctatctgctggccgtggctgcgggcgtggtgtcctatggggtgatggcgttcgtgatgacggccgcgccggtggcgatggtcaaccacgggcattcggtggacaacgccgccctaggaatacagtggcacctgctggcgatgttcgggccgagctttttcacaggacgactgatggtgcgctacggcaaggagcgcgtgaccgccgtcggcatggtgctgctcgccgcctccggggtggtggccctgggcgggctcggcctgtcccacttctggggctcgctggcgctgctgggcatcggctggaacttcagcttcatcggcgcgacggcgatggtcaccgattgccacaccccggccgagcgcagcaaggcgcagggcatgaacgatttcttcgtcttcgccgccacggcggccgtgtcgttcctcgcgggatcgatcctgcacagctcgggctggcaggcggtcaactggatgatcttcccggccctggcgctgatcctggtgccgctgctgtggcaggccgcgcgaaagccggcgctgccagctccggtctga

SEQ ID NO: 162921 - DNA, 1455 bp, Enterobacter cloacae
atgaacacgacaacagcggcttccgcacaacagccctccgtcatctatgatctagtcacgataggttccggttcggcggctagagccgcagcgaacgaagcacgtaggctcgacaaaacagtcgccatgatcgaacaggggttggcaggagggacctgtctcaatgtaggatgcgttccttcaaagacgttgcttgcggcggcttctgctcgcatgtctgctgcgcatgggaagttcccaggtatagcgacctcggccgggcctgtcgacttgtctttgcttgtcagagataaagatcaaatgatcgggcacttccggcagtctttccatgtacaagcacccaaggatgcaggtattgcggtatttcgcggcaaggcgacctttgtagcgtcagatgagccagatatcgtagcgctcgtcgtcgcggactcagacggaaacacaaacctggtgtacgccaagcaggtactgatcgccagtggggcagcgccattcattccttccattcctggcctcagtgaggtggactttctcacttccggctcggccatgtcccttgagcaggtgcctgagtccatgctggtcgtcggcggcaatgcgatcggtctggagcaaggtcaattgttcgctcgactgggcagcaaggttgaagtggtcgagatagctcctcgaattgcaccgttcgaggatcccgcgatttctgcggcactggagcaggcgctgtcagcggagggcatcatgttccatactggcgccaatctgacaaacgtcgtaccacacgagagcggggtgcttgcaactgtcgtcgccgaaggacgtactcagcaaattttcgcccataagattctcatagcgacggggcgccgtccggcaactgaaggactcaacttggatgctgtcaatgtgtccaggggcgatcgaggcgaaataattgtggacgaacatctgcgaacctcaaatcctcgcatctgggcagcgggcgatgtcactggtatggctcaattagtgtatgtcgctagtgcgcaggggaccgtggccgcgagcaatgctctgggcaacgagcctcggtccctagactacaccgccttgccccgcgtcattttcacgtcgcccgagatggctgctgtcggcatgactcctatgcaggctgaggcggcccaaattgcctatgatgttcgtgaaattccggtttcctttgttctacgtgctattgtaagtcgtcacgacaaagggataatcaagatgatatccgagcgtgagacaggaaggattctgggtattcatatggtaggcgaatctgctggagaggttattgcagctgcaacctatattatctccgcaggacttacggttgaccaacttgcaaaacagtggtctccgtacttcactatggcggagtcgcttaaaaacgtagcaagcagtgcgccaactttggaagattcggctaatggctaa

SEQ ID NO: 162922 - DNA, 585 bp, Enterobacter cloacae
atgaataacatcatggacaaaaaagaacagttagtcgcaactgcctttaaccttttttataagtacggcattcatgctgttggcatcaatcgggtacttgaagagtccggcattgccaagaaaacgctatataaccatttctccagcaaggaagatctaattgctgcgaccgtcgaatattgtgatcagcagtatttctcttggctcgatttgcgtttgcacgaagcgacgccaggtagggacgccttgtatgccatgcttgatgcttttgacgatctgtttcagggtctcgatcaatccaagccacttttcttgggttgttatttcattaatgtcagcgccgaattcagcaatccggatcatgatatacataagctttgcgcccgaaacaaagaggctatgctgcgatggatcacacaccacacttcacttgtcataacgtccagagaatcgatagttcaaatctctgaaacaattgctatgttgcttgaaggggcgattattcaggctcacgttcttggagatctgcacgctgctcgcaaagccaaagccgtggttaaactgcttcttgataaatctaactaa

SEQ ID NO: 162923 - DNA, 1182 bp, Enterobacter cloacae
atgaccgaccagagcatcacgcgccgaaacatcggcgttctcaccgccgcgcaggcgctcggcggcgccagcgcgcccatcgtgatgtcgctgggtgggctggtcggccagcagcttgccaagaattcggcctggatcaccttgcccgtgagtctgttcggcctgggtcttgccatcggcaccttgcctgccgccttcatcatgcggcaccatggccgccgcaacggatacgtggtgggggtcggcttcggcgtggcctcgggcctgatcgccgcgttgggcatcatgctggcctcgttctggatcttctgcgccggcaccttcctggcgggcttctacggcgcgtatgtgcagagctaccgcttcgcagccgccgacaccgccgaggacgcgcttaaggccaaggccatttcctgggtcatggtgggcggtctcgcgggcgccatcatcgggccgcagttggtgatcttcacgcgcgatgcggtagcgggcacgccctacgttggcagcttcctcagccaggcgctgctgccgctgatcgccttgccgatcctgctgatgctgcgcacgccgagccagacccaggccgaagcagtcgccgatagcggtcggacggtgctgcagctcttggcgatgccgcgctatctgctggccgtggctgcgggcgtggtgtcctatggggtgatggcgttcgtgatgacggccgcgccggtggcgatggtcaaccacgggcattcggtggacaacgccgccctaggaatacagtggcacctgctggcgatgttcgggccgagcttcttcaccgggcgactgatggtgcgctacggcaaggagcgcgtgaccgccgtcggcatggtgctgctcgccgcctccggggtggtggccctgggcgggctcggcctgtcccacttctggggctcgctggcgctgttgggcatcggctggaatttgagtttcatcggcgccacggcgatggtcaccgactgccacaccccggccgagcggggcaaggcgcagggcatgaacgacttcttcgtcttcgccgccacggcggccgtgtcgttcctcgcggggtcgatcctgcacagctcgggctggcaagcggtcaactggatgatcttcccggccttggcgctgatcttggtgccgctgctgtggcaggggcggtacggttgcaactga

SEQ ID NO: 162924 - DNA, 387 bp, Enterobacter cloacae
atgaggatcggtgaacttgcgcgcttgacgggcacccccccggagaacattcggttctacgagcgggagggcctgttgcaagccccggagcggtcacgcaacaactatcggcgctatggcccggcccatgtcgaacggcttcacctgattcgcaactaccgtgcctcgggaatcggcctggatgacgtgcgccgcctactgggttgggcacatgaggggttcctggaacctgagctgctaaggcaggctgtccaaggccatctcgcctgtgttgaggaacgcatggagcaactgatccaggtgaaagagcacctgctcgcattggccctgcacggtgctgcttccgccggggcttccgaggatggaccggctcgcgatggttcgtga

SEQ ID NO: 162925 - DNA, 1506 bp, Enterobacter cloacae
atgaaaacatctttcgcattcacacgacccgccaggacgctggcgccgctcgccctcgcggcggcgctggctggctgctccatggcaccgaagtatgaccggcccgcagcgccgatcgacacggcctatccctcgggcgcggcctatgtggaactggcggccgcgacgcccgacgacgcgatcacggccgagatcggttggcgggacttcttccgcgacccgctgctgcagcagttgatcggcatttcgctggagaacaaccgcgacatgcacaaagccgcgctcaacgtggaggcggctcaggcgctgtaccgtatccagcgtgccgagatgctgccgaacctgggcgtttccgcccgcggcgcgtcagagcgcgtaccggccgacctcagtaccacggggcaaagcgacgtgctccggcgctacgacgtggccggggtgacggccgcctgggagctggacctgtggggccgcatccgcagcctcaacgaccgggcgctggcgtcctacctggccctcgacgagacccgcatcgccacgcagatgagcctggtgtccgaggtggccagcgcctacctcacgctgcgcgccgaccaggaactgctgcgcctgacgagcgacaccctcgccacacagaagcgctcctatgacctgaccacccaactggtggaagcgggaaattccacgcagctcgacctgcgccgcgcggagatcgcgctgcgcaccgccgaggccaaccgcgccgcctacacgcggcaggcggccaaggaccgcaacgcgctggtgctgctgctgggccagccgctgacgccggagctgtcccggcagcttgacgaggccgtggcgctgccggacgacatcgtgccgaccgacctgccgagcggcctgccgtccgaactgctcgcgcgtcggccggacatccgcgccgccgagcagatgctgatcggcgccaacgccaacatcggcgcggcgcgggccgcgttcttcccgacgattagcctcacgggctcggcgggcacggccagcgcttcgctggacggcctgttcgattcgggctcgcgggcctggagcttcctgccgcagatcacgctgcccatcttccgcggcggcgcgttgcgagccaatctggacgtggcacaggtacaaaagaggatcgaaatcgccaactacgagaagtctatccaggcggcctttgctgaggtggctgacggcttggcgggcaagcgcacgcttgatgagcagatccgctcggagcagctcctggtagcggctagccagaaagcctaccaactagccgagcaacgcttccaggaaggcgtggacgacaacctcaccttgctcgatgcgcaacgcacacagtacggtgcgcagcagaccctggtgcgcacgcgcctgacgcggctgaacaacctcatccacctctacaaggcgctgggtggcggctggactgagcacacggtgcaatcgggcgccaccgggcaaccatccgcccggtcgccgggataa

SEQ ID NO: 162926 - DNA, 3177 bp, Enterobacter cloacae
atgaatttcccccgcttcttcatcaaccggccgatcttcgccatcgtcctgtcggtgctgatgctgatcgcgggcgcgatcagctatttccagctccccctgagcgagtacccccaggtcacgccgccgacggtgcaggtcaccgccagctatcccggcgccaacccgcaggtgatcgccgacaccgtggcatcgccgctggagcaggcggtcaacggcgtggaaggcatgatgtacatgcagtcccagatgtccacggacgggcggatggtgctgaccatctcgttcgagcagcacatcgaccccgacgtcgcgcagatccaggtgcagaaccgcgtctcacgcgcgctgccccggttgccgcccgaggtccagcgcatcggcgtggtcaccgacaagaccgcgcccgatattctcatggtggtgcatatgctctcgccgggggaccgctacgacccgctgtacgtgtccaactacgcgatgctcaacgtgcgcgacgaactggcgcgcctgccgggcatcgccaacgtgatcatcggcggtgaaggcgagtacgcaatgcgcgtctggctcgaccccgagaaggtcgcatcgcggggcatgaccgccagcgatgtggtcgccgccatccgcgagcagaacgtgcaggtcgcagccggctcgatcggccagcagccgaatgcgtcggccgccttccaggtcagcgtcaatgcgctggggcgcctgaccaccgaagagcagttcggcgacatcgtgatcaaggccggcgccaacggccaggtgacccgcctgcgcgacgtcgcacgcctggaactgggctcggacaactacaccatgcgcggccagctcgacggcgagaacgcggtcggcctgcaaatcctgatgacgcccggctccaatgccctggacacgtccagcgcggtgcgcgcgacgatggagcggctgcaggccaagttccccgaaggcatcgagtacaagatcgcctacgaccccacagtcttcgtgcgcgcctcgctccagtccgtcgccgtcacgctgctggaggccatcctcctggtggtgatcgtggtggtgctgttcctgcaatcttggcgcgcgtcgatcattccactgatcgccgtgccggtctcgctggtcggcacgttcgcggtgatgcacatgttcggcttctcgctgaacacgctgtcgctgtttggcctcgtgctctccatcggcatcgtggtggatgacgccatcgtggtggtggagaacgtggagcgccacatggcgctgggcgaatcgcccaaggatgcggcgcgcaaggcgatggatgaagtgactggcccgatcctggccatcacctcggtgctggcagcggtcttcatcccctcggcgttcctgtcggggctgcagggcgagttctatcgccagttcgcgctgaccatcgcgttctcgaccatcctgtcggcgatcaactcgcttacgctgtcgccagcgctggccgccatcctgctcaagccgcaccacggcgcggccaagcccgatcgtctcacgcgcatcatcgacggcgtgttcggcggcttcttccgccgcttcaaccgcttcttcgatcgcgcctcgaattcctacgtcgggggcgtgcgccgcgcggtgcgcggcagcgccatcgtgctgctgctctacgtcggcttcctgggcctgacctggctgggcttccacaaggtgcctgcgggcttcgtgccggcccaggacaagtactatctcgtgggcatcgcccagcttccgaccggcgcctcgctggatcgcaccgaggcggtcgtcaaggagatgaccaagatcgcactggctgagccgggcgtcgagagcgtggtggccttcccgggcctgtcggtcaatggaccggtgaaccagccgaacaccgcgctgatgttcgccatgctcaagcccttcgatgagcgcaaggacccgtcgctgtcggccttcgccatccagggcaagctcatgggcaagttcagccagatcccggacggcttcgttggcatcttcccgccgccgccggtgccgggcctgggttcgatgggcggcttcaagctgcagatcgaggaccgggcgggcctgggtcccgaggcgcttgcgcaggcacagggccagatcatgggcaaggccatgcaggcgcccgagctggcgaacatgctcgccagcttccagaccaatgcgccgcagttgcaggtggacatcgaccgggtgaaggccaagtcgcagggcgtatcgctgaccgaggtgttcgacaccctgcaggtcaaccttggctcgctctacgtcaacgacttcaaccgcttcggtcgcacctaccgggtcatggcccaggccgatgcgcagttccgcatgcaggctgaggacataggcatgctcaaggtgcgcaatgcagcgggcgacatgatcccgctgagcgcgatcgcgaccatcgagcgcagttccggccccgaccgggtgatgcattacaacggctttccctcggccgacatcagcggcgggccagcgccgggctactcgtccggccaggccaccgccgcgattgagaagatcgtgagcgaatcgctgccggacggtatgacctacgaatggacggacctgactttccaggaaaaacgggttggcaacacggcgatctacatcttcgcgctggcggtgctgctcgccttcctgttcctggcggcccagtacaacagttggtcgctgccgttcgctgtgctgctgattgcacccatggcgctgctctcggcgatcgccggcgtctggctctctgggggcgacaacaacatcttcacgcagatcggtttcgtggtgctggtcggcctggctgccaagaacgcgatcctgatcgtggagttcgcccgcgcgaaggaaagcgaaggggccgatccgctggcagccgtgctcgaagccgcgcgcttgcggctgcgcccgatcttgatgacgtcgttcgccttcatcgctggcgtggtgccgctggtgctggccagcggtgcgggcgccgagatgcgccacgccatgggcatcgcggtgttcgccggcatgctgggcgtgacggtattcggcctggtgctgacgccggtgttctacgttgtggtgcgcaagctggcgctgcgccgcgaagcgcgccatgcccgtggcggcatgaccgaccagcacgcatga

SEQ ID NO: 162927 - DNA, 1056 bp, Enterobacter cloacae
gtgagcgttcccgaaggtagcctcgtgcgcaagggccaactgctgttccagatcgacccgaggccgttccaggttgcgctcgacacggccgtggcgcaactgcgtcaggccgaggtgctggccagccaggcccaggccgactttgaccgcgccgagcgcctggtggcgaccggcgccgtcgcgcgcaagacctatgacgatgccgcctccgcacgcaacgcgcgccaggctcaggtgcaggcggctaaggccgccgttgctgcggctcagctggacctgtcctacgcccgcgtcactgcgcccatcgccgggcgcgtcgaccgcgtgctcgtgaccgagggcaacttggtcagcggtggcggcgccggcgcggccacgctgctgaccacgatcgtatccatcgacccgttgcacgtgtacttcgacattgatgaggccacctatctcaacgtcgtcagccgctcgcggcccgctgcgggcgccggtagcaaggcttcgctgcccgtgcaggtcgggctgaccacggacaagggtttcccgcacaggggcgcgctcgacttcgtgggcaacaccattgaccgaagcaccggcacgatccgcgcgcgcgccgttgtgcccaacccggatgggcgcatggcacccggcatgttcgcccgggccaagctgtccaccggcgcggcgcgcgaggccgtcctgatcgacgatcaggccgtgggcaccgaccaagggcgcaactacgtgctggtcgtgggcgagaacaaccaggcccagtaccggcccatcgaactggggccggtggtggacgggctgcgcgtcatcaacggcggcctgcaggccggtgagaagatcatcatcaagggcctcgtgcgccccggcatggcggtcacgccgcgcatggtgcccatgcaggcgcccgcggcaccggccgccggcgcgaccggcgcgaccaaggctgcggcaaacgctccggctcccgctgcggcgcctgccaaggccggtggcgcggaccccgccaaggctgacggcgcggccggctcggcggaggcccgcaaatga

SEQ ID NO: 162928 - DNA, 255 bp, Enterobacter cloacae
atgcgtaaaaaaatcagaatcattgtggtggcaggcgtcatcgcagccgtcggggggatagcgatcgctgcccgcgacgccaaggacgagggcaaggccgcggcgcccccggcgggcgcgccgatggcgccgcaggtgcccgtggccgaggtcattaccgcacggtcgcgccatcggccgagtacaccggcttcctggccgcgcccaagaccgtcgagctgcgctcgcgggtcggcggcgccgtcgatgcggtga

SEQ ID NO: 162929 - DNA, 2715 bp, Enterobacter cloacae
atgtctttggaaacattggacggcacaggagcgcaggacgaacaactgggctttcgggtcgaaggtatggattgcgccagttgcgtcggcaagattgaaacagcgcttggtcgaattgatggcgtatcaaatgtacaggttaattttacaaatgagacgctgacgttgacgcgcagcacaagtagccgaaatactgcacgcgacattgccaagaaaatccggtccctgggcttcgacgtgcaggcactgcccgcgtccgaaatgtccgcagcacctgcaccgtgccatgcggcccacgcgcatgaccacgccggctgcggcggccaccatgaccatgggcatgcccacgaccacgggcacgatcattcgcacggcaaagcgtgcggtgatgaccatgggcatggccatgctcacggccatgcccatgcccatgaccacggtcacgatcacggggcctgcagcgggcatgaccatgcgccggcctctgcctcccgtggagcacccagcacgccccccaacgtgtccatgcgcgtcgagggcatggactgcgccagttgcgtcggcaagatcgaaacggcgctcgctcgcatggatggcgtgtccgatgcccgcataaacttcaccgcagaaacgctggaattgacgctcgcgtctggcggccccacgcagctcggccacatcgagaagaccatcaagagcctgggcttcggcgtctccgacgtgcgccgccatgatggctcagcacccgcggccccagcagcagcatcgacggcgcgccatcagcgctggtggcagacgaagaaaggcaagcacgtgctgggcctgggcggcctgatgggctcggcctacgcgatcgcgcagttcgttcctggctacgctgaatggatcttcgccgctgcggtgatcgcgggcgtgctgccgttcgctcgcaaagccttcgcgctggctgtgtcaggctcgccgttctctatcgaaacgctgatggtcgtcgcctcgctgggcgcgctcgtgataggcgaggccgaggaagctgctgccgtggtgttcctgttcgcgatcggcgagctgctggaaagcgtggccgccggccgcgcgcgcgccggcatcaaggcgctggcctccctggtgcctaagacggcggtactgctcgatgccgcgggcgggcagcgcgaagtgcccgccgcttccctgcgcgtgagcgaccgcgtgctggtgcgccctggtgaccgggtgcctgcggacggcaagatcctccgcggtgaaagcagcctggacgagtcgcctatcaccggcgagtccgtaccgcgtcaaaaggctatcggtgccgacgtgttcgccggctccatcaacgtcgatggcgtgctcgaagtacaagtcgagaagacggcatcggacaacaccatttctcgcatcatccaactggtggagcaggcgcagtcctccaaggcgcccacggctcgcttcatcgaaaagttcagccgctactacacccctgccgtcatggccatcgcggcgttgatcgtggtggttccgccacttgccatgggtggcgactggggtacctggctgtaccgcggcctcgcactgctgttgattgcctgcccatgtgcgctggtgctctccacaccggcggccatcgcctcgggccttgcggtggccacgcgacggggcctgctgatcaagggtggcaacgcgttggaaaccatcggccgcgtgcgcgccattgccttcgacaagactggcacgctgaccgagggcaagccgcgcatcaccgaggtcctgcccttcgggctgttcaagcatcaacaggtccttgcgcttgccgccgctgtcgagtccggctcaaaccatcccttggcgaaggccattgtcgcccatgccaagagcctggacgtggcgattccccaggccacgggcgcatcggccattgccggcaaggcggtgcgcgccaccgtgaacggcagtgcgctcgctgtcggatcgcccgcccatgcggaacagacggccacgctgacagccgcgcaccgcagggaaatcgacaagctggaggatggcggcaagaccgtggtggtcctgttcgacgaagccagcaagaacgttctgggcctgctggccctgcgcgacgagccccgccgcgacgcgcgcgaaggcgtggcccagctcaacgccatgggcgtgcgctcggtcatgctgaccggcgacaaccgccgcaccgcgcaggcgatcgccggcaagctgggcatcgagtgggaggccgagctgctgccgcaggacaagctgcgcttggtcaacgagatgaagcgtgatgccaaggtggcgatggtcggcgacggcatcaacgacgcgccggccctggcgaccgccgacgtgggtatcgccatgggcggcggcacggacgtggcgctggaaaccgccgatgccgcgctgctcaagagccgcgtcacggacgtggcccacctggtggccctgtcgcgggcgacgatggccaacattcaccaaaacgtcgtattcgccattggcctcaagggcttgttcctggtcaccaccgtgttgggtatcaccggcttgtgggttgccgtgctggccgacaccggcgccacggccctggtcacgctgaacgcactgcgcctgctgcgcttcaagggcgcgccggaggccaaccacggcgacgacgccgggcgtcccaccaccttgtccgtgccgtctgcccgctga

SEQ ID NO: 162930 - DNA, 570 bp, Enterobacter cloacae
atgtccaagaaaattcgctttgctgttctgctttccgcactttttgctgctggagtaaacgctcaaccgttcgccgcagatatgacacggcaacaggtccaggaggatctggctgcttggaggcaatctgggttggaagcgttgtctcgcggcgaaagcggcccggatacgttcagccctcaataccaggctgcctttcagcgctacttgcaattgacccaaggtgatatgtatcaggcgccctcagcaggaaagactcgtgctgaagtgatggctgatttggaactgtggaaaatctccggcatgcacgcgttcacctcgcgcggaatcaccaccgcttcgcacacccaagcctaccaacaagcctacgagagctatctccagctcaagctgggtgcggcttacaaggctccggtggcattgactcgtgctcaagtaaagagtgatttggcagattggcaggttgcgggaatggctggattctgggctggtgagcagacgcctgatacctatagtgatgcctaccgcaccgcatttgaaacctaccagatgctgcgcaacaaaaaatga

SEQ ID NO: 162931 - DNA, 378 bp, Enterobacter cloacae
atgacatcccgcaaaaccaccagcgccgctattgtgcaatgttcgacctctaaccacggcacgaccactgatgtcctcgcactatcgcaaagtgacgtcgctgttctggcagagaccttccgcctgctgggcgaccaatcgcgattgaaaatcctgttgcagtgcatgcgcggatcggtcgcagtgggcgacattgctggctcgctagacctgtcgcagtccttggtcagccatcacctgcgcctgttgcgcggcgcgcgcctcgtgcgcggcgagcgccaagccaagcacatcttctacggcattgccgaccagcacgtcagccaggtactccaggacatggcggttcacatttcggaggacagacacgacgattga

SEQ ID NO: 162932 - DNA, 1023 bp, Enterobacter cloacae
atgtcccaatccaatgcacatgaccatggtcacgaccatgatcacgaccacacccccacagtgacgagcgccaacgagcgcaaggttctggtttccttcttcctgatcttcggcttcatgctcgtggaagctgtcggcggcgtgctgtcgggctcgctagccctacttgccgatgctggccacatgctgaccgacgccgtggcacttgccctggcttacgctgccttccgattcggtcgccgcgcagccgacagcaaacgcacattcggttacctgcgcttcgaggtcatcgccggcttcctgaacgccgtgaccctgttcgcgatcgtcgcatggatcgcctacgaggcgtgggagcggctgcaggcgccgcccgtcatcctcgccggcccgatgatgatcgtcgccgtgctcggcttactgatcaacgtcctcgtgctgtggatcatgacccgcggcgaaaccgatcacgtcaatgtgaaaggtgccatcctccacgtgatgggtgacctgctcggctctgtcggcgccatcgttgcagcgatcgtcatctacttcaccggctggactccgatcgaccccatcctgtcggttctagtagcggcgttgattctgcgcagcgcctggaagctcctggccaagtcgatccatatcctgttggagggtgcgccagaggacgcttcgccggaaaaggtggaacaaggcctgatgagcactgtgcccggcctggcggctgtcagccatgttcacgtgtggcaactcacttccggtcgcacgatggccacgctacacgttcgacccaacgtggacgaggaggcgcgagctgtggtcaagcgcgtcgaggcggtgctgcgagagcagttcagcatcgaacacgccacagtcggaatcgactggaactcggaggctgacgagaacatctgcagcctgcaacccacgacaggccgtcaggaccacagcggccacgaccacagtgagcacaatcatgaccatgaccactccgctcccggtcacaagcattga

SEQ ID NO: 162933 - DNA, 1311 bp, Enterobacter cloacae
atgctctccgtcctaaagaaccgcacctaccgccacctgttcaccgcgcaggtgatcgcactcgtcggcacaggcctgatgacggtagcgctcggcctacttgcctacgagctggccggggccgatgcaggtgcggtgctcgggtcggcgctggctatcaagatgctggcctatgtgggagtcgctccagtcgcacaggccttcgccgaccagttcccgcgacggtcattgctcgtagcgctggacctggtacgagcggttgtcgcgatctgtttgccctttgtcaccgaggtctggcagatctatctgctgatctttgtcctgcaagcggcatccgccggcttcacgccgactttccaagccactatcccggacatccttcccgatgaagaggactacacgaaggcgctgtcgctgtcccggctggcctatgacctggaaagcctgatttccccgatgctggctgctgcgctgctgaccgtcatcagctttcacaacctgttcgcgggaacagtgctcggtttcctcgtttcagccgcgctcgtggtcagcgtgcggttgcccacaactattcccggaccgcgccgcggcatttgggatcgcacgacccgcggcacacgcatctatctcgctacgccacgcctgcggggcctgctggcgatcagcttggccgtctcggcggcgggcgccatggtgatcgtgaacacggtggttctcgtgaaggcgcgctttggcctaggcgaggtcgaagtggcgtcggcactggcggcattcggaggcggttcgatggtggcagccttcgttctgccatccttactggaaaaggtggccgaccgaaccgcgatgctcaccggcgctaccgtactggtcgtgggcacggggatcggcgcactgctgccgagctatgcattgttgctgccgctgtggttgatcatcggctttggctacagcgtggcgcaaacgccatccggccgtcttctgcgccgctcggcccatgccgaggaccgtcctgcgatcttcgcggcacacttcgcgctgtcgcacgcctgttggctcatctgctacccacttgccggccgcttcggcgcggtcatgggcttgccatcgaccttcattgtcatgtccctggtcggcttggccggcgtggcgctgacgctctggctgtggccggccagcgacccttctgacgtggcgcatgaccaccccagcttgccgccggatcaccctcatttacgcacacacgcagaccaaggcaggcaccatcaccagctgattctggatgacctgcaccgtatctggccgaaaggatag

SEQ ID NO: 162934 - DNA, 258 bp, Enterobacter cloacae
atgaaagaaatgcacaagcacaccagccaccccgatctcgtgaagcggctcaagcgcgccgagggtcatctacggcacgtcatcgggatgatcgaaggagaagaaacctgcctcgacatcgcccgccagctcgcggcggtggagagcgccgtcacagcggccaagcgggttctgatccatgaccacatcgaccactgcctatctcatgatgaggactccgttctagccgaaatgaaggcgctaaccagactgctctga

SEQ ID NO: 162935 - DNA, 1329 bp, Enterobacter cloacae
atgcttcgcaaagacatacgcaagggatggatatgggcggtatccacgctttgggccggcaccgtgctagcccagccagtagccgcccctcacgtcccatccagaccagacagccatatggtcgcccaattgtgggagtcagcttggcagcggcagccagaagccgctggagaaggcgcctggcagcaggccgcccaagcacgccaagagacggccggcagttgggtggcaggtccgatggcgctggaagcctccaccaaaactgatcggttcaacaaccgcaacggacagcgcgaatatgaagtcggggtggctattcccctttggatgcctggtgagcgcgcctcgtcggcacgctgggcggacgcggaaagcctcgcgctatccagccggatgctggccgccaagctacgcacggccggacaggttcgccaggcatggtgggcatggcagcgtgcccaggccgaattggtggcggcgcaggatcgcacccgcagcgcggacgagttggcgcaagatgtggctcgccgggttcgcgcgggcgacctggcgcaagccgacagaaaccaggccgatggcgccttggcgtcggctcgtagtgccctggccattgctcaggccgaagaaatcacgcagcgcgaggcgttgttggcactgaccggcatcgagagtatcccgtcgcaggccgattccgcgcagccggagcagtcaggtgtccgagttcaaccggcatcggcacagccgtccggcgcgttgttgggtaaccaccctgcgctgctggaactgcagcacaaggcgctggcggcccgccgctctgcggaactggtgtcccatcagaagtacgccaaccccgaactgaccctggcgaccacgcgggatcggggcggctacggcgaacgctacaaccagacgatcacggtgggtgtgcgcattcccttcggtacgggtagccgtcataccgagcaattgtccagcgccaatgcgcaggcactggaggctgagtcggcactcgcggcccagcgcacccggctactctcggaaattcgaactgcccaatcgcgcgaactggcaacccgcacccagatgcaggccgcttcggagcgccagcgactagcccaacaaacgcgcaccttctaccaaaagtcgttcgcgatgggcgagacggacatgccgacacgccttcgcatcgagcaggaggccaccgaggccgagcgcgcggcgctgctcgccaaggtggagcatgccgcggccatctcgtccctgttgcaggcacaaggcacgctgccgcagccgaccgagactttcactgacatctccggcacgcgctga

SEQ ID NO: 162936 - DNA, 552 bp, Enterobacter cloacae
atgtcgcaatcctctttctggcgtgcagctgccttgtccagcctcctgcttggcagtagcgcaacgtgggccggcgacggccatgaccatggcgaagccgctcctgcccccgcagcggccgcgcttccgcgctttgccgcagtttccgatgacttcgaactggtgggtgtgctgaacggccagcgtctcacactctacctcgaccatgctgccgacaaccggccggtgaccgatggcgagctgaccctcgagctgggtggtcaacaggtaaaggtcagctcacacggggttggagagttcgaggccgatctgactgagccgctatccgatggcgagacctcaatcatggccactgttactgcgcagggccaatcggacctgttgacgggcgttctcgatgttcatagcgaagacgccgaacacgagcatgccgtcgcatccggccgtgtggtcgtactaggtggcggtgccgcagtcctcggcgtcggtgtcctagcgtgggcgctgcgcagacgtacacgcaccaacggtgcactgcgaggtgcagcatga

SEQ ID NO: 162937 - DNA, 1116 bp, Enterobacter cloacae
atgaagcgcaacttccgtttcctaatgacgacggccatggcggctgcattggctctggctgctcccgcgttcgctcacgacggccatgaccacggcgacgaagcgccggctgcgtcttccaatggcccccagcgccagcctgatggcagcgtgtttcttccgaaaccgtcgcaacgtcagatcggtgtacgcacccagctgatcaagcaggagcccttggcccgcagccatgaactggctggcaaagtaatcatggacccgacgacaggcggcaaggtccaggcaatggtaatgggccggctggtgcccgggccggatggtctgccgcagatcggccaatccgtgcgcaagggccaggtgctggcttacatcgaaccggccagcggtgtgctggagcgctcaggccagatggcccaggttgccgagctgcgtgcgggccaagcgctcgcgcagaagcgcttggcccggctgcgcgagctgtcggagaccgtgccccgcaaggagatcgaagcagccgaaagcgaagtgaacagcctgaccgaacgcgcccgcgccttgagctggggcctcgccggcagggacgtactgaaggccccagtcagcggcgtcatcgcatccagccccgcagttgccgggcaggtcgtggatgcgcgcgaactggtgtttgaggtggtcgatccgacccaactgcgcatcgaggcgcttgcctacgatccggcaatggcacagaacctggccggtgctgcactcgcagtaggcggtcagaaggtgccgctgagcttcgtcggtgccgccagcagcctgcgcgagcaggccctgcccatgctgttcaagggcaccagcgaaagcctctcgcgcttggcggtcggtatgccggtggtggtcttcgtgcaagaggcgacgacggtacctggctaccgcgtgccttccggtgcgctgatgaagaaccctgccaaccagaacatcgtctgggtcaaagaccaggccgagcgcttcgagccgcgtgtcgtgaacatcactcctttggatggtgcatccatcgctgtcacttcgggcctggcggacggcgaccgcgtggttgtcgagggcgcgtccctgatcaatcaagttcgttga

SEQ ID NO: 162938 - DNA, 3147 bp, Enterobacter cloacae
atgttcaagtggcttctcgaaaatagcttacgaaaccggctcctggtcatcatcggggcgctggtgctgatggcgtatggcgcgttcaccctgacgcgcacgccggtagatgtctttcccgatctcaacaagccgaccgtcactctcatgacggaggctggcggcatggctgccgaagaagtcgagcaactcatcacgttcccgctcgaaacggccatgaacggcctgcccagcgtcgaaagcgtgcgctcggtctccagcgccgggctttccttcatctacgtgacatttgactggaagaccgacatcttccgggcgcgccagatggtctccgaacgcctgacgtccatggaggaagggctagccccgggcgtgacgcccactatggggccaatcagctcagtgatgggcgagatcatgcagattgcaatccccatcggtgccaagccctcagggcagaagaacgcagccccgccgctgtcggccatggacactcgcgagtacgcggactgggtgctacgcccccggctgatggccatacctggtgttgcccaagtcatcccgatcggaggcgaggtccgtcagttccaggtccagcccaacaccacgcgaatgtcagagctgggcgtgactgcgtccgatctggatgcggctctcaagggcttctccgcgaacacttccggcggcttcctggagatcaatggccgcgagtacctgatccgcaacctgggccgcacgtcccgactcgacgacctgcgtaacctgcctctcgcggtgcgtgcgggccaacccatcctgatccaccaggtcgccgatgttcagtttgcgccagccatcaagcgcggcgatgcgggcttcgagggcctgccagccgtgatcctgggcatccaaaagcagcccacggccgatacgattgcactgacccgctcgatcgagtcagcgttagcggacatgaagggctcactgccggctggcatggccgagccgcaagtgaccttccgacaagccaacttcatcgaggcgtccatcagcacgctgcaaggcaagctcatcggcgcatcggtcttcgtggcggtgatcctgttcttcttcctgggcactttgcgccccctggtgatcgcgttgaccgcgattcctgcctcgatcttcgtgaccgggctggtgttccactatttcggcctatcaatcaacaccatgacgctcggtgggctggcgatcgccatcggcggtctcgtggacgatgctgtggtcgatgtggagaacatcatgcggcggctcaaggagaaccgcgcccgccaccctgagaaccggctgacgcccctggtcatcgttgccagggcctcgatggaggttcgctcggcgattctctacgccacgatgatcattgtgctggtgttcctgcccctgttcgcgctgccggggatggaagggcgcttgttcgtgccgctgggcatcgctttcatcgtctccacgctggcctcgctgctggtctctgtgacggtcacgccggtgctgtcgtactacctgctgcccaagatgaggacgctggaccatggcgacactcggattctagcctggcttaaggcgcgttatcagggcggcctgcagcgggtcttgcagcggccgcgtgccgcccttggcatggccgctgtggctgtcacactggctgtcgccgcggtgccattcttcccgaccacgttcctgcccccgttcaatgaaggaacgttgctggtgggcctgcgcctgaatcccggtgtgacgctggccgaatcttcggcgcttgcccagcaagccgagctgctggttgcgcaggtgccggaggtgcagcacgtgggccggcgcagcggacgggctgagctggacgagcatgccgaaggcgtgcatgtcagcgagctggacgtgggcctgctgcccgcctcggagctaaagcgctcaatggaggagatcaccgccgacatccgttcgcgtctggctcacttgcccggctccatcggcattggccagccgatctcgcaccgcatcgaccacatgttgtcgggggtgcgctcgcagatcgccatcaaggtgttcggcgaggacctggacgtcctgcgcgggcaggcggatctgctgcgcgccaagctggccggaattccggggcttgctgacctggagatcgaaaagcaggtccttgcgccgcagatcaaaatccgcgtggattatgcggcggcgggacgctacggcgtggccgcaccgcaaattctgtccacgctacaaagcctggtcgaaggcgaaaagatcaccgaggtcatcgagggcaaccgccgcttcgcgctggtggttcgcctgcccgagcaggcgcggtcgattgagggcttgagccgcatcctcatcgacacgcccatgggtcgggtcccgttgtcgcgccttgccaccatcgaagacagcgacggccccaaccaggtcagccgcgacgatggccgtcgacgcatagttttgtcggccaacgctcagggacggccgctgtccgaagtagtggccgacatacgcagcgtcgtccaagaagtgcgcttgcccgaaggctacttcatcacgctgggcggccagttccaggcacaagaggaagcctcgcgactggtgggcctgctgtccatcgtctccctgacgctcatgttcgtggtgttgtacacgcgctacaagtcggtcgtcctatcagcgctcatcatggtgaacattccattggccctggtcggcgccgtgttggggctgtggctgtctggccagccgttgtccgtggccgccctggtcggcttcatcacgctcgcgggtatttctgtgcgcaacggcatcctgaaggtgagccactacctcaacctcatgcgcatggagggcgaggacttcgaccagaagatgatcgtgcgtggctcgctcgaacggctttccccggttctgatgaccgcgctggtcacggccttcgcgctggccccgctgctgttcgaggcgtcccgacccggtactgagatcctgcaccccgtcgcggtggtgatcttctcggggctggtcagctccacgctgctagacaccttccttacacccgccatgttctggctgttcggccgcaagcctgccgaacgcctgctggacgaccgcgacgcggaggcattctga

SEQ ID NO: 162939 - DNA, 399 bp, Enterobacter cloacae
atgtctgttcgatttcgttccctcacggccggcaccgccctcgccctggcatccgtcaccgccttcgccgcaggcgaccatgaccacgcgcatgaccacaagccgctgcatggtggcgtcgtgaccgaagtccgggacgtggactacgagttggtcgttcagcccgcagcagcgcaactctacctgcgcgaccacggcaagcaggtcaatgtaagcaacaccaaagccaagctcacactgttgaccggctcacaaaagcaggaggtgcaactcacgcctgccgcggacggaagccgcctcgaaggcagcgggaccttcgccgcagccaagggcacgaaggccgtcgtccaagtcgaacgtgggggcaataccgcgagcgcccggttcgttctgccgtag

SEQ ID NO: 162940 - DNA, 1428 bp, Enterobacter cloacae
atggaaatgcatttcgacgtcattgttatcggtgccggcccaggcggatacatcgcggccattcgcgctgcccaattaggcatgaaggtcgcttgtgtagatgcctggaagaacaaggacggaaagccagcacctggcggcacctgcaacaacatcggttgtatcccttcgaaagcgctactgcagtcgtcagagaactttgaacaagccaagcaccactttggcacgcacggcatctccacgggtgatctgcgcatggatgtgaccacgatgttggaacgtaagaatcaggtcgtgaagtccagcaacgaaggcatcctttatctgttccgcaaaaacaaggtccagtttttcaacggcctggcgtctttcaccaggactgtcgatggtggcttcgaggtgagcgtcgccgccgatgaggctgttaccttggtgggcaagcagatcatcgttgccacaggctccaacgtgcggccactccccaacctaccgttcgatgagcgggtcgtgctctccaacgacggcgcgctggacatcgcggccgtgcccgatcggttggccgtcatcggtgccggcgtgatcggcctggagctgggctccgtttggcgccgcctgggggcggatgtcacgatcctcgaaggcttgcccagcttcctgccaatcgtcgaccaagccatcgccaaggaggcgaagaaggcgttcgacaagcaaggcctgaagatcgaactaggtgcgaaggttcgcgaagtcaatgcaaccgaggctggcgtgactattcactacaccgacagccagggccagacgcagtccttgcaggcagacaaagtgatcgtggctatcggccgtgtgcccaacaccgaaggcctgaatccggccgccgtgggactccaactggatgagcgcggcgccgtgctggtggacgatgaatgccgcaccagtgtgcccggcatctgggccatcggtgacgtggtgcgtggcccgatgttggcgcacaaggcggaagaggaaggtgtcgcagtggccgagcgcattgccggccagcacggtcacgtcgatttcaatacgatccccaacgtcatctacaccagcccagagattgcctgggtaggccgcaccgagcagcagctcaaagagcagggcaccgcctatcgaatcggttccttcccgttcatggccaatggccgcgcgcgtgcgctgggcgacacgccgggcctcgtcaaggtgatcgccgatcctgccactgatgagatactcggcgtgcatgtggtcggcccgcaggccagtgaactggtggccgaggccgtgatcgccatggcgttcaaggccagcagcgaagacatcgcccgcatctgctttgcccatccgaccctctccgagacgttcaaagaggcctcgctggccgtggacaagcgcgcgctcaacttctga

SEQ ID NO: 162941 - DNA, 357 bp, Enterobacter cloacae
atgaatacaagtaagccattcagtaccccaccgaagggtcccagcgccgatttggaatcgctgtcacagaatgacgtgaccatcttggctgagacattccgcctcctgggtgacccgtcccggctgagaatcatgctgtgctgcatgaaaggctcttcctcggtcggggacatcgctgaaaccctcgaactctcgcagtcgctggtgagccaccacctgcggctgctgcgcggtgctcgcctggtcaagggcgtgcgccaagccaaacagatcttctatgaggtggcggacaagcacgtgaaccaggtgctgctggatatggccacccacatcgcggaagaccacaacgacgagtaa

SEQ ID NO: 162942 - DNA, 2496 bp, Enterobacter cloacae
atgagcatggcaacaacgagtagtgctggcgcccaagcagcggcaatcagcctgcccatcgagggcatgacctgcgcaagctgtgtcggccgagtcgaggccgcccttgccaaggtcgagggcgtggcaagcgtgtctgtcaatctcgccaccgagcgagcggacattcgcctgaaccgtcctgtcgatcgcatggcgctgatccaggcgatcgagaaggtagggtacgacgtgcctcagggcaccatcgagctggcgatcggaggcatgacctgcgcttcgtgcgtgggccgcgtcgagaaggcgctcaaggcggtgccgggcgtcactgaggctgtggtcaatctggcgaccgagcgcgctaccgtgcgtggcgtagcatccgtgcaggatctgattgctgctgtcgataaggtcggctacgaggccagcccggtcgatacaggcatgcaggccgacgaggaagctgccgagaaaaaggacgccgagcgcgccgaactcaagcgcgacctgaccctggccgccgtgctggcgctgcctgtgttcgtgctcgaaatgggctcgcacatgattcccggcatgcacgagtgggtggcttccaccattggcatccagcagagctggtatctgcagttcgtgctgaccctgctggtgctcgccattccgggctggcgcttctatgagaagggcttcccggcgctgttccgcctgggtcccgacatgaactcgctggtcgcggtcggcacggccgcggccttcggttattcgatggtcgccacgttcgcgcccagtctgctgccggccggcacggtgaacgtgtactacgaggcggcagccgtcatcgtggcgctgatcctgctgggccgctttcttgaggcacgggccaagggccgcacctccgaggccatcaagcgcctgatcggcctgcaggccaaggaggcgcacgtgctgcgcgacggccgcatcgtggacatcccgatcaacgacgtggcgcagggcgacatcgtggaagtgcgccccggcgagcgcgtgccggtcgatggtgaagtgaccgagggccgcagcttcgtggacgagtcgatgatcaccggcgagccgattcccgtcgaaaaggcggaaggcagcaccgtggtcggcggcaccgtcaaccagaagggtgcgctgacgctgcgtgccaccgccgtgggcggtcagaccatgctggcgcagatcatccgcatggtcgagcaggcgcaaggttccaagctgccgatccaggccgtggtggacaaggtgacgctgtggttcgtgcccgccgtcatgctggccgcggtgctgaccttcctggtctggctggtgttcggcccgtcgcccgcgctgtccttcgcgctggtcaatgccgtggcggtgctgatcattgcctgcccttgcgccatgggtttggcgacgccgacctccatcatggtcggcacgggccggggcgccgagatgggcgtgctgttccgcaagggtgaagccctgcaactgctcaaggacgccaaggtggtggccgtggacaagaccggcacgctgaccgagggccgcccggtcctgaccgacctggagattgccgacggctttgaccgcaaccaggtgctggcgaaggtcgccgctgtcgaatcgcgctcggagcatccgatcgcacgcgccatcgtcgagtcggccgtggaaggtggcatcgcgctgccgacgatgacagacttcgattcggtcacgggcatgggcgtgcgcgccaccgtggacggcgcgcgtgtcgaggtcggtgccgatcgcttcatgcgtgagctggggttggacgtgggcagcttcgctcgcacggccgagcgcctgggcaacgagggcaagtcaccgctgtacgccgcgatcgacggccggctggccgccatcatcgcggtggccgatccgatcaagtccagcacgcccgcggccattgccgcgttgcaccagctcggcctgaaggtggcgatgatcaccggcgacaacgcgcgtaccgcgcaggccatcgccaagcaactgggcatcgacgaggtggtggccgaagtgctgcccgagggcaaggtcgaagccgtgcgccggctgaaagccagccacggccagatcgcctacgtgggcgacggcatcaacgacgccccggcgctggccgaggccgacgtgggcctggccatcggcaccggcaccgacgtggcggtggagtcggccgacgtagtgctgatgtcgggcaacctgcagggcgtgcccaacgccatcgcgctgtccaaggcgaccatcggcaacatccgccagaacctgttctgggcgtttggctacaacacggccctgatcccggtggccgctggcgtcctgtaccccgcatacggtgtgctgttgtcgccgatcttcgcggctggcgcgatggcgctgtccagcgtgttcgtgctcggcaacgcgctgcgcctgcgccgcttccagccgccgctggcggcggataccgctcattga

SEQ ID NO: 162943 - DNA, 480 bp, Enterobacter cloacae
atgaacatcggtgaagcatccaaggcctcgaaggtctcggccaaaatgatccgctactacgagcaaatcggtctgatccctccggctgaccgcaccgattcgggctaccgcgcctatacccaggacgacgttcaccggttgcatttcatccggcgttcgcgcgacctcggcttctcggtggccgagatcacggacttgctgggactgtggaatgacaagtcgcgccagagtgctgatgtaaagcgtctggcccagcaacacatcgacgagttggaccggcgcatcgagagcatgctggagatggccgcgacgctcaaggcgctgatccggtgttgcgccggcgacgaacggcccgactgcccgatcctgcacacgctggagcagcccgatatcagtgacaacaagcccgaagcgcgcactggcgcagtgccgcgccgcgcgcgagccaacgcagcaggaaaaaagccgtgtgcgcactga

SEQ ID NO: 162944 - DNA, 339 bp, Enterobacter cloacae
atgcccaaaatcaccgtcttgccccatcctgaactggcgcctgagggagccgaactgaacgtgccagcaggcacttcgatctgcgaggccctgctggacaacggcatcgagatcgagcatgcctgcgacatgagctgtgcctgcacgacctgtcactgcatcgtgcgcaaggggttcgattctctaaacgaagtcgaggaatgcgaggacgatctgctcgaccgggcctggggactggaggcgcagtcgcggctgagctgccaggccatcgttgcgaccgaagacctgaccgtcgagatccccaagtacacgatcaaccatgccaaggagaaccactag

SEQ ID NO: 162945 - DNA, 273 bp, Enterobacter cloacae
atgtctgcgcccaagctagccacgctctaccgaatggtcatgcccggccatacctgcccctacgggctgaagtcgctcgatctgctcaaccgcaagggctacgaggtcgaggacaaacacttggcaagccgcgagcagacggatgcgttcaagaaggagcatggcatcgagaccacgccccaggtcttcataaacgggcggcgcgtgggcggctacgacgacctacgcaaattcttcggcatgtccgtgaaggacaagaacgccgtgacctag

SEQ ID NO: 162946 - DNA, 228 bp, Enterobacter cloacae
atggtcgcgggcgtggggatgtgggtgtcgattccgttggcgctgttcatcgggaccgtcggggccgtgtcggttttcaaggcggtctatgtcgatcgccgggaactcaagtgcgcctgcgtgggcggggacagcaacgtgccgctgggcttcgtgtccctgaccgagaacctgatgatggtggcgatggccctgtggccaaggtcggcctaccttgggatgcactga

SEQ ID NO: 162947 - DNA, 195 bp, Enterobacter cloacae
atgcaattccatctcgaagacatgacctgcggcggctgcgcccgcactgtgacgaaaacgatccaaatgatcgaccccaacgccaagatcgtcacggacccgccgacccgccgtgtcgaggtccagacctcggcctcgcaagagcagatcgccgcggccctgagcgaagctggcttcccgccgcgcgcgcagtaa

SEQ ID NO: 162948 - DNA, 213 bp, Enterobacter cloacae
gtgttccgcgcgtctgtccagaactggccagaggttgtggagtgccatgcgctgaccggcgacatggactatctgctgcgggtggtcgtcatggacatggctcactactcccgcttcgtgctcgacacgctgctcaagcaccccagcgtgcaggactgcaagaccagcttcgtgctggatcgcgtaaagagcaccacggccttgcccctatga

SEQ ID NO: 162949 - DNA, 597 bp, Enterobacter cloacae
atgggattgcgcttgtgcgagtcggagtactgggccgacttctacacgaagttcttcaacttccaagagatccgctacttcgacatcaacggcgagtacaccggcctagcctccaaggcgatgagcgcgccggacggcctgatccgcatcccgctgaacgaggaagcacgccagggcggcggccagattgaggaattcttgatgcagttcagcggcgagggcatccagcacatcgccctgctgtgcgacaacctactcgatgcgctcgaccgcgtgcagatggccggtatcccgctgctgaccgcccccaacgacatctattacgcaaacttggaaaagcgcctgcccggccatggccagcccgtacccgagttgcaggcgcgcggcattctgctcgacggcacgaccgaaggcggccagccccgcctgctgctgcagatattctccgagccgctgcttggcccggtgttcttcgagttcatcgagcgcaagggcaactaccgcgagggcttcggcgaaggaaacttcggtgccttgttcgagtcgatggaacgcgaccagatcaaccgtggctcgttggaaatcaacccggcctga

SEQ ID NO: 162950 - DNA, 894 bp, Enterobacter cloacae
atggaacttcgtcatttgcgctgcttcgtggctctcgccgaagagctgcatttcacccgtgctgcggagcgcttgcacatcgagcagccgccgctgtcccgcacgatcaaggaattggaagacgaactgggggtgctgctctttgaccgcgatcggcggggaacgcggttgacgccagcgggcaccaccttccttcaggacattcgcaggctgttcaccaacctggagcaggcacgagaaaacgtcagggcgatcgccgcaggcctaagaggcagcgtgcgcatcgccatctccgatggcgccatcgacccgcggctgtctgcacttcttgccctgtgccgccaggaggagccggagatcgaaatacggctctccgaggtcaccctggcggaacagttgcggggactgcgatccggcgacttcgcgatcggtttcgcacacaccgcggacgtcggcgacggactggtgacggagcccatctggcaggacccgctggtggtgaccgtgccgatccggcacccgttgctggcccacaaggaagtgtcgctacgtgaactcgtgagttacccgctggtgatgtgcgatccgcagctttgcgagggctactgccgcgaattgacccggctgctacatcccctggagcgcgagtccaccatcgttgagcatgtctcgtcgctggacatgatgctcacattggtcggagctggttacggcatcggcttcgcaacggcgacccgaatcgcggcgtgtcaacgtcccgacgtggtgatccggccgttggcgctcgattcggccgtcatcatcacctacctgcttcggcccgaaggcggtagcggactatccgcacccgtagagcgcttcatcgagcgtttgcgttcgccaaagagcgattag

SEQ ID NO: 162951 - DNA, 309 bp, Enterobacter cloacae
atgacgcttctgcgaatgcagaagcgcactattcggcctggacggcccgccggagtaaccacctatgagtccgcaccggcgttggcgttcgggcaagcggtgcgagccgctcgcctggctcaggggattgctcaggatgagttcgcgggcttggcggggatcgcgcgctcgcacatgggcaagattgagcgcggcgagcacatgccgacactcgctctcattctaaaaatttccctggctctcaagatcagctcggccgaactgatgacggccacggagcgcaacctctaccttcagggcgatgcgtga

SEQ ID NO: 162952 - DNA, 642 bp, Enterobacter cloacae
atgcacaacgccatcagaccgtccccgaatttcacactcgccatagcgccaggtgtgccgtcttcacggctgtcggcgctgcttgcactgcagcgagcgcacgagccgggtgtcgcgatcgccgtgcgtgaagtttcggatcaagagctggtaacgggcctgcatgagggccgctacgacgcggggctatctcttagcagtgcgggggatcacctgacgagtagccggaggctgtggtgcgaaagcatggccgtcgcgataccaccgcggttccgtttggttgatcaggcgaagctcaccatctccgatcttcaggactatccaatctatcgctggcaggcggaggcttgtcccttgctggacgagaggttggcctccctgatgccagtggaccaagagaacatcctgcctgcaacttcattcgagatgatggcgctgtgggtttcagccggctacggcatcggcgtatgcgcgcaatcgcgcatcgagcgtgcccatcaatggggggtaagcatgcgaccgctcgccgatggcccctatgagatcgtgacgtacctccaacggccccacgcgcaagcagattctgctgccaagcgtttcgagcgcagggcgctgcagatcgccgaggcaggcgccctgtag

SEQ ID NO: 162953 - DNA, 1944 bp, Enterobacter cloacae
atggcactctctgatctgacagtccggcaggcaagaaccaccggcaagcgctacaccctctccgataacgactgcctgggcctgatggtctctgccgcaggcggcaagtcgtggatcttccgatactactggctgggcaagcaaaagcgcatgtccctgggtggctatcccgccctcagtctgcgcgaggcccgcgccgagcgggacaaggctcaggttctgctcgccaagggcattgatccccaaatcgaacgcgaccagcgccggcacgcggccaagctggcgggcgaatacaccttcaagaacgtcttcgatgcttgggtcgagcatcgccgcaaggaactcaaggaaggccgtcagagcacgctttcgcagatcctgcgcatcttcaacaaggacgtgctgcctaccctggggaagatgtcgatctacgacattcgacggccccagctcgtgggcgtcgtggcggcgatcgagaaacgcaaggcgttcaccaccgccgagaaggtccgcacctggttcaaccagatgttccgctatgccctggtcatcgccgaagggctggaagtcaatccggccgcggacctggacgtggtggccgagcccaagcccccggtggcccacaacccctatctgcacctgcccgagctgcccgagttccttcagaagctccggcgctacaacccccggggctggcagacccagcttggcgtccggctgctgttcctgacgggggtgcgcacgggcgagttgcgcctggccgagcctgagcaattcgacctcgaccgcggcttgtggatcatcccgccgcaggtcgtcaagcaactccaggacgaaatgcgcaaggccggcaagcggccgcaggacgtgccgccctacatcgtgcccctgtccctgcaggccatcgagatcgtgcgctatctcctgggcgtgatgcgtccagcgcagaagtacctgctgtcgcatcgcagcgaactcaagaagcgcatcagcgagaacaccctcaacaaggccgtgcagctcatgggctacgaggggcgcctgaccggccacggcatccgcggcaccatctcgaccgcgctcaacgagatcggatacccgaagatttgggtggacgctcagctttcgcactccgaccccaacaaggtgagttcggcctacaaccacgccaagtacgtggagcctcggcgtcgcatgatgcaggactgggcagaccgtcttgacctgctcgaacagggtgaagtcgaagccgcgagcgcgcatctgaccatccgtatcgacggggtgccggcaatggcggaagtggaggaagtggtgggcgcggtctccacgactgctgagcctgttgtccccggcgtgccgcccgtggtggccacgcctatcgtcgtgacccccaacagcggcggaatcatgttccagcggctgtcgcaggtgccgccgcctccggtgcatgccccggagccggaagtctccgcgatccagcgcgagcgcgaggaaatgctggccatctacgagtcgccgaacaatctgccggtcccgctgttcggcaagctggccgggaagtccaaggaccagatcaaccgcgagctgaaggcgggcaagctgctgtcgatcagcctgggcaaccgggggcagcgggttcccgactggcaactggtgccgctcaagcacaagctggcccaagtgctcatgaaccaatgcccgcacgccgattcgtgggacctgtaccgcatgctgacccagcctcaccccgacctgggtgatcgtgcggccattgatgcggtcacgccaacgaacgtgcccgcaatcatccgggttctcatgggcgactaccagcaccatgcggatgtgcccgaggccgttgccccgcggcccatccccgaggacgtgcggcagagcgtccgccgactggtggacagcgcagcggtgcttgaaggggtctag

SEQ ID NO: 162954 - DNA, 900 bp, Enterobacter cloacae
atgaggatacgacacctgcactattttctgatcgtcgccgaagagcagagctttgcccgtgccgcagccagagtccacatcgaaccttcgccgctatcccgcgccatcaaggagctggagaaccagcttggcgtcaagcttctcgaccgcaccaaggggcgaatacgactgacctggcctggcgaggttttccgtgaagaagcgcgccgcatgctcgctttcatggacaacgcccagacacgtgtcaactcagcctcacagggctaccgcggcagactgcgaataggcctggccgatagcctcgcccaaccgcgtctcacacaattgctcgcccgctgccgtgaggaagagcctcgtaccgagatccggattgcggagatgacggtcaacgaaatgctccaggctctccgtcatgatcagattgacgtcggcttcactgtagatggcgaaaccgccaatggatgcgtgaaggacatggtttgggccgaacgtcctgcgattgccatccccacccaccatccgttgctttccttcgacaaggttccccttggcgaagcccaccgatatcctttgattctttgccatccggaacgatgcgcaggtggacataacgtcattcgtcgctggttcaatgatggcgtattgccctcgctgtccgttgccgagtatgtttcaggtcatgaacccatgatcatgctcgtcgcggcaggatacggcattgggataggactggaatcgcagattgcgctttacagccatccgaacgtcatcatcagaccggttgcggacgaggttcccaatacagcgacgttcattgtggtgccggagaagcctgcttccagggaactggggcgcttcataaagcgagcacaagaaatcggcagaagcggaatcagctga

SEQ ID NO: 162955 - DNA, 213 bp, Enterobacter cloacae
atgtttcaacagaatcccgctcccgcacaggagcggcgcatactgcgtcgcgcagaagttgaggcaaagacgggctttaagcgcgcccacatctacagcctcatgaaagatggcaagtttcctaaagcactgcggcttggtgttcgggccgtgggctgggattcagccgagatcgaccaatggatcactgaccgccttaaagagcgcgtctga

SEQ ID NO: 162956 - DNA, 864 bp, Enterobacter cloacae
atgcaggtgatttctgtcatatcgacgaaaggcggcgttggaaaaacgacgactgccgcaaatctcggcgggttcatcgccgacgccggactgcgggtgctgcttctcgatctcgacatgcagccgacactttcgtcgtattacgaactagctcaccgcgcccccggcggcatctacgaattgctggcattcaacgagcgcgacatttcgcagttggcctcccgcacgacgatcgagcgtctggatatcattctgtccaacgaccagcacaggcagttgaacaccttgctgctgcacgcaccggatggccggttgaggctgcggaatctactgccggtgttccagccagattacgatctggttctgatcgacacgcaaggttcacgcagtgttcttcttgagatggctgtgttggcttccgggtctgcggtttctccggttacgcccgagatccttgctgccagggaaatgcgccggggcaccctgcaactcatcgaggatatcgcgctttatcgtcatctcggtattgagccaccaccgctgcaattgctgatcaatcgggtgcccgctgtatcttccaatgcccttctgatccggcagacattgcgccagattttccgcgaacaatctggggtccaggttctcgataccgaagtaccggcaatagaggcatttccgcgtgcggcaacgcggagcctgccagcccatcgcgtcgagtaccggcgtccgacaggcaggattgcccctgctgcactggacatcgttcgtgctctggcaaccgagttgtgcccgcaatggcatgcggatttcgggatggtcaccggcaagatcggggggagacatccgcatgtcgaacgttcatga

SEQ ID NO: 162957 - DNA, 258 bp, Enterobacter cloacae
atgtcgaacgttcatgaactggcgcgcggccacaagcagctcttgcccctcattgaatatgcgctgagcgaaggctggactgtttcccgcacatcgggcggccacctcaaattcatcaagccgggactgccacccatattcactagctcgacggccagcgatcaccgtgctggtcgtaatgcccgtgccatgctgcgccgtgcgaaacgccagaacaccgccgccacctcagacacagaggaggcaggccatggctga

SEQ ID NO: 162958 - DNA, 1725 bp, Enterobacter cloacae
atggctgatatctccgaacaagaaatgaccgccaagctgatgagcgatggctttggtcgtaccggcgtggtggctgctgcgttgaccgatccggtcgcagacaccccgatggtcgtgacgctcgatgagttgcgtccctatgagctcgatccgcgccttacccgcaatccgctctatgacgaaattaaagcctcaatccgcgaacggggcctggacgcacccccgcccatcacccggagacccggcgcagcccacttcatcattcgcaacggtggcaacacccgcctcgccatattgcgcgagctatgggcagagacgaaggatgaacgtttcttccgtatcggctgcctgttccgtccctggcctgagcgcggtgaaattgttgcgctgaccggacacctcgcagagaacgaactccacgggagtctttccttcatcgagcgcgcgctcggtgtcgagaaggttcgcgaactctacgagcaggaagacggaaaatcactatcgcaatcggagctggcccggcgtctcaaggctgacggctacccggtgcctcagcctcacatcagccgtatgcaggaggccattcaatacctgctcccggtgatcccgaacgttctctatggaggactggggcggcatcaggtcgagcaattgaccggcctccgccgggcgggtgccaggatatgggaggcccgcggcgccgctaaacatgcgaatattgatttcgccacgctgttccaggacgttctcgccgtcttcgacggcgcccctggcagtttcaatctccagagagtccaggatgagttgatcgggcagatggccgatctgcttggcgtggaatatgacacgctcgctcttgagataaccgactccgaaaaacgctggcaggtcctgaccagtgaacctgtcgcggcaccgacggctacgccttccgtcacaacgtcgccgcagaccgcgccaacgcagctttctccgcccacaccctcagcgcctcgaaccgatgagacgccagcacccgcaccagagtcccgcacgcacacgaagccagcaccggtgcagtctcccgcagctgacgatcagccggacgatgaaaaccaacggtctgcgctgctgcaggagcacatcgtctctcccgcgccaacgaccgatcgcctccagtcgatccagcggctcattgccgaccatactggagaagcgcacaacgacttcgaaagcaacgtccttcaagccatccccgtgcaggtcggcggcctttatccgatctcggacgtatggcacatcgacgctggcctggatgagcccgaacgcttgcggacgcatattgcgcagttcgcactggaaatcgccagtgaagccggcgttggagagcatatcgtgccgtccgaagatggcatcgggttctcatgcgcgtcccgtatcgagcgtgctaaccctgaaggcacaatggcgcaccccggtgcaatcctgactttgctgcacgtcctgagcgcgccttatctgtcggccagttcctctccggcacgtatcgacacttcacggctggctggcgatttgggcgtcctgctactgggaatggcgccatcgaccataccgtccaggagccagtcctatgtcctcagcgacaccggcctggtgaaactgttccggctggttcggctcacccgccgactgctggaaatcgaggcaggcatcatgggtggcgacagcgccatgcccgggtcatga

SEQ ID NO: 162959 - DNA, 561 bp, Enterobacter cloacae
atgtcgaatccccatcctctcaatcaggcagtgatcgcgcaggcgctccatgacctgcgtaacggtcagttgcgtcgcgccaaatccatgggatttgaggatgaggatctcgatgcgctcaaacatcccgccatggccagcgtgctggccaatgccctggtctcctggtgctctgtgacagtcaatcgggatgtcgtgcaacgcctgctgcaccaatgggacaatgtgcagaaggaaatccatgttattgaccgcctgttgaccctgggcgccagcaccgaactgatcagtcgtttctatggactgacccatcaggaaatcgctgtgcgccgcggcgttctcgggctccccaagcgcaagggacgccaccctgtcctcacagaagagcaggattgcgatttgtggaatcgctggtcgcaaaccgtcaaagagcgcggtgtggtgctgaccgacgaaacggcgatgcttggcatcgccgcagaccttgccgaaagcatgggccttcccatctctgtcatctggagcgccatcggcaggtggatcgatgaagggctggtttga

SEQ ID NO: 162960 - DNA, 1191 bp, Enterobacter cloacae
atggacagcccacgccgatcaagcggtcccgtatcgctgggcgacctcttcgatcaggcccttcagcggatgcaggttcagccgccgccacaagcacctgtccagacagccccagctcgccagactgacggtttcattttcagcggtaatcgccatgactccgtgccacgcgccttgctcacggacaatcgcctgacgccactggaacgcaatgcgtggcaggtgttccggttgttgctcaatgacgatggcatcaccgctctaccgacctacgaccagcttgcgccctggctggcttcgatgccatgcgccaccagagcctcacatgaaacggtcgctcgcgccctgaccctgctacggcttacacgctggatcagcctggtaaggcgccggcgagaccccaggacagggcgcatacagggcaacctttatgtcctgcacgacgaacctctcaccccctacgaagccatccagcttgatgtcgattatctggaactggtcagccagtcgctggcccatgccagcaaatccatccagcgcgtcggcgtccatacgctccgggaaatgatcgacgacccgctgcttagcggcagggaactgccgagccggctgcaggtgatatcgcggcgtctggccgcgcaagggtggactgaaccagcgacttatccacagcctggggataatcatgattccgaagacggggaaaccggccttcttcggaatcgtgacgcaccttcttcggaatccgaagtgggcgaaaaaacgcggaaaaccggctcacttcggattccgaagacggatagtacagtacgtaaagaaaaagaaataaaagaagtacgtacagtaccgcgcgggttgggcatgcttcgccttcccgagcgcttcatgtcgctcaaggcagaacagcaatcgggcgcattggccgcattgcaaccggtcgatcccgacctgcatcaggctgttctcgatgaatgggatgcccgctgccgcgcgagcagcgtgcgcaatccggccggctacctgtttggcatcatccagaaagccatgcgaggcgagttccgcgcatgggctggacagaggacgcctcccgataaaacgggcacaccgccccaggaaccacggcaacctgtagatccggaagtcgctcaggctcatatcgcccggctgcgctcgatgcttcgcttgtcgtag

SEQ ID NO: 162961 - DNA, 822 bp, Enterobacter cloacae
atggccaacgaaacagaatctctgcaattgaatcttgggtcgttgcgcagcgcgatgtcgctgacgctgcacacccatcatgcgtcgcgcatctggcacgggcgcacaccatccgaaggcaagcccggcatcatcggcctcaacggctttgtcgccatcatgaacaagctgaagcgcggggccgaacaggacgacccctattcggactggtggatgctgcgcattgaggacaaactcagcacgaccaaggaacagcttcagactttgcgcgagcaggtggaccaggcgctcgccgacattccgcaggcgctcagcctcggtgaaaacctcaacgtgcagcccgtcaagctgccgctgttcgtctcctcccagttgggcttcatggcggtctacctgctggccgactatgacgatcttgcccgtcgcctgatcctggcgcatcacaccgccctgatcgatcgcagcactctcgaacgctggttgggcgaaggtgcgcattccctgcgcagcctgttcagcctggcgcagcagtaccgctactccggcacgaaacgcgacgacttcgcagcgaacaacgccgcagcacgcgcagccttggagaaatatggtgagctgccgcaggacgtgctcgaaggcgagcgccgctcccgcttcgcgccgccgctcattcggcgttcgccactggcctcggcgacaacccggtcgaccgccccgattgtcgtaccgcccgacgaacccgaccaggctgcgccagccgtttccgacgaagcgagcggggatgaggcatccgcgtcatcggacgaagaggatgcctcatcatga

SEQ ID NO: 162962 - DNA, 531 bp, Enterobacter cloacae
atgagcgacacgatccgcttcacggcgctggaacagacagacttccagaagctggaacacgcagcctacctaaaaggccttttgaaaccctttaaaggtaatggggagcttgcgacctgggccagccagtgcgcagcgctgcgggacgacctgattggcctggcgcagcgcagggtgctgacgcaggcccgcagccaccccttcaacctgttgcccgttcaactggcccaacagaacactggcgcaggcacgaccttccttcgctggcgcaacctcgatcgttccagcatgggtgtagcgctgtgggaggaactggttgcgagcccctccacgccggccggcctgattgacgacctccttgcgctggaacagcagcgcatcgtggtgaacatgcagatcagcctgtgccacaccattgcccggcaaggtatggaatgcgccagcaagttggcgtccgcgcaggccgttcaccagcgcagggccgccggcgggaccggtactggtccatcgactgacgggccatcctcatga

SEQ ID NO: 162963 - DNA, 960 bp, Enterobacter cloacae
atgagcgggcctgccgctgatgcagggcgctggctcgaccgcacccatgccggggattgccgccagttgttgaagcggatgcgcgaggacggcgtacgggtgcagatgtgcgtgaccagtccgccatacttcggcctgcgcagctacctgcaggaaggccatccggacaagcacctggagatcggacggcagatcaccgttcggcaatacatccgcgaactggtcgacgtgttccgcgcggtgcgtcaggtgctcgccgatgacggaactctgtggatcgtcatcggggacacctacgccgcaacccggacatggcaggcgccgagcacccgcggaggccccaaacacgctgctgcccaacgggctgccggcggcatgcgagccggggatgggctcaaacccaaggacatgatgggcattccctgggcgcttgctttcgccctgcgcagggatggctggtatctgcgccaggacatcgtgtgggccaagcccaatccgatgcctgaaagcgtcactgaccgctgcacccggtcgcatgaatatctgttcctgctcgccaagaatcgccgctactacttcgatcaggacgcgatccgtgaaccctctaccgatcctcgcggccccggaaacatccgcccggtcagcgcaccgcccggcgaacgcgcgtccagcagcaacgcaaacctgcgcggcagtctccacaagatcggcgtgcgcagcacccgcaacaggcgggatgtctggtccatcgcgagcaaaccattccgcggggagcatttcgcggtattccccgacacgcttgtgacgccctgcattgtcgccggctcccgtattggcgacaccgtactcgatccattcatgggcagcggcacgaccgccgcggcagcactacgcctgcaacggcatttcatcggctgcgaattgaaccggtcgttcatcgacctgcaacacctgcactga

SEQ ID NO: 162964 - DNA, 444 bp, Enterobacter cloacae
atgagcacgcattactacggcgagggcaatatcggttctgcgccagactatcgggagtttccgaacgggaacgacgaaccgcgcaggctgctgcgcctgaatgtctacttcgacaacccggtgcccaccaaggatggtttcgaggatcgcggcggcttctgggcccccgtggaaatctggcaccgcgacgccgagcactggaagggcctgtaccagaagggcatgcgcgttctggtcgaaggacgcgccgttcgcgacgagtgggaggatgcggaagaaaacgagcgcgtcaccttcaagatcgaggcgcggcggatcggcatccttccctatcgggtcgaggccgtgacgctcggcgcgaagccacaggagatcgagggcgaagcggagacgaagccgaaggagaccagggggcagaaggaaccgaaacagggtaaggcgtaa

SEQ ID NO: 162965 - DNA, 2025 bp, Enterobacter cloacae
atgcgactgtatctgtgcgagaagccttcgcaaggtaaggacatcgcccgagtgctgggcgccaggcagcgtggtaacggctgctacaacggacccggtatcgtcgtgacctggtgcatcggccatctggtcgaagcggcgccaccggaagcttacggggagcagtacaagcgctggtccatcgaacagcttccgattcttccagagcgctggcgcaacgaggtcaagtcctcgactgccacgcaattcaaagcggtcaaacagctgatcggacaagccaccgaactggtgattgcaaccgacgcggaccgtgagggcgagatgatcgcccgcgagatcatcgacctgtgcggctaccgcggctccattcagcggctctggttgtcggcgctcaacgatgcgtccatccgtaaggcgctggatgccctgaagccgtcgagcgagacattgccgatgtactactcggcgctcgcccgttcgcgtgcggactggctgatcggcatgaacctcagccgcttgttcaccgtgctcggccggcaggccggctatcagggcgtgctatcggtcggccgtgtgcagaccccgacgctgaagctggtcgttgaccgcgatcgcgagattgcgcgttttgtttccgtgccgttctgggctgtcgaagtgcagttgtcccattcgagccattcattctccgccagttgggtgccacctgaaggtgccagcgatgaggccggaagatgcctgcaacagtccgtggcattgcatgcggcagatcagatacgcgatggccgcgaggcgctggtgcaatcggtggaaaccgaacgcgtgcgcgaagcaccgccattgccgtttgatctcggcacgctgcaggaaacgtgctccaggcagttcggcctcgacgttcaggaaacgctggacattgcccaggccttgtacgagacgcacaaggcgacgacctatccacgcagcgactccggctatctgccggaaagcatgtttgccgaagtgccggccgtgctcgacgccattgttgccaccgatcccagcctgcgcccgttgatcgaccggctcgacagaaatcagcgttcacgcgcatggaacgacgcgaaagtgacggcgcaccacggcatcatcccgacgctggagcccagcaatctttcggccatgtcggagaaggaacgggcggtgtatggactgatccgtgcgcacttcattgcgcagttcatgccccaccacgagttcgaccggacggtcgcgcgattgtcggcgaacggccaatcgctgcaggcgaacggcaaacaggtgatcgttccgggctggcggctcgcgctgatcaacagcgaaccggagacacaagacggcaaggacgacgaacccgcccagcggagccagatcctgccgcctctgagcaacggcgcccgctgcggtgtcgagcaggtcgagttgaaggcgctgaaaacgatgccgcccaagccctatacccagggtgaacttatcaaggccatgaaaggcgtcgccaaactggtgaccgacccgcggttgaagcagaaactgaaggagacgacgggcatcggcaccgaagccacgcgcgccagcatcatcaacggcttgctcggccggagctatctggtcaagaaaggccgttccattcgcgcttcggatgccgcgttcacgctcattgacgctgtgccgtccgccattgccgatccgggtacaaccgccgtgtgggaacaggccctggacatgattgaagctggccagctgacgctggacatgttcatcgaaaagcaatccatctggatcacgcagttggtccggcaatacggaagtaccagtttgtccatcaaggttcccgaagggccggcctgtcctgtgtgcggcgccgcgacccggcagcgcaccggcaagaccggcgtattctggtcatgtagccgttacccagactgcaagggcaccgtggcgatcgaatcgtccggtggcaagcgtccggccgcccgcaagcggcgcgcgccccgcaagacttcctga

SEQ ID NO: 162966 - DNA, 630 bp, Enterobacter cloacae
atgcctccagcgactgacaaggaaaccacctgtgggctgtcgcagggacctggccgtcgtcatgagcctgtcgctgtgtcagcggtcgcacccgacccgtttcgtggctggggccggcatcgttcggcgcacatccgcgcacaaaaggaacccgttgtttcaccggcgggcaccggaatcgaacaccgtcgtccccgaagggtctcctggcgccttgcatgcaaggcgccaggagacccttcggatcggacgcagaaatcgctgatcaacaggctgcgtttacgcaaccgggcaggaaaacaccttcatccctcccggcgacacgaaccactggaggggagcatgcctttgcagaaggcggagacatgctcgggataccccgccgttggcggggcaatgcctgacaaccgctggaaatcgcggtatgggcaggacgtgtctgacgtcaggaagtcttgcggggcgcgcgccgcttgcgggcggccggacgcttgccaccggacgattcgatcgccacggtgcccttgcagtctgggtaacggctacatgaccagaatacgccggtcttgccggtgcgctgccgggtcgcggcgccgcacacaggacaggccggcccttcgggaaccttga

SEQ ID NO: 162967 - DNA, 582 bp, Enterobacter cloacae
atgaaccatcccaaccttcaatacggcagcgtgtgcagcggcatcgaggccgtcagcctggcctggaagccgctcggctggcatccggcctggttctcggaaatcgatccattcccgaatgccgtactcgcccaccattaccccgacgtccccaacctcggcgacatgagggggatcgccgatcagattctcgccggcaccgctccggcgcccgacattctggtcgggggcacgccatgccaggcgttcagcgtggccggcgcgcgcggcggcctgtccgacccgcgtggcgccctgaccctcaaatacacggagcttgcaaatgcgatcgaccaaacccgtcagcaacagcatcaacagccctcggtcatcgtctgggaaaacgtccccggcgtcctctccgacaaatccaacgcctttggatgccttctgggagcactgcccggcgaaagccgcgaactgcaaccagcaggggccaaatggacgaacgcaggttgtgtgtctggaccccgccgcagcatcgcgtggcgggtactcgacgcccaattatgtgaagctccacataattgcgcttatggatag

SEQ ID NO: 162968 - DNA, 1038 bp, Enterobacter cloacae
atgactaggcaacggcttccaacggattttgcatacgccttgtccaagttccttggggaatatctagcgacccaccgcggattgagcgaaaacaccgtgtcttcctacagagatacgttttcaatcctcttgcggttcatggagagccaggctggcatccgggctgagaaaattcgccttgcagacctggatcagcatcgggtgcaatcgtttctcctgtggcttgagcaggaaagaggaaattcggtcaacaccaggaatcaacgcctcagtgcgatcacaagcttctttcgcttcgtgccatcaatccatcccgaacatatccttctatcccaacaaattctcaatatcgagtttaagaaacgccagtcttctccggtggactatctgccgatcgacgccgttgaaatgctgctcaagcaaccagatacacgcaaaccgtcggggcgcagggacctggttttactcagcgttctgtacgacacaggagccagggtccaggagcttgcaaacatgaacgttggtgacgtgagattaaatgcacctgcaacggtgcggctgctgggcaagggaaacaaagtccgcgtggttccgttgcttgcgcccaccgcgtcacttgtgggctcatatctggaagagcaccagaatcgatatcccggccaaaaagatggtcccttgttctgcaacaatgtcaggaagcggcttaccagagcaggcatttcctacattcttcaaaaatatgtgcttaaggcacaaaaaaccagatcgggtttgctggatgcaaagattggtccgcacacgctccggcatagcaaggccatgcacttgctacaggccggagtgaaccttgtttacatccgtgatctactcggccacgccgacatcaaaacgacggagaactacgcgcgggcagactctgagagcaagagagctgctttggaaatggcttatcccagcaagccccggacgccatatccagcgtggaacgaagacggcgaactgctcagttggttgcagtcgctaggaaaaaatcactga

SEQ ID NO: 162969 - DNA, 996 bp, Enterobacter cloacae
atgcctcatacaaaatcctacttctcaggtcccttcgcgcccatgtgcgaggtgttcgtcacccaaaggcgcgccatgggacgtcaatataaacagcaggcgatgctcctgcgcatgttcgataatttcagcaagagctacaacattcgggatttcacaattccgcaggagctggcctcggcatggagtagaaagcgcccgaacgaggcggaaagctcacgatattctcgtgtcggcgaaatgctccgtttcgcagaatttctcagtaggcaaggttatccatcttaccttccgcagataaagacatctcggaagagcttacatgttccttacattttcaccgccagggaaatcgacctcatcttgaattatgtgagtagtctggagccaaccaacgcatcgccagtgatgcacctctcgctcccgacaatcatcaagattctgtatggaagcggcctgagaatatccgaggccctcgcacttcaagttcgtgacgtggatctggatcgtggagtattacatatcagacgggggaagaacgaccgcgaacgacttgttcccttgtcaacctcattggcagaaatctgccgcgcatacgctgcgcaagcgctgaagggcgtgaatgatttcgcaccgttctttttcaatcgaaggcgcgagccatacagcgcgggcttttttggaaagcactttcggcagattttgtgggaagtagggataccctatcgcggaaaagaccgtggtccacgactgcatgatcttcgccatacatttgtctgccaccggcttaacaaatgggccgacgagaacgcagacctgaatgccatgctgcccgtgctttcagcatatctgggacattccaatctgaattcgacctactactacctgaagctaaccgccgaggtgtatccaaacataacgtccgcactggaggcgaaggtcggtcacatcttccccgaaatcaatcatctgattggggagactgcacatgactag

SEQ ID NO: 162970 - DNA, 1209 bp, Enterobacter cloacae
atgaagagcggagattccgtactggacacagcccgactggttgaagaactgacagtcaggctgaaggatatgggctacagcgatttcactatcatgcgcctgaattcaatatggaggaatctggtcccctatgccaatcatcacgcccatggtgctttctcgatggaaatggcgcgggagtttatcgagaagcactatggattttgccttggggatcgagatgcttcccacaatgttcatcgggcaattcatcttttgggcgatttccagcggttcgggactattttcaaacagtcccatgtcacgttgaagggattttcaccgaactaccgaggtttgttcgagggtttcctccgcagcctgtctgaaaagggagttgccaaaggatcaatcagaacatggagaagccgccttttccggcttgagcatttcctcatccatcacggggtcgaggagttccgatttgtccgcattcagcacgtcaacgggtacattgaatcactggccggcttctcgtcgagcaccgttggcgcgacgttgagaatcctgaagcagctcttcgagtatgcattcgtcaaaaaccttcatccggagaggctcgacaaagccatacctgctgttcgccgacagaaacggcagcgcctgccaactgttttcaccccggatgaaacggaaaaaatcctgtgcgcgatcgatcgcaacaacggcctgggcaagcggaactatgcggttttcctgctgctggcaagaatggggttacgaatcagcgacgttcggacactgactttcagtcactttgactggtcgcggaacgtcgtctcgatcattcagcaaaagacgaaacgagcccttgaactgccgattatggaggacgttggatgggcaactattgattatctaagaaacggacggccacattcagattgccaaaaaatattcatcaagcatgtcgcaccgttcgatgagctgacctccgcgtttcatcggccaatgatcgagtacctgcgtaaagctggtgttgctgtgcccgcgggcaagtccagaagggtgcattcgcttcgccacagtctcgcgacaacgttgctggagaagcaggttccgattcaaacgatctcccatactttgggccatctcgatatcggtagcaccagcacgtatattcaggtcagtctgccgcaactccgcctctgcgcactggaggtggtctga

SEQ ID NO: 162971 - DNA, 1200 bp, Enterobacter cloacae
gtgtttcttgtggcaagtggtcgtgacggattcgatcccgcagcggtactttttgagcccgattgcctgcacgggaattcttcgccgggcgagcaaacgtggcaagtcgctgccggaccttttgcaggcggccctgatggcgcaggcagctttcccggatctctggccggagcctaccaacgggtatccgtcaccgtctgcttcggcggcggaaaccggcaagggccgatcgacaaagcggcctgcctgaccgcacgcgggcacaaatgcgacttcgaggtcgaaacctttgcggctcagtcggtcaccggacagcaaacccatgccctgaacaccgccaacggcggcaaaggtagtagtgaggacggaaccggccgcggcgtacccatcgtcacccagctcacgccctggtccgcattgcccatggctttcgcccagaacagccgcaacgaagttcgccttgaagccggtgatggacagatcgttggtgcgctgtcggtgggcggcggcaagccaggccagggactgcctgcaatcgcctatgttcctgcccggaacgccgcatcggatgaccaaggcgatgagaagacgccgatgctgggattcaccgcccagggcagcggcgcggatgttctcgaaaaccttgctccaacccttcgcgccggcgggcacgctgacagccatgccaatgccggcgtcgtgccggcgatcgccttcaaaacgcttcaggccaccttcaactacgacatctccggcacgctgatcagccactacagcaagaggcaggagaatgcggacacgatcctcggaccggatctgatcgcacgctccgtcgcggtgcgtgggcgggagggcggcgcaacggccgagctgggcggtgcggtcgctgacgctctgcgcgcgagcgggggcggcagcgacaaggcccatgtcctgctgccctcattcgaggcatattttcgtggcgaattgctcccgccggacgaaagcggctggtcgcgatgggcttgctggcgcgtcaggcggttgatgcctgtcgaatgcgagcgtcttcagggaatgccagacaactacaccctggtgccgtatcgcggcaagcctgccgccgacgcgccccgctacaaggctatcggtaattcaatggccgttccttgcgttgcatggctgggccaaaggctgtcaaagttcatgaacgtatag

SEQ ID NO: 162972 - DNA, 528 bp, Enterobacter cloacae
atggcattgacggtgccgtcagcgctggccgcaggtcatgtgctcgacgaattcgattgcggcaaaggcagtttgaacgactggctggtgcggcatgcccggcagtcacagtccagtggctcagccaaaacctatgtcgtgaccgacgatcagcgggtcgttgggtatttcagcctgacagtgggccagatcgataccctggaagcgcctgaccgtgtgcgaaagggtatgggggggtatcccgtgcccgttgtcattctggcgcggttggctgtagaccagcggatgcatgggcgcggtattggcgtggggctgctgcaggaagcaatccggcgcacggtcatcatctccgagcaagctggcgtgcgggcaatgctgacgcatccgatcgatgatgaggccgcacgcttctaccatcgcttcggtttcgaggcatcacccgtacgggagcagcagctactgctgttgttgaaggatgcacgaaagctcctgttgccccagagcgcgcaaacccgatcgatttcatag

SEQ ID NO: 162973 - DNA, 279 bp, Enterobacter cloacae
atgggtacttcagcaatgaaaaccgcgcggtttgggctgcgcgcaacgccgcagcaggaagccgtgctgcgaagggcggccgacgtcgctcacaagtcgatgacggacttcatccttgacagcgcctatcaggtggctgagcagacgctacttgaccagcgcctgttcgtcgtctcaggcagccagtcgcatgcgcttctggatctactggatcgaccggcgcaggacaatgcagggctgaaggatctgttctcgcgctctgcaccgtggagtagctga

SEQ ID NO: 162974 - DNA, 1566 bp, Enterobacter cloacae
atgggcactatccgtctcaagaccaatcagcaccgtctgatttccaaccttcgacatgccttcaacccgcagtcgatgctcggcgaactgctgcagaatgcacggcgagctggtgcgaaccagatccacatcactgtggacgacgcctcgatcaccgtcagcgacgacggcgccggcatcgccgacatgcaatccctgattcatatcgccgaatccggctgggacccggaactgcaggcgcgtgagaacgccttcggcatgggcgtgctttcgaccttgtatttttccacgcacctgtcggtgcattcgggtgcgcaggcgttcagtgccagcaccgcgaccatcatccgcggcgatggcattgaggtccatgctgaagacgcacgtatcggcacggaaattcgtctcgatggcgtgcaatctccaaccgccggcgtcaatctgccagcctgggtggcacagcagctcaagaggctatgcgaggcctttccggtgcctgtcttcctcaatgaaaaggaactggttcgaccgttggccaatcctgccttgcaatggcgcgaaacgcctgtcggacggattctgctcaacctggaggcctcgtgcgtccagtggcagtgcttcctgcaggggcttcccatcggccttccgcccagagcatcgaattatcacgtggtcgtgctgcgcgacgatatgattgcctggcttcccgatcggcaacatctgctcaatgaagctgacgaatatgtccgtatccaggccgcgatcaatcaagcctacagccaggcattgatcgaagccaaggagcggctgccggccagcgagttcatcgagcactatgccgaaaggtgcctttcctcatccaatgcagacctgttgaacgacattcccttcgttccgctggcatggttccgtaactggtacgacactcctccaggacattgccgcttctgggagcgctatcaccgcaccggaatatcggccagtgaggctctgaaggaagtcggcgtctggtgcatcgacagcgaggacgatgatcaatcgactgccgaggtctaccttagcgctcgcaaagggtttctgctggaggaaacacggctggattcggagcattggctgatgtccatggtccgaacgatcaggcccgagcaggttgtcgtccagcatgccaccaggctgtatgaagacaatcaccccagcctggcggacggcgcactctcgctggttctggtcgaaggcctgcgcgtcagcctggaaggcgagcccggcgagtatccggtacatgcggtgcgcagggtcgacaccctctacctcaccgtagacgtgggctccgtcacccagctgatttcggactacatgttcgatgaccgttacgacgaagccagcgaggccgaggatgagcggaccatcagtaccttcatcgccatcggctcatcgcaggacccgattcgcgtcatcagcgccttgctgccagacatgctgcgctatacgcctcagcccaaactggcaggcgcgacggtgcggctggtcttcgatgatgaaggcaagctacaaacgatcaccaattga

SEQ ID NO: 162975 - DNA, 558 bp, Enterobacter cloacae
atgagcattcatcaacagcgcgtcagcctgaagaacctcaaggttgccgatttcgccagcgaggaaacgctttgcttcaccgccaccgttttgttcgacggcgaacccatcgccgacgccagtaatgacggccacggtggcatgaccttcgtccgcgcacgcgacggaaaacggtcgaagctcgctgaagcagaggagttcgcggcaagcctgccaccggatgtcaccgagtacgacgatccccaggatagctcccgtaagttcaccatccagatcacactggattacctggtcgatgaccttgccaatgcgatgcacgcggacaaaaaaatccgtgctgccttcaatcgcgacatcggcaacaaggtgctgttcgtgaaggacggaaagctactgttcctcaagggcgtcaagctcaagactgtcaccgacagacctgcctacttcgccaggctgcgggctgcgcaaaagcaaccaatcgtcatcctcgccgagctcgcgcctgatgaggcctttgccctctggaaacagcacacctgcaacgatggcgcgtcttga

SEQ ID NO: 162976 - DNA, 243 bp, Enterobacter cloacae
atgtcgtttgtttcctatccccaagctcccagaacacaggctgacgccattggccgcctggcattgcactgggtgggcaaacgccttccccttcgcgttctgcgcagcgctgctggttattacatcggcacgaccgatgaagaaggtccggtctcacgcgagtccgtcgagtatttccccaacagcgaaacagccgccacggccctcgaaacaggccagtgggaacggcgttcgcatccctga

SEQ ID NO: 162977 - DNA, 399 bp, Enterobacter cloacae
atgaacctgagtatttctctccccgaagaggtgatcgaacagatcgcacgcgaagaagcccattttgcactggcgccagccgcgttcttccgagcctggaaacgtggcgtggaaatcgccggtgtcgagtggttcggtgacggcacccgtgaaggattgcggagcgctgtcagcaagtgggatctacgacccaacatgctgctgctcaacgatgccctgggtgtcctgagcggcgggcagcggctcttcctctccgccatggtcagcttttacaactccagagaaggtgccgcgatgctcaggcgtatcgggttcgaaggccttgccgatctcggtggtctcgatctggaacgcagggaagtcatcgcagagctggtgcgtaactacagcggctggtga

SEQ ID NO: 162978 - DNA, 675 bp, Enterobacter cloacae
atggcgaacaattactacgaagcgaccggcgttctgtcgctggagcacgtgacacctgtcattactgccctgttcggagccttcaacctcgacgccagctatccgggcaatggccgcgctttcatcgccaggattgccgaaaccaatgatccgcaatgggatgacgtgctggaaaggctgactgccctggctgcacagcttggcatttcgccaaattcagaggccgagtccacaattgaggtagttctggaaaaccttgccagatacttccaggccgatcaggacgaagatttcgaaaaccttatcgagcatcatccgtttgaaggagatgcagaccttgaagccttgttcttcatcgcatcgcgtttcaacgatggccataaccttgtcgctattcagttcgagggttgctggtactgcagcgcgccgcggctgttcgagtttgttggtcacgcctgcttcatcagccgggaagtcaaccttttcaggaactccactcaggcgttgaagctcggaactgatttgcacaaggctttgcgggagggtgatctaactgaagcaaccacctgcattactcttgaaatggcaggtcttcttgccggaattcaagatccgaatatccgccgaatactgcggcaacgcattgccgagtgtctgctccaagatcaggactga

SEQ ID NO: 162979 - DNA, 714 bp, Enterobacter cloacae
atgtcccagactatcaatcctttcattcgcggctatcggaacctgcattttgtccgaacactctgcatcagccacgaagacgacagcccgctgatctggcggcctttgcatcccagtcaggcgcatcttcctgacgatcagatcgcacagttcccctgccttctgtccagcgattatgcgctgatcaccgagggccaggaaataccggaagacctggaagcacaatgccagacttccggcctcgtacgaactgttgtctacgccattaccggcgatgacttcagccagcccgttcacgttggcgactgctattctcgggaagctgcgcaggaagtgatccatcggctgagtttcgacaccggattttatagccggtgctgggagatcagcacagcgcatattaccgaagaagctttccactatctggccgagttggcagatatcgccacgccgaccggattccggttcatcgcattccgcatcccatacagcccggcgatcggcatcaaactgattgcgacaccatggacagatgagaacctgctgcacgtggagggcataaccgcagcacaattgcggcaggaacatctggaaaagcgtatgccagaatctctggccgacatcattcatctggccgcactggcggatatccgcatcctgatctttgatgctgatgctccgaccctggacgacctgcctcaatatgaagagtaa

SEQ ID NO: 162980 - DNA, 591 bp, Enterobacter cloacae
atggcatcggacaccggaataaaggcaacagcgacttctgccgagaagaagctgttgaacgcagtcaggaacatcgtggcggcgaaagacgcattggacgcggcgctgaaatcacccgcctcgacagtccttgtccctcccgagctgcgcaatagcgcaagttccgcgatcgatgtctccgccttcaccagggctgtagtgccgtttctggacctgacacactcgcttcatccccgacgttcccgcgtccctctcgatcgattgctgggtgagtcctggcggtggcgagagccatcatcgtcaagccgctccgtcaccgcgcttgccgactatctgctggaggatgaccgctctctgcccggtgaccgtgaccaggccattgtgtttgagatcgctccgctgggactgtggttcgcccacgagggcaaaaaccgggtccatttcctgcgctccggcggcgcaaccgaaatgcctgcgatggtgacgacccgatgtgggagggctccggtttcaatctggaggttccatcatgtcagaaatcgcctgcaactcttcctcacaatctatcggagataccggtctcgcgtttga

SEQ ID NO: 162981 - DNA, 342 bp, Enterobacter cloacae
atgtcagaaatcgcctgcaactcttcctcacaatctatcggagataccggtctcgcgtttgatgaaatcgcctggcgggccgtctgcgagaaggttgccgtacaaacccacaacggctgcggactgtctcacgactactacgtcgaacgcttcagttcggagattgaacgacacattgatcgattgcccgaacaccagcgggcacaggctctgcagatcgcccaggactgggactacgcgacacctgccgagaggcaggaaacccacgactggaatgcagataatggctactgcacacacggaatcgagctgggttgttgcccggccggttgcggttcataa

SEQ ID NO: 162982 - DNA, 561 bp, Enterobacter cloacae
atgaccacttctaccgaaaagtcctttttcgacctgcacatcaccggcctcggctacctcaatcgcatccgcgaagtgaagccgaagaaaggtgatcccttccttgcctgcgatatcgcagcactcaatggtccgagcgacgatgtttcgtacgtgcgtttcgatacgcgcgtttcgggcaccgatgctcagcatctgatccgtcgctgcatcgatgccgtcgaggcagagaagaaagtgatgatcggattccgtctgggcgacctgtggaccgacaccttcacctattccaaggggaagcgtgccggcgaacagggtgtaagcctgaaggcccgcctgctattcgtcagttggatcaaggtcgatggcgtcctgaagtacaaggccgagcccaagccggccgagtccgaacaggatgctacggagcaatccgccgcacctgcacctgctcctgctcctgctccgcaggaagagccggctccggaagtatccaagccggtcgctgaacctgccgacgaagccgctgatgcgcaagcaccggcactggccgagtcgttctga

SEQ ID NO: 162983 - DNA, 612 bp, Enterobacter cloacae
atgatcaccctaccaggccagttggccatcaagacaatccatggcaggaatggcgacttcaatgtcggccgcctctcgaccagtattggtgagttcgtcatcaagaatgccgagctggaccagtacgacgaaggcaaatacgacggagatttcgtcatcgccgaaatccgaccctccacctacaacaccagtgggaggatggtcatcgaaatccgcgcccatctgggcgggatgaccctctcaaacagcgatcgccttagcaaggacgaagcccagcggcttagcccgcaggagatcgatcccattgatgaggaagcacaggctccagcggcagccgccaggcctccagccaggaccaaggcccgcagcacgcgtgatccactggtcgacaccacgccatttggcagcgaaccagcggcagcatcgccctccgacgcctcggctgaagatgacgacgcggcactgttcggcatgctctggccattgagcgaaatcgtgaaactcgacgcaaccgtcgaccgccgcgtcctgcgtcagcagcgcgaccgtctcgatgcgatgggctatcggtttgaacctctgtcccaggactggcacctcgccagcgcctga

SEQ ID NO: 162984 - DNA, 342 bp, Enterobacter cloacae
atgagtcggcactgcttcgacacgtcccacaagggatttcccatcaccgtcgtgctcggctgggaccggccgatgcaatatttcttcctgaccatcgaaaagcctgccgagctgatcgacgacgccatgcaggtcgaggatgaccgcttcctgtacagcaatctgcacgaggccgatcctttcggtcatggcctggactactaccgcgaggtcttgcggcattttcagatcatcgtgccggaaagcctgttcagagaggtccagtccgacgccgagaggaatgtcggcaaccgcttcatcaggcatcaggcagacggttcattcaccgagctggggttctga

SEQ ID NO: 162985 - DNA, 396 bp, Enterobacter cloacae
atgggttggctattttcccatcgctcacgcagcgaactgatccattacctggtgcagccccaaaactgccaggcagcacatgtcgaaaccctggcctataccctgcgcggcaacgtgctgtggtccgtggtcaaaatcacggccaaagagccgaatatgctcaacctcgctgccggtgaattcttcacctatatcggctgcacattactgcaacgctaccgcaacgagtggggctacaagtcgatggatgaatccgttcatccctactactacagctgcccgctcagctatctggaacgcgcacccacgcaatcgcccgaatggcgcgagcgtgtacgggcgtaccacgaccacagacgcgcagtacgttcggcatccgccgttccagtcgtctga

SEQ ID NO: 162986 - DNA, 828 bp, Enterobacter cloacae
atgcaactcgcatctcgtttcgcatcacgttccccgatcctgcgtgcagatcatcccctgtcggatgaccagatccgcgcagtcgctccttccatcttcgcggacaccccgcacgaaagccgctccgaacggtatagctacataccgacctccgccgttctggcgaaactccgcaatgaagggttcgagcccttcatggtgtgccagacccgcgtgcgtcatgaagaccgtcgcgagttcacgaaacacatgctccgtcttcgccatgcaagccagatcaatggcagagaggcgaatgagatcatcttgctgaattcgcatgatggcaccagcagctatcaaatgctggctggcatgttccgtttcgtgtgccagaacggtctggtgtgcggcgatatcgtcggtgacgtccgtgtgccccacaagggcaatgtcacagaccatgtaatcgaaggcgcctatgaggtcctgagcggtttcgaccaggtgcaggattcccgcgaagccatgcgagcgatcacgctcgatgatggcgaggcggaagtcttcgcaaggtcggccctgacgctcaagtacgacagcgacaccaaggtgctgccgattactgaaagccaggttctggcgacacgccggttcgatgacaaccggccggatctgtggtcggtgttcaaccgggtgcaggaaaacctcgtcaaaggaggtctgtccggtcggactgccaatggccgccaccaacgcacgcgtcctgtgcaaggtatcgatcagaacgtccgcctcaatcgggcgctgtggctgctggccgaaggcctgcggcaactgaaaaactga

SEQ ID NO: 162987 - DNA, 651 bp, Enterobacter cloacae
atgcccgatacaacatcttcgcaaccgcttcttcgcattgatgaatgccccgacctgatggccgacggctacatcggcgacgaaggcggcaacctgaccttcctgtccctatgggcacgagatacggccattcagcagtttctggcccggctcacgctgggtcgtgacgacgatggcctggatcagttccacctcatcaccgacgcaggcggctccattccggttttcatcggaaacgtcgacaggctggagaagcgctccacgcgccttttccgccgcaccctgttcggtgcgatggtcaacctgtggctcttcgaccagcgctgcgtcaagcccgacaaggccaacgccagcgcgctgacgctgttgcccagggactcagaccatcggcttgatcgcttgtggacgctggtacaggaaacgtgccctctgccactcctcgatcactggcgcgacatcgtgctggatctgctgatggagcaatccatgctggcacgtcttcccatggcttacgggcccctcgaagggcaccgtctggctctggatgtccctgtgctcacaaaggcactcggcgatctgatccgtaacggcacccttagcgccacggcgcatgaactggtttccggcatgcctttgcggcacgtcacctga

SEQ ID NO: 162988 - DNA, 1107 bp, Enterobacter cloacae
atggctctcatgttccccaggcttgcccgcaattttgcgaaaaacggctactacccaacagacgaacccacactggagcgggcgcttaacgcgctggcgccagcaaccgggcaagtcaccattatcgacccatgcgccggcgaaggcgttgccatcgctgaggccgctcatgtgcttggtcgtgatctggtatccgcttatgccgtcgagtttgacgaagagcgtgccagacatgcccgaggccttgtcgaccattgcctgcacagcgatctgatggatacgctgatcagccggcagagcttcggactgatgtggctcaaccctccctatggtgatctgtccagggatgccgatggcaacatcggctatcagggtcagggccgcgccaggctggagaagctgttttatcagcgggtcttgccgctactgcaatacggtggcgtgttcgtattcatcattccgagctacacgctggatgccgagctggtgggctggctgacacgccatttcaccggactgcgcatctaccgtgccgtcgaacagcagttcaggcaggtggtcatcttcggcacccgctcacgtcagcgtgatctggcgagcgatgccaaatccatccgaaaccggctgttgcagatcggtgctggtgatatcgaagcggaagaactgccggtcgagtggccgttccttccgtattccgtcccggctacacaggccgagccggagcagttctatcgggtcaccatggagcccgagcaattcgctgccgaggttcatcgcctgcaagggctatggccatctctcgacacgcatctcggcgcttcgcagcaatcgctgcggccgccggctcgtgccttgtctcactggcatcttgccctggcgctcgccgccggtgcgatttcaggtgtcgtgcgatctaggtccggcaaggtgatggtcgtcaaaggtgatacccacaaagagaagtccgccgcggtcgaatacaacgaacgtgacgacggctcgatcaccgaaacacgcatcctcaccgacaagttcgtaccggtcattcgcgcatgggacatgacacccggctcccccacccggggagaggtgctcaccatccgctga

SEQ ID NO: 162989 - DNA, 327 bp, Enterobacter cloacae
atgcgcatcaggctgttcccacgccagcgttccacgccggcatccgtccctctgttttccagtggtgccctgacgctcagcgccagagtgcaatggctggacagaactgggctggttgatccccaccgtttcctgcatcgccacctgcgtggtgattggggcgatctcgaagatactgaacggcgtgcaaacgatgctgcccttcaatccaaaggtactctgacctcgcgctaccaggtgacgccgcggctttcgctggtggtgatcaccaacgaggaccacagccagaccgtgatccaactgcccgaagaaaacgatcctcactga

SEQ ID NO: 162990 - DNA, 306 bp, Enterobacter cloacae
atgacatccgacgcaaagcgtaatggtcatcgccgtttgctgttcccgatcgacacattgattttcagccagggcgtagatcgtctgatgcgggaaggccagcttgatccgatgccttacctccagcgccacatccgtggtgactggggcgatgtgacggatgacatgtggcaggaaaacaatgccgccctggcgtccggcgagcctctcggttcgctttacatcgtcacccgcgaactcaccattcgcatcttcaccgaagcagaccggagcgtgacgcatgtcatgctgccgtccgaatcctga

SEQ ID NO: 162991 - DNA, 312 bp, Enterobacter cloacae
atggcacatgaagcacatttcgttagcgttgtcccgcaaccgcgattcctgaccgggcaactggtcatgacctccggcgtcgatgaactggtccaacagggccgcctcaatcccagccgatatctcgcgcgccatctcagcgccgactggggcgatctcgacgacagcgactggcagtccaatgacagtgccttgcgcaccggcgaggaccgcctgttttcgtcctaccaggtcgagcctgacctgaagctttggatcatcaccgaatgggatcgcagcgtcaccacgctgctgttgccgtccgaatactga

SEQ ID NO: 162992 - DNA, 2274 bp, Enterobacter cloacae
atgtccctcgatcttgaaaccatccccgaatccgccgcgcagggcgacttgctcgaacaggaatcttctcctctcaccatcagcctcaacgacttcgtttccgaattcggcgacgaactgctggacagcctcaaccgcgccaatcccccggtctataccggccaggcacgcccacaccggcaactggttttgtcgggtctcaagcgatcgccgttcccggcgcaggcggaagtcatccacgccgtcagcgaattgctggtcgaccgcggcgaacgtgccgcgatcatcaacgcagaaatgggaacgggcaagacgctgatggcaattgccgtcgcggccgtgctcaatgccgaaggctatcgtcgcacgctggtcctgtccccgccgcaccttgtctacaaatggcgccgggaaatactcgaaaccatccccggtgccagggtgtgggtgctcaacgggcctgatactctggtcaagctgctgaagctgcgcgagcaactcggcgtaccggccaccggccaggagttctttgttcttggcagggtcaggatgcgcatgggcttccactggaagcctgtgttcactcgtcgccgcacgcctggtggctttgtcggagcatgcccgcattgcggtcacgtcatcaccgatctcgatggcgagcccgtcaacacggtcgagctcgaggccgaagagtcgcggcgcaagtgcagccattgcgcatccgcgctgtggacgttgatgcgcccgcgctctctttcctccaccgatcagtcctcggcggtgatcaaggcgctcaagcgtattccgaccatcggtgaggctacggctcagcggctgatgaagaagttcggtgagtcgttcctggtttctctcctgggcgacaacctgttcgagttcatcaatctgatggacgaaaacggcgatcttgtcttctccgaccggcaggctcagcgcatggaacgtgcaatggcctccatggaatttggctttggtgagggtggctatcaagccagcgagttcatcaagcgctatcttccgcagggctttttcgatctcctcgtgtgtgacgaaggccatgagtacaaagggtcgggttccgcacagggacaggcgatgggcgtgcttgccgccaaggctcgcaggaccctgctgctgaccggtacgttgatgggcggatacgcggacgatttgttcgcgctgctgttccggacgctgaccgggcggatgatcgaagacggctaccggccctccagaaccggcagcacgacgtcggctgcgatggccttcatgcgcgaacacggcgttttgaaggacatctattccgaaagcaccggcacggcgcacaagaccgccaagggcaccaaaatcacggtgcgcacggtcaaagcaccaggcttcgggccgaaaggcatcctgcggtgcgtgttgccgttcaccgtgttcctgaaactgagggacattggcggcaacgtacttcctccttacgaggaggagtttcgtgaggtcgcgatggaggccgatcaggccatcgcttatcgtgaccttgccggccgcctcacggcagctctcaaggaagccctgcgtaagcgggatacgacgcttcttggtgtggtcctcaacgtgcttctggcctggccagacacgtgcttccgtcccgagacggtcacgcatccccgcacacgggaattgctggcgttcacaccgtctcagttcaacgagctggaaatcacgccgaaagagcgtgaactgatcgacatctgcaaggcagagaaagccgagggccgtaaggtcctggcctataccgtctacaccgggacgcgggacaccacgtcgaggctgaaggttctgctggagcaggaaggtctgaaggtcgcggtgctgcgcgcaagcgtggatacctcacggcgcgaagactggattgccgatcagctcgaccggggcatcgatgtgctgctgaccaaccccgaattggtcaagacgggcttggatcttctggagtttccgacgatcgtgtttctccagtcgggctggaacgtctacacgcttcagcaggcctcgcgccggtcgtggcggatcggtcagaagctggccgtaaaggtcatctatctcggctatgcagccacgtcgcagatgacgtgcctgtcgctgatggcgaagaagatcctcgtctcgcagagcacgtcgggagatgtgccggagtccggcctggatgacctcaacacggatggcgactctgtagaagtggcgatggcaaggcaacttgtcgccgcctga

SEQ ID NO: 162993 - DNA, 867 bp, Enterobacter cloacae
atgagcactgctagaacgatggagcgcacgcgaaaggagttggccgactttctgcgtagtcggcgtgagcgcttacaccctgttgatgttggtcttccatctggtggacgccgccgtacgcccggcctgcgacgcgaggaagtggctgcattggccggggtcggattgacctggtacacgtggctggagcaagggcgtgatatcagtgtatcggcgacatttctcgacaatctgtcacgggtactgaagctggatgccgctgagcgccggtatctctatctgctaagccagcagcgtcctcccgcagaaccgggaaagacatggtgtgtcgtaccgcaagtggtccatcgtctcatgggtgacctcgcgttacgcccagcctacgtgatcaatcttcgatgggatgtgctggcgtggaaccaagccgcagaccgagtgttccacttttcaaagcatgccccggaacgccgaaacctgctctggatgctgttcgctgatcctgatactcaagcgctgtttagcccttgggaggagcaagccctcaacttgctatctgagttccggcgagatttcgtccgggcgacgcaagagcctgatatctgtgccttgatcaaggatctggaaaaggtgtctcctgatttcaaggcttggtggcaggaacagaccatccatgatctgaatatgagttggcagcgtttatctctttcaggttacgggcatgtcgcgttcgaatacacgaagcttacgattgacgaggatcgccatcttcgattgctctactacgcagcattggatcaaagcgatcaagatcagagtttcatcaattggctgacgtcctgtgccgaaaatgaaatagcgcctctatga

SEQ ID NO: 162994 - DNA, 1104 bp, Enterobacter cloacae
atggcctcctacgttacggctgggctcctgccgatgatcgaaacggctttttctgtgtccgtagcgattgcggcgcagctggtcaccgccttcacgctggcctatggactgggatcacctatctttgtcgcgttgttacccgcgcaccagcaacgagcaggcttactgttcgccctcggactatttgttctggccaatgcagccagtgcgctatctaccgacttcacggttctgatggttttccgcgccatcgcgggtattggagcgggtgtttatctcgcgatgggcatcgccgcctctgcggcgctttccccccctgatcagcgtgggaaatcaatcgccgtaatcatggggggaatggctagcggaacagtgctgggcgttcctttgagcctgctcctggcggaacaactcggctggcaatctgcgctgtggctggtcacgctgttggggggcatcgctttcgtagggctgtttgcccgtcttcctgcattgccaacggcacaggcaatcccactcaaggctaaaatcgcattgctcacagatagccatgtggtggtcatccttttggtttccctgctcgcggcgatttccagcttgggaatgtataccttcctcgctccgctgatagctgctgctgaacccggctcatctccctccgttacgccgtatctttgggtatggggtgttggtggggtgctgggcagcttcctgatcggtccgctcgtggatcgcgttaagggaccgacgctgaccttatggattatggccattctggcaatggcgctgcttttactgccggcctcgttgtctaccggcccttggctggtgatgcttccgatctctatctggggtgctgtaggctgggcgctgcaggtccctcaaaacaatgagctgatcaaagctcgtgaacaacagggagatggcaatctcgctgtggccttgaatgaatccgccctctatctgggaagcgcgctcggcgctgcaatgggagggattttacttctgcagcaatggcctgcatggatgttggcgaccagtgcaggggctgtcgcaattattggcacaatacttcaactacttaatttacgcaggaaaccataa

SEQ ID NO: 162995 - DNA, 585 bp, Enterobacter cloacae
atgcaaccattcagctccttccatcgccgtctggcgggctgcggcctgctgatcgccgcggtactgatgagcggctgcgcgacgacagcgccgccggccaggaccgccccgatcgcgaagccggcgatcgcaccggcgaaacagaagccggaattcattcctgtggttcgctatgggcgctataccctggtcgagctggccccggcctcggcgcagaaggacttgctgctgcaggtcgtcgatgtcgccgtacccgacacgcgcaatgcgactgtgggcgatgcactgcgtcacgttcttctacgctccggctaccaactctgcaccgggggcgacgtcaccgctctcaatgccttgccgctgccggcatcccactatcggctgggaccgatgctgctgcgcgatgccctgctgacgctggcaggttctgcctgggatctgaaagtcgatgatggagcccgccggatctgcttcacccgcgctccgcaaccgtcatccattcagaaccaatcaccttcgcaatcggcccggaaggcgcctggccatgtcgaaagacgcccgctcacaacggaggcccggccatga

SEQ ID NO: 162996 - DNA, 648 bp, Enterobacter cloacae
atgacggtcattcccggctccagccgtcgcccgcgcgtcacgctgatgcgtgtggccactatcacctgggtcttgctcatcagttcgggaacagtcgtcaaccacgtggcgctgtcgaacctggcgacgcagacaagcgccagtgctcaaagtgcccaggttgcggcactcgaaacccggctggcggaactgagccagcagatcgaagcgcagcgccagcagcccgatgcgttgacgaccacccgatacgaatccgagcgccaggccatcgagcagcgggtttccgccattgaacggtcgctggacgacaggcttaccgccgatgatctttcgccgttgctgacccgcatcgaacaactggagtctcgactggacaaagcagcgcagaccccgcccatcccagcccggacacggaaaagccaaccctccaaacccaggacagcagcgcctccattcaaggtcatgggtctcgaaatgcgcggcggcgagcgctttctgtcgatcctgcctacgggcgcacccgcggcgtcccggacaggcgttttgcggcccggtgaatccgaggctggctggcgactggaaaccatcgaagaccgtaccgccgtattccagaacaacggtcaggttcttcgcgtggtagcgccatag

SEQ ID NO: 162997 - DNA, 741 bp, Enterobacter cloacae
atgaaccgcacgatcatttcctttgcgctggcgaccagccttgctgtcggcccgattttcccggcagtggcgcagaacgcccgcacaaccgcatctcctgttgtgcccagtcaggaacaggcaacggtcccgagcaacagcgaggagcaaaacgcccgcgactgggggctgcgccttgaggaatggacacgctaccgggaagtgatgcgggggccgctgggcatcttttcccccaatctcgatccactgactgcgcttggcatcgaagcgcgctcggatgacgaacgtcgccgctacgccgaattgcaggtgcaggtcgaggcgcggcgtgtcgagaaaacactggcttaccagcgtgcttatgacgctgcctggcaacgcctgcatccgggcatgcagcgcgtcaatctgccgggggccaaccaggcttccagcgcggcacatgtgccgagcgatgcgagccggttggccgtattcataaaagacgattgtgccccatgcggccagcttgtccagcaattgcagacttccggggccgagttcgacctctacatggtcggcagccggcaggaggatgcccgcattcgcgattgggccaagcgtgcccggattgaccccgcccgtgtccgtagcggctccatcaccctcaaccatgatgcaggccgctggttgtcgttgggcctgcaaggggagctgcccgccgtcgtgcggcaggtcggcggcgaatggcaaaggcaatga

SEQ ID NO: 162998 - DNA, 573 bp, Enterobacter cloacae
atgaaccattacgcacgcctgctcgcgttgctcgccgccttggccgccggaaccgcactcgccagggcgcaagagataccgcctcctgcctaccaggtcgcagcacagcgcgcggatattccttccccggttctctatgccgtcgcgctgcaggagagcggcttgcggcgtggtggccggttgatcccatggccgtggaccctgaatgttgctggagcggctcgccgcttcagcagtcatgcagaggcatgcgacggactgaaacaagcattgcgtgaagttccgccaacacgcgtcgatgccggactagctcagatcaacctgggataccagaagcatcgctacagccatccctgcgacctgctcgatccataccgcaacctcgctatcgccgccgaaatcctgcgtgaacagcacacgcccggcgaagactggttgctcgctatcggccgctatcaccgcccggccggcggtgccccagctgcgcgttaccggcgcagcgtcagccagcacctggcgcgggtggtcggtcccacccgtgctgacgtttccaccaggaggaccacgccatga

SEQ ID NO: 162999 - DNA, 552 bp, Enterobacter cloacae
atgaaacctgccttctcttgttttgccgccatgccggttctttgcgctctcctgttcatgactggtacggcggcgctggccgggcaaccgcctcttgtcgtggtcgaggaccacggcggttcctctgcattgccttactatcaggcgctggatttgccaccgcgccaggatcggacccttccgcccccgatctctgtgccatcccccggaggcaagacattcagcgaggcggatatgctgcccgtgcgctcggaacgcctctcgcccggcgacgagccacgcagggtcatacaggctcccgggttaacaccggtctttctcgttggcgacgacgaacgttcccgcttgtggcttctggaacgcaaaaccgcgctgcacgaaatcggctccatcggtctcgtggtcaatgtcggatcggccgaggcgctggcggcattgcgcaagctggcgcccgagctcaccttgtccccggcatcaggtgacgacctcgctcagcggctgggactgaagcattacccggtcctgatcaccgccagcggcatcgagcagtga

SEQ ID NO: 163000 - DNA, 2166 bp, Enterobacter cloacae
atggcccagcctcatgcggtggaagtgctgctgcggccagcagtggagctatacaccgttgcggtatgcgccggctccgcgctggtctgcctggtggcaccgtggtcgctcgcgctaagcccgctgctcggattcggcagcgctctggccttcctcatttttggcgccatccgcttgcgggacgcgatggcgatcttgcggtatcgccgcaacatccgacgcctgcctcgctatgtcatgaccagtcgccaggtgccggtcagccgccagcgcctgttcattggccgtggcttccgctgggatcagcgccacacgcaccggctgatgcagacctatcggccggaattccggcgctacgtcgagccgacaccgatctaccgcgttgcacggctcgttgaagagcgccttgagttcgcaccgtttccgctttccgcacttgcccgcgtaactgcatgggacagcccgctcaatcctgcccggccgctgccgccggtgggcggcatgccgcgcctgcatggcatcgagccacacgaaatcgatgtcactctcccgctcggggaacgggtcggccactcgctggttctcggcaccactcgcgtcgggaagaccaggttggcagagctcttcatcacccaggacatccgcagaaaaaatgcggctggtgagcatgaagtcgtgatcgtcttcgatccgaaaggcgacgccgacttgctcaagcgcatgtatgttgaagccaggcgtgcgggccgcgaaaacgagttctatgtgttccatctcggctggcccgacatcagcgcccgctacaacgctgtcggccgcttcggccgcatcagcgaggtcgctacgcgtatcgcagggcagctttcaggagagggcaacagcgcggcattccgcgagtttgcgtggcgcttcgtcaacatcattgcccgtgcgctggtggaactggggcagcgcccggactacctgctgatccagcggcatgtcgtgaacatcgatgcgctattcatcgagtatgcccagcactacttcgccagccacgaaccgaaggcatgggaggtcatcgtccagctcgaaggccggatcaacgacaagaacaccccccgtcacatgatgggcagggaaaagcgagtggtggcgctcgaacagtatctgtcccaggtgcgtgtgtacgatccggtgctcgatggtctacgttcggcagtgcgatacgaccggacctacttcgacaagatcgtggcgagcctgttgccgttgctggaaaagctgaccaccggcaagaccgcgcagctgctcgcgcctaactattccgacctaagcgatccgcgcccgatcttcgactggatgcagatcatccgcaagagggccgtcgtctatgtcggactggacgcactctccgatgcggaagtcgctgcggccgtcggcaactccatgttcagcgatctggtatccgtcgccggacacatctacaaattcgggatcgatgacggattgcccggagccaatgccggcaacaaagtgccgatcaacgtccatgccgacgaattcaatgaattgatgggcgacgaattcatcccgatggtcaacaaaggtggcggggccgggttgcaggtcacggcctatacgcagacattgagtgatatcgaagcccggatcggaaatcgcgccaaagctggtcaggtcgtcggtaacttcaacaacctcttcatgctgcgtgtgcgtgaaacggcaaccgccgaactgttgacgaagcaactgccaaaggtcgaggtctatacgacctcgctcatgagcggcgcgaccgacagttcggacattcgcggtcagacggatttcaccagcaacacgcaggaccgcatcaccacaacgagcgtgcccctgatcgaacctgcccatgtggtgtcgctaccgaaaggacaggcattcgccctgcttgaaggcggcaacttgtggaaggttcgaatgccgttgccggcgccggacccggatgaggtcatgcccaaggacctccagcaactcgcgggctatatgcgtcagcactatgtcgaggccggtgactggtgggaaaaccaggggctgcctggtttgcaggatgagcccctgccagaagatttgctcgacggcttccggcacattaccactgtcgacaatgaggccgtttcaccatga

SEQ ID NO: 163001 - DNA, 750 bp, Enterobacter cloacae
atgagcgatccggcctccacagctcagcgacagcagaaccgccagcaagggctgatcgcaggcatcatcacgctgccatttcgcctgttcggcgtgctgtgcggctcgctgctgctctgcatcgtcatcgagtgcgtgggaatgcacctgttctgggcggacgagggatggcgacacgcgcagagtatgttgaactacgagctcgcccagctttccggtcacttcacgcgcagcgcgctggtacaggaaccagggcgtaccgcgaactggctggtcgaacaggcctatcagtggattttcgtcaaatctgggctgctggaatggatgcgtaacgcagcagatcgggccagtgctccgggccaaagtgccgcacgggacttccgctactacatcagccaggcctacgtctggatagaaagctacctgatcgccgcggcgttcacgacgctggtcttcctcgtgcgcttactggtactggtgctgacattaccgctgtttcttctggccgcgttcgtggggctggtcgacggtctggtgcgccgtgacatacgccgcttcggtgccggacgcgaatccggcttcctctaccaccgggcgaaagcgagtctgatgcctttggccgtactgccatgggtgacctatctggcaattccggtgagcgtcagccccttgctgatcttgctgcccgcggcagtgctactgggagtggcgacgaacctcgctgcgggaagcttcaagaaatatttgtag

SEQ ID NO: 163002 - DNA, 198 bp, Enterobacter cloacae
atgctcattctgacgcgccgcgtgggtgaaatcatccgtatcggcgacgatatcaccgtcacccttcttggggtcaaaggtcagcaggtgaagttcggaacttctgcgccgaaggaggtgaatgttcatagagaggaaatctatgaccggattcacggcgaaagagtttcggctgtttctagaaagaacctctattag

SEQ ID NO: 163003 - DNA, 1290 bp, Enterobacter cloacae
atgaaatcggctgtctcgatacgtcagcagattcaggtctgcatcggcaaggcgggcacgcctgtcggcaccctcgtttacgtcaagcagggccgccgcgaaaacaccacctttgcctacgaccaggactggctggcaaaccctgccggcttcaatgtgtccgccgatctcggttttcactccgggtatcaaccgcgcagggcgccgtcagcgcatgattcggtcttccacttcgcccttgccgatacggctccggacgcatggggacgcagggtcatcgcgcgggaccacgccaagcgccgcaaggacaacgcagcgctcgccccgttgtccgaactggactacctgctggcggttgacgacttcagtcgagttggcgccttgcgtctgcgcgatcaggatggccgctattgcagggcggtggaggatggcaggcgtagcacaccgccgcttctggaactgcaacgcatctacagcgccagccgtgcggtcgagcaaggccaggaaagcaccgaggatctgcgttacctgcagggcaaaggcacgtctcttggcggcatgcggcccaagagcactgtggtcgacgaagatggcgcgctggccatcgggaaattcccgagcgtgggggacacgcgcagcgtgacgcgcggagaggtgctggctctgtgcctggcgcaacgtgccggcatcgacgccgcggctgcccgtatcgtggaactcgacggcataccggtcgcgatcatccgccgcttcgatcgcgatgatgccgacgggcgcattccgtatcagtcggccgcatccctgctccaggcttcgcgtgaagaggatcgaagctacaccgagatcgcggacgttattcgctcgctgggacatgcgccgaccgcagatgtgcagcagctttggcgacggctggtgttcaacctgctgatcaccaacgtggatgaccacctgcagaaccacggctttcttcatgtcgaacagggtttgtggcggctggcgccggcctttgacgtcaatcccttccctgacaaggaccgggaatccaagacctggctatccgaacaggatgggccgatcaccgatcttgagatgctgctggcccgaagcgcgtatttttcattgagcaggaccgatgcgctggcggtgctggccgaggtgtatgcagccgttctggactggcggaaggttgcgctcagtgccgcggtagggttacgctcaaacgagctggaagatttcgcgcctgccttcgagcatgagcagatgtcgcttgcgaagacgctgctgggttga

SEQ ID NO: 163004 - DNA, 369 bp, Enterobacter cloacae
atgaaagcacataaaccagatagtcactccgttgagagcgataaagtagatgttccactgccgttgcctgccgagcgtgccatccgcaagctcggcagcgacgtcgcgctggcgcgcaggcgccgccggatttcgcaggcctcgctggccgagcggatgggcgcatccgtgtctactgtccggcgcatggaaaaaggtgatgtgcgcgtgcccatccacttctttgcccgcgcactgcatgtcttcggtgagatacaggcgctggctggcctgctggatacggcgcgtgacgacatcggcctgacgttgatggacgaaaacctgcccaggcgcgtgcgtagcaagccgggcaaatcgggggcgctatga

SEQ ID NO: 163005 - DNA, 357 bp, Enterobacter cloacae
atggcacggtcctaccgcccggcacttgcaaggcgcagcacgctcgcagcgctgctgattgtcggcctgtcgacggctctgccggcagtcgcggccgacgacagcaatgagaaggagcacctggcggcagtcgttcgccagttggacctgctcgatcgtctcgcgaagcagtccgctgcgaccgcatcgcaggagcgcgcccgctatcacttcgactacacgcgcctcacggcagacctgcaacgcatgcgggccggcatcaacgattacctgacgccgcagcgcgcccaaccgcgcgcccccgctgcgctgcagggcgactaccgacaggactccgaacaggagccgaagaaatga

SEQ ID NO: 163006 - DNA, 234 bp, Enterobacter cloacae
atgaatgccagccagatcaccgccttccaggccaacggcggcttcaccccatccgctgtctcggtcgtgctggtcggcgcggtgttcgcggtcctgctgctgtggggcgtgtgggcgctgcgtaccgcctatgtcggctggtcggagcagcggatttcccagcgtcagttcctcggcgtcgcggtgcgttttgtcgcgatgtacgtcgtgctgacttttttcctcctctcgtaa

SEQ ID NO: 163007 - DNA, 366 bp, Enterobacter cloacae
atgaatccgttttcgcatcccttccgctccgcacgcatcgtcgccctggcttccctgccggcgtttgccatgctgagttcgctcgctcaggcccagggcctgcccacgcttgaagacccgtcgcgcggcacgggctcgggcatcatggatacgctgcgcaactacggctacgacatcgtgatgctgatcgccttgctggtggtcgcatcgatgttcgtgggcgtttgctatcacgcttacggcacctacgccgaaatccacacaggccgcaaaacgtggggacagttcggcctgaccgttgcggttggcgccgtcctcctggtcgtcggcatctggctgctcaccgaagccaccggcgttctgtga

SEQ ID NO: 163008 - DNA, 402 bp, Enterobacter cloacae
atgcctgagcatcaggacgtccggcctgacggaacggtagcgttcctgccgcatcgcctcaatcgtcatcctgtggtcgtgcgcggccttacggcggatgagttgtggatatgcgcaggcctgtcgggcgcggccggtctgtcggtgggcattccgctggcgatcgtcttctcgatcatcgccatcgcgcccaccgccatcgtgctcggcatcgccgccggcgtctttgccggcggcggcatgttgcgccgccagaaacgcggcaggccggacacatggctttaccggcagatccaatggtggatcgcgcgacggcatccgggcattgcccagttcgtcggcgggcgggacctggtgacccgttcgggctactggacaaccaggcggagggccgcctcatga

SEQ ID NO: 163009 - DNA, 693 bp, Enterobacter cloacae
atgagccggttcaagaacgagatcacgcacctgcaggcgcatatcaagaccctgcgcctgggcgcgggtgctttgctgctggtggccctgatcatggggatcggctggtggaatgcgccgcgcgacctgaccattcacgtgccgccggatctgcgctcgggcagcaccaggaagtggtgggaagtgccgccagagtcggtttattccttctcgttttatatctggcagcaactccagcgctggcccgtcaacggcgatgaagactacgcccgcaacatccatgtgctgtcgccttacttcacgccatcctgccagagcttcctgcgccacgactacgaatatcgccgcacggctggcgagctgcgtcagcgcgtgcgcgggatctacgagatccccggccgaggctacggcgaagaccccacgctgcgcgtcaaggccgtctccgaccgcgactggatcgtcacgctggatgtgacggcggacgaatactacggctccgaacaggtcaagcgcgcgctggtgcgttaccccctcaaggtcgtgcgctcggatggcgatccggaacgcaacccgttcggtctcgccatcgactgctacagcggtgcgccgcagcgcattaccacccctgaccctgtgcccccgaccggagcgacatccggcggcctcggcggcccattgggagacacgccatga

SEQ ID NO: 163010 - DNA, 906 bp, Enterobacter cloacae
atgaaacacgtcctctatctcctcggcatcctggcgaccacgggactgcccactgcggtccaggcgctggaaatcctgcgctgggagcgactgccgctggcagtgtccctgcatgtggatcaggagcgcgtcgtctttatcgaccgtaacgtccgtgtcggcgtcccggcatcgctggccggccgcctgcgtgtccagagtgccggcggcgcgatctacctgcgtgcaagcgaaccgatcgagcctacgcgactgcaattgcaggacgccgatagcggcgcgttgatcctgctggacattgccgccgaagttgcgccggcaggtcaggcaccgctggagcctgtgcgcattgtcgaggccgagggtgcgcccacccgctacggcgacctgacagcggcagcaacggctgacggcgacacgcaggacgcggcgtcccgcacagctcgcgagacgcccgtgcccgtggtgctgacacgctatgccgcccagaatctctatgcgcctctgcgtactgtcgaaccggtatccggcatcacgcgtgtcaatctgaaacacaacctgccgctggataccttgttgccgaccctgccggtacgcacccgggcgctcgctgcctggcggctcgatggcctttgggtcacggctgtgcgcctcaccaacacctcgaaacgctggctgtctctcgacccacgcgatctgcaaggcgacttcatgacgggggcattccagcacaatacgctcgggccggccggcacacccgatgacacgtcagtggtttacctggtgaccaaaggacacggcctggctgaatcgctgttgccaacgatcagccctgtcaacgcggcactgaacctgccggaaccgaagacaccggcacgaaagaatggaggccgtcatgaaaggtaa

SEQ ID NO: 163011 - DNA, 1434 bp, Enterobacter cloacae
atgaaaggtaatggcctgctcaagtggctgatgatcccgatggcgttgttgctggtctttgtcggcgtgaagctgttttccggcgggggtagccagcccggccgcgatggcggaacccagctcacgcctgaagaagccagagcgcttggcattgaaggcgatacgccgcgggatacggtggcgaccctagtcggccaggtgcggcagctgcgcaccgagctgcaaaccgcactgaccgacaacaagacccagaaggctgagaacgagcgcctgcgccaacgcgagggcgccatcgatcgccgtatccagagcgcactggaaaccgagcgcaatcagttgaagaacgaccgcgagcaggtcgccagcgaacgccagcaaactcagggtctgctgcaggatctccaacgccagttcgagaacctgagcaacaagagcggacatgccgatctgccggtcgggctgggactggagcccggtgacggccccggagccgatggcgtgcgctggatcgagccggaagatgcccgcagcgacggcaaaagccgcacccctggcacagccgggaacttcacattcccgaccagtttcggcccggcacagaaaacgctggatacgacgagggatgcggccgtcgatgcgggcagcaaggcagccggcgtctccacggccaagcccgtctataccgtccccaccaacgccacgttgatggggtcgatttcgatgacggctctgatcgggcgtgtgcctatcgacgggaccgtgaacgatccgtatcccttcaaggtcctgatcggcccggacaaccttaccgccaatggcatcgacattcccgatgtcgccggtgcggtcgtcagcggcaccgcgtcaggcgactggacgctctcttgcgtgcgcgggcaaatccgttcggtcacgttcgtcttcaacgacgggaccattcgcacgatgcccgaggacggcgagcgcggcggcaaccgtcagcagagcaacagcgccaacgggagcaacacgcaggatggcctcggctggatcagcgatccctacggcatcccttgcgtcagcggggagcggcgcagcaatgcccagcagtatctgggcacccaggccctgatcaccgctgccggcgcaggtgctgcatcgctgatcaagtccgacaacggcagcgtagcagtggtcgccaacaacaacggctcgctcggcacggtcggtatttccggcaacgaagcgatgggccgcatcctcgctggcggcgtgcaggacatgtcgcagtgggtgaacaagctctatggccaggccttcgcggcggtgtacgtcaaacccggcgccaaggtcgcggttcatctcgaacaacccctcaccatcgattacgacccgaaggggcgcaaggtcgatcatcgtctcggaggtgcttctgatgcacaggatctggattaa

SEQ ID NO: 163012 - DNA, 435 bp, Enterobacter cloacae
atgcacaggatctggattaacggcctggcggtgttggtcattgccgtggcgcttgtcggctgctcgaccagcaaggaaaaactgctgccccacgatggtcagaccatgatggacatctggaacgaggaaaccggcggcaatgcccgcggcggccagaccgcacggcagttgctcgacgccagacaatcgctgcgtcgcccgctgaccgaagtcgatgtgaaggccacacctgcggtcaacgccagctatacccgcacggcgcaaaacgagatctaccggcagttccagcgcctgccgaaccccgatctgaccatgtacgtgtttccgcatctcgcaggcaccgatccggtgcccatccccggctacaccaccgtcttcccgctgtaccagcgcgtgcaatacgccatgccgggcgaacggaccgaggattactga

SEQ ID NO: 163013 - DNA, 2883 bp, Enterobacter cloacae
atgggacggttcttcaaacgccgcgctacggcgacagaggccgatagcggctcctctccagatgctccatcggatgcatgggctcgctatctcgcgcgactgtgggcagacggcatccctgaacccggcaagcgggacaccgccaggcacaggccagcgacacaggccgatgagcaggcgctttacgacgtttcgccgtcctttgccgacctgctgccgtgggtggagtatctgccggagtccaggtgcatgctcctggaggatggtgtttccgtcgccgcattcttcgagttgatgccgatcggcacggaaggaagggaagcatcctggctggctcaggtccgggacgcgctggaaaacgcgctgcaggacagtttcgacgagctggacgagtccccatgggtagtgcagttgtatgcacaggatgatgccaactggaaccgctatctctccagtctggagaactaccttcagcctcgggccagggaaagcgagttcacggagttctatctccgtttcttcggccaccatttgcgcgccgtctcccggcagggagggctgttcgaggatcgcacagtcacacgcttgccctggcgcgggcagacgcgacgcgtccggctggtcgtctatcggcgcgtcggcaatgcgccagcccggcgcgggcaatcccccgaacaggcgctgaatgtcgtctgcgaacgcctggcaggcggcctcgccaacgccggcgtgcaggcgcatcgcctcgatgccgccgcgatccacgcctggttgctgccctggttcaatccaggaccggcgctgctgggtccgacagacgaagaccgcgagcggttctatcgcctggcttcctatcctgaagacatagaagaaggcgaactggagcttgccagcggcactgacttcgcacagcggctgtttttcggtcagccgcggtcggatgtcgaaaacggtctctggtttttcgacggcatgcctcatcgcaccatcgtcctcgatcggctgcgcacgcccccgctaaccggccacctcacaggtgaaacccgcaaaggtggcgacgccatcaatgccctgttcgatcagatgcccgaggacacggccatgtgcctcaccctggtcattacgccccaggacatcctcgaagcccatttgaaccatctggcgaaaaaagcggtcggcgaaaccctggcatcggaacaggccctcaaggatgtgcagcaggcgcgaggcctgatcggcagttcgcacaagctctatcgcgcttcgctggcgttctacctgcgcggccgcgacctcgccgacctcgatatgcgcggccttcagctcggcaatgtcctgctcaatgccggtctgcagcctgtccgtgaggaagacgatgttgctcctctcaacagctacctgcgctggcttccttgcgtctacgaccccggcaaggacaaacggcagtggtacacccagctcatgtttgcccagcatgcggccaatctggctccggtatgggggcgcagtcagggaaccggccatcccggcatcaccttcttcaatcgcggcggcggcaccgtcaccttcgatccgctcaacaggctggatcggcagatgaatgcgcacctgttcctgttcggtcccaccggctcgggcaagagcgccaccctgaacaacatcctcaaccagatcaccgcgatttatcgtccgcggatgttcatcgtggaagcaggcaacagcttcggcctgttcggcgatttcgcggcacggctgggccttacagtgcatcgtgtcaagctgtcgcccggcgctggcgtgagcctcgcaccgtttgccgatgcctggcgactagtagatacgccaagccaggtgcagacgctcgatacggatgcgctggacgacgccgccgccgaagaggaatcgacggaaggcgacgagcagcgtgacgtcctcggggaactggaaattaccgcccggctcatgatcacaggcggcgaggacaaggaggaggcccgaatgacgcgggccgatcgcagcctgatccgtcagtgcatccttgaggccgcacagcgctgcgtgtcggagaagcgtaccgtgttgacccgcgacgtgcgcgatgcgctgcgcgagcgcggccgcgattccacgctgcctgaaacgcgccgcacgcgcctgctggaaatgtcggatgcgatggacatgttctgccaggggatcgacggcgaaatgttcgatcggcccggtacaccgtggccggaagcggacatcaccatcgttgatctggcaaccttcgcgcgggagggctacaacgcgcagctctccatcgcctatatcagcctgatcaacacggtgaacaacattgctgaacgcgatcagttcctcggtcgccccatcatcaacgtgaccgatgagggccatatcatcaccaagaacccgttgctcgcgccctatgttgtgaagattactaaaatgtggcgcaagctgggagcctggtactggctcgccacccagaacctcgacgacctgcctaaagcggcggaacccatgctcaacatgattgaatggtgggtgtgcctcagcatgccgcccgacgaagtggagaagatcgcccgcttccgcaagctcaatccatcgcagaaagccctgatgctctcggcgaggaaagaggccgggaaattcaccgaaggcgtgatcctgtccaagtcaatggaattgttgttccgcgctgtcccgccgagtctgtacctggcgctcgccatgaccgagccggaagagaaagctgagcgctaccagctgatgcagcagttcggcatcagcgaactcgatgccgccttcaaggtcgcggaaaaaatcgaccgggcgcgcggcatcaactctttgccgctggacgcatcggactga

SEQ ID NO: 163014 - DNA, 267 bp, Enterobacter cloacae
atgcgacagggcaatcacctcatccgcctgcatggggtatgccagcagatagctctgaagagtatcgcagccgagactggtcaggatttgctgctgctcggcggtctccacgccttcggctacaacccgaagatcaagcgtctgtcccagggcaacgatggccgagacgattgccgcatcctcagtgccgcaagcagggtcatgtacaaagcagcgatcttgagttccgttgcgggcaagcgcttgaggtacagcaggctggaatag

SEQ ID NO: 163015 - DNA, 741 bp, Enterobacter cloacae
atgcaatcttctcttatctctctttttccccttcgccgcatgctggggcccctgatggctctcgcactcaccttgttgcttgtggcgacctggtatttgacgagccaatccggctcacccgcaaagaccagtgcggacaacgccgtctcgcaaagttttcaggcgggaccgccatggcgttacggcaaggccggcgcgcgctttacgctggtgctgtatgccgatctggaatgcccatactgcaagagctactacccgctgctcagggcatgggtcgaccggaaccccgaggcgaacctgcaatggcaccatctgccactccccatgcacgagcctgccgcaacacgacaagcccggcttgccgaatgcgccggagaggccgggggccacgccgcgttctggcaggcggtcacctggatctatcaacaaacccgcagcgacggggccggcatacctgaaaacatacaatacccggcactcaccccggaaatccaggcctgcctggacagcacacgcaccgaggcaatcattcaggcgcaggcgaatgaaggttcgcgtgaaggcgttaccgcgaccccgacgctgaagctcagcgacaaccagagtggccatacgcttgtcctgcccggtcccgtcgaaggcgacgcgctgttgtcagcgtttgatctgctatcgagcgatggcgacaccggccaagagaagagtgccgggacaccagccatcgcggagccttcaagatga

SEQ ID NO: 163016 - DNA, 501 bp, Enterobacter cloacae
atgctcacctcgtggtcgctcatcaagcttgagggggactacaaggatctgcgctaccggcaggaacttgacgcgaagaatttcgatggttctaaccggtctgtctatgcgacctacttccatggggtgggggccggctggaccttgttcggcggtctggatttcgtggacagcgatgccaaagaagacaccaacgcctatctacagaaaggggtacggctcggtgcctcgctgcaactgccgtcaggctttatcggtacgctcttcgcctcgtaccgacatcgcgactatggcgccaacagcccgttgttcgaagcgcgccgggaggaggatgagcagaactacacgctcatcttgaaggctccgcgatggctggtgtcccggcactcttctcttggccggtgtcgccatcgctcgatagcagatcaaacgctgacaacagcgcgtcgccttcgacgggaccgggcaggacaagcgtatggccactctggttgtcgctga

SEQ ID NO: 163017 - DNA, 180 bp, Enterobacter cloacae
atggacgggcatcacggggtatacgttcgctccctgctctatggaaagtacggcgaatacaacgaaaccacgctgatcactcaggccggatacagctatagaaccgcacggcatcaggcagcgctggcaccgtcgttcgaggtgtacgagtggggaaatgacactctctacggaacatag

SEQ ID NO: 163018 - DNA, 450 bp, Enterobacter cloacae
atgctcaacccgtttcgccccccatccgggccgatgcgctttccatcggcggtagccagcgtcttgtgcggtgcattgggtctggccggtcaggcggccagcgccgcagaagtgacggccttcaccgaccgatccgtcacgctgaaatcggcggacaacttcactatcgtccacctcgacgcagcaaaggaaatcgaggccagcctcgcggccgatctgcccgctgatcccggtcgcgcccaggccatcgtccagcaacgtcttcagcagggcggtgcccagttgcaacgcgatctggcttccgcctaccagggcgtggccgaggcctggagcctcagcgtttccaccgttccggctgtcgtggtcgaccggcgctacgtcatctacggcgagccggacgtagccagggcggttgcccgcatcgaggcataccggaggacgcagccatga

SEQ ID NO: 163019 - DNA, 945 bp, Enterobacter cloacae
atgaagcgatcccgccgtctccgcgccgctaccgcggccctcatgatcgggaccgtatcgccggcctttgcgctcaacaccgcaacgatcaccgcttcggcgctgtccccggactgcctagaataccgggtggtcggcatctgctattggctgttttgcagcaccttcggatgctcggtacggacatcggtgaaagttcgccattacgtgcccgatgccgtggtttccagttacgccaatactggcgagaacccttgggtcgaagtacgtgccatgagcatgccgaacaccacggcacaggccggcggcgatggcacgacgaaccaggaccacgaaaacaacctatcgaagttcaagaacgctgacgtgatcggtcaccccggcggcgcggtcctgggccagctcgccagcgcttcaggctattcctgcgaaggcgccggtacggccttcatgccgtacctgttgagcacgctcgacacggtggcgtggcgctacaacgtgcccgaggccgtctatccggaagcgctgatccccggcatgcgcgagatcggcgcacgcacgtcccttaatctgtggggtgcggtctacccacgcggcggcttcctgcaccagactgacgactacaagagcggtgccgttatcgcgcagcgtgcgggcgatgtggttacccgccgcggccagatccacgtctaccaacctctgcttgccaccgcgcgcgacggctactggccggcaggcgagctcgtcgaaggcgatgcctccacaggcaagtggcaggaactcacccccacgatgtccagttcctgcgccgtcttcccccattcgaaccagcgcgtccaggcccaacagggcgactatgcctgggcgctatggcggccctacagctgctgccagcgtcggggccagaccttccttggcagcgtcgacttcgggagaggctcctga

SEQ ID NO: 163020 - DNA, 1407 bp, Enterobacter cloacae
atggcttctcgttctcctactcccgcagtccgcaaacatttgcgccgggtcctgctcgtttgcgccctgacggcggcttgctcgggcgccgtcgcccagaccagcgtcaatgactatggcctgcagcatcgcggcagcgtcattggcgacgatgtgctctacagcattggcggcggtcgagctgtatcaatgaccggggcagccaacatgcgctccatcggcgtaggcgtcggctggaatagcaacctgatttgcggcgacatgagcctcaccaccacgctgcagaaccagttgaacggtatcaccaacgggttccagaccatcatgtcgaacgtgatccagaacgccaccagcgcggtggcttctctgcccgcgctgatcatccagcgcgccgatcccggtctctataacctgctcaccaacggtgtcttgcaagccaggctcgatttcgaccgctcgaagctcacctgccgggcgatcgcgaacaggatggctgacatggccggcggccagctcggctgggaccagctcgcggagggcatggcactgaagaaggccgtcgccagcaccgatgcggtctccgcgatcgaggaagccgaaagcagcaagggcaatgaaggcgtgccctgggtgggcggcgacaatgccggcggctcgggacaggcacctatccgtgtggtcgctgacgtgacgcgggccggctacaacctggtgaacggtcgcagcgtggacgacacttcatccatcgacaccagtagctgcggcgacaggttgacgtgccagacctggaactctccccaggccgcggttacgtgggccacacgtgtgctgggcgagcaggaacaacgcacctgcgagagctgcaccaagacacagacgacgcccggtgtcgggctgacctcactcattcaggaagaatacgagaccaagcttgaaagcctgcaggaactgatctcgggcagtcgctcgatgagtttcgataaccttcaggcggccagcagcacctcgttgccgatcacccgtggcgttatcgaagcgctgcgtgacgaacccgaccaggacatcctcgcaaggcgcctcgcttccgaggttgcgctggccagtgtgctggaaaaagcattgctgcttcagcgcacgctgctgaccggacggatggagccgaatgtggcagccaacgaaatggcccaggaggcggtcacgcaggagagcgacattctcgaccgcgagatcaacaacctcaagaccgagctcgaactgcgccgcgagttggcgaacaactccccgatgcagatcatccagcgccacagcacccgtgctgcgggttcgcgcggcgtgtaccagggcgatcccgttcctaatcgcctcgacgagttgcagcggtcgcagtcgggaggaagcaatccatga

SEQ ID NO: 163021 - DNA, 351 bp, Enterobacter cloacae
atgatcccggtctggctacggatgcggtggctgttcaaccgccgcgtcggcttcgcgctgctctggacagtcctgttgctcaccgtcgcgatcgggatcaacctgatcggtatccgcgcgctcggcagcatcgaaggctgggagcgctggatgaacgagcataagagctattttctggcctggcgcctgttgctctatgcgggcattgcctggggatggcgatggatgcgcaaacgcgtcctggctcgtgaacctgatgcggaatcgcaccagcgtctcatccgcgttgaaattgccggcgtggtggctctggtcgtccttgaaggcagcctgctgctgcaatccacttaa

SEQ ID NO: 163022 - DNA, 1518 bp, Enterobacter cloacae
atgacgctctacacgtccgactatctggagtattacctgacactggtgggatggatcgtccacaacggcatctggtcggttctggtcgccagcggtctgtttgcgatcccgtttctcgccatcgttattcaggaatggctgaaagcacgcgcggagggggccgacgagggcaacaagggcgtgctttcctcgatgcggatcgaaaaccgggtgttcgtcgccatcgtggtaatcatgttcgccggcatcccgttcatcgacgtcgatctcaacacgatcagcttcgaccagtcgcgttccagccagtgccaggtgaacgttcccgctcctggggacacaggctggggccagtcattcaccacgctcaacaaccagtccgccaaggtgccggtctggtggttcttcatgcactcgatctccaaggcggtcactagtgccgccgtcgcagcgataccctgcggaaccgacctgcggcagatgcggatggacatcgacaacacccgtattgacgatcccctgctggctcaggaggtgacggatttcgcgctgaattgctatggtcctgcacgggccaggctgttcatgaaccggccgacccttagcgaggagcagatggcggacgtgagttggatcggctccaactactttgtcgatacgcccggctactacgacacctatcgctcgagcacgcctcgcgagtcatggccgtacgatgacagccgtgatgcggggctgaccgaggtgccaagcggcgcaggatatccgaactgccgggaatggtggtcggatggctcaaccggtttgcgcgcccgcttgctggctcaggtcgatcccaatctgctttcgcgcatggcgaactgggctggcttcatttccaggacggagctggacgattccgtgatccgcgccatcgccgctccccgccagcagaagctgaatcagggggccgtttacaccgattacggcggacagatcgacaagaccctgccgaacatcgtcacccgggctgccggtgacgtagggatggcggttggagcaataccggcgtttccggcgatggacgtcatgcgccaggctctacccatggcgttgtcgctgctcaagatggcgctggtgatctgcattccgctcgtgctggtgatcggcacctatgacctgaaaaccctcatcacggtgagcgtagtgcagttcgcgctgttctttgtcgatttctggtttcagttggccaggtgggtagattccacgatcctggacgcgctctatggctggggatggggttacaaccgccccatgagcaatttcgatccggtgatggggctgaacaacgcatttggggatctgctgctgaacttcgtgatggcgacgatgttcctggtgctgcctgggttctggctcgccggacttagctgggttggcattcgtactggctactcaatgcaggggctcatggaaggaactaagggtgccacacaagccggctcgaaaggagccggagccatctctaacaagttgaagtaa

SEQ ID NO: 163023 - DNA, 381 bp, Enterobacter cloacae
atggcaacgcacgcacacaacaaaggatgggcctatcggctcggtagcggcatggggcgcgcctggcgtggttatgcccggtttgagaagaaggctgcttgctggttggttgcgcaaggtgcccccgtggtggcggcgtcggctctcctgtggctggtcaagatcgcggtgctcggcgctctcttctacatcgcattctggttggcgcttctggtcctgttcgccgttgcagttgcctggtcggcggggcatggagagccggtggaagaggacgagtggccgttcatcgatctgcacgaaatgagaaagacgcccggatacgatcccgtgctctacaacgatttcgaccatccagattatccggacgagaaagacctctga

SEQ ID NO: 163024 - DNA, 420 bp, Enterobacter cloacae
atgatcgtcctcgacaccaacgttctatccgagacacttcgccctgctccagacgcgcttgcgctgacctggctggctcagcaacctcgctctgcgctgttcaccacgacagtcacgcgggcggagttgctctatggtgtgcgcctgctgccggacggccagcgcaaggccgcgctcatggaggcgattcacggcatcttcgcttcggatatggccggacaggtgctgggcttcgacaatgacgcatccgatgcctacgctgaaatcgcagcgttacgcaaactggcgggcaagccgatcagccagttcgacgccatgatcgcggcgattgcaaagtcgcgaggcgccagcctggcaacccgcaacgtcaaggatttcgtggactgtggcatcacggtgatcgatccgtggaagcgttga

SEQ ID NO: 163025 - DNA, 255 bp, Enterobacter cloacae
atggcgatgaccacgatgaccatcaggaatatcgacgaaggactaaaggcgcggctgcgcgtgcaggctgctcagcatggccgttcgatggaagatgaggctcgcgacattttgcgggcggctttgtcgaccgaggctgcgcgcggcagttctttggtcgaggctatccgtgcgcgggtagagccgctaggcgggatcgagctggacctgccggcgcgggaggccattcgtcacccgccggagtttggtgcatga

SEQ ID NO: 163026 - DNA, 246 bp, Enterobacter cloacae
atggaccattcagacaacaacggaaccagcattcacgcacagcgggcgtatgcactcatcatgtcaggcgtggcggaatgcgatacggcgcaggaccagcgcttgttgctcgattccctcatctgtcagtgcgcagttttcacccgcatcctgggtggtgagcgggagttttataacctgctggaaaagctgaagtgcgtcgatctcgatactgcgggcgacctgatgcctgccatacagcattga

SEQ ID NO: 163027 - DNA, 1926 bp, Enterobacter cloacae
atggggcccaaggggaatggacctatctggaaaaggaaaaggcctcttgtgaccgcaatttcgggtgatgtcatgttcacgctttttcaacgcaaacgaccgacgtcggttgctcctgcagcctccgccactgcaacaaaagccaaagggctgacgcggccggagtcggccgcatcgctgctggcgacgccgcgccggcagaaactgctggaacacatttggcagcgcacgtcgctctctcgcaagcagttcgcgttgctgtacctcggcccactggaacggtatgccgagctggtccaacaattcccggcgtcggagtcccatcaccacgcctatcccggtggtctgctcgatcacgggcttgagattgtcgcctatgcactcaagctgcggcagtcctacctgctaccagcaggaacgacgccagaggatcaggctgcgcaagccgaggcctggacggccgccacggcctatgccgcgctgctgcacgacgtcggaaaaattgccgtcgatcttcacgtggagtcgagtgatggccgcgtatggcacccctggcacggaccattgcagcaccactaccgttttcgctaccgcaaggagcgcgagtatcgtctgcacagtgccgcgagcggattgctatacaaccgcgtgctcgatcgcgagatcctcgactggctctgtggctaccctgagctgtggtcggcactgctttatgtgctggcaggacagtatgagcacgctggcgtgctgggcgagctggtcactcaggctgaccgcgcttccgtcgcgcaggaactgggcggcgaccctgcaaaggcgatggccgcaccgaagcacgctttgcaacgcaagttgcttgagggccttcgctacctgctcaaggaagaactgaaactcaatcagccgcaggcgtcggatggctggctgacacaggacgccttgtggctcgtctccaaaactgtgtcagacaagctgcgtgctcatctgctgtctcagggcattgagggtattccagccaacaacaccgccgtcttcaacatcctgcaagaccacggcatgcttcaggctacgccagacgacaaagccatctggaaagcggtcgtcaccagcgatgcaggctggacacacacgttcacactgcttcggcttgcaccggccctgatatgggaaggcagcgagcgtccgccagcgtttcagggcaccgtggaagtggtgcaagatgaggccgctccggccgaacccacctcggctccatcgcccgacgaaggaccatctccgcccaccactggcgcgatagccaggcctgcgccccacccattggcaccttcagcgccggcgcctgacaccgatggtatcgctgccttgctcgacttgcttgggacgccggacattgaggttccgtccagtgctccagcggtagacaaactgcccgcccggaatcccgaacaggatctggaaactggctcaaccgaagccccttcattgccgttggcggccctgccgaatgacatcaataccgctccttccggcgaacatttcatcgcctggctgcgtcagcacatcgaggctcgaaaactgatcatcaacgacgcgaaagccctggtgcatactgtagctgacacagtgtacctggtcagccctggcgtattccagcggtatgcacaggagcatccgaagactgcattcctggccaagcaagaacaaatcgcggactggcaatgggtacagatacgcttcgagaagctgcaattgcaccgcaaacaggatagcggcctcaacatctggacctgcgaagttaccggtccaaggaaatcacgccgactacatggctatctactagacgatcctttggtcctgttcagcgaacctccccccaagaacccgtatctgtccatcgaggcatccaaatctatgcctacaccatag

SEQ ID NO: 163028 - DNA, 603 bp, Enterobacter cloacae
atgcttacaggcgaccgtatgaaactgatgtacgatgctgcttccgatttaaaaaccttcgcggacgcgctctacgttggtcgcgcctgtgatgacgccaatttcttctggtacgaagatccctatcgcgacaactctatctctgccttctcacataaaaaactgcgcagcctgttgaaaaccccgttgttaattactgaacatgtgcgcggactggaggccaaagccgacttcatcctcgcggacggcaccgactttgtgcgtgtcgatccggaatacgacatgggtatcaccggtgctttgaagacggcgcatatggctgaagctctgggattagacgtggaaattcatgcacctggcccagcgcatcgccagttgatggcgtctattcgcaatacgaatttctatgaattagctgaagttggcccgaaactcggcaacatcctgccgccttgctatgcctgcggttataaagatgagctcgattctatcgatcgcgatggcaatgtcatcgtgcctgaagggcctggtttaggggtgacatacgattgggattggctcaacgcacatgccacacaacgtcatatgttcaataagaaataa

SEQ ID NO: 163029 - DNA, 903 bp, Enterobacter cloacae
atgaaccaggctctctttgccggcgtcaatgccgccgcgctgaccgcgtttaatccggatttatcgatcaattatgagaagagtgtggcgcattgccgctggctactggataacggatgccacggattagccatcctgggcacaacggctgaaaccaattcactcagtttggacgaacgtgaacacttgctggagcgcatcgttgccagcggtatcccagcggagagactccttcccggcactgctgcctgtgatattcccagcgccgtgcgcctgactcaacatgcagaaaaaatgggatgtaaaggtgtcttattactgcctccgttctactacaaatccccaacgcttgatggattagtgcattactacagtgaaatcattacgcgtatcgggggaacggtgggtgtttatctttatcacttcccacaacaatctgcggtcgcgattacccccgaactgatcgctatcctgctggaaaagtatccgcaccgaattaaaggcatcaaggacagcagtggcgatgcgcagaatacaaaaacctatatcgaccgcttcgcagcgcagggatttgaggtttacaccggtgccgatgccgatttcctggcgatgttgcagatcggtgcagcgggttgcatcactgccatgaccaacttgacggccgggctggcgcgtcaggtattcgaccacgctcaggatgatattgggaaaaaggcgcagcgggaattagccatgctgcgtaaagcgttggccgtgaccgataccattcctgccgtcaaagccgtcaaaagcgcgctcgcagacgacgcgcattgggaaatcgttcgtcccccactttacagtccacccgcagcggtaagacagcaactgatcgccagttttcgcccgttgatcgcagggtaa

SEQ ID NO: 163030 - DNA, 1335 bp, Enterobacter cloacae
atggacacatccaaaattagatactccatgttgggctttatcggcatggcaatgctggtgaatttcattgaccgcgcgactctgtcggtggctgcgccattaatgagtaaagagttaggcttcgacgccgccaccatggggtgggccttctccgcctttggttgggcttatatgctgtttcaaattccgggggggattctcctggataaattcggttcccgtctggtgtatggctcggccattctcatttggtcaatcttcacctttatccaggggctggtgtacctgttccctgccccgtttatcatgctgttcctgttccgttttctgatgggggcagccgaagccccggcaaccccagccagtagccgtttaactgtgcagtggttccctgacaaagagcgtggtttcgctacctcaatctatcaaaccatgccctacgttgcgttaggcgtgtttaccccggtgatgacatggtttatgcatactttcagttggcattacgcgttttatacttccggcattctcggcatggtatttggcattatctggctgacatcggtgcgcgatccgttgaagcataagaaggtcaatcaggcagaaattaactatatccagcaaggcggcggcattccgaatttaggcgctgaccaaaaacaaaaaaccaaactgagctggctgcaggtacggaaaatgtgctgcaaccgcatgatgattggcatctacattggacaattcagcctgacgtctattacctggtttttcttcacctggtttccgacctatttgtatgaagccaaaggcatgtcgattattaaagttggtttggtcgcagccattccagccctggcggggtttctcggcggtattgttggcggcctcatctctgattatttcctgcgcaaaggatacagcctcaccttcgcacgcaaattcccgatcatattggggatgttgctctcctgctccatcatcgcggccaattacacccgttcggatgtgattgtggtgttggtcatgagcattgcgttttttgccaaaggtttcggcaacctcggctggtgtattctcagcgacacttcacccaaggaggcgttggggttatcgggcgggatttttaataccttcggtaatgtcgcgggcattctgaccccgttggtgattggctttattttggaagcaacgaaatcctttgatatggcgattctttatgtcggatcgatgggcattattggtgcgctgtcttaccttttcattgttggccccctgcaacgccaggcgctacctgataacgacgacgcaccccgccgcgccgttcagcaccgctctgcttaa

SEQ ID NO: 163031 - DNA, 1323 bp, Enterobacter cloacae
atggccacaacctttgcacatcagagtaaaaagcccagcagggtgcgtttcaccattttaatattcctgtttctggcgaccgtgtttaattatgttgatcgcgccaccttatccgtcgccgctccttttatgtcgaaagagctgggcttcgatgccgtcaccatgggctgggcattttctgctttcggctgggcttacgttgccatgcagatccccggcggctggttactggataagttcggcgccagattggtttacggagttggcctggtggcctggtcagcactcactttcatgcagggatacgtacaactcttcgcgcaagcctttgccgtgctgttcatcctgcgctttctgatggggatggtcgaagctcctgctttcccagccaacagtcgtttaagtgtgcagtggtttcctaataatgagcgtggattcgttacctccgtttattctgccgcgcaatacattgcgctgggtattttcacacccgttatgactttaattttgcaaacctggagttggcacgccattttccattgggcaggcgcggtgggtgtggtgttgggtttattgtggctatggtatgtacacgatccgctgcgccacaaacaggttaatcaggaagaaattgattatattcgcgcaggagggggaattcccgatctcagtcataaaaagaacgaagcattccgcttcaggcatcttaaacccctgattgccaaccgcatgatggtgggcgtgtatattgggcagttctgtctgacctccatcacgtggttttttctgacctggtttccgacctatttgtatcaggatcgcggtatgtcgattcttaaagtgggcttagtggcatcaataccggcaattgcaggatttattggcggcattcttggcgggctttgttccgactatctgttacgcaaaggatacgatttgaccctggcgcgcaaattgcccgttatggctggcatgatcttctcagcggtgattattttagctaactatgtcacctccgacctcgccgttatcatcgtgatgagcgtggcttttttcgctaagggatttggcaatattggctggtgtattctcagtgatacttcacccaaagaggtgctgggtgtggccggtgggttgtttaatttctttggcaacatcgccagtattgcaacgccgctggttgtcggtttaattctggcgaaaaccggttcgtttaatctggcgattctctacgtgggcatgatgggaattatcggtgccatttcctatctgttcattgtggggccgctgaagcggttggaattgccgcaagaggatatgtaa

SEQ ID NO: 163032 - DNA, 225 bp, Enterobacter cloacae
atgtatgttgcgatttatcagtatgataatatttattatacaactattagtctgacagggattaaacttatcattaaatatttaccaatgggacctgtgaaaatcccttattcttggcagtcattacgctccgctagcacaagggcgctagattattgtaagagatcagctggtgacctgagtaaatatgtgctaatgaatcaaaagaatctatcttttgattag

SEQ ID NO: 163033 - DNA, 453 bp, Enterobacter cloacae
atgaaaattggtgaactcgcccgaaaagccggatgccccgttgaaactgtccgctattatgagaaagaagggctgctacaggcacctctgcgggatattgagaataattacaggcattatgacaatgcccatctggagaaattgctcttcatccgccgttgccgtgcacttgatatgacgcatgaagaaattcgtgggttgcttaaggccatgaatactcatggcaaggattgtggtcctgttgatgctattatcagcgatcatctggctcatgttcagcataggattgcagaattactggcccttgaaaaacaactgaaggaactacacgatttttgcaacgccgaccgcagtgtggatggctgtggtattgtacaaaagctaacgtcgctggatgaggataacgagatactaccctcaccgcccactgaacatttgggaggagtgcactaa

SEQ ID NO: 163034 - DNA, 129 bp, Enterobacter cloacae
atgacagatatttccaatatgcccggcatggagttcctgccgttttacaacaaactgaatgcactgaatgcaggtatcgctcccgataccccgtccctcgatattcctggcaaggccatacaggcttga

SEQ ID NO: 163035 - DNA, 210 bp, Enterobacter cloacae
atgaacgaaagaaatgaattattcgagggtctacagttacgtattgctgcagtagaatacctaatatgccggctaatatcgctacaggataataaagcaatagaaaatatttacacgtcaacactaaatgaaatcaacgtgcttaaagaggagtgcccagataatgctagggtactggaaatggttttacatctgacaggtcgtcagtga

SEQ ID NO: 163036 - DNA, 264 bp, Enterobacter cloacae
atgctggtaaatgatccgactttaactctgatgattgaaaaattgtcggataagtatcacgaattttatgaagcactcagttcagacgagccctgcattgacattatcagagtgttatatgaaatggaaagaactgttaaactgattaagaaagagattatgacacagcatgttcatttctgtcattcaaaccagtgcaatgatattgacgcacataatatgcttattgatgatatcaaaacccttctcaattgcgtcgcatga

SEQ ID NO: 163037 - DNA, 933 bp, Enterobacter cloacae
atgaaaaaaaataaacaggcgcataatcacaaccatgaagacggtcatgaccatgaccattctcataaggtaacatcgggtaacgaaaagcgtatccgttttgtatttatacttacatttggctatgcccttatacaggctgttggtggggcaatgtcgggctctcttgcgctgattgctgattccgggcatatgctctcagatgctgcggccctgctgcttgcactggtggcataccggatagccagaagacctgctgataacagaagaacgtatggtttccaccgtgtgcgcgttctggctgcgctggccaatggtgtcactctacttgctctcgttgtgtggatagtatgggaagcaatacagaggatcactcagccttcagaggtgctggcggggccaatgttaatcgttgccgtcattggactgatcgtgaacctggttggcgcatggatcctcatttcgggcaataaagaggatggtaaccttaagggagcgctgctacatgtaattggcgacctgctgggttccgtcggagctatagcagctgctattggtattatgctgacaggctggaccattctcgatccaatactttccgtctttgttgcgctgctggtagtcagatctgcctggaaactggtattgagttcaatcaacatcatcctgcaggccacgccccagaatatagatgccaaccaggttgagaaagaactacaggaactcccggggataagtgaagcagggcattttcatgcctggacgctgactgacgactccgttgttgccaccgttcacgtcacagcgcaacctgatgtggatcccgtcaccctgcctggcgttgtttctgcgcatcttaaagaacgttattctgttgaacatgtcacagtgcaggttgatccgcccggccagataacaggcgttattcactga

SEQ ID NO: 163038 - DNA, 945 bp, Enterobacter cloacae
atgatcaaacaaaaaaccatctgtcgcaagattacactcagtggcaccgggctgcacagcggtaacactgtttcgatgaagatactgccatctgctgctgacaccggcattcgctttcgcaggactgatatcaaacctgcggtggacattcaactccgggctgacctggtgcacgatactttactggcaacaagcctgatcaatgaaaatggcatccgcgtttctactgtcgagcattttctttctgctgtctctagtctggggatcgataaccttctcattgagcttgatgcaccggaactacctatcatggacggcagtgctaaagtttttgttgagcattttttgcaggcgggctttgctgagcagcacgctgataaaaagtttctgttaatcaaagaaactgtatccgttaaagacggtaataaatgggcgctgctgcaccccaatcctaaattcacaattgactttacggttgagtttgatcacccggtcatctctgctgataccagagagctatccattgaaatctcagataaaagttacatcaatgaaattgccggcgcgcgaacatttgggtttgttcgtgacgttgaaaaactgcaacaaaatggtctgggattgggtgccagtctggataatgctgtaggtcttgatgaatatactgtcctgaaccctgaaggcctgaggttcagtaatgagttggtacgccataaggccctggatgccgtaggggacctcttcgtaacaggccataacataattggtgcttaccatgcttttaagtcaggtcatgggcttaacaacaaactgatgcttgaattgctggctgcaactgaggcgtgggagttagtaagtgtgccggaaatggatcaaaatgatgagtacagcagcaggctttcccaagtatcgttatgccacgaaatgctgaaagtcacagtataa

SEQ ID NO: 163039 - DNA, 213 bp, Enterobacter cloacae
atgaaaaacatcaaacttttagcagcagcaagcgtactttccgttatgtccttctctacttttgcacagtcagtcagcgtaacagcatcaactctgtctgaagctgaggctaaagtggctgcgatcgcgcagaatgaaggtgcatcttcatatcgcatcacctcagcgaacaccaacgagcgagtgtatatgacggctgtgctggaaaaataa

SEQ ID NO: 163040 - DNA, 1338 bp, Enterobacter cloacae
atgattacaaaatatgaagtacagtccattattgaagagcttggaggaaaagaaaacatacaggattatttccactgtgccacacgactcagatttaatctttttgaaccgaataaggccaatattgaagcattaaaaaaaatatcgagcattctcgccgtgattcaggcgagcggtcagtgtcagttgatcattggcaataacgtttcttcctactatcagaaagttgtcgaagtactggggtcatcccctccccctgccaaccagaatgaagaggtctcccccccaacgcaggaaagattaatcaatcgtttgtttgcctttatctccggtagcttcctgccccttatcggcttactggccgccgcaggtctgctcagggccggcgtgatactgctcgggaaagtcgatgcattaaacggcagcgataccttaaaaatattatcgttcctggcagaagcaccattttatttccttccggtgctgctaggggtaaccatcgccaaaaaactgaagtcgaacgagctcactggcgccgtgacaggcgcagttattctctatcctggcttcacgccgatggtcggagagaagttaagctttttatcccttcctctttggattctcaactatggtggaggtgtatttcctatgttccttgccatccccctggcatggaaaatagaaaccgtactaaaaaaacgaatcccggaatcgatacaattattttcagtgccttttttaaccttgttaatcgttgtaccggctacactgttgttgctgggtccctttggcactattgtcggcgattacctggccacaggcatactttttatcattagtcttaacggcattatttccggcatggtcattggcgcagtctacagctttatcgttttgtttggcctgcaatggtcactgatgccaatcatactctcaaacattgcccagggaggcgacccgatttatgccttaggcggcatgtcggcaatcgcccagatgggggtggcattgggtattttgcttaaaacacgcgatgcaaaaaccaaagagctggcggcgagtgcatttttcccggcgctaatcagcggggttaccgagccgattctgtatggcttaatcattccgaaccgaaaagcggtgctgtatataatactagcaggtgcagtcggcggtgctattaatggttattatcatataaccattaatagcccggtattctctagtttactggctattccgaccgccagtagttatatcgtctatgccagtgcattattttccacactgtttaccggagcagtattagtactgttattcggctataaatccaggccttaa

SEQ ID NO: 163041 - DNA, 1335 bp, Enterobacter cloacae
atgatgactgaactgaacaaaaccttgattcccttgatggtagctttgctgcaggtgtctccattcgcgttggcagatcaatccttctggaacggcacagtgttgggtttcgaagccccgcagcctgggttactgggcaatatgctcggcatccggccgatactaacggaaaacggctttacctataatctgggctatcttacccagagcgcctataacgccagcggtggctatgatcacaacggacgtgtcgcctttatcgaccagctggcgctgatgttcaaccaggatctcgaacgctggaccggcattcccgacgcccgtattgagggcaatatcgtcaaccgcaaccataatgacgacctgacctccaggcgtttgcaggacacgcgggtaaatgagaccgacctggcgcaggaaagctatggaggtcagtccatcaccagactggggtggctcacctttgcccgcagtttcgacgatcgccggctgacctggcgtatcggcatgatgaacaagaaccagaccttcgaccagattgtgccctgcgattttcagaccctggcactgtgcggcggtaaatccgcttactcatatacctggagtaactggaacgtacatacctggggcacgacgttcgagtacaagctgaggccggaactgacgctcaagagcggcgttatagaatacaatacggagaggtcttcccgcagccatgcatggagctggtctaccaaagggagcaagggagttctgctgccggtggagcttgaagcgcgtacccacgtttatggtttgccaggggcctataatctgggcgtgctgttcaccaacgccaggcgagccgatctgtacaccgccgatagcgataaaaactacaatcgtacctggttcgtatggggtgggttaaaccagcagctggcgcagcaggcaggcgatccgaaccgtgggctgagcgcctcgtttaacttcagcgtcgccgatcagcgcagcgttgccctgcattccgtcatagctgcctccctgcgctaccgtgggctgtttgacgcgcgcccggaagactggattggcctgggcgtgagttatatggatgtcagtgaccattacgcgcgcaatcaggcatacctgaatcaggtcaacggcgtcagcgattataacaatccgctttacagcccggtacccggccatgccgtcaacgccgagttttattaccgcttcgccccggttccctggctgtcgctgcagccggggctgcagtattggcatcgtcccggtgggctgaaggaaacccaggacgcctgggtggtggggctaaaaaccatcgtggcattctga

SEQ ID NO: 163042 - DNA, 1440 bp, Enterobacter cloacae
atgaaatttaaaaatctatctttcccagaaaattttctatggggtggcgctatctctgccaatcaggccgagggggcatggaacgtaggcggtaaaggtattagtatcgctgacattaatgaattcatccctaaaactgatcttcggaaaatgtcaaacaaagagatgacccgcgagtgtgctcttgaacgtatcaacagtcatacagggcatttccctaaaagggatggcattggttttttccatacctttaaagatgatttgaagcttttaagcgagaccggattaaaaacgttcaggacatcgattagctgggccaggatatttccccatggagacgattcggcgccaaatgaagaaggtttaaattattacgatgagttaatcaatgccgttattagtaacggtatggtaccgttgatcactttgtcccactatgaaatgcccgtaaatctggcattaaagtataatggttggagcaacagaaaacttattgaatttttctttaattttgccaagacctgtatcgaccgttatcatgacagagttaaatactggattccggtaaatcagatcaacctgattaaatttgaatcatttaatcacctgggaattttagaagatgatgtggataatctcatgcaggaaaaattccagggacttcaccacgaactggtagtatccgcgatgatcaagcaatatgcagtgcagcttaatgacgatataaaaatcggcatgatgttgtattgtgattttgcttacccagagactccgttaccggaagataatttggctacctatcaacggaatcaactggagttatactgtgcggatgtgttgttgagggggcagtacccgggttatgtaaaaagattcttcaccgagaacaatattacaatctctagcacggatgaggatatcgcgatccttaataacaccgcagattttatgagtttttcgtattacaacacttacctcagcaatgtcagaacgggaagtaattatcctgacaatgcgttccctaaccctgaattaccagcgacagaatggggatggaatattgatgctatcggattaagacatgttctgaatttttactgggatcggtggcagaaacctattttcattaccgaaaatggtatcggtttttccgatgaactcactaatggcacagtgaatgacgactacaggattgcttttttaaaggaacatctggtatcagttggcgaagcgataaaagatggagtgaacgtcattggctattatatgtggtctccaatagatattgtcagctgttcatccagccagatgtctaaacgttatgggctagtctatgttgatctggacgatttcagtcagggctctggtgataggttccggaaaaaaagtttttattggtataaagaagtcatttctaccaacggaaaatcgcttgaataa

SEQ ID NO: 163043 - DNA, 744 bp, Enterobacter cloacae
atgaaggtagataaatccgcgttttacagtccgttatatatgaaagcttctgagtacatttttcattcctccagagcgaacgtgtttgtaagaatagcgcgagctattgttgataaaatagatgaatttccttatgttaatatcgaagagcttgctaaaaccgctgacactactccccccagcgtgacgaagtttagtaggctcattggatatgctagctatactgaattgaaaaatgatattgtttcacaaatgtgtactcttgacgcagatgcgttacaaactgaaacggaaataattaatgatatatattcctttatacccatgaaaaagtgtcagcaactggcaaatgtattgtcactaaaaaaaagtgtactcattttgactaatgaattttcgttcagtatctcaaatatacttaaagtcggaattagtagtaaccaacggaaagtgtataccgttgatcgaacaaatcaccagctgatcagtttttttatggctcacgtagactgcgttgtgattattactttaaccggggaatggatggaaaaggataacctacttaaccgatttccggatcggttgacattgtgccttatatcgaaggtaaaaccgaagaagtatgaggggaaaatacattttcatcttagtctggatgattacccccggttactgtgctcaaattatcactctcataaatatctggaaagtatagtttttaatattgcccaggctcttctttga

SEQ ID NO: 163044 - DNA, 1239 bp, Enterobacter cloacae
atgtttgaaaaggtcatcgtcatgaaaaagaaaataatcgttcttctgctggcggctgccgtcggcacctcgggtgggacagcatttgctgcccaaagcgaatccaaagacgaggtccagggcaccggtagcgcagcgatggggcctaaagtacccgtcgcagtggtcatcacccgcgagatcgttccttcagtcgaattcacaggacacctgtccgcaccgaaaaccgtagagttacgaccccgcgtcggaggtgccgtcgatgaggtcagcgttcctgaaggcagcctggtgcgaaaaggacagttgctgttccagatcgaccctcgctctttccaggttgccctcgaaaccgccgaggcacaattgcgccagacggaggcactggcgtcacaggccaaaagggacttcgaacgtgccagccgtctggtgaccaacggcgcggtctcgcgcaagacctatgatgatgccgtttcaactcgtaacgcccgacaggctgaggtacaggcagccaaagcggctgttgccgcggcgagactcgacttgtcctacacgcgtatcaccgcgccaatcagtggccgcgtggaccgggtgctggttaccgagggtaacctggtaagcggcggcacttccggctcggcgacccagttaaccaccattgtatcggttgatccgctatatgcctacttcgatatcgatgaagccactttcctcaactatgtcgacaaggctcggccgaacaccgccgcaaaaggcaagccctcactttccgtccaggtcgggctggccacggagaaagggttcccacacccggggacgctcgacttcgtaggtaaccagattgaccgtaataccggcaccatccgcgcccgcgccgtggtgcctaaccccaacggtcagttgacgcccggggcattcacacgcgccaaactctccctcggcgtatcacgccggactatcctgattgacgaccaggcggtcggttcggatcaggggcgtaattatgtgctggtggtgggcaagggcaacaaagcccagtaccggccgatcgagctgggaccggtggttgagggactccgtgtcgtcaacggcggcctgcaatccggcgagaaaatcatcatcaagggtctggtaggccccggcatgacgatcttgccgcagatggtgcccatgcaggcacaggtagtcaaaacggcccaatccgctggcgaagccgacgtaacggaggtccgaaaatga

SEQ ID NO: 163045 - DNA, 3180 bp, Enterobacter cloacae
atgaattttcctcgcttcttcatcaaccgaccgatcttcgccgtcgtattatcggtgctgatgctgatcggcggtattatttcctttttccagttgccgttgagcgagtatccgtcgataaccccgcccacagtacaagtcagcaccagctattccggtgccaatccccaggtcatcgccgacaccgtagcttctcctctggaacaggccatcaatggtgtcgaagggatgctttacatgagctccctgatgtctaccgacggcaaactggtgatcaccatctcgttcaagcagggaacggatccggacatcgcacaaatccaggttcagaaccgggtctcacgggcgctgtcccgcttgcctcaggaagttcaggatgtcggcgtggtcaccgaaaaaacgtcgccaaacctgctgatggtggtcaacatgtactccccggagaaccgctatgacccgctctatgtctctaactattccctgctgcatgtccgcgatgagctggcccggttaccgggtatttcgaatgtggttatcggcggcgagggtgagtatgccatgcgtgtgtggctcgatcctgccaaggttgcggcgagaggcctgacttccagcgatgtcgtctcggcaattaaggagcagaacgcacaggttgccgccggttcagtcggccaggagcccaatttgtcggcgtctttccaggtcagcgtcaatacgctgggacgtctcaccaccccggaccaatttggagatatcgtggtaaaagcgggtgccgacggccagataacccgtttgcgcgacgttgcccgcgtggagctgggttcggacagttactccctgcgcgcactgcttgacggcatggatgcagtcggtatccagctgctgatgagcccgggagccaacgccctggacgtggctgaatcggtacgagtcaaaatgaaggaactgcgcgccggtttccctgagggtcttgattacaaaattgcctatgaccccaacgtctttgtcagcgcgtcactgaaatctgtcgccaccacgctgtttgaagccatcgtgctggtggtcattgtggtggtactgttcctgcagacctggcgcgcctcaatcattccactggtagcggtaccgatctcgctggtcggcaccttcgcgctgatgcacctgttcggcttttcgctcaacaccctgtcgctgttcggtctggtgctgtcgatcggcatcgtggtcgacgacgccatcgtcgtggtcgagaacgtggagcggcacatgcgcctgggggaatcgccgaaaaatgcggccctcaaggcgatggaggaagtgaccggtccgattctggccatcacctcagtgctggcggctgtcttcatcccttcagcatttctgtccgggctgcaaggggagttctaccgtcagtttgccctgacaatcgccatttcgaccattctgtcggccattaactcactgactttgtcgccagccctggcagcggtgctgcttaagccgcatcatggccctgccgcaagccgcgaccggttaacgcgcatcatcgacagcctgttcggcggtttcttcaggcgcttcaacagcttcttcgacagagcgtcgggcgcctatgtcggaatggtgcggcgtgcggtgcgcggtagtgcgattgtcctgatgctttacgttggcttcctggggctgacatggctgggcttcaatcaggtgcccaacggctttgtgccggcgcaggacaaatactacctggtcggcctggcccagctgccaagcggctcttccctcgatcgcactgaagccgtggtcaaggagatgaccagaatcatgatggccgagcccggtgtcgaaagcgtcatcgccttccctggtatgtcaatcaacgaatcggtgaacgtgcccaactcagcgctgatgttcgccatgcttaagccgttcagtgagcgtaaggacccgtccatgtcagccaacgccatcgccggcaagctgatgggcaaattcagtcacattacggatggcttcgtcggcatattcccgccgccgccggttcccggcctgggttcgatgggtggcttcaagctgcagatcgaggatcgcgccagccttggctttgaagcaatagctcaggcgcagaatcagatcatggccaaagcggcacaggccccggaactgaccgacatgttcgccaacttccagaccaacgccccacaggtacaggtggatatagaccgcgtgaaggttaagtcagcaggcgtgtctctgaccgacgttttcgagacgctgcaggtgaaccttggctcgtactacgtgaacgacttcaaccgctttggccgcacgtatcgcgtcgttgtccaggccgatgctccgttccgcatgcaggttgaagacatcagtatgcttaaggtccgcaatgccgctggcgacatgattcctttaagcgcgctggctaccatcacgcgcagttccggcccagcccaggtcatgcactacaacggatatccctcggccgatatcagcggcggggcggcgccaggctactcttcggggcaagccaccgccgcgatcgagaaaatcgttagcgaaacgctgcctcccggcatggcgtttgagtggaccgatctgacctatcaggagaaacaggcgggcaatacctcgttcattatcttcccgctcgcggtggtgttggccttcctgatacttgctgcgcagtacaacagctggtcgctgccgtttgccgtgctgcttatcgcgccgatgtcgttgctgtcggcaattgccggggtttggctcacggggggcgacaataatatcttcacgcagatcggcttcgtcgtgctggtgggcctcgcggccaaaaacgcgatcctgatcgtggagtttgcccgggccaaagaacaagaaggcgacgatccactggcggcggtgctggaagccgcgcaccttcgcctgcggccgattctgatgacctcgctcgcgttcattgccggcgtggtgccgctggttctcgcctctggcgagggcgccgagatgcgccacgccatggggatcgcggtatttgccggcatggttggcgtgacactgttcggtctggtgctgacgcctgtgttctatgtggtggtgcgcaaacttgctctgcgccgagaagtgcgtaaagcccgctccgccgcgaccagcacgcgattgtaa

SEQ ID NO: 163046 - DNA, 1455 bp, Enterobacter cloacae
atgacaatgacggacgagacccgcatgatgacagagaaaactaaaatgattgaccgtaaaccacggcgcgtactggtgccagcgctgctggtactggctctgggcggttgcaccctgcagccgaactatgaccgcccggcaatgcctgtgcccagccaatggaaccagaccagcggcgctggcaccagcgcaactaacatggactggcagcagtttttcagcgatccggccctgcatcagttgatccagctggcgctggacaataaccgctccctgcaggtaacggcgctcaatgtcgagcgcgcccgcgcccggtacggggtgcagcgttcggcactgctccccacagtgagcgctggcgccagccagacgtcgaaacacctgccgggcaatctctgggagacccaaagcaccgggccggcgacctaccagcagtacgaagccaacctgggcgtcacctcctgggaactggacttcttcggccgcgtccgcagcctgcgcgaccaggcgctggagacctatctctccactgaagccacctcgcaggccgcacgcatcagcctgattgccgacgtggccatcggctacctggccctgggcgccgacagcgatttgctgcgtcttgcgcgcaataccgccagcagccagcgtgaatcctacaacctgaccaaacgcagctacgagttgggcgacagttctgctcaggatctggcgcaggcggaaacctcggtgaaaagtgccgaagccgacgtcgccaaatacacccgtcaggtacagcagaatgtcaacgcgctacggttgctgctgggtacagagttgccggcaggactggcggataatgccaccctgaacaataactggcgcttccccgccctgcccgcaggcctgccatctgacctgctgacacgccgcccggacatcattgccgccgaacatacgctgaaagccgccaacgccaacatcggcgcggcccgggctgcgttcttccccagcatcagcctgacgacctatggtggttcggcgtcatccagcctcgggcacctgtttgaagcgggcactgccagctgggctttcgtaccatccatcagcgtgcctatttttgacgctggcaaaaaccaggccaatctggatatcgcaagggtggagaaacgcatcgaggtggccaactatgagaaagccatccagaccgcgttcagggaagtgtcagatgcgctggccgggcaggccacttaccgggacgagctaaccgcacgcgagcaggacgccgacgccaaccagcgctactacgacctggcacaggcacgataccaggagggtatggacagctatctgaacttactggtggcccagcgctcgctgtatcaggcgcagcaaacgaagatctcaacacaactgagcacgctggctcagcagattgccctgtacaaagtgctgggaggcggctggaaatcgtaa

SEQ ID NO: 163047 - DNA, 783 bp, Enterobacter cloacae
atggaaagcaaacaagatacccagaataatccacgtagagtaagcatctcgccggatttcattactgtcctgaatgacattttaactgcgaacacagaagttggtctccatcaccatgactggggccaacttaacgttatcaattcaggaatgattgagactgacattgataatggcaacagtctcattgccccatggcagtatgccatctggatcccagcaggagtgggtcattccagccacaatcaaaaaattacagagtactgttcaatatgtattccagaaaagttttgtgacaaactgcccaaagaagcgtgtattattaacttatctgaaattggtcgcgccataataaacagcatgttgaagcatcaaattacatatctttccggcaacaaagggcaaaatctggctaatgtattgctggaccaactggaagatgcttcaaaagccatgaattatattcctaatagcgaggataagtatctcagcccaatactcagataccttaaagaaaaaccaggtagtaaccggacactgaacgaatgggccgagaaagtttatacatctgaaaaaacgctatccagaaaattcaaaaatgaactacatatgtcgttcagggaatggcggtcaaggctgagattccttcactcactgtctttgctcaagacaaaaatgactgttcaggagatatcttatttattgggttacaacaacccttcatcatttattgttatgtttgaaaaactatcaggcacaactccggacaaatatagaaaataa

SEQ ID NO: 163048 - DNA, 351 bp, Enterobacter cloacae
atgaaacgtcgacccgattttctgaccagtgttatacaagaactacttgagagaatcgagaaagatatcaaggatgaaataacaataaatcaactttcagatatttctggctacagcaggtggcacctgcaaagggtcttcaaatcccatacgggtgtatcgcttgggacctatatcagacagaaaaaagtcgagcatgcagcaaatgatctgcttaaagagcgtaccagcattattgatgtggttgttgactataacttcagttcacaatctgcattttgccgtatatttaaaacggtttacggtgttaccccggcagcctacaggagtatccacaaatctgttcattaa

SEQ ID NO: 163049 - DNA, 192 bp, Enterobacter cloacae
atggctgacatggttttattcagtatgtctttcccatatatattcaagataatgctccttggattttttttatatgttacatgcatggaattagttaagcactgcaaattttggcacaacatctggcataagccgctgttttctttctccatttatatgatcagtgtgtccactgtttattattggtattaa

SEQ ID NO: 163050 - DNA, 858 bp, Enterobacter cloacae
atgaaaaatataaaaaacatttcactaactgttgccatttttattgcagcatgtgtttccatttatcatgtttcagacatgcagattaatggattatggaccagggatggcagggtcagagctgacgttgttacattggctggcgaagttaatggctacataaaagacgtggccgtaaatgataaccaattcgtcaaaaaaggacaactcctttttacgatagatgaccgtgattaccaaatcctggccgctcaatcacataaagaaatacagtcgaaaaagtatgatatgaataaactcggggaaacgtacaaccggaaacatggtttatccggcacggtgctgagccgtgaagaggtcagcaatgcaggctttgactactttattgctcaggcagattacgactccgcaatcgaaaagaaccgccgcgacgaactgaatttgtcgaaaaccaaaatctatgcgccagcagacgggtacatcaccaatttacaggtgcatgccggtgactacatttcgaatgggaaaaacattgtttccatcgtcaaagataaaagtttttatgtctatgcttatttccaggaggatcagcttgacaagataaaaccaggacaacaggtgaaggtaacactattaaacaggaagataaagctcagcggacatgtagaaagcatatcaagaggtattcttgactacagcaataaaagcacacaaggtgaattacatgaagtcaacccgacctttgaatggattcgtttgccgatgagaatacctgtacgtatttcgctccccgttaatgaaaaaaactatgacctcctcatttccgggatgacctgcactgtaactattactgagtaa

SEQ ID NO: 163051 - DNA, 1764 bp, Enterobacter cloacae
atgaaaattccatacgatgagctgcgcattctttcgctggtggtcgccgtttatatcattcagttgctagcattctgtttcaacattgacggcggccccaccgcagtgatgagcgctatcgtggtgtcgcagacttttgtcggtgcccagtacttaaaggcccgtaaccgcattgcgggcaccgtattgggtataatagtttcttttatcgccgtatatctgtttgccgaaaaggaagtctattttattgccttttccctggtctggctgacatttatggcgatgatggtcagtctggttccgacagataactcacaccttttccagttgggagctaatacctatgcatttgtggcccttccgttaatcgaggatccttcactggcatatttcaatctgatgtccagaagcactggtgttttcatgggtgtcaccatcctggttgctacatcggtactgttgtttttgaaatacagcaattacgacattaaatccaatgttcgcgttatttatcagaaaacattcaaaatcagaagaaaggtgaacgcagaatcaccgattgaaatttctgagataaaagcttatttttcggatatttcaaaaatgatcataaacaaaaccaacgccagatatgagtatggttttggcttcaagtcggtgtccgcgttcaaaaccttttcattaatgtccatgatgctttttttttacaccaatactctgcggcattcactgaaaatcggcggacatatctcggataatataaagaacgactatcttagtattatccgaaaagccttgcagtgcaggggagacatgagcaagttcagccatgaaaaactgacagtcagcagttatttccctgagcataaatcatttttgcaagcagtaaaacgcggagccaggacattcattgtaaccagtattctgcttgccatctggtatgtttctggctggtccgccgggcatgccatggtatccctgggtgtcgtatacatgatccttctcaccagtttcccctcgccagttagcggcggcaaggatctggtttacggcacgttgcttggtatggtaacgggatggttctatattcagtttgtttatagtttcccttacgcttattccacgccggctctgtattttctggctcaactccccgtcctgatacttggtgggcgttggctctttgttgggaaaacctttctttttggcgtgacgtttatgaccacgttctattacggcttacagccaagtaatactaccgtggtcacttatgccacttttatggacaactgtcttggggccgccgtcgggcttgccatcactggtctggggatatccatcattttcccggaaaatagatttattaaaagcaaaaatctgatcaacctgacactgcgtgaacttattcaggtgcttaaaagcaagaatatggatatgtcagccgttatcctggaaatgcacgacaggctacggctgacctcgtcactggatggacataccaatgacgatttcactgtattagccaacctcgcatccctttacacaatcatctattatgtgaaggagcatggacagggtggtgaaacattgcctccacttaaaaaacaacttaccctgtggtttaagactggtcatttaactattgatgatcaacttacttcttatttcgaaagacttattcgcgagcaaaccggtgaagcacaaaggatatcaatgtgtacttataatattctgcaagaaatcgaggaaatttatgaaaaataa

SEQ ID NO: 163052 - DNA, 261 bp, Enterobacter cloacae
atgaaaaaatgtcttgttctctcgctgatactctctgcaataaactgttatgcctctacagaggctacttataaaaaccctgctccctcctcttctgtacgtataggttcagtaagtttctttaatagcggtagtgtaacacagtccgaaattgtcaatgagctttcgagaaaatcagatgaattaggtggaagttatttcgtaacaacctccctcgatgttgacaataactcgcgcgctactgcggtagtttataagtaa

SEQ ID NO: 163053 - DNA, 363 bp, Enterobacter cloacae
atggattacgaatttctgcgcgacatcaccggagtggtgaaagtgcgtatgtcgatggggcacgaagccgttggccactggtttaacgaagaggtgaaagagaatctcgcgctgctggatgaagttgaacaggcggcgaagacggtaaaaggcagtgaacgctcctggcaacgtgccggacatgaatacacgctgtggatggatggcgaagaggtgatggtgcgcgccaaccagctggagttttcgggtgatgagatggaagaggggatgagctactacgatgaagagagcctgtcgctgtgcggcgtcgaggactttttgcaggtggtagctgcgtaccgggcgtttatgaaacagaagtaa

SEQ ID NO: 163054 - DNA, 1266 bp, Enterobacter cloacae
atgaatgatgtccaattaaattcaagtattgattataatgaatatttttctcttgagttgcttgcagacatattatcggaatcaaaaaaaaccttggagagctgggtaaaaaatggggctatcaaatctatcttttgtccagaaacgagcaaaattttagttcacaaaaatcaagttgcgcataaagaagaaattcaaaaattattaaacagcaagtgggattatgaactccaaactcgtcctttgcgcccctataaactcgtagagctatttgcaggtgctggtgggctagctattggtctggagcaggcaggcttaaaagccatatttcttaatgaactggataaatctgcatgtgatactcttcgccataacagacctgaatggaatgttattcaaggtgatattgttaatgtcgatttctcatccatttctgaagatattgatcttttaaccggagggttcccttgtcaagccttttcttatgcggggaaaagattgggtttcgaagatacaagaggcactttattttttgagtttgcgcgcgctgtaaaagaattaaagccgaaagttttcatggcagagaatgtgcgtggtttgctaactcacgaagatgggagaacccttgagacgatcactcaagtaatcgatgaacttggttatgaactagttgagcctcaagtacttaaagctatattttacaaagtgccgcaaaaacgagagcgacttatcttggttggtattcgaaaagatcttaccgataaggttaagtttaattggccttcgccttataataaaattcttactttgcgggatgcattttttgcaggagaactttatccaactaatgttccagaatcaattggacaggtctatcctaaaagaaaaaaagaaattatggaacatgttcctcctggtggttactggcgcgacttgaacgatgatttgcagcgagaatatatgcaagggagttattttttgggaggaggtaaaacgggcatggctcgtagactttctcttgatgaacctagtttaacattaactacttctcctgctcaaaagcaaacggagcgctgccatcctctcgagactaggccactccaagtaagagaatatgcaaggattcagactttccctgatgactgggagtttaaaggatccatgggcgcaatatataaacaaattggtaatgctgttcccgttaacatggctgctgcattaggtcgttcattagtccgcttactgaacgatatcgaaaaaatttaa

SEQ ID NO: 163055 - DNA, 702 bp, Enterobacter cloacae
atggcttttaatcgtgaagctgtaaaaaatgttctccgcccaataataataagtgcatatatgagtcgagaatctaattcagatttatttagaaataccttagactgtttctcttgtattatagatgcttcagttaaaggcatcagcattgaagaatggctcgaaatagaaagaggtcgccaagtacaaaaaaccctacagaatcagataggtgagatgcaccaaaaaattataggtacattaccgggaatgacagaccttggagttggcggcgttcttgatattagaagtgacactttacattttgtagcagaggttaagaataaacataacaccactaaaggcaatcataaaatcgcaatatatgatgatcttgagcgatatctagcgcaatgccctcaaaattttattggttattatgtggaaattctacctatgaatggtagaagatataatgagccatttacaccctccgataacaacctcggacagaggagaccagtcaacgaaagaataagacgtattgatggggcaactttttatgattatgtaacgggagaacaaaactccataagaaatctttatgacatgttccctgggattatctcagaattattgcacgaaataccgggttgtaatgtaagttcagtacgacttggaacagataatttcaacatgattttcaataggatattcggttaa

SEQ ID NO: 163056 - DNA, 726 bp, Enterobacter cloacae
atgatttccctgaaaaatgtttctaaatggtatgggcactttcaggtgctgaccgactgctccacggaagtgaaaaaaggcgacgtggtggtggtgtgcggcccgtccggttccggtaagtccacgctgatcaaaaccgttaatggtctggaacctgtgcagcagggcgaaattgttgttaacggcaccaaagtgaacgacaaaaaaaccaaccttgcccagcttcgctctcacgttggcatggtgttccagcactttgagctgttccctcacctctctatcatcgagaacctgacgctggcgcaggtgaaagtgcttaagcgcgataaaaaagcatcgcgtgagaaaggccttaagcttctggagcgcgttgggctttctgcacatgccgataagttcccggcgcagctttcgggtggtcagcagcagcgtgtagcgatcgcacgcgcgctgtgtatggatccggtggcaatgctgtttgatgaaccgacgtcggcgctcgatccagagatgatcaacgaagtgctcgacgttatggtcgagctggcgcacgaagggatgaccatgatggtggtgacgcacgaaatgggcttcgcccgtaaagtggccaaccgcgtcatctttatggacgaagggaagatcgtggaagactcgccgaaagaagagttcttcgcgaacccgaaatccgaacgtgcaaaagatttcctcgccaaaatcctgcattaa

SEQ ID NO: 163057 - DNA, 1677 bp, Enterobacter cloacae
atgggtgacaaattaatccccctgtttgacaaacctgttgatgaaccaacggattttcatgggcttctgggatggtcagccgactggcgatgtataaatgatccagaagaaaagcctgtgccgttagatcatattgaatcactagatcccaaagataatatcattacggttcgaaggggggatactctaggaaaaatagccaaggataacagtgtctcaataaaagagttagctgagtataatggaataaaaaatgcttctttaatctatcccggccaagaaatcagattaccatcgtataaatacaccgatgaaatatcagttcctgaaacgcattctcatgaacaatgtattatgtcatttacatttcaggatcttattgagaagccaattcaaaatcttaaggttaaattggtcgcgttaagtggggatgtgtatgagtcagtgactaatgaaatgggtaaaataagtgatttcatactcgataaggtttcagacgtgcaagtgtttgtctctgctgggactggagaaccaaaaaaaattgcaaatatatctccaaccgagtcgaaaaacaacattcagcttacaagtccgaaagtaagaattagagggacatcatcagcattaaatggtgagccgggccaacttgactcacaagttggagtgttaaatacagtcacaaaaggacgtgatagtaaaggaaaccctataattcaaattaatcatgcatgccctaatgaatatgaccttaatctagggaaaaacataatttattgggatgacataatttctgcctctaagcgtagtggaatcatacctcaaagtattgccgcggtaataaatgcagaatcggccaaagacaaagagttgatttggaaacaagaatctgtttgctataattatggggaaatgaaaaaaaggaagaaggccagagccgagtctaatttaactccaatagatattgtactgtataaaagttcagctgctgggatgacacagtttcttaacaaaacatggttttgggaaacttttagaaaagggaccttcttgaatgacaaagcaagagagatgggattgctagccgataaacccaaaatggataagcatggaaagcccattttaaaaaaggataaaacccctgttcttgaaacacagttcaatgtttcccctgatgtttggaattcaatgtctgatatagttaaaggtggctatttgctagggaaaacaccatatccaaaaaaggcaactaaatcgattcaagattggttaaatatgaggtttaaatcactatacgcaattatggcagcagttgattatggaatgtataatttatccttcctaaaagaaattggttataatgttgattccttaaatgatgcggaaaaagctaaagttatgtatctaatgcataaccttggagctggtgatgccaaaaaatttataggtaaaactataaatgaagaacgcgccgaggaactattgatagctcaggttgggaaggataatgcagtttcccgtgcaaaaatgaacagcggtagctatgtgcgtgcacatagactttggttatctgcatatatagatcaaatgattaaggttgaattattttactgtcctcgtgtcatgcacggaagtcaggttacatctgaagatgttttttgtattttaaataaaatttag

SEQ ID NO: 163058 - DNA, 498 bp, Enterobacter cloacae
atgaaacgcattataattatgttttttatcctgtctatttcaatgttcacgtatgcatatgatacatgtgattttgatgattactactgcactaatacaaccttagggaagatggataaaattaagagctcgaaatctaaagatggctattctcatatttttttaaatggcaaagaattatttaaagcaaaaacgagattctttagtgaggtaccaaatggttggacattagatttcaataataaagtatctaaaactattgttttttttgatagggatgagccaataaagactgaagatgggcagtataagcgtagagcttatgtgctgcttgatttttcttcaaactcaggggctgtaatatctaaagaattcttcccgggtacagattttgcagacataaaatgggtttcgtgggggaaggaaagttcagtaattatttttaatgacggctctaagtttaaatattcaaatggtagcgttttgaatgatgattga

SEQ ID NO: 163059 - DNA, 318 bp, Enterobacter cloacae
gtgacctataaaatatttacgcttggtatcgtttggctgtgcatgtcgattctcgtcattgttgtcttctcgacacaggacaaggagtggtggattggagaagagaacatcaaaaatatctgtgacctgatggcgtatgtagagaatgatgatatccgcgatttcggcatgctcataacgttcccggtttttttacctgctctgtatgctttcttgataaaaaaagcccatcacggttttttgtaccttataaccatactcatcgcaggcgtctggttatggcgctttatcttccgctaccagttttgtctcgggtaa

SEQ ID NO: 163060 - DNA, 711 bp, Enterobacter cloacae
atgaatgaaacgctgcttttctgtgatgttgatgagtatggttttccgcactggaacggattcgatatgtttcagtggtatgtactgccgaccgactgggagtacatgacgggtaatgcttatttatggctttataaaacatcctggctgatctatcaccgaagtatgattaagcaatttgcaaaagaagcacagataccggaactattacttgctggcgtggctgttgctgaggtgggagggacgcctgagagactgaaaggaataggcgtattgcaggcaaggcaagtcctggatgaattatcacgcgaaaaaaataaatattctaataaaacatccataggatctgtcgctattcaattaggcgttgcggcagaaacgctgggattagatcccgcttctcttgaccactttcaacaataccagcttgcccaatgcctgcttgaaaatagttttaatataagagtggttgcatttcatttacgcgatttaatccttcatgacaatccgggcatccgaaccgataatctgacagatgaacaaatcattctggcaggctcacgatataacagaggtacccaaagaagtgctggtgatatcgttggttcaattcacgagcctgtggggaaaccttcacgcgcgtacagtgagtatggtagacgcataattgagaaaaaaagcgcaatcctggccatcttagaaggtaattaa

SEQ ID NO: 163061 - DNA, 357 bp, Enterobacter cloacae
atggacgcgatttccgacccggtatgcgtctccaccatctaccaccatcctctggcggagcagggtatcatcttttgttcgatcggcgaagcgattcagggatacccggaactggtgcgtaaaaccctgagcactgtggcgccgcccaactataccttcttcgccgcgcttgcctcggagggtaactttgtcaacatgccgaaaggcatgcactgctggatggagctgacgacctatttcatcgaggacaatccggctgctgaacatgcccggagatctgctgacgcgctatgtgaacgtcggtttcaaccggcggcgagagaaaatgaaacaatatcatacaaatggctgccgtaa

SEQ ID NO: 163062 - DNA, 153 bp, Enterobacter cloacae
atggctgccgtaaggacgaatctgtgcgtcctggactatatccgcagtgactatgtgcacgtcctgtatcaggaacgcatcgtcaactccggcgactttgtgctggtaaaacagctggagcaagggtatggctggcttgccgaccaacagtag

SEQ ID NO: 163063 - DNA, 699 bp, Enterobacter cloacae
atgacaatagacgagacacttcctcaggccacacgacactcacttgtggataccgcgattacactactccgagcccagattgaaggaggagcatggaaagttggagagcgcattccaaaagagcttgaactggcagagatgcttcgcgtcggacgcaacactgtacgggaagccatccgcgtcctttcccatgcagaggtgctagaggttcggcaaggagatggtacttacgttttgactaacctggatccgactaatgttatgcgtcgcgtaaaccgctccagtctacgcgagcaccttgagttgcgcaccatactggaaactgaagccgcaaggctggcggctcaacatcgcaccaagtcagacgtcgtgcagcttcgccgcttgttaaaagcacgaggcgagcaacctcagcaccaattcattgacgccttcgcggaggctgataccgcctttcactatgccatcgcacgcatgagcggaaatagcgcacttagcgaactctaccgctatttctcccattcggtacgggaaaacatactttcggtgattgatcgcaaagacctacctgagccggatctgctatctcatcaggctattgttgatgcaattgagaaccaggacagcagtggagctgcggctgccgtacaggcagtggttgcaccgattattgtggcactaggcaaccacaaagattaa

SEQ ID NO: 163064 - DNA, 192 bp, Enterobacter cloacae
atgcatttttacattgataatatgacctgtggcggctgtgcacgcagcgtgacgaaagctattgtagacgttgatcccaatgccaaaatcgtcacggatcccccaaaccgtagtgtgcaggtttgttctaccgctccactggatgacattaagaagtctttgcaaaacgctggttttccggtacgggaataa

SEQ ID NO: 163065 - DNA, 3438 bp, Enterobacter cloacae
atgtctgaaattatcccaggatattgcacattatgcaggtcccgttgtggaactcttaatgaggtggaaaacgattgcctgattaaaataaaaccggatccagcgcatcctaatggtaaggccatgtgcatgaaaggtaaggccgcgcctgaactggttcatagcgcaaaccgtattttatatccaatgaagagaactcaacctaaaggggcagaagatcccggttgggtacggattagttgggaagaagcgatgtcagccgtagcatctcagctggataaattcaagcaacaaagtggtgccgaatcagttgcttttgccgtcactacacccagtggtactccaattagtgaagcgatcgaatggattgaacggtttgtgcggatctatggcagtccaaatactagttatggtactgaggtttgcaactggcataaagatgttgcacaccgctggacatttggctgtgggatccccgtaggggattatgccaatgctgatttgatacttctctggggacataaccctgcaaacacatggcttgcgcaggccaacgcagtgggtgggggaagagcaaagggcgccagattgatggttgttgacccaaggccaacaccactggcaaaagaagcagacgcctggctgaacgtttatccgggaacggatggtgcgttggcactaggtctcagccatttactcattgccaaaggggcatataatcatgatttcgtgcgtaactggacgaatggtcccttgctggtaagaagtgataatggtcattttttgcgtgagcaagacctccagcctcaggccagtcagaaccgatatgttgcctgggatggtttaaataacaatgtgctgtatatagaatctgagcgcagagaatccgaaaaaatcgcgtcggaagttgtacttgaaggtagtattgaaattacattagcaaatggcattaccactggttgcgtcactgctttttccctttttaaagcattagtcgaagactatgagccagaaaaagtcagcgaaattaccggcgtttcggtggagtccatatatacagcggcccagcttattacgggggcaaaacgtattgcctatcacagctggtctggcgtggctcaacatacgaatgcgacgcaaactgaaagagccatcgccactctttacgcccttaccggctgttttgatatgcatgggggtaaccgaatttattccgggcatccagtaaacattgtcaattctccgacgctaatgagcaaatcccagtgggataaagcattagggcttgttgatcgcccattggggcccccttctcaggggtgggtgcattcaagagatatctggcgtgctgtactggaaggtcatccttatcgtgtcaggggactggtcggctttggagcaaatatattactttcccagagcgatacatccctgggccagaaagcactaagtgcactggaattctatgtgcatgccgacttgtttgaaaccccaacatcgaaatatgctgatatcctactccccgcgaatacgccatgggaaagagagggattacgtacggggtttgaaagcacagcccaggcccaggagcatattcaactccgtaaacgcatggtgtctccccgaggggaaagccgttcagatatggaaattgtgttcgatttggcttgccggcttggaatgcgtaatgaattctttgatggcagtatcgaacgagcatggaatcactcactcgctccgacaggaataacggtcggggaactgagggaaaaaccagcgggaatagacttgcctcttgttcacagggagagaaaatattcactaaaggatgagaaaacaggctatttgactggttttaatactgaaacccgaagggctgagctatattccgaggtattattacgtcacggctacagtccgttaccgggttatgtcgagcccaaagaaaatcagcgcaacgatcctgattatccgctgcgtctgacttctgtcaaaaatggtttcttctgccacagccagcatcgcagccttaccagcctgcggaaaaaagcaccttatccgacagttgagatttcaggtgaactcgctgttgaagagaaaatcaggaccggagactgggttgaaattgaaacgcgtgccggcattgcccggttcagggctaaagtggaagacaggttatcccgtgatacggttatcgccgaatttggctggtggcaggcatgccacgatttcggtaaaccctcatacccggttgccggcgagtatagcagtaattacaatagcttgattagtggggatgattatgatccgatcagtggttctcttccccttcgttcgttcaggtgtcgtcttcgcaggctgaatgagtttgagctgataaggcgcccgtgggaagggagagcaaaattccgggtagcggagctgagaaaagaagctgaaggcgtaaccacggtaacttttgagacggaaggtcgcgaatatttaccggattatgagcctggtcagcatataactgtcagttgtccattaccaggttctgaagagattgttacgcgtgcatattctctgaccgggtctgcctttgtggataaccgccagacatattctatttccgttcgtcatcaaaaggggcttgatagtaatgggatgccggtggaaggggttatgtcgtcttttattaatcagtatttgaaaacaggttccccggtcgagttgactgctcctggtggaaattttattgtacctctgaatgctgttaaccctgtcgttatgtttgccggagggatcgggattacgccgtttatttgctatctcgaatcacttgatttaacacaggacgggtcagagatttggctctattactcaaaccagaatagtaaaacgcatgctttcaagaagcgactccaggaactggaaaacagcatagaacgtttgagcattgttaatatatatgggaatcctttaccagaagatgttaaaggcaaagattaccaaaaaacaggctttgtcagcgcggcagatgtgccgcagtacctgcttgagcaaaatgcccgctattatatgtgcgggcctatgcctatgatggaggcgctatcgaaaggcttgcaagtcagaggcgttccggtatttggtgttttttacgaaatatttcgctccccagcaaaaattagcaatgatcctaatttgcaccataaggttgtcttcgcaaagtcagggattgagcagatatggacaacagacaaaggtactttactggctttcggtgagaaactgggtatttccatgccaagtggatgcagggttggacaatgcgaaagttgttctacgaaaatattgcaaggaaacgtgatccatcttaatggggcggcaccttcagatgaagatgcctgcctgacatgtcaatgtattcctgccggagatattattattgatgcctga

SEQ ID NO: 163066 - DNA, 1074 bp, Enterobacter cloacae
atgccttcacttaagacgcttttgcaactgcctcgcgggtggcaatcggcccgacaaactactggccctgatggagtgacaatccatttgcaggcaacgcgtaaaacctcgcgctgccctgaatgcatgaagcgcagcaattctgtacatagctgtcgacgacgccggatacagcatctgccatgttccgggcaggtactctggctgatatttgccgttcgccactggtactactgttgtaacccatcctgttcacgcaaaaactttgccgaatccctcgctccttttgctggctcgcgacagcaggcttcgcattcactgcaaaaattacagtatcaattggggttgattgccggtggagaaggctgcaacggcgacaggcctgtgcgaaccagcacggataccattcttcgcagggtaataagcactcctgagacaaagcaacccggtaccccacacataggaatcgacgaatgggcatggcatcggggccatcgttacggcacgttaatagtcaatcttgagactcaccgtcccctggtcctgctacccggccacgatcagcgtacgctggctgcctggttcagaaaacatcctgaaatacaggttgtttctcgcgatcgcggcggtatctatgctactgcagcacatgaaggtgcacctcaggccagacaggtggcagatcgccggcacttgctgaaaaacattggcgatgcacttgaacggatgatgtacagacatatgcctctgatacgtcttgtcgccagtgagttgtcgccaaagaaatcacctgagccagaaatggaagtacctgcgccatatatccgtcgcccggaacgacttaagcagcagactcgtaaaaaacgtcatcaacgctgggtggaggctattacccttcataagaacggagatgggatccgtgaaatatcccgcaccaccgggttatcacgtgtaacagtcaggcgttggctccagtccggtacatttcccagaaatatcgacccgcccgacgaaacccggccttctggatccctggcgtgggtggctgcaagaacggcgcgagcgcagcgataa

SEQ ID NO: 163067 - DNA, 354 bp, Enterobacter cloacae
atgacttcacataaaccggacaacatttctcacggtgaacataccgggcttccctctctctctctcaatgaactggctattcttgccgaaacgttccgccttctgggagacccgtcccggcttagaataatgctgtactgcatgcagggagccgcttccgttggggatatagcagaaaatcttgagctttcccagtcactggtgagtcatcatttgcggctgctgcgtggtgcccgattggttaaaggggtacgtcaggccaagcagatcttctatgagatcgatgataaacacataagccacgtgttgttggatatgagcagccacatcgccgaagagcaggaagacgactaa

SEQ ID NO: 163068 - DNA, 2859 bp, Enterobacter cloacae
atgtcttcagagcttatcgagcgcgagaccacacagggtgaaaagctcgtgtttcgtgtggaagggatggattgcgccagctgtgttggcaagatcgaaacggccttgcaccgtctcaacggcctgtctgatgtgaatgtcaatttcgcagccgaaaccctctcggttctccgcagttcgagcagtcgtactaccgcaagtggtattgccaaaaagatcaaggcattgggtttcgatgttcaggagctcacggctgagccgctgccagtaatgcctaccgctattaagcgcgaagccactaacactcatgaccactctgtacacgcgcatggagatgagagccatactgcacactcccacagcggctgcggcgggcatgaacacaaccatgagcactccgcacatgcgcatggagataaggaccattccgcgcactcccacagcggctgcggcgggcatgagcacgatcatgaacacagccatgagcactccgcacatgcgcatggagataaggatcattcctcgcattcccacagcggctgcggcgggcatgggcacaatcatgaacacaaccatgagcactccgcacatgtgcatggagataaggatcattccgcgcattcccacagcggctgcggcgggcaagagcatggtcacggcccatgctgcgactcccatcagactacggcaaatacttctcgtccagctccgactttgccacctaatttatcgatgcatgtggaagggatggactgcgcaagctgtgtttccaagatagaaaccgcgttagggcgtatgaccggcgtgtctgatgcgcgcatcaacttcgcaactgaaacgctggaactgacactcgcggccagtgccgcaactcagatcggtgacatagaaaagacgattaagagcctgggcttcggtgtctccgacgtccatcggcatgacggctcctcgtctgctgcccctgcatcgcgagccgctactcgcgacctgcgctggtggcaaacgaagaaaggcaggctggtgcttggcctgggagctttgatgggggccgcctacggggtctcacaattcgttcctggctattctgaatggatttttgctgcggccgtggttgtcggcgttattccatttgcgcgtaaagctttcgcgttagcgacttcggggtcgccattttctatcgaaaccctgatggtggtggcatccatcggtgccctgatcattggagaaacggaagaagcggctgcggtggtcttcctgtttgccgtaggcgaactgttggaaagcgtggcggccgggcgtgctcgcgctggcatcaaggccttggcgtcattagtgcccaaaaccggtgtgctgcttggtcctgacgggacgcagagtaccgtgcctgtaacctccctgagagttggtgatcgtgtcctagttcggccgggcgatcaggttcccgccgacggcgttatttttgagggtgagtccagccttgatgagtcccctattacgggggagtcggtgcctcggcagaaggccgttggtgagaaagtattcgcgggctcgattaacgtagatggggtgcttaaagtccaggtggaaaaagccgcatcggacaataccatctcccgcatcatccagctagttgaacaggctcagtccgccaaagcgccaacggcccgtttcatcgagaaattcagtagctactatacgccgagtgtgatgttgatcgccgcgctgatcatgctcgtcccgccattgttcatgggcggcgactgggatacctgggtataccgtgccctggccttgctgctgattgcctgcccctgtgcactggtattgtcgactccagcggcaatcgcttcggggctggcggtggcgacacgtcgtggtctgcttatcaaaggcggtaacgcgttggaaatcatcggccagatacgcgccattgcctttgataaaaccggtacgctgactgagggcaaaccgcgggtaaccgagattgttaccttcgccgatggcaacgaaaacgaagttctggctctggccgcggcagtcgaagccggttcgagccatccgctggctaaagctgttatcgagcgggcacaagctgacagtattgccattcccgttgccaccaatgcatccgcaacggcgggtaaggcggtacacgccacggttgccggtcgtcgtctggcggtaggttctccgtcgtatgccgaccaggttgccagcctgactccaccatctcgccaacgtattgaagcgcttgaagacagtggtaaaaccgtggctgttttgttcgatgaacagaacggcgaggtactggggttgttggcgctgcgcgatgagccgcgcgatgatgcacgcgaaggcgtggctcagctcaaaaccatggggatccgctcggttatgctgactggtgacaaccgtcgtaccgccaaagcgattgccggcaaccttggtcttgactgggaagccgagctgttgccccaggataaactgagcctgataaatgggatgaagaaaaatgccaaagtggccatggtgggtgacggcattaacgatgcgccagctctggcaacggctgatgtgggtatcgccatgggcggtggaacggatgtcgcactggaaaccgccgatgcggcgctgctccaaagccgtgttacggatgtggcatacctggtgtccctttctcgcgccacgatgaagaacatccatcagaatgttgcatttgcagtcggtcttaagggattgttcctggtgaccagtgtgctgggcatcaccggtctgtgggtcgcggtattggccgatacgggggctaccgcattggtaacgcttaacgcgctgcgcctgttgcgttttaaaggacgataa

SEQ ID NO: 163069 - DNA, 399 bp, Enterobacter cloacae
atgaaccaatatgttaaacgcacacaacgcgattaccctctatcctttaaattgaccgtcgttgagcaggtcgaaaaaggcgaaatgacttaccgccaggcgcaggaccgctacggtattcagggcagtcataccgtcctgagctggctgaaaaaatatggtcaactctactggctcacgtccccttctgtcagaaagtgcggagccaatatgcctgatactcctcagacgcctgaacaacggattaaagaactggaacaacaactggctgaatctgaagttaaagctcagttctttgaggctgtcgtgaaagtgatgaacacagaattcggagctacgctgacaaaaaagcagttaacctccttatcacgcaaacacaaacaccgaaacttaccgtaa

SEQ ID NO: 163070 - DNA, 2061 bp, Enterobacter cloacae
atgctatcatcaggaaggaagatttctcgcgccaaaaaactggctaacttttgtacgattggggttgtattcagctcttcatatggatattcagctgaaaacgattcccctgacaattcagataagacaataattgttactggaacaattaatgattattcagtacaatctacaaatgcggcaacaaaacttaatttggcaacaaaagaaacacctcagtcggtcaccgtcattaccccatcccggattaaagaccaagaccttaaaactataggagatgtgttaaaaaacacaaccagggtctctgaaaatagttacgacagcgacagatttgattattggtcacgcggttaccgtattgacaatttttcatatgatggattaccaaccgccacaggttctgttagttcattcctcgatgcaagtctggacatgtccatatatgaccatgtgaatgtcgttagaggcgctaccgggttattaactggagtcggtaatccttccgcatcagtagacttgattcgtaaacacgccgtaagtaaaaattttgaacgtacggctaacctcggaggtggaacctgggataactaccgtgggtcggtagatataagtacaccgctaacagaagatggttctgtgagaggacgcttcattaccaccttacaaactacggacttgcagctaaacagatacaataagaaaaataaattgttttatggcgtcatagatgcagatctaagccctaataccttattgagcataggatatgactatcaagatgctcgtccaggcgctccgactttcggtggtttttatttctttgattcagcaggtaaaaagattaactggtcgcgtaaattcaactcagctccaaactgggcaaaatgggatgtgaatactaataatgcctttgtaacattagaccatttttttagtaatgactgggaatttaagatcaatggcgagtactctgaaaccaaaacccatgaaaaactggcatcatttgccggagctcctgatgctgaaactggcagcgtgacttatgaggccattaaaaacgttgagaatagaaaggtatactctgttgatgcttttgccagaggcccatttgaattattcaaccatgaacatgaactggttattggtataagtgccagtcgtcaaaggacaaactcgcttagttcaagctggaattatttcacagttgataatatttataacttcaatggttctgtttctgaacccgactggggaagcttgtcagatcagggaacgaataggacttatcagagagcaatctatgccaccaccagatttaaccttactgatgatctgaagtttattttaggcgggcgtttttccgattggcgagtaacgggttcggatgataacaacaagagtaagttcattccatacaccggcgttttttataatctaaatgatacattcacactatattccagctacactggcatattcaacccacaaacctaccgtgataaaaatgtggcatatttacaaccccaaattggtaaaagctatgaagccggcgtgaaagcatcttcatttgacgatcggctgaacacatctttatctgtgtttaagaccacgcagtctaactttgctgaagtcgatggccaaagttatgttcttggcacatttgagcaagcgtataaagccgcatcggatacgacaagcagaggatttgaaattgaggcatcgggtgccttaacagatagatggaatcttagtgcaggttttactcattatgtaatgcatgcatcaagtaacgaagccgtgaacactgatattccccggacaacaattaaaatgtttacatcatataaagcccctgtcttgcaagataaattgaactttggtggcggtgtaaggtggcagaatggaacatataaagatataacgtctaatactactacagagcgcgttaaacaggaggcgtacactttagttgatttatatgcccgatacgacatattgcctaacgttacggcgcaagtaaatgtcaacaacgtttttgataaaaatactatagcgttttag

SEQ ID NO: 163071 - DNA, 591 bp, Enterobacter cloacae
atgtcggttttccgccagcttgtgtcaaatctggaacatgtatctgcccctatagtagggagtaatgaggtttacagttcagcctatctggctccgcattttcatcagagaaatcaactgctctttgctactcgaggagtaatccttatttcgacagcaacaggggagtggctgttgccatcaggtagggctatatggataaatgctggaatagagcatagcctgacgataaaaaaaccagcagaaatgtgtgtgctttatattcagctggcttgtcatattgtgtctaaaagaaccgattgtacggttgtggatgtgattcctctcgccagagagcttattattacttgcgctagttttaattgggactatgcaaccgatacaccagagtggcacctggtgcatgttctactggaccaactgaaaaagcttaatcgaaagcccgttgagcttccttttccatcagattcacgtggtttgaaggtggctgaaattcttcaacatgacccgacgggtcgtcggacgttgtcatctattgccaacgaagtaggggccagtactagggaaggtgcgaacaagttcctgatatga

SEQ ID NO: 163072 - DNA, 198 bp, Enterobacter cloacae
atgaactggcacagcgcattgttaacccgggacaccgttgttgacctttcttacaacaatacgcagaacgttcgtcgtttcatgaaggcggagtgcagtaaggcgtttcgatttgaccgggaatttatagcatgggtgcgtaacggcgaaccgaaaacgttgggatatgtggtcaatgaatggaagcagaggtcatga

SEQ ID NO: 163073 - DNA, 756 bp, Enterobacter cloacae
atgactaagacacgattcacatttaccaataatgaaggacatgaactttgtgcgctgctggaagaacccgtgggagagataaaagcttacagcctgtttgcacattgtttcacttgcggcaaggacttgcgctctgcttcccgcattacacgacaactactcgcacagggaattgcggttctgcgtttcgactttacaggactcggaaacagtgagggcgattttagtaatactaatttttcctccaatctcagcgatctgcgttctgcaatcgatatgcttcgactgaaatatcaagcgcccgcattgttgattggtcacagtcttggcggcaccgcgattcttgctatcgcaggcgaagtgccggaagccagagtggttaccacgatcggttcccctggggaactgtcgcgattgacgcgattgttcgaagatgacattaaacacattgaaacaaacgggtctttccctgtcagtcttgctggacgtcaatttacaataaaaaagcaaatgctggatgatcttaaacgacataacgttgcggacaagatttttatgatgcaaaaaccactgcttatatttcatgctcctcaggacgatacggtctcaatcgatcaggctgaaaagatctatgcggctgcgaaacatccaaagagctttatttcactggatgatgccgatcatcttctcagcaagccagctgatgctgattatgtggggtcgtgtatagcatcttgggcattccgttatctctaa

SEQ ID NO: 163074 - DNA, 336 bp, Enterobacter cloacae
atgaactggaatgaataccgtaaagaaacactgtctaatgtatctgattttgcaaaggccgctcctgaaacaatgaaagcactgatggctgtgtctgctgcaccgcaaaaaaccggccatcttgatgaaaaaacgcgtgagctgatctccgtcgctgtagccatcaccacgcgctgcgatggttgcatcgccgctcatgctgaggctgctgttaaagctggcgtgacggaagaagaattaaccgaggcactcagcgtggcgataaacctgaatacgggtgccgcaatggtatattcctcccgtgcacttgctgcagttcgtcaggttcagaagtaa

SEQ ID NO: 163075 - DNA, 570 bp, Enterobacter cloacae
atggctgtgatgactcgtgataaaattctgtttgaagcaaatgcgcttatgtgtggtaaaggatattcttcattcagttatgcggatttatctaaaataattggaattactaaggcaagtattcatcatcacttcccgacgaaggatatcttgggcgaaacagctatactggaatcgttgcaaaaacaggagcaaagcctcacagcaatcgacgaaaataataaaagctgtgtaaatcgtatcagagcatatattgacttgtttattgaaagttttcgcaactcccaattaccactttgctgcgcactgtccgcagagttggataatttgccggtaaacatgaaagaaaaggtaacgatttattttgattgtcaggtgaactggcttgaaaaaacgctgaacgaaggtgttgattctggagaaattaaatctgaaattaacatccatcaggcagctatgatgattctgacgttgtgcgaaggtgcttgcattgtcgcgcgaccggtcagaaatgaagacgtgttcagacagagctttgaacaaactcttacgcttttaatcaataaatag

SEQ ID NO: 163076 - DNA, 339 bp, Enterobacter cloacae
atgagcgaactaaagaaatacgacgaaaataatttttgtgaaattgaaaggtacagcggtgtctcggtcgtgcggctttatgctgactggtgtgcaccgtgcaggcaatcagatgtttttttcagggagttcgcacgccagcttccggaagatatcaggacaggggtggttaatgtcatcctcgcgccaacactgacttggaagtatgatattgcaagtatcccggttaccttattttttcggcagggacagttagtgaaacgagcttatggccccaaaagtatcagcgaactcagcagagacctgatgggtgccaaagaccaacaagcttatcattag

SEQ ID NO: 163077 - DNA, 969 bp, Enterobacter cloacae
atgtcgtcagcactgcgaaaagtggatttaaatctgttgcttattttcgattcaatatatcgccatggaagtgtggcagaagcatcccgggaactcgctctcagtccttccgcgttgagtcatgcgcttaaccgcttacggcaggcgttaggggatccgctgtttattcggactggggggcgcatgttgccgacggtgaaagcgacagggatggccattaacatttccagtgcactgagaagcatttcattctgcctgcatgattctgaacgcttcgagccagaaaatagccaggcgacatttacaattgcggcaacagattacaccgctgcagtgatcctgcctgcattggttgcccgggttaaccatcttgcgccagggataactatcaggcttatctattcgcgtgactttaacgccaacgacgacctgctctctggtaaagtcgattttgcattaggttttgaagaagaagaaaaacattcccggaacggtatcgaatccatgtcatgtttcactgatgattacgccgtggctgtacgtcggggacatccggaaatcacgaatgtacttacgcaagagctttacctgcgtacggggcatgctgttgtgcgcccctggcctgaatcccgcggtgtcatagatcgttaccttgaaagccagcatgttcgccgcaaaatcgttgtcgaacttccgagcctgatgattgcgcccttaattgtgtctcaaaccgaccttgccatcacgcttcccaagcgtggcatctgttcaattttcgacatgaaagatcttgtggtttttgctcctccgtttcctaccccgcagtatgtactgaaggtgtattaccggattgcatccggtaatacacctggcatggtatggatgagggaactgattaaaaatgtctgtgctcctccgtataaggttaatgagggtggagtcgatccaggccaaggcgcaaatctgtga

SEQ ID NO: 163078 - DNA, 1179 bp, Enterobacter cloacae
atgaaagttaataatagtcagtcgttgaagttatctacccgtctaactcagctgggaagaaatacccgcgagcagtacggttttgtgaacacgccggtctacaggggatcgaccgtagtatttgatactgttgaagatcttgaaaacaaccgcgctgcctttgcgtatggcacactgggaactcctacaataaaaaatctggaggatgcctggactgagcttgctggcgccgccggcacggtgatgtcgccgtcgggtctaggagccgtggcgctggcactgatgaccacgctcaaggcgggtgatcacctcctgatgccggattccgtctaccgaccaacccgtaatttttgcgattttacgctgcaaaaattcggtgtcacgacgacctattacgatccaatggtcggagaagggatttgcgagcttatccgcccggaaaccacaacgattttcctcgagtctcctggctcccaaacctttgaaatccaggatgtaccacttattacgcacattgcccgcagcaggagtattaaaacaattatcgacaacacctgggcaacacctctcttttttcaggcgcatcagcacggatgtgatatctccgttgaagcaggaacaaagtatctgagtggccactctgatctgctgatggggatggtgagcgcaaatgcggaaacttggccagcattgcgtgccgtctatgacagcctggcaatgctacctggcgcagaggattgcttcctcgctttgcgcggtctcagaacgctgcatatccgactgaaagaagccgaagaacgggcactcaaaattgcgcgctggcttgctctgcaacccgaggtcaaaactatcttgcatcctgcatttgaaagctgtccgggtcatgagatctggaagcgagactttaagggttcgtcagggctgttttctctgatcctggatcccgccatcagcaagcaggcggtaacccgcatgctggatggaatgcagttattcggaatgggctactcttggggcgggtttgaaagcttaatcataccatttgactgcagggaataccgtactgccaccacctgggataccgaaggtgaaacgctgcgactacagattggcctggaagacagcgatgacctgatcacagatttgcgccttggcctggatcgactccaccctcattaa

SEQ ID NO: 163079 - DNA, 1275 bp, Enterobacter cloacae
atgacaattaatagtgaacactcagcaataaagtatcgtattccattcacaacttatgatctcggatgggtggtactatgcatcggcatggctatcggtgccggaattatttatatgcctattcaggcgggagtgaagggcatttgggtatttgtcgcatctattggtctaagttaccctgccgtatactggttacaggatttgtatcttaaaacgctgacccagacacaatcttgcgacagttatgcagaaattattacgcaataccttgggaaaaactggggcggattattaggtatcgcctattttttaatgctgctaatgggcattcttaattatgccatgagtctggtgaatgacagtgctacatatcttcacagctatcacatcaccgaaggttttttatcaaaaaccatatggtatccatttattttattagcagtgatggtgttaattgctaatcagggcgaaaaatggctgtttcgcatcgccggaccgatgattttttttaaagtagcggtgattgtttttctcgggatagttatggttccgttctggagctttaacaatatttccgcatttccccctgttctgagtttcctgcgtgatgtcctgttgacgcttccgttcacgctcttctcaatcctgtttgtacagatactcaacccgatgaacattgcttaccgtaaggttgaggccgatcctgttatcgcgtcattacgggccattcgcgccacacgaatcgcatacattgttctggtggtgagcgtgctattcttcgcgttctctttcagttttgccattacaaaagaggaagccgcctccgcactggcgcaaaatatttcagcactggcacttgcttcacaaatcatgcctggaaatctaattaatattctttctgttaccttaaatattttcgccatattgaccgcattcttcagcatctaccttggattcaaagaagcaattgtcggattagctgtcaacatgatttcccgtatttcaggtaatgaggatatcaaccgtggattgctctcgaaaattattgcagtagctatagttgttttcctgtggatatgggtcagatttgacttctccgttatgttattaatgcagatcgccggtccagtatttggccttgtcgcctgtctgattccgttctatctggtgaaaaaagtttctgcgctggaaaatctgcgtgccggaaaaaattattatgttgctttctatggcatgcttttgtgcatttctccttttttaaagtttgttgagtaa

SEQ ID NO: 163080 - DNA, 912 bp, Enterobacter cloacae
atgaataccacaaacctgtcaggatatcttaatcagtttcaggtccttataaaggttgccgaaactggtaatttgtcacgcgcggcaagggaactaggtctgaccccctctgccgtgagtaaaagtctggcgcaacttgagagcattgttggcagtgcggtcattgtccgggaaacccgccccttccagttaaccccgggcggacggcgaatattacagattgcgcacagggttattagcgatatcgaaggaatcgctatcggaaatttcatggcagatactcaaactgagacccttcgtatcagctgttccgtcgcttttggctgcacgcatattccccggatcacgggtgaatatcagcaactgcacccgggagtgaacatcaatgtaacgcttgacgatcgccttattaatctttcaagagatgagtttgatattgccctgagaatttcctctgaagcagccggggatggcttaaacgagacggtattgatggatatctgctggttttattgtgcttcaccggtctatctcaaacgtcatccccctatcagcgtcccagccgatttgcgttttcatcagtgtcttgtttacccgcaaatgaccagtgaagggaagtgggcatttcatcaccggggaaaaagcgaaacggtgaaagtagtacagcatttctcctgcaattccagtttgttgctgttacaaagagctttggctaatggcggtgtagcctgcctgccgaattatttagccagccattacgtcgattcagggaagcttatccgtgtgctgccagagcacgatcccggcgtgacgcaccggttgcgtgcagtcgtatcaccttcctcgcagaacagcgagactgtgaaggtttttctggccttcctgcaaaggatgttagggcaaaaaatgtga

SEQ ID NO: 163081 - DNA, 366 bp, Enterobacter cloacae
atgtatagctggaatttagttgtgataacgttgtttggggggacgtattttccctttctatggttcatcgtgatgagaacccgggctaaagaaattctcgtcaaaaataagttttatgagattgatcccactgcgctggtacctacatgggctaaaaccggtacacagatatttttctatgcacactactgtttctttttagttcctttgacaatgttcagctggttgcacggactggctgcgtttggtgccggggtattaatgtttgtttttactcccgtattcttccggagtgacctgatcatattcagacgtaacattctgcaggtatttaaaaaagatcaagttgacggcgacaacttataa

SEQ ID NO: 163082 - DNA, 336 bp, Enterobacter cloacae
atgaaagataaagcgtcatttgactcattttcggctctcgatatgcgtgccggtaccatcatcagggttgaggagagtaaaacatcaaagcccacctggcgcatgactattgacctaggaccagaactgggaacaagggtgtcatgcggtgcgtatactaactatgcagcagaagacctgcaggaaacgcaggtaatctgcatcgtcaatctgggtaccatgaagatgggacctgaaaagtcagaggtgctggtacttggtgtgtctgatggttcaggcgggacgatcccgctgacgacagaaaagcgcgtcgataacggtgaatgcgttttctga

SEQ ID NO: 163083 - DNA, 213 bp, Enterobacter cloacae
atggcaaccacgatcagtctgctggagccggttatagccgcactgctggccgttgtgctcgtcggtgaaaggctgccgccttccggatgggcaggcgtcggactgatagttgcgtgtctggggctcatcaccgttccggctggaaagttacgtttcagtctgttccggcaacggaaagaaaactttgaaatcgcaaaaaggaaagaattatga

SEQ ID NO: 163084 - DNA, 690 bp, Enterobacter cloacae
atgcgtttcgtgcagcccagaaccgaatctcagcaggcaatgcgagctctgcatcgtgtccgtgaatccctggttcaggataaggtgaaaacaactaatcagatgcatgcttttctgctggaatttggtatcagcgttccgcgaggtgctgccgttattagtcgactgagtacccttcttgaggacagtagtttgcctctttatctcagccagttactgctgaaattacaacagcattatcactatcttgttgagcagattaaagatctggaatctcagttgaaacgaaagttggacgaagatgaggttggacagcgcttgctgagtattccctgcgttggaacgctgactgccagtactatttcaactgagattggcgacgggaagcagtacgccagcagccgtgactttgcggcggcaacagggctggtaccccgacagtacagcacgggaggtcggacgacattgttagggattagcaagcggggcaacaaaaagatccgaactttgttggttcagtgtgccagggtattcatacaaaaactggaacaccagtctggcaagttggccgactgggtcagggagttgttgtgtcggaaaagcaactttgtcgtcacctgtgctctggcaaacaagctggccagaatagcctgggcactgacggcgcgacagcaaacttacgaagcataa

SEQ ID NO: 163085 - DNA, 246 bp, Enterobacter cloacae
atgcctcatcaaccccatttcggagaggacccccgttctggtcttctggaatggttagataatgatgggaacattcaaagagaatatgtcttaagtgaacgcggagattatggcctgctttatgattccgtttatgaaacgctcaaaaatggtaaggcaccttatataacagaagaagaggtactgacaacaataggtatcattgagcaggcagcaaagcagcatattcctttagagaatgaataa

SEQ ID NO: 163086 - DNA, 852 bp, Enterobacter cloacae
atgaacatgaataagttacttgctgctgttgttctgagtgcaacgatagtgacatctgcttttgcaggtgataattatcaacaaatccgtaatgcaaccggcagagtggaaattgcaggcaaaacgttccttatcgatcctatgctggccaaaaaagatgcttatcctggttttgaaaatacttataacagccaactaagatttccgctggttgaattgcctataagtattgaaagtacttataagggcgtggaagggataatcgtcacccatacacatctggaccactgggatccggcagcagcacaacaattgcccaaagatatcctcatcattactcaacatgaagatgatgcaaagttaatccggggtcagggctttaaaaatgtcaaagtactcaatggttcaatgcagtttggtgatgtcacgttagtgaaaacgcatggtgctcacggtacagacgagatgtttgcatcctcaatcagcgaggtactcggtgaagctatgggtgtcgttttgaaagcaaaagaccataaaacagtatatattgccggtgatactttgtggaatgcagacgttaacaagaccatcgttaaatacaagcctgatgtgttagtattgaacacaggcgatgcacgtaacctgattttccctgattcaggtattattatgggcacaaaagatgtacgtcatgcgtacaaaatgttacctaatgccaaaatcattacggtacatatggacgctgttaaccatacgcttgtcagtcgcgctgatatgcgggcatacattaaagaaaataagcttggtgaccgtgttgtagtgccgaatgatggcgagaccgtaaactattaa

SEQ ID NO: 163087 - DNA, 489 bp, Enterobacter cloacae
atgaacaatgccctgatcgttatcgacatccagaacgattactttcctggcggagcctttccacttgaggctccagaggcagcgtgccaggccgccgttcgggctatcaacaaagcgcatgaggaaggctggttagtcattggtgttcagcatgttaccaccccagatggacccttcttcagacctggcagcgaaggggtaaaaatccatcctgagattgctgctgcactcggtaatgctcctgtaatcgtaaaaaaagaagccgacagcttctttgaaaccggccttgaggcactcctgcgtgaaaacggtatttctgatgtgtatctgaccggcatgatgacgcagcattgtgtcacgcatactgcgctctctcctcaggcgaagggcatgaaggtacacatcatcactgaaggttgtgctgcaccaactaaagcgctcagcgaccttgccctggctggcctccatgcccgctgtagcgtggactag

SEQ ID NO: 163088 - DNA, 981 bp, Enterobacter cloacae
atgtctgctctgacagttgctgtcattcccacggaagggttcagcccttttcacttctctgttccctgtatccttttcggcccctcgatgccggaaccggatctgttccgcgttgtaatctgcgctcaggagccgggcgttgttcagtctgatatggggttgtctatccacgtggaacacggacttgaactactggatactgccgacattatcatcgtgccttactggaacaatcctgatgaaaaaccgactcaggcactgctggataaactgaaaagcgcatggcatcggggggctcaggtggtggggctttgcctgggaacctatgtgctggcatacaccggcctgcttgacggacaccgagccgccacgcactgggaatatgaaaaggactttacagagcgctttccagcggttcatctggacaggaattcgctttatacgagcgatgaacgacttattacctctgccggaacggcggctggtattgactgctgtctgaatattatccgcgaccattacggttcggcagtggctaaccgggtggcaagaaggatggtggtcccgccttatcgtgaaggcggacaggcccagttcatagaacgtccggtcccgggaactacgcgggacagcaaaatgaatgaattaatggattacctgcgccgtaatctggacaaacctcacgacctggattccctggccggctttgtcaacatgagtcggcgaacgctaacacgtcactttctgaaggctaccggcactactctggcagactggattaacgcggaaaggcttcaacgaagccaggagctgctggagacgacagatcacagcattgaaaaagtctcggagatggccggatttcagtcgtcggtttcattccgccagagtttcaagtcaaaattcagcgtgagtcccagcgaatggcgtcgggcattccgcggtcctgaacccgttgaccgggagaagtcctcggtgtga

SEQ ID NO: 163089 - DNA, 615 bp, Enterobacter cloacae; identical to SEQ ID NO: 100706

SEQ ID NO: 163090 - DNA, 1026 bp, Enterobacter cloacae
gtgaaaccgtttgggcgtgagtgggcattatccgaattcaaacaagcccccgaaaagcctggcaagctggtgcgtgatttcacgcaacgattcactccgcaatacatcgatgcctggttgctcaatgacaagcccaaggagtcaagcgagtcgtttcgaacgtggtcgagcgtcgccgttcaaaaattgatttattgtctgccgacggaaatcaggtccgaaggggaagatgcccaggtattctttcgtggagggcgatccctaccgattcctatcgaaaaacacacgtgctgggacaagatcaattttgaactgatccatgatgtctgtgagtgggtctatgccacgcctcgcgaggcagaaacgaagtttcagctgctaaataaccatgtcggcatcaactggagcgctgcggaaacctggccgtccgggaccaatgatgttttgcctaatagttttgccggcgcgaaggaagctttcgctttccatcttcaagaacaaagtaaagaggccgtcaagagcctgggagatctccgaaaaggcttgcaagaagaggtcaacaaaacccaaaccgcaacccgggacttggtttcggcgctttggcgagattttgccgtagcaggcgtcgtagctgcgcttaaagcccccgtattacccaacgccattccagacgcttctatgaaggttctccagcttggtgtcgctgtgttgttgttcctgagtatcttggtcagcactgtctccagcttgaggttcaacaacctggcagataacagccgacgggactggcggaaaaagctgtatagcttcatgtcggatacggactggaaacgactggtggagaatcccatcggttcgggacgagccgtctattgggtttcttggtcattctgtcttgtactgtacttggtgatgatcaggtatttcttgtcgcttgccgtccctgacttcatcctcatttatgtcgatgctcccttaaatcatctgctggactgtctttgcgccgtcctgtcaatccgctgttag

SEQ ID NO: 163091 - DNA, 609 bp, Enterobacter cloacae
atggaaatagaaaatatcctgaagcttttaagtcctgtgggtgtaatagcaggtgttgcaaagatcatctacgaacactcctccagcagcaaacacaaattaagggacgactaccgctttgctaaggattttcttaaagacatggaacaccctgacggccttcaccatcttgccgttcagcgaggctattatgcattggcgggtacaacatccataaacgtgactgacattgcttatcttatctctctggaaaacccagacaagtcgttgaaagattacgctctagcaaggaattatgttgagttcaatgcgaaactgaatcgagtggtctacagacctaaggtaaaaagtaaattttccagaaggtggcgacagactgcgcattttagcgcctattttatattcgcttatttatccatatcaccactcattctccctagctactataatctcggctcacacttcatgtggttggcaatagccactttccctgtgtttggtttttttgcgttccaaacactgcgcagttttatcagaattcaaagaggtgaagctttggtcaatgagcagaaaaaacacaccacactgattattatagaaaaaaaataa

SEQ ID NO: 163092 - DNA, 618 bp, Enterobacter cloacae
atgacgaattttgcttctagtttcaaagaccttctctttgaggacattgcatctctcaagccccgggatcgtatattaaagacggcaatcgtcctctttaatgaacgcggtgtgcacactgtcggaattgatcgaattattgctgagagtggtgtgtcgaagagaactttttataactacttcccttctaaagcggatcttattgccgcctatttggatttttggcactggctgcgatttacgaaccttgacaagtacgctgcgcgagtttgcggcgatccaaaagccgagctgctggcaatttttgatttccttgagtattggttttccgaacaagatttcagaggctgtgcatttgcccgaggcctgaatgactttaatgatgacgcatcgcaaattctgcgcgccaaagttagtgtgcacttcgatgaatgggccaacttcattatgaagcggttatcccagctcgtggaacctgaaaaggcggacatcatcctcccgcagcttctaagcctaattaccggaacaaccgtagttgcccacgcctcaggcaacgtaaaaatcgcgcaactgaataagaacatagctgaagcactcttaagtggtcgagtaatctaa

SEQ ID NO: 163093 - DNA, 594 bp, Enterobacter cloacae
atgcccaacttcaatgatttctcgttcaaagcacagccttggtacaacgaagcggagttccgcccgctcttcgccaaggcggtgagtctcaataccatcgtcatccactgcttcgatccacgtgcttcggaaataccggccgttgttgccaagcattttggcgaggtctacccgggcgaaaacgttctcgatgaagctggaaatcgggtaggacatacgacgacattattccccgtgtctgtcgctggtggtcgtgccgtcgcaggtgtgcagtcaattgcgacgatggtccatctcttcggcatcaaaagggttgtggttgtgcaccactcattctgcggtgcgacgtcgttcaccaatgaaggcatcattgacgcgttcaaacatgagcacggcagcgatatttcctcggcgtttgaccatgacagcatctgcatttcggatttcgagacctcgctcaaatacgatgttggagttgttcgagcaaatccgggggtgccagcgaacgtcgagatctacggcttcttctacaatatcgacacgctggagctgactgaggtagtgagcgacattcctgaccaggccgaggcttga

SEQ ID NO: 163094 - DNA, 390 bp, Enterobacter cloacae
atgataagtttatcaccaccgactatttgcaacagtgcccgagacttcctgttaggccagggcttcgcgcgcgagcatgccgatacggtggcgcacgccattgccgtgcaccttaattatcacgttccagctgaggaacatggcgcagaggcattcttggttacgcgcggcgctatctgtgatgtcttcggcaccggtgtgtcacgaatgtctcaacaatcagtaaaagatgtgcttgccaagtactcccgcgacgaactctacagcgtcttcagcgcgacagcatttgaacacctggtcggcacgcgatttgaagtttcgttcaaggccgtgacaagtgggctggtggaaacaattccgcacgcacttgatttaccgcctttcgtttaa

SEQ ID NO: 163095 - DNA, 291 bp, Enterobacter cloacae
atgaagaccaacaagagcaatgcagagaagatatgtggtgaaatgaccatggtagtgagtctaatcactaccatggtccgcagtaagcgttacttacgcaatgaacgtcggactgatttgcaacaacatgggctacggcgcatcagaagacggccgttgtgcttcagcaaaacagccctgctttattttaattcttcaatgttaatcatgaactcagatctgcctgtaaggccggatacagcagggaaaataggaaagctacggctgtccccgagccccaaatccagttga

SEQ ID NO: 163096 - DNA, 309 bp, Enterobacter cloacae
gtgctcgctggttcggcaggcctggcgtcagagggatggcaactgctgccgccaatggaccctggcggcatgggagaaatgggggtagttgaggcagagcaaaccgaaaacggcggactgactatccgcttgtttaagcgaaaatacatgctgagcgatgaaggggagatcgtcaaaacaaaaggggaaccgatggacgtgccggtgaacagctggatcgatgttcgcctggatatgcctaatgattctgcctttaatcagcggatgagacaggaaccacagcttgagcctctttctccagctctctga

SEQ ID NO: 163097 - DNA, 579 bp, Enterobacter cloacae
atgcaagtgggggcttttggggttggaacataccaggctccaaggcaaaatgatgcaaactcatcgtttatcagtgatgctgacggtaacaccagttgggctcctgccaatggctgtggctaccaaagctcttataacactcagcgcatagcacaaatgtgggttaccactggcggagctggctattgccgttttctgttaaacacgaatcctcaaagtgcaaaaacagatgctccgtggactgtatttcagtcagcaggaacatcggacattaactttaagaaagtgaccggggatctggatctaaacgaatcgctgtcaaacatcgacgcaatggattttaagaccttctactaccttgctgatgaagagaaagccattcgccgcggcgttattgctcaggagctggaaaagatagatccccagtatgttcattcagctgaggaatcggggaaaatgacacttgacctcaaccctctagtgctcgatgcgcttgctgccatcaaagctctgacaatccgtgtcagagagctggagaaagaggctcaagctgtggttcctgtctcatccgctgattaa

SEQ ID NO: 163098 - DNA, 1143 bp, Enterobacter cloacae
atgccctgggatgcgagagataccatgtcattacgtaccgagtttgtactgttcgcctcgcaggacggggcgaacatccgttcgctgtgccgtcgcttcggcatttcacccgccaccggctacaagtggcttcagcgctgggctcaggaaggcctctccggccttcaggaccggccccgcgtgcctcatcattccccgaaccgctcatctgacgacatcaccgcgctactgcgcatggcgcatgaccgtcatgaacgctggggggcccgcaagattaagcgctggctcgaagaccagggacaccgtatgcctgccttcagtactgtccataacctgatggcccgccatggcctgctgcccggcaccgctcccggcattccgcccacgggccgcttcgaacacgacgcgccgaaccggctctggcaaatggattttaaggggcacttcccctttggcggcggccgctgccatcctctcaccctgctggacgaccactcccgcttttccctgtgcctcacacactgtaccgatgaacggcgtgagaccgtgcagcagcagctggtcagcgtgtttgaacgctatggcctgccggagcggatgacgatggacaacggctccccgtggggcgacaccaccgggacctggacggcgcttgagctgtggctgatgcgccagggtatccgggtgggccactcccggccttatcatccgcaaacgcagggcaagctggagcgttttcaccgcagcctgaaggcggaagtgctgcaggggaaatggttcgcggacagcggtgaactgcagcgcgccttcgaccactggcggacggtctacaaccttgaacgcccgcacgaggcgctggatatggcggtgcccgcctcgcggtatcagccgtcttcgcggcagtacagcggcaccgtgacatcaccggaatacgatgatggtgtggtggtcaggaaagtggatatcagcgggaagctgagcttacagggagtcagtctgagcgcaggaaaggcgttcaggggagagcgggtcgggctgaaggagacacaggaggatggctgctatgaggtgtggtggtacagcacgaaagtgggggtgatcgacctgaagaaaaagtcgatcaccatggggaaaggatgttaa

SEQ ID NO: 163099 - DNA, 189 bp, Enterobacter cloacae
atgaataaagctggctgtgccgaagtgtataataactttgaagagcttgttcagaaacttacagaaagtttaatagatctcaaatcaactgaacaacttgggcgaaaagcaaggatgtatgcacttgaaaacaatgactggagagttaaggtcaaaaagattcaagaacaactaaattatgaacggtaa

SEQ ID NO: 163100 - DNA, 1209 bp, Enterobacter cloacae
atggagtttgttccaggaagccgtccctatgggatctttcagcaggttaacgttctggccagctttgtcgcaacaggtttctgcattgccttgtggtttttgttccggggcaggacatggcgcaaccgcctgctatggcttctattgatcgcgatttttaccgtcacactggatcttctacaatcccgcaccggtgtggcgggtgtgctcctttatagcctgttcatccttaccattcgttttaaggcccgccagaaaggggtattcaccgtctactgcataacggttgcggcagctctggctattatccacatgatgaagtatttcggtgtttctctggtcttcctggagctgcttggcacggtcaataaaacaggatcgacgctggagcgtattgcaatactaaaagcgacgctggaaatgatcaggcaacatccacttagcggctgggggtatggcagtttcgaatacgtgttgagtcgaatatctttaaatgacttccatcatttcattactactagtgtagaccatgctcataacgagtttcttttcgagtgggccgaaggtggaatactggccgttgcgggaatgttttgtatggtggctggtttctgcatgccattacgtcacgtcaccagggcagcggtggcccgatgggggctggcaatccctattattgttcatatgatgctggaatatccccttattcagtctgttccacactggatagtcttactgcttctttgtcgccttgccgctccggaacacatgccttcattgcatacaggtagcaggagtatgacgggggccgttttagccacttcattaacgggaataatattcctgggggttggagtgcatactaatgtcgcactgaccagatttgagcgtaatggcatgaaaaatttcagcccctgcaaggctctgctcaatccatggattcaatgggatcgctggcaatacgatgaacatacagcgttactgattcgttacaatacagagcgagaccctgagctgttgaagcgctatgcccggtggggaatttactatcttcagcgtaaaaatgatctctatgtctttcaaaatctggtgcgtattaacaaagtattccaagataaattacaagataaatggttatccgaacaatggaaagactattactctgaagcgtctcgcaagttaacaggtgataagcgattggttcagtaa

SEQ ID NO: 163101 - DNA, 738 bp, Enterobacter cloacae
atggtacatgttgaaaaaccaaaagattttaatagcagccttcagaaagtggagaacgaagtggggcatcggaaggttccaactcgctccagacatgatcacctgggactggatgatgttaaacgaccttatgaggcgatcactcgtcttcatgatgctttactcccttttgccacgccctatgagcaaaaggggagccgcaatctgcctgcttatcaacaccagcagggcattgtatggcttgtcacgacaggtaacctgacattttatcgggcgcacgatgatctgaagatcatgacctcaaagggccctatcttaactgggctggcggagatttttcagccgctgggaagaacttattaccgtatctctcgcggtgccagagtctcatggatcagcagcgatgaagccagaaagatatttgatgcgcagtctttatggcgcgatgtggctgaggttctgacatatatcactcagatgatggtatatcgagatgagcatctggtcacaaaacattcctacacaatgataagggcaaagataattgaatattctcaaaaaagagcgtcgaatattcttcaaaatgaaaaaatgggaattgctgcttacattcaggaaacaacctatctgtcacgtagcctgatttatcatgttttatctgatctcagtgaaggcggatatataaaaattcagaatggaaaacttctcgaagtgaataaactgccattaaattattaa

SEQ ID NO: 163102 - DNA, 534 bp, Enterobacter cloacae
atgaaattgaataaatttgtactggctgctgctgcattttgcgttatttcaacttccgctaatgcggctgatatgggtcacggtaaaatcacctttaaaggctccgtaattgatgcgccatgctcaatcgatgcgaaaagtctggatcagactattcagcttggtgctatttctaaaaatcagctggcgaacggcggtaaatccactccggttgatttcagtattattcttcacgactgtgatactgcgacttttgatactgccagcattgcgtttaacggttatgccggtgaagcagcagatggtctggacagcagtttcgctgttacgggtcagggcgcgggtgtaggtgtaaccctcaccaacatgggcggcaaagtgctgaagccgaacgttgcaaacgatctgccaccgctggcagatggcgacaatgagctggaattccaggcgttcgttcagggcaccactgcttctgctggcgcaactccgggtaccttccagtctatcgctaacttcgtcatggattacgagtaa

SEQ ID NO: 163103 - DNA, 507 bp, Enterobacter cloacae
atgctatttcgttattttttcgccacgttattcatactgacgataccctgccaggcaaaaattgcctcacatggcaaagtcaatatgcagggtagtattcttgaaagcgcatgctcaattaatattaattctcagtatcaggatattttactcaaaaccatccctgtaggagagcttttacataataataacggcccgatgactccacttgatattaaattggttaattgttcaaacctgccgggagaatatcgctttcgcgttacgttttatggcgataatgcgggagatgggcgtttcggtttcacgggttccgctgaaggagtcagtttgcgcatcagcaccattcagggtgaagaagccgttcccggtattccgatgacagaaagtcaactccaggggggaacgaatgtattgagatatcagttgcggttgaccggaaacggtcaggatctcaaggccggaacttaccagacacttttacgtatgaatcttgaatattactga

SEQ ID NO: 163104 - DNA, 2529 bp, Enterobacter cloacae
atgttaaaaaaaagagtagtgctattccgccagtctctcactgcaagtctagtttttggaatgatagcttcgcaaagcggcgctgtgtgggcagaagaagccattcagtttaataccgatgttctggatgttcaggatcgtggacatatcgatctcagtcagttttctcaggcaggttatgtcatgcccgggacttatgcgctggcgattcaggtcaataaaagcacactacctgagcaacaaattcaattcctcgcgccggacaatgatcctaaaggcagtcgtgcctgccttacgacggacctggttaccagactgggcctgacgaatgcagccagcaagaaattacagtggtggcataacggtcagtgccttgatccgacatcattacccggtatgtcgcttcgcggagatattggggcaggtgttttgtacgttagtgtcccgcaggcttatctcgaatatgtggctgaaaactgggatccaccgtcacgctgggatgaaggcgttccgggggtgctccttgattacaacgtgaacgggcagattaaccacgcttacggcagcgatgatggtggcgactcacgaaccttaagcggcaatggtacggcgggggcgaatctgggcgcatggcgttttcgtgccgactggcagggacagcagcagtctggtgacggttcggatagcgtacgctcatttgactggaaccgttactacatgtaccgcgccattccttccctgcgcgcgaagctgacgatgggtgaagattacctgacgtccgatatgtttgacagcttccgctttacaggggcaagcctgatctcaagcgataacatgctgccgccgaatctgcgtgggtatgcgccggaagtaacgggagtggctaagaccaacgccaaagtcacggtgagtcaacaggggcgcgtaatttctgaaactacggtagcagcaggcccgttccgtattcaggatttgaataatgccgtgtccggtacgctggatgtgaaggtcaaagagcaggatggtacagagcagacttatcagatcaacacatcgaatgtgccatatctgactcggccgggaatggtgcgttacaaaattgcaaccggtaaaccatctgattacgaccatcacagcaacggccctgtatttggaaccggggaattttcctgggggatcaataacggctggtcgctgtacggaggcctgctgggcgccggggattataacgctctgtcgctgggtatcggtcgtgatttgctggcgctgggggcgatttcttttgacgtaacggagtcctctgctcgtttgccggatcaaggtaatcagcaaggggggtcgtaccgcgtaagctattcaaaacgctttgacgaaacgaacagtcaggtcacttttgctggctaccgtttttccgaacgtgaatttatgacgatgacggaatatctcgatgcccgttataagtcatacgaagacgccggtaataacaaggagatgtataccatctctttcaaccagcagttgacctcgctgaataccagcctgtacgtgaactacagtcgccagacgtactgggataacgacgcgagtacaacatggaatacctcgatttcgcgctactttgatctcggacgctttaaaaacctgagcgttaacctctcagctttccggacggaaaacgccgattacaaagacgatggggtctatgccagcgtgtcgattccatggggggaaacggcgtcctttggctatgacagccagtacggccacgggggaagcagccataacgtttcctacgatgaccgcattgataacaataatacctaccacctttctgccggtaccgatcaaaacggtcggggtggtggaagcggttacttcacgcatgaaggggatattgctgaaatgacggccaccgcagcttaccagagcagcgattacagctcggcgggtattgccctgcggggtggcatgacggcaacccaatccggtgccgctttgcaccgaatttcggtgccgggcggtacgcgaatgatgctggataccgatggggtcggcggtgtaccggtttatggcaatgctgccattacgcacaccaacatgtttggcaaagcagtgctggctgatgtcagtagctactaccgcaacagtatgaacatcgatatgaattcactcagcgatgacgtggatgcaacccgttcggtagtacagggaaccttaaccgaaggtgcgattggttatcgtaagttcggcgtaatcgccgggaaaaaagcgctggtcgttgttcgtctgagcgatggttctgtaccaccgtttggcgcaaccgtcagcaacaaggataaggaacagaccgggttagttagcgatgacggtagcgtctggctgacggggatgaagtccggtgaggttatggccgtaagctgggatggcgctgaacagtgccagatacgcttaccgtcgccattgccactcaatatggacactcaacatatgctgctgccatgcgtacccgcaacggtagcaaaacgttaa

SEQ ID NO: 163105 - DNA, 756 bp, Enterobacter cloacae
atgtttatgtttactcaaaaaagtacttgtcgtctggcactgacaataaccgctttactgatgacttcacaggcggcgcatgccgccctggcgctggaccgaactcgcgcgatccttgatggtggtgagaagtccctaagcatgagcgtaaccaaccagaatcgcgagctgccttttctggctcaggcctgggtggaagatggtcagggtaaaaaattaaccgatcctctggtggcattaccaccggtacagcgtattgagccaggcagcaaaacgcaggtaaaagtccaggcatccgcgtcgatgaacacgctgccgcaggatcgcgagtcgctgttctatttcaacctgcgtgaaattccaccgaagagcagtaaaccgaacacgctgcagctggccctgcaaacgcggatcaagctgttttatcgtccggcaccgctggcggtgaacccaaacgataagccgtggcaggaaaaggtcacgctgacacgagaaggggggaaatttgttgccaacaacccaacgccatattttgtctcgatcattgatgccgcagccaccgagaaaggcaatgcgcaaaagggcttcaagccggtaatgattgcgccgaaaagcagcgcgcctttaagcgttgatgccggcgcgctgggcaacagcccggttctgacctacatcaatgactatggtggacgtccgaagctgattttcgcctgtgcgggcaatacctgtagcgtcaaagaagcgcgtaaaggctaa

SEQ ID NO: 163106 - DNA, 579 bp, Enterobacter cloacae
atgaagccgggaaaaggccagtcaggattcattggcatgacattgatgatatgcagcgcgacagccttcgccagtcagccacaaacagcggacgtgtttgttaacgttcacggaacgctcaccgacggcgcatgcatgcttgagttaagttctgcccgtcaggaaatcgattttagcgtactttcgctgtctgggatgcgaaaagcgggtgaccggggaaacccggtcccactgacgctgaggtttaaaaactgtctgcgcacgcaggggcgcagtatggatcggcgaacaggaacgtgggcgtgggatgctctccagccgattatcaccgtggggttccttgcacctgcagacagtgacaatccggaattatttgcgctggagggaacccggggaatcgggctacgcctgaccgattcggccaataacaacgtctatcctggtcagcggggcgtcccccagtttgctaagccgggtaacaacgagctgacgtggtatgtaatacccgagcgtacctcggccccgcttgttcacgggccgtttaaagcatcggtgaatttatttgtggagtatgactga

SEQ ID NO: 163107 - DNA, 525 bp, Enterobacter cloacae
atgatgcggacttttttatggctgtcaggactgatgctgacgctgcctgcgctatcggcagagaacaatctgaagataaccggcaacctggtcaccgaaccctgcacgctggatctgaattcgtcagatatctcgctggatttcggcaatctggtgagtaagtacttctataccgccgacagaacgcctgccatgccgttctccgtcgtgctgaccggctgcgacacctcgctgggtgacagcgccaccgtcactttccagggcacggaaagccaggagttaaacggttttctggtccccgacgacggggacacccacggtatcgcctttgggattgagacggacgacagcgcggcgaccccggtgctgtttaacgaacccagcccggcgtttacgctgacggatggcgaaaaccgcctcaatttacgcggtttcgtgcaggctgaaccgaaagctatcgctgcgcgcagcatcaaaccaggcgcgtttactggcacagcgacatttgaaattgagtacccctga

SEQ ID NO: 163108 - DNA, 540 bp, Enterobacter cloacae
atgaaaccgctcttactcgcgctggcagttattggcgcattttcgctgtcgggggcatccctggcggcgaccgaggtttctcgggtgaatgtcaatattaagggcaccatcgtcagcggcaaatgcacgttcgatcagggggagtccgttaccattgattttggcgatgtgaaatatgtcaccaccgggtcgaataacacgcttgacggtgagcaccgcaaaacgctgccggtgcagatgacctgcaaaggggattccggcgacgcgcaaatgacctttaaacccgccagtggcggcacggtcagctacgacgggcacacactgctgccggcaacgctggacggggccaaccccggacaagatctggcgatccgcctgctggtgaacggtgtggtacaggacgtcagccagagctttgccttcgacgtcgcgtcgcagccgacgctggaagccgagctggtgcaggtgggcagcggcagcggttttacccccggcgcggcgattgccgccagtgccaccctggtgatggagtttatttga

SEQ ID NO: 163109 - DNA, 498 bp, Enterobacter cloacae
atgaaaccacttcaatatctgttaattccgttgctgatggcatcctgcgccgcccaggcagcaacgcttgtaggggattccatcaccgtgaactttaccggccatctcaccaaccgctcgccgtgcacggtgggggatgacaaggtgattgaagtccccttcggaaacgtcggcgtcaataaggtcgataccggtcagtttattcagaccgtgccctatacgctggagtgcggcagcgctgcggcgggggatacggtaaagatgaagattctggcgacaccggttgccgctgaaaattctgcaatggcctcaagcgttaatgggctatggatccgttttttaaaggacgacgcccgacaaccgctgaacgaggagtttgacgtccctgactggcataacccgccgaagctggaaattcagttagcaaaagatcctgcggtggatttaaccgccgcggcctttacggcgacggcgacgttaacggcagaatatttttaa

SEQ ID NO: 163110 - DNA, 951 bp, Enterobacter cloacae
atgagaaaatttgttctgttttgttttatgcttttttctttcttcagcacgaataatgctgacgctggcatgatgggggtccctggcgttttgggtatacccgctaatacacctgggtacataattgattcagctggttgcagtattccattagacataacaaattggtttcaacattcaggatcacttaagtggtgtatattcaatcaatctgttccttgggctgatgatatatatgtgcctgtcgaaagtaatacctgggcgctccgagttaatgcaagtagtatgccttgggcaagccattatgcagcaactggcagaactgctcgtaacgtaaaatattttagattagatcgttctgttggtgcccaaaatcctgattggggtgggatgacggaaacatctgttcctacttcaggtggaactgcactatgttattatttaaccgataatgtcaatactggcgagcattatataggaaagaatggaccatggtgtaatggtaattttaaaccgcttcccccaaatcctgctatgaatacctgtgctataaataacgataacccggtcaccgttgatatgggcgaaattaaccgggcggagatctccaccgcggcaggtagcggcgaggttaaatataaatctatcccggtatggtgctacagtgattcaggtttttccagcatgcctgttaatttacaatttagctatactccgaccacctttgttgatgggaaagcgatccagtcttccgtgccaggggtagggatatcggtaggctatgattcaagaatcctggtatcgaacgaggtgctcaacctgaatttaccgacaggcgacagcaatatggacttcaccttcgaggcgatccgcgattccagtgttgccgtagcggatatcccgaccggcccctttaccgccagcggcgtactgattatgtcactgccgtaa

SEQ ID NO: 163111 - DNA, 327 bp, Enterobacter cloacae; identical to SEQ ID NO: 84280

SEQ ID NO: 163112 - DNA, 219 bp, Enterobacter cloacae
atggacatcatcgacacagcagcagagattgaagagcttcagcgtaacgctgcactttccgctcacctactgaaccgcaacgccgtatcagctgagcattgcgcggagtgcggcgaggatatcccagcgccgcggcgcgctgccgttcccggctgccaaacgtgcgcggagtgccaaagcgttatcgaattgaggaataagcagagggggatccagtga

SEQ ID NO: 163113 - DNA, 1188 bp, Enterobacter cloacae
atgaaaacaactgaacggttggcattcgaccgcgcttcaatgcgctcgtttgatggcaacggcaggcttcaggtaaaggttagcaatatcagcaaggctaatgtctgcccctacttcgggagggagattccaagtgctgaaaagctcgggttagagccagacaagatttaccagttatggcgacaccctgatgaactgaagaaagccgctgcaacattcaacaacatccctcttttatcaatccatacccctgactttcccggcgaccctccgcgcgaatatcgcgttggcgtaacgcattcaaatgcagactttgacggaacgtatctgacaaacggtttatcagtttgggacgactccgcaatcgccggtattgagacggaagagcaggaagaattgtcttcgtcgtaccaatacgtcgctgacatgacccccggagttacaccgaatggagagccgtatgacggcatcatgagggacatcatcgggaaccacgtagcgctggttgaaaaaggccgcgcaggaagcgacgtattggtcgcagattcactacccccggagttaaagcaaatggcacgagctaaaaatattctcgacgctctgaaaccattcctcgcagctgacgctgacctgaaagaagtcgaagaaaaggtcaaagataagctcgatgaggaagacgaaaagcgtgaagaagatgatttgaagaaaaaggcagagcgcgagaaagaagaggctgaaaagctgaaaaaagaaaccgctgacgacgaagatgacgaagacagcgatgacaaaaagaaaaagccagccgaagacgaagacgatgaagacgagaaaaaagacgacaaagtctccaaaacggcaatggacagtgcgatccgtttagcagccgacagcgcaaccaaacgagcggcggagaacttccgcaaagtacgtgaagctgagcaggctgtgcgaccgctgattggcgatgtcgttgcaatggactccgctgatgatgtctaccgcactgcacttgagcaggctggcgtggatatcgaaggcgttcatccttcggcctttcctaagatggtcaaaatggctatcgagcagcagaacaacaaacgccctgtcattgcgcaggattccgcatctcacagcgaatttgagaaagctttcccgaccgctggcaaactgaaacgaggtttctaa

SEQ ID NO: 163114 - DNA, 198 bp, Enterobacter cloacae
atgggtcagcaaatcgctggcctgaccgactacgccaacgtgccaaaaacaatagcaacggttctgtcgtcgggtaaatgctcgctgacggaactgagcacaacgcttggcgtagaggatatgtggtggtggcttgagataatcacagtcgacaattacaaccaaatggtcatcaacagggctcaggagaatggctga

SEQ ID NO: 163115 - DNA, 519 bp, Enterobacter cloacae
atgaagttattttgttttgcggctgtgctatttccaacaattgcgctatctgccgtggattgtgacgctatcgcaacaagaaacctcaaagccattgaatatcaagataacactaagaaccatgaaagcatggttaatatctgcaggttgggcgaaaaatatgctaagagtggggtttcgcaaaatgagttcggagaagcactaaagtcttttgagacaaatcatgacaggtcagagctaaggaaaaaaaatgccctgatagaagggtactatgggggtcttagcgatatcgggaagactgcttttgactttgagaggaatgaatttgtttcaaatgacgaagttcgatttaagcaacaaaaaatagaaagttgcacagcctggtcgtcaaagatggttagaagcgaaattgataaaggatatcttccactatcagacgacccatcatttaacgcaagtatgcaaatgtctaggcaaaacgaatacattgccaggtgtttaaaccaacagaataactaa

SEQ ID NO: 163116 - DNA, 1113 bp, Enterobacter cloacae
atgaactcttctgataccccttcaagaattacaaaagcatttggtgtaaatgggcttaaaaacaccatcccagttgactcaagcacgacaacggacaacaacggcgtagcaacatttgataagggtttcccttccattaccatgcaacccctgagtgcaggagggattccgccatcaggtaaagacgtgaatggcgtgctgtattcaacaacattgcagcaacagtggcagaacgccgggatgacatatccattcagtcaggcattttctgacgcggtaagcggttacccaaaaggcgctattgtccccaactcagtttatacgggacagtggttaaacctgaacgaagccaatggcacttcacctgagtcatctacaggggctaacactggctgggttccaattaataactacggtgtcactcagataacgatgacatcaagtagtgttgtcatgtcatctcttcaggcagcgaaagacaggatcatcattagcggggtactaactgccaacgttaatttgattttcccagcctggataaaatcatgggttgtgcataacaactgcacgggaaatttcacgatcacgtgtagaacggcatcgggttcaggtgtcgttgtaatacctgggttagtttctaggttattttgcgatggcgtaaatataagcgatgaaacttacaacccaaataatgacatggtcggtgcggtagttgggtttgctatgaattcagcacctactggatggttggctgctgatttttcagaagtaagcagaataacctacgcgagattattttctcggataggaacaacatatggagctggagatggctctactaccttcaatcttccagattacagaggtctgttccagagggcgcttgataatgggagggggatagacccatcgagggtaattggcagcatccagcaagatgaaatcaaggcgcacacccatagactgcaatattcatcaacatcttcagggaatggatcactcgttaccggctcgcctggtactgggtcgctttcgaatttcgcagtggaatccactggcggaaccgagtccagacctaaaaacatatcagcgctttattgcataaaatattaa

SEQ ID NO: 163117 - DNA, 2220 bp, Enterobacter cloacae
atgtctatctctgatacaaagcaggctaagaaatatgcggccattgctgaggtggctgccgcccaatgtaaactccttacagaagaggcaagcaaggcacctgaatatacaaatcaggcaaaacaatatgcagaaagcgcagcagcttcttcagcatcagccataagtgcatctcagcaagctgtaagtagtgcaaatggagcatcacaaagcgccatttcggcacaggcttctgcgggtgaggcgtcagcttctcagcaggctgcgcaggatagtgagaatgcatcctcggctagtgctgcttcagctttgaatagtgcaaacgatgctgaagcatctgctgcatcagcggctgcgtctgtcagcaatactcttcgtatttctgacgggccagtagcgccacttcccaatgcggctacgagggcaaacaaagtccttacatgcgatgctagcggtaattttcaattcacagtgccttctagcggttctgctgcagatgttcttaatgagctcgctgattcaactgggtcatctcttgttggtacgtcaagcggaaagactgtccagcagtttattgatgtaaccgggaatgttgttggcaccaataattatgcaaccctccctgcagttgggagcgccatcacctctggtagcgattacttatacaacggggtgctgtacacaaccgtaggggaatctggaacaattcagtccattactggaaatgtagtgttgacggacaacggcaatgcataccttctcgataaaagatggcctataactgaccttagagcgtggggggtgagtgatggtgataatgctgatgaagcatttgctaatgccgcaacattcctctgtcgacaagacggaacggttaggagcctgtatgtacctcctataggcataaagctgtcctctgtagagctcagggacatgagtaattttaatatacacttcgatgggacctacgtgcttggagtggcatccacatcaaaaaatgcaatgatatcggttgtaaatgctgtattttttagcattacaggaaatccaattatagagtctattgctaataactatacatatggaatagagcttaaaggaggacttccatcattaatagctcccctaactggacttctaagtaatgtctgtactgatacaataagatttcgtcgtttcccctgtgcattcagagtaggtgatggcagtgatttgcaaatctcagaaatacaactcaatgcacaaacaaatcgatgcaattgttcatgcgaggtaaacggttctcaagcaatagtctcaattaatggcagccttctctgcgagccacaacaagacttttcatacccaaaggttctgttcaacgccataggcggtataatctatcaaagttctggagaaacggttgctagtgtcgataatgattcagtaatcgcccagattaaacaggttagctcttcattatacggaaacccatttggtagcgttaaaatatcctgcactcatgtagaatgtgctgggcttttgatggcagttgataacaactccgggatagtaggggattcagatagtaaatatagttctgtttcatttagcaactgccagggaagtatgttgaatggtgctggtgaactaatagcaatacgcgttgacccatatgaaggaacattttcagcagacgaaacatgcaatttctatacaagcgcaacaagaacggcaagaatagtttatagcatttcatcaaaattcaactttgatgtttccccccgctctttccgtaaaggatttaatacgctctcctctgaaataggaagtggtaatgttaactggatccataatgtacaacctattattaaaatgtctgtaaatcctgttactatcgcatcatcaggaacggcaccacttggattttcttctagggaagctaccggagattacacgttttattttggggacactaccagtggcggaattgttcttttacataacctaaatatgcttaatatttcaatatctgttcctgcaacaggagtgctggcaatcattgtcaagctcaatggatcggaggtatttggatgcactaacagtggatatcttacactcacaaaagagatgatcccaatcggaacggtaattgaatttgaagctaaaaatgggactggagggtcgataacaacgaacgcagcagctagagttatagcttcagcatcaaatatacggtaa

SEQ ID NO: 163118 - DNA, 1236 bp, Enterobacter cloacae
atggtaaatcatatgaagctaaatatgaatgcatgtaacattagatatttattgctttcgtctatagtttttgcgtacttgtttagctatgcatctaccatagatttgtccacatcaaatgacgatcatgtattcctttctgtttttaacagtggagccatagttgaatttcttgcgaataattataacacgtggagtgggagatccgctattgagttatttatggtttctaccattggttatcatttagtttggaaattaggaatacctttatcaatagtggtgcttgcctacgcctcaggtcgtgtatcaactgggaaatcatctataacatttatagcgatttttatattactattcagtttaattcctgacgcaatcaatggtgatgcatcttggtgggttactggtttttataactatttgcttcctatgtcagtggctatgtatttattctctgtattttttgaaggaaataagtgcgccctagttaaactggtttgtatacctttagctgtttatgtcgcgtatatggagcaaattgcattatgcctgcttttttgctctgcaatattgatcgccactaatacttctgccagacataaatataattactttttactggcaattattgcttttaattttgcgatatgcatatcggcgccgggtaatattaacaggttgcatctagaaactatgaattggatgccatcatttgctgattataacttactgcaaaaggtttctttaggctttgacaagacataccaattcataacatttaaatacaattatcctttgaccattttttctttgatagttattttatttagattaaaaatgggaaagattgaaatgcattccatgattccgattctcatcgtatcgtcttttgttcccttaatggtctatcaatctctttgcggtgatttgtttttcgaggggaatctagttgataatggcaatgtttcgcgcatgcctatttattataattatgcttacagtattgcatacatactttcaattatgtatgtcatctttgacatgatgcagaaaaggatggtttcagcgctccctattatatgcctccttagcggttttttatctgttatgataatggggttctctccaactgtatatgcttctggtgttcgtgtgtacttttatttcgaaatcatgttaataacaggttcaatgtacattttgaatcgctactttagctttgacagaccttag

SEQ ID NO: 163119 - DNA, 390 bp, Enterobacter cloacae
atgggatttcctagccctgcacaagactacgttgaagagcgcatatctctagacaagcgcatcataaccaggccagcggctacctacttcatgagggcctcagagaccatctatcgatgcggaatcatgaaggatgcgctgttggtcatcgactcgtctctgaatccttgtgacggttcattgctcgtttgtgactgtggaggggagtttgctgtgcggcgctatcgagcttatccgcacccgcatctggagaacgtatcgaacggaagaaaggaaaagttacctggtcacgatgagaacgctaccggacccggtccagtgttcggcgtgataacgtacatcatcaacgatgcaagaacaggtgagtttgatgattgcccggtgatgtaa

SEQ ID NO: 163120 - DNA, 885 bp, Enterobacter cloacae
ttgtttactttagataacaaaaataataatgcagtcgagactgacagtttcctttcaatcactgacatatgtgaacgggaaaatatatctattacgaaagttataagcgattggttgaatttttcgaggaagctatttgtaaaattagatgctgttccatgttgcttgaaaagaacattcgaaggggatgacaattcggaaatagaaaatattacttcaggttctgatgagtaccaaagcgtttttggttcaacggcttacagggtctttattcctctaaatccacaagaatgtgaaattgaaaaaaataaagatcaaaatgaaattgtttcatcttatatttcttaccaaggtctggcatatggcttttgggaagtaaagccaactaaaataactcgttttgcaaatgaagggtatcatattgcaaatggaacctcacgtaatgctattattaatactcccggagcagtaattattaatggcaatgtaagtgatcatgttttattttttaatcattcttttgtaattttcaaagaagacttttttgttggacctgacattgaagctgttttagatgagtctttatttaccgaaggtacagttgaggtttcacctcaaaatataaagtcagtagttcccggagcagaaagtaacgttgatcaaaatgtgaacgctaaagaaattgttaaaggggctaaagaaagggtatctaaggcagaacgggatgctatatttataatgttaagtaaatactataaaagtaaaaatggtaaacttgaggctgcaccaatcgcgaatatgttgaattcggatgccaaggatatattacctggacgagaattcagcccggaaactattcgccgctggttgaaatcaattcaatga

SEQ ID NO: 163121 - DNA, 237 bp, Enterobacter cloacae
atgaaagcagaattcaacagtccaacatcagaagaacgcttacaggtattacgcaacaatggcgaacctcatgatcgcctcgtacgtgaaaaagagcgtcagcacattacatctgtatcccgttcaacggcctggaaactagagcaagtcggtcagtttccactgcgtaagtctattggtctgaaatcctgcgggtggctgttaagtgacctgctgtattggatcagtgagcgttaa

SEQ ID NO: 163122 - DNA, 1425 bp, Enterobacter cloacae
atgctgtgtggtcgtccttttcctgtacatgtgttcccacagatcatcagaaatgcagtttacgaagtagaacagcatacgcaggctcctcaggctttgattgccgcatcagtactaggggttatttctcttgcctgccagaaccggattgatgtgtgcagactgaataatctgcgcagcccggtatcgctttttttactgacactggcggaatcgggtgagcgcaaaagtacggtggacaaactgctaatgaagccattgtatcagctggaagatgaatggtttgaaaaatatacccaggatctgattatctggcggaatgaggaaacggcttttaatgttgaaaagaaagccttgatgtcaaaactgaaatcagagatttcccgtaacaaagaacattccacaacgaatgaacgactgaaagcgctgttggcaacatacccgaaagcaccggtcaggttcagacagatattcaatgatgccacacctgcggcgataaaagactatctcagtgggcgctggcggtctatcgggcttatgtctgatgaagctggcaccatttttaacggctatgcgctgaatgaactgcctttcatcaataaaatgtgggatggcgcaatgtttcccgtggaaagaaaaagcgaaccagataaattaatcaaagatgccagaatgacgctggcactgatggtccagcctgatgtgcttaaaaaaggatatctggaacgaaaaggcgatacagcgaaagggatcggattcttcgcacggtgcttgatgtgtcagcctggttcaacacagggctaccggcaaattaccagcccggttgtctcaagcgagcatctaccggtatttcatctacgactgatggggatcgttaacgagagtattaccagaaatgatgaaaatgaacgtcagtgtctgtacttctcccctgaggctgaaaaacgctggctcgaattttataataaagttgagtcggaaatggggattcttggagcactgtctaattttaaagattatgcctctaaaatggctgaaaatatggcaagaattgcggcattattgcattactttaatggtgatgaaggtgatatatctcttctgactacggaggcggctgtggagatcagtgcctggtatgttgatgagtatattcgacttgtttctaatcccacgggatttacactggttaattcagaagcggatgaactttacttctggattaaagagtattgctgtcggtgctttgtgccctacatcaggaaaaacactatactgcaatatggacccagtaggtttcgaaatcgtaataaagtgaatgagttgttaggtgcactatattctcaaaaaaggatactcgctgctaaaaaaggaaaaacagtatttatagcgcccgctaatatcgaatttaatatttatagttaa

SEQ ID NO: 163123 - DNA, 582 bp, Enterobacter cloacae
atgaactggctgaatctggcttcatggctcccctgcaccgaggttgaggggccgggaaaacgcgctgctctatgggttcagggctgcgacaaacgctgtgtcgggtgctgcaatcccggctacctgaaaatcattgagcgtgaaattattcacgcgaatactatgattgatcgtttgctcgcagcccatgaagaatgggggctagaaggggtaacctttttgggaggagaacctttcctccaggcgcaagggttggcagcagtggcagaaggtgtctcacacgccgggctttcggtgatggtattcactggctacacgatgggtgaactaaatgaactcaatctgcctggcacgcaggcattgctgaaatggacggacgtgatagttgatggcccctatcaggcatccagccccgatcggacacgtaaatgggtcggttctacgaaccagcagtttcactatttaaccaacaggtacagcgagtcgatagaaggctcaacccagccagaccgcgccatggaatggcggatcagcggtgatggccgcattgtggtcaatggctggccttatgctattaaatga

SEQ ID NO: 163124 - DNA, 1857 bp, Enterobacter cloacae
atgagctccggacaacaatcctggcaagaaaatttccgccgcgaatgcgggatccggcgagggatcatcctgcacggcaacattgtcgatgtggtctacgacgaatccgctactggccagtggagaagcataccggaaaccatcgatgtcctgctcaaagagcgcggttaccggcatgttatccgctgggatcgtgtctctggcgtatctggtgtcaatgcccgggaatggaccgatctgatgagcgccgcgacgcccgcttcttcaccagcagaaggcgacgaatatgatatgggcacgccgttgccgacagcacgggccacacaaaccagccatgcattagaggtgaatccacaagactttctgacagtcgtcgcccggctgatgaagtcttctggccccgatcgtattgccttcgtgctggactggtctcacctgttgtttgggcaagccaacgcgctgagtgaagcggaacggggcttgctactgatgatgggtaaagccgcgcgtgacgcgcagctagcgctcaacgctgcggatatcgataaaccgcaaacgttgatggtttttttgtgtcagggcttatcggtattgccgccgtcgttatacctgcataacccgctgttcaaagaaatcaatgtgccgcttccgtcccgcaccacgcgggaaaacgccgtgctgagtcttaataacgtcctcctccttaacaccccaatactgaataagagccgggtgcttgcggatcttgtggattcgctggaagggcttacgctgcgtgatattcacaatattgcgaaactctcccgacaacttccgcaaaaaatgagcgccgaatcgctggtcagcatgtaccgctatggtgagaaaaaaagcccgtgggaagagctgaaccgcgacaaactgagcaaagcgatcgaaacgttgaaggtgcgtgtgaaaggacaagatcaggcgctggcagtcgttaaccaaatcctgatccgcgcgtataccggcttatctggtttacagcattccagcaaacaaagaacccctaaaggcgttttattctttgtcggcccaaccggtgtggggaaaacggagctggcaaaagccctcgcccagtttttgtttggcgacgatgaggcttgccagcgcttcgatatgtcggagttcaaccatgaacacgccgaccagcgactggttggtgcacctcctggctacgtgggttacgaagagggtggccaattaaccaacgcggtaaaaaaacggccgttctctttgttgctgtttgatgaaattgaaaaagcacatccccgaatactcgacaaattcctgcaaattctggaagacggaaggctgactgacggtaagggcgatacggttcaattttctgataccgttatagtctttacgtcaaacattggggcggcgcaaatcgcggtggacaatccggatgtcaaaggggcttttattgaggaagtacgtaatcattttgtcagtgaattgaatcggccagaattgcttgggcgtatcggtgagggaaatattatcccgtttaactttatgactgatgaaaatttcctgattgatatcgcacgatcgaaactggaaccgctccgctatcgccttaacgagaaatggggcgtaacgggaatgcacttcgaggatgagacgaaagcgcttagatcgatcgttaagatggttgatcgcagcagcggcgggcgcggtgtgctcaatgttttaatccgctgtctgtttgatccgttgtcccgattcctgtttgaagaggttggttcacctgagcactccctgggtcgtgcaataaaggttgttcagggggggaccaaacccaattttgacttcgatctggagtaa

SEQ ID NO: 163125 - DNA, 1146 bp, Enterobacter cloacae
atgagcagacatgagcaggcacgctaccagattgagcgccagcggcgtcaggagctttttaaccagcgggtcagcgagacaacgcgggtgtatctcgaccgctatcgcaacatcttgaatgatgtacaaaaccaagggatcagcaagtacgtgcaggctgaattttccgcactgcaacgcgaactggagactctgacatggcttgttgattccgatccggccaccgcgcgcgatcggagtattgccctaggccagcaggtacatgcgttacccagacacgccagagcaatgcgccaggctgttgttgaagcagagcgtgtggcggagcacgttgctcaggaagaggcgcgggaagccgttcggcaaagggttgagcaagaaaccaaagcccgtgaagaagtggaaaccgtctggcagaacgaactgacaaactgggacgacccgctggccaggcaattagccttcaaagcgctggcggagcttcgtcgtcatctcctcgacgccaatcaccacaccacagttgaacaactgcgggctgaattaggcaacattaagcacgaatacgaacagcgttctcaggaaagaagagcgcaggagtatcaaacggcggtggccagtacaaccgaggattcgctgcaattatgccgtgagcagattgccgcagcgagccgtcaggctcccgaacacgcagcagcattggccgcaactcttgatacggcaagctcgctgtcgccagaggaactctcccggagaatggttgaagtcaccagcgaactcgatacagcggtggtggatgaaagttgccgccgtgaagtcgtgcaggcggtttatcgttcgctcgaggacgctgggtttgtaacggaaaaaccgcgtctgatgaacaaagatgacagcaacgaagtggttatccgcgcgatgagacctgcgggcgcacaagcggaatttaaaatagagctcagcggaaaactgaaatacaagtttgaccattaccagggttctgcctgcaaaaaagatatcgatacggtccttcctcgactgcaatccatttatggcattcagttgtccacagagcgggtcgtttgggaaaacccggacgacaaggacagcgacgccagaccacaacccggcatgacaagggagaaataa

SEQ ID NO: 163126 - DNA, 2424 bp, Enterobacter cloacae
atgaagttaggatcttttgctgtcagtgtaccgcagtacaaaattgaaacgcaggtgatctaccagaccatacgaacccccacggtctttgagcgtatgctgatgagactgtgtaaaagctaccggaaaacgccggaaattgcgcaattgacgctggcgcagattttcgagcagcaactgggcgtcacatcggccagtgcgctggtcggtccttgcgtcgaggatctgatttaccttggggtgctagcctgtccggcatcagagaactatatgtcgcttcgtctggccgacatatcgttaacccctgaggggctcaactttcttgctcgcgaacggttacctgggcgtcagcaacaaaccaaggtccagcacctgtttttgcctttatcaaataccgttcagccattgcgcgccagcaatctgcctggcacgcccaccagcacagtatttatcagcaaggacgtgcttgaaccgcaggactgttccgcgtggatacgacaagagttagaaaaagagcgccatccgtggaaaacagcgaatacagagattcactccgttcagtccagcgtagctggcgtagtgtgggagcagcaccaaatcaccattgagtgtgatgggtccggcgtcctttccgttaaagcgcccggctctgccaactttgaacaatggctgcaaatggccgctgcagatatcgtgtggcagcacattttgcagccgatcctgacgagcgaacctgcggcaaactggcccagactcagcgatgagagtattcgccatgcaacagagatagcgccgttaagtcgcgcagcagacagcacaacggatccttccgccaccctgctgcacgtcatcacaaatgatgcagaaaaagataactacttcggtgaaaatctgatcctgctgcacggtaagaagagttccatactgggcatgacaattctgctcaggaacgccgaacctgaaatccgccagcttgacagcaaaaagggaagtctgtggctcgaaatgagagtgcctgaaggtttacctgcaggactggctactctgcgtatccagaaaaaggatggcgcaccgcaggcgcatttttccggatggggcaacgtcttttggcgagggcaagcgcagcgtgccgcgctcagcctcactgcggacagcaccatcagtgccgaaatctggcaacgactacaagcggaattacaatccggtctgaatgccacgcacagtgccacagcgcacgccctcacttcgctttggcttactccgcaggagacgattacgcactggcaatccagaaatgaggtgcatcctgttgcggaatggcttgccgacgcgagcgaattcgcggcggcgctggagaggtttaccccccactcgcgagcacagtggcaaccatactggcttaacacgcttaaagctctgatgatggccggagtgacacgtttgcaaaccccgatccaacctgatgaagcgatccattacctcaccgttctgaatcagttggtgcctgaccatagcagtgatttttccgcgctcttgctggatcactgcagtccgcttactgatgtggcctcgctcgaacaactgcgtaaggccgttggcccgacatcggttctgccgaattcccttttaagcagcacgctgctgcaaatatggctggcagaggtattaacggatgcgccgctcactttgcatgagcctcatgcctttgcccagtcgctaacaacactcagaaatgcgcagcaagacgtgttacgcaacgtgggaatgaaatccctgacggatgccgctacgggcaatttaagccttaaaagcgtgaaaacatcagcactgacaagcgtgacacagtggcagaatgccgttgcagcactcggtacattacgtgcggccgtaacgtccgcctccttttcgcttatcgatgaattcgatacgcaagttcaggcctggcgagaactggcaacgcaaaagctcgcccatcccgaagcgcccggcaaacggtttgtcatctttgataccagcgcattaatagagtaccccaatctgccctcgcgtttgcagcagaatgacacgccagtcattgccagacgcgttcatcaggagctggatcatctcaaaacatcagacaaccccaacaaagcccgacgagcacgggaggcgattcggacgctggaacagatacacaaaatcgttcgttacgaatccgaagttatggagcttctacctgctgacctcgaaccgacatcagataatcgcatcctgtcggtggcgctatacctgcgactcagcgatgtcatcctggtgaccgctgataaaaatttccgcaacatagcatgcgctgaaaacattacggcgattctgcccagcgaatataaagagatgtcgcacggcaagaccagaccgcgcaatacgggagaaatagtgaaatga

SEQ ID NO: 163127 - DNA, 3939 bp, Enterobacter cloacae
atgtccaatctttacatttgggttgacgataaaaaccgcaataacctcatacgaacaatcgacaacctggcgcggcgacatccagattttaaagcgctgctacgtgacggagataaaattgaaaataccctcaatcttttgtttcctcacggcatgccgatggagtacctcatctccaacctcagcattgatgagcggccggaagagaatttagatttagcctttcgtcctgtgctcggtccagggcaaccctggccgttcccgccaggttgctcactggttgcaaaaggtttctggaaaaccggtgcgccttttttcaagattcaggatattttcgaggttgcagatgcgcctgcacaggtctatgaaaaaagtcttcccgtggtggtttatcaggataaccccgccctacagcctcgaatcaaaagaaccgataatgcgctgagccgggagttagcccacgagctaccgccaatctccgccaacacacgaagtaaactggttgactggcgcgagtttctggaatggaaacgcaagctggtttccgaaaaaactcgtggattgcattttacaaaacgtggatggcaggaagacaaattggttttccaggtcgtaggtgaaagcgaacaatgtatccgtgacgtgttgcgtgccttgtcgcgccaggatgtggtggcgtttgatcctgcagtttctgaagatgaatggctgtttcgaatcagtgataaagacagcgccaaacgtacaccaaaagggattgaactcgggcaaccggaggtcaggccaacgtttgtgccaaacaggagcatcccccagggttgtccgtggcccgtaccgtgccttgtcgatgtgtttgtcagcctgtcagaggatgaccagaatcaactttcgacggcagaggatcatgaaagcgcccgcgacagtttactggccaggatccctgaaaaaggctttctttcggtttcggcggcgggcgatttagccttgatccgccgtcacgagcaggcacttaaacgcctgcaagatcagggtggttacgccccttatctctcatcctatctctttgatgcgcgccaagccaaaagccccacctcgttcgaacctatcatcgattggtttcgcgaggatctgaatattttccagcaagaggctgtcaacaaaatcctcacggcgccggatctctgcctgattcagggaccgcctggcacggggaaaacaacggtgattgcagaagccataatgcaactggcgcgtaaaggggagcgggttctgctggctagccaggcgcatacggcggtcgataacgcgctggaacgtctgggcaaacacccggatttgcgggttattcgtctcgcacgtgatttgagcaaaatttccggcgagggcaaagcgttcatacaggaaacctccttatcccgctactacacctcgctggctgaggatgtagagaaacgctttctgacgccctggcgtgaggcaaaagatcagctcaaccaattgcaatcgtggctcaatcaggcggagtttttacgccgtgacgcagaacacgccgggcaggcgcttaccgcgcatgaacatgcgctaaagaaggcagaacaaaacagaactctggcgtggcggaaattgcaggagcaggggcaaaaacacgcagatgcgaaacagcggcaaacccggttactggcgctgaaggcattcctcgaacagaatgaggaaacgatccctgagcgttgcccgctgccggaacccgccgcctccgcgctagcatctgcgttgttcgatcttgccagcgcgcaggtgaaacttcccgtctcccttgccgactggaccgccgtaccgtcgcaacaaccccagatgctgtccgggctgttgcgattctggcacaggttgtgggcgcaccgcaccgatctggaaaatgatgtggcccgcttgcgggccacagggccgtctgcactacaaagcccggatcgggccattcacctcgctgaattggaggccgaagagcgagtacttgccgataaacttgacgacgatgaaagtctgtttccggtatggaaagccaaacgacaggagattaaacagcttcgcgacagttctgctggtggcttaaatccggagctgtacggcaaaatgttccttgacccggaatcctggtgtcagtcgattgaaaacgcggaactgacgggtaagaaactggcggcgcgcgttgccgccttggtggcgagcagcaccgtgattgaacgggaattagcacgacttctggctcagactgacgaacttattgcgctttctcacgtgccggatatcgatgaatctgagtggcgtcaatgcgagcaagaaaccgcccatcagcaacagcgggagccacagattcgccaggctctggaagactgcattagccagcaggcggagtggttggcccggcgtgtctcgctggcaacgttgcctgattcaccctctgcggagataagcgtgcgctttgcgcaagagatggcgtcctgcgaagaaacgatcggtacgctgacgtcgcgccttgcggaacagcaggcggttcaggaggtctgggagccgttgttacaggactggagaaacgatctaagccgtcaggtttcgtaccaaaacgactggcatcactttaaagaaacgtttgtggctgaatgcaacctggttgcgattacctgtaacgagcgtgaacaaacattagaagaatcgggccaggtcagttttgatgtcgccattatcgatgaagtcagcaaagcaacgccgctggagatgttactgccgttgatgcgcgcgcgccgttcaatcttggtgggcgatcaccggcaattaccgccgctgtttcaggaaggcaccgatgcgcaaacctttagcgatgccgtcgatgaagcggacgaagacgggcagaatacccgaacatcgctgacccggcataaccttcagcggtttgaaaaaatggtgacggcatcattattcaaatcccacttcgaaacggctgatgatgcgatcaaagcgcgtctggaaatacagtttcgaatgcacccacaaatcatggcgatggtaaaccatttctatgaacgccgcctgagctgtgggctggagttccccaattacgacagaaaccacggtctggtgctggtcgataccgacggcaacaccatcgtggagcctgcacgaaatagtgtcggagagcgggtcgtcaaagatatccagcgctcgccttcaaccatcccacgggaagaaaaagcggtaactgagggcgaccatgtgctgtgggtggatacatcccgtgacctgcaaggccaacttcataaagaagatgtggacgccagcggtaaacccgcgcgcagcaactggctggaagcacagcttattgctcacacgctgttacagattgataaacagtgcgccagccttggctattcagcgcaaaaacgctaccaagtgggtgtcgtctctttctatgcccgtcaatgtcggttgattcgcgaggccatccgcgaggttaaacctaacggacgttttgactgcctggatgtcgagatcaataccgttatccgctatcagggcaaggagaaacctaccattctcgtcagcctcgtgcgtaatgatggcgtggatacccaaagccatggcgggaaggtaagacgccgctccagccgcgccaacgtcgcgcgttacgaatttatcaacgtcgctttctcacgcgcgcaagagctgctgattgtgtttggcgcacgaaatatgtacgagtcctatgacgtcacgcttccacatatggacagcgagggtgtaacaacccgcacggtctataaagacattttggatcaactggacagaaatgctcagttgattccggcgagtcgcctgatgcgaaatacaccgcagagtaagcgtaactctccatcgtcatccggcatgcgtcacagagggaataagtga

SEQ ID NO: 163128 - DNA, 1221 bp, Enterobacter cloacae
atggtgccgaagctacgtttcgaaggattcaataaaaactgggcggtaaaaaaattagatagtattttttcatttaagaatggacttaatgccagcaaggaaatgtatggtaaaggtgttaagtttatcaatgtactggatattatcaataacgataaaataacttatgatgttattaatgaaagcgtgggcgcaactgatgatcaaatatcatcttatcaagtaatgcaaggggacattctttttcaaagaagttcagaaactagagatgaagttgggcaaactaacgtctacgctgactccaaaactgttttgtttggaggttttgtgataagaggcagaccgttaattaacataaatagcacttttttaaattttcagttgaagactgatgcgttaagaaaagatataactcagagaagtggtggtagtacaaggtataacattggacaggattctcttgggaaggtcactgcattttttcctgagattagagagcaagaaaaaattgctaatttcttatcctctgttgatgaaaaaatggcgctactgaacaagcagtacaacctgctatgccagtacaaaaaagcaatgatgcagaagatttttagtcaggaagtgcggtttaaggatgaaaatggggagggttacccagaatggaaatatgtagatttaaaagaaatagcttctaaagttaatattaaaaatagagagggtttggtcaacgtagtactaactaactctgcgacacaaggcatagttagacaagatagttactttgaaagagagattgtaactgaaagcaacttacaaggatattatgtagttagtgttggtgattttatatacaacccaagaatatctgcaacagctccggttggccctataaaaatgaatgaattaatccagggcgtgatgtctcctttgtatacggtatttcgttttaaaaaaggattattgaagttttaccaatatttttttgaaagttcagtttggcatgactatatgaaaagtgtcgctaatagtggtgccagacatgaccgtatgaatatttctggagcagacttttttgcccttccagtatctcaacctattgaggcagaacaaagcaaaatagccaacttcctttctgctatcgatgaaaaaatatccgcaaaaaaagcggaactagataaattaaaaaattggaagcaaggcttgctccagcaaatgtttatataa

SEQ ID NO: 163129 - DNA, 219 bp, Enterobacter cloacae
atgaacgtcaataagggcaatcgtcagggattcctcgaaaataatgtcatccgtcagaaacaggatgtaacgctgctcattaacctggactgctgcttcaagcacttgtcccggtacaataatgcccgtgcttttaccattgagcacaacgttagattgagcctgggatacagcggtagcttcactaaccttaaccaggtaatgactccaacttattga

SEQ ID NO: 163130 - DNA, 429 bp, Enterobacter cloacae
atggatatcgctcttttccctggtcagaaccgtcggcagtgggcacacacgatgattaatctagaggccaggaaacttgtgaataccgcaaatacggtcgcggccatgcacctcagtgattcattcactcgtctgaaattcgtggatgaaataagacaggttgtaatgcaacagtttgaagctgcaagacgtgccaagaacgatgaagactgtattatctgccttaaaaaactcagggctgagaatgattatctgattgaacaatcacgcatgcttaagaccggttatgcccggatctacgccgaagtccaatacgtaactgagaataataaaattgtcgggtatttcatttcagggataaaagtaattcttgctggcgttcaggccgtattggggtttgagggccaacgatgtaaaaaaccacgttaa

SEQ ID NO: 163131 - DNA, 840 bp, Enterobacter cloacae
atgattgactctggtacaacttggcgccaaggccaaattcttagacatgaagatgcggtttccctcggattaattgccgaaggggatgtaggcgttaaagttgtcgtaatcagtcatgactgtgatctacagagtgcttcggaacccaaaatcgagcttatagctggccctttattaaaaggggccagcaactttacccgagccaaacatccaagaattttgcatttacattttgaaaatgcttcggatgctaacttaaatgctatcgaattgaagcatgatcataagcttcgtatagataaagaaagattcacatgttcagaatgtgatccttcttattccatatcgccagaagaaaaacagggtttaaaacaatggcttgcagctcgatatgggcgacctgcattcccagatgtctttgaaagtaggctacgagcttttgataccaaaaaatttagatttgagaaagagctggcgaagataatcagtcagcattctaattttttgataggtgtcttcttcgatttgggtgaagatcgatttgtcgatctggaagagggtattccttacgaattaaatatccacttggtttatgacgcgattgacggtggacctgaggcaaggctagaggctgagcaggctgtagagcatgtacacactctgtttactacttatcatggtgacccatctgaaagcgaactaatcgctttaatgtcatgcaatcctgtgcccgataccgaattcaccctgtatgctttacgaagaatggatcagtggcgcgtagaatatataagcttaatgggcgatgagattggggattatcttaacccttcaatttga

SEQ ID NO: 163132 - DNA, 645 bp, Enterobacter cloacae
atgcgtcaatccatgactggtagtaactatgagacacccggctttgcaccttttgctggtgcggcgtttatagttgcatcatctttattcttaagtagtacaggatcgaatttttctgttaaagatgttaaccagtggcgtggctatgtacagcctaaggttcagttcgggttgtcaagatctgaaactgacggtgatgttgaaaatgatattgttgacgtcagaacgatatctgaccatttgaacaacgtcagaaacacgcttgctccctctatgtcggaacttgcaaaagatttaggtattactaggcaggcactctacaaatggttatcaggtgaaagtcagcctgatgacatggaaaaggctagctatatcattgagttgagccgattgtcagatcgttttaatgaagcaggcattttaaatgcgaaactgatggctaagatgaaagcttttgacggcttctctatcattgatttgataaagagaggcgataattggcaacaatcagtaaataccttgattgaagaagctcgtaatcttaaaggcgctggtgttaaagcaaatctgacaggtagtaaagcttcacctacagatggttggatgtcatcagtttctatcccaggctcaggagtgagggagtaa

SEQ ID NO: 163133 - DNA, 807 bp, Enterobacter cloacae
atgagtgacaacgttcgtatgtccaatgcacccgtatattatgtgttagcgcagataaagtttacgcctgtaaaggcgatgaaaaagtatgtagatgacatacaggatgcgttacgtttgcaaggctatcctctcttcgagagccgagagtctacgcagctgaagtttgaatttaacactcctactgaaccggctcaacccgcatttgagatggtccagcaatggtatatgtcggacttgaaacgtacctcagggtttgttttaggaaacgatttcatcacatttcatacaacagaatacgatacacaccaaccgtttattaaagagttaatgaagggtttggcggttgtgttggaacatcctaagccagctttggttactcgtttgggccttagatacttggatgctgtattgccggaaaatggtgaaactattgaacaatacctctgtgaaggcttgcatggtatcgatttagagttaaatcaaattcagtctgtcaacgaattagtcttccaaaccaaagttggaccagtaattgaaaatggtttcctagttacacgtttgcacaaaatgcatggtcaacttggattcccacccgacatggttccaattggtgttgatatgattcagcgctttagaactgaacatgttctttggcatggtattatcgatactgatcattatgtggaaggtaacctgccacctgctattgatttgattgagaaacaattcacttctcttcatagtgtggtaaaaggtacgtttaataaaatgatatctcagtatgctattgacaagtgggcataa

SEQ ID NO: 163134 - DNA, 459 bp, Enterobacter cloacae
atgacaacagcgacacagtacgaccttgtacccgctaacgaatccgatttcaaactcacagtaacgcaggttcccgacgaacagcgtctcgatttctggccacagcactttggctctatcccacaatggataacgctggaaccccgcattttcgcctggatggatcgcttctgtgatgagtacagcggtggtatctggtccttttacacgctcagcaatggcggcgcgtttatggcccctgatgctgacagtgacgataaatggcgtctgttcaacagtatgaacggtaatgatgctgatatgagtgcagaagctgccggtatcgctgtcagcctgattgaatacagccatcatgcctgtcgtaacgaatgcgatgtcatgacggagcactattaccgcctgcgggactatgccctgcagcatccagaagcccacgccattctgcgtatcatcgactga

SEQ ID NO: 163135 - DNA, 288 bp, Enterobacter cloacae
atgcctgaatccccgttactaccgcccggttctttcacccggcagcaggccgaagccattatcagtcgttaccacaacgtcaccatcgaagatgaccagaccacgcattttcgtctggttgtgcgcgacgatgatggcggcatggtctggcgtgcctggaattttgagcccgatgccggtgcagaacttaccccatatatccggcgcttatggcatccgcaggtcgttactcaccgactgacaaaccccattcccgacagacacatctcccggaccatcctttattaa

SEQ ID NO: 163136 - DNA, 474 bp, Enterobacter cloacae
atgaaaattaaaccctgtttacctgtcctgctgtctcttctggcccctgccttcactcatgcaacagtgaccgaacagcagtggggtgaatggtacggcaatacgggcggtatggagtttgcactcagcagcgacaatcgggccggagagaagctgaccatcagttgcagcaataaaaagatggttgtggcctggcagctcccgaaggaggattaccgcgccacctctgatgaaggaatgagcgaagtgtatcttctgataaacgatgaaaaatactcgcttgagaatgaaactctgcttccgggtgaggctgttccggctcaggtggcttttgaagcactgaagcacacaggagcaaaagacatactggctttcaccgcctttcagtcaggggaatcgaaaccgttcagtgcccgtggtcttcacgacgcgctgaaagatatcacctggcaggattgtctcgatcaaccctga

SEQ ID NO: 163137 - DNA, 696 bp, Enterobacter cloacae
atgaaactgattaaattattacctctgctggcaatggttgctggctccagctttgctgcatcaccggagagtacggtcaaagcatcaggctgtctggcggtaaacgatatgcttgagaacctcaattcgcgggagtcctgtgtttcagtcgatatcaccagtaccttatctgaaggccgttatctggcgattgctaacctgactaatggcaatatctacccggtccgcatgaccctcagtgacggtgtcattacggcacgtccggacacggatgagattgataagctcaatcagcagcaggcgcaaaagcgccgggaagagcagttacagaaaaagctcgattattataaagcccacccacagaaagagagcgggttcgacaaagcgaaaaaggcacatctgaatcttactcaatatcactcagccgcctgcagggccattggtcaaaaagtatgggattccattcatgaagatgtgccgtgcctgatgattgagaatgcacagccggtcagtgatagcactcaaacaggaacagccattctgcgcgggccaggtgcgagcaaatttaagctcccggtgacgttcagagtgattcaggaggattttatccgtattgacgccgatatagcaccagctgcgctggcacaactaaaggcacagatagacgcgtataaagaaaaactaaaccagcgctaa

SEQ ID NO: 163138 - DNA, 864 bp, Enterobacter cloacae
atgagaaatcaggaaggtatgtattcgttgcagagctcactcacaggcttaccagaatgggtatcagaacgagtcatgcaaaaaattcatcaactaacaaactacgaaccagtgatcggcattatgggcaaaaccggtgccggaaaatcgtcgctgtgcaatgccttgttcaccggagaagtctcaccggtcagcgacgtagcggcctgcacccgtaatccgctgcgttttcgcctgcaggtgggagagcactatatgacattggtggacctgcccggtgtgggggaaagtagttcacgcgatgctgaatacactgcactttaccgtcagcaacttccccgacttgacctggtattgtggctgatcaaggccgatgatcgggcgctggcggtggatgagcatttttatcatcaggtaattggtgagtcataccggcataaggtgctatttgttattagccagtcggacaaggttgaacccacctgcggtggtgaaaagctgtctatagagcagaaacaaaacatcggccgcaaaatctgtctgctgcatgagctgttccaacctgtacatccggtatgtgccatttcagttcgggctaagtggggactgcgggtgatggccgagcggatgattaagtgcctgccgcgtgaggccagcagcccggtggtgtcgcaactgaagccctcctttcgcacaccgacagtccagaaaaaagcgcgtgacgattttggtgaaacgatcggcacggcgctggatgcggtaagtgccctgccgttgataccggctccggtgagggcagtcatacgcgcggtgcgcgataccgtggtgtcggttgcccgtaccgtctggaacttcttcttctga

SEQ ID NO: 163139 - DNA, 189 bp, Enterobacter cloacae
atgagcctgcagatgatgcgtgaaggctggtttgccccgacgctcaatttaacgcagccggatgagcaatgcggtgctttagattatattatgggagaagcccgtcagattgactgcgagtatctgcagagcaataacttcgcgtttggcggcatcaacacctcgattatcattaaacgctgggcgtaa

SEQ ID NO: 163140 - DNA, 957 bp, Enterobacter cloacae
atgaatactgaaaaactgttaaaaataaaaaaatggataggtttagatgaagcagcagaacgcctgacatcaatttttgaagaacgtataacagttctggacctcattgaattaggcttggagcgagatatcgttctgtctgtaaggctgccatacggagagaaatttgttggtcgagagatggtctataaagaaattccaatcactgaacacttgttagagttgtttatgttcagaaaaggttgtgaggaacattcattacgatcactcagcaaagatgaggttctcaaaagttacaaggatgaatttgacgagtatttaaatgaagaattcaaaaagacttgtgaaaagctttcagaaaactatggttcgaattatgctgaaatgagtttagaagcttttttgaagactgcaaccttcggtgattatgaatatgtttcagatcctaagtatttaagcgaagtaatttatgatttacctatgattggtgctgaggtcttagatgttcaacgtttatattctataaacaaaggttacgagtcgaaaggattaataaatcttaacggtccttttttaaaggataaaagtggaaagttaattaatctaatggaagcttttgatcataaatcgaggaagtctagtgcgtccggtttagatcctatgaactacttcccttgtgatcgtttaccgactcacagtgaattgggctttcggccagaaaatctcatagcttttgaaaggagtgtatcgaatgttcctgacgtcaaagatgctggattgagtcttttagtaggggcaatgttgaacgttttgaaaaataccaacataaaacaaagaagatggacacaggatctgcttaaagacgagattgttgaatcttgccctcattttacacgtcgagctttggatgaccttttcgcagattcgaacaaatcattcaaggaaaaatccaattaa

SEQ ID NO: 163141 - DNA, 1518 bp, Enterobacter cloacae
atgaacattttaatcatccctcgagagcaaagaatcccttattcaggggtaaacacagcttatttacatgttgatcgctgggatgattattcgttcataacaatgttttatttgtctttacatgatgaatcaggaaatttgcatgaaattggaaatgtcaaaattggatttcaagggcaagttattggaaaaccaacatatacaaccttaggacatgcatttcaggctttaccaaatggatatttttcagttggtcaagacgtggagtattatcaaaaaatatttaacctttccgattctatcaaaaataaaattcttgaatcattaaaggatatagcttattcaacagaggccatggcaatagccgagacagaagctgtttttaaaacatctcttcttagaggtgttagtttgtcagttatcaaaggacagttcactagggttatagaaggaaaaaatccattaacaaactttaaatttaaattcttgaggcctgctacggaaaagatgtcaggtatagagttgatatttaatgttgaaatagacgaaaaacccagtacgaatattcatgcaataataggtagaaatggagtaggtaaaacaaccctactaaatggaatgattgaggcagttaccagcagagggcaatcaaattcaaaattttatgatgttgaaggcttctcagaaagtccaataggaaaagattattttagtagtttagtgtcagtctctttcagtgcttttgatcctttcgaacctccaactgaacaagatgatccttcaatgggaacatgttacttctatataggtttaaaaaaagagggagaagtacttaagggtcttaatgatattcatgaagattttattcaagcattaaagcaatgttttagccaaggccctaaaaaaaatagatgggttagcgctattgatactcttgaatctgacgaaaattttgaaagtatggatcttaaagatcttgtgcgttttaccggtgttgatttagttagtaatgctcgaaaattaattaagaaaatgagttcaggacatgctattgttttattaaccatcacgcgattagttgctactgtggaggaaaaaacattagttctgatcgatgaacctgaaagccatctacatcctccattactttcagcttttattcgagctctatcagatttgttacttgaccgcaatggtgtagcactcatcgcaacacattcaccagtagttcttcaggaagtgccaagaagttgtgtttggaaactcaatcgctctcgattagtaaccgtagtgcgtagaccagatatagaaacttttggtgaaaatgttggggttttaacgagagaagtttttggtctagaagtagtgaaatcgggttttcatgacttattaacaaaatctgttgaatcaggtctatcttatcaagatatcattgatgaatataaaggtcagcttggggttgaagcaagggcattattaaaagctttagaaatccaccgggataggggggccaactag

SEQ ID NO: 163142 - DNA, 225 bp, Enterobacter cloacae
atggaaagaaatcggcacagaatccgcagtgtggattatcccggcagaacgtatgaagatgcgccgcccgcatattgtgcctttatcaataccatcattgagcgcatccgcgaaatgacggggcgttaccctctgatgtttcctgggcgtaatgacccgcgaaagactatgggtgaagccagtatcaatcaggtgttaagtggatttgttacaccggccgcgtaa

SEQ ID NO: 163143 - DNA, 636 bp, Enterobacter cloacae
atgtctccaggcttaaaaactaattctgtaattatctttgaacctcgccagctattttatcaggctgccagttcctgtatggaagcctgcggatgtcaggttgaaaatattttctctgatggagtaatgcgagagcttgttaccgatagagatctcaatgtattaactgcaataggtctcaatggggctggtgcggaattttaccctttgctgaaaataattaatctgaaaacaaagtctatggtgaatctggtcgtttggttacctgagcgggatatcattctggcaaactttatgcgcgcactgggagtgacttctttattaagtgaaacctatcttattgaagagatacctctgcgtctggataatatgttttttaacacttcttatttccctgtaagacacatgtctgccatcacagggggcatcaaaagtcgagtctcccggactgagcttgacatagtcattgattgcgcgtgcggtatggatccttatgaaatagccagaaagcatgatattacctacaaaacagtcctggctcacatatataacatacgggttcgtctgaatcttgaagaccgcaatcgttggtttgatttacttaccagaatgaagcagatttcgtctacgaaatga

SEQ ID NO: 163144 - DNA, 633 bp, Enterobacter cloacae
atgatagtttacacaatttatacgcgtaatattcatcaaacgcttctgcatggccttatggcatgtgcaaaaaagttaaagactgcaaatccggagtgggaatatcagtttgtcgatgagggagaggcacatcttaacgtgctggatttcactacacgggagagaccagactcgcttaacgaagatgatttaaaactactttcgtactatccggatagcagtacgcttgtacttcttaggagcgaacagagccagttggcaaaacaccttattcagtcttaccgctgttcattgctgtgtgtggatgaatgccatttccggatgcgtgaactggtggagagttcgctaaaaaaaaagcgttatgtcagtccagtgtttcttcgacattgcgaagttgaggagaaatgtgcactggaactgaattttacacctgcggaatataaagtgttacatggtctttgccgaagggaaacaggaactgaaatgtcagctaaactgtttcgtagccaaaaaacgatcagttctcacaaacgcagtataatgcggaaactgggagttaaagatgcatttgaattacatcaggttttgcttgagatacaggcatcacactcaatacgaattcatttaatatga

SEQ ID NO: 163145 - DNA, 510 bp, Enterobacter cloacae
atgggtctaatattccaaaattacacacaattgtcattgtgtttgatgtgggggtttattactgtttgtcactcagtgtggccatgttttttaacaaaacctatgcgcaaactaacattagttaagttatcaacatcattacttttaacttgtctgttaatttattttttaattgtactttcagtttatattcctaacatgggaggtaacgggttaaatcttccccaaaacattttagcctggatagccatcggagttattgtttgtattctgtttagtgtggcaatcgttaagaaaacgattaaatggaatgaaccttttctgcttttcgcagtcggttccatcctcatcattctgccttttggctggagcgattatcccagaaatatctttgctatacccagatttatgggcctgattggcggcctttttttttatctggctcttttacaggtgcgtcagtcacctgtctgtaagagaaggctattattcatactggtttggaggtaa

SEQ ID NO: 163146 - DNA, 1137 bp, Enterobacter cloacae
atggcgagttacgttttatgggctaacaaaggtggcattggcaaatcgaccttatcattccagttagcctgcaagtacgcgcgggtacatagagataccccaacattcgtgatcgacttaagtccccagtgcgacgtatcaaggatgttattgggaggcggtcgatgggatggcgaagcaaaaatcctcgagctgatgcaacaacctgttcgtaagacaatttatcaatacctacgagaatgcgtcagggatgtcccaaatggtcaaggatggccctcaataagaaattttgttatcaagcccaacgacggtcgtgatgttgaggctacaaatctccctgataacctttatatgatttgtggtgatttcgatctcgaaagagctacccatgacattgagtcgctttctcaaccaccaaaacgtggtgggttggtaccgaccggggcgtattactcacgttatctgcttccaaggacgttcttgagaaaagcggtggaagatatcgaagcagaatatccgggggctactgtattcattgatacagacccttactattccgtggtgacaactcatttaggcctactagcagcacagaatctcataactgcctactcgccgtcttcacaagcaagtcaatatgccgtctatagaagtctcgagttccttcatgcgacaggctacagtctttccgatgacattgtccgtgagaaagctctttatccagagccttggttcgactcaagagatcaacagctttatgtgcccccagttaacgttcctacgttatcgcatgtgataagtaatatgaccacgtccaaagccggggttggtgaacctcgctactctcaaccacagcagttgcatagaagtgttatcaatgcggtcacttcagaaattaataacaaacttacggcattgaaccaaactcacgtacctcaatttgaacatatttgggcacttcaacgattgggccttatctgtgactataacggaatcgacatgagtagcatcgttgccggtggacgctattcgcagccagatagtacagaaatgtaccgagtagaccgctctgctgataatcagttgcagatggatgcctacaatcaaaggattgaagctgttgtaaacctgctataa

SEQ ID NO: 163147 - DNA, 966 bp, Enterobacter cloacae
atgactttaccaaaaagattatattacacgttagataaggcagcatctgagttggggtgcgatatttccgatataatccatttcgttgcaaatggttacgccaatctttgcataaaatatttcgaaacaaatcatcaaccacctaatgaggaacttccacactgggaatctaacttgttgattaattataaaagggtttctgagcttgttaacgaacattattctatggatggtaaatttactatctctgaagatggggcgtatttggctgaggatgatatcaattttgagtatgtaaactcttatgtgaggttgtttggaaagattcatttttggatggaaaaagaatctttaagtgtttgtgatgcgtattcaggcctatttgatttgaaagggttgttacaaatacctaatcatatgatttataataatgaatacaaccttcttaagggcggagagatgcttgttgaagtgttcgagttacctattgataacacacactctattcccgaggggcgtttttttgactatgtcagtgagttttcgaatgatgattggttaatagataaagatgataagttgttaatggataatctgatttcaaataatttaaaaaaattagacggaccagagactatttttcttgatgatttgcttataacagctgacgaacttgagaagcttaaatgctttgataacatgtcacaggctgaaaataaaaatattgctgtttccttagattcaaatttaatggaaagtccaaaagcgttagcaaagtattcagagcttttgcatgcaatgatttccttatgttctgactttaaagatgtagatgttagaaaggttcctgttagtcgtttgatggagatgcttcaacaagtttcagcaaaaaaaggcgttgatctccccgaactacatccccagacattagctaaatacttaggtcgaaaccgaatgagaaagtga

SEQ ID NO: 163148 - DNA, 210 bp, Enterobacter cloacae
atgaacaattttaaacagtcccagcagtctacagaacgagttatccgtgaggcagaatgccgccagttaacaggaatatgccgcaccacgcgatacatgatggaaaaagaggggagctttcccgcccgccgcaagctgggaggtcgcgctgttggttggcttctgtctgaggtgacggcatggcagcagagccgcagcaaagcagcgtaa

SEQ ID NO: 163149 - DNA, 351 bp, Enterobacter cloacae
atgacaaaccaggtacagctttggccggaaggcgagatatttacccgagaggtattgataccgacaaaatacgagccactgccggtggaaatcacttacaccgttccagcattcgatgtggttgtggatacatggcagaacaaagacccggtgaagggctacgccctgtttcgccagtttatcgtcgactgggatcagcaggataagctgacagatgatgtactggtgtcgtttctggtggcttatcccggtactgacgaggctatttttgccggatggtgcgagcacatgaaaaaggtgttggcgaccaatggaaaacaattctctacattgagccagactattaattga

SEQ ID NO: 163150 - DNA, 210 bp, Enterobacter cloacae
atgacgttgccatatttatgtccaaaaagcttcttgaaagatagattaattatgtgtattcatccagaaatattattaaaacccggcgttgttcatgtgttaaacgtggccaaacttgttcaaatctattttttagatcagcatctttcactggaacaaatactggttgctcgttattatcagaggagttctcatcaaagcagtcgataa

SEQ ID NO: 163151 - DNA, 189 bp, Enterobacter cloacae
atgtcatacaaaaatttgatagtagaagggtgtgaagatagagaggctactaacgaccagacttgtgtggagatcgcttatgtcagtagacataacgacaatatttatgatttacggatggaattagataaaagagagactcttgaagctttcaaaaaaattctcactaaagaaattatttttgattag

SEQ ID NO: 163152 - DNA, 258 bp, Enterobacter cloacae
atgcgaagtctcctgactaaaggaatttgtcttgcgttagcgttgtccgccgccgggacggcgctggccgctcagaaagagagccatgacgacaagctcaacgggataaccattttcgctcaaaaagagtctcagggaagccaatgggacagtacaacgggcgaagcaaaatatatggtcagctataaagttacgcttgataacgcgtcgggtaaaagtattgagccgggcggtgatgctgccaacttactgatttag

SEQ ID NO: 163153 - DNA, 456 bp, Enterobacter cloacae
atgacaattaaatttagtgttaataaacaagcattttatgatgaaaatacagtttctatacccgatgatgcagtggttgttacccatgagcagcacatatcgctgattagtggtattaacgatggcgggagacgtgtttacatcgccacggatggggagttaacactgtcagacagcaagccatctcaatggcatacctgggacagtgataccaatgagtgggttatttctacggatgcgcaaattaaattagctgacgacgagaaatcccgcttaacccagggggcaaacgattatataaacagtaagcagtggccggggaaagctgctatgggacggctgaaggataccgaaaaagcccagtacaatttgtggctggattatcttgatgagctggaggcggtagatacatcaacagctccagatatcatctggcctgaggcacctgcgacataa

SEQ ID NO: 163154 - DNA, 342 bp, Enterobacter cloacae
atggcagaaacaaaaatggcgccactactgctgaaagtggacgccagcgaagtgctagctcaggtcagcgtaattctgaaattactagagcttccagccagtgcctttgagggaattcctgagcatgtcgtcgatctgttttttgaccgtgtccgtggcctgattgacaacatcgtccttagtgatttctcgaccacagtcagcacaactgacgccggtgaaatttgtctcaaagtcaaaatcatcgggctggttgaatatctcacttccgcagtcagggcacacggtccgcatggtttgcatgaatatatcctttctactgttggggagattaaagagtaa

SEQ ID NO: 163155 - DNA, 423 bp, Enterobacter cloacae
atgagcgtgaaacgttatgaatttgagctgtatcactgcaatggcggagagatgcttgtcagtgatactggtgattatgtttcctacgatgactacgccgaacttgaagccagatgcgcggcgctggctgcggagctgagtgcagttgaaacaattcacaacgacgccgtgttcatcacagacgaacactatgagcaatgcccgccggaagtgcagaaaatgattcgctcgctggctgtgttgcagattcctgcgtacaagtctttcctggctgaagtgcgagccgccgcggtagacgaagtttgcctgaaaattagcaatgcaattgttaattgctatcaggacgaacaaattgggcttgatgcagcagcaactatctgcggtgaattcgccgcccagcttcgcaaaggagtgcagtcatga

SEQ ID NO: 163156 - DNA, 321 bp, Enterobacter cloacae
atgagcgattcaattagctatgtcgatgattgccacatgagcgtgcgagttgatgagattgtgtcatctgtgccaacttttccgacaaaaaccgcagccgttaatgcgggcgctgaattcgggtggagaactgcaattcgtattgtgcggcgattcgaaaatgtgtgggtagttggtaagaaatgccttcagggagatcactctgccgggattaactttgaagcatatcgattcccgcttcttagatgggagaaagaaggcggtgttaccaaatgccatgttctctctgtgcgcagattcaaaccggaggccgcccaatga

SEQ ID NO: 163157 - DNA, 231 bp, Enterobacter cloacae
atgatgagacgatcaggttgggatgctcgccttgataagcgcgtgaatatcgagaagctagaagaacaaggtcttatcgctgacagtatggaagttagaaaaagtcttgttgagcgcgttatgaaaggagaaataactccagagcagtctagggaagaactgaaacggattcagcgtaatgccaagcgcaatggacttaaaaccagaaaccaggcatggagagagggatga

SEQ ID NO: 163158 - DNA, 123 bp, Enterobacter cloacae
atgctcacctttgctgaacgcataaacgattatttccgcccgagcaatattctccacctcatagcctttgagaaaattgacgttttttgcatattcattgttaaaaaaatcttcaacaaatga

SEQ ID NO: 163159 - DNA, 531 bp, Enterobacter cloacae
atgttagatgtacttatgcgacatgcggttcaaacttttttccagaaagagcgggctaatattctcaatggagtagccgaaagaaatttgtgtgctcgtttagctctttatatcgaattggaaatggagcgaattggcttacagggatattatgctgatgttgaatacaataggaaacaaaatggagctgtaaaaacgataatggatgatgagtaccaaataattagaatcaattgtgacctcatccttcacagtcgtggtgaaattatacagagagataatctgattgcagtcgaaatgaagaaaattgaaaggccgcaatatgaaaaagatagtgacatcaatagactccgggcaatgacgaaaaaaagttatgatgatatatggtcatttgatggagaaacgcacccagagcatgtatgtggttacgaatacggatatttccttgaaattgataacgttaataggagttataatgttatcactgttgttgaaggtgaagtaattaatcaatctaatttcttattttga

SEQ ID NO: 163160 - DNA, 501 bp, Enterobacter cloacae
atgatcgcactgcacgacttcaatcagctgcctgagaaagacgcttttacgctgcttcagccctgcgtggcgatacccggctgggccaacgcgctggtgagtgggcggccttattcgagccgggacgcgttgttcattgcggcgcaggccctgacgcaacgctgggatgaagcggccttaacgcaagccctgagcgcccatccgcgcatcggggaaaagcccgcgggttcagcggcggaggcggcactgtcgcgccaggaacagggcgcggtgaacgatcgcgataccgcccttgccaaggcgctgcgtgaaggtaatgcccgctacgaagcccgctttgggcgcgtctttctgatccgcgcgaaaggacgcagcggcgaggagatattacaggccctgcacgcgcggctggagaacagcgacgcgcaggaaatccgtgccgcgctggaacagctgcgggaaattacgctgctgcgactggaaggagtcattcacgaatga

SEQ ID NO: 163161 - DNA, 246 bp, Enterobacter cloacae
atgaaagcaatgctgagcctaacagtaatcctgcagttttttgctaaaaatattgttgttgaaaactcaagcgaaatgtatctagatataaatttatatgacttagtaacagaattgttatacaaaatggagagtctgaaggaggggcagggtagccccatgtgtaaaggtttttttgctatgcttgtttcttttcgttccaggcatcggaatgcaagatattgccatctttataaaggtgagtga

SEQ ID NO: 163162 - DNA, 486 bp, Enterobacter cloacae
atggctgtaccagtgcatttgattttaaaagatgatggtggatctcagatcatgggatcttgtgacgttcatggacgtgatggaagcatagaactgcgtagcttacagcatagcgtgatcattcctacagacaatttaacaggtaaagtgacaggaagccggcaacattgctcattcaatttcactaaagagattgacagttcatcaccctatctgtttaaagctgttgcaacggggcagactcttaaaagcgctgagtttaatttctatcgtatcaactacagtgggcaagaagaaatttactacaccattacactagaaagtgtgaaagtagttagctttagtcctgtaatgcacgatacccgaacggctacgggtacaggccatatggaagatatttctttagcctacgagaaaatcactcacctttataaagatggcaatatcttgcattccgatgcctggaacgaaaagaaacaagcatag

SEQ ID NO: 163163 - DNA, 735 bp, Enterobacter cloacae
atgtttacttatatgttttggggtaaggtcttgccagagcgtgcgcagttagatatgaacttcaaagttaatttcatagctgataaattagacttaaaaggtgatgcatttataagcattatccttaatcaagttttggtgactttgaagattgataaagaggtgaatatactaactctaaaaagaattgtgagttctttactagataaggaaatggctaagcttgcatttattagagggtttgattatacggttgttattgatagatgtttaaaagaagatttgacagaggattgggtttatggaattgattatccattggagagcggcgttcatactcttaaagaaattaatgagcgaatgaactggctaaggatgctatcagtcggaatggatggtcttcttattgatcgctgtctaaatgattttaaatcagcacttactcatattgaagatgccccattttattgttacagggccattgaatccttgagaaatcactgttcggagcaaaatgatattaatgatgagcccaggtctatacaatgggaatatttccgaaatacagctttgatttcaacggaggatattaatttctttactaaatggtcgagagatataaggcatggtcgtgcagcttatatgtcagatgatgaagaggtgacagttattaataaagcacatcaaataatttcctcatacttggaaaatataagtaaaaaagtggttagataa

SEQ ID NO: 163164 - DNA, 495 bp, Enterobacter cloacae
gtgagcgttaaatttaaatacttaatatgcaccttgctatttgcggctggtgcattagtgtcatttttttatacaattcataagaaaaatgcacttaacaataatacttgctccacaaaagcaatactttaccataatgagatcagagcaaacataagtctggattacatgtatacattaaaaaataaaacaggcatagttactgtaagtggaacatactacaagagcaataagtatctaggttcaatcaggcaggatgtatcctacacctggactgaaaacaagaacaattttaacttcgtatccaccaggatagataaaatcattactagcaatccagtcacggataaagaactgagctatgttttaccagatttctacatatatccagggaaacaaatcgcattcacaatcgtgaatcaaggccctaaaggatatatatttactattggaaagcgcccattatttttatgtaccataatctcccataaataa

SEQ ID NO: 163165 - DNA, 828 bp, Enterobacter cloacae
atgctctggataataaacgataatatacaatttaacccagaaacaaaaaaactggagtcattaagaaaccccgatttagctataactctgactactcctgcatcccgttgtttgactttgttactggaatcttatcctgaggtagttacacagaaatctttcttctcttttgtctgggctgaagaagggatgctggtaccagccaatacactatatcaaaacatttctatcgttcgccgcggtctgagagcggccggtgaaactgacgaattactcatacttaccgtaccccgtaaaggttttcagattgaaaaccgagtcaagatccaaaagttaacaaagggaatagatatttctgaaagtcaaaagaatgatgcatttcatagtgttcccccctctccttcgttgagccttcccttaaataaggatattaaaaaggctaattcaaagagaaacgaaaaatatcctattcaaatctatacttatttattgatggccatgtcattcattcttgggataatgttgttacagttcccatggttttacgacacaagtaaaatggattattttgatagctacaccatgtcaaaagtcgaaaatgggtgccattatttctctaaagatgacaatattgaaaatattgatattttctcaaaatataaatctatgattatgcaaacgggtctggattgcaaaaaatatccctggatatactttgcttcgttcagtgccgctcctgcattttcagcgtttgtgtgcaagaagccttatggctcctcctctcaaagtgattgtatcaccctttatttcagaggttatgatcagtga

SEQ ID NO: 163166 - DNA, 1017 bp, Enterobacter cloacae
atgacttcagagaaaagtggcaaacctgtaggtagagctatcggaggtaaggcacgtgcggctaaacttactcccgaagagcgaaaggcatcatcattaaaagcagctaaggccaagaaacattattcaacgttaccaactgctgaatatggtaatagctctaccgttctcaaggtaggagacattgaaattccatgttatgtcctggatgatgggcgtcgcgtactatctcaaggggggctgcaagcagggataggtatgtccaaaagtggggggattcgcggcgagcagcgcattgtcactttccttcgttctttagacgcaaaaggcatagtaaacaaagagttaatggcacgctgcgagagcccgattgagttccgtggtaaaagtggtgggcgttcaatttacgggtttgaagcggaaatcttagctgatatttgcgatgcagtcttagaagccaactcacaaggccttctggcgcctcagcaaaagcattttgctaagcagtgtgagatcctagttaggggattcgcacgagttggtatagtagcattagttgacgaagcaactggataccaaagagaacgagaaagagatgctttagctaagattttagaagcatttgttgctaaagaaattcaaccctacattactacattcccagcggattactatgaagaactttttcgtcttagaggtttagactacccaccgtctaaccctagattccgtccgcaatacttcggcacccttacaaacgatatagtttataaacgtatcgcaccaaatgttcttgaagagttaaaaaaacagaccaaaaaagcaagtaagggaactaagttgttccaatctttaactccaaatattggccatcaaaagcttagagagcatctttcttccgtggtaaccataatgaaactatcggatgattaccccgacttcattaaaaagatgaacaggcttcatccaaggtttgatgaaacgctacatcttgatcttgaggataaagatagataa

SEQ ID NO: 163167 - DNA, 228 bp, Enterobacter cloacae
atgaaagcaattgataaagctattgatagggcgggttcggctacccggttagcagagcaactagcagtaagcgcaatgactataagtcactggcgaaatcgatacgcgggcgtagtgccggctgaccgggtactagccatctatgcattgactggcgttacacctcacgagctacgacctgatctctacccaaaccccacagacggtttacctaaacaggagccttaa

SEQ ID NO: 163168 - DNA, 585 bp, Enterobacter cloacae
atgaaccctgcaattttcatgaaaatcttcggcgaagtggatatttcaaagctttttcttaatattgaccaaaatgatgacgagctaggatcggttttaagaattcatcttttgtgtgagcgtttacttgatgcatggatagcggctcaccttgacaaagaagatttgtttcaaaattcagcaggggagaaaataaaattcaatccaagctatgggctgaagttggggctagcaaagaagcttgggatgcatcctggtctttgcacctgccttcaaactataaataaaatcagaaatagcttcgctcaccgttatgattgcgagcctcttttagcaaaagacatgcaagccatggctaatatactaataagcatacctcttcccggaaatgttaagagtgttgatgatgttgaattcaaaatcatcgacatcaatgataacgaaataaaaaactactatttcaatgatgaaaaaaccccaaatcgcattcgccttactattgtattttcaaacatactggcaaggataatctcagtagtgggcgataattttaataaaataagcccactaggttttaaatattaa

SEQ ID NO: 163169 - DNA, 150 bp, Enterobacter cloacae
atgacctacatctaccaaatcaagttaaccacccaaacaggtgaaaccttcatgggcaaaatgttacaacgtcagtctgagctgcttaacggctttgtgccgctggcgacagagcctggggaatggctgacttcgcaccggtcgttgtga

SEQ ID NO: 163170 - DNA, 357 bp, Enterobacter cloacae
atggccgaagttattgtgcggaccaaggacgagcttgagaaggcaaaagctaacaaagtccaatatattactatagaaggcgaacttgccacgaaggtgaagcgaggtaaaacgattgctaaagccagcggtgttagccttgcgttattaaccacagctcttgctgcgacaccttttactggtggcatgtctgctcttgctgccgcgccaatagcggcaatgtctggttttgagatagccgctattattgctgcggcttccattgggattaccttaatcatcgcaatttttaaagattatgaagagattgaggttggagagggtaggatgaaactgaaacgtcgtaagagcgattaa

SEQ ID NO: 163171 - DNA, 240 bp, Enterobacter cloacae
atgtcgaaacacattaatgagatgcgcgagatgtcgggtaaaaccgatccggacgaagcgtggcgctgctataagttggaggatggtgcagacgacctatatcttctggctcaatggttcgaatccattcctgattatcacacccaagccactgggatccgcttgtggcttttaattgatgtcatcttaagcagaaccataattatcctgtacaagaatttgatactgaaggtgtcatga

SEQ ID NO: 163172 - DNA, 183 bp, Enterobacter cloacae
atgcatacaatagacgactcgaattttcataaagtagtgctggcaattaaggcaggccccacggacattgctttccaatccgcattagaacttggttttaagtggcttgaagagtatgaagcaaaattgctgaagctcactgatgagcaagcgaggacccttaaagacttgctttcacaataa

SEQ ID NO: 163173 - DNA, 603 bp, Enterobacter cloacae
atgctttacactaagacaccgttttcaaaagcgatttttgagctttttagtggactttctgaacaattaacagagcatggctataattcccctggttgctgcaaggcttttatctttgggggatgtgctatgcatttgcatacaaacatccgcactagtagcgatttagatgcccagttgtcaggagcgccagatgtacaaaggcaagcattagaactcatacgtcacgttgttccagttgattttgatgatgaaacaaaagggccaattgtcttaattttcgatgagacattcaactatgcacttgctccaatgcatgaagattatgatcatagagccatcccactggaagttgacaatgattctccggtatgggtttacctcattagcaaagtagatcttgccataagtaagcttggtcggtatggcgatgttgatcaaagcgatatccaagcgctctttgatgcaggcttatcagttgaagattttcgtcagttagtaacagagcttaatagttacgctgtgggtcaaactggcttgtgttcaaaaatggagcatgctataagtacctacaacgatagaagaggtactcaacatgactaa

SEQ ID NO: 163174 - DNA, 960 bp, Enterobacter cloacae
atgactttaaagattcgcatcatcaatggagtgaaaagtaaatctgtcgatctctttttgttgtttttctatgtggtttgcctcattcttataaaaataaaaagccctgcaagtatatacatatcttatgtattatttgctgcgcttatcatcgtaatatatgtaagaaaagaaagaagtagagagattgttaatctttttacacgctttgaaaatgaactatggattagtaaggtagcaggatggacatctcttattgcatggtgttcttttatattaattccgtttttaattaatataaagtttatttatatggcgaaagtgctccttatgattttcgtcgttctaattgcgataagtagtattcttacaatttttatcctggaaataaacggatacaagagtatcaaaaaaataaggctggtattattttcttttatatcattatgctatgcgttatcaagcgccttctcagcaagtcttttttttcaaatcagcaatctggatttatcttctagcccttgggttgagttcttatggaagcttactgcattcttcgtgttattctcttttattttgcagttagtaacctatgtgatatttgttacgactgcagataaatttcaaggatatacacttttcaatattttgggggctttgatgttactgactttacttatgacgtttgtcactggcagtcttgacgttgttgcctattatgtgttgaattattctactgatgttgagtggagggataatttctcttgcggcagtaaaactttcaagcatccaaatgagaaatattttggttttgatactgagaaatatacagtttatttttctgaccgtaatggtaaatggggttttgatgaaataaaatgtattaaaggcaatcaggggaatgatggctacactgtgaaaaacgtgtcagaacaaactattcctacatgggcaaagtaa

SEQ ID NO: 163175 - DNA, 1872 bp, Enterobacter cloacae
atggatccgttattatctcaaatattaattagtggtactggagaagctgttaaagtaatgactgaaaaactcctttcttccaactggttgagaggaactgaggaaagtataggaatagtagaacagctcgataatcctgaagtacgttcaaagtatattgagaaacatgtttcaaatgctctccgcatgcgaacactccaccagcgtgagcatgacatcttgcttaatgaaatatacttccccttaacaataaaaaacatcgcaaatgatgataacataaccataaatgatgactgtattatatcgcactcccgaatattaaacatcataggtattgcagggcaaggtaaaagtaccatattaagaaaactgttccaaaatgaaataaactctggcaacagaatacctttttttctcgaacttagaaggatagaaaagggatcaattttagaattcttcaagctaacgattgaatcgcttggaattgatattaatcgtaaagaaaatcacgtagagcttttgcttcagtcgggtaaaattgttttgatgctcgatggctttgatgaggttaaagctagttcaagacttgagattttatctcaaataaaagaattgaatgttagatataactgtcctgttatagttaccagtcgaccagaaactgaaatatgcagggaaacatctattaacaatcttatggtgaaagagttagatgaagaaagccaactcggcattttgaaagttctttccactgaagcagaatataatgaaatatctagtgtaattatcgacaacgctcaacttaaagaaacacttaaaactccaatccttattaatcttttatatgtatgctatccgtactgggatgagttaccaagtaacgtagtagagttttacaataagctttatataacactatacttgaaacatgacagaatgaagtcatgggccagagaacgaaaatcatccttaaatactgatgattccctttggtgcttttctgctctatgttacttttccatgaaagatgaagtatttgagttcgatacgaaaacactagccaaatatgcgaggaaagcactcaatgcggcaagcattgatactagacagtgtgaggattttgtcgatgatataattaacattacttgtttgatacagcaagatggtttagaccgctttgtttacttacacaaatcagtgcaggaataccatgcagcctatactatcagtaatcttcctaaagaaataaaattgaaattttatgaatcaatttcagaaagcttagcatcaaatgacaaatttgataatgtgctgaactttctacattacattgataaagatgtctttcaggaacaaatctcaataaaattctttgaaaagcttggcttggcagacatagcaaacgctgaccttgaaaccgtctgtgaacttatattacagaaggcgaggggtttgagtatatatgctgaacccacaagaaataaccagttaacctggcaagaggtggaagtaatatcgcaagtgtttggaatcgatgcgttatacattatgactggtggtcctcgattctatagtgagtctattgatgacccaatacttgaagtagcgaatattgatttcgaaaaagcagaaattgaaaggtatgaatattcaatagttaccaccccgcttgctaaaaaattaaatttgaaaagatacaaggtaaatcttgcaagttttattttagagcatgatttacataatgaagttgcacacagactaaagagaagggccgaagactattaccactcagtatataccccattaatcaaagccaagcaaaaaaggaaaaaagcactgtataaagaatttgaaataaagcgcgaactctaa

SEQ ID NO: 163176 - DNA, 585 bp, Enterobacter cloacae
atgcttttaacaaaaactgcttatgcccatcattgtggagttagccgccagacagtttatggatgggtagccaagggcgaagtagtgatgtccggtaacaagattgacgttgaagctaccaaacaaatgcagcatggcaacgaacattctgagaggaaggactacctggtcctgtctgcttcgcaggtaattaaatggattcataccaatcaggataagtttcttgcggcgcaaagccaggaagaagcgaaacagctgcaggaagccgccacccaactaatttcatacgatatagagtatctgtgtgatgaagacggagaagaggttgtcaggcttcatcacgaacccggcgattgcgagcactatttccatgggttccaccagctgggcaatgctatagccttcatacaagattttatcctggcagattgcctgaggatgaaattacgaggcaaaggagaccatatagatccggagcgggaccgttggtcagtgaaggggctgaaggcattgtgtacgccaactgaaacagatgaagctcgtttaaagcgcttccacgaacacatgggggaggatgaaagttag

SEQ ID NO: 163177 - DNA, 693 bp, Enterobacter cloacae
atggcaccccgtaaaagcatcccaaatgaaattaaattacaattgttttctgcatcagcagggcattgtcagcatcctgattgccataaaccactgtttcctcaggagatgggaggttacaaacatatcggagaaatggcacatgtcattccccatggtgataaggggcctcggcatgaggagagaccagaagaaggatttgaagcagactcttttgaaaaccttcttttactatgccctaattgccacactatcatcgacaaggctcctgaggcgtatcccagaagcctccttctagactggaagacaaaccaccttgtcgctttggcaaatcggcaaggcattgttcgctatgaaaacagagagcaagccagagaggctgttttagccgctatggatgaaaataaagctctttgggcaaaatttgcgcctagtgaaggagagtgttttacctatgatcctgagtctgaaacggcggagttatggtctcaaagaatgcgtagtgtcattttacctaatcattatcgaattcaagctattttaggcctgaacagatgtcatatgacacctgatgagagagatatttttgcgcagtaccttgagcacgttcgtgggcttacagaacgtcatgtctgtggcgtttctggtaaagccataaggtatccaagagaaatggatggaatattagcatga

SEQ ID NO: 163178 - DNA, 645 bp, Enterobacter cloacae
atgaattggcaagtaaattatgcgattaaatatattaatgatgaactgggagattcagggtctgcagtacatgtgaatggagatgctatcagagtttcttttcgcaatagacctgatgtattagcagtaatttcggcttcagaagaaattagtttggaaattgctcagaaataccatcaagatttcccggatgtggattttatatgtgggtatagaaaagagtgtgtatggactggagaggcgataagctatcttacatcagctaaaataggatgggggaatgctggaaccttttacagcgcactgtctgatgacactctcaatactgcctcccataaagattactttttctcgtatcggctcataacgcagatgagagtagtaaaagaaatagagagacagtttgatcgtgtatttattattactttagcaaatactcgaaagttaagagtaggtatgttaactgaatacgaaccgactgccgattctgtgcgcactttctgggagaaatttggccatgttgatattttgtggaatataaatcccaatggtagtcctgctcgaaatgcctatgaggcaggaagtgaacttggctgtgaggtaatgaaatggccggagttaaaagcgttgatcactcaaaaataa

SEQ ID NO: 163179 - DNA, 327 bp, Enterobacter cloacae
atggccggagttaaaagcgttgatcactcaaaaataatgaccgcgagtgaagttgcaaaacatctgttaaataactgcaagacattggcattgtatgagagttttatgtttggttcgtcccttttagggatgggttgtgattacgatatattgattattggaccatcaggtgatgctttgcataaacttaaaggtgaaatgaaacatgctggcgccgaattaccgttagatattttatatatgctgccaatcgaagctgaagaaacacagtttgtgaagaaacaaaaatgcgtatcccttgcatttttagcttcacaaggtagttag

SEQ ID NO: 163180 - DNA, 654 bp, Enterobacter cloacae
atgccttccatcgaaacgtttatcacttttcttctcgcgctgacgcttctggagatttctccggggccagacatgatgctaactatcgccagaggcgtcggtcagggaagacgtattgcactgtttacggtactgggtaatgtatttgtagcgggttttgtgcaagtttcttttcttgtcctggggctggtagccgttgttcatgcctggccggttgcactagatctgttaaggtgggctggtgcggcttatctgatgtggctgggcataaaaatgattgcgacttcaggcacagatacgcggctgcgaaaaacggccaaaatttctgactggagtgccgttaaggaaggcgccctgaacagcctgactaacccaaaatccctgctgttcatgtttgcttttcttcctcagtttgttgatcctgctgcggggcctgtctggctgcaattgcttgttctgggtagtatccagaagctggcaggaattatttccctggggtcagtcgcgatggcatcagggacatttggaaactggctaagtaaacaccctggctttatcaaatggcaggaacgatttacaggtgttgtcatgataggcctcggtatccgcatgttgtttagcgggtctggtgtcgtatcgaaatcttccagttaa

SEQ ID NO: 163181 - DNA, 555 bp, Enterobacter cloacae
atggtattacattccgggggcattgcattcgcaccgggaagtattggtgacagcgatgcactggcgctggtaaaagccagcggtgcgaaaggagcaggtattggcttcggcagtagtgaaattggtgattctggttacggcattttaccttatatgtcggcttatcgtgaaaaccgtgtttatctggatatcagcaccctggaaaacgacgttgaaataacaaacaccagtgaaattactgttcctcgtagcggttctgtggtgctggttaattttgaaacgaacgaaggtcgttcactgatattagagctccagcgaaccgataaagggtttattcctctgggtgcagatgtattaaatgagaaaaatgaatctgtcggcaccgtcggtcaggcgggtcaagcttatgtccgtggcgtagaggatcaaggcgtactgcacgtggtctggggaaatgataaggacagtaaatgtgacgtccgttatcaggttttacaaaacgctcaaaaagtaggacttacaacggtacttaataaccaacagtgccaaatgtaa

SEQ ID NO: 163182 - DNA, 3042 bp, Enterobacter cloacae
atgagaacctttaaactgaatgcaattgcattttctataagtagccttttaacgactggatatgcttactcagcaattcataacacagatggccttttcgatgtcggaagtggcggcgtcatttcgggcagtggtgtaatcgaagaagataagacttataacattattagcacaacgggcgagaaaaataatatttccattgctaataatgggagcattaccgtaaatcatgacggtggctctcctattgtcccagcttggggtgaatttgagcaaggtgattttgccctgacaaatggctctgtgattgtttttaatagcggaacgataaaccttggctcaggctcaactgtaaatacgaaatacacagacttgattgaaggagtattcccttcacgtccggatctacctcttgatatggattataacttcgtttttggtgtcggcatcagtgttcctggtgggacaagcgaagaaaagcagttagagcaagggaaaataattgctgatgaccttactataaatatgagccatcagcgtgataataaaagagtgatgggtctccacgcaagcaaagatgccgcgacacttgaattaactggattgaccacaataaacactacggctttcggaaataacagtaacgcatggggtatatatgtgcgtaagggagctctggtggatgctgaacattttaatatcttgagtaaaggccagagcagcgctatcggtatactagccaattcgacgtctaatcaggcccaaactcaagtaaaatataacaatgcttcaatcaaatcttatgcggatgagtttgcagcaggtttagttattggaagtggagatgttaccgctctgggagacactaatttagatattaacgttactaatgcgggaggggttggtgaaggtattgaattaaattatggcggagatgcaaatgacagtagcttgcgctccacttttaatgctactggagataccaatatctccttaaaatcgggtgctgatgatattgttctgtttggcgcaatgtcaactggtgcatcagaacttacagccaataacctttccatcgcgttcgatacccaaggacaggagaaaattgaaggaacgggcttatttgcttccacggatagtactggcaaacaagaaggtgccggaaaaataacgataaaaggagatcttgatatcgactcatcagatgttaaccataacggctcatggcgatatgtcgttgcagaaaatggcggggatattaccttagatggaaaaattcgcttaggtgttaagaacaatgcccctgatgcaatcgctcttctggctgaaaaagaaggttctcaaatcacgactactggaaaaaacttgcatgtagttggaacaatagtcagtcgagagtctggtttggttaacattgacgcatctgataaatctcgttttatcggaggatttataacgagttcagacggggttagcaatcttgcactatctgatcattcagaatggagcatgacaaaggattctcaactcacaaacttgacactcaataattcatctttgaactttatgcacccgggtttacaacctaaaaatgcatctaccaacgtagctgggtttaagacgcttttagttaattctgatttcgttggaagcaacggttatttggtaatgaatactgcgcttggtgatgatagctctttgacggatcggctgattgtaaatggtgataccagcggtaccactaacgttaaagtgataaatgccggcggaaaaggtgaattaacttctaacggtattgaattaattacagttaaaggtcgttccgagggtgaattcattcagaacggtcgtattgtggccggttcctatgactatgtgttacaaagagggactggaacgaattctgttaactggtatctcaatagtgcactatcacctctaacaccagaggtgacgaatccgccattgccagtaattcctgaagagccagattcagagacggatggagagccggttgttccttggccagagtcaccagacggtacaaagccaaatccagaaacaaagcatgcagtgcgtcccgaagcaggattatatggtatgaacctggcagcagctaatacccttttcaatactcgactgcatgaccgtatgggtgagacgtactatgtcgatagttttacaggaaaagaagcttcaacaactttatggatgagaaatatcggcgggcatacccgacagcgtgatagcagtggccaattgaagttgcaaagcaaccgttatgttatgcaacttggtggtgacgttgctcagtggagtagtgataacgatgatcgcttccacttaggcgttatgggtggttatgctaaccagaaaagcagttctgtaaataagtatactaattaccgagcatcaagcagtattaatggatatagtctcggtgtatatggcacctggctacagtatagtgaaagtaaagaaggcgcttacattgatacctgggctcaatataactggtttgaaaacactatttctggtgaggacatcgcagctgaaaagtacaaatcacaaggccttacagcgtctgttgagtcgggttacacgttgaaactgtctgatataagtgagcgtagcgctctgtttattcaacctaagatgcagctaacctggatgggcgtcaaatcggactctcatacagaggcaaatggcacaaaggttgaaggaaaaggtgatggcaatattcaaacacgagtaggtttgcgtttgtatagtaaaggccataataagctagatgacggtaaagatcgtgagtttcaacctttcgtagaggctaattggatcaataattctaagtcctttggggcatctcttaacggtgacagtgtgaatttagcaggtaataaaaacacaggagaaataaaagcaggagtcgaaggtcagattaataacagtttatcggtatggggaaatatttcccagcaaattggagataaaggctatagcgatactcagggcatgttaggcgtgcggtatagctggtaa

SEQ ID NO: 163183 - DNA, 237 bp, Enterobacter cloacae
atggttattgctaaggaaaataataaagaaaattatgatgctatgatagttgatgaaaaatataatcttagcttgtttttctggatgtttattttgaaaaataaagagtctttatttttttcctctgatgttttaagcaccatttcagattatcagctgaaagtattacttaccaattatgagttattcgatacaaccccttcagagggaatggctgtatcaagtatttatgtataa

SEQ ID NO: 163184 - DNA, 918 bp, Enterobacter cloacae
atgtttgatgattttgattttaacttactaagctctgatgaatttaaagaggattcagtcagagaagagttgattttaccaattattaaagctcttggttataaagcatcgggagatagccgtgtaatcaggagcaaaacgcttacacatccatttgtctcaataggttcacagccaagaaagatttcaatagtaccggattatgtttttctttctaacgaccgaccatattggattcttgatgcaaaggctcctaatgaaaaaataaccaaaagcatgcacgttgagcaagcctatagttatgctatacatccagaaataagggcagaaatgtatgcattgtgcaatgggaatgaatttgttctatatagcatacgggaactccacccaatactcagattttctttaaaagacattggtaatcactgggggaaattatttaggatattaaatccagatattaaagccaatccggatgttttgaattatgcgcctgattttggaattcacattcgaaaaatgggtttggttaaagatggttcttttagtgccccagctataaacactaaatttattagtcgattgagcgaacggtcatacacgtgcatatctacaatacccggagatattgatatggccatttctctggactttaacaaaaaaacattcaaacagctacttaaagtccttccatcagaacaggcaaataaaattagacaggctttaggtcaacaaccttttcatatacatttctctgaaaacgatcctgacgtaaaattcggaatcacaagtaatatcagtaatgaaatacatcacaatgctgaagaaagctacattcctttcatagttaaagaggtatttccttataataactcaatcgacgaatgggaagaattagccaaaagagaaatggagtga

SEQ ID NO: 163185 - DNA, 495 bp, Enterobacter cloacae
gtgtccgtgccggtgaaatacggaagtttatttgctcctgtagcgagaccggcaattgccgtcagcgtggcatcaagcgcctggaaatccttaccgaacgcggtggtcattttggtaatgaagccgttcaaatcagcatcatcaagcacatccagcccacttttgttggcggtgtactgtgccagcgctgccgcgataaaactggcctgccggattgccttatttacctctgcgctggccgccttacctgaagtaaaaccagagagcagggccggaagtccttcccagtcagcctgggacatcacgttagcatttgctgctgtcgcgaatggtttaaagtcatttttagccattacagtaatttcccccatgcgccatcatcaaatccggcgatgtattcgttgtccatgtcaaaaccgaagaatcgattaccttctgacggtgtttctaccgaaggcgtttcaacgtcaccggcccatacgccagcggctttaa

SEQ ID NO: 163186 - DNA, 732 bp, Enterobacter cloacae
atgccagtagcgcaaccaaaaactggagaagtcgtcgctaagcttggtccatccttggaagccggaagaatcttgcttcttgaccttgaaaaacagaagttgttaagagaagcccgtgctttacctataaggtatcaatctttagcacttgaagggctgattctgttgctggatggcaaagtggagcgaggtatcgaggcgattgagacatctttagccatatgcccgacagatcctgttacttggaacaacttttctagcgcactaagcaaccttgggctttactctaaacggcgagagttgcttactcgggctctcgactacgacttcccctgcatggccgaacatgctttaaattttgcggccttctgggctgatggggagattctcgatatggctatcgcaaagcttgagaaatttggtcaaactgaaaaagaaacaaatgtatctgcattgcaaaccgctttagttttgagcaacttaggcgattcaatgagcgacggtttgaaaaaagctgcagatgtattgatgtacattgtggaaagcgaatcactccgtgctaagacctccagtctgcttaccgatggtgagggttatgcttctttttctgttggcatcgaaactgaagacgcagagtatctttcatatcttaacgataaggtcgttgatgagatgattgaaagaggtctggaaacgggatgcagtgtcgcttactttgaggcggtgaactga

SEQ ID NO: 163187 - DNA, 330 bp, Enterobacter cloacae
atgggctttccatcccccgcagcagactacgcagaagcatccctgacaatcaacagcctttgcggcttcgacggcaactgccgcgcgctcgaaacgtcagcgggctatgcaatcatcaatgtcgccattaaaccgaatccgggtgatacggttctggtttcgtactgcgggcgcatggagttcgccgttgtccagggaagggcgcttatcactccggagggagagtccattgaaggggatgcgctggacgacacgacagtgcacggcgtggtgacccacttcctgaatcgcgttggcagccaggacgacgaaccaataccagttatgtaa

SEQ ID NO: 163188 - DNA, 702 bp, Enterobacter cloacae
atgaaacgccgccaattcgatatatccagccgttttctggttgatacagcctttcatcgtcttgagataattcgtgatgatggactctaccgccacttgcgcatgaaacaacctggcacatcctgttattacttcgacgtgatcacctggcccggttatctgaccgtgaccggagacatggggacctggacattttcccgcatcgcggacatgttcgactttttcggtccgtggcaagacggtattaacaccggttactggtccgaaaaattggaggctggcgctggctgttcagcgtgtgagctattggcgaaagagtacgatcatgatgctttttgccggagccttaaagaatcgctgagcgagtatcttgaagattctgaagaggaccagccggaagacgatgactgggatgatgacgacgacgcaccagatagcgataagtcgaaggtccgtgaggttgttcgcgaattatgccgctctgggttcagcaacgactgggaagcgtatcaggctgtttatgatgctgactggcctgacggctggagcgcttgggatatttgcgatggtctgaccttcaaaacgtataccagccatttccgctggatcttgttcgctatcacatgggccatcagcaaataccacaataccaaacttgtcgataaagcgatggggacgtacctcgcagtgaagggagtgtga

SEQ ID NO: 163189 - DNA, 189 bp, Enterobacter cloacae
atgttctcacccataaatgacacctcagtaatggttggaacttcactttacgtaaaaaatatcaagctagtcgggaatggtacatatgacgtcatttacaggattttcgaagaaacaaataacggcctgagcgatatgattgatgagaagaagtgcgcaattatttctgccaacccaataaggacttag

SEQ ID NO: 163190 - DNA, 195 bp, Enterobacter cloacae
atgttgcaacgaatcaaagatttagaaaaagacatgcacggcatcaaaactgaccttgccgtgatgaaatcaaattacgctaccaaggctgacgttagtgacgcgaagttcagcatcatagtttgggtggttggagcgatctttatcgcacaacttctcccacctatcatcaacgctattaaggcagctctttaa

SEQ ID NO: 163191 - DNA, 126 bp, Enterobacter cloacae
atgtttgaaaaaacatcaggaaggagtcgcgtgatggatttggatgaagaaagggtcaatatgatggctcatgcggccgggcgggccgtgatggacgtgtcgctggcagatctgcctgtgacgtag

SEQ ID NO: 163192 - DNA, 201 bp, Enterobacter cloacae
atggctaattacggcacaacaacattaccaagaaccagcgttgtaccagggatgctggtcaggtatcaggggcgcacataccgcgcatctgcaaacgtgggaaaagggttgtatctgttcactctgtttgagcgcctgcgcaccactaacgatgagatagaagtttatctcaaccagcacggtaaacctgccattcattag

SEQ ID NO: 163193 - DNA, 231 bp, Enterobacter cloacae
atgcagacggacgtacccggcgcggtcggtaatggcctgccgatcctcttccgtcatgtccgcaagctgtttaaagacaatgcccaggcggggattgttaccgagacgcgcctgattgcgcgcaaagaagtcccagtaaagggcattgaaggggcaggcctgctctccggtacgctggttgtgctgataccggcacccctgacagtaattactcatcttatgaatatatga

SEQ ID NO: 163194 - DNA, 135 bp, Enterobacter cloacae
atgctcataaatcacattctttttactatttttcttactaacaaaactgtaagaattgccggaagcaatccaaataataaggcgatatcgactaacgtatcctccaatttttctatcccgtatgtgccgaaatga

SEQ ID NO: 163195 - DNA, 510 bp, Enterobacter cloacae
atgttaaatttcttggcaagtaaatcagaattaatcgtttcattttgtgcaatggtaacctcaataatatcgttattcatagcatataaagcacaagttaatcagcaaaagcacaatcaattatcggtaaaaccattggcagaatttttaatcggggattatgaagacgtaatttttttaaaaataaaaaatcaaggaacaggccctttaattataaaagagtttttaacgcagaaagataacaatcatcaccatcagctcctggatgcaataagtcacatcaaacgagatcttgtctgggaccgttttactggaaatattgatggcagaattatttctgtagataaagaaataactcttatacaagcaagctttgaagcaggccaaaatttcattagacaacaattgcgttctgaattatccaatctcgaattaaagttaacatacaatgatatctatgaaatagaacaacctaaaataacaaaaaaacttgattggttttcacgataa

SEQ ID NO: 163196 - DNA, 1368 bp, Enterobacter cloacae
atggctaaatatacggcatatccggagtataaggattcaggggttgagtggttgggggagattcctaagggctggactatcagtaaagtaaagtatcttgctccatttcaggttggttggaccccgccaacaaagaatgatgccaatttcattggtgataatctatgggtcaatatttctgacttaaaagataaatttatttcatctacagcaaaatgtatctctgataaagctgcaaaagaagcatcaatggttatcactcctagggggtctctgctatatagttttaaactatcggttggcgcagtttcatttgcaggatgtgatctttatacaaatgaagctatcgcatcatttttggaccaagctcaactgcctctatcatatttgtactatgcacttccgatatttattattgaaaatgcatcaactaatatctatggtgcaaagatattaaaccaagagcttataaaaaactcatttttacttgcaccttcacgtagtgaagcagagaaagttgctaattttttggagcacgaaaccgcaaaaatcgacaacctgatcgagaagcaaaagcaactgattgaactgctgaaagaaaaacgtcaggctgtgattagccattccgttaccaaagggctaaaccctgatgtgccgatgaaagattctggtgttgagtggttgggggaagttccggagcattggaaaatatgccgcattaagcaattatcaaaacagatatctaaaggtacaacaccgagcaccattggtggtgattttgttgatgaaggtattcgatttttaaaagcagaaaatattggtaagtcaaagtttgttaattcattaccagaattctatattagtaatgacgtagataaacaaatctcaagaagtcggcttcaagaacgggatgtcttagttatcatagcgggtgcaactactggtatggcttcagttcttcaaaaagagatactgcctgcgaacacaaatcaggcagtaagtttcattcgcactaaaaatagtaatcatgccgattgggtctattactggcttgggacggataccatccagaggataataggaatgggcgcggttcaggctgcccagccgaatctatcaatggaagatcttgggaatattccaattttacttccagaacaagatgaacttgcctctatatgcatggaaatagaaaagcagtttgttcaatttgagtccttaatttgtaaagcggaatctgcaatagatttaatgcaagagcgccgcaccgctcttatctccgccgccgtcaccggaaaaatcgacgtccgcgactgggttgccccggacacgcaaaatgttgaggagccacaggaggccaccgtatga

SEQ ID NO: 163197 - DNA, 513 bp, Enterobacter cloacae
atgctccagcccgctccatcgcctttggctcattcccggtcttcgcccgctgctgatgctcggccactctacgcaaccgtgcttgccgtggcaggcaacgcggcggggatgtgtagtggaacggtactctttatcggtattgttaatttaatcaataatatactgttatcggtaggtattcttcaaaacatcttcattcatttctgtatcgttcaatcatctttcttgttcgtttcctttcaggtcttagccgtcggtcattggtcttactgcctgctgtgctactgccagctatggcacgccgtcacggtctactgtctgttacctgtcctactgcgttcactgtctgccgtctgtcatcctgtcggattccatccgttgacgttccgcgctcgcttgtttcggctgcgccgcgctcgctcagcgtatctagcgatactatatcactatagacactttcataattatctaatgattacagtaacttatatttttaattttaaaggctactaa

SEQ ID NO: 163198 - DNA, 915 bp, Enterobacter cloacae
atgaaccgttcgtataacatcgtctggaattgcgccagaaatatgtacatcgttgcctcggagttttcaaaaggggacagcaaagtcaaatcctgcgtacgcgccggaagcgcgatcgcaacgtttatcttgtcaggtgttgtgagtaccgcacacgccagtgacacgacgtttgttgcagtcccgggtaataacaccatcagtggtgaatattcaacgacgagccctaatacctcggcggtatccgcctctggctctgatgtcatcgtcaccgataacggcgccttaacgatatccacaaccggggatgcaggcatggggctatccgtgtcgaatggagcgaaaatcacgctcgatgattcgggatccacaatccgcacttccggggaaggcagtcatgcgataaccattgtcggtgataactcagaagccatgttgaacaaccttaccgtttcgacggaaggcgagatcgcatctgccgtattgtttagctctaatgcaaaaggcaccattgacggggggagctatacggcgacgggagagggttcttatggtgttgagatattgaatggcgcagacctgacgataaaaaacgcgaccattacgacttccgggtatggcatggctcgggctattgttaaccgatatgccaccctttcattagacaatgtgaatataaacaccacgggagattttggtaatgcaggtatatataaggacggtgaattgacctgctcaaacgtcacgattaccactaccggaagccagagctttggtattcaaaactataccaacacatttaatttagcggcatcccacgttgaaacttacggtgagcagtcagttggcataatgaataccggacgcgcagaactcactgacactcatatcgtcactcatggggaaaaatgctga

SEQ ID NO: 163199 - DNA, 525 bp, Enterobacter cloacae
atgaataacactattgtggcgagcgcaatcattggcgtgtcgatgattttttctggccttatcatatcagataacatctccttcaaagatcagcatgtaatcccacttgctggtggcgctgtaaaacttggtgatatatataaggaagagaaactaattagcgcaaaactcatttttaaacagggtgagcaggtgttagtttctaaaggcaatcccgatgactttaacagtgaagttgatgataaaattgctgaaattatcaaagaactaaatgctgggaaagcgaaaaatgacgaacgcattacacctgaaacactcagtgttcttgatgatgcaaaattggagttagtttcagcagtgcgatacaacagtgagcatcaaccaatgtttactttaactcttgaaaagaaagttattccaatggttaaaggttcttacattaaggacttttctcttaagaatattaaacagttcgttgaaagccagcagcaagcctatagtcagtctttgtttataacaaagtaa

SEQ ID NO: 163200 - DNA, 306 bp, Enterobacter cloacae
atggggactgagccaacttatccggtgcagtttcctgcctgggcaaaggtagtgcaaaccagcgccactacctaccaggagacagcccagaccgataacgttattacgcattacatcaccattcgctggcgcagggggatcacgactgattttgaagtggttctgaatgacctggtgtaccgggttaaacgggtgcgtgacctgaacagcaagcgccgatttttgcttctggagtgcactgaacttggtgagaacccggtaaatactggaggtaattccaatggcggaacccttttttcacgttga

SEQ ID NO: 163201 - DNA, 351 bp, Enterobacter cloacae
atgccgccacgcacaccaaaggcctgtcgcgttcgcggctgccgctcgacaaccattgatccatcaggctactgcgaaacccacaagggcgaaggctggcggcagtataagcctgggcaatccagacaccagcgaggatacggtaccaaatgggagttaattcgggctcgcatcctgaagagagataacggtctctgtcaggatcatcttgcagatggtgtggcgaagccagcctcctgcgttgaccacatcaagcccaaggctcagggcggcaccgacgacgattcgaacctgcaaagcctgtgctggtcgtgccacgcccgcaagaccgcgcgggatcgcatcaagtga

SEQ ID NO: 163202 - DNA, 579 bp, Enterobacter cloacae
atggacctgaatccagcaaaaaaagaattattacgagcacaacgttgtgtcagtcgcatgaagtcagctaaatcctatgatgagtatgatgaagcctggagtgatttcttaagtcgtattgaaaatgtttttaacagaatcaaagtggcggctgaataccatcacaagtatccacccttttcatcaaagacgaatcacctaagatcttcagacccattgcttatttaccttaaacaagcccgaaactcagcccatcatggaattgctgatacttcgaaatttgtttctggtggtttttcaattaatccggcaacgcctggtgcagcagttcatatcaaatctctgacaattgatgaaaatggaaacgccacgataatccctggctcaccaattaaattagaactacaccccagcactgttgaggcaatcccttgtcgtaaccggggcgtcacatataaccctccagcgtctcatttgggcgaagtactggaatcaagaagcccagtactcatagcggagttgggtattgagttttacagtgcttatctgctagaggctgagaaaacattctgccagtaa

SEQ ID NO: 163203 - DNA, 180 bp, Enterobacter cloacae
atgaataacgtggaaagagaatcactcaccaaagagttagttgctgcaaatgaggatgtacttaagaagtacggacttaagaatgttaaatggaatgcaacatattttctggatggagatgaagaagtaatggcatcttatgtttccggttccatcggagaaaggtcacaacctgagtag

SEQ ID NO: 163204 - DNA, 243 bp, Enterobacter cloacae
atgaacattaataatgttaacgctgcttcagtcttatgcgaacagctcaaggagcttgaaggtcagcactcactggtcgcccgtggggaagggcttggaatcacgattcagagccgttatcaggatgatgcttttgttgatgcggtacgtcgtagtgttactggggaacttagccgacgcattggtgcggttaagcatcagcttgctgaattaggcataacttcatttaccaaagagcggtag

SEQ ID NO: 163205 - DNA, 318 bp, Enterobacter cloacae
atgaaagttttgatgctcactataatttctgcgttaatttggactaacagttgccttgctggcaatttacaaaaaaacatttccattcaatgtgataacggtgtgaaggcaactttcaacactgagcaactggagatttctagcttgttgctcttaccgttcaaaagagtcgaagaacaagatgataacaaaacaatagtagtttatggcaatgatcgggccgatacaaagatactaattcagtatgcaggtccaaaagtattcttacaagacagaaacaactggattccttgtgatgcctatcgcactgaatcctga

SEQ ID NO: 163206 - DNA, 351 bp, Enterobacter cloacae
atgaattatgttgcagcactgacaacagcattactgcttacagcggcgatcaatctccctgtccaagcggaagatgctcctattgatatttcattaacatgtgagaacaacataacggctgattttcattatgctgatggatatggatttattgatatcaatgccccctatggacatcgaaaaatcaaatcctataaggccagcagcgaagggaagtttagtatcataactttctatgacggtgagtcatttgcgaagatggcattcataaccaacggaggaacaaatcatattgaattaaaaattggtccacagggtgaatggaatacctgtaagggagaaagaggatga

SEQ ID NO: 163207 - DNA, 600 bp, Enterobacter cloacae
atgatacttaaaaaccgtcccgaggccctgctacttctggctgtcgcacttgctctcgcgtcgataggatacgctagaggtattgtgggcttttccgtctggactactgatgctgactacagtttcggtttacaagttatgctgccccgcgtcggacttatgatcagcggctttatgggagcatgtggtgcattcgctgttgcaaataaatgcagtcagtcaaaagatgaactcagtgctatatataagctggcatctatcgttatgttcattattggtgctggccttcttatctacggaatatggaactggaaaacggactatcagctactctatagcatattcgggcctgcatttgttggaaatggaatgttcatattcacacactcctcaaaatggcttaaaaataaagctgtcacatcggctatcacagcgatatggctgataccagcttttgcaatagcgagcattggcaggccctcgccctttgatccaatgcagtttatcgatgtactcaatggcggcactggtctgttcatcctaatggcggcggtgagtggtagtttcgttatgaacagtctgataaagcacccgacttga

SEQ ID NO: 163208 - DNA, 399 bp, Enterobacter cloacae
atgcacacacgaaacgtcaacgtcaaaaccgccgctcaagaatctaccggaagatgtgattcaaacctcaccacgtcccagtttacggatctgttttgctgggtcctggccgcatcggaaggggagccacaaccggtaatttttacgccgccagagaatgccactgagctgacgttaataaatgacgaatgcccggattatatctctgtctgggttgtagatggtcgcccggtggcagctgcaatcccgctggataattttcaccgcgttatttcttcatctcttactaaggaaggtgcgaataagcaggtcatttcttcccaagctgactcgctgattaaaatttcgcggatctgggccgatttttttcccgcaaacacatcgaatcagcctatttag

SEQ ID NO: 163209 - DNA, 981 bp, Enterobacter cloacae
atgagtcatcaacttaccttcgccgacagtgaattcagcagtaagcaccgtcagaccagaaaagagattttcttgtcccgcatggagcagattctgccatggcaaaacatggtggaagtcatcgagccgttttaccccaaggctggtaatggccggcgaccttatccgctggaaaccatgctacgcattcactgcatgcagcattggtacaacctgagcgatggcgcgatggaagatgctctgtacgaaatcgcctccatgcgcctgtttgcccgattatccctggatagcgccctgccggatcgcaccaccatcatgaatttccgccacctgctcgagcagcatcaactggcccgtcaattgttcaagaccatcaatcgctggctggccgaagcaggcgtcatgatgacccaaggcactttggtggatgccaccatcattgaggcacccagctctaccaggaacaaagagcagcaacgcgatccggagatgcatcagaccaagaaaggcaatcagtggcactttggcatgaaggcccacattggtgtcgatgccaagagtggcctgacccacagcctagtcaccaccgcggccaacgagcatgacctcaatcagctgggtaatctgcttcatggagaggagcaatttgtctcagccgatgccggctaccaaggagcgccacagcgcgaggagctggccgaggtggatgtggactggctgatcgccgagcgtcccggcagggtaaaaaccttgaagcagcatccgcgcaagaacaaaacggccatcaacatcgaatacatgaaagccagcatccgtgccagggtggagcacccgtttcgcatcatcaagcggcagttcggcttcgtgaaagccagatacaaggggctgctgaaaaacgataaccaactggcgatgttattcaccctggccaacctgtttcgagtggaccaaatgatacgtcagagggagagatctcagtaa

SEQ ID NO: 163210 - DNA, 132 bp, Enterobacter cloacae
atgaaattaaaacaattagccgttgttggtctgatcgcgtctactctcgctctgtcaggttgtggcgccatgtccactgcggtgaagaaacgtaatcttgatgtcaaaacccagatgagtgaaaccatctga

SEQ ID NO: 163211 - DNA, 840 bp, Enterobacter cloacae
atgcaccttcgctttggtgagactgaatcagcctttgattacatgatggccacccgcgagtatctcgagcaacacggcaagccccttgcgttctacagcgacaagcacggcattttcagggtcaataatggtggttcaaccacaaccggtgttacccagtttggccgcgtgctttctgaactggggatcgaactgatttgtgccaatagtccgcaggctaaaggccgcgtagagcgagcaaatcagacacttcaggatcggcttatcaaggatatgtgtctcgagggaatcagcagtattgaagcagccaacgcctggctggataccttcattgccgacttcaatcgtcgcttcgcaagaccagcaaaataccccaaagatctgcaccgaaccgtggctgaaagcaacgaagagctggatgatatctttgcctggcaggaactgcgtaagctgtctaaaacgctgacattccgctatgacaaaatgatatatctggttgaacctagtgaagaaaatactcgcatcgctggcgaaaaaataacagtcttcgactatccggacggcacgctggcattcaaatacggttaccgttcactcaaatatcaggtgttcgacaaactggaatgtgtcgaccaggggcaaatcgttgataacaagcgtcttggggctgttctgaaactcgctcaggacaagatggacgaactggagcgggacgggaaacgggaccgtagcaagaagatgcctaaaaggcgggcacaggcccgggtgcaggaacaagtaagagctatcaatccggtgctggcaaacccagcggaattcagggccagcctgaaacgttag

SEQ ID NO: 163212 - DNA, 273 bp, Enterobacter cloacae
atgttgattaaagcacgcaggatgttagtattgccggaaggcgaagcgttcaaacaacttacaaaaacatatgaaagcaacttaatacccataccaggaatgtacgttcaagattctatgtggcatgatcagctagaaatttgcgaagttgtttgccaatttaaggaagactgctactacattttgctgcctgacctgaaaattaactcacctaaatcagttgagtttgaaacagaaacactgtctcttcacggctggactgtttcaccatag

SEQ ID NO: 163213 - DNA, 1302 bp, Enterobacter cloacae
atgaatgctgcattcgaaagtagtatagtggctcttaatagtcttagtgactacttattaagtgcaacgaaagaaaatagactcttaacagaagtttatggcgttaaccatccagcattatatcccgcagatcttacagacctagttaaaaacactaagaataaaataatttcatacggaaatatagagctgactgaagatgagattgcggaggtcgagtacattccgttacgggttaactgtgtgctgactaatattgcaccgcatcttttcaatggcaatggaccgcagtcaataccatctttcgtcgctaccttcacatttataaattcatttcttgatgatatgtttagcctgtcaagattagaaaaagaaaatttattacctaaaaacattaccaggagaattaaaaatatagatgtgagaataaaagaaattgaacctaacattgaatctcttgaagctaaaataaaatcaataaatgatgcgcatgcagctgctgaggaaattcctgtagacctcgatgagttgagaaaatataacaaggatgcgcaggatataaaagacaagataagcaaaatacagtttaatctggagggcgtagaagagttaagtaagaagaaattggattcactggatgagaaagaaactaaagcagctgaatatcttgccttatgcgaagaagctattcgagcttcaacatccaaaggtttagctggagcatttgaaataaaagcaaataagcttaataaaagtattcaagcttgggtaggtggattaatactatctttagtgttaggtggatggtttggcttcaaacgttttgaagtcttatcaactgtgcttaagcaagacaacccaaatacaacagttattattacacagttattcttatctttgtttagcatagcagcaccattatggtttgcttggttggcaactaaacaaataaaccagcgctggaagttggcagaggattatgcatttaaatcttcagtggcgaaagcgtatgagggatataaaaatgaagcaaaacgtgtatctgatggtgaatttgaaaaaagactttttgattcagctctgactcgtcttgaggaagctccgttacggcttattaaaggtgatgatcatagtacaccttggtcagagttattaagttcaaagtcgtttcagaaatttttagatgcctctatcgaaaatgttcaatttgttagagggattttaaacaaaaaaattcaacaaccagcgctggctagtaatgatgcagaaactgatatagttaaaaaacaaagtgaactataa

SEQ ID NO: 163214 - DNA, 1233 bp, Enterobacter cloacae
atgaatctatttaaaaatacagctctttttagtgccgaaaggttactacgcacaggtcttggttttttagtgtctgttatgattactaaagcatatggtatcgagatttacggtgaatatgcttattattttgctattgtaaatatatttggcgtggcattatcattaggtttagatgattatttcgtgaaatgtattgcagaaggaaataaattaccatttgcactgcttcatataaggatggttttaagtggattagctttcttctgttgttgtttggtattattttggaaacgagctggaattgatttctggattgtttcacttttatcttggacgtatatctggaattgtttctatttgttgctaattatccttgataaaccaaataaatataaaacaatacttactttgatttgtatcagtttgctttttattttactaaaatttttagtattgaatttcggattcattgtgtttatgtgtactacgttgtttgagacgatggttacaacatttattttatatttatctattaaaggggtttttgaagtaaaaaaaataaatttgcgtgttgttaaatccattattaatttatcgttaccggtcggaatatcgtcattatcagttatgttattttatcggtttgatcaaatgattgttgaacattacttaggtgttaagacattgggcgtatatgctttatccgcaagtatgatcctcgctgcaggttatcttcaatccgcatatgttactggtatgtattcagcgattggtaatgctaagaacaatggaaacaatatagatatacaaaacgcactcttaaaagcctatcgcggtgctatttatatcggtctatttatttatgttgggtattttatagctggtcgatttgttattatttatattttccctgacttatccgtaaaactgatatctatcctagatgtcgggatgctttcaatacttttttcgggattggcagccattaattcgcaatatctcttctttaataattattcaaacaaacgcttaatcagaacacttattgctctttcatttaacgtcgtttggaatatgctatttattcctaagttaggagttatggcggctgtctggggttatttaattacgcaaatgattatgggagtactgttaaatattttcgataagttaaccagggagttattcaaattacaattaaaggccatatttacagtcagggtaaaataa

SEQ ID NO: 163215 - DNA, 276 bp, Enterobacter cloacae
atggttgaaacacatagtgctgaattaataaaccgattaaggctgcgagttattgaagaaccaagtattaaagatgatattaatatcgtctttgttgagaatactggagatggtaaaaagtctggggctactataatgcaatttaaaatagacgaaaatggaatgttcccagaatatcctgatggctttttagatgagtcgactaagttagccgatgcaattttacaagcaagagtaaaaaagaatcaagagttgaaggcgccttgggaaaaataa

SEQ ID NO: 163216 - DNA, 735 bp, Enterobacter cloacae
atgccaaaaatcacattttgcccacatcatattttaaacattgatcctaaccttgatccaagggtaatagaaaagttttatgtaatgccattggttgactttataaaagcctgtaaagtcatggggttgaaagtttctatttcacagactttgcttgagatgtttgaggagctgcacccttggtctttaggtgaagacgtaaaatggaccaagtggctggctgattggcatgcagtattaaaaccgttgttaaatgacatggatattgttgtacatcctataacaggcaatgttagtaaagttagatgtgcaggtatcacaaaaaaagtgaatgatattttttgtgattttataaactatatttctactcatacatttcacgataaaacaaatgaagaggctatttatacacctacacctatgtgcataaattacaacgatttcattaacataaaagaagtgaaagatataaaatttgccaaatacacgtggtacaaaatttatcctgataatcttccatcgcaaggtgattttccttttgtgccccctcaacattggcgtaaaagtgcgaagcctttaaaggctggaaaaccgaattatggttttttggatgataagcggcgtgaatggcattgggataagtttcataaagatcattgggatgttcaaaaccctggtggaggtttagatgattataccaatgtaacaccagaaggtaagattcttcgggagtga

SEQ ID NO: 163217 - DNA, 189 bp, Enterobacter cloacae
atggcgatgagcagactgtcagttgaaatcaaaagcaggtggtggcttcccgtttacatcaggacgctgacactgttctgcgtgatgatgcggtgcgagcctgattaccgaaaggtggctgagttcatcgtaaagcgcggcatcagccagaaggtgaaggcggagccggtaaaatacaaaacggagtaa

SEQ ID NO: 163218 - DNA, 456 bp, Enterobacter cloacae
atgaagaagagttttgttggtttatcagttgtggcgatcactttattcttaacggcgtgcgctcccagtaaggagatgcaggaagccaaaaaaagagatgctgaattcgctcaagccgtaaaaaacattaatcttgaaacagctgatgtaggtagcaaaccagataattccaaagtcatcatagagtcggccattcgcgatcagttaaaagaccccgagtctgcaaaattctctgaattcacagagcctcgcaaagaggtaatggttgagaataggaattttgtgtacggctattcttcctgcgtttatgtgaatgctaaaaattcatatggtggttatacaggcaagcaactgtattgggcgtttatgagaaatggccaagtcctaaggattaaaaacacgaatgatgcttatggaaacataatcttcattggcaggccggtaaattgtagttaa

SEQ ID NO: 163219 - DNA, 654 bp, Enterobacter cloacae
atgaacgatgccgacattgacctgataaacaaaacgttttatccgggctggctgatggtcagccagttgcgcagcggccaggaggtaaaggacggcgaagcgctgtaccgacgggcctgccggtgggtgaacgccgcgcgtgaatcactgaacaaagccgggttcagcaccacgtcctgcgaacatatgctgtatgcgtactgcgccctgatggatgagagcgtgctgaaccgggataaacaggatgacggttaccgccagtggcgaaaagacccacttcaggcgcggtttttccgtaccctgaatgcaggagaagagctatgggagcgtatccgtacggccctgcgcgaacctgcgccggatgtggcagtgctgacctgtctgtaccgcactctgcaactgggcttcaccggccagtaccgcacgcaggatgatgagcggcgtgaggatgtggtgcgcgcgctcagtgagcgcgtaccgccgtttgcgctgacccaggaaacgcctgtggtggtcagggcatcccgcctgcgcagcggacgccggatgtactggctgggctgggcggcgggcgtggtggtgctggcggcgctgtggttcaccttctcctctgtgctgtcgcagatggtggcgcagattgcggggcagggataa

SEQ ID NO: 163220 - DNA, 1323 bp, Enterobacter cloacae
atgagtcagtctccttatgatgatgagttcagggccatccgttatattcagctccgtggtcaggatatcgcgaacgctcacgagacaattaacagtgatatagagagccttaaggcacagttgaccgggctaatcagcggcactgaacttgatgaagcggagcatctggcgcttaaagaacatcatctgcgagaaatgaccccttcagatactgccatgcattctactggtctcaagactatatatagcgaggctaaccagcgtgtatgcggtgatattggactggccacaatactctccacggatgacttggctgttgtagatgcccggatccagaatcatattaaagaatttaatgatcgctacgcactcgacgcctgggattatgctattgcctgcggatgcgggctcatagcatccatgctggatttactttgcgtcagagccccgccaaaacctacggtgagctttacggcagaagtggatggtattttcaataaacaggtgcagaaagccttcaatgccattttgccggaggacctgagtacaaaactctcagatttgttccctataggggcaccagacagttcgatcagcagcgatttagtgggtgcggccggtggcgttttgtctcccacaaatcaccgcttaagagctttgtcacacgatcccgtactgggcattattttcggtataaaggatatgctgaacgggacctgtacggtggttcagaatggacagatcgtggtttatccttccagtaaaggcgttacagacgaaaccaatattttcaggctcatcgccagaatgtttggacacctggcatcggatgttaatgccccctcagcaaaaggaaaccgtggcatggggttaccggctccttttatggggctacttcgtatgcttgaggggatccctgtggggagttctaacttcggcaaacaaatagagtacatgtatgtcaacgggtatgactttcgtcagtttatcgtgacaagtattccgatgagcataatggaagttttgatgcgggttttctatgtggcgaaacaggtatcgctgggaaaaggagcttttggggagaccttactggataccatgccgttgcggctaaatccacgcttccggatgatgcttgccctgggttatggaacttccagtgctgttaacgcaggtaaaatgtatatcaccggcaatattctcaatgcgaattacgcctcctggatggggttggcctggaatggttttcactcactcaagtggtccctttatcagcgacacttaaaggggagcccgcagaattcggaaaaaatcgtacgctaa

SEQ ID NO: 163221 - DNA, 219 bp, Enterobacter cloacae
atgaaactacgtatcacaagagcaatcggcctcagcaagttctcgccacgttgggttaaggttatctgttttcgattgactaaaaacgatattgagcgctccctcgacgctcttctggcccacattgatgaatcagaactcttcccggagcaagttaaagcattaagggaatgcattgccagaattaacttggcaagggggaaggggtttcaagtgtaa

SEQ ID NO: 163222 - DNA, 570 bp, Enterobacter cloacae; identical to SEQ ID NO: 146428

SEQ ID NO: 163223 - DNA, 642 bp, Enterobacter cloacae; identical to SEQ ID NO: 31871

SEQ ID NO: 163224 - DNA, 840 bp, Enterobacter cloacae; identical to SEQ ID NO: 6027

SEQ ID NO: 163225 - DNA, 3390 bp, Enterobacter cloacae
atgtcgctcactatgactccggatggcgtgtttaagccgacgactaaagtgactttagatgatggcactgagattgatttcaaacagtcctgggcaacccctttacgtagaactttacagccggtaagtggacctcaaaaagtcggtgatgagtacctctatatctttgacttaacggatcttataaacgggtcctacgcagcgacttttacagtagaaaatacgagcaaaaactcttctacgtacactgagcctgaaagcaaactgatgctgtctgataacccaacgcttatggttctcaaagatgggcaggtattaactaaacgagcacccgtatacttcctgaacgagattatcgttgcagctttccaggggcaggctggggttgctgacataaaatcagtaacaatagacaacaaagtagtttcgttaacacctacaaattataaaggtatttactacctgccggttggagacgatttagcagttaattcggatcacgagattactgtggtggctgaaaacctttatggaaaaaacgtaaatttcagtaccgtgttcacttatcaacctactggattcactcttaagaatctggaaaaaaacgtaactctttactcgcgcgtacgtcagtatacggacctgcttagtcaaacagctggtgataaatgcactctgtttaccacagaggaaaatgcgaatgcttacctcgcctggtatggggaaaaatcagatgttacagcatgctaccctcagtggaacaatgtccctgatgggttggagttctattttaaaggacgtaccccgggtctaactggattctttaataaaacaggtgagaatctgctcgactatcaagtctatatgattaacgggaagggctctaaagcggtttccgcaaggaatcgccgtactctgaccacacaattaccatacaacccgatcatctcttacaaaaagaataaagtcatagcaggcatcaatccgaacactgctctggcttatacgaccgggggggaggccgctcgaatattagcgaaggtggtaccagctgacgttacgatgatcgtctctcaaaacggctctgaggctgtcaaaacgtcatttaaaaatcgttcctcaaacaacgatgcaacgacctttgtacaaagggtcaaggttgctgctgcaccattgtggacaaagaacgtctttgacatagctgtagaatactcaaaggatccagaattaagaactacagacaccctcaacgtatatacggtgcctgatttcaatattcgagcatcgatggaagtggatgacaaaaaaacagccacatctcttgaagtgcccttaaaggtaacagtggggcgttataacaactccacacgtaaaagtgcatttgaccgtaaaacaatgggagaatgggacgtcacgatatactctcaaaaaagtgtatacggcaaagatccagaaacaggccgttataaaactacatacgaaagaactgcgctgactgaagcattgccggtcaatgatgcgggcattgtcgaaaccaagattaaaattgaaaatatggatctgggtaatatgcgtctggttggtgtggctaaggtcagatcgccattctctgattttgaaatgaaacgtgagaccagtgctgtaggcattcgaatctataaaggtgaggaactggagggtaacctgtcgaaaagccttattatcggaaggatcccacttagtactctggtaagcttcaaatctgccagtacggctaactctgatgcactcgcccccaccgaatggcagcagtcctctgataatggtcaaacctggaccatgctttccgacatgaccggaaagagaagtgtaagtatcaaaaagacagaagtaggaaagtggctttatagggcaaaaatgactaataaattcacatccaagatttcctacacagatgccttaacggtagttacctacaagcagcctaagctcagtatagatgttacagacattcttcagggctcagatatacctgtaaccctgcttgataacgatgaacctataccagcaggcaccgctgaggttctctggtcagaggataaagtcaactgggtgcagggagatacaacttacactgtggcttcagctgataccctaccgtctacgatttatgcccggatgcgttaccttgattccgatgaactggcagaggagtcttcatggaaggaaacgtctgctcggttggcagccgcaaaacccaagcgcctttctgtctcggtaacgggggtttcaaaggtagaggttggtcaaaaagttactttggaaggtaagttcacgaaccctaacagtaagtaccagaatggtaataacgtagttgaagaatggaaaacaccggatggccagacatttaagggctcttcactgtctgttacccttactgagcaaatgttggataaacagggatatgctgcttttgaatacagtgcatggttagcggacaataaggagaatacggtttctacccgtagagtttctgtcaaatcgtgggtttataaatttcccgagatgaaaataagctccaaacttaaatacgacatggcaccgaccaccctacgcgttgcgttgagcggtattaaggatggagactatcctggtgttacttattcccgtgaatggatctacgacaaagagaatctggtaatcactaaagatgaaggtgacaccaaagaatttacaattgaaaatcctggcaaatatacattgatggttgttttcaaagataaccgaaacaatgaacagcgtatcgaaaatacctttgttgtcgatgaacaaacgccaatgaacgttgagatgacacccaagttctctaacaaatatatgagagctccactcgatgtaaccttaaggtcaaacatcaagctatctcattcggcggactcgatagatacggtcacatacaaggtgaacggtgaagtaatacccagcggcaaaaattattgggctcaactgatctcgggtttaaaagaaaagaaatacgagattacaattgatgttgttagtaaacttggacagagaggttcagcatctgttgagtttgatgtcgttaaaaacgcagtgcctaattgtacattgagctacacggaaaccaacctaagctggagctttaccaataaatgtgatgatactgatggaaaaatggttagatatgaatggttcatcaacggcgaattaaggaacgttttcggtagtacggctacactttctaaaaaccttaaccgtggtaagcaggacataaaagtaattgcttatgatgatagtggagactttgcaacacagcacgtgacagttttcggaccggctgaagaggcaagtaagtctgaaaacactgtatcaataccaagcagtgagtag

SEQ ID NO: 163226 - DNA, 255 bp, Enterobacter cloacae
atgagaaaatcaggtttaggtttagccctgttgttttctttaattgctccgattaaagcggtctatgctgaagcgattatgatttcaggaaagctacaggctgatctgccagccgtatcctttgacccggggccgggcgactttgttgcatacgttaattctaacactatcactgcctcaggtgcaggcacagcctgtaatgtaacggttgatgatcgagcgacttcctcttatcaatctttaaagtatgcatga

SEQ ID NO: 163227 - DNA, 498 bp, Enterobacter cloacae; identical to SEQ ID NO: 15298

SEQ ID NO: 163228 - DNA, 885 bp, Enterobacter cloacae
atgttagtaagcataattataaccaccagaaactcaagtagctatattgaaaaaacattagaagcaattgtatcccaaacgtataagtcgtatgaagtgcttgtgattgatgatgcaagtgatgaccttattgagttggaaaaaaaaataggaaattacatcaacaaaattactattaagcttatcagactgtgcactaaaagtaatgcttccgttacacgaaacataggaatcaaaaattcagtaggtgaaattatttgctttctagatgcagatgatatttggtgtgaaaacaaactacaagttgtttccgctacttttgaaaaagttgggaaagagcctttgattgcatttcacaaatcattgaggggcacctacaatgatatcgaaaacgggaaagcaaagatagttcctaagactgggccatctaacaacaatattatcgattatctattaaatgaacatggtgttatacaaacatctaccataagtataaataaaaatgctgcaaagatgttaacatttgatgaatcccttcctcgtcatcaggatgttcagttttgttttgacgcatataaaaaagaagtttcgttcgtttttatagatcagatattatcgcactggattattttagatcgcgcattgaatgcacatacaaagggcgcaactgttgatttttgtgaaaaatggctaaataaaaacagaacccttttaagcgaagaaaatataattaattatcttagtaacgttgtattcttgattgctataaaagaaaaaaatatttttcgaactattcccattagtatatccctactaggttggaaaacagtgattgcttggaaaaaattctgcattctcgcctgtggtaaaattttaaataaataa

SEQ ID NO: 163229 - DNA, 267 bp, Enterobacter cloacae; identical to SEQ ID NO: 162174

SEQ ID NO: 163230 - DNA, 1044 bp, Enterobacter cloacae
atgtcaagtttggtagatgatgtgcttgcccgctatgctcaggttgtagagcatggctatgtcgcaacaggtggacctcgttttaaaagctatgctgtatccaatcttaggggaggtgtcggtaaatctacgatgactttcaacttggcatacgagatttctcgcatcaactcggttcttgttgctgacctttgcccacaatgcaacctgacggaaacgatcctgaagggagccaatgctaaagttacagttgctcatgccttaacacctaaaatgttaggtccagcatttggtgataagccagacgatatttcatatcgtgtaagcaattacatcgaagatttcaaaggtggtaaggcttgctatgcaatccctggagatcctgagctatttgctttcccctcgagcatgtatcagcaactgcaggtggcattatctcgaggagagccaagagccgttgctacgcttcttacctcccttcattcgatcatgatagaggaggctattgaaaaaaaatgcgaaattctcttaatggatacaagcccgttttatgcgggtgggacacaccttgcctggtgcgccgctgaagcactaatcattcccgttcgagttgacgagcattctattgaatctcttaatttgacactggatatgttgtcacgcactgataaagacttccaaatgtggaatagccgcgccggaggtttatcctcacctaaagtcgcagcaatcgttatgacgatggctggttcaaaaagcaaactgtcatcaacaccgggcaaagcatcgcaaatgtatatcgagcgagctgttaagattgctgataaatataagcatctatttgccgatgaagacgtaagcaaagcttttgttgtaactgatgatttcgtttccagcggtcaaattagtggtgccgaaggtatcccaatctctcagcttaaggttggtagattccataccgtgagtgaaggcaagcgattgcaggttaaccaatctgttacgcgataccagaaacaattgaggtatctcgcaagcatcctctaa

SEQ ID NO: 163231 - DNA, 897 bp, Enterobacter cloacae
gtgggtaacgtatccaatttagccgaagccagagaggccagaaggctccagaaaccgcgcacgaatgacggtaaggggtttgccttgctgcaccgtaaaattatggatgtgccgttctacaaggacgctgaggcatcacacttatgggtgcatctcatcctcaaagccaagcacgctcctgagtcagttctcaccgatatcggcgaaatgctggttaaccggggacagttgctcagtggtcgaaacgccctggcatttgaaacaggtctgaaagcagatcgcgttcagtacctgctcagaaagttccagaagctggggatggttagctgggtttcacacggtaaattctctgtttttaccatcgtgaaatatgacgattatcagtcaaattctgtaccagcagattaccagcagattaccagcgcaaagccagatgtggcgcagcttgaagcgaagagtgtaccagcagattaccagcaaattaccacagataaagaagttattaataactctcttactaacgtaagagagagtgcatcagcggaatttattcctgcacagaaaaaatcgtcaatcagctgtgagcaggtagtcgaggtttaccatcgcgtactgcctgaagcccagagcatcaggatactgactgacaagcgccgtgctctgatccgcaccttctggcagaaggccgggaaagtaactcagcagctcgacggccataagttcaccttgagcgactgggaatcgtatctgagctacatagccactaactgccgctggatgctggagaaccgcccagaccagcgcacgggacgcacatggcgccgcaaggctctcgaatacttcctgaacgtggatgtgtatgccaagacgcgcgagggggcctgtgatgacctctga

SEQ ID NO: 163232 - DNA, 249 bp, Enterobacter cloacae
atgaaaggtgaaattcatgatcatgcctgcattaactgctttaccgataaaggcccgtgcctcggcgagtgccacgtaaccgacgttaataaggctcgcagctcctccttcgaagatgtcgttaagccggtaatcaaatggcttaacgataacgccaaccctcacgcatcaatcattgttgattgcaccagtgcagagctcctcaccggggaaattggcgtacacacggaagagttcctgaaagactga

SEQ ID NO: 163233 - DNA, 249 bp, Enterobacter cloacae
atgtccaacttatcagtatttattttcaaagcccttctttccgcgctcagtgttattactattgccttttcaatttttttaattattctcgtatgtgatatgtggactcaggaaggaatcccaccacttgaaaatattaaattcagcattgcattattcattgttacagtaatgctactgattatatgtcagtgttttaaataccttactgacatggcaatagatacgcgaaataagactatccgataa

SEQ ID NO: 163234 - DNA, 1866 bp, Enterobacter cloacae
atggctctcacacttttagcggccaacaatgcacagactgtgctggctgcaggaattagctcatctgctacctctcttactgtaaacaccggaaccgggtcattattcccctctccagtaagtggaaccagcttttttaagttaactctggtcgatgcggcaacaggactcatcaccgagatcgtacatgtaaccgccagaagtggtgacgtaatgacagttgagcgagcccaggaggggacggcggcccggtcctggtcagcaaatgacattgctgcaaatatgatgactgccgggacgataacctacatcctcggaaactttcaacctcttgatgtcacgctgacggcattagcagggttggctaccggtgcaaataagcttccatactttaccggggttgatgtcatggcacttactgacatctctcaaaccggcagggatatcctggggaaagcgagtgcagatgctgtaaatcagtatcttggtctgggaacggcagccaaaaagaacacaggttcaaatccgggcgatgttgttacggcggccagtgaccagccagtttataactccaccttaccgaccagcggttataccagcacagacccaagtggatatatgggaaaggccaccgtcacaggcggcgatactctggtgcgtctcattggcctgattgcccgtaacgtcgctggcaactggacactggtcaactcctatggctcacactttggcactggcggttcaatccagccagaggatgccgcccacgttctggtatccactgatggggccagttacacccgtcgttggtacttttacaacaacggcacgctgaatggcccaaatggcctgtttgcggatcaggcctgggtaaatggtaaggtaggcagtgttagcggtattacttccactggcgaaggtatagatgttcagaaggtcaaaatcccaaacctcccaaatatcggatacaacgctacatcttcccgtggcgttttggctactgctacagctcaatctgactcaattaccaaagcacatagcattcagttaaacaaccccggcagctggggcttgaatatgtcatgggggacgtataccggcgcgtcgggttctgttgctgatgttgctcatctgctttgttccaccgatggcgccgcgtatgttaaaaggtggtggttctacaataacggcgatgcaataggtccggcaggaaagctttattctgagaaaaacaccaccaaagcggctgacggtaccctgaaagcagcatcaccagtggtcaaattgtttgctgatgggcgcgctgaaaccaacgctgaatcggagggctgtacagtcacccgtttgtctgtcggtgagtatctgattagtgggtgcattggactgaatgcagatgcggcatggggtggtacagatggtgggtttgatgtcccaaccgaccgaaacaaacaaccgttaatctggctggactatgagattaaccctgatggatctgttctggtgaaaacctatcaccggacccatcctgattcgccggtgtttgcgcggaatgaacgcgagggatattcaagtggtgatccaatagacattcctaccgaccagtttgtttctgtacgtgttgaaatgccggaagacagcgtttaccgccagaagcaggaggcagagcgcaaagcggcttatgaggcgtgggtagtgatgctgcaacaggcagaagaggatgcatatcaggaagaccagttgcgagagacactccggaaagctgaagaggaacgaaaagcaatggaagaagagtggctggaaaggatgcgcgctgaaaaagaaacagaactgaatgcatccgatattactgaagaagacgaaaagtag

SEQ ID NO: 163235 - DNA, 702 bp, Enterobacter cloacae
atgaagcgattacctcttatggtagctgtactgggcgtcatactgctttcaggctgccatgaccgtcgggcaggtgtgaaaacgctgttaggggacggcgtggagcagtatggacagaagttgccttacgatcactggcactttaattttttctatccagccaacctgccggcactggtgaccatggtgtatctggaggacgggaatatccgtgaaactatctaccggcgacttgatccgaccgaacccagccagggcagcgtgggaacatggagccagcgtgtaggcggttttccagccaattttaatatcggcaaggcgctgccggtcaggatgacggtgtgctgggactcggttatcgacaaaaaggcgtacgaaacggagatctggttcagtcgggagacatggcaacagatgcgcacagcctatcctgatacctatcgtcccggtaatacgtattaccgaaacaaaatgataataggtctggccccggaaggaaaagtcagagtatggctgaaggataaccgtaatcctgttgtgctccagcatcccgccagacagttcacgctgacaggggatgatatgctgatatgcaaaaacgttcccaaccggattgatttcagttacatcgaggctaatggttacgatcccttcatccgcaattttatcgaggggaagcgctatccgtatggtaattggtag

SEQ ID NO: 163236 - DNA, 522 bp, Enterobacter cloacae
atgaataaagtattagctctggttgttgccgctgctatgggtctgtcttctgctgcatttgctgctgacactaccgcaactgctgcaccggctgccgcgcctgctgcaaccaccaccgctgcgccagcaaaagcggttcaccataagaaacatcacaaagctgcagtgaaaaaagaagccgctgcgccagcaaccgcagcaccaaccgagcagaaagctcaggctgccaaaaagcaccacaagaaagccgctaaaccggctgtagaacagaaagcgcaggctgctaaaaagcaccacaaaaaagccgctaaaccggctgtagagcagaaagcgcaagctgctaaaaagcaccacaaaaaagcgaccaaaccggctgtagagcagaaagcgcaggctgctaaaaagcaccacaaaaaagcgaccaaaccggctgtagaacagaaagctcaggctgctaaaaagcatcacaaaaaagcagtaaaacacgaagctgctaaaccagctgcacagccagctgcgtaa

SEQ ID NO: 163237 - DNA, 645 bp, Enterobacter cloacae
ttgaaagccacattacctatattaactggctgcgttgcaattgccctcattcataatacctccgacactgtcaatttccgcggcacccgttttttagataaagcagcaaaaaaagaagtttcagtaaacgtgcgcaacccgttcagtgcaccgtatttaattgaggcggtagtgaaaaatcttaacaacgacgtgcacaaatccccccacctcatcattcttcccttctgtcaccaggaaggcggtaaagagaacctaaagcgccttgttattgcaggcacgcttccccaggataaagagtcgatgtacaggcttcgcgtcaaggcgattccgtttgcgtctaaggaaaataagacgctacagattgccgccgcgaccagtatcaaacccatctatcgccctgacgcgctaaaagatgcccacgttgaaaaacagagcgataaactcaagtggcatgttacaggcgagcggtttgaaggactttcttatgaggcctacagcggcgggaaaacagggattatcgatactgcctcagcagttggcacgccgacgtttaaaattcatacacatactgtgagtatggcctctggcaacatacccggtaaaatcagccctgttattaccatgtcatttgcatacaactga

SEQ ID NO: 163238 - DNA, 2355 bp, Enterobacter cloacae
atggctgctaatatcgggcttcaactcgaatattccactcaatcagttattaacatcacagatggtgcgcgagtggagggcgttgcgacaaacggcctttacctccacggcgctgatggttcggtagtcaatatcgataagtcagccgtatccgggggggagtcaggtatatatgtctttagcgacaacattgcacttaatatttctgactccactatcagcggctcaagcggtggttcaggtctggggtatggcataagatacaatgcctcaaacggcgccgtgatgattaaagacagtaccgtttcctccgccgtgcatggcttctttcttgggagttcctcaaatactggagtggatgttagccagtcaaccatttcgggtggaacttcaggtttcagaatatataacaccggtaatgacattgctactttcgacaatactgtcattaatggtggcaaaggcatctggctgcagggtagcaataaaaacgacacggtaacggtttccaatggttcacaaatcaatggcgtagcaaacggcattctaggtgaagatacggatgcgacaggaaataacacgatcaatgtaaaagggtcatcggttcaggcgtcaaatggtaacggtgtctctctcaaaaccggttatacgctgaacgttagtgaaggctcttcaatcgctggcgataatgccattgttctcactggtgataccgctggcagcaccgtaaacgtgaaagattccaccgtcaccggcaaaaccaatctgctgcagatctccggtaccagcgcggtggatacggtcggtttcagcggctctaccctttccggcgccatcaccacctcttcaggtgctgaccagtcggtgaacatcgacagctcagcctggaccggcagcgccgggaaaaccggtaccggcgcgctggcgctgaatatcagcaacggctcagcctggatcaacaacgcggccacggatgtcgatgccatcagcctgaccggtgccagcaccatcgtgatggacggcgggaatatccacaccgcaagtctttccgacaccgcaccgaccacgctgctggcggcggccagcccgacggcgtcaaccatttactccacgtataacgcggaaaccggttcagccttcgtgctcacggccgacaaggccaccggcagctttaatgccggcgtcacctccagctccagcggtgcggcgggcgatatgaccggcaacaccattgttcaggtgacggacggttccggtgcgaccttcaactccatgcagagcgatgtcggggtttaccgttacgaatcacgcagcgtggctaacgcagacgggtcaaccagcgtgatcctcgataacattacgccagaaccgacgccagacccggcccctggcccgaatccgaacccgaacccggattcacgcacgctctcaaccgccgcgcaggctgtggtgaatacccgtgcggcagcgatgagcatctggagcgacgaacaggatgtgctgaaccgccgtctggataacgagcgcctcaccggcagcagcgacggcacggtgaacgcctggggcagctactacggcggctaccaccgtcagcaggtcgagcagaccagttctgcctacgatcagaccaacaacggctttatgttaggtgctgacaagcgtgtcgatatcgcgccgggcaacctgctgttcggttttgccgccacccgcgggtattcggatgtgaacatgcatgacggcggcagtgcaggtacagatgtcgacagctacggcgcctcactgtatacctcactgcgcctgaacaacggtctgttctttgatgccagcatcaagggcacgcacctgaaaaacgacatcagcgtgacgtctctggacggcggtcataccaccggcgactataacaacaatggcttcggcggagctttcaaaacgggctaccacaagcagtttaatgcctggtatatcgaaccttatgcccagatttcttatgcccgctataacagcgttgactacaagctgaaaaatggcctgcacacgaaagatgacggcagcacctcactgggtctggaaggcggtgtgaatgtcggtacggcgatggcgctgaacaatggcaccgaggtccgtccgtatgtgcatctggccgttgcgggtgaaaccgagaacagcaacaccatggacatcaacggcgaaaaaatcaacgacagcaccgacggttcacgcggcatcgttggcctgggcgcggatgtgaagctcagcaaaaacctgagcggatgggccggggcgaactatgccaaaggtcaggatcactacgagtctccatggcagctgaatgccggtgtcagctacacctggtaa

SEQ ID NO: 163239 - DNA, 522 bp, Enterobacter cloacae
atgaaaaaatatcgccttagcgacgaaacccgcctctggcaatggaaaaacggcgaaactacccgctccgtcacgctgcggcagattatcgcgacagtggattttaacgacgtgacggtcggcacgaaaggcggctgggttgacgatgagcgcgccctcgcgcaggacggcgactgttggatctacgacgaaaacagcgtggtgttcgccggtgccgtcgtgtccggcaacgcgcgccttaccctgccgtgcatcgttagccacgatgcgcatatcagcggcagctgctggctggacggcgcggaggtcagccacggggagcgaataagtgacaacgtcaccattcagcactcctgcgtgcggggcgaatgccatctctacggcgatgcccgcattctgcacaacagcgttatcatcgccgccaaaggtctgacgccggaccatgaccagatcctgcaaatctacgataaggcgaccgtcagccagtcgcgcattgtgcatcaggcgcaaatctacggctag

SEQ ID NO: 163240 - DNA, 1863 bp, Enterobacter cloacae
atgcttgatctgaatgttagcaccctaaaaaatacagtcaccttcgttgtggacaagcaaagtattgcagaggctaaggccgcagcggataaccttcaaaagcacttccagaaaatagccgatcccaagattcgcttccaggctcagaagcagcgcagagctaaagcgcgtgaacaagtagcagatgctaaggtggctccctctaagagtgccagtgatttaaaacaacagcgtcaggctgagaaagcggcaaaagttcaggctcgtgaggctgacaagctacgccgtcgcaatgaaaccgccgatctaaagtttcgtagcgctaatctccagatgaaaggtgtagctggtaagtatgggattgatccggctaaacaataccagtttgtaaagtttgctcacgtgcagacagagcttttccgtaacggtcagatcagtagccagaagatgaactatgagctacgtgaacgtattgctcttatgcgtcgtgaggcagcgttacaggcaaaagtaactgcgtccactcaggcacaggcggcagcactcagacatgctaagaaaaccgactatgcaggggctgcaaagggtattaaagaaaaagggctgaatgttatcggtggcggtgctggctttgttggtgctactgctgcattagctggcggggctggtgtcttgtctcgtatccgtgacaaagggaatgagaacttggacctggtgagaaaatcagccctggttaagactaatcctaacgttgtgaaaactctggttgcatacggacaacaacacggcatagatagcgcatctgtagacaaggtgacggacaacttcaaagacgtgcgcgagcgtttgggtgagtcggtgacgaactccacattcgatcagaagtcagggaaatggaaaggcggcaacggtgctatagataacgttatgaacctgttcggatggactaaagccgacatcgccaaattccagaacaacccgcttaactttatacaggcaacagttaacgaaggtcagcgccgtggaatgtctcaggcatccatcgggcatctgatcgaggattatggggatgacctcgcacactacaccgatctattcctgaataacggtgcagagtttaacaagacgctaagaacccttgttgatagtggtcagacactgaacgaagagcaggtaaaacagacgcttgcatttggtgatttaagtgtggctttcggcaatttgcagaacgggatcgataactctctgctgtatggttttatgaaaggtttcgctgatggtggtgatgacctcgtgaagaacacccgtgttatcacagaatcagccggattgctcggagagggtttaggagatttagctaaacagatgacaggatttgtttctgaaatctccggtgttgtctcggatctaaatgcagggcttcgcgctcgcttccctggttggtttgctgataaagataagccagcggctcaggcggtctatgatggcgtcacaggaagtgctaacggcgcggcagggtggattcaagagcaaacgggttggaatcctcagacagtggctccggctattaaatcgtggttaggtattgatgatcagcaagcagggacagcggcgaacgaatataaccttgcaggtgattctctgcgtgattctgcaatgtcactcaatagcggcaatccaccagcgtataatctgaatcctacatttaacctgacggttgcaccgtccgtaccacttacgatccaatctgacacaggcagattagccgattatgtcgatttcacggcgaaagcatcccaggccagcttcatgcaatcgctcacgttgtcagcgttaagcggtcagtcatcaacaggcgggtga

SEQ ID NO: 163241 - DNA, 132 bp, Enterobacter cloacae
atggggtacgtcatgaaaatcgcgttaagcagtgatagcaagggcgcagccatttaccacacacaacacagctttatttttgatcagttacattgcaacttactgaaattgatcatattgtttatttcatag

SEQ ID NO: 163242 - DNA, 324 bp, Enterobacter cloacae
atggaaaaagaacactttaaggctaatgttcagtatggcgactggaaaggaagcgttgcggctgacgatgctcacgagggtttttctaaataccttagcgttgcaggtattctcaaacacggagaggtggtgaccggtatttcctttcactcagcagagaacttctttgatgttgaggtgtatatcaccgaggatgctaatgtcttacgtagagaacgtgtccagatgaccatagaggagtttttcaaagccttcaaacgtttttcaatcaagatttctcgccatggggaacttgatgatcaagacatcgagttcaaagtgtaa

SEQ ID NO: 163243 - DNA, 147 bp, Enterobacter cloacae
atggctatcgcgaacagacagattcacaaggaatcacctgaggaagagttagatcgcttgctggaagaacttgaactcacacaggagcaacgggagtttatcgagtccatgcggcaagaggacggggaaaataacaacgggcaataa

SEQ ID NO: 163244 - DNA, 267 bp, Enterobacter cloacae
atgggaattaagagctcgctcgatcttgcggacacccatatcgcagccatccgcaaacatttcaacgttgtcctggaaagaacggtgcgcgagttgcgcggcgagtcttgtctcgagcttgaaaagtttgcactgctgaagcaggagatcgtctgtagccgttcattcgacgataggacttcagaatacgagcagatgcgtcaggctatctgcagctatgccgtccgtggtgctgacggagggcgtcaatactgcaggtacatatag

SEQ ID NO: 163245 - DNA, 291 bp, Enterobacter cloacae
atggccatgctggaggagatgaaccctcgcgtcgaaatatactcaatcgacgaggcctttttttacctaatcagggtgcgtaactgccgcgacctggaagagttcgggcatgaactgaaagatactgtgcgcaggaataccggcctggccgtcggtatcggaattgctcaaaaaaagatcctagacaagcttgtcaatcatgccgcaaagacatgggcgggccactggcggcgttgtagacctgtcgaacgccgactgacagagaaagctcatgaaacagctgcctgttga

SEQ ID NO: 163246 - DNA, 180 bp, Enterobacter cloacae
atgtttatggcactcgtttatgaaaaatggaattttataggtttccctggcgcaaatgacatgatcctcagccaactgacaaagaagattcaccgcatttttccagatgcagtagttcgcgtgaagcctatgaggacgttgtcagcgatcaacactgatgcgagcaaacatgagaaatag

SEQ ID NO: 163247 - DNA, 993 bp, Enterobacter cloacae
atgctcaaaataaaggacgtgttttttgacagaaatcacactaacgcaattaaaggtattgcaattctactagtcttgctaggacacattggcttcattcctcatgctggcgcttatggagttgttttatttttaatgctatctgggtttgggcttgtacagtcatatttaaattcaggactgagtaagtttttctctaagcgactgtctaaagtaattatcccatacgctgtaataaccataatttggctattttgttttgggcatcaatacattattgatgcggactactataagttgataatgcttgtccttgggatggatttaagatcgtcattagaccctagtatgtggtacatttcgtttttgatagtatggtatgttgtcttctatttaatttttagtgcaagttcatcaatccatactaaaatcgttttattgtttttgttctcagttgtgatttaccaaaacgctggtatttttccaatgcctgctggcgctgcattgtatgttactgcattccctattggcgcggcaattggtgctgtatataattcagtgaaagaatgcaaggcagataaaaagatactgttatcaggtttttcgtttttatctattttgtcattgttagcgtcggtatatttctatggaagaataagtcttagcgttttcgattactcgtccacgaatgtttcatgtgcatttcttgtaattggtgttacttccgtgctaagaacattgcatattaaattagatgtttttgagtttttcgggaacatctcatatgaaatgtatttgcttgagtatatgtttttgatgaaatgcttgtggttgttgatgttgttgccagaagaatatatgaaggctattgtttttgttgtcgccgtaactttttctgcgtatgtatacaaaatgttgcttttctgggggggggctaagattgggttattaactgataagttaaaggcaatgcaacttacgctcaaatcttaa

SEQ ID NO: 163248 - DNA, 1440 bp, Enterobacter cloacae
atgttcttcaagaaaaaacaaaatataattttcagagattatcaaaactttagttatataactgataatagagattacagttatctaccatctaatggtaataacatcggcgataaaatcttatcagaaagcggaacaatattctatttagctttaaaagattatccgcaacaaattgaagacattgcaaatgaaataaaaaaaagctttgccaacgttgatactgaaacaattgtaaatgatgcgaaggattttctcaattctcttcatatgagtggatttattgctgcaggtaataccaaacaagaatgtctggatggtgacaaaaaattctcatataatattttaaaccaagaaaactccgaaaaaaaatatgaagatgaaaacgaatcaaccattgatttttttgataaacattttcaaggtaaatatcaactaaaaagcgtacatatagaaataataagtaaatgtaacgagaggtgtgttcattgttatattccacacgaaaataaaatagctgccatggaagcggagttattcttcaggataatacagcaatgcaaagagatgaacgtattgcatttgacattaagtggtggtgaacccatgcttcataagcacttctctcagttcttgaggaagtgcaggcacgataatttttcaataaatatcctaagcaatctcacattactaagtgatgatattctaagagaaatgaaaaaaaaccccttacttggcgttcagacatctttatattcaatgaatcctgttattcacgatgacataacccgaaaaaaaggcagctttgaaaaaacaaaagcatccattttaaaacttattaataacaacattcccttacaaatcagttgtcctataatgaaacaaaatcgtgaaagctataaaggtgttttagattgggcaaaagcacatagaatacaaattggggatgattattctatcattgcaaactataatcattccaccgaaaacttatcatgcaggctatcacttgacgaaatagaagcaataattaaagacaaaataaatagcagcgaaaattttagcgaagaacaaataataacaaaaaaagatcctgaagaatttatttgtagtgtttgtaacagctcaatttgtatttcagaaacgggtaacatatatccatgtgcaggatggcaaggctatagcataggtaatataaacacatcggaactagataatgtttggaataattcagcccaagtgaattatttgaggaacctacgtttacgtgatttccctgaatgtttaaagtgtacccaaagagatttctgcaccatgtgcatggtgagaaactctaatgaagataaatgtggagaccccttaaaagtaaataaattcttttgcgatgttgcaagaattaaaaaacaaataatcgtcaacaaaatagggggcgtaaattaa

SEQ ID NO: 163249 - DNA, 702 bp, Enterobacter cloacae
ttgtctcgactaactaatgacgactttaaacttcttgttgattttttaagatgctattccctagagagtgtttctagtaatagtgattttttaaaaaatctaaaaatggttcataaaggatatttttcgttgttggttttttcttcggaacttacattaaaccaagctatcggaattaattctgaagttttgaatagagttaatgaaacctgttctgatataggagcatctattctccttcttgctcatggtatgtataagcaagcaaatatgtcactaagaagttcgatagaaaatttttcaaagtcgatagcttatcctgagtgtaaaaacatcattgaggataaaagtgtattctctgtttttgagaaaaccagaagcatttcattgtttagcacacttcggctgaaagatagatacaccgatataacatctatttattctgatttgtgcgcttacacacacacagcaaatgcgtctaacatggctaacattagtgcgttaaacagcatacctaaatttgatgaaggtaagtgcattgagtttattaatttctcaaagaaactattgacgtgtttccttattatttacacacatctttaccgcgacagattcttcaagttcaatctaagtaatagagatgcagtattacatgtactcagccccaccgagcgcagacacctaatggaagccactccctaa

SEQ ID NO: 163250 - DNA, 525 bp, Enterobacter cloacae
atggataaactaactagtaaagatcttaagacgctcatgaatttcattgaggagttctcttgggttgccaacaaatataagaatattgatgcaaaaaaattaattgaatatatcaataatgttgaaaactcaaaaaaagaagatactttctattctaaatatcgctatgatagcaagttaagggataactctgttaaagagaaatccttccttattggtgcattgcctgcgctgctgatggatcgtgaactatttataaaaaacaaggacttatctgatttcgctgctcttattggcattgaagttaaatttcctgagaaacgttctagagatgagataataggcactataatttgttcaatccaagatgaaaatacactagctaaagtctccgatatcggtgaatttatatacagattgactagtgatgaacgcgttattagcaatataaaaatagaaaagaaattaatgaatgacaactatgactggaatcgtcttattcgtcatctttataatagggggtga

SEQ ID NO: 163251 - DNA, 825 bp, Enterobacter cloacae
atgaaggttattagttttattaatatgaaaggtggtgttggtaaatctacggtagccataaatgtggctcattgcttatccgagaggaatgaaaaaagagtcctcataatcgacatggacccccaatttaacgctacacaatgcgtattaacacccgaggcttatatcaaacacatggaaagtggcggtgacacaatctgtacggtttttaatccagaaagggttgttgtcaactcgattaatggatcgtcgatagttaagcctaaagaaattgaagatataaaaccaattaaaatagacaataatttagatctattaccgggtagtttggaacttcatcgaatcgaggtttcggctggtagtggtttagagtttaaattacgtaggtatttagaatcagtaagggaatcttacgattatgtgttagtggacaccccccctacgccatcaatctggatgtatagcgctttaatagcttctgatttttatatcataccagtaaaaccagaaccgttatccatcacgggaattgatcttctagaaagtattattgaagataaaaagaaaaactttgctctgaaaataaaatgtttaggacttgttttaaacttggttgaggaacacacagttacttatagaaaaacaatggagtttttagagggcagtgataagtggcgaagtttaatctttagatcattcatacctaagaggaccgcgatttccaaagggcagacctcagctgttcacatattaaaattgaaagatagagcattacatatgaaacttgtcagagtcgttgatgagttgaaagagaaagcaagctaa

SEQ ID NO: 163252 - DNA, 726 bp, Enterobacter cloacae
ttgcataacgctgcactcgaactcttcgatgaccgcttacttcacaaaccgtacttttcggacgatctgcatttcggcgtccgtattgccgctaaagaacgcgccattccggcgaaatacatccagttcaaccagcctcacgccatgttcttgttgggattagacgtcgatcgcaacgcccccgcgcccacactgatcaaccccaacaacggacaggcgcatcagctgctcgcgctaaaaacctctattcgcaccgcaccggacggaaaaatgaagccgctgagttacggcgccgtggagaatgcgctacgtaaaaaattagaggctgacgcagggtattcgagattaatcagcaaggatccgaaacatggtcactggaaaattgtcgaatggcagtcggaactctacacgctggactggccggagtacaaccagtggcttcaagcctgctatgagcgggccagtgcttataatttgaaaatttctgtccctctcgatgaaaacgaagttagaggtactgctaaaagcatagcaaaatggactcatttaaaatttacccaagattcatttcctgaatatgtattgaagactcatactaatgagattcaatctttaagaagtaataaaagtaaagaagccggaagaccttgtctgggtaatccatgggaagcaatggaaattagtcgtcgaacctattttaggtataaaaagaaagggatagtatga

SEQ ID NO: 163253 - DNA, 180 bp, Enterobacter cloacae
gtgagtcacgcgattgagtttatcgagcccctgatgtttatccgtcagataaaacagatcgccacggatgaagagctcagcgagctgcaaaagaagctgattgagtcgccggaaaaaaaggctctctcatctagaaaactggtgggctacgctaaatcaggatggcgacgggcaacctag

SEQ ID NO: 163254 - DNA, 648 bp, Enterobacter cloacae
atgaaatcaatcggcagaataatttcgatcttatttctcttaggctctgttaatgcctgtgctagtgagaaatctaacagcctcaaaactccctgggataagtggtatttcgcttttactacaccaaaagctttaccagcacaggttacattgttaaaactgttggatgttgatggttatgcatcgacgtattggacaatcgatcagccacaagggatcagtgtaggtaaatggagtgaacgtaattctgcggggaacacccagtttaataaagccgacagattgccacagataatgatattttgttgggactcaatcatcgataaaaaaacatatcagtcaactttattttttacgcatgatacatgggctaaaatgattagcccttacccagatgttttagagcctgggaaaaatgcatatcggcaaacgatgttaataggattagcaccggaaggaaaagtacgggtctggttgagacaatatggtcattctgacatcccattaaatgatgcaaaaataacgactgtttcaggtaaagaccttgacatgtgcaaaggtgaaacgaactttcctaatggatatgaatatagcgagggtataaagaaatttataaatggtaaacattacccttatggctcatggtga

SEQ ID NO: 163255 - DNA, 648 bp, Enterobacter cloacae
atggaaactatcaccagaataacttcggttttagtacttgtgggttttgctaacgcctgtgtcagtgaacaacctagcagtcttaaaaccccgtgggacaaatggtactttgcctttactacaccgaaagctttaccagcacaggttacattgttaaaactgttggatgttgatggttatgcatcgacatatcggactatcgatcagccgcaaggaatcagtgtaggtaaatggagtgaacgtaactctgcggggaacacccagtttaataaagccgacaggttgccacagataatgatattttgttgggactcaatcatagataaaaaaacatatcagtcaactttattttttacgcatgatacatgggataaaatgattagcccttaccctgatgttttagaacctgggaaaaatgcatatcggcaaacgatgttaatagggttagcaccggaaggaaaagtacgggtctggttgagacaatatggccattcagatatcccattaaatgatacaaaaataacgaccgtttcaggtaaagaccttgatatgtgtaaaggggtaaccaaaagcgattttagttatggttatgatgaagatatcttagggtttataaaaaacaaaaaatatccttatgggtcatggtga

SEQ ID NO: 163256 - DNA, 1155 bp, Enterobacter cloacae
atgagctgggagcgtcagaaatcaacaatatcgactaagcctgaagaaccttcattcatcctgtggatgatgttgggggctttcgcgctggtcggttgtgtactgctgtttgtcctgcatgccaataaactggccgggccacttcaaacatttaatctttgggctgtcaccgcaggccctgcagttctctggtttttctttctgtgtctgcgtggctggatctataacaatgcttttgacagacacgaatttgaaaccaatgaggcagagtatgcgcaacaacagtggatggagtggtctggacgcaatatcgcagtattgcatagtggcatcatgctgcctgcaaatctgacacctcaaaattttattgcagccccgccaacgctgcagcagaacacatctctaactcaacgaatttgtctgccagttcatgagacccatttttcttttctgctcgcagggttaggtccagttcttgcaaagttgccttcagatttaataccagccgtcacgctgctgacagattctcacgatgatcttcaggtattgcaggatgcatttgcccatgcctggcaggcagtcattctggatcgttctgttccacagttgaccgttcgtacgtcaaagaccttcctctcacttgatgagcgaattaaatcaccaacgctggatatggacttaatcctgattcaccagacgcaggggcgggacgcgtacagtgatgccctggccgtcctattgttgacctctgatgatgtcgccacaaaaaataatctttcgctgaatgcacgtcttttgcgtccaatggctcttgatatggcgatttcagaaaaatcgctggatacatttttctcgacacaaactcaggcttgtgccacttccagtattgtcggcgacagagtggaatggggtaaggcattttctgatttactcgcagtgacacaggattatggcggtcactggaaaccagaacaactccactggctggaaaaatatgccgggctcagcggccccttttctccatggataatggcagccgtcgccagcgatatcgtgaacatacaaaaagcagactgtctgatgctttctacagatggtgagcaggaatttattaatacagtgcaaacagggaaccgaaacgatgaccacgggtga

SEQ ID NO: 163257 - DNA, 495 bp, Enterobacter cloacae
atgacaggctgcgttaccgcggatgaggccctcaaccagcaggcgcgcggcaatatcctgagcatggtgccaaacccgcatctggcaagttccgaatggggctggcagattgaccccatcggcctgcgtaccctgttgaacgtgctctgggatcgctatcagaagccgttgtttatcgtggaaaatggcctgggggcgaaggataaaccggatgcggacggcgtggtgcaggatgactatcgcatcagctaccttaacgaccacctggtgcaggtgcgtgaagcgattgatgacggcgttgaggtgatggggtataccagctgggggccaatcgacctggtgagcgcgtctaaagctgaactctccaagcgctacggctttatttacgtcgatcgcgatgacagcggtaacggcacgctggcgcgcagccgtaagaaaagtttctactggtataaagaggtgattgccacgaaaggggcttcgctgaaagcctga

SEQ ID NO: 163258 - DNA, 1581 bp, Enterobacter cloacae
atggaaaacatgggtatttcaaatgaaataatagctgcattatatataaaaatatcctttaacgcacaagaaactagtagattaaccttcaaaagtattttcaagctatcacttatcaaagaaccaagcaggcaaaaaaacaagttaaaagaactaatctcgaaaaatgagtattatcgaattagcactttagccgaagaattaaataagaacaactctcctgataaaaccaataacattttagatttaaaaaatatcataaaaatctgtctttcagataattacattcattatcatatagtaagatcaagccttttcaaagattctgttttgaaactttacaatagttactataaatatcaccacgaaataagacagtacaagaaatcggatgacatttatcagtttattgttgagcacttgcctccaccagataaaaaaacaatatctaaaggtgaggtattcgatatttcccatcgcgttaatcaatattttcatcatagcgaagaatttctacacattgaagaactcaaacaaatcatagaaccaactgatattttataccaaatgcagtataactcattatcatttaaccaagaaacacaccccaacaacgttagtatatactggggaactaatagagcgagcattacaaaaaacgacaaaactcaattcactgatgaaaggaataacggagttgcgctaagtgaacaattacgttttggacgttcacttgtaacgatacccaacgttcatgaatatggtgaaattgaaagaccagcaccttggtggaaaatatggaaagaaacagaagaggatgtttaccaacatataaccattcactctattgaacttatagataaagataagtggcagtcatctctaaaagaaacttatgcaggtaaagaaggaatgctattcattcatggctataattgtagctttgaggatgcactgtacagagctgcacaattgaaatacgatcttaaatttgatggtgctgctttttgtttcagttgggcgtctaaagccaagatcctttcatataacatagacgaaagcactatcgactggagtacatctcatttagaacaatttatcgatttaattactaaagacttaaatttaacaagacttcacatcgttgctcatagtatgggaaatagagcgttactagatgttatcaaccgctggaatggacagaaaaaaaatatccatacggtagtattagcagctccagatgttgatgtagataagatgaaaaacatcgagaaatgcttttctcagttcgaaaatgtaacattatattcatcaaaacacgatattcctgtaaatatttcaggtaaaatacatggatatctaagagctggtaatgctatgccgcctcttgttctgcaaagtacagacactatagatgttagcaatattggaaagccaatattctcacttggccatagttattttgccgacgcgttttcagtctttaatgatttgtattacttaattaaccaaaaaatccccgccattaatagaattggcatatctttcaaaaaggaatggagctgctacgttttaaaataa

SEQ ID NO: 163259 - DNA, 282 bp, Enterobacter cloacae
atgaacaaactatacctattgaacgaagcaacacatcatcaaatcgaatgcaacaccgtttgccaacgtctttattatcaccttgcatctctcaaacgtgaaagcggagcaataaaagccaccgtgaaacacattgctgatggtgtcggtataagtgaaagtggggcgcggtattggatgttattaatgcacgatgcagccgttataactatggaacgtcacggcaagtattacgacattaccgttaatgatgcggtgagttttattactacaccccactga

SEQ ID NO: 163260 - DNA, 339 bp, Enterobacter cloacae
atgactaataagactatggacaccataaacaccctacttaattctttccacgagaattggcaccaacctattcttgaactggttaatgcagcgtggcgtgacagaacgccagaagcgctgttatgcgcgtctaaacagacagagcaggggatagacgcgctggagcagttagaacgcgccatagcgcttctgatgcgctctcaaaatagtacggttacagaacatgaggtttggaaagtgatcgatgagtggacggaacttgcatgttctctaaagtatgtctcacaggaactttccgagctttccatagagatcgccgaagaatacgccataacataa

SEQ ID NO: 163261 - DNA, 1170 bp, Enterobacter cloacae
ttgatatctccctgtgatgtgcctacacatgacgtgctgactgcgggttttccctgccagccattctccaaagctggggagcagcttgggtttgagtgcacgaaacaaggtgatttgtttttcaatgtggcagcaatactcgagcagaagaagccgagcttctttattcttgaaaatgtaccgaatctgctcaagcatgatgaaggtcgaacctggaaagctattcaggagatcttagggttaggtccaaaaggacttggctatcacattgctgctgaacgcttctcaccgcatcattttggtatcccgcagattcgagagcgcgtatatatcattggttcacgaaagcctctaaaagatttttcttggcctcaaagaaatccggtagagacaaccattgacagcattctagatgatcatccagctaatgcgaagccgctttctgcgcaggttttggattgtctaaatgtctgggcagattttttgaaacgctgcccagcagatgttgaattgccttcttatccattatggtcaatggagtggggggcaacatatccatacgaacaggaaacaccctacgctttaaaagaggattatggtattgacggtcttaaggggttttcggggagccatggacgcaaaatcggctacctgcacactctcgaagaacgttggtttgcgttgcctagtcatgcccgtaccccgcagcgaaagtttcccaagtggaaggtagatttcattcgccagaaccgccagttctacgctgacaataaggaatggattgatccttggatgaaaaatatcttgaagtttccgtcgagccttcaaaaattagaatggaatgtcaagggtggtaagcgagatctttgggagtacgttctgcagttccgtgcatcaggagtaagggtgaaacgccgtaacactgctcctagcttaattgcaatgactgacacgcaagtgcccataattgcatggcaacggcgttacatgactccggaggaatgcgctcgtctgcagagtttagacgagttgaaggcgctgccatctactcctactaaggctttccatgcacttgggaatgctgtgaactctacagttgttgagttggttgcccgtgctctgttgggggattttataggacaatctccggtactggagacattaaaataa

SEQ ID NO: 163262 - DNA, 1599 bp, Enterobacter cloacae
atgacggatagtcaaaagtctagccaattaccagctattgaaatccggcccgaagtaacgatgctctcggtgctacgccatctaaattacaagccatggtttgccatggccgagttcgtcgataacgcaattcaaagtttgatcgccaacaacgatcaattgcaattgctgcatggtggtaaatttcaacttaaggtagatgtaaaaatagatacttctggccctggtattattgttattagtgacaatgctgctggaatatcagaagttgattttcctagagcatttcgggcggctcaagtcccagaggatcgtagtgggctttctgagttcggcatggggatgaagagcgcggcatgctggtttgcagagaaatggagtgttcgtaccaaagcaattggcgaatcaatagaacgtacaatatatttcgatgttagaaatattgtcgaaaataagattgaaagtttgaatactgaagttcgtaaggtcgatccattatcgcattacacagtggtaactctccgaggcctacatcacatgccgcaagggcgaacggtaggcaagattcgagaccacctagccagcatttatcgaatgtttctaagagatggaaggctgtcactaaacttaaatggttcatcgctttcatataaatgtcctaaaatactcactgccgttgcttatacatctcccggggtacaggcgcagggtgataacgtagtacctgttgaatggcggaaagatatcgatttggattttggtggaaatcagcgtatcacaggttttgccgcactacgtgaagttggttcaacaccattggccggttttgctttatttcgtcgtgacagattaatagaaggtagcttggacgagagctatcggcctagctatgtatttaaacaaactaacagttatccctatcaaagattgtttggtgaactgcatgtcgaaggattcgaagttagtcatacgaaagatggctttcgctgggaagaatacgaagatatttttctggaatatttgaaagctcaaatcgaagagcccccactgaatttactcgctcaagccgaaaattatcgggcacttccttcgcgaaaaactattgagacacgagctgttgcagcgactgccgctgttgcaaactatgtcgaaaaagaagttgccccactgttgattgaggctaataaatatccaacagatgtagatgagttgccgtccgagcttgttgctggagaactccaggcttctgagcgtgttgtcgaagttaatgatggcaattaccaatggatcataactttgagaacctctgtagatcctgcaacagaggattgggtttcagtcgcagttactcagaaacccactgactctggcgaggacatccggcgtttgactattgatctttcattggctcatcctttttccattgaatttttgggcgtgaacaatgagaacgttgaagttttgctgcgtatttcaacatcgatatgcattgctttgatcttaacggaggatgttttaggagtgtcaccagagagttttctttatcatttcaactacttgatgagaggtgctctgttgagaacctcgttagagaaataa

SEQ ID NO: 163263 - DNA, 2259 bp, Enterobacter cloacae
atggcaacctctatcgaaattctaaaaactcttcaaccacctttacgttgggtgccggaaaaaaaagacattactgaggattttcttcgaagcaaatccaatgatcctaatggtcctagctacgaggatttaactgatggtatgaactctgtgcttcaagaagcacaaagaattcttggtcgttgcttgcctccaacagagccctcagggagagaaacggggttagtagtgggttatgtgcaaagcggcaaaacattgtcgttcgaaacagtaatttctctggcacgagataacggttatggacttgtaattgttctagcaggtacgaagaataatcttcgtgatcaatctgaaaaccgcttgaagaaagaccttggtatcgatgatggagagaactggtatcactattccaatcctaccaataacgttaaaagacagatcgaagataaacttattgcctggaagaaaaatcctacaaaaaaagccattttagttaccgtgctcaaacatggtggccatcttgaaaatttagcttctttagttaaaaagttgtcggtatcagatgttccatctttgattattgatgatgagagtgaccaagcaagtttaaacacgaaggcggctaagattcgtagtggtaaaattgcaccttcagaaatgagtacgacctacgaaaaaatttgtaagctacgtgataaactcccacatcattcatatctgcagtacactgctacaccacaggctaatcttctactggcgcaaactgatttactgaacgcttcgtttgcagaattggtgacacctggtgaggcttatacaggtggaaagtctttcttcggaaagaacacccccctcgtcagagacattccatcagaggaagtacccggacccacgaatatattgaaagcgtcacctaaaagtttactgagtgccttacgttacttcttattagcatgtgctcatcacgcgttgacgcgtgagcgaaagaaagacagaaaccgctcaatgatgattcatccggcgatggctaccacatcccatactcattacaaggattggcttgataagtccttaaagacgctaaagtcattcgtcgaaaagcaatatattaataaaatcgatgctgtaactcagatgtttcaacctgaatatgattcgctaaaaaaaacatatccaaaaattaaaccattgattgacttgatttccgcaatggttgatgaagtattcaacgaaatgaatcatgtcgtggtcaatggaactaaggacgcggagaaaaatattgactggaaagccacgccatactggattctagtgggcggcgctaagctagatcgaggttatacaatcgaaggcctttgcgtgacctatatgccacgccccttggggacttcacctgcagcagatactctgcagcagcgagctcggtttttcggatataagaaatcatatttggggctctgtcgtgtttttgttcagcggaatgtgagtgatgctttcaccgagtatgtagagcatgaggagtttgttcgagaggccttagagaattcgcgcggcaaacctctttctgactggcgccgagattttgtgctcacatcaatgcttaaggctactcgtgcgaacgtaattggactcggtacgcgccgtattcctgctaatggctggatggtgcctgatgttctgcaaagggatgacaatgctgctttagccaatcaagagttgctttcttgcgtggtaaagaaatgggctgctgaatatggtgctcctgtcaacgcagcaggattttctcaattcaaaggaggtaaaaatttatcaccgcacttcatgtttaaccctatcccgttaaaatcggtactggaagattttctgcttgaggtaaaagttaaagatccctcagatgctgaggaacatagtgcgatgttgctcgcgatagccgcacttctcaggaagagtccagatctcaaggccgatgtatttcttatgaacaacttagtagcgggttatcgaacacgatctactggacgtggcgtagaagctaagcaccgctttgcaccaattaaccagtatttcagccaaagtgcagacactgttaatgacaggagtttttgctctaatgaacgtgtctctatccagctacgtcgattcaatttaggtacgacgctgcgtgactccggtagtgccgatattaaaaatataacttggtttgcattacatgtgccaagcaagttgaggacggatttactaatcgaggcgcgccgttag

SEQ ID NO: 163264 - DNA, 975 bp, Enterobacter cloacae
atgaatatcttcgataatttcttaaatttgccttgtgccacgtcagatacgagttttacggcgatccccttatctgcacaccgtaatgactttctcgcaaaaggctccgatggctcccccatttttttattgcacgatgctagcgaagcacaatatagccctagtatgcagttcaggtatttgagtgcacagtttcatgctacttgcagaatccataccgattgtaaggtgctacaagatcaatttgccctcgtttcttgcgatggcgctgtgacggatcttcatgaaatatttgtgcgttgtttcagcgctgcgatcgaggaacttcctattaattctggcacgcgagaactgaatacctgtattcagaaactagtggatctttttagggccctctctcagccaagtaggaaagacgttctgggtctgtggggcgaactctacgtaatcgcaaaaagtggcaacattgcaggtgccatggcaagttggcacgaagatccattcgatcgctttgatttttcatgggagcatggatgccttgaggtgaaggcaaccatgcaatcagctaggcttcataccttttcgcttgagcagttaatgaaccctaaacaaggaattggttatgttacgtcattgctattacaacctttgaccgcaggactcgggttgattgatcttgcgaatttgattgaaatggaagtgaagcattcaccagcgctgaagctgaagctttggagaaatttggctaaggctttaggaggagatttttctgacaaactagataagcgatttgatatctctcatgccgatcgtaatgtcattgtgtacgcgatggatgacgttccaaggcctgaaaaacccaatgatccgcgtgtgatggcaattcgttttaccgcagatcttacggcaacgttgtcctcactcaaaaaaagtgcattgccagcattatgcggcatttttggatcggttttgtga

SEQ ID NO: 163265 - DNA, 273 bp, Enterobacter cloacae
atgattcaggccttcgtcgtttcagccttctgtaatctcatcctctcccttatcgttaacataaagttaatatgcatagtgcaatttattaacaaatgcacgaatatagtgcattatttgcactggtattgtgcatttctccatcactcctctctgcgcacctcattcagaatgtttctttctgtaaaaataactcacgcggaatcatttggttatctcctgctttccaaaaatatgccgaaccaattacgcattggtttggttattgcttaa

SEQ ID NO: 163266 - DNA, 228 bp, Enterobacter cloacae
atggatgttgctgcaaaaaattgtattgcctttgatagcaataaaaaagaaaaggtttatcgcttcattaacaaatattcccatagtgctgttatcgaaatgaatgaagatattgctgaaaatttaataggtgaaggcacaaacgtaatcggagatatctttttatggatagaagaaattgacaaggttcattatgatgaaatggtaagtgtttgtcagaaaagctga

SEQ ID NO: 163267 - DNA, 1833 bp, Enterobacter cloacae
atggtgcaaagcattgacttacttagagactacggaatcttcagaaattacatcaagactgatgcaaaagattttggaaggcttaatttaatatacggctggaatggaagcggaaaatcaacattatcatcgctttttgagcaaatagaaaaccgacagaatactagataccctaattcaaccttttctgtaaaaaccttcgatcaaggatctataacaaaagataacattttcgcaaataatttaaatctgaaagtattcaatcagagttttataaacaaaaacattgactggaataactcagtaaaaagtattttgttgatagctcaagaaaaaattgaagagaagaaaaaattagaggaattgaaaacatctttagataaaaaaacaaaagagtatgttagaagaaaaacagcgaatgataaacttaccgatgaacttcaaaagttcctaacggatgcagctaagagaactaaaacaaatttacaagtcattgataccagtgactcaagatttttaagctataacagaacaaaacttgaaaacttcatcacatcaaatgttgatctaataaaaaaagcagattcaatcctagatataaatgaagtggcaaggttaactaaagcagcaaatcctacacaaaaaccggcaattacaacaaaaattccgagcgtagattcttccctactaaaaaaagcacaagataggttaaatgaactattcaaacaatcagtaacaaataaagttattgaaagtttgaaaaacaatcaagatatacaatcttgggtttttagtgggttgaatttaaatctaggtagtgatagttgtcatttttgcgggaacaagatatcacaagagcgaatcgatgaattaaacgcacactttaatgatgaatacagaaagttctcaggaactctagacaaagctaaaacatggttagcaagccaattcattgcgttagtaaacaacagtgatattgatatttatgacgaacataaagatcttctaaaagaaaagtcatcactccttaaagatgaggctgaaaaaataaacagctacatcaatgaatgggagaaaacattagatgaaaaaataataaaccctttcaacattgatctctttgctgttgaaataccaaataaattatttgttaacttcaatcaaaccgcaaccgaaatcaataagataatagagtcgcataataaaaaatgcaaagactttaaagaggaaactaataaggtaaagtctaaacttgagtcacactatgcggcatcagaggtaaacgcgttcgattacttcaagaaaatgtcaaaccgcgacgcggaaacaaaaaatttactgacaaacgataatgacctaaaaggaataaaagcagaaataaaatccattgaagattcattatcaaatgaaaccatagcagcagatattttcaacaaacatctacacggttttcttggtcgctcagaattatctctccaatttaataaagaaaaaaatggatacgaaatactcagagataaccaaattggacatgcacctaatcttagcgagggtgaaaaaactgccatagctttgatttactttataacaaaactaacagagaatgataataaaatctccgatagtatcatcgttttcgatgatcccgtttcgagttttgattcaaaccatctatttcattcatactcatttataaaaacttattgtaatgatgcaaagcaactttttttactaactcataactttacgtttttcaaattggcacgcgactggttcaacacaaacaataaaaacagaaaaagaaaagaaaaagttgaaaacgcatttttctaa

SEQ ID NO: 163268 - DNA, 570 bp, Enterobacter cloacae
atgagactacaatttgatattgacatagcagatgaagccgaattagccaatataattgggtgtgaaggccatgaacttaacgataaactaaacagttttgggaaagcaagcatactagaatacttggcaatgattcaaggcataaaggtattcaaacgcggcagtgatatccttgaatatagattatttcttctagtcgataatgtttttgagggtaaaatccctgacgagcaaatcataagtaaattgtttcaaactactgcttctgaaagtaagagttatttgagatctattatatcaaaatatcaatatcagctaaagcatgctattgatgaaacactcaaagttattcttttaaatgcagaaattcaagaggctattggtccttacagcatcacattgaatagtgtaaatgttatagaagaattaaataaaaaattagcggcaattgatggcacacttgcatccgttagcaagaagcgtggtagcgtttcaacttatgaggtaactaagtcttcatacgaagcattatgccattctttacaaattcaaccggtgcagcatcaataa

SEQ ID NO: 163269 - DNA, 201 bp, Enterobacter cloacae
atggcaatttcatcgcgaatcacacttctcggcgcactggcgctgtgggcatttcaggcgcaggcggtggacgtcaccgtcgcgtatcaaacctctgcggaaccggcgaaagtcgcgcaggcggacaacacctttgcgaaagagagcggcgcgaaagtcgactggcgcaaattcgacagcggggcgtccgttgtgcgttag

SEQ ID NO: 163270 - DNA, 525 bp, Enterobacter cloacae
atggtatggatcggctttgggtatttgtttgatttgcgtagcgtattcaggaattgtttggtgagaaggatttctgcgggtgatggtttttcttatagcagtgtatggaagtctgtgaaagatgcatccgctttgtgccaagggcggacgttagccaaaagtagtggccctttttataagtgccttatttttaatcaaatgaaagcaaccccctcaagtcacctgaccataataccagcgttcccccgtaaaacactcattacggtcctcacttccataatattcgagagtgataccgatttcctgtatgttagtaggaagaacgagcccccactcagctgcaaggctacgatctttgatcaaagccgaagcaccattttcagaacgatcttcagctataaagccttgaaaatattcttcagaacgataaagacagacctcacttgtaaacatatcaggaagacatacgacagcggtaattcgaggactgtaattcataccagcagtagccgttatgaggtttga

SEQ ID NO: 163271 - DNA, 126 bp, Enterobacter cloacae
atgtgccgaataattggcctgttcttgctgattaaaatcaataaacagacgactaaagaacagaacaaccgtctttttgccatggccatacatttatgtcatgagggtcttgaccgtcagaaatag

SEQ ID NO: 163272 - DNA, 348 bp, Enterobacter cloacae
atgtcgattgatatagatgaattagttaataattttaaagataaagctaaagatatattaaaagtagatgttagctatgtccgtggatttagccaagatcaacttattgcaatagcccagcaagcacagtttgtagccattggaattaaaagtggccaaatcactaaagaaactcaacagttttttttagatagtctagatgatatgcttttaaagtttgctaacactttaagaggactgatgatggttacaattgaaaaactgtggaatgcgttagttcaggttttatgggatgccatttcaaaaacagtatccctagaatacaaaattccaaatataactatttaa

SEQ ID NO: 163273 - DNA, 516 bp, Enterobacter cloacae
atgttcaaaattgcccgacagcaagtaatgcttacattaatttttatatttcttttcatgactgcatcatgcacagtaaagttatcacctgactatgataaggatttatctacatctttgtcatcaattaataccgaaatgatggttttttttgcttccattgatgaaggaactcatagcacaaactttggggatagaaaacaaacctactccaaaataaaaggaaagttagaagctcttgtaatagatttaaagtcaaggccaacaccttccataaataatatggaggcgataaatgccatattaaaagcaaataaaattccaatattgcctaatgatatgaattccccgccaagtgttgagtcagtattatcagtttcaaagacaataaaacaaatggaaagtacagataaatcacaggggttgacatcttttgaaatacaagcattcaagaatcaaatcaacatatacatgtcacaagccattacttatgaaaatttcttgaaaaataaatag

SEQ ID NO: 163274 - DNA, 1590 bp, Enterobacter cloacae
gtgctagtttatgttaattcgtttaattgtgttggtgaggatggtttttttagtgtggtgcgctctgtttgcggttggcttaacagagtttctaaaattcgaatttctccagatgagctactttcacgtcgtgattggaatttagaaagagcctatgtcagaacctacacggcagatcggatggatcccaaaatctattccataatgtatacacatccagataaagatgtaagtggtagacaatggattaccgaaattggtattagaagggaaggtgcaaacacgtttgtatccatattattagaaataagtgatgttagtaccctggttgatgccaagccaatagccaccagaccgtcgcttgtttcatatttaaaaagaaactgcgtgttcgattttgatgttgttggtcagcgagtggattatattaaaagtcaatacggtgactttcaatatttaatgcatgaaatatctagagatgaccggacttaccctctagtttttattagtgaaggagttaatggatttcctgttattccagaaaaattacaagaacaactcatcggccttgctcaggttgttgcaacaagtggtaaaatggactcttgggaaatggaacgtttgctcgggaggaattattcatcttggggtggtgcaataaatatcatttacccaatgaatcagtctggttatatagggacaaagctttttcttccaaagcaaattgatgagattaaggttagtaatatacctgttaacaaccatatattatctgtgataacacattcatttaatggttataataaaaaactacatttatcacctgcaaatgtccgagccaaaagacagcgagatgataacattgcgtttaggcaacgaatgaacgaattaaagggtggggttcagtttgaagctttgcttgatgaggctctgttagagtttgaagagttcaagtcagcaagcgaagagttagaactcgattatctgaaaaggattgatgaaatagatggaaagcatgatgcggttgtagcagagaagaataaaattgaagccgaattagaaagattaaagtttgaggtaaggaattttaatcgtcgggcaacaaatgatggggatgacattgatgttgagaatataatatctttaattagtaatagattaaatcctgagtctgttctaagattattagagctccttattcctaataatgttgagattcttaagtcagcgttcatatcagcacgggaatcttctaaattcaagcataaccatagattgatttatttgttgtataaactttgcacggtgtacctcatcgagtatcttgaaaatggggataatacagctaaagatattcttggcgacgcctattcagcaaatgagtcagagactgtagagcgctccgctacattgtctaaaatgagagagtttgaatatgatggtaataaaataaaaatgtttcagcatgttgggataggaacggcccgttcaaaatctgagactataaggatccatttttttgttgataggaaaaaacgtaaaataataattggctactgtggtgaacatcttgatgttaaatctacttga

SEQ ID NO: 163275 - DNA, 408 bp, Enterobacter cloacae
atgccattcaaaacggctactaaatggattcactcccttgtgacgctttcgcttctgactctggtcattgggtttttctggttaaaccaccagcctaatccgcgaaataacgatgaactacagcgcgtttataaattatccgatagcgtctggctctatatgaccgtgaacaatcagggcggtgcaaccgtgcccacaatctaccgttactatctctcaggggagatagcagggaaagatatcgacattatccatcagttggccatgaagaatcccgtcattgaaggtacaggtacgattaccgcggccagccttgatacaaacggagaagtcaaaatcacctatagcgggaaagttatttcgattgagagcaatatctccgatctccggttctcagttaagccctga

SEQ ID NO: 163276 - DNA, 1020 bp, Enterobacter cloacae
atgaactataagcaaagactctttttagggtggtttttttctggttcttttttcaggtctctaaagcaaaagctgcaaactgaaagggaaagacaggaaaacgaatttgctataacatttttcaatgatgatcaggaattgatcgaattatttacttctaaccttagttcgtttccgaagttaacaaaaggtgatgttggtacgtgtcaaatagaatatataaataaaagggaattgacttatgtgagaaatattatactcggccctgtgtcatttgcagatgatccattattatcaattaaggctagattgaacgaacacaatatattttgcaatgctaatgatactgtaactaagtttatgatcgaacaatacggtaaatttaggaatagtcgaagatgtatttcttatgtgaagagtcttaatggacaagtttgtgcttactgcgataaaggaataattgattgtacagataagcacttttatggtgatttagaccatatacatgacaaatcaacgcatttcttttatgctcttaatatcaataacttatctccttgttgtaaagtgtgtaaccaaaaaaaaggtaaaaatgctctaaaatttaacgcacttgaattaaagcttgatgatgtttttgatttttatattgatgattcggatatggttcgtttgctgatgaatttggagggatcaaataatataaatgttaaactcaaagagaaaaatgatgatttatatccaattcttgaagacttaaatagaatactagccttagatgatagatataaaaactcaggattaattgttggacatctatctcagctaaagcgaatttacacggaaggatatctagaggaaatatcagtattgctaaatgatgattataatccggatgagattaaaagttttcttctgagtgattactctaaaggttcttttgaaaaaatacagcccttgacaaagctaattcgtgatattgcaaatcagttagatttattttccgaggagaaaatttga

SEQ ID NO: 163277 - DNA, 408 bp, Enterobacter cloacae
atgataaatatactgaatgatgccgatgatgctgcggaaacttatttcgaaaatatcgccgcagacctgctgagtgggttgctgggcgcccatgacaatgagcagaatgcgttactgaaggactggctggataaaccctttgagctggacaatgcggcactgttacagcatgcggaatatatctgtggtcgctttaatgccggtgatgacaggcgtctgctgatgcacggtattgatgaacaacttgacgcgatgtccttttccaatagtgaccgacaaaaaccaacagcattcggggccgtcagggcagtcaccacgggccgggatgtggcaaaggttaatgcattgctgaaggtcattattacttattacgaatgcgagttaattaaactaaaaaaggacatgtga

SEQ ID NO: 163278 - DNA, 615 bp, Enterobacter cloacae
atgagagtaaataaattacatttaggagccaggatttccttatttattgtatcctatctccctctcttttttatcatgtgctttgttcaactgtatacctatagtgattatttaaactggaaaggtataagcgttgaatcagtcaccatttttttaaaatactttggtgttgttagttttctaattgcattatcattatttggtatcttcggtttaaaaatcttcttaaataatataaaacgccgatgccagacaagcggaagaacagttagaatcttagatatagaaaataaaaacaatgaatcaataagttatctttttacatatatcataccatttgtatttcaagatttgtctaaaatgtctaatgttgtccctatagctgtattattaacagttactgctttgatatatattaactccagtatgattctcataaaccctacaataagtataaggtacacactctatcaaataaactatctagacatagagagtgaaaaaaaacgcagtggaatgattttaaccaaatcaaaatatttggaagaagatgatcttcttgatattgaagacgtaggtcctaaacttttttacgctgaatctcataaggtataa

SEQ ID NO: 163279 - DNA, 501 bp, Enterobacter cloacae
atgaaatttaataaaagtcaggattacagggctagttgttactataactctgaattattgcttgttgagactcaatcagggctggggatggtcgctgctgatcccctctttcctccccacttattgcaccccgatgccgataatcaaagtatcggtgaagttgttttacaagcgttgtcagatagccggacattgacgattgaagagtgtgatacgttctttgatgttgagaaaggcaaagcacaatatgctgcctggatagcaatgttgatgaaaaaatacggctataaaaccaaacgtgctttattcaaagatatgaagaactgtggtgtacattgtatcaatggttttatcactttttcaccaactcgccatgagaaactagaaggttggggaagaactaaaggtgatggcatagagaatgtcgttctctctgtagatagcactccagccgaaattggcgcgggtctgcgacttgccctcagtcgttgcaaaggttga

SEQ ID NO: 163280 - DNA, 291 bp, Enterobacter cloacae
atggtatggcagggcaccgttaaagatatagtggagctggctgtcgccgaagatcgtcacatccagctctgtgacgtcgtttatctcctgacggaaccagatgcccacgtcagacagaatgcgctgaataaactgcaggtcggtttcacgccactgggttatcagttcacgaaccggataatgccgggaaagtgtaaacgcaaaatccgccccttccagctcgtgagaacgcagcacctgcgccaccacttcaggtacagaaaggttctggtaaatagcacagcgacgtga

SEQ ID NO: 163281 - DNA, 1023 bp, Enterobacter cloacae
atgggaaaggccaccgtcacaggcggcgatactctggtacgactcattggtctgattgcccgtaacgttgcgggcaactggacgctggttaactcctacggctcccactttggtacaggtggctctattcaaccagaagacgccgctcatgtgcttgtttcgactgatggcgcaggttatacccgccgctggtatttttacaataatggcactctccgtggcccagccggtgattttggcgatatggcgtgggttaacaacaaagtcggcactgtcgatggtgttattactcttggtaacggtattaacgtcaaaaaggtcgctattcctgatttaccattacttgggtatacggatacttcatcacgcggcattctggctacggctaccggccaggctgattctgccaccaaagcccatagcattcagctgacaaaaccgggagcgggtggctgggggctgaccatgtcatgggggacgtatgtcggggcttccggcagtgttgatgatgtcgctcacctgttatgtgccagcgatggtgcggcattttccaggcgttggtggttgtacaataacggcgaccttgttggccctgccggaaagttttactcagaaaaaaacaccatccgcaccgctgacggaacgcttaaagcagcgtcgccggtggttaaaatattcagtgatggccggtttgagtcaaatgcagaatcagaaggtgcaagcgttgaacgtctggcggtcggtgaatatctgatcacaggttgcaaggggttaaactcagatgcggcatggggtggtattgatggtgggtttgatgttcctgttgacaggaacaagcagccgttagtctggctcgactacatggtgaacgctgacggctctgtgctcgtgaaaacctatcaccgtacacacccagatgctccggcgttcgcccgcaacgaaattggcggcaagaaagacggagaccccgttgatattcctgccgaccagtttgtcagtgtgagggttgagatggtgatgtag

SEQ ID NO: 163282 - DNA, 429 bp, Enterobacter cloacae
atgtacttattttcagcaaaaacattagctttttatcctgaacagatgaaagagatctatcaggaagctggttcgctacctgcggatgttatagaggtaagtgacgaactgagagacaaatataacgtccagccacctgataattttaagctgggtatcgacggtaaaggcttgcctgcgtgggtggctctttcgaatgatgagcttgttagccgcgcgaatgcagccaggcaaggtttaatacagaccgctaactatttcattaacgataagcagtggcccggtaaggcggcgataggtcggctgaagggtgacgaactggcgcagtacaatctgtggctggattatctggatgcactggaagcagtcgatacctccaacgcaccagatatcgattggcctacatcaccatctcaaccctcacactga

SEQ ID NO: 163283 - DNA, 810 bp, Enterobacter cloacae
atgatatcatgggttatatttagcgcgggtttattgctgagcttatattatctttactacactcctgttttgagtgggtttggtgagatacagtatgctaatctttccaacatttatggtagattaagttggctgatatttagtttgttatgtgtgccaattggattaactctggtaaacttatctctttcttttcttctttctgttatcgtggcaagagtgtcatgtctttatttttataatcgtaatgtatatgtaaaagaaataaaaaagacgaaactcgaagagaaatctacaattccttatatttcaggtagtgctataaaattaggtttagcaacggcagggaatgtggttattaaccgcgctccgattataattgcgggcattgcatttagtctaagtattgcaggtgagtttacattaacgatgcaaattttcttggcgattatttctgtgagtaacgtgtacttggcagtaaaaataccaagattatcccagttggttataaaaatcacaggtgctaaagttggttttttagaaacaaaatatattttattactaggttttgttttgcttttagatttgaaccataatatatgtgcatcaattttgactgctggaaataaaattccatttgttatacctgtcataatgtcaggtgtcttaatcacaattactggttggttgtttgctgtgttttttaatatgggggttattggacttattttagcccaagggattattcaattgagttataataattggcgatggccgctcatggtatatgaagaatacattagaaaatga

SEQ ID NO: 163284 - DNA, 207 bp, Enterobacter cloacae
atgattcaaaactatttcaaaagtagtgacgcgcgcgtaagtgatgctgagcattctcgaatggtagctacagctgcggctttagaaattataaaagctgctatttctgcacctactaatgcaaaaaatgtatcttatgaccttgaagaggcgataaaactgcttcctaagctaactgatgccattcaaaagacgatcggtaagtga

SEQ ID NO: 163285 - DNA, 270 bp, Enterobacter cloacae
gtggggatcgaaacgataatcgggctggccgcgttgtttatttccgctattgccggcgcttttggccttggccatattcgcggcacaagcaaagcggaagcgaaatccgatcagcagcgcaccgaagataacgcagcggcaacggtcgcagcagccgaacgccggatagatgcaacgaaagaggccagcaatgtacagcagactgttaaccatatgcctggcgacgatgttgatcgcgagctgcgggacaactggacccgtaagggttga

SEQ ID NO: 163286 - DNA, 546 bp, Enterobacter cloacae
atgctatcattagaagaagttgcccaacttacctataacacgcttcagtcctatatggaccagcgtggaattgaattagccgtcggacctttaagcgatattgatgccggatcacttgccagagcttatggtgagctgaattgggagtggtacatcactgaagttggtaatcgtgatgattgctttagcctttgtatcaagcttgtgacatcacaagaaaacaaagttgttgagcattaccctgcgggtgtggcattgtgtacctacttcatcgattcaaaaatctttgaagtacatgcagttgaaaacttcgtaaaagatacagaagatcacccattgcgtcgcaagatggttttgtatactctatacgccgcattgatcttcatgaaccaggtagatggcgaggcaatccgcattatcgaaccggttgaagataaaattgaatactaccgaagctttggctttgaaatgttggcagacggttcaaacgcaatgcactgtgactttgataagtttcaacgtgttcttgcagaacgtacaggttaa

SEQ ID NO: 163287 - DNA, 141 bp, Enterobacter cloacae
atgaagccagatacgatagagacactccgtatgcgctggctgcgcctgcgaatttaccgccgcccgggttccgtgctggtggattaccgcattcttagaaaccttttacgcatttaccagatagcaggagccgcagcatga

SEQ ID NO: 163288 - DNA, 612 bp, Enterobacter cloacae
atggctaagttaccgcgccgtaagtgcgcatatcagggttgtcgccagtggttccacccggtacgcgaagggcaggtggtttgttgcttcgagtgcgccagcgcgatcggcaaagaacagactgcaaaagcccgtgaagccgctaagcagaaggaggctcagcgtcagcgcaccgaagagaaggcaggtcgccaacggcgcgctgcgcgtcgtaacgagctgaagccgatccgtcactgggtgcagatgactcagcgtgctttcaacgactggcggcgtgaaatgctattggccgccgggcatggctgcatctcctgcggaaccaagaccgcctttgcttggcatgccggacattaccgcaccacggccgccgcaccacagcttcgctttaatccggacaatatctggctccagtgctccgcctgcaacgttcataaatccgggaacatcgaggcgtaccgtgctgcgctggttgaactgatcggtgaagagcgcgtgctggcgctggaatccaacaacgtaacccatagatacacccgtgaagagctggacggcatccgcgccaaggcccgggcagaccttcgggcactgaaacagcaggaggcagcatga

SEQ ID NO: 163289 - DNA, 207 bp, Enterobacter cloacae
atggggatgaagcatacctggttccattataccgattgcacaacccagcaggccgaagaactcatggcggaataccagcgccgcggcgttaaggtagagcgcagcctgaactccgattatctcacctggacagtcagcgcattcctccctacctccaccaacccgccgcgatcagataaccgctggcgtaaccgggtatgggagtga

SEQ ID NO: 163290 - DNA, 657 bp, Enterobacter cloacae
atggaatcagtaatcgacgcattgaaagcaatgggcaaagcaacctatctcgatgtagcagcacgcctggatatcgaacccgtagaggctctgaaaatgctgcgcgagcagaaggaggaagggttgtgcgatttctacgatggatcatggtcggtcggtaccgcgaaggagcagaagccgaagcgcatcagaccaaagcaggtatcacctctggttgagagggtgttggcagcaatgcaggggcagggagccatgagctccaatcaggttgctgaaaagctgggtaaaagcccgcgagccctgaatgcatcgctgggtgcaatgtgcaaagacggtctggttatgcgccatgtggacgggaaaaacatcacctggagcctgaaagctgacagcgtgcccaccccagcaagcaccgctcctatcatagaaaccaacgacacagcatccgcacctgtagaaaaaaccactgcccaaatcgttgaagaaatccctgcttacaccagccgtccggatgatctgattattccgtcgtcccgttatatctcgaacgaaatccgccgcacaaaagcgaagctgtcgaaccttcaacgtcttcagactgccgttcgcgagctgcgtcggcacaaacatcttctggaaggtatgagccatgagtaa

SEQ ID NO: 163291 - DNA, 630 bp, Enterobacter cloacae
atgatcactatttccagagaatggctcatgaagacaatcgcggagcttgaagaagagcgcgatgcgacgcccggagcagtaaacgaagacgcggctatggctctggcggcaatgaaactggcgctggaaatgttgagtgctgagccggtctatcagtgcgagttttgccatcaggactccaatggcgagcttcaatggcactgggaagacgttaacaaggatttttatgagcagtacgactctgaacgacgtgggaagcgacgggttctttacaacgccccgccagctctggaaacctcagcacatgaaatgttgaagcgcctggctaacattctttccggaagtgatgctcccggagagatttgttctcttaccgttactgctcagagttttgtagatcgttgtaaggccctggcgaaagaacgtgatgagtgccgcacggccttgcttcaggtgaaatccgcaagccagcatgaactgtccgagaagtgggtgtcagtgccagctgagccaacacttgaaatggtcaaggctggcgctgaggctgcatctacagggatgcttattccaggagtatacaaggcaatgctcgcatctgcgccgcagcatgaggtgaaaaagtgtacctga

SEQ ID NO: 163292 - DNA, 219 bp, Enterobacter cloacae
atgaaattgaatgaatttgcagccggtctcactaaagacggaatgcttattttatgcctttccgaaggagaaataacagattacgttgtgaccagcaaagccatgcgcacaatgattcatcgggaagataacagaatatcagcccaggttctgggtgatgaagataggatcataaatttaaacttactgccagaagcacttaaggttctcaagctgtaa

SEQ ID NO: 163293 - DNA, 525 bp, Enterobacter cloacae
atgcacgaatcagaaccaaaaaactcaaacgccagcttgcccctgcaagatagtgagaccgataaatcttcagaacaacttgcagagcagattgaaggggagctcgtagaaaatccagtcgttctcgaaaggctcctcgaacgtccgcaattcaaagctattatcagccaatctttcttccgtgggccgcttccacctccaacgatgctgcgagaatacaacgatattgttgcaaatggtgcagagcgtattatggccaggagtgagaaggaacaggcccatcgtcatcaaatgcaagacaaaacggttaccggcactatcaataaagatagacgggggcagtggatggcttactcaataacgctatttattctattgatcgcgactgtttttgcttggcgtggaaatacagtcttcgctggtaccttgattacagtggatttgataggccttgcttctgtttttatcatgggaagagttgcatcaccttcacgtccttcctctaaaatgaatgacgatgaataa

SEQ ID NO: 163294 - DNA, 261 bp, Enterobacter cloacae
atgccagcaatcgaagaatcaatcgaagatatttatgtaaagattgaagaattacatttagagctgcacgcagctcgtgttgctattacggtcttatctagtgctttgaatgggatttgcggtaaaccagggcacttagctgaagttgttgaagagggtatgtctaaagcaggtccacttcacttcgatttcccagtcgacgatggctacgaggctaaacttaacacaaaagttttggccttgctttccaaacaagactaa

SEQ ID NO: 163295 - DNA, 396 bp, Enterobacter cloacae
atgtcagatatcattcttgcccgtgtttcagaaaccctctccactgagcaatctctcgacagtcttgtgcgtcagctactggaaatgctggaaattgtgacggatatggaatcaacctacctgaccaaaatcgatattaacgcgcgtttgcagcacattttatatgcccgtaacagcaagcaaatgcaaatcccggaagggttcagcgtgccctgggacgaaacgctctgtaagcgcgccatggatagcgacactttgttcagtaacgaggtgcctgaccgctggccggagtgtgaagcggcaaaagcactgggtattacaacctatatgagcgtgccggttcacctggctgacggttctctgtacggcacgctttgcgctgccagcaccgcatag

SEQ ID NO: 163296 - DNA, 831 bp, Enterobacter cloacae; identical to SEQ ID NO: 119722

SEQ ID NO: 163297 - DNA, 264 bp, Enterobacter cloacae
atgaagaagcgtttttccgatgaacagatcatcagtattctccgcgaagccgaagctggggtacccgcccgtgaactctgccgcaagcatgccatttccgatgccacgttttacatctggcgtaagaagtatggcggtatggaggtgcctgaagttaagcgcctgaagtcgcttgaggaagagaacgccagactcaagaagctgcttgccgaagccatgctggataaagaggcgcttcaggtggctcttgggcgaaagtactga

SEQ ID NO: 163298 - DNA, 774 bp, Enterobacter cloacae
gtgtgtcagggaaatgacagtcgtttaaacacgctcgacgggaaaactggcgggactgtgaaatcaacagtttacatggatacgggtggcacagccgtagctgttcagacggcaggctatgcaggggtggatgcctggcatgaccaaatcgtaatcggtggaagcattagatggcgaatgggattgaccgatatagggagttctggtgggcatagaattatatggcagtttagaaacctgggaggggatggatacaggcaggttctttctctctacccgaatgacgtcatctataccagcggcaacacaaccaaggcgagtgatggaactcttaaggctgcatcaccgatcgccagaattgtaaaatctcaggaggacaaccagcgcaccgatattgatgaagctgggttcacatggtgcggttgtggtacggcgaatgccgaagctgaaggaatcaaaatttcccggctcgatgttggtgtttatgtgctgacaggttcggcaggcctggcatcagaaggctggcagctgctgccgccaatggacccttgcggcatgggggagctgggtgtggctgaagcggagcagactgaaagcggcggactgactatccgcctgtttaagcgaaaatacatgctgagcgataacggggagatcgtcaaaacgaaaggggaaccgatggacgtgccagtgaacagttggatagatgttcgcttggatatgcctgatgattctgcctttaatcagcggatgaatcaggaacttcagccatag

SEQ ID NO: 163299 - DNA, 147 bp, Enterobacter cloacae
atgtataatcaatcaaatatcattctgcttttcctggtgttgttttcctctgcaggatgcagcgttagccagaccgttaacaagacgttatctccaccggcggatacaaagtgggttaattttgaagtaaaaaacccatctcagtag

SEQ ID NO: 163300 - DNA, 228 bp, Enterobacter cloacae
atggaacacggagcacgattaagtacacagcgggttattgccatcggctttattgccatgggggtggttattctgggaagcatcaccaccaatgttattcaggccgtcaacaactaccgccttcagaatgagcagaagtctatcgtcacgccaatgcttttcaacgcgccgtttccggtcagacggtcgccgcacccgctgcgctttctgccacgattgtcccgttga

SEQ ID NO: 163301 - DNA, 657 bp, Enterobacter cloacae
atgacacttgacgataaaaactataatgaaatcttagcggtaatggaaaaacgagcctatcgttcaaaatggacaactcttttatttgtgtatgccttattgacggctctaattagcattcctaccgtctatattttctataaagcagacagaaataaaaccgataaagcttttgcttctttaataatgagctcgaagcagaacgagtctgctctcactgtgcttgacagtttccgacaagcaacgcaagaatttgcgaaagcatcagaaattctaaaatcatctgcaaataaaaaactatcaactcaaggtagtgaatcaggcctcaatttttctggagcagacaccaaaagcacgtttgagaaagctgtagaaaccgctgcgccatattttcttttcctatcagggctgttatttgtcggatatatacttcgtctctttatggtttttataaaatacaacatgcaaatgagcaatgattatgaaaaccaaagaatttcatttttactatcccaagggaacactgatgacttcagtaaaataatccaaaccctgcgtgaacataatataagctttgaaaagacaccgaatctccctcaagaaaaaatcattgttgagttaattgatttattaaggacttcaaaagccaagggttaa

SEQ ID NO: 163302 - DNA, 267 bp, Enterobacter cloacae
atggcattacaaaaaagtgattggaaacatgaggacaataaacattatcggggacatctcgatcgtatttatgtttcaaccacagaagaatgggaggttggctattttgttgacaaatatcttaaagaccacaacagcacaaccagtgataaaaacagagatgtaataatgcagaatatagctgcgtatcctggtaagaagccaattctacggaccgagcttacgaaattcttagatggaaagattacctttactgctgcaaagtaa

SEQ ID NO: 163303 - DNA, 1065 bp, Enterobacter cloacae
  misc_feature (1015)..(1024): n is a, c, g, or t
atggacgatgataaatcaaaagagattcactataaccacatcatcaatagcatcttaagcatgcctttcattgctcctccacttatattagaaaaagacattgtcactgactttaaaaatcggcatgagcattacataaaggccctcaagaaatatgaagacgataatgatacgaacataaattttagcctaatgattaggagaataactcgaatcagcacaggaattataaaatgtctagaagagttcctttctggagatataaaatctgcctatgatgttttcgatgaaaccttttcagcagatgtaataaatcgacatattcaacgtataactactcctttgaatgacatttgcaattttgaaaagcctttatttagagttcgaaaatcagatacgcctttaacagaaagggaagaaatatttcatataccattcacgaaacgccacaatgtaaatgcacaacgatattcagtagcgggattaccttgcttgtatctcggttcatctctttatgtctgctggcaggaaatgaataaaccagatttcgataaattatatttatcatccttcatatctgaggatgataaatctaagatacttaatttctcacctttaatgttaaacaatccaatatctgggattttagagggggatgaacttaaaaattcaaactggagcaaggcatcctatttgattttatggcccttaataatgtcttgcagttacataaaaaagaacgataatgcatctttcattcaagaatatattatcccaaaccttttaatgcaatggattagtcgaagagccagttcgccaattgtaggaattgcttattattcaacccgaatgcctaacgcaaataagactcatcgttcaattaacgttgtactcccccccaaagcgacatacagacaaactgtaatgcaggagtattgtcctcgactaaaaggattatttgaattcacacctccggtttcatggcaagtccttaaaacattagactatcaatttnnnnnnnnnngcatagatcaactcttcgactatgacagaatctttggctga

SEQ ID NO: 163304 - DNA, 192 bp, Enterobacter cloacae
atgaagattaaagcaactatagaacgcatcccgggggggatgatgctggtcccgctggtacttggcgcgatattaaatacgctggccccgaataccggtgcttattttggcggttttacaaaaggtatgatcaccggaacggtaccgattctggcagtctggttcttttgcatcggcgcatctattaactag

SEQ ID NO: 163305 - DNA, 150 bp, Enterobacter cloacae; identical to SEQ ID NO: 120627

SEQ ID NO: 163306 - DNA, 678 bp, Enterobacter cloacae
atggaaaacaaggccgtcacaatatcaacacagctagcaatatttattgatagtgccgtagccagaccagaccttctttttaatagcctcaactcagaaattggcgaagttatagacgcaatgccacaaacgcttcccctgccagcagatgcgccttcagacatccctcgcgttattggcacatcttcctttggcaagttcaacttaaacatatcactaaacagaatagattttgtagaaaactacgcccccactgaggcaatcgaaaaatcaatagtagaattcaaattaaagtgcaacacattaataaccacaatatcacaaaaatatgggatcgtaaggattggcttggttgggaactattatgtcccacataagaacccatctcaactaataacagatctgtatttaaataaaaacaagagcaatcttgacgaaataacaataagaataaataaacgcgatacattcaaaaatatacaaataaacaatgttattaacctaagtcaagggcaagtaactgcacaggactacaatggaaatgcggtaatagttcaacttgactacaactcggccgataacagcacaccacttgaagaaggggtaatcctagccttattcaaagaaaaatccattgcttatagctccaagcatgttgaggagataagtggattatga

SEQ ID NO: 163307 - DNA, 189 bp, Enterobacter cloacae
atgagtctgatgcttttgttgtttgaaagcgggtatttgatattaaaatatgtaaagaaaagatctttcagcagaattgctatgttgtcagatcacaacatgtcgctgctatttctggatggcgcaaacgagcaatttccatttgatgggttgcccattcgtatgttgatgatggttttggggaggtag

SEQ ID NO: 163308 - DNA, 771 bp, Enterobacter cloacae
atgtttgaaaatgtgttcagccttgagtctctgctggctatttcagtcggggctctgtttagcttcagggtcaataaagtcagcctgaatctgaaaaataacatcagaaatcaaagtccggatatctacgggaacaataacgttgttatctacaatcaggctatggatgatgtcgggaaggaaatgacactctccgtcaggctctgcgccatagcgatgatgattgtatttcacatgattccggccttttttgttaatctgctgatgtctctttcgttcttcctgccggtattcagcattattggggttataaatgccatccggcttaatggtatgaacagagggtgggatgttttataccctctggcctctgttgtaatgggggttattttctattgctcggcgaaaatcatgacgcattatctgccgacctatccacaattaacccaactttatcattatctttctgggtatgatctgattagggtgtttaaggcacatcctcagattgatgattttcagcatatattattctcaagtctggcatgccctgtattaattgtgctggggttctatctgtcctttgcgtatacaagggcaagggacggaaataacgctttcaggtactgcgcaggttttcttgctgccgggtacatgttctatattttgctgtccggtagcttgttttcgaacaaccagagtaacactgattactttgttcaggttctgatttaccccttcaacacccttttctcgcttttctctttctag

SEQ ID NO: 163309 - DNA, 450 bp, Enterobacter cloacae
atgagtgactttaagccctttgacgacaggctcaatggtctgattgctgccctgtcaccggcatcgcgcaggaagctggccgggaagattgcaaaggagctgcgcaagtcgcaacagcaacgcatcaaacagcaaaaagccccggacggctcaccgtatcaggcgcgaaaacgtcagccgctcagggctaagatcgggcggattaaacgggcgatgttccagaagctccgcacaagccgttacatgaaagccactggccgtgaaaacagcgcggtggtggaattcaccggcaaagtgcagcgcatcgcacggattcaccagtacggtctaaaagaccggcctaatccgcataccagtgacgttcagtatgcagaacgccagttgctcggcatcagtgaggatgaaagacagaggattgaacgaataattattgatgcactgatgttataa

SEQ ID NO: 163310 - DNA, 1755 bp, Enterobacter cloacae
atgagagatcttaaatatattttaaggcaaagttatgaaagtagcagggctttggtgattggtattaatcagtatgagaaagtttcaccactagagtatgcagtaaatgatgcaaaagaaataagagatacccttattaacgatcttgggtttgaaccagagaaaataatttacttgactgatagtgacgcaaccaagattaacattctaaaagctttccattcttttacgtctgaagatgtaaaggttgacgatcgattcttggtcttctttgctggccatggccatactaaaactggttttcgtggagaggttggttatttggtcccttatgatgcagatatggatgactcatcatcttttatacgttgggatgagttgacaaggaatgctgaacttattagagcaaaacatatattatttataatggatgcctgttatggaggtttggctgtttatcgtgatattaaagctgggagttcgcgcttcttaaaagatatgtatcaaagattctcacgccaagtgataacagctggaaaagcagacgaagtagtttctgacgctggcggaccgttgccaaatcattctgtatttactggccacttaattgaaggcatacgtgggaaagcagcaaatgagcatggggtcatcactgcaagtggtcttatggcttatgtgtacactaaagttgctaacgatacgaattctgaacaaacaccacattatggtcaattcgacggtgatggtgattttataattaaagctccaaatattgataagctatcctctgatgagaaaaaagatctcgatgaattaatatctgtcccgtatgccgaaattgtaagaaataatcatacgttggaagaaaaggttatatatataaaggagttgctctcttcccaaaagtcacacattaaactacatgacttttttattgaagaggtgcgtaaatttctttcaaacacaaatgaagataactatgcgcttagcggatcttttactgatgctgagtttttatctagaatttcatcgtacgaaaaaaatagtaaagaactaggcgcagtattttcaattatggcctattggtcctcagaccaagaacttgagattttaaggaagatcatattaagggtcagtgacaggttagttgatactagtgggggtctagttgcgtggatacatttaaggtggtatccattgttagtgcttttatatttggcaggcattgcttcaattgaaagcaaaaactataaggctctatcaaccattttatatacaaagataggtgtatcaaatcagagtagccaagaatcttgttttgcgcagcaattgtctaactcaattagtgaactcaacgcaatggaggtatttaagcgaattcctgggcatgataggcattatacaccgttaagtgaatatttgtttaaacagattcaacctatattagatgacttgttttttttaggtaaaggctatgaatcgagctttgatgaatttgagattttatatgcactcactgtagtcgatcttagattgcaaaagggagagcatgcatgggggcctgtaggaagatacggctggaagtatgcaaatagaggtgaacattcaccttatgtaaggctttgtgaagaagcaaaaattctaagagaacattgggggcctttgaagtctgggatgtttggaggctcatatgaacgctttgaaaaagcttcaaatgcatttaaagaaaacttaggaaggctgcattggtattaa

SEQ ID NO: 163311 - DNA, 681 bp, Enterobacter cloacae
atgagttggaaactagttggcgtattttttctttgcatttttatgtttgttctaggattgctggttggtggggttgatttttcattgatgaaagaggggcatggcccggaggttgcattctggtctatgctgggcggatgggtttctggtatagcaaccgtcgcagcagtcatcgtttctttgtaccttgcttatcaggcttcacaggccggtgtcgaaaaactagaaatctcatttgatcatatttttcaaactctttcgggtaagcgttcaaagaagttgggcccggatgatttggtaaatatcaaagttaaaaatatgcgtagtgtaacagccgcaattctgaatatttatatggaaattgaaggggttagcgatcgcattcgtatctctaatctgaaacaaaatggattgccaattccctatacattgcatcatatcggtgaaagatgggaattcgcgttttctatttcaacctctaaccgcttagatattacgctcctcaatctaaaaagtgagggtgaaccgactttcagaaaaggaagttttattattgagacagcaatgaaccagtacacattgaaaatgcaaccagatttacttgcacttttgaaagagagatacgaaaaaattgttagcgcgcaggatctttctaaacttcaaagtgggtggtcgcagtag

SEQ ID NO: 163312 - DNA, 804 bp, Enterobacter cloacae
atggcggaaaatgaacatccagggaaattgatatggcacattgcttgcgacgagtcaggtattgacggtcagcgattctatggatttggcagcctttggatgaaatatcaacggcgtggtgattttgctcaactaatcagaaatctcagagagaaacattgcttctttgaagaaatcaaatggcaaaaggcatcttcgaagcgttacgccgatttttatcacgaactaattgatgtcttcttcaaggttccgtggctagcttttcactgtatagtggtcgaaaaatcaatggttaataaatcatttcacaatggtgattatgatttagccaggagaaagcatttcactaatctcatatcgaccaaaattggctccgttatctcagcccatccagaacgggacagttacttcaggatcgaagtagacccaatagcatctcgctacaaaaaagcggatgaagaattccatgttatagctaacaacgtgctaaatattaaatttggtcgtcaagggattatcagtagcgtggtgacaaaggactccaaagcatctgaaaatatccaaatggccgactttttcctcggagctgtcatgtgtgcttatcaaggaaaagcttcttcggaggcaaagcttaaggtgtcaaataacgttgcgtcttacttaggatgggatcatttgcaacatgacacttggcatacagaaaggaaattcaatatttggtacttttatgacaaaagcagaggacctagagatattgaaacaaaatcagtgaagctaaaacatccattgccgaagaagaaataa

SEQ ID NO: 163313 - DNA, 213 bp, Enterobacter cloacae
atgggggcttgggcaatatgctacatatcattaatgtgcagggacgaagtcaatgtgctcatagacacgcgaataaaaatctttctagatgtcgaaaacttattaccgtacctcaagttcacgggcaatagcctttggctggccctcaactatcaagtcataccaacgaacctgcattatattgatttgcacagagtgcgccttcgcacgtaa

SEQ ID NO: 163314 - DNA, 201 bp, Enterobacter cloacae
atgaaacagttccgaattaccgcaacctgttttgatggttcaggagcgtcgatcccggtcacatggtacggcaatgccgtcagttcgagtgatgccaaattgcaaatgacccacgaagcacagcgcaacggctggagcgttggggcaattatttgtgtacagcagcgaaaaatcagcaagagcatagaggtggtggcatga

SEQ ID NO: 163315 - DNA, 918 bp, Enterobacter cloacae
atgagccagaacggaaacaccaatgagcgtttttacaagagcgagaatcgccttttccatgcagacacggttacaaataaatccactggtgaagtggttgagattagtaattcactagaaaaattatacgcttatatgctgagccagtatcgtttctggagtggattaaatcaacaatttgctgagtcgcaggagcgtctagggaccgttgctcgaatcggtgacgccaagaagaaaacaaagcctcagatcgataagctgatcgctcttggtctagttgaaatcactggaaaggtcgggcgttgcaatatttacaaagtgatcgatgttgataaggttgctggaaatcttgagttttcctacccagagtgggctggagaaccaatgtatgaccatgagaaacgcttaggaaaatctagtcaacagccaaaaaacgaggagaaaaaaggcaatggcgagcaggcacagcagcaagagcacgaacagcaatcccctggtgtggcctctgaatctgccaaggatgatcctcaacagcgatctggcgtttcacagtctgctggtgatagcggcgatgatgtttccggtagtgatgaggtgaagaaacggttctatgccgatcttaataccctcaacaactgggtagaaggctacgacgatgaaggatttatggcctatggtgcgacgtgggggatagaaaaacctggtgcgataacagatctgataaagagccatatcagaatcatccagagcgatggttacaaaggatcgaggtctgccgctaacgatacttcatccggtcctgatgcttattacaaacagcagcaggcgcgaaaagcagccgaagcgaaacaggctactaataccccgcagcaacaagaggatgagcagcttgaatttgatgatgaaaaaccgttttag

SEQ ID NO: 163316 - DNA, 810 bp, Enterobacter cloacae
  misc_feature (785)..(794): n is a, c, g, or t
atggaagtgctgttaattgtccttggtacaacaaccgatgtcacgacgatcaccaaacaggacattaagcaggtgatggaagttgttgaaaacttgcctaagcgtatagtgcagccttatcggtcaatgacggttcagcaattgatcgagtgtgatgatgtgccacctgaagatttggttggcgctgagtctatccacaagcatttaaagatttacaaatcgttgtttaaaaccttcctgactgacaataaagatattctggagaagtctccgactgatggagttgtcgccgcaccgtcgaaagcgaggtttggagcttacagtgcagcagaaatgagaaagtttgtagggtgggcgctcaagcagcctgatggctggcagaaatggatcaccttgttgttggcgtacacgggagccagaagaggcgaaatcgccaagctggagaaatcacagatcaaatttgatgaagatagccagcggcactatctcctgatcgcggaaggagggcaggggaaaaccgagaacgctacaaggcaggtggcgatccatcccaaactgatcgagtgggggttcctcgattttgtaaaccgccaatggaaagagaagattttctcgcctgtgtcgggtaagaatatgccgaagatcggcaaagttttagccgatgtccgcgatcagcttggtattccctaccttgatgattatgggcagcggcggctagttcacagtttccggcataccatgatttcaacctgtttagctggctgggttggcaatctggcacactnnnnnnnnnnttgcagcaggtcgtag

SEQ ID NO: 163317 - DNA, 513 bp, Enterobacter cloacae
atgacttacccaaccgtttcagtaaatggcgtttccgttcgtgttgacgacgaagggcggtataacctcaatgatcttcatgcggctgccgtggccgagggaaatgccaccgaatcacagcgtccaagtaactttgtcaaaagcaaagccatcaaagaatttgtcaaagaattgaccgccgctacgaaaatagcggcgcttaaaaccgttaatggcggtgcaaaacatggtgtctggggcctcgaattggtggcgatacgatatgccgcatggctgagcgcgaagttcgaaattaaggtttaccagacctttcagatggtcatccgtaatggcattgatgccatgtctcgcctgaacaaaatcgaccacatcatcaaaaccgaatctaaagcgatcagccaatgtgccagccagatggcccgctggggcgctggtggacgcaagcagttattgcatgcagcccgggaacgcgtcgctgacgaagtccagatgtatctaccaggcattaactaa

SEQ ID NO: 163318 - DNA, 441 bp, Enterobacter cloacae
atgcaaaccagtgataaaggcattgccctaatcaagcagttcgaaggctgcaagcttgccgcgtaccaggacagcgtcggtgtatggacgattggctatggctggactcagcctgtagacggcaagccgattcgcgccgggatgacgattaagcaggaaacagcagagcgtctgctgaagaccgggctggtcagctacgaaagcgacgtgtcacggctggttaaagtcggccttactcaagggcaattcgacgccctggtgtcgttcacttacaacctcggcgcccggtcactgtcgacatcgacccttctgcgaaaactcaacaccggtgattacgctggcgctgccgatgagttcctgcgctggaataaagctggcggcaaggtcctgaatgggctgacccgtcggcgtgaggcggagcgcgctctgttcctgtcgtga

SEQ ID NO: 163319 - DNA, 342 bp, Enterobacter cloacae
atgagccgcatgattgacgacgcggagctggtgaacctgatggcccaagctccgcataacttcaccatcatcccgccgccacagcgggaaccatcagactatggccgctccgggtacgtactgcccccgacgccagatttggaactcaacggcgtttccattcgaaatgtcgcaggtgaggtcatagccctggtcgagcagaagcgcgccaccgaagcccagcgcgacgagctgctggcggcgctggaattcattctggatgactgctcacgcatggtgccgaaatgcgcggaaaagaaggcccgcgcagccatcgcccgcgtcaaaggcggtgcagcatga

SEQ ID NO: 163320 - DNA, 294 bp, Enterobacter cloacae
atggatgacaatcggaagcaggcggcgctggctttgcagccagacctgatagagatcgtcctggatctggctgccaatgcgcaaatcgttaatcaggatatggccattttgaggcagtccctgctggtgcaggcggatatggcagttcgcatcgacgttaacgatcgagaggacatgatcgcactgggcgataagctgtcgggtcagcgtgccggcaccgtgcggcagatccagcaggatccacttgtagtgccccttttccttcaggctctgcagcgccagcgtgaactgtga

SEQ ID NO: 163321 - DNA, 381 bp, Enterobacter cloacae
atggcccagttaccctcagatagtgtagacaaacaggtaggccaacgcattcaaatgcgtcgtaaagagctgggaatgacagcccagcacttagcggagcttgttgatatatcccaccaacagctttcgcgttatgaacgaggaacaaacaagataaacgtagctcatcttgtgaacatcgccatccagcttaatacacctattagctggtttttcattgattgcttctcgacgttagatactgaagccaagaagcagcatgatttcgtacccgtaaaagattctgatttgaaaagtcgtctggataatatatggcctcgtctgacacatgagcaaagacgaatattgattatgtttcttgataaatacaccaaacaataa

SEQ ID NO: 163322 - DNA, 303 bp, Enterobacter cloacae
ttgcagggccgcaccttctatatcctagaagtcgatacatctgacggtgtttgttctctatcaactttgctattacggctgaagtcgcctctggattggaccaagcagcttacgctgttggcagaagagttaacccagaaatcactgcactggccaaatcagcggttaaaaatgctctgcggcaaggatggctattccggcattcctcacccgcagaccaaatccgtggataagggcaagttgcatgaggagtcgatagagcactgggcggcaagatttcacagttggatgacatcaatctaa

SEQ ID NO: 163323 - DNA, 1260 bp, Enterobacter cloacae
atggaagggaaaaactacacttctgaatatctgttgattttctcagaagaaagaaagctaatgcaaaatgaagaggatttaataagaggtcttcaacttaaccaaaacttaaggatagaaaaaaaggggtccagcaacaccatcacatttcataacactgagttttccctaaacgtaaagaaaataaagtcaaaaaatgaagcttaccgtagctatgttattgatatttgcaacctgactgaggtttcaaatgagagagaaaaactagcaattagagacctaaataaagaagtcattgctacaattagagaattacaacactcacaacttaatacgcttagagatgacttagcaactgaattttctattgaaggctacaagcacatacatgaaatagaaaataaaatgagaaaattaataaccatttttatgtctacgaaagtaggcttggagtggattaagtcaaacattccacaagaagtcatagattcaatcaaaaataaagacgttaaatctgaaactcaatcactgaacacattcctttcagaaacggatttcattcagctttccaagtttttattcgataagtatagtacaatcaaaacagccgacgttcatcgaattttaaatagcacaaaaaaaaccattgacgttgaaaagctaatggactttgtccctaagagtaactggcaacgatatttctcccctgaagtttattcagaaagtaccgattctaaagagcgaaacaaaaaagaagaaaaacttattgacgattgggaatctttgtatgatctgagaaataaagttgcacacaatcgttttattacttatgaggaaatgagacaaatcattagtaaaaaaaatgatatcaatgaagttatcaatgaagcatttaatgccattgaggaaatagaaataactgaacaacaagaagcagaaataaaatcagagttaaaaacgaccattcatgaaaaaactggagaaagtgtagacattagtaaaaacgatgacacagataataagtcagcagataaaaaacttatagctgatggagagcaccacataagaaagctaacaagatacatatatatgaatattcatgattcatacaaaaaagaactaagaaaatatagaaacaaactaaacaaagcagttgagaattacaaattatcaaatgacgacactcttacgcataatttgctggaactggagttaaatcgggtaaaagattatttaaagacattaaatgccgttatttag

SEQ ID NO: 163324 - DNA, 186 bp, Enterobacter cloacae
atgcaggtgcaagaccagcttcagggtgcgccagtgctggtgctggcgggggatccagtgtcgctaaaacgcatgcaaaaccatgcaccttatgcatgcatggcttttttaggggaaaaaggcgggattttcgggaattttttaaaggactactgcgcggccagctctgcgcgtcggcgggtgtaa

SEQ ID NO: 163325 - DNA, 147 bp, Enterobacter cloacae
atgacggaacctaaccggttaagaataactatccataaaaggtacatgcttcaactcgttatccatacaatggcaacaaaatgtctgggggcacaaaaaggggcatattttttagtttgtaatattaaatccttttatatcaattaa

SEQ ID NO: 163326 - DNA, 366 bp, Enterobacter cloacae
atgaacgacaaaatcagtcaggatacgatcaataaagccctgtgggccgcgtgtgatacgttccgtggcaccatcagtgctgatacctataaagactttatccttaccatgctgttcctcaagtacatttctgatgtctggcaggatcactatgacgaatataaagaacattatggcgatgcgccggagctgattgaagccatgatggcaaacgagcgttttgtgttaccgaaaagcgccagcttttatgcgctgtatgaacgccgtcatgagccgggtaacggtgagcgtattgatcaggcactacacgctattgaagaagccaacggcaccaaactgaaagatgctggaagactttgccggtga

SEQ ID NO: 163327 - DNA, 1962 bp, Enterobacter cloacae
atgattttaactaatgttcagcttggaccttttcgttctatcaacacaccccaaaactgtactatcgaccctaaggttaccgtattagttggtatgaatgaggcaggtaagacagtctttcttcaaggcatacataaggcatgtgacgctttagatattgaacattatgaagttatagaggattaccctaggaaagatttaacacgttataataaaacacatctagaaaaaccagagaatgcaatcagacttacatacatgcctgaacaagacgatttagatcttattaataaaagacacaatacagatcttgaacttggattcacctactctatatcaacaaactataataataaacgctcaatagatatttacatagatgaaaaaccaattatttctaaattgctaaaatcaggtaatttcacatcagatacagtacaactggtaaaggaagccaccacaataaaaaaacttgttgccatgttaaatgatctggacttaaatgaaagtgaacagaaaacacatgaacaactttctgccagaactaaatccattgcttgggataacataactcaatatgaagtctttaaatccctagatgagttattacctaaaacactatactttagcgattacgatattttaccagggaaattgaatattagagatttagctcggcggcataaactgtctgaaagtgatccttctcaattaacccctaaacacaaatctattttagctctgttaagaatggcggacgtgagtattgatgaactctctgataccgatggctacgagtcccttaaagccaaaattgaaggtgtatcaaacagtttaacagatcaaataatgcaattctggaaacagaatgaaaatattgaagtcgttgttgatattcagtctgattctaaggatgaagcccccttcaacgatggagccaatatatatctcaggataaaaaacagtaggcatagagttaccactccttttgataaaagaagtcgtgggtttatctggttctttagctttttagtttggttcgatagcgttcagtatcaattcaatgctgaagatgaggatagaaaactcattttacttcttgatgaaccggcattagcattacatgcattagcacaatctgattttttgacatacatagatcatctttctgaaaatcatcaagttatatatacaactcattcaccattcatggttcactcggacagattaaatcaagttcgcatggttgaagacaaggataaaattggcacagtgatatccgaaaatctctctggaacagatccaagaaccgtatttcctcttcaagcagcgcttgggtgggatattgcacaaaacttatttatctcaaaaagaaaccttttagtcgaggggccttcagaacttatttacctaaaacacttatcttctatcctcgaagcaaaaaaccgaactggactgaacgaatcaataactatagtaccaactggcggcttggacaaaataattacatttattgcactcctaggtgctaacaatcttaatatcgcagtactccatgattatgatggaaaaagcaatcaaaaaattgatgagatgataaaaagcaggataataaaccctaaatcaattaaaaacacatctatgtacacagagcacaaagataaacctagtgacattgaggacttattatccacaaaaacatacattgattacttcaataaaacattcgaaaaacagctcactgacaaaatcaaaatatcagatttaccaaatggaacaagaattgtagaaaggattaatcgataccttaaagagaaaaacattacattacggccttcaggtggtttcaatcattatcttgttgcttcaacatttggctcaaacccgccaaaaacaattgacgaaaatacactatctaattttgagagtttatttaaagatattaatagtatattagaataa

SEQ ID NO: 163328 - DNA, 546 bp, Enterobacter cloacae
atgtggggacttgctccattctgcttcctcgcccgttcgctcgcaaggctcggtcacgggtctgcggcgagcagtacagactgtcaaggtcacccacaaattcagtggataacctgcagggaaaggtgtgagggaaaagtaaggctgcggcgaagccgtttttccataggcttcgcccccctgataagcatcacagaatctgacgctcaaatcagtggtggcgaaacccgacaggactataaagataccaggcgtttccccctggcggctccctcgtgcgctctcctgttcctgcctttcggtttaccagtgtcattccgctgttatggccgcggtttctcattccacgccagacactcagctccgggaaggcagttcgctccaagctggactgtatgcacgaaccccccgttcagtccgactgctgcgccttatccggtaactatcatcttgagtccaacccggaaagacacgacaaagcgccaatggcagcagccactggtaactgatttagaggagttagtcttgaagtcatgcgccagttaa

SEQ ID NO: 163329 - DNA, 585 bp, Enterobacter cloacae
atggaatcattctctgttgagcattggttaccacaggctactgctggagatagtcaggctagattttatttggggaagatattctcatgcgggctgggtgttcatcaggattataagctggctatatactggtttcagcttgcagcggagcaaggccatgatgatgcccagtttaatcttgggtgggtatatcatttggggttaggtggatataaacatgtccaaaaagcgtctgaatggtatcagaaggccgctctgcaaggtcatgcagaggctcagtttcatctaggaaggctgtatgctttctctgatttaagaaatgatgggcttgcagttgaatggtttctctgtgccgcgaagcaaggctatagtagtgcgcaatttaaacttggctggatgtatcatctcggtatgggcgttgagcaaagtgacaggcaggctttccattggtttattcgggctgctgagcaagatcatgcaggggctcaggcatctcttggtgagatgtataagcatgggtggggagtcgagcaagacgaaacgatggcacagtattggtttcgactcgcaagaacaatgccatag

SEQ ID NO: 163330 - DNA, 534 bp, Enterobacter cloacae
atgccaggtactaggtgtgttactgttcttactgctcgtggaattactgagattttaaaaacaggtggaagcaaagcctggagactcaatgcaacccatgcaggaaaatgttcgtatgttgtttgcgttcagaactcgaagattgattggggaacccaggaggcaaagcatcaccatgcttttatgattggccgtatttctgggattagcaggattccagaccatcccaagaagcgttggataatcaacattgattcttatgctgagattgatatccctgaccaatgggatggaaaccggaatccggtttcttaccgaaaccttgaggatatggggatagatcttgatactctcgattttaaacctgttggtcatattgtatctggaataaaacagactagtggtgacgaatacgatgagtatgaagaagttgatgtcagcgatagacctttaagcctgaaagaagctaaggctggtctagcacttcattttggcgtcaatgaggatgacattcagatcactattaaggggtga

SEQ ID NO: 163331 - DNA, 498 bp, Enterobacter cloacae
atggctgacagttttcagaacgaggtgcctaaggcacgtattaacctgaagcttgacctgcatactggcggagcaagcaagaaaatggaattacccttgaaattgcttgttacgggtgatttcagcaacgggcaggaatctgctacaatatctgagcgtgaaaagattaacatcaccaaaaataattttgatagcgttctttccgaatattccccaaaagttaacctggccgtaaaaaatacactgtctgacgatggtggtgaagacaacattcagctgactttccagagcatgaaagatttcacgccagagcaggtggctgcccaaattccgcagctgaaggcgatgctggcgatgcgcaacttgcttcgcgatctcaaagctaacctgttggataaccagactttccgaaaagagctggaaaaaatcgttgttgaccagtcgcttagtgctgagttgcgaaatgaactgtccgcactggcttcaaaacaaccttaa

SEQ ID NO: 163332 - DNA, 921 bp, Enterobacter cloacae
atgaacactattattctaccgaaaacacagcacctcgtggtatttcaggaagtcattaaaagtggctccataggttctgcagcaaggcagctgggcctgacgcaacccgccgtcagcaaaattatcagcgatattgagtcctacttcggcgtggaagtgatggtgcgcaaaaacaccggcgtgaaactgaccgccgcgggccaggttctgctctcgtactcagagtcgatcacccgcgaaatgaaaaacatggtgagcgaaatcaacagccttagcttcagcaccgttatggatgtctcctttggctacccgtcactgatcggctttaccttcctgtccgggatgatcaaaaaatttaaggaagtgttcccgaaagcgcgcgtctcaatgtatgaagcccagctctcctctttcctcccggccattcgcgacggtcgtctggattttgccatcggcacgctgagcgacgaaatgctgctgcaggatctgcacgtcgaaccgctgtttgagtccgagtttgtgctggtcgccagcaaaacgcgaacgtgcaccggcccgacgacactggcatcgctcacgcacgagcagtgggtgatgccgcaaacagatatgggctactacaaagaactcctgactactctgcaagacaaccacatcagcatcgaaaacatcgtccagaccgattcggtcgtcaccatttataaccttgtcctgaatgccgattatctgacggtgattccccgcgacatgatcgccccattcggttcggatcaatttattgtgctgcctgtggaagatgaattacccgtggcgcgttatgccgccgtgtggtctaaaaattacagaattaaaaaatcggcgtccgtattagttgagctggcaaaacaatattcgtcgatgaatgtcgaaaaacgacgataa

SEQ ID NO: 163333 - DNA, 879 bp, Enterobacter cloacae
atgcatattacttacgatctcccggtaaccattgaagatattcaggatgccagaaaacgcctggcaggcaagatatataaaaccggtatgccacgctcgaattatctcagcgaacgttgtaagggcgaaatattcctgaagtttgagaacatgcagcgtaccggctcgttcaaaattcgcggcgcgtttaataaattaagctcgctgaccgatgctgaaaaacgcaaaggcgtggtcgcctgctcagcgggaaaccacgcgcagggggtttccctttcctgcgccatgctcggcatcgatggcaaagtggtgatgccaatgggcgcaccaaaatccaaggtggccgcgacgcgcgactactcggcggaagtggtgctgcacggtgagaactttaacgacaccatcgccaaagtcagcgaaatcgtcgagatggaagggcgcatttttatcccgccttacgatgacgccaaagtgattgccggtcagggcactatcggcctggaaattctcgaagatttatatgacgtggataacgtgattgtccctatcggcggcggcggtttaattgccgggattgcaacggcgattaaatccatcaacccgaccattaatattatcggcgtacagtctgaaaacgtgcacggaatggcagcctcctggcaggcaggagaaataaccaaccatcgcgtcaccggcacgttagccgacggctgcgacgtctctcgcccgggcaaattaaccttcgaaatcgttcgtgaactggtcgatgacattgtgctggtgagcgaagacgatattcgcaacagcatgattgcccttattcagcgaaataaagtggtgacggaagggctggcgcactggcctgtgcggcgttattaa

SEQ ID NO: 163334 - DNA, 459 bp, Enterobacter cloacae
atgacaacacagacgcagcacgacctcgcacccgctaaccgacccgaatttgaactgaccgtcacgccggtccccgatgaacagcgtatcgatttctggccgcagcactttggcaccattccgcagtggataaccctggagccgcgtatttttgcctggatggcgcgtttctgtgcgacctacagcggtggcatctggtcgttctacaccctcagcaatggcggcgcgtttatggcccctgatgttgaaggtgacgataaatggcatctgttcaacggcatgaacggtaatggttcggatatgagtgctgaagccgcaggtattgctgtctgcctgattgcgtacagccatcacgcctgtcgcacccaatgcgatgccatgactgaacactattaccgcctgcgggactacgccctgcagcatccagaggcccacgccattctgcgtattatcgactga

SEQ ID NO: 163335 - DNA, 1296 bp, Enterobacter cloacae
atgagcgagttgagttatctggaaaaactgctggatggagttgaggttgaatggttgccattgggtgatctaggcgaactagtacgtggaaatggattacctaaatctgatttcacggagtcgggagtacctgccattcactacggtcaaatatatactttttacggactatcaactgaaactacaaaatcatttgtttctcatcaaacagcggaaaagctaaaaaaagtaaatcctggtgatgttgttattactaatactagtgaaaattttgaagatgttggcaaggcgttggtataccttggaaaagaacaagccgttactggtgggcacgccacgatcttcaaacccaataatgaaattattgggaaatattttgcttactacactcaaacgggattttttgcaagcgagaaaagaaagtactccaaaggaacaaaagtaatagacgtatcggcaactgatatggcgaaaattactatcccaaccccctgcccgaacaatccggaaaagtccctcgccatccagtctgaaattgtccggattttggataaatttaccgcaattaccgctgagcttaccgctgagcttaccgctgagcttaccatgcgtaaaaaacagtacaactactatcgcgaccagctactgagttttgatcaaggtgaagttgagtggaagccgttgggggacattggtgaatttattcgtggaaagcgctttactaaagctgattatgtggaagaaggaatcagcgttattcactacggtgagatatatacgcggtacggtgtttttgcgacccatgcccattctcatgtccgagacgatatggctgaatcactacgctatgcaatgcctggtgatgttgtaatggctggtgtgggtgagactgttgaagatgttggtaaggctgtggcttggattggaaatgaaaaagtagccatccacgatgacagttatgctcttcgccattcaatgaacccaaagttcatttcttatgtgatgcaaacagctgcattcattgatgataaggcgaaacatgtctctaggggaaaggtcaataggttattaattgatggaattgcaaaagtcaaaataccaattccatatcccaatgacactgaaaaatcactcgcagaacaggctaatatcgtcgccattctcgataaattcgatactctgaccagctcaatcaccgaaggcctcccacgtgaaattgagctacgtcagaaacagtacgaatactatcgtgacctgctgttcagtttcccaaagcctgaagccgtcagcaactga

SEQ ID NO: 163336 - DNA, 789 bp, Enterobacter cloacae
atgacattaaagcggcccgattttcaccctttgtcaatggcatctgaaaagtgccatatcatgtctgaaaatttactgaatgattggcttgatcataaagttccactctacattcggttggatgctttgccatgcctgatcgtcaggcaccttggtggagatcaatttcttcttaaagattgggagaggaaaattaaatcaggcatggattattatcagcatgaaaaaatgccagagtttaaaataaggctgttttacccggagaaaaatgcagaaattgaatctcgacttctggaaggttacttggggatatgtcgttatacctacaatgggcatgcacatggttactggcgggtaaaggctacgccagtgactcgttttgcggaagaccattacgtgctaacggatatggatactttcagagaaaataataatattgcaggtgcgattacggtatatggtaaagatgattgggattatttgagatttccaagtgaagtttttcgaaataaatcagaattgttttttgatgcaaatgaattgtcaccacaaagtgtagaaagcatgccctgcgtgaaaaaagaaaaacaaacccgcatttctaggccagaaagaatagccctgtatgtcatgctgaaagagcattatcttgatggtaatggtgaggttaatttttcaaaaatggcggagatgcttactgtggcatccaaaaaatatggattcagtgactcattcagtgatgacactatcgctaagtggataaaacgcattgagaatgaaaatcaatag

SEQ ID NO: 163337 - DNA, 486 bp, Enterobacter cloacae
atgcaagacatgaaaaacttagatcagaaatttttagaaaaattgaagtcgaaacaagatattctgggtctcgaagaaaatgcctctaggacggtaagtgatgatgtatggcaatcgaaaggtaatttcgaatataagggaatgaagtttaattatggtataactcgtagtgacttaatgaacttttattattttagttttggttttaactttactttcaaaaaagaaatgccaaaaatgaaatgcttggaaatagtaaattcttttaatgaagataggccttcaattaaagcggttctatccacaaagaaaaataaaaaattctcgattgtttttagtcaagaaatcgcttcattagaaaatgaatcaattgtagatttgatatacccagcattaaatattttagcaacgtcaccagctttgttttactttgatgccgaaaaagctggtgcagcaattattcccccaatggaaatggcggaatga

SEQ ID NO: 163338 - DNA, 483 bp, Enterobacter cloacae
atgatggaacagtcatttacctcacaggcttcggtactcccactgagcgctcaacgcactgtgcaacttgccctggccctgcttgaccaccacctgcgcgaaacaggcgtggcattcacctccactcaggctgcccgtgactggctgaaactgaaaatggcgggactggagcgcgaagagtttatggcgctgtacctgaaccagcagaaccagtttattgcccacgaaaccctgtttgccggttccattagcagtaccgaggtacatccccgtgaggtggtcaaacgcgccctgtgcttcaatgcggcggcagtgatactggtgcataaccatccctccggtgacatcacacccagccaggcagataagaccatcacgcaacatctggtgcaggcgctccagctcgttgatatccgtgtgcctaaccaccttatcgtcggtggtacgcagatattgtcgttcgctgaacacggtctgctttga

SEQ ID NO: 163339 - DNA, 462 bp, Enterobacter cloacae
atgacaacagcgacaaaaaacaacctcgcatctgctgctaacgaatccgaatttgaactgaccgtaacgcagatacccgacgaacagcgtatctgcttctggccgcagtactttggctctatcccacaatggataacgctggaaccccgcattttcgcctggatggaccgcttctgtgatgagtacagcgggggtatctggtccttttacacgctcagcaatggcggcgcgtttatggcccctgatactgacagtgacgataaatggcatctgttcaacagcatgaacggcaatggtgcggagatgagcgcagaagccgccggtatcgctgcctgcctgattgaatacagccaccatacctgccgtacagaatgtgacgcgatgaccgcgcacttttaccgcctgcgggactatgccctgcagcatcccgaagctcacgccattctgagcattattgattga

SEQ ID NO: 163340 - DNA, 618 bp, Enterobacter cloacae
atgcgaacgctgactgaaaagaaacgaactgacatcctgaacgccgccactacagtctttctcgagcaggggtatgaacgcgcctccatggatggtgtggccagagctgcagagtgctccaaggccacgctctataattatttttcctctaaggaaatgctccttgacgccgtcgtcagggcttatggcactaactttctgacgcgcgccgccgatgaaatttgcagtcaggagaaccgccatcttcccctgtctgaaaggttgcaacgttttggcgagggaatgctgggaaccatgacatcggactggaaggggcttcagctgtatcgcatggttgtgggagaggcaggccattcacgtatcggcgatattttttatgaatccggtgtcagggaaagtatgaacgctcttgcgacgctgatggagcagcatattgaggacggcgaccttatccccttccgaccggctttgagggcaaaacagttttctgcgctggttaaagctgaggctgacgagcttttcctgctgcacgatatgcctgtgtatacgcgcgaagatatcgccgtaatggtaaaaaatgccgtagacctgtttttatcgggcgcatcactacgctga

SEQ ID NO: 163341 - DNA, 207 bp, Enterobacter cloacae
atgacaatgtttgctgcagaggttctggtggctccggccatcaggaccctgtttattactcatgttttcgggggtgtcattataactgcatgcaggaagagtcagaaaaaagcccgccggaacgcgggctggcagggtcagatgtggctgccgatggacagacacccggtaagcatcaatatcataatgccagtgaagagactgtaa

SEQ ID NO: 163342 - DNA, 291 bp, Enterobacter cloacae; identical to SEQ ID NO: 82221

SEQ ID NO: 163343 - DNA, 486 bp, Enterobacter cloacae
atgctgtacatcaacccagaattttttttgtcaggcaggacttacaatattcgtgcacttcaggtgcccacggcagcactgagggagaagatgccggagaccatacgggaagtgagtactgaacgtgccgattttatagggtgtctgccgctccgctattctgggctgtcgttgcggcgcagacttataagactgatgctgacgctgcagaaatatggcgaagccagtggtggccctgaaagccgggggcgggacgccttttcaccagcagaagattatgcgcggagtgttatagatagggcgatggttcgcggagaactgcgctgccagccctccggtgcgatgaactgcgcctttctgacacagacagaggaactgcggagcataatggctggcgttcagcaggatatggcgcaacttcgaaaagaagtcaggcgcaaaacggatgattttctttggcggtttgcagcgggaacaaaagcatga

SEQ ID NO: 163344 - DNA, 669 bp, Enterobacter cloacae
atggtctgcctgacaaaaaagctgtcccgtacgtttatactgaccgccatcattgccaccgcggggtgttcgtccacatcaccggtaaaatattccggcattgaggccacgtccaggatgacgcccaacactgctgacgacagcgaccggatccccttccgctacgctgctccggttgactggagtaaataccgcaacatcaccattgctccagttgatatctatggcgggagcgacgcacagtttaatgacctgtctcaggaagaccgacgcaatctggcagactatatgcaaaagaagtttgccgaagttctgggagagaagtttactgtcaataaaaacgccggaagcgccccttctctcaggcttcaactgacactgaccggcgcggacacgacgccgcaggttgtgggcacttttacaaaattcgacctagccggaggtccttataacatcgttcagtccgtgcgcggcgggcgaggactgatgagtgggtacgtcaattatgtcgttgaggtgaaagataccgagaccggtgaacttctgctggcctatgtggcagagcagtatcccaacgccatgaacgtaggtgcaacgtttggctcaatgagcgcggcagagacaggagtggacaaaggcgcggagcagcttctggaaaagctacactaa

SEQ ID NO: 163345 - DNA, 273 bp, Enterobacter cloacae
ttgaatcgcattgttaagctggcgtgccctgcgctcttattttcgctatttatgctctccggctgctcattatccccggcagttccggttttaggcgcagcatttcccggttggttcttctgcttattaggcgccgcgctgttacttattccctgccatatcctgattgtgcgtcaaggatggcaatcgcgattttctccgctggtcttcagctatctggcgctgatgttcctgttcgccacgattctgtggttcctgttcttcgtaaactag

SEQ ID NO: 163346 - DNA, 1944 bp, Enterobacter cloacae
atgcaaagcttgtggccgtttctgacccgggaacttcgcgatgcgccggggcgggcgaactacaccctgcgcctgacgctcagctgtgcggtgctgattgtgctgtttatgacgctgcatattcccttcctcgccgtggcgctgatcgtggtgttttacgtcagccagcctaacgtcctgatgattaaactggtcagcatggttttcgtggtgaccgtcagcgtcgccctgggcggcgtactactgattatcaagtggacctatgactatccgctgattcgcctggtcgcctcggtgctcctgttcttctgtgcgatttacctgatgcgggtcctcggcaagctggggctggcgttttccgtggtggcgctggtagtcatctacgcccaaaccttcccgtcgatgaccagccagagcgaaattctggtacgcctgctgctgtggctatgggtggcgattaacactgccattctagtgacgctgctgatcaacgcctgtttccagcagaccttccccggctatcagtttaaagcccggctggtggtcatgctgcgccagacggcgcggattcttagcccaccggatggcgggaagccgcagcccacctttaaagagatcgtcggccagtttaaccagttgcagtccctgtaccagcaggccgcgcgtaccacgccggagattgccgccagcccgcaggcctggcaatcactgatggccgccgcgctgcgctgctaccatttgacggcgctgttacagccgggccgcgaccatcccgatgcgcgccagcggatagcccacgagctgaacgcgctggcggataatctgcccagcctcacggctgcggatattcagccgttgatggtcccacgcgatagcgataacagcgccattttgcaggagatcgccgaggtgctggcgcggctggcgcgcggcgaagccatcgcattgctgcagggcgaagtggaaaaagcgccgctgctgctgccggacgcgtggtccaatccggcctatctgcactttgccctgaaaacgctgctggcgacgctgctgtgctacgttttctataccgccgccgactggcagggcatccacaccattatgctgagctgcgtaattgtcgcccagccgggtctgggcgctaccatgcagaaaacgtggctgcgcatcggcggcgcgctgctggcgacgctgattgcgctgctcctgatcgtctttgtgcagccctggaccgactcgctgagcggcctgctggcgatgaccctgccagtgtttgcgctggccgcgtggattgcggcagggtcagagcgcatcgcctacgccgggatccagataggtttcacctttgcgctggcgttcctcagttggtttggtccgctcagcaaccttaccgaactgcgcgaccgggtgatcggtattctgctcggcgtgctggtctcctcgattgttcatctctatttatggccggatagcgaagccccgcagcttaaagcgcgtctggcgcagctttattgccagctggcgcagaccctatcctcaagcgacgatgaggttcagctggtatcgatctttgccgcgctgaccgagagcgaaaccttaatcaaccgggtagccgccgagccgctgggaatctatgcgcacccgtggccggaagccaaaaactggccggtgcgggcgactttccatcaggcggaagagatcctgcggctcagcgaaggctatcgtctgtacgccgcgccgggggatacttttttaccccgctgcgcccggcggcttgaaggctacgctgccgatatcgacgcgcagcaaactgcagtagaacgccctcaggcgcttctcccggacccggcgaatccgtttggcgcgccgctggttaacgctctggccgccctgccggcgtggccatttgcgtcttccgatattccgcgaaaggcaatgctatcatga

SEQ ID NO: 163347 - DNA, 1485 bp, Enterobacter cloacae
atgataaaaacttttactctcccgcgcgccgcacgatccccggggcttgccttcgccctgacgctgttaaccggatgtgcgttaattcaggacgatcccggccaggttccgctggtcaatccgcagcaggccgagctggcgcaggtgatccatctggcgaacagcggctggccgacggcgcgctggtgggaaggctatcaggatccgcagctaaatatgctggtcaatcgcgcgctgcagaactcccccaccatgcaggcggcgcggctgcgtatttcgcaatcgcagtccacggtcgagctggcgcagtcggcaatgggcgtgcaggccactgccgtagcggcgcaaaaccgtctgcgggtcaccaataaacagttcacctggccctactccttctccctgccggtggataaaaacggcccctggtacacgctgaatacggtcggcgtcggggcgacgctgaatatcgatttatggggcgccgatcgcgcccgcgttgccgccgcgatcggcgaaaagaacgcccgccaggcggagactgccggtatcgagctggatcttgccagcagcgtggctcagctctatttcgcgatgcaggcaaccttccagaaaatcgaattacttaaccaactggaggctatcgccaggctttcggtgcaggcgcatgagcatcgtaccgcgcgcggcgttgaggatagcgtcgatgtcgccaacgcccaggcggagctgctggcggcgcagcagcaggtgattacggcgcaggggacgctgacgcagtatcgggaaacgctgcgggcgctgatcggcgccgatgcgcatagcatgccggagattcatcccgtggcgctgccggcgctacaggagacgctaccggactcgctttcgtttgaactgctggcccgccgcccggatctgcaggcgctgcgcggctacgtcagcgcctcaatgaaccaggtggacgcggcaaaagcggcgttttacccgcacttcgatatcaaagccttctggggctacaacgcgctgagcgtcggcgatctgtttaagtcctcattccagcagatcaacctgctgccggggctctatttgccgctgtttgacggcgggcgcttaaacgccaacctgaaatcgacgcgtacggcgagcaatattttaattaagcagtacaaccaggcggtgctggacgcggtgcgtgacgtggcggttagctccagccagttgaacgatttgaaccagcaggccgcgctgcagcagcagaaagtcgcggcggcgatgatgaccacccgcagcgtcagcgcgcaccatcagcgcggactggtcagctactatgcggcgcaggaggctcgtcgtccatccatcgcgcagcagcttttgctgctggatatcgaggcccagcggctcagcaccgatatcaccttgattaaagcattgggcggcgattatcgcggcccggcggtggcgcccgcagggaaggaagtggcgcaatag

SEQ ID NO: 163348 - DNA, 357 bp, Enterobacter cloacae
gtggagaaaagcaccactctgtcaaaaaaatcccggctgggagaggcgttcgcttatgccctgaaccagtggaatgccctgtgctactactgcgatgacggtcttgcagagccggataataacgccgctgaacgcgcgttacgagccgtctgccttggcaagaaaaattatatcttcttcgggagcgatcacggtggtgagcgtggagcgttgctgtacagcctgatcgggacatgcaaactgaacagcgtggatccagaaggctacctccgctatgtgcttgacgtcatagccgactggccggtcaatcgggtcagcgaactgctaccctggcgcgtagcactgccaactgaataa

SEQ ID NO: 163349 - DNA, 411 bp, Enterobacter cloacae
atgagtcaggactatcttgcccgtattgccgcactggaagacgcgcttcgccagaaagacggtcagctcagtctcgttgcagagactgagtcgttcctgcgttcggcgctggcccgcgcagaagagaaaatagagaacgaagagcgtgaaatagagcatctgcgggcacagatagaaaaactgcggcgaatgctgttcggtacccgctcagaaaaacttcgccggcaggttgaagaagccgaagccctgctgaaacagcaggagcagcaaagcggccactacaacggacgggaagacgatccactggtacctcgccaactgcagcagtcccgccatagtcgcccgttaccggaacaccttccccgcgagatacaccggctggagccagcagaaacctgctgtccggaatga

SEQ ID NO: 163350 - DNA, 399 bp, Enterobacter cloacae
atgaaaaactcaaatgaaaaacttgtacatgatttttatcaggctcttgaaggttatgattttttaacccttaaatcactttgctccagtgactttgttttctattcacagatagataaccccattcatggagttgacggttttatcgcatctgaaactgccacacttgatggattccggggcttcagcatgaagcctgaagttcttatcagtgaagcggataaagtcgtagcttatgttgtttttgaaggtatccacaataatgaaatgcacggatataaaccaaccgggaaaaaagtacgtatttctctgatgatgctgctgactattgaaggcggtaaaattaaggaaaaacgtgcgcactttgattataacgatatcgtacgtcagattagttaa

SEQ ID NO: 163351 - DNA, 954 bp, Enterobacter cloacae
atgaaaaagatagccattttgataaccgatgatatcagtgcatttcatctctccgtaccactggcaatttttgcagatattatcccggaccattcattatttaacgttgttttatgctccgtgcagggaaagactataaaaacctcacatggtatgcatattacaccggaatatgacttatcgatgttacgtactgctgacatggttatagttcctttctggccatcgcctgacattgtaccggagccacagttaacggaagcactccgggaagctgcacagcataatgccaccattgtgggtttgtgccttggtgcctatgctctggcctattcaggactactggatgcaagaaacgcgtcgacacactggttgtatgagagtgattttcagtcacggtttccgaatacccacctggatatgaatgcgctctatgtagctgacgataatattattacttctgccggtacaggtgcgggtatggactgctgtctgtatctggtcagggagttgtacgggagcaatattgccaatcagatagcaaggcgaatggtgatcccgcctcatcgggacgggggacaggctcagtatattcagatgccttttccatctgcaacaaaggatcgccagataattctgctggttgaaacgctgcgccaggacctggccagacgctggacgctggatgaactttgtgaagtcgttagcatgagccgacgaacctttacacgccgcttccgacagtcgacgggcatgacactggttgactggttaacaacggagcgtctgagagaagcgcaggtattactggaatctacagcccactctgtacagaaggtatctgagctggttggttttagttccgcaacatctttacggaaaaagtttatcgcaaaatttggcgtatcgccgtccgtatggcgaaaaacattcaggggttcagaagcgatataa

SEQ ID NO: 163352 - DNA, 777 bp, Enterobacter cloacae
atgaaatttcatcagatccgtaacgccactgcaattattcattatgcaggaaaaaaaatcctgattgacccgatgttatcagcaaaaggttcattccctggttttccattgacgatgaaccgccatttacggaaccctcttgttgacttacctcttccggtatcagaggttattgatgtagatgctattattgttactcatacgcatgatgaccactgggatgctgctgcccgggcgctgatccctcgcgatatgcttatttttgtacagaatactgaagacaaaaacgaactggcccgcgatggatttattaacctacaagttcttgataatgaaattgaatacgccggaattcgcttaattaaaactcactgtcaacatggtagtgatgaggcattccgcaaccccgctgcggcagagctattaggtgaagctatgggggttattctccagtctgatggcgaaaagactatctatatagttggtgatactatctggattaatgatgtagagcaggttatgcataaatatcagcctgatatcgttatcctgaatacgggatatgcgcaggtggaaaatctggggcctattatcatgggtaaagaagatgtgctaaggacacataacatacttccaaaagcacatattatttccacacatatggaatctgtaaatcattttggacaaacccgaaaagaaatccgtgagtatgtagatcttaataagattactgaccaggttagtatccctgaagatggtgaagtcgttaatctttaa

SEQ ID NO: 163353 - DNA, 669 bp, Enterobacter cloacae
atgaaaaaggtttcaaagccactgggagcaggactacttatcgtggcagttctgctgatgatactctttatttttgcacagacagcgcagttaccgtccggtagcggtgacgataatttctggtatgtgctggcaggttgcatcattctgaccgccacattatgcaccctggtgttctttacgttgtccaggcaacaaaatccctctcccgttacgcctgatggtgaaaacaatcccaacgaagaaagcgcgtcggatcaatatgatttttcagcactgagcaggaatctcagaaggcggcactcgttcttctggcggcgtaaagtccgcctgctgctgatcaccggcgatgaagccgcgattgagcaactggtacccggcctgcaacagcagcagtggcttgaaggcaaccgcaccgtgctgatttatggcggcagcctggcatcggagcctgaccgcgaaaaatacacagcgctgcgtaaactacgccgcgggcgccctctggacgggattatccgtgtactgcccgagtcgcttaagctgaccccacatatcagcgacagcgatttacgcggcctggaaaaaatcagcgaactgctgcgttattccgctccggtctggctgtggcaactgtgcagcagtcactggtcgcagggtacgcgtccttag

SEQ ID NO: 163354 - DNA, 951 bp, Enterobacter cloacae
atggctaccggagaagagaaaagtaaaacaactgtgcagggttcagggtctgttgtaaaagggaaatgtgagcctgaatgttatttacacccgggcagtgcgacactgctctttctgaccgcttcagaaaacaaagttatcgagcaggaacataactttctggctggtttactggaggcccagaaacaggcacaaaaaaatcttgatgatattaactatgaagcgataactcaggcaggcagggtgccggcaagaaagtttgagagtgaaatcaccaatgcatatgcggcattagataaagcgaacaaggcactacgccaggagttgatgtcactgacggcaaatccgccagaaggtgagttactgaatgataaaatgaaagataccgcgattggtatcatggaactcattccgcttaagaagaatacggtaaagggagttaaaaaagtctatgtccgctcagataaaataaaacagcactggcggacatacaggctcagtgaagttgataaaaagagcggtgaagccagttttataaaatataaaaataagactatcacaacccaggatgctgatggtaaaacggttgagaaaactattcgccaggcaaaaatagatactgaaaaactaataaaacagttcaatactgtccctgcttctcttaaatgtgaactggttaaagacacgaatgttattgtcagcagctgggcagaagagatgaacaagtctctgacatggccaaagggaaacgataaggtcgacgaatctgtctaccaccagtatgttgacatcagcgcacaggctcaattgatgcgctacagccatggagcagggctttcagcgaaatataatccgtcagaaggaaagttggagggcaagatagaaggccatgccagttttgctctagggcagccaaggcccaagctgttctgtacttgccggacaggttag

SEQ ID NO: 163355 - DNA, 228 bp, Enterobacter cloacae
atggaaaacaataatcgtttaatgccccatataaggcggacaacacatatcatgatgtttgcccaccgtaactgttttgactttcatctctttaacgcccggtattccttcgacttctggcgcatctgcttacaggttatcctgaaaaacgctattttacaggctgttgcctgtgaacacctgcgctcattccttgtgattcagattctccgcaaccgggcggactga

SEQ ID NO: 163356 - DNA, 348 bp, Enterobacter cloacae
atggaagaggaaatcttcacacgtgaagaggctgcgtcgtacctgaaggttgataaaggcaccatcacgcagtggatccgcagcggtcgacttccggccgcaaagataaatccagaaaaacccaagagcccgtatcgcatttgtaagtctgactgcattgcagcgctgaagtctgtccgacacaatagcgctgtgaatgcggttggtatgcaggaggaaaaagcatgtcaatcaaactacgcggtggcacgtgacactgcgacttcgtcgcgccagatggatcaagagttagacgctctcttgaaacatcggacaagagggaagcgcaagagcttcacgatcgtctga

SEQ ID NO: 163357 - DNA, 1800 bp, Enterobacter cloacae
atggccgaacaaaaagtaaaacttactgagttgccaaccgcgaccgatacactagatacagcgcagctcttggtcaatcagaacagtaccgaccagaagctggctataacacatctgttgcgcgcaaagaacaatctgtcagaactagaggattttgcacaggctcgagcaaatttagatgttccgtctgtagaggaagttaataacaagttatcaggatttattgacgggtcttatacatttagcgctggcgggtctttagcgtcacgatctgattttatctgggatgaagatactaaatcctggtattactggtcaggagtattgccaaaagaagttccagccgcttccaatcctgactctacaggtggtactggtgttggtgcatggattcctgttggagaatcagtactgcgaggggacttagcaaacccaaccggctcatctctcattggttatcagtatcctgcggatggctcagtattcagaaccgtgcaggacaagcttgaggacttcgtcttccttgaggacttcggcggaaaggcaaatgataattcagtagataacagcctggcatttacaaaggcctttgccgcatccccgagagttagactaagaactccaggcgtttattacatgaaaaccagagatgttgttcttcccgctaactggcatattgaaggatctggctttaatactgaactgaagtatccgggaacagatacaacatttactatgtttactgctaacggaacaggccctgaagatgctaatcaaatacaaggcggtgtgttcagaaatgttgtaatttctgctgatgtacctttagaaggtgcatttgttttccgtcacttaaagcatgctttatgggaaagatgcttcttttacaacactggcacaaaaatggataatttccattatattgattacattttttgccaacgatggggcagccctttctatggagcagcaaccttaaatacagagaaacatattagtgagatgccgcgctggttaaactgtttttcatctagctctcctatagatctagttgatacaacagactctgttcttgcaaatagtatcttctatggtggtgagtttgtagtgcggcagcgttacactgcgcctggattgctacctggcgataagacctacggcttccctattcatatcaatcattgtgttatggatgccgttcgtggcactgcattagatcttgacaggcttgcttattttactatcactggaaatctgatatcagctggtagagacctggaaagagacggggttttaataaccaacagcgtatctggaaccttctcagataacgttataaccttttcaggcgcttttggactaagagccgatacactttatcagtgtaattttgggggtaatatacttaatggaaacaaaacaggaggtatgtcactaagtaatagtaagcagtgcactgtttcagggggagccatggggacatcgtactcttatggaggctactatgtgcagccagttggcttcaccgaccccgcaaatagttgcaccgatattacattgatgggaattcagttagatgatgaccttactgtaaaaataagtcttgatactaatccagcatcaaaaaacagagtcctggcatgtagaggtgttcctgataccttttatagcggcccaacatctgcaaggccttcgcctgttggaatgggtttcacctatttcgacaccactatcggtctccaaatccagtggaatgccacaactggtaattggcaaagatacgacggaacaactgtttaa

SEQ ID NO: 163358 - DNA, 1470 bp, Enterobacter cloacae
atgaagtttataatatgcaagcgacatttgatctacattttagcattaattttgctagcaatattttatgcgtctttgtcacggaatatccttcctagttctgacgccgtctctgtaatgttagaaggtaaagatgtagcgtctggcaaccttggacttgctggatggtatctatccaccgtttcattttattttaccgaggtcatttggtatgcattggctaccaaattagctggttatagctcacatcaagcttatataatcccagcgcttatgtactcctgtcttgttttactcgctttttatctatcgcgtgagaaacttggctctgtttgggcattagtttttagtattggcattccatctgcgtttgcttctcttaatacccttattccagttattcatatagggacttacgtttacacgttaatttcttttgctctcattgaaagattcattaataccaaagaaggaaaatatattgtagccttcatcatacttgcgactttaacatgtttcagtgatgatattacaaactacattttggtagctccattattcttatcaggtttattcttcttcgttaaaaacagatcgccatacaacttatatgtggccatggctgtattgatagcttatgctcttgccaaagctatgcagtattacgcttcgataagtggattatttatactaccaggaataccctcgccgcagtttatagattttgacttgatagggaaaaacttatacttattcacagaaggcatgctgcgttacacgggggcattcttttttggtaaaagcccttcagaccctgaagcgattaagtcaataattctccttattgtatttgcattattctgcatgcatacctataaagcattaaaaatatcatataagcaatcaatagttgacatgtctctttgtgtagcatgccttattatgatacctgcatttgtgttaagcaatagaccaattgatgtttggagcattcgctatcttgtgcctttctttatttttgctccaattataattggaagagcaaaaactactaatggattaatatacaacattctggccgtgttcttggtggttttccttgcttatggttctggattcacacaaagagcagaccattcaaatgatattttgaataaattaaaaactacattgcgtgaaaatggacttaaagatggttatggatctttctggtttgcatcttctcttagtattgatggagatttgaaagttgctcctttggatgtcaacagagtccttaacatattcgcgtgcaacaagtggctgtccaagaatgaatggtatagcgacggtggaaacttcatcataatagatgatgaccagatgagggatattgctttaaaagaaattggtaatcctgagaaggtaatacaaacaggagataagcgcattttcatctatgcgaaaaaaataacttactcctgtcaatag

SEQ ID NO: 163359 - DNA, 585 bp, Enterobacter cloacae
atggctattgaagaaaattgggaaagcattcccggatatgaaggcatttatgaggtcagtgatttagggcgggttcgttctcttgaccgtgttgattgtcgtgggcgtacggtgatggggagggtgttgaaaccatatcgtgacggtaataaaggctatgtcgcagttagcttggtgaaaaatggtgaaagtactcgcaccaaattgcacagacttattgcttcagtttttctttctacaactagaggaaacggtgatcaggtcaatcacatcaatgggattcgagatgataacagagtcgtcaatctggaatgggtcacgtgtcagcaaaatatacgtcactcgtttgatgtcctgcataagaaaccatcaggaggacataaaaataagaccggcgcaaaacatcattcttccaggtccgttattgccacacgattgagtgatggcgaaaccttgcattttggtagcgcggctgaggctgggcgcacgctaaacattccatctggttccattcctcgttgttgcaacggtaaataccgtagcagccatggctattcgtttaagtatggggtgcatgatgcttaa

SEQ ID NO: 163360 - DNA, 384 bp, Enterobacter cloacae
atgaaaagcaaagacagcatcaaatattcaaactatcttaataacgttagggtggttatatctaaaagactaaaaccaaatattgggattatttcaaacataacaccctccgcagatggcggcggtattattgaattagaattcgtgcacaacaaaccgagcagggataatattggaaaacatatttacccaaatttaaattccgcattgaaaaatgtcaaacaaagcgcatttgcaggtaatcttgatgctttcaaattctctggcaccaacggcgttatggaaggcaataaaataatcttgattaaagatggttctgattcggaatggaccatggaagcagcagataaagacgcctctatgatttttgggaatgtgaaatga

SEQ ID NO: 163361 - DNA, 417 bp, Enterobacter cloacae
atgaagcataaccgtttaacaggagagattgacggtactcctcaagaaattagcgatttttatactaaccttggtttcaatgctgatgatgttttcgaaaaaagacataagacttttttgattgctttgccagcgaccctgttcattttgttttgcgttggtcttttaatatttgatcagacgcttgtcggtgaaaaggccttcacaatagaagcaatcatcacgttattcattgctctatggtttacggcttctatccagcattatctaaaacaatggattactacattaatcgtcttcataggatgtttactcatattgcttttggctagtaaacaaataacacttaacactatatccactatatctcaagatgcggccagaagttatctgaacaatgatgacaaaggcaaataa

SEQ ID NO: 163362 - DNA, 372 bp, Enterobacter cloacae
atgaccgattcactgaacaacaaagaactggtcgcagtagggcatgagttcgcacgtacgatgagcagcgacacgccgatcatcgatatggcgaagattgtatcgcgcctggccgaacgtctggactgtaccactgcggcgctacgcgaaatgacgaggcagcgtgatgcgctggctgctgagaatgcggggttgaagtcgcttattgagcagcatgcagattccgttgccgtgtgccagaactgctcgcatgaagagccaagcgaagctgacgatatcattgcgctttatcgcactaaggaaaccccgtccaccgacgccttccgggctgaagtgcgtgctattgctatcgctcaggaacagtcatcgtaa

SEQ ID NO: 163363 - DNA, 684 bp, Enterobacter cloacae
atggaaaccgtaattcaggtactggaaaaaatggggcgggcgacataccgcgaagtagccgcccgtctggatatcgagccagtcgaagctctgaacatgttgcgcgagcagcgcgatcagggcctttgtgatttcaccgacggaggctggttcattggctcagctaaaaatgcaaagcgcgtcacttttgttccccagccgaaaccagcgctgcatggcgaagtgccagaacccgttgacccggctgtcattcgtggccttctgtcgaagcatggcgccatggacaccgtatcgctggcagcagcagttaaccgtaacggtcgcggcatgacttcagctatgcgcgcgctggagcgccagggcgtggttgtgaagaacgggcagggaaaaggcgtaacctggtcgctaccgacgacgccagatgaatcgaagcctacagcacctgcagtaaccgacgccgataagcctttggaacaatttgtcaacgagatcccctcgttcacagaagggcgcttaaccgtccagctcgttccgaccgtccgagtgatctcccgggaaattcgccgcgcgaagagcaaactggcgaacctggagagattgcgcgacgccgtgcgcgttgttggccgccacaaacacctcgtgcagcagctggtaaacgcggaggccgaaaatggcaaggcctaa

SEQ ID NO: 163364 - DNA, 1413 bp, Enterobacter cloacae
atgtcgtgtggtcgtcctttccctgtacatgtcttcccacagatcatcagaaatgcggtttatgaagtggaacagcatacgcaggctccccaggctttgattgctgcatcggtattgggggttatttcgcttgcctgccagaaccggattgatgtgtgccgactgaataatctgcgcagcccagtatcactttttttactgacactggcggattctggtgaacgcaaaagcacggtggacaaactgctaatgaagccattgtatcaactggaagaagcatggtttgaaaaatatacccaagatttaattatctggcggaatgaggaaacgacttttagcattgaaaagaaagccctgatgtcaaaactgaaatcagatattcgccgtaacaaagatcactccacaacgaatgaacggctgaaaacgctgctgtcggcgaacccgaaagcaccggtcaggttcaggcagatattcaatgatgccacaccagcggcgataaaagactatctcagtggttgttggcgttccatcgggcttatgtctgatgaagctggtaccatttttaacggctatgcgctaaatgaactgcctttcatcaataaaatgtgggatggcgcaatgtttactgtggaaagaaaaagcgagccagataaattaatcaaagacgccagaatgacactgtcgttgatggttcagcctgatgtgttcaaaaaggggtatctggagcgtaaaggcgatacagcgaaagggatcggattcttcgcgcggtgtttgatgtgtcagcctagttcaacacagggttacagacaaattaccagcccggttgtatcaagcgagcatctaccggtatttcataaacgattgatggagatcgttaacgagagcattgtcagaaatgatgaaaatgcgcgtcagtgcctacgtttctctgcagaagccgaaaagaactggatcgaattttataacaaggtcgagtcagaaatggggttgattggcttcctgtctggctttaaggattacgcctctaaaatggcggaaaatatggcaaggattgccgctctgctgcataaatttaatggtgatgaaggtgatatacccctcagtgccgtagaagccgcagtagagataagcgcctggtatgtggatgagtatgtgagaattttctctaaaccccagacgttgctgttggttagttcagaagcagatgaactttattcgtggataaaagattattgctaccggtgtgtggtgccatatatcaggaagacaaccatcttgcaatatggtccgaaccggttcaggaatcggagcaaagcgaatgagcttctcagtacactttattcgcaaaagaaaatacgggcggagaagatagggaaaaccattttcatacaacctgttgatattcttatataa

SEQ ID NO: 163365 - DNA, 195 bp, Enterobacter cloacae
atggcaagcatgccaatgtccgttcatcacgaagggaaagactggtatccgttctcagtgcattactcagacgctgatgaccgccagttctcatttcacatttacgctgttaaccgggagcacgactcctacgcagtgcgggaaacaggtgagacggcaactcttggcgatcaactcgccagcatcatcaggtaa

SEQ ID NO: 163366 - DNA, 861 bp, Enterobacter cloacae
atggaaagaggtgttgtttttactgcttgtgagttagttaaaaccgagagaaacgacggctttcagctaggaaaagggatttctccagaggaagtcaactatctcgtaatgtattgggataggctcgtctccccgacaaataacgttattcacataggcatcaacaatgaagacgatttggttaaatgcgggatacttgtaagacctaggtttatgattcagggaatccttagtggaagtaacgttgctgactttcaggcagacacgtactctcaggctttggatatccttcgtaaagaagaaggtcaagtagattggcgaatacattttttgaatggccaagtatctttacccaagcaacaatcagaagaaagggaggtgctgagattcgagctgtttaatcttttacctgtgccgacaaaagaaacccctttgcacgagattttagagtttaaacacagacgctcagctgagttagaagctttgcacggttatcttgacgagctatattcagaggtacttgcttcaggtgattttaatttgcaaagagcaaaagcattgtctggacttatgaaatctatagaggatttgaattctataaataatcagggctttaaaagtcctctgaagtttaatttatcatcttccttcgagttcgatttatcacaattggtggtaggggcttcaactgcttatgctgcaatgcagtctcagcatccttttgaaattctcactggcgcagcaattgctgcaataggaggggcaataaaagttaggcctcagttacaaagtgtattcaaaaatggtgaccaaaggctggcttatttaacaaatgctgagagagagggcttgctaatttaa

SEQ ID NO: 163367 - DNA, 315 bp, Enterobacter cloacae
atggcggaatatggtgttcagacatgggacgcctcaggcaaggtaaacaactatggcgttaagcctgtcagcgtttgtggctatctccagctggcccagaaccagaaaacaggctcttactccgtagcgcttccaccgggttgcaggctaacctgttttcaggtcatgaacggtgatcagtttggaacaagtcggaggaagatcactatttcagggggaaccgcgacagtgtcatcagcaggcgataccgactactcagcagggactgagcctgcgacagcggcttatctcattttccagatcgagagggcataa

SEQ ID NO: 163368 - DNA, 3546 bp, Enterobacter cloacae
atggctaaaacaattaccggacgtaaaggcggaagctcgagttcccgaacccctgtcgagcagcccgatgatctccagtccgttgcgaaagcgaaaatcctgatggttctcggtgaaggggagtttgctggtgggctgaccgcgagggatatctatcttgacggcacacctttacaaaacgctgatggttccgagaacttcagcggtgtcgtgtgggagtttcgcccgggtacgcaggcgcaggactacattcaggggatacctggtacagaaaatgaaatcagcgtcggtaccgaagtatccagcgacacagcctggacgcataccttcaccaacacgcagctatcggcggttcgcctgcgcctgaagtggccgtcgcttttcaagcagcaggataacggggatttggtgggatactccatcaactatgtggtggagcttcagacggacggtggtagctggcaaaaggtccttgatactaatgtgaccgggaaaaccacatccggttatgaacgcagccatcgcatcgatttaccgaaagctggcagcacctggaccatcagactgcgcaaaattaccgctgacgcaaacagtgccaaaattggcgacacgatgacgctccaaagttatacagaggtcatcgatgccaaactgcgctatccaaacacagctctgttgtacatcgagtttgattccagccagttcaatggctctattccccaaattgcctgtgaaccacgtggtcgtgtcatccgcgtaccggatacttacgatccggaaacaagaacttatagcggtacgtggcttgggacattcaaatgggcctggacagataaccctgcgtggatattctacgacctggtggttagcgaccgtttcgggcttggggatcgtctcacaacagcgaacatagacaaatggacactttaccaggttgcacagtattgcgatcagatggtgccggatggcaaaggcggaagtggcaccgaaccacgttatacctgcaacgtctacattcaggaacgcaacgacgcttatacggtcctgcgtgattttgctgctatcttccgcgggatgacctactggggcgacgaccagattgttgcgctggcggacatgccgagggatgttgattttacatacacgcatgcgaacgttatcgatggccggtttacctattccagcagcaccacaaagaaccgttataccaatgcgctcgtatcctggtctgatcctgataacgcctattctgatgcgatggaacctgtttttgaacaggcgctggtttcgcgttatggttttaatcaacttgagataacagctattggttgtacccggcaatcggaggcgaaccgaaaggggcgatgggggatcctcaccaataacaaagatcgcgttgttactttcaatgtaggggaagacggtaacattccacagcctggctatgtaattgctgtagccgaccgaaatctttccggatgtgaccttggcggccgtgtttctgcggtgaatggtcgtgttttgacgctggacagggcaccggatgcatcttcgggcgacaggatgattgtcaatctgccatcaggggtttcgcagtcacgcaccatccagtcgataaggggcaataaagtaaccgttacgactgcttacagcgaaacgcctgtggctgaggccgtatgggtcattgagtctgatgagctctacgcacagcagtatcgcgttattacggtaactgataataatgacggcacgttcacaatcgtcggtgcaaatcacgatccggataaattcgatcgcattgatacgggagccatcattgaccagcggccggtgagcgtgatcccgccgggcaaccagtcgccgcctgcgaacatcgtgatcagctcgttttctgtggtacagcaaaatatcagcgtcgaaacgatgcgcgtgagctgggaccaggcgcagaacgctatcgcctatgaagcgcaatggcgccgcaacgacgggaactgggttaacgtgccgcgcagctccaccacgtcattcgacgtccccgggatttatgcagggcgctacctggtgcgcgtgcgcgcaatcaatgccgcagaaatctcgtccggatggggctattcagaagagaaaacgctgacggggaaagtgggcaatccaccgaagccggtcggcttcatcgcttctgaaaacgtggtattcggtattgagctgagctggggattccccgcgaataccgacgacacgctgaagacggaaattcagtacagcctggccgggacggaagacgatgtgatgctgctggcagacgtaccctttccgcagcgcaagtatcagcagatgggcctaaaggcagggcaaattttctggtaccgcgcgcagctggtggaccgcagcggaaacgaatcagggtatacagactttgtgcgcgggcaggccagcatcgatgtatccgacatcaccgatgcaatcctggaggacatgaaaggctccgatacgttcaaagacctgatcgagaacgcggtggacagcaatgaaaaaattgctggcatggctaacgacatcaaacaggccaacgacgaactggagcaacaggcgcagaaaattgcccaaaatgcccaggatatcggaaaggttcagaccagcgttacaaacctgtcgagcaaggtcggagatgtgtcttcttctctgaacgagcttgagcagacagtggcgacggccgataccgcactgggtcagcgtatcgatagcatcaacgtgtctatggacggcatggcggggggagtgaagaactccgccatcgcgattattcagggcaacctggcgcaggtggcggcgcgcaaaacactgtctgcatcggtcgccggtaacagcgcgcagctggaccgcattgatgaggtgatcgtcaacgagaaggaggcaacggcgcgttcgctgctgagtttgcagactgacgtgaacggcaacaaggcatccatcaacagccttaaccagacgttctcggattaccagcaggctatggccacgcaggtaaacagcatcacggcgaccatcaacgggcatacgtcagccattaccactaacgctcaggccatcgcgaacgttaacggggacctgaaggcgatgtacagcatcaaggtcgggttatccagcaacggtcagtattacgccgcagggatggggataggcgtggagaatacgccgtccggcatgcagtcgcaggttatcttcctggctgaccgcttcgccgttactcaccaggccggagcgaccgttacgcttccgttcgttattcagaacgggcaggtgttcatcagagacgcgctgataggtgatggcaccatcagtaacaccaaaatcggcaactacatccagtccaataactatgtggctggctcagtcgggtggaggctggataagggcggtacgtttgagaactacggttcgacagctggtgagggggccatgaaacagacaaaccagacgattagtgtcaaggatgccaacaatgtgttgagggtgcagatcgggagaatcacgggaacatggtaa

SEQ ID NO: 163369 - DNA, 288 bp, Enterobacter cloacae
atgcctgaacccacggcggaagacctggcgccctatggactcacgccggatgactacgacgataaaattgtggatgtctggcccgatgtctggcctgcgttccgtgtctttcagtctgtcagtactcagtggcgcacgggcatgggtggcgcaaccgggcttgattacaacgtcctgccctgggtaatgcgactccatgctgtcgacgacgaggcaaccgcactttccgatctccagataatggagcgaaccgcgcttaaaataatgcataaagagagggccggatga

SEQ ID NO: 163370 - DNA, 444 bp, Enterobacter cloacae; identical to SEQ ID NO: 140641

SEQ ID NO: 163371 - DNA, 1932 bp, Enterobacter cloacae
atgagtgaaaaaacagatacaaccagggctttagagttaaagtatgacgacaatggaaaaccttcatggcgttcatgcccttctcataaaaatataaaggtccgcggaggatgtgatttacctcctcatctccctggtttgataatactcgtccatggggttaactcaacaggtgaatggtatcaaaatgcggaagagtctctctgcaaaggattaaatgacaggttagggctcaatggttctcaatttgaattgaagccgaacaaatatagtgcagattgtgagaaggaggaagggaaaagtaactcgtcaccttcacctttagctcgtagaaaacttattgaaaattctgagcgctctccaatcattcgattctattgggggtattcttctgtgaggggggaagaggataaatatattatcccgttagctaatgcggatggtgaagattatcatgaaatgaaaagaacaggtataaaacaagatgacattcaaaaaaaagggccatatatatggggaggtggcccattccaaaatggcacgaataacttacactcgctttggagtgactatggattcgatgagaatctggcgggaatctctggagcaaaacttcagtatctcaatgaagataaagatagacttttaacaaatgctccaccaagaaaatactattcacatgcagctaagagattagcagatcttttagaccttatccgggataaatatccaaatgatacggttagtattatctctcatagccaagggacaatgatttcgctagccgcagtcgcattagcaaaaaaagggccagatactctttttatattaaactccccttatgcaatacataatagccagcttaatgagctttcaattcctcagaaagagagaatttctccaagcggacgcgaaaatacattatcatcaataattgaaaaaattgcaaaacaatccacgcatctgtcttctgtgggttataaagggttatgtgtaggcaagtttactgataaaacgaattggaagcctgaaggtgagaatgtaatacgggctggaaaaatacaagagcgtgataatcatggcagaacgtatatttatttttgccctcatgaccgagtgatggggtcattaccgcttcgctcgatagggtggcaagggctacctaatgataaaaatggtaatccacatctattaattgtgaaatttaaaaataatttgtaccagaggatgttggccaggaatacgccatgcggttcttatcctgataagcagacaccatttggtactttacctgatggaaaaccattttgggatgatgatggtgataaatatcaaagtagtagcattacatatcctgaccctccaaaatggcaaacagtgtttgtaaatgcagagaaagtccctgagcctattaatcccagtgagttggccgaatttgacgaaaccagagtaggtaaagagcatggctcaaaacaacaggatgggtggggtgagatagcccctaaaactggaaagaaaaatgacaatacatatgataactatgtcaatttatatccaaaccaagatgtcgtaatcggctataaggagcttccaagtggttatgtgcaagagataacaaggaaggaaactttcgaagaaaaagataaaaggttacgaacttatgtttctcaaccaacagatcacagcacactgcccggaaacaaggaatttatgaccagagtagtagcttatgatttaccgataggttactgcgatgctacatgggataaagaatttctttcaacgctccgatatcttgctgattggaccactggcgcagacccttatatgaacactggggttgttgaaagaattaatgaaccttcaatgataagtcgggaaacgggtatcgaggaaattattcgagaaaaggcaaaggagtatggttattaa

SEQ ID NO: 163372 - DNA, 540 bp, Enterobacter cloacae
  misc_feature (462)..(471): n is a, c, g, or t
gtgacagttcccggtgaggttaacccattcgttcagtatgccaaggctctcgtttccaatgtgatttccgggctttcttacatagagaaaaagccttctatttatctgattcacaagaacatgaaaagccacatgtctattgtgaatcttacagtcaaggtaatggagtcatgttacgcgagatattatggttacgatgtctggaccgaaaaagttaagtacgtcgctaacgataccttgccggtacgtttcaagcgtctcgctgaatggtttacggctcatttcatgaattacgaggggtccgaacaaatagactggttagatactgtttcccagcttattgattactcaatgtccgacccagagcatatggctaaaatgaccgcaggtattatgcctgttttcgatatgctcattgaaaaacctttaaatgagcttttatctcctaacccgaactcagtnnnnnnnnnnatcatcaagagaaattgtaacaagcgaagggatgttcagcactggcggggtgctatacatttcgcttga

SEQ ID NO: 163373 - DNA, 318 bp, Enterobacter cloacae
atgcaatggatttccacagccagccagaaaatcgatgagcgtctctatcgtgtctgcgtctgggtaaaaaaatatcacgctgatgcgattaaccgcgttgtgctaaccgttgatctaagtaaagcccgacatgaccctgacgaggaccaggtaagagcagagctgctgtgcggccatcatcgggggggtgttcgaaagaaaacacttgagcgaatcgatgcgttccagaatctggtcacgaaaatagggcaaatcgtcataactcatacgtttctccaggctcatgttatttccaatcaattttgctgcccaggctga

SEQ ID NO: 163374 - DNA, 243 bp, Enterobacter cloacae
  misc_feature (75)..(84): n is a, c, g, or t
atggagacgccatggatagtggatagtcttacccacctgggtgatccgattgaggcgaaaacgaccatttatacnnnnnnnnnngcggccattattttttgcttcgtaaggaaaacgcttcgaactctgcgcctgacgatcaaaagtttgctttcctgcctgacgggcgcaatctgtgttggcagaccgcaaccccggtgcttcagcatctcctactcaataaaaacgttcctgagtcgctga

SEQ ID NO: 163375 - DNA, 444 bp, Enterobacter cloacae
atgcactatctgtattatctcgataaaggtaaaaggattaatctggagaatattatgaaacatactcaaacattgctggcaggtttgctggtacttgcccctcttttttctgttcaggctgcctctcaggtaagcacaggctgtgacgccaaacgtcagaatattgaggagcaaatagattacgcccgcacccatgacaacattcaccgcatagcgggtcttgaaaaagcgctttctgaacttaataccaactgcaccaacgaagggttgcgtgctgagcgtgaagccgatatccgtaaaaaagagctgaaggtagaggaacgccgtcaggaactggctgaagccagggtcgatggacgtccggataaaatcattaaaaaacagcagaagttggaagacgctcaatatgagctaaacgaagccagaaataggctaaacaaatag

SEQ ID NO: 163376 - DNA, 612 bp, Enterobacter cloacae
atgactacgttaggcaccgtagaaagtgactggagtacagatgtagataatgacttcattgttattaatgaaggggatgtagcaaaaggatacattcatctttccgcaggtgatgaaatcactattaaaccagatgggaaatgtacattcaaatcttcatcattaagtaacaccatacctgtccagggggggaagtatagcggtggtggctatggagtgttaatggccctggcagggaaagttaaaataacattatcacctgtgtattttgattccagcgggaatgaagtgacaacgtctggaatgagtgatagctatttgcgactcacggatccaatcgtgaatggtgacgaactgattggggcgaaaaatgcaacattaaatagcacctcaaatatcatcctcaaccaaaacctggtcttgataaaaaaacaatatacacacctctatgatgatctgagaatagcattcagcgatgcattgaataatttatatccggatgttaataaaaacatcaatactgacggtgaatatgttgatgatgaatttaaaaaagcatgggacattcttagtgaaatgtataataaagggaaaatcacccttattaaatag

SEQ ID NO: 163377 - DNA, 894 bp, Enterobacter cloacae
atgcgattaagtaccctttatatgtaccagcagagcgcgcaaagcatgtcggcgcgcatgagtcagagcaatgatgcctacctgcggatgtcggcaggtaaaacgctgttaaaagcttcggacgatccggcagcggctaccgatgcggtgaaatataaagatgcactggcaaagcttgagctatacagcgacgtgcgttcccgcgcgcgcggtgcgctggagcatgaggacaatatactgagtggggtcgggaacttactgaccaccacgctgaaagagaaactcgtggcggcgggttcggatgcctattctgatgcggatcgtaatgccttaggcaaagagattgaggggattcgtcagaatttgctggatttggccaatagccgcgacggcaatggccgctatatttttggcggttttaagaccgacaaaccgccgtatcttgataacggtacctatgttggtggggaagaaacgcgcctgcagaccgttgcagacggtacggagatgcagattggccatctgggcagggaggttttcgaagatctcttcaggaggcttcagacggcggtggaagagcttagcaaagacccaattgagcgagagaagatggagaaggcactgaaggccgcaagccagggcgtcgatgcgggcatcgaccgcctgggcaaggcccaggccgagctcgggaccaacctgcagcagctggaggcgctcgatatgtccggtgacgtgatgatcattgatatgaaagtcaaggtggataccgccattggtgccgatacgggcgtgctggtttcgctgatggcggagtcgcaaatgtccgagctggcgctgaacgcttccatgtacgtttataaaagtatgcaaaaaatgaatctctttaacagctga

SEQ ID NO: 163378 - DNA, 1470 bp, Enterobacter cloacae
atggcatcaaccaatttcttaggcgttggctctaacctgccgttcgaccagtggctggcggtggagcgtgagggtattagccaaaagctgaacccctatttgcaaaagcaaagcacctttcaggggcagatttccgcctgggggtctatctccagcgcgttgagtaccatgaaggacaatctcggtaagcttgagaatgaagggttcaacggcgtcagcgtcagcgacaataaaacctttaaggccacggcaggtagcggggcgatccctaacagctattctgttgccgttaaacagctggcgaaagcgcatcagttggggtttgagaatgacacgcgtgataaacctatcggtggaaccggcgcgaaagttaaaataagtgtaggtgacggcacccctcttgaacttaatttaaaggcagatgaaacgtccctcgatcagattgccaaaaaaatcaatgcacagaatggcgatgtcgttgcagaagtaatgacggtcaaagagggtgagcacaggcttgttcttacctcaaaaaaaaccggtgatgctggggagatgaaaattgaggtgagagataatgggacacttgaggatatgctcaccgatcccgatccggcttcggagacgaaaccacaaaacgcaaaaattgagctgaatggggaagaggttattcgtagctccaatacgattaacgatctgattaccggtgtgacgctggagttgcgtgaggtctcggaaaaaaatcctgactacacgggtgctccaggtgaaagtgaatacaaaaccgaatctctcaccatcaccgaagacacctcaaaagtgaaaacgctgattgaggagttcgtaaagaattacaacagctacctcagcaccgtcgccagtgccaccaaatataccgccccggatcgcgacagccagtcaacggctcccgcaactaccaacggcgcgctcttcagcgatggctcgcttcgccgcctcaccagccagcttaaagcgaccgtgggggggaactatcccgatgccgatgccgttatacagtcgctcggcagtatcggtattaccgtgaagtttgatggcaagattggcgacgagcgtggcgggaatctgggggagttgtcgattgataccaaaaagctggatgcggcgctgaaagacaaccctaaagcggtggaagcgctgttcctgggcaaagacggcaaagagggtatcaaagatcgcatggagggtatttttgatacctacctcggggataaagacgccatcaccaaaaaagagggcgtgatcgaaaccgcccttgagtcgctgcgagagcaggataaacgtatcggcaaacaaatcacggctatggaacggcgtattgaagaggctatggcgcgcaaggaaaaagagtttcagcgtctcgacaaggtgataagcgatatgaacaacatgagcagtcagctacagggttcgctggcagggttgatttaa

SEQ ID NO: 163379 - DNA, 390 bp, Enterobacter cloacae
atggggtttctttcaccggcaatggactatgttgaacagcgcatatcgctcgaccagcgcttcataatcaggccgtcatctacctattttatgcgagcaggttcaacgcatttccgcgagggcataatcaacggcgcactacttgtcgtcgatgcatcgcttaacccctgcgatggctctttgcttgtttgtgcgtgcgatggcgaattccgcataaaacgataccgcgcatatcctgaaccacatctggttaatctcgagaatgggaaaaaggagctgttgcggcagaacgaggaagcaggggagcctgaccgttcagtttttggtgtgatcacttacatcatcaatgatgcgcgcgccggggagttcgacgactgcccggtgatgtga

SEQ ID NO: 163380 - DNA, 1119 bp, Enterobacter cloacae
atggaaaggcagcgtagtaagaatggtaccatcttgggcttgcaatacatgcgtggcattgctgcgctgatggttgttctattccacctaaaggaaagacttcctgacaatattgctccgttttttaacaacggccgtggtggtgttgatatattttttattatcagtgggtttataatttattttataactcagaatagcagtgaattaaatccaaaaacatttattataaagcgagcattcagaatattccctctctattggtttgtattcctaatctctacatttttattcttcactaaatttgatttcacatcagttgtcagaggtttttttcttttccataacaattaccaggctcctgcaccaggctttggatttagtattgtcggcgtggcatggacattaacatatgagatttatttctatgccattttccttatatgctccctgatatcaaatagattcaggggagagataacatcatttgttttgcttatcttaccagtggctttgcaattccattttaatggtgatttttctctttcttcctccgtttcggttaacgttcatggaaatggattgttttcacaagcgttgcacattgttagcagcacaatgatttatgagtttgtattaggaattattctatgcaaggcttatttacgccttgaaaaagcaactattccagtaatggtatggcgaactctttttgcaatatctacaaccttatcagtcgctatattctataatgacgtaggtctgtggtttgggatttacaaaccatacaacgggaatatctctaacgcgctgggttgcggtggatttattttcatggctataccattcgcgcttatgtttcttttcttcgaactatcgaaattcaaaaaaaccattccccctctaatgtttttaggtaatatttctttttctctttatctgtgccactggttcgtgaaccgcttatttacggactacatgccagatttcaatagcatgaatagtttcttcgttgtcattatcctttctttcttaatggcctatgcgtgtcacatacttatcgaaaaaccaggcgtgaaactgatacgacgtactgaccacggacctgctttgagctga

SEQ ID NO: 163381 - DNA, 453 bp, Enterobacter cloacae
atgaccaaaattattaactctgaatctgcaaattatttttacagcgcttccactggtggtttttatcctgttagcctgaaagaggattatgaaacggcaggttcctggccgggagatgctgtttctgtgtctgacgaagatatgatggcattacaggcaggacaatccgcaggtaagcagatttcttctaatgctgagggatatccagttctaaccgatcctaaaccgcttacatctgagcaacttcaacaacaggctaaaacccagcagagtgcgctgatgaatgctgctggaaatgcgatagcacctttgcaggatgcagttgatctggatgaggcgacggaagaggagcttgctcttctcaataaatggaagcagtaccgagttacgttaaacaggcttgatttatcaacggcgccggatatcgagtggcctgagaaacctgaagaataa

SEQ ID NO: 163382 - DNA, 1470 bp, Enterobacter cloacae
atggctaagaacgattttaaaccttttgcgaccggcaacggcgcgaatgtattgactcaggcagagtatgaggcgctagccgcattggcatctggcttcacctcgggtaaggcatcctcagctcaaataaacaaagcaattcggcaggcaacagttattgccagtgtaatagcgcaatttacagcagacaacggcggaagcgatgttctggataatggaaatacggccgctattcttgctagttttatcacagctcttaatacttccgtaggaaactcactgggttcgaacttcctgcgtaagactaataatctgtctgatatttccaatgctacaacatcacgacaaaacttatccgctgctaagtctggggcgaatagtgatattactgcactcagcggacttactactgcacttactgtacctcaaggtggaaccggcgcaactagcgcaattaatgccagggcaaatctctatgccgcacaactgggagccaattcagacatcacttcactgtctgggctaacaacagctttatcaattccgcaaggggggaccggggcgaaatctgcgactgatgctcgtgctaatctttttgctgctcagttgggggcaaactctgatataacatccctttcaggcttgactactgccttgtcaatcgatcagggtggcactggtgcaaaaacagcagcaggagcgcgtagcaatatctctgctgcatcaagcggtgctaattcagatattacttcaattagcggacttacgactgctttgagtgtgccgcagggaggcactggtgcaaccagcgcggtaaatgcaagagcgaacctttttgctgcgcagttaggagcgaactccgatattacatctctaaatggactcactactgctttgtcgattgaccagggcggaacaggagccaaaacagcagcgaacgcacgtagtaatattggtgctgctgcttctggttcaaactcagacatcacagccattaatggcttaactacggcactaaccgttccgcaaggtggaacaggatcttcaagtgctgcaggtgcccgagcaaatttgtttgcagcacagctcggcgctaactcagatatcacgtcattgtctggattgacaaccgccctttcagttacacagggagggactggtgcaaaaacagctaccgctgcacgcgcgaacctgtttgcaggtggtattcctaccgcgctgaactcagctcaaggctggtggaaatgcgcggatactggacgtattttccaacatggtaaagttgcaattacctccggctcacagcttaccttcccgattgcattccccaatgcctgctttgcagtgatccttactgataatgatggttataaggatgtaggtctgcttggcgcgacgactacttacgcatcattcaccagtggttctggcggtactgtcaccgttggttatctggcaattggctattaa

SEQ ID NO: 163383 - DNA, 681 bp, Enterobacter cloacae
atgagtaaatacacgggacttatcaccaattaccacgcaacaaaacctaagttttatgatcacattgatcttagtacccggcctttaacgaatgtcattttgtcaatgcagggtttgcttacagcattcgatttggataaagccgcgggcgctcaactggacatactcggtttatggataggacgcagccgtattgtcagacgaccgatcactggcgtctatttcagttgggatacggatgatttgggttatgaccagggtgtttggcaaggaccgtatgatcccgattctggatatacgtcattaagtgacgaaacctacagaataattctcaaagcaaaaatagcgataaacaactgggatgggagaaacgattctttacctcccattcttgacgctgcgacagagggctccggaattaggatgcaaattgtcgacaatcaggacatgacaatatctgtatgggtatttcctgaaacagatattgatgatgtatctctggaacttatagcagcaataagacagggatatctgaccatcaaagctgccggggtatgggcaggaagtatagaaacaccagcagttgaagcaccatctgaaggaaataaattctttggattcgacatggaaaacgactatttcgccgggtttgactccggggcgtggggagaaatattgtaa

SEQ ID NO: 163384 - DNA, 387 bp, Enterobacter cloacae
atgccttttctcgatgtgactgatgtcctgctcgatcctgatttctgtgattacacgctggtctgcacccgcagtacgcagacggtcgacgctgatggctttaccacgaacgtcagccaggatatcccgttcaacggggtggtgacggttgaccgatcgctggaagccaggcgtatggccgccgggcagtctatcggcggggcgatcctcgttgtgacgcagttcaggctgacgcagggcaagtcgggtctggatgccgatgtggtgctctacaacgggcggcactatcgcgtgacgtttgtggatccgtacacctcgtacggtgccgggttcgttcaggctcactgcgagctgatggagttcgacggaggtacgccagttgaatga

SEQ ID NO: 163385 - DNA, 498 bp, Enterobacter cloacae
atgagcggcgtgaaaatcagggcggataatgccgcctcggtgctggctggtctcgacaggctatcgaagatggatgtgctggtgggcatccctgaggggcctcagcgtgaagatgcacctctttcgaatgcgcagcttggctatctacaggccacaggcgcgacggtggagatcgacggcagcgtcgtaactctcccccctcgtccgtttctcgatattggtattgaggattctcaggccgttaccactcagcaccttgagtcagcagcaagacacgcactggcgggggatttcaggattgcagaaaaagagcttgagagcgccggtattgtagcaagcatggctgtgcagagggttattggagatggggatcgcctggctccgctttcaaaaatcaccgcagccaggcgcatagagaatgggcaggatatcaagcctctctatgacacagggaaactcaaagcttcaatcacctacgttgtgagaggtaaaaaataa

SEQ ID NO: 163386 - DNA, 1263 bp, Enterobacter cloacae
atgaaatatttttttgagaccaggctcggggaaacccggttccgcatggcggacggttcattgctttgcaaagacgtgccgattgccagaacgggatcgcaggtctacctgccggaggaaatcgacctcgaaccggactcgagtggcaccgtcactgtctggcgaacggaagacgaggtgttctcccctgaaacgatggcgagctttgaaggcgtcgccgtcacgctgggccacccagaagatgctggtggcggaatcctgttcgttaacccagcgaactttgcagatctggcccacggacatattcagaacgtccggcgcggcaccggcgataaatccgacctgctcattgccgacgtgctggttaagcgccaggaggcaatcgacgctatcgaggctggcctgaccgatgtcagttgcggttacgacgcgctctataagcagctctcgcccggcaagggcaagcaacaccaaatcacaggcaaccatctggccgtcggtatcgaccgcgggcgggctggttctcgttgtgcaatcggggattcggccccatcaaaaccaaaggagaagcctgcaatgtcatggctgaaaagactggctactgccattaaaacgaaagatgaggatgcgcttgcgcagctcatcgatgaagcgccggacatgccgtctgatggcatgggttctatccccggagtgactatcaacatgaatgtgccttcacaggctaccgcgctgccgtcagaccaaaagactacggtcgatggaggagccaatccagatgatgataagccgactggtgatgaagacgttccggcatgggcgcaggcaatcattgcccgcctcgataagctggaaggcaaagcgggcgacgctgaccctgacggcgataagcccaccggtgatgaagatgcggaagaagatgcgaaggtgaccggcgatgcggcgtataagcgcaacatcatcggcgacgctgagatcatctgcccgggcttccagcctgctggagataaaggccttaagcgtcaggtgctcaaccaggcgctgcgcacaggcgacagcctgaagtcgttcggcattgccgacttcgccacagcgccgaaggcaaccgttgatgcggtgttcaaggctgctgtcgagatcagtaaagccaagaaccatatcaccccgccatctggcaaaccaacaggtgaccgcgcccgcggccatttgaccccggctgagctgaacaagatcaacgccgatttctggaaacgcaaccaataa

SEQ ID NO: 163387 - DNA, 198 bp, Enterobacter cloacae
ttgagtagaaaagatgagttattaaaaaaattagatcgcattgctgatgagtggtcccgcaccacaggccttcataatgactatggtgagggcgtgagataccacgaaattaaagatgcgcttactgagcttggcgtcaatgctcgtatcgatacgatcgagggtaactcagctcaattccgggtttatgtggattga

SEQ ID NO: 163388 - DNA, 321 bp, Enterobacter cloacae
atgaaagacggtatttattttgtcattttcaaaagcggtcagaatgatgttggaaacggaacggtcgttgtgaaggataacgcggttaatggtggcgattttggatttacctatcaggggcgcatccaggatgggaaattgaatcttcacgtgtcacgccataaccctactgcacaaaacgtcatcgcaggtctgaatgactatgtaatggacctgtcagtgagagatatcggcgatggttatttcctcgagggcagcattgcaggcgttccaggtgcgaacttagctgtacaggcaaaattcatcggcaacctgatttaa

SEQ ID NO: 163389 - DNA, 393 bp, Enterobacter cloacae
atgaagatccgctacaagataatcatcttcgcgttcgcgctgagcacactgggcggaatcatctggtcttccagtcactaccacgataagtaccaggcggaaaagaaacgcgctgatgctgctgagcagaacgccagcgccgccgaagcgattaccgccaacgtcattcaggccgttaacgtcatcaacgccatttcagaggccaatcaggatgcaaagaaccagatcgcactggagtcacagggagcccaggcagatatcaaagtggctgttgcgaatgatgattgcgctcgtcagcctgtgtctgttgcagctgctgaccggctgcgggaatacgcggacagtttacgtaccggttccggtggtgccgcttccggcaaacctgaccgctga

SEQ ID NO: 163390 - DNA, 489 bp, Enterobacter cloacae
atgtcgccggaactccgaaataaaatcctcgcagcactggggggcggcgctatcgccattgccacggtcatgctatccggtaaagacggtctggaggggcgcgaatacgttgcctatagcgacgttgccggcgttctgacggtctgcgacgggcacactggctccgacatcattccaggcaaacgctataccgacaaagagtgtgacgctctgacccgggctgacctgacgcgaatcgccagacaggtgaatcagcatatcagggtgccgctcaccgagactcagcgcgcggcaatctactcgttcgcttataacgtcggtgctgccgcaaccattaactccacgatgctgagaaagcttaacgctaacgactacggcggggcatgcgctgagcttaagcgctgggtgtatgccgggggccagaagtggaaaggcctgatgaaccgtcgcgacgttgagtatgaagtctgcacgtggagccagaaatga

SEQ ID NO: 163391 - DNA, 207 bp, Enterobacter cloacae
atgcatcgtatggaaaaattcactaatggtgccgctgttggcgcagggacaacgacgacgctgttcggcgctctctcgcttaacgattgggcgctggttgtgggcatcgcctgcacgataggaacattcatcatcaactggtactaccgggacagggaataccgaagaaagtcgggaggtgacgatgtcgccggaactccgaaataa

SEQ ID NO: 163392 - DNA, 189 bp, Enterobacter cloacae
atgagccctttaatcgttaccgctatggttgtttacgccttctgcgccggcctggttgcagcaagagtctggcgtcgtgtgaaaaacctaaatttcaagctcaaagagaagttggtcatcactgctatatgggcgtcctgctgtttagtgtcatggccgcttatttggatgatggaggagcgggaatga

SEQ ID NO: 163393 - DNA, 237 bp, Enterobacter cloacae
atggctcgttttatcgcagttattcacgggtggttcgtcgacagcaagggttttgatgtgcatgaacttagcgcaacggacaaggaatcggcccacaacgaagcggtgctgttgaagcataaacgagaaagcactttctgctcatgtgcctgcactgtagttgagattgctgaccacgaaagattgccaagcaagttaactctacgcgaacgtctgacagggaggactaacccatga

SEQ ID NO: 163394 - DNA, 414 bp, Enterobacter cloacae
atgaaacagaaatttatcgagtggtttaccaaaggcaataacggctgcgcgccatcaatcaacgccgacggtagttttgagcaagagaaaactcagcacatgttcgaagcgtaccaggctgggatggctgaatctgatcgcaaggtggagcagctggctgcggagttaagtgctgtagacgccatccacaatgacgccgtattcatcaccgacgatcactatgagcagtgccctccggaagtgcagaagattattcgctcgttggctgtgttgcagattcctgcatatcagcaattcctggctgaagtgcgggccagcgctatcgaacatgcagcatcagaaccctggggtagtggctacgtgttcgatgaactgaatgacttcgccgccaaaattcgccaggaggcacaatga

SEQ ID NO: 163395 - DNA, 405 bp, Enterobacter cloacae
atggcaggacaaacaaagcaagtaaacaccgacctaagagctggtgacaggttcgaaaccgcatacccatttatctatgtgtgcacagattatcagtcatacgacggcaacgtgcataccgatgagcgttggattggtggctgccacaaaaattatgagcccgctgactgtgggtatggtgatcagtgcttttacacggctgatgctgaaggaaagcgaattcttgaggttttggctgtcgtggaaatgccagggaactggcagagaagaattatttactcctgccatctcatagagcctgaaggcaaggagaggaaaggcaggaaggcttacacagtaactgaatccagattcttaaaaatggcttctggttattttgcagattacgaattggaggatgcctaa

SEQ ID NO: 163396 - DNA, 270 bp, Enterobacter cloacae
atggcaattgattttgaagtgaaagctactggcatagatgtttcaacaagtgggtaccgtgaccacgtaattttagaagttcgcggcgtggagctctcagagcttgtctctgaaattgaagggaaatcgctctttcaggaaatcgatcttgatgactatatcgactgggctgaggcggctggtcataccgaagacgttcttgaacggcttaatgcagatgacgttatcgcatggttgcgcagcaacgggcacctggatactgaatcatga

SEQ ID NO: 163397 - DNA, 969 bp, Enterobacter cloacae
atgaacgctccaattctttcaatagttgtgccatgctataacgagcaagaggtttttaatctttgtcttgatgaattatctagacgtatagtcgaaatgaaagataaaggtaaaataaataccagaagccatattgtattcgtggatgatggaagcaaagatgcgacatggagcttaatacaaaacgcttcaaacaataatgatttagtaaaaggcgtaaagctatcacgcaataaaggccatcagactgctttgatggctggattatcatcatgcatagattctgatattactgtaagtattgatgctgatttacaggatgacacagcagttattgaaaagatggttgactcatatcttacaggacacgatattgtttttggagtaagaaatgacagaacatcagatagcttctttaagaagttcacagccgaagcattttacaaaataatgacgaaacttggcgttaatcaagtagagaatcatgctgattttagactattaagcaaaagagcattgcattcactccttcagtacaaagaacaaaatctttatataagaggacttatacctctgattgggtatccttccgagaatgtttattattctcgaagcgagaggactgcgggtgaatcaaaatatcctctcaagaaaatgctggcattggctcttgagggaatcacttcattctcagtcacaccactaagaattgttacggcgctaggttttattatatcaatactatcatctgtgggtgttgtatatacgctaattcaatatttccttgggcatacggtgagcggttgggcctctatgatattagcagttttatttattggaggcgtgcaaatgctatgcttaggagtgataggtgagtatatcggcaagatttatatggaatctaaaaaaaggccaaaattttttactgaatctaaaattggatttaatgagaatgacgggaatatgtaa

SEQ ID NO: 163398 - DNA, 474 bp, Enterobacter cloacae
atgagggtcgatcaagtctatgtctggtgctacacttcaggcctttcagaattcactgatttttatcatgttaaagatgcgcaactcatgagtataaacctttcttccatttatcgtagccaggccgtcaggtactgccttgttggcggaatgaacacagcggtaacagcttcagtgatccttgctcttaccgcctttggtgtaggactctatagtgcaaatttttcgggctatgttgttggtatcctgtttagttttatcctcaatacgctattcacgttttcatcaaagctttcaatatcaaaacttctcaaattcctggcatgctgtggggtttgttacgtaataaatattttcgctatgaaaataactattatagctggcgttgaaaatttatatctcgttcagttaacagggatgtttttttacacagcagcaggctttatcattaataaattatgggttatgaaataa

SEQ ID NO: 163399 - DNA, 309 bp, Enterobacter cloacae
atgccacgcacagcagacatacagaccgcctttatagcggtagctgatccattcacacctccttctgcaagcattattgaaacgccggaaggttatgatgtcattgataatgcatcagcattcaatcgcggagacacattgctcatctggttttgcggacgccagcagcacgcatattgggctggtgatgcgctcattaccgatgatggagaggccatagaaggcgatgcgcttgatgatgttcgcctggttggtgtagttacgcataccatttacccggtttcctcagacgaaaaccccttcatgtag

SEQ ID NO: 163400 - DNA, 636 bp, Enterobacter cloacae
atgatttcagaaattatagtgaaaaaggaagtatgggcttctttagcctcgctactgcctattgctactgctttttgggcatgcataaaatatatctatggttttctaaaaaatggaaaattgattaagcttcgctatttttataaagaatatggtgagcatttggatgatgaggacaagaaatatatatcaaaactccttaaggaaaaggttatgcggcaagtagttcccgtaccatcttggtcgaatagaatgaaaatggtatatattttgaatcgttgcgacctaactttatctctacgaaaaattgcaatcttaagtcgttacttaaaatttgatgggaaacggttttattttctcgttgataccaaatatctccttaaaaggaaggcagcttggttcgccggtgtagtatatctagcttatgcacttgcacctataaagttctaccatgagatcttttttggttttatgtcaacaaatattgcttatttattctcattgctatgtgtatgtatggcgatctttctctttaacgcgtacccatctaaagagcagatacaaggcgcaaatggacgtatgttaaagttaagtgttttagattacgaaaaacactgtaaaaaatctatgcagtga

SEQ ID NO: 163401 - DNA, 207 bp, Enterobacter cloacae
atggaacgattcttccggatcctgaaaaacgagtgggtgccagtgacaggttatttaaactttagcgaagctgctcatgcgatcacagactatatcgtcgggtattacagctcgctaaggccgcattactataacggtgggttgcccccaaacgaatcggaaaaccgatactggaaaaactctaaagcggtggccagttttagttga

SEQ ID NO: 163402 - DNA, 303 bp, Enterobacter cloacae
atgaaaaaaagaaatttcagcgcagagtttaaacgcgaatccgctcaactggttcttgagcagaactacaccgttgcagctgcggccagtgctatggatgtggggctttctaccatgacgcgatgggtaaagcagttgcgggatgaacgacagggcaaaatacctaaagcctcccctgtaaccccggaacagattgaaatacgtgagctgaagaaaaagctactacgcattgaaatggaaaacgacatattaaaaaaggctaccgcgctcttgatgtcagactccctgaacagttctcgttaa

SEQ ID NO: 163403 - DNA, 819 bp, Enterobacter cloacae
atgagcgattacgccataagccgattcagaaggatctaccctcctcttgttctgtcactgattattattttgttgatggccttcgtggcacctcacgtctttgagtcaggctctcagcgattctctacggaaagtgacgagttcatcaaagggcgtggcattttctactggccttctcagattttctctgttcttacattcaccaatggattattaccccagggcacaccatttaacaccccgctatggagcctcccgtttgaagcctggtattacgttcttgcagcactactattcacaaagaaaccattctatatagtgttggctttcatactggcatatgccatttcaggagctaatatcaaattcatgatctttggtgctgtttggtttgctggcctcggcctctccattattgatataaaaggaaaagtgcatacggttgctgcatgcattttaacaacaataacttcgtggtttgcctttgcccacggcgcaaaatatatctccagcggcggtgattatactatgtttaatatgtggtttggccttgctttcgcagcattcacatacttgttcatccttagcatgaatataaggataaatatcatttctaattcctctaagtattcctatactttgtatattattcattatcctataatcatgttcatgatcgggatgtttgagagcagggttatgggcggcttttatagttcacttccaatagcaatttgcgccgctgcaatagctttggcgcttgcttataaagcatctcagtatgtagaaaacccaaacctaattaagaggttcatgtaa

SEQ ID NO: 163404 - DNA, 822 bp, Enterobacter cloacae
atgaagaatctaaggaaagttgcattctctcttaaaaactggctgtataaaaaacagataacttcaaccattcgccgcatggacgagaaggtggaccatactcaatggcctggcgcggagttccacccagactatttcaaaccattctcattaggctacccagaaaaatacagccctcaaggtgtcgctcgcagcaatgatattgatagtgaggttggagagttagcagcaaagatcaccactgactttaaagagaagattgttggcttcctaggtgaagatacgcgcctcgatgatatttatctgttttggtacgaccctgataagcgtgaggagtggagtctctctaactcctggcatgatgataacgttggtcaccgcatcaagatctacgtatgttttgaaggaaatggcaacactcctacggtagtgattccgaacagttacaataagccatacaccccacgtaaaagcgagattgccaggtttgtaggtaagcgtgacattgagaacgcagaaaaccaggtaaaactggcatataaatcgggtgatatagcaatgttcgataccgcatgtttgcaccgcggcctttatgaggagccagctggtctgcgcgctgttttagtgatggagtatattgaccgtaaaaaagctaacatcattgcaggaaagtctccgtgcgggccagcaatgagccgaactggtaaagttacattctctcaagaggcctacgacgcccttaacgagaccggcttaattgacaacgcaatcatcaagaaaaatggtgatcgttacgagtattctcttgcatttttaggatga

SEQ ID NO: 163405 - DNA, 390 bp, Enterobacter cloacae
atgggattcccgtctccagcagcagaatacgttgaagaacgcatatcacttgaccagcgcatcatagccaggccgtcagctacatactttatgaaggcaggagcgacacactatcgcgaaggtatacttcagggtgcgttactggttgtcgatgcctcactgaatccttgcgatggttcacttctggtgtgctcgtgcgaaggtgagtttcgtatcaagcgctttagaacacatccgcagccatatcttgagaatcttgaaaacggtcacagggaattgttgcgccagaaggatgagacaaccgattctgacaaaccggtgttcggggtgatcacctacatcatcaacgatgcgagaacgggtgagtttgatgactgtccggttatgtga

SEQ ID NO: 163406 - DNA, 1614 bp, Enterobacter cloacae
gtgggctcggagatgtgtataagagacagaattgatagtatcgctactcagaaaaatgaatattttgcgcttaaatctgaataccttgaagagcctcaaatatctttaacctttctacatgagaagattgaaaggtggattgaaaataaatgcaaagcatataagcaaggtattgcagacatcaataaccaaagtgattctgttgatttggttttgtttttatcagatactcaaaaaactcttaatgtactggatgtatttattaacaaggcagaggatagcaagaaatacatttcagttaataagagggcgagtggttattgtgatgggttgtcaatttcaccgttcgagctttttgacagtaaatatgatattgcagtatttggtggtgctggcgctggtaaaacaacaacacttcagatgtatgttaaaaaattactaaaagatccattgagcaaagttatatacattgcgttaaatcgttacatcaataaaataagtgttgtgctggatgataaagtcaagaattatgatgttttgctttctataatattaacagctaagaatttagaatcaaaccccgaaaatattcttagtattaagagttatttttctgaagaggataagcttaagttagtgcttgatggtcttgatgaggcctatgcaaagtatccaggaataattgatgcaataaatgagttcaagacaaagcatccttcaatacaaatcttgatatcgagtagggattgtgtgagttacctttctaaagtttgctttctcggaatcactcttcttccatttagtgaaccccagctttataagttcattagatcttggttccaaaataaagatgtagaattaggcgaaagggtgattgatagtataattgggaaggatgttgccgaaatagtcaagacccccttgcttgctacgttattatgtgacttagctgaaaagggtatagacatacctcgaagtgagagtgaaatttttactaaaagacttgagctattttgtggcgtttacgatacatataaagatattcggaggacgactctttcacaaagtattttacaaaaggcagcaataaagatagcttactctttgcattcacgcaatcaacgctctgcccaaaaaagtgatattattaaatatcttaataatgatgccggttttaattatgataaaaatacgtgcattacggctgtggaagagttgattgatccttgcaatattcttgtgctcgatacaatttcaggaacatattcgtttgggcatttgcgatatcaagagcatttaacatcactcgagcttttatttaataggtctatcgaattggtttcatatttgaagaatgattggtggagaggcgctttatgtctatatgctcaaagttgtgagtttttttcactcattgaagagtttactatgaaatatcacaatataggccctgcgctaattacgctcagagaaatggcaaaatatcgtccacttaaagagcaaaataatattttgagtttgattaatgggtatgagcgaagtgatgacggttattatcataaatctgattgggatatggatgattcatggagagagaacttcttagattattaa

SEQ ID NO: 163407 - DNA, 507 bp, Enterobacter cloacae
atgcataaggtgcatgattttgcatgctttttaccgacactggatccccttccagcgccagcactggcgcgccctgaggtcggtcatgcacctgcattaaaagcgaccgtgaaaattaacggtatcgtgcgcaaaggggcgacgaactccatcgtggacctgctgctcaccggcaccgcagggacaactattatgaacggtaccgtgaaagacactaataacctgatctggcgtcttcctgcctcggtagtgattggcgttgacggtacgatgacggctactgccacctcctcaaacagcggcgcggtcgcagcgctggccgggactattaccaccattaacacgccgacccgtggatgggcatcggtaaccaacccggcggcggccaccgtaggcgcaccggcagaaaccgacgcagagctgcgtatcaggcaggggcagagcgtcgcgctaccctttcgccgtttgagggcgttgacggtgcgattgctaacgttgctggcgtga

SEQ ID NO: 163408 - DNA, 267 bp, Enterobacter cloacae
atgcagatcgtcgataacctggatatgacgatatccgtctgggtattcccggagactgatatttctgatgtgtctctcgaacggatcaccgcaatcaaacagggttatctcaccattaatgcagttggcgtatgggctggtgatgtggaaacgccttcggttgaaacaccgtccgagggatcaaaattatttggattcgatattaataacgaatacatcggtggattcgatgtaggagcatggggagtattactcaaatggcaataa

SEQ ID NO: 163409 - DNA, 243 bp, Enterobacter cloacae
atggcaataaatgatttcaaacccttcgcaaccaataatggtgcgaatgtaacagagcaaagcgactgggagtcactccaaacgttatcttctggttttacagcaggcgtgacttcaagtactcaaattaataaggctttgaggcaatcatcctccgtgatggcggcattcacagatttgattgcgttgacatggaattccaatgttcctgatgatgggaatatcgcagcattaaccgaataa

SEQ ID NO: 163410 - DNA, 492 bp, Enterobacter cloacae
gtgtatctcttagcgcttcggctacatctaatgcagcagcagcaggtggcactgctggatgttatacgcgcgctcggcttgatgtgccagccggaaacgtcacagttaccatgggtgcaagaggcttgggcggcgcgggtagcaataatggaggtggggggattaagcagtttcgggacgcaagtaagtgctggtggcgggtatggtggaacgttcatgcctgccgacagtgtgctagctatcgttgttgccgctgcgtcgacccagcctggtggaacattgccaatcggaggaaatgtgaattccagcacagatactactcagtataattttgacgtacggctatcaggatctgtggctaattctggttcaggtggttgttcattattagataatggcggtggtggtgcgcgagcatctggaacagcaactgctacattcaatggcggaaaaggcggcggtggcgtagtgattgtctgggagttttcataa

SEQ ID NO: 163411 - DNA, 1062 bp, Enterobacter cloacae
atgtttgagctaacaaaaaacagatctactaccctcgaatcgttcagggcaatatcggcttttactgttatgctggcccactgttatatcatttttataagcaaaagatatcccgatatttatcctattgctggcgcccttgcccaaagctcggtaatgttttttttcgtgctaagcggttttctcattggcctttctgttaaaaacaacttaaacagaaacaaaggcgcattcagtattaaagagtatgcagacgctcgttttttcagaatttaccctccattaatattttctttagtattagcggcttttctttcactactttcaatttatgttttcaacatgcctgatggaaaacctttatcggcgtgggccagaatgcctgggtactcactagactttatacctacccagtatttttcgactttgacattctctaattacttgctaaatcagggcgtctcatcaaacgggtctttatggagtttaccgatagaagtctggtgttacgttgtagctggaatgacgtttgtaagaaacatatgggttaaagttatctcagtatgcttattcttaattttacaagacatgcatattaagtttagactcttttctttagtctgggctctatctttcgcaatggcatttgctatgcctattatcgcaaagattaaaaatacaagtttcatttgcattttaatttcgcttacgatggcattttttgcaaaaaataaccttgttgaattctacacaactaaaacgggtctttacttcaatacatttattggattgtcatttttattcttattaatccccctgctaaaacacgacttaaaaatcaacatttttaaagcacatgcgagatattcctactcactttacctcattcactttccattaatgattttcgccattgctttgttaatgcgctacgacattagcaatcctaattatgatatcatcgcgttcatattagtaccattggtgtgtatttgggtatcaaaaaaaacagcattattattcgaagatagaaatcgcataaaaaacatacttgctcgttag

SEQ ID NO: 163412 - DNA, 327 bp, Enterobacter cloacae
atggctaagaactatgcgcaggacgggaaaacgatccctctggtaaacggcggtgcaaccgatgttcacagcggcgacccggttgttgttggaaaacttatcgcggtggcaattaccgatatcccggctggcgataccggggacggttttactgagggtgttttccttctgccaaaagtatccgcagatgcggttactgccggggcgcaggtgtatctgaaggacggcaaaatcacgatcgaagaaacggacgccgttgccgcgggcatcgcctgggaagatgcaggggcaaacaccaccgttgttgaagttaagatcaatgcctaa

SEQ ID NO: 163413 - DNA, 693 bp, Enterobacter cloacae
atgtctagagaaggctcgttggacttattgcaagaagttgaagaaagtcttgacataatgagacagacacagcatatcaagcctgtaaaagtcaaagctattttggaaaacttacgaagttccttagagtatcttgctaatgatacctatgataaatatatttccccaagcagtaatgatgagcgcccaaaaatatatttcccttacggaaaaaaagagtttgttgataaatttttcttaaagactctaaaagtaaacccaccatcatcttctccattatataaaacttttacttctatacaggattaccacactggtgaatcttggttgggaatgatgtgtaatctcactaatgaagtaaagcacagacaaccaatccccttaagagaagagagttctgttaaggacctaagtgtgagcgtagatggctttggtttaatcacagcaggaagctcagcaaaaattctttttaaaaacaactatatcaatggtaaaaaattagaagattttactttcgaaaatgggaaattacaaagaagtggtaatggtgtacctttaaacatagtcattaccgaagagaaaaaaataagattccatgggaatgactatgaagtaatccctttcattgagtcatgccttattaaaatcagaagttttattatcgaagcctatgatgagttagataagatttga

SEQ ID NO: 163414 - DNA, 537 bp, Enterobacter cloacae
atgaaaattaatccgggtctaatcggcgttgtcattattgctggtctttcggtcgcactcgttaagagttgctccgacgccataagccttcagagcgataacgacgttctgcgaagtgacaactctttgcaggggcaggtgatcgccaaccaggcattcaacttcaatcgattcaatcaggttgcagaacatgccaacaggcttaactccctgatcgacaccagcaccgaagaaaccgtaatcgaataccgggagattctccgccgtgaaaaaacctgtgatctgcctattcctgatgacattgctggtgggctgctcgaatacgcgcaccgtttacgttccagcgcaatgcacaccgataccgccggacctgacgcagccgatgatcgtaccgctgccaccagctcaatgacctactgccaagctgttttgtggattaagccgctactggcgttgatagaaaaaggaaataataatttttcgagtattcgtgaaattgatgagttgcgttacagaccaactgagcatggccagtaa

SEQ ID NO: 163415 - DNA, 381 bp, Enterobacter cloacae
atgattactaagaaaacaaacaagaaatccttgcgcgccacgctcgccagggccaaacgtcagaattacgagaagatggttattcgcgtttctctgatcgaggaattactcgatcagttggacgcggtagaagatttgaatattgcgttagtcgctgaagtaaacgacctcaaacacccaggaacttatttgccatccaaaagagctacgccggtagcagatgcggtactggctgaaatgcgtgcgcagggcgcggaaatgtttgctgcctattgcggtgaagaaaactcggtatttgttgaggctaaggcttattaccgctctctgccggatgccgcctatgagttcgctgcccagcttcgccaggagcgtgccgtatga

SEQ ID NO: 163416 - DNA, 1050 bp, Enterobacter cloacae
atgagcgaatttatttcaattgatggtcgtaaaattggtaaagatcatcctccttatattattgctgaactttcggcgaaccataatggcgacatcaaccgtgcatttaagattatggaagaagcgaaagctgcaggtgcggatgccataaaattacaaacataccgtgctgataccatcaccattgattgtgatactgaagattttcagattcatggtggcttgtgggatgggcaaacgctttttaatttatataaaggggcacaaatgccatgggaatggcataagccactgttcgagaaagctaaagaactgggcataacaattttcagcagtccatttgattttaccgccgtcgatctgctcgagaatttgggcgcgcctgcatataaaatagcctcctttgaagccatcgatctgccgctcataaagtatgtcgcaaaaacaggtaagccgatgatcatttcaacgggtatggctaacgagcaggagattcaggaagctattacggctgcacgtgaaggtggttgtaaagaacttatcgttttacattgcgtaagtggttacccggcaccagctgaagattataatttggcgactattcctgatatggctgagcgttttggggtcattaccggattatccgatcatacaattgataatacgactgcagtcgcttcagttgtgctcggcgctaacgtcattgaaaaacacgttacgctggatcgaaatggtggggggccagatgacagtttctcgcttgaacccgctgagttaattgccttatgtagggacgcaaaaacagcgtggaaagcgttaggccatgtaaattatgagcgcaaagaaagtgaaaaaggaaatgttaagttccgtcgttcactctatattgttaatgatgttaaaaagggtgaaaagctaacggctgaaaatgtcaaaagcattcgccctggttatggacttgctcctaaaaattatcatgaagtaattggtaaagttgctacacggaatcttgttaaaggcactccacttcagaaagaacattttaattaa

SEQ ID NO: 163417 - DNA, 1536 bp, Enterobacter cloacae
atgaacgtgtttctgcgggctgactcatcgctttcgatcggttctggccacatcatccgttgtctaaatcttgcgaggggcttagaaaaagcaggggcacggtgctgtttcatttcaaaagaccatcctggtaatattctggaaaaaataaaacaggaaaaatttcctgtcaaagttattacagtttcaaacgagtcgagtacttacattagggatgaaaaatcttggcttaatggaaatccggctgatgatgctgagaaatttatcgatttaattataaaagactgtttttatccagacattattattgtcgatcactactcccttgatcacgaatgggaagcgatagtgaaagcccgctttcctgaagcacatttagtggtaatcgatgatctctgcaaccggccgcattgtagtgatttactgattgatcaaacctataagcgcagcgcaaaagaatatgcccagtttaataaaaaagaaggtaaaattttgactggagcgaaatatgcattgctaaatcctgcgttttcgaaattaagaaatcaatcaattgctcgtaaaacggatattatcgtaccgaaaaaactattgttaaccatgggcggggtagacgctcataatgttgctggcaaagtgctggagtttttagagcagtcattttttgaaaacctagaaaaaattactgtcgtattaggcgctgcctgtccgcaccgtgccgaaattatttcccttgctaataaatcgaaatatgacgtcgatgttctcgttaatgtgtcaaatatggcagaactgatgatggaacacgatttcgcaatcggcgctatggggggaacgacctgggaaagatgtgccatgggattacctgcgataaacgtagccatcgcggataatcaaaaaaccattgcaaacaacctggctaacgctggtgcgattgtactctatgctgataattttaacgcagtagatctcaacgtcgcactcaatgatttgctcgcgcattatcacgagcagcggctccttgctatgaacatatgtgatggacaagggctttacagggatattcaggaaatagttattatgccagctaaagatggcaataatgttactcttcgtctggcaacatccgacgatattgattttgtctatcaactgcaatgtgaaccgcaaacgcgtaagtacgcgcgtaaccctgaaattcccgcatatgagagtcacgttgaatggatgaagcggaaattaaatgccgatgattcgttcttttatatcattgaaaataatggatcatgtggtgtcattcgattagaccctgttgagcattccattgcaaaatatgaaatatcgattttcctgacatctgcatgtcaaggtaaaggcgttgcgagtgcatcaatcaaacgcgttttaatgctgcatgagggtattgtgttacttgcaacggtattaccagaaaattatacatcacatcagttatttgagcgtcttggattttacaaattatcacccagcgaatatatcagcgagaaaaatcaatga

SEQ ID NO: 163418 - DNA, 714 bp, Enterobacter cloacae
gtgacacagagcggctcctcagaatctacattaatgaagcaaatgactttaagttccacgattccgagtggaacgagatcactggggctgagtgcaaacgacacagttatcgaagaggcagagattatcgatccctcaatagatgcagaagccgagaagacgaactccaactcggaatccttcaacaattcgcacaccgacttggaggatgatggcgatagtggtgatgaggcaatcgccgaaatcgtaactgacgtcattaaaaaagagccagaagttcttgaacgaatcatgcaagacgagcaggttcgtcacatggttatggttcaacagaagagttatcgtggtcctcttcctcctagcgaactgctttctggatatgaaacattttgccctggagcaactgagcgttttattgggcagttagaagctaaccaaaagcatcagcatgaaatggaaaaactggctgtttctgcaactattactcgtgatcaggagaaccgcaagtacggatttgcattgacatgcttagcactcattgcaagtgtaacgcttggggtaactggacacgatattcttgccggtactatcgcaaccactactattggtacgatcttagtaacgttcattctgaatcgtcgaccaaacaatagtagagatgagaaagaagacaaacagtcacaactaccagctgaagatagtaatgagaaatag

SEQ ID NO: 163419 - DNA, 276 bp, Enterobacter cloacae
atgagaatacatgactatatctatcttaaccgtgacaagataacctttcccagcggtgcagagtcctttgtcattgattgcaatcttaacgattcaaactacttcattacctatggcacagggtgggtacttactgatgtgattggggattgcgattatccggggaaggtttgcataacacgcaatgactttgaccgaatcatcgctacgcaagataaaaagatcgcgcgtcgcaacaagattagaaaacttttcgggcttaaggataaaatttaa

SEQ ID NO: 163420 - DNA, 189 bp, Enterobacter cloacae
atggatatcgacctaatcaccatgtctatctcagcgctggctttggctatctctgtgtacgccgctgtgccggttcctgagcagaagtccaagcagattaagcgcacgcatcccgatcagcttccacccgaggtgagaaagctcattgagaacgttgatgagcttgagcgcagggttaaattactctga

SEQ ID NO: 163421 - DNA, 1212 bp, Enterobacter cloacae
atggaaaaaataaaattacgactttatcagctaacactcatattaagtcttatctctttggctttagtgctggttagctctggtaaacaaagagagtttttctatatagctatatatactggtattcttggtttagccctggaatataagaatattaaatggcgacctttcaccattgcattccctatcttattgataggtttattaaatttaatatggtatctcgtttatgagtaccacaatgtagggctgaatgcatacagtgattaccttggctcttgtaaaaaactaatcttggcaagttttttggttttttatctcgaccgttttaaatattatattgctaatgaaaagtttaagacatattttttgattgcgtcagggttagggtttttattagccacaggttacggtctggtgcaagcttcgcaaggaataaaccgtgttgagatggcaatcaatcgcccaactatagccgcctatgtctactcagtattgtccttatcctttgtatatagtctttatctgcttaataatacaaaaatttatatttttgctggctttgtcattttaacttcattctttgtcattcttttaacagctactcgtgctgcaatggggctttatctcgtcctcgctatttttctcaccctttatcaattcagaaaaattcatctcaaatcattattaatatttttatgcattgttgctggcatagtcattgttagctataagccattgattttacctaaaattaagcagactgagatagaaatagcaaaatatcaggaagggcaagatgctacttctctgggcgctcgtttttctatgtgggaagtgggtatccataatggctttgagcatccattaggtcagtcgatcgaaagtagagaatcttggtcaagaaactatgttaaagatggccacccaaatgttgctgcagcactagggtatattagaattcatctacacaatgaattcattgaaaaatattccttacaaggaatacctggcctggcaatactgctctttttcttcgtgtcgatgatgggctacgccatcagaaacaaaaatggtctgctattgactgccatgcttctattattgctctatggcctgacagacgtcatattgttgagttcagaggcattgatattctttatgatcctgtttgctctgagtacacctttctctcagacaaaacaacgatga

SEQ ID NO: 163422 - DNA, 147 bp, Enterobacter cloacae
gtgctggtgctggtgcaggtgcaggtgcaggtgcaggtgcaggtgcaggtgcaggtgcaggtgcaggtgcaggtgcaggtgcaggtgcaggattctcatacgcaggaagacaaaaattcatactttcggctggcgtcgctacactga

SEQ ID NO: 163423 - DNA, 315 bp, Enterobacter cloacae; identical to SEQ ID NO: 116835

SEQ ID NO: 163424 - DNA, 570 bp, Enterobacter cloacae
atgggctggtcttcgttggttaggataaccattggcatatttctgttagctggattgtcatcttctgcatacgcaaagaactgtaagaaagggattccatgtggtaattcgtgcattgctgttgggaaaacgtgccggattggatcaggtgcctcttctgcgtataaaaattattcatactcttacccgtcatcttctcttcatagttccatcccgaaatcttcttcatattccccatcagctaaggatgatggaaaaaacacggcgtcaactgcgaaaacttatctctgtcagtatgctattgcagcggtacagaatgggagaataggcgcattgcgtgtgctgggtaaggctaaggtaacgttgtatattgatagcttcaaagcaaaccgtctggacggtgcatacctgctctcgccaaagctgaaaactaacggtaagttgatgatggcagatgataaaagcaaagtttacgcatatgatccatcactgatgaactttgcgattagtgatcgtatcgcaaaaagtacggagcaatgggatcattgcatactgattaacaataaataa

SEQ ID NO: 163425 - DNA, 489 bp, Enterobacter cloacae
atgccaaatctttctgacatcgttgatgcttacaagaaaatcccaacaagcttgttttttgcaattggttttgttttggcgctgatcctgtttagtccagattcatggatagataaatttagtttatatgagttcagagttaattatcgagtgtggcttgggcccgcgtttctatgcattttggctatcttggttagccgtgcgttcacatttctcagcgagagagtggttggctttcaaattaaaagggaacggctcaataatctgaaaactctcactcgtgatgaaaaagagtatctaagggtttttatggagaaagacacagcaactatctcaagggaaattagtgatggtataattggatctcttgagtcaaaaggaattgtttatagaacatctagcttaagctcatattggaaaactttcccatacagtctccaaccttgggcaagaaaatatctgaaagggcaaccaaaacttttggaatag

SEQ ID NO: 163426 - DNA, 468 bp, Enterobacter cloacae
atggctggtaattacgagatctactatctccttggggacaaggaacattcaatcaaacattggttagagactgatgaaccaacacctcagacagaggaagttgtaaaagcagttttggagacagttccacatggtaaagcacccagtatcatacgtcttgtagatttggatacagatgggaagccgatgatttacgatgagtttatcattcaaaactttagtgggatcactttcgggcttatttatcgtcaattggggtatgatggctggttctatcttgctgatccccaaatgtacggattgagagagggaagtaaaattacggcaaataaactaactgtcgttgcgagttctcgttactcattttctgataaagctgattttcccgtaacagccaccatcgattgggatagactcagtttacgttatggaaataaggaactttacttaatcccaacctcgatttag

SEQ ID NO: 163427 - DNA, 285 bp, Enterobacter cloacae
atgacaatcaagggccaagaatatctttatctttcaccggacggtgtatggcagtttcaaatctacatcccgtcttacatgcgccacatgttcggcgggaaacgcctctaccggaaaagtacagggacaagagatatctacaaggtgcatcactcccgcaatcacatgctggtagagtggaacaagctaaaagaacggttcaagcctgatacggatgacagacgaatacaacttgcgatcacttccctgcactctcagatcagaaagaacaaaataagccactga

SEQ ID NO: 163428 - DNA, 678 bp, Enterobacter cloacae
atgatgcctgaggccgttgtcttcgatcttgatggtgtgatcaccgataccgcgcatctgcattttctggcctggcgtgccgtggcgcaggaaattggcatctcgttcgacgtggtgttcaacgacgagctgaaagggataagccgtatggaatcgctgcagcggatcctgcgccatggcggaaaagagggggagtttaacgaccagcagcggcaggcgctcgcggataaaaagaacgcgcgctacgttgggtctctggcgtcgttgacgcaggattctctgcttccgggcatccgcgaggtgctggcggaaattcgtgcggcgaacgtcaaaatcgggctggcctcagtgtcccttaacgcccccggtattttgcaggcgctgggcattgagagggcttttgatttctgcgccgatgcctcgcgcattgcccgctcaaaaccggacccggagatctttcttgcggcctgcgccgggctgaacgtgcgccccgagcaggctattggaatcgaagatgctgcagccggcgttgaggcaatcaacgcggcgggaatgctctcggtcgggattggacctggcctgaaccatgcgggattacaacttcattcaacgcaggaactgacctggaaatgcctgacggatttctgggcatcccgaacggtaatgataaggaattaa

SEQ ID NO: 163429 - DNA, 276 bp, Enterobacter cloacae; identical to SEQ ID NO: 101078

SEQ ID NO: 163430 - DNA, 132 bp, Enterobacter cloacae
atgctgaaaaaacctgcccacgggaaagagtggcaagttaaaacgccgcggttaaagcatctcaataatgctcagccatggacttatgttttgctgtttgcccctgaattgggtgaagaaaaaacgcagtaa

SEQ ID NO: 163431 - DNA, 723 bp, Enterobacter cloacae
atgaactcagaaagacgcgtctcgcctctcaatccccgccttaatcgctttattcaagaaacacaggccgaactcttccagctaatcgacaaatggcgttttctcaagtcgggtcataaactggtaattcctcgcccgaacaaaacagatatcagctacgagggagtggtattttccggctctgtcagggatgtattctggggggattttattgacccctacatcaagctacggagcctcgagcttatcaagaaaactcgagagctcgcagaagagtgcaatttaccaacggatgatgccctcaatgatattggcgatatgctctacggaatggtaatcaggatttatgacagaatggctgaaacggaccgcatactgcgaggggatgggatgactttccctccaaaaaccgacgtatcccgtcacattcaatttatgcaggaagttattgttagcgaggtgaatgtagaaaagatgaaagcaaataagcccagttcaaataatgtttttaatttcaatggtcccaacagcccagtccagatcggtgacggcaatacccagtcccagactatcaatatgactatccaacagcttgtggatgaggtagccagaagtggtgacacagaggctaaatcaaagcttgctgccctcctgaagaacccggtagtaaacacgcttttgggtgcggcagcagagacactattgtcacaactactgaaatag

SEQ ID NO: 163432 - DNA, 183 bp, Enterobacter cloacae
atgcaacctcatccccgacgtggcaaagatgctgtatcgaatttctacaacgatacatcgggagccatcaaccctagcacggctggtggtatggatgctgatagactggtgaggcgtatcaagcaggaacagtcggaggacattcaccaagcattgaacatgaccaagactgacaaattctaa

SEQ ID NO: 163433 - DNA, 276 bp, Enterobacter cloacae; identical to SEQ ID NO: 101078

SEQ ID NO: 163434 - DNA, 150 bp, Enterobacter cloacae
atggcagatacctttggaattcgcattgcttataaagttggccgaaacagacctgagaaggtttttgaagcaatggctatgtatatcaatgcctatgaagatctcattcgtctattgtctcagactataggctgtaaagggctttgttga

SEQ ID NO: 163435 - DNA, 237 bp, Enterobacter cloacae
atgttaaaccttttaatttttgtttgtataagcataacacacttgtatgattatcaggcaaaaaaggttttagaatccgatccgctgcccgtgcctcaggcgctgcaattgattgatctgcttgatgagcatgccattcacggcctgatgtatgtagataacgcaatagtgtatgaacgtccgacaggccacgtgatccgcaccagcaactgggcactgtctctgcctgaagcgtag

SEQ ID NO: 163436 - DNA, 1023 bp, Enterobacter cloacae
atgaaaatgctttttaggtttatggttctgtttattttaatgagttgtcattatttatatgcatcttgccaacttctttcggggagcacaatagagtattcagttaatatgagtggcaataactttacattggatatcactaactcaccagtaggtactttgctttatacatatggtggaatgactattaccaataatgcaacgtgggatattaattgtaatggaaatgaaccgagtggatataaaagcttcagcggagcacgagttagctcagcatataatagtaaaccaggtgatatttttagcatcccgggcctacctggtattggttatagttttcagatgggtgagcaagatggtgttgattttgattctttattttatgaatatcctaacgcatccccatttagtggggaaagaacctttagtgcagaaagcaaaaaacctacactatatttctggaggattcctgattcttccggcctaccccccccagggcaatactgttttaatagctatctaggtgatatttatttagataatgtagatgctgttagatttagtgtcagtggattatgtataactgttaaagctcctacttgtaccgtaatggatattagtaaaaacattactgtcaacatgggcacccataataaaacctctttttccggcgttggtagtacaacctcagaagtcccttttactatcagtttatcaaactgtcaaagtgttggttctgtttttatgcagttcaatgccactgttgacacggattattcaggcggcgatcaaattatacatattgacaattcacctaactcagcaactggagttggtattcagatattagatagtaataataatccagtaactttaaacaatccttctcaaatttggtctggtagcaaaggtagtcaaactgcatataattttcagtattatgcaagatattttcaaacactttcttctgttagcgcaggtgaagctaatgctgtagccacatacgtattaacatataactaa

SEQ ID NO: 163437 - DNA, 1947 bp, Enterobacter cloacae
gtgcgctatacagctaacagttatgaaagtaacaataacaatgaaacaaataactttaattaccttggcattgacggtagtttaaggatttctggatggaaattataccatcaggctgcatttcaatccagtaaagactctagtagttgggataatattacaacatatgcagaaaaaggtttgtttaaccaacaatcaactttacgcatcggaaaaggatggagtgatgggacatacttcgatagcgtgaattatacagggttaaaacttgcaacagaccagagaatgctgccaagttctcgccgtggctttgctcctgtaatatctggaatagcgcaaacaaacgctcgggtcacagtgacacaaaatggtttgcaaatatatgaggcaactgttccacctggtaatttttctttttcagacatttatcctactaatgcaggaaccgatttagttgtcactatcaatgaagcagatggtcgacaaagtacctacacagtaccttattctacaattccagggctagttagggaaggtgctttaaactatgatctttatgcgggtagaatcaatgatagtgatgttaatggtcaccctgaattttaccagcttttaagccaatatgggtttgataattttataagtgcatatggaggagggcagcttacaaaggattattattcaatcctttatggaaatgccataaatacatcattaggcgcactttcaattgatttaacaaattctacatgggcatcatctggaattaaatcaatgaacgggagtaaaatcaaaacaaatataagcaaaaaattctcatcaggtactcgctttttattttcttttgaaaaggttattgatgatgggtatatttctttgcgtgactccttgctaagacgcggttttgataaatatagttacagagaatcagaaagatacacaacgtcaataactcaacaaatttttgatggtactttatcacttagaggtgttaaaagcacaacttataataacaagcatgacacaacttatcagattgggtattctggcctatttggcagactggggtattatgtctatgctatgcaaagtaaagatattaacgatgaaaatgataatgtaattggtatttctatatctttaccgctaggtaaggataataatatttatacaagatttaatcatagtaaaaattatggagaacaacttcaatcttcatttacgggatatcaaggtgtcaaaaataacatttcttatagtgtttcaactatttatgacagagatgtcaacggtggtaagaataaatctatcggtgcgaatggcagcataaggaatagcttttcttatctgaatgcgagtgtaagtgctggtgatcatcagcaacaattctcagttggtgcttcaggtgctttaattgcgacaaacgatggattttttgccacacctgaattaggtgatacttttggcattatcgaagcaccaaatgctggcggcgcaactatttctaatcagcctgggcaaccagtaagctctaatgggtataccgttgtcccttatctcaatccttatacactaaattggatagatattgaccctaacggtactgatgctaatgttgaaatagtatcaagcagtacatcggtagtacccgacgcaggtgcggcaataaaagttaaatttaaaacaaaaaaagggttcccactatttttgactgtattcatgaataatggaaatacaccttcgctaggttcaaaagtatttgataaaaacaatgatttaattggttatatcgggcaagggggactcttgtatgctagggtttcagataaagaagggtatctgaaaataatgtatgactctaacaataacaaagaatgtcagttgcattataccatcaatgccaaaataaccaactttaaaacccttaataaaaccaagtgcatttaa

SEQ ID NO: 163438 - DNA, 1035 bp, Enterobacter cloacae
atgcgctcgaaaaactcagaaatgattgccaatttcatgtataaaaacacgtttgatagtgcattgaaacaccttgaaagcattgggtacccggcaagacttgctatgcaagtgatttctgtgtacgacgagaaaattgagctttattctataagtaaattagcaaaaattgatgtgtctgattcagaaagaatgtgtaattatctcctcgaaagacttatactgaagaaaactggggagtattacgagcttaatgagtttgccaaaagatttgtttttattaagctgcttcctgatcgatttgaacttagtaatcttaaggataagatcagaacacacaaagaaagaatgaaaaagaaaatttcagaacttgatggaacattgaagaaaaactctattcttcatcgaaatgtttctgaatggcaacctaggaattatatcgataaaattgtaatagcagagcttttttctctatatggagaagcaatcagatgtgttcgcagaaaaaataagaaagaatatgaacgttatcttaaggaatttgatgatcattccttcgttactaatcacccttatgtcccacttcaaaaagctcgtctcttaaagagtgggttgaaagtattttacaataaagaaacctcgatacttactcaagttgagcacctgtatgaagaggctatcgagtcaattgaatatgattataggtatctgataggtacagtagcacatgcatcattactaatgttatttgggattttcttatctgagaatcttaaacaagaaggtagggcaataagattccttgaggatgcgaaagcatatcatggagataaaagaaataaaggctggtttattatttgtaattatctttcaaaggcatataaaaataaatatattgaaactaatgatagtgcttacagatctcagctcgttaaaattgtaagggaagtactcaagaataatgagaaatcacataagtctgatttcgatatacagcttttcaaacagcagttttctgaatggttgcctgcttaa

SEQ ID NO: 163439 - DNA, 192 bp, Enterobacter cloacae
atggattttgccgtacatgccaaggtcatcaggtcactcaccgaaaaatacaccgtcgactatattggcgttgatgcgatcggcgtcgatcagagtgtttaccagctggtgcgatcattcttctcagcagcacatgtcatccgctacatgccggaaatgagaaccgcaatcgcgtaccattccagctgctga

SEQ ID NO: 163440 - DNA, 687 bp, Enterobacter cloacae
atgataaaaaacttattacttttttcaattttcttatcttttgccgctaatgcaaatattatcattgatgggacaagaataattttcccatcaaataaaaaagaagtctctgtcagagttacaaatgtaggcgacacgccttcattagctcaagtttgggtggatgatgggaaaatacaaaatagcagttctaacgataaggctccatttatcgttttaccaccaataataagaatcgacccagcgaaaggtcaaacatttcgtttggtttattcaggcgtaaccttgccacaagaccgagagtcactttactggtttaacttattagatataccgccagaacctaaaggtgaacaagagaataattatttacagttgtcaatacgttcaaggataaaattattctttagaccgtcagagatccagacaacagaaaacaatcctgagaagtcgctttcatgggattttgaaggacagagggaagttatttctgttaaaaatagctctccattttttataacaatagacagcatcaccataaatggagagaaagtacaaggtgcaatgatcccaccattttcaaaagtagatattaaaaatactggaagaaagtggaattcagcacccaaaaatgtcacgtacacaacaataaatgactatggtgctttaataaaacatagtatataa

SEQ ID NO: 163441 - DNA, 984 bp, Enterobacter cloacae
atggtgatcacaaaactgataaacaaaataaaaaatgtagaactgaaagcgcaaactgttgctataacgatatttctatctatattgattacttcagtatctatttatcgttcggtgttctctgatagttttggaagaacattcttccctgagaaagtttaccaacttaaattggataattatcctaattatctcgatatggttagctatcttaaagaaagagttctgaaaggtaatgtgaagtatgtgtcggttatcagttctggtggtgtacttaatcagagcatgctcaagtatatggcaaaaggtgatctcgacaacaggataaaattaactccacaagtagacttgcgggatggaatgcctattgattctttgttatcagaatatttggttgttgttacccctatagacactcacctccctcatggtcaggaagtaattaagacaacagccactgagattttatctggtaacgggttgggatctcactatgaagaaataaacagatttaatcttgcaaacggatcgctaggaatcatttacaaaaaaacatccccatttgcggtaaatgaaatcaaagaatttatttctaagttcacaaggcattacccaaaatggcaaggtgattatgataatgagaaagtcatatcgctgatgacatccagcctctctcttggggatggagcggcatggttttccagaagcaacgaatttggcataaacactcatcctggtagaaattttgataccgtaatcagttttatacctttaagggatatgataactatcaagtcaacaagtactgcttgtaaaaatgcagatggtgtttatgtttcctatgcctctaaagatgaaaatggaaaattacatatagagccaggcaaagaagttaaaattgtattgcacgataagtctgcacgattggaattgcgcataaacaaaggtctaaatgacgcttgtgatagtattttaatcaactga

SEQ ID NO: 163442 - DNA, 396 bp, Enterobacter cloacae
atggccgtagaagtgtatgcagtgatcgactctgaagggaatgtggtcagcacaagtttgtgggacggagaggcggaatgggcgccaccagagggaatggaagctgttaaaaccggggatagtggcgcaggtatcgggtggacctataaaaaaggcaagttcacaccgccaccgccacctggggtgccaaaagaagatttgatttctcaggctgagcagcaaaaggctaaccttatagctgaagcaagccagacgatctccatacttcaggatgcggtagacctagacatggcgacagatgaagaaagaacacagttaactacactgaaaaaatatcgcgtgcttttaagccgggttgatacttccaaggcacctgatattgactggccaaaataa

SEQ ID NO: 163443 - DNA, 1485 bp, Enterobacter cloacae
atgagtgattcagcgttaaaaaacgataaattccagcgaatttttagaattgttttgccattgtcccttttatacatatcttggattgtttttactggcagactttacattgatgacttaggccgttctctttacggttatacatcgtgggggcaggacggcaggccagcctctgatctattaatgtcagccttgagttttggcacgccaatcctagatattacaccccttccccagattttatctgtcattgccttaagtgcagttctgtcactttggggggtgaagtatctgcccaaaaaaggcacaatttcttctgctgcatgtgttttatattttattctatcaccatttttccttgagaatatctcatatcgttatgactcactacctatgtctttgagtcttgttgcactattattgccatatgcattgaagaaaaaaccttggtctccttttctgcatttcatttctgttatcgcttccctgtctttttatcaggcatcaatatcgctattcatattacttatgattattgatgtaattcatctttatttttctaaaaaagatgatttaagatacctggaaataatcaagtcaattgcaattaacactcttgcctttgctgctggatttgttttttataaggtattaattgctagctcttttgcgtcgggctcttattctgatgagcactcaaaaattataaacgttgaccacaccttttttgatgtactgtataataatacagttgtcatattcacgtggcttttaaacccgctttataagtgctctccttttctctttaaggggtgcgcattgatcttgatagttagcatcataaagatatcaatgacatccaaagatgtgaaatccagagttattaacttatttttactttccgccttgattactgcgggctttttctcttgctttgcacacattgcacttcttaaaacccctgtgctagcgcctagagtattaatatctttcacaggattcttcctgctttttgcatacctagtagtccaagcctttgaaagtaaaaaaattcagctgatacttttggcccctgttgttttttttagtttcatactttcattttcttatgcaaacgcatcaagctcccaaaaggagctagataaattaatttccacctcaatttataacgacatttctcatcaagatttgagttttaaaaatgttttcattcatggcgttatgccaacatcgaagcagagggcattgatagtcgagagacttccgataatgaattctctgatacctatttatttaaataacaattggtcttggggggctatgatgcttaagcattaccttctcgactacaatgtggacgcaacaattacagatccaaaaaaggaaatctgctccttaacaccattctccaggtctaatgattattcactatacagcaaaggtgataccttaatagtatcatttgataagactggatgccgctga

SEQ ID NO: 163444 - DNA, 930 bp, Enterobacter cloacae
atgaaaatatcccttgtcgttccggtatttaatgaagaagacgccataaccattttctatagggaaatccgtcattttcagcccttccagggggaagaggttgaaattgtctttgtagatgacggtagcactgacttcactgctgttctgatgaaagagatggcgcaggaagatagtctggtcaaaaacatattctttactcgcaactttggtaaagaagctgcgttatttgctgggctagcagaggccagcggcgaggtggtaatacctatagacgtggaccttcaggacccgctggaagtcattccgcgcatgattgagaaatggcgagaaggggctgatgttgttctggcaaagcgcatggataggtcttgcgatagctacctcaagagaaaaagcgctgaatggttctaccatcttcacaacttaatcagtaatcctcaaattgaagagaacgtaggcgattttcgtcttatgtcccgagaagttgtcgaacacatcaagctgctgcctgagagaaacctttttatgaaggggatactatcctgggtaggtggtaagacagatgtggttgaatacgtaagagccgaaagagccgcaggaaaaagtaagtttaatggctggaagctttggaatctggcgcttgaagggataacgagcttctccactttcccgctgagaatgtggacgtatatcggactcttcgttgccggatgctcttttttttatggagcatacatgcttatcgacaccctatgctttggaaaccctgttaagggatacacctcgataatggtatctatgctgttccttggcggtgttcagctgataggcattggagtgctcggagaatacattgggcgcatttacatcgaaacaaagaacagaccaagatacattacgaaaagggataatgttgaacatgagtga

SEQ ID NO: 163445 - DNA, 360 bp, Enterobacter cloacae
atgttaaagctgttcgctcgctacgcttcagttggggcggttaacactctcattcactggataatttttgctgctctttactcacagggcttcaaccagtcgatgtcaaactttgcggccttctgttgcgcggtaaccttttcatttttcgcaaatgccaagtggacatttgacgctgagaccaccacgtttcgctacataatttatcttttctttatgggcggcatggcatctgcagttggaatgtatgcggacaggtcgcactccagccctgttattacgcttattgctttttccgccatcagcatggtgtgtggattcatttattcaaagtacattgttttcaaggatagaggatga

SEQ ID NO: 163446 - DNA, 393 bp, Enterobacter cloacae
atggaaaagcagcagcttttatatggcgttaaatacggtgataaagtccattttgattttgccgtcaggatgccggttgtcagggacactattgaagccctgcgtctcactgatgaggcttgcggaacaaccgaaggggcatcggcggggttgtattatcgcgtggcgctgatggcactggcaattgaagcactcggttcactggataagaaagacataacaccagagttgctccttgatgggctgaatgatgatgatttcgatctcattgatgctcagattgacgccgttaaaaaaaagcggatggatttgaacaaaagctcaccgggtaccgaaccctcgtcctcgccctcgggcgatatgggatcagtgaacaacaaatcggaagcatga

SEQ ID NO: 163447 - DNA, 627 bp, Enterobacter cloacae
  misc_feature (573)..(582): n is a, c, g, or t
atgaatacatcaacaattatctccagagtctggagcttctgtactaccttacgcgatgacggagtgggttatggcgactatctagaacaactcacttatctgatctttctgaaaatggctgatgaatactctaaaccgccatactctcgtgacgtgggcattcctacaaagtacaattggcaggcgctcaccagtaagaagggggcagagcttgaagtcctttatgtagagctgctgcgtgaattaggcaagcagaaaggtatgcttggccagattttcactaaagcgcaaaacaagattcaagacccggccaagttgtaccgccttatcgatatgattgatagtacccagtgggtcatgatgggtgcggatattaagggagatatctatgaagggttgctggaaaagaatgctgaagataccaagtccggtgcggggcagtattttacaccgagggctttgatccgcgccatggtagcatgtgttcgaccagaaccaggcaaaacaattgccgacccctcatgcggtacaggtggtttttttctggcggcctatgactttctaacaaatccnnnnnnnnnnatccagaaaatacttcactcgataaagagcaaaagcactttctga

SEQ ID NO: 163448 - DNA, 351 bp, Enterobacter cloacae
atgcgtaaaggcatttcggatagtgatggactcacattccctcttttcaacctgaaaaatgtttatgctgatgaaaatgagcagcgcattgatgcccataaatgggagacgacattaagaagcgagcatacctttaaagaaggtgagttaactaatccttgctttgatatagcttattatggtcgcgattgcgggatgcctgttaacgtggatgagttagatgaattgccttatgttcttattgtaactttatccgctgaggaaatgcctgatttatataacctgataaggcaaaaatatcagacattgcagcctatccaggttcagcagcaaattattttgcgtgcttaa

SEQ ID NO: 163449 - DNA, 1401 bp, Enterobacter cloacae
atgacgctcttttcaaaccagcccggcgatgagggcttaccagggcatgaacgcgccagggtgatggccgccgttatgaccaccacgctgatgggcgtctttgacggcaccatgatcaacatcgcgctcccctccatggcaagagcgatgcaggttcccgcgaacgttgcggtctggttcgccaacggttacctgctgtcagcggcgatgacgctggccattttcgccgcactggcggcacgcgtgggctatcgccgggtatttcttgccgggcttgccacctttacgctcacctcgctcggctgcgcgctggcaacaacgccggaaatgttaaccgggatgcgaattctgcagggcatcggcggcgcggccaccctgagtatcgccccggcgatcctgcgctccgtttttccggggcggctgctgggccgtattctggggctgcacgccctgcttatcgcctccagtacggcgattgcccccgtgctgggcggaacgatactggacgcgctgagctggcagtggctgttcgccattaaccttattccgggcagcatcgccctgctgctggcatggcgggccttgccgcgggaatcggccattgaccgcactccctttgacgcgccgggcgccgtgctctccgccgtcctgttaggttcggcgatcatgctggccgacagccttcagcacatgacgaaaaacatcaaccaggcagccacagtctgggggctgctcacgctggtcagcgccctcgcctttatctggcggattcggcgcgcgcaaagtcccatactgccgcccgtcatgttcaaaaacggacgctttaccctcgcagccctgacctcgctggcctcgtttgtcagtcagggcatcacctttgtcgcgctgccgttcctggttcagagcgtgtatggctacagcccggtggtgtcggcgctgctgtttaccccgtggccgattggcatcgtgctgatcgcgccgcacgcgggtcgctgggcggatacgatctccgcgccgctgatctcgaccctcgggctgatggtatttgtcggtgggctggtcctgctggccaccctgccggacaatccttccgcgtggaatatctgcctgcgcagcctggtttgcgggattggcttcggctgcttccagagccccaataaccgggaaatgctctctaacgtggcgcgggaatatgccagctacgcctccggcgtgttgtcgattgtgaggacattcggccagtgtctcggtgccgccgcggtgggcgtgctgttggcgacgaccgaatcagaccatgaccgggccgtgcattttgcgctgtggatagccgtgatagcctcaacgggatcggtgttatttagcgtgagtcggctgcgccctgcagttcgggcatcagcgtaa

SEQ ID NO: 163450 - DNA, 906 bp, Enterobacter cloacae
gtgtccgatcctgattttaaccttctggttgcgctcgacgttttgctggcagaagccagcgtggcgggcgcggcgcgacgtttgaacctcagtacctccgccatgagccgcaccctgagcaggctgcgggaggtgacaggcgatcctattcttgtgcgggccggtcgtcatatggtgctgacgccctgggccgaagccacgcgggaccgcgccagaagcgccgtgcatgaggcgagggctgtgctgcagccctccaccgacgcgctgaaggtggaaagtctcgagcggctgttcaccatcagagccaacgacggttttgtggtggcgtttgggccactgctgattgcggcggtggcgagcgttgcgcccggggtgtgcatccgcttctcgccgaaacctgaaaaaacctcgcgctatttgcgtgaggggctggtcgacctggagatcggcgtgcagagcaatatggggccggaaatacggctgcagcggctctttcaggatcggtttgttggcgcggtgcgcaagggacatccgctgtcgttacagcctgacgtcagccttgacgattatgtcgcgtggggccacgtggtggcctcaccggacggatcgctgcacgggtttgtcgatgacgcgctggcggaacgggggataaagcgcaagatcgccagcgtggtgcccgggtttccgacggcgttatccgtggcgctggtctccgatctgattgccatggtgccggcgttatacctgctcaatcagccgatgaacgagcgcgtgcacgtctttgaactgccgtttaaaacccggagcattacggtgtcgcagatgtggcatccgcgcatggaaagggatccggggcatcgctggctcagggagaaggtactggaggtgtgccgcgctgtgcgctga

SEQ ID NO: 163451 - DNA, 426 bp, Enterobacter cloacae
atgaaggtttcacatcccgccacggtgagtgacatggataaatccgacttcatcaaagttgttattggaaagccatgggccaacaggagttgcacattcggtgcgatggattgttgggcattggtggtgctgtattaccggcacgttctcggcattgagctgcaccagacgccggactacgaagccggagctgacttcttcacctgctatcagggcgacgtcgttttctggcgccaggtcgataagccggtagagggcgggatattcgtggggtatcgcggcgcgcagcctgcgcacgttggccttgtgctaaaccgtcaggcgctgcatgcgcgcggtgagggcggcagtgtgcgcatggactcgttgctggtcattcagcgggcattcaccaaagtggagtacttttcgtatggcgctggttga

SEQ ID NO: 163452 - DNA, 930 bp, Enterobacter cloacae; identical to SEQ ID NO: 157585

SEQ ID NO: 163453 - DNA, 744 bp, Enterobacter cloacae
atgaatattttctcaggtcagtctcccaaagcaacagaaataaaagcaaaaataaaccaatgggacctaatcaaactgacaagcttttgcacagcaaaggaaaccaaaaagaaaacaaaaagacaacttacagaatgggagaaaatagtttcaaatgatgcaactgacaagggcttaatctctaaaatatacaaacaacttatacaactcaacagcaaaaaagccaacaacccaatggaaaaatgggcaaaagacctgaatagacatttctccaaggaagatatacagatggccaacaagcacatgaaaaaatgctcaacatcactgattattagagaaatgcaaatcaaaactaccatgagataccacctcacaccagtcagaatggccatcattaataagtccacaaataacaaatgctggagggggtgtggagaaaagggaaccctcttgcactgttggtgggaatgtaagctggtacaaccactatggagaacagtatggaggtaccttagaaaactatacatagaacttccatatgacccagcaatcccactcttgggcatatatccagacaaagctttccttaaaaaagacacatgcacccacatgttcactgcagcactattcacaatagccaagacatggaaacaacccaaatgtccatcgacagatgattggattaggaagatgtggtacatatacacaatggaatactactcagccataaaaaagataaaataa

SEQ ID NO: 163454 - DNA, 1146 bp, Enterobacter cloacae
atgcaaatcaacatcatacaccacattaacaaaagaaaagtcaaaaaccacatgatcatctcaatagatgcagaaaaagcatttgacaaagtccaacatccattcatgatcaagaccctcgccaaagtgggtatagagggaacattcctgaatataatcaaagccatttatgacaaacccacagcaaatataatactcaatggggaaaaactgaaagccttctcactcaaatctggaacaagacagggatgcccactctcaccactgctcttcaacatagttttggaagtcctagccacagcaatcagacaaacaaaagaaataaaaggcatccatataggaagagaagagataaaactgtcactgtatgcagatgacatgatactatacctagaaaaccctaaggactcaaccccaaaactccttgaactgattaataaattcagcaaagtagcaggatataagattaacattcagaagtcagttgcatttctgtataccagcaatgaaacattagaaaaggaatacaaaaatacgataccttttaaaattgcacctcacaaaatcaaatacctcggaatacacctgaccaaagaggtaaaggacctatatgccgagaactataaaacattaatcaaggaaattaaagacgatgtaaagaaatggaaagatattccatgttcctgggttggaaaaattaatattgtgaaaatggccatactacccaaagcaatctacagattcaatgcaatccctatcaaattacctatgacatttttcacagaactagaacaaacaatccaaacatttatatggaaccacaaaagacccagaattaccaaagcaatcctgaggaacaaaaaccaagcaggaggcataactctcccagacttcaggcaatattacaaagccacagttatcaagacagtgtggtactggtaccaaaacagacatacagaccaatggaacagaatagagaatccggaaataaacccagacacctatggtcaattaatcttcaacaaaggaggcaagaatataaaatgggaaaaagacagtcttttcagcaagaattgctgggaaaactggacagctgcatgtaaatcaatgaaactagaacacaccctcacaccatcacaaaaataa

SEQ ID NO: 163455 - DNA, 1602 bp, Enterobacter cloacae
atggcaataaataatcatctatcaattatcaccttaaatgtcaatggactgaatgctccaatcaaaagacacagagtggctgagtggataaaaaggcaaaaaccttcaatatgctgcctacaagaaactcaccttaggacaaaagatacatatagattgaaagtgaaagggtgggaaaaaatatttcatgccaatagacatgacagaaaagcaggagttgcaacactcatatcagacaaaatagactttaaaacaaaagacataaagaaagacaaagaaggacactatttaatgattaagggatccatccaaggagaggatgttactatcatcaacatatatgccccaaatacaggagcacccagatacatacaacaaatattaacagacataaagggagatattgatgagaatacaatcatagtaggagaccttaatacccccctcacatcaatggacagatcctctagacagaaaatcaataaggcaacagagatcctaaaggacacaatagaaaagttagacttaattgacattttcaggacattacatccaaaaaaatcagaatacacattcttctcaaatgctcatggaacattctcaagaatcgaccacatattgggacacaaagcgaatctcaataaatttaggagcatagaaattatctcaagtatcttctctgaccacaatgccatgaaattagaaatcaaccatgggaaaagcaaagagaaaaaacctactacatggagactaaacaacatgctactaaaaaaccaatgggtcaatgaggaaatcaagaaggaaattaaaaactaccttgaaacaaatgataatgaagacacaacctctcaaaatctatgggatgctgcgaaagcagtgctcagagggaaatttatagcaatacaggccttcctcaaaaaagaagaaagatctcaaattgacaacttaaccctccacctaaatgaattagaaaaagaagaacaaaaaagtcctaaagtcagcagaaggaaggaaattataaagatcaaagaagaaatcaataaaatagagactcaaaaaacaatagagaaaattaataaaaccaagagctggttctttgaaaaggtgaacaaaattgacaaacccctggccagactcactaagaagaggagagaaagaacccaaataaccaaaattagaaatgaaaaaggagaaatcacaatggatactgcagaaatacaaaaaaccataagagaatactatgaacaactatatggcaacaagtttgacaatctggaagaaatggacaattttctagaatcttacagcctgccaaaactgaatcaagaagaaacagaccaactgaacagaccgatcactagaaatgaaattgaagaggtcataaaaacactccctacaaataaaagtccaggaccagatggcttcacaggtgaattctatcaaacatataaagaggaattggtgcccatcctccttaaactctttcaaaaggttgaagagaagggaacactcccaaagacattctatgaagccaccatcaccctaataccaaaaccagacaaagataccaccaaaaaaaaaactataggccaatatctttga

SEQ ID NO: 163456 - DNA, 837 bp, Enterobacter cloacae
atgagttatttagtaaaggaggttgactctaaggatgtgtttttcttcaagaaggttttaaggaagaaaaacaaatcaagagtgatatattcggttgacgacaagtcttcttctatttataaagatatggaaaaatcaatatcaaaaagatttatttgtgagatgtcaaaaaaagaaaacttcctcataaaaaaagtaccatatgcctactatccgggaaggtcggctaatcaaaacgcaaaagctcatcagccattcgattttacattatctatggatatccgagatcacttcacatcgataacgcctaagatggtagattggttacttaccccaagggagttatacctatgttttatagatggttcattacctcaggggctctctactagcccagtaatttctaatatagccatgatggaggttgatagagcgatattatctgaattatcaaatgttgtatctaacggctccgaaccaataaacggttttgtatacagaataaaaaacttccgatacacaaggtattctgatgatttagttgtaagctttaatttgcacgagccatctatgcatttacataggcgtatatttttatatatagaggccctaataagtaaaaccataaggcagtttggttttgaaccaaataacaataaagttaaaatgcaaaatgaaaagtctggctttagagttatcactggtgtatccgtctcaagagaaatcataaagccaacaaggaaaacaaaaagaaaacttagatcagcaatacataacgccaacatagacaatgctatcgggctgtataactggatcaaattagtgtcgagaacataa

SEQ ID NO: 163457 - DNA, 297 bp, Enterobacter cloacae
atggatagatctgaatttgaaaaactaatatcagatctggagtcaaaactgaaacgggcagtcctgagggttggcctgaaaaaaatagaagttcaagtattcctactattcccactcggtgaatcgcaactaggtactattcatgtcgaagcatatagacgtacagatatactgaatcgtaaaaaaccacagccaatatataaaataaaaagtgattgtttcaaggatatcgaaaggggatttttgaaatgggtcattgattataaatcgactatcgataaggtggctattaaatga

SEQ ID NO: 163458 - DNA, 837 bp, Enterobacter cloacae
atgagccgtcttaaccctaaatcaacaactttaagaaccctttttctccgttcgggaaatcaatgtgcctttccaggatgtgatgtggaattaattaattcttacggccagtatgtcggaaatgtctgccatattgaagcagctgaagtcggaggagagcgttataataagtcacaaacagatgaagatcgtcgagcttatagtaacctaattcttctttgtgcaaatcatcacaaagtaactgatgatgtagatatgtaccctgtacaagttttgcattcaatgaaaacgacgcacgagcgtacggtttatggaagaaatatcgcagagaacaaagttacagctttcgtcaattcaacacatggtgaaacggtaaatttacctcaaaatctatacaaagttcgaaactcaatcttagaaattttccgagaagaggcattttctggattagttgatcatgcgagaaattatttttctcattttgtcggagttcctaaagcaactcgtacactttacgctcaaatccttttgatttcagaaagcgctgaccactgtacgattattgatattcgaaaagtaccgcaattccttggtgtggcaatggaatttttacatgtacattacacaatacttgaaaatgcagggttgcttagtgagcaaattatagatgacgatgtccatccagtccgcctctatcgcgtattcactacttttgatcgaaatgacatgcaggcttggttgttacaaagtataagaaattattatctgcaaagccaacgacaaaccgattttgtggaactggtaactgatcttaactttaaccttatggattcataa

SEQ ID NO: 163459 - DNA, 786 bp, Enterobacter cloacae
  misc_feature (347)..(356): n is a, c, g, or t
atggcaaccctccttagccgaaatgcccaaaggagaagcaaagaatgcttatccgataagcgtatagctttagttggttgcggaaccattggtgggtatattgcagaattgttactccgaaacggtgccggttgtgggaaaggtttactgcatttatttgatgatgatatctaccgtcctagtaattttggtcgtcacattttaccttcacatgattttgggtggtccaaagcgctctcactcgcaacaaaacttcaagactctgtgcatttacagaccagagtagaaggattttataagcaattccccatcagtattgatgttatgaaaaaatatgacattattannnnnnnnnnaggtcgacctcctgtttccaagcgtattgcggctatcgtaagacagattccctgtgagcaaagacctattattatccacgccttcaatgatggtaatggacgagcatccaaagttttaatcgatgatggccgaagctgctatggatgtatggttactaatccagcaaaataccataatggtatcgattcccgattttacaacctcgatatctcaagtgaaaaaaataaaagttgtggtagcacatacacatcttatgatgcggcggtgagtaatataacggcatctttggctcaacaggcagtcttgagtactcttgagcctgacctcaaatggacttacaacgagcatatgttagaaggtggacgttcactgaaacctcagtttttgccacatcagcctaactgtcctatctgcaatgaacataactga

SEQ ID NO: 163460 - DNA, 486 bp, Enterobacter cloacae
atggaatatactgcattcaatcacgctgcatggaattcactgcattcaattgggatccattgcaccacgatgcatggaatccactgcgttcaattaaaatccattgcaccacactgcatggaatacactgcgttcaatcgagatccattgggccacgctgcatggaatccactgcattcaatcgggatccatttagccatgcttcatggaatacactgcgttcaatcgggatgcattttaccatgctgcatggaatccactgcattcagtgacactgcatggaatccactgcatcaatcgggatgcattttaccatgctgcatggaatccactgcattcaatgacactgcatggaatccactgcatcaatcgggatgcattttaccatgctgcatggaatccactgcattcaatgacactgcatggaatccactgcattcactcgggatccatttagccatgctgcatgtaatccactgcgtttaa

SEQ ID NO: 163461 - DNA, 147 bp, Enterobacter cloacae
gtggctgccaagcttcagaggctctcctggtccctgctgtggctggggcaagagctgcactgggcgatccccctctggctagaccacatctccgtgtggcacagggcacccaaatccacggacaaggaagaagaggcattgaaatga

SEQ ID NO: 163462 - DNA, 135 bp, Enterobacter cloacae
atggtggccatgagaagaatgctggaaagaatacttgtcatccaattgtccaatacatccaatggatcctcctttaatttagtatcaacatacctccagatcatgagctcaggctgcccgatgtacaacaattga

SEQ ID NO: 163463 - DNA, 129 bp, Enterobacter cloacae
atgccgcagcaggttaaggagccacacaagtcgccggtggatcaggtcgcattcaatccctggcccgggaacttccgaatgctgtgggcctggccaacaaaacaaaacaaggctgtaaggatgaaataa

SEQ ID NO: 163464 - DNA, 687 bp, Enterobacter cloacae
atgctgataaattccttgcttgagcatgctatatgtggtgttcggttccagcctatctattcttcacaggaaaaaaagataaaggcatgggaaatgctaagtgccttacgccaggggatcgactgcgaaaccttttttgaaaagatgtctttaaatgctagctttcgtttattacgctggcagttgcgtatagcttctctgtgtgtagacagtgaagcctattttattaatgtgcctgcgaaattactctgccgttcagttttgattgatgaactattgcccagcctgcactctggcattgttattgagatacaagatccctgtaattttatttcattgtcaaaaaaagaacaggaggttttttactccatgcatcaaaaaataaaaaatacaggtgcaaagatatggctggatgatattaaacatgagcatttgtcactgctgggtgaacgcatttgtttatttgacggtgtcaaggtagataaaatgagcctatgggaaaacagaggttccccatgggtattaaagtcaatgattgcctactgctcgttgatggtagagcaggtgcttatagagggcatcgaagataacgaactacttgcattggctcagggtacaggatgcaatttaatgcaaggatttctttggcctgagaaaaggttcagtattgattatgtcccggtctga

SEQ ID NO: 163465 - DNA, 510 bp, Enterobacter cloacae
atgaattttaaacttatggctattgcggcgatggtatctttttcatccatggcggctgatacggtaaatattaacgttacgggtactattgttgcttctccttgcgtaatcaatggaggaagtgccaacctgaacgtggatttaggttcgactattcaggcctctacacttgccagtgcgggagcaacctctacccccctggcatttactcttccgataacagcatgccctgtaggaacgagtagtgtgcaagtaaccttcagcggaacgccggaccctgtcgcaggtgccaactattataagagcacagggaccgcgactaacgtagcggtggggctgtatcaggccagcaatggcaatctgttggggaacgggagttctgtgacccaaaccgttcaaggcgatcgtaccgcctcgttagctatgcaggcaaaagcttattctgcatcgggtagcgtcatgccgggaaccattaattccgttattgttgccaccatgcaatataactga

SEQ ID NO: 163466 - DNA, 642 bp, Enterobacter cloacae
atgttaaatattctgattcaggaaacggatctgttttttcaggctgggctgcaggactttttagagagtttttttaagcataactttcatcgcactatcacatttaatcctggcttaacccatgaaaatgtcagtcaggccgatattattatcctgtcattatgtcagggtgagacactgacctgttttcccgagttactggcccggcaaaaagggattgtgatagggttcgtcgacgatgagcagtcggtttcggcgttgccctcctgctttcaggacatcattttacttcctcgccgtgcatcgattgatcgaatcagtggcgaactgtttatcgcgtggttcaggacgcgactaccgggttacacgtggaccaaaaggaactgtttcaactgccagcataaaagtttatcccggcaacaaattcgtattatggtgaatttttacagagggctgtcggttatgcagaccgctcacgcgctcgagatgagcgagaaaacggtctttacccacaaatatatgatgatgcaaaaatttaatctgcgaaacgattacgagatgatcgcattgctgagaaggttgatggagaaaaagagccggccgaacctgcttcgcgaattcctggaaaacaatgacgcatga

SEQ ID NO: 163467 - DNA, 129 bp, Enterobacter cloacae
atgaaaacggcgggaattcccgccgttgttgttttgcaggccgggatcgctgcgcgccacccggcattacatcagagcaccaaccccgcaaagctcgccgacagcaaactcaccagcgtcgcgccgtag

SEQ ID NO: 163468 - DNA, 1680 bp, Enterobacter cloacae
atgtggcagacgcgagcggtagaactgaatacccaggcttactgggactggaataaaaccggtgaactggtgaagtgggctgtagcccatggcttcaataccctcattgtcgggcaggctgacctctttaatctgcttgccacaccgaaagggtatacgccacatcactacaatgaccgcttatccagccagcagcgggcgcgctgcgtttatctcaaccgcctgggccagctgtgccgacgtcaggggctgcgattttaccttcaggccaaagagctcaactttccaaccgatctcttgctttcccatccgcacctgtttgatcccaaccagggtgtacgcttcgacgtggacttctggtgcagttaccttgcggataagatttcacagatctgccagcgcattccgtctctcagcggcctgatgattgcgatttctaataccgacggattgctgccagtctcacgcccgagttgggagcagccatcaacagaaaaatccgccccgttacaacgcgacgatcgcagcttcatgatttatagctgctgcttcactgccctctcccgcgtgatgcagcaggaaaataaacatctggtgctgcgtgtatttccggcggataaccacgatcttggcaacgtgctggaggccatccgtcccttaccggcgagcgtcagcgtctcgatcaagctcacccccgaacgtttctggccatcctttcctaataaccccgcactgctggaggttcgggagcgcgaggtctggacagagatcgaccttgtcggggaagaggttggctggggcatctttccattcccgcgtattgatgaactccaggggcggttgctctggtgtcgcagtaacccggccatcactggcgcggtatgcaaagtgagctgggaaagtctggataaccattggatcatgggtacgctcagcgaatgtaatctggtggcctgcagcagaatgctgagcaacgaggggacaatgctgacgaaagcgcagctgatgaccgactggctacacgaaagctatggctggcaacccgacgagcagacctttgagacattttgttccctgcttgagcaagcgggacaggtgttatacagcgctatttatgtccgcaagcacgttttccatcgtcacagccaggtccccgaaagctatggccaggcggtgtggagcctttacggccagctaaaccgcaattactggcttcccggctcagaacggacaatcaccttcgatcgcaacgatccagaaacgtccgccgcttgcctgtcacgtatcgcaagggagaaagacgaggcgggcaacgctgccgccgcgcttcaggaagcggcactgcatttcgtaaaacgcgccgcgtttccccgctcgcttgaacgtcgctggtatgaagagtggcagggctttaccctctattgtcgtctctttttacatgcgcaaaaggcgttcttcacgctgcgctatgcccgtgaggtcgagaacagctggagtatgcaggagattagccatatcaatattcaggagctttatcgatgcgcctgtgaaatggaggattactgccagaaacacgctgacgcctcacccggtctgcatgtgttatttgatgcctcgcgggtacgtgcgctggctgacagtctgagccatgaattaacgtcgctgagagggcgttcataa

SEQ ID NO: 163469 - DNA, 1365 bp, Enterobacter cloacae
atgaaaatttctttagacaatgcgccactcgatcgcagtggcaatacggtactgacggcgcaactgcaacagcttatcgatgagatagcctccgccgggggcggaacgctggtcgtgacgcccggcatctggctcaccggtacgctggttttaccctctcattttaccctgcatctggaagccggtgcctgcctgcgcgccagcgcaaaccctgccgattaccagcattcggagacggtgacgctcgcagaaatgtcaaacatggcgctcctttacgcccgtggcgagcagcacatcacgctgagtggagaaggaaaaattgatggagacgccgcaagctggttttcatcagatgcggatgaccagggctatcgccagcctaaatcacagcgcccgcgactggtggtgtttgaaggctgcgaacaggtacgcctgcaggatattaccctgcataactcgccgatgtggaccgctcacctggtgagctgcaaccacgtttttgtccggaacatcaccattgataatgacctggcgctcgccaacaccgatgcgctcgatatcgacagttgccagcacgtccatatcagcgacagctacttcagcgccgccgacgacgggatttgcctgaaaaccacccggaaacccgcgccgctacagcagcccattcgtaacgtaacggtgaacaactgtattgtgcgttccaaaagctgcgccatcaaaatcggtacggaaacctttgccgatattgagaacatcaccgtcaacaactgcacgatttttgagtccaaccggggtattgggctggtttcacgcgatggggggcgttttcaacggctggtgttcagcaatattctgtttgactgccgtcacggccatccctgtcactggggaaaagccgatccgatctatatttcggtacgccaccgtgcgccagatgttcagcctggcaccatcgaaaacgtcattttcagtaaccttgcaggccacgctgaaggcgcgattaacctgcacagcgacacgccgggcaacattcgcgacgtcatgtttaatggcctctgcgttgaacaatgcctcagcgactcgcaggaacaaggcttctacgatattcgtccgccgtgcaaccccgcgcgtcccaccggaatggggctggacaacgcctacaacatcaatccgtctaccggccgtgcgcatggggtagagccctaccctggcggtatgcccgttttttacgccaacggcgtaagcgggctgcggctctgcgccacgcacctctgccgaccggtgcccttgcctgcaggctggaacgcggaaaaaaccgtcctgcttaacgttcagaacctcatcaccgactccgcctgtgcataa

SEQ ID NO: 163470 - DNA, 1557 bp, Enterobacter cloacae
atgataaaaaaagtacgtgaaataaagctgcataactacgtttgttatggtcttgctgatgtaataggctctggcgcgttcacgctggtgagcgcatggttactcttcttcctgaccaccttctgcggcttaacgccgattgaagcaggctcgctgtttgccgtggcgcgcattgtcgacgtcatcatgtgtccgctgatgggctatgtctccgataacttccataaaacccagctgggccgtcgttttggtcgtcgccgcttcttcttgttggtcagtattccactggtgtcggtctacagcctgctgtgggtagaggggtttaactactggatctatctgctggtctatattctgttcgaaatcgtctattcgatgattattatcccttacgatacgctctccgcagaaatgacctccgattttagcaagcgttcgaagctgaccagcgcccgtatgtatatcgcccaactggcgggatttgccgccgcctttctgccgggacgtctggtggcttattttggttcagactccgcagattcgttcttttatgccggcgcgatcttcacgctctcatttatggtcgtcctgttctttgtctacttcggtacctgggaacgctcgcttgatgagatagagcaatgcgagcgtcacgttgacgagggggaaaagcagccgctcctcgcccgcgttcacgccatctgctacgacttcctgtccacgctgaaaataaaaaccttccgctcgcatctggggatgtatctgggcggctcagttgcccaggatatctttaattcggtattcacctactttgtcgtcttcgccctgatgaccaccccggtcatggcctccaacctcctggcgaccatcaacggcatgcagttctttggcgtcggtgtagcaacctggctcacgctgcgtttctcaccctcacgcgcgttcgccacccaggcaacactcgcccttctggcttttctccttttcggcgcggcatgggtaaacggctctaccagtatggccctgctttatctgacggcagggattgcgggtctggcgcgcggggggatctacgcgatcccgtggaacaactatacctttgtggcggacgtggatgaaatccttacctgcagccgccgcgaagggatctttgctggctttatgagcctgttgcgtaaagcctcccaggcgctgtcaatcttcctggttggcgttgcgttgcaactctccggcttcgtttcagggcagagccaccagccgggaacggccatcacaatgatcgtgattatcatgattgcgctccccgttgtgctcacgctctgggggatatggtcggccttccagttcaaggtgaacagccgtactcatgccatccttaacgacgaggttgcacgcctcaaacgtggcgaaaagaaagacgctgtcagcgctgaaaacagagccgtgattgaaagtcttaccggcttaccttacgagcagtgctgggggcagaacacggtgggccacgtcaatcgtagccagatgaaatcccgttcgaccgtacaactgaaaaatgcctga

SEQ ID NO: 163471 - DNA, 1251 bp, Enterobacter cloacae
atgactgaacataacttggtgatgcaacaagggatatgggcgcggataggattaccccgggagcttagctggggattcatcggtgtttttttatttataaccggagcgaccatcgaacaaagctggctggcttcacttttgcagcagcggggctttgatcctgttgaaattagcctgctttcatccatcttcggcctgtgcgttgccgctgtctcctggttttccggtatcggagcaggcgtgctgggggtgcgccggctgatgtggatcgcgacggtggtctattttatcggctcggtgccctttatttttgttgccctcccccagaataactatccgctcatggtcgcaacctacgcgctacgcggggtggcttacccgctgtttgcctactcgtttctggtatggataaaccagcgctgcgaaagccgtattttaggccgtgcggtctcctggttctggatagcctttggtgtcggaatgacaattgttggcccgtggtactccagcatgatgctggcccgcatgggcgaaacgggcacgctgttgagcggcttcgcgtttgttctttgcggcgggttttgcgcactggtcctcaaccaggaccggcccgttttcagggacggttatccgctgagaacagcgcttctggaggggattatcgtcctggtgcgagagccgaaaatgcgtctggcggtcgtggtgaaaaccatcaatgacatcggtaaattttcgctggtgatcctgatgccggtctatttaccgcaatttggctttagcattgccgagtggctaacagtctggggcctggtcaatattgtgaatattttcgccagctatctgtttggctggctgggcgattgcctgggctggcgaaaaacggtgatgtggttttccggtacgctatgcggcgtagcctccatcgcggtgtgttatgcccccgtgctgtttggccacagcaccctcgccctgtttctggcgctcgccctttacgctatcggcctgggggcgtttggcccgctgagcgccctgatcccctcgctgctgccggaaaacaaaggggcggcgatctcctgtctcaaccttggttcggggctaagcaatttcgccggccccttcatcgtcaccgtgtgcgtcgcgccattgggtgtggaagggacattgtgggtgatagccgtactctatttcgccgccagcctgatgacggtaccgctgcgcctaccggaaacggcggcacggccgaacgcttaa

SEQ ID NO: 163472 - DNA, 741 bp, Enterobacter cloacae
atgggccttgattggataccctttagtttccaaaaacaaccaatggatatagctcaagagagaagtactaaaaagattgtacttcaatcatgttcacagcttttgaaaacaacagtacttcaatcaatagcttttagtctaatggcaaatgatccctgtaactttgcttttggtagtagttctgaatcagaagtgaagaaattcaaggatggtaaatttcttccagcaattgaaacaagtgaagtactaaagccattagtaaccgataagaatgataagaacgccgccaataactctaaacaaacacaaatggtgaacggtacttttatctattggttaaatctcaacacgccggggaatcttcgcggtatcacaaccaggtgtgttctgttagatgaggtcagcaactgcgaaattactgatgaagggaatccaataaaattagcagaagcacgtaccagtacctttggtagtgattcattggtggttgtatcctcaacacctttgtataaagatgatttaattaatgcggaatataacctatctgataaacgccgttactttgttacacattcttgcggtcatgagtatatttttgaatgggagcaggtagcattcaaatttaaatatttagagaatggtagagcaattccagatagtacaactacccgtttaatatgtccgtgctgtgaacaggaaattggtgaacatacacgacatcaaatgattgataacgggtga

SEQ ID NO: 163473 - DNA, 222 bp, Enterobacter cloacae
atgcgcgtccaggacaagcgcacgcactacgaaatctgcgacctgttccagtgggcaaacagggacgagttctggaaagacaacatcctgagcccttccagtctgcgcaagcagtgggatcagctcactaccaaacggctgcgtgcaaccggaacggcaaagccttcccggggcagcatcgacctgcataacaccgactggattgacggggtgctggaatga

SEQ ID NO: 163474 - DNA, 687 bp, Enterobacter cloacae
atgaaaaaccttgccgagagcattcgcaattttgaccgggaacaggctcgccgtgtggcacataacttgccagagcagtgcaccgaacgcgaacaaatgcagcaggtggcgcagattatcaacgggctattcgtacagctggcggctgcgttccccgcaagcctggttaatcgcagccaagaggatgtgaatgagatccgccgacagtgggcgctggccttcaaagaaaacggcatcatcaccatggagcaggttgaagcgggcatgcgtatggtacgccgtcaggagcgtccattcctgccttcgccaggccaattcatcaagtggtgcagggaagggcgcagcgtgctggtgatcaccaccgctgacgttatggctgaatactggaagtggcgtaagctggtgttccggtacccgagcagtgagcagtatccgtgggcgaagccggtttattaccacatctgtctggagttgcgtcgtcgtggtatcgatggccaactgagccacaaagagctcgagcatgaggccagcgacattctcgatatgtgggaaaagcgggtgctggccgggaagccgatcccgcctgttcggcgggggctggcagctccactggctccgagggggccgacaccggcggagttgctaaaagcgaagtatgagagtatgaaagctggtggagtaatgtga

SEQ ID NO: 163475 - DNA, 258 bp, Enterobacter cloacae
atgagtgaaaaatatccagcaatcaagtacagtaagtacgaaacaagttttatcgatgatgagtttgttagcgaggatgagttaagctcaggaaaggtattgcgtaacggagtattattcaaagtatccattttggttcatgaaaaaaatggggttagtagaaaatatgctttcattcacattgatggcgaagaagaggatttcagattcctgattgatgaattaaatccatgctctatagatggaactatattttga

SEQ ID NO: 163476 - DNA, 597 bp, Enterobacter cloacae
atgaccagttggcagcaatacaacgacaaagcatctagcttcttcgaatcctacataggaatgagctttgatgaaatttttagcgatgttgctgagtttatcccttcttcaggtgagtcatgcctggacattggagccggatcgggccgtgattccgccgcacttgctaaacgagggctaaaggttactgccgtagagcctagcgtcgagttcagagcactagctaagagttaccataaagatcttgatatcacttggattgatgacagcttaccatatctaaaaaaagtgagcaccagcaataagaaatttgacttcatattgatgagtgccgtatggatgcatctaccacctgaagacagaactcaagcattgcacactgcttataacttattaaatgcacatggaaaaatgatcatcactttacgtcttggtcccgcagaacctgagcgtgttatatacaagatcactaccgaagaagccatctccaaagctaaagaagctggtttcaatgttgagtttgtaaatccaatcaaagaagatggattcaaacgcaacaatgtcacatggcaaatagtggtacttaccaaaaattag

SEQ ID NO: 163477 - DNA, 660 bp, Enterobacter cloacae
atggcatccccaattcatgagcaaccagaactaaaagatgaattaagcataagtcaaattgaagctttaaaatggcatcagcgtttacaggaaataacttacttagaagctggtcagcatatgcgtgccttgaatcagcttatgtggcaagtccctagtttagttatcataattaatggaggtttatggtatggtttaacgatgatgagtaacttcaccgctcattttatttttgcattttgtttattattcgatttagcttccatcgtcacattatatagattaagaaaactaattggtacgaagattgaaattcaatcttccatcgaaaaaagctataaaaaagaaattttaaatgaaataacaaatagcatatttaaagaaaaagaaatagtgataagagcagaaaagacagaattagaacctgatggacatcataaaaaaaacagaagaacaagaatatttgaatggatcattaataaaaccgatggtagttatactgttatatcatgctggagcctttcccttgccttttgcatcataatcaatgcaataggtgtttgttcaccatccttattccttgataacgaaccaaaaaaaatcaagcatgaattctacatagataagccgtatgttataattgatactaatcagatttaa

SEQ ID NO: 163478 - DNA, 243 bp, Enterobacter cloacae
atgactgatgaacaaaaaatctacagcgccatcaaagaagcacgtctcttagctaaacagggcgagaaaacttcagaattacaccttcagctattgaagtactctaacgccttaaagcatgtcgatcgaaaagctatatgtgaagaacttggcattggagaatcctacacggctgaaattggtaagatgcgcaacatagtagataggctattagctgccggtcttgaacttgataaaatttga

SEQ ID NO: 163479 - DNA, 660 bp, Enterobacter cloacae
atgagctttacaaaacgaaaacctttatacaaaaggaaaaaattcattactggattaggtgatagtttacagaaacactcagtcacagttttaataacgtatacattgtcaatttttatatcggcctacactttagttcaatctcgtgtcgaaactgagaagtccattacaaaccaatataagataaaacttgacttgcttgaaaaggacatgtctcagattaaattagagaatgagcagtataaagcgtggctgttagaaaatgaaaaaatcaacccaacactatatgagaaatttcaaaaattaaatgcagaaaatgctgagttaagaagggagaaaaaagaaactaatcctaacatatctaatgagcaagataatgaaaaaaaattgactcaaattcctttgtttaaaaaatatatgatccgaaaggggtcttctttttacgatgaacaagccaatattctagttggagttggtaatgtggatgtcactagaagtgctgaaattgttgttaatacattttcgcctaaagaagaggaaaggctaaaagtttcaccagggagtgctattcaattaaacaatggagactatgttttgcttgtgacagacgtggagttcattacagatcaagtcagtttcatattaaaggcaaataagtga

SEQ ID NO: 163480 - DNA, 240 bp, Enterobacter cloacae
gtgaatgagatgcaggagcaggggctgggtgaatggtacgacattatcaggcgttcagacggcaaactgattggctctgtgccgattgaaagccgctgcctcgtctataccagaaatggtctggtctcgtgtcgcccgctgctcgaagatgaagggatttttaatttgtcgtccggaacccgttttcttcgccacctaggctaccgtgtctctcaaccctctgatattattctttcatag

SEQ ID NO: 163481 - DNA, 234 bp, Enterobacter cloacae
gtgtttccctcggcgaacacctcaatcacattcaacccggaaaggataatcatccatccaaaacttcggtcacttcgacactggcttgagttcaccggtaaaggtcaggatgtcgagcacatccatctggtttatctcaacgagacgattcaggacctttgtcgcatttatgccaaccagatcattgcgttatgctttaagttcggcaattctggactggatgtcaggttatga

SEQ ID NO: 163482 - DNA, 582 bp, Enterobacter cloacae
atgaaaattgaagaattaattagtttttgtagtgatgtgagacgcgctttagaaatggctgatgcagaaggtattcacgatgagatgacggctctcggcatgtccgacttccccgctggctgttgtggtgatactacagacatactcgcatttctgattaataaacaatttggcgagctagctttacgtcgctctggagtttataaagagcatctcaacgcagattccaggcttcgtgatgggaacagccatgcatggcttgaattatccggaaatgtgattgatttaactgcagatcaatttaatgatcgcggattcgaaaatccctcagtaatgattacttcagaccactcatttcatgatttgtttgcatcaagggatagtaggtataacttgcaagcagcagtcccaccatctatcaacccaagactaggaacatcaatctggtatgttactgaaaacttaagtcgtttggatggtgatttgatcactgtacgcatgcgccactacgatgagcctacccatggtgatagcaataaaaaaccacccgaaggcggtttcatcgtttctaggggtgtttaa

SEQ ID NO: 163483 - DNA, 531 bp, Enterobacter cloacae
atgagttttggcgaacaactgattgcctggcgccgcgaactgcaccagaacccggagctgtccggccaggaggtcgaaaccaccgcgcgcctgcgccagtggctgaccaacgccgggatcaccccacagccttacgacctgtcgaccgggctggtggcggaaatcggaacgggcagcaggctggttgcgctgcgcgccgacattgacgcgctgccgatcgaggagcgcagcggcgtgccgtttagctcacagcatgcaggggtgatgcacgcctgcggacacgatattcacaccagcgtcatcctcggcgccgcgttaaagctgaaagagcgggaggcctcgcttaacggccgggtgcgcatcctgtttcagcctgctgaagagaactttggcggtgcgaagagcatggtgcgcgccggtgccctgcgcgatgtcagcgcgatttcggtatgcacaacgagcccggcctgccggtcggtgagttcgccacccgcggcgggccgttctacgccaacgtcgaccgcttcgtga

SEQ ID NO: 163484 - DNA, 510 bp, Enterobacter cloacae
atgaccatgaagcgtgaaaatgaaaagttgcccgggatagatgagagttatcgcttgctgacgtttgaatacgcgtttcgtcaggtgggttttattgttctgctggctattatcatcgccgctatcgccggtctgttttcaagcgggtgggtcagcgatacggttaaaaccaattccgctaaatcactgaccataagctatgaacggtttggcagccgggagacggagacgcgaatggagctgtcgttcccggtgcgaacagagggaaagtatgttctcagcatggccagcgagagcagcgatgtttacgagcctggcagcgtctggccgcagccggacagcatgttcagccgtggcaagaccctctattttgtctataacaacctgaaaaagtcagaccgcttcgcggtgttacttttcaccacgccttcgagagccggtaaatggaacacgaccgttcgtgtaaacaacgaaccggagataaccctctggcaatttatttacccctag

SEQ ID NO: 163485 - DNA, 2052 bp, Enterobacter cloacae
atgtctgatgatgttatgacaaaaaccgatatggttgttgccagctatgattcatcttattttacctatgaatctgtcgattctgcactgaaagaaaccaatgaaaatgaatatttccgtgtcccacaaggagtggaagccagcagcgcgtttatttattaccgaaaggtttccggtaaggcggttgaagttgccgaaattattggcggccaatatgtcaaagatgaaatccaggccatctatgaaaactgtggccgcagcccaaaggtgttcaatttgtttgacgcctcacgtattacagaaggaaaatatgtcaatactgtaggctccctttccgctaatgcggcttattttgccagcgatatgatgcctgttcagagtggaacacaatatgttttcgcccgttcagtagcacaccttgcattttatggctttgacaagaaattcattagctatgctggtgctgtaggggctgccacgccgttttcgacgccagatgatgctttttttgtccgcttttcccaaaccctttcaaccggcgcggatacgcagatgttgaccaaaggtaccagtaaaccttctgtatatatgggttacggttggcgtgactggtacagtcaggatctgaaatcccaccaacagactgttgaactgttcaacagaaacttcccgggtgccaatctggttaatcgtgaccaggtgctgatgggatatgccctgtcaacgaatggctcagtaacaagcaacgccagctattttgtgacggactttatcccagtagctcccctggcaacgtatatctgcaataaagccagtaatgtggtctgttgctacgatgtgaacctgaagaaagttgatgttcttagcattcacactaacacgccattcaccacgccagcgagtgcggcctacatccggatgcatgccacaccgctgaacactgctgatgtgcttatggtgctgcatggcaatgaaatgccttcagactatgtgccatttggtgcgccaaacaagcaggatattatgcagacgtcgatgcagatttcccgcagtaccctcaatgcggcactaccgtcaggtcgcaatatttttgacaagagccgcgcccgcgtgggatataccgtctcataccaaaatggggcagtcggtcagaatgctgcatacgccattactggccttatccccgtgaccccagggggacattttgtctcctcttcaggcagtaactcgctgtgtttctacaatgccagcggccagtttatcgccggatcaaaggactacagcagcgcagcccgaatgcccatcccagtaccagaaggcgcatggttcgtccagttccagattacacccgtgaatcgtatggaatcgctgatggtcacagaaggagatgctgggcagacggggtacattccgttcgggggcaacggcagtattctgcccggtcagggaaaaaaggttctctggcttggagactccatcacgcacagtggtttctatattccgtttgtcctgaaagaaacgggactcacgacactcgccaactatggcgtacccggtcaaggagtcaggacaatggccgaccggttgaccacggaaaccattacggatgcggatcttatttcagtctttggtggcaccaacgactacggcggcaaccgcccccttggtacgttaggcgattctcgcggggattatgatgaaagcaaaggaaaatcgttttattacgatgtgttttatgtactgaatacgattttcaccctgaaaccggatgcaagagtcgtggtcagtaccccactgaagcgcgggaatgtggccgggcaggcggtggtttatccggctgctaatgggattggggtcaggcttgaagaatatgtacaagcaatcaaagacgtctgctcattattctccgtaccggtctgtgatctgtttaatgaaagcggggttaatctgtataacctgtcagtctttacgctggataatctgcatcctaatgacgtgggggcagagcggatatcacacaatctggtccagcaatttaatactgtattgtga

SEQ ID NO: 163486 - DNA, 1752 bp, Enterobacter cloacae
atgagtggtggagacggtaacagcgaaagcaataccggaccaggtcataatggcggtacaacaggcgagattaatggctcttcagaaagcggaacgccaggcagagttggctggagttgggaccacacaactcctaatacaaccaccggccctgatggagaggtccacgttagatttgacggaacatcaaactcatcaagcccggataatactacaggaaatggcggaaatggcggaaatggcggcgggggcggaaatacaccaatcgatccaactaaccccaactataacagtcaggggttgagtgttagccacgggcatccaggatactggggattccggctaatcagcagcgacaatgccaccaattattacctaaaaatatttatcccatatggtgattctctggcatcacaggcggccagggcctcgcaggacctgctggatgcaaaacaggctgaggaggccgcaaggaaagcggctgagcgtgcttcaggggaagataaagctgcggctgaacaggcggcgaaagatgccgaagaagcgagagtgaatgctgagcttgagcaacagaaacaacaacgactggccgccgctgcccgtttgtttgctcaggatattcagtctgtgcgtggcatcccagttgtttccgagggagggggatcgccagtaagttttgcactggcaggattgggtggggtgtcttttacaggtaccccagccagcgcactgagctctcgcattgctgctgctatcgcttcccttagcgaaatcgctacagcctcgcttgtagggcctgtagtggcagcagtcacaacatttttctacagtccctcactgaattctggtgagaacattgatattggcagggatgtcagtgcaataatcccggcaaacctcatgggactgcctgacacggcagaactggaaaaagcctggcacaccggtactcctgttatgatgccggtacggggcgcccttgacagagatgctaatagtatactcactgtgggactggtcagaacccctgccactggcagtgccagagtagcaaaagcagaaaaggatgagcagaccggttattacagctacgctctgcctgataaatatggtattcctcgacagactatccttattagcccggcggatgcacccggtgtaaacggaccaacaacgctgacaggccccgttcctttgcctgaaaaggttgtcaatacgggggattttgaaggggatggtgagacccctgacacaacgattctgccaactccatggcctctggataatggttttgatgatattatcctgattttcccaccagaatctggattgaaaccgatttatgtgatgttccggtctccccggaatattcccgggacagccagcgggaaaggtcagccgcaaggggataactggctggatggtgcgggtgaaggtgagggggtgccggttccagcgcaggtggccgataaactacggggtagaacgtttagcagctttgattcattccgcagagcattctggattgctgtctcacaagaccctgaattagcgaagcaattaaataatgctagtcttggtcagacaaaattaggaaaatcaacttttgtgaaaaaaggcgagcgagcgggcaagaggttaaagcatgaacttcaccataaaaaatcaatacaagatggtggtgaggtatatgatattgataatataagggtgttaacacctaagcgccatgttgaaatccataaaaagtag

SEQ ID NO: 163487 - DNA, 744 bp, Enterobacter cloacae
atgctgagaggaaaacgcgctgttatcacgggtggcggcgggggatttggtcaggcgctgtgcgtctggctggcgcgagagggcgttgacgtggattttagcgcccgtcgggtagaggatatagaaaaaacctgcgccctcatcgcggctgaagggggggtggcaagaggatatctctgcgatttagcccagccggaatccgtttctcagttctcttcgcaggtcttacatgcagacaggccaattgatattttactactgaatgctgctcagtggctgtcagggactctagacgaacaatcgagcacagaaatcgtcaataccgtcagttcaggcctgacaggttcaatcctgctcacccaggcgttgctttcaggattgcgacgttcagacggcgcagacatcattgcgattatatccgcatgcggtattccgaactttacagattccattgcccatcccgctttttttgccagcaaacatggaatgagcggctttatcaccaaactgtcgaaacaattgtcccgggaaaatataagggtgaccggcttgtatccacccgattttgaacttaccgggttagacgcgcttgtcgacgatcgctcacgaatgggggagcgcttaatgaatggacgatctgtctgggaaacggtgcgttttgtgctcactcagccccgtagctgccacattggtaccgtctactttcaggggcccactcgcgaagatctggaatgtcagtcctga

SEQ ID NO: 163488 - DNA, 480 bp, Enterobacter cloacae
atgcgtactcatcaacagaataagtcccgtaagctgtatcgcagcgtcaacaccactacacgacaccaatctaataatcctggtgctgagtatcgctgggaacgcaacggtaaaaaagtcggaaatgagctactggcaaagcgcgggacaatgcatggcagacagaagcgtggccgagattatacacccttgttttatttcctgatcaaacacattggcaaaccatggtatgaaatattcagtgaagtatgtgggcgtcttgatactaccgagcctgtattctggttagtcgcacgacatgagcatcagcgaagagatttagtctgcattggtgaaagtagtttttatccgggtctgtttgttgatgagaatggaattcttcaacaggtaaatccttcaatttcgggaaaggacgtgaaagtaacttgccgctactgcacacacacctatattggtgaacctgtcccctggatagagtaa

SEQ ID NO: 163489 - DNA, 402 bp, Enterobacter cloacae
atgctttttagcagcctgagctttctgttctacagccggtttagcggcttttttgtggtggtgctttttagcagcctgcgctttctgctctacagcgggtttagcggcttttttgtggtggtgctttttagcggcctgcgctttctgctctacagcgggtttagcggcttttttgtggtgctttttggcagcctgcgctttctgctcggttggtgctgcggttgcaggtgcagcggcttcttttttcgctgcagctttgtggtgtttcttatgatgaaccgcttttgctggggcagcggtggtggttgcagcaggtgcggcagccggtgcagcagttgcggtagtgtcagcagcaaatgcagcagaagacagacccatagcagcggcaacaaccagagctaa

SEQ ID NO: 163490 - DNA, 303 bp, Enterobacter cloacae
atgtcatggggtatacaaacatgggatgcgagtggaagtccaaataactatggcattaagccagtttcggttgttggacgtattccactagcggcagggcagaactcaggggcatggagctttagcctaccccaggggtttaaagtggggtttgttgtttctcttgacgaggggggaaacagtgtcggacgcagaattgtagcgagcgggaacaccattgctgtgacacccgcatcagaaacgggcttgggcaattatccggcatctaaatgcgagctgattatttttatggagaaagcataa

SEQ ID NO: 163491 - DNA, 1185 bp, Enterobacter cloacae
atgtctctccgcttaagacaaacatttaatctttttcctggtgtacgccttaacattggtaaacgtggtgtaagcgtgagcattggtgtgccgggggcaacactaaatgttggacaaaaaggaattaaaactacgatagggttgcctggatcaggtttgtcgtattcatcaactcttttaccctacgagaataagcgaccagtaacaaatccattcaatccaaacactaatgaatctcatttagatgagcctaataccacacccaataacactccattaaacgccaaagtttatctgccgcaagctggcatgaatgaaatttctagcgcttctgttgaggttctgacaagtacatctcttttacctttacgagatttgattgccaaagcacgcgagcaaaaagccgaggtaaaagctgacttacaagaagcgctagcagaggaatcgaaacaaaagagtgaattggttcgtcgaaaatcaagtctgttccgttggttttacaagcgccgaattgctgaacttgaaacagaacttcctcaattgaaagcagaaattgatcgcctcatatcctgggaagacaacaccaaaatttcgataacttttgaaagcagtgatgcttcgcagcgagcatatgctgcaatggtaagagccttcgacgctttaaagtcaagtagcaaaatatgggatattacggcggatagggctacagaccaatttgccgaaaggacattagctacgagaactgtgaaccgataccccgttaacttcgatttcagttcaactgacatcattcagttcgcagggcgagcgatgtggtttgaaaatatcaatggtgatgatattttgctctaccctggtgttgctgtccttccacgtgccgatggtgccttcgctctgattgatttacgcgaattagaaatcaaagcagaacctcggggatttcatgaagaggatggtgtaccgattgatgccaaagttgccggtcatacatgggcaaaaacgaacaagaatggctctccagaccgccgatttaaggacaattatcaaatccctatctgtatttatgggaatattacttttcagtctcaatccggagttactgaagaatacatggtatcaaatgcagaagccgcacttgccttttcagaggctacgaaacgctaccaactgtcacttaacgaatag

SEQ ID NO: 163492 - DNA, 2142 bp, Enterobacter cloacae
atggaattactacaaggtcaaggggatatacttaagctcgttttgatgccaactactggcgagcaatcaattcttcaaggatttgatataggagtaataaattccaatgttagtgagatactcatgttggttggcaaagcgccaaaacatattagagatatatttgttttggatgatggtgagcaaagaactagactagagactcaaaatccaattgtattaatttcaaaagagaatatatataatattccaggcttgtttgaaacaaatttttgtataattttctgtatttcaaaagactatcattatgtgaaagaattttctaagcagtttgtaataccgcccattatttgttccgatagtaagttggcagaactaaaattcggtgagatcaatagcatttattcatacgataaatttattttttcaaggcttaaactcatagaaagtaaaatcataaaaaaaagtggagaaaaaaaattattaactaggtttaaaagacgtggggcgacgtttaaacggtgtgggttgagctcaacgttaaataatacgacattgcccaatgagttacttattgaatcgttaggcttcatgctttctcctccaaagagaattaaagacgggagtagtaagcgtgagttcataaatgctatgttggatggtgtcgtcacttataaaaactgtttagaagaattaggtaaggaaccaccgtcagaaataattctatatgcaccaggaatgtattcctacctttatgatacagataatgagatatatgagtttattgaagaaaacttaaatatagatcaaaagaaatttttgatcagtggtgtgttaagaaatccagattattcaggttttagaattgtcatggaacatgatggtggtaaaaaaaataacatatctagagatcctgtgtttaggtatttaattaagctcagacgctctgagatgcgattgaccactaccgcaataatgtttttaagcatgaataaaaaaattccagccataagattgccaaatgctataaatcatcaaagcaatatcataaagaaaattgaagatctagcacgccaatacgacattaaacaccctgtatttataaagaaagttaaggcttttaatacaattataaaaagaatacttggagcaaagttaagagatcatatatcgaagaactataatgatattacttttgttactgatactcctttggattggataagaataggtcatctgccaattatgttcagccacgaaatatctagagttaatacaacgccaggaaatgtgttattacaaaatgcagcttcatttccacgggttttaataaaatcatccgaactaaaaaaagtgttaattatacgatcttttgaaccagatgaccatattaaattccatttggaacatgctttggattgtttcatgcctcacatgcccgatttgcagtatgaaatagttgatgttagaaccaaaaaggaatttatggaagcattaaatcattatgatggttatttattagtgcttgattgtcatggcgatcacggaggagataaaagtcatggctggctaataattggagaggagagaattgatacatgggagctgagaaaaattgttagagtgcctcctattgtaatccttagcgcttgcttaacttcagctcttagtggatctcatgcttctgtggcaaatggtttcttaataagtggagcagtaagtgtcataggaacattacttcctgttaattcggtagattctgcagcctttgttagccgtttaatctatagatttcatcaatttccatcgagcttaccgactatgtttactcacatgaatttaagacttttcatctcattattttttagaatgtcttatgtgactgatttgatgagagctttcgaactggagggcgtaatacctcaaaattcttgggaggaggatgcaattgaaataaatatgcacataaacatgttcgaccctgattggtatggtcagactcttcacgccttaactaaactatcgggactggaagagtatgaagttgttaatttaattaatgagaaattcttcattacagaaactatgtgttatagccagataggatttcctgaggctatcaccataagtgtaaaagaatga

SEQ ID NO: 163493 - DNA, 2289 bp, Enterobacter cloacae
atgatacggagcatcaacaaattacgaggttttggaatatacgaaaaccataacaatattaattgtgacgagttttcaaagttcaatcttatatatggatggaatggctctggtaagtcaacgctgactaagctttttagatgcatcgaaaagaaaaatatcggtagttgtggctatgtttcacctgagtttgagatatcttataatgatggtgagcaagtaaagtctttaactgaggctaatgttaaagataacatgttaaggttgtttacgttcaatgacgattttgtaagggagaatattgattgggataattctgtcagtagtatacttttgattgataaaaataaaatcaatgatcgtaaagaattagagaaattaaaagaagaatacaaaataataaaaatagacttacacaatgaaatggagaataaatcctcattagaaagaagcatgttggattttttgaccaaaacagcgagaaatattaaaacaaatctgcaggtgataaatactcaagatcggcgttatctgaattataatagaacaacactatccgggttgatattaaaggaaggtgtgaggttatataaaaaggaatcgttgctcaatgataaggatttaggtgatttaactagggctgcactaccagttgaaatgccaattataaatacgcacttgtattctttaaatgtcaaaacttttgaggagtctcatgagcaaataactactgtgctccaaaaaaccgtggttagtgaaattatagaatcccttaaagagaattcaactttacaatcttgggtagaaaaaggattatctattcataaagagttagaaagtcttaaatgtgaattttgtggtggtgagttgcatcttgaaaaaatgcaaaaaattgaaagacattttagtgatggattcagggttttcaaagaagagatatctagtgcttttaaatattgttctgaagtgccgctcaccattctaccacctaaagatagtcttttccctgagcttcaagatgaatatttaaatcttattgagctgctaaataattctaaaattgaaattgatgagttaatatctcaatggagaaatactttaaagttaaaagatgagaaccctttcgaactatcactctcaattaatatcatgccatatagtaagataatggagtacaattctttagtagagcaagtgcaagaaatatttaatagacataataataagtcaagaaattttgcggaagaagttgcaaaaacaaaaagcagactggaacttcattatgcggcgcgggaattaattgattttgaatatgataaaaaagagattaataaaaaggaggtggatgacagaataagtgagctatctgcctctaaaatagagcttaagagtaaaattgatactttagaaagttctttatcagacgagtcaatagctgctaaagtttttaatgaggaattgcataagtttttaggtagaagtgaaatttcattatgttttgataagacaaagaaagggtatcgaatacaaagaaatggttctgcttctcatgcgcgtaatcttagtgagggagaaaaaacagcgatagcattcgtttattttgctataaaagttggtgaggatgataatgatattacacagtcagtcattgttattgatgatccggtttcaagctttgattcgaatcacttattccattcctatgcatttttgaaaaaaacctttgaatcatctatgcagttgttcgttcttacacatagtttctcatactttaagttagttcgtgattggattttgaaaaaaaataagaaagacaaagtaagatccagggtttatagtgtcgaaacttattttgatggtgttcggaaatctagagtggttaatgcctcaggtcatcttacaaactacaattctgagtatcattttttatattctcgactaaggcattttaaagataaagcgcatctcgaattggatgaagtttatctttgcgcaaatttatctagaaaattacttgaaacgtttttatcatttaaattccctaagaaacgagataattttagaaccttgcttgatgacagcgttaaaaacgtacaaggtgtaagtatcgatgagatagagaaagtttatagatttatcaataaatattctcataatcaagagattgatatgggtgacaacaccgataatttactaggtgagtctcctttaattttaaaatctttattttcgatgatggagaaaatcgatcccactcactttttagaaatggagtcattgacagcctaa

SEQ ID NO: 163494 - DNA, 1107 bp, Enterobacter cloacae
atgaataagaacaacgagatagaggttttaagggccatagggattatctttgtgataatggctcatttaaatggctttataacatggaaccctggttggttaaaccatttgtattcacacacatacttttggggtggggttgatctgtttttctgtgtttccggttatgtaataaccaaaagcttagtcagcttattcaatgaaaccaacaatatagtttactggaataatgtgtttgcattttgggttagacgtttttaccgattagttccagcagctatgttcttcctcttgataaaggtggttatatcagcctttattcccggaactaaatactttggcaacctcccagctaatgtaattgattttgtgacacaggcatttcatttatcaaactttagatattattattgcgtgaatggcctttctgaatgcggcgctaattcaatatattggtcgttatcattggaggaacagttttatatattattccctatcgcaatttttctcttaagaaagaatgttatctatcttcttgctgcgatgatagctattcagttcccaattgaaaggccgatgttctctcttggatgggttataaggagcgatgccatttcgtggggttgtttgattgcgttactatcaaacactaaatatttcaagttaatgatgccaaaccttatgaacaaaatggcattcagagtcgtagttgtaatcatgatgctttcaggattggctatttttgccaggggaatggtcgttcccttctacatcggcgcaatggcaataccgtgcgcagtacttgtctggctagcatcttataactgtgggcttctgttccgatccgtcagaaataacagaacccttttatggattggctccaggtcttactctatttatttgactcactccatcggatattattctatttatcactatctcatagcatacaatggtgaggtaagtggaaaagacacatttagaatactttttctaggcacattggcaactgtatttttggcagaatttagttacagggttattgaagatccaattagaaaaatcggaaaaaaagttgctaaaggcattactgaaaaaagtttttag

SEQ ID NO: 163495 - DNA, 549 bp, Enterobacter cloacae
atgagcgttgtagttatctattattctggctacggtcatactaaacgcgttgcagaaacagtcgccgagggcgcgcaggctgagctgatcgccattgacagcaatggcgatattcaggaaagcgactggcaaaaactcaacgatgctaaagcgattatttttggcgcgccaacctacatgggaagcgtaccgtggcagtttaagaaattcgctgatgcgacctctaaagcctggttcgtgcgtagctggcaggacaaagtgttcgcgggcttcagcaacagcgccagcctgaacggtgataagcaggtgtcgttacaatacctgcaaacgctggcctctcaacacggtgggatttgggtgagcctggggctaccgccgtcaaatacgcttgccgctacccgtcaggacattaataatctgggcggttctgttggtttactggtgcagtctccttcagatgctgatgctggcgccattgccagcggcgatctgcaaaccgcggtgaaattcggcgagcgtgtagcggctattgcgaaacgttttaactga

SEQ ID NO: 163496 - DNA, 393 bp, Enterobacter cloacae
atgacccctacagcagtattgaaaaaggagatgcctccttacaacgtgttcgatgagcgctgcccgacacgcggcgtgctgacgcgtatcgccgataagtgggcactgttaatccttgcgcgccttgagaatggaccgatgcgctttaatcatcttcaacgcgatattcagcgaatcaccaaaaaggtgctgacccagtctttacgcaagctggaacgagatgggctggtgtcgcgaaagatattcgccacggtacctgtcacagtcgagtacagcctgacaccgcttggccagacgttaactgaaacggtgacggtgctggcgcactgggtggaaaataatattgatgctattgtggcggcacaatccgcttatgacgccgccaacacgtaa

SEQ ID NO: 163497 - DNA, 1011 bp, Enterobacter cloacae
atgaataaatacattacaactctgctttatctccttatattatcactgttatggatatttagccttgaagtaaaagcctcagcgtgcagaatcgacggtgtggaaaaggtgttaaatatcacagacaacattacgctgaaccctgcggataaaggctccgcaggaacggtattatggtctaaaacctataccgcacctaacatcaaatatagctgtgatgaatcaacgcaaacgcagtggcacactgcatacagccgaaattatctctcttcctcgatagataaagtctatgcaaccgaaattccgggcattggtattcggatgaaatggccagccaataccggaaacgcctgggtaccgggtaactccggctctcctgtgacctgtagtccgagctgttcaatcgataacagcacggtgctactggagtttgttcagaccggcaccattaatcagggtgaaaccgagatccctgccggtgaaatggttaacgtaaaagtcaaacctttgctcacgccagaggatgagcttcgtattcttactatcaatttatcagtaccgattaaagtgaatacgcgttcatgctccatttatccctcgtcgacaaacgtcaatttagggacctacagtattgcctcattccagaacacaccaaattaccagggcgataaaaaagacttttctattaccatcacgtgcccggaagcggaacaagttggcttaactatctcttctatgatcgggacaaaattcgcagaatcgagcggtattctgggggtggagaccggcgaaggctacgcccaaaacttcgcgattatggtttacgaaaaatcgagcacgtatgtttcaacgccccttattcttgagaaactcattgttttcccggtttcatcccgagtaacgaaaaactatcaggctcagatttacgttcctacagaagttaatcgcgcaaattcattaagtgctggcagggtggtcggcgcaattcaatacaccatggctatacaataa

SEQ ID NO: 163498 - DNA, 708 bp, Enterobacter cloacae
atgacacgaattactccagcaacttttatcagccagctgattactcattctttcttattagccgcttcaatgctgactatggctcacgctggtggtatcggccttggcgcaacgcgaatcatttatccgcagggtgataagcagatttcattgcctgttacgaatacttccgagaacaatgcctttttagtgcaatcctgggtagcaaatgctgaccagtctaaatctcaggattttattgttactcccccactttttgtgatgcatccaaaaaaagaaaacactgtgcgaataatgtacgctggaccggatctgcctacggacagagaaagcgtcttttttttcaacagtaaagccatcccggcggtcgataaaagcaagttgcagggaaatacgctgcagattgcgacccaaagcgttattaagctttttattcgtcctaaaaagttaccgacgccgtccattgatgcgccaaagacgctgcgttgcgcgctggctaacggcaaactgaccattaaaaacccatcgccttattacgtttctctggttcaactcaaagtcggaagcgcgaaattaacaaacacaatggtttcgcccatgaacagtctggtcattgatctcccggcaggaagcgggagccaggtgagtttccagacggttaatgattttggtgctaccacacctgttcagtcatgccctggagcataa

SEQ ID NO: 163499 - DNA, 2619 bp, Enterobacter cloacae
atgaagtgtcgtaagtatcagacaaggattgtcattcatcgtttggcccctctcacactggccatgctcggtgccttatcatccgttagcgcggatgcaaactattatttcaaccctgccttcctctcaagcgatcctgctgcggttgcggatttatcccgttttagtacttcaggtcaggcgcccggggtttaccgcgtagacgtctggctgaatgacaattttatcgccacgcgcgacatcacctttaatattcgtaaggtgtcaaaacccacagatgatgatacggggctcgcgccctgtttatcgctcaaatcactggatgcaatgggcgttaatgtcgatgcatttccaggcttgaaagacgaaaaagagagccagtgtgcggacttaccttctgccatccctgcggccagcaccctttttgattttgaacggcaacgcctggatatcagcatcccgcaagctgcgctgcgtaataacgcacgtggttatattcctccagaacaatgggatgaagggatcaatgccctgttgctgaattacgactttacgggttcacacagccgtaatagcggcgatcatggttcgacaaccgacaactactttttaggaatgaacagcgggtttaacctgggtccctggcgactgcgagatttttccacatggaactacagtagcagcggttcagagacttacacagactggcagcacattaaaacctacgttgaacgtgccgttatcccactgaagagcaagctcacaataggtgaaaattacacaacgtcggatattttcgatagcctgccgtttcggggagtgcagatcaattcggatgaaaacatgctgccggatagcatgaagggttttgcccccaccattcgcgggatcgcgaaatccaatgcgcaggtgacggttaaacaaaacggttacaccatctatcaaagctatgtcccgccaggcgcatttgcgattaccgatctttaccccacctcatccagcggcgatttgaatgtcgaggtaaaagaatctgacggtacgatcaacagttactccgtaccctattctgcggttccggttttacagcgtgaaggtagcgtaaaatattccgctaccgctgcccgttatcgcagtagcagcgatcagcaagaggacgtgaactttgtccaggggacgctcatctggggtttacccaaagggtttacggtttatggcggttctcagctgacggaaaaatacgccgcctttgccgccggttccggcgtaaacctgggtaactttggtgctgtctcggccgatttcacccatgcccaaagcgaactgagcgacggtagctcacacagcgggcaatcaatacgttttttatatgcaaaatcgctgaacaacgttggaaccaactttcagctgttaggttatcgctactcaacatccggtttttatacgctggatgaaaccacctataagcagatgaaagggtatatcggccaggacgatccgaataacggcaccgaagaccatgagcccgtgtggactgattattacaatctctactacaccaaacgcggtaagttacaggccaatatttcccagcaattgggtcaggccgggtcgattttcctcaacggcagtcagcaaacatactggcataccgatgaaaaaaacacgcttctgcagctaggctatagcggaacggcagcaggcgtgagctataacctgacgtataactacaataaagcgccaggcatgagcaacagcgatcgcatttattcgttaacgctctcattcccgcttaatctctggctccacccgggtggagacgtgaccaaacgtttaaacagcatttataccacttacgtcatgagcgccgatgataatggtagggttaccaacacagcgggcattaacggaacgctgcttgaggataataacctgagctacagcgttcagcagggttatcaaaatcagcatgccggtgccagcggtagcgtcagtacggaatatgatagcgcctacggtaatgcaaacctggggtacaactacagtaataacggcgactaccaacagataaactatggcctcagcggcggtattgtcgcccaccgcaatggcattaccttgagccagccgttgggcgataccaatgtcctgatcgcagcgcctggcgcaagcaacgttaaggttgaagacggacccgggatccacactgactggcgaggctatgccgttgtgccgtacgccagcgcataccaccgtaaccgtatggcgctgaataccaactccctgagcgacgacctggacattgacgaggccgttacccaggttgttcccacccagggtgcccttgtacgcgcgaccttcaaagcccgctccggcaatcgtgccatgatctcattaattcataacggtcaaccggtgccctttggtgccattgtcacgcgcggtgatgaagggggagacacgattgtaggcgagaacggcgaagcttatctgtcagggctaggctcaacaggcaccctgacggcgcaatggggcgacacccgcgataaaaaatgtattgcgatctataagctaactgaaacaaagcagtccctcgtgcgtttaaaagcggagtgccgatag

SEQ ID NO: 163500 - DNA, 1017 bp, Enterobacter cloacae
gtgaaattacgtatttttattttattactgagtcttgtcacgtcagcgaaaagcctggcggtgatctgccataatttttcaaatagcattacgattgtaaattacgatctgtcaacgacgttgaccaaagaagaaaaccagctgggaaaggctgttgaactgattaagtcacaggatgtgggcgtcgaagccatatgcgcacaacatcctgacggggattctcgaacctatcgttcataccgaagcccctttccggttatcttcacagaagatcagtggaaatatatgagcctcgatccaacctatatcgcgggcgcgatgcgcattaccgactctgatattggtgattattatccccctgcggattacatccatatggggaaagactggagggtcgatagagaagatcttaacgaacccttttcagtatatgattccaatctggtgttcagaataaaaattgtcaaaccgtttattggcacggtgattatccccaataaagtgatgttcaatgtttatgttacaacaacgaacaccgacccgctgaatactattgtttatcaaattacgtacaacggcgccgtaaccgtgccgcaaaactgcgtcattaatgcgggacaggtgatcactgttgacctgggaaaactaaacagttcttcattcacgaccgtcggtgagaagccgtataacgcgccggtaaaaacctttaacgttcctgtcgaatgtaatgcggacgtgatatcacccgcgcatctcacgcttcgactggtggcaacggcagacacgcacgttagccaggcgcttgcaaccgataataaagatgttggcgtcgtggtaaccaacgaaaatggcaccgtcatgatccctaacgacacgtccagtgtcgctgattttattactgatgatacgggccatgccgatgtaacgttaaaaacctaccctatcagcaccacaggcaatgctccagcagaaggtgttttcacagctctggcatgtttacgtatcgattttgcgtaa

SEQ ID NO: 163501 - DNA, 543 bp, Enterobacter cloacae
atgaaaatcgtttattttttcccgctggtgatgctgttttcaggaatgccggtcacctatgcggatgatggcgcgtcaattaacctccagatattcggcaccattattggtgagtcctgtgatgttgatgtgaacagtaaagaacaaacggttgatctgggcgactttgacgcatcggaatttccagtacctggaacaacgtcgccagaaaaagcgtttaccatcgacctgaataattgttcacgtgccatccagggaacaaaagtctggttcagcggtacgcccgatagtaataatcccgatctgttagccctgagcgacacgggtaaaggcacggccaccgaaatggcgaccggcgttggcgtggagcttctcaatgccgaactgaatccaatcaagataaataatgtggaatcagcaatctatccgttaaagcaaggcgataatagcctgacgtttaatttacggtataaatctactctgccagcggttacgcctgggaatgcaacggccattatgtattttgatttgctctatcagtag

SEQ ID NO: 163502 - DNA, 531 bp, Enterobacter cloacae
atgaaaaaaaaattaacaatgatattcaccgcgctttttctggtggcattgttttctgaatgtacactggcgcacgacggtacaatttatatcactggcgttatccataaaaagacgtgcactatcgcgcctgactcacagacgctgacggtcccaatggacagcgttcaaagcctctacttcacccaaccgggtatgggggccgattatcacccgtttgccattaatgtggaaaactgtgccggaacagaaggctccgtcagtattacctttgatggtacacccgacacggtaaaccccgatttgctcatgctcatcggcggtgaaggctatgcgacgggcatcggtgtaggtatttacaatcaggacaaatcgctgatttccatcggaagtaaaagccaggacgtcttgattatccctcatcaaagcgacgccattctgcatttttacgcccgctacatagccactgccagtaccgtcaccacggggacggcaaatgcgacgacgacatttattcttaattatgcgtga

SEQ ID NO: 163503 - DNA, 738 bp, Enterobacter cloacae
atgcgacgacgacatttattcttaattatgcgtgaacgtttattcccggcgacgatgctgcttctctttttattctcgatgaccgtgccccaggcaagggctggggtcacgatcggtggaacacgttttgtctatccggaacgagagaaatcaatcagtttttctgtccgtaacccttctgacgcttcttacctgatctacaccaaagtcgagccaggcggcctctgggcaggctctgaaaccccgcccgggttgcaatcggcatttgtcgccacgccacagctgttttcattgcatcctgaacgtgaaaatacggttcgcctgatatttacgggaggcgtcatacctgaagatcgcgaaacgctgtttacgttaagcgtttcggccattccttctgcgaacaagcactccgcaggcgttcagactgcagtgcgttcacgctttaaacttttttatcgccccgccgggctcaccggtaatcctgatgatgcttatcaggctctacgctggtcgcgaagcaaaagtaaggtcgtcgtgtataacccgacgccttattacatcacgctttatcagctcagcctcggggggaagaacatacccgacggcggcgttgtcgccccttttagcaagcgcgagctcgaaggctgtaaagacgccgcgctgtgccaggtacgctggcaaacgattaatgactatggccgcattatgcctgttcgaatgcaaacacttttgccgtag

SEQ ID NO: 163504 - DNA, 627 bp, Enterobacter cloacae
atgaaagtccctaccgtcctttgtcgcctttcagtcccccttgctgcggcacttgttttctccactgcaacgcaggcagagcccgccacgccccagcagatcgagcaaacaggaaaagcggcagaagcctatttcgctgcacatcctgaaaaaataggggaaattgtctcgacctatcttgccgagcatcctgagtttttggttgcggcgggcgaaagccttcgccagcgtcaacagatagcccagcagcaagccatggtgcaaaatgccgtgatccatcgcgatcggttacttgccgccggcgatcccgtcgtcggccccgttgacgcaaaagccgccgtggtggctttcgtggaggaaaactgtgtgaactgcaacatcacacaagagcttatccatgccaatccggatgtgcgttttatctttaaaaaattgccttcagccgggtcggcaaacatagcattacaggaaaacgtgacgctagtgaagcagatcggttttaccaacatgccagcgtttgtcgttttgcctcaggaaaaagatcctgtcattcagcgcattagcgttatgtccggcaatgtttctgctgatgcattaatcatggcgattcagaaagccaaaggatag

SEQ ID NO: 163505 - DNA, 675 bp, Enterobacter cloacae
atgaaaaaagtatggcttgcaactgttctgtctctttgtgtctcttctgcatttgcagctgacccgagcgccgttttgaagttaaaaggtacgttaactaatgcgtcctgtaccccaacgctgagcggcggcggcaccattgactacggcaccgtcaatctgggctcgctgagcgccactgcagttaaccaactgggacaaaaagacttctccctgacgattagctgccaggcgcctatcaaagtgggctttagcgtgaatgatgaccgtagcggcacggcggcgaatgtggtcgttaaaaacggtaccgtagccggtgttgacgtcctccagccggtaaacctgtttggcgtgaataccacggcaggcaacgtgaagattggtaactacagcatgtttgttaaaaccgacagcataacggcggatggtaacgcagtcggggcgacctatagctctgataatggaacgtcctggtctaacgtgggttcgctgatgcagaataacgccagtgaaattgtgactgttgcaaccaccggagaaacggcaccactggcctttactcaggccgttgtaccaatggctatttcgcttgcgattcaggacaccacgacgctggcaattaccgatgataccagcattgatgggcaggcaacttttacgctgaaatatctgtaa

SEQ ID NO: 163506 - DNA, 681 bp, Enterobacter cloacae
gtgaaaaaagttttactcgcaactgcgctttctctgtgtgtgacatcagcatttgctgcagacccttcagcggtactgaaggttaaaggtacgctgaccaatgcagcatgtacacccgttctgagcaacggtggtactgttgactacggtacaattaacctgggcgatctgagtgcgactgcaaccaaccagttgggccagaaaaatatcgacctgaccattaactgcaccgcggcaacaaaagtgtcctggaatatggtagacgaccgcgtggattctaacgcgaacctgacggtaacaaacggtcagtttggtggtggctctcaaggtagcggcactggccaaacttacggtgtgggcaaaaccgaaggtggcgttaacatcggtacttacgctatgtttgttaaagcagacagcgtaacggctgatggtgctgcggcagatccaatctatcagcagaacgcaactggtaactggaccaaaaccaccaatggttctactcagggcagccatattcgtgacttcaccgtcgcgtctacgggtactctggacccgctggctttccagaccgcgaccttcccactggtgacctcactggctgttcagaacaccgcaactctggcgattaccgatgatactcagcttgacggtcagttgaccatcagcctgcgttatctgtaa

SEQ ID NO: 163507 - DNA, 1440 bp, Enterobacter cloacae
atgatgcaacacattacggtcaataacatcctcctattaggtgcggttggggcaatttttgcaattttaattcttcttacatcatccatattatactattttttttcacacaataacgggacgttacagtatttacttaaaaccattataatagggcttataacaatacccgtagctatagttctattgttcgcccttatccattatgttttctggcaaaaaggaatcttatcagcatgtcgatatatttcattttcaagtaaaaaaaataatgaaaatacgattgccgatgctgagtctgcggatgttctagttcatctcgttcatggtacctttgaacctaacgcaccttggacgcaatctaactcagaactgtgcaaagaaatcaataaggtaaaccccgaactggaaatttcccgcttcgtctgggacggtaaaaacactgaaaaatcccggaaaaatgcagcgctgcaattgggtaatcatatcaagaattcgccagccaagcataactacattattgctcatagccatggcgctgctattgtaagagaaatgtcgtatctgtttggagacgttgccagaaaggttgagggagtctgtcttctgtcgcctccttttatttatcgacgtaaaataactcgcacatccggtgcattgatgcatcttattgatataagcggttctctctcaatccaacttatgcttgtcctaattctaaaaccttttggtctgtataatttctattttgcatttctcttttttgcgctcaccgcatttgcagaagtaaaactctctcaaaaatataaaaaggaagttttgagtgaggtcgaagacggcaaactacgagaaggtgtggatttcagaaatgttgagatttatcatgctataggcgatgaggcggactctggattaaggtttgtaagttcactgcacgaaggatgttttgcaatattctcgcaactgaaaaaagcacaaacaagtcaacgcaagttaatacattggtcagcatttataagttacattttgcacattcttgctggtctattagtttgggagttttaccctcaagatacagcatggctgatctcattgttagttagcttcataatagtttttttatctcacattttccaatgcctaagaccctctagagatattccgcatgttttattattagctgcaatgcctgttgccattttatcgttttggctggctttggctaaaggaatagcatatggagacctgcgcttaattttctgccctgaggtatttatcgcatcatcagaaactcctgctggagatcatcaggttcttaagtttgcaccacaaagtgatggggttttaatgcactctacacactcgaacgcagaagctttgcaaaatgtagctcaatggttgtactgtagtgaaaaggagaggaaaaaccgcaacccatag

SEQ ID NO: 163508 - DNA, 1584 bp, Enterobacter cloacae
  misc_feature (381)..(390): n is a, c, g, or t
atggcaataaaagcatgcgcagaaattcatagagaactgtggtacacacagaagctaggagtagcacaggggtatggcccatctccgcgggatcgtgaattgctggttgtacttgctcaaaaactcggcataccaaacgaggaatttattagttccgacgagagtaaaaaaatcacagctcagaagtatctgatagctatgcttgagacaatggaaccactttctcaaatgttccaagatatttggatatattgcgaacgcacattgattagaacttcaaagaacgcacttgatattgaatggaattttaatattaatggagagttgataacaatagattttgaatcattcagaaaatataaaaaactgttaaataatacnnnnnnnnnngataaatttaacaaaatctgcaatgaattttcttctgtttgctgtaaagataatgttagtaaaggttattctagaaatgccccaatgccaccaaaaccaaaaggtgcagacccaacaagtgttgcatcgagaattcatgatatgtgtaagcgtgtcaaagaagaaggtttaattcaagatggatactttggagctacagacgcaatcccttatctgtctgcaatactgaataaaaacctctggcgacaagaagactttgcagaattaagaccattagtaaatgaattttataaccgtatagagcttgaagatattctgtctttaccattctggaaattccgctggcaaatttacgaactgtggtgtttgatagttacccttcaactctttgagtctcgtggatttacactagctcagtcttatgacggcgcttccttgcttgaactggggacaaaagtagtggttgcggaaaaaaattcaaaaccactggggcagattatttaccaacctacatatatcagcacgtcaggaaaaaatgttcatcctgacattgtggttgttcagggacacactgatgcactcacaccgaatattgttcgtgcaatagttgaatgcaaacagcgtaagatgggcaatgaggagtttctattctctcacaagagacatttcgatggtgttgctgaagcttataatgatgccatcggccacaatggtcagttggtgctgttaaattacgatgaggttaaatttaccagaagctatacacttcttgataattttaaaccacaaaatatctcccccctacgagagtcacttacctcaatactgaatgagttttctgcggtagaagaaccgcgtcaaattgtgcttgtggttgatggctcacaaagtatgttacagacatccgttaaatctgaggaatatattaaaggtcttcataaaacactgggcgcattaaacgaggtaatatggctaagagggaatgtcgttcatgtcgaaaaaatagatgattttgactacagatcattctatggctccgaacacttgagtctattcttggatggaatagctaaagcaaatagttgtggatcaaatgttagtgttcatcttattactgatcttgaaccacattctgaaatattgggtgaagtacggaaagtggtccccaagctacatatacattatatgacgtga

SEQ ID NO: 163509 - DNA, 237 bp, Enterobacter cloacae
atgtctaagattaagtttgaactgagacgtggaagcgacgtgatacgtgatggtatgtatctggaattatccatcagcgggacatctccattacggcaagttgctgaagtcttctactctgacattacacatgaattctttctgacctgctacgaagagaagatccctctggaagcagtggaaaaattgatttcggtggcaaaaacatctctcccgccagtgaggtcagaacaataa

SEQ ID NO: 163510 - DNA, 999 bp, Enterobacter cloacae
atgaaaacacgttatctgggaaaagataaatttcaggtgtcagcactggggttgggttgtatggggatgagttttgcctatggtggcgccgaagaatcggaggcgatcaataccattcacgcagcggtggatttgggcgttaccttccttgattccgcggaagtctatggcccctatgataatgaagtcctggtcggaaaagcgattaaaggcattcgcgaaaaggtacagattgcgactaaatttggttttcgtatcctgccctccgggcaagggctggagcgtatggcaggtgttgacagccgccctgaacatattcgtgaagcggtagacggttcacttaaacgtctcaatatcgagactatcgatctgctttatcagcaccgtgccgacccgtctgtgcctgttgaagacgttgtgggaaccatggctgatttaatcaaggaaggaaaaattcgccatatcgggctttcagaagtgtctgccgacacgttacgccgggcctgccaagtttatccgattaccgccgtgcaaacggaatattcgctttggactcgcgagccggaggaaagcatgcttaacgtttgccgcgaactagacgttgggtttgtaccctatagtccgttgggtcgcggatttttaaccggaaaaatcacagacagctccggctttggcgaggatgattttcggcgaaacctgcctcgcttccagaaggcagcgatgcagaaaaaccaacagttgcttgcccaactgcaggatgtcgcggataaataccgctgttccctcgcacagctggctctcgcatgggtgatgagtaaaggagatgacattgttcccataccgggggctcgaaaaatagcgcatttacaggataatgcaggtgcggtcagtctgaatctttcaggttcggatattaagtttattgaccatatctttaggcctgacaatatccaggggcaaagatataaccagagtgattttaatttaatcgaaaaataa

SEQ ID NO: 163511 - DNA, 909 bp, Enterobacter cloacae
atgaaaaatgcaccagaactgcaacatatagaaatattacttcttattttaaaacatgggagttttcgtcaagccgcaagagaattaaatgtttcagcgccaacgttaactgtcgccataaataatcttgaagaaaaacttggggttaggcttttaaatcgctccacccgaagcttgtctttgactgccatcggtaaagcatttcttgatgacgtgacgcccgtcctgaatgactacagacgcgtcattgataatcttaatgactacaaagaaaaacctgaaggtgtcatcaaagtcaacttaccccggatcgtgcttgatctcttttttcaaagccacttcgtgaagttcaaaaatgattacccgggtattaaattagcgttgttcaccactgacagaaaaatcaatattatcgactcaggtttcgatgccggaatacgttatacacaagatgttcctaaagagatggtcgccattccctttggtggcaagatgtctcttattcccgttgccagccctgattttctgaagaaatcaggtcagcctgactcaccaaacgatctggtcaatttcaggtgtataaatcgctgttttcctgatggaaagctgtatcgctgggagtttatggatccacaaggggaaacgatggaggtatctgtaaatggcgatctggttgtcgattcagacgcggcaatgatccaggctgctgaatatggtttagggattgcgtttgtttatgagaatttggttgaggataaaattagcgaaaacaaacttgtccgtttgctacctgattatacctatcccgctgataatttttgtgtttactacccgagtcgtaaacatctgccagcaccgctgagaaccttcatagcgtgggtgatgtcgatgaataaagacgtgcgttga

SEQ ID NO: 163512 - DNA, 1098 bp, Enterobacter cloacae
atgaaaaagaataatgacatagaagttttaagggctgtcggtatactttatgtaattatatcccactttccagtgtttatgccctggaatccctcatggcatggatggctatttaatcacacttacttctggagtggtgttgatttattctttgcagtctctggttttgtaataatgaagagtatttatccgtgggtatttagttcagaaaaagatgcttacatatcagcgacaattactttctggataaagcgattttacaggcttattcctgcatcctggacctttcttttattgacatatctcgcatctatttttttcaactcaatgggtacacttggcgtaccatctaataatcttgccgatgcgataggtcaattcttttatctttctaattggcgatcatattattgcactgctggtcaggcagcatgtgggctcaataatcattattggtcattatcattagaagagcaattctattttattttaccaattgccatccttattttaaggaaaaacgttgtttggttttttgcggcgttgataataattcaattcccgacgtcacgcattccaggggaatggttatggcttaatagagtagattcaatgatgtgggggtgcttaatcgctatggcaaccgaaactaagttttatcaaaagattaaacctacatcattaaaatcaatgccttacaaggtgctaattgcgtctgtgcttctctattctttggcattttttgccagaggtgaaatcgtaagtttcaatatgggtgtagttgcgctggtttctgcaagcatggtatggatttcatcttatgatgaaggtctattgtttggtaagtatatttctaataataaaattgttttgtggattgcctcaagatcttacagtatctatctcagtcatccattggcttatgttttgatgatggagtattgcaaacaaacacgtggacagttgaataacgatgccatgttcacgattatgtttttcggcactttactgaccatagcactttccgagctctcatttagatttattgagtccccattaagaaaacgaggcgctcagatagttcagccagcaagatag

SEQ ID NO: 163513 - DNA, 1227 bp, Enterobacter cloacae
atgttatgtagcattacgaaaatagatattccaattcaatactcttccaaaagagcctgtatagaacttgacggcaagagcttaatcatcactggaaataatggtagtggtaaaaccagttttataaatcaagtatataatcatttacttcaaaacattaacaataaaaacgaaaatgatattgaatatgtcaaaagacaattaaaatcagcaatagaaactttaaatagaattggaagagatgatggaggttattcccactacaccactcaaaaaataaaatatgaaaaaagactaaacgaactattaacattcaatattgaaacaacttccaatgaaataactgagattcgttcattattacgatttcacaatgcaacaaggcagtcgaatattcaatcacctgttgatgcgcctaagtactcaacccttatgcagaaccatcagcattttggcaacaacgttgatggaagtagcattttcgaaagttatttattgagcttaaaaaaaaatcaaagttacgctatttcattcgatgaggataaagaaaaagctacaaacattgcgttgtggtttgaaaaaatccaaagtgatttacgttcattatttgaagatcctgacttaattttaaaatttgacactgccgatgagaaattttatcttcttcaaaaagaaaaggaaaaatatacttttcaaactctttcatcaggctactcttccatactgagcatttatacagatctcgtgatgcgtgtagagatgtggggtgttacgccagataatattcaaggaatcattttcattgatgagatagatgcacatctacatgtatcattacaaaagcaaattcttcgtttctttataaaagccttccctaaagtacaatttattgtaactacccactcgccatttgttgtaacctcagtaacagacgctgttatatacgatctcagttcaaatgaacagattacagatgtgtcttcctactcatatggcatagttatggaagaattatttggagttgcaacagaatctcacgcattaactgataagcttctaaatatagaaaaacttataactgatataaataacgataacattcaagaaatagataaagaaattagctcgctagctgtggatcaaagcaacatgagcgaagatgcccaagctttccttgatcgagcaaaattagaattattgaaaagcaaaaaaagaatacaagggtaa

SEQ ID NO: 163514 - DNA, 213 bp, Enterobacter cloacae
atgaacaacgccgaacaacagttcctgaacgagctggataacaaactctggaaggccgccgacaagctacgcgccaatatgaatgccggcaactacaagcatatggtgcaggggcttatcttcctgaagtatgtgcccgctgcctctgaggcccgtctgcagaggggtcattactctgttccgctatgttggcaacccggacaacatctatga

SEQ ID NO: 163515 - DNA, 702 bp, Enterobacter cloacae
atgtgtaacgaacatatccctctttcagccgttctttttgatatggacggcgtgttaattgattcaaaccccgtcatagaacgagcatggacagaagctgcagccatgtatggaatagatatttccaatgaagatattgtgcagcatattcatggccagccaggtcatcatactatccgcgcgctatttggtcatcttcccctccatgaacaaaataacgttcagaaccatgttatctacgttgaaaatacggctgagtatgcgcccattcctggcgtggcgaaactgattgcttccctgcatagcgcaggagtgacggtggggattgtgacgagtgggtggaaggagaaaatagagcgtgtcgcggccatgcttgatatttcacagtctgtgtcggttattgttgaacgcgatgatgttgaacgaggtaaacccttcccggatccctacttagtcgcagcccggcgtctgaatatacccgccaggaatgccctggttttcgaagactccgttagcggagtgacatcagccgtcgccgccggggcgtattgtgtcggtctcggtgcagcagaactgcttaagcacggcgccagactgacacttcaggactttaccggggttgctattgcagcgacagaagcggggaaagtggtgatgactattgactcgcaaacgcagctggagctgaaaccctgccgataa

SEQ ID NO: 163516 - DNA, 783 bp, Enterobacter cloacae
atgaaggggaccctctttatccgcggcagaaagggcgcgacgctcacagcgtttggtcatcatctgttgtcgaatgcaaacgccattttgtctgcccatgacgaactgttgaagcaggctaaaatatttcaaaaaacatgttacaaaacgctcagggtgggattgggtatttcttcttttcatcatgtaccgatatggataaaccattttcgacgaatagttaccgattgtgaggtggtaataaaagaaatggcctcgagtcttcagtgccacatgctgacggagggagagctggatataggcttcatcaggatgccggtggcaggggcgctgacgggaagagcgttgtttgaggagaaacttgttctggctgttccgggggataaaagaatagacaccatgaatatgactgacgtcttatcgtccttgccattattacaattatccccggatgttatgccctgtctggctgaacaaactgcactctggcaaaaaaatacgaaaacaaccgcgcttcctggacccatggctgacgatattcctaccttgctggcattagtggcgggcggcaatgggactgccttagtgcccgggagtgtcagacattttttaccgccaggcgtgaggcttatcacgctggagacagatcctgtcggctgggatattggtatcgcctggaatccaaaaatagcccatccgcagcgggatgaatttttacgtctggttgaagaaacttcgacatttgacccacgacaaggcggtttgatgcacagtcttccataa

SEQ ID NO: 163517 - DNA, 558 bp, Enterobacter cloacae
gtgaaaatagttaacgtgatgctgagcggtctgacattatttttcgcctctcaggtattcagcgaggagtgccagatgaccctttctcagccgaccgtctcgtttggccgattcaaacaggacgatattgctgcctctctgaaaaactggaatcgcatgcccgcaaaagaggtgatgatcaacgtgttttgccctcagcctcaggtcatggccctgttcatgcagtccgcgtctggcgccaacggcggcgtgctgtttgggcaggagggacggctggcgctggtcgcgaacaacatgacggtagacggacgccgctacgatctcgtcaaaaccaccgaccgggtaaaatttacctcatcagacagccccaaagaacatgttttcctgaaaaacaacgacggcatcattgctcgccaaaacgcgacaccggttcagggcaagcaaatgagcgtaaccataaaacttatacccatcattaataataaccagctgcgcagaatttccgataataccgacctggaaagcaccctcgcctgggaattattaacaagcgagtaa

SEQ ID NO: 163518 - DNA, 2367 bp, Enterobacter cloacae
gtggcagtattactgccgtcttccgcgctgcatgcgtccgatgtggactttaatacggatattctggcgacacgtggcatcagtaccaacctcgcccactatttctctgaagctcaacgctatctgcctggcaagcatgccgtgcaggtaaaaataaacggcattgaaaagggcagtctcgccgtcaagataggggacgaagggcagctctgtgttgatgatgatttcatcagcgccgtggggcttttaccgctaaatatcagcgaaaaagagacgtgtcatgacctgctcaaagactacccttcagccacgatcaagctcatgcccaacaccgaatcactggagatattcgttccggcagaagccatggataacgggttctatgccgccaggttttactctcacggcggcgttgcgggcctcattaactacaacgctttcaccaactacaacgaatatggcagcggtggcaacagcacgttttcacagggaaatatcggtaccggtattaacattgcaaactggacgctgcgcagtaactacatcctgacggacgataacggcacccgcagcgccgagaatctttacacctacgctgagcacgtttttgaagagaaaaaaatgcgtgcgcaggtcggtcaaatcaatatcaactccgccctgtttagcggcgcgcaaattaccggggtccagctcatgcctgaaaccggtcttcagcccaatattcaggtcacggaagtctccggtattgcccgtacaaaccaggctcgcgtagaagttcgtcagtccggtcaggttatctattcttcgctgatcaatgccggtcccttcacgctgccggacgtaccggttttgcgcagcaatgtcgacctggatgtcagcgtcatcgaaaccgatggctcaacaacccatttcaccgtgccctcatcagccctcaacgtcatcgggagcaaccgtgccgaggggttaaatctggcacttggtcaggttcgcgacagtggcgatgaaaagaattccccctgggtgttcaccgtgtctgacggtacgagcctgactacacgcctgactgccgttgcggcaagcgtgctggccgagaaataccagtctaccggtgcaaagctcgactggtccgtcaatgaaaactggctcatttcacccagcgtattgctgagtcagtcccgcttttatgatacgcagcggggcagcaagtttgagctcagcagcaatattttactccccgcgcagctgacgctcgggctcagtgcttcccagtataacggcgactttcgtgagctcaccgaagccatggacgaagaatcgcaaagctatgaaaacgcatggaataccagcctcagctggaacaacgaatacatcggctccctctctttacaatacagcgcgaactctggcgatgagagcagcggtgactcacgctatctgatggcctcgtggagcaaaagcctggggcgtacttcgctgtccataaactggcaacacgccatgagcaatagcgaaacagaaaacagcaccagcaacaatgacgatctcttctatgtcagcctgatcgtccctctgggcgacgatcgcgtcagtacctacatgcgtactcagggtgaaaagcaaaactatggcgtccaggacagcggttctgtcggccgaaaccttaactacaacatttctgccgatcgcgataatcaggacaaaagtgattcctttaacggcaatatcacgaccaacctgcactatacccaacttgggctgtctgctggtctgaatgacggaaaccagcataactacagcgcatcgttagggggtggcattgtcatgcaccgccatggcctcacctttgcccccttcccggtgaaagagacctttggcatcgcaaggctaagtgagccggaaagcggaatagaaatcaccacacccgatggcaccgtctggacagattactgggggcaagccgtcgttcccgggctcagagagtggcagaaatcacaaattgtgatcaataccagctcgctgccgcaggggatggatttatcaaatggtatccagaccgtgtccgcggcctacggctcatttgcccaggtcgatttccaggtgctgaatacccgtcgcgtgatgctgaaggtaaaacatgtcaatggcggctggctcgaaaaagggctaagtatcgtggacaaagacagcaactatattgtcagcgtgatggataacggcagcgtgtttatttctgatgcctcgacgacgccggagctgtatgtcgtggacgacaatatgacgcgtttatgccagatccactacacgctgaatgaagagaaagataaagacgcctattacgaaaaagcagaaggaacatgccagtga

SEQ ID NO: 163519 - DNA, 690 bp, Enterobacter cloacae
atgaaaacttcatccctgttttccgtccttttattcgcgcttcccaccacgctgttcgccgcaggcatggtacctgaaaccacgctgctgatgatcgatgaagccaaccacggcggcgtaatgagcgtcaaaaataccgacaccataccgactctgctctacacctctattaacgatatcgaaggggaaaatggcgtaaagctcaacgtcacccagccggttgttcgtctggaaccaggccaggaacagcaggtgcgttttattcttgaaaccgataaacctctcacggtcgaacactataagcgcgtgatcttcgaaggcattccgccgaagagcaaagataaaaacgtgaaggtggggattaaccttcgccaggatctgccggtactgatccatccgaaaagtctgcctgtcgtcaccgatgcgtggaagttactgacctggtcgctggaaggaaaagaggttgtggtgcgcaatacctccccttacgtcgtgcgcttctcaaccgccattaccctacttccatcgcgagcaaccgggctggtcaacaagacctttatcctgccgggtgaaaccatgaaagtgcagatggacaagccgatgggtagcaccgataacgcagtagagttcagccccgcgagccgctacgggattgaagtggataactacacagccccccttaaacgctaa

SEQ ID NO: 163520 - DNA, 717 bp, Enterobacter cloacae
atgaaaaagctccttctcgctaccgttttatcaatggcagcgactgcggtctatgctgaaccgactgcaatgctgaaagttcagggaacgctgaccagcgctggttgcgtgcctgaaatcagcaacggcggtctggcagatttcggcgaagtgggtctggattcgctttcctcctccgcggcctaccaggctggccataaagatgtgacattcaccatcaaatgccagtcggctacccgcgtaggctggacgatcaaagatgaccgtgcagattcaaatgccggtaagaataaaacatcaagcgagttccacgtggataacggcacggcgaacggtgctcaggcatccggtaactaccagttgaacggcgtgggtaaaaccagcgcaggggaaaacatcggtgcctattccgttgcgacctatctgacttccgtcaccgcagacggcgcaacggctcagcctattgccgcgtctatgtacaccggcggcgccatcagcagcagaagctgggtcaacatgtggaccagcggcatcatcatgaacgacggtaccgacgtgatgaccgttgccaaaacgggtgagcgtgcgccaatggccttcaccactgcagctttcccactgaaaatcgccctggctatcgcgccaagcaaagatctgaccctgaccgacaaaaccgatctcgacggccagtccactattacgctggtttatctgtaa

SEQ ID NO: 163521 - DNA, 669 bp, Enterobacter cloacae
ttggctgtaatactgatggcttcaggctgtcaggccaatgagccgccgacgcaggtggtttaccgctttgatgaccatcgttatctggaactgaaaggctgggactgtgaaggcgagctctggtacaccgatacgcagcgggggattcattcgcagccgtattcacaattttatcgcatttttaccaaaaaatttattcacccttcagagcgatatattgtcctcacatcatggggtggtggtgcctttaccgtatcaaaagatttcggaaagacctggcagttagcgcagttttctcccggagaaaacgagccgaatggtgattcctcaccagcttatgatgaggtgctatctctgacggtaataaacgatcaaggctttctgcagacaaagcgcagcctttatatgtcatccagaccgtttgatgacccccgactattgcccggtggtaagggtattcattacgaacttcaggatggggtccagggcgatattaaagcaggaacggggggctgggcatggggaatggtttatatgacgaagcaaggcctcaaggacaccgtacagtcattgcagactaattgggaagaccaacccgataaggtccctgaagtaaaagactacaccggctgggaccatatgcaatgtgacatggatgcggggcgctaa

SEQ ID NO: 163522 - DNA, 132 bp, Enterobacter cloacae
atgcttgttatattgcagagcaaaaccgcactacagtcattaacgctgctgctgaaaaacaggctttggagaatgctgctcaacttgcacaatcagcacataagcatcttcctgaaggctgcactcaggtga

SEQ ID NO: 163523 - DNA, 2181 bp, Enterobacter cloacae
atgtcgtcttctcaatcagacaaatatcgtgctgcgacgccgcagaataacgaaatggatcttattcagctgcttgctgagatgttcgatcaccgggtaacgatcgcgtgtgtgacacttctgtttacggtatgtgcggggatctacgcattcagcgccacgccagtttatcaggctgatgccctggtgcaggtcgaagcgaagcagggcaacgcgctgctcaagaacctgacgtcgttcaggcccgatcgttcacccgatgtcgccccagaacttttactcctcaagtcacggatggtcctcggcgagaccgttgatcaattagggctgacctacgaggttagccagcgcatgttccccgttatcggggcgctttggcagcacgtgcagggccgcaaaccggcggaaatcacgattggctcgctgaatattccccttgtggaaggtgagccacaaacgcttttactcaccgttcatgagcaggggcgatatcatcttgaggggaaaacgcttgaggcagagggcgttgtcgggaaagcgctggttaaagagggcgtatcgcttctggtgacatccctcagtgcggtaccgggaacgcaatttaccctcaacaccgtgaccaggcttgacgcgatcaacgcccttcagagcagacttacgattgccgagtcggcgaaacagagcggtatgatcgccttaacgctaacgggcgacgatcccgacaagaccgccacgatacttaattcgattgctgaacattttctcagccagaacattgcgcgccaggaggctaaagattcccgcagcctcgcattcttacaggatcagttacctacaatcagtctcgaactgaatgaagccgaggcacgactgaatgcttaccgagagcagcgcgattcggtcgatttatctcttgaggcaaaatcggtgcttgatcaggtggttaacgtggaaaatcagcttaacgagcttatatttcgcgaggcagaagtctctcagctgttcaaaaaagatcatccgacctaccgtgctttacgggagaagaaacaaacccttgaacgggagcgcgcacgtctgaatagccgcgtgtcatccatgccttccacgcagcaggaaatattacgtctgagtcgtgacgttgaatccgggcgtaccgtatacatgcagttgctgacgcgtcaacaagagctgagcatctcgcgctccagcgcgatcgggaacgtgcggatcattgacccggccatgactcagcctgctccggttgaaccgcgcaaagcactcattatcgtgtttggtatgctgatggggttgatactttctgccggaacggttttagtgcgttcagcctttaagcggggcattacgtcgtcagaacaactggatgagctcggaatgccgctgctggtgacgcttccgcgctcggcatggttatggaaaaaaacgcacctgcgcaggagaaacctgtttacttcccactggaagcacaagatagccaacgtgccttttctgcccatcgatcgtccggctgattcgtttgtcgaggcgatacgcgggctgcgcaccagtttgcactttaccatgatggatgccacaaaccggattgtcgtggtgtctggccccacgcaggactgcggaaagacgctagtcagttcttcgctggcgtcgattctggcgcaggccggacagcgggtgctgtttattgatgcggatatgcgcaagggctatgtccacaacgtgttcaggctgaataatcagcaggggttgtccagcgtgctcgacggaacggtcgagtggcaggaagcggttcaacgcttcgaaaaaggaggttttgatgtactgacctgcggacctcaacctgcccatcccgtcgatctgctcatgagtgaaagccttcaggggataatgtcgcagattgaaaagcgatatgacatggtgattatcgacactccgcctgtgcttgccgtcacggatgctttgctgatagccagagccgccgccaccacgctgctggtcgcccgctttggtaaaaccagcgttaaagagatcgagaccagccttaagcgtatggaacggatgggcgtgcaggtgagtggcacgatcctcaatgacatagtgaaatctgccgcgctctattacaactcggggtacagctattacgattacggctatagcccggagtaa

SEQ ID NO: 163524 - DNA, 492 bp, Enterobacter cloacae
atgctggctaactatttaatgctccctcaactagaatccatatgttgggaggatatgaggaaaattactcttccttacgagctaaacgaagttgttgagcagggttttgtggagttatttagttgttttttatcaaaaaaactcttcggttattgtgggggggttaaacctgattcttttgaagatgaaatagccttggagtgttttgtaaattctatccatatagaagattacgtaagtgaaaattaccttcaacattctattgtcttttgtaattcaatgattaaggaatggaatgaaagccattctggggttctaaatgttattatatcgttggatgatgaaacattactgccaacaataaaattccatttaaaaagaaaagacgcttcatggctagatgaagataatcttgactcaagtattcaggctgtcttagtgactacagatgaaattaataaggatagattatcaagtctactgattaagtaa

SEQ ID NO: 163525 - DNA, 519 bp, Enterobacter cloacae
atgttcgaacaactgactggtattctgacgcacacccccatctgggtctgggtgctgtttgtgtttctggtttctcgtgggctccgggcccgccggcccgccacggtcacgctggaaaaactggcgataattccggccatttttctgctatgggatatttacgatctggtgatgtaccgctccctcagcgtcgcgacgctgtcgatgtggcttgcgggcattctggctggcgctgcgctgggttacgcattgattcgcccgacggcggtgactcgtgccgccgcgccgcgcaccctttgccgccaggctgactacaccgcgctgccgtttatgatgctggcgttcgcggtgaaatacgtgctgggggtaatgagcgccatcgcgccgcagacgctgcagcagcccgccatcagcgcccttgcgattgtctccggcgggctgtttgccggggtgtttatcggcaagtttacgcggtatgttgaggtgtttagccgtaccgcgccgcgcccggcggagtga

SEQ ID NO: 163526 - DNA, 1035 bp, Enterobacter cloacae
atgcaatttcagggacgacatatgctgtacgccgcggtgattttttgcttcggcctgttttcttccaccgttatggcgctgacctgtaaagcccagggctcggtgagccagtacgttgccattaacagcatcatcaaagcgtcaatcggcgacttcggcaccaacaccaaaatatgggtatcgtcaccgatcacggcgacgtttacttgctctgacacggacgcctatccaaacggcgagagcgcctatttatggctcgatccgaaggatgcggtgaaaaacgtgcacaactctctggaaattggcatcaccttcaggaacgttgattacaagctgaagaaaggcgataaaatagaaattggtccaggtaccgtgtgccgccctaacggcaacaaaggctgtctctccccggcggccccgcagacgttcacgctcacctatcaggtttacatcaaaaccaccggccttccggcggccaccaatggcaaagtgatgggggatgtcagcctgtcgctcttccaggtagatggcgtcggcggtctgcgaggcggcacggtgactcaggacggtaactttaacctgaccattaccgggctggataaaatcacctttctggcctgcacgccaaaagtgctgctggtacccgataccctcgactttggcgtcatcaacggcagctgggcgacgcccggtaagattgaaaaaacaaaaccctttacgctacaggtcgatttgacgcgtgaagccagcggtaaaacctgcacgggggagacgttgctgatgacattaagctcgacgaatacggtcaaagacggggcaatcatcatgcccgcggcagacagcggctttgggtttatcatttccgccagcagcctgatggagccgcgcattgcgctgaacacgccgcaggagataggaacgatcggcggagaccggctcacgcaagattattacgcagggtttatatggacgaccacgacgccgaagcttggggattacagtgcgacagccacctttaccgtgacgttcaagtaa

SEQ ID NO: 163527 - DNA, 2529 bp, Enterobacter cloacae
atgcaacgaacatggatccccctgtgcgcgctcacctctttactggtttccggcagcgaatgtctggcgcaaagtgaatataacaccgcattttttcatggagcgggcgagcaatcgttcattaatttgatcgaccctgattccggcattattcccggaacctattccctcgatgtttacgttaaccgaaagctcgttgaacagcgtgacgttgagatcgtccgcgataagcccgacagcgcgctgtacccgtgcattagcgccgatcggcttcgcgcgtggtcagtcgatcttcccgctgacgatgacgagtcgtgctatcccctcgagcgccggattgcgggtgcgtccatgaacgttacgatgaccgagcaccggctggatattcaggttccccagctcaatatgctgacacaaccgcgtggaacggtacccgccacgcgttacgacgagggcatcaatgccgcttttgtgaattacaacctggcggcgaacaccatcagaagctacgggcaaaacagccagtacgcctacctttacctgaataacggtatcaatataggggcgtggcgcttgcgccagatggcgaacctgacaaagcgggatggggacacgggccactggaaaaacgtctcgtcgtgggctgaaagggcgcttccgtcactcaggagtcgtctgctgctgggacaagggagtaccggaacaaccctctacgacagtattccgtttcgcggggtgcagctggcctcggagcccatgatgcgtgcagacagccagtcgcgctatgcccctgtcgtcagaggcgtcgcggaaagcaatgcccgcgtggaggttcgacagaataagtatctgatctactccaccaacgtgccgccgggaccgttcgcgtttgatgacattgtgccggtcagtcagagcggggatctgtttgtcaccatcattgaaaccgacggacggaaaaccaatctggtgatcccctataccgtgctcccgggactggttcgcaaggggcagtggaactatgaaatcacggccgcaaaatatcatgacggtgccgacggctatgcccctgcgtttgttgaaagccagctcgccagagggatgagcgatacggtgaccctgtcgggcggcctgctttcggcggaacactaccgcagcgcggcgatgggcatgggcaaaaacatggggcattttggcgcggtgtccgtcgatctggcgttatccgacacgcggcttgcgcggggcgacgatgagcaaggggggagcgctcgcttcctgtacgcgaaatcctttctcgattcccgcaccgatttccaggtggcgggctatcgttactcctcgtccggttattacgatttccaggagtcggttcaggaacgtcgccgctgggataatggccgatataaaacctattactgggatgacgccgatcaggataaccctgactgggtcgcgtcaaagcctgaaatccaatacgacagccgctacgcaaccaaaaaagcgcggctggatatctcaatgagccagcagataggtgagatcagccagctttatctcaccttcagcaagcaaagctactggcaggatgccggttctgataccacggttcagtctggctttacctcacggctgggcaatgtgacctggagtctgtactaccagaatacgcgcaaccactacattgcacatgacagcagcattaacctgcgcctgtccctgccgctcagctttggcagccacccggcgacggcgacgacagaccttcacgccgatcgtgccggaaatgtgtcctcctccgcggggctgagtggctccctgcttgaggataaccgccttagctacgccatgcaggtgcagcaaaacgatgctgaggggacggcgggcgatctgagcatgggctacaaggggggcgccggaaatctgtggctgggctattccagagcggaagatgtgcagcaaagcagcatgaacctcagcggcggcattcttgctcacgctggcggcgtgacgctgtcccagccaccgggcagtacctttaccctgattgaggctcaggatgcgcaaggggtgagggtagagaatcaggccggagtgcggatcgacgctgcgggctatgccgttgccccgcatgcgattccttatcgcaacaatacctggtcgttaaacacccaggacttcccggaggggctggacgtgcctgttgccacccagaataacgtccctacccgcggcgcgattacgcgcgtgacgtttgaaacatatcggggcgacagcgtgctgattcacagcaaacgacccgacaacagcgtgccgccggttggcgcgcaggcctacagccggggcgagcgtaacaacggcattgtcgggcctgacggggatatttttgtttcaggcgtgctgccgggcgaagcgatcgccattcgctggggggagggggatgacgaacagtgtcgcatccagcttccggatgaggaacggcgtgaacaggataccgcgggctatcgcgagatcagcgcaatttgtcgataa

SEQ ID NO: 163528 - DNA, 660 bp, Enterobacter cloacae
atgaagtcacttattattgcgctattcgcgctgtactccgcatcggctatttcagctattcagattgaaagttcacgggtgatttattccggtgagaataaatcggcctcgttaacgctgcataacgcgtcgcaaaaaaattatattatccagacctggctggacgaagattcagacaagcccggaaaagagatggtggtgacgccgcctattatgaaggtgaaacccgatcaatccgccgtgttacgttttatctattccggtaaaggattaccgaccgacagagaaagcgtttactggattaacgttcaggaaataccgccccgggccagcgagcctaatgtgatgcagctggcgattcgaacgcgccttaagcttttttatcgcccggttgggatgaaggcaaaacttgacgagcagataggtcagttaacgctgacgaaaagcagtgaggcattggtcgtcagcaatcccgggcctctgcatattagcctgagtcagttaatgattaaaaccccgcagggaaaagaacaaaaaataacggccccgatgatcgctccctttggcagcgaaacgattccttttcccaaaggctcgcgggtggttggcttaacgtacattaacgattacggcggcgttgccgacgtgaaaatgcactaa

SEQ ID NO: 163529 - DNA, 546 bp, Enterobacter cloacae
atgaaattgaaatctctttgcgcggcgatggttgccctggggctttttacctcttttgcccatgcggcagacggtaagttaaaatttgtagggcaaattggctcatcatcctgcaagctctccggggaaagcactgccgaaattacggttccgatgggaactattccgatggaaaccttaaaacaagatgctaatggtccggaggtgggctttgccattaacctgacgggctgtcagccgggcacctattatctggttcttgacggcgtcagcccgtccggtcagccgaacgtgctggacctggataacgcgaccgccagcaccacggcaaaaggggtggggattcagattaaagatatctccgaccagaacattaccttatccaaaacccttgataaatccgatgccagcatcactattgctgaaggcgatacctcgggcagcgggacgttcttcctgaaagcgaactattacgcctataacaaagatgcggtcaccaccggggaagcaaacgcaacggccaccttcaccattgttcaacaataa

SEQ ID NO: 163530 - DNA, 621 bp, Enterobacter cloacae
atgattatttgtgtatctgataatgtctggttcagaattgggttgagtgaaatcatacaaaattgccagagagataagcaggaactgaagtttttagcatttgaaaaagccagcgtaacgctgagcacgatggtaatgagatcaccggtcacgataatcattgactattatattgctgaccacggtttactgttgttactgttaaagatgaagcgccagaatgtttttgacaatatacttattattacgactaatgcgcgaattgtggaagtgactgaaaatattttgctggactcggttgcggatatcttaattgataacagcgaatcatttgataaactcagcacttttatggtcaaagataaggctggccagattatttcaaaatccgtgaccaataaaacctgggcgatgattaagaaaaattcaaatctcacccaccgggaattagacctgatgccattttttattacagggaaaggtaataaagagatctcccggcaggtcgatattagtgagaaaatggtcagtattcaccggcgtaacatttattccaaactccaggttgagagtcttaccgggctttatcattatctgacaacggatataaaggttacataa

SEQ ID NO: 163531 - DNA, 1182 bp, Enterobacter cloacae
atgaaagcgcttatcgggttgaccctgcttcttttttgctttgctgcctcctcatccgatcaaatcaccttctgggatacccctcagcacggtggaaacagctttaaccgcctgccgcccacacaggaatactatgatgcgctgcgtggctatggcgcgacgtgggttcgcctctcttatgataaatggaaacctgccgggagagattttcttctcggcaacgccgacggttaccgtgggctcgaggccgcagacctcgcgacgctcaaagcctccatcaggaaagcccacgcggccgggctacaggtcgttattgccccactctctttacccggcatgcgctgggcgcaaaataacaataaccagtttgatgaccgcatctggcaggataaaaaatactggcaggaagccgctcagttctggcgtgatttggcccaggccctgaaggacgaaccgggcattgcggcctggaacctggtcaatgaacccgcgcctgaaaaaagaggcaacattagcgagcaggcgtcgccagaggcgttaaaaacctggtatcagcagcagcaaagcacggcgcgtaaccttcccgctctctacaatcagattattgccgccatccgcgaggtcgatgccaccacaccgattatggtcgatggaggctggtacgcctccgcacgtggtttttctggctggccgtccgcgcttgaggataagcgggtgctctacagcttccacatgtacgagccctatgatttcaccagcgcgccaaatgcacgccgcaaagtgccgttcgactatcccggcatggtcacgttcggcggtaaaaaggtgaaatgggacgctacggccatagagaaatggatgaacgcaccctttgactgggcgaaacagcacggtattccggccaaccgggttgtcgcgggagagtttggctgcgttcgcactctgcagggctgcaggcagtggcttaatgatgtcctgaccgtcctcgacaaacatcatgcacactgggcattttatgcgtttcgtgaagatgcctgggacgccatggactatgagctggggaaaaaaccggtgccgtgggcctactggaaagccattgaggataacgcacctgatacgctcaagcgccattctaccgaggaatttgaaccgattgctacgcggctaaaacaaggcctttga

SEQ ID NO: 163532 - DNA, 297 bp, Enterobacter cloacae
atgagtgtaggtgaattgtacttggatggagcgcacgtcctatctgaaaaagagtttcattccattatgtctgcatcattagactttgggccttactatggtagaaatctcgatgcattgtgggatcgccttagcaccgatgttgaaaggccggtaaaaataatatggttaaactctgacttatccagaatatatcttggcagttatttcgacgaaattatcaaggtttttgagagggcaaaactgcaagacctgaattcaaattgggaagaaaagttcgagtatgtattgaaataa

SEQ ID NO: 163533 - DNA, 999 bp, Enterobacter cloacae
atgaaaaaccgcataatgattgtcggcggcggcacgggaggaaccattgttgccaacctgctggccaggaaattacgacgtgaaattgctgccggtcaggtagagctggtactgatttccgaatcaccaatgcactactacaaacccgcctttatgtacgtcgcctttaacctcttccatcaccatgaactggcccggcctgaacggcaattactgagtccggaaattcaatttattaccgacaggattgaatctttcgattttaagcagcgtcgactgtacggggccagtaagcgacattacgactgggatctgctggttattgccaccggctgcacaccttttacacaaaaaatccctggccttgccgacgcgggcgatcatttttatcaatacgcggctgccagacaattagcgcataagctcgccaccctcaaaaaggggcgaatatttattactgtctctttccctgaaacaccgaatgttccccaccagtgcggcattgcccccattgaaaccacgctgatggttgatgactatttgcgtcagcgtggcgtacgtaatcaggttgagattgtttatacctatccgaccgtcgcgcagctgctgcgaaactgcctgttcctgcaacgtccggtgggggaggcgctgggcgatatttttgccgccaaaggaatacagcatcagcgtggttttaccttaagccatgtcgatcctgacagcaaaattgcctattccgccgagggcgattcacagaatttcgacatcctgatggcaacgccgcccatcagggcagtagaagcggtgcgtaacaccgggctcagtgaggttcagaacggtgaaggctggctgccgacggatcaccagacgctgggcgtctacggtttagaaggggtatatgtgatcggcgataccgtcgatctgccgatcagtaaagcgggagggtcgtgccacaaccaggcgcccgtcattgctgacaacattgtggcggagctctaa

SEQ ID NO: 163534 - DNA, 234 bp, Enterobacter cloacae
atgtggttttctatcaacgccaccgaacaccaaaacttcatcattaccataatatttaatttttatagttatacaattatttgttttatctacgacgatatattcaattattgcatctataatctttctgatcttatccctatcattatcttccatgttcgtaaaaacagcccattgaataaggatgaaaaattccatgatatctacttcaaaagaaccttttccttgaaatga

SEQ ID NO: 163535 - DNA, 963 bp, Enterobacter cloacae
gtggattatcgcaaaattatcaaagaggtagggcggggcaaaaatcatgcgcgcgacctggattacgaaacggctaaggcactttatacgcacatgctgaatggcgatgtgccagatctggagatgggcggcatcctgatcgcgctgcgtattaaaggggaaggtgaagcggagatgcgcggtttttacgaggcgatgcaggcgcaaacgatgcgcttaacgccgccagtcgcaaagccgatgccgattgtcatccccagctataacggggcgcgtaaacaggcaaacctgacgccgctgctggcgattttactgcacaagcttggattcccggttgtcgttcacggcgtaagtgaagatcccacgcgcgtgttgacgcaaaccatctttgagctgctggacatcaagccgacccttcatgcgggtcaggcgcaggcgaagcttgacgggcatcagccggtctatattccggttggtgcgttctgcccgccgctggaaaagcagctggatatgcgctggcgtatgggggtgcgtaacagcgcccacacgctggccaaactggcaacgccgtttggcgaagatgccgcgctgcggctttccagcgtctctcatccggagtacgtgacgcgagtcggcaagttctttgaagaggttggcgggcgcgctttactgatgcacggcaccgaaggggaggtgtatgccaacccgcagcgctgcccgcagattgtgcacattgattctaccggcgcgcgcgtcattctggagcgcgggacggataatcgtgatgtggcgttgcccgaagccaaagatccgcacaccaccgcccactggatcacccagtgtctggcgggccaggtccctgttccgcacgccattaagcagcagatggcctgctgtctgctggcgacgggtgaggtggactcgatagaggacggtctggcgcgcgtggcgcagtctttttaa

SEQ ID NO: 163536 - DNA, 990 bp, Enterobacter cloacae
atgcagattgtaaaacaactggtgttcttattcgtgctcggcctgtcggcgctattcatgccccatgcaaaggccgaatgtacgacgcccgatatgccaaagttgctaaacgtggcaaccatatcggtacccagcacgttgcccgtgggcgaaagtattcccggaacggaacaaaccgttcacgttgcgggaagctgcgaccacgcctatgaagccggtcaggaaattgtctcctgctactacggcaccggcaccgaaattccgggcctcgccggcgtgtacggtaccggcgtggaggggattggcattgcgctggtcaacgacaaaggccagcggataacgggcgcgggtggggtctattgcgattcgcgcagtacacccattggctacatctcaaatgatgatgcgcgaaacttcagcttcgatgtcacccttgaactgataaaaaccagcaatgcggtaagctcgggtacgctttcaattgaccagacgaagtttgggattggcgtttatggcatggacgggattggttctccgaacaccgtatcttacgctggcgacgtcaatattcaggaggtgacctgttcggtttcccctaaaaacctcaccgttgtactaggcgattttccggtcagcgattttatcggcatcggcacgctctccatgccggcgcaggagtttaacgtaacggtcaactgtaacgccacggtacagcctgaagtgaaaatcaccagcgctaacggctatgagaccggctacgctggggtgatcaaactcactcagcagcccggaatggccaccggggtcggggtgcgaatgttgttcgacaacgatatcgccaccttcgatcaatacgtcacgacccccagcgaggccgttgccaaccagacgctggatatccctttccaggtgcgctaccagcaaatcagcgacgaggttacgcccggcccggccaacaccgttgccacaataactctggcctataagtga

SEQ ID NO: 163537 - DNA, 507 bp, Enterobacter cloacae
atgatgaaaaaaatagtgcttttcattgggatgggcctgatgacgcaggcctgggcggatgatatccaggttcagatggtcgggaatatctatgccaatacctgcgtgatcgacagcgccagcaaaaacttaaccgtcgacctcggccagacagcgtccggcaattttaaagacgtgggggatacgggcgaatggaaagaattttcgctgaacgtctcgcattgtcccaaaacgctgacgctggcaacggcctttttctatggccaggcagacagcctgcacccgacaaaatttgccaacatcggcagcgcaaaagggctggcgcttgagctggcggaccggcaggacaatatcctcatcgccccgcaggcgagctttaacgcgctgattaatcaaaacgatcacacggccaccttccctctcgccgcacgctactacgccacctcgatgccggtgagcgcggggacgttcagcagcgtggtgcaggtgaccttcacttaccagtag

SEQ ID NO: 163538 - DNA, 618 bp, Enterobacter cloacae
atgataacatcgtcgcataaggttgtccgctgtataagctgtgaattgtcctgtcagttatatccagataacacagtacgttcacaatattgtggaaacgcctcgttcgcagtttggccaggtgataaccatttcctgcagattgcagtagaaaataaaatagtgcgaggaaacaagaatcacttattacgcggatttatatttgtagacttttcaatgtacaacctgcgcgcacttgccgatccgcaatggattgaacgtctggcgagaactaacatgaacattgtgattatctcagaccgcaagctggaagcattggccaattattttctcactcaccgcagtgaaataaagggagttatttattcagatgacagtgacattatattaaaagaaaaaattagccatctattcaccgggagacgagtgaatagcagacgcggcagtatcttaaatgctgttgaattcacgttgcttaacagatttttgtcaggagcgtgccttcaggagattataaaaacagacggcattgatgttaaaaaaatttacgtccataaaatacgacttgagaggaagttaggcaccagcattcataaaattctcgtttctattttgtaa

SEQ ID NO: 163539 - DNA, 738 bp, Enterobacter cloacae
ttgtatctcattaacaaattggtcgagtatgatccagaaaacaaaaccctggtaaatcatatttccgggcgctcgatacaattgcagcttcctgccaacctctgttttctctatctcgtcacccatcccggagaaataatttcgcaaaatcagttaatgatagtgggatggggtgagcgcaatgacgtcaccacaccgaataccttttatcaggctattttgacattacgcaacgccctggctgaggtggggttaccgcgcgatacggtaaaaacgatttcgcgtcgtgggcttatgctttccgaagccacccaggttgaacgatttatcccaggcgctgagccgataatagccaataaagacgcagtcgttgccgatagcaccgcggtgaagagtccggcctggctgataataacgaccgcaacgcttttgctgatcgcgcttatcaacggggggatattatacaaacagcaccagaacatgccgtttagtcactacattccactttctacgggcagcagtgcctgccagcttttttatgcgcctaacgaacctatgcaggaccattacttgcgcttgttaaacaataaccctggcctgtgtgccgaaaagcgatatgtttttctcatcggctacagtaaaacggagcgaatcgcggcgtttgcctgtaataaggatccgcgtcgcgacgcggcagcgttttgtaccacccattatttttgggcacacgagcaatga

SEQ ID NO: 163540 - DNA, 372 bp, Enterobacter cloacae
atggaacacatggcggtttttgataccaatatcctgatcgaccttttcaacaatcgcgtcgaggcagcaaatacgatcgaaaacacagcatcgcaccggtcaatcagtctaatcacatggatggaagtcatggtaggggcgcgcaaacatggccacgaagcgaaaaccgcggcggtaatgggcgcatttgaggttatcgatgtaacccgagagatcgcagaaagaagcgtcgtgctccgtgagaagcatggcatgaaactgccggatgccattattttagcgactgcccaaagcagaaattgcccgttaatcacccggaataccaaagactttcaggggattgccggggtggttttaccttatcaattgtag

SEQ ID NO: 163541 - DNA, 1464 bp, Enterobacter cloacae
atggacaattccctcgcgtttccacacggttttttatggggcggcgcgattgccgccaaccaggccgaaggcgcatggaacgtggacggcaaagggccgtccgttgccgacgctgtcgcctggaaacccaacctctccgtgaaagattacagcggccacatggccctgacggacgagaatatccgcgacgcgtttgaaggtaaaaatgatgcgctgtacccgaaacgccgcggcatcgatttttatcaccactataaagacgacatcgcgctgtttgctgagatgggttttaaggtgctgcgcgtatctattgcctggtcacgtattttcccgaccggagaggacgccgagccaaacgaggccgggctgcagttttatgaagaactgttccgcgagctgcgtcgtcataacatcgagccgctggtcaccctttcccactacgaaatgccgctggcgctgagcgaaaaatataacggctgggtgcatcgcaatgtggttgatgcctttgttcgcttcagcaatgtttgtttcgaccgctacaaagagctggtgcgttactggctaaccttcaatgaaatagacagtattcaccgccatccctttacgaccgcgggcattcgcgaagagaaaagcgcgccgggcaacgcgaaacaggatatctatcagggtctgcaccatcagtttgtcgcgtctgcactggtcacgcgcgactgccacgccaaaattccgggcagccaggtcgggtgcatgctgaccaaactgacgacctatccgcacagctgccgtccggaagacgttgaagccacgctgaagaaaaacctggaaaactatttttatgccgacgtgcaggtatttggcgactatcccccgctgatcctgcgcgatctggaacgacgaaatatccatattgaaatgcaccctgacgatcggcgtattttaaaggcgcataccgtcgatttcgtctccttcagctattacatgtcgatgaccgaatccacgcagcctgacgccgaacgcattcccgggaataccgttctcggtgtgaaaaacccgtatctgccagcgtccgaatggggatggcagattgatccgcttgggttgaaaatctcgctgctggagctgtatgaccgttaccagaagccgctgtttatcgttgaaaacggtctgggcgcgaaggatgtggtcgaaaacggcaagatccacgatagctatcgaatcgactatttccgcgcgcacttcgcgcaaacgctggccgcgattaatgaaggcgtggaggtgatggggttcaccacgtggggctgtatcgacatcattagtgcgggcacctcgcagatgtccaaacgctacggttttatctatgtcgatcaggacgatgaaggcaacggtacgttgaaacggctgaaaaaagactccttctggtggtaccaaaaggtgattgccagcaacggcgcagatctgcgctaa

SEQ ID NO: 163542 - DNA, 858 bp, Enterobacter cloacae
atgaaatataaaaaaatcattattgtattatctatattgccaatgcccttaatggcattggctgagagaactccgaatgaagaaaaaacagttgtagggtatgcaaatcataacgggcaattatataacatcacagcaatatatgggaatacaatatactacactgtaccaatgggaactataacaattaacacaagggattcttctggcacacatatacaggtttcttttgattacgcagaatatgttcgagaagcatttaacgaatgggcacctgcaggaataagtgttcaacaagtgccgggagttggaacggaagcacgagtcgtcttattcggtacatctaattacgcagataactcattaggcagtaccatcttcgacccgtcaggaaatacaagaatgagcattgacttaggttcatttaataaatttattatgaataactttgacaaactcaagtctcggaaagcgatcccagaaaatatgagccctgaagaatatatcaaactaaaactaaggattaccataaaacatgagataggtcatatacttgggctgctacataataatgaaagtggtacataccttacacatggcgtgggtcaggaaatagcccgttgtaggctcctgaaccaagcaccttcaattatgctaaacggtagtaactatgattacattgatcgtttagcacgttatttagaacgaccagttactgaatctgatattggtccatcaagaaatgatattgagggggttcgggtaatgagaagaggaggtaataggaatttgttaacaaatcaattttcgtgtctgggtttaggattggcattttcgcggtcaggaggagatctgtaa

SEQ ID NO: 163543 - DNA, 390 bp, Enterobacter cloacae
gtgctgcgccggtacggggtttacctctcgttcttcacggcgatcatcgagttcatccggggtgtagacgcccagaatcacatccgggcagaacagtctcgcccagcgtttgacggccaggtacgccagctgctggcgagggtcatcagcccaaagggtagagtttcgggttcgggcctgagccagcagcaaatcgagttctcttggctgatcttcgcctttaagcgttgcgcggataataatgccgatcccggcttcgtcagccagggtccagcccgggacgcggtactcgcctttgtcgcctttacggatatggaatttcccaacaaccttttcccatggcccgtaccactcatattcaaaacggctggccagcacgccgctgcgtga

SEQ ID NO: 163544 - DNA, 240 bp, Enterobacter cloacae
atgggcatatatgttcaaattcaaagaaaatcctctgagggcagtaacactaattatattttctccaatgagaatggaagtggtgagtttagtattgataagaataatggtaaaattgattactaccgtaaaatgcctaatgatataaaaaacttatatttttccagagccgccttcaaagttataaagtattgggaagttaatggaaaactccctgaaagtgaagtttgggcatcctaa

SEQ ID NO: 163545 - DNA, 477 bp, Enterobacter cloacae
atgggtactccttttgagaacgcttggcatgaattagattcaatacttagtgaagtcgaagatctgcaagaactagatgaaactcaagtatccaccgaacagtattttaagatcttagctgaaacagaaaatgcatatgaacgcataagacaagatgaatcagatattaacaagatttcgaataatattgaacaagatattgaagtcgtaggaagggtaaaaaatcatattttcttcaatgagcatgatataacttatcaagacggttcaactgaacgtaagagattagatcccgaccctttgattgctaatgcatggaacaggcttacatgcgcaaaccatactgatgaagacatagcattctttgctcatgaagaatacgagtctatgatagaaatccgcgacggactgacctataatgaagctcatagattgactatcgttgctgggtatgcttggaactataagggggaatga

SEQ ID NO: 163546 - DNA, 414 bp, Enterobacter cloacae
atgaacactgaacaaataatctacccaaacgatataaattacgattttttgttaaaaacattccaaaacgcaggaatgcaagctgaatataataacgaaagaataattctcacaaattcgaacacaaaggccacagtgagaattaattcggaagtgattacatttttcagttattataaaatcaaaaaagatgttgagtatactcagttaaccgagatggtttacaccctcaacaaaccatcagcttttaacatatcatccatcacaaaaaacaacgaaagacttagtatttcaatggcttaccttaccaaggctggggtttttattcctcattttattcatacggtttatggcttttttgcatttcaacgtatttcattaaaaaataatgatttttcagatattttagaatga

SEQ ID NO: 163547 - DNA, 156 bp, Enterobacter cloacae
atggcggatacctttgttttgagcagcggcaataccgatattatcagaaagggacaaaagctcaacgttagagcaggaagtctgaagcctggaaatatcctcaatattgtcactaccattgtcgacgataatagttcgataggattgtgtctctaa

SEQ ID NO: 163548 - DNA, 780 bp, Enterobacter cloacae
atggaaagagttgctgattatattgatgagctaaataaagagctcatcagacaggtgactgttaatgttgttgtctattctgttaatactactgacagtaataatttagctatgtccctaaaaggtgttctatcgagtggtggaaaagttttgggcgcactttcaaatgattttgcagttgctaattctcctacattaagtggttttattaacggagatcaggatacaaacaacagtgtaattatgaatttgttagccagtgccggaaaggtaagcattgtaacatcagcttccgtaacaactatgtctggacaaccagttccactacaagtaggtaacgaccgaacatatgtctctgaaataggaacaacacttggccaaacggcatctacatcaacagtttctacttcaagcatttcatctggattttcgatgaacctgttaccgagagtcatggataatggcaatgtattgttacaatacggaatcaatatatcttcgttggcaggaagcaataatggttttgaagcggttacggtatctggcaccacaatacagctaccaaatgttgatcagcgaacttttgtgcaatcaagtcttttaagaaatggaagtaccttggtattggcaggatacgagcaacaaagagatgaaacagctgaccaaggtgtagggcgtcctgactttaagttacttggtggaggtaaaagaagtactaatgaaagaaacgtcatcgttatttgtattactcctacagtgattaatgtagataaggattaa

SEQ ID NO: 163549 - DNA, 297 bp, Enterobacter cloacae
atgagcaatttttacctgattgtcctgaaggtcgctaccttggaagatgaattccagctcaacatgatgttgtcccggtggtacctggatcaggacactgatatcacgtttacctgctttactggtacttttagctctttgccacacctcaccattttcgacagtaatgttttccaataccagtttctgttcactgttttgtgctttttcattcaagtaatcggaaaaatcgagttcacgccagttgtcattgtcaacgaaatgctcctgaatgaatttagcactaaattcagttag

SEQ ID NO: 163550 - DNA, 525 bp, Enterobacter cloacae
atgaaaaagaaagaattcggttactcgttgattgagattgcgctattctctgtaatgataggcgtggttattgctaatatttatagtacaaagcagagtcttgtcaacttctattatcataaacagttttcacttgcagcttgctcatatgccaatgctttcagtcgatatattaacttaggaaataacatcccaaataacatttctatagagcaactaaaaagcaaaggagttataagccctttcgcagaatcacagatcggttattttacagtttcctttcaaaccataaaaaaagacggatatcaatacggcttgatgaaactacactcaaataaaagaatttctgttgcagatgaagaattactttcaagtaatatcggcatttatagttcagttaaagaatcgaattctttaaaaggcctgtattataatattgatttccatggtatatctacgcctggtgatggttatatatatgcaatcatccctccccattattctaaataccaggaatgtttctga

SEQ ID NO: 163551 - DNA, 264 bp, Enterobacter cloacae
atgaatcttcaagcaagtctgtttatagccgcagcaatagctattgctgcctatcaatgggttaagcataagggtacaaaaaaggattgggagaaaggtagtatcattttcttaggcttattacttgcaatacctgttttctttgtttcctcagtcgcaatttttggtatttgggggcaggaaggtcaagcaaaagaagatgctcaacaggaagcacgtaaagcagaagaagatatgaatgccagcgagctatcgagaaattag

SEQ ID NO: 163552 - DNA, 411 bp, Enterobacter cloacae
atgcaaaagcgcggcaaaccgatggtgcaaggggattaccgccagctaacaaaaatgattctggttgatgaagctgataattttatgcgccaggattttgccagtttgcgtaaaattcttaaggaaggccgcgaatatggtgtaggggcgatcctgtcaacgcaggaaattacccacttcaagacgggtgataacaactatgcttcctatattctttcttgggttattcatcgtgtgtcggagattaaaaatgcagatattaaagcagtatttaacattgatgacaaaggtgagcaggaatctttaatggggcagattcggcagcttgagaagcatcatagtctatttgttgatggtgataagcaggtttgtaagatgcgagattacgcattttgggagttaattaaataa

SEQ ID NO: 163553 - DNA, 444 bp, Enterobacter cloacae
atggcgaccaaaaagaaaacaggccgcccttctgactatttaccagaggtggcagccgatatatgcgcgaagctagccgaaggtgaaagcctccgcactgtatgctcccgtccaggcatgcctggcaaggcaacagtgtttcgttggctaaaagagcatgaagagtttcgagaccaatacgcaaaagccactgacacgagagcggactccatcttcgaggagatgctggagcttgctgatgatgtgaaagaggacggcgcggcggttgctaaagctcgccttcagatagacacgcgaaagtgggtgctttctcgaatggcaccaaagaaatatggcgataaggtcgtgaatgagcttgtcggcaaggatggcggacctatccagcaatcacattccgtatccgtagacgaaaaggcgcttaacagcatattgagcaaactatga

SEQ ID NO: 163554 - DNA, 276 bp, Enterobacter cloacae
atgagcaacatcgacaaacgcgaattacgtaaagccgccgaaaaacatggagatgacgatattctgtcgctgctggatgagttggaagccgcagagaagcggattgctgagctatccaccacctgcaatgcgcgcacgcctttgtcgagcatacagaggcatttggtcacgaagcatcaaacgggattctgtgttgtggtgaggcgcagtggaacattgatgcgtctaggtcggctctggccgcagccggtaaaggagagtgagcatggaacgtga

SEQ ID NO: 163555 - DNA, 1011 bp, Enterobacter cloacae
atgattcaagaatcaattacttattttgtcaaaaagccagaaatttctttcttatttatagcaatatattgcatttaccttttaactgaatacaaaaaaaacaaaaacaataattattttgaaatgactgaagaaaggctgacaaagcaaaatctatttaaacaatcaataagaataccgattgtatcagcattgtattttggtatattctcatggattggacactatcctcgattcgatgcagtaggatttagtaacttcatcgaaataagcaaattatcgatcgccctcctttctctttctataccattcgttgctatcgttgcgaacatacaccgaacaattcaaacagagaatcaaatccgtaaaacacaacaacaaatcgatctagtaactgagaaaaatcggagtgatgcatactatgcacatcttaaaaatttttcagacatgttcaaaacattaccatcatttacactttcacgacgagacaatactaccttcgaaaaaggcactgtaaaactttcggtagatcatacatattcattatataaaaaaatatttaaaaaatcttctatctctaatggatatagtaatgaggttgataaaggatttctaaagctattagaaaacacatatcataacattggcaatacattaataaaaaacaatgaacttcaccgaaatcttgattgcatatccaatttagaaaaccttgaggcgcttatagtgtttttatgcagggaattaggtgtgaactatgagcgtgatgtaaataacttcgagattttcaatcccatcacaaacttaggaatagaaacatcgttttctgatgaaaaagaaattaaagaaatactacgaggactaagagacattttaatatctctttacatgctaattgatcagaatccaattatttttcaaggtaatataaacagcatggactttttagccaattatgcatacgatccagataatttgatttttaaaaatatactacctataaaacaataa

SEQ ID NO: 163556 - DNA, 1545 bp, Enterobacter cloacae
  misc_feature (179)..(188): n is a, c, g, or t
ttgattaaaaattttaacgtgcaatctgatgctgttgttaaattaagaatggatgcaatacgttctgaaatacaacgttataatcctgatgaattcatcgaattttgcatgcaatataatttgcagaaattcgatgataacttacacatgctcagacatatgccatgggtagtgaattnnnnnnnnnngaatttatgtttaaaatggtctacatcagcaattggaaagaacaaaaaatttaaaaatctaaataaaatgcaagccatcgctctgtttcaaaaggcttatgacaccttaagtataataccaattggtcttgaaaagaaaaatggattagattttttcttaagaaataatatttatcaacaagggatttatcaaagaattgatgctttaaactcaattagcaggcaagtttttttattcttgccacttgaagaaaaacataaaataaaaacctcgttcttatcattaactaatatctcaattgaggatttcctagttctgtcattcgtattaataactcacataacctcaaacaatccaattcgaaaaatgaatgtaaaaacttttgatgtactacaaccaattatatctaaagagaccattgaaagataccttgatgcaatttcaattacgtatgaaagactaccatcattttctaaattaaaaacacatgataaacctttactagaatactattcatcaagtcctttcctcgaaaatccactaataaaaaaaggttcagattattttcaaatacatacacaactaacttcaacaagcatacaaactttcatatatgacttattaagaagaaatgatgccgagaagttcatggacagttttggaaaggtatttgaagattcattagaaaaaatcatacatgagagcacaattccattttttactgaaaagtatcttaaagaaagattacctaaagacaataaagtagttgattttttgatcccacattccgatgcaaatatatttattgatgctaaaggtgtggaaatacatgaaaaagggatggttacattacgtcctgaagatatttcaggaaaaataaaaacatctgttttgaaagctattgagcaggcacatgaagttaatagagaaattttcttaaatgatgggaaaatctgcgcctttagaaaagaatcttacgcactctgcatcacatacaaaaatctttttttaggaaatggaactttcctcgctaatgcttatgcatcaaatgagatgcaaaaaatatatgacaaattcaatagcgactatcacatccctaaagaaaatatattttgtttagcatttgatgaatttgaataccttctcgcgtcctgcaaatacgcgaatgtccccccccatctggttcttaaatatgcagttgagaaaaataaaaaaccgtccagcgccgccttccttttcgcacaccatttaagagcatttttcgatagagtaaaaaactcagatctggtcaatgagatgggaaaaaaaatggttatatcaatatcggaaaaaatatcgccaagtaacgggatataa

SEQ ID NO: 163557 - DNA, 555 bp, Enterobacter cloacae
atgacgacgattttcgttgctggctctataaccattaaagaacttgatccgctcatcattgagcggttgaagaagattgtagacaaaaagtatcgtgtggttgttggtgacgctaacggcgtagattcatcagttcagcgagcgcttattgcgttgaattgtgaaaccactacagttttcagcagttcgccaaagccgcgaaacaacttaggtgcgtggcccgtaaatgttgtcaaaacagattacaagcgcggaacacgtgagttttacactgctaaagatatccagatggccgagaacgcagactgtggcctgatggtgtgggactgcaagagtccaggtacgcttaataacgtagtagagttgcttctgcgaaataagtattcagtggtgttcgtcaacaaaatgcgtgactttattaaagttaaaacgcctgacgatattgatacgctgataaaaatgatgaaaactaccgatctggaaaaggcagaagacaaaatcagtttaagcggcaagctggcgcgtttgaaaaacaatcagatgtctttgctgtaa

SEQ ID NO: 163558 - DNA, 585 bp, Enterobacter cloacae
atgagttcaaaaataaatatatgcgaagtacttatagggcattttcgaactttacgggatgctgatacgaaaaaaatcagtatgtgggatatattcacttttattattctcccgtttatcattgctgcttcattttcattttttggaagtggcataacgaaagatttaatatcgctactagtgaattttagcgctatattaacagcgctgttacttagtgttctagttttagtctatgatcaagaatcaaagataagacaaagaaaagacatcgatactttttatgaatcaaaaaaatcactgctaactgagctttattttaacatttgttactcaatattatgcggggtatttttggttgtattatgttttatagtatcactattctcggttgattcatctggttatttctatggtgcaactcacgaatacttcatcgataaagcaaatataaccttaaaaattaatatgttaacgcatattttatgcccaatgattatatatgtctgcgtacatctaattttaaatatcattatgatagttaaaaggatgcatgctcttttaacacttgatacgagttcctaa

SEQ ID NO: 163559 - DNA, 927 bp, Enterobacter cloacae
atgcatgctttagcaccgtatctttttcgctgctataaccctcacgcagcgaaagaacagcgttactctacccttagtaacattaaagaacatgatttattggatatattatatagtttcattgagcaatataatgatggatatattatttctgaacaaaccaaacaggtttttcgtttcaatgaagttattcgtgacgataacaaccgcgaaatttacggttggtttgagtcaggatattatggaacaaaaactgacataattaacattgacaccggcaatgttgattttgaaaaaacaaagaacaatgctgaaataattagatactatatacatttttatattcccagagatgtaaatgaaggcatggcttttttgcatacatacagaggggatggaatcaaaacccttttcatgaatttattttctgaatatttcaaaagagttactaaccttgtaattcaaatgaatcctctagcatatgataaagcgatcgaaaaatggatggacgccattgccaaagagattaaagtaacaaaatttcaaggtgtaaaggatgttgcagaacaagcccgaaaactaggtcataatgaacaagagcttgtaataaaaccacctagaaactcaggccttggaaggctcagggactatttctctagagactccgagcaatatcaattagtagaaatacttaaagaatatggagaaaccgttaaaacagttgtagaattaggcgatggtagaaaaaggactttccgaattggaactacagccaaaggtgccgtttgtgaaattatattcgatgaagagcaagttgtatttaatgatggaatgccagagattagatcattaaataaattagttgactctattatcattgaatatattcagttactatatcgcggagttgctataaggagagcgtaa

SEQ ID NO: 163560 - DNA, 861 bp, Enterobacter cloacae
atgagtattcaacattttcgtgtcgcccttattcccttttttgcggcattttgccttcctgtttttgctcacccagaaacgctggtgaaagtaaaagatgctgaagatcagttgggtgcacgagtgggttacatcgaactggatctcaacagcggtaagatccttgagagtattcgccccgaagaacgttttccaatgatgagcacttttaaagttctgctatgtggtgcggtattatcccgtgttgacgccgggcaagagcaactcggtcgccgcatacactattctcagaatgacttggttgagtactcaccagtcacagaaaagcatcttacggatggcatgacagtaagagaattatgcagtgctgccataaccatgagtgataacactgctgccaacttacttctgacaacgatcggaggaccgaaggagctaaccgcttttttgcacaacatgggggatcatgtaactcgccttgatcgttgggaaccggagctgaatgaagccataccaaacgacgagcgtgacaccacgatgcctgcagcaatggcaacaacgttgcgcaaactattaactggcgaactacttactctagcttcccggcaacaattaatagactggatggaggcggataaagttgcaggaccacttctgcgctcggcccttccggctggctggtttattgctgataaatctggagccggtgagcgtgggtctcgcggtatcattgcagcactggggccagatggtaagccctcccgtatcgtagttatctacacgacggggagtcaggcaactatggatgaacgaaatagacagatcgctgagataggtgcctcactgattaagcattggtaa

SEQ ID NO: 163561 - DNA, 246 bp, Enterobacter cloacae
atgaagattaaagcaactatagaacgcatcccgggcgggatgatgctggtcccgctggtacttggcgcgatattaaatacgctggccccgaataccggtgcttattttggcggttttacaaaaggtatgatcaccggaacggtaccgattctggcagtctggttcttttgcatcggcgcatctattaacttgcgtgcaacaggtacggtgacctgctccccgttgattagtacaccccgatgttag

SEQ ID NO: 163562 - DNA, 444 bp, Enterobacter cloacae
atggtcggcttcaccggcgcatcggtgtcgatggtcacggtccagctgctgctggctgactcattacccatcgggtccttcgctgtggcggtgaaggtgtggtccccgcggcccaggtccacgctcggcgtgaagctccaggtgccgtccgcgcccgcggtggtggtgcccagcacgttgctgccgtccatgatggtcacggtgctgcccgccttcgccgtgccgctgatttgcggacgggtgtcgtcggtgaccgcgttctgggacaggctgccggtcacgctgccggcgtcatcggtcacggcggtgatttccaccttgcccgggaccacgtcaacggtgatgaccacgtgcgacccttccggcccggtgttgcccgacggatcggtgacggtggtggtcaggtcgtgtgcgccgttcgccagcggctggtcaggggtgtag

SEQ ID NO: 163563 - DNA, 444 bp, Enterobacter cloacae; identical to SEQ ID NO: 163562

SEQ ID NO: 163564 - DNA, 672 bp, Enterobacter cloacae
atgactcggagtgaaataaacgtctgggatgtgagacgaggcacaaatagtcctcgagttgaggagattcgatctgaagctcagcgcgacttttctcgattgattcactcgtctactttcagacgattgcaatccaagacacaggttcttggtctgggtgaaagtgatttctaccgcacacgactgactcactctatggaagtcgcccaaatcggttcaggtcttcttgctaagctgaaaataaaatataaaggtaaagaggaagagcaatttttaccagataacgatctgatgcaaacagtatgtctcgcacatgatattggacatcctccatttggtcacggcggtgaggtagctcttaactactgtatgctggattacggtggttttgaaggaaacggccagacgcttcgcattctctcgaaactagataagtataccttagaacacggactcgatcctacacgcagacttctgctaggcatactgaaatatccggttaaatactcggatctagtggttaaaaaagaccgtattccggccactaacggatcaccgaactggctctttaagtcatctgattttaaacctccaaaatgctatctagattcagaatgcgatattgtagaattcgctctatcaccatttactgaatcgccacggataatctag

SEQ ID NO: 163565 - DNA, 477 bp, Enterobacter cloacae
atgaacaacatactcaccctgaccagcccggtaactgaatctctcacctcaccacgtactgatgcagaccgcatcgatcgcatgcccgtacccgatgagcagcgtgctgccttctggccacagcactttggcagcatcccgctgtggataacccttgagccgcgaatctttgcctggatggaccgcttctgcgcggattacagcggcggtatctggaatttttattcactgagcaacggtggcgcgttcatggctcccgatgccggcagcgataaaaaatggtcattgtttaacagcatgaacggtaacggcggtgaactcagcgctgaggctgccgggattgcggtctgccttatggcttacagccatcacgcctgccggacggaatgcgatgccatgacggagcattattaccgcctgcgggattatgctctgcagcaccctgaatccagcgccattctgcgcattattgattaa

SEQ ID NO: 163566 - DNA, 264 bp, Enterobacter cloacae
atgccgcacatccccgatggcgtgatacaggtctcgtcatacccgttttccctgaacgaccagactggttgccgctccatctctgacgacgacctgtgcgcctggtgttcacatctcctttatcgccccggtgaactcagcctgtgcagcttaagcatccctgaaggggcctggccctcgcgctgtgatgatgatggctatatgcagttctgtccgtcacttcgtcacaacaacccacatgaaaatacaaaggatactaaatga

SEQ ID NO: 163567 - DNA, 342 bp, Enterobacter cloacae
atgaaaagtatattactcgccgcattactcggtctggtttcgtattctgctgtggcggctgaagcaccttttacagtaagtgccggccccagcaatgcaggtgcactttacagcaaggtctatatcacttcccggtcagattcggtggtgataaagaaaattctcgttaaccgtggcaactgccaggatgccgaagcgatgccctggaaacctgtcagactgggattcggtaataccgtggaccggctgttcgtcggtaaagggtttatgtcggcctgcagaatactggaaattgcagtagatactgaccagggctcctggtcctttaataccagccagtaa

SEQ ID NO: 163568 - DNA, 465 bp, Enterobacter cloacae
atgaaaaaagtacttttaattacaacgctggtaactactgctctgatgcctggtgtctctcaggcttctggcaaccgtgatgcctgggtcagcggctatgcgcagggcactgcggaatacaccattctgggtaaagggcagtcacaactttacctggcctgcgacagctacggtgacaaacctgaaatgctcgtttttactgatgaatccgggcgacaggtcagcacggacagtaatcagcgcatcatggtgaatattgacggggaagaagccactgacgtcagtgaaacagcaagtcatgcaggggcggataactttgcctggatgtgggacaaactacgcacaggtaaacaggtaactgtctccggcgatggcgtgaagcctgccacctttaccctgaaaggcgcaggcaaaactttacctgcatataacgattcttcctgtgtggctgagttcgcacgctga

SEQ ID NO: 163569 - DNA, 1551 bp, Enterobacter cloacae
atgacaaataaatcagccccctcacgcgaagcattaagggagaaaaaaatctcagagctacaaaatgaaatagataatgaaatagcgcgggcagctcgattagccagaaagtgcaacctctgggatttacgattctttatctatttactgagactaaaccgtatttcaatgcttagcaataaaaacgaaacgactcagccatcaaacttattactgcatatgaatgatgatgcattgaaatacgccattcagttaacagccaagtatgctaactggcatgatgctgcgtctgttaatcaaagcatgaacaattatgattcgactcgcgctcagagactgatggaggcaacgcgaaaaattaatggcttatttgatcatgctatgcttttaaatgtttcagaaatagaaaatgaatgcaatgaagatggaaatcaggagtggaaactatctgataggaaagagcatcctgaccgtgcactggaacgtgattttggtttaaggattgaagaatgggctatgtggggaaaagataacacgatcaacatccccgagctgatctgcaaacttttgcaaaagtacggaaggcttcatgaaatattcgaagctggtcacaatatagcacttgatgactattgcgtgggcttagtatgcctctgcgctgcaattacaagacggttaaagtctcaatttgacgagccagatagcgatgccttaatcgatcaatggtctattgcaaccatcagtaatataacgcgtttaatgatatttacagattctgaactggaaatggagtttgacgatgtttttataaaatatttacacaacaactcttacgatgcaacccaactgagtgacagtgaattacgatttcactatatttcacgcaaaccatttctccgtggaaacggttttatgatcctgagcccggagttagtttttgatagcataatggataactgtcattataccttacttgaaaataatgcatctaaaaatgcgtatcaagctgaatatggaagacagtttgttaatgaggttgcgcaatccgcagaaaaaaacgggtatgtagtaaaaggtcgggatatttatttaggcagcccgcgtaaaagtattggtgacattgatctcgttttagaaaacccacaaaccggccacactttgttcattgagtgtaaaaatcacaaactcccattagacgttcaatttcgaacaacgggtaaagtaaaaaaacatatagagttaacattaaaatgggaaaagaaagtccagaaaaggattgaccacctgaaaggcccctcgcctgattatacagttgagggaacgtgggattatgttgttgtttctttcatgcctcaacctctctcgcatcaatcagaactgttaattatgagtataagagagtttgaattatggctttcgaatactccaagagcacgcaacttccctgaattatttaagcagatatatgaaacaaacatcatgcgatttagtaatgctgatatcgataatttcaatgatgcaagttttgcatttataaaacctgtcatttaa

SEQ ID NO: 163570 - DNA, 1215 bp, Enterobacter cloacae
atgacgagcttgtgggatgacttccgcgtgtttggtctgcgccgggaagaccttgcctatgagagcccctgccaaaaatggatcgatatcagcaggcactacttcttcgttggattcgagcccataaagtctgacgaactgtccggaaagaatgataaggccagtccgcgcttcataatgttcgatctgctggataagctgtaccgaagtcaggcgaccagcgatgggcgagagttcagaaggccaaatctgaagcttcgtgattctcagccaatacgaagtgaacgtatagatgaagaatggttaggcgctctggagaaggggatacttgaaaaagaaaaggcattttcttatctctgtgaaagctatcgtaatgttgtaaagaagcatcgtcaggtcgaaacattgacactgactttccatttaccccctgaggcgagtgatggccagtcggcacaaaactttcggaaagaaacggatgactctcgtttcaggttacagctggctgcacttgaacgacgttttactttgttgagaaaacggataaacgcggatccgctctacaaagcagcttgtggttattcgcggataatcctgataaacgcgaaattcgaaccttactatctggttaatttcttctttaaaaaacatcctgtcagcccaattgacagcttagtcccaataaatatttataaaaaatgggttaagccagttggtgatgagccccggattaacagtagggttgagtactactgcttaaatggagcttcccgaccatatgtaacagacgacagttggctattagtccgcaggccagaccgagtaactgatgttggtcaattttcagacccgctctctttggttttattagaagaacggaaattcgaaaacaaccgcaaagattatctggctttctttcgccttcaggctcaaatctacaatgttattcctggaacacgaaccctgacatgttctgacgattttacctacatcaatgcagctgagaagaaacgcagaaaagccaaaaaagcagacttgaaaaagaaatccaaaagagcattacctatcgatgaaacttcagctacgcccggaaatgatctccatgataaagagggctctcccgagttgccttacctgttcgacgaattcaatgatgccctgccttcaaacttagaagagcatacgtacgggattttaaaagtggagaagccgtaa

SEQ ID NO: 163571 - DNA, 588 bp, Enterobacter cloacae
atggcttaccacgacattaccgatatcaatcttagctatgttcagcaccgtaccctgcaacgtaagctacgccatcaccaggaccagttattcgaacgctattccaagctgctcatgctgcgggtggacttctcttacctgcaggacagcgattctcatggtgagggagatattcactctacggtggcggatattacgttactgattcaacgttgctacgagatcagcgggctggtgggctacgcatgggtactggaacatacggagcgccatggtcatcacgttcacgcagccttttatctcaatggtcagaagcatcggaaggtatggacagtctttgtaacactcagggatatctggaaggacgtgacatggggagaggggcatgcatatcgatgtgagcctaaggagcattatcgcgtgcggggagaatgggtgacagcctatgacgatgccaggggccgcagggggatgcagtacatcctgagctacctcagcaaggaggctcagaaaagtatgggtgttatctgtcagttaagcgacatacccgtggtgtctgttgtgggcagacggcggaaggccagttaa

SEQ ID NO: 163572 - DNA, 207 bp, Enterobacter cloacae
atgaccacacccaccagccttctcaacgataagtttgtcgatatggcctttatcactgagctcaccggcctgacggataaatggttctacaagttgataaaagacggtgaatttccgaagcctatcaaattgggcagaagttcccgttggctacaaagcgaagtagaagcctggctgcagcaacgtatcactgactccaggggctga

SEQ ID NO: 163573 - DNA, 132 bp, Enterobacter cloacae
atgtacgcccaatcttttatcgcacttgatggcaagcagcgcctcacgggggcgaccaccgcacagatgtccccttaccaccactacaccagccatctttacggcaattcactggtctttcttaatgaatag

SEQ ID NO: 163574 - DNA, 555 bp, Enterobacter cloacae
atgaaaactatggctatcacttctgacagctacgtcaatgtcagcgtgcgggagaagatcggatacgggctgggcgatatggcctccaatctgtcgtttgggtttgtctcgctgttcctgcttttcttctataccaacgtctgtggcataaccgctgtacaggcaagtctgatcttcgtgattgcccgcgtgctcgatgccctgttcaatatctgtatcggctatgtgattgataaaactaatacccggtacggcaagctgcgcccgtatttactgtttggtgcggtcccgctgggagtgctcaccgtcctctgtttcagtacattcagtgacgagtttaaattttattacgcgctgatttcctacaccctttattgtctggcctatactgcggtgaataccccttattccgcgatgaccaatacccttaaaggcaggctcgaccctgccgtctggatgtggggagtcaatctactgtatatcgctctgtcaatagttctgaatctgtgggataccttaccgatgcggcggatccgtgctttcactctcaagtag

SEQ ID NO: 163575 - DNA, 3843 bp, Enterobacter cloacae
gtggcaatcttcgatatcaataaagatgaattactcggactctcagatactcttttggaagagttaattgcgcgccttgctgaagccgaagtggcggcctgcggtcatagcccggcgcaggtgcgctggtcgggatcgatcaacgcacctgatggtggaattgatgtccacgtgcaggtgccggttgaacagctcaactccgggtatattgagcgaccggataccgtcttccaggccaaaaaacacagaatgcgcagggcagatattctgcgagagatggctccttctggcgtcctttctcccatgatatccggccaggccacaaaggggggaagctatatcattgtcagtctggatgaggactgttccccctctatgcttgccgaacgcgtcaaggcgatgcatgaggccgtcaggcatgatccctctcacccaattcttcatctggctttctatgatcgcgcaaagttggctcagtggatacgacagcatccgtcagtaatgctgtgggtaaacagaatactggggcggggatattccggctggcagccatatggagcgtggagttgccctccagaggaggcggaagataccctgattaccgcgtccggtatcacgatctcacttccgtcagaaaaaggtcacccccttagtattaaggatgccatcgggccgatacgccagtttatccggaccactcggaaggccgtgcgtattactggtttatctggcgtcggtaaaacgaggattgttcaggccttgtttgatgaatccgtaggagccgatgccctggaccgcaccctagcggtctatgccgataccggtgacggtccgatcccttcggctgcagccatgctggaacgcctcatcgctgaccagcgcagcgcaattatggttcttgataactgcccgtctaaactgcatgcttccctcgcggcgagagttacttcgatggggaacagaatcaagctaattaccgttgagtatgatattcgggaggacaaacctcagaccacggaggtgatccacatcgaggcggtaggaccggaagtagcggaaaaacttctgctacggcgtttccccggtatcggacgattgaacgcccgtcgaatcgctcaatttgctgacgggaatgccagagtttcgctggctatcgccgagagagtggaggaaggggagtcgctggccgttctgtctgatgcacaactcttcaacagactttttgaacaacgtcatgaaccggacgagggattacgggagcaggccgagctactttcactggtctactcgttttcgattaacttttctgaaacaggcgacagtgaactggagagcctgggtacgctcgcgggctattcacataaccagctgtaccggacgctcaaaaagctgactgatcgccacattcttcaggccaggtcgcactggcgagccatcttaccccatgctatcgcgaacaggctggccgcctccgcgttggacagctttccggtggcgtttcttcgttcatgctttgaagtgccgggacgggagcgcctgcttatgtcgtttgctcaccggctgggtcttttacacgatcatccggtggcaaaggagattgcggctgcatggcttcagccgggagcgttgctgagtaacttgctggcgttagaggacttaccagctcgtatgctggagtacattgcaccggtggtgcctgacgttctacttaaccggattgacgaggacctcagggctacagactttaaaggccagaaaagacattacgatccgcgctggaacactatcctcgaccttttgcaggcactggcctgggagtcttcatactttgaccggtgcgccagccttctgctgcaagtcgcggatcatgaaacggataagcctggtcagaagaatgcacgggacaaactcaccttgttctgtcagccctacctgtcaggcacacatgcttctctggagcagcgaattgcgcttcttgaagaatgtctctcttcaggtatgtcacagcgtcgggcgctcggactgaggatgctttctgccggacttagcggttcgacgtggacaggttcgggtatctgtgagtttggtgcccggccgagggattatggggcagaaccagactatgaggcgttgatgacgtggcggcgtgcgttcattgcgattgctgttcgcatcgggaacgctggtgatatgcgtcttgccagcggtgcacgaactattctggcaaattcactcagcggcctgtggagtgacaagaagatggactcagtcttggttgatgccgcacgtacactacatgcccatcgtccttggggggagggctggaaggcgattcggacaaaactgtactttatgcagaaggatcctcaggtatcacccgttctgcttgaaacttttgatgctctgcaaagggagctcagaccgaatgatttgctttccggtatccggctttatgttctgagcaaaggtcaccacaactgggtgcttgatgacgaatttaaccgaaatgatcaggaccgatatgctgaagctgaagagcgactgatggccagagcagagcaactggggcgtgagtttgccgcttcaacactttgcttttctgatctgaggcccaatttgttctcttctgagtggatgccttaccggagcgcatttgggcaggggcttgctcagggaactgcgagtcctcgtgaaatctggcaattgcttataaaagaactagaacaggactctactgaaaataaagatttttcggtctttcttggctttatcgacggtgtggatcgtattaatgaagctatggcccatgaatttctggatcagtgcgctgtgcatccttccctatgtcgagttctggttaaattgcatcctcagcgagattttacagaaagggatttgaatcgatgcatgtcgcttctggataaaccggatatccatccgtttatgtttgacacctttttgtgggataaaaaatgccggcatcttccagtctcccgggtgctcgaactggctgaacgactgttagtcatggaaagcggcgaggaaccgattttgaatgggctcggcatgaggctacacggcaaaaaagcgacagaggacatgcctggtccggaacttcttcaaatcggtttcagggcagccattcaggttttacagaaagatactgacgctcggggtagtcttgtagatgtctttatggaatcggtcgtggcggaggcattgcagttagatgaacatgacgtgctcaagcatcagtggctggatgctgtcttctcagcgattgataaacactacggctatatgaatgagtatcgtaaaaccatagagacaacagtggcacttatacctgaagcgtttctctcccgcctgtttgcagattctgaagggcagaggtgtatgcggttgttctttatgcgtggaagcattggggatactccgctgctttcaggcgttgacatcgaaatcttgattgactggtgctccagcagtgacgatccgaggatatgggcatttgtgccgcaagggttagaactctgggtaagaattccagacacaagcgggacggtcttacatgaaaatgctgtcaaattcctggaggcggcacctgaaccatccttggtccttgattcttttgcagaattaacaagtcccacaagctggagtggcagccttgcaaacatatggcagtcacgggctgacgctttcagtaaactcattgaacacgagcgggacgacatttcaaacattgcaaaaaaaatccacgagagattgatgcttatgattgagcgtcaaaggaatcgggaacagcaggaagatcgtaaaggtgaacagcggtttgagtaa

SEQ ID NO: 163576 - DNA, 246 bp, Enterobacter cloacae
atgaaagaacagcatacatatacaggcctctggattaccgaagatgggttcattcgccatgagcttttaccaaatgggcgttacgatgaagcacgaggcacaaaacctcatgcttatcagggcgactacgacattcgtgaaaacaggatctattatcaggacgataccggttttacagctgatggaacttttgttaataatgacgaacttcaccacgcaggaatggtgcttttccgccgccaataa

SEQ ID NO: 163577 - DNA, 222 bp, Enterobacter cloacae
atgaataacatccattatttaactgtagcaacaattgtgtttttagtatctttcagcactatggcccaaactgttacggcagtagattcaaccatcgagggcgctgaggaaaaaatttccacccttgcaactaaagaggggaaaaaatataaaattcttggagcctcttttaaaaacagggtttatatggcagcagagttaatccctgttaataaaaaatag

SEQ ID NO: 163578 - DNA, 723 bp, Enterobacter cloacae
atggataaagttatattaattaccggcgcgtcaagcggcattggggaaggtattgccagagagcttggaagtacaggtgcgaaggtgctattaggggcacgcagactggaacgtatcgaagccatagccgcagaaatccgcagcaccggcggtattgccgacgcgcgggagctggatgttacaaaccgactgtccatggctcagttcgtgcagtcagcgcttgataactggggtcgtgttgacgttctgattaacaatgcgggcatcatgccactttcaccgcttgcggccggcaaacaggatgaatgggaacgtacgattgacgttaatatcaagggcgtgctgtggggaattggagctgtgcttccagtgatggaagctcagggttctggccagataattaaccttggctctatcggtgctctttcagttgtgccaacagctgctgtctattgcgcctccaagttcgcagtacgggctatttctgatggtctacggcaggaaagctcgaaaatccgcgtgacctgcgttaatcccggcgttgtggaaagtgaactcgcctcaaccatcacccatgcggaaaccatggcggtgatggatgcataccgttctgttgcacttaaacccactgatattgcccgtgccgtacgacatgtcattgaggctccggaaaacgttgatacaacagaaataaccatcagaccgacagcatctgcaaactga

SEQ ID NO: 163579 - DNA, 906 bp, Enterobacter cloacae
atgaaaattgatctcaatcttttacctgtttttatcgcggttgctgaagagcgtaatttcaccacagccgcagcccggctgggagttacgcgctcggcgattagccagggaatgaggcggcttgaagatactctcggcacaatgctggtaatgcggacaacacgttcagtaaacctgactgaggcgggagaacgactgcgtacatccttgtcattacctttatccagcattgaagctgcgttcgaagatattgcatccgacagcacgccatgtggacttctgaggatcgcggtaacctccatagctgaagagtttctttctggtccgctgatcgcctcgtttgcggctgctaatccagccgtgacgatcgatattgtcgtgacggatgaggaatttgatattgtggccgctggttatgatgctggcgtaaggcttggagatgtgatcgagaaagatatgattgctatcccgcttacagaaaagcaacgtgaaatggtggttgcgtccccatcctatctcacagctaatagcgcccctcttcatccatgtgagcttgtgcatcatcagtgtatcggctggcgtccatccccggatgttgcgccttatcgctgggaatttgaggagaacgggagagctttcgatgtggcggtagaaccgcgaataacaacgaatgacctgcgtctcatgctgagactggctcttgccggtggcggtataacatttgcccctcaggaaacattcaagtcgtatattgaaaatggtcaacttgtttcaatgcttgatgattttcttccccattttcctggcttctatctgtattttcctcaacgccggaatatagcgccaaaattacgcgccctgatcgaccatgtaagactatggcggcaaccgcatgcaaaatgttaa

SEQ ID NO: 163580 - DNA, 132 bp, Enterobacter cloacae
atgacaaaaacacaaagtaacgtattcagcatggaaataataaacttactcataatagttgccgcgacgtttaaaatattaagagtctatgaatatagcgctctcaacaaaatgacaaacgacattggctaa

SEQ ID NO: 163581 - DNA, 636 bp, Enterobacter cloacae
atgacaattcaggaagtagttcagcaacgtaatattactaggctgtttcattttactcatagcgacaatttatcttctattttagaaaatggtcttttatcacgttcagagcttgatgatgaaacgaatgaatataactatcatttcaatgatgaagataggattgatgggcatttagatgggatatgtttgtcgataagtttccctaatgcaaaaatgttttggaaatataggagtttaaaacctggtgattgggtcatattagagattaatccatccatactttggactaagaattgtgcattttaccccactaacgcagcatcaaataatgttcgttttaacgaacttgagttaattaaaggggatgcagcatttagtgcattgttttcagatgaggtttttggcattcagagagatgtaaaccttcctgctgaatatacaacggatgttcaagctgaagtgatggtttttgaaaaaattgacccattatatattgtaaatacatttcactctaacaaacaatctgctgaacatttcaaaggactacatccgcagacaaatcagagatattatgctaatcttaatggtagaacactctactctcagaggcactattatttaggactaggataa

SEQ ID NO: 163582 - DNA, 690 bp, Enterobacter cloacae
atggccgttagacctgttttcatccctacaaatgccgggaacgtactatcagttacgaaggatgtagacttcccttgggctcctgggatgtccaaaacgcaaaagcaaaaatcgatcagggcattacatgcagctgcaaatgaactgggagttaactctttgttggagatatctagtaaatctgaggatgagctgggagtaaaacttagtgcctttaatctaagaataaagacaaaaaaacttggtaaagagtttacagttgaatctgcgtttcaggcaagtaaagtatttgaaatgggtggaccatatgtcgatatcttagacaaaagctctgtagaggccaagaaagatttgagactgaaggagtcagggagtttggttaatttcaaattttataatactttgtggcctcttgttcccagaacggctttttatgattggttatatttaagtgcgctcaaccaaaataaacaattggctctccatttattaagatttgacggctttactgatattgaattcaatccggtgaagtctattaattgccaagctagagctgctgctctttatgtctctttagtgcggcgaaatatgttggatgatgttttatcttcaaaagatgaatttttatcagtattagtaaatcattatggtattgagagttacgctattcaaaacacattgatataa

SEQ ID NO: 163583 - DNA, 258 bp, Enterobacter cloacae
ttgaacgacttaatgattgacctcgaatcaatgggaaaaaagccaaacgcgccgatcgtgtcaattggtgccgtcttttttaaccctcatacaggtgaacttggccaagaattctatacggccgtctcgcttgaaagcgcaatggctcagggtgcggtaccggacggagatactattctttggtggctcaaacaaagctcggaagcgcgctcagctatttgtgttgatgatgcgctgcctatcactgatgcactgtag

SEQ ID NO: 163584 - DNA, 762 bp, Enterobacter cloacae
atgaatttagaagccttaccgaagttttattcaccaaaatcctcaaagctaaacgacagcactccggccactggagattatgctctgactatgaccgatgttatggcggcgcagggaatggtacaagcaaaggcctcactggggtttaacctgtttttagcgaaaatgggcatacaagatccggccccggctgttgatggacttgttaaattaatagtggcacttaataacccaattataaacaagcttagcgagtcgactcgtaccgaaatagctcattgcttagcccagtttgtatactgtgactacgcccgctcggcagccagcaaatgtgactgccctcgttgctcaggtcagggggtgttgcgagttgttcgtgacgttgtcaaacatgctggtgttaaaggagttgagccgacgataaaggaagaagaagttgaagaaatgtgcaacttatgtaatggaaagggcgaagtaagcactgcgtgccgtgattgtagaggacgcggtatggccattgataaaaagcgaactgtacttcacggcgtaccggtacaaaagctctgtagccgctgtaatggtaaaggatacagcaggttgcctacaaccttggcgcgagcacatgttgaaaagctgatccctgatttaaccaattaccaatggtacaacgggtatgcgagcgttatagacaggctggtaatgagatgctggcaggaagaggggcatgcagaaatgctcttgaaaagaataactatgaagtga

SEQ ID NO: 163585 - DNA, 345 bp, Enterobacter cloacae
atgcctaaagaaaaagcagtaagcattatctataccgaaacattcaaacactctgcaaccgatgttcgtgattacttagctcattatcatgaggatcctaaggaaatcattgataaacagttggatgagtttgaaaacaaagtaagcatcttccccgaaggttgtcagatctcacgcgatttgtctgctttagggtgctaccgctaccgcgaatgtataacaaaagacggttaccgcattttgtattccttcgatccaaacgcgtatgacttgactacgcacgtgattcttggtcaaaagcagtcagtacagcaactgctttttgaccgtatcatctctatgtga

SEQ ID NO: 163586 - DNA, 555 bp, Enterobacter cloacae
atggtatctacgacattaaaatttggagggaaaataattgaggagctctctcaaaaaatcccttcaacattattcgctttgaatgagttagtcaaaaattcatatgatgcattctctccagatgtaaccattactgtagtcccatctaaattaatgataactgtttctgatcgcggaaatggcatgtcattagaggaaattaattccctgtttcatatttcaaaaagcacaaagagatatggatatgaattaaagcaaaatggggttactagaattattcaaggctcaaaaggacttggttttttatcagcctttaaatttggtgataaagttgagtggaaaacatgcaaaaatggtatttgcagtgttttctctattaaaaaaacggaccttgttaataaagatgatgtttctgggattaatattcctatagaaacagagcgttgtgacgaaaatggaactgagataagaatatatactaatcagcatttatttcagaatgtgaaagtagtcagcttttttatgtggaatatgactcttctaaagaggaaataa

SEQ ID NO: 163587 - DNA, 564 bp, Enterobacter cloacae
atgaccactttaaatcaagctgtaaaaattgaatcacccgttgcaagtatcagccacctgttaccgttcgaacagaaacagcatattgaaaagctgtatttcccgagagtacaaaaggcttctgaaaagatgtctaaagctgaatctgaatgtcaggatgctatagagtcccgctcagtgcttattcaacaaaagaccgctgaatatttggctaatccttcagaacgtcacggattcattgtgaagcaggtttacccaactaaccagcaacaagtgattcaaagcatggctgaacaaggttatatggttcatcgtgtaggaatgggcttaatctatttcatctcaacaaaaaagaatgctctgaaagacgcaactgacaaggcaaatgctgaagctgagatgtcaattgataagatgattgagcgtctgaaggtaaaagcgggtgaggctgtccaccagcgaaacaagattgtgattgaagcccgtaaagctctggatgctgtaaaaaactttactgattacctgagcgttattgtaactgactctgaagaggtaacagaataa

SEQ ID NO: 163588 - DNA, 564 bp, Enterobacter cloacae
atgttgttagaaaacggatggctggtggacgcgcggcatgtaccgtcgccgcaccacgactgccgcccggaggatgaaaagcccacactgctggtggttcacaatattagtctcccgccgggtgagtttggcggtccgtggatcgatgcgttattcactggaacgatagatcccgatgcccaccccttctttgctgagattgcgcatctgcgcgtatcggcgcactgtctgatccgtcgtgatggcgaagtggttcagtatgttccttttgataagcgagcctggcatgctggcgtgtcgatgtatcaggggcgcgagcggtgcaatgatttctctattggaattgaactggaaggaacggacaccacgccttacaccgatgcgcaatatgagaaactggttgctgtaacgcaaacgttaatcgggcgctatcccgccattgcagacaatattacagggcacagcgacatcgccccggaaagaaaaaccgaccccggcccggcgtttgactggtcccggtttcacgccatgcttaccacgtcgtcagataaggagataacatga

SEQ ID NO: 163589 - DNA, 942 bp, Enterobacter cloacae
gtgaatcaagatgctttagtcatagctagatccattttggagctcaagcaagatggagatgtgctcaaggactatatttttccattctttgttgcttttttttcagctctacttggtgccggtgtggcttattcttttaataaaaggcaggagcggcacaggattgagagggagcggtttgatttggcaaataaattattgtctgatgtaactttagctttgaattcgctagtatcaataaaatctaactacattggtttgactgaggttgatccatataaaagagcattttcaattccatttactatgcttgatgaaagaagtttgggtgtcgatatcgcaaggtattattttatcgagcctaagcaaacgtgtaattttacaataatgcaaaaaatttcccgctggattaatcaaaagattgttcgtgttgttccatctgaaccttcaatggaagatttcggtaaaagttggcggaatttaatgagggtaaaggcatttgtaaataattataattatattctgtttgttctgcacaaaaggaatgcaatcgaggaggatataaaaaaggaaatccaaactatctgtcgtcagcaaaaggtcgatcctcgtaaagttagtctagaatttgtgctattacatttggaaggggaaaagttagttcatcatgttcatttgacagagctttttatttctctactggatcatgtcttgaaagaaatggattcttttgtgaattgttttcctgatatagctgaaagtaatattgaaatgaagatgattggtgaaagggcgaaagttgttagggttataaacgatcgccctgcttatttagcaagtcttatcccaataataaagccagattttcgagctttatcaaaaattgtcgggagaaaccttcgtgaaaccgaacaaacatacacattcagagattggtattga

SEQ ID NO: 163590 - DNA, 234 bp, Enterobacter cloacae
atgaaagttgaattaaccattgatcgcacaaagaaacttccagatggagccgtgccagcgctggagaaagagttgctgaaacgactacataaccggtttgataattgcagcctggttatccgacgcgcaggtactgatgggttaagtgtttatggcggtgagaaggacgcaaagaagacgatagaagaaattctgcacgatacctgggaaagcgcagacgactggttcttttaa

SEQ ID NO: 163591 - DNA, 399 bp, Enterobacter cloacae
atgagcaacatacgtagaagcaaacatgacttacatccttttgacccctatataaaatggctagctaatcgcatttttatgattggatcttggatagtagtcatggcattagggttatacctttcggagcattattctcagtggagcatcctgccaagatttggggcaattggaataatgattggtacattactaacgctctctcctctttttgctgatgggatttacctatctcaaagtgaggcatttagttttggtagccttgatgatgaaggaaagacgagagtaacaactgaagagggtcggaaggtttcaatcaacattttttggggggtgatactaatagttttctcgtccttcattaatgcttttggagactatcttggtgactatctatga

SEQ ID NO: 163592 - DNA, 390 bp, Enterobacter cloacae
atgatcacacttaccaaagaatggctattgaagacaatcgcggagcttgaagaagagcgcgatgcgacgccaggagcagtaaacgaagacgcggctatggcgcttgctgcgatgaaactagcgctggcatcgctcgaagcggagaaaggtgccgagcctgtggcgaaggttgagactgttggggtttgttggtacgcagataacggcgtgtctcgcaaacctgctcttggtacagagctattcaccgccccgccagcgccgatgttgccggaggaaatgccaaaaggcctggcaggtcagattgtcagcctgctggcgcataacattggcgataaattattggcacagaaaatctggaatgtctgccgcgctgccgcaaaaggagagtga

SEQ ID NO: 163593 - DNA, 921 bp, Enterobacter cloacae
atgagccagctacaggatatcattactcttctgagtaacggcgatgaaggaacgaccaatgcattgcttcaaacaaaggtatttctttactctataggcaaaaaagatctgtcgccttggatagatcacgaaataaatggttatccctctatcaaagatgccccagaatacagggtagttaaggctagaattcttgctaaccttaacaacggcttccgacactacaacagctttcagcttccgctcgcttacttaagcaagaaggattataaggatgctcatgaatctgtagtaacaatgtcaattagccaaattgagcagttggttattaacgcaggtgataacccaaacctacagcaacatattcctttagatttagctcgtctaaaatactgcaaatccattgacgatagttatgaaataacaacatgttacaaggaaatagcacttcatagctttacggggattttaacgcaagtacggtcacgtctattgagtttcttattagagctatcagaccaaaccgctggaatgccagaggagaaaagcatggcggataaattaagaaaggtggatacagattctatttttcatagcgccatcttcggtgataacactgtaataaatttagggcatgagaattcttttactattaataatcaagtttgcaagggtgacttacccgctttaaaaaggactcttacggagaagggaattagcgaaactgacgttaatgatctggaagcagcaattattgctgatggtccaatcgcgccccggagcaactcctatggcaaaaatgttagcacttggttttccaatgtaataacaaaagcggccaatggtacgctgggcattggggtgactgttgctactgaagtgcttaccgacagcttaaaaagatatttcggcttacaatag

SEQ ID NO: 163594 - DNA, 405 bp, Enterobacter cloacae
atggaaggcatcctcgtgctgaatcacgtggtcagccgccagcacaagcatcaaaggatcgcagtcagggctgctgcgttttgccgccagcgccgccagggcgatagcgggtgcagtgttacgcccggcaggctccaggatgatgttttctgtgcgtttgttcagctggcgcagctgctcggcaacgataaaacggtgctgctcattgcatataataatcggatcattgcatgccaaatcgtgcagacggttaactgtcgtttgcagcatggtgagatcgcctttcaggcgcaggaattgtttgggataaagaacgcgagacagtggccacagacgactgcctgttccaccagccataattactgggaaaatttttctgtgattcattttgttaactcattctaa

SEQ ID NO: 163595 - DNA, 564 bp, Enterobacter cloacae
  misc_feature (431)..(440): n is a, c, g, or t
atgaaagtagcaatcgttcatgagtggttcagttcctatgcgggttctgaaaaagtggttgagcaaattttacgttgttatcccgatgcggatattttcgctgtatgtgatttcttaaagccaaaagaaaaacattttcttaataataaaaaagtcactacaacatttattcagcgtttgccatttgcagcaaaaaaattccagtcttatctgccgttgatgccgttggctatcgaacagcttgatatgtctgcttatgacgtagttatttcaagcagtcatgctgtttccaaaggggtgatcactggccctgaccagattcatgtgtcgtatgtccattctcctatccgttacgcgtgggatttccagcaccagtatctgcgggaatccggcctgaacaaaggtctgaaagggtggcttgctaagtatcnnnnnnnnnnattcgtatttgggattaccgtaccgctgcgggcgttaatcattttattggtaactcacggtttattgcgcgccgcattaacaaggtttatggcagacaagcagacgtcatctatccgccggtga

SEQ ID NO: 163596 - DNA, 213 bp, Enterobacter cloacae
atgtacagcagactgttaaccatatgcctggcgacgatgttgatcgcgagctgcgtgactcgtggaagcgtcccggtggtggttgataccacctgtgattgggtaaagccaatctaccttactgataacgacattgacgttcttgacccccagaccaagaaagacatcctgacacacaacaaagcttgggagcgtcagtgcggaatgttttga

SEQ ID NO: 163597 - DNA, 1752 bp, Enterobacter cloacae
atgaagtcagcagacattgagcccttcatcagacatattcgcttcccttttttcaaaaaccttacagaaggatgtaaggttgactttagctatcccatcacagctcttgtgggccaaaatggaacaaataaaagctccgttcttagggcgctttttggctcgccgaacaactattcactcggcagtttatggttctcaacagatgttgatgaaattaaggatgaagggcgctcacgttttatttatggatattttgatgcaccgacaaacaagatagtagaggttatcaagactcgtatttcaaaagaagacgaccctgattattgggagccatccagacccatacgatcggatgacatggcagcaatgcctgagaagatactgtcacctaatcagttgaaaaccagatggaaagcaattgaaaaaaatgttatatatttagattttcgcgctaccatcagtgcatttgataaattcttttatcattcagactttcatacatacccaaaaaaagattatctccgaaagcgcagtcaaatgcttaaagatattattgacaatgaccttaaaacctacaaaccacacaaagggaaaaaggataaattatttgtcaatactttattagacaaagagaaagttaagataattggtcatatacttggcaggaaatacaaaagcatccgattactggagcattcattattcaccaatgacagagcgccaacaattatactacaatctgaaaatttgaaatattcagaggcttttgccggaagtggggaatttgcagtttctattttagtacataaacttatggactgtcaaaaagcctcgttaattttattagatgaacctgaagtatcacttcaccctgctgcacaatgtaatcttatgaatttcttaagtgaacaagcactgaagaaaaaacaccagatagtcatatctactcattcttcatcgatagtcaaagacttaccgaaggaagctataaaattattttgtcttaatgacaagattggtaaagtggatgtccttcaaaacgtcagtccagaagagtcattcttcatccttggcgaacgtatcgagaagaaaacagttattgttgaagatcgtttagctaaaaaattcgttgagaaagctttaagaataggtggcatgggtcttttgaactccttcgatgtgaaatattgccctggtggggcaggaagcatatatcaaaacattgcagtaccgctgtgtgttgcaaacgttaaaaacgttatttttttactagatggagatcaatgcctaacaaataatttcccaacatcaaattcaattcctgtgaacgaagactccaacctacaagaaattattaaaacgattatcaatcaagatataaaatttcattgtgatggttctaatggggtcgcaaacattaagcaaaaaacgaagatgcaaagagacttcattgatttcattcatgataaaatctccttccttcctgttttaacgccagaaaaattcattattgaaaacactcacggagactataaaacatacagagattccatcgctaaggaaattacggattccaagcaaatcaccatggagatatgtaaactcgacacgggagaagaaaatataactggtgatgacattttcgaaactcaaataagaatattaaataaaatacctagcgaccatgtggcttttacaaaaacaagagagatgctgcaatttttcttagataatgatactatcaggttatga

SEQ ID NO: 163598 - DNA, 738 bp, Enterobacter cloacae
atggaaaagaagtttgagcttttgaggaaaagaatcaaaaattctcaacgttttgtaatggatgcagtaatcgagaatcacaatgttgatatgtgctttttatgtggttctgtaaaggagattacacgcgagcacatcattccacaatgggcgtttgaatcaaaccacgaaaaaggattggttaacaagaaaaataaccagacagtaaattatattaaggccaccatccctgcgtgtaaggaatgcaattcagaactgttaggtgcgttcgaagataatcttaaacgggttttattacacaaaaaaggcgacgaactaacgccaaaggatttggattgcattatatggtggttacagtacctaggctttaagttgcaacttatggatcttcgctcacgctttctaagattcaaaaataaggattacattccgtatttatcacagattccaattgccatgttttggggagacattgataccacgcctaataaggtattcaggattatcaggaggagcaggcgtgcattaatgaccaagaagaaaaacgcgaagcataactcattaggtgtttttgaaacatctaataagcattttcatttctttcacaaagtggatgaattcatttttattgaacttcctcaagtacagaaagcgttcttctttttttacaataaagaatttcaaaatcatcttgaatctcataaagagcgcatggatgttataaaaaaattctattaa

SEQ ID NO: 163599 - DNA, 225 bp, Enterobacter cloacae
atgaacagagaagttatgacgatttcaagcgaaaggctggaggtcatgcttaagaatacagcaagagagaccagtgctgcgactgttgccctgctctcatcaaaactggatttattgattgcgcacatttgtaaatctgaaatgaacaggacggaaatcatcgaactgttggggcaggaatccgcaaaacttcacaattcggttactgaaataaaaatgtattaa

SEQ ID NO: 163600 - DNA, 282 bp, Enterobacter cloacae
atgagcattcacatcgaaatcggtgataactgggttattaccagtgacaaatttcaattcattttgaatgaaaagaaggttgttaaatcagggaaaaatactggcgagcaatgcctctctacaatcggctattacccaaaaatcaaccagcttatttctggcctgattcatcaccatattcagcacagtgaaattaagtctctcgaaacaatggctactgaaattgaacggttaggacttctttgcacttccgcttttggtaattggagtgagaaaaaataa

SEQ ID NO: 163601 - DNA, 831 bp, Enterobacter cloacae
atggtcggagacgttactaacgttattcattaccacggtacacctgtatggggtgacgctggtaacgttcaccgtatcgctgtaaatggtgctggcgcttttgtgtcatatgcaagggcagatcagttagcagcatcactcaagtttgcaaactcagttgcgatcgacaatggggctttttcagcctggaagcgaggcctcgtcattgactggcagaaattttatcagtggttaattccccattatcatcaccccaaattacgcttttttgtaattcctgatgtagtcgaggggggcgaggcagataacgacgcgctaatactcactatgccgcgtttatttagaaataaagctgtgccggtttggcaccttcacgaatcactaaaccgcctggttgaactgtgccggtcatggccgcgggtctgctttggttcctccggtcaatatgcaaccattcgtacacagctctggcatcgcaggatgaccgaagcatttgaaactatttactgcaaacataacttcacgacacaggtacatggcctgcgaatgttggacgggcgggtattggggaattacccattggcaacagctgatagcacaaatcttgcctgtaatgtgcctaagtttgaggtcaaatatccggaactcacaaaagccattcgtgaagcggactatgcgaaaaatctctctgaagtggagctgaaagctgtaatccttaagcgtcgctgtgccatcctcaaaaacacaatcgaagctgtatcccctccttcaattgctgactggcaatcaaaaggcctaactccccttcaactggagttggctatagcatga

SEQ ID NO: 163602 - DNA, 318 bp, Enterobacter cloacae
atgacaataaattctgaacgccaacttaaaaccggcggggatccgcgcacacttgcggattacgctgccttgcgcgaagaaatgaacaagctcacccatccggcacgcccggatgttaactggcaacacgcggaaacgctctgtctgtcactgttcgagcataacggtgtggagctacaaacggctgcctggtatacgctcgcccgcacgcatctcgccggactctacggcatgaatgaagggctggcgctactggctgcactggtcgtccgtcagtggggtacagcagttgacgaacaggctaaacgcgctggatga

SEQ ID NO: 163603 - DNA, 258 bp, Enterobacter cloacae
atggggaacgccaatattatcccgcgacagccacgtaactatctctatcacgcctatctggtctatatggaggcgaatggttacaagcatgtgctgagcctgaaaatgttcgggctggggctgccgatgatgctgaaagagtacgggctgaattatgacaagcggcacaccaagcaggggacacagaccaacctgacgctcagggaagacagcaacggcgactggctgccgaagtgcgatgaaaccgcagcgacataa

SEQ ID NO: 163604 - DNA, 2226 bp, Enterobacter cloacae
gtgtgcggcggctctgaccgctttcgctttgatgataaagaggggcgcgggacgtggttctgcaaccagtgcggcgcgggtgacggactgaaactggtcgaaaaggtgttcggcgtgtcggcctccgaggccgccggaaaggtgaacgccctgaccggcaacctgtcgccggttgctgaggacattattgccgccgctgaggctgaaactgatgccgaccgcaaggcggccgccacgcttgctgcaaagcttctggagaaaacccgcacggccaccggcaacgcctacctgacccgtaagggcttccccggtcatgagtgtgtcatgctgaccggtacacacaaaaccggcggcgtgacgttccacgccggtgatgtggtggtgccgttgtatgacgacaccggcgtgctggttaacgtgcagcttatcaattctgagggtctcaaacgcaccctgaaaggcggagcggtaaaagggacatgccacaccctcgaagggaaaaaagaggcagggaaacggctgtggatagcggagggctatgcgaccggactcaccgtgcatcacctgaccggcgaaaccgtcatggtcgcgctctcgtccgtgaacctcctttctctggcgagccttgcccgtcagacacacccggcctgtcagattgtcctcgccgccgaccgtgacctcagcgggaacggccagactaaagccgcagcggcggcacaggcctgtgagggcacggttgccctcccgccggtattcggtgactggaatgatgcgtttatgcagcagggcgaggacgccacgcgcaaggcgatttatgccaccatcaggccagcggcgcaaagccctttcgacaccatgagcgaggcggaatttaccgccatgagcaccagtgaaaaggcgatgcgggtgcatgagcattacggcgaagcgctggccgtggacgccaacggccagctcctgtcccgttatgaagccgggacatggaaaatcattccgccgtcggattttgcacgcgatgtggccgggctgttccagcgcctgcgtgccccgttctcgtcaggaagaattgcctcggtggtcgacaccctgaaactgattataccccagcaggccgccccggcgcgccgtctgattggttttcgcaacggcgtgctcgatacccaaagcgggaaattcagcccacaccaaaaatcacactggctgcgcacgctgtgtgacgtggactttacgccaccggtggagggggaaatgctggaaacccacgcgccgaatttctggcgctggctcgaccgtgcggccagcgggaacgctgaaaagcgggacgttattctggccgcgctgtttatggtgctggcgaaccgctacgactggcagctctttctcgaagtcaccggtccgggtggcagcggtaaaagtatactggctgaaattgcgaccctgctcgccggggaggataacgccacgtcagcgaccatcgagacgctggaatcaccccgcgaacgcgcggcgctgattggcttctcgctgatacgcctgcctgaccaggagaaatggagcggggacggtgcaggacttaaggccatcaccggcggcgatgccgtgtcggtcgacccgaaataccgcgatgcgtattcggcctatatcccggcggtgattctggccgtgaataataacccgatgcgtttcaccgaccgcagcggtggtgtctcccgtcgacgggtgattattcacttcccggaacaaatcgccccggaggagcgtgacccgcagcttaaggacaaaatcgcacaggagctggccgtcatcgtgcgccagcttatgcagcagttcagcgacccgatgagcgcccgcgcactgctccagtcacagcagaactccgatgaagcactcagcatcaagcgcgatgctgacccgacatttgatttttgcggctatctggaggcgctgccgcagacaaacgggatgtttatggggaacgccaatattatcccgcgacaaccccgtaactatctctatcacgcttatctggtttatatggaggcgaacggctacaagcacgtgctgagcctgaaaatgttcgggctggggctgccgatgatgctgaaagagtacgggctgaactacgagaagcggcacaccaagcagggcacgcaaaccaacctgacgctcagggaagacagcaacggcgactggctgccgaaatgcgacgaaaccgcagcaccataa

SEQ ID NO: 163605 - DNA, 300 bp, Enterobacter cloacae
atgcaggcgcacggcgatacgctggtctccattctggcaccggaactgatggatatcagcgggcagtcaggccggaataaagagcgtgcggttgaccggtcactgatttatctgcgtgaagcccttctgggctggctgacgggaggaaaaaaaatagaatattgtgcacaggacagcgcaattttaacggccatcggattcaggcctgacgcggcttcgcgggtggataatcaggtaaaatattcgcccgcaaaaaacatgatttttgcccgccgtcgtgcagaactggctgcacagtag

SEQ ID NO: 163606 - DNA, 561 bp, Enterobacter cloacae
atggctaagcttaaatatacagttggcgatgtgtcagcaatacgccgttcgattgctgaaggtggtgacgtatggtataacaagaagcttgcgggtgtaaaaaaaaatataaaaaaacattttaaagataaatgtctgagatgctgttattgccagcgttcttttaagggggagttcgatcttgttattgatatagagcatatactccctcagtcactttacgctaaatacatgttttccccgaaaaatttaagcatcgcttgcaagcgctgcaatatgaaaataaaaaaagcgagtgtgaaatttatagttgatggttatcataaaaaaagaattttcaataagtcaacctataaattcatccatccaaatctagatgcatataacaaacacataaccagaataaatatagagctagaaaatctatctataacaaaatacgttgttaaaaataatagtcaaaaaggtttttatacttacaggtttttcaggttgttcgatttcgaatgccaagattttgatcttgcacaaggactacctatcattgaaagatacatttaa

SEQ ID NO: 163607 - DNA, 1179 bp, Enterobacter cloacae
atgtttctgccaaaactaagcaaacaatcaaataatcatctcttaattggtgagaatggcgcaggaaaaagcaggctcatggctgcattagcacaagaaatagcttactccgagccttatgcaagcatcataacgattgcaaacactattcataacaaattcccaactttgcgtatcaaaaattactttagacttccatcaaataaaataaatcacgtaagtgatgttatgatagatgctttatcatcaaaaaaatcacaacttgataatggaaaatcatttgaaactctacgacgggtattagcttatattggtttcgatagtaagatcgaagtatcatttaagatattaaatagctctgactcttttaataaaataaactctttagagtatacgaaatccctaaatatatatgatatatcaagagtaagggcgtttttatcaaagctaccagaaagcaaaaccataccaggaatgtggtctagtatcgaaaaaaatccaaaagtcgagatggtaatagattttgaaaaccttggtcttgatttagaaacagagtatttactttctgttttaagactgaaatatcatttaatgaaattaaaaattctaagtgatgtaaaaatatcacttttcaaaaacggcgataaaataaatttaaatgacgctagttctggtgagttaacacttttaacatcgttatcatggatctcaatgcatattgataaaagggcatatatacttattgatgaaccggaaaatagtcttcatcctaagtggcaacgtgaatactttaaaaatataaatgatttattttatcaatataaaccaaatgttatatgtgctactcatgcaccgatagtcatttcaggtgctcatagttcagaatctaatgtaagcatttatagaaccataaacgggaatataaaaaagcttgcggatcaccattcaaaaaacattgaagagatactcacaaatgtttttcaaataataacgcctgaaagtcgatattttagctatcttattaataaattaataaacgatacactaagtgataatattgatgaggctgggctttatcatcaattgaatgaatttaaaataatcactgatgaccctaagcatcttgatataattaattcggtaccaagtataatcaaagagattagaaaacatggctaa

SEQ ID NO: 163608 - DNA, 798 bp, Enterobacter cloacae
ttgaaaattcatagttatgaccttctaatcagttcacttagcatggacatcagaaaaggtactgaggtatgttttttatttggctcggcaataagtcttcccgatagtgggatgggaatgccctctgttgatgagatggttgatatcatcattgattaccttacaaaatatggtgatgatggattagaagcacacctcagaaacatcaatggatcagccagatatcaagcggccttcgaatatctcttggcagtaggaacacaggaagatgtcaaatctattctgaaaatagctgtcgacagagctaaagatgcaaatggaaaatgggttatacctaaaacaatacgtgatttcacaaaacttgttgctactggcgcccttaaagtacgtaacattttaaccactaacttcgatccattaatcgaagaatcattgcgcgaaagcgaatttgatataaatagaattgagcttacagacgatctaacctttgataatagtaaaagtcacaataatgaaagaattaacataatacatcttcatggttattatgaaggtgacacccttcatacccccgaccaattaacagcgtacagagaagaaagtataaactgccttaaaaatttattttctcgatgcaaattatatattattggatatggaggatgggatgatatcataaaccagaccataatgagcatggttaatgaaaaaaaggtaaatacgaatttcgctgggcattttattctaacgaagactcaacaatactggaatcaaataaagaatttttcaataacctaa

SEQ ID NO: 163609 - DNA, 2031 bp, Enterobacter cloacae
atgattcgtttaaacgaacaagaaagtgcacgcgaacatattaaggcagacagtagcgtaatggtaattagcggtattggttatgggaagttagaatttacatcatgttttttaagggatgaatatcctgaatacaaagcatttagattagactgttccgctctaaatactagagaagaggcaaaggaacgcttcttaaataatattggcgttgactttacgactttagttgcgtcgtgcgatccaaacaaaaccacgatattattatttgataatataacagagctcaatgcagaaatgctaggctacttcaatgaaataatcagtatattaaaagattatgatggtggcttgaaaggcgtgttcttcacaaatagaaaaattccgctttcaattaattccgtagaacttcaacccctaagccttgttgatataaatgaatatttacgtcaagacttgaattacccgctcaccgcagatgaattagagagaatatttcaaagatcctctggccttcctgtaaaactggatagactaaaagactacttttcaatctccacagtttcacatgtattgagcacccccaatgatggtatcgatagtgaaactgcccttcttacagatagcattccaaaacatttggtggacttaataactgaactttcaaaatcagaaagcgaagaaaataaaagagtttatactttattaaaagtgctatgtgttatagaatgcggtgaaacgccagaaaatatcatgaggcaatttagaaattacaaatttaacctaagcgatttcttacgtttggttaataatggattaatttattcggtcacagtacctgacttgagggatttcaaagtgaatcgagttaatccgataataaaagatttcgtcaaaagtaagattgataaagatactctcgaaaccattcgacaaaatgctatcaaaatggtttccggtgacatttggttaaataaacacgttaccgtatcaagaacaacaagaattttacttaacaacattgatttccagccaggaaacgcccacttattaatactagaatcattaagaacagctaacgaagaaaaggaattaaacatttaccgagatgcagcagtgtcatatgcatactttctagaaagaaaatgccgttataaagaagttgtttctttcgttaatgagatctctaattggttcacagaaaagaatctagcgtattacagattgaaaaagtaccttgcagaaagtatgagaatgcttgacagagaagaagaagctattactctcttagaaaaaacacttgaggactttaatgataaaagtccactttataacagatcccttcatgagagcatgacgtctacacttttgcttgcgtattctgaatgcaacaaagaaaaagcattcatgatggcagaaaaaataaaaaaagcttctgaaaaaaatagttaccgcagattcttagctgagagtattcttgcggaaaaattaaccggcacagaaaaggttgacaaactgaaacgcttagaaaaaaaagcgaggaaccacaacgaaataattattgccaataatatatctttagatatcgcggcacttgactctacgtcgacggatcgatatatcaacacagttctatcctcagaaagctctgattataccagggtacgtgcaatattaaaaaaatcagagggtttgctttcaaactccgccacaactcgaattacgtcaaaagatataattaatttaagtgagtgctatcgatacttattcattcaaagaattgacggtcttttcaatcgctgccatgctttattatggaaagcgctacttcttgaaaatcgatttgacgaattattcaatgtttttctaagcagctcccttgtatggagaatatccggccaaatagataaggagcgtagctatagtgaaaaaataattactgcattagcagtacatgagcaatcctaccctgtttatatagcatatttataccgtcgctctaacgtactaatggagaaaataatcaattag

SEQ ID NO: 163610 - DNA, 447 bp, Enterobacter cloacae
atgagtgaatttaagccctttgacgaccggctcaatggtctgattgctgccctgtcaccggctgcgcgccgtaagctggccggagagatagcaaaggagctgcgcaagtcgcaacagcaacgcatcaagctgcagaaaaccccggacggctcgccgtatcaggcgcgcaagcgtcagcctctcagagctaagaccgggcggattaaacgggcgatgttccagaagctacgcacaagccggtacatgaaagccactggccgtgaaaacagcgcggtggtggaatttacaggcaaagtgcagcgcatcgcccagattcaccagtacggactaaaagaccggcctaacatgcatgctaaggaagtgcagtacgcagagcgcccgttactcggatttaataaatatgatgagtttttaatagaaatgctaattcttaggaaattgaactga

SEQ ID NO: 163611 - DNA, 159 bp, Enterobacter cloacae
atgccgggaagcaacccggccactaatggtgacctgagcgccgatattcgcaggcttgagcacgcgctcgccgcctgcgcgctgcaggttgaaaccgtcaaagactgtcaggataaactcgatgaagaaagcacgcagcctgcgcgaagcgctgattaa

SEQ ID NO: 163612 - DNA, 318 bp, Enterobacter cloacae
gtgccgaaaggggaaatcaccgagcgtcaggcggcggcgaaccttgtcgcggatgtgctgaacgtcgagaaacgtctggccgtatgcgcgccggtgaaaataccgccgcaggtttacgacgcgctggtcagtttctcattcaacgtgggaaccggcgcggcctgccggtcgacgctggtctcgtttatcaaacgccagcaatggccgcaggcgtgcgaccagctcacccgctgggtttacgtgaacggcgaaattaacaaagggcttgaaaatcgccgcgcgcgtgagcgtgcctactgccttagggggattcaatga

SEQ ID NO: 163613 - DNA, 651 bp, Enterobacter cloacae
atgacaatattttttgacaaggcattgtcaaaattaaaagcaagaacagctgtacttgatagtgcttttgaaaggaatttgcttgttgcaaatccaaacaaatgcgcagataggtatgctgttcaagaaggtttaatgtcttctttgtggcaggcttggtgcatgtattgccggaccataatatttggttcgttaactgatgggttgaccgtaaatggaaacagggtttcctctacatattctaacttaaccgatagagaattggtttttcttgcgcaaaaagcttcgcagggatctaatttggcaacaattactgtgagatctgcaccgccgcatatagaaatgacatggggggatgctattaagctaaacccagttataaccgctttcagtccctcaaacgcagctgttcttctaagtggattgggtacggttagctttctattagatttgcaaaagtttagaaacgcaaatgcgcatataacgtccttcacaataggtgaagttaaaaatgcgcaagtaagatatacacacacaaagtttcgtcatccctcagatacaatgttttggatcgatcctcaaacgaatgattatttatggaagtcatggatagaggaaattgaattgatttctgaggctatggctcagtag

SEQ ID NO: 163614 - DNA, 1077 bp, Enterobacter cloacae
atgttaattaattccagttattatagtattgcagaacttgtcgatatgctttcacgccgagacttgatagttaattcaaactatcaacgcgcagcagggttatggccagaggggccgagcagctatttcattgatacgatattagagggttttccatttcctaagatatatctttatgaatttatgaatcgcactgagcgtaagataaaaaaggaaattgttgacggtcagcaacgtatcacgacaatacgtagatatattgataatcaatttcgagttaagggtgatagccaatattctggattgctcttccgtgagctaccaatagaagtgcaagaccaatttatgtcgtataccgtttctgctgatgtaataagaaatgcaacgcgcagtgaaattttacagatgtttagacgaatgaatgcctatactcttcctcttaataacgcggaaaagcgtcactcttcctatattggggaatttaaatggtttattaatgaggcatccgatagtttaaatgagtttttcatagagtatggtgtctttacagataggcaaataataagaatggctgatgcagagtttatttcagaatgtttgatttctgttgagcgtggtatagttagcgctagtcctacagatttgaatcgtctatatcaacaaaatgatgaaacttttgctaatagaaatgagttccatcaaatgctaactgaaacattcagctttatttctgctaattttagcaatttaagacagtcgttcatgatgaagccttatgctcttcactccctgattactgcattaatccatgcaagatatggcattcaggctattacaaatgaatacgcaattccgagattaggtgtctacacaacagatattgccacagctgcaaatcgcctggagtctttggctctcgctcatgaatcaaaggatgtatctggaccattccacaaatatgtatggggaacagaatcaagtaccaataaagcaccacgaagagaggcaagagttttgacgatcttatcggctctgggttgtcaaattggagatcaagagtatgacaatattttttga

SEQ ID NO: 163615 - DNA, 573 bp, Enterobacter cloacae
atgttttgcgaagaaaaagtagctcagatggctgcttacctgctacttaaacgtggcgggcgcatggcatatctgaagctaatgaaattactttacctttcaaatcgcagttctctcatcgagaggggcaggatgatgggtgaggataaccttttttcaatgaaacatggtccagtgatgtcaaacactctggatctgattcgcaacaaacataaaaagggcggaaagtactggtttaggctgttgaaaacggaagggactgacttggttcttcgccatgacccaagaaaggttgatgtggatgaggttctcgacagtttaagccgatccgacctaagaatactcgatggtgtttacgccaagtttgggcatatgaatcgctttgagctcagggatatgacccatctaaaagagttctgtcctgagtgggaagatgtaggcaattctaataagccaatcgacagaaagctaatcttgatgtttgaaggcaaaacagaggaagaggccaataacatcattcagcatatgagcgaatcagaagagctaatggaatttagtgctcagttaagatga

SEQ ID NO: 163616 - DNA, 654 bp, Enterobacter cloacae; identical to SEQ ID NO: 120272

SEQ ID NO: 163617 - DNA, 174 bp, Enterobacter cloacae
atgacccgtgttcaggcgaaacccgtacatgaaaaagttgcggaattgaagcaagtttctattagccgtaatcagaaagaaatgattgaaaatcttaaagatttaggcctcttaaacacgcctaagtttactttagcgtatggtccaacagctcaagtttaccaaccgcgttaa

SEQ ID NO: 163618 - DNA, 885 bp, Enterobacter cloacae
atggataacttagagactacacttgaagggtatatcaaatacaagctcaacgaattcaggctacagtttttccaagaatgtgacattattacatactacggtgggattactgattgggcaaagtttgtttatcaaccagttatagaagaactaggtacttttgcccttaaccgtgaacataggtttcttgtgatattgcttcaaacaaatggtggtagtgttgaggctgtagagaaaatggtagaaattactagacatttctatcatgaagtctattttatcgtgccggatagtgctatgtcagctggaaccatttggtgtatgtctggtgataaaatctatatggactatgcatcatcactcggccccattgatccgcaagttcaatcctctgatggtaaatgggtcccagctttaggatatcttgacaaagttgaagaaataatcgccaaatcagcttcaggctcaatcacgcaagctgagttaatgatggtcaacaatttagatcttgctgagttaagacgttacgaagaagctcgcgaattgtccaaagaccttctaaaaaaatggttggtagaattcaaatttcgtgactggcaagtgcatgaaacaaatgctgctaaacttggtcagcctgtgacccaggatgagaagattgaacgagctagagaaatcgccacggtgctctcagacaacaaaaaatggcattctcatagtagaacaatcggaatcaatactatagtttatgatctaagattgaagatagaagattacacaaaccagcaagacatgcgtttagcgattaacgaattgcataagttgttgaatgaattcaggtataagacaaatagagaaatcgtagctataagttcgataccattttaa

SEQ ID NO: 163619 - DNA, 123 bp, Enterobacter cloacae
atggtattgaacatgctatccgctcgtttggctcagcaagtgcacttagttccgctatcggtgtttcaaaaatggcagtctccctatggcgaaaaaatggcgtgccggcagaacgggttttaa

SEQ ID NO: 163620 - DNA, 1371 bp, Enterobacter cloacae
atgcacgaaaaattaacagagctttatgagaagttatcaaatctgcacacaactgtaagtgagatagcattcccgcgtgaaaatttaattgaactgggtacttatacatttccgttcctaaattccgaggatttaaaataccttcctgaaatgcttgcacataaggttgggaaaataaaaaaatacacaccaagcaatgatgacattgcttctattgattcaatcattgaggcaataaatcaagcacagccgaatcttcaacatttgaatcatgggcaacctaatgtatctggcccagcaattcaatcttatttattatcgatgttatttattagcaatgaaataaatgaactgttttcattcgaagtgctttcgaatagggaacttttaccaaaaagaatactaaacagattagaactctataactctaatctaaactccatcgcagaggaaacaggaagtattcaggagaaaataaacacaatcaatgaagcctatgatgctgctgagggtctaccaaccactttaaaatcccttcgcgaaacaaatgaagaaatttcaaaactaaaagacaactcatttgaaaatgaaagttcaattcaaaaaaacctcaatgcttcagaaactgcattaaatgaaataaatacaaccaaaaacaaaatcaaagaccttagtgaaaacatcacttctgatgcagaaaaataccttaaaaaccttaaaaatcaagcacaaaactatattgataaatgcgaggaagctttccgaacaacgacatccaaaggtttggccggtgcttttgaagataaagccaagaaattaaatcgtagtattcaattttgggtagcaggtttaattggagctttaacatcaggtgcatttgtgggatatactcgcttacacgcgctagagggatacttagctgatcctaactcaaccggtttaaaattagtaatacaattaatactatcagtattaagtgtgggtgcccctctatggtttgcatggctagcgacaaaacaaataggtcaacgttttagattagccgaggattatgaatttaaggcctcggtatctaaagcatatgaagggtatagaagagaagcactacagttagatgaggatttctcgcaacgattatttggtaatgctttatcacgtttagaagagccaccacttcggtttgtagaagaaacggcacactcttcaccattgatggaaatactatcatctgataacttcaaaaagttggttgaacaaggtggtgaaaaattcgatgcagtgctcgaaaaagctggattacaaaagaaaaataacgaaagaaatgagaaagtaaaagaacatcaagaaacaataacggaagaaaacaattag

SEQ ID NO: 163621 - DNA, 789 bp, Enterobacter cloacae
atgaggatggatgcaggaactctcctagattatctaaatgcaacacttgaaaattctaacgatcacgcaaatgaataccctcaattaatgtatatggttcttcaaatggataggatatttcatgatgaaatttttgactgtgaatttaatgtaaaccctattgccggttttctggcaatgaattcctatacgttactgctgagcactgtacgacaggcactatctggacatctggtaacagtctttccgattgttcgtactgctctggaatccgcctgttatgcttacctgatagctcataacgaagcgatgggaaagatttggttaaataggcacaaatctgagaatgcactccagaagtgtcgtaaaatgttttccgtaaagaaagcttcaaatgaattaaaatcgatttcccctgaaatggctgaatatgtgatggcacactatgaagcagctatcgattatggggcacatccaaataaaaaagcagtctttagtcacttgagtgacatgggggaagtcgatgaaaggtatcatggttttgagcttgttggtgtttatgggcgaaatagctggcatgtgaactatgcactacttatttgcacagaggttggccaggcaattgcatttctgcttgcagcatgtaccgataagcatcctctgcttcatgatcgtttagaagtgtttactgagtggattaatgaaaagaataggatggctgacgaactcaatggcgagccaataaaatacactggaccaatgtattgctcagttataccaccagagtaa

SEQ ID NO: 163622 - DNA, 186 bp, Enterobacter cloacae
gtggctgaaacaacactcccgttcctgaaaaaagcgtcagagctggctcatatggagcctttgccggatgacgttatcgaacaactggatgctatctgcaaagaggctggcgaggctacgcctgaaggcaggatgattggcgtcctgatcggctcggtttacacccggctaaacaaccctgattaa

SEQ ID NO: 163623 - DNA, 345 bp, Enterobacter cloacae; identical to SEQ ID NO: 81398

SEQ ID NO: 163624 - DNA, 228 bp, Enterobacter cloacae; identical to SEQ ID NO: 10398

SEQ ID NO: 163625 - DNA, 3309 bp, Enterobacter cloacae
atggccagaacatctcaacaacatgatatattacgagcatggcaacgtattgaattttttcacccttacactcttgagcataaagagagtttcctgagaatttctcttgagaaactcatcaaatatggtgatattttacttccgtggcattcagaggaattatgtcaacaacaacaaatcccgcttaaatctaactttactctacatattggtatctttgacaaaagcattgcgaacgaaattagccgagaaatattaggtgacaaccatgatgaagagtgcgagcagcgactgaatcaggaaggaatgacatgttttgccaaagtacagttaaataatgaaggcgtaccagccctagataagttatcagttagctcactcccctgggctcttgggcatttaaaaaatgagcgattccagaagcttgaatcaaagatatttgccacggactgcaggcaacttgccgatacgctcagtatgttcaggaatacactaaaaccagcacaaaaagagggtcctggtgtattacgctctagtgacatcattacgctactgctaacacatttagttgagtgggctgattttaggcctgaatggcaatatgcaatacaaattgaatggtttgagagtaatgcaaccagagaaaaatctcaacaggatgaattagatgaggatgaagcagaaaaaatattttcactccccatcctaaatagtttctatttcgaagacctggaaagcactattgaggaactacggcataacaaggggaaagctcttaatagttatctttctcaagggataaatagaaagccagacctatactcaaaagggggccttgcttcaattattgataaattgcatccaagcagaatgccgcaaggacgatggccttcagagccaaatcataccatgtcgctaatgcaacaatttacgataaatacagctgtagaagaacttgtagatggaggccttttatctgtcaatggacctccaggcacaggaaaaacgactcttctccgagatcttgtagcacataatgtagttgagcgtgcgaaagtacttgcaaaatatgacaacgctgaagatacattagatcagcagggctttatcgtcccggaattaaccgggtacgaaatgatcattgcgtcttccaataattcggcagtagaaaacatttcaaaggagttaccgcaaaaaaattccctggcgaaaaattttcaaaactttgaatatatttgtgctacagctaaccaagttgcagccgaatacttaccaaaaagcaaacgaaaaaaatacaaatcattaagcggcaatgaaaaagaatttaatatttttcgaccacttgatgatgataaactgtgttggggcttagtatcagcggcgttagggaaaaagcataatagggaaaacttttctcaaagactattatttgatgaacatttcttacgcaatactttatctgaatcgcagcgctcagataaagataatttcctgagcctgtggcgatggaaagcgtgtcaacataagctttcattcgctgattctaaaaagcattttgtcaatgcccttcgtaaagtcgaagaagagcaaagactgttagaaacctactgcaagctcttggatgaaaaaccagacaatacttatactgagctttcttttgagttggaaaaaaaaacaatccaacgcgaaaatgacctcaataaaatcaatgaattggaactggaaagagatatcatttccaaaaaaatcgatcatacaaatcgtcagttaaaactcataaaaagcgaagcacctggatttctgtcgcgtctatttaatagaaaaaaaacaaattcctataaagatctaacaaataaaacaaaacagcaattagttgagttgacaaaacatttgattgagaaaatgcagcacgttgcggacagtaatattgagctgataaaaaaccaaacggcaatccgagatatagagtttagattgaatgaaataaaaaaacaaaaagcaacaagcgagcaaaaattaaatgatttacaaaatagattccataatatcgctatccctaaccataatttatccattgatgatgcaaatctgcaacgtactgcattctggcaaaatgaggagataaatcgtctgcgttcagaactttttctgacagcgatgagcttacatgaagcatggctatatgaagcaatggagataaagcgtttcaagagtttcatttttacactaaacaaatttctcagcgctcctcaacatcaccctaccccattacgatgctggcaaacgctatgtatgttcgttcctgtactgtctactacttttgcctctatcggccgaatgttgacgggagtgaaaagtgaagaaattggatggttaatgattgatgaggcaggtcaggcatctccgcaacaggctgttggggccatttttcgagcaaaacgtgtattagtcgtaggagatccattacagatcgagccggtatttactgcctcgccaagtttggttaaacgtctctgcgaagatgttttacaagaacgagcggatgactggaatcctgcaaaactatcagttcagcagctggcagatcgcattaaccattggggttgtgaattagaagtaatgaataaaaatatatggattggtatcccattatgggtgcatcggcgttgtatcgagcctatgtttagcatagccaacaagctcgcttataataatcgaatgatccatggtctcgatgctgcaaaaattcgtagtcaatttgtaaatggaaatcttgataatcactggctcgttgcgaatggcggccagggcgaacgacagtatcgggacagccacgggcaaagcctacttatattacttgatcgtcttttatatgaaaatgtccctctggagtcaatttttgtaattaccccttttaaagcggtgaaatcggaagtatctaaacttatagcacaacgccccttgcaaatctggcaacaatcctcaccattgattaaggcaaaaagtattaagcaatggcaaaaaaattgtattgggacagtgcatacatttcagggaaaagaaaatgatattgtaattttcatccttggatgtgacgaagaaaataatggcggtgctaagtgggcctcaagcaaaccgaatctgttaaatgttgctgtaacgcgcgccaaaaagaatatatttttcattggtgatccgaatgtttggagcgctttacctggatttaatagtgttacatatactctaaaagagcttcagcctaatgacattgcaatgctcagcgaccgtgaacattttttagagctttaa

SEQ ID NO: 163626 - DNA, 1350 bp, Enterobacter cloacae
atgaaacttattgccaacggattaaatggagagttttttagatcatgtttaccccctccaggtaaagaaattgatggtgttgttgccgccattgcttatggagatgataaaaccacgctcctcgagcattgcataaaaaaccatcaccgacttgatatttggatgcgatatgatcatacagttcctgtatcgcctgcatttttatcaaaacttctcgcaaacgttaaaaataatattttttgtaaacttataccagattgcctgcacagcaaagttatttggtggaagggatatggcgcttatattggttcagccaatttaactgagcgtgcatggtactcgaatatagaagccggtattttcttcactgagagtgatttatacagttctaatttaattgaacagttagaggaattcttcgataacttagcgtcacttgactcttgcgttgatcttagtaaagagattattgatgaacaaagacaattattaaaactaaaagtcgaattagagaaaaaagaacgagagcttatcaaaaagcggaaaatacctgaatggggtggcgtgaattttgttgataacaaaaaaactaaagatagaaggaaagagagtttccataaagaatgggaaagcacattttcaatcatcaagagtatctcagaccaaattaatgattacagacctgcatggatatcagaagatactccaaaattttggcaaaccgatcaatttctacacgcatactattataagaaagttcatcaacaagataatacttatccttttgaggattatcaccgcaccaatagtaaaaacccacaagcagtattgatgaatatgctctcctggtggaaaatccaatcagttcctccgtctaatgaggatattcatcttgggatttacgccccctacattcgcgaacacttgtcaaaaaataatattgactcattgacagaggataagctctatcaaatattctcttacacacatgcaacaatggaccatgtgataaaaatgagcgctgaaacatttggctattcagccaaaacatccttaaataaggaagagcgcgccgttttattcacaaaatggatcatgggccaaaccaatcaaaaaggtatgactattgctgaattgctcaactatgtcctctacggtggaaagccttcattaatgtgggaaaggctctatctggcaggcaaagacgaggagtacaaattccagcattacggtattaactctattgctgaagtggtcggttgggcaaggccagaagatacgcctcccagaaatggcagaaccaataaagccttgcgtgcattaggctatccagttcgcgtgaatatttag

SEQ ID NO: 163627 - DNA, 3675 bp, Enterobacter cloacae
atgaataccaataacatcaaaaaatacgcaccacaggcccgtaaccagttccgcgatgcggtgatccagaagctgaccacactggggattgccgccgataaaaaaggcactttgcagattgcggatgctgagctcgtcggcgagaccgtgcgctacggccagttcgactatccgaaagccaccctcacccgccgcgaccgtctggtaaaacgcgcccgcgagcagggctttgacgtgctggttgagcactgtgcctacacctggttcaaccgcctgtgcgccattcgctatatggagatccagggttatcttgaccacggtttccgcatgctctcgcacccggataacccaaacagctttgaagtgctggaccatgtgccggaagtggcggaagccctgctgccggagaaaaaggcgcagctggtcgagatgaagctttctggtaaccaggacgaagccatctaccgtgaactgctgctaggacagtgccacgcgctgcatcgtgcgatgccgttcctgtttgaagcagtggatgatgaagccgaacttcttctgccggataatctgacccgtactgactctattctgcgcggtctggtggacggtattccggaagaagactgggaagacgttgaggttatcggctggctatatcagttctatatctctgagaaaaaagatgccgttattggcaaggtggtaaagagcgaagatattcctgccgccacccagctgtttaccccgaactggattgtacagtatctggtgcagaactccgtcggtcgccagtggttgcagacctacccggactcgccgctgaaaggcaaaatggactactacattgagccagccgaacagactccagaagtgcaagcccaactggcagccattacgccttccagcattgaaccggaaagcatcaaggtgctcgacccggcctgcggctctgggcatattttgattgaagcctataacgtgctgaaaaatatctacgaagagcgcggctatcgcgcccgtgatattccgcagctgattctggaaaataatatttttggtctcgacattgacgaccgtgctgcccagctttccggctttgccttattaatgatggctcgacaggatgaccgccggatattcgcccgcgacgtgcgcctgaatattgtctccctgcaggagagcctgcatctggatattgctaatctgtggcaacaactgaacttccaccagcagaaccagaccggcagcatgggagatatgtttgccgaaaatacagcattagcgcataccgacagtgcagaatatcagctgctgatgcgtacgctgaaacgctttgtgaatgccaaaacgctgggctcattgattcaggtaccgcaggaagaagaagcggaactgaaggcgtttctcgatgagatgtatcgccaggaacaggaaggggatttccagcagaagacggcagcgaaggcgtttattccgtatattcagcaggcgtggatattggcacagcggtatgatgcgatagtggcgaatccgccatatatgggaaatggcgggatgaatagtgaattgaaggattttgctaaaaatcattttccagatagtaaatcagatttgtttgctatatttatgcaacatgctttttctttgcttaaaaagcatggatttaatgcacaaataaatatgcagtcatggatgtttttatcaagctatgagacattcagaacatggttattagataagaaaaatataatctctatggcacaccttggtgctcgagcatttagtcaaataaatggtgaaattgtccaaacgacagcttggataattcagaacactcatacaataacttatatgcctactttcttccgcttggtagaaggaaatgaagaagataaatccaatcagctaattttacgggataaagaatttacaggcatatcccagcttgaattcaaaaaaatacctggcgcccctcttgcttattgggcatcaaaagaaatattgaagctcttcgccgctaattcaagactctcagaaaagataacaacaagagaaggaatggctactggtgacaatgaaaaattcttacgttattggtttgaaataagcacgaatgaaatcggttttaatatagctgacaatagccaatctgttacctctcaaaaaaaatacttcccttacattaaaggcggtaattttagacgttgggcagggaatctttcatatgtggtcaactggtttaatgatggtcaggcattaaagagtttcgctgacgaaaaaacaggtaggattcgctctcataattataatggcaattatgcttttagagaaggcttctcgtggtcaggaatttctagcggttcgttcgctgtgcggcatgtttcctcaggttttatgtttgatgcaaaagggccaatgggatatgttaataataaaagcgacctttattatattgaggcttaccttaatagtgccgttgctaattatttgataaaaatgctcgcaccaacattggattttaaactgggacatatattaaacttaccctttattgaaacaaaagaagatattgtcaccttagaaaacttgactaaagaggctattgacatctcaaaaaatgattgggatgcatttgaaatatcttgggattttgcgacatctccaataattcaagaacaagagaaaacgattaaatccagtattaataaatttataggcaagtggaaaaagtatgcgcaaagacttcaaaaaattgaagagaaaatcaatcaaatatttattacacaaagtggtttaataaatgaagttaaatctgctgtagaactagatacagtttctcttatgacaaatccatgctttagatataattctaaagaattaaacgagtcgatgcagataaatgatttattaaaagaacttatttcatataccatcggctgcatgatgggccgctactccctcgatcgcgaaggtctggtctacgctcacgaaggtaacaaaggctttgccgaactggtcgctgaaggcgcatacaaaaccttcccggccgacaacgacggcatcctgccgctgatggatgacgagtggtttgacgacgacgtcacctctcgcgtcagagagtttgttcgcaccgtctggggcgaagaacacttgcaggaaaatcttgaatttatcgccgaaagtctctgtttatacgcggtcaagcccaaaaaaggcgaatctgcgctggataccatccgtcgctatctttccacccagttctggaaagatcatatgaagatgtataaaaagcgcccgatctactggctgttcagctctggtaaagagaaagcgttcgagtgtctggtctatctgcatcgctacaacgacactacgctggcgagaatgcgtaccgaatatgtggtgccgctgctggcacgctatcaggccaatattgaccgcctgaacgaacaggtcgatggtgcctccggcggagaagccacccgtttgaagcgcgatcgcgacaatctgagcaagaaattcaacgaactgcgcagcttcgacgatcgcttacgccactatgctgatatgagaatcagtatagatctcgacgatggcgttaaggttaactacggtaagtttggcgatctgctggcggatgtgaaagccattaccggcagtgcgcctgaggtgatttaa

SEQ ID NO: 163628 - DNA, 243 bp, Enterobacter cloacae
atgccctatacgattatcgggcaatgcctctcaccaattatccctatagtcgaaagaaacctgatagtcataaatagtgggggttattttatgtacgaagtggggctgaagaattggtatccattcggcttcaatatcaaaaaaaccattattcacattgttcttagtcggtatacgaagacatatggttatgatctccatgttatcgccgaaattgttagaaaattctgtgctttcacctag

SEQ ID NO: 163629 - DNA, 1326 bp, Enterobacter cloacae
atgttactttctgagcaatatgttgaacaaataaaaagcaagtctgaatttaaatttttactaactaaaagggatgatgccttaatcggagaggaaaagccaaataaaaaggcaaaggtatttttgaaacaacaggtgaaagatataatagatgggttaagccgcgatctaattttcccagatttgaactttttattgattaatgaagcgctacataaagttgaaacgcaaattgaaaatgctgcaatagaagtggataattttctggagctttatgagaataaagttacggttattaatgagattaaaaatgagatcggattattgcaaaagaaaagtagttatatatcaatgcttattgaccgattcaagatgctcaaagattgctatctttccgaccttcagcgaattaactctatatcgcaagcgacatttttcttggagaattttgctgaggagttgtgcgataactgcgggcatacaataaaccattcgccggagataaattatgaagattattacgcttcatgtatggctgaatcagaaaaaataaacatccaactggctgggttgcttaagtcaatcaaatcaaacgaagatgagttgtcatccattaatttgtcaattaaagaaagtgagttcctattgaatttggaaatgccagagtacgaacgcttacatgatgttgatttaaagaactcccggagagtgatagaggaattatatgagcataaagaatgcttattatcagactattctaagcatcaaattataagtgctttggaatccaagggggataatcttgacttggatgtctataattctgatgattttgatgatctgaaagttgatgaaataaatgaggtaataaatcagttaaggtttgtgctcaattcaataaaattcgacgggcgcaccgataactcagtggaatttgatgaaaacaagtatgactttatcataaatgaaaaagaacgttctttatttggtaaaggtagtcgtgctgttatatatgcttgctttgtgatttcgcttgctgatgttttagctagaaagggaaatccgcagacaggctttgtactgttagatagtccgttagttacacacttcgataaaaaaagagaaattaaaaaatcagaagttaaccctttaactttaactgatgcattttatagttacttaataaattccaattcaaccattcaggtcatactaattgaaaataaaggtccatcctttactgtagaaaataatgatgacataaagttgattgatcttaactttgatggtgcaacgggagtttttcctaaaaagagtataaattaa

SEQ ID NO: 163630 - DNA, 543 bp, Enterobacter cloacae
atgatgacgggtatgaataatcaggccggggcgaagatagccccggcgtttatgctcaagctggataacgacgatatcacgcaggctttgagtgaccgccttattagtctgaccatgaccgacaatcgcggattcgaggccgaccagctcaatatcgagctcgatgacactgacggtcagatagctttgccaccgcgcggcggaacgttgacgctgtggttaggctggcaggattccgcgctgataaaaaaagggacgttcactgtagacgaaatcgagcacaggggcgcgcctgatacgctgaccatccgggggcgcagcgccgattttcgcggcacgctaaactctcgccgggaacagtcatggcacgacaccacgctcgggcaaattgtcgagacgattgcggcacgcaataagctgacggccagcgtggccgacacgctgaaagccgtcgccgtgcctcacattgaccagtcgcaggaatcggacgcggtgtttctttcccgcctggctgaccggaacggtgcggaggtttcggtataa

SEQ ID NO: 163631 - DNA, 351 bp, Enterobacter cloacae
atgacggtgcgttatctgggaatgaacagccagaccgggctcagtatctctgaggttgagcatatccggcaaagcgtgcgcgacattctggtcacgcccgttggctcgcgcgtcatgcgccgtgaatacggctcgctcctgtcgcagatgattgaccagccgcagaccccggcgctgcgcctgcagattatggccgcgtgctactccgcgatccagaagtgggagccacgcgtcagcctgacgaccatcacctttgaactgtcagacaccgacggcgggctgtatgtcgatatcaccggcacgcgcacggaaacgagcctgccgttttctctgaccattccaatgagttaa

SEQ ID NO: 163632 - DNA, 417 bp, Enterobacter cloacae
atgtctagtatcgatatggatattgtttctaagcgtttgaataaatcactggatattgtttttttgcgtcatcctattcgcacagcctttgggtttattgttggctatcttatctatatgtgtgtgtataccgctagggggtttattggtgcgaattggttcgagattgatgtggtgcattatataggatgctttattttgggtgttgtactgatgcatataaatacaatcattgatgcctataatggaacagctttggatgagaggctttctacattgttaaaggccgtggaaagtagggctgatatttctaaggagcaaaagagaatgatggttattagcatattaaatcaggagataaagtctctgacggcgcaggatctagatgcggctgaaaaagagattgctgataaataa

SEQ ID NO: 163633 - DNA, 705 bp, Enterobacter cloacae
atgattaatgtaactttgaaggttttagctttattaaaacatatcacaatgagggtggagtatttatttcaaacatctttctctactacgacgcgggatgatgtgatagagaaaatcaaagttctaaataaagagcgaaatgaaatatatgtgcgttatgccgtctttacaaagttgagacgtttaaaagaaaatggtgttgtcattgagcgttcaaaattttttgaaagtaaagagttgcctgatgaggagttgagtgagatatatgaaaatatagagattgttgaatcattgctggagacagagcaagaaagcgcatacgccaataaaaatgaaactgttgtaaatttatttttattaagtgaaaagaaaaaatatttcaagtgtaaagctattgctgttttgactttgataatgagcgcggtctcggttgtttttttaaatgtcccgtattggacagtgtttattggttttgtattgtatgttttgtttgaggtaaaagatcaagtagttagttatcgtgttgcaaaaggattttttgggaccacgactactgaagcaatagaattaatcaaattcattcgtgacaatattgaagatattgactctggagatggaggagggacgggacggaaggtacttaatccaataaaaaatgcaaccatcgatgatacgctgacccgaggggagttacctaatgtctag

SEQ ID NO: 163634 - DNA, 447 bp, Enterobacter cloacae
atgagtgaatttaagccctttgacgaccggctcaacggtctgatagctgccctgtcaccggcagcgcgccggaagctggcctgggagatagcaaaggaactgcgcaagtcgcaacagcaacgtatcaagctgcagaaagctcctgacggctccccctatcaggcgcgaaagcgtcagcctctcagggctaaaagcgggcggattaaacggacaatgttccagaaactccgtacaagccgctacataaaatccagtggacgtgaaaatagcgcggtggtggaatttaccagcaaagtacaacgtatcgcgcggacccatcagtacgggctcaaagaccggcctaacccacacgcgcaagaagtgcagtacgcagaacgtcagcttctcggattaaatattgacaataaaaggtatattgaaagaattatttttgcatttttgacttga

SEQ ID NO: 163635 - DNA, 741 bp, Enterobacter cloacae
gtggctgcggcgctgacgcagctgagtggcgggagcagtgcggatggcctgaaggctggtgccataggggccattacggcctcggcgatgactgaccatctggtcagcgcgctgtatggagataaaaaatccagtgacctgacggcagaggagaaacggctggtcagtagcctcgtgagtatcgcaggtggtctggcgggcgcagcagtgacggatggcagtgtctccatggcggcgacggcgtcggaaacggcgaaggtggaggttgagaataacacgctgagtcctggccatgatgaggaagagcttgagaaagagcacggcgaccgcctcccaaaagtctacaacattgccaggcctggggtgttgtttgacgaagatggtaagccgcttcctggaactgctggtcttgggattggggctgttccgattggtggtaaatctaaagatactcagatttggacagaaaccaagaaagcaaaacctgtgggtaatgcctatggacactggacaaaacatgggaaagaatttcctgagtatcagaatgctaagcaatatgttgatgctgcccataattttatgacaaccccaccgcaaggtaccttaactaaaactcgccctaacggagacacgctgtattacaatcctgcgactaatgtctttgcttcaaaagatataaatggtgtaccgcgtacaatgtttaaaccagagaaaggtctcgaatattggaaaaaacaatga

SEQ ID NO: 163636 - DNA, 942 bp, Enterobacter cloacae
atgtcggactcgtcgctcatcaaggctaaagtgtctttaacggcggggacgtcctctcaggacagtcgttaccacagtaccgacacgcagggcaccaccattaatgccggcgagaatgtctctgttcgtgccggaaatgacattgccggtatgggggtacagatcgcgggtaaacacgtggcgctggatgcggggcgggatattctgctgtcttcctcccagaacacaacccactctgagagtaaaaacagcggcagccagttcagcgtcggtgtcggtgtgagcctgattggtgcgcaaaacggcatctcggtggagctgggggcgtcacagcataagggtaaggaaaacagccagtcgcagcgcaatacgaacagcgttgtccatgctgatgaacagcttacggtgaacagcggacgcgacaccaccctgaaaggtgcggagctggaaggtaaccgtgtggtggtcaacaccgggcgcgatctcaccatcagcagtgtgcaggatacagccagttataacagcaagcagtcttcgtcaggcgcgtccctcagtctgtgcataccgccactgtgttatggtgcctcttccggtagcgtcagtgcatcgggtgagaatatcacccagaatggtaagagcgtcgctaaacagagcgggatattcgcaggcaagggcggctttgccgtcaccaccggaaatcatacccagcttgacggcgcggtgattgcatccacggcgtctgcagataaaaatagcctcgacaccggtacgctgggtttcagtaatctccataacgagagccagaccagcggcaacggctacacggtggcgctttccggcagcgcgggtggcagtggaaacggtgaaaaccgcatcctggcaccggccatcggtacggccaggcaaaagagagccacaccggcacgacctcatcagcggtga

SEQ ID NO: 163637 - DNA, 201 bp, Enterobacter cloacae
atggacacgattgaagagtctggtcaccgctactgtataacatatattcaactatttgatttacatataaattttacaaataccgtcaaggagcaatttatccgtcaaattaagttaaacttcgtcacaggtttcagtgagttatgggacggagggcagaatgacgagcgaagaagcacttttaaaatcaggtttttgtaa

SEQ ID NO: 163638 - DNA, 243 bp, Enterobacter cloacae
atgaactatgcagcctccatcaaaacggcaagcgatctccttttcctgggctcaagctcgtcgcatcaagattacgaggatgcactggagttggtggagtatgtgattgagcatgcccccgatagcccgctggtagaagagctaactcatttaatggagttagaaatattcaagcggatcatctgcaagacgatccgtataattgtcacctcatatcttcgcatcataaaacatgcatcctag

SEQ ID NO: 163639 - DNA, 654 bp, Enterobacter cloacae
gtgaaaaagcacgacggcatatcaaaatacaagctaaataaaatagctacagagtctttgagaaatagtatccgtcttcattttgactcaattttgctctatgagaacggttcgtatccaagtgcatttcagctttcagtcttggcgcttgaagagttctcaaaagccatttgggtagatcactacatttggtcatctgaaactaatgagggctatccagatgttcagtttgagcaggcatggttaaaacttttatacctacatcccaaaaaacagtggaattttgtagcaagagaaatagatgattattcaccgggctttatttcactgatacagagaagggaattagaagagaaaaagcagaatgctatatatgttggtttgtctcgtatgaaaggaggtgttgatatcgatagccgagtttctaccccttggagaattaaacaaaaagatgctaggcagtttatatcagtaatcaatgatgaattactaaggataattgcgagaattgaggaggatgagttttattttgagggaggcaaagggatggatgaggtgtttgattacgaaatatataaaaatcttttgcaatggcctcataaaagcggaatgagaaataataggtggaggaagaaaaaccatctacggaaataa

SEQ ID NO: 163640 - DNA, 546 bp, Enterobacter cloacae
atgggccagcacgcgtcccttaagatccgtctccgggatggcattcgcgatggcattggcgatatacggcgcggcaccgcccgcaatcgcagctttaatatcgccacctgccagcgcctgaatgcccgccgttgctgccgtgatggcgcgctgggtgctctgccccgttcccatgccagactggttaaacgcttcgttatagaaggtctggtacatctggtcatgaattgcctgatcggtaacctctttaccgtcttttttcagctggctgatggcggcgttacgcgcatcgctgcccgcggttttcatcttctcgttggccgcttccgtggccgcaatcttgccgttggtgcgcgcaatatccgcaacctgattgccgatctcgccaatcatttgcgcggtttgcaggcgtttctgctctttctctttgttaaagatcgggtcgatgctgccgttggcatggtcagtgtcacggctgagcgtgctgacgtcctgcttctggttagcctggtcgcgaacaatgatagcaccgtcggctaccgctga

SEQ ID NO: 163641 - DNA, 864 bp, Enterobacter cloacae
atgaaaaatgttgaaagtatgcagccgctgcagaattcgctttccgacctgccgcaatgggtgtctgaacgtatatcgcagcagataaatcagttaatccactatgaaccggtgatcggcattatgggtaacaccggagcgggaaagagtagcctttgcaatgccctgtttgctggagaggtatcgccggtcagcgatgtggaggcctgtacccgtgaaccactgcgctttcgcctgcaggttggcgaccgctatatgacgctggtggacctgcccggccctggggagagtagcgttcgcgataccgagtatcctgcgctgtaccacgaacaactttcccggctcgacctggtactgtggttgattaaggtagatgactgggcgctggcggtagatgagcatttttatcatcaggtgattggggaggcattccggcataaggtgctgtttgttatcagccagtcggacaagactgaacccaccagcggtagtggtcaattgtccacggcgcagaagcagaatatcagccgcaaaatctgcctgctgcacgagctgtttcaacctgtacatccggtgtgtgcggtgtcggtccgtctgcagtggtggttacgggtgatggccgagcggatgataaagtgtctgccacgtaaggccagtagcccggtggtggcgcaactgcagtctccctttcacacaacgacagtccaggaaaaagcacgtgacgattttggtgaaacggtcggcgcggtactggacacggtaagtgctttcccactgataccggctccggtacgggccgtaatacaggccgtccgtaacaccgtggtgtccgttgcccgggctgtctggaatttcttcttctga

SEQ ID NO: 163642 - DNA, 483 bp, Enterobacter cloacae
atgaaaaccaatttaaaattaacgtcgatattctatgccttacttttattcattttttcatgctttagtttcggaaatgtgtccggggcgacgaaaattgaaagttcaccagaatctgttgttcagcatttttatgctgactacctgacagcctggaatgacccggacgttgggcatggtctcgaaaaaagccagagcgctatagacagctttacaacaaaacatcttcagaaactcaaaagtgaggatgactcaggggctgactacttcacgaatgttcaggatatttgccctgagtgggtgagtgaaatttatacgaatgcttcatctttggataaagacaaagccgttatagaattgatgctgggtcacagcgaaagtgagtcaaaatataaaatcaaccttgtccgagctaatggtaaatggctcatagactcagtcttatttgtatccaacgcgactggccattgtaacgataattaa

SEQ ID NO: 163643 - DNA, 360 bp, Enterobacter cloacae
atgttaaacttgtttactcgctatgcatcaataggtgtctttaacacgatgatccactggttggtctttggggcactctacgagttgggtcttaggcagtcgtgctcaaatcttgttgcctttgtgttcgcagtcactttctccttcttcgccaatgcgaagtggacattcgattcaaaagcgaccaaaacacgttacatattgtatacagtattcatgggagcacttgcactagtgataggttggatggcagataacctggagatgaacccaatcctgacacttatggtattctcaataatcagccttatttgcggttttttttattccaagctcattgtttttagggaaacgaaatga

SEQ ID NO: 163644 - DNA, 1227 bp, Enterobacter cloacae
atgcaacagaatgattttgaattactgacggcgtcaaacggcgccccgatcaaaatgtggactcacggcgttcccgtggagccagaggcacaggcgcagttactgaatactgcaaagatgccgtttattttcaaacaccttgcggtgatgcccgacgttcatctcggtaaaggctcaaccatcggcagcgtgatcccgaccaaaggggcaattattcctgcggcggttggcgtggatattggctgcgggatgattgccgttcgcacgtcgctggtggccggtgatttgccggataatctcagcggtttacgtagcgccattgaacaggcagtaccgcatgggagaaccaatacgcgttctcgacgggataaaggcgcgtgggaaacgccaccgaaagaagtggacgatcgctggtgggtgctggccccacgttttaaacaactcacggataaatacccacagttgctgaaaaccaacaactaccagcatctgggcacgctgggtaccggaaaccactttattgaaatttgcctcgatgagcagcagcgcgtctgggtgatgttgcacagcggctcgcgcggcgtaggaaacgccatcggtaatgtgtttatcgccctggcacagcaggatatgcagcatcacctgggacatctgccggataaaaatctggcctattttcaggaggggagtcgtcactatgaggactacatcgaggcggtggagtgggcgcaggattttgcccgccacaatcgggaagtgatgatgtcgcgcgtgctggcggcgctctctcgcgaagtgacaaagccctttattacgcagcaggaggcggttaactgccatcacaactatgtgcagaaagagcatcactttggggaagaggtactgatcacgcgcaaaggtgcggtgtcggcgcagaaagggcagatggggattattccgggctcaatgggcgcaaagagcttcatcgtgcgtggcctcggcaacgagcaaagcttctgttcctgcagccacggcgccgggcgagtgatgagccgaacggcggccaaaaaacgctatacccttagcgaccatattcaggcgacctctcacgtagagtgtcgcaaagacaatgaggtgatcgatgaaacgccgatggcctataaagacattgatgccgtgatggccgcgcaatcgtcgctggtggagatcgttcacaccctgcgtcaggtagtgtgtgtaaaaggataa

SEQ ID NO: 163645 - DNA, 1248 bp, Enterobacter cloacae
atgtttgcaacagataattcaaggacatcaaaatttatttttataactttggcaattatgttttttgtaattacattttttcgccttagattaatgaatcatgctgatgatgtggttttttcacacgcccttgataatattgatttaattcaatatcttcatcagagatacttcctctggagtggccgtgtatttattgaagctattatggttagcaccataaaataccatataatatggcgtatcacattacctttgttagtgctcgcaatgagttatctgatgtggtcatcattcatgagaggcagcatcgagaaatactcaggcatgtcattatctctacttctcatactttgtatggatggaggggttgctggtgattctcaatggtggattactggtttttataactacctattaccaatgacttgcgcactatatataattcatacaattataaacaatagagcgttttcagtttctgcaatcattttagtgattttttgtgggttaatatctacttcatgcgagcagatcgcaatagggatgatcataacgtgtgcaattatattaatcaagcataagtcgaataatattgcacttaaaccaacgttgctaatttcattattgatcatcatgggggctacaattaacttattaagtcccggttcggagaacagattttacatcgaagctcatcgatacatgcctcaaatactcgatatgaatcttttcgaaaaatcaataatcggtgtggatagattagtcgagaatatttcaacaacgaaaaacatcttgtttattatttgttgtttcacatttatcaaatataaaatcgatcaagctcaagacaatatcgttactaaaatcaaccttttctttatttgcctttctctgattattattttgattggcccctcagcatatatgaatgatatatcatttttaacatatcaaagtaaattcacaacagcaaacttcggcgattatcatatatatatctactacactatattcatgataagcctcatcagtctggctgtgggaacattaaatgataatggagtaataaacttggattgtttccttgcattaagtataggtatattagtaacaattgcaattgggctttctccaactgcatacgcctctaatgtcaggatcttatatgtggtaaatatatgcatggttatttataatctcttacttattaaaagaattgttgataacagattcaaacctaaataa

SEQ ID NO: 163646 - DNA, 264 bp, Enterobacter cloacae
atggatgtcaggattgggattttgttcttcgtgtatcagagtatacgtcgaaaatttatcatattccgaaagtactttaccattggcgtattattccacaatcaattgcagctgatattgctgctaaagattacgtgcttactgcatctcaacagacgcgtaaagatgcacttgatcgccgaggcagaaaaggtgaggtggaagctgttgaggggttccctggatatttccgtattaactatattcctgaaaatagcccattag

SEQ ID NO: 163647 - DNA, 297 bp, Enterobacter cloacae
atgccagactacgcccgctttgcggtccccggttttttgcgcattaacgagatctttactgttacgcccctgctggcgtactgctacttcggcagagggggagtccgcattcaccgccgaggcacggatagtggaaagtaccgccgcattgacagcgtagtattgatgataagccgccatttttttaacagtacggatactgataatccctttgctgtcttcatgtttgctggcctcaaacacgataaagtggcggatcatatccagcagtgttacaggattaagcaacccctgtaa

SEQ ID NO: 163648 - DNA, 657 bp, Enterobacter cloacae
gtggcaaggactgaagagcagcgagctcaggcaacatcaattttcgcaacttacaaagcagaagttgataagcgtgagctctctaatactgacaactatgataagaacattcttacattgtcatctgctggccttgctatctcattaactgtctttaaagatatagcacctcatgaccaaactgcatatatgtggctgctttactctgcatggatattatttggttgtgcaatattagcaacaatatttagtttctcgattagtaacgcagcattgagggctgagttagaaattgctcataaatactacatcgaagaagatgaaagtgtctttgggaaggtaagcctagaatcaaagatattgaactgggtgaacagattttcaggtggtttttttgttttagctataatctcggtcataacatttggagtgatcacctttgatagaaaaatagaggttagcaaaagcgatatggttaaaaaaacgcagcaaattaacaacgatgggttgccgccaccaatgatgcaaagagtgcctattgataaaggtgctacggtcccattaatgcaaccggtaacgcaaacaaatcagacggttccaccagctactgatggtacatcttcgcctgcaacaccaactgatcctgctaaaaactaa

SEQ ID NO: 163649 - DNA, 183 bp, Enterobacter cloacae
atgagttccaataattacaaaacagttcgtattggcgatggtgccatatcacctaagatgattaaagtatctaactctaatattgagaaacatggtgcaacgatgccgaaaatgcagccagtccccagtcaatcatcaggtacagttccttcaccgactaaaacaacgaacaataagcagtag

SEQ ID NO: 163650 - DNA, 570 bp, Enterobacter cloacae
atgaaccaaataactgaacagcaaacgcgacgtggcgtagcgatctacgacgcaaaccccttcatgatggagatgcagaccaaaacgcggagggttacaaacaagcgcggtgacatgatgctggtcagcaatgagggagagatcgtcaccaacgtggcaggcttctgggaggccgaagaagtggacgcaaccaagttcgtgaagctctttgtgaagggcgtaaaggcactcaaggagctgacaggagcgggaaccaaggtcttcgaggtgctctacctccgagtgcaggagagcatcggcaaagatcaggtttacatggctttcgccgccgttgaccaagccctaactccgatgagcgtcagcacctacaagcgaggaatggcagagctgatcgaaaagggctttatcgctgcaacacccatgcaaggcgtcttttggctcaatccctcattcgtctggaacggtgaccgcctcgcgttcgtgaaggagtaccacaaggcatcggccaagaagactatcgaacgagacacccgcaccctagacctgtttgacggggaggcagcgcaatga

SEQ ID NO: 163651 - DNA, 219 bp, Enterobacter cloacae
atgagcgaatgcagctatcagatcgacccgcgccccgctgaacttggcggcggctggcgtctccggctcatcgaggacggggaggaagtcggcgggggcgtgtttccgctgtccgagtacgcgaccgaggacaacgccgaggacaacgccgaggaagcggccaagtgggcatacgaggatgcacttgcggaagcatcggcatggctggcgtcgcggtga

SEQ ID NO: 163652 - DNA, 795 bp, Enterobacter cloacae
atgggagcgcgaccgtgccgagtgggagcggcagcaggcggcatgggacgcgcagcgcaagcagcacatggccgaggtgaaggcgcaacgggatgccgccgtggaaacggcccggcggcatcaagcacaggcggccaaggccgccgcactggcgaaggaggttcagaccttgaaaaccgagaacagcaggcttctggccgaacggcagacgctcaaggccgaagccgaccggctacgcggcaccgacctttgcgacgtgctcaccaaggtatacggcgctcaggaggcggcagacagccgcccaagctaccgaacgcgcaagttcgagctgggcgagcatggaaacatcgccgtgaccggcgagctttggacggacaacgccaccggcaagggcggaaagggcgcaatcaacctcgtgatgcacctcgaagggtgggagcaggggcgctacaaggacgctgtgcgcgttttggccgagcatttcagcccggagagcgttgccgccgacatgggccgttttacggccctagaaggcgctacagccgtttccaagctcaagcaggagcctttgcccatgccggagcctgtcctgtcgaactggccccgcgcaaggcgctatctggaggacgtgcggaagatccccggcaagctgatcgactgggcgaacaagcgcggcctgatcttcgcagacgaacgcgccaatctggtctttgtccgggacggaggcgggtgcttcaagcgcggcagctacgacccgaaagaccggccagccttcaagcagacgctaggccgtga

SEQ ID NO: 163653 - DNA, 549 bp, Enterobacter cloacae
gtgctggcaaaaggggctttgacttcgaaaagttctggtgaaggtgatatccgtgcggcgctggttaaagatgcaaatgttattgactgtatcgttaacttacccgcaaaactgttcctgaatacccagatccctgccgcattatggtttatgcgccgtgatcgtgaaaacagcagccagtatcgtgatcgcagtaaagaaattctgtttattgatgcccgtaatcttggtcatttgattaatcgtcgtaccaaagtgctttctgacgacgatatcaagaccattgctgatacctaccataactggcgtaataaaggtggtgactatgaggacgttgctggtttctgtgcttccgtagacattgatgaagtggctaaactcgattatgtgctgacaccgggtcgttatgtcggtctcgctgatgaagaagacgatttcgactttaaagaacggtttactgctcttaaagcggagtttgaagcacaactggaagaagaagcgcgcctgaataaaactatcgctgataatctggcgaaggtgatgttatga

SEQ ID NO: 163654 - DNA, 780 bp, Enterobacter cloacae
  misc_feature (727)..(736): n is a, c, g, or t
gtggtactgggcttgatttttcttaaatacatttcagattcttttgaatcacattacgaacagctaaaagccggagaaggtgaatttgcaggagccgatccggaagacaaagacgaatataccgcctataacgtgttctatgttcctgaactggcgcgatggagttacctgatatctaaggccaagctaccggaaatcggtaagctggttgatgatgcgatggagtttatcgaagcgggtaacccacagctaaaaggagtcttgccgaaagtctatgctcgccagaatcttgatgccacagtgctgggggaactgatagatttgattggcaacattgctttgggagatgccaaagcgcgttctgctgacgttttaggccacgtattcgaatactttcttggtgaatttgcactggcagaaggcaaacaaggcggtcagttctatacgcctaaatctattgtaagcctgctggtcaacatgctggaaccctacaaaggccgtgtgtttgacccctgttgcggttctggtggtatgtttgttcagtcagagaaattcgttgaagctcatcagggtaatatcgacgatatttcgatttacggtcaggaatccaaccagacgacctggcgactggcaaaaatgaaccttgctattcgtggtatcaactcagaacacgtccgctggaacagtgaaggctcattcctgaacgatgcccataaagatttaaaannnnnnnnnngatgcccgttggcaatacggtatccctcctgctggcaacgctaa

SEQ ID NO: 163655 - DNA, 231 bp, Enterobacter cloacae
atgccctggactgagacccgacctatgcaacgccttgattttatccgtgcctgccatgcaggtacggactccttctccgctctttgccgtctttttggtatcagccgcaaaaccggctacaaatggcttcagcgttttgacccttctgacctgtcctctctctctctgaccggtcgcgcgcaccatgctctcactcccggacggttcctgatgaggtcgtcggacacctga

SEQ ID NO: 163656 - DNA, 474 bp, Enterobacter cloacae
atggaaaatttgagattgtacaattctcaagtagaaatctcgctgagacttgccaaaattcttatggcatttaatccgaatggtttgaccattgaaaagttaatatgtctagattttcttgtccttaatttaagtgattttattcctgagcagagtagcttgcatcctgcaattccaaggcgagatagccaattggcaattactaggaaaacattcacagatgcgcttgttttaatgaaaaaatataaaatagtagaggaggattatactaggcatggaatcttgttctcggtaactgataaaactttttcgttcataaattctgtacagaatgagtatgtttcaaaaatggggcataatataaacattgcaagagagacatttggttctttaaatgaatcagagttgaaaaagctagtgggatcaaaatttggatgtttggataaggatggatactatgagtcaatacattaa

SEQ ID NO: 163657 - DNA, 969 bp, Enterobacter cloacae
ttgaaggatcagatcacgcatcttcccgacaacgcagaccgttccgtggcaaagcaaaagttcaaaatcaccaactggcccacctacaataaagccctcatcaaccgtggctccataactttctggctggatgatgaagctattcaggcctggtatgagtcggcagcgccttcatcacggggaagacctcagcgctattctaaccttgccatcacgactgtgctggtcattaaacgcgtattcaggctgaccctgcgcgctgcgcagggctttattgattccattttttctctgatgaacgttccgctacgctgcccggattacagctgtgtcagcaggcgggcaaagtcggttaatgtcagtttcaaaacgcccacccggggtgaaatcgcacacctggtaattgattccaccgggctgaaggtcttcggtgaaggcgagtggaaagtcaaaaagcatggccaggaacgccgccgtatctggcgtaagctgcatctcgccgttgacagtaaaacacatgaaatcatctgcgctgacctgtcgctgaacaacgttacggactcagaggccttccccgggttaatccggcaaacccaccggaaaatcaggtcagccgccgccgatggcgcttacgatacccggctatgtcacgatgaactgcggcgtaagaaaatcagcgcgcttatccctccccgaaaaggtgcgggttactgtcccggtgaatatgcagaccgtaaccgtgctgttgcgaatcagcggctgaccgggagtaatgcgcggtggaaatggacaacagattacaatcgtcgctcgatagcggaaacggcgatgtaccgggtaaaacagctgttcgggggttcactgacgctgcgtgactacgatggtcaggttgcggaggctatggccctggtacgagcgctgaacaaaatgacgaaagcaggtatgcctgaaagcgtgcgtattgcctga

SEQ ID NO: 163658 - DNA, 834 bp, Enterobacter cloacae
gtgaaaaccgatctggcgagcctgtcgcctgaacaggacacgctggtgtggctcggccactcctcctggtatatgcagctggcggggaaacgcatcctgatcgatccggttctgagtagctacgccgcaccgttctccttcctcaataaagcgtttgcgggggagtacccgtggcgtgcggagagcatgccggagatcgacctgctgattatctcccacgatcactatgaccatctggattacgccaccatcaaggcgctgctgccgaaggttaagcgcgtggtcaccccgctgggcgtggggtcgcatctgcgctactgggggatgaaccctgagattatcgacgagcgggactggaaccagtcggtgcatatcagcgatacgctgaccgtacacgttctgccggcgcgccatttttccgggcgcggcattaagcgtaaccagaccctgtggggcagctttatgtttgtcaccccagagcgaaaggtctactacagcggagactccggttacggcccgcacttcaaagcgattggcgagcagtttggcggagttgacttagccatcatggaaaacggccagtacgaccaggactggaagtacatccatatgcacccggcagaaacggcgcaggcctcggcagatctcaatgccaaagcggtcgtaccgggacataacgggcgttttgtgctggcgaaacatacctggaacgatccactgatccagctggcgaaagccagtaaggataaaaactaccggctgctgacgccggagctgggcgagcccgtgcgggtgagtgataccacgcaacaatttcgcgagtggtgggaataa

SEQ ID NO: 163659 - DNA, 1023 bp, Enterobacter cloacae
atgactgttaaggtgatagaccttttttgtggggcgggcgggttgactcatggcctgcaacttgccgggcttgatgtagttgctggtattgaccttgagggggaatgtcgatttccctatgaaaaaaacaataactcagtctttattgagcaagacatagcgaaggtcacaaaagagcagcttcttgaactttatggtgattcatccgttaaagttctcgctgggtgtgctccctgccagcctttttccaaatatactcaaggtaaggacaaagcagaagataaaaaatggccgctattatatgagtttgagcgcctgattcgcgaggtttctcctgaaattgtaactatggagaacgttcctgatgtaacgaaacataaagtttatgatgatttttataactcattaatagatttgggctaccaagtgtgggcttcaaaggttgactgtgtagaatatggcattccacagaatcgtgctcgacatgtgctgttggcatctaaacttggaaaaattgagttagtaaaatctgaaaatattcctcgtaaaactgtcgcagatgttattcgtgatttaccgccattagaatccggtgaggctgatccacatgattttttacatcgtgcaagcaagttaagccctattaataagaagcgtatcattcattcagttcccggtggaacttggaaagattggcctgaggaattggtggctgcctgtcatcttaaatccagtggtaagggctatgggagtgtatacggccgtatgtcttgggataaaccaagcccaacgattacaactctttgttatggttttggtaatggtcggtttggtcatccagaacaaaatcgtgcgatctctttaagagaagcggcattattgcaaacatttccaatgaattattcatttgttgaagataactcaaaattcaacatgagaaatattggtaaaatgattggtaacgctgttcctgtcgagttggggcgagttattggtcaagctattaaaaatcatttgaattaa

SEQ ID NO: 163660 - DNA, 681 bp, Enterobacter cloacae
atggaaagttttcgcgaggactttgatattaggtcaggagaaatactggcctatttagatcttttgaggttcattgagcatgcaggttctgaattggtttcaacagaagaccctgaaaacaaattcaatattacttctgaatctcgtaaaactttaaagggcgcggtatacattcttttatataatttaattgaatccactatgagggaagcgatttgttttattcatgattccttacatgataaaaacgttcaatttgacaatctcaaaaaaaacctgcgcactgaaatagttaaacgtttaaaaagcgattctgtaggcgtggaaaatttcataaatggtcttacgaaaggtatatcctgtggaatttcttatggtacttttaataagaaaaaattattctcaggcaatatagatcgtgatgaaattaaggaaaaagccacaatttacggtttttcaacatcatctgattacattcatactaagcatggagaaaaactaagcacaattaaacagcatcgtaacgatcttgcgcatggtaacgtttcattttccgaaataggcaaaaacgtatcgtatcaagatttagaaaatgtttcattggaagtaattgcatatcttgacgctatagcaaccaatattgaagattatattcattccgatggttacttagcatcctaa

SEQ ID NO: 163661 - DNA, 1143 bp, Enterobacter cloacae
atggaactcgttgaactaaaagctctgctagaaaaagaagctgacgcgaagagaagagctgatttactcgctcagttagaagtttctaaacagaatgcagaagaacaaatacgcactgagcaaaaagacgtagatttcgagacgaaggagtttaccgtcgagttactggtaaataagtatcacagcggtttggaagatgatactaacgaactttttgttcctgactaccaaagggacttcgtttggagcgaaaaaagacaatcacgtttaattgaatccttaattctcggatttcctattccgtacattttcaccgctgatgttctttcagaagaccctgaactggatggtaggatcgagattgtagatggttcgcaacgtgtcagaaccatccatgctttcattcataatgagttaaccttacaagatttgaaatctttagattctctaaatggttttactttccaagacttgccactatctagacagcgtcgctttatgcgcatacctgtaagggtgattgaattaagctcaaaatgcaacgaggagacacgccgagacctttttgaaagaattaactcaggtagcgacattcttaaggatatggaagtcagaaaaggctcagaacttggttcaacttcactttatacgcaggttattaagccttgctctgccattcctctatttaaagatttagctccattatctgaagcaaaagaaaaacgtgatgaacgtttagaattcgcactacgcttttttgcatatttagagaactatgagaactttgatcactcagtccgtgattttctcaatgattacatgcgggaaaatggagaggtagactctcacaaacaggattctatgaaagaagaattcaccaggatgttaaacttcgtaaatgagtacttccccgcaggtttcaaaaaaacagttactgcgaagtccacccctagggtcagatatgagtccttagcagtaggtgtcgcattagcattaagagaagattctacactcgtgcctcagaatcttgactggttaagttctgacgaattcaaaatattaacaacctctgacggtgcgaatagccgagtcaaagtaaaagagcgaattgagtatgtgcgtgataaattgttagaggtttaa

SEQ ID NO: 163662 - DNA, 312 bp, Enterobacter cloacae
atgaccacacaaaaccttccgtggcacggtacagagagaggaagacatcaggctattcttacgtcctatacctatgacaggaaagaacgcaagtccaaatctgtgtacctcattcgccataatagcgttatacagcaaaccgttctggagcaggaaattacaattgagcgggacatgtttggaaaattcaaaccggtagtggctcttgaagactttcctgctgggctcagtgaccgtgaatcaatgctgaaactcgccgactggcttcatcgtttgggtgtggcgatcgaagataactgggcacaaccatga

SEQ ID NO: 163663 - DNA, 306 bp, Enterobacter cloacae
atgagcaaccaaaaatacgatcagcgtaaggatttgcatctgtggttcggcctttcttatgcagcgtttctggtaatgccccgcgtggcgatgatggaaatgccaaaggaatggcaggagaaaatggcggaactactcaaccagtacgacgaaactatcgacacctccgcattcggcgtgaggggttgccgcgttcaggcgttaactggtgaaggaaagctgatgaagatgcctgatgagcttctcaattaccggcatccatcgccagaagtaaaagcccaattactgcttccgcgtgaggactaa

SEQ ID NO: 163664 - DNA, 531 bp, Enterobacter cloacae
atgagcaacatcgacaaacaagcttgccaggtgagcagatatgacctggttagtggatacatgcagaagtggcctgatggtgagttcgtttctcactacgattatcaggcgctgctggatgagctggaagctaaagacgggcggattgttgagattgaatcacagcgccaaatggctttcatggcctgtaatcggtgggcagataagttcagagaggcagagaagcggattgctgagctggaggcgcgggaggttaagccagtggcatggatgaggagcgctaacgtcacatcattcatgtcgaggttcacaaccgatgagaaatatgcagttgagcaatggggtgatgatgcagttgccctctatccactccctgtagctttcattcctgcatgctttacagacgaaagaaatctcatgcatatcaacgagcgtgggcgagaaacgtcacttatctggagtaagcggaactcagacagcggcgacattaaactttttcgtatcgccgccgcagccggtaaaggagagtga

SEQ ID NO: 163665 - DNA, 570 bp, Enterobacter cloacae
atgaaagcatatgtctacttggagtctcgtgattttgtaaatacatgggtaaatggtggaagattgccaatcgcttcaatcagaaaatacctgtgtgaagaagaaaaaagaggtgggaacctcaccccggatgaaggattaattgacaactcgagctccccgcagagcgcgtttggtattaatgctgagaatgcaactatcaactttgttaattgttggtctagtgaattaggttttataaggtcgggaaaaattgaaaggtataatgaagagggaatcgttctttgtgcctcaaaatcccttaaaagaaaaatagcatcaaaatttgaaagagaatattgtgttaaaatatacgatatatctaagttgcatgtcgagttgaatagacaacttaattcaattggtgctctgggtgtatgcgaatacacaaagggacacaagagaaattgcttcttgaagtcatggaaggactcatggcaagaggaggttagaattttttggaaagaccttcagccaacttatgttcaactgccacctggattagccgttgaagtaaagatacctgactaa

SEQ ID NO: 163666 - DNA, 270 bp, Enterobacter cloacae
atgaaccttgaaacaatgctggggctaatagttgcagcgctagcagcaattgtcggagcgtttggcttgggccatatccgcggcaccagcaaagcggaagcgaaagccgaccagcagcgaacagaagaaaaagccgcagccactgaagcagtagccgaacgccgggtagaagcaacgaaagaggccagcaatgtacagcagactgttaaccatatgcctggcgacgatgttgatcgcgagctgcgggacaactggacccgtaagggttga

SEQ ID NO: 163667 - DNA, 453 bp, Enterobacter cloacae; identical to SEQ ID NO: 140466

SEQ ID NO: 163668 - DNA, 552 bp, Enterobacter cloacae
atggggttagaggatatggttacatcagtgactggcgcagacacaataataattctgcgtgtcatggtagtgttgtgtggtgtaatcctcttttcagcttcagtaccgttttcagaagcaaaacattggaaatttattaaaaagaatccagatatattagatgataatctaatgaatattcttttttatgaaaaaggctttttagataaaaagataaaaacagaaatattgagagggatagttttagctttttcatcattgattgggattctttttaccctctttgaggtaaatcaaataatggacgccgggagagtgttttatattttatcttcctatttagtcattgcttataccattcgctgtattgttgactcgctaggttggatttttagcatcaaagatataaagcaacgctatgccagtaactcagatggaatgaaaaaactacagggattcatgaaacgtaattctgttagtacgttaattcaatccgcttttggcattgctgtatcaatactcctgctcttacaaatttcttctcctgcctaa

SEQ ID NO: 163669 - DNA, 489 bp, Enterobacter cloacae
atggacaatattaggactgtgttaagacaagtaagggctgttataatgactagtgcgaatcttggccctagaacggtaattgctgttgttagagcgtcactggctgacatagatatttggcaaaaaaatggcgttagtcgtgatgagattgcgagcgtattgactgagcgctacggtgtttctatcacattaacggccttcgataaggctctgtatagggcaaggaaagaactgaaaagtagattgcacaattcaacaaaacaggaagataaaagccagatagaaagtggattgcacaatccagaaaggagagaggaagtacagcaagcggattatggattgcacaacccaaaacaagataagctggttgaagatatgggcggcaataaagaatttttgtctgacacagattttaaaaaaatcggtgatgaggcaaaaaaagtcgcatcctcattcaagggtagtgtaggtaataaaaaaggtttctaa

SEQ ID NO: 163670 - DNA, 438 bp, Enterobacter cloacae
atgagtaaaattattgattttcctaccggaaaaaagagggagaaaagggccaaagcgatccgagcgcgtcgcaataaagaagcgcagcagcggagcgaaataaccccctcccaattttggcgggttaagaaaacaaagttactcaccgtgattaaacaatcggcgcgttttctcttattacatttagggttattagttgccgacatccttatctgtctccttcttattctaggaaaactcctaaaaatctttacgatgattggtatcatcgcggcacttctgtttcttatcgtggaatataggaatgattggcattatacgcaatctgcactccataccgcagcaatatttgttagcctgattgccctgcgcatcgggcataacaaactactgaatggcctaataaggcttaaatcccatctatccagaaaagggtga

SEQ ID NO: 163671 - DNA, 318 bp, Enterobacter cloacae
atgcggaagataataattgcatccgtggtgatactggcatcgtcttattccgttgccagcttcgcaaaagatccttgcaagacattagcttgcatggctgcaaaatcaggtggcgagtttgggagtgttggcgatagtgattgctctggtgctatcgctgacttcttcaatatcgtgaagaaaaacaagcatggctttcttcctaatcacacagcagatgcgcgtaaagaatttcttatggaatgttcaggcgcggagcagaataccgccgctgttagcagggttatttcaatgtttggacgtatcaggaaaggttaa

SEQ ID NO: 163672 - DNA, 327 bp, Enterobacter cloacae
atgaagcgtgattatattcctgatgccggtgatattgtatggatggattttaatccgcaagccgggcatgaacaagcgggccatagaccagctttagtgttaagtcctgcggtatataacggcagaatagggctgttgttgtgctgccctatgacaacgaaaataaaaggttatccattcgaggtgcggaacggagaggggagtgctgtactcgctgaccaggtgaaaagtcttgattggcgtgaacggggggccgtaaagaaaggtaaagtgtctgcggctgtgttagctgaagtcaggtctaaattaaaagtattgattggatag

SEQ ID NO: 163673 - DNA, 360 bp, Enterobacter cloacae
atgagtcttatagatttaatcaaagataatatccctcaaattgtcgagtttgttgataaggctgaatctttatttctttattttgttttgtttttgttttcccttgctgtattgattgttttcattggatatatatatggcgaaataaaatcaggtgaggctatagataatatttttctttgggttggcgggcctgtagcggtggctattggtttctttcttataactaattttagctacagtgtatatatcgttatatcaggattgcttatctctattgcgggtgcattgttttttattgggatgctcattcttttttttacatacatagtcccaaacttaaagaatctcaatgattaa

SEQ ID NO: 163674 - DNA, 417 bp, Enterobacter cloacae
atgtacatcccagttgttatccataaggatgcagattcggattatggcgtaactgtccctgatattcctggttgttactcagcaggtgaaagcgttgctgatgcactgaaaaatgctaaagaagctgttcttttccatattgaagggcttttagaagacggtgatttgcctaactttaagtttagagaggtagatgaactcacccatcttgatgagtataagggcggtattttttcgttagtagatgtagatataagcgacctaactgttgaagcaacaagattcaacgttagctggcctaaatacatcctatcgatcctcgatggttctcttaaagagagccatgagacacgttcaggatacttagcaaaattagtgcttcaagacttacgcaaaaaccgagtgctccacgaatga

SEQ ID NO: 163675 - DNA, 915 bp, Enterobacter cloacae
ttgcataaggccgcactcaagcttttcaacgaccgcttaccgcacaagccgtacttttcggatgatctgcacttcggtgtacgcatcgcggggaaagaacgggctatcctggcgaaatacatccagttcaatcagcctcacgccatgttctggctgggattcgacgtcgatcgcgccggtgccgccatcgactggagcgatcgcaacgcgcccgcgcccacgctgaccatcaccaatcccgaaaacgggcacgcccacctgctttacgcgctgcaaacctcgatacgcaccgcgccggacggcaaaatgaagccgctgcgctatgccgccgccgtggagaacgcgctacgtaaaaaattagaggctgacgcggggtattcggggctaatctgcaaaaatccgaaccacgggcactggaaaattgccgtatggcagccggagctctacacgctggactggttggccgactcgctcgacctgaacgccgcgaacgataaagaaatcgttgccgattacggcttaggccgtaactgcaccctgttcgacaaaacccgcaagtgggcataccgcgccatccgtcagggatggcctgagtacgatcagtggttgcaagcctgctatgaacgcgctagcgcttataacctgcaattctcagtgcctttagatgattcagaggtgatgagtgttgctaaaagtattgctaaatggactaattcgaatctatcagctgagtcttttgcagcatacgtagagaaaacgcatacatctgaaattcaatcggttagaggcagaaaaagtaagggtggaggaaggaaagcggacattcattcgattaatagccaaaagccatggattgcgctggggattagtcggagaacttacttttaccggaagagcaaaccagatggtgaatga

SEQ ID NO: 163676 - DNA, 237 bp, Enterobacter cloacae
atggctaaaggtgcgcaggtaattgctaaagaaataaatgagttaatgaggaaaaatgggaatgagtgcattactttaaagtgggggcagttttacgagatttgcgagagggatagacttgcagatgttgttatggagaaggttgcagacagcctgaagaaaaatgaccttcatatcatctacggcaacaatgtgattatcgtaagagacttctgctggaatcccgtatctctttaa

SEQ ID NO: 163677 - DNA, 147 bp, Enterobacter cloacae
atggccactggttcaatgccaagtgtcttctgcaaaatcagcaaagatgatggtatagcgacccagcctaaggacagtccgtccttcccccattttttttctaacgaattttgctccatagtgccctttttttcaaaaaaaaactag

SEQ ID NO: 163678 - DNA, 447 bp, Enterobacter cloacae
atgcctctgtatgatggtgctatagataaactgagagaaaatctgacaaaaatctcctcgggggagcgtgttagcattaccccaattggagaactgactgattctcagtttcagcaaataaatgaatttagaaaggaacaaaaccttcccgatttagagtcgaaggaggttatctatcttggacgtcatcattacaatagcagaaccgctgatggatatactgttgatgatattattgaacagataattagtgccatgtctgatagttcggaattattaaggactgtaaagggtactgttcttgaaaataaaatcaaacgcgatgatggttatggaaacatggttaacgatagagccgtgttagaactcacgagtagaaaacccagatctgagttatattcagtgattccccgaggtgatgtaaataaaccaaatagcagtaaataa

SEQ ID NO: 163679 - DNA, 141 bp, Enterobacter cloacae; identical to SEQ ID NO: 36145

SEQ ID NO: 163680 - DNA, 939 bp, Enterobacter cloacae
atgttccaatcgcttttctttccatcgctttggtttgataaaaactacgaattgctgaagtggaaagaaataagtaatatttgtcaaatttcaacttgggctacacttttacctgttcttatcttgttttatacaaattataaaaaagtacgattaacactttcatttaatctgcttgataaattcttaattccagcgctgtgcgttatgattatgttgttatggacgatgttcccagtcccagcagcgttagggaaataccttttccttgataaagttcctgctgtgcgaatgatgctaggtcttggattggttgttaatatactagctgtgatagcgcttattcgtattcctttaaatgttactgcgcgccggattggaatttttacaatcatttatgctggattgtttatcatttttaaaggtggaataaaacctgcacaagtagaactgattgctcttttgataggcgcgttggttagtttagtcctcattcgtttcaagaataatgccatgctggctctatcaagcataactgtcatatattcattagctgtgttctttgctttcaatccattgcaggattcaagatttattttccataaaaattatcaaacaccagcaattgaaatatataaacagcaggttaatcaatatggagttgctttggctgcaatgtccggttcgattattaatggtttaggatatccttcaggaaatcatgtgctcacaactccacagttagcattctggtataaaaaattcccaaatcttaataaagaggaaatgaacaaagtattcaaccgttatgcacatattcatcttgtccctgaaagcaacgtaattgaactcagtgcaacagatgtcatttccgttcctcagcgttgttttatgtccggtattgataccccatgtaaaaatgtttctattaagaagtaa

SEQ ID NO: 163681 - DNA, 999 bp, Enterobacter cloacae
atgacgaccatggcgaatgattttaaaattgcagtcgtaattccctgctacaaagtaaaggaacatatcttaaaagttattgctgatattggggacgaagtctcatttatttacgcagtggatgataaatgcccagaaaaatctggagaatatatccttgagaactgtaaagataaacgtgttcgcgttttattcaatcaggaaaaccaaggtgtgggcggtgcggttatccatggttataaagttggtctcactgaaggcgccgatgtttttgttaaagtagatggggatgggcaaatggatccaaccctcattaagctgtttgtgcgtcccattcagcatggtgaagcagactatacgaaaggtaatcggtttcacgaaattgaagggttgaagccgatgccgaagatccgtcttttcggcaatgctattttgtcgtttatgactaaattttcttctgggtattataaaactttcgaccctaccaatggatatactgcaatctcagctattgctttaaaaaaattgcctttagacaaaattagtaaacgatatttttttgaatctgatattctttttagattgaacgtcgtaagcgctaaagttttagatatcccaatggatgctgtttacggtgatgaggtatcaaaccttaatattaagaaaatattatttccttttttgaaaggtaatattaagaatctttgtaagcgtatattttataattatttccttcgtgggttttcgattgcctctattgaattagtattaggaacattactcttcatcttcgggatcatttatggtactggtgcctggtatcactctgtcgcaacgaatactccggcaacaagtggtacagtgatgctcgctgcgttacctattatacttggcgtacaatttttattgtcgtttattcaggcagatatagagagtcaaccaactgttgcgctgacacgcttgttaggtcatgagcgaggcaatgagcgtgggctatag

SEQ ID NO: 163682 - DNA, 219 bp, Enterobacter cloacae
atgaaattgaatgaatttgctgccggtctcaccaaagacggaatgcttgttttatgtcttactgatggtgaaataacggactacctggtgtccagcaaggcattgcgcacactgattcgccgggaaggcggcgggctttcagcccagattctggacgatgaagatcggattatcaacttgaactccctgccagaagcacttaaggttctcaagccgtag

SEQ ID NO: 163683 - DNA, 855 bp, Enterobacter cloacae
atgtctacttttttgactcccttacgttatcctggtggaaaaggacgcatggggccttggctatctgaattgctaaggcataacgatattagtggtgggtgctatgtcgaaccttatgccggaggtgcgggagctgcattatatttattgatgtatggctatgtcgatcacattattattaatgatctcgatcccgctgtttattcattttggtggtcactgttaaaccaaaatgacggctttattgatttattaaatacaacagatgttactattgataattggtatgtgcaaaaagatatattaagtaaccattccagatatgatccattaaccgtgggttttgcaacattcttcctaaacaggactaatcgttctgggattctctcaggaggtgttataggtggaaaggctcaaagtggtgtatataaattagatgctagatataataaagaagagctttgtaatagaattagaaaaataggttctatgaggaattttattgatttgttcaatctggatgcttgtgatctgattgatcaaattcgtgattctttgccaaaaaaatccttaatatacttagaccctccatattatgaaaaaggtagtcaactctatcggaatcattataaacctcatgatcatcaaataatttgtgacaaggtcatggcaatgtcaacgcctgtgattgtaacgtatgacaattgtaatgaaatcagagagttatataaaaaagaaaatacaatagagttttcttttcattattcaacacatttaaagagaccaaaagtaacagaattaatgatttataaaaacctaaagatccatagcgttccgtccatgaaaaaaaaataa

SEQ ID NO: 163684 - DNA, 1407 bp, Enterobacter cloacae
atggctcgtaaagatttcactcagcaaccagatatacctattcaaaacattctccttgatacagaaaatgccagaatacgtgctggtagtgaccaaaacaattgtatttcaagaattttgcgtaaagaaagccaaatgttagttttaatggaggatattgcagagaatggtttgacgaccatgcctattttaattatgcctcactctgatggaaaatggatagtcaaagatggtaaccggcgaatcacggctttgaagcttctcaactttcctgaaggctgcccagagcctcacctaattcctaaaataaaaaaaataaaagaaaaattccaagataatataccaaacactgttgactgcctttccagtgataattttgaggcgatcttcaaagaaattgttgcaagacattcaggtgcgcgtaatggggctggtcagtatgactggtttgcttatatgcgaacggtgttcttgctcaacaacgggcatccgacagactataagagagcaggtcaatatatgtgttgggctgaacgtgaaggtattgatgttgatgatgattttcctatcacgtccgttgcaaggttcttcaccaaagataaccttcgcttgttaggatttgaggttgtaaatgacgacttgagcccaattctatctaaagagaaaatcattaaaatggcagcaaaaatcaacactgatttctctttaaaattagtagatgtaaatactgtatttaatccagatgatgcaaaaaaatatcttcactcagttagaaaaaacgcagggattttagatgaagagcctgaaaatcatcaaaaaaataacagcactcatgcgcaagaacacgacaatcctaacaatgcagatgatattcaggataaagaaaatgaatttgatgatgactttaatccaaatattgaacaagacgaacccaaaaaaagatccggcagaagaggttcaccgcaaaaaaaaccttcggaacgaaacaagcttttcggtagagggaagatagggcttttaatccctgatgatgatactaaagtaaggactataatttctgaactacgccaactagatgtcaaaaaaaccacattggctgcggcatttttattacgtgctttattagagctaagtgacaaagaatatagaaaaatcaatactttaaaggacaggggtacgttagctaaaaatattgcttctagcgcagatcatatgttgcagcaaaacctcataagtgattcagagcatcatataatagttgcgtatacgcgaggtgaacaaggaactgttcatattgagactttacaaaaattgatccatagagaaacgcatcatcctgattatatttcaatgaacgttttttgggataatgtaggttgttttgttcgcgcttgttggaaggactaa

SEQ ID NO: 163685 - DNA, 858 bp, Enterobacter cloacae
atggaaacctcaaacaaaatagattcagtaacttctttccttgactacatctataaacaaaccccacccaagtacacaaggtgctaccgaggacaatccaacacacattggagtttgagaccctcagtcatgagaggtctacgcgctaatgctgaacggcagatttttagtgaattgatggttgaatctccgacagaattcaatggtgatcgtctcatgttcgacaagcttgtaagagcacaacactatggactaccaacccgacttcttgacgtttcactgaatcctcttgtcgcactttattttgcttgcaacgaagaaactcatcatgatgaaaatggtgccgttcacctgttggactttgaagaaaaaagagttcggttttcggatagtgacaccatcagtttgatatgtaatttggcgcgacttacagatgcagagaagaaagaaatcaaacagaaatataaagaaattaaatcatggaatgatagtgtacgtgaggactttcgaaagctagatcctatgaaacgactctatcaatttatccgagtagaaaaaccatacttcactgattcaattatacctagcgacatgttcagatatcagtttgtataccctgctaaaacaaatagaagagttattgcacaatcaggtgctttcctcgtagctggacttctcgattataattcgccaggtcgaacacaaaaaggcttcaccgcaagcaaaatcgtgataccagccgatgccaaaatacatatacttaaagagcttgacgtcttgaatattaattcaagaaccatgttcccagaggtagaattcgctgctggctacattaagaaaaaatggcaactaagctaa

SEQ ID NO: 163686 - DNA, 462 bp, Enterobacter cloacae
gtgaaccggttaacatcaatcatctgtgctgtcgttatctgcctgatagtttccatggcctgggcgattaaccactaccgcgccaactccaccacctacaaagctcagcgcgataaggccactgaaaatctcagtctggcaaacgccaccatcaaagatatgcagacccgccagcgcgatgtcgctgcgttggatgccaaatacaccggagaactggctgatgctaaagaaactattgagcgcctgcatagcgatgtcgttgctggccataagcggttgcagctcaacgctaactgtcccgcgaacggagcgaccagcaccggcggcatgggcgatgcttccggcccccgacttactgactcctctgagcgggattatttcaccctcagagggcgaatcattacagtgacgaagcaggttggctatctccaagacttcatcagagagcaatgtcttcactaa

SEQ ID NO: 163687 - DNA, 357 bp, Enterobacter cloacae
atgacacacatacagcaacttatcagcgcagcggatccattaattccattcaaaaatgaagccgtagctagtgcttttttgcagcaatactctgttgatgatcaggcggcgcttatctccgcactttacataggccgggatcatggtggtgccaaccagttgaatgaagactgcttcattgaagggatgccatttgatcgttatttccacaccggtggcgggcacggctacggctggttaattgcacctactgaatttggtcgaattctgtacgagaaaaacacaaatgttcgcacctattttcattcatttgtgcgctgtgccagtggttcgggtattgatctgagtaccttctga

SEQ ID NO: 163688 - DNA, 222 bp, Enterobacter cloacae
atgcctaagaatgtcatagctattttacctggtgaccagttagatcatgttgttgttcaggacgacttggatgttgctacctttcgaggtgataagggtggagtgcttaccatgcctatcgaggaatacgaattggatggagttatctataacattgcacgatgcgatggtatggtctctgacaaacaagttgagaatgccatcagacactacaccgagtaa

SEQ ID NO: 163689 - DNA, 489 bp, Enterobacter cloacae
atggaccaggaaattgcttcttttaagctgaatataaatcagctggccgggatcactggtgtgcaccgacagacggttgccgccaggctgaaaaatgtagaaccggctcccggcagtaacgcgaaattaaaactgttccagatcactgacattcttaccgagctgatggtgccgaccaccacgggtgagcttgaagacatgtcaccgtcagatcgtctcgctcactggaaagccgagaatgagcggatcaaatttgagcaggaaacagggcaacttattccagcagatgaggtggcccgtgaatattctttgatggcaaaagccatcgtcatggttcttgaaacccttccggatgtactcgaacgcgactgcgcactttctccagcagcggtttcccgtgttcagagtgttatcgatgacttacgtgatcagatggcccagaaggtgctggaagccgaagcagaggaggatgagccagaggaggactga

SEQ ID NO: 163690 - DNA, 900 bp, Enterobacter cloacae
atgaacaaacttgatgctctaaagttttttatcatcgcctctgaaaccctgaacttccgcgaagcagccataaagctgtcggtttcaccatcagtagtaacccgaacagtcgctgagttggagaaacagcttggtgaacctcttttcaaacgcaatactcggtcgatctttctcaccagtttcggtgagttatttttaccccaagcgaagcgactactggaagattctgaaaaattatttctgatggcgaaagatgataatgaaatgaaaggtattgttcgtatcacattacttcgatttccaaatcatgagcaaatcttgtatgaactgttgactgcactgcgtccatatcctgagttatttatcgactggcgtttagatatgatgaaacttgatactatcgagcatcgtatcgatataggcatacgcgtagggcgagagcctaatccaaacttcatcattaaaaatatcgggcaagttgagcatattttggttgcatcccctgaactcattgcgcgcctgggagcaccaactgatttagaagatcttcgacagcgttatccatttagtggtttaattaatcctgaaacggggaagtcatttgagtttatgagtgacgcagtgaatacttttgtccctcgtcatattgagttttatactacagacccatacgccgaaattcaggctgcattggccggaaaaacggttgtacaatccagcgattttatctgtagggagtacttagcaagcggccaacttgttcccccactgccagaactgcgacaggagaaatggcaattttatttatatcgaccttatcagctgattactcccaaaagggtcacggtcgttttctcgctattagaaaaaatattacgaaaatatttcacatctaaataa

SEQ ID NO: 163691 - DNA, 573 bp, Enterobacter cloacae
atgtcaattcaaccagtagagttaaacaaagcctatcgtttattgcaggtcgggccaacgacgatgatatcggctaaaaatgatggcattgaaaatgtcatggcagctgcctgggtggggttagtaggtaataacaaagtgatggcttttataggtccacaggcatttactcgcgggcttgtagaaaaaagcggatattacgttgtacagatcccagtagtgaatcagatggaaatggttttatatgctggaggtcacagttattccgacacacccgataaaaatagtaaaatcccactattttatcagaaagagtttgatctgcctttagtggaaggttgcgctggctggttagtatgtaaggtcatacccaatgaagaaaatgaaaagcagcacaacttgttcatgggggaaattgtcggagcatggagtgatgaccgcgttttcagaaatgggcactggatttttgatgatgcgcctgatgaattacgtactgtccattacgtagctggcggacagttttacgccattggcaaagggacaaaatttaattatggtccgggaaaagactaa

SEQ ID NO: 163692 - DNA, 462 bp, Enterobacter cloacae
gtgaataatcagcatctgcgttttaccaaagacaaatttattgtcacaaccgatcccagcttttttcagctggaagccattcatgattacctctcgcaatcgtcctgggctcctggtattgatgctgaaacggtcaggatatcaatccagaacagcctttgtttcgcgctcctggatggaacaagacaaatcggcttcgcccgtctggtcacagactatgccacttttggttatttgtgcgacgtctacgtgctgaacgattatcagaaaagtggtcttggacgttggctgattgaatgctgtcatgcccatccattgttgtcacgtctgcgacggataatgctggtaaccgacagcgcgccatggttataccagaagctggggtataacccattgaaccgaccagattttgtctggcaaatcaatcgacccgatatttatcgtaaccccgggcaaaaataa

SEQ ID NO: 163693 - DNA, 603 bp, Enterobacter cloacae
atgaccaaaaaagtcaatttaatgaccgatgcaaacgctatcgtcaatactgtgaatgaagccgtatctcagcgaattaaactctatcgtaagcataagaagatatccctcgatgaactctcccgtcgggcaggcgtcagcaagggagcgctggttgagatagagggatgccgggcgaatcccagcattgccctgttatgccgcctggctgccgcaatgggggtttcggtggctgattttgtggatgtcagttcaaaaccgaccgtgcatctcattgctgaagatgagatcccagaattgtgggaaggtgaaaaaggcgggagagcaagattgctcgcagggtcaggtggccctgatatgaccgagctctggatgtgggaaatgcagccgggggaaaagtttgcctcccccggccacacggaaggtacgcttgaactgttttatgtgcagtcgggcacgctcacactcggcgttcaggaacacgtgtatcgggtaaatactggctgttcggctaccgccagaacggacgttcctcatttctatgaaaaccagggggagaacccgctggtatttatcatgactgtatatgaaaaagcatcctga

SEQ ID NO: 163694 - DNA, 696 bp, Enterobacter cloacae
gtgctaacagtatctccgtcaattacccctgaaatttatcgtattgctcccggttttcgtgcactgagcatttgcgtaaaagctgcgccagtgcttaatcccgacattggggaaacggcgctgcgtgaagcctgtgaagccgttctggccggtgaaccagattgggcggactctcatctggcggcatgggccgacgtttttcaaaagtttggtgctaaacctaaacgcaccccttgctcagcagatgcgttacgcaagcgcgtgttacgtgacggaacgatgccagcgctcgatcctatcgttgatctttataatgccgttagtctccgctatgccgttccagttggtggagagaatctctctgcctatcagggggcgccgcgtctgactgtggcaaaaggaacagagccttttgataccgtcaaagagggagaggccaccgttgagtctccttcacaaggcgaggttatttggtgtgatgatatcggcgtgacctgccgtcgctggaactggcgacaggggatcagaacccgcttaggcgtggaggctcagcaaatgtggttcattctggagagtctcccccagatgccgctggatagacttcacgaagccgggaagatgctgaccgacggcctggaaaaaatgatgcccggtctgtggtttgaagttgctctcatcgaagaacaacagctgtaa

SEQ ID NO: 163695 - DNA, 894 bp, Enterobacter cloacae
atgtttaccggtttgtcggcgtttccattaaccccagtcactgcccgcggcgtggatgaaaagggttttagccatattctttcccgtcttacagacgctcgggttgattctatgggcatcctggggtcaaccggaagctacgcctatctgacccgggagcagcgcaagcgcgtagcaacgctggctaaacagcatgcagggaacatccccgttatggtgtgtgtgggagcggtcagtaccgatgccattctgcatctggcagaggatgcacaggcagctggtgcgaatgcgctgttactcccggcggtcagctaccagccactccgtgacgaagaagtcttttcactctttgagaccgttacccggcacgcgtctgtaccggtgtgtatctacgataatccgggcactacgcattttacctttacggatgaacttcatggtcgtctctcctcacttgagggggttcgctcggtcaagatccctggcgtcccggatagccccgctgcagcgattgaaagggtgaatgcgttacgtcaacttttgcgccctggcgtaacaatcggtattagtggcgacgcttatgcggggctgggattaaacgccggttgtgaagtgtggtattccgtgtgtggcggtctgttccctgagatggcgaaacaaatcaccgaagctgcggcggcaaacgatcgtcaacgcgttacagccctgacaacccgccttgagccgttgtggtcgctcttccggaaacatggcggaagtattcgcgttattgccgctgcggctggcgtgcttgggcttaccgacatggattgcctgcctcgccctctgcaaccgttgtcagctggcgacatcgcggatattgcccatgtaataagcacgctggagctgaagtga

SEQ ID NO: 163696 - DNA, 303 bp, Enterobacter cloacae
atgctggcaaacgcacgccagtttatgcccgtcaggatcgcgcagataggcaacataaaaatcggggccgtaggcggttcgtgtaccgggcacgccttcatcctttcctcccgcacggaggcccgctgcatggaagcgtctgacaatttccgcgctatcggctctgaatgcgaacattgtcccgtttccggccgtcgcgggttgctggtcaaaaggaggacaaatgcagaagccaaattcgtcatccggatgattttcgtttccccacattgcccagctatcagtccaggcgggcagacgtga

SEQ ID NO: 163697 - DNA, 438 bp, Enterobacter cloacae
atgtcgcagacgttaccgggaattgatgtcatgttcgtcgccgggttccggcccatttcacaggatacagcgtccagcaccgcgttttatatccagacactcggtctgccgctgaagccgatggaggacaatgccgagtatctgctcactgaagagggacacttaccgggcgtgaagcattttgccgtctggccgctgtcacaggcggcaacgtcctgttttggtgaatcggaatggcccgtggagcatccgataccgcagggatggattgaatacgaggtgcaggatctcgattccgctacccgtgttctgagtgaaaaaggctatcggttgttggtcgccaaccgcacggaaccgtggggacaaatcgttactcgcctgctcagcccggaaggtttgctgaccggactaacagttacgccgtggctgcgtggatag

SEQ ID NO: 163698 - DNA, 1161 bp, Enterobacter cloacae
atgttgaaacgcacgtcaccgttactcttcgctattatcgcttttatcgtcgggctaaatctgcgccccattctggcctcggttggccctctgttctccgtgctgcagcgcgaagcggggctgaccgcgacgcaattcagcctgctgaccaccctgccggtggcgatgatgggactggctgccctgtgtggtccctggcttttagccaggatcggtgccgtcaggggaattatgctcgggctgttcatcctgctggtagcctgttcattacgcggttttagcacctcgctgacgggcttgatgggcaccgcgttactgggcggggccagcatcggcacgatccaggcgttaatgcctgccctgataaaaaaggcgtatacgcaaacggccagcacgatcatgtcgctattcagcacgggcattatggccggtgcggcagtcgccgccgccagcgccgagccgctgttttcatggctcacgctcaagcccgcgctggctatggcaggcgtgctcgcgctgctggcgctgatgctgtggttacccctggttaagcagcctcaaggagaacaaacagcacatgaatccgttacgctctcttcctcccggactggactccttctgctctttttcggcgtggggacgggtgcctacacgctggtcttagcctggctgcccccgctctatattcaggcaggatggtccgcacgcagcagcggctatatgctggcctggctgaccctaaccgaggtgaccgccgggtttgccgtctccgcgctgatcggtaaattccccgaccgccgtgttccgctgataactgtactgttactgctgctcgcggggttactgtgtctggtcttctctccaggtacgacgccggtcttatcaaccttgctgcttggcatcggtatcggcgccctcttcccgctgtcgcttatcgtcacgttcgatcatgcgcgaacgcccgcgcaggccgggaagttactgtctaaagttcagggaggaggatatatgatcgccgcgctcatgccgctagttgccgggatcgttcgcgacagttcggtctcgctgaacagcgcatggctggtgatgagtgcgggagtcgtgctgttgatcgctatcgcgttcactttcaaacccgccgtgaacgtgcaggcgcggtga

SEQ ID NO: 163699 - DNA, 492 bp, Enterobacter cloacae
atgcccgagctggacgcctcgtcgatgaaaatttttggccgaatgctcaggctgatgaagcacctgggaaaagaacgcgcgctggccatggcgccgtttagctttcgcgagggcgagtttgacgtcctcgccacgctgcgccgcgccggggagccgtactgcctttcgcccacgcagctgtatacatccctgttgatcacctcaggggcgatgacgaatcggctcaaccatctcgaacagcaaggccttatcaggcggattgccgatcccgatgacaagcgcagctcgctcgtcagcctgacgccgcacgggcaggagcgtatcgaacaggcgctgctcgtgcacacggaaacgcaaaatgcgctgctgagaaacctctctgaggcgcaacgcgcgcagcttgagtccctgctcagggtgctgctgctgacgtttccggctgaggaatgggatgaaacgtcaccgagcgccgataatacaaaacctgcatga

SEQ ID NO: 163700 - DNA, 924 bp, Enterobacter cloacae
atgtctttaccgccactgtatgcgctgcgcgcgttcgaagttgccgcacggctgaactcctttagcaaagcggctgaagtcctgaatatcacgccgggggcggtcagcaggcatgtccggacgcttgaaatgtggtttgactgcgagctgtttaagcggcagggtccgagagtggaggtcagcgacgccgggcgcattctggccgggcagcttagcgaaagtttctcgaatattgagtgggcctgtcgcgcattcaaaagtgaaaaccaccttctgcgcctcaaagcccccagcaccctgacgatgcgatggctcctcaatgtgcttaaatcctttcgcgagaaccacgcgaagccgaaaatcgaaatcgccagcgtctggatggacttcgacactgttgacttcagccgcgagccctacgattgtgcgatcctcctcgggaacggctatttcggtgagtcaacggagagcaggctgctcttcagtgaatggcttattccggtttgtacgccgtctttgctggagcctgcccggcatcagcttccagaatgcgatcttattcatccgtcaccggacagacgggactggaagcgctggctgaaaaggacgggcttattccccggcctcgacatgggcggcgggatcgtgttcgacaccctggagcagggcagccttgcggccatgcacggacacggcgtagcgatggcggatctccggctcacgctcgacgcgctgaaaagcggccttctcgcgctgcccttcagggaggcgatagcaacaggggacggttactaccttgtctggcccaaaaattcgctcagaggacagagtattgaacggttgctggcctggcttaaccttaatgcgccagtggtgccctctttggatattgtctgtcttgatttcaatgaaaagcggatttaa

SEQ ID NO: 163701 - DNA, 471 bp, Enterobacter cloacae
atgacactcgatgttttatttcatctaatgaaaatgatctcacctgaaaaaaacatcgcgggtgaaaatatacatgcgttaataacgttactttcgtcagaaaacgatagcgctgaggtcctttcgccctttattcatcgactgcatcttctgtctttcgcccaaagcaatccgggtaacgccgaagagttgctctctgcgcacttgcccaaagacgacgggatccttccggttctggacttcgcggactggccccgggtgcgttacgccgcttcaggcgaagttcagacgcctgaatctgaggagtacttccgtgaaatgacatcggctaccaatctgttacgttctgcgctgatcgaagctgaacgcgcaaagggaacgcctgcgttttttatactggataaattactcaacctgaacagcgccctgccggaaagatataaaaagatggcaaatattccctacgcataa

SEQ ID NO: 163702 - DNA, 678 bp, Enterobacter cloacae
atgagattagagagtgcgtcagttttagaagaactccggaccaggctaagacccgcatcggtcgcgcaggtcggtgggttccggccgcctgaagatcccataacgtcatggtttctgaagggcgtttctcgcgcagatgaaggattacccacctggaagggcaaacccatgtttccacttcttcagatcagggtcgacgagcttcctgttattcctgaccagttgaagggcatagcccttctggtgttgtttcacaatgtggaacaacatccctttgacgaaccgcacggtgaaggatggttaattcgcgagtatgccagcctcgaagggcttcagccattgcctgaattggacacgccgtatcggccgtttccagttcaatggctgagtgtcattgacgatgctcctggatgggaagatgcctgggatattattgatctctcttgcgtaaatgatgatgagcaggccagtgatagtttttttgaagatttcaatcgctacaggggaaccaaggtagggggatttccgactgagatacaacacggtgtgggaatcgaagagtttgtttttcaggttgggtcagaagaaaaagtaaactggatgtgggcggataacggtatcggttactttcaccggtcatcagaaggggaatggcggttttcatgtcagttctactga

SEQ ID NO: 163703 - DNA, 477 bp, Enterobacter cloacae
atgaaacagattactttcagtgacctgcagcagcaaagcgagcaggccgcacattctcctcgcttacgcgcgcaccgtaatttacaccctgacctgagcgacccggtgcagcgtctggccattgcaatggaacccggtacctatgtccgcccccaccgccatccgcacacgtttgaactgctgacggccctgagcggccgctttctggtgctgaattttgacgacagcggaaacgtgacccggcgtgtagtgttaggtgaagagtgtaaagtgctggagatggatgccggaacctggcatgccgtgctgtcgctggataaaggcggcgtcatttttgaggttaaacacggggggtaccagcctgtgcccgagcatgataccgccccatggtcaccggcagaaaacgagcctggcaccgagaagctgatgcaatggtatgctcaggcacaggtgggtgacggtggttttaccctgtaa

SEQ ID NO: 163704 - DNA, 543 bp, Enterobacter cloacae
atggtttcatctgacaatgctctcttgattatcgacatgcagcagggcctctttcggggcccgatttcccctcgctccgccgatgccgttctgaccaatatccgcttgttaatcgccaacgcccgagacgcgcaggtatccgtcttttttgcccgccatattgggccggacgactcccccttctcagaaaaggggccgttaacacagctgatacctgaactggacgtgaaggagcaggacgttgttttcaccaagcgctatcccagctgttttcgggatacggtattgctgcgagaacttaatcagagaggcatcaagcagctggtcattgccgggatgaaaacagagttttgcgtcgatacgacctgccgggccgcaccggagctgggtttcaggacggtattaatttcagatgcgcataccacaatggataatgactgtttatccgccagcgacattattgcccatcacaacaacacactggcaggcccgtttgtgacgctgtcgactgctcgtgactggctttttagtagggtgagttga

SEQ ID NO: 163705 - DNA, 303 bp, Enterobacter cloacae
atgttgaaaagattagtcgcggggcagatgagcttaccgatgactttctggggatggggaatttgcggtaattttctactgggtctcattgggcttgctggagtgcagaccggtcacccggccatggtgccgctttcctatatacttaaagccattctgttcagtgctgtactttccggcataactttcattctgcgtcgaaaaatcacggtattgggtgggatcgctttttttattattttgattcaggtgattatgagtgtagtgatgacgataggccttttctcgttattttttgaataa

SEQ ID NO: 163706 - DNA, 600 bp, Enterobacter cloacae
atgtctgcaacacatgccattaaaaacgcgctgatcgtgacggcacacccgatcgacaattcgttatcccatacgctggcagctcgtattgccgggaaattacgcgaggaaggtacgcaggttgagatcgccgatctgcatgctgaagggtttaatccgtcgatgacccgcgccgatctcgatttgtatcacggcgatccgagcgccctccccgacgatattctgcgcgagcagcagcgcgtcgagcgcgcggatatgctggtattcgtcttcccggtgtactggtggtcggttcccgcgctgttgaaaggctggttcgatcgcgtgttaaccctgaactgggcgtataaggtggccgacgacggccggattgtgggcaacttacgggatgttcccgtccgcctgattgccactggcggtagcgatctcaccggatttgataaacacggctattcgacggcgattcagacacagataatcgaaggggtatttggcttctgcgggttgaagaacgttaagctcgatatcctttaccaggcagacacggcgacgcccgagcaggttgacgaattcctgagcgagatcggcaacctaaaataa

SEQ ID NO: 163707 - DNA, 594 bp, Enterobacter cloacae
atggttgttaagcgcttaagaaaagaggaccgccgcgtgcagctgctggaggttgcgcgagggatcgtacgtcagcaaggcacggaggcgttgacccttggctatctggcagaacgggctaacgtgaccaagcccatcccctacgaccactttggcgatcgtgaagggctattgatggcgctgtaccaggactatagcgatcggcagctggcaaaattccgcgagacgctggcggtggacagcaaaacgctggagaagacgatccgctttttcagcgcggcctatatcgactgtgcgattgccgccgggcctgaaaccgggccaatcgccgcggcgctgtccggttctcgcgcgctgcagacgtttcgggaagcgtgcgtggccgaatgtgccgactgcctgcgcaccgcgctttcgccttttatcgtcttaaaaggcgttcagggagaagcggtactgacggccatcattggcgcggcggaggcgctcagcacctcggcgggcaacggcgtgctcgcccgaaatgtggcagaagatatgctctgcggcgccatgaccggggtgctggagacctacgcgaatagcacaaaatga

SEQ ID NO: 163708 - DNA, 1110 bp, Enterobacter cloacae
atgctcaggctcacttcagcccgccttgccatatgtcttctgccgtttgccctcgcggcatgcggcgatatttccgcgagtgacgatccgcgcaccaggccaccgcttgtcagatccgcctccgtcgagagggcgaatccagccgctcgcacctttacgggcgtggtggtggcaagaacgcaaagcgacttgggcttcagggttcagggtaaaatcctcgaacgcctggtggataccgggcagaccgtcaaacagggccagcccttgctgcgtctggatccggttgacctgaaattacaggctcaggcgcagcagcgcgcggtggatgctgcccaggcgcgggcgagaaaagccaccagcgatgaggcgcgttatcgcggtctggtggcgtccggcgcggtgtcggccgcggagtacgatcagattaaagcggcggccgatacggccagggcggatctcagcgccgcccgggcgcaggccaacgtggcgcaaaacgccacgggctatgccgtcctgctggcggattcagacggcgtggtgatggagacgcttgccgaacccggtcaggtggtcagcgccggacaggtggcgatccgccttgccagagcgggacagcgtgaagcgctcgtgcagcttccggagacgctgcgccctgccgtcggcagcgaagcacgggccacgctttatggccgtgaacaacacccggtcaccgccacgttgcgcctgctgtctgattccgcggatgccgcaacccggacgtatgaagcacgctacgtgctggcaggccagctggcgaacgcgccgctgggggcaaccgtcacgctcagccttgaagacccgaaagcggaaggtcaggccatgcaggtcccgctggcctcactctacgatgcgggtaaagggcccggcgtctggcgcatttccgcccagccggcaaaggtcacatggacgccggttaaggtgctgagcgtgggcgaagatgcggtccaggtcacgggcggcgtgaagcccggggagaagatcgttgcgttaggcgcccatcttctgcacgaaggtgaagttgtcaggctggcagaacagcgccatgccgctccggcggagaacgcgccatga

SEQ ID NO: 163709 - DNA, 603 bp, Enterobacter cloacae
atgaacgccccatcaatacgtggtccacttgaccattctgtcagagagcaaatcgtcgaagcggcctttgagcacttcggtcattacggctatgaaaaaaccaccgtcgccgagctggcgaaatctatcggtttttcaaaatcctacatttataagttcttcgattccaagcaggctatcggcgaggtgatctgcgctaaccgcctggagctgatcatggcggccgtgctttccgccattgaggatgcgccgtcagccagcgaaaaactccgccgtctttttaagtcgctcaccgaggccggcagcgagctgtttttccacgatcgcaagctctacgacatcgccgccgtcgcgtcacgggagaagtggccttcgacggaaaggtataccgaaagcctcctgaagctgattgagaccatcattatcgaaggcagacaggctggagagttcgaaaggaagacgccgctggacgaggtcacctttgccgtttacatggtgatgtgcccttacattaaccccgttcagctgcagtacaaccttgaaactgccccaacggcggcggtacttctctcctcactgattttaagaagcctggccccctga

SEQ ID NO: 163710 - DNA, 912 bp, Enterobacter cloacae
atgggtaaactcgaagacatggccttactggtggaagtcgccgaggccggaagtctttccgccgccggacgacgcctgtcgctttctcctgccacgatgaccgccaggctgaaggcaattgaggagcgttaccagacgcgcctgtttcatcgctcaacgcgatccctcaccctgacccgcgcaggcgaagagttttatcacgccgcgctgcgcgtgctggaagaggtgcaccacgccgagtcgctgctgacgcaaaaagagggcgtgctcagcggcaatattcgcctttccgcgccctcggactttggcagacagtatctcagccctgccgtcattgaattttctcgtcaccatcctgccgtcaaattttacatctcgctaaaagaagacgttgaggatctggtcgctaaccggctggatatgagcgtgcgcttcggcaatttgccggacagcagccttgtcgtcagaaacatccgcccgaaccgtcgggtgctggttgcctccggggcgtatcttaacgaccacggtatccccgccacgtttgccgatctagcccggcaccggtgcctggcgctggagtctcagggcgtggtgatgaacgaatggcgctttgaacatgagggagaggaaagcgttgttcgcgtcgagcccgccatggtgtgcgacgacggggcattgcttcgtcagtgggccctgggcggagcgggcatcgccgggaaatcgtggtgggacgtcaaagacgacgttgacgccggaagactcacggtgctgtttgccgacagcttcaccggctttagccgctacgatcgcaaagatgtcgggctgcagcttgtttacccgcagcgcaagcttcagccgcttcaggttacggcgttcagccagttttttctcgactggcttaaaaaacattaa

SEQ ID NO: 163711 - DNA, 1116 bp, Enterobacter cloacae
atgaaacctgcttcactctttgaacgctacaggctggggtcgctggacctgaaaaatcgtatcgtcatggcgccgatgacccgcgcgcgctcccttcagccgggcaacattccctccgcgctgatggcggagtattaccggcagcgggccagcgcggggttaatcatcaccgaagccacgcaaatctcgcctcagggtcagggatactcctggacgcccggcatccattcgccggagcaggtttcaggatggcagctcacgacgggggccgtacatcaggtgggcggggtcattttttctcagctctggcacgttgggcgaatgtcgcacgccagttttcaccatgacggtcagcccgtcgccccgtcagcgctggcaccggacgcgcaggtgtgggtggtgaatgagcgtggagaaggccagatggttgactgcccgcagccgagaacgctctcacgcaaggacattcagaacatcgtcgcggactatcgccaggccgctttgaatgccgttcaggccgggtttgatggcgtggaggtccacggcggaaacggctatctgatcgaccagttcctgcgccaaacctccaacaaacgcacggacgagtacggcggtacggtggctaaccggatccgcttcgcccaggacgtgttaagcgcgattgccggggcgattggtcacgaacgtacgggcattcgtctttcgccgtttattacccagcgcgggatgaacgacccgcaggtctctgaagccatactcgcgcttgcggcctggtgcgaacaaaaagggattgcgtttatccacctggcggaagccgactgggacgacgcgccgcagattcctgcgcatttccgtcaatcgcttcgcgagaccttcagcggcaccctgatcgtcgcgggcaactatgaccttgccaaagccgaagaaattctggcggcgggctatgccgatttgattgccttcggacgaccgtttattgccaacccggatttgcctcaccggctggcgcaccgcttgccgctggcccaggtgcgcgaccccgccacgctgtttggcggcaccgccacgggctataccgattactcaacgtacacccagcaggagggaatattatga

SEQ ID NO: 163712 - DNA, 720 bp, Enterobacter cloacae
atgacccgtaaaaccttaattatcggcggcgcttccggcatcggtttcgccgtgggcaccctgcttgccgggcgcggcgaggagattatgcttgcgggacgcgatagcgcgaaactggacgctgcacggcaacgactgggcgctcatgccgcgtctgttagcactctcttgctcgatatcagccgtgaggaagagcttgttgcgctcagtgaaacgctgggcgaggtcaataatattgtcgtcacggcgggttcacaggcgccgggcgggctgctttccggactggatctccgtgcggcaagacaggcctttggtacaaaattctggggaagcctgaatgtcgcccgctatctcagcgggaacatcgctccccgcggtacgctgaccttcactagcgggtttgttgcacgccgcaccgtggcgggcgccatcgtaaaaacaacgatgaatgcctccattgaggccgcgacaaaggtactggcgaaagagctttccccgctgcgcgtcaacgtcgtgagtccggggctgaccgacacggaagcgtatgcggggatggacgccgccgcgcgggaaaaaatgctcgcaggcgcggcggaaaccctgccagccaaagcctggggaagggcgcaggacatcgcacaagggtatcttttcgccatggacaacccctttgtcaccgggtcggtcattgatattgagggcggggcgttaattaactga

SEQ ID NO: 163713 - DNA, 540 bp, Enterobacter cloacae
atgaaatatacgacgtgctttcgtcccgctatcgcggcgcttatttttgctggtctgtcgggcaatgctatttcagcgcagggggaaagggtacagccgaaacagctgattgtggacaagagcctgcccctggtgcaattaaagacgaatggagccgttgccagagaatatgccacgttctggaacaccggtaatgaaactctggcgcgtgatgccctggcggcaaactttgttgataaaacaccgccggaaggccgtaagcaggggccggaaggtgctattttagcctcgcgggcgtttcgcacggccgtgcccgatttgcgctgcgacgttgagcagatgattatttcaggcgaccgcgtggtctcacatttacatttttacggcacattcaccgggacatttggcaagctgaaaggaaagggacagaagatagattttatcgccacggatatctatgaaatccgtgacggtaaaattgcagcgaactggcatattgaggacaacctgacgctgatgaaacagctgggcgcgctgtaa

SEQ ID NO: 163714 - DNA, 468 bp, Enterobacter cloacae
atgaacacacgtcctcccttgccgcccttcacacgcgaaagcgctattgaaaaagtcaggctggcagaagatggctggaacagccgcgatccggcgaaagttgcgctggcctatacgctggatacccaatggcgcaaccgtgcagaattcgccaccaacagggaggaagcgcaggcgttcctggcgcggaaatggaaaaaagagctggattatcgtctgattaaagagctgtgggcctttacggataaccgcatcgcggtccgctatgcctatgaatggcatgatgattcaggaaactggttccgctcgtacggcaacgaaaactgggagttcgcaccggacggcttgatgaagcgccgctttgcctgcgttaacgatatgccgataaaagaatccgagcgactgttccactggccgttgggcagacgcccggacgatcacccctcgctgagcgatctggggttatag

SEQ ID NO: 163715 - DNA, 579 bp, Enterobacter cloacae
atgaaagcagaatccgaaaacaacgataaaaaaataagcgtcagggataaaatattactgacggcccacgatctgttttattccacaggcttcagagcgacgggggtggatacgctgattaaagaggcgaaagtgacgaaggtgacgttttatcgccattttccgagtaagagcttgcttattctcgcctatttacactatcgacatgaaatatggattaactggtttgaggccacgcttcgtcgacatctcgttgaaggccagacgcctgcggacgctctatcggctaccctttatgaatggtttatttcgcctgagtttcacggctgtgcgtttattaatgccagcgccgaagccaaatccgaagatattgaaagcgaaataaaagcgatatgccgcgatcataaaatcgaaacaaagaagattattgcgttgctgacaaagattgcggatgagcgcgtcgtcaatgaaatcatgctgctcatcgacggcgccattattcatgcgcagatgggcatggagacggatgaggtcatcgcgtcgttgaagagggcgctggcagacttaatcgggggctag

SEQ ID NO: 163716 - DNA, 543 bp, Enterobacter cloacae
atgcgccacggcgaacccgaatacaggggcgccggaaaggtgtcgtacagggaaatggtgggatggatcgacagctataaccgctcttcaacgggccgcgacagaccttcggagatggctcaaatcctcgcgtaccgcgcactgacgtttctcagcagccctctcccgcgagccctttcatcgttgaaaacgctggggtgtgaaccgggcttaattgatgaggtttttcgggaagcagagctgccggtgttccgtattccggggttccggctatcgcctttttactgggcagcgctgtttcgcgttctttggctctgcggcctgtctggcgagtcagagcgcgtaagcgccgcaaaagaacgtgccgttaaggcggcagaaatcctggtgaatgtagcgaaggactctgacggccccgtcttgctcatggggcacggggtcatcaaccggttcattgcaaaagaactgatcgcatcaggctggaaagaacagactcgtccgggtaagggggactggggagcgggggtttacagcatggtatag

SEQ ID NO: 163717 - DNA, 396 bp, Enterobacter cloacae
gtgtcaaaaatcacgtcatctatcacaacactctgtctttcaagaattttattgacctttttcttctggatggcaggcttttatgggttgttcaactttggagagattgtgctggaaatggtggatgtgggtctcccctggcccgtcttattcgcgacaggcaccattctctgtcagcttgtaggctctgctctggtgatttcgaattttgccggctacggatggattggatcggcaatgctgattgtgtttacattactcaccattccggtggggcatccattctggaaatttagcgagccccagcgcacccaggagtttcatatcgcgcttgaacacataaccgttatcggggggctcatgatgagcatgcttttgtcaggtcgtaaacgatga

SEQ ID NO: 163718 - DNA, 633 bp, Enterobacter cloacae; identical to SEQ ID NO: 140681

SEQ ID NO: 163719 - DNA, 405 bp, Enterobacter cloacae
atgagaacacagaaacgatgcctcggctgcgtggctattgtggttgatgactacgatcgcgccattgagtactacacagacaagctggggtttaccctcgtagaggatacgccgcaaccgggtaaacgctgggtggtcgtctcacccaacccggaaagcgactgcaacattttgctggctcgtgcgtctaacgagaggcaggaaggttttatcggtaatcaatgcggcggcagagttttcctgttccttcagacggatgatttctggcgcgattaccatgtcatgaaggcaaaaggcgttcatttctgcgaagaaccacgtgaggaagagtacggtacggtggtggtgtttgaagatatgtacggcaaccgctgggacctctatcaacatgcccaacgcgggtga

SEQ ID NO: 163720 - DNA, 513 bp, Enterobacter cloacae
atgacgcttcgaattcgacaggccaccggggccgattcaacgctattaagcgagttgggatatcgtatctatcccgcgcattttcagcatctctgggtatcagacgccgagatgacggcttttctggacgccgagtatgccccctccgtcattgagcagagcctgaccgagagccatgtttcctggtttgtggcagaaaccgatcggccagtgggatttatgaaagtgacctgggacgccatgcttccggaaacggacaagaggggcgttctcctcaacaagctctacctcgatcctgctgagaccggcaagcactatggtcaggacatgttcaataaaatcatcgacatggcccggagcaggggaaaggactctctctggctggaagtgcttgagcagaacgcaggagcgcaccggttctaccagaagcagggcatgctctgcattaagaacgtcctttttgaaacagcctcacagcagagcatactcagaattatggggatgtctctttag

SEQ ID NO: 163721 - DNA, 789 bp, Enterobacter cloacae
atgggaacggcgatatttatggtgctgatggtctgcgggtactggtacaccagccgagacctgtcgacccgttttaaaatcaagcgttcctttggctgggacgtctattttctcgttgcgctttacggctgtattttcgttctgcagggggtgattgctacggggctgctctggctgctgctgctcaccctttctgccgccaacaacgccttccactttgcctcaccaaaatacaccgactggcaaatcgactttatgaactggagttttttaggcattcaggcaccggtggtggtgatgctggcgtttgccattctgttttgcctataccgctctaactgggcaggcagcgccaggctggacggcgagagtcggaaaaagctctacaaacggcttgcgcaggcgagcgggattgaacaattgctctatcagtgtatggagcaaggcgaactggcgcaggtcacgctccgctcgaggcggatatacgtgggtatgatccacaccgcaacgctggaatatgaaaaaacggccaatatcgtgctgatcccgatgttgagcgggtaccgggatgcgaagacgatgaacctgcgcatcgagaataattacagcaggtggtatgcggagcatgacattacgctcgactcggaaccccgcagcgccatgtcattccgcaaggtgattttactcaaccagattgagagcatctcgctgttcgatcccgccagcgccagcgcgctgtcgctggcacagcgggatgagagccctggccctaaagagacatccccataa

SEQ ID NO: 163722 - DNA, 198 bp, Enterobacter cloacae
atgaaacgtttctttctctccctcttctcaagcccggaatccttactgcaggtgatgagtcagcaggaaattattgaagccgtggaagatggcgaccgcatcattatcgaccaggacgggaacgcctcggtgaactacaagagcaacgaggtgcggcaggactttctgcgtcacgttaacgcgctgaagagggcctga

SEQ ID NO: 163723 - DNA, 435 bp, Enterobacter cloacae
atgagcactttgccctctgtcgtgagtcggtttgtcgagtactacgccgcactggatagccagccgccgtccgcgctggtcgggctttaccattcaaatgccacgcttgtcgatccgttcggcgagcacgacggtatctttgcgcttcagcgctatttcacccatctgctggccaacgtcgagaactgccgtttttctatcgacccgccgctctgcagcgggaaccggtttgttgtcacctgggtgatgcactggtcgcatccgcgcattgccggaggcgaaccgctcgatctgccggggtgctcggtggtggagacggaaaacgatcttatcacccaccagcgcgactactacgatgcgggagagatgatctacgaacatcttcctctgctgggctgggcggtacgcggcgtgaagcggagggtcaaatcatga

SEQ ID NO: 163724 - DNA, 720 bp, Enterobacter cloacae
atgaagacggtactgattaccggtgcaagttcgggcattggcgccgggctggcgaaatccttctccgctgacggctatcatgtgattgcctgcgggcgcgatccggcgcgtctggaagcgctgcatcagacctgccccaatctcaccgttcgcctgttcgatatgacggaccgggaggcttgccgacaggcgctgaccggcagctacgccgatctgattattctctgcgccggtacctgcgaatacctcgacggtggcgtggtggatgcggcgctggtggagcgggtcatgaacaccaatttcctcgggccggtgaactgccttgaggcgctgcagccgcagctggttcgcggcaaccgcgtggtgctggtgagctcgatggcccactggctacctttccctcgcgcagaggcctacggtgcgtccaaagcggcgctgagctggtttgccgaaagcctgcgcctggactgggagccaaaagggattaccgtcacggttgtctctccgggcttcgtcgatacgcccctgacgcgaaaaaacgattttgccatgccgggtcgggtgaccgtcgatgaggcggtgaaggcgatccgtatcgggctggcggccgggaaaatgcacatcgcgtttcctgccggatttggcttcattttgcggctgctctcagggctgcctgcttttcttcagcgcacgctgctgcgcaggatggtgcgttcatga

SEQ ID NO: 163725 - DNA, 1260 bp, Enterobacter cloacae
atgaacattgcaattatcggcagcggcattgccgggctgacgtgcgcctggcgactggccgggcaccatcaggtgaccctgtttgaagcgggatccacaccgggcggccataccgcaacggttgacgtgacgacgccacaaggcacatacgcgatcgataccgggtttattgtctacaacgaccgcacctatccgcgctttatgggcctgctcagcgagctgggtatcagcgggcaaaaaacccagatgagcttttcagtacacaaccccgagacggggctggaatacaacggccacaccctgacgtcgctgtttgcccagcgccgaaatctcgtcaatccgacattctggcggctgctcggtgaaatcatccgcttcaatcgtctggcaaaacaggcgctggacggggaagtggacccgaacgccacgctgcagacgtttctggaccagcacggctttacgccgttttttgcgcgccactatattctgccgatgggggccgccatctggtcatcctcgctgcaggagatgaagcgtttcccgctgccgctttttttacgtttcttccaaaaccacggtctgctggatatcacccatcgcccgcagtggtacgtggtgccgggcggctcgcgagagtatatccgcgcgatgctggacaaactgggcgatcggctgacgctgcatctcaattcaccggttcagcgggtgagccgccacgaggacggggtcacgctccagcttgaaaacggcagccataccttcgaccaggtgatatttgcctgccactccggcagtgctctggcgatacttgacgacccgacctccgcagagcgcgaggtgctgggcgatatcggctggcagcgcaacgaggtggtgttgcacagcgacccgcgctggctgccggtgcggccgcgcgcctgggcgagctggaattaccggctgagcgcgcaggagcaggccagcgcctgtgtgacctacaacatgaacattctgcaggggctgcctgcgggcagtccgctgttctgcgtcacccttaacccggacgcggcggtggatgagcgcttcgttctgcaacgcttcgtttatgagcacccgctgtttaacccgcaaagctggcgggcgcaggcgcggcgcgacgagatcaacggtcaccggcggagctggttctgcggagcctattggtacaacggttttcatgaagacggcgtgcgcagcgcgctggacgtggtcaacgcgatagcggccggagaggggaactga

SEQ ID NO: 163726 - DNA, 723 bp, Enterobacter cloacae
atgaacagctgcctctatcacggcgtattgcgccaccgccgccttcagccgaaaacccatgaatttcgctacagcgtctttatggcctggctggatcttgatgagctgccgctgctggcgtctgtcggcgtgcgccgcaatcgctttgccgccgccgcgttccatgacgcggattatccgctcggcacgccgctcaaagagaacgtgctcagcaggctggagagcctgaccggggaacggccggacgggcgggtcatgcttctgacgcagttgcggtatttcgggtttcattttaacccggtcaacttttactactgctatgacgggaaggggactctgcgctgggtactggcggaggttcgcaacacgccgtggaacgagcgtcattattacgcggtcgacgggcaacatgcccagcccacggaaaaagcgtttcacgtttcccccttcaacccgatggacatgatctaccactggcgcttcaacgatccggataacacgctgcatatgcacattgaaaatcatcaggaagcgaaggtgttcgacgccacgctcgccctgcgccgggagccgctgacccgtccggcactgcgcgcgctgctgctgcgcatcccgcttatgaccctgaaaaccgttttcgccatttactggcaggcgctgaggctgtggctcaagcgcgtgccgctgtataaccatcccgtcagcaggagtgaacgctcatga

SEQ ID NO: 163727 - DNA, 1221 bp, Enterobacter cloacae
atgaccgatcccgtctttgcgttagaacccgatatcccgcgcaacgtccgcctcgcgcgatggctgctgtttcgtctgttaagcggcatccgcggtggttcgctcaccctgcgtgaaggggcgcagaccttccattttggcgagacatcctccgcgctgcacgccgacgtgcagatcctcacgcccgccgtctactggcgcgtcttaacgggcgggagccttgccgccgctgaagcctggatggacggcgaatgggaaaccgcgcagctcacggcgcttctgcaaatcctggccctcaacggcgaggtgcttggccgtcttgagaaagggttccggctgcttggccgaccgctggagcgtttgcgccactggacgcggcgtaactcccgcgcgcaggcgcgtgaaaatattgccgcccattacgacctgggcaacaccttctatgcccattttctggacagggaactgctttactccagcgcgctctttaccgcagacgagcaggatctcgcgacggctcagcaggccaaaatggcgcgcctgtgcgaccagctggcgcttagcgaggccgaccacctgctggaaatcggcaccggctggggggcgatggcggaatacgcggcccgtcattatggctgtcgggtgactaccaccacgctgtcgcaggagcaatacgtctgggcaaccgagcggatcgcccgcgccgggctgcaggatcgtgttgaggtgctgctctgcgactatcgcgacctcaccgggcagtacgacaagctggtctcaatagagatgattgaagccgtcgggcagcgctatctgcccacattcttccggacctgtcaggcgcggctgcgcccggggggacgaatggcgattcaggccatcaccattcaggaccagcgctatcgcgactacagcaaaagcgtcgattttattcagcgctacattttccccggcggcttcctgccgagcatcaccgcgatgaacgagctgatgacgcgccacaccgatttcgtggtgcgcaatctcttcgacatggggccggactacgcccgcacgctggcgcactggcggcagcgctttgtccacgcctggcaggagattgaaaagctcggctttgatgagcggttccgccgcatgtggctttattactttggctactgtgaagccgggtttaacgcccgcaccattagcgtggtgcagctgaccgcagagcgcgtatga

SEQ ID NO: 163728 - DNA, 486 bp, Enterobacter cloacae
atgagacgatatcttcaggtcttcctgctggccgtcgcgttcgatctctactgggcgctggtggtgctctttcgcgaacagggcctgattatctggctcgcgctggcgatcctggcgtgcctgctcttgccgtctgtataccgtttttacgccattgggctggccgcggcgggcagtttgctggatacgctctgggcgctgacggggctgatcgccttcacgggtgatgccctgatgccgctatggatggtggcattatggctgatgttcgccaccgtctggacgcagcttacgcgcaccaccacgttgcccggctggctgctcaccctgctggccgccgtgggagggccggtggcgtacctgattggcgagcggctgggtgccatcacgtttctggagccgacctttatcgtcgtcagctggatggcgccgggctggctggtgttgatgctgtttttccacctgctgatggggagacaaaaatga

SEQ ID NO: 163729 - DNA, 525 bp, Enterobacter cloacae
atgagagctgcggttttgttgctttgtctgacgctggttgttcctgttgctcaggccgccgactggctggcgtggcggaaggtgggtgatgccacgctcacctgggggccattcaccgtctatacctcccagctgcgtacgccggacgggcgttacggtcgggagaaccaggatcaggcgctgataattacctatgcgcgcgatatcgatcgcgatgagctggtcgaggcgacccgcgaccagtggcaggcgcaggggatcctgcaacgggaaccccgaagcgaagcctggttacagatgctgcgctctctgtggccggatgtccggccgggcgcacagctggcgtttgtgctcgacgacgggcaggggcagttctggtatcgcgcgtcagcggcgcaaaaagcctttattccactcggaccgcgtcagtcagaagcgttcagcacccgcttcctggccatctggctcgattctcgcacgcaataccctgagctgcgtcagcagttaatcggaggccaaaaatga

SEQ ID NO: 163730 - DNA, 534 bp, Enterobacter cloacae
atgaaacgtatcctgatgatggcgctggcattgacgatgctgctggcaggctgtagcacggaggtgaccgagtatcgccagcagcagccgcggctggatatcttccactacttccagggcaaaaccgaagcgtgggggatggtgcaggatcgcagcggcaagcagatccgccgctttcacgttgagattgccggggacgttatcggcgatacgctgacgctgaacgagcacttcgtttacgacgatggcgagaagcagcagcgggtctggcatatccgccgcgtggggagcgatcgctacgaaggcacggcgggggatattgaaggggtagcaacggggcaggccgccggcaacgcgttcaactggcattacagcatgaacgtgaaggccaacggcagcacctggctactgaactttgacgactggatgtacctgcaggatgagaaccatctgtttaataaaaccgagatgaagaaactgggcgtcaccgtcgccacggtgacgctgttctttacccgtaagacctcagcttag

SEQ ID NO: 163731 - DNA, 459 bp, Enterobacter cloacae
atgacactgatgatgataattctggccatctgcggcggcgcgacgctgagcatacaggccgcaattaatgggcagctcggcagcagcgtgggcgttttcaagagcgcgtttctaacgttttccgtcggcgcgctggtgaccgccctgctcattttcttctttgagcctaagcaggcggtcacgctgctggacgtgccgaaatggcagctcctcggggcgatgtttggcgtgccctatatcgtgataatggtgctcgccgtacagcggatcggcaccgccgtcgccacggtggcggtgatcttcggccagctcgccatgagtatgctgattgataactttggctggctgggcaatcccgcaatttcgttttcaccgagccgtctgagcgcggtggtatgcctggggattgccctgtacttcatctactccagcagcaaaaccggcagcgtccgcgactaa

SEQ ID NO: 163732 - DNA, 435 bp, Enterobacter cloacae
atgcagttggttttgattttactggtgatcgctggcgggatgggcctctccgtcgaggcgggactgctgggccccctggggggaaaagtcggggatttatgggcgacgttcagcatttttggcgtcggcgccgcgctgacgtttctgctgatgctgtttttcagcccgcgcaacagcccgtcgtttttcgcacagcccggctggcagctcctcggcggggtgctgggtccgatctacgtcgtcatactgacgctcgccacgccgactatcggcatcgcgctgacgatgattggcattctggcaggtcaggtttttaaaagcctgctcattgaccactttggcctgctgggtacgccgcacaggaagataaacgcaagacgcatcgtggcgctggtttttattattgccgcactggtactggtcgcaaaggggtaa

SEQ ID NO: 163733 - DNA, 963 bp, Enterobacter cloacae
atggttgacgccagcaacatcaacatccgcgcgctgctgatctttatcgacgtgtatgaagcgcagaacttctccgtcgtggcgcggcggcaggggatatcggcctcgcagatatcgcgcgtgatccaccagctcgaggatgcgctcgggcagcagcttttctatcgcaatacgcgggccgtcattcccacggaaagcggtcatctgtttattcgctacgcccggtcgatggcggagaatcttgaagaggcgcgccgggagctggacgcgcgtgcggtggagccgtccggtgcgatccgcattaacggaccggtgtttttcggccagaagcacatagccccaggacttcccggcctgtcggcacgctatcctcgcctgagcgtagagctgacgctgaccgatgatttcattgacccccaccgtgatgcggcagatcttatcttccgcattggcgtgctgacggactcgtcgtttcgcgcgcgggtgtttgggcagcaggtgtaccatctggccgcgtcgccagactacgtgcgtaaacacggtgcgccagaagtgccggacgatctgaaccaccatcattgcctggtgtatcgcggatcgtcagggcctaaccgctggctgttgcgcagggcgggcgaggcgtggacacactatcccgtgacgccattgatgacctcgaataatgcggaagcgttgctggctgcggcgcttggcgggatggggattgtgctgtttccggactggctggtgagcgagccgctccagcgcggtgagctgattccgctcctgcccgcgctggagtgcgccatcactacggaacaacaggctatcgcggcgatctaccctgatgcccgacatccgcccctgaacgtcagggcggtgattgattattacgtcgagcgctttggtacgccgctgtactggcagcgtaaggggattacgcgccaagctcctggcggataa

SEQ ID NO: 163734 - DNA, 1029 bp, Enterobacter cloacae
atgaaaacattgctcccgacttcaacggctggcagcctgccaaagccgacctggcttgcgcaacctgagacgctctggtcaccgtggaagttacaggatcaggaactgctggcaggcaagcaggatgcgctgcgcctgtctctggatgagcagatccgcgcgggaatcgatatcgtcagcgacggggaacagacccgccagcacttcgtcaccacctttattgaacacctgagcggcgtcgattttgagaaccgccagacggtgcgcattcgtaaccgctatgacgcgagcgtgccgaccgtggtttctgcggttgcgcgccagaaaccggtcttcgtcgacgatgcaaagtacctgcgccagctcacggacaagccgatcaaatgggccctgccggggccgatgaccatgatcgacaccctgtatgacgcgcactataaaagtcgcgaaaagctggcctgggaatttgccaaaatccttaaccaggaagcgcgagagttagaggccgcaggcgtggacattatccagttcgatgaaccggcgtttaacgtcttttttgatgaggtcaacgactggggcatcgccgcgctggagcgcgccattgaagggctgaagtgcgaaaccgcggtccacatctgctacggctacggcatcaaggccaataccgactggaaaaagacgctcggctcggagtggcgccagtacgaagaggccttccctaagctgcagacctctaacatcgacatcatctccctggagtgccacaactcccgcgtgccgatggatctgctggagctgatccgcggtaaaaaagtgatggttggggcgatcgacgtggcaaccaacacggttgaaacgccggaggaagtggccgatacgctgcgaaaagcgctgcagtttgtcgacgccgacaagctctatccgtcaaccaactgcggcatggcgcccctctcccgtcaggttgccaacggaaagcttagagcactcagcgctggcgcagaaattatccgccaggagcttggcgcgtaa

SEQ ID NO: 163735 - DNA, 975 bp, Enterobacter cloacae
atgagcaaagctttcacatatacccttaagcgcagttgcttcgatgagaattacaacccgtcagaaaatacgcgtacgaccaccaactttgccaacttggcgcgcggggaaaaacgtcaggaaaacctgcgcaatacgctggtaatgatcaacaaccgctttaatgccttagcgcgctgggataacccaaacgccgatcgctatgcggttgaactggaaatcatctctgtcgatttgaatattggcgcggaaaagccgtttccggccattgagattctgcaaaccaccattgtcgacaagaaaaacaaccagcgtatccctggcatcgtcgggaataacttctcgtcttacgtgcgggattatgatttcagcgtgctgctgctggagcacaacaagaaccagcagcacttcagcattccggaaaaatttggcgaactgcacggcaatatcttccgccattttgtgagttcacctgaatacaaagagaacttcacaaaaggaccggtgatttgcctgagcgtctccagcaaagatacctatcgccgcaccggtaaccagcaccccgtgctgggcgttgagtaccagccggatggcgaatcgcttacggagcagtacttcgcgaagatgggcctgagcgtgcgctacttcatgccggaacacagcgtggcgccgttcgcgttcttctttaccggggatttgctgagtgattacaccgacctcgaactgatcgccaccatcagcacgatggagacgttccagaagatctatcgcccggaaatttataacgccaactcggcggccggactgtgctaccgaccggatctgaaccagcaggatcactccttaaccaaaattgtgtatgaccgggaagagcgaagccgtctggcgattgaacagggtcggtttaccgaagagtactttattaagccttacaaacacattcttgagccgtggtctgataactacacgctttaa

SEQ ID NO: 163736 - DNA, 492 bp, Enterobacter cloacae
atgcctattcctccctacatgtggctaaaagacgacggtggagcacatattaaaggttctgtagatgttcaggatcgtgaaggtagcattgagatcataggactgagtcatggccttaacctcccggtagacagcgctaacggcaagatcaccggcacgcgtcaacactcatctatgcggattgaaaaggaagttgatagcgccacgccctacctttacaaagcagcatctaccggtcaggcactcaaaagcgctgaaattaagttctatcatattaatgatgccggacaggaagtctgttattacaccgtactaatggagaacgtaaaggttacgggtgttaactgcagcgtgccgaacgtgaaaatcgctgccaacgataaaatgaaccatgttgaaagcgtaagtctgcagtacgaaaaaattacctggcgcatcgtcgacgggaacataatgcacagtgacgcctggaacgaacgccctacagcataa

SEQ ID NO: 163737 - DNA, 522 bp, Enterobacter cloacae
atggccttaaaaggaacgatgctgctaaatggtgctgactatgcgccttttaacctgtacggcgttggcgtgtttatggcgcattccgggcagggaatttacagaaacaacggattttgtggtgcagttaaagggtcgggtccaattcctccaggtaaatactggattgttgacagagggactggaggtttcttttccggtttaaaagcgaaggttcaggatcggtggaataaggtcaggtccggtgcagaatttggccgcgatgagtggtttgctttatacaaggatgactggggaatcgatgatggtacctggattgataacgtctatcggggtttgtttcggctgcatccgggtacggtatctgaaggatgtatcacgattgcccataattctgattacgcactgattcggaatgctctcatgagtacagagcttattcaggttccctgtatgcgttcactgatggcacgcggttgggttgaggtgagtgaaagtggatataccaacgcgtgcccttaa

SEQ ID NO: 163738 - DNA, 540 bp, Enterobacter cloacae
atgacaaaactcaccttacaagagcagatgctgaaagcgggcctcgtcagcagcaagaaagcggcgaaagtgcagcgcacggcaaagaaatcacgcgttcaggcgcgtgaggctcgggaagcggtagaagagaacaagaaggcgcagatcgagcgtgacaagctgctgagcgagcagcagaagcaggccgtgctggcgaaagagtttaaggcgcaggtgaagcagctgatcgagatgaaccgcatcaccgtctcaaggggcaacattacctttaacttcaccgacggtaatctgatcaaaaaaatcgaggtggacaagcaaacccaggctcagctgatcaacggccgtctggcgattgcccgcttggtcatcaacgccagcggcgactgtgaatacgcgattatcccggcggtagtggccgataaaattgcccagcgcgatgccgacagcatcgtgttaaacagcgcgctcagccaggaagagcaggacgaagacgatccgtacgcggacttcaaaatccctgacgatttgatgtggtaa

SEQ ID NO: 163739 - DNA, 687 bp, Enterobacter cloacae
atgtctgcgatcattgattcttttattgccccaccgtgtcacgatgacattcagatcctctggcaggatgaacatctgctgctgatcgacaagccttccggcctgctcagcctctcgggcaaaaatccgcaaaaccttgattccgtccactatcgtctggttcagacgttcccgggctgcacgctggtgcaccgtctggattttggtacgtccgggctgatggtggttgcgtgcaataaggccatcaacgcggcactgtgccagcagtttagccagcgcagcgtggagaaagtctacagcgccttgctttgcggccacgtggaaaatgatgaaggggtcattgacgcgccgattgccaaagacccggcgctgttcccgctgatgtctatctgcgccattaccggtaaacccgcccgctcccgctaccaggtcgtggaacggttttatcagggggcgggattaccgttaacgcgggtgaaactgatcccggagaccgggcgaacccatcagctgcgtattcactgccagcagctgggacacccgattctgggctgcgatctgtatggcggtcttgacgtgccgggtgctgaggaaacgccccggttgatgctgcatgcctgcgagctgaattttattcatcccgtgagcggcgagccggttaacgcccgtcacgccgccccgttctga

SEQ ID NO: 163740 - DNA, 606 bp, Enterobacter cloacae
atgagcaaagtattagttttgaaatccagcattctggcagggtactctcagtctggtcagctgtctgattacttcgttgaacagtggcgtgaacagcattctgctgacgaaatcaccgtgcgtgacctggctgcaaaccccattcctgtgcttgatggcgagctggttggcgcgctgcgcccaagcgatgcaccgctgagcccgcgtcagcaggaagcgctggccctgtccgacgagctgattgctgagctgcaggcgcatgacgtcatcgtcatcaacgccccaatgtacaacttcaacatcccaacccagctgaagaactacttcgacctggtggcgcgcgctggcgtaaccttccgttacaccgagaacggccctgaaggtctggtaaaaggcaaacgcgctatcgtgctgaccagccgcggcggtatccacaaagataccccaaccgacctggttgcgccgtacctgagcctgttcctgggcttcatcggtatcactgacgtgaacttcgtgttcgcggaaggtatcgcttacggtccggaagtggcgaccaaagcgcagaccgacgcgaaagccgccatcgacagcctggttgcagcgtaa

SEQ ID NO: 163741 - DNA, 3903 bp, Enterobacter cloacae
atgacagaacaacaaaaattcaccttcccgatgctcctgcaacagctcgattctctgacgctgcgcgacaaacagcgcttcgcccgccgtctgcacggcgtcaagaaggttaaaaatcctgatgctcaacaggccatttaccaggagatggcgaaagagattgaacaggcggcagggaaggttgtgctgcgcgaagctgcgcgcccggcaattacctacccggaaaacctgcccgtcagccagaagaaacaggacattcttgaggccgtacgcgaccaccaggtggtgattgtcgcgggtgaaaccggttcggggaaaaccacccagttgccgaaaatctgtatggagctgggccgcgggataaaaggcctgattggccacacccagccgcgtcgtctggcggcgcgcaccgtcgccaaccgtattgccgaagagctgcagacggagccgggcggctgcatcggctacaaggtgcgcttcagcgaccacgtgagcgataacaccatggtcaagctgatgaccgacggtattctgctggcggaaattcagcaggatcgcctgctgatgcagtacgacaccatcatcattgacgaagcgcacgagcgcagcctgaacatcgacttcctgctcggctacctgaaagagctgctgccgcgtcgcccggatctgaaagtgatcatcacctccgcgaccatcgatccggagcgcttctcgaagcacttcaacaatgcgccgattatcgaggtgtcaggtcgcacgtatcctgtggaagtgcgctatcgcccgattgtggaagaggcggatgataccgagcgcgaccagctgcaggccatttttgatgccgttgacgagctgggtaacgaaagcgcgggcgacattctgatcttcatgagcggcgaacgcgaaattcgcgataccgccgatgcgctcagtaagcgcgacctgcgccacaccgagatcctgccgctgtatgcccgcctgtccaacagcgaacagaaccgcgtcttccagccgcacagcggacgccgcatcgtcctggcgaccaacgtggcggaaacctcgctcaccgtgccgggcattaaatacgtgatcgatccgggtacggcgcgcatcagccgctacagctaccgtaccaaggttcagcggctgccgattgagcccgtttcgcaggcgtctgctaaccagcgtaagggccgctgcggccgcgtgtcggaagggatctgtattcgtctctattccgaagacgatttcctgtcgcgcccggaatttaccgacccggaaattctgcgcaccaacctggcgtccgttatcctgcagatgaccgcgcttgggctgggcgacatcgcggcgtttccgttcgtcgaggcgccggacaaacgcaacatccaggacggcgtgcgtctgctggaagagctcggggcgatcaccaccgacgagcaggcgacggtctacaaactgacgccgctgggtcgccagctcagccagctcccggtcgatccgcgcctggcgcgtatggtgctggaagcgcaaaagcacggctgcgtgcgcgaggcgatgatcattacctcggcgctctccattcaggatccgcgcgagcgtccgatggacaaacagcaggcctcggacgaaaagcaccgtcgcttccacgacaaagagtccgatttcctcgccttcgtgaacctgtggaactacctcggcgagcagcagaaggcgctctcttcgaaccagttccgccgccagtgccgggtggatttcctcaactacctgcgcgtgcgcgagtggcaggatatctatacccagcttcgccaggtggtgaaagagctgggcattccggtgaacagcgaaccggcggagtaccgcgaaatccatatcgcgctgctgaccggcctgctgtcccacattgggatgaaggacgccgagaagcaggagtataccggcgcgcgcaacgcccgtttcgccatcttcccgggttctggcctgttcaagaagccgccgaaatggaccatggttgccgagctggtagaaaccagccgcctgtggggacgcattgccgcccgtatcgatccggaatgggtggagccggtggcgcagcatctgcttaagcgctcgtacagtgaaccgcactgggagcgcgcgcagggcgcggtgatggcgaccgaaaaagtgaccgtttacggcttgccggtggtcgccgcgcgcaaggtcaactacagccagatcgatccggcgctcagccgcgagctgtttatccgtcacgcgctggtggagggagactggcagacgcgccacgccttcttccgcgaaaacctgaagctgcgcgcggaagtggaggaacttgagcacaagtcccgccgccgcgacattctggtggacgacgaggcgctgttcgagttttacgaccagcgcatcagccacgatgtgatttccgcccgccacttcgacagctggtggaagaaggccagcaaagagacgccggacctgctcaacttcgaaaagagcatgctgataaaagagggcgccgagtcggtcagcaagctcgactacccgaacttctggcatcagggcaacctcaagctgcggctgacctatcagttcgagccgggggcagacgcggacggcgtgaccgtccacattccgctgccgctgttaaaccaggtggacgagagcggtttcgagtggcaaattcccggcctgcgccgcgagctggtgattgcgctgatcaaatctctgccgaaaccggtgcgccgcaactttgtgcctgctccaaactacgcggaagcgtttttgggccgcgtcacgccgctggagctgccgctgctggacgcgctggagcgcgagttccgccgcatgaccggcaccaccatcgaccgcgacgactggaactgggatcaggtgcccgatcacctgaaaatcaccttccgcgtggtggacgataaaaacaaaaagctgctggaagggcgttccctgagcgagctgaaagaggcgctgaaaggcaaagtccaggagacgctctctgcggtggccgacgacggcatcgagcagagcgggctgcatatctggagctttggccagcttccggaaagctacgagcagaagcgcggcaactataaggtgaaagcctggccggcgctggtggacgagcgcgacagcgtggcgatcaaactgtttgataacccgcaggaacagcagcagatgatgtggcgcgggctgcgtcgcctgctgctgctcaacatcccgtcgccgatcaagtatctgcacgagaagctgccgaacaaggccaagctggggctctactttaacccgtacggcaaagtgctggatctgattgacgactgcatctcctgcggcgtggacaaactcattcacgaagcgggcggcccggtctggacggaagagggctttgctcagctgcatgaaaaggtgcgcgcggagctgaacgacaccgtggtggagattgccaaacaggtcgagcagatcctcaccaccgtgttcaacatcaacaagcgtctgaaagggcgcgtggatatgaccatggcgctgggtctgtcggacgtgaaggcgcagatggcggggctggtttaccgcggctttgtcaccggcaacggcttcaaccgtctcggcgatacgctgcgctatttgcaggcgattgaaaaacggctggagaagatggctatcgatccgcaccgcgaccgcgcgcagatgctgaaagtggagagcgtgcagcaggcgtggcagcagtggctgaacaagctgccgccagcgcgccgcgacgatgaagacgtgcaggcgatccgctggatgatcgaggagctgcgcgtcagcttctttgcccagcagctcggtacgccgtatccgatttcggataagcgtattctgcaggcgatggagcagatttccggttaa

SEQ ID NO: 163742 - DNA, 660 bp, Enterobacter cloacae
atgcaacaacagtggtctgcagttgataatttcatgatttcgtcacttattcctgacgatgacgtactgaatcaggtgctggaaaacaacaaacgcgctgggctgcctgaacatgatgtcgcggccaatcaggggcagctgctggcgctgttcgtgcgcatgacgcaggcaagacgcattcttgagatcgggacgctgggtgcctacagctcaatctggatggcgcgcgcgctgccgccggacggtaagctgattacgcttgaggccgatcccacgcatgcccgcgttgcgcgcgagaatattcagcttgcggggttaaacgaacgcattgaattaattgaaggcccggcgctgagctcgctggagaatttcggcgaggttccgccgttcgacctgatctttattgatgccgataagccgaacaatcccggctatctggaatgggcgctgcactactcccgccccggtacggtgattatcggcgataacgtggtccgtgatggcgaagtcattaacggccaaagcgacgacgcgcgcgtgctgggcgtgcggcgttttattgagatgatgggcgataacccgcgcttaaccgccaccgcgctgcaaacggtggggattaagggatgggatgggtttacgctggcgattgtagaacgataa

SEQ ID NO: 163743 - DNA, 1380 bp, Enterobacter cloacae
atgatccttcgcccgatagccgcgctggtggcggcggtcatgctggccggatgccagtccgttgacgtcaaaccagcgcagccgacgctgcacatccccacccagtggcgcaccgtctccggccctgccagcccgacggagcagctctggtggcgtaatttccatgacaaccacctgaaccgctatgtggatcaggcgctacagcataacagcgacgtgctgatcgcccgcgaacggataaacgagtatcaggcgcgggtctatgcggccgacggcagcctgtttccctccctcgacgcgggcgtaaccgggacgcgcgcccgttcacaatccgcggcgaccgggctgccggtttacggcacattgtacaaagggagcctgacggcaagctatgacgtggatatctggggcgtcaaccgcagcacctcgcgcgctgccgaagcctcgctggcggcgcaaaaagccgccgccgcggccgcggatttgaccgtcgcctcgtctgtggcatccgggtatgtcaccctgctctcgcttgacgagcagctgcgggtgaccgagtccacgctgaaatcgcgcgaagaggcgtttaaccttgcgaagcgtcagtttgagacgggctacagctcgcgcctggagctgatgcagtcggattccgaacttcgctcaacgcgggcgcaggtgcccgtgctgcagcaccagattgcacagcaggagaatgccctcagcctgctgctgggaagcaacccgggcgacgtggcgcgcagtgaaagctatgcagcactgacgccgctaacgctgccgtcgcagctgccttctacgctgctgaaccgcaggccggatatcgtccaggccgaacgccagctggtggcggcggatgcctcgctcgcggcgtcgcgcgccagcctgctgccgtcgatcaacctgaccgcgacaggatcggttcaggatcgcaccctttccggcctgctggacaacccgcttcagctctggagcgtcggaggcagtattctcgccccgctgctgaaccgccaggcgctgaatgcgcaggtggatatttctcagtcccagcgtaaccaggcgctgtacgcctatgaaaagaccgtgcgtaacgcgtttgccgaagtgaacaacagccttgatgcgattacgcgctatcaggaacagctgacggagctgcttgcccagcaggatgtggcccaggagacgctgcgcattgcgcagaatcgctatcgcaacggttattcctcctatcttgacgtactggacgcgcagcgcacgctgttctcggtccagaccagcgtcgtgcaggtgaaaaataacctgctgctggcgcagattgatttgtacagagcgctgggcggcggctgggtcagtgcctga

SEQ ID NO: 163744 - DNA, 1083 bp, Enterobacter cloacae
atgagtcagcaggatgccgccaaagagcaggccaacacccgcaaaaatgtgcgcattgtttccgttttcaccgccgccgccatcggtattgtcggcgtgctggtgatcctttatgcgtggcaactgccgccgttcacccgtcacgcgcagtttaccgataacgcctacgtgcgcggccagacgacgtttatcagcccgcaggtgaacggctatatcaccgaggtgaaggttcaggactttgtgcaggtcaaaaaaggcgatctgctgctgcagatcgatgaccgtatctatcgtcagcgggtgcatcaggccgaggcgcagctggcgatgaaaattgccgccctgaataacaacctgcagcagcgtaaaagcgccgaagcaacgatcgccaaaaatgacgccgcgctgaaaaatgcccgcgcccagagcctgaaaagccaggcggatttaaaacgggtgaaagagctgacggcggacggctcgctttccattcgcgagcgcgacgccgcgctggccagtgccgctcagggtagcgccgacatcgaccaggcgaaagccgcccttgagatgtcgcgtcaggatctgcagacggtgattgtcaatcgcggtgcgctggaagcggatgttgaaaacgccaaagcagcgctggagctggcgcagattgacctgcaaaacacccgcattgtggcgccgcgtgacggccagctcggccagatcgccgtgcgtctcggggcctacgtgaccgccggaacccatctcaccaccctggtgccgccgcagcactgggtcatcgccaacattaaagagacccagctcgcggagctgcgcgtcggccagccggtgaagttcaccgttgatgccctgaacaacaaggcgtatcaggggcgtgtggagagcatctctccggcgaccggggttgaattcagcgccatcacgccggataacgccaccggcaactttgtcaaaatagcccagcgtattccggtgcgcattgaggtgctcggtaagccagaggacgccgcgctgctgcgtccgggtatgtcggtgcaggtaaccattgatacgcgggaggcgaagcaatga

SEQ ID NO: 163745 - DNA, 1653 bp, Enterobacter cloacae
atgcgcctgcccgaacgcgacccttatgctcctcgcgagtggcagccacatgagaaacccgccctgctgggttcgccctccacgcccgaacacagtacgccaaaacgcattgcctatggcgtcgtgggcctgctggtctgcctgacgggtgcgctgggcaatgcggtggtgaccgccaacctgcaaaatttgcaggggaccttcggcgcctggtcaaccgaaatcgcctggctgcccgcggtttatgtgatgaccaacatctccatcaacctgctgctggttaaattccgccagcagtacggcctgcgcgcctttacggaaggttttctggtgctgtacgtgctggtcacctttttccacctgttcgttaacgatctcagctcggcgctgatggtgcgcgccgcgcacggcatggtggccgccgcgcttagctcgctggggatttactatcagatccaggcctggcctgcgaagcaccgcctgaaggcgctgaccatcggcatcaccggatcgtcactcgccatcccgctggcccgcctgttttcaaccgagctgctgcagctggacgagtggcgcgggctctatttcttcgagctgggactggcgctgatctccctggcctgcgtcatcgccttaaaattaccgccgggcgaccggcgcaaggtctttgagaaaaaagactttatcaccttctttttactggctcccgggatggccctgctctgtgccgtcctctctctgggccgccttgactggtggttcgaagcgccgtggatcggctggtcgctggcgctatcgctggtgctgattgtcgcagccatcgtctttgaacataaccgcagcaacccgctgctgaacacccgctggctgtcgagcggcagcatcgtccgcctggggctgattatgctgctgatccgtatcgtgctggccgagcagaacaccggcgtcatcggctggctgcagtacgtgggcttacagaacgagcagatgacgcatctggcgtggtccattttcgccggtatcgtctgcgggattgtcaccagctgtctcaccatcaagccgacgaaactggcgtggccaatcatcacgtctctggcgctgatgattgttgcctcgctgctggacagccagtccaacaacctgacccgtccggatcagctgatggtaagccagttcctgctgggcttcggcagcgccttcttcctggcgcccgctatgctggccgccattggcggggtgatcgccgacccgcgtaacctggtcagcttctcggtgatgtttggcatgagccagaacctcggcggcctgctgggctccgcgatcctcggcaccttccagacctggcgcgagaagtaccactccagcctgctggcggaccagctcaccacgctcaacccgctggtcaacgagcgaattcagctttatacccagatgtacaaaagcctgattggcgacagcgcgctgctgggcacccaggcgataacgcagctgcaaacggtcaccgcgctggaggcgaatattctggcttataacgatacttatctgctgacggcgagcatcgctgccgccacgctggtctggattttatggcgcttgctgcgcctgcgcatcactgcccgtctggcgctgaagaacgccaccggcaacaaataa

SEQ ID NO: 163746 - DNA, 1320 bp, Enterobacter cloacae
atgacagaacatgaaagtacgacgacggtgttacgtaaaaataaaaaggtgttaatcgccagccttaccgggagcgccattgaatggtttgactattttctctacggtacggcggccgcgctggtcttcaataagatctttttcccgatggtcgatccggtgatcggactcatcctctcttatctctctttctcattaaccttctttattcgccccatcggcggggtacttttcgcccacatcggcgaccgcatcggacgtaaaaaaaccctcgtgctgaccctctctttgatgggaggtgcaaccgttatgattggcctgctgcccacgtatgagatgattggcctctgggcgcctgctctgctgatcctgatgcgcatcattcaggggatgggcatcggcggtgaatggggcggcgcgctgctgctggcctatgaatacgcgccagaaaaacgtaaaggcttcttcggcagtattccgcaggcgggcgtcaccatcggcatgctgatggcaacctttatcgtgtcgctgatgaccctgttcagcgaggaggaatttctctcctggggctggcgcatcccgttcctgctgagctcggtactggtgttgctcggcctgtggatccgcaaagatattgacgaaacgcccgattttcagaaagtgaaagcgtccggtcaggtagcgaaggccccgctgcgcgatacgctgaaacatcactggcgtgaagtgttgattgccgccggtctgaaggtggttgaaaccgcgccgttctatattttctcgaccttcgtggtgagctatgccaccagcacgctgacgtatcagaaatcgcaggcgctggaagccgtgacgctgggagccctggtggcgaccattatgatcccgctaatggggctgctctccgataaggtaggccgtcagcgcatgtacgcaatcagcgtcttcgtgctgggcctgtttatcgtaccgtggtttatgctgctcaataccggcaccacatggggtatcgtgctcgcgacggtcatcgcctttggcgtgttgtgggcccctgtcacggcggtactcggcacgctgtgctctgaaatctttagcgcaaacgtgcgctacaccggcattacgctcggctatcagctgggtgccgcgctggctggcggtaccgcgccgctgattgccaccggcctgctggcaaaatacgacggcgactgggtgccggtggcctggtatcttgccgtcacggtgaccatttctttaatcgcgattttctgcgccagccgcgttaagcgcaccactctcatccaggcgcagcccgaacgtctctga

SEQ ID NO: 163747 - DNA, 795 bp, Enterobacter cloacae
atggttcagccccattttcccgttctggcggatgccacgctggcggctttcaatactgtcggtgaatggctggcgcaggacgacctgagcgcgacgagtccgctcccggaagtcgatgcggtgattctggccggaaacgcggtgatccccaccattgacgcggcctgccgtattgccgcccagaacgacgtgccgcttctgatcagcggcggtatcgggcattcgaccccctttttatatgccgccatcggcagccatccgcgttatcacaccgtaccggtcacagggcgggccgaagcgagcattcttgccgacattgcgcgggcgttctggcagatccccgaggcgcgtctgtgggttgaggatcgctccaccaactgcggtgaaaacgcgcactttagctggaacatgctgaaacagcgtcatcgaacgaccgggcgggtgctggtggtgcaggatccgacgatgcagcgccgcacgatgtcgacgtttgcccgcgtgtgtcgtgatgagcccgattcaccgcagtggatcagccatcccgggtttacgccgacgctgcaaaacggtaacgagggcgtggaattcagcgagggcaacactggcctgtggcccgttgaccgttacctttcactggttatgggggagctgccgcgcctgtatgacgacgccaacggctatggcccggccgggcgggattatattgctcacgttgaattccccgaggccgtcatggccgcgtggaaacagctgcagcaggatcctgtcctgaagggcgcacgtaaaataatttag

SEQ ID NO: 163748 - DNA, 1002 bp, Enterobacter cloacae
atgagtaaaattggcattaacggatttggacgcatcggacgtcttgttctgcgccgccttcttgaaacccaggacagtaataccgtcgtcgccatcaacgacctcacctctcccaaagtgctggcctacctgctcaggcacgactccaactacggtggcttcccgtggagcgtggatttcaccgaggatgcgctgatcgttgacggtaaaaccatcgcggtgtatgccgaaaaagaggcaaagcacattccgtggaaagccgcgggcgtggatatcgtcgtggagtgcaccggcttttatacgtctgaagagaaatcacgggcgcacctggacgcgggcgcgaagaaggtgctgatctctgcgcctgcgggggacatgaaaaccatcgtctacagcgtgaacgacgagaccattgacgccagtgataccattatttccgtcgcctcctgcaccaccaactgcctcgccccgctggcaaaagccctgaacgacgcgtttgaaattaaggtgggcaccatgaccaccattcatgcctataccggtacccaggcgctggtggatggcccgcgcgggaaagatcttcgcgcctcccgggcggcggcagagaatatcattccgcacaccaccggcgccgccaaagccatcggtctggtgatccctgcgctcagcggcaaactgaaaggccacgcccagcgcgtgccggttaaaacgggctccgtgaccgaactggtggccattctgggcaagaaagtgaccgttgaggagatcaacgccgcgctgaaaaaggccactcagggcaataaatccttcgggtataccgatgaagagatcgtgtcgtcagatgtgattggctcgcattatggttcggtgtttgacgccacgcagacggaggtgtcagaagcgggagaccttcagttggtgaaagccgttgcctggtatgacaacgagtatgggtttgtgacgcagctggtgcggacgctggataagtttgcggcgctgtga

SEQ ID NO: 163749 - DNA, 531 bp, Enterobacter cloacae
atgcgcactaaatatacaagcctgcaaatcggcatccactggctggtgtttctgttaatcatcgtcgcctactgcgccatggagttcagaggtttcttcccgcgcaccgcgcgcccgacgatcaacatgatccacgtctcatgcgggatcagtatcctggtgctgatggtgacgcgtctgctggttcgcctgaaattccgtgcaccaccgattcaaccgaagccaaaagcgatggtgacggggatgtctcatctggggcatctggtggtgtatctgctgtttattgcgctgccgctgattggcattgtgatgatgtataaccggggcagcgactggtttgcttttggcctggcgatgccgcatgcggcggagtccaattttgacctggtagatatgctgaaagagtggcacgagacgctggcaaatctgggctattttgtgattggcctgcacgccgcggcggcgctgatgcaccactatttctggaaagataatacccttctgcgcatgatgccgaaaaagcgttcgtag

SEQ ID NO: 163750 - DNA, 1068 bp, Enterobacter cloacae
atgagtacagttcgaacaattaacattgcgctgatcgggtatggatttgtgggcaaaaccttccatgccccgttaatccagtctgtggacgggcttaagctggccgtggtctcttctcgtgatgaagagaaggttaaacgcgatctgccggacgtagaggtggtcgccacccctgaagaggctattcagcatccggatgttgatctggtggtgattgcctcccccaacgccacgcacgccccgctggcgacgctggctctgaacgccggcaagcatgtcgtggtggataagcctttcaccatcgacatgcaggaagcccgcgacctgatcgcgctggcggaggaaaagcagcgtctgctctccgtcttccacaaccgccgctgggacagcgatttcctgggcattaagcagattattgagcagggcacgctcggcaagattaaacatctggagtcgcatattgaccgcttccgcccggaagtgcgcgtgcgctggcgcgagcagaacgtccccgggagcggcttatggtttgacctgggtcctcatcttatcgaccaaacgctgcagctctttggcctgccgcagtcggttcaggggaatatcgcgacgctgcgcgacggcgcagaaatcaacgactgggcgcacgtggtcttaaactacccggagcataaggtgattctgcacgccagcatgctggtggcgggcggtacggcgcgctttgccgtccacggggacaagggcagcgtggtgaaggccagaattgaccagcaggaagcacagctgctctccggggtgatccccggcagtgaggcctggggcgaagacagcgacagcatggtgttctttggcgctgacggcgcatcgcagacgatccctaccccgaaaggcgatcagcgtcagtactacatcaacgtgcgtaatgcgctacgcggggaaatcgccaatccggtccaccctgttgaggcattagcggtgatggctgtgctggaagcggcggtgacgtcgtcggaaacggggtcaacgcagacgctggcgttaacggctgaagagcgtgctctgttgggttaa

SEQ ID NO: 163751 - DNA, 744 bp, Enterobacter cloacae
atgcacaaaactgcacgacagcgccacgttctggatatcctgagcgagcaaggccaggccagcatcaccgaactggcagaaaagctgcaggtttcagccgataccatccgtcgggatctgaccgacctggagaaccagggcctggcgcagaagaaccacggcggagccatcgcgctgaatctctccgccatgaaccgtcagggccgcaatacgctgctgccggaaaccaaacagcgcctcggaaaacaggtcgccctgcaggtccctgcgggttctaccctgtttctggatgcgggcagcacggtaatggctgtcgcctcctttcttcgcgggccgctcaccgtcataaccacgtcgctggatatcgcccagcattttagcgaccgggaagacgttgaactgatcctgctcggggggaaatgggaccaccagcagcgcctgtttgccggaagcgccacgttgtcgttgctgtcccgttatcgggcagatatcgccatcctcggggcgtgcgccattcatgccgaactcggtttgagcgccggtaaagaagcggatgccgaggttaagcgcgcgatgcttgacgcaagccatgcgcactggattgttgccgaccacctgaaagtcaaccgctgcgagccgtatctggtttccgggttatccaacattcaacaactttttttagatcgtccctggcctgagcttggggaccctggcgcattgcaggtcacggtgtgcgcgaattaa

SEQ ID NO: 163752 - DNA, 18006 bp, Enterobacter cloacae
atgagtaacataaaggttgttgatgtcatcattcgcaaaacggcggagaaaacgaaattaaccggcgaaggaaatttgtcggtctctatttcctccccgagcgtgattgaaatccagggttctgctcaggatgtggtgcgatatgtccgccagggtaaagacctcctcatttatatgaaagatggcagcgtgattcgctgcaataactattttgttgaagatcctgagacgcacaaccagtcagagctggtgttcaacgatcgtcaggaactgacgcatatttcttttgccgataccggggaagcgtcaggcgttgcggtgaccgagctaaccgcgcaggccacaccgattagcagcattcaacctttcctcgagcagggaagcgtcttaagcgacgccccgtggggctggattgcgggagctgcattaggcggcggtgccatcggggcgctgctggcaaacggcggcgacggcgagactaaaacaaaagttattgataatacgaaagaggtggaaagcgccacgccaaccttcctgctgtcggataaagcgggcgataagcagggcgtgctgacagcaaacgcgatcacggacgacaacacgccaacctttagcggtaccggtcagccgggcgcgaccatccagattaaagacagcagcggcagcaccatcgccagcgccatggtcggtaaagagggcacctggacggtaaaattaccgacccagacggacggggaacacacctggtcggtggtgcagatcgacggcagtaaaaccaccgatgcgggcaacattaccgtaacggtctcgaccgccgaggctgccattacgctggctaccacagcgggcgacaacgtgcttaacgccagcgagcaatccgcgggctttacgctctccggtgccagcaagaatctggcgcagggtaccgcactcaccgtgacgctgaacggtaaaacctatacgacggaagtgggggctgacgggacgtggagtgttaacgtgcccgcggccgacgcgcaggcgctgggcgatggcacctggacggtcaacgtcagcggcaaagacgcggcgggtaacaccgtgagcggcagccagacaatcggcgtggatagcgtcgcgccaaccctctctgtcgataccctcgcgcaggacaacatcattaatgccgccgagcacagccagccgctgacgctgaccggcaaaacgactgcggaagccggtcagatcgtcacggtcacgctgaacggtaaaaactacaacgccacggtgggcagcgacggtacctggtccgtcacgcttgctggggacgacgtgcaggcgctcaacgagggtaatcacaccctgaccgtgaacgtcagcgacaaagcgggcaacggttcgtctgtgaccgcagatttcacggtggataccaccgcgccggtggtcaccatcgataccgtggcgggcgacgacatactgaacaccagcgaacagggccaggcgcagattatttccgggcagacgagcggcgcgtcggcaggcgatgtggtcaccgtgaccgttggcggccagtccttcaccggcgtggtgctggcggacggcagctggagcgtgggcgttccggcatccgtgctgggcgcgctgggtgaaggcaaccacacgatttcagtatccgtgaccgacgcggcaggcaacaccggcagcgccacgcacggcattacgctgagcggcaacccgccagaatttacgattgacgccattagccaggacaacgtgctgaatgcccaggaggcgatgcagccgctgagcctgaccggtaccagcaacctgcctgacggcagcgccattaccgtgacgctgaacaacgtcagctatcaggccaccgttgaaaacggcatctgggcggtccaggtgccggtttccgacgtgctgaatctggcgaacaccctctacaccgtcagcgtcagcggcactgacagcgtgggtaacagcggctctgccggggcgacgctgctggtggataccgtgctgccgcaggtggtcatcaacacctttgcgggcgacaacctggtcaataacgccgaagcgggtgtcgatcaaaccctcagcggtcgcgttaccggcgcgacggcgggcgataccgtttctgtcaccgtgggaggcaagagctacaccgccacggtgggcagcgatctgacctggagcgtgaaaatcccgtcagcggatcttaaggcgttcggcgacggcgatttaaccttcaccgcgtcggtgaccaattcgcacggcaataccggtaccggcgagcgcgatatcaacatcaacgcacagctgccgggcctgcgtgtgaacaccatttccggcgatgacgtgatcaacgccatcgaacagcagcaggatctgaccgtcaccggcgccagcacccacctggccgcgggcacgccgatcgtcgtcaccattaacaacgtcgaatataacgccgtggttaccgccagcggcggctggagcattggcgttcctgctgcggacctgcaggcctggaccgcgggagaggtgacggttagcgtcagcgcaaaagatgcctggggcaataccgttgcggctgaacacccgattgaactcgatctcaacgccgtggcggtcaccattgataccgtctccggcgatgacctgctgaatgcggcagaaaaaggtgccgatttaactctctccggaaagacgcagggcgtggaggcggggcagaccgtggtggtgaaattcgccgaccagacctttaccgcccaggtgcagcaggatggctcctggagcctgaccgtgcccgccagcgccatggaaaccctgatcgacgggcgggcgcaggtgagcgtcagcgtcacgaacgtcaacggtaacagtgccgacgcgtcgcgcgtggtcacggtggatacgctgccgccggcgattaccctcgataacctcaccagcgataacatcatcaatgcggcagaggcgcagcaggatttagccttaagcggcaccagtactgcggaaccgggccagacggtcaccgtgacgctgaacggcaaaacgtatcagaccacggttcagacggacggaacctggcagctgatcgtaccggcggctgacgtcggtgccctcaacgatggcatcgtgaccgtgacggccaccgtaagcgacgtggcgggcaacagcagcagcgccgaccgcgtgggtctggtggacgcgaccgtgccgcaggtgaccatcaaccacttcgtcaccgacaccaataccgttaaccagctcgcccatgcacaggctcagatcctgagcggctccgtcaccggggcggcagcgggcgatcgggtgactatcactattaacagcgtcgattacaccaccgtggtggatgcggcaggcaactggagccttggcctgccggcgtctgtcgtacaggggctgacggacggtacctggaccatcgacgtctccgtgaccgaccgatccggcaataccggaagcagttcactggatgtggtggtgaataccgtgacgcctgttatcggtatcaacacgctggcggcggacgacgtgatcaacgcgaccgagaagggcgaagaactgcagatttccggcaccagcaaccagccggaaggcacgaccattacggtgaccctgaacggcattcactacacggctaccgctgacgccagcggaaactggagcgtaaccgttccggcggcaaacgtctcggcgctgggcgaagcgaattacaccgtgacggcgaacgtcaccgatagcgtcggcaacagcgcttcaacctcgcacgacgtgctggtggacagctcgctgccggtggtaacgatcgacacgctggcgggcgacaatatcgttaacgcggcggaagtggcggcagggcaaaccctgaccggtaaggtgacaaatgcggcgccaggtgacactgtcacgattaccctgggcggccagacctttactgccaccgtacaggacgatctcacctggagcctgccgttaacccagagccagttgaccgcgctgggcaacggcgatctcaccgtatcggccagcgtcaccaacgcgcacggcaataccggttcttcttcgctcgacttcaccatcgacgcccagcttccggggctgcgtattgatacggtcgcaggcgacgacgtgatcaacgtgattgagcacgctcagaacctgattgtgtccggcaccagcaccgatctggcggctggcagcgccgtcaccgtgaccatcaacggaaaagcgtattccgcaacggtgctggcggacggcacctggcaggcggcggtaccggcggcggacgtgtcccagtgggcagatggctcgctggatatcaaggcaagcgcgcaggatgcctccggcaacccggtggctatcgggaccgtcgtggacgtcgatctcgcgccggttgccatcaccatcagcagcgtgaccgacgacaacgtccttaacgcagcggaaaaaggccaggatctggtgctgtccggcacgtcatctcacgttgaagcgggccagaccgtcaccattatcttcgcaggaaaaacgtacaccacgacggtggatgcctacggcgactggacctggaccgttccggctgccgatctgagcggcctgaaagacggcgacgccagcgtgcaggtcagcgtcaccaacgtgaacggcaacgccgcgtcttcggcgcaggcattcagcgtcgacaccaccgcgccgacggtgaccatcaacaccatcagcggcgataacatgctgaatgcggcagaggcagcgcaggatctgaccctgagcggcacttctactgccgaagcgggccagacggtcaccgtgaccttcaacggcaatcagtacaccgcgcaggtgcaggcggacggcagctggacgctcgacgtgcctgcggcggatctggcaggcatcaccgacggcaacgcggcggtcacggcgaccgtgtccgataaagcaggtaacccggccagcgcgggctcctcggtgctggtggacaccaccgtaccgcagattagcttcaacgtcgtcgcgggcgacgacatcgtgaatattgccgagcacggccaggcgctgatcgtctccggtaaggtgacgggcgcgcaggcgggcgacgtgattaccgtgaccctgaacggtaaagattacaccgccatgctggacgcgtccggcagctggagcgtgggcgttccggcggcggacgtgggcgcgctggtcaacggcgaccagacgatctccgcgaccctcaccgacaaagccggtaacagcaccactgcgacgcacgaatttgacgtctccctgaccgcgccggtggtcgccatcaataccctggcggctgacgacgtgatcaatgcgaccgagaaaggccaggatctgcaggtgtccggcaccagcgaccagccggaaggaaccgccattacggtgtccctgaacgggattaactatacggccaccaccgacgcgagcgggaactggagcgtgaccgttccggcggcaaacgtctcggcgctgggcgaagcgagctacgccgtgacggcgagcgtaactgacgccgcgggcaacagcgcgagcaccggtcacagcgtgctggttgacagcgcgctgccgcaggtcaccatcaatccggtcgcgacggacgacgtgattaacgcggcggaagtggctgccggtcagaccctgagcgggaaagtgagcggtgcggcgagcggtgacactgtcaccattaccctcggcggcaatacctataccgcgacggttcaggacgatctgagctggtcggtcaacgtgccgtcctcggtcttaaccgccatcggtaacggcgatctgacggtgtcagccagcgtcactaacggccacggcaacaccggcaccggcgagcgcgacatcaccattgatgctaacctgccgggcctgcgcgtcgataccgtggcgggcgacgatgtgatcaatagcatcgaacacgctcaaaacctgataatcaccggttccagcgacggtctggcaacgggcgcggcgctgaccgtcaccgtcaacggcaaaacctacgcggccaccgtactggcggacggcacctggacggcggccattccggcggccgacgtcagcgcgctcggcgcgggcacggttaccgtgaaggttgaaggtcatagcgcggcgggcaacccggtttccatcagccatgacgtgaaggtggatctggcgacagtcgccatcagcattaacccgattgcctctgacgacgtgattaacgcggcggagaaaggcgcggacctggtgctgtccggctccaccaccaacgtggaagaaaaccagaccgttaccatcaccttcggcggcaaatcgtacaccgcgacggtggatgccgacggcaactggacggccaccgtgccgtctgccgatttgggcagcctgaaggacggcgatgccagcgtgcaggtgagcgtcaccaacgtgaacggcaacagcgcgtcggcaggccgcgagtacagcgtggacgccaccgcgccgacggtgtctatcgagatcgtcagcgacaacaacatcatcaatgcggccgaggcgcagcaggatctggtcgttaatggtgtaaccaacgccgaagcgggccagaccgtcaccgtgaccctgaacggcgtggactacaccaccaccgttgaggctaacggcagctggagcgtgaccgtgccgtccgcggatctgagcggtattaccgacgggaactacaccgtcagcgccgccgtatcggacaaagcgggcaacccggcctccgcggatcgtgacgtgctggtcgataccaccgtcccgcagctgaccattcacaccgtgtccgacgacaacgtgatcaacagcgccgagcacgcgcaggcattgattgtcacgggctccgtgaccggcgcggcggcgggcgacgtggtcaccgtcaccctcaacggcaaatcgtacaccgccaccctggatgcctccggcaactggagcgtgggcgtgcctgcggcagacgttaccgcgctggccgccggggattacactattaccgcggcgctgaccgataaagcgggcaacagcaacagcgccacgcacggtgtggcggtgaacctgaccgcgccggggctgaccattgacaccgtttccggtgacgatgtgatcaacagcaccgagaaaacccaggatctgacgatctccggtacggcgtccggcctggcggcaggcgcggtagtgaccgtgatgctcaacggcaaagcgtacagtgcgcaggtggacgataacggaaaatggaccaccaccgttccggcgagcgaagttggtcagctgggcgaggcgctttataccgtcaccgcgtcagccacggacagcgtcggcaacagcaccagcgcgacgcacacggtaaacgtggagtccgttctgccgggcgtgattatcaacaccattgcgggcgacgacgtgattaacgccgccgagctggctgccggccagaccatcagcggtaaggtggtgaatgccgaagcgggcaacaccgtgaccgtgaccattggcggcaaccgctacaccgcaacggtgcagaacgatctcacctggtccgtcgatgtgccggaatctgtcctgaccgccctgggcaacggcgatttgacggtgaccgccagcgtgaccaacggcgtcggcaacagcggatccgctgagcgcgatatctcgatcgacgctaacctgccgggcctgcgcgtggataccgtggcgggcgacgacgtgatcaacagcatcgagcacgggcagaatctgattgtgaccggatccagcgatggcctgaccgcaggtaccaccttgaccgtcaccgtaaacggcaaaacctacccggccaccgtgctggccgacggcacctggcgtgcggccatcccggctgcggatgtgggtgccctggcagcaggtccggtcaccgtgaccgttgcaggccagagcagcgccggtaacccggtttccatcagccacgatgtgacggtggatctggcgaccgttgccatcagcatcgatgcgattgccgccgacgacgtgattaacgccgccgagaagggcgcggatctggtgctctccggggcgacctcgaacgttgaggaaaaccagaccgttaccatcaccttcggcggcaagagctacaccgcgaccgtcggcgccgacggcaaatggacgaccacggtgccagccgccgacctggcgggtctgaaagacggcgacgccagcgtgcaggtgagcgtcaccaacgtgaacggcaacagcgcctcggcgggacgtgagtacagcgtggacgcgaccgcgccgaccgtcacgattaacaccctggcgacggatgatattctgaacgccgccgaagcgaagagcgatctgacggtttccggtaccagcaccgccgaagcgggccagacggtcaccgtatcgctgaacggcaaagactacaccaccaccgtcagcgcagacggcagctggacgctgaacgttccggcggccgatctggcaggattaaccgacggcagcgtcaccgtgaccgcatcggtcagcgacaaggcgggtaacccggcgtccgtggaccacaacctgacggtggatgtgaccgttccagctgtcactatcaacaccatcgcgggtgacgatgtgattaacgtggctgaacacagtcaggcacacgttatcagcggcaccgccaccggcgcggccgcgggcgataaggtgaccgtcaccattggcggccagacctacaccaccgtgctggacgcggcggggaactggagcgtgggcgtaccggcgagcgtgatttccggcctcagcgacggcagcgtgaccgtcacggcatcggttaccgacgcggcgggcaataccggcaccggcacgcataacgtgaccgtcgataccggtctgccttcggtcagcttcaacgccatcagcgacgataacgtgctgaacgcggtggaaaaaggtcaggatctgagcgtgagcggcaccagcgccaacctggcggaaggcaccgtggtgaccgtgaccctgaacggcaaaaactacacggcgacgacggcggcagacggtacctggagcctgacggttccggcggcggatctggccggtctgggtcaggccaactacaccctgaacgcgaccgccaccaacggcgtgggcaacagcgtcagcaacaccgcgaacctgctggtggacaccgcgctgccaacggtcaccatcaacaccgtggcgggcgataacgtcattaatgcggcggaagtggccgcaggccagaccctgagcggcaccgtggcgaatgccgaagcgggcaataccgtgaccgtgaccattggcggcaacagctacaccgcaacggtgcagaacgatctgacctggtccgtcaacgtgccgtctgacgtgctgacggcgctgggtaacggcagcctgagcgtgacggcgaccgttaccaacggccacggtaacaccgggaccggcgagcgcgagatcgctatcgacgctaacctgccgggtctgcgcgtcgataccgtggcgggcgacaacgtggtcaacagcatcgaacatactcaaaacctgatcgtcagcggatccagcgacgggctggcgccaggtacagccctgaccgtcaccatcaacggcaaagactatgcggccacggtgctggcggacggcagctggagcgcggctgttccatcagcggacgtgagcgcgtggccggaaggcaccgtcaaaatcagcgtcaccggcgacagcgcggcgggcaacccgattaccatcagccacgatgtgacggtagatctggcgaccgttgccatcagcatcaatccgattgcgaccgacgacgtgattaacgcggcggagaagggcgcggatctggtgctgtccggtgcgaccatcaacgtggaagccgggcagaccgtgaccatcagcctgaacggcaaaatctatagtgcgacagtagacgacagcggcaactggacctggaccgtaccgtctgcggatctggctggcctgaaggacggcgatgccagcgtgcaggtgagcgtcaccaacgtgaacggcaacagcgcctcggcgggccgcgagtacagcgtggatgcgaccgcgccgagcgtgaccatcaacactctggcgacggacgacattctgaatgccgccgaagcgaagagcgatctgaccgtgtccggcagcagctctgccgaagcgggccagacggtgaccgtgtcgctgaacggcaaagactacaccaccaccgtcagcgcggacggcagctggacgctgaacgtcccggcgtccgatgttgcggccctgacggacggcagcgtgaccgttaccgcaagcgtcagcgacaaggcgggtaacccggcgtccgttgatcacaacctgacggtggacgtcaccgttccggcggtgaccattaacaccgtggcgggcgacgatgtcattaacctcgcagaacacagccaggcgcatatcatcagcggcaccgccaccggcgcggccgcgggcgataaggtgaccgtcaccatcggcggtcagacgtacaccaccgtgctggacgcggcggggaactggagcgtgggcgtaccggcgagcgtgatttccggcctcagcgacggcagcgtgaccgtcacggcatcggttaccgacgcggcgggcaataccggcaccggcacgcataacgtgaccgtcgataccggtctgccttcggtcagcttcaacgccatcagcgatgacaacgtgctgaacgcggtggaaaaaggtcaggatctgcgcgtgagcggcaccagcgccaacctggcagaaggcaccgtggtggccgtgaccctcaacggcaaaaactacacggccacgacggcggcagacggtacctggagcctgaccgttccggcggcggatctggcgggtctgggcgaagcgaattacaccctgagcgcgagcgccaccaacggcgtgggcaacagcgtgagcaacaccgcggacctgctggtggataccgcgctgccaaccgtcaccatcaacaccgtggcgggcgataacgtcatcaacgcggcggaagtggccgcgggccagaccctcagcggcaaggtcgcgaacgcggaggcgggcaataccgtcactgtgaccattggcggcaacacctacactgcaacagtgcagagcgatctgacctggtccgtgaacgtgccggaatccgtcctgacggcgctgggcaacggcgacctgacggtgtctgcgactgtgaccaacggccacggcaacacgggaacgggcgagcgcgaaatcgttatagacgccagcctgccgggcctgcgcgtcgatacggtagcgggcgacgatgtgatcaacagcatcgaacatactcaaaacctgatcgtctccggcaccagcgacgggctggcggcaggcacaacgctcaccgtgaccgtcaatggcaaaacctatgcggcctccgtgctggcagacggctcctggagcgcggcgatcccggcggcagacgtcgcggccttcgcagcaggtacggtcaccgtgaccgttgcaggccagagcgcggcgggcaacccggtgaccatcagccatgacgtgaccgtcgatctggcggcggtggctatcagcatcgatgcgattgccaccgacgacgtgattaacgcggcggagaagggcgtggatctggtgctctccggcagcacctcgaacgtggaggaaaaccagaccgttaccgttatcttcggcggcaagacgtacaccgcgaaggtggatgctgacggtcactggaccgccaccgtgccttccgccgatctcgcgggcctgaaggacggtgacgccagcgtgcaggtgagcgtcaccaacgcgcacggcaacagcgcctcggcgggccgcgaatatagcgtggacgcgactgcgccaaccgtaaccattgatacggtcgcaggcgataacgtgattaacgccagcgaagcggctgcgggcgtggccatttccggcaccaccacggcggaagccgggcagacggttaccgtgacgctgggcgggaagagctataccgcccaggtgcagcagggcggcgtctggagcgtgaacgtgccgggcagcgatctgaccgcactggcggatagcggctacaccgtgcaggtgagcgtgagcgacgccgcggggaacccgggcagcgcgggcaagacgattacgcttgataccacgccgccgaccgtcagctttaacgtggtggcgggcgatgacgtcattaacagcgtggagcacggccaggcgcagatcgtcagcgggtcggcaaccggcgcgaacgtcggtgataaagtggttatcaccctcggttcgcaccagtacaccaccaccgttgacgccagcggcaactggagcgtgggcgttccggccagcgtgatttccgccctgaccgacggcaccgtgaccctcagcgcgaccattaccgacagcgcgggtaacagcagcacccagacccatgacgtggtggtcaacaccgcctccgtggcgctgacggtgaacaccgttagcggtgacgacgtcatcaacgcggctgaagccggttcgtcactggtgattaacggttccagcgcgcagttcgccagcgggacccaggtcaccgtgaccctgaacggcaagacctatacggctacgatccagagcgacggcacctggacgaccaccgtaccggccgccgacgtgggtgctctggccgatggcgcacgctatcaggtgtcggtgtcggcacaggacagcgcgggcaacagcgcgtcggcaacgcacggcatcagcgtggataccactgcgccggtggtgagcatcgggacgctgtcggttgacgatatgctgaacgccgcggaagcgcagcagccgctggccgtgcacggatcttccagcgcggaggcggggcagaccgttaccgtgacgctgggaggaaaaacctacactgcgcttgtcggcagcgacggcacctggacgctcgacgtgccggcagccgacctggccgccctgagccagggcgcgctgacggtcaccgcctcggtcaacgacaaagccggtaacagcggccagaccacgcacaccttaacggtggataccgtcgcgccaaccgtgaccatcagcaccgtggccgatgacgatatcgtcaacaacgcggagcagctggcgggccagaccatccgcggcaccaccacggcggaacagggccagacggtgaccgtctccttcaacgggcacagctatcaggcgaccgtcggggcggacggatcgtggtcggtcttcgtaccgggccgtgatttcctcggcctgagcgacggggagtacaccatcaccgcgtcggtaagcgacagggcgggcaacccgggcagcgcaacgcacgacgtgacgctgaacggcgatgtcccaaccatcaccattaacacctttgcacaggacgacatcgtcaacgccgccgagcacggcacgccgctggtcgtcagcggcaccaccaacgcgccggcaggccagacggtgaccctcacgctgaacggtaaaacctatgcggctaccgtccagaatgacggcacctggagctacacggtcagcagcgctgacgtggccgcgctggcagacggtggttcttacgtcattaacgcgcaggtcagcaacaccatcggcaacagcgccagcgataaccataccgtcacggtggatctcaccgcgccgtcgatggggatcagcattgattcgctgcaaaacgacaccggcctgagcgcaacggatttcatcaccaacgacagccaggtcgtcgtcaacggctcgctgaccgcgcagctcggcaataacgagaaggcgcagatcagcctcgacggcggcgtcacctggatcgacctgaccgtgaccggcaccacctggcgctacgccgatggccgcaccctgacggacggtacgtatcagtaccaggtccgcgtgattgataacgcgggcaacgtgggggccacggacagccaggacgtggtgattgacctgacgaagcctgcggcaaccaccattaccgtggattccattacgcaggataccggcctgtccggcagcgactttatcaccagcgacaaccagatcagcctgaaagggacgctcggtgcggcgctgggcagcggcgaccacgcgcagatcagccttgacggcggcgtcacctggatcgacgtcagcgtcagcggcctgagctggacgtacgtcgatgggcgcacgctggccgacggggattacaactaccagctgcgcgtgattgacgatgcgggcaacatcagcgccaccgcctctcaggtggtgaccattgatacggttgcaccggacgccagcaaaacgatcgccatcgacagcatcagcgacgataccggcctgagcagcagcgactttatcactcgcgacacgtccctgacgctgcacggctcgctcggcgcgacgctggccgacggcgaatacgcccagatcagcctagacggcggcgtcacctggcagaacgtgatcgtcaccggcaacagctggtactacgtcgatagccgcacgctgggtaaccagacctatgactattacgtccgcgtggtggatgccgccggtaacgtgggggccagcgcccatcagcaggtgaccgtcgatacgattgctccggatgcggcgatcacggtgttggtggataacatcaccgtggataccggcttcgacaataacgacttcctgaccagttcgacctcgtacaccctgcacggaacgctcggcgctgaactcggcgcgggcgagtacgtgcaggtgagcatggacggcggcacgacctgggtgtacgccaccgtcagcggcacccagtggagctacagcgatacgcgtaccctgaccgacggcagccataactatcaggtgcgggttgtcgaccaggcggggaacgtcggggccaccacctcgcaggcggtgacggtggatacccaggcgccgcagtacggcatcaccatcgacagcatcagcgacgataccggccagtccgggagtgatttcatcaccatggacaccacgctgacgatcaacggttcgctgggcagcgcgctggcaagcgacgagcgcgtacagatcagcctggacggcgggaatacgtggctcgataccacggtcaccaaccagcgctggagctacaccgatacccgcgatctgcctgacggagactacacctacctggtgcggattatcgaccaggcgggcaacgtgggttccaccgcgtctcaggtcgtcacggtagacaccacgccgccgaccacggtcggtacggtcgtgagctataccgacggcgaaggcgagcgtcagggcacctttggcagcgcggtggcaacggacgataactcgccgctgatcaacgggacgctgaaccgcgccccggacgacggcgagatcgtgcagctttaccgtgacggggttctgctcggccaggtgaccatgaacggcagcgcaagctggtccttccaggacaacggcctgagcgacgggaatcacacctacatcgtgcgcgtcaccgacagggccggaaactacacggaatccgacggctttgtgctgaacgttgataccagcatcccgaccaccacggcggcgattaccgcgcagaccacgtcggataccacgccgatcgtcaccggtaccgtctccgctgacctggtgaacggtgaatacctggtggtgacggtgaacggcaaaacctacacctcccagacgggcggtgcggtggtggtcgacccggatcacaacacctggtatctgcagatcccggacggcgatgcgctgagcgtggcgagctacagcgtgaccgcgcaggtgaagagcagcgcgggtaacggcaataccaccggtacggcgaccggcagcctggtgattgataccacctcggtgaacaccgactgggcaaccacggcggggaacagcaacaactccaccatgaccctcggcatgaacagcagcggtctgtggaatatcatcgctaacggccagtcttactccagcagcgatagctcgacctatgccggcaatacgctgactaacacccgtaactactacgtggtgagccagaccgccgccgactttgaccgtaacggcacgcaggacattttcgcgacggaaaatacctacgccgggtcaacgcaggtgatgtggacctacgatggcagcacctataacgccagccagctggcaatgggcaccaccatctggttcggcggcgtgattgcctacgataaaaccggggatgggtatctggacctggcgtacggtgactccggcgcggactccattacctatctgatcaacaaaaacggggtactctcgcctgacggcacctacggcggcgcggggttctggggacagttcaccaccatgcgtgaaatctccggcgtcgatattaacaatgacggcaccgtggatgtggttcagcacaccaaccgcagcggcgcgtactcgttaaccgtgatcaacaacaacggcaacggcacgctctccatcggtcagaacctgacgaacgtgtttgtgcccaacgcctcgaataccaccacggcggcgtccatgacgtgggcggacttcaacggcgatggctacatggatctgtacctgggcagcagctacaacaacaacggcggggtgatctactacaacgacggtaccgggaagctctcggccaccaagagcgcggtcgaggcctctaacgcagcggcgggctatctgtcggtggcggtggactggaacggtgacgggcagatggacatcgtcaagctcagcacctacggcggctcgcagacggcgacgctgttcaccaacaacggctacggatccacctggaccgccagccagctggcgtccggcattgcttacgccaccggcgtggcggcagtggactacaactgggacggcgcgcaggacctgctggtctctcagcagaacggcaaggtggtgctggtgcaaaacagcaaaaccattgctgacggcaccgcgatgcatctgcacattgtcgacagcgagggcatcaacgcctactacggcaatacggtcaacctgtacaacgccgcgggcgtgctggtggcctcgcagatcatcaacgcccagtccggtatcgggtcgaacgatacgtccgcgctggtgagcttctacgggctggatccgaatgaaacctattcggccgagatcctgaagatcaccaacggcgtgtcggataacgtcacctggagcggtctggaagcgggcaacggcaaagagggctacgtcctgacggccgaagcggccaccggcggccacagcggaaccattaccggaaccgggtataacgacacctttatcgccgaaaatggcacgtatacctacaacggttccggcggctggactacccattccgaccatgacacctggagcaacaccggtgggatggacgtggtggattaccgcaatgcgacctctggcgtgaccgtggatctgcgcctctcaaccgcgcaggacaccggcttcggcaccacgcgtctgctgaacattgaagggatcaacggctcggattacgacgacgtcatcaccggcaacagcggtgataaccggttcgaaggccgcggcggaaacgacaccttcaacatcggcagcggcggccacgatacgctgctctacaagctgatcaacgcctcggatgccacgggcggtaacggtcacgacgtggtgaacggctttacggtcggcacctgggaagggacggcggacacggatcgtattgacctgcgcgatctgctctccgggagcggctataccggcacgggctcggcgagctatgtgaacggcgtggccacgctggacagcggcgcggggaatatcagcgattacatccgcgtggtgcagaacggcagcaataccgagatccaggttgacctggacggtaccggcggtcagttctcgccaaccaccctggtgacgctgaacggcgtgcagacggatctggcaacgctgctggcgaaccatcaactgttaattgcgtaa

SEQ ID NO: 163753 - DNA, 2181 bp, Enterobacter cloacae
atgaagacacatccacagtacgaaccctggctgcagggcatgctcatcatcgcgaagcactaccggctggacttttcggtggagcacgttcgggtcacgattaaccatgaaagccagtcgccgcgccagctggtgctggaggagatggcgcgccagcttgggctggggatgcgcgtggtggcggcggaagcggcatccctcgatccgtggcgtctgccgctgctggcggaattcaccggcgggcagattgcggtgatcaaccgcatggacaacgaaggcaacgtcagcctccagttcagcggcgacggcggcctggagacgacgctgacgcgcgaggcgctcgggtcgcgattaaagggcctgatggtgctgcgcccgctcgagtccacgccggatgcccgcgtggatgactacatcaaaccgtatgaaaaaaactggttctggcagctggcgctgaaggactggcgacgctacggcgacattatgctggtggcgctggtcgccaacgtgctggcgctttccggcatggtcttctccatgcaggtctacgacagggtggtaccgtcgcagtcagaagccacgctgtgggtgctgttcggcggcgtgatgattgccatcgtgttcgaattcatcatgcgcatgctgcgcgtgcacatttctgacgtggtggggaagcgcgccgatctgcgcatctctgaacgcgtctttgcccacgcgctgcggattaaaaacggcgcacgctcaaaatcaaccggatcgtttatcgcgcagatccgcgagctggagtcggtgcgcgagctgatcacctcgacgaccattgcggccctctccgatctgccgttcttcctgctgttcgtcttcattctgtggatgattggcggtccgctggtgctggtggtcctgctcgccgtgccgctgttgcttattccgggcctgctggtgcagcgcccgctggggaaactctccagcgaagggatgcgtgaatccgccattcgtaacgccacgctggtggaagcggtgcagggcattgaagacatcaagctgatgcgcgccgagcagcgtttccagaaccagtggaataacaccaacgacgtcgccgccagcgtcggcatgaagcagcgctggctgacgggcctgctgctcacctggacgcaggaggtgcagtccattgtttacgcggtggtgctgctggtgggctgctatctggtcatcagcggtgacatgaccaccggtgcactggtgggcacctcgattctggcgtcgcggaccattgcgccgctgtcgcagatctcaggcgtgctctcgcgctggcagtctgcaaaagtggcccgcaaggggctggacgacctgatgcagcggccgattgacgatccgcagcacggcaagaaggtgcacaaagcccacctgcgcggcgactatgcgcttgaggacgtcgggttttattacgacgaggaagagaaactcaccgtgctcaacatcagcaagctgcagatccgcgccggagaacgcgtggcggtgctcgggcgtaatggctccggcaaaagcacgctcctacagcttctggcgggcatgcaggagccgcagcagggcagcattctgctggacgatattgcccttaatcatctcgacccggccgacgtgcgtcgcgacatgcagctgctgagccagcaggcccgtctgttctttggctccgtgcgggacaacatcctgatgggtaacccgctggcgaccgacgatgagattcaccaggcgctggtcaacagcggcgcgctggagtttgtgcgcaaacagaaaatggggttgaacactatcatcaacgagggcggaacgggcctctccggcggtcagcgacaggcgcttttgctggcgcgcgccctgatcacctcgccgactatcctgctgctggacgagcctaccgcctggctggacgaaatgagcgaaaagcagtttattcagcatcttcacacatggctgggtaaacgccggacgctggtggtggccacgcatcgcctgccgattctggacctggtcgaccgcatcatcgtgctggaaaacggcaaggtggtgatggacggcccgcgcgacgccatcctgcaccagcacggcatggcgccgcaaaagacagcacagcgcaccgtgaccatgaaaccggcggcggttgcagaggagggcgcggcatga

SEQ ID NO: 163754 - DNA, 1176 bp, Enterobacter cloacae
atgaatgatttctcccgttttaatagccgactgaaagagccgcgccttccgcgcgccacgctggtggcatggtcgctgttcgccctgctggcggcgtttatcgcctgggcgagcctgttccatcttgatgaggtgacgaccggcagcggtaaggtgataccgtcttctcatgagcaggtcatccagtccctggaaggcggcattatccacagtctgatggtgcgcgaaggcgacatcgtcgagcgcggccagcagctcgcgcagcttgatcggacaaaaaccgagtcgagcgtgctggagagcgagtcgcgtctgaatgcggcgctggccacggcggcacgcctgaaggccgaagttaacgactcggagctgacgtttcccgaggagctggatgacgacgttgagctggttaagcaggaaacggcgctctaccagtcccgtcgcgagagccttgaaaaagggctggctggtttacgtcagggtgccgagctggtgcaacgcgagctgtcgttgacccgtccgctggtgacccagggggcggccagcaaggtggaggtgctgcgtcttgagcgtcaaaaaaatgagcttgagaataaaatcaccgagatgaaaaaccagtattacgtccgcgctcgcgaagagctggcgaaagccaatgcggagattgaagcccagcgttcggtgatgaagggtcgggaagactccctgacccgactgaccttcaatgcgccggttcgcgggatcgtgaaggatattgacgtcacgaccgtgggcggcgtcatcccgccgaacggcaagctgatgagtctggttccgcttgacgatcagatggtgattgaggcgaaaatttcgccgcgcgatgtggcgtttatccatcccggccagaaggcgctggtgaaagtgacggcctatgactactccatttacggcgggctggaaggggaagtgaccatgatttcgccggacaccctgcaggatgaggtgaaaagagatgtttattactatcgcgtctatattcgtaccgacagtaaccatctgaccaataagcagggtcaggaattcccggtctttccgggcatgattgctaccgtagacattaaaaccggcagcaaaaccattctggattatctgttgaaaccgctgaataaggcaaaagaggcgctgcgggaacgatag

SEQ ID NO: 163755 - DNA, 885 bp, Enterobacter cloacae
atggataatcatatctcatccagggccttgctacatcgaagggatgtcataaagagcaatccacgattcggtgaggcaatattagagcactacacaattaatgacaccatctacaaaaaacaacctttgttctacaagacaatgctacaggaatcacggttcaacattatcctctccatgtgttgttttatttttggcaatcaggccgagtcagtttctgaaattaaagagttatgttctcgctataagatagccagccccaacagcgttattgcgatcattacgatactcagaaccaccgggcgcatcaggacctggcgctgtacggaagacagacgaaagacgagaatcgcgccaaccgaaaaaggcctgaatgaactaaagcgttatatgtccggcgcttttttgcccgtcagcattctttatccgacatttaatattaatgtaaacctgctggataatgatattttgagaagcaacttctttcgccgcgcggcagaatatctttttcggggattaacgttcagaaaggttttgcctgaagtaggattatttattgataaagatggtggccgtatgattatgctttatctttacctgcaggctatgaaaaacaaatccgcccatggcgccgttattgactattcagccagcacgctcgcaaaagaattttttgtatcgcgcatccacgtcaaccggattatcaaatcagctcaggaggcgggctatctgaaagatcggggtgatggtcggctatcggtctatccggcgtttatcgaactcgtcgaaaattatgccggattatattttgcgtatgtcacgcattacatcaacgtggttcctaaagagcgacgccaccttcacaacgtgacgtcaaccgtataa

SEQ ID NO: 163756 - DNA, 1464 bp, Enterobacter cloacae
atgacccaaaaaatgtctctcaaaaatggggtttgcgatgaacataaatttgtcatctcagcctgcggcttcacatttcaggggtattgttcgatcctcaataagtacgggatccacgcttcccgaattcactttaacggtgatgaggcatcccaacaggatgttgaaaatatccttaaaaatcaggatgcccatatcgtggtgttcctcgggaaaggtgtcgtcaatctcctggaaagcctgaagcgactggcctcggtactcaatgcactccccgttattcggcatgtcatcctgtatggtgatattcctgacggctggctgtaccgcacgctgggcagtcttttaaataacagttatcaattatcattgattcgcgtagccagcgtttcggacatagtaggctgttttaatacccattacaaaagctttaaggatcgttcccgtgtattacgcgaacgctacatggatattggctatgaagaaaatctaaagtggttaacaagaagagagattgacgttttattaaatttctatcgtggtatgtccgtaaaggaaatgtgcgatagaatggggttgtcgaataaaacggtttatacccaccgaaaggaaggtgtgcttaaattacgtttaattaagcgctggttacacgatccgcacaattttaaagcagataaacctgataaacacccgcgtcaaaaagtggggttcacggaaaaagaagccgaaatttttaatgcgttacgtaatcgggaaatattcccggcatatcagattattaccgatcgagataaaaaaggggttgggtttgaaatcctgattcgctggaataaaaacggtaaaattgtcaagccagccagttttttaacggatgtttccaatcatgaaatctggctgaaaattacggcgttggtcatccatgccgccgtttcaggtattaataagtataacgggaaatactatttttcagtgaatattccgcctcgtctggcgtccgggaatgctttgcctgatatggcacggaaagccatcggcatgctgctcaaaccgcagtgggccgaaaagctggtttttgaatttgcagaagatattgacgtgacgaaggacaaaaggatccctgaaaccatgcggcatttacgcaatacggggtgtcgattgttcctggatgactgcttctctaaccatcaaaccatgttcccggtgcgccaggtgcatttcgatgggcttaagctggatcgggacatcgttgagcattttgtggcaaacgacaatgactataatttgattaaagcgatacaggtttacagcgacatgaccggaacggactgtattgcagagggggttgatagtgaagaaaagtttgagaaattagtcgagctgggcgtcaagaactttcagggatattatttatcgcgcgccgtgaaagaggatgagttagaccgcatggtcaggttgtttagttaa

SEQ ID NO: 163757 - DNA, 273 bp, Enterobacter cloacae
atgtctgatttcggtactgataaaaacacccagtttgctgaagataaagcaaaaaataaatttgatgaacttgcaggttcagcgcagcagcagtttggtgaattcgttgattcaccaaaacatcaggttaaaggtgctgctaaaaaatatgccgctcaggccagcgatgccgtttccgatgtcactgaagccgtcagaaacaatcccctcaccggcctcgttgccgcgggtgcaatcggtattgttctcggcttgttgctgggccggaaataa

SEQ ID NO: 163758 - DNA, 669 bp, Enterobacter cloacae
atgacgacagccccttttatccgccctcaactcaccctgccaaacggcgctgacaaactgctgctgcactcctgctgcgccccctgctccggtgaagtgatggaggctatccaggcatcgggcattgagtacaccattttcttctataaccccaatatccatccgcaaaaggaatacctcattcgtaaggaggaaaatattcgctttgcggaaaagcacggcgtgccgtttgttgatgccgattacgacaccgataactggtttgagcgcgcgaaaggcatggaatgggaacccgagcgcggcgtccgctgcaccatgtgcttcgatatgcgtttcgagcgtacggcgctctatgcggcagaaaatggattcagcgtcatcagcagctcgctggggatctcccgctggaagaacatgcagcagataaatgactgcggccagcgtgcggcggcgcgctatccgggtatggtgtactgggactataactggcgcaaacagggcggatcctcacgcatgattgagatcagcaagcgggaacagttttaccagcaggaatactgcggctgcgtttattcgctcagggacagtaacctgcaccgtaagtcacagggccgcccgctgatccgcattgggaaactgttttacggtcaggatgacaatgagaaataa

SEQ ID NO: 163759 - DNA, 477 bp, Enterobacter cloacae
atgagtatcacccttcgccaggcacgccccgaagatgcggcggccatttacgccatgatttacgagctggcggtgtatgaaaaagccccggaagaagtggttaccacaccggaggagatccgggaaacgctctttggcgcaggtactaaaaccgaagcgctgatcgcggagtgtgaaggcaagatcgccggctatgccgtgttcttcaccagctattcaacctggcttggccgcaacgggatttatatggaagatctgtatgtttccccagcttatcgcggcctgggggcgggaaaaacactgctgaaacatatcgcccagctcgccatacaacggcagtgcggtcgccttgaatggagcgtgctggactggaaccagcccgccatcgatttttatctgagcattggcgcgctgccgcagtccgaatgggtgcgctaccgtcttgacggagaagcgttgctcaaatttgccgaatag

SEQ ID NO: 163760 - DNA, 930 bp, Enterobacter cloacae
atgatgaatattatgcatccggccctgagacgtcttgatttaaacctgctgcccgttttcgacgcgatttaccgccaccgctccgttcgcctggccgctgacgagctggcgatgagcacatccgcgctcagccatgcgctgtcgcgcctgcgtgccaccctgaacgacccgctgtttttccgcgaagggcatcgcatgtcccccagcgtgtatgcttctcagctcgcgccttcgattgcttccgcactgtcgttcctgaatcatgagctgaccccgcagccggagtttgatgcagccagcagttcggagtgcttacaaattgcgataacggactttaccgcgctgtgcattttcccggtgctgatgcacaaactgcagcttgcggccccgggcttgcgtttcgaattgcgctatctgccgcacagcccggcgctgacggaactgctggcgggcgaggtggatctggcgctggggttcagcactcaggatgatatccggcacccggagctggaagagatcgactggtttgaagatgagtatgtggtcatcagcaacgcgcgccggacgcgtctgacgctggaggaatatctcgcggcccgacacctggtggtgacgccatggaatgagaagcagggcgttctggacgtgcggctggaacaactgggctatacccgacaaatcgcgatcaaaacgccgtcgatgctcagcgcaccgtttatcgtagcggaaagcgacctgatgatggccatccctcgatacgccgctgagaagctggttgcggcagcaggcctgaggatttttcctttaccgttctcgatacgcacgtttgaagtgaaaatttactcgcataaacgcagcggccagcggggcgcaacgcgctggctgaaggaggaactgcaaacgctggcgcaggctgccaggggacggtag

SEQ ID NO: 163761 - DNA, 498 bp, Enterobacter cloacae
atgaaaaagctaacatggctggtattacttatgctgacaggttgtaccgggacaagtaaaccccagccccagtctacccccaagccaccggcaggcgtcataaaaatccttgaagataagaaaattgcttcgtatatcgatcttcgggtgatttcaacttatcagggtaacgaccgcttacgccgcttttatttcatcaataactacgccgagaagacactcattataaaaaatcctcccgtctacatagcgagttcccgggcaatcgacgtgattaattgcgacaaaaaccagcgtgctattatggcgcgaacctatttttccaaaccgttcgcagaaggtgatgtcgtacatgtgacacaggatgtgggacaatgggaaagttacccgaaagactctctttttgggataatagcggaaagcatgtgcagtattcccgttgaaaaactcaagccagagccagcgaaagataatcgaaaaccgctactggatgaataa

SEQ ID NO: 163762 - DNA, 624 bp, Enterobacter cloacae
atgcgtaagctcatctcctccattgggctcatagcaggtatggctgtaaccacacccacggttcacgccagcacgttgacacaaacgttgacccgctgcgactcaacctttttcaacgagatttatcatcagcgagccaaactcagccgcgtagcccccttaacgctcaacaagcattcgcaggcctggttcaaagcccctgaagacggcaatcgcaccatctggtttgctcaaccgctgcatgaattaaatctgacggtatcgggatattacctgcaaaccagcaatctcgatgaaatcaattacggtaagtactattactggggactcattttcaaagagtcacaagaagaagtgatgtccaggcttgatcatttgtcctggaaaaaggcgggagatgattatgtttctcagacgatgattaaaatcaacccaacgagtgagtgggaagacaacgcgcaggcggtgacaggtattgctccggcaaaagaaagtaccgaaaagctgttaatgctcagcaaaagcaaagacgggacattattgctctgtactgttcagggaaatgtaacgcctgacatgctgacgacattacgacctgatttatccgcaggggatgcgaaatga

SEQ ID NO: 163763 - DNA, 276 bp, Enterobacter cloacae
atgccgcattcacccgaagataaaaaacgtattcttacccgcgtccgccgcattcggggccaggttgatgcccttgaacgcgcgctggagtcgggcgacccctgtctggccatcctgcagcaaattgccgccgtgcgcggggctgccaatggcctgatgggcgaaatggttgaaattcacctcaaagatgagctggtagcgggggaaaccacgccggatcagcgtgccgttcgcatggcggaagtcggccatttactgcgctcttatctaaaataa

SEQ ID NO: 163764 - DNA, 1119 bp, Enterobacter cloacae
atgaaatctcgcgctgcagttgcatttggccccggccagccgctcaaaatcgttgaaattgacgtggcaccgccgaagaaaggcgaagtgctgatcaaaatcacccataccggcgtatgtcataccgatgcgtttacgctctcgggcgacgacccggaaggcgtcttcccggcggtgctcggccatgaaggcggcgggattgtggtagaagtgggcgagggcgtgaccagcctgaagccgggcgatcacgtgatcccgttgtacaccgcggaatgcggcgagtgtaagttctgtaaatccggcaaaactaacctctgccaggccgttcgcgccacccaggggaaagggctgatgcccgacgggacgacccgtttctcctacaacggcgagccggtttatcactacatgggcaccagcaccttcagcgaatacaccgtttgcgcggagatctcgctggcgaaggtgaacccgcaggcgccgctggacaaagtctgcctgctgggctgcggcgtgaccaccggtattggcgcggtgcataacacggcaaaagtcaaagagggcgataccgtggcggtgttcggtctcggcggcattggtctggcggtgattcagggcgcggtgcaggcgaaggccgggcgtatcatcgcggtcgacactaacccggagaaattcaggctggcgggtgaaatgggtgcgaccgatttcgtgaacccgaaagatcacgagaagccgattcaggacgtcatcgttgagatgaccgacggcggcgtggacttcagcttcgagtgtatcggcaacgtcaacgtgatgcgttccgcgctggagtgctgccacaaaggctggggcgagagcatcatcattggcgtggccggtgcgggtcaggagattaaaacccgtccattccagctggtcaccgggcgcgtatggcgcggttccgcgtttggcggcgtgaagggccgtacccagcttccgggtatggttgaagatgcgatggtcggcaagattcagctcgatccgttcattacccaccgcttaccgctggagcagatcaacgaggcgtttgatctgatgcacgaaggaaaatccatccgtaccgttatccatttcggcgacaagtaa

SEQ ID NO: 163765 - DNA, 1692 bp, Enterobacter cloacae
atggacaacactacttcgatgctggcgcagcgcaagctgggcttcttgcatcacatcaggctggttccgctgttttcctccattctcggtggcattattcttctgtttgccttgagctcgggtctggcagggtatttcctgctgcaggccgataacgatcagcaggatgtcacagctgaaattcaggtgcgtatggggctgtcgaacagctcaaaccatctgcgaaccgcgcgtatcaatctgatccacgccggtgcggcaagccgtatcgcagagatggatgcgatgaagcagaacatcagcgaggcggaaacgcgtattaagcagtcccaggagagctttaccgcctacatgaatcgcgccgtgcgtaccgccgagggcgcagcgctggatgcggagcttaagacccggtatgacgcctatatcgcgggcatgcagccgatggtcaaattcgccaaaaacggcatgttcgaagcgattatcaaccatgaaaacgaaacggcgcgtccgctggatgacgcgtacaacgccgtactgctgaaggcgattaagatccgtaccgaccgtgccaatgcgctgacggcgcaggcgcacagccgcacgcagctgggtctgatgtttatggtgggcgcgtttgcgctggcgctggtgctcacggcgatgacctttgtcgtgctgcgccgcacggtaatcaatccgctgcagcgggcagcgaaacgtatcgagaatatcgctaagggcgacctgacgatgccggacgatgtggccgggcgcagcgaaattggccgcctgacgcgcgatctgcaaaccatgcagcactcgcttgaaaaaacggtcggcaccgtgcgtcagggggcggaggagatttaccgcggcaccagcgagatctctgccggtaacaccgatctctcttcccgcaccgagcagcaggctgccgccatcgagcagaccgctgccagcatggaacagcttactgcgacggtgaaacagaacgccgataacgcccatcatgccagcaagctggcggaagatgcctccgggaaagccacccgcggcggccagatggtctccggcgtggtgaaaaccatgggcaatatctccagcagctcgaagaagatctctgaaatcaccgccgtgattaacagcattgccttccagaccaatatcctggcgcttaacgcggcggtagaagcggcgcgggcgggtgaacaggggcgcggatttgccgtggtggccagtgaagtgcgcaccctggcaagccgcagtgcgaatgccgcaaaagagatcgaaagcctgatcaacgaatcggtttcgctgatcgatcaggggtccggtgaagttgttgccgccggtaacaccatgaatgagatcgtcgacgcggtgaagcgcgtcaccgacatcatgctggagattgccgcggcgtccgatgagcagagtcgcggtatcgtccaggtgagccaggcgatttcggagatggataaagtgacccagcagaacgcctcgctggtggaagaagcctccgcggcggcggcgtctctggaagaacagggcgcgcgtctgaccgaggcggttggggcgtttcgtctgagcggtgcgaagccgaaccgcgcggtgacggctgcaccggtggcgacgagcgcgccgttgcgcccggcggcgacagtttcgggggataactgggagacgttctga

SEQ ID NO: 163766 - DNA, 2382 bp, Enterobacter cloacae
atggcatttggcagcgcgccacgtggaataccgcgtattctgcagtggcttcttgccggactgatgatgctcatcggtctggcggtcggcgggttgggctttaagctcgccaccgtaggcgggagtagttacttcctgataatgggcgtggcaatggtgattgccgcgatcctgattttcctcaaccgcaccagcgggatcctgctttacggcatcgcgtttatcgcctcgctgttctgggcggtaagcgatgcgggctgggatttctggccgctcttctcccgcctgtttacctttgccgtgctggcgttcctgtgcgccatcgtctggcccttcctgcgtgcggcaaaccacactgcaccaaccaaagctcccgcttttggcgtcgcggcgctgctcgcggtggccatgctggtcagcctcggctggatgtttaagccgcaaacccttgtggcagcgaacgagcccgtgccggtgaaacccgtcgcacccggcgagcagcaaaagaactgggagcactggggcaacaccacccacggcgaccgcttcgccgcgctggaccagattaacaagcaaaacgtcagctcgctgaaagtcgcgtgggttgcgcacaccggcgatattccgcagagcaacggctcgggtgcggaagatcagaacacgccgctgcagattggcgacacgctgtatgtctgtacgccgtacagtaaagtgctggcgctggacgtggattccggtaaagaaaaatggcgctacgattccaaagccacggcccctaactggcagcgctgccgcggtctgggctattttgaagaccactccaccgtgacaacgtcacaggcagaaacacagccagcggcatgtcctcgccgtctgttcctgcccaccaccgatgcccgtctgattgccattaacgcggataacggcaaggtctgcgacgactttggcgaccatggcaccgtggatctgagcgtcgggatgggtgagattaagcccggatattatcagcagacctccacgccgctggtggccgggaacgtcgttgtcgtcggcggtcgcgtcgcagataactactcaaccggcgagccgccgggcgtggtccgcgcctacgacgttcacaccggtaagctggcctgggcgtgggatccgggtaatccgaacctgaccggcctgccgccggaaggccagacctacacccgcgggacgccgaacgtctggtctgcgatgtcctacgacgccaaactgaacctgatctacctgccaaccggcaacgccacgccagacttctgggcgggcgagcgtaccgcgctggacgataagtacagttcttccatcgtcgccgtcgacgcggccaccggccaggtccgctggcatttccagaccacccaccacgacctgtgggactttgacctgccttcccagccgctgctgtacgacctgcctgacggcaagggcggcaccacgcctgtgctggtgcagaccagcaagcagggcatgatcttcatgcttaaccgcgaaaccggcaagccggtggcgaaggtagaggagcgccctgtccctgcgggcaacgttgaaggtgaacgctactccccaacccagccgtactctgttggcatgccgatgattggcaaccagacgctgaccgagtccgacatgtggggcgcgacgccagtcgacctgctgctgtgccgcattcagtttaaagagatgcgtcatcagggcgtcttcacccctccgggtctcgaccgttccctgcagttccccggctcactcggcgggatgaactggggcagcgtctccgttgacccgaacaacagcctgatgttcgtcaacgatatgcgtctgggtctggcaaactacatggtgccgcgcgcgaacgtggcgaaagatgccagcggcatcgagatggggattgtcccgatggacggcacgccgttcggcgcaatgcgcgagcgcttcctgtcgccgctgggcattccgtgccagaagccgccgtttggcaccatgtcggcggttgacctgaaaaccggcaagctggtgtggcaggttcctgttggcacggtggaagataccggcccgctgggtattcgcatgcacatgccaatcccaatcggcatgccgacgcttggggcatcgctctcgacccagtccggcctgctgttctttgccggcacccaggatttttacctgcgcgcgtttgataccgccaccgggaaagagatctggaaagaccgcctgccggtcggcagccagtccgggccgatgacctacgtgtcgccgaaaaccggtaagcagtacatcatcattaacgccggtggcgcccgccagtcgccggatcgcggtgattacgttatcgcgtacgcgttacctgataagaaataa

SEQ ID NO: 163767 - DNA, 924 bp, Enterobacter cloacae
atggaaaaaaatggtctgttcagtcagcgcatacgcttgcgccatttgcatacatttgtggccgtcgctcaacagggaacgctggggcgtgcggctgaaactcttaacctgagccagcctgcgctctcgaaaaccctcaacgagcttgaacagctgaccggcgcccgtctttttgaccggggtcggctgggggcgcagcttaccatcgtgggcgaacagttccttacgcacgccgtcaaagtgctggatgcgctcaataccgcaggccagtcgctgcatcgaaaagaagaacacaccagcgaggtcgtccgcgttggggccctgcccaccgccgcgctgggcattcttccgccggtgattggccagttccacaagcagcaacggcataccacgatccaggttgccaccatgaataacaccatgctgcttgcagggctgaaatcgggcgagctggatatcgggattggccgcatgtccgaccctgaactgatgggcggtctcaattacgagctgctgttcctggagtccctgaagctggtggttcgtcccgatcatccgctgctgcaggacacggtgacgttaagccgcgtcatggagtggccggtggtggtgtgcccgaaagggaccgtcccacgtcagaccgccgaaaccttgctgcaaatgcaggggtgtacgctgccatcagggtgtatcgaaacgctgtcggcctcgctttcacgccagctcacccttgactatgactacgtctggttcgttccctccggcgcggtaaaagatgatttgcgccagggcacgctgaccgctctccccgtaacggcccccggcgccggtgaacctatcggcattttgacccgggtagataccccgctttccacgggcgcgcagacgctgctgagcgccatccgtaaatcgatgccggtttaa

SEQ ID NO: 163768 - DNA, 885 bp, Enterobacter cloacae
atgagtgatacccaacaacgtacgaacgcttacccgcagcccccgttcccggaacagccgcaaacgccaccgggactggcatccgaaatgcagcctgtacccgatcacggggaaaccagctacaaagggcatggccgcctggccggtaaaaaagcgctgatcaccggcggtgactcgggtatcggtcgcgcagtggccatcgcctatgcccgcgaaggtgcagacgtggccattaactacctgcctgaagaggaaaaagacgccgcggaggtcatcgacctgatcaaagccgaaggccggaatgccgtcgcgctgccgggggacgttcgggacgaaaccttctgccagaatctggtcgaagaagccgtctcgaagctgggcgggctggatattctggtcaataacgccggtcgtcagcagttccgtgaatcccttgaagagctgactaccgaagattttgacgcgacgtttaaaaccaacgtctatgccccattctggatcacgaaggcggcgctgcgccacctgaaagcctcgtccgttatcattaatacctcctccgttcaggccgtgaagccgagcccggtgctgctggactacgcccagaccaaagcctgcctggcggtatttaccaaatccttagccaagcagctgggtccgaaaggcattcgcgtcaacgcggtcgcccctggcccttactggacggtgctgcaatccagcggtggccagccgatggaaaaagtgaaggagtttggcggcgataccccgctgggacgtccgggtcagcccgtcgagattgccccgctgtacgtcacgctggcctcggatgaatgttcatttacctccggccaggtatggtgttctgacggcggtgacggcgtgatctaa

SEQ ID NO: 163769 - DNA, 390 bp, Enterobacter cloacae
atgaaattatcgcttatttccgcttttttgatatttctggttccggccgcatgggcagataataacggcgggttacaaaaaggtgaagccccaccgcctccccacgcgctggatagcggatatcgcggaaccgatgacgcgcgtattatgaccatcgatcaggcaaaacaactgcacgacggtgcgaccatttcattacgcggtaatctaattgacggtagcggcgataagtttgtatttcaggataaaaccggaaaaatcgacgttattattccccaggcagtgttcgacggcagaacggtaaaacccgaccagatgatcagcatcaacggttcgcttgataaaaaatcatctcctgccgtcgtccgtgtcgatcgtttgcagaaataa

SEQ ID NO: 163770 - DNA, 510 bp, Enterobacter cloacae
atggccatgaagcgtgaaaatgaaaagttacccgggatagaggaaagatatcgcttgctgacgtttgaatacgcgtttcgtcaggtggggtttattgttctgttaggtattatcgttgccgccattgccggtctgttttcaagcggaatagtcagcgatacggtaaaaacaaattccgccaagtcgctgaccataaactatgagcgctttgggcggcgggagacggagacacggatgcagcttgcgtttccggtgagaacggaggggacctataccctcagcgtcaccagcgagagtagcgaggcgtatgatccaggcagcgtctggccccagccggacgccatgttcagccacggaaacagcctctattttgtttatcacaacctgaaaaagacagataacttttcggtattactctttaccacaccgtcccgggccggtaaatggaactcggtcatccgcgtaaacaacgagccggagatcaccctctggcaatttatttacccgtag

SEQ ID NO: 163771 - DNA, 447 bp, Enterobacter cloacae
atggatatggtctttcgtgcgctggcgatttatctgttcctcgtggtggtatttaaagtggccgggcgacgcgcgctgctgcagatgaccagctttgatctcattcttctcctgataattagtgaagccacgcagcaggcccttctggggcaggatttttccgtcaccggcgcgatgattacgattaccaccctggtggtagtggatattatttttggccttatgaaaaaatatttttccccggtagagaatattctggacggcactcctgtgattctggtggaaaacggcgttcccctggcggataaactcaaaaaggttgatgtctcttgcgatgacattctggtttccgcgcgtcagaataatggcattaccgaaataagccaaattaaatatgccatacttgagcgcaatggacatatttcaatcattcctttcgagaaataa

SEQ ID NO: 163772 - DNA, 519 bp, Enterobacter cloacae
atgagcaatcttttgcacgataaccattacaccgtcggtgaattgacaaaaaaactggcgagcaagttaaccgatgccggtctgcgcttaaccacggcggaatcctgcaccgggggaaagctctcggtggcgctctgcgctgaagagaacacggccgatttttatgatgtcgggctggtggtgttcagcgatgccgcgaaagcgcggatcctcggcgtgcgtcctgaaacgctggcgcgctataccgccgtcagcgaacagacggtgaccgagatggccgccagcatccgcgacattgcccaggcggatatcagcatcgccatcagcggatacgctggcccggaagggggcgacgacggtacggcggcggggacggtctgttttgcgtggaacatacgtggcgagacgaaaacccgtaccgtgcttttctccggagactgtcaggacgtggtggaaaaagcggtgcatttttcgctggcagagctggtaacaacattgtcggacggaaataacggttga

SEQ ID NO: 163773 - DNA, 987 bp, Enterobacter cloacae
atggctgtcatagtgattaccggtgggacggcgggcgtgggaaaagccacggcgctgcgcttcgcaaaagcaggttacgatgtgggcctcatcgcccgtgatgaagccagcctgcactccacccaggaagagctgcgccgcttcggcgtaaatgcgcacgccgtgcaggcggacgtcgccgacagtcaggcggtggtggatgcggctaacgagattgagtatcgtctcggtgcgattgatgtctgggtcaacaacgccatgggggccgtgctggcaccgtttcgtacccttacgccggacgagtttcggcgcgtgaccgaggtgacatacctcggctacgtgaacggcacccgcgcggcgcttgagcttatggttccgcgcgacaggggcgtgattattcaggtagggtccgcgctggcctaccgttccattcccctgcagtccgcctactgcggggccaaagcggcgattcgcgggtttaccgatgcggtgcgcactgagctgatgcatgagaacagccgggttcagctttcgatggtgcagatgccggggctcaatacgccgcagttcgaatgggcaaggaacaagttcgcgtgggcaatgcggccggtaccgccggtgttcgagcctgaagtcgccgccagcgccatcttcagggtggcgcaaaagccggtgcgcgagctgtgggttggcagcagcaccattcagtcgattgtcgggcagttcctcttcccgggttttctggacaggctgatggtgaagaaagcctgggaaggtcagatgaccgacgatctgaacgcgccggaccgccgggattatctcgaccagccggttaacgacctgcacaaaatccatggccgtttcactgacgaagcgaaaacccgcgcgtcgtccgtgacctccggtatgccgggcaaagtggcgttaggggcccttgcggtggcgggtattgtgttgacgcgtttgataatccgccggaaaccgtaa

SEQ ID NO: 163774 - DNA, 1626 bp, Enterobacter cloacae
atgacggactggcatacacgggccattatttaccagattgataccgcactcttttatgatttgaacggcgatggctgcggggacatcgccgggatagcggccaagctgcggtacattcgccgcatgggggcgacggttatctggatcaccccgttttacctcacgccctttctcgatgaaggctatgacgtcagcgaccatctccaggtggatccccgcttcggaaagctggccgatatcatcgcctttatcgaacaggcccgcgagctgggcatgcaggtcattattgaactgctgatccagcacacctctgacgcgcatccctggttccagcaggcccgccgtaacccggcgtcaccctatcgggattactacctctggtcagatactgacgacgacgatacgccccccatgtttcccggcgtggaggagagcatctggacctgggacgacgaagcgggacaatactaccggcacatgttctatcgccacgaaccggacctgaacctgacctcgcccgcggtgctgaaagagatcgagaacatcatcctcttctggctcaagctgggcgtgtcggggttccgcctggatgccgcctcccacctgaccacgcaggcgggaaacggtgatgaaaaaaaggggctgtggatcctcgaacatatgcgccgtctgattgaggagcataatccggacgcgatcctgctgggtgaagtggacgtcgaggtggaggcctatcaggactactttggcaataatgaccgcctgaatctggtgctcaatttctggctcaacaagtatttttacgtcagcctggcccgcaaaagcgcccgtccgctgcgcaacgcggtgaagaagatgatcgtcccgcccgattcatgctgttttgccaactggctgcgcaatcacgacgagctggatctggagggcatcagccagaaagacaaacagtttgtcctcgataccttcgcccctgacgacgagatgaacgtctaccagcgcgggatccgccgccgcctggcgccgatgttgaacggcgatctgaagcggctggcgttctgccacgcggtactcttttccctgcccggcgttccggtgatgcgctatggcgatgagatcggcatgggggatgacctcgatctggaagagcgctacgccgtgcgcacccccatgcagtgggcaggatcgcaaggcggcggtttttcggcagccgacccggaaaaatttatcgcgccgattattgaccgcggtccttaccgctatcaaaaaatcaacgtcgctgattcgctgctccaccgcaactcgctcctgcaccgcatcattgatatcgccaatacccgctcggagttccccgaaattgccgttgcgccctttcggctcctcacgatcgatagtgacgcggtgctggggatctattacgagaccgaagaacgcagcatcctgacctttgttaacttcagtgaccagccggtgcagttcaccgtgaaggggatccgcaacacgacctggaccgcctgtctcgcggacaaacgctacgatgacgcgctggtttgcggtaaaaccgtcgagctcagccttggcggctacggctatcgctggttctggacgcaccgcagcgcgctgcgctga

SEQ ID NO: 163775 - DNA, 1011 bp, Enterobacter cloacae
atgggcgtcgatatctcagtgatttggtttgccatcatcgtgtttgccacgctgatgtatatcattatggacggcttcgatctggggattggcctgctgtttaacttcgtgggcgatgccaaagagcgcgatgtgatggtcaacagcgtggcgcccgtctgggacggcaacgagacctggctggtgctcggcggcgcggggctgttcggcgcgtttccgctggcctatgcggtgatcattgatgcgctgaccatccccctcaccgcgatgctgatcggcctcatttttcgcggcgttgcctttgagttccgcttcaaagccaccccttcacaccgcaaattctgggactactcctttgccggcggctccctgctcgccaccttcagccagggcgtggtggtgggcgccgtgatcaacggctttgacgtggagggccgacgttttgtcggctcttcgctggactggctcacgcctttcaacctcttctgcggcatcggtctggtcgtcgcctacacgctgctgggcaccacctggctcatcatgaaaagcgaaggcgcgctgcaacaacgcatgcgcgaactgacccgccacgtgctgctggcgctgatggtggttatcgcggtggtcagcgtctggacgccgctcggctggcagtacgtcgccgaccgctggtttaccctgcccaacttcttctggttcctgccggttccgctgctggtcgggatcttcagcgtgctgatctggtgcctgacccgcaatccggccagccacgcgcgccctttcctcctgacgctggggctgatcttcctcgggttcagcggactgggtatcagcctctggccgaacattattccgccgcgtatcactctgtgggaggccgcggccccgcctgccagccagctgtttatgctggtcgggacgttactgattattccggtgatcctggtgtacaccgcctggagctattacgtgttccggggcaaggtttcggatactgaaggctatcactga

SEQ ID NO: 163776 - DNA, 1404 bp, Enterobacter cloacae
atgttcgaactcgatgcatttcatctggccagaattcagttcgcttttaccgtctcgttccacatcctgtttcctgcgatcaccatcggtctcgccagctacctggtggtgctggagggcatgtggctgcgcaccaaaaacgacgtctggcgatcgttgtaccacttctggctaaagatatttgccgttaacttcggcatgggcgtcgtttccgggctggtgatggcgtaccagtttggcaccaactggagcgggttctcccagttcgcgggcagcattaccggcccgcttctgacttatgaggtgttaaccgccttcttcctggaggccggattcctcggcgttatgatgttcggctggaacaaggtcggcccggggctgcacttcttttcgacctgcatggtggcgctcggcacgctgatgtcgaccttctggatcctcgcctccaacagctggatgcatacgccgcagggtttcactatcgaaaacgggcaggttatcccgcaggactggctggcaatcgtctttaacccctccttcccgtaccgtcttattcatatggctatcgccgcgttcctgagcagcgcgctgtttgtcggcgcgtcggccgcctggcatctgctgcgcggtaacgatacgcccgccgttcgcaccatgttttcgatggcgatgtggatggcgctgctggtcgcccctatccaggcggtggtgggcgatatgcacggcctgaacacgcttgagcatcagccagccaaaatcgccgctattgagggtcactgggaaaatccgcccggcgaggccaccccgctgctgctgtttggtctgccggatatggaggaagagcgcaccaaatacggcctggagatccccgcgctcggcagcctgattctgacgcacagcctggataaacaggtcccggccctgaaagacttcccgaaagaggatcgacccaactcgaccatcgttttctggtcgttccgcattatggtggggatgggtctgctgatgattaccctcggtctggtcagcgtctggctacgctatcgccatcgactttaccactcgcgtccgttccagtggtttgccctctgcatggggcctgcggggctggtcgcgctgcttgccggctgggtgaccaccgaagtaggccgtcagccgtgggttgtctatggctacctgcgcaccatcgacgcggtatcgctgcacagcaccctgcagatgagcattagcctgctggcgttcttcgtcgtctactcatccgtatttggcgtgggctatgtttatctcatccggctgattaagaaaggtcctcagcccgttgatacgctgacgtcaaacacctcgggcacgcctgcccgtccgctgtcagccgcggagtctgttccggaagaggagagaatctga

SEQ ID NO: 163777 - DNA, 873 bp, Enterobacter cloacae
atgtttcgacacgtcaaacagctgcaatacacggttcgcgtcgccgaaccgaatcccggcctggccaaccttttactggaacaatttggcggaccgcagggtgaactggccgccgcctgccgctactttacgcaagggttgagcgatgacgatccgggccgtaaagacatgctgatggatatcgcgaccgaggagttaagccacctcgaaatcatcggtaccctggtcggtatgctgaataaaggtgccaagggcgcgctggcggaaggggtggaaaatgaggccgagctgtatcgctccatgaccgaaaacgggaatgacagccacatcacctccctgctctacggcggcggaaccccgctaaccaactcagcgggcgtaccctggacggcggcctacgtcgacaccattggtgagccgacggcggatctgcgttcgaacgtggcggccgaggccagagccaaaatcatctatgaacggctgatcaacgtgactgacgatcccggcgttaaagatgccctggcgtttctgatgacgcgtgaggcggcgcatcagctctcctttgagaaggcgctgcagtctatccgtaataatttcccgccaggaaaactgccgccaatcgaggaattcaccaacaagtactacaatatgtctgaaggtggagaggttcgcggaagctggaacagcgataaacatttcgattacgttgagtccccccagcctgcggtggatggcggcgatggcagtgccagcgtgacgctcacaaccgagcaggcaaccctggttaaggcgatgtctgcccgcacgaagtccgatccacattccgacccgctgaccggtgccgagctgggtgccggtaagactaaaccgtaa

SEQ ID NO: 163778 - DNA, 510 bp, Enterobacter cloacae
atgatgaatcacgtagaacactaccatgactggctacgcgatgcccatgcaatggaaaagcaagccgaatctatgctggaatccatggctagccgtatcgataattatcctgatgttcgcgccagaattgagcaacatattaatgagacaaaacggcaaatcacattgctggaggaaatcctcgaccgtaatgatatttctcgttcggtcttaaaagactcgatgagcaaaatggcggcgctgggacaatccatcggcggcatgttcccttctgacgaaatcgtgaagggctcgatcagcggctatgttttcgaacagtttgaaatcgcctgctatacctccctgctggcggcggccaaaaaagcgggtgacaccgcctcgatacccgctattgagacgatcctcgccgaagagcgcgaaatggccgactggctgattcgtcacatcccgcaaacgacggaacagttcctgctgcgttcagacgcgtcgggtgtcgaagcgaaaaaataa

SEQ ID NO: 163779 - DNA, 204 bp, Enterobacter cloacae; identical to SEQ ID NO: 125746

SEQ ID NO: 163780 - DNA, 495 bp, Enterobacter cloacae
atgaatatgaaaagtgtagaggatgtatttattcatcttctgtcggatacctacagcgcagaaaagcagcttacccgagcgttaagcaaacttgcccgcgccgcctccagcgagaagctgagcgccgcctttaccgcacaccttgaagagacgcaaggtcagatcgaacgtatcgaccagatagtggaacaggaagacggcatcaagctcaagcgcatgaaatgcgtcgcaatggaaggcttaattgaagaagctaatgaagtcatcgaaagcacggaaaaaaatgaagtccgtgatgccgcattaattgccgctgcgcaaaaagtggagcattacgaaatagccagctacggtacccttgccactctggcagaacagctcggctataaaaaagccgttaagcttcttgccgaaacgctggaagaagagaaagagaccgaccttaaactcaccgacctggccgttggcaatattaaccaaaaagcgcagaaatga

SEQ ID NO: 163781 - DNA, 186 bp, Enterobacter cloacae
atggcagagcatcgtggtggttccggtaatttcgctgaagaccgtgaaaaagcatcagaagctggacgtaaaggtggccagcacagcggtggtaattttaaaaacgatccgcaacgcgcatctgaagcgggtaagaaagggggacagaacagtcacggcggaggccgtaaatctgataactcctga

SEQ ID NO: 163782 - DNA, 1344 bp, Enterobacter cloacae
atggcgaacaccatcacggctgatgacattcgggaacacttttcgcaggctatgtcggcgatgtaccagcaggaagttccgcagtacggcaccttgcttgaactggtagcggacgtaaacctggcggtgctggaaaatgatccactattacatgaacaactggcaaacgccgatgagcttgcgcgtctgaacgtcgagcgtcacggggccatccgcgtcggcagtgcgcaagaactttcaaccctgcgccgtatgtttgccattatggggatgtacccggtcagctattacgatctctcccaggcgggggtgccggtccactcaacggcatttcggccgattgatgatgcggcgctgtgccgtaatccgttccgcatctttacttcgctgctgcgccttgagctgattgaaaacgtcgcgctgcgcgaacgtgcggcggaaattctgtctcaccgaaacatcttcaccccgcgctgtctggcgcttctcgatctgtatgaatctgaagggcagtttaccgtcgagcaggcgcaggagtttgtgcaggaagcgctggaaaccttccgctggcaccgccatgcgacggtcgatcaggagacctatctcgcgctgcataacgagcaccggctgatcgccgatgtggtctgcttcccgggctgccacattaaccacctgacgccgcgcacgctggacattgaccgggtgcaggagctgatgccgaagtacggtattgagccgaaaattttgattgaagggccgccgcgtcgcgaggtgcccgtcctgctgcgtcaaaccagtttcaaggcgctggaagagccggtgctgtttgccggtgaacacaaaggcacccacaccgcgcgcttcggtgagattgagcagcgcggcgtggcgctgaccccgaaaggccgggaactgtacgatagcctccttgcccaggccggtaccggcaaagataacctgacgcaccagctgcatctgcaggagatctttagcgccttccctgacagcgaactgttaatgcgccgtcaggagctggcgtatttccgctatcgtctgacgccagcgggtgaagcgcatcgccatgcgttccggccgggcgacgatccgcagccgctgatcgagcgcggatgggtcgtcgcacagccgatcacctacgaagatttcctcccggtcagcgccgcggggattttccagtccaatctcgggaatgaaacccaggcccgcagccacggtaacgccagccgcgatgcgtttgaagcggccctcggctgcccggtgtatgatgaattttccctctatgaggaggctgaaacgcgcagcaaacagcgttgcggtttgctctga

SEQ ID NO: 163783 - DNA, 1506 bp, Enterobacter cloacae
atgcaaaatccttccgcccctgtggttgaaacgcgccagggcgcactctctggtttaaccgatgaaaatgtccacgtctggtgcggtattccttatgccgcaccgcccgttggcgagtggcgctggcgctccccgcggcatcctgagccgtgggatggcgttcgcgaggctaccgctttttcggcctcaagctggcaaagcagcgaatattgccaggagctgggcgggggcgatcccggtcagttctcggaagactgcctctatctgaacgtctggtctcccacagagcgcgccgggccgcttccggttatggtctggctgcacggcggcggctttaccatcggtgcgggtggcttaccgccctataacggcaaagcgctggccacgcgcggcgtagttgtggtgacgatcaactaccgtctcggtcatcttggcttttttgcccatcccgcgctggaaggcgaggaagatcgcgtggtgcataattttgccctgctggatcagatcgccgccctcgaatgggtaagggacaatatcgccgcatttggtggcgaccccgctaacgtgaccctgtttggcgaatccgcgggcgcgcgcagcgtgctctctctgctggcctctccgcttgcagaaggattgttccataaggcgattgtgcaaagcgggtacaccttgccggacacgccgcgagagcaggcgttgcaaaaaggggaggcgctggccgcccattttggcctggaacaggcgacagccgaacaactgcgcgccattccgccggaggcgttctggccgctcaccgcgccgctgaacattgctccggcccccatcgtcggggattgcgttctgcctgaagcgatgctggacgtctttttcgccgctcgccagcaccccgtgccggtaatgatcggctcgaacagcgatgaggccagcgtgatggcggtgtttggcatcgatctcgccgggcaaatccagaagcttcgccgggagcgacgcttcgggctggggctgattaagctgctctatccgggcgtcaaaggcgatgaggagctgggcaggcaggtgtgccgcgacatggcgttcaccacgatgggctacgtcgtgatgcaggcgcagcagcgcgtcggcggattgtgctggcgttactggtttgactatgtcgcggaagcggaacatgccacctatatcaacggcgcgtggcacggcaatgaagtgccttacgtctttgataccctcggccaggtggagccttcacgccagtatgtcaacgaacgggatgtacagtttgctgctcaggtggccgattactgggtgagctttgcgcgagacgcaggacctcgcgagatcctgcccgggccgacgcactggcccgcatgccgaaaagggcgggacgttttgttacgcattggcgtgaataaacatgcaggtttcaggcttgaaaaccgctttatgcgcgcccggatgagcctcttcaaacgggtgatgaagcaccacgtcagcctcgattaa

SEQ ID NO: 163784 - DNA, 843 bp, Enterobacter cloacae
atgtcgcgccgttcgctcccgctcaatgccatcgacgcatttttagtcaccgcgcgtcacctgaatctgacccatgctgccgcagagctttgtctgacgcagggggccgtgagccgcaagatagcctccctcgaggcctggtttggctttccgctttttgaacgccacgcgcgcggcctgcgcctctcttcacagggcagcgccctgctcccggaactgcagtctgcgttcgaacacttgctgaccgtggccgaccaggcccgcagccagcaaaccgtgatccggctcaaggcacccacctgtgccatgcgctggctggtgccgcgcctgctggaggtggagcgtgagcagccggatctgcagatcgccctgaccaccaccaccgatcataacgtcaatttcaaaaccgaatcttacgacgcggccatcgtgttcggtacgcacatgagcgcaggcgacctgctgttcgaagaggcgctcaccccggtcttaagcccggtgcgggcgggtgcagcgctgggatcgctgacgttcctacacccgacaagggataaaacagactggtcgctgtggctgacgaaacaggaaggtccgggctttgccatgcacaaaaatcaacacttcgacacgatggatctcgccatcacggccgccattcaggggctgggcgttgccattgccgacgaaacgctggtggccgaagatgtccgcgcgggaagactgatgcggccttatgaaaccagcataaaaaccggcgcgagctaccggctggtgctgcgcgaaacgccaggcgaggaaaatgggctggcggcgtttcgcgactgtttgcttaatcgaggctga

SEQ ID NO: 163785 - DNA, 1170 bp, Enterobacter cloacae
atgactttacaaacgcctgtgcaaacgcgctccaaactgcccgatgtgggcaccacgatctttaccgttatcggccagctctcggcgcagcataacgcgataaacctttctcagggcgcaccgaatttttcctgcgacccgaagcttgttgcgggcgtcacccgcgcgatggaggcagggcacaaccagtacgcgtcgatgaccggcctgcagacgctcaaagagcgcattgccgataaaattgccacgctttacggcacgcagtatgacccgggccgcgaggtgctggtgaccgccagcgccagcgaagggctctactcggcaatcagcgggctggtgcatccgggcgatgaggtgatctattttgagccgtcatttgacagctacgcgccgattgtccgcttgcagggggcaacgccggttgccatcaggctcaccgtgccggattttgccgtcaactgggacgaggttcgcgccgcgatcaccccgcgcacgcgcatgatcatcatcaatacgccgcacaacccgagcggtcaggtcttctccgacgacgatctgcagcagctggcggcgctgacccgcaatactgacatcattattttgtctgacgaagtgtacgaacacgtggtgtttgacggtgagccgcaccacgggatggctacgcacccgcagctggcggagcgaagcgtgattatttcttctttcggaaaaacgtatcacgtcaccggctggcgcgtgggttactgtgttgcaccggcggtactgatggacgagatttgtaaagtccatcaatttttaatgttctctgccgatacgccaatgcagcacgcgtttgctgaacatatggtcgacccgcaaacctggctgtcgctgtcggcgttttaccagcgcaagcgcgatctgctgcagagtctgctggccgattctccgtttacgctgctgccaagcgccggctcgttcttcatgctggcggactacagccagttcagcgacgagcgcgacagcgagctggtgaaacggctgatcgttgagtacggtgttgccaccattccgctgtcggcgttttatgcggacggtacggataataaattgattcgtctctcttttgcgaaagatgaggcgacgttacgggcaggtgcccaggccctgtgtcgggttaaaccacgctaa

SEQ ID NO: 163786 - DNA, 774 bp, Enterobacter cloacae
atgaaattacgcgcgctagttgtcggcatgggattgctgtgtaccttttcctccttcgcagcgtccgagctgcgttacggtctggaagccgaatatccgccgtttgaaagccgcaatgcggcaggcgaactggaagggtttgacgttgagctggggaatgccatctgcaaagcggcagcgctgaagtgcagctgggtggaaacctcgtttgatgcgctgatcccggggctggtggcgaagaaattcgacgccatcaactcggcgatgaatatcaccgagcagcgccgcaagagcattgattttacccagccgatctaccgtattccgtcgcagctggtcggcaaggccgggacggcggtcgaggcgacgccagaagggctgaaggggaaaaccatcggcgtgctgcagggctccattcaggaaacctatgccaaagagcactgggaaaagcagggtgtcaccgtggtgtcgtataaagatcagaatatggcctggggcgatctgctgaatggccgtatcgacgcctcgctggtcatgtccgcggccgggcaggcaggtttcctcagcaagccgcagggaaaagggtttggcttcatcggcaaaccggtgtctgacgacaccatcctcggcagcgggatcggttttgggttgcgtaaaggtgacgaggccaccaaaaagcagcttgatgccgcaattgataaggtacgtgccgacggcacgatcgccaaactcgctgataagtacttcccgggtatcgatgtcagcgtaaaataa

SEQ ID NO: 163787 - DNA, 1656 bp, Enterobacter cloacae
atgaatcgcagacgttttctaaaaggctcgctggcagtggcagccctgagcggcacatccggccttgcttccctgttttccaaagcggcatacgctgccgactctgacattgctgacggccagagccgtcgttttgacttctccgtactgcaatccatggcgcatgacctggcgaaaaccccgtggggtggcgcgccgcgtccgctgccggagacgctggcaaccatgacgccgcaggcgtacaacgccattcgctacgacgaaaagcagtctctgtggaacaacattgaagggcgtcagctggacgtgcagttcttccatatgggaatggggttccgccgccgcgtacggatgttctcgctggaccagtcaaccgctatggcgcgcgagatccacttccgtcctgagctgttcagctacggtgaaacgggcgtagataccaaacagctggaagggcaaagcgatctcggctttgcgggcttccgcgcgtttaaggcgccggagctggcgcgtcgcgatatcgtctctttcctgggggccagctatttccgcgcggtggacgacacctaccagtacggcctttccgcccgtggtctggcggtagacacctttaccgacacgccggaagagttcccggactttaccgccttctggtttgaaaccgtcaagcccggcgacaccacctttaccgtctatacgctgctggatagcccgagcatcaccggcgcctataagttcgtgatccactgcgagaagagccaggtgatcatggaggtggaaaaccacctctatgcgcgtaaggacatcaagcagctcggcattgcgccgatgaccagcatgttcagctgtggcaataacgaacgccgcatgtgcgacaccattcacccgcaaattcacgactccgaccgcctggcgatgtggcgcggcaacggggagtggatttgtcgtccgctgaacaacccgcagaagctgcagttcaacgcctatatggataaaaacccgaaagggttcgggctgctgcagctcgatcgcgatttctcgcactatcaggacgtgatggggtggtacaacaagcgcccaagcctgtgggtggaaccgcgtaacgactggggtaaaggcgcggttggcctgatggagatcccgaccaccggtgaaacgctggataacgtggtctgcttctggcagccggaaaaagcggtaaaagcgggcgacgagctggacttcaaatatcgcctctactggagcgcgatgccgccggtgcgctccccgctggcgaacgtttatgcgacccgcaccggcatgggcggcttcccggaaggctgggctccaggggaaaactacccgaaagtgtgggcccgtcgctttgcaattgacttcgtcggtggcgacctgaaggccgctgcgccaaaaggcatcgagccggtgattacgctttccagcggtgaagcgaagcaggtagagatcctctacgttgagccgtttgacggctatcgcattctgtttgactggtacccgacgtcggattcgacggagccggtggatatgcgcctgttcctgcgctgtcagggcgacgccatcagtgaaacctggctgtaccagtatttcccaccggcgccggataaacgtcagtacgttgacgacagggtaatgcgttaa

SEQ ID NO: 163788 - DNA, 540 bp, Enterobacter cloacae
atgtcttcagaaatcatccccgtcacccaggatatcgaacttcgcgccgtcgaagagcgctacaccgccgacctgcacaatctcgttgttaaaaacagagcctttctgcaaaccgcctttgactgggcgcagcacgtgggcagcgaagaggatacccgccgcaacgtgcagagcaaccagatgcttcaccagcgcggctacgccaaaatgtttctgatcttcaaggatgatgcgctggttggcgtcctgtcgttcaacacgattgaaccgaccaacaaagccggctacatcggctactggctggatgaagcccaccagggtcagggcattctctctcagtcactgcaggcgtttatgcgctactacgctgaacgcggtgagatccgccgttttgtgatcaagtgtcgggtggcgaatcagcaaagcaacagcgttgccgtgcgcaacggttttacgctggaaggctgcctgcgggaagcggaatacctgaatggccgctttgacgacgtgaatatctacggcaggatttataccctataa

SEQ ID NO: 163789 - DNA, 981 bp, Enterobacter cloacae
atgaacaaatatcgccttagcgacgagacacgcctctggcaatggaaaaacggcgaaaccacccacgccaccacgctgcggcagattatcgccacggcggactttaacgacgtgacggtcggcacgagaggcggctggattgacgatgagcgcgccctcgcacaggacggcgactgctggatctacgatgaaaacagcgtggtgttcgccggggcaaccgtatccggcaacgcgcgtcttacccttccatgcatcattagccatgacgcgcatatcagcgacagctgctggctggatggcgcggaggtcagtcacggggcgcgaataagtgacaacgtcaccgttcagcaatcctgcgtacggggcgagtgccatatctacggcgacgcgcgcgtgctgcatcacagcgtggtcattgccgccaaagggctgacgccggaccatgaacagattctgcaaatctacgataaggcgacggtgagccagtcgcgcattgtgcaccaggcgcaaatctacggcgaggcgatggttaattttgccttcgttgaacaccgggccgaagtcttcgacaacgcgatcctggagggtaacgaactcaacaacgtctgggtgtgcgactgcgcgaaagtctacggcaacgcccgcgtgatagccggtttcgacgacgatgccatcccgacggtgcgctacagctcgcagattgcggagaatgccgtggttgaaggcaactgcgtcatcaagcatcacgtcctgattggcggtcaggcatggctgcgcggcgggccgatcatgctggatgataaagtggtgatccaggggcgcgcgcgaatcagcggggacgtgcttatcgagcatcgggttgaaatcaccgacgatgcggtcatagaagcgtttgctggcgagagcattcatctgcgcggcgaaaaagtgataaacggcgaccagcgcatcacccgcacgccgctgctgggtgcgttatag

SEQ ID NO: 163790 - DNA, 594 bp, Enterobacter cloacae
atgaccgtcgatgagaattacttcactgagaaatatggcttaacgcgtacccattcagaagtgctgtacagcgcggagatcgtgaaacccggtaaaacgctggatctgggctgcggcaacggccgtaacagcctttatcttgcagccaacggctacgatgtcaccgcgtgggacaagaacccgatgagcatcgacaatatcgagcgcatcaaggcggaagaagggatcgctaatctgcataccgcgattaaggatctgaacaacctgagctttgacggccagtacgattttattctctctaccgtggtgctgatgttcctggaggcaaaaaccatcccggaccttatcgccaatatgcagcgctgcacgacgccgggcggttacaatctgatcgttgccgccatggatacggcagactacccctgcacggtcggcttcccgtttgcgttcaggagcggtgagctgagcaactactatgaaggctggcagttgctcaaatacaacgaagacgttggcgaactgcaccgcaccgatgaaaacggcaaccgcatcaagctgcgctttgccacgatgctggcacgcaagcccgcttaa

SEQ ID NO: 163791 - DNA, 1230 bp, Enterobacter cloacae
atgggctcgccgctttccagacaattaacgcaccgttttttccgctatctcgcgatcaccagccagagcgatcccagagtcaaaactctgccctcaacgccgggccagcacgacatggcgcgcgagctggcgcaggagctggcacagctggggttaaacgatattgtgattgatgaatttgccacggtaacggcggtaaaaaaaggcaacgtgcccggtgcgccgcgcatcggctttattacccatattgataccgtcgacgtgggactttcaccggatattcatccacaaatattaacgtttaccggtgaagatctctgtctgaataaagagaaagacatctggctgcgggtagaggagcacccagaaattctggcttatccgaacgaggagattattttcagcgacggaaccagcgtattgggcgccgataataaatcggcggtcacggtggtcatgacggtgctggaaaacctgacggcggaacaccagcatggcgatatcgtcgtggcgtttgtgcctgacgaagagatcggcctgaacggtgccaaggcgctcgatcttaagcgctttgacgtcgacttcgcctggactatcgactgctgcgagctgggggaaattgtctacgaaaactttaatgcggcagccgcggaaatccgctttaccggcgtgacggcgcacccgatgtccgcgaaaggcgtgctggtaaatcccctgctgatggcgactgactacattagccattttgaccgccagcaaacgcccgagtgcaccgagggacgtgaaggctatatctggtttaacggcattcaggccgggcagaacgaggccgttcttaaggccaatatccgcgactttgacaaggagcgctttgccgcgcgcaagcagcagattgccgacgtggccgcgctgattgccgcccaatatccgacggccagcgtggactatcgcattgaagatacctacagcaatatcagcaatgcgattggcgaagaccgacgcgccatcgatctgatgttcgaggcgatggaatcgctcggcatcacgccgaaaccgacgccgatgcgcggcggcaccgacggcgcggcgctctcggctaaagggctactcaccccgaacttcttcaccggggcgcataacttccactcgaagtttgaattcctgccgctgtcgtcgtttgaggcgtcttataagactgccctgcagatctgcctgctggccgcccgttaa

SEQ ID NO: 163792 - DNA, 1596 bp, Enterobacter cloacae
atgacaagcaaactcacaactttcacattggcgctcgcggcactcacggtcagttccgccgtcgccgcgaaaacgctggtgtattgctccgaaggatcgccggaaaactttaaccctcagctttacacctcgggaaccagcgtcgacgccagcgccgtgccggtctataaccgtctggtcgatttcaaacccggcaccacggagctggtgccgagcctggcggagcgctgggaggtgagcgacgacggcaaggtttacaccttccatctgcgtcagggcgtgaagttccagagcaataaatccttcacgccgacccgcgactttaacgccgacgacgtgatcttctcgtttatgcgccagaaagacgtcaatcatccctaccacaacgtctctaacggcagctactccaacttcgaaagcctggagttcggcagcctgataaccgccattgataaagtcgatgaccacaccgtgcgctttaccctggcgcacccggaagcgccgtttgtcgccgatctggcctggtattttgcctcaatcctttcggcggagtatgccgacgcgatgctgaaagcgggcacgccggagaaggtggatatggagcccatcggcaccgggccgtttaagctggcgcagtatcagaaggattcccggatcctgttcacggcgtttgccgactactggcaggggaaatcgaagctggaccgactggtgtttagcatcaccccggatgcctctgtgcgttttgccaaaattgaaaagaacgaatgtcaggtgatgccgttcccgaacccggccgatctgccgcgcatgaaggccaataaagatatcaacctgatgagcaaagccggactgaacaccggttttctggcgttcaacacgcagaagccgccgctgaataacgtaaaagtccgtcaggcgctggcgatggccatcaataaaccggccattattgacgcggtgttccacggtaccggaacggcggcgaagaacctgctgccgccgggcgtctggagcgccgacagcgagcttaaggattacgactacgatcctgaaaaagccaaagcgctgctgaaagaggccggctttgccagcggcgtcagcatcgatttatgggcgatgccggtccagcgtccctataacccgaatgcgaaacgcatggcggagatgattcaggcggactgggcgaaaattggcgtacagaccaaaatcgttacctacgagtggggcgaataccttaagcgtgtgaagggcggggaacatcaggctgcgctgatgggctggacgaccgcaacgggcgatcctgacaacttctttggtccgctgtttacctgcacctcggcgaacggtggctcaaattcggcgaaatggtgctataagccgtttgataagatcgttgctgaagccaaatcgataaccgatcatgataaacgggtggcgctgtataaacaggctcagcagatgatgcatgaccagatgcctgcggtgatgattgcgcattcaacgattttcgaaccggtgcgcaaggaggtgaagggctatgaaatcgacccgtttggcaaacatctgttctggcaagtggatataaatcagtaa

SEQ ID NO: 163793 - DNA, 675 bp, Enterobacter cloacae
atgcgtactcaaactttttttaaagttgcagtgcttactggtctgttggcgttggcgggctgttcttcaaaagtcgccgctccggaacaatactccggctttttaaaagattattcaggcttacagcaaacgacctcggcgacgggaaaaccaacgctgcgttgggtcgatccttcttataacgaagccaattacgacagcattctctggacgccaattacctattatccaacgccaaaacccaccacgcaaattgggcaaaaaacgcttgatgagttgttgaattacaccaataacaaaatgaaaacggcgattggtacgcgtaagccagttgtcaccacgccgggtaaacacagcctgattttccgtggcgcgattaccggggtgagttcgcagaaagaggggctgcagttctatgaagtggtgcctgttgcgctggtggttgccgggacgcagatggcaaccggacaccgcaccatggatacgcatctcttctttgaaggcgagctgatcgatgcggccaccaacaaaccggttatgaaggtagttcgtaaaggcgaaggtaaagagctgaataacgaaaacacaccaatgacctttgcgacgctgaagcaggttgttgatgacatggcgacggacgccaccatgtttgatgtgaaaaagaccgcgaaataa

SEQ ID NO: 163794 - DNA, 897 bp, Enterobacter cloacae
atgaacgcattattatacggactcgtggtcattatctggggaaccacctggattgcgattttcctgcagcagggccccgtcgcggcgccggtgtcgattttctggcgcttcgccgtcgccagcctcaccatgatggtggtgttacttgccctgcgtcgcctgcgcacgctggcgctgcgggatcatcttttttgcctgcttcagggatgctgtgttttctgctttaacttctggtgtttttacacggcagcggcacatatcaataccgggctggagtcggtgatcttctccatggcggtactctataacgccattaacagctttattttcttcggacagcgcccgcccgcgcgattctggacggcggcggcgctggggctggtcgggatcatcaccctcttctgggacgacctgctggccagcggctggagcgcgtcactcctgacgggcattggcctttccgcactaggcacgtatgggttctcgctgggtaatatgatcagcatgcgccatcagcgcagaggcctggaaaccatgaccaccaacgcctgggcgatgctctatggcacgctggtgatgggctgcattgcgctgttcagaggcgatagctttgtgccggaatggacggtgagctatctcggcgcgctggtgtatctggccctgtttggctcggtgattgcttttggcgcctacttcacgctggtgggacgtattggcccgggcaaagcggcctacagcacgctgctcttcccgctggtggcgctctccatctccacggtgtatgaaggctacgtctggcatgtcaacggtatcgtgggattagtgctgattctgggaggaaatatggtgatgtttaccaaaccggaaacctggttcagacgcttacgaatggcataa

SEQ ID NO: 163795 - DNA, 873 bp, Enterobacter cloacae
atgtctcacgcttacgatacctttgaaacgctttgccaacagaatgcagtcctgcgggaaaccgtctcgctgaattcgggtattcagctggccgcgtggtacaacaagcacgacacgatcaccgtaaagagcaaccatcataccctcagcctgtacgtggcggacggctacgaaagctatcaaaaaacgccaggaggctggaagaacggcggggggccggaccgtttctgcctgatgcccaaagagagcgaatcgacgtgggatatccgcgatgacctgtcgtttgtgcatctctactgcaccgatgaacacctgcgcgacgtgggagaaaaaatctgggataagcggccgctttcgctgaccctggacgagcgtatttttggcagcgacccgaagatcaccacgctgtatcgccagtttttactgggctgtgactggcagcagcacgccaaccagctcaccctgagcacggcctccacgctgctgctgacccatctgctgcaaaactactcaaacgtgcagtggaagctgccggtcgttacgggcgggttatcgccgttcgtgctgcgcaacgtcctcgcctttatcgaagagaacctcgggcagcccctgacgctggccgagctggcggcgcaggccgccctcagcgaataccattttgcccgcatgttccgccagtcgacggggctggcaccgcatcagtacgtgatgcacaggcgtatggtcaaagcgaaagagcttgtgcagcatacctccatgccactgacggacattgcgctggcctgcgggtttaactccgccagccacttcagcaaccgctttcgcagcgcgacgggcatgacgccgtcgcagctacgcgcggcgagcgcatga

SEQ ID NO: 163796 - DNA, 1167 bp, Enterobacter cloacae
atgcgcccttcctctcatcttgttccggtcgtactggctggatttgtcgccgttctggtgggttacgccagctcggccgccatcatctggcaggccgccgccgcggctggcgccagcgcgcagcagatcgcaggctgggtgaccgcgctggggattgggatgggcgtcagcacgctggtgctttcctggtggtacaaagcgcccgtgctgaccgcctggtcaacgcccggcgcggcgctgctcgccaccagcctgcacggcgtcacgctggcggaaaccatcggcgtgttcatctttgccaacgcgctaattttgctctgcggcatcaccgggcttttcgcccgtctgatgacgctgatcccccattcgcttgctgccgccatgctcgccggggtactgctgcagtttggcctgcacgcgtttgcgcatcttgaggggcactttctgctgtgcggcagcatgattgcggcatggctgatcgcaaaagcgctggcaccgcgctatgccatcgtggtcacgctgctggtgggcggtatcgtggcctgggccggtggtgacgttgtcacggataagttcaccctttcactggtgaagcccgaatttattgcgcccgccttcaccttcaccagcctggtgagtattggcttgcccttcttcctcgtgaccatggcctcgcaaaatgcgccgggtttcgccacgatgaaagcctccggttacccgctggcggtctcaccgctcatcatcgtgacggggggactggcgctgctgttttctccgtttggcgtcttttctatctgcattgcggccattaccgccgccatttgtcaaagcccggatgcacacccggacgcggataaacgctggctggcggccatcgcagccggcgggttttatctgctggcgggaattttcggtggctccattaccggcattatggccgccctgccgctcagctggatccagacgctcgccggtctggcgctgctgggcaccattagcgggagtttataccaggcgctgagtcacgaagcggagcgcgacgcggccatcgtcacgtttctgacgaccgcaagcggcgttacgatcctgggcatcggttcggcgttctgggggctggtgctgggcggggtaggttacgccctgttttcatgcgctcgccgcgcgtag

SEQ ID NO: 163797 - DNA, 528 bp, Enterobacter cloacae
atggacatcacacaacaccttgcagcaacactgaaaacattacgccaggcacggggctggagcctgtcgaaactggcggacgaaaccggcgtatcaaaggccatgctcgggcaaatcgagcgaaatgaatccagccccacggtgtcgacgctgtggaaaattgccacgggactgaacgtgccgttttccgccttcatcacgccggaggcggaccggcaggcggtgtttgacccgcagcagcaggcgatggtcgtcaagccgctctttccgtgggacgaggcgctccggtttgattatttctccattaccctggcccccggcgccctgagtgaatccacgccgcatgaggcgggggtgattgaacatgtggtggtggtcagcggcgaactggagatgaagctcgagggcaagtggaagacgatttcagccgattccggcgtccgttttgccggcgataaaccgcacgcctaccgcaacagcagcgaccggacggtgcattttcactccctcattcattatccccgctga

SEQ ID NO: 163798 - DNA, 1965 bp, Enterobacter cloacae
atgcgcctgcaatcccatcatcttgaacttttaagcccggcccgtgacgccgccattgcccgtgaagcgatccttcatggcgcagacgccgtctacattggcggcccgggcttcggtgcccgccataacgccagcaacagcctgagcgatattgctgaactggtgccgttcgcccaccgtttcggggcgaaggtgttcgtcaccctgaacaccattcttcatgatgatgagctggagcctgcgcaacgtctgattaccgatctctatcaggccggggtggatgccctgatcgttcaggatatgggcgtgctggagctggatattccgcccattgagctgcacgccagtacccagtgtgatatccgcacggtagagaaggcgaagttcctctccgacgtcggcttttcgcagatcgttctggcgcgcgagctaaacctcaatcagatccgcgatattcaccaggcaaccgacgcgacgattgaattcttcatccacggcgcgctgtgcgtggcctattccggccagtgcaatatttcccacgcgcagacgggccgcagcgccaaccgcggtgactgctctcaggcctgccgtctgccgtataccctgaaagacgatcagggccgcgtggtggcatttgaaaaacacctgctctcgatgaaggataacgaccagaccgccaacctgggcgcgctgatcgacgcgggcgtgcgttccttcaagattgaagggcgctataaagatatgagctacgtgaagaatatcaccgcgcactatcgccagatgctggacgccatcatcgaagatcgcggtgacctggcgcgcgcgtcggccggtcgtaccgagcatttctttattccgtcgacggacaaaacgttccaccgcggcagcacggactatttcgtgaatgcccgtaaaggggatatcggcgcgtttgactcaccgaagtttatcggtttgccggtgggtgaagtgctgaaagtggcgaaagatcaccttgatgttgcggtgacggagccgctggcgaacggcgatggccttaacgtgatgattaagcgtgaggtcgtgggcttccgcgccaacacggtggagaaaaccggtgagaaccgctaccgcgtatggccgaatgaaatgccggccgatctctacaaggcgcggccgaacgcggcgcttaaccgtaacctcgatcataactggcagcaggcgctgctgaaaacctccagcgagcgtcgtatcgcggtggatattgaactgggtggctgggaagagcagctgattctgaccatgacctgtgaagacggcatcagcgtaacgcatacgcttgatggcttgttcgaggtggcaaacaacgcggagaaagcgcgaaacagcatgaaggatggcgtcgcgaagctggggcagacgatttactacgcccgcaacgttgaggtcaatctgccggatgccctgtttgtgccgaacagtttgctcaaccagttccgccgtgaaaccgccgagatgctggatgacgcgcgcctggcgaactacccgcgcgctagccgtaaagcagaaaccgttcctgcgcccgtctacccggatacgcatttatccttcctcgccaacgtctacaaccataaagcgcgtgaattctatcatcgccacggcgtgcagctgatcgacgcggcttatgaggcgcatgaagagaagggcgatgtgccggtgatgatcaccaagcactgccttcgtttcgcgtttaacctgtgtcctaagcaggcgaaaggcaacatcaagagctggaaggccacgcctatgcagctcgtaaacggtgacgaagtgctgaccctcaaatttgactgccgtccgtgcgaaatgcatgtgattggcaagatgaaaaaccacatcttcaaaatgccgcagcccggcagtattgtggcgtccgtcagcccggacgatctgatgaaaaccctgccaaaacgcaagggcagctaa

SEQ ID NO: 163799 - DNA, 231 bp, Enterobacter cloacae
atggttaaaaaaggtttatctctcgtgatgcttatctgtgccctcttttcaggccagcttatggccgggcacaaaggacatgaatatctgtgggtaaagaatgtggatcatcaacttcgtcatgaagccgatagcgatgaattgcgaagcgcggcggaggagtcggcggagggtttgcgcgaacaccacctgtggcagaaatcgcgcaaaccggacacgcacgttcggtag

SEQ ID NO: 163800 - DNA, 537 bp, Enterobacter cloacae
atggtcaccacacacatttttatcgcaaccagtcttgatggctacatcgcccgacacaatgatgatatcgactggctgctgcagcacgatgacccgaatgaggatcatggctacacggcgttcattgcggacaaagactggatcgtgatgggccggggtagctatgagaaggtgcggacctttgagacatggccttatgaccggcccgtactggtgctctcccgtcagctggtcgacacgcccgtacccgacgcgctgaggggcaaagtacagttttccggccgcacgccaaaggaggtgctcgacgatctggcgaggcagaacgcccgtcgcgtctatctcgatggtgggcaagtcatacagtcgttcctgcgagaaggactggtggccgatatggtgatcacaaccgttcctgtcctgctcggttcgggaaaatcgctgtttggcgcccttcccggggatatcaatttgacgctggtctccagccgcagcttcccttcgggtctggtgcagtcgcattatcgggtgacgccataa

SEQ ID NO: 163801 - DNA, 1008 bp, Enterobacter cloacae
atgccagaaaacagcaaaaagatgacaacgttaagacagattgcccgcccgaaggtggtggtgctggcgtatgacggtctgtgtacctttgagtttggggtggcggtggaaatcttcggcctgccgcgccccgagctgggcgacgactggtatcgttttgccgtggcaagcgttgataacggtgagcttcgggcgacaggcgggatccgcatcattaccgatggcgatctctccctgcttgcgtctgccgatctgatcgtggtgccgggctggcggggggtggactcgccggtcccggacgcgctctgcaacgcattacgtcaggccagcgcgcggggctgtcagctactctccatctgctcgggcgtgtttgtgctggccgcctccggtctgctcaacggacgcaaagccacgacgcactggcgctacattgagacgcttaaagcccgctaccctgacatcgacgtggtcgaggatgtgctctaccaggacgaaggtgagatcctgacttccgcaggcagcgcggcggggatcgatctctgtctgcacgtcgtgcgtcgggatttcgggatggaaaccgccaacagcgtggcgaggcggcttgtcattccccctcaccgggatggatctcagccgcaacagctgagccgcccggtggcgcagctgcgggaaagccagcgcctcggtcagctgtttgattttctgcacacgcatcttaccgagccgcacagcgtcgactcgctggcgcgtcgtgtcggtatgagtcagcgcacgtttctgcgtcgcttcgaagcggcaacgggaacgacgcctgcccgctggttactcaatgagcgcctgctgcgggcgaaagattatctggaaagcagtcgtttaagcatcgacagcatcgcggaacagaccgggtttggtcaggcatcgacgctgcgtcatcattttcgccagcagttcgcgatttccccggcccagtaccgtaaacaattttctcatgccggtactgcccgctga

SEQ ID NO: 163802 - DNA, 414 bp, Enterobacter cloacae
atgagctatgttactgaatttccggctgccgaaccgcaggaagccgttacccattttctgtgtcgcctgagcgtcgaaaccgactgcgccgatgtgcatcatgccatcacgcataatgagcaggactttgttttgctgcacgtggtggggagcccggagcagtttgcccgtcgccatgtgccgggcgctctgcatatgccgtggagccagatgaccgctgagcgcatggcccaatggcctgaagggacgctgtttgtcgtctactgcgcagggccgcactgtaacggcgcggacagggcggcgctgaagctggcgcgtctcgggctgccggtcaaaatcatgctcggtgggatcaccggctgggaagatgaacgctacgcgtttgccagcgaggcgtccgtcgccgcgctgtga

SEQ ID NO: 163803 - DNA, 1104 bp, Enterobacter cloacae
atgcaacgacaccacgccccgtaccgcgccgacgtagtcggcagttttttacgcccggatgccatcaagcaggctcgcctgaaatttgccagcggtgagattgatgccgggcagcttcgcgcggtggaggacgaggccattcgccacgtcgtcgagcagcagtgtgcgtgcggcctgcatgtggtgaccgacggtgagtttcgtcgtgcctggtggcacttcgacttcttcgacggtcttcagggcgttgagcgttacgattccgagcagggcatccagtttaacggcgtgcaaaccaaagcccacggcgtgcgtgttaccggcaagctgggctttggcgagcacccgatgctggacgatttccgctatctgaaaagcatcagcggtaacgcccagccaaaaatgaccattccgagcccaagcgtgctgcacttccgcggcggtcgcaaagacattgatgcgaccgtgtatccggaccttgacgtttatttcgatgacctggcgaccacgtggcgcgatgccatccgggccttctacgacgcgggctgccgttatctgcagctggatgacaccgtctgggcctatctctgttcggacgatcagcgccgtcagatccgcgagcgcggcgacgacgccgatgagctggcgcgcatctatgcccgcgtgctgaacaaggcgctggagggcaagccggacgatctgaccatcggactgcacgtctgtcgcggcaatttccgttccacctggatttccgaaggcggctacgagccggtagcggaagtgctgttcggaacggtcaacgttgacgccttcttcctcgaatatgataacgaccgcagcggggatttcgcgcccctgcgctttgttcgcccgggcaaacagcaggtggtgttgggtcttatcactacaaaaaacggcgagctggagaatccggagggaattaaagcccgtcttgaggaggcggcgaaatacgtggcgaaagagcagatttgccttagcccgcagtgtggttttgcctcgaccgaagagggcaacagcctgagcgaagcccagcagtgggacaaagtccggctggtcacgcagattgccagcgaagtctggtaa

SEQ ID NO: 163804 - DNA, 1272 bp, Enterobacter cloacae
atgcagcgtcgtaccttattaaaagcttttgcgttatccgcgtccgtcgtggcgatggggataagttttggcgcgcaggcggccgataccatcaaggtggggatcatgcattcgctgtccggcaccatggccatctccgaaaccccgctgaaagacgtcgcgctgatgaccatcgatgagatcaacgccaaaggcggcgtgctgggcaagaagctggagccggtggtggtggatccggcctcaaactggccgctgtttgccgagaaggcgcgtcagctgctgagccaggataaagtggcggtggtattcggctgctggacgtcggtgtcgcgcaaatccgtactgccggtgttcgaggagctgaacggcctgctgttctatccggtgcagtatgagggcgaggaaatgtcgccaaacgtcttctataccggcgcggcgccgaaccagcaggccatcccggcggtggaatacctgatgagtgaagacggcggcgcggcgaagcgcttcttcctgctgggcaccgattacgtttacccgcgcaccaccaataagatcctgcgcgcgttcctgcattcgaaaggggtggaggataaggacatcgaagaggtttataccccgtttggccatagcgactaccagaccatcgtcgccaacatcaaaaaattctccgcgggcggcaaaactgccgtggtgtcgaccatcaacggcgactccaacgtgccgttctacaaagagctggctaaccaggggctgaaggcgaccgacgtgccggtggtggcgttctccgtcggcgaagaagagctgcgcgggatcgacaccaaaccgctggtgggtaacctggcggcctggaactactttgagtccgtggataacccgactaaccaggcgtttgtagcggattacaaagcctatgcgaaggcgcacaagctgccgaacgccgataccgtcgtaactaacgatccgatggaagccacctacgtaggtattcacatgtgggcgcaggcggtggagaaagcaggcactaccgatgtggacaaagtgcgtgcggcgatggccggtcagtcctttaaggcgccgtcaggctttacgctcaccatggatgccaccaaccatcatctgcacaagccggtcatgatcggtgaaatcgaaggcaacggccagtttaacgtggtgtggcagaccgaacagccggtacgcgcccagccgtggagtccgttcatcgccgggaatgacaaaaagcccgaccagccgatgaaaaccgccagcaactaa

SEQ ID NO: 163805 - DNA, 1575 bp, Enterobacter cloacae
atgaacgccatgcgcctgttcatcgctcttgtatggctttccggactgctgccagggatggtgcaggcatcggatgccgatcgttttgttgccgccagccgcagccagcaggcggatttgttgacgcagtgggccgccgcgccggatgcgtcaagactgccgctccttgaggcgctgcaaaaggaaaatctctacgtcgatacgcaaaagcacgcctttgcacaacgcgatggcaacgtcatcccgctaggggacagtcagacggcagagggcccaaccaaagccgtgcgcctgacgaatcggctgcgcgtgctggcagcaaccgccatcgccacgcatcagctggtgagtgacagtgtcaccgaaaggcgggcggcggcgcgtcagctgcagcgcgatgcccagcccgggatgctcgcttttctggaaaagcgtgtgaacgatgagacggacgccgtgacacgtcaggcgctgctgctcgcggtcgcgaatctccagctggccagcccgcagccggaagtgcgccgcaaggccgtcgaattgttaggccagtcagacgatccggacgtgcagtccaggcttaccccgtttacccagccacagacggagccggatagcgcggtgcgcgcggccgcagaagagagtcttagccagatccaacaccgcctgatgtggggcgacctgctgggccaggcgtttatggggctgtcccttgggtcggtgctgctgctggccgcgctggggctggctatcacctacggcctgctgggcgtgattaacatggcccacggcgagatgctgatgctgggggcatatgcgacctggatggtgcagcaggcgatggccgggcttgcgccccattggctggcgctctatcccgttatcgccttgccggtcgcgttctgcctgacggcgggcattggaatggtgctggagcgcacggtgatccgtcatctgtacggtcgtccgctggaaacgctgctggcgacgtggggcatcagcctgatgcttatccagctggtgcgcatgacctttggcgcccagaacctggaggtggcgaacccggcatggctctccggcggggtgcaggtttttgccaacctgacgctgccgtggaaccgcatcgtggtgctgggcttcgtgctgctggtgctgttctttacctggctcattctgaataaaacccgtctggggctcaacgtgcgggcggtgacgcaaaaccgcagcatggccgcctgctgcggggtaccgacagggcgcgtcgatatgctggcgttcgggcttggctccgggattgcagggttaggcggcgtggcgttatcgcagctcggtaacgtcgggccggagctgggccagggctatatcatcgactccttccttgtggtggtgcttggaggcgtaggccagctggcaggcagcgtggccgcggcgtttgggctggggatctttaataaaatccttgaaccccagatgggggcggtactgggcaagatcgtgattctggtggcgatcgtgctgtttattcagaaacgcccccagggactgtttgcgctgaaagggagggtgattgactga

SEQ ID NO: 163806 - DNA, 1074 bp, Enterobacter cloacae
atgagccagccgctgaccttaacgctggcgcgcaaagcgccacgcaccacgcagatagcgggcagcctgctggtggtgtgtttgctaatactgccgtttttcgccttactgcctgcgacgcatccgctggcgctgtcgacctggatgctgacgctgattggcaagatcctctgctatgccatcgtggcggtggcgctggatctggtgtggggctacgccggcatgctgtcccttgggcacggcctcttcttcgccctgggcggctatgcgatgggcatgtacctgatgcgccaggcggcaggtgacggtctgcccgcgttcatgtcgtttctctcctggagcgagctgccctggttctggtggggcacccagcattttgcctgggcgctggtgctgattgtgctggtgccgggcctgctggcgctggtgtttggctggtttgccttccgctcgaagatcaaaggggtctatttctcgattatgacccaggcgctgacctatgccgggatgctgctgttctttcgcaacgaaaccgggtttggcggcaataacggctttaccggttttaccacgctgctcgggttttcggtaacggaaacgaccacccgcatcgcgctgttcctggcgaccgtgctgttgctgcttctggccctgggcaccgggtttgcgctggcgaagagcaagtttggccgcatcctgaccgccgtgcgcgacgccgaaaaccgcctgaccttttgcggctacgatccgcgcggcttcaagctgctggtgtggacgctttctgccgtgctgtgcggtctggcgggggcgctgtacgtgccgcaggtgggcattatcaaccccggtgaaatgtcaccaacgaactcgatagaagcggccatctgggtggcgttgggcgggcgcggcacgctggtggggccggtgattggcgcggcgctggtgaacggggcgaaaagtttcttcaccgtcgcgatgccggagtattggcagctgtttctggggctgatttttatcgccgtcacgctgttcttgccgcgcggcgtctacggtctgttgcgtaagggagagaaataa

SEQ ID NO: 163807 - DNA, 798 bp, Enterobacter cloacae
atgcagccaacggaaggattatttacccgccagctgcccggcgatcgctaccgggaccagactgacccggtgcttcagcttgaatccattaacgtcaattttgatggttttcaggccctgaccgatctctcgctgaatatcggcgtgggcgagctgcgctgcgtgattggccccaacggtgcgggtaaaaccacgctgatggacgtcatcaccggcaaaacgcggccaaagagcggcagggcgatttacgatcagtccatcgacctgaccgcgctggagcctgcggccatcgcccgccagggcatcgggcgtaaattccagaagcccacggtttttgaagcgctgacggtgtgggaaaacctggagatcgccatgaaaaccgataaatccgtctgggcgagcctgcgggcaaaactcaacggggagcagcgtgaccggatcgacgagatgctggttttgctgcgccttagcgcggagcgcgaccgacgggccgggctgctttcccacggacagaaacagttcctggagatcggcatgctgctggtccaggacccgcatctgctgctgctggatgaacccgccgccggaatgaccgacgcggaaacggaatacaccgcagagctgttcaaaacgctggcgggcaagcactccctgatggtggtggagcacgatatgggctttgttgaaacgattgccgaccacgtgacggtgctgcatcaggggcgggtgttggcggaagggtcgcttcgcgacgtgcaggccaacgagcaggtgattgaggtctatctgggacgttaa

SEQ ID NO: 163808 - DNA, 699 bp, Enterobacter cloacae
atgctacaggtcaacgaactgaatcagtattacggcggcagccatatcctgcgcggcgtgagctttgaggccgtcaccggcgaagtcacctgcctgctggggcgcaacggcgtggggaaaaccacgctgctgaagtgtctgatggggctgatcccggcgaaaaccggggaggtcatctggcaggggaaaacgattacccacagcaaaccgcaccagcgggtgcagtctggcgtggcgtatgtcccgcagggacgcgagatttttccgcgcctgaccgtggaggagaatctcctgctggggctatcgcggttttccgcccgcgaggcgaagcaggtgccggaggagatctggcagctgttcccggtgctcaaagagatgaagcaccgtcgcgggggcgatctctcgggtgggcagcagcagcagctggcgattggtcgcgcgctggcgagtcgtccgcggctgcttatcctggatgaaccgaccgaaggcatacagccttccgttattaaagagatcggccacgtgatccgcaccctggcaaacagaggcgacatggcgatcctgcttgttgagcagttttacgactttgccgccgagctggccgacagctatttgctgatgtcccgcggcaccattattcagcgcgggcggggtgaaaacatggagcaggagggcgttcgcggcctggttgcgatctga

SEQ ID NO: 163809 - DNA, 642 bp, Enterobacter cloacae
ttggctgcacatattgggaaatttgccatgactctgggggcgctgctggtcagcggccagctgtttgctcactcgcacggccaccagatgaccgaagcagaacagaaagcggcgaacggcgtgtttgaggataaagacgtgaaggacagagcgctgtctgactgggacggcacctggcagtcggtctatccgttcctgctcgatggttcgctggatccggtctttaagcagaaagcgcagaaggataaaagcaaatcctttgatgaggtgaaagcctactaccgcacgggttatgcgacggacgtggatgccatcggtatcgaaaataacgtgatggaattccatcaggggaaagcggtcagccgctgccagtatgattacagcggctacaaaattctgacctacgcgtcaggcaagaaaggcgtgcgctatctctttgagtgcaaggacgccagcagcaaggcgccgaagtttgtccagttcagcgaccataccatcggaccgaaggcctcttcgcacttccatattttcatgggcaatacctcccacgaggcgctgctgaaagagatggataactggccgacctattatccgaacgagatgtataaagagcaggtggtggaggagatgttgcaccactga

SEQ ID NO: 163810 - DNA, 1194 bp, Enterobacter cloacae
atgaaaccatctctcaggcgctcaaccgcagcgctgctggcatcgtcattgttgttaaccatcggtagaggggcaacgctgccgttcatgaccatctatctcacgcgcgtctacagcatgagcgtcgagaatattggttatgccctgaccgtggcgctgaccattggcgtggtgttcagcctgggatttggcattctggccgataagtttgataaaaaacgctacatgctcatcgccatcgtagcctttatcgccggatttgtggcgatcccgctggtcaataacgtcacgctggtggtgctgttctttgcgctgatcaactgcgcctactccgtcttttcgacggtgctgaaagcctggttctccgacgtgctcacctccagccagaaggcgcgggtcttctcgctgaactacagcttcctgaacattggctggacggtcggcccgccgattggcaccctgctggtgatgtacagcctgcagctgccgttctggctggcagccttctgtgccgccctgccgctgggctttatccacttctttgtgcagaaaagcgtggcgttagataccgccgaggagaagacgccgtggcagccgtcggtcttgctgaaagaccgcgcgctgttctggtacacgctctctggcctgctggcgtcgtacgtgggcgggtcgttcgcgagctgtatttcgcaatacgttctcgctgcacatgcggacagcgatttcgccgaaaaggtggtcgccgtggtgctgcccgttaacgctgccgtggtggtaacgctgcaatatgcgctgggccgtaagatctcagccagcaatatccgcccgctgatgtccctcgccaccctgttttttatcgtggggctgggcggctttatgctctccggggaaaacctggtttactggggcatcgctgccgccatctttacgctgggtgagattatctatgccccgggtgaatacatgctgattgacaacattgcgccaccgggaatgaaggcgagctatttttccgcgcaggcgctgggctggctcggcgcggcggcaaacccgatgatcaccggcatcatcctgaccaacctgccgcactggtcgctgtttgtgattatgatggccgcgattattgtggcgtggctgatgattttgcgcgggatgagcgtgaaggcatggtgcgagtcacccaaagcggcgtag

SEQ ID NO: 163811 - DNA, 906 bp, Enterobacter cloacae
atgacgcggaaagacgggctgctggcactgctggtagtcgtagtatgggggctcaattttgtggtcattaagctggggctgcacaatatgccgccgctgatgctggccggcttacgttttatgctggtcgctttcccggccatcttctttgtggcgcgtccaaagatcccctttaaactgctgctgggctacggtctgaccatcagctttggccagttcgcgtttctcttttgcgccatcaagttcggtatgccggccggtctggcctcgctggtgttacaggcgcaggcgttctttaccattattctcggggcgtttgtgtttggcgagcgcctgcagggcaaacagctggcggggatcacgctggcggtgtttggcgtgctggtgctgatcgaggccagcctgaatggtcagcacgtggcgctgctcgggtttatgctgacgctggcggcggggctgagctgggcctgcgggaatatcttcaacaagctgatcatgcagcacgaggcgcgcccggcggtgatgtcgctggtggtgtggagcgcactgctcccggttatcccgtttctgctggcgtcgagtattctggacggtccggcggtgatgctgcagagtctggtcgacatcgatctgaccaccatcctttctcttgtctatctggcctttgtcgccaccattgtgggctatgggatctggggatcgctgctggggcgttatgagacctggcgcgtcgcgccgttatccctgctggtgccggtggtaggacttgccagtgcggcgatattgctggatgaaacgctgagcgcgctgcagctgtttggcgccgtgctgatcatggccgggctgtatatcaacgtgtttggtctgcgggttcgtcggacgacgcgggtaagcgaaaaggcataa

SEQ ID NO: 163812 - DNA, 219 bp, Enterobacter cloacae
atgaaagttatcgcctccgccgccctcgccttgctggtgctgttctccagccagaccttcgcggagcaaacccctcgtgcaacgcagcaaaataatcctgatacgatgattttgccgtccgcacatgaccagtcgccctatgatttcaaccacatgggtgctggtagcgacaaatccgacgaattaggcgtgccttattataatcggcacggcttctga

SEQ ID NO: 163813 - DNA, 381 bp, Enterobacter cloacae
atgtccagacgcaatactgacgctatcaccattcatagcattttggactggatcgaggataacctggaatcgccgctctcccttgaaaaagtgtcagagcgttcgggttactccaaatggcacctgcaacggatgttcaaaaaagagaccggccattcattaggtcaatatattcgcagccgcaagctgacggagattgcccagaaactgaaagaaagcaatgagccgatcctttatctggcggagcgttacggatttgaatcgcagcaaaccctgacgcgtacgttcaagaactattttgacgtgccgcctcacaagtaccgaatcaccagcgtgccgggcgaatcccgatacctgtatccgttaaaacactgtagttaa

SEQ ID NO: 163814 - DNA, 435 bp, Enterobacter cloacae
gtgaaaagcaccagtgatatctttaacgacgttgttccgctgggtcgtcttattcatatggtcaatcagaaaaaagatcgcctgctcaatgactatctgtcaccgctggatatcaccgcaacacagttcaaagtgctgtgttccattcgctgcgaagtgtgtatcacgccggttgagctgaaaaaggtgctctctgtcgatctgggtgcgttaacccgcatgctcgatcgtctcgtctgcaaaggatggatagaacgaagccctaacccgaatgacaaacgcggcgtactggtgaagctgaccagcgatggcgcggccatgtgcgagcaatgtcatcaattagtaggacaaacactgcatcaggaactaacaaaaaacttaacggcagatgaagtggcaacccttgagcttttgctgaagaaaatcctgccgtaa

SEQ ID NO: 163815 - DNA, 666 bp, Enterobacter cloacae
atgttggatttgattaaagcaatcagccttgggctggtggtcttgctgccgttggctaacccgttaacgacggtggcgcttttcctcgggctggcagggaatatgaacagcgccgagcgcaatcatcagtcgatgatggcctcggtgtatgtgtttgccatcatgatggtggcttactacgccgggcaactggtgatgaataccttcgggatttccatccctggcctgcgcatcgccggggggctgatcgtggcctttatcggtttccgcatgctgttcccggcgcaaaaagcgcatgaatcgccggaagcgaccagcaaatcggaagagctggaaaccgaaccgagcgcgaatatcgccttcgtgccgattgccatgccgagcacggcggggccggggaccatcgcgatgatcatcagctccgcgtcgacggtgcgtgacagcgcaaccttcccggactgggtgctgacggtggcaccgccgctgatttttgcgattatcgggattatcgtgtgggcatcgctgcgcagctccggcgccatcatgcgctgggtaggcaaaggcggtatcgaggcgatttcccgcctgatgggcttcttactggtctgtatgggcgtgcagtttattattaacggcgtgctggagattattaagacctatcattaa

SEQ ID NO: 163816 - DNA, 843 bp, Enterobacter cloacae
atgcgtgcaaaacactgttttctcgtactgagtacgttgctgttttcatttaatgccactgccggtttgttcgattctgcgcccgaatttaaatgtggtcgtgaggatgccattgctgctatgcaatctaaaatcagagatgatgcgatgagtaaattgcaggaaacgtatctggcaacgccttcgcaattttatggaaaaccgcttaaatcttacctggaaaaagcacagcaaataactattcagttggaaaatgtcacaacgacaccgtttgataaaaatgattcaaaccgcagttgtaccgctaaggtgaccctcaccatgccaacggaaattcttgggtttattgcatcctatcctcagaagttaggtgggataaatcaagggggcggcaaggtgcttaacaatagtgttcaatgggagaagtttgtttatttattatctctggcggacaatggcaaagatatttctgcatcctatgaatattctggtagggattatatttctcagtcgctggccgctatgactatgctggcaatgaataaatccgaacttgagaaagccgatctcgataacaaattaaacaatgccatatttgcctattcagaaaacgatggtcagttaaataatctctggaaatcgcttccagagtctgtcagagcctctatgaaaaaagaacagaatctctggattaacgagaaggctaaaagatgcgggaagatcagtgatgcgtcttctactgccacgcctgttgagacaagaatcaagatctatcagtgccagtctgaaagaacctttgaaagatttatctatctgggtggagatgaagaacgacagtattaa

SEQ ID NO: 163817 - DNA, 1197 bp, Enterobacter cloacae
atgacaacgaacacagtttcccgcagggttgcgtggctacgcgtggtcacgctggccattgccgcgtttatttttaacaccacagaatttgtgccggttgggctgttgtctgacatcgctgacagtttccagatggaaacggcgcaggtgggcattatgttgaccatttacgcctgggtggtggcgctgatgtccctgccgttcatgctgctgaccagccagatagagcggcgcaggctgctgatcggtctgtttgtcttgttcatcgcgagccacgtgctgtcgtttatggcgtggaattttacggtgctggtcatcagccgcgtcggtatcgcctttgcccatgcggtgttctggtcgatcaccgcgtcgctggcgattcgcctggcaccggcgggtaaacgcgcgcaggcgctaagcctgattgctaccggtaccgcactggcgatggtgctgggcctgccgattggccgcatcgtggggcaatacttcggctggcgtaccaccttcttcgccatcggcatgggcgcgctggtgacgctggtgtgtctgattaagctgctgcccgcgctgccgagcgagcattccggctcgctgaaaagcctgccgctgctgatgcgtcgccctgcgctgctgagcatctacctgctgaccgccatcgtggtaacggcccattacacggcgtatagctacattgaaccgtttgtgcaggtggtagcaggctttagcgccaactttgccaccgtcttactgctgatcctcggcggcgcggggattattggcagcgtgctgttcggcaagctgggtaaccggcacgcctcctcgctggtaagcagcgctatcggcctgctgctggcctgtctgctgttgctgatgcccgccgcgggcagtgaaagccatctggcgatcctcagcctgttctggggcgtggcgatcatgattattggcctgggcatgcaggtgaaggtgctagccctggcgccggatgcgacggacgtcgccatgtcgctgttctcgggaattttcaatctggggattggcgcgggtgcgctggtgggaaaccaggtcatcctgcacgtatcgatgtcggcgattggctatctgggtgccattccggcgctgatggcgctgatctggtccgtgcttatcttccgtaagtggccggtggcgctggaggaacaggggcagcacgggtga

SEQ ID NO: 163818 - DNA, 789 bp, Enterobacter cloacae
atgcaggagattgatttttatctggtcgatgcgttcagcaataccacgtttggcggcaacccggccgccgtttgtccgctcaaggaatggttacccgatgagaccttgctgaaaatggcacagcagcataatcagtcggaaacggcctttttcgtctgcactaaaggaggcattgagctacgctggtttaccacgcttaccgaagtcaatctctgcggccacgccacccttgccgccgcgtacgttctgtttaatgaactggattatcccgactcgcggatccactttgataccgcctctggccgcctgacggtcagccgggagggggagtggatgacgctggacttcccgtcatgtccaacccatgaagagacgccgccgccggagatgctctcggcgctcggtatccgtcattacgttgcagcacgcaaagggcgcgcctggctgatcgtgctggacaatcgccagcaggttgaagcactcgcgccacgcttttcggcgatgacgccgggcgagcataaggtgagcgtgacggcacggggtgagggggaatacgattttgtcagccgctttttctcccccggggtatccgttccggaagacccggtcaccggctccgcgcacaccatgctgctcccgtactggggtgaacggttggggaaaacagccatgcttgcccgtcaggtttccgcgcgcggcggcgacgtgcgctgtgagctgaaaggctcgcgcgtgctgatgagcggacaggcttcactttatctgaaaggcacagtttttctgcgctaa

SEQ ID NO: 163819 - DNA, 792 bp, Enterobacter cloacae
atgcaggaaattgatttttatctggtggatgccttcagcgacaaaacctttggcggcaacgcggcagcggtatgtcctctggaagcgtggctgccggacgagacgctgctcaaaatggcgcagcagcataaccagtctgagaccgccttttttgtacgcaccgacggtgggtttgaactgcgctggtttaccacgctcgatgaaattaacctgtgcggccatgctacgcttgccgcatcgcacgttattttcgaataccttgactatccgcacactgaaattaccttcaccacgcgcttcgtgggcgagctgacggtgaaacgcagcggcgactggctgacgctgaacttccccgcgtggtcaacggaggtggtcgagaacccacctgcgctgctgtttagcgcgctgggcatcccagacgcaaaagaggtgcgcgtcggacgtgattacctggtggtgctggagagccagcagcaggtggaagcgttaacgccggatattggggcgatgatcccgctggataaaatggtctgcgtgacggcgccgggcgaaaaatatgacttcgtcagccgcttcttctgcccgggggaaggggtgccggaagatccggttaccggatcggcccacagcatgctgatcccatactggagcgaaaagctgggtaaaacgtcactttatgcccatcagggggcgcaccgtggcggggatctgcgctgcgaaatgaagggcgaccgcgtgctgattggcggtcaggccaccctgtacctgaaagggaaaatctttttgcgctaa

SEQ ID NO: 163820 - DNA, 483 bp, Enterobacter cloacae
atgtattccattacctctgaatctgcacgtcacccggacattctcagcctgatcgcggcgctggaccgctatcagagcgagctctatcccgccgaaagcaatcatctgatcgatctggctgcgctgccggaaacgtcgctgatcctgatggtcattcgcgaccagcagcttcaggccgttggctgtggcgccatcgtgctcaacggcgacggtaccggtgaaatgaagcgggtctatatcgatccggcccatcgtgggctgcaccttggggagacgctattggccgccctggaagatgaggccctgagccgtcattgccatacggtacggctggagacgggcatcaagcagcgcgccgcggtgcgtctttatgaacagtgcggatacgatgtgcgcccggcgtttcccccttacgttgacgatccgctcagcctgtttatggagaaggcgctggttgaagacgttcgtttagcagcgctataa

SEQ ID NO: 163821 - DNA, 879 bp, Enterobacter cloacae
atggatttaacccagcttgaaatgtttaacgccgtcgcgctgacgggcagtatcacccaggcggcgcagaaggtgcatcgcgtgccgtcaaacctgacgacccgcatccgccagctggaagccgatcttggcgttgagctgtttattcgtgagaaccagcgtttacgtttatccccggctggccataacttcctgcgctacagcaagcagatcctcgccctggtggatgaagcgcgcatggtcgtcgcgggggatgagccgcaggggttatttgccctcggcgcgctggaaagtaccgccgccgtgcgcattcctgaaacgctggcacagtttaaccagcgctatccgcgcattcagtttgccctttctaccgggccgtccgggacgatgattgatggcgtactggagggaaccctgagcgccgcctttgtcgacgggccactgtcgcacccggagctggaaggaatgccggtctaccgggaagagatgatgctggtcacgcctgccgggcaggcggaaatctcacgcgccgcgcaggtgagcggcagcgacgtttatgcctttcgcgccaactgctcttatcgccggcacctggagagctggtttcacgctgaccgcgccacgcccggccgcattcacgagatggagtcctatcacggcatgctcgcctgcgtcattgcgggcgcgggcatcgcgctgatgccgcgctcgatgctggagagtatgcccgggcatcatcaggttgaagcctggccgctggcagaaaactggcgctggctcaccacctggctggtgtggcgacgcggggcaatgacccgccagctggaggcctttatagcgctgctaaacgaacgtcttcaaccagcgccttctccataa

SEQ ID NO: 163822 - DNA, 1419 bp, Enterobacter cloacae
atgaatcaaccgaaaaacgtggagaacaccatgacttattcctctgcaacacatgccttctctgtcaacccggcaacgggtgaaaccctcgccgcgtatccgtgggcgacgtcggaacaggttgaccgcgcgatttctcagtccgacgcgggctatcgccagtggcgtcgcgaaagcgtctcccaccgggcgcacaagctgcgcgatcttggcgccgcgctgcgtcatcgcgctgaagagatggcgcagacgatctcccgtgaaatgggcaaacccattcagcaggcgcgggcggaagtggcgaaatccgctggcctgtgcgactggtacgccgagcacggcccggcgatgctgcacgcggaaccgacgctggtcgaaaaccagaatgcggtcattgaataccgtccgctggggccgatcctcgcggtcatgccgtggaacttcccgctctggcaggtgctgcgcggcgcggtgccgattctgctggcaggtaacagctatctgctcaaacacgcgcccaacgtcctcggctcggcggagcttatcgcgcagatctttgcggatgccggtttccctgaaggcgtgttcggctgggtaaacgccaccaatgacggcgtcagccaggcgattaacgatcgtcgtattgcggcggtgaccgtcaccggcagcgtgcgtgccggggctgccattggtgctcaggcgggggccgcgctgaagaaatgtgttcttgaactgggcggctcagacccgttcatcgttctcaacgatgccgacctggatcttgccgtgaaggcggcggtagcaggccgctaccagaataccggacaggtgtgcgcggcggccaaacgcttcattgtggaagagggtattgcgaagacctttacccagcgctttgtcgacgcggttgctgcgctgaagctgggcgcgccggaccaggaagaaaactatattggcccgatggcgcgttttgacctgcgcgatgaactccatcagcaggtgcaggcgacgctggcggaaggtgcaacgctgctgctgggcggtgagaaaatcagcggtgaggggaattattacgccccaaccgtgctggcgaacgtcaccccggcgatgacggccttccggcaggagctgtttggtccggtcgcggccattactatcgcgaaagacgcggagcatgccctgatgcttgccaacgacagcgattttggcctgtctgccacggtctttaccgccagtgatgcgctggcagagaccttctcccgcgagctggagtgcggcggggtgtttatcaacggctttagcgccagcgatgcgcgcgtggcctttggcggcgtgaagaaaagtggctttggccgcgaactttcccactttgggttgcacgagttctgcaacgtgcagacggtgtggaaggatcgcgtgtaa

SEQ ID NO: 163823 - DNA, 1602 bp, Enterobacter cloacae
atgaagctaattatgaacataacgcaaatttttcgccgtattgcgcagcgtctcactccccgtcactttggcctgctgacagggatcttttgcattattggccttttctccgcgctgcagctctcctcgtcattcctgcttaacgcctccctgaacgaagcccagcgcaacgagcagcaaaacctgctggcgtggcagcagcagagcaagctggatctggcccgcgtctctctgctggcggcaagcgatctccttaaccgctccggggtgtggtttatgcaggataaagagaccggatccgacggaagctggcacagcctgatggatgacgcgcaaaaggcgctaacggtgtctcagcaggcgtggaaggcctggctggcgctgaatccaccgaaagacgacgccctggtgaacagctatcagctcttctacggcgcgatcaaagagcaggcggaaggtctggtcaaaaccaataccatcgacgctttttttgccgtcccggcgcaggcttttcagactgattttaacgacaactatgcgcgctaccagcaggcaagcgagaagcaggccatgcaggggcgtcagagcctcatggcgcagctctctgacctgcaaacgttattcctgtttgccccgttgctgttagtcgccattgctgctgtcgtctggttcggtatgtcccgatgggtgattacgccgctgcgtcggctcattgcgcatatcaaccggctggcagcaggggatctctccggcacgccgccgaacgtcatgcgcttcaaccgggagatagggcagcttagcgacagcattgccacgatgcagcacggcctgcagcagctggtgacgcaggtcagccacgccacggctaccatggtggagaacattgattctctggcgcagggtaaccagaagctgtatcagcagtcggcacgtcaggcgaaagagcttgaggatgtgacggcgcatattgcggcgctggaaagccacgtggaagggaataccggctatgccagactcgccagctcccgggccgatgaagcacgccaggcagccgtgggcggcgaccagatgatgtcgaccgtaaatgcgtctatgcaggcgatcgtcgaccgatcgtctgagatgcgcgggatcgtggcaatgatcgacagcgtggcgtttcagacgaacatcctggcgctgaatgccgccattgaggccgcccatgccggaaatcaggggcgcgggtttgccgtcgtcgcccgggaggttggactgctggccagaaagagcagccactcgacgcagaccattcaggagctgatcaaccgttcactacagggtatcgaagacggttcccgtgccgtcaccctgatggaagagaatttgcagcaggtcaccggtctggtgggcaatttgagcagtttgctgaatgagatctccaccgccacgctcagtcagggagagcgtattcacctgatgacgcgtcagcttcaggcgctgaaccaggtctcccgtcagacggacctgctggtctctgacgcctcggaggcctctgagcggctgcaaaagcaatccgatcttttattgcaggccgtttcgcgttttcgtcttagcgcctga

SEQ ID NO: 163824 - DNA, 927 bp, Enterobacter cloacae
gtggctgcggtcatccataatgagatgttggacgagattctggcgcaggttcgtccgttaattggaaaggggaaggttgccgactatattccggcccttgcctcggtcagcgggaataagctgggtattgctatctgcaccattgacggacagcgattccaggcaggggatgcaactgaacgtttttccattcagtccatttcgaaagtgctcagtctggttgcggcgatgcgccagtatgaagaagacgaaatctggcagcgcgtgggtaaagatccgtccggccagccttttaactcgctgcttcagcttgaaatcgagcagggtaaaccgcgaaatccctttatcaacgccggggcgctggtagtctgcgacatgctgcagagccgcctcagcgcgccgcgtcagcgaatgctggagatagtacgccagctctcgggggttgacgacattgcctacgatccggtggtggcccgctcggagttcgaacactctgcccgtaacgcggccatcgcgtggctgatgaaatccttcggcaacttccataacgacgtggcgaccgtcctgcaaaactacttccactactgcgccctgaaaatgagctgcgttgagctggctcagacgttcctgttccttgcgcatcaggggcacgcgccgcacctcgatcaggaggtggtttctcctctgcaggcgcgccaggtcaacgcgctgatggcaaccagcgggatgtatcaaaacgccggcgagtttgcctggcgcgttggcctcccggccaagtcgggcgtgggcggcggagtggtggcgattgtaccgcatgaaatggcgattgcggtctggagccccgagctggatgaaacgggaaattcccttgccggtgtcgcggttctggagaaactgacccagcgtatgggacgttccgtttactga

SEQ ID NO: 163825 - DNA, 267 bp, Enterobacter cloacae
gtggtgaatcacgctgacgatatactgctgctgctgcgcggtgagctgaacaccgtgaggaatattatgccatttcgccagacagccccggcaacaggtggcggtggcatgctgggcgataaaaaccgggtgaccgcgcatgggcgtctgtttgccgtcattcgcaggttgtgcaggggcaaggcgcttttcgacaaaatcagcggcatgctgatcaatagtatcggggcctttgtcccagcaatactgccgttccttatcgcctaa

SEQ ID NO: 163826 - DNA, 1449 bp, Enterobacter cloacae
atgcgttctgctcttaccgctttcaggccgttccagcctgacacgccgctgcgaaatgcatcgacgatctttatcctcaccactttgttctattttgtgggggcggaattacgtctcgtggaggccttgtcgctgttctggcccctcaacggcgtgatggcagggatctttgcccgctatgtttttctgaatcgcctgcattactacgcggtatcctatgtcgccatgctgatgtacgacgcggtgacgaccaactgggggatagcctccgtggtgatcaacctgtctaacatggtctttatcgtcgtggtcgccgtgctgatccagcgtgacaggcggctgatgaagaaaacccccgatccgcttaacgcattacgcctgttcaactactgcctgattgctgcgctgctgtgcgcactgctcggcgcggtagggtcggtcgggattgacagccacaccttctggccgctctttgccgactggtttagcgagcagttctcaaccggcgtgcttgttgtgccgtgtatgctcacgataggcatgcccgagcgcgaattcaggttacgtctggagcagctattaccggttattgcgctgatcgtctcggtggtcgcgtcagtcgtgattggcggcgcggggagcctctcttttccactgcctgcgcttatctggtgtgcggtacgctacccattgcctgtgacctgcttgctgacgtttgtcacgggcgccattgaaattattctggtcgccaattcggtgattaatattgccgtggcgacaccgctgaccaccccaatgatgttttctgcccggctgggtattgccacgatggcgatctgtccggtgctggtctccgtcagcatggcagccattaattccctgatccgtcaggtttccctgcgggcggattatgactttttaacgcaggtttattcgcgttccgggctttatgaggcgttaaaacacgaagagacgcaccgccattcgcgtttcctgaccgttatgctgctggatatcgattacttcaaaagcatcaacgataactacggccacgagtgtggcgaccgcgtgctggcgtcattcgcccggcaggttcagcaggtggtcggtgaagacgggatggtcgcgcgtatgggcggggaagagttcgcggtggtggtcaactctggcgacgctcgacacggttatgaactggcggaacgtatcagaactaccgtcgctaaccatccttttacatggcgtcagcaaacgctctctctgacggtcagtattggccttggaagcgggaaggcggaggcatggcagttgaccgaggtcttcaacaagctcatgaccgaagcggacgatcacctctatcgttcaaaaaaagcgggtcgaaatcgtaccagcgcccgggtcgcggacgagcatattactgccgccaccgggcatgaaacagagctgcgttaa

SEQ ID NO: 163827 - DNA, 966 bp, Enterobacter cloacae
atgaaagcacctgcaacccctgaaaatgaaacagacagactgaactcgctgcgcgaatcaggtctgcttgagatcgacagttccccggcgtttgaccggcttacgcgtctggcgaagcgcttcttccaggtgccgctggcaatggtcaacctcattgatgagcactcgctgatcgtgaagtcggccgatggcaaggcgcctgacaccgttccgcgtaatatctcgttttgtggccatacgatcctcaccgaagcaccgctggtggtaggggatatgctgcaggacgatcgttttgcggataatccgctggtggcgggtgaacctcgcgtgcgtttttatgcgggcttcccgctgcgcctgcgtgacggcgccagcgtgggctcgctgtgtctgattgattacgccccccgtgagttctcggcggccgatcttgccgtgctgggagacctgggcgcgctggcagaagatgagtttgccgccatcagcgcggcgaccacggatgagttaaccggcttattcaaccgtcgcggctttaatcagctcgtgagattcacgctttccgttgcccgacgccgggcggagccgctgacgctcggctggctggatttggatcgctttaaggagattaacgatcgctacgggcatgaagagggcgataaggcgcttaaagttatggcgcagctgatgcgcagcgctttccgtgaggcggatatgctggtgcgttttggcggggatgagttcgcggtgctgttcgcggataccgacgagcagggcgcctggatagccatgcagtatctcgccgagcaggtggaaagctataacgcccgcaagctgcacccgtggtcgctacacttctcatgggggctcagtgaattcgatcataacggcaacgacctgcaacagtggttaaaagatgccgatgaaaagatgtatgccatgaagcagcagcgccagcgcgcccggtga

SEQ ID NO: 163828 - DNA, 528 bp, Enterobacter cloacae
atgaatacctcactgcaaatcaaaaccctcacccgggaagagatcctcatccatcttgatgcgctggccgggatcctcgaaaactgcgtaaacggcggggcatccgtcagctttatgctcccttttagcctcgacaaggcccgtactttctggcgcggtattgccgaaagcgtcgcgcgaggcgagcggctggtgcttgcctgcgtcgatgcgcaggacggggtcattggaacggtgcagctgatcgcagaccagccggaaaaccagccgcaccgggcggatgtggcgaagctgctggtgcatgaaaaagcgcgtcgaaaaggggccgcaatggcgttaatggaagcgctggaggctgaggcccgggccagagacatttctgtgctggtgctcgatacctccaccggcagcggggcagaaaccttctaccagcgtgccggctggcaaaaggttggtgagatcccgcgctacgcgctgatgcctgacggcgctatgaacgccacctctgtgttttataagttcttataa

SEQ ID NO: 163829 - DNA, 1452 bp, Enterobacter cloacae
gtgaacacgctcaaccgtcgtgattttcccggtgcgcactatccagaacgcatcattcagtttggcgaaggcaatttcctgcgtgcgtttgtcgactggcagattgacctgttaaacgaacataccgatcttgacgctggcgtggtaatcgttcgcccgattcagagcgacttcccgccgtcgttaagcacccaggatgggttgtacaccacgatcgttcgtggcctgaatgagcagggcgaggcggtgagcgaggcccggctgatccgctccgttaaccgggaaatcagcgtctatgacgactatggcgcatttctgaaactggctcacaatcccgatatgcggtttgtattctcgaacaccaccgaagcgggtatctgctaccacgcgggtgacagcgtcgacgatgcccctgcggtgagctatccggcgaagctgacgcgtctgctgtttgagcgctttagccacttcaacggtgcggctgacaagggctggatcatcattccctgcgagctgattgactacaacggtgacgcactgcgtgaactcgtcttgcgctatgcgcaggagtgggcgctgcctgctgcctttattcagtggctcaacgacgccaacagcttctgctcgacgctggttgaccgtatcgtgacaggctatccccgcgatgaagcggccgcactggaggctgaactggattatcacgatgggttcctcgacacggccgaacatttttatctgtttgtgattcagggaccggcatctctttcgcacgaacttcgtctggataagtacccgttaaacgtgctgattgtcgatgacatcaggccctacaaagaacgcaaggtcgccattctgaacggcgcgcacacggcgctggtgccggtcgccttccaggccgggctggatacggtaggcgaggcgatgaatgatgcggagatctgcgcgttcgtcgaaaaagcgatttatcaggagatcattccggtcctcgatttgccgcgtaacgagctggaatcgttcgccagtgcggtgacaggacgttttcgtaatccctacatcagacaccagctgctctccatcgcgcttaacggtatgaccaaataccgcacccgcattctgccgcagctgctggcagggcagaaggcaacggggcaattaccggctcgcctgacgtttgctctggccgcattgatcgcgttttatcgcgcggagcgtaacggggagagctatccggtgcaggatgatgcacgctggctggatcgttatcagcagctgtgggcgcagcaccgcgatcggcagcttagcacccgtgaactggtgcagtcggtgctcagcgcacgcgaccactgggagcaggacttgacgcaggtaagcggtcttgtcgaccaggtgacgctggatctggatgccattctgcttaagggcatgcgcgccgcggttaaaccgctttgctaa

SEQ ID NO: 163830 - DNA, 915 bp, Enterobacter cloacae
atgatcgttcgtcctaaacagcactggctacaactgatttttgtctggcacggttcggtacttcccaagatctatacccgattgctgctcaacttcctgctctctatcgccgttatcctgatgttaccgtggtatacctcgctcggtatcaaatttaccgtggcgccattcagcattctcggcgtggcgatcgctatctttctgggtttcagaaacaacgcctgttattcccgctacgttgaggcgaggctgctctgggggcagttgatgatagcggcacgctcgctgtttcgcgaggtaaaaaacaccttacccgacgataagcacctcggcgaatttgtccgtctgcagattgctttcgccaactgtctgcgcatgaccctgcgccgggaactgaatgctgagcagctctctcgttatcttgctgcggaggatttacgtaaagtcatggacgccaactcaccggcgaaccgtattttgctgatcatgggggaatggctggccgtgcggcggcgaaacgggcaactctcagacattctgttccatagcctgaacaaccgtctgaacgacatgtctatcgtcctttccggctgcgagcgcattgcgaccacgccggtgccgtttgcctacacgctgattttgcaccgcacggtatatctgttctgcatcatgctgccgttcgcgctggttgtggacctgcactacatgacgccctttgtttcggcgctgatttcttatacctttatttcgctggacgccctggcggaagagctggaagacccgtttggcacagaagataacgacctgccgctggacgccatctgcaacatgatggaacgcgatctgctgcagatgaatgatgaagagaacattccggacaggctgatgccggataagcactatcagctgacctga

SEQ ID NO: 163831 - DNA, 549 bp, Enterobacter cloacae
atgacgataccgacgctcacgacagaacgtttactgctgaaaccgctggttgccgaagatgccgcccagatacaaacgctgtatccgcgctgggagatcgtccgttatatggtctcttccgtgccctggccctatccggataacggcgcggaaaactatgtcaacaacgtggcgctgccggatatggcaaaagggattgcctggttctggagcatccggcgacgtgaggtgccggatgaattgatgggcattatttgcctgtacgacgtcgaggataacaaccgcgggttctggctcgcgccggagtttcaggggcacggatatatgcgcgaagccagcattgccgcgacggattactggttcaacacgctaaacaaatccgttttgcgggccccgaaggccgccgccaacagccgctcccgtcgtatttcggacagtagcggcatgcggcttatcagaacggagaagaaagcctacgtcagcgggatgctggactccgagctgtgggagattacccgcgacgagtggaacgcccgtcaggtcagctga

SEQ ID NO: 163832 - DNA, 594 bp, Enterobacter cloacae
atgagctttgtgtctcttttaaccggacgggttttccaggatctcctgcagcatggcaaagagatagaggagactattgctcatcgtgatatccgtatccgtctcttgaatcattccactcccgagctggaacggtatttttcgcgacccctcagcgagcttccgcgtcaaaatccttacccggtagctatgctgttacctctgtttttagtggcgtttgcgctaaaccttttgccttttctcagcacgttgcagggtttgtcacctttacatcatgcattgagctttttcttaccatcattgacgatgacaggcgcgctcattgtgacaagcgtactactggctcgtggaaagacgtcgggattgtcgggctttatggcgttgttcatcatcctgctgataacgaccctcgttcaggttctacatgtcatgctttctcatgatggaagcctctggccacacgtcattgcatctttcgcgctgttactttgtcgggtggtgatgaacggcagcggctttgttctgtttacgctctattgtcgtactcagcgtcttgccagattggcacgggaaatgcggctaaaaagccgttaa

SEQ ID NO: 163833 - DNA, 471 bp, Enterobacter cloacae
atgacattacgaaaagccacgccacaggaagccgaaacactctggaatatacgcaatcaggcgattcgtcacggctgtacaaccagttacgacgctgaggtcattgcgcgctggacgcccgatctgatgcccgaacgctatcggcaaatggtcattgaataccctttttacgtggttgaagatgaaaagggcgatgttgcggcaaccggctacctcgatctggatacccattgcctggaggcgattttcaccttgcccgcagcctccggcaaaggcatggcgacccggattatcgaggccctcaaacatgaggcccgtagccgggggataacccgcctgacgcttgatgcaacgcctaacgcccagtcgttttatcagaagctggggtttgtgacgctgcgcgaaaactatcatcactcgcgtatggccggggctgatttacgctgttttgaaatggcgattactctgtaa

SEQ ID NO: 163834 - DNA, 441 bp, Enterobacter cloacae
atggctgttacggtacgaccgctatacaaagacgattattccgaatggcgaccgctgtgggacggctatacccatttttatgattgctaccttgaggaatccgtcaccgcagcgacgtgggaaagggcgctctcagcgcattcatcgatgttctgccgggtcgtggagaaggacgaaaagatcatcggtttcgcaatgtgtgttctgcacgaaggcacctggtcaaccgcacccatctgctacctggaagatctgtttgttgatgctgccgaacgcggggcgggggccggtaaggcgctcattgacgctctgattgaggaaggcaagcgcgaagggtggtcgaaactgtactgggtcacccgggagaacaacccggcgcgtaaactttatgacaaatatggtgaagctgacgactacgtccgctaccgtctctccctttaa

SEQ ID NO: 163835 - DNA, 996 bp, Enterobacter cloacae
atgttcagcaaacttgcttactcaaccctcgcactgaccgtttcgcttggcaccgtgatgtcctgtcaggcggaagccaccggcacgaatttcgcggccgcctttgatcatccccagcaaattaacgctggcgatctgaacgtcggttatgtcgacattggtccgaaggacggtcagccggttattttattgcacggctggccctacgatattcacagctatgccgaggttgcacccgtactggcggcaaaaggttaccgggtcattgtgccgtctctgcgcggctacggtaccacgcgcttcctgtcagcaaacacaccgcgcaacggccagccctcggcgatggcgaaagatatcgttaatctgatggatgccctgaatatcaggcaggcggtatttgcaggctatgactggggcgcccggacggcggatatcgtcgcggcgctgtggccagagcgcgtaaaatcactggtgtcggtgagcgggtatctcatcagcagccagcagattggcaaacagccgctgccgccaaaagcagagcagcagtggtggtatcaattctattttgcgacagagcgcggtgcggaaggctatgccaaaaacacgcatgactttgcgcgcttaatctggtcgcaggcctcgcctgactggaaattcagcgacgcggtctttaacgccagcgccaaatccctcgataacccggaccacgtcgcggtgacgctcagtaactatcgttggcgtttagggctggaaaaaggcgagcgcaaatacgaccgctacgagcaaaaactggccacgctgccgaatatcaccgtaccaacgatcaccatcgaaggcggtaacaacggcgcgccgcatccggcaccgcaggcatatgcagctaaatttaccggcaaatatgagcaccgcaccttcggcgcaaccgtggggcacaatccgcctcaggaagatccgcaggatttcgttaaggcggttatcgacgcggataagctgtga

SEQ ID NO: 163836 - DNA, 741 bp, Enterobacter cloacae
gtggaacatattgaccacatccttgtcgtcgatgacgacagggatattcgtgaactgattgtcgactatctcgttaagtccggttatcgcgcctccggcgcggcgaacggcaaagagatgcgtgccgtgctggataaacagcatatcgacctggtagtgctggatatcatgatgcccggtgacgacggccttacgctgtgtcgagagctgcgcgtcgggaagtataaagatttgcccattctgatgctgaccgcgcgtaacgaggagacggacaggatcctggggctggagatgggggcggatgattacgtcgtgaaaccgtttgtcgcgcgtgagctactggcgcgcattaaagcgattttacggcgttttcgcacgatgccgcccaatttacaggtaacggaagcagggcggctggtgatgttcggtgaatggcagctcgataccgtcgctcgccacttaatcgacccggaaggggtgatcgtcgcgctcagcggagcggagtatcgtctgctgcgcgttttccttgaccatccgcagcgcgtgctgacccgagaccagctgctcaacctgacgcaggggcgagacgccgagctgtttgaacgctcaatcgacctgctggttagccgggttcgccagcgtctcaatgaagatgcccgcacgcccgcctatatcaaaaccgtgcgcagcgaaggctacgtctttacgatgccggtgaccatcaaagaggttaacgaatga

SEQ ID NO: 163837 - DNA, 1302 bp, Enterobacter cloacae
atgacgatctggccgcgctcgctgctggcccgtttgctgctcgtcgtgctggccggtctgctgctggctaacgccctgagcctgacgctggtcatggttgaacgcatgcacagcgcccgcacggtgatgctcggtaatctggaaaacgatgtcgcaaccagcgtcgccattttagaccgcttaccggccagcgaacgcgccgcctggctgccgcggcttgaacgaggtaactatcgttatatcctgggcacaggggaacccggcgcagcgccgacggataagcgttcgcaggacgccatcagaaccttaaaagcgacgctggccgcgcattacccgcttcgctttaccgccgttcctggcgccatttcacatattcaggcccaccttacgttacgcgatggcgcaccgctgaccattgacctgatcccacgcatgccgcccgtcgccagctggctaccggtcgtcctcatcctgcagctgctcgtactggccgtctgcgcctggatcgccgtgcggcaggtggtacggcctttttcacactttacccgcgcggtggatgcgctggatccggcggccagcacgcctatgacggaaaaagggccgcttgaggtgctgcgggcagcgcatgccttcaacgccatgcaggcgcgcatacagtcttatctccgggaacgcgcgcagatcctggcctcgatttctcacgatctccagacgcccattacccgcatgaagctgcgcgtcgaaatggccggagagcctgaacttcgcgacaagctcctgaacgaccttgataacatgtctcgtctggtgcgggagggcattgcgtatgcccggtcatcggaatcactggaggagacgtcactgaagctggagctgaacgcctggatcaacagcatcgcctgcgattatcaggacatcggtaaaaacgtgcactttcaggcaagcgaaacccgcttgcccatcgtcacgcggccgcaggcgcttcgccgggtgatgaccaacctgctggataacgccctcaaattcggcgagcgtgctgcgattgcgatagacgtttcgtcggacagcgaggtcattattcacattatggacgacggaccgggaatacccgaagccgagctggaggcggttctgcagccgttttatcgggttgaaacctcgcgtaaccgcgataccggcggaacaggactcggcctggcgattgccgcgcagctgaccgcacagctggaaggaaaactcaggctggcgaaccgcgccgggggcggactggatgtcgccattacgctaccgcgtcgttcgtag

SEQ ID NO: 163838 - DNA, 1191 bp, Enterobacter cloacae
atgtttctggtaatcgcttttctgggcgggatgataagcctgctcagcccatgtacgctcccggttattccactcctgttcgccggtttccaggggcagcgtcggcatattctggccctgcttgcggggatgatcgtgatgttcaccctggtggcaatggtcgtcaccgtcgccagcgagtggatagcagaggcaaccattgtcgggcgctggatcgcgctcgtcattctggccaccgccgcgctggccttgattttcccgtctttcgcccagcgtattgcgggaccggccgtcagcgcgggaaatgttctcaacagccgtagcgggcaaacgcgcggaatggcatcggcttttctggccgggctagcggttgggctgctctggtctccctgcgccgggcctattctgggcgcgattttcagcattaatattgcggggcattcggccatcgccacaggcgcactgcttgccgcctatggcagcggatgcgcgctgatgctgggtctactcgtgttcggcggacgctcgctgatggcaccactgagagcaaaatcggcgctaatggcgaagctgcgtcagggggcgggggtggcgatgttagccgcagtcatcctgaacgcgacggggatgacttcgctgctgaaaggggcaaacggcgtcgcggaccgtcttgagacggtgctcttgaatctggcgaaacctgccaccgcgccggtgaagctccagccggtagtcatgacagagcccagcagccagctgccttcgctaagcggtggaacagggtggataaacggtgaccctgtcacgtctgaatcgttacggggaaaggttgtactgattgatttctggacgtgggactgcattaattgccagcatacgctcccccatgtgcgggagtgggccacaaagtaccagccgcagggtctggtggtgattggcgttcacaccccggaatatccctgggagaaaccgctgtcgtcggttaaaaatgcggtgaataaatggcaactgccgtatcgggtggtgacggataacaactatcaaatctggaatgcgttcggcaatcagtactggccagcacattactattttgatgccaaagggcagctgcgctataccgcctttggcgaaggtgactatgagcaacaggaaaaggttatccagcagctgctcaaagaagcccgctcataa

SEQ ID NO: 163839 - DNA, 759 bp, Enterobacter cloacae
atggccgactggaacccttctctttacctgcaatttggcgcagaaagaacgcgtccggccgcagaactgctcgccagagttcctctggatgaggccgctaccattgcggatttgggctgcggaccgggaaacagcaccgcgctgttgaagcatcgctggccttctgctcacatcaccggggtcgataactcccctgccatgctcgaggaagcacgcgccgccttacccgattgccattttgtagaggccgatattcgtcagtacacgcccggccagccgctgagcctgatttatgccaacgcgtcgctgcaatggattccggaccattacgatctcctgccgcatctagtttccctgcttaagctaaatggcgtgctggcgatccagatgcctgataactggctggaacccacccatgtggcgatgcgtgaagtggcgctggagcaagactatccagaccgtggccgcgaaccgctgccgggcgtacacgcttattacgatattctgtctgaagctggctgtgacgtggatatctggcggacaacctattatcacaaaatgagctctcatcaggcgattattgactgggtaagcgccaccggccttcgcccctggcttcaggaactgaacgagagcgagcagaaacggttcctgaaacgctaccatgaactgctggaagagcagtatccgctccaggaaaacgggcagatactgctggcttttccaaggttgtttatcgtggctcaacgccagccctga

SEQ ID NO: 163840 - DNA, 639 bp, Enterobacter cloacae
atgaattctgtcattgaattttttttacacgactacgataatttacccccagcattagcgcgcgaactttaccgactccggagaaaaacgtttcgggaccgactcgactggaaagtggaatgcgtcgaaggtatggagaaggatcaatttgattcccataacacgacatatttactgggtatgtatgatggacaactgttatgcggcgcacgatttattaacgcaacgcagcccacaatgataagcgaaatttttcataattatttcgacaaccccattatttttcccgcagatgttccttgttgtgaagtgagccgtttatttttagataaagaaatacgagattccgcaagtctgcatggcgtgcccgccagtaaagcattgtttcttgcaatgaatatttattgcatgaagaacaaatatcatggaatgtatgctgtagccagtcgtggaatgtatgccatatttcgccatgcgaactggaaagttgaagttattcagcgcggtgtttctgaaaaaggcgaggttatttactatatttatatgcccgccagcaccagcattattgaagacattattagcaaagagaaatccagtcactggcttcgcgaaatgctcgagcacttacgccatttataa

SEQ ID NO: 163841 - DNA, 693 bp, Enterobacter cloacae
gtgaaggatacatattacaacgacttaacgatcaatacgcaaattcagagtgagctggacgcgttttttgaggacttcaaagggatcgtcttcgcctacgccattatgaacaagaaagatccctcacagatgaggataatcaataacagtccagagtggtttactatctaccttgaaaaaaaatatcagttcattgaccctgttatcattcgggctttgcgctgtgtggaagattttttctgggaaagtgatgttgtcctgtcagatggttataacctgacgcgtattttcgacgaaagtgtccagtatgatatttatcagggacagacgtttcctctgcatgactatttgaataatcttgttgtcttatccgtcatcagtcctaagcattctgggattgacattgaaaaatatcggccgcattttctacgcttccttgttcagttacaccagaagacactcaatctgtatagtcagcatcagcagaaaaagaatgttttcctgtcgccacgtgagcgccaaatccttaaatgggtcagcgccggaaaaacgtacgcagaaatttctgttatattgtctattgctgagcgcaccgttaaattccatatgggcaacatcatgaaaaagctcggtgtgaataatgcaagacacgcaataaaacttggaacggaactccggttactggaggactga

SEQ ID NO: 163842 - DNA, 585 bp, Enterobacter cloacae
gtgcaatcaaaacgtgcagatgtgcgcatcattaacagtgaaaccctgtcagataactggtacatccttaaaaaatacaccttcgacctgcagcgccgtgatggcgaatggcagcggcaacagcgggaagtctatgaccgtggcaacggcgcgacgattcttctctacaaccgtgagaaaaagacggtcatcctgacgcgccagttccgcttccctgtttttattaacggccatgaggacgatttaattgaagcggcggcgggattgctggacaacatggatcctgaaagccgcatcaaagcagaagcggaagaagagaccggattccacgttacgcgcgtagagaaaatcttagaagcctatatgagcccgggctctgtcacggaaaaactctatttttatcttgccgagtatcagccgaaagacagaaccggcgccggcggcgggatcaaggctgagggagaagatatcgacgtgctggaaatgacgcttgaagaggcattacgccgcattgaaaccggcaggattgtcgacggtaaaaccatcatgctgctttatcatattgccctgaaaggcattctgtaa

SEQ ID NO: 163843 - DNA, 774 bp, Enterobacter cloacae
atgctcactcgtcagcgaaaacaattgatccttgaaaagctgggtgccgaaggtcaggtccagtcaaaagcgctcagcattcttttcgacgtctctgaagacactatccggcgcgatctccgcgagctggcggcagaagggcgtttgcagcgtgttcacggcggcgcactaccgtcatcttccgcaattgctccgtttgccgaacggcaatccgtgaagatggatgcaaaaaaaagggtggcccggaaaggggcccagctgatttcatcaggccaggtggtaattatcgacggtggcacgacaacctcggagctaattacctttttcccgcctgacttgcgcatcaccgtggtgacgcacagcccgagtattgctctggggcttgttgatcatcctgccattgaggtgattttgatcggcggacggttgtataaacactcgattgttgcggtcggcgcggcggccatcgaaggcatagagaatattcatgcagatctgttctttatgggcgtgaccggtattcatccggatgcggggctgacaaccggtgatttcgaagaggcatgcatcaaacgtgcattctccggcagagccgcggaaacggtcgttctggcgtctccggaaaagatcaacaccgcgtcgtcgtttgtgattggcgatgtatcatcagtgaataccatcatcgttgaagacggtacagataaggagtggatccgcgcggtatcggaaaaggggggatccgtcgtgctgacctcagatcgtgacagcctctga

SEQ ID NO: 163844 - DNA, 372 bp, Enterobacter cloacae
atgtttgatcatgtgaaatttggcgtcagcgattatgaaaaaagtaaaaccttcttcctcgaggcgcttcgtccgcttggtgttgaactcgtcgatgaaggcgcgccggattatggtgttgagatgagctctggcgacgtttcgctttgccttttccagacaaatgacaaaccggcgcctctgcatctggcgtttgtggccaagacccgtcagcaggtagatgatttttaccatgccgcgctgggcgctggcggacgtgataacggtgagccggggctacgttcctatggtgaaaattactatgccgctttcgtcatctcgcctgatggtcataacatcgaagccgtatgccatgcgccggaaagtcggtag

SEQ ID NO: 163845 - DNA, 444 bp, Enterobacter cloacae
atggaaattgaattagataaaagctttagagaaaggattttccacgcggtcatttttgaagtcacggccaacattatcatcgcgctgtcgcttgcgtggctgatgaacgtgtcggtactccagtctggttcgctgtccgtgatatccgcgcttaccgccacggcctggaattttgtttttaacaaattctttgacgctcttcagaaaaaataccagtttgaaagaacgttcctcgtccgcgcgctccatgcggcctgtttcgaagccggacttatcatcacgttaattcctgtggccatggtgatgctgcatttaacgatgacggaggcattttttgttgagattggtttggtactgtttttcctgccgtacacgatgctgtttaactgggtttacgattacctgcgctggacatttgttggacggaaacggtctgctatgtaa

SEQ ID NO: 163846 - DNA, 1038 bp, Enterobacter cloacae
atgaagtatgtgaatctgggtcgtagcggtttgcaagtctcccgtctttgtctcggttgtatgagctatggtgaacctgaacgtttgcctcaaccctggtccctggatgaaaaggcgtcacgtccgctcattcgacaggcgcttgaagcaggcattaatttttttgataccgcgaatatctactcgggcggaagttctgaagagatcacaggaaaagcgctgagagaaatggccagacgcgatgagatcgttgtggcgacaaagaccttctttccgtggcgcaactcacccaataccgggtttctttcccgcaaggccatttttcagtctattgacgatagcctgatgcgcttaggtatggattatgtggatctctttcagattcaccgctttgaccactctacgcctgttgaagagaccatggaggctctgcatgacctcgttaaatcaggaaaagtacgttacatcggcgcatcatctatggaagcctggcgctttgcaaaaatgcagcatactgcagagcgtaacggctggactcgatttatcacgatgcaaccgcaatacaacctgctttaccgggaagaagagcgcgagatgctgcccctgtgtgaagaccagggcgttggagtgatcccctggagtccgatggcgcgcggcaggcttacgcgcgactggagtgtcacgtcccgacgaacgcaaaacgatgcctttgcattaaaaatgtacgagaacgcagcccttctggataagcccgttattgatgttgttgccagcattgctgaaaagcaccatgtgccaagagcccatgttgcacttgcctggttgctatcaaaaacggtcatcacagccccgatcattggcgcgaccaaaccagaacatctttccacggctatcagcgcactggactttacacttagcgatgctgaaatcacggaactcgaggcactctatctgccgcaccccgtcgacgggatcattcccccgcttcctgatacgcccccttcactcacgccgccttcagcaatacagaaccgttaa

SEQ ID NO: 163847 - DNA, 264 bp, Enterobacter cloacae
atgagcaagatgatgcatgaccagcattctgcttccgtacccgcttcccgggatcgtcgcaattttctgatcgccggagccggtctggcgttggccgcaaccccgggtacgacgcaatatccgcacctaatagaaaacagcggtgcaccgcaagtccggttgacggacagcgagctacgcgaaatcgatgcggcgctggccaaaatcccattgcagggcggtcgcgccgatccgtttaccgaaagtcagtttgataaaagttaa

SEQ ID NO: 163848 - DNA, 987 bp, Enterobacter cloacae
atgaactatacgcatcttggccgcaccggcctgaaagtcagccgcctttgtctcggaaccatgaattttggtgacgtcaccgacgagaaaaccagcgcccgcattctggatgaagcgcttgaggcgggtataaatttcattgatacagcagacgtgtatggcactgagcaatcacccgatatccagcaaggttcggggctgtccgaggaaattattggtcgctggctccagcagggtggccgccgtgaccgtattgttttggcgacgaaagtctatcagcctatggggccaggtccgaacgatcgccgtctttctgcttatcatattcgcaaggcctgcgaggacagtttgcgacggcttaagacggaccatattgacgtctatctgatgcatcacatcgatcgctattcgccatgggaagaggtctggcaggccatggaactccttgttcagcagggaaaagcgctttatatcggtagcagcaatttcgcgggctgggacattgcgactgcgcagtcagttgccacggctcgtcattctctgggcctggttgctgagcaaagtctctacaatctgactgcccggactgttgagctggaggtcattcccgcatgccgtcattttggcctgggactgattccctggagtccacttgccggagggttgcttggcggcgtactgaaaaagatggaaagcgggcgccgtgcaaggcccgcgttttcccgtctaatcgaacagtatcgtccacagctggaagcctacgaaggattatgtgaggacctcggcgaaaccccttccgatgtggcgcttgcctggctcctgcagaatcctgtcgttactgctccacttatcgggcctcgtacggtcgaacaactccagcaggcgctgcacgcaacgacaatcacgctatcagacgacaccatgagctgtctcgacgaactctggcccggacccgggggagaagcgccacaggcttatgcctggtaa

SEQ ID NO: 163849 - DNA, 909 bp, Enterobacter cloacae
atgcaaataagcagagctgatgtcgccgatctcatttatttcatggctattgcacgtcatcgcagtttcagccgtgcggcgattgaattaggtgtcagtgcatcagcgcttagtcatgccctgaagggactggaaacccggctcggggttcgcctccttaatcgcacgaccaagagcgttacacctacggctgcaggtgaagaactggttcagtctgtccttcagcctttcgacacgatagaaggcgcgcttgaatcgcttaaccggtatcgtaatacccctaccggacgtatccgcatcaatgctgccgttgaagcagccaatcttttgcttgcgccggttatgcccgcgtttatggatcgctatcccgatattgaaatcgatattgtggccagcaaccgtatggttgacgtcactgatgcgggcttcgatgccggtatccgctatggtggcaccgtcccggaagacatggttgcccggcgtttatctgccgatattcgctgggttatcgcagcatcccccgactaccttgaacgctacggaacgcctgaacatcctgatgatttattacaccatcgctgtataagcaatcgtctcggcgacgatcggatttatcgctgggaacttgagcgagatggcgaaacgtaccaaatcactgtgccaggctctgtgacggtcaatcaggctgaaacgggccttgtggccgtcttaggtggagccggcctgatgtattttccggagcctcttgttgcaccctatgtgaaggatagacggctccgcctggtgcttacggaatggtctccgctggaggaaggttttcatatctattattcaagccgccggcaactgccgatcgggcttcgccttctgattgagttcatacaggaggccaggccactggggttgtga

SEQ ID NO: 163850 - DNA, 900 bp, Enterobacter cloacae
atgaataacgccctgtataaccagatacggatctttcagagcattgcacgtgagggcaatatttcggcagccgcaagaaaactggaaattacgcctccctccgtcagcaatgcgcttaagctgctggaagatcatattggccatccgctttttgtgcgtacgacccgccgtattgagctgacggaaaccgggcagctgttgctggaacagaccgccgcggcggtggagtcgctggaaaattcgcttgaaagcattcgcgaccagaatcaggagccctctggtatcgtgcgtatcacgctctcgcgttttgcctatctgttaattcttaagcctgcaatggcgaaattctgtcagcaatacccgggtatacagctggaaatatcggtttacgacggtaccgtgaatatcatcgaagagcgttttgatcttgggatccgttttggcgatatcctcgagggtggggtggtggcgcggccgttaatgaaaccctttcgtgaagggttatatgcatcctcagcttatattcgcgagtatggaatgcccgaggtgccggctgacctcagtcaacacaagctgattggctaccgttttatcactaacaaccgcatccttccgttgatcctgaacgaccgcggagagcagttgacggttgagatgcccgggcagttaatcagtaacgatatcgacgttatggctgacgggatccgtaacgggctgggaattggacgcttgtttgaacccatctggcagttacagcccgacagagagcactttatccccgtgatggagagtttctggaaaacctacccgccagtctatctctattaccccaaaaacgcgggtaaaacgaaaagagtgaaggccctgattgattttctgacatccgctacggaacgataa

SEQ ID NO: 163851 - DNA, 309 bp, Enterobacter cloacae
atgcgaattttatgtctggatatccccgcacctggagcatcgctggaaaaatatgctccgcaccttaacgctgaagcgctgcacgcctggggattgtataaatccggcttcatccgcgacatctacttccgtcaggacaggcctggtgtcgctatttttcttgaaagtgactctgtcgatgaagcgatgaacgtaatggccgaattcccgctggcaaaagcaggcttattaagctttgagtgcattccgcttggctcctttattaactgggaaaatctctttgccgctgaatttaaaaatatagagtga

SEQ ID NO: 163852 - DNA, 690 bp, Enterobacter cloacae
atgaaacctgcagataaacccgtgctgtgtgtcgtttccagccatccgattaaaggcgcatccggtgtaccaaccggttttttcctggccgagctgacgcatccgctgaaagtactggaagatgccggactaaaaacgacgatagccagcattcgcgggggacagccgccggtggatggatttgacctcagcgatcctgtcaacgcctggtactggaacgaaaccgattttcagcagcgcctggcaacaacaccagcgttatccgagctgaacggtaccgattacagcgccgttttctttgcgggcggccatggaaccatgtgggatttccgtgatagccaggatgcccagcgtattatccgcgaaatatatgaaagtgatgggattgtctcagccgtctgccacggacctgcggcactggttgacgcaaagctcagtagcggcgaatacctggtgaaaggcaaaaacgtggcggcctttaccaacaaggaagaggaagaagttcacaccacagatgtggttccctacctgcttgagactgcactccgcgagcatggcgcgcttcatcatgaagccccgaactggtctgaaaacgtggttaccgacggacgccttatcacggggcagaatcccgcttcagcgcacggtgtcggtgtggcgctgttaaatgccctccgccagccaacttaa

SEQ ID NO: 163853 - DNA, 948 bp, Enterobacter cloacae
atgaaaactcttcctccagtcgcgctcggcacatggtcctggggcacaggcttcgccggtggcgacaccgtcttcggcaatcatctttctgatactcagatagcagacgtgttcaccacggccatgagtaagggtctcaacctctgggataccgcagcagtatatggcatggggagttccgaggcagcgctgggaacattagtccgtcagttcccccgcgagaatatgattttatccaccaaattcacgccgcagattgcgaacgagcagtctgcacagcctgtcagcgatatgcttgagttcagcctcggacgcctgggcgtggacgcgattgatatctactggatccataatcccctcgacgtcgaaaaatggacgccaggactgatcccacttttacaaagcggtaaggtaaaacgcgtaggtgtttccaaccacaatctggcacaaatcagacgcgccaatgaaatccttaacgcttccggttattccctcagtgcagtacaaaatcactacagcctgctctatcgcgcttctgaagaggccgggatccttgattattgccgaaaaaataacatcacgttctttgcttacatggtcctggagcaaggcgcgctcagtggtcgttatgattcaaatcatcccatgcctgccgggagtggccgggccgaaagttataacgcagtactgccgcagatagaaagactaaccgccgccatgaaaaaaatgggagccgaaaggaatgccagcgtggcacagatagccatcgcatgggctattgcgaaaggtacccttcccctcgttggtgcgactaaagtccatcacgttctggacgccgcctgcgcttcagacatccagttacgcgatgaggaaatcatcctgctggaacaactcgccgcagagaccagagtggatacacgaggcgcctgggaaaaaccgatggtgtaa

SEQ ID NO: 163854 - DNA, 1035 bp, Enterobacter cloacae
atgaaaatcatttgcctcgaagaacattatctcgacagcgagttagggcgagcgtgtattcctgttgcgcttgagcaggcacctttccttggcgactgggggaaaaccgtcgctgatggtcataatcctgaccgaagccggccgcagatagaaaagaatgcgctgataaacgcgaaaggcgctgatttgggaagccgccgcctcagggatatggatgaggcgggaattaccctgcagatactctctgtgggcggattcccccagctggcacccgaggatgaagcggtaacattaaatacggcggcaaacgatcgccttgccgaggcggtaagaaatcacccagatcgcttcgcggcatttgccacacttccctgggcacagccgaaagatgctgaaaatgagcttgtccgcgcagttgaaaaactaggatttaaaggagcactgctgaatggcagaccctcttcatgctttctcgatcatcctgactatgactccctgctttcccgctttaataaactgaatgtgccactctatcttcatcccggattaccgcttaaaagcgtacagcaggcctacttcacgggcttcagcgcagaggtcaacgccaggctttctatgtttggctggggctggcatcacgaagcggggatccatttgttgcggctgatgttatcgggcgcatttgataaatatcccaacctgcaggtaatcagtggccactggggggagatgctgcccttctggctccagcgtcttgatgacagcctaccactggctgcaacgggtctgtcacgcacgctaacgagaaccttccaggagcacgtttacgttaccccgtcaggtatgctgacgctgccgcacttccagtttatctacgcgttaatgggggcagaaaggatcctgttctccgctgattatccctatcagaccctggacggtgtaaaaacatttatcgactgtctgccggtcaataaggctgaaaaagaggccatcgcgtttcgcaatgcagaacgtttactgggcatcacagcgtag

SEQ ID NO: 163855 - DNA, 573 bp, Enterobacter cloacae
atgaaaaatatccttgttatttcaggtcatcctgagctgaaccattctgtcgccaacgccactatccttgacgaagtggcgaccgcctttcccgaggctgaaattcgtcgtctggactggctctatccggacggaaaattcaatatcgctgcggagcaggaaagcctgctcagggccgatgtgattgtctggcagtttcctttttcatggtatgggctgcccgggttaatgaaacaatggctggacgaggtctttgtccacggcttcgcgcatggctcaacggcgaaactgggcggtaaaaagctgatcctctccttcactacaggggcgccgcaggtgctctataccgctgacggtttctttggccatgccatagaagagtatcttattccattcgagaccacggcaaggctgtgcaatcttgagctgctggcgccggtttatacctgcggtatcagctatgccgaccgggatgccgacaaaatcgcgcagcaaaaaacgcttgcccgggaacacgcttcaaggcttgtcgagctgctcaattccgtcgtgaataatccagagggagaataa

SEQ ID NO: 163856 - DNA, 1020 bp, Enterobacter cloacae
atgcagtatacccggctcggtaaaagtgacttactggtctcccgcatctgtatgggatgtatgggatttggcgacccgttaacgggccagcatcgctggacgctggacgaaacagcaagccgggacatcatccgctacggtctcgaaaagggtatcaatttttacgataccgccatcgcctatcagaacggctccagcgagcgatacgttggccgggcgctgcgggagatggcaaaacgcgaggacgtggtgctggccaccaagtttctgccgcgaaccgccgcgcaaattgccgcggggatcggcggaaaagaggcaatagcccgatcgctcgatcagagcctgcagaatctggggatggactacatcgacctctacatttaccacatctgggattacaacacgccagttatcgaggtgcttgaagcgctgcatgccgccgttactgcgggcaaagtgcgcgctattggtatttccaattgctatgcctggcagcttgcgaaagcgaacgcccttgccgaacgcgaagggctgacgccctttgtttccgtgcaaagccactacaacctgattatgcgtgaagatgaacgagagctcttcggtctgtgcgctgaggatgatatcgccatgaccccctatagcgcgcttgccagcggccgtctcgcccggaaagaaggccacacgcggcgagccaccgaggatgcctatgcccgcggaaaatatgacagcacggctgaacaggatcggatcattatcgagcgcgtcgccgagcttgctgaacgacagagggtgtccatgacggaaatctcactcgcctggctgctgacaaaagtcacgtcacctgtcgtaggggccacaaaaaaagatcacgtcgatggcgcggtaaacgccgtaaatcttcaactgagcccggaggaaatccggtttctggaagaaacctaccagccgcatgttctgacggggatcatggggcaaaacacgccgcaaacgaaagacgccaggcaggtctggacgcggtag

SEQ ID NO: 163857 - DNA, 378 bp, Enterobacter cloacae
atgatttttaaaacagtggtagccactcttttcaccctctcagggctcgcgtcagccctggcagcaacgcctgcttattacatcgcagagtttcaggcgaccgatcttgacgctatcaaaccgtacagcgctcaggttgaatccaccttcagaccttttggtggacggttcatcgtcagaggaggtgaacccgatgttaaagaagggtttggagcacagggcagactggttgtaatcaagtttgagagtctcaaaaatgcccaggactggtatagctcggccgcgtaccagaagatcattcctatccgacaccgtgccggcaattcgcgaacctatatcgtagaaggattgccagaactggctcctgttacaccataa

SEQ ID NO: 163858 - DNA, 606 bp, Enterobacter cloacae
atggtgttacttcagcgcagagcagcagcattgtttttgtttgcctttatcttcctcatgcccattagtcatgctcatagccgtgaaaagaccgacattaaaacgctcgttatcgtctctcacccttatccggaacgctcagttctgacaaaagggctgcaggaagccgctgagagtctggaaggcgtgacggttcgcaaccttgagacgctgtatggctatgacacacgacggattaatggcgacgcggagcgaaaaatgatgcgtgaacacagtcgtgtcgtttttatcttcccgacacactggttcaatattacgccgatgatgaaggcctggttgaatgaaacctgggggagtgtcggacccggtttgtggcagggaaaggagatgcttgtagtcagtacggctgcggggggacgctctacttacgggccggacggcaggatcggggtatcgctcgcggatgtgtttttaccgatgaaggcaagcgccctgcacgcaggtatgacgtggcttcctccccttgtctttgagagcgccagcagcgatcggttaccttcttaccaacaccaacttatagaacgtcttaaacagccatttcagtaa

SEQ ID NO: 163859 - DNA, 726 bp, Enterobacter cloacae
gtgaaaaagactcttatgcttttaatttgcatgctgataagcagccctgtctttgcaacaaaactggacgcgctggataaggtagtgatgaatatctttgagcttggcgtcaggcacgatcgggacaaagattttgcagacgtagccagacagacgatttccgcttcggttgatcatgaagcaggtacgctggcgatgtacgccctgcaccgcagcgacaatccacataaggcattcatggtcgaactctatgaaaacgagagtgcttaccgcaaacatctaaatgctgaaccatacaaggcattcgctgcccgggcacctgacattatcgattggaaaaataaaatcactctggagccccaatttctgggggacaaacacatcataccgaatgagcgaaccattaataatctggtgatcgtcgaggtaaagcctgaatttcagaccgaatttaaaaacatcgtcatgcctgaaatggctgagtcactcaaagtagagaaaggcgtgttagccatgtattccgctacagactcacagactccgaaccgctggtatttctatgagatttacgccagtgaggaagcgtatcaactgcaccgacaaacgccacacttccgtgactatctcaggcaaacggcgcatatgagcaccagtaaggacgctatcccggtaaaaccggtatttcttcgtaacaaaggcggaatcaaacaggatccgcaccgttga

SEQ ID NO: 163860 - DNA, 723 bp, Enterobacter cloacae
atgatgaaaattgaaccttcagcgatttctgaagctgatattcgttctgtctcaccggctcttgcgcgctttggtcgagaagctattgctgaagatctgtggacacgcgatgccctctcgcccagggatcgtagtatggtgaccgtctccatgctaattgccagaaaccagcctggcgaccttaagcactatatagacattgcccttgataatggcgttacgccagcggaattgtcagaaatcattacccatctggcgttctactcaggttggccaaatgccatgtcagccgtcagcgtgaccaaagcagtatttgaaactcgtggcgtcacggcagatgcacttcctgaagcttctccggacctgcttcctctcaatcaggaagcagaaaagcagcgttcagagacagtggagaaaaatgttggcccaatatctccgggcctggttaaattcactgcagatccactgttcctggatctctggcaaagacctgcgctgaaaccccgcgacagaagtatgattacggtcagcgcgttaatcgcatccggacagagcgcgcagattggctatcacctcaatagagcaatggataatggactttctgttgaggaagctggtgagatcgttacccaggccgcgttctacgctggctggccaaacgcatttactgctgctcccgttgtcggagaggtgctaaacaatcgatcatcgagtaaaaggtaa

SEQ ID NO: 163861 - DNA, 411 bp, Enterobacter cloacae
atgtttctgtgtggttcatcgtttgcgaatgatgaatattttgtgtgcgacactgcaaaaggaacaatcaaactagaagaaaacgacggtgtacttcggtacaccttattgaaagaccacaaaaatgaatttaactatgagtcgaaaggcaatgaacatttagaatttaaatacaatcattattcacgatttcaaactgattacttcaatgtgtcgtttgtaaatgcagggtataaatacacgatatttagtaattatgagaatgagaatgaaagtcgtggggttagtgttacgaacctgaatagcaagaaggaatctgtttacgattgtaagtccgttggcattgatcgcctcagtgatttgtcggcaaaattgacctgtgataaggactcagttcttggttgtgagtag

SEQ ID NO: 163862 - DNA, 2160 bp, Enterobacter cloacae
atgaatatatgttacccggtacggaaggccgacggacgggagtataagaactatgacgaattgctgaccgacattcgaaaaaatgcccacggttggtggttacttggcacaaatcgttactggcatgggggaattcatgtcgggatgtcatcgtccccggccacggtgctggatcctgattcaccagaaaaatctgttccgcttcagttcatgatggacggtgaggtggtggcatggcgggttaaccgcgattacgcggttatcgagtgttgccaggaacgccccctgcgccagtccggcacctttgtgctggttaaatcagtgtacaagcctgacgagcaggatgaatcctcctggctgacgctgtaccagctttacatgcacatcgcgccattgtcagaatttccgaaacgctcgctttaccgggtcacgcagacaggccacggcgtgcggatgcgtaaacattcccgctacgatgacagccgcgaaatcgcgccggacgttctggaaaacaaacacggccacgccagaacgctcgtacagggtgacacgcttgccgtactgcaacagaaatcgtttttactggaacaacgtccggagccgtttgctctggtgcagcgtcttcaggacggtaaacccgccggagaacttttctgggtctcgatgcgcccggaatttctggagcctgacggcgaatgttacgtgtgtctgcccgactggatgcacagtgcgctgaatcacggcgtgttagatgatgtggtggtgccgcctgtgccgctgaaagtgatggtgaaagcaggggatgcggtcggattcctcggcgttcaggatctggctgacgaagataactatccgcagattactacaacggactataaagcccatatcgagttgctgagcctcgatgagcatgtcccggatgtggtggcaaacgtaaaggggattaaaacgggtaaacagttcattaagctgaagctaaaacgcccactgtaccttagatgcggggagggcgaggaaagtacctttgagcagatgagcgccattactcgtgccgatgccggaaaaattatccctcgtgatgccacgtacccgtttacggataaaaccggaatcacatactttcagatccgcccgcatacgtggatacacgaggacgatgtggaacagctaagccagcataatttagcagggctaaactttcactgtattgaggctgaacacacaaccgattttacccgcacgctggatgaacgatggctgattgacgccctgaaaagcatcagttcgtactttgacggtgaaaaaggacctcagttcgcgcaggcaaaaatgttttatgacagcctgatccacaacgctgaaaccagaagatcgcctagcccgtatcccgataaatcacatgaccagtatttgtttcgtgcactgcataccaaccaaatgaatatccctgaatatgcgcggcgactgatagtgaaacacgacagcgactggcacagtacgcgcgatgatacacgctggtcatcggtatttaaggtcagggatgaaagtcctgttgtgaagatggccaacgggggatttctggatgcaacgcgctggatggataaggttccgccgttcgccagtcagcgctcagtatggcattttcatccgcttgagtttctggaaatattacgaagtgcagagtttcccaagactcctgttaatggggaattaacgcctatggaatttattaatttctataatgaagacagaattgatgatactgattatgaagaggctgcaaaagagttgggatgcgaagttgcagcaattaaagctgtagcaaaaacagaaacaggttcttatggctcttattttaagtttgaagataacgatgattatgttcctgcgatattatttgaaagacatcactttcataaatatacaaatgggaaatatgatcatttcgaagatatatcaaactctgttgcgggtggatatggcgcaacatcagtacagtatacaaaactagtcaaagcgtataccttagacaaaaaagctgctttgaaatcagcatcctggggtaagtttcagattttggcgtcgaacttcgccacggcaggctacgccagccctgaggatttcgtttcggcattaagtaagtctgaaaaaatcaattaa

SEQ ID NO: 163863 - DNA, 432 bp, Enterobacter cloacae
atgctttataatgatgattttgattatgtacatcccctaaacccaggattgggctatggcgtactcgccgtactcggtcagccagccgaacgcgtattcgtgtgggttgtgctgatcgccctgctgttcgcaggcatcaacggcgtgacgatatttatgattggcaaaggcagcatgcgcgccgtgcgttttcatcttacgctggcggcgataagcctggtcttaacggcagcctttttgctggccgcgctgagcgggaatgctttgccggttgtcagtctgactgcggccctggtgagtatcgtcatgttattgcttagcggcagctgtatcctctccacatccttttataagatgctgctgtttactctgcataatcgtgcatggcgcaagctgagcgggcaaactcgcgatgcacacacaccgcactaa

SEQ ID NO: 163864 - DNA, 1230 bp, Enterobacter cloacae
atgggtattagtcagcctaccgtttcacgatcgattaaagcgcttggcgatgaggtggttcgcattggctccggtccatctattcactatgtgctgcgggatacacatcgaggattcagttcggctcctgtctaccgcatcacggaagagggtcaggtaaaatcgctgggtaaactcattccggtttatccagatggttttgtagtggcgcaaacggacaatgtgtgcctccatagcgatgggttgccgtggtggttgtttgacatgcggcctcagggataccttggccgcgcgtacgcctcgcgattttcatccgagatgggcctgccgccgaatccagagaactggagtgatactgacgttatcagggctttgctcgctcatggacacgatgcggtggggaacctgttaatcggagaacaggcgaggaatcattttgtagagatgccgtcgcctgttgcggtggaccgcgcaaccgcctacccgtcgctggcgcaggccgtgagcgcgggcgaagtaccgggctcctctgctgggggtgagcagccgaagttctgtacttatacagaacgtggccacgtcattgtgaaattcacggcaccggacgataaccctgtaagcgaacgctggcgagaccttttgctagcagaacatcttgcgttaagcgtgcttggcgtcgaaaccgaggtgtttgattttggcggacagcgcttccttgagatcccgcggttcgaccgtacgggaccccttggtcgtaagggactcttttctttacgtgcgctcgaggcggagtttgtcggcagggcaagagaatcctggccggtactggtgaatgagctggcaaagcagggctgtgttcaccaggatgcggtcgccagcacgtcaaggctttgggcgtttggtatgctgatcggcaataccgacatgcaccacggtaatctgtcgtttatcagttcccatggacggccttacgatcttgctcctgcctatgacatgctgcccatgggatttgccccgaaatcaggaggcgcactggtgaatacgctgcgtccggctacgcttattgacgcgatcgcgggagaaacctggcatgaagcactggcgctggccgagcgcttttatacgctggccagcagttgcggccgcttttcttccaattttgcgccatgtcttgccgcattgcgcagccatctggacgaggcgagagtgaaggtgtcgcgtcttggataa

SEQ ID NO: 163865 - DNA, 3177 bp, Enterobacter cloacae
atgattgaatggattatccggcgttcggtcgccaaccgtttcctggtgatgatgggcgcgctgtttctcagcgtctgggggacatggaccatcatcaacaccccggtcgatgccttgcccgatctgtctgacgttcaggtgattatcaaaacaagctatcccggccaggccccgcagattgttgaaaaccaggtgacctatccactcaccaccaccatgctgtctgttcctggcgcgaagaccgtgcgcggtttttcacagtttggtgattcgtatgtgtacgttatttttgaagacgggaccgatctgtactgggcccgctcgcgcgtgctggagtacctgaatcaggttcagggcaaactccccgccggggtgagttccgaaatcggcccggacgccacgggcgtaggctggatatttgaatatgcgctggtggaccgcagcggaaaacacgatctcgccgagctgcgatcattgcaggactggttcctgaaatttgagctgaaaacaatcccgaacgtggccgaggtggcctccgtcggcggcgtggtgaagcagtatcagattcaggttgacccgttaaagctggcgcagttcggcgtcagcctgccggaagttaagcaggcccttgaatcgtctaatcaggaagcgggcggatcgtccgtagaaatcgcggaagcggaatatatggtgcgggccagcggctatctgcagaccatcgatgatttcaatcacatcgtcctgaaaaccggtgagaacggtgtgccgatttacctgcgtgatgttgcccgcgtacaaacggggccggaaatgcgccgtggtattgccgagctgaacgggcagggtgaagtggcgggcggcgtggtgatcctgcgttcgggtaaaaacgcgcgcgaggtcattacggcggtaaaagacaagctgcagacgctgaaggccagcctgccggaaggcgttgagattgtgaccacctacgatcgcagccagctcatcgaccgggcaattgataacctgagcagcaaacttctcgaagagtttttcgtggtggccatcgtctgcgcgctgttcctctggcacattcgctcggcgctggtggcgattatctctctgccgcttggcctgtgtattgcctttatcgtcatgcatttccaggggctgaacgccaatattatgtcgctgggaggcattgccatcgccgtcggcgcgatggtggatgccgccatcgtgatgattgagaacgcgcataagcggctggaagagtgggatcaccagcacccgggagagcagattgataacgccacccgctggaaggtgattaccaacgcctctgtagaggttggaccggcgctgtttatcagcttgctgatcatcactttatccttcattcccatctttacccttgaggggcaggaagggcggctgtttggtccgctggccttcaccaaaacgtacgccatggcaggggcggccgcgctggccatcatcgtaatccccattctgatgggattctggatccggggtaaaatccccgccgagacccgtaacccgctgaacaagctgctgattaacgcctatcatccgctgctgattcgggtgctcaactggcccaaaacaaccctgctggttgcggccttatccatcttgacggtgatctggcccctgagccaggtaggcggcgagttcctgccgaagattaatgagggcgatctgctgtatatgccttcaacgttgcccggcgtctcaccggcagaagcggcggcattgttacagaccacggacaagttaataaaaaccgtccctgaagtggcctctgtcttcggcaagaccggtaaagccgaaacggcaacggattccgcgccgctcgaaatggtggaaaccaccattcagcttaagcctgaggatcggtggcgtcccgggatgacgattgacaagatcgttgaggagcttgataagaccgttcgtttgcccggtctggcgaatctctgggttccgcccattcgcaaccgcattgatatgctgtcgaccgggattaaaagcccgattggcatcaaggtgtctggtaccgttctggctgatatcgacgccacgtcgcaaagcattgaagcggtagccaaaacggtgccgggcgtggtgtctgccctggcagaacgtctggaaggcgggcgctacatcgatgtcgatatcaaccgggagaaagcctcccgctatggaatgacggtgggcgacgtgcagctgttcgtctcctcggccatcggcggtgcgacggtgggtgaaacggtggaaggcgtggcccgctatccgattaatattcgttatcctcaggactaccggaatagcccgagcgcgttgaagcagatgccgatcctgacgccaatgaaacagcagattacgctgggtgatgtggcggatatcaacgttgtttcaggccccacgatgctgaaaacggagaatgcccggcctgcgagctggatttatatcgatgcccgcggcagggatatggtgtcggtggtgaacgacattaagacggccatcggccagaacgtgaagctcaggccgggtaccagcgtgtcattctccgggcagtttgaactgcttgagcacgccaacaagaaactgaagctgatggtgccgatgacgctgatgatcattttcattctgctctatctggcgttccgtcgcgtggacgaagcgttgctgatcctgatgagcctgccgttcgcgctggtcggcgggatatggttcctgtactggcagggcttccatatgtccgtggcaaccggcaccgggtttatcgccctggccggggtggcagcagagtttggagtggtcatgctgatgtatttgcgtcatgccgttgaagcacatccggcgctgtcccagcgcgaaacgttcactgaacaggggcttgatgacgccctttatcagggcgccgtgctgcgcgtgcggccaaaggcgatgaccgtcgcggtgatcatcgcgggtctgctgcccattctctgggggaccggcgcagggtcagaagtcatgagccggatagcggcgcccatgatcggcgggatgattacggcaccgctgctatcgctgtttattattcctgcggcgtataagttaatttggttgcgcaggcataaaccagagacagccgttggtgaagatgacaggggagtcaatacctga

SEQ ID NO: 163866 - DNA, 1248 bp, Enterobacter cloacae
atggcctcattaaaaataaaatacgctgccgtgatagtcagcagccttattgcgggagggctgatatcggtgacggcctggcagacactttattcatctgaaaaaaaagcaaatagcgttgcggaaagaacggtgcttttctggtatgacccaatgaagcctgacgtgaaattcgacaagcccggtacatcaccgtttatggatatggatctggtgccgaaatatgccgatgagaatgataaaagcagtgacggtatccgtatcgatccgacccaggttcagaacctgggattaaaaacgcaaaaagtgacgcgcggaaagctgaattatgcccagacgatcccggccaacgtcagctataacgactatcagtttgtcattgtgcaggcgcgtgcggaagggttcgttgagaaagtgtacccgctgacgattggcgataaggtgaaaaaaggcacgccgctggttgatatcaccattccggactgggtcgaagcgcagagcgagttcctcctgctttccggcaccggcggaacgcccacgcagataaaaggcgttctggagcgtctgcgcctggcgggtatgccggatgacgatattcagcggctgcgtgcgacccgcgctatccagacccggtttaccatcaaggcgcccattgacggggtgatcactgcctttgacctgcgcaccggaatgaatatttcgaaagagaaggtggtggcgcagattcaggggatggatccggtctggatcggcgcggcggtccctgaatccattgcttatctgctgaaagatacctcgcagtttactgtttcggtaccggcttatccggataaattcttcccggttgaaaaatggcgtcttctgccgagcgtggatcaaaccacccgtacgctgcaggtgcgcctgcaggtctccaacaaggatgaactgctgaaaccgggcatgaatgcctacctgaagctgaatacccaaagtcaggaaatgttgctcattccgtctcaggccgttatcgataccgggaaagaacagcgcgttattaccgttgatgcgaacgggaagtttgtaccgaaaaggatccacgttctgcatgaatcacagcagcagtccggcattgataccggactggaggagggggagtcggtggtggtcagcggtctgtttctgattgactcggaggccaatattaccggcgcgctggagcgcatgcgccacgctgaagccgctgacgacgcgcattcaggccattaa

SEQ ID NO: 163867 - DNA, 339 bp, Enterobacter cloacae
atgcgcaattcacttaacgccgtcgtatttggtgcaatcattatgttttctgccggtcttcaggctgaggttcatcagcacgcggagatgagcgccgccagcgaaggtgcctcagagcaggttatcaccgggaccggcattgtgaaggatattgatctcacgaataaaaaagtgacgatttctcacgaagccatcccggaaattggctggcccgcgatgaccatgcgttttacttttatgcaggtcgacgagagtattactgccttaaaagtcggcagccacgtgaatttctcgtttgttcagcagggcaatctctctttactcaagagcattaaatag

SEQ ID NO: 163868 - DNA, 684 bp, Enterobacter cloacae
atgaaaatactgatcgttgaagacgaaatgaaaaccggggaatacctcagcaaggggctgacggaagcggggtttgtcgtggaccatgcggataatggcctgaccgggtaccacctcgccatgactgcggaatatgacctgctgattctggatatcatgctgcccgacgtgaacggctgggatattgtccgcatgcttcgctctgccggtaaagggatgcccatactgcttctgacggctctcggtacgattgaacatcgggttaaagggcttgagctgggcgcggatgattatctgattaagcctttcgcctttgcggagctgctcgcccgggtcaggacgctgctaagacgcggaaatacggtgatcgcggaaagccagcttcaggcggctgacctgacggttgaccttgtgtcgaggaaggtcagccgggcgggcaatcgcatcctgttaaccagcaaggagttcagcctgctggaatttttcatgcgtcatcagggcgaggtgctgccccgctccctgattgcctcccaggtgtgggacatgaactttgacagcgacacgaacgcaatagatgtggcggtaaagcgcctgcgcgcaaagatcgataacgattttgaacccaagctgatccagacggtacgcggcgtgggctatatgctggaggtgccggatgcccgttaa

SEQ ID NO: 163869 - DNA, 1455 bp, Enterobacter cloacae
atgcccgttaagcccctccgacgcccgttctcgcttgcgctgcggctgaccttttttatcagcctctccaccatactggccttcttcgcctttacctggtttatgctgcactccgttgagaagcactttgccgagcaggatatcagcgacttacagcagattagcagcgcaattcaccgcatcctccagtctccggccgatcccgaccaaaagaaaatcagcaagctcaaagagtcggtcgccagctaccgcaacgtggccgtcctgcttctggatccgcagggcaataccctgttcagctcggcgcaaggcgcggcattgcgcccggcgatgaacacagcgaactttagcgaacaccgtcaggcacaggatgtgtttctctggacggtagaagacccggtcaagcctatgcatgccgggtccgacatgaaaatggaaacgtaccggattatcgcctcttcaggcaggacaacgctgcagggcaaaacccaggactacgtcatgctgatcgggctctcgattaattttcatctccactaccttgaggcgctgaagaagaatctttttgccattgccgcggcgatcagcctgctgattgtgctggtgattcgtatcgcggtgcgccagggacacttgcccctgcgtaacgtcagcaccgccattaaaaatatcacttccgaaaatctggatgcgcgactggagccgtcccgcgtgcccgttgagctggaacagctggtgatctccttcaaccatatgattgggaaaattgaagatgtctttacccggcaggcgaatttttccgccgacatcgcgcatgaaatcaggacgcccatcaccaacctggtgacgcaaacggaaattgcgttgagtcagaaccgctcccagaaagagctggaagatgtcctctactccagcctggaagagtacaaccggatgacccgcatggtcagcgacatgctcttcctggcgcaggcggataataaccagctcatcccggatcgggtgatgtttgatttaagcgccgaggtgatgaaagtcttcgatttcttcgaagcctgggcggaagaacgccacgtctcgctgaaatttaacgggatgccctgcctgatagaaggcgatccgcagatgttcagaagagcaatcaataatctgctctccaacgccctgcgctatacgccggaagggaaagcggtaacggtctccatcagaaaacgggataacgacgttgagctggtaacagaaaaccccggcacgccgatcccgcaggcgcatctgccaaagctgtttgaccgtttttatcgcgtcgacccgtccaggcagcgtaagggcgaaggcagcgggattgggcttgccatcgtgaagtccatcgtcaccgcgcaccacggaaaagtccgcgtggaatcggatgcggtgtcgacgcgcttcatcctcacggtgccggggaaagtgctctga

SEQ ID NO: 163870 - DNA, 906 bp, Enterobacter cloacae
gtgtccgatcctgactttaaccttctggttgcgctcgacgttttgctggccgaagccagcgtggcgggcgcggcgcgacgtttaaacctgagcacctccgccatgagccgcaccctgagccggctgcgggaggtgaccggcgatcctattctggtgcgggccgggcgtcatatggtgctgacgccctgggccgaagccacccgggaccgcgccagatgcgccgtgcacgaggcgagggcggtgctgcagccctccaccgacacgctgaaggtggaaagcctcgaacggctgttcactattcgggccaacgacggttttgtcgtggcgtttggacctatgctcatagccgcggtggcgagcgttgcgcccggggtctgcatccgcttcgctcccaaacctgaaaaaacgtcgcgctatttacgggaggggcttgtcgacctggagatcggcgtgcagagcaacatggggcctgaaatacggctgcaaaggctctttcaggatcggtttgttggcgcggtgcgcaagggacatccgctgtcttcacagcctgaggtcagccttgacgattatgttgcctggggccatgtggtggcgtcgcctgatggggcgttacacgggtctgtggacgacgcgctggcggagcgggggatgaaacgaaagatcgccagcgtggtgcctggattcccgacggcgttatccgtagcgctggcctccgacctgattgctatggtaccggcgttgtacctgctcaatcaggcgatgaccgagcgcgtgcacgtctttgaactgccctttaagacccgcactattacggtatcccagatgtggcatccgcgcatggagcgggatccggcgcatcgctggctcagggaaaaggtccttgaagtgtgccgcgcggtttgctga

SEQ ID NO: 163871 - DNA, 1416 bp, Enterobacter cloacae
atgacgctatttacaaaccagcccggcgatgaaggtttacccgggcatgaacgcgcccgggtcctggccgccgtcatgaccaccacgctgatgggcgtctttgacggcaccatgatcaacatcgcgctcccctccatggctagagcgatgcaggtccccgcgaacgttgcggtctggttcgctaacggttatctgctgtcagcggcgatgacgctggctattttcgccgcgctggcggcccgcgtgggctatcgcccggtgtttctgagcgggcttgccacctttacgctcacctcgctcggctgcgcgctggcaacaacgccggaaatgttaaccgggatgcgaattctgcagggcatcggcggggcggcgaccctgagtatcgccccggcgatcctgcggtccgtttttcctggccgactgctgggccgtattctggggctgcacgccctgcttatcgcctccagcacggcgattgccccggtactcggtggaacaatactggacgccctgagctggcaatggctgttcgccattaatctcattccgggcagcatcgccctgttgctggcgtggcgagccttgccgcgggaatcggttgctgacagaccgccctttgatgcgccgggcgccgtgctctccgccgtcctgttaggttccgcgatcatgctggccgacagccttcagcacgtggcgcaacacattagtctgcaggccgtctgctggagcgttctcgcgctggttagcgccctcgcctttatctggcggattcggcgtgcgcaacatccgttactgccgccggtgatgttcagaaacgggcgcttcaccctcgccgcgctgacctcgctggcctcgtttgtcagccaggggatcacgtttgtcgcgctgccgttcctgtttcagagcgtatatggctacagccctgtagtgtccgcgctgctgttcaccccatggccgattggcatcgtgctgatcgcgccgcacgcgggtcgctgggcggatacgatctccgcgccgctcatctcgaccctcgggctgatggtttttgtcggcgggctgatcctgctggccacgttgccggagaatccttccgtgtggaatatctgcctgcgcagtctggtctgcgggatggggtttggctgcttccagagtcccaataatcgggaaatgctcgctaacgtcgcgcgggaacatgccagctatgcctccggcgtgttgtcgatcgtcagaacattcggccagtgtctcggcgccgccgtggtgggggttctgctgggagcggcggcaggatgggaccatcaacatgctatccaggttgcactgtggttagccgtcatcgcctcgacgggttcggtggtatttagcctgagcaggctgcgccctgcgcggtctacaggcaagcgttgcacaatgtag

SEQ ID NO: 163872 - DNA, 996 bp, Enterobacter cloacae
atggaattaacgcaacatcaggccgacgcgtttgcccgcatgcctttgacctatttgcgccaggaatacccgaaccacatcatgcacctgctgaatgatgatggtgacgtgctgccgccgcgcgagctgcatcccattttctacggctgttttgactggcactcggcggttcatggttactggctgctgctgcgctgcgtacgcctctatccagaattaccgtgtcgggacgcgatcgtcgcgctttttgacgagcacctgaccgaagagaacgtggcgagggagttggcctatttcaccgcgccgttccgcgcctcgtttgagcggccgtatggctacggctggctgctggcgctggcccaggagctgaaacagtcgtcgctgccgcaggccgcaggctggtaccagacgctggagccgctcacccaggatattcgcaaccggctggtggattacctcggcaagctcacctatccgatccgcgtcgggacgcactacaacaccgcgtttgccctcgcgctggcgctggattatggtcgcgcagtgggcgacaaggcgcttgagcaggcaattctggcggcggctgagcggttttatctcgccgacacgcgctatccggctcattatgagcccggcggagacgagtatatttccggcgcgctgacggaggcactgctgatgagcaaggtgtcggagggattcccggcctggtttgacgcgtttctgccggaagtgggcgccgttacggcactgatgaacccggcgaaagtgagcgatcgtaccgacccgaaaattgcccatctggacgggttaaaccttagccgcgcatggtgtatgaagcacatagcgaaagcgcttcctgccagccacccggcgcaaccggcattgcgcgaggcggtgacgaaacatctggccgccagcgtcgggcatgtggttggcagccactacagcggcgggcactggctggcgagctttgcgctgctggcgctggagtaa

SEQ ID NO: 163873 - DNA, 987 bp, Enterobacter cloacae
atgatgacgcttatcaccattaaccgcgtgtactacctgattggctttgtcgtaatgctgctggttgtcatgaccctgcgcgatcgcgccaacccgaagcgctttaccaccgcgctgttctggttcttgtttggcgggatcttcctgtttggcgatctgatggtgcaggaactggggaaatcactggcgtaccggatcattggcggcggcgttatcgttatcgcgctgctggcgggttttggtctcgtcgcgaaagggcactataaaatgtccaccgaggaggagcgcgtcgcgtcgtcaaaccggcttaaaaactggctgttcctgccggcgctgatgatcccggtggtgacggtgctgggcacgttattcctgaagggcgtttcggtcggcggcgtgtttctactcgatcagaaacagctcaccctggcggcgctgtgcgtggcctgcgtcgcggcgatcctcaccggctggtggctgaccaaaggcacgccgctccatgccgttcgtcagtcccgtcgtcttgtcgataccatcggctgggcggtgatcctgccgcagatgctggccatgcttggcggcgtgttcgtggtggccaacacgggtgactcggtgcagaaggtggtgagcctgtttgtgaacccggataaccgcttcatgctggtggtgatttattgcgtgggcatggcgctgtttaccatgattatgggtaacgcctttgcggccttcccggtgctgagtgcggggatcgccttgccgtttctgatcaacgtgcatcacggcaacccggcgccgctgctggcgattggcatgtacgcaggctactgcggcacgctgatgacgccgatggccgcgaacttcaatatcgttcccgccgcgctgctggagctgaaagacaaatatcaggtgatcaagatacagatcccgaccgcgttaaccctgctggtggtgaacgtgttcttaatgtacttcctcgtgtttcgctaa

SEQ ID NO: 163874 - DNA, 723 bp, Enterobacter cloacae
atggacggtactacgctgctgccgctgatcgggataccgatcgtggttattggttttgcactgcgcttcaacccgctgctggtggtcgtggtggcggggctggcgacgggtctgctggtcggcatggatttcgggatgctgctggagacctttggcgagaagttcgtcaatagccgatcgctggccaccttcatcctgatcctgcccgtgattggtctgctggaatattacgggcttaaggagcgcgcccaggcctgggtggcgaagatcgccagcgccacctcagcgcgtattctgatgctttactttgttgcgcgggaaggcaccgccgcgctgggactgatgtcgctgggcggccatgcccagacggtgcgcccgctgctggcaccgatggccgaaggggcggcgctgaacgaatacggcgaactgccgcagcacatccgcgacaaaatcaaagcccacgccgccgcgtgcgacaacatcgcggtcttctttggggaagatatctttattgccttcggggcggtgctgctgatcgacgcgttcctgaaagagaacggtattccgggcattgaaccgctgcatatcggcctgtgggccattcccaccgccattgcggcattgattattcatatgacgcgcctgctgcgcctcgatgcgagcatccgtcgcgacgtgatggcctggcgggcagagcagggtacgcaggaggccgcgcaatga

SEQ ID NO: 163875 - DNA, 546 bp, Enterobacter cloacae
atgacctcagaaaagagtgcttcacccgatcgcgacgatatcaacgagggccggatcgtctcttcccgccatctggtatccgagcgctgcgcggagttatcagagctggaatatgcgctgatcatgaccggcaacgcgtttaacaaatggatggtgcgctgcatgacggcagccggcgagcccgatatgggcgcctttgacgtttcgctgctgcatcacgttaaccaccgcgaccgcaagaaaaagctggccgatatctgcttcgtcctcaacgtggaagacacccacgtggtgacctatgcgctgaaaaagctggtcaaagcaggctacgtgacgagcgagaaagcggggaaagagctctttttctctacaacggaggaagggaaagcgctgtgcatgaaataccgggacgtgcgggaggcgtgtctgattgcgatccacgcggagagcggcattgccgggaagtcgattggcgagaccgcgcagctgttacgcacgatctcctccctgtatgacaccgccgcacgggcggcggcgtcactttaa

SEQ ID NO: 163876 - DNA, 2076 bp, Enterobacter cloacae
atggcaaaggatacaacgtttgaaattcgggccggtcatggccagcagttgggggcgaattatgacgggaagggcgttaacttcgcgctgttctccgcgcacgctgaacgagtggagctctgtctgtttgacccgtccgggaaaacggaaatcgcccggctggagctgccggagtatacccatgagatctggcacggctatgtgcctgacctgaagccgggcgcgctgtacggctatcgcgtctacggcccctacgacccggaaaatggtcatcgctttaacccgcataagctgctcatcgacccgtacgctcgcgaactggtgggtgacatcgactggaacgacgcccatttcggctatgcgctggggcatgacgagctggatttgagctttgatacccgcgacagcgcgccgtttacgccgaaatgcagggttatcgacccgaacgcctttgactggcaggacaacaaccggccgaacgtaccctggccgcataccgttgtctatgagagccacgtgaaaggctttacccagatgaacccggccattccacccgagctgcgcgggacgtttgaggggatggggcacaaagcctcggtcgactacatcaaaagcctgggcattacctcggtggagctgctgccggttcactggttcccggacgaccagcacctgctcgaccgcggcctgaagaacttctggggctataacacgctgggcttttttgctccggcgtcgcgctactacggcccggcggggatccagggctttcgcgatatggtgcgcgcctatcatgacgcgggcatcgaggtcattctggacgtggtatacaaccacacggcggaagggaacgagcttggcccgacgctctcgtttaaggggattgataactacagctattaccgcacgctgcccgaccagcaccggtactacatcaacgacaccgggacgggaaacacggtcaacacctcgcacccgcgcgtgttgcagatggtgatggattccctgcgctactgggcggaatcaatgcacatagacggttttcgtttcgacctcgggacgatcctgggccgcgagcccgaagggtttgacccgcgcggcggttttttcgacgccatgacccaggatccggtcttatcccgactgaagctgattggtgaaccctgggatattggccccggcggctatcaggtgggcggattcccgccgggctggggggagtggaacgacaaataccgcgacaccgttcgcgagtactggaagggggacaacgtctccacggactttgccgcgcggcttctcggctccggcgatctgtacgatttgcgtgggcgtcgcccgtgggccagcgtcaactttatcaccgcccacgacggctttacgctgaatgacctggtgtcgtacaacgagaagcacaacgccgacaacggcgaggacaataacgacgggcataacgataaccgctcgtacaactacggcgaggaagggccaaccgagaacccggatattattgctacccgcgaacggcagaagcgtaacttcctcaccacgctgctgttctcccacggcacgccgatgctgctggcgggggacgagtttggccgcacgcagaaggggaacaacaacggctactgccaggacagtgagatctcgtggatcgactggaaggggctctccgaaaacgacgccgcgctgcgcgagtttacccgtcgtctcattgcccttcgcgcgcaacagccgctgctgcgccgtgaaagctggcgtgacgggctggagatccgctggttcaatgccggaggcggtccgcagcaggccgagcagtgggatgaaggctcaacgctcggggtctccatcagccggccggatcttcagcaggaggacggcatctggcacgacgtgctgatgctgttcaatccgtttgaaggcaccgtgccgttccagatcccgcagtttggcgaagggggatgggtgctggagctgtctacggcggatgatgccgccaccgggacagcgatcaccgaaaccgttgagtacgcgctggccggacggagcattacgctgttccgccgtccttag

SEQ ID NO: 163877 - DNA, 2469 bp, Enterobacter cloacae
atgatcccttccgccacgtaccgtattcagttccgtaacggcatgaccttcgaccgcgttgtggcgctggtgccgtatatgaaggacctcggcatcagccacctttacgcgtcgcccgtgttcactgccacggcggggtctacccacggctatgacgtgaccaacccgaatgaaatcgaccccgcgattggcggacgagaaggctttgaccgcatggccgcggcgcttaagcaggccggcatggggctgattctggacattgtcccgaaccatatgtccacctcgctggaaaacctctggtggcgtgacgtgattgaatacggccagcaaagccgctatttccgctattttgatatcgacgggtcgaggccgctgacgctgccgtttcttggcgatacctttgatgcggagctggagaagggagccatcacgctaaaacgtgaccctgtcacgaaaaaggccgccctggtctactatgacgccgagtatccgctcaacccgggcacgtacagcgaagaaaaaagcattgccgagctgcacgaggcgcaaagctggcggctgatgtcctggcgggaggcgccgaagcagctatcgtggaggcgcttctttgagatcaccgggctggtcggcgttcgggttgaggatgatgcggtcttcgacgatacgcaccggctgatccttgagctggtccacgcgggcgtggtggacggcctgcgcattgaccatgtcgacggcctggcggatccgctgggctatctgcagcgcctgcggcaggccgccgggcccgactgctacatcacggtcgaaaagattctcgccaaaggggaacagctccccgctgactggccggtatccggcaccaccggctacgagtttatcgcctcgctggcggaggtgctggtcgatgatgatagcctgtcgcgtctggagaaaatccacgacgaaacgctcggcgtgacggtcgatcgccacgcggagctgcgcgatgctaaaggcctgatgaccgatcgcaattttgagggtgaattcaccacgctgctaaaccttgctgaggatctggcccgccgcaatgaggttgcgctgccgcgcgaggatatccgccacgcgctgcgcgagctgcttattgcgtttccggtctaccgcacctacggcactcgcgaggggttaaccccgccggacgtggcgctgctcaaccgcgtggttgccagcgtggagacgtctgaagccgcgctcagcctgatcgtgcgcattcttaccggcgacctgccggaagattgccgcgagagcgccgcgcggttcaggacccgcttccagcagctcaccgggccgctgatggcgaagtccgttgaagacacgctgttctttcgccacaaccttgagcttgcgctcaatgaagtgggggccgacccgaccccgcgcgcgttttccttatcccgcttccaccaggagatgcgcattcgtctggcccgtcagcccgacgcgctgctgggtacctccacgcacgataccaagcgcggagaagacgcccgggcgcgcctttacaccctgacggaagccccggaacgctggggggaaaatctggcccgctggcggcagatgaaccagacccaggtgcgttttctcaatgacggtaccgcgccgaacgccgccgatacgtggatgatctaccaggcgctggcgggcgtctggcccgccacgctgtcaccggacgacgctgaagggcttaaagcactcgaaacgcggttcctcggcttcctcgaaaaagcgctgcgcgaggcgaagcagcgcaccgactggatcgacagcaacgagagctatgagagcgtggtgttgagctacgcgcggtacctgctttcgccggacaacaccccgttcctgcacgatttcagcgaggcgatgcagccctttattcgcgccgggctgatgaacagcctcagccagacggcgatcaagctgacggcgcccggcgtgccggatatttatcagggcagcgaggcgcttaacttcagccttgtcgacccggataaccgacgcgagcctgactttccggccctggtgcagagtctcagcgcggcggatgccggggtgtttgacaacccggcctgctggcgggacggacgggtcaaacagtttgttaccgccacgctgctgcggcttcgaccgcactacgacgcgcttttccgctacggcgactggctgccgcttaaggtcaccggcgagcgggaggagaacctgattgtttatgcgcgcgttaaggacgaggaggcgctgattgtcgccgtgccgcgtctggtttttggcgtcacggataatcatcagctgtgggtcaataccacggtggcgatacccgacgaactggccgggaagcgctatcgggatctgttcagcggtgagagccgcattctgcaaaagacgctggatttaacgtcagaaaagggatgtgtactggttctgcttacctgcgaataa

SEQ ID NO: 163878 - DNA, 1788 bp, Enterobacter cloacae
atggaattcaggacatttcaaaagcagtggggtgctgagtttatttccgatgacgttgtacgttttcgcgtctgggcagaaggacagaaagaacttacgctacgtcttgccgccaccgaggtgccgatgacggcaaccggcgacggctggtttcaggcggacgtccccggcgtcaggcacggtgcagaatatcagtttgttcttcaggacggcacggcggtgcccgatcccgcctcgcgggcgcaaaagggtgacgttaacggcccctcagtcgtgatcgatccccgacgttaccagccggtcaaccgcgactgggcagggcggccgtgggaagagacgatcatttacgaactgcacatcggcacgtttaccccggagggcaccttccgggcggcgatcgacaagctgccgtatctggcggagctggggattacccagcttgaagtcatgcccgtctcccagtttggcggttcccgcggctgggggtacgacggggtgctgctgtatgccccgcactctgcgtacggcacgccggaggatttccacgcgtttatcgacgccgcgcacgggctggggctttccgtggtgctggatatcgtgctcaaccacttcggcccggaggggaactatctccctctgctgtcgcccgcgttttttgatgagcatcgaatgacgccgtggggcaacggcatcgcctacgagcgcgagccggtgaggcagtacatcaccgacgcaccgctctactggctgacggagtaccgtctggacggcctgcgctttgatgccatcgaccagattaaagacagctccgggacgcacattctggaggagattgccgcaaaaattcgcgaggcgatcccacaccggcacgttcacctgaccacggaagacagccgcaacgtgatttttctgcatccgcgcgatgaacagggccacacgccgctgtttaccggcgagtggaatgatgattttcacaacgctgcccacgtgtttgccaccggtgagacgcacgcctactaccaggactttgcctttgagccggagaaaaagttcgcccgggcgctggcggaaggctttgtctaccagggcgagatttcgctgcaaaccggcgaatcccgcggcgtggagtgccgcacgcagccgccgcagttcttcgtcgattttattcaaaaccacgatcagaccggcaatcgcgcccagggcgaacggcttatctccctggcgggtgccgacaagacgcgggtgctgcttgccgcgctgctgctttccccccatatcccgctgctgtttatgggcgaggagtttggtgaaacgcatccgttcctgttcttcaccgactttcacggcgaactggcaaaggcggtgcgggaagggcgcgcgaaagagtttaccggccatgccgggcacgatgaaaccgtcccggacccgaacgacgtgaacacgtttatccgctcaaagctcgactggaacaaaatcgccaccgacgagggcaaaacgtggctgcgctatacgcgccatctgttgacgctgcgccatcgctatatcgttccgcttctgcatccgggcggtgccgttgagggccatgtgctcaagaccgcgcccggcatggtggcggtgagctggcgcttcccgtcaggcacgctttctctggcgctgaatattggaacgaagcccgtcgacctgcccgcgctcgcgggggagacgcgcttcgcctggccggaggtcaacgacgttttacccccgaacggtattgtcgttcgctttgctgatggagaagcatcgttatga

SEQ ID NO: 163879 - DNA, 528 bp, Enterobacter cloacae
atgcagattcgaaaaggactcaataccgacttcgcacgccttgaatgctgtgacttttctttcaccattagccacattgcccgggagccgtttatccactgtgatttacatattgaagccgtggcagagccgtggataaaaacctacgaactcgacattcaaacgcttgaaaatcactgcgttaatccggacgccatatttcttgtcgcggaaacggacgacggtgaaatagccggatttattaccgcgtcagtcggctggaataaatttatttcagtggattatattgccgttgaacgcaccaaacgcagaaccggcgccgcgcataaattaatggccgccgcgcacgtgtgggcccgcagcgtaaacgcgccgggattacggcttgaaacacaaaatgtgaacgtctctgcctgcctgttttaccgtcactacggatttaccctgggcggatacgatcgttatctctacaacgccctaccggaaaaagacgaggtcgctctgttctggtattacatgctggtctag

SEQ ID NO: 163880 - DNA, 759 bp, Enterobacter cloacae
gtgaattcaatggctaaggcattactgctggcattaccggttttgagtgcagcggcagcggcgacggccgcggagcacgacctgtgtgaaccgaaagcgtacgaaatggcgctgcgctatcagcagaaatcggcagagattatggcccttcagctgcaaacctatcggtttgccaccgagcgttttaacgaaaagttaaaggatctgaaaacgcccgaaaattacgccgtggtaatggacctggatgaaacggtactggataacacccctctgctggtgcgcgacatggagcagtgtcacgactatacgaaatgggacacctggagcgactgggagaaacagggaaaacccggcttaattccgggggcgaaagcgtttcttgaccacgtgaatcaaagcaaggtccgcatctactatgtctcggatcgtatgcaggaaaacaaagccgacacgctgaagacgttaaacgctctcggcctgccgcaggtatctgacgaaagcgtgctgctggatacggtcagcaaggaagagcgccgtcagagcatcctcaaaaagcagcagatcgtgatgctgttcggcgacagcctgccggatttcgccgtgcagtttaaaaacaaaaagccgagcgagcagcagcgtgaactggttgaggccagcgcggaccacttcggcaacgactggattgtgctgcctaatgccgcttatggctcatggtccaaagccacgccggacagctggaacgcaccgctgaaaaaataa

SEQ ID NO: 163881 - DNA, 987 bp, Enterobacter cloacae
atgcttaccgtgaaaaaacttgctctttccacgctgatttccagctcactgcttttctaccctgcgctccaggcctctgcagaaacgccgcagcacgtcgttaaacaaccggcgggcggttacagcgtgcaggtcggcgacgtgcttgtcacctcgtttaccgacgggaccgtcgcgcaggatctgcacaagctgctgcgccggacaacgccgcaaaacattgatgcgctgctcgcaaaaaatttccagaccaacccggctgaggtctccatcaacgcgtttctgattgcgatacccggacataaaatcctggtggataccggctcgggccagctctttggtcctgataccggcggacgtctggttgagagcctcgccacgcagggaataaaacccgaggacatcactgaagtcctgctgacccacgcccactccgatcatgcgggcggcctggtgaaagacggcaaggtggtgttcagcaacgcgcgcgttttcgttggcaaaccggacatcgactttttctttaacgacgacaatcagaagaaaaccggctacggcaagaactacttcgatgtcgcgcagaagaccttaaagccctaccttgacgcggggaaagtggtgccgtttagtggcacatcggagattcttccggggcttaccggcacggttcatcccggacacacgccgggttcagccttctacaccctgacaagcaaaggcgagaagatcacctttgtcggcgacatcattcacgccgcggcggtccagttcccgcagcctgcggtgaccatcacctacgatgaagatgagaacaaagcggcaagcgtacgcgagcatgcgttcgctgactttgtgaaaaataaagaactcattgccgcgccccatctgcctttcccgggcatcggctatgtgacgaaaggcgagaaaggcggctatgcctgggtccctgtgacctataccaaccgggacgccagcagcgcgaaataa

SEQ ID NO: 163882 - DNA, 894 bp, Enterobacter cloacae
atggacatagacctgctcctgacgctggacgccctgcttcaggacaggaacatcacccatgcggccgcgcggctgggcatcagccagcccgcgttatccgctcgtctcgcgcgtctgcgcacgctgtttggcgaaccgctgtttatcccctccccgcatggacgcggggtattgcccacgccgcgcgcggaagcgctcaggccgcaggtgacaggcgtgctgcgcggcatcagcgcaatgtttgcgcccaccgcgtttgacgcgcaaaccagcagccggacatttgtcatcgcgctgcatgaaaacccggcgctgatgctcggcaccgcgctgcttaaccaggtgggtaccgatgctcctggtattcgcctgcgcttcgccctgcccgagatggccgaactgccgcagcagctggagaacggcgatgtggatctctacatcggcgtgagcgcgggcgcccatgacgggtgggtaaggcgcaaactcctcgacgacgcgtttgccaccgcccagcgaaaaggccatccgcgcggaacgggtgcgttagatctggagatctactgcgcgctttcccatctggtggtgtcgtcggcgggcgatccgtttaccggatttgtcgaccaaaccctcgccgggctgggctatcagcgacacgttgccatgtccacccagagctacgctatggcgcccgcgctggttgccggtaccgacctggtgtgcaccctgccggaacggatgctgaagcagtttgccagcacgctggatctctttgcaccaccgctgccgctccagcccattaccatcaacatgtactggcacccgaaaaacagccaggatccggcgaacgcctggctgcgcgagcagctcctgcggacagcaggacgtcaggtgtga

SEQ ID NO: 163883 - DNA, 885 bp, Enterobacter cloacae
gtgcagtttcgccagatgcgccacttcatcgtcgtggccgaagagctccatatgcaccgggccgcggagcgtctgaacatggcgcagccggcgctgagccagcagataaaggccctggaagaacgtttaggcgtcacgcttttcagccgggcgaaccgccgcttgaccctgacgcccgcgggcgaagcatttctcgtgaaagcccggcttgccatctcgctgaccgaacaggcggtgctggacgccagacaaacggcacggggcgagcagggtgtgttaaacctcgggtgcgtgtcgagcgcgatgtttgacggcaggctgcccgccgcgctgcgccagatgcacagccgctggcccgccattaccatgtcgctgatgacgggaaacgtgcagacgctctacgccgccgtgcagagcaaccagctggatgtggccatcatccgcgcgccgctgccgtcgctgccggacgatctgcaaagccgcccgttcgcctcggagaaaacggtgctggcgctgtatcgtcagcatccgctggccgggtccgccgcgctgacgctttcgtcggtgaaagacgaaaaatggatctccctgcgcgatccggagggaatggggctggagcagtacttctatgacgcctgcagcggggcgggctttcagccggacgtggtgcaaaacgcgaccgacgtgcccacggtcatcagcctggtttcggcagggtttggtctggcgctgctgcccgcgtcggcaaaggcggtgagcgtcgagaatgtcgtctacgtggacatccttgaccggctgcgggagagcgaactcaccctggtttgccaccggattattcgctcagaggtgctaaaaaagtttctggttacgctcgatcacacctga

SEQ ID NO: 163884 - DNA, 1491 bp, Enterobacter cloacae
atggaaaaccagattaacgatctccgcagcgccatcgccttactgcagcgccacgaagggcagtacattgaaaccgatcgtccggtcgatcccaatgcggagctggcgggcgtctaccgccatattggcgcaggcggcacggtcaaacgtccaacccgtacgggcccggcgatgatgttcaacagcattaagggctatccgcactcccgcatcctggtgggcatgcacgccagccgcgagcgcgcggcgctgctgttgggctgtgagccttcggaactggcaaagcacgtcggccaggcggtgaaaaagccggttgcgccggttgtcgttccggcctcgcaggccccctgccaggagcaggtcttttacgctgacgatcctgacttcgacctgcgcaagctgctgccggccccaaccaacacgccgattgatgcgggtccgttcttctgtctggggctggtgctggcaagcgatccggaagacagctcgctgacggatgtcaccatccaccgcctctgcgttcaggagcgcgacgagctttccatgttccttgccgccgggcgccatatcgaagtcttccgcaaaaaggcggaggatgccggaaaaccgctgccggtgacgatcaacatgggtctcgaccccgccatctacatcggcgcgtgctttgaggcccctaccacgccgtttggctacaacgagctgggcgtcgccggggcgctgcgccagcagccggttgagctggtgcagggcgtagcggtcaaagagaaagccatcgcgcgggcggaaatcatcatcgaaggtgaactgctgccgggcgtgcgcgtgagagaggatcagcacaccaacaccggccacgcgatgccggagttcccgggctactgcggcgaggcgaacccctccctgcctgtgatcaaagtgaaagccgtgaccatgcgaaaccacgcgatcctgcagacgctggtgggaccaggggaagaacataccacgctggccggactgccgaccgaggccagcatccgcaatgccgtagaggaggctattccgggcttcctgcaaaacgtctatgcccataccgcgggcggcggcaagttcctcgggatattgcaggtgaaaaaacgccagccgtcagacgaaggacgtcagggccaggcggcgcttatcgccttagccacctattcggagctgaagaacattattctggtcgacgaagacgtggatattttcgacagcgacgacatcctgtgggcgatgacgacgcgcatgcagggcgatgtcagcatcaccaatattcctgggatccgcggccaccagctggatccgtcccagtcgccggattacagcacctcgattcgcggcaacggcatttcctgcaagacgatcttcgactgcacggtgccgtgggcgctgaaggatcgcttcgaacgggcgccgtttatggaggttgacccacgcccgtgggcgccagagctgtttgctgacaacacgaaatag

SEQ ID NO: 163885 - DNA, 426 bp, Enterobacter cloacae
atgcagacgccggtgcaggcagaatttccggcggtgctcggttccctgacgccgctggccggctggctggaagcgcggctgagcgcgcttcccgtagatgatgagtggcgtttcgcgctcgatctcgccgtctgtgaggtggcgacgaatatcatccgccacgcgctgcatgaggatgccacgcgcgcattcagcgtacggttcgacatccgcgacagcgatgtctgcattgtttttaccgacgcgggtgacgcgttcccgctggagcggcttgaggccgccaggcgagaccgtttttgtgaaatctcgccgctgctggagagcggcagggggctcatgctcattttgctgagcgtcgatcgtttcactgtggaacgtgtgacgggtgaaaacatcgccacgcttgaaaagaaaatcagcgtatga

SEQ ID NO: 163886 - DNA, 339 bp, Enterobacter cloacae
atgattattaacactgaacgactaccgcatgccaacattctcacgcccgcagtccggcggctggatgcctccgttgccgcgacgtttaaagcgtccgtgacggaagaaattggcgacgatcgcaaggctttgattgtcgacttcagcaaagtggattttatcgacagcagcgggctgggaatgctggtgtcgttgtttaagctgatgaacgggaaaggcgacatggcgctgtgctctctgaatcccgggatcatgaacatgttcaccctgacccgcatggaccgcatattccgcatctatccggacaaaagcagcgcgcttgcgcagctggggcagtag

SEQ ID NO: 163887 - DNA, 1215 bp, Enterobacter cloacae
atgtcggcgctgcacgtgttaatcgtagaagattcgctgatttatcgtcggttactctcccgaatgctcacccagtgggggtatatcgtgagcgaggcggaaaatggcgtcgccgcgctggaaatactgtccagccagccgatcagcatggtgataagcgactgggacatgccggaaatggacggactcacgctctgtcagaccatccgcaaccgtcagtttggccactacgtctatgtcattctgctcacggcacgcgaaaatgccggggatttaacgcagggctttgatgccggagccgatgattttttaagcaagccggtcgagcaggatgaactgcgggcgcgtctgcacgccggggtccgtattttaacgctggaagcgaccctcgcggcgcacaacaagcgcctgagtgaagcgttgcaccagattgaacaggatcttgaactcgcggcgcgcgttcagcactccgtgctgccttcgcaccgcttacgctttgggaactacttttccgactggcttttcatgccgtctgcgtgggtctcaggcgatgtgttcaatatttttccactcgattctcacattgggttctattgcgtggatgtgtccggtcacggcgtgggggccgcgatgatgtccctcgcggtggcgcgtcagttcttacatggccgggtggtagaccgttttttgtttaccgatcagggcggcattcagtcgcctgcggaggtgatcggaatcctgaacagccgcttttgcagtgaagagagcgacattaccagctatttcaccattatctacggggtgatcgaccccgagagcggaagaggggtgttgtgtcaggccgggcatccaactcccgttattgtgaacgcagacagcgccgtcacgtccgtgggcaacggcggcccgccggtcgggctgatgcctgacctcagctgggaggacgtcgcgtttaccctcaatccgggggatcgcttatgcttattcagtgacggtattacggagtgtgagaacgtcagcggcgagcagtttggcccgcagcgtctcgaacgctggcttcatgaccatgcccgacttccggttgacctgctcctggcgcggttcggtgaccacctgaccggctggcgcaatgcaaatcgtgatgaaccgaccgccttaaccgatgacgtttcactgctcgtgatcgagcgtcagggagaacagaatgattattaa

SEQ ID NO: 163888 - DNA, 900 bp, Enterobacter cloacae
atgcgcgaaaaatggcttctggcgggcgtgctgctcgccgcgatccccgccgcagaggcggcgaaaagcagtgaaaatgaatccctgcgcgacaagaacggtgaacctgttcaggctggcgtctttaccagccgctgggggcgcctgttctcgggtaacgacaagaaattctcaggtgcgctgagctttagctcgggactgaaagagcagtggatgagcattcctaacagttcagacaccgccacggaaaagaaaaagattaaccagacgctgaatctcagccttcagtattccccctacagcttctggtttgccaacattacgtcccgactgccggtcagagacaccagccgctacaccgccgattttcgctacagcttcggctacgatgactggcacgccaacaccgtcagtctggtttacagcaactacggcgataaccatttctggacatcgggcagccgacgacacacctatttcgaacagggcgccttcacgctggcctacaagttttcgctaccgaaaccggtcgaaaacacgctcctgattaataaaggggattccatcatttgccaggtcgggtacagctgggtgccgcgctactacgacctcagcagcgatgacatccgcaaaaataaaaacgtcatgctcggcggctgcggctacaccttcaaacaacatttcttcgttcgcgcgacggcattctggttcccggacagcagccagcagcagccctggaacggcgattacagctacagcttcggttatgccggctatacgccgggttcgttctccatccagtacgcgaactatgcgggaacgcgctatccggggcacggcaacgggaatgcaaaattcagggaagggaccgtgagcctcatctggttcttaccgctttag

SEQ ID NO: 163889 - DNA, 1218 bp, Enterobacter cloacae
atgagccatgttgcgccgtcggtagcgcaagaagatgacgctaaatcaacagcatggcggtatgccgttgcaggtgccagggacctgagaatcgactttatgcgcggcattgccctcgtcatgatggtcgtggcgcatacggaggtgatgtcggtatttaatatattctcctgggagcgttttgggttaacaaccggtgcagaaggttttgttattctctcggggtttatgcttggcatgctgaaccgcgcgcgtctgcaaaaagtggttttgctcacggtttcctgggggctttatctcagggcatggaaaatatatcgtgtaaatatcattatcatagtgtcgtttattcttctggcctatatcccacatattaacgttttcgaggtcacccattttaccgaccgtttttcgggtgaaagctggtcgctttatccggttacgccgcaaataaaagagacctggttcaacattatcctctatttgcagattggccctcatcagacgcaaattctggggctgtatatctttttactgctactcagcccgctatttttggggatgctgcagaaaggaaaagtctggtggctgctggggctgtcgctgctggtgtacagcctgtggcagcgctggccgcttcggctgacgccgtcggaattcgaatttgccttcccgctgctcgcctggcagttcatctttgtgctgggcatggccagcggctggtataaagccgaactgctctctttcgcccggacgcctccggggaaaggggtggtagtggcgctggtcatggtgtcgctggtgctgggatttgtcgcccagaaccataccaacccgtttatgccgcccgcgctgctgatgcacgtcatcccgcctgacagcttcaattcgttttatcacacctgggcggcgaagaacgggctgggcccggtgagggtgctaaacgatatcgccctgatggtcaccgtctacctggtgctgacgtattgctggacgccgctcaatcgcctgctgggatggttcctgatcccgctcggccagcactcgctttatacctttattttgcatgtgtacgtggtgctgctggtgagccagttcatcaccttcgacttatggcgacatgcctggatagagaacacgttagtgcatgcggcggcactgggtattttgtggctgatggcaaaatacgacgtcggcgcacgctggatacctaactaa

SEQ ID NO: 163890 - DNA, 1320 bp, Enterobacter cloacae
atgaggatacgtgatgtcctgctgcccgcgcgcagctacctcaccattttgctcggcttcctgatcggctttgccattgtggtctgggtggagaaacagatgcccacgcgcgtggaaagcagcggcggcatcgcgctcagtaaagacttcccgccgctgcccacaacacgggcgctgacctatgacgaagccatctgggcgcgggtcgcctggcaatactacgtgaataatacccagccaaacgggctggcgaacgccagcgacggtgaaccctggctgagcctctggagcgtgggaagctacctctttgcgaccgctgccgcagagcagctcaatatcatatccgccgatgagtttgacgagagggtcagcaccgccgtgttcacgctggggcaactgccgctcaatgacaaaggtctccccgccgcctattaccatgcggacacgctcaagatcctgggcaaacctgacgcctccgcaatcggtctgagccggctgctgacggcattacagaccctgctgtggcgctatccccagcacgcggcggccatccgcgatttgttgagcgtgtggcgcaccgcggcgctgattgacaataacacccaaagccaggctgcggtgccgctccaccactggacgctggccgacgatgaacagcgggacacttttggctaccgtctctatgccagccatacgctgcgcctgattgacagcgcggcaggactcgcggtgaccaatccgcctgaagggcaaaagatgatcgatctggatggcgtaatggtgcccgatgaagggcttcgcacgccctggggcaagcaaacctcgctgatcagtctcccctatctgttaaccggtcttgagctgggctttgatgcgcagagcgctgaaattgcgtggcggattatgcagatccagcagcggcgccacggcctgcgcgcgccaaaaccccccgtcagtacggattatgccgagcccgcgccggattacgttaacgatctgccggacaggcagccggtacaggcgcgtaacctgcgcgacgaggtgccggagaaagtggcgatgacctccacccgcaccgcgtttgcctggtatgccctgttccgcaacagctggagcgaagcgctgcgccagcaggttctgccgcttcaggtgccgggtaaaggctggcagcgcgggttaaatctcaacaacagcgtcaatggcgtcgtggacgccgataccaatgccattgtgctggaaagtctgtcttacatcgcgcatggccagatgctctgtctggcctgcctctacacatccccctcagcaggagcaacgccatga

SEQ ID NO: 163891 - DNA, 1548 bp, Enterobacter cloacae
atgaagccacgatccccgatccttttccacctgctcacgggaataacgatctgctggctggcgctatcgaccgtgcgtgcggacacgaagctgcctgcatcaggttactccccgcgcagcggcgagctgacggcccgagagatgaccatcgccaaaaacgcctggcagtatttcgtcaccaactatcagcccacgacgggcctggtgaatgcggtcaacaaatatccctccaccaccatgtgggacagcgcctcctatctggccgccctgacggcggcgcgcgagctggggatcattgataaagcggaatttgaccgccggatgctgaagtttctcgccacgttaaacaccctggtactgttccgcaacgagctgcccaacaaggcctataacaccatcagcggccagaaggtggactacaccaacaagcccggcgaaattggcttctcggcgctggatatcgggcgaatgctggtctggctgaaaatcatcaaggagcgttacccggaatacggcaacagcattgataacgtggtgctcggctgggatttcagccacgcgatcgacccctgcggcacgctgtacggggcctatctggagaacggccagccgaagtacgttcaggaaggtcgactgggctatgaagagtacggcgcggccggtttccagctgtgggggtttaatacctgcaaagccagccgtccgcagccttacgagctggccgagatctactgcgtgctggtcccgtacgatacgcgcgacccgcgcaacacgtcgcagcataactacgtggtgacggaatcctacctgctctacgggctggagttcggctttgataaaccgaccgaccgggataacgccccgcgcgactactccctgacgtggatgaaaaactttgccgaccgcgtttatcaggctcaggagaaccgctataccattaccggcgtcctgaccgcgcgctccgagcaccagctcgataaggccccttacttcgtctatgacaccgtcttcagcgacgggtacaactggaacaccattaccgataaaggccagtttgtccctaacgctgcagcgatttcgctgaaggcggcgctgggcatgtgggtgctgtggaactccccctataccgaccgcctgctgaacaccattgagaatgccaacgaagagggaaaaggctactacgaagggctgtatgaaaacggcgacgggccgatcaaagagttcaccgcgaacaataacggcatcatgctggaggccctgttgttcaaaaaagagggaaaactgctggccttcaacaccgacaacccgaagagcaaggattttgccccgtctctgtgggatcaaaagctgctcgatcagtttgaagagaacaacgcgctgcgcagccgcccgttccttgccagcaccccggccgtaaaaagctggtgcgaccggaccggcgtcacgcagcgcaccaaacccgcctgccaggcctgtcagtgcgcgtcatgcagcgcggacgagcccgttaaactgcctccggtgactgcgcaatgcttaaaaccatag

SEQ ID NO: 163892 - DNA, 1395 bp, Enterobacter cloacae
atgcttaaaaccatagccagagggcttgcgggattactccttgcaggcgcgatcgtctttgcgctgtttgcccatcagggcgcaggctggcgctggctcatcagtggcggctggcactccagcgcgcgcattgccgccctgacgccggaagagcagacgtgggcggcgatcgcctggcgctatttcgtcaataatacccagccgcaaaccgggctggtcaacggcagcgacaaacagccccgcgtcacgctctggcaaatgggcgatacgtttatcgccctgctggcggccaaagagctggggctgattgaggaggccgagtatgacgctcgcctgacgcggctgatgggcaccctcaaccgcctgatgctgaccgaggcccggacgcccggtcgactctattccagccagacggcgacgccgatcgactttagcggcaagccggttaaaaatggctggtccgcgcgcgatatggcgcgtctgatgctcgccctgcgcctcaccgcagagcgggaaccgcagtacagcgaatacctcgataaaatcatcctgcgctggaatttctgtccggtcatcgacggcgaaggcgaactgtggtcatcttccctgcaaaacggccagccggtggtgcgcgaggagctgcgcctgggcgagagcgaatatgccgcaacggcgtttcagctgtgggggttttccccggagaaagcgtttacgcccccggcgcaccacgtcatcatcgcccagcggcgtctggccgttgatgcccgggatccgcgcaccacgtggcagccctccctgatcaccacccttccctatatgctgccgggcctggagtttggctgggagcccgaaggcgttgcggccgatcggcaaaagcacctgcgcaagcaggccgaaaacgtctggctgagccagaagagccgctgggagaccgataagatcctgacggccagggcagatttctcgctctctcaggcgccctggcatatccaggatacggtctggggaaatggctatgcctggaactctgtcggtgacgatggccgggactacacccgtttcgcgcaggtatcgaccaaagcggtctttgccctgtgggccctgtgggacaccccgtacaccgacatgctgatggcggtgacaaagcatcttaacgatccgcaaaaaggctggtacgaaggccgccaggaagccacgggcgatactaacgctgcgctcaccctttccaccaatgccacggtgctggaagccctgttctttaaacacaacgcgggccccctgtttgacgcccgccgggctaaaaaagagagctactttacgcgccgtgtggcagatgactatacgcccgtcgggcactgtctaccgggcgaaaatgccgtaaggaggacgccgtga

SEQ ID NO: 163893 - DNA, 426 bp, Enterobacter cloacae
gtgaaattttaccgcgatctgtttgaatccagtctgaaccgcgtctttccggataatgataaaacggcgttttttcagacgttctatgacgccttcgtccatatgtcacccgagacggagcagcatttttctcgcctgccggatagcgagggtcagcagactctgtttaagagtttcttcgccatgcttgcggtagacggcgcgttaatcgtgcctgattttctcgagcgcctggcgcgggagcaaagcgacgacggtctccacctcccgccgcgttttttcgccctgtggcgcgaagcgatgttgaacaccgtgagcctgcgcgatccgcagtgcgacgatgagatcctgacggcctgggccatggcgatcgcgcccgggctggaatacctgcgccgacaggcagaactgcactaccgcgcgtag

SEQ ID NO: 163894 - DNA, 2667 bp, Enterobacter cloacae
atgagcgcattcacgtacgatcttaacgcgctgccggccgccgtcatgatttatgacgccgaggaacgcctgcaggcctggaatcacaacgtggcccttttttatccggtcatcaccccgtggctgaaggtgggcacaacgctggcgtcgctggcggaacgctttatcgacgccgtttacaacgtcgaccctggccttcgccagacgctgcgcgagtcgatcgtgcgcaactgtcggcaggataaacactgcgaagtgcggcaggcaggccagcggcggatcttcgtccagcaccagcgccttgcggacggcggcattgtcagcctgcacagcgatgtcacggagctggatgaagcacagcgggcgcgtcatctgctgcatgacgattttctgctgacggcggaatccatccatatcgggatctgggactggcaggtgtctggcgacacgctccaggtcaacgataccctgctggccatgctgggccagtcgcgcacccagtggcgatatccggtgcgttttctgctcaatcaggtccacgagaacgatcgcgctgcgctgcgcaaggcgctgcacgcgtcgaagcaggatcatcgtccggtctttgaatgtgaaattcgcgtgcatcaccctaccgaaggtctgcgctggatgctgctctccggccaggtggtcacgctctccattgagggaaacgccgagcgcgtgattggcacgctgcaggatattacgcgccgcaaggaggctgaaattcaggcgttcgcctcggccattgaggcacaaaaagccaatgaggcaaaaagcgcgttcctggcgaatatgagccatgaaattcgcacccccatgaacggcattattggcatgacccagctgtgcctcgatacctctctcagtgccgatcagcgcgattacctgacgctggtgatgagttctgcccagtctctgctgcatatcatcaacgacattctcgacttttcccgaatcgaagccggcaaagtggagctggaggcggagcccgtcccggtccgccccttcattcagtcgcttattcgcccccacatgccgggggcgagcgaaaaaggcattgagctgctggtcgatattgcgcccgacgttcccgacgtgctgctggtcgacggcgcgcggctgcgccagatcctgaccaatctgctgggtaacgcgctgaaatttacccatcagggggaagttatcctgattgttgagcccgcggatagcgcggatcgatggcgtttccgggtgtgcgacagcggcattggcataccggcagataagcagaaagccatctttgaagccttcagccaggcggataactcaaccacccgacgctatggcggtacggggctcgggctaaccatctcagcgcgactggtcgcggcgatgggcggcgaattaacggtctccagcgagccggggaaaggcagcgaattttccttcgtgctaccgcttgcgacccaggcgcccggcccggaggaacgccggcatagccatcgctttaacggggaacccgtgctggtggttgatgataacgcgaccaacctgcggctattggccgccatgcttagccagatggggttgaaacccacctgcgttaataacgccagcgaggccatcaaccgggttaaaaccggaacggcatggcccctgatcctgctggacgcgcagatgccggatatggacggcgtgtcgctggctctcgaactttcggtgctgccgcaggttgctgaaagccatatcatcatgctgagctccatgagccgacattttgatatcaatatgctgaagcggatcggtatccagaactacctgcacaaacctatcgcccagaatgaattgcatcaggcgattgccgcggcgtttgaacgtgcaccaaagacggtgagtgaaagcgcgcccgcgcccaccgtcgcgccggacacggccgggctcagggtcctgcttgcggaagataatctggtcaaccagaaggtcgccgcgcgcctgcttgagcggctcgggcacacctgtcagatcgtcgataatggcgtcgcactgctggaacgctggcgcgcgggcgtgtgggacgttttgctgatcgatcttcagatgccagagatggacggtgaaaccgccattcgcctgctgcgtgaagaagaacgcgcccggcccggaccggcgcagcccaccgtcgccatgacggcacacgccatgcagggggataaagagcgctgtcttcagatgggtttcgacggctacattgccaaacccatcagccaggagcgtctcgctgaggagattgctcgcgtgctcccgcgccacgatgacccttccgccttcccggatgaagcacgtctgctgaagcagtgcgctgacgaccctgctctggttcaggagctgctggccctgtttggcgaagggctggaggaggccatgaaggccatcaccctggctatcgacggcgacgatcgtgaagcgctgcgccgcgcggcccacaagctgcgaggagaagccgtcacgctggatttcgggcgacttgcccgtcagctgcaggcgctggagagcgaggcgcacacgctggaggggcaaaagcttgcggcgctaaaccagcagcttcaaaaggaatcgctgcgcctgatggcgtggctcaacgcgcgcggggtaaacgcatga

SEQ ID NO: 163895 - DNA, 2175 bp, Enterobacter cloacae
atgatgactcgcaactgcgcgctgctcgttgccctgttgaccacccatacggtggcgaacgctgcgccggtcagctggtctctggccggagaatggcaggttcaggacgccaatgatagcgcgcgtcctgccgcatcaggctggcgcccgcttcaggtccccgccaactggtacagcgccgggtacgatcaccagggcgcgctgtggtacaagcacgcgttttccctgcccgtgcagccgcccgacgtaatgagcaccctggtgtttgacggcgtcgactacctggccgaggtcaccttgaacggccagccgctcggccagcatgagggctattttcagcgcttttcgctggatgccagtcaagcgttacaacgtcacaaccgactgatggtcagggtggacagcccttacgaagatcccactaaggtctggccgctgcataaaacggtcatgaaggggatccttaaccagcatgacacgcgtcccggcggggcctggtcgccgcaaggacaggacgccaactcgggcggcatctgggcgacggtgaggctgcatcttagccggggcgctacccttgatgagaccattctgcggccagactggtcacaggggctgacgcaccccgcgctgaaagcagacattcgctatcgcgcgctcggtcagggcccggcgaccgtgcggctcaccgccacgcccgccaacttcagcggtaggcgctatcaggctgactttccggttaccctcgaaagcggcgcccattccgtgcagctgacgctgcccatgccgaaggcaaaactgtggtggcccgtcggtaccggaaaaccccacctgtataccattcgcgtggcattgcgggatgaaaacggcctgatggatacggcggtcacccgcaccggactgcgcaagatcgtcgagcagcccgacaataagggctggctcattaacgacaaacgccttttcattaagggcagtaattacatcggttccccctggctcagcaccatgacgcgagaaaaatatcgtcgcgatcttcgtctggtggaagccatgaacgccaacgccatacgcgtgcacggacacgttgccggacgtgggttgtatgacgtggccgatgagatgggcatgatgatctggcaggatgttccgctgcagtggggctacaacaatagtgcggctttcacggaaaatgcggttagacagacgcgggagatgatcgaacagtttggcaattcccccgccatcatcgtctggggcgggcataacgaaccgccgtggaactcgccgtggatggaaaaacgcttcccggactggaataaagatctgaatcgcgagctcacgcaaaaggtggcggatacgcttgccgaagatacctcgcgcatcgtgcaccgcttctccgccgttgaggagcattactgggcaggctggtactttggtaccgtacgcgacctgcttgctccggccaaaacggggatcatcaccgagttcggcgcgcaggcgcttccccgcttatcgacgctaaaaaccatcatcccggcggcgtcgctctggcccaaaacgaccgccgctgacgatcccggctggaccgtctggaaataccataattttcagcccttccagacctttaagtttgccggtatttcgcgtggggacaacattcaggcgatgatccgcaatactcaggcgtaccagtcgcagctggtggccacggcggcagagagctaccgtcgacagcgctaccagccggtgacggccctgttccacttcatgtttgtagaaacctggccctccatcaactggggcgtggtggactacctgcgtaagcctaaagccgggttttacgccttaaaacgcgcctaccagcctgttttgccgtccattgaacccgtcacggcgcagtggcaatccggggcggcggcgaccgtgcgtctgtgggccatcaacgacacctggaaaccgtgccgcgaatgccgtctgagctggcgcatcacccagcgcgataaggtgctggcaaatggcacgacgacgatgacgatcgcagcagactcgggaacgatggtaaaagcggtcacggccacgcccgtgggccaggacgacgtgtcgattcggtttacgattgaaaacagcgcgggaaaaattgtcggcgaaaatcagcgcacggagtccgtcataaagtga

SEQ ID NO: 163896 - DNA, 288 bp, Enterobacter cloacae
atgactgcacatatttccaaagatcctttgcatggcgtaacgctggagatgatggtcaacgccctggtggcgaaatatggctggagcgagttgggtgaccgcatcaaaattaactgtttcagaaaagaccccagcgttaaatcgagcctgaaatttctgcgccgcaccccgtgggcgcgcgcggaggttgaagccctgtatctggactctctcagcgatgagggaaatacagagcaggcggcgcccgcctttaatccctgggccaacagcaggattatcaagagctaa

SEQ ID NO: 163897 - DNA, 1293 bp, Enterobacter cloacae
atgacgcgacacgtaaaacggattggtgcgctggctgcctgcgcgcttttacttgtaagctgctcctcaacaccacccaaatcactggttacccctcttcccaccgtcagtaaaccgacgccgcaggcaaacgccccgatgcgcggcatctggctggcgaccgtctcgcgtcttgactggccgccggtggcctcggtgaatggccgcagcgcggaccagcgcatcgcgatgcaaaagcaggcgctgatcgcaaagctcgacaaccttaagcagctcggcatcaacacggtattttttcaggtgaagccggacagcacggcgctctggtcatccaaaattttaccgtggtcagatatgctgaccggcaacatcggtgagtatccgggatacgatccgctgcagtttatgcttgatgaagcgcacaagcgcggcatgaaggtccatgcctggtttaacccctatcgcgtgtcgaccaacaccaaaccgtccaccatcgccgccctgaaccggacggcataccagacgccgtccagcgtttatgtccagcatccggaatgggtccgcatctcgggtgaccgctttgtgctcgacccgggcattccggaggtgcgcgactggataaccaaagtggtgaccgaagtggtggcgaactacccggtagacggcgtgcagtttgatgattacttctatgccgaatcgccgggatccgcgctcaatgacgcgcagagctggcggcagtacggccaggggtttgcctcaaaagccgactggcgaagacacaatacgcagcagctgattgtccaggtctcccgcgcgatcaagcagacaaagcccaacgtggagtttggcgtcagcccggcgggcgtgtggcgcaaccgctcctttgacccggcaggctccgacacccgcggcgccgcggcctatgatgaatcctacgccgatacgcgtcagtgggtgcagcagggcctgctggactacatcgcgccgcagatttactggcccttctcccgggatgccgcgcgctacgacgtgctgaccagatggtgggccgacgtggtgaagccgacccacactcgcctgtatatcggcattgcgttctacaaggttggcgagccgtcgaaaaaagagccggactggacggttcagggcggcgtgccggagttgaaaaagcagctcgatctcaacgattcgctgcccaacgtcaacggcaccatcctgttccgggaagattacctgaaccagccgcagacccaacaggcggtaaactatctccgtggacgctggggtagctaa

SEQ ID NO: 163898 - DNA, 759 bp, Enterobacter cloacae
atgagaaaattactgttactttcggcgctggcgacgtcagggctggtacaggcggctgaagccataccggatgtggtgaagcacttcagcgagcagcagaacattaaaatcatcaagaagctggatgcgccgggcggggcgccagcctggctcgggcagtatcaggatatgggcgtgacgctctttttaactccggacggcaaacacgtcatttcgggctatctgtacgatgacaaaggaaaaaacctcagcgaaggggttttccagaaagagatctacgccccgatgggacgcgaaatgtggaaaaacctcaacgcggcgcatcccctgaaagaaggggcggatagcgccccgcgtaaggtctttgtctttgccgatccgttctgtccgtactgcaagcagttctggtccgaggcgcagccgtgggtgaaggccggtaaggtgcagctcaatacgctgctggtggcgtttctcaaccccaacagcggacgcaacgccgccgccattctgaatgcgaaagatccggtttcggcctggcgcgaatacgagctttccggcggcaaaaaactgcccaagcctgaaggcgaggcttcccgcgaaacggttgcgatcctacagaaacatcaggcgctgatggacagcctcggcgctaacgccacgcccgcaatttactatctgaatgcggaaaacgagctgcagcaggtggtggggatgccggatgcgcagcagctcgaggcgatgttcgggccgaagccgtaa

SEQ ID NO: 163899 - DNA, 612 bp, Enterobacter cloacae
atgaaaaaattccttattacgcttctgctcctgctggccccgcttcaggtattcgccgcgcagccgctgacgccggaccaggagcagcgcgcgcagaagacgatcgctgatttcctgtttaacgatccaaactccccgcgcatcggcgcgaaaaacccaaagctcaccctggtggtgtttaccgactacaactgcccgtactgtaaaaaattcgatccgtacctggagaagattgtcgaaaaacatccggacgtggcggtggtctttaagtttttacctttccgctcggaaagttcgctgaccgccgcacgagacgcgttaaccgtctggcgtgcgcatcctgagcagtttatgaagctaaaccacaccctgatggcgaaaaaggggtaccacgatgacgccagcattcaggaggcgcaaaagcgggcgggcgtgagcgtgacgacgccggacgaggagagttttctgacgatcaggcgcagcctcattgtggcggaaaaaatggggatccagggcacgcccgccacgcttatcggcgaggggctgcttcccggctgggtgccgttcgaacaattcgacgaaatggtcagtgaagcactgaaaaaccgctaa

SEQ ID NO: 163900 - DNA, 2025 bp, Enterobacter cloacae
atggttaacctcttcaggggattcgtcttcctgtggctgtcctgcatcggcattgtccatgcggcagacaccggctggctggtctccccacaaaacgatcacgcccgcatccgctttcaggcggagagggaacaaacgcatgttaaaggcctgctcaccgttgagctaaagcccggctggaaaacctactggcgatcgccgggcgagggcggcgtggcgccgaaaatcagctggccggaaggcgtaacggacagctggtcctggccggtaccgtcgcgtttcgatatctccggcatgacgacgcagggctatcacgataaggtcactatcccgatcgttctcgacggggtgaagggcgacacgctcgacgggacgctcacgctctccacgtgcagcaacgtgtgtctgctgacggactaccctctgcatctcgattttacccagccggtggatgagggcttccgcagcgccttcgggcaagcgatgcgcgccgttccgggctcatcaggcgtgtcgtcggatctttctgcctggctctctggcgacaagctggtgattaccggcaccacggacgggaaatgggacaatccggggatctactttgacccgctggagggtgacattctgcccggcgagccggttattaaacatgacggcaatacgcttcgggttaaggtacccgtgaccgacgaatggggtgataaacccgcctcgctggcaggcaaaagtctgtcgtttgtgctcaccaacggcgatcgggcgcagcaaaccaccatgaccgttgggacaacgcccgaagagacctccgcaccggacgggacgggaaaaatggtgctctttgcgctattaggcgggctgatcctcaacctgatgccctgcgtgctgccggtaatgggcatgaagcttaacagcatcctgcaggcgggatcggacaggcgtgccatccggctgcgcttcctcgccaccagcgccgggatcctcacctccttcatgctgctggccgggatggtcaccgcgctgaagctggccggagcgtcgctggggtggggcattcagttccagaacccgtggtttatcggcctgatggttgccgtgaccttcctgtttgcgctgaacctgtttggggcgtttgaaatgctgctgccttctgccgccgccggacggctggcgacggcagggggatcggggattggcggcagcttctgcgaaggaatgttcgccacgctgctggcaacgccgtgctccgcgccgttcctcggtaccgcggtcgcctttgcccttggcgcgccgctgcacgccctgtggctgatcttcctgatgctcggcgtgggcatgagcctgccgtggctgtttgtcgccctggtgccgaaaacggccatgctgctgcccaaacccggccgctggatgaacacgctcagggtcatcctcggcctgatgatgctggcctccagcctctggctggcgacgctgttgagcgtgcatctgggcgaggcggtcagccagatcgtgatgctggggctgactgccgtcgcgctggtgctgtttgcgctaaaggggcaaaaatcttcgccgctgttctggctggtggtcatcgcgctgtcggcgttcggcgggtatcaggcgcgcggtctgcttaacacgccgcctgacgctccggcacaaagcgatgcgcagactatcccgtggcagccgctcagtgaagaggctatcgagaacgcgctggcgcaggggaaacgggtgtttgtggatatctccgcggactggtgcgtgacctgcaaagttaacgagcaccgcgtactcagtcagccggacgtgattgccgcgctgcgccagccggacgtggtggccctgcgcggggactggagccagccgtccgcgtttatcgcggattttctggcgaagcgaaaccgctacgccattccgtttaacgcggtgtatggccccggcctgcctgatggcgagatcctctcgccgctgctggacaagcgcaccctggtcaccaccctgaacaacgcaaaaggctaa

SEQ ID NO: 163901 - DNA, 372 bp, Enterobacter cloacae
atgcgcaaccgtcagctcctcggaaaatggcttttgattatcacctgtctcgcgatggcgctttgcctcgtgcagcgtgcggtgatgctcaaccattttttacagggactggatccgcagatttcgctgagtacagatgccccggctcaaaccagcaacactgaacaacccggcccgtcgccgtgtcagctcggcgcgcactcgctgctttgcgcccagccgctgttcttcgacggtgcgttaccggccattattatcttcttcgcgctgctgcagctgttgacgcaagggcgggcactggctcccgcggaacagcccgttcaggcaccacctccccgaatacaccttaaaaactgcgttttccgtgaatga

SEQ ID NO: 163902 - DNA, 561 bp, Enterobacter cloacae
atgaaagccggggaggcgggcggatccatgctgatgtcggcgctcaacgcctgtcgcgcccggctgaaagccttcattcgcgggcggacgtccgtccgcgatgatgccgacgacattttgcaggaagtgacctatcagctgatgaaagtggagcagccggtcgaaaacgtcgccgcctggctgttccgcgcggcgcgtaacgagatgaccgaccgggcgcgtaaaaagcgcgaggtgtcgctctccggctattttacgggcgaagacgacgacggttttccggaagacgagctggccgaaaccctgttcggcgtaccgcacacgccggaagaggagtacctcaaaacgctgctgtgggaagagctgggccaggcgctgtcagaactcccgccgccgcagcgggaggcgtttgaaaagaccgagctccacggctacagcattaaaatgctggcagaggagaccggcgccagcgaacaggcgctgttatcccgcaagcacaaggcggtgctgtttctccgcacgcggctgcgggacgtctatgatgcgctgacgggcgaatag

SEQ ID NO: 163903 - DNA, 420 bp, Enterobacter cloacae
atgagagattttgaactgcacggcagaggtcacgggcgcggatttggtcgccaccgtatgggcaagggcttaatcatcggcgcggtgattttcatcgtgctcggtctgctggtgatgtccctgtggaacgccttgctcccggcgatcctgggcgtgaaggccatcggattctggcaggcgctgggcattctggtgctgagccgcattctgtttggcggcttaggtttccgccccgggatgtttggcgcgcaccgccgcatgcacgagcgctggatgaacatgacgcccgaacagcgtgaggcgtttattcagcagcgccgcgaagggttcggtcgccacggacgcggtcactgcggctggcacggtcatcgtgacgataagcgcgatgacgctacgccaaaagcgccggacgcggagtga

SEQ ID NO: 163904 - DNA, 240 bp, Enterobacter cloacae
atgggaaagcgcaagagtgctctggtttatgtcctgaccgtcattatttttttgcttattatccctgagatcattctgcgtgtatgcacgtccgagcaacttggccgtctcagcgacttcaccagtttaggtggtttgttaaatccactattatccttgctcatcttcctggcacttttgtcaatcatactggccgtcattgctattgcattggttaagcgacttcttcgtacgagatga

SEQ ID NO: 163905 - DNA, 1551 bp, Enterobacter cloacae
atgtcgttgaaaaagtcgtccctgattgtcctgttctcgctgcttttcttctttgttatcagcaccgtcaccagcgttggcatcatcattaaaagtaataattccctggataacgtcaacaaagagatccaggttgtgctgtccattattgaccccatcaaccacagccgtacgctgcgcgtgcgggtgatggagtatgtgaagatggtggaagcgggcaacgcggcggacggcgctgcaaagctgaccgccgtgaaagaggcgctgaccaaagcggaccacgcctttgcagcctttatggcgtcgccgcgcctgagcgatgaagcgtcgctggtcactgcctatcaggacgcctggcagaactaccgcaaccaggggctggcgccgctgatcgatgccgccgaggcgcacgatgtcgccaaatttaacgcgctcatcccggaagtctcccgcctcgaccgccagtacgagatcgttctcgaccaggtgctttccgtccaccagaaattcgccaaaagcctgaacgaagatgcgagcagtagcttcgtctccggcctggcgatcgttgctgctatcgccagcctgtttgtggtggtgattatcgccgttagcctgctgatgaagcgctttgtctttgcgccgatcaacctggcgcgcgagcactgcagccagattgcggcaggcaagctggacattccggtgccggtgaaggggagtacaggcaacgaaatcgaccatctgatgggctcgatggagcagatgcgtcaggcgctgctggcgaccatcgcccaggtgcgcgatgcgagttataccgtgacgcacgccgcccaggagattgcctccgggaatatcgacctcgcttcacgcaccgagcagcaggcttccgcattaacccagacggcggccagcatggaagagctgagcgcgacggtggcgaacaataccgataacgtgtatcaggccgggaagctggtgcaggacgcggtgaaaaatgcccacaccggtgaagcggtaacccgtgaagtcatcgacacgatgaataccatcgcggcgaactcgaagcgcatcgaagacatcaccagcgtgattaacagcatcgccttccagaccaacattctggcgctgaacgcggcggttgaagcggcgcgcgccggtacccagggccgcggctttgcggtggtggccagcgaagtgcgcactctggcgcagaaaagcgcggtggcggcgaaagatatcgaaagcctgatcgcgcagtcggtctccagcgtgaaaaacggtgcggagctggtgagccgctcgggcgaggtgattgacgcgatcatttcgtcggtgaacaaagtgaatacgctgatggagcagatctccgtcgcctctgaagagcagagccgcgggatcggccaggtcgggcaggcggtgaccgagatggatggcgtcacccagcagaacgccgcgctggtgcagcagtccgctgcggcagcggcctcgctggaagagcaggcgcagcagctttcacggagtatttcgagttttaggttgccggtgcaggcttga

SEQ ID NO: 163906 - DNA, 1008 bp, Enterobacter cloacae
gtgagaaaaacaaaacgcgtcaccattaaagacatcgcggagctggcgggtgtgtcaaaagccaccgccagcctggtactgaacggccgcagcaaagagcttcgcgtggcggaggagacgcgcgagcgcgtgctggcaattgcaaaagagcaccactatcagcccagcattcacgccaggtcgctgcgcgataaccgcagccacaccattggtctggtggtcccggagatcaccaactacggttttgccgtcttttctcacgagctggaaacgctatgccgcgaggcaggcgtgcagctgctgatctcctgcagcgatgaaaacccggggcaggagacggtggtggtgaacaacatggtggcgcgtcaggtggacgggctgattgtggcctccagcatgctcaacgacgcggactaccataagctgagcgagcagctgccggtggttctgtttgaccgtcacatcaacgacagcgcgctgccgctggtgatcaccgattccatcaccccgacgaccgaactggtggcggacattgcgcgccagcatccggatgaattctacttcctcggcggccagccccgtttatccccgacgcgcgatcgtcttgaaggctttaagcaaggcctgcgagaggccggcgtggtgctgcgccccgagtggatcattcacggcaactatcacccgagctccggatacgagatgtttgctgaactctgcgcccgcctggggcgtccgccgaaagcgctcttcgccgccgcctgcgggctgctggaaggggtgctgcgctatatgggccagcataacctgctgcaaagcgatatcaggttagccagttttgacgatcactatctctacgattcgctgacgatcccggtggataccatccgccaggataaccgacagctggcgtggcactgctttgatttgattagcaaactgatcgagggagaggctcctgaaccgttgcaacgcaagctggcggccaccctgcagcggcgctataagtga

SEQ ID NO: 163907 - DNA, 1407 bp, Enterobacter cloacae
atgacgttaccttcccgctggcctgcgatcctgcaggccgttatgacaggtcagccgcgggcgctggcggacagccattatccgcaatggcacgccgcgccggtgacggggctgatgaacgacccgaacggatttatctggtttgctggccgctatcacctgttctatcagtggaacccgctggactgcgagcaccgctttaagtgctgggggcactggagttctgcggacctggtgcactggcagcatgagccgctggcgctcatgcccgacgaggcgtatgaccgcaacggctgctactccggtagcgccgtcgataaccagggcgtactgaccctgtgctacaccggcaacgtcaagttcgatgacggcagccgcaccgcctggcagtgcctggccgtggagcagccggacgggaccttcaggaagctggggccggtgctggcgctgccggaaggctacaccggccacgtgcgcgacccgaaggtgtggcggcacgacggggactggtacatggtgctcggcgcgcaggatgtgcaaaagcgcggcaaggtgctgctctttaaatcagccgatttgcacgcctggacatcctgcggggagatcgccggtcacggggttaacggcctgtcggacgcgggctatatgtgggagtgtccggacctgttttccctcgacggaacgcacgtcctgatctgctgcccgcaggggctggcgcgcgagccgcatcgctacctcaatacctatccggccacctggatgagcggggcgtttgactatgcccgcgcgacgttcgatcacggcgagctgcacgagctggacgcggggtttgaattctacgccccgcaaaccacgctggcggaagatggacgccgcatcctgattggctggatgggcgtaccggacggggaagagatgcttcagcccacgcgggcgcacggctggatgcaccagatgacctgcccgcgagaattgcgcttccgcgacggcaggctctggcaaaccccggcgcgcgagctggcggcgctgcgtgaagatgagcagcactggcaggggcgcgccagcgacgcgcccgaactggacgcgacgcgtctggagtttgagctgagcgcatcgcaggtgaatgtcgattttggcggcgcgctgcgcctcacgctcgatgagcagggcgtgcgcctggagcgcgcgagcctgaaaaccggtgaaacattggcccgctactggcagggcgacgtccgttatttgcgcgtcctgtgcgaccgctccagcgtcgaaatcttcattaaccatggcgaaggggtaatgagcagccgctattttcctgaccatccggctcgggtgcgattcgaaggtgcgtccgatatcacattacgctactggtcgctgcgcgcctgcatgatagaatga

SEQ ID NO: 163908 - DNA, 1371 bp, Enterobacter cloacae
atggattttaatcaaatcgcccgcgagcttattccgctgctcggcggcaaggaaaacatcgccagcgcggcgcactgcgcaacgcgtcttcgtctggtgctggttgatgacacgctggcggatcagcaggccatcggcaaggttgacggcgtgaaaggctgcttccgtaacgccgggcagatgcaggtgatttttggcacgggcgtggtcaacaaggtgtacgccgcatttattcaggcggccgggattagcgaatccagcaaatcggaagccgcggatctggcggcgcgcaagctgaacccgttccagcgcattgcccgcttactctccaacatctttgtgccgatcattcccgcgattgtggcgtccggtctgctgatgggcctgctcggcatggtgaaaacctacggctgggtcaatgcggataacgccctctacatcatgctggacatgtgcagctcggcggcgtttatcattctgcctattctgattggctttaccgccgcgcgcgaatttggtggtaacccgtacctcggcgcgacgctgggcggcattctgacccacccggcgctgaccaacgcctggggcgtggcgtcgggcttccacaccatgaacttcttcggccttgagattgcgatgattggctatcagggcacggtattcccggtgctgctggccgtctggtttatgagcatcgtcgagaaaaacctgcgccgcgcgatcccggatgcgttagacctgatcctgacgccgttcctcaccgtcgtcatctccggctttatcgccttgctgattatcggcccggcggggcgcgctctgggggacggtatctcctttattctgagcacgctgatcgcacacgcgggctggctcgccgggctgctgttcggcggactttactcggtgattgtgatcaccggtattcaccacagcttccacgcgattgaagccgggctgctggggaatccgtcgattggcgttaacttcctgctgccgatctgggccatggcgaacgtggcgcagggtggcgcctgtctggcggtgtggttcaaaaccaaagatgccaaaatcaaagccattaccctgccgtcggcgttctctgcaatgctgggcatcaccgaagcggccatttttggtatcaacctgcgcttcgttaagccgtttatcgccgcgctgattggcggtgcggtgggcggggcctgggtggtctccgtgcacgtgtacatgaccgccgtcgggctgaccgcgattccggggatggccatcgtgcaggccagctcgctgctgaactatattatcggcatggtgattgccttcggcgtggcgtttaccgtctcactgctgctgaaatataaaacggattctgaataa

SEQ ID NO: 163909 - DNA, 1518 bp, Enterobacter cloacae
atgtataaaaaacgcagacttgccgtgatgataggcatgctggccggaagtacctctgtttttgcccagacggatatgtccagtattgaagcgcgtcttgccgcgatggagcagcgccttcaggacgcggaaacgcgcgcgcaggtggctgagaagcgcgctgcggcagcagaacaaaaaacgcagcagctggttgccgctcagcagcaggcgcaaacgacaacccaggaggtggcgcagcgcaccaccgcgctggagaagaaggcggatcagaccggtgggtttgagttccacggctatgcccgctctggcctgttgatgaacgatgccgcctcaagcagcaaaagcggcccttacctgacgccagccggtgaaaccggtggtgcggtggggcgtctgggtaacgaagccgacacctacgtcgagctgaacctggagcacaagcaaaccctggataacggggcgaccacgcgcttcaaggcgatgctggccgacggtcagagaacctataacgactggtcagccgataccagcgacctcaatattcgtcaggccttcgcggagctgggcaacctgcctgattttaccggcgcgctgaagggcagcaccttctgggcgggtaaacgcttcgaccgcgacaactttgacatccactggctggattccgacgtggtgttcctggccggtaccggcggcggcgtttacgacgtgaagtggaacgattcgctgcgcagcaacttctccatttacggccgcaacttcggcagcgtggagcagaccgacaacaacgttcagaactatatcctcagcatgaaccacttcgccggcccgttccagctgatggtgagcggcctgcgggcgaaggataacgacgaccgtaaagacactaacggcgatctgattaaaacggatgccgccaatcacggcgttcatgccctggtaggcttgcataatgagagcttctacggcctgcgtgaagggaccgccaaaacggcgctgctttatggtcacgggctgggtgcggaggtgaaaagcatcggctccgacggcgcgctgctgtctgaggcggatacctggcgcttcgcaagttacggtgtcacgccgatcggcggtggctggagcgttgcgcccgccgttctggcacagagcagtaaagatcgctacgtcaagggcgatagctatgagtgggtaacgctcaacacccgcctgatcaaagaggtcacccagaatttcgcgctggcgtttgagggaagctaccagtacatggatttaaacccggagggctataaggaccgcaacgccgtgaacggcagtttctacaagctgacctttgcgccgacgttaaaagcgagcaaaatcggcgatttcttcagccgtccggaactgcgcctgtttgccacctggatggactggagcagcaaactggataattacgccagcgatgatgcctttggcagcagcggcttcaacgctggcggggaatggaactttggggtccagatggaaacctggttttaa

SEQ ID NO: 163910 - DNA, 891 bp, Enterobacter cloacae
atgaagaaaatctgggtacttggcgatgcggtagtggatttgctgcccgatggagaaggtcgattactgcagtgtcccggcggcgcgccggcgaacgtcgcggtcggtattgcccggctgggcggccagagcgcctttatcggcagggttggcgacgatcctttcgggcgctttatggcgaaaacgctctcagacgagcgggtcgacgttaagtggatgcgtcttgacccggcgcaccgcacctcaacggtggtggtcgatctcgacgaccacggcgagcgctcgtttaccttcatggtgcgcccgagcgccgatctgtttctcgaacccgacgacctgccgacgttcagcgccggggagtggctgcacgtctgctccatcgccttaagcgccgagccgagccggactgcgacgtttcaggcgatggccgccattcgtgaggcgggcggttacgtcagcttcgaccccaatattcgcccggacctctggccggatgagaacgcactgcatggctgcctggagcaggccctgcaaagcgccgacgtggtgaaactttcggtagaagagctggcctttttcaccggcagcgcggaagtcaacgttggtctggaggtgctgatgcagcgctgcccggcgcgtctggtgctggtcactcagggaaaagcgggcgtaaccgcgtggcatgaaggtaccgtaaaacactacccggcaacgcctgtgcagtgcgtcgatacgaccggtgcgggcgatgcctttgtggcggggctgctctacgggctggccgccggacaggacctgacgccggttattgcgctcgcccagcgctgcggcgcgctggccaccaccgccaaaggggcgatgaccgcgttgccctggcagcacgacctgtaa

SEQ ID NO: 163911 - DNA, 1212 bp, Enterobacter cloacae
gtgctgacgacgctgatctaccgaagccacttgaatttatcccgcccgtccaccgaactgcgggagctggtggagcgcgccaggggccgcaacgtaaaactggacattaccggcgtcctccttgctaaaggcaacgacgttctgcagatcctcgaagggtcggaagagagtgtggtcaaactgttccataaaatccgcgaggacaagcggcacagcggggtagtagaactgctgcgggactatggtcctcgcagacgcttcgaaaacgtcggtatgctgctgttcgacctgcaaacgcagtcgccgaaagaggtgctgcagtcggtgctgcgctacagcaagctggacagctatctgacctccgacgatcgggtgttcaaatttattcagacctttataaccggtaaacgtccggccccgtcgggggcacgctacaccgcgaacaaatggacgctctcgaccgaagcgctaccctttggcgaacatctgggcctgattgccgggcaaacctgtcagtttgcgctgcagcctattgtcgagccctcggaagggaaaatcagctcccttgaggcgcttatccgcggcaacgacggcggcagcccggatcacttcttcagcaccgtcaatccggacaacgtctacgaagtcgatctccagacgaaagcctatgcctttgcgctggcggaaaagctgggcattggcagccataaaatcgcggtaaacctgctgcccatgtcgctggtgaatgtccctggcgcggtggaatttctggtcgatcagattaaaaaacatggccttcagccggagcaggtggtcattgaagtcactgaaaacgagatgatctccgggctcaaccagtttaacagcgctatcaagcagcttcgcggcgaggggattggcctggcgatcgatgattttggctcgggctatgccgggctttcgctgctgacccgcttccagccggacaaaattaaaatcgaccgtgagattgtcagcaacatccacctgagcggccccaaacaggcgattgtgcgctccatcatcagctgctgctccgatcttgaaatcaccctggtggccgaaggcatcgagaaaatcgaggagtggtgctggctcgaatcggccgggatccgccgctttcagggattcctgtttgcccggccgcagcttaatggcgtcggcgatatccactggccgcatctggtgcggtaa

SEQ ID NO: 163912 - DNA, 1482 bp, Enterobacter cloacae
atggcgaattggccctggcgagtcagcgtgcgcctggtggcgcttgcaaagaaaacagggatggtcgtggggatcgtcctggtcgtcctgctggcggtgcgggtgtatctttcgcagcaggggccggaactgcacccgtggcacacctggcgggcagatgagatgtccgtgcgcgagctggataacgccgatttcgccgggtacctcgcccgtgaaaaggcgattttcaccgatctggataacgcggtgacggcgaaaacagccggcgaggatcaaactccgttaaaccgctactaccgccagagcctggtgtggcccggccagtttgcccccgatgccaaccgctcctttgtgctgatgccagccgggaagccccgcggcgcggtggtgctgctgcacggcctgaccgattcgccttacagcgtcaggcaccttgccgtgaactatcagcagcgcggctttgtggccgtggtcccgcgtcttcccggacacggcaccgcgcccggcgcgctgacggacgtggactgggaaatgtggctggcagcgacgcggcttgccgtgcgggaagccacgcgcctgacggggaataacgtgccgctgcatctggtgggctactccaacggcggggcgctggcgatgaagtatgccctcgatgcgctggaagaccctgcgctgcgtaagcctcagcagatgatcctgctctcaccgatgatcggcgtgacgtcctttgcgcggttcgccggattcgccgggctacctgcgctgttgccgccgtttgccaaagcggcctggctgaatatctccccggaatataatccgtataaatacaactcgttcccggtgaacgccgcccgccagtcgtggctgctgacgaaggccctgcaggagcagattggccgtgaggcgcgggaaaacaggctggcgaatttgccgccggtgctggcgttccagtcggtgatggactccacggtcagtacccgcgcggtggtcagcggcctgtttgaccagcttccggcaaacggcagcgagctggtagtgtttgatatcaaccaggcggcgagcttccgtccactctttaaaccgtcgtcctggacggccaccacggcgctgctgccggtcgtacagaggcgttacggtgtcacgattatcaccaatgccggcgagcacagtttctcgacggtggcgaaaatcacgccggcaggcagcacgcaggagacggtcgtgccgcttgcccagtcctggccgcaggatgtttattccctgtcgcacgttgcggtgccgttcccgccggatgacgatctctatggtcgtgaaccacgcgtgaaaaaccgatatggcatcagcctggggacgattgcgctgtggggagagacgtccgtgttgagcgtcgggaaagaggcgcttatgcgggtcacctcgaacccgttctacgactatatgcaggagaggattaacagccggatcggggaccagaaaaagtaa

SEQ ID NO: 163913 - DNA, 855 bp, Enterobacter cloacae
atgacgacgaaacccgagatgttgagccgtatcgaggcgaccttcagccagctcacgcccagcgaaaagcgggtcggaagctggctgctggcgcacgccgcgcaaatcccgtttgaaacggcggagagcgtcgggctggcaagcggaaccagcgggatcaccgtcggacgcttcctgcgcaagctgggatatcgcaacctggaggatgccaaaaagagcctgcgcgatccgtaccagccctggggcatgaacgagcgcctcgactcctggcagcagcagcgtcccctgcccaaccgccttcagcacgccctgtcgctggaagtggacgccatcacgcaggtgtatcagctggcgcaaacggacgccttccgccaggtagtgcaccatctggcccacgcggacgcggtttttgtgctggggatccagtccacgcgcgggatcgccaacgccttcttcagccaccttgaatacctccgcccgcgggtgagctatgccgaaggcgcttccggcagctgggtggaatccctgaactccgggtttgcgcacccttatgtcgtgctgaccgatacgcgcacctactccacaatggctcgccagtactgccgcgtcgcgagcgagaaaggcattccgctggccttaatcaccgacatctggtgcccgtgggcgcgggattacccgatggatttactgcaggtgaaaaccgataccggtcatttctgggattcacttgcccccgtgagctgtctgttcaacctgctgctgtcgggcgtggtggaagcgctgggtgatgcgctcccggcgcgcctggcagtaaaccgacaattacaacaagagtttggtcaattcgaacgctaa

SEQ ID NO: 163914 - DNA, 576 bp, Enterobacter cloacae
atgcccgtagagagtgaactgattgatgtggcgaagacgttccccacgctgcatatcgatctgaagtacgccaccgccgacaacatcacaggccgcccgatctatcaggaggcgcagtgcctgctgcataccgatgccgctaccgcgctggcaaaagccatcagcattgccacgctggccgggctgaagctggtggtctacgacgcctatcggccgcagcaggcgcaggcccagctgtgggaggcctgcccgaacccggaatatgtggtcgacgtggcgattggctctaaccacagccgcggcacggccatcgacgtcacgctgatggacgagcataacgtcgtgctggatatgggcgccggttttgacgaaatgcatgaccgctcgcatccgtatcacccttccgtgccgccccacgcccagcgcaaccgtctgctgttgaacgccatcatgttcggcggcggttttgtcgggatcggcagcgaatggtggcacttcgaactgccgaacgccgccagctacccgctgcttgatgaccgttttgcctgttttcccctgacgcacacccctctttaa

SEQ ID NO: 163915 - DNA, 1533 bp, Enterobacter cloacae
atgaaaacatcgcttctctcgaccgtcattgccgccacgctggccctgagcgccccgctggcgctggctgccgtcccgaaagacatgctggcgatcggtaaagccgccgacccgcaaacgctcgacccggccatcaccatcgataacaacgactggaccgtcacctatccgtcctaccagcgtctggtcaaatacaagccaggctctaccgaggtggaaggcgatctgtcgacgggctggaaggcgtccgacgaccagaaagagtggaccttcaccctggcggataacgccaaattctccgacggcacgccggtcaccgccgaggcggtcaaactctcctttgagcgcctgctgaagctcggccaggggccgtctgaggccttcccgaaagatctgaaagtggaggccgttgatgagcacacggtgaaattcaccctcagccagccgttcgcgcctttcctctacaccctggcaaacgacggggcgtccatcattaacccggcggtgctgaaggccaatgccgcggattacgcgcgcggttttctggcgcaaaacaccgccggttccgggccgtttatgctgaagagctggcagaaaggccagcagctggtgctggtgcctaacccgcactggtcgggcgacaagccgcacttcaagcgcgtctcggtgaaaattatcggtgagagcgcgtcgcgccgtctgcagctttcccgcggtgacctggacattgccgactccctgccggtcgatcagctgtcggccctgaagcaggaagggaaagtcgccgtcgccgaatacccgtctctgcgcgtcacctacctctacctcaacaacagcaaagcgccgctcaatcaggtcgatttacgccgcgcggtctcctgggcgacggactatgaggggatggtgaaaggtattctgagcggcaacggcaagcagatgcgcggcccgatcccggaaggcatgtggggatttgacgcctcggcaatgcagtacagcctcgacgaggccaaagccaaagcggccctggagaaggtcaaagacaagcccgccagcctgaccttcctctactcggacaacgatccaaactgggagcctatcgccctttcgactcaggccagcctcggcaagatcggcattaacgtcaagctggagaaactggccaacgccaccatgcgcgaccgcgtcggcaaaggcgattacgacatcgccatcggcaactggagcccggattttgccgacccgtacatgtttatgaactactggttcgaatcggacaagaaaggtctgccgggcaaccgttcgttctatgagaacaaagaggtcgattccctgctgcaggccgcgctgaaaaccaccgaccaggcggaacgcaccaaagattaccagcaggcgcaaaaggtggtcatcgacgaggcggcctacgtttatctgttccagaagaactaccagctggcgatgaacaaagaggtcaaaggcttcacctttaatccgatgctcgagcaggtgtttaacatcgccaccatgagcaagtaa

SEQ ID NO: 163916 - DNA, 1023 bp, Enterobacter cloacae
atgacgttctggagcatcgtgcgccagcgctgctgggggttactcctggtggtggccggtgtctgtattatcacttttattatttcacacctgatccccggcgatccggcccgtctgctggccggcgaccgcgccagcgacgacatcgtgcagaacattcgccagcagctggggctggatcagccgctctacgttcagtttggtcgctacgtggacgccctggtccacggtgatttaggcacctctatccgtaccggacgcccggttgcggaagacctgaaggcctttttccccgccacgctggagctggccttttgttccctcctgctggcgctggtcatcggcgtgccgctgggaattttatcggcggtgtaccgcaaccgctggctggatcacctggtgcgtttgatggcgatgaccgggatctccaccccggccttctggcttgggctgggcgtcattgtgctgttctacgggcacctgcaaatcctgccgggcggcggcaggctggacgactggctcgatccgccgacgcacgtcaccggcttttatctgctggacgcgctgctggaaggcaacggcgaggtctttttcaatgcgctgcagcacctgattttaccctcgctgacgctggcattcgtgcatctcggcatcgtggcgcgtcaggtccgttccgcgatgctggagcagcttagcgaagactacatccgcacggcacgcgccagcggcctgcccggctggtatatcgtcctgcgctacgccctgccgaatgcgatgatcccgtcgattaccgtgctcgggctggcgctgggggatctgctttacggggccgtgctgaccgaaaccgtctttgcctggccgggcatgggcgcctgggtggtgacgtccattcaggcgctcgatttccccgcggtgatgggctttgccgtcgtcgtttcgctggcctacgtgctggttaatctggtggtcgatctgctttacctgtggattgacccgcgaatcgggcgcggaggtgccgaatga

SEQ ID NO: 163917 - DNA, 894 bp, Enterobacter cloacae
atgatgttaacgcaggaaacgcccgtcccggtgaaaaccgccagacaacgcatcaactgggcaaagctgttctggatgctgcgccaaagcccgctcacgatcgttggcggcgtcattatgctggtgatgcttttcattatggtggccgcaccgtggatcgcgccgcacgacccgaacgcgctggatctgaccgcgcgcctgcaggcgccgtccgcgcagcactggtttggtaccgacgaggtgggccgcgatctgttcagccgggtgctggcgggcagccagcagtccattaccgccgggctggcggtggtggtaattgcgggcggcatcggttcgctgctgggctgtctgtccggcgtgctgggcgggcgcggcgacgccgtcatcatgcgggtgatggacattatgctctcgataccttccctggtgctgaccatggcgctggccgccgcgctcgggccaagcctgtttaacgccatgctggcgattgcgattgtccgcattccgttttacgtccgcctggcgcgcggccaaaccctggtggtgcgccagtttacctacgtgcaggccgcccgcacctttggcgcctcccgctggcatgtgatcagctggcatatcctgcgcaacgccctgccgccgctgatcgtgcaggcgtcgctggacatcggcagcgccatcctgatggccgccacgctggggtttattggcctgggggcgcaacagccgaccgccgaatggggcgcgatggtggccgtcggccgtaactacgttctggaccagtggtggtactgcgcgtttcccggagcggcgattttgattaccgccgtgggctttaacctgtttggggatggcatccgcgatctgctggatccgaagtcaggaggtaaacagtga

SEQ ID NO: 163918 - DNA, 987 bp, Enterobacter cloacae
atgaccgatccggttctcaagattgaagacctgcatctgagcttcccgattttccgcggcgaggtccacgcgctgaaccacgtctcgctggagatcggcaggggtgaaattgtcggcgtggtgggcgaatccggttcgggtaaatccgtgaccgccatgctcgccatgcgtctgctgccggaaggcagctaccgcattcatcatggtcaggtgaaattactcggcgaaaatgtcctgagggcgtccgagaaacagcttcgccagtggcgcggcgcaaaggtcgcgatgatttttcaggagcccatgaccgccctcaacccgacgcggcggattggcaaacagatggtcgaggtgatccgccagcatcaaccgctttcccggcgtaaggcgcagcagaaggcgattaccctgctggaagagatgcaaatcccggacgcgaaagcggtcatggcgcgctatccgtttgaactctccggcggcatgcgccagcgggtgatgattgcccttgccttctcctgcgagccggagctgatcgtcgccgacgaaccaaccacggcgctggacgtcaccgttcagctgcaggtgctgcgcctgctgaagcacaaggcgcgggccagcggcacctcggtgctgtttatcagccacgatatggccgtggtgtcccagctctgcgacagaatgtacgtgatgtatgcgggcagcgtgatcgagagcggcaccacgcaaacgctgatccaccagcccgtgcatccctattctattggcctgctgcagtgcgcgccggaaaacggccagccgcgcgccccgcttcccgccatccccggcacggtgcccaacctcagccagcttccgcagggatgcgcattccgcgagcgctgctttgccgccggggcgaaatgcagcgaaacgccgcgcttagcgcccactggcgcagagggccaacaggccgcctgctggtatccacaacgggagaaagcccatgtctga

SEQ ID NO: 163919 - DNA, 930 bp, Enterobacter cloacae
atgtctgatgtactgctggaactggatagcgtgcacgtgaactttgcggcgcgcaaaaactggctgggtcgcgtgacggaacgggtccatgcgctcaacgggctcgaccttgagatccgtcggggagaaacgctcggcatcgtcggggaatccggctgtgggaaaagcacgctcgcccagctgctgatgggcatgcttaagcccagcaccggcgcctgccagcgggcgcaccacgcgggcggcatgcagatggtgtttcaggatccgctctcctcgcttaacccgcgcctgccggtctggcgaatcatcaccgagccggtgtgggtgcaaaagcgcagcagcgagcgcgaccgccgccagctggctgaaaacctggcgctgcaggtgggaattcgaccggaatatctcgaccggcttccgcacgccttctccggcgggcagcgccagcgcattgccatcgcccgggcgctctcgtccgatccggatatcatcgtgctcgatgaacccaccagcgcgctggatatttccgtgcaggcgcagatcctcaacctgctggtgacccttcaacagcagcgtaatctgacctacgtgttgatctcgcataacgtctcggtggtccggcacatgagcgaccgcgtggcggtgatgtaccttgggcagattgtggagctgggcagcgccgcgcaggtgcttggcgagccgcgccatccttacacccgcctgctgctcgattcggttccgcgcaccggtgaaccgctggatgaaacgctggccttacgcaaaacggagcttcccggcaaccgccgtctgcccgaaggctgttttttccgcgaccgatgcccgatggccgcgcaggggtgcgagcgtcctcagccgttacagccctctcgcgagggccgtgacgtccgctgctggcgcagtctgggttag

SEQ ID NO: 163920 - DNA, 750 bp, Enterobacter cloacae
atgaacacgactctctcaggaaaaatcgcactggtcaccggcggcagcaccggcatcggtcttgccacggcgcaggagctggctgcacagggcgcgaaggtgtacatcaccggacgtcgtcaggccgagctggacgcggcggtggctgaaattgcttcaacggcagtgggcattagcgctgacgtgtcaaaactggcggacctggacgaggtctatgcccggatagccaaagaagaaggccgcctcgatattctgttcgccaatgcgggtggcggcgatatgctgccgctgggcgcgataaccgaagagcagtttgaccggattttcggcactaacgtccgcggggtgctgttcacggtgcagaaggcgctgccgctgctctccgccggatcctcgattattctgaccggctcgacggtgtccattaaggggacggcaaactttagcgtctacagcgccagcaaggccgccgtgcgtaactttgcccgctcctgggcgctggatttgcagggccgcgggatccgcgtcaacgtggtaagcccgggcccaatcaaaacgcctggcctcggcgacctcgtgccggaagaacaccgccaggggctgtacgacgcgctggccgctcaggtgccgctcggccgtttaggcgcgccgggtgaggtgggtaaagcggtggcgtttctggcctccgatgcggccagctttattaacgccaccgagctgttcgtggacggcggcatggcgcaaatctaa

SEQ ID NO: 163921 - DNA, 906 bp, Enterobacter cloacae
atggatcagctcatggcgatgcgcgcctttacccgggtggtggaaaccggcagctttacccgcgcggcggactcactgaacatgccgatcgccacgctgagcaagctggtgaaatcgcttgagacgcatctggagatacgcctcctgcaccggacgactcgccgggtagtcgcgacgccggaagggatggaatactatgaaaaagcgctcagggtcttgatagatatcgaagatatcgacaccgcgtttcgcgtttcccgcgcgacgcccaaagggcatttgcgggttgacgtgggcggctccaccgcccgggacgtgctcatccccctgctgccggactttatgcggcgctacccggatatccgcatcgaccttggcgtggccgatcgtccggtggatctgatcggcggtaacgtagactgcgtgatccgcggcggcccgctggacgattcgacccttatcgctcgccatattggtaacgccgaaatggtgacctgcgcgacgccgggctacctgaaaaaccatggcgttccagcctatccacaggagctgtgcaacggccacaagctcattagctacctctcgcccgtcaccgggcgggcgtttccctttcgcttcaggcggcatggcgaggcgatggaaatcaatatcccccattatctcggcataaatgaaagtaatgcccacctggcggcggccgtggcaggattggggatcgtgcagacgtttgagtattcggcaaagccgtatttgcaggcgggaacgctggcggcgatcctgagcgactggcgccctgccgcgtacccgtttcacgtggtatacccgcagaaccgccatctgacgcaccgtctgaaggtgtttattgcctggctggcggaggtgtttcccgccgcgctgaagggatag

SEQ ID NO: 163922 - DNA, 429 bp, Enterobacter cloacae
atgactattcataagcacggttcggcacactggtctggcgacattaagcgcggtaaaggaacggtttccaccgagagcggcgttctcaatcaacagccttatggctttaatacccgttttgagggtgaaaaggggaccaaccccgaagagctgatcggcgcggcacatgcggcctgcttctcgatggcgctgtcgctgatgctcggcgaagcgggctataccgccgacgccattgataccaccgcggatgtctccctcgataaaacggacggcggttttgccatcaccaaggttgccctgaagagcaaggtgaccgttcccggcatcgcccctcagcagttcgacggtattattcagaaagccaaagcgggctgcccggtttcgcagctactgaaagccgaaattacgctggactatacgcttaactaa

SEQ ID NO: 163923 - DNA, 960 bp, Enterobacter cloacae
atggcgctaaaaatcaggatggccgttgcgatcgctaccctcgctctatcgtggtctttgcaggcgaaaacgcccgagaactttatctataccagctccggcgagctcgacgcggcgttcccgctcgttacgcgaagcgatatcggcggcgtacagatcgtctacaactggcgcgcgcttgagcctgagaaggatcgctacgatttctcgcgcattgaacgggatctcgcgcgtcttaaggctgccaggaaaaagctcttcatccagattcaggaccgtttctttgaggcggacgcccgctacgtgccggactatctgatgcacgataagcaatatggtggcgggattgcgccgcagttcgataaccccggcgaaggcaagccggtcggttcaggctgggtggcgcgtcagtgggatcccgcggtgagccagcgctaccaggcgctgctggccgccctcgcgaaacgctttgatggcgaggtatatggcgtaaacctgcctgaaaccgccatcgatcttgacgaaaaaaatccgcccgccggatttacctgcgacagttattttgcgggagaaatggaaaacctggcctttgcgcgcaaggcttttcagaaatcacacgtggtgcaatacgtgaacttctggccgtgcgaatgggataatgaccgcaactacatggggcgtctttttgcgtatgccagcgccaacaatgtcggcctcggtgggccggacattgttcccaaccgcaaggcgcatatgaagaatgcctatcctttcttccataaaaataaacagacgctgccgcttatcgccatggcggttcaggaaccgaccctgacctataagaaccctgagaccggcaagcccttcaccaaagcagaatttgatcggttcgcggaaaattatctcggggcggatattattttctggagcacagcctccccctggctaaaggctaagtaa

SEQ ID NO: 163924 - DNA, 876 bp, Enterobacter cloacae
atggatcgcgtgattgccgctcaggtttacaaccgaatatgcgagctgggaagtttgagcgcggcggcccgggcgctgggtatttcccgcccaatggtgagccgctaccttgaacagatggagaaatgggcgggcacgcggctggtaaaccgctccacgcgcaagctgacgctgaccgcggcaggcgaaaaggtgctgcaaaaaacgcggacgctctcgcagatctcgcaggaaattgaaggccagtcggaaaaagatctcccgtctggcaccctgcgggtggcctgcgcgcactttaccgccatgcacctgattgcgccggtcctgcccggtctgctctcgcgctacccgcagctgcgcatcgaactggatgtgaacaaccatccggtcagcctggtgggagagcgcattgacgtcgccgtacgcattaccgataaccctgaacccggcatgattgcccgtcggctgggggagtgtcgctcggtcctttgcgcctcgccggactatctggcgcagcacggcacgcctggcagccccgaagaactagcccggcacaactgcctgcactacagcttttttgccgggcagtcctggcacttcctgacgccggagggcgaaagcctgagcgtggccgtcagcggcaacctaagcgccagcatctcttcgctgctgatggacgcggcgattaagcactgcggtatcgccatgctgccggagcgtgaagcgcgtgccgcgctggagcagggatggctggtgccggtaccggcggcgctggagccgaagccgctggccatccatggtatttatcagtcccgggaataccagcctgccgcgctgcgggcgttccttgatgagctggcccgctatctggcatga

SEQ ID NO: 163925 - DNA, 852 bp, Enterobacter cloacae
atgaaattcactcaccttgccctgctttccacccttttcacgccggctgtttttgccgcgccgttaagcattgatacctataacccgcaggagaaaggcattttcgcggtctcctccacgctggtctccggcccgaaagaggcggtgctgtttgacgcgcagttcagcgtgaaggatggcgaagcgctggtagagaaaattcgtcaaagcggtaagactctgaacaagattgtgatcacctccggcgatccggatttctattttggcctgcagccgctggtcaaagccttcccgaacgccaaagtggtggccacgcagcacgtggttgatcacatcaaggccactaaagacgccaagctcgccttctggggtccgcagatgaaagacggcgcgccaacggagctggtcgtcccgcaggttctcgcctccaccacgtttatggttgacggggagaagatcgacatcgaacagcctgacagctatgcggcctatgtatggatcccgtccgcaaagaccatcctcggcggcactggcgtagcctgggggattcacgtctggacggcggacacccagacagcggaaagccgtaagcagtggcaggaaacgctggtgaacatggcggcgcacaaacccgagcgcgtgatcccgggtcactatctgggtaccccgccagccgggacgggtgcgattgattttacccgtgactatctccagcgctttgaaaaggccttgtccgttcataaagattctgcgggcgtcatcagcaccctgaaaaaacagtatccgaatctggctgaagagagctcgctggaattaagcgctaaggtgaataccggcgaaatgaagtggtaa

SEQ ID NO: 163926 - DNA, 216 bp, Enterobacter cloacae
atgtttacttattacccggcaaataccgcagcagcacaacctgaactcgttaacgcgattgcacagggtcttcacgccgagcacggtgctgtgactgaagatgacattttgatggaactcaccaggtgggtggaatccacagataatgacatcctcagtgacatctaccagcagaccattaactacgtcgtcagcgggcaaaacgcacccttgtaa

SEQ ID NO: 163927 - DNA, 138 bp, Enterobacter cloacae
atgaaatcgaaccgtcaggcacgccatattctgggactgaactacaagctttctaatcagcgcaaagtggtgattgaaggcgaccacgaaacccaagtcactcacgccaccggcagaaaacgccacgccggcaagtaa

SEQ ID NO: 163928 - DNA, 1698 bp, Enterobacter cloacae
atggacaacaaactgaaaaaacatcgttccttatacatcccatacgccggaccggttttactcgaattccccctgctcaacaaaggcagcgccttcagcatggaagagcgcagcagctttaacctgctgggtctactgcctgaagtggttgaaaccattgaagaacaggcagagcgcgcgtggatccagtaccagggtttcaaaactgaaatcgacaaacacatctacctgcgcaacattcaggacaccaacgaaaccctcttctatcgcctggtacaaaaccatcttgaagagatgatgccggtgatctacaccccgacggtgggtgccgcctgcgagcgtttctcagagatctaccgccgctcccgcggggtattcatctcttatcagaaccgtcacaacatggacgatattctgcagaacgtgccgaaccacaatatcaaagtaattgtggtgaccgacggcgaacgtattcttggcctcggcgaccagggcattggcgggatggggatccccatcggtaaactctctctgtataccgcctgcggcgggatcagcccggcgtataccctgccggtggtgctggacgtcggcaccaacaaccagcagttgctcaacgacccgctctatatgggctggcgccatccgcgtattaccgacgacgagtactatcagtttgtcgacgacttcatccaggccgtgaagcaccgctggccggacgtgctgctgcagtttgaagactttgcgcagaaaaacgcgatgccgctgctgaaccgctatcgcgatgagatctgctcctttaacgacgatatccagggcaccgcggccgtgacggtgggtacgctcatcgccgccagccgtgcggcgggaagccagctgagctatcagaaaatcgtcttcctgggcgcaggctccgcgggctgcggtattgccgagcagattatcgcccagacgcagcgcgaaggcttaagcgaagagctggcccgctcccgcgtctttatggtggaccgtttcggcctgctgaccgacggcatgccgaacctgctgccgttccagaccaagctggtgcagaaacgcgaaaacctgaaaaactgggataccgacaacgaagtcctttccctgctggacgtggtgcgcaacgtgaagccggatattctgattggcgtttccgggcaaaccggtctcttcaccgaagagattattcgcgagatgcacaagcactgcgaacgccctatcgtgatgccgctgtctaacccgacgtcccgcgtggaggcgacgccgcaggacatcatcgcctggaccgaaggtaatgcgctggtggccaccggcagcccgttcgatccggtggtgtggaaggataaaacctatccgattgcccagtgcaacaactcatacatcttcccgggcattggtttgggcgtgatagcctccggcgcgtcccgcatcaccgacgaaatgctgatgtccgcgagcgagaccctggcgggccactcgccgctggtcaacgacggcgaaggtctggttctgcccgagctgaaggacattcacaaggtgtcgcgcgctatcgcgtttgcagtgggtaaaatggcgcagcagcagggcgtggcggtgaaaacctctgccgacgcgctgcagcaggccatcgacgacaacttctggaagcctgaataccgcagctatcgccgtacgtcgatttga

SEQ ID NO: 163929 - DNA, 522 bp, Enterobacter cloacae
atggaaaatataagttttcaagatattgataaatcagttgaaattttaaaaaacaatatgattaaatatcattataatattgcaacaccgcttcctcaagaaatacaggaatttattcaaagcgacgtgcctcccgcagactggaatgaaataaagaaaaatatacacaaagacataaaaacattatttgacgaagtggaggaggttaaatatttttatacaaaaattgatggtttagaatttaatgcagcgacgatatatgggttcagtcagattgctgatggggaaatgctgtggtcaaatatctatacaatgaacttttataatagagataatgaaatattcattgatccggacttaaaagataacattgttattggtgaagatagtatgtcatactttttatataatatggaatgtaaaacctttgaaattagagataagattgcccctggcgttctagaatcattcattgaattcaacggcattctgaagtatataattagaacgacagaactttga

SEQ ID NO: 163930 - DNA, 1146 bp, Enterobacter cloacae
atgttcagattatgtgagatctatgactttgagcgagatgctactcttttggacttcgaaaatatagtgagtccaaagcggggcttggaattggcatgttattactatgtgttagactacagcgcgtataagtcaaggttattttttgatatacctaatagaaaatggaatggcgataggcattttggtgagaaatttaaaaggcaacctttagcgtactatgatccgatttatgatgatttagaaagggagttgttgctcggtcgaatagttgctgtagatacagataaacattggacttggtataataaccctttttcttttgatgataacggtgaaatagtttacgagccgtttatgcctggttcttgggaatgttcattccgtgattcagtgttgagcgcatatcatatagtgctggagcgtaatcaacgtatcaaaccacgtcctacacagaaaatacagtatggcgcacctggatatgttgaacctgagcaacatgctcagtcagcaaagaccataaataacaagaatgtagggcgtctgttagccgctggcggcgtttataatggtaacgttgagggatttagaaagactgctgaacaactgggtggagaagctttagaaggttataaaggcgttatgaccgatactaacattggaatgggtatagctgctgcatcaattcttttggtaaaaaatcctgcgatggctgaagaactaacaggatttttagggaaaacaaaaaatacaaaagtcttcttacagaatgtaaaagttgaacaaataaattacttacgcagaccacgtgatgaatatttatcacttagaaaagaatttgataatacagtcagaaaaaattttatgaaaagcttatcagtcgaaccaggtattgatcattactttaatacttctcaaattgaattaatggcacatggaggtgttcctgattcctggcaggttcatcataaattacctcttgatgatgggggcgacaacagttttggaaatttgatactaatacaaacaaagccatatcataatgcattaactggggcacaaaaatccgttactaaagatttgatgccaggtcaaagcattgatacattatggcctatgccaaatggaacatttttcagtaaatag

SEQ ID NO: 163931 - DNA, 1710 bp, Enterobacter cloacae
atgagcactttactcactgcacaatctttacgcgttgatacggcgtttggcacgctcttcgactcactctcctttacgctgaaaaaaggcgaccgcattggcctgctgggcgataacggctgcggtaaaagtacgctgctgaaggtgctggacggcacggattcccctgctgccggaacggtagcgctggccggacactgcctgatggcgcgcgtggagcaacatctcccggacgctattttaccgctcaccatgctggatgccgtcctggcccagctgcccgtagcggaacgggacagcctgcgctggaaagccgaaacgctgctggcaggcatgggctttacgccgcaggatatggcgctgcactccgccacgctgagcggcgggcagcacacccgcctgctgctggcccgggcgctgattcacgagccggacctgctcctgctggatgaacccagcaaccaccttgacctgccgaccatgctctggctggagcactttttacagacctggtcgggcagctttgtgctggtctcgcatgacagacagctgctggatgccgtcaccaacggcagctggatcctgcgcgataaaacgctgcactactttgcccttccctgcacggcggcacgtcaggcgctggaagccaaagatgagaccgacgcgcagcgccacaaggcggagcaaaaggagatcgaccgcgtgaccgccagcgccaaacgtctggcgacctggggtaaggtttacgataacgaagacctggcccgcaaagccaaacagatggaaaaacaggtcgaacggctcaaagagagtcagaccgcgctcacggcgggcagcccgtggacattaaccctgcgcggcgacgcgctgcgggctgaccgtctgctggagatggaaaacctcggcgtcccgcccgcgcctgggctaccgccgctgtttaacatcgaaacggcgcggctgaaaagcggcgatcgcgtggcgattgtcggtcgtaacggctgcggtaaatcgtcgttgatgaagcttatctggcgacatttttccgatgaaccggcggacagcgggctgaaaatccatccgcgcgtctcgccgggctactacgaccagacgctgcatcagctgccggatgacgccacgctgctcgacgcgctggagccttttgcaccggatccgcagaaccgcaaaatggccctgataagcgccggtttcccatgggcgcgtcacggacaaacggtcagcacgctcagcggcggcgaacgctcgcgcctgctgttcgtgggcctgacgcttgcccgctacagcctgctgatgctggatgagcccaccaaccacctggacatggaaggcaaagaggcgctggcgcaaaccctccaacagttcgaaggcggcgtgctgctggtcagccatgaccgtcagttaattagccaaagctgcaaccgtttctggctaattgaggacggtacgctgagcgaatggcacgatgcagaagcggtgtttgagcggctgcgtgaacgcgcggggctggtgacagccactgcgcccgctgtcgccgcgacggttcacccctcgccgcatgacgatctgcttgagcgcctcgtcgcgctggaaacgctgctggaagacgatctggcgcgcaagccgaagcatcaaaagccgcagctccaggcgcaatggcgtaaagagattgaggagatagaagcccagctgtaa

SEQ ID NO: 163932 - DNA, 1620 bp, Enterobacter cloacae
atgcaaaccccatttcgtctgccgctgctgacggcgctgattctgacgaccaccgccgcctggtccgcggatgcgcccgttaaaggcggcacgctgatttatctggagcaacaggcgcacaccaacctctatccgcctgccggcggcttttacccgaacggcggcattctgaaccagattaccgacaaactgacgtggcagaacccaaagacgctgcaggtcgaaccgtgggtggccgaaagctggaccaccaacgccgataaaaccgaatacaccttcaaaattcgcccggggatcaccttctccgacggcacgccgctggacgccaacgccgtagcaaaaaactttgatacctacggcttaggtaacaaggcgcagcgcctgccggtgtcagaagtgatcaataactacgatcgcagcgaagtggtcgacccgctgaccgtgaagttctacttcaaaaaaccgtcaccggggttcctgcagggcaccgccaccatcgggtcgggcctggtctcgctcagcacgctggagcgcaactttgaagagctgggtgacgcccggcatatcattggctccggcccgtttgtggtgaaggacgagaagctggggcgcgaagtgacgctggaagcgcgaaaggactaccagtgggggcccaaaaatctggcgcaacaggggccagccaatctggacggcatcaagtttatcgtgactcaggaagacagcgtgcgcgtcggcgccctgctggccggtcaggccgactttattcgccaggtgcaggcgtatgacgaaaagcaggcgaccgatcagggctataagatctacgctgccccaacgcgcggggtgaacgacagcatcagcttccgcccggataacccgctggtctccgatattcgcgtgcgccaggcgctgctgcatgccaccaatgcaaaacaggtggttgagaccctcttctcggctaactatccgcaggcgaagtcggtgattgccgattccgccgctggctttgtcgatctcagcgacaaattgacctttgacccggctaaagctaaccagctgctggacgaggcgggctggaaagcgggcagcgacggcatccgcgccaaagatggccagcggctggcgctgacggtatatgaatccctgccgcagccgcaaaacaaagaggtgctgcagctggttgcccagcagtggcgacaggtgggcgtggcgctgagcgtgaaagccggtgacgcaggcagccgcacgctggataaccttgatccgctgaagaccccgttaaccgtctccgaagtgggccgcgccgatccggacgtggtgaagagcatgttctaccccgctaaccgcgacgccctgctgcaaaaaggcggctccagcgacaaggtcaaaagcttccgtgacgacaagctgaatgcgctgctggtgaatatctcctcagaggttgatccgcaaaaacgcctgcagctgaccggcgatgcccagcgctatctgctggataacgcctacgtcattccgattttcgaggagccgcaggtctttgccggtgcgccgtggctgaaaggcgtgaattttgaagcggtcggccgcccgtcgttctacggcgcgtggcttgagaaacactga

SEQ ID NO: 163933 - DNA, 945 bp, Enterobacter cloacae
atgcgccacgcacttcttcaacgctttgggcacgggctgctggtgctgtgggccgcctttaccctctcgttcgtgttgctccaggtgctgccgggcgacgcggtgctgattaaatttcagaacccggacctgggcttaagcccggcgcaaatcgaggagatgcgcgtggcctacggtgcggacagcccgctgtggcagcagtacggccacacgctgctggcgatgctgcgcggggatttcggctactcgttacaggcaggcgtgccggtcagcgagctgattgccagcaatctgccggataccctgagcctcgccctgcccgcctttttactcgcggttctgctggcgtttgcgctggcctttgcgtcgcgcctgccgggtctgcgctggctaagtaataccctccagtctctaccggtcctgtttatctccttaccgacgttctggctggggattgccctcatccagctcttttctttccagctgcggctgatcccggtgattaacccgacgccgctgcaggggctgatcctgccgatcgtgaccgtcgcgatcccgatctccgccccgctggcgcaaatcctgatgcgcagcctggaccaggtggcgacgcagccgtttgtcgccgtggcccgcgccaaagggctgagtgaaaccgccgtcctgtggcgccacgtcaccggcaacgcgctgctgccggtactcaatattgccgggctgctgctgggcgagctgattgccggagcgctaatcaccgaaaccgtatttggccgcagcgggctcgggcagctaacccagcaggcggtaaataaccaggacatcgccgtgcttcaggcggtggtgatgatttccgccctcggctttgtcctgatcaatctgctggtggacctgctgatgccgctgctggatccccgtctgcaaaccgttaccggaggtgcatcatga

SEQ ID NO: 163934 - DNA, 852 bp, Enterobacter cloacae
atgagcctggtcgattacgctgccgcggcgcgaaaacgcgttcccggctggcagggcgtcgcgtggcagccgggactgtggctggcgtgggcggtgattattctcgcggtttttgccgccgtggcgcccggcctgttaacccactacagcccgattgagggcatcgccggagcgcaacgtctggcgccgcaggcgggccactggctcggcaccgatcagcttggccgcgatgtttacacccgtattgtgtacggtgcgtcccactccctgagcgcggcgctcgctgccgtcacgatggggctggtggcaggcaccggcctgggggtcatcgccggggcgttcgccggacgcgtcgagtctttcctgatgcgttttgtcgacgtgctgttgtccattccgtctctgctgctctcgctgacggtcattattctgctcgggtttggcaccgttaatgccgcgattgccgtcggcgtggcctccattgccagcttcgcccgcctcgcgcgcggtgaagtggtgcgcatccgccatacggattatgtcgaggcggcgttcggcagcggcggaacgttcctggcggtgctgtggcgacacatcctgcccaacgccttaaccgccgtccttgcctttgccacgctacagtttggtcaggccattctggccctgtccacgctgagctttctcggctacggcaccccgccgcccgtaccggaatggggcttattgattgccgaagggcgtaactatctctctaccgcctggtggttaaccaccttccccggcgtggtcgtcatcgccgtcgtgcttgccaccaaccgtatcagccagcagttcagcggaggcctgaaatga

SEQ ID NO: 163935 - DNA, 1608 bp, Enterobacter cloacae
atgaccgtactctcggtagaaaacctgaccatcagctaccgtaccgcgcgccggtggcgcgaggtggtgcataacgtcagctttaccctcaggcgaggggaaatgctggccttcgtcggcgaatccggatccggcaaaacgaccacggcacaggcaatcattggcctgctggcggataacgcccggcgcgatgcgggaaaaatcctgctcaacggcgaggaaattagccggtggtcagcgaagcgtctcgatacccttcgcggggcgcgaatcagcctggttccgcaggatccgggtaattcactcaacccggtgaaaacgatcggcgcccaggtcggggaaattattcagctgcaccagaaggtgactcacgcccaacgcgacgagcaggtgctcgccctgctgaaaaaggtcggcctgagccaccccgaacaacgcatgatgcagtatccgcatcagctctccggcgggatgaaacagcgcgtgctgattgccatcgccattgccctgagcccggacgtcatcattgccgatgagcccaccagcgcgctggacgtgacggtgcaaaaacgcattctcgatctgctggatatcctgcgccgggaatcgggtactgccgttctgtttgtcacccacgatctggccctggccgcccagcgcgcggacaggctgctggtgtttcgcaacggtgaggttcaggagcacggcgacaccgccgatatcgtccgcacgccgcagcacgcctacacccgtcagctgctgagcgatcttcagggccagcgcctgaccatcgccccggtagccggtctcccgctcgcgtcaccggccattcgcgcccgcgccatcagcaaacggttctcgctgggtaaaggtcatcagctgcaggcgctggatcgggtgacgtttgacgtcaggcgcggcagcacgcacgcgctggtcggtgaatccggctcagggaaaaccaccctcgcccgtattttgctgggttttgaacaggcggacagcgggcaggtcattattgacgacatcgatgccaccgacctcagccgcgaggcccgccgtcagctgcgccagaagatccagtttgtttaccagaacccgttcgcctctctcgacccgcgtcagacgctgttcgagatcatcgaagagcccctgaagaacttttctcgcctcgccaaggcggagcgaaaggtacgggtggaaaccgtggcgcagcgggttgccctgcccgtcgaactcctgagccgcaccgcaagggagctttcaggcgggcagcgccagcgcatagccatcgcccgggcgctgatcctggagccgaccattctggtgctggacgaagccacctccgcgctggacgtcaccgtccaggcgcaaattctggcactgcttcagcagctgcagcagcagctgggattaacctacctgttcatcacgcacgatctctctaccgttcgccggatcgcccacagcgtcacggtgctgcgcagcggtcaggtggtcgaacacggtgacgtcgagaccttattcacgtcaccgcagaacgactatacccgcgagctgattgccgccattccccatttttcacccgctacggaggagttcgtatga

SEQ ID NO: 163936 - DNA, 990 bp, Enterobacter cloacae
atgacgcgaaaacgcctgggatttttcacccgcctgcttgacgacaccacgccgaaagagcgctatcgtctggcaaccgaacagatccgccacgccgaacgccacggttttgacagcgcctggatcgcgcagcaccacttccatgagaatgaaggtggcctgccgtcgccgctgctgtttctggcccacgttgcggcgcataccgagaccattcggctggggacggccatcattaccctgccgatggaaaacccgctgcgcgtggcggaagatgcggcggtgctggatttactcgccgatggacgtctcgaagtcggttttggttcgggcggcacgccgacctctttcctgccgttcggactgacgtttgaacagcgcggcgcggcctttgctgaccatttgcatgtgatccagagcgcctggcgcggggattcgcttacccatccggataaccacctctacccgccagcgccacagctggttgacaggatctggattgccaccttttccgtcgacggcgccgttcgcgccgcgcgggccggacacggtttgatgctctcccgcacgcagccgcgtccggcagaccagttggatctcacgctcgacgcgatccagaacccgattgtggatgcctaccttgaggccctgcctgccggtatcgcaccgcgtattctggcctcccgtacggcattcgtcgccgacagcgatgactacgcgctgaaggttgcgacgccgggtctcaccagacaggcccagcagcatcgcgctgccggacacgcggttaaaggtgacaccgtcaccgattttcgtcgccagttcgacgcccacatcggttcgcccgagacggtgctgcgttcgctgcaggccgattccgttctccggcgcgccacggacatctcattccaggtccattcggtcgagcccacccatcgcgacaccctgcgctctatcgaactgatcgccgaacatattgccccccacatcctttga

SEQ ID NO: 163937 - DNA, 1092 bp, Enterobacter cloacae
atgtcattaagtcacgacattctcgccgagctggcggaaatcaaacccggttcccctctggcagaggcgcgcgccacgcgggacgccgccacgcgccacgcccagggcagctacgaaatcttatttacacagcaggatagcgattttgcgctggacgagcgcttcgccgtcgcggcaaaagtcgccaggtggcacaacgcggaggcgctggccgcgcactatgcggggtttggcctggcagacccgacctcagaccgtctgaccccggcgctcaatttcgcgcgcctgctgaccttctcccccgtcgaagccacgccgacatcgttaagggcgctgacccaggcgggttggagcaaggaaggcatcgtgacgctggcgcagcttatcgcctttgtcagcttccagagccgactgattgccgggctgcggctgctgaacgacaggcctgtcgccacaagcgatgcgccggtggcggcaggcgtctggcacacgaccgccaccacggccaccgggaaggcggctcccgtcgccttcacccagcaggagctgggctgggagccgtggatcgccgccaaaccgctggcggattttcgtgatgacgaggttgctatactggcgaagtttggccacaccgattccgactatttccgcctgctggggcgcaacctgccggtgcttgaacagcgcacgctaacggataaagggattttttacacgccgggggggttgccgcgcgccgaacgcgagctggcggcaacggtcgccagtaaaatcaacggctgcatttactgcgcatctgtccatgcgcggaaagccagccagctgtcaaaggatgacgcagcggtagaggccctgctggccgtgcgtccgggacaatccctgagcgaggggcaatctgcgcgctggcaggcggagattaattttgcggcagcgctgtcggttaccccgccggccgccacgccgctgcaccttgccgcgctggaaaaagaggggctggacaccttagcccagcttgatctggtgcagtccgccgcgttcttcgcctgggccaaccgcctgatgctgaccctgggcgagccctggctagcctga

SEQ ID NO: 163938 - DNA, 1176 bp, Enterobacter cloacae
atgaaaaagacaatattttcgttggcgcttggcacatttggcctgggcatggctgaatttggcatcatgggcgtgttaaccgagctggcgcatgacaccggtatttcgattccctccgccgggaatatgatctcgttttatgccttcggcgtggtgattggcgccccgattgtggcgctcttctccggcaagttctcgttaaaaaccacgctgctgtttctggtggcgatgtgcgctgttggcaatgccctgtttacgttttctacgtcttatttctggctggcgctggggcgcctgatttccggtttcccgcacggcgcgattttcggcgtcggggcgataatcctctccaaaattgcgccgccgggaaaagtgacggtcgcggtggccgggatgatcgccggaatgaccgtcgccaacctggtgggtgtgccgctcggcacctggctggggcaccagttcagctggcgttatacctttttcctgatagccctgttcgatgcgctggtgatcctctcggtgctgatctgggtgccggacattcatgacaaatcagaaattaaactgaccgagcagttccagttcctgaagaaaccggagccctggctgatttttgccgccaccatgtttggcaacgccggtgtattcgcgtggttcagcttcgttaagccgtttatggtcaacctttctggcttttctgaaggcatgatgacgatcatcatgatgctgatgggccttggcatggtgttgggcaatctgctgagcggcaagctctcggggcgctttagcccgctgcgcattgcggcgactaccgacatggtgattgtcgcctcgctgctgctgcttttcgccctgggcgaactgaaaacggcctcgctggtgatgggctttatctgctgcgccgggctgttcgcgctctctgcaccgctgcaaattttgcttctgcaaaatgcgaagggcggcgagatgctgggggcggccggagggcagatggcgtttaatctcggcagtgcgatcggggcgtactttggcgggatgatgattaccctcggctttagctggcgctacgtcacgctgcctgcggcgttactctcgttctcggccatgagtgcattactgatctacggttacctgcgtgccagacaggctcaggctaacgctcgcgcgctagcctga

SEQ ID NO: 163939 - DNA, 819 bp, Enterobacter cloacae
atgggaagcagaaagaaaacccctgtcgctgttgatgttgtatcgaatgcaccgcttaagaccaaagagtatgaaaaagagctccgccgcctgcacgtcgaactggttaagctccagcagtgggtcgtcgccaaagggttaaaagtgtgtattgtttttgaaggacgcgatggcgccggcaaaggcggcaccattaaagcgatcaccgagcgcgtcagcccgcgcgtgtttcgcgttgttgcgctccctgccccaacggaaaaagaaaaaagccagctctacttccagcgctatgtgccccacctgccttcggcgggtgaaatcgtgatcttcgatcgcagctggtataaccgcgcgggcgtggagcgggtgatgggtttctgcacggaagaacaggcagagaaatttttggacggcgcgccggtcatggaaaaagcgatggtcgatgccggcattatcctgctgaagtactggctggaggtaacgccgaaagagcaggagcgccgcctgcgcgaccgtattaacgatgggcgtaagatctggaagctgtcgccgatggatattaaatcctttaacctctgggacgagtacacccttgcgcgcgacgccatgtttgaagccaccgacaccgcctgggcgccgtggtttgtggcgcgttcagaggataaaaaacgcgtgcgcctgaatattatttcgcatctgctttcgcagatcccgtataaagaaattcacgtcgacaaggtggatttaccgaaacgcaaaatcggcaaggtcaaacccacgaaatacccgttccggtatgtggaagagcggttttga

SEQ ID NO: 163940 - DNA, 324 bp, Enterobacter cloacae
atgtgctttcagtttgacgtttaccgtaacccttcagagagatcacgggactaccagccttattttatgataattcaacatgactattatgatgatttatcaacaagactgattattccattaagttaccacaactatttacgtggcaatatcaacgccgcggcgccgttaatgaatattgattttcagcgatattttcttaacaccgctggcataacacatgtggagaaaaagaaactacataataaaaattttgtatgcaaccttcgcagcgcgagaagtaccgttatcgcggcgatagatgcactagtgaccaatacataa

SEQ ID NO: 163941 - DNA, 657 bp, Enterobacter cloacae
atgagtaagtcgaaaatgatagtgcgcaccaaatttgtcgatcgcgcctgtcactggacggtagtgatctgcttcttcctggtggcggtatcgggaatttcgttcttcttcccgacgctgcagtggctgaccgaaaccttcggtacgccgcagatggggcgcattctgcacccgttcttcggcgtgctgattttcgtggtgctgatgtttatgttcgtgcgcttcgttcatcacaatattccggacaagcaggatatcccctgggtgaaagggatcgttgaagtcctgaagggtaacgagcacaaagtcgcgaaggtggggaaatacaacgccggacagaagatgatgttctggaccatcatgagcatgatttttgtgctgctggtgaccggggtgatgatctggcgtccgtattttgcacactacttcccgatacaggtgattcgctacgcgctgctgatccacgcgacgtcggccatcattctgattcacgccatcctgatccatatgtatatggcgttctgggtgaaaggatcgattaaaggcatgattgaagggaaggtgagccgccgctgggcgcagaaacaccatccgcgctggtaccgtgatgtggaacggctggaagcgaaacaggaaagtacggaagggatgaagtaa

SEQ ID NO: 163942 - DNA, 885 bp, Enterobacter cloacae
atggcgatggaaacacaagacattattaaacgctccgcgaccaatcccataacgcccgcgccccgcgcgcgggactacaaggcagaggtcgccaagcttatcgacgtctcctcctgcgtgggctgtaaggcctgtcaggtggcctgttcggagtggaacgatattcgcgacgaggtagggcactgcgttggggtgtacgacaatccggcggatctgagtgccaaatcctggacggtgatgcgctttagcgaaaccgaccagaacggcaggctggagtggctgatccgcaaagacggctgcatgcactgtgaagatccgggctgcctgaaggcgtgcccgtctgccggggcaattattcagtatgccaacgggatcgtcgatttccagcaggacaactgcatcggctgcgggtactgcatcgcgggctgcccgtttaatatcccgcgcctcaataaagaggataaccgggtatacaaatgcaccctgtgcgtggaccgcgtcagcgtcgggcaggagcctgcctgcgtgaagacctgtccaaccggcgccattcacttcggcaccaaaaaagagatgctggacgtggcgcaggaacgcgtcgataagctcaaagcgcggggctacgacaaagcgggcgtttacaacccgcagggcgtgggcggcacgcacgtgatgtatgtgctgcaccatagcgaccagccggagctgtaccacaacctgccgaaggatccggcgatcgatacctccatcaacctgtggaaaggggcgctcaagccgctctccgcggcgggctttatcgccacctttgccgggctgatttatcactacatcggtatcgggccaaacaaagaggtggatgacgacgaggaggagcatcatgagtaa

SEQ ID NO: 163943 - DNA, 2412 bp, Enterobacter cloacae
atgaccaaccactgggttgatatcaaaaacgcgaacgtcgtcgtggtgatgggcggtaacgccgctgaagcccatccggtggggttccgctgggcgatggaagcgaaaaataacaacgatgcgacgcttatcgtcgtcgatccgcgctttacgcgtacggcatcggtggccgatatctatgcgccgatccgctccggtacggacattacgttcctgtccggcgtgctgctgtacctgatcgaaaacaacaaaattaacgcggaatacgttaagcactacaccaacgcgaacctgctggtgcgggatgattttgcctttgatgacgggctgttcagcggctatgacgctgaaaaacgccagtacgacaagtcctcgtggaactatcagttcgacgaaaacggctatgcgatgcgggatgaaaccctgacgcatccgcgctgcgtgtggaacctgctgaagcagcacgtttcccgctatacgccggacgtcgtggagaacatctgcggcacgccgaaagcggacttcctgaaggtgtgtgaagtgctggcctccaccagcgccgccgacagaaccaccacgttcctgtacgcgctgggctggacgcagcacaccgtgggcgcgcagaacatccgcaccatggcgatgatccagctgctgctcggcaacatgggcatggcaggcggcggcgtgaacgcgctgcgcggccactcaaacattcagggcctgaccgatctcggtctgctctccaccagcctgccgggctacctgacgctgccgtctgaaaagcaggccgatctgcaagcgtatcttgaggccaatacgccaaaagcgacgctgccggatcaggtgaactactggagcaactatccgaagttctacgtcagcctgatgaaatccttctacggcgatgcggcgcagaaggagaacgactggggctttgagtggctgccgaagtgggatcaggcttatgacgtcatcaagtatttcaacatgatggataagggcgacgtcacggggtatatctgccagggcttcaacccggtggcctccttcccggacaaaaacaaagtcgttcgcagcctgagcaagctgaagtacatggtcgttatcgatccgctggtgaccgagacctccaccttctggcagaaccacggggaatcgaacgatgtcgatccggcctcgattcagaccgaagtgttccgcctgccgtccacctgctttgcggaagaggacggctctattgccaactctggccgctggctgcagtggcactggaaaggccaggacgccccgggcgaagcgcgtaacgacggcgaaatcctggccgggatttaccaccgcctgcgcgaaatgtaccgcactgaaggcggcaaaggcgctgagccgctgctgaagatgagctggcactacaagcagccggatcgtcctgagtctgaggaagtcgcgaaagagaacaacggcgtggcgctggcggatctctacgacgccaacggcaatctggtggcgaagaaaggccagctgctgaacagcttcgcgctgctgcgtgacgacggtaccacggcatcatcctgctggatctacaccggcagctggacggagcagggtaaccagatggcgaatcgcgacaacgccgatccgtcaggcctgggcaacaccctgggctgggcatgggcgtggccgctgaaccgtcgcgtactctacaaccgcgcctccgccgacgtggacggcaagccgtgggatccgaaacggatgctgatccagtggaacgggacgaagtggaccgggaacgacatcccggactacagcaccgccgcgccgggcagcaacaccgggccgtttatcatgcagccggaagggctggggcgcctgtttgccctcaacaagctggcggaagggccgttcccggaacactacgagccgatggaaacgccgctcggcaccaacccgctgcacccgaacgtagtctccagcccggtggtgcggatctacgaagacgacgtgctgcgcctgggcaaaaaggacaagttcccgtacgtagggacgacctaccgcctgaccgagcatttccatacctggaccaagcacgcgcggcttaacgccatcgcgcagccggaacagtttgtggagataagcgaaacgctggcgaaagcgaagggcattgccaacggcgaccgcgtgaaggtgagcagcaagcgcggctttatccgcgcggtggcggtggtcacccgccgcctgcagtcgctgaacgtgcacggccagcaggtggaaaccgtcggtatcccgttgcactggggctttgaaggggtggcgcagaaaggctacatcgccaataccctgacgccaaacgtcggcgattccaactcgcaaacgccggagtataaagcgtttctggtcaacatcgagaaagcgtaa

SEQ ID NO: 163944 - DNA, 588 bp, Enterobacter cloacae
atggacgtcagccgcagacaattttttaaaatctgcgcgggcggtatggccggaacaacagccgcaatgctgggatttgctcccaaaatggcgctggctcaggcacgcaactataaactgctgcgcgccaaagagatccgtaacacctgcacatactgctccgtgggttgtgggcttttaatgtatagcctgggcgatggcgcgaagaacgccagagaagcgatttatcacattgaaggggatccggatcatccggtgagccgcggggcgttatgcccgaaaggggcggggctgctggactacgtccacagcgaaaaccgcctgcgctaccccgaataccgcgcgccgggctccgacaaatggcagcgtatctcctgggatgaggccttctcccgtattgcgaaattgatgaaagccgaccgcgacgccaactttattgaaaagaacgcgcagggcgtgacggtcaaccgctggctttccaccggcatgctgtgcgcctcggcggccagtaatgaaaccggcatgctgacgcaaaaatttgtgcgctcgctcggcatgctggcggtagacaaccaggcgcgcgtctga

SEQ ID NO: 163945 - DNA, 879 bp, Enterobacter cloacae
atggacagaaagagagcaacgcttattgggctggcggcaatactgttatggagcaccatggtcggccttattcgcagcgtgagtgagggattggggcctgttggcggtgccgcgatgatttacaccctcagcggattactgtgtctggtgacggtaggatttcctgatatccgacggttttctccccgctatcttattgccggcagcgttttatttgtcagctacgaaatatgtctggcgctgtcgctgggctatgccgccacgcgcgcgcaggcgattgaagtcggtatggtgaattacctctggccgagcctgacgatcgtatttgcgattttgttcaacgggcaaaaatctaccctgtgggtgatccccggcttgctcatttcgctgctgggcgtctgctgggtattgggtggcgaagagggattacaccttgaggaaataacccgcaatgtcgtttccagccctctcagctatgcgctggcgtttgccggggcctttatctgggccgcctattgcaccgtcaccagcaaatttgcgaaagggcaaaacggcatcacgctgtttgtattgctgaccgcgctgagtctgtgggtgaaatatgccctgagcgatcagcccgacatggtgttcacgcttccggtagtagtgaagctggttatgtgcggtatcgcgcttgggtttggttacgccgcctggaatattggcatcctgcacggtaacgtcacggttctggctgccgtatcctattttacccccgtgctttctgccgcgcttgccgccgcggtgctaagctcccccctttcattctcgttctggcaaggcgcgctgatggtctgcgccgggtcgttgctctgctggtacgccacacgaaaataa

SEQ ID NO: 163946 - DNA, 1110 bp, Enterobacter cloacae
atgaaacttaaattagttgcagtggcagtcacttccatgctggcagcaggcgttgttaacgctgccgaaatttacaacaaagacggtaacaagctggatctgtacggtaaagtgacaggtctgcactatttctctgatgatgctggcgcagatggcgataaaacctacatgcgtatcggcttcaagggtgaaacccaggttaacgatcagctgtccggttacggccagtgggaataccagattcagggcaacaaagacgaaggcgacaaccagtcctggactcgtgtggcgtttgcaggtctgaagttcgcggaagcaggttcattcgattatggtcgtaactacggcgtgatttacgacgtgacctcctggaccgacgttctgccagaattcggcggtgacacctacggtgccgacaacttcatgcagtctcgtgctaacggcgtggcaacctaccgtaaccaggacttcttcggtctggttgacggcctgaactttgctctgcagtatcagggtaaaaacggcagcgtaagtggtgaaaacaccagcggtcgcagcctgctgaaccagaacggtgacggctatggcgcatccctgacttacgatctgggcgaaggcttcagcgtaggcggtgcaatgtcctcctcccgtcgtaccgctgaccagaatgcggctggcgtatacggtgaaggcgaccgcgcagaagtatacagcggtggtgtgaaatacgacgcgaacaacatttacctcgcggcgcaatactctcagacctacaatgcaacccgtttcggtacctctaacaacaagcgtaccgacatttacggctttgcaaataaggcgcaaaacttcgaagttgtggcccagtatcagttcgactttggcctgcgtccgtctatcgcttacctgcagtctaaaggcaaagacatcgaaaacttcggcgaccaggatctggtgaaatacatcgatgttggcacgacctattattttaacaaaaacatgtccacctacgtggattacaaaatcaacctgctcgatgacaacacgttcactcgccaggcaggcatcggtaccgacaacatcgtagcgctgggtctgacctaccagttctaa

SEQ ID NO: 163947 - DNA, 945 bp, Enterobacter cloacae
atgaataaaacagaacaattggttggcctgcctgcgtatgcagaaagtcgccttgcaaacgatccgccgcttcgggctgtgcgtgcctttgaggccatcgcccggctgggcagcgtcacgctggccgcgcaggagctggacatttctccgtcggccgtcagccatcagctcagggtgctcgaagggtacctgcaaatgccgctgacggagcgtcaggggcgcaggctggtgctgagccagcacgggcgtgaatactaccgctcgatccgtgcggcgtttaacgtgctgcgccaggcgacggagcacctggcggagcaggcgcaaacgcgtcaggtcaccatcagcctgatcccgctttttggtatgggatggtttatcccgcgcttgcctgcgtttatgcgcgccaacccgcagaccgagatcaacgtggtgtatgccaaccatcgtaactatctgagcgacgcatcggatatgtcgattcgttttggcaacggccagtgggcgggctatcagagtgaaaagctgatttccggacagatggtgccggtgtgcagccgcgcgtttttgcgcattcacggccatatcgacacgcctgagcaactgctgcagatgccgctgctgcacgatgaggagcgcacgacgtgggcgcagtggtttgtacagcagggggtgaagcgtcccgttcgccgcagcggtccaatgtttgaggacggtctgctgacgctggcgggcgtacaggcgggtctggggtgtgcgctgatgcgggagccgctgattgcgccgtatcttgagagcggcgagctggtgaagatctttgacctaccgattgatgacggacgcgactactacctctgcgtgcgctcagattcagagatgaccgaggacggcaagctgctgcaaaactggctgcggcgggcagcgggcggggagtcgtctggcgggtaa

SEQ ID NO: 163948 - DNA, 915 bp, Enterobacter cloacae
atgctgggaagcatctacgcgctgatcgcgctgggctataccatggtgtatggcattttgcgcattattaactttgctcacggcgatattctgatggtcggcgcgctcaccacgctctccgccattaacgccctgaataccaccttcccgcatatgccgcagctgttgcagctcggcgttgccctgatgattgccatggccgtctgcgccctgctggcgatggccgtggaacgctttgcctaccgtcgactgcgcaacgcgccgcgcctcgcgccgctgatctcgggtatcggcgtttcggtcctgctgcaaaccgtggcgatgattatctggacgcgcaacccgctgatgttcccgcagatcctgccgatggaccctatcgccgtcacgtccggcagcgaagcgcatcctcctgccatcgtcaccgtcaccggtatcgtcaccgttgtcctggcgctggcggtgatgaccgggctctggctgctggtggaatatacccgtctggggcgcggcatgcgcgccgtggcggaaaacccgcgcgtggccacgctgatgggggttaacccaaacgccattattaccctgacgtttgccattggcggcgtatttgccgcgctggcaggcgtgatgatggccagcaactacggtaacgccagcttctcgatgggctttttacccgggatcaaggcctttaccgccgccgtgctggggggcattggtaacattcgtggcgccatgattggcggcatcctgctcggcattatcgaagcgctgggcgcaggctacctgggtgaactgacccacggcgtatttggcagcaactatcaggatgtctttgcctttatggtgctgatcctggtgctggtcttccgtccggctggcctgctgggcgagcgggtggcgaacagggcgtaa

SEQ ID NO: 163949 - DNA, 1107 bp, Enterobacter cloacae
atgacaacacttcaactccagaccccggcgacgacgcgcaaattctggtcaggcatgagcctgttctgcctcgcgctgctgattgcgcccgtggtggccacgcagcttggcggcaactactgggtgcgcgtcatcgacttcgccctgctctacatcatgctggcgctcgggcttaacattgtggtgggctataccggcctgctggacatgggctttatcgccttttacgcggtcggcgcctacctcgcggcactgatggcttccccgcacctgctggaggtgttcccgatcctcggcgtctggttcccggaggggctgcatacctcgtatctgctcattattccgctggccgccctcgtcgcggccgtctgcgggattttactcggtgctcctacgctcaagctgcgcggggactacctggcgatagtgaccctcggctttggcgaaattatccgcatcctgatgcgtaacctcgaccgtccggtgaacatcaccaacggcgcaaagggcataaccggagtggatacgctgaacctgttcggcctgaagttcagcggcgtataccactggtttggtttcaaagtacccgcgctgtggctgtggtactacctgctgatgctggtgattatcgcgatcgtcttcgtctgcctgcgcctgcagcattcccgtattggccgcgcctggcacgccatccgcgaggatgaagatgtggcccgtgcgatgggcatcaacgtgcgtaactataagctgctcgcctttgcgatgggcgcctcctttggcggcgtggcgggtgcgcttttcggcgcgtttcagggctttgtctctccggaatccttcaccttacaggaatcgattgccgtactggcgatggtggtgctgggcggtatggggcacattccgggcgtgatcctcggcgcggtactgcttaccgccctgccggaactgctgcgcagccaggcagcgccggtgcagcaggcgctgttcggtacggtgctgattgaccctgaagtgctgcgccagctgttttacggtctggcactggtgctggtgatgctggtgcgcccgtccggcatctggccggtacgccacaaggaggtgaaggcatga

SEQ ID NO: 163950 - DNA, 768 bp, Enterobacter cloacae
atgagtctgttaaccgtacgcaacatgacaaaacgcttcggcgggctgactgccgtggatgacgtttcgattaccgtgaacagaggcgagatctacgggctgatcggccccaacggcgcgggaaaaaccacctgctttaacctgatcaccgggctttatccggcggacagcggcgaattttcgattgccgataagccctacttcccgaagcagatagagaaagtgaccgccgccgggattgcccgcaccttccagaacgtgcgcctcttcaacgagatgtcggtgctggaaaacgtgatggtgggccgccacgtgcgcacccgtaacggcctgtgggccgcgctgagccgccacaaacgcgcccgcgaggaagagaagcagacccgcgagctggcctggcactggctggactataccggcattgcgcagttcgcccactatcgcgcctgcgacctggcctatggccatcagcgtcggcttgaaatcgcccgcgcgctggcaacggatccgctgctgctggcgctggatgaacccgctgccgggatgaacgcggcggaaaaagtggcgctcggcgagctgctcatccgcattcgcgatgacggcaaaaccctgctgatgattgagcatgacgtcaagctggtgatgggcatctgcgaccgcctgacggtgcttgattacggcaaaacgctcgccagcggcacgccggaaagcgtgcggcgcgacccggcagtggtcgccgcctggcttggaggtaacgcccatgtctga

SEQ ID NO: 163951 - DNA, 720 bp, Enterobacter cloacae
atgtctgaattactgaaggtggaacgtctggacgtgcattacggcggcattcaggccgtacgcgatgtctcctttaccctgcgcgagggcgaacaggctacgctgatcggcgcgaacggcgcggggaaaagctccaccgtgcgcgccattaccgggctggaaagctttagcggcagcattgacttcagcggtaaagcggtacgtaaacagagcccggagaccctgcttcgcgacgggctggtgatggtcccggagggccgcgggatcttctcccgcatgacggtgctggaaaacctgcagatgggcgcctggctcaggcgtgacactgtcaccgtcaggcgcgagatgaacgaaattttcgagcgcttcccgcgtctgggcgaacgccagcatcagcttgccgggctgctgtccggcggcgagcaacagctgctggcccttaaccgcgccctgctcagccgcccgcgcctgctgatcctcgacgagccgtcaatgggccttgccccgaagatggtcgagaacatatttgccgttattgccgggctgcgcgagcgcggcgtcgcactgctgcttatcgaacaaaacgcccggctcgcgctggaggtgaccgacagcgcgtgggtgatggacagcggcagcattgttcatcatggcgaatcgactgcgctgctcaacgacgaccagattgcacagatttatttgggcgaaatgcccgtttaa

SEQ ID NO: 163952 - DNA, 1158 bp, Enterobacter cloacae
atgaaaacagtaaaaatcagtgcgctcagcgccgctattctgctcggcagctttgcctcaacgtccgcgtgggccgctgacggtgaaaccgtggtcatcggtctggcaggcccgctgaccggcccgtctgcccgtatcgggaaagatctggagaacggcgcgcagctggctatcgatgacatcaacaagcagcacccgaccatcggcggcaaagcggtgaccttcaaactgcagtccgaagacgatcagtccgacccgcgcactgccgtagccgtcgcgcagcgtctggtggatagcggcgtggcgggcgtggtcggtcactggaataccggcaccagcattccggcggcccgcatttatcacgatgcgggtattgcccaggtggcgccggtcgcaaccggtcatgcctatacccaacagggttttgacaccagcttccgcgtgatgggccacgacgatgacggcggccagctcgccggtcagtacgcggttaacaccctgaaagccaaacgcattgcggtgatcgacgaccgtaccgcatttggtcagggtctggcagaccagtttattaaatcgctggaagcgcagggcgtgaaaattgtcgatcgtcagtacgtggatgacaaaacggtcgatttcagcgccgtactgaccgccatccgcagtaaaaacgccgatctgatcttcttcggcggcgtcgacagccaggccgcaccgctggcgcgccgcatcaaacagctgggcatgaacgccacgctgatgggcgcaggcggattcgtcagccagacgttcctcaagctggcgcagaaagaaggcgaaggcgttgtggcgctggagccgggtctgcccgttgaccagatgccgggtggtaaagcgttcgagcaggcgtaccagtcccgctaccacacccatatcgaactgcacgccccgttcgcctatgacgccacccgcgtgctggtggcggcgatggaaaaagcagactccgttgagccgtccgactatctgcccgccctgcgcgccatcagctattccggcgtgaccggacagatcgcgtttgataaagagggcaacctgaaatcgccgtcgttcacggtctataaggttgtcgacggcaaatggcagccgcagaccgtgctgggcggcgcaaaagcgaagtaa

SEQ ID NO: 163953 - DNA, 483 bp, Enterobacter cloacae
atgagtgataataacgagctgggcattctcgcccgccgcaaaattgaagccgaaattattaagccaatttatgaaatcctggtgcgcgagatagggaaagaccgcgcccaggcggtgattggtgaggccattgagcaggccgcgattgacgctggcaaagggtttgccagcaaagaacccaacggcgcaaacatcaagagctttatcgccctgcagtatctgtgggagaaagataacgccctggacgtgaaggtgatcgacgccgacgaccagcagtacaactacaacgtgacccgctgtcgttacgcggagatgtaccacgagatggggctgggcgaaattggtcacctgctctcctgcgcgcgcgatgaaaaattcatcgtgggctatgcgcccgacgtagagctaacccgcaccaccaccattatgcagggcggcgcgtgctgtgatttccgctaccgctgcagtaaggacaagccatga

SEQ ID NO: 163954 - DNA, 1227 bp, Enterobacter cloacae
atgatccgcgtcaacgccgaacggctgtggtcaacgcttgagatgatggcgcagatcggcggtacgcccgccggtggcgtcacccgtctggcattaagcgaggaagatcgtattgcgcgtgacctgcttcgcgactgggcgctggacgccggttttacctgtgacgtcgacagcatgggcaatatgtttatccgtcgtgcggggaaaaatccgcagcttgccccggtcttgaccggttcgcacgtggatacgcagccgctgggggggaactacgacggggtttacggcgtgctggccgggctggagctgctgcgaacgctcaacgaccatcatattgagacggaacgtgacgttgtgctggtcaactggaccaacgaagaaggcgcgcgcttcgcgccagccatgctcgcttcaggggtctggacggggcaatttagcgaagcgtacgcccatgcccgcgccgatcacgatggcatcaccgtgggtgaagccctggataacatcggctaccggggggaagcccctgcccgtgcgtttccggtttacgcctgctacgagctgcacatcgagcagggcccgattctggaggacgaaggtctggatatcgggctcgtccgcgcggcaatgggccagcgctggttcaccctgacgctggacgggtttgccgcccacgcgggcaccacgccgatgcacagccgccgcgacgcactgaccgccttcgcggagctggcgctgaaggtgcaggagattggctatcggcatgcgccggacggacgggcgacgatcggtatggcgcaggttacgccaaactcgcgcaacgtcgtgccgtctcgggtggtctgcagcgtggagtttcgccatccggcgctgacggcgctggaagccatggaggcagcgctgcataaggtggctgaaagcctgagcctgcgcggggtggcggctgtcgttgagcgcatctttgactacgcgcccatcgcgtttgatgccgaatgtctggcccgcacggagaaggccgtggcggaactgggctactcggcgaaaccgatggtctccggcgcgggacacgacgcctgctatgtcagcaaaattgcccctgccagcatgatttttatcccctgcgtgaagggcatcagccataacgaagcggaaaggatcctgccggagtggtcggaaaaaggggcgaacgtgctgttgcacagcgtgttggccgcggcccaggaacaataa

SEQ ID NO: 163955 - DNA, 1488 bp, Enterobacter cloacae
atgtttcgtcagtggttagcgttagtgattatcgtgctggtgtatatcccggtggcgattgacgcgacggtgctgcacgtagcggcgccgacattgagcatgacgctgggcgccagcggcaatgaattattgtggatcatcgatatttactcgctggtgatggcgggaatggtgctgccgatgggcgccctgggtgaccgcatcggttttaaacggttgttgatgatcggcagcacgctgtttggcctgtcatcgctggcggcagcgtttgctccctcagcagggtggctgatcgcggcgcgcgcctcgctggcgattggtgcggccatgatcattcctgccactctggcggggatccgcacgctctttaccgacgcgaaagatcgcaacatcgcgctcggcgtctgggcggcggtcggttccggcggggcagcgtttggcccgctgattggcggtatgctgctcgagcatttttactggggatcggtgtttttgatcaacgtaccgattgtgctggtggtggtgtcgctggccgcgcgttttgtcccccgtcagcagggccgaccggagcagccgctgaatatcagccatgccatcatgctgattgtggcgattttgctgctggtctacagcgccaaaaccgcgcttaagggcgctctggcgccgtggctggtggcgtgtaccctgctgacgggtgccgtgatgctgtttatttttgtgcgcatccagctgcgcgcccgcgtgccgatgatcgacatgcgcctgttctgtcaccgcatcattttaagcggcgtggtaatggcgatgacggcgatgatcgccctggtgggctttgaattgctgatggcgcaggaactgcagtttgtccatggctttacgccgttcgaggcgggcatgtttatgctcccggtaatggtggccagcgggttcagcggaccgattgccggtgtgctggtgggccgtctggggctacgcattgtcgctgcgggtggcatggggctgagcgcggtcagctttatcggcctgtcgacgctcgacttcagcacgcagcagtggcaggcgtgggggctgatggtgctgctcggcttcagtgccgccagcgcgctgctggcctcgacctcggccattatggcggccgcgccgagagagaaggcggctgccgccggagccattgaaaccatgtcctatgagctgggggccgggctggggatcgccatttttggcctgctgttgacccgcagcttctcggcgtcgattgcgctgccgcaggggctgcatgcctcgctcgtcgataaagcctcgtcatcgattggtgaagcgatgaaggtggcgcaggatctgacgccgtccctcgcggagccggtgattgaggcggcgaaaagcgcctttattacctctcacagcgtggcgctggggagtgcaggcggaatgctgctgttgctggcagtggggatctggttcagcctggcgaaggtgccgaaggggtaa

SEQ ID NO: 163956 - DNA, 576 bp, Enterobacter cloacae
atgcaatatttgagcaaggaagagagacgggaagcgatcctgcaggccgcgatgcgcgtagcgctggccgaggggctggcagccatgacggtacggcgaattgccgctgaagcgggcgtcgcgaccggacaggtccaccaccacttcgcctccggcggcgagctaaaatcgctggcctttgtgcgcgtgatccgcgagctgctggatgccgacgtggtgggtgaaaacgccagctggcgggaacggctgcacagcatgctcggcagtgacgacggcgggcttgagccttacattcgcctctggcgggaagctcaaattctcgccagccgggatcctgaaatcaacgcggcttacgccctgaccatggagatgtggcatcaggagaccgtggcgattatccgcgccggggcggaggccaacgcctttacgcttaccgatcgcgcggaaaatattgcctggcgattgatcgggctggtttgtgggcttgatgggatcatgattttaaatatgcccgaaatggacgatgcggcgtttaataagcatctcgataaacttatctccctcgaattgggttaa

SEQ ID NO: 163957 - DNA, 1389 bp, Enterobacter cloacae
atgtcacaacaaagtgagaagagtaatccgcatctgttaagtaactggaaaccggaaaatgtgcaattttgggaaaacaaaggaaaacatatcgcgcgaagaaacctgtggatttccgtcgcctgtttgctgttagcgttttgcgtctggatgttatttagcgccattgccgtcaatctgaataaagtcggatttaatttcaccaccgatcaactttttatgctaacggcattaccttctctctccggcgcgatattgcgcgtcccctattcgtttatggtgcccatatttggcggacgatactggacggtattgagtaccgtcatcctgatcattccctgcgtctggctggggattgccatccagaacaccgcgacgccttactggacctttatcgtgattgccctgctctgcggctttgcaggcgccaactttgcctccagcatgggcaacatcagcttcttcttccccaaggcaaaacagggtagcgcgctcggtattaacggcgggctcggcaacctgggcgtcagcgtgatgcagctggtcgcgccgctggtgatcttcctgccgatgtttaccttcctgggcgtggagggcgttccgcaggatgacggttccaccctgtggctggcgaatgcggcctggatatgggcgccgctgctgctgctggccacccttgcggccttctttggaatgaacgatatcgccagctctaaggcctctatcgccagccagctcccggtactgaagcgctttcacctctggctgctgagcctgctctatctggcgaccttcggctcgtttatcggcttctcggcgggctttgccatgctgtcaaaaacccagtttccggacgtcaacattctgcacctcgccttctttggccccctaatcggtgcgctggcgcgatcagcgggcgggatgatctctgacaaactgggcggcgtgcgggtcacgctgattaactttgtttttatggccctcttcagcgccctgctcttcctgacgctgcccggctctggctccggcagctttgtcgcgttctatctggtctttatggggctgttcctcaccgccgggctcggcagcggatcgaccttccagatgatcgcgattattttccgccaaatcacgctcgaccgcgtcaaaaaacagggcggcacggacgagcaggcgcagcacgaagcggtgacagagaccgccgccgcgctgggctttatctccgctatcggcgccgttggcgggttcttcattcccaaagcctttggcacctcgctggcgatgaccggatcgccggtcggcgccatgaaggtgttcctcgtgttttacatcgtctgcgtgctcgttacctggctgatgtatggccgcaaatccgcaaaacaagaataa

SEQ ID NO: 163958 - DNA, 3741 bp, Enterobacter cloacae
atgagcaaactgttggatcgctttcgttatttcaaaacaaagggggacagcttcgccaacgggcacgggcaggtatataacaccaaccgcgactgggaggacggctaccgccagcgctggcagttcgataaaattgtgcgctccacccacggcgtgaactgtaccggctcctgcagctggaagatttatgtcaaaaacggcctggtaacctgggaaacccagcagaccgactatccgcgcacccgccctgatctgcccaaccacgagccgcgcggttgcccgcgtggggcgagctactcctggtatctctatagcgccaaccgtcttaaatacccgctggtgcgccgcaggctgattgagctctggcgcgaggcgctggcgcagcataccgatccggtgctggcctgggacgccatccagagcgatccgcaaaaggcgcaaagctacaggaaggcgcggggtaaaggagggtttatccgctcgaactggaaagagctgaaccagctgattgccgccgccaacgtctggaccatcaaaaactatggtccggaccgcgtggccggtttttcccctattccggcgatgtcgatggtctcctacgccgccggcacgcgctatctttccctgctgggcggtacctgcctgagcttctacgactggtactgcgacctgccgcctgcgtcgccgatgacctggggcgagcagaccgacgtgccggagtccgccgactggtacaactccagctacatcattgcctggggctcgaacgtgccgcagacgcgtactccggacgcccatttcttcaccgaagtgcgctacaagggcaccaaaaccgtcgccatcacgccggacttctcggaagtcgcgaagctgagcgaccagtggctgtcccccaaacagggcaccgacagcgccctcgccatggcgatgggccacgtgatcctcaaagaatttcacctcgataacccgagcgactacttccttaactactgccgccgctataccgatatgccgatgctggtgctgttggacgagcaggaagacggtcgcgtcgtgcctgggcgtatgctgcgcgcctcggaccttgtcgacgggctgggggaagccaataacccggagtggaagaccgtcgcctttgatattgccggaaacctggtggtgccaaacggctccatcggcttccgctggggagaaaaaggcaaatggaacctggagccacaggctgcgggccacgacaccgaactgacgctgtcgctgctcattacccacgacagcgtggccgatgtcgccttcccctactttggcggcaacgagaacccgcatttccgcagcgtgaagcaggagccggtgctgacgcgccgcgtgccgagcaaaaccctgaccctcgccgacggcagcgagaaacgggtagtcagcgtttacgatctggtgctggcgaactacggtctcgatcgcggtctggaggacagcaacgccgcagagagctatgaccaggtcaaagcctatacccccgcctggggcgagcagatcaccggcgtgcccgcccggctgattgaaaaaatcgcccgcgagtttgccgacacggcgcacaaaacccacggccggtcgatgatcattctcggtgcaggggtgaaccactggtaccacatggacatgaactaccgcgggatgatcaacatgctggtcttctgcggctgcgtcgggcagagcggcggcggctggtcgcactatgtcggccaggagaagctgcgcccgcaaaccggctggctgccgctggccttcgcgctggactggaaccgtccgccgcgccagatgaacagcacctccttcttctacaaccacgccagccagtggcgctacgagaagctgaccgcgcaggagctgctctccccgctggcggacgcctcgaggttcaccggccacctgattgatttcaacgtccgcgccgagcgcatgggctggctgccgtcggcgccgcagctcaacctcaacccgctgcacataaaggcccgcgcggacgcggcgggcatgacgccgcaggagtacaccgttcaggcgttaaaatcgggcgagatccgcttcgcctgcgagcagccggacagcggtaagaaccacccgcgcaacctgttcgtctggcgctctaacctgctcggctcgtccgggaaaggccacgagtacatgctgaaatacctgctcggcaccgagagcgggattcagggcgaggatttgggctcaaccgatgacgtgaagcctgaggaagtggagtggcagaccgccgccattgagggcaagctcgacctgctggtcacgctcgacttccgcatgtccagcacctgcctgttctcggatatcgtcctgccgaccgccacctggtatgaaaaagacgatatgaatacctcggacatgcatccgtttattcacccgctctcggccgccgtcgacccggcgtgggagtcccgcagcgactgggagatctacaagggcatcgccaacgtcttctccgaggtctgcgtcgggcatctcggcaccgaaaccgacgtggtgttacagccgctacagcatgactccccggcggagctgtcgcagccgtttgatattcaggactggcgcaaaggggaatgcgatttgatccccggtaaaacggcgccgaacatcgcggtcgtcgagcggaactacccggaaacgtacgaacgcttcaccgccctcggcccgctgatggacacgctcggcaacggcggaaaaggcatatcgtggaacacccagaacgaggtcgatttcctcggcaagctcaactacgtcaagctcgacggcccggcgaaaggccgaccgcgcattgaaaccgccattgatgcctccgaggtgatcctcgccctcgcgccggaaaccaacggccaggtggcggtgaaggcctgggaagcgctcggcgagctgaccgggcgcgatcacacccatctggcgctgaacaaggaagatgagaagatccgcttccgcgatatccaggcgcagccgcgtaaaatcatctccagcccgacctggtccggcctggagagcgagcacgtctcctataacgcgggctataccaacgttcacgagctgatcccgtggcgcacgctgtctggccgccagcagctgtatcaggatcatccctggatgcgcgccttcggcgaaagtctggtggcctatcgtccaccgattgacacccgcagcgtcacccatatgcgcgagatcccgccgaacggcttcccggaaaaagcgctcaatttcctgacgccgcaccagaaatggggcattcactccacctacagcgaaaacctgctgatgcagaccctgtcgcgcggcgggccgattgtctggatcagcgaaaccgacgcccgcgagctgggcattgaggacaacgactggatcgaggccttcaacgccaacggcgccctcaccgcccgcgcggtggtcagccagcgcgtgccgccgggcatgaccatgatgtaccacgctcaggagcgcatcctgaatattccgggctcagaggtgaccggacggcgcggcgggatccacaactctgtcacccgcgtctgcccgaaaccgacgcacatgatcggcggctacgcccagctggcgtacagcttcaactactacggcaccgtcggctccaaccgcgacgagttcatcatgatccgcaaaatgaaaaacattaactggctggacggcgaaggtcgggatcaggtccaggaggcgaaaaaatga

SEQ ID NO: 163959 - DNA, 1545 bp, Enterobacter cloacae
atgaaaatacgctcacaggttggcatggttctgaatctcgataaatgcatcggctgccacacctgctcggtcacctgcaagaacgtctggaccgggcgtgaagggatggaatatgcgtggttcaacaacgtggagaccaaaccggggatcggctacccgaaaaactgggaggatcaggaggagtggcaaggcggctggatccgcggcattcacggcaagctgaccccacgcctcggcggcaaaatgggcgtgctgtcgaagattttcgccaaccccgtcctgccgcagattgacgattactatgagccctttacctttgactatcaggatctgcaccgcgcgccggagggcgatcacctccctaccgcccgcccgcgctcgctgattgacggcaagcggatggacaaaatcgtctggggacccaactgggaggagctgctggggggcgagttcgaaaaacgcgcccgcgaccgtaacttccagaagatccagaaggagatgtacggccagttcgaaaataccttcatgatgtacctgccgcgcctgtgcgagcactgtctcaacccgagctgcgtggccacctgcccgagcggcgccatctacaagcgcgaagaggacggcattgtgctgatcgaccaggataaatgccgcggctggcgcctgtgcatcagcggctgtccctacaaaaagatctacttcaactggaagagcggcaagtcagaaaaatgcatcttctgctacccgcgcattgaatccggccagccgaccgtctgctcggaaacctgcgtcgggcgcatccgctatctcggcgtgctgctgtatgacgcggaccgtattgaggaggcggccagcaccgagcatgaaaccgatctgtacgagcgccagtgcgacgtgttcctcaacccgaacgatccggcggtgattgaggaagcgctgaagcagggtattccgcagaacgtgattgacgccgcccagcgttccccggtctacaaaatggcgatggactggaagctggccctgccgctgcacccggaataccgcaccctgccgatggtctggtacgtgccgccgctgtcgccgatccagtcctacgcggacgccggcggcctgccgcagagcgacggcgtactgcctgcggtcgaaagcctgcgcattccggtgcagtatctggcgaacatgctcagcgcgggcgacaccggcccggtgctgcgcgccctgaagcgcatgatggcaatgcgtcactacaagcgttcccagaccgtggaaggcgtgaccgatacccgcgccattgaagaggtcggcctgaccgaagcgcaggttgaggagatgtaccgctatctggcgattgccaactacgaagaccgcttcgtgatcccgaccagccaccgcgaaatggcgcgcgacgcttttccggagaaaaacggctgcggcttcaccttcggcgacggttgccacggctccgatacgaaattcaacctcttcaacagcagccgcatcgacgcgatcaacatcaccgaggtgcgcgaacatggggagggagagtaa

SEQ ID NO: 163960 - DNA, 696 bp, Enterobacter cloacae
atgcagatcctcaaaatcatcgcgctgctgatcgagtatcccgatgagcccctgtgggaaaaccgtaatgaagcgctttcgttaattgcgcaggacgcgcccatgctgctgccgtttgcccgccagcacctgagcgccccgctgctggataaacaggccgaatggtgtgaggtgtttgagcgcggtcgcgcgacgtcgctgctgctgttcgagcacgttcacgccgagtcccgcgatcgcggccaggcgatggtcgacctgatgagccagtatgagaaagcgggtcttgagctggactgccgcgagctgccggactacctgccgctctacctggaatatctcagcatcgtcaccgacgacgaagcgcgtgaaggactgcaaaacgtcgcaccaattctggcgctgattggcggccgcctgaagcagcgcggcgtggcgcactatcagctgtttgacgccctgctggcgctggcgggaacgcggctctccagcgacagcgtggcgaaacaggtgtccggtgaaaaacgggatgatacccgtcaggcgctggacgccgtgtgggaagaggaacaggtgaagtttatcgaagacaacgccacatcgtgcgacagctcgccgatgcagcaatatcaacgacgctttagccaggacgtcgcgccgcagtacgtggacgtcagtgccggaggcctaaaatga

SEQ ID NO: 163961 - DNA, 681 bp, Enterobacter cloacae
atgacacactacctgaacgtgtttttctatgacatttatccgtacatctgcgccaccgtgtttttcctcggcagctggttgcgctacgactacgggcagtacacctggcgcgcctcgtcgagccagatgctcagcaagcgcgggatgaactgggcctctaacctgtttcatatcgggatcctggggattttcttcgggcacctgttcggcatgttaaccccgcactggatgtacgcctggtttttacccgtcgcggttaagcagcagctggccatgattgcgggcggaatttgcggcgtgctgacgctgatcggcgggtcgatgctgctgattcgccgcttgttcaaccagcgggtgcgtgccacctccaccacgccggatatcatcattatgagtatcctgctgcttcagtgcattctggggctatcgaccattcctttctccgcgcaatatcctgacggaagcgagatgatgaagctggtgggctgggcgcaggggatcgtgacgtttaagggcggttcatcagaaatgctgagcggcgtggcgccgatcttccgcgtgcatctggtgctggggatgacgatcttcctcatcttccccttcacccgcctggtgcacgtgtggagcgcgccgtttgagtactttacgcggcggtatcaggtggtgagatcgcgccgttga

SEQ ID NO: 163962 - DNA, 2595 bp, Enterobacter cloacae
atgttagatgattacactcagcaccggaaagcccgccaggaggcgggtattccggcgaaaccgttaacagcggaacagacagcggcgctgatccagcgtttacttcacgatgcgccgacacatcacccgcaattaatcgatttattaacccactgcgtcccaccgggtgtcgatcctgcggcaaagttaaaagctgaatttttatttaaggtggctttgcaggactaccgtgttaacggtctctctcccgaagcggccaccacgctgctgggtaccatgcagggcggctataatgtccagccgttgattgcgcttcttgatcatccggacctggcaccgctggccgcacagcagctctcttcgaccatcctcatttttgacaaattcagccagcttgaaaccaaagcgatggccggtaacgtccatgcgaaagcggtgcttcacgcgtgggcgaatgccgaatggtttacccgccgcccggcgatggctgaaaaaatcaccctgaaggtgtttaaggtgcccggcgaaaccaataccgacgatttgtctccggcaccggaggcgtggtcacgcccggatattccactgcatgcgctctccatgctcagtaacgcccgggaaggggttgagccggatggacccggcgcgcgcgggccgctgcgccagctggcagaattaaaagcggctggctggccgctggtctatgttggtgacgttgtgggaacgggatcgtcacgtaaatccgccaccaactccatcttatggcacatcgggaacgatattcctttcgtgccgaataaacgcaacggcgggtttgtgtttggcggcaagattgcccccattttctttaatacgctcgaagattccggtgccttgccggtagagatggatgtctccacgctgacgaccgggatgctgatcgatctttatccccggaaaggcgaaattcgtgagaccgaaagccagcgtctggtgacgacctttacgcttaaaaccgaggtgctgctggatgaagtgcgtgccggcgggcggatcccgttgattatcggacgcagcctgacggcgaaagcgcgggaatcgctgaagctcgcgccttcagatgtcttccgtaagcctgcggcgcctgcgccttccaccgccggttttacgctggcccagaagatggttggtaaagcctgcggcgtcgcggggatccgtcccgggcagtattgcgagccaaagatttcgacagtcggttcacaggataccaccggcgggatgacgcgtgatgagctgaccgatctggcgtgcctgacgttttcagccgatctggtgatgcagtctttttgccacacctctgcgtatccaaagccggtggatgttcggctgcatgaaacgctgccgcagtttatcacccgtcgtaacggggtcgcgctgaaaccgggggacggcattatccactcctggcttaaccgcatgctgctgccggatacggtgggcaccggtgccgactcccatacccgcttcccgctggggatctccttcccgggcggctccggactggtggcgttcgccgcggcaacgggcattatgccgctggatatgccggaatcggtgctggttcgctttacgggcgagatgcagaaagggatcaccctgcgcgacctggttcacgccattccgctctacgccagaaagcagggcatgttgacggtcgagaaaaagaataagcgcaatattttctcgggccggatccttgaaattgaagggctggaaacactgagtgcagagcaggcgtttgagctggctgacgcctccgctgaacggtctgctgccgcttgcgtgatgcgcctgtcggaggacaaggtcgcacaatacctgcgttccaacgcggccctgctgcgctggatggttaagcagggatatgagaacgccgacacgcttgaacgacgcatcgctgaaatcgaggcgtggctggctaacccgtcgctgctttcggccgatcctgatgcggaatatgccgcagtcattgagattgatctcaatgaaatcaccgaaccggtggtctgcgcgccaaacgatccggatgatgctcgcttactttctgaggtggccaacacgccgatagaggaggtctttattggctcctgcatgaccaacatcggtcatttccgcgctgcgggtgaaatcctggccgatgccggtgaaagccaggcgcggctgtggatcgcgcctccgaccaaaatggatgcccggcagctttcccgtgagggctattttagccagtttataaagtcgggagcgcgaatcgagcccgcgggctgctccctctgcatggggaaccaggcgagggtgcgcgaagggagccacgtggtatcgacgtcaacccgaaatttcccgcatcgtctgggaacgaatgccagcgttttccttgcctcggcagaattaagcagcgtcgcggccatcctgggtaaaatgcccaccgttgacgagtattttcgctataccgataaacttcacggcgcgcatgaaaatatctatcgttatctcagttttgacaccctgaccgaatatcaaatcacagaaggtgataatattccggttgttagcgtgtag

SEQ ID NO: 163963 - DNA, 549 bp, Enterobacter cloacae; identical to SEQ ID NO: 125803

SEQ ID NO: 163964 - DNA, 876 bp, Enterobacter cloacae
atgactacttcgcttgccagatgtaatgcgccagacgttcagcaccccttcgcggagctggcggccgaggccctgtaccgtgaaattcgcttgaccccgaaaccgggtctggtagatcgcgtcaacagcggggcgcatcgcgatatgaattacgcgctgtttatggccagtatcgcggccattgccccgtggttcaccgcgttctttaacgtcggcagggagacggcccgtcttgccgggccgcaaacgctgcgggcaataaggccggtcggtctggcctgcgaacaggcgatgttcaacgccaccggcggggtgaacacccataaaggcggcatcttctctctggggctgttgtgtgccgcggcagggcgtctgacgcaaaggcaggaaagcctcacgcagcgcagcctgtgcgatgagagcagggcgatttgcgctggcatcgttgatcgggagctgaaaaatcgcggcgtggcgaaaacgaagggcgagcagcagttccaggcatacggtttaaccggtgcccgaggggaagctgaaagcggttttgccaccgtccgccacgccgggctacctcactttgaaatggcactgcgccagggagcctctgaggatgacgcgttactgagaatgttgctcgggctgatggcggcgaatccggataccaatcttgtttcacgggggggaataaaagggctgaattatgccagacgctattccagacgaattttagcggtgaaacatctgacgccggagaaacgcgttaacgccttaaccaatatggacgttcagtttattcgccggaatttaagcccgggcgggagcgcagatcttatcgccgtcggatggttattgtcgcagtttccgtgcgaataa

SEQ ID NO: 163965 - DNA, 540 bp, Enterobacter cloacae
atgacggataacgcatcgaacgcccctgtttcgctggaacaggttctgacatcaaaagagcagcgcgcacgccgacagcaggcgtggctgtttcagtcggatcataccgtggtatccgtcacgctggtctggccggggacggtgaaggataccggtctggcccgacgagtgatggccgttgcgaatgaggcgctcggagagctattccgcacgcatcagtggacggtctgtcgccagcagactctgcagccggtcacggggccggaagcgctctggtcggtggcggccccggcctggatgatcaagcacgtcaccgcgcatctcgaagataaccatcctctgggacgcctgtgggatatcgacgtgctgtgtccgaaaacgggactgctgaaaagaagcgccatccagcaaccgatgcgcagatgctttatctgtcatgaacctgctcacgtttgttcccgcatgcgacgtcattcgctggccgagctcacgcgcgtaatcgaggcgttaaccgatgactacttcgcttgccagatgtaa

SEQ ID NO: 163966 - DNA, 1521 bp, Enterobacter cloacae
atgaaaaatctcacagaaaccctgcaccacattcccggcacgcgtcgtgaatacgtcgccttcagcggcgctaacgcgacgacgccgtatctttctgatacacagcaaaaatatcagcgcaaactttttgccagcgtggacgaggtgctggaccgttgcgatttgcatgacggcatgaccgtctccttccatcacgcgttccgcgaaggcgacaaggtgatcaactatgtgatggataagctggctcagcgcggtctgaaagggatcacgctcgcgtccagctcgttaatgtcgtgcaatgccccgcttattgaacatattcgcagtggcgtgattggcaaaatctacacctccggcatgcgtggcgagctggcggatgcgatttcacacgggctgatggatgagccggtacagatccactcccacggcgggcgggtgaacctgattcagaagggtgaaattgccattgatgtcgcctttctggcggtgtcctgcagcgatgaatatggcaatgccagcggcaacggcggcacatcgcagtgcggctcgctcggttacgctatggtcgacgcgcaatatgccaaaaaggtggtcttgctcaccgaaaccctgaagccgttccccaacctgccggccagtatcgttcaggaccgggttgactatgtggtgcagattgagagcgtcggcgacccggcaaaaatcagcgtcggcgccgccagggtgaccagcaatccacgtgagctgatgattgcccgttctgctgccgatgtaatcgaacactccggctacttccgcaacggcttttccattcagaccggttcaggtgcggcgtccaccgcctgtacgcggtttatggaggcccggatgcgtaaacacaatattgtcgcccgttttgcgctcggcgggatcaccggcagcattgtcgatctgcatcaaaaggggctcattgaaaagatcctcgatacgcaaagctttgacggtgctgcggccgcttccatgaccgtcaatcctggccatgtggaaatctccaccaacgtctatgcgaacccggctgcaaaagccgcctgctgcgacagggtggacgtggttatcctcagcgcgctggaggtggacacccggttcaacgtcaacgtgctgaccggttccgacggggtgatgcgcggcgcgtcgggcgggcattgcgacgtcgccgcggcggcaaatctcaccatcgtggttgccccgctgatccgcagccgaattcctaccgttgtcaggcaggtcaccaccctggtgacgccgggcgaaagcattgacgttctggttaccgatcacggtattgccgttaacccggcgcgcccggagatccgcgaacgcctgattcacgcggggctggccgtcgtcgacattgaggcgctgtatcagaaggcgttgctcatctcgggtgagcctaagccggtggcgtttaccgaccggatcgttggcgtggtgcgctaccgcgacggcagcgtgattgatgtggttcaccaggtgaaggagtga

SEQ ID NO: 163967 - DNA, 876 bp, Enterobacter cloacae
atgaaaaagttacgtcgcagtatgttatttattcccggttcaagtgctgccatgttgtcgacggcatttatctataaaccagactccattatgtttgacctggaagatgccgttgcgctgaaagaaaaagacagcgcgcgtcttctggtatttcacgcgctgcaacacccgatgtacaacgatattgaaaccgttgtcagaattaacccgcttaataccccttttggtttaaaggatctggaagccgccgtcagggcaggggcggatgttattcgtctgccgaaaaccgacacaccggaagatatttatcagctcgaacgtgaaatcgtccgcattgaagaaagctgcgggcgtcctgttggctcaacgaaattaatggcggcaatcgaatccgccgtcggcgtcattaatgccgttgccattgcgaaatcctccgaccgtttaatggggattgcgctcgccgcctttgactacgtgatggatatgcaaaccgagcggggcgacggaacagagctgttttatgcgcggtgcgcggtattacatgccgcgcgcggggcagggatcgacgctttcgacgtggtctacgccgatgtcaatgacgaggccggtttcctgaaagaagtggatctcatccgacggatgggcttcaacggaaaatcgctgattaatccgcgacaaattgaaattcttcacaacgcctacgcgcccacgcaggaagaagtggattacgcccagcgcgtgattgctgccgcagaagagggcgaacgcaacggactcggggtgatctcgctgaacggcaaaatgatcgacgcgccgattatcaaccatgcccgggttgttatcgaacgcaaaaatgcctctggcattcgtcagtaa

SEQ ID NO: 163968 - DNA, 291 bp, Enterobacter cloacae
atgaaaattgtgcaagccgcgatggcaggaacgctggagtccagcgacctcatggttaaggtcagccccgatgagagcgggctggacgtggtcatccagagcgaagtgtataagcaattcggcgaccgaattgcagaggtggtccatgaaaccctggctgcgttcaacatcgaacaggggcagatcattattgatgataaaggcgcgctggactgcgtgatccgcgcccgcgtgcaggctgcactgctcagagggacagcccgggaagacattgcatgggaaacgttataa

SEQ ID NO: 163969 - DNA, 1068 bp, Enterobacter cloacae
atgtacaccgccagaacacccgagtttgaggttattaacgccggtaacgcccagtcccgggaagaggttgtccgcttcctggcccgcaacggtttaggtattgatgacgatattgcgcaatttattgttgcccgctatcagcgccatcttgtcgcctgcaccggcattgcgggtaacacgttgaagtgcatcgcagtggatgccgggtggcggggcacgtcgttaatcctgacgttaatccatgaggccgaacttcaggcggcacagaacggtgaacatcaactctttctctttacctgtccggataacgtgaagtcatttcgcggatgcgggttttatccgctggtgacggtcgagaaccgtgcgtcattaatggagaatacgccggtgggtattcatcgttattgcagccagctgcgccgccatcatttcgtgccggggaaaaatattggcgcgattgtgatgaacgccaatccgttcaccctcggccaccaatatcttatcgagcatgcggcgagccggtgcgacgcgttacatgttttcgtggtccaggaagatgtctcggcattttcgtttaaagaacggttcgcgatggtcagggacggatcgcagcacctgccgaatgtcaccgttcatccggggtcggcgtatattatttcgcgcgggacgttcccgagctatttcctgaaagataagcaggtcatcgataaaacctacgcggcaattgacctcatgctgttcagaaattacatcgcccccgcgttgaatattaaccatcgtttcgtgggtaccgagccgttctgtcctttaaccgccgaatataaccgggcgatgcaccgctggttggaagaagagacgagcacagcggcccgtattagcgtacacgaaatagaaagaagaacggacggtaataatgtgccggtatcggcttcagccgttcgtcgtttattaaaagaaaacaacatcgctgccgccagccgcatggtgcctgccaccacgcgcgcgtttctaaataacggaatacagcatcagccctgtttatccgagccgctgacggcagcggtttaa

SEQ ID NO: 163970 - DNA, 864 bp, Enterobacter cloacae
atgaaactagcaagttatattcatcagggccgtaaaagctacggaatctatactgagtcgggctttatcgacctgggtaataaaattggccatcaatatgcaaccctgaaagatctccttcaatgggatgcgattgatgtcgccagacaatatatcgattgcccggtggatattaggcctgaagacgtgacctttttgcccgttatagaagcgcccggaaagattttctgcgtggggatgaattacgctgaaaaaagaaaagagtttgctgagaccaataatgcccccacgctgtttatccgttttcctgattcgcaaaccgggcatgcgcggccggtgataaaaccggttctctccagcgagttcgattatgaaggcgagctggccgtaattatcggtaaacccggtagccaaattgacgtcagtaacgcgctcagccacgtcgcgggatacagctgctatatggacggctccgtgcgcgactggcagcacgcctggttcaccgccggtaaaaactggacgcaaaccggcgccttcggcccctacatgaccacggcggacgagatccccgatcctcacgccctgaccattcacacctggctgaacggcatgctggttcagaatgactccacaggcagcatgatccacaaagtggcggatcttatcgcctacatcagtacgttcacctctctcagcgccggcgacgtcattattaccggttcgccaggcggcgtcggcaaaaagcgcaatccacctctgtttctgcacgacggcgatcgcgttgaagtggagatcgaaaacgttggccggctggtcaataccattgtggaagcccagccgcagccacaagcgttagctgtctaa

SEQ ID NO: 163971 - DNA, 1245 bp, Enterobacter cloacae
atggcgttcacgcatgctaacaataccctgaaagcgcccgatcctgtaaaagccagcgcgcatattcgcgtaattctggcactcgcattatccgggcttgcagaacttgcttctctgttttttattcagccactgcttccaacgctggccgtggaatataatgttccggtcagccaggtgagtattatcttatccgcagaaacggccttgctggcaattgggttgctgtttaccgggacgttatccgatcattatggcaggaagcggttaattatcgtctccctcctgctgggcggcattctgacgctgctctgcccgctggtagaatcctgggcgatgctggtggcgctgcgtgcggtgatcggtctggcgctgagcggcatcgcggcggcagcaaccgcctacatcagtgaggaggtcgcaccggtggcagctggcatcgtgacgggctattttgtcttcggtaactcgatgggcggcatgtccggccgtattgttgccagccagcttattgatcacgtttccattaatgtcatcttttacggctttgccgtcagcctgattgcggttgctattctggtgaaattcctgctgccagattccaaaaattttacccctacccagaacctgaacgtgatgcgaatggtgaaaggggcagcatcgcatttcaaaaataaaaatctggcactggcgtttgtcatcagctttattatcttcggcgcatttacctcactgtataactatctggccttcttcctgaaaggtgaaccgttccatatttcaccggcaaatgcaggcctgctctcctttagcttcgccctgagtttctttacggcaccgcaggcaggccgcttatcggcaaaatatggcgcaatgaaagtcctgcgcgtgttgttcctgatcatggcgttcggcatgctgctgacgctcacgtcgaacgttgtcacctttattgttggcgcagtgatttttaccggctgtttcttcggctgccattctatcggcttaagctgggtcagtaaaaatgccacgcatgcaagaggtcaggccgtcgcgctctatttattcttctactacatgggcggttcggtgattggttttatcaacggttttgtcttccattcaatgggctggcagggaatgaccggatttattctggcattacttggcgttggcgtagtcgtggctacgtatctggcatctggtaataagcaggttctggttccagcgcagtcagccgagtaa

SEQ ID NO: 163972 - DNA, 1089 bp, Enterobacter cloacae
atgttaaagatcccttgcgtattaatgcgtggcggtacgtcaaaaggccccgttattttggccagcgacctgcctgaggaaaccgaagcgcgcgacgcggtgttactcagcttgatgggcgcaggtcatgaacttgaaattgatggcattggcggtggaagcccgcaaaccagtaaggtggccatcgtcagtccttccgacagcccggacgctgatgtggattatttattcgcacaggtgatggtgaatgaacgtcgcgtcgataccacgccaaactgcggcaatatgctctgcgcggtggggccctttgcgattgaaaaagggctggtgaaggcgcaaagcccggtgacaacggtgcgtatccgcaatctgaacaccggaacactggtcgacgccgaggtgcaaacgccggattatcgcgttgtgtatgaaggcgatacccagattgacggagttccgggtactgccgcgcccattggtttaaccttcctgaattcagcgggttccaaaacagggaaattgcttccgaccgacagcgttacaaacgtattcgacggtattaacgttacctgtattgatatggcgatgccgatggtattgattgaggcctcggcactggggaaaacaggaggggagtcacccgcggaactggatgccgatgcgacgtttaaagcaaggctggagagcctgcgtcgtcaggcgggtgaggcgatgggcttaggggatgtgtcaaacaaagtgatccctaaaccggttctcctcagccgggcgcgcaacggcggaacgcttcaggtgcggtatttcatgccacacacctgccataaatccctggccattaccggctcgattggtatttcgaccgcgacgcttatagaaggctccgtcgccgctaaaattgtcgctggtcgtccaaaagagcgctttaccaatattattgatattgaacacccaagtggaaaaatatccgtgtcattgttgagggacgggaacaatatcgaaaatacccgagctgcggtaattcgtacttcccgtaagctatttgaaggtgtcgtctgcgtacctgaaaaaatgctctctgaagttgattag

SEQ ID NO: 163973 - DNA, 930 bp, Enterobacter cloacae
atgcaacatgaattacagggaatacaagcgtttgtaaaaattgcagaaatcggatgttttacaaaagcgtcgcaatttcttcatatttcacaaccggcgttaacacgaagaattcaaaaactggaagaaagtctgggtaccacgctatttgagcgttcaacgcgcagcgtcaagctcacgacggtgggaagagaatttttacctaaggcaaagaatttaatcgatttttatgaaagctcagtcctgagtattaaagagatggcgacgcatcaggccggggttattacggtttcctgtatccctactgccgccttctattttctgccttcagtgatacgagattataacaatgactatccaaacatccggatccgcatccttgagcacagtgccagcgattgtctcgaagcggttttaaatggcgacgcagatttcggcataaatatgataaacatcacacatccgaatatcgattttgccccgctggtaaacgaaccctttgttctggcatgccgccgcgacaatgaactggcgaaaaaaccgctggtgacctgggacgatctggcaggcatgaagctgattggagtcaggcgttccagcgggaaccgttcgcttatcgatcaggcttttgaaaagatggactggaagccgaactggttttacgaagtgcgtcacctgtcaacgtcactggggatggtagaggcgggtctcggggtgtctgttgtgccgagtctggcgatgccgaccgatgaacatcatgtccttgtcagtcgcccgctgattgaacccgtcatccggcgaacgctagggctagtacaacgccgggaaaaccctctcagcccggcggcggaaaaattcagagagctgcttgtacagctatggtcagcggaaaacaacagcccgtggattggcaagtttactcagctgtaa

SEQ ID NO: 163974 - DNA, 846 bp, Enterobacter cloacae
atgtccccctttctgaccgcctatttcgcccgcatcggctggaagcaaccggcttctgctgatatagacaccctgcgcgcactgcatttacatcacaactgcgcgatcccgtttgagaatatcgatgtcgtcctgccgcgcgaaattcatctcgaagaccagtgtctggtcgacaaattgctgaccgcccgccgtgggggatactgctttgagcaaaacggcctgtttgagcgggtattgcgtgacgtcgggtttaccgtgcgcagcgtattggggcgcgtggtattagcgagcccgccgcaaatgccgccgcgcacgcaccgcctgctgctggtggagcttaacggtgagcgctggattgcggacgtggggtttggcggccagacgctgacggcgccgattcgtttactcgctaacgaggagcaggaaacgccgcacggtctgtatcgtctgctgagcgagggcaacgactgggtgctgcagtaccgccaccacgagcactggcagtcgatgtaccactttgacctgacgacgcagtatttcagtgattacgtgatgggaaatttctggtcggcgcactggccgcagtcgcatttccgccatcatctgctgatgtgccgccatctgccggacggcggcaagctgacgctgaccaacttcaactttacccactggcagaacggtcatgtggaggagcagatccatctttccgatgcggcagcgctttaccagctggtgcaggaacgctttgggctgggcgttgacgatgcaaaacacggtttttcacttgcagagttgacggcggtgatggcgggctttgatacacatcctcaggcgggaaaataa

SEQ ID NO: 163975 - DNA, 573 bp, Enterobacter cloacae
atgagccactttcgccctgttgaattacgtcatgccagccgtctgctgaaccacggtcctaccgtactgattaccagtcgtgatgaaacgctcgacagacgtaacgttatggccgccgcatggtccatgcccgttgagtttgaaccgccacgcatcgcgatagtcgtggataaaagtacctggtcacgcgagctgatcgaacgcagcgggaaatttggcatcgtcatccccggcgtggcggcggccaactggacttacgcggtgggcagcgtcagcgggcgcgacgaggacaaattcaactgctacgggatcccggtcgtgaatggcccggagctcggcctgccggtcattgaagagaaatgcctggcgtggatggaatgccggttattacccgtgacctccgcggcagagaaatacgacacgctgtttggtgaagtggtttcagcggcagcggatgagcgggcgtttattgccggacgctggcagtttgacggggataagctcaataccctgcatcatcttggagccgggacgtttgtggcgagcgggaagatggtgaaggcgctggattga

SEQ ID NO: 163976 - DNA, 363 bp, Enterobacter cloacae
atgacatggaataaagatggcgcaatctcgtatgccaaatcacacgcccaaccgaagagtacgggttattgtgctcactacgtcaccgaagcgatcagaacggggggaagattaaaaatccccaatacgcgtctggcaaaagatatggggcggacattggtcaacgctggctttcgcctggtatacgatcaacctcatgccggtgacgtagccgttatccaaaatattgcgggtcacgatagcgggcacgtttgcctatacgatggtcagcaatggatcagcgattttgtacaacgctctctgtatccaggacaggcttaccgaaacaaacagcctcattacgaactgttcaggcatgactaa

SEQ ID NO: 163977 - DNA, 426 bp, Enterobacter cloacae
atgaaaacactcttctttttactcttcaccctgtctccgtttgctgtcgcagataacatttatgcaccgggacaggctgcgcttaaattcaatcaatggtatatcgctcagctgaatcaggacaaaccgccagtgctgaatccagacattatgaatgagtacgttgcctctgggacaattgatgcaattaaggagatgtactcaggagacagtaacgaaaaagacatgcccgatgctgatatgttcattaaagcgcaggactgggatgaggactgggatcagataaccgttctgcattctgattttgatgccgtttgcaccaacgtttatgtcgcattcggtcagaaacaagatcacgttgtcgcagattgtctcgttcaggaaaaaggaaaatggaaagttcgttcggccacgctgattaagtga

SEQ ID NO: 163978 - DNA, 2100 bp, Enterobacter cloacae
atgccccgacccatccctctcgaacgttatcgcaacatcggtatctccgcgcatatcgatgccggtaaaaccaccaccaccgagcgcatcctgttttataccgggatgagccacaagctgggtgaagtacacgatggcgcggcaaccactgactggatggcgcaggagcaagagcgcgggatcaccattacctccgcggcggttagctgcttctggccaggtatggacagaggctatgagccgcaccggattaacatcatcgacaccccggggcacgtggatttcaccattgaggtggaacgttccatgcgcgtactcgacggtgccgtgatggtgtatgactccgtgggcggcgtgcagccgcagtcggaaaccgtctggcgtcaggccaataaatatcacgtaccgcgtctggccttcgtcaacaaaatggaccgtccgggtgccgacttcttccgcgtcgtgcggatgatgcaggagcgtctgaaggccaatccggtgccgattgtcatcccggtgggtgccgaagatcatttcaccggcgtggtggatctgatcaagatgcgcaccattctgtgggacgatgccactcagggcatggcgtttaactatgcgccagtacctgacgatctgctcagtaccgcgcaagagtggcgcgaaaaaatggtctctgcggcggcagaagccagcgatgaactgatggacaagtacctggaaaccggcgacctgacggaagcggaaattattaaagggctgcgtattcgcaccatatcgggcgagatccagccgatgctctgcggcagcgcgtttaaaaacaaaggggtgcagcgcatgctcgatgcggtgattgagcttatgccgtcgccgctggacgtgccggctattgatggcgtggatgaaaaagggcagcacgcggagcgtcacccgagtgatgatgagccgttctcggcgctggcgttcaagctgatgagcgacccgtacgtcgggcagctgacctttatccgcgtctactctggcgtgctgcgtaaaggcgacgcggtgtataacccggtaaaagggaagaaagagcgcatcgggcgaatcgtactgatgcatgccaacgatcgccacgaggtggacgaactgcgcgccggggatatcgcggcctgcgtggggctgaaagacgtaaccaccggcgacacgctcaccgatccgaacgccgtcattacgcttgagcgcatggagttcccggacccggtgatctcgctggcgattgagccgaaaaccaaaggcgatcaggagaaaatgggcatcgcgctgcagcgtctggcggcggaagatccgtctttccgcctgcacactgacgaagagtccggtcagaccattatctccgggatgggtgagctacacctcgagattatcgtcgaccgcatgaagcgtgagtttggcgtcgaggcaaatatcggtcgtccgcaggtgacctaccgtgaaaccctgcgtaaaacggtgaaggacatcgaaggcaaatttgtccgacagtccggcggtaaagggcagtacggccatgtggtcctgagtctggagccgctggagcccggaagtggttttaaatttgaagatgccaccaagggcggcgtggtgccgcgcgagtatatcccgtccgttgagaaagggctgcgggaagcgatgaacagcggcgtgctggcgggctatccggtcgtcgatgttaaagcgacgctgacgtttggctcgtatcacgacgtcgactcttcggagatggcgttccgcatggcggcgatcctcggttttaaagagggcgcccgcagggcggatccggcgatccttgagccgatcatgcacgtggaggtggaaacaccggaagagtacgccggtaacatcatgggcgatctctcttcccgccgcggcatggtgcaggggatggcagagcagtacggcagccagattatccgcgccgatgtaccgctggcagagatgtttggttatgccacgacattgcgttcgatgtcccagggacgcgcgacgtatacaatggagttccatcattttgcggaagccccgcggaatgttgcggatgagattattgcacggcgtgcgaagtag

SEQ ID NO: 163979 - DNA, 300 bp, Enterobacter cloacae
atgatccctaaccaccctgaaactgaacaaatactgctggaaaatgtgctctttgccctcggcaacccgctccggctatcgattattcgccggctcgccgacggcagcgaactgagctgtaacgcgctgcgcccggaggacgtggtgaagtccacgatgacccatcactggcgcgtattgcgcgacagcggggtcatctggcagcgtccgcagggacgcgaaaacatgatttcattgcgacgagacgatctggatacccgttttccggggctgatggcgatcctgctgcaggttaagtaa

SEQ ID NO: 163980 - DNA, 642 bp, Enterobacter cloacae
atgaccggaagaattgattatcagattgaaaaatatctcctgaccgaagctgccgaaccggagcgcctgacgcgccagtgggcagaggttctggaggagtgtcgtgagcaaaaggccggtgcagaggagcggctgcgcctcgcgttgcttaatgtggattacgtcaccagcttcgagctgcccttcaggctgcttctcacccgcgcgccccagttgattgatgccgtcaggaaagagcttcagctcagtcagaaaaatgttctgtttaacggcaagcgctttggctgcgtctacagccttaaacgggatctggacggcatacctgacgagtttacctatcacctgaagacgcggatccagcgcagtgacgccacgggcgcgacggaagcgtcttaccgacaaattgcccagcaggtgaaagcgccaaaggaacgcctcaaactggcgctggacaacgggctgtctgtaaccgcgctcgacgggcttttctggtttggcattcagcgcatcgcggctgatgtacaacggttacgcaaaacagggatgcggatcgtgacgtccaacgccgaggtgttcgatacgcttaccaaaacaacccggcaggtcccggtctatcgcctggaagggactcaaattacttaa

SEQ ID NO: 163981 - DNA, 1332 bp, Enterobacter cloacae
atgaaagataatcctgtaccgacttccgcgctgtcgacctcgcgttttgcttttgggctgaacacgaccgaggtgggcgcggttccgctgatgctgttcgtcgggattgccgcgattgtggcgacgtccgcctgggcagggctgctgccgaaaaatatgattggcggactggcggtcatcatgacccttggttttgcgtttgccaaagtggggcgtcaaatccccgtgctgaaggacatcggcggcccggcgatcctgtgtctgatggtgccttcggtgctggtctattttggcgcattcgggaaacaaacccttgatacggtgcatctgctgatgaaggaggcgaatctgctctatttcgtcatcgcctgcctggtggtcggcagcattctggggatgaaccgggtgctgctgatccagggcatgatgcgcatgtttgttccgctggtggcggggacactgatggccgtgctgagcgggcttattgtgggaacgctgtttgggtatacgccttaccacaccttcttctttatcattgtccctatcattggcggtggaattggcgaggggattttgcccctgtctctggcctattcggcaatcctggggcagacgccggacgtctacgtggcgcagctggctcccgctgcggtcgtcggaaatatcttcgccattatttgtgccggctcgctggcgcgtctcgggacgaaacgtcctgcgctttcaggaaatggcatgctcacgcggagtaaagacgacgccagcctgttcgccggggcgtctggcgctcagcagacggattttcatctgatgggcggcggattgctgatggtgtgcgcgtttttcatcgtcggaggcttgtttgaaaaactggtccatattcccggcccggtgctgatgatcctgattgccgtcctgtgtaaatacttcagggtgatcccggcctcaatggagcagggggcgcacagctgctataaattcgtttcggctgcgctggtctggccgctgatgatcggcctcgggatgctatacgtgccgcttgaaagcgtggtgtcggtcttctcggtgggctatgtagtggtatgcggatcggtggtgattgcgatggcgctgagcggctacgtgattgcgtcgcgtctgaatatgtatcccgtggaagcggcgattgtgacctgctgccacagtgggctgggcggtacgggagatgtggccattctgtccgcctcaaaccgcatgtcgcttatgccgttcgcgcagatcgcgacgcgtattggcggtgcctcaacggtgattttcgccacgctgctgatgggctggattatggcgcactga

SEQ ID NO: 163982 - DNA, 1686 bp, Enterobacter cloacae
atgtctcgtaaagacgttctgtacacgccctataatggcgccgtactgctggaaaatccgttattaaataaaggcctcgcctttattaaggaagaacgggataattttaatctgcatggattattgccgcataacgttgaaaccattgaggagcaaacggagcgtgcctgggtgcagttctgccattttaaaagcgatatttcccgccatgtttatttgcgcaatattcaggacaccaatgaaaccctcttttacaacctcttgcgttcgcatctgaaagagacgttaccgattatctataccccgacggtgggtgaagcctgcgagcatttctccacgatttatcgccgcgcgcgcggcttgtttatttcatggcctaaccgccaccgcattgatgagatgctgcaaagtttctcgcgcaacgacgttcgggtgattgtggtaacggacggagaacgcattttaggcctcggcgaccagggtatcggcggtatgggcattccgattggcaagctgtcgctgtataccgcctgcggagggatccatccggcctccaccctgccgattatgctggatgtcggcaccaataatcagcaacacctcgacgacccaatgtacatgggctggcgtcacccgcgcatcagcgacgaccagtacgctgagtttatggatatgtttatcagcacggttaaggcgcgctggcccaacgttctcctgcagtttgaagactttgcgcagaaaaacgccacccgacttctgcagcgctaccgcgaccagctgtgctgcttcaatgatgatattcagggcacggcagccgtcaccgccggtacgctgatggcggcggcgcacgcggcggggacgcgcattcgcgatcagcgcgtggtgttcctgggcagcggctctgccggatgcgggattgctgaaaaaattgtcgcgctgatggtcgatgacggcctgagcgagtcggaagcccgcagccggatctttatggtcgatcgcttcggcctgctgaccgacgatatgaccaacctgctcgatttccagaaaaacctgctcaccgcgcgcgacgccgttagtcgctggcaggtagactcgcaaaatatttccctgctggacgtggtgaaaaacacacatcccacggtgatgatcggcgtttcaggccagccggggctgttcagtgaagagatcgtcaaagagatgcatcgccactgtccgcgcccaatcatcatgccgctctcgaacccaacgtcgcgggcggaagcccagccgcaggaccttatcgcctggacccagggtgccgcgctggtggccaccggcagtccgttcgccccggtattctgggagaatgcgcactatgagattgcccagtgcaacaacgcctatatcttcccgggcctggggcttggcgtgctggcctgtaacgcgcgccgggtgacggaagagatgctgatggcagcaagccgcagcctggccgcgcagtctccgctcgtgaccacggaaagaggaggattactgccgccggtagatcagattgaaacggtctcacgccagattgccgttgccgtcgcccgggccgccattgaacaaggcgtggcgccagcgttagatgatgaaaccctgatggcgcgtatcgagaaaacctggtggcaggcggactatgcgccgtaccgccgatccgcgctgtag

SEQ ID NO: 163983 - DNA, 1002 bp, Enterobacter cloacae
atgacaaaattaccccgtttttcattcgcctttcttcatccccgttactggctaagctgggccggcattgcggctctgtggctcatcatgctgctcccttatccgcttctgttcagaatcggtcatggcctgggtcgactggcgatgcgcttactgcctcgccgcgtcgagattgcccgccgcaacctggagctttgtttcccggagatgaaaaaggatgaacgcgagtcattgctgcagcgtaattttgaatcggtaggaatgggggtaatcgaaaccggaatggcatggttctggcctgcatggcgggtaaagaaatgctttaccgtgcaggggtatgagcacatggaaaaggcgagggcgcagggaaaaggcgtggtgctggtagggatacattttctgacccttgagctgggcgcgcggatatttggcatgcttaaccccggtatcggggtctatcgtcctaataacaatgctctgctggactggcttcagacgcgcgggcgcctgcgcgccaacaaaaccatgctcgatcgccatgatttaaagggcatgatccgcgcgctgaagcagaatgaaattttgtggtacgccccggatcacgactatggcaaaaccaacagcgtgtttgtgccgttctttgcggtgccggatgccgcgacgacggcgggcagctatatgctggtcaaaagcgctaaccctgccgttatcccctttgtgccgcgccgcagggcggatggcaccggttacgagctgattattctggaggatatcagcgaggcgctgcagggcggcgataaagaagccgtggcgacgcagatgaacagggcaattgagcaggccgtacgcatggcgcctgaacaatatatgtggctgcaccgtcgcttcaaaacccgtcctgaaggggtacctgaccggtatgcccgtctgaagcaggcggcaactcggggtgatagtctctccgccagcgatttttctgaccgctcaggcgtacagcactga

SEQ ID NO: 163984 - DNA, 231 bp, Enterobacter cloacae
atgccacacgtagatattaaatgttttccccgtgatttaaacgacgaacagaaagctgccctggcggcagatattgccgacgtgattattcgccatttcaacagcaaagacagttccgtgtcggtggcgttgaagcagatcgcgcctgaagactggaaggcgcaggtctgggataccgaaattggaccgaagctggaggagcttattaagaagcccgggtattcgatgtaa

SEQ ID NO: 163985 - DNA, 618 bp, Enterobacter cloacae
atgattaaactctatggcgtacccggctggggctcggcaatcagtgaggtgatgctgaccctggctgatatcccttatcaattcatcaacgtggacgggtttgaccagcccggtccgcagcgtgaattgctgcacaagctcaatccgctgtgtcaggtgccgacgctggagctggaaaatggcgccatcatgaccgaaacggcggcgattgccctgatggtgctcgacagatgtcccgatcttgctccacccgtggggcaggcagagcgtcagcagtttcagcgtttgctcatctggttcgtagccaacgtctatcccacgtttacctatgcagactatcccgaacgctgggtgccggatgcgccggaacagctgcagaaaaactgcatcgaataccggaaatccctctatatgtggttcgaaagccagcttaaggctgccccgtttgcgctgggggaacggctgacgctgctggatgtgtatattgcggtagcgcgcacctgggggccccgttacgcctggtttgccgaaaatacccctaaattcacggcgattgcggacgctgtatgtcagcgaccggaactgcacaaggtgttaaaggcaaacaaaattatctga

SEQ ID NO: 163986 - DNA, 888 bp, Enterobacter cloacae
atgaaatatggacttctggcggggctggtcttcacgacggcgagccacgccagcatcgatctgaaagccaacgagcagccgctgccggtgacggtggatcggcaggccgtggcgaagatccccgccggctataaattcgttgagccaggtacgctgacggtcgccgtctcgatgctgaactccccgccgctggcgctgctggccagcgataaccgcacgcggatcggcagcgacccggatattgcccgcctgctggcgggcagcctggggctgaagctaaagctggtgccgacggcgtgggaagactggccgctggggatcgcttccgggcgctacgacgtggcgctggtgaacattgcggtgaccgaacagcgtaaagagaagtttgattttgcgacctaccgcgtcgattcgctggcgttttcggtgaaatccaccagcgagattcagtcaatcaaaagcgcggaagatctggccgggaaaagggtgattgtcggctcgggtaccaatcaggagcgcatcctgctgggctggaacgaagagaataaaaaggcggggcgggcgcctgcgctgccggtctatcttcacgacgatgcctcgggcaatctttatatccagtccggcagggcggatgtgttctttggccctcagtcggtttcagcttacaaagcggcgctcaccggcaaaacccgcgtggtcggtttagggccgaagaaagcttatgtcgccaccacgaccaaaaaaggcaatcaactggtttatgccctgcaggccgcgctgaacggcgcgattgagcgcggagagtaccagaaggtgctggcgcgctggggcgagcagggcgaagcggtgacgcaatcggaggtcaacccgcctgggataacctactaa

SEQ ID NO: 163987 - DNA, 774 bp, Enterobacter cloacae
atgcaagcctctcctgaaggacatatctcaatcaccggcgtcagcaagtattttggtcgccataaggcgctcgacaacgtgtcgcttgagatcccgcccgggtccgtgacggtcatcctcgggccgtccgggtcgggaaaatcgacgctgctgcgcaccataaaccacctggagcgcgtcgacgaaggctttattcagatcgacggggactacattggctaccgtcgccagggcgacaagctctacgagctgaaggagaaagagatcctcaaacagcgcgtcaacgtgggctatgtgttccagaacttcaatctctttccccatctcacggtgctggaaaacctgattgaggcacccatcgcgcataaaaagctcagcaaaaaagaggcggtggaaagcgcgtacagcctgctggacgtggtcgggctgcgggacaaagccgacgcctggtcccgccatctctccggcggccagcagcagcgcattgccattgcccgcgcgctggcgttacgtccccgcgtgatgctgtttgatgaacccacctcggcgctggacccggagctggtaggggaagtgctggacgtaatcaaaaaactggcccggtccggcactaccctggtggtggtcactcacgagatcggctttgcccgtgaagtggcggatcaggtggtgtttatggtcgacggaaaaatcgtggaacagggcagcagcgacgcggtattgaaccgtccgtcgcacgcgcgcacgcgccagttcctctccaaagtcttgtaa

SEQ ID NO: 163988 - DNA, 927 bp, Enterobacter cloacae
atgagcaacgttgaaaccattaaggtggtcccggcgcgttatccgctgcgggccgtcggcgccgcggtggcgctgtttgtcctggcggtcgtgattcagtcagtcgcctttaacccgcgctgggagtgggcggtgttcgcccgctggttcttcgacccggtgatcctcgaaggcgtcgggcagaccctgctgctgacgctgatcggcaccgcgctgagcgtggtgtttggcggcatgctggcgctggcgagactctcgtcatcctggctgctgagcagcctggcgtgggcgtatatctggctgtttcggtcgctgccgctgatcgtcgtgctgattatcctgtacaacttttcctatctctacgacacgctctcgctcggcgtgccgttcaccggcatcacctggggcagctttgaaaccatcaacgtgctggggcagttctctaccgccgtggtggggctaacgctggtgcagagcgcctataccgccgagatcattcgcggtggtttcctcggggtcgatcacgggcagtatgaggccgccgccgcgctcggcctgccggcctggcgccgcacggtgcgcatcattttgcctcaggcgctgcgcaccatcctgccgtcggggttcaatgaaatcatcagcctcgccaagggcacggcgatggtgtacgtcctggcaatgccggagctgttctataccatccagatgatctacaaccgtacgcaggaggtgatcccgctgctgatggtcggtgccgcctggtacctggcgatcaccaccgtcctgtccgctatccagtacggtgttgaacgcgcactcgcccgcagcgaacgccgctctgcggttaatcagagccgtgccgcccgtcgcacccgttccgtcaccaccacgccagcacaggagcctatccatgcaagcctctcctga

SEQ ID NO: 163989 - DNA, 510 bp, Enterobacter cloacae
atgagcgaacgatttcgtgatgtttcaccggaagatgccgaacttcagcccattatcgaggggctgttcggtgaatatgcggcccgctacggggactacttttctaaagacgcggaagtggagctcaccgagtggtatctggcgccgcaggggctgtttatcgtcctggagcgcgacgggaagattatcgccaccggcgcgtacaaaccgttcgacgaacgcaccgcggaaatcaaacgtatctggacggacaaaaccctgcgtcagcaggggcttgccgggcgcgtggtgcaggagctggagcgcagggcggtgctggcagggtacagtcagatctacctgacaaccggctttcgtcagccggaagcggtcaggctctatcttagccagggctatcagccgcagttcgatctgaaccgcgatccggaagagtatagccagccgccgtttgacggtcggctgcgtttcaccaaaacgctggtacgtgaagcgttcagcaaaaccgcatga

SEQ ID NO: 163990 - DNA, 933 bp, Enterobacter cloacae
atgcagaaatcatcgcttgttctggcgctcgcgctggcctttacccctgccgtctgggcagagaacgtcaatattaacggcaccggcgtaagcatcgaggccaataaaacgccgattaacaccgcgaaaaatagcgaggcggtggcgcagctgccgaaagactatcgctttgccgtgccggggaaatttaccgttgcggtggcgggactcaatcagccgccgctgacggtcttctccgacgacaacaaaacgctgctggggagcgaagttgacgtcgcgcgtctggtcgccgacagcctcgggctggagctgaacgtggtgcccacctcctgggaagactggccgctgggcgtcgcgtccgggaaatacgatgccgccatcagcaacatcaccgtcactaaagagcgcaaacagaagtttgattttgccacctaccgtaaggattccctcggtttctacgtgaaatcgaccagcccgatcaaatcgcttcagaaagcggaggacatcgccgggctgcggattatcgtgggctccggcaccaaccaggaggccatcctgctggcgtggaatgccgaaaacctgaagaagggactgaagccctttaccccgatctacaccaaagacgatgcggcccaaaccctggcgctgcagtccgggcgtgcggatgcctactttggcccgaacgtgattggcgcctggaaagcggcgctgaacgggaaaaccaaactggtgggcagcgtcgacggcggctggccgaaggcggcgcacattgcggtgacgctgaaaaaaggcagcgggctggttgagccggtgcagaccgcgctgaacggcgtcatcaaaaacggcgattacgacaaagtgctgaaccgctggggtgaaggggttgagcgcattccgcagtccgaagtgaacccggcgggcctgggcgattaa

SEQ ID NO: 163991 - DNA, 1317 bp, Enterobacter cloacae
atgtctgcaacccgacaactgcggctgggcaccattctgcatggtgcatccgggaatatgtccgcctggcgccatcctgcggcgattgccgacgccagtattaactttgacttcgtgaaagcgacggcgttaaaggccgaggaagggaagctcgattttctcttcgtggccgatggtctctatatcaacgagaaatcgatcccccattttctgaatcggtttgaaccgttaaccgtgctttctgctctggccagcatcacctcgcgcctggggctggtgggaaccctatccacctcctacagcgagccctttaccacggcgcgccagttcgccagcctcgatcacctgagcaacggccgggcgggctggaacgtggtgacctcaccgctggaggggtcggcgaagaacttttcccgcgaaaaacaccccgagcatgcgctgcgctaccggattgcggatgagtatctcgacgtggtgaaagggctgtgggattcctgggaaggggatgcgtttatccgcaacaaagaaagcggccagttttttgacccggcgaaactgcatacgctcgatcatcacggtgacttcttccaggtcgccggtccgctgaatattggccgcacgccgcaggggcgaccaattgtctttcaggccggggcgtcggacgacgggaaaaagctggcggcaaaacatgctgacgccatttttacccaccacgagaccttcgacgaggcaaaagccttttatcaggacgtaaaacagcagctggaaacaaacggccgccgcgcgtcggatctccatattttccagggcgttagcgtgattgtggggaaagatgccgatgacgtggaacaccagtaccagaccacggcggcgctggtgtcgattaatgacgccctcaattacctcgggcgttatttcgaacatcacgatttcagccagtatccgctcgacgagccgttcccggatatcggcgacttaggcaaaaacagcttccgcagcaccacggatgaaatcaagcgtaacgcccgcgaacgcagcttaaccctgcgtcaggtggcgcttgaagccgcttcgccgcgcccgcgcttttccggcacgccggaggaggtggctgacggtcttcaggcctggtttgagggttatgccgcagacggcttcatcattcagggcggtacgccggacaccttcccgcgctttgttgaccaggtggtaccgattctgcagtctcgcgggctgttccgtaccgactacccgggcaccacgctgcgcgaaaaccttggcttagaccaaccgaaaaaccagtacacacaacaataa

SEQ ID NO: 163992 - DNA, 1122 bp, Enterobacter cloacae
atgagttttggcgaacaactgattgcctggcgccgcgaactgcaccagaacccggagctgtccggccaggaggtcgaaaccaccgcgcgcctgcgccagtggctgacgaatgccgggatcgccccgcagccttacgatctgtcgaccgggctggtggcggaaatcgggacgggcagcaggctggttgcgctgcgtgccgacattgacgcgctgccgatcgaggagcgcagcggcgtaccgtttagctcacagcatgccggggtgatgcacgcctgtggacacgatattcacaccagcgtcatcctcggcgccgcgttaaagctgaaagagcgggaggcctcgcttaacggccgggtgcgcatcctgtttcagcctgctgaagagaactttggcggtgcgaagagcatggtgcgggccggtgcgctgcgcgatgtcagcgcgattttcggtatgcacaacgagcctggcctgccggtcggtgagttcgccacccgcggcgggccgttctacgccaacgtcgaccgcttcgtgatccgcattaccggtaaaggcgcgcacgccgcacgtcctcatgaaggcaacgacgccatcgtgctggcaagccagctggtgacggcgctgcaaagcgtcgccagccgcaacgtcaacacgctggattcggtggtgctgagcgtcacccgcatcgcaggcggcaacacctggaacgtgctgccggaaagcgtcgagctggaaggcacgctgcgtacccatcgcacggaagtgcagcagaatgtgaaagcccgcgtgggtgaaattgccgccgggtttgccagcgccttcagcgcgcagattgacatcacctggtatgccgggcctaccgcgctggtgaatgacgaacgctgggccgacttcgccacctcggtcgcgcgtgaggccggttatgaaacccggcacgcggaactgcatatgggcggggaagattttgcggtctatttgcagtctgttcccggcgcgtttgtcagcattggcagcaacagcccgtttggtttacatcacccggcctttaatccggatgaagcactgattgagcccgctgcccgctattttgcacagcttgcggaaaaagccctgcaacacgtttaa

SEQ ID NO: 163993 - DNA, 1002 bp, Enterobacter cloacae
atgtcatggcgaatcagcattctggataaaagccccatcgctgaaaacgaaacggctgccgatgcactggcgcgtaccctggcgctggcgcagcaggcagaaaatctgggctatcaccgcttctggattgccgaacaccacaacaccccacagcttgccagcccttcgccggagctgctgattgcctggatcctcgggcaaaccacgcgcattcgcgtcgggtctggcggcgtaatgcttcagcactacagcccctataaagtggccgagaacttcaacgtgctggccgcgctggcgcctggccgcgtcgatctcggcgtcgggaaagcccccggcggattaccgctctcaacccgcgcgctgcagcagggcctgaatcaacaggaaaagggcagcttcgccgaacaattggcccagctcgaccgctggatccgtcctgagcatcacgctattgaagaggccgtccgcgccacgccgctgccgccgttgcctgctgatgctttcctgctgggcgcgagtaccgaaagcgcgctgctggccgccaggctcgactggcactttgtgtttgccgcacacctgaacggtgacccggacctgctgcgcgaggtggtatcgacctggcgtgagaacagcgcgcgggacgtgatagtggcggtgcaggcgattgtcgcgccgacgcaggccgaggcagacgcgctggcgcagaaggtcgaagtgtggggcgttgagctggcaaacgggcagcgtgtcaccgtggccagcgaagagcaggcctacgcgtttgcgcgccaggcgggcagtgagccggtgcgcattgcacgccgggcgcagtcgctgctggcgggctccgctgagtcggtagtggaacagctcaacgcgctgcaccagcagtggggcattgacgaatttatcatcgacacgccggtggcggagggggctacgcgcgtcgcgtcgctgcgtctgcttgccggggcgcgtctaaacaaggaggtcaccgtatga

SEQ ID NO: 163994 - DNA, 540 bp, Enterobacter cloacae
gtgaaaattaacgtcatcggtaccagcgggagcggaaaaagcacgctggcgaagcagattgcgaccgcgctgtctattccctgtatcgagatggacagactctactggcaggctaactggcagggcacgccggacgacgagtttcaggcaaagctggcgcaggcgctacaggcttcgccagactgggtgctcgacggtaactacaaccgcacgcgaccgctgaaatggcgcgatgtcgatgtggtggtgtgggtggattacgggtttacccgcaccctctggcaggccgtcacccgagcaataaagcgggcctggcataaacacgagctttggccgggaacgggaaacaaagagagtttccggcgcgcgttcttcagcagagaatccattatcatctggacgatgaaaacctggcgtaacaaccgtacgcgctatgaagccgacctgcaaaacccgcaatatagccatattcgcttcgtccgcattacccgtcgggagcaggtggaaacgctgattgcctccttaaagtcttattcttag

SEQ ID NO: 163995 - DNA, 1536 bp, Enterobacter cloacae
atgaggcgtaacacccccgttacacaaaacgagtatttacttaacgccggttcgacgttaatgtccactaccgatataaaaagtcatattacctatgctaactccgcttttatagaagccagcggatataaagaagagcatcttctgggggagccgcataacctcatccgccatcccgacatgcctgccgaagcgtttggcgacatgtggtttaccctccagcagggcgagacctggacagggctggtgaagaaccgtcgtcataatggcgatcactactgggtgcgggccaacgtgacgccggtctggcagggggaatccctgaccggctatatttcggtgcgcaatatcccctcacgggaagagatcgcggccagtgaaaatctgtatgcaaaagtgcgtaataatgaattaaaacatcatcgtttttataaaggactgttcgttcggcgcggtatattttcctttttgtcgctctttaaatgtctcagtaccggaaaacgaattcagcttggtattactgtgacagcattactttcctgcctggcgatgtatttattccgcgatcgtctcgttcaggccgccactctggtgctgcttttttctgcgctgtcctgttatcttcacgcgcagatcgcgcggccggtaaaatccattgttcaacagatgcagcgcgtggtttcagggcgtaaaacggactattaccattttgacagaatcgatgatatcgggctgatgatgcgcctggtgaatcagtctggtttaaacctgaactcgctggttgatgatgtcggggcgcaaatcagcggtattggcaccatcagccagcaggtcgcgaaagaaggcgcggcgctgcaggcgcgttctgaagaaaccgccgatttcttgcagcaaaccgcatttgcggtggaagagatcgccagcgccgtgaagcagacggccgaaaccgcgaacgaggcgattcagatggcggatcgcacccgcgacagcgcccactgcggggaagcgatgatgaaagagaccatcggtatgatgcagtccgtttcgcaggataacggccagatcgtcgatattatcagcgttatcgatcgtattgccttccagaccaatattcttgcgctgaatgccgccgtggaagcggcgcgcgcgggtgaagccggccgcggctttgccgtggtcgcggctgaggtgcgcaatcttgcgcagcactccgcgacggcggcgaaagagatcaaagcgctgatcgagaaaaacgttgccagcgtcaacgctggcgtggagaaggtgggacaaaccgaatcacagctgacggttatgatcgaccatgttctgcaggtttccaccctgattaaggagattggcctcgccacgcaggagcaaactcaggcgctgacgctcatcaacgcctccctctcccgtatcggcgcaatgagccagagcaatacggggatggtggataacgtcactcacgcggcgaatcacctgatgcagcggacgacgcgcctgcagcaggcgattgccgtttttggcggttag

SEQ ID NO: 163996 - DNA, 399 bp, Enterobacter cloacae
atgaaaattatccgcagcggttcattaccttcagtacgaggaccggaagcctggtttaccggggctgttcgcattgacgcgccctttcaggcgaccgaacctgccaacgtcggcggggcaaccgtaacctttgagccgggcgcgcgcacggcctggcatacgcatcccctgggacaaatgctgattgtgacgcagggtcgcggctggttacaggaatggggcaaagaggcggaaatcctgaatcagggcgatatcgcctggatcccacccggcgtgaagcactggcacggcgcaagtgcgcaaacggcgatgacgcatcttgccatcgccgaagcggtaaacggcagcccggtaacatggctggaaaaagtgaccgacgagcagtacccgaacggctaa

SEQ ID NO: 163997 - DNA, 915 bp, Enterobacter cloacae
atgctaaaagataatttcaacgatctgctctcctttatggtggtggcccgcgagcgcagctttacgcgcgcagcggcgcagctgggcgtctcgcaatcggcactgagccatgcgatgcgcaagcttgaagcgcgattagacgttcgcctgttaacccgcacaacccgcagcgtggttccgacacccgcgggtgagcagcttttttcgcgcctcagcccgcatctgctggagatcgaacaggaactcacggcgcttcgcagcagccgcgacaaacccgcaggcgctatccgcatcgtcgccggcgagcacgcgatggacgccgtcctctggccggtactgaaggcttttatgctgcagtatcctgacattaacgtcgaagtgacggtcgacaatggcctgacagatatcgtcgatggccgcttcgacgcaggggttcgcctgggtgaacaggtggcaaaagacatgattgcggtgcggattgcgccggacatgcgcatggcggttgtcggctccccggattacctggctcgttttggcgtgccgctcgtgccggagcagttgggtgaacaccgctgtatcaatctccgcctgcccacccgagggggattgtatgactgggaatttgagcgcgacgggcgcgagcttcgcgtgcgggttgacggacagcttacgctgaataacctgtcgcagcgcatcgacgccgcggagaatggtctcggattagcctacgtgcccgagtcctcggttctggacgctctgaatcagggacggctggtcagggtccttgaatcgtggtgccccacgtttgaaggataccacctctattatccgagccgtcggcagcacacaaccgcgttcaggttacttctcgatgccctgcagcagcaaaaatttataccatctggtaataattaa

SEQ ID NO: 163998 - DNA, 1497 bp, Enterobacter cloacae
atgaaaacaagcaataaaagcgcagccgatcatcacgctgctaaacgtcgctggttgaactcccacgaagagggctaccacaaagcgatgggcaaccgtcaggttcaaatgatcgccatcggcggcgctatcggaacgggtctgtttttaggtgcgggtgcacgtctgcagatggctggcccggctctcgccctggtctatctggtgtgcgggatcttctctttcttcattctccgcgcgctgggcgagctggtactgcatcgcccttccagcggcagcttcgtctcttacgcccgtgaattcctcggtgaaaaagccgcttacgtcgcgggctggatgtacttcgtcaactgggcgatgaccggtatcgtcgatatcaccgccgttgcgctgtatatgcactactggggcgcgtttggcgatgtgccgcagtgggtctttgcgcttggcgccctggcgattgtcggcaccatgaacatggtcggcgtgaagtggttcgcggagatggagttctggtttgcgctggttaaagtgctggccatcgtggtgttcctggtcgtgggtaccgtcttcctcggcagcggtaagccgctggatggcaatgccaccggcttccacctgataaccgataacggcggattcttcccgcacggcctgctgcctgcgctggtgctggttcagggcgtcgtgttcgccttcgcctccatcgagctggtgggcaccgcagcaggtgaatgtaaagatccgcagacgatggtaccaaaagccatcaacagcgtgatctggcgtatcggtctgttctacgtcggttccgtggtgctgctggtgctgctgctgccgtggaacgcctatcaggcgggccagagtccattcgtcaccttcttctcgaagctgggcgtgccgtacgtgggcagcatcatgaacatcgtggtcttgaccgcagcgctctccagcctgaactcaggtctttactctaccggccgtatcctgcgctccatgtccatgggcggttctgcaccgaagttcatgtccaagatgagcaagcagcacgtgccgtacgccggtattctggcgacgctggtggtctatgtcttcggcgtgttcctgaactatctggtgccgtctcaggtattcgaaatcgttctgaacgtggcggcactcgggattatcgcgtcctggggctttatcgtggtctgccagatgcgtctgcgcaaggcgattaaagaaggcaaagccgctgacgtcagctttaagctgcctggcgctccggtgacttcctggctcaccctgctcttcctgttcagcgtgctggtgctgatggccttcgactacccgaacggcacctacaccatcgcgaccattccgctgctggccgttctgctgattgcgggctggttcggcgtgcgtaaacgcgttcatgaaattcacagcaccgcgccggttcatcctgacgatgaaaaacacgacgccccgctggtagaagaaacctcgcgttaa

SEQ ID NO: 163999 - DNA, 1062 bp, Enterobacter cloacae
atgtctttacgtcaactgtgctcgccgcgtctgagcctgtcgctgctgtctgccactttactgcttgccgggacgttccaggtgcatgccgccgaagaggtactgcgtaaagcggtgggcaaaggggcgtatgaaatggccgtgagccagcaggagaatgcgctgtgggtggcgacctcgcaaagccgtaaaaccgacaagggcggggttgtctaccgtcttgatccggtcacgctggacgtgacgcaggcaatccatagcgatctgaaaccctttggcgccacctttgacaaggcgactcaaacgctgtggttcggcaatacgatcaacggcgcggtaaccgcgattgatgcaaaaacgggtgacgtaaaagggcggctggtgctggacgggcgtcagcgcagcgaaaccgtcaaaccgctgcagcctcgccagctggtggcagatgacgcgagcaacacgatttacatcaccggtgtcggtaaagagagcgtgatttgggtcgtggatggcgccacgctgaagctgaaagaaaccattgccaatacgggcacctacagcaccggcctggcgctggatgcgcaggcgaaacgtctgtacaccacgaatgcggacggcgaactggtgacgattgatacggccagcaataaaattattgcccgtaaaaaggtgcaggatgacggtaaagagcacttctacctgaacctgagcctcgacactgccggtcagcgcgcgttcctgaccgattcaaaacagccggaagtgctggtggtgagcctgaaagacggtagcgtgatcgagaaaatcgccgcgccggcatccctggcggtcctgtttaacccgacccgcaatgaagcctacgtgacgcaccgtgaagccggcaaggtgagcgtgattgacgcgaaatcgtataaggtcactaaaaccttcgacacgccggtctacccgaacagcctggcgctttcagcggatggcaaaaccctgtacgtgacggtgaaacagaaatctacccgccagcaggaagccacccagcctgacgatgtgatgcgtattgctctgtaa

SEQ ID NO: 164000 - DNA, 2115 bp, Enterobacter cloacae
atgaaaatcatttctgcccgtaaggcttctctcccgctgctgctggttcctgttatttttgcgccgctcaccgccgtgagcgcagaggaacagaccatgatcgtcagcgccacgccgcaaaccgtatcggagctcgatactccggccgcggtcagcgtcgtcaatggcgacgatatgcgccaggccgcgccccgcattaacctgtctgaatcccttggcagcgtacccgggctgcaaattcagaaccgtcaaaactacgcccaggatctccagctttcgatgcgcggatttggcgcccgctcaaccttcggggtgcgcggtatccgtatgtacgtcgatggtattccagccaccatgccggacggacagggccagacctccaacatcgacctttccagcgtggagagcgttgaagtgctgcgcggtcccttctctgccctgtacggcaacgcctctggcggcgtaatcaacatcaacacccagaccgggcagcagccgccaaccattgaagccagcagctattacggcagttacggaacctggcgctatggcatgaaagccaccggcgcgatgggtgacggcacccacgccggggacgtggattacaccgtctccaccacccgcttcaccaccaaaggctaccgcgaccacagcggcgcgcggaaaaatctcgctaacgccaaactgggtgtacggattgacgacgccagcaagctgacgctgattttcaacagcgtggacatgaaggccaacgatccgggtgggctgaattaccaggagtggcgggacaacccgcgtcagtcgccgcgcggcgatcagtacaacacccgtaagaccatcaagcagacccaggccggcctgcgctacgatcgccagctcagcgctcaggacgacctgagcgtgatgatgtacgccggcgagcgtgaaatgacgcagtaccagtcgattccgtatcagccgcagctaaaagccactcactccggcggggtgattgatatgcagcgccactatcagggcgtggacactcgctggacacaccgcggcgagctgctggtgccggtgaccttcaccaccggtctgaactacgaaaacatgagcgaagaccgtcgcggatacgagaacttcgtgatgcgcaacggcgtgccggactacggcgtcaaaggcgataaacgtcgtgacgaacgcaacctgatgtggaacgtcgatccttatctgcaaacgagctggcagctgacgcagaaactctctgtcgacgcgggtgtccgctacagttcggtctggtttgattccaacgaccactacgttacgccgggcaacggcgatgacagcggtgacgcgagctaccacaagtggctcccggcgggcgccgtgaagtatgcggtgacggatgcgtggaacctctacgctgccgcagggcgtggctttgaaacgccaaccatcaacgagctctcctatcgcgccgataaccagggcggtctgaatattggcctgaagccgtccacgaataatacgtatgaagtgggcagcaaaacccgaatcggcaacggcctgctgacggcggcgttgttccgcaccgatacggatgatgagatcgtggtggactccagttctggcggccgtacaacctataaaaatgccgggaaaacccgtcgtcagggtgtcgaaatttccctggatcagcagttcgcggagaactggaagctgaagatggcctggacgtacctggatgccacctaccggactaacgtctgcagcgacgcagactgtaacggtaaccgtatgccggggattgcgcgcaacatgggcttcgcctcgtttggctggcagccggaggaaggctggtatgcggggacagacgtgcgttacatgagcgatatcatggccgacgacgaaaacaccgcgaaagcgccgtcctatacggtagtcgggctgaataccgggtataaatttaactacggcaactggggaatggacgtctttggccgcgtcgataacctgttcgacaaagagtacgcgggctcggtaattgtcaacgagtccaacggtcgttattacgagcctgcaccaggccgaaactatggcgtcgggctgtcggtctcttatcgcttcgagtaa

SEQ ID NO: 164001 - DNA, 669 bp, Enterobacter cloacae
atgcttgatttggatcacttagaaaaagcccaaagggttagccttaccatgcaggttgaacacagtttgaaaggggcgttaattacaggctctctcaaaccaggagcacgactgattacgaaagagattgctgataaattaggcaccagtattacgccggtccgcgaagcgctgttgcgcctggtctcctcaggcgcgcttcacgccacgcccgcacaggcatttctggtccctgaagtgacgctggagcgttataacgagattaacgccatcagaaaacagcttgagccaatggcggtcgccgcagcatgccagaagatgtcagacggcaagctggaggcgttgcgcaaaatgtcagaggctttccatgaggccatgcgcaatggaaacgttcagcaggcattgcatgcgaatcgtatcttcaggtttacgctttatcagtatgcggaaatgcctacgcttaatgccttaattgaacagctatgggtccgcatcgggccctgcatgaactacctgcatcacgaacttaacgacatcaaaacggcaacgtatcactatgacgagctgctttcggcccttgagcggagagatgttgatgcgagccagaaggcgattgataagttgattgatgaagcagattctcttttacagcgacaatattttaactga

SEQ ID NO: 164002 - DNA, 555 bp, Enterobacter cloacae
atgaatcaacggattagcgcaagaattcgccttgaacgcgagtctcgcgggtggtccctgagcgagctggcggaccgggcaggcgtctcccgcgccatgatccataaaatcgagcgcggggacagtagcccgacagccaccttgcttgcccgcctgtcgggcgcgtttggcatcagcatgtcaacgctgattgcccgggccgaaatgcaggagggcaagctgctgcgcctggcaaatcagcccgtctggcgcgacccgcagacgcactacctccgccgccatgtttctccccgtaccgatctgcccatcgaccttgttcaggtggaactgcctgcgggcagcgatgttccgatgccggcctcttcttacgcgctggcgcgtcagcttatctggctgcagtccggtgagctggtgtttcaggagggcgacacccgccacgagatgcacgccggagactgtctggagctggggccgcctaatgactgccggttcatcaacgagacgaatgaaacctgcatctatctggttgtacgcctcaatcagtctggctcgtaa

SEQ ID NO: 164003 - DNA, 519 bp, Enterobacter cloacae
atgatcgttcgtcatgcctgcaaagaagactgcgctgcgataggcgagatttacaaccacgcggtgctgcacactgccgcaatctggaacgataaaaccgtcgataccgataaccgaatcgcctggtttgaggcgcgctcgcttgcgggctacccggttctggtgagcgaggaagacggcgtaatcaccggctacgcctctttcggcgactggcgcgcctttgacggcttccgtcatacggttgagcactcggtctacgtccacccggcccatcagggcaaagggattggccgcacgctgatgaaggcgctgattaacgaggcccgcgccatcgggaaacacgtgatggtggccgggattgaagcgcaaaaccatgcctcgattcatctccatgaaacgctcggctttgtgacgaccggacaaatgccgcaggtgggaaccaagtttggccgctggctggacttaacctttatgcagctgcagctggacgagcgcagcgacccggacgcgatcctatga

SEQ ID NO: 164004 - DNA, 450 bp, Enterobacter cloacae
atgaatcagtcactgacgctggcgtttctggtggcggcgggcattggcctggtggtgcaaaacaccctgatggtgcgtatcacccagtcctcctccaccattcttatcgcgatgctgctgaattcgctggtcggcatcgtgctgtttgtcagcattctgctgctgaaacagggcgtcgccgggttcagcgagctcgccgcaacggtgcgctggtggacccttatcccggggctgctggggtcgttttttgtgtttgccagcatcagcggctatcagaacgttggcgcggcgacgaccatcgccgtgctggtggcaagccagctgattggcgggctggtgctggacgtgctgaggagccagggcatcccgctgcgcgccctgatcggcccggtgtgcggcgcggtgatgctggtggtcggggcctggctggtggcgcgacgccagttttga

SEQ ID NO: 164005 - DNA, 234 bp, Enterobacter cloacae
atgtcacatttaaacgaagttatcgcccgcgtcgatgccgctatcgaagagagcgtgattacccacatgaacgaactgctggttgaattaagcgatgatgcggagctgagtcgtgaagatcgctacactcagcagcagcgtctgcgcaccgcgatttcgcaccacggcaagcagcataaagaggagatgtacgcgcgtgaggaacagctgacgaaaggcggcaccatactgtaa

SEQ ID NO: 164006 - DNA, 1350 bp, Enterobacter cloacae
gtggcaaaaactcttttacgcagcggtaatctggatgattttcaggccgttggcggcggcggacaagccgttttcgaatcagcgttgcaaatccgggaagcgctccggttgcgcaaacaacaggccatcgtcgactgtctggcgattcctcaggtcaacgacagcggcgaccgcgtggactggtattccccggttgaagggagcgtaaccagctggaaagcggccgatgaagatgatcgctatcgcgccctgcgctatctggaaaacacgctcgccagcgtcgagtcattaagcaagaaatgcctgcagtcgcccaaaaccgcgcaacagctctttggctctctgctgtcgaaggcatttcagttcccgggcgaaaacttcctcttcctggtggacggaaagccggtcattagcttctgggggtttgtaaacctcaacgagaacgcgcgcgacgatgtcctcgactgcctgcgtgaatcgctgatccctgagccagcccccgttgtgattgacgatcctgaacccgagcctgagccagagccggtgatgacctttgagcatgctgacgagccgctgatcgccccatccacggtggtgcgtattacgccggaggagctgtatgagcccgaaccggcccccgtcgttgcgcaaccagtccaggaacctgctccggcgaacgtcgtgaaaaagcgccgcgttcccctgtggaccctgccggttgccgccgtgatcgttgccgccgttgccgccccgctgctgtggccaaaacaggcaccttccgctgagcccgccccagctcccacacctgaacccgtggagattgcgccaaaaccgatcaaagcggttgagccgctggcgatgaagctaccgctgcatcaggcggaggtcgtggccagcaaagaaaaagaagcagctccggccgctcctgcgccacagcccgctccggtggtgattgtcgccatcccgaaagacgccatggtgatggaagcgaatcaggtaaaagcgggatcgacgcgcttcctgaacggcacctggcgcgccatcctcgacgtgaaggatccggtgaccggcaagccgccgtcgctgcgctatcagatccagaacaacaaaggtttcgcccgcgttgtccacggcgataacattgtctgccgcgcggaggtcttctccgggctgcacagcaatggcgaactgatgattaagagtcgcggtactgcccgctgcaccgacggttcccgctacccgatgccggaagtggcctgtaaagcaggcaccagcgatatcgcagaatgtcgcgcccgttatgatgccaacaccgtcgtcccactgacgttcaagaaagcaggtgcctga

SEQ ID NO: 164007 - DNA, 2982 bp, Enterobacter cloacae
atgctggtaaatctttgcgactataaacaaagcgtcacgcttattgccaacagcggcgtgcagttcctcgatttcggtctgacgccgcaggactccgccagcaacgggcgcttcgtacgtaaaaccgcgaacggcccgctgttgcgcctcgatttcgacctggtcaacggtcgctataccctaccgggcatgaacggcggccagcctgaagtggtcaagccggaaaccactatcccgctgcatcagtcgctggcggtactggatggcgtctggcttccggttccgttcctgcgcttcaacccgccgcggacgtttgtggaagggccggataactgggcccgcgttcaggtgcgcaagcttgagacccccgacaccgcaggcaatacccaccgcgtcaccctcgcgcttgacagccagattgccgaccatgccacgtccgcgctctctccggtggaaaacgatattctgaacggcacccgcttcgcgctggcctggcgcgataacgaggtagacagcttcctcgatcagacctggattgacggctggctgcgcgaggcgtttacccagtatgccgacggcgttgagaaccgctctgaacgcgacctgcagcaggcgatgcgcagctttgagtatcaggcccactggctcaacctgctgaccatgctcggtgaacagctcaccgtgcctgaggtgaaatttgtcacccatacgctcagcacgcctgccattccggtcgacctgatcctcgacgtgggcaatacccacacctgcggcgtcattattgaagaccacggcgatgccaacgatgggctgcgccagaccgccgagctgcaggtccgctcgctcagcgagccgcagttcctgaacgaaccgctgttcaccagccgtctcgagttttcggaagcgcgttttggcaagcagcacttctcggtggaaagcggtcgcgaagatgcctttgtctggccgtcgattgtccgcgtcggtgatgaagcccgcaagctggcgatgcagcgtctgggcaccgagggcaacagcggtatctccagcccgcgccgctacctgtgggatgaaaccccggtcgtgcaggactggcgctttagccagatgaacagcaagacccagcgtgaaccgcttgccaccgcgttcccgctgatgaacctgatgaacgatgacggcgagccgctcttcacgctgccgcaggacgagcgcctgccggtcttctcgccgcagtacagccgcagcaccctgatgacccacatgctgtgcgagctgctggcacaggcgctggggcagatcaacagcgtcgccacgcgcctgcgcctgggcttccctgcctcgccgcgccagttgcgcacgctgatcctgacgctcccctccgccatgccaaagcaggagcgcgagatcttccgacgccgcatgtttgaagccatcgccattgtctggaaagcgatgggctggcacccgcaggatgaggattttgtcacccgcaaacagcaggaaaaaagcgtggtgccggtaccggaaatccagatggagtgggatgaagccagctgcggtcagctggtctggctgtataacgaagccatctcccgctttggcggccagaccgaggccttcttcgcctcccttgcccgtccggaccgtgagcctgagccgggcagccagccgggacgcgcgctgcgcgtcgcgtccatcgacatcggcggcggcacaacggatatggcgatcacccattaccagctggacgacggctccggcaataacgtcaaaatcaccccgcagctgctgttccgggaagggtttaaggtcgcgggcgacgatacgcttctggacgtgattcagcgctacgtgttgcccgccctgcaaacgcagctgcaaaaatccggtatcgcagacgcctcgctgctgatggcttcactgttcggcgactccgggcgcattgatacccaggccgtactgcgccagcagacggcgctgcagctgtttatgccgcttggccatgcgattcttgccgggtgggagtccagcgacgttgacgatccgctggctggtctgcacgccacctttggcgatctcctgccgcagaagccgacccgcaacgtgatgaactatctgcagcaggcgatcgaccatgccctgcctgcgggttctgacgcttttgacctcttcgccgtgccgctgcacgtcaatttccgcgaaatgcaggatgcgatgctggccgggcagtttacgctggcctccccgctccacgcggtgtgtgaggcgatctcccattatagctgcgacattctgctgatcaccggacgcccgggctgcctgcctggcgttcaggcgctgattcgccacctgcagccggtgccggtcaaccgcatcgtctggctggatcaataccaggtgcatgagtggtatccgttcagccagcaggggcgcattggcaacccgaaatcgaccgctgccgtgggggccatgctctgcagcctggcgcttgatctgcgtctgccgcgcttcaactttaaggccgcggacattggcgcgtattccaccgtgcgctatctgggcgtgctggataacaccgtcaataccctgcacgaggaaaacgtctggtatcaggatatcgatctcgataaacccggcgcgaagcttgacgcgcgtctgcacttcccgctgcgcggtaacgttaccctcggcttccgccagctggcgaacgcgcgctggccggccacgccgctctacacgctcagcattaactcggccgaactggcgaaagcgattgctggcgacggcgtgctgaacgtgcggctcaaactctgcggcggcagcaagcatgaaggcccggaggccttcgagctgagcgatgcctggctgcaggacggcacgccggtggcgcctgacgccttaaccttcaaactgaataccctggccgaccgccgacacagcggcagccactactggatcgacagcgggagcgtatacctgaaatga

SEQ ID NO: 164008 - DNA, 2178 bp, Enterobacter cloacae
atgacagcgacgaccaccaccactcaggccttaatcgggtggatcaacgagacgcgcctgaacgcccccgtgctggataacgatgccgacgccctgcttgcccgcatcaacgcggcgcaggcgcgcgagcaggccattgaacgcgccatgacccgccagagcagcatcgggctttacggccattcgcagagcgcgaaagcgcacctgctgttgtcgctgtgcggcagcggcaatggacgcctgaacgtgacgccaggccagcgcacctttgactatttttcgcatatcaatccgggacatgccctgaccaacatggccgtccgcttcacccgggaaaccccggaagcgcttgacgaggcgtttccgctgcgcctgagcctggtcaccgaggccgagctggtgcagctgtttattgcccgcacgacgctgcatccgcagatgcgcgcggtggataaggcggtcattgagacccgcctggagaaatggcgcggtctgcgccagccgcagagcgtgcccggcatcacggcgcaggacgtgggggcgattgcccgcttctggcagagcacggtacccgccgcgaaacagcaaattgatgatgccctgtggcacgagttcgcccaactggtgccttcgctcgatctcagcacccgcgccagcgtctggtcgctgctgtggggcgagcagcaggaactgacccagcagtggttaaatctggcccatgtgctgcaccagaccagccatgccagcgagattgcggccccccttagcctgctggtggacagcttcgggctgcctggcgaagggttcctgacgcacgacggctcggtagcgctgcagaatacgcaagagacgcttctccatccgctgaacaacggtgagatgctgaacgccatcagcctccccgtcgatgtgctggccttcctgacccgcgagctggtgcttccggttgagaacggcgcgctggataatgtcgatatcattgatatcccggtgtttgaagaccgccatgccgatccgctacgccaggcaaaatcccagtggctgcttgagcactaccgtcaacagctccagccggatgtgctggtcatctgcaacgcgacggcgcagcacgaacagacggccaaaaaagcaaaagtgttaatgaactgggtcagggagacgcagcctgcggaagaatctgccctgccgggtctggtgtgggcgatcaccccgcacgacgctcgctttaccacccggcagaatctcgatgaagccgtacagcatctgctcgggaagcccggcctgcgctggggcacgctgcaggctctggacagccacagcatgcagcgcgtcattgagtggctgtctcaggccacgctgcccgcgcagcgacagaaacgtctcggcacgctcaaaaacgcgctgcgtctggagctctcggcgatgatgcaaagctacctggcaccgctggttgaggagccaggtatccgacgcgctcaggctgaaaacatggtgcgcacgctgcaaagcagtgccgcccgccacggcgagctgcttgaaggcctgctgccgccgctgaaggcctttgaaacgctgttggccattcagcagccgcgcgaggagcaggttaacgggctatttacggataccattgacctgtttgccgagaacgcccaggaaagcgccggtctgtaccagaccaaagacaaagcgcgcctggcgcacaaagtctggataaatcatctgcgccagtggagccgcaacgaggcgacagccgcccgtcttgggctggttcctgcggtgttacagcaaattgcggatgtgctggtggtcaccagctaccggctggatctgcctcagcagctgcagcgaattgtcgaagcggataagagtagcgctgcgcaactgcatgccgtgatgggcaatttcattggctggctgggttacgacaagacgcccgtggcgacgcgcccggcaagccgcatccgcaaggggcaggccatcttcgtcaccccggtggtgagcagcgccgagccccgcctgacgcgtctgggtgaacagccggtccatgcggctaccgcgtacgtttacgactggctggtcgcgctctatagccgcgcgatcgagaacattgattaccagcacccgcatgatgttcagcctgacgctcgtcaggcactacgggctttaataatgtag

SEQ ID NO: 164009 - DNA, 756 bp, Enterobacter cloacae
atgaacagtttttactcgcagcaggccggttgcaccgtacgctggcacgacttgcccggctccggcgatcccgtggtgttcattcacgggctgggctgcgccgcttcctatgaatatccccgcgtcgttcgtgacccgctgtttggcgcgcgcagagcgattctcatcgacttgcccggcagcggctacagcgataagcctgagcactacagctacaaaaccaccgaccaggcgcacgttgtggcggagctgattgaccatcttaaactggattccttctggttatacggccacagcatgggcggcagtattgctatcgaaacggcggggcttttggctacgcgcgtgaaggggctgatggtgtcagaacccaattttcatgcgggtgggggcatgttcagccggtcaatcgcggcgcaaagcgagcaacagtttctggagcagggttatgacgccatgctcagtgcagaaaaaacggcgtgggcagggtgcctgcagagcaatgcggcttatgccgtctggcgcggtgcatccagcctggtggccggcgttgaaccggaatgggaagcgcagttcctgtcacttccttgcccggtaacgttgatttttggcgagctctctctgccggatgacgatgtggaaaatctgcaacagaaaggcgttgaggtaaaaattatccctgcggcggggcactctatgtcgtgggaaaacccctctgcgctggcgcaggcattagccgggtgtatgacgatgtaa

SEQ ID NO: 164010 - DNA, 1425 bp, Enterobacter cloacae
atgcaaaaacatctgctgataaacggtgagctggttgccggagagggtgaaaaacagccggtttataacccggccactggagaggtattgctggaaattgctgaggcatcagcggcccaggtcgacgcggcggtgctggcggctgaccgtgcttttgcggcgtggggacaaacgacgccgaaaacccgcgccgagtgcctgctgaagctggcggatgcgattgaagcgcacggtgaggcgtttgcccggatcgagtccctcaactgcggcaagccgctgcactgcgcgctgggggatgaaattccggcggtggtcgacgttttccgtttctttgccggggccgcccgctgcctgaacggtctggcagcgggcgagtaccttgacggccacacgtcgatgattcgccgcgatccggtgggcgtggtggcctctatcgcgccgtggaactacccgctgatgatggcagcctggaagctggcccccgcgctggcggcagggaactgcgtggtgataaagccctctgagatcacgcccctgaccgcgctgaagctggcagagctggcaaaagatatcttcccggcgggcgttctgaacgtgctgtttggtcgcgggaaaacggtcggcgacccgctcaccgggcacgagaaggtccgcatggtttcgctgaccggttcgatcgcgaccggggaacatatcatcggccatacggcgtcctcgattaaacgcacccatatggagctgggcggcaaagcgccggtgatcgtgtttgatgatgccgatctggatgcggtggttgaaggggtgcggacgtttggcttctacaatgccggacaggactgtacggcggcctgccgcatttatgcccagaagggaatctatgcccaactggttgaaaaactgggcgccgcggttgccagccttaaaatgggtgccccggaggacgaggctaccgaactgggaccgctcagctcggccgcccatctgtcacgcgtctgtcaggccgtcgatgaggcgaaagcgctcggccatatccgggttgtcaccggcggaagcaaaaaagagggggcgggctactacttccagccaaccctgctggcgggggcaaaacaggacgatgccatcgttcagcgcgaggtgtttggcccggtggtgagcgtcactgagtttgatgacgaggcgcaggtgctggcctgggcaaacgactcacaatacggcctggcgtcatcggtctggaccaaagacgtggggcgcgcccatcgcctgagcgcgcgcctgcagttcggctgcacctgggtgaatacccattttatgctggtgagcgaaatgccgcacggcggcatgaaattatcgggctacgggaaagatatgtcgatctacgggcttgaggattatacggttgtccggcatgtcatgatcaaacactga

SEQ ID NO: 164011 - DNA, 807 bp, Enterobacter cloacae
atgcactctgaacgcgcaccgctgttcctgaaagtggcagcgtggggaggcgtcatcttcctgcacttcccgctgctgattatcgcgacctatgccttcaacaccgaagacgccgccttcagctttccgccgcaggggctgacgctgaaatggtttagcgtggcggcggggcgcggcgatattatcgaatccgtgacgttgtcacttcaaattgccgcgctttccaccgcgatagctcttgtgcttggcacgcttgctgcagcggcgctgtggcgaagcgcgttttttggcaagaatgcgatctctctgctgctgctgttaccgattgcgttaccggggatcatcaccggcctggcgctgctgacggctttcaaaacgatcaatcttgagccgggttttttcaccatcgtggtcggacacgccaccttctgcgtggtggtggtgtttaacaacgtgattgcccggttcagacgcacctcgtggagcctggtggaagcgtcgatggatctcggggctgacgggtggcaaacctttcgctatgtggtgctgcccaatctgggttccgcgctgctggccgggggaatgctggcgtttgccctgtcgtttgacgagatcatcgtcacaacgtttacggcgggacacgagcgcacgttaccgctgtggttgctcaaccagctcgggcgtccgcgtgacgtgccggtcaccaacgtcgtggctctgctggtgatgctggtgacaactatccccattctgggagcctggtggctaacccgcgacggcgaaaacattgccggcagcgggaaataa

SEQ ID NO: 164012 - DNA, 945 bp, Enterobacter cloacae
atggatatgagcgttgcgcatcctcccgccccgcgcggccgcctgagccgcatgacggccctgttctggcgaaagccgtcgctcggtctgttcctgcttctgcttgcgccgctgatgtggtttggcatcgtctatttaggatcgctgctgacgctgctgtggcaggggttttatacctttgacgatttcaccatggcggtcacgccggatctcacgctggcgaacattcaggcgcttttcaacccggcaaactacgacatcatcctgcgcacgttaacgatggcgattgcggtgaccattgccagcgccatccttgcgttcccgatggcctggtacatggcgcgatacaccagcggcaagtggaaagcgtttttctatatcgccgtgatgctgccaatgtgggcgagctacatcgtcaaagcctacgcctggacgctgttgctggcgaaggacggcgtggcccagtggtttctcagccatctcggcctggagccgattctgacctcaatcctgacgctcccggcaattggcggcaacaccttgtctacctccgggctgggacggtttctggtgttcgtgtacatctggctgccgtttatgatcctgcccgtccaggcggcgctggagcgcctgccggcctcgctgctgcaggcctcggccgacctcggcgcgcgtccccgtcagacgttccgctatgtcgttctgccgctggccatcccgggcattgcggcgggttcaatcttcaccttttccctgacgctgggggatttcatcgttccacagctggtggggccgccgggctacttcattggtaacatggtctactcccagcagggcgctatcggcaatatgccgatggccgctgcgttcacgctggttcccatcgtgctgatttctctttatctggcgttcgtgaaacgtctgggagcattcgatgcactctga

SEQ ID NO: 164013 - DNA, 1014 bp, Enterobacter cloacae
atgacgtacgcagtcgagtttaacaatgtttcccgtctgtacggcgacgtccgggcggtggatggggtcaccattgcgatccgcgacggagagtttttctccatgctggggccttcgggctccggcaaaaccacctgcctgcgtctgatagcgggttttgaacagctgtcaggcgggacgatttccatcttcggtaaagaagcgagcgaactgcccccctgggagcgggacgtgaacaccgtgtttcaggactacgcgctgttcccgcatatgtcgatcctcgacaatgttgcctacgggctgatggtcaaaggcgtcgacaagaaaaaacgccatgcgcaggcccgcgatgctctggaaaaagtgggcctgagctttgccatcgcccgcaaaccatcgcaactttccggcggccagcgtcagcgtgtcgccatcgcccgcgcgctggtgaacgaaccgcgcgtcctgctgctggacgagcctttaggggcgctcgatctcaagctgcgggaacaaatgcagttcgagctgaagaagcttcaacaagaactcggcatcaccttcatttttgtcacccacgatcagggcgaggccctttccatgtcggaccgggtggcggtgttcaataacgggcgcatcgagcaggtggataccccacgcgatctctacatgcgtccgcgcacgccgtttgtcgccggttttgtcggcacctccaacgtttttgatgcgggccttgcgcagacgctttgcggcatggagggcatcttttccctgcgcccggagcatattcgccttaatgaacagggtgacgttcaggttcagggcgtcgtgcaggccgttcagtatcagggggctgccacgcgtctggagctgaagctcgccgatggcgccaaactgctggtgagccaggctaacttcagtgacgcctcgccgctgagcggcattgcgccggggcaggcggtcatggcgtcatggtcgcgcgaggcgatgatccgccttcacgaggagaggtga

SEQ ID NO: 164014 - DNA, 1146 bp, Enterobacter cloacae
atgagcaaaaaatttgcccgcagcagcctgtgcgcgctcggcatgactatcatggccgcgcaagccgcagaaccagcaaaggccattggcgacggggaaggtcgactggatattatcgcctggccgggatacatcgagcgggggcagacggataaaaactacgactgggtcacccagtttgaaaaagagaccgggtgtgcggtcaacgtcaaaacggcggccacgtcggatgaaatggtcagcctgatggcgaaagggggatatgacctggtgaccgcctcaggcgatgcctccctgcggctgatcatgggcaaacgcgtccagccgattaaccccgatcttatccccaactggaaaaccctcgacgagcggattgtgaaaggggaatggtttaacgtcggcggtaaagtctacggcacgccgtaccagtggggaccaaacctgctgatgtacaacaccaaaaccttcccgacgccgccggacagctggagcgtcgtctttaccaaacaggatctgccggacggtaaaaccaatcagggacgcgtgcaggcctatgacggcccgatttatatcgccgatgcggcgctgttcgttaaagcgacccagccgcagctgggtatcaaagacccttaccagctcaccgaagcacagtatgccgccgtgctgaaagtgctgcgcgaccagcatgcgctgatccaccgctactggcatgacaccaccgtccagatgagcgatttcaaaaacgagggcgtggtggcctccagcgcctggccgtatcaggcgaatgccctgaaggccgagaaccagcctattgccaccgtcttcccgaaagagggggtgacaggctgggcggacaccaccatgctgcacgcgcaggctaaacacccgatgtgcgcctacaaatggatgaactggtcgctgacgccgaaagtgcagggcgatctggccgcatggtttggctccctgcccgtggtgccggaagggtgtaaagccagcacgctgctgggcgataaaggctgcgaaacaaacggttataatgagttcgacaaaatcatgttctggaaaacccccatcgcagaaggcggcaaatttgtcccttatagccgctggacgcaggattacatcgccatcatgggcggtcgttaa

SEQ ID NO: 164015 - DNA, 1410 bp, Enterobacter cloacae
atgaaaaaataccagcgtctggcgcaacaaattatctcgcagattgagcttggcgtatggctgccgggcgataagttgccttccctgcgagagcaggtggcaagcagcggcatgagttttatgaccgttggccacgcgtatcagatgctggaaagtcaggggcgcattgtcgccagaccgcagtcgggctattacgttgcctcgcgcccgaccgcacaacagcctgcgccacccgctcaggtgatgcgtgacgaagcggtggatatcaatacctacatcttcgacgtcttacaggccagccgcgacccgtccgttgttccctttgcttccgcgtttcccgaccccagacttttcccgcttcagcagctcaaccgttcgctggcaaacgtcagcaaaaccgcgacggcgatgagcgtgattgagaacctgccgccgggaaacgtcgatctccgccacgccattgcccgccgctacgcgcagcaggggatgaacatctccccggaagagatcgtgatcaccgcaggcgcgctcgaagcgctgaatcttagccttcaggcggtaaccgagccgggtgactgggtgattgtcgaaaacccctgtttttacggtgcgctgcaggcgctggaacgcctgaagctcaaagcgttgtcgattgcgacggacgttcgcgaggggatcgatctcaacgcccttgaacaggcgctgaatgagtacccggttaaagcctgctggatcatgactaacagccaaaacccgctcggcttcacgctgagcgcggagaaaaaagcccagcttgtcgccctgttaacccagcacaatgtcccgctgattgaagatgacgtctacagcgagctctattttggacgtgaaaagccgctcccggcgaaagcgtgggatcgtcaggacatgacgctacactgctcgtccttttcaaaatgtctggtggccggttttcgcatcggctgggtggcggcaggaaaacacgcgcgacgcattcagcagctgcagctgatgagcacgctttcaaccagttctcccatgcagctggcgctggtggattacctggcgaccaaacgctacgacgcccacctgcgccgcctgcggcgtacgctggccgagcgaaagcagcaggcctggcagtcacttcttcgccatatgcctgcaggcgttaaaattcaccataacgacagtggctactttttatggctggaactgccggcacagctggacgcggggctgctgagcgaaaaggccttaacgcaccacatcagcattgctcccggaaaaatgttttccacctctgacgcgtggacgccgttctttcgttttaatacctcctgggcctggggagagcgggaagagcaggcggtcattcagttaggaaaattaattagcacgatgctggaataa

SEQ ID NO: 164016 - DNA, 189 bp, Enterobacter cloacae
atgacttcatatatccattttcgctgcccatgctgtcatggctcgcagtaccgtacctcagcctttgacgtgtctgagaaaaacccgtttggcgcgaaatgcattttttgcaaatcgtcgatgatcacgctcgaccacctggccgccgcgcgttccgctcagagccacgtgaccgaataccgtaagtaa

SEQ ID NO: 164017 - DNA, 372 bp, Enterobacter cloacae; identical to SEQ ID NO: 146419

SEQ ID NO: 164018 - DNA, 492 bp, Enterobacter cloacae
atgaaggggattataattactctggcgttattattatcagcttgtacgtgcgtacctcagcagagtgctgccgaacgggcggaagaattttactccaactatctgacattttttgcggaaagtgatggggaataccctcagcttagagagtacgttgcggcagatacgctatcccgacttaacgagatagagtctattcctgaacaggaaatcctggggtcagattatttcgcttatgttcaggattatgatccctcttgggtgaagcggctcgaggttggtgcgccgcatcaattcatcaatggcgaagttcttcctgtccggattggtattgagaacggcgggtttcttaatcttgaagtctatatgcgtcgtgaagacggaaagtggaaaatttaccgcgtgagtgacgtaaccgatcgctacgagcaccccatatttaatgccggagcaattactcgggcaaagtcattagcgaaaaacggactttaa

SEQ ID NO: 164019 - DNA, 1401 bp, Enterobacter cloacae
atgtttggtttggatgcttttcaccttgcgcggatacagtttgcctttaccgtatccttccacattattttcccggccatcaccattggtctcgcaagctatcttgccgtgctcgaagggctgtggctgaaaacaaaaaatccggtctggcgctcgctgtaccatttctggtcgaagatttttgccgtcaactttggcatgggcgtggtctccgggctggtgatggcctaccagtttggcaccaactggagcggcttttcgcagtttgcgggcagtattaccggcccgcttctgacctatgaagtgcttaccgccttcttcctcgaagccgggttcctcggcgtgatgctgttcggctggaataaagtcgggccgaggctgcacttcttttccacctgcatggtggcactggggaccattatctccaccttctggatcctctcctccaacagctggatgcaaaccccgcagggctatgagatcgtcaacggtcaggtggtaccggtggactggttcgccgtggtgtttaacccctccttcccttaccgcctgctgcacatgtcgatagccgcgttcctgagcagcgccctgtttgttggcgcatccgcggcatggcatctgctgcgcgggaataatacccccgccatccgggcaatgttttcaatggcgctgtggatgacgctgattgtcgcgcccctccaggccatggtgggcgatatgcacgggctgaacaccttaaagcaccagcccgcgaaaattgccgccattgaagggcactgggaaaatccgccgggcgagcctaccccgctactgctgtttggctggccggatatggaacaggagcgcacccgctttggactggagattcccgcactcggcagccttattctgacgcacagtctggataaacaggtaccggcactcaaagagtttccaaaggaagaccgcccgaattccaccatcgtcttctggtcgttccgcatcatggcgggcctgggcatgctgatgctgctgcttggggtgacggcactctggctgcgctataaaaagcgcatttattcctcccgtcctttcctgtggtttgccctgctgatggggccctccgggctgattgctattctggccgggtggatcaccaccgaagtgggccgccagccgtgggtggtctatgggctccagcgcacgaaggatgcggtttctgcccatggcgatttgcatatgagcgtgagcctgctggccttcttcgtcgtttacacttcggtatttggcgtgggttacagctatatggtgcgcctcatccgaaaaggcccgcagccgcatgaatctttcgccaccgagtccgacggacgtccggcgcgcccgctttctgccgtcacaactgaacataaggagcagccgtaa

SEQ ID NO: 164020 - DNA, 1011 bp, Enterobacter cloacae
atgggtatcgatctttccattatctggtttgtgatcatcgtctttgccacgctgatgtatatcgtgatggacggttttgatctggggattggcattctgttcccggccacgcagaacgccgacgatcgcgatgtgatggttaacagcgtcgcgccggtctgggacgggaatgaaacctggctggtgctgggcggggccgccctgttcggcgcctttccgctggcctacgccgtgattatcgatgccctcaccattccgctcacattaatgctgatcggtcttatttttcgtggcgtagcgtttgagtttcgctttaaagccacgccagcacaccgtcctttctgggataaggcgtttataggcggttccattctggcgacgtttacccagggcgtgacggtgggcgccgtcattaacggctttagcgtcaccggccgggcctataccggcggcccctttgactggtttaccgcgtttaatctgttttgcggcgcgggcctggtggtggcctacgcgctgttaggctcgacctggctggtaatgaaaagcgaaaatgcattgcaacagcggatgcgtcaagtatcgaaaaccctgttaatcgtgctgctggcgtttattgcggcgatcagcctctggacaccgctggcgcagccggccatcgcggcgcgctggtttacgctgccgaacctgttctatctgctgcccgtcccggccatggtggtgatttttagtttgtatcagtggcgctgcctgaataatcccgacagccatagccgaccgtttatcctgacgctggggctgatcttcctcggctttagcgggcttgggatcagcatctggccgcacatcattccaccgtcaatcaccctgtggcaggccgccgcaccgacgcaaagccagggctttatgctggtcggcgcgctgttgatcattcccgttatcctggtctacaccttctggagttactacgtatttcgcggcaaagttcggcatggggagggttatcactga

SEQ ID NO: 164021 - DNA, 129 bp, Enterobacter cloacae
atgcaacaaccggtctggaaaagattactgtggctggccattatctggggcggcagcgtactggcgctggctgcggtcagtatgctcttccgtatgctgatgacggcggcagggtttaaatcacattaa

SEQ ID NO: 164022 - DNA, 438 bp, Enterobacter cloacae
atgaaaaagctcattgcgttaagtgttatcagtcttgtccttaccggctgcgttaatccgggtaaagcctccgttcagccggagcaacttaagaaccaccgctttgtgctggaaagtgtggacggtaaggccgtgaagaccgcgacaacgcaacctgagatcggttttagcgcactgccagatatcagtctggtgaataacatcagcgtttctggccagatgtgtaaccgcttcaacggacaggggaaattgtccgaaggcgagctgaaggtgaaaacgctggccatgacgcgcaagctctgtagtgagccgcagcttaacgagctggatcaggccatcggcgacatgctgcgcaaaggcgcgcaggtcgacctgactgaagaccagttaacgctggcgacagccgataaaacgctgatgtttaagcgtgcagaataa

SEQ ID NO: 164023 - DNA, 267 bp, Enterobacter cloacae
atgcgctcagcatttttggtagggtgtgccgcattattgttgtcggcatgcagcagtgaacctgtccagcaggcaacggccgcgcacgtggtgccgggtatgaaagccgcgatgtccagctccggtcaggccaactgcgcgatgattggcggttcgctgtcggtagctcgccagcttgatggttcagctattgggatgtgcgccttgccaaacggcaaacgctgtagtgaacagtcgcttgccgttggaacctgcggtaactactga

SEQ ID NO: 164024 - DNA, 1161 bp, Enterobacter cloacae
atgcaaagaaaagtactggccctgatgattccggctctgttaatggctggcgcaactcatgcagcagagatttataataaagacggtaacaaattagatctgtacggaaaagtagatggtctgcactatttctccgatgataaaggcgctgacggggatcaaacctacatgcgtctgggcttcaaaggcgaaacccagatcaacgacatgatgactggctacgcacagtgggaatacaacattcaggccaataacaccgaagggtctgataaccagtcctggacgcgtctggccttcgccggtatcaaagtgggtgactacggctccttcgattacggtcgtaactatggcgtactgtacgacgtggaaggctggaccgatatgctgcctgagttcggcggcgactcctacaccaaagccgacaacttcatgaccggccgcgccaatggcgtagcaacctaccgtaacaccgacttctatggtctggtgcagggtctgaactttgcgctgcagtatcagggcaaaaatgaaggcagcaactgtgacgaaaatggttgttctcaggaaggaacgaacaaccgttctgataacaacattcgtaaccaaaacggtgacggtttcggtatctccacaacctatgactttggcatggggattactgcgggtgcagcgtatacctcttcagatcgtactaatgaccaggtgatcgcaggcaccggtgcagcatctcaatatgctggcggcgataaagcggacgcatggaccgcgggtctgaaatatgacgctaacaatatctacctggcggcaatgtactctgaaacccgcaatatgacgccatatggttccagtgacagcacttcaggcggcggtattgccaacaaaacccagaacttcgaagtgaccgcacagtaccagttcgacttcggcctgcgtccgtccctttcctacctgcagtctaaaggcaaggaccttggcaacggccagggcgaccaggatctggttaagtacgctgacgtcggcgcaacctattacttcaacaaaaacatgtccacctacgttgattacaaaatcaacctgctggatgaagatgacagcttctacaaaaacaacggcatcggcacggatgatgtcgtggcactgggcctagtttaccagttctga

SEQ ID NO: 164025 - DNA, 423 bp, Enterobacter cloacae
atggctgatattcgtcatgcgcagtgccattgtggcgcggtggcctttaccgttgcgctaacggatggcctgaataccgcgcggcgctgcagttgttccttttgtcgcatgcggggtgcggtcgtcgtctctgcgccgctgtcagggattaccgtgaccaaaggtgaggataagctcacggagtaccgcttcaatacgggaacagcacgacactttttctgctcggtgtgcggaatttacacgttccatcagcggcgttctaatccaaacgaatacggcgtgaatgtggcctgctttgataacgtctcaccgttcgatttccctgaagtgacggtgatggacggggttaaccatccctcggatggagatagcggggtgtttggctacctctcttttcgcaagaaaggaacaggtcaggcgtaa

SEQ ID NO: 164026 - DNA, 198 bp, Enterobacter cloacae
atgaagaacaaagacgaacaaacaggattagtggggctggcgattggggcggccgttattgggctggtttctgcccagaaaccaatcgatcgcgacagcattgttgatgagctggtcaggctcggcaggcagaaaggcgatggtgtagaagatgaggttttcgtcaaggctgctgacctggtgaggaaggggatctag
